United States Patent Application Publication US 2014/0004565 A1 - sequence listing, part 127

SEQ ID NO: 3185523 - RNA, 19 nt, Artificial Sequence
  Description of Artificial Sequence: Synthetic oligonucleotide
ugcaaauuuggauaaaaua

SEQ ID NO: 3185524 - RNA, 19 nt, Artificial Sequence
  Description of Artificial Sequence: Synthetic oligonucleotide
aacuaaaccagaaucagaa

SEQ ID NO: 3185525 - RNA, 19 nt, Artificial Sequence
  Description of Artificial Sequence: Synthetic oligonucleotide
gaaagugcaaauuuggaua

SEQ ID NO: 3185526 - RNA, 19 nt, Artificial Sequence
  Description of Artificial Sequence: Synthetic oligonucleotide
auaaugcaaccuuuuaaag

SEQ ID NO: 3185527 - RNA, 19 nt, Artificial Sequence
  Description of Artificial Sequence: Synthetic oligonucleotide
auaaaauaaaacauuuaca

SEQ ID NO: 3185528 - RNA, 19 nt, Artificial Sequence
  Description of Artificial Sequence: Synthetic oligonucleotide
auaacauaaauaaugcaca

SEQ ID NO: 3185529 - RNA, 19 nt, Artificial Sequence
  Description of Artificial Sequence: Synthetic oligonucleotide
uucuuuugaaaagacaacu

SEQ ID NO: 3185530 - RNA, 19 nt, Artificial Sequence
  Description of Artificial Sequence: Synthetic oligonucleotide
cauaaauaaugcacaaaac

SEQ ID NO: 3185531 - RNA, 19 nt, Artificial Sequence
  Description of Artificial Sequence: Synthetic oligonucleotide
cuuuugaaaagacaacuuc

SEQ ID NO: 3185532 - RNA, 19 nt, Artificial Sequence
  Description of Artificial Sequence: Synthetic oligonucleotide
uucugaaagugcaaauuug

SEQ ID NO: 3185533 - RNA, 19 nt, Artificial Sequence
  Description of Artificial Sequence: Synthetic oligonucleotide
uaaaguuuucuuucuuuug

SEQ ID NO: 3185534 - RNA, 19 nt, Artificial Sequence
  Description of Artificial Sequence: Synthetic oligonucleotide
ucuuucuuuugaaaagaca

SEQ ID NO: 3185535 - RNA, 19 nt, Artificial Sequence
  Description of Artificial Sequence: Synthetic oligonucleotide
ugaaagugcaaauuuggau

SEQ ID NO: 3185536 - RNA, 19 nt, Artificial Sequence
  Description of Artificial Sequence: Synthetic oligonucleotide
uuucuuuugaaaagacaac

SEQ ID NO: 3185537 - RNA, 19 nt, Artificial Sequence
  Description of Artificial Sequence: Synthetic oligonucleotide
aaaauuuagcccguccucu

SEQ ID NO: 3185538 - RNA, 19 nt, Artificial Sequence
  Description of Artificial Sequence: Synthetic oligonucleotide
caaaacuaaaccagaauca

SEQ ID NO: 3185539 - RNA, 19 nt, Artificial Sequence
  Description of Artificial Sequence: Synthetic oligonucleotide
gaaucagaauaaugcaacc

SEQ ID NO: 3185540 - RNA, 19 nt, Artificial Sequence
  Description of Artificial Sequence: Synthetic oligonucleotide
ugcacaaaacuaaaccaga

SEQ ID NO: 3185541 - RNA, 19 nt, Artificial Sequence
  Description of Artificial Sequence: Synthetic oligonucleotide
aaucagaauaaugcaaccu

SEQ ID NO: 3185542 - RNA, 19 nt, Artificial Sequence
  Description of Artificial Sequence: Synthetic oligonucleotide
aacauuuacaauggaaaau

SEQ ID NO: 3185543 - RNA, 19 nt, Artificial Sequence
  Description of Artificial Sequence: Synthetic oligonucleotide
uuuaaaguuuucuuucuuu

SEQ ID NO: 3185544 - RNA, 19 nt, Artificial Sequence
  Description of Artificial Sequence: Synthetic oligonucleotide
aaauuuggauaaaauaaaa

SEQ ID NO: 3185545 - RNA, 19 nt, Artificial Sequence
  Description of Artificial Sequence: Synthetic oligonucleotide
gaauaaugcaaccuuuuaa

SEQ ID NO: 3185546 - RNA, 19 nt, Artificial Sequence
  Description of Artificial Sequence: Synthetic oligonucleotide
auuuagcccguccucugcc

SEQ ID NO: 3185547 - RNA, 19 nt, Artificial Sequence
  Description of Artificial Sequence: Synthetic oligonucleotide
uugaaaagacaacuucaga

SEQ ID NO: 3185548 - RNA, 19 nt, Artificial Sequence
  Description of Artificial Sequence: Synthetic oligonucleotide
uuaaaguuuucuuucuuuu

SEQ ID NO: 3185549 - RNA, 19 nt, Artificial Sequence
  Description of Artificial Sequence: Synthetic oligonucleotide
gucucugaggcccacagag

SEQ ID NO: 3185550 - RNA, 19 nt, Artificial Sequence
  Description of Artificial Sequence: Synthetic oligonucleotide
guauuugucucugaggccc

SEQ ID NO: 3185551 - RNA, 19 nt, Artificial Sequence
  Description of Artificial Sequence: Synthetic oligonucleotide
gacaacuucagacgcauuc

SEQ ID NO: 3185552 - RNA, 19 nt, Artificial Sequence
  Description of Artificial Sequence: Synthetic oligonucleotide
gauggugagugccagcagc

SEQ ID NO: 3185553 - RNA, 19 nt, Artificial Sequence
  Description of Artificial Sequence: Synthetic oligonucleotide
uuucuuucuuuugaaaaga

SEQ ID NO: 3185554 - RNA, 19 nt, Artificial Sequence
  Description of Artificial Sequence: Synthetic oligonucleotide
aaauuuagcccguccucug

SEQ ID NO: 3185555 - RNA, 19 nt, Artificial Sequence
  Description of Artificial Sequence: Synthetic oligonucleotide
aauaaugcacaaaacuaaa

SEQ ID NO: 3185556 - RNA, 19 nt, Artificial Sequence
  Description of Artificial Sequence: Synthetic oligonucleotide
auaaugcacaaaacuaaac

SEQ ID NO: 3185557 - RNA, 19 nt, Artificial Sequence
  Description of Artificial Sequence: Synthetic oligonucleotide
aaccuuuuaaaguuuucuu

SEQ ID NO: 3185558 - RNA, 19 nt, Artificial Sequence
  Description of Artificial Sequence: Synthetic oligonucleotide
uaacauaaauaaugcacaa

SEQ ID NO: 3185559 - RNA, 19 nt, Artificial Sequence
  Description of Artificial Sequence: Synthetic oligonucleotide
gaaaauuuagcccguccuc

SEQ ID NO: 3185560 - RNA, 19 nt, Artificial Sequence
  Description of Artificial Sequence: Synthetic oligonucleotide
guuuucuuucuuuugaaaa

SEQ ID NO: 3185561 - RNA, 19 nt, Artificial Sequence
  Description of Artificial Sequence: Synthetic oligonucleotide
uguccagugucucuuucag

SEQ ID NO: 3185562 - RNA, 19 nt, Artificial Sequence
  Description of Artificial Sequence: Synthetic oligonucleotide
uggaaaauuuagcccgucc

SEQ ID NO: 3185563 - RNA, 19 nt, Artificial Sequence
  Description of Artificial Sequence: Synthetic oligonucleotide
ucuuuugaaaagacaacuu

SEQ ID NO: 3185564 - RNA, 19 nt, Artificial Sequence
  Description of Artificial Sequence: Synthetic oligonucleotide
cucaguaauaacauaaaua

SEQ ID NO: 3185565 - RNA, 19 nt, Artificial Sequence
  Description of Artificial Sequence: Synthetic oligonucleotide
caaauuuggauaaaauaaa

SEQ ID NO: 3185566 - RNA, 19 nt, Artificial Sequence
  Description of Artificial Sequence: Synthetic oligonucleotide
uucuuucuuuugaaaagac

SEQ ID NO: 3185567 - RNA, 19 nt, Artificial Sequence
  Description of Artificial Sequence: Synthetic oligonucleotide
aucagaauaaugcaaccuu

SEQ ID NO: 3185568 - RNA, 19 nt, Artificial Sequence
  Description of Artificial Sequence: Synthetic oligonucleotide
agauagccgcuuuucaguc

SEQ ID NO: 3185569 - RNA, 19 nt, Artificial Sequence
  Description of Artificial Sequence: Synthetic oligonucleotide
auucugaaagugcaaauuu

SEQ ID NO: 3185570 - RNA, 19 nt, Artificial Sequence
  Description of Artificial Sequence: Synthetic oligonucleotide
agcagcucguauuugucuc

SEQ ID NO: 3185571 - RNA, 19 nt, Artificial Sequence
  Description of Artificial Sequence: Synthetic oligonucleotide
aaacguaucuaucaauucc

SEQ ID NO: 3185572 - RNA, 19 nt, Artificial Sequence
  Description of Artificial Sequence: Synthetic oligonucleotide
aaugccauuggccuugucc

SEQ ID NO: 3185573 - RNA, 19 nt, Artificial Sequence
  Description of Artificial Sequence: Synthetic oligonucleotide
uaugugguaagacaggugg

SEQ ID NO: 3185574 - RNA, 19 nt, Artificial Sequence
  Description of Artificial Sequence: Synthetic oligonucleotide
aagguacuuguucagaugg

SEQ ID NO: 3185575 - RNA, 19 nt, Artificial Sequence
  Description of Artificial Sequence: Synthetic oligonucleotide
cucaacuucuucaugaugg

SEQ ID NO: 3185576 - RNA, 19 nt, Artificial Sequence
  Description of Artificial Sequence: Synthetic oligonucleotide
ucaguaugugguaagacag

SEQ ID NO: 3185577 - RNA, 19 nt, Artificial Sequence
  Description of Artificial Sequence: Synthetic oligonucleotide
aacagaaacguaucuauca

SEQ ID NO: 3185578 - RNA, 19 nt, Artificial Sequence
  Description of Artificial Sequence: Synthetic oligonucleotide
uggcuugugguauagaagg

SEQ ID NO: 3185579 - RNA, 19 nt, Artificial Sequence
  Description of Artificial Sequence: Synthetic oligonucleotide
uauagaagguacuuguuca

SEQ ID NO: 3185580 - RNA, 19 nt, Artificial Sequence
  Description of Artificial Sequence: Synthetic oligonucleotide
aacuucuucaugauggagg

SEQ ID NO: 3185581 - RNA, 19 nt, Artificial Sequence
  Description of Artificial Sequence: Synthetic oligonucleotide
auuccugauugccugaugg

SEQ ID NO: 3185582 - RNA, 19 nt, Artificial Sequence
  Description of Artificial Sequence: Synthetic oligonucleotide
uaucucaacuucuucauga

SEQ ID NO: 3185583 - RNA, 19 nt, Artificial Sequence
  Description of Artificial Sequence: Synthetic oligonucleotide
acuucuucaugauggaggg

SEQ ID NO: 3185584 - RNA, 19 nt, Artificial Sequence
  Description of Artificial Sequence: Synthetic oligonucleotide
augguucuuggguacagcc

SEQ ID NO: 3185585 - RNA, 19 nt, Artificial Sequence
  Description of Artificial Sequence: Synthetic oligonucleotide
ugugcucuccaacagaaac

SEQ ID NO: 3185586 - RNA, 19 nt, Artificial Sequence
  Description of Artificial Sequence: Synthetic oligonucleotide
uucuucaugauggagggcc

SEQ ID NO: 3185587 - RNA, 19 nt, Artificial Sequence
  Description of Artificial Sequence: Synthetic oligonucleotide
uaccauagccugaugacag

SEQ ID NO: 3185588 - RNA, 19 nt, Artificial Sequence
  Description of Artificial Sequence: Synthetic oligonucleotide
auacucuggggacagcacc

SEQ ID NO: 3185589 - RNA, 19 nt, Artificial Sequence
  Description of Artificial Sequence: Synthetic oligonucleotide
acauaucucaacuucuuca

SEQ ID NO: 3185590 - RNA, 19 nt, Artificial Sequence
  Description of Artificial Sequence: Synthetic oligonucleotide
guucagauggcucucauca

SEQ ID NO: 3185591 - RNA, 19 nt, Artificial Sequence
  Description of Artificial Sequence: Synthetic oligonucleotide
uaagacaggugguacuggg

SEQ ID NO: 3185592 - RNA, 19 nt, Artificial Sequence
  Description of Artificial Sequence: Synthetic oligonucleotide
aucaauuccugauugccug

SEQ ID NO: 3185593 - RNA, 19 nt, Artificial Sequence
  Description of Artificial Sequence: Synthetic oligonucleotide
ugguauagaagguacuugu

SEQ ID NO: 3185594 - RNA, 19 nt, Artificial Sequence
  Description of Artificial Sequence: Synthetic oligonucleotide
aucuaucaauuccugauug

SEQ ID NO: 3185595 - RNA, 19 nt, Artificial Sequence
  Description of Artificial Sequence: Synthetic oligonucleotide
ucuggucccacacauacuc

SEQ ID NO: 3185596 - RNA, 19 nt, Artificial Sequence
  Description of Artificial Sequence: Synthetic oligonucleotide
cuugugguauagaagguac

SEQ ID NO: 3185597 - RNA, 19 nt, Artificial Sequence
  Description of Artificial Sequence: Synthetic oligonucleotide
aguccaagggcucaguaug

SEQ ID NO: 3185598 - RNA, 19 nt, Artificial Sequence
  Description of Artificial Sequence: Synthetic oligonucleotide
agccacauaucucaacuuc

SEQ ID NO: 3185599 - RNA, 19 nt, Artificial Sequence
  Description of Artificial Sequence: Synthetic oligonucleotide
ucagauggcucucaucaug

SEQ ID NO: 3185600 - RNA, 19 nt, Artificial Sequence
  Description of Artificial Sequence: Synthetic oligonucleotide
cucaucaugccacacggcc

SEQ ID NO: 3185601 - RNA, 19 nt, Artificial Sequence
  Description of Artificial Sequence: Synthetic oligonucleotide
uuggcuugugguauagaag

SEQ ID NO: 3185602 - RNA, 19 nt, Artificial Sequence
  Description of Artificial Sequence: Synthetic oligonucleotide
cucucaucaugccacacgg

SEQ ID NO: 3185603 - RNA, 19 nt, Artificial Sequence
  Description of Artificial Sequence: Synthetic oligonucleotide
agacaggugguacuggguc

SEQ ID NO: 3185604 - RNA, 19 nt, Artificial Sequence
  Description of Artificial Sequence: Synthetic oligonucleotide
ucuaccauagccugaugac

SEQ ID NO: 3185605 - RNA, 19 nt, Artificial Sequence
  Description of Artificial Sequence: Synthetic oligonucleotide
ucuaucaauuccugauugc

SEQ ID NO: 3185606 - RNA, 19 nt, Artificial Sequence
  Description of Artificial Sequence: Synthetic oligonucleotide
cuaucaauuccugauugcc

SEQ ID NO: 3185607 - RNA, 19 nt, Artificial Sequence
  Description of Artificial Sequence: Synthetic oligonucleotide
cuuguccucuaccauagcc

SEQ ID NO: 3185608 - RNA, 19 nt, Artificial Sequence
  Description of Artificial Sequence: Synthetic oligonucleotide
uaucaauuccugauugccu

SEQ ID NO: 3185609 - RNA, 19 nt, Artificial Sequence
  Description of Artificial Sequence: Synthetic oligonucleotide
aacguaucuaucaauuccu

SEQ ID NO: 3185610 - RNA, 19 nt, Artificial Sequence
  Description of Artificial Sequence: Synthetic oligonucleotide
acagccacauaucucaacu

SEQ ID NO: 3185611 - RNA, 19 nt, Artificial Sequence
  Description of Artificial Sequence: Synthetic oligonucleotide
auagaagguacuuguucag

SEQ ID NO: 3185612 - RNA, 19 nt, Artificial Sequence
  Description of Artificial Sequence: Synthetic oligonucleotide
gugguugccaguccaaggg

SEQ ID NO: 3185613 - RNA, 19 nt, Artificial Sequence
  Description of Artificial Sequence: Synthetic oligonucleotide
ucugaggugggccugugcu

SEQ ID NO: 3185614 - RNA, 19 nt, Artificial Sequence
  Description of Artificial Sequence: Synthetic oligonucleotide
gaugacaggccuuggugag

SEQ ID NO: 3185615 - RNA, 19 nt, Artificial Sequence
  Description of Artificial Sequence: Synthetic oligonucleotide
ugaugacaggccuugguga

SEQ ID NO: 3185616 - RNA, 19 nt, Artificial Sequence
  Description of Artificial Sequence: Synthetic oligonucleotide
auuggccuuguccucuacc

SEQ ID NO: 3185617 - RNA, 19 nt, Artificial Sequence
  Description of Artificial Sequence: Synthetic oligonucleotide
ugcaccuccaccacugacc

SEQ ID NO: 3185618 - RNA, 19 nt, Artificial Sequence
  Description of Artificial Sequence: Synthetic oligonucleotide
uacuuguucagauggcucu

SEQ ID NO: 3185619 - RNA, 19 nt, Artificial Sequence
  Description of Artificial Sequence: Synthetic oligonucleotide
guauagaagguacuuguuc

SEQ ID NO: 3185620 - RNA, 19 nt, Artificial Sequence
  Description of Artificial Sequence: Synthetic oligonucleotide
gaaacguaucuaucaauuc

SEQ ID NO: 3185621 - RNA, 19 nt, Artificial Sequence
  Description of Artificial Sequence: Synthetic oligonucleotide
uuguccucuaccauagccu

SEQ ID NO: 3185622 - RNA, 19 nt, Artificial Sequence
  Description of Artificial Sequence: Synthetic oligonucleotide
cuucuggucccacacauac

SEQ ID NO: 3185623 - RNA, 19 nt, Artificial Sequence
  Description of Artificial Sequence: Synthetic oligonucleotide
gguacagccacauaucuca

SEQ ID NO: 3185624 - RNA, 19 nt, Artificial Sequence
  Description of Artificial Sequence: Synthetic oligonucleotide
gaagguacuuguucagaug

SEQ ID NO: 3185625 - RNA, 19 nt, Artificial Sequence
  Description of Artificial Sequence: Synthetic oligonucleotide
auugccugaugguucuugg

SEQ ID NO: 3185626 - RNA, 19 nt, Artificial Sequence
  Description of Artificial Sequence: Synthetic oligonucleotide
uguccucuaccauagccug

SEQ ID NO: 3185627 - RNA, 19 nt, Artificial Sequence
  Description of Artificial Sequence: Synthetic oligonucleotide
ucugcuggcaucugaggug

SEQ ID NO: 3185628 - RNA, 19 nt, Artificial Sequence
  Description of Artificial Sequence: Synthetic oligonucleotide
ucucaacuucuucaugaug

SEQ ID NO: 3185629 - RNA, 19 nt, Artificial Sequence
  Description of Artificial Sequence: Synthetic oligonucleotide
ugccacacggccucaaugc

SEQ ID NO: 3185630 - RNA, 19 nt, Artificial Sequence
  Description of Artificial Sequence: Synthetic oligonucleotide
augccauuggccuuguccu

SEQ ID NO: 3185631 - RNA, 19 nt, Artificial Sequence
  Description of Artificial Sequence: Synthetic oligonucleotide
auggcucucaucaugccac

SEQ ID NO: 3185632 - RNA, 19 nt, Artificial Sequence
  Description of Artificial Sequence: Synthetic oligonucleotide
cagauggcucucaucaugc

SEQ ID NO: 3185633 - RNA, 19 nt, Artificial Sequence
  Description of Artificial Sequence: Synthetic oligonucleotide
uaucuaucaauuccugauu

SEQ ID NO: 3185634 - RNA, 19 nt, Artificial Sequence
  Description of Artificial Sequence: Synthetic oligonucleotide
ucuccaacagaaacguauc

SEQ ID NO: 3185635 - RNA, 19 nt, Artificial Sequence
  Description of Artificial Sequence: Synthetic oligonucleotide
accuuuguuggcuuguggu

SEQ ID NO: 3185636 - RNA, 19 nt, Artificial Sequence
  Description of Artificial Sequence: Synthetic oligonucleotide
agaagguacuuguucagau

SEQ ID NO: 3185637 - RNA, 19 nt, Artificial Sequence
  Description of Artificial Sequence: Synthetic oligonucleotide
auagccugaugacaggccu

SEQ ID NO: 3185638 - RNA, 19 nt, Artificial Sequence
  Description of Artificial Sequence: Synthetic oligonucleotide
ugccugaugguucuugggu

SEQ ID NO: 3185639 - RNA, 19 nt, Artificial Sequence
  Description of Artificial Sequence: Synthetic oligonucleotide
cuuggugagacggugcacc

SEQ ID NO: 3185640 - RNA, 19 nt, Artificial Sequence
  Description of Artificial Sequence: Synthetic oligonucleotide
uggguacagccacauaucu

SEQ ID NO: 3185641 - RNA, 19 nt, Artificial Sequence
  Description of Artificial Sequence: Synthetic oligonucleotide
uuggccuuguccucuacca

SEQ ID NO: 3185642 - RNA, 19 nt, Artificial Sequence
  Description of Artificial Sequence: Synthetic oligonucleotide
gggacagcaccuuuguugg

SEQ ID NO: 3185643 - RNA, 19 nt, Artificial Sequence
  Description of Artificial Sequence: Synthetic oligonucleotide
gugguacugggucugcugg

SEQ ID NO: 3185644 - RNA, 19 nt, Artificial Sequence
  Description of Artificial Sequence: Synthetic oligonucleotide
acagaaacguaucuaucaa

SEQ ID NO: 3185645 - RNA, 19 nt, Artificial Sequence
  Description of Artificial Sequence: Synthetic oligonucleotide
cucaguaugugguaagaca

SEQ ID NO: 3185646 - RNA, 19 nt, Artificial Sequence
  Description of Artificial Sequence: Synthetic oligonucleotide
ucuggggacagcaccuuug

SEQ ID NO: 3185647 - RNA, 19 nt, Artificial Sequence
  Description of Artificial Sequence: Synthetic oligonucleotide
ucaacuucuucaugaugga

SEQ ID NO: 3185648 - RNA, 19 nt, Artificial Sequence
  Description of Artificial Sequence: Synthetic oligonucleotide
aauuccugauugccugaug

SEQ ID NO: 3185649 - RNA, 19 nt, Artificial Sequence
  Description of Artificial Sequence: Synthetic oligonucleotide
caguaugugguaagacagg

SEQ ID NO: 3185650 - RNA, 19 nt, Artificial Sequence
  Description of Artificial Sequence: Synthetic oligonucleotide
aguaugugguaagacaggu

SEQ ID NO: 3185651 - RNA, 19 nt, Artificial Sequence
  Description of Artificial Sequence: Synthetic oligonucleotide
agauggcucucaucaugcc

SEQ ID NO: 3185652 - RNA, 19 nt, Artificial Sequence
  Description of Artificial Sequence: Synthetic oligonucleotide
ucaucaugccacacggccu

SEQ ID NO: 3185653 - RNA, 19 nt, Artificial Sequence
  Description of Artificial Sequence: Synthetic oligonucleotide
auaucucaacuucuucaug

SEQ ID NO: 3185654 - RNA, 19 nt, Artificial Sequence
  Description of Artificial Sequence: Synthetic oligonucleotide
cugaugacaggccuuggug

SEQ ID NO: 3185655 - RNA, 19 nt, Artificial Sequence
  Description of Artificial Sequence: Synthetic oligonucleotide
augauggagggccagccca

SEQ ID NO: 3185656 - RNA, 19 nt, Artificial Sequence
  Description of Artificial Sequence: Synthetic oligonucleotide
ucccacacauacucugggg

SEQ ID NO: 3185657 - RNA, 19 nt, Artificial Sequence
  Description of Artificial Sequence: Synthetic oligonucleotide
acaggccuuggugagacgg

SEQ ID NO: 3185658 - RNA, 19 nt, Artificial Sequence
  Description of Artificial Sequence: Synthetic oligonucleotide
ugcucuccaacagaaacgu

SEQ ID NO: 3185659 - RNA, 19 nt, Artificial Sequence
  Description of Artificial Sequence: Synthetic oligonucleotide
agaaacguaucuaucaauu

SEQ ID NO: 3185660 - RNA, 19 nt, Artificial Sequence
  Description of Artificial Sequence: Synthetic oligonucleotide
guaucuaucaauuccugau

SEQ ID NO: 3185661 - RNA, 19 nt, Artificial Sequence
  Description of Artificial Sequence: Synthetic oligonucleotide
cauagccugaugacaggcc

SEQ ID NO: 3185662 - RNA, 19 nt, Artificial Sequence
  Description of Artificial Sequence: Synthetic oligonucleotide
uuggguacagccacauauc

SEQ ID NO: 3185663 - RNA, 19 nt, Artificial Sequence
  Description of Artificial Sequence: Synthetic oligonucleotide
ggggacagcaccuuuguug

SEQ ID NO: 3185664 - RNA, 19 nt, Artificial Sequence
  Description of Artificial Sequence: Synthetic oligonucleotide
ugguucuuggguacagcca

SEQ ID NO: 3185665 - RNA, 19 nt, Artificial Sequence
  Description of Artificial Sequence: Synthetic oligonucleotide
uugccugaugguucuuggg

SEQ ID NO: 3185666 - RNA, 19 nt, Artificial Sequence
  Description of Artificial Sequence: Synthetic oligonucleotide
uggucccacacauacucug

SEQ ID NO: 3185667 - RNA, 19 nt, Artificial Sequence
  Description of Artificial Sequence: Synthetic oligonucleotide
uugugguauagaagguacu

SEQ ID NO: 3185668 - RNA, 19 nt, Artificial Sequence
  Description of Artificial Sequence: Synthetic oligonucleotide
uacucuggggacagcaccu

SEQ ID NO: 3185669 - RNA, 19 nt, Artificial Sequence
  Description of Artificial Sequence: Synthetic oligonucleotide
gauggcucucaucaugcca

SEQ ID NO: 3185670 - RNA, 19 nt, Artificial Sequence
  Description of Artificial Sequence: Synthetic oligonucleotide
ucaauuccugauugccuga

SEQ ID NO: 3185671 - RNA, 19 nt, Artificial Sequence
  Description of Artificial Sequence: Synthetic oligonucleotide
aaauuuauaaaacaaugcc

SEQ ID NO: 3185672 - RNA, 19 nt, Artificial Sequence
  Description of Artificial Sequence: Synthetic oligonucleotide
auuaauuuaaaauaucccc

SEQ ID NO: 3185673 - RNA, 19 nt, Artificial Sequence
  Description of Artificial Sequence: Synthetic oligonucleotide
uagaacauaauaauugacg

SEQ ID NO: 3185674 - RNA, 19 nt, Artificial Sequence
  Description of Artificial Sequence: Synthetic oligonucleotide
auuuaaaauauccccaugg

SEQ ID NO: 3185675 - RNA, 19 nt, Artificial Sequence
  Description of Artificial Sequence: Synthetic oligonucleotide
auaauugacguguaauucc

SEQ ID NO: 3185676 - RNA, 19 nt, Artificial Sequence
  Description of Artificial Sequence: Synthetic oligonucleotide
cuuaauuuguagcagaugc

SEQ ID NO: 3185677 - RNA, 19 nt, Artificial Sequence
  Description of Artificial Sequence: Synthetic oligonucleotide
aaaguguuaaaaucagcac

SEQ ID NO: 3185678 - RNA, 19 nt, Artificial Sequence
  Description of Artificial Sequence: Synthetic oligonucleotide
uucuagaacauaauaauug

SEQ ID NO: 3185679 - RNA, 19 nt, Artificial Sequence
  Description of Artificial Sequence: Synthetic oligonucleotide
cagauuuucgacuauaugc

SEQ ID NO: 3185680 - RNA, 19 nt, Artificial Sequence
  Description of Artificial Sequence: Synthetic oligonucleotide
uguauugacaucauuguca

SEQ ID NO: 3185681 - RNA, 19 nt, Artificial Sequence
  Description of Artificial Sequence: Synthetic oligonucleotide
uaaucugugaaauugacuc

SEQ ID NO: 3185682 - RNA, 19 nt, Artificial Sequence
  Description of Artificial Sequence: Synthetic oligonucleotide
aauaauugacguguaauuc

SEQ ID NO: 3185683 - RNA, 19 nt, Artificial Sequence
  Description of Artificial Sequence: Synthetic oligonucleotide
gagauuaaaauuuauaaaa

SEQ ID NO: 3185684 - RNA, 19 nt, Artificial Sequence
  Description of Artificial Sequence: Synthetic oligonucleotide
aauaccgaagacaacauuc

SEQ ID NO: 3185685 - RNA, 19 nt, Artificial Sequence
  Description of Artificial Sequence: Synthetic oligonucleotide
aaccgcaugauuaaaaugg

SEQ ID NO: 3185686 - RNA, 19 nt, Artificial Sequence
  Description of Artificial Sequence: Synthetic oligonucleotide
agcagaugcauauucaaac

SEQ ID NO: 3185687 - RNA, 19 nt, Artificial Sequence
  Description of Artificial Sequence: Synthetic oligonucleotide
uuuuaugguaauuuuauau

SEQ ID NO: 3185688 - RNA, 19 nt, Artificial Sequence
  Description of Artificial Sequence: Synthetic oligonucleotide
aaacuaaucugugaaauug

SEQ ID NO: 3185689 - RNA, 19 nt, Artificial Sequence
  Description of Artificial Sequence: Synthetic oligonucleotide
aauauuuuccaacuuuuau

SEQ ID NO: 3185690 - RNA, 19 nt, Artificial Sequence
  Description of Artificial Sequence: Synthetic oligonucleotide
auaauugcuuaccuauugc

SEQ ID NO: 3185691 - RNA, 19 nt, Artificial Sequence
  Description of Artificial Sequence: Synthetic oligonucleotide
ucugacauaagucuuugca

SEQ ID NO: 3185692 - RNA, 19 nt, Artificial Sequence
  Description of Artificial Sequence: Synthetic oligonucleotide
uuaaaauauccccauggug

SEQ ID NO: 3185693 - RNA, 19 nt, Artificial Sequence
  Description of Artificial Sequence: Synthetic oligonucleotide
ugucaguuaaucuucagga

SEQ ID NO: 3185694 - RNA, 19 nt, Artificial Sequence
  Description of Artificial Sequence: Synthetic oligonucleotide
aaaagccagccaaagagcc

SEQ ID NO: 3185695 - RNA, 19 nt, Artificial Sequence
  Description of Artificial Sequence: Synthetic oligonucleotide
auauuuuccaacuuuuaug

SEQ ID NO: 3185696 - RNA, 19 nt, Artificial Sequence
  Description of Artificial Sequence: Synthetic oligonucleotide
guaauuuuauauauaauug

SEQ ID NO: 3185697 - RNA, 19 nt, Artificial Sequence
  Description of Artificial Sequence: Synthetic oligonucleotide
aacaauuuaucucucacuu

SEQ ID NO: 3185698 - RNA, 19 nt, Artificial Sequence
  Description of Artificial Sequence: Synthetic oligonucleotide
guuaaaaucagcacaauac

SEQ ID NO: 3185699 - RNA, 19 nt, Artificial Sequence
  Description of Artificial Sequence: Synthetic oligonucleotide
uuuauugguuaacauagcu

SEQ ID NO: 3185700 - RNA, 19 nt, Artificial Sequence
  Description of Artificial Sequence: Synthetic oligonucleotide
ugaauguuauaucuuuucc

SEQ ID NO: 3185701 - RNA, 19 nt, Artificial Sequence
  Description of Artificial Sequence: Synthetic oligonucleotide
uuauaaaacaaugccaucu

SEQ ID NO: 3185702 - RNA, 19 nt, Artificial Sequence
  Description of Artificial Sequence: Synthetic oligonucleotide
uuguauuuaauccagugua

SEQ ID NO: 3185703 - RNA, 19 nt, Artificial Sequence
  Description of Artificial Sequence: Synthetic oligonucleotide
auuuaucucucacuucugc

SEQ ID NO: 3185704 - RNA, 19 nt, Artificial Sequence
  Description of Artificial Sequence: Synthetic oligonucleotide
gagagauuaaaauuuauaa

SEQ ID NO: 3185705 - RNA, 19 nt, Artificial Sequence
  Description of Artificial Sequence: Synthetic oligonucleotide
agaggggaggauuagcugc

SEQ ID NO: 3185706 - RNA, 19 nt, Artificial Sequence
  Description of Artificial Sequence: Synthetic oligonucleotide
uugucaguuaaucuucagg

SEQ ID NO: 3185707 - RNA, 19 nt, Artificial Sequence
  Description of Artificial Sequence: Synthetic oligonucleotide
ucuagaacauaauaauuga

SEQ ID NO: 3185708 - RNA, 19 nt, Artificial Sequence
  Description of Artificial Sequence: Synthetic oligonucleotide
uugaaaguguuaaaaucag

SEQ ID NO: 3185709 - RNA, 19 nt, Artificial Sequence
  Description of Artificial Sequence: Synthetic oligonucleotide
uuuauauauaauugcuuac

SEQ ID NO: 3185710 - RNA, 19 nt, Artificial Sequence
  Description of Artificial Sequence: Synthetic oligonucleotide
ugucucuuaguaaagcuug

SEQ ID NO: 3185711 - RNA, 19 nt, Artificial Sequence
  Description of Artificial Sequence: Synthetic oligonucleotide
uuuaaaauauccccauggu

SEQ ID NO: 3185712 - RNA, 19 nt, Artificial Sequence
  Description of Artificial Sequence: Synthetic oligonucleotide
guuaacauagcuuguauca

SEQ ID NO: 3185713 - RNA, 19 nt, Artificial Sequence
  Description of Artificial Sequence: Synthetic oligonucleotide
aucaaggaagccauaaugc

SEQ ID NO: 3185714 - RNA, 19 nt, Artificial Sequence
  Description of Artificial Sequence: Synthetic oligonucleotide
aauuuaaaauauccccaug

SEQ ID NO: 3185715 - RNA, 19 nt, Artificial Sequence
  Description of Artificial Sequence: Synthetic oligonucleotide
gaagacaacauucucaaaa

SEQ ID NO: 3185716 - RNA, 19 nt, Artificial Sequence
  Description of Artificial Sequence: Synthetic oligonucleotide
gaaaguguuaaaaucagca

SEQ ID NO: 3185717 - RNA, 19 nt, Artificial Sequence
  Description of Artificial Sequence: Synthetic oligonucleotide
auugcuuaccuauugcaag

SEQ ID NO: 3185718 - RNA, 19 nt, Artificial Sequence
  Description of Artificial Sequence: Synthetic oligonucleotide
uuuaugguaauuuuauaua

SEQ ID NO: 3185719 - RNA, 19 nt, Artificial Sequence
  Description of Artificial Sequence: Synthetic oligonucleotide
agaaguguucuuuucugac

SEQ ID NO: 3185720 - RNA, 19 nt, Artificial Sequence
  Description of Artificial Sequence: Synthetic oligonucleotide
ugaugcuugccauuguagg

SEQ ID NO: 3185721 - RNA, 19 nt, Artificial Sequence
  Description of Artificial Sequence: Synthetic oligonucleotide
uuaugguaauuuuauauau

SEQ ID NO: 3185722 - RNA, 19 nt, Artificial Sequence
  Description of Artificial Sequence: Synthetic oligonucleotide
agagauuaaaauuuauaaa

SEQ ID NO: 3185723 - RNA, 19 nt, Artificial Sequence
  Description of Artificial Sequence: Synthetic oligonucleotide
aaagaggguuacucuuugc

SEQ ID NO: 3185724 - RNA, 19 nt, Artificial Sequence
  Description of Artificial Sequence: Synthetic oligonucleotide
auugacucaucuguuaugg

SEQ ID NO: 3185725 - RNA, 19 nt, Artificial Sequence
  Description of Artificial Sequence: Synthetic oligonucleotide
auugacguguaauuccaac

SEQ ID NO: 3185726 - RNA, 19 nt, Artificial Sequence
  Description of Artificial Sequence: Synthetic oligonucleotide
aacaauuuauugguuaaca

SEQ ID NO: 3185727 - RNA, 19 nt, Artificial Sequence
  Description of Artificial Sequence: Synthetic oligonucleotide
augguaauuuuauauauaa

SEQ ID NO: 3185728 - RNA, 19 nt, Artificial Sequence
  Description of Artificial Sequence: Synthetic oligonucleotide
uccaagaugcuuaauuugu

SEQ ID NO: 3185729 - RNA, 19 nt, Artificial Sequence
  Description of Artificial Sequence: Synthetic oligonucleotide
ugacauaagucuuugcacu

SEQ ID NO: 3185730 - RNA, 19 nt, Artificial Sequence
  Description of Artificial Sequence: Synthetic oligonucleotide
gauuagcugcauuggaagg

SEQ ID NO: 3185731 - RNA, 19 nt, Artificial Sequence
  Description of Artificial Sequence: Synthetic oligonucleotide
uuuguucucacaacacacc

SEQ ID NO: 3185732 - RNA, 19 nt, Artificial Sequence
  Description of Artificial Sequence: Synthetic oligonucleotide
ucuuaguaaagcuugugau

SEQ ID NO: 3185733 - RNA, 19 nt, Artificial Sequence
  Description of Artificial Sequence: Synthetic oligonucleotide
uuuuguucgagcccucaag

SEQ ID NO: 3185734 - RNA, 19 nt, Artificial Sequence
  Description of Artificial Sequence: Synthetic oligonucleotide
gaacauaauaauugacgug

SEQ ID NO: 3185735 - RNA, 19 nt, Artificial Sequence
  Description of Artificial Sequence: Synthetic oligonucleotide
uaauugacguguaauucca

SEQ ID NO: 3185736 - RNA, 19 nt, Artificial Sequence
  Description of Artificial Sequence: Synthetic oligonucleotide
agaugcuuaauuuguagca

SEQ ID NO: 3185737 - RNA, 19 nt, Artificial Sequence
  Description of Artificial Sequence: Synthetic oligonucleotide
aagaggguuacucuuugca

SEQ ID NO: 3185738 - RNA, 19 nt, Artificial Sequence
  Description of Artificial Sequence: Synthetic oligonucleotide
auuggaaggaucuuccaca

SEQ ID NO: 3185739 - RNA, 19 nt, Artificial Sequence
  Description of Artificial Sequence: Synthetic oligonucleotide
aagugucucuuaguaaagc

SEQ ID NO: 3185740 - RNA, 19 nt, Artificial Sequence
  Description of Artificial Sequence: Synthetic oligonucleotide
uuaauuuguagcagaugca

SEQ ID NO: 3185741 - RNA, 19 nt, Artificial Sequence
  Description of Artificial Sequence: Synthetic oligonucleotide
guauugacaucauugucag

SEQ ID NO: 3185742 - RNA, 19 nt, Artificial Sequence
  Description of Artificial Sequence: Synthetic oligonucleotide
gaagccauaaugcacaugu

SEQ ID NO: 3185743 - RNA, 19 nt, Artificial Sequence
  Description of Artificial Sequence: Synthetic oligonucleotide
uugaauucugauaauuaau

SEQ ID NO: 3185744 - RNA, 19 nt, Artificial Sequence
  Description of Artificial Sequence: Synthetic oligonucleotide
uuguuggaaggccagaagu

SEQ ID NO: 3185745 - RNA, 19 nt, Artificial Sequence
  Description of Artificial Sequence: Synthetic oligonucleotide
gacuauaugcagaauaaac

SEQ ID NO: 3185746 - RNA, 19 nt, Artificial Sequence
  Description of Artificial Sequence: Synthetic oligonucleotide
auuuguagcagaugcauau

SEQ ID NO: 3185747 - RNA, 19 nt, Artificial Sequence
  Description of Artificial Sequence: Synthetic oligonucleotide
uucgacuauaugcagaaua

SEQ ID NO: 3185748 - RNA, 19 nt, Artificial Sequence
  Description of Artificial Sequence: Synthetic oligonucleotide
uguuaaaaucagcacaaua

SEQ ID NO: 3185749 - RNA, 19 nt, Artificial Sequence
  Description of Artificial Sequence: Synthetic oligonucleotide
ugaaaguguuaaaaucagc

SEQ ID NO: 3185750 - RNA, 19 nt, Artificial Sequence
  Description of Artificial Sequence: Synthetic oligonucleotide
aacuccaagaugcuuaauu

SEQ ID NO: 3185751 - RNA, 19 nt, Artificial Sequence
  Description of Artificial Sequence: Synthetic oligonucleotide
acuauaugcagaauaaacu

SEQ ID NO: 3185752 - RNA, 19 nt, Artificial Sequence
  Description of Artificial Sequence: Synthetic oligonucleotide
aguaaacucucccaugaug

SEQ ID NO: 3185753 - RNA, 19 nt, Artificial Sequence
  Description of Artificial Sequence: Synthetic oligonucleotide
aauuggcauuuucaaagca

SEQ ID NO: 3185754 - RNA, 19 nt, Artificial Sequence
  Description of Artificial Sequence: Synthetic oligonucleotide
ugcauuggaaggaucuucc

SEQ ID NO: 3185755 - RNA, 19 nt, Artificial Sequence
  Description of Artificial Sequence: Synthetic oligonucleotide
gacaacauucucaaaauga

SEQ ID NO: 3185756 - RNA, 19 nt, Artificial Sequence
  Description of Artificial Sequence: Synthetic oligonucleotide
aggcuuggcauucuugagc

SEQ ID NO: 3185757 - RNA, 19 nt, Artificial Sequence
  Description of Artificial Sequence: Synthetic oligonucleotide
uugcaagcaaacuaaucug

SEQ ID NO: 3185758 - RNA, 19 nt, Artificial Sequence
  Description of Artificial Sequence: Synthetic oligonucleotide
gaugcuugccauuguaggc

SEQ ID NO: 3185759 - RNA, 19 nt, Artificial Sequence
  Description of Artificial Sequence: Synthetic oligonucleotide
cuagaacauaauaauugac

SEQ ID NO: 3185760 - RNA, 19 nt, Artificial Sequence
  Description of Artificial Sequence: Synthetic oligonucleotide
uguucgagcccucaagucu

SEQ ID NO: 3185761 - RNA, 19 nt, Artificial Sequence
  Description of Artificial Sequence: Synthetic oligonucleotide
acaauuuaucucucacuuc

SEQ ID NO: 3185762 - RNA, 19 nt, Artificial Sequence
  Description of Artificial Sequence: Synthetic oligonucleotide
ugacucaucuguuauggcu

SEQ ID NO: 3185763 - RNA, 19 nt, Artificial Sequence
  Description of Artificial Sequence: Synthetic oligonucleotide
ucgacuauaugcagaauaa

SEQ ID NO: 3185764 - RNA, 19 nt, Artificial Sequence
  Description of Artificial Sequence: Synthetic oligonucleotide
uaagucuuugcacuacaga

SEQ ID NO: 3185765 - RNA, 19 nt, Artificial Sequence
  Description of Artificial Sequence: Synthetic oligonucleotide
ugcacuacagaugauuggc

SEQ ID NO: 3185766 - RNA, 19 nt, Artificial Sequence
  Description of Artificial Sequence: Synthetic oligonucleotide
uuuguucgagcccucaagu

SEQ ID NO: 3185767 - RNA, 19 nt, Artificial Sequence
  Description of Artificial Sequence: Synthetic oligonucleotide
uuacuuuaaugaauguuau

SEQ ID NO: 3185768 - RNA, 19 nt, Artificial Sequence
  Description of Artificial Sequence: Synthetic oligonucleotide
ugcaagcaaacuaaucugu

SEQ ID NO: 3185769 - RNA, 19 nt, Artificial Sequence
  Description of Artificial Sequence: Synthetic oligonucleotide
uauucaaacaccgggcaug

SEQ ID NO: 3185770 - RNA, 19 nt, Artificial Sequence
  Description of Artificial Sequence: Synthetic oligonucleotide
aauccaguguaugagcucu

SEQ ID NO: 3185771 - RNA, 19 nt, Artificial Sequence
  Description of Artificial Sequence: Synthetic oligonucleotide
aaacccagaauuucaaagc

SEQ ID NO: 3185772 - RNA, 19 nt, Artificial Sequence
  Description of Artificial Sequence: Synthetic oligonucleotide
agaauuucaaagcaggcac

SEQ ID NO: 3185773 - RNA, 19 nt, Artificial Sequence
  Description of Artificial Sequence: Synthetic oligonucleotide
aaaacccagaauuucaaag

SEQ ID NO: 3185774 - RNA, 19 nt, Artificial Sequence
  Description of Artificial Sequence: Synthetic oligonucleotide
auugaugaggaccagcgcg

SEQ ID NO: 3185775 - RNA, 19 nt, Artificial Sequence
  Description of Artificial Sequence: Synthetic oligonucleotide
uuucgguccaacaagaugu

SEQ ID NO: 3185776 - RNA, 19 nt, Artificial Sequence
  Description of Artificial Sequence: Synthetic oligonucleotide
agaaugguuaaccuccagc

SEQ ID NO: 3185777 - RNA, 19 nt, Artificial Sequence
  Description of Artificial Sequence: Synthetic oligonucleotide
ucuuuauccaacuuggagu

SEQ ID NO: 3185778 - RNA, 19 nt, Artificial Sequence
  Description of Artificial Sequence: Synthetic oligonucleotide
uggagaaugguuaaccucc

SEQ ID NO: 3185779 - RNA, 19 nt, Artificial Sequence
  Description of Artificial Sequence: Synthetic oligonucleotide
augguuaaccuccagcagc

SEQ ID NO: 3185780 - RNA, 19 nt, Artificial Sequence
  Description of Artificial Sequence: Synthetic oligonucleotide
augaugacauccucgaugg

SEQ ID NO: 3185781 - RNA, 19 nt, Artificial Sequence
  Description of Artificial Sequence: Synthetic oligonucleotide
gaugaugacauccucgaug

SEQ ID NO: 3185782 - RNA, 19 nt, Artificial Sequence
  Description of Artificial Sequence: Synthetic oligonucleotide
ucuguuuucuguaaccgca

SEQ ID NO: 3185783 - RNA, 19 nt, Artificial Sequence
  Description of Artificial Sequence: Synthetic oligonucleotide
cuugaugaugacauccucg

SEQ ID NO: 3185784 - RNA, 19 nt, Artificial Sequence
  Description of Artificial Sequence: Synthetic oligonucleotide
ucuguaaccgcacugccug

SEQ ID NO: 3185785 - RNA, 19 nt, Artificial Sequence
  Description of Artificial Sequence: Synthetic oligonucleotide
acaucauagccaucgggcc

SEQ ID NO: 3185786 - RNA, 19 nt, Artificial Sequence
  Description of Artificial Sequence: Synthetic oligonucleotide
caacaagaugucaaaaccc

SEQ ID NO: 3185787 - RNA, 19 nt, Artificial Sequence
  Description of Artificial Sequence: Synthetic oligonucleotide
aaugguuaaccuccagcag

SEQ ID NO: 3185788 - RNA, 19 nt, Artificial Sequence
  Description of Artificial Sequence: Synthetic oligonucleotide
uuaaccuccagcagccagg

SEQ ID NO: 3185789 - RNA, 19 nt, Artificial Sequence
  Description of Artificial Sequence: Synthetic oligonucleotide
ugguaguugugcuugauga

SEQ ID NO: 3185790 - RNA, 19 nt, Artificial Sequence
  Description of Artificial Sequence: Synthetic oligonucleotide
gagaugagugucuugauga

SEQ ID NO: 3185791 - RNA, 19 nt, Artificial Sequence
  Description of Artificial Sequence: Synthetic oligonucleotide
gaaugguuaaccuccagca

SEQ ID NO: 3185792 - RNA, 19 nt, Artificial Sequence
  Description of Artificial Sequence: Synthetic oligonucleotide
aaccgcacugccuggaaac

SEQ ID NO: 3185793 - RNA, 19 nt, Artificial Sequence
  Description of Artificial Sequence: Synthetic oligonucleotide
cacaucauagccaucgggc

SEQ ID NO: 3185794 - RNA, 19 nt, Artificial Sequence
  Description of Artificial Sequence: Synthetic oligonucleotide
ugcuugaugacuuggguga

SEQ ID NO: 3185795 - RNA, 19 nt, Artificial Sequence
  Description of Artificial Sequence: Synthetic oligonucleotide
acugccuccacaucauagc

SEQ ID NO: 3185796 - RNA, 19 nt, Artificial Sequence
  Description of Artificial Sequence: Synthetic oligonucleotide
aacccagaauuucaaagca

SEQ ID NO: 3185797 - RNA, 19 nt, Artificial Sequence
  Description of Artificial Sequence: Synthetic oligonucleotide
accucuuccauccucaucu

SEQ ID NO: 3185798 - RNA, 19 nt, Artificial Sequence
  Description of Artificial Sequence: Synthetic oligonucleotide
uuuucgguccaacaagaug

SEQ ID NO: 3185799 - RNA, 19 nt, Artificial Sequence
  Description of Artificial Sequence: Synthetic oligonucleotide
ucuuccauccucaucuccc

SEQ ID NO: 3185800 - RNA, 19 nt, Artificial Sequence
  Description of Artificial Sequence: Synthetic oligonucleotide
gaugucaaaacccagaauu

SEQ ID NO: 3185801 - RNA, 19 nt, Artificial Sequence
  Description of Artificial Sequence: Synthetic oligonucleotide
ugucuugaugaugacaucc

SEQ ID NO: 3185802 - RNA, 19 nt, Artificial Sequence
  Description of Artificial Sequence: Synthetic oligonucleotide
cuuuauccaacuuggaguc

SEQ ID NO: 3185803 - RNA, 19 nt, Artificial Sequence
  Description of Artificial Sequence: Synthetic oligonucleotide
aagaugucaaaacccagaa

SEQ ID NO: 3185804 - RNA, 19 nt, Artificial Sequence
  Description of Artificial Sequence: Synthetic oligonucleotide
ugaguuuucgguccaacaa

SEQ ID NO: 3185805 - RNA, 19 nt, Artificial Sequence
  Description of Artificial Sequence: Synthetic oligonucleotide
uccaacaagaugucaaaac

SEQ ID NO: 3185806 - RNA, 19 nt, Artificial Sequence
  Description of Artificial Sequence: Synthetic oligonucleotide
uugaugaugacauccucga

SEQ ID NO: 3185807 - RNA, 19 nt, Artificial Sequence
  Description of Artificial Sequence: Synthetic oligonucleotide
ugagaugagugucuugaug

SEQ ID NO: 3185808 - RNA, 19 nt, Artificial Sequence
  Description of Artificial Sequence: Synthetic oligonucleotide
aaacccuugaccucuucca

SEQ ID NO: 3185809 - RNA, 19 nt, Artificial Sequence
  Description of Artificial Sequence: Synthetic oligonucleotide
aauuucaaagcaggcacug

SEQ ID NO: 3185810 - RNA, 19 nt, Artificial Sequence
  Description of Artificial Sequence: Synthetic oligonucleotide
gaugacauccucgauggcc

SEQ ID NO: 3185811 - RNA, 19 nt, Artificial Sequence
  Description of Artificial Sequence: Synthetic oligonucleotide
gaguuuucgguccaacaag

SEQ ID NO: 3185812 - RNA, 19 nt, Artificial Sequence
  Description of Artificial Sequence: Synthetic oligonucleotide
uuuucuguaaccgcacugc

SEQ ID NO: 3185813 - RNA, 19 nt, Artificial Sequence
  Description of Artificial Sequence: Synthetic oligonucleotide
aacaagaugucaaaaccca

SEQ ID NO: 3185814 - RNA, 19 nt, Artificial Sequence
  Description of Artificial Sequence: Synthetic oligonucleotide
uuuccucucauauuccucu

SEQ ID NO: 3185815 - RNA, 19 nt, Artificial Sequence
  Description of Artificial Sequence: Synthetic oligonucleotide
ucaguggagaagcuuggag

SEQ ID NO: 3185816 - RNA, 19 nt, Artificial Sequence
  Description of Artificial Sequence: Synthetic oligonucleotide
uccaacuuggagucagugg

SEQ ID NO: 3185817 - RNA, 19 nt, Artificial Sequence
  Description of Artificial Sequence: Synthetic oligonucleotide
agauugaugaggaccagcg

SEQ ID NO: 3185818 - RNA, 19 nt, Artificial Sequence
  Description of Artificial Sequence: Synthetic oligonucleotide
ucauagagcaggcuguccu

SEQ ID NO: 3185819 - RNA, 19 nt, Artificial Sequence
  Description of Artificial Sequence: Synthetic oligonucleotide
ucucauauuccucuguuuu

SEQ ID NO: 3185820 - RNA, 19 nt, Artificial Sequence
  Description of Artificial Sequence: Synthetic oligonucleotide
cucuuuauccaacuuggag

SEQ ID NO: 3185821 - RNA, 19 nt, Artificial Sequence
  Description of Artificial Sequence: Synthetic oligonucleotide
aggguuugaguuuucgguc

SEQ ID NO: 3185822 - RNA, 19 nt, Artificial Sequence
  Description of Artificial Sequence: Synthetic oligonucleotide
uccucaucucccgagaagg

SEQ ID NO: 3185823 - RNA, 19 nt, Artificial Sequence
  Description of Artificial Sequence: Synthetic oligonucleotide
agaaggacacugcugcagg

SEQ ID NO: 3185824 - RNA, 19 nt, Artificial Sequence
  Description of Artificial Sequence: Synthetic oligonucleotide
uucaaagcaggcacuguug

SEQ ID NO: 3185825 - RNA, 19 nt, Artificial Sequence
  Description of Artificial Sequence: Synthetic oligonucleotide
ucaaagcaggcacuguuga

SEQ ID NO: 3185826 - RNA, 19 nt, Artificial Sequence
  Description of Artificial Sequence: Synthetic oligonucleotide
aaagcaggcacuguugagu

SEQ ID NO: 3185827 - RNA, 19 nt, Artificial Sequence
  Description of Artificial Sequence: Synthetic oligonucleotide
ugguuaaccuccagcagcc

SEQ ID NO: 3185828 - RNA, 19 nt, Artificial Sequence
  Description of Artificial Sequence: Synthetic oligonucleotide
uugugcuugaugacuuggg

SEQ ID NO: 3185829 - RNA, 19 nt, Artificial Sequence
  Description of Artificial Sequence: Synthetic oligonucleotide
ucaaaacccagaauuucaa

SEQ ID NO: 3185830 - RNA, 19 nt, Artificial Sequence
  Description of Artificial Sequence: Synthetic oligonucleotide
uuauccaacuuggagucag

SEQ ID NO: 3185831 - RNA, 19 nt, Artificial Sequence
  Description of Artificial Sequence: Synthetic oligonucleotide
ucaucucccgagaaggaca

SEQ ID NO: 3185832 - RNA, 19 nt, Artificial Sequence
  Description of Artificial Sequence: Synthetic oligonucleotide
aagcaggcacuguugagug

SEQ ID NO: 3185833 - RNA, 19 nt, Artificial Sequence
  Description of Artificial Sequence: Synthetic oligonucleotide
ucgauggccuuccauaacu

SEQ ID NO: 3185834 - RNA, 19 nt, Artificial Sequence
  Description of Artificial Sequence: Synthetic oligonucleotide
accucuuuauccaacuugg

SEQ ID NO: 3185835 - RNA, 19 nt, Artificial Sequence
  Description of Artificial Sequence: Synthetic oligonucleotide
cuccacaucauagccaucg

SEQ ID NO: 3185836 - RNA, 19 nt, Artificial Sequence
  Description of Artificial Sequence: Synthetic oligonucleotide
uuggagucaguggagaagc

SEQ ID NO: 3185837 - RNA, 19 nt, Artificial Sequence
  Description of Artificial Sequence: Synthetic oligonucleotide
gaaacccuugaccucuucc

SEQ ID NO: 3185838 - RNA, 19 nt, Artificial Sequence
  Description of Artificial Sequence: Synthetic oligonucleotide
gaugacuugggugagcuga

SEQ ID NO: 3185839 - RNA, 19 nt, Artificial Sequence
  Description of Artificial Sequence: Synthetic oligonucleotide
uuucaaagcaggcacuguu

SEQ ID NO: 3185840 - RNA, 19 nt, Artificial Sequence
  Description of Artificial Sequence: Synthetic oligonucleotide
uuucuguaaccgcacugcc

SEQ ID NO: 3185841 - RNA, 19 nt, Artificial Sequence
  Description of Artificial Sequence: Synthetic oligonucleotide
uugaguguguggcugggga

SEQ ID NO: 3185842 - RNA, 19 nt, Artificial Sequence
  Description of Artificial Sequence: Synthetic oligonucleotide
ucauauuccucuguuuucu

SEQ ID NO: 3185843 - RNA, 19 nt, Artificial Sequence
  Description of Artificial Sequence: Synthetic oligonucleotide
uuccauaacugccuccaca

SEQ ID NO: 3185844 - RNA, 19 nt, Artificial Sequence
  Description of Artificial Sequence: Synthetic oligonucleotide
cauaacugccuccacauca

SEQ ID NO: 3185845 - RNA, 19 nt, Artificial Sequence
  Description of Artificial Sequence: Synthetic oligonucleotide
accagcgcgucauagagca

SEQ ID NO: 3185846 - RNA, 19 nt, Artificial Sequence
  Description of Artificial Sequence: Synthetic oligonucleotide
uggagaagcuuggagaaug

SEQ ID NO: 3185847 - RNA, 19 nt, Artificial Sequence
  Description of Artificial Sequence: Synthetic oligonucleotide
agugucuugaugaugacau

SEQ ID NO: 3185848 - RNA, 19 nt, Artificial Sequence
  Description of Artificial Sequence: Synthetic oligonucleotide
aguggagaagcuuggagaa

SEQ ID NO: 3185849 - RNA, 19 nt, Artificial Sequence
  Description of Artificial Sequence: Synthetic oligonucleotide
ugugcuugaugacuugggu

SEQ ID NO: 3185850 - RNA, 19 nt, Artificial Sequence
  Description of Artificial Sequence: Synthetic oligonucleotide
auggccuuccauaacugcc

SEQ ID NO: 3185851 - RNA, 19 nt, Artificial Sequence
  Description of Artificial Sequence: Synthetic oligonucleotide
ccaacaagaugucaaaacc

SEQ ID NO: 3185852 - RNA, 19 nt, Artificial Sequence
  Description of Artificial Sequence: Synthetic oligonucleotide
ugagcugagaugagugucu

SEQ ID NO: 3185853 - RNA, 19 nt, Artificial Sequence
  Description of Artificial Sequence: Synthetic oligonucleotide
ugccuggaaacccuugacc

SEQ ID NO: 3185854 - RNA, 19 nt, Artificial Sequence
  Description of Artificial Sequence: Synthetic oligonucleotide
uccucuguuuucuguaacc

SEQ ID NO: 3185855 - RNA, 19 nt, Artificial Sequence
  Description of Artificial Sequence: Synthetic oligonucleotide
uccauaacugccuccacau

SEQ ID NO: 3185856 - RNA, 19 nt, Artificial Sequence
  Description of Artificial Sequence: Synthetic oligonucleotide
aagcaggugugguaguugu

SEQ ID NO: 3185857 - RNA, 19 nt, Artificial Sequence
  Description of Artificial Sequence: Synthetic oligonucleotide
aggacacugcugcaggaac

SEQ ID NO: 3185858 - RNA, 19 nt, Artificial Sequence
  Description of Artificial Sequence: Synthetic oligonucleotide
uuggagaaugguuaaccuc

SEQ ID NO: 3185859 - RNA, 19 nt, Artificial Sequence
  Description of Artificial Sequence: Synthetic oligonucleotide
uugaccucuuccauccuca

SEQ ID NO: 3185860 - RNA, 19 nt, Artificial Sequence
  Description of Artificial Sequence: Synthetic oligonucleotide
uccuucaccucuuuaucca

SEQ ID NO: 3185861 - RNA, 19 nt, Artificial Sequence
  Description of Artificial Sequence: Synthetic oligonucleotide
uugaguuuucgguccaaca

SEQ ID NO: 3185862 - RNA, 19 nt, Artificial Sequence
  Description of Artificial Sequence: Synthetic oligonucleotide
uugaugaggaccagcgcgu

SEQ ID NO: 3185863 - RNA, 19 nt, Artificial Sequence
  Description of Artificial Sequence: Synthetic oligonucleotide
gagucaguggagaagcuug

SEQ ID NO: 3185864 - RNA, 19 nt, Artificial Sequence
  Description of Artificial Sequence: Synthetic oligonucleotide
augagugucuugaugauga

SEQ ID NO: 3185865 - RNA, 19 nt, Artificial Sequence
  Description of Artificial Sequence: Synthetic oligonucleotide
guuuucuguaaccgcacug

SEQ ID NO: 3185866 - RNA, 19 nt, Artificial Sequence
  Description of Artificial Sequence: Synthetic oligonucleotide
gaagcuuggagaaugguua

SEQ ID NO: 3185867 - RNA, 19 nt, Artificial Sequence
  Description of Artificial Sequence: Synthetic oligonucleotide
guuaaccuccagcagccag

SEQ ID NO: 3185868 - RNA, 19 nt, Artificial Sequence
  Description of Artificial Sequence: Synthetic oligonucleotide
gauggccuuccauaacugc

SEQ ID NO: 3185869 - RNA, 19 nt, Artificial Sequence
  Description of Artificial Sequence: Synthetic oligonucleotide
gauugaugaggaccagcgc

SEQ ID NO: 3185870 - RNA, 19 nt, Artificial Sequence
  Description of Artificial Sequence: Synthetic oligonucleotide
cucuguuuucuguaaccgc

SEQ ID NO: 3185871 - RNA, 19 nt, Artificial Sequence
  Description of Artificial Sequence: Synthetic oligonucleotide
cucaguagaaccaagaagg

SEQ ID NO: 3185872 - RNA, 19 nt, Artificial Sequence
  Description of Artificial Sequence: Synthetic oligonucleotide
uacagcauaaucuugacag

SEQ ID NO: 3185873 - RNA, 19 nt, Artificial Sequence
  Description of Artificial Sequence: Synthetic oligonucleotide
aucauauccaauuggaugg

SEQ ID NO: 3185874 - RNA, 19 nt, Artificial Sequence
  Description of Artificial Sequence: Synthetic oligonucleotide
agagauuugccuucaaagc

SEQ ID NO: 3185875 - RNA, 19 nt, Artificial Sequence
  Description of Artificial Sequence: Synthetic oligonucleotide
aauuugccaguucaaacac

SEQ ID NO: 3185876 - RNA, 19 nt, Artificial Sequence
  Description of Artificial Sequence: Synthetic oligonucleotide
ugucugguaacccuaaagg

SEQ ID NO: 3185877 - RNA, 19 nt, Artificial Sequence
  Description of Artificial Sequence: Synthetic oligonucleotide
acuuggaaaguccuaaagc

SEQ ID NO: 3185878 - RNA, 19 nt, Artificial Sequence
  Description of Artificial Sequence: Synthetic oligonucleotide
cuuggaaaguccuaaagcc

SEQ ID NO: 3185879 - RNA, 19 nt, Artificial Sequence
  Description of Artificial Sequence: Synthetic oligonucleotide
uuuaaagaagucuucaauc

SEQ ID NO: 3185880 - RNA, 19 nt, Artificial Sequence
  Description of Artificial Sequence: Synthetic oligonucleotide
aaacaaucuuuccagaaca

SEQ ID NO: 3185881 - RNA, 19 nt, Artificial Sequence
  Description of Artificial Sequence: Synthetic oligonucleotide
augauugagauguaguuag

SEQ ID NO: 3185882 - RNA, 19 nt, Artificial Sequence
  Description of Artificial Sequence: Synthetic oligonucleotide
aacaauuaaucuucauguc

SEQ ID NO: 3185883 - RNA, 19 nt, Artificial Sequence
  Description of Artificial Sequence: Synthetic oligonucleotide
auaguuaacauacaauaga

SEQ ID NO: 3185884 - RNA, 19 nt, Artificial Sequence
  Description of Artificial Sequence: Synthetic oligonucleotide
aguaaggugauauuuaaau

SEQ ID NO: 3185885 - RNA, 19 nt, Artificial Sequence
  Description of Artificial Sequence: Synthetic oligonucleotide
guaauuuccuucuauggag

SEQ ID NO: 3185886 - RNA, 19 nt, Artificial Sequence
  Description of Artificial Sequence: Synthetic oligonucleotide
aaaaucauugccagauccc

SEQ ID NO: 3185887 - RNA, 19 nt, Artificial Sequence
  Description of Artificial Sequence: Synthetic oligonucleotide
caauagcacaucauaaugg

SEQ ID NO: 3185888 - RNA, 19 nt, Artificial Sequence
  Description of Artificial Sequence: Synthetic oligonucleotide
uuuauuuuccucugaacac

SEQ ID NO: 3185889 - RNA, 19 nt, Artificial Sequence
  Description of Artificial Sequence: Synthetic oligonucleotide
ucuggauaggacuucaccc

SEQ ID NO: 3185890 - RNA, 19 nt, Artificial Sequence
  Description of Artificial Sequence: Synthetic oligonucleotide
aauuaaucuucaugucccg

SEQ ID NO: 3185891 - RNA, 19 nt, Artificial Sequence
  Description of Artificial Sequence: Synthetic oligonucleotide
uguugaaaaucucauuucu

SEQ ID NO: 3185892 - RNA, 19 nt, Artificial Sequence
  Description of Artificial Sequence: Synthetic oligonucleotide
gagauuugccuucaaagcc

SEQ ID NO: 3185893 - RNA, 19 nt, Artificial Sequence
  Description of Artificial Sequence: Synthetic oligonucleotide
uaauuuccuucuauggagg

SEQ ID NO: 3185894 - RNA, 19 nt, Artificial Sequence
  Description of Artificial Sequence: Synthetic oligonucleotide
uucaaagccuucaucgggg

SEQ ID NO: 3185895 - RNA, 19 nt, Artificial Sequence
  Description of Artificial Sequence: Synthetic oligonucleotide
auagauaauaugccuguag

SEQ ID NO: 3185896 - RNA, 19 nt, Artificial Sequence
  Description of Artificial Sequence: Synthetic oligonucleotide
acaauagcacaucauaaug

SEQ ID NO: 3185897 - RNA, 19 nt, Artificial Sequence
  Description of Artificial Sequence: Synthetic oligonucleotide
gauaccauguauuucuuca

SEQ ID NO: 3185898 - RNA, 19 nt, Artificial Sequence
  Description of Artificial Sequence: Synthetic oligonucleotide
cacauuguaaggcacauug

SEQ ID NO: 3185899 - RNA, 19 nt, Artificial Sequence
  Description of Artificial Sequence: Synthetic oligonucleotide
caucauauccaauuggaug

SEQ ID NO: 3185900 - RNA, 19 nt, Artificial Sequence
  Description of Artificial Sequence: Synthetic oligonucleotide
uaaacaaucuuuccagaac

SEQ ID NO: 3185901 - RNA, 19 nt, Artificial Sequence
  Description of Artificial Sequence: Synthetic oligonucleotide
gaacaacauagucagcagg

SEQ ID NO: 3185902 - RNA, 19 nt, Artificial Sequence
  Description of Artificial Sequence: Synthetic oligonucleotide
ucauauguaaucucuguaa

SEQ ID NO: 3185903 - RNA, 19 nt, Artificial Sequence
  Description of Artificial Sequence: Synthetic oligonucleotide
guugaauucauauguaauc

SEQ ID NO: 3185904 - RNA, 19 nt, Artificial Sequence
  Description of Artificial Sequence: Synthetic oligonucleotide
uuuaaauguuggaucauaa

SEQ ID NO: 3185905 - RNA, 19 nt, Artificial Sequence
  Description of Artificial Sequence: Synthetic oligonucleotide
uagacacugugauagagug

SEQ ID NO: 3185906 - RNA, 19 nt, Artificial Sequence
  Description of Artificial Sequence: Synthetic oligonucleotide
gugcaaucaacucuuagag

SEQ ID NO: 3185907 - RNA, 19 nt, Artificial Sequence
  Description of Artificial Sequence: Synthetic oligonucleotide
uagguuguacacuaggcug

SEQ ID NO: 3185908 - RNA, 19 nt, Artificial Sequence
  Description of Artificial Sequence: Synthetic oligonucleotide
acagugaaucaaaugauac

SEQ ID NO: 3185909 - RNA, 19 nt, Artificial Sequence
  Description of Artificial Sequence: Synthetic oligonucleotide
uaucuggcgauaaacaauc

SEQ ID NO: 3185910 - RNA, 19 nt, Artificial Sequence
  Description of Artificial Sequence: Synthetic oligonucleotide
ugaauccagaccaaauucu

SEQ ID NO: 3185911 - RNA, 19 nt, Artificial Sequence
  Description of Artificial Sequence: Synthetic oligonucleotide
aauuggauggaccggaaua

SEQ ID NO: 3185912 - RNA, 19 nt, Artificial Sequence
  Description of Artificial Sequence: Synthetic oligonucleotide
uugaauucauauguaaucu

SEQ ID NO: 3185913 - RNA, 19 nt, Artificial Sequence
  Description of Artificial Sequence: Synthetic oligonucleotide
aaaucccugggaaugacuc

SEQ ID NO: 3185914 - RNA, 19 nt, Artificial Sequence
  Description of Artificial Sequence: Synthetic oligonucleotide
uacuuggaaaguccuaaag

SEQ ID NO: 3185915 - RNA, 19 nt, Artificial Sequence
  Description of Artificial Sequence: Synthetic oligonucleotide
uaaugggacaacucaacug

SEQ ID NO: 3185916 - RNA, 19 nt, Artificial Sequence
  Description of Artificial Sequence: Synthetic oligonucleotide
gaaugcacguuccagguac

SEQ ID NO: 3185917 - RNA, 19 nt, Artificial Sequence
  Description of Artificial Sequence: Synthetic oligonucleotide
ugugauagaguggauagcu

SEQ ID NO: 3185918 - RNA, 19 nt, Artificial Sequence
  Description of Artificial Sequence: Synthetic oligonucleotide
auauucauuggcuggauaa

SEQ ID NO: 3185919 - RNA, 19 nt, Artificial Sequence
  Description of Artificial Sequence: Synthetic oligonucleotide
cuuagaaggguccacuuug

SEQ ID NO: 3185920 - RNA, 19 nt, Artificial Sequence
  Description of Artificial Sequence: Synthetic oligonucleotide
agcgacaccacguucauga

SEQ ID NO: 3185921 - RNA, 19 nt, Artificial Sequence
  Description of Artificial Sequence: Synthetic oligonucleotide
gaccggaauacuuggaaag

SEQ ID NO: 3185922 - RNA, 19 nt, Artificial Sequence
  Description of Artificial Sequence: Synthetic oligonucleotide
ugcuggaccacccauggug

SEQ ID NO: 3185923 - RNA, 19 nt, Artificial Sequence
  Description of Artificial Sequence: Synthetic oligonucleotide
ucuuucguuagguuguaca

SEQ ID NO: 3185924 - RNA, 19 nt, Artificial Sequence
  Description of Artificial Sequence: Synthetic oligonucleotide
uguaugguuuauugaaaug

SEQ ID NO: 3185925 - RNA, 19 nt, Artificial Sequence
  Description of Artificial Sequence: Synthetic oligonucleotide
aguggugugcaaucaacuc

SEQ ID NO: 3185926 - RNA, 19 nt, Artificial Sequence
  Description of Artificial Sequence: Synthetic oligonucleotide
cuauaagcauauucauugg

SEQ ID NO: 3185927 - RNA, 19 nt, Artificial Sequence
  Description of Artificial Sequence: Synthetic oligonucleotide
uggugaaggacucuuuucu

SEQ ID NO: 3185928 - RNA, 19 nt, Artificial Sequence
  Description of Artificial Sequence: Synthetic oligonucleotide
ugacguguugaaaaucuca

SEQ ID NO: 3185929 - RNA, 19 nt, Artificial Sequence
  Description of Artificial Sequence: Synthetic oligonucleotide
ucaaccaacucauauguuu

SEQ ID NO: 3185930 - RNA, 19 nt, Artificial Sequence
  Description of Artificial Sequence: Synthetic oligonucleotide
uacugcagaaaacagugaa

SEQ ID NO: 3185931 - RNA, 19 nt, Artificial Sequence
  Description of Artificial Sequence: Synthetic oligonucleotide
augagucuuauuuggguag

SEQ ID NO: 3185932 - RNA, 19 nt, Artificial Sequence
  Description of Artificial Sequence: Synthetic oligonucleotide
cucucaaagucucugcugc

SEQ ID NO: 3185933 - RNA, 19 nt, Artificial Sequence
  Description of Artificial Sequence: Synthetic oligonucleotide
agaagucuucaauccgugc

SEQ ID NO: 3185934 - RNA, 19 nt, Artificial Sequence
  Description of Artificial Sequence: Synthetic oligonucleotide
cuucaaagccuucaucggg

SEQ ID NO: 3185935 - RNA, 19 nt, Artificial Sequence
  Description of Artificial Sequence: Synthetic oligonucleotide
uuguacacuaggcugugca

SEQ ID NO: 3185936 - RNA, 19 nt, Artificial Sequence
  Description of Artificial Sequence: Synthetic oligonucleotide
aauccgugcauaguuaaca

SEQ ID NO: 3185937 - RNA, 19 nt, Artificial Sequence
  Description of Artificial Sequence: Synthetic oligonucleotide
uuuaagacauucccacgcu

SEQ ID NO: 3185938 - RNA, 19 nt, Artificial Sequence
  Description of Artificial Sequence: Synthetic oligonucleotide
gauaauaugccuguagaaa

SEQ ID NO: 3185939 - RNA, 19 nt, Artificial Sequence
  Description of Artificial Sequence: Synthetic oligonucleotide
uuggaaaguccuaaagccu

SEQ ID NO: 3185940 - RNA, 19 nt, Artificial Sequence
  Description of Artificial Sequence: Synthetic oligonucleotide
auuaaucuucaugucccgc

SEQ ID NO: 3185941 - RNA, 19 nt, Artificial Sequence
  Description of Artificial Sequence: Synthetic oligonucleotide
aaaucauugccagauccca

SEQ ID NO: 3185942 - RNA, 19 nt, Artificial Sequence
  Description of Artificial Sequence: Synthetic oligonucleotide
aaggccaaauucuucugca

SEQ ID NO: 3185943 - RNA, 19 nt, Artificial Sequence
  Description of Artificial Sequence: Synthetic oligonucleotide
uggaaaguccuaaagccuc

SEQ ID NO: 3185944 - RNA, 19 nt, Artificial Sequence
  Description of Artificial Sequence: Synthetic oligonucleotide
ucaguagaaccaagaaggc

SEQ ID NO: 3185945 - RNA, 19 nt, Artificial Sequence
  Description of Artificial Sequence: Synthetic oligonucleotide
cagugaaucaaaugauacc

SEQ ID NO: 3185946 - RNA, 19 nt, Artificial Sequence
  Description of Artificial Sequence: Synthetic oligonucleotide
uguuguggcugcuuggagc

SEQ ID NO: 3185947 - RNA, 19 nt, Artificial Sequence
  Description of Artificial Sequence: Synthetic oligonucleotide
cuggauaggacuucacccc

SEQ ID NO: 3185948 - RNA, 19 nt, Artificial Sequence
  Description of Artificial Sequence: Synthetic oligonucleotide
cauaaugggacaacucaac

SEQ ID NO: 3185949 - RNA, 19 nt, Artificial Sequence
  Description of Artificial Sequence: Synthetic oligonucleotide
aaugauugagauguaguua

SEQ ID NO: 3185950 - RNA, 19 nt, Artificial Sequence
  Description of Artificial Sequence: Synthetic oligonucleotide
gacacugugauagagugga

SEQ ID NO: 3185951 - RNA, 19 nt, Artificial Sequence
  Description of Artificial Sequence: Synthetic oligonucleotide
aggaguuucuugcaucauc

SEQ ID NO: 3185952 - RNA, 19 nt, Artificial Sequence
  Description of Artificial Sequence: Synthetic oligonucleotide
aguccuaaagccucuguca

SEQ ID NO: 3185953 - RNA, 19 nt, Artificial Sequence
  Description of Artificial Sequence: Synthetic oligonucleotide
auaaugggacaacucaacu

SEQ ID NO: 3185954 - RNA, 19 nt, Artificial Sequence
  Description of Artificial Sequence: Synthetic oligonucleotide
uguguaugguuuauugaaa

SEQ ID NO: 3185955 - RNA, 19 nt, Artificial Sequence
  Description of Artificial Sequence: Synthetic oligonucleotide
auugaggccucccucagcu

SEQ ID NO: 3185956 - RNA, 19 nt, Artificial Sequence
  Description of Artificial Sequence: Synthetic oligonucleotide
ucaaagucucugcugcagc

SEQ ID NO: 3185957 - RNA, 19 nt, Artificial Sequence
  Description of Artificial Sequence: Synthetic oligonucleotide
gagcucuuucguuagguug

SEQ ID NO: 3185958 - RNA, 19 nt, Artificial Sequence
  Description of Artificial Sequence: Synthetic oligonucleotide
uaugguuuauugaaauguu

SEQ ID NO: 3185959 - RNA, 19 nt, Artificial Sequence
  Description of Artificial Sequence: Synthetic oligonucleotide
uggcaguucagauaaugac

SEQ ID NO: 3185960 - RNA, 19 nt, Artificial Sequence
  Description of Artificial Sequence: Synthetic oligonucleotide
guauaucuugcucugccug

SEQ ID NO: 3185961 - RNA, 19 nt, Artificial Sequence
  Description of Artificial Sequence: Synthetic oligonucleotide
agauaauaugccuguagaa

SEQ ID NO: 3185962 - RNA, 19 nt, Artificial Sequence
  Description of Artificial Sequence: Synthetic oligonucleotide
aguucagauaaugacgugu

SEQ ID NO: 3185963 - RNA, 19 nt, Artificial Sequence
  Description of Artificial Sequence: Synthetic oligonucleotide
cugguaacccuaaaggauc

SEQ ID NO: 3185964 - RNA, 19 nt, Artificial Sequence
  Description of Artificial Sequence: Synthetic oligonucleotide
aaggaucaaugaaugcacg

SEQ ID NO: 3185965 - RNA, 19 nt, Artificial Sequence
  Description of Artificial Sequence: Synthetic oligonucleotide
ugaguggaucaccugcacc

SEQ ID NO: 3185966 - RNA, 19 nt, Artificial Sequence
  Description of Artificial Sequence: Synthetic oligonucleotide
augaaugcacguuccaggu

SEQ ID NO: 3185967 - RNA, 19 nt, Artificial Sequence
  Description of Artificial Sequence: Synthetic oligonucleotide
ucuugacaguuaaagggaa

SEQ ID NO: 3185968 - RNA, 19 nt, Artificial Sequence
  Description of Artificial Sequence: Synthetic oligonucleotide
uucagauaaugacguguug

SEQ ID NO: 3185969 - RNA, 19 nt, Artificial Sequence
  Description of Artificial Sequence: Synthetic oligonucleotide
guuagguuguacacuaggc

SEQ ID NO: 3185970 - RNA, 19 nt, Artificial Sequence
  Description of Artificial Sequence: Synthetic oligonucleotide
aaagguggcacuacaucug

SEQ ID NO: 3185971 - RNA, 19 nt, Artificial Sequence
  Description of Artificial Sequence: Synthetic oligonucleotide
aagaaauuacaacacaccc

SEQ ID NO: 3185972 - RNA, 19 nt, Artificial Sequence
  Description of Artificial Sequence: Synthetic oligonucleotide
aagacaaagaaauuacaac

SEQ ID NO: 3185973 - RNA, 19 nt, Artificial Sequence
  Description of Artificial Sequence: Synthetic oligonucleotide
ucauaaaagacaaagaaau

SEQ ID NO: 3185974 - RNA, 19 nt, Artificial Sequence
  Description of Artificial Sequence: Synthetic oligonucleotide
uuuuaaucuacuuuuagca

SEQ ID NO: 3185975 - RNA, 19 nt, Artificial Sequence
  Description of Artificial Sequence: Synthetic oligonucleotide
aauaaaacccuagcaaucc

SEQ ID NO: 3185976 - RNA, 19 nt, Artificial Sequence
  Description of Artificial Sequence: Synthetic oligonucleotide
acaaauugaauuuuaaucu

SEQ ID NO: 3185977 - RNA, 19 nt, Artificial Sequence
  Description of Artificial Sequence: Synthetic oligonucleotide
uuuacaaauugauaaauca

SEQ ID NO: 3185978 - RNA, 19 nt, Artificial Sequence
  Description of Artificial Sequence: Synthetic oligonucleotide
aguaguucaaugcacacac

SEQ ID NO: 3185979 - RNA, 19 nt, Artificial Sequence
  Description of Artificial Sequence: Synthetic oligonucleotide
aaagaaauuacaacacacc

SEQ ID NO: 3185980 - RNA, 19 nt, Artificial Sequence
  Description of Artificial Sequence: Synthetic oligonucleotide
auugauaaaucauaguuug

SEQ ID NO: 3185981 - RNA, 19 nt, Artificial Sequence
  Description of Artificial Sequence: Synthetic oligonucleotide
aaaauaaaacccuagcaau

SEQ ID NO: 3185982 - RNA, 19 nt, Artificial Sequence
  Description of Artificial Sequence: Synthetic oligonucleotide
agauguuagacauuaaaag

SEQ ID NO: 3185983 - RNA, 19 nt, Artificial Sequence
  Description of Artificial Sequence: Synthetic oligonucleotide
uaagcuaauuaucauauac

SEQ ID NO: 3185984 - RNA, 19 nt, Artificial Sequence
  Description of Artificial Sequence: Synthetic oligonucleotide
guagguucuagucacaugg

SEQ ID NO: 3185985 - RNA, 19 nt, Artificial Sequence
  Description of Artificial Sequence: Synthetic oligonucleotide
acaauuauuggucauauaa

SEQ ID NO: 3185986 - RNA, 19 nt, Artificial Sequence
  Description of Artificial Sequence: Synthetic oligonucleotide
auaacaaccagagacaaag

SEQ ID NO: 3185987 - RNA, 19 nt, Artificial Sequence
  Description of Artificial Sequence: Synthetic oligonucleotide
cacaaauugaauuuuaauc

SEQ ID NO: 3185988 - RNA, 19 nt, Artificial Sequence
  Description of Artificial Sequence: Synthetic oligonucleotide
ucaacuguagacuuuauuc

SEQ ID NO: 3185989 - RNA, 19 nt, Artificial Sequence
  Description of Artificial Sequence: Synthetic oligonucleotide
aaucauauuacuaugcaga

SEQ ID NO: 3185990 - RNA, 19 nt, Artificial Sequence
  Description of Artificial Sequence: Synthetic oligonucleotide
uaguuuguaagauaaaagu

SEQ ID NO: 3185991 - RNA, 19 nt, Artificial Sequence
  Description of Artificial Sequence: Synthetic oligonucleotide
uuccagaccacaaagaaac

SEQ ID NO: 3185992 - RNA, 19 nt, Artificial Sequence
  Description of Artificial Sequence: Synthetic oligonucleotide
ucaacaucguaacagaggu

SEQ ID NO: 3185993 - RNA, 19 nt, Artificial Sequence
  Description of Artificial Sequence: Synthetic oligonucleotide
acucaugauucucagacac

SEQ ID NO: 3185994 - RNA, 19 nt, Artificial Sequence
  Description of Artificial Sequence: Synthetic oligonucleotide
uaccaaaagaaucaguugu

SEQ ID NO: 3185995 - RNA, 19 nt, Artificial Sequence
  Description of Artificial Sequence: Synthetic oligonucleotide
acacaaaucauuucauaac

SEQ ID NO: 3185996 - RNA, 19 nt, Artificial Sequence
  Description of Artificial Sequence: Synthetic oligonucleotide
aaauugaauuuuaaucuac

SEQ ID NO: 3185997 - RNA, 19 nt, Artificial Sequence
  Description of Artificial Sequence: Synthetic oligonucleotide
acuaaaguggcaucacagc

SEQ ID NO: 3185998 - RNA, 19 nt, Artificial Sequence
  Description of Artificial Sequence: Synthetic oligonucleotide
aacauugcaguaccaaaag

SEQ ID NO: 3185999 - RNA, 19 nt, Artificial Sequence
  Description of Artificial Sequence: Synthetic oligonucleotide
uccauaaagauggagagug

SEQ ID NO: 3186000 - RNA, 19 nt, Artificial Sequence
  Description of Artificial Sequence: Synthetic oligonucleotide
auauagagaauuuaaugga

SEQ ID NO: 3186001 - RNA, 19 nt, Artificial Sequence
  Description of Artificial Sequence: Synthetic oligonucleotide
aaauaaaacccuagcaauc

SEQ ID NO: 3186002 - RNA, 19 nt, Artificial Sequence
  Description of Artificial Sequence: Synthetic oligonucleotide
acucauaaaagacaaagaa

SEQ ID NO: 3186003 - RNA, 19 nt, Artificial Sequence
  Description of Artificial Sequence: Synthetic oligonucleotide
ucaagcagccauaauacug

SEQ ID NO: 3186004 - RNA, 19 nt, Artificial Sequence
  Description of Artificial Sequence: Synthetic oligonucleotide
caaagaaauuacaacacac

SEQ ID NO: 3186005 - RNA, 19 nt, Artificial Sequence
  Description of Artificial Sequence: Synthetic oligonucleotide
uacuaaaguggcaucacag

SEQ ID NO: 3186006 - RNA, 19 nt, Artificial Sequence
  Description of Artificial Sequence: Synthetic oligonucleotide
ucaaguagaaaagaugccc

SEQ ID NO: 3186007 - RNA, 19 nt, Artificial Sequence
  Description of Artificial Sequence: Synthetic oligonucleotide
uaggaaagcaauaggagac

SEQ ID NO: 3186008 - RNA, 19 nt, Artificial Sequence
  Description of Artificial Sequence: Synthetic oligonucleotide
uccaaguuuauuuacaaua

SEQ ID NO: 3186009 - RNA, 19 nt, Artificial Sequence
  Description of Artificial Sequence: Synthetic oligonucleotide
uccaucaaaaguauucuga

SEQ ID NO: 3186010 - RNA, 19 nt, Artificial Sequence
  Description of Artificial Sequence: Synthetic oligonucleotide
gagguauaagaauauuucc

SEQ ID NO: 3186011 - RNA, 19 nt, Artificial Sequence
  Description of Artificial Sequence: Synthetic oligonucleotide
uuacuaugcagauagugga

SEQ ID NO: 3186012 - RNA, 19 nt, Artificial Sequence
  Description of Artificial Sequence: Synthetic oligonucleotide
auuacuaugcagauagugg

SEQ ID NO: 3186013 - RNA, 19 nt, Artificial Sequence
  Description of Artificial Sequence: Synthetic oligonucleotide
uacuagagaacuccugacg

SEQ ID NO: 3186014 - RNA, 19 nt, Artificial Sequence
  Description of Artificial Sequence: Synthetic oligonucleotide
aacaacaaaauaaaacccu

SEQ ID NO: 3186015 - RNA, 19 nt, Artificial Sequence
  Description of Artificial Sequence: Synthetic oligonucleotide
aaacugaacuuguuuaaca

SEQ ID NO: 3186016 - RNA, 19 nt, Artificial Sequence
  Description of Artificial Sequence: Synthetic oligonucleotide
uuagcaacuaagagcuugg

SEQ ID NO: 3186017 - RNA, 19 nt, Artificial Sequence
  Description of Artificial Sequence: Synthetic oligonucleotide
augaugauaugacacauga

SEQ ID NO: 3186018 - RNA, 19 nt, Artificial Sequence
  Description of Artificial Sequence: Synthetic oligonucleotide
uuaauuacuaaaguggcau

SEQ ID NO: 3186019 - RNA, 19 nt, Artificial Sequence
  Description of Artificial Sequence: Synthetic oligonucleotide
uggacaaucauauuacuau

SEQ ID NO: 3186020 - RNA, 19 nt, Artificial Sequence
  Description of Artificial Sequence: Synthetic oligonucleotide
aaguagaaaagaugcccuc

SEQ ID NO: 3186021 - RNA, 19 nt, Artificial Sequence
  Description of Artificial Sequence: Synthetic oligonucleotide
aacaccacuacaauuuuag

SEQ ID NO: 3186022 - RNA, 19 nt, Artificial Sequence
  Description of Artificial Sequence: Synthetic oligonucleotide
aauuuacaaauugauaaau

SEQ ID NO: 3186023 - RNA, 19 nt, Artificial Sequence
  Description of Artificial Sequence: Synthetic oligonucleotide
acccuagcaauccagguac

SEQ ID NO: 3186024 - RNA, 19 nt, Artificial Sequence
  Description of Artificial Sequence: Synthetic oligonucleotide
acaucaauagaagaaaugu

SEQ ID NO: 3186025 - RNA, 19 nt, Artificial Sequence
  Description of Artificial Sequence: Synthetic oligonucleotide
aauuacuaaaguggcauca

SEQ ID NO: 3186026 - RNA, 19 nt, Artificial Sequence
  Description of Artificial Sequence: Synthetic oligonucleotide
caucauuugcacuagcuac

SEQ ID NO: 3186027 - RNA, 19 nt, Artificial Sequence
  Description of Artificial Sequence: Synthetic oligonucleotide
uauuacuaugcagauagug

SEQ ID NO: 3186028 - RNA, 19 nt, Artificial Sequence
  Description of Artificial Sequence: Synthetic oligonucleotide
auuuacaauaaauaccuuu

SEQ ID NO: 3186029 - RNA, 19 nt, Artificial Sequence
  Description of Artificial Sequence: Synthetic oligonucleotide
aauaccuuuauuaaaccau

SEQ ID NO: 3186030 - RNA, 19 nt, Artificial Sequence
  Description of Artificial Sequence: Synthetic oligonucleotide
acugucgucauacucuggg

SEQ ID NO: 3186031 - RNA, 19 nt, Artificial Sequence
  Description of Artificial Sequence: Synthetic oligonucleotide
uuggcaauuuacaauaaau

SEQ ID NO: 3186032 - RNA, 19 nt, Artificial Sequence
  Description of Artificial Sequence: Synthetic oligonucleotide
auauauaagcuaauuauca

SEQ ID NO: 3186033 - RNA, 19 nt, Artificial Sequence
  Description of Artificial Sequence: Synthetic oligonucleotide
aacagagguagacccuacc

SEQ ID NO: 3186034 - RNA, 19 nt, Artificial Sequence
  Description of Artificial Sequence: Synthetic oligonucleotide
cauaguacuagagaacucc

SEQ ID NO: 3186035 - RNA, 19 nt, Artificial Sequence
  Description of Artificial Sequence: Synthetic oligonucleotide
uaugcuuuuaguugguccu

SEQ ID NO: 3186036 - RNA, 19 nt, Artificial Sequence
  Description of Artificial Sequence: Synthetic oligonucleotide
uuagauauuugcuccuuug

SEQ ID NO: 3186037 - RNA, 19 nt, Artificial Sequence
  Description of Artificial Sequence: Synthetic oligonucleotide
uuuagaaggcuuccauuag

SEQ ID NO: 3186038 - RNA, 19 nt, Artificial Sequence
  Description of Artificial Sequence: Synthetic oligonucleotide
uauagagaauuuaauggau

SEQ ID NO: 3186039 - RNA, 19 nt, Artificial Sequence
  Description of Artificial Sequence: Synthetic oligonucleotide
ugcucaaguagaaaagaug

SEQ ID NO: 3186040 - RNA, 19 nt, Artificial Sequence
  Description of Artificial Sequence: Synthetic oligonucleotide
uacaauuuuagaaggcuuc

SEQ ID NO: 3186041 - RNA, 19 nt, Artificial Sequence
  Description of Artificial Sequence: Synthetic oligonucleotide
uaaugguagguucuaguca

SEQ ID NO: 3186042 - RNA, 19 nt, Artificial Sequence
  Description of Artificial Sequence: Synthetic oligonucleotide
aaaguuuauuuuaaaauuu

SEQ ID NO: 3186043 - RNA, 19 nt, Artificial Sequence
  Description of Artificial Sequence: Synthetic oligonucleotide
ucguaacagagguagaccc

SEQ ID NO: 3186044 - RNA, 19 nt, Artificial Sequence
  Description of Artificial Sequence: Synthetic oligonucleotide
aauuucacacucaagugca

SEQ ID NO: 3186045 - RNA, 19 nt, Artificial Sequence
  Description of Artificial Sequence: Synthetic oligonucleotide
aaaagcuaacaauugcuuu

SEQ ID NO: 3186046 - RNA, 19 nt, Artificial Sequence
  Description of Artificial Sequence: Synthetic oligonucleotide
ggcaauuuacaauaaauac

SEQ ID NO: 3186047 - RNA, 19 nt, Artificial Sequence
  Description of Artificial Sequence: Synthetic oligonucleotide
gauguuagacauuaaaagu

SEQ ID NO: 3186048 - RNA, 19 nt, Artificial Sequence
  Description of Artificial Sequence: Synthetic oligonucleotide
uuaaugguagguucuaguc

SEQ ID NO: 3186049 - RNA, 19 nt, Artificial Sequence
  Description of Artificial Sequence: Synthetic oligonucleotide
caacaacugaauuucacac

SEQ ID NO: 3186050 - RNA, 19 nt, Artificial Sequence
  Description of Artificial Sequence: Synthetic oligonucleotide
uaucaacaucguaacagag

SEQ ID NO: 3186051 - RNA, 19 nt, Artificial Sequence
  Description of Artificial Sequence: Synthetic oligonucleotide
aauuauaaacugcccagua

SEQ ID NO: 3186052 - RNA, 19 nt, Artificial Sequence
  Description of Artificial Sequence: Synthetic oligonucleotide
caaaauaaaacccuagcaa

SEQ ID NO: 3186053 - RNA, 19 nt, Artificial Sequence
  Description of Artificial Sequence: Synthetic oligonucleotide
agcaguuugcccaaucucc

SEQ ID NO: 3186054 - RNA, 19 nt, Artificial Sequence
  Description of Artificial Sequence: Synthetic oligonucleotide
aauugauaaaucauaguuu

SEQ ID NO: 3186055 - RNA, 19 nt, Artificial Sequence
  Description of Artificial Sequence: Synthetic oligonucleotide
ucugggguaaagauacugc

SEQ ID NO: 3186056 - RNA, 19 nt, Artificial Sequence
  Description of Artificial Sequence: Synthetic oligonucleotide
uugcacuagcuacuuaggg

SEQ ID NO: 3186057 - RNA, 19 nt, Artificial Sequence
  Description of Artificial Sequence: Synthetic oligonucleotide
uugaugaugauaugacaca

SEQ ID NO: 3186058 - RNA, 19 nt, Artificial Sequence
  Description of Artificial Sequence: Synthetic oligonucleotide
ugauagugaacgucaacug

SEQ ID NO: 3186059 - RNA, 19 nt, Artificial Sequence
  Description of Artificial Sequence: Synthetic oligonucleotide
uagaauauuucagaaugca

SEQ ID NO: 3186060 - RNA, 19 nt, Artificial Sequence
  Description of Artificial Sequence: Synthetic oligonucleotide
cuuguuagaauauuucaga

SEQ ID NO: 3186061 - RNA, 19 nt, Artificial Sequence
  Description of Artificial Sequence: Synthetic oligonucleotide
uggcaauuuacaauaaaua

SEQ ID NO: 3186062 - RNA, 19 nt, Artificial Sequence
  Description of Artificial Sequence: Synthetic oligonucleotide
agugcuuaaggagugauca

SEQ ID NO: 3186063 - RNA, 19 nt, Artificial Sequence
  Description of Artificial Sequence: Synthetic oligonucleotide
aaaguaggauugucuaugu

SEQ ID NO: 3186064 - RNA, 19 nt, Artificial Sequence
  Description of Artificial Sequence: Synthetic oligonucleotide
aaaacccuagcaauccagg

SEQ ID NO: 3186065 - RNA, 19 nt, Artificial Sequence
  Description of Artificial Sequence: Synthetic oligonucleotide
gguaucaacaucguaacag

SEQ ID NO: 3186066 - RNA, 19 nt, Artificial Sequence
  Description of Artificial Sequence: Synthetic oligonucleotide
ucgacugucgucauacucu

SEQ ID NO: 3186067 - RNA, 19 nt, Artificial Sequence
  Description of Artificial Sequence: Synthetic oligonucleotide
auauaagcuaauuaucaua

SEQ ID NO: 3186068 - RNA, 19 nt, Artificial Sequence
  Description of Artificial Sequence: Synthetic oligonucleotide
aggguuaucauaguacuag

SEQ ID NO: 3186069 - RNA, 19 nt, Artificial Sequence
  Description of Artificial Sequence: Synthetic oligonucleotide
ugauaaaucauaguuugua

SEQ ID NO: 3186070 - RNA, 19 nt, Artificial Sequence
  Description of Artificial Sequence: Synthetic oligonucleotide
accuaauaagcuuagugau

SEQ ID NO: 3186071 - RNA, 19 nt, Artificial Sequence
  Description of Artificial Sequence: Synthetic oligonucleotide
acagccucaacacaaagcc

SEQ ID NO: 3186072 - RNA, 19 nt, Artificial Sequence
  Description of Artificial Sequence: Synthetic oligonucleotide
uaacuuguugcgcacacgg

SEQ ID NO: 3186073 - RNA, 19 nt, Artificial Sequence
  Description of Artificial Sequence: Synthetic oligonucleotide
uuuauccacagccucaaca

SEQ ID NO: 3186074 - RNA, 19 nt, Artificial Sequence
  Description of Artificial Sequence: Synthetic oligonucleotide
agccgcuuuaacuuguugc

SEQ ID NO: 3186075 - RNA, 19 nt, Artificial Sequence
  Description of Artificial Sequence: Synthetic oligonucleotide
aacacaaagccggacaaag

SEQ ID NO: 3186076 - RNA, 19 nt, Artificial Sequence
  Description of Artificial Sequence: Synthetic oligonucleotide
cuggcaaccaaacaccugg

SEQ ID NO: 3186077 - RNA, 19 nt, Artificial Sequence
  Description of Artificial Sequence: Synthetic oligonucleotide
aaacaccuggucucggaac

SEQ ID NO: 3186078 - RNA, 19 nt, Artificial Sequence
  Description of Artificial Sequence: Synthetic oligonucleotide
ugcaagguuggucucuugg

SEQ ID NO: 3186079 - RNA, 19 nt, Artificial Sequence
  Description of Artificial Sequence: Synthetic oligonucleotide
uuauccacagccucaacac

SEQ ID NO: 3186080 - RNA, 19 nt, Artificial Sequence
  Description of Artificial Sequence: Synthetic oligonucleotide
ucgaugaccgcccgcagcg

SEQ ID NO: 3186081 - RNA, 19 nt, Artificial Sequence
  Description of Artificial Sequence: Synthetic oligonucleotide
caaagccggacaaagcugg

SEQ ID NO: 3186082 - RNA, 19 nt, Artificial Sequence
  Description of Artificial Sequence: Synthetic oligonucleotide
ugaaggcucugcaagguug

SEQ ID NO: 3186083 - RNA, 19 nt, Artificial Sequence
  Description of Artificial Sequence: Synthetic oligonucleotide
ucucuuggcgaucagccgc

SEQ ID NO: 3186084 - RNA, 19 nt, Artificial Sequence
  Description of Artificial Sequence: Synthetic oligonucleotide
uucccuuuggcacagcgac

SEQ ID NO: 3186085 - RNA, 19 nt, Artificial Sequence
  Description of Artificial Sequence: Synthetic oligonucleotide
uuuaacuuguugcgcacac

SEQ ID NO: 3186086 - RNA, 19 nt, Artificial Sequence
  Description of Artificial Sequence: Synthetic oligonucleotide
uccgacuggagacucugcg

SEQ ID NO: 3186087 - RNA, 19 nt, Artificial Sequence
  Description of Artificial Sequence: Synthetic oligonucleotide
caacuggcaaccaaacacc

SEQ ID NO: 3186088 - RNA, 19 nt, Artificial Sequence
  Description of Artificial Sequence: Synthetic oligonucleotide
aacaccuggucucggaaca

SEQ ID NO: 3186089 - RNA, 19 nt, Artificial Sequence
  Description of Artificial Sequence: Synthetic oligonucleotide
agcgacuccaacuggcaac

SEQ ID NO: 3186090 - RNA, 19 nt, Artificial Sequence
  Description of Artificial Sequence: Synthetic oligonucleotide
ucaacacaaagccggacaa

SEQ ID NO: 3186091 - RNA, 19 nt, Artificial Sequence
  Description of Artificial Sequence: Synthetic oligonucleotide
gacagacgcagcuccaggg

SEQ ID NO: 3186092 - RNA, 19 nt, Artificial Sequence
  Description of Artificial Sequence: Synthetic oligonucleotide
cuccaguucgucauccucg

SEQ ID NO: 3186093 - RNA, 19 nt, Artificial Sequence
  Description of Artificial Sequence: Synthetic oligonucleotide
caagguuggucucuuggcg

SEQ ID NO: 3186094 - RNA, 19 nt, Artificial Sequence
  Description of Artificial Sequence: Synthetic oligonucleotide
gguucuucugcucagugcc

SEQ ID NO: 3186095 - RNA, 19 nt, Artificial Sequence
  Description of Artificial Sequence: Synthetic oligonucleotide
caguucgucauccucgccg

SEQ ID NO: 3186096 - RNA, 19 nt, Artificial Sequence
  Description of Artificial Sequence: Synthetic oligonucleotide
agccucaacacaaagccgg

SEQ ID NO: 3186097 - RNA, 19 nt, Artificial Sequence
  Description of Artificial Sequence: Synthetic oligonucleotide
aagguuggucucuuggcga

SEQ ID NO: 3186098 - RNA, 19 nt, Artificial Sequence
  Description of Artificial Sequence: Synthetic oligonucleotide
aaagcugggcacggugucc

SEQ ID NO: 3186099 - RNA, 19 nt, Artificial Sequence
  Description of Artificial Sequence: Synthetic oligonucleotide
aguucgucauccucgccgg

SEQ ID NO: 3186100 - RNA, 19 nt, Artificial Sequence
  Description of Artificial Sequence: Synthetic oligonucleotide
uggacacaggcucugacuc

SEQ ID NO: 3186101 - RNA, 19 nt, Artificial Sequence
  Description of Artificial Sequence: Synthetic oligonucleotide
uccugaaggcucugcaagg

SEQ ID NO: 3186102 - RNA, 19 nt, Artificial Sequence
  Description of Artificial Sequence: Synthetic oligonucleotide
ucccgagccggacagacgc

SEQ ID NO: 3186103 - RNA, 19 nt, Artificial Sequence
  Description of Artificial Sequence: Synthetic oligonucleotide
ucugacuccaguucgucau

SEQ ID NO: 3186104 - RNA, 19 nt, Artificial Sequence
  Description of Artificial Sequence: Synthetic oligonucleotide
caaccaaacaccuggucuc

SEQ ID NO: 3186105 - RNA, 19 nt, Artificial Sequence
  Description of Artificial Sequence: Synthetic oligonucleotide
cacagccucaacacaaagc

SEQ ID NO: 3186106 - RNA, 19 nt, Artificial Sequence
  Description of Artificial Sequence: Synthetic oligonucleotide
cuggucucggaacaggccc

SEQ ID NO: 3186107 - RNA, 19 nt, Artificial Sequence
  Description of Artificial Sequence: Synthetic oligonucleotide
aagcugggcacgguguccc

SEQ ID NO: 3186108 - RNA, 19 nt, Artificial Sequence
  Description of Artificial Sequence: Synthetic oligonucleotide
ucugcggcugcugagccgg

SEQ ID NO: 3186109 - RNA, 19 nt, Artificial Sequence
  Description of Artificial Sequence: Synthetic oligonucleotide
ucugcacuccgacuggaga

SEQ ID NO: 3186110 - RNA, 19 nt, Artificial Sequence
  Description of Artificial Sequence: Synthetic oligonucleotide
gacaaagcugggcacggug

SEQ ID NO: 3186111 - RNA, 19 nt, Artificial Sequence
  Description of Artificial Sequence: Synthetic oligonucleotide
acagacgcagcuccagggg

SEQ ID NO: 3186112 - RNA, 19 nt, Artificial Sequence
  Description of Artificial Sequence: Synthetic oligonucleotide
aaccaaacaccuggucucg

SEQ ID NO: 3186113 - RNA, 19 nt, Artificial Sequence
  Description of Artificial Sequence: Synthetic oligonucleotide
guggcuuggacacaggcuc

SEQ ID NO: 3186114 - RNA, 19 nt, Artificial Sequence
  Description of Artificial Sequence: Synthetic oligonucleotide
ccaacuggcaaccaaacac

SEQ ID NO: 3186115 - RNA, 19 nt, Artificial Sequence
  Description of Artificial Sequence: Synthetic oligonucleotide
uuaacuuguugcgcacacg

SEQ ID NO: 3186116 - RNA, 19 nt, Artificial Sequence
  Description of Artificial Sequence: Synthetic oligonucleotide
ugcugagccggaucagugg

SEQ ID NO: 3186117 - RNA, 19 nt, Artificial Sequence
  Description of Artificial Sequence: Synthetic oligonucleotide
acuccaguucgucauccuc

SEQ ID NO: 3186118 - RNA, 19 nt, Artificial Sequence
  Description of Artificial Sequence: Synthetic oligonucleotide
aggcucugacuccaguucg

SEQ ID NO: 3186119 - RNA, 19 nt, Artificial Sequence
  Description of Artificial Sequence: Synthetic oligonucleotide
uccagccggucgaugaccg

SEQ ID NO: 3186120 - RNA, 19 nt, Artificial Sequence
  Description of Artificial Sequence: Synthetic oligonucleotide
aagccggacaaagcugggc

SEQ ID NO: 3186121 - RNA, 19 nt, Artificial Sequence
  Description of Artificial Sequence: Synthetic oligonucleotide
agcucugcgggucccgagc

SEQ ID NO: 3186122 - RNA, 19 nt, Artificial Sequence
  Description of Artificial Sequence: Synthetic oligonucleotide
aggcucgcagcucaggcuc

SEQ ID NO: 3186123 - RNA, 19 nt, Artificial Sequence
  Description of Artificial Sequence: Synthetic oligonucleotide
uccaacuggcaaccaaaca

SEQ ID NO: 3186124 - RNA, 19 nt, Artificial Sequence
  Description of Artificial Sequence: Synthetic oligonucleotide
cuccugaaggcucugcaag

SEQ ID NO: 3186125 - RNA, 19 nt, Artificial Sequence
  Description of Artificial Sequence: Synthetic oligonucleotide
ggaucaguggcuuggacac

SEQ ID NO: 3186126 - RNA, 19 nt, Artificial Sequence
  Description of Artificial Sequence: Synthetic oligonucleotide
gaaggcucugcaagguugg

SEQ ID NO: 3186127 - RNA, 19 nt, Artificial Sequence
  Description of Artificial Sequence: Synthetic oligonucleotide
cuuguugcgcacacgguuc

SEQ ID NO: 3186128 - RNA, 19 nt, Artificial Sequence
  Description of Artificial Sequence: Synthetic oligonucleotide
gccgcuuuaacuuguugcg

SEQ ID NO: 3186129 - RNA, 19 nt, Artificial Sequence
  Description of Artificial Sequence: Synthetic oligonucleotide
uauccacagccucaacaca

SEQ ID NO: 3186130 - RNA, 19 nt, Artificial Sequence
  Description of Artificial Sequence: Synthetic oligonucleotide
uuggacacaggcucugacu

SEQ ID NO: 3186131 - RNA, 19 nt, Artificial Sequence
  Description of Artificial Sequence: Synthetic oligonucleotide
gaugaccgcccgcagcgcg

SEQ ID NO: 3186132 - RNA, 19 nt, Artificial Sequence
  Description of Artificial Sequence: Synthetic oligonucleotide
acucugcggcugcugagcc

SEQ ID NO: 3186133 - RNA, 19 nt, Artificial Sequence
  Description of Artificial Sequence: Synthetic oligonucleotide
gaucagccgcuuuaacuug

SEQ ID NO: 3186134 - RNA, 19 nt, Artificial Sequence
  Description of Artificial Sequence: Synthetic oligonucleotide
cacagcgacuccaacuggc

SEQ ID NO: 3186135 - RNA, 19 nt, Artificial Sequence
  Description of Artificial Sequence: Synthetic oligonucleotide
acuuguugcgcacacgguu

SEQ ID NO: 3186136 - RNA, 19 nt, Artificial Sequence
  Description of Artificial Sequence: Synthetic oligonucleotide
uucgucauccucgccggcg

SEQ ID NO: 3186137 - RNA, 19 nt, Artificial Sequence
  Description of Artificial Sequence: Synthetic oligonucleotide
acacaaagccggacaaagc

SEQ ID NO: 3186138 - RNA, 19 nt, Artificial Sequence
  Description of Artificial Sequence: Synthetic oligonucleotide
cucgccggcgcucagcucc

SEQ ID NO: 3186139 - RNA, 19 nt, Artificial Sequence
  Description of Artificial Sequence: Synthetic oligonucleotide
uccaguucgucauccucgc

SEQ ID NO: 3186140 - RNA, 19 nt, Artificial Sequence
  Description of Artificial Sequence: Synthetic oligonucleotide
agcuccgccagcucugcgg

SEQ ID NO: 3186141 - RNA, 19 nt, Artificial Sequence
  Description of Artificial Sequence: Synthetic oligonucleotide
ucgcagcucaggcuccucg

SEQ ID NO: 3186142 - RNA, 19 nt, Artificial Sequence
  Description of Artificial Sequence: Synthetic oligonucleotide
agcucaggcuccucguccg

SEQ ID NO: 3186143 - RNA, 19 nt, Artificial Sequence
  Description of Artificial Sequence: Synthetic oligonucleotide
uccucguccgacugcagca

SEQ ID NO: 3186144 - RNA, 19 nt, Artificial Sequence
  Description of Artificial Sequence: Synthetic oligonucleotide
cucaacacaaagccggaca

SEQ ID NO: 3186145 - RNA, 19 nt, Artificial Sequence
  Description of Artificial Sequence: Synthetic oligonucleotide
aucaguggcuuggacacag

SEQ ID NO: 3186146 - RNA, 19 nt, Artificial Sequence
  Description of Artificial Sequence: Synthetic oligonucleotide
uuggcgaucagccgcuuua

SEQ ID NO: 3186147 - RNA, 19 nt, Artificial Sequence
  Description of Artificial Sequence: Synthetic oligonucleotide
agccggacaaagcugggca

SEQ ID NO: 3186148 - RNA, 19 nt, Artificial Sequence
  Description of Artificial Sequence: Synthetic oligonucleotide
guucucccgguccagccgg

SEQ ID NO: 3186149 - RNA, 19 nt, Artificial Sequence
  Description of Artificial Sequence: Synthetic oligonucleotide
cugcacuccgacuggagac

SEQ ID NO: 3186150 - RNA, 19 nt, Artificial Sequence
  Description of Artificial Sequence: Synthetic oligonucleotide
uggcacagcgacuccaacu

SEQ ID NO: 3186151 - RNA, 19 nt, Artificial Sequence
  Description of Artificial Sequence: Synthetic oligonucleotide
uuuggcacagcgacuccaa

SEQ ID NO: 3186152 - RNA, 19 nt, Artificial Sequence
  Description of Artificial Sequence: Synthetic oligonucleotide
ggcacagcgacuccaacug

SEQ ID NO: 3186153 - RNA, 19 nt, Artificial Sequence
  Description of Artificial Sequence: Synthetic oligonucleotide
gucucuuggcgaucagccg

SEQ ID NO: 3186154 - RNA, 19 nt, Artificial Sequence
  Description of Artificial Sequence: Synthetic oligonucleotide
ucggaacaggccccgcucc

SEQ ID NO: 3186155 - RNA, 19 nt, Artificial Sequence
  Description of Artificial Sequence: Synthetic oligonucleotide
cagccucaacacaaagccg

SEQ ID NO: 3186156 - RNA, 19 nt, Artificial Sequence
  Description of Artificial Sequence: Synthetic oligonucleotide
guccccuucccuuuggcac

SEQ ID NO: 3186157 - RNA, 19 nt, Artificial Sequence
  Description of Artificial Sequence: Synthetic oligonucleotide
aacuggcaaccaaacaccu

SEQ ID NO: 3186158 - RNA, 19 nt, Artificial Sequence
  Description of Artificial Sequence: Synthetic oligonucleotide
uggucucggaacaggcccc

SEQ ID NO: 3186159 - RNA, 19 nt, Artificial Sequence
  Description of Artificial Sequence: Synthetic oligonucleotide
ucugcgggucccgagccgg

SEQ ID NO: 3186160 - RNA, 19 nt, Artificial Sequence
  Description of Artificial Sequence: Synthetic oligonucleotide
ucugcucagugcccucugc

SEQ ID NO: 3186161 - RNA, 19 nt, Artificial Sequence
  Description of Artificial Sequence: Synthetic oligonucleotide
cuccaacuggcaaccaaac

SEQ ID NO: 3186162 - RNA, 19 nt, Artificial Sequence
  Description of Artificial Sequence: Synthetic oligonucleotide
ucgucauccucgccggcgc

SEQ ID NO: 3186163 - RNA, 19 nt, Artificial Sequence
  Description of Artificial Sequence: Synthetic oligonucleotide
uuuuauccacagccucaac

SEQ ID NO: 3186164 - RNA, 19 nt, Artificial Sequence
  Description of Artificial Sequence: Synthetic oligonucleotide
accuggucucggaacaggc

SEQ ID NO: 3186165 - RNA, 19 nt, Artificial Sequence
  Description of Artificial Sequence: Synthetic oligonucleotide
acaaagccggacaaagcug

SEQ ID NO: 3186166 - RNA, 19 nt, Artificial Sequence
  Description of Artificial Sequence: Synthetic oligonucleotide
caguggcuuggacacaggc

SEQ ID NO: 3186167 - RNA, 19 nt, Artificial Sequence
  Description of Artificial Sequence: Synthetic oligonucleotide
ugacuccaguucgucaucc

SEQ ID NO: 3186168 - RNA, 19 nt, Artificial Sequence
  Description of Artificial Sequence: Synthetic oligonucleotide
ucaguggcuuggacacagg

SEQ ID NO: 3186169 - RNA, 19 nt, Artificial Sequence
  Description of Artificial Sequence: Synthetic oligonucleotide
aaagccggacaaagcuggg

SEQ ID NO: 3186170 - RNA, 19 nt, Artificial Sequence
  Description of Artificial Sequence: Synthetic oligonucleotide
cacaaagccggacaaagcu

SEQ ID NO: 3186171 - RNA, 19 nt, Artificial Sequence
  Description of Artificial Sequence: Synthetic oligonucleotide
aaagauucuccuuugagac

SEQ ID NO: 3186172 - RNA, 19 nt, Artificial Sequence
  Description of Artificial Sequence: Synthetic oligonucleotide
uuaauuuaaacucagucac

SEQ ID NO: 3186173 - RNA, 19 nt, Artificial Sequence
  Description of Artificial Sequence: Synthetic oligonucleotide
uuuaauuuaaacucaguca

SEQ ID NO: 3186174 - RNA, 19 nt, Artificial Sequence
  Description of Artificial Sequence: Synthetic oligonucleotide
ucuucuuuaauuuaaacuc

SEQ ID NO: 3186175 - RNA, 19 nt, Artificial Sequence
  Description of Artificial Sequence: Synthetic oligonucleotide
uuaaacucagucacgaagg

SEQ ID NO: 3186176 - RNA, 19 nt, Artificial Sequence
  Description of Artificial Sequence: Synthetic oligonucleotide
gaagguucuaaccagauug

SEQ ID NO: 3186177 - RNA, 19 nt, Artificial Sequence
  Description of Artificial Sequence: Synthetic oligonucleotide
uuuaaacucagucacgaag

SEQ ID NO: 3186178 - RNA, 19 nt, Artificial Sequence
  Description of Artificial Sequence: Synthetic oligonucleotide
uucaccaucaugaagacaa

SEQ ID NO: 3186179 - RNA, 19 nt, Artificial Sequence
  Description of Artificial Sequence: Synthetic oligonucleotide
aucgaucucguuuucaacc

SEQ ID NO: 3186180 - RNA, 19 nt, Artificial Sequence
  Description of Artificial Sequence: Synthetic oligonucleotide
auugcauauuccuuucucc

SEQ ID NO: 3186181 - RNA, 19 nt, Artificial Sequence
  Description of Artificial Sequence: Synthetic oligonucleotide
aacucagucacgaagguuc

SEQ ID NO: 3186182 - RNA, 19 nt, Artificial Sequence
  Description of Artificial Sequence: Synthetic oligonucleotide
uugacauauuucuggaucg

SEQ ID NO: 3186183 - RNA, 19 nt, Artificial Sequence
  Description of Artificial Sequence: Synthetic oligonucleotide
gaugcauucaccaucauga

SEQ ID NO: 3186184 - RNA, 19 nt, Artificial Sequence
  Description of Artificial Sequence: Synthetic oligonucleotide
uuggaagucaguauuucag

SEQ ID NO: 3186185 - RNA, 19 nt, Artificial Sequence
  Description of Artificial Sequence: Synthetic oligonucleotide
agauucuccuuugagaccc

SEQ ID NO: 3186186 - RNA, 19 nt, Artificial Sequence
  Description of Artificial Sequence: Synthetic oligonucleotide
uaaagauucuccuuugaga

SEQ ID NO: 3186187 - RNA, 19 nt, Artificial Sequence
  Description of Artificial Sequence: Synthetic oligonucleotide
aagauucuccuuugagacc

SEQ ID NO: 3186188 - RNA, 19 nt, Artificial Sequence
  Description of Artificial Sequence: Synthetic oligonucleotide
aauuuaaacucagucacga

SEQ ID NO: 3186189 - RNA, 19 nt, Artificial Sequence
  Description of Artificial Sequence: Synthetic oligonucleotide
uauuguugcacauggcuag

SEQ ID NO: 3186190 - RNA, 19 nt, Artificial Sequence
  Description of Artificial Sequence: Synthetic oligonucleotide
aaggugguguauuuggaag

SEQ ID NO: 3186191 - RNA, 19 nt, Artificial Sequence
  Description of Artificial Sequence: Synthetic oligonucleotide
uauuucuggaucgaucucg

SEQ ID NO: 3186192 - RNA, 19 nt, Artificial Sequence
  Description of Artificial Sequence: Synthetic oligonucleotide
aagucaguauuucagcugu

SEQ ID NO: 3186193 - RNA, 19 nt, Artificial Sequence
  Description of Artificial Sequence: Synthetic oligonucleotide
acauucuggacucuuccgc

SEQ ID NO: 3186194 - RNA, 19 nt, Artificial Sequence
  Description of Artificial Sequence: Synthetic oligonucleotide
aguauuguugcacauggcu

SEQ ID NO: 3186195 - RNA, 19 nt, Artificial Sequence
  Description of Artificial Sequence: Synthetic oligonucleotide
uccacaguaguauugagaa

SEQ ID NO: 3186196 - RNA, 19 nt, Artificial Sequence
  Description of Artificial Sequence: Synthetic oligonucleotide
agucacgaagguucuaacc

SEQ ID NO: 3186197 - RNA, 19 nt, Artificial Sequence
  Description of Artificial Sequence: Synthetic oligonucleotide
uguaguuugaggugaaggu

SEQ ID NO: 3186198 - RNA, 19 nt, Artificial Sequence
  Description of Artificial Sequence: Synthetic oligonucleotide
agagcuggcagacuucagc

SEQ ID NO: 3186199 - RNA, 19 nt, Artificial Sequence
  Description of Artificial Sequence: Synthetic oligonucleotide
uccuuugagaccccaagag

SEQ ID NO: 3186200 - RNA, 19 nt, Artificial Sequence
  Description of Artificial Sequence: Synthetic oligonucleotide
agucuucuuuaauuuaaac

SEQ ID NO: 3186201 - RNA, 19 nt, Artificial Sequence
  Description of Artificial Sequence: Synthetic oligonucleotide
uugcacauggcuaggggcg

SEQ ID NO: 3186202 - RNA, 19 nt, Artificial Sequence
  Description of Artificial Sequence: Synthetic oligonucleotide
ugaagacaaggguucacgg

SEQ ID NO: 3186203 - RNA, 19 nt, Artificial Sequence
  Description of Artificial Sequence: Synthetic oligonucleotide
ggaguugacauauuucugg

SEQ ID NO: 3186204 - RNA, 19 nt, Artificial Sequence
  Description of Artificial Sequence: Synthetic oligonucleotide
uccacauccacacugcagu

SEQ ID NO: 3186205 - RNA, 19 nt, Artificial Sequence
  Description of Artificial Sequence: Synthetic oligonucleotide
ucaaccucgugaaugucag

SEQ ID NO: 3186206 - RNA, 19 nt, Artificial Sequence
  Description of Artificial Sequence: Synthetic oligonucleotide
ucagaaugguuuuccacag

SEQ ID NO: 3186207 - RNA, 19 nt, Artificial Sequence
  Description of Artificial Sequence: Synthetic oligonucleotide
gaggggacaacgcugcugg

SEQ ID NO: 3186208 - RNA, 19 nt, Artificial Sequence
  Description of Artificial Sequence: Synthetic oligonucleotide
guugacugggguuggaggg

SEQ ID NO: 3186209 - RNA, 19 nt, Artificial Sequence
  Description of Artificial Sequence: Synthetic oligonucleotide
ugguguauuuggaagucag

SEQ ID NO: 3186210 - RNA, 19 nt, Artificial Sequence
  Description of Artificial Sequence: Synthetic oligonucleotide
agcuguagaacaucuguag

SEQ ID NO: 3186211 - RNA, 19 nt, Artificial Sequence
  Description of Artificial Sequence: Synthetic oligonucleotide
aagguucuaaccagauugc

SEQ ID NO: 3186212 - RNA, 19 nt, Artificial Sequence
  Description of Artificial Sequence: Synthetic oligonucleotide
aaggguucacgguacagcu

SEQ ID NO: 3186213 - RNA, 19 nt, Artificial Sequence
  Description of Artificial Sequence: Synthetic oligonucleotide
uuuucaaccucgugaaugu

SEQ ID NO: 3186214 - RNA, 19 nt, Artificial Sequence
  Description of Artificial Sequence: Synthetic oligonucleotide
auugagaaaagucuucuuu

SEQ ID NO: 3186215 - RNA, 19 nt, Artificial Sequence
  Description of Artificial Sequence: Synthetic oligonucleotide
aagacaaggguucacggua

SEQ ID NO: 3186216 - RNA, 19 nt, Artificial Sequence
  Description of Artificial Sequence: Synthetic oligonucleotide
guugacauauuucuggauc

SEQ ID NO: 3186217 - RNA, 19 nt, Artificial Sequence
  Description of Artificial Sequence: Synthetic oligonucleotide
uguugacugggguuggagg

SEQ ID NO: 3186218 - RNA, 19 nt, Artificial Sequence
  Description of Artificial Sequence: Synthetic oligonucleotide
gaucccugaguauuguugc

SEQ ID NO: 3186219 - RNA, 19 nt, Artificial Sequence
  Description of Artificial Sequence: Synthetic oligonucleotide
acugauacccgacugggca

SEQ ID NO: 3186220 - RNA, 19 nt, Artificial Sequence
  Description of Artificial Sequence: Synthetic oligonucleotide
uguugcacauggcuagggg

SEQ ID NO: 3186221 - RNA, 19 nt, Artificial Sequence
  Description of Artificial Sequence: Synthetic oligonucleotide
ucuccuuugagaccccaag

SEQ ID NO: 3186222 - RNA, 19 nt, Artificial Sequence
  Description of Artificial Sequence: Synthetic oligonucleotide
ucacauucuggacucuucc

SEQ ID NO: 3186223 - RNA, 19 nt, Artificial Sequence
  Description of Artificial Sequence: Synthetic oligonucleotide
uuuggaagucaguauuuca

SEQ ID NO: 3186224 - RNA, 19 nt, Artificial Sequence
  Description of Artificial Sequence: Synthetic oligonucleotide
ugcauucaccaucaugaag

SEQ ID NO: 3186225 - RNA, 19 nt, Artificial Sequence
  Description of Artificial Sequence: Synthetic oligonucleotide
uugagaaaagucuucuuua

SEQ ID NO: 3186226 - RNA, 19 nt, Artificial Sequence
  Description of Artificial Sequence: Synthetic oligonucleotide
gaacaucuguaguuugagg

SEQ ID NO: 3186227 - RNA, 19 nt, Artificial Sequence
  Description of Artificial Sequence: Synthetic oligonucleotide
cuaaccagauugcauauuc

SEQ ID NO: 3186228 - RNA, 19 nt, Artificial Sequence
  Description of Artificial Sequence: Synthetic oligonucleotide
uguauuuggaagucaguau

SEQ ID NO: 3186229 - RNA, 19 nt, Artificial Sequence
  Description of Artificial Sequence: Synthetic oligonucleotide
accaucaugaagacaaggg

SEQ ID NO: 3186230 - RNA, 19 nt, Artificial Sequence
  Description of Artificial Sequence: Synthetic oligonucleotide
cucgugaaugucagaaugg

SEQ ID NO: 3186231 - RNA, 19 nt, Artificial Sequence
  Description of Artificial Sequence: Synthetic oligonucleotide
ucuaaagauucuccuuuga

SEQ ID NO: 3186232 - RNA, 19 nt, Artificial Sequence
  Description of Artificial Sequence: Synthetic oligonucleotide
guuuucaaccucgugaaug

SEQ ID NO: 3186233 - RNA, 19 nt, Artificial Sequence
  Description of Artificial Sequence: Synthetic oligonucleotide
ugcgcaucuauacccauga

SEQ ID NO: 3186234 - RNA, 19 nt, Artificial Sequence
  Description of Artificial Sequence: Synthetic oligonucleotide
uuucagcuguagaacaucu

SEQ ID NO: 3186235 - RNA, 19 nt, Artificial Sequence
  Description of Artificial Sequence: Synthetic oligonucleotide
ugagaaaagucuucuuuaa

SEQ ID NO: 3186236 - RNA, 19 nt, Artificial Sequence
  Description of Artificial Sequence: Synthetic oligonucleotide
uaguauugagaaaagucuu

SEQ ID NO: 3186237 - RNA, 19 nt, Artificial Sequence
  Description of Artificial Sequence: Synthetic oligonucleotide
uuccacaguaguauugaga

SEQ ID NO: 3186238 - RNA, 19 nt, Artificial Sequence
  Description of Artificial Sequence: Synthetic oligonucleotide
uagaacaucuguaguuuga

SEQ ID NO: 3186239 - RNA, 19 nt, Artificial Sequence
  Description of Artificial Sequence: Synthetic oligonucleotide
cagacuucagcagaggacc

SEQ ID NO: 3186240 - RNA, 19 nt, Artificial Sequence
  Description of Artificial Sequence: Synthetic oligonucleotide
ucacgaagguucuaaccag

SEQ ID NO: 3186241 - RNA, 19 nt, Artificial Sequence
  Description of Artificial Sequence: Synthetic oligonucleotide
gaucucguuuucaaccucg

SEQ ID NO: 3186242 - RNA, 19 nt, Artificial Sequence
  Description of Artificial Sequence: Synthetic oligonucleotide
uuuuccacaguaguauuga

SEQ ID NO: 3186243 - RNA, 19 nt, Artificial Sequence
  Description of Artificial Sequence: Synthetic oligonucleotide
uccaacugauacccgacug

SEQ ID NO: 3186244 - RNA, 19 nt, Artificial Sequence
  Description of Artificial Sequence: Synthetic oligonucleotide
uaaccagauugcauauucc

SEQ ID NO: 3186245 - RNA, 19 nt, Artificial Sequence
  Description of Artificial Sequence: Synthetic oligonucleotide
ucgagaggcauucauccac

SEQ ID NO: 3186246 - RNA, 19 nt, Artificial Sequence
  Description of Artificial Sequence: Synthetic oligonucleotide
ugaaagaucccugaguauu

SEQ ID NO: 3186247 - RNA, 19 nt, Artificial Sequence
  Description of Artificial Sequence: Synthetic oligonucleotide
gauugcauauuccuuucuc

SEQ ID NO: 3186248 - RNA, 19 nt, Artificial Sequence
  Description of Artificial Sequence: Synthetic oligonucleotide
gucacgaagguucuaacca

SEQ ID NO: 3186249 - RNA, 19 nt, Artificial Sequence
  Description of Artificial Sequence: Synthetic oligonucleotide
augaagacaaggguucacg

SEQ ID NO: 3186250 - RNA, 19 nt, Artificial Sequence
  Description of Artificial Sequence: Synthetic oligonucleotide
ucguuuucaaccucgugaa

SEQ ID NO: 3186251 - RNA, 19 nt, Artificial Sequence
  Description of Artificial Sequence: Synthetic oligonucleotide
ucuauacccaugacuggug

SEQ ID NO: 3186252 - RNA, 19 nt, Artificial Sequence
  Description of Artificial Sequence: Synthetic oligonucleotide
cucguuuucaaccucguga

SEQ ID NO: 3186253 - RNA, 19 nt, Artificial Sequence
  Description of Artificial Sequence: Synthetic oligonucleotide
cuguaguuugaggugaagg

SEQ ID NO: 3186254 - RNA, 19 nt, Artificial Sequence
  Description of Artificial Sequence: Synthetic oligonucleotide
acuucagcagaggaccugc

SEQ ID NO: 3186255 - RNA, 19 nt, Artificial Sequence
  Description of Artificial Sequence: Synthetic oligonucleotide
uucacgguacagcuguuga

SEQ ID NO: 3186256 - RNA, 19 nt, Artificial Sequence
  Description of Artificial Sequence: Synthetic oligonucleotide
agaaugguuuuccacagua

SEQ ID NO: 3186257 - RNA, 19 nt, Artificial Sequence
  Description of Artificial Sequence: Synthetic oligonucleotide
uucuggaucgaucucguuu

SEQ ID NO: 3186258 - RNA, 19 nt, Artificial Sequence
  Description of Artificial Sequence: Synthetic oligonucleotide
guugcacauggcuaggggc

SEQ ID NO: 3186259 - RNA, 19 nt, Artificial Sequence
  Description of Artificial Sequence: Synthetic oligonucleotide
gaggugaagguguucugag

SEQ ID NO: 3186260 - RNA, 19 nt, Artificial Sequence
  Description of Artificial Sequence: Synthetic oligonucleotide
auuuggaagucaguauuuc

SEQ ID NO: 3186261 - RNA, 19 nt, Artificial Sequence
  Description of Artificial Sequence: Synthetic oligonucleotide
uauuuggaagucaguauuu

SEQ ID NO: 3186262 - RNA, 19 nt, Artificial Sequence
  Description of Artificial Sequence: Synthetic oligonucleotide
auauuucuggaucgaucuc

SEQ ID NO: 3186263 - RNA, 19 nt, Artificial Sequence
  Description of Artificial Sequence: Synthetic oligonucleotide
uuggaggggacaacgcugc

SEQ ID NO: 3186264 - RNA, 19 nt, Artificial Sequence
  Description of Artificial Sequence: Synthetic oligonucleotide
acauauuucuggaucgauc

SEQ ID NO: 3186265 - RNA, 19 nt, Artificial Sequence
  Description of Artificial Sequence: Synthetic oligonucleotide
uucuccaacugauacccga

SEQ ID NO: 3186266 - RNA, 19 nt, Artificial Sequence
  Description of Artificial Sequence: Synthetic oligonucleotide
uaaacucagucacgaaggu

SEQ ID NO: 3186267 - RNA, 19 nt, Artificial Sequence
  Description of Artificial Sequence: Synthetic oligonucleotide
auacccaugacuggugagg

SEQ ID NO: 3186268 - RNA, 19 nt, Artificial Sequence
  Description of Artificial Sequence: Synthetic oligonucleotide
ucuggaucgaucucguuuu

SEQ ID NO: 3186269 - RNA, 19 nt, Artificial Sequence
  Description of Artificial Sequence: Synthetic oligonucleotide
guucuaaccagauugcaua

SEQ ID NO: 3186270 - RNA, 19 nt, Artificial Sequence
  Description of Artificial Sequence: Synthetic oligonucleotide
guaguauugagaaaagucu

SEQ ID NO: 3186271 - RNA, 19 nt, Artificial Sequence
  Description of Artificial Sequence: Synthetic oligonucleotide
uaaucuuagaagcugaucc

SEQ ID NO: 3186272 - RNA, 19 nt, Artificial Sequence
  Description of Artificial Sequence: Synthetic oligonucleotide
gaugaaguaaccgagaccc

SEQ ID NO: 3186273 - RNA, 19 nt, Artificial Sequence
  Description of Artificial Sequence: Synthetic oligonucleotide
ugcauguuuacacagauga

SEQ ID NO: 3186274 - RNA, 19 nt, Artificial Sequence
  Description of Artificial Sequence: Synthetic oligonucleotide
aagguaggcauauucaggg

SEQ ID NO: 3186275 - RNA, 19 nt, Artificial Sequence
  Description of Artificial Sequence: Synthetic oligonucleotide
auuucuguaaucuuagaag

SEQ ID NO: 3186276 - RNA, 19 nt, Artificial Sequence
  Description of Artificial Sequence: Synthetic oligonucleotide
aacugaggcuuacugagcc

SEQ ID NO: 3186277 - RNA, 19 nt, Artificial Sequence
  Description of Artificial Sequence: Synthetic oligonucleotide
uuucuguaaucuuagaagc

SEQ ID NO: 3186278 - RNA, 19 nt, Artificial Sequence
  Description of Artificial Sequence: Synthetic oligonucleotide
aacgauacaaccaacagga

SEQ ID NO: 3186279 - RNA, 19 nt, Artificial Sequence
  Description of Artificial Sequence: Synthetic oligonucleotide
aaucuuagaagcugauccg

SEQ ID NO: 3186280 - RNA, 19 nt, Artificial Sequence
  Description of Artificial Sequence: Synthetic oligonucleotide
ugguccauugccuuuaugg

SEQ ID NO: 3186281 - RNA, 19 nt, Artificial Sequence
  Description of Artificial Sequence: Synthetic oligonucleotide
ugagccauucuccuaaccg

SEQ ID NO: 3186282 - RNA, 19 nt, Artificial Sequence
  Description of Artificial Sequence: Synthetic oligonucleotide
gaacgauacaaccaacagg

SEQ ID NO: 3186283 - RNA, 19 nt, Artificial Sequence
  Description of Artificial Sequence: Synthetic oligonucleotide
cuuucugaacgauacaacc

SEQ ID NO: 3186284 - RNA, 19 nt, Artificial Sequence
  Description of Artificial Sequence: Synthetic oligonucleotide
agaacugaggcuuacugag

SEQ ID NO: 3186285 - RNA, 19 nt, Artificial Sequence
  Description of Artificial Sequence: Synthetic oligonucleotide
uucauuucuguaaucuuag

SEQ ID NO: 3186286 - RNA, 19 nt, Artificial Sequence
  Description of Artificial Sequence: Synthetic oligonucleotide
ugaacgauacaaccaacag

SEQ ID NO: 3186287 - RNA, 19 nt, Artificial Sequence
  Description of Artificial Sequence: Synthetic oligonucleotide
uuuacacagaugaaguaac

SEQ ID NO: 3186288 - RNA, 19 nt, Artificial Sequence
  Description of Artificial Sequence: Synthetic oligonucleotide
gaacauugcauguuuacac

SEQ ID NO: 3186289 - RNA, 19 nt, Artificial Sequence
  Description of Artificial Sequence: Synthetic oligonucleotide
aaucuucacagccugguga

SEQ ID NO: 3186290 - RNA, 19 nt, Artificial Sequence
  Description of Artificial Sequence: Synthetic oligonucleotide
gacaauagucuacugcagg

SEQ ID NO: 3186291 - RNA, 19 nt, Artificial Sequence
  Description of Artificial Sequence: Synthetic oligonucleotide
auucagggaaucuucacag

SEQ ID NO: 3186292 - RNA, 19 nt, Artificial Sequence
  Description of Artificial Sequence: Synthetic oligonucleotide
gauacaaccaacaggacuc

SEQ ID NO: 3186293 - RNA, 19 nt, Artificial Sequence
  Description of Artificial Sequence: Synthetic oligonucleotide
cagacuucagaacugaggc

SEQ ID NO: 3186294 - RNA, 19 nt, Artificial Sequence
  Description of Artificial Sequence: Synthetic oligonucleotide
ugaagguaggcauauucag

SEQ ID NO: 3186295 - RNA, 19 nt, Artificial Sequence
  Description of Artificial Sequence: Synthetic oligonucleotide
ucagggaaucuucacagcc

SEQ ID NO: 3186296 - RNA, 19 nt, Artificial Sequence
  Description of Artificial Sequence: Synthetic oligonucleotide
agaugaaguaaccgagacc

SEQ ID NO: 3186297 - RNA, 19 nt, Artificial Sequence
  Description of Artificial Sequence: Synthetic oligonucleotide
aauagucuacugcaggagu

SEQ ID NO: 3186298 - RNA, 19 nt, Artificial Sequence
  Description of Artificial Sequence: Synthetic oligonucleotide
aagcugauccgugagcugc

SEQ ID NO: 3186299 - RNA, 19 nt, Artificial Sequence
  Description of Artificial Sequence: Synthetic oligonucleotide
uuucugaacgauacaacca

SEQ ID NO: 3186300 - RNA, 19 nt, Artificial Sequence
  Description of Artificial Sequence: Synthetic oligonucleotide
uauucagggaaucuucaca

SEQ ID NO: 3186301 - RNA, 19 nt, Artificial Sequence
  Description of Artificial Sequence: Synthetic oligonucleotide
cauguuuacacagaugaag

SEQ ID NO: 3186302 - RNA, 19 nt, Artificial Sequence
  Description of Artificial Sequence: Synthetic oligonucleotide
aacauugcauguuuacaca

SEQ ID NO: 3186303 - RNA, 19 nt, Artificial Sequence
  Description of Artificial Sequence: Synthetic oligonucleotide
ucagaacugaggcuuacug

SEQ ID NO: 3186304 - RNA, 19 nt, Artificial Sequence
  Description of Artificial Sequence: Synthetic oligonucleotide
uacacagaugaaguaaccg

SEQ ID NO: 3186305 - RNA, 19 nt, Artificial Sequence
  Description of Artificial Sequence: Synthetic oligonucleotide
uuagaagcugauccgugag

SEQ ID NO: 3186306 - RNA, 19 nt, Artificial Sequence
  Description of Artificial Sequence: Synthetic oligonucleotide
ugggacaauagucuacugc

SEQ ID NO: 3186307 - RNA, 19 nt, Artificial Sequence
  Description of Artificial Sequence: Synthetic oligonucleotide
aggaacauugcauguuuac

SEQ ID NO: 3186308 - RNA, 19 nt, Artificial Sequence
  Description of Artificial Sequence: Synthetic oligonucleotide
ucuguaaucuuagaagcug

SEQ ID NO: 3186309 - RNA, 19 nt, Artificial Sequence
  Description of Artificial Sequence: Synthetic oligonucleotide
gaugcuuucugaacgauac

SEQ ID NO: 3186310 - RNA, 19 nt, Artificial Sequence
  Description of Artificial Sequence: Synthetic oligonucleotide
ucuaguucauuucuguaau

SEQ ID NO: 3186311 - RNA, 19 nt, Artificial Sequence
  Description of Artificial Sequence: Synthetic oligonucleotide
aaccaacaggacuccagac

SEQ ID NO: 3186312 - RNA, 19 nt, Artificial Sequence
  Description of Artificial Sequence: Synthetic oligonucleotide
uucugaacgauacaaccaa

SEQ ID NO: 3186313 - RNA, 19 nt, Artificial Sequence
  Description of Artificial Sequence: Synthetic oligonucleotide
uccauugccuuuaugggac

SEQ ID NO: 3186314 - RNA, 19 nt, Artificial Sequence
  Description of Artificial Sequence: Synthetic oligonucleotide
auauucagggaaucuucac

SEQ ID NO: 3186315 - RNA, 19 nt, Artificial Sequence
  Description of Artificial Sequence: Synthetic oligonucleotide
cacagaugaaguaaccgag

SEQ ID NO: 3186316 - RNA, 19 nt, Artificial Sequence
  Description of Artificial Sequence: Synthetic oligonucleotide
gagccauucuccuaaccgg

SEQ ID NO: 3186317 - RNA, 19 nt, Artificial Sequence
  Description of Artificial Sequence: Synthetic oligonucleotide
ugcaggagugucuaguuca

SEQ ID NO: 3186318 - RNA, 19 nt, Artificial Sequence
  Description of Artificial Sequence: Synthetic oligonucleotide
acauugcauguuuacacag

SEQ ID NO: 3186319 - RNA, 19 nt, Artificial Sequence
  Description of Artificial Sequence: Synthetic oligonucleotide
gaagguaggcauauucagg

SEQ ID NO: 3186320 - RNA, 19 nt, Artificial Sequence
  Description of Artificial Sequence: Synthetic oligonucleotide
acacagaugaaguaaccga

SEQ ID NO: 3186321 - RNA, 19 nt, Artificial Sequence
  Description of Artificial Sequence: Synthetic oligonucleotide
uauuacugguccauugccu

SEQ ID NO: 3186322 - RNA, 19 nt, Artificial Sequence
  Description of Artificial Sequence: Synthetic oligonucleotide
acuucaugaagguaggcau

SEQ ID NO: 3186323 - RNA, 19 nt, Artificial Sequence
  Description of Artificial Sequence: Synthetic oligonucleotide
acaauagucuacugcagga

SEQ ID NO: 3186324 - RNA, 19 nt, Artificial Sequence
  Description of Artificial Sequence: Synthetic oligonucleotide
uuacacagaugaaguaacc

SEQ ID NO: 3186325 - RNA, 19 nt, Artificial Sequence
  Description of Artificial Sequence: Synthetic oligonucleotide
ugaaguaaccgagacccag

SEQ ID NO: 3186326 - RNA, 19 nt, Artificial Sequence
  Description of Artificial Sequence: Synthetic oligonucleotide
caugaagguaggcauauuc

SEQ ID NO: 3186327 - RNA, 19 nt, Artificial Sequence
  Description of Artificial Sequence: Synthetic oligonucleotide
uucuguaaucuuagaagcu

SEQ ID NO: 3186328 - RNA, 19 nt, Artificial Sequence
  Description of Artificial Sequence: Synthetic oligonucleotide
aaccggguacuucaugaag

SEQ ID NO: 3186329 - RNA, 19 nt, Artificial Sequence
  Description of Artificial Sequence: Synthetic oligonucleotide
uggugaggaacauugcaug

SEQ ID NO: 3186330 - RNA, 19 nt, Artificial Sequence
  Description of Artificial Sequence: Synthetic oligonucleotide
uaguucauuucuguaaucu

SEQ ID NO: 3186331 - RNA, 19 nt, Artificial Sequence
  Description of Artificial Sequence: Synthetic oligonucleotide
ucuuagaagcugauccgug

SEQ ID NO: 3186332 - RNA, 19 nt, Artificial Sequence
  Description of Artificial Sequence: Synthetic oligonucleotide
uuaugggacaauagucuac

SEQ ID NO: 3186333 - RNA, 19 nt, Artificial Sequence
  Description of Artificial Sequence: Synthetic oligonucleotide
auugcauguuuacacagau

SEQ ID NO: 3186334 - RNA, 19 nt, Artificial Sequence
  Description of Artificial Sequence: Synthetic oligonucleotide
uuuaugggacaauagucua

SEQ ID NO: 3186335 - RNA, 19 nt, Artificial Sequence
  Description of Artificial Sequence: Synthetic oligonucleotide
ugagcugccaugaugcuuu

SEQ ID NO: 3186336 - RNA, 19 nt, Artificial Sequence
  Description of Artificial Sequence: Synthetic oligonucleotide
aucuucacagccuggugag

SEQ ID NO: 3186337 - RNA, 19 nt, Artificial Sequence
  Description of Artificial Sequence: Synthetic oligonucleotide
uacugagccauucuccuaa

SEQ ID NO: 3186338 - RNA, 19 nt, Artificial Sequence
  Description of Artificial Sequence: Synthetic oligonucleotide
uacuucaugaagguaggca

SEQ ID NO: 3186339 - RNA, 19 nt, Artificial Sequence
  Description of Artificial Sequence: Synthetic oligonucleotide
uaugggacaauagucuacu

SEQ ID NO: 3186340 - RNA, 19 nt, Artificial Sequence
  Description of Artificial Sequence: Synthetic oligonucleotide
ugccuuuaugggacaauag

SEQ ID NO: 3186341 - RNA, 19 nt, Artificial Sequence
  Description of Artificial Sequence: Synthetic oligonucleotide
ugcuuucugaacgauacaa

SEQ ID NO: 3186342 - RNA, 19 nt, Artificial Sequence
  Description of Artificial Sequence: Synthetic oligonucleotide
cagaugaaguaaccgagac

SEQ ID NO: 3186343 - RNA, 19 nt, Artificial Sequence
  Description of Artificial Sequence: Synthetic oligonucleotide
ugaggaacauugcauguuu

SEQ ID NO: 3186344 - RNA, 19 nt, Artificial Sequence
  Description of Artificial Sequence: Synthetic oligonucleotide
gguccauugccuuuauggg

SEQ ID NO: 3186345 - RNA, 19 nt, Artificial Sequence
  Description of Artificial Sequence: Synthetic oligonucleotide
auguuuacacagaugaagu

SEQ ID NO: 3186346 - RNA, 19 nt, Artificial Sequence
  Description of Artificial Sequence: Synthetic oligonucleotide
uguaaucuuagaagcugau

SEQ ID NO: 3186347 - RNA, 19 nt, Artificial Sequence
  Description of Artificial Sequence: Synthetic oligonucleotide
uagaagcugauccgugagc

SEQ ID NO: 3186348 - RNA, 19 nt, Artificial Sequence
  Description of Artificial Sequence: Synthetic oligonucleotide
ggguacuucaugaagguag

SEQ ID NO: 3186349 - RNA, 19 nt, Artificial Sequence
  Description of Artificial Sequence: Synthetic oligonucleotide
cuuuaugggacaauagucu

SEQ ID NO: 3186350 - RNA, 19 nt, Artificial Sequence
  Description of Artificial Sequence: Synthetic oligonucleotide
accaacaggacuccagacu

SEQ ID NO: 3186351 - RNA, 19 nt, Artificial Sequence
  Description of Artificial Sequence: Synthetic oligonucleotide
agggaaucuucacagccug

SEQ ID NO: 3186352 - RNA, 19 nt, Artificial Sequence
  Description of Artificial Sequence: Synthetic oligonucleotide
aaguaaccgagacccagaa

SEQ ID NO: 3186353 - RNA, 19 nt, Artificial Sequence
  Description of Artificial Sequence: Synthetic oligonucleotide
uguuuacacagaugaagua

SEQ ID NO: 3186354 - RNA, 19 nt, Artificial Sequence
  Description of Artificial Sequence: Synthetic oligonucleotide
gggacaauagucuacugca

SEQ ID NO: 3186355 - RNA, 19 nt, Artificial Sequence
  Description of Artificial Sequence: Synthetic oligonucleotide
cauuucuguaaucuuagaa

SEQ ID NO: 3186356 - RNA, 19 nt, Artificial Sequence
  Description of Artificial Sequence: Synthetic oligonucleotide
ucugaacgauacaaccaac

SEQ ID NO: 3186357 - RNA, 19 nt, Artificial Sequence
  Description of Artificial Sequence: Synthetic oligonucleotide
cuaaccggguacuucauga

SEQ ID NO: 3186358 - RNA, 19 nt, Artificial Sequence
  Description of Artificial Sequence: Synthetic oligonucleotide
uccgugagcugccaugaug

SEQ ID NO: 3186359 - RNA, 19 nt, Artificial Sequence
  Description of Artificial Sequence: Synthetic oligonucleotide
ugauccgugagcugccaug

SEQ ID NO: 3186360 - RNA, 19 nt, Artificial Sequence
  Description of Artificial Sequence: Synthetic oligonucleotide
ccaugaugcuuucugaacg

SEQ ID NO: 3186361 - RNA, 19 nt, Artificial Sequence
  Description of Artificial Sequence: Synthetic oligonucleotide
accggguacuucaugaagg

SEQ ID NO: 3186362 - RNA, 19 nt, Artificial Sequence
  Description of Artificial Sequence: Synthetic oligonucleotide
aggagugucuaguucauuu

SEQ ID NO: 3186363 - RNA, 19 nt, Artificial Sequence
  Description of Artificial Sequence: Synthetic oligonucleotide
agaagcugauccgugagcu

SEQ ID NO: 3186364 - RNA, 19 nt, Artificial Sequence
  Description of Artificial Sequence: Synthetic oligonucleotide
aacaggacuccagacuuca

SEQ ID NO: 3186365 - RNA, 19 nt, Artificial Sequence
  Description of Artificial Sequence: Synthetic oligonucleotide
guuuacacagaugaaguaa

SEQ ID NO: 3186366 - RNA, 19 nt, Artificial Sequence
  Description of Artificial Sequence: Synthetic oligonucleotide
gacuccagacuucagaacu

SEQ ID NO: 3186367 - RNA, 19 nt, Artificial Sequence
  Description of Artificial Sequence: Synthetic oligonucleotide
auuacugguccauugccuu

SEQ ID NO: 3186368 - RNA, 19 nt, Artificial Sequence
  Description of Artificial Sequence: Synthetic oligonucleotide
gucuaguucauuucuguaa

SEQ ID NO: 3186369 - RNA, 19 nt, Artificial Sequence
  Description of Artificial Sequence: Synthetic oligonucleotide
uugcauguuuacacagaug

SEQ ID NO: 3186370 - RNA, 19 nt, Artificial Sequence
  Description of Artificial Sequence: Synthetic oligonucleotide
auacaaccaacaggacucc

SEQ ID NO: 3186371 - RNA, 19 nt, Artificial Sequence
  Description of Artificial Sequence: Synthetic oligonucleotide
aaucuugcagaauuaauac

SEQ ID NO: 3186372 - RNA, 19 nt, Artificial Sequence
  Description of Artificial Sequence: Synthetic oligonucleotide
  modified_base (7)..(7): a, c, u, g, unknown or other
  modified_base (10)..(10): a, c, u, g, unknown or other
acuuuunuunuucuucuuc

SEQ ID NO: 3186373 - RNA, 19 nt, Artificial Sequence
  Description of Artificial Sequence: Synthetic oligonucleotide
agaaagguuucucaggucc

SEQ ID NO: 3186374 - RNA, 19 nt, Artificial Sequence
  Description of Artificial Sequence: Synthetic oligonucleotide
uauguagucauccuggcag

SEQ ID NO: 3186375 - RNA, 19 nt, Artificial Sequence
  Description of Artificial Sequence: Synthetic oligonucleotide
aauaccauuucuuugugga

SEQ ID NO: 3186376 - RNA, 19 nt, Artificial Sequence
  Description of Artificial Sequence: Synthetic oligonucleotide
uguggagagagaaagcugg

SEQ ID NO: 3186377 - RNA, 19 nt, Artificial Sequence
  Description of Artificial Sequence: Synthetic oligonucleotide
aauuaauaccauuucuuug

SEQ ID NO: 3186378 - RNA, 19 nt, Artificial Sequence
  Description of Artificial Sequence: Synthetic oligonucleotide
ucuugcagaauuaauacca

SEQ ID NO: 3186379 - RNA, 19 nt, Artificial Sequence
  Description of Artificial Sequence: Synthetic oligonucleotide
aucggugaaaacuucaugg

SEQ ID NO: 3186380 - RNA, 19 nt, Artificial Sequence
  Description of Artificial Sequence: Synthetic oligonucleotide
gaagccgugggauacaucg

SEQ ID NO: 3186381 - RNA, 19 nt, Artificial Sequence
  Description of Artificial Sequence: Synthetic oligonucleotide
auuaauaccauuucuuugu

SEQ ID NO: 3186382 - RNA, 19 nt, Artificial Sequence
  Description of Artificial Sequence: Synthetic oligonucleotide
  modified_base (4)..(4): a, c, u, g, unknown or other
  modified_base (7)..(7): a, c, u, g, unknown or other
uuunuunuucuucuucuuc

SEQ ID NO: 3186383 - RNA, 19 nt, Artificial Sequence
  Description of Artificial Sequence: Synthetic oligonucleotide
  modified_base (2)..(2): a, c, u, g, unknown or other
  modified_base (6)..(6): a, c, u, g, unknown or other
  modified_base (11)..(11): a, c, u, g, unknown or other
  modified_base (16)..(16): a, c, u, g, unknown or other
anaggnaggcnguagngau

SEQ ID NO: 3186384 - RNA, 19 nt, Artificial Sequence
  Description of Artificial Sequence: Synthetic oligonucleotide
aaaacuucauggcagauuu

SEQ ID NO: 3186385 - RNA, 19 nt, Artificial Sequence
  Description of Artificial Sequence: Synthetic oligonucleotide
ucuucuucuucuucgaagg

SEQ ID NO: 3186386 - RNA, 19 nt, Artificial Sequence
  Description of Artificial Sequence: Synthetic oligonucleotide
aguaauagggucuaagacu

SEQ ID NO: 3186387 - RNA, 19 nt, Artificial Sequence
  Description of Artificial Sequence: Synthetic oligonucleotide
  modified_base (17)..(17): a, c, u, g, unknown or other
ucgauugcaaggcacanag

SEQ ID NO: 3186388 - RNA, 19 nt, Artificial Sequence
  Description of Artificial Sequence: Synthetic oligonucleotide
aacugagccgcuuuucucg

SEQ ID NO: 3186389 - RNA, 19 nt, Artificial Sequence
  Description of Artificial Sequence: Synthetic oligonucleotide
acuaguagugccuuugggg

SEQ ID NO: 3186390 - RNA, 19 nt, Artificial Sequence
  Description of Artificial Sequence: Synthetic oligonucleotide
cauccuggcaguaauaggg

SEQ ID NO: 3186391 - RNA, 19 nt, Artificial Sequence
  Description of Artificial Sequence: Synthetic oligonucleotide
  modified_base (13)..(13): a, c, u, g, unknown or other
  modified_base (17)..(17): a, c, u, g, unknown or other
uugcaaggcacanaggnag

SEQ ID NO: 3186392 - RNA, 19 nt, Artificial Sequence
  Description of Artificial Sequence: Synthetic oligonucleotide
ugguauguagucauccugg

SEQ ID NO: 3186393 - RNA, 19 nt, Artificial Sequence
  Description of Artificial Sequence: Synthetic oligonucleotide
cucauaggcacauagcugc

SEQ ID NO: 3186394 - RNA, 19 nt, Artificial Sequence
  Description of Artificial Sequence: Synthetic oligonucleotide
  modified_base (3)..(3): a, c, u, g, unknown or other
  modified_base (6)..(6): a, c, u, g, unknown or other
uunuunuucuucuucuucu

SEQ ID NO: 3186395 - RNA, 19 nt, Artificial Sequence
  Description of Artificial Sequence: Synthetic oligonucleotide
ucuuuguggagagagaaag

SEQ ID NO: 3186396 - RNA, 19 nt, Artificial Sequence
  Description of Artificial Sequence: Synthetic oligonucleotide
  modified_base (15)..(15): a, c, u, g, unknown or other
  modified_base (19)..(19): a, c, u, g, unknown or other
gauugcaaggcacanaggn

SEQ ID NO: 3186397 - RNA, 19 nt, Artificial Sequence
  Description of Artificial Sequence: Synthetic oligonucleotide
uuucucagguccaagggag

SEQ ID NO: 3186398 - RNA, 19 nt, Artificial Sequence
  Description of Artificial Sequence: Synthetic oligonucleotide
aucuugcagaauuaauacc

SEQ ID NO: 3186399 - RNA, 19 nt, Artificial Sequence
  Description of Artificial Sequence: Synthetic oligonucleotide
uucuucuucuucuucuucg

SEQ ID NO: 3186400 - RNA, 19 nt, Artificial Sequence
  Description of Artificial Sequence: Synthetic oligonucleotide
aaugguagaaagguuucuc

SEQ ID NO: 3186401 - RNA, 19 nt, Artificial Sequence
  Description of Artificial Sequence: Synthetic oligonucleotide
gagagagaaagcugguucg

SEQ ID NO: 3186402 - RNA, 19 nt, Artificial Sequence
  Description of Artificial Sequence: Synthetic oligonucleotide
cuaguagugccuuuggggc

SEQ ID NO: 3186403 - RNA, 19 nt, Artificial Sequence
  Description of Artificial Sequence: Synthetic oligonucleotide
cuucauggcagauuuaaac

SEQ ID NO: 3186404 - RNA, 19 nt, Artificial Sequence
  Description of Artificial Sequence: Synthetic oligonucleotide
aguggcaaaaucuugcaga

SEQ ID NO: 3186405 - RNA, 19 nt, Artificial Sequence
  Description of Artificial Sequence: Synthetic oligonucleotide
uucauggcagauuuaaacu

SEQ ID NO: 3186406 - RNA, 19 nt, Artificial Sequence
  Description of Artificial Sequence: Synthetic oligonucleotide
  modified_base (3)..(3): a, c, u, g, unknown or other
uunuucuucuucuucuucu

SEQ ID NO: 3186407 - RNA, 19 nt, Artificial Sequence
  Description of Artificial Sequence: Synthetic oligonucleotide
ucauggcagauuuaaacug

SEQ ID NO: 3186408 - RNA, 19 nt, Artificial Sequence
  Description of Artificial Sequence: Synthetic oligonucleotide
gagaaagcugguucgauug

SEQ ID NO: 3186409 - RNA, 19 nt, Artificial Sequence
  Description of Artificial Sequence: Synthetic oligonucleotide
ugcagaauuaauaccauuu

SEQ ID NO: 3186410 - RNA, 19 nt, Artificial Sequence
  Description of Artificial Sequence: Synthetic oligonucleotide
uucuccaaugguagaaagg

SEQ ID NO: 3186411 - RNA, 19 nt, Artificial Sequence
  Description of Artificial Sequence: Synthetic oligonucleotide
cagauuuaaacugagccgc

SEQ ID NO: 3186412 - RNA, 19 nt, Artificial Sequence
  Description of Artificial Sequence: Synthetic oligonucleotide
ggcagauuuaaacugagcc

SEQ ID NO: 3186413 - RNA, 19 nt, Artificial Sequence
  Description of Artificial Sequence: Synthetic oligonucleotide
  modified_base (12)..(12): a, c, u, g, unknown or other
  modified_base (16)..(16): a, c, u, g, unknown or other
ugcaaggcacanaggnagg

SEQ ID NO: 3186414 - RNA, 19 nt, Artificial Sequence
  Description of Artificial Sequence: Synthetic oligonucleotide
auagcugcugucuucagca

SEQ ID NO: 3186415 - RNA, 19 nt, Artificial Sequence
  Description of Artificial Sequence: Synthetic oligonucleotide
gauguguguucuccaaugg

SEQ ID NO: 3186416 - RNA, 19 nt, Artificial Sequence
  Description of Artificial Sequence: Synthetic oligonucleotide
ucuaagacuaguagugccu

SEQ ID NO: 3186417 - RNA, 19 nt, Artificial Sequence
  Description of Artificial Sequence: Synthetic oligonucleotide
ucuucuucgaaggaguggc

SEQ ID NO: 3186418 - RNA, 19 nt, Artificial Sequence
  Description of Artificial Sequence: Synthetic oligonucleotide
aaaucuugcagaauuaaua

SEQ ID NO: 3186419 - RNA, 19 nt, Artificial Sequence
  Description of Artificial Sequence: Synthetic oligonucleotide
uuuguggagagagaaagcu

SEQ ID NO: 3186420 - RNA, 19 nt, Artificial Sequence
  Description of Artificial Sequence: Synthetic oligonucleotide
aaacugagccgcuuuucuc

SEQ ID NO: 3186421 - RNA, 19 nt, Artificial Sequence
  Description of Artificial Sequence: Synthetic oligonucleotide
uaauaccauuucuuugugg

SEQ ID NO: 3186422 - RNA, 19 nt, Artificial Sequence
  Description of Artificial Sequence: Synthetic oligonucleotide
uagggucuaagacuaguag

SEQ ID NO: 3186423 - RNA, 19 nt, Artificial Sequence
  Description of Artificial Sequence: Synthetic oligonucleotide
ucuccaaugguagaaaggu

SEQ ID NO: 3186424 - RNA, 19 nt, Artificial Sequence
  Description of Artificial Sequence: Synthetic oligonucleotide
ucuucuucuucgaaggagu

SEQ ID NO: 3186425 - RNA, 19 nt, Artificial Sequence
  Description of Artificial Sequence: Synthetic oligonucleotide
agcucauugguauguaguc

SEQ ID NO: 3186426 - RNA, 19 nt, Artificial Sequence
  Description of Artificial Sequence: Synthetic oligonucleotide
uccaaugguagaaagguuu

SEQ ID NO: 3186427 - RNA, 19 nt, Artificial Sequence
  Description of Artificial Sequence: Synthetic oligonucleotide
cugucuucagcacugagug

SEQ ID NO: 3186428 - RNA, 19 nt, Artificial Sequence
  Description of Artificial Sequence: Synthetic oligonucleotide
ugguagaaagguuucucag

SEQ ID NO: 3186429 - RNA, 19 nt, Artificial Sequence
  Description of Artificial Sequence: Synthetic oligonucleotide
uugguauguagucauccug

SEQ ID NO: 3186430 - RNA, 19 nt, Artificial Sequence
  Description of Artificial Sequence: Synthetic oligonucleotide
ucagcacugagugaagccg

SEQ ID NO: 3186431 - RNA, 19 nt, Artificial Sequence
  Description of Artificial Sequence: Synthetic oligonucleotide
uuaauaccauuucuuugug

SEQ ID NO: 3186432 - RNA, 19 nt, Artificial Sequence
  Description of Artificial Sequence: Synthetic oligonucleotide
cauuucuuuguggagagag

SEQ ID NO: 3186433 - RNA, 19 nt, Artificial Sequence
  Description of Artificial Sequence: Synthetic oligonucleotide
agaaagcugguucgauugc

SEQ ID NO: 3186434 - RNA, 19 nt, Artificial Sequence
  Description of Artificial Sequence: Synthetic oligonucleotide
gcagauuuaaacugagccg

SEQ ID NO: 3186435 - RNA, 19 nt, Artificial Sequence
  Description of Artificial Sequence: Synthetic oligonucleotide
ucuggcagcaugcuugagc

SEQ ID NO: 3186436 - RNA, 19 nt, Artificial Sequence
  Description of Artificial Sequence: Synthetic oligonucleotide
uaaacugagccgcuuuucu

SEQ ID NO: 3186437 - RNA, 19 nt, Artificial Sequence
  Description of Artificial Sequence: Synthetic oligonucleotide
aacucuggcagcaugcuug

SEQ ID NO: 3186438 - RNA, 19 nt, Artificial Sequence
  Description of Artificial Sequence: Synthetic oligonucleotide
aggaguggcaaaaucuugc

SEQ ID NO: 3186439 - RNA, 19 nt, Artificial Sequence
  Description of Artificial Sequence: Synthetic oligonucleotide
agcugguucgauugcaagg

SEQ ID NO: 3186440 - RNA, 19 nt, Artificial Sequence
  Description of Artificial Sequence: Synthetic oligonucleotide
ugagaucucuguucacugg

SEQ ID NO: 3186441 - RNA, 19 nt, Artificial Sequence
  Description of Artificial Sequence: Synthetic oligonucleotide
gaucucuguucacuggagg

SEQ ID NO: 3186442 - RNA, 19 nt, Artificial Sequence
  Description of Artificial Sequence: Synthetic oligonucleotide
uguguguucuccaauggua

SEQ ID NO: 3186443 - RNA, 19 nt, Artificial Sequence
  Description of Artificial Sequence: Synthetic oligonucleotide
caguaauagggucuaagac

SEQ ID NO: 3186444 - RNA, 19 nt, Artificial Sequence
  Description of Artificial Sequence: Synthetic oligonucleotide
ucggugaaaacuucauggc

SEQ ID NO: 3186445 - RNA, 19 nt, Artificial Sequence
  Description of Artificial Sequence: Synthetic oligonucleotide
  modified_base (9)..(9): a, c, u, g, unknown or other
  modified_base (13)..(13): a, c, u, g, unknown or other
  modified_base (18)..(18): a, c, u, g, unknown or other
aaggcacanaggnaggcng

SEQ ID NO: 3186446 - RNA, 19 nt, Artificial Sequence
  Description of Artificial Sequence: Synthetic oligonucleotide
gguagaaagguuucucagg

SEQ ID NO: 3186447 - RNA, 19 nt, Artificial Sequence
  Description of Artificial Sequence: Synthetic oligonucleotide
uucuucuucuucuucuucu

SEQ ID NO: 3186448 - RNA, 19 nt, Artificial Sequence
  Description of Artificial Sequence: Synthetic oligonucleotide
agguuucucagguccaagg

SEQ ID NO: 3186449 - RNA, 19 nt, Artificial Sequence
  Description of Artificial Sequence: Synthetic oligonucleotide
uuucuuuguggagagagaa

SEQ ID NO: 3186450 - RNA, 19 nt, Artificial Sequence
  Description of Artificial Sequence: Synthetic oligonucleotide
  modified_base (4)..(4): a, c, u, g, unknown or other
  modified_base (9)..(9): a, c, u, g, unknown or other
  modified_base (14)..(14): a, c, u, g, unknown or other
aggnaggcnguagngaugu

SEQ ID NO: 3186451 - RNA, 19 nt, Artificial Sequence
  Description of Artificial Sequence: Synthetic oligonucleotide
uacaucggugaaaacuuca

SEQ ID NO: 3186452 - RNA, 19 nt, Artificial Sequence
  Description of Artificial Sequence: Synthetic oligonucleotide
ucagguccaagggaggugg

SEQ ID NO: 3186453 - RNA, 19 nt, Artificial Sequence
  Description of Artificial Sequence: Synthetic oligonucleotide
uugagaucucuguucacug

SEQ ID NO: 3186454 - RNA, 19 nt, Artificial Sequence
  Description of Artificial Sequence: Synthetic oligonucleotide
aacuucauggcagauuuaa

SEQ ID NO: 3186455 - RNA, 19 nt, Artificial Sequence
  Description of Artificial Sequence: Synthetic oligonucleotide
ucauccuggcaguaauagg

SEQ ID NO: 3186456 - RNA, 19 nt, Artificial Sequence
  Description of Artificial Sequence: Synthetic oligonucleotide
aauagggucuaagacuagu

SEQ ID NO: 3186457 - RNA, 19 nt, Artificial Sequence
  Description of Artificial Sequence: Synthetic oligonucleotide
gacuaguagugccuuuggg

SEQ ID NO: 3186458 - RNA, 19 nt, Artificial Sequence
  Description of Artificial Sequence: Synthetic oligonucleotide
aagacuaguagugccuuug

SEQ ID NO: 3186459 - RNA, 19 nt, Artificial Sequence
  Description of Artificial Sequence: Synthetic oligonucleotide
gucuaagacuaguagugcc

SEQ ID NO: 3186460 - RNA, 19 nt, Artificial Sequence
  Description of Artificial Sequence: Synthetic oligonucleotide
accauuucuuuguggagag

SEQ ID NO: 3186461 - RNA, 19 nt, Artificial Sequence
  Description of Artificial Sequence: Synthetic oligonucleotide
cugcagguaacucuggcag

SEQ ID NO: 3186462 - RNA, 19 nt, Artificial Sequence
  Description of Artificial Sequence: Synthetic oligonucleotide
uucuucuucuucgaaggag

SEQ ID NO: 3186463 - RNA, 19 nt, Artificial Sequence
  Description of Artificial Sequence: Synthetic oligonucleotide
agggucuaagacuaguagu

SEQ ID NO: 3186464 - RNA, 19 nt, Artificial Sequence
  Description of Artificial Sequence: Synthetic oligonucleotide
cauugguauguagucaucc

SEQ ID NO: 3186465 - RNA, 19 nt, Artificial Sequence
  Description of Artificial Sequence: Synthetic oligonucleotide
aagcugguucgauugcaag

SEQ ID NO: 3186466 - RNA, 19 nt, Artificial Sequence
  Description of Artificial Sequence: Synthetic oligonucleotide
uuguggagagagaaagcug

SEQ ID NO: 3186467 - RNA, 19 nt, Artificial Sequence
  Description of Artificial Sequence: Synthetic oligonucleotide
uucagcacugagugaagcc

SEQ ID NO: 3186468 - RNA, 19 nt, Artificial Sequence
  Description of Artificial Sequence: Synthetic oligonucleotide
agaauuaauaccauuucuu

SEQ ID NO: 3186469 - RNA, 19 nt, Artificial Sequence
  Description of Artificial Sequence: Synthetic oligonucleotide
augguagaaagguuucuca

SEQ ID NO: 3186470 - RNA, 19 nt, Artificial Sequence
  Description of Artificial Sequence: Synthetic oligonucleotide
ggugaaaacuucauggcag

SEQ ID NO: 3186471 - RNA, 19 nt, Artificial Sequence
  Description of Artificial Sequence: Synthetic oligonucleotide
aaaauagcgccacacagcc

SEQ ID NO: 3186472 - RNA, 19 nt, Artificial Sequence
  Description of Artificial Sequence: Synthetic oligonucleotide
uauccaaagauauaguucc

SEQ ID NO: 3186473 - RNA, 19 nt, Artificial Sequence
  Description of Artificial Sequence: Synthetic oligonucleotide
aaccagaucagcuccaugg

SEQ ID NO: 3186474 - RNA, 19 nt, Artificial Sequence
  Description of Artificial Sequence: Synthetic oligonucleotide
aagauauaguuccuugugg

SEQ ID NO: 3186475 - RNA, 19 nt, Artificial Sequence
  Description of Artificial Sequence: Synthetic oligonucleotide
ucuaggaauauacaaaagu

SEQ ID NO: 3186476 - RNA, 19 nt, Artificial Sequence
  Description of Artificial Sequence: Synthetic oligonucleotide
uagagcacagcuaugagcc

SEQ ID NO: 3186477 - RNA, 19 nt, Artificial Sequence
  Description of Artificial Sequence: Synthetic oligonucleotide
uauuagucuaggaauauac

SEQ ID NO: 3186478 - RNA, 19 nt, Artificial Sequence
  Description of Artificial Sequence: Synthetic oligonucleotide
cuaggaauauacaaaagug

SEQ ID NO: 3186479 - RNA, 19 nt, Artificial Sequence
  Description of Artificial Sequence: Synthetic oligonucleotide
auaggugggaaccagauca

SEQ ID NO: 3186480 - RNA, 19 nt, Artificial Sequence
  Description of Artificial Sequence: Synthetic oligonucleotide
uuuacaaagccuuugcggu

SEQ ID NO: 3186481 - RNA, 19 nt, Artificial Sequence
  Description of Artificial Sequence: Synthetic oligonucleotide
ucaaacgccagccagguga

SEQ ID NO: 3186482 - RNA, 19 nt, Artificial Sequence
  Description of Artificial Sequence: Synthetic oligonucleotide
ugauguauagcauugccac

SEQ ID NO: 3186483 - RNA, 19 nt, Artificial Sequence
  Description of Artificial Sequence: Synthetic oligonucleotide
auugucaaagagcuucacc

SEQ ID NO: 3186484 - RNA, 19 nt, Artificial Sequence
  Description of Artificial Sequence: Synthetic oligonucleotide
gaaagcaaguagucuaugg

SEQ ID NO: 3186485 - RNA, 19 nt, Artificial Sequence
  Description of Artificial Sequence: Synthetic oligonucleotide
uaggaauauacaaaagugu

SEQ ID NO: 3186486 - RNA, 19 nt, Artificial Sequence
  Description of Artificial Sequence: Synthetic oligonucleotide
uucuuugaaagcaaguagu

SEQ ID NO: 3186487 - RNA, 19 nt, Artificial Sequence
  Description of Artificial Sequence: Synthetic oligonucleotide
aaagcaaguagucuauggu

SEQ ID NO: 3186488 - RNA, 19 nt, Artificial Sequence
  Description of Artificial Sequence: Synthetic oligonucleotide
aaaccaauauacuucuaga

SEQ ID NO: 3186489 - RNA, 19 nt, Artificial Sequence
  Description of Artificial Sequence: Synthetic oligonucleotide
aagcaaguagucuauggug

SEQ ID NO: 3186490 - RNA, 19 nt, Artificial Sequence
  Description of Artificial Sequence: Synthetic oligonucleotide
aguagucucgaaaauagcg

SEQ ID NO: 3186491 - RNA, 19 nt, Artificial Sequence
  Description of Artificial Sequence: Synthetic oligonucleotide
agggccuccauguacaugg

SEQ ID NO: 3186492 - RNA, 19 nt, Artificial Sequence
  Description of Artificial Sequence: Synthetic oligonucleotide
aggcauggaacucagggac

SEQ ID NO: 3186493 - RNA, 19 nt, Artificial Sequence
  Description of Artificial Sequence: Synthetic oligonucleotide
ucugucgucuggaaggccg

SEQ ID NO: 3186494 - RNA, 19 nt, Artificial Sequence
  Description of Artificial Sequence: Synthetic oligonucleotide
augguauccaaagauauag

SEQ ID NO: 3186495 - RNA, 19 nt, Artificial Sequence
  Description of Artificial Sequence: Synthetic oligonucleotide
ucuggaaggccgaauuugg

SEQ ID NO: 3186496 - RNA, 19 nt, Artificial Sequence
  Description of Artificial Sequence: Synthetic oligonucleotide
gaugccuccagacaucaag

SEQ ID NO: 3186497 - RNA, 19 nt, Artificial Sequence
  Description of Artificial Sequence: Synthetic oligonucleotide
aaccaauauacuucuagaa

SEQ ID NO: 3186498 - RNA, 19 nt, Artificial Sequence
  Description of Artificial Sequence: Synthetic oligonucleotide
aauaggugggaaccagauc

SEQ ID NO: 3186499 - RNA, 19 nt, Artificial Sequence
  Description of Artificial Sequence: Synthetic oligonucleotide
uggggcgaaaccaauauac

SEQ ID NO: 3186500 - RNA, 19 nt, Artificial Sequence
  Description of Artificial Sequence: Synthetic oligonucleotide
acugcaggcaauuccuagc

SEQ ID NO: 3186501 - RNA, 19 nt, Artificial Sequence
  Description of Artificial Sequence: Synthetic oligonucleotide
aggucaauguccuucuggg

SEQ ID NO: 3186502 - RNA, 19 nt, Artificial Sequence
  Description of Artificial Sequence: Synthetic oligonucleotide
acucccauucuuugaaagc

SEQ ID NO: 3186503 - RNA, 19 nt, Artificial Sequence
  Description of Artificial Sequence: Synthetic oligonucleotide
agaugcauggggcgaaacc

SEQ ID NO: 3186504 - RNA, 19 nt, Artificial Sequence
  Description of Artificial Sequence: Synthetic oligonucleotide
agauauaguuccuuguggu

SEQ ID NO: 3186505 - RNA, 19 nt, Artificial Sequence
  Description of Artificial Sequence: Synthetic oligonucleotide
aaagccuuugcgguuucgc

SEQ ID NO: 3186506 - RNA, 19 nt, Artificial Sequence
  Description of Artificial Sequence: Synthetic oligonucleotide
gugcugaaguuacagaagg

SEQ ID NO: 3186507 - RNA, 19 nt, Artificial Sequence
  Description of Artificial Sequence: Synthetic oligonucleotide
acaaaagugugacauggca

SEQ ID NO: 3186508 - RNA, 19 nt, Artificial Sequence
  Description of Artificial Sequence: Synthetic oligonucleotide
aaaguguacaugaggauga

SEQ ID NO: 3186509 - RNA, 19 nt, Artificial Sequence
  Description of Artificial Sequence: Synthetic oligonucleotide
agucuaggaauauacaaaa

SEQ ID NO: 3186510 - RNA, 19 nt, Artificial Sequence
  Description of Artificial Sequence: Synthetic oligonucleotide
aggaauauacaaaagugug

SEQ ID NO: 3186511 - RNA, 19 nt, Artificial Sequence
  Description of Artificial Sequence: Synthetic oligonucleotide
uaugccagggaacuucuug

SEQ ID NO: 3186512 - RNA, 19 nt, Artificial Sequence
  Description of Artificial Sequence: Synthetic oligonucleotide
uagucucgaaaauagcgcc

SEQ ID NO: 3186513 - RNA, 19 nt, Artificial Sequence
  Description of Artificial Sequence: Synthetic oligonucleotide
auaggcuuggaguagggca

SEQ ID NO: 3186514 - RNA, 19 nt, Artificial Sequence
  Description of Artificial Sequence: Synthetic oligonucleotide
uauagcauugccacuccca

SEQ ID NO: 3186515 - RNA, 19 nt, Artificial Sequence
  Description of Artificial Sequence: Synthetic oligonucleotide
ucuuugaaagcaaguaguc

SEQ ID NO: 3186516 - RNA, 19 nt, Artificial Sequence
  Description of Artificial Sequence: Synthetic oligonucleotide
cauggaagaugcauggggc

SEQ ID NO: 3186517 - RNA, 19 nt, Artificial Sequence
  Description of Artificial Sequence: Synthetic oligonucleotide
agccaggugaaguagagca

SEQ ID NO: 3186518 - RNA, 19 nt, Artificial Sequence
  Description of Artificial Sequence: Synthetic oligonucleotide
aauagggccuuaugccagg

SEQ ID NO: 3186519 - RNA, 19 nt, Artificial Sequence
  Description of Artificial Sequence: Synthetic oligonucleotide
gaaguuaccagccaaugua

SEQ ID NO: 3186520 - RNA, 19 nt, Artificial Sequence
  Description of Artificial Sequence: Synthetic oligonucleotide
auguauagcauugccacuc

SEQ ID NO: 3186521 - RNA, 19 nt, Artificial Sequence
  Description of Artificial Sequence: Synthetic oligonucleotide
caauguagccaaauagggc

SEQ ID NO: 3186522 - RNA, 19 nt, Artificial Sequence
  Description of Artificial Sequence: Synthetic oligonucleotide
gaaaauagcgccacacagc

SEQ ID NO: 3186523 - RNA, 19 nt, Artificial Sequence
  Description of Artificial Sequence: Synthetic oligonucleotide
caaaagugugacauggcac

SEQ ID NO: 3186524 - RNA, 19 nt, Artificial Sequence
  Description of Artificial Sequence: Synthetic oligonucleotide
acaucaaguacucccgaag

SEQ ID NO: 3186525 - RNA, 19 nt, Artificial Sequence
  Description of Artificial Sequence: Synthetic oligonucleotide
uauaguuccuuguggucag

SEQ ID NO: 3186526 - RNA, 19 nt, Artificial Sequence
  Description of Artificial Sequence: Synthetic oligonucleotide
guuccuuguggucagcagg

SEQ ID NO: 3186527 - RNA, 19 nt, Artificial Sequence
  Description of Artificial Sequence: Synthetic oligonucleotide
gauggugaugggcucaccc

SEQ ID NO: 3186528 - RNA, 19 nt, Artificial Sequence
  Description of Artificial Sequence: Synthetic oligonucleotide
accuccagcaccucugucg

SEQ ID NO: 3186529 - RNA, 19 nt, Artificial Sequence
  Description of Artificial Sequence: Synthetic oligonucleotide
auggggaugguauccaaag

SEQ ID NO: 3186530 - RNA, 19 nt, Artificial Sequence
  Description of Artificial Sequence: Synthetic oligonucleotide
cuccaaaggaauagguggg

SEQ ID NO: 3186531 - RNA, 19 nt, Artificial Sequence
  Description of Artificial Sequence: Synthetic oligonucleotide
ucaguucaccuccagcacc

SEQ ID NO: 3186532 - RNA, 19 nt, Artificial Sequence
  Description of Artificial Sequence: Synthetic oligonucleotide
ucuauggugucucgguuga

SEQ ID NO: 3186533 - RNA, 19 nt, Artificial Sequence
  Description of Artificial Sequence: Synthetic oligonucleotide
guuaccagccaauguagcc

SEQ ID NO: 3186534 - RNA, 19 nt, Artificial Sequence
  Description of Artificial Sequence: Synthetic oligonucleotide
guagagcacagcuaugagc

SEQ ID NO: 3186535 - RNA, 19 nt, Artificial Sequence
  Description of Artificial Sequence: Synthetic oligonucleotide
agugugacauggcacaaca

SEQ ID NO: 3186536 - RNA, 19 nt, Artificial Sequence
  Description of Artificial Sequence: Synthetic oligonucleotide
caucaaguacucccgaagc

SEQ ID NO: 3186537 - RNA, 19 nt, Artificial Sequence
  Description of Artificial Sequence: Synthetic oligonucleotide
uuguauaccucauucucuc

SEQ ID NO: 3186538 - RNA, 19 nt, Artificial Sequence
  Description of Artificial Sequence: Synthetic oligonucleotide
uaugagccaacagucagug

SEQ ID NO: 3186539 - RNA, 19 nt, Artificial Sequence
  Description of Artificial Sequence: Synthetic oligonucleotide
uuggggauggugaugggcu

SEQ ID NO: 3186540 - RNA, 19 nt, Artificial Sequence
  Description of Artificial Sequence: Synthetic oligonucleotide
ugcagaaaguguacaugag

SEQ ID NO: 3186541 - RNA, 19 nt, Artificial Sequence
  Description of Artificial Sequence: Synthetic oligonucleotide
gugauugucaaagagcuuc

SEQ ID NO: 3186542 - RNA, 19 nt, Artificial Sequence
  Description of Artificial Sequence: Synthetic oligonucleotide
aaauagggccuuaugccag

SEQ ID NO: 3186543 - RNA, 19 nt, Artificial Sequence
  Description of Artificial Sequence: Synthetic oligonucleotide
ccaauguagccaaauaggg

SEQ ID NO: 3186544 - RNA, 19 nt, Artificial Sequence
  Description of Artificial Sequence: Synthetic oligonucleotide
uacaaaagugugacauggc

SEQ ID NO: 3186545 - RNA, 19 nt, Artificial Sequence
  Description of Artificial Sequence: Synthetic oligonucleotide
agagauggcccucgugggc

SEQ ID NO: 3186546 - RNA, 19 nt, Artificial Sequence
  Description of Artificial Sequence: Synthetic oligonucleotide
uagagauggcccucguggg

SEQ ID NO: 3186547 - RNA, 19 nt, Artificial Sequence
  Description of Artificial Sequence: Synthetic oligonucleotide
ucucuccaaaggaauaggu

SEQ ID NO: 3186548 - RNA, 19 nt, Artificial Sequence
  Description of Artificial Sequence: Synthetic oligonucleotide
uguauagcauugccacucc

SEQ ID NO: 3186549 - RNA, 19 nt, Artificial Sequence
  Description of Artificial Sequence: Synthetic oligonucleotide
agggcagaugccuccagac

SEQ ID NO: 3186550 - RNA, 19 nt, Artificial Sequence
  Description of Artificial Sequence: Synthetic oligonucleotide
ugauugucaaagagcuuca

SEQ ID NO: 3186551 - RNA, 19 nt, Artificial Sequence
  Description of Artificial Sequence: Synthetic oligonucleotide
guagucucgaaaauagcgc

SEQ ID NO: 3186552 - RNA, 19 nt, Artificial Sequence
  Description of Artificial Sequence: Synthetic oligonucleotide
acacagcccaguuucgcac

SEQ ID NO: 3186553 - RNA, 19 nt, Artificial Sequence
  Description of Artificial Sequence: Synthetic oligonucleotide
acaggcauccggaaguuac

SEQ ID NO: 3186554 - RNA, 19 nt, Artificial Sequence
  Description of Artificial Sequence: Synthetic oligonucleotide
caaaggaauaggugggaac

SEQ ID NO: 3186555 - RNA, 19 nt, Artificial Sequence
  Description of Artificial Sequence: Synthetic oligonucleotide
ucaaguacucccgaagcac

SEQ ID NO: 3186556 - RNA, 19 nt, Artificial Sequence
  Description of Artificial Sequence: Synthetic oligonucleotide
agcuuggggauggugaugg

SEQ ID NO: 3186557 - RNA, 19 nt, Artificial Sequence
  Description of Artificial Sequence: Synthetic oligonucleotide
guauccaaagauauaguuc

SEQ ID NO: 3186558 - RNA, 19 nt, Artificial Sequence
  Description of Artificial Sequence: Synthetic oligonucleotide
gccaaauagggccuuaugc

SEQ ID NO: 3186559 - RNA, 19 nt, Artificial Sequence
  Description of Artificial Sequence: Synthetic oligonucleotide
uaggcuuggaguagggcac

SEQ ID NO: 3186560 - RNA, 19 nt, Artificial Sequence
  Description of Artificial Sequence: Synthetic oligonucleotide
aguagagcacagcuaugag

SEQ ID NO: 3186561 - RNA, 19 nt, Artificial Sequence
  Description of Artificial Sequence: Synthetic oligonucleotide
uucucuccaaaggaauagg

SEQ ID NO: 3186562 - RNA, 19 nt, Artificial Sequence
  Description of Artificial Sequence: Synthetic oligonucleotide
uggaugggaaaguagucuc

SEQ ID NO: 3186563 - RNA, 19 nt, Artificial Sequence
  Description of Artificial Sequence: Synthetic oligonucleotide
cauccggaaguuaccagcc

SEQ ID NO: 3186564 - RNA, 19 nt, Artificial Sequence
  Description of Artificial Sequence: Synthetic oligonucleotide
uuccuuguggucagcaggu

SEQ ID NO: 3186565 - RNA, 19 nt, Artificial Sequence
  Description of Artificial Sequence: Synthetic oligonucleotide
aucucauagagauggcccu

SEQ ID NO: 3186566 - RNA, 19 nt, Artificial Sequence
  Description of Artificial Sequence: Synthetic oligonucleotide
aucaaguacucccgaagca

SEQ ID NO: 3186567 - RNA, 19 nt, Artificial Sequence
  Description of Artificial Sequence: Synthetic oligonucleotide
gugcagaaaguguacauga

SEQ ID NO: 3186568 - RNA, 19 nt, Artificial Sequence
  Description of Artificial Sequence: Synthetic oligonucleotide
cauggcacgguacagguca

SEQ ID NO: 3186569 - RNA, 19 nt, Artificial Sequence
  Description of Artificial Sequence: Synthetic oligonucleotide
aagugugacauggcacaac

SEQ ID NO: 3186570 - RNA, 19 nt, Artificial Sequence
  Description of Artificial Sequence: Synthetic oligonucleotide
aguagucuauggugucucg

SEQ ID NO: 3186571 - RNA, 19 nt, Artificial Sequence
  Description of Artificial Sequence: Synthetic oligonucleotide
aauucuaaagguuacauaa

SEQ ID NO: 3186572 - RNA, 19 nt, Artificial Sequence
  Description of Artificial Sequence: Synthetic oligonucleotide
uauauuacaaagaggagag

SEQ ID NO: 3186573 - RNA, 19 nt, Artificial Sequence
  Description of Artificial Sequence: Synthetic oligonucleotide
aaguuuggcacauagauca

SEQ ID NO: 3186574 - RNA, 19 nt, Artificial Sequence
  Description of Artificial Sequence: Synthetic oligonucleotide
cuuacugcaauuaaaauac

SEQ ID NO: 3186575 - RNA, 19 nt, Artificial Sequence
  Description of Artificial Sequence: Synthetic oligonucleotide
cuaaagguuacauaaaacc

SEQ ID NO: 3186576 - RNA, 19 nt, Artificial Sequence
  Description of Artificial Sequence: Synthetic oligonucleotide
aauacuguauauuacaaau

SEQ ID NO: 3186577 - RNA, 19 nt, Artificial Sequence
  Description of Artificial Sequence: Synthetic oligonucleotide
agaacgaugauuucaacac

SEQ ID NO: 3186578 - RNA, 19 nt, Artificial Sequence
  Description of Artificial Sequence: Synthetic oligonucleotide
uuauagucuuaacagaagg

SEQ ID NO: 3186579 - RNA, 19 nt, Artificial Sequence
  Description of Artificial Sequence: Synthetic oligonucleotide
aauguuaacagaaagaaaa

SEQ ID NO: 3186580 - RNA, 19 nt, Artificial Sequence
  Description of Artificial Sequence: Synthetic oligonucleotide
aaauuuguguucuccaggg

SEQ ID NO: 3186581 - RNA, 19 nt, Artificial Sequence
  Description of Artificial Sequence: Synthetic oligonucleotide
aaaugaaacuguuuuaugu

SEQ ID NO: 3186582 - RNA, 19 nt, Artificial Sequence
  Description of Artificial Sequence: Synthetic oligonucleotide
uuuuauguaaacaugcagu

SEQ ID NO: 3186583 - RNA, 19 nt, Artificial Sequence
  Description of Artificial Sequence: Synthetic oligonucleotide
aaaauaaaucccugauggc

SEQ ID NO: 3186584 - RNA, 19 nt, Artificial Sequence
  Description of Artificial Sequence: Synthetic oligonucleotide
aacauaguuuaaauaaucc

SEQ ID NO: 3186585 - RNA, 19 nt, Artificial Sequence
  Description of Artificial Sequence: Synthetic oligonucleotide
aauuguguucacauaaugc

SEQ ID NO: 3186586 - RNA, 19 nt, Artificial Sequence
  Description of Artificial Sequence: Synthetic oligonucleotide
aaaauuuguguucuccagg

SEQ ID NO: 3186587 - RNA, 19 nt, Artificial Sequence
  Description of Artificial Sequence: Synthetic oligonucleotide
aaacuaacacuguucacac

SEQ ID NO: 3186588 - RNA, 19 nt, Artificial Sequence
  Description of Artificial Sequence: Synthetic oligonucleotide
ucuaguuuacuauaaaacu

SEQ ID NO: 3186589 - RNA, 19 nt, Artificial Sequence
  Description of Artificial Sequence: Synthetic oligonucleotide
uauaagugcaaugaaauug

SEQ ID NO: 3186590 - RNA, 19 nt, Artificial Sequence
  Description of Artificial Sequence: Synthetic oligonucleotide
aauaaauucuguguaauga

SEQ ID NO: 3186591 - RNA, 19 nt, Artificial Sequence
  Description of Artificial Sequence: Synthetic oligonucleotide
uauauaagugcaaugaaau

SEQ ID NO: 3186592 - RNA, 19 nt, Artificial Sequence
  Description of Artificial Sequence: Synthetic oligonucleotide
aaugacauugaagugcugg

SEQ ID NO: 3186593 - RNA, 19 nt, Artificial Sequence
  Description of Artificial Sequence: Synthetic oligonucleotide
auaaauucuguguaaugac

SEQ ID NO: 3186594 - RNA, 19 nt, Artificial Sequence
  Description of Artificial Sequence: Synthetic oligonucleotide
gcaaacauaauucuaaagg

SEQ ID NO: 3186595 - RNA, 19 nt, Artificial Sequence
  Description of Artificial Sequence: Synthetic oligonucleotide
acuaacacuguucacacag

SEQ ID NO: 3186596 - RNA, 19 nt, Artificial Sequence
  Description of Artificial Sequence: Synthetic oligonucleotide
uacacaaugagauuuguac

SEQ ID NO: 3186597 - RNA, 19 nt, Artificial Sequence
  Description of Artificial Sequence: Synthetic oligonucleotide
uaacagaaagaaaaguuug

SEQ ID NO: 3186598 - RNA, 19 nt, Artificial Sequence
  Description of Artificial Sequence: Synthetic oligonucleotide
aaucaaaauaacuugcaua

SEQ ID NO: 3186599 - RNA, 19 nt, Artificial Sequence
  Description of Artificial Sequence: Synthetic oligonucleotide
uaauucaaaaugaggacca

SEQ ID NO: 3186600 - RNA, 19 nt, Artificial Sequence
  Description of Artificial Sequence: Synthetic oligonucleotide
auuguguucacauaaugca

SEQ ID NO: 3186601 - RNA, 19 nt, Artificial Sequence
  Description of Artificial Sequence: Synthetic oligonucleotide
aaauaaaucccugauggca

SEQ ID NO: 3186602 - RNA, 19 nt, Artificial Sequence
  Description of Artificial Sequence: Synthetic oligonucleotide
guauucggcauucauacgg

SEQ ID NO: 3186603 - RNA, 19 nt, Artificial Sequence
  Description of Artificial Sequence: Synthetic oligonucleotide
uaaacuaacacuguucaca

SEQ ID NO: 3186604 - RNA, 19 nt, Artificial Sequence
  Description of Artificial Sequence: Synthetic oligonucleotide
uguaaaauaaaucccugau

SEQ ID NO: 3186605 - RNA, 19 nt, Artificial Sequence
  Description of Artificial Sequence: Synthetic oligonucleotide
auacuuaaaauucacugca

SEQ ID NO: 3186606 - RNA, 19 nt, Artificial Sequence
  Description of Artificial Sequence: Synthetic oligonucleotide
aaauuguguucacauaaug

SEQ ID NO: 3186607 - RNA, 19 nt, Artificial Sequence
  Description of Artificial Sequence: Synthetic oligonucleotide
gaucaauguuaacagaaag

SEQ ID NO: 3186608 - RNA, 19 nt, Artificial Sequence
  Description of Artificial Sequence: Synthetic oligonucleotide
uucaagaaucaaaauaacu

SEQ ID NO: 3186609 - RNA, 19 nt, Artificial Sequence
  Description of Artificial Sequence: Synthetic oligonucleotide
uuaacagauguucugugug

SEQ ID NO: 3186610 - RNA, 19 nt, Artificial Sequence
  Description of Artificial Sequence: Synthetic oligonucleotide
auaaaaccugccuuuguac

SEQ ID NO: 3186611 - RNA, 19 nt, Artificial Sequence
  Description of Artificial Sequence: Synthetic oligonucleotide
ucaacuuuaaaauccuaca

SEQ ID NO: 3186612 - RNA, 19 nt, Artificial Sequence
  Description of Artificial Sequence: Synthetic oligonucleotide
uacacauauucauacagug

SEQ ID NO: 3186613 - RNA, 19 nt, Artificial Sequence
  Description of Artificial Sequence: Synthetic oligonucleotide
uuuauagucuuaacagaag

SEQ ID NO: 3186614 - RNA, 19 nt, Artificial Sequence
  Description of Artificial Sequence: Synthetic oligonucleotide
aaaacaaagucugacuaug

SEQ ID NO: 3186615 - RNA, 19 nt, Artificial Sequence
  Description of Artificial Sequence: Synthetic oligonucleotide
aguuaugcuauauacacaa

SEQ ID NO: 3186616 - RNA, 19 nt, Artificial Sequence
  Description of Artificial Sequence: Synthetic oligonucleotide
cucuaguuuacuauaaaac

SEQ ID NO: 3186617 - RNA, 19 nt, Artificial Sequence
  Description of Artificial Sequence: Synthetic oligonucleotide
uaauccaauaaauucugug

SEQ ID NO: 3186618 - RNA, 19 nt, Artificial Sequence
  Description of Artificial Sequence: Synthetic oligonucleotide
cuaguuuacuauaaaacuc

SEQ ID NO: 3186619 - RNA, 19 nt, Artificial Sequence
  Description of Artificial Sequence: Synthetic oligonucleotide
agguauuacauauaaacau

SEQ ID NO: 3186620 - RNA, 19 nt, Artificial Sequence
  Description of Artificial Sequence: Synthetic oligonucleotide
uuucacagcacucaccuac

SEQ ID NO: 3186621 - RNA, 19 nt, Artificial Sequence
  Description of Artificial Sequence: Synthetic oligonucleotide
uguuagguauuacauauaa

SEQ ID NO: 3186622 - RNA, 19 nt, Artificial Sequence
  Description of Artificial Sequence: Synthetic oligonucleotide
auccaugucaaguauuuuc

SEQ ID NO: 3186623 - RNA, 19 nt, Artificial Sequence
  Description of Artificial Sequence: Synthetic oligonucleotide
acuuuaaaauccuacauuu

SEQ ID NO: 3186624 - RNA, 19 nt, Artificial Sequence
  Description of Artificial Sequence: Synthetic oligonucleotide
uugaauacagaaaacuuua

SEQ ID NO: 3186625 - RNA, 19 nt, Artificial Sequence
  Description of Artificial Sequence: Synthetic oligonucleotide
ugcccuuugaagaaaaugu

SEQ ID NO: 3186626 - RNA, 19 nt, Artificial Sequence
  Description of Artificial Sequence: Synthetic oligonucleotide
auuuucacagcacucaccu

SEQ ID NO: 3186627 - RNA, 19 nt, Artificial Sequence
  Description of Artificial Sequence: Synthetic oligonucleotide
auuuguguucuccagggag

SEQ ID NO: 3186628 - RNA, 19 nt, Artificial Sequence
  Description of Artificial Sequence: Synthetic oligonucleotide
ucugaggcuaacccgaugc

SEQ ID NO: 3186629 - RNA, 19 nt, Artificial Sequence
  Description of Artificial Sequence: Synthetic oligonucleotide
guuuuauguaaacaugcag

SEQ ID NO: 3186630 - RNA, 19 nt, Artificial Sequence
  Description of Artificial Sequence: Synthetic oligonucleotide
uacacuugcaaacugucac

SEQ ID NO: 3186631 - RNA, 19 nt, Artificial Sequence
  Description of Artificial Sequence: Synthetic oligonucleotide
uucacuuuaacagauguuc

SEQ ID NO: 3186632 - RNA, 19 nt, Artificial Sequence
  Description of Artificial Sequence: Synthetic oligonucleotide
ucuaaagguuacauaaaac

SEQ ID NO: 3186633 - RNA, 19 nt, Artificial Sequence
  Description of Artificial Sequence: Synthetic oligonucleotide
uuccuuaguacugaaagcc

SEQ ID NO: 3186634 - RNA, 19 nt, Artificial Sequence
  Description of Artificial Sequence: Synthetic oligonucleotide
uuuauguaaacaugcagua

SEQ ID NO: 3186635 - RNA, 19 nt, Artificial Sequence
  Description of Artificial Sequence: Synthetic oligonucleotide
acauagaucaauuucuaaa

SEQ ID NO: 3186636 - RNA, 19 nt, Artificial Sequence
  Description of Artificial Sequence: Synthetic oligonucleotide
acauugaagugcuggauuc

SEQ ID NO: 3186637 - RNA, 19 nt, Artificial Sequence
  Description of Artificial Sequence: Synthetic oligonucleotide
uugcauauguuuauugcug

SEQ ID NO: 3186638 - RNA, 19 nt, Artificial Sequence
  Description of Artificial Sequence: Synthetic oligonucleotide
uucuaaagguuacauaaaa

SEQ ID NO: 3186639 - RNA, 19 nt, Artificial Sequence
  Description of Artificial Sequence: Synthetic oligonucleotide
uccaugucaaguauuuuca

SEQ ID NO: 3186640 - RNA, 19 nt, Artificial Sequence
  Description of Artificial Sequence: Synthetic oligonucleotide
uaaacauaguuuaaauaau

SEQ ID NO: 3186641 - RNA, 19 nt, Artificial Sequence
  Description of Artificial Sequence: Synthetic oligonucleotide
uguuuuauguaaacaugca

SEQ ID NO: 3186642 - RNA, 19 nt, Artificial Sequence
  Description of Artificial Sequence: Synthetic oligonucleotide
aaauacuguauauuacaaa

SEQ ID NO: 3186643 - RNA, 19 nt, Artificial Sequence
  Description of Artificial Sequence: Synthetic oligonucleotide
acauaaugcaaguacuuca

SEQ ID NO: 3186644 - RNA, 19 nt, Artificial Sequence
  Description of Artificial Sequence: Synthetic oligonucleotide
agaagggaaaauuguguuc

SEQ ID NO: 3186645 - RNA, 19 nt, Artificial Sequence
  Description of Artificial Sequence: Synthetic oligonucleotide
uccagaaacacucaucuuu

SEQ ID NO: 3186646 - RNA, 19 nt, Artificial Sequence
  Description of Artificial Sequence: Synthetic oligonucleotide
uccuuuacagcacugaauu

SEQ ID NO: 3186647 - RNA, 19 nt, Artificial Sequence
  Description of Artificial Sequence: Synthetic oligonucleotide
guucacauaaugcaaguac

SEQ ID NO: 3186648 - RNA, 19 nt, Artificial Sequence
  Description of Artificial Sequence: Synthetic oligonucleotide
cucaacuuuaaaauccuac

SEQ ID NO: 3186649 - RNA, 19 nt, Artificial Sequence
  Description of Artificial Sequence: Synthetic oligonucleotide
auguuaaccugauuggcag

SEQ ID NO: 3186650 - RNA, 19 nt, Artificial Sequence
  Description of Artificial Sequence: Synthetic oligonucleotide
ucagaaguuguccauccug

SEQ ID NO: 3186651 - RNA, 19 nt, Artificial Sequence
  Description of Artificial Sequence: Synthetic oligonucleotide
acuucaucaaacaacgcuc

SEQ ID NO: 3186652 - RNA, 19 nt, Artificial Sequence
  Description of Artificial Sequence: Synthetic oligonucleotide
cuuaguacugaaagccugg

SEQ ID NO: 3186653 - RNA, 19 nt, Artificial Sequence
  Description of Artificial Sequence: Synthetic oligonucleotide
uauucggcauucauacggg

SEQ ID NO: 3186654 - RNA, 19 nt, Artificial Sequence
  Description of Artificial Sequence: Synthetic oligonucleotide
uguuugaguaucacucucc

SEQ ID NO: 3186655 - RNA, 19 nt, Artificial Sequence
  Description of Artificial Sequence: Synthetic oligonucleotide
ugcaaguacuucaucaaac

SEQ ID NO: 3186656 - RNA, 19 nt, Artificial Sequence
  Description of Artificial Sequence: Synthetic oligonucleotide
aaugagauuuguacaugac

SEQ ID NO: 3186657 - RNA, 19 nt, Artificial Sequence
  Description of Artificial Sequence: Synthetic oligonucleotide
cugauggcaaacauaauuc

SEQ ID NO: 3186658 - RNA, 19 nt, Artificial Sequence
  Description of Artificial Sequence: Synthetic oligonucleotide
aaaaucaauaguauacaau

SEQ ID NO: 3186659 - RNA, 19 nt, Artificial Sequence
  Description of Artificial Sequence: Synthetic oligonucleotide
uuguacaugacuugggaaa

SEQ ID NO: 3186660 - RNA, 19 nt, Artificial Sequence
  Description of Artificial Sequence: Synthetic oligonucleotide
ggaguuaugcuauauacac

SEQ ID NO: 3186661 - RNA, 19 nt, Artificial Sequence
  Description of Artificial Sequence: Synthetic oligonucleotide
aacauaauucuaaagguua

SEQ ID NO: 3186662 - RNA, 19 nt, Artificial Sequence
  Description of Artificial Sequence: Synthetic oligonucleotide
acaaaacaaagucugacua

SEQ ID NO: 3186663 - RNA, 19 nt, Artificial Sequence
  Description of Artificial Sequence: Synthetic oligonucleotide
agauuuguacaugacuugg

SEQ ID NO: 3186664 - RNA, 19 nt, Artificial Sequence
  Description of Artificial Sequence: Synthetic oligonucleotide
aauaacuugcauauguuua

SEQ ID NO: 3186665 - RNA, 19 nt, Artificial Sequence
  Description of Artificial Sequence: Synthetic oligonucleotide
uuuaacagauguucugugu

SEQ ID NO: 3186666 - RNA, 19 nt, Artificial Sequence
  Description of Artificial Sequence: Synthetic oligonucleotide
ucucuaguuuacuauaaaa

SEQ ID NO: 3186667 - RNA, 19 nt, Artificial Sequence
  Description of Artificial Sequence: Synthetic oligonucleotide
uggcagcuaaacaaggugc

SEQ ID NO: 3186668 - RNA, 19 nt, Artificial Sequence
  Description of Artificial Sequence: Synthetic oligonucleotide
auucaaaaugaggaccagc

SEQ ID NO: 3186669 - RNA, 19 nt, Artificial Sequence
  Description of Artificial Sequence: Synthetic oligonucleotide
cuugcaaacugucacauga

SEQ ID NO: 3186670 - RNA, 19 nt, Artificial Sequence
  Description of Artificial Sequence: Synthetic oligonucleotide
ugcauauguuuauugcugc

SEQ ID NO: 3186671 - RNA, 19 nt, Artificial Sequence
  Description of Artificial Sequence: Synthetic oligonucleotide
ucuguuaugagcaagagag

SEQ ID NO: 3186672 - RNA, 19 nt, Artificial Sequence
  Description of Artificial Sequence: Synthetic oligonucleotide
aagauuguggaauuccucc

SEQ ID NO: 3186673 - RNA, 19 nt, Artificial Sequence
  Description of Artificial Sequence: Synthetic oligonucleotide
aguccuaggaccuacaugg

SEQ ID NO: 3186674 - RNA, 19 nt, Artificial Sequence
  Description of Artificial Sequence: Synthetic oligonucleotide
cauucuuaaagacacagcg

SEQ ID NO: 3186675 - RNA, 19 nt, Artificial Sequence
  Description of Artificial Sequence: Synthetic oligonucleotide
agaacgacggcccagggcc

SEQ ID NO: 3186676 - RNA, 19 nt, Artificial Sequence
  Description of Artificial Sequence: Synthetic oligonucleotide
gaaacaagugcucacaagc

SEQ ID NO: 3186677 - RNA, 19 nt, Artificial Sequence
  Description of Artificial Sequence: Synthetic oligonucleotide
ugguguacaacauacauca

SEQ ID NO: 3186678 - RNA, 19 nt, Artificial Sequence
  Description of Artificial Sequence: Synthetic oligonucleotide
auuucgaaaugucuuaggg

SEQ ID NO: 3186679 - RNA, 19 nt, Artificial Sequence
  Description of Artificial Sequence: Synthetic oligonucleotide
aaacugaucgacaggaagc

SEQ ID NO: 3186680 - RNA, 19 nt, Artificial Sequence
  Description of Artificial Sequence: Synthetic oligonucleotide
uccaagacaaacauagugc

SEQ ID NO: 3186681 - RNA, 19 nt, Artificial Sequence
  Description of Artificial Sequence: Synthetic oligonucleotide
uuagggaucgguaugguca

SEQ ID NO: 3186682 - RNA, 19 nt, Artificial Sequence
  Description of Artificial Sequence: Synthetic oligonucleotide
cuuucacacagccagaacg

SEQ ID NO: 3186683 - RNA, 19 nt, Artificial Sequence
  Description of Artificial Sequence: Synthetic oligonucleotide
aagaacagcaggcuuauca

SEQ ID NO: 3186684 - RNA, 19 nt, Artificial Sequence
  Description of Artificial Sequence: Synthetic oligonucleotide
cucacaaccaucuguaacg

SEQ ID NO: 3186685 - RNA, 19 nt, Artificial Sequence
  Description of Artificial Sequence: Synthetic oligonucleotide
aacaagugcucacaagccg

SEQ ID NO: 3186686 - RNA, 19 nt, Artificial Sequence
  Description of Artificial Sequence: Synthetic oligonucleotide
caagagagcauucuuaaag

SEQ ID NO: 3186687 - RNA, 19 nt, Artificial Sequence
  Description of Artificial Sequence: Synthetic oligonucleotide
uucgaaaugucuuagggau

SEQ ID NO: 3186688 - RNA, 19 nt, Artificial Sequence
  Description of Artificial Sequence: Synthetic oligonucleotide
caaacucuaacucuaacug

SEQ ID NO: 3186689 - RNA, 19 nt, Artificial Sequence
  Description of Artificial Sequence: Synthetic oligonucleotide
cagagagcugccuugaugg

SEQ ID NO: 3186690 - RNA, 19 nt, Artificial Sequence
  Description of Artificial Sequence: Synthetic oligonucleotide
aagagagcauucuuaaaga

SEQ ID NO: 3186691 - RNA, 19 nt, Artificial Sequence
  Description of Artificial Sequence: Synthetic oligonucleotide
gauggagagaccuuugcug

SEQ ID NO: 3186692 - RNA, 19 nt, Artificial Sequence
  Description of Artificial Sequence: Synthetic oligonucleotide
agaacagcaggcuuaucac

SEQ ID NO: 3186693 - RNA, 19 nt, Artificial Sequence
  Description of Artificial Sequence: Synthetic oligonucleotide
aggauccucguucaagucc

SEQ ID NO: 3186694 - RNA, 19 nt, Artificial Sequence
  Description of Artificial Sequence: Synthetic oligonucleotide
uauuggauucagcaccagg

SEQ ID NO: 3186695 - RNA, 19 nt, Artificial Sequence
  Description of Artificial Sequence: Synthetic oligonucleotide
aagaaccaaacugaucgac

SEQ ID NO: 3186696 - RNA, 19 nt, Artificial Sequence
  Description of Artificial Sequence: Synthetic oligonucleotide
uggauauaauguuuaauaa

SEQ ID NO: 3186697 - RNA, 19 nt, Artificial Sequence
  Description of Artificial Sequence: Synthetic oligonucleotide
ugagcgguaauccaaccug

SEQ ID NO: 3186698 - RNA, 19 nt, Artificial Sequence
  Description of Artificial Sequence: Synthetic oligonucleotide
acuaacuggucacuuggac

SEQ ID NO: 3186699 - RNA, 19 nt, Artificial Sequence
  Description of Artificial Sequence: Synthetic oligonucleotide
auuuuaaugggcuuuccau

SEQ ID NO: 3186700 - RNA, 19 nt, Artificial Sequence
  Description of Artificial Sequence: Synthetic oligonucleotide
aacucuaacugccgcaucu

SEQ ID NO: 3186701 - RNA, 19 nt, Artificial Sequence
  Description of Artificial Sequence: Synthetic oligonucleotide
ugggcuuuccauuaaaguc

SEQ ID NO: 3186702 - RNA, 19 nt, Artificial Sequence
  Description of Artificial Sequence: Synthetic oligonucleotide
uuucgaaaugucuuaggga

SEQ ID NO: 3186703 - RNA, 19 nt, Artificial Sequence
  Description of Artificial Sequence: Synthetic oligonucleotide
cucccagucuguuagaggc

SEQ ID NO: 3186704 - RNA, 19 nt, Artificial Sequence
  Description of Artificial Sequence: Synthetic oligonucleotide
agugcucccagucuguuag

SEQ ID NO: 3186705 - RNA, 19 nt, Artificial Sequence
  Description of Artificial Sequence: Synthetic oligonucleotide
uguuugcacaugcauuuag

SEQ ID NO: 3186706 - RNA, 19 nt, Artificial Sequence
  Description of Artificial Sequence: Synthetic oligonucleotide
uuucacacagccagaacga

SEQ ID NO: 3186707 - RNA, 19 nt, Artificial Sequence
  Description of Artificial Sequence: Synthetic oligonucleotide
acaagccucaaugagauca

SEQ ID NO: 3186708 - RNA, 19 nt, Artificial Sequence
  Description of Artificial Sequence: Synthetic oligonucleotide
agaucaucgacaaagcucu

SEQ ID NO: 3186709 - RNA, 19 nt, Artificial Sequence
  Description of Artificial Sequence: Synthetic oligonucleotide
aggcuuaucacagccaugg

SEQ ID NO: 3186710 - RNA, 19 nt, Artificial Sequence
  Description of Artificial Sequence: Synthetic oligonucleotide
augaggaaaugauggagag

SEQ ID NO: 3186711 - RNA, 19 nt, Artificial Sequence
  Description of Artificial Sequence: Synthetic oligonucleotide
ucugcauagucucuguuau

SEQ ID NO: 3186712 - RNA, 19 nt, Artificial Sequence
  Description of Artificial Sequence: Synthetic oligonucleotide
uuucaccugggccaaaaga

SEQ ID NO: 3186713 - RNA, 19 nt, Artificial Sequence
  Description of Artificial Sequence: Synthetic oligonucleotide
caaaagauuguggaauucc

SEQ ID NO: 3186714 - RNA, 19 nt, Artificial Sequence
  Description of Artificial Sequence: Synthetic oligonucleotide
ugcauagucucuguuauga

SEQ ID NO: 3186715 - RNA, 19 nt, Artificial Sequence
  Description of Artificial Sequence: Synthetic oligonucleotide
uuccauuaaaguccuccag

SEQ ID NO: 3186716 - RNA, 19 nt, Artificial Sequence
  Description of Artificial Sequence: Synthetic oligonucleotide
uacacuugcucagggaugg

SEQ ID NO: 3186717 - RNA, 19 nt, Artificial Sequence
  Description of Artificial Sequence: Synthetic oligonucleotide
ucaggggugguguacaaca

SEQ ID NO: 3186718 - RNA, 19 nt, Artificial Sequence
  Description of Artificial Sequence: Synthetic oligonucleotide
ucacaagccgacaaaggac

SEQ ID NO: 3186719 - RNA, 19 nt, Artificial Sequence
  Description of Artificial Sequence: Synthetic oligonucleotide
ugagcuguucucgagucgg

SEQ ID NO: 3186720 - RNA, 19 nt, Artificial Sequence
  Description of Artificial Sequence: Synthetic oligonucleotide
aaggacucgggccagucca

SEQ ID NO: 3186721 - RNA, 19 nt, Artificial Sequence
  Description of Artificial Sequence: Synthetic oligonucleotide
auacaucacugccaagaac

SEQ ID NO: 3186722 - RNA, 19 nt, Artificial Sequence
  Description of Artificial Sequence: Synthetic oligonucleotide
cuaagaaccagagaagguc

SEQ ID NO: 3186723 - RNA, 19 nt, Artificial Sequence
  Description of Artificial Sequence: Synthetic oligonucleotide
cugaucgacaggaagcggc

SEQ ID NO: 3186724 - RNA, 19 nt, Artificial Sequence
  Description of Artificial Sequence: Synthetic oligonucleotide
ucuccagaaguucucugcc

SEQ ID NO: 3186725 - RNA, 19 nt, Artificial Sequence
  Description of Artificial Sequence: Synthetic oligonucleotide
aaagacacagcgcggccug

SEQ ID NO: 3186726 - RNA, 19 nt, Artificial Sequence
  Description of Artificial Sequence: Synthetic oligonucleotide
ucacagguucagcauuucg

SEQ ID NO: 3186727 - RNA, 19 nt, Artificial Sequence
  Description of Artificial Sequence: Synthetic oligonucleotide
agaaacaagugcucacaag

SEQ ID NO: 3186728 - RNA, 19 nt, Artificial Sequence
  Description of Artificial Sequence: Synthetic oligonucleotide
aaguccuaggaccuacaug

SEQ ID NO: 3186729 - RNA, 19 nt, Artificial Sequence
  Description of Artificial Sequence: Synthetic oligonucleotide
uguuuaauaaaagggccaa

SEQ ID NO: 3186730 - RNA, 19 nt, Artificial Sequence
  Description of Artificial Sequence: Synthetic oligonucleotide
ucuuguuugcacaugcauu

SEQ ID NO: 3186731 - RNA, 19 nt, Artificial Sequence
  Description of Artificial Sequence: Synthetic oligonucleotide
ugucuuagggaucgguaug

SEQ ID NO: 3186732 - RNA, 19 nt, Artificial Sequence
  Description of Artificial Sequence: Synthetic oligonucleotide
uuaaagacacagcgcggcc

SEQ ID NO: 3186733 - RNA, 19 nt, Artificial Sequence
  Description of Artificial Sequence: Synthetic oligonucleotide
uuccccagcacuaacuggu

SEQ ID NO: 3186734 - RNA, 19 nt, Artificial Sequence
  Description of Artificial Sequence: Synthetic oligonucleotide
gacucaaaaugaucugcag

SEQ ID NO: 3186735 - RNA, 19 nt, Artificial Sequence
  Description of Artificial Sequence: Synthetic oligonucleotide
caccccaagaaccaaacug

SEQ ID NO: 3186736 - RNA, 19 nt, Artificial Sequence
  Description of Artificial Sequence: Synthetic oligonucleotide
aaccugagcuugcaaacca

SEQ ID NO: 3186737 - RNA, 19 nt, Artificial Sequence
  Description of Artificial Sequence: Synthetic oligonucleotide
ugggugagccuccuggcgg

SEQ ID NO: 3186738 - RNA, 19 nt, Artificial Sequence
  Description of Artificial Sequence: Synthetic oligonucleotide
aucgacaaagcucuccaca

SEQ ID NO: 3186739 - RNA, 19 nt, Artificial Sequence
  Description of Artificial Sequence: Synthetic oligonucleotide
aagccgacaaaggacucgg

SEQ ID NO: 3186740 - RNA, 19 nt, Artificial Sequence
  Description of Artificial Sequence: Synthetic oligonucleotide
accagcuucagaaacaagu

SEQ ID NO: 3186741 - RNA, 19 nt, Artificial Sequence
  Description of Artificial Sequence: Synthetic oligonucleotide
agaccaaggugucuucccg

SEQ ID NO: 3186742 - RNA, 19 nt, Artificial Sequence
  Description of Artificial Sequence: Synthetic oligonucleotide
aaaguccuccagccagugg

SEQ ID NO: 3186743 - RNA, 19 nt, Artificial Sequence
  Description of Artificial Sequence: Synthetic oligonucleotide
aggacaucaaacgugugug

SEQ ID NO: 3186744 - RNA, 19 nt, Artificial Sequence
  Description of Artificial Sequence: Synthetic oligonucleotide
caacaagugcaugagggcc

SEQ ID NO: 3186745 - RNA, 19 nt, Artificial Sequence
  Description of Artificial Sequence: Synthetic oligonucleotide
ugaucgacaggaagcggcc

SEQ ID NO: 3186746 - RNA, 19 nt, Artificial Sequence
  Description of Artificial Sequence: Synthetic oligonucleotide
ugugagugugcuauuggau

SEQ ID NO: 3186747 - RNA, 19 nt, Artificial Sequence
  Description of Artificial Sequence: Synthetic oligonucleotide
agccagugcagagagcugc

SEQ ID NO: 3186748 - RNA, 19 nt, Artificial Sequence
  Description of Artificial Sequence: Synthetic oligonucleotide
gaaccagagaagguccugg

SEQ ID NO: 3186749 - RNA, 19 nt, Artificial Sequence
  Description of Artificial Sequence: Synthetic oligonucleotide
ccaagacaaacauagugcc

SEQ ID NO: 3186750 - RNA, 19 nt, Artificial Sequence
  Description of Artificial Sequence: Synthetic oligonucleotide
acaggugcagggcagguca

SEQ ID NO: 3186751 - RNA, 19 nt, Artificial Sequence
  Description of Artificial Sequence: Synthetic oligonucleotide
ugcauuuagaguccacuuu

SEQ ID NO: 3186752 - RNA, 19 nt, Artificial Sequence
  Description of Artificial Sequence: Synthetic oligonucleotide
uuaaaguccuccagccagu

SEQ ID NO: 3186753 - RNA, 19 nt, Artificial Sequence
  Description of Artificial Sequence: Synthetic oligonucleotide
ucgacaaagcucuccacaa

SEQ ID NO: 3186754 - RNA, 19 nt, Artificial Sequence
  Description of Artificial Sequence: Synthetic oligonucleotide
augggcuuuccauuaaagu

SEQ ID NO: 3186755 - RNA, 19 nt, Artificial Sequence
  Description of Artificial Sequence: Synthetic oligonucleotide
ggauauaauguuuaauaaa

SEQ ID NO: 3186756 - RNA, 19 nt, Artificial Sequence
  Description of Artificial Sequence: Synthetic oligonucleotide
uuuucaccugggccaaaag

SEQ ID NO: 3186757 - RNA, 19 nt, Artificial Sequence
  Description of Artificial Sequence: Synthetic oligonucleotide
gaucucucaucuccaagac

SEQ ID NO: 3186758 - RNA, 19 nt, Artificial Sequence
  Description of Artificial Sequence: Synthetic oligonucleotide
uaauccaaccugagcuugc

SEQ ID NO: 3186759 - RNA, 19 nt, Artificial Sequence
  Description of Artificial Sequence: Synthetic oligonucleotide
agauuguggaauuccucca

SEQ ID NO: 3186760 - RNA, 19 nt, Artificial Sequence
  Description of Artificial Sequence: Synthetic oligonucleotide
uaaaagggccaacuggcuu

SEQ ID NO: 3186761 - RNA, 19 nt, Artificial Sequence
  Description of Artificial Sequence: Synthetic oligonucleotide
aaaugucuuagggaucggu

SEQ ID NO: 3186762 - RNA, 19 nt, Artificial Sequence
  Description of Artificial Sequence: Synthetic oligonucleotide
uuaugagcaagagagcauu

SEQ ID NO: 3186763 - RNA, 19 nt, Artificial Sequence
  Description of Artificial Sequence: Synthetic oligonucleotide
aaugauggagagaccuuug

SEQ ID NO: 3186764 - RNA, 19 nt, Artificial Sequence
  Description of Artificial Sequence: Synthetic oligonucleotide
auguuuaauaaaagggcca

SEQ ID NO: 3186765 - RNA, 19 nt, Artificial Sequence
  Description of Artificial Sequence: Synthetic oligonucleotide
uuggacgugucuccucucc

SEQ ID NO: 3186766 - RNA, 19 nt, Artificial Sequence
  Description of Artificial Sequence: Synthetic oligonucleotide
uaacugccgcaucuccucg

SEQ ID NO: 3186767 - RNA, 19 nt, Artificial Sequence
  Description of Artificial Sequence: Synthetic oligonucleotide
agggauggccgaguggucc

SEQ ID NO: 3186768 - RNA, 19 nt, Artificial Sequence
  Description of Artificial Sequence: Synthetic oligonucleotide
ucucaucuccaagacaaac

SEQ ID NO: 3186769 - RNA, 19 nt, Artificial Sequence
  Description of Artificial Sequence: Synthetic oligonucleotide
gucuuagggaucgguaugg

SEQ ID NO: 3186770 - RNA, 19 nt, Artificial Sequence
  Description of Artificial Sequence: Synthetic oligonucleotide
aauaucugaugguccugaa

SEQ ID NO: 3186771 - RNA, 19 nt, Artificial Sequence
  Description of Artificial Sequence: Synthetic oligonucleotide
aaauuaaagaaguaaaagg

SEQ ID NO: 3186772 - RNA, 19 nt, Artificial Sequence
  Description of Artificial Sequence: Synthetic oligonucleotide
uaaaauuucacauaguaug

SEQ ID NO: 3186773 - RNA, 19 nt, Artificial Sequence
  Description of Artificial Sequence: Synthetic oligonucleotide
aaaaggcugauauaaaauc

SEQ ID NO: 3186774 - RNA, 19 nt, Artificial Sequence
  Description of Artificial Sequence: Synthetic oligonucleotide
aaaauuaaagaaguaaaag

SEQ ID NO: 3186775 - RNA, 19 nt, Artificial Sequence
  Description of Artificial Sequence: Synthetic oligonucleotide
uuuaacuccagaaacagca

SEQ ID NO: 3186776 - RNA, 19 nt, Artificial Sequence
  Description of Artificial Sequence: Synthetic oligonucleotide
auuugaauauaacaugggc

SEQ ID NO: 3186777 - RNA, 19 nt, Artificial Sequence
  Description of Artificial Sequence: Synthetic oligonucleotide
aaauguaaaugucacugac

SEQ ID NO: 3186778 - RNA, 19 nt, Artificial Sequence
  Description of Artificial Sequence: Synthetic oligonucleotide
uacaauacaucccaaacag

SEQ ID NO: 3186779 - RNA, 19 nt, Artificial Sequence
  Description of Artificial Sequence: Synthetic oligonucleotide
uauauugacaacagaaaag

SEQ ID NO: 3186780 - RNA, 19 nt, Artificial Sequence
  Description of Artificial Sequence: Synthetic oligonucleotide
auauugacaacagaaaagc

SEQ ID NO: 3186781 - RNA, 19 nt, Artificial Sequence
  Description of Artificial Sequence: Synthetic oligonucleotide
ugauauaaaaucaaacaga

SEQ ID NO: 3186782 - RNA, 19 nt, Artificial Sequence
  Description of Artificial Sequence: Synthetic oligonucleotide
uuugaauauaacaugggca

SEQ ID NO: 3186783 - RNA, 19 nt, Artificial Sequence
  Description of Artificial Sequence: Synthetic oligonucleotide
uuaucauuugaauauaaca

SEQ ID NO: 3186784 - RNA, 19 nt, Artificial Sequence
  Description of Artificial Sequence: Synthetic oligonucleotide
ucuguagaaauuuagccag

SEQ ID NO: 3186785 - RNA, 19 nt, Artificial Sequence
  Description of Artificial Sequence: Synthetic oligonucleotide
agcauuuucuuucaacugc

SEQ ID NO: 3186786 - RNA, 19 nt, Artificial Sequence
  Description of Artificial Sequence: Synthetic oligonucleotide
aaucuuacaauacauccca

SEQ ID NO: 3186787 - RNA, 19 nt, Artificial Sequence
  Description of Artificial Sequence: Synthetic oligonucleotide
uaucauuugaauauaacau

SEQ ID NO: 3186788 - RNA, 19 nt, Artificial Sequence
  Description of Artificial Sequence: Synthetic oligonucleotide
guaaucuuacaauacaucc

SEQ ID NO: 3186789 - RNA, 19 nt, Artificial Sequence
  Description of Artificial Sequence: Synthetic oligonucleotide
uauaacaugggcauuguac

SEQ ID NO: 3186790 - RNA, 19 nt, Artificial Sequence
  Description of Artificial Sequence: Synthetic oligonucleotide
cugauauaaaaucaaacag

SEQ ID NO: 3186791 - RNA, 19 nt, Artificial Sequence
  Description of Artificial Sequence: Synthetic oligonucleotide
aaauuuagccagcagucuc

SEQ ID NO: 3186792 - RNA, 19 nt, Artificial Sequence
  Description of Artificial Sequence: Synthetic oligonucleotide
ucuuuuaucauuugaauau

SEQ ID NO: 3186793 - RNA, 19 nt, Artificial Sequence
  Description of Artificial Sequence: Synthetic oligonucleotide
uuuucuuucaacugcagcu

SEQ ID NO: 3186794 - RNA, 19 nt, Artificial Sequence
  Description of Artificial Sequence: Synthetic oligonucleotide
uguacuuugguauccauga

SEQ ID NO: 3186795 - RNA, 19 nt, Artificial Sequence
  Description of Artificial Sequence: Synthetic oligonucleotide
aauguaaaugucacugacc

SEQ ID NO: 3186796 - RNA, 19 nt, Artificial Sequence
  Description of Artificial Sequence: Synthetic oligonucleotide
gauuucaccauauauugac

SEQ ID NO: 3186797 - RNA, 19 nt, Artificial Sequence
  Description of Artificial Sequence: Synthetic oligonucleotide
uagaaauuuagccagcagu

SEQ ID NO: 3186798 - RNA, 19 nt, Artificial Sequence
  Description of Artificial Sequence: Synthetic oligonucleotide
uugacaacagaaaagccug

SEQ ID NO: 3186799 - RNA, 19 nt, Artificial Sequence
  Description of Artificial Sequence: Synthetic oligonucleotide
uaaguuucuuuaaugaacu

SEQ ID NO: 3186800 - RNA, 19 nt, Artificial Sequence
  Description of Artificial Sequence: Synthetic oligonucleotide
aguuucuuuaaugaacugc

SEQ ID NO: 3186801 - RNA, 19 nt, Artificial Sequence
  Description of Artificial Sequence: Synthetic oligonucleotide
agaaauguaaaugucacug

SEQ ID NO: 3186802 - RNA, 19 nt, Artificial Sequence
  Description of Artificial Sequence: Synthetic oligonucleotide
ucaaacagaaauguaaaug

SEQ ID NO: 3186803 - RNA, 19 nt, Artificial Sequence
  Description of Artificial Sequence: Synthetic oligonucleotide
auuuucuuucaacugcagc

SEQ ID NO: 3186804 - RNA, 19 nt, Artificial Sequence
  Description of Artificial Sequence: Synthetic oligonucleotide
agccuguucacuaagaagc

SEQ ID NO: 3186805 - RNA, 19 nt, Artificial Sequence
  Description of Artificial Sequence: Synthetic oligonucleotide
uguaacuguauccagguaa

SEQ ID NO: 3186806 - RNA, 19 nt, Artificial Sequence
  Description of Artificial Sequence: Synthetic oligonucleotide
aaugaacugcacuauugag

SEQ ID NO: 3186807 - RNA, 19 nt, Artificial Sequence
  Description of Artificial Sequence: Synthetic oligonucleotide
uaaaaucaaacagaaaugu

SEQ ID NO: 3186808 - RNA, 19 nt, Artificial Sequence
  Description of Artificial Sequence: Synthetic oligonucleotide
uaaucuuacaauacauccc

SEQ ID NO: 3186809 - RNA, 19 nt, Artificial Sequence
  Description of Artificial Sequence: Synthetic oligonucleotide
aauuguugaucucauuaug

SEQ ID NO: 3186810 - RNA, 19 nt, Artificial Sequence
  Description of Artificial Sequence: Synthetic oligonucleotide
ugaacugcacuauugagga

SEQ ID NO: 3186811 - RNA, 19 nt, Artificial Sequence
  Description of Artificial Sequence: Synthetic oligonucleotide
ucaacugcagcucacaaaa

SEQ ID NO: 3186812 - RNA, 19 nt, Artificial Sequence
  Description of Artificial Sequence: Synthetic oligonucleotide
uaagaagcgucgaagaugu

SEQ ID NO: 3186813 - RNA, 19 nt, Artificial Sequence
  Description of Artificial Sequence: Synthetic oligonucleotide
uuacaauacaucccaaaca

SEQ ID NO: 3186814 - RNA, 19 nt, Artificial Sequence
  Description of Artificial Sequence: Synthetic oligonucleotide
aacugcacuauugaggagg

SEQ ID NO: 3186815 - RNA, 19 nt, Artificial Sequence
  Description of Artificial Sequence: Synthetic oligonucleotide
caauacaucccaaacagac

SEQ ID NO: 3186816 - RNA, 19 nt, Artificial Sequence
  Description of Artificial Sequence: Synthetic oligonucleotide
aaaucaaacagaaauguaa

SEQ ID NO: 3186817 - RNA, 19 nt, Artificial Sequence
  Description of Artificial Sequence: Synthetic oligonucleotide
gagcuaaaauuucacauag

SEQ ID NO: 3186818 - RNA, 19 nt, Artificial Sequence
  Description of Artificial Sequence: Synthetic oligonucleotide
aucauuugaauauaacaug

SEQ ID NO: 3186819 - RNA, 19 nt, Artificial Sequence
  Description of Artificial Sequence: Synthetic oligonucleotide
uugaauauaacaugggcau

SEQ ID NO: 3186820 - RNA, 19 nt, Artificial Sequence
  Description of Artificial Sequence: Synthetic oligonucleotide
uucuguagaaauuuagcca

SEQ ID NO: 3186821 - RNA, 19 nt, Artificial Sequence
  Description of Artificial Sequence: Synthetic oligonucleotide
uguuuuaacuccagaaaca

SEQ ID NO: 3186822 - RNA, 19 nt, Artificial Sequence
  Description of Artificial Sequence: Synthetic oligonucleotide
ucugaaucucuauugcagg

SEQ ID NO: 3186823 - RNA, 19 nt, Artificial Sequence
  Description of Artificial Sequence: Synthetic oligonucleotide
aaguaaaaggcugauauaa

SEQ ID NO: 3186824 - RNA, 19 nt, Artificial Sequence
  Description of Artificial Sequence: Synthetic oligonucleotide
uucaguucaacucuuugcu

SEQ ID NO: 3186825 - RNA, 19 nt, Artificial Sequence
  Description of Artificial Sequence: Synthetic oligonucleotide
aagauguaaucuuacaaua

SEQ ID NO: 3186826 - RNA, 19 nt, Artificial Sequence
  Description of Artificial Sequence: Synthetic oligonucleotide
auauauugacaacagaaaa

SEQ ID NO: 3186827 - RNA, 19 nt, Artificial Sequence
  Description of Artificial Sequence: Synthetic oligonucleotide
uuuaucauuugaauauaac

SEQ ID NO: 3186828 - RNA, 19 nt, Artificial Sequence
  Description of Artificial Sequence: Synthetic oligonucleotide
acauaguauguuaaagucc

SEQ ID NO: 3186829 - RNA, 19 nt, Artificial Sequence
  Description of Artificial Sequence: Synthetic oligonucleotide
ucuuuaaugaacugcacua

SEQ ID NO: 3186830 - RNA, 19 nt, Artificial Sequence
  Description of Artificial Sequence: Synthetic oligonucleotide
uuucaguucaacucuuugc

SEQ ID NO: 3186831 - RNA, 19 nt, Artificial Sequence
  Description of Artificial Sequence: Synthetic oligonucleotide
cuuacaauacaucccaaac

SEQ ID NO: 3186832 - RNA, 19 nt, Artificial Sequence
  Description of Artificial Sequence: Synthetic oligonucleotide
agaaauuuagccagcaguc

SEQ ID NO: 3186833 - RNA, 19 nt, Artificial Sequence
  Description of Artificial Sequence: Synthetic oligonucleotide
gauguaaucuuacaauaca

SEQ ID NO: 3186834 - RNA, 19 nt, Artificial Sequence
  Description of Artificial Sequence: Synthetic oligonucleotide
auaacaugggcauuguacu

SEQ ID NO: 3186835 - RNA, 19 nt, Artificial Sequence
  Description of Artificial Sequence: Synthetic oligonucleotide
uucuuuaaugaacugcacu

SEQ ID NO: 3186836 - RNA, 19 nt, Artificial Sequence
  Description of Artificial Sequence: Synthetic oligonucleotide
aguucuguagaaauuuagc

SEQ ID NO: 3186837 - RNA, 19 nt, Artificial Sequence
  Description of Artificial Sequence: Synthetic oligonucleotide
ucuauugcaggaagggaag

SEQ ID NO: 3186838 - RNA, 19 nt, Artificial Sequence
  Description of Artificial Sequence: Synthetic oligonucleotide
uguucacuaagaagcgucg

SEQ ID NO: 3186839 - RNA, 19 nt, Artificial Sequence
  Description of Artificial Sequence: Synthetic oligonucleotide
uaaaaggcugauauaaaau

SEQ ID NO: 3186840 - RNA, 19 nt, Artificial Sequence
  Description of Artificial Sequence: Synthetic oligonucleotide
acagaaauguaaaugucac

SEQ ID NO: 3186841 - RNA, 19 nt, Artificial Sequence
  Description of Artificial Sequence: Synthetic oligonucleotide
uguaaucuuacaauacauc

SEQ ID NO: 3186842 - RNA, 19 nt, Artificial Sequence
  Description of Artificial Sequence: Synthetic oligonucleotide
uaaugaacugcacuauuga

SEQ ID NO: 3186843 - RNA, 19 nt, Artificial Sequence
  Description of Artificial Sequence: Synthetic oligonucleotide
aaaauuucacauaguaugu

SEQ ID NO: 3186844 - RNA, 19 nt, Artificial Sequence
  Description of Artificial Sequence: Synthetic oligonucleotide
gaauauaacaugggcauug

SEQ ID NO: 3186845 - RNA, 19 nt, Artificial Sequence
  Description of Artificial Sequence: Synthetic oligonucleotide
auaaaaucaaacagaaaug

SEQ ID NO: 3186846 - RNA, 19 nt, Artificial Sequence
  Description of Artificial Sequence: Synthetic oligonucleotide
uucuggguagagcaggagg

SEQ ID NO: 3186847 - RNA, 19 nt, Artificial Sequence
  Description of Artificial Sequence: Synthetic oligonucleotide
ucucauuauggcuuucuag

SEQ ID NO: 3186848 - RNA, 19 nt, Artificial Sequence
  Description of Artificial Sequence: Synthetic oligonucleotide
uuagccagcagucucuucu

SEQ ID NO: 3186849 - RNA, 19 nt, Artificial Sequence
  Description of Artificial Sequence: Synthetic oligonucleotide
auuguugaucucauuaugg

SEQ ID NO: 3186850 - RNA, 19 nt, Artificial Sequence
  Description of Artificial Sequence: Synthetic oligonucleotide
aaacagaaauguaaauguc

SEQ ID NO: 3186851 - RNA, 19 nt, Artificial Sequence
  Description of Artificial Sequence: Synthetic oligonucleotide
uauguuaaaguccucuuuu

SEQ ID NO: 3186852 - RNA, 19 nt, Artificial Sequence
  Description of Artificial Sequence: Synthetic oligonucleotide
uucacauaguauguuaaag

SEQ ID NO: 3186853 - RNA, 19 nt, Artificial Sequence
  Description of Artificial Sequence: Synthetic oligonucleotide
uuuugguacuugauaagca

SEQ ID NO: 3186854 - RNA, 19 nt, Artificial Sequence
  Description of Artificial Sequence: Synthetic oligonucleotide
cacauaguauguuaaaguc

SEQ ID NO: 3186855 - RNA, 19 nt, Artificial Sequence
  Description of Artificial Sequence: Synthetic oligonucleotide
uuugguacuugauaagcac

SEQ ID NO: 3186856 - RNA, 19 nt, Artificial Sequence
  Description of Artificial Sequence: Synthetic oligonucleotide
uauugacaacagaaaagcc

SEQ ID NO: 3186857 - RNA, 19 nt, Artificial Sequence
  Description of Artificial Sequence: Synthetic oligonucleotide
aagcacuucugauucuggg

SEQ ID NO: 3186858 - RNA, 19 nt, Artificial Sequence
  Description of Artificial Sequence: Synthetic oligonucleotide
ugcacuauugaggagggag

SEQ ID NO: 3186859 - RNA, 19 nt, Artificial Sequence
  Description of Artificial Sequence: Synthetic oligonucleotide
uuuucaguucaacucuuug

SEQ ID NO: 3186860 - RNA, 19 nt, Artificial Sequence
  Description of Artificial Sequence: Synthetic oligonucleotide
aaaggcugauauaaaauca

SEQ ID NO: 3186861 - RNA, 19 nt, Artificial Sequence
  Description of Artificial Sequence: Synthetic oligonucleotide
uuuuaucauuugaauauaa

SEQ ID NO: 3186862 - RNA, 19 nt, Artificial Sequence
  Description of Artificial Sequence: Synthetic oligonucleotide
uuguugaucucauuauggc

SEQ ID NO: 3186863 - RNA, 19 nt, Artificial Sequence
  Description of Artificial Sequence: Synthetic oligonucleotide
ucaccauauauugacaaca

SEQ ID NO: 3186864 - RNA, 19 nt, Artificial Sequence
  Description of Artificial Sequence: Synthetic oligonucleotide
ucuucuguaacuguaucca

SEQ ID NO: 3186865 - RNA, 19 nt, Artificial Sequence
  Description of Artificial Sequence: Synthetic oligonucleotide
gaaucucuauugcaggaag

SEQ ID NO: 3186866 - RNA, 19 nt, Artificial Sequence
  Description of Artificial Sequence: Synthetic oligonucleotide
aggaggaguugcuucauac

SEQ ID NO: 3186867 - RNA, 19 nt, Artificial Sequence
  Description of Artificial Sequence: Synthetic oligonucleotide
agguaaguuucuuuaauga

SEQ ID NO: 3186868 - RNA, 19 nt, Artificial Sequence
  Description of Artificial Sequence: Synthetic oligonucleotide
auuaaagaaguaaaaggcu

SEQ ID NO: 3186869 - RNA, 19 nt, Artificial Sequence
  Description of Artificial Sequence: Synthetic oligonucleotide
uucuucuguaacuguaucc

SEQ ID NO: 3186870 - RNA, 19 nt, Artificial Sequence
  Description of Artificial Sequence: Synthetic oligonucleotide
ucauuauggcuuucuagcc

SEQ ID NO: 3186871 - RNA, 19 nt, Artificial Sequence
  Description of Artificial Sequence: Synthetic oligonucleotide
aaaucaaaacaauugauac

SEQ ID NO: 3186872 - RNA, 19 nt, Artificial Sequence
  Description of Artificial Sequence: Synthetic oligonucleotide
auugauaccaucuuacucc

SEQ ID NO: 3186873 - RNA, 19 nt, Artificial Sequence
  Description of Artificial Sequence: Synthetic oligonucleotide
ucaacaauuaauaaauggg

SEQ ID NO: 3186874 - RNA, 19 nt, Artificial Sequence
  Description of Artificial Sequence: Synthetic oligonucleotide
aaaacgacagcccacagac

SEQ ID NO: 3186875 - RNA, 19 nt, Artificial Sequence
  Description of Artificial Sequence: Synthetic oligonucleotide
uauuagaagacaaaguggg

SEQ ID NO: 3186876 - RNA, 19 nt, Artificial Sequence
  Description of Artificial Sequence: Synthetic oligonucleotide
aaagauauucaccaacccc

SEQ ID NO: 3186877 - RNA, 19 nt, Artificial Sequence
  Description of Artificial Sequence: Synthetic oligonucleotide
aaucaaaacaauugauacc

SEQ ID NO: 3186878 - RNA, 19 nt, Artificial Sequence
  Description of Artificial Sequence: Synthetic oligonucleotide
ucuauuagaagacaaagug

SEQ ID NO: 3186879 - RNA, 19 nt, Artificial Sequence
  Description of Artificial Sequence: Synthetic oligonucleotide
aacucaagaagcuagucac

SEQ ID NO: 3186880 - RNA, 19 nt, Artificial Sequence
  Description of Artificial Sequence: Synthetic oligonucleotide
acaauuaauaaaugggacc

SEQ ID NO: 3186881 - RNA, 19 nt, Artificial Sequence
  Description of Artificial Sequence: Synthetic oligonucleotide
aagucagcaagacaaaacg

SEQ ID NO: 3186882 - RNA, 19 nt, Artificial Sequence
  Description of Artificial Sequence: Synthetic oligonucleotide
aaaagauauucaccaaccc

SEQ ID NO: 3186883 - RNA, 19 nt, Artificial Sequence
  Description of Artificial Sequence: Synthetic oligonucleotide
aauugauaccaucuuacuc

SEQ ID NO: 3186884 - RNA, 19 nt, Artificial Sequence
  Description of Artificial Sequence: Synthetic oligonucleotide
acaucaguagcacagacac

SEQ ID NO: 3186885 - RNA, 19 nt, Artificial Sequence
  Description of Artificial Sequence: Synthetic oligonucleotide
aucaacaauuaauaaaugg

SEQ ID NO: 3186886 - RNA, 19 nt, Artificial Sequence
  Description of Artificial Sequence: Synthetic oligonucleotide
aaaagacaaagucagcaag

SEQ ID NO: 3186887 - RNA, 19 nt, Artificial Sequence
  Description of Artificial Sequence: Synthetic oligonucleotide
aucuccaaaauauacaaag

SEQ ID NO: 3186888 - RNA, 19 nt, Artificial Sequence
  Description of Artificial Sequence: Synthetic oligonucleotide
aaauagacaauucucaaua

SEQ ID NO: 3186889 - RNA, 19 nt, Artificial Sequence
  Description of Artificial Sequence: Synthetic oligonucleotide
aaaugggaccuccugaaac

SEQ ID NO: 3186890 - RNA, 19 nt, Artificial Sequence
  Description of Artificial Sequence: Synthetic oligonucleotide
aacaauuaauaaaugggac

SEQ ID NO: 3186891 - RNA, 19 nt, Artificial Sequence
  Description of Artificial Sequence: Synthetic oligonucleotide
uaagaaaguguucaacagg

SEQ ID NO: 3186892 - RNA, 19 nt, Artificial Sequence
  Description of Artificial Sequence: Synthetic oligonucleotide
uauacaaagaacucaagaa

SEQ ID NO: 3186893 - RNA, 19 nt, Artificial Sequence
  Description of Artificial Sequence: Synthetic oligonucleotide
aaucuauuagaagacaaag

SEQ ID NO: 3186894 - RNA, 19 nt, Artificial Sequence
  Description of Artificial Sequence: Synthetic oligonucleotide
aaaauauacaaagaacuca

SEQ ID NO: 3186895 - RNA, 19 nt, Artificial Sequence
  Description of Artificial Sequence: Synthetic oligonucleotide
auacccuugaauuaacugg

SEQ ID NO: 3186896 - RNA, 19 nt, Artificial Sequence
  Description of Artificial Sequence: Synthetic oligonucleotide
aagaaaguguucaacaggg

SEQ ID NO: 3186897 - RNA, 19 nt, Artificial Sequence
  Description of Artificial Sequence: Synthetic oligonucleotide
ugaauuaacugguacagga

SEQ ID NO: 3186898 - RNA, 19 nt, Artificial Sequence
  Description of Artificial Sequence: Synthetic oligonucleotide
cauaacaucaguagcacag

SEQ ID NO: 3186899 - RNA, 19 nt, Artificial Sequence
  Description of Artificial Sequence: Synthetic oligonucleotide
cuauuagaagacaaagugg

SEQ ID NO: 3186900 - RNA, 19 nt, Artificial Sequence
  Description of Artificial Sequence: Synthetic oligonucleotide
aacuaaauagacaauucuc

SEQ ID NO: 3186901 - RNA, 19 nt, Artificial Sequence
  Description of Artificial Sequence: Synthetic oligonucleotide
ugaacauaacaucaguagc

SEQ ID NO: 3186902 - RNA, 19 nt, Artificial Sequence
  Description of Artificial Sequence: Synthetic oligonucleotide
auuaauaaaugggaccucc

SEQ ID NO: 3186903 - RNA, 19 nt, Artificial Sequence
  Description of Artificial Sequence: Synthetic oligonucleotide
aaaacaauugauaccaucu

SEQ ID NO: 3186904 - RNA, 19 nt, Artificial Sequence
  Description of Artificial Sequence: Synthetic oligonucleotide
ugggaaaagauauucacca

SEQ ID NO: 3186905 - RNA, 19 nt, Artificial Sequence
  Description of Artificial Sequence: Synthetic oligonucleotide
aauuaacugguacaggaga

SEQ ID NO: 3186906 - RNA, 19 nt, Artificial Sequence
  Description of Artificial Sequence: Synthetic oligonucleotide
aagacaaagugggaaauac

SEQ ID NO: 3186907 - RNA, 19 nt, Artificial Sequence
  Description of Artificial Sequence: Synthetic oligonucleotide
aauacccuugaauuaacug

SEQ ID NO: 3186908 - RNA, 19 nt, Artificial Sequence
  Description of Artificial Sequence: Synthetic oligonucleotide
ugcaaaucaaaacaauuga

SEQ ID NO: 3186909 - RNA, 19 nt, Artificial Sequence
  Description of Artificial Sequence: Synthetic oligonucleotide
aauaaaugggaccuccuga

SEQ ID NO: 3186910 - RNA, 19 nt, Artificial Sequence
  Description of Artificial Sequence: Synthetic oligonucleotide
acugggaaaagauauucac

SEQ ID NO: 3186911 - RNA, 19 nt, Artificial Sequence
  Description of Artificial Sequence: Synthetic oligonucleotide
uguaaggcaaaagacaaag

SEQ ID NO: 3186912 - RNA, 19 nt, Artificial Sequence
  Description of Artificial Sequence: Synthetic oligonucleotide
uaaggcaaaagacaaaguc

SEQ ID NO: 3186913 - RNA, 19 nt, Artificial Sequence
  Description of Artificial Sequence: Synthetic oligonucleotide
uccaaaauauacaaagaac

SEQ ID NO: 3186914 - RNA, 19 nt, Artificial Sequence
  Description of Artificial Sequence: Synthetic oligonucleotide
aacugcagcagggaaaugc

SEQ ID NO: 3186915 - RNA, 19 nt, Artificial Sequence
  Description of Artificial Sequence: Synthetic oligonucleotide
aauagacaauucucaauag

SEQ ID NO: 3186916 - RNA, 19 nt, Artificial Sequence
  Description of Artificial Sequence: Synthetic oligonucleotide
aaaguguucaacagggaac

SEQ ID NO: 3186917 - RNA, 19 nt, Artificial Sequence
  Description of Artificial Sequence: Synthetic oligonucleotide
aucaaaacaauugauacca

SEQ ID NO: 3186918 - RNA, 19 nt, Artificial Sequence
  Description of Artificial Sequence: Synthetic oligonucleotide
auaagaaaguguucaacag

SEQ ID NO: 3186919 - RNA, 19 nt, Artificial Sequence
  Description of Artificial Sequence: Synthetic oligonucleotide
aacgacagcccacagacug

SEQ ID NO: 3186920 - RNA, 19 nt, Artificial Sequence
  Description of Artificial Sequence: Synthetic oligonucleotide
auauacaaagaacucaaga

SEQ ID NO: 3186921 - RNA, 19 nt, Artificial Sequence
  Description of Artificial Sequence: Synthetic oligonucleotide
ucuguaaggcaaaagacaa

SEQ ID NO: 3186922 - RNA, 19 nt, Artificial Sequence
  Description of Artificial Sequence: Synthetic oligonucleotide
aacauaacaucaguagcac

SEQ ID NO: 3186923 - RNA, 19 nt, Artificial Sequence
  Description of Artificial Sequence: Synthetic oligonucleotide
uucuguaaggcaaaagaca

SEQ ID NO: 3186924 - RNA, 19 nt, Artificial Sequence
  Description of Artificial Sequence: Synthetic oligonucleotide
cugaacauaacaucaguag

SEQ ID NO: 3186925 - RNA, 19 nt, Artificial Sequence
  Description of Artificial Sequence: Synthetic oligonucleotide
aaagucagcaagacaaaac

SEQ ID NO: 3186926 - RNA, 19 nt, Artificial Sequence
  Description of Artificial Sequence: Synthetic oligonucleotide
gacaaagugggaaauaccc

SEQ ID NO: 3186927 - RNA, 19 nt, Artificial Sequence
  Description of Artificial Sequence: Synthetic oligonucleotide
aagacaaaacgacagccca

SEQ ID NO: 3186928 - RNA, 19 nt, Artificial Sequence
  Description of Artificial Sequence: Synthetic oligonucleotide
aagauauucaccaacccca

SEQ ID NO: 3186929 - RNA, 19 nt, Artificial Sequence
  Description of Artificial Sequence: Synthetic oligonucleotide
gaaaagauauucaccaacc

SEQ ID NO: 3186930 - RNA, 19 nt, Artificial Sequence
  Description of Artificial Sequence: Synthetic oligonucleotide
acuuccugaacauaacauc

SEQ ID NO: 3186931 - RNA, 19 nt, Artificial Sequence
  Description of Artificial Sequence: Synthetic oligonucleotide
aagacaaagucagcaagac

SEQ ID NO: 3186932 - RNA, 19 nt, Artificial Sequence
  Description of Artificial Sequence: Synthetic oligonucleotide
acaauugauaccaucuuac

SEQ ID NO: 3186933 - RNA, 19 nt, Artificial Sequence
  Description of Artificial Sequence: Synthetic oligonucleotide
aaaacaucaaacaauccaa

SEQ ID NO: 3186934 - RNA, 19 nt, Artificial Sequence
  Description of Artificial Sequence: Synthetic oligonucleotide
ucugacagagggcugaucu

SEQ ID NO: 3186935 - RNA, 19 nt, Artificial Sequence
  Description of Artificial Sequence: Synthetic oligonucleotide
aaauauacaaagaacucaa

SEQ ID NO: 3186936 - RNA, 19 nt, Artificial Sequence
  Description of Artificial Sequence: Synthetic oligonucleotide
gacaaagucagcaagacaa

SEQ ID NO: 3186937 - RNA, 19 nt, Artificial Sequence
  Description of Artificial Sequence: Synthetic oligonucleotide
caaaauauacaaagaacuc

SEQ ID NO: 3186938 - RNA, 19 nt, Artificial Sequence
  Description of Artificial Sequence: Synthetic oligonucleotide
ggaaaugcaaaucaaaaca

SEQ ID NO: 3186939 - RNA, 19 nt, Artificial Sequence
  Description of Artificial Sequence: Synthetic oligonucleotide
ugaaucuauuagaagacaa

SEQ ID NO: 3186940 - RNA, 19 nt, Artificial Sequence
  Description of Artificial Sequence: Synthetic oligonucleotide
ugaucuccaaaauauacaa

SEQ ID NO: 3186941 - RNA, 19 nt, Artificial Sequence
  Description of Artificial Sequence: Synthetic oligonucleotide
agcacagacacugagauca

SEQ ID NO: 3186942 - RNA, 19 nt, Artificial Sequence
  Description of Artificial Sequence: Synthetic oligonucleotide
uucaacagggaacugcagc

SEQ ID NO: 3186943 - RNA, 19 nt, Artificial Sequence
  Description of Artificial Sequence: Synthetic oligonucleotide
accaaaacaucaaacaauc

SEQ ID NO: 3186944 - RNA, 19 nt, Artificial Sequence
  Description of Artificial Sequence: Synthetic oligonucleotide
caaaacaucaaacaaucca

SEQ ID NO: 3186945 - RNA, 19 nt, Artificial Sequence
  Description of Artificial Sequence: Synthetic oligonucleotide
agcaagacaaaacgacagc

SEQ ID NO: 3186946 - RNA, 19 nt, Artificial Sequence
  Description of Artificial Sequence: Synthetic oligonucleotide
agaucaacaauuaauaaau

SEQ ID NO: 3186947 - RNA, 19 nt, Artificial Sequence
  Description of Artificial Sequence: Synthetic oligonucleotide
cuugaauuaacugguacag

SEQ ID NO: 3186948 - RNA, 19 nt, Artificial Sequence
  Description of Artificial Sequence: Synthetic oligonucleotide
uaauaaaugggaccuccug

SEQ ID NO: 3186949 - RNA, 19 nt, Artificial Sequence
  Description of Artificial Sequence: Synthetic oligonucleotide
ucaccaaaacaucaaacaa

SEQ ID NO: 3186950 - RNA, 19 nt, Artificial Sequence
  Description of Artificial Sequence: Synthetic oligonucleotide
gagaucaacaauuaauaaa

SEQ ID NO: 3186951 - RNA, 19 nt, Artificial Sequence
  Description of Artificial Sequence: Synthetic oligonucleotide
aucaguagcacagacacug

SEQ ID NO: 3186952 - RNA, 19 nt, Artificial Sequence
  Description of Artificial Sequence: Synthetic oligonucleotide
uguucaacagggaacugca

SEQ ID NO: 3186953 - RNA, 19 nt, Artificial Sequence
  Description of Artificial Sequence: Synthetic oligonucleotide
cacugaaucuauuagaaga

SEQ ID NO: 3186954 - RNA, 19 nt, Artificial Sequence
  Description of Artificial Sequence: Synthetic oligonucleotide
aaggcaaaagacaaaguca

SEQ ID NO: 3186955 - RNA, 19 nt, Artificial Sequence
  Description of Artificial Sequence: Synthetic oligonucleotide
aaugggaccuccugaaacu

SEQ ID NO: 3186956 - RNA, 19 nt, Artificial Sequence
  Description of Artificial Sequence: Synthetic oligonucleotide
ugggaaauacccuugaauu

SEQ ID NO: 3186957 - RNA, 19 nt, Artificial Sequence
  Description of Artificial Sequence: Synthetic oligonucleotide
ucagcaagacaaaacgaca

SEQ ID NO: 3186958 - RNA, 19 nt, Artificial Sequence
  Description of Artificial Sequence: Synthetic oligonucleotide
acugaaucuauuagaagac

SEQ ID NO: 3186959 - RNA, 19 nt, Artificial Sequence
  Description of Artificial Sequence: Synthetic oligonucleotide
acuaaauagacaauucuca

SEQ ID NO: 3186960 - RNA, 19 nt, Artificial Sequence
  Description of Artificial Sequence: Synthetic oligonucleotide
aacagggaacugcagcagg

SEQ ID NO: 3186961 - RNA, 19 nt, Artificial Sequence
  Description of Artificial Sequence: Synthetic oligonucleotide
gaagcuagucaccaaaaca

SEQ ID NO: 3186962 - RNA, 19 nt, Artificial Sequence
  Description of Artificial Sequence: Synthetic oligonucleotide
cuucuguaaggcaaaagac

SEQ ID NO: 3186963 - RNA, 19 nt, Artificial Sequence
  Description of Artificial Sequence: Synthetic oligonucleotide
ucuccaaaauauacaaaga

SEQ ID NO: 3186964 - RNA, 19 nt, Artificial Sequence
  Description of Artificial Sequence: Synthetic oligonucleotide
ucaacagggaacugcagca

SEQ ID NO: 3186965 - RNA, 19 nt, Artificial Sequence
  Description of Artificial Sequence: Synthetic oligonucleotide
agaagcuagucaccaaaac

SEQ ID NO: 3186966 - RNA, 19 nt, Artificial Sequence
  Description of Artificial Sequence: Synthetic oligonucleotide
caacaauuaauaaauggga

SEQ ID NO: 3186967 - RNA, 19 nt, Artificial Sequence
  Description of Artificial Sequence: Synthetic oligonucleotide
acaucaaacaauccaauua

SEQ ID NO: 3186968 - RNA, 19 nt, Artificial Sequence
  Description of Artificial Sequence: Synthetic oligonucleotide
aauuaauaaaugggaccuc

SEQ ID NO: 3186969 - RNA, 19 nt, Artificial Sequence
  Description of Artificial Sequence: Synthetic oligonucleotide
aacaauugauaccaucuua

SEQ ID NO: 3186970 - RNA, 19 nt, Artificial Sequence
  Description of Artificial Sequence: Synthetic oligonucleotide
uuagaagacaaagugggaa

SEQ ID NO: 3186971 - RNA, 19 nt, Artificial Sequence
  Description of Artificial Sequence: Synthetic oligonucleotide
acauacaugacacacacug

SEQ ID NO: 3186972 - RNA, 19 nt, Artificial Sequence
  Description of Artificial Sequence: Synthetic oligonucleotide
  modified_base (9)..(9): a, c, u, g, unknown or other
aacacaganagcuggccgg

SEQ ID NO: 3186973 - RNA, 19 nt, Artificial Sequence
  Description of Artificial Sequence: Synthetic oligonucleotide
ugugcuaguaccauacaca

SEQ ID NO: 3186974 - RNA, 19 nt, Artificial Sequence
  Description of Artificial Sequence: Synthetic oligonucleotide
uucucuuuggucuuggcca

SEQ ID NO: 3186975 - RNA, 19 nt, Artificial Sequence
  Description of Artificial Sequence: Synthetic oligonucleotide
guaccauacacauacauga

SEQ ID NO: 3186976 - RNA, 19 nt, Artificial Sequence
  Description of Artificial Sequence: Synthetic oligonucleotide
uugcucuucaaggagaggg

SEQ ID NO: 3186977 - RNA, 19 nt, Artificial Sequence
  Description of Artificial Sequence: Synthetic oligonucleotide
acaugacacacacuggugg

SEQ ID NO: 3186978 - RNA, 19 nt, Artificial Sequence
  Description of Artificial Sequence: Synthetic oligonucleotide
aacauacuucucuuugguc

SEQ ID NO: 3186979 - RNA, 19 nt, Artificial Sequence
  Description of Artificial Sequence: Synthetic oligonucleotide
gcuaguaccauacacauac

SEQ ID NO: 3186980 - RNA, 19 nt, Artificial Sequence
  Description of Artificial Sequence: Synthetic oligonucleotide
auauuuguuucuccagugg

SEQ ID NO: 3186981 - RNA, 19 nt, Artificial Sequence
  Description of Artificial Sequence: Synthetic oligonucleotide
  modified_base (12)..(12): a, c, u, g, unknown or other
aagacaugcagnggugugc

SEQ ID NO: 3186982 - RNA, 19 nt, Artificial Sequence
  Description of Artificial Sequence: Synthetic oligonucleotide
  modified_base (13)..(13): a, c, u, g, unknown or other
uggcaacacaganagcugg

SEQ ID NO: 3186983 - RNA, 19 nt, Artificial Sequence
  Description of Artificial Sequence: Synthetic oligonucleotide
auaccauauuuguuucucc

SEQ ID NO: 3186984 - RNA, 19 nt, Artificial Sequence
  Description of Artificial Sequence: Synthetic oligonucleotide
aaguaucaggcuuggucac

SEQ ID NO: 3186985 - RNA, 19 nt, Artificial Sequence
  Description of Artificial Sequence: Synthetic oligonucleotide
gaguagucaugcuugcugg

SEQ ID NO: 3186986 - RNA, 19 nt, Artificial Sequence
  Description of Artificial Sequence: Synthetic oligonucleotide
auggguagcuuccuggugg

SEQ ID NO: 3186987 - RNA, 19 nt, Artificial Sequence
  Description of Artificial Sequence: Synthetic oligonucleotide
gaauugggcugccagggcg

SEQ ID NO: 3186988 - RNA, 19 nt, Artificial Sequence
  Description of Artificial Sequence: Synthetic oligonucleotide
cuuacagagucgcagcagg

SEQ ID NO: 3186989 - RNA, 19 nt, Artificial Sequence
  Description of Artificial Sequence: Synthetic oligonucleotide
gugcauaaagcccugguug

SEQ ID NO: 3186990 - RNA, 19 nt, Artificial Sequence
  Description of Artificial Sequence: Synthetic oligonucleotide
  modified_base (15)..(15): a, c, u, g, unknown or other
ucuaagacaugcagnggug

SEQ ID NO: 3186991 - RNA, 19 nt, Artificial Sequence
  Description of Artificial Sequence: Synthetic oligonucleotide
agcuccuccaaguaucagg

SEQ ID NO: 3186992 - RNA, 19 nt, Artificial Sequence
  Description of Artificial Sequence: Synthetic oligonucleotide
ugcucuccgaaucugaguc

SEQ ID NO: 3186993 - RNA, 19 nt, Artificial Sequence
  Description of Artificial Sequence: Synthetic oligonucleotide
cauauuuguuucuccagug

SEQ ID NO: 3186994 - RNA, 19 nt, Artificial Sequence
  Description of Artificial Sequence: Synthetic oligonucleotide
acagagucgcagcagguuc

SEQ ID NO: 3186995 - RNA, 19 nt, Artificial Sequence
  Description of Artificial Sequence: Synthetic oligonucleotide
cucguugccauugaauugg

SEQ ID NO: 3186996 - RNA, 19 nt, Artificial Sequence
  Description of Artificial Sequence: Synthetic oligonucleotide
ugaagccuccuccaggagc

SEQ ID NO: 3186997 - RNA, 19 nt, Artificial Sequence
  Description of Artificial Sequence: Synthetic oligonucleotide
  modified_base (13)..(13): a, c, u, g, unknown or other
uaagacaugcagnggugug

SEQ ID NO: 3186998 - RNA, 19 nt, Artificial Sequence
  Description of Artificial Sequence: Synthetic oligonucleotide
ucugcugauggcuccauga

SEQ ID NO: 3186999 - RNA, 19 nt, Artificial Sequence
  Description of Artificial Sequence: Synthetic oligonucleotide
uaccauauuuguuucucca

SEQ ID NO: 3187000 - RNA, 19 nt, Artificial Sequence
  Description of Artificial Sequence: Synthetic oligonucleotide
uaguggaugacuuccggga

SEQ ID NO: 3187001 - RNA, 19 nt, Artificial Sequence
  Description of Artificial Sequence: Synthetic oligonucleotide
aguaguggaugacuuccgg

SEQ ID NO: 3187002 - RNA, 19 nt, Artificial Sequence
  Description of Artificial Sequence: Synthetic oligonucleotide
caaguaucaggcuugguca

SEQ ID NO: 3187003 - RNA, 19 nt, Artificial Sequence
  Description of Artificial Sequence: Synthetic oligonucleotide
cauugaauugggcugccag

SEQ ID NO: 3187004 - RNA, 19 nt, Artificial Sequence
  Description of Artificial Sequence: Synthetic oligonucleotide
guaguaguggaugacuucc

SEQ ID NO: 3187005 - RNA, 19 nt, Artificial Sequence
  Description of Artificial Sequence: Synthetic oligonucleotide
ugauggggaagacugccgc

SEQ ID NO: 3187006 - RNA, 19 nt, Artificial Sequence
  Description of Artificial Sequence: Synthetic oligonucleotide
accauauuuguuucuccag

SEQ ID NO: 3187007 - RNA, 19 nt, Artificial Sequence
  Description of Artificial Sequence: Synthetic oligonucleotide
cagucgaaggcucacagug

SEQ ID NO: 3187008 - RNA, 19 nt, Artificial Sequence
  Description of Artificial Sequence: Synthetic oligonucleotide
aucaggcuuggucacagag

SEQ ID NO: 3187009 - RNA, 19 nt, Artificial Sequence
  Description of Artificial Sequence: Synthetic oligonucleotide
ucuccagugggaugguggg

SEQ ID NO: 3187010 - RNA, 19 nt, Artificial Sequence
  Description of Artificial Sequence: Synthetic oligonucleotide
guaguggaugacuuccggg

SEQ ID NO: 3187011 - RNA, 19 nt, Artificial Sequence
  Description of Artificial Sequence: Synthetic oligonucleotide
uuccggacaagguagcuac

SEQ ID NO: 3187012 - RNA, 19 nt, Artificial Sequence
  Description of Artificial Sequence: Synthetic oligonucleotide
cagaacauacuucucuuug

SEQ ID NO: 3187013 - RNA, 19 nt, Artificial Sequence
  Description of Artificial Sequence: Synthetic oligonucleotide
uaguaguggaugacuuccg

SEQ ID NO: 3187014 - RNA, 19 nt, Artificial Sequence
  Description of Artificial Sequence: Synthetic oligonucleotide
accauacacauacaugaca

SEQ ID NO: 3187015 - RNA, 19 nt, Artificial Sequence
  Description of Artificial Sequence: Synthetic oligonucleotide
gauggugggauccacucuc

SEQ ID NO: 3187016 - RNA, 19 nt, Artificial Sequence
  Description of Artificial Sequence: Synthetic oligonucleotide
uaguaccauacacauacau

SEQ ID NO: 3187017 - RNA, 19 nt, Artificial Sequence
  Description of Artificial Sequence: Synthetic oligonucleotide
ucucguugccauugaauug

SEQ ID NO: 3187018 - RNA, 19 nt, Artificial Sequence
  Description of Artificial Sequence: Synthetic oligonucleotide
aaguguuccgccccuuuga

SEQ ID NO: 3187019 - RNA, 19 nt, Artificial Sequence
  Description of Artificial Sequence: Synthetic oligonucleotide
aguaccauacacauacaug

SEQ ID NO: 3187020 - RNA, 19 nt, Artificial Sequence
  Description of Artificial Sequence: Synthetic oligonucleotide
uagaggagggacaaguguu

SEQ ID NO: 3187021 - RNA, 19 nt, Artificial Sequence
  Description of Artificial Sequence: Synthetic oligonucleotide
gacaagguagcuacacucc

SEQ ID NO: 3187022 - RNA, 19 nt, Artificial Sequence
  Description of Artificial Sequence: Synthetic oligonucleotide
uacacuccuuacagagucg

SEQ ID NO: 3187023 - RNA, 19 nt, Artificial Sequence
  Description of Artificial Sequence: Synthetic oligonucleotide
aucauccugggguagcuug

SEQ ID NO: 3187024 - RNA, 19 nt, Artificial Sequence
  Description of Artificial Sequence: Synthetic oligonucleotide
uuggccaguuucaugugca

SEQ ID NO: 3187025 - RNA, 19 nt, Artificial Sequence
  Description of Artificial Sequence: Synthetic oligonucleotide
uuugaugggcuugaagccu

SEQ ID NO: 3187026 - RNA, 19 nt, Artificial Sequence
  Description of Artificial Sequence: Synthetic oligonucleotide
aggagcgcggagcuggcgc

SEQ ID NO: 3187027 - RNA, 19 nt, Artificial Sequence
  Description of Artificial Sequence: Synthetic oligonucleotide
ucaucagcaggccugucau

SEQ ID NO: 3187028 - RNA, 19 nt, Artificial Sequence
  Description of Artificial Sequence: Synthetic oligonucleotide
ugugcauaaagcccugguu

SEQ ID NO: 3187029 - RNA, 19 nt, Artificial Sequence
  Description of Artificial Sequence: Synthetic oligonucleotide
ggucguacucaucagcagg

SEQ ID NO: 3187030 - RNA, 19 nt, Artificial Sequence
  Description of Artificial Sequence: Synthetic oligonucleotide
uuggucuuggccaguuuca

SEQ ID NO: 3187031 - RNA, 19 nt, Artificial Sequence
  Description of Artificial Sequence: Synthetic oligonucleotide
acugguggacaccgguggc

SEQ ID NO: 3187032 - RNA, 19 nt, Artificial Sequence
  Description of Artificial Sequence: Synthetic oligonucleotide
aucacuucugcugauggcu

SEQ ID NO: 3187033 - RNA, 19 nt, Artificial Sequence
  Description of Artificial Sequence: Synthetic oligonucleotide
uguaguaguggaugacuuc

SEQ ID NO: 3187034 - RNA, 19 nt, Artificial Sequence
  Description of Artificial Sequence: Synthetic oligonucleotide
uucaaggagagggaguagu

SEQ ID NO: 3187035 - RNA, 19 nt, Artificial Sequence
  Description of Artificial Sequence: Synthetic oligonucleotide
aauugggcugccagggcgg

SEQ ID NO: 3187036 - RNA, 19 nt, Artificial Sequence
  Description of Artificial Sequence: Synthetic oligonucleotide
  modified_base (9)..(9): a, c, u, g, unknown or other
acaugcagnggugugcuag

SEQ ID NO: 3187037 - RNA, 19 nt, Artificial Sequence
  Description of Artificial Sequence: Synthetic oligonucleotide
acucucucucccaggaucc

SEQ ID NO: 3187038 - RNA, 19 nt, Artificial Sequence
  Description of Artificial Sequence: Synthetic oligonucleotide
agucgcagcagguucucag

SEQ ID NO: 3187039 - RNA, 19 nt, Artificial Sequence
  Description of Artificial Sequence: Synthetic oligonucleotide
aguccgcacagccacuggg

SEQ ID NO: 3187040 - RNA, 19 nt, Artificial Sequence
  Description of Artificial Sequence: Synthetic oligonucleotide
aagacugccgcuucucguu

SEQ ID NO: 3187041 - RNA, 19 nt, Artificial Sequence
  Description of Artificial Sequence: Synthetic oligonucleotide
ugguccauucacagagucc

SEQ ID NO: 3187042 - RNA, 19 nt, Artificial Sequence
  Description of Artificial Sequence: Synthetic oligonucleotide
uccuuacagagucgcagca

SEQ ID NO: 3187043 - RNA, 19 nt, Artificial Sequence
  Description of Artificial Sequence: Synthetic oligonucleotide
acaagguagcuacacuccu

SEQ ID NO: 3187044 - RNA, 19 nt, Artificial Sequence
  Description of Artificial Sequence: Synthetic oligonucleotide
ggaguagucaugcuugcug

SEQ ID NO: 3187045 - RNA, 19 nt, Artificial Sequence
  Description of Artificial Sequence: Synthetic oligonucleotide
uuccuggugguguaguagu

SEQ ID NO: 3187046 - RNA, 19 nt, Artificial Sequence
  Description of Artificial Sequence: Synthetic oligonucleotide
aggcuggucguacucauca

SEQ ID NO: 3187047 - RNA, 19 nt, Artificial Sequence
  Description of Artificial Sequence: Synthetic oligonucleotide
agcaggccugucaucaucc

SEQ ID NO: 3187048 - RNA, 19 nt, Artificial Sequence
  Description of Artificial Sequence: Synthetic oligonucleotide
ugauaccauauuuguuucu

SEQ ID NO: 3187049 - RNA, 19 nt, Artificial Sequence
  Description of Artificial Sequence: Synthetic oligonucleotide
cacugguggacaccggugg

SEQ ID NO: 3187050 - RNA, 19 nt, Artificial Sequence
  Description of Artificial Sequence: Synthetic oligonucleotide
gugugcuaguaccauacac

SEQ ID NO: 3187051 - RNA, 19 nt, Artificial Sequence
  Description of Artificial Sequence: Synthetic oligonucleotide
guucugacccagaacauac

SEQ ID NO: 3187052 - RNA, 19 nt, Artificial Sequence
  Description of Artificial Sequence: Synthetic oligonucleotide
  modified_base (4)..(4): a, c, u, g, unknown or other
aganagcuggccggugccc

SEQ ID NO: 3187053 - RNA, 19 nt, Artificial Sequence
  Description of Artificial Sequence: Synthetic oligonucleotide
uugcuggucuggcuguucc

SEQ ID NO: 3187054 - RNA, 19 nt, Artificial Sequence
  Description of Artificial Sequence: Synthetic oligonucleotide
ucauccugggguagcuugc

SEQ ID NO: 3187055 - RNA, 19 nt, Artificial Sequence
  Description of Artificial Sequence: Synthetic oligonucleotide
  modified_base (5)..(5): a, c, u, g, unknown or other
gcagnggugugcuaguacc

SEQ ID NO: 3187056 - RNA, 19 nt, Artificial Sequence
  Description of Artificial Sequence: Synthetic oligonucleotide
acuuccgggacacugucaa

SEQ ID NO: 3187057 - RNA, 19 nt, Artificial Sequence
  Description of Artificial Sequence: Synthetic oligonucleotide
cuugaagccuccuccagga

SEQ ID NO: 3187058 - RNA, 19 nt, Artificial Sequence
  Description of Artificial Sequence: Synthetic oligonucleotide
aaagcccugguugcucuuc

SEQ ID NO: 3187059 - RNA, 19 nt, Artificial Sequence
  Description of Artificial Sequence: Synthetic oligonucleotide
  modified_base (6)..(6): a, c, u, g, unknown or other
ugcagnggugugcuaguac

SEQ ID NO: 3187060 - RNA, 19 nt, Artificial Sequence
  Description of Artificial Sequence: Synthetic oligonucleotide
uccugggguagcuugcucu

SEQ ID NO: 3187061 - RNA, 19 nt, Artificial Sequence
  Description of Artificial Sequence: Synthetic oligonucleotide
uccgggacacugucaaaag

SEQ ID NO: 3187062 - RNA, 19 nt, Artificial Sequence
  Description of Artificial Sequence: Synthetic oligonucleotide
ggucccgagaaggugaugg

SEQ ID NO: 3187063 - RNA, 19 nt, Artificial Sequence
  Description of Artificial Sequence: Synthetic oligonucleotide
uuacagagucgcagcaggu

SEQ ID NO: 3187064 - RNA, 19 nt, Artificial Sequence
  Description of Artificial Sequence: Synthetic oligonucleotide
ucccgagaaggugaugggg

SEQ ID NO: 3187065 - RNA, 19 nt, Artificial Sequence
  Description of Artificial Sequence: Synthetic oligonucleotide
gauggguagcuuccuggug

SEQ ID NO: 3187066 - RNA, 19 nt, Artificial Sequence
  Description of Artificial Sequence: Synthetic oligonucleotide
uggucacagagcaggguga

SEQ ID NO: 3187067 - RNA, 19 nt, Artificial Sequence
  Description of Artificial Sequence: Synthetic oligonucleotide
ugccauugaauugggcugc

SEQ ID NO: 3187068 - RNA, 19 nt, Artificial Sequence
  Description of Artificial Sequence: Synthetic oligonucleotide
agucgaaggcucacagugc

SEQ ID NO: 3187069 - RNA, 19 nt, Artificial Sequence
  Description of Artificial Sequence: Synthetic oligonucleotide
ggacaagguagcuacacuc

SEQ ID NO: 3187070 - RNA, 19 nt, Artificial Sequence
  Description of Artificial Sequence: Synthetic oligonucleotide
gcaucacuucugcugaugg

SEQ ID NO: 3187071 - RNA, 19 nt, Artificial Sequence
  Description of Artificial Sequence: Synthetic oligonucleotide
aagaagaauagccagaagc

SEQ ID NO: 3187072 - RNA, 19 nt, Artificial Sequence
  Description of Artificial Sequence: Synthetic oligonucleotide
uuuguuuucauuuugacag

SEQ ID NO: 3187073 - RNA, 19 nt, Artificial Sequence
  Description of Artificial Sequence: Synthetic oligonucleotide
uuuaacaagaagaauagcc

SEQ ID NO: 3187074 - RNA, 19 nt, Artificial Sequence
  Description of Artificial Sequence: Synthetic oligonucleotide
aaaucuguuagcuagcuug

SEQ ID NO: 3187075 - RNA, 19 nt, Artificial Sequence
  Description of Artificial Sequence: Synthetic oligonucleotide
aagguuaguacauuuagag

SEQ ID NO: 3187076 - RNA, 19 nt, Artificial Sequence
  Description of Artificial Sequence: Synthetic oligonucleotide
aaaacuaugucuuggguug

SEQ ID NO: 3187077 - RNA, 19 nt, Artificial Sequence
  Description of Artificial Sequence: Synthetic oligonucleotide
uagaaaaucuguuagcuag

SEQ ID NO: 3187078 - RNA, 19 nt, Artificial Sequence
  Description of Artificial Sequence: Synthetic oligonucleotide
acuuugaugaauuaggucu

SEQ ID NO: 3187079 - RNA, 19 nt, Artificial Sequence
  Description of Artificial Sequence: Synthetic oligonucleotide
ucauuuaacaagaagaaua

SEQ ID NO: 3187080 - RNA, 19 nt, Artificial Sequence
  Description of Artificial Sequence: Synthetic oligonucleotide
uugaacauggguuuaagcc

SEQ ID NO: 3187081 - RNA, 19 nt, Artificial Sequence
  Description of Artificial Sequence: Synthetic oligonucleotide
uuaacaagaagaauagcca

SEQ ID NO: 3187082 - RNA, 19 nt, Artificial Sequence
  Description of Artificial Sequence: Synthetic oligonucleotide
uggacuuugaugaauuagg

SEQ ID NO: 3187083 - RNA, 19 nt, Artificial Sequence
  Description of Artificial Sequence: Synthetic oligonucleotide
acauaguucauuuaacaag

SEQ ID NO: 3187084 - RNA, 19 nt, Artificial Sequence
  Description of Artificial Sequence: Synthetic oligonucleotide
aauagaaaaucuguuagcu

SEQ ID NO: 3187085 - RNA, 19 nt, Artificial Sequence
  Description of Artificial Sequence: Synthetic oligonucleotide
gaucuauggacuuugauga

SEQ ID NO: 3187086 - RNA, 19 nt, Artificial Sequence
  Description of Artificial Sequence: Synthetic oligonucleotide
aauagccagaagcagaacu

SEQ ID NO: 3187087 - RNA, 19 nt, Artificial Sequence
  Description of Artificial Sequence: Synthetic oligonucleotide
cuugcaacuacacugagug

SEQ ID NO: 3187088 - RNA, 19 nt, Artificial Sequence
  Description of Artificial Sequence: Synthetic oligonucleotide
cauuuaacaagaagaauag

SEQ ID NO: 3187089 - RNA, 19 nt, Artificial Sequence
  Description of Artificial Sequence: Synthetic oligonucleotide
cuagcuugcaacuacacug

SEQ ID NO: 3187090 - RNA, 19 nt, Artificial Sequence
  Description of Artificial Sequence: Synthetic oligonucleotide
cucaggguaacuuuuaagc

SEQ ID NO: 3187091 - RNA, 19 nt, Artificial Sequence
  Description of Artificial Sequence: Synthetic oligonucleotide
agaucuauggacuuugaug

SEQ ID NO: 3187092 - RNA, 19 nt, Artificial Sequence
  Description of Artificial Sequence: Synthetic oligonucleotide
uacauuuagagacuuuccc

SEQ ID NO: 3187093 - RNA, 19 nt, Artificial Sequence
  Description of Artificial Sequence: Synthetic oligonucleotide
gaagcagaacuacagaagc

SEQ ID NO: 3187094 - RNA, 19 nt, Artificial Sequence
  Description of Artificial Sequence: Synthetic oligonucleotide
aguucauuuaacaagaaga

SEQ ID NO: 3187095 - RNA, 19 nt, Artificial Sequence
  Description of Artificial Sequence: Synthetic oligonucleotide
gguuaguacauuuagagac

SEQ ID NO: 3187096 - RNA, 19 nt, Artificial Sequence
  Description of Artificial Sequence: Synthetic oligonucleotide
uaacaagaagaauagccag

SEQ ID NO: 3187097 - RNA, 19 nt, Artificial Sequence
  Description of Artificial Sequence: Synthetic oligonucleotide
uaagccaauagaaaaucug

SEQ ID NO: 3187098 - RNA, 19 nt, Artificial Sequence
  Description of Artificial Sequence: Synthetic oligonucleotide
aguacauuuagagacuuuc

SEQ ID NO: 3187099 - RNA, 19 nt, Artificial Sequence
  Description of Artificial Sequence: Synthetic oligonucleotide
ugaacauggguuuaagcca

SEQ ID NO: 3187100 - RNA, 19 nt, Artificial Sequence
  Description of Artificial Sequence: Synthetic oligonucleotide
guaagguuaguacauuuag

SEQ ID NO: 3187101 - RNA, 19 nt, Artificial Sequence
  Description of Artificial Sequence: Synthetic oligonucleotide
cauuuagagacuuucccag

SEQ ID NO: 3187102 - RNA, 19 nt, Artificial Sequence
  Description of Artificial Sequence: Synthetic oligonucleotide
uggguuuaagccaauagaa

SEQ ID NO: 3187103 - RNA, 19 nt, Artificial Sequence
  Description of Artificial Sequence: Synthetic oligonucleotide
uaguucauuuaacaagaag

SEQ ID NO: 3187104 - RNA, 19 nt, Artificial Sequence
  Description of Artificial Sequence: Synthetic oligonucleotide
ugacauaguucauuuaaca

SEQ ID NO: 3187105 - RNA, 19 nt, Artificial Sequence
  Description of Artificial Sequence: Synthetic oligonucleotide
guaacuuuuaagcacaaaa

SEQ ID NO: 3187106 - RNA, 19 nt, Artificial Sequence
  Description of Artificial Sequence: Synthetic oligonucleotide
gacuuucccagaucuaugg

SEQ ID NO: 3187107 - RNA, 19 nt, Artificial Sequence
  Description of Artificial Sequence: Synthetic oligonucleotide
ugaauuaggucuuuguuuu

SEQ ID NO: 3187108 - RNA, 19 nt, Artificial Sequence
  Description of Artificial Sequence: Synthetic oligonucleotide
cuuggguugacauaguuca

SEQ ID NO: 3187109 - RNA, 19 nt, Artificial Sequence
  Description of Artificial Sequence: Synthetic oligonucleotide
aaucuguuagcuagcuugc

SEQ ID NO: 3187110 - RNA, 19 nt, Artificial Sequence
  Description of Artificial Sequence: Synthetic oligonucleotide
cauaguucauuuaacaaga

SEQ ID NO: 3187111 - RNA, 19 nt, Artificial Sequence
  Description of Artificial Sequence: Synthetic oligonucleotide
uagagacuuucccagaucu

SEQ ID NO: 3187112 - RNA, 19 nt, Artificial Sequence
  Description of Artificial Sequence: Synthetic oligonucleotide
caauagaaaaucuguuagc

SEQ ID NO: 3187113 - RNA, 19 nt, Artificial Sequence
  Description of Artificial Sequence: Synthetic oligonucleotide
auuuaacaagaagaauagc

SEQ ID NO: 3187114 - RNA, 19 nt, Artificial Sequence
  Description of Artificial Sequence: Synthetic oligonucleotide
aaaaguaagguuaguacau

SEQ ID NO: 3187115 - RNA, 19 nt, Artificial Sequence
  Description of Artificial Sequence: Synthetic oligonucleotide
ucaggguaacuuuuaagca

SEQ ID NO: 3187116 - RNA, 19 nt, Artificial Sequence
  Description of Artificial Sequence: Synthetic oligonucleotide
uaagguuaguacauuuaga

SEQ ID NO: 3187117 - RNA, 19 nt, Artificial Sequence
  Description of Artificial Sequence: Synthetic oligonucleotide
aacuacacugaguguuugg

SEQ ID NO: 3187118 - RNA, 19 nt, Artificial Sequence
  Description of Artificial Sequence: Synthetic oligonucleotide
acauuuagagacuuuccca

SEQ ID NO: 3187119 - RNA, 19 nt, Artificial Sequence
  Description of Artificial Sequence: Synthetic oligonucleotide
uuaagccaauagaaaaucu

SEQ ID NO: 3187120 - RNA, 19 nt, Artificial Sequence
  Description of Artificial Sequence: Synthetic oligonucleotide
uuagcuagcuugcaacuac

SEQ ID NO: 3187121 - RNA, 19 nt, Artificial Sequence
  Description of Artificial Sequence: Synthetic oligonucleotide
uuucccagaucuauggacu

SEQ ID NO: 3187122 - RNA, 19 nt, Artificial Sequence
  Description of Artificial Sequence: Synthetic oligonucleotide
uuuaagccaauagaaaauc

SEQ ID NO: 3187123 - RNA, 19 nt, Artificial Sequence
  Description of Artificial Sequence: Synthetic oligonucleotide
auggguuuaagccaauaga

SEQ ID NO: 3187124 - RNA, 19 nt, Artificial Sequence
  Description of Artificial Sequence: Synthetic oligonucleotide
aagcagaacuacagaagcc

SEQ ID NO: 3187125 - RNA, 19 nt, Artificial Sequence
  Description of Artificial Sequence: Synthetic oligonucleotide
aauuaggucuuuguuuuca

SEQ ID NO: 3187126 - RNA, 19 nt, Artificial Sequence
  Description of Artificial Sequence: Synthetic oligonucleotide
guugacauaguucauuuaa

SEQ ID NO: 3187127 - RNA, 19 nt, Artificial Sequence
  Description of Artificial Sequence: Synthetic oligonucleotide
augaauuaggucuuuguuu

SEQ ID NO: 3187128 - RNA, 19 nt, Artificial Sequence
  Description of Artificial Sequence: Synthetic oligonucleotide
uugacauaguucauuuaac

SEQ ID NO: 3187129 - RNA, 19 nt, Artificial Sequence
  Description of Artificial Sequence: Synthetic oligonucleotide
gaagaauagccagaagcag

SEQ ID NO: 3187130 - RNA, 19 nt, Artificial Sequence
  Description of Artificial Sequence: Synthetic oligonucleotide
gaaggcugcuugaacaugg

SEQ ID NO: 3187131 - RNA, 19 nt, Artificial Sequence
  Description of Artificial Sequence: Synthetic oligonucleotide
augucuuggguugacauag

SEQ ID NO: 3187132 - RNA, 19 nt, Artificial Sequence
  Description of Artificial Sequence: Synthetic oligonucleotide
uuuagagacuuucccagau

SEQ ID NO: 3187133 - RNA, 19 nt, Artificial Sequence
  Description of Artificial Sequence: Synthetic oligonucleotide
aagccaauagaaaaucugu

SEQ ID NO: 3187134 - RNA, 19 nt, Artificial Sequence
  Description of Artificial Sequence: Synthetic oligonucleotide
ugaugaauuaggucuuugu

SEQ ID NO: 3187135 - RNA, 19 nt, Artificial Sequence
  Description of Artificial Sequence: Synthetic oligonucleotide
ucuuuguuuucauuuugac

SEQ ID NO: 3187136 - RNA, 19 nt, Artificial Sequence
  Description of Artificial Sequence: Synthetic oligonucleotide
gacauaguucauuuaacaa

SEQ ID NO: 3187137 - RNA, 19 nt, Artificial Sequence
  Description of Artificial Sequence: Synthetic oligonucleotide
aagaauagccagaagcaga

SEQ ID NO: 3187138 - RNA, 19 nt, Artificial Sequence
  Description of Artificial Sequence: Synthetic oligonucleotide
uacacugaguguuugggaa

SEQ ID NO: 3187139 - RNA, 19 nt, Artificial Sequence
  Description of Artificial Sequence: Synthetic oligonucleotide
cuugaacauggguuuaagc

SEQ ID NO: 3187140 - RNA, 19 nt, Artificial Sequence
  Description of Artificial Sequence: Synthetic oligonucleotide
ccaauagaaaaucuguuag

SEQ ID NO: 3187141 - RNA, 19 nt, Artificial Sequence
  Description of Artificial Sequence: Synthetic oligonucleotide
agaagaauagccagaagca

SEQ ID NO: 3187142 - RNA, 19 nt, Artificial Sequence
  Description of Artificial Sequence: Synthetic oligonucleotide
uuugggaaucccagaguag

SEQ ID NO: 3187143 - RNA, 19 nt, Artificial Sequence
  Description of Artificial Sequence: Synthetic oligonucleotide
agaaaaucuguuagcuagc

SEQ ID NO: 3187144 - RNA, 19 nt, Artificial Sequence
  Description of Artificial Sequence: Synthetic oligonucleotide
ucucaggguaacuuuuaag

SEQ ID NO: 3187145 - RNA, 19 nt, Artificial Sequence
  Description of Artificial Sequence: Synthetic oligonucleotide
cuuucccagaucuauggac

SEQ ID NO: 3187146 - RNA, 19 nt, Artificial Sequence
  Description of Artificial Sequence: Synthetic oligonucleotide
acuacacugaguguuuggg

SEQ ID NO: 3187147 - RNA, 19 nt, Artificial Sequence
  Description of Artificial Sequence: Synthetic oligonucleotide
caggguaacuuuuaagcac

SEQ ID NO: 3187148 - RNA, 19 nt, Artificial Sequence
  Description of Artificial Sequence: Synthetic oligonucleotide
cauggguuuaagccaauag

SEQ ID NO: 3187149 - RNA, 19 nt, Artificial Sequence
  Description of Artificial Sequence: Synthetic oligonucleotide
uaggucuuuguuuucauuu

SEQ ID NO: 3187150 - RNA, 19 nt, Artificial Sequence
  Description of Artificial Sequence: Synthetic oligonucleotide
uugggaaucccagaguagc

SEQ ID NO: 3187151 - RNA, 19 nt, Artificial Sequence
  Description of Artificial Sequence: Synthetic oligonucleotide
aaguaagguuaguacauuu

SEQ ID NO: 3187152 - RNA, 19 nt, Artificial Sequence
  Description of Artificial Sequence: Synthetic oligonucleotide
aacccuaucucaggguaac

SEQ ID NO: 3187153 - RNA, 19 nt, Artificial Sequence
  Description of Artificial Sequence: Synthetic oligonucleotide
ugaguguuugggaauccca

SEQ ID NO: 3187154 - RNA, 19 nt, Artificial Sequence
  Description of Artificial Sequence: Synthetic oligonucleotide
ucuuggguugacauaguuc

SEQ ID NO: 3187155 - RNA, 19 nt, Artificial Sequence
  Description of Artificial Sequence: Synthetic oligonucleotide
cuuuguuuucauuuugaca

SEQ ID NO: 3187156 - RNA, 19 nt, Artificial Sequence
  Description of Artificial Sequence: Synthetic oligonucleotide
aacaagaagaauagccaga

SEQ ID NO: 3187157 - RNA, 19 nt, Artificial Sequence
  Description of Artificial Sequence: Synthetic oligonucleotide
guguuugggaaucccagag

SEQ ID NO: 3187158 - RNA, 19 nt, Artificial Sequence
  Description of Artificial Sequence: Synthetic oligonucleotide
uguuagcuagcuugcaacu

SEQ ID NO: 3187159 - RNA, 19 nt, Artificial Sequence
  Description of Artificial Sequence: Synthetic oligonucleotide
cuguuagcuagcuugcaac

SEQ ID NO: 3187160 - RNA, 19 nt, Artificial Sequence
  Description of Artificial Sequence: Synthetic oligonucleotide
gguuuaagccaauagaaaa

SEQ ID NO: 3187161 - RNA, 19 nt, Artificial Sequence
  Description of Artificial Sequence: Synthetic oligonucleotide
gacuuugaugaauuagguc

SEQ ID NO: 3187162 - RNA, 19 nt, Artificial Sequence
  Description of Artificial Sequence: Synthetic oligonucleotide
ucuguuagcuagcuugcaa

SEQ ID NO: 3187163 - RNA, 19 nt, Artificial Sequence
  Description of Artificial Sequence: Synthetic oligonucleotide
agaagcagaacuacagaag

SEQ ID NO: 3187164 - RNA, 19 nt, Artificial Sequence
  Description of Artificial Sequence: Synthetic oligonucleotide
agguuaguacauuuagaga

SEQ ID NO: 3187165 - RNA, 19 nt, Artificial Sequence
  Description of Artificial Sequence: Synthetic oligonucleotide
uagcuugcaacuacacuga

SEQ ID NO: 3187166 - RNA, 19 nt, Artificial Sequence
  Description of Artificial Sequence: Synthetic oligonucleotide
ugcaacuacacugaguguu

SEQ ID NO: 3187167 - RNA, 19 nt, Artificial Sequence
  Description of Artificial Sequence: Synthetic oligonucleotide
auggacuuugaugaauuag

SEQ ID NO: 3187168 - RNA, 19 nt, Artificial Sequence
  Description of Artificial Sequence: Synthetic oligonucleotide
aguagccccaacccuaucu

SEQ ID NO: 3187169 - RNA, 19 nt, Artificial Sequence
  Description of Artificial Sequence: Synthetic oligonucleotide
agcagaacuacagaagcca

SEQ ID NO: 3187170 - RNA, 19 nt, Artificial Sequence
  Description of Artificial Sequence: Synthetic oligonucleotide
uucauuuaacaagaagaau

SEQ ID NO: 3187171 - RNA, 19 nt, Artificial Sequence
  Description of Artificial Sequence: Synthetic oligonucleotide
acuucuauuguucagagcc

SEQ ID NO: 3187172 - RNA, 19 nt, Artificial Sequence
  Description of Artificial Sequence: Synthetic oligonucleotide
uucuuaacaaagaacaaug

SEQ ID NO: 3187173 - RNA, 19 nt, Artificial Sequence
  Description of Artificial Sequence: Synthetic oligonucleotide
uugguaucaaaucaccucg

SEQ ID NO: 3187174 - RNA, 19 nt, Artificial Sequence
  Description of Artificial Sequence: Synthetic oligonucleotide
auuaacugcucacauuucc

SEQ ID NO: 3187175 - RNA, 19 nt, Artificial Sequence
  Description of Artificial Sequence: Synthetic oligonucleotide
caauauauaggcuuuuggg

SEQ ID NO: 3187176 - RNA, 19 nt, Artificial Sequence
  Description of Artificial Sequence: Synthetic oligonucleotide
gauuucuuaacaaagaaca

SEQ ID NO: 3187177 - RNA, 19 nt, Artificial Sequence
  Description of Artificial Sequence: Synthetic oligonucleotide
ucguacuucaauauauagg

SEQ ID NO: 3187178 - RNA, 19 nt, Artificial Sequence
  Description of Artificial Sequence: Synthetic oligonucleotide
acauguggaaucucaaagc

SEQ ID NO: 3187179 - RNA, 19 nt, Artificial Sequence
  Description of Artificial Sequence: Synthetic oligonucleotide
uaucaaaucaccucgucca

SEQ ID NO: 3187180 - RNA, 19 nt, Artificial Sequence
  Description of Artificial Sequence: Synthetic oligonucleotide
aacuugucugaguccaucc

SEQ ID NO: 3187181 - RNA, 19 nt, Artificial Sequence
  Description of Artificial Sequence: Synthetic oligonucleotide
uuuugagcagaacugaagu

SEQ ID NO: 3187182 - RNA, 19 nt, Artificial Sequence
  Description of Artificial Sequence: Synthetic oligonucleotide
ucuaauccgaaguaaccgg

SEQ ID NO: 3187183 - RNA, 19 nt, Artificial Sequence
  Description of Artificial Sequence: Synthetic oligonucleotide
agucuuuuaaacaucguac

SEQ ID NO: 3187184 - RNA, 19 nt, Artificial Sequence
  Description of Artificial Sequence: Synthetic oligonucleotide
uuuauaaugguugaaccac

SEQ ID NO: 3187185 - RNA, 19 nt, Artificial Sequence
  Description of Artificial Sequence: Synthetic oligonucleotide
ugauuaacugcucacauuu

SEQ ID NO: 3187186 - RNA, 19 nt, Artificial Sequence
  Description of Artificial Sequence: Synthetic oligonucleotide
aacugcucacauuuccacc

SEQ ID NO: 3187187 - RNA, 19 nt, Artificial Sequence
  Description of Artificial Sequence: Synthetic oligonucleotide
uaaugguugaaccacucca

SEQ ID NO: 3187188 - RNA, 19 nt, Artificial Sequence
  Description of Artificial Sequence: Synthetic oligonucleotide
ucugaguccauccucguug

SEQ ID NO: 3187189 - RNA, 19 nt, Artificial Sequence
  Description of Artificial Sequence: Synthetic oligonucleotide
uuaaacaucguacuucaau

SEQ ID NO: 3187190 - RNA, 19 nt, Artificial Sequence
  Description of Artificial Sequence: Synthetic oligonucleotide
auaaugguugaaccacucc

SEQ ID NO: 3187191 - RNA, 19 nt, Artificial Sequence
  Description of Artificial Sequence: Synthetic oligonucleotide
cuuugcuucauucacauca

SEQ ID NO: 3187192 - RNA, 19 nt, Artificial Sequence
  Description of Artificial Sequence: Synthetic oligonucleotide
gauuguugguaucaaauca

SEQ ID NO: 3187193 - RNA, 19 nt, Artificial Sequence
  Description of Artificial Sequence: Synthetic oligonucleotide
aguccauccucguugaagg

SEQ ID NO: 3187194 - RNA, 19 nt, Artificial Sequence
  Description of Artificial Sequence: Synthetic oligonucleotide
uaccaagucacgccaaacg

SEQ ID NO: 3187195 - RNA, 19 nt, Artificial Sequence
  Description of Artificial Sequence: Synthetic oligonucleotide
ugauuuguucauacaaagc

SEQ ID NO: 3187196 - RNA, 19 nt, Artificial Sequence
  Description of Artificial Sequence: Synthetic oligonucleotide
aaugucgaaauuugauugu

SEQ ID NO: 3187197 - RNA, 19 nt, Artificial Sequence
  Description of Artificial Sequence: Synthetic oligonucleotide
cugauuuguucauacaaag

SEQ ID NO: 3187198 - RNA, 19 nt, Artificial Sequence
  Description of Artificial Sequence: Synthetic oligonucleotide
uugauuguugguaucaaau

SEQ ID NO: 3187199 - RNA, 19 nt, Artificial Sequence
  Description of Artificial Sequence: Synthetic oligonucleotide
uaugcuacagugcagcguc

SEQ ID NO: 3187200 - RNA, 19 nt, Artificial Sequence
  Description of Artificial Sequence: Synthetic oligonucleotide
uugucugaguccauccucg

SEQ ID NO: 3187201 - RNA, 19 nt, Artificial Sequence
  Description of Artificial Sequence: Synthetic oligonucleotide
uaaacaucguacuucaaua

SEQ ID NO: 3187202 - RNA, 19 nt, Artificial Sequence
  Description of Artificial Sequence: Synthetic oligonucleotide
uuuggcaagacacugccau

SEQ ID NO: 3187203 - RNA, 19 nt, Artificial Sequence
  Description of Artificial Sequence: Synthetic oligonucleotide
ucuuaacaaagaacaaugu

SEQ ID NO: 3187204 - RNA, 19 nt, Artificial Sequence
  Description of Artificial Sequence: Synthetic oligonucleotide
uaaccggucauacagguau

SEQ ID NO: 3187205 - RNA, 19 nt, Artificial Sequence
  Description of Artificial Sequence: Synthetic oligonucleotide
auuguugguaucaaaucac

SEQ ID NO: 3187206 - RNA, 19 nt, Artificial Sequence
  Description of Artificial Sequence: Synthetic oligonucleotide
accaagucacgccaaacgg

SEQ ID NO: 3187207 - RNA, 19 nt, Artificial Sequence
  Description of Artificial Sequence: Synthetic oligonucleotide
ucauguaaguagcaagaga

SEQ ID NO: 3187208 - RNA, 19 nt, Artificial Sequence
  Description of Artificial Sequence: Synthetic oligonucleotide
acagguaugcuacagugca

SEQ ID NO: 3187209 - RNA, 19 nt, Artificial Sequence
  Description of Artificial Sequence: Synthetic oligonucleotide
aucguacuucaauauauag

SEQ ID NO: 3187210 - RNA, 19 nt, Artificial Sequence
  Description of Artificial Sequence: Synthetic oligonucleotide
aaucaccucguccagcuga

SEQ ID NO: 3187211 - RNA, 19 nt, Artificial Sequence
  Description of Artificial Sequence: Synthetic oligonucleotide
acaucagacugauuuguuc

SEQ ID NO: 3187212 - RNA, 19 nt, Artificial Sequence
  Description of Artificial Sequence: Synthetic oligonucleotide
uucauauccugugugaugu

SEQ ID NO: 3187213 - RNA, 19 nt, Artificial Sequence
  Description of Artificial Sequence: Synthetic oligonucleotide
ggaaucucaaagcauuugg

SEQ ID NO: 3187214 - RNA, 19 nt, Artificial Sequence
  Description of Artificial Sequence: Synthetic oligonucleotide
uuaacugcucacauuucca

SEQ ID NO: 3187215 - RNA, 19 nt, Artificial Sequence
  Description of Artificial Sequence: Synthetic oligonucleotide
uuugcuucauucacaucag

SEQ ID NO: 3187216 - RNA, 19 nt, Artificial Sequence
  Description of Artificial Sequence: Synthetic oligonucleotide
aaacaucguacuucaauau

SEQ ID NO: 3187217 - RNA, 19 nt, Artificial Sequence
  Description of Artificial Sequence: Synthetic oligonucleotide
uuguugguaucaaaucacc

SEQ ID NO: 3187218 - RNA, 19 nt, Artificial Sequence
  Description of Artificial Sequence: Synthetic oligonucleotide
aaccacuccauuucuucag

SEQ ID NO: 3187219 - RNA, 19 nt, Artificial Sequence
  Description of Artificial Sequence: Synthetic oligonucleotide
uagucuuuuaaacaucgua

SEQ ID NO: 3187220 - RNA, 19 nt, Artificial Sequence
  Description of Artificial Sequence: Synthetic oligonucleotide
gacacugccauauucccac

SEQ ID NO: 3187221 - RNA, 19 nt, Artificial Sequence
  Description of Artificial Sequence: Synthetic oligonucleotide
ucaaauucuccauagucuu

SEQ ID NO: 3187222 - RNA, 19 nt, Artificial Sequence
  Description of Artificial Sequence: Synthetic oligonucleotide
cauauucccaccugagugc

SEQ ID NO: 3187223 - RNA, 19 nt, Artificial Sequence
  Description of Artificial Sequence: Synthetic oligonucleotide
uuucuuaacaaagaacaau

SEQ ID NO: 3187224 - RNA, 19 nt, Artificial Sequence
  Description of Artificial Sequence: Synthetic oligonucleotide
ucgcagaacaugacggacg

SEQ ID NO: 3187225 - RNA, 19 nt, Artificial Sequence
  Description of Artificial Sequence: Synthetic oligonucleotide
aauccgaaguaaccgguca

SEQ ID NO: 3187226 - RNA, 19 nt, Artificial Sequence
  Description of Artificial Sequence: Synthetic oligonucleotide
uuauaaugguugaaccacu

SEQ ID NO: 3187227 - RNA, 19 nt, Artificial Sequence
  Description of Artificial Sequence: Synthetic oligonucleotide
cucuaauccgaaguaaccg

SEQ ID NO: 3187228 - RNA, 19 nt, Artificial Sequence
  Description of Artificial Sequence: Synthetic oligonucleotide
ucugauuaacugcucacau

SEQ ID NO: 3187229 - RNA, 19 nt, Artificial Sequence
  Description of Artificial Sequence: Synthetic oligonucleotide
uguaaguagcaagagauuu

SEQ ID NO: 3187230 - RNA, 19 nt, Artificial Sequence
  Description of Artificial Sequence: Synthetic oligonucleotide
accucauguaaguagcaag

SEQ ID NO: 3187231 - RNA, 19 nt, Artificial Sequence
  Description of Artificial Sequence: Synthetic oligonucleotide
uguugguaucaaaucaccu

SEQ ID NO: 3187232 - RNA, 19 nt, Artificial Sequence
  Description of Artificial Sequence: Synthetic oligonucleotide
guugguaucaaaucaccuc

SEQ ID NO: 3187233 - RNA, 19 nt, Artificial Sequence
  Description of Artificial Sequence: Synthetic oligonucleotide
uuucauauccugugugaug

SEQ ID NO: 3187234 - RNA, 19 nt, Artificial Sequence
  Description of Artificial Sequence: Synthetic oligonucleotide
gacugauuuguucauacaa

SEQ ID NO: 3187235 - RNA, 19 nt, Artificial Sequence
  Description of Artificial Sequence: Synthetic oligonucleotide
aacaaugucgaaauuugau

SEQ ID NO: 3187236 - RNA, 19 nt, Artificial Sequence
  Description of Artificial Sequence: Synthetic oligonucleotide
agucacgccaaacggucgc

SEQ ID NO: 3187237 - RNA, 19 nt, Artificial Sequence
  Description of Artificial Sequence: Synthetic oligonucleotide
uugucugauuaacugcuca

SEQ ID NO: 3187238 - RNA, 19 nt, Artificial Sequence
  Description of Artificial Sequence: Synthetic oligonucleotide
accugagugcucuaauccg

SEQ ID NO: 3187239 - RNA, 19 nt, Artificial Sequence
  Description of Artificial Sequence: Synthetic oligonucleotide
ucuagaaccccuugucuga

SEQ ID NO: 3187240 - RNA, 19 nt, Artificial Sequence
  Description of Artificial Sequence: Synthetic oligonucleotide
uauaaugguugaaccacuc

SEQ ID NO: 3187241 - RNA, 19 nt, Artificial Sequence
  Description of Artificial Sequence: Synthetic oligonucleotide
gaaucucaaagcauuuggc

SEQ ID NO: 3187242 - RNA, 19 nt, Artificial Sequence
  Description of Artificial Sequence: Synthetic oligonucleotide
caaagcuuucaucuccucc

SEQ ID NO: 3187243 - RNA, 19 nt, Artificial Sequence
  Description of Artificial Sequence: Synthetic oligonucleotide
uacagguaugcuacagugc

SEQ ID NO: 3187244 - RNA, 19 nt, Artificial Sequence
  Description of Artificial Sequence: Synthetic oligonucleotide
aaccccuugucugauuaac

SEQ ID NO: 3187245 - RNA, 19 nt, Artificial Sequence
  Description of Artificial Sequence: Synthetic oligonucleotide
caacucgcggacaagcucc

SEQ ID NO: 3187246 - RNA, 19 nt, Artificial Sequence
  Description of Artificial Sequence: Synthetic oligonucleotide
cugacuuugcuucauucac

SEQ ID NO: 3187247 - RNA, 19 nt, Artificial Sequence
  Description of Artificial Sequence: Synthetic oligonucleotide
cauguaaguagcaagagau

SEQ ID NO: 3187248 - RNA, 19 nt, Artificial Sequence
  Description of Artificial Sequence: Synthetic oligonucleotide
accacuccauuucuucagc

SEQ ID NO: 3187249 - RNA, 19 nt, Artificial Sequence
  Description of Artificial Sequence: Synthetic oligonucleotide
ugaaccacuccauuucuuc

SEQ ID NO: 3187250 - RNA, 19 nt, Artificial Sequence
  Description of Artificial Sequence: Synthetic oligonucleotide
cucuagaaccccuugucug

SEQ ID NO: 3187251 - RNA, 19 nt, Artificial Sequence
  Description of Artificial Sequence: Synthetic oligonucleotide
aacaugacggacgcucccg

SEQ ID NO: 3187252 - RNA, 19 nt, Artificial Sequence
  Description of Artificial Sequence: Synthetic oligonucleotide
aagcuccguagcuuucucg

SEQ ID NO: 3187253 - RNA, 19 nt, Artificial Sequence
  Description of Artificial Sequence: Synthetic oligonucleotide
ugacuuugcuucauucaca

SEQ ID NO: 3187254 - RNA, 19 nt, Artificial Sequence
  Description of Artificial Sequence: Synthetic oligonucleotide
gucaucacgggacacaguc

SEQ ID NO: 3187255 - RNA, 19 nt, Artificial Sequence
  Description of Artificial Sequence: Synthetic oligonucleotide
cagacugauuuguucauac

SEQ ID NO: 3187256 - RNA, 19 nt, Artificial Sequence
  Description of Artificial Sequence: Synthetic oligonucleotide
uucaauauauaggcuuuug

SEQ ID NO: 3187257 - RNA, 19 nt, Artificial Sequence
  Description of Artificial Sequence: Synthetic oligonucleotide
agcugacuuugcuucauuc

SEQ ID NO: 3187258 - RNA, 19 nt, Artificial Sequence
  Description of Artificial Sequence: Synthetic oligonucleotide
ugcgcguugcaacucgcgg

SEQ ID NO: 3187259 - RNA, 19 nt, Artificial Sequence
  Description of Artificial Sequence: Synthetic oligonucleotide
uacaaagcuuucaucuccu

SEQ ID NO: 3187260 - RNA, 19 nt, Artificial Sequence
  Description of Artificial Sequence: Synthetic oligonucleotide
aaaccuucaucuccuccca

SEQ ID NO: 3187261 - RNA, 19 nt, Artificial Sequence
  Description of Artificial Sequence: Synthetic oligonucleotide
uucuauuguucagagcccc

SEQ ID NO: 3187262 - RNA, 19 nt, Artificial Sequence
  Description of Artificial Sequence: Synthetic oligonucleotide
cauuucuucagcagacaug

SEQ ID NO: 3187263 - RNA, 19 nt, Artificial Sequence
  Description of Artificial Sequence: Synthetic oligonucleotide
uuugauuguugguaucaaa

SEQ ID NO: 3187264 - RNA, 19 nt, Artificial Sequence
  Description of Artificial Sequence: Synthetic oligonucleotide
ucgaaauuugauuguuggu

SEQ ID NO: 3187265 - RNA, 19 nt, Artificial Sequence
  Description of Artificial Sequence: Synthetic oligonucleotide
caucagacugauuuguuca

SEQ ID NO: 3187266 - RNA, 19 nt, Artificial Sequence
  Description of Artificial Sequence: Synthetic oligonucleotide
caccugagugcucuaaucc

SEQ ID NO: 3187267 - RNA, 19 nt, Artificial Sequence
  Description of Artificial Sequence: Synthetic oligonucleotide
cuucuauuguucagagccc

SEQ ID NO: 3187268 - RNA, 19 nt, Artificial Sequence
  Description of Artificial Sequence: Synthetic oligonucleotide
uaacugcucacauuuccac

SEQ ID NO: 3187269 - RNA, 19 nt, Artificial Sequence
  Description of Artificial Sequence: Synthetic oligonucleotide
uauuguucagagccccaca

SEQ ID NO: 3187270 - RNA, 19 nt, Artificial Sequence
  Description of Artificial Sequence: Synthetic oligonucleotide
cauguggaaucucaaagca

SEQ ID NO: 3187271 - RNA, 19 nt, Artificial Sequence
  Description of Artificial Sequence: Synthetic oligonucleotide
auaguuaugaaauugcuac

SEQ ID NO: 3187272 - RNA, 19 nt, Artificial Sequence
  Description of Artificial Sequence: Synthetic oligonucleotide
uacacuaugauucauaaca

SEQ ID NO: 3187273 - RNA, 19 nt, Artificial Sequence
  Description of Artificial Sequence: Synthetic oligonucleotide
gauauuuacacuaugauuc

SEQ ID NO: 3187274 - RNA, 19 nt, Artificial Sequence
  Description of Artificial Sequence: Synthetic oligonucleotide
aaaauuauaguuaugaaau

SEQ ID NO: 3187275 - RNA, 19 nt, Artificial Sequence
  Description of Artificial Sequence: Synthetic oligonucleotide
aaaaugauuuuaucguugg

SEQ ID NO: 3187276 - RNA, 19 nt, Artificial Sequence
  Description of Artificial Sequence: Synthetic oligonucleotide
aaugauuuuaucguugggg

SEQ ID NO: 3187277 - RNA, 19 nt, Artificial Sequence
  Description of Artificial Sequence: Synthetic oligonucleotide
cuacaaaaugauuuuaucg

SEQ ID NO: 3187278 - RNA, 19 nt, Artificial Sequence
  Description of Artificial Sequence: Synthetic oligonucleotide
uugaaaaccacuguuauag

SEQ ID NO: 3187279 - RNA, 19 nt, Artificial Sequence
  Description of Artificial Sequence: Synthetic oligonucleotide
ugaaauugcuacaaaauga

SEQ ID NO: 3187280 - RNA, 19 nt, Artificial Sequence
  Description of Artificial Sequence: Synthetic oligonucleotide
aacaacagcaaaauuauag

SEQ ID NO: 3187281 - RNA, 19 nt, Artificial Sequence
  Description of Artificial Sequence: Synthetic oligonucleotide
aauuauaguuaugaaauug

SEQ ID NO: 3187282 - RNA, 19 nt, Artificial Sequence
  Description of Artificial Sequence: Synthetic oligonucleotide
ugaggaacuguauuaaagg

SEQ ID NO: 3187283 - RNA, 19 nt, Artificial Sequence
  Description of Artificial Sequence: Synthetic oligonucleotide
auuauaguuaugaaauugc

SEQ ID NO: 3187284 - RNA, 19 nt, Artificial Sequence
  Description of Artificial Sequence: Synthetic oligonucleotide
uacaaaaugauuuuaucgu

SEQ ID NO: 3187285 - RNA, 19 nt, Artificial Sequence
  Description of Artificial Sequence: Synthetic oligonucleotide
ucagauauuuacacuauga

SEQ ID NO: 3187286 - RNA, 19 nt, Artificial Sequence
  Description of Artificial Sequence: Synthetic oligonucleotide
cuaugauucauaacaacag

SEQ ID NO: 3187287 - RNA, 19 nt, Artificial Sequence
  Description of Artificial Sequence: Synthetic oligonucleotide
uaugauucauaacaacagc

SEQ ID NO: 3187288 - RNA, 19 nt, Artificial Sequence
  Description of Artificial Sequence: Synthetic oligonucleotide
augaaauugcuacaaaaug

SEQ ID NO: 3187289 - RNA, 19 nt, Artificial Sequence
  Description of Artificial Sequence: Synthetic oligonucleotide
uaugaaauugcuacaaaau

SEQ ID NO: 3187290 - RNA, 19 nt, Artificial Sequence
  Description of Artificial Sequence: Synthetic oligonucleotide
gaggaacuguauuaaaggg

SEQ ID NO: 3187291 - RNA, 19 nt, Artificial Sequence
  Description of Artificial Sequence: Synthetic oligonucleotide
cauaacaacagcaaaauua

SEQ ID NO: 3187292 - RNA, 19 nt, Artificial Sequence
  Description of Artificial Sequence: Synthetic oligonucleotide
uauuaaagggguagcagca

SEQ ID NO: 3187293 - RNA, 19 nt, Artificial Sequence
  Description of Artificial Sequence: Synthetic oligonucleotide
aauugcuacaaaaugauuu

SEQ ID NO: 3187294 - RNA, 19 nt, Artificial Sequence
  Description of Artificial Sequence: Synthetic oligonucleotide
cauuagaagguugaaaacc

SEQ ID NO: 3187295 - RNA, 19 nt, Artificial Sequence
  Description of Artificial Sequence: Synthetic oligonucleotide
uuaugaaauugcuacaaaa

SEQ ID NO: 3187296 - RNA, 19 nt, Artificial Sequence
  Description of Artificial Sequence: Synthetic oligonucleotide
aaaugauuuuaucguuggg

SEQ ID NO: 3187297 - RNA, 19 nt, Artificial Sequence
  Description of Artificial Sequence: Synthetic oligonucleotide
agcauuagaagguugaaaa

SEQ ID NO: 3187298 - RNA, 19 nt, Artificial Sequence
  Description of Artificial Sequence: Synthetic oligonucleotide
agcaaaauuauaguuauga

SEQ ID NO: 3187299 - RNA, 19 nt, Artificial Sequence
  Description of Artificial Sequence: Synthetic oligonucleotide
uuauaguuaugaaauugcu

SEQ ID NO: 3187300 - RNA, 19 nt, Artificial Sequence
  Description of Artificial Sequence: Synthetic oligonucleotide
aacuguauuaaagggguag

SEQ ID NO: 3187301 - RNA, 19 nt, Artificial Sequence
  Description of Artificial Sequence: Synthetic oligonucleotide
auaucagauauuuacacua

SEQ ID NO: 3187302 - RNA, 19 nt, Artificial Sequence
  Description of Artificial Sequence: Synthetic oligonucleotide
guauuaaagggguagcagc

SEQ ID NO: 3187303 - RNA, 19 nt, Artificial Sequence
  Description of Artificial Sequence: Synthetic oligonucleotide
uuuacacuaugauucauaa

SEQ ID NO: 3187304 - RNA, 19 nt, Artificial Sequence
  Description of Artificial Sequence: Synthetic oligonucleotide
caaaauuauaguuaugaaa

SEQ ID NO: 3187305 - RNA, 19 nt, Artificial Sequence
  Description of Artificial Sequence: Synthetic oligonucleotide
ugauucauaacaacagcaa

SEQ ID NO: 3187306 - RNA, 19 nt, Artificial Sequence
  Description of Artificial Sequence: Synthetic oligonucleotide
uguauuaaagggguagcag

SEQ ID NO: 3187307 - RNA, 19 nt, Artificial Sequence
  Description of Artificial Sequence: Synthetic oligonucleotide
caaaaugauuuuaucguug

SEQ ID NO: 3187308 - RNA, 19 nt, Artificial Sequence
  Description of Artificial Sequence: Synthetic oligonucleotide
augauuuuaucguuggggu

SEQ ID NO: 3187309 - RNA, 19 nt, Artificial Sequence
  Description of Artificial Sequence: Synthetic oligonucleotide
acaacagcaaaauuauagu

SEQ ID NO: 3187310 - RNA, 19 nt, Artificial Sequence
  Description of Artificial Sequence: Synthetic oligonucleotide
uauaguuaugaaauugcua

SEQ ID NO: 3187311 - RNA, 19 nt, Artificial Sequence
  Description of Artificial Sequence: Synthetic oligonucleotide
acagcaaaauuauaguuau

SEQ ID NO: 3187312 - RNA, 19 nt, Artificial Sequence
  Description of Artificial Sequence: Synthetic oligonucleotide
acuaugauucauaacaaca

SEQ ID NO: 3187313 - RNA, 19 nt, Artificial Sequence
  Description of Artificial Sequence: Synthetic oligonucleotide
agauauuuacacuaugauu

SEQ ID NO: 3187314 - RNA, 19 nt, Artificial Sequence
  Description of Artificial Sequence: Synthetic oligonucleotide
aaauuauaguuaugaaauu

SEQ ID NO: 3187315 - RNA, 19 nt, Artificial Sequence
  Description of Artificial Sequence: Synthetic oligonucleotide
aagguugaaaaccacuguu

SEQ ID NO: 3187316 - RNA, 19 nt, Artificial Sequence
  Description of Artificial Sequence: Synthetic oligonucleotide
acuguauuaaagggguagc

SEQ ID NO: 3187317 - RNA, 19 nt, Artificial Sequence
  Description of Artificial Sequence: Synthetic oligonucleotide
gauuuuaucguugggguca

SEQ ID NO: 3187318 - RNA, 19 nt, Artificial Sequence
  Description of Artificial Sequence: Synthetic oligonucleotide
uagaagguugaaaaccacu

SEQ ID NO: 3187319 - RNA, 19 nt, Artificial Sequence
  Description of Artificial Sequence: Synthetic oligonucleotide
aacagcaaaauuauaguua

SEQ ID NO: 3187320 - RNA, 19 nt, Artificial Sequence
  Description of Artificial Sequence: Synthetic oligonucleotide
aggaacuguauuaaagggg

SEQ ID NO: 3187321 - RNA, 19 nt, Artificial Sequence
  Description of Artificial Sequence: Synthetic oligonucleotide
auaacaacagcaaaauuau

SEQ ID NO: 3187322 - RNA, 19 nt, Artificial Sequence
  Description of Artificial Sequence: Synthetic oligonucleotide
uucauaacaacagcaaaau

SEQ ID NO: 3187323 - RNA, 19 nt, Artificial Sequence
  Description of Artificial Sequence: Synthetic oligonucleotide
ugcuacaaaaugauuuuau

SEQ ID NO: 3187324 - RNA, 19 nt, Artificial Sequence
  Description of Artificial Sequence: Synthetic oligonucleotide
auauuuacacuaugauuca

SEQ ID NO: 3187325 - RNA, 19 nt, Artificial Sequence
  Description of Artificial Sequence: Synthetic oligonucleotide
auugcuacaaaaugauuuu

SEQ ID NO: 3187326 - RNA, 19 nt, Artificial Sequence
  Description of Artificial Sequence: Synthetic oligonucleotide
gauucauaacaacagcaaa

SEQ ID NO: 3187327 - RNA, 19 nt, Artificial Sequence
  Description of Artificial Sequence: Synthetic oligonucleotide
auuagaagguugaaaacca

SEQ ID NO: 3187328 - RNA, 19 nt, Artificial Sequence
  Description of Artificial Sequence: Synthetic oligonucleotide
uaucguuggggucaccaca

SEQ ID NO: 3187329 - RNA, 19 nt, Artificial Sequence
  Description of Artificial Sequence: Synthetic oligonucleotide
agaagguugaaaaccacug

SEQ ID NO: 3187330 - RNA, 19 nt, Artificial Sequence
  Description of Artificial Sequence: Synthetic oligonucleotide
acaaaaugauuuuaucguu

SEQ ID NO: 3187331 - RNA, 19 nt, Artificial Sequence
  Description of Artificial Sequence: Synthetic oligonucleotide
uuuaucguuggggucacca

SEQ ID NO: 3187332 - RNA, 19 nt, Artificial Sequence
  Description of Artificial Sequence: Synthetic oligonucleotide
augauucauaacaacagca

SEQ ID NO: 3187333 - RNA, 19 nt, Artificial Sequence
  Description of Artificial Sequence: Synthetic oligonucleotide
uuagaagguugaaaaccac

SEQ ID NO: 3187334 - RNA, 19 nt, Artificial Sequence
  Description of Artificial Sequence: Synthetic oligonucleotide
augaggaacuguauuaaag

SEQ ID NO: 3187335 - RNA, 19 nt, Artificial Sequence
  Description of Artificial Sequence: Synthetic oligonucleotide
aucagauauuuacacuaug

SEQ ID NO: 3187336 - RNA, 19 nt, Artificial Sequence
  Description of Artificial Sequence: Synthetic oligonucleotide
uaguuaugaaauugcuaca

SEQ ID NO: 3187337 - RNA, 19 nt, Artificial Sequence
  Description of Artificial Sequence: Synthetic oligonucleotide
auucauaacaacagcaaaa

SEQ ID NO: 3187338 - RNA, 19 nt, Artificial Sequence
  Description of Artificial Sequence: Synthetic oligonucleotide
uaucagauauuuacacuau

SEQ ID NO: 3187339 - RNA, 19 nt, Artificial Sequence
  Description of Artificial Sequence: Synthetic oligonucleotide
aguuaugaaauugcuacaa

SEQ ID NO: 3187340 - RNA, 19 nt, Artificial Sequence
  Description of Artificial Sequence: Synthetic oligonucleotide
agcaugaggaacuguauua

SEQ ID NO: 3187341 - RNA, 19 nt, Artificial Sequence
  Description of Artificial Sequence: Synthetic oligonucleotide
cacuaugauucauaacaac

SEQ ID NO: 3187342 - RNA, 19 nt, Artificial Sequence
  Description of Artificial Sequence: Synthetic oligonucleotide
aaagggguagcagcauuag

SEQ ID NO: 3187343 - RNA, 19 nt, Artificial Sequence
  Description of Artificial Sequence: Synthetic oligonucleotide
uuggggucaccacagcaug

SEQ ID NO: 3187344 - RNA, 19 nt, Artificial Sequence
  Description of Artificial Sequence: Synthetic oligonucleotide
ugauuuuaucguugggguc

SEQ ID NO: 3187345 - RNA, 19 nt, Artificial Sequence
  Description of Artificial Sequence: Synthetic oligonucleotide
uaaagggguagcagcauua

SEQ ID NO: 3187346 - RNA, 19 nt, Artificial Sequence
  Description of Artificial Sequence: Synthetic oligonucleotide
uuacacuaugauucauaac

SEQ ID NO: 3187347 - RNA, 19 nt, Artificial Sequence
  Description of Artificial Sequence: Synthetic oligonucleotide
ggguagcagcauuagaagg

SEQ ID NO: 3187348 - RNA, 19 nt, Artificial Sequence
  Description of Artificial Sequence: Synthetic oligonucleotide
ugaaaaccacuguuauaga

SEQ ID NO: 3187349 - RNA, 19 nt, Artificial Sequence
  Description of Artificial Sequence: Synthetic oligonucleotide
ucauaacaacagcaaaauu

SEQ ID NO: 3187350 - RNA, 19 nt, Artificial Sequence
  Description of Artificial Sequence: Synthetic oligonucleotide
uuaaagggguagcagcauu

SEQ ID NO: 3187351 - RNA, 19 nt, Artificial Sequence
  Description of Artificial Sequence: Synthetic oligonucleotide
gaaauugcuacaaaaugau

SEQ ID NO: 3187352 - RNA, 19 nt, Artificial Sequence
  Description of Artificial Sequence: Synthetic oligonucleotide
uuaucguuggggucaccac

SEQ ID NO: 3187353 - RNA, 19 nt, Artificial Sequence
  Description of Artificial Sequence: Synthetic oligonucleotide
aagggguagcagcauuaga

SEQ ID NO: 3187354 - RNA, 19 nt, Artificial Sequence
  Description of Artificial Sequence: Synthetic oligonucleotide
auuuuaucguuggggucac

SEQ ID NO: 3187355 - RNA, 19 nt, Artificial Sequence
  Description of Artificial Sequence: Synthetic oligonucleotide
agggguagcagcauuagaa

SEQ ID NO: 3187356 - RNA, 19 nt, Artificial Sequence
  Description of Artificial Sequence: Synthetic oligonucleotide
gcuacaaaaugauuuuauc

SEQ ID NO: 3187357 - RNA, 19 nt, Artificial Sequence
  Description of Artificial Sequence: Synthetic oligonucleotide
guuaugaaauugcuacaaa

SEQ ID NO: 3187358 - RNA, 19 nt, Artificial Sequence
  Description of Artificial Sequence: Synthetic oligonucleotide
uaacaacagcaaaauuaua

SEQ ID NO: 3187359 - RNA, 19 nt, Artificial Sequence
  Description of Artificial Sequence: Synthetic oligonucleotide
aaauugcuacaaaaugauu

SEQ ID NO: 3187360 - RNA, 19 nt, Artificial Sequence
  Description of Artificial Sequence: Synthetic oligonucleotide
uagcagcauuagaagguug

SEQ ID NO: 3187361 - RNA, 19 nt, Artificial Sequence
  Description of Artificial Sequence: Synthetic oligonucleotide
gggguagcagcauuagaag

SEQ ID NO: 3187362 - RNA, 19 nt, Artificial Sequence
  Description of Artificial Sequence: Synthetic oligonucleotide
gaagguugaaaaccacugu

SEQ ID NO: 3187363 - RNA, 19 nt, Artificial Sequence
  Description of Artificial Sequence: Synthetic oligonucleotide
auuuacacuaugauucaua

SEQ ID NO: 3187364 - RNA, 19 nt, Artificial Sequence
  Description of Artificial Sequence: Synthetic oligonucleotide
agcagcauuagaagguuga

SEQ ID NO: 3187365 - RNA, 19 nt, Artificial Sequence
  Description of Artificial Sequence: Synthetic oligonucleotide
uauuuacacuaugauucau

SEQ ID NO: 3187366 - RNA, 19 nt, Artificial Sequence
  Description of Artificial Sequence: Synthetic oligonucleotide
gcauuagaagguugaaaac

SEQ ID NO: 3187367 - RNA, 19 nt, Artificial Sequence
  Description of Artificial Sequence: Synthetic oligonucleotide
aucguuggggucaccacag

SEQ ID NO: 3187368 - RNA, 19 nt, Artificial Sequence
  Description of Artificial Sequence: Synthetic oligonucleotide
cacagcaugaggaacugua

SEQ ID NO: 3187369 - RNA, 19 nt, Artificial Sequence
  Description of Artificial Sequence: Synthetic oligonucleotide
guugaaaaccacuguuaua

SEQ ID NO: 3187370 - RNA, 19 nt, Artificial Sequence
  Description of Artificial Sequence: Synthetic oligonucleotide
gcaaaauuauaguuaugaa

SEQ ID NO: 3187371 - RNA, 19 nt, Artificial Sequence
  Description of Artificial Sequence: Synthetic oligonucleotide
acaauggacacguauagcc

SEQ ID NO: 3187372 - RNA, 19 nt, Artificial Sequence
  Description of Artificial Sequence: Synthetic oligonucleotide
aaaguaaaugcacuucacg

SEQ ID NO: 3187373 - RNA, 19 nt, Artificial Sequence
  Description of Artificial Sequence: Synthetic oligonucleotide
auaaagcuggucuagcacc

SEQ ID NO: 3187374 - RNA, 19 nt, Artificial Sequence
  Description of Artificial Sequence: Synthetic oligonucleotide
ugucaugcuacuuaaaggc

SEQ ID NO: 3187375 - RNA, 19 nt, Artificial Sequence
  Description of Artificial Sequence: Synthetic oligonucleotide
aagauaaucggcuucuuca

SEQ ID NO: 3187376 - RNA, 19 nt, Artificial Sequence
  Description of Artificial Sequence: Synthetic oligonucleotide
uuggaugugauccuugggg

SEQ ID NO: 3187377 - RNA, 19 nt, Artificial Sequence
  Description of Artificial Sequence: Synthetic oligonucleotide
aaguaaaugcacuucacga

SEQ ID NO: 3187378 - RNA, 19 nt, Artificial Sequence
  Description of Artificial Sequence: Synthetic oligonucleotide
agaacauagacaucagugg

SEQ ID NO: 3187379 - RNA, 19 nt, Artificial Sequence
  Description of Artificial Sequence: Synthetic oligonucleotide
ucaagucaccuccagaacg

SEQ ID NO: 3187380 - RNA, 19 nt, Artificial Sequence
  Description of Artificial Sequence: Synthetic oligonucleotide
uggaccagcagcaugaaca

SEQ ID NO: 3187381 - RNA, 19 nt, Artificial Sequence
  Description of Artificial Sequence: Synthetic oligonucleotide
aaagaaacgccgcaggggu

SEQ ID NO: 3187382 - RNA, 19 nt, Artificial Sequence
  Description of Artificial Sequence: Synthetic oligonucleotide
gguaagaugaagaacaucc

SEQ ID NO: 3187383 - RNA, 19 nt, Artificial Sequence
  Description of Artificial Sequence: Synthetic oligonucleotide
uuuccaugggaccugcugg

SEQ ID NO: 3187384 - RNA, 19 nt, Artificial Sequence
  Description of Artificial Sequence: Synthetic oligonucleotide
gagaacauagacaucagug

SEQ ID NO: 3187385 - RNA, 19 nt, Artificial Sequence
  Description of Artificial Sequence: Synthetic oligonucleotide
uguaaugucagcugugcca

SEQ ID NO: 3187386 - RNA, 19 nt, Artificial Sequence
  Description of Artificial Sequence: Synthetic oligonucleotide
acaugauuguacuucuugg

SEQ ID NO: 3187387 - RNA, 19 nt, Artificial Sequence
  Description of Artificial Sequence: Synthetic oligonucleotide
gaacauagacaucaguggc

SEQ ID NO: 3187388 - RNA, 19 nt, Artificial Sequence
  Description of Artificial Sequence: Synthetic oligonucleotide
uuuaacauucccuuucccu

SEQ ID NO: 3187389 - RNA, 19 nt, Artificial Sequence
  Description of Artificial Sequence: Synthetic oligonucleotide
aagauauccuggcacagcu

SEQ ID NO: 3187390 - RNA, 19 nt, Artificial Sequence
  Description of Artificial Sequence: Synthetic oligonucleotide
uacuuaaaggcucuucggc

SEQ ID NO: 3187391 - RNA, 19 nt, Artificial Sequence
  Description of Artificial Sequence: Synthetic oligonucleotide
guugcagucagccuggcag

SEQ ID NO: 3187392 - RNA, 19 nt, Artificial Sequence
  Description of Artificial Sequence: Synthetic oligonucleotide
uacaugauuguacuucuug

SEQ ID NO: 3187393 - RNA, 19 nt, Artificial Sequence
  Description of Artificial Sequence: Synthetic oligonucleotide
acucacauaaagcuggucu

SEQ ID NO: 3187394 - RNA, 19 nt, Artificial Sequence
  Description of Artificial Sequence: Synthetic oligonucleotide
guaaaugcacuucacgaag

SEQ ID NO: 3187395 - RNA, 19 nt, Artificial Sequence
  Description of Artificial Sequence: Synthetic oligonucleotide
aauggacacguauagccca

SEQ ID NO: 3187396 - RNA, 19 nt, Artificial Sequence
  Description of Artificial Sequence: Synthetic oligonucleotide
uuuccugaaccuucaaucc

SEQ ID NO: 3187397 - RNA, 19 nt, Artificial Sequence
  Description of Artificial Sequence: Synthetic oligonucleotide
uagcccaacaaucccauag

SEQ ID NO: 3187398 - RNA, 19 nt, Artificial Sequence
  Description of Artificial Sequence: Synthetic oligonucleotide
uuuacaugauuguacuucu

SEQ ID NO: 3187399 - RNA, 19 nt, Artificial Sequence
  Description of Artificial Sequence: Synthetic oligonucleotide
aggaagaugagcuuagcgu

SEQ ID NO: 3187400 - RNA, 19 nt, Artificial Sequence
  Description of Artificial Sequence: Synthetic oligonucleotide
acagcuugaggauacgguc

SEQ ID NO: 3187401 - RNA, 19 nt, Artificial Sequence
  Description of Artificial Sequence: Synthetic oligonucleotide
agcguguuagcccaucuac

SEQ ID NO: 3187402 - RNA, 19 nt, Artificial Sequence
  Description of Artificial Sequence: Synthetic oligonucleotide
auuuaacauucccuuuccc

SEQ ID NO: 3187403 - RNA, 19 nt, Artificial Sequence
  Description of Artificial Sequence: Synthetic oligonucleotide
ugaucaugguuucugguga

SEQ ID NO: 3187404 - RNA, 19 nt, Artificial Sequence
  Description of Artificial Sequence: Synthetic oligonucleotide
gauuuaacauucccuuucc

SEQ ID NO: 3187405 - RNA, 19 nt, Artificial Sequence
  Description of Artificial Sequence: Synthetic oligonucleotide
uucugguugaacauucucu

SEQ ID NO: 3187406 - RNA, 19 nt, Artificial Sequence
  Description of Artificial Sequence: Synthetic oligonucleotide
uggagugugagauaucacu

SEQ ID NO: 3187407 - RNA, 19 nt, Artificial Sequence
  Description of Artificial Sequence: Synthetic oligonucleotide
uugaucaugguuucuggug

SEQ ID NO: 3187408 - RNA, 19 nt, Artificial Sequence
  Description of Artificial Sequence: Synthetic oligonucleotide
augagcuuagcguacagcu

SEQ ID NO: 3187409 - RNA, 19 nt, Artificial Sequence
  Description of Artificial Sequence: Synthetic oligonucleotide
aguguaaugucagcugugc

SEQ ID NO: 3187410 - RNA, 19 nt, Artificial Sequence
  Description of Artificial Sequence: Synthetic oligonucleotide
acagccagcguguuagccc

SEQ ID NO: 3187411 - RNA, 19 nt, Artificial Sequence
  Description of Artificial Sequence: Synthetic oligonucleotide
gagcuuagcguacagcucc

SEQ ID NO: 3187412 - RNA, 19 nt, Artificial Sequence
  Description of Artificial Sequence: Synthetic oligonucleotide
aagagguugggaaugacca

SEQ ID NO: 3187413 - RNA, 19 nt, Artificial Sequence
  Description of Artificial Sequence: Synthetic oligonucleotide
uucucucagugacagcugg

SEQ ID NO: 3187414 - RNA, 19 nt, Artificial Sequence
  Description of Artificial Sequence: Synthetic oligonucleotide
uuggauuuaacauucccuu

SEQ ID NO: 3187415 - RNA, 19 nt, Artificial Sequence
  Description of Artificial Sequence: Synthetic oligonucleotide
aaggugugcuucucguugg

SEQ ID NO: 3187416 - RNA, 19 nt, Artificial Sequence
  Description of Artificial Sequence: Synthetic oligonucleotide
acuggcuccaccuccuggc

SEQ ID NO: 3187417 - RNA, 19 nt, Artificial Sequence
  Description of Artificial Sequence: Synthetic oligonucleotide
uauccaaggagcucuguca

SEQ ID NO: 3187418 - RNA, 19 nt, Artificial Sequence
  Description of Artificial Sequence: Synthetic oligonucleotide
ugcaucauauggcuguggc

SEQ ID NO: 3187419 - RNA, 19 nt, Artificial Sequence
  Description of Artificial Sequence: Synthetic oligonucleotide
uccucgaacaugauggagu

SEQ ID NO: 3187420 - RNA, 19 nt, Artificial Sequence
  Description of Artificial Sequence: Synthetic oligonucleotide
auacgggugggguagccgc

SEQ ID NO: 3187421 - RNA, 19 nt, Artificial Sequence
  Description of Artificial Sequence: Synthetic oligonucleotide
augucaugaaagaaacgcc

SEQ ID NO: 3187422 - RNA, 19 nt, Artificial Sequence
  Description of Artificial Sequence: Synthetic oligonucleotide
auacgguccacauauggca

SEQ ID NO: 3187423 - RNA, 19 nt, Artificial Sequence
  Description of Artificial Sequence: Synthetic oligonucleotide
uuaacauucccuuucccuu

SEQ ID NO: 3187424 - RNA, 19 nt, Artificial Sequence
  Description of Artificial Sequence: Synthetic oligonucleotide
agucggaagccuuuguguc

SEQ ID NO: 3187425 - RNA, 19 nt, Artificial Sequence
  Description of Artificial Sequence: Synthetic oligonucleotide
ucugguugaacauucucuc

SEQ ID NO: 3187426 - RNA, 19 nt, Artificial Sequence
  Description of Artificial Sequence: Synthetic oligonucleotide
uaaagcuggucuagcaccc

SEQ ID NO: 3187427 - RNA, 19 nt, Artificial Sequence
  Description of Artificial Sequence: Synthetic oligonucleotide
uguacuggcuaaugaacug

SEQ ID NO: 3187428 - RNA, 19 nt, Artificial Sequence
  Description of Artificial Sequence: Synthetic oligonucleotide
acuuaaaggcucuucggcu

SEQ ID NO: 3187429 - RNA, 19 nt, Artificial Sequence
  Description of Artificial Sequence: Synthetic oligonucleotide
aagcucugcagccggcgcc

SEQ ID NO: 3187430 - RNA, 19 nt, Artificial Sequence
  Description of Artificial Sequence: Synthetic oligonucleotide
acguauagcccaacaaucc

SEQ ID NO: 3187431 - RNA, 19 nt, Artificial Sequence
  Description of Artificial Sequence: Synthetic oligonucleotide
acagcagcaucaucagggc

SEQ ID NO: 3187432 - RNA, 19 nt, Artificial Sequence
  Description of Artificial Sequence: Synthetic oligonucleotide
ucaugcuacuuaaaggcuc

SEQ ID NO: 3187433 - RNA, 19 nt, Artificial Sequence
  Description of Artificial Sequence: Synthetic oligonucleotide
accaaagacaaugaugaug

SEQ ID NO: 3187434 - RNA, 19 nt, Artificial Sequence
  Description of Artificial Sequence: Synthetic oligonucleotide
agguuuacaugauuguacu

SEQ ID NO: 3187435 - RNA, 19 nt, Artificial Sequence
  Description of Artificial Sequence: Synthetic oligonucleotide
ugaacaggaaggccuccgg

SEQ ID NO: 3187436 - RNA, 19 nt, Artificial Sequence
  Description of Artificial Sequence: Synthetic oligonucleotide
uggugcuuggugaaugugc

SEQ ID NO: 3187437 - RNA, 19 nt, Artificial Sequence
  Description of Artificial Sequence: Synthetic oligonucleotide
uuaaaggcucuucggcucc

SEQ ID NO: 3187438 - RNA, 19 nt, Artificial Sequence
  Description of Artificial Sequence: Synthetic oligonucleotide
uccaucacggguuuccaug

SEQ ID NO: 3187439 - RNA, 19 nt, Artificial Sequence
  Description of Artificial Sequence: Synthetic oligonucleotide
uuaagguccucuaggggcu

SEQ ID NO: 3187440 - RNA, 19 nt, Artificial Sequence
  Description of Artificial Sequence: Synthetic oligonucleotide
ugagaacauagacaucagu

SEQ ID NO: 3187441 - RNA, 19 nt, Artificial Sequence
  Description of Artificial Sequence: Synthetic oligonucleotide
cauaaagcuggucuagcac

SEQ ID NO: 3187442 - RNA, 19 nt, Artificial Sequence
  Description of Artificial Sequence: Synthetic oligonucleotide
caauggacacguauagccc

SEQ ID NO: 3187443 - RNA, 19 nt, Artificial Sequence
  Description of Artificial Sequence: Synthetic oligonucleotide
aaucccauagccagccagg

SEQ ID NO: 3187444 - RNA, 19 nt, Artificial Sequence
  Description of Artificial Sequence: Synthetic oligonucleotide
agugaggacgcaauguccg

SEQ ID NO: 3187445 - RNA, 19 nt, Artificial Sequence
  Description of Artificial Sequence: Synthetic oligonucleotide
gaagucggaagccuuugug

SEQ ID NO: 3187446 - RNA, 19 nt, Artificial Sequence
  Description of Artificial Sequence: Synthetic oligonucleotide
gauacgguccacauauggc

SEQ ID NO: 3187447 - RNA, 19 nt, Artificial Sequence
  Description of Artificial Sequence: Synthetic oligonucleotide
cacguauagcccaacaauc

SEQ ID NO: 3187448 - RNA, 19 nt, Artificial Sequence
  Description of Artificial Sequence: Synthetic oligonucleotide
caggaagaugagcuuagcg

SEQ ID NO: 3187449 - RNA, 19 nt, Artificial Sequence
  Description of Artificial Sequence: Synthetic oligonucleotide
caagucaccuccagaacgc

SEQ ID NO: 3187450 - RNA, 19 nt, Artificial Sequence
  Description of Artificial Sequence: Synthetic oligonucleotide
guacuuggugugcagaaug

SEQ ID NO: 3187451 - RNA, 19 nt, Artificial Sequence
  Description of Artificial Sequence: Synthetic oligonucleotide
uccagaacgccaucugucc

SEQ ID NO: 3187452 - RNA, 19 nt, Artificial Sequence
  Description of Artificial Sequence: Synthetic oligonucleotide
acacguauagcccaacaau

SEQ ID NO: 3187453 - RNA, 19 nt, Artificial Sequence
  Description of Artificial Sequence: Synthetic oligonucleotide
gugaugugggcuuuucucc

SEQ ID NO: 3187454 - RNA, 19 nt, Artificial Sequence
  Description of Artificial Sequence: Synthetic oligonucleotide
cuuaaaggcucuucggcuc

SEQ ID NO: 3187455 - RNA, 19 nt, Artificial Sequence
  Description of Artificial Sequence: Synthetic oligonucleotide
aagaugaccauggguagca

SEQ ID NO: 3187456 - RNA, 19 nt, Artificial Sequence
  Description of Artificial Sequence: Synthetic oligonucleotide
uuugugucugcuuguuccc

SEQ ID NO: 3187457 - RNA, 19 nt, Artificial Sequence
  Description of Artificial Sequence: Synthetic oligonucleotide
uccuggcacagcuugagga

SEQ ID NO: 3187458 - RNA, 19 nt, Artificial Sequence
  Description of Artificial Sequence: Synthetic oligonucleotide
auccuuggauuuaacauuc

SEQ ID NO: 3187459 - RNA, 19 nt, Artificial Sequence
  Description of Artificial Sequence: Synthetic oligonucleotide
ugaugggccaggaggaugu

SEQ ID NO: 3187460 - RNA, 19 nt, Artificial Sequence
  Description of Artificial Sequence: Synthetic oligonucleotide
ugaugugggcuuuucuccc

SEQ ID NO: 3187461 - RNA, 19 nt, Artificial Sequence
  Description of Artificial Sequence: Synthetic oligonucleotide
gaagagguugggaaugacc

SEQ ID NO: 3187462 - RNA, 19 nt, Artificial Sequence
  Description of Artificial Sequence: Synthetic oligonucleotide
uacgguccacauauggcag

SEQ ID NO: 3187463 - RNA, 19 nt, Artificial Sequence
  Description of Artificial Sequence: Synthetic oligonucleotide
aauguccguggcugcagag

SEQ ID NO: 3187464 - RNA, 19 nt, Artificial Sequence
  Description of Artificial Sequence: Synthetic oligonucleotide
gaggugaauggccaccacc

SEQ ID NO: 3187465 - RNA, 19 nt, Artificial Sequence
  Description of Artificial Sequence: Synthetic oligonucleotide
cagggguugauauaugcuc

SEQ ID NO: 3187466 - RNA, 19 nt, Artificial Sequence
  Description of Artificial Sequence: Synthetic oligonucleotide
gcuccuuugggucuuagag

SEQ ID NO: 3187467 - RNA, 19 nt, Artificial Sequence
  Description of Artificial Sequence: Synthetic oligonucleotide
aaagacccagaaaccaaag

SEQ ID NO: 3187468 - RNA, 19 nt, Artificial Sequence
  Description of Artificial Sequence: Synthetic oligonucleotide
acggucaaugaccauggug

SEQ ID NO: 3187469 - RNA, 19 nt, Artificial Sequence
  Description of Artificial Sequence: Synthetic oligonucleotide
uuccugaaccuucaauccu

SEQ ID NO: 3187470 - RNA, 19 nt, Artificial Sequence
  Description of Artificial Sequence: Synthetic oligonucleotide
uauagcccaacaaucccau

SEQ ID NO: 3187471 - RNA, 19 nt, Artificial Sequence
  Description of Artificial Sequence: Synthetic oligonucleotide
uuuuaaaggagcaacauca

SEQ ID NO: 3187472 - RNA, 19 nt, Artificial Sequence
  Description of Artificial Sequence: Synthetic oligonucleotide
aagaucuuggaauugagag

SEQ ID NO: 3187473 - RNA, 19 nt, Artificial Sequence
  Description of Artificial Sequence: Synthetic oligonucleotide
uauauuuuaacaaacacuu

SEQ ID NO: 3187474 - RNA, 19 nt, Artificial Sequence
  Description of Artificial Sequence: Synthetic oligonucleotide
ucaaaagucauucugacuc

SEQ ID NO: 3187475 - RNA, 19 nt, Artificial Sequence
  Description of Artificial Sequence: Synthetic oligonucleotide
uuaugauaggcaaagaucu

SEQ ID NO: 3187476 - RNA, 19 nt, Artificial Sequence
  Description of Artificial Sequence: Synthetic oligonucleotide
uuaacaaacacuuuccaug

SEQ ID NO: 3187477 - RNA, 19 nt, Artificial Sequence
  Description of Artificial Sequence: Synthetic oligonucleotide
uaaaacacaccuuuuaaag

SEQ ID NO: 3187478 - RNA, 19 nt, Artificial Sequence
  Description of Artificial Sequence: Synthetic oligonucleotide
aaaacacaccuuuuaaagg

SEQ ID NO: 3187479 - RNA, 19 nt, Artificial Sequence
  Description of Artificial Sequence: Synthetic oligonucleotide
uuagcuuucacuuaaggcu

SEQ ID NO: 3187480 - RNA, 19 nt, Artificial Sequence
  Description of Artificial Sequence: Synthetic oligonucleotide
auuagcuuucacuuaaggc

SEQ ID NO: 3187481 - RNA, 19 nt, Artificial Sequence
  Description of Artificial Sequence: Synthetic oligonucleotide
aaucaaaagucauucugac

SEQ ID NO: 3187482 - RNA, 19 nt, Artificial Sequence
  Description of Artificial Sequence: Synthetic oligonucleotide
aaauguguauauuuuaaca

SEQ ID NO: 3187483 - RNA, 19 nt, Artificial Sequence
  Description of Artificial Sequence: Synthetic oligonucleotide
uauuuuaacaaacacuuuc

SEQ ID NO: 3187484 - RNA, 19 nt, Artificial Sequence
  Description of Artificial Sequence: Synthetic oligonucleotide
ugucuauucaccuuaaaug

SEQ ID NO: 3187485 - RNA, 19 nt, Artificial Sequence
  Description of Artificial Sequence: Synthetic oligonucleotide
ucagaauugauaaucaaaa

SEQ ID NO: 3187486 - RNA, 19 nt, Artificial Sequence
  Description of Artificial Sequence: Synthetic oligonucleotide
aauguguauauuuuaacaa

SEQ ID NO: 3187487 - RNA, 19 nt, Artificial Sequence
  Description of Artificial Sequence: Synthetic oligonucleotide
agaauugauaaucaaaagu

SEQ ID NO: 3187488 - RNA, 19 nt, Artificial Sequence
  Description of Artificial Sequence: Synthetic oligonucleotide
aaaauuucucuucagaauu

SEQ ID NO: 3187489 - RNA, 19 nt, Artificial Sequence
  Description of Artificial Sequence: Synthetic oligonucleotide
uguauauuuuaacaaacac

SEQ ID NO: 3187490 - RNA, 19 nt, Artificial Sequence
  Description of Artificial Sequence: Synthetic oligonucleotide
aaacacaccuuuuaaagga

SEQ ID NO: 3187491 - RNA, 19 nt, Artificial Sequence
  Description of Artificial Sequence: Synthetic oligonucleotide
auaaucaaaagucauucug

SEQ ID NO: 3187492 - RNA, 19 nt, Artificial Sequence
  Description of Artificial Sequence: Synthetic oligonucleotide
uuuaugauaggcaaagauc

SEQ ID NO: 3187493 - RNA, 19 nt, Artificial Sequence
  Description of Artificial Sequence: Synthetic oligonucleotide
aauugagagaucucaagcu

SEQ ID NO: 3187494 - RNA, 19 nt, Artificial Sequence
  Description of Artificial Sequence: Synthetic oligonucleotide
gaauugauaaucaaaaguc

SEQ ID NO: 3187495 - RNA, 19 nt, Artificial Sequence
  Description of Artificial Sequence: Synthetic oligonucleotide
ucacuuaaggcuucuaagg

SEQ ID NO: 3187496 - RNA, 19 nt, Artificial Sequence
  Description of Artificial Sequence: Synthetic oligonucleotide
auuauauuagcuuucacuu

SEQ ID NO: 3187497 - RNA, 19 nt, Artificial Sequence
  Description of Artificial Sequence: Synthetic oligonucleotide
aauaaaacacaccuuuuaa

SEQ ID NO: 3187498 - RNA, 19 nt, Artificial Sequence
  Description of Artificial Sequence: Synthetic oligonucleotide
auuuuaacaaacacuuucc

SEQ ID NO: 3187499 - RNA, 19 nt, Artificial Sequence
  Description of Artificial Sequence: Synthetic oligonucleotide
cuuaaugugucuauucacc

SEQ ID NO: 3187500 - RNA, 19 nt, Artificial Sequence
  Description of Artificial Sequence: Synthetic oligonucleotide
aucaccagaaauaaaacac

SEQ ID NO: 3187501 - RNA, 19 nt, Artificial Sequence
  Description of Artificial Sequence: Synthetic oligonucleotide
uaaucaaaagucauucuga

SEQ ID NO: 3187502 - RNA, 19 nt, Artificial Sequence
  Description of Artificial Sequence: Synthetic oligonucleotide
agaaauaaaacacaccuuu

SEQ ID NO: 3187503 - RNA, 19 nt, Artificial Sequence
  Description of Artificial Sequence: Synthetic oligonucleotide
uuaaauguguauauuuuaa

SEQ ID NO: 3187504 - RNA, 19 nt, Artificial Sequence
  Description of Artificial Sequence: Synthetic oligonucleotide
aucacuugaaaauggauug

SEQ ID NO: 3187505 - RNA, 19 nt, Artificial Sequence
  Description of Artificial Sequence: Synthetic oligonucleotide
uguguauauuuuaacaaac

SEQ ID NO: 3187506 - RNA, 19 nt, Artificial Sequence
  Description of Artificial Sequence: Synthetic oligonucleotide
uauauuagcuuucacuuaa

SEQ ID NO: 3187507 - RNA, 19 nt, Artificial Sequence
  Description of Artificial Sequence: Synthetic oligonucleotide
gaauugagagaucucaagc

SEQ ID NO: 3187508 - RNA, 19 nt, Artificial Sequence
  Description of Artificial Sequence: Synthetic oligonucleotide
uugaaaauggauugugugc

SEQ ID NO: 3187509 - RNA, 19 nt, Artificial Sequence
  Description of Artificial Sequence: Synthetic oligonucleotide
uucucuucagaauugauaa

SEQ ID NO: 3187510 - RNA, 19 nt, Artificial Sequence
  Description of Artificial Sequence: Synthetic oligonucleotide
ugaaaauuucucuucagaa

SEQ ID NO: 3187511 - RNA, 19 nt, Artificial Sequence
  Description of Artificial Sequence: Synthetic oligonucleotide
cuuaaggcuucuaaggugc

SEQ ID NO: 3187512 - RNA, 19 nt, Artificial Sequence
  Description of Artificial Sequence: Synthetic oligonucleotide
ugauaggcaaagaucuugg

SEQ ID NO: 3187513 - RNA, 19 nt, Artificial Sequence
  Description of Artificial Sequence: Synthetic oligonucleotide
uauuagcuuucacuuaagg

SEQ ID NO: 3187514 - RNA, 19 nt, Artificial Sequence
  Description of Artificial Sequence: Synthetic oligonucleotide
ugaaaauggauugugugcc

SEQ ID NO: 3187515 - RNA, 19 nt, Artificial Sequence
  Description of Artificial Sequence: Synthetic oligonucleotide
aaauaaaacacaccuuuua

SEQ ID NO: 3187516 - RNA, 19 nt, Artificial Sequence
  Description of Artificial Sequence: Synthetic oligonucleotide
uucacuuaaggcuucuaag

SEQ ID NO: 3187517 - RNA, 19 nt, Artificial Sequence
  Description of Artificial Sequence: Synthetic oligonucleotide
aaaggagcaacaucacuug

SEQ ID NO: 3187518 - RNA, 19 nt, Artificial Sequence
  Description of Artificial Sequence: Synthetic oligonucleotide
cuugaaaauggauugugug

SEQ ID NO: 3187519 - RNA, 19 nt, Artificial Sequence
  Description of Artificial Sequence: Synthetic oligonucleotide
aacaucaccagaaauaaaa

SEQ ID NO: 3187520 - RNA, 19 nt, Artificial Sequence
  Description of Artificial Sequence: Synthetic oligonucleotide
uucagaauugauaaucaaa

SEQ ID NO: 3187521 - RNA, 19 nt, Artificial Sequence
  Description of Artificial Sequence: Synthetic oligonucleotide
uaaaggagcaacaucacuu

SEQ ID NO: 3187522 - RNA, 19 nt, Artificial Sequence
  Description of Artificial Sequence: Synthetic oligonucleotide
uuuuaacaaacacuuucca

SEQ ID NO: 3187523 - RNA, 19 nt, Artificial Sequence
  Description of Artificial Sequence: Synthetic oligonucleotide
uucuuuaugauaggcaaag

SEQ ID NO: 3187524 - RNA, 19 nt, Artificial Sequence
  Description of Artificial Sequence: Synthetic oligonucleotide
ugauaaucaaaagucauuc

SEQ ID NO: 3187525 - RNA, 19 nt, Artificial Sequence
  Description of Artificial Sequence: Synthetic oligonucleotide
gauuauauuagcuuucacu

SEQ ID NO: 3187526 - RNA, 19 nt, Artificial Sequence
  Description of Artificial Sequence: Synthetic oligonucleotide
ucuucagaauugauaauca

SEQ ID NO: 3187527 - RNA, 19 nt, Artificial Sequence
  Description of Artificial Sequence: Synthetic oligonucleotide
aauugauaaucaaaaguca

SEQ ID NO: 3187528 - RNA, 19 nt, Artificial Sequence
  Description of Artificial Sequence: Synthetic oligonucleotide
ugauucuuuaugauaggca

SEQ ID NO: 3187529 - RNA, 19 nt, Artificial Sequence
  Description of Artificial Sequence: Synthetic oligonucleotide
cuuuccaugauucuuuaug

SEQ ID NO: 3187530 - RNA, 19 nt, Artificial Sequence
  Description of Artificial Sequence: Synthetic oligonucleotide
gauucuuuaugauaggcaa

SEQ ID NO: 3187531 - RNA, 19 nt, Artificial Sequence
  Description of Artificial Sequence: Synthetic oligonucleotide
aaggcuucuaaggugcccc

SEQ ID NO: 3187532 - RNA, 19 nt, Artificial Sequence
  Description of Artificial Sequence: Synthetic oligonucleotide
uuuccaugauucuuuauga

SEQ ID NO: 3187533 - RNA, 19 nt, Artificial Sequence
  Description of Artificial Sequence: Synthetic oligonucleotide
aaugugucuauucaccuua

SEQ ID NO: 3187534 - RNA, 19 nt, Artificial Sequence
  Description of Artificial Sequence: Synthetic oligonucleotide
uaacaaacacuuuccauga

SEQ ID NO: 3187535 - RNA, 19 nt, Artificial Sequence
  Description of Artificial Sequence: Synthetic oligonucleotide
uaaauguguauauuuuaac

SEQ ID NO: 3187536 - RNA, 19 nt, Artificial Sequence
  Description of Artificial Sequence: Synthetic oligonucleotide
uaggcaaagaucuuggaau

SEQ ID NO: 3187537 - RNA, 19 nt, Artificial Sequence
  Description of Artificial Sequence: Synthetic oligonucleotide
augauucuuuaugauaggc

SEQ ID NO: 3187538 - RNA, 19 nt, Artificial Sequence
  Description of Artificial Sequence: Synthetic oligonucleotide
agcaacaucacuugaaaau

SEQ ID NO: 3187539 - RNA, 19 nt, Artificial Sequence
  Description of Artificial Sequence: Synthetic oligonucleotide
ucaccagaaauaaaacaca

SEQ ID NO: 3187540 - RNA, 19 nt, Artificial Sequence
  Description of Artificial Sequence: Synthetic oligonucleotide
ucuauucaccuuaaaugug

SEQ ID NO: 3187541 - RNA, 19 nt, Artificial Sequence
  Description of Artificial Sequence: Synthetic oligonucleotide
uuuaacaaacacuuuccau

SEQ ID NO: 3187542 - RNA, 19 nt, Artificial Sequence
  Description of Artificial Sequence: Synthetic oligonucleotide
ucuggauuauauuagcuuu

SEQ ID NO: 3187543 - RNA, 19 nt, Artificial Sequence
  Description of Artificial Sequence: Synthetic oligonucleotide
uuaaugugucuauucaccu

SEQ ID NO: 3187544 - RNA, 19 nt, Artificial Sequence
  Description of Artificial Sequence: Synthetic oligonucleotide
uaucagugaaaauuucucu

SEQ ID NO: 3187545 - RNA, 19 nt, Artificial Sequence
  Description of Artificial Sequence: Synthetic oligonucleotide
ucuuaaugugucuauucac

SEQ ID NO: 3187546 - RNA, 19 nt, Artificial Sequence
  Description of Artificial Sequence: Synthetic oligonucleotide
caaacacuuuccaugauuc

SEQ ID NO: 3187547 - RNA, 19 nt, Artificial Sequence
  Description of Artificial Sequence: Synthetic oligonucleotide
cuaucagugaaaauuucuc

SEQ ID NO: 3187548 - RNA, 19 nt, Artificial Sequence
  Description of Artificial Sequence: Synthetic oligonucleotide
uuggaauugagagaucuca

SEQ ID NO: 3187549 - RNA, 19 nt, Artificial Sequence
  Description of Artificial Sequence: Synthetic oligonucleotide
uuaaaggagcaacaucacu

SEQ ID NO: 3187550 - RNA, 19 nt, Artificial Sequence
  Description of Artificial Sequence: Synthetic oligonucleotide
auaaaacacaccuuuuaaa

SEQ ID NO: 3187551 - RNA, 19 nt, Artificial Sequence
  Description of Artificial Sequence: Synthetic oligonucleotide
caacaucacuugaaaaugg

SEQ ID NO: 3187552 - RNA, 19 nt, Artificial Sequence
  Description of Artificial Sequence: Synthetic oligonucleotide
aaauggauugugugcccuc

SEQ ID NO: 3187553 - RNA, 19 nt, Artificial Sequence
  Description of Artificial Sequence: Synthetic oligonucleotide
uuucucuucagaauugaua

SEQ ID NO: 3187554 - RNA, 19 nt, Artificial Sequence
  Description of Artificial Sequence: Synthetic oligonucleotide
auugugugcccucuuaaug

SEQ ID NO: 3187555 - RNA, 19 nt, Artificial Sequence
  Description of Artificial Sequence: Synthetic oligonucleotide
uuuaaaggagcaacaucac

SEQ ID NO: 3187556 - RNA, 19 nt, Artificial Sequence
  Description of Artificial Sequence: Synthetic oligonucleotide
ucagugaaaauuucucuuc

SEQ ID NO: 3187557 - RNA, 19 nt, Artificial Sequence
  Description of Artificial Sequence: Synthetic oligonucleotide
uuucacuuaaggcuucuaa

SEQ ID NO: 3187558 - RNA, 19 nt, Artificial Sequence
  Description of Artificial Sequence: Synthetic oligonucleotide
acuuaaggcuucuaaggug

SEQ ID NO: 3187559 - RNA, 19 nt, Artificial Sequence
  Description of Artificial Sequence: Synthetic oligonucleotide
ucuuggaauugagagaucu

SEQ ID NO: 3187560 - RNA, 19 nt, Artificial Sequence
  Description of Artificial Sequence: Synthetic oligonucleotide
ccaugauucuuuaugauag

SEQ ID NO: 3187561 - RNA, 19 nt, Artificial Sequence
  Description of Artificial Sequence: Synthetic oligonucleotide
agagaucucaagcuaucag

SEQ ID NO: 3187562 - RNA, 19 nt, Artificial Sequence
  Description of Artificial Sequence: Synthetic oligonucleotide
cagaauugauaaucaaaag

SEQ ID NO: 3187563 - RNA, 19 nt, Artificial Sequence
  Description of Artificial Sequence: Synthetic oligonucleotide
agugaaaauuucucuucag

SEQ ID NO: 3187564 - RNA, 19 nt, Artificial Sequence
  Description of Artificial Sequence: Synthetic oligonucleotide
uugauaaucaaaagucauu

SEQ ID NO: 3187565 - RNA, 19 nt, Artificial Sequence
  Description of Artificial Sequence: Synthetic oligonucleotide
auguguauauuuuaacaaa

SEQ ID NO: 3187566 - RNA, 19 nt, Artificial Sequence
  Description of Artificial Sequence: Synthetic oligonucleotide
uugugugcccucuuaaugu

SEQ ID NO: 3187567 - RNA, 19 nt, Artificial Sequence
  Description of Artificial Sequence: Synthetic oligonucleotide
ugcccuaacaucaccagaa

SEQ ID NO: 3187568 - RNA, 19 nt, Artificial Sequence
  Description of Artificial Sequence: Synthetic oligonucleotide
accagaaauaaaacacacc

SEQ ID NO: 3187569 - RNA, 19 nt, Artificial Sequence
  Description of Artificial Sequence: Synthetic oligonucleotide
aaauuucucuucagaauug

SEQ ID NO: 3187570 - RNA, 19 nt, Artificial Sequence
  Description of Artificial Sequence: Synthetic oligonucleotide
cuuuuaaaggagcaacauc

SEQ ID NO: 3187571 - RNA, 19 nt, Artificial Sequence
  Description of Artificial Sequence: Synthetic oligonucleotide
uuuaagaaaaccaaaacuc

SEQ ID NO: 3187572 - RNA, 19 nt, Artificial Sequence
  Description of Artificial Sequence: Synthetic oligonucleotide
aacacaacauuccucaugg

SEQ ID NO: 3187573 - RNA, 19 nt, Artificial Sequence
  Description of Artificial Sequence: Synthetic oligonucleotide
uagaaauucucuaagaaug

SEQ ID NO: 3187574 - RNA, 19 nt, Artificial Sequence
  Description of Artificial Sequence: Synthetic oligonucleotide
uuuuauuacauaaacacaa

SEQ ID NO: 3187575 - RNA, 19 nt, Artificial Sequence
  Description of Artificial Sequence: Synthetic oligonucleotide
uuaaaggucaguuacaugu

SEQ ID NO: 3187576 - RNA, 19 nt, Artificial Sequence
  Description of Artificial Sequence: Synthetic oligonucleotide
aaauguaauguuuucuuuc

SEQ ID NO: 3187577 - RNA, 19 nt, Artificial Sequence
  Description of Artificial Sequence: Synthetic oligonucleotide
uuuacuuuaaaauguaaug

SEQ ID NO: 3187578 - RNA, 19 nt, Artificial Sequence
  Description of Artificial Sequence: Synthetic oligonucleotide
aauaauagguuuuguuuac

SEQ ID NO: 3187579 - RNA, 19 nt, Artificial Sequence
  Description of Artificial Sequence: Synthetic oligonucleotide
ucuuaagaaaauaauaggu

SEQ ID NO: 3187580 - RNA, 19 nt, Artificial Sequence
  Description of Artificial Sequence: Synthetic oligonucleotide
uuuuguuuacuuuaaaaug

SEQ ID NO: 3187581 - RNA, 19 nt, Artificial Sequence
  Description of Artificial Sequence: Synthetic oligonucleotide
aaaauaauagguuuuguuu

SEQ ID NO: 3187582 - RNA, 19 nt, Artificial Sequence
  Description of Artificial Sequence: Synthetic oligonucleotide
uuuguuuacuuuaaaaugu

SEQ ID NO: 3187583 - RNA, 19 nt, Artificial Sequence
  Description of Artificial Sequence: Synthetic oligonucleotide
uuugacuuaauuauuccag

SEQ ID NO: 3187584 - RNA, 19 nt, Artificial Sequence
  Description of Artificial Sequence: Synthetic oligonucleotide
uucuuaagaaaauaauagg

SEQ ID NO: 3187585 - RNA, 19 nt, Artificial Sequence
  Description of Artificial Sequence: Synthetic oligonucleotide
auuuaagaaaaccaaaacu

SEQ ID NO: 3187586 - RNA, 19 nt, Artificial Sequence
  Description of Artificial Sequence: Synthetic oligonucleotide
uuaagaaaaccaaaacucc

SEQ ID NO: 3187587 - RNA, 19 nt, Artificial Sequence
  Description of Artificial Sequence: Synthetic oligonucleotide
uuuacaaaguucuauaaaa

SEQ ID NO: 3187588 - RNA, 19 nt, Artificial Sequence
  Description of Artificial Sequence: Synthetic oligonucleotide
aaauguuucuuucccaauc

SEQ ID NO: 3187589 - RNA, 19 nt, Artificial Sequence
  Description of Artificial Sequence: Synthetic oligonucleotide
agaaugauuuaagaaaacc

SEQ ID NO: 3187590 - RNA, 19 nt, Artificial Sequence
  Description of Artificial Sequence: Synthetic oligonucleotide
guaauguuuucuuucaagg

SEQ ID NO: 3187591 - RNA, 19 nt, Artificial Sequence
  Description of Artificial Sequence: Synthetic oligonucleotide
uuacauaaacacaacauuc

SEQ ID NO: 3187592 - RNA, 19 nt, Artificial Sequence
  Description of Artificial Sequence: Synthetic oligonucleotide
auaaacacaacauuccuca

SEQ ID NO: 3187593 - RNA, 19 nt, Artificial Sequence
  Description of Artificial Sequence: Synthetic oligonucleotide
aaaaccaaaacuccucuca

SEQ ID NO: 3187594 - RNA, 19 nt, Artificial Sequence
  Description of Artificial Sequence: Synthetic oligonucleotide
uaagaaugauuuaagaaaa

SEQ ID NO: 3187595 - RNA, 19 nt, Artificial Sequence
  Description of Artificial Sequence: Synthetic oligonucleotide
auucuuaagaaaauaauag

SEQ ID NO: 3187596 - RNA, 19 nt, Artificial Sequence
  Description of Artificial Sequence: Synthetic oligonucleotide
aaauaauagguuuuguuua

SEQ ID NO: 3187597 - RNA, 19 nt, Artificial Sequence
  Description of Artificial Sequence: Synthetic oligonucleotide
uacauaaacacaacauucc

SEQ ID NO: 3187598 - RNA, 19 nt, Artificial Sequence
  Description of Artificial Sequence: Synthetic oligonucleotide
uauuacauaaacacaacau

SEQ ID NO: 3187599 - RNA, 19 nt, Artificial Sequence
  Description of Artificial Sequence: Synthetic oligonucleotide
aauguaauguuuucuuuca

SEQ ID NO: 3187600 - RNA, 19 nt, Artificial Sequence
  Description of Artificial Sequence: Synthetic oligonucleotide
ucuaagaaugauuuaagaa

SEQ ID NO: 3187601 - RNA, 19 nt, Artificial Sequence
  Description of Artificial Sequence: Synthetic oligonucleotide
uacauaaggaagcuuaugu

SEQ ID NO: 3187602 - RNA, 19 nt, Artificial Sequence
  Description of Artificial Sequence: Synthetic oligonucleotide
uuauuacauaaacacaaca

SEQ ID NO: 3187603 - RNA, 19 nt, Artificial Sequence
  Description of Artificial Sequence: Synthetic oligonucleotide
ugauuuaagaaaaccaaaa

SEQ ID NO: 3187604 - RNA, 19 nt, Artificial Sequence
  Description of Artificial Sequence: Synthetic oligonucleotide
uuaagaaaauaauagguuu

SEQ ID NO: 3187605 - RNA, 19 nt, Artificial Sequence
  Description of Artificial Sequence: Synthetic oligonucleotide
aaaccaaaacuccucucac

SEQ ID NO: 3187606 - RNA, 19 nt, Artificial Sequence
  Description of Artificial Sequence: Synthetic oligonucleotide
uguaauguuuucuuucaag

SEQ ID NO: 3187607 - RNA, 19 nt, Artificial Sequence
  Description of Artificial Sequence: Synthetic oligonucleotide
gauuuaagaaaaccaaaac

SEQ ID NO: 3187608 - RNA, 19 nt, Artificial Sequence
  Description of Artificial Sequence: Synthetic oligonucleotide
ugacagaaagucaagugcc

SEQ ID NO: 3187609 - RNA, 19 nt, Artificial Sequence
  Description of Artificial Sequence: Synthetic oligonucleotide
aauguuuucuuucaaggua

SEQ ID NO: 3187610 - RNA, 19 nt, Artificial Sequence
  Description of Artificial Sequence: Synthetic oligonucleotide
ugucuuuugacuuaauuau

SEQ ID NO: 3187611 - RNA, 19 nt, Artificial Sequence
  Description of Artificial Sequence: Synthetic oligonucleotide
uguagaaauucucuaagaa

SEQ ID NO: 3187612 - RNA, 19 nt, Artificial Sequence
  Description of Artificial Sequence: Synthetic oligonucleotide
uuucuuucaagguauaaaa

SEQ ID NO: 3187613 - RNA, 19 nt, Artificial Sequence
  Description of Artificial Sequence: Synthetic oligonucleotide
uuacuuuaaaauguaaugu

SEQ ID NO: 3187614 - RNA, 19 nt, Artificial Sequence
  Description of Artificial Sequence: Synthetic oligonucleotide
accaaaacuccucucacac

SEQ ID NO: 3187615 - RNA, 19 nt, Artificial Sequence
  Description of Artificial Sequence: Synthetic oligonucleotide
aggacuucucgauaagucc

SEQ ID NO: 3187616 - RNA, 19 nt, Artificial Sequence
  Description of Artificial Sequence: Synthetic oligonucleotide
aaugauuuaagaaaaccaa

SEQ ID NO: 3187617 - RNA, 19 nt, Artificial Sequence
  Description of Artificial Sequence: Synthetic oligonucleotide
cuaagaaugauuuaagaaa

SEQ ID NO: 3187618 - RNA, 19 nt, Artificial Sequence
  Description of Artificial Sequence: Synthetic oligonucleotide
aauguuucuuucccaauca

SEQ ID NO: 3187619 - RNA, 19 nt, Artificial Sequence
  Description of Artificial Sequence: Synthetic oligonucleotide
aaacuccucucacaccucc

SEQ ID NO: 3187620 - RNA, 19 nt, Artificial Sequence
  Description of Artificial Sequence: Synthetic oligonucleotide
uaagaaaaccaaaacuccu

SEQ ID NO: 3187621 - RNA, 19 nt, Artificial Sequence
  Description of Artificial Sequence: Synthetic oligonucleotide
uuauguuugucuuuugacu

SEQ ID NO: 3187622 - RNA, 19 nt, Artificial Sequence
  Description of Artificial Sequence: Synthetic oligonucleotide
ucuuuugacuuaauuauuc

SEQ ID NO: 3187623 - RNA, 19 nt, Artificial Sequence
  Description of Artificial Sequence: Synthetic oligonucleotide
uuuugacuuaauuauucca

SEQ ID NO: 3187624 - RNA, 19 nt, Artificial Sequence
  Description of Artificial Sequence: Synthetic oligonucleotide
aagaaaauaauagguuuug

SEQ ID NO: 3187625 - RNA, 19 nt, Artificial Sequence
  Description of Artificial Sequence: Synthetic oligonucleotide
aauucucuaagaaugauuu

SEQ ID NO: 3187626 - RNA, 19 nt, Artificial Sequence
  Description of Artificial Sequence: Synthetic oligonucleotide
aaacacaacauuccucaug

SEQ ID NO: 3187627 - RNA, 19 nt, Artificial Sequence
  Description of Artificial Sequence: Synthetic oligonucleotide
ucucuaagaaugauuuaag

SEQ ID NO: 3187628 - RNA, 19 nt, Artificial Sequence
  Description of Artificial Sequence: Synthetic oligonucleotide
uucuuucccaaucacauuc

SEQ ID NO: 3187629 - RNA, 19 nt, Artificial Sequence
  Description of Artificial Sequence: Synthetic oligonucleotide
uuuauuacauaaacacaac

SEQ ID NO: 3187630 - RNA, 19 nt, Artificial Sequence
  Description of Artificial Sequence: Synthetic oligonucleotide
aaauacauaaggaagcuua

SEQ ID NO: 3187631 - RNA, 19 nt, Artificial Sequence
  Description of Artificial Sequence: Synthetic oligonucleotide
aagaaaaccaaaacuccuc

SEQ ID NO: 3187632 - RNA, 19 nt, Artificial Sequence
  Description of Artificial Sequence: Synthetic oligonucleotide
cugacagaaagucaagugc

SEQ ID NO: 3187633 - RNA, 19 nt, Artificial Sequence
  Description of Artificial Sequence: Synthetic oligonucleotide
uuuaaaauguaauguuuuc

SEQ ID NO: 3187634 - RNA, 19 nt, Artificial Sequence
  Description of Artificial Sequence: Synthetic oligonucleotide
aaucacauucuuaagaaaa

SEQ ID NO: 3187635 - RNA, 19 nt, Artificial Sequence
  Description of Artificial Sequence: Synthetic oligonucleotide
auuacauaaacacaacauu

SEQ ID NO: 3187636 - RNA, 19 nt, Artificial Sequence
  Description of Artificial Sequence: Synthetic oligonucleotide
aaagucaagugccuguaga

SEQ ID NO: 3187637 - RNA, 19 nt, Artificial Sequence
  Description of Artificial Sequence: Synthetic oligonucleotide
uaaaauguaauguuuucuu

SEQ ID NO: 3187638 - RNA, 19 nt, Artificial Sequence
  Description of Artificial Sequence: Synthetic oligonucleotide
uuaaaauguaauguuuucu

SEQ ID NO: 3187639 - RNA, 19 nt, Artificial Sequence
  Description of Artificial Sequence: Synthetic oligonucleotide
gaaugauuuaagaaaacca

SEQ ID NO: 3187640 - RNA, 19 nt, Artificial Sequence
  Description of Artificial Sequence: Synthetic oligonucleotide
ucugacagaaagucaagug

SEQ ID NO: 3187641 - RNA, 19 nt, Artificial Sequence
  Description of Artificial Sequence: Synthetic oligonucleotide
uaagaaaauaauagguuuu

SEQ ID NO: 3187642 - RNA, 19 nt, Artificial Sequence
  Description of Artificial Sequence: Synthetic oligonucleotide
cugaucuucaguuugcuuc

SEQ ID NO: 3187643 - RNA, 19 nt, Artificial Sequence
  Description of Artificial Sequence: Synthetic oligonucleotide
uugucuuuugacuuaauua

SEQ ID NO: 3187644 - RNA, 19 nt, Artificial Sequence
  Description of Artificial Sequence: Synthetic oligonucleotide
aaaauguaauguuuucuuu

SEQ ID NO: 3187645 - RNA, 19 nt, Artificial Sequence
  Description of Artificial Sequence: Synthetic oligonucleotide
cuuauguuugucuuuugac

SEQ ID NO: 3187646 - RNA, 19 nt, Artificial Sequence
  Description of Artificial Sequence: Synthetic oligonucleotide
cuuuugacuuaauuauucc

SEQ ID NO: 3187647 - RNA, 19 nt, Artificial Sequence
  Description of Artificial Sequence: Synthetic oligonucleotide
aacaagcugaagaaggaag

SEQ ID NO: 3187648 - RNA, 19 nt, Artificial Sequence
  Description of Artificial Sequence: Synthetic oligonucleotide
uucuugcucugacagaaag

SEQ ID NO: 3187649 - RNA, 19 nt, Artificial Sequence
  Description of Artificial Sequence: Synthetic oligonucleotide
uucccaaucacauucuuaa

SEQ ID NO: 3187650 - RNA, 19 nt, Artificial Sequence
  Description of Artificial Sequence: Synthetic oligonucleotide
uugcuucuugcucugacag

SEQ ID NO: 3187651 - RNA, 19 nt, Artificial Sequence
  Description of Artificial Sequence: Synthetic oligonucleotide
aagcugaagaaggaagugg

SEQ ID NO: 3187652 - RNA, 19 nt, Artificial Sequence
  Description of Artificial Sequence: Synthetic oligonucleotide
aagagaaaggcugccgugg

SEQ ID NO: 3187653 - RNA, 19 nt, Artificial Sequence
  Description of Artificial Sequence: Synthetic oligonucleotide
uaauguuuucuuucaaggu

SEQ ID NO: 3187654 - RNA, 19 nt, Artificial Sequence
  Description of Artificial Sequence: Synthetic oligonucleotide
aagaaugauuuaagaaaac

SEQ ID NO: 3187655 - RNA, 19 nt, Artificial Sequence
  Description of Artificial Sequence: Synthetic oligonucleotide
uguuucuuucccaaucaca

SEQ ID NO: 3187656 - RNA, 19 nt, Artificial Sequence
  Description of Artificial Sequence: Synthetic oligonucleotide
uucucuaagaaugauuuaa

SEQ ID NO: 3187657 - RNA, 19 nt, Artificial Sequence
  Description of Artificial Sequence: Synthetic oligonucleotide
aauagguuuuguuuacuuu

SEQ ID NO: 3187658 - RNA, 19 nt, Artificial Sequence
  Description of Artificial Sequence: Synthetic oligonucleotide
ucaguuugcuucuugcucu

SEQ ID NO: 3187659 - RNA, 19 nt, Artificial Sequence
  Description of Artificial Sequence: Synthetic oligonucleotide
uauguuugucuuuugacuu

SEQ ID NO: 3187660 - RNA, 19 nt, Artificial Sequence
  Description of Artificial Sequence: Synthetic oligonucleotide
uacuuuaaaauguaauguu

SEQ ID NO: 3187661 - RNA, 19 nt, Artificial Sequence
  Description of Artificial Sequence: Synthetic oligonucleotide
aggaacaagcugaagaagg

SEQ ID NO: 3187662 - RNA, 19 nt, Artificial Sequence
  Description of Artificial Sequence: Synthetic oligonucleotide
ugaagaaggaaguggcccc

SEQ ID NO: 3187663 - RNA, 19 nt, Artificial Sequence
  Description of Artificial Sequence: Synthetic oligonucleotide
uguuuacaaaguucuauaa

SEQ ID NO: 3187664 - RNA, 19 nt, Artificial Sequence
  Description of Artificial Sequence: Synthetic oligonucleotide
ugcucugacagaaagucaa

SEQ ID NO: 3187665 - RNA, 19 nt, Artificial Sequence
  Description of Artificial Sequence: Synthetic oligonucleotide
aaacaggacuucucgauaa

SEQ ID NO: 3187666 - RNA, 19 nt, Artificial Sequence
  Description of Artificial Sequence: Synthetic oligonucleotide
uuuguuuacaaaguucuau

SEQ ID NO: 3187667 - RNA, 19 nt, Artificial Sequence
  Description of Artificial Sequence: Synthetic oligonucleotide
ucuucaguuugcuucuugc

SEQ ID NO: 3187668 - RNA, 19 nt, Artificial Sequence
  Description of Artificial Sequence: Synthetic oligonucleotide
auagguuuuguuuacuuua

SEQ ID NO: 3187669 - RNA, 19 nt, Artificial Sequence
  Description of Artificial Sequence: Synthetic oligonucleotide
acauaaacacaacauuccu

SEQ ID NO: 3187670 - RNA, 19 nt, Artificial Sequence
  Description of Artificial Sequence: Synthetic oligonucleotide
agcugaagaaggaaguggc

SEQ ID NO: 3187671 - RNA, 19 nt, Artificial Sequence
  Description of Artificial Sequence: Synthetic oligonucleotide
aaaauaauugugcaguaca

SEQ ID NO: 3187672 - RNA, 19 nt, Artificial Sequence
  Description of Artificial Sequence: Synthetic oligonucleotide
aauucggucauguacgguc

SEQ ID NO: 3187673 - RNA, 19 nt, Artificial Sequence
  Description of Artificial Sequence: Synthetic oligonucleotide
aaaauaaccugucugacaa

SEQ ID NO: 3187674 - RNA, 19 nt, Artificial Sequence
  Description of Artificial Sequence: Synthetic oligonucleotide
uacaauacaaauucgguca

SEQ ID NO: 3187675 - RNA, 19 nt, Artificial Sequence
  Description of Artificial Sequence: Synthetic oligonucleotide
ugcaguacaauacaaauuc

SEQ ID NO: 3187676 - RNA, 19 nt, Artificial Sequence
  Description of Artificial Sequence: Synthetic oligonucleotide
aagaaaauaauugugcagu

SEQ ID NO: 3187677 - RNA, 19 nt, Artificial Sequence
  Description of Artificial Sequence: Synthetic oligonucleotide
guuugaaaaggcuugcugg

SEQ ID NO: 3187678 - RNA, 19 nt, Artificial Sequence
  Description of Artificial Sequence: Synthetic oligonucleotide
aaggcagcaaggcaguuac

SEQ ID NO: 3187679 - RNA, 19 nt, Artificial Sequence
  Description of Artificial Sequence: Synthetic oligonucleotide
uacaaauucggucauguac

SEQ ID NO: 3187680 - RNA, 19 nt, Artificial Sequence
  Description of Artificial Sequence: Synthetic oligonucleotide
cugaagaaaauaauugugc

SEQ ID NO: 3187681 - RNA, 19 nt, Artificial Sequence
  Description of Artificial Sequence: Synthetic oligonucleotide
gaagaaaauaauugugcag

SEQ ID NO: 3187682 - RNA, 19 nt, Artificial Sequence
  Description of Artificial Sequence: Synthetic oligonucleotide
ugaagaaaauaauugugca

SEQ ID NO: 3187683 - RNA, 19 nt, Artificial Sequence
  Description of Artificial Sequence: Synthetic oligonucleotide
aauugugcaguacaauaca

SEQ ID NO: 3187684 - RNA, 19 nt, Artificial Sequence
  Description of Artificial Sequence: Synthetic oligonucleotide
ucccugaagaaaauaauug

SEQ ID NO: 3187685 - RNA, 19 nt, Artificial Sequence
  Description of Artificial Sequence: Synthetic oligonucleotide
aauuguuugaaaaggcuug

SEQ ID NO: 3187686 - RNA, 19 nt, Artificial Sequence
  Description of Artificial Sequence: Synthetic oligonucleotide
ugucugacaaaagacagag

SEQ ID NO: 3187687 - RNA, 19 nt, Artificial Sequence
  Description of Artificial Sequence: Synthetic oligonucleotide
aauacaaauucggucaugu

SEQ ID NO: 3187688 - RNA, 19 nt, Artificial Sequence
  Description of Artificial Sequence: Synthetic oligonucleotide
uagucaauuguuugaaaag

SEQ ID NO: 3187689 - RNA, 19 nt, Artificial Sequence
  Description of Artificial Sequence: Synthetic oligonucleotide
ucaauuguuugaaaaggcu

SEQ ID NO: 3187690 - RNA, 19 nt, Artificial Sequence
  Description of Artificial Sequence: Synthetic oligonucleotide
acaaauucggucauguacg

SEQ ID NO: 3187691 - RNA, 19 nt, Artificial Sequence
  Description of Artificial Sequence: Synthetic oligonucleotide
uaauugugcaguacaauac

SEQ ID NO: 3187692 - RNA, 19 nt, Artificial Sequence
  Description of Artificial Sequence: Synthetic oligonucleotide
agucaauuguuugaaaagg

SEQ ID NO: 3187693 - RNA, 19 nt, Artificial Sequence
  Description of Artificial Sequence: Synthetic oligonucleotide
caguacaauacaaauucgg

SEQ ID NO: 3187694 - RNA, 19 nt, Artificial Sequence
  Description of Artificial Sequence: Synthetic oligonucleotide
uguuugaaaaggcuugcug

SEQ ID NO: 3187695 - RNA, 19 nt, Artificial Sequence
  Description of Artificial Sequence: Synthetic oligonucleotide
aaggcaguuacuugggucu

SEQ ID NO: 3187696 - RNA, 19 nt, Artificial Sequence
  Description of Artificial Sequence: Synthetic oligonucleotide
uaaccugucugacaaaaga

SEQ ID NO: 3187697 - RNA, 19 nt, Artificial Sequence
  Description of Artificial Sequence: Synthetic oligonucleotide
guuacuugggucuccagag

SEQ ID NO: 3187698 - RNA, 19 nt, Artificial Sequence
  Description of Artificial Sequence: Synthetic oligonucleotide
ugugcaguacaauacaaau

SEQ ID NO: 3187699 - RNA, 19 nt, Artificial Sequence
  Description of Artificial Sequence: Synthetic oligonucleotide
ucuuagguuggaaaagcca

SEQ ID NO: 3187700 - RNA, 19 nt, Artificial Sequence
  Description of Artificial Sequence: Synthetic oligonucleotide
auaauugugcaguacaaua

SEQ ID NO: 3187701 - RNA, 19 nt, Artificial Sequence
  Description of Artificial Sequence: Synthetic oligonucleotide
aaccugucugacaaaagac

SEQ ID NO: 3187702 - RNA, 19 nt, Artificial Sequence
  Description of Artificial Sequence: Synthetic oligonucleotide
auuguuugaaaaggcuugc

SEQ ID NO: 3187703 - RNA, 19 nt, Artificial Sequence
  Description of Artificial Sequence: Synthetic oligonucleotide
uuugaaaaggcuugcuggu

SEQ ID NO: 3187704 - RNA, 19 nt, Artificial Sequence
  Description of Artificial Sequence: Synthetic oligonucleotide
guacauuucagacuuaaaa

SEQ ID NO: 3187705 - RNA, 19 nt, Artificial Sequence
  Description of Artificial Sequence: Synthetic oligonucleotide
ugaaaaggcuugcugguac

SEQ ID NO: 3187706 - RNA, 19 nt, Artificial Sequence
  Description of Artificial Sequence: Synthetic oligonucleotide
acacuuaaggcagcaaggc

SEQ ID NO: 3187707 - RNA, 19 nt, Artificial Sequence
  Description of Artificial Sequence: Synthetic oligonucleotide
gacacuuaaggcagcaagg

SEQ ID NO: 3187708 - RNA, 19 nt, Artificial Sequence
  Description of Artificial Sequence: Synthetic oligonucleotide
uguacggucaccugugugu

SEQ ID NO: 3187709 - RNA, 19 nt, Artificial Sequence
  Description of Artificial Sequence: Synthetic oligonucleotide
acuuaaggcagcaaggcag

SEQ ID NO: 3187710 - RNA, 19 nt, Artificial Sequence
  Description of Artificial Sequence: Synthetic oligonucleotide
aauaaccugucugacaaaa

SEQ ID NO: 3187711 - RNA, 19 nt, Artificial Sequence
  Description of Artificial Sequence: Synthetic oligonucleotide
guacaauacaaauucgguc

SEQ ID NO: 3187712 - RNA, 19 nt, Artificial Sequence
  Description of Artificial Sequence: Synthetic oligonucleotide
uuucuuagguuggaaaagc

SEQ ID NO: 3187713 - RNA, 19 nt, Artificial Sequence
  Description of Artificial Sequence: Synthetic oligonucleotide
aguuucuuagguuggaaaa

SEQ ID NO: 3187714 - RNA, 19 nt, Artificial Sequence
  Description of Artificial Sequence: Synthetic oligonucleotide
gugacaggcaguuucuuag

SEQ ID NO: 3187715 - RNA, 19 nt, Artificial Sequence
  Description of Artificial Sequence: Synthetic oligonucleotide
uucuuagguuggaaaagcc

SEQ ID NO: 3187716 - RNA, 19 nt, Artificial Sequence
  Description of Artificial Sequence: Synthetic oligonucleotide
agaaggacacuuaaggcag

SEQ ID NO: 3187717 - RNA, 19 nt, Artificial Sequence
  Description of Artificial Sequence: Synthetic oligonucleotide
cagcaaggcaguuacuugg

SEQ ID NO: 3187718 - RNA, 19 nt, Artificial Sequence
  Description of Artificial Sequence: Synthetic oligonucleotide
aauaauugugcaguacaau

SEQ ID NO: 3187719 - RNA, 19 nt, Artificial Sequence
  Description of Artificial Sequence: Synthetic oligonucleotide
ucauguacggucaccugug

SEQ ID NO: 3187720 - RNA, 19 nt, Artificial Sequence
  Description of Artificial Sequence: Synthetic oligonucleotide
gaaaagccaucccugaaga

SEQ ID NO: 3187721 - RNA, 19 nt, Artificial Sequence
  Description of Artificial Sequence: Synthetic oligonucleotide
caggcaguuucuuagguug

SEQ ID NO: 3187722 - RNA, 19 nt, Artificial Sequence
  Description of Artificial Sequence: Synthetic oligonucleotide
aaagccaucccugaagaaa

SEQ ID NO: 3187723 - RNA, 19 nt, Artificial Sequence
  Description of Artificial Sequence: Synthetic oligonucleotide
gaaaauaauugugcaguac

SEQ ID NO: 3187724 - RNA, 19 nt, Artificial Sequence
  Description of Artificial Sequence: Synthetic oligonucleotide
aaggcuugcugguacauuu

SEQ ID NO: 3187725 - RNA, 19 nt, Artificial Sequence
  Description of Artificial Sequence: Synthetic oligonucleotide
cagaaggacacuuaaggca

SEQ ID NO: 3187726 - RNA, 19 nt, Artificial Sequence
  Description of Artificial Sequence: Synthetic oligonucleotide
aguuacuugggucuccaga

SEQ ID NO: 3187727 - RNA, 19 nt, Artificial Sequence
  Description of Artificial Sequence: Synthetic oligonucleotide
aguacaauacaaauucggu

SEQ ID NO: 3187728 - RNA, 19 nt, Artificial Sequence
  Description of Artificial Sequence: Synthetic oligonucleotide
aaauaauugugcaguacaa

SEQ ID NO: 3187729 - RNA, 19 nt, Artificial Sequence
  Description of Artificial Sequence: Synthetic oligonucleotide
uccugugacaggcaguuuc

SEQ ID NO: 3187730 - RNA, 19 nt, Artificial Sequence
  Description of Artificial Sequence: Synthetic oligonucleotide
cuagucaauuguuugaaaa

SEQ ID NO: 3187731 - RNA, 19 nt, Artificial Sequence
  Description of Artificial Sequence: Synthetic oligonucleotide
uacuugggucuccagagcu

SEQ ID NO: 3187732 - RNA, 19 nt, Artificial Sequence
  Description of Artificial Sequence: Synthetic oligonucleotide
guuucuuagguuggaaaag

SEQ ID NO: 3187733 - RNA, 19 nt, Artificial Sequence
  Description of Artificial Sequence: Synthetic oligonucleotide
uagguuggaaaagccaucc

SEQ ID NO: 3187734 - RNA, 19 nt, Artificial Sequence
  Description of Artificial Sequence: Synthetic oligonucleotide
caaauucggucauguacgg

SEQ ID NO: 3187735 - RNA, 19 nt, Artificial Sequence
  Description of Artificial Sequence: Synthetic oligonucleotide
gucaauuguuugaaaaggc

SEQ ID NO: 3187736 - RNA, 19 nt, Artificial Sequence
  Description of Artificial Sequence: Synthetic oligonucleotide
uugcugguacauuucagac

SEQ ID NO: 3187737 - RNA, 19 nt, Artificial Sequence
  Description of Artificial Sequence: Synthetic oligonucleotide
ugacaggcaguuucuuagg

SEQ ID NO: 3187738 - RNA, 19 nt, Artificial Sequence
  Description of Artificial Sequence: Synthetic oligonucleotide
ugugugccuagucaauugu

SEQ ID NO: 3187739 - RNA, 19 nt, Artificial Sequence
  Description of Artificial Sequence: Synthetic oligonucleotide
ccugaagaaaauaauugug

SEQ ID NO: 3187740 - RNA, 19 nt, Artificial Sequence
  Description of Artificial Sequence: Synthetic oligonucleotide
guuggaaaagccaucccug

SEQ ID NO: 3187741 - RNA, 19 nt, Artificial Sequence
  Description of Artificial Sequence: Synthetic oligonucleotide
uuggaaaagccaucccuga

SEQ ID NO: 3187742 - RNA, 19 nt, Artificial Sequence
  Description of Artificial Sequence: Synthetic oligonucleotide
ggaaaagccaucccugaag

SEQ ID NO: 3187743 - RNA, 19 nt, Artificial Sequence
  Description of Artificial Sequence: Synthetic oligonucleotide
uugugcaguacaauacaaa

SEQ ID NO: 3187744 - RNA, 19 nt, Artificial Sequence
  Description of Artificial Sequence: Synthetic oligonucleotide
uuagguuggaaaagccauc

SEQ ID NO: 3187745 - RNA, 19 nt, Artificial Sequence
  Description of Artificial Sequence: Synthetic oligonucleotide
agguuggaaaagccauccc

SEQ ID NO: 3187746 - RNA, 19 nt, Artificial Sequence
  Description of Artificial Sequence: Synthetic oligonucleotide
ggacacuuaaggcagcaag

SEQ ID NO: 3187747 - RNA, 19 nt, Artificial Sequence
  Description of Artificial Sequence: Synthetic oligonucleotide
ugccuagucaauuguuuga

SEQ ID NO: 3187748 - RNA, 19 nt, Artificial Sequence
  Description of Artificial Sequence: Synthetic oligonucleotide
agaaaauaauugugcagua

SEQ ID NO: 3187749 - RNA, 19 nt, Artificial Sequence
  Description of Artificial Sequence: Synthetic oligonucleotide
ugugccuagucaauuguuu

SEQ ID NO: 3187750 - RNA, 19 nt, Artificial Sequence
  Description of Artificial Sequence: Synthetic oligonucleotide
ugcugguacauuucagacu

SEQ ID NO: 3187751 - RNA, 19 nt, Artificial Sequence
  Description of Artificial Sequence: Synthetic oligonucleotide
uuacuugggucuccagagc

SEQ ID NO: 3187752 - RNA, 19 nt, Artificial Sequence
  Description of Artificial Sequence: Synthetic oligonucleotide
cuugcugguacauuucaga

SEQ ID NO: 3187753 - RNA, 19 nt, Artificial Sequence
  Description of Artificial Sequence: Synthetic oligonucleotide
acggucaccugugugugcc

SEQ ID NO: 3187754 - RNA, 19 nt, Artificial Sequence
  Description of Artificial Sequence: Synthetic oligonucleotide
caaggcaguuacuuggguc

SEQ ID NO: 3187755 - RNA, 19 nt, Artificial Sequence
  Description of Artificial Sequence: Synthetic oligonucleotide
cuugggucuccagagcugg

SEQ ID NO: 3187756 - RNA, 19 nt, Artificial Sequence
  Description of Artificial Sequence: Synthetic oligonucleotide
ccugucugacaaaagacag

SEQ ID NO: 3187757 - RNA, 19 nt, Artificial Sequence
  Description of Artificial Sequence: Synthetic oligonucleotide
acaauacaaauucggucau

SEQ ID NO: 3187758 - RNA, 19 nt, Artificial Sequence
  Description of Artificial Sequence: Synthetic oligonucleotide
aaaagccaucccugaagaa

SEQ ID NO: 3187759 - RNA, 19 nt, Artificial Sequence
  Description of Artificial Sequence: Synthetic oligonucleotide
gugccuagucaauuguuug

SEQ ID NO: 3187760 - RNA, 19 nt, Artificial Sequence
  Description of Artificial Sequence: Synthetic oligonucleotide
aaauaaccugucugacaaa

SEQ ID NO: 3187761 - RNA, 19 nt, Artificial Sequence
  Description of Artificial Sequence: Synthetic oligonucleotide
uggagggcuccugugacag

SEQ ID NO: 3187762 - RNA, 19 nt, Artificial Sequence
  Description of Artificial Sequence: Synthetic oligonucleotide
aagccaucccugaagaaaa

SEQ ID NO: 3187763 - RNA, 19 nt, Artificial Sequence
  Description of Artificial Sequence: Synthetic oligonucleotide
accugugugugccuaguca

SEQ ID NO: 3187764 - RNA, 19 nt, Artificial Sequence
  Description of Artificial Sequence: Synthetic oligonucleotide
uggaaaagccaucccugaa

SEQ ID NO: 3187765 - RNA, 19 nt, Artificial Sequence
  Description of Artificial Sequence: Synthetic oligonucleotide
gaaaaggcuugcugguaca

SEQ ID NO: 3187766 - RNA, 19 nt, Artificial Sequence
  Description of Artificial Sequence: Synthetic oligonucleotide
ccagaaggacacuuaaggc

SEQ ID NO: 3187767 - RNA, 19 nt, Artificial Sequence
  Description of Artificial Sequence: Synthetic oligonucleotide
ugugacaggcaguuucuua

SEQ ID NO: 3187768 - RNA, 19 nt, Artificial Sequence
  Description of Artificial Sequence: Synthetic oligonucleotide
ugguacauuucagacuuaa

SEQ ID NO: 3187769 - RNA, 19 nt, Artificial Sequence
  Description of Artificial Sequence: Synthetic oligonucleotide
cuuagguuggaaaagccau

SEQ ID NO: 3187770 - RNA, 19 nt, Artificial Sequence
  Description of Artificial Sequence: Synthetic oligonucleotide
gagggcuccugugacaggc

SEQ ID NO: 3187771 - RNA, 19 nt, Artificial Sequence
  Description of Artificial Sequence: Synthetic oligonucleotide
ucuucauacauauagaccc

SEQ ID NO: 3187772 - RNA, 19 nt, Artificial Sequence
  Description of Artificial Sequence: Synthetic oligonucleotide
aaguccaucaagcacaugg

SEQ ID NO: 3187773 - RNA, 19 nt, Artificial Sequence
  Description of Artificial Sequence: Synthetic oligonucleotide
aaugcuuuccaccuggacg

SEQ ID NO: 3187774 - RNA, 19 nt, Artificial Sequence
  Description of Artificial Sequence: Synthetic oligonucleotide
aaaaugucaucguaaaguc

SEQ ID NO: 3187775 - RNA, 19 nt, Artificial Sequence
  Description of Artificial Sequence: Synthetic oligonucleotide
aaucuuuugaaucaaucug

SEQ ID NO: 3187776 - RNA, 19 nt, Artificial Sequence
  Description of Artificial Sequence: Synthetic oligonucleotide
uuuugaaucaaucugugau

SEQ ID NO: 3187777 - RNA, 19 nt, Artificial Sequence
  Description of Artificial Sequence: Synthetic oligonucleotide
aacauucccauccggaugg

SEQ ID NO: 3187778 - RNA, 19 nt, Artificial Sequence
  Description of Artificial Sequence: Synthetic oligonucleotide
uguggagaaaucauggucc

SEQ ID NO: 3187779 - RNA, 19 nt, Artificial Sequence
  Description of Artificial Sequence: Synthetic oligonucleotide
uuuguuucauugaagcuag

SEQ ID NO: 3187780 - RNA, 19 nt, Artificial Sequence
  Description of Artificial Sequence: Synthetic oligonucleotide
uaaaaugucaucguaaagu

SEQ ID NO: 3187781 - RNA, 19 nt, Artificial Sequence
  Description of Artificial Sequence: Synthetic oligonucleotide
ugaagcuaggcauugcugg

SEQ ID NO: 3187782 - RNA, 19 nt, Artificial Sequence
  Description of Artificial Sequence: Synthetic oligonucleotide
aguauugucgucuuuccuc

SEQ ID NO: 3187783 - RNA, 19 nt, Artificial Sequence
  Description of Artificial Sequence: Synthetic oligonucleotide
aagggcgagucucucaucc

SEQ ID NO: 3187784 - RNA, 19 nt, Artificial Sequence
  Description of Artificial Sequence: Synthetic oligonucleotide
gagacaaaucuguacaggg

SEQ ID NO: 3187785 - RNA, 19 nt, Artificial Sequence
  Description of Artificial Sequence: Synthetic oligonucleotide
auagguaucaauggcaugg

SEQ ID NO: 3187786 - RNA, 19 nt, Artificial Sequence
  Description of Artificial Sequence: Synthetic oligonucleotide
uggacaaagaagaugucag

SEQ ID NO: 3187787 - RNA, 19 nt, Artificial Sequence
  Description of Artificial Sequence: Synthetic oligonucleotide
uuugucaguucuaggaagg

SEQ ID NO: 3187788 - RNA, 19 nt, Artificial Sequence
  Description of Artificial Sequence: Synthetic oligonucleotide
aauucacugcugcauacuc

SEQ ID NO: 3187789 - RNA, 19 nt, Artificial Sequence
  Description of Artificial Sequence: Synthetic oligonucleotide
uugaaucaaucugugaucg

SEQ ID NO: 3187790 - RNA, 19 nt, Artificial Sequence
  Description of Artificial Sequence: Synthetic oligonucleotide
aagcacauggccgaaaccg

SEQ ID NO: 3187791 - RNA, 19 nt, Artificial Sequence
  Description of Artificial Sequence: Synthetic oligonucleotide
aagaagaugucaggcaccc

SEQ ID NO: 3187792 - RNA, 19 nt, Artificial Sequence
  Description of Artificial Sequence: Synthetic oligonucleotide
ucugaaaugcugucaaugc

SEQ ID NO: 3187793 - RNA, 19 nt, Artificial Sequence
  Description of Artificial Sequence: Synthetic oligonucleotide
auucugguuucccuuacgc

SEQ ID NO: 3187794 - RNA, 19 nt, Artificial Sequence
  Description of Artificial Sequence: Synthetic oligonucleotide
ucuaggaugauucuaccaa

SEQ ID NO: 3187795 - RNA, 19 nt, Artificial Sequence
  Description of Artificial Sequence: Synthetic oligonucleotide
auguugaccucugaaaugc

SEQ ID NO: 3187796 - RNA, 19 nt, Artificial Sequence
  Description of Artificial Sequence: Synthetic oligonucleotide
cucaaugacggacagaaac

SEQ ID NO: 3187797 - RNA, 19 nt, Artificial Sequence
  Description of Artificial Sequence: Synthetic oligonucleotide
uuauccgagacaaaucugu

SEQ ID NO: 3187798 - RNA, 19 nt, Artificial Sequence
  Description of Artificial Sequence: Synthetic oligonucleotide
uugaacugcaucgauauug

SEQ ID NO: 3187799 - RNA, 19 nt, Artificial Sequence
  Description of Artificial Sequence: Synthetic oligonucleotide
uccucaaugugcaacaacu

SEQ ID NO: 3187800 - RNA, 19 nt, Artificial Sequence
  Description of Artificial Sequence: Synthetic oligonucleotide
uggaugaaggaucuuuuag

SEQ ID NO: 3187801 - RNA, 19 nt, Artificial Sequence
  Description of Artificial Sequence: Synthetic oligonucleotide
guccucuucauacauauag

SEQ ID NO: 3187802 - RNA, 19 nt, Artificial Sequence
  Description of Artificial Sequence: Synthetic oligonucleotide
caaaagagggagcugaccc

SEQ ID NO: 3187803 - RNA, 19 nt, Artificial Sequence
  Description of Artificial Sequence: Synthetic oligonucleotide
gauguaggacaccugaggc

SEQ ID NO: 3187804 - RNA, 19 nt, Artificial Sequence
  Description of Artificial Sequence: Synthetic oligonucleotide
ucuacaucagucucgcugc

SEQ ID NO: 3187805 - RNA, 19 nt, Artificial Sequence
  Description of Artificial Sequence: Synthetic oligonucleotide
ucgucuuuccucauucugg

SEQ ID NO: 3187806 - RNA, 19 nt, Artificial Sequence
  Description of Artificial Sequence: Synthetic oligonucleotide
acaccugaggcauggaggc

SEQ ID NO: 3187807 - RNA, 19 nt, Artificial Sequence
  Description of Artificial Sequence: Synthetic oligonucleotide
acaauucuagaauagguau

SEQ ID NO: 3187808 - RNA, 19 nt, Artificial Sequence
  Description of Artificial Sequence: Synthetic oligonucleotide
aaagaagaugucaggcacc

SEQ ID NO: 3187809 - RNA, 19 nt, Artificial Sequence
  Description of Artificial Sequence: Synthetic oligonucleotide
ucaaugacggacagaaaca

SEQ ID NO: 3187810 - RNA, 19 nt, Artificial Sequence
  Description of Artificial Sequence: Synthetic oligonucleotide
uauaccuacuggcaccggg

SEQ ID NO: 3187811 - RNA, 19 nt, Artificial Sequence
  Description of Artificial Sequence: Synthetic oligonucleotide
guguuuguuucauugaagc

SEQ ID NO: 3187812 - RNA, 19 nt, Artificial Sequence
  Description of Artificial Sequence: Synthetic oligonucleotide
agaaugaagucugaucuac

SEQ ID NO: 3187813 - RNA, 19 nt, Artificial Sequence
  Description of Artificial Sequence: Synthetic oligonucleotide
gauaaaaugucaucguaaa

SEQ ID NO: 3187814 - RNA, 19 nt, Artificial Sequence
  Description of Artificial Sequence: Synthetic oligonucleotide
augucaggcacccaaaucu

SEQ ID NO: 3187815 - RNA, 19 nt, Artificial Sequence
  Description of Artificial Sequence: Synthetic oligonucleotide
ucugacuguagagagaaug

SEQ ID NO: 3187816 - RNA, 19 nt, Artificial Sequence
  Description of Artificial Sequence: Synthetic oligonucleotide
augugcaacaacuugcuca

SEQ ID NO: 3187817 - RNA, 19 nt, Artificial Sequence
  Description of Artificial Sequence: Synthetic oligonucleotide
ucuuuugaaucaaucugug

SEQ ID NO: 3187818 - RNA, 19 nt, Artificial Sequence
  Description of Artificial Sequence: Synthetic oligonucleotide
ucugguuucccuuacgcgu

SEQ ID NO: 3187819 - RNA, 19 nt, Artificial Sequence
  Description of Artificial Sequence: Synthetic oligonucleotide
auaaaaugucaucguaaag

SEQ ID NO: 3187820 - RNA, 19 nt, Artificial Sequence
  Description of Artificial Sequence: Synthetic oligonucleotide
uacaauucuagaauaggua

SEQ ID NO: 3187821 - RNA, 19 nt, Artificial Sequence
  Description of Artificial Sequence: Synthetic oligonucleotide
aaacacaaaagagggagcu

SEQ ID NO: 3187822 - RNA, 19 nt, Artificial Sequence
  Description of Artificial Sequence: Synthetic oligonucleotide
gacgucuauaccuacuggc

SEQ ID NO: 3187823 - RNA, 19 nt, Artificial Sequence
  Description of Artificial Sequence: Synthetic oligonucleotide
acuccagaaaccuuuccuc

SEQ ID NO: 3187824 - RNA, 19 nt, Artificial Sequence
  Description of Artificial Sequence: Synthetic oligonucleotide
uuugaaucaaucugugauc

SEQ ID NO: 3187825 - RNA, 19 nt, Artificial Sequence
  Description of Artificial Sequence: Synthetic oligonucleotide
aucgauauuguacacucca

SEQ ID NO: 3187826 - RNA, 19 nt, Artificial Sequence
  Description of Artificial Sequence: Synthetic oligonucleotide
aaaaguccucuucauacau

SEQ ID NO: 3187827 - RNA, 19 nt, Artificial Sequence
  Description of Artificial Sequence: Synthetic oligonucleotide
acguccacagccuugaugu

SEQ ID NO: 3187828 - RNA, 19 nt, Artificial Sequence
  Description of Artificial Sequence: Synthetic oligonucleotide
ucuaccaacguuuccuccc

SEQ ID NO: 3187829 - RNA, 19 nt, Artificial Sequence
  Description of Artificial Sequence: Synthetic oligonucleotide
aaguccucuucauacauau

SEQ ID NO: 3187830 - RNA, 19 nt, Artificial Sequence
  Description of Artificial Sequence: Synthetic oligonucleotide
caaagaagaugucaggcac

SEQ ID NO: 3187831 - RNA, 19 nt, Artificial Sequence
  Description of Artificial Sequence: Synthetic oligonucleotide
ucaugcuuuuguuugucag

SEQ ID NO: 3187832 - RNA, 19 nt, Artificial Sequence
  Description of Artificial Sequence: Synthetic oligonucleotide
aacuugcucacguuucaag

SEQ ID NO: 3187833 - RNA, 19 nt, Artificial Sequence
  Description of Artificial Sequence: Synthetic oligonucleotide
auuguggacagugguaagc

SEQ ID NO: 3187834 - RNA, 19 nt, Artificial Sequence
  Description of Artificial Sequence: Synthetic oligonucleotide
auuauauaaacgaugggaa

SEQ ID NO: 3187835 - RNA, 19 nt, Artificial Sequence
  Description of Artificial Sequence: Synthetic oligonucleotide
gauauuguacacuccagaa

SEQ ID NO: 3187836 - RNA, 19 nt, Artificial Sequence
  Description of Artificial Sequence: Synthetic oligonucleotide
caucguaaaguccauguug

SEQ ID NO: 3187837 - RNA, 19 nt, Artificial Sequence
  Description of Artificial Sequence: Synthetic oligonucleotide
gucaguucuaggaagggcg

SEQ ID NO: 3187838 - RNA, 19 nt, Artificial Sequence
  Description of Artificial Sequence: Synthetic oligonucleotide
guuauccugagacugaaga

SEQ ID NO: 3187839 - RNA, 19 nt, Artificial Sequence
  Description of Artificial Sequence: Synthetic oligonucleotide
gaucuuuuagaauggacaa

SEQ ID NO: 3187840 - RNA, 19 nt, Artificial Sequence
  Description of Artificial Sequence: Synthetic oligonucleotide
aauagguaucaauggcaug

SEQ ID NO: 3187841 - RNA, 19 nt, Artificial Sequence
  Description of Artificial Sequence: Synthetic oligonucleotide
aaugugcaacaacuugcuc

SEQ ID NO: 3187842 - RNA, 19 nt, Artificial Sequence
  Description of Artificial Sequence: Synthetic oligonucleotide
aaccuccaaauccaggucu

SEQ ID NO: 3187843 - RNA, 19 nt, Artificial Sequence
  Description of Artificial Sequence: Synthetic oligonucleotide
cauccuuccaauagugccg

SEQ ID NO: 3187844 - RNA, 19 nt, Artificial Sequence
  Description of Artificial Sequence: Synthetic oligonucleotide
ugaaaugcugucaaugcuu

SEQ ID NO: 3187845 - RNA, 19 nt, Artificial Sequence
  Description of Artificial Sequence: Synthetic oligonucleotide
acaaagaagaugucaggca

SEQ ID NO: 3187846 - RNA, 19 nt, Artificial Sequence
  Description of Artificial Sequence: Synthetic oligonucleotide
guaaaguccauguugaccu

SEQ ID NO: 3187847 - RNA, 19 nt, Artificial Sequence
  Description of Artificial Sequence: Synthetic oligonucleotide
ucucauccuuccaauagug

SEQ ID NO: 3187848 - RNA, 19 nt, Artificial Sequence
  Description of Artificial Sequence: Synthetic oligonucleotide
guuugucaguucuaggaag

SEQ ID NO: 3187849 - RNA, 19 nt, Artificial Sequence
  Description of Artificial Sequence: Synthetic oligonucleotide
ugggaaauacaauucuaga

SEQ ID NO: 3187850 - RNA, 19 nt, Artificial Sequence
  Description of Artificial Sequence: Synthetic oligonucleotide
acauguacacguccacagc

SEQ ID NO: 3187851 - RNA, 19 nt, Artificial Sequence
  Description of Artificial Sequence: Synthetic oligonucleotide
gaaggaucuuuuagaaugg

SEQ ID NO: 3187852 - RNA, 19 nt, Artificial Sequence
  Description of Artificial Sequence: Synthetic oligonucleotide
aucaaucugugaucgaaug

SEQ ID NO: 3187853 - RNA, 19 nt, Artificial Sequence
  Description of Artificial Sequence: Synthetic oligonucleotide
augaagucugaucuacauc

SEQ ID NO: 3187854 - RNA, 19 nt, Artificial Sequence
  Description of Artificial Sequence: Synthetic oligonucleotide
agucugaucuacaucaguc

SEQ ID NO: 3187855 - RNA, 19 nt, Artificial Sequence
  Description of Artificial Sequence: Synthetic oligonucleotide
cugugaucgaaugucaugc

SEQ ID NO: 3187856 - RNA, 19 nt, Artificial Sequence
  Description of Artificial Sequence: Synthetic oligonucleotide
ucuuuccucauucugguuu

SEQ ID NO: 3187857 - RNA, 19 nt, Artificial Sequence
  Description of Artificial Sequence: Synthetic oligonucleotide
uucugguuucccuuacgcg

SEQ ID NO: 3187858 - RNA, 19 nt, Artificial Sequence
  Description of Artificial Sequence: Synthetic oligonucleotide
ucuauaccuacuggcaccg

SEQ ID NO: 3187859 - RNA, 19 nt, Artificial Sequence
  Description of Artificial Sequence: Synthetic oligonucleotide
uguuugucaguucuaggaa

SEQ ID NO: 3187860 - RNA, 19 nt, Artificial Sequence
  Description of Artificial Sequence: Synthetic oligonucleotide
ugcaacaacuugcucacgu

SEQ ID NO: 3187861 - RNA, 19 nt, Artificial Sequence
  Description of Artificial Sequence: Synthetic oligonucleotide
ugaacugcaucgauauugu

SEQ ID NO: 3187862 - RNA, 19 nt, Artificial Sequence
  Description of Artificial Sequence: Synthetic oligonucleotide
auccgagacaaaucuguac

SEQ ID NO: 3187863 - RNA, 19 nt, Artificial Sequence
  Description of Artificial Sequence: Synthetic oligonucleotide
auugaagcuaggcauugcu

SEQ ID NO: 3187864 - RNA, 19 nt, Artificial Sequence
  Description of Artificial Sequence: Synthetic oligonucleotide
aaccguuauccugagacug

SEQ ID NO: 3187865 - RNA, 19 nt, Artificial Sequence
  Description of Artificial Sequence: Synthetic oligonucleotide
guugugucauggaugaagg

SEQ ID NO: 3187866 - RNA, 19 nt, Artificial Sequence
  Description of Artificial Sequence: Synthetic oligonucleotide
ucaaucugugaucgaaugu

SEQ ID NO: 3187867 - RNA, 19 nt, Artificial Sequence
  Description of Artificial Sequence: Synthetic oligonucleotide
uguuuguuucauugaagcu

SEQ ID NO: 3187868 - RNA, 19 nt, Artificial Sequence
  Description of Artificial Sequence: Synthetic oligonucleotide
aaucuguacaggggcuucc

SEQ ID NO: 3187869 - RNA, 19 nt, Artificial Sequence
  Description of Artificial Sequence: Synthetic oligonucleotide
ucgauauuguacacuccag

SEQ ID NO: 3187870 - RNA, 19 nt, Artificial Sequence
  Description of Artificial Sequence: Synthetic oligonucleotide
ucaugguccucaaugugca

SEQ ID NO: 3187871 - RNA, 19 nt, Artificial Sequence
  Description of Artificial Sequence: Synthetic oligonucleotide
uaaaugaaaagauacacag

SEQ ID NO: 3187872 - RNA, 19 nt, Artificial Sequence
  Description of Artificial Sequence: Synthetic oligonucleotide
uggaaaaugaaauacauaa

SEQ ID NO: 3187873 - RNA, 19 nt, Artificial Sequence
  Description of Artificial Sequence: Synthetic oligonucleotide
guaauaguaauacugcugg

SEQ ID NO: 3187874 - RNA, 19 nt, Artificial Sequence
  Description of Artificial Sequence: Synthetic oligonucleotide
uguuaaguaauucaccaag

SEQ ID NO: 3187875 - RNA, 19 nt, Artificial Sequence
  Description of Artificial Sequence: Synthetic oligonucleotide
ucaguuuuggacuugagug

SEQ ID NO: 3187876 - RNA, 19 nt, Artificial Sequence
  Description of Artificial Sequence: Synthetic oligonucleotide
gauguauuuauacaagugc

SEQ ID NO: 3187877 - RNA, 19 nt, Artificial Sequence
  Description of Artificial Sequence: Synthetic oligonucleotide
uuuaacauguuccagcucu

SEQ ID NO: 3187878 - RNA, 19 nt, Artificial Sequence
  Description of Artificial Sequence: Synthetic oligonucleotide
uguauuuugggcauggucu

SEQ ID NO: 3187879 - RNA, 19 nt, Artificial Sequence
  Description of Artificial Sequence: Synthetic oligonucleotide
uuuucuuugucuaaacugc

SEQ ID NO: 3187880 - RNA, 19 nt, Artificial Sequence
  Description of Artificial Sequence: Synthetic oligonucleotide
uguuuuaucauguuaagua

SEQ ID NO: 3187881 - RNA, 19 nt, Artificial Sequence
  Description of Artificial Sequence: Synthetic oligonucleotide
ugguguaauaguaauacug

SEQ ID NO: 3187882 - RNA, 19 nt, Artificial Sequence
  Description of Artificial Sequence: Synthetic oligonucleotide
ucuucaauggcuuucauau

SEQ ID NO: 3187883 - RNA, 19 nt, Artificial Sequence
  Description of Artificial Sequence: Synthetic oligonucleotide
aaaggacugaguuccuugc

SEQ ID NO: 3187884 - RNA, 19 nt, Artificial Sequence
  Description of Artificial Sequence: Synthetic oligonucleotide
uaagucauccuuuagggug

SEQ ID NO: 3187885 - RNA, 19 nt, Artificial Sequence
  Description of Artificial Sequence: Synthetic oligonucleotide
uguaauaguaauacugcug

SEQ ID NO: 3187886 - RNA, 19 nt, Artificial Sequence
  Description of Artificial Sequence: Synthetic oligonucleotide
ucugcuaacuuguacuugg

SEQ ID NO: 3187887 - RNA, 19 nt, Artificial Sequence
  Description of Artificial Sequence: Synthetic oligonucleotide
uuaguuuccucaauuaacu

SEQ ID NO: 3187888 - RNA, 19 nt, Artificial Sequence
  Description of Artificial Sequence: Synthetic oligonucleotide
aaauacuugagggucagag

SEQ ID NO: 3187889 - RNA, 19 nt, Artificial Sequence
  Description of Artificial Sequence: Synthetic oligonucleotide
aacuauuuacuguuuuauc

SEQ ID NO: 3187890 - RNA, 19 nt, Artificial Sequence
  Description of Artificial Sequence: Synthetic oligonucleotide
uaaucuuauuguuucuugg

SEQ ID NO: 3187891 - RNA, 19 nt, Artificial Sequence
  Description of Artificial Sequence: Synthetic oligonucleotide
uaaguaauucaccaagaca

SEQ ID NO: 3187892 - RNA, 19 nt, Artificial Sequence
  Description of Artificial Sequence: Synthetic oligonucleotide
uuggauuucauccaaggaa

SEQ ID NO: 3187893 - RNA, 19 nt, Artificial Sequence
  Description of Artificial Sequence: Synthetic oligonucleotide
uaucauguuaaguaauuca

SEQ ID NO: 3187894 - RNA, 19 nt, Artificial Sequence
  Description of Artificial Sequence: Synthetic oligonucleotide
ucugaaaauugcaugcuug

SEQ ID NO: 3187895 - RNA, 19 nt, Artificial Sequence
  Description of Artificial Sequence: Synthetic oligonucleotide
ucaguuauauauauuacuu

SEQ ID NO: 3187896 - RNA, 19 nt, Artificial Sequence
  Description of Artificial Sequence: Synthetic oligonucleotide
ucaaauuaaagugaguuau

SEQ ID NO: 3187897 - RNA, 19 nt, Artificial Sequence
  Description of Artificial Sequence: Synthetic oligonucleotide
ugugcucuggcaaagguug

SEQ ID NO: 3187898 - RNA, 19 nt, Artificial Sequence
  Description of Artificial Sequence: Synthetic oligonucleotide
ucagagauugcucauggcu

SEQ ID NO: 3187899 - RNA, 19 nt, Artificial Sequence
  Description of Artificial Sequence: Synthetic oligonucleotide
uuuagucauucuuuagggg

SEQ ID NO: 3187900 - RNA, 19 nt, Artificial Sequence
  Description of Artificial Sequence: Synthetic oligonucleotide
uuaaguaauucaccaagac

SEQ ID NO: 3187901 - RNA, 19 nt, Artificial Sequence
  Description of Artificial Sequence: Synthetic oligonucleotide
cacagauuccucauuaggg

SEQ ID NO: 3187902 - RNA, 19 nt, Artificial Sequence
  Description of Artificial Sequence: Synthetic oligonucleotide
gacuuuacugguguuaugg

SEQ ID NO: 3187903 - RNA, 19 nt, Artificial Sequence
  Description of Artificial Sequence: Synthetic oligonucleotide
aguaugaacuagaugaggg

SEQ ID NO: 3187904 - RNA, 19 nt, Artificial Sequence
  Description of Artificial Sequence: Synthetic oligonucleotide
uuacaguuaauguuuucag

SEQ ID NO: 3187905 - RNA, 19 nt, Artificial Sequence
  Description of Artificial Sequence: Synthetic oligonucleotide
guaaccuuuaugugaaggg

SEQ ID NO: 3187906 - RNA, 19 nt, Artificial Sequence
  Description of Artificial Sequence: Synthetic oligonucleotide
uacauaaagauguauuuau

SEQ ID NO: 3187907 - RNA, 19 nt, Artificial Sequence
  Description of Artificial Sequence: Synthetic oligonucleotide
ucauguuaaguaauucacc

SEQ ID NO: 3187908 - RNA, 19 nt, Artificial Sequence
  Description of Artificial Sequence: Synthetic oligonucleotide
uguuugaacguugaaacug

SEQ ID NO: 3187909 - RNA, 19 nt, Artificial Sequence
  Description of Artificial Sequence: Synthetic oligonucleotide
uagaucauguccuuucucc

SEQ ID NO: 3187910 - RNA, 19 nt, Artificial Sequence
  Description of Artificial Sequence: Synthetic oligonucleotide
aggugugugacuuaggacu

SEQ ID NO: 3187911 - RNA, 19 nt, Artificial Sequence
  Description of Artificial Sequence: Synthetic oligonucleotide
agugguuuguaacuuaucu

SEQ ID NO: 3187912 - RNA, 19 nt, Artificial Sequence
  Description of Artificial Sequence: Synthetic oligonucleotide
ucugcaucaguuuuggacu

SEQ ID NO: 3187913 - RNA, 19 nt, Artificial Sequence
  Description of Artificial Sequence: Synthetic oligonucleotide
aaccuuuaugugaaggggc

SEQ ID NO: 3187914 - RNA, 19 nt, Artificial Sequence
  Description of Artificial Sequence: Synthetic oligonucleotide
cuuuauuuugcucugccug

SEQ ID NO: 3187915 - RNA, 19 nt, Artificial Sequence
  Description of Artificial Sequence: Synthetic oligonucleotide
uaauccuuugcuuuggggu

SEQ ID NO: 3187916 - RNA, 19 nt, Artificial Sequence
  Description of Artificial Sequence: Synthetic oligonucleotide
uggaguaaccuuuauguga

SEQ ID NO: 3187917 - RNA, 19 nt, Artificial Sequence
  Description of Artificial Sequence: Synthetic oligonucleotide
acaaguugcagucaaauua

SEQ ID NO: 3187918 - RNA, 19 nt, Artificial Sequence
  Description of Artificial Sequence: Synthetic oligonucleotide
uguacaucuucucuucugc

SEQ ID NO: 3187919 - RNA, 19 nt, Artificial Sequence
  Description of Artificial Sequence: Synthetic oligonucleotide
uuucuaucggcucugggga

SEQ ID NO: 3187920 - RNA, 19 nt, Artificial Sequence
  Description of Artificial Sequence: Synthetic oligonucleotide
uaguuaucacacuugaacu

SEQ ID NO: 3187921 - RNA, 19 nt, Artificial Sequence
  Description of Artificial Sequence: Synthetic oligonucleotide
ugaacguugaaacugccau

SEQ ID NO: 3187922 - RNA, 19 nt, Artificial Sequence
  Description of Artificial Sequence: Synthetic oligonucleotide
aguaagugcacacucgaug

SEQ ID NO: 3187923 - RNA, 19 nt, Artificial Sequence
  Description of Artificial Sequence: Synthetic oligonucleotide
uuugcuuugggguaccaca

SEQ ID NO: 3187924 - RNA, 19 nt, Artificial Sequence
  Description of Artificial Sequence: Synthetic oligonucleotide
ucuacaagcauuacaguua

SEQ ID NO: 3187925 - RNA, 19 nt, Artificial Sequence
  Description of Artificial Sequence: Synthetic oligonucleotide
ugagugaggacucucugug

SEQ ID NO: 3187926 - RNA, 19 nt, Artificial Sequence
  Description of Artificial Sequence: Synthetic oligonucleotide
uaaccuuuaugugaagggg

SEQ ID NO: 3187927 - RNA, 19 nt, Artificial Sequence
  Description of Artificial Sequence: Synthetic oligonucleotide
aucacacuugaacuguuac

SEQ ID NO: 3187928 - RNA, 19 nt, Artificial Sequence
  Description of Artificial Sequence: Synthetic oligonucleotide
aguuuuggacuugagugcc

SEQ ID NO: 3187929 - RNA, 19 nt, Artificial Sequence
  Description of Artificial Sequence: Synthetic oligonucleotide
ugcaagaguaucaguauga

SEQ ID NO: 3187930 - RNA, 19 nt, Artificial Sequence
  Description of Artificial Sequence: Synthetic oligonucleotide
uuuucaugaggucaucuuc

SEQ ID NO: 3187931 - RNA, 19 nt, Artificial Sequence
  Description of Artificial Sequence: Synthetic oligonucleotide
uaacuuaucuucaguuugc

SEQ ID NO: 3187932 - RNA, 19 nt, Artificial Sequence
  Description of Artificial Sequence: Synthetic oligonucleotide
uuuccauacaggcauguaa

SEQ ID NO: 3187933 - RNA, 19 nt, Artificial Sequence
  Description of Artificial Sequence: Synthetic oligonucleotide
uggauuucauccaaggaau

SEQ ID NO: 3187934 - RNA, 19 nt, Artificial Sequence
  Description of Artificial Sequence: Synthetic oligonucleotide
aagugaguuauggaaaaug

SEQ ID NO: 3187935 - RNA, 19 nt, Artificial Sequence
  Description of Artificial Sequence: Synthetic oligonucleotide
auccuuuagcuucagcuuc

SEQ ID NO: 3187936 - RNA, 19 nt, Artificial Sequence
  Description of Artificial Sequence: Synthetic oligonucleotide
uucuagccgacuuucaaug

SEQ ID NO: 3187937 - RNA, 19 nt, Artificial Sequence
  Description of Artificial Sequence: Synthetic oligonucleotide
aggguccucgucuuggucc

SEQ ID NO: 3187938 - RNA, 19 nt, Artificial Sequence
  Description of Artificial Sequence: Synthetic oligonucleotide
uuuaucauguuaaguaauu

SEQ ID NO: 3187939 - RNA, 19 nt, Artificial Sequence
  Description of Artificial Sequence: Synthetic oligonucleotide
auacacaguaagugcacac

SEQ ID NO: 3187940 - RNA, 19 nt, Artificial Sequence
  Description of Artificial Sequence: Synthetic oligonucleotide
gaagagguguggcuguugg

SEQ ID NO: 3187941 - RNA, 19 nt, Artificial Sequence
  Description of Artificial Sequence: Synthetic oligonucleotide
aaaaucuuucucaauugcu

SEQ ID NO: 3187942 - RNA, 19 nt, Artificial Sequence
  Description of Artificial Sequence: Synthetic oligonucleotide
uuucacucauuguuuugcg

SEQ ID NO: 3187943 - RNA, 19 nt, Artificial Sequence
  Description of Artificial Sequence: Synthetic oligonucleotide
aaacuauuuacuguuuuau

SEQ ID NO: 3187944 - RNA, 19 nt, Artificial Sequence
  Description of Artificial Sequence: Synthetic oligonucleotide
ugguguaaugcuguugugg

SEQ ID NO: 3187945 - RNA, 19 nt, Artificial Sequence
  Description of Artificial Sequence: Synthetic oligonucleotide
gacuuuauugguuguuuug

SEQ ID NO: 3187946 - RNA, 19 nt, Artificial Sequence
  Description of Artificial Sequence: Synthetic oligonucleotide
uugaaccuaacuuuagaaa

SEQ ID NO: 3187947 - RNA, 19 nt, Artificial Sequence
  Description of Artificial Sequence: Synthetic oligonucleotide
gaccauugaugacugcucg

SEQ ID NO: 3187948 - RNA, 19 nt, Artificial Sequence
  Description of Artificial Sequence: Synthetic oligonucleotide
uaugugaaggggcugccca

SEQ ID NO: 3187949 - RNA, 19 nt, Artificial Sequence
  Description of Artificial Sequence: Synthetic oligonucleotide
uuccauacaggcauguaaa

SEQ ID NO: 3187950 - RNA, 19 nt, Artificial Sequence
  Description of Artificial Sequence: Synthetic oligonucleotide
aacuagcugaaccagccau

SEQ ID NO: 3187951 - RNA, 19 nt, Artificial Sequence
  Description of Artificial Sequence: Synthetic oligonucleotide
gaguuuguuucugagauca

SEQ ID NO: 3187952 - RNA, 19 nt, Artificial Sequence
  Description of Artificial Sequence: Synthetic oligonucleotide
agucugguggcucauuguc

SEQ ID NO: 3187953 - RNA, 19 nt, Artificial Sequence
  Description of Artificial Sequence: Synthetic oligonucleotide
acuuacuguaauuugugau

SEQ ID NO: 3187954 - RNA, 19 nt, Artificial Sequence
  Description of Artificial Sequence: Synthetic oligonucleotide
uuuagugccccauuaguua

SEQ ID NO: 3187955 - RNA, 19 nt, Artificial Sequence
  Description of Artificial Sequence: Synthetic oligonucleotide
uugcaagaguaucaguaug

SEQ ID NO: 3187956 - RNA, 19 nt, Artificial Sequence
  Description of Artificial Sequence: Synthetic oligonucleotide
uuagcuucagcuucaacuu

SEQ ID NO: 3187957 - RNA, 19 nt, Artificial Sequence
  Description of Artificial Sequence: Synthetic oligonucleotide
uccuuuagggugaauucug

SEQ ID NO: 3187958 - RNA, 19 nt, Artificial Sequence
  Description of Artificial Sequence: Synthetic oligonucleotide
uaggacuagaucuccaggu

SEQ ID NO: 3187959 - RNA, 19 nt, Artificial Sequence
  Description of Artificial Sequence: Synthetic oligonucleotide
ugggcuugugauuucaaga

SEQ ID NO: 3187960 - RNA, 19 nt, Artificial Sequence
  Description of Artificial Sequence: Synthetic oligonucleotide
uccggggagacucugaaaa

SEQ ID NO: 3187961 - RNA, 19 nt, Artificial Sequence
  Description of Artificial Sequence: Synthetic oligonucleotide
uguuacuguuugaacguug

SEQ ID NO: 3187962 - RNA, 19 nt, Artificial Sequence
  Description of Artificial Sequence: Synthetic oligonucleotide
aucuacaagcauuacaguu

SEQ ID NO: 3187963 - RNA, 19 nt, Artificial Sequence
  Description of Artificial Sequence: Synthetic oligonucleotide
aagaguggcuguauuuugg

SEQ ID NO: 3187964 - RNA, 19 nt, Artificial Sequence
  Description of Artificial Sequence: Synthetic oligonucleotide
cucaacuucuaguuugaag

SEQ ID NO: 3187965 - RNA, 19 nt, Artificial Sequence
  Description of Artificial Sequence: Synthetic oligonucleotide
cugcauuucagagaguagc

SEQ ID NO: 3187966 - RNA, 19 nt, Artificial Sequence
  Description of Artificial Sequence: Synthetic oligonucleotide
uaugagugaggacucucug

SEQ ID NO: 3187967 - RNA, 19 nt, Artificial Sequence
  Description of Artificial Sequence: Synthetic oligonucleotide
agaguggcuguauuuuggg

SEQ ID NO: 3187968 - RNA, 19 nt, Artificial Sequence
  Description of Artificial Sequence: Synthetic oligonucleotide
aguuugguaucacugcugu

SEQ ID NO: 3187969 - RNA, 19 nt, Artificial Sequence
  Description of Artificial Sequence: Synthetic oligonucleotide
caauagaucauguccuuuc

SEQ ID NO: 3187970 - RNA, 19 nt, Artificial Sequence
  Description of Artificial Sequence: Synthetic oligonucleotide
acugucgucacuuuauuuu

SEQ ID NO: 3187971 - RNA, 19 nt, Artificial Sequence
  Description of Artificial Sequence: Synthetic oligonucleotide
aauuggauaauucaaaauc

SEQ ID NO: 3187972 - RNA, 19 nt, Artificial Sequence
  Description of Artificial Sequence: Synthetic oligonucleotide
uuguauuucauacaaaugg

SEQ ID NO: 3187973 - RNA, 19 nt, Artificial Sequence
  Description of Artificial Sequence: Synthetic oligonucleotide
aagaacaagaaacaaaagg

SEQ ID NO: 3187974 - RNA, 19 nt, Artificial Sequence
  Description of Artificial Sequence: Synthetic oligonucleotide
aacaaaaggaaauagugcu

SEQ ID NO: 3187975 - RNA, 19 nt, Artificial Sequence
  Description of Artificial Sequence: Synthetic oligonucleotide
uauauaacauugaagaaca

SEQ ID NO: 3187976 - RNA, 19 nt, Artificial Sequence
  Description of Artificial Sequence: Synthetic oligonucleotide
aucauaaauauauagacca

SEQ ID NO: 3187977 - RNA, 19 nt, Artificial Sequence
  Description of Artificial Sequence: Synthetic oligonucleotide
aaggaaauagugcucuugc

SEQ ID NO: 3187978 - RNA, 19 nt, Artificial Sequence
  Description of Artificial Sequence: Synthetic oligonucleotide
caauauauaacauugaaga

SEQ ID NO: 3187979 - RNA, 19 nt, Artificial Sequence
  Description of Artificial Sequence: Synthetic oligonucleotide
aauauauagaccaauauau

SEQ ID NO: 3187980 - RNA, 19 nt, Artificial Sequence
  Description of Artificial Sequence: Synthetic oligonucleotide
auauauaacauugaagaac

SEQ ID NO: 3187981 - RNA, 19 nt, Artificial Sequence
  Description of Artificial Sequence: Synthetic oligonucleotide
ucaucauaaauauauagac

SEQ ID NO: 3187982 - RNA, 19 nt, Artificial Sequence
  Description of Artificial Sequence: Synthetic oligonucleotide
aaacaaaaggaaauagugc

SEQ ID NO: 3187983 - RNA, 19 nt, Artificial Sequence
  Description of Artificial Sequence: Synthetic oligonucleotide
ugaagaacaagaaacaaaa

SEQ ID NO: 3187984 - RNA, 19 nt, Artificial Sequence
  Description of Artificial Sequence: Synthetic oligonucleotide
acauugaagaacaagaaac

SEQ ID NO: 3187985 - RNA, 19 nt, Artificial Sequence
  Description of Artificial Sequence: Synthetic oligonucleotide
aaugguucaucauaaauau

SEQ ID NO: 3187986 - RNA, 19 nt, Artificial Sequence
  Description of Artificial Sequence: Synthetic oligonucleotide
uccauaacagucauaauug

SEQ ID NO: 3187987 - RNA, 19 nt, Artificial Sequence
  Description of Artificial Sequence: Synthetic oligonucleotide
augguauuguauuucauac

SEQ ID NO: 3187988 - RNA, 19 nt, Artificial Sequence
  Description of Artificial Sequence: Synthetic oligonucleotide
aaugaaaugguauuguauu

SEQ ID NO: 3187989 - RNA, 19 nt, Artificial Sequence
  Description of Artificial Sequence: Synthetic oligonucleotide
aaauauauagaccaauaua

SEQ ID NO: 3187990 - RNA, 19 nt, Artificial Sequence
  Description of Artificial Sequence: Synthetic oligonucleotide
gaaacaaaaggaaauagug

SEQ ID NO: 3187991 - RNA, 19 nt, Artificial Sequence
  Description of Artificial Sequence: Synthetic oligonucleotide
auaauucaaaaucucuugg

SEQ ID NO: 3187992 - RNA, 19 nt, Artificial Sequence
  Description of Artificial Sequence: Synthetic oligonucleotide
uucaucauaaauauauaga

SEQ ID NO: 3187993 - RNA, 19 nt, Artificial Sequence
  Description of Artificial Sequence: Synthetic oligonucleotide
uugcauaaaggucaauucg

SEQ ID NO: 3187994 - RNA, 19 nt, Artificial Sequence
  Description of Artificial Sequence: Synthetic oligonucleotide
gauaauucaaaaucucuug

SEQ ID NO: 3187995 - RNA, 19 nt, Artificial Sequence
  Description of Artificial Sequence: Synthetic oligonucleotide
uauagaccaauauauaaca

SEQ ID NO: 3187996 - RNA, 19 nt, Artificial Sequence
  Description of Artificial Sequence: Synthetic oligonucleotide
uauauagaccaauauauaa

SEQ ID NO: 3187997 - RNA, 19 nt, Artificial Sequence
  Description of Artificial Sequence: Synthetic oligonucleotide
ugguucaucauaaauauau

SEQ ID NO: 3187998 - RNA, 19 nt, Artificial Sequence
  Description of Artificial Sequence: Synthetic oligonucleotide
uauuguauuucauacaaau

SEQ ID NO: 3187999 - RNA, 19 nt, Artificial Sequence
  Description of Artificial Sequence: Synthetic oligonucleotide
auaaaggucaauucgcuug

SEQ ID NO: 3188000 - RNA, 19 nt, Artificial Sequence
  Description of Artificial Sequence: Synthetic oligonucleotide
ugcucuugcauaaagguca

SEQ ID NO: 3188001 - RNA, 19 nt, Artificial Sequence
  Description of Artificial Sequence: Synthetic oligonucleotide
aauauauaacauugaagaa

SEQ ID NO: 3188002 - RNA, 19 nt, Artificial Sequence
  Description of Artificial Sequence: Synthetic oligonucleotide
uguauuucauacaaaugga

SEQ ID NO: 3188003 - RNA, 19 nt, Artificial Sequence
  Description of Artificial Sequence: Synthetic oligonucleotide
uucaaaaucucuugguaag

SEQ ID NO: 3188004 - RNA, 19 nt, Artificial Sequence
  Description of Artificial Sequence: Synthetic oligonucleotide
aaauggaaaugguucauca

SEQ ID NO: 3188005 - RNA, 19 nt, Artificial Sequence
  Description of Artificial Sequence: Synthetic oligonucleotide
guucaucauaaauauauag

SEQ ID NO: 3188006 - RNA, 19 nt, Artificial Sequence
  Description of Artificial Sequence: Synthetic oligonucleotide
uuuuccauaacagucauaa

SEQ ID NO: 3188007 - RNA, 19 nt, Artificial Sequence
  Description of Artificial Sequence: Synthetic oligonucleotide
ugcauaaaggucaauucgc

SEQ ID NO: 3188008 - RNA, 19 nt, Artificial Sequence
  Description of Artificial Sequence: Synthetic oligonucleotide
aagaaacaaaaggaaauag

SEQ ID NO: 3188009 - RNA, 19 nt, Artificial Sequence
  Description of Artificial Sequence: Synthetic oligonucleotide
uauaacauugaagaacaag

SEQ ID NO: 3188010 - RNA, 19 nt, Artificial Sequence
  Description of Artificial Sequence: Synthetic oligonucleotide
auuggucacaaugaaaugg

SEQ ID NO: 3188011 - RNA, 19 nt, Artificial Sequence
  Description of Artificial Sequence: Synthetic oligonucleotide
uccauuguugacuucaaug

SEQ ID NO: 3188012 - RNA, 19 nt, Artificial Sequence
  Description of Artificial Sequence: Synthetic oligonucleotide
auauagaccaauauauaac

SEQ ID NO: 3188013 - RNA, 19 nt, Artificial Sequence
  Description of Artificial Sequence: Synthetic oligonucleotide
uaaauauauagaccaauau

SEQ ID NO: 3188014 - RNA, 19 nt, Artificial Sequence
  Description of Artificial Sequence: Synthetic oligonucleotide
auacaaauggaaaugguuc

SEQ ID NO: 3188015 - RNA, 19 nt, Artificial Sequence
  Description of Artificial Sequence: Synthetic oligonucleotide
agaacaagaaacaaaagga

SEQ ID NO: 3188016 - RNA, 19 nt, Artificial Sequence
  Description of Artificial Sequence: Synthetic oligonucleotide
uaaaggucaauucgcuugg

SEQ ID NO: 3188017 - RNA, 19 nt, Artificial Sequence
  Description of Artificial Sequence: Synthetic oligonucleotide
uauuucauacaaauggaaa

SEQ ID NO: 3188018 - RNA, 19 nt, Artificial Sequence
  Description of Artificial Sequence: Synthetic oligonucleotide
ucauaauuggauaauucaa

SEQ ID NO: 3188019 - RNA, 19 nt, Artificial Sequence
  Description of Artificial Sequence: Synthetic oligonucleotide
caucauaaauauauagacc

SEQ ID NO: 3188020 - RNA, 19 nt, Artificial Sequence
  Description of Artificial Sequence: Synthetic oligonucleotide
uuccauaacagucauaauu

SEQ ID NO: 3188021 - RNA, 19 nt, Artificial Sequence
  Description of Artificial Sequence: Synthetic oligonucleotide
uucauacaaauggaaaugg

SEQ ID NO: 3188022 - RNA, 19 nt, Artificial Sequence
  Description of Artificial Sequence: Synthetic oligonucleotide
auaacauugaagaacaaga

SEQ ID NO: 3188023 - RNA, 19 nt, Artificial Sequence
  Description of Artificial Sequence: Synthetic oligonucleotide
auuucauacaaauggaaau

SEQ ID NO: 3188024 - RNA, 19 nt, Artificial Sequence
  Description of Artificial Sequence: Synthetic oligonucleotide
aaaucucuugguaagcuuc

SEQ ID NO: 3188025 - RNA, 19 nt, Artificial Sequence
  Description of Artificial Sequence: Synthetic oligonucleotide
aauucaaaaucucuuggua

SEQ ID NO: 3188026 - RNA, 19 nt, Artificial Sequence
  Description of Artificial Sequence: Synthetic oligonucleotide
aaugguauuguauuucaua

SEQ ID NO: 3188027 - RNA, 19 nt, Artificial Sequence
  Description of Artificial Sequence: Synthetic oligonucleotide
aacauugaagaacaagaaa

SEQ ID NO: 3188028 - RNA, 19 nt, Artificial Sequence
  Description of Artificial Sequence: Synthetic oligonucleotide
cuucuuguuguucuuagcc

SEQ ID NO: 3188029 - RNA, 19 nt, Artificial Sequence
  Description of Artificial Sequence: Synthetic oligonucleotide
uuucauacaaauggaaaug

SEQ ID NO: 3188030 - RNA, 19 nt, Artificial Sequence
  Description of Artificial Sequence: Synthetic oligonucleotide
uggauaauucaaaaucucu

SEQ ID NO: 3188031 - RNA, 19 nt, Artificial Sequence
  Description of Artificial Sequence: Synthetic oligonucleotide
uugaagaacaagaaacaaa

SEQ ID NO: 3188032 - RNA, 19 nt, Artificial Sequence
  Description of Artificial Sequence: Synthetic oligonucleotide
aauggguuuuccauaacag

SEQ ID NO: 3188033 - RNA, 19 nt, Artificial Sequence
  Description of Artificial Sequence: Synthetic oligonucleotide
aacagucauaauuggauaa

SEQ ID NO: 3188034 - RNA, 19 nt, Artificial Sequence
  Description of Artificial Sequence: Synthetic oligonucleotide
uggguuuuccauaacaguc

SEQ ID NO: 3188035 - RNA, 19 nt, Artificial Sequence
  Description of Artificial Sequence: Synthetic oligonucleotide
uacaaauggaaaugguuca

SEQ ID NO: 3188036 - RNA, 19 nt, Artificial Sequence
  Description of Artificial Sequence: Synthetic oligonucleotide
ugcuguuggaauaaccggc

SEQ ID NO: 3188037 - RNA, 19 nt, Artificial Sequence
  Description of Artificial Sequence: Synthetic oligonucleotide
agaccaauauauaacauug

SEQ ID NO: 3188038 - RNA, 19 nt, Artificial Sequence
  Description of Artificial Sequence: Synthetic oligonucleotide
uaauucaaaaucucuuggu

SEQ ID NO: 3188039 - RNA, 19 nt, Artificial Sequence
  Description of Artificial Sequence: Synthetic oligonucleotide
uuucccaaguccauuguug

SEQ ID NO: 3188040 - RNA, 19 nt, Artificial Sequence
  Description of Artificial Sequence: Synthetic oligonucleotide
aaaugguucaucauaaaua

SEQ ID NO: 3188041 - RNA, 19 nt, Artificial Sequence
  Description of Artificial Sequence: Synthetic oligonucleotide
auaauuggauaauucaaaa

SEQ ID NO: 3188042 - RNA, 19 nt, Artificial Sequence
  Description of Artificial Sequence: Synthetic oligonucleotide
ggaauaaccggcuuggcag

SEQ ID NO: 3188043 - RNA, 19 nt, Artificial Sequence
  Description of Artificial Sequence: Synthetic oligonucleotide
ucuuguuguucuuagccug

SEQ ID NO: 3188044 - RNA, 19 nt, Artificial Sequence
  Description of Artificial Sequence: Synthetic oligonucleotide
uaacauugaagaacaagaa

SEQ ID NO: 3188045 - RNA, 19 nt, Artificial Sequence
  Description of Artificial Sequence: Synthetic oligonucleotide
agugcucuugcauaaaggu

SEQ ID NO: 3188046 - RNA, 19 nt, Artificial Sequence
  Description of Artificial Sequence: Synthetic oligonucleotide
aaucucuugguaagcuucc

SEQ ID NO: 3188047 - RNA, 19 nt, Artificial Sequence
  Description of Artificial Sequence: Synthetic oligonucleotide
gucauaauuggauaauuca

SEQ ID NO: 3188048 - RNA, 19 nt, Artificial Sequence
  Description of Artificial Sequence: Synthetic oligonucleotide
ugguaagcuuccaacaaug

SEQ ID NO: 3188049 - RNA, 19 nt, Artificial Sequence
  Description of Artificial Sequence: Synthetic oligonucleotide
uguuggaauaaccggcuug

SEQ ID NO: 3188050 - RNA, 19 nt, Artificial Sequence
  Description of Artificial Sequence: Synthetic oligonucleotide
aaauagugcucuugcauaa

SEQ ID NO: 3188051 - RNA, 19 nt, Artificial Sequence
  Description of Artificial Sequence: Synthetic oligonucleotide
uggaaaugguucaucauaa

SEQ ID NO: 3188052 - RNA, 19 nt, Artificial Sequence
  Description of Artificial Sequence: Synthetic oligonucleotide
auucaaaaucucuugguaa

SEQ ID NO: 3188053 - RNA, 19 nt, Artificial Sequence
  Description of Artificial Sequence: Synthetic oligonucleotide
cuugcauaaaggucaauuc

SEQ ID NO: 3188054 - RNA, 19 nt, Artificial Sequence
  Description of Artificial Sequence: Synthetic oligonucleotide
auuggauaauucaaaaucu

SEQ ID NO: 3188055 - RNA, 19 nt, Artificial Sequence
  Description of Artificial Sequence: Synthetic oligonucleotide
uagugcucuugcauaaagg

SEQ ID NO: 3188056 - RNA, 19 nt, Artificial Sequence
  Description of Artificial Sequence: Synthetic oligonucleotide
ucuugguaagcuuccaaca

SEQ ID NO: 3188057 - RNA, 19 nt, Artificial Sequence
  Description of Artificial Sequence: Synthetic oligonucleotide
gaaaugguauuguauuuca

SEQ ID NO: 3188058 - RNA, 19 nt, Artificial Sequence
  Description of Artificial Sequence: Synthetic oligonucleotide
accaauauauaacauugaa

SEQ ID NO: 3188059 - RNA, 19 nt, Artificial Sequence
  Description of Artificial Sequence: Synthetic oligonucleotide
aacaagaaacaaaaggaaa

SEQ ID NO: 3188060 - RNA, 19 nt, Artificial Sequence
  Description of Artificial Sequence: Synthetic oligonucleotide
uuggucacaaugaaauggu

SEQ ID NO: 3188061 - RNA, 19 nt, Artificial Sequence
  Description of Artificial Sequence: Synthetic oligonucleotide
uuggauaauucaaaaucuc

SEQ ID NO: 3188062 - RNA, 19 nt, Artificial Sequence
  Description of Artificial Sequence: Synthetic oligonucleotide
cauuguugacuucaauggg

SEQ ID NO: 3188063 - RNA, 19 nt, Artificial Sequence
  Description of Artificial Sequence: Synthetic oligonucleotide
ugauuucccaaguccauug

SEQ ID NO: 3188064 - RNA, 19 nt, Artificial Sequence
  Description of Artificial Sequence: Synthetic oligonucleotide
aaaggaaauagugcucuug

SEQ ID NO: 3188065 - RNA, 19 nt, Artificial Sequence
  Description of Artificial Sequence: Synthetic oligonucleotide
ccauuguugacuucaaugg

SEQ ID NO: 3188066 - RNA, 19 nt, Artificial Sequence
  Description of Artificial Sequence: Synthetic oligonucleotide
uaauuggauaauucaaaau

SEQ ID NO: 3188067 - RNA, 19 nt, Artificial Sequence
  Description of Artificial Sequence: Synthetic oligonucleotide
uucgcuuggcugcuguugg

SEQ ID NO: 3188068 - RNA, 19 nt, Artificial Sequence
  Description of Artificial Sequence: Synthetic oligonucleotide
acuucaauggguuuuccau

SEQ ID NO: 3188069 - RNA, 19 nt, Artificial Sequence
  Description of Artificial Sequence: Synthetic oligonucleotide
guuggaauaaccggcuugg

SEQ ID NO: 3188070 - RNA, 19 nt, Artificial Sequence
  Description of Artificial Sequence: Synthetic oligonucleotide
gaauaaccggcuuggcagg

SEQ ID NO: 3188071 - RNA, 19 nt, Artificial Sequence
  Description of Artificial Sequence: Synthetic oligonucleotide
aagaaaauaaauuuugggc

SEQ ID NO: 3188072 - RNA, 19 nt, Artificial Sequence
  Description of Artificial Sequence: Synthetic oligonucleotide
aauauaguuacuugguucc

SEQ ID NO: 3188073 - RNA, 19 nt, Artificial Sequence
  Description of Artificial Sequence: Synthetic oligonucleotide
aguacuaaaauauaguuac

SEQ ID NO: 3188074 - RNA, 19 nt, Artificial Sequence
  Description of Artificial Sequence: Synthetic oligonucleotide
aaauauuauauucacugac

SEQ ID NO: 3188075 - RNA, 19 nt, Artificial Sequence
  Description of Artificial Sequence: Synthetic oligonucleotide
aauaauauaugucaguacu

SEQ ID NO: 3188076 - RNA, 19 nt, Artificial Sequence
  Description of Artificial Sequence: Synthetic oligonucleotide
aaauauaguuacuugguuc

SEQ ID NO: 3188077 - RNA, 19 nt, Artificial Sequence
  Description of Artificial Sequence: Synthetic oligonucleotide
uaaacaaugaaaaugcaac

SEQ ID NO: 3188078 - RNA, 19 nt, Artificial Sequence
  Description of Artificial Sequence: Synthetic oligonucleotide
ucuuguuacauacaaagcc

SEQ ID NO: 3188079 - RNA, 19 nt, Artificial Sequence
  Description of Artificial Sequence: Synthetic oligonucleotide
uuuuaugaaguccagcagg

SEQ ID NO: 3188080 - RNA, 19 nt, Artificial Sequence
  Description of Artificial Sequence: Synthetic oligonucleotide
uaauuaucuauucacuugg

SEQ ID NO: 3188081 - RNA, 19 nt, Artificial Sequence
  Description of Artificial Sequence: Synthetic oligonucleotide
ugaaaaucaucucaaagcc

SEQ ID NO: 3188082 - RNA, 19 nt, Artificial Sequence
  Description of Artificial Sequence: Synthetic oligonucleotide
ugaguuuuaagucuaaugu

SEQ ID NO: 3188083 - RNA, 19 nt, Artificial Sequence
  Description of Artificial Sequence: Synthetic oligonucleotide
uugaaaaucaucucaaagc

SEQ ID NO: 3188084 - RNA, 19 nt, Artificial Sequence
  Description of Artificial Sequence: Synthetic oligonucleotide
aaauaauauaugucaguac

SEQ ID NO: 3188085 - RNA, 19 nt, Artificial Sequence
  Description of Artificial Sequence: Synthetic oligonucleotide
uguguaacaaaauuuaugu

SEQ ID NO: 3188086 - RNA, 19 nt, Artificial Sequence
  Description of Artificial Sequence: Synthetic oligonucleotide
uucacaaugaaaauaauau

SEQ ID NO: 3188087 - RNA, 19 nt, Artificial Sequence
  Description of Artificial Sequence: Synthetic oligonucleotide
uuuccuuauauacagaaga

SEQ ID NO: 3188088 - RNA, 19 nt, Artificial Sequence
  Description of Artificial Sequence: Synthetic oligonucleotide
aauucuaacauccuauaga

SEQ ID NO: 3188089 - RNA, 19 nt, Artificial Sequence
  Description of Artificial Sequence: Synthetic oligonucleotide
uuugaaaaucaucucaaag

SEQ ID NO: 3188090 - RNA, 19 nt, Artificial Sequence
  Description of Artificial Sequence: Synthetic oligonucleotide
uaaaugaauuauaaaacug

SEQ ID NO: 3188091 - RNA, 19 nt, Artificial Sequence
  Description of Artificial Sequence: Synthetic oligonucleotide
auaaaacugaaucuggguc

SEQ ID NO: 3188092 - RNA, 19 nt, Artificial Sequence
  Description of Artificial Sequence: Synthetic oligonucleotide
uuauaaaacugaaucuggg

SEQ ID NO: 3188093 - RNA, 19 nt, Artificial Sequence
  Description of Artificial Sequence: Synthetic oligonucleotide
aauguaagcaaaauuauga

SEQ ID NO: 3188094 - RNA, 19 nt, Artificial Sequence
  Description of Artificial Sequence: Synthetic oligonucleotide
aauaaagagaugcaaucca

SEQ ID NO: 3188095 - RNA, 19 nt, Artificial Sequence
  Description of Artificial Sequence: Synthetic oligonucleotide
ugaaaaugcaacuuuauau

SEQ ID NO: 3188096 - RNA, 19 nt, Artificial Sequence
  Description of Artificial Sequence: Synthetic oligonucleotide
uuugggaauaaagagaugc

SEQ ID NO: 3188097 - RNA, 19 nt, Artificial Sequence
  Description of Artificial Sequence: Synthetic oligonucleotide
cuuuuaauuaucuauucac

SEQ ID NO: 3188098 - RNA, 19 nt, Artificial Sequence
  Description of Artificial Sequence: Synthetic oligonucleotide
uucacuuggauuaugagaa

SEQ ID NO: 3188099 - RNA, 19 nt, Artificial Sequence
  Description of Artificial Sequence: Synthetic oligonucleotide
gaagaaaucauaaaggaca

SEQ ID NO: 3188100 - RNA, 19 nt, Artificial Sequence
  Description of Artificial Sequence: Synthetic oligonucleotide
uaugucaguacuaaaauau

SEQ ID NO: 3188101 - RNA, 19 nt, Artificial Sequence
  Description of Artificial Sequence: Synthetic oligonucleotide
ucuaacauccuauagaaua

SEQ ID NO: 3188102 - RNA, 19 nt, Artificial Sequence
  Description of Artificial Sequence: Synthetic oligonucleotide
augcaauccaucuucaugg

SEQ ID NO: 3188103 - RNA, 19 nt, Artificial Sequence
  Description of Artificial Sequence: Synthetic oligonucleotide
uggauuaugagaaaauaac

SEQ ID NO: 3188104 - RNA, 19 nt, Artificial Sequence
  Description of Artificial Sequence: Synthetic oligonucleotide
auuaugagaaaauaacugu

SEQ ID NO: 3188105 - RNA, 19 nt, Artificial Sequence
  Description of Artificial Sequence: Synthetic oligonucleotide
cagaagaucacuuucuucc

SEQ ID NO: 3188106 - RNA, 19 nt, Artificial Sequence
  Description of Artificial Sequence: Synthetic oligonucleotide
uuaauuaucuauucacuug

SEQ ID NO: 3188107 - RNA, 19 nt, Artificial Sequence
  Description of Artificial Sequence: Synthetic oligonucleotide
uaaauuuugggccauccca

SEQ ID NO: 3188108 - RNA, 19 nt, Artificial Sequence
  Description of Artificial Sequence: Synthetic oligonucleotide
gagaccaaaauacaagucc

SEQ ID NO: 3188109 - RNA, 19 nt, Artificial Sequence
  Description of Artificial Sequence: Synthetic oligonucleotide
agaaggagaauguagcuuc

SEQ ID NO: 3188110 - RNA, 19 nt, Artificial Sequence
  Description of Artificial Sequence: Synthetic oligonucleotide
gauuaugagaaaauaacug

SEQ ID NO: 3188111 - RNA, 19 nt, Artificial Sequence
  Description of Artificial Sequence: Synthetic oligonucleotide
aaagagaugcaauccaucu

SEQ ID NO: 3188112 - RNA, 19 nt, Artificial Sequence
  Description of Artificial Sequence: Synthetic oligonucleotide
aaauucuaacauccuauag

SEQ ID NO: 3188113 - RNA, 19 nt, Artificial Sequence
  Description of Artificial Sequence: Synthetic oligonucleotide
ugucaguacuaaaauauag

SEQ ID NO: 3188114 - RNA, 19 nt, Artificial Sequence
  Description of Artificial Sequence: Synthetic oligonucleotide
agagaugcaauccaucuuc

SEQ ID NO: 3188115 - RNA, 19 nt, Artificial Sequence
  Description of Artificial Sequence: Synthetic oligonucleotide
uaucauguaaacaaugaaa

SEQ ID NO: 3188116 - RNA, 19 nt, Artificial Sequence
  Description of Artificial Sequence: Synthetic oligonucleotide
aggaacaucauuguaauuc

SEQ ID NO: 3188117 - RNA, 19 nt, Artificial Sequence
  Description of Artificial Sequence: Synthetic oligonucleotide
aacuauuuugaacacuucu

SEQ ID NO: 3188118 - RNA, 19 nt, Artificial Sequence
  Description of Artificial Sequence: Synthetic oligonucleotide
aaaugaauuauaaaacuga

SEQ ID NO: 3188119 - RNA, 19 nt, Artificial Sequence
  Description of Artificial Sequence: Synthetic oligonucleotide
aaagguuucuuuuaauuau

SEQ ID NO: 3188120 - RNA, 19 nt, Artificial Sequence
  Description of Artificial Sequence: Synthetic oligonucleotide
uuuuaauuaucuauucacu

SEQ ID NO: 3188121 - RNA, 19 nt, Artificial Sequence
  Description of Artificial Sequence: Synthetic oligonucleotide
acuugguuccccuaaaggg

SEQ ID NO: 3188122 - RNA, 19 nt, Artificial Sequence
  Description of Artificial Sequence: Synthetic oligonucleotide
uuuaagucuaauguaagca

SEQ ID NO: 3188123 - RNA, 19 nt, Artificial Sequence
  Description of Artificial Sequence: Synthetic oligonucleotide
uacaaccuauucuaaaagg

SEQ ID NO: 3188124 - RNA, 19 nt, Artificial Sequence
  Description of Artificial Sequence: Synthetic oligonucleotide
caaaauuuauguaaaacca

SEQ ID NO: 3188125 - RNA, 19 nt, Artificial Sequence
  Description of Artificial Sequence: Synthetic oligonucleotide
uaauucacagccucaaaag

SEQ ID NO: 3188126 - RNA, 19 nt, Artificial Sequence
  Description of Artificial Sequence: Synthetic oligonucleotide
ugcaacuuuauauaauuca

SEQ ID NO: 3188127 - RNA, 19 nt, Artificial Sequence
  Description of Artificial Sequence: Synthetic oligonucleotide
ucauaaaggacaauuuaac

SEQ ID NO: 3188128 - RNA, 19 nt, Artificial Sequence
  Description of Artificial Sequence: Synthetic oligonucleotide
aaacaaugaaaaugcaacu

SEQ ID NO: 3188129 - RNA, 19 nt, Artificial Sequence
  Description of Artificial Sequence: Synthetic oligonucleotide
auguaagcaaaauuaugac

SEQ ID NO: 3188130 - RNA, 19 nt, Artificial Sequence
  Description of Artificial Sequence: Synthetic oligonucleotide
aaaauaauauaugucagua

SEQ ID NO: 3188131 - RNA, 19 nt, Artificial Sequence
  Description of Artificial Sequence: Synthetic oligonucleotide
uaucuauucacuuggauua

SEQ ID NO: 3188132 - RNA, 19 nt, Artificial Sequence
  Description of Artificial Sequence: Synthetic oligonucleotide
aaaagguuucuuuuaauua

SEQ ID NO: 3188133 - RNA, 19 nt, Artificial Sequence
  Description of Artificial Sequence: Synthetic oligonucleotide
aagcaaaauuaugacagac

SEQ ID NO: 3188134 - RNA, 19 nt, Artificial Sequence
  Description of Artificial Sequence: Synthetic oligonucleotide
ucuaaaagggguuugggaa

SEQ ID NO: 3188135 - RNA, 19 nt, Artificial Sequence
  Description of Artificial Sequence: Synthetic oligonucleotide
uguaagcaaaauuaugaca

SEQ ID NO: 3188136 - RNA, 19 nt, Artificial Sequence
  Description of Artificial Sequence: Synthetic oligonucleotide
acuacucugaguuuuaagu

SEQ ID NO: 3188137 - RNA, 19 nt, Artificial Sequence
  Description of Artificial Sequence: Synthetic oligonucleotide
aauguagcuucaugaaguc

SEQ ID NO: 3188138 - RNA, 19 nt, Artificial Sequence
  Description of Artificial Sequence: Synthetic oligonucleotide
auaaauuuugggccauccc

SEQ ID NO: 3188139 - RNA, 19 nt, Artificial Sequence
  Description of Artificial Sequence: Synthetic oligonucleotide
aaaagcaaaugacaccuga

SEQ ID NO: 3188140 - RNA, 19 nt, Artificial Sequence
  Description of Artificial Sequence: Synthetic oligonucleotide
uuacaaccuauucuaaaag

SEQ ID NO: 3188141 - RNA, 19 nt, Artificial Sequence
  Description of Artificial Sequence: Synthetic oligonucleotide
ugaagaaaucauaaaggac

SEQ ID NO: 3188142 - RNA, 19 nt, Artificial Sequence
  Description of Artificial Sequence: Synthetic oligonucleotide
acauuugaaaaucaucuca

SEQ ID NO: 3188143 - RNA, 19 nt, Artificial Sequence
  Description of Artificial Sequence: Synthetic oligonucleotide
aaucauaaaggacaauuua

SEQ ID NO: 3188144 - RNA, 19 nt, Artificial Sequence
  Description of Artificial Sequence: Synthetic oligonucleotide
auacauuugaaaaucaucu

SEQ ID NO: 3188145 - RNA, 19 nt, Artificial Sequence
  Description of Artificial Sequence: Synthetic oligonucleotide
aauaucauguaaacaauga

SEQ ID NO: 3188146 - RNA, 19 nt, Artificial Sequence
  Description of Artificial Sequence: Synthetic oligonucleotide
gaacacuucuuuuaaauga

SEQ ID NO: 3188147 - RNA, 19 nt, Artificial Sequence
  Description of Artificial Sequence: Synthetic oligonucleotide
gacaauuuaacuauuuuga

SEQ ID NO: 3188148 - RNA, 19 nt, Artificial Sequence
  Description of Artificial Sequence: Synthetic oligonucleotide
uauaugucaguacuaaaau

SEQ ID NO: 3188149 - RNA, 19 nt, Artificial Sequence
  Description of Artificial Sequence: Synthetic oligonucleotide
aauauuauauucacugaca

SEQ ID NO: 3188150 - RNA, 19 nt, Artificial Sequence
  Description of Artificial Sequence: Synthetic oligonucleotide
uaaaacugaaucugggucu

SEQ ID NO: 3188151 - RNA, 19 nt, Artificial Sequence
  Description of Artificial Sequence: Synthetic oligonucleotide
ccaaauauuauauucacug

SEQ ID NO: 3188152 - RNA, 19 nt, Artificial Sequence
  Description of Artificial Sequence: Synthetic oligonucleotide
agcuucaugaagucaaggg

SEQ ID NO: 3188153 - RNA, 19 nt, Artificial Sequence
  Description of Artificial Sequence: Synthetic oligonucleotide
caauuuaacuauuuugaac

SEQ ID NO: 3188154 - RNA, 19 nt, Artificial Sequence
  Description of Artificial Sequence: Synthetic oligonucleotide
agccaaauauuauauucac

SEQ ID NO: 3188155 - RNA, 19 nt, Artificial Sequence
  Description of Artificial Sequence: Synthetic oligonucleotide
uuuaugaaguccagcagga

SEQ ID NO: 3188156 - RNA, 19 nt, Artificial Sequence
  Description of Artificial Sequence: Synthetic oligonucleotide
aaaugacaccugaacaugc

SEQ ID NO: 3188157 - RNA, 19 nt, Artificial Sequence
  Description of Artificial Sequence: Synthetic oligonucleotide
uuuaauuaucuauucacuu

SEQ ID NO: 3188158 - RNA, 19 nt, Artificial Sequence
  Description of Artificial Sequence: Synthetic oligonucleotide
uauucacugacaauggaaa

SEQ ID NO: 3188159 - RNA, 19 nt, Artificial Sequence
  Description of Artificial Sequence: Synthetic oligonucleotide
aaaauguguaacaaaauuu

SEQ ID NO: 3188160 - RNA, 19 nt, Artificial Sequence
  Description of Artificial Sequence: Synthetic oligonucleotide
gcaaaauuaugacagacag

SEQ ID NO: 3188161 - RNA, 19 nt, Artificial Sequence
  Description of Artificial Sequence: Synthetic oligonucleotide
caaggggagaccaaaauac

SEQ ID NO: 3188162 - RNA, 19 nt, Artificial Sequence
  Description of Artificial Sequence: Synthetic oligonucleotide
auucuaacauccuauagaa

SEQ ID NO: 3188163 - RNA, 19 nt, Artificial Sequence
  Description of Artificial Sequence: Synthetic oligonucleotide
ucaauucagaaggagaaug

SEQ ID NO: 3188164 - RNA, 19 nt, Artificial Sequence
  Description of Artificial Sequence: Synthetic oligonucleotide
uuggauuaugagaaaauaa

SEQ ID NO: 3188165 - RNA, 19 nt, Artificial Sequence
  Description of Artificial Sequence: Synthetic oligonucleotide
uauaaaacugaaucugggu

SEQ ID NO: 3188166 - RNA, 19 nt, Artificial Sequence
  Description of Artificial Sequence: Synthetic oligonucleotide
cauccuauagaauaucaug

SEQ ID NO: 3188167 - RNA, 19 nt, Artificial Sequence
  Description of Artificial Sequence: Synthetic oligonucleotide
uuuuccuuauauacagaag

SEQ ID NO: 3188168 - RNA, 19 nt, Artificial Sequence
  Description of Artificial Sequence: Synthetic oligonucleotide
ucaucucaaagccaaauau

SEQ ID NO: 3188169 - RNA, 19 nt, Artificial Sequence
  Description of Artificial Sequence: Synthetic oligonucleotide
aauuuugggccaucccaac

SEQ ID NO: 3188170 - RNA, 19 nt, Artificial Sequence
  Description of Artificial Sequence: Synthetic oligonucleotide
ucauuguaauucaugguac

SEQ ID NO: 3188171 - RNA, 19 nt, Artificial Sequence
  Description of Artificial Sequence: Synthetic oligonucleotide
aauauauaucaucggcugc

SEQ ID NO: 3188172 - RNA, 19 nt, Artificial Sequence
  Description of Artificial Sequence: Synthetic oligonucleotide
aaauauauaucaucggcug

SEQ ID NO: 3188173 - RNA, 19 nt, Artificial Sequence
  Description of Artificial Sequence: Synthetic oligonucleotide
cuuuauuucauuuuccgug

SEQ ID NO: 3188174 - RNA, 19 nt, Artificial Sequence
  Description of Artificial Sequence: Synthetic oligonucleotide
uguacauuauucuguaucc

SEQ ID NO: 3188175 - RNA, 19 nt, Artificial Sequence
  Description of Artificial Sequence: Synthetic oligonucleotide
gacuuuauuucauuuuccg

SEQ ID NO: 3188176 - RNA, 19 nt, Artificial Sequence
  Description of Artificial Sequence: Synthetic oligonucleotide
uuauucuguauccacauuc

SEQ ID NO: 3188177 - RNA, 19 nt, Artificial Sequence
  Description of Artificial Sequence: Synthetic oligonucleotide
uuuucuuguacauuauucu

SEQ ID NO: 3188178 - RNA, 19 nt, Artificial Sequence
  Description of Artificial Sequence: Synthetic oligonucleotide
ucugcaucugauuggaucc

SEQ ID NO: 3188179 - RNA, 19 nt, Artificial Sequence
  Description of Artificial Sequence: Synthetic oligonucleotide
ucuguauccacauucucug

SEQ ID NO: 3188180 - RNA, 19 nt, Artificial Sequence
  Description of Artificial Sequence: Synthetic oligonucleotide
uuguacauuauucuguauc

SEQ ID NO: 3188181 - RNA, 19 nt, Artificial Sequence
  Description of Artificial Sequence: Synthetic oligonucleotide
uuucuuguacauuauucug

SEQ ID NO: 3188182 - RNA, 19 nt, Artificial Sequence
  Description of Artificial Sequence: Synthetic oligonucleotide
uuuauuucauuuuccgugu

SEQ ID NO: 3188183 - RNA, 19 nt, Artificial Sequence
  Description of Artificial Sequence: Synthetic oligonucleotide
aaugaagacacuccugaau

SEQ ID NO: 3188184 - RNA, 19 nt, Artificial Sequence
  Description of Artificial Sequence: Synthetic oligonucleotide
cuuuucuuguacauuauuc

SEQ ID NO: 3188185 - RNA, 19 nt, Artificial Sequence
  Description of Artificial Sequence: Synthetic oligonucleotide
gaauucccacucuucaucg

SEQ ID NO: 3188186 - RNA, 19 nt, Artificial Sequence
  Description of Artificial Sequence: Synthetic oligonucleotide
uuggacgucuuucugcgcg

SEQ ID NO: 3188187 - RNA, 19 nt, Artificial Sequence
  Description of Artificial Sequence: Synthetic oligonucleotide
uuccgugugacacucuccg

SEQ ID NO: 3188188 - RNA, 19 nt, Artificial Sequence
  Description of Artificial Sequence: Synthetic oligonucleotide
uucuuguacauuauucugu

SEQ ID NO: 3188189 - RNA, 19 nt, Artificial Sequence
  Description of Artificial Sequence: Synthetic oligonucleotide
uucauuuuccgugugacac

SEQ ID NO: 3188190 - RNA, 19 nt, Artificial Sequence
  Description of Artificial Sequence: Synthetic oligonucleotide
uucuguauccacauucucu

SEQ ID NO: 3188191 - RNA, 19 nt, Artificial Sequence
  Description of Artificial Sequence: Synthetic oligonucleotide
ucuccgcaaauauauauca

SEQ ID NO: 3188192 - RNA, 19 nt, Artificial Sequence
  Description of Artificial Sequence: Synthetic oligonucleotide
ucuucaucgggcaucaaaa

SEQ ID NO: 3188193 - RNA, 19 nt, Artificial Sequence
  Description of Artificial Sequence: Synthetic oligonucleotide
uggacuuuauuucauuuuc

SEQ ID NO: 3188194 - RNA, 19 nt, Artificial Sequence
  Description of Artificial Sequence: Synthetic oligonucleotide
auuucauuuuccgugugac

SEQ ID NO: 3188195 - RNA, 19 nt, Artificial Sequence
  Description of Artificial Sequence: Synthetic oligonucleotide
gcaaauauauaucaucggc

SEQ ID NO: 3188196 - RNA, 19 nt, Artificial Sequence
  Description of Artificial Sequence: Synthetic oligonucleotide
uacauuauucuguauccac

SEQ ID NO: 3188197 - RNA, 19 nt, Artificial Sequence
  Description of Artificial Sequence: Synthetic oligonucleotide
uguauccacauucucugca

SEQ ID NO: 3188198 - RNA, 19 nt, Artificial Sequence
  Description of Artificial Sequence: Synthetic oligonucleotide
cauucucugcaucugauug

SEQ ID NO: 3188199 - RNA, 19 nt, Artificial Sequence
  Description of Artificial Sequence: Synthetic oligonucleotide
uauucuguauccacauucu

SEQ ID NO: 3188200 - RNA, 19 nt, Artificial Sequence
  Description of Artificial Sequence: Synthetic oligonucleotide
auauaucaucggcugcugc

SEQ ID NO: 3188201 - RNA, 19 nt, Artificial Sequence
  Description of Artificial Sequence: Synthetic oligonucleotide
uauaucaucggcugcugcu

SEQ ID NO: 3188202 - RNA, 19 nt, Artificial Sequence
  Description of Artificial Sequence: Synthetic oligonucleotide
ucugauuggaucccuggac

SEQ ID NO: 3188203 - RNA, 19 nt, Artificial Sequence
  Description of Artificial Sequence: Synthetic oligonucleotide
ugaauucccacucuucauc

SEQ ID NO: 3188204 - RNA, 19 nt, Artificial Sequence
  Description of Artificial Sequence: Synthetic oligonucleotide
uccgcaaauauauaucauc

SEQ ID NO: 3188205 - RNA, 19 nt, Artificial Sequence
  Description of Artificial Sequence: Synthetic oligonucleotide
uauuucauuuuccguguga

SEQ ID NO: 3188206 - RNA, 19 nt, Artificial Sequence
  Description of Artificial Sequence: Synthetic oligonucleotide
auucucugcaucugauugg

SEQ ID NO: 3188207 - RNA, 19 nt, Artificial Sequence
  Description of Artificial Sequence: Synthetic oligonucleotide
aauucccacucuucaucgg

SEQ ID NO: 3188208 - RNA, 19 nt, Artificial Sequence
  Description of Artificial Sequence: Synthetic oligonucleotide
auucccacucuucaucggg

SEQ ID NO: 3188209 - RNA, 19 nt, Artificial Sequence
  Description of Artificial Sequence: Synthetic oligonucleotide
aagacacuccugaauuccc

SEQ ID NO: 3188210 - RNA, 19 nt, Artificial Sequence
  Description of Artificial Sequence: Synthetic oligonucleotide
acuuuauuucauuuuccgu

SEQ ID NO: 3188211 - RNA, 19 nt, Artificial Sequence
  Description of Artificial Sequence: Synthetic oligonucleotide
auauauaucaucggcugcu

SEQ ID NO: 3188212 - RNA, 19 nt, Artificial Sequence
  Description of Artificial Sequence: Synthetic oligonucleotide
gaagacacuccugaauucc

SEQ ID NO: 3188213 - RNA, 19 nt, Artificial Sequence
  Description of Artificial Sequence: Synthetic oligonucleotide
augaagacacuccugaauu

SEQ ID NO: 3188214 - RNA, 19 nt, Artificial Sequence
  Description of Artificial Sequence: Synthetic oligonucleotide
gaucccuggacuuuauuuc

SEQ ID NO: 3188215 - RNA, 19 nt, Artificial Sequence
  Description of Artificial Sequence: Synthetic oligonucleotide
ucuuucugcgcguccauug

SEQ ID NO: 3188216 - RNA, 19 nt, Artificial Sequence
  Description of Artificial Sequence: Synthetic oligonucleotide
ccgcaaauauauaucaucg

SEQ ID NO: 3188217 - RNA, 19 nt, Artificial Sequence
  Description of Artificial Sequence: Synthetic oligonucleotide
uuuguccuuuucuuguaca

SEQ ID NO: 3188218 - RNA, 19 nt, Artificial Sequence
  Description of Artificial Sequence: Synthetic oligonucleotide
auucuguauccacauucuc

SEQ ID NO: 3188219 - RNA, 19 nt, Artificial Sequence
  Description of Artificial Sequence: Synthetic oligonucleotide
ucuuguacauuauucugua

SEQ ID NO: 3188220 - RNA, 19 nt, Artificial Sequence
  Description of Artificial Sequence: Synthetic oligonucleotide
uuuuguccuuuucuuguac

SEQ ID NO: 3188221 - RNA, 19 nt, Artificial Sequence
  Description of Artificial Sequence: Synthetic oligonucleotide
caucugauuggaucccugg

SEQ ID NO: 3188222 - RNA, 19 nt, Artificial Sequence
  Description of Artificial Sequence: Synthetic oligonucleotide
uuauuucauuuuccgugug

SEQ ID NO: 3188223 - RNA, 19 nt, Artificial Sequence
  Description of Artificial Sequence: Synthetic oligonucleotide
uuuuccgugugacacucuc

SEQ ID NO: 3188224 - RNA, 19 nt, Artificial Sequence
  Description of Artificial Sequence: Synthetic oligonucleotide
caaauauauaucaucggcu

SEQ ID NO: 3188225 - RNA, 19 nt, Artificial Sequence
  Description of Artificial Sequence: Synthetic oligonucleotide
gguuggacgucuuucugcg

SEQ ID NO: 3188226 - RNA, 19 nt, Artificial Sequence
  Description of Artificial Sequence: Synthetic oligonucleotide
cucugcaucugauuggauc

SEQ ID NO: 3188227 - RNA, 19 nt, Artificial Sequence
  Description of Artificial Sequence: Synthetic oligonucleotide
uuucauuuuccgugugaca

SEQ ID NO: 3188228 - RNA, 19 nt, Artificial Sequence
  Description of Artificial Sequence: Synthetic oligonucleotide
acucuccgcaaauauauau

SEQ ID NO: 3188229 - RNA, 19 nt, Artificial Sequence
  Description of Artificial Sequence: Synthetic oligonucleotide
ugacacucuccgcaaauau

SEQ ID NO: 3188230 - RNA, 19 nt, Artificial Sequence
  Description of Artificial Sequence: Synthetic oligonucleotide
ugaagacacuccugaauuc

SEQ ID NO: 3188231 - RNA, 19 nt, Artificial Sequence
  Description of Artificial Sequence: Synthetic oligonucleotide
cucuccgcaaauauauauc

SEQ ID NO: 3188232 - RNA, 19 nt, Artificial Sequence
  Description of Artificial Sequence: Synthetic oligonucleotide
aucggcugcugcuuugggg

SEQ ID NO: 3188233 - RNA, 19 nt, Artificial Sequence
  Description of Artificial Sequence: Synthetic oligonucleotide
auccacauucucugcaucu

SEQ ID NO: 3188234 - RNA, 19 nt, Artificial Sequence
  Description of Artificial Sequence: Synthetic oligonucleotide
uuuccgugugacacucucc

SEQ ID NO: 3188235 - RNA, 19 nt, Artificial Sequence
  Description of Artificial Sequence: Synthetic oligonucleotide
uauauaucaucggcugcug

SEQ ID NO: 3188236 - RNA, 19 nt, Artificial Sequence
  Description of Artificial Sequence: Synthetic oligonucleotide
ucauuuuccgugugacacu

SEQ ID NO: 3188237 - RNA, 19 nt, Artificial Sequence
  Description of Artificial Sequence: Synthetic oligonucleotide
uucucugcaucugauugga

SEQ ID NO: 3188238 - RNA, 19 nt, Artificial Sequence
  Description of Artificial Sequence: Synthetic oligonucleotide
ugugacacucuccgcaaau

SEQ ID NO: 3188239 - RNA, 19 nt, Artificial Sequence
  Description of Artificial Sequence: Synthetic oligonucleotide
aucccuggacuuuauuuca

SEQ ID NO: 3188240 - RNA, 19 nt, Artificial Sequence
  Description of Artificial Sequence: Synthetic oligonucleotide
acauuauucuguauccaca

SEQ ID NO: 3188241 - RNA, 19 nt, Artificial Sequence
  Description of Artificial Sequence: Synthetic oligonucleotide
uucccacucuucaucgggc

SEQ ID NO: 3188242 - RNA, 19 nt, Artificial Sequence
  Description of Artificial Sequence: Synthetic oligonucleotide
cuuucugcgcguccauugc

SEQ ID NO: 3188243 - RNA, 19 nt, Artificial Sequence
  Description of Artificial Sequence: Synthetic oligonucleotide
aucugauuggaucccugga

SEQ ID NO: 3188244 - RNA, 19 nt, Artificial Sequence
  Description of Artificial Sequence: Synthetic oligonucleotide
ugcgcguccauugcuagug

SEQ ID NO: 3188245 - RNA, 19 nt, Artificial Sequence
  Description of Artificial Sequence: Synthetic oligonucleotide
guccuuuucuuguacauua

SEQ ID NO: 3188246 - RNA, 19 nt, Artificial Sequence
  Description of Artificial Sequence: Synthetic oligonucleotide
uuguccuuuucuuguacau

SEQ ID NO: 3188247 - RNA, 19 nt, Artificial Sequence
  Description of Artificial Sequence: Synthetic oligonucleotide
ucugcgcguccauugcuag

SEQ ID NO: 3188248 - RNA, 19 nt, Artificial Sequence
  Description of Artificial Sequence: Synthetic oligonucleotide
gacacuccugaauucccac

SEQ ID NO: 3188249 - RNA, 19 nt, Artificial Sequence
  Description of Artificial Sequence: Synthetic oligonucleotide
acacucuccgcaaauauau

SEQ ID NO: 3188250 - RNA, 19 nt, Artificial Sequence
  Description of Artificial Sequence: Synthetic oligonucleotide
uccugaauucccacucuuc

SEQ ID NO: 3188251 - RNA, 19 nt, Artificial Sequence
  Description of Artificial Sequence: Synthetic oligonucleotide
uauccacauucucugcauc

SEQ ID NO: 3188252 - RNA, 19 nt, Artificial Sequence
  Description of Artificial Sequence: Synthetic oligonucleotide
uuucugcgcguccauugcu

SEQ ID NO: 3188253 - RNA, 19 nt, Artificial Sequence
  Description of Artificial Sequence: Synthetic oligonucleotide
ucaucggcugcugcuuugg

SEQ ID NO: 3188254 - RNA, 19 nt, Artificial Sequence
  Description of Artificial Sequence: Synthetic oligonucleotide
uccacauucucugcaucug

SEQ ID NO: 3188255 - RNA, 19 nt, Artificial Sequence
  Description of Artificial Sequence: Synthetic oligonucleotide
cacuccugaauucccacuc

SEQ ID NO: 3188256 - RNA, 19 nt, Artificial Sequence
  Description of Artificial Sequence: Synthetic oligonucleotide
auuauucuguauccacauu

SEQ ID NO: 3188257 - RNA, 19 nt, Artificial Sequence
  Description of Artificial Sequence: Synthetic oligonucleotide
ugauuggaucccuggacuu

SEQ ID NO: 3188258 - RNA, 19 nt, Artificial Sequence
  Description of Artificial Sequence: Synthetic oligonucleotide
cuguauccacauucucugc

SEQ ID NO: 3188259 - RNA, 19 nt, Artificial Sequence
  Description of Artificial Sequence: Synthetic oligonucleotide
cauuuuccgugugacacuc

SEQ ID NO: 3188260 - RNA, 19 nt, Artificial Sequence
  Description of Artificial Sequence: Synthetic oligonucleotide
uccuuuucuuguacauuau

SEQ ID NO: 3188261 - RNA, 19 nt, Artificial Sequence
  Description of Artificial Sequence: Synthetic oligonucleotide
acuccugaauucccacucu

SEQ ID NO: 3188262 - RNA, 19 nt, Artificial Sequence
  Description of Artificial Sequence: Synthetic oligonucleotide
ggacuuuauuucauuuucc

SEQ ID NO: 3188263 - RNA, 19 nt, Artificial Sequence
  Description of Artificial Sequence: Synthetic oligonucleotide
acacuccugaauucccacu

SEQ ID NO: 3188264 - RNA, 19 nt, Artificial Sequence
  Description of Artificial Sequence: Synthetic oligonucleotide
ucccacucuucaucgggca

SEQ ID NO: 3188265 - RNA, 19 nt, Artificial Sequence
  Description of Artificial Sequence: Synthetic oligonucleotide
cgcaaauauauaucaucgg

SEQ ID NO: 3188266 - RNA, 19 nt, Artificial Sequence
  Description of Artificial Sequence: Synthetic oligonucleotide
cauuauucuguauccacau

SEQ ID NO: 3188267 - RNA, 19 nt, Artificial Sequence
  Description of Artificial Sequence: Synthetic oligonucleotide
ggguuggacgucuuucugc

SEQ ID NO: 3188268 - RNA, 19 nt, Artificial Sequence
  Description of Artificial Sequence: Synthetic oligonucleotide
gacgucuuucugcgcgucc

SEQ ID NO: 3188269 - RNA, 19 nt, Artificial Sequence
  Description of Artificial Sequence: Synthetic oligonucleotide
uucugcgcguccauugcua

SEQ ID NO: 3188270 - RNA, 19 nt, Artificial Sequence
  Description of Artificial Sequence: Synthetic oligonucleotide
acauucucugcaucugauu

SEQ ID NO: 3188271 - RNA, 19 nt, Artificial Sequence
  Description of Artificial Sequence: Synthetic oligonucleotide
agaauuagcagguuuaagc

SEQ ID NO: 3188272 - RNA, 19 nt, Artificial Sequence
  Description of Artificial Sequence: Synthetic oligonucleotide
aaaccuucaguacacgucc

SEQ ID NO: 3188273 - RNA, 19 nt, Artificial Sequence
  Description of Artificial Sequence: Synthetic oligonucleotide
aauaguuuucauuacacgu

SEQ ID NO: 3188274 - RNA, 19 nt, Artificial Sequence
  Description of Artificial Sequence: Synthetic oligonucleotide
aaagggaaaagucucaaag

SEQ ID NO: 3188275 - RNA, 19 nt, Artificial Sequence
  Description of Artificial Sequence: Synthetic oligonucleotide
aucaggaugguucaaaacc

SEQ ID NO: 3188276 - RNA, 19 nt, Artificial Sequence
  Description of Artificial Sequence: Synthetic oligonucleotide
uucaguaaagcauuaauag

SEQ ID NO: 3188277 - RNA, 19 nt, Artificial Sequence
  Description of Artificial Sequence: Synthetic oligonucleotide
uguacuuucguuuacagcu

SEQ ID NO: 3188278 - RNA, 19 nt, Artificial Sequence
  Description of Artificial Sequence: Synthetic oligonucleotide
aaagucucaaaguucuacc

SEQ ID NO: 3188279 - RNA, 19 nt, Artificial Sequence
  Description of Artificial Sequence: Synthetic oligonucleotide
uugauaauuaucaauguac

SEQ ID NO: 3188280 - RNA, 19 nt, Artificial Sequence
  Description of Artificial Sequence: Synthetic oligonucleotide
uucuugauaauuaucaaug

SEQ ID NO: 3188281 - RNA, 19 nt, Artificial Sequence
  Description of Artificial Sequence: Synthetic oligonucleotide
auuaauaguuguuugugac

SEQ ID NO: 3188282 - RNA, 19 nt, Artificial Sequence
  Description of Artificial Sequence: Synthetic oligonucleotide
uguaaguuguuucagaagu

SEQ ID NO: 3188283 - RNA, 19 nt, Artificial Sequence
  Description of Artificial Sequence: Synthetic oligonucleotide
uuguuugugacaaugaaac

SEQ ID NO: 3188284 - RNA, 19 nt, Artificial Sequence
  Description of Artificial Sequence: Synthetic oligonucleotide
aaauccaaauguuuccugg

SEQ ID NO: 3188285 - RNA, 19 nt, Artificial Sequence
  Description of Artificial Sequence: Synthetic oligonucleotide
uuugcaauaguuuucauua

SEQ ID NO: 3188286 - RNA, 19 nt, Artificial Sequence
  Description of Artificial Sequence: Synthetic oligonucleotide
cuguuuggaauuaaaaggg

SEQ ID NO: 3188287 - RNA, 19 nt, Artificial Sequence
  Description of Artificial Sequence: Synthetic oligonucleotide
uguuauaauaaacugguuu

SEQ ID NO: 3188288 - RNA, 19 nt, Artificial Sequence
  Description of Artificial Sequence: Synthetic oligonucleotide
gaaguguuauaauaaacug

SEQ ID NO: 3188289 - RNA, 19 nt, Artificial Sequence
  Description of Artificial Sequence: Synthetic oligonucleotide
aaaagucucaaaguucuac

SEQ ID NO: 3188290 - RNA, 19 nt, Artificial Sequence
  Description of Artificial Sequence: Synthetic oligonucleotide
aauuaaaagggaaaagucu

SEQ ID NO: 3188291 - RNA, 19 nt, Artificial Sequence
  Description of Artificial Sequence: Synthetic oligonucleotide
aaguguuauaauaaacugg

SEQ ID NO: 3188292 - RNA, 19 nt, Artificial Sequence
  Description of Artificial Sequence: Synthetic oligonucleotide
ucaaaguucuaccugaauc

SEQ ID NO: 3188293 - RNA, 19 nt, Artificial Sequence
  Description of Artificial Sequence: Synthetic oligonucleotide
aauguugacuucuuccuug

SEQ ID NO: 3188294 - RNA, 19 nt, Artificial Sequence
  Description of Artificial Sequence: Synthetic oligonucleotide
caaaguucuaccugaaucc

SEQ ID NO: 3188295 - RNA, 19 nt, Artificial Sequence
  Description of Artificial Sequence: Synthetic oligonucleotide
guuauaauaaacugguuuc

SEQ ID NO: 3188296 - RNA, 19 nt, Artificial Sequence
  Description of Artificial Sequence: Synthetic oligonucleotide
auuaaaagggaaaagucuc

SEQ ID NO: 3188297 - RNA, 19 nt, Artificial Sequence
  Description of Artificial Sequence: Synthetic oligonucleotide
gcuguuuggaauuaaaagg

SEQ ID NO: 3188298 - RNA, 19 nt, Artificial Sequence
  Description of Artificial Sequence: Synthetic oligonucleotide
ugauaauuaucaauguacu

SEQ ID NO: 3188299 - RNA, 19 nt, Artificial Sequence
  Description of Artificial Sequence: Synthetic oligonucleotide
aaugaaaccuucaguacac

SEQ ID NO: 3188300 - RNA, 19 nt, Artificial Sequence
  Description of Artificial Sequence: Synthetic oligonucleotide
aauguacuuucguuuacag

SEQ ID NO: 3188301 - RNA, 19 nt, Artificial Sequence
  Description of Artificial Sequence: Synthetic oligonucleotide
agcuguuuggaauuaaaag

SEQ ID NO: 3188302 - RNA, 19 nt, Artificial Sequence
  Description of Artificial Sequence: Synthetic oligonucleotide
uuggaaaagucauuguaag

SEQ ID NO: 3188303 - RNA, 19 nt, Artificial Sequence
  Description of Artificial Sequence: Synthetic oligonucleotide
uaaacuuugcaauaguuuu

SEQ ID NO: 3188304 - RNA, 19 nt, Artificial Sequence
  Description of Artificial Sequence: Synthetic oligonucleotide
guugauuucuccuaggaca

SEQ ID NO: 3188305 - RNA, 19 nt, Artificial Sequence
  Description of Artificial Sequence: Synthetic oligonucleotide
acaaugaaaccuucaguac

SEQ ID NO: 3188306 - RNA, 19 nt, Artificial Sequence
  Description of Artificial Sequence: Synthetic oligonucleotide
agucauuguaaguuguuuc

SEQ ID NO: 3188307 - RNA, 19 nt, Artificial Sequence
  Description of Artificial Sequence: Synthetic oligonucleotide
uaauaaacugguuucagua

SEQ ID NO: 3188308 - RNA, 19 nt, Artificial Sequence
  Description of Artificial Sequence: Synthetic oligonucleotide
uucagaaguguuauaauaa

SEQ ID NO: 3188309 - RNA, 19 nt, Artificial Sequence
  Description of Artificial Sequence: Synthetic oligonucleotide
uuuggaauuaaaagggaaa

SEQ ID NO: 3188310 - RNA, 19 nt, Artificial Sequence
  Description of Artificial Sequence: Synthetic oligonucleotide
uaauuaucaauguacuuuc

SEQ ID NO: 3188311 - RNA, 19 nt, Artificial Sequence
  Description of Artificial Sequence: Synthetic oligonucleotide
uucucuacauuuccuaugc

SEQ ID NO: 3188312 - RNA, 19 nt, Artificial Sequence
  Description of Artificial Sequence: Synthetic oligonucleotide
gaaaagucauuguaaguug

SEQ ID NO: 3188313 - RNA, 19 nt, Artificial Sequence
  Description of Artificial Sequence: Synthetic oligonucleotide
aaacugguuucaguaaagc

SEQ ID NO: 3188314 - RNA, 19 nt, Artificial Sequence
  Description of Artificial Sequence: Synthetic oligonucleotide
ugcaauguugacuucuucc

SEQ ID NO: 3188315 - RNA, 19 nt, Artificial Sequence
  Description of Artificial Sequence: Synthetic oligonucleotide
accugaauccuuugaaagc

SEQ ID NO: 3188316 - RNA, 19 nt, Artificial Sequence
  Description of Artificial Sequence: Synthetic oligonucleotide
gaauuagcagguuuaagca

SEQ ID NO: 3188317 - RNA, 19 nt, Artificial Sequence
  Description of Artificial Sequence: Synthetic oligonucleotide
ucuccuaggacauuucacc

SEQ ID NO: 3188318 - RNA, 19 nt, Artificial Sequence
  Description of Artificial Sequence: Synthetic oligonucleotide
uuucaguaaagcauuaaua

SEQ ID NO: 3188319 - RNA, 19 nt, Artificial Sequence
  Description of Artificial Sequence: Synthetic oligonucleotide
aaauguuuccuggacaucu

SEQ ID NO: 3188320 - RNA, 19 nt, Artificial Sequence
  Description of Artificial Sequence: Synthetic oligonucleotide
acaacugguugauuucucc

SEQ ID NO: 3188321 - RNA, 19 nt, Artificial Sequence
  Description of Artificial Sequence: Synthetic oligonucleotide
gacaaugaaaccuucagua

SEQ ID NO: 3188322 - RNA, 19 nt, Artificial Sequence
  Description of Artificial Sequence: Synthetic oligonucleotide
aagggaaaagucucaaagu

SEQ ID NO: 3188323 - RNA, 19 nt, Artificial Sequence
  Description of Artificial Sequence: Synthetic oligonucleotide
uuucauuacacguucuacu

SEQ ID NO: 3188324 - RNA, 19 nt, Artificial Sequence
  Description of Artificial Sequence: Synthetic oligonucleotide
aauaaacugguuucaguaa

SEQ ID NO: 3188325 - RNA, 19 nt, Artificial Sequence
  Description of Artificial Sequence: Synthetic oligonucleotide
aguguuauaauaaacuggu

SEQ ID NO: 3188326 - RNA, 19 nt, Artificial Sequence
  Description of Artificial Sequence: Synthetic oligonucleotide
uuaaacuuugcaauaguuu

SEQ ID NO: 3188327 - RNA, 19 nt, Artificial Sequence
  Description of Artificial Sequence: Synthetic oligonucleotide
uuaaaagggaaaagucuca

SEQ ID NO: 3188328 - RNA, 19 nt, Artificial Sequence
  Description of Artificial Sequence: Synthetic oligonucleotide
ugguucaaaaccacaacug

SEQ ID NO: 3188329 - RNA, 19 nt, Artificial Sequence
  Description of Artificial Sequence: Synthetic oligonucleotide
aagcauuaauaguuguuug

SEQ ID NO: 3188330 - RNA, 19 nt, Artificial Sequence
  Description of Artificial Sequence: Synthetic oligonucleotide
uaccugaauccuuugaaag

SEQ ID NO: 3188331 - RNA, 19 nt, Artificial Sequence
  Description of Artificial Sequence: Synthetic oligonucleotide
aauccuuugaaagccuggg

SEQ ID NO: 3188332 - RNA, 19 nt, Artificial Sequence
  Description of Artificial Sequence: Synthetic oligonucleotide
uuccuggacaucuucagag

SEQ ID NO: 3188333 - RNA, 19 nt, Artificial Sequence
  Description of Artificial Sequence: Synthetic oligonucleotide
ugcuaaauccaaauguuuc

SEQ ID NO: 3188334 - RNA, 19 nt, Artificial Sequence
  Description of Artificial Sequence: Synthetic oligonucleotide
ucaguaaagcauuaauagu

SEQ ID NO: 3188335 - RNA, 19 nt, Artificial Sequence
  Description of Artificial Sequence: Synthetic oligonucleotide
auaauuaucaauguacuuu

SEQ ID NO: 3188336 - RNA, 19 nt, Artificial Sequence
  Description of Artificial Sequence: Synthetic oligonucleotide
gaauuaaaagggaaaaguc

SEQ ID NO: 3188337 - RNA, 19 nt, Artificial Sequence
  Description of Artificial Sequence: Synthetic oligonucleotide
ucaggaugguucaaaacca

SEQ ID NO: 3188338 - RNA, 19 nt, Artificial Sequence
  Description of Artificial Sequence: Synthetic oligonucleotide
uauaauaaacugguuucag

SEQ ID NO: 3188339 - RNA, 19 nt, Artificial Sequence
  Description of Artificial Sequence: Synthetic oligonucleotide
uuaauaguuguuugugaca

SEQ ID NO: 3188340 - RNA, 19 nt, Artificial Sequence
  Description of Artificial Sequence: Synthetic oligonucleotide
ucuacauuuccuaugcaau

SEQ ID NO: 3188341 - RNA, 19 nt, Artificial Sequence
  Description of Artificial Sequence: Synthetic oligonucleotide
ugcaauaguuuucauuaca

SEQ ID NO: 3188342 - RNA, 19 nt, Artificial Sequence
  Description of Artificial Sequence: Synthetic oligonucleotide
caauaguuuucauuacacg

SEQ ID NO: 3188343 - RNA, 19 nt, Artificial Sequence
  Description of Artificial Sequence: Synthetic oligonucleotide
agaaguguuauaauaaacu

SEQ ID NO: 3188344 - RNA, 19 nt, Artificial Sequence
  Description of Artificial Sequence: Synthetic oligonucleotide
guugacuucuuccuugggg

SEQ ID NO: 3188345 - RNA, 19 nt, Artificial Sequence
  Description of Artificial Sequence: Synthetic oligonucleotide
auguacuuucguuuacagc

SEQ ID NO: 3188346 - RNA, 19 nt, Artificial Sequence
  Description of Artificial Sequence: Synthetic oligonucleotide
aaagcauuaauaguuguuu

SEQ ID NO: 3188347 - RNA, 19 nt, Artificial Sequence
  Description of Artificial Sequence: Synthetic oligonucleotide
uuucagaaguguuauaaua

SEQ ID NO: 3188348 - RNA, 19 nt, Artificial Sequence
  Description of Artificial Sequence: Synthetic oligonucleotide
uaaacugguuucaguaaag

SEQ ID NO: 3188349 - RNA, 19 nt, Artificial Sequence
  Description of Artificial Sequence: Synthetic oligonucleotide
aacugguuucaguaaagca

SEQ ID NO: 3188350 - RNA, 19 nt, Artificial Sequence
  Description of Artificial Sequence: Synthetic oligonucleotide
ucaaaaccacaacugguug

SEQ ID NO: 3188351 - RNA, 19 nt, Artificial Sequence
  Description of Artificial Sequence: Synthetic oligonucleotide
cauuucaccagcuguuugg

SEQ ID NO: 3188352 - RNA, 19 nt, Artificial Sequence
  Description of Artificial Sequence: Synthetic oligonucleotide
aagucucaaaguucuaccu

SEQ ID NO: 3188353 - RNA, 19 nt, Artificial Sequence
  Description of Artificial Sequence: Synthetic oligonucleotide
uguuucagaaguguuauaa

SEQ ID NO: 3188354 - RNA, 19 nt, Artificial Sequence
  Description of Artificial Sequence: Synthetic oligonucleotide
ucuuggaaaagucauugua

SEQ ID NO: 3188355 - RNA, 19 nt, Artificial Sequence
  Description of Artificial Sequence: Synthetic oligonucleotide
uggagcaucugcaucagga

SEQ ID NO: 3188356 - RNA, 19 nt, Artificial Sequence
  Description of Artificial Sequence: Synthetic oligonucleotide
aauuagcagguuuaagcau

SEQ ID NO: 3188357 - RNA, 19 nt, Artificial Sequence
  Description of Artificial Sequence: Synthetic oligonucleotide
aaacuuugcaauaguuuuc

SEQ ID NO: 3188358 - RNA, 19 nt, Artificial Sequence
  Description of Artificial Sequence: Synthetic oligonucleotide
auuaucaauguacuuucgu

SEQ ID NO: 3188359 - RNA, 19 nt, Artificial Sequence
  Description of Artificial Sequence: Synthetic oligonucleotide
augguucaaaaccacaacu

SEQ ID NO: 3188360 - RNA, 19 nt, Artificial Sequence
  Description of Artificial Sequence: Synthetic oligonucleotide
uuacacguucuacuucugg

SEQ ID NO: 3188361 - RNA, 19 nt, Artificial Sequence
  Description of Artificial Sequence: Synthetic oligonucleotide
ucuugauaauuaucaaugu

SEQ ID NO: 3188362 - RNA, 19 nt, Artificial Sequence
  Description of Artificial Sequence: Synthetic oligonucleotide
uuauaauaaacugguuuca

SEQ ID NO: 3188363 - RNA, 19 nt, Artificial Sequence
  Description of Artificial Sequence: Synthetic oligonucleotide
auaauaaacugguuucagu

SEQ ID NO: 3188364 - RNA, 19 nt, Artificial Sequence
  Description of Artificial Sequence: Synthetic oligonucleotide
auuguaaguuguuucagaa

SEQ ID NO: 3188365 - RNA, 19 nt, Artificial Sequence
  Description of Artificial Sequence: Synthetic oligonucleotide
aauccaaauguuuccugga

SEQ ID NO: 3188366 - RNA, 19 nt, Artificial Sequence
  Description of Artificial Sequence: Synthetic oligonucleotide
uaauaguuguuugugacaa

SEQ ID NO: 3188367 - RNA, 19 nt, Artificial Sequence
  Description of Artificial Sequence: Synthetic oligonucleotide
uguuuggaauuaaaaggga

SEQ ID NO: 3188368 - RNA, 19 nt, Artificial Sequence
  Description of Artificial Sequence: Synthetic oligonucleotide
uucaaaaccacaacugguu

SEQ ID NO: 3188369 - RNA, 19 nt, Artificial Sequence
  Description of Artificial Sequence: Synthetic oligonucleotide
ucucuuggaaaagucauug

SEQ ID NO: 3188370 - RNA, 19 nt, Artificial Sequence
  Description of Artificial Sequence: Synthetic oligonucleotide
ucugcuaaauccaaauguu

SEQ ID NO: 3188371 - RNA, 19 nt, Artificial Sequence
  Description of Artificial Sequence: Synthetic oligonucleotide
gaugccaccaucuucaggc

SEQ ID NO: 3188372 - RNA, 19 nt, Artificial Sequence
  Description of Artificial Sequence: Synthetic oligonucleotide
ucuguauucccauggaugg

SEQ ID NO: 3188373 - RNA, 19 nt, Artificial Sequence
  Description of Artificial Sequence: Synthetic oligonucleotide
agaagaaugggucaugcuc

SEQ ID NO: 3188374 - RNA, 19 nt, Artificial Sequence
  Description of Artificial Sequence: Synthetic oligonucleotide
gauauaagccagcagcagg

SEQ ID NO: 3188375 - RNA, 19 nt, Artificial Sequence
  Description of Artificial Sequence: Synthetic oligonucleotide
cauugcaccaaucaacacg

SEQ ID NO: 3188376 - RNA, 19 nt, Artificial Sequence
  Description of Artificial Sequence: Synthetic oligonucleotide
auguauaccccuuccuucc

SEQ ID NO: 3188377 - RNA, 19 nt, Artificial Sequence
  Description of Artificial Sequence: Synthetic oligonucleotide
ugacuuguccaccagagac

SEQ ID NO: 3188378 - RNA, 19 nt, Artificial Sequence
  Description of Artificial Sequence: Synthetic oligonucleotide
agugauguugagcaacugg

SEQ ID NO: 3188379 - RNA, 19 nt, Artificial Sequence
  Description of Artificial Sequence: Synthetic oligonucleotide
gacagcacaugauauaagc

SEQ ID NO: 3188380 - RNA, 19 nt, Artificial Sequence
  Description of Artificial Sequence: Synthetic oligonucleotide
uggaguaggcaucucaucc

SEQ ID NO: 3188381 - RNA, 19 nt, Artificial Sequence
  Description of Artificial Sequence: Synthetic oligonucleotide
ugaaccaucuggaugucag

SEQ ID NO: 3188382 - RNA, 19 nt, Artificial Sequence
  Description of Artificial Sequence: Synthetic oligonucleotide
auugcaccaaucaacacgg

SEQ ID NO: 3188383 - RNA, 19 nt, Artificial Sequence
  Description of Artificial Sequence: Synthetic oligonucleotide
aaugggaagagggacacga

SEQ ID NO: 3188384 - RNA, 19 nt, Artificial Sequence
  Description of Artificial Sequence: Synthetic oligonucleotide
gaagaaugggucaugcucc

SEQ ID NO: 3188385 - RNA, 19 nt, Artificial Sequence
  Description of Artificial Sequence: Synthetic oligonucleotide
guaggcaucucauccacgg

SEQ ID NO: 3188386 - RNA, 19 nt, Artificial Sequence
  Description of Artificial Sequence: Synthetic oligonucleotide
caaucaacacggaaugggg

SEQ ID NO: 3188387 - RNA, 19 nt, Artificial Sequence
  Description of Artificial Sequence: Synthetic oligonucleotide
ucuacaucauggcugcgca

SEQ ID NO: 3188388 - RNA, 19 nt, Artificial Sequence
  Description of Artificial Sequence: Synthetic oligonucleotide
gauguauaccccuuccuuc

SEQ ID NO: 3188389 - RNA, 19 nt, Artificial Sequence
  Description of Artificial Sequence: Synthetic oligonucleotide
acaguaauggaggcugucc

SEQ ID NO: 3188390 - RNA, 19 nt, Artificial Sequence
  Description of Artificial Sequence: Synthetic oligonucleotide
gaugaggggcaccugugcg

SEQ ID NO: 3188391 - RNA, 19 nt, Artificial Sequence
  Description of Artificial Sequence: Synthetic oligonucleotide
ucuggugaugccaccaucu

SEQ ID NO: 3188392 - RNA, 19 nt, Artificial Sequence
  Description of Artificial Sequence: Synthetic oligonucleotide
uucaggcagguagagaagg

SEQ ID NO: 3188393 - RNA, 19 nt, Artificial Sequence
  Description of Artificial Sequence: Synthetic oligonucleotide
auagcugucuggugaugcc

SEQ ID NO: 3188394 - RNA, 19 nt, Artificial Sequence
  Description of Artificial Sequence: Synthetic oligonucleotide
ugaccaaggcaucugccag

SEQ ID NO: 3188395 - RNA, 19 nt, Artificial Sequence
  Description of Artificial Sequence: Synthetic oligonucleotide
ugagcaguaaagccaccag

SEQ ID NO: 3188396 - RNA, 19 nt, Artificial Sequence
  Description of Artificial Sequence: Synthetic oligonucleotide
aagagggugaccaaggcau

SEQ ID NO: 3188397 - RNA, 19 nt, Artificial Sequence
  Description of Artificial Sequence: Synthetic oligonucleotide
aaccaucuggaugucagag

SEQ ID NO: 3188398 - RNA, 19 nt, Artificial Sequence
  Description of Artificial Sequence: Synthetic oligonucleotide
cuugauguauaccccuucc

SEQ ID NO: 3188399 - RNA, 19 nt, Artificial Sequence
  Description of Artificial Sequence: Synthetic oligonucleotide
aucaacacggaauggggug

SEQ ID NO: 3188400 - RNA, 19 nt, Artificial Sequence
  Description of Artificial Sequence: Synthetic oligonucleotide
ugggugggcagaagaaugg

SEQ ID NO: 3188401 - RNA, 19 nt, Artificial Sequence
  Description of Artificial Sequence: Synthetic oligonucleotide
ugggaagagggacacgacc

SEQ ID NO: 3188402 - RNA, 19 nt, Artificial Sequence
  Description of Artificial Sequence: Synthetic oligonucleotide
aggaauucggcuugguaug

SEQ ID NO: 3188403 - RNA, 19 nt, Artificial Sequence
  Description of Artificial Sequence: Synthetic oligonucleotide
auggugaaccaucuggaug

SEQ ID NO: 3188404 - RNA, 19 nt, Artificial Sequence
  Description of Artificial Sequence: Synthetic oligonucleotide
gcagaagugauguugagca

SEQ ID NO: 3188405 - RNA, 19 nt, Artificial Sequence
  Description of Artificial Sequence: Synthetic oligonucleotide
uccucuacaucauggcugc

SEQ ID NO: 3188406 - RNA, 19 nt, Artificial Sequence
  Description of Artificial Sequence: Synthetic oligonucleotide
uguauaccccuuccuuccg

SEQ ID NO: 3188407 - RNA, 19 nt, Artificial Sequence
  Description of Artificial Sequence: Synthetic oligonucleotide
aauggugaaccaucuggau

SEQ ID NO: 3188408 - RNA, 19 nt, Artificial Sequence
  Description of Artificial Sequence: Synthetic oligonucleotide
ucugccgaagcucuucugu

SEQ ID NO: 3188409 - RNA, 19 nt, Artificial Sequence
  Description of Artificial Sequence: Synthetic oligonucleotide
ugauguauaccccuuccuu

SEQ ID NO: 3188410 - RNA, 19 nt, Artificial Sequence
  Description of Artificial Sequence: Synthetic oligonucleotide
acauugaacaugggcaagg

SEQ ID NO: 3188411 - RNA, 19 nt, Artificial Sequence
  Description of Artificial Sequence: Synthetic oligonucleotide
ugggucaugcuccaggauc

SEQ ID NO: 3188412 - RNA, 19 nt, Artificial Sequence
  Description of Artificial Sequence: Synthetic oligonucleotide
acaugggcaagguggaaag

SEQ ID NO: 3188413 - RNA, 19 nt, Artificial Sequence
  Description of Artificial Sequence: Synthetic oligonucleotide
gagcaguaaagccaccagc

SEQ ID NO: 3188414 - RNA, 19 nt, Artificial Sequence
  Description of Artificial Sequence: Synthetic oligonucleotide
ucuucuguauucccaugga

SEQ ID NO: 3188415 - RNA, 19 nt, Artificial Sequence
  Description of Artificial Sequence: Synthetic oligonucleotide
ugauauaagccagcagcag

SEQ ID NO: 3188416 - RNA, 19 nt, Artificial Sequence
  Description of Artificial Sequence: Synthetic oligonucleotide
cauggaugguacaauggug

SEQ ID NO: 3188417 - RNA, 19 nt, Artificial Sequence
  Description of Artificial Sequence: Synthetic oligonucleotide
uugauguauaccccuuccu

SEQ ID NO: 3188418 - RNA, 19 nt, Artificial Sequence
  Description of Artificial Sequence: Synthetic oligonucleotide
uaaagccaccagcaggggc

SEQ ID NO: 3188419 - RNA, 19 nt, Artificial Sequence
  Description of Artificial Sequence: Synthetic oligonucleotide
cagggugagcaguaaagcc

SEQ ID NO: 3188420 - RNA, 19 nt, Artificial Sequence
  Description of Artificial Sequence: Synthetic oligonucleotide
gaagucucggccuguggcc

SEQ ID NO: 3188421 - RNA, 19 nt, Artificial Sequence
  Description of Artificial Sequence: Synthetic oligonucleotide
acaugauauaagccagcag

SEQ ID NO: 3188422 - RNA, 19 nt, Artificial Sequence
  Description of Artificial Sequence: Synthetic oligonucleotide
caccaaucaacacggaaug

SEQ ID NO: 3188423 - RNA, 19 nt, Artificial Sequence
  Description of Artificial Sequence: Synthetic oligonucleotide
accaucuggaugucagagg

SEQ ID NO: 3188424 - RNA, 19 nt, Artificial Sequence
  Description of Artificial Sequence: Synthetic oligonucleotide
uuguccaccagagacacau

SEQ ID NO: 3188425 - RNA, 19 nt, Artificial Sequence
  Description of Artificial Sequence: Synthetic oligonucleotide
caguaauggaggcuguccc

SEQ ID NO: 3188426 - RNA, 19 nt, Artificial Sequence
  Description of Artificial Sequence: Synthetic oligonucleotide
ugccaagcugucauagcag

SEQ ID NO: 3188427 - RNA, 19 nt, Artificial Sequence
  Description of Artificial Sequence: Synthetic oligonucleotide
acauugcaccaaucaacac

SEQ ID NO: 3188428 - RNA, 19 nt, Artificial Sequence
  Description of Artificial Sequence: Synthetic oligonucleotide
caaccggggaccuucgggg

SEQ ID NO: 3188429 - RNA, 19 nt, Artificial Sequence
  Description of Artificial Sequence: Synthetic oligonucleotide
cacucuaggaggcaaccgc

SEQ ID NO: 3188430 - RNA, 19 nt, Artificial Sequence
  Description of Artificial Sequence: Synthetic oligonucleotide
uuccuuccggcccucaaug

SEQ ID NO: 3188431 - RNA, 19 nt, Artificial Sequence
  Description of Artificial Sequence: Synthetic oligonucleotide
ugguauggcaaccggggac

SEQ ID NO: 3188432 - RNA, 19 nt, Artificial Sequence
  Description of Artificial Sequence: Synthetic oligonucleotide
aucauggcugcgcaccagg

SEQ ID NO: 3188433 - RNA, 19 nt, Artificial Sequence
  Description of Artificial Sequence: Synthetic oligonucleotide
aagaaugggucaugcucca

SEQ ID NO: 3188434 - RNA, 19 nt, Artificial Sequence
  Description of Artificial Sequence: Synthetic oligonucleotide
ugcaccaaucaacacggaa

SEQ ID NO: 3188435 - RNA, 19 nt, Artificial Sequence
  Description of Artificial Sequence: Synthetic oligonucleotide
aaucaacacggaauggggu

SEQ ID NO: 3188436 - RNA, 19 nt, Artificial Sequence
  Description of Artificial Sequence: Synthetic oligonucleotide
auugaacaugggcaaggug

SEQ ID NO: 3188437 - RNA, 19 nt, Artificial Sequence
  Description of Artificial Sequence: Synthetic oligonucleotide
caagguggaaagaggccgg

SEQ ID NO: 3188438 - RNA, 19 nt, Artificial Sequence
  Description of Artificial Sequence: Synthetic oligonucleotide
gacacauugcaccaaucaa

SEQ ID NO: 3188439 - RNA, 19 nt, Artificial Sequence
  Description of Artificial Sequence: Synthetic oligonucleotide
ucccauggaugguacaaug

SEQ ID NO: 3188440 - RNA, 19 nt, Artificial Sequence
  Description of Artificial Sequence: Synthetic oligonucleotide
agcaguaaagccaccagca

SEQ ID NO: 3188441 - RNA, 19 nt, Artificial Sequence
  Description of Artificial Sequence: Synthetic oligonucleotide
aacgggcauagcugucugg

SEQ ID NO: 3188442 - RNA, 19 nt, Artificial Sequence
  Description of Artificial Sequence: Synthetic oligonucleotide
ugagcaacuggaguucccc

SEQ ID NO: 3188443 - RNA, 19 nt, Artificial Sequence
  Description of Artificial Sequence: Synthetic oligonucleotide
aguaauggaggcugucccu

SEQ ID NO: 3188444 - RNA, 19 nt, Artificial Sequence
  Description of Artificial Sequence: Synthetic oligonucleotide
gagcucucagugcuggucc

SEQ ID NO: 3188445 - RNA, 19 nt, Artificial Sequence
  Description of Artificial Sequence: Synthetic oligonucleotide
aaggcagaagugauguuga

SEQ ID NO: 3188446 - RNA, 19 nt, Artificial Sequence
  Description of Artificial Sequence: Synthetic oligonucleotide
caccuccucuacaucaugg

SEQ ID NO: 3188447 - RNA, 19 nt, Artificial Sequence
  Description of Artificial Sequence: Synthetic oligonucleotide
cugcgcaccaggaauucgg

SEQ ID NO: 3188448 - RNA, 19 nt, Artificial Sequence
  Description of Artificial Sequence: Synthetic oligonucleotide
uguggagggcagcaccucc

SEQ ID NO: 3188449 - RNA, 19 nt, Artificial Sequence
  Description of Artificial Sequence: Synthetic oligonucleotide
uauaccccuuccuuccggc

SEQ ID NO: 3188450 - RNA, 19 nt, Artificial Sequence
  Description of Artificial Sequence: Synthetic oligonucleotide
uaggcaucucauccacggg

SEQ ID NO: 3188451 - RNA, 19 nt, Artificial Sequence
  Description of Artificial Sequence: Synthetic oligonucleotide
cauagcugucuggugaugc

SEQ ID NO: 3188452 - RNA, 19 nt, Artificial Sequence
  Description of Artificial Sequence: Synthetic oligonucleotide
uucgggguccucaaucaac

SEQ ID NO: 3188453 - RNA, 19 nt, Artificial Sequence
  Description of Artificial Sequence: Synthetic oligonucleotide
ucaacacggaauggggugc

SEQ ID NO: 3188454 - RNA, 19 nt, Artificial Sequence
  Description of Artificial Sequence: Synthetic oligonucleotide
auagcaggacaguaaugga

SEQ ID NO: 3188455 - RNA, 19 nt, Artificial Sequence
  Description of Artificial Sequence: Synthetic oligonucleotide
gauguugagcaacuggagu

SEQ ID NO: 3188456 - RNA, 19 nt, Artificial Sequence
  Description of Artificial Sequence: Synthetic oligonucleotide
agcaacuggaguuccccug

SEQ ID NO: 3188457 - RNA, 19 nt, Artificial Sequence
  Description of Artificial Sequence: Synthetic oligonucleotide
acggaauggggugccaagc

SEQ ID NO: 3188458 - RNA, 19 nt, Artificial Sequence
  Description of Artificial Sequence: Synthetic oligonucleotide
uccaggaucccaucaccug

SEQ ID NO: 3188459 - RNA, 19 nt, Artificial Sequence
  Description of Artificial Sequence: Synthetic oligonucleotide
gaguaggcaucucauccac

SEQ ID NO: 3188460 - RNA, 19 nt, Artificial Sequence
  Description of Artificial Sequence: Synthetic oligonucleotide
gugcgcacauugaacaugg

SEQ ID NO: 3188461 - RNA, 19 nt, Artificial Sequence
  Description of Artificial Sequence: Synthetic oligonucleotide
gagggacacgaccuccacg

SEQ ID NO: 3188462 - RNA, 19 nt, Artificial Sequence
  Description of Artificial Sequence: Synthetic oligonucleotide
uguauucccauggauggua

SEQ ID NO: 3188463 - RNA, 19 nt, Artificial Sequence
  Description of Artificial Sequence: Synthetic oligonucleotide
caagcugucauagcaggac

SEQ ID NO: 3188464 - RNA, 19 nt, Artificial Sequence
  Description of Artificial Sequence: Synthetic oligonucleotide
ugugcgcuguccacucuag

SEQ ID NO: 3188465 - RNA, 19 nt, Artificial Sequence
  Description of Artificial Sequence: Synthetic oligonucleotide
ucaugcuccaggaucccau

SEQ ID NO: 3188466 - RNA, 19 nt, Artificial Sequence
  Description of Artificial Sequence: Synthetic oligonucleotide
ccaaucaacacggaauggg

SEQ ID NO: 3188467 - RNA, 19 nt, Artificial Sequence
  Description of Artificial Sequence: Synthetic oligonucleotide
agagcucucagugcugguc

SEQ ID NO: 3188468 - RNA, 19 nt, Artificial Sequence
  Description of Artificial Sequence: Synthetic oligonucleotide
guauaccccuuccuuccgg

SEQ ID NO: 3188469 - RNA, 19 nt, Artificial Sequence
  Description of Artificial Sequence: Synthetic oligonucleotide
aagguggaaagaggccggg

SEQ ID NO: 3188470 - RNA, 19 nt, Artificial Sequence
  Description of Artificial Sequence: Synthetic oligonucleotide
cugccaggaagucucggcc

SEQ ID NO: 3188471 - RNA, 19 nt, Artificial Sequence
  Description of Artificial Sequence: Synthetic oligonucleotide
ugcauuguggcuuaaaucg

SEQ ID NO: 3188472 - RNA, 19 nt, Artificial Sequence
  Description of Artificial Sequence: Synthetic oligonucleotide
acaucggcagcacagaugc

SEQ ID NO: 3188473 - RNA, 19 nt, Artificial Sequence
  Description of Artificial Sequence: Synthetic oligonucleotide
uucucuacagccuugcggg

SEQ ID NO: 3188474 - RNA, 19 nt, Artificial Sequence
  Description of Artificial Sequence: Synthetic oligonucleotide
uugagaggcacaaugccgg

SEQ ID NO: 3188475 - RNA, 19 nt, Artificial Sequence
  Description of Artificial Sequence: Synthetic oligonucleotide
cuuaaaucgaguucugcag

SEQ ID NO: 3188476 - RNA, 19 nt, Artificial Sequence
  Description of Artificial Sequence: Synthetic oligonucleotide
uuaaaucgaguucugcagc

SEQ ID NO: 3188477 - RNA, 19 nt, Artificial Sequence
  Description of Artificial Sequence: Synthetic oligonucleotide
cacagaugcaguuauuggg

SEQ ID NO: 3188478 - RNA, 19 nt, Artificial Sequence
  Description of Artificial Sequence: Synthetic oligonucleotide
ugacccagcacucagcaug

SEQ ID NO: 3188479 - RNA, 19 nt, Artificial Sequence
  Description of Artificial Sequence: Synthetic oligonucleotide
uaacacaucggcagcacag

SEQ ID NO: 3188480 - RNA, 19 nt, Artificial Sequence
  Description of Artificial Sequence: Synthetic oligonucleotide
cuugagaggcacaaugccg

SEQ ID NO: 3188481 - RNA, 19 nt, Artificial Sequence
  Description of Artificial Sequence: Synthetic oligonucleotide
acagcaguaugccuggcac

SEQ ID NO: 3188482 - RNA, 19 nt, Artificial Sequence
  Description of Artificial Sequence: Synthetic oligonucleotide
agcgcagcuuaacacaucg

SEQ ID NO: 3188483 - RNA, 19 nt, Artificial Sequence
  Description of Artificial Sequence: Synthetic oligonucleotide
gaucugaggugccugaccc

SEQ ID NO: 3188484 - RNA, 19 nt, Artificial Sequence
  Description of Artificial Sequence: Synthetic oligonucleotide
uaaaucgaguucugcagcc

SEQ ID NO: 3188485 - RNA, 19 nt, Artificial Sequence
  Description of Artificial Sequence: Synthetic oligonucleotide
acagcuccgggacucaccc

SEQ ID NO: 3188486 - RNA, 19 nt, Artificial Sequence
  Description of Artificial Sequence: Synthetic oligonucleotide
uaagccauggccagcgcag

SEQ ID NO: 3188487 - RNA, 19 nt, Artificial Sequence
  Description of Artificial Sequence: Synthetic oligonucleotide
cacaaugccggcuccaccg

SEQ ID NO: 3188488 - RNA, 19 nt, Artificial Sequence
  Description of Artificial Sequence: Synthetic oligonucleotide
cuucucuacagccuugcgg

SEQ ID NO: 3188489 - RNA, 19 nt, Artificial Sequence
  Description of Artificial Sequence: Synthetic oligonucleotide
agcuuaacacaucggcagc

SEQ ID NO: 3188490 - RNA, 19 nt, Artificial Sequence
  Description of Artificial Sequence: Synthetic oligonucleotide
cagcuuaacacaucggcag

SEQ ID NO: 3188491 - RNA, 19 nt, Artificial Sequence
  Description of Artificial Sequence: Synthetic oligonucleotide
uggcuugagaggcacaaug

SEQ ID NO: 3188492 - RNA, 19 nt, Artificial Sequence
  Description of Artificial Sequence: Synthetic oligonucleotide
agaucugaggugccugacc

SEQ ID NO: 3188493 - RNA, 19 nt, Artificial Sequence
  Description of Artificial Sequence: Synthetic oligonucleotide
acagaugcaguuauugggg

SEQ ID NO: 3188494 - RNA, 19 nt, Artificial Sequence
  Description of Artificial Sequence: Synthetic oligonucleotide
guuauuggggcagucgugg

SEQ ID NO: 3188495 - RNA, 19 nt, Artificial Sequence
  Description of Artificial Sequence: Synthetic oligonucleotide
gugcuaaccagccagggug

SEQ ID NO: 3188496 - RNA, 19 nt, Artificial Sequence
  Description of Artificial Sequence: Synthetic oligonucleotide
uguggcuuaaaucgaguuc

SEQ ID NO: 3188497 - RNA, 19 nt, Artificial Sequence
  Description of Artificial Sequence: Synthetic oligonucleotide
uauuggggcagucgugggg

SEQ ID NO: 3188498 - RNA, 19 nt, Artificial Sequence
  Description of Artificial Sequence: Synthetic oligonucleotide
gaugcaguuauuggggcag

SEQ ID NO: 3188499 - RNA, 19 nt, Artificial Sequence
  Description of Artificial Sequence: Synthetic oligonucleotide
aaugcuaccggcacguccu

SEQ ID NO: 3188500 - RNA, 19 nt, Artificial Sequence
  Description of Artificial Sequence: Synthetic oligonucleotide
agaggcacaaugccggcuc

SEQ ID NO: 3188501 - RNA, 19 nt, Artificial Sequence
  Description of Artificial Sequence: Synthetic oligonucleotide
uucccuguggcccauggcu

SEQ ID NO: 3188502 - RNA, 19 nt, Artificial Sequence
  Description of Artificial Sequence: Synthetic oligonucleotide
aggggugcuaaccagccag

SEQ ID NO: 3188503 - RNA, 19 nt, Artificial Sequence
  Description of Artificial Sequence: Synthetic oligonucleotide
cauuguggcuuaaaucgag

SEQ ID NO: 3188504 - RNA, 19 nt, Artificial Sequence
  Description of Artificial Sequence: Synthetic oligonucleotide
aaucgaguucugcagccgu

SEQ ID NO: 3188505 - RNA, 19 nt, Artificial Sequence
  Description of Artificial Sequence: Synthetic oligonucleotide
ugcacagcaguaugccugg

SEQ ID NO: 3188506 - RNA, 19 nt, Artificial Sequence
  Description of Artificial Sequence: Synthetic oligonucleotide
accggcacguccuguaagc

SEQ ID NO: 3188507 - RNA, 19 nt, Artificial Sequence
  Description of Artificial Sequence: Synthetic oligonucleotide
aaaucgaguucugcagccg

SEQ ID NO: 3188508 - RNA, 19 nt, Artificial Sequence
  Description of Artificial Sequence: Synthetic oligonucleotide
aguucugcagccguggcag

SEQ ID NO: 3188509 - RNA, 19 nt, Artificial Sequence
  Description of Artificial Sequence: Synthetic oligonucleotide
uaugccuggcaccaccagc

SEQ ID NO: 3188510 - RNA, 19 nt, Artificial Sequence
  Description of Artificial Sequence: Synthetic oligonucleotide
agcuccgggacucacccac

SEQ ID NO: 3188511 - RNA, 19 nt, Artificial Sequence
  Description of Artificial Sequence: Synthetic oligonucleotide
agugcauuguggcuuaaau

SEQ ID NO: 3188512 - RNA, 19 nt, Artificial Sequence
  Description of Artificial Sequence: Synthetic oligonucleotide
ucuacagccuugcggguug

SEQ ID NO: 3188513 - RNA, 19 nt, Artificial Sequence
  Description of Artificial Sequence: Synthetic oligonucleotide
uaaccagccagggugcagg

SEQ ID NO: 3188514 - RNA, 19 nt, Artificial Sequence
  Description of Artificial Sequence: Synthetic oligonucleotide
uuaacacaucggcagcaca

SEQ ID NO: 3188515 - RNA, 19 nt, Artificial Sequence
  Description of Artificial Sequence: Synthetic oligonucleotide
ugcucuucuggucgugggg

SEQ ID NO: 3188516 - RNA, 19 nt, Artificial Sequence
  Description of Artificial Sequence: Synthetic oligonucleotide
aaugccggcuccaccggcc

SEQ ID NO: 3188517 - RNA, 19 nt, Artificial Sequence
  Description of Artificial Sequence: Synthetic oligonucleotide
uggcccauggcuugagagg

SEQ ID NO: 3188518 - RNA, 19 nt, Artificial Sequence
  Description of Artificial Sequence: Synthetic oligonucleotide
agcacagaugcaguuauug

SEQ ID NO: 3188519 - RNA, 19 nt, Artificial Sequence
  Description of Artificial Sequence: Synthetic oligonucleotide
uccuguaagccauggccag

SEQ ID NO: 3188520 - RNA, 19 nt, Artificial Sequence
  Description of Artificial Sequence: Synthetic oligonucleotide
ucacccacuucucuacagc

SEQ ID NO: 3188521 - RNA, 19 nt, Artificial Sequence
  Description of Artificial Sequence: Synthetic oligonucleotide
agcaugcacagcaguaugc

SEQ ID NO: 3188522 - RNA, 19 nt, Artificial Sequence
  Description of Artificial Sequence: Synthetic oligonucleotide
augccuggcaccaccagcc

SEQ ID NO: 3188523 - RNA, 19 nt, Artificial Sequence
  Description of Artificial Sequence: Synthetic oligonucleotide
uuauuggggcagucguggg

SEQ ID NO: 3188524 - RNA, 19 nt, Artificial Sequence
  Description of Artificial Sequence: Synthetic oligonucleotide
aaccagccagggugcaggc

SEQ ID NO: 3188525 - RNA, 19 nt, Artificial Sequence
  Description of Artificial Sequence: Synthetic oligonucleotide
ucugaggugccugacccag

SEQ ID NO: 3188526 - RNA, 19 nt, Artificial Sequence
  Description of Artificial Sequence: Synthetic oligonucleotide
ugaggugccugacccagca

SEQ ID NO: 3188527 - RNA, 19 nt, Artificial Sequence
  Description of Artificial Sequence: Synthetic oligonucleotide
cauggcaguggccaccagg

SEQ ID NO: 3188528 - RNA, 19 nt, Artificial Sequence
  Description of Artificial Sequence: Synthetic oligonucleotide
uggcaggcaaugcuaccgg

SEQ ID NO: 3188529 - RNA, 19 nt, Artificial Sequence
  Description of Artificial Sequence: Synthetic oligonucleotide
aucggcagcacagaugcag

SEQ ID NO: 3188530 - RNA, 19 nt, Artificial Sequence
  Description of Artificial Sequence: Synthetic oligonucleotide
ugcuaaccagccagggugc

SEQ ID NO: 3188531 - RNA, 19 nt, Artificial Sequence
  Description of Artificial Sequence: Synthetic oligonucleotide
gccaccagggaagagaugg

SEQ ID NO: 3188532 - RNA, 19 nt, Artificial Sequence
  Description of Artificial Sequence: Synthetic oligonucleotide
uugugguucccuguggccc

SEQ ID NO: 3188533 - RNA, 19 nt, Artificial Sequence
  Description of Artificial Sequence: Synthetic oligonucleotide
agaggggugcuaaccagcc

SEQ ID NO: 3188534 - RNA, 19 nt, Artificial Sequence
  Description of Artificial Sequence: Synthetic oligonucleotide
auggcaguggccaccaggg

SEQ ID NO: 3188535 - RNA, 19 nt, Artificial Sequence
  Description of Artificial Sequence: Synthetic oligonucleotide
cagaugcaguuauuggggc

SEQ ID NO: 3188536 - RNA, 19 nt, Artificial Sequence
  Description of Artificial Sequence: Synthetic oligonucleotide
caaugcuaccggcacgucc

SEQ ID NO: 3188537 - RNA, 19 nt, Artificial Sequence
  Description of Artificial Sequence: Synthetic oligonucleotide
cacccacuucucuacagcc

SEQ ID NO: 3188538 - RNA, 19 nt, Artificial Sequence
  Description of Artificial Sequence: Synthetic oligonucleotide
cuguaagccauggccagcg

SEQ ID NO: 3188539 - RNA, 19 nt, Artificial Sequence
  Description of Artificial Sequence: Synthetic oligonucleotide
gcuuaaaucgaguucugca

SEQ ID NO: 3188540 - RNA, 19 nt, Artificial Sequence
  Description of Artificial Sequence: Synthetic oligonucleotide
ucgaguucugcagccgugg

SEQ ID NO: 3188541 - RNA, 19 nt, Artificial Sequence
  Description of Artificial Sequence: Synthetic oligonucleotide
gacucacccacuucucuac

SEQ ID NO: 3188542 - RNA, 19 nt, Artificial Sequence
  Description of Artificial Sequence: Synthetic oligonucleotide
cuggucgugggguugugag

SEQ ID NO: 3188543 - RNA, 19 nt, Artificial Sequence
  Description of Artificial Sequence: Synthetic oligonucleotide
guggcaggcaaugcuaccg

SEQ ID NO: 3188544 - RNA, 19 nt, Artificial Sequence
  Description of Artificial Sequence: Synthetic oligonucleotide
gugcauuguggcuuaaauc

SEQ ID NO: 3188545 - RNA, 19 nt, Artificial Sequence
  Description of Artificial Sequence: Synthetic oligonucleotide
guggcccauggcuugagag

SEQ ID NO: 3188546 - RNA, 19 nt, Artificial Sequence
  Description of Artificial Sequence: Synthetic oligonucleotide
agaugcaguuauuggggca

SEQ ID NO: 3188547 - RNA, 19 nt, Artificial Sequence
  Description of Artificial Sequence: Synthetic oligonucleotide
aggugccugacccagcacu

SEQ ID NO: 3188548 - RNA, 19 nt, Artificial Sequence
  Description of Artificial Sequence: Synthetic oligonucleotide
acuucucuacagccuugcg

SEQ ID NO: 3188549 - RNA, 19 nt, Artificial Sequence
  Description of Artificial Sequence: Synthetic oligonucleotide
gcacagaugcaguuauugg

SEQ ID NO: 3188550 - RNA, 19 nt, Artificial Sequence
  Description of Artificial Sequence: Synthetic oligonucleotide
uggucgugggguugugagg

SEQ ID NO: 3188551 - RNA, 19 nt, Artificial Sequence
  Description of Artificial Sequence: Synthetic oligonucleotide
augcacagcaguaugccug

SEQ ID NO: 3188552 - RNA, 19 nt, Artificial Sequence
  Description of Artificial Sequence: Synthetic oligonucleotide
aacacaucggcagcacaga

SEQ ID NO: 3188553 - RNA, 19 nt, Artificial Sequence
  Description of Artificial Sequence: Synthetic oligonucleotide
acguccuguaagccauggc

SEQ ID NO: 3188554 - RNA, 19 nt, Artificial Sequence
  Description of Artificial Sequence: Synthetic oligonucleotide
uuguggcuuaaaucgaguu

SEQ ID NO: 3188555 - RNA, 19 nt, Artificial Sequence
  Description of Artificial Sequence: Synthetic oligonucleotide
aagccauggccagcgcagc

SEQ ID NO: 3188556 - RNA, 19 nt, Artificial Sequence
  Description of Artificial Sequence: Synthetic oligonucleotide
cuguccacagcuccgggac

SEQ ID NO: 3188557 - RNA, 19 nt, Artificial Sequence
  Description of Artificial Sequence: Synthetic oligonucleotide
uucgagugcauuguggcuu

SEQ ID NO: 3188558 - RNA, 19 nt, Artificial Sequence
  Description of Artificial Sequence: Synthetic oligonucleotide
guugugguucccuguggcc

SEQ ID NO: 3188559 - RNA, 19 nt, Artificial Sequence
  Description of Artificial Sequence: Synthetic oligonucleotide
ugccugacccagcacucag

SEQ ID NO: 3188560 - RNA, 19 nt, Artificial Sequence
  Description of Artificial Sequence: Synthetic oligonucleotide
acaaugccggcuccaccgg

SEQ ID NO: 3188561 - RNA, 19 nt, Artificial Sequence
  Description of Artificial Sequence: Synthetic oligonucleotide
gcuugagaggcacaaugcc

SEQ ID NO: 3188562 - RNA, 19 nt, Artificial Sequence
  Description of Artificial Sequence: Synthetic oligonucleotide
ugugguucccuguggccca

SEQ ID NO: 3188563 - RNA, 19 nt, Artificial Sequence
  Description of Artificial Sequence: Synthetic oligonucleotide
agcaguaugccuggcacca

SEQ ID NO: 3188564 - RNA, 19 nt, Artificial Sequence
  Description of Artificial Sequence: Synthetic oligonucleotide
ugugagguggggccccagc

SEQ ID NO: 3188565 - RNA, 19 nt, Artificial Sequence
  Description of Artificial Sequence: Synthetic oligonucleotide
caggcguucgagugcauug

SEQ ID NO: 3188566 - RNA, 19 nt, Artificial Sequence
  Description of Artificial Sequence: Synthetic oligonucleotide
cagcacucagcaugcacag

SEQ ID NO: 3188567 - RNA, 19 nt, Artificial Sequence
  Description of Artificial Sequence: Synthetic oligonucleotide
caggcaaugcuaccggcac

SEQ ID NO: 3188568 - RNA, 19 nt, Artificial Sequence
  Description of Artificial Sequence: Synthetic oligonucleotide
ucagcaugcacagcaguau

SEQ ID NO: 3188569 - RNA, 19 nt, Artificial Sequence
  Description of Artificial Sequence: Synthetic oligonucleotide
acagccuugcggguugugg

SEQ ID NO: 3188570 - RNA, 19 nt, Artificial Sequence
  Description of Artificial Sequence: Synthetic oligonucleotide
cucacccacuucucuacag

SEQ ID NO: 3188571 - RNA, 19 nt, Artificial Sequence
  Description of Artificial Sequence: Synthetic oligonucleotide
aaagcaguuaauuauacac

SEQ ID NO: 3188572 - RNA, 19 nt, Artificial Sequence
  Description of Artificial Sequence: Synthetic oligonucleotide
uauuuaaacaaacaguggc

SEQ ID NO: 3188573 - RNA, 19 nt, Artificial Sequence
  Description of Artificial Sequence: Synthetic oligonucleotide
aagaaaacagaucaaaucu

SEQ ID NO: 3188574 - RNA, 19 nt, Artificial Sequence
  Description of Artificial Sequence: Synthetic oligonucleotide
acuaguuauauuuauuugg

SEQ ID NO: 3188575 - RNA, 19 nt, Artificial Sequence
  Description of Artificial Sequence: Synthetic oligonucleotide
uaauuauacacauaaauaa

SEQ ID NO: 3188576 - RNA, 19 nt, Artificial Sequence
  Description of Artificial Sequence: Synthetic oligonucleotide
aauuauacacauaaauaac

SEQ ID NO: 3188577 - RNA, 19 nt, Artificial Sequence
  Description of Artificial Sequence: Synthetic oligonucleotide
uuaauuauacacauaaaua

SEQ ID NO: 3188578 - RNA, 19 nt, Artificial Sequence
  Description of Artificial Sequence: Synthetic oligonucleotide
aaagccaaaugcuaguaag

SEQ ID NO: 3188579 - RNA, 19 nt, Artificial Sequence
  Description of Artificial Sequence: Synthetic oligonucleotide
auuaagaaguccaagaauc

SEQ ID NO: 3188580 - RNA, 19 nt, Artificial Sequence
  Description of Artificial Sequence: Synthetic oligonucleotide
uaaauuaagaaguccaaga

SEQ ID NO: 3188581 - RNA, 19 nt, Artificial Sequence
  Description of Artificial Sequence: Synthetic oligonucleotide
aauaaaggcaauauuuuag

SEQ ID NO: 3188582 - RNA, 19 nt, Artificial Sequence
  Description of Artificial Sequence: Synthetic oligonucleotide
uauuucauagggaagagaa

SEQ ID NO: 3188583 - RNA, 19 nt, Artificial Sequence
  Description of Artificial Sequence: Synthetic oligonucleotide
aagaaguccaagaaucucc

SEQ ID NO: 3188584 - RNA, 19 nt, Artificial Sequence
  Description of Artificial Sequence: Synthetic oligonucleotide
aaggguacuguguacaaag

SEQ ID NO: 3188585 - RNA, 19 nt, Artificial Sequence
  Description of Artificial Sequence: Synthetic oligonucleotide
cuaauugguuucuauaugc

SEQ ID NO: 3188586 - RNA, 19 nt, Artificial Sequence
  Description of Artificial Sequence: Synthetic oligonucleotide
aauaguuuaggaacugugg

SEQ ID NO: 3188587 - RNA, 19 nt, Artificial Sequence
  Description of Artificial Sequence: Synthetic oligonucleotide
aagacugcacaaccuaagc

SEQ ID NO: 3188588 - RNA, 19 nt, Artificial Sequence
  Description of Artificial Sequence: Synthetic oligonucleotide
uucuauaugcagaauagcu

SEQ ID NO: 3188589 - RNA, 19 nt, Artificial Sequence
  Description of Artificial Sequence: Synthetic oligonucleotide
aauugguuucuauaugcag

SEQ ID NO: 3188590 - RNA, 19 nt, Artificial Sequence
  Description of Artificial Sequence: Synthetic oligonucleotide
uuagaaaacaguucauccc

SEQ ID NO: 3188591 - RNA, 19 nt, Artificial Sequence
  Description of Artificial Sequence: Synthetic oligonucleotide
ucugguaagaccauguguc

SEQ ID NO: 3188592 - RNA, 19 nt, Artificial Sequence
  Description of Artificial Sequence: Synthetic oligonucleotide
aauuaagaaguccaagaau

SEQ ID NO: 3188593 - RNA, 19 nt, Artificial Sequence
  Description of Artificial Sequence: Synthetic oligonucleotide
gaaaguggcaucuugucug

SEQ ID NO: 3188594 - RNA, 19 nt, Artificial Sequence
  Description of Artificial Sequence: Synthetic oligonucleotide
uuccauaucaucacuggag

SEQ ID NO: 3188595 - RNA, 19 nt, Artificial Sequence
  Description of Artificial Sequence: Synthetic oligonucleotide
aaaggcaauauuuuagaaa

SEQ ID NO: 3188596 - RNA, 19 nt, Artificial Sequence
  Description of Artificial Sequence: Synthetic oligonucleotide
aaguguuugauugagcuca

SEQ ID NO: 3188597 - RNA, 19 nt, Artificial Sequence
  Description of Artificial Sequence: Synthetic oligonucleotide
uguuugauugagcucaaug

SEQ ID NO: 3188598 - RNA, 19 nt, Artificial Sequence
  Description of Artificial Sequence: Synthetic oligonucleotide
gauuugacagccuggcugg

SEQ ID NO: 3188599 - RNA, 19 nt, Artificial Sequence
  Description of Artificial Sequence: Synthetic oligonucleotide
aaguucaucuguuaagggu

SEQ ID NO: 3188600 - RNA, 19 nt, Artificial Sequence
  Description of Artificial Sequence: Synthetic oligonucleotide
aaaacagaucaaaucuccc

SEQ ID NO: 3188601 - RNA, 19 nt, Artificial Sequence
  Description of Artificial Sequence: Synthetic oligonucleotide
aacaacugcgaggugagac

SEQ ID NO: 3188602 - RNA, 19 nt, Artificial Sequence
  Description of Artificial Sequence: Synthetic oligonucleotide
ugcuaagacaaccugcuug

SEQ ID NO: 3188603 - RNA, 19 nt, Artificial Sequence
  Description of Artificial Sequence: Synthetic oligonucleotide
aaugaaugacucugguaag

SEQ ID NO: 3188604 - RNA, 19 nt, Artificial Sequence
  Description of Artificial Sequence: Synthetic oligonucleotide
acuucuaggacccugcugu

SEQ ID NO: 3188605 - RNA, 19 nt, Artificial Sequence
  Description of Artificial Sequence: Synthetic oligonucleotide
uguaaccaugcuaagacaa

SEQ ID NO: 3188606 - RNA, 19 nt, Artificial Sequence
  Description of Artificial Sequence: Synthetic oligonucleotide
aguccaagaaucucccacc

SEQ ID NO: 3188607 - RNA, 19 nt, Artificial Sequence
  Description of Artificial Sequence: Synthetic oligonucleotide
aacaggauuugacagccug

SEQ ID NO: 3188608 - RNA, 19 nt, Artificial Sequence
  Description of Artificial Sequence: Synthetic oligonucleotide
uguguggaugcagagaggg

SEQ ID NO: 3188609 - RNA, 19 nt, Artificial Sequence
  Description of Artificial Sequence: Synthetic oligonucleotide
ugauugagcucaaugguca

SEQ ID NO: 3188610 - RNA, 19 nt, Artificial Sequence
  Description of Artificial Sequence: Synthetic oligonucleotide
auaaaggcaauauuuuaga

SEQ ID NO: 3188611 - RNA, 19 nt, Artificial Sequence
  Description of Artificial Sequence: Synthetic oligonucleotide
ugcuugugaauccaggagc

SEQ ID NO: 3188612 - RNA, 19 nt, Artificial Sequence
  Description of Artificial Sequence: Synthetic oligonucleotide
gcuaguaaguguuugauug

SEQ ID NO: 3188613 - RNA, 19 nt, Artificial Sequence
  Description of Artificial Sequence: Synthetic oligonucleotide
uguacaaagcaguuaauua

SEQ ID NO: 3188614 - RNA, 19 nt, Artificial Sequence
  Description of Artificial Sequence: Synthetic oligonucleotide
ucuuuagacaaagaggacu

SEQ ID NO: 3188615 - RNA, 19 nt, Artificial Sequence
  Description of Artificial Sequence: Synthetic oligonucleotide
ugcagaauagcuguaacca

SEQ ID NO: 3188616 - RNA, 19 nt, Artificial Sequence
  Description of Artificial Sequence: Synthetic oligonucleotide
agagaauaaaagccaaaug

SEQ ID NO: 3188617 - RNA, 19 nt, Artificial Sequence
  Description of Artificial Sequence: Synthetic oligonucleotide
aaugcuaguaaguguuuga

SEQ ID NO: 3188618 - RNA, 19 nt, Artificial Sequence
  Description of Artificial Sequence: Synthetic oligonucleotide
auaguuuaggaacugugga

SEQ ID NO: 3188619 - RNA, 19 nt, Artificial Sequence
  Description of Artificial Sequence: Synthetic oligonucleotide
aguaggacucgucugagug

SEQ ID NO: 3188620 - RNA, 19 nt, Artificial Sequence
  Description of Artificial Sequence: Synthetic oligonucleotide
aauagcuguaaccaugcua

SEQ ID NO: 3188621 - RNA, 19 nt, Artificial Sequence
  Description of Artificial Sequence: Synthetic oligonucleotide
uccuuuugcccacugcugg

SEQ ID NO: 3188622 - RNA, 19 nt, Artificial Sequence
  Description of Artificial Sequence: Synthetic oligonucleotide
acagaucaaaucucccggc

SEQ ID NO: 3188623 - RNA, 19 nt, Artificial Sequence
  Description of Artificial Sequence: Synthetic oligonucleotide
gacuaguuauauuuauuug

SEQ ID NO: 3188624 - RNA, 19 nt, Artificial Sequence
  Description of Artificial Sequence: Synthetic oligonucleotide
uacuaauugguuucuauau

SEQ ID NO: 3188625 - RNA, 19 nt, Artificial Sequence
  Description of Artificial Sequence: Synthetic oligonucleotide
aacugucauaaauuaagaa

SEQ ID NO: 3188626 - RNA, 19 nt, Artificial Sequence
  Description of Artificial Sequence: Synthetic oligonucleotide
aagagaauaaaagccaaau

SEQ ID NO: 3188627 - RNA, 19 nt, Artificial Sequence
  Description of Artificial Sequence: Synthetic oligonucleotide
acaagcugcggccccaucc

SEQ ID NO: 3188628 - RNA, 19 nt, Artificial Sequence
  Description of Artificial Sequence: Synthetic oligonucleotide
ucauucaacaggauuugac

SEQ ID NO: 3188629 - RNA, 19 nt, Artificial Sequence
  Description of Artificial Sequence: Synthetic oligonucleotide
gaccaugugucacagacac

SEQ ID NO: 3188630 - RNA, 19 nt, Artificial Sequence
  Description of Artificial Sequence: Synthetic oligonucleotide
aaaggcugguuuuaucuga

SEQ ID NO: 3188631 - RNA, 19 nt, Artificial Sequence
  Description of Artificial Sequence: Synthetic oligonucleotide
guuucuauaugcagaauag

SEQ ID NO: 3188632 - RNA, 19 nt, Artificial Sequence
  Description of Artificial Sequence: Synthetic oligonucleotide
cauaucaucacuggagugc

SEQ ID NO: 3188633 - RNA, 19 nt, Artificial Sequence
  Description of Artificial Sequence: Synthetic oligonucleotide
auaucaucacuggagugcc

SEQ ID NO: 3188634 - RNA, 19 nt, Artificial Sequence
  Description of Artificial Sequence: Synthetic oligonucleotide
uggagugccaaagaaaaca

SEQ ID NO: 3188635 - RNA, 19 nt, Artificial Sequence
  Description of Artificial Sequence: Synthetic oligonucleotide
augucuguuuuacuaauug

SEQ ID NO: 3188636 - RNA, 19 nt, Artificial Sequence
  Description of Artificial Sequence: Synthetic oligonucleotide
uuaaacaaacaguggcagc

SEQ ID NO: 3188637 - RNA, 19 nt, Artificial Sequence
  Description of Artificial Sequence: Synthetic oligonucleotide
ugagaaaguggcaucuugu

SEQ ID NO: 3188638 - RNA, 19 nt, Artificial Sequence
  Description of Artificial Sequence: Synthetic oligonucleotide
gaaaacaguucaucccuag

SEQ ID NO: 3188639 - RNA, 19 nt, Artificial Sequence
  Description of Artificial Sequence: Synthetic oligonucleotide
gacugcacaaccuaagcuc

SEQ ID NO: 3188640 - RNA, 19 nt, Artificial Sequence
  Description of Artificial Sequence: Synthetic oligonucleotide
agcaguuaauuauacacau

SEQ ID NO: 3188641 - RNA, 19 nt, Artificial Sequence
  Description of Artificial Sequence: Synthetic oligonucleotide
uugacagccuggcuggagg

SEQ ID NO: 3188642 - RNA, 19 nt, Artificial Sequence
  Description of Artificial Sequence: Synthetic oligonucleotide
ucuugucugacaccgggug

SEQ ID NO: 3188643 - RNA, 19 nt, Artificial Sequence
  Description of Artificial Sequence: Synthetic oligonucleotide
  modified_base (17)..(17): a, c, u, g, unknown or other
gaauccaggagcaaggnga

SEQ ID NO: 3188644 - RNA, 19 nt, Artificial Sequence
  Description of Artificial Sequence: Synthetic oligonucleotide
agugccaucucuuccuuag

SEQ ID NO: 3188645 - RNA, 19 nt, Artificial Sequence
  Description of Artificial Sequence: Synthetic oligonucleotide
cacaccaacaacugcgagg

SEQ ID NO: 3188646 - RNA, 19 nt, Artificial Sequence
  Description of Artificial Sequence: Synthetic oligonucleotide
uccuggacuaguuauauuu

SEQ ID NO: 3188647 - RNA, 19 nt, Artificial Sequence
  Description of Artificial Sequence: Synthetic oligonucleotide
uugauugagcucaaugguc

SEQ ID NO: 3188648 - RNA, 19 nt, Artificial Sequence
  Description of Artificial Sequence: Synthetic oligonucleotide
aggauaucacaccuacuuc

SEQ ID NO: 3188649 - RNA, 19 nt, Artificial Sequence
  Description of Artificial Sequence: Synthetic oligonucleotide
uuacagaccucugagggug

SEQ ID NO: 3188650 - RNA, 19 nt, Artificial Sequence
  Description of Artificial Sequence: Synthetic oligonucleotide
ucugagugccaucucuucc

SEQ ID NO: 3188651 - RNA, 19 nt, Artificial Sequence
  Description of Artificial Sequence: Synthetic oligonucleotide
aaaagccaaaugcuaguaa

SEQ ID NO: 3188652 - RNA, 19 nt, Artificial Sequence
  Description of Artificial Sequence: Synthetic oligonucleotide
acaccuacuucuaggaccc

SEQ ID NO: 3188653 - RNA, 19 nt, Artificial Sequence
  Description of Artificial Sequence: Synthetic oligonucleotide
uaugcagaauagcuguaac

SEQ ID NO: 3188654 - RNA, 19 nt, Artificial Sequence
  Description of Artificial Sequence: Synthetic oligonucleotide
ugcgaggugagacuggccu

SEQ ID NO: 3188655 - RNA, 19 nt, Artificial Sequence
  Description of Artificial Sequence: Synthetic oligonucleotide
aaagacugcacaaccuaag

SEQ ID NO: 3188656 - RNA, 19 nt, Artificial Sequence
  Description of Artificial Sequence: Synthetic oligonucleotide
gacaauuacagaccucuga

SEQ ID NO: 3188657 - RNA, 19 nt, Artificial Sequence
  Description of Artificial Sequence: Synthetic oligonucleotide
ucugugugcugccugagaa

SEQ ID NO: 3188658 - RNA, 19 nt, Artificial Sequence
  Description of Artificial Sequence: Synthetic oligonucleotide
agacaaagaggacuuguca

SEQ ID NO: 3188659 - RNA, 19 nt, Artificial Sequence
  Description of Artificial Sequence: Synthetic oligonucleotide
uuucuauaugcagaauagc

SEQ ID NO: 3188660 - RNA, 19 nt, Artificial Sequence
  Description of Artificial Sequence: Synthetic oligonucleotide
uaaaggcaauauuuuagaa

SEQ ID NO: 3188661 - RNA, 19 nt, Artificial Sequence
  Description of Artificial Sequence: Synthetic oligonucleotide
gaaaggcugguuuuaucug

SEQ ID NO: 3188662 - RNA, 19 nt, Artificial Sequence
  Description of Artificial Sequence: Synthetic oligonucleotide
uuagacaaagaggacuugu

SEQ ID NO: 3188663 - RNA, 19 nt, Artificial Sequence
  Description of Artificial Sequence: Synthetic oligonucleotide
acaaccuaagcucugucau

SEQ ID NO: 3188664 - RNA, 19 nt, Artificial Sequence
  Description of Artificial Sequence: Synthetic oligonucleotide
agccccaugacaauuacag

SEQ ID NO: 3188665 - RNA, 19 nt, Artificial Sequence
  Description of Artificial Sequence: Synthetic oligonucleotide
cucaggauaucacaccuac

SEQ ID NO: 3188666 - RNA, 19 nt, Artificial Sequence
  Description of Artificial Sequence: Synthetic oligonucleotide
ucucccaccacaccaacaa

SEQ ID NO: 3188667 - RNA, 19 nt, Artificial Sequence
  Description of Artificial Sequence: Synthetic oligonucleotide
guaaguguuugauugagcu

SEQ ID NO: 3188668 - RNA, 19 nt, Artificial Sequence
  Description of Artificial Sequence: Synthetic oligonucleotide
uugugaauccaggagcaag

SEQ ID NO: 3188669 - RNA, 19 nt, Artificial Sequence
  Description of Artificial Sequence: Synthetic oligonucleotide
acuuggguucaccuuguuc

SEQ ID NO: 3188670 - RNA, 19 nt, Artificial Sequence
  Description of Artificial Sequence: Synthetic oligonucleotide
aguaaguguuugauugagc

SEQ ID NO: 3188671 - RNA, 19 nt, Artificial Sequence
  Description of Artificial Sequence: Synthetic oligonucleotide
agaacuguuacccagcgcc

SEQ ID NO: 3188672 - RNA, 19 nt, Artificial Sequence
  Description of Artificial Sequence: Synthetic oligonucleotide
auuuacagaacuguuaccc

SEQ ID NO: 3188673 - RNA, 19 nt, Artificial Sequence
  Description of Artificial Sequence: Synthetic oligonucleotide
gaucuucuuacucaggugg

SEQ ID NO: 3188674 - RNA, 19 nt, Artificial Sequence
  Description of Artificial Sequence: Synthetic oligonucleotide
gagguuucgaagucgagcg

SEQ ID NO: 3188675 - RNA, 19 nt, Artificial Sequence
  Description of Artificial Sequence: Synthetic oligonucleotide
aaaguggaucuucuuacuc

SEQ ID NO: 3188676 - RNA, 19 nt, Artificial Sequence
  Description of Artificial Sequence: Synthetic oligonucleotide
uuggcauggacgaaaacag

SEQ ID NO: 3188677 - RNA, 19 nt, Artificial Sequence
  Description of Artificial Sequence: Synthetic oligonucleotide
uccuugagugcacugaagg

SEQ ID NO: 3188678 - RNA, 19 nt, Artificial Sequence
  Description of Artificial Sequence: Synthetic oligonucleotide
aacagcaaacuucccgagc

SEQ ID NO: 3188679 - RNA, 19 nt, Artificial Sequence
  Description of Artificial Sequence: Synthetic oligonucleotide
aguggaaagaucuugcccu

SEQ ID NO: 3188680 - RNA, 19 nt, Artificial Sequence
  Description of Artificial Sequence: Synthetic oligonucleotide
acagcacaggagcagaccc

SEQ ID NO: 3188681 - RNA, 19 nt, Artificial Sequence
  Description of Artificial Sequence: Synthetic oligonucleotide
ucaaaguggaucuucuuac

SEQ ID NO: 3188682 - RNA, 19 nt, Artificial Sequence
  Description of Artificial Sequence: Synthetic oligonucleotide
gaauacgugaccugggaug

SEQ ID NO: 3188683 - RNA, 19 nt, Artificial Sequence
  Description of Artificial Sequence: Synthetic oligonucleotide
uuacagaacuguuacccag

SEQ ID NO: 3188684 - RNA, 19 nt, Artificial Sequence
  Description of Artificial Sequence: Synthetic oligonucleotide
augcccugcagcuucaggc

SEQ ID NO: 3188685 - RNA, 19 nt, Artificial Sequence
  Description of Artificial Sequence: Synthetic oligonucleotide
aguucgugcucucaacagc

SEQ ID NO: 3188686 - RNA, 19 nt, Artificial Sequence
  Description of Artificial Sequence: Synthetic oligonucleotide
aaguggaucuucuuacuca

SEQ ID NO: 3188687 - RNA, 19 nt, Artificial Sequence
  Description of Artificial Sequence: Synthetic oligonucleotide
aaagcagaggcagccaggg

SEQ ID NO: 3188688 - RNA, 19 nt, Artificial Sequence
  Description of Artificial Sequence: Synthetic oligonucleotide
cucaccaucagcgaggcgc

SEQ ID NO: 3188689 - RNA, 19 nt, Artificial Sequence
  Description of Artificial Sequence: Synthetic oligonucleotide
uggaucuucuuacucaggu

SEQ ID NO: 3188690 - RNA, 19 nt, Artificial Sequence
  Description of Artificial Sequence: Synthetic oligonucleotide
acaggugaccugcuugucc

SEQ ID NO: 3188691 - RNA, 19 nt, Artificial Sequence
  Description of Artificial Sequence: Synthetic oligonucleotide
gacgaaaacagcaaacuuc

SEQ ID NO: 3188692 - RNA, 19 nt, Artificial Sequence
  Description of Artificial Sequence: Synthetic oligonucleotide
uagcagacagucauugaag

SEQ ID NO: 3188693 - RNA, 19 nt, Artificial Sequence
  Description of Artificial Sequence: Synthetic oligonucleotide
aguggaucuucuuacucag

SEQ ID NO: 3188694 - RNA, 19 nt, Artificial Sequence
  Description of Artificial Sequence: Synthetic oligonucleotide
ugccgcaccagccagcggg

SEQ ID NO: 3188695 - RNA, 19 nt, Artificial Sequence
  Description of Artificial Sequence: Synthetic oligonucleotide
aaacagcaaacuucccgag

SEQ ID NO: 3188696 - RNA, 19 nt, Artificial Sequence
  Description of Artificial Sequence: Synthetic oligonucleotide
cuugcugcuagcauuggug

SEQ ID NO: 3188697 - RNA, 19 nt, Artificial Sequence
  Description of Artificial Sequence: Synthetic oligonucleotide
acagcaaacuucccgagcu

SEQ ID NO: 3188698 - RNA, 19 nt, Artificial Sequence
  Description of Artificial Sequence: Synthetic oligonucleotide
gaagaggugaagguacacg

SEQ ID NO: 3188699 - RNA, 19 nt, Artificial Sequence
  Description of Artificial Sequence: Synthetic oligonucleotide
aucaguggaaagaucuugc

SEQ ID NO: 3188700 - RNA, 19 nt, Artificial Sequence
  Description of Artificial Sequence: Synthetic oligonucleotide
uuacucagguggaugagcu

SEQ ID NO: 3188701 - RNA, 19 nt, Artificial Sequence
  Description of Artificial Sequence: Synthetic oligonucleotide
uauuuacagaacuguuacc

SEQ ID NO: 3188702 - RNA, 19 nt, Artificial Sequence
  Description of Artificial Sequence: Synthetic oligonucleotide
gacgucaaagcagaggcag

SEQ ID NO: 3188703 - RNA, 19 nt, Artificial Sequence
  Description of Artificial Sequence: Synthetic oligonucleotide
agccauauuggcauggacg

SEQ ID NO: 3188704 - RNA, 19 nt, Artificial Sequence
  Description of Artificial Sequence: Synthetic oligonucleotide
cuucucaccaucagcgagg

SEQ ID NO: 3188705 - RNA, 19 nt, Artificial Sequence
  Description of Artificial Sequence: Synthetic oligonucleotide
ucagacgucaaagcagagg

SEQ ID NO: 3188706 - RNA, 19 nt, Artificial Sequence
  Description of Artificial Sequence: Synthetic oligonucleotide
ucaguucgugcucucaaca

SEQ ID NO: 3188707 - RNA, 19 nt, Artificial Sequence
  Description of Artificial Sequence: Synthetic oligonucleotide
acuguuacccagcgccugc

SEQ ID NO: 3188708 - RNA, 19 nt, Artificial Sequence
  Description of Artificial Sequence: Synthetic oligonucleotide
uuuccuccgggacaguagc

SEQ ID NO: 3188709 - RNA, 19 nt, Artificial Sequence
  Description of Artificial Sequence: Synthetic oligonucleotide
ucaguggaaagaucuugcc

SEQ ID NO: 3188710 - RNA, 19 nt, Artificial Sequence
  Description of Artificial Sequence: Synthetic oligonucleotide
ugcucucaacagcagcugg

SEQ ID NO: 3188711 - RNA, 19 nt, Artificial Sequence
  Description of Artificial Sequence: Synthetic oligonucleotide
uugcuucucacuuucaguu

SEQ ID NO: 3188712 - RNA, 19 nt, Artificial Sequence
  Description of Artificial Sequence: Synthetic oligonucleotide
uguagguccucacgcacug

SEQ ID NO: 3188713 - RNA, 19 nt, Artificial Sequence
  Description of Artificial Sequence: Synthetic oligonucleotide
aucacaggugaccugcuug

SEQ ID NO: 3188714 - RNA, 19 nt, Artificial Sequence
  Description of Artificial Sequence: Synthetic oligonucleotide
ucucacuuucaguucgugc

SEQ ID NO: 3188715 - RNA, 19 nt, Artificial Sequence
  Description of Artificial Sequence: Synthetic oligonucleotide
gaucaguggaaagaucuug

SEQ ID NO: 3188716 - RNA, 19 nt, Artificial Sequence
  Description of Artificial Sequence: Synthetic oligonucleotide
uggacgaaaacagcaaacu

SEQ ID NO: 3188717 - RNA, 19 nt, Artificial Sequence
  Description of Artificial Sequence: Synthetic oligonucleotide
accguugcuucucacuuuc

SEQ ID NO: 3188718 - RNA, 19 nt, Artificial Sequence
  Description of Artificial Sequence: Synthetic oligonucleotide
aaaggcccuagggucagac

SEQ ID NO: 3188719 - RNA, 19 nt, Artificial Sequence
  Description of Artificial Sequence: Synthetic oligonucleotide
agcucagccauauuggcau

SEQ ID NO: 3188720 - RNA, 19 nt, Artificial Sequence
  Description of Artificial Sequence: Synthetic oligonucleotide
ucaguccucuucauggacu

SEQ ID NO: 3188721 - RNA, 19 nt, Artificial Sequence
  Description of Artificial Sequence: Synthetic oligonucleotide
guugcauuccugcaccagc

SEQ ID NO: 3188722 - RNA, 19 nt, Artificial Sequence
  Description of Artificial Sequence: Synthetic oligonucleotide
auggacgaaaacagcaaac

SEQ ID NO: 3188723 - RNA, 19 nt, Artificial Sequence
  Description of Artificial Sequence: Synthetic oligonucleotide
caggagcagacccagcugg

SEQ ID NO: 3188724 - RNA, 19 nt, Artificial Sequence
  Description of Artificial Sequence: Synthetic oligonucleotide
ucucucggagguuucgaag

SEQ ID NO: 3188725 - RNA, 19 nt, Artificial Sequence
  Description of Artificial Sequence: Synthetic oligonucleotide
caguggaaagaucuugccc

SEQ ID NO: 3188726 - RNA, 19 nt, Artificial Sequence
  Description of Artificial Sequence: Synthetic oligonucleotide
ugcaaaggcccuaggguca

SEQ ID NO: 3188727 - RNA, 19 nt, Artificial Sequence
  Description of Artificial Sequence: Synthetic oligonucleotide
caggucucgaaccugcagc

SEQ ID NO: 3188728 - RNA, 19 nt, Artificial Sequence
  Description of Artificial Sequence: Synthetic oligonucleotide
aagguacacggccuugcug

SEQ ID NO: 3188729 - RNA, 19 nt, Artificial Sequence
  Description of Artificial Sequence: Synthetic oligonucleotide
gaggcugcugaucuccucc

SEQ ID NO: 3188730 - RNA, 19 nt, Artificial Sequence
  Description of Artificial Sequence: Synthetic oligonucleotide
uugaagaggugaagguaca

SEQ ID NO: 3188731 - RNA, 19 nt, Artificial Sequence
  Description of Artificial Sequence: Synthetic oligonucleotide
agcagcuggugccuggcac

SEQ ID NO: 3188732 - RNA, 19 nt, Artificial Sequence
  Description of Artificial Sequence: Synthetic oligonucleotide
aagcagaggcagccagggc

SEQ ID NO: 3188733 - RNA, 19 nt, Artificial Sequence
  Description of Artificial Sequence: Synthetic oligonucleotide
guagcagacagucauugaa

SEQ ID NO: 3188734 - RNA, 19 nt, Artificial Sequence
  Description of Artificial Sequence: Synthetic oligonucleotide
gagaucaguggaaagaucu

SEQ ID NO: 3188735 - RNA, 19 nt, Artificial Sequence
  Description of Artificial Sequence: Synthetic oligonucleotide
uugcauuccugcaccagcu

SEQ ID NO: 3188736 - RNA, 19 nt, Artificial Sequence
  Description of Artificial Sequence: Synthetic oligonucleotide
agccagggcguauuuacag

SEQ ID NO: 3188737 - RNA, 19 nt, Artificial Sequence
  Description of Artificial Sequence: Synthetic oligonucleotide
uagggucagacgucaaagc

SEQ ID NO: 3188738 - RNA, 19 nt, Artificial Sequence
  Description of Artificial Sequence: Synthetic oligonucleotide
gacaguagcagacagucau

SEQ ID NO: 3188739 - RNA, 19 nt, Artificial Sequence
  Description of Artificial Sequence: Synthetic oligonucleotide
ucgaaccugcagcucagcc

SEQ ID NO: 3188740 - RNA, 19 nt, Artificial Sequence
  Description of Artificial Sequence: Synthetic oligonucleotide
acugccaggaugucugucu

SEQ ID NO: 3188741 - RNA, 19 nt, Artificial Sequence
  Description of Artificial Sequence: Synthetic oligonucleotide
uucgaagucgagcgcugag

SEQ ID NO: 3188742 - RNA, 19 nt, Artificial Sequence
  Description of Artificial Sequence: Synthetic oligonucleotide
uacacggccuugcuggaca

SEQ ID NO: 3188743 - RNA, 19 nt, Artificial Sequence
  Description of Artificial Sequence: Synthetic oligonucleotide
agguuucgaagucgagcgc

SEQ ID NO: 3188744 - RNA, 19 nt, Artificial Sequence
  Description of Artificial Sequence: Synthetic oligonucleotide
ucacaggugaccugcuugu

SEQ ID NO: 3188745 - RNA, 19 nt, Artificial Sequence
  Description of Artificial Sequence: Synthetic oligonucleotide
ugacccucuggaaggguag

SEQ ID NO: 3188746 - RNA, 19 nt, Artificial Sequence
  Description of Artificial Sequence: Synthetic oligonucleotide
caaagcagaggcagccagg

SEQ ID NO: 3188747 - RNA, 19 nt, Artificial Sequence
  Description of Artificial Sequence: Synthetic oligonucleotide
aggcccuagggucagacgu

SEQ ID NO: 3188748 - RNA, 19 nt, Artificial Sequence
  Description of Artificial Sequence: Synthetic oligonucleotide
agcaucuugaggcggguga

SEQ ID NO: 3188749 - RNA, 19 nt, Artificial Sequence
  Description of Artificial Sequence: Synthetic oligonucleotide
agaggugaagguacacggc

SEQ ID NO: 3188750 - RNA, 19 nt, Artificial Sequence
  Description of Artificial Sequence: Synthetic oligonucleotide
aaggcccuagggucagacg

SEQ ID NO: 3188751 - RNA, 19 nt, Artificial Sequence
  Description of Artificial Sequence: Synthetic oligonucleotide
ugacccucuuguucucucg

SEQ ID NO: 3188752 - RNA, 19 nt, Artificial Sequence
  Description of Artificial Sequence: Synthetic oligonucleotide
ucggagguuucgaagucga

SEQ ID NO: 3188753 - RNA, 19 nt, Artificial Sequence
  Description of Artificial Sequence: Synthetic oligonucleotide
ucacgcacuggaccugggg

SEQ ID NO: 3188754 - RNA, 19 nt, Artificial Sequence
  Description of Artificial Sequence: Synthetic oligonucleotide
ucaucuugggagcccggug

SEQ ID NO: 3188755 - RNA, 19 nt, Artificial Sequence
  Description of Artificial Sequence: Synthetic oligonucleotide
uagguccucacgcacugga

SEQ ID NO: 3188756 - RNA, 19 nt, Artificial Sequence
  Description of Artificial Sequence: Synthetic oligonucleotide
ucgugcucucaacagcagc

SEQ ID NO: 3188757 - RNA, 19 nt, Artificial Sequence
  Description of Artificial Sequence: Synthetic oligonucleotide
ugagaucaguggaaagauc

SEQ ID NO: 3188758 - RNA, 19 nt, Artificial Sequence
  Description of Artificial Sequence: Synthetic oligonucleotide
uuguagguccucacgcacu

SEQ ID NO: 3188759 - RNA, 19 nt, Artificial Sequence
  Description of Artificial Sequence: Synthetic oligonucleotide
cucacuuucaguucgugcu

SEQ ID NO: 3188760 - RNA, 19 nt, Artificial Sequence
  Description of Artificial Sequence: Synthetic oligonucleotide
cuuuccuccgggacaguag

SEQ ID NO: 3188761 - RNA, 19 nt, Artificial Sequence
  Description of Artificial Sequence: Synthetic oligonucleotide
aggaauacgugaccuggga

SEQ ID NO: 3188762 - RNA, 19 nt, Artificial Sequence
  Description of Artificial Sequence: Synthetic oligonucleotide
caggggagcaucaggcagg

SEQ ID NO: 3188763 - RNA, 19 nt, Artificial Sequence
  Description of Artificial Sequence: Synthetic oligonucleotide
ucuccaucacaggugaccu

SEQ ID NO: 3188764 - RNA, 19 nt, Artificial Sequence
  Description of Artificial Sequence: Synthetic oligonucleotide
ugagauccaccguugcuuc

SEQ ID NO: 3188765 - RNA, 19 nt, Artificial Sequence
  Description of Artificial Sequence: Synthetic oligonucleotide
uggcggguggcgcagcggg

SEQ ID NO: 3188766 - RNA, 19 nt, Artificial Sequence
  Description of Artificial Sequence: Synthetic oligonucleotide
ucucgaaccugcagcucag

SEQ ID NO: 3188767 - RNA, 19 nt, Artificial Sequence
  Description of Artificial Sequence: Synthetic oligonucleotide
ggaguugcauuccugcacc

SEQ ID NO: 3188768 - RNA, 19 nt, Artificial Sequence
  Description of Artificial Sequence: Synthetic oligonucleotide
uggcauggacgaaaacagc

SEQ ID NO: 3188769 - RNA, 19 nt, Artificial Sequence
  Description of Artificial Sequence: Synthetic oligonucleotide
uucaguucgugcucucaac

SEQ ID NO: 3188770 - RNA, 19 nt, Artificial Sequence
  Description of Artificial Sequence: Synthetic oligonucleotide
caggaauacgugaccuggg

SEQ ID NO: 3188771 - RNA, 19 nt, Artificial Sequence
  Description of Artificial Sequence: Synthetic oligonucleotide
aaacucacugcuuagcucc

SEQ ID NO: 3188772 - RNA, 19 nt, Artificial Sequence
  Description of Artificial Sequence: Synthetic oligonucleotide
aaaaugaagagaucauccc

SEQ ID NO: 3188773 - RNA, 19 nt, Artificial Sequence
  Description of Artificial Sequence: Synthetic oligonucleotide
aaaauugauaagcaaagcu

SEQ ID NO: 3188774 - RNA, 19 nt, Artificial Sequence
  Description of Artificial Sequence: Synthetic oligonucleotide
agugauaucaaacucacug

SEQ ID NO: 3188775 - RNA, 19 nt, Artificial Sequence
  Description of Artificial Sequence: Synthetic oligonucleotide
uucauuaacaaacaauucu

SEQ ID NO: 3188776 - RNA, 19 nt, Artificial Sequence
  Description of Artificial Sequence: Synthetic oligonucleotide
uaacaaacaauucuguuug

SEQ ID NO: 3188777 - RNA, 19 nt, Artificial Sequence
  Description of Artificial Sequence: Synthetic oligonucleotide
ucauuaacaaacaauucug

SEQ ID NO: 3188778 - RNA, 19 nt, Artificial Sequence
  Description of Artificial Sequence: Synthetic oligonucleotide
agcaaauggacaucaaagc

SEQ ID NO: 3188779 - RNA, 19 nt, Artificial Sequence
  Description of Artificial Sequence: Synthetic oligonucleotide
aaauugauaagcaaagcug

SEQ ID NO: 3188780 - RNA, 19 nt, Artificial Sequence
  Description of Artificial Sequence: Synthetic oligonucleotide
aaugacaagacgaauaacu

SEQ ID NO: 3188781 - RNA, 19 nt, Artificial Sequence
  Description of Artificial Sequence: Synthetic oligonucleotide
aagugaaaguuucaucagg

SEQ ID NO: 3188782 - RNA, 19 nt, Artificial Sequence
  Description of Artificial Sequence: Synthetic oligonucleotide
uguuuguuccuccagcagg

SEQ ID NO: 3188783 - RNA, 19 nt, Artificial Sequence
  Description of Artificial Sequence: Synthetic oligonucleotide
aaacaauucuguuuguccu

SEQ ID NO: 3188784 - RNA, 19 nt, Artificial Sequence
  Description of Artificial Sequence: Synthetic oligonucleotide
agacgaauaacugugguac

SEQ ID NO: 3188785 - RNA, 19 nt, Artificial Sequence
  Description of Artificial Sequence: Synthetic oligonucleotide
ucucucaaugacaagacga

SEQ ID NO: 3188786 - RNA, 19 nt, Artificial Sequence
  Description of Artificial Sequence: Synthetic oligonucleotide
aaagugaaaguuucaucag

SEQ ID NO: 3188787 - RNA, 19 nt, Artificial Sequence
  Description of Artificial Sequence: Synthetic oligonucleotide
gucauuugcagacacagag

SEQ ID NO: 3188788 - RNA, 19 nt, Artificial Sequence
  Description of Artificial Sequence: Synthetic oligonucleotide
uuucuguuucuccaaaugc

SEQ ID NO: 3188789 - RNA, 19 nt, Artificial Sequence
  Description of Artificial Sequence: Synthetic oligonucleotide
cucuccaucagcaaugggg

SEQ ID NO: 3188790 - RNA, 19 nt, Artificial Sequence
  Description of Artificial Sequence: Synthetic oligonucleotide
uccacugguggaaagaaag

SEQ ID NO: 3188791 - RNA, 19 nt, Artificial Sequence
  Description of Artificial Sequence: Synthetic oligonucleotide
uccagcagggauaaaagcc

SEQ ID NO: 3188792 - RNA, 19 nt, Artificial Sequence
  Description of Artificial Sequence: Synthetic oligonucleotide
acagaaaccagccggacag

SEQ ID NO: 3188793 - RNA, 19 nt, Artificial Sequence
  Description of Artificial Sequence: Synthetic oligonucleotide
uggaaggucaucaucacac

SEQ ID NO: 3188794 - RNA, 19 nt, Artificial Sequence
  Description of Artificial Sequence: Synthetic oligonucleotide
aauugauaagcaaagcuga

SEQ ID NO: 3188795 - RNA, 19 nt, Artificial Sequence
  Description of Artificial Sequence: Synthetic oligonucleotide
uguuucauuaacaaacaau

SEQ ID NO: 3188796 - RNA, 19 nt, Artificial Sequence
  Description of Artificial Sequence: Synthetic oligonucleotide
agaaccaugugguacaucu

SEQ ID NO: 3188797 - RNA, 19 nt, Artificial Sequence
  Description of Artificial Sequence: Synthetic oligonucleotide
aggaucgucauuugcagac

SEQ ID NO: 3188798 - RNA, 19 nt, Artificial Sequence
  Description of Artificial Sequence: Synthetic oligonucleotide
caaacaauucuguuugucc

SEQ ID NO: 3188799 - RNA, 19 nt, Artificial Sequence
  Description of Artificial Sequence: Synthetic oligonucleotide
uauucucucaaugacaaga

SEQ ID NO: 3188800 - RNA, 19 nt, Artificial Sequence
  Description of Artificial Sequence: Synthetic oligonucleotide
acaguagcaguccuuggcc

SEQ ID NO: 3188801 - RNA, 19 nt, Artificial Sequence
  Description of Artificial Sequence: Synthetic oligonucleotide
agugaaaguuucaucaggc

SEQ ID NO: 3188802 - RNA, 19 nt, Artificial Sequence
  Description of Artificial Sequence: Synthetic oligonucleotide
acacaguccuguuuguucc

SEQ ID NO: 3188803 - RNA, 19 nt, Artificial Sequence
  Description of Artificial Sequence: Synthetic oligonucleotide
uccagugauaucaaacuca

SEQ ID NO: 3188804 - RNA, 19 nt, Artificial Sequence
  Description of Artificial Sequence: Synthetic oligonucleotide
aaagaaagucuccagugau

SEQ ID NO: 3188805 - RNA, 19 nt, Artificial Sequence
  Description of Artificial Sequence: Synthetic oligonucleotide
ugaaaguuucaucaggcuc

SEQ ID NO: 3188806 - RNA, 19 nt, Artificial Sequence
  Description of Artificial Sequence: Synthetic oligonucleotide
guuucuguaaugucaagug

SEQ ID NO: 3188807 - RNA, 19 nt, Artificial Sequence
  Description of Artificial Sequence: Synthetic oligonucleotide
uaaugucaagugaaaagug

SEQ ID NO: 3188808 - RNA, 19 nt, Artificial Sequence
  Description of Artificial Sequence: Synthetic oligonucleotide
agguguaucgucuggcagc

SEQ ID NO: 3188809 - RNA, 19 nt, Artificial Sequence
  Description of Artificial Sequence: Synthetic oligonucleotide
ucuccaaaugcaaaauuga

SEQ ID NO: 3188810 - RNA, 19 nt, Artificial Sequence
  Description of Artificial Sequence: Synthetic oligonucleotide
gacaagacgaauaacugug

SEQ ID NO: 3188811 - RNA, 19 nt, Artificial Sequence
  Description of Artificial Sequence: Synthetic oligonucleotide
uucuguuucuccaaaugca

SEQ ID NO: 3188812 - RNA, 19 nt, Artificial Sequence
  Description of Artificial Sequence: Synthetic oligonucleotide
uucagcgacacgauggcag

SEQ ID NO: 3188813 - RNA, 19 nt, Artificial Sequence
  Description of Artificial Sequence: Synthetic oligonucleotide
auccaaguuucacauuugc

SEQ ID NO: 3188814 - RNA, 19 nt, Artificial Sequence
  Description of Artificial Sequence: Synthetic oligonucleotide
cacacugcuauguacacag

SEQ ID NO: 3188815 - RNA, 19 nt, Artificial Sequence
  Description of Artificial Sequence: Synthetic oligonucleotide
agcauacucuuccugaauc

SEQ ID NO: 3188816 - RNA, 19 nt, Artificial Sequence
  Description of Artificial Sequence: Synthetic oligonucleotide
aaagccgcagcauauguau

SEQ ID NO: 3188817 - RNA, 19 nt, Artificial Sequence
  Description of Artificial Sequence: Synthetic oligonucleotide
acugcuauguacacagucc

SEQ ID NO: 3188818 - RNA, 19 nt, Artificial Sequence
  Description of Artificial Sequence: Synthetic oligonucleotide
aucaaagcucgcuucacuc

SEQ ID NO: 3188819 - RNA, 19 nt, Artificial Sequence
  Description of Artificial Sequence: Synthetic oligonucleotide
uuucauuaacaaacaauuc

SEQ ID NO: 3188820 - RNA, 19 nt, Artificial Sequence
  Description of Artificial Sequence: Synthetic oligonucleotide
gucuuuuccauucagcgac

SEQ ID NO: 3188821 - RNA, 19 nt, Artificial Sequence
  Description of Artificial Sequence: Synthetic oligonucleotide
gacaggauuacuaauaaaa

SEQ ID NO: 3188822 - RNA, 19 nt, Artificial Sequence
  Description of Artificial Sequence: Synthetic oligonucleotide
aguaacguuuguuggaucu

SEQ ID NO: 3188823 - RNA, 19 nt, Artificial Sequence
  Description of Artificial Sequence: Synthetic oligonucleotide
ucaagugaaaagugaaagu

SEQ ID NO: 3188824 - RNA, 19 nt, Artificial Sequence
  Description of Artificial Sequence: Synthetic oligonucleotide
ucuccaucagcaaugggga

SEQ ID NO: 3188825 - RNA, 19 nt, Artificial Sequence
  Description of Artificial Sequence: Synthetic oligonucleotide
gucaagugaaaagugaaag

SEQ ID NO: 3188826 - RNA, 19 nt, Artificial Sequence
  Description of Artificial Sequence: Synthetic oligonucleotide
ucuccagugauaucaaacu

SEQ ID NO: 3188827 - RNA, 19 nt, Artificial Sequence
  Description of Artificial Sequence: Synthetic oligonucleotide
auggcaguaacguuuguug

SEQ ID NO: 3188828 - RNA, 19 nt, Artificial Sequence
  Description of Artificial Sequence: Synthetic oligonucleotide
uguccugcaaaccuuauuu

SEQ ID NO: 3188829 - RNA, 19 nt, Artificial Sequence
  Description of Artificial Sequence: Synthetic oligonucleotide
ucaaacucacugcuuagcu

SEQ ID NO: 3188830 - RNA, 19 nt, Artificial Sequence
  Description of Artificial Sequence: Synthetic oligonucleotide
ucacacacugcuauguaca

SEQ ID NO: 3188831 - RNA, 19 nt, Artificial Sequence
  Description of Artificial Sequence: Synthetic oligonucleotide
acugcuuagcucccagugc

SEQ ID NO: 3188832 - RNA, 19 nt, Artificial Sequence
  Description of Artificial Sequence: Synthetic oligonucleotide
aaaauccacugguggaaag

SEQ ID NO: 3188833 - RNA, 19 nt, Artificial Sequence
  Description of Artificial Sequence: Synthetic oligonucleotide
ugugguacuuguuucauua

SEQ ID NO: 3188834 - RNA, 19 nt, Artificial Sequence
  Description of Artificial Sequence: Synthetic oligonucleotide
gauaagcaaagcugacagg

SEQ ID NO: 3188835 - RNA, 19 nt, Artificial Sequence
  Description of Artificial Sequence: Synthetic oligonucleotide
uucucucaaugacaagacg

SEQ ID NO: 3188836 - RNA, 19 nt, Artificial Sequence
  Description of Artificial Sequence: Synthetic oligonucleotide
uccaaaugcaaaauugaua

SEQ ID NO: 3188837 - RNA, 19 nt, Artificial Sequence
  Description of Artificial Sequence: Synthetic oligonucleotide
ugaggaucgucauuugcag

SEQ ID NO: 3188838 - RNA, 19 nt, Artificial Sequence
  Description of Artificial Sequence: Synthetic oligonucleotide
ucuacagaaaccagccgga

SEQ ID NO: 3188839 - RNA, 19 nt, Artificial Sequence
  Description of Artificial Sequence: Synthetic oligonucleotide
uuuguuggaucuccuauuc

SEQ ID NO: 3188840 - RNA, 19 nt, Artificial Sequence
  Description of Artificial Sequence: Synthetic oligonucleotide
ugacaagacgaauaacugu

SEQ ID NO: 3188841 - RNA, 19 nt, Artificial Sequence
  Description of Artificial Sequence: Synthetic oligonucleotide
gugauaucaaacucacugc

SEQ ID NO: 3188842 - RNA, 19 nt, Artificial Sequence
  Description of Artificial Sequence: Synthetic oligonucleotide
ucgucauuugcagacacag

SEQ ID NO: 3188843 - RNA, 19 nt, Artificial Sequence
  Description of Artificial Sequence: Synthetic oligonucleotide
aaccuuauuucuguuucuc

SEQ ID NO: 3188844 - RNA, 19 nt, Artificial Sequence
  Description of Artificial Sequence: Synthetic oligonucleotide
uguuggaucuccuauucuc

SEQ ID NO: 3188845 - RNA, 19 nt, Artificial Sequence
  Description of Artificial Sequence: Synthetic oligonucleotide
caaaccuuauuucuguuuc

SEQ ID NO: 3188846 - RNA, 19 nt, Artificial Sequence
  Description of Artificial Sequence: Synthetic oligonucleotide
uccuauucucucaaugaca

SEQ ID NO: 3188847 - RNA, 19 nt, Artificial Sequence
  Description of Artificial Sequence: Synthetic oligonucleotide
agggauaaaagccgcagca

SEQ ID NO: 3188848 - RNA, 19 nt, Artificial Sequence
  Description of Artificial Sequence: Synthetic oligonucleotide
augugguacaucuuuccag

SEQ ID NO: 3188849 - RNA, 19 nt, Artificial Sequence
  Description of Artificial Sequence: Synthetic oligonucleotide
ucuguuucuccaaaugcaa

SEQ ID NO: 3188850 - RNA, 19 nt, Artificial Sequence
  Description of Artificial Sequence: Synthetic oligonucleotide
gguacaucuuuccaggucc

SEQ ID NO: 3188851 - RNA, 19 nt, Artificial Sequence
  Description of Artificial Sequence: Synthetic oligonucleotide
acaauucuguuuguccugc

SEQ ID NO: 3188852 - RNA, 19 nt, Artificial Sequence
  Description of Artificial Sequence: Synthetic oligonucleotide
auaucaaacucacugcuua

SEQ ID NO: 3188853 - RNA, 19 nt, Artificial Sequence
  Description of Artificial Sequence: Synthetic oligonucleotide
uggcaguaacguuuguugg

SEQ ID NO: 3188854 - RNA, 19 nt, Artificial Sequence
  Description of Artificial Sequence: Synthetic oligonucleotide
auuaacaaacaauucuguu

SEQ ID NO: 3188855 - RNA, 19 nt, Artificial Sequence
  Description of Artificial Sequence: Synthetic oligonucleotide
gaaagaaagucuccaguga

SEQ ID NO: 3188856 - RNA, 19 nt, Artificial Sequence
  Description of Artificial Sequence: Synthetic oligonucleotide
aucgucuggcagcaaaugg

SEQ ID NO: 3188857 - RNA, 19 nt, Artificial Sequence
  Description of Artificial Sequence: Synthetic oligonucleotide
uacucuuccugaaucucag

SEQ ID NO: 3188858 - RNA, 19 nt, Artificial Sequence
  Description of Artificial Sequence: Synthetic oligonucleotide
uaaaagccgcagcauaugu

SEQ ID NO: 3188859 - RNA, 19 nt, Artificial Sequence
  Description of Artificial Sequence: Synthetic oligonucleotide
aggucaucaucacacacug

SEQ ID NO: 3188860 - RNA, 19 nt, Artificial Sequence
  Description of Artificial Sequence: Synthetic oligonucleotide
guuucacauuugcugaggg

SEQ ID NO: 3188861 - RNA, 19 nt, Artificial Sequence
  Description of Artificial Sequence: Synthetic oligonucleotide
uuuuccauucagcgacacg

SEQ ID NO: 3188862 - RNA, 19 nt, Artificial Sequence
  Description of Artificial Sequence: Synthetic oligonucleotide
ucuuccugaaucucaggug

SEQ ID NO: 3188863 - RNA, 19 nt, Artificial Sequence
  Description of Artificial Sequence: Synthetic oligonucleotide
ucuggcagcaaauggacau

SEQ ID NO: 3188864 - RNA, 19 nt, Artificial Sequence
  Description of Artificial Sequence: Synthetic oligonucleotide
ucuguaaugucaagugaaa

SEQ ID NO: 3188865 - RNA, 19 nt, Artificial Sequence
  Description of Artificial Sequence: Synthetic oligonucleotide
aaccaugugguacaucuuu

SEQ ID NO: 3188866 - RNA, 19 nt, Artificial Sequence
  Description of Artificial Sequence: Synthetic oligonucleotide
aaagcugacaggauuacua

SEQ ID NO: 3188867 - RNA, 19 nt, Artificial Sequence
  Description of Artificial Sequence: Synthetic oligonucleotide
uaucaaacucacugcuuag

SEQ ID NO: 3188868 - RNA, 19 nt, Artificial Sequence
  Description of Artificial Sequence: Synthetic oligonucleotide
uucuguuuguccugcaaac

SEQ ID NO: 3188869 - RNA, 19 nt, Artificial Sequence
  Description of Artificial Sequence: Synthetic oligonucleotide
ugguacuuguuucauuaac

SEQ ID NO: 3188870 - RNA, 19 nt, Artificial Sequence
  Description of Artificial Sequence: Synthetic oligonucleotide
ucgucuggcagcaaaugga

SEQ ID NO: 3188871 - RNA, 19 nt, Artificial Sequence
  Description of Artificial Sequence: Synthetic oligonucleotide
aaaguuaaagaacuguucc

SEQ ID NO: 3188872 - RNA, 19 nt, Artificial Sequence
  Description of Artificial Sequence: Synthetic oligonucleotide
auuucuucaacguauagac

SEQ ID NO: 3188873 - RNA, 19 nt, Artificial Sequence
  Description of Artificial Sequence: Synthetic oligonucleotide
aacuguuccuuuuacaggc

SEQ ID NO: 3188874 - RNA, 19 nt, Artificial Sequence
  Description of Artificial Sequence: Synthetic oligonucleotide
aauuaacgaacccucagag

SEQ ID NO: 3188875 - RNA, 19 nt, Artificial Sequence
  Description of Artificial Sequence: Synthetic oligonucleotide
uucuucaacguauagacgc

SEQ ID NO: 3188876 - RNA, 19 nt, Artificial Sequence
  Description of Artificial Sequence: Synthetic oligonucleotide
uaauacuggagaaacauga

SEQ ID NO: 3188877 - RNA, 19 nt, Artificial Sequence
  Description of Artificial Sequence: Synthetic oligonucleotide
aaaauuaacgaacccucag

SEQ ID NO: 3188878 - RNA, 19 nt, Artificial Sequence
  Description of Artificial Sequence: Synthetic oligonucleotide
uuaacgaacccucagagaa

SEQ ID NO: 3188879 - RNA, 19 nt, Artificial Sequence
  Description of Artificial Sequence: Synthetic oligonucleotide
uaagauaggauuccaaaca

SEQ ID NO: 3188880 - RNA, 19 nt, Artificial Sequence
  Description of Artificial Sequence: Synthetic oligonucleotide
aagauaggauuccaaacag

SEQ ID NO: 3188881 - RNA, 19 nt, Artificial Sequence
  Description of Artificial Sequence: Synthetic oligonucleotide
agaacuguuccuuuuacag

SEQ ID NO: 3188882 - RNA, 19 nt, Artificial Sequence
  Description of Artificial Sequence: Synthetic oligonucleotide
aaaaguuaaagaacuguuc

SEQ ID NO: 3188883 - RNA, 19 nt, Artificial Sequence
  Description of Artificial Sequence: Synthetic oligonucleotide
gucaugagcaccuugaagc

SEQ ID NO: 3188884 - RNA, 19 nt, Artificial Sequence
  Description of Artificial Sequence: Synthetic oligonucleotide
uugguuauugauaaucggc

SEQ ID NO: 3188885 - RNA, 19 nt, Artificial Sequence
  Description of Artificial Sequence: Synthetic oligonucleotide
aaagaacuguuccuuuuac

SEQ ID NO: 3188886 - RNA, 19 nt, Artificial Sequence
  Description of Artificial Sequence: Synthetic oligonucleotide
ugaaaauuaacgaacccuc

SEQ ID NO: 3188887 - RNA, 19 nt, Artificial Sequence
  Description of Artificial Sequence: Synthetic oligonucleotide
ucaaauuucuucaacguau

SEQ ID NO: 3188888 - RNA, 19 nt, Artificial Sequence
  Description of Artificial Sequence: Synthetic oligonucleotide
uaggauuccaaacagcaug

SEQ ID NO: 3188889 - RNA, 19 nt, Artificial Sequence
  Description of Artificial Sequence: Synthetic oligonucleotide
uacuggagaaacaugacug

SEQ ID NO: 3188890 - RNA, 19 nt, Artificial Sequence
  Description of Artificial Sequence: Synthetic oligonucleotide
cagcacaugaaaauuaacg

SEQ ID NO: 3188891 - RNA, 19 nt, Artificial Sequence
  Description of Artificial Sequence: Synthetic oligonucleotide
ugguuauugauaaucggcc

SEQ ID NO: 3188892 - RNA, 19 nt, Artificial Sequence
  Description of Artificial Sequence: Synthetic oligonucleotide
uugauaaucggccuggggu

SEQ ID NO: 3188893 - RNA, 19 nt, Artificial Sequence
  Description of Artificial Sequence: Synthetic oligonucleotide
gacucagucacguaguaag

SEQ ID NO: 3188894 - RNA, 19 nt, Artificial Sequence
  Description of Artificial Sequence: Synthetic oligonucleotide
cuuugguuauugauaaucg

SEQ ID NO: 3188895 - RNA, 19 nt, Artificial Sequence
  Description of Artificial Sequence: Synthetic oligonucleotide
uuugguuauugauaaucgg

SEQ ID NO: 3188896 - RNA, 19 nt, Artificial Sequence
  Description of Artificial Sequence: Synthetic oligonucleotide
agaaacaugacugcaacuc

SEQ ID NO: 3188897 - RNA, 19 nt, Artificial Sequence
  Description of Artificial Sequence: Synthetic oligonucleotide
aaauuaacgaacccucaga

SEQ ID NO: 3188898 - RNA, 19 nt, Artificial Sequence
  Description of Artificial Sequence: Synthetic oligonucleotide
ugaguauuugucgucaggg

SEQ ID NO: 3188899 - RNA, 19 nt, Artificial Sequence
  Description of Artificial Sequence: Synthetic oligonucleotide
cacaugaaaauuaacgaac

SEQ ID NO: 3188900 - RNA, 19 nt, Artificial Sequence
  Description of Artificial Sequence: Synthetic oligonucleotide
agucuguugucccauaggg

SEQ ID NO: 3188901 - RNA, 19 nt, Artificial Sequence
  Description of Artificial Sequence: Synthetic oligonucleotide
acugcucacggacugacgc

SEQ ID NO: 3188902 - RNA, 19 nt, Artificial Sequence
  Description of Artificial Sequence: Synthetic oligonucleotide
aacguauagacgcgaucgc

SEQ ID NO: 3188903 - RNA, 19 nt, Artificial Sequence
  Description of Artificial Sequence: Synthetic oligonucleotide
gacgcgaucgcccugcucg

SEQ ID NO: 3188904 - RNA, 19 nt, Artificial Sequence
  Description of Artificial Sequence: Synthetic oligonucleotide
acaugaaaauuaacgaacc

SEQ ID NO: 3188905 - RNA, 19 nt, Artificial Sequence
  Description of Artificial Sequence: Synthetic oligonucleotide
aaggcuucacugcucacgg

SEQ ID NO: 3188906 - RNA, 19 nt, Artificial Sequence
  Description of Artificial Sequence: Synthetic oligonucleotide
agcacaugaaaauuaacga

SEQ ID NO: 3188907 - RNA, 19 nt, Artificial Sequence
  Description of Artificial Sequence: Synthetic oligonucleotide
acuggagaaacaugacugc

SEQ ID NO: 3188908 - RNA, 19 nt, Artificial Sequence
  Description of Artificial Sequence: Synthetic oligonucleotide
aacaggacgcgguugcugg

SEQ ID NO: 3188909 - RNA, 19 nt, Artificial Sequence
  Description of Artificial Sequence: Synthetic oligonucleotide
aaauuucuucaacguauag

SEQ ID NO: 3188910 - RNA, 19 nt, Artificial Sequence
  Description of Artificial Sequence: Synthetic oligonucleotide
aauuucuucaacguauaga

SEQ ID NO: 3188911 - RNA, 19 nt, Artificial Sequence
  Description of Artificial Sequence: Synthetic oligonucleotide
uuauugauaaucggccugg

SEQ ID NO: 3188912 - RNA, 19 nt, Artificial Sequence
  Description of Artificial Sequence: Synthetic oligonucleotide
aaguuaaagaacuguuccu

SEQ ID NO: 3188913 - RNA, 19 nt, Artificial Sequence
  Description of Artificial Sequence: Synthetic oligonucleotide
gacagacucagucacguag

SEQ ID NO: 3188914 - RNA, 19 nt, Artificial Sequence
  Description of Artificial Sequence: Synthetic oligonucleotide
agagcaagucuguuguccc

SEQ ID NO: 3188915 - RNA, 19 nt, Artificial Sequence
  Description of Artificial Sequence: Synthetic oligonucleotide
ucuguugucccauaggguc

SEQ ID NO: 3188916 - RNA, 19 nt, Artificial Sequence
  Description of Artificial Sequence: Synthetic oligonucleotide
ucuucaacguauagacgcg

SEQ ID NO: 3188917 - RNA, 19 nt, Artificial Sequence
  Description of Artificial Sequence: Synthetic oligonucleotide
gaacuguuccuuuuacagg

SEQ ID NO: 3188918 - RNA, 19 nt, Artificial Sequence
  Description of Artificial Sequence: Synthetic oligonucleotide
aauacuggagaaacaugac

SEQ ID NO: 3188919 - RNA, 19 nt, Artificial Sequence
  Description of Artificial Sequence: Synthetic oligonucleotide
auagggucaaauuucuuca

SEQ ID NO: 3188920 - RNA, 19 nt, Artificial Sequence
  Description of Artificial Sequence: Synthetic oligonucleotide
gugucuugaguauuugucg

SEQ ID NO: 3188921 - RNA, 19 nt, Artificial Sequence
  Description of Artificial Sequence: Synthetic oligonucleotide
uuucuucaacguauagacg

SEQ ID NO: 3188922 - RNA, 19 nt, Artificial Sequence
  Description of Artificial Sequence: Synthetic oligonucleotide
caacguauagacgcgaucg

SEQ ID NO: 3188923 - RNA, 19 nt, Artificial Sequence
  Description of Artificial Sequence: Synthetic oligonucleotide
uugaagcgucucuugaugg

SEQ ID NO: 3188924 - RNA, 19 nt, Artificial Sequence
  Description of Artificial Sequence: Synthetic oligonucleotide
gauaggauuccaaacagca

SEQ ID NO: 3188925 - RNA, 19 nt, Artificial Sequence
  Description of Artificial Sequence: Synthetic oligonucleotide
aguaagauaggauuccaaa

SEQ ID NO: 3188926 - RNA, 19 nt, Artificial Sequence
  Description of Artificial Sequence: Synthetic oligonucleotide
ucaugagcaccuugaagcg

SEQ ID NO: 3188927 - RNA, 19 nt, Artificial Sequence
  Description of Artificial Sequence: Synthetic oligonucleotide
cauagggucaaauuucuuc

SEQ ID NO: 3188928 - RNA, 19 nt, Artificial Sequence
  Description of Artificial Sequence: Synthetic oligonucleotide
aagucuguugucccauagg

SEQ ID NO: 3188929 - RNA, 19 nt, Artificial Sequence
  Description of Artificial Sequence: Synthetic oligonucleotide
guaagauaggauuccaaac

SEQ ID NO: 3188930 - RNA, 19 nt, Artificial Sequence
  Description of Artificial Sequence: Synthetic oligonucleotide
aguauuugucgucagggga

SEQ ID NO: 3188931 - RNA, 19 nt, Artificial Sequence
  Description of Artificial Sequence: Synthetic oligonucleotide
augaaaauuaacgaacccu

SEQ ID NO: 3188932 - RNA, 19 nt, Artificial Sequence
  Description of Artificial Sequence: Synthetic oligonucleotide
uugaguauuugucgucagg

SEQ ID NO: 3188933 - RNA, 19 nt, Artificial Sequence
  Description of Artificial Sequence: Synthetic oligonucleotide
cagucacguaguaagauag

SEQ ID NO: 3188934 - RNA, 19 nt, Artificial Sequence
  Description of Artificial Sequence: Synthetic oligonucleotide
guugagguaauacuggaga

SEQ ID NO: 3188935 - RNA, 19 nt, Artificial Sequence
  Description of Artificial Sequence: Synthetic oligonucleotide
aacaugacugcaacucagc

SEQ ID NO: 3188936 - RNA, 19 nt, Artificial Sequence
  Description of Artificial Sequence: Synthetic oligonucleotide
guuauugauaaucggccug

SEQ ID NO: 3188937 - RNA, 19 nt, Artificial Sequence
  Description of Artificial Sequence: Synthetic oligonucleotide
uuccaaacagcaugggaag

SEQ ID NO: 3188938 - RNA, 19 nt, Artificial Sequence
  Description of Artificial Sequence: Synthetic oligonucleotide
caugaaaauuaacgaaccc

SEQ ID NO: 3188939 - RNA, 19 nt, Artificial Sequence
  Description of Artificial Sequence: Synthetic oligonucleotide
gaguauuugucgucagggg

SEQ ID NO: 3188940 - RNA, 19 nt, Artificial Sequence
  Description of Artificial Sequence: Synthetic oligonucleotide
cucguugagguaauacugg

SEQ ID NO: 3188941 - RNA, 19 nt, Artificial Sequence
  Description of Artificial Sequence: Synthetic oligonucleotide
aagaacuguuccuuuuaca

SEQ ID NO: 3188942 - RNA, 19 nt, Artificial Sequence
  Description of Artificial Sequence: Synthetic oligonucleotide
gagguaauacuggagaaac

SEQ ID NO: 3188943 - RNA, 19 nt, Artificial Sequence
  Description of Artificial Sequence: Synthetic oligonucleotide
auugauaaucggccugggg

SEQ ID NO: 3188944 - RNA, 19 nt, Artificial Sequence
  Description of Artificial Sequence: Synthetic oligonucleotide
acccucagagaacaggacg

SEQ ID NO: 3188945 - RNA, 19 nt, Artificial Sequence
  Description of Artificial Sequence: Synthetic oligonucleotide
aaacaugacugcaacucag

SEQ ID NO: 3188946 - RNA, 19 nt, Artificial Sequence
  Description of Artificial Sequence: Synthetic oligonucleotide
auacuggagaaacaugacu

SEQ ID NO: 3188947 - RNA, 19 nt, Artificial Sequence
  Description of Artificial Sequence: Synthetic oligonucleotide
agggucaaauuucuucaac

SEQ ID NO: 3188948 - RNA, 19 nt, Artificial Sequence
  Description of Artificial Sequence: Synthetic oligonucleotide
gggucaaauuucuucaacg

SEQ ID NO: 3188949 - RNA, 19 nt, Artificial Sequence
  Description of Artificial Sequence: Synthetic oligonucleotide
aacagcaugggaaggcuuc

SEQ ID NO: 3188950 - RNA, 19 nt, Artificial Sequence
  Description of Artificial Sequence: Synthetic oligonucleotide
ugucuugaguauuugucgu

SEQ ID NO: 3188951 - RNA, 19 nt, Artificial Sequence
  Description of Artificial Sequence: Synthetic oligonucleotide
gaaggcuucacugcucacg

SEQ ID NO: 3188952 - RNA, 19 nt, Artificial Sequence
  Description of Artificial Sequence: Synthetic oligonucleotide
ucagagaacaggacgcggu

SEQ ID NO: 3188953 - RNA, 19 nt, Artificial Sequence
  Description of Artificial Sequence: Synthetic oligonucleotide
uuacaggcgaugcccauca

SEQ ID NO: 3188954 - RNA, 19 nt, Artificial Sequence
  Description of Artificial Sequence: Synthetic oligonucleotide
uaaagaacuguuccuuuua

SEQ ID NO: 3188955 - RNA, 19 nt, Artificial Sequence
  Description of Artificial Sequence: Synthetic oligonucleotide
agauaggauuccaaacagc

SEQ ID NO: 3188956 - RNA, 19 nt, Artificial Sequence
  Description of Artificial Sequence: Synthetic oligonucleotide
ucacgacagacucagucac

SEQ ID NO: 3188957 - RNA, 19 nt, Artificial Sequence
  Description of Artificial Sequence: Synthetic oligonucleotide
ucccauagggucaaauuuc

SEQ ID NO: 3188958 - RNA, 19 nt, Artificial Sequence
  Description of Artificial Sequence: Synthetic oligonucleotide
gagaacaggacgcgguugc

SEQ ID NO: 3188959 - RNA, 19 nt, Artificial Sequence
  Description of Artificial Sequence: Synthetic oligonucleotide
ugcucguugagguaauacu

SEQ ID NO: 3188960 - RNA, 19 nt, Artificial Sequence
  Description of Artificial Sequence: Synthetic oligonucleotide
ucuugauggugauucggug

SEQ ID NO: 3188961 - RNA, 19 nt, Artificial Sequence
  Description of Artificial Sequence: Synthetic oligonucleotide
caugggaaggcuucacugc

SEQ ID NO: 3188962 - RNA, 19 nt, Artificial Sequence
  Description of Artificial Sequence: Synthetic oligonucleotide
ucucuugauggugauucgg

SEQ ID NO: 3188963 - RNA, 19 nt, Artificial Sequence
  Description of Artificial Sequence: Synthetic oligonucleotide
ugggucaugagcaccuuga

SEQ ID NO: 3188964 - RNA, 19 nt, Artificial Sequence
  Description of Artificial Sequence: Synthetic oligonucleotide
ugauucggugucuugagua

SEQ ID NO: 3188965 - RNA, 19 nt, Artificial Sequence
  Description of Artificial Sequence: Synthetic oligonucleotide
aacgaacccucagagaaca

SEQ ID NO: 3188966 - RNA, 19 nt, Artificial Sequence
  Description of Artificial Sequence: Synthetic oligonucleotide
uugauggugauucgguguc

SEQ ID NO: 3188967 - RNA, 19 nt, Artificial Sequence
  Description of Artificial Sequence: Synthetic oligonucleotide
aucacgacagacucaguca

SEQ ID NO: 3188968 - RNA, 19 nt, Artificial Sequence
  Description of Artificial Sequence: Synthetic oligonucleotide
ucuugaguauuugucguca

SEQ ID NO: 3188969 - RNA, 19 nt, Artificial Sequence
  Description of Artificial Sequence: Synthetic oligonucleotide
gaaacaugacugcaacuca

SEQ ID NO: 3188970 - RNA, 19 nt, Artificial Sequence
  Description of Artificial Sequence: Synthetic oligonucleotide
auuccaaacagcaugggaa

SEQ ID NO: 3188971 - RNA, 19 nt, Artificial Sequence
  Description of Artificial Sequence: Synthetic oligonucleotide
aaggaaaucauauaaaccc

SEQ ID NO: 3188972 - RNA, 19 nt, Artificial Sequence
  Description of Artificial Sequence: Synthetic oligonucleotide
aaaacaaugauacacgugg

SEQ ID NO: 3188973 - RNA, 19 nt, Artificial Sequence
  Description of Artificial Sequence: Synthetic oligonucleotide
aauaaaggaaaucauauaa

SEQ ID NO: 3188974 - RNA, 19 nt, Artificial Sequence
  Description of Artificial Sequence: Synthetic oligonucleotide
uaaauuauuaauaacuggu

SEQ ID NO: 3188975 - RNA, 19 nt, Artificial Sequence
  Description of Artificial Sequence: Synthetic oligonucleotide
uucuaaauuauuaauaacu

SEQ ID NO: 3188976 - RNA, 19 nt, Artificial Sequence
  Description of Artificial Sequence: Synthetic oligonucleotide
aguacuguagacuaacugc

SEQ ID NO: 3188977 - RNA, 19 nt, Artificial Sequence
  Description of Artificial Sequence: Synthetic oligonucleotide
auuauuaauaacugguuac

SEQ ID NO: 3188978 - RNA, 19 nt, Artificial Sequence
  Description of Artificial Sequence: Synthetic oligonucleotide
aauaaauaaaacuaccaaa

SEQ ID NO: 3188979 - RNA, 19 nt, Artificial Sequence
  Description of Artificial Sequence: Synthetic oligonucleotide
aaaucauauaaacccauuc

SEQ ID NO: 3188980 - RNA, 19 nt, Artificial Sequence
  Description of Artificial Sequence: Synthetic oligonucleotide
aaaauaauaauaaaggaaa

SEQ ID NO: 3188981 - RNA, 19 nt, Artificial Sequence
  Description of Artificial Sequence: Synthetic oligonucleotide
aauaauaauaaaggaaauc

SEQ ID NO: 3188982 - RNA, 19 nt, Artificial Sequence
  Description of Artificial Sequence: Synthetic oligonucleotide
ucuaaauuauuaauaacug

SEQ ID NO: 3188983 - RNA, 19 nt, Artificial Sequence
  Description of Artificial Sequence: Synthetic oligonucleotide
uuaauaacugguuacagcu

SEQ ID NO: 3188984 - RNA, 19 nt, Artificial Sequence
  Description of Artificial Sequence: Synthetic oligonucleotide
aaaggaaaucauauaaacc

SEQ ID NO: 3188985 - RNA, 19 nt, Artificial Sequence
  Description of Artificial Sequence: Synthetic oligonucleotide
auuaauaacugguuacagc

SEQ ID NO: 3188986 - RNA, 19 nt, Artificial Sequence
  Description of Artificial Sequence: Synthetic oligonucleotide
auuaaaaucacacuaacuu

SEQ ID NO: 3188987 - RNA, 19 nt, Artificial Sequence
  Description of Artificial Sequence: Synthetic oligonucleotide
uauaaacccauucugaaac

SEQ ID NO: 3188988 - RNA, 19 nt, Artificial Sequence
  Description of Artificial Sequence: Synthetic oligonucleotide
ugauagaauaaauaaaacu

SEQ ID NO: 3188989 - RNA, 19 nt, Artificial Sequence
  Description of Artificial Sequence: Synthetic oligonucleotide
auaauaauaaaggaaauca

SEQ ID NO: 3188990 - RNA, 19 nt, Artificial Sequence
  Description of Artificial Sequence: Synthetic oligonucleotide
aagaaaaguccugaaauac

SEQ ID NO: 3188991 - RNA, 19 nt, Artificial Sequence
  Description of Artificial Sequence: Synthetic oligonucleotide
aaucauauaaacccauucu

SEQ ID NO: 3188992 - RNA, 19 nt, Artificial Sequence
  Description of Artificial Sequence: Synthetic oligonucleotide
ugcacaauuaaaaucacac

SEQ ID NO: 3188993 - RNA, 19 nt, Artificial Sequence
  Description of Artificial Sequence: Synthetic oligonucleotide
uagugcacaauuaaaauca

SEQ ID NO: 3188994 - RNA, 19 nt, Artificial Sequence
  Description of Artificial Sequence: Synthetic oligonucleotide
cuaaauuauuaauaacugg

SEQ ID NO: 3188995 - RNA, 19 nt, Artificial Sequence
  Description of Artificial Sequence: Synthetic oligonucleotide
ugaaauacagaaaugcccu

SEQ ID NO: 3188996 - RNA, 19 nt, Artificial Sequence
  Description of Artificial Sequence: Synthetic oligonucleotide
aauaacugguuacagcuug

SEQ ID NO: 3188997 - RNA, 19 nt, Artificial Sequence
  Description of Artificial Sequence: Synthetic oligonucleotide
uagaauaaauaaaacuacc

SEQ ID NO: 3188998 - RNA, 19 nt, Artificial Sequence
  Description of Artificial Sequence: Synthetic oligonucleotide
uccacuauuucacagaagu

SEQ ID NO: 3188999 - RNA, 19 nt, Artificial Sequence
  Description of Artificial Sequence: Synthetic oligonucleotide
uaaaggaaaucauauaaac

SEQ ID NO: 3189000 - RNA, 19 nt, Artificial Sequence
  Description of Artificial Sequence: Synthetic oligonucleotide
auagaauaaauaaaacuac

SEQ ID NO: 3189001 - RNA, 19 nt, Artificial Sequence
  Description of Artificial Sequence: Synthetic oligonucleotide
aaauacagaaaugcccucc

SEQ ID NO: 3189002 - RNA, 19 nt, Artificial Sequence
  Description of Artificial Sequence: Synthetic oligonucleotide
uagacuaacugcuuaauug

SEQ ID NO: 3189003 - RNA, 19 nt, Artificial Sequence
  Description of Artificial Sequence: Synthetic oligonucleotide
gauagaauaaauaaaacua

SEQ ID NO: 3189004 - RNA, 19 nt, Artificial Sequence
  Description of Artificial Sequence: Synthetic oligonucleotide
aacaaugauacacgugggg

SEQ ID NO: 3189005 - RNA, 19 nt, Artificial Sequence
  Description of Artificial Sequence: Synthetic oligonucleotide
aauuauuaauaacugguua

SEQ ID NO: 3189006 - RNA, 19 nt, Artificial Sequence
  Description of Artificial Sequence: Synthetic oligonucleotide
auucuaaauuauuaauaac

SEQ ID NO: 3189007 - RNA, 19 nt, Artificial Sequence
  Description of Artificial Sequence: Synthetic oligonucleotide
cugaaauacagaaaugccc

SEQ ID NO: 3189008 - RNA, 19 nt, Artificial Sequence
  Description of Artificial Sequence: Synthetic oligonucleotide
aaaaccaauugcugcugcc

SEQ ID NO: 3189009 - RNA, 19 nt, Artificial Sequence
  Description of Artificial Sequence: Synthetic oligonucleotide
aaaguccugaaauacagaa

SEQ ID NO: 3189010 - RNA, 19 nt, Artificial Sequence
  Description of Artificial Sequence: Synthetic oligonucleotide
acugguuacagcuugguug

SEQ ID NO: 3189011 - RNA, 19 nt, Artificial Sequence
  Description of Artificial Sequence: Synthetic oligonucleotide
agaaaugcccuccuccucc

SEQ ID NO: 3189012 - RNA, 19 nt, Artificial Sequence
  Description of Artificial Sequence: Synthetic oligonucleotide
ucauauaaacccauucuga

SEQ ID NO: 3189013 - RNA, 19 nt, Artificial Sequence
  Description of Artificial Sequence: Synthetic oligonucleotide
aguaaaacaaugauacacg

SEQ ID NO: 3189014 - RNA, 19 nt, Artificial Sequence
  Description of Artificial Sequence: Synthetic oligonucleotide
aucauauaaacccauucug

SEQ ID NO: 3189015 - RNA, 19 nt, Artificial Sequence
  Description of Artificial Sequence: Synthetic oligonucleotide
uuuaguaaguuaaauguuu

SEQ ID NO: 3189016 - RNA, 19 nt, Artificial Sequence
  Description of Artificial Sequence: Synthetic oligonucleotide
uucugaaaccccaagaaaa

SEQ ID NO: 3189017 - RNA, 19 nt, Artificial Sequence
  Description of Artificial Sequence: Synthetic oligonucleotide
uaaguuaaauguuuuauuu

SEQ ID NO: 3189018 - RNA, 19 nt, Artificial Sequence
  Description of Artificial Sequence: Synthetic oligonucleotide
uuaaaaucacacuaacuuc

SEQ ID NO: 3189019 - RNA, 19 nt, Artificial Sequence
  Description of Artificial Sequence: Synthetic oligonucleotide
aauugcugcugccuaagag

SEQ ID NO: 3189020 - RNA, 19 nt, Artificial Sequence
  Description of Artificial Sequence: Synthetic oligonucleotide
gaauaaauaaaacuaccaa

SEQ ID NO: 3189021 - RNA, 19 nt, Artificial Sequence
  Description of Artificial Sequence: Synthetic oligonucleotide
uuucacagaaguacuguag

SEQ ID NO: 3189022 - RNA, 19 nt, Artificial Sequence
  Description of Artificial Sequence: Synthetic oligonucleotide
gaaaaguccugaaauacag

SEQ ID NO: 3189023 - RNA, 19 nt, Artificial Sequence
  Description of Artificial Sequence: Synthetic oligonucleotide
ucugaaaccccaagaaaag

SEQ ID NO: 3189024 - RNA, 19 nt, Artificial Sequence
  Description of Artificial Sequence: Synthetic oligonucleotide
aaguacuguagacuaacug

SEQ ID NO: 3189025 - RNA, 19 nt, Artificial Sequence
  Description of Artificial Sequence: Synthetic oligonucleotide
uccugaaauacagaaaugc

SEQ ID NO: 3189026 - RNA, 19 nt, Artificial Sequence
  Description of Artificial Sequence: Synthetic oligonucleotide
aacugcuuaauuguccugg

SEQ ID NO: 3189027 - RNA, 19 nt, Artificial Sequence
  Description of Artificial Sequence: Synthetic oligonucleotide
auaaauaaaacuaccaaaa

SEQ ID NO: 3189028 - RNA, 19 nt, Artificial Sequence
  Description of Artificial Sequence: Synthetic oligonucleotide
agacugauagaauaaauaa

SEQ ID NO: 3189029 - RNA, 19 nt, Artificial Sequence
  Description of Artificial Sequence: Synthetic oligonucleotide
aaacuccagugcuacaagg

SEQ ID NO: 3189030 - RNA, 19 nt, Artificial Sequence
  Description of Artificial Sequence: Synthetic oligonucleotide
aauaauaaaggaaaucaua

SEQ ID NO: 3189031 - RNA, 19 nt, Artificial Sequence
  Description of Artificial Sequence: Synthetic oligonucleotide
aacuaaacuccagugcuac

SEQ ID NO: 3189032 - RNA, 19 nt, Artificial Sequence
  Description of Artificial Sequence: Synthetic oligonucleotide
aguccugaaauacagaaau

SEQ ID NO: 3189033 - RNA, 19 nt, Artificial Sequence
  Description of Artificial Sequence: Synthetic oligonucleotide
uaauaauaaaggaaaucau

SEQ ID NO: 3189034 - RNA, 19 nt, Artificial Sequence
  Description of Artificial Sequence: Synthetic oligonucleotide
uacaagggcaguaaaacaa

SEQ ID NO: 3189035 - RNA, 19 nt, Artificial Sequence
  Description of Artificial Sequence: Synthetic oligonucleotide
uacagaaaugcccuccucc

SEQ ID NO: 3189036 - RNA, 19 nt, Artificial Sequence
  Description of Artificial Sequence: Synthetic oligonucleotide
uaaaacaaugauacacgug

SEQ ID NO: 3189037 - RNA, 19 nt, Artificial Sequence
  Description of Artificial Sequence: Synthetic oligonucleotide
auaaacccauucugaaacc

SEQ ID NO: 3189038 - RNA, 19 nt, Artificial Sequence
  Description of Artificial Sequence: Synthetic oligonucleotide
uccaacuaaacuccagugc

SEQ ID NO: 3189039 - RNA, 19 nt, Artificial Sequence
  Description of Artificial Sequence: Synthetic oligonucleotide
caguaaaacaaugauacac

SEQ ID NO: 3189040 - RNA, 19 nt, Artificial Sequence
  Description of Artificial Sequence: Synthetic oligonucleotide
uuacauucuaaauuauuaa

SEQ ID NO: 3189041 - RNA, 19 nt, Artificial Sequence
  Description of Artificial Sequence: Synthetic oligonucleotide
auaauaaaggaaaucauau

SEQ ID NO: 3189042 - RNA, 19 nt, Artificial Sequence
  Description of Artificial Sequence: Synthetic oligonucleotide
ugggauuacauucuaaauu

SEQ ID NO: 3189043 - RNA, 19 nt, Artificial Sequence
  Description of Artificial Sequence: Synthetic oligonucleotide
uuguagugcacaauuaaaa

SEQ ID NO: 3189044 - RNA, 19 nt, Artificial Sequence
  Description of Artificial Sequence: Synthetic oligonucleotide
uuccaaaaccaauugcugc

SEQ ID NO: 3189045 - RNA, 19 nt, Artificial Sequence
  Description of Artificial Sequence: Synthetic oligonucleotide
acugauagaauaaauaaaa

SEQ ID NO: 3189046 - RNA, 19 nt, Artificial Sequence
  Description of Artificial Sequence: Synthetic oligonucleotide
uuauuaauaacugguuaca

SEQ ID NO: 3189047 - RNA, 19 nt, Artificial Sequence
  Description of Artificial Sequence: Synthetic oligonucleotide
aauacagaaaugcccuccu

SEQ ID NO: 3189048 - RNA, 19 nt, Artificial Sequence
  Description of Artificial Sequence: Synthetic oligonucleotide
aauuaaaaucacacuaacu

SEQ ID NO: 3189049 - RNA, 19 nt, Artificial Sequence
  Description of Artificial Sequence: Synthetic oligonucleotide
uauuaauaacugguuacag

SEQ ID NO: 3189050 - RNA, 19 nt, Artificial Sequence
  Description of Artificial Sequence: Synthetic oligonucleotide
uacauucuaaauuauuaau

SEQ ID NO: 3189051 - RNA, 19 nt, Artificial Sequence
  Description of Artificial Sequence: Synthetic oligonucleotide
uucacagaaguacuguaga

SEQ ID NO: 3189052 - RNA, 19 nt, Artificial Sequence
  Description of Artificial Sequence: Synthetic oligonucleotide
aaguuaaauguuuuauuuu

SEQ ID NO: 3189053 - RNA, 19 nt, Artificial Sequence
  Description of Artificial Sequence: Synthetic oligonucleotide
ugcugcgugucauaguugg

SEQ ID NO: 3189054 - RNA, 19 nt, Artificial Sequence
  Description of Artificial Sequence: Synthetic oligonucleotide
acuccagugcuacaagggc

SEQ ID NO: 3189055 - RNA, 19 nt, Artificial Sequence
  Description of Artificial Sequence: Synthetic oligonucleotide
uuuuaguaaguuaaauguu

SEQ ID NO: 3189056 - RNA, 19 nt, Artificial Sequence
  Description of Artificial Sequence: Synthetic oligonucleotide
acuaacugcuuaauugucc

SEQ ID NO: 3189057 - RNA, 19 nt, Artificial Sequence
  Description of Artificial Sequence: Synthetic oligonucleotide
uuuccaacuaaacuccagu

SEQ ID NO: 3189058 - RNA, 19 nt, Artificial Sequence
  Description of Artificial Sequence: Synthetic oligonucleotide
ugaaaccccaagaaaaguc

SEQ ID NO: 3189059 - RNA, 19 nt, Artificial Sequence
  Description of Artificial Sequence: Synthetic oligonucleotide
agaaguacuguagacuaac

SEQ ID NO: 3189060 - RNA, 19 nt, Artificial Sequence
  Description of Artificial Sequence: Synthetic oligonucleotide
ggcaguaaaacaaugauac

SEQ ID NO: 3189061 - RNA, 19 nt, Artificial Sequence
  Description of Artificial Sequence: Synthetic oligonucleotide
agaauaaauaaaacuacca

SEQ ID NO: 3189062 - RNA, 19 nt, Artificial Sequence
  Description of Artificial Sequence: Synthetic oligonucleotide
cacuauuucacagaaguac

SEQ ID NO: 3189063 - RNA, 19 nt, Artificial Sequence
  Description of Artificial Sequence: Synthetic oligonucleotide
aaacccauucugaaacccc

SEQ ID NO: 3189064 - RNA, 19 nt, Artificial Sequence
  Description of Artificial Sequence: Synthetic oligonucleotide
cugauagaauaaauaaaac

SEQ ID NO: 3189065 - RNA, 19 nt, Artificial Sequence
  Description of Artificial Sequence: Synthetic oligonucleotide
cauucuaaauuauuaauaa

SEQ ID NO: 3189066 - RNA, 19 nt, Artificial Sequence
  Description of Artificial Sequence: Synthetic oligonucleotide
uguagugcacaauuaaaau

SEQ ID NO: 3189067 - RNA, 19 nt, Artificial Sequence
  Description of Artificial Sequence: Synthetic oligonucleotide
agacuaacugcuuaauugu

SEQ ID NO: 3189068 - RNA, 19 nt, Artificial Sequence
  Description of Artificial Sequence: Synthetic oligonucleotide
uccaaaaccaauugcugcu

SEQ ID NO: 3189069 - RNA, 19 nt, Artificial Sequence
  Description of Artificial Sequence: Synthetic oligonucleotide
caauuaaaaucacacuaac

SEQ ID NO: 3189070 - RNA, 19 nt, Artificial Sequence
  Description of Artificial Sequence: Synthetic oligonucleotide
ugcuuaauuguccugggau

SEQ ID NO: 3189071 - RNA, 19 nt, Artificial Sequence
  Description of Artificial Sequence: Synthetic oligonucleotide
aauuauuuccacuggaccc

SEQ ID NO: 3189072 - RNA, 19 nt, Artificial Sequence
  Description of Artificial Sequence: Synthetic oligonucleotide
auuuucaacaaccaggcgc

SEQ ID NO: 3189073 - RNA, 19 nt, Artificial Sequence
  Description of Artificial Sequence: Synthetic oligonucleotide
aagaaaagagccuccaaac

SEQ ID NO: 3189074 - RNA, 19 nt, Artificial Sequence
  Description of Artificial Sequence: Synthetic oligonucleotide
aauaaaugcagcgugugcg

SEQ ID NO: 3189075 - RNA, 19 nt, Artificial Sequence
  Description of Artificial Sequence: Synthetic oligonucleotide
uguaugaucuaaaagugca

SEQ ID NO: 3189076 - RNA, 19 nt, Artificial Sequence
  Description of Artificial Sequence: Synthetic oligonucleotide
uggaauuccucucaugucg

SEQ ID NO: 3189077 - RNA, 19 nt, Artificial Sequence
  Description of Artificial Sequence: Synthetic oligonucleotide
gacacaauuaagaaaagag

SEQ ID NO: 3189078 - RNA, 19 nt, Artificial Sequence
  Description of Artificial Sequence: Synthetic oligonucleotide
aacgaaauauaucccgaac

SEQ ID NO: 3189079 - RNA, 19 nt, Artificial Sequence
  Description of Artificial Sequence: Synthetic oligonucleotide
agugcaauuauuuccacug

SEQ ID NO: 3189080 - RNA, 19 nt, Artificial Sequence
  Description of Artificial Sequence: Synthetic oligonucleotide
agcucaacacaccaaaucg

SEQ ID NO: 3189081 - RNA, 19 nt, Artificial Sequence
  Description of Artificial Sequence: Synthetic oligonucleotide
uguaagaaggaaaauuuuc

SEQ ID NO: 3189082 - RNA, 19 nt, Artificial Sequence
  Description of Artificial Sequence: Synthetic oligonucleotide
agagccuccaaacuucucc

SEQ ID NO: 3189083 - RNA, 19 nt, Artificial Sequence
  Description of Artificial Sequence: Synthetic oligonucleotide
uuuucaacaaccaggcgca

SEQ ID NO: 3189084 - RNA, 19 nt, Artificial Sequence
  Description of Artificial Sequence: Synthetic oligonucleotide
acacaauuaagaaaagagc

SEQ ID NO: 3189085 - RNA, 19 nt, Artificial Sequence
  Description of Artificial Sequence: Synthetic oligonucleotide
ucuaaaagugcaauuauuu

SEQ ID NO: 3189086 - RNA, 19 nt, Artificial Sequence
  Description of Artificial Sequence: Synthetic oligonucleotide
aauucgaugccucucuucu

SEQ ID NO: 3189087 - RNA, 19 nt, Artificial Sequence
  Description of Artificial Sequence: Synthetic oligonucleotide
uauaucccgaacuucaucu

SEQ ID NO: 3189088 - RNA, 19 nt, Artificial Sequence
  Description of Artificial Sequence: Synthetic oligonucleotide
uaaacaagaaucugaggca

SEQ ID NO: 3189089 - RNA, 19 nt, Artificial Sequence
  Description of Artificial Sequence: Synthetic oligonucleotide
aaauauaucccgaacuuca

SEQ ID NO: 3189090 - RNA, 19 nt, Artificial Sequence
  Description of Artificial Sequence: Synthetic oligonucleotide
agcuccagaagacaauccc

SEQ ID NO: 3189091 - RNA, 19 nt, Artificial Sequence
  Description of Artificial Sequence: Synthetic oligonucleotide
aacaaccaggcgcauuagc

SEQ ID NO: 3189092 - RNA, 19 nt, Artificial Sequence
  Description of Artificial Sequence: Synthetic oligonucleotide
aaacaagaaucugaggcag

SEQ ID NO: 3189093 - RNA, 19 nt, Artificial Sequence
  Description of Artificial Sequence: Synthetic oligonucleotide
uuucagggcaccaagguaa

SEQ ID NO: 3189094 - RNA, 19 nt, Artificial Sequence
  Description of Artificial Sequence: Synthetic oligonucleotide
ucucaugucgucccugugg

SEQ ID NO: 3189095 - RNA, 19 nt, Artificial Sequence
  Description of Artificial Sequence: Synthetic oligonucleotide
uucuaguaaaggcaugggc

SEQ ID NO: 3189096 - RNA, 19 nt, Artificial Sequence
  Description of Artificial Sequence: Synthetic oligonucleotide
cuggauauguccucaaagc

SEQ ID NO: 3189097 - RNA, 19 nt, Artificial Sequence
  Description of Artificial Sequence: Synthetic oligonucleotide
auuucuccucuauggagcc

SEQ ID NO: 3189098 - RNA, 19 nt, Artificial Sequence
  Description of Artificial Sequence: Synthetic oligonucleotide
aaagugcaauuauuuccac

SEQ ID NO: 3189099 - RNA, 19 nt, Artificial Sequence
  Description of Artificial Sequence: Synthetic oligonucleotide
aaggaucugagcucguuug

SEQ ID NO: 3189100 - RNA, 19 nt, Artificial Sequence
  Description of Artificial Sequence: Synthetic oligonucleotide
aaccaggcgcauuagcuuc

SEQ ID NO: 3189101 - RNA, 19 nt, Artificial Sequence
  Description of Artificial Sequence: Synthetic oligonucleotide
caauuauuuccacuggacc

SEQ ID NO: 3189102 - RNA, 19 nt, Artificial Sequence
  Description of Artificial Sequence: Synthetic oligonucleotide
acgaaauauaucccgaacu

SEQ ID NO: 3189103 - RNA, 19 nt, Artificial Sequence
  Description of Artificial Sequence: Synthetic oligonucleotide
uuuguaaaaggaaauccuu

SEQ ID NO: 3189104 - RNA, 19 nt, Artificial Sequence
  Description of Artificial Sequence: Synthetic oligonucleotide
uggauauguccucaaagca

SEQ ID NO: 3189105 - RNA, 19 nt, Artificial Sequence
  Description of Artificial Sequence: Synthetic oligonucleotide
ugaacgaaauauaucccga

SEQ ID NO: 3189106 - RNA, 19 nt, Artificial Sequence
  Description of Artificial Sequence: Synthetic oligonucleotide
acuucaucuagagucaccg

SEQ ID NO: 3189107 - RNA, 19 nt, Artificial Sequence
  Description of Artificial Sequence: Synthetic oligonucleotide
cauuucuccucuauggagc

SEQ ID NO: 3189108 - RNA, 19 nt, Artificial Sequence
  Description of Artificial Sequence: Synthetic oligonucleotide
acagguaauaauccagaag

SEQ ID NO: 3189109 - RNA, 19 nt, Artificial Sequence
  Description of Artificial Sequence: Synthetic oligonucleotide
ugugcgaugaaauggaauu

SEQ ID NO: 3189110 - RNA, 19 nt, Artificial Sequence
  Description of Artificial Sequence: Synthetic oligonucleotide
uaauaaaugcagcgugugc

SEQ ID NO: 3189111 - RNA, 19 nt, Artificial Sequence
  Description of Artificial Sequence: Synthetic oligonucleotide
uuuacauucagggucagua

SEQ ID NO: 3189112 - RNA, 19 nt, Artificial Sequence
  Description of Artificial Sequence: Synthetic oligonucleotide
cauucgagagcauuucucc

SEQ ID NO: 3189113 - RNA, 19 nt, Artificial Sequence
  Description of Artificial Sequence: Synthetic oligonucleotide
uuuggacacaauuaagaaa

SEQ ID NO: 3189114 - RNA, 19 nt, Artificial Sequence
  Description of Artificial Sequence: Synthetic oligonucleotide
ucuagagucaccguggcgu

SEQ ID NO: 3189115 - RNA, 19 nt, Artificial Sequence
  Description of Artificial Sequence: Synthetic oligonucleotide
accacgaagacccaggcga

SEQ ID NO: 3189116 - RNA, 19 nt, Artificial Sequence
  Description of Artificial Sequence: Synthetic oligonucleotide
uaauccagaagaacggagu

SEQ ID NO: 3189117 - RNA, 19 nt, Artificial Sequence
  Description of Artificial Sequence: Synthetic oligonucleotide
ugugccucgucucuguaag

SEQ ID NO: 3189118 - RNA, 19 nt, Artificial Sequence
  Description of Artificial Sequence: Synthetic oligonucleotide
ucguccgaguauuucaggg

SEQ ID NO: 3189119 - RNA, 19 nt, Artificial Sequence
  Description of Artificial Sequence: Synthetic oligonucleotide
aacauggugaugcuggaua

SEQ ID NO: 3189120 - RNA, 19 nt, Artificial Sequence
  Description of Artificial Sequence: Synthetic oligonucleotide
ucgcgcucggcccagaagg

SEQ ID NO: 3189121 - RNA, 19 nt, Artificial Sequence
  Description of Artificial Sequence: Synthetic oligonucleotide
uguaucugaacgaaauaua

SEQ ID NO: 3189122 - RNA, 19 nt, Artificial Sequence
  Description of Artificial Sequence: Synthetic oligonucleotide
gucaccguggcguaguagg

SEQ ID NO: 3189123 - RNA, 19 nt, Artificial Sequence
  Description of Artificial Sequence: Synthetic oligonucleotide
acaaucccgaaucagcuca

SEQ ID NO: 3189124 - RNA, 19 nt, Artificial Sequence
  Description of Artificial Sequence: Synthetic oligonucleotide
cuaguaaaggcaugggcac

SEQ ID NO: 3189125 - RNA, 19 nt, Artificial Sequence
  Description of Artificial Sequence: Synthetic oligonucleotide
ucaacaaccaggcgcauua

SEQ ID NO: 3189126 - RNA, 19 nt, Artificial Sequence
  Description of Artificial Sequence: Synthetic oligonucleotide
auauaucccgaacuucauc

SEQ ID NO: 3189127 - RNA, 19 nt, Artificial Sequence
  Description of Artificial Sequence: Synthetic oligonucleotide
gaaggagaaguugagcgag

SEQ ID NO: 3189128 - RNA, 19 nt, Artificial Sequence
  Description of Artificial Sequence: Synthetic oligonucleotide
cuguaugaucuaaaagugc

SEQ ID NO: 3189129 - RNA, 19 nt, Artificial Sequence
  Description of Artificial Sequence: Synthetic oligonucleotide
ugagcucguuuguaaaagg

SEQ ID NO: 3189130 - RNA, 19 nt, Artificial Sequence
  Description of Artificial Sequence: Synthetic oligonucleotide
aaauggaauuccucucaug

SEQ ID NO: 3189131 - RNA, 19 nt, Artificial Sequence
  Description of Artificial Sequence: Synthetic oligonucleotide
cagaagacaaucccgaauc

SEQ ID NO: 3189132 - RNA, 19 nt, Artificial Sequence
  Description of Artificial Sequence: Synthetic oligonucleotide
caguaauaaaugcagcgug

SEQ ID NO: 3189133 - RNA, 19 nt, Artificial Sequence
  Description of Artificial Sequence: Synthetic oligonucleotide
uaucugaacgaaauauauc

SEQ ID NO: 3189134 - RNA, 19 nt, Artificial Sequence
  Description of Artificial Sequence: Synthetic oligonucleotide
aagugcaauuauuuccacu

SEQ ID NO: 3189135 - RNA, 19 nt, Artificial Sequence
  Description of Artificial Sequence: Synthetic oligonucleotide
uccagaagaacggaguuga

SEQ ID NO: 3189136 - RNA, 19 nt, Artificial Sequence
  Description of Artificial Sequence: Synthetic oligonucleotide
ccgaacuucaucuagaguc

SEQ ID NO: 3189137 - RNA, 19 nt, Artificial Sequence
  Description of Artificial Sequence: Synthetic oligonucleotide
gagccucuucagcagaucg

SEQ ID NO: 3189138 - RNA, 19 nt, Artificial Sequence
  Description of Artificial Sequence: Synthetic oligonucleotide
gaaggaaaauuuucaacaa

SEQ ID NO: 3189139 - RNA, 19 nt, Artificial Sequence
  Description of Artificial Sequence: Synthetic oligonucleotide
ucccgaaucagcucaacac

SEQ ID NO: 3189140 - RNA, 19 nt, Artificial Sequence
  Description of Artificial Sequence: Synthetic oligonucleotide
ugcgaugaaauggaauucc

SEQ ID NO: 3189141 - RNA, 19 nt, Artificial Sequence
  Description of Artificial Sequence: Synthetic oligonucleotide
aaucugaggcagucuguag

SEQ ID NO: 3189142 - RNA, 19 nt, Artificial Sequence
  Description of Artificial Sequence: Synthetic oligonucleotide
agcgugugcgaugaaaugg

SEQ ID NO: 3189143 - RNA, 19 nt, Artificial Sequence
  Description of Artificial Sequence: Synthetic oligonucleotide
gagaaguugagcgagucca

SEQ ID NO: 3189144 - RNA, 19 nt, Artificial Sequence
  Description of Artificial Sequence: Synthetic oligonucleotide
auggaauuccucucauguc

SEQ ID NO: 3189145 - RNA, 19 nt, Artificial Sequence
  Description of Artificial Sequence: Synthetic oligonucleotide
cucaaagcagccgucaccc

SEQ ID NO: 3189146 - RNA, 19 nt, Artificial Sequence
  Description of Artificial Sequence: Synthetic oligonucleotide
uacugguaucccucggucg

SEQ ID NO: 3189147 - RNA, 19 nt, Artificial Sequence
  Description of Artificial Sequence: Synthetic oligonucleotide
aaugcagcgugugcgauga

SEQ ID NO: 3189148 - RNA, 19 nt, Artificial Sequence
  Description of Artificial Sequence: Synthetic oligonucleotide
uuaagaaaagagccuccaa

SEQ ID NO: 3189149 - RNA, 19 nt, Artificial Sequence
  Description of Artificial Sequence: Synthetic oligonucleotide
cagggucaguaauaaaugc

SEQ ID NO: 3189150 - RNA, 19 nt, Artificial Sequence
  Description of Artificial Sequence: Synthetic oligonucleotide
agaucguccgaguauuuca

SEQ ID NO: 3189151 - RNA, 19 nt, Artificial Sequence
  Description of Artificial Sequence: Synthetic oligonucleotide
aguaaaggcaugggcacgg

SEQ ID NO: 3189152 - RNA, 19 nt, Artificial Sequence
  Description of Artificial Sequence: Synthetic oligonucleotide
acaagaaucugaggcaguc

SEQ ID NO: 3189153 - RNA, 19 nt, Artificial Sequence
  Description of Artificial Sequence: Synthetic oligonucleotide
gaagacaaucccgaaucag

SEQ ID NO: 3189154 - RNA, 19 nt, Artificial Sequence
  Description of Artificial Sequence: Synthetic oligonucleotide
acacaccaaaucgagcagc

SEQ ID NO: 3189155 - RNA, 19 nt, Artificial Sequence
  Description of Artificial Sequence: Synthetic oligonucleotide
aaaugcagcgugugcgaug

SEQ ID NO: 3189156 - RNA, 19 nt, Artificial Sequence
  Description of Artificial Sequence: Synthetic oligonucleotide
ugaggcagucuguagucag

SEQ ID NO: 3189157 - RNA, 19 nt, Artificial Sequence
  Description of Artificial Sequence: Synthetic oligonucleotide
auaaaugcagcgugugcga

SEQ ID NO: 3189158 - RNA, 19 nt, Artificial Sequence
  Description of Artificial Sequence: Synthetic oligonucleotide
auuauuuccacuggaccca

SEQ ID NO: 3189159 - RNA, 19 nt, Artificial Sequence
  Description of Artificial Sequence: Synthetic oligonucleotide
ucguugagaauucgaugcc

SEQ ID NO: 3189160 - RNA, 19 nt, Artificial Sequence
  Description of Artificial Sequence: Synthetic oligonucleotide
aagcuccagaagacaaucc

SEQ ID NO: 3189161 - RNA, 19 nt, Artificial Sequence
  Description of Artificial Sequence: Synthetic oligonucleotide
ucgggcauagucccacagg

SEQ ID NO: 3189162 - RNA, 19 nt, Artificial Sequence
  Description of Artificial Sequence: Synthetic oligonucleotide
guaauaaaugcagcgugug

SEQ ID NO: 3189163 - RNA, 19 nt, Artificial Sequence
  Description of Artificial Sequence: Synthetic oligonucleotide
auaauccagaagaacggag

SEQ ID NO: 3189164 - RNA, 19 nt, Artificial Sequence
  Description of Artificial Sequence: Synthetic oligonucleotide
ucgagcgcucgguugacgg

SEQ ID NO: 3189165 - RNA, 19 nt, Artificial Sequence
  Description of Artificial Sequence: Synthetic oligonucleotide
uccacuggacccauuuaca

SEQ ID NO: 3189166 - RNA, 19 nt, Artificial Sequence
  Description of Artificial Sequence: Synthetic oligonucleotide
uucccaguuucguugagaa

SEQ ID NO: 3189167 - RNA, 19 nt, Artificial Sequence
  Description of Artificial Sequence: Synthetic oligonucleotide
cagucuguagucagcaaac

SEQ ID NO: 3189168 - RNA, 19 nt, Artificial Sequence
  Description of Artificial Sequence: Synthetic oligonucleotide
cacaccaaaucgagcagcc

SEQ ID NO: 3189169 - RNA, 19 nt, Artificial Sequence
  Description of Artificial Sequence: Synthetic oligonucleotide
ucccgaacuucaucuagag

SEQ ID NO: 3189170 - RNA, 19 nt, Artificial Sequence
  Description of Artificial Sequence: Synthetic oligonucleotide
gugcaauuauuuccacugg

SEQ ID NO: 3189171 - RNA, 19 nt, Artificial Sequence
  Description of Artificial Sequence: Synthetic oligonucleotide
accuuguacacguacaccg

SEQ ID NO: 3189172 - RNA, 19 nt, Artificial Sequence
  Description of Artificial Sequence: Synthetic oligonucleotide
aaaacuuggaggagaugcc

SEQ ID NO: 3189173 - RNA, 19 nt, Artificial Sequence
  Description of Artificial Sequence: Synthetic oligonucleotide
uuggucacggccuucuugg

SEQ ID NO: 3189174 - RNA, 19 nt, Artificial Sequence
  Description of Artificial Sequence: Synthetic oligonucleotide
ugcuucagcaccuuguaca

SEQ ID NO: 3189175 - RNA, 19 nt, Artificial Sequence
  Description of Artificial Sequence: Synthetic oligonucleotide
uacacguacaccgaguagc

SEQ ID NO: 3189176 - RNA, 19 nt, Artificial Sequence
  Description of Artificial Sequence: Synthetic oligonucleotide
aaacuuggaggagaugccg

SEQ ID NO: 3189177 - RNA, 19 nt, Artificial Sequence
  Description of Artificial Sequence: Synthetic oligonucleotide
uucuucugggccuugguca

SEQ ID NO: 3189178 - RNA, 19 nt, Artificial Sequence
  Description of Artificial Sequence: Synthetic oligonucleotide
uucuuggagcccuucuucg

SEQ ID NO: 3189179 - RNA, 19 nt, Artificial Sequence
  Description of Artificial Sequence: Synthetic oligonucleotide
uucagcaccuuguacacgu

SEQ ID NO: 3189180 - RNA, 19 nt, Artificial Sequence
  Description of Artificial Sequence: Synthetic oligonucleotide
cuugccguccuucuucugg

SEQ ID NO: 3189181 - RNA, 19 nt, Artificial Sequence
  Description of Artificial Sequence: Synthetic oligonucleotide
acguacaccgaguagcucu

SEQ ID NO: 3189182 - RNA, 19 nt, Artificial Sequence
  Description of Artificial Sequence: Synthetic oligonucleotide
ucuuggagcccuucuucgg

SEQ ID NO: 3189183 - RNA, 19 nt, Artificial Sequence
  Description of Artificial Sequence: Synthetic oligonucleotide
uguacacguacaccgagua

SEQ ID NO: 3189184 - RNA, 19 nt, Artificial Sequence
  Description of Artificial Sequence: Synthetic oligonucleotide
aacuuggaggagaugccgg

SEQ ID NO: 3189185 - RNA, 19 nt, Artificial Sequence
  Description of Artificial Sequence: Synthetic oligonucleotide
ugaaccugcuucagcaccu

SEQ ID NO: 3189186 - RNA, 19 nt, Artificial Sequence
  Description of Artificial Sequence: Synthetic oligonucleotide
cuuguacacguacaccgag

SEQ ID NO: 3189187 - RNA, 19 nt, Artificial Sequence
  Description of Artificial Sequence: Synthetic oligonucleotide
accgaguagcucuccuugc

SEQ ID NO: 3189188 - RNA, 19 nt, Artificial Sequence
  Description of Artificial Sequence: Synthetic oligonucleotide
cuuggagcccuucuucggg

SEQ ID NO: 3189189 - RNA, 19 nt, Artificial Sequence
  Description of Artificial Sequence: Synthetic oligonucleotide
gaguagcucuccuugcggc

SEQ ID NO: 3189190 - RNA, 19 nt, Artificial Sequence
  Description of Artificial Sequence: Synthetic oligonucleotide
gaggagaugccgguguccg

SEQ ID NO: 3189191 - RNA, 19 nt, Artificial Sequence
  Description of Artificial Sequence: Synthetic oligonucleotide
gucacggccuucuuggagc

SEQ ID NO: 3189192 - RNA, 19 nt, Artificial Sequence
  Description of Artificial Sequence: Synthetic oligonucleotide
uugccguccuucuucuggg

SEQ ID NO: 3189193 - RNA, 19 nt, Artificial Sequence
  Description of Artificial Sequence: Synthetic oligonucleotide
uuggaggagaugccggugu

SEQ ID NO: 3189194 - RNA, 19 nt, Artificial Sequence
  Description of Artificial Sequence: Synthetic oligonucleotide
uuggagcccuucuucgggg

SEQ ID NO: 3189195 - RNA, 19 nt, Artificial Sequence
  Description of Artificial Sequence: Synthetic oligonucleotide
ugcgcuugcgcuucuugcc

SEQ ID NO: 3189196 - RNA, 19 nt, Artificial Sequence
  Description of Artificial Sequence: Synthetic oligonucleotide
gugaaccugcuucagcacc

SEQ ID NO: 3189197 - RNA, 19 nt, Artificial Sequence
  Description of Artificial Sequence: Synthetic oligonucleotide
uuguacacguacaccgagu

SEQ ID NO: 3189198 - RNA, 19 nt, Artificial Sequence
  Description of Artificial Sequence: Synthetic oligonucleotide
cuucuugccguccuucuuc

SEQ ID NO: 3189199 - RNA, 19 nt, Artificial Sequence
  Description of Artificial Sequence: Synthetic oligonucleotide
ugggccuuggucacggccu

SEQ ID NO: 3189200 - RNA, 19 nt, Artificial Sequence
  Description of Artificial Sequence: Synthetic oligonucleotide
cuucuuggagcccuucuuc

SEQ ID NO: 3189201 - RNA, 19 nt, Artificial Sequence
  Description of Artificial Sequence: Synthetic oligonucleotide
acuuggcuggcucaggcau

SEQ ID NO: 3189202 - RNA, 19 nt, Artificial Sequence
  Description of Artificial Sequence: Synthetic oligonucleotide
ucuucugggccuuggucac

SEQ ID NO: 3189203 - RNA, 19 nt, Artificial Sequence
  Description of Artificial Sequence: Synthetic oligonucleotide
uggcucaggcaucuuagaa

SEQ ID NO: 3189204 - RNA, 19 nt, Artificial Sequence
  Description of Artificial Sequence: Synthetic oligonucleotide
ucaggcaucuuagaaucuc

SEQ ID NO: 3189205 - RNA, 19 nt, Artificial Sequence
  Description of Artificial Sequence: Synthetic oligonucleotide
cuuggucacggccuucuug

SEQ ID NO: 3189206 - RNA, 19 nt, Artificial Sequence
  Description of Artificial Sequence: Synthetic oligonucleotide
gcucaggcaucuuagaauc

SEQ ID NO: 3189207 - RNA, 19 nt, Artificial Sequence
  Description of Artificial Sequence: Synthetic oligonucleotide
uucugggccuuggucacgg

SEQ ID NO: 3189208 - RNA, 19 nt, Artificial Sequence
  Description of Artificial Sequence: Synthetic oligonucleotide
acuuggaggagaugccggu

SEQ ID NO: 3189209 - RNA, 19 nt, Artificial Sequence
  Description of Artificial Sequence: Synthetic oligonucleotide
guacacguacaccgaguag

SEQ ID NO: 3189210 - RNA, 19 nt, Artificial Sequence
  Description of Artificial Sequence: Synthetic oligonucleotide
aguagcucuccuugcggcu

SEQ ID NO: 3189211 - RNA, 19 nt, Artificial Sequence
  Description of Artificial Sequence: Synthetic oligonucleotide
uacaccgaguagcucuccu

SEQ ID NO: 3189212 - RNA, 19 nt, Artificial Sequence
  Description of Artificial Sequence: Synthetic oligonucleotide
uccgggugaaccugcuuca

SEQ ID NO: 3189213 - RNA, 19 nt, Artificial Sequence
  Description of Artificial Sequence: Synthetic oligonucleotide
cuucuucugggccuugguc

SEQ ID NO: 3189214 - RNA, 19 nt, Artificial Sequence
  Description of Artificial Sequence: Synthetic oligonucleotide
caccgaguagcucuccuug

SEQ ID NO: 3189215 - RNA, 19 nt, Artificial Sequence
  Description of Artificial Sequence: Synthetic oligonucleotide
cuugcggcugcgcuugcgc

SEQ ID NO: 3189216 - RNA, 19 nt, Artificial Sequence
  Description of Artificial Sequence: Synthetic oligonucleotide
uucuugccguccuucuucu

SEQ ID NO: 3189217 - RNA, 19 nt, Artificial Sequence
  Description of Artificial Sequence: Synthetic oligonucleotide
cugcgcuugcgcuucuugc

SEQ ID NO: 3189218 - RNA, 19 nt, Artificial Sequence
  Description of Artificial Sequence: Synthetic oligonucleotide
guccgggugaaccugcuuc

SEQ ID NO: 3189219 - RNA, 19 nt, Artificial Sequence
  Description of Artificial Sequence: Synthetic oligonucleotide
aaccugcuucagcaccuug

SEQ ID NO: 3189220 - RNA, 19 nt, Artificial Sequence
  Description of Artificial Sequence: Synthetic oligonucleotide
gggugaaccugcuucagca

SEQ ID NO: 3189221 - RNA, 19 nt, Artificial Sequence
  Description of Artificial Sequence: Synthetic oligonucleotide
ucacggccuucuuggagcc

SEQ ID NO: 3189222 - RNA, 19 nt, Artificial Sequence
  Description of Artificial Sequence: Synthetic oligonucleotide
ggagaugccgguguccggg

SEQ ID NO: 3189223 - RNA, 19 nt, Artificial Sequence
  Description of Artificial Sequence: Synthetic oligonucleotide
ccuucuucggggcggagcg

SEQ ID NO: 3189224 - RNA, 19 nt, Artificial Sequence
  Description of Artificial Sequence: Synthetic oligonucleotide
gaugccgguguccggguga

SEQ ID NO: 3189225 - RNA, 19 nt, Artificial Sequence
  Description of Artificial Sequence: Synthetic oligonucleotide
caccuuguacacguacacc

SEQ ID NO: 3189226 - RNA, 19 nt, Artificial Sequence
  Description of Artificial Sequence: Synthetic oligonucleotide
uccuucuucugggccuugg

SEQ ID NO: 3189227 - RNA, 19 nt, Artificial Sequence
  Description of Artificial Sequence: Synthetic oligonucleotide
cugggccuuggucacggcc

SEQ ID NO: 3189228 - RNA, 19 nt, Artificial Sequence
  Description of Artificial Sequence: Synthetic oligonucleotide
ggcggagcggacuuggcug

SEQ ID NO: 3189229 - RNA, 19 nt, Artificial Sequence
  Description of Artificial Sequence: Synthetic oligonucleotide
uucuucggggcggagcgga

SEQ ID NO: 3189230 - RNA, 19 nt, Artificial Sequence
  Description of Artificial Sequence: Synthetic oligonucleotide
agcaccuuguacacguaca

SEQ ID NO: 3189231 - RNA, 19 nt, Artificial Sequence
  Description of Artificial Sequence: Synthetic oligonucleotide
uuggcuggcucaggcaucu

SEQ ID NO: 3189232 - RNA, 19 nt, Artificial Sequence
  Description of Artificial Sequence: Synthetic oligonucleotide
uggagcccuucuucggggc

SEQ ID NO: 3189233 - RNA, 19 nt, Artificial Sequence
  Description of Artificial Sequence: Synthetic oligonucleotide
gcuucagcaccuuguacac

SEQ ID NO: 3189234 - RNA, 19 nt, Artificial Sequence
  Description of Artificial Sequence: Synthetic oligonucleotide
aggagaugccgguguccgg

SEQ ID NO: 3189235 - RNA, 19 nt, Artificial Sequence
  Description of Artificial Sequence: Synthetic oligonucleotide
cuucagcaccuuguacacg

SEQ ID NO: 3189236 - RNA, 19 nt, Artificial Sequence
  Description of Artificial Sequence: Synthetic oligonucleotide
uagcucuccuugcggcugc

SEQ ID NO: 3189237 - RNA, 19 nt, Artificial Sequence
  Description of Artificial Sequence: Synthetic oligonucleotide
uggaggagaugccgguguc

SEQ ID NO: 3189238 - RNA, 19 nt, Artificial Sequence
  Description of Artificial Sequence: Synthetic oligonucleotide
cagcaccuuguacacguac

SEQ ID NO: 3189239 - RNA, 19 nt, Artificial Sequence
  Description of Artificial Sequence: Synthetic oligonucleotide
gagcccuucuucggggcgg

SEQ ID NO: 3189240 - RNA, 19 nt, Artificial Sequence
  Description of Artificial Sequence: Synthetic oligonucleotide
gacuuggcuggcucaggca

SEQ ID NO: 3189241 - RNA, 19 nt, Artificial Sequence
  Description of Artificial Sequence: Synthetic oligonucleotide
ggacuuggcuggcucaggc

SEQ ID NO: 3189242 - RNA, 19 nt, Artificial Sequence
  Description of Artificial Sequence: Synthetic oligonucleotide
cugcuucagcaccuuguac

SEQ ID NO: 3189243 - RNA, 19 nt, Artificial Sequence
  Description of Artificial Sequence: Synthetic oligonucleotide
uugcgcuucuugccguccu

SEQ ID NO: 3189244 - RNA, 19 nt, Artificial Sequence
  Description of Artificial Sequence: Synthetic oligonucleotide
guagcucuccuugcggcug

SEQ ID NO: 3189245 - RNA, 19 nt, Artificial Sequence
  Description of Artificial Sequence: Synthetic oligonucleotide
ggucacggccuucuuggag

SEQ ID NO: 3189246 - RNA, 19 nt, Artificial Sequence
  Description of Artificial Sequence: Synthetic oligonucleotide
cuuggaggagaugccggug

SEQ ID NO: 3189247 - RNA, 19 nt, Artificial Sequence
  Description of Artificial Sequence: Synthetic oligonucleotide
gcaccuuguacacguacac

SEQ ID NO: 3189248 - RNA, 19 nt, Artificial Sequence
  Description of Artificial Sequence: Synthetic oligonucleotide
cuuggcuggcucaggcauc

SEQ ID NO: 3189249 - RNA, 19 nt, Artificial Sequence
  Description of Artificial Sequence: Synthetic oligonucleotide
acacguacaccgaguagcu

SEQ ID NO: 3189250 - RNA, 19 nt, Artificial Sequence
  Description of Artificial Sequence: Synthetic oligonucleotide
accugcuucagcaccuugu

SEQ ID NO: 3189251 - RNA, 19 nt, Artificial Sequence
  Description of Artificial Sequence: Synthetic oligonucleotide
agcggacuuggcuggcuca

SEQ ID NO: 3189252 - RNA, 19 nt, Artificial Sequence
  Description of Artificial Sequence: Synthetic oligonucleotide
ucuccuugcggcugcgcuu

SEQ ID NO: 3189253 - RNA, 19 nt, Artificial Sequence
  Description of Artificial Sequence: Synthetic oligonucleotide
gcuggcucaggcaucuuag

SEQ ID NO: 3189254 - RNA, 19 nt, Artificial Sequence
  Description of Artificial Sequence: Synthetic oligonucleotide
ggugaaccugcuucagcac

SEQ ID NO: 3189255 - RNA, 19 nt, Artificial Sequence
  Description of Artificial Sequence: Synthetic oligonucleotide
uugcggcugcgcuugcgcu

SEQ ID NO: 3189256 - RNA, 19 nt, Artificial Sequence
  Description of Artificial Sequence: Synthetic oligonucleotide
acaccgaguagcucuccuu

SEQ ID NO: 3189257 - RNA, 19 nt, Artificial Sequence
  Description of Artificial Sequence: Synthetic oligonucleotide
uucggggcggagcggacuu

SEQ ID NO: 3189258 - RNA, 19 nt, Artificial Sequence
  Description of Artificial Sequence: Synthetic oligonucleotide
ccgaguagcucuccuugcg

SEQ ID NO: 3189259 - RNA, 19 nt, Artificial Sequence
  Description of Artificial Sequence: Synthetic oligonucleotide
ucuugccguccuucuucug

SEQ ID NO: 3189260 - RNA, 19 nt, Artificial Sequence
  Description of Artificial Sequence: Synthetic oligonucleotide
gcgcuugcgcuucuugccg

SEQ ID NO: 3189261 - RNA, 19 nt, Artificial Sequence
  Description of Artificial Sequence: Synthetic oligonucleotide
acggccuucuuggagcccu

SEQ ID NO: 3189262 - RNA, 19 nt, Artificial Sequence
  Description of Artificial Sequence: Synthetic oligonucleotide
cuugcgcuucuugccgucc

SEQ ID NO: 3189263 - RNA, 19 nt, Artificial Sequence
  Description of Artificial Sequence: Synthetic oligonucleotide
cuccuugcggcugcgcuug

SEQ ID NO: 3189264 - RNA, 19 nt, Artificial Sequence
  Description of Artificial Sequence: Synthetic oligonucleotide
agaugccgguguccgggug

SEQ ID NO: 3189265 - RNA, 19 nt, Artificial Sequence
  Description of Artificial Sequence: Synthetic oligonucleotide
ggagcccuucuucggggcg

SEQ ID NO: 3189266 - RNA, 19 nt, Artificial Sequence
  Description of Artificial Sequence: Synthetic oligonucleotide
ugccguccuucuucugggc

SEQ ID NO: 3189267 - RNA, 19 nt, Artificial Sequence
  Description of Artificial Sequence: Synthetic oligonucleotide
gagcggacuuggcuggcuc

SEQ ID NO: 3189268 - RNA, 19 nt, Artificial Sequence
  Description of Artificial Sequence: Synthetic oligonucleotide
uggucacggccuucuugga

SEQ ID NO: 3189269 - RNA, 19 nt, Artificial Sequence
  Description of Artificial Sequence: Synthetic oligonucleotide
gcggagcggacuuggcugg

SEQ ID NO: 3189270 - RNA, 19 nt, Artificial Sequence
  Description of Artificial Sequence: Synthetic oligonucleotide
ucagcaccuuguacacgua

SEQ ID NO: 3189271 - RNA, 19 nt, Artificial Sequence
  Description of Artificial Sequence: Synthetic oligonucleotide
ucuuguauguuuauuaucc

SEQ ID NO: 3189272 - RNA, 19 nt, Artificial Sequence
  Description of Artificial Sequence: Synthetic oligonucleotide
uuauuauccauuccuaggg

SEQ ID NO: 3189273 - RNA, 19 nt, Artificial Sequence
  Description of Artificial Sequence: Synthetic oligonucleotide
acagacauuucuuagcacc

SEQ ID NO: 3189274 - RNA, 19 nt, Artificial Sequence
  Description of Artificial Sequence: Synthetic oligonucleotide
uuuauuauccauuccuagg

SEQ ID NO: 3189275 - RNA, 19 nt, Artificial Sequence
  Description of Artificial Sequence: Synthetic oligonucleotide
uuucuuagcaccaugccag

SEQ ID NO: 3189276 - RNA, 19 nt, Artificial Sequence
  Description of Artificial Sequence: Synthetic oligonucleotide
uucucuacgaaucccacag

SEQ ID NO: 3189277 - RNA, 19 nt, Artificial Sequence
  Description of Artificial Sequence: Synthetic oligonucleotide
cucugugugauguaggugg

SEQ ID NO: 3189278 - RNA, 19 nt, Artificial Sequence
  Description of Artificial Sequence: Synthetic oligonucleotide
aacgucauuguccugugag

SEQ ID NO: 3189279 - RNA, 19 nt, Artificial Sequence
  Description of Artificial Sequence: Synthetic oligonucleotide
ucauguuacaggaugggug

SEQ ID NO: 3189280 - RNA, 19 nt, Artificial Sequence
  Description of Artificial Sequence: Synthetic oligonucleotide
auguuuauuauccauuccu

SEQ ID NO: 3189281 - RNA, 19 nt, Artificial Sequence
  Description of Artificial Sequence: Synthetic oligonucleotide
agcaguaacgucauugucc

SEQ ID NO: 3189282 - RNA, 19 nt, Artificial Sequence
  Description of Artificial Sequence: Synthetic oligonucleotide
cauguuacaggaugggugg

SEQ ID NO: 3189283 - RNA, 19 nt, Artificial Sequence
  Description of Artificial Sequence: Synthetic oligonucleotide
uuaucuuguauguuuauua

SEQ ID NO: 3189284 - RNA, 19 nt, Artificial Sequence
  Description of Artificial Sequence: Synthetic oligonucleotide
guuuauuauccauuccuag

SEQ ID NO: 3189285 - RNA, 19 nt, Artificial Sequence
  Description of Artificial Sequence: Synthetic oligonucleotide
uauguuuauuauccauucc

SEQ ID NO: 3189286 - RNA, 19 nt, Artificial Sequence
  Description of Artificial Sequence: Synthetic oligonucleotide
uguauguuuauuauccauu

SEQ ID NO: 3189287 - RNA, 19 nt, Artificial Sequence
  Description of Artificial Sequence: Synthetic oligonucleotide
ugugaguugccuugguccg

SEQ ID NO: 3189288 - RNA, 19 nt, Artificial Sequence
  Description of Artificial Sequence: Synthetic oligonucleotide
aucuuguauguuuauuauc

SEQ ID NO: 3189289 - RNA, 19 nt, Artificial Sequence
  Description of Artificial Sequence: Synthetic oligonucleotide
auuucuuagcaccaugcca

SEQ ID NO: 3189290 - RNA, 19 nt, Artificial Sequence
  Description of Artificial Sequence: Synthetic oligonucleotide
acauuucuuagcaccaugc

SEQ ID NO: 3189291 - RNA, 19 nt, Artificial Sequence
  Description of Artificial Sequence: Synthetic oligonucleotide
cugugaguugccuuggucc

SEQ ID NO: 3189292 - RNA, 19 nt, Artificial Sequence
  Description of Artificial Sequence: Synthetic oligonucleotide
uauuauccauuccuagggc

SEQ ID NO: 3189293 - RNA, 19 nt, Artificial Sequence
  Description of Artificial Sequence: Synthetic oligonucleotide
ucuacgaaucccacagucc

SEQ ID NO: 3189294 - RNA, 19 nt, Artificial Sequence
  Description of Artificial Sequence: Synthetic oligonucleotide
aagcaguaacgucauuguc

SEQ ID NO: 3189295 - RNA, 19 nt, Artificial Sequence
  Description of Artificial Sequence: Synthetic oligonucleotide
auguaggugguucucuacg

SEQ ID NO: 3189296 - RNA, 19 nt, Artificial Sequence
  Description of Artificial Sequence: Synthetic oligonucleotide
uguuuauuauccauuccua

SEQ ID NO: 3189297 - RNA, 19 nt, Artificial Sequence
  Description of Artificial Sequence: Synthetic oligonucleotide
auuauccauuccuagggca

SEQ ID NO: 3189298 - RNA, 19 nt, Artificial Sequence
  Description of Artificial Sequence: Synthetic oligonucleotide
guauguuuauuauccauuc

SEQ ID NO: 3189299 - RNA, 19 nt, Artificial Sequence
  Description of Artificial Sequence: Synthetic oligonucleotide
uuauccauuccuagggcac

SEQ ID NO: 3189300 - RNA, 19 nt, Artificial Sequence
  Description of Artificial Sequence: Synthetic oligonucleotide
augccagucauguuacagg

SEQ ID NO: 3189301 - RNA, 19 nt, Artificial Sequence
  Description of Artificial Sequence: Synthetic oligonucleotide
aggggcaggaagcaguaac

SEQ ID NO: 3189302 - RNA, 19 nt, Artificial Sequence
  Description of Artificial Sequence: Synthetic oligonucleotide
acaggguacagacauuucu

SEQ ID NO: 3189303 - RNA, 19 nt, Artificial Sequence
  Description of Artificial Sequence: Synthetic oligonucleotide
aguaacgucauuguccugu

SEQ ID NO: 3189304 - RNA, 19 nt, Artificial Sequence
  Description of Artificial Sequence: Synthetic oligonucleotide
uaucuuguauguuuauuau

SEQ ID NO: 3189305 - RNA, 19 nt, Artificial Sequence
  Description of Artificial Sequence: Synthetic oligonucleotide
auuccuagggcaccccugg

SEQ ID NO: 3189306 - RNA, 19 nt, Artificial Sequence
  Description of Artificial Sequence: Synthetic oligonucleotide
gaaucccacaguccaagcc

SEQ ID NO: 3189307 - RNA, 19 nt, Artificial Sequence
  Description of Artificial Sequence: Synthetic oligonucleotide
uacaggauggguggcaggg

SEQ ID NO: 3189308 - RNA, 19 nt, Artificial Sequence
  Description of Artificial Sequence: Synthetic oligonucleotide
uguccugugaguugccuug

SEQ ID NO: 3189309 - RNA, 19 nt, Artificial Sequence
  Description of Artificial Sequence: Synthetic oligonucleotide
uuguauguuuauuauccau

SEQ ID NO: 3189310 - RNA, 19 nt, Artificial Sequence
  Description of Artificial Sequence: Synthetic oligonucleotide
ucauuguccugugaguugc

SEQ ID NO: 3189311 - RNA, 19 nt, Artificial Sequence
  Description of Artificial Sequence: Synthetic oligonucleotide
cauuucuuagcaccaugcc

SEQ ID NO: 3189312 - RNA, 19 nt, Artificial Sequence
  Description of Artificial Sequence: Synthetic oligonucleotide
ugccagucauguuacagga

SEQ ID NO: 3189313 - RNA, 19 nt, Artificial Sequence
  Description of Artificial Sequence: Synthetic oligonucleotide
cagucauguuacaggaugg

SEQ ID NO: 3189314 - RNA, 19 nt, Artificial Sequence
  Description of Artificial Sequence: Synthetic oligonucleotide
guacagacauuucuuagca

SEQ ID NO: 3189315 - RNA, 19 nt, Artificial Sequence
  Description of Artificial Sequence: Synthetic oligonucleotide
gguacagacauuucuuagc

SEQ ID NO: 3189316 - RNA, 19 nt, Artificial Sequence
  Description of Artificial Sequence: Synthetic oligonucleotide
gacauuucuuagcaccaug

SEQ ID NO: 3189317 - RNA, 19 nt, Artificial Sequence
  Description of Artificial Sequence: Synthetic oligonucleotide
uguaggugguucucuacga

SEQ ID NO: 3189318 - RNA, 19 nt, Artificial Sequence
  Description of Artificial Sequence: Synthetic oligonucleotide
ugguucucuacgaauccca

SEQ ID NO: 3189319 - RNA, 19 nt, Artificial Sequence
  Description of Artificial Sequence: Synthetic oligonucleotide
ugugugauguaggugguuc

SEQ ID NO: 3189320 - RNA, 19 nt, Artificial Sequence
  Description of Artificial Sequence: Synthetic oligonucleotide
agucauguuacaggauggg

SEQ ID NO: 3189321 - RNA, 19 nt, Artificial Sequence
  Description of Artificial Sequence: Synthetic oligonucleotide
cucuacgaaucccacaguc

SEQ ID NO: 3189322 - RNA, 19 nt, Artificial Sequence
  Description of Artificial Sequence: Synthetic oligonucleotide
gauguaggugguucucuac

SEQ ID NO: 3189323 - RNA, 19 nt, Artificial Sequence
  Description of Artificial Sequence: Synthetic oligonucleotide
ggaagcaguaacgucauug

SEQ ID NO: 3189324 - RNA, 19 nt, Artificial Sequence
  Description of Artificial Sequence: Synthetic oligonucleotide
cuacgaaucccacagucca

SEQ ID NO: 3189325 - RNA, 19 nt, Artificial Sequence
  Description of Artificial Sequence: Synthetic oligonucleotide
agcaccaugccagucaugu

SEQ ID NO: 3189326 - RNA, 19 nt, Artificial Sequence
  Description of Artificial Sequence: Synthetic oligonucleotide
uuacaggauggguggcagg

SEQ ID NO: 3189327 - RNA, 19 nt, Artificial Sequence
  Description of Artificial Sequence: Synthetic oligonucleotide
uuagcaccaugccagucau

SEQ ID NO: 3189328 - RNA, 19 nt, Artificial Sequence
  Description of Artificial Sequence: Synthetic oligonucleotide
aggugguucucuacgaauc

SEQ ID NO: 3189329 - RNA, 19 nt, Artificial Sequence
  Description of Artificial Sequence: Synthetic oligonucleotide
caugccagucauguuacag

SEQ ID NO: 3189330 - RNA, 19 nt, Artificial Sequence
  Description of Artificial Sequence: Synthetic oligonucleotide
gaagcaguaacgucauugu

SEQ ID NO: 3189331 - RNA, 19 nt, Artificial Sequence
  Description of Artificial Sequence: Synthetic oligonucleotide
cuuagcaccaugccaguca

SEQ ID NO: 3189332 - RNA, 19 nt, Artificial Sequence
  Description of Artificial Sequence: Synthetic oligonucleotide
cuggguccccaacacaggg

SEQ ID NO: 3189333 - RNA, 19 nt, Artificial Sequence
  Description of Artificial Sequence: Synthetic oligonucleotide
gucauuguccugugaguug

SEQ ID NO: 3189334 - RNA, 19 nt, Artificial Sequence
  Description of Artificial Sequence: Synthetic oligonucleotide
cuuguauguuuauuaucca

SEQ ID NO: 3189335 - RNA, 19 nt, Artificial Sequence
  Description of Artificial Sequence: Synthetic oligonucleotide
ucugugugauguagguggu

SEQ ID NO: 3189336 - RNA, 19 nt, Artificial Sequence
  Description of Artificial Sequence: Synthetic oligonucleotide
accaugccagucauguuac

SEQ ID NO: 3189337 - RNA, 19 nt, Artificial Sequence
  Description of Artificial Sequence: Synthetic oligonucleotide
uacagacauuucuuagcac

SEQ ID NO: 3189338 - RNA, 19 nt, Artificial Sequence
  Description of Artificial Sequence: Synthetic oligonucleotide
uauccauuccuagggcacc

SEQ ID NO: 3189339 - RNA, 19 nt, Artificial Sequence
  Description of Artificial Sequence: Synthetic oligonucleotide
aguuaucuuguauguuuau

SEQ ID NO: 3189340 - RNA, 19 nt, Artificial Sequence
  Description of Artificial Sequence: Synthetic oligonucleotide
uccggucucugugugaugu

SEQ ID NO: 3189341 - RNA, 19 nt, Artificial Sequence
  Description of Artificial Sequence: Synthetic oligonucleotide
uguuacaggauggguggca

SEQ ID NO: 3189342 - RNA, 19 nt, Artificial Sequence
  Description of Artificial Sequence: Synthetic oligonucleotide
auccauuccuagggcaccc

SEQ ID NO: 3189343 - RNA, 19 nt, Artificial Sequence
  Description of Artificial Sequence: Synthetic oligonucleotide
guuacaggauggguggcag

SEQ ID NO: 3189344 - RNA, 19 nt, Artificial Sequence
  Description of Artificial Sequence: Synthetic oligonucleotide
uaggugguucucuacgaau

SEQ ID NO: 3189345 - RNA, 19 nt, Artificial Sequence
  Description of Artificial Sequence: Synthetic oligonucleotide
ggguacagacauuucuuag

SEQ ID NO: 3189346 - RNA, 19 nt, Artificial Sequence
  Description of Artificial Sequence: Synthetic oligonucleotide
ccagucauguuacaggaug

SEQ ID NO: 3189347 - RNA, 19 nt, Artificial Sequence
  Description of Artificial Sequence: Synthetic oligonucleotide
acgaaucccacaguccaag

SEQ ID NO: 3189348 - RNA, 19 nt, Artificial Sequence
  Description of Artificial Sequence: Synthetic oligonucleotide
cccaacacaggguacagac

SEQ ID NO: 3189349 - RNA, 19 nt, Artificial Sequence
  Description of Artificial Sequence: Synthetic oligonucleotide
cagacauuucuuagcacca

SEQ ID NO: 3189350 - RNA, 19 nt, Artificial Sequence
  Description of Artificial Sequence: Synthetic oligonucleotide
ugauguaggugguucucua

SEQ ID NO: 3189351 - RNA, 19 nt, Artificial Sequence
  Description of Artificial Sequence: Synthetic oligonucleotide
auguuacaggauggguggc

SEQ ID NO: 3189352 - RNA, 19 nt, Artificial Sequence
  Description of Artificial Sequence: Synthetic oligonucleotide
caggauggguggcaggggc

SEQ ID NO: 3189353 - RNA, 19 nt, Artificial Sequence
  Description of Artificial Sequence: Synthetic oligonucleotide
guaacgucauuguccugug

SEQ ID NO: 3189354 - RNA, 19 nt, Artificial Sequence
  Description of Artificial Sequence: Synthetic oligonucleotide
uccuagggcaccccugggu

SEQ ID NO: 3189355 - RNA, 19 nt, Artificial Sequence
  Description of Artificial Sequence: Synthetic oligonucleotide
ucucugugugauguaggug

SEQ ID NO: 3189356 - RNA, 19 nt, Artificial Sequence
  Description of Artificial Sequence: Synthetic oligonucleotide
ggugguucucuacgaaucc

SEQ ID NO: 3189357 - RNA, 19 nt, Artificial Sequence
  Description of Artificial Sequence: Synthetic oligonucleotide
acgucauuguccugugagu

SEQ ID NO: 3189358 - RNA, 19 nt, Artificial Sequence
  Description of Artificial Sequence: Synthetic oligonucleotide
uugguccggucucugugug

SEQ ID NO: 3189359 - RNA, 19 nt, Artificial Sequence
  Description of Artificial Sequence: Synthetic oligonucleotide
accccuggguccccaacac

SEQ ID NO: 3189360 - RNA, 19 nt, Artificial Sequence
  Description of Artificial Sequence: Synthetic oligonucleotide
aggguacagacauuucuua

SEQ ID NO: 3189361 - RNA, 19 nt, Artificial Sequence
  Description of Artificial Sequence: Synthetic oligonucleotide
ugugauguaggugguucuc

SEQ ID NO: 3189362 - RNA, 19 nt, Artificial Sequence
  Description of Artificial Sequence: Synthetic oligonucleotide
gcaggaagcaguaacguca

SEQ ID NO: 3189363 - RNA, 19 nt, Artificial Sequence
  Description of Artificial Sequence: Synthetic oligonucleotide
aguugccuugguccggucu

SEQ ID NO: 3189364 - RNA, 19 nt, Artificial Sequence
  Description of Artificial Sequence: Synthetic oligonucleotide
cauuccuagggcaccccug

SEQ ID NO: 3189365 - RNA, 19 nt, Artificial Sequence
  Description of Artificial Sequence: Synthetic oligonucleotide
uuccuagggcaccccuggg

SEQ ID NO: 3189366 - RNA, 19 nt, Artificial Sequence
  Description of Artificial Sequence: Synthetic oligonucleotide
guugccuugguccggucuc

SEQ ID NO: 3189367 - RNA, 19 nt, Artificial Sequence
  Description of Artificial Sequence: Synthetic oligonucleotide
ucucuacgaaucccacagu

SEQ ID NO: 3189368 - RNA, 19 nt, Artificial Sequence
  Description of Artificial Sequence: Synthetic oligonucleotide
uacgaaucccacaguccaa

SEQ ID NO: 3189369 - RNA, 19 nt, Artificial Sequence
  Description of Artificial Sequence: Synthetic oligonucleotide
uucuuagcaccaugccagu

SEQ ID NO: 3189370 - RNA, 19 nt, Artificial Sequence
  Description of Artificial Sequence: Synthetic oligonucleotide
cuagggcaccccugggucc

SEQ ID NO: 3189371 - RNA, 19 nt, Artificial Sequence
  Description of Artificial Sequence: Synthetic oligonucleotide
auaacuccaauucugagcc

SEQ ID NO: 3189372 - RNA, 19 nt, Artificial Sequence
  Description of Artificial Sequence: Synthetic oligonucleotide
auuuguaaaagccagauaa

SEQ ID NO: 3189373 - RNA, 19 nt, Artificial Sequence
  Description of Artificial Sequence: Synthetic oligonucleotide
uuuaggauuccuuaaauca

SEQ ID NO: 3189374 - RNA, 19 nt, Artificial Sequence
  Description of Artificial Sequence: Synthetic oligonucleotide
uaaaucaucaccucccugg

SEQ ID NO: 3189375 - RNA, 19 nt, Artificial Sequence
  Description of Artificial Sequence: Synthetic oligonucleotide
uuagagaaggacuagaaac

SEQ ID NO: 3189376 - RNA, 19 nt, Artificial Sequence
  Description of Artificial Sequence: Synthetic oligonucleotide
gauuccuuaaaucaucacc

SEQ ID NO: 3189377 - RNA, 19 nt, Artificial Sequence
  Description of Artificial Sequence: Synthetic oligonucleotide
cuagaaaccucccugaggg

SEQ ID NO: 3189378 - RNA, 19 nt, Artificial Sequence
  Description of Artificial Sequence: Synthetic oligonucleotide
ugguaaguggcuuagaaga

SEQ ID NO: 3189379 - RNA, 19 nt, Artificial Sequence
  Description of Artificial Sequence: Synthetic oligonucleotide
uuagaagagggacugguag

SEQ ID NO: 3189380 - RNA, 19 nt, Artificial Sequence
  Description of Artificial Sequence: Synthetic oligonucleotide
cagauaagcaucaaggaag

SEQ ID NO: 3189381 - RNA, 19 nt, Artificial Sequence
  Description of Artificial Sequence: Synthetic oligonucleotide
aacaauuuuggccacuugu

SEQ ID NO: 3189382 - RNA, 19 nt, Artificial Sequence
  Description of Artificial Sequence: Synthetic oligonucleotide
uaagcaucaaggaaggucu

SEQ ID NO: 3189383 - RNA, 19 nt, Artificial Sequence
  Description of Artificial Sequence: Synthetic oligonucleotide
uggagaacaauuuuggcca

SEQ ID NO: 3189384 - RNA, 19 nt, Artificial Sequence
  Description of Artificial Sequence: Synthetic oligonucleotide
uguaaaagccagauaagca

SEQ ID NO: 3189385 - RNA, 19 nt, Artificial Sequence
  Description of Artificial Sequence: Synthetic oligonucleotide
uaaguggcuuagaagaggg

SEQ ID NO: 3189386 - RNA, 19 nt, Artificial Sequence
  Description of Artificial Sequence: Synthetic oligonucleotide
uagagaaggacuagaaacc

SEQ ID NO: 3189387 - RNA, 19 nt, Artificial Sequence
  Description of Artificial Sequence: Synthetic oligonucleotide
uuuguaaaagccagauaag

SEQ ID NO: 3189388 - RNA, 19 nt, Artificial Sequence
  Description of Artificial Sequence: Synthetic oligonucleotide
agaaggacuagaaaccucc

SEQ ID NO: 3189389 - RNA, 19 nt, Artificial Sequence
  Description of Artificial Sequence: Synthetic oligonucleotide
gaaggcauaacuccaauuc

SEQ ID NO: 3189390 - RNA, 19 nt, Artificial Sequence
  Description of Artificial Sequence: Synthetic oligonucleotide
uugguguggagcaugagug

SEQ ID NO: 3189391 - RNA, 19 nt, Artificial Sequence
  Description of Artificial Sequence: Synthetic oligonucleotide
cauaacuccaauucugagc

SEQ ID NO: 3189392 - RNA, 19 nt, Artificial Sequence
  Description of Artificial Sequence: Synthetic oligonucleotide
auaagcaucaaggaagguc

SEQ ID NO: 3189393 - RNA, 19 nt, Artificial Sequence
  Description of Artificial Sequence: Synthetic oligonucleotide
aaaucaucaccucccuggg

SEQ ID NO: 3189394 - RNA, 19 nt, Artificial Sequence
  Description of Artificial Sequence: Synthetic oligonucleotide
uguaccugugcucuccugg

SEQ ID NO: 3189395 - RNA, 19 nt, Artificial Sequence
  Description of Artificial Sequence: Synthetic oligonucleotide
aucaaggaaggucucugcc

SEQ ID NO: 3189396 - RNA, 19 nt, Artificial Sequence
  Description of Artificial Sequence: Synthetic oligonucleotide
caugccguaacacaguggc

SEQ ID NO: 3189397 - RNA, 19 nt, Artificial Sequence
  Description of Artificial Sequence: Synthetic oligonucleotide
aggggauauuuguaaaagc

SEQ ID NO: 3189398 - RNA, 19 nt, Artificial Sequence
  Description of Artificial Sequence: Synthetic oligonucleotide
ugugauagcccugcgaggg

SEQ ID NO: 3189399 - RNA, 19 nt, Artificial Sequence
  Description of Artificial Sequence: Synthetic oligonucleotide
cuugugauagcccugcgag

SEQ ID NO: 3189400 - RNA, 19 nt, Artificial Sequence
  Description of Artificial Sequence: Synthetic oligonucleotide
guggagaacaauuuuggcc

SEQ ID NO: 3189401 - RNA, 19 nt, Artificial Sequence
  Description of Artificial Sequence: Synthetic oligonucleotide
caauucugagccuuuagag

SEQ ID NO: 3189402 - RNA, 19 nt, Artificial Sequence
  Description of Artificial Sequence: Synthetic oligonucleotide
uuguaaaagccagauaagc

SEQ ID NO: 3189403 - RNA, 19 nt, Artificial Sequence
  Description of Artificial Sequence: Synthetic oligonucleotide
aauuuuggccacuugugau

SEQ ID NO: 3189404 - RNA, 19 nt, Artificial Sequence
  Description of Artificial Sequence: Synthetic oligonucleotide
augaguguccagugaagcc

SEQ ID NO: 3189405 - RNA, 19 nt, Artificial Sequence
  Description of Artificial Sequence: Synthetic oligonucleotide
aaggggauauuuguaaaag

SEQ ID NO: 3189406 - RNA, 19 nt, Artificial Sequence
  Description of Artificial Sequence: Synthetic oligonucleotide
uccuuaaaucaucaccucc

SEQ ID NO: 3189407 - RNA, 19 nt, Artificial Sequence
  Description of Artificial Sequence: Synthetic oligonucleotide
uccagaauguaccugugcu

SEQ ID NO: 3189408 - RNA, 19 nt, Artificial Sequence
  Description of Artificial Sequence: Synthetic oligonucleotide
aguggcuuagaagagggac

SEQ ID NO: 3189409 - RNA, 19 nt, Artificial Sequence
  Description of Artificial Sequence: Synthetic oligonucleotide
uuugguguggagcaugagu

SEQ ID NO: 3189410 - RNA, 19 nt, Artificial Sequence
  Description of Artificial Sequence: Synthetic oligonucleotide
aaggcauaacuccaauucu

SEQ ID NO: 3189411 - RNA, 19 nt, Artificial Sequence
  Description of Artificial Sequence: Synthetic oligonucleotide
uuuagagaaggacuagaaa

SEQ ID NO: 3189412 - RNA, 19 nt, Artificial Sequence
  Description of Artificial Sequence: Synthetic oligonucleotide
cuguggagaacaauuuugg

SEQ ID NO: 3189413 - RNA, 19 nt, Artificial Sequence
  Description of Artificial Sequence: Synthetic oligonucleotide
uuuuaggauuccuuaaauc

SEQ ID NO: 3189414 - RNA, 19 nt, Artificial Sequence
  Description of Artificial Sequence: Synthetic oligonucleotide
auucugagccuuuagagaa

SEQ ID NO: 3189415 - RNA, 19 nt, Artificial Sequence
  Description of Artificial Sequence: Synthetic oligonucleotide
agccagauaagcaucaagg

SEQ ID NO: 3189416 - RNA, 19 nt, Artificial Sequence
  Description of Artificial Sequence: Synthetic oligonucleotide
uagaagagggacugguagg

SEQ ID NO: 3189417 - RNA, 19 nt, Artificial Sequence
  Description of Artificial Sequence: Synthetic oligonucleotide
acuagaaaccucccugagg

SEQ ID NO: 3189418 - RNA, 19 nt, Artificial Sequence
  Description of Artificial Sequence: Synthetic oligonucleotide
auuccuuaaaucaucaccu

SEQ ID NO: 3189419 - RNA, 19 nt, Artificial Sequence
  Description of Artificial Sequence: Synthetic oligonucleotide
uaaaagccagauaagcauc

SEQ ID NO: 3189420 - RNA, 19 nt, Artificial Sequence
  Description of Artificial Sequence: Synthetic oligonucleotide
uuaggauuccuuaaaucau

SEQ ID NO: 3189421 - RNA, 19 nt, Artificial Sequence
  Description of Artificial Sequence: Synthetic oligonucleotide
agaaaccucccugaggggc

SEQ ID NO: 3189422 - RNA, 19 nt, Artificial Sequence
  Description of Artificial Sequence: Synthetic oligonucleotide
aaaggggauauuuguaaaa

SEQ ID NO: 3189423 - RNA, 19 nt, Artificial Sequence
  Description of Artificial Sequence: Synthetic oligonucleotide
ugagcuagggacagagucc

SEQ ID NO: 3189424 - RNA, 19 nt, Artificial Sequence
  Description of Artificial Sequence: Synthetic oligonucleotide
uguccagugaagcccaacc

SEQ ID NO: 3189425 - RNA, 19 nt, Artificial Sequence
  Description of Artificial Sequence: Synthetic oligonucleotide
ucugcuccucuccagaaug

SEQ ID NO: 3189426 - RNA, 19 nt, Artificial Sequence
  Description of Artificial Sequence: Synthetic oligonucleotide
aggacuagaaaccucccug

SEQ ID NO: 3189427 - RNA, 19 nt, Artificial Sequence
  Description of Artificial Sequence: Synthetic oligonucleotide
uaggaaaggggauauuugu

SEQ ID NO: 3189428 - RNA, 19 nt, Artificial Sequence
  Description of Artificial Sequence: Synthetic oligonucleotide
aguuccuggguccuuggac

SEQ ID NO: 3189429 - RNA, 19 nt, Artificial Sequence
  Description of Artificial Sequence: Synthetic oligonucleotide
aagccagauaagcaucaag

SEQ ID NO: 3189430 - RNA, 19 nt, Artificial Sequence
  Description of Artificial Sequence: Synthetic oligonucleotide
uagggcagaaggcauaacu

SEQ ID NO: 3189431 - RNA, 19 nt, Artificial Sequence
  Description of Artificial Sequence: Synthetic oligonucleotide
agucccuaggauuuuagga

SEQ ID NO: 3189432 - RNA, 19 nt, Artificial Sequence
  Description of Artificial Sequence: Synthetic oligonucleotide
uccagugaagcccaaccug

SEQ ID NO: 3189433 - RNA, 19 nt, Artificial Sequence
  Description of Artificial Sequence: Synthetic oligonucleotide
agugaagcccaaccugagc

SEQ ID NO: 3189434 - RNA, 19 nt, Artificial Sequence
  Description of Artificial Sequence: Synthetic oligonucleotide
aaggaaggucucugccucc

SEQ ID NO: 3189435 - RNA, 19 nt, Artificial Sequence
  Description of Artificial Sequence: Synthetic oligonucleotide
ugaguguccagugaagccc

SEQ ID NO: 3189436 - RNA, 19 nt, Artificial Sequence
  Description of Artificial Sequence: Synthetic oligonucleotide
augguaaguggcuuagaag

SEQ ID NO: 3189437 - RNA, 19 nt, Artificial Sequence
  Description of Artificial Sequence: Synthetic oligonucleotide
uaccaagaggucacugugg

SEQ ID NO: 3189438 - RNA, 19 nt, Artificial Sequence
  Description of Artificial Sequence: Synthetic oligonucleotide
ugccguaacacaguggcag

SEQ ID NO: 3189439 - RNA, 19 nt, Artificial Sequence
  Description of Artificial Sequence: Synthetic oligonucleotide
uguggagaacaauuuuggc

SEQ ID NO: 3189440 - RNA, 19 nt, Artificial Sequence
  Description of Artificial Sequence: Synthetic oligonucleotide
uuaaaucaucaccucccug

SEQ ID NO: 3189441 - RNA, 19 nt, Artificial Sequence
  Description of Artificial Sequence: Synthetic oligonucleotide
agauaagcaucaaggaagg

SEQ ID NO: 3189442 - RNA, 19 nt, Artificial Sequence
  Description of Artificial Sequence: Synthetic oligonucleotide
auuuuaggauuccuuaaau

SEQ ID NO: 3189443 - RNA, 19 nt, Artificial Sequence
  Description of Artificial Sequence: Synthetic oligonucleotide
gauuuuaggauuccuuaaa

SEQ ID NO: 3189444 - RNA, 19 nt, Artificial Sequence
  Description of Artificial Sequence: Synthetic oligonucleotide
ucugagccuuuagagaagg

SEQ ID NO: 3189445 - RNA, 19 nt, Artificial Sequence
  Description of Artificial Sequence: Synthetic oligonucleotide
ggauauuuguaaaagccag

SEQ ID NO: 3189446 - RNA, 19 nt, Artificial Sequence
  Description of Artificial Sequence: Synthetic oligonucleotide
aucgccagggagcaguagg

SEQ ID NO: 3189447 - RNA, 19 nt, Artificial Sequence
  Description of Artificial Sequence: Synthetic oligonucleotide
uaggauuccuuaaaucauc

SEQ ID NO: 3189448 - RNA, 19 nt, Artificial Sequence
  Description of Artificial Sequence: Synthetic oligonucleotide
uuuuggccacuugugauag

SEQ ID NO: 3189449 - RNA, 19 nt, Artificial Sequence
  Description of Artificial Sequence: Synthetic oligonucleotide
aaggacuagaaaccucccu

SEQ ID NO: 3189450 - RNA, 19 nt, Artificial Sequence
  Description of Artificial Sequence: Synthetic oligonucleotide
auauuuguaaaagccagau

SEQ ID NO: 3189451 - RNA, 19 nt, Artificial Sequence
  Description of Artificial Sequence: Synthetic oligonucleotide
uggacuucugcuccucucc

SEQ ID NO: 3189452 - RNA, 19 nt, Artificial Sequence
  Description of Artificial Sequence: Synthetic oligonucleotide
cuccucuccagaauguacc

SEQ ID NO: 3189453 - RNA, 19 nt, Artificial Sequence
  Description of Artificial Sequence: Synthetic oligonucleotide
ucaaggaaggucucugccu

SEQ ID NO: 3189454 - RNA, 19 nt, Artificial Sequence
  Description of Artificial Sequence: Synthetic oligonucleotide
cugagcuagggacagaguc

SEQ ID NO: 3189455 - RNA, 19 nt, Artificial Sequence
  Description of Artificial Sequence: Synthetic oligonucleotide
cuggcaugccguaacacag

SEQ ID NO: 3189456 - RNA, 19 nt, Artificial Sequence
  Description of Artificial Sequence: Synthetic oligonucleotide
ugccaggacuaccaagagg

SEQ ID NO: 3189457 - RNA, 19 nt, Artificial Sequence
  Description of Artificial Sequence: Synthetic oligonucleotide
acuaccaagaggucacugu

SEQ ID NO: 3189458 - RNA, 19 nt, Artificial Sequence
  Description of Artificial Sequence: Synthetic oligonucleotide
ccuuaaaucaucaccuccc

SEQ ID NO: 3189459 - RNA, 19 nt, Artificial Sequence
  Description of Artificial Sequence: Synthetic oligonucleotide
aggauuuuaggauuccuua

SEQ ID NO: 3189460 - RNA, 19 nt, Artificial Sequence
  Description of Artificial Sequence: Synthetic oligonucleotide
ugagccuuuagagaaggac

SEQ ID NO: 3189461 - RNA, 19 nt, Artificial Sequence
  Description of Artificial Sequence: Synthetic oligonucleotide
aaaagccagauaagcauca

SEQ ID NO: 3189462 - RNA, 19 nt, Artificial Sequence
  Description of Artificial Sequence: Synthetic oligonucleotide
ggggauauuuguaaaagcc

SEQ ID NO: 3189463 - RNA, 19 nt, Artificial Sequence
  Description of Artificial Sequence: Synthetic oligonucleotide
guaaguggcuuagaagagg

SEQ ID NO: 3189464 - RNA, 19 nt, Artificial Sequence
  Description of Artificial Sequence: Synthetic oligonucleotide
agaguagagggaucgccag

SEQ ID NO: 3189465 - RNA, 19 nt, Artificial Sequence
  Description of Artificial Sequence: Synthetic oligonucleotide
acuguggagaacaauuuug

SEQ ID NO: 3189466 - RNA, 19 nt, Artificial Sequence
  Description of Artificial Sequence: Synthetic oligonucleotide
aucaucaccucccugggau

SEQ ID NO: 3189467 - RNA, 19 nt, Artificial Sequence
  Description of Artificial Sequence: Synthetic oligonucleotide
ucagaguagagggaucgcc

SEQ ID NO: 3189468 - RNA, 19 nt, Artificial Sequence
  Description of Artificial Sequence: Synthetic oligonucleotide
uuggccacuugugauagcc

SEQ ID NO: 3189469 - RNA, 19 nt, Artificial Sequence
  Description of Artificial Sequence: Synthetic oligonucleotide
aagagggacugguaggaaa

SEQ ID NO: 3189470 - RNA, 19 nt, Artificial Sequence
  Description of Artificial Sequence: Synthetic oligonucleotide
aggacuaccaagaggucac

SEQ ID NO: 3189471 - RNA, 19 nt, Artificial Sequence
  Description of Artificial Sequence: Synthetic oligonucleotide
auauuaacaacuuagaucc

SEQ ID NO: 3189472 - RNA, 19 nt, Artificial Sequence
  Description of Artificial Sequence: Synthetic oligonucleotide
auauaagcgacucaggugc

SEQ ID NO: 3189473 - RNA, 19 nt, Artificial Sequence
  Description of Artificial Sequence: Synthetic oligonucleotide
uauuguuacaaacaaaugu

SEQ ID NO: 3189474 - RNA, 19 nt, Artificial Sequence
  Description of Artificial Sequence: Synthetic oligonucleotide
uauauuaacaacuuagauc

SEQ ID NO: 3189475 - RNA, 19 nt, Artificial Sequence
  Description of Artificial Sequence: Synthetic oligonucleotide
ucugucagaacauucauag

SEQ ID NO: 3189476 - RNA, 19 nt, Artificial Sequence
  Description of Artificial Sequence: Synthetic oligonucleotide
aaucauaggcacuauuagg

SEQ ID NO: 3189477 - RNA, 19 nt, Artificial Sequence
  Description of Artificial Sequence: Synthetic oligonucleotide
uaugauaagagcuuugcug

SEQ ID NO: 3189478 - RNA, 19 nt, Artificial Sequence
  Description of Artificial Sequence: Synthetic oligonucleotide
uccaacuccagacugauag

SEQ ID NO: 3189479 - RNA, 19 nt, Artificial Sequence
  Description of Artificial Sequence: Synthetic oligonucleotide
aacauaaucuguuucuuug

SEQ ID NO: 3189480 - RNA, 19 nt, Artificial Sequence
  Description of Artificial Sequence: Synthetic oligonucleotide
uauucauguaaucauaacu

SEQ ID NO: 3189481 - RNA, 19 nt, Artificial Sequence
  Description of Artificial Sequence: Synthetic oligonucleotide
ugauuuuauaagcaaaaga

SEQ ID NO: 3189482 - RNA, 19 nt, Artificial Sequence
  Description of Artificial Sequence: Synthetic oligonucleotide
uauuagguuggccaaagag

SEQ ID NO: 3189483 - RNA, 19 nt, Artificial Sequence
  Description of Artificial Sequence: Synthetic oligonucleotide
auauucuguacucagauga

SEQ ID NO: 3189484 - RNA, 19 nt, Artificial Sequence
  Description of Artificial Sequence: Synthetic oligonucleotide
aaugugugaagugaguacg

SEQ ID NO: 3189485 - RNA, 19 nt, Artificial Sequence
  Description of Artificial Sequence: Synthetic oligonucleotide
gucaaaugcacuuugagac

SEQ ID NO: 3189486 - RNA, 19 nt, Artificial Sequence
  Description of Artificial Sequence: Synthetic oligonucleotide
uauaacauaaucuguuucu

SEQ ID NO: 3189487 - RNA, 19 nt, Artificial Sequence
  Description of Artificial Sequence: Synthetic oligonucleotide
gaugugguaauguauuuag

SEQ ID NO: 3189488 - RNA, 19 nt, Artificial Sequence
  Description of Artificial Sequence: Synthetic oligonucleotide
aaagaugacugucagcugu

SEQ ID NO: 3189489 - RNA, 19 nt, Artificial Sequence
  Description of Artificial Sequence: Synthetic oligonucleotide
gaacauaccuucuuugagg

SEQ ID NO: 3189490 - RNA, 19 nt, Artificial Sequence
  Description of Artificial Sequence: Synthetic oligonucleotide
cauuaauccagucauaauc

SEQ ID NO: 3189491 - RNA, 19 nt, Artificial Sequence
  Description of Artificial Sequence: Synthetic oligonucleotide
acugauaagcaauauauaa

SEQ ID NO: 3189492 - RNA, 19 nt, Artificial Sequence
  Description of Artificial Sequence: Synthetic oligonucleotide
uacucuuuagcucuuguug

SEQ ID NO: 3189493 - RNA, 19 nt, Artificial Sequence
  Description of Artificial Sequence: Synthetic oligonucleotide
uguuguuuaugauaagagc

SEQ ID NO: 3189494 - RNA, 19 nt, Artificial Sequence
  Description of Artificial Sequence: Synthetic oligonucleotide
ugaucaagaucuucuauag

SEQ ID NO: 3189495 - RNA, 19 nt, Artificial Sequence
  Description of Artificial Sequence: Synthetic oligonucleotide
uuagguuggccaaagaggu

SEQ ID NO: 3189496 - RNA, 19 nt, Artificial Sequence
  Description of Artificial Sequence: Synthetic oligonucleotide
uuauauuaacaacuuagau

SEQ ID NO: 3189497 - RNA, 19 nt, Artificial Sequence
  Description of Artificial Sequence: Synthetic oligonucleotide
ugcauuguugaacauaccu

SEQ ID NO: 3189498 - RNA, 19 nt, Artificial Sequence
  Description of Artificial Sequence: Synthetic oligonucleotide
ugguagaaaagacagauuu

SEQ ID NO: 3189499 - RNA, 19 nt, Artificial Sequence
  Description of Artificial Sequence: Synthetic oligonucleotide
ucaaucauuaauccuuuga

SEQ ID NO: 3189500 - RNA, 19 nt, Artificial Sequence
  Description of Artificial Sequence: Synthetic oligonucleotide
ugcauaauugcuagguucc

SEQ ID NO: 3189501 - RNA, 19 nt, Artificial Sequence
  Description of Artificial Sequence: Synthetic oligonucleotide
uuugacucugaguaaaucu

SEQ ID NO: 3189502 - RNA, 19 nt, Artificial Sequence
  Description of Artificial Sequence: Synthetic oligonucleotide
aagauccaaggcugcaucc

SEQ ID NO: 3189503 - RNA, 19 nt, Artificial Sequence
  Description of Artificial Sequence: Synthetic oligonucleotide
gaagagaacguuugcauug

SEQ ID NO: 3189504 - RNA, 19 nt, Artificial Sequence
  Description of Artificial Sequence: Synthetic oligonucleotide
aacaaauguuguuccaaag

SEQ ID NO: 3189505 - RNA, 19 nt, Artificial Sequence
  Description of Artificial Sequence: Synthetic oligonucleotide
auuaauacugccuuagcaa

SEQ ID NO: 3189506 - RNA, 19 nt, Artificial Sequence
  Description of Artificial Sequence: Synthetic oligonucleotide
agcaaaagaaaauucauua

SEQ ID NO: 3189507 - RNA, 19 nt, Artificial Sequence
  Description of Artificial Sequence: Synthetic oligonucleotide
gaaucauaggcacuauuag

SEQ ID NO: 3189508 - RNA, 19 nt, Artificial Sequence
  Description of Artificial Sequence: Synthetic oligonucleotide
uguuacaaacaaauguugu

SEQ ID NO: 3189509 - RNA, 19 nt, Artificial Sequence
  Description of Artificial Sequence: Synthetic oligonucleotide
caauauauaagcgacucag

SEQ ID NO: 3189510 - RNA, 19 nt, Artificial Sequence
  Description of Artificial Sequence: Synthetic oligonucleotide
aauauucuggguaugagaa

SEQ ID NO: 3189511 - RNA, 19 nt, Artificial Sequence
  Description of Artificial Sequence: Synthetic oligonucleotide
uauauaagcgacucaggug

SEQ ID NO: 3189512 - RNA, 19 nt, Artificial Sequence
  Description of Artificial Sequence: Synthetic oligonucleotide
guaugagaaagauccaagg

SEQ ID NO: 3189513 - RNA, 19 nt, Artificial Sequence
  Description of Artificial Sequence: Synthetic oligonucleotide
augauaagagcuuugcuga

SEQ ID NO: 3189514 - RNA, 19 nt, Artificial Sequence
  Description of Artificial Sequence: Synthetic oligonucleotide
cuucuuguagccacuaucc

SEQ ID NO: 3189515 - RNA, 19 nt, Artificial Sequence
  Description of Artificial Sequence: Synthetic oligonucleotide
agaguuacaguucuaguca

SEQ ID NO: 3189516 - RNA, 19 nt, Artificial Sequence
  Description of Artificial Sequence: Synthetic oligonucleotide
ucuaguagcuucuuaccag

SEQ ID NO: 3189517 - RNA, 19 nt, Artificial Sequence
  Description of Artificial Sequence: Synthetic oligonucleotide
auugauauucauguaauca

SEQ ID NO: 3189518 - RNA, 19 nt, Artificial Sequence
  Description of Artificial Sequence: Synthetic oligonucleotide
uagcaauaaaacuaguuaa

SEQ ID NO: 3189519 - RNA, 19 nt, Artificial Sequence
  Description of Artificial Sequence: Synthetic oligonucleotide
uuugguagaaaagacagau

SEQ ID NO: 3189520 - RNA, 19 nt, Artificial Sequence
  Description of Artificial Sequence: Synthetic oligonucleotide
acugauagccucaacuucc

SEQ ID NO: 3189521 - RNA, 19 nt, Artificial Sequence
  Description of Artificial Sequence: Synthetic oligonucleotide
ugaaucauaggcacuauua

SEQ ID NO: 3189522 - RNA, 19 nt, Artificial Sequence
  Description of Artificial Sequence: Synthetic oligonucleotide
ucuugaagcuuuaauauuu

SEQ ID NO: 3189523 - RNA, 19 nt, Artificial Sequence
  Description of Artificial Sequence: Synthetic oligonucleotide
ucuaucucacaagugagag

SEQ ID NO: 3189524 - RNA, 19 nt, Artificial Sequence
  Description of Artificial Sequence: Synthetic oligonucleotide
aucuuuaugacuugcuucu

SEQ ID NO: 3189525 - RNA, 19 nt, Artificial Sequence
  Description of Artificial Sequence: Synthetic oligonucleotide
aacaagauucugagcaacc

SEQ ID NO: 3189526 - RNA, 19 nt, Artificial Sequence
  Description of Artificial Sequence: Synthetic oligonucleotide
uuauccagaaguuucuccu

SEQ ID NO: 3189527 - RNA, 19 nt, Artificial Sequence
  Description of Artificial Sequence: Synthetic oligonucleotide
uauccauauuguuacaaac

SEQ ID NO: 3189528 - RNA, 19 nt, Artificial Sequence
  Description of Artificial Sequence: Synthetic oligonucleotide
uagacagacugaaaagugc

SEQ ID NO: 3189529 - RNA, 19 nt, Artificial Sequence
  Description of Artificial Sequence: Synthetic oligonucleotide
uucauuaauacugccuuag

SEQ ID NO: 3189530 - RNA, 19 nt, Artificial Sequence
  Description of Artificial Sequence: Synthetic oligonucleotide
uguuucuuuguauuucagc

SEQ ID NO: 3189531 - RNA, 19 nt, Artificial Sequence
  Description of Artificial Sequence: Synthetic oligonucleotide
agaugagaagucuagcaug

SEQ ID NO: 3189532 - RNA, 19 nt, Artificial Sequence
  Description of Artificial Sequence: Synthetic oligonucleotide
gcuacaugaacauuguuag

SEQ ID NO: 3189533 - RNA, 19 nt, Artificial Sequence
  Description of Artificial Sequence: Synthetic oligonucleotide
ucuauaguugcaaggauuu

SEQ ID NO: 3189534 - RNA, 19 nt, Artificial Sequence
  Description of Artificial Sequence: Synthetic oligonucleotide
aggcauaucaacagguucc

SEQ ID NO: 3189535 - RNA, 19 nt, Artificial Sequence
  Description of Artificial Sequence: Synthetic oligonucleotide
auagcucucauguugacau

SEQ ID NO: 3189536 - RNA, 19 nt, Artificial Sequence
  Description of Artificial Sequence: Synthetic oligonucleotide
acuaagcucaguuagguuu

SEQ ID NO: 3189537 - RNA, 19 nt, Artificial Sequence
  Description of Artificial Sequence: Synthetic oligonucleotide
uaucuuucacacuuaucag

SEQ ID NO: 3189538 - RNA, 19 nt, Artificial Sequence
  Description of Artificial Sequence: Synthetic oligonucleotide
ugaguuuaccaacuaggca

SEQ ID NO: 3189539 - RNA, 19 nt, Artificial Sequence
  Description of Artificial Sequence: Synthetic oligonucleotide
cacucaaugucccaugagg

SEQ ID NO: 3189540 - RNA, 19 nt, Artificial Sequence
  Description of Artificial Sequence: Synthetic oligonucleotide
aacaccauccacaaacuug

SEQ ID NO: 3189541 - RNA, 19 nt, Artificial Sequence
  Description of Artificial Sequence: Synthetic oligonucleotide
uuugcagcaaaucucccuc

SEQ ID NO: 3189542 - RNA, 19 nt, Artificial Sequence
  Description of Artificial Sequence: Synthetic oligonucleotide
uuugaagagaacguuugca

SEQ ID NO: 3189543 - RNA, 19 nt, Artificial Sequence
  Description of Artificial Sequence: Synthetic oligonucleotide
acuaugaaucacaucaauc

SEQ ID NO: 3189544 - RNA, 19 nt, Artificial Sequence
  Description of Artificial Sequence: Synthetic oligonucleotide
uccucuaaagaucggagaa

SEQ ID NO: 3189545 - RNA, 19 nt, Artificial Sequence
  Description of Artificial Sequence: Synthetic oligonucleotide
cauuguuaggaccaacaag

SEQ ID NO: 3189546 - RNA, 19 nt, Artificial Sequence
  Description of Artificial Sequence: Synthetic oligonucleotide
accuucagcaguuucagga

SEQ ID NO: 3189547 - RNA, 19 nt, Artificial Sequence
  Description of Artificial Sequence: Synthetic oligonucleotide
cucauucugaacaucuuug

SEQ ID NO: 3189548 - RNA, 19 nt, Artificial Sequence
  Description of Artificial Sequence: Synthetic oligonucleotide
aagucuagcauguguuuca

SEQ ID NO: 3189549 - RNA, 19 nt, Artificial Sequence
  Description of Artificial Sequence: Synthetic oligonucleotide
uugcuuacucuuuagcucu

SEQ ID NO: 3189550 - RNA, 19 nt, Artificial Sequence
  Description of Artificial Sequence: Synthetic oligonucleotide
caucauuucaaucugaccu

SEQ ID NO: 3189551 - RNA, 19 nt, Artificial Sequence
  Description of Artificial Sequence: Synthetic oligonucleotide
cauauuguuacaaacaaau

SEQ ID NO: 3189552 - RNA, 19 nt, Artificial Sequence
  Description of Artificial Sequence: Synthetic oligonucleotide
gaaugugugaagugaguac

SEQ ID NO: 3189553 - RNA, 19 nt, Artificial Sequence
  Description of Artificial Sequence: Synthetic oligonucleotide
ucaacagguuccuuaauau

SEQ ID NO: 3189554 - RNA, 19 nt, Artificial Sequence
  Description of Artificial Sequence: Synthetic oligonucleotide
aucuaaaacugucugcccu

SEQ ID NO: 3189555 - RNA, 19 nt, Artificial Sequence
  Description of Artificial Sequence: Synthetic oligonucleotide
uuaauauuuuauccugcau

SEQ ID NO: 3189556 - RNA, 19 nt, Artificial Sequence
  Description of Artificial Sequence: Synthetic oligonucleotide
gaguuuaccaacuaggcau

SEQ ID NO: 3189557 - RNA, 19 nt, Artificial Sequence
  Description of Artificial Sequence: Synthetic oligonucleotide
uacaauucuuuucuucuuc

SEQ ID NO: 3189558 - RNA, 19 nt, Artificial Sequence
  Description of Artificial Sequence: Synthetic oligonucleotide
uugugcagcggccaaagcu

SEQ ID NO: 3189559 - RNA, 19 nt, Artificial Sequence
  Description of Artificial Sequence: Synthetic oligonucleotide
uacaacauuguagagucgu

SEQ ID NO: 3189560 - RNA, 19 nt, Artificial Sequence
  Description of Artificial Sequence: Synthetic oligonucleotide
aaaagaugacugucagcug

SEQ ID NO: 3189561 - RNA, 19 nt, Artificial Sequence
  Description of Artificial Sequence: Synthetic oligonucleotide
aagauggcacuaugaauca

SEQ ID NO: 3189562 - RNA, 19 nt, Artificial Sequence
  Description of Artificial Sequence: Synthetic oligonucleotide
uuuaaugucuccucacuuu

SEQ ID NO: 3189563 - RNA, 19 nt, Artificial Sequence
  Description of Artificial Sequence: Synthetic oligonucleotide
uucacacuuaucagagaag

SEQ ID NO: 3189564 - RNA, 19 nt, Artificial Sequence
  Description of Artificial Sequence: Synthetic oligonucleotide
uguauuuccuaaggcaacc

SEQ ID NO: 3189565 - RNA, 19 nt, Artificial Sequence
  Description of Artificial Sequence: Synthetic oligonucleotide
acaugcucucuuuugagcu

SEQ ID NO: 3189566 - RNA, 19 nt, Artificial Sequence
  Description of Artificial Sequence: Synthetic oligonucleotide
acugucagcuguauuauuc

SEQ ID NO: 3189567 - RNA, 19 nt, Artificial Sequence
  Description of Artificial Sequence: Synthetic oligonucleotide
uuguaugcaacccgaagau

SEQ ID NO: 3189568 - RNA, 19 nt, Artificial Sequence
  Description of Artificial Sequence: Synthetic oligonucleotide
gaagugaguacgcagcauc

SEQ ID NO: 3189569 - RNA, 19 nt, Artificial Sequence
  Description of Artificial Sequence: Synthetic oligonucleotide
uucuauaguugcaaggauu

SEQ ID NO: 3189570 - RNA, 19 nt, Artificial Sequence
  Description of Artificial Sequence: Synthetic oligonucleotide
uaauguauuuagacagacu

SEQ ID NO: 3189571 - RNA, 19 nt, Artificial Sequence
  Description of Artificial Sequence: Synthetic oligonucleotide
aauauuaacaauuauaaac

SEQ ID NO: 3189572 - RNA, 19 nt, Artificial Sequence
  Description of Artificial Sequence: Synthetic oligonucleotide
uuaacaauuauaaacaaag

SEQ ID NO: 3189573 - RNA, 19 nt, Artificial Sequence
  Description of Artificial Sequence: Synthetic oligonucleotide
auauagaagaaacucagcc

SEQ ID NO: 3189574 - RNA, 19 nt, Artificial Sequence
  Description of Artificial Sequence: Synthetic oligonucleotide
aaucauauuggccacaguc

SEQ ID NO: 3189575 - RNA, 19 nt, Artificial Sequence
  Description of Artificial Sequence: Synthetic oligonucleotide
aacaauuauaaacaaagca

SEQ ID NO: 3189576 - RNA, 19 nt, Artificial Sequence
  Description of Artificial Sequence: Synthetic oligonucleotide
uuuagaacaacccuucuag

SEQ ID NO: 3189577 - RNA, 19 nt, Artificial Sequence
  Description of Artificial Sequence: Synthetic oligonucleotide
uuauaaacaaagcagugca

SEQ ID NO: 3189578 - RNA, 19 nt, Artificial Sequence
  Description of Artificial Sequence: Synthetic oligonucleotide
ucauauagaagaaacucag

SEQ ID NO: 3189579 - RNA, 19 nt, Artificial Sequence
  Description of Artificial Sequence: Synthetic oligonucleotide
ucuaauauuaacaauuaua

SEQ ID NO: 3189580 - RNA, 19 nt, Artificial Sequence
  Description of Artificial Sequence: Synthetic oligonucleotide
ucagccauaggucagaucu

SEQ ID NO: 3189581 - RNA, 19 nt, Artificial Sequence
  Description of Artificial Sequence: Synthetic oligonucleotide
auuauaaacaaagcagugc

SEQ ID NO: 3189582 - RNA, 19 nt, Artificial Sequence
  Description of Artificial Sequence: Synthetic oligonucleotide
acaauuauaaacaaagcag

SEQ ID NO: 3189583 - RNA, 19 nt, Artificial Sequence
  Description of Artificial Sequence: Synthetic oligonucleotide
aagaaacucagccauaggu

SEQ ID NO: 3189584 - RNA, 19 nt, Artificial Sequence
  Description of Artificial Sequence: Synthetic oligonucleotide
cuaauauuaacaauuauaa

SEQ ID NO: 3189585 - RNA, 19 nt, Artificial Sequence
  Description of Artificial Sequence: Synthetic oligonucleotide
ugauauugaagguuuuacg

SEQ ID NO: 3189586 - RNA, 19 nt, Artificial Sequence
  Description of Artificial Sequence: Synthetic oligonucleotide
gauauugaagguuuuacga

SEQ ID NO: 3189587 - RNA, 19 nt, Artificial Sequence
  Description of Artificial Sequence: Synthetic oligonucleotide
uucucuaauauuaacaauu

SEQ ID NO: 3189588 - RNA, 19 nt, Artificial Sequence
  Description of Artificial Sequence: Synthetic oligonucleotide
auauuaacaauuauaaaca

SEQ ID NO: 3189589 - RNA, 19 nt, Artificial Sequence
  Description of Artificial Sequence: Synthetic oligonucleotide
acucauauagaagaaacuc

SEQ ID NO: 3189590 - RNA, 19 nt, Artificial Sequence
  Description of Artificial Sequence: Synthetic oligonucleotide
aacaaagcagugcaacuag

SEQ ID NO: 3189591 - RNA, 19 nt, Artificial Sequence
  Description of Artificial Sequence: Synthetic oligonucleotide
uuccccuuaaucauauugg

SEQ ID NO: 3189592 - RNA, 19 nt, Artificial Sequence
  Description of Artificial Sequence: Synthetic oligonucleotide
auaaacaaagcagugcaac

SEQ ID NO: 3189593 - RNA, 19 nt, Artificial Sequence
  Description of Artificial Sequence: Synthetic oligonucleotide
uuuacgaaucuccucagga

SEQ ID NO: 3189594 - RNA, 19 nt, Artificial Sequence
  Description of Artificial Sequence: Synthetic oligonucleotide
uauagaagaaacucagcca

SEQ ID NO: 3189595 - RNA, 19 nt, Artificial Sequence
  Description of Artificial Sequence: Synthetic oligonucleotide
uuuccccuuaaucauauug

SEQ ID NO: 3189596 - RNA, 19 nt, Artificial Sequence
  Description of Artificial Sequence: Synthetic oligonucleotide
cuagcauuuagaacaaccc

SEQ ID NO: 3189597 - RNA, 19 nt, Artificial Sequence
  Description of Artificial Sequence: Synthetic oligonucleotide
gcaacuagcauuuagaaca

SEQ ID NO: 3189598 - RNA, 19 nt, Artificial Sequence
  Description of Artificial Sequence: Synthetic oligonucleotide
uaacaauuauaaacaaagc

SEQ ID NO: 3189599 - RNA, 19 nt, Artificial Sequence
  Description of Artificial Sequence: Synthetic oligonucleotide
acuagcauuuagaacaacc

SEQ ID NO: 3189600 - RNA, 19 nt, Artificial Sequence
  Description of Artificial Sequence: Synthetic oligonucleotide
acuggaacuacacaugcag

SEQ ID NO: 3189601 - RNA, 19 nt, Artificial Sequence
  Description of Artificial Sequence: Synthetic oligonucleotide
uguucucuaauauuaacaa

SEQ ID NO: 3189602 - RNA, 19 nt, Artificial Sequence
  Description of Artificial Sequence: Synthetic oligonucleotide
uucacuucucuucacacca

SEQ ID NO: 3189603 - RNA, 19 nt, Artificial Sequence
  Description of Artificial Sequence: Synthetic oligonucleotide
ucuaguguuacagugucag

SEQ ID NO: 3189604 - RNA, 19 nt, Artificial Sequence
  Description of Artificial Sequence: Synthetic oligonucleotide
aauuauaaacaaagcagug

SEQ ID NO: 3189605 - RNA, 19 nt, Artificial Sequence
  Description of Artificial Sequence: Synthetic oligonucleotide
auagaagaaacucagccau

SEQ ID NO: 3189606 - RNA, 19 nt, Artificial Sequence
  Description of Artificial Sequence: Synthetic oligonucleotide
aacuucuacucauauagaa

SEQ ID NO: 3189607 - RNA, 19 nt, Artificial Sequence
  Description of Artificial Sequence: Synthetic oligonucleotide
cuacucauauagaagaaac

SEQ ID NO: 3189608 - RNA, 19 nt, Artificial Sequence
  Description of Artificial Sequence: Synthetic oligonucleotide
gaagguuuuacgaaucucc

SEQ ID NO: 3189609 - RNA, 19 nt, Artificial Sequence
  Description of Artificial Sequence: Synthetic oligonucleotide
uuccucuucaguaaagucu

SEQ ID NO: 3189610 - RNA, 19 nt, Artificial Sequence
  Description of Artificial Sequence: Synthetic oligonucleotide
aggaguuuuccccuuaauc

SEQ ID NO: 3189611 - RNA, 19 nt, Artificial Sequence
  Description of Artificial Sequence: Synthetic oligonucleotide
ugcagugaggacaaggcug

SEQ ID NO: 3189612 - RNA, 19 nt, Artificial Sequence
  Description of Artificial Sequence: Synthetic oligonucleotide
acuguucucuaauauuaac

SEQ ID NO: 3189613 - RNA, 19 nt, Artificial Sequence
  Description of Artificial Sequence: Synthetic oligonucleotide
uguacuggaacuacacaug

SEQ ID NO: 3189614 - RNA, 19 nt, Artificial Sequence
  Description of Artificial Sequence: Synthetic oligonucleotide
uagaacaacccuucuagug

SEQ ID NO: 3189615 - RNA, 19 nt, Artificial Sequence
  Description of Artificial Sequence: Synthetic oligonucleotide
uauuaacaauuauaaacaa

SEQ ID NO: 3189616 - RNA, 19 nt, Artificial Sequence
  Description of Artificial Sequence: Synthetic oligonucleotide
uacagugucaggcacagua

SEQ ID NO: 3189617 - RNA, 19 nt, Artificial Sequence
  Description of Artificial Sequence: Synthetic oligonucleotide
cuucuacucauauagaaga

SEQ ID NO: 3189618 - RNA, 19 nt, Artificial Sequence
  Description of Artificial Sequence: Synthetic oligonucleotide
uggaacuacacaugcagug

SEQ ID NO: 3189619 - RNA, 19 nt, Artificial Sequence
  Description of Artificial Sequence: Synthetic oligonucleotide
acuucacuucucuucacac

SEQ ID NO: 3189620 - RNA, 19 nt, Artificial Sequence
  Description of Artificial Sequence: Synthetic oligonucleotide
agaacaacccuucuagugu

SEQ ID NO: 3189621 - RNA, 19 nt, Artificial Sequence
  Description of Artificial Sequence: Synthetic oligonucleotide
uaguguuacagugucaggc

SEQ ID NO: 3189622 - RNA, 19 nt, Artificial Sequence
  Description of Artificial Sequence: Synthetic oligonucleotide
uuuuacgaaucuccucagg

SEQ ID NO: 3189623 - RNA, 19 nt, Artificial Sequence
  Description of Artificial Sequence: Synthetic oligonucleotide
uaauauuaacaauuauaaa

SEQ ID NO: 3189624 - RNA, 19 nt, Artificial Sequence
  Description of Artificial Sequence: Synthetic oligonucleotide
gaaacucagccauagguca

SEQ ID NO: 3189625 - RNA, 19 nt, Artificial Sequence
  Description of Artificial Sequence: Synthetic oligonucleotide
aacccuucuaguguuacag

SEQ ID NO: 3189626 - RNA, 19 nt, Artificial Sequence
  Description of Artificial Sequence: Synthetic oligonucleotide
uacacaugcagugaggaca

SEQ ID NO: 3189627 - RNA, 19 nt, Artificial Sequence
  Description of Artificial Sequence: Synthetic oligonucleotide
uuacgaaucuccucaggag

SEQ ID NO: 3189628 - RNA, 19 nt, Artificial Sequence
  Description of Artificial Sequence: Synthetic oligonucleotide
aguacuucacuucucuuca

SEQ ID NO: 3189629 - RNA, 19 nt, Artificial Sequence
  Description of Artificial Sequence: Synthetic oligonucleotide
uaaacaaagcagugcaacu

SEQ ID NO: 3189630 - RNA, 19 nt, Artificial Sequence
  Description of Artificial Sequence: Synthetic oligonucleotide
caugcagugaggacaaggc

SEQ ID NO: 3189631 - RNA, 19 nt, Artificial Sequence
  Description of Artificial Sequence: Synthetic oligonucleotide
uauugaagguuuuacgaau

SEQ ID NO: 3189632 - RNA, 19 nt, Artificial Sequence
  Description of Artificial Sequence: Synthetic oligonucleotide
uuaaucauauuggccacag

SEQ ID NO: 3189633 - RNA, 19 nt, Artificial Sequence
  Description of Artificial Sequence: Synthetic oligonucleotide
uagcauuuagaacaacccu

SEQ ID NO: 3189634 - RNA, 19 nt, Artificial Sequence
  Description of Artificial Sequence: Synthetic oligonucleotide
ucucuaauauuaacaauua

SEQ ID NO: 3189635 - RNA, 19 nt, Artificial Sequence
  Description of Artificial Sequence: Synthetic oligonucleotide
uacgaaucuccucaggagu

SEQ ID NO: 3189636 - RNA, 19 nt, Artificial Sequence
  Description of Artificial Sequence: Synthetic oligonucleotide
ucuucaguaaagucuauuu

SEQ ID NO: 3189637 - RNA, 19 nt, Artificial Sequence
  Description of Artificial Sequence: Synthetic oligonucleotide
uguguuugucuacuguucu

SEQ ID NO: 3189638 - RNA, 19 nt, Artificial Sequence
  Description of Artificial Sequence: Synthetic oligonucleotide
uacucauauagaagaaacu

SEQ ID NO: 3189639 - RNA, 19 nt, Artificial Sequence
  Description of Artificial Sequence: Synthetic oligonucleotide
uucucuuugcguaccuggg

SEQ ID NO: 3189640 - RNA, 19 nt, Artificial Sequence
  Description of Artificial Sequence: Synthetic oligonucleotide
gaacuacacaugcagugag

SEQ ID NO: 3189641 - RNA, 19 nt, Artificial Sequence
  Description of Artificial Sequence: Synthetic oligonucleotide
guucucuuugcguaccugg

SEQ ID NO: 3189642 - RNA, 19 nt, Artificial Sequence
  Description of Artificial Sequence: Synthetic oligonucleotide
cauauagaagaaacucagc

SEQ ID NO: 3189643 - RNA, 19 nt, Artificial Sequence
  Description of Artificial Sequence: Synthetic oligonucleotide
auauugaagguuuuacgaa

SEQ ID NO: 3189644 - RNA, 19 nt, Artificial Sequence
  Description of Artificial Sequence: Synthetic oligonucleotide
uugauauugaagguuuuac

SEQ ID NO: 3189645 - RNA, 19 nt, Artificial Sequence
  Description of Artificial Sequence: Synthetic oligonucleotide
aaagcagugcaacuagcau

SEQ ID NO: 3189646 - RNA, 19 nt, Artificial Sequence
  Description of Artificial Sequence: Synthetic oligonucleotide
agaaacucagccauagguc

SEQ ID NO: 3189647 - RNA, 19 nt, Artificial Sequence
  Description of Artificial Sequence: Synthetic oligonucleotide
agaagaaacucagccauag

SEQ ID NO: 3189648 - RNA, 19 nt, Artificial Sequence
  Description of Artificial Sequence: Synthetic oligonucleotide
cuucucuucacaccacugg

SEQ ID NO: 3189649 - RNA, 19 nt, Artificial Sequence
  Description of Artificial Sequence: Synthetic oligonucleotide
cucauauagaagaaacuca

SEQ ID NO: 3189650 - RNA, 19 nt, Artificial Sequence
  Description of Artificial Sequence: Synthetic oligonucleotide
ggaguuuuccccuuaauca

SEQ ID NO: 3189651 - RNA, 19 nt, Artificial Sequence
  Description of Artificial Sequence: Synthetic oligonucleotide
aagcagugcaacuagcauu

SEQ ID NO: 3189652 - RNA, 19 nt, Artificial Sequence
  Description of Artificial Sequence: Synthetic oligonucleotide
ucagaucuguacuggaacu

SEQ ID NO: 3189653 - RNA, 19 nt, Artificial Sequence
  Description of Artificial Sequence: Synthetic oligonucleotide
uauaaacaaagcagugcaa

SEQ ID NO: 3189654 - RNA, 19 nt, Artificial Sequence
  Description of Artificial Sequence: Synthetic oligonucleotide
auaggucagaucuguacug

SEQ ID NO: 3189655 - RNA, 19 nt, Artificial Sequence
  Description of Artificial Sequence: Synthetic oligonucleotide
gguuuuacgaaucuccuca

SEQ ID NO: 3189656 - RNA, 19 nt, Artificial Sequence
  Description of Artificial Sequence: Synthetic oligonucleotide
caauuauaaacaaagcagu

SEQ ID NO: 3189657 - RNA, 19 nt, Artificial Sequence
  Description of Artificial Sequence: Synthetic oligonucleotide
ugcaacuagcauuuagaac

SEQ ID NO: 3189658 - RNA, 19 nt, Artificial Sequence
  Description of Artificial Sequence: Synthetic oligonucleotide
ucuacuguucucuaauauu

SEQ ID NO: 3189659 - RNA, 19 nt, Artificial Sequence
  Description of Artificial Sequence: Synthetic oligonucleotide
uccucuucaguaaagucua

SEQ ID NO: 3189660 - RNA, 19 nt, Artificial Sequence
  Description of Artificial Sequence: Synthetic oligonucleotide
gaagaaacucagccauagg

SEQ ID NO: 3189661 - RNA, 19 nt, Artificial Sequence
  Description of Artificial Sequence: Synthetic oligonucleotide
ucuguacuggaacuacaca

SEQ ID NO: 3189662 - RNA, 19 nt, Artificial Sequence
  Description of Artificial Sequence: Synthetic oligonucleotide
acugguucucuuugcguac

SEQ ID NO: 3189663 - RNA, 19 nt, Artificial Sequence
  Description of Artificial Sequence: Synthetic oligonucleotide
uucucuucacaccacuggu

SEQ ID NO: 3189664 - RNA, 19 nt, Artificial Sequence
  Description of Artificial Sequence: Synthetic oligonucleotide
guacuggaacuacacaugc

SEQ ID NO: 3189665 - RNA, 19 nt, Artificial Sequence
  Description of Artificial Sequence: Synthetic oligonucleotide
uccccuuaaucauauuggc

SEQ ID NO: 3189666 - RNA, 19 nt, Artificial Sequence
  Description of Artificial Sequence: Synthetic oligonucleotide
aguguuacagugucaggca

SEQ ID NO: 3189667 - RNA, 19 nt, Artificial Sequence
  Description of Artificial Sequence: Synthetic oligonucleotide
uugaagguuuuacgaaucu

SEQ ID NO: 3189668 - RNA, 19 nt, Artificial Sequence
  Description of Artificial Sequence: Synthetic oligonucleotide
auugaagguuuuacgaauc

SEQ ID NO: 3189669 - RNA, 19 nt, Artificial Sequence
  Description of Artificial Sequence: Synthetic oligonucleotide
cuguucucuaauauuaaca

SEQ ID NO: 3189670 - RNA, 19 nt, Artificial Sequence
  Description of Artificial Sequence: Synthetic oligonucleotide
uguuacagugucaggcaca

SEQ ID NO: 3189671 - RNA, 19 nt, Artificial Sequence
  Description of Artificial Sequence: Synthetic oligonucleotide
aauuaggagcuucuggcuc

SEQ ID NO: 3189672 - RNA, 19 nt, Artificial Sequence
  Description of Artificial Sequence: Synthetic oligonucleotide
auuaggagcuucuggcucc

SEQ ID NO: 3189673 - RNA, 19 nt, Artificial Sequence
  Description of Artificial Sequence: Synthetic oligonucleotide
aguacaaauccugagcuuc

SEQ ID NO: 3189674 - RNA, 19 nt, Artificial Sequence
  Description of Artificial Sequence: Synthetic oligonucleotide
ggaauuaggagcuucuggc

SEQ ID NO: 3189675 - RNA, 19 nt, Artificial Sequence
  Description of Artificial Sequence: Synthetic oligonucleotide
aaauccugagcuuccgugu

SEQ ID NO: 3189676 - RNA, 19 nt, Artificial Sequence
  Description of Artificial Sequence: Synthetic oligonucleotide
ucgggcuacagccagggcc

SEQ ID NO: 3189677 - RNA, 19 nt, Artificial Sequence
  Description of Artificial Sequence: Synthetic oligonucleotide
aauccugagcuuccgugug

SEQ ID NO: 3189678 - RNA, 19 nt, Artificial Sequence
  Description of Artificial Sequence: Synthetic oligonucleotide
uguggcacccggaagugcc

SEQ ID NO: 3189679 - RNA, 19 nt, Artificial Sequence
  Description of Artificial Sequence: Synthetic oligonucleotide
acagccagggcccgggacc

SEQ ID NO: 3189680 - RNA, 19 nt, Artificial Sequence
  Description of Artificial Sequence: Synthetic oligonucleotide
ucugggagcggucuggggu

SEQ ID NO: 3189681 - RNA, 19 nt, Artificial Sequence
  Description of Artificial Sequence: Synthetic oligonucleotide
gucgcaggcgcucaggccg

SEQ ID NO: 3189682 - RNA, 19 nt, Artificial Sequence
  Description of Artificial Sequence: Synthetic oligonucleotide
ugggaguacaaauccugag

SEQ ID NO: 3189683 - RNA, 19 nt, Artificial Sequence
  Description of Artificial Sequence: Synthetic oligonucleotide
caaauccugagcuuccgug

SEQ ID NO: 3189684 - RNA, 19 nt, Artificial Sequence
  Description of Artificial Sequence: Synthetic oligonucleotide
caaccaacgacuguggcac

SEQ ID NO: 3189685 - RNA, 19 nt, Artificial Sequence
  Description of Artificial Sequence: Synthetic oligonucleotide
ccaugugggaauuaggagc

SEQ ID NO: 3189686 - RNA, 19 nt, Artificial Sequence
  Description of Artificial Sequence: Synthetic oligonucleotide
uggggucgcugucugacgg

SEQ ID NO: 3189687 - RNA, 19 nt, Artificial Sequence
  Description of Artificial Sequence: Synthetic oligonucleotide
gggaauuaggagcuucugg

SEQ ID NO: 3189688 - RNA, 19 nt, Artificial Sequence
  Description of Artificial Sequence: Synthetic oligonucleotide
uuccguguguuggagggcg

SEQ ID NO: 3189689 - RNA, 19 nt, Artificial Sequence
  Description of Artificial Sequence: Synthetic oligonucleotide
ugcagcugcagcagggccc

SEQ ID NO: 3189690 - RNA, 19 nt, Artificial Sequence
  Description of Artificial Sequence: Synthetic oligonucleotide
uacaugaccuccagcuucu

SEQ ID NO: 3189691 - RNA, 19 nt, Artificial Sequence
  Description of Artificial Sequence: Synthetic oligonucleotide
guacaugaccuccagcuuc

SEQ ID NO: 3189692 - RNA, 19 nt, Artificial Sequence
  Description of Artificial Sequence: Synthetic oligonucleotide
uacaaauccugagcuuccg

SEQ ID NO: 3189693 - RNA, 19 nt, Artificial Sequence
  Description of Artificial Sequence: Synthetic oligonucleotide
aguccugggaguacaaauc

SEQ ID NO: 3189694 - RNA, 19 nt, Artificial Sequence
  Description of Artificial Sequence: Synthetic oligonucleotide
ugcccaugugggaauuagg

SEQ ID NO: 3189695 - RNA, 19 nt, Artificial Sequence
  Description of Artificial Sequence: Synthetic oligonucleotide
gggaguacaaauccugagc

SEQ ID NO: 3189696 - RNA, 19 nt, Artificial Sequence
  Description of Artificial Sequence: Synthetic oligonucleotide
cugagcuuccguguguugg

SEQ ID NO: 3189697 - RNA, 19 nt, Artificial Sequence
  Description of Artificial Sequence: Synthetic oligonucleotide
ucuggcuccucuccaugcc

SEQ ID NO: 3189698 - RNA, 19 nt, Artificial Sequence
  Description of Artificial Sequence: Synthetic oligonucleotide
uguguuggagggcgggcgc

SEQ ID NO: 3189699 - RNA, 19 nt, Artificial Sequence
  Description of Artificial Sequence: Synthetic oligonucleotide
gcuuccguguguuggaggg

SEQ ID NO: 3189700 - RNA, 19 nt, Artificial Sequence
  Description of Artificial Sequence: Synthetic oligonucleotide
ugagcuuccguguguugga

SEQ ID NO: 3189701 - RNA, 19 nt, Artificial Sequence
  Description of Artificial Sequence: Synthetic oligonucleotide
uucuggcuccucuccaugc

SEQ ID NO: 3189702 - RNA, 19 nt, Artificial Sequence
  Description of Artificial Sequence: Synthetic oligonucleotide
accaacgacuguggcaccc

SEQ ID NO: 3189703 - RNA, 19 nt, Artificial Sequence
  Description of Artificial Sequence: Synthetic oligonucleotide
guggcaguuucugggagcg

SEQ ID NO: 3189704 - RNA, 19 nt, Artificial Sequence
  Description of Artificial Sequence: Synthetic oligonucleotide
guuucugggagcggucugg

SEQ ID NO: 3189705 - RNA, 19 nt, Artificial Sequence
  Description of Artificial Sequence: Synthetic oligonucleotide
aggccaaccaacgacugug

SEQ ID NO: 3189706 - RNA, 19 nt, Artificial Sequence
  Description of Artificial Sequence: Synthetic oligonucleotide
gaauuaggagcuucuggcu

SEQ ID NO: 3189707 - RNA, 19 nt, Artificial Sequence
  Description of Artificial Sequence: Synthetic oligonucleotide
ucgcuagcgggcccguccg

SEQ ID NO: 3189708 - RNA, 19 nt, Artificial Sequence
  Description of Artificial Sequence: Synthetic oligonucleotide
ugugggaauuaggagcuuc

SEQ ID NO: 3189709 - RNA, 19 nt, Artificial Sequence
  Description of Artificial Sequence: Synthetic oligonucleotide
acaaauccugagcuuccgu

SEQ ID NO: 3189710 - RNA, 19 nt, Artificial Sequence
  Description of Artificial Sequence: Synthetic oligonucleotide
ugcugcuccaggugcagcu

SEQ ID NO: 3189711 - RNA, 19 nt, Artificial Sequence
  Description of Artificial Sequence: Synthetic oligonucleotide
uuucugggagcggucuggg

SEQ ID NO: 3189712 - RNA, 19 nt, Artificial Sequence
  Description of Artificial Sequence: Synthetic oligonucleotide
gucgcugucugacggcggg

SEQ ID NO: 3189713 - RNA, 19 nt, Artificial Sequence
  Description of Artificial Sequence: Synthetic oligonucleotide
ucuggggucgcugucugac

SEQ ID NO: 3189714 - RNA, 19 nt, Artificial Sequence
  Description of Artificial Sequence: Synthetic oligonucleotide
caugaccuccagcuucucc

SEQ ID NO: 3189715 - RNA, 19 nt, Artificial Sequence
  Description of Artificial Sequence: Synthetic oligonucleotide
agcgcccugggacugcccg

SEQ ID NO: 3189716 - RNA, 19 nt, Artificial Sequence
  Description of Artificial Sequence: Synthetic oligonucleotide
ggaguacaaauccugagcu

SEQ ID NO: 3189717 - RNA, 19 nt, Artificial Sequence
  Description of Artificial Sequence: Synthetic oligonucleotide
guacaaauccugagcuucc

SEQ ID NO: 3189718 - RNA, 19 nt, Artificial Sequence
  Description of Artificial Sequence: Synthetic oligonucleotide
gagcuucuggcuccucucc

SEQ ID NO: 3189719 - RNA, 19 nt, Artificial Sequence
  Description of Artificial Sequence: Synthetic oligonucleotide
caugugggaauuaggagcu

SEQ ID NO: 3189720 - RNA, 19 nt, Artificial Sequence
  Description of Artificial Sequence: Synthetic oligonucleotide
uccucuccaugccccaggc

SEQ ID NO: 3189721 - RNA, 19 nt, Artificial Sequence
  Description of Artificial Sequence: Synthetic oligonucleotide
ugggaauuaggagcuucug

SEQ ID NO: 3189722 - RNA, 19 nt, Artificial Sequence
  Description of Artificial Sequence: Synthetic oligonucleotide
uggcuccucuccaugcccc

SEQ ID NO: 3189723 - RNA, 19 nt, Artificial Sequence
  Description of Artificial Sequence: Synthetic oligonucleotide
gacuguggcacccggaagu

SEQ ID NO: 3189724 - RNA, 19 nt, Artificial Sequence
  Description of Artificial Sequence: Synthetic oligonucleotide
ucugacggcgggcgcgcgg

SEQ ID NO: 3189725 - RNA, 19 nt, Artificial Sequence
  Description of Artificial Sequence: Synthetic oligonucleotide
aguuucugggagcggucug

SEQ ID NO: 3189726 - RNA, 19 nt, Artificial Sequence
  Description of Artificial Sequence: Synthetic oligonucleotide
gccgguggcaguuucuggg

SEQ ID NO: 3189727 - RNA, 19 nt, Artificial Sequence
  Description of Artificial Sequence: Synthetic oligonucleotide
aggagcuucuggcuccucu

SEQ ID NO: 3189728 - RNA, 19 nt, Artificial Sequence
  Description of Artificial Sequence: Synthetic oligonucleotide
ugcagcagggcccggcggu

SEQ ID NO: 3189729 - RNA, 19 nt, Artificial Sequence
  Description of Artificial Sequence: Synthetic oligonucleotide
cucgcuagcgggcccgucc

SEQ ID NO: 3189730 - RNA, 19 nt, Artificial Sequence
  Description of Artificial Sequence: Synthetic oligonucleotide
acgacuguggcacccggaa

SEQ ID NO: 3189731 - RNA, 19 nt, Artificial Sequence
  Description of Artificial Sequence: Synthetic oligonucleotide
uucugggagcggucugggg

SEQ ID NO: 3189732 - RNA, 19 nt, Artificial Sequence
  Description of Artificial Sequence: Synthetic oligonucleotide
ugcucugcccaugugggaa

SEQ ID NO: 3189733 - RNA, 19 nt, Artificial Sequence
  Description of Artificial Sequence: Synthetic oligonucleotide
guguguuggagggcgggcg

SEQ ID NO: 3189734 - RNA, 19 nt, Artificial Sequence
  Description of Artificial Sequence: Synthetic oligonucleotide
ucuccagccgggcccgcag

SEQ ID NO: 3189735 - RNA, 19 nt, Artificial Sequence
  Description of Artificial Sequence: Synthetic oligonucleotide
cugagggccgggucggcgg

SEQ ID NO: 3189736 - RNA, 19 nt, Artificial Sequence
  Description of Artificial Sequence: Synthetic oligonucleotide
uccguguguuggagggcgg

SEQ ID NO: 3189737 - RNA, 19 nt, Artificial Sequence
  Description of Artificial Sequence: Synthetic oligonucleotide
ggaagugccguuggguggg

SEQ ID NO: 3189738 - RNA, 19 nt, Artificial Sequence
  Description of Artificial Sequence: Synthetic oligonucleotide
cugggaguacaaauccuga

SEQ ID NO: 3189739 - RNA, 19 nt, Artificial Sequence
  Description of Artificial Sequence: Synthetic oligonucleotide
cuggcuccucuccaugccc

SEQ ID NO: 3189740 - RNA, 19 nt, Artificial Sequence
  Description of Artificial Sequence: Synthetic oligonucleotide
uacagccagggcccgggac

SEQ ID NO: 3189741 - RNA, 19 nt, Artificial Sequence
  Description of Artificial Sequence: Synthetic oligonucleotide
caggcgcucaggccggugg

SEQ ID NO: 3189742 - RNA, 19 nt, Artificial Sequence
  Description of Artificial Sequence: Synthetic oligonucleotide
gaguccugggaguacaaau

SEQ ID NO: 3189743 - RNA, 19 nt, Artificial Sequence
  Description of Artificial Sequence: Synthetic oligonucleotide
cccaugugggaauuaggag

SEQ ID NO: 3189744 - RNA, 19 nt, Artificial Sequence
  Description of Artificial Sequence: Synthetic oligonucleotide
cuccucuccaugccccagg

SEQ ID NO: 3189745 - RNA, 19 nt, Artificial Sequence
  Description of Artificial Sequence: Synthetic oligonucleotide
ggcccguccgggcugaggg

SEQ ID NO: 3189746 - RNA, 19 nt, Artificial Sequence
  Description of Artificial Sequence: Synthetic oligonucleotide
ucgcaggcgcucaggccgg

SEQ ID NO: 3189747 - RNA, 19 nt, Artificial Sequence
  Description of Artificial Sequence: Synthetic oligonucleotide
cuucuggcuccucuccaug

SEQ ID NO: 3189748 - RNA, 19 nt, Artificial Sequence
  Description of Artificial Sequence: Synthetic oligonucleotide
agcuucuggcuccucucca

SEQ ID NO: 3189749 - RNA, 19 nt, Artificial Sequence
  Description of Artificial Sequence: Synthetic oligonucleotide
cugucugacggcgggcgcg

SEQ ID NO: 3189750 - RNA, 19 nt, Artificial Sequence
  Description of Artificial Sequence: Synthetic oligonucleotide
caacgacuguggcacccgg

SEQ ID NO: 3189751 - RNA, 19 nt, Artificial Sequence
  Description of Artificial Sequence: Synthetic oligonucleotide
gguggcaguuucugggagc

SEQ ID NO: 3189752 - RNA, 19 nt, Artificial Sequence
  Description of Artificial Sequence: Synthetic oligonucleotide
cuggggucgcugucugacg

SEQ ID NO: 3189753 - RNA, 19 nt, Artificial Sequence
  Description of Artificial Sequence: Synthetic oligonucleotide
cugggagcggucugggguc

SEQ ID NO: 3189754 - RNA, 19 nt, Artificial Sequence
  Description of Artificial Sequence: Synthetic oligonucleotide
cugcccaugugggaauuag

SEQ ID NO: 3189755 - RNA, 19 nt, Artificial Sequence
  Description of Artificial Sequence: Synthetic oligonucleotide
gugcagcugcagcagggcc

SEQ ID NO: 3189756 - RNA, 19 nt, Artificial Sequence
  Description of Artificial Sequence: Synthetic oligonucleotide
auccugagcuuccgugugu

SEQ ID NO: 3189757 - RNA, 19 nt, Artificial Sequence
  Description of Artificial Sequence: Synthetic oligonucleotide
acuguggcacccggaagug

SEQ ID NO: 3189758 - RNA, 19 nt, Artificial Sequence
  Description of Artificial Sequence: Synthetic oligonucleotide
gcgcccucgggcuacagcc

SEQ ID NO: 3189759 - RNA, 19 nt, Artificial Sequence
  Description of Artificial Sequence: Synthetic oligonucleotide
cacccggaagugccguugg

SEQ ID NO: 3189760 - RNA, 19 nt, Artificial Sequence
  Description of Artificial Sequence: Synthetic oligonucleotide
ugagggccgggucggcggc

SEQ ID NO: 3189761 - RNA, 19 nt, Artificial Sequence
  Description of Artificial Sequence: Synthetic oligonucleotide
gaccguccgggucgcaggc

SEQ ID NO: 3189762 - RNA, 19 nt, Artificial Sequence
  Description of Artificial Sequence: Synthetic oligonucleotide
ucaggccgguggcaguuuc

SEQ ID NO: 3189763 - RNA, 19 nt, Artificial Sequence
  Description of Artificial Sequence: Synthetic oligonucleotide
uugcucugcccauguggga

SEQ ID NO: 3189764 - RNA, 19 nt, Artificial Sequence
  Description of Artificial Sequence: Synthetic oligonucleotide
guccccgcggccuccgccg

SEQ ID NO: 3189765 - RNA, 19 nt, Artificial Sequence
  Description of Artificial Sequence: Synthetic oligonucleotide
augccccaggccaaccaac

SEQ ID NO: 3189766 - RNA, 19 nt, Artificial Sequence
  Description of Artificial Sequence: Synthetic oligonucleotide
acccggaagugccguuggg

SEQ ID NO: 3189767 - RNA, 19 nt, Artificial Sequence
  Description of Artificial Sequence: Synthetic oligonucleotide
gagcuuccguguguuggag

SEQ ID NO: 3189768 - RNA, 19 nt, Artificial Sequence
  Description of Artificial Sequence: Synthetic oligonucleotide
cuagcgggcccguccgggc

SEQ ID NO: 3189769 - RNA, 19 nt, Artificial Sequence
  Description of Artificial Sequence: Synthetic oligonucleotide
agcggucuggggucgcugu

SEQ ID NO: 3189770 - RNA, 19 nt, Artificial Sequence
  Description of Artificial Sequence: Synthetic oligonucleotide
uuaggagcuucuggcuccu

SEQ ID NO: 3189771 - RNA, 19 nt, Artificial Sequence
  Description of Artificial Sequence: Synthetic oligonucleotide
aaaacuauauauuauacau

SEQ ID NO: 3189772 - RNA, 19 nt, Artificial Sequence
  Description of Artificial Sequence: Synthetic oligonucleotide
cuauauauuauacauaugc

SEQ ID NO: 3189773 - RNA, 19 nt, Artificial Sequence
  Description of Artificial Sequence: Synthetic oligonucleotide
aauagggaaauauuucacc

SEQ ID NO: 3189774 - RNA, 19 nt, Artificial Sequence
  Description of Artificial Sequence: Synthetic oligonucleotide
uauauuauacauaugcaag

SEQ ID NO: 3189775 - RNA, 19 nt, Artificial Sequence
  Description of Artificial Sequence: Synthetic oligonucleotide
auauuauacauaugcaagc

SEQ ID NO: 3189776 - RNA, 19 nt, Artificial Sequence
  Description of Artificial Sequence: Synthetic oligonucleotide
aacuauauauuauacauau

SEQ ID NO: 3189777 - RNA, 19 nt, Artificial Sequence
  Description of Artificial Sequence: Synthetic oligonucleotide
acauaugcaagcuucaugg

SEQ ID NO: 3189778 - RNA, 19 nt, Artificial Sequence
  Description of Artificial Sequence: Synthetic oligonucleotide
cacccaagaagauagaucg

SEQ ID NO: 3189779 - RNA, 19 nt, Artificial Sequence
  Description of Artificial Sequence: Synthetic oligonucleotide
uagaucgacauuuagaagu

SEQ ID NO: 3189780 - RNA, 19 nt, Artificial Sequence
  Description of Artificial Sequence: Synthetic oligonucleotide
uauauauuauacauaugca

SEQ ID NO: 3189781 - RNA, 19 nt, Artificial Sequence
  Description of Artificial Sequence: Synthetic oligonucleotide
gacauuuagaaguuggagc

SEQ ID NO: 3189782 - RNA, 19 nt, Artificial Sequence
  Description of Artificial Sequence: Synthetic oligonucleotide
uuuagcaaagaaaucugcc

SEQ ID NO: 3189783 - RNA, 19 nt, Artificial Sequence
  Description of Artificial Sequence: Synthetic oligonucleotide
uuauacauaugcaagcuuc

SEQ ID NO: 3189784 - RNA, 19 nt, Artificial Sequence
  Description of Artificial Sequence: Synthetic oligonucleotide
gauagaucgacauuuagaa

SEQ ID NO: 3189785 - RNA, 19 nt, Artificial Sequence
  Description of Artificial Sequence: Synthetic oligonucleotide
uaugcaagcuucaugguca

SEQ ID NO: 3189786 - RNA, 19 nt, Artificial Sequence
  Description of Artificial Sequence: Synthetic oligonucleotide
auauauuauacauaugcaa

SEQ ID NO: 3189787 - RNA, 19 nt, Artificial Sequence
  Description of Artificial Sequence: Synthetic oligonucleotide
auuucaccaguucauuugc

SEQ ID NO: 3189788 - RNA, 19 nt, Artificial Sequence
  Description of Artificial Sequence: Synthetic oligonucleotide
acauuuagaaguuggagcu

SEQ ID NO: 3189789 - RNA, 19 nt, Artificial Sequence
  Description of Artificial Sequence: Synthetic oligonucleotide
gaaauauuucaccaguuca

SEQ ID NO: 3189790 - RNA, 19 nt, Artificial Sequence
  Description of Artificial Sequence: Synthetic oligonucleotide
accaccuuaggcuaggagg

SEQ ID NO: 3189791 - RNA, 19 nt, Artificial Sequence
  Description of Artificial Sequence: Synthetic oligonucleotide
agaauagggaaauauuuca

SEQ ID NO: 3189792 - RNA, 19 nt, Artificial Sequence
  Description of Artificial Sequence: Synthetic oligonucleotide
uuuuagcaaagaaaucugc

SEQ ID NO: 3189793 - RNA, 19 nt, Artificial Sequence
  Description of Artificial Sequence: Synthetic oligonucleotide
ugagaauagggaaauauuu

SEQ ID NO: 3189794 - RNA, 19 nt, Artificial Sequence
  Description of Artificial Sequence: Synthetic oligonucleotide
uauuucaccaguucauuug

SEQ ID NO: 3189795 - RNA, 19 nt, Artificial Sequence
  Description of Artificial Sequence: Synthetic oligonucleotide
uagaaguuggagcugaccu

SEQ ID NO: 3189796 - RNA, 19 nt, Artificial Sequence
  Description of Artificial Sequence: Synthetic oligonucleotide
uuagcaaagaaaucugccu

SEQ ID NO: 3189797 - RNA, 19 nt, Artificial Sequence
  Description of Artificial Sequence: Synthetic oligonucleotide
uaggcuaggaggaaguuca

SEQ ID NO: 3189798 - RNA, 19 nt, Artificial Sequence
  Description of Artificial Sequence: Synthetic oligonucleotide
aagauagaucgacauuuag

SEQ ID NO: 3189799 - RNA, 19 nt, Artificial Sequence
  Description of Artificial Sequence: Synthetic oligonucleotide
uagcaaagaaaucugccug

SEQ ID NO: 3189800 - RNA, 19 nt, Artificial Sequence
  Description of Artificial Sequence: Synthetic oligonucleotide
aggaaguucaggccuaugg

SEQ ID NO: 3189801 - RNA, 19 nt, Artificial Sequence
  Description of Artificial Sequence: Synthetic oligonucleotide
auggucauggcugauuucc

SEQ ID NO: 3189802 - RNA, 19 nt, Artificial Sequence
  Description of Artificial Sequence: Synthetic oligonucleotide
auaugcaagcuucaugguc

SEQ ID NO: 3189803 - RNA, 19 nt, Artificial Sequence
  Description of Artificial Sequence: Synthetic oligonucleotide
auagggaaauauuucacca

SEQ ID NO: 3189804 - RNA, 19 nt, Artificial Sequence
  Description of Artificial Sequence: Synthetic oligonucleotide
uccucauccagcuaggaga

SEQ ID NO: 3189805 - RNA, 19 nt, Artificial Sequence
  Description of Artificial Sequence: Synthetic oligonucleotide
gacacacccaagaagauag

SEQ ID NO: 3189806 - RNA, 19 nt, Artificial Sequence
  Description of Artificial Sequence: Synthetic oligonucleotide
ugaccuggugagaauaggg

SEQ ID NO: 3189807 - RNA, 19 nt, Artificial Sequence
  Description of Artificial Sequence: Synthetic oligonucleotide
aaaagaccauuuuagcaaa

SEQ ID NO: 3189808 - RNA, 19 nt, Artificial Sequence
  Description of Artificial Sequence: Synthetic oligonucleotide
uauacauaugcaagcuuca

SEQ ID NO: 3189809 - RNA, 19 nt, Artificial Sequence
  Description of Artificial Sequence: Synthetic oligonucleotide
uauuauacauaugcaagcu

SEQ ID NO: 3189810 - RNA, 19 nt, Artificial Sequence
  Description of Artificial Sequence: Synthetic oligonucleotide
uacauaugcaagcuucaug

SEQ ID NO: 3189811 - RNA, 19 nt, Artificial Sequence
  Description of Artificial Sequence: Synthetic oligonucleotide
accauuuuagcaaagaaau

SEQ ID NO: 3189812 - RNA, 19 nt, Artificial Sequence
  Description of Artificial Sequence: Synthetic oligonucleotide
gaaguuggagcugaccugg

SEQ ID NO: 3189813 - RNA, 19 nt, Artificial Sequence
  Description of Artificial Sequence: Synthetic oligonucleotide
ucaugcaccauucaucuuu

SEQ ID NO: 3189814 - RNA, 19 nt, Artificial Sequence
  Description of Artificial Sequence: Synthetic oligonucleotide
ucaccaguucauuugcucc

SEQ ID NO: 3189815 - RNA, 19 nt, Artificial Sequence
  Description of Artificial Sequence: Synthetic oligonucleotide
aaauauuucaccaguucau

SEQ ID NO: 3189816 - RNA, 19 nt, Artificial Sequence
  Description of Artificial Sequence: Synthetic oligonucleotide
uagggaaauauuucaccag

SEQ ID NO: 3189817 - RNA, 19 nt, Artificial Sequence
  Description of Artificial Sequence: Synthetic oligonucleotide
agaagauagaucgacauuu

SEQ ID NO: 3189818 - RNA, 19 nt, Artificial Sequence
  Description of Artificial Sequence: Synthetic oligonucleotide
uaggaggaaguucaggccu

SEQ ID NO: 3189819 - RNA, 19 nt, Artificial Sequence
  Description of Artificial Sequence: Synthetic oligonucleotide
ucauccagcuaggagacag

SEQ ID NO: 3189820 - RNA, 19 nt, Artificial Sequence
  Description of Artificial Sequence: Synthetic oligonucleotide
agggaaauauuucaccagu

SEQ ID NO: 3189821 - RNA, 19 nt, Artificial Sequence
  Description of Artificial Sequence: Synthetic oligonucleotide
auagaucgacauuuagaag

SEQ ID NO: 3189822 - RNA, 19 nt, Artificial Sequence
  Description of Artificial Sequence: Synthetic oligonucleotide
aucgacauuuagaaguugg

SEQ ID NO: 3189823 - RNA, 19 nt, Artificial Sequence
  Description of Artificial Sequence: Synthetic oligonucleotide
ucauggcugauuucccugg

SEQ ID NO: 3189824 - RNA, 19 nt, Artificial Sequence
  Description of Artificial Sequence: Synthetic oligonucleotide
gaaguucaggccuauggca

SEQ ID NO: 3189825 - RNA, 19 nt, Artificial Sequence
  Description of Artificial Sequence: Synthetic oligonucleotide
auuuuagcaaagaaaucug

SEQ ID NO: 3189826 - RNA, 19 nt, Artificial Sequence
  Description of Artificial Sequence: Synthetic oligonucleotide
gagaauagggaaauauuuc

SEQ ID NO: 3189827 - RNA, 19 nt, Artificial Sequence
  Description of Artificial Sequence: Synthetic oligonucleotide
cuaggaggaaguucaggcc

SEQ ID NO: 3189828 - RNA, 19 nt, Artificial Sequence
  Description of Artificial Sequence: Synthetic oligonucleotide
gaauagggaaauauuucac

SEQ ID NO: 3189829 - RNA, 19 nt, Artificial Sequence
  Description of Artificial Sequence: Synthetic oligonucleotide
aagaagauagaucgacauu

SEQ ID NO: 3189830 - RNA, 19 nt, Artificial Sequence
  Description of Artificial Sequence: Synthetic oligonucleotide
ucgacauuuagaaguugga

SEQ ID NO: 3189831 - RNA, 19 nt, Artificial Sequence
  Description of Artificial Sequence: Synthetic oligonucleotide
cuaggagacagggucaugc

SEQ ID NO: 3189832 - RNA, 19 nt, Artificial Sequence
  Description of Artificial Sequence: Synthetic oligonucleotide
aaaacccggacacacccaa

SEQ ID NO: 3189833 - RNA, 19 nt, Artificial Sequence
  Description of Artificial Sequence: Synthetic oligonucleotide
uuuuaccaccuuaggcuag

SEQ ID NO: 3189834 - RNA, 19 nt, Artificial Sequence
  Description of Artificial Sequence: Synthetic oligonucleotide
cauuuuagcaaagaaaucu

SEQ ID NO: 3189835 - RNA, 19 nt, Artificial Sequence
  Description of Artificial Sequence: Synthetic oligonucleotide
aauauuucaccaguucauu

SEQ ID NO: 3189836 - RNA, 19 nt, Artificial Sequence
  Description of Artificial Sequence: Synthetic oligonucleotide
gcuaggaggaaguucaggc

SEQ ID NO: 3189837 - RNA, 19 nt, Artificial Sequence
  Description of Artificial Sequence: Synthetic oligonucleotide
agaaguuggagcugaccug

SEQ ID NO: 3189838 - RNA, 19 nt, Artificial Sequence
  Description of Artificial Sequence: Synthetic oligonucleotide
aggagacagggucaugcac

SEQ ID NO: 3189839 - RNA, 19 nt, Artificial Sequence
  Description of Artificial Sequence: Synthetic oligonucleotide
agauagaucgacauuuaga

SEQ ID NO: 3189840 - RNA, 19 nt, Artificial Sequence
  Description of Artificial Sequence: Synthetic oligonucleotide
gcaagcuucauggucaugg

SEQ ID NO: 3189841 - RNA, 19 nt, Artificial Sequence
  Description of Artificial Sequence: Synthetic oligonucleotide
uuuaccaccuuaggcuagg

SEQ ID NO: 3189842 - RNA, 19 nt, Artificial Sequence
  Description of Artificial Sequence: Synthetic oligonucleotide
aaacuauauauuauacaua

SEQ ID NO: 3189843 - RNA, 19 nt, Artificial Sequence
  Description of Artificial Sequence: Synthetic oligonucleotide
aacccggacacacccaaga

SEQ ID NO: 3189844 - RNA, 19 nt, Artificial Sequence
  Description of Artificial Sequence: Synthetic oligonucleotide
auuuagaaguuggagcuga

SEQ ID NO: 3189845 - RNA, 19 nt, Artificial Sequence
  Description of Artificial Sequence: Synthetic oligonucleotide
aagaccauuuuagcaaaga

SEQ ID NO: 3189846 - RNA, 19 nt, Artificial Sequence
  Description of Artificial Sequence: Synthetic oligonucleotide
auuucccuggcacuuaaaa

SEQ ID NO: 3189847 - RNA, 19 nt, Artificial Sequence
  Description of Artificial Sequence: Synthetic oligonucleotide
uuggagcugaccuggugag

SEQ ID NO: 3189848 - RNA, 19 nt, Artificial Sequence
  Description of Artificial Sequence: Synthetic oligonucleotide
auuauacauaugcaagcuu

SEQ ID NO: 3189849 - RNA, 19 nt, Artificial Sequence
  Description of Artificial Sequence: Synthetic oligonucleotide
agaccauuuuagcaaagaa

SEQ ID NO: 3189850 - RNA, 19 nt, Artificial Sequence
  Description of Artificial Sequence: Synthetic oligonucleotide
uuagaaguuggagcugacc

SEQ ID NO: 3189851 - RNA, 19 nt, Artificial Sequence
  Description of Artificial Sequence: Synthetic oligonucleotide
aagcuucauggucauggcu

SEQ ID NO: 3189852 - RNA, 19 nt, Artificial Sequence
  Description of Artificial Sequence: Synthetic oligonucleotide
agcuucauggucauggcug

SEQ ID NO: 3189853 - RNA, 19 nt, Artificial Sequence
  Description of Artificial Sequence: Synthetic oligonucleotide
ucauggucauggcugauuu

SEQ ID NO: 3189854 - RNA, 19 nt, Artificial Sequence
  Description of Artificial Sequence: Synthetic oligonucleotide
gaccauuuuagcaaagaaa

SEQ ID NO: 3189855 - RNA, 19 nt, Artificial Sequence
  Description of Artificial Sequence: Synthetic oligonucleotide
uucaccaguucauuugcuc

SEQ ID NO: 3189856 - RNA, 19 nt, Artificial Sequence
  Description of Artificial Sequence: Synthetic oligonucleotide
uggcugauuucccuggcac

SEQ ID NO: 3189857 - RNA, 19 nt, Artificial Sequence
  Description of Artificial Sequence: Synthetic oligonucleotide
acacccaagaagauagauc

SEQ ID NO: 3189858 - RNA, 19 nt, Artificial Sequence
  Description of Artificial Sequence: Synthetic oligonucleotide
auauuucaccaguucauuu

SEQ ID NO: 3189859 - RNA, 19 nt, Artificial Sequence
  Description of Artificial Sequence: Synthetic oligonucleotide
ggaaauauuucaccaguuc

SEQ ID NO: 3189860 - RNA, 19 nt, Artificial Sequence
  Description of Artificial Sequence: Synthetic oligonucleotide
ggaaguucaggccuauggc

SEQ ID NO: 3189861 - RNA, 19 nt, Artificial Sequence
  Description of Artificial Sequence: Synthetic oligonucleotide
guuggagcugaccugguga

SEQ ID NO: 3189862 - RNA, 19 nt, Artificial Sequence
  Description of Artificial Sequence: Synthetic oligonucleotide
aaagaccauuuuagcaaag

SEQ ID NO: 3189863 - RNA, 19 nt, Artificial Sequence
  Description of Artificial Sequence: Synthetic oligonucleotide
uuuagaaguuggagcugac

SEQ ID NO: 3189864 - RNA, 19 nt, Artificial Sequence
  Description of Artificial Sequence: Synthetic oligonucleotide
uaccaccuuaggcuaggag

SEQ ID NO: 3189865 - RNA, 19 nt, Artificial Sequence
  Description of Artificial Sequence: Synthetic oligonucleotide
uuucaccaguucauuugcu

SEQ ID NO: 3189866 - RNA, 19 nt, Artificial Sequence
  Description of Artificial Sequence: Synthetic oligonucleotide
aaguucaggccuauggcaa

SEQ ID NO: 3189867 - RNA, 19 nt, Artificial Sequence
  Description of Artificial Sequence: Synthetic oligonucleotide
accuggugagaauagggaa

SEQ ID NO: 3189868 - RNA, 19 nt, Artificial Sequence
  Description of Artificial Sequence: Synthetic oligonucleotide
gucauggcugauuucccug

SEQ ID NO: 3189869 - RNA, 19 nt, Artificial Sequence
  Description of Artificial Sequence: Synthetic oligonucleotide
auccagcuaggagacaggg

SEQ ID NO: 3189870 - RNA, 19 nt, Artificial Sequence
  Description of Artificial Sequence: Synthetic oligonucleotide
caagcuucauggucauggc

SEQ ID NO: 3189871 - RNA, 19 nt, Artificial Sequence
  Description of Artificial Sequence: Synthetic oligonucleotide
aguacagaaggacagaagc

SEQ ID NO: 3189872 - RNA, 19 nt, Artificial Sequence
  Description of Artificial Sequence: Synthetic oligonucleotide
ucaucagucuuuaagagag

SEQ ID NO: 3189873 - RNA, 19 nt, Artificial Sequence
  Description of Artificial Sequence: Synthetic oligonucleotide
aaagucugucuucuuaaac

SEQ ID NO: 3189874 - RNA, 19 nt, Artificial Sequence
  Description of Artificial Sequence: Synthetic oligonucleotide
ugucuucuuaaacugagcc

SEQ ID NO: 3189875 - RNA, 19 nt, Artificial Sequence
  Description of Artificial Sequence: Synthetic oligonucleotide
acagaagcagcuuugcugg

SEQ ID NO: 3189876 - RNA, 19 nt, Artificial Sequence
  Description of Artificial Sequence: Synthetic oligonucleotide
aagucugucuucuuaaacu

SEQ ID NO: 3189877 - RNA, 19 nt, Artificial Sequence
  Description of Artificial Sequence: Synthetic oligonucleotide
ugugugugcccacagagag

SEQ ID NO: 3189878 - RNA, 19 nt, Artificial Sequence
  Description of Artificial Sequence: Synthetic oligonucleotide
aacugagccuucuuguagg

SEQ ID NO: 3189879 - RNA, 19 nt, Artificial Sequence
  Description of Artificial Sequence: Synthetic oligonucleotide
ucugucuucuuaaacugag

SEQ ID NO: 3189880 - RNA, 19 nt, Artificial Sequence
  Description of Artificial Sequence: Synthetic oligonucleotide
ucuuguaggcguuauggag

SEQ ID NO: 3189881 - RNA, 19 nt, Artificial Sequence
  Description of Artificial Sequence: Synthetic oligonucleotide
auucugguaacuauucugc

SEQ ID NO: 3189882 - RNA, 19 nt, Artificial Sequence
  Description of Artificial Sequence: Synthetic oligonucleotide
ucugugugugcccacagag

SEQ ID NO: 3189883 - RNA, 19 nt, Artificial Sequence
  Description of Artificial Sequence: Synthetic oligonucleotide
aaacugagccuucuuguag

SEQ ID NO: 3189884 - RNA, 19 nt, Artificial Sequence
  Description of Artificial Sequence: Synthetic oligonucleotide
uguucagaaggucucgugc

SEQ ID NO: 3189885 - RNA, 19 nt, Artificial Sequence
  Description of Artificial Sequence: Synthetic oligonucleotide
gacagaagcagcuuugcug

SEQ ID NO: 3189886 - RNA, 19 nt, Artificial Sequence
  Description of Artificial Sequence: Synthetic oligonucleotide
uuaaacugagccuucuugu

SEQ ID NO: 3189887 - RNA, 19 nt, Artificial Sequence
  Description of Artificial Sequence: Synthetic oligonucleotide
ucagucuuuaagagagugg

SEQ ID NO: 3189888 - RNA, 19 nt, Artificial Sequence
  Description of Artificial Sequence: Synthetic oligonucleotide
agagugguaggcuuuggcg

SEQ ID NO: 3189889 - RNA, 19 nt, Artificial Sequence
  Description of Artificial Sequence: Synthetic oligonucleotide
ucuuuaagagagugguagg

SEQ ID NO: 3189890 - RNA, 19 nt, Artificial Sequence
  Description of Artificial Sequence: Synthetic oligonucleotide
gagugguaggcuuuggcgg

SEQ ID NO: 3189891 - RNA, 19 nt, Artificial Sequence
  Description of Artificial Sequence: Synthetic oligonucleotide
uacagaaggacagaagcag

SEQ ID NO: 3189892 - RNA, 19 nt, Artificial Sequence
  Description of Artificial Sequence: Synthetic oligonucleotide
auggucaugauuuucugca

SEQ ID NO: 3189893 - RNA, 19 nt, Artificial Sequence
  Description of Artificial Sequence: Synthetic oligonucleotide
gucuuuaagagagugguag

SEQ ID NO: 3189894 - RNA, 19 nt, Artificial Sequence
  Description of Artificial Sequence: Synthetic oligonucleotide
cuucuuguaggcguuaugg

SEQ ID NO: 3189895 - RNA, 19 nt, Artificial Sequence
  Description of Artificial Sequence: Synthetic oligonucleotide
cuuaaacugagccuucuug

SEQ ID NO: 3189896 - RNA, 19 nt, Artificial Sequence
  Description of Artificial Sequence: Synthetic oligonucleotide
auagccuuccccuaugcug

SEQ ID NO: 3189897 - RNA, 19 nt, Artificial Sequence
  Description of Artificial Sequence: Synthetic oligonucleotide
acagagaguacagaaggac

SEQ ID NO: 3189898 - RNA, 19 nt, Artificial Sequence
  Description of Artificial Sequence: Synthetic oligonucleotide
cauucugguaacuauucug

SEQ ID NO: 3189899 - RNA, 19 nt, Artificial Sequence
  Description of Artificial Sequence: Synthetic oligonucleotide
cuucaucagucuuuaagag

SEQ ID NO: 3189900 - RNA, 19 nt, Artificial Sequence
  Description of Artificial Sequence: Synthetic oligonucleotide
agucugucuucuuaaacug

SEQ ID NO: 3189901 - RNA, 19 nt, Artificial Sequence
  Description of Artificial Sequence: Synthetic oligonucleotide
uucaucagucuuuaagaga

SEQ ID NO: 3189902 - RNA, 19 nt, Artificial Sequence
  Description of Artificial Sequence: Synthetic oligonucleotide
ucuucuuaaacugagccuu

SEQ ID NO: 3189903 - RNA, 19 nt, Artificial Sequence
  Description of Artificial Sequence: Synthetic oligonucleotide
uccaguguucagaaggucu

SEQ ID NO: 3189904 - RNA, 19 nt, Artificial Sequence
  Description of Artificial Sequence: Synthetic oligonucleotide
gauggucaugauuuucugc

SEQ ID NO: 3189905 - RNA, 19 nt, Artificial Sequence
  Description of Artificial Sequence: Synthetic oligonucleotide
uuuucugcaggccuccagu

SEQ ID NO: 3189906 - RNA, 19 nt, Artificial Sequence
  Description of Artificial Sequence: Synthetic oligonucleotide
cuuuaagagagugguaggc

SEQ ID NO: 3189907 - RNA, 19 nt, Artificial Sequence
  Description of Artificial Sequence: Synthetic oligonucleotide
ugagccuucuuguaggcgu

SEQ ID NO: 3189908 - RNA, 19 nt, Artificial Sequence
  Description of Artificial Sequence: Synthetic oligonucleotide
auggaguucugugugugcc

SEQ ID NO: 3189909 - RNA, 19 nt, Artificial Sequence
  Description of Artificial Sequence: Synthetic oligonucleotide
uccccuaugcugaugguca

SEQ ID NO: 3189910 - RNA, 19 nt, Artificial Sequence
  Description of Artificial Sequence: Synthetic oligonucleotide
agagaguacagaaggacag

SEQ ID NO: 3189911 - RNA, 19 nt, Artificial Sequence
  Description of Artificial Sequence: Synthetic oligonucleotide
uuugcuggccuuguugggg

SEQ ID NO: 3189912 - RNA, 19 nt, Artificial Sequence
  Description of Artificial Sequence: Synthetic oligonucleotide
uaugcugauggucaugauu

SEQ ID NO: 3189913 - RNA, 19 nt, Artificial Sequence
  Description of Artificial Sequence: Synthetic oligonucleotide
gucaugauuuucugcaggc

SEQ ID NO: 3189914 - RNA, 19 nt, Artificial Sequence
  Description of Artificial Sequence: Synthetic oligonucleotide
uuuaagagagugguaggcu

SEQ ID NO: 3189915 - RNA, 19 nt, Artificial Sequence
  Description of Artificial Sequence: Synthetic oligonucleotide
ugcauucugguaacuauuc

SEQ ID NO: 3189916 - RNA, 19 nt, Artificial Sequence
  Description of Artificial Sequence: Synthetic oligonucleotide
uagccuuccccuaugcuga

SEQ ID NO: 3189917 - RNA, 19 nt, Artificial Sequence
  Description of Artificial Sequence: Synthetic oligonucleotide
acugagccuucuuguaggc

SEQ ID NO: 3189918 - RNA, 19 nt, Artificial Sequence
  Description of Artificial Sequence: Synthetic oligonucleotide
uugacaaagucugucuucu

SEQ ID NO: 3189919 - RNA, 19 nt, Artificial Sequence
  Description of Artificial Sequence: Synthetic oligonucleotide
acaaagucugucuucuuaa

SEQ ID NO: 3189920 - RNA, 19 nt, Artificial Sequence
  Description of Artificial Sequence: Synthetic oligonucleotide
uuaagagagugguaggcuu

SEQ ID NO: 3189921 - RNA, 19 nt, Artificial Sequence
  Description of Artificial Sequence: Synthetic oligonucleotide
acagaaggacagaagcagc

SEQ ID NO: 3189922 - RNA, 19 nt, Artificial Sequence
  Description of Artificial Sequence: Synthetic oligonucleotide
aucagucuuuaagagagug

SEQ ID NO: 3189923 - RNA, 19 nt, Artificial Sequence
  Description of Artificial Sequence: Synthetic oligonucleotide
aaggucucgugcauucugg

SEQ ID NO: 3189924 - RNA, 19 nt, Artificial Sequence
  Description of Artificial Sequence: Synthetic oligonucleotide
gccuccaguguucagaagg

SEQ ID NO: 3189925 - RNA, 19 nt, Artificial Sequence
  Description of Artificial Sequence: Synthetic oligonucleotide
ugauggucaugauuuucug

SEQ ID NO: 3189926 - RNA, 19 nt, Artificial Sequence
  Description of Artificial Sequence: Synthetic oligonucleotide
uguugacaaagucugucuu

SEQ ID NO: 3189927 - RNA, 19 nt, Artificial Sequence
  Description of Artificial Sequence: Synthetic oligonucleotide
ccacagagaguacagaagg

SEQ ID NO: 3189928 - RNA, 19 nt, Artificial Sequence
  Description of Artificial Sequence: Synthetic oligonucleotide
uucuuguaggcguuaugga

SEQ ID NO: 3189929 - RNA, 19 nt, Artificial Sequence
  Description of Artificial Sequence: Synthetic oligonucleotide
agaagcagcuuugcuggcc

SEQ ID NO: 3189930 - RNA, 19 nt, Artificial Sequence
  Description of Artificial Sequence: Synthetic oligonucleotide
gaaggucucgugcauucug

SEQ ID NO: 3189931 - RNA, 19 nt, Artificial Sequence
  Description of Artificial Sequence: Synthetic oligonucleotide
uuauggaguucugugugug

SEQ ID NO: 3189932 - RNA, 19 nt, Artificial Sequence
  Description of Artificial Sequence: Synthetic oligonucleotide
ggucaugauuuucugcagg

SEQ ID NO: 3189933 - RNA, 19 nt, Artificial Sequence
  Description of Artificial Sequence: Synthetic oligonucleotide
ugugugcccacagagagua

SEQ ID NO: 3189934 - RNA, 19 nt, Artificial Sequence
  Description of Artificial Sequence: Synthetic oligonucleotide
agcuuugcuggccuuguug

SEQ ID NO: 3189935 - RNA, 19 nt, Artificial Sequence
  Description of Artificial Sequence: Synthetic oligonucleotide
guugacaaagucugucuuc

SEQ ID NO: 3189936 - RNA, 19 nt, Artificial Sequence
  Description of Artificial Sequence: Synthetic oligonucleotide
uaaacugagccuucuugua

SEQ ID NO: 3189937 - RNA, 19 nt, Artificial Sequence
  Description of Artificial Sequence: Synthetic oligonucleotide
gagagugguaggcuuuggc

SEQ ID NO: 3189938 - RNA, 19 nt, Artificial Sequence
  Description of Artificial Sequence: Synthetic oligonucleotide
aggacagaagcagcuuugc

SEQ ID NO: 3189939 - RNA, 19 nt, Artificial Sequence
  Description of Artificial Sequence: Synthetic oligonucleotide
uauggaguucugugugugc

SEQ ID NO: 3189940 - RNA, 19 nt, Artificial Sequence
  Description of Artificial Sequence: Synthetic oligonucleotide
auuuucugcaggccuccag

SEQ ID NO: 3189941 - RNA, 19 nt, Artificial Sequence
  Description of Artificial Sequence: Synthetic oligonucleotide
gcuuugcuggccuuguugg

SEQ ID NO: 3189942 - RNA, 19 nt, Artificial Sequence
  Description of Artificial Sequence: Synthetic oligonucleotide
uggucaugauuuucugcag

SEQ ID NO: 3189943 - RNA, 19 nt, Artificial Sequence
  Description of Artificial Sequence: Synthetic oligonucleotide
uaggcuuuggcggugcggc

SEQ ID NO: 3189944 - RNA, 19 nt, Artificial Sequence
  Description of Artificial Sequence: Synthetic oligonucleotide
augauuuucugcaggccuc

SEQ ID NO: 3189945 - RNA, 19 nt, Artificial Sequence
  Description of Artificial Sequence: Synthetic oligonucleotide
uuucugcaggccuccagug

SEQ ID NO: 3189946 - RNA, 19 nt, Artificial Sequence
  Description of Artificial Sequence: Synthetic oligonucleotide
aaggacagaagcagcuuug

SEQ ID NO: 3189947 - RNA, 19 nt, Artificial Sequence
  Description of Artificial Sequence: Synthetic oligonucleotide
ucaugauuuucugcaggcc

SEQ ID NO: 3189948 - RNA, 19 nt, Artificial Sequence
  Description of Artificial Sequence: Synthetic oligonucleotide
gacaaagucugucuucuua

SEQ ID NO: 3189949 - RNA, 19 nt, Artificial Sequence
  Description of Artificial Sequence: Synthetic oligonucleotide
ugugcccacagagaguaca

SEQ ID NO: 3189950 - RNA, 19 nt, Artificial Sequence
  Description of Artificial Sequence: Synthetic oligonucleotide
guucagaaggucucgugca

SEQ ID NO: 3189951 - RNA, 19 nt, Artificial Sequence
  Description of Artificial Sequence: Synthetic oligonucleotide
agugguaggcuuuggcggu

SEQ ID NO: 3189952 - RNA, 19 nt, Artificial Sequence
  Description of Artificial Sequence: Synthetic oligonucleotide
uaagagagugguaggcuuu

SEQ ID NO: 3189953 - RNA, 19 nt, Artificial Sequence
  Description of Artificial Sequence: Synthetic oligonucleotide
aagagagugguaggcuuug

SEQ ID NO: 3189954 - RNA, 19 nt, Artificial Sequence
  Description of Artificial Sequence: Synthetic oligonucleotide
gaguacagaaggacagaag

SEQ ID NO: 3189955 - RNA, 19 nt, Artificial Sequence
  Description of Artificial Sequence: Synthetic oligonucleotide
ugauuuucugcaggccucc

SEQ ID NO: 3189956 - RNA, 19 nt, Artificial Sequence
  Description of Artificial Sequence: Synthetic oligonucleotide
augcugauggucaugauuu

SEQ ID NO: 3189957 - RNA, 19 nt, Artificial Sequence
  Description of Artificial Sequence: Synthetic oligonucleotide
cugucuucuuaaacugagc

SEQ ID NO: 3189958 - RNA, 19 nt, Artificial Sequence
  Description of Artificial Sequence: Synthetic oligonucleotide
cagagaguacagaaggaca

SEQ ID NO: 3189959 - RNA, 19 nt, Artificial Sequence
  Description of Artificial Sequence: Synthetic oligonucleotide
ucugcaggccuccaguguu

SEQ ID NO: 3189960 - RNA, 19 nt, Artificial Sequence
  Description of Artificial Sequence: Synthetic oligonucleotide
gucucgugcauucugguaa

SEQ ID NO: 3189961 - RNA, 19 nt, Artificial Sequence
  Description of Artificial Sequence: Synthetic oligonucleotide
ggcguuauggaguucugug

SEQ ID NO: 3189962 - RNA, 19 nt, Artificial Sequence
  Description of Artificial Sequence: Synthetic oligonucleotide
cuuugcuggccuuguuggg

SEQ ID NO: 3189963 - RNA, 19 nt, Artificial Sequence
  Description of Artificial Sequence: Synthetic oligonucleotide
uggaguucugugugugccc

SEQ ID NO: 3189964 - RNA, 19 nt, Artificial Sequence
  Description of Artificial Sequence: Synthetic oligonucleotide
ucuuaaacugagccuucuu

SEQ ID NO: 3189965 - RNA, 19 nt, Artificial Sequence
  Description of Artificial Sequence: Synthetic oligonucleotide
uucagaaggucucgugcau

SEQ ID NO: 3189966 - RNA, 19 nt, Artificial Sequence
  Description of Artificial Sequence: Synthetic oligonucleotide
uuggcggugcggcuguuga

SEQ ID NO: 3189967 - RNA, 19 nt, Artificial Sequence
  Description of Artificial Sequence: Synthetic oligonucleotide
uucugugugugcccacaga

SEQ ID NO: 3189968 - RNA, 19 nt, Artificial Sequence
  Description of Artificial Sequence: Synthetic oligonucleotide
agaguacagaaggacagaa

SEQ ID NO: 3189969 - RNA, 19 nt, Artificial Sequence
  Description of Artificial Sequence: Synthetic oligonucleotide
cagaaggucucgugcauuc

SEQ ID NO: 3189970 - RNA, 19 nt, Artificial Sequence
  Description of Artificial Sequence: Synthetic oligonucleotide
cuuguaggcguuauggagu

SEQ ID NO: 3189971 - RNA, 19 nt, Artificial Sequence
  Description of Artificial Sequence: Synthetic oligonucleotide
cauauauuugcucauaggg

SEQ ID NO: 3189972 - RNA, 19 nt, Artificial Sequence
  Description of Artificial Sequence: Synthetic oligonucleotide
ucaugaaggucucaggagg

SEQ ID NO: 3189973 - RNA, 19 nt, Artificial Sequence
  Description of Artificial Sequence: Synthetic oligonucleotide
auucuugcauuccagaguc

SEQ ID NO: 3189974 - RNA, 19 nt, Artificial Sequence
  Description of Artificial Sequence: Synthetic oligonucleotide
ugguaguuucucaugaagg

SEQ ID NO: 3189975 - RNA, 19 nt, Artificial Sequence
  Description of Artificial Sequence: Synthetic oligonucleotide
uauaccuuguggcacagcc

SEQ ID NO: 3189976 - RNA, 19 nt, Artificial Sequence
  Description of Artificial Sequence: Synthetic oligonucleotide
auauauuugcucauagggc

SEQ ID NO: 3189977 - RNA, 19 nt, Artificial Sequence
  Description of Artificial Sequence: Synthetic oligonucleotide
ugcguuuucuccuggaagg

SEQ ID NO: 3189978 - RNA, 19 nt, Artificial Sequence
  Description of Artificial Sequence: Synthetic oligonucleotide
gagcagaugggcuucaggg

SEQ ID NO: 3189979 - RNA, 19 nt, Artificial Sequence
  Description of Artificial Sequence: Synthetic oligonucleotide
ucauaugcauuccugcugc

SEQ ID NO: 3189980 - RNA, 19 nt, Artificial Sequence
  Description of Artificial Sequence: Synthetic oligonucleotide
auuccggguauucaggugg

SEQ ID NO: 3189981 - RNA, 19 nt, Artificial Sequence
  Description of Artificial Sequence: Synthetic oligonucleotide
auucaugucauccucgcug

SEQ ID NO: 3189982 - RNA, 19 nt, Artificial Sequence
  Description of Artificial Sequence: Synthetic oligonucleotide
agagcaguucaauuccugc

SEQ ID NO: 3189983 - RNA, 19 nt, Artificial Sequence
  Description of Artificial Sequence: Synthetic oligonucleotide
cuucuuggcauacucaugc

SEQ ID NO: 3189984 - RNA, 19 nt, Artificial Sequence
  Description of Artificial Sequence: Synthetic oligonucleotide
aggugggagaccuuggagc

SEQ ID NO: 3189985 - RNA, 19 nt, Artificial Sequence
  Description of Artificial Sequence: Synthetic oligonucleotide
agugauucaugucauccuc

SEQ ID NO: 3189986 - RNA, 19 nt, Artificial Sequence
  Description of Artificial Sequence: Synthetic oligonucleotide
uuuuggagaagguugggga

SEQ ID NO: 3189987 - RNA, 19 nt, Artificial Sequence
  Description of Artificial Sequence: Synthetic oligonucleotide
uugcauuccagagucaggg

SEQ ID NO: 3189988 - RNA, 19 nt, Artificial Sequence
  Description of Artificial Sequence: Synthetic oligonucleotide
guguucucggagcagaugg

SEQ ID NO: 3189989 - RNA, 19 nt, Artificial Sequence
  Description of Artificial Sequence: Synthetic oligonucleotide
cuuggcauacucaugcagc

SEQ ID NO: 3189990 - RNA, 19 nt, Artificial Sequence
  Description of Artificial Sequence: Synthetic oligonucleotide
gaugccuauucacagagca

SEQ ID NO: 3189991 - RNA, 19 nt, Artificial Sequence
  Description of Artificial Sequence: Synthetic oligonucleotide
uaugcauuccugcugcaug

SEQ ID NO: 3189992 - RNA, 19 nt, Artificial Sequence
  Description of Artificial Sequence: Synthetic oligonucleotide
ucccuugaggcucaaaucu

SEQ ID NO: 3189993 - RNA, 19 nt, Artificial Sequence
  Description of Artificial Sequence: Synthetic oligonucleotide
ucaugcagcuuccacagga

SEQ ID NO: 3189994 - RNA, 19 nt, Artificial Sequence
  Description of Artificial Sequence: Synthetic oligonucleotide
aaauucagugacucuggcu

SEQ ID NO: 3189995 - RNA, 19 nt, Artificial Sequence
  Description of Artificial Sequence: Synthetic oligonucleotide
ugcaugacagacuggacca

SEQ ID NO: 3189996 - RNA, 19 nt, Artificial Sequence
  Description of Artificial Sequence: Synthetic oligonucleotide
acauucuugcauuccagag

SEQ ID NO: 3189997 - RNA, 19 nt, Artificial Sequence
  Description of Artificial Sequence: Synthetic oligonucleotide
ucuuggcauacucaugcag

SEQ ID NO: 3189998 - RNA, 19 nt, Artificial Sequence
  Description of Artificial Sequence: Synthetic oligonucleotide
accauauauuugcucauag

SEQ ID NO: 3189999 - RNA, 19 nt, Artificial Sequence
  Description of Artificial Sequence: Synthetic oligonucleotide
uuucacacagugauucaug

SEQ ID NO: 3190000 - RNA, 19 nt, Artificial Sequence
  Description of Artificial Sequence: Synthetic oligonucleotide
agcagaugggcuucagggc

SEQ ID NO: 3190001 - RNA, 19 nt, Artificial Sequence
  Description of Artificial Sequence: Synthetic oligonucleotide
ugcuugaccuggcacagag

SEQ ID NO: 3190002 - RNA, 19 nt, Artificial Sequence
  Description of Artificial Sequence: Synthetic oligonucleotide
gaggauuccggguauucag

SEQ ID NO: 3190003 - RNA, 19 nt, Artificial Sequence
  Description of Artificial Sequence: Synthetic oligonucleotide
ucacagagcaguucaauuc

SEQ ID NO: 3190004 - RNA, 19 nt, Artificial Sequence
  Description of Artificial Sequence: Synthetic oligonucleotide
uuucucaugaaggucucag

SEQ ID NO: 3190005 - RNA, 19 nt, Artificial Sequence
  Description of Artificial Sequence: Synthetic oligonucleotide
gaugguauaccuuguggca

SEQ ID NO: 3190006 - RNA, 19 nt, Artificial Sequence
  Description of Artificial Sequence: Synthetic oligonucleotide
ucucucauaugcauuccug

SEQ ID NO: 3190007 - RNA, 19 nt, Artificial Sequence
  Description of Artificial Sequence: Synthetic oligonucleotide
cacacagugauucauguca

SEQ ID NO: 3190008 - RNA, 19 nt, Artificial Sequence
  Description of Artificial Sequence: Synthetic oligonucleotide
gacuuuuggagaagguugg

SEQ ID NO: 3190009 - RNA, 19 nt, Artificial Sequence
  Description of Artificial Sequence: Synthetic oligonucleotide
cacagagcaguucaauucc

SEQ ID NO: 3190010 - RNA, 19 nt, Artificial Sequence
  Description of Artificial Sequence: Synthetic oligonucleotide
cugcaugacagacuggacc

SEQ ID NO: 3190011 - RNA, 19 nt, Artificial Sequence
  Description of Artificial Sequence: Synthetic oligonucleotide
uacucaugcagcuuccaca

SEQ ID NO: 3190012 - RNA, 19 nt, Artificial Sequence
  Description of Artificial Sequence: Synthetic oligonucleotide
ucuugcauuccagagucag

SEQ ID NO: 3190013 - RNA, 19 nt, Artificial Sequence
  Description of Artificial Sequence: Synthetic oligonucleotide
agcugcgagacuuuuggag

SEQ ID NO: 3190014 - RNA, 19 nt, Artificial Sequence
  Description of Artificial Sequence: Synthetic oligonucleotide
cucucauaugcauuccugc

SEQ ID NO: 3190015 - RNA, 19 nt, Artificial Sequence
  Description of Artificial Sequence: Synthetic oligonucleotide
gagaccuuggagcugcgag

SEQ ID NO: 3190016 - RNA, 19 nt, Artificial Sequence
  Description of Artificial Sequence: Synthetic oligonucleotide
uucugcugggcccucuugg

SEQ ID NO: 3190017 - RNA, 19 nt, Artificial Sequence
  Description of Artificial Sequence: Synthetic oligonucleotide
guucaauuccugcuguugc

SEQ ID NO: 3190018 - RNA, 19 nt, Artificial Sequence
  Description of Artificial Sequence: Synthetic oligonucleotide
ucacauucuugcauuccag

SEQ ID NO: 3190019 - RNA, 19 nt, Artificial Sequence
  Description of Artificial Sequence: Synthetic oligonucleotide
ugauucaugucauccucgc

SEQ ID NO: 3190020 - RNA, 19 nt, Artificial Sequence
  Description of Artificial Sequence: Synthetic oligonucleotide
agacuuuuggagaagguug

SEQ ID NO: 3190021 - RNA, 19 nt, Artificial Sequence
  Description of Artificial Sequence: Synthetic oligonucleotide
auacucaugcagcuuccac

SEQ ID NO: 3190022 - RNA, 19 nt, Artificial Sequence
  Description of Artificial Sequence: Synthetic oligonucleotide
ucucauaugcauuccugcu

SEQ ID NO: 3190023 - RNA, 19 nt, Artificial Sequence
  Description of Artificial Sequence: Synthetic oligonucleotide
cacaccauauauuugcuca

SEQ ID NO: 3190024 - RNA, 19 nt, Artificial Sequence
  Description of Artificial Sequence: Synthetic oligonucleotide
uucucaugaaggucucagg

SEQ ID NO: 3190025 - RNA, 19 nt, Artificial Sequence
  Description of Artificial Sequence: Synthetic oligonucleotide
ugcagcuuccacaggacug

SEQ ID NO: 3190026 - RNA, 19 nt, Artificial Sequence
  Description of Artificial Sequence: Synthetic oligonucleotide
agcaguucaauuccugcug

SEQ ID NO: 3190027 - RNA, 19 nt, Artificial Sequence
  Description of Artificial Sequence: Synthetic oligonucleotide
uccaucagauccaggaagu

SEQ ID NO: 3190028 - RNA, 19 nt, Artificial Sequence
  Description of Artificial Sequence: Synthetic oligonucleotide
ugugaugguaguuucucau

SEQ ID NO: 3190029 - RNA, 19 nt, Artificial Sequence
  Description of Artificial Sequence: Synthetic oligonucleotide
cucauagggcuucugcugg

SEQ ID NO: 3190030 - RNA, 19 nt, Artificial Sequence
  Description of Artificial Sequence: Synthetic oligonucleotide
gacagacuggaccacugag

SEQ ID NO: 3190031 - RNA, 19 nt, Artificial Sequence
  Description of Artificial Sequence: Synthetic oligonucleotide
aggguguaaggcucuggcc

SEQ ID NO: 3190032 - RNA, 19 nt, Artificial Sequence
  Description of Artificial Sequence: Synthetic oligonucleotide
cucaugaaggucucaggag

SEQ ID NO: 3190033 - RNA, 19 nt, Artificial Sequence
  Description of Artificial Sequence: Synthetic oligonucleotide
gcucacaccauauauuugc

SEQ ID NO: 3190034 - RNA, 19 nt, Artificial Sequence
  Description of Artificial Sequence: Synthetic oligonucleotide
cugagccacgguaugaagc

SEQ ID NO: 3190035 - RNA, 19 nt, Artificial Sequence
  Description of Artificial Sequence: Synthetic oligonucleotide
uaccuuguggcacagccaa

SEQ ID NO: 3190036 - RNA, 19 nt, Artificial Sequence
  Description of Artificial Sequence: Synthetic oligonucleotide
augguauaccuuguggcac

SEQ ID NO: 3190037 - RNA, 19 nt, Artificial Sequence
  Description of Artificial Sequence: Synthetic oligonucleotide
ggagcugcgagacuuuugg

SEQ ID NO: 3190038 - RNA, 19 nt, Artificial Sequence
  Description of Artificial Sequence: Synthetic oligonucleotide
ugccuauucacagagcagu

SEQ ID NO: 3190039 - RNA, 19 nt, Artificial Sequence
  Description of Artificial Sequence: Synthetic oligonucleotide
uacuucuuggcauacucau

SEQ ID NO: 3190040 - RNA, 19 nt, Artificial Sequence
  Description of Artificial Sequence: Synthetic oligonucleotide
uguucucggagcagauggg

SEQ ID NO: 3190041 - RNA, 19 nt, Artificial Sequence
  Description of Artificial Sequence: Synthetic oligonucleotide
caugaaggucucaggaggc

SEQ ID NO: 3190042 - RNA, 19 nt, Artificial Sequence
  Description of Artificial Sequence: Synthetic oligonucleotide
acagacuggaccacugagc

SEQ ID NO: 3190043 - RNA, 19 nt, Artificial Sequence
  Description of Artificial Sequence: Synthetic oligonucleotide
gcucaaaucucuugggagg

SEQ ID NO: 3190044 - RNA, 19 nt, Artificial Sequence
  Description of Artificial Sequence: Synthetic oligonucleotide
auagggcuucugcugggcc

SEQ ID NO: 3190045 - RNA, 19 nt, Artificial Sequence
  Description of Artificial Sequence: Synthetic oligonucleotide
cuuuuggagaagguugggg

SEQ ID NO: 3190046 - RNA, 19 nt, Artificial Sequence
  Description of Artificial Sequence: Synthetic oligonucleotide
uacccuggugugaugguag

SEQ ID NO: 3190047 - RNA, 19 nt, Artificial Sequence
  Description of Artificial Sequence: Synthetic oligonucleotide
cuugaccuggcacagagga

SEQ ID NO: 3190048 - RNA, 19 nt, Artificial Sequence
  Description of Artificial Sequence: Synthetic oligonucleotide
uuggccaugaugguauacc

SEQ ID NO: 3190049 - RNA, 19 nt, Artificial Sequence
  Description of Artificial Sequence: Synthetic oligonucleotide
ugcugcaugacagacugga

SEQ ID NO: 3190050 - RNA, 19 nt, Artificial Sequence
  Description of Artificial Sequence: Synthetic oligonucleotide
uuggggaggcuguucagag

SEQ ID NO: 3190051 - RNA, 19 nt, Artificial Sequence
  Description of Artificial Sequence: Synthetic oligonucleotide
cucaaaucucuugggaggg

SEQ ID NO: 3190052 - RNA, 19 nt, Artificial Sequence
  Description of Artificial Sequence: Synthetic oligonucleotide
cucauaugcauuccugcug

SEQ ID NO: 3190053 - RNA, 19 nt, Artificial Sequence
  Description of Artificial Sequence: Synthetic oligonucleotide
uucaauuccugcuguugcu

SEQ ID NO: 3190054 - RNA, 19 nt, Artificial Sequence
  Description of Artificial Sequence: Synthetic oligonucleotide
ugcucauagggcuucugcu

SEQ ID NO: 3190055 - RNA, 19 nt, Artificial Sequence
  Description of Artificial Sequence: Synthetic oligonucleotide
guaugaagccaccguaccc

SEQ ID NO: 3190056 - RNA, 19 nt, Artificial Sequence
  Description of Artificial Sequence: Synthetic oligonucleotide
cuugcauuccagagucagg

SEQ ID NO: 3190057 - RNA, 19 nt, Artificial Sequence
  Description of Artificial Sequence: Synthetic oligonucleotide
uucaggugggagaccuugg

SEQ ID NO: 3190058 - RNA, 19 nt, Artificial Sequence
  Description of Artificial Sequence: Synthetic oligonucleotide
gacuggaccacugagcaca

SEQ ID NO: 3190059 - RNA, 19 nt, Artificial Sequence
  Description of Artificial Sequence: Synthetic oligonucleotide
ucauccucgcugaaggguc

SEQ ID NO: 3190060 - RNA, 19 nt, Artificial Sequence
  Description of Artificial Sequence: Synthetic oligonucleotide
uugaggcucaaaucucuug

SEQ ID NO: 3190061 - RNA, 19 nt, Artificial Sequence
  Description of Artificial Sequence: Synthetic oligonucleotide
caucagauccaggaagucc

SEQ ID NO: 3190062 - RNA, 19 nt, Artificial Sequence
  Description of Artificial Sequence: Synthetic oligonucleotide
uucuucacauucuugcauu

SEQ ID NO: 3190063 - RNA, 19 nt, Artificial Sequence
  Description of Artificial Sequence: Synthetic oligonucleotide
cacagccaaauucagugac

SEQ ID NO: 3190064 - RNA, 19 nt, Artificial Sequence
  Description of Artificial Sequence: Synthetic oligonucleotide
auugcaucucuuggggugg

SEQ ID NO: 3190065 - RNA, 19 nt, Artificial Sequence
  Description of Artificial Sequence: Synthetic oligonucleotide
ugcauuccagagucagggg

SEQ ID NO: 3190066 - RNA, 19 nt, Artificial Sequence
  Description of Artificial Sequence: Synthetic oligonucleotide
cuguucagagcucacacca

SEQ ID NO: 3190067 - RNA, 19 nt, Artificial Sequence
  Description of Artificial Sequence: Synthetic oligonucleotide
ucuggcccacugcaaauug

SEQ ID NO: 3190068 - RNA, 19 nt, Artificial Sequence
  Description of Artificial Sequence: Synthetic oligonucleotide
ggguguaaggcucuggccc

SEQ ID NO: 3190069 - RNA, 19 nt, Artificial Sequence
  Description of Artificial Sequence: Synthetic oligonucleotide
caauuccugcuguugcucc

SEQ ID NO: 3190070 - RNA, 19 nt, Artificial Sequence
  Description of Artificial Sequence: Synthetic oligonucleotide
cacaggacuguguucucgg

SEQ ID NO: 3190071 - RNA, 19 nt, Artificial Sequence
  Description of Artificial Sequence: Synthetic oligonucleotide
uaugauauaauuuagguca

SEQ ID NO: 3190072 - RNA, 19 nt, Artificial Sequence
  Description of Artificial Sequence: Synthetic oligonucleotide
aacacugaauaacugaagc

SEQ ID NO: 3190073 - RNA, 19 nt, Artificial Sequence
  Description of Artificial Sequence: Synthetic oligonucleotide
ugaacaauaacccugagaa

SEQ ID NO: 3190074 - RNA, 19 nt, Artificial Sequence
  Description of Artificial Sequence: Synthetic oligonucleotide
aacaagaucucaaaguuac

SEQ ID NO: 3190075 - RNA, 19 nt, Artificial Sequence
  Description of Artificial Sequence: Synthetic oligonucleotide
aacuuaguacaucacuggc

SEQ ID NO: 3190076 - RNA, 19 nt, Artificial Sequence
  Description of Artificial Sequence: Synthetic oligonucleotide
gauacuuaccaauuucugg

SEQ ID NO: 3190077 - RNA, 19 nt, Artificial Sequence
  Description of Artificial Sequence: Synthetic oligonucleotide
aagcaagaggacuugaguc

SEQ ID NO: 3190078 - RNA, 19 nt, Artificial Sequence
  Description of Artificial Sequence: Synthetic oligonucleotide
uguaugauauaauuuaggu

SEQ ID NO: 3190079 - RNA, 19 nt, Artificial Sequence
  Description of Artificial Sequence: Synthetic oligonucleotide
aucgaauauauauuugugg

SEQ ID NO: 3190080 - RNA, 19 nt, Artificial Sequence
  Description of Artificial Sequence: Synthetic oligonucleotide
uuggaucucaggaugaggg

SEQ ID NO: 3190081 - RNA, 19 nt, Artificial Sequence
  Description of Artificial Sequence: Synthetic oligonucleotide
uuuguaugauauaauuuag

SEQ ID NO: 3190082 - RNA, 19 nt, Artificial Sequence
  Description of Artificial Sequence: Synthetic oligonucleotide
ugaacuuaguacaucacug

SEQ ID NO: 3190083 - RNA, 19 nt, Artificial Sequence
  Description of Artificial Sequence: Synthetic oligonucleotide
caaaggaucacacagugag

SEQ ID NO: 3190084 - RNA, 19 nt, Artificial Sequence
  Description of Artificial Sequence: Synthetic oligonucleotide
aguugaugaacaauaaccc

SEQ ID NO: 3190085 - RNA, 19 nt, Artificial Sequence
  Description of Artificial Sequence: Synthetic oligonucleotide
uuguaugauauaauuuagg

SEQ ID NO: 3190086 - RNA, 19 nt, Artificial Sequence
  Description of Artificial Sequence: Synthetic oligonucleotide
ucgaauauauauuugugga

SEQ ID NO: 3190087 - RNA, 19 nt, Artificial Sequence
  Description of Artificial Sequence: Synthetic oligonucleotide
uauauuuguggaaagcugu

SEQ ID NO: 3190088 - RNA, 19 nt, Artificial Sequence
  Description of Artificial Sequence: Synthetic oligonucleotide
uguugugauaagcaagagg

SEQ ID NO: 3190089 - RNA, 19 nt, Artificial Sequence
  Description of Artificial Sequence: Synthetic oligonucleotide
ucacucuuuacuauuaugu

SEQ ID NO: 3190090 - RNA, 19 nt, Artificial Sequence
  Description of Artificial Sequence: Synthetic oligonucleotide
gagauaguaauguaacaag

SEQ ID NO: 3190091 - RNA, 19 nt, Artificial Sequence
  Description of Artificial Sequence: Synthetic oligonucleotide
uuuuccaggauuauuugug

SEQ ID NO: 3190092 - RNA, 19 nt, Artificial Sequence
  Description of Artificial Sequence: Synthetic oligonucleotide
auuuauuuucacucuuuac

SEQ ID NO: 3190093 - RNA, 19 nt, Artificial Sequence
  Description of Artificial Sequence: Synthetic oligonucleotide
cuaauucuguaucugaagc

SEQ ID NO: 3190094 - RNA, 19 nt, Artificial Sequence
  Description of Artificial Sequence: Synthetic oligonucleotide
ucaaggucaguaaauaacu

SEQ ID NO: 3190095 - RNA, 19 nt, Artificial Sequence
  Description of Artificial Sequence: Synthetic oligonucleotide
acugguacuuaccagcuac

SEQ ID NO: 3190096 - RNA, 19 nt, Artificial Sequence
  Description of Artificial Sequence: Synthetic oligonucleotide
uuacaaaacuucaccaaag

SEQ ID NO: 3190097 - RNA, 19 nt, Artificial Sequence
  Description of Artificial Sequence: Synthetic oligonucleotide
cagauauuaacauacugac

SEQ ID NO: 3190098 - RNA, 19 nt, Artificial Sequence
  Description of Artificial Sequence: Synthetic oligonucleotide
auaguugaugaacaauaac

SEQ ID NO: 3190099 - RNA, 19 nt, Artificial Sequence
  Description of Artificial Sequence: Synthetic oligonucleotide
uuugagauguauguauugg

SEQ ID NO: 3190100 - RNA, 19 nt, Artificial Sequence
  Description of Artificial Sequence: Synthetic oligonucleotide
uuuacaaaacuucaccaaa

SEQ ID NO: 3190101 - RNA, 19 nt, Artificial Sequence
  Description of Artificial Sequence: Synthetic oligonucleotide
acuugagucacucugggug

SEQ ID NO: 3190102 - RNA, 19 nt, Artificial Sequence
  Description of Artificial Sequence: Synthetic oligonucleotide
guugugauaagcaagagga

SEQ ID NO: 3190103 - RNA, 19 nt, Artificial Sequence
  Description of Artificial Sequence: Synthetic oligonucleotide
uaaauaacugccuaagcau

SEQ ID NO: 3190104 - RNA, 19 nt, Artificial Sequence
  Description of Artificial Sequence: Synthetic oligonucleotide
auugguuugagauguaugu

SEQ ID NO: 3190105 - RNA, 19 nt, Artificial Sequence
  Description of Artificial Sequence: Synthetic oligonucleotide
auauauauuuguggaaagc

SEQ ID NO: 3190106 - RNA, 19 nt, Artificial Sequence
  Description of Artificial Sequence: Synthetic oligonucleotide
auaauuuaggucaagguca

SEQ ID NO: 3190107 - RNA, 19 nt, Artificial Sequence
  Description of Artificial Sequence: Synthetic oligonucleotide
gaacuuaguacaucacugg

SEQ ID NO: 3190108 - RNA, 19 nt, Artificial Sequence
  Description of Artificial Sequence: Synthetic oligonucleotide
auacuuaccaauuucuggu

SEQ ID NO: 3190109 - RNA, 19 nt, Artificial Sequence
  Description of Artificial Sequence: Synthetic oligonucleotide
guaaauaacugccuaagca

SEQ ID NO: 3190110 - RNA, 19 nt, Artificial Sequence
  Description of Artificial Sequence: Synthetic oligonucleotide
ugagauguauguauuggug

SEQ ID NO: 3190111 - RNA, 19 nt, Artificial Sequence
  Description of Artificial Sequence: Synthetic oligonucleotide
ucuaauucuguaucugaag

SEQ ID NO: 3190112 - RNA, 19 nt, Artificial Sequence
  Description of Artificial Sequence: Synthetic oligonucleotide
cuuaauauugauuauuaaa

SEQ ID NO: 3190113 - RNA, 19 nt, Artificial Sequence
  Description of Artificial Sequence: Synthetic oligonucleotide
aauguaacaagaucucaaa

SEQ ID NO: 3190114 - RNA, 19 nt, Artificial Sequence
  Description of Artificial Sequence: Synthetic oligonucleotide
cuuaccauggcuugacugg

SEQ ID NO: 3190115 - RNA, 19 nt, Artificial Sequence
  Description of Artificial Sequence: Synthetic oligonucleotide
uaacauacugaccauggcu

SEQ ID NO: 3190116 - RNA, 19 nt, Artificial Sequence
  Description of Artificial Sequence: Synthetic oligonucleotide
uuauuaaaucaaugguuag

SEQ ID NO: 3190117 - RNA, 19 nt, Artificial Sequence
  Description of Artificial Sequence: Synthetic oligonucleotide
gaauaguucacagucauca

SEQ ID NO: 3190118 - RNA, 19 nt, Artificial Sequence
  Description of Artificial Sequence: Synthetic oligonucleotide
agaucgaauauauauuugu

SEQ ID NO: 3190119 - RNA, 19 nt, Artificial Sequence
  Description of Artificial Sequence: Synthetic oligonucleotide
gagaaguacaugcaucuag

SEQ ID NO: 3190120 - RNA, 19 nt, Artificial Sequence
  Description of Artificial Sequence: Synthetic oligonucleotide
aaauaacugccuaagcauc

SEQ ID NO: 3190121 - RNA, 19 nt, Artificial Sequence
  Description of Artificial Sequence: Synthetic oligonucleotide
aaaggcacaugugcuaacc

SEQ ID NO: 3190122 - RNA, 19 nt, Artificial Sequence
  Description of Artificial Sequence: Synthetic oligonucleotide
uguaucugaagccaccaca

SEQ ID NO: 3190123 - RNA, 19 nt, Artificial Sequence
  Description of Artificial Sequence: Synthetic oligonucleotide
guacuuaccagcuacuggc

SEQ ID NO: 3190124 - RNA, 19 nt, Artificial Sequence
  Description of Artificial Sequence: Synthetic oligonucleotide
uaagaaauuucuguucuag

SEQ ID NO: 3190125 - RNA, 19 nt, Artificial Sequence
  Description of Artificial Sequence: Synthetic oligonucleotide
agauguauguauugguguc

SEQ ID NO: 3190126 - RNA, 19 nt, Artificial Sequence
  Description of Artificial Sequence: Synthetic oligonucleotide
aaaacuucaccaaagucgu

SEQ ID NO: 3190127 - RNA, 19 nt, Artificial Sequence
  Description of Artificial Sequence: Synthetic oligonucleotide
auguugcugaacgagaccc

SEQ ID NO: 3190128 - RNA, 19 nt, Artificial Sequence
  Description of Artificial Sequence: Synthetic oligonucleotide
ugaacgagacccagaaccg

SEQ ID NO: 3190129 - RNA, 19 nt, Artificial Sequence
  Description of Artificial Sequence: Synthetic oligonucleotide
aaagcuguccuuccccuuc

SEQ ID NO: 3190130 - RNA, 19 nt, Artificial Sequence
  Description of Artificial Sequence: Synthetic oligonucleotide
uugaguauaucauugguuu

SEQ ID NO: 3190131 - RNA, 19 nt, Artificial Sequence
  Description of Artificial Sequence: Synthetic oligonucleotide
caucuagugaacuuaguac

SEQ ID NO: 3190132 - RNA, 19 nt, Artificial Sequence
  Description of Artificial Sequence: Synthetic oligonucleotide
caucuuaaacgcuccaugg

SEQ ID NO: 3190133 - RNA, 19 nt, Artificial Sequence
  Description of Artificial Sequence: Synthetic oligonucleotide
guuuguaugauauaauuua

SEQ ID NO: 3190134 - RNA, 19 nt, Artificial Sequence
  Description of Artificial Sequence: Synthetic oligonucleotide
uaaaucaaugguuaguauu

SEQ ID NO: 3190135 - RNA, 19 nt, Artificial Sequence
  Description of Artificial Sequence: Synthetic oligonucleotide
uuaaacgcuccauggaaag

SEQ ID NO: 3190136 - RNA, 19 nt, Artificial Sequence
  Description of Artificial Sequence: Synthetic oligonucleotide
cauuguuuggcauaguuga

SEQ ID NO: 3190137 - RNA, 19 nt, Artificial Sequence
  Description of Artificial Sequence: Synthetic oligonucleotide
aguguucaaguucaucuuc

SEQ ID NO: 3190138 - RNA, 19 nt, Artificial Sequence
  Description of Artificial Sequence: Synthetic oligonucleotide
ucugaagccaccacauuug

SEQ ID NO: 3190139 - RNA, 19 nt, Artificial Sequence
  Description of Artificial Sequence: Synthetic oligonucleotide
ucuuaaacgcuccauggaa

SEQ ID NO: 3190140 - RNA, 19 nt, Artificial Sequence
  Description of Artificial Sequence: Synthetic oligonucleotide
uaucagaaauuucacccug

SEQ ID NO: 3190141 - RNA, 19 nt, Artificial Sequence
  Description of Artificial Sequence: Synthetic oligonucleotide
ugauacuuaccaauuucug

SEQ ID NO: 3190142 - RNA, 19 nt, Artificial Sequence
  Description of Artificial Sequence: Synthetic oligonucleotide
uauaguugaugaacaauaa

SEQ ID NO: 3190143 - RNA, 19 nt, Artificial Sequence
  Description of Artificial Sequence: Synthetic oligonucleotide
uuuugccaaacacugaaua

SEQ ID NO: 3190144 - RNA, 19 nt, Artificial Sequence
  Description of Artificial Sequence: Synthetic oligonucleotide
agauauuaacauacugacc

SEQ ID NO: 3190145 - RNA, 19 nt, Artificial Sequence
  Description of Artificial Sequence: Synthetic oligonucleotide
uacuaacugguacuuacca

SEQ ID NO: 3190146 - RNA, 19 nt, Artificial Sequence
  Description of Artificial Sequence: Synthetic oligonucleotide
cuaagcaucuuaaacgcuc

SEQ ID NO: 3190147 - RNA, 19 nt, Artificial Sequence
  Description of Artificial Sequence: Synthetic oligonucleotide
auaucauugguuugagaug

SEQ ID NO: 3190148 - RNA, 19 nt, Artificial Sequence
  Description of Artificial Sequence: Synthetic oligonucleotide
uaagcaagaggacuugagu

SEQ ID NO: 3190149 - RNA, 19 nt, Artificial Sequence
  Description of Artificial Sequence: Synthetic oligonucleotide
agagaucgaauauauauuu

SEQ ID NO: 3190150 - RNA, 19 nt, Artificial Sequence
  Description of Artificial Sequence: Synthetic oligonucleotide
uacaaaacuucaccaaagu

SEQ ID NO: 3190151 - RNA, 19 nt, Artificial Sequence
  Description of Artificial Sequence: Synthetic oligonucleotide
aaauuucacccugugaaga

SEQ ID NO: 3190152 - RNA, 19 nt, Artificial Sequence
  Description of Artificial Sequence: Synthetic oligonucleotide
aaaucaaugguuaguauuu

SEQ ID NO: 3190153 - RNA, 19 nt, Artificial Sequence
  Description of Artificial Sequence: Synthetic oligonucleotide
gaggacuugagucacucug

SEQ ID NO: 3190154 - RNA, 19 nt, Artificial Sequence
  Description of Artificial Sequence: Synthetic oligonucleotide
auguaacaagaucucaaag

SEQ ID NO: 3190155 - RNA, 19 nt, Artificial Sequence
  Description of Artificial Sequence: Synthetic oligonucleotide
uccaggauuauuugugacc

SEQ ID NO: 3190156 - RNA, 19 nt, Artificial Sequence
  Description of Artificial Sequence: Synthetic oligonucleotide
auuauuaaaucaaugguua

SEQ ID NO: 3190157 - RNA, 19 nt, Artificial Sequence
  Description of Artificial Sequence: Synthetic oligonucleotide
gaauauauauuuguggaaa

SEQ ID NO: 3190158 - RNA, 19 nt, Artificial Sequence
  Description of Artificial Sequence: Synthetic oligonucleotide
acguguauucuuuuccagg

SEQ ID NO: 3190159 - RNA, 19 nt, Artificial Sequence
  Description of Artificial Sequence: Synthetic oligonucleotide
uuaacauacugaccauggc

SEQ ID NO: 3190160 - RNA, 19 nt, Artificial Sequence
  Description of Artificial Sequence: Synthetic oligonucleotide
uguuucuaauucuguaucu

SEQ ID NO: 3190161 - RNA, 19 nt, Artificial Sequence
  Description of Artificial Sequence: Synthetic oligonucleotide
accacauuugaauauacuu

SEQ ID NO: 3190162 - RNA, 19 nt, Artificial Sequence
  Description of Artificial Sequence: Synthetic oligonucleotide
aucuuggucaucaauuuuc

SEQ ID NO: 3190163 - RNA, 19 nt, Artificial Sequence
  Description of Artificial Sequence: Synthetic oligonucleotide
guaaaacacaaggaggaag

SEQ ID NO: 3190164 - RNA, 19 nt, Artificial Sequence
  Description of Artificial Sequence: Synthetic oligonucleotide
auuaaaucaaugguuagua

SEQ ID NO: 3190165 - RNA, 19 nt, Artificial Sequence
  Description of Artificial Sequence: Synthetic oligonucleotide
uucuaauucuguaucugaa

SEQ ID NO: 3190166 - RNA, 19 nt, Artificial Sequence
  Description of Artificial Sequence: Synthetic oligonucleotide
acuaacugguacuuaccag

SEQ ID NO: 3190167 - RNA, 19 nt, Artificial Sequence
  Description of Artificial Sequence: Synthetic oligonucleotide
auuuguggaaagcuguccu

SEQ ID NO: 3190168 - RNA, 19 nt, Artificial Sequence
  Description of Artificial Sequence: Synthetic oligonucleotide
gaucgaauauauauuugug

SEQ ID NO: 3190169 - RNA, 19 nt, Artificial Sequence
  Description of Artificial Sequence: Synthetic oligonucleotide
aaagucguaucagaaauuu

SEQ ID NO: 3190170 - RNA, 19 nt, Artificial Sequence
  Description of Artificial Sequence: Synthetic oligonucleotide
ucguaucagaaauuucacc

SEQ ID NO: 3190171 - RNA, 19 nt, Artificial Sequence
  Description of Artificial Sequence: Synthetic oligonucleotide
aaaucgguaacuuccagcc

SEQ ID NO: 3190172 - RNA, 19 nt, Artificial Sequence
  Description of Artificial Sequence: Synthetic oligonucleotide
uauuuuaauguuuauguug

SEQ ID NO: 3190173 - RNA, 19 nt, Artificial Sequence
  Description of Artificial Sequence: Synthetic oligonucleotide
uccucaagaaucuagagcc

SEQ ID NO: 3190174 - RNA, 19 nt, Artificial Sequence
  Description of Artificial Sequence: Synthetic oligonucleotide
uucuuuuaccuacugagcg

SEQ ID NO: 3190175 - RNA, 19 nt, Artificial Sequence
  Description of Artificial Sequence: Synthetic oligonucleotide
aucagauuaacuuaguucu

SEQ ID NO: 3190176 - RNA, 19 nt, Artificial Sequence
  Description of Artificial Sequence: Synthetic oligonucleotide
ucuucggucaucaaaaucu

SEQ ID NO: 3190177 - RNA, 19 nt, Artificial Sequence
  Description of Artificial Sequence: Synthetic oligonucleotide
auugaaacguauuuuaaug

SEQ ID NO: 3190178 - RNA, 19 nt, Artificial Sequence
  Description of Artificial Sequence: Synthetic oligonucleotide
aguguuuugaauucuaucu

SEQ ID NO: 3190179 - RNA, 19 nt, Artificial Sequence
  Description of Artificial Sequence: Synthetic oligonucleotide
uguuuugaauucuaucucg

SEQ ID NO: 3190180 - RNA, 19 nt, Artificial Sequence
  Description of Artificial Sequence: Synthetic oligonucleotide
ugacguuaaaagaaugugg

SEQ ID NO: 3190181 - RNA, 19 nt, Artificial Sequence
  Description of Artificial Sequence: Synthetic oligonucleotide
aaaucucuguauuaugcuc

SEQ ID NO: 3190182 - RNA, 19 nt, Artificial Sequence
  Description of Artificial Sequence: Synthetic oligonucleotide
uccaaaaugaucccuacca

SEQ ID NO: 3190183 - RNA, 19 nt, Artificial Sequence
  Description of Artificial Sequence: Synthetic oligonucleotide
aauucuaucucguccaaga

SEQ ID NO: 3190184 - RNA, 19 nt, Artificial Sequence
  Description of Artificial Sequence: Synthetic oligonucleotide
uuaccuuaaauccugcagc

SEQ ID NO: 3190185 - RNA, 19 nt, Artificial Sequence
  Description of Artificial Sequence: Synthetic oligonucleotide
aggaacaaaucacacacac

SEQ ID NO: 3190186 - RNA, 19 nt, Artificial Sequence
  Description of Artificial Sequence: Synthetic oligonucleotide
aguaaagggaaucuugguc

SEQ ID NO: 3190187 - RNA, 19 nt, Artificial Sequence
  Description of Artificial Sequence: Synthetic oligonucleotide
gacguuaaaagaauguggg

SEQ ID NO: 3190188 - RNA, 19 nt, Artificial Sequence
  Description of Artificial Sequence: Synthetic oligonucleotide
uguugggcaaguuuggagg

SEQ ID NO: 3190189 - RNA, 19 nt, Artificial Sequence
  Description of Artificial Sequence: Synthetic oligonucleotide
guaaagggaaucuuggucc

SEQ ID NO: 3190190 - RNA, 19 nt, Artificial Sequence
  Description of Artificial Sequence: Synthetic oligonucleotide
ugcauaaaaugucacagcu

SEQ ID NO: 3190191 - RNA, 19 nt, Artificial Sequence
  Description of Artificial Sequence: Synthetic oligonucleotide
aaaacccucucuuccauag

SEQ ID NO: 3190192 - RNA, 19 nt, Artificial Sequence
  Description of Artificial Sequence: Synthetic oligonucleotide
uucuaucucguccaagacg

SEQ ID NO: 3190193 - RNA, 19 nt, Artificial Sequence
  Description of Artificial Sequence: Synthetic oligonucleotide
ucggcagaaaucaaaaucu

SEQ ID NO: 3190194 - RNA, 19 nt, Artificial Sequence
  Description of Artificial Sequence: Synthetic oligonucleotide
uguuauuugagauacccau

SEQ ID NO: 3190195 - RNA, 19 nt, Artificial Sequence
  Description of Artificial Sequence: Synthetic oligonucleotide
ucuaggaucaaaucgguaa

SEQ ID NO: 3190196 - RNA, 19 nt, Artificial Sequence
  Description of Artificial Sequence: Synthetic oligonucleotide
guaacagagaccauagugg

SEQ ID NO: 3190197 - RNA, 19 nt, Artificial Sequence
  Description of Artificial Sequence: Synthetic oligonucleotide
guuaacuugaggcacauuc

SEQ ID NO: 3190198 - RNA, 19 nt, Artificial Sequence
  Description of Artificial Sequence: Synthetic oligonucleotide
acucgaaacauuugagggc

SEQ ID NO: 3190199 - RNA, 19 nt, Artificial Sequence
  Description of Artificial Sequence: Synthetic oligonucleotide
aacaaugucuauacaaguc

SEQ ID NO: 3190200 - RNA, 19 nt, Artificial Sequence
  Description of Artificial Sequence: Synthetic oligonucleotide
agagaugacaacuuuacaa

SEQ ID NO: 3190201 - RNA, 19 nt, Artificial Sequence
  Description of Artificial Sequence: Synthetic oligonucleotide
auguuuaccuaccauguuc

SEQ ID NO: 3190202 - RNA, 19 nt, Artificial Sequence
  Description of Artificial Sequence: Synthetic oligonucleotide
uuugagguccaaucggugg

SEQ ID NO: 3190203 - RNA, 19 nt, Artificial Sequence
  Description of Artificial Sequence: Synthetic oligonucleotide
acgugaacaacuguggugc

SEQ ID NO: 3190204 - RNA, 19 nt, Artificial Sequence
  Description of Artificial Sequence: Synthetic oligonucleotide
agaaaggugaacaugaaca

SEQ ID NO: 3190205 - RNA, 19 nt, Artificial Sequence
  Description of Artificial Sequence: Synthetic oligonucleotide
uucccauaaguccagcagg

SEQ ID NO: 3190206 - RNA, 19 nt, Artificial Sequence
  Description of Artificial Sequence: Synthetic oligonucleotide
aucgguaacuuccagcccg

SEQ ID NO: 3190207 - RNA, 19 nt, Artificial Sequence
  Description of Artificial Sequence: Synthetic oligonucleotide
ugagcugggauaguuaagg

SEQ ID NO: 3190208 - RNA, 19 nt, Artificial Sequence
  Description of Artificial Sequence: Synthetic oligonucleotide
ugugguaucaguccuggac

SEQ ID NO: 3190209 - RNA, 19 nt, Artificial Sequence
  Description of Artificial Sequence: Synthetic oligonucleotide
gguucuuuuaccuacugag

SEQ ID NO: 3190210 - RNA, 19 nt, Artificial Sequence
  Description of Artificial Sequence: Synthetic oligonucleotide
uuguacaauuauuuuaaga

SEQ ID NO: 3190211 - RNA, 19 nt, Artificial Sequence
  Description of Artificial Sequence: Synthetic oligonucleotide
uguuuaccuaccauguuca

SEQ ID NO: 3190212 - RNA, 19 nt, Artificial Sequence
  Description of Artificial Sequence: Synthetic oligonucleotide
guuaccuuaaauccugcag

SEQ ID NO: 3190213 - RNA, 19 nt, Artificial Sequence
  Description of Artificial Sequence: Synthetic oligonucleotide
uugaaacguauuuuaaugu

SEQ ID NO: 3190214 - RNA, 19 nt, Artificial Sequence
  Description of Artificial Sequence: Synthetic oligonucleotide
accauguucauauuaagaa

SEQ ID NO: 3190215 - RNA, 19 nt, Artificial Sequence
  Description of Artificial Sequence: Synthetic oligonucleotide
aaaccgguagucucuauca

SEQ ID NO: 3190216 - RNA, 19 nt, Artificial Sequence
  Description of Artificial Sequence: Synthetic oligonucleotide
uacaggaggaaaccgguag

SEQ ID NO: 3190217 - RNA, 19 nt, Artificial Sequence
  Description of Artificial Sequence: Synthetic oligonucleotide
gugguauccguuuaucugg

SEQ ID NO: 3190218 - RNA, 19 nt, Artificial Sequence
  Description of Artificial Sequence: Synthetic oligonucleotide
gagggaaagguccacgggg

SEQ ID NO: 3190219 - RNA, 19 nt, Artificial Sequence
  Description of Artificial Sequence: Synthetic oligonucleotide
uuuggaccaccgaagacag

SEQ ID NO: 3190220 - RNA, 19 nt, Artificial Sequence
  Description of Artificial Sequence: Synthetic oligonucleotide
aaauauggccaccaaccca

SEQ ID NO: 3190221 - RNA, 19 nt, Artificial Sequence
  Description of Artificial Sequence: Synthetic oligonucleotide
ucucaucaaaaucucuaag

SEQ ID NO: 3190222 - RNA, 19 nt, Artificial Sequence
  Description of Artificial Sequence: Synthetic oligonucleotide
ucggucaucaaaaucucug

SEQ ID NO: 3190223 - RNA, 19 nt, Artificial Sequence
  Description of Artificial Sequence: Synthetic oligonucleotide
aaggaccacuucuaggauc

SEQ ID NO: 3190224 - RNA, 19 nt, Artificial Sequence
  Description of Artificial Sequence: Synthetic oligonucleotide
uuuuggaccaccgaagaca

SEQ ID NO: 3190225 - RNA, 19 nt, Artificial Sequence
  Description of Artificial Sequence: Synthetic oligonucleotide
ucuuacagagaugacaacu

SEQ ID NO: 3190226 - RNA, 19 nt, Artificial Sequence
  Description of Artificial Sequence: Synthetic oligonucleotide
auaaacgugaacaacugug

SEQ ID NO: 3190227 - RNA, 19 nt, Artificial Sequence
  Description of Artificial Sequence: Synthetic oligonucleotide
uacuccaagaaguccagag

SEQ ID NO: 3190228 - RNA, 19 nt, Artificial Sequence
  Description of Artificial Sequence: Synthetic oligonucleotide
uggcagauaaacgugaaca

SEQ ID NO: 3190229 - RNA, 19 nt, Artificial Sequence
  Description of Artificial Sequence: Synthetic oligonucleotide
caggauuuguaacauuugg

SEQ ID NO: 3190230 - RNA, 19 nt, Artificial Sequence
  Description of Artificial Sequence: Synthetic oligonucleotide
ggauuuguaacauuuggug

SEQ ID NO: 3190231 - RNA, 19 nt, Artificial Sequence
  Description of Artificial Sequence: Synthetic oligonucleotide
agagcuauggagaagauau

SEQ ID NO: 3190232 - RNA, 19 nt, Artificial Sequence
  Description of Artificial Sequence: Synthetic oligonucleotide
auacccauggaucagguaa

SEQ ID NO: 3190233 - RNA, 19 nt, Artificial Sequence
  Description of Artificial Sequence: Synthetic oligonucleotide
ucuccuugacguuaaaaga

SEQ ID NO: 3190234 - RNA, 19 nt, Artificial Sequence
  Description of Artificial Sequence: Synthetic oligonucleotide
aaaugucacagcuuuguuu

SEQ ID NO: 3190235 - RNA, 19 nt, Artificial Sequence
  Description of Artificial Sequence: Synthetic oligonucleotide
uaaaaugucacagcuuugu

SEQ ID NO: 3190236 - RNA, 19 nt, Artificial Sequence
  Description of Artificial Sequence: Synthetic oligonucleotide
cuuaacuuuggaguaacag

SEQ ID NO: 3190237 - RNA, 19 nt, Artificial Sequence
  Description of Artificial Sequence: Synthetic oligonucleotide
agaacaaugucuauacaag

SEQ ID NO: 3190238 - RNA, 19 nt, Artificial Sequence
  Description of Artificial Sequence: Synthetic oligonucleotide
gaacaucagauuaacuuag

SEQ ID NO: 3190239 - RNA, 19 nt, Artificial Sequence
  Description of Artificial Sequence: Synthetic oligonucleotide
uaccauguucauauuaaga

SEQ ID NO: 3190240 - RNA, 19 nt, Artificial Sequence
  Description of Artificial Sequence: Synthetic oligonucleotide
uccaagacgauuuccauua

SEQ ID NO: 3190241 - RNA, 19 nt, Artificial Sequence
  Description of Artificial Sequence: Synthetic oligonucleotide
gugguaucaguccuggacg

SEQ ID NO: 3190242 - RNA, 19 nt, Artificial Sequence
  Description of Artificial Sequence: Synthetic oligonucleotide
uucauguaagccuuuugga

SEQ ID NO: 3190243 - RNA, 19 nt, Artificial Sequence
  Description of Artificial Sequence: Synthetic oligonucleotide
guuaaaagaauguggggca

SEQ ID NO: 3190244 - RNA, 19 nt, Artificial Sequence
  Description of Artificial Sequence: Synthetic oligonucleotide
aucccuaucccucugccuc

SEQ ID NO: 3190245 - RNA, 19 nt, Artificial Sequence
  Description of Artificial Sequence: Synthetic oligonucleotide
uaacagagaccauagugga

SEQ ID NO: 3190246 - RNA, 19 nt, Artificial Sequence
  Description of Artificial Sequence: Synthetic oligonucleotide
accgguagucucuaucacc

SEQ ID NO: 3190247 - RNA, 19 nt, Artificial Sequence
  Description of Artificial Sequence: Synthetic oligonucleotide
cuaacggaggccuuccagg

SEQ ID NO: 3190248 - RNA, 19 nt, Artificial Sequence
  Description of Artificial Sequence: Synthetic oligonucleotide
ugcuucacuuucuacacca

SEQ ID NO: 3190249 - RNA, 19 nt, Artificial Sequence
  Description of Artificial Sequence: Synthetic oligonucleotide
auuugagauacccauggau

SEQ ID NO: 3190250 - RNA, 19 nt, Artificial Sequence
  Description of Artificial Sequence: Synthetic oligonucleotide
ggaaucuugguccaggagc

SEQ ID NO: 3190251 - RNA, 19 nt, Artificial Sequence
  Description of Artificial Sequence: Synthetic oligonucleotide
cuauuaaugccuucccuug

SEQ ID NO: 3190252 - RNA, 19 nt, Artificial Sequence
  Description of Artificial Sequence: Synthetic oligonucleotide
acguuaaaagaaugugggg

SEQ ID NO: 3190253 - RNA, 19 nt, Artificial Sequence
  Description of Artificial Sequence: Synthetic oligonucleotide
auucuaucucguccaagac

SEQ ID NO: 3190254 - RNA, 19 nt, Artificial Sequence
  Description of Artificial Sequence: Synthetic oligonucleotide
ucucucaucaaaaucucua

SEQ ID NO: 3190255 - RNA, 19 nt, Artificial Sequence
  Description of Artificial Sequence: Synthetic oligonucleotide
aauauggccaccaacccaa

SEQ ID NO: 3190256 - RNA, 19 nt, Artificial Sequence
  Description of Artificial Sequence: Synthetic oligonucleotide
aaugaucccuaccaucuaa

SEQ ID NO: 3190257 - RNA, 19 nt, Artificial Sequence
  Description of Artificial Sequence: Synthetic oligonucleotide
guuagcaucuccuugacgu

SEQ ID NO: 3190258 - RNA, 19 nt, Artificial Sequence
  Description of Artificial Sequence: Synthetic oligonucleotide
gacuuggucuuccaggagc

SEQ ID NO: 3190259 - RNA, 19 nt, Artificial Sequence
  Description of Artificial Sequence: Synthetic oligonucleotide
ucuaacggaggccuuccag

SEQ ID NO: 3190260 - RNA, 19 nt, Artificial Sequence
  Description of Artificial Sequence: Synthetic oligonucleotide
aagauaugccacaccuugc

SEQ ID NO: 3190261 - RNA, 19 nt, Artificial Sequence
  Description of Artificial Sequence: Synthetic oligonucleotide
ucuacaggaggaaaccggu

SEQ ID NO: 3190262 - RNA, 19 nt, Artificial Sequence
  Description of Artificial Sequence: Synthetic oligonucleotide
ugaucccuaccaucuaacg

SEQ ID NO: 3190263 - RNA, 19 nt, Artificial Sequence
  Description of Artificial Sequence: Synthetic oligonucleotide
cacacacuuaacuuuggag

SEQ ID NO: 3190264 - RNA, 19 nt, Artificial Sequence
  Description of Artificial Sequence: Synthetic oligonucleotide
uugaggcacauucucaccu

SEQ ID NO: 3190265 - RNA, 19 nt, Artificial Sequence
  Description of Artificial Sequence: Synthetic oligonucleotide
cucggcagaaaucaaaauc

SEQ ID NO: 3190266 - RNA, 19 nt, Artificial Sequence
  Description of Artificial Sequence: Synthetic oligonucleotide
uccaaggaccacuucuagg

SEQ ID NO: 3190267 - RNA, 19 nt, Artificial Sequence
  Description of Artificial Sequence: Synthetic oligonucleotide
aaaaucucugggaacgucu

SEQ ID NO: 3190268 - RNA, 19 nt, Artificial Sequence
  Description of Artificial Sequence: Synthetic oligonucleotide
aucucugggaacgucuugc

SEQ ID NO: 3190269 - RNA, 19 nt, Artificial Sequence
  Description of Artificial Sequence: Synthetic oligonucleotide
ucacuucuuaaaaucucug

SEQ ID NO: 3190270 - RNA, 19 nt, Artificial Sequence
  Description of Artificial Sequence: Synthetic oligonucleotide
uuguuauuugagauaccca

SEQ ID NO: 3190271 - RNA, 19 nt, Artificial Sequence
  Description of Artificial Sequence: Synthetic oligonucleotide
aagucuuccagacaaacug

SEQ ID NO: 3190272 - RNA, 19 nt, Artificial Sequence
  Description of Artificial Sequence: Synthetic oligonucleotide
cuuagcaucuccuuuaagc

SEQ ID NO: 3190273 - RNA, 19 nt, Artificial Sequence
  Description of Artificial Sequence: Synthetic oligonucleotide
uuacugaugaaguagcagc

SEQ ID NO: 3190274 - RNA, 19 nt, Artificial Sequence
  Description of Artificial Sequence: Synthetic oligonucleotide
ucaucuuuccccuugaagu

SEQ ID NO: 3190275 - RNA, 19 nt, Artificial Sequence
  Description of Artificial Sequence: Synthetic oligonucleotide
uggaaguacaccuagcuca

SEQ ID NO: 3190276 - RNA, 19 nt, Artificial Sequence
  Description of Artificial Sequence: Synthetic oligonucleotide
agagcugcaacuucuuagc

SEQ ID NO: 3190277 - RNA, 19 nt, Artificial Sequence
  Description of Artificial Sequence: Synthetic oligonucleotide
cuuguagccauaucgcucg

SEQ ID NO: 3190278 - RNA, 19 nt, Artificial Sequence
  Description of Artificial Sequence: Synthetic oligonucleotide
agcaccaccuccuuguagc

SEQ ID NO: 3190279 - RNA, 19 nt, Artificial Sequence
  Description of Artificial Sequence: Synthetic oligonucleotide
uuagcaucuccuuuaagca

SEQ ID NO: 3190280 - RNA, 19 nt, Artificial Sequence
  Description of Artificial Sequence: Synthetic oligonucleotide
auaucgcucgcucugugcc

SEQ ID NO: 3190281 - RNA, 19 nt, Artificial Sequence
  Description of Artificial Sequence: Synthetic oligonucleotide
aucuccuuuaagcaccacc

SEQ ID NO: 3190282 - RNA, 19 nt, Artificial Sequence
  Description of Artificial Sequence: Synthetic oligonucleotide
ucuccuuuaagcaccaccu

SEQ ID NO: 3190283 - RNA, 19 nt, Artificial Sequence
  Description of Artificial Sequence: Synthetic oligonucleotide
aguuuacugaugaaguagc

SEQ ID NO: 3190284 - RNA, 19 nt, Artificial Sequence
  Description of Artificial Sequence: Synthetic oligonucleotide
acacaacgcacuucuagcc

SEQ ID NO: 3190285 - RNA, 19 nt, Artificial Sequence
  Description of Artificial Sequence: Synthetic oligonucleotide
aaguacaccuagcucaucu

SEQ ID NO: 3190286 - RNA, 19 nt, Artificial Sequence
  Description of Artificial Sequence: Synthetic oligonucleotide
agacaaacugcacaggucu

SEQ ID NO: 3190287 - RNA, 19 nt, Artificial Sequence
  Description of Artificial Sequence: Synthetic oligonucleotide
uccuuuaagcaccaccucc

SEQ ID NO: 3190288 - RNA, 19 nt, Artificial Sequence
  Description of Artificial Sequence: Synthetic oligonucleotide
ugaaguagcagcagaagau

SEQ ID NO: 3190289 - RNA, 19 nt, Artificial Sequence
  Description of Artificial Sequence: Synthetic oligonucleotide
uuaagcaccaccuccuugu

SEQ ID NO: 3190290 - RNA, 19 nt, Artificial Sequence
  Description of Artificial Sequence: Synthetic oligonucleotide
uagagcugcaacuucuuag

SEQ ID NO: 3190291 - RNA, 19 nt, Artificial Sequence
  Description of Artificial Sequence: Synthetic oligonucleotide
acuucuagccacuucacca

SEQ ID NO: 3190292 - RNA, 19 nt, Artificial Sequence
  Description of Artificial Sequence: Synthetic oligonucleotide
uuuacugaugaaguagcag

SEQ ID NO: 3190293 - RNA, 19 nt, Artificial Sequence
  Description of Artificial Sequence: Synthetic oligonucleotide
uuccagacaaacugcacag

SEQ ID NO: 3190294 - RNA, 19 nt, Artificial Sequence
  Description of Artificial Sequence: Synthetic oligonucleotide
gaguuuacugaugaaguag

SEQ ID NO: 3190295 - RNA, 19 nt, Artificial Sequence
  Description of Artificial Sequence: Synthetic oligonucleotide
accuagcucaucuuucccc

SEQ ID NO: 3190296 - RNA, 19 nt, Artificial Sequence
  Description of Artificial Sequence: Synthetic oligonucleotide
acaccuagcucaucuuucc

SEQ ID NO: 3190297 - RNA, 19 nt, Artificial Sequence
  Description of Artificial Sequence: Synthetic oligonucleotide
gacacaacgcacuucuagc

SEQ ID NO: 3190298 - RNA, 19 nt, Artificial Sequence
  Description of Artificial Sequence: Synthetic oligonucleotide
agcaucuccuuuaagcacc

SEQ ID NO: 3190299 - RNA, 19 nt, Artificial Sequence
  Description of Artificial Sequence: Synthetic oligonucleotide
aaacugcacaggucugccc

SEQ ID NO: 3190300 - RNA, 19 nt, Artificial Sequence
  Description of Artificial Sequence: Synthetic oligonucleotide
agacacaacgcacuucuag

SEQ ID NO: 3190301 - RNA, 19 nt, Artificial Sequence
  Description of Artificial Sequence: Synthetic oligonucleotide
gacacuugcggugaaacgc

SEQ ID NO: 3190302 - RNA, 19 nt, Artificial Sequence
  Description of Artificial Sequence: Synthetic oligonucleotide
aacugcacaggucugccca

SEQ ID NO: 3190303 - RNA, 19 nt, Artificial Sequence
  Description of Artificial Sequence: Synthetic oligonucleotide
cuugcggugaaacgcaugc

SEQ ID NO: 3190304 - RNA, 19 nt, Artificial Sequence
  Description of Artificial Sequence: Synthetic oligonucleotide
augaaguagcagcagaaga

SEQ ID NO: 3190305 - RNA, 19 nt, Artificial Sequence
  Description of Artificial Sequence: Synthetic oligonucleotide
acaacgcacuucuagccac

SEQ ID NO: 3190306 - RNA, 19 nt, Artificial Sequence
  Description of Artificial Sequence: Synthetic oligonucleotide
uacugaugaaguagcagca

SEQ ID NO: 3190307 - RNA, 19 nt, Artificial Sequence
  Description of Artificial Sequence: Synthetic oligonucleotide
cacuucaccagacacuugc

SEQ ID NO: 3190308 - RNA, 19 nt, Artificial Sequence
  Description of Artificial Sequence: Synthetic oligonucleotide
auggaaguacaccuagcuc

SEQ ID NO: 3190309 - RNA, 19 nt, Artificial Sequence
  Description of Artificial Sequence: Synthetic oligonucleotide
cuugaagucuuccagacaa

SEQ ID NO: 3190310 - RNA, 19 nt, Artificial Sequence
  Description of Artificial Sequence: Synthetic oligonucleotide
ugcggugaaacgcaugcug

SEQ ID NO: 3190311 - RNA, 19 nt, Artificial Sequence
  Description of Artificial Sequence: Synthetic oligonucleotide
ugaugaaguagcagcagaa

SEQ ID NO: 3190312 - RNA, 19 nt, Artificial Sequence
  Description of Artificial Sequence: Synthetic oligonucleotide
uuuaagcaccaccuccuug

SEQ ID NO: 3190313 - RNA, 19 nt, Artificial Sequence
  Description of Artificial Sequence: Synthetic oligonucleotide
uagcagcagaagaugaggc

SEQ ID NO: 3190314 - RNA, 19 nt, Artificial Sequence
  Description of Artificial Sequence: Synthetic oligonucleotide
acaaacugcacaggucugc

SEQ ID NO: 3190315 - RNA, 19 nt, Artificial Sequence
  Description of Artificial Sequence: Synthetic oligonucleotide
gaugaaguagcagcagaag

SEQ ID NO: 3190316 - RNA, 19 nt, Artificial Sequence
  Description of Artificial Sequence: Synthetic oligonucleotide
gaaguagcagcagaagaug

SEQ ID NO: 3190317 - RNA, 19 nt, Artificial Sequence
  Description of Artificial Sequence: Synthetic oligonucleotide
uccccuugaagucuuccag

SEQ ID NO: 3190318 - RNA, 19 nt, Artificial Sequence
  Description of Artificial Sequence: Synthetic oligonucleotide
cacaggucugcccauagag

SEQ ID NO: 3190319 - RNA, 19 nt, Artificial Sequence
  Description of Artificial Sequence: Synthetic oligonucleotide
uucaccagacacuugcggu

SEQ ID NO: 3190320 - RNA, 19 nt, Artificial Sequence
  Description of Artificial Sequence: Synthetic oligonucleotide
uuccggaguuuacugauga

SEQ ID NO: 3190321 - RNA, 19 nt, Artificial Sequence
  Description of Artificial Sequence: Synthetic oligonucleotide
guagcagcagaagaugagg

SEQ ID NO: 3190322 - RNA, 19 nt, Artificial Sequence
  Description of Artificial Sequence: Synthetic oligonucleotide
agucuuccagacaaacugc

SEQ ID NO: 3190323 - RNA, 19 nt, Artificial Sequence
  Description of Artificial Sequence: Synthetic oligonucleotide
cuccuuguagccauaucgc

SEQ ID NO: 3190324 - RNA, 19 nt, Artificial Sequence
  Description of Artificial Sequence: Synthetic oligonucleotide
cuucuagccacuucaccag

SEQ ID NO: 3190325 - RNA, 19 nt, Artificial Sequence
  Description of Artificial Sequence: Synthetic oligonucleotide
ucaccagacacuugcggug

SEQ ID NO: 3190326 - RNA, 19 nt, Artificial Sequence
  Description of Artificial Sequence: Synthetic oligonucleotide
ccuccuuguagccauaucg

SEQ ID NO: 3190327 - RNA, 19 nt, Artificial Sequence
  Description of Artificial Sequence: Synthetic oligonucleotide
agacacuugcggugaaacg

SEQ ID NO: 3190328 - RNA, 19 nt, Artificial Sequence
  Description of Artificial Sequence: Synthetic oligonucleotide
cuucaccagacacuugcgg

SEQ ID NO: 3190329 - RNA, 19 nt, Artificial Sequence
  Description of Artificial Sequence: Synthetic oligonucleotide
cucaucuuuccccuugaag

SEQ ID NO: 3190330 - RNA, 19 nt, Artificial Sequence
  Description of Artificial Sequence: Synthetic oligonucleotide
ugaagucuuccagacaaac

SEQ ID NO: 3190331 - RNA, 19 nt, Artificial Sequence
  Description of Artificial Sequence: Synthetic oligonucleotide
uacaccuagcucaucuuuc

SEQ ID NO: 3190332 - RNA, 19 nt, Artificial Sequence
  Description of Artificial Sequence: Synthetic oligonucleotide
ugaaacgcaugcuggcaug

SEQ ID NO: 3190333 - RNA, 19 nt, Artificial Sequence
  Description of Artificial Sequence: Synthetic oligonucleotide
uagccacuucaccagacac

SEQ ID NO: 3190334 - RNA, 19 nt, Artificial Sequence
  Description of Artificial Sequence: Synthetic oligonucleotide
ugcccauagagcugcaacu

SEQ ID NO: 3190335 - RNA, 19 nt, Artificial Sequence
  Description of Artificial Sequence: Synthetic oligonucleotide
aacuucuuagcaucuccuu

SEQ ID NO: 3190336 - RNA, 19 nt, Artificial Sequence
  Description of Artificial Sequence: Synthetic oligonucleotide
ucuuagcaucuccuuuaag

SEQ ID NO: 3190337 - RNA, 19 nt, Artificial Sequence
  Description of Artificial Sequence: Synthetic oligonucleotide
gaaacgcaugcuggcaugg

SEQ ID NO: 3190338 - RNA, 19 nt, Artificial Sequence
  Description of Artificial Sequence: Synthetic oligonucleotide
cuuccagacaaacugcaca

SEQ ID NO: 3190339 - RNA, 19 nt, Artificial Sequence
  Description of Artificial Sequence: Synthetic oligonucleotide
caucuuuccccuugaaguc

SEQ ID NO: 3190340 - RNA, 19 nt, Artificial Sequence
  Description of Artificial Sequence: Synthetic oligonucleotide
uccuuguagccauaucgcu

SEQ ID NO: 3190341 - RNA, 19 nt, Artificial Sequence
  Description of Artificial Sequence: Synthetic oligonucleotide
uagcaucuccuuuaagcac

SEQ ID NO: 3190342 - RNA, 19 nt, Artificial Sequence
  Description of Artificial Sequence: Synthetic oligonucleotide
caugcuggcauggaaguac

SEQ ID NO: 3190343 - RNA, 19 nt, Artificial Sequence
  Description of Artificial Sequence: Synthetic oligonucleotide
acaggucugcccauagagc

SEQ ID NO: 3190344 - RNA, 19 nt, Artificial Sequence
  Description of Artificial Sequence: Synthetic oligonucleotide
aaguagcagcagaagauga

SEQ ID NO: 3190345 - RNA, 19 nt, Artificial Sequence
  Description of Artificial Sequence: Synthetic oligonucleotide
aagcaccaccuccuuguag

SEQ ID NO: 3190346 - RNA, 19 nt, Artificial Sequence
  Description of Artificial Sequence: Synthetic oligonucleotide
ucuuccagacaaacugcac

SEQ ID NO: 3190347 - RNA, 19 nt, Artificial Sequence
  Description of Artificial Sequence: Synthetic oligonucleotide
acuucuuagcaucuccuuu

SEQ ID NO: 3190348 - RNA, 19 nt, Artificial Sequence
  Description of Artificial Sequence: Synthetic oligonucleotide
uagcucaucuuuccccuug

SEQ ID NO: 3190349 - RNA, 19 nt, Artificial Sequence
  Description of Artificial Sequence: Synthetic oligonucleotide
cauaucgcucgcucugugc

SEQ ID NO: 3190350 - RNA, 19 nt, Artificial Sequence
  Description of Artificial Sequence: Synthetic oligonucleotide
ucuagccacuucaccagac

SEQ ID NO: 3190351 - RNA, 19 nt, Artificial Sequence
  Description of Artificial Sequence: Synthetic oligonucleotide
agccauaucgcucgcucug

SEQ ID NO: 3190352 - RNA, 19 nt, Artificial Sequence
  Description of Artificial Sequence: Synthetic oligonucleotide
aacgcaugcuggcauggaa

SEQ ID NO: 3190353 - RNA, 19 nt, Artificial Sequence
  Description of Artificial Sequence: Synthetic oligonucleotide
ugcacaggucugcccauag

SEQ ID NO: 3190354 - RNA, 19 nt, Artificial Sequence
  Description of Artificial Sequence: Synthetic oligonucleotide
agcagcagaagaugaggcu

SEQ ID NO: 3190355 - RNA, 19 nt, Artificial Sequence
  Description of Artificial Sequence: Synthetic oligonucleotide
acugaugaaguagcagcag

SEQ ID NO: 3190356 - RNA, 19 nt, Artificial Sequence
  Description of Artificial Sequence: Synthetic oligonucleotide
uucuuagcaucuccuuuaa

SEQ ID NO: 3190357 - RNA, 19 nt, Artificial Sequence
  Description of Artificial Sequence: Synthetic oligonucleotide
aguagcagcagaagaugag

SEQ ID NO: 3190358 - RNA, 19 nt, Artificial Sequence
  Description of Artificial Sequence: Synthetic oligonucleotide
uccagacaaacugcacagg

SEQ ID NO: 3190359 - RNA, 19 nt, Artificial Sequence
  Description of Artificial Sequence: Synthetic oligonucleotide
uggggcagacacaacgcac

SEQ ID NO: 3190360 - RNA, 19 nt, Artificial Sequence
  Description of Artificial Sequence: Synthetic oligonucleotide
cugguuccggaguuuacug

SEQ ID NO: 3190361 - RNA, 19 nt, Artificial Sequence
  Description of Artificial Sequence: Synthetic oligonucleotide
gcugcaacuucuuagcauc

SEQ ID NO: 3190362 - RNA, 19 nt, Artificial Sequence
  Description of Artificial Sequence: Synthetic oligonucleotide
ggcauggaaguacaccuag

SEQ ID NO: 3190363 - RNA, 19 nt, Artificial Sequence
  Description of Artificial Sequence: Synthetic oligonucleotide
uuccccuugaagucuucca

SEQ ID NO: 3190364 - RNA, 19 nt, Artificial Sequence
  Description of Artificial Sequence: Synthetic oligonucleotide
guagccauaucgcucgcuc

SEQ ID NO: 3190365 - RNA, 19 nt, Artificial Sequence
  Description of Artificial Sequence: Synthetic oligonucleotide
gcaacuucuuagcaucucc

SEQ ID NO: 3190366 - RNA, 19 nt, Artificial Sequence
  Description of Artificial Sequence: Synthetic oligonucleotide
cagacaaacugcacagguc

SEQ ID NO: 3190367 - RNA, 19 nt, Artificial Sequence
  Description of Artificial Sequence: Synthetic oligonucleotide
cacuucuagccacuucacc

SEQ ID NO: 3190368 - RNA, 19 nt, Artificial Sequence
  Description of Artificial Sequence: Synthetic oligonucleotide
uucuagccacuucaccaga

SEQ ID NO: 3190369 - RNA, 19 nt, Artificial Sequence
  Description of Artificial Sequence: Synthetic oligonucleotide
ugguuccggaguuuacuga

SEQ ID NO: 3190370 - RNA, 19 nt, Artificial Sequence
  Description of Artificial Sequence: Synthetic oligonucleotide
agcugcaacuucuuagcau

SEQ ID NO: 3190371 - RNA, 19 nt, Artificial Sequence
  Description of Artificial Sequence: Synthetic oligonucleotide
aagaguuucagcuucuguc

SEQ ID NO: 3190372 - RNA, 19 nt, Artificial Sequence
  Description of Artificial Sequence: Synthetic oligonucleotide
agaguuucagcuucugucc

SEQ ID NO: 3190373 - RNA, 19 nt, Artificial Sequence
  Description of Artificial Sequence: Synthetic oligonucleotide
auagaagaguuucagcuuc

SEQ ID NO: 3190374 - RNA, 19 nt, Artificial Sequence
  Description of Artificial Sequence: Synthetic oligonucleotide
uuguaaggcacuuccacag

SEQ ID NO: 3190375 - RNA, 19 nt, Artificial Sequence
  Description of Artificial Sequence: Synthetic oligonucleotide
uucuucauggcuguguccg

SEQ ID NO: 3190376 - RNA, 19 nt, Artificial Sequence
  Description of Artificial Sequence: Synthetic oligonucleotide
uuuguaaggcacuuccaca

SEQ ID NO: 3190377 - RNA, 19 nt, Artificial Sequence
  Description of Artificial Sequence: Synthetic oligonucleotide
gagcucaugccauagaaga

SEQ ID NO: 3190378 - RNA, 19 nt, Artificial Sequence
  Description of Artificial Sequence: Synthetic oligonucleotide
agcaugacgaagucugcac

SEQ ID NO: 3190379 - RNA, 19 nt, Artificial Sequence
  Description of Artificial Sequence: Synthetic oligonucleotide
cagucuugcccucagaggc

SEQ ID NO: 3190380 - RNA, 19 nt, Artificial Sequence
  Description of Artificial Sequence: Synthetic oligonucleotide
caugacgaagucugcaccg

SEQ ID NO: 3190381 - RNA, 19 nt, Artificial Sequence
  Description of Artificial Sequence: Synthetic oligonucleotide
acuuccacagucuugcccu

SEQ ID NO: 3190382 - RNA, 19 nt, Artificial Sequence
  Description of Artificial Sequence: Synthetic oligonucleotide
gaacaugccucccagcaug

SEQ ID NO: 3190383 - RNA, 19 nt, Artificial Sequence
  Description of Artificial Sequence: Synthetic oligonucleotide
cuuuguaaggcacuuccac

SEQ ID NO: 3190384 - RNA, 19 nt, Artificial Sequence
  Description of Artificial Sequence: Synthetic oligonucleotide
uguccguuccguucgauca

SEQ ID NO: 3190385 - RNA, 19 nt, Artificial Sequence
  Description of Artificial Sequence: Synthetic oligonucleotide
uucagcuucuguccguucc

SEQ ID NO: 3190386 - RNA, 19 nt, Artificial Sequence
  Description of Artificial Sequence: Synthetic oligonucleotide
guuccguucgaucaccucc

SEQ ID NO: 3190387 - RNA, 19 nt, Artificial Sequence
  Description of Artificial Sequence: Synthetic oligonucleotide
ucagcuucuguccguuccg

SEQ ID NO: 3190388 - RNA, 19 nt, Artificial Sequence
  Description of Artificial Sequence: Synthetic oligonucleotide
caugccauagaagaguuuc

SEQ ID NO: 3190389 - RNA, 19 nt, Artificial Sequence
  Description of Artificial Sequence: Synthetic oligonucleotide
gaguuucagcuucuguccg

SEQ ID NO: 3190390 - RNA, 19 nt, Artificial Sequence
  Description of Artificial Sequence: Synthetic oligonucleotide
acagucuugcccucagagg

SEQ ID NO: 3190391 - RNA, 19 nt, Artificial Sequence
  Description of Artificial Sequence: Synthetic oligonucleotide
ucaguguggccugagaaca

SEQ ID NO: 3190392 - RNA, 19 nt, Artificial Sequence
  Description of Artificial Sequence: Synthetic oligonucleotide
gaguguuucuucauggcug

SEQ ID NO: 3190393 - RNA, 19 nt, Artificial Sequence
  Description of Artificial Sequence: Synthetic oligonucleotide
gagaacaugccucccagca

SEQ ID NO: 3190394 - RNA, 19 nt, Artificial Sequence
  Description of Artificial Sequence: Synthetic oligonucleotide
ucagaggcccuguacucgg

SEQ ID NO: 3190395 - RNA, 19 nt, Artificial Sequence
  Description of Artificial Sequence: Synthetic oligonucleotide
uacucggcgacuccucccg

SEQ ID NO: 3190396 - RNA, 19 nt, Artificial Sequence
  Description of Artificial Sequence: Synthetic oligonucleotide
cuucuguccguuccguucg

SEQ ID NO: 3190397 - RNA, 19 nt, Artificial Sequence
  Description of Artificial Sequence: Synthetic oligonucleotide
cacagucuugcccucagag

SEQ ID NO: 3190398 - RNA, 19 nt, Artificial Sequence
  Description of Artificial Sequence: Synthetic oligonucleotide
ugccauagaagaguuucag

SEQ ID NO: 3190399 - RNA, 19 nt, Artificial Sequence
  Description of Artificial Sequence: Synthetic oligonucleotide
uuccguucgaucaccuccc

SEQ ID NO: 3190400 - RNA, 19 nt, Artificial Sequence
  Description of Artificial Sequence: Synthetic oligonucleotide
aguguuucuucauggcugu

SEQ ID NO: 3190401 - RNA, 19 nt, Artificial Sequence
  Description of Artificial Sequence: Synthetic oligonucleotide
uaaggcacuuccacagucu

SEQ ID NO: 3190402 - RNA, 19 nt, Artificial Sequence
  Description of Artificial Sequence: Synthetic oligonucleotide
uguguccgagcucaugcca

SEQ ID NO: 3190403 - RNA, 19 nt, Artificial Sequence
  Description of Artificial Sequence: Synthetic oligonucleotide
caugccucccagcaugacg

SEQ ID NO: 3190404 - RNA, 19 nt, Artificial Sequence
  Description of Artificial Sequence: Synthetic oligonucleotide
uggccugagaacaugccuc

SEQ ID NO: 3190405 - RNA, 19 nt, Artificial Sequence
  Description of Artificial Sequence: Synthetic oligonucleotide
uguacucggcgacuccucc

SEQ ID NO: 3190406 - RNA, 19 nt, Artificial Sequence
  Description of Artificial Sequence: Synthetic oligonucleotide
ugcacacucaguguggccu

SEQ ID NO: 3190407 - RNA, 19 nt, Artificial Sequence
  Description of Artificial Sequence: Synthetic oligonucleotide
acgaagucugcaccggcuc

SEQ ID NO: 3190408 - RNA, 19 nt, Artificial Sequence
  Description of Artificial Sequence: Synthetic oligonucleotide
uguuucuucauggcugugu

SEQ ID NO: 3190409 - RNA, 19 nt, Artificial Sequence
  Description of Artificial Sequence: Synthetic oligonucleotide
cucaguguggccugagaac

SEQ ID NO: 3190410 - RNA, 19 nt, Artificial Sequence
  Description of Artificial Sequence: Synthetic oligonucleotide
uguggccugagaacaugcc

SEQ ID NO: 3190411 - RNA, 19 nt, Artificial Sequence
  Description of Artificial Sequence: Synthetic oligonucleotide
uuucuucauggcugugucc

SEQ ID NO: 3190412 - RNA, 19 nt, Artificial Sequence
  Description of Artificial Sequence: Synthetic oligonucleotide
cugagaacaugccucccag

SEQ ID NO: 3190413 - RNA, 19 nt, Artificial Sequence
  Description of Artificial Sequence: Synthetic oligonucleotide
uguaaggcacuuccacagu

SEQ ID NO: 3190414 - RNA, 19 nt, Artificial Sequence
  Description of Artificial Sequence: Synthetic oligonucleotide
acucaguguggccugagaa

SEQ ID NO: 3190415 - RNA, 19 nt, Artificial Sequence
  Description of Artificial Sequence: Synthetic oligonucleotide
guuucuucauggcuguguc

SEQ ID NO: 3190416 - RNA, 19 nt, Artificial Sequence
  Description of Artificial Sequence: Synthetic oligonucleotide
ucauggcuguguccgagcu

SEQ ID NO: 3190417 - RNA, 19 nt, Artificial Sequence
  Description of Artificial Sequence: Synthetic oligonucleotide
uagaagaguuucagcuucu

SEQ ID NO: 3190418 - RNA, 19 nt, Artificial Sequence
  Description of Artificial Sequence: Synthetic oligonucleotide
cuccccugcacacucagug

SEQ ID NO: 3190419 - RNA, 19 nt, Artificial Sequence
  Description of Artificial Sequence: Synthetic oligonucleotide
ugacgaagucugcaccggc

SEQ ID NO: 3190420 - RNA, 19 nt, Artificial Sequence
  Description of Artificial Sequence: Synthetic oligonucleotide
guaaggcacuuccacaguc

SEQ ID NO: 3190421 - RNA, 19 nt, Artificial Sequence
  Description of Artificial Sequence: Synthetic oligonucleotide
auggcuguguccgagcuca

SEQ ID NO: 3190422 - RNA, 19 nt, Artificial Sequence
  Description of Artificial Sequence: Synthetic oligonucleotide
uccacagucuugcccucag

SEQ ID NO: 3190423 - RNA, 19 nt, Artificial Sequence
  Description of Artificial Sequence: Synthetic oligonucleotide
ugagaacaugccucccagc

SEQ ID NO: 3190424 - RNA, 19 nt, Artificial Sequence
  Description of Artificial Sequence: Synthetic oligonucleotide
ucccgaguguuucuucaug

SEQ ID NO: 3190425 - RNA, 19 nt, Artificial Sequence
  Description of Artificial Sequence: Synthetic oligonucleotide
cacuuccacagucuugccc

SEQ ID NO: 3190426 - RNA, 19 nt, Artificial Sequence
  Description of Artificial Sequence: Synthetic oligonucleotide
ucgaucaccuccccugcac

SEQ ID NO: 3190427 - RNA, 19 nt, Artificial Sequence
  Description of Artificial Sequence: Synthetic oligonucleotide
cccagcaugacgaagucug

SEQ ID NO: 3190428 - RNA, 19 nt, Artificial Sequence
  Description of Artificial Sequence: Synthetic oligonucleotide
aaggcacuuccacagucuu

SEQ ID NO: 3190429 - RNA, 19 nt, Artificial Sequence
  Description of Artificial Sequence: Synthetic oligonucleotide
agaggcccuguacucggcg

SEQ ID NO: 3190430 - RNA, 19 nt, Artificial Sequence
  Description of Artificial Sequence: Synthetic oligonucleotide
ggcacuuccacagucuugc

SEQ ID NO: 3190431 - RNA, 19 nt, Artificial Sequence
  Description of Artificial Sequence: Synthetic oligonucleotide
gcuguguccgagcucaugc

SEQ ID NO: 3190432 - RNA, 19 nt, Artificial Sequence
  Description of Artificial Sequence: Synthetic oligonucleotide
uucauggcuguguccgagc

SEQ ID NO: 3190433 - RNA, 19 nt, Artificial Sequence
  Description of Artificial Sequence: Synthetic oligonucleotide
agucuugcccucagaggcc

SEQ ID NO: 3190434 - RNA, 19 nt, Artificial Sequence
  Description of Artificial Sequence: Synthetic oligonucleotide
cccuuuguaaggcacuucc

SEQ ID NO: 3190435 - RNA, 19 nt, Artificial Sequence
  Description of Artificial Sequence: Synthetic oligonucleotide
aguuucagcuucuguccgu

SEQ ID NO: 3190436 - RNA, 19 nt, Artificial Sequence
  Description of Artificial Sequence: Synthetic oligonucleotide
cucagaggcccuguacucg

SEQ ID NO: 3190437 - RNA, 19 nt, Artificial Sequence
  Description of Artificial Sequence: Synthetic oligonucleotide
augacgaagucugcaccgg

SEQ ID NO: 3190438 - RNA, 19 nt, Artificial Sequence
  Description of Artificial Sequence: Synthetic oligonucleotide
gaucaccuccccugcacac

SEQ ID NO: 3190439 - RNA, 19 nt, Artificial Sequence
  Description of Artificial Sequence: Synthetic oligonucleotide
aggcccuguacucggcgac

SEQ ID NO: 3190440 - RNA, 19 nt, Artificial Sequence
  Description of Artificial Sequence: Synthetic oligonucleotide
cuguguccgagcucaugcc

SEQ ID NO: 3190441 - RNA, 19 nt, Artificial Sequence
  Description of Artificial Sequence: Synthetic oligonucleotide
guucgaucaccuccccugc

SEQ ID NO: 3190442 - RNA, 19 nt, Artificial Sequence
  Description of Artificial Sequence: Synthetic oligonucleotide
agaacaugccucccagcau

SEQ ID NO: 3190443 - RNA, 19 nt, Artificial Sequence
  Description of Artificial Sequence: Synthetic oligonucleotide
ucaccuccccugcacacuc

SEQ ID NO: 3190444 - RNA, 19 nt, Artificial Sequence
  Description of Artificial Sequence: Synthetic oligonucleotide
augccucccagcaugacga

SEQ ID NO: 3190445 - RNA, 19 nt, Artificial Sequence
  Description of Artificial Sequence: Synthetic oligonucleotide
ccauagaagaguuucagcu

SEQ ID NO: 3190446 - RNA, 19 nt, Artificial Sequence
  Description of Artificial Sequence: Synthetic oligonucleotide
cccgaguguuucuucaugg

SEQ ID NO: 3190447 - RNA, 19 nt, Artificial Sequence
  Description of Artificial Sequence: Synthetic oligonucleotide
gccauagaagaguuucagc

SEQ ID NO: 3190448 - RNA, 19 nt, Artificial Sequence
  Description of Artificial Sequence: Synthetic oligonucleotide
uucgaucaccuccccugca

SEQ ID NO: 3190449 - RNA, 19 nt, Artificial Sequence
  Description of Artificial Sequence: Synthetic oligonucleotide
agcucaugccauagaagag

SEQ ID NO: 3190450 - RNA, 19 nt, Artificial Sequence
  Description of Artificial Sequence: Synthetic oligonucleotide
gaagaguuucagcuucugu

SEQ ID NO: 3190451 - RNA, 19 nt, Artificial Sequence
  Description of Artificial Sequence: Synthetic oligonucleotide
cuucauggcuguguccgag

SEQ ID NO: 3190452 - RNA, 19 nt, Artificial Sequence
  Description of Artificial Sequence: Synthetic oligonucleotide
gcaugacgaagucugcacc

SEQ ID NO: 3190453 - RNA, 19 nt, Artificial Sequence
  Description of Artificial Sequence: Synthetic oligonucleotide
ucuucauggcuguguccga

SEQ ID NO: 3190454 - RNA, 19 nt, Artificial Sequence
  Description of Artificial Sequence: Synthetic oligonucleotide
agaagaguuucagcuucug

SEQ ID NO: 3190455 - RNA, 19 nt, Artificial Sequence
  Description of Artificial Sequence: Synthetic oligonucleotide
uccgagcucaugccauaga

SEQ ID NO: 3190456 - RNA, 19 nt, Artificial Sequence
  Description of Artificial Sequence: Synthetic oligonucleotide
aguguggccugagaacaug

SEQ ID NO: 3190457 - RNA, 19 nt, Artificial Sequence
  Description of Artificial Sequence: Synthetic oligonucleotide
uccguuccguucgaucacc

SEQ ID NO: 3190458 - RNA, 19 nt, Artificial Sequence
  Description of Artificial Sequence: Synthetic oligonucleotide
uccccugcacacucagugu

SEQ ID NO: 3190459 - RNA, 19 nt, Artificial Sequence
  Description of Artificial Sequence: Synthetic oligonucleotide
guacucggcgacuccuccc

SEQ ID NO: 3190460 - RNA, 19 nt, Artificial Sequence
  Description of Artificial Sequence: Synthetic oligonucleotide
aacaugccucccagcauga

SEQ ID NO: 3190461 - RNA, 19 nt, Artificial Sequence
  Description of Artificial Sequence: Synthetic oligonucleotide
accuccccugcacacucag

SEQ ID NO: 3190462 - RNA, 19 nt, Artificial Sequence
  Description of Artificial Sequence: Synthetic oligonucleotide
ucggcgacuccucccgagu

SEQ ID NO: 3190463 - RNA, 19 nt, Artificial Sequence
  Description of Artificial Sequence: Synthetic oligonucleotide
gacuccucccgaguguuuc

SEQ ID NO: 3190464 - RNA, 19 nt, Artificial Sequence
  Description of Artificial Sequence: Synthetic oligonucleotide
ucaugccauagaagaguuu

SEQ ID NO: 3190465 - RNA, 19 nt, Artificial Sequence
  Description of Artificial Sequence: Synthetic oligonucleotide
cuguccguuccguucgauc

SEQ ID NO: 3190466 - RNA, 19 nt, Artificial Sequence
  Description of Artificial Sequence: Synthetic oligonucleotide
uccguucgaucaccucccc

SEQ ID NO: 3190467 - RNA, 19 nt, Artificial Sequence
  Description of Artificial Sequence: Synthetic oligonucleotide
ggccugagaacaugccucc

SEQ ID NO: 3190468 - RNA, 19 nt, Artificial Sequence
  Description of Artificial Sequence: Synthetic oligonucleotide
cguucgaucaccuccccug

SEQ ID NO: 3190469 - RNA, 19 nt, Artificial Sequence
  Description of Artificial Sequence: Synthetic oligonucleotide
guguggccugagaacaugc

SEQ ID NO: 3190470 - RNA, 19 nt, Artificial Sequence
  Description of Artificial Sequence: Synthetic oligonucleotide
gcuucuguccguuccguuc

SEQ ID NO: 3190471 - RNA, 19 nt, Artificial Sequence
  Description of Artificial Sequence: Synthetic oligonucleotide
agcacuugcagucugagac

SEQ ID NO: 3190472 - RNA, 19 nt, Artificial Sequence
  Description of Artificial Sequence: Synthetic oligonucleotide
ugguauaagagccaucacc

SEQ ID NO: 3190473 - RNA, 19 nt, Artificial Sequence
  Description of Artificial Sequence: Synthetic oligonucleotide
cacaguacaacucauugcc

SEQ ID NO: 3190474 - RNA, 19 nt, Artificial Sequence
  Description of Artificial Sequence: Synthetic oligonucleotide
ucugcucucagucugguca

SEQ ID NO: 3190475 - RNA, 19 nt, Artificial Sequence
  Description of Artificial Sequence: Synthetic oligonucleotide
ucugagacuagucccaacc

SEQ ID NO: 3190476 - RNA, 19 nt, Artificial Sequence
  Description of Artificial Sequence: Synthetic oligonucleotide
agcaccuagaggcucaggc

SEQ ID NO: 3190477 - RNA, 19 nt, Artificial Sequence
  Description of Artificial Sequence: Synthetic oligonucleotide
aacucagcgagcugggcac

SEQ ID NO: 3190478 - RNA, 19 nt, Artificial Sequence
  Description of Artificial Sequence: Synthetic oligonucleotide
agaacugagagugccaggc

SEQ ID NO: 3190479 - RNA, 19 nt, Artificial Sequence
  Description of Artificial Sequence: Synthetic oligonucleotide
cuuggcuucacccagcgag

SEQ ID NO: 3190480 - RNA, 19 nt, Artificial Sequence
  Description of Artificial Sequence: Synthetic oligonucleotide
uguagcggcacccucacug

SEQ ID NO: 3190481 - RNA, 19 nt, Artificial Sequence
  Description of Artificial Sequence: Synthetic oligonucleotide
aauguagcggcacccucac

SEQ ID NO: 3190482 - RNA, 19 nt, Artificial Sequence
  Description of Artificial Sequence: Synthetic oligonucleotide
aaaggagcuggacugccuc

SEQ ID NO: 3190483 - RNA, 19 nt, Artificial Sequence
  Description of Artificial Sequence: Synthetic oligonucleotide
agcaaagacaggcugagca

SEQ ID NO: 3190484 - RNA, 19 nt, Artificial Sequence
  Description of Artificial Sequence: Synthetic oligonucleotide
agguccaagccgcugaacc

SEQ ID NO: 3190485 - RNA, 19 nt, Artificial Sequence
  Description of Artificial Sequence: Synthetic oligonucleotide
ucugcagaggcugagagca

SEQ ID NO: 3190486 - RNA, 19 nt, Artificial Sequence
  Description of Artificial Sequence: Synthetic oligonucleotide
aucaccugccaucaccucc

SEQ ID NO: 3190487 - RNA, 19 nt, Artificial Sequence
  Description of Artificial Sequence: Synthetic oligonucleotide
cuucucacagguauggagc

SEQ ID NO: 3190488 - RNA, 19 nt, Artificial Sequence
  Description of Artificial Sequence: Synthetic oligonucleotide
acaaaggccagagagagug

SEQ ID NO: 3190489 - RNA, 19 nt, Artificial Sequence
  Description of Artificial Sequence: Synthetic oligonucleotide
ugcaagagccgaaaggagc

SEQ ID NO: 3190490 - RNA, 19 nt, Artificial Sequence
  Description of Artificial Sequence: Synthetic oligonucleotide
aggugugccaccucuuucc

SEQ ID NO: 3190491 - RNA, 19 nt, Artificial Sequence
  Description of Artificial Sequence: Synthetic oligonucleotide
ugcagucugagacuagucc

SEQ ID NO: 3190492 - RNA, 19 nt, Artificial Sequence
  Description of Artificial Sequence: Synthetic oligonucleotide
uccugcaagagccgaaagg

SEQ ID NO: 3190493 - RNA, 19 nt, Artificial Sequence
  Description of Artificial Sequence: Synthetic oligonucleotide
agagaguggaacugucccc

SEQ ID NO: 3190494 - RNA, 19 nt, Artificial Sequence
  Description of Artificial Sequence: Synthetic oligonucleotide
agagccaucaccugccauc

SEQ ID NO: 3190495 - RNA, 19 nt, Artificial Sequence
  Description of Artificial Sequence: Synthetic oligonucleotide
cauugaguagcgcuggcgg

SEQ ID NO: 3190496 - RNA, 19 nt, Artificial Sequence
  Description of Artificial Sequence: Synthetic oligonucleotide
gaagugaccacgcaucuuc

SEQ ID NO: 3190497 - RNA, 19 nt, Artificial Sequence
  Description of Artificial Sequence: Synthetic oligonucleotide
acuagucccaacccuuggc

SEQ ID NO: 3190498 - RNA, 19 nt, Artificial Sequence
  Description of Artificial Sequence: Synthetic oligonucleotide
aguacaacucauugcccac

SEQ ID NO: 3190499 - RNA, 19 nt, Artificial Sequence
  Description of Artificial Sequence: Synthetic oligonucleotide
aacuguccccagcacuugc

SEQ ID NO: 3190500 - RNA, 19 nt, Artificial Sequence
  Description of Artificial Sequence: Synthetic oligonucleotide
cucacaguacaacucauug

SEQ ID NO: 3190501 - RNA, 19 nt, Artificial Sequence
  Description of Artificial Sequence: Synthetic oligonucleotide
agguauggagcuugggugg

SEQ ID NO: 3190502 - RNA, 19 nt, Artificial Sequence
  Description of Artificial Sequence: Synthetic oligonucleotide
gaugcggacagccugguuc

SEQ ID NO: 3190503 - RNA, 19 nt, Artificial Sequence
  Description of Artificial Sequence: Synthetic oligonucleotide
ucacaguacaacucauugc

SEQ ID NO: 3190504 - RNA, 19 nt, Artificial Sequence
  Description of Artificial Sequence: Synthetic oligonucleotide
gagagugccaggcauugag

SEQ ID NO: 3190505 - RNA, 19 nt, Artificial Sequence
  Description of Artificial Sequence: Synthetic oligonucleotide
ugucugcagaggcugagag

SEQ ID NO: 3190506 - RNA, 19 nt, Artificial Sequence
  Description of Artificial Sequence: Synthetic oligonucleotide
uuaguugguauaagagcca

SEQ ID NO: 3190507 - RNA, 19 nt, Artificial Sequence
  Description of Artificial Sequence: Synthetic oligonucleotide
ucucagucuggucaugucu

SEQ ID NO: 3190508 - RNA, 19 nt, Artificial Sequence
  Description of Artificial Sequence: Synthetic oligonucleotide
acaccucugagucuucuuc

SEQ ID NO: 3190509 - RNA, 19 nt, Artificial Sequence
  Description of Artificial Sequence: Synthetic oligonucleotide
guugguauaagagccauca

SEQ ID NO: 3190510 - RNA, 19 nt, Artificial Sequence
  Description of Artificial Sequence: Synthetic oligonucleotide
ugagacuagucccaacccu

SEQ ID NO: 3190511 - RNA, 19 nt, Artificial Sequence
  Description of Artificial Sequence: Synthetic oligonucleotide
ugaaccuggggcuggagga

SEQ ID NO: 3190512 - RNA, 19 nt, Artificial Sequence
  Description of Artificial Sequence: Synthetic oligonucleotide
acagguauggagcuugggu

SEQ ID NO: 3190513 - RNA, 19 nt, Artificial Sequence
  Description of Artificial Sequence: Synthetic oligonucleotide
cagguauggagcuugggug

SEQ ID NO: 3190514 - RNA, 19 nt, Artificial Sequence
  Description of Artificial Sequence: Synthetic oligonucleotide
auugaguagcgcuggcggg

SEQ ID NO: 3190515 - RNA, 19 nt, Artificial Sequence
  Description of Artificial Sequence: Synthetic oligonucleotide
aggacaaaggggccuuccc

SEQ ID NO: 3190516 - RNA, 19 nt, Artificial Sequence
  Description of Artificial Sequence: Synthetic oligonucleotide
uacaacucauugcccaccc

SEQ ID NO: 3190517 - RNA, 19 nt, Artificial Sequence
  Description of Artificial Sequence: Synthetic oligonucleotide
acaaaggcaggugugccac

SEQ ID NO: 3190518 - RNA, 19 nt, Artificial Sequence
  Description of Artificial Sequence: Synthetic oligonucleotide
cagacugcagugcaguacc

SEQ ID NO: 3190519 - RNA, 19 nt, Artificial Sequence
  Description of Artificial Sequence: Synthetic oligonucleotide
aaggagcuggacugccucg

SEQ ID NO: 3190520 - RNA, 19 nt, Artificial Sequence
  Description of Artificial Sequence: Synthetic oligonucleotide
aguggaacuguccccagca

SEQ ID NO: 3190521 - RNA, 19 nt, Artificial Sequence
  Description of Artificial Sequence: Synthetic oligonucleotide
aagagccgaaaggagcugg

SEQ ID NO: 3190522 - RNA, 19 nt, Artificial Sequence
  Description of Artificial Sequence: Synthetic oligonucleotide
uuggcuucacccagcgagg

SEQ ID NO: 3190523 - RNA, 19 nt, Artificial Sequence
  Description of Artificial Sequence: Synthetic oligonucleotide
ucagcccacagucugcaca

SEQ ID NO: 3190524 - RNA, 19 nt, Artificial Sequence
  Description of Artificial Sequence: Synthetic oligonucleotide
agucccaacccuuggcuuc

SEQ ID NO: 3190525 - RNA, 19 nt, Artificial Sequence
  Description of Artificial Sequence: Synthetic oligonucleotide
accuuaguugguauaagag

SEQ ID NO: 3190526 - RNA, 19 nt, Artificial Sequence
  Description of Artificial Sequence: Synthetic oligonucleotide
ccuuaguugguauaagagc

SEQ ID NO: 3190527 - RNA, 19 nt, Artificial Sequence
  Description of Artificial Sequence: Synthetic oligonucleotide
acagguguagcagccaggg

SEQ ID NO: 3190528 - RNA, 19 nt, Artificial Sequence
  Description of Artificial Sequence: Synthetic oligonucleotide
gugaccacgcaucuucagg

SEQ ID NO: 3190529 - RNA, 19 nt, Artificial Sequence
  Description of Artificial Sequence: Synthetic oligonucleotide
aaaggggccuucccaaccu

SEQ ID NO: 3190530 - RNA, 19 nt, Artificial Sequence
  Description of Artificial Sequence: Synthetic oligonucleotide
ugguucgagauguuggcac

SEQ ID NO: 3190531 - RNA, 19 nt, Artificial Sequence
  Description of Artificial Sequence: Synthetic oligonucleotide
caccuagaggcucaggccc

SEQ ID NO: 3190532 - RNA, 19 nt, Artificial Sequence
  Description of Artificial Sequence: Synthetic oligonucleotide
ucuggucaugucugcagag

SEQ ID NO: 3190533 - RNA, 19 nt, Artificial Sequence
  Description of Artificial Sequence: Synthetic oligonucleotide
cucagucuggucaugucug

SEQ ID NO: 3190534 - RNA, 19 nt, Artificial Sequence
  Description of Artificial Sequence: Synthetic oligonucleotide
uccuggggaauguagcggc

SEQ ID NO: 3190535 - RNA, 19 nt, Artificial Sequence
  Description of Artificial Sequence: Synthetic oligonucleotide
aggcugagagcaaagacag

SEQ ID NO: 3190536 - RNA, 19 nt, Artificial Sequence
  Description of Artificial Sequence: Synthetic oligonucleotide
agucuggucaugucugcag

SEQ ID NO: 3190537 - RNA, 19 nt, Artificial Sequence
  Description of Artificial Sequence: Synthetic oligonucleotide
uuccucagccuccagggcu

SEQ ID NO: 3190538 - RNA, 19 nt, Artificial Sequence
  Description of Artificial Sequence: Synthetic oligonucleotide
ugcaggacaaaggccagag

SEQ ID NO: 3190539 - RNA, 19 nt, Artificial Sequence
  Description of Artificial Sequence: Synthetic oligonucleotide
uggaacuguccccagcacu

SEQ ID NO: 3190540 - RNA, 19 nt, Artificial Sequence
  Description of Artificial Sequence: Synthetic oligonucleotide
acaaaggggccuucccaac

SEQ ID NO: 3190541 - RNA, 19 nt, Artificial Sequence
  Description of Artificial Sequence: Synthetic oligonucleotide
ccagcgaggacaaaggggc

SEQ ID NO: 3190542 - RNA, 19 nt, Artificial Sequence
  Description of Artificial Sequence: Synthetic oligonucleotide
agugccaggcauugaguag

SEQ ID NO: 3190543 - RNA, 19 nt, Artificial Sequence
  Description of Artificial Sequence: Synthetic oligonucleotide
ucccugacgguucuccugc

SEQ ID NO: 3190544 - RNA, 19 nt, Artificial Sequence
  Description of Artificial Sequence: Synthetic oligonucleotide
ucacccagcgaggacaaag

SEQ ID NO: 3190545 - RNA, 19 nt, Artificial Sequence
  Description of Artificial Sequence: Synthetic oligonucleotide
acaggcugagcaccuagag

SEQ ID NO: 3190546 - RNA, 19 nt, Artificial Sequence
  Description of Artificial Sequence: Synthetic oligonucleotide
uuccugucugcucucaguc

SEQ ID NO: 3190547 - RNA, 19 nt, Artificial Sequence
  Description of Artificial Sequence: Synthetic oligonucleotide
uucucacagguauggagcu

SEQ ID NO: 3190548 - RNA, 19 nt, Artificial Sequence
  Description of Artificial Sequence: Synthetic oligonucleotide
gcugagagcaaagacaggc

SEQ ID NO: 3190549 - RNA, 19 nt, Artificial Sequence
  Description of Artificial Sequence: Synthetic oligonucleotide
acaguacaacucauugccc

SEQ ID NO: 3190550 - RNA, 19 nt, Artificial Sequence
  Description of Artificial Sequence: Synthetic oligonucleotide
gacuagucccaacccuugg

SEQ ID NO: 3190551 - RNA, 19 nt, Artificial Sequence
  Description of Artificial Sequence: Synthetic oligonucleotide
gagaacugagagugccagg

SEQ ID NO: 3190552 - RNA, 19 nt, Artificial Sequence
  Description of Artificial Sequence: Synthetic oligonucleotide
agguucagcccacagucug

SEQ ID NO: 3190553 - RNA, 19 nt, Artificial Sequence
  Description of Artificial Sequence: Synthetic oligonucleotide
acccucacugugaaguugc

SEQ ID NO: 3190554 - RNA, 19 nt, Artificial Sequence
  Description of Artificial Sequence: Synthetic oligonucleotide
ugacgguucuccugcagca

SEQ ID NO: 3190555 - RNA, 19 nt, Artificial Sequence
  Description of Artificial Sequence: Synthetic oligonucleotide
cugagacuagucccaaccc

SEQ ID NO: 3190556 - RNA, 19 nt, Artificial Sequence
  Description of Artificial Sequence: Synthetic oligonucleotide
ucaccugccaucaccuccu

SEQ ID NO: 3190557 - RNA, 19 nt, Artificial Sequence
  Description of Artificial Sequence: Synthetic oligonucleotide
uccaagccgcugaaccugg

SEQ ID NO: 3190558 - RNA, 19 nt, Artificial Sequence
  Description of Artificial Sequence: Synthetic oligonucleotide
cuggccugcaggacaaagg

SEQ ID NO: 3190559 - RNA, 19 nt, Artificial Sequence
  Description of Artificial Sequence: Synthetic oligonucleotide
ggacaaaggccagagagag

SEQ ID NO: 3190560 - RNA, 19 nt, Artificial Sequence
  Description of Artificial Sequence: Synthetic oligonucleotide
gaacucagcgagcugggca

SEQ ID NO: 3190561 - RNA, 19 nt, Artificial Sequence
  Description of Artificial Sequence: Synthetic oligonucleotide
uugaacaccucugagucuu

SEQ ID NO: 3190562 - RNA, 19 nt, Artificial Sequence
  Description of Artificial Sequence: Synthetic oligonucleotide
acagccugguucgagaugu

SEQ ID NO: 3190563 - RNA, 19 nt, Artificial Sequence
  Description of Artificial Sequence: Synthetic oligonucleotide
aggccagagagaguggaac

SEQ ID NO: 3190564 - RNA, 19 nt, Artificial Sequence
  Description of Artificial Sequence: Synthetic oligonucleotide
augcuucucacaguacaac

SEQ ID NO: 3190565 - RNA, 19 nt, Artificial Sequence
  Description of Artificial Sequence: Synthetic oligonucleotide
gagauguuggcacugcacu

SEQ ID NO: 3190566 - RNA, 19 nt, Artificial Sequence
  Description of Artificial Sequence: Synthetic oligonucleotide
caggcauugaguagcgcug

SEQ ID NO: 3190567 - RNA, 19 nt, Artificial Sequence
  Description of Artificial Sequence: Synthetic oligonucleotide
gcagucugagacuaguccc

SEQ ID NO: 3190568 - RNA, 19 nt, Artificial Sequence
  Description of Artificial Sequence: Synthetic oligonucleotide
cugaaccuggggcuggagg

SEQ ID NO: 3190569 - RNA, 19 nt, Artificial Sequence
  Description of Artificial Sequence: Synthetic oligonucleotide
cuggaugcggacagccugg

SEQ ID NO: 3190570 - RNA, 19 nt, Artificial Sequence
  Description of Artificial Sequence: Synthetic oligonucleotide
uugcccacccagaagugac

SEQ ID NO: 3190571 - RNA, 19 nt, Artificial Sequence
  Description of Artificial Sequence: Synthetic oligonucleotide
aauaagaacuuguagaaug

SEQ ID NO: 3190572 - RNA, 19 nt, Artificial Sequence
  Description of Artificial Sequence: Synthetic oligonucleotide
uuucaaaauacuuaaauug

SEQ ID NO: 3190573 - RNA, 19 nt, Artificial Sequence
  Description of Artificial Sequence: Synthetic oligonucleotide
aaauggaaagcauuugccc

SEQ ID NO: 3190574 - RNA, 19 nt, Artificial Sequence
  Description of Artificial Sequence: Synthetic oligonucleotide
agcaucauaacacaaacac

SEQ ID NO: 3190575 - RNA, 19 nt, Artificial Sequence
  Description of Artificial Sequence: Synthetic oligonucleotide
aaacucaaaacuuaaguug

SEQ ID NO: 3190576 - RNA, 19 nt, Artificial Sequence
  Description of Artificial Sequence: Synthetic oligonucleotide
uugaacaagaguauuagag

SEQ ID NO: 3190577 - RNA, 19 nt, Artificial Sequence
  Description of Artificial Sequence: Synthetic oligonucleotide
uaaaugaacauuaaauuac

SEQ ID NO: 3190578 - RNA, 19 nt, Artificial Sequence
  Description of Artificial Sequence: Synthetic oligonucleotide
aaagagaaguuacuauuac

SEQ ID NO: 3190579 - RNA, 19 nt, Artificial Sequence
  Description of Artificial Sequence: Synthetic oligonucleotide
uugaguuuuauccuaaaca

SEQ ID NO: 3190580 - RNA, 19 nt, Artificial Sequence
  Description of Artificial Sequence: Synthetic oligonucleotide
uuaaauggaaagcauuugc

SEQ ID NO: 3190581 - RNA, 19 nt, Artificial Sequence
  Description of Artificial Sequence: Synthetic oligonucleotide
aauugagugauuuuaguaa

SEQ ID NO: 3190582 - RNA, 19 nt, Artificial Sequence
  Description of Artificial Sequence: Synthetic oligonucleotide
aaguaauauaaacuccuuc

SEQ ID NO: 3190583 - RNA, 19 nt, Artificial Sequence
  Description of Artificial Sequence: Synthetic oligonucleotide
ugaacauuaaauuacucaa

SEQ ID NO: 3190584 - RNA, 19 nt, Artificial Sequence
  Description of Artificial Sequence: Synthetic oligonucleotide
uugagaaaauuuuagaaaa

SEQ ID NO: 3190585 - RNA, 19 nt, Artificial Sequence
  Description of Artificial Sequence: Synthetic oligonucleotide
uggacuuaaaguaaaggug

SEQ ID NO: 3190586 - RNA, 19 nt, Artificial Sequence
  Description of Artificial Sequence: Synthetic oligonucleotide
uaauuacuaauucaaauua

SEQ ID NO: 3190587 - RNA, 19 nt, Artificial Sequence
  Description of Artificial Sequence: Synthetic oligonucleotide
agagaaguuacuauuacac

SEQ ID NO: 3190588 - RNA, 19 nt, Artificial Sequence
  Description of Artificial Sequence: Synthetic oligonucleotide
uuacuuugaacacagcaca

SEQ ID NO: 3190589 - RNA, 19 nt, Artificial Sequence
  Description of Artificial Sequence: Synthetic oligonucleotide
aguauuagagaaaagaaca

SEQ ID NO: 3190590 - RNA, 19 nt, Artificial Sequence
  Description of Artificial Sequence: Synthetic oligonucleotide
uuaauaauucuguauuuga

SEQ ID NO: 3190591 - RNA, 19 nt, Artificial Sequence
  Description of Artificial Sequence: Synthetic oligonucleotide
uccagcaacauauaaaccu

SEQ ID NO: 3190592 - RNA, 19 nt, Artificial Sequence
  Description of Artificial Sequence: Synthetic oligonucleotide
ucuggggaaaccuagaagu

SEQ ID NO: 3190593 - RNA, 19 nt, Artificial Sequence
  Description of Artificial Sequence: Synthetic oligonucleotide
auaaaugaacauuaaauua

SEQ ID NO: 3190594 - RNA, 19 nt, Artificial Sequence
  Description of Artificial Sequence: Synthetic oligonucleotide
acaagggacgccuacaggg

SEQ ID NO: 3190595 - RNA, 19 nt, Artificial Sequence
  Description of Artificial Sequence: Synthetic oligonucleotide
aguacagcccuucuaauuc

SEQ ID NO: 3190596 - RNA, 19 nt, Artificial Sequence
  Description of Artificial Sequence: Synthetic oligonucleotide
uaggcauuuuccaaaagcc

SEQ ID NO: 3190597 - RNA, 19 nt, Artificial Sequence
  Description of Artificial Sequence: Synthetic oligonucleotide
ugaguuuuauccuaaacau

SEQ ID NO: 3190598 - RNA, 19 nt, Artificial Sequence
  Description of Artificial Sequence: Synthetic oligonucleotide
ucucgcauaagcuucaaca

SEQ ID NO: 3190599 - RNA, 19 nt, Artificial Sequence
  Description of Artificial Sequence: Synthetic oligonucleotide
caaaauaauacacugauua

SEQ ID NO: 3190600 - RNA, 19 nt, Artificial Sequence
  Description of Artificial Sequence: Synthetic oligonucleotide
auuacuuugaacacagcac

SEQ ID NO: 3190601 - RNA, 19 nt, Artificial Sequence
  Description of Artificial Sequence: Synthetic oligonucleotide
auaauuacuaauucaaauu

SEQ ID NO: 3190602 - RNA, 19 nt, Artificial Sequence
  Description of Artificial Sequence: Synthetic oligonucleotide
augaacauuaaauuacuca

SEQ ID NO: 3190603 - RNA, 19 nt, Artificial Sequence
  Description of Artificial Sequence: Synthetic oligonucleotide
ugguacaacaaauugaaau

SEQ ID NO: 3190604 - RNA, 19 nt, Artificial Sequence
  Description of Artificial Sequence: Synthetic oligonucleotide
guaguauuuaaagacagcc

SEQ ID NO: 3190605 - RNA, 19 nt, Artificial Sequence
  Description of Artificial Sequence: Synthetic oligonucleotide
gauuacuuugaacacagca

SEQ ID NO: 3190606 - RNA, 19 nt, Artificial Sequence
  Description of Artificial Sequence: Synthetic oligonucleotide
auuauaagaccauaaugca

SEQ ID NO: 3190607 - RNA, 19 nt, Artificial Sequence
  Description of Artificial Sequence: Synthetic oligonucleotide
ugcauauuuaaacucugug

SEQ ID NO: 3190608 - RNA, 19 nt, Artificial Sequence
  Description of Artificial Sequence: Synthetic oligonucleotide
uguguaaagauuucucuga

SEQ ID NO: 3190609 - RNA, 19 nt, Artificial Sequence
  Description of Artificial Sequence: Synthetic oligonucleotide
ucguaguauuuaaagacag

SEQ ID NO: 3190610 - RNA, 19 nt, Artificial Sequence
  Description of Artificial Sequence: Synthetic oligonucleotide
uagaaugacaguucuaacu

SEQ ID NO: 3190611 - RNA, 19 nt, Artificial Sequence
  Description of Artificial Sequence: Synthetic oligonucleotide
agcuucagcaacuauuuuc

SEQ ID NO: 3190612 - RNA, 19 nt, Artificial Sequence
  Description of Artificial Sequence: Synthetic oligonucleotide
uuauaagaccauaaugcac

SEQ ID NO: 3190613 - RNA, 19 nt, Artificial Sequence
  Description of Artificial Sequence: Synthetic oligonucleotide
uccuaaacauaagucaucg

SEQ ID NO: 3190614 - RNA, 19 nt, Artificial Sequence
  Description of Artificial Sequence: Synthetic oligonucleotide
acaaauacuggucuggagu

SEQ ID NO: 3190615 - RNA, 19 nt, Artificial Sequence
  Description of Artificial Sequence: Synthetic oligonucleotide
ugacuuaucaucagaugcc

SEQ ID NO: 3190616 - RNA, 19 nt, Artificial Sequence
  Description of Artificial Sequence: Synthetic oligonucleotide
uuacuuccuaaacaaauac

SEQ ID NO: 3190617 - RNA, 19 nt, Artificial Sequence
  Description of Artificial Sequence: Synthetic oligonucleotide
aaagcauuugcccuaccca

SEQ ID NO: 3190618 - RNA, 19 nt, Artificial Sequence
  Description of Artificial Sequence: Synthetic oligonucleotide
ucuggcacaaccauggcgu

SEQ ID NO: 3190619 - RNA, 19 nt, Artificial Sequence
  Description of Artificial Sequence: Synthetic oligonucleotide
uaauauaaacuccuucuuc

SEQ ID NO: 3190620 - RNA, 19 nt, Artificial Sequence
  Description of Artificial Sequence: Synthetic oligonucleotide
agugugaugacagaaagca

SEQ ID NO: 3190621 - RNA, 19 nt, Artificial Sequence
  Description of Artificial Sequence: Synthetic oligonucleotide
uacuauauauucaguaacu

SEQ ID NO: 3190622 - RNA, 19 nt, Artificial Sequence
  Description of Artificial Sequence: Synthetic oligonucleotide
cagacaggacuuuaaaugg

SEQ ID NO: 3190623 - RNA, 19 nt, Artificial Sequence
  Description of Artificial Sequence: Synthetic oligonucleotide
aacauaagucaucgguuuc

SEQ ID NO: 3190624 - RNA, 19 nt, Artificial Sequence
  Description of Artificial Sequence: Synthetic oligonucleotide
uugaacacagcacaaguaa

SEQ ID NO: 3190625 - RNA, 19 nt, Artificial Sequence
  Description of Artificial Sequence: Synthetic oligonucleotide
cucauuuagguguucacag

SEQ ID NO: 3190626 - RNA, 19 nt, Artificial Sequence
  Description of Artificial Sequence: Synthetic oligonucleotide
uuaaacucuguguaaagau

SEQ ID NO: 3190627 - RNA, 19 nt, Artificial Sequence
  Description of Artificial Sequence: Synthetic oligonucleotide
uucagaacuagucugggau

SEQ ID NO: 3190628 - RNA, 19 nt, Artificial Sequence
  Description of Artificial Sequence: Synthetic oligonucleotide
aaaggauaaauuguccuca

SEQ ID NO: 3190629 - RNA, 19 nt, Artificial Sequence
  Description of Artificial Sequence: Synthetic oligonucleotide
aacaacgacuugcaucuuc

SEQ ID NO: 3190630 - RNA, 19 nt, Artificial Sequence
  Description of Artificial Sequence: Synthetic oligonucleotide
accaaaggcagcaagaauc

SEQ ID NO: 3190631 - RNA, 19 nt, Artificial Sequence
  Description of Artificial Sequence: Synthetic oligonucleotide
cuaggcauuuuccaaaagc

SEQ ID NO: 3190632 - RNA, 19 nt, Artificial Sequence
  Description of Artificial Sequence: Synthetic oligonucleotide
aagagaaguuacuauuaca

SEQ ID NO: 3190633 - RNA, 19 nt, Artificial Sequence
  Description of Artificial Sequence: Synthetic oligonucleotide
uauccuaaacauaagucau

SEQ ID NO: 3190634 - RNA, 19 nt, Artificial Sequence
  Description of Artificial Sequence: Synthetic oligonucleotide
cauuuugucgcaaaucuuc

SEQ ID NO: 3190635 - RNA, 19 nt, Artificial Sequence
  Description of Artificial Sequence: Synthetic oligonucleotide
cuacuauauauucaguaac

SEQ ID NO: 3190636 - RNA, 19 nt, Artificial Sequence
  Description of Artificial Sequence: Synthetic oligonucleotide
uagaaguacccauagcuga

SEQ ID NO: 3190637 - RNA, 19 nt, Artificial Sequence
  Description of Artificial Sequence: Synthetic oligonucleotide
aacauauaaaccuggcauu

SEQ ID NO: 3190638 - RNA, 19 nt, Artificial Sequence
  Description of Artificial Sequence: Synthetic oligonucleotide
gaacaagaguauuagagaa

SEQ ID NO: 3190639 - RNA, 19 nt, Artificial Sequence
  Description of Artificial Sequence: Synthetic oligonucleotide
cugcaaaugagaaaagcac

SEQ ID NO: 3190640 - RNA, 19 nt, Artificial Sequence
  Description of Artificial Sequence: Synthetic oligonucleotide
uagauucuccuucacagac

SEQ ID NO: 3190641 - RNA, 19 nt, Artificial Sequence
  Description of Artificial Sequence: Synthetic oligonucleotide
aacaaauacuggucuggag

SEQ ID NO: 3190642 - RNA, 19 nt, Artificial Sequence
  Description of Artificial Sequence: Synthetic oligonucleotide
uuagcaaauuauuacuaaa

SEQ ID NO: 3190643 - RNA, 19 nt, Artificial Sequence
  Description of Artificial Sequence: Synthetic oligonucleotide
ucucuuuuaauuguuuuga

SEQ ID NO: 3190644 - RNA, 19 nt, Artificial Sequence
  Description of Artificial Sequence: Synthetic oligonucleotide
uuuacuuccuaaacaaaua

SEQ ID NO: 3190645 - RNA, 19 nt, Artificial Sequence
  Description of Artificial Sequence: Synthetic oligonucleotide
gaagaagaacccuuagcug

SEQ ID NO: 3190646 - RNA, 19 nt, Artificial Sequence
  Description of Artificial Sequence: Synthetic oligonucleotide
uggaaaggauaaauugucc

SEQ ID NO: 3190647 - RNA, 19 nt, Artificial Sequence
  Description of Artificial Sequence: Synthetic oligonucleotide
uucuggcacaaccauggcg

SEQ ID NO: 3190648 - RNA, 19 nt, Artificial Sequence
  Description of Artificial Sequence: Synthetic oligonucleotide
uaaagagaauauuuugaaa

SEQ ID NO: 3190649 - RNA, 19 nt, Artificial Sequence
  Description of Artificial Sequence: Synthetic oligonucleotide
gauacuaccaaguuuuggu

SEQ ID NO: 3190650 - RNA, 19 nt, Artificial Sequence
  Description of Artificial Sequence: Synthetic oligonucleotide
cugauuagaaacuggugac

SEQ ID NO: 3190651 - RNA, 19 nt, Artificial Sequence
  Description of Artificial Sequence: Synthetic oligonucleotide
agaaugacaguucuaacua

SEQ ID NO: 3190652 - RNA, 19 nt, Artificial Sequence
  Description of Artificial Sequence: Synthetic oligonucleotide
uuuaaacucuguguaaaga

SEQ ID NO: 3190653 - RNA, 19 nt, Artificial Sequence
  Description of Artificial Sequence: Synthetic oligonucleotide
uaaaguaaaggugaggcuu

SEQ ID NO: 3190654 - RNA, 19 nt, Artificial Sequence
  Description of Artificial Sequence: Synthetic oligonucleotide
aaaggcuucuuacuuuccu

SEQ ID NO: 3190655 - RNA, 19 nt, Artificial Sequence
  Description of Artificial Sequence: Synthetic oligonucleotide
augucuucuacucauugca

SEQ ID NO: 3190656 - RNA, 19 nt, Artificial Sequence
  Description of Artificial Sequence: Synthetic oligonucleotide
uccuaaacaaauacugguc

SEQ ID NO: 3190657 - RNA, 19 nt, Artificial Sequence
  Description of Artificial Sequence: Synthetic oligonucleotide
uuaaaguaaaggugaggcu

SEQ ID NO: 3190658 - RNA, 19 nt, Artificial Sequence
  Description of Artificial Sequence: Synthetic oligonucleotide
uucagcaacuauuuucucu

SEQ ID NO: 3190659 - RNA, 19 nt, Artificial Sequence
  Description of Artificial Sequence: Synthetic oligonucleotide
aauuaaaugucuggggaaa

SEQ ID NO: 3190660 - RNA, 19 nt, Artificial Sequence
  Description of Artificial Sequence: Synthetic oligonucleotide
auuuugucgcaaaucuucc

SEQ ID NO: 3190661 - RNA, 19 nt, Artificial Sequence
  Description of Artificial Sequence: Synthetic oligonucleotide
auuagcaaauuauuacuaa

SEQ ID NO: 3190662 - RNA, 19 nt, Artificial Sequence
  Description of Artificial Sequence: Synthetic oligonucleotide
acuucuggcacaaccaugg

SEQ ID NO: 3190663 - RNA, 19 nt, Artificial Sequence
  Description of Artificial Sequence: Synthetic oligonucleotide
uggauccaaacaaaugcug

SEQ ID NO: 3190664 - RNA, 19 nt, Artificial Sequence
  Description of Artificial Sequence: Synthetic oligonucleotide
uaaauuacucaagagcaaa

SEQ ID NO: 3190665 - RNA, 19 nt, Artificial Sequence
  Description of Artificial Sequence: Synthetic oligonucleotide
ucgaacaacgacuugcauc

SEQ ID NO: 3190666 - RNA, 19 nt, Artificial Sequence
  Description of Artificial Sequence: Synthetic oligonucleotide
guaaagagaauauuuugaa

SEQ ID NO: 3190667 - RNA, 19 nt, Artificial Sequence
  Description of Artificial Sequence: Synthetic oligonucleotide
aacucagcauuugucacag

SEQ ID NO: 3190668 - RNA, 19 nt, Artificial Sequence
  Description of Artificial Sequence: Synthetic oligonucleotide
uuaaauuguuucuggacuu

SEQ ID NO: 3190669 - RNA, 19 nt, Artificial Sequence
  Description of Artificial Sequence: Synthetic oligonucleotide
uacuaccaaguuuugguug

SEQ ID NO: 3190670 - RNA, 19 nt, Artificial Sequence
  Description of Artificial Sequence: Synthetic oligonucleotide
gcagacaggacuuuaaaug

SEQ ID NO: 3190671 - RNA, 19 nt, Artificial Sequence
  Description of Artificial Sequence: Synthetic oligonucleotide
aagauugagcugccgagcc

SEQ ID NO: 3190672 - RNA, 19 nt, Artificial Sequence
  Description of Artificial Sequence: Synthetic oligonucleotide
ucuccgacaccacagagcg

SEQ ID NO: 3190673 - RNA, 19 nt, Artificial Sequence
  Description of Artificial Sequence: Synthetic oligonucleotide
agcgccagcacucagggcc

SEQ ID NO: 3190674 - RNA, 19 nt, Artificial Sequence
  Description of Artificial Sequence: Synthetic oligonucleotide
aguucuugcaaauucccgg

SEQ ID NO: 3190675 - RNA, 19 nt, Artificial Sequence
  Description of Artificial Sequence: Synthetic oligonucleotide
ucagguaccgggcugaaag

SEQ ID NO: 3190676 - RNA, 19 nt, Artificial Sequence
  Description of Artificial Sequence: Synthetic oligonucleotide
aaaguucuugcaaauuccc

SEQ ID NO: 3190677 - RNA, 19 nt, Artificial Sequence
  Description of Artificial Sequence: Synthetic oligonucleotide
ugaaaguucuugcaaauuc

SEQ ID NO: 3190678 - RNA, 19 nt, Artificial Sequence
  Description of Artificial Sequence: Synthetic oligonucleotide
auauuggcaacgcuggaac

SEQ ID NO: 3190679 - RNA, 19 nt, Artificial Sequence
  Description of Artificial Sequence: Synthetic oligonucleotide
gaaagauugagcugccgag

SEQ ID NO: 3190680 - RNA, 19 nt, Artificial Sequence
  Description of Artificial Sequence: Synthetic oligonucleotide
cacauauuggcaacgcugg

SEQ ID NO: 3190681 - RNA, 19 nt, Artificial Sequence
  Description of Artificial Sequence: Synthetic oligonucleotide
aacggagccuagcagcgac

SEQ ID NO: 3190682 - RNA, 19 nt, Artificial Sequence
  Description of Artificial Sequence: Synthetic oligonucleotide
cucggaaagauugagcugc

SEQ ID NO: 3190683 - RNA, 19 nt, Artificial Sequence
  Description of Artificial Sequence: Synthetic oligonucleotide
ugcaacggagccuagcagc

SEQ ID NO: 3190684 - RNA, 19 nt, Artificial Sequence
  Description of Artificial Sequence: Synthetic oligonucleotide
uuauuguugguccgggagu

SEQ ID NO: 3190685 - RNA, 19 nt, Artificial Sequence
  Description of Artificial Sequence: Synthetic oligonucleotide
cugggucucggaaagauug

SEQ ID NO: 3190686 - RNA, 19 nt, Artificial Sequence
  Description of Artificial Sequence: Synthetic oligonucleotide
agcacagggaggcagcagg

SEQ ID NO: 3190687 - RNA, 19 nt, Artificial Sequence
  Description of Artificial Sequence: Synthetic oligonucleotide
ucuucugcuugguucgccg

SEQ ID NO: 3190688 - RNA, 19 nt, Artificial Sequence
  Description of Artificial Sequence: Synthetic oligonucleotide
aaguucuugcaaauucccg

SEQ ID NO: 3190689 - RNA, 19 nt, Artificial Sequence
  Description of Artificial Sequence: Synthetic oligonucleotide
uguugguccgggaguaagg

SEQ ID NO: 3190690 - RNA, 19 nt, Artificial Sequence
  Description of Artificial Sequence: Synthetic oligonucleotide
cuugguucgccgauucugg

SEQ ID NO: 3190691 - RNA, 19 nt, Artificial Sequence
  Description of Artificial Sequence: Synthetic oligonucleotide
ucuuuauuguugguccggg

SEQ ID NO: 3190692 - RNA, 19 nt, Artificial Sequence
  Description of Artificial Sequence: Synthetic oligonucleotide
aacggggcggaggacaggc

SEQ ID NO: 3190693 - RNA, 19 nt, Artificial Sequence
  Description of Artificial Sequence: Synthetic oligonucleotide
ucucucacggcccaccaca

SEQ ID NO: 3190694 - RNA, 19 nt, Artificial Sequence
  Description of Artificial Sequence: Synthetic oligonucleotide
uucuuuauuguugguccgg

SEQ ID NO: 3190695 - RNA, 19 nt, Artificial Sequence
  Description of Artificial Sequence: Synthetic oligonucleotide
cuucuuuauuguugguccg

SEQ ID NO: 3190696 - RNA, 19 nt, Artificial Sequence
  Description of Artificial Sequence: Synthetic oligonucleotide
ugcaaauucccggccagcg

SEQ ID NO: 3190697 - RNA, 19 nt, Artificial Sequence
  Description of Artificial Sequence: Synthetic oligonucleotide
uccgacaccacagagcgca

SEQ ID NO: 3190698 - RNA, 19 nt, Artificial Sequence
  Description of Artificial Sequence: Synthetic oligonucleotide
aauucccggccagcgaacc

SEQ ID NO: 3190699 - RNA, 19 nt, Artificial Sequence
  Description of Artificial Sequence: Synthetic oligonucleotide
gaggagcucagguaccggg

SEQ ID NO: 3190700 - RNA, 19 nt, Artificial Sequence
  Description of Artificial Sequence: Synthetic oligonucleotide
ucaccugggucucggaaag

SEQ ID NO: 3190701 - RNA, 19 nt, Artificial Sequence
  Description of Artificial Sequence: Synthetic oligonucleotide
guucuugcaaauucccggc

SEQ ID NO: 3190702 - RNA, 19 nt, Artificial Sequence
  Description of Artificial Sequence: Synthetic oligonucleotide
gaguaaggcucgaaggccg

SEQ ID NO: 3190703 - RNA, 19 nt, Artificial Sequence
  Description of Artificial Sequence: Synthetic oligonucleotide
uccuucuucugcuugguuc

SEQ ID NO: 3190704 - RNA, 19 nt, Artificial Sequence
  Description of Artificial Sequence: Synthetic oligonucleotide
gauugagcugccgagccag

SEQ ID NO: 3190705 - RNA, 19 nt, Artificial Sequence
  Description of Artificial Sequence: Synthetic oligonucleotide
auuggcaacgcuggaacuc

SEQ ID NO: 3190706 - RNA, 19 nt, Artificial Sequence
  Description of Artificial Sequence: Synthetic oligonucleotide
gaagagaccguggcgggcg

SEQ ID NO: 3190707 - RNA, 19 nt, Artificial Sequence
  Description of Artificial Sequence: Synthetic oligonucleotide
aaggccgaggagcucaggu

SEQ ID NO: 3190708 - RNA, 19 nt, Artificial Sequence
  Description of Artificial Sequence: Synthetic oligonucleotide
aacagccgcagcacgcugc

SEQ ID NO: 3190709 - RNA, 19 nt, Artificial Sequence
  Description of Artificial Sequence: Synthetic oligonucleotide
ccagccaucgucaacgggg

SEQ ID NO: 3190710 - RNA, 19 nt, Artificial Sequence
  Description of Artificial Sequence: Synthetic oligonucleotide
uucuugcaaauucccggcc

SEQ ID NO: 3190711 - RNA, 19 nt, Artificial Sequence
  Description of Artificial Sequence: Synthetic oligonucleotide
caccacagagcgcagcucg

SEQ ID NO: 3190712 - RNA, 19 nt, Artificial Sequence
  Description of Artificial Sequence: Synthetic oligonucleotide
uccaacagccgcagcacgc

SEQ ID NO: 3190713 - RNA, 19 nt, Artificial Sequence
  Description of Artificial Sequence: Synthetic oligonucleotide
ucucggaaagauugagcug

SEQ ID NO: 3190714 - RNA, 19 nt, Artificial Sequence
  Description of Artificial Sequence: Synthetic oligonucleotide
aaggcucgaaggccgagga

SEQ ID NO: 3190715 - RNA, 19 nt, Artificial Sequence
  Description of Artificial Sequence: Synthetic oligonucleotide
cuugcaaauucccggccag

SEQ ID NO: 3190716 - RNA, 19 nt, Artificial Sequence
  Description of Artificial Sequence: Synthetic oligonucleotide
agccgcagcacgcugcacg

SEQ ID NO: 3190717 - RNA, 19 nt, Artificial Sequence
  Description of Artificial Sequence: Synthetic oligonucleotide
ucgucaacggggcggagga

SEQ ID NO: 3190718 - RNA, 19 nt, Artificial Sequence
  Description of Artificial Sequence: Synthetic oligonucleotide
uugcaacggagccuagcag

SEQ ID NO: 3190719 - RNA, 19 nt, Artificial Sequence
  Description of Artificial Sequence: Synthetic oligonucleotide
gucucggaaagauugagcu

SEQ ID NO: 3190720 - RNA, 19 nt, Artificial Sequence
  Description of Artificial Sequence: Synthetic oligonucleotide
ucaacggggcggaggacag

SEQ ID NO: 3190721 - RNA, 19 nt, Artificial Sequence
  Description of Artificial Sequence: Synthetic oligonucleotide
aaccagccaucgucaacgg

SEQ ID NO: 3190722 - RNA, 19 nt, Artificial Sequence
  Description of Artificial Sequence: Synthetic oligonucleotide
gggaguaaggcucgaaggc

SEQ ID NO: 3190723 - RNA, 19 nt, Artificial Sequence
  Description of Artificial Sequence: Synthetic oligonucleotide
ugagacgcugcgccugcgg

SEQ ID NO: 3190724 - RNA, 19 nt, Artificial Sequence
  Description of Artificial Sequence: Synthetic oligonucleotide
uaaggcucgaaggccgagg

SEQ ID NO: 3190725 - RNA, 19 nt, Artificial Sequence
  Description of Artificial Sequence: Synthetic oligonucleotide
uucaccugggucucggaaa

SEQ ID NO: 3190726 - RNA, 19 nt, Artificial Sequence
  Description of Artificial Sequence: Synthetic oligonucleotide
ccuucuucugcuugguucg

SEQ ID NO: 3190727 - RNA, 19 nt, Artificial Sequence
  Description of Artificial Sequence: Synthetic oligonucleotide
accggcaggcugaagagac

SEQ ID NO: 3190728 - RNA, 19 nt, Artificial Sequence
  Description of Artificial Sequence: Synthetic oligonucleotide
aaauucccggccagcgaac

SEQ ID NO: 3190729 - RNA, 19 nt, Artificial Sequence
  Description of Artificial Sequence: Synthetic oligonucleotide
cugaagagaccguggcggg

SEQ ID NO: 3190730 - RNA, 19 nt, Artificial Sequence
  Description of Artificial Sequence: Synthetic oligonucleotide
uauuggcaacgcuggaacu

SEQ ID NO: 3190731 - RNA, 19 nt, Artificial Sequence
  Description of Artificial Sequence: Synthetic oligonucleotide
cuugcaacggagccuagca

SEQ ID NO: 3190732 - RNA, 19 nt, Artificial Sequence
  Description of Artificial Sequence: Synthetic oligonucleotide
ggaaagauugagcugccga

SEQ ID NO: 3190733 - RNA, 19 nt, Artificial Sequence
  Description of Artificial Sequence: Synthetic oligonucleotide
agcacucagggccgggagg

SEQ ID NO: 3190734 - RNA, 19 nt, Artificial Sequence
  Description of Artificial Sequence: Synthetic oligonucleotide
acagggaggcagcagggca

SEQ ID NO: 3190735 - RNA, 19 nt, Artificial Sequence
  Description of Artificial Sequence: Synthetic oligonucleotide
agcgacggcaccggcaggc

SEQ ID NO: 3190736 - RNA, 19 nt, Artificial Sequence
  Description of Artificial Sequence: Synthetic oligonucleotide
uuguugguccgggaguaag

SEQ ID NO: 3190737 - RNA, 19 nt, Artificial Sequence
  Description of Artificial Sequence: Synthetic oligonucleotide
ucgaaggccgaggagcuca

SEQ ID NO: 3190738 - RNA, 19 nt, Artificial Sequence
  Description of Artificial Sequence: Synthetic oligonucleotide
cucgguucucucacggccc

SEQ ID NO: 3190739 - RNA, 19 nt, Artificial Sequence
  Description of Artificial Sequence: Synthetic oligonucleotide
ucggaaagauugagcugcc

SEQ ID NO: 3190740 - RNA, 19 nt, Artificial Sequence
  Description of Artificial Sequence: Synthetic oligonucleotide
aagagaccguggcgggcgg

SEQ ID NO: 3190741 - RNA, 19 nt, Artificial Sequence
  Description of Artificial Sequence: Synthetic oligonucleotide
accacauauuggcaacgcu

SEQ ID NO: 3190742 - RNA, 19 nt, Artificial Sequence
  Description of Artificial Sequence: Synthetic oligonucleotide
uauuguugguccgggagua

SEQ ID NO: 3190743 - RNA, 19 nt, Artificial Sequence
  Description of Artificial Sequence: Synthetic oligonucleotide
ggacaggcggcuugcaacg

SEQ ID NO: 3190744 - RNA, 19 nt, Artificial Sequence
  Description of Artificial Sequence: Synthetic oligonucleotide
cagcgaaccagccaucguc

SEQ ID NO: 3190745 - RNA, 19 nt, Artificial Sequence
  Description of Artificial Sequence: Synthetic oligonucleotide
agcucggaguccuugcccu

SEQ ID NO: 3190746 - RNA, 19 nt, Artificial Sequence
  Description of Artificial Sequence: Synthetic oligonucleotide
ggaguccuugcccuggucc

SEQ ID NO: 3190747 - RNA, 19 nt, Artificial Sequence
  Description of Artificial Sequence: Synthetic oligonucleotide
guugguccgggaguaaggc

SEQ ID NO: 3190748 - RNA, 19 nt, Artificial Sequence
  Description of Artificial Sequence: Synthetic oligonucleotide
caacgccgagccgagagcg

SEQ ID NO: 3190749 - RNA, 19 nt, Artificial Sequence
  Description of Artificial Sequence: Synthetic oligonucleotide
ugggucucggaaagauuga

SEQ ID NO: 3190750 - RNA, 19 nt, Artificial Sequence
  Description of Artificial Sequence: Synthetic oligonucleotide
gagagcgccgguagcacag

SEQ ID NO: 3190751 - RNA, 19 nt, Artificial Sequence
  Description of Artificial Sequence: Synthetic oligonucleotide
caggcgggugcugagacgc

SEQ ID NO: 3190752 - RNA, 19 nt, Artificial Sequence
  Description of Artificial Sequence: Synthetic oligonucleotide
aucgucaacggggcggagg

SEQ ID NO: 3190753 - RNA, 19 nt, Artificial Sequence
  Description of Artificial Sequence: Synthetic oligonucleotide
acagagcgcagcucggagu

SEQ ID NO: 3190754 - RNA, 19 nt, Artificial Sequence
  Description of Artificial Sequence: Synthetic oligonucleotide
caaauucccggccagcgaa

SEQ ID NO: 3190755 - RNA, 19 nt, Artificial Sequence
  Description of Artificial Sequence: Synthetic oligonucleotide
acauauuggcaacgcugga

SEQ ID NO: 3190756 - RNA, 19 nt, Artificial Sequence
  Description of Artificial Sequence: Synthetic oligonucleotide
cuugcccugguccuucuuc

SEQ ID NO: 3190757 - RNA, 19 nt, Artificial Sequence
  Description of Artificial Sequence: Synthetic oligonucleotide
gguucgccgauucuggaac

SEQ ID NO: 3190758 - RNA, 19 nt, Artificial Sequence
  Description of Artificial Sequence: Synthetic oligonucleotide
uugcccugguccuucuucu

SEQ ID NO: 3190759 - RNA, 19 nt, Artificial Sequence
  Description of Artificial Sequence: Synthetic oligonucleotide
cagccaucgucaacggggc

SEQ ID NO: 3190760 - RNA, 19 nt, Artificial Sequence
  Description of Artificial Sequence: Synthetic oligonucleotide
cagggaggcagcagggcag

SEQ ID NO: 3190761 - RNA, 19 nt, Artificial Sequence
  Description of Artificial Sequence: Synthetic oligonucleotide
ggaguaaggcucgaaggcc

SEQ ID NO: 3190762 - RNA, 19 nt, Artificial Sequence
  Description of Artificial Sequence: Synthetic oligonucleotide
cagcucgguucucucacgg

SEQ ID NO: 3190763 - RNA, 19 nt, Artificial Sequence
  Description of Artificial Sequence: Synthetic oligonucleotide
accagccaucgucaacggg

SEQ ID NO: 3190764 - RNA, 19 nt, Artificial Sequence
  Description of Artificial Sequence: Synthetic oligonucleotide
cagagcgcagcucggaguc

SEQ ID NO: 3190765 - RNA, 19 nt, Artificial Sequence
  Description of Artificial Sequence: Synthetic oligonucleotide
agauugagcugccgagcca

SEQ ID NO: 3190766 - RNA, 19 nt, Artificial Sequence
  Description of Artificial Sequence: Synthetic oligonucleotide
ugaagagaccguggcgggc

SEQ ID NO: 3190767 - RNA, 19 nt, Artificial Sequence
  Description of Artificial Sequence: Synthetic oligonucleotide
cuagcagcgacggcaccgg

SEQ ID NO: 3190768 - RNA, 19 nt, Artificial Sequence
  Description of Artificial Sequence: Synthetic oligonucleotide
cucagggccgggaggcugg

SEQ ID NO: 3190769 - RNA, 19 nt, Artificial Sequence
  Description of Artificial Sequence: Synthetic oligonucleotide
gucuccgacaccacagagc

SEQ ID NO: 3190770 - RNA, 19 nt, Artificial Sequence
  Description of Artificial Sequence: Synthetic oligonucleotide
agcacgcugcacguggcgg

SEQ ID NO: 3190771 - RNA, 19 nt, Artificial Sequence
  Description of Artificial Sequence: Synthetic oligonucleotide
aaugucaccgaucagagga

SEQ ID NO: 3190772 - RNA, 19 nt, Artificial Sequence
  Description of Artificial Sequence: Synthetic oligonucleotide
aauagcuucacauccagcu

SEQ ID NO: 3190773 - RNA, 19 nt, Artificial Sequence
  Description of Artificial Sequence: Synthetic oligonucleotide
aaacucaucuuucuccagc

SEQ ID NO: 3190774 - RNA, 19 nt, Artificial Sequence
  Description of Artificial Sequence: Synthetic oligonucleotide
ugaauugaagggcaguugg

SEQ ID NO: 3190775 - RNA, 19 nt, Artificial Sequence
  Description of Artificial Sequence: Synthetic oligonucleotide
cauuaagagagacauaagg

SEQ ID NO: 3190776 - RNA, 19 nt, Artificial Sequence
  Description of Artificial Sequence: Synthetic oligonucleotide
uaaggucucaaccagaagu

SEQ ID NO: 3190777 - RNA, 19 nt, Artificial Sequence
  Description of Artificial Sequence: Synthetic oligonucleotide
uggagaaccacucuuuagg

SEQ ID NO: 3190778 - RNA, 19 nt, Artificial Sequence
  Description of Artificial Sequence: Synthetic oligonucleotide
ugcaguaaggcccaugcgg

SEQ ID NO: 3190779 - RNA, 19 nt, Artificial Sequence
  Description of Artificial Sequence: Synthetic oligonucleotide
gauauuugaauugaagggc

SEQ ID NO: 3190780 - RNA, 19 nt, Artificial Sequence
  Description of Artificial Sequence: Synthetic oligonucleotide
agaagacacacauuaagag

SEQ ID NO: 3190781 - RNA, 19 nt, Artificial Sequence
  Description of Artificial Sequence: Synthetic oligonucleotide
uccagugugauguuugugg

SEQ ID NO: 3190782 - RNA, 19 nt, Artificial Sequence
  Description of Artificial Sequence: Synthetic oligonucleotide
agaaguaccuucuucugac

SEQ ID NO: 3190783 - RNA, 19 nt, Artificial Sequence
  Description of Artificial Sequence: Synthetic oligonucleotide
uuaagagagacauaagguc

SEQ ID NO: 3190784 - RNA, 19 nt, Artificial Sequence
  Description of Artificial Sequence: Synthetic oligonucleotide
uaagagagacauaaggucu

SEQ ID NO: 3190785 - RNA, 19 nt, Artificial Sequence
  Description of Artificial Sequence: Synthetic oligonucleotide
ugacuuucuacuagguucg

SEQ ID NO: 3190786 - RNA, 19 nt, Artificial Sequence
  Description of Artificial Sequence: Synthetic oligonucleotide
aaggccuuucaauagcuuc

SEQ ID NO: 3190787 - RNA, 19 nt, Artificial Sequence
  Description of Artificial Sequence: Synthetic oligonucleotide
gagacauaaggucucaacc

SEQ ID NO: 3190788 - RNA, 19 nt, Artificial Sequence
  Description of Artificial Sequence: Synthetic oligonucleotide
auccccgagacauucaggc

SEQ ID NO: 3190789 - RNA, 19 nt, Artificial Sequence
  Description of Artificial Sequence: Synthetic oligonucleotide
uggagaaaauguuucaucu

SEQ ID NO: 3190790 - RNA, 19 nt, Artificial Sequence
  Description of Artificial Sequence: Synthetic oligonucleotide
uugaccgagauuacgagca

SEQ ID NO: 3190791 - RNA, 19 nt, Artificial Sequence
  Description of Artificial Sequence: Synthetic oligonucleotide
ucgacaucaaauuccagug

SEQ ID NO: 3190792 - RNA, 19 nt, Artificial Sequence
  Description of Artificial Sequence: Synthetic oligonucleotide
ucagaguugaccgagauua

SEQ ID NO: 3190793 - RNA, 19 nt, Artificial Sequence
  Description of Artificial Sequence: Synthetic oligonucleotide
ugcguuuugaugauauuug

SEQ ID NO: 3190794 - RNA, 19 nt, Artificial Sequence
  Description of Artificial Sequence: Synthetic oligonucleotide
uuggaauucgacaucaaau

SEQ ID NO: 3190795 - RNA, 19 nt, Artificial Sequence
  Description of Artificial Sequence: Synthetic oligonucleotide
gaauucgacaucaaauucc

SEQ ID NO: 3190796 - RNA, 19 nt, Artificial Sequence
  Description of Artificial Sequence: Synthetic oligonucleotide
agagacauaaggucucaac

SEQ ID NO: 3190797 - RNA, 19 nt, Artificial Sequence
  Description of Artificial Sequence: Synthetic oligonucleotide
uucgacaucaaauuccagu

SEQ ID NO: 3190798 - RNA, 19 nt, Artificial Sequence
  Description of Artificial Sequence: Synthetic oligonucleotide
auuacgagcagccaccugu

SEQ ID NO: 3190799 - RNA, 19 nt, Artificial Sequence
  Description of Artificial Sequence: Synthetic oligonucleotide
gaugcugaucucuuguugc

SEQ ID NO: 3190800 - RNA, 19 nt, Artificial Sequence
  Description of Artificial Sequence: Synthetic oligonucleotide
ucuuguugcugcuugaagu

SEQ ID NO: 3190801 - RNA, 19 nt, Artificial Sequence
  Description of Artificial Sequence: Synthetic oligonucleotide
uuuugaugauauuugaauu

SEQ ID NO: 3190802 - RNA, 19 nt, Artificial Sequence
  Description of Artificial Sequence: Synthetic oligonucleotide
ugcacauuggugauguuga

SEQ ID NO: 3190803 - RNA, 19 nt, Artificial Sequence
  Description of Artificial Sequence: Synthetic oligonucleotide
gacauaaggucucaaccag

SEQ ID NO: 3190804 - RNA, 19 nt, Artificial Sequence
  Description of Artificial Sequence: Synthetic oligonucleotide
aaguucaugccaccaauca

SEQ ID NO: 3190805 - RNA, 19 nt, Artificial Sequence
  Description of Artificial Sequence: Synthetic oligonucleotide
aaccagaaguaccuucuuc

SEQ ID NO: 3190806 - RNA, 19 nt, Artificial Sequence
  Description of Artificial Sequence: Synthetic oligonucleotide
accaauggcaggcagcagg

SEQ ID NO: 3190807 - RNA, 19 nt, Artificial Sequence
  Description of Artificial Sequence: Synthetic oligonucleotide
agagguuugacugauucag

SEQ ID NO: 3190808 - RNA, 19 nt, Artificial Sequence
  Description of Artificial Sequence: Synthetic oligonucleotide
auuaagagagacauaaggu

SEQ ID NO: 3190809 - RNA, 19 nt, Artificial Sequence
  Description of Artificial Sequence: Synthetic oligonucleotide
gaugccaucacaguacagc

SEQ ID NO: 3190810 - RNA, 19 nt, Artificial Sequence
  Description of Artificial Sequence: Synthetic oligonucleotide
agacauaaggucucaacca

SEQ ID NO: 3190811 - RNA, 19 nt, Artificial Sequence
  Description of Artificial Sequence: Synthetic oligonucleotide
ucaaccagaaguaccuucu

SEQ ID NO: 3190812 - RNA, 19 nt, Artificial Sequence
  Description of Artificial Sequence: Synthetic oligonucleotide
uauuugaauugaagggcag

SEQ ID NO: 3190813 - RNA, 19 nt, Artificial Sequence
  Description of Artificial Sequence: Synthetic oligonucleotide
acgagcagccaccuguucc

SEQ ID NO: 3190814 - RNA, 19 nt, Artificial Sequence
  Description of Artificial Sequence: Synthetic oligonucleotide
cauggaugcacccucacug

SEQ ID NO: 3190815 - RNA, 19 nt, Artificial Sequence
  Description of Artificial Sequence: Synthetic oligonucleotide
agguuugacugauucagag

SEQ ID NO: 3190816 - RNA, 19 nt, Artificial Sequence
  Description of Artificial Sequence: Synthetic oligonucleotide
aggacucugcaguaaggcc

SEQ ID NO: 3190817 - RNA, 19 nt, Artificial Sequence
  Description of Artificial Sequence: Synthetic oligonucleotide
uugaugauauuugaauuga

SEQ ID NO: 3190818 - RNA, 19 nt, Artificial Sequence
  Description of Artificial Sequence: Synthetic oligonucleotide
agaaccacucuuuagggaa

SEQ ID NO: 3190819 - RNA, 19 nt, Artificial Sequence
  Description of Artificial Sequence: Synthetic oligonucleotide
aauucgacaucaaauucca

SEQ ID NO: 3190820 - RNA, 19 nt, Artificial Sequence
  Description of Artificial Sequence: Synthetic oligonucleotide
uggaauucgacaucaaauu

SEQ ID NO: 3190821 - RNA, 19 nt, Artificial Sequence
  Description of Artificial Sequence: Synthetic oligonucleotide
aaguaccuucuucugacca

SEQ ID NO: 3190822 - RNA, 19 nt, Artificial Sequence
  Description of Artificial Sequence: Synthetic oligonucleotide
accagaaguaccuucuucu

SEQ ID NO: 3190823 - RNA, 19 nt, Artificial Sequence
  Description of Artificial Sequence: Synthetic oligonucleotide
aagagagacauaaggucuc

SEQ ID NO: 3190824 - RNA, 19 nt, Artificial Sequence
  Description of Artificial Sequence: Synthetic oligonucleotide
aucaccaguucccuccggc

SEQ ID NO: 3190825 - RNA, 19 nt, Artificial Sequence
  Description of Artificial Sequence: Synthetic oligonucleotide
aauuccagugugauguuug

SEQ ID NO: 3190826 - RNA, 19 nt, Artificial Sequence
  Description of Artificial Sequence: Synthetic oligonucleotide
cuggauccggccuucagcg

SEQ ID NO: 3190827 - RNA, 19 nt, Artificial Sequence
  Description of Artificial Sequence: Synthetic oligonucleotide
auggaugcacccucacugc

SEQ ID NO: 3190828 - RNA, 19 nt, Artificial Sequence
  Description of Artificial Sequence: Synthetic oligonucleotide
auaccugacuuucuacuag

SEQ ID NO: 3190829 - RNA, 19 nt, Artificial Sequence
  Description of Artificial Sequence: Synthetic oligonucleotide
gacugauucagaguugacc

SEQ ID NO: 3190830 - RNA, 19 nt, Artificial Sequence
  Description of Artificial Sequence: Synthetic oligonucleotide
gagaaugucaccgaucaga

SEQ ID NO: 3190831 - RNA, 19 nt, Artificial Sequence
  Description of Artificial Sequence: Synthetic oligonucleotide
uaccugacuuucuacuagg

SEQ ID NO: 3190832 - RNA, 19 nt, Artificial Sequence
  Description of Artificial Sequence: Synthetic oligonucleotide
uucaugccaccaaucagcc

SEQ ID NO: 3190833 - RNA, 19 nt, Artificial Sequence
  Description of Artificial Sequence: Synthetic oligonucleotide
uguugcugcuugaaguuca

SEQ ID NO: 3190834 - RNA, 19 nt, Artificial Sequence
  Description of Artificial Sequence: Synthetic oligonucleotide
gggaaagccaucuggaugc

SEQ ID NO: 3190835 - RNA, 19 nt, Artificial Sequence
  Description of Artificial Sequence: Synthetic oligonucleotide
acauaccugacuuucuacu

SEQ ID NO: 3190836 - RNA, 19 nt, Artificial Sequence
  Description of Artificial Sequence: Synthetic oligonucleotide
ucuggaugccaucacagua

SEQ ID NO: 3190837 - RNA, 19 nt, Artificial Sequence
  Description of Artificial Sequence: Synthetic oligonucleotide
acugccucaguggacaugg

SEQ ID NO: 3190838 - RNA, 19 nt, Artificial Sequence
  Description of Artificial Sequence: Synthetic oligonucleotide
uguuccacaaggccuuuca

SEQ ID NO: 3190839 - RNA, 19 nt, Artificial Sequence
  Description of Artificial Sequence: Synthetic oligonucleotide
uguuuguggagaaccacuc

SEQ ID NO: 3190840 - RNA, 19 nt, Artificial Sequence
  Description of Artificial Sequence: Synthetic oligonucleotide
uuugacugauucagaguug

SEQ ID NO: 3190841 - RNA, 19 nt, Artificial Sequence
  Description of Artificial Sequence: Synthetic oligonucleotide
ugaaguucaugccaccaau

SEQ ID NO: 3190842 - RNA, 19 nt, Artificial Sequence
  Description of Artificial Sequence: Synthetic oligonucleotide
ugauguuuguggagaacca

SEQ ID NO: 3190843 - RNA, 19 nt, Artificial Sequence
  Description of Artificial Sequence: Synthetic oligonucleotide
accgagauuacgagcagcc

SEQ ID NO: 3190844 - RNA, 19 nt, Artificial Sequence
  Description of Artificial Sequence: Synthetic oligonucleotide
cuucacauccagcugccgg

SEQ ID NO: 3190845 - RNA, 19 nt, Artificial Sequence
  Description of Artificial Sequence: Synthetic oligonucleotide
cacauuaagagagacauaa

SEQ ID NO: 3190846 - RNA, 19 nt, Artificial Sequence
  Description of Artificial Sequence: Synthetic oligonucleotide
aguggacauggaugcaccc

SEQ ID NO: 3190847 - RNA, 19 nt, Artificial Sequence
  Description of Artificial Sequence: Synthetic oligonucleotide
agggaaagccaucuggaug

SEQ ID NO: 3190848 - RNA, 19 nt, Artificial Sequence
  Description of Artificial Sequence: Synthetic oligonucleotide
gaugcacccucacugccgg

SEQ ID NO: 3190849 - RNA, 19 nt, Artificial Sequence
  Description of Artificial Sequence: Synthetic oligonucleotide
aguugaccgagauuacgag

SEQ ID NO: 3190850 - RNA, 19 nt, Artificial Sequence
  Description of Artificial Sequence: Synthetic oligonucleotide
ugcuugaaguucaugccac

SEQ ID NO: 3190851 - RNA, 19 nt, Artificial Sequence
  Description of Artificial Sequence: Synthetic oligonucleotide
gaucucuuguugcugcuug

SEQ ID NO: 3190852 - RNA, 19 nt, Artificial Sequence
  Description of Artificial Sequence: Synthetic oligonucleotide
caucuggaugccaucacag

SEQ ID NO: 3190853 - RNA, 19 nt, Artificial Sequence
  Description of Artificial Sequence: Synthetic oligonucleotide
ucuacuagguucgggauaa

SEQ ID NO: 3190854 - RNA, 19 nt, Artificial Sequence
  Description of Artificial Sequence: Synthetic oligonucleotide
cuucuucugaccaauggca

SEQ ID NO: 3190855 - RNA, 19 nt, Artificial Sequence
  Description of Artificial Sequence: Synthetic oligonucleotide
gcagaagacacacauuaag

SEQ ID NO: 3190856 - RNA, 19 nt, Artificial Sequence
  Description of Artificial Sequence: Synthetic oligonucleotide
uugacugauucagaguuga

SEQ ID NO: 3190857 - RNA, 19 nt, Artificial Sequence
  Description of Artificial Sequence: Synthetic oligonucleotide
gagauuacgagcagccacc

SEQ ID NO: 3190858 - RNA, 19 nt, Artificial Sequence
  Description of Artificial Sequence: Synthetic oligonucleotide
auauuugaauugaagggca

SEQ ID NO: 3190859 - RNA, 19 nt, Artificial Sequence
  Description of Artificial Sequence: Synthetic oligonucleotide
cuggaugccaucacaguac

SEQ ID NO: 3190860 - RNA, 19 nt, Artificial Sequence
  Description of Artificial Sequence: Synthetic oligonucleotide
ucugaccaauggcaggcag

SEQ ID NO: 3190861 - RNA, 19 nt, Artificial Sequence
  Description of Artificial Sequence: Synthetic oligonucleotide
uuguggagaaaauguuuca

SEQ ID NO: 3190862 - RNA, 19 nt, Artificial Sequence
  Description of Artificial Sequence: Synthetic oligonucleotide
agaguugaccgagauuacg

SEQ ID NO: 3190863 - RNA, 19 nt, Artificial Sequence
  Description of Artificial Sequence: Synthetic oligonucleotide
cagaagacacacauuaaga

SEQ ID NO: 3190864 - RNA, 19 nt, Artificial Sequence
  Description of Artificial Sequence: Synthetic oligonucleotide
uugaagggcaguuggaauu

SEQ ID NO: 3190865 - RNA, 19 nt, Artificial Sequence
  Description of Artificial Sequence: Synthetic oligonucleotide
ggagaaccacucuuuaggg

SEQ ID NO: 3190866 - RNA, 19 nt, Artificial Sequence
  Description of Artificial Sequence: Synthetic oligonucleotide
guugaccgagauuacgagc

SEQ ID NO: 3190867 - RNA, 19 nt, Artificial Sequence
  Description of Artificial Sequence: Synthetic oligonucleotide
auagcuucacauccagcug

SEQ ID NO: 3190868 - RNA, 19 nt, Artificial Sequence
  Description of Artificial Sequence: Synthetic oligonucleotide
ugaugauauuugaauugaa

SEQ ID NO: 3190869 - RNA, 19 nt, Artificial Sequence
  Description of Artificial Sequence: Synthetic oligonucleotide
guuguggagaaaauguuuc

SEQ ID NO: 3190870 - RNA, 19 nt, Artificial Sequence
  Description of Artificial Sequence: Synthetic oligonucleotide
cacccgagagguuugacug

SEQ ID NO: 3190871 - RNA, 19 nt, Artificial Sequence
  Description of Artificial Sequence: Synthetic oligonucleotide
aguaaguuuguccaguucc

SEQ ID NO: 3190872 - RNA, 19 nt, Artificial Sequence
  Description of Artificial Sequence: Synthetic oligonucleotide
gaugauaauccucucaggg

SEQ ID NO: 3190873 - RNA, 19 nt, Artificial Sequence
  Description of Artificial Sequence: Synthetic oligonucleotide
aaggcuuagaaucuucuac

SEQ ID NO: 3190874 - RNA, 19 nt, Artificial Sequence
  Description of Artificial Sequence: Synthetic oligonucleotide
auauccaaagaauccaugc

SEQ ID NO: 3190875 - RNA, 19 nt, Artificial Sequence
  Description of Artificial Sequence: Synthetic oligonucleotide
aagaugauaauccucucag

SEQ ID NO: 3190876 - RNA, 19 nt, Artificial Sequence
  Description of Artificial Sequence: Synthetic oligonucleotide
ucauucaaguuguauaugg

SEQ ID NO: 3190877 - RNA, 19 nt, Artificial Sequence
  Description of Artificial Sequence: Synthetic oligonucleotide
uuugucaauauccaaagaa

SEQ ID NO: 3190878 - RNA, 19 nt, Artificial Sequence
  Description of Artificial Sequence: Synthetic oligonucleotide
aauagagcguacuucagca

SEQ ID NO: 3190879 - RNA, 19 nt, Artificial Sequence
  Description of Artificial Sequence: Synthetic oligonucleotide
ugauaauccucucagggug

SEQ ID NO: 3190880 - RNA, 19 nt, Artificial Sequence
  Description of Artificial Sequence: Synthetic oligonucleotide
uggagaaacgguaagaaaa

SEQ ID NO: 3190881 - RNA, 19 nt, Artificial Sequence
  Description of Artificial Sequence: Synthetic oligonucleotide
ucagaauccaaacucugag

SEQ ID NO: 3190882 - RNA, 19 nt, Artificial Sequence
  Description of Artificial Sequence: Synthetic oligonucleotide
gauaauugcuccaucgugg

SEQ ID NO: 3190883 - RNA, 19 nt, Artificial Sequence
  Description of Artificial Sequence: Synthetic oligonucleotide
caaacucugaguaaguuug

SEQ ID NO: 3190884 - RNA, 19 nt, Artificial Sequence
  Description of Artificial Sequence: Synthetic oligonucleotide
aaauccaguucuugagggc

SEQ ID NO: 3190885 - RNA, 19 nt, Artificial Sequence
  Description of Artificial Sequence: Synthetic oligonucleotide
uuacuuuugguucugugac

SEQ ID NO: 3190886 - RNA, 19 nt, Artificial Sequence
  Description of Artificial Sequence: Synthetic oligonucleotide
uuuaguuguucuaguagag

SEQ ID NO: 3190887 - RNA, 19 nt, Artificial Sequence
  Description of Artificial Sequence: Synthetic oligonucleotide
aauccaaacucugaguaag

SEQ ID NO: 3190888 - RNA, 19 nt, Artificial Sequence
  Description of Artificial Sequence: Synthetic oligonucleotide
auaauugcuccaucguggc

SEQ ID NO: 3190889 - RNA, 19 nt, Artificial Sequence
  Description of Artificial Sequence: Synthetic oligonucleotide
gaaacgguaagaaaaguug

SEQ ID NO: 3190890 - RNA, 19 nt, Artificial Sequence
  Description of Artificial Sequence: Synthetic oligonucleotide
ucuaauugugcagugaugu

SEQ ID NO: 3190891 - RNA, 19 nt, Artificial Sequence
  Description of Artificial Sequence: Synthetic oligonucleotide
uauauggagaaacgguaag

SEQ ID NO: 3190892 - RNA, 19 nt, Artificial Sequence
  Description of Artificial Sequence: Synthetic oligonucleotide
aaacgguaagaaaaguugg

SEQ ID NO: 3190893 - RNA, 19 nt, Artificial Sequence
  Description of Artificial Sequence: Synthetic oligonucleotide
ucuacuacagauugcugag

SEQ ID NO: 3190894 - RNA, 19 nt, Artificial Sequence
  Description of Artificial Sequence: Synthetic oligonucleotide
ugauaauugcuccaucgug

SEQ ID NO: 3190895 - RNA, 19 nt, Artificial Sequence
  Description of Artificial Sequence: Synthetic oligonucleotide
aauugcuccaucguggcag

SEQ ID NO: 3190896 - RNA, 19 nt, Artificial Sequence
  Description of Artificial Sequence: Synthetic oligonucleotide
agaagugaugcuugaacgg

SEQ ID NO: 3190897 - RNA, 19 nt, Artificial Sequence
  Description of Artificial Sequence: Synthetic oligonucleotide
agaaucuucuacuacagau

SEQ ID NO: 3190898 - RNA, 19 nt, Artificial Sequence
  Description of Artificial Sequence: Synthetic oligonucleotide
uucuacuacagauugcuga

SEQ ID NO: 3190899 - RNA, 19 nt, Artificial Sequence
  Description of Artificial Sequence: Synthetic oligonucleotide
ugucaauauccaaagaauc

SEQ ID NO: 3190900 - RNA, 19 nt, Artificial Sequence
  Description of Artificial Sequence: Synthetic oligonucleotide
uuguauauggagaaacggu

SEQ ID NO: 3190901 - RNA, 19 nt, Artificial Sequence
  Description of Artificial Sequence: Synthetic oligonucleotide
uguauauggagaaacggua

SEQ ID NO: 3190902 - RNA, 19 nt, Artificial Sequence
  Description of Artificial Sequence: Synthetic oligonucleotide
aucucagagaaauagcaug

SEQ ID NO: 3190903 - RNA, 19 nt, Artificial Sequence
  Description of Artificial Sequence: Synthetic oligonucleotide
aacgguaagaaaaguuggc

SEQ ID NO: 3190904 - RNA, 19 nt, Artificial Sequence
  Description of Artificial Sequence: Synthetic oligonucleotide
caaauccaguucuugaggg

SEQ ID NO: 3190905 - RNA, 19 nt, Artificial Sequence
  Description of Artificial Sequence: Synthetic oligonucleotide
cucuauggagcagagaucg

SEQ ID NO: 3190906 - RNA, 19 nt, Artificial Sequence
  Description of Artificial Sequence: Synthetic oligonucleotide
agaaaaguuggccauauuu

SEQ ID NO: 3190907 - RNA, 19 nt, Artificial Sequence
  Description of Artificial Sequence: Synthetic oligonucleotide
aauuucuucaucugauaau

SEQ ID NO: 3190908 - RNA, 19 nt, Artificial Sequence
  Description of Artificial Sequence: Synthetic oligonucleotide
uaauagagcguacuucagc

SEQ ID NO: 3190909 - RNA, 19 nt, Artificial Sequence
  Description of Artificial Sequence: Synthetic oligonucleotide
aauuggcugccccugaugu

SEQ ID NO: 3190910 - RNA, 19 nt, Artificial Sequence
  Description of Artificial Sequence: Synthetic oligonucleotide
ugugacuugacgcuuacua

SEQ ID NO: 3190911 - RNA, 19 nt, Artificial Sequence
  Description of Artificial Sequence: Synthetic oligonucleotide
ugauguguugucaaaucca

SEQ ID NO: 3190912 - RNA, 19 nt, Artificial Sequence
  Description of Artificial Sequence: Synthetic oligonucleotide
agagaaauagcaugcucag

SEQ ID NO: 3190913 - RNA, 19 nt, Artificial Sequence
  Description of Artificial Sequence: Synthetic oligonucleotide
guuguauauggagaaacgg

SEQ ID NO: 3190914 - RNA, 19 nt, Artificial Sequence
  Description of Artificial Sequence: Synthetic oligonucleotide
cuugucacugucuucuucc

SEQ ID NO: 3190915 - RNA, 19 nt, Artificial Sequence
  Description of Artificial Sequence: Synthetic oligonucleotide
uugucaauauccaaagaau

SEQ ID NO: 3190916 - RNA, 19 nt, Artificial Sequence
  Description of Artificial Sequence: Synthetic oligonucleotide
gaagguuuaguuguucuag

SEQ ID NO: 3190917 - RNA, 19 nt, Artificial Sequence
  Description of Artificial Sequence: Synthetic oligonucleotide
ugugacgucagaguggugc

SEQ ID NO: 3190918 - RNA, 19 nt, Artificial Sequence
  Description of Artificial Sequence: Synthetic oligonucleotide
gcugauuugucacuaaagg

SEQ ID NO: 3190919 - RNA, 19 nt, Artificial Sequence
  Description of Artificial Sequence: Synthetic oligonucleotide
ugcugauuugucacuaaag

SEQ ID NO: 3190920 - RNA, 19 nt, Artificial Sequence
  Description of Artificial Sequence: Synthetic oligonucleotide
gaagaggagaucuuuucac

SEQ ID NO: 3190921 - RNA, 19 nt, Artificial Sequence
  Description of Artificial Sequence: Synthetic oligonucleotide
uacuacagauugcugagca

SEQ ID NO: 3190922 - RNA, 19 nt, Artificial Sequence
  Description of Artificial Sequence: Synthetic oligonucleotide
uauccaaagaauccaugcu

SEQ ID NO: 3190923 - RNA, 19 nt, Artificial Sequence
  Description of Artificial Sequence: Synthetic oligonucleotide
gaggagaucuuuucacugg

SEQ ID NO: 3190924 - RNA, 19 nt, Artificial Sequence
  Description of Artificial Sequence: Synthetic oligonucleotide
cagagcuucauucaaguug

SEQ ID NO: 3190925 - RNA, 19 nt, Artificial Sequence
  Description of Artificial Sequence: Synthetic oligonucleotide
acuacugagcucuugcucu

SEQ ID NO: 3190926 - RNA, 19 nt, Artificial Sequence
  Description of Artificial Sequence: Synthetic oligonucleotide
acgguaagaaaaguuggcc

SEQ ID NO: 3190927 - RNA, 19 nt, Artificial Sequence
  Description of Artificial Sequence: Synthetic oligonucleotide
accauggucaauuucuuca

SEQ ID NO: 3190928 - RNA, 19 nt, Artificial Sequence
  Description of Artificial Sequence: Synthetic oligonucleotide
uuuaggcuugucagaaucc

SEQ ID NO: 3190929 - RNA, 19 nt, Artificial Sequence
  Description of Artificial Sequence: Synthetic oligonucleotide
uuaguuguucuaguagagg

SEQ ID NO: 3190930 - RNA, 19 nt, Artificial Sequence
  Description of Artificial Sequence: Synthetic oligonucleotide
uauuuccugagccaauacu

SEQ ID NO: 3190931 - RNA, 19 nt, Artificial Sequence
  Description of Artificial Sequence: Synthetic oligonucleotide
gguucuuuaggcuugucag

SEQ ID NO: 3190932 - RNA, 19 nt, Artificial Sequence
  Description of Artificial Sequence: Synthetic oligonucleotide
augcucaguaauuggcugc

SEQ ID NO: 3190933 - RNA, 19 nt, Artificial Sequence
  Description of Artificial Sequence: Synthetic oligonucleotide
aagaggagaucuuuucacu

SEQ ID NO: 3190934 - RNA, 19 nt, Artificial Sequence
  Description of Artificial Sequence: Synthetic oligonucleotide
ugcuagaagcugcagaagu

SEQ ID NO: 3190935 - RNA, 19 nt, Artificial Sequence
  Description of Artificial Sequence: Synthetic oligonucleotide
ggaggaauugcuaauagag

SEQ ID NO: 3190936 - RNA, 19 nt, Artificial Sequence
  Description of Artificial Sequence: Synthetic oligonucleotide
acugggacaucucagagaa

SEQ ID NO: 3190937 - RNA, 19 nt, Artificial Sequence
  Description of Artificial Sequence: Synthetic oligonucleotide
guuuaguuguucuaguaga

SEQ ID NO: 3190938 - RNA, 19 nt, Artificial Sequence
  Description of Artificial Sequence: Synthetic oligonucleotide
ugucacuaaaggcuuagaa

SEQ ID NO: 3190939 - RNA, 19 nt, Artificial Sequence
  Description of Artificial Sequence: Synthetic oligonucleotide
uucugugacgucagagugg

SEQ ID NO: 3190940 - RNA, 19 nt, Artificial Sequence
  Description of Artificial Sequence: Synthetic oligonucleotide
cuugacgcuuacuauuucc

SEQ ID NO: 3190941 - RNA, 19 nt, Artificial Sequence
  Description of Artificial Sequence: Synthetic oligonucleotide
ugguucugugacuugacgc

SEQ ID NO: 3190942 - RNA, 19 nt, Artificial Sequence
  Description of Artificial Sequence: Synthetic oligonucleotide
uauggagcagagaucggcc

SEQ ID NO: 3190943 - RNA, 19 nt, Artificial Sequence
  Description of Artificial Sequence: Synthetic oligonucleotide
gauguguugucaaauccag

SEQ ID NO: 3190944 - RNA, 19 nt, Artificial Sequence
  Description of Artificial Sequence: Synthetic oligonucleotide
uuacugggacaucucagag

SEQ ID NO: 3190945 - RNA, 19 nt, Artificial Sequence
  Description of Artificial Sequence: Synthetic oligonucleotide
aaauagcaugcucaguaau

SEQ ID NO: 3190946 - RNA, 19 nt, Artificial Sequence
  Description of Artificial Sequence: Synthetic oligonucleotide
ucagcaucacucacggugc

SEQ ID NO: 3190947 - RNA, 19 nt, Artificial Sequence
  Description of Artificial Sequence: Synthetic oligonucleotide
uaaaggcuuagaaucuucu

SEQ ID NO: 3190948 - RNA, 19 nt, Artificial Sequence
  Description of Artificial Sequence: Synthetic oligonucleotide
cugauguguugucaaaucc

SEQ ID NO: 3190949 - RNA, 19 nt, Artificial Sequence
  Description of Artificial Sequence: Synthetic oligonucleotide
agaugauaauccucucagg

SEQ ID NO: 3190950 - RNA, 19 nt, Artificial Sequence
  Description of Artificial Sequence: Synthetic oligonucleotide
acgaagaggagaucuuuuc

SEQ ID NO: 3190951 - RNA, 19 nt, Artificial Sequence
  Description of Artificial Sequence: Synthetic oligonucleotide
aauauccaaagaauccaug

SEQ ID NO: 3190952 - RNA, 19 nt, Artificial Sequence
  Description of Artificial Sequence: Synthetic oligonucleotide
gaagaugauaauccucuca

SEQ ID NO: 3190953 - RNA, 19 nt, Artificial Sequence
  Description of Artificial Sequence: Synthetic oligonucleotide
ugauucagagcuucauuca

SEQ ID NO: 3190954 - RNA, 19 nt, Artificial Sequence
  Description of Artificial Sequence: Synthetic oligonucleotide
agaggagaucuuuucacug

SEQ ID NO: 3190955 - RNA, 19 nt, Artificial Sequence
  Description of Artificial Sequence: Synthetic oligonucleotide
agcaugcucaguaauuggc

SEQ ID NO: 3190956 - RNA, 19 nt, Artificial Sequence
  Description of Artificial Sequence: Synthetic oligonucleotide
agcucuugcucuauggagc

SEQ ID NO: 3190957 - RNA, 19 nt, Artificial Sequence
  Description of Artificial Sequence: Synthetic oligonucleotide
aagguuuaguuguucuagu

SEQ ID NO: 3190958 - RNA, 19 nt, Artificial Sequence
  Description of Artificial Sequence: Synthetic oligonucleotide
cuacagauugcugagcagc

SEQ ID NO: 3190959 - RNA, 19 nt, Artificial Sequence
  Description of Artificial Sequence: Synthetic oligonucleotide
aguuguauauggagaaacg

SEQ ID NO: 3190960 - RNA, 19 nt, Artificial Sequence
  Description of Artificial Sequence: Synthetic oligonucleotide
ucugaguaaguuuguccag

SEQ ID NO: 3190961 - RNA, 19 nt, Artificial Sequence
  Description of Artificial Sequence: Synthetic oligonucleotide
uuuccugacgaagaggaga

SEQ ID NO: 3190962 - RNA, 19 nt, Artificial Sequence
  Description of Artificial Sequence: Synthetic oligonucleotide
guuguucuaguagaggaag

SEQ ID NO: 3190963 - RNA, 19 nt, Artificial Sequence
  Description of Artificial Sequence: Synthetic oligonucleotide
gguuuaguuguucuaguag

SEQ ID NO: 3190964 - RNA, 19 nt, Artificial Sequence
  Description of Artificial Sequence: Synthetic oligonucleotide
aaguuuguccaguucccca

SEQ ID NO: 3190965 - RNA, 19 nt, Artificial Sequence
  Description of Artificial Sequence: Synthetic oligonucleotide
uuuccugagccaauacuac

SEQ ID NO: 3190966 - RNA, 19 nt, Artificial Sequence
  Description of Artificial Sequence: Synthetic oligonucleotide
agcagccucauccaugcuc

SEQ ID NO: 3190967 - RNA, 19 nt, Artificial Sequence
  Description of Artificial Sequence: Synthetic oligonucleotide
uauggagaaacgguaagaa

SEQ ID NO: 3190968 - RNA, 19 nt, Artificial Sequence
  Description of Artificial Sequence: Synthetic oligonucleotide
ugaugcuugaacgggagga

SEQ ID NO: 3190969 - RNA, 19 nt, Artificial Sequence
  Description of Artificial Sequence: Synthetic oligonucleotide
cuucaucugauaauugcuc

SEQ ID NO: 3190970 - RNA, 19 nt, Artificial Sequence
  Description of Artificial Sequence: Synthetic oligonucleotide
uucuaauugugcagugaug

SEQ ID NO: 3190971 - RNA, 19 nt, Artificial Sequence
  Description of Artificial Sequence: Synthetic oligonucleotide
aaugauuucaggucauuac

SEQ ID NO: 3190972 - RNA, 19 nt, Artificial Sequence
  Description of Artificial Sequence: Synthetic oligonucleotide
uuaaccaaccagcagaagg

SEQ ID NO: 3190973 - RNA, 19 nt, Artificial Sequence
  Description of Artificial Sequence: Synthetic oligonucleotide
aaauauuuuggccaucauc

SEQ ID NO: 3190974 - RNA, 19 nt, Artificial Sequence
  Description of Artificial Sequence: Synthetic oligonucleotide
aauauuuuggccaucaucu

SEQ ID NO: 3190975 - RNA, 19 nt, Artificial Sequence
  Description of Artificial Sequence: Synthetic oligonucleotide
guaucagucgacuugaagg

SEQ ID NO: 3190976 - RNA, 19 nt, Artificial Sequence
  Description of Artificial Sequence: Synthetic oligonucleotide
gaauuauccagcauuaagg

SEQ ID NO: 3190977 - RNA, 19 nt, Artificial Sequence
  Description of Artificial Sequence: Synthetic oligonucleotide
aaggguuaaaaucaccauc

SEQ ID NO: 3190978 - RNA, 19 nt, Artificial Sequence
  Description of Artificial Sequence: Synthetic oligonucleotide
uuaaguuuguguaagccug

SEQ ID NO: 3190979 - RNA, 19 nt, Artificial Sequence
  Description of Artificial Sequence: Synthetic oligonucleotide
augauuucaggucauuacc

SEQ ID NO: 3190980 - RNA, 19 nt, Artificial Sequence
  Description of Artificial Sequence: Synthetic oligonucleotide
auuaccuucuuccaaauug

SEQ ID NO: 3190981 - RNA, 19 nt, Artificial Sequence
  Description of Artificial Sequence: Synthetic oligonucleotide
aauguuaaucucucuaaug

SEQ ID NO: 3190982 - RNA, 19 nt, Artificial Sequence
  Description of Artificial Sequence: Synthetic oligonucleotide
uguuuauuucugauggugg

SEQ ID NO: 3190983 - RNA, 19 nt, Artificial Sequence
  Description of Artificial Sequence: Synthetic oligonucleotide
aaacaguccagucucaucu

SEQ ID NO: 3190984 - RNA, 19 nt, Artificial Sequence
  Description of Artificial Sequence: Synthetic oligonucleotide
aaucuuucauuucuaaugu

SEQ ID NO: 3190985 - RNA, 19 nt, Artificial Sequence
  Description of Artificial Sequence: Synthetic oligonucleotide
aauuauccagcauuaaggu

SEQ ID NO: 3190986 - RNA, 19 nt, Artificial Sequence
  Description of Artificial Sequence: Synthetic oligonucleotide
uuauccagcauuaagguau

SEQ ID NO: 3190987 - RNA, 19 nt, Artificial Sequence
  Description of Artificial Sequence: Synthetic oligonucleotide
uaaccaaccagcagaaggg

SEQ ID NO: 3190988 - RNA, 19 nt, Artificial Sequence
  Description of Artificial Sequence: Synthetic oligonucleotide
gauccaaaaggcugaaucg

SEQ ID NO: 3190989 - RNA, 19 nt, Artificial Sequence
  Description of Artificial Sequence: Synthetic oligonucleotide
ugugccgcuguuuaaagcg

SEQ ID NO: 3190990 - RNA, 19 nt, Artificial Sequence
  Description of Artificial Sequence: Synthetic oligonucleotide
uuuugcaaauauuuuggcc

SEQ ID NO: 3190991 - RNA, 19 nt, Artificial Sequence
  Description of Artificial Sequence: Synthetic oligonucleotide
ucuucaaacgaguugugcc

SEQ ID NO: 3190992 - RNA, 19 nt, Artificial Sequence
  Description of Artificial Sequence: Synthetic oligonucleotide
guuuguguaagccuguugc

SEQ ID NO: 3190993 - RNA, 19 nt, Artificial Sequence
  Description of Artificial Sequence: Synthetic oligonucleotide
ugcauuguagaucuguucu

SEQ ID NO: 3190994 - RNA, 19 nt, Artificial Sequence
  Description of Artificial Sequence: Synthetic oligonucleotide
agugacucuuucuucaaac

SEQ ID NO: 3190995 - RNA, 19 nt, Artificial Sequence
  Description of Artificial Sequence: Synthetic oligonucleotide
aaggcugaaucgaugaggc

SEQ ID NO: 3190996 - RNA, 19 nt, Artificial Sequence
  Description of Artificial Sequence: Synthetic oligonucleotide
aucuaacaaauucucaguc

SEQ ID NO: 3190997 - RNA, 19 nt, Artificial Sequence
  Description of Artificial Sequence: Synthetic oligonucleotide
uaagguaucagucgacuug

SEQ ID NO: 3190998 - RNA, 19 nt, Artificial Sequence
  Description of Artificial Sequence: Synthetic oligonucleotide
ugauccaaaaggcugaauc

SEQ ID NO: 3190999 - RNA, 19 nt, Artificial Sequence
  Description of Artificial Sequence: Synthetic oligonucleotide
ucuaacaaauucucagucc

SEQ ID NO: 3191000 - RNA, 19 nt, Artificial Sequence
  Description of Artificial Sequence: Synthetic oligonucleotide
aaaggcugaaucgaugagg

SEQ ID NO: 3191001 - RNA, 19 nt, Artificial Sequence
  Description of Artificial Sequence: Synthetic oligonucleotide
aucucucuaaugcugugcc

SEQ ID NO: 3191002 - RNA, 19 nt, Artificial Sequence
  Description of Artificial Sequence: Synthetic oligonucleotide
auuaccgaaguccuggaag

SEQ ID NO: 3191003 - RNA, 19 nt, Artificial Sequence
  Description of Artificial Sequence: Synthetic oligonucleotide
gacauuuucauuuggaugu

SEQ ID NO: 3191004 - RNA, 19 nt, Artificial Sequence
  Description of Artificial Sequence: Synthetic oligonucleotide
uuuucguacuaccagucug

SEQ ID NO: 3191005 - RNA, 19 nt, Artificial Sequence
  Description of Artificial Sequence: Synthetic oligonucleotide
aaaguuuaaguuuguguaa

SEQ ID NO: 3191006 - RNA, 19 nt, Artificial Sequence
  Description of Artificial Sequence: Synthetic oligonucleotide
uuaccgaaguccuggaagg

SEQ ID NO: 3191007 - RNA, 19 nt, Artificial Sequence
  Description of Artificial Sequence: Synthetic oligonucleotide
uaagguuccaugccauugg

SEQ ID NO: 3191008 - RNA, 19 nt, Artificial Sequence
  Description of Artificial Sequence: Synthetic oligonucleotide
aaucgaugaggcuauauuu

SEQ ID NO: 3191009 - RNA, 19 nt, Artificial Sequence
  Description of Artificial Sequence: Synthetic oligonucleotide
aaaacaguccagucucauc

SEQ ID NO: 3191010 - RNA, 19 nt, Artificial Sequence
  Description of Artificial Sequence: Synthetic oligonucleotide
aaucucucuaaugcugugc

SEQ ID NO: 3191011 - RNA, 19 nt, Artificial Sequence
  Description of Artificial Sequence: Synthetic oligonucleotide
aaguuuaaguuuguguaag

SEQ ID NO: 3191012 - RNA, 19 nt, Artificial Sequence
  Description of Artificial Sequence: Synthetic oligonucleotide
ucgauaaaaucucuaaaau

SEQ ID NO: 3191013 - RNA, 19 nt, Artificial Sequence
  Description of Artificial Sequence: Synthetic oligonucleotide
aaggaucgagguuucuucg

SEQ ID NO: 3191014 - RNA, 19 nt, Artificial Sequence
  Description of Artificial Sequence: Synthetic oligonucleotide
uuuaaagcggguuaaccaa

SEQ ID NO: 3191015 - RNA, 19 nt, Artificial Sequence
  Description of Artificial Sequence: Synthetic oligonucleotide
ucuuucuucaaacgaguug

SEQ ID NO: 3191016 - RNA, 19 nt, Artificial Sequence
  Description of Artificial Sequence: Synthetic oligonucleotide
aaauuguucugcagaagac

SEQ ID NO: 3191017 - RNA, 19 nt, Artificial Sequence
  Description of Artificial Sequence: Synthetic oligonucleotide
gaugaggcuauauuuggug

SEQ ID NO: 3191018 - RNA, 19 nt, Artificial Sequence
  Description of Artificial Sequence: Synthetic oligonucleotide
caggucauuaccuucuucc

SEQ ID NO: 3191019 - RNA, 19 nt, Artificial Sequence
  Description of Artificial Sequence: Synthetic oligonucleotide
ucgaugaggcuauauuugg

SEQ ID NO: 3191020 - RNA, 19 nt, Artificial Sequence
  Description of Artificial Sequence: Synthetic oligonucleotide
cagucugucagguagaauc

SEQ ID NO: 3191021 - RNA, 19 nt, Artificial Sequence
  Description of Artificial Sequence: Synthetic oligonucleotide
uucucaguccauuggagag

SEQ ID NO: 3191022 - RNA, 19 nt, Artificial Sequence
  Description of Artificial Sequence: Synthetic oligonucleotide
uauuuuggccaucaucuga

SEQ ID NO: 3191023 - RNA, 19 nt, Artificial Sequence
  Description of Artificial Sequence: Synthetic oligonucleotide
cuucgcuuugcccacaacg

SEQ ID NO: 3191024 - RNA, 19 nt, Artificial Sequence
  Description of Artificial Sequence: Synthetic oligonucleotide
acgaguugugcccaggaac

SEQ ID NO: 3191025 - RNA, 19 nt, Artificial Sequence
  Description of Artificial Sequence: Synthetic oligonucleotide
gucagguagaaucauauca

SEQ ID NO: 3191026 - RNA, 19 nt, Artificial Sequence
  Description of Artificial Sequence: Synthetic oligonucleotide
guugcuaugaccuccccug

SEQ ID NO: 3191027 - RNA, 19 nt, Artificial Sequence
  Description of Artificial Sequence: Synthetic oligonucleotide
auuucaggucauuaccuuc

SEQ ID NO: 3191028 - RNA, 19 nt, Artificial Sequence
  Description of Artificial Sequence: Synthetic oligonucleotide
uaucagucgacuugaagga

SEQ ID NO: 3191029 - RNA, 19 nt, Artificial Sequence
  Description of Artificial Sequence: Synthetic oligonucleotide
acgugcauccaacaaaguc

SEQ ID NO: 3191030 - RNA, 19 nt, Artificial Sequence
  Description of Artificial Sequence: Synthetic oligonucleotide
agugcguuuaccuuuaauu

SEQ ID NO: 3191031 - RNA, 19 nt, Artificial Sequence
  Description of Artificial Sequence: Synthetic oligonucleotide
uuacuaagguuccaugcca

SEQ ID NO: 3191032 - RNA, 19 nt, Artificial Sequence
  Description of Artificial Sequence: Synthetic oligonucleotide
aaugguaaccggcuuuacu

SEQ ID NO: 3191033 - RNA, 19 nt, Artificial Sequence
  Description of Artificial Sequence: Synthetic oligonucleotide
uuuaauuaccgaaguccug

SEQ ID NO: 3191034 - RNA, 19 nt, Artificial Sequence
  Description of Artificial Sequence: Synthetic oligonucleotide
ugacucuuucuucaaacga

SEQ ID NO: 3191035 - RNA, 19 nt, Artificial Sequence
  Description of Artificial Sequence: Synthetic oligonucleotide
uguuaaucucucuaaugcu

SEQ ID NO: 3191036 - RNA, 19 nt, Artificial Sequence
  Description of Artificial Sequence: Synthetic oligonucleotide
caacacauaacagugacuc

SEQ ID NO: 3191037 - RNA, 19 nt, Artificial Sequence
  Description of Artificial Sequence: Synthetic oligonucleotide
caaaguuuaaguuugugua

SEQ ID NO: 3191038 - RNA, 19 nt, Artificial Sequence
  Description of Artificial Sequence: Synthetic oligonucleotide
guagaaucauaucaccuug

SEQ ID NO: 3191039 - RNA, 19 nt, Artificial Sequence
  Description of Artificial Sequence: Synthetic oligonucleotide
accuuguuguucuagauaa

SEQ ID NO: 3191040 - RNA, 19 nt, Artificial Sequence
  Description of Artificial Sequence: Synthetic oligonucleotide
uucauaaacgugcauccaa

SEQ ID NO: 3191041 - RNA, 19 nt, Artificial Sequence
  Description of Artificial Sequence: Synthetic oligonucleotide
uuucaggucauuaccuucu

SEQ ID NO: 3191042 - RNA, 19 nt, Artificial Sequence
  Description of Artificial Sequence: Synthetic oligonucleotide
uuccagaaugauuucaggu

SEQ ID NO: 3191043 - RNA, 19 nt, Artificial Sequence
  Description of Artificial Sequence: Synthetic oligonucleotide
guuuauuucugaugguggc

SEQ ID NO: 3191044 - RNA, 19 nt, Artificial Sequence
  Description of Artificial Sequence: Synthetic oligonucleotide
ucauaaacgugcauccaac

SEQ ID NO: 3191045 - RNA, 19 nt, Artificial Sequence
  Description of Artificial Sequence: Synthetic oligonucleotide
auaguuucuuuucauaguu

SEQ ID NO: 3191046 - RNA, 19 nt, Artificial Sequence
  Description of Artificial Sequence: Synthetic oligonucleotide
uuaccuucuuccaaauugu

SEQ ID NO: 3191047 - RNA, 19 nt, Artificial Sequence
  Description of Artificial Sequence: Synthetic oligonucleotide
cuaccagucugucagguag

SEQ ID NO: 3191048 - RNA, 19 nt, Artificial Sequence
  Description of Artificial Sequence: Synthetic oligonucleotide
ugcguuuaccuuuaauuac

SEQ ID NO: 3191049 - RNA, 19 nt, Artificial Sequence
  Description of Artificial Sequence: Synthetic oligonucleotide
uuuucauuuggaugugcug

SEQ ID NO: 3191050 - RNA, 19 nt, Artificial Sequence
  Description of Artificial Sequence: Synthetic oligonucleotide
ucuggcugcaaauucuccc

SEQ ID NO: 3191051 - RNA, 19 nt, Artificial Sequence
  Description of Artificial Sequence: Synthetic oligonucleotide
ucaggacauuuucauuugg

SEQ ID NO: 3191052 - RNA, 19 nt, Artificial Sequence
  Description of Artificial Sequence: Synthetic oligonucleotide
uguuuaaagcggguuaacc

SEQ ID NO: 3191053 - RNA, 19 nt, Artificial Sequence
  Description of Artificial Sequence: Synthetic oligonucleotide
auuuuggccaucaucugac

SEQ ID NO: 3191054 - RNA, 19 nt, Artificial Sequence
  Description of Artificial Sequence: Synthetic oligonucleotide
ggaauuauccagcauuaag

SEQ ID NO: 3191055 - RNA, 19 nt, Artificial Sequence
  Description of Artificial Sequence: Synthetic oligonucleotide
gacucuuucuucaaacgag

SEQ ID NO: 3191056 - RNA, 19 nt, Artificial Sequence
  Description of Artificial Sequence: Synthetic oligonucleotide
aagcggguuaaccaaccag

SEQ ID NO: 3191057 - RNA, 19 nt, Artificial Sequence
  Description of Artificial Sequence: Synthetic oligonucleotide
uuaaucuuucauuucuaau

SEQ ID NO: 3191058 - RNA, 19 nt, Artificial Sequence
  Description of Artificial Sequence: Synthetic oligonucleotide
agaccugcgcgauaguuuc

SEQ ID NO: 3191059 - RNA, 19 nt, Artificial Sequence
  Description of Artificial Sequence: Synthetic oligonucleotide
gguacaacacauaacagug

SEQ ID NO: 3191060 - RNA, 19 nt, Artificial Sequence
  Description of Artificial Sequence: Synthetic oligonucleotide
agcggguuaaccaaccagc

SEQ ID NO: 3191061 - RNA, 19 nt, Artificial Sequence
  Description of Artificial Sequence: Synthetic oligonucleotide
uaaaaucucuaaaauucuu

SEQ ID NO: 3191062 - RNA, 19 nt, Artificial Sequence
  Description of Artificial Sequence: Synthetic oligonucleotide
agcucuaucaucuccacuu

SEQ ID NO: 3191063 - RNA, 19 nt, Artificial Sequence
  Description of Artificial Sequence: Synthetic oligonucleotide
guuaaucucucuaaugcug

SEQ ID NO: 3191064 - RNA, 19 nt, Artificial Sequence
  Description of Artificial Sequence: Synthetic oligonucleotide
agcagaaggguuaaaauca

SEQ ID NO: 3191065 - RNA, 19 nt, Artificial Sequence
  Description of Artificial Sequence: Synthetic oligonucleotide
uaauguuaaucucucuaau

SEQ ID NO: 3191066 - RNA, 19 nt, Artificial Sequence
  Description of Artificial Sequence: Synthetic oligonucleotide
ggcuauuucauaaacgugc

SEQ ID NO: 3191067 - RNA, 19 nt, Artificial Sequence
  Description of Artificial Sequence: Synthetic oligonucleotide
caaauuguucugcagaaga

SEQ ID NO: 3191068 - RNA, 19 nt, Artificial Sequence
  Description of Artificial Sequence: Synthetic oligonucleotide
aaaaucucuaaaauucuua

SEQ ID NO: 3191069 - RNA, 19 nt, Artificial Sequence
  Description of Artificial Sequence: Synthetic oligonucleotide
aauucucaguccauuggag

SEQ ID NO: 3191070 - RNA, 19 nt, Artificial Sequence
  Description of Artificial Sequence: Synthetic oligonucleotide
uggagagcaguuuccaagc

SEQ ID NO: 3191071 - RNA, 19 nt, Artificial Sequence
  Description of Artificial Sequence: Synthetic oligonucleotide
aauucagaaagauagaugg

SEQ ID NO: 3191072 - RNA, 19 nt, Artificial Sequence
  Description of Artificial Sequence: Synthetic oligonucleotide
aauuuuguuacccacuagc

SEQ ID NO: 3191073 - RNA, 19 nt, Artificial Sequence
  Description of Artificial Sequence: Synthetic oligonucleotide
aauaccaagacuuuuccac

SEQ ID NO: 3191074 - RNA, 19 nt, Artificial Sequence
  Description of Artificial Sequence: Synthetic oligonucleotide
uugaaaagcaucaucaggg

SEQ ID NO: 3191075 - RNA, 19 nt, Artificial Sequence
  Description of Artificial Sequence: Synthetic oligonucleotide
uuucuuuauaacuagacag

SEQ ID NO: 3191076 - RNA, 19 nt, Artificial Sequence
  Description of Artificial Sequence: Synthetic oligonucleotide
aacaacuagaguuaucagg

SEQ ID NO: 3191077 - RNA, 19 nt, Artificial Sequence
  Description of Artificial Sequence: Synthetic oligonucleotide
ugugcuaauucuuuaaagg

SEQ ID NO: 3191078 - RNA, 19 nt, Artificial Sequence
  Description of Artificial Sequence: Synthetic oligonucleotide
aauagcagaugaugaagcc

SEQ ID NO: 3191079 - RNA, 19 nt, Artificial Sequence
  Description of Artificial Sequence: Synthetic oligonucleotide
uuaagaaaagaccaggacu

SEQ ID NO: 3191080 - RNA, 19 nt, Artificial Sequence
  Description of Artificial Sequence: Synthetic oligonucleotide
uaaugcucaucuaugaagg

SEQ ID NO: 3191081 - RNA, 19 nt, Artificial Sequence
  Description of Artificial Sequence: Synthetic oligonucleotide
aaaucuaaauagcauuguc

SEQ ID NO: 3191082 - RNA, 19 nt, Artificial Sequence
  Description of Artificial Sequence: Synthetic oligonucleotide
uaaaaucuaaauagcauug

SEQ ID NO: 3191083 - RNA, 19 nt, Artificial Sequence
  Description of Artificial Sequence: Synthetic oligonucleotide
uaauucuuuuccaucaagg

SEQ ID NO: 3191084 - RNA, 19 nt, Artificial Sequence
  Description of Artificial Sequence: Synthetic oligonucleotide
uccacuuaagaaaagacca

SEQ ID NO: 3191085 - RNA, 19 nt, Artificial Sequence
  Description of Artificial Sequence: Synthetic oligonucleotide
agauuugugaaaugcaaac

SEQ ID NO: 3191086 - RNA, 19 nt, Artificial Sequence
  Description of Artificial Sequence: Synthetic oligonucleotide
aucaggcaaaagcagaucc

SEQ ID NO: 3191087 - RNA, 19 nt, Artificial Sequence
  Description of Artificial Sequence: Synthetic oligonucleotide
uaugaaggacucaagaaga

SEQ ID NO: 3191088 - RNA, 19 nt, Artificial Sequence
  Description of Artificial Sequence: Synthetic oligonucleotide
aaagaccaggacuugaucu

SEQ ID NO: 3191089 - RNA, 19 nt, Artificial Sequence
  Description of Artificial Sequence: Synthetic oligonucleotide
aaugaagcuacucuuuaca

SEQ ID NO: 3191090 - RNA, 19 nt, Artificial Sequence
  Description of Artificial Sequence: Synthetic oligonucleotide
aacuucacugugcuaauuc

SEQ ID NO: 3191091 - RNA, 19 nt, Artificial Sequence
  Description of Artificial Sequence: Synthetic oligonucleotide
acagcauacgaaaugaagc

SEQ ID NO: 3191092 - RNA, 19 nt, Artificial Sequence
  Description of Artificial Sequence: Synthetic oligonucleotide
aucuaaauagcauugucug

SEQ ID NO: 3191093 - RNA, 19 nt, Artificial Sequence
  Description of Artificial Sequence: Synthetic oligonucleotide
uuuucuuuauaacuagaca

SEQ ID NO: 3191094 - RNA, 19 nt, Artificial Sequence
  Description of Artificial Sequence: Synthetic oligonucleotide
uucuuuauaacuagacagc

SEQ ID NO: 3191095 - RNA, 19 nt, Artificial Sequence
  Description of Artificial Sequence: Synthetic oligonucleotide
aagacuuuuccacuuaaga

SEQ ID NO: 3191096 - RNA, 19 nt, Artificial Sequence
  Description of Artificial Sequence: Synthetic oligonucleotide
aguaauuucucuaaugcuc

SEQ ID NO: 3191097 - RNA, 19 nt, Artificial Sequence
  Description of Artificial Sequence: Synthetic oligonucleotide
ucaguuuauauuaucagua

SEQ ID NO: 3191098 - RNA, 19 nt, Artificial Sequence
  Description of Artificial Sequence: Synthetic oligonucleotide
cugagcacugcaaauaugg

SEQ ID NO: 3191099 - RNA, 19 nt, Artificial Sequence
  Description of Artificial Sequence: Synthetic oligonucleotide
uaagaaaagaccaggacuu

SEQ ID NO: 3191100 - RNA, 19 nt, Artificial Sequence
  Description of Artificial Sequence: Synthetic oligonucleotide
uggaauguuaauuuuauuu

SEQ ID NO: 3191101 - RNA, 19 nt, Artificial Sequence
  Description of Artificial Sequence: Synthetic oligonucleotide
gaaaauaagcuccuugaac

SEQ ID NO: 3191102 - RNA, 19 nt, Artificial Sequence
  Description of Artificial Sequence: Synthetic oligonucleotide
uuccacuuaagaaaagacc

SEQ ID NO: 3191103 - RNA, 19 nt, Artificial Sequence
  Description of Artificial Sequence: Synthetic oligonucleotide
ucauugucaauccucaccu

SEQ ID NO: 3191104 - RNA, 19 nt, Artificial Sequence
  Description of Artificial Sequence: Synthetic oligonucleotide
cuaugaaggacucaagaag

SEQ ID NO: 3191105 - RNA, 19 nt, Artificial Sequence
  Description of Artificial Sequence: Synthetic oligonucleotide
cuugaaaagcaucaucagg

SEQ ID NO: 3191106 - RNA, 19 nt, Artificial Sequence
  Description of Artificial Sequence: Synthetic oligonucleotide
gauagcauggauuccuucc

SEQ ID NO: 3191107 - RNA, 19 nt, Artificial Sequence
  Description of Artificial Sequence: Synthetic oligonucleotide
cuuuuaucauccuagcuac

SEQ ID NO: 3191108 - RNA, 19 nt, Artificial Sequence
  Description of Artificial Sequence: Synthetic oligonucleotide
aacuauucuagccucuuca

SEQ ID NO: 3191109 - RNA, 19 nt, Artificial Sequence
  Description of Artificial Sequence: Synthetic oligonucleotide
ucuaaauagcauugucugg

SEQ ID NO: 3191110 - RNA, 19 nt, Artificial Sequence
  Description of Artificial Sequence: Synthetic oligonucleotide
aaagauagaugggaaggac

SEQ ID NO: 3191111 - RNA, 19 nt, Artificial Sequence
  Description of Artificial Sequence: Synthetic oligonucleotide
cuaaugcucaucuaugaag

SEQ ID NO: 3191112 - RNA, 19 nt, Artificial Sequence
  Description of Artificial Sequence: Synthetic oligonucleotide
uuaacaagccaucaguuua

SEQ ID NO: 3191113 - RNA, 19 nt, Artificial Sequence
  Description of Artificial Sequence: Synthetic oligonucleotide
uacgaaaugaagcuacucu

SEQ ID NO: 3191114 - RNA, 19 nt, Artificial Sequence
  Description of Artificial Sequence: Synthetic oligonucleotide
ucaaggauagcauggauuc

SEQ ID NO: 3191115 - RNA, 19 nt, Artificial Sequence
  Description of Artificial Sequence: Synthetic oligonucleotide
uugcuuugaacuauucuag

SEQ ID NO: 3191116 - RNA, 19 nt, Artificial Sequence
  Description of Artificial Sequence: Synthetic oligonucleotide
gaagcuacucuuuacagga

SEQ ID NO: 3191117 - RNA, 19 nt, Artificial Sequence
  Description of Artificial Sequence: Synthetic oligonucleotide
uuaauucuuuuccaucaag

SEQ ID NO: 3191118 - RNA, 19 nt, Artificial Sequence
  Description of Artificial Sequence: Synthetic oligonucleotide
augauuggcggucagugac

SEQ ID NO: 3191119 - RNA, 19 nt, Artificial Sequence
  Description of Artificial Sequence: Synthetic oligonucleotide
aaaagcaucaucagggcug

SEQ ID NO: 3191120 - RNA, 19 nt, Artificial Sequence
  Description of Artificial Sequence: Synthetic oligonucleotide
ugaagcuacucuuuacagg

SEQ ID NO: 3191121 - RNA, 19 nt, Artificial Sequence
  Description of Artificial Sequence: Synthetic oligonucleotide
uggaaaauaagcuccuuga

SEQ ID NO: 3191122 - RNA, 19 nt, Artificial Sequence
  Description of Artificial Sequence: Synthetic oligonucleotide
cacaaggggaauuucauag

SEQ ID NO: 3191123 - RNA, 19 nt, Artificial Sequence
  Description of Artificial Sequence: Synthetic oligonucleotide
auuucucuaaugcucaucu

SEQ ID NO: 3191124 - RNA, 19 nt, Artificial Sequence
  Description of Artificial Sequence: Synthetic oligonucleotide
aaucuaaauagcauugucu

SEQ ID NO: 3191125 - RNA, 19 nt, Artificial Sequence
  Description of Artificial Sequence: Synthetic oligonucleotide
aaaagaccaggacuugauc

SEQ ID NO: 3191126 - RNA, 19 nt, Artificial Sequence
  Description of Artificial Sequence: Synthetic oligonucleotide
agugaguccuuuuaucuuc

SEQ ID NO: 3191127 - RNA, 19 nt, Artificial Sequence
  Description of Artificial Sequence: Synthetic oligonucleotide
ucagugacagaauagcaga

SEQ ID NO: 3191128 - RNA, 19 nt, Artificial Sequence
  Description of Artificial Sequence: Synthetic oligonucleotide
uccaagauauccaaguaaa

SEQ ID NO: 3191129 - RNA, 19 nt, Artificial Sequence
  Description of Artificial Sequence: Synthetic oligonucleotide
gguaauauauuguaaaauc

SEQ ID NO: 3191130 - RNA, 19 nt, Artificial Sequence
  Description of Artificial Sequence: Synthetic oligonucleotide
ucuuuucuuuucuagugag

SEQ ID NO: 3191131 - RNA, 19 nt, Artificial Sequence
  Description of Artificial Sequence: Synthetic oligonucleotide
aacuagacagcauacgaaa

SEQ ID NO: 3191132 - RNA, 19 nt, Artificial Sequence
  Description of Artificial Sequence: Synthetic oligonucleotide
caagauauccaaguaaagc

SEQ ID NO: 3191133 - RNA, 19 nt, Artificial Sequence
  Description of Artificial Sequence: Synthetic oligonucleotide
auucuuuaaaggugugugg

SEQ ID NO: 3191134 - RNA, 19 nt, Artificial Sequence
  Description of Artificial Sequence: Synthetic oligonucleotide
auuugugaaaugcaaacaa

SEQ ID NO: 3191135 - RNA, 19 nt, Artificial Sequence
  Description of Artificial Sequence: Synthetic oligonucleotide
aguaucaugucauguuuuc

SEQ ID NO: 3191136 - RNA, 19 nt, Artificial Sequence
  Description of Artificial Sequence: Synthetic oligonucleotide
cauaguaacuucacugugc

SEQ ID NO: 3191137 - RNA, 19 nt, Artificial Sequence
  Description of Artificial Sequence: Synthetic oligonucleotide
ggaauguuaauuuuauuug

SEQ ID NO: 3191138 - RNA, 19 nt, Artificial Sequence
  Description of Artificial Sequence: Synthetic oligonucleotide
uucagaaagauagauggga

SEQ ID NO: 3191139 - RNA, 19 nt, Artificial Sequence
  Description of Artificial Sequence: Synthetic oligonucleotide
ucuaugaaggacucaagaa

SEQ ID NO: 3191140 - RNA, 19 nt, Artificial Sequence
  Description of Artificial Sequence: Synthetic oligonucleotide
gauauccaaguaaagcagg

SEQ ID NO: 3191141 - RNA, 19 nt, Artificial Sequence
  Description of Artificial Sequence: Synthetic oligonucleotide
aucaguuuauauuaucagu

SEQ ID NO: 3191142 - RNA, 19 nt, Artificial Sequence
  Description of Artificial Sequence: Synthetic oligonucleotide
aauaugggcacauguaauu

SEQ ID NO: 3191143 - RNA, 19 nt, Artificial Sequence
  Description of Artificial Sequence: Synthetic oligonucleotide
cucuuuacaggaaaaugag

SEQ ID NO: 3191144 - RNA, 19 nt, Artificial Sequence
  Description of Artificial Sequence: Synthetic oligonucleotide
auagcagaugaugaagccc

SEQ ID NO: 3191145 - RNA, 19 nt, Artificial Sequence
  Description of Artificial Sequence: Synthetic oligonucleotide
uaucauccuagcuacaagu

SEQ ID NO: 3191146 - RNA, 19 nt, Artificial Sequence
  Description of Artificial Sequence: Synthetic oligonucleotide
agaaggcacaauuguauuc

SEQ ID NO: 3191147 - RNA, 19 nt, Artificial Sequence
  Description of Artificial Sequence: Synthetic oligonucleotide
aucauaguaacuucacugu

SEQ ID NO: 3191148 - RNA, 19 nt, Artificial Sequence
  Description of Artificial Sequence: Synthetic oligonucleotide
uacaaguuugcauauuuuc

SEQ ID NO: 3191149 - RNA, 19 nt, Artificial Sequence
  Description of Artificial Sequence: Synthetic oligonucleotide
auuuuauuugguaauauau

SEQ ID NO: 3191150 - RNA, 19 nt, Artificial Sequence
  Description of Artificial Sequence: Synthetic oligonucleotide
aagcagauccccuaagccu

SEQ ID NO: 3191151 - RNA, 19 nt, Artificial Sequence
  Description of Artificial Sequence: Synthetic oligonucleotide
guauucucgagcaagauuc

SEQ ID NO: 3191152 - RNA, 19 nt, Artificial Sequence
  Description of Artificial Sequence: Synthetic oligonucleotide
ucuuuauaacuagacagca

SEQ ID NO: 3191153 - RNA, 19 nt, Artificial Sequence
  Description of Artificial Sequence: Synthetic oligonucleotide
uacuaagccuugaaaagca

SEQ ID NO: 3191154 - RNA, 19 nt, Artificial Sequence
  Description of Artificial Sequence: Synthetic oligonucleotide
agaaauaccaagacuuuuc

SEQ ID NO: 3191155 - RNA, 19 nt, Artificial Sequence
  Description of Artificial Sequence: Synthetic oligonucleotide
ucauaguaacuucacugug

SEQ ID NO: 3191156 - RNA, 19 nt, Artificial Sequence
  Description of Artificial Sequence: Synthetic oligonucleotide
uacagauuugugaaaugca

SEQ ID NO: 3191157 - RNA, 19 nt, Artificial Sequence
  Description of Artificial Sequence: Synthetic oligonucleotide
caucaguuuauauuaucag

SEQ ID NO: 3191158 - RNA, 19 nt, Artificial Sequence
  Description of Artificial Sequence: Synthetic oligonucleotide
ugcucaucuaugaaggacu

SEQ ID NO: 3191159 - RNA, 19 nt, Artificial Sequence
  Description of Artificial Sequence: Synthetic oligonucleotide
aguaacuucacugugcuaa

SEQ ID NO: 3191160 - RNA, 19 nt, Artificial Sequence
  Description of Artificial Sequence: Synthetic oligonucleotide
gacucaagaagaaauacca

SEQ ID NO: 3191161 - RNA, 19 nt, Artificial Sequence
  Description of Artificial Sequence: Synthetic oligonucleotide
aaauaccaagacuuuucca

SEQ ID NO: 3191162 - RNA, 19 nt, Artificial Sequence
  Description of Artificial Sequence: Synthetic oligonucleotide
aagccuuuuaucauccuag

SEQ ID NO: 3191163 - RNA, 19 nt, Artificial Sequence
  Description of Artificial Sequence: Synthetic oligonucleotide
ucuuuaauucuuuuccauc

SEQ ID NO: 3191164 - RNA, 19 nt, Artificial Sequence
  Description of Artificial Sequence: Synthetic oligonucleotide
auaguaacuucacugugcu

SEQ ID NO: 3191165 - RNA, 19 nt, Artificial Sequence
  Description of Artificial Sequence: Synthetic oligonucleotide
uuaucauccuagcuacaag

SEQ ID NO: 3191166 - RNA, 19 nt, Artificial Sequence
  Description of Artificial Sequence: Synthetic oligonucleotide
aaaaucuaaauagcauugu

SEQ ID NO: 3191167 - RNA, 19 nt, Artificial Sequence
  Description of Artificial Sequence: Synthetic oligonucleotide
cauccuagcuacaaguuug

SEQ ID NO: 3191168 - RNA, 19 nt, Artificial Sequence
  Description of Artificial Sequence: Synthetic oligonucleotide
uaucaugucauguuuucuc

SEQ ID NO: 3191169 - RNA, 19 nt, Artificial Sequence
  Description of Artificial Sequence: Synthetic oligonucleotide
aaugaggcaauuggaaugu

SEQ ID NO: 3191170 - RNA, 19 nt, Artificial Sequence
  Description of Artificial Sequence: Synthetic oligonucleotide
cucauugucaauccucacc

SEQ ID NO: 3191171 - RNA, 19 nt, Artificial Sequence
  Description of Artificial Sequence: Synthetic oligonucleotide
uuaucugugacuauuaaag

SEQ ID NO: 3191172 - RNA, 19 nt, Artificial Sequence
  Description of Artificial Sequence: Synthetic oligonucleotide
acuuaaaucauguaagaac

SEQ ID NO: 3191173 - RNA, 19 nt, Artificial Sequence
  Description of Artificial Sequence: Synthetic oligonucleotide
auuaccucuaauuucaaac

SEQ ID NO: 3191174 - RNA, 19 nt, Artificial Sequence
  Description of Artificial Sequence: Synthetic oligonucleotide
aaucuuauuucuuuuaucu

SEQ ID NO: 3191175 - RNA, 19 nt, Artificial Sequence
  Description of Artificial Sequence: Synthetic oligonucleotide
aaauaaguaaagcagucug

SEQ ID NO: 3191176 - RNA, 19 nt, Artificial Sequence
  Description of Artificial Sequence: Synthetic oligonucleotide
uuaguaaagacauucagcu

SEQ ID NO: 3191177 - RNA, 19 nt, Artificial Sequence
  Description of Artificial Sequence: Synthetic oligonucleotide
aaucuuaguaaagacauuc

SEQ ID NO: 3191178 - RNA, 19 nt, Artificial Sequence
  Description of Artificial Sequence: Synthetic oligonucleotide
caaguaaagaauauguagg

SEQ ID NO: 3191179 - RNA, 19 nt, Artificial Sequence
  Description of Artificial Sequence: Synthetic oligonucleotide
aacuaaaucacaugaaacu

SEQ ID NO: 3191180 - RNA, 19 nt, Artificial Sequence
  Description of Artificial Sequence: Synthetic oligonucleotide
aaauguagugaacaaagug

SEQ ID NO: 3191181 - RNA, 19 nt, Artificial Sequence
  Description of Artificial Sequence: Synthetic oligonucleotide
uaaauuaccucuaauuuca

SEQ ID NO: 3191182 - RNA, 19 nt, Artificial Sequence
  Description of Artificial Sequence: Synthetic oligonucleotide
aaaugaaaugcccauagga

SEQ ID NO: 3191183 - RNA, 19 nt, Artificial Sequence
  Description of Artificial Sequence: Synthetic oligonucleotide
auaaauuaccucuaauuuc

SEQ ID NO: 3191184 - RNA, 19 nt, Artificial Sequence
  Description of Artificial Sequence: Synthetic oligonucleotide
aauuucuguaucuugauau

SEQ ID NO: 3191185 - RNA, 19 nt, Artificial Sequence
  Description of Artificial Sequence: Synthetic oligonucleotide
aaugaaaauguguuugaag

SEQ ID NO: 3191186 - RNA, 19 nt, Artificial Sequence
  Description of Artificial Sequence: Synthetic oligonucleotide
uguuauuucaacaaacagu

SEQ ID NO: 3191187 - RNA, 19 nt, Artificial Sequence
  Description of Artificial Sequence: Synthetic oligonucleotide
uuaguaaaccuaaauguag

SEQ ID NO: 3191188 - RNA, 19 nt, Artificial Sequence
  Description of Artificial Sequence: Synthetic oligonucleotide
uccauuaaagugaaguggg

SEQ ID NO: 3191189 - RNA, 19 nt, Artificial Sequence
  Description of Artificial Sequence: Synthetic oligonucleotide
uacugauuuacuuugguag

SEQ ID NO: 3191190 - RNA, 19 nt, Artificial Sequence
  Description of Artificial Sequence: Synthetic oligonucleotide
caaaguguuaggaauaucc

SEQ ID NO: 3191191 - RNA, 19 nt, Artificial Sequence
  Description of Artificial Sequence: Synthetic oligonucleotide
ugagacuucauaaugaaaa

SEQ ID NO: 3191192 - RNA, 19 nt, Artificial Sequence
  Description of Artificial Sequence: Synthetic oligonucleotide
aaccaagagaagcacauuc

SEQ ID NO: 3191193 - RNA, 19 nt, Artificial Sequence
  Description of Artificial Sequence: Synthetic oligonucleotide
aaaacuaaaucacaugaaa

SEQ ID NO: 3191194 - RNA, 19 nt, Artificial Sequence
  Description of Artificial Sequence: Synthetic oligonucleotide
aaacuaaaucacaugaaac

SEQ ID NO: 3191195 - RNA, 19 nt, Artificial Sequence
  Description of Artificial Sequence: Synthetic oligonucleotide
guuaggaauauccaaaggc

SEQ ID NO: 3191196 - RNA, 19 nt, Artificial Sequence
  Description of Artificial Sequence: Synthetic oligonucleotide
aagagaagcacauucaaaa

SEQ ID NO: 3191197 - RNA, 19 nt, Artificial Sequence
  Description of Artificial Sequence: Synthetic oligonucleotide
uuaaagaugcauuaacugu

SEQ ID NO: 3191198 - RNA, 19 nt, Artificial Sequence
  Description of Artificial Sequence: Synthetic oligonucleotide
uuuuaauaauaauucacac

SEQ ID NO: 3191199 - RNA, 19 nt, Artificial Sequence
  Description of Artificial Sequence: Synthetic oligonucleotide
uuaauuuuaucuaaauuua

SEQ ID NO: 3191200 - RNA, 19 nt, Artificial Sequence
  Description of Artificial Sequence: Synthetic oligonucleotide
aauguagugaacaaagugu

SEQ ID NO: 3191201 - RNA, 19 nt, Artificial Sequence
  Description of Artificial Sequence: Synthetic oligonucleotide
ucuaauuucaaacucucau

SEQ ID NO: 3191202 - RNA, 19 nt, Artificial Sequence
  Description of Artificial Sequence: Synthetic oligonucleotide
ucuuauuucuuuuaucugu

SEQ ID NO: 3191203 - RNA, 19 nt, Artificial Sequence
  Description of Artificial Sequence: Synthetic oligonucleotide
uguaagaacuaacagugcu

SEQ ID NO: 3191204 - RNA, 19 nt, Artificial Sequence
  Description of Artificial Sequence: Synthetic oligonucleotide
uagugaauaauuaccacca

SEQ ID NO: 3191205 - RNA, 19 nt, Artificial Sequence
  Description of Artificial Sequence: Synthetic oligonucleotide
auauacuuaaaucauguaa

SEQ ID NO: 3191206 - RNA, 19 nt, Artificial Sequence
  Description of Artificial Sequence: Synthetic oligonucleotide
aaaaugaaaugcccauagg

SEQ ID NO: 3191207 - RNA, 19 nt, Artificial Sequence
  Description of Artificial Sequence: Synthetic oligonucleotide
uacaaaacaaacacccugc

SEQ ID NO: 3191208 - RNA, 19 nt, Artificial Sequence
  Description of Artificial Sequence: Synthetic oligonucleotide
aaauuguuuucaaagagca

SEQ ID NO: 3191209 - RNA, 19 nt, Artificial Sequence
  Description of Artificial Sequence: Synthetic oligonucleotide
auuaucuguaaccuuuagg

SEQ ID NO: 3191210 - RNA, 19 nt, Artificial Sequence
  Description of Artificial Sequence: Synthetic oligonucleotide
uuaauaugucauuugaguc

SEQ ID NO: 3191211 - RNA, 19 nt, Artificial Sequence
  Description of Artificial Sequence: Synthetic oligonucleotide
uccaaauuuaacauuguaa

SEQ ID NO: 3191212 - RNA, 19 nt, Artificial Sequence
  Description of Artificial Sequence: Synthetic oligonucleotide
uggacaaaugaacaguuug

SEQ ID NO: 3191213 - RNA, 19 nt, Artificial Sequence
  Description of Artificial Sequence: Synthetic oligonucleotide
aacuaacagugcuauguac

SEQ ID NO: 3191214 - RNA, 19 nt, Artificial Sequence
  Description of Artificial Sequence: Synthetic oligonucleotide
uuuuaaguagacaguaacu

SEQ ID NO: 3191215 - RNA, 19 nt, Artificial Sequence
  Description of Artificial Sequence: Synthetic oligonucleotide
uagacaguaacuuuuggcu

SEQ ID NO: 3191216 - RNA, 19 nt, Artificial Sequence
  Description of Artificial Sequence: Synthetic oligonucleotide
auuugagucaaguaaagaa

SEQ ID NO: 3191217 - RNA, 19 nt, Artificial Sequence
  Description of Artificial Sequence: Synthetic oligonucleotide
uaaagaugcauuaacuguc

SEQ ID NO: 3191218 - RNA, 19 nt, Artificial Sequence
  Description of Artificial Sequence: Synthetic oligonucleotide
ugucauuuaaaccuuuuaa

SEQ ID NO: 3191219 - RNA, 19 nt, Artificial Sequence
  Description of Artificial Sequence: Synthetic oligonucleotide
aagacaaccuccauuaaag

SEQ ID NO: 3191220 - RNA, 19 nt, Artificial Sequence
  Description of Artificial Sequence: Synthetic oligonucleotide
uuacuuugguagcaaauag

SEQ ID NO: 3191221 - RNA, 19 nt, Artificial Sequence
  Description of Artificial Sequence: Synthetic oligonucleotide
ugcaacacuagaaacaaaa

SEQ ID NO: 3191222 - RNA, 19 nt, Artificial Sequence
  Description of Artificial Sequence: Synthetic oligonucleotide
uaaaccuaaauguagugaa

SEQ ID NO: 3191223 - RNA, 19 nt, Artificial Sequence
  Description of Artificial Sequence: Synthetic oligonucleotide
ugaacaaaguguuaggaau

SEQ ID NO: 3191224 - RNA, 19 nt, Artificial Sequence
  Description of Artificial Sequence: Synthetic oligonucleotide
aagagcaaagcgucuguac

SEQ ID NO: 3191225 - RNA, 19 nt, Artificial Sequence
  Description of Artificial Sequence: Synthetic oligonucleotide
ugaaagacaaccuccauua

SEQ ID NO: 3191226 - RNA, 19 nt, Artificial Sequence
  Description of Artificial Sequence: Synthetic oligonucleotide
aaaucauguaagaacuaac

SEQ ID NO: 3191227 - RNA, 19 nt, Artificial Sequence
  Description of Artificial Sequence: Synthetic oligonucleotide
cuuaaugugcuaauaguug

SEQ ID NO: 3191228 - RNA, 19 nt, Artificial Sequence
  Description of Artificial Sequence: Synthetic oligonucleotide
aucacaugaaacuacaaaa

SEQ ID NO: 3191229 - RNA, 19 nt, Artificial Sequence
  Description of Artificial Sequence: Synthetic oligonucleotide
ugcauuaacugucacauua

SEQ ID NO: 3191230 - RNA, 19 nt, Artificial Sequence
  Description of Artificial Sequence: Synthetic oligonucleotide
aaaggcugcuucuuggaag

SEQ ID NO: 3191231 - RNA, 19 nt, Artificial Sequence
  Description of Artificial Sequence: Synthetic oligonucleotide
guaaagaauauguaggaga

SEQ ID NO: 3191232 - RNA, 19 nt, Artificial Sequence
  Description of Artificial Sequence: Synthetic oligonucleotide
cauaaugaaaauguguuug

SEQ ID NO: 3191233 - RNA, 19 nt, Artificial Sequence
  Description of Artificial Sequence: Synthetic oligonucleotide
caaaaugaaaugcccauag

SEQ ID NO: 3191234 - RNA, 19 nt, Artificial Sequence
  Description of Artificial Sequence: Synthetic oligonucleotide
uuaucuaaauuuacuuuca

SEQ ID NO: 3191235 - RNA, 19 nt, Artificial Sequence
  Description of Artificial Sequence: Synthetic oligonucleotide
uaauuuuaucuaaauuuac

SEQ ID NO: 3191236 - RNA, 19 nt, Artificial Sequence
  Description of Artificial Sequence: Synthetic oligonucleotide
uugaccucaaguuaauaug

SEQ ID NO: 3191237 - RNA, 19 nt, Artificial Sequence
  Description of Artificial Sequence: Synthetic oligonucleotide
ucacacaagaacuuugaca

SEQ ID NO: 3191238 - RNA, 19 nt, Artificial Sequence
  Description of Artificial Sequence: Synthetic oligonucleotide
aauuuauuguaaucuuagu

SEQ ID NO: 3191239 - RNA, 19 nt, Artificial Sequence
  Description of Artificial Sequence: Synthetic oligonucleotide
aaguuaaauuucuguaucu

SEQ ID NO: 3191240 - RNA, 19 nt, Artificial Sequence
  Description of Artificial Sequence: Synthetic oligonucleotide
uugauauacuuaaaucaug

SEQ ID NO: 3191241 - RNA, 19 nt, Artificial Sequence
  Description of Artificial Sequence: Synthetic oligonucleotide
ugccuagugaauaauuacc

SEQ ID NO: 3191242 - RNA, 19 nt, Artificial Sequence
  Description of Artificial Sequence: Synthetic oligonucleotide
uuuauuaguguaccacuca

SEQ ID NO: 3191243 - RNA, 19 nt, Artificial Sequence
  Description of Artificial Sequence: Synthetic oligonucleotide
aacagcuuccuuaugaucu

SEQ ID NO: 3191244 - RNA, 19 nt, Artificial Sequence
  Description of Artificial Sequence: Synthetic oligonucleotide
ucuuaaugugcuaauaguu

SEQ ID NO: 3191245 - RNA, 19 nt, Artificial Sequence
  Description of Artificial Sequence: Synthetic oligonucleotide
aauucuuagaaagguacca

SEQ ID NO: 3191246 - RNA, 19 nt, Artificial Sequence
  Description of Artificial Sequence: Synthetic oligonucleotide
cuauuaaagaugcauuaac

SEQ ID NO: 3191247 - RNA, 19 nt, Artificial Sequence
  Description of Artificial Sequence: Synthetic oligonucleotide
uuauuguaaucuuaguaaa

SEQ ID NO: 3191248 - RNA, 19 nt, Artificial Sequence
  Description of Artificial Sequence: Synthetic oligonucleotide
acauaaauuaccucuaauu

SEQ ID NO: 3191249 - RNA, 19 nt, Artificial Sequence
  Description of Artificial Sequence: Synthetic oligonucleotide
uuaacauuguaauuuucaa

SEQ ID NO: 3191250 - RNA, 19 nt, Artificial Sequence
  Description of Artificial Sequence: Synthetic oligonucleotide
agauguuauuucaacaaac

SEQ ID NO: 3191251 - RNA, 19 nt, Artificial Sequence
  Description of Artificial Sequence: Synthetic oligonucleotide
ucauuugagucaaguaaag

SEQ ID NO: 3191252 - RNA, 19 nt, Artificial Sequence
  Description of Artificial Sequence: Synthetic oligonucleotide
ucuugaaaucuguauauaa

SEQ ID NO: 3191253 - RNA, 19 nt, Artificial Sequence
  Description of Artificial Sequence: Synthetic oligonucleotide
uaucuaaauuuacuuucag

SEQ ID NO: 3191254 - RNA, 19 nt, Artificial Sequence
  Description of Artificial Sequence: Synthetic oligonucleotide
aaagacaaccuccauuaaa

SEQ ID NO: 3191255 - RNA, 19 nt, Artificial Sequence
  Description of Artificial Sequence: Synthetic oligonucleotide
uaggaauauccaaaggcug

SEQ ID NO: 3191256 - RNA, 19 nt, Artificial Sequence
  Description of Artificial Sequence: Synthetic oligonucleotide
ucuguaaccuuuaggaaaa

SEQ ID NO: 3191257 - RNA, 19 nt, Artificial Sequence
  Description of Artificial Sequence: Synthetic oligonucleotide
agaacuaacagugcuaugu

SEQ ID NO: 3191258 - RNA, 19 nt, Artificial Sequence
  Description of Artificial Sequence: Synthetic oligonucleotide
gacaaaauuuauuguaauc

SEQ ID NO: 3191259 - RNA, 19 nt, Artificial Sequence
  Description of Artificial Sequence: Synthetic oligonucleotide
gacaaccuccauuaaagug

SEQ ID NO: 3191260 - RNA, 19 nt, Artificial Sequence
  Description of Artificial Sequence: Synthetic oligonucleotide
guuauuucaacaaacagua

SEQ ID NO: 3191261 - RNA, 19 nt, Artificial Sequence
  Description of Artificial Sequence: Synthetic oligonucleotide
uuucuuuauuaucuguaac

SEQ ID NO: 3191262 - RNA, 19 nt, Artificial Sequence
  Description of Artificial Sequence: Synthetic oligonucleotide
uguacaaggcugcuugugc

SEQ ID NO: 3191263 - RNA, 19 nt, Artificial Sequence
  Description of Artificial Sequence: Synthetic oligonucleotide
uaguaaaccuaaauguagu

SEQ ID NO: 3191264 - RNA, 19 nt, Artificial Sequence
  Description of Artificial Sequence: Synthetic oligonucleotide
uggaaaugcuuauaggaac

SEQ ID NO: 3191265 - RNA, 19 nt, Artificial Sequence
  Description of Artificial Sequence: Synthetic oligonucleotide
ucucuccucaucuugaccu

SEQ ID NO: 3191266 - RNA, 19 nt, Artificial Sequence
  Description of Artificial Sequence: Synthetic oligonucleotide
uuaccucuaauuucaaacu

SEQ ID NO: 3191267 - RNA, 19 nt, Artificial Sequence
  Description of Artificial Sequence: Synthetic oligonucleotide
aaugaaaugcccauaggaa

SEQ ID NO: 3191268 - RNA, 19 nt, Artificial Sequence
  Description of Artificial Sequence: Synthetic oligonucleotide
uaggaaaacuaaaucacau

SEQ ID NO: 3191269 - RNA, 19 nt, Artificial Sequence
  Description of Artificial Sequence: Synthetic oligonucleotide
auagcaaugcaacacuaga

SEQ ID NO: 3191270 - RNA, 19 nt, Artificial Sequence
  Description of Artificial Sequence: Synthetic oligonucleotide
aggaauauccaaaggcugc

SEQ ID NO: 3191271 - RNA, 19 nt, Artificial Sequence
  Description of Artificial Sequence: Synthetic oligonucleotide
uuuucaaagacauagagug

SEQ ID NO: 3191272 - RNA, 19 nt, Artificial Sequence
  Description of Artificial Sequence: Synthetic oligonucleotide
aagacauagagugugaacc

SEQ ID NO: 3191273 - RNA, 19 nt, Artificial Sequence
  Description of Artificial Sequence: Synthetic oligonucleotide
uuguguaugacaauggagc

SEQ ID NO: 3191274 - RNA, 19 nt, Artificial Sequence
  Description of Artificial Sequence: Synthetic oligonucleotide
uuugaagguacccacuucg

SEQ ID NO: 3191275 - RNA, 19 nt, Artificial Sequence
  Description of Artificial Sequence: Synthetic oligonucleotide
aagagaugucaucugagac

SEQ ID NO: 3191276 - RNA, 19 nt, Artificial Sequence
  Description of Artificial Sequence: Synthetic oligonucleotide
aagacuuugugaaauuucc

SEQ ID NO: 3191277 - RNA, 19 nt, Artificial Sequence
  Description of Artificial Sequence: Synthetic oligonucleotide
agagaugucaucugagacc

SEQ ID NO: 3191278 - RNA, 19 nt, Artificial Sequence
  Description of Artificial Sequence: Synthetic oligonucleotide
aaagacauagagugugaac

SEQ ID NO: 3191279 - RNA, 19 nt, Artificial Sequence
  Description of Artificial Sequence: Synthetic oligonucleotide
uuggcauaguggaagaucg

SEQ ID NO: 3191280 - RNA, 19 nt, Artificial Sequence
  Description of Artificial Sequence: Synthetic oligonucleotide
aaccugagaagucuugccc

SEQ ID NO: 3191281 - RNA, 19 nt, Artificial Sequence
  Description of Artificial Sequence: Synthetic oligonucleotide
uagagugugaaccugagaa

SEQ ID NO: 3191282 - RNA, 19 nt, Artificial Sequence
  Description of Artificial Sequence: Synthetic oligonucleotide
gaagguacccacuucgucg

SEQ ID NO: 3191283 - RNA, 19 nt, Artificial Sequence
  Description of Artificial Sequence: Synthetic oligonucleotide
ucaagauuguguaugacaa

SEQ ID NO: 3191284 - RNA, 19 nt, Artificial Sequence
  Description of Artificial Sequence: Synthetic oligonucleotide
uaguggaagaucgaaaugg

SEQ ID NO: 3191285 - RNA, 19 nt, Artificial Sequence
  Description of Artificial Sequence: Synthetic oligonucleotide
aauggagccauccuuccag

SEQ ID NO: 3191286 - RNA, 19 nt, Artificial Sequence
  Description of Artificial Sequence: Synthetic oligonucleotide
aucgaaauggcaucucggc

SEQ ID NO: 3191287 - RNA, 19 nt, Artificial Sequence
  Description of Artificial Sequence: Synthetic oligonucleotide
cauucacuggaccagaagg

SEQ ID NO: 3191288 - RNA, 19 nt, Artificial Sequence
  Description of Artificial Sequence: Synthetic oligonucleotide
ugaaauuuccccuucucca

SEQ ID NO: 3191289 - RNA, 19 nt, Artificial Sequence
  Description of Artificial Sequence: Synthetic oligonucleotide
aacaccaccccguaccugg

SEQ ID NO: 3191290 - RNA, 19 nt, Artificial Sequence
  Description of Artificial Sequence: Synthetic oligonucleotide
aagauuguguaugacaaug

SEQ ID NO: 3191291 - RNA, 19 nt, Artificial Sequence
  Description of Artificial Sequence: Synthetic oligonucleotide
gacuuugugaaauuucccc

SEQ ID NO: 3191292 - RNA, 19 nt, Artificial Sequence
  Description of Artificial Sequence: Synthetic oligonucleotide
gucgauauaagguuguccc

SEQ ID NO: 3191293 - RNA, 19 nt, Artificial Sequence
  Description of Artificial Sequence: Synthetic oligonucleotide
aagugaaagugccauuguc

SEQ ID NO: 3191294 - RNA, 19 nt, Artificial Sequence
  Description of Artificial Sequence: Synthetic oligonucleotide
gacaucacaagugaaagug

SEQ ID NO: 3191295 - RNA, 19 nt, Artificial Sequence
  Description of Artificial Sequence: Synthetic oligonucleotide
uaaagagaugucaucugag

SEQ ID NO: 3191296 - RNA, 19 nt, Artificial Sequence
  Description of Artificial Sequence: Synthetic oligonucleotide
aauuuccccuucuccaugg

SEQ ID NO: 3191297 - RNA, 19 nt, Artificial Sequence
  Description of Artificial Sequence: Synthetic oligonucleotide
uucaaagacauagagugug

SEQ ID NO: 3191298 - RNA, 19 nt, Artificial Sequence
  Description of Artificial Sequence: Synthetic oligonucleotide
uuugacaucacaagugaaa

SEQ ID NO: 3191299 - RNA, 19 nt, Artificial Sequence
  Description of Artificial Sequence: Synthetic oligonucleotide
uaccgaaccagguagaaga

SEQ ID NO: 3191300 - RNA, 19 nt, Artificial Sequence
  Description of Artificial Sequence: Synthetic oligonucleotide
aaagagaugucaucugaga

SEQ ID NO: 3191301 - RNA, 19 nt, Artificial Sequence
  Description of Artificial Sequence: Synthetic oligonucleotide
uagaagagcaacagcagca

SEQ ID NO: 3191302 - RNA, 19 nt, Artificial Sequence
  Description of Artificial Sequence: Synthetic oligonucleotide
uggaagaucgaaauggcau

SEQ ID NO: 3191303 - RNA, 19 nt, Artificial Sequence
  Description of Artificial Sequence: Synthetic oligonucleotide
uugacaucacaagugaaag

SEQ ID NO: 3191304 - RNA, 19 nt, Artificial Sequence
  Description of Artificial Sequence: Synthetic oligonucleotide
uguguaugacaauggagcc

SEQ ID NO: 3191305 - RNA, 19 nt, Artificial Sequence
  Description of Artificial Sequence: Synthetic oligonucleotide
agugaaagugccauugucg

SEQ ID NO: 3191306 - RNA, 19 nt, Artificial Sequence
  Description of Artificial Sequence: Synthetic oligonucleotide
gucgcuguagucaagauug

SEQ ID NO: 3191307 - RNA, 19 nt, Artificial Sequence
  Description of Artificial Sequence: Synthetic oligonucleotide
ucugagacccauucacugg

SEQ ID NO: 3191308 - RNA, 19 nt, Artificial Sequence
  Description of Artificial Sequence: Synthetic oligonucleotide
gagaugucaucugagaccc

SEQ ID NO: 3191309 - RNA, 19 nt, Artificial Sequence
  Description of Artificial Sequence: Synthetic oligonucleotide
caucacaagugaaagugcc

SEQ ID NO: 3191310 - RNA, 19 nt, Artificial Sequence
  Description of Artificial Sequence: Synthetic oligonucleotide
agaucgaaauggcaucucg

SEQ ID NO: 3191311 - RNA, 19 nt, Artificial Sequence
  Description of Artificial Sequence: Synthetic oligonucleotide
aagucuugcccacuauguc

SEQ ID NO: 3191312 - RNA, 19 nt, Artificial Sequence
  Description of Artificial Sequence: Synthetic oligonucleotide
ugucccuuggcauagugga

SEQ ID NO: 3191313 - RNA, 19 nt, Artificial Sequence
  Description of Artificial Sequence: Synthetic oligonucleotide
aaccagguagaagagcaac

SEQ ID NO: 3191314 - RNA, 19 nt, Artificial Sequence
  Description of Artificial Sequence: Synthetic oligonucleotide
uggaugcgcucuuugaagg

SEQ ID NO: 3191315 - RNA, 19 nt, Artificial Sequence
  Description of Artificial Sequence: Synthetic oligonucleotide
uauaagguugucccuuggc

SEQ ID NO: 3191316 - RNA, 19 nt, Artificial Sequence
  Description of Artificial Sequence: Synthetic oligonucleotide
acaauggagccauccuucc

SEQ ID NO: 3191317 - RNA, 19 nt, Artificial Sequence
  Description of Artificial Sequence: Synthetic oligonucleotide
ugcgcagccagcaguaccg

SEQ ID NO: 3191318 - RNA, 19 nt, Artificial Sequence
  Description of Artificial Sequence: Synthetic oligonucleotide
gaaagugccauugucgcug

SEQ ID NO: 3191319 - RNA, 19 nt, Artificial Sequence
  Description of Artificial Sequence: Synthetic oligonucleotide
uucgaggaguccuuggaag

SEQ ID NO: 3191320 - RNA, 19 nt, Artificial Sequence
  Description of Artificial Sequence: Synthetic oligonucleotide
acuuugugaaauuuccccu

SEQ ID NO: 3191321 - RNA, 19 nt, Artificial Sequence
  Description of Artificial Sequence: Synthetic oligonucleotide
gugaaagugccauugucgc

SEQ ID NO: 3191322 - RNA, 19 nt, Artificial Sequence
  Description of Artificial Sequence: Synthetic oligonucleotide
auaagguugucccuuggca

SEQ ID NO: 3191323 - RNA, 19 nt, Artificial Sequence
  Description of Artificial Sequence: Synthetic oligonucleotide
agcagcaacagcaccacgc

SEQ ID NO: 3191324 - RNA, 19 nt, Artificial Sequence
  Description of Artificial Sequence: Synthetic oligonucleotide
aaauuuccccuucuccaug

SEQ ID NO: 3191325 - RNA, 19 nt, Artificial Sequence
  Description of Artificial Sequence: Synthetic oligonucleotide
uaugacaauggagccaucc

SEQ ID NO: 3191326 - RNA, 19 nt, Artificial Sequence
  Description of Artificial Sequence: Synthetic oligonucleotide
guagucaagauuguguaug

SEQ ID NO: 3191327 - RNA, 19 nt, Artificial Sequence
  Description of Artificial Sequence: Synthetic oligonucleotide
guagaagagcaacagcagc

SEQ ID NO: 3191328 - RNA, 19 nt, Artificial Sequence
  Description of Artificial Sequence: Synthetic oligonucleotide
ucgaaauggcaucucggcc

SEQ ID NO: 3191329 - RNA, 19 nt, Artificial Sequence
  Description of Artificial Sequence: Synthetic oligonucleotide
gauauaagguugucccuug

SEQ ID NO: 3191330 - RNA, 19 nt, Artificial Sequence
  Description of Artificial Sequence: Synthetic oligonucleotide
gugaaauuuccccuucucc

SEQ ID NO: 3191331 - RNA, 19 nt, Artificial Sequence
  Description of Artificial Sequence: Synthetic oligonucleotide
gguagcgccagguaaagag

SEQ ID NO: 3191332 - RNA, 19 nt, Artificial Sequence
  Description of Artificial Sequence: Synthetic oligonucleotide
uguaugacaauggagccau

SEQ ID NO: 3191333 - RNA, 19 nt, Artificial Sequence
  Description of Artificial Sequence: Synthetic oligonucleotide
acaagugaaagugccauug

SEQ ID NO: 3191334 - RNA, 19 nt, Artificial Sequence
  Description of Artificial Sequence: Synthetic oligonucleotide
aguggaagaucgaaauggc

SEQ ID NO: 3191335 - RNA, 19 nt, Artificial Sequence
  Description of Artificial Sequence: Synthetic oligonucleotide
gauuguguaugacaaugga

SEQ ID NO: 3191336 - RNA, 19 nt, Artificial Sequence
  Description of Artificial Sequence: Synthetic oligonucleotide
agguagaagagcaacagca

SEQ ID NO: 3191337 - RNA, 19 nt, Artificial Sequence
  Description of Artificial Sequence: Synthetic oligonucleotide
auuguguaugacaauggag

SEQ ID NO: 3191338 - RNA, 19 nt, Artificial Sequence
  Description of Artificial Sequence: Synthetic oligonucleotide
uuucaaagacauagagugu

SEQ ID NO: 3191339 - RNA, 19 nt, Artificial Sequence
  Description of Artificial Sequence: Synthetic oligonucleotide
gaucgaaauggcaucucgg

SEQ ID NO: 3191340 - RNA, 19 nt, Artificial Sequence
  Description of Artificial Sequence: Synthetic oligonucleotide
agagugugaaccugagaag

SEQ ID NO: 3191341 - RNA, 19 nt, Artificial Sequence
  Description of Artificial Sequence: Synthetic oligonucleotide
agucuugcccacuaugucu

SEQ ID NO: 3191342 - RNA, 19 nt, Artificial Sequence
  Description of Artificial Sequence: Synthetic oligonucleotide
ucaaagacauagaguguga

SEQ ID NO: 3191343 - RNA, 19 nt, Artificial Sequence
  Description of Artificial Sequence: Synthetic oligonucleotide
aucugagacccauucacug

SEQ ID NO: 3191344 - RNA, 19 nt, Artificial Sequence
  Description of Artificial Sequence: Synthetic oligonucleotide
auaguggaagaucgaaaug

SEQ ID NO: 3191345 - RNA, 19 nt, Artificial Sequence
  Description of Artificial Sequence: Synthetic oligonucleotide
uugucccuuggcauagugg

SEQ ID NO: 3191346 - RNA, 19 nt, Artificial Sequence
  Description of Artificial Sequence: Synthetic oligonucleotide
ugucaucugagacccauuc

SEQ ID NO: 3191347 - RNA, 19 nt, Artificial Sequence
  Description of Artificial Sequence: Synthetic oligonucleotide
agaagucuugcccacuaug

SEQ ID NO: 3191348 - RNA, 19 nt, Artificial Sequence
  Description of Artificial Sequence: Synthetic oligonucleotide
gucaagauuguguaugaca

SEQ ID NO: 3191349 - RNA, 19 nt, Artificial Sequence
  Description of Artificial Sequence: Synthetic oligonucleotide
acuucgucgauauaagguu

SEQ ID NO: 3191350 - RNA, 19 nt, Artificial Sequence
  Description of Artificial Sequence: Synthetic oligonucleotide
guaaagagaugucaucuga

SEQ ID NO: 3191351 - RNA, 19 nt, Artificial Sequence
  Description of Artificial Sequence: Synthetic oligonucleotide
uccccuacccacuggaugc

SEQ ID NO: 3191352 - RNA, 19 nt, Artificial Sequence
  Description of Artificial Sequence: Synthetic oligonucleotide
ugcccacuaugucuggugg

SEQ ID NO: 3191353 - RNA, 19 nt, Artificial Sequence
  Description of Artificial Sequence: Synthetic oligonucleotide
agguaaagagaugucaucu

SEQ ID NO: 3191354 - RNA, 19 nt, Artificial Sequence
  Description of Artificial Sequence: Synthetic oligonucleotide
aagguacccacuucgucga

SEQ ID NO: 3191355 - RNA, 19 nt, Artificial Sequence
  Description of Artificial Sequence: Synthetic oligonucleotide
acaucacaagugaaagugc

SEQ ID NO: 3191356 - RNA, 19 nt, Artificial Sequence
  Description of Artificial Sequence: Synthetic oligonucleotide
uuugugaaauuuccccuuc

SEQ ID NO: 3191357 - RNA, 19 nt, Artificial Sequence
  Description of Artificial Sequence: Synthetic oligonucleotide
ugugaaauuuccccuucuc

SEQ ID NO: 3191358 - RNA, 19 nt, Artificial Sequence
  Description of Artificial Sequence: Synthetic oligonucleotide
agacuuugugaaauuuccc

SEQ ID NO: 3191359 - RNA, 19 nt, Artificial Sequence
  Description of Artificial Sequence: Synthetic oligonucleotide
gaaccugagaagucuugcc

SEQ ID NO: 3191360 - RNA, 19 nt, Artificial Sequence
  Description of Artificial Sequence: Synthetic oligonucleotide
uccuuggaagacuuuguga

SEQ ID NO: 3191361 - RNA, 19 nt, Artificial Sequence
  Description of Artificial Sequence: Synthetic oligonucleotide
auauaagguugucccuugg

SEQ ID NO: 3191362 - RNA, 19 nt, Artificial Sequence
  Description of Artificial Sequence: Synthetic oligonucleotide
agagcaacagcagcaacag

SEQ ID NO: 3191363 - RNA, 19 nt, Artificial Sequence
  Description of Artificial Sequence: Synthetic oligonucleotide
uuuugacaucacaagugaa

SEQ ID NO: 3191364 - RNA, 19 nt, Artificial Sequence
  Description of Artificial Sequence: Synthetic oligonucleotide
agauuguguaugacaaugg

SEQ ID NO: 3191365 - RNA, 19 nt, Artificial Sequence
  Description of Artificial Sequence: Synthetic oligonucleotide
ucuuugaagguacccacuu

SEQ ID NO: 3191366 - RNA, 19 nt, Artificial Sequence
  Description of Artificial Sequence: Synthetic oligonucleotide
agacauagagugugaaccu

SEQ ID NO: 3191367 - RNA, 19 nt, Artificial Sequence
  Description of Artificial Sequence: Synthetic oligonucleotide
uuccccuucuccauggcac

SEQ ID NO: 3191368 - RNA, 19 nt, Artificial Sequence
  Description of Artificial Sequence: Synthetic oligonucleotide
uucacuggaccagaaggag

SEQ ID NO: 3191369 - RNA, 19 nt, Artificial Sequence
  Description of Artificial Sequence: Synthetic oligonucleotide
gaaauggcaucucggcccc

SEQ ID NO: 3191370 - RNA, 19 nt, Artificial Sequence
  Description of Artificial Sequence: Synthetic oligonucleotide
gagccauccuuccagcgag

SEQ ID NO: 3191371 - RNA, 19 nt, Artificial Sequence
  Description of Artificial Sequence: Synthetic oligonucleotide
uuuaaagaauccuacaagg

SEQ ID NO: 3191372 - RNA, 19 nt, Artificial Sequence
  Description of Artificial Sequence: Synthetic oligonucleotide
aauaguggaaaguuucugg

SEQ ID NO: 3191373 - RNA, 19 nt, Artificial Sequence
  Description of Artificial Sequence: Synthetic oligonucleotide
aaagaauccuacaagggcc

SEQ ID NO: 3191374 - RNA, 19 nt, Artificial Sequence
  Description of Artificial Sequence: Synthetic oligonucleotide
uuuuaaagaauccuacaag

SEQ ID NO: 3191375 - RNA, 19 nt, Artificial Sequence
  Description of Artificial Sequence: Synthetic oligonucleotide
uuaaagaauccuacaaggg

SEQ ID NO: 3191376 - RNA, 19 nt, Artificial Sequence
  Description of Artificial Sequence: Synthetic oligonucleotide
uaaagaauccuacaagggc

SEQ ID NO: 3191377 - RNA, 19 nt, Artificial Sequence
  Description of Artificial Sequence: Synthetic oligonucleotide
uugagucuggacauuagcg

SEQ ID NO: 3191378 - RNA, 19 nt, Artificial Sequence
  Description of Artificial Sequence: Synthetic oligonucleotide
aguggaaaguuucuggugg

SEQ ID NO: 3191379 - RNA, 19 nt, Artificial Sequence
  Description of Artificial Sequence: Synthetic oligonucleotide
ugagacuugagucuggaca

SEQ ID NO: 3191380 - RNA, 19 nt, Artificial Sequence
  Description of Artificial Sequence: Synthetic oligonucleotide
aaaguuucuggugggcucc

SEQ ID NO: 3191381 - RNA, 19 nt, Artificial Sequence
  Description of Artificial Sequence: Synthetic oligonucleotide
auuagcgagguuuuaaaga

SEQ ID NO: 3191382 - RNA, 19 nt, Artificial Sequence
  Description of Artificial Sequence: Synthetic oligonucleotide
uuagcgagguuuuaaagaa

SEQ ID NO: 3191383 - RNA, 19 nt, Artificial Sequence
  Description of Artificial Sequence: Synthetic oligonucleotide
uagaucugagacuugaguc

SEQ ID NO: 3191384 - RNA, 19 nt, Artificial Sequence
  Description of Artificial Sequence: Synthetic oligonucleotide
cuacaagggccuuugaggc

SEQ ID NO: 3191385 - RNA, 19 nt, Artificial Sequence
  Description of Artificial Sequence: Synthetic oligonucleotide
uuucuggugggcuccauag

SEQ ID NO: 3191386 - RNA, 19 nt, Artificial Sequence
  Description of Artificial Sequence: Synthetic oligonucleotide
guuuuaaagaauccuacaa

SEQ ID NO: 3191387 - RNA, 19 nt, Artificial Sequence
  Description of Artificial Sequence: Synthetic oligonucleotide
ucaccucacauccauggcc

SEQ ID NO: 3191388 - RNA, 19 nt, Artificial Sequence
  Description of Artificial Sequence: Synthetic oligonucleotide
ugagucuggacauuagcga

SEQ ID NO: 3191389 - RNA, 19 nt, Artificial Sequence
  Description of Artificial Sequence: Synthetic oligonucleotide
auagaucugagacuugagu

SEQ ID NO: 3191390 - RNA, 19 nt, Artificial Sequence
  Description of Artificial Sequence: Synthetic oligonucleotide
agguuuuaaagaauccuac

SEQ ID NO: 3191391 - RNA, 19 nt, Artificial Sequence
  Description of Artificial Sequence: Synthetic oligonucleotide
agaucugagacuugagucu

SEQ ID NO: 3191392 - RNA, 19 nt, Artificial Sequence
  Description of Artificial Sequence: Synthetic oligonucleotide
gagucuggacauuagcgag

SEQ ID NO: 3191393 - RNA, 19 nt, Artificial Sequence
  Description of Artificial Sequence: Synthetic oligonucleotide
auaguggaaaguuucuggu

SEQ ID NO: 3191394 - RNA, 19 nt, Artificial Sequence
  Description of Artificial Sequence: Synthetic oligonucleotide
uccuacaagggccuuugag

SEQ ID NO: 3191395 - RNA, 19 nt, Artificial Sequence
  Description of Artificial Sequence: Synthetic oligonucleotide
acauccauggccccagggg

SEQ ID NO: 3191396 - RNA, 19 nt, Artificial Sequence
  Description of Artificial Sequence: Synthetic oligonucleotide
agaacggcggagaaggcgc

SEQ ID NO: 3191397 - RNA, 19 nt, Artificial Sequence
  Description of Artificial Sequence: Synthetic oligonucleotide
cauuagcgagguuuuaaag

SEQ ID NO: 3191398 - RNA, 19 nt, Artificial Sequence
  Description of Artificial Sequence: Synthetic oligonucleotide
cuugagucuggacauuagc

SEQ ID NO: 3191399 - RNA, 19 nt, Artificial Sequence
  Description of Artificial Sequence: Synthetic oligonucleotide
agcgagguuuuaaagaauc

SEQ ID NO: 3191400 - RNA, 19 nt, Artificial Sequence
  Description of Artificial Sequence: Synthetic oligonucleotide
uccucuagggcuccaggag

SEQ ID NO: 3191401 - RNA, 19 nt, Artificial Sequence
  Description of Artificial Sequence: Synthetic oligonucleotide
ccuacaagggccuuugagg

SEQ ID NO: 3191402 - RNA, 19 nt, Artificial Sequence
  Description of Artificial Sequence: Synthetic oligonucleotide
ggcuccauagaucugagac

SEQ ID NO: 3191403 - RNA, 19 nt, Artificial Sequence
  Description of Artificial Sequence: Synthetic oligonucleotide
gaauaguggaaaguuucug

SEQ ID NO: 3191404 - RNA, 19 nt, Artificial Sequence
  Description of Artificial Sequence: Synthetic oligonucleotide
ucuggugggcuccauagau

SEQ ID NO: 3191405 - RNA, 19 nt, Artificial Sequence
  Description of Artificial Sequence: Synthetic oligonucleotide
aauccuacaagggccuuug

SEQ ID NO: 3191406 - RNA, 19 nt, Artificial Sequence
  Description of Artificial Sequence: Synthetic oligonucleotide
uaguggaaaguuucuggug

SEQ ID NO: 3191407 - RNA, 19 nt, Artificial Sequence
  Description of Artificial Sequence: Synthetic oligonucleotide
uggugggcuccauagaucu

SEQ ID NO: 3191408 - RNA, 19 nt, Artificial Sequence
  Description of Artificial Sequence: Synthetic oligonucleotide
gaaaguuucuggugggcuc

SEQ ID NO: 3191409 - RNA, 19 nt, Artificial Sequence
  Description of Artificial Sequence: Synthetic oligonucleotide
ugaggcaucacuuccucua

SEQ ID NO: 3191410 - RNA, 19 nt, Artificial Sequence
  Description of Artificial Sequence: Synthetic oligonucleotide
caccucacauccauggccc

SEQ ID NO: 3191411 - RNA, 19 nt, Artificial Sequence
  Description of Artificial Sequence: Synthetic oligonucleotide
gagaacggcggagaaggcg

SEQ ID NO: 3191412 - RNA, 19 nt, Artificial Sequence
  Description of Artificial Sequence: Synthetic oligonucleotide
uuugaggcaucacuuccuc

SEQ ID NO: 3191413 - RNA, 19 nt, Artificial Sequence
  Description of Artificial Sequence: Synthetic oligonucleotide
gggagaacggcggagaagg

SEQ ID NO: 3191414 - RNA, 19 nt, Artificial Sequence
  Description of Artificial Sequence: Synthetic oligonucleotide
guggaaaguuucugguggg

SEQ ID NO: 3191415 - RNA, 19 nt, Artificial Sequence
  Description of Artificial Sequence: Synthetic oligonucleotide
cauagaucugagacuugag

SEQ ID NO: 3191416 - RNA, 19 nt, Artificial Sequence
  Description of Artificial Sequence: Synthetic oligonucleotide
gaucugagacuugagucug

SEQ ID NO: 3191417 - RNA, 19 nt, Artificial Sequence
  Description of Artificial Sequence: Synthetic oligonucleotide
acauuagcgagguuuuaaa

SEQ ID NO: 3191418 - RNA, 19 nt, Artificial Sequence
  Description of Artificial Sequence: Synthetic oligonucleotide
ggcaucacuuccucuaggg

SEQ ID NO: 3191419 - RNA, 19 nt, Artificial Sequence
  Description of Artificial Sequence: Synthetic oligonucleotide
aagaauccuacaagggccu

SEQ ID NO: 3191420 - RNA, 19 nt, Artificial Sequence
  Description of Artificial Sequence: Synthetic oligonucleotide
aucacuuccucuagggcuc

SEQ ID NO: 3191421 - RNA, 19 nt, Artificial Sequence
  Description of Artificial Sequence: Synthetic oligonucleotide
uagggcuccaggagcaccc

SEQ ID NO: 3191422 - RNA, 19 nt, Artificial Sequence
  Description of Artificial Sequence: Synthetic oligonucleotide
gaggcaucacuuccucuag

SEQ ID NO: 3191423 - RNA, 19 nt, Artificial Sequence
  Description of Artificial Sequence: Synthetic oligonucleotide
uggacauuagcgagguuuu

SEQ ID NO: 3191424 - RNA, 19 nt, Artificial Sequence
  Description of Artificial Sequence: Synthetic oligonucleotide
gguuuuaaagaauccuaca

SEQ ID NO: 3191425 - RNA, 19 nt, Artificial Sequence
  Description of Artificial Sequence: Synthetic oligonucleotide
uccgaauaguggaaaguuu

SEQ ID NO: 3191426 - RNA, 19 nt, Artificial Sequence
  Description of Artificial Sequence: Synthetic oligonucleotide
uuccucuagggcuccagga

SEQ ID NO: 3191427 - RNA, 19 nt, Artificial Sequence
  Description of Artificial Sequence: Synthetic oligonucleotide
gagguuuuaaagaauccua

SEQ ID NO: 3191428 - RNA, 19 nt, Artificial Sequence
  Description of Artificial Sequence: Synthetic oligonucleotide
agucuggacauuagcgagg

SEQ ID NO: 3191429 - RNA, 19 nt, Artificial Sequence
  Description of Artificial Sequence: Synthetic oligonucleotide
ccgaauaguggaaaguuuc

SEQ ID NO: 3191430 - RNA, 19 nt, Artificial Sequence
  Description of Artificial Sequence: Synthetic oligonucleotide
cuuccucuagggcuccagg

SEQ ID NO: 3191431 - RNA, 19 nt, Artificial Sequence
  Description of Artificial Sequence: Synthetic oligonucleotide
gagacuugagucuggacau

SEQ ID NO: 3191432 - RNA, 19 nt, Artificial Sequence
  Description of Artificial Sequence: Synthetic oligonucleotide
ucugagacuugagucugga

SEQ ID NO: 3191433 - RNA, 19 nt, Artificial Sequence
  Description of Artificial Sequence: Synthetic oligonucleotide
uacaagggccuuugaggca

SEQ ID NO: 3191434 - RNA, 19 nt, Artificial Sequence
  Description of Artificial Sequence: Synthetic oligonucleotide
caucacuuccucuagggcu

SEQ ID NO: 3191435 - RNA, 19 nt, Artificial Sequence
  Description of Artificial Sequence: Synthetic oligonucleotide
aggcaucacuuccucuagg

SEQ ID NO: 3191436 - RNA, 19 nt, Artificial Sequence
  Description of Artificial Sequence: Synthetic oligonucleotide
uggaaaguuucuggugggc

SEQ ID NO: 3191437 - RNA, 19 nt, Artificial Sequence
  Description of Artificial Sequence: Synthetic oligonucleotide
gacauuagcgagguuuuaa

SEQ ID NO: 3191438 - RNA, 19 nt, Artificial Sequence
  Description of Artificial Sequence: Synthetic oligonucleotide
accucacauccauggcccc

SEQ ID NO: 3191439 - RNA, 19 nt, Artificial Sequence
  Description of Artificial Sequence: Synthetic oligonucleotide
uccauagaucugagacuug

SEQ ID NO: 3191440 - RNA, 19 nt, Artificial Sequence
  Description of Artificial Sequence: Synthetic oligonucleotide
agaaggcgccuccgaauag

SEQ ID NO: 3191441 - RNA, 19 nt, Artificial Sequence
  Description of Artificial Sequence: Synthetic oligonucleotide
ugggcuccauagaucugag

SEQ ID NO: 3191442 - RNA, 19 nt, Artificial Sequence
  Description of Artificial Sequence: Synthetic oligonucleotide
uucuggugggcuccauaga

SEQ ID NO: 3191443 - RNA, 19 nt, Artificial Sequence
  Description of Artificial Sequence: Synthetic oligonucleotide
ccuuugaggcaucacuucc

SEQ ID NO: 3191444 - RNA, 19 nt, Artificial Sequence
  Description of Artificial Sequence: Synthetic oligonucleotide
gagaaggcgccuccgaaua

SEQ ID NO: 3191445 - RNA, 19 nt, Artificial Sequence
  Description of Artificial Sequence: Synthetic oligonucleotide
cacauccauggccccaggg

SEQ ID NO: 3191446 - RNA, 19 nt, Artificial Sequence
  Description of Artificial Sequence: Synthetic oligonucleotide
uugaggcaucacuuccucu

SEQ ID NO: 3191447 - RNA, 19 nt, Artificial Sequence
  Description of Artificial Sequence: Synthetic oligonucleotide
uagcgagguuuuaaagaau

SEQ ID NO: 3191448 - RNA, 19 nt, Artificial Sequence
  Description of Artificial Sequence: Synthetic oligonucleotide
acaagggccuuugaggcau

SEQ ID NO: 3191449 - RNA, 19 nt, Artificial Sequence
  Description of Artificial Sequence: Synthetic oligonucleotide
ucacauccauggccccagg

SEQ ID NO: 3191450 - RNA, 19 nt, Artificial Sequence
  Description of Artificial Sequence: Synthetic oligonucleotide
cucacauccauggccccag

SEQ ID NO: 3191451 - RNA, 19 nt, Artificial Sequence
  Description of Artificial Sequence: Synthetic oligonucleotide
acuugagucuggacauuag

SEQ ID NO: 3191452 - RNA, 19 nt, Artificial Sequence
  Description of Artificial Sequence: Synthetic oligonucleotide
aaggcgccuccgaauagug

SEQ ID NO: 3191453 - RNA, 19 nt, Artificial Sequence
  Description of Artificial Sequence: Synthetic oligonucleotide
cucuagggcuccaggagca

SEQ ID NO: 3191454 - RNA, 19 nt, Artificial Sequence
  Description of Artificial Sequence: Synthetic oligonucleotide
cugagacuugagucuggac

SEQ ID NO: 3191455 - RNA, 19 nt, Artificial Sequence
  Description of Artificial Sequence: Synthetic oligonucleotide
cuggugggcuccauagauc

SEQ ID NO: 3191456 - RNA, 19 nt, Artificial Sequence
  Description of Artificial Sequence: Synthetic oligonucleotide
ggcgccuccgaauagugga

SEQ ID NO: 3191457 - RNA, 19 nt, Artificial Sequence
  Description of Artificial Sequence: Synthetic oligonucleotide
gugggcuccauagaucuga

SEQ ID NO: 3191458 - RNA, 19 nt, Artificial Sequence
  Description of Artificial Sequence: Synthetic oligonucleotide
cuagggcuccaggagcacc

SEQ ID NO: 3191459 - RNA, 19 nt, Artificial Sequence
  Description of Artificial Sequence: Synthetic oligonucleotide
gcaucacuuccucuagggc

SEQ ID NO: 3191460 - RNA, 19 nt, Artificial Sequence
  Description of Artificial Sequence: Synthetic oligonucleotide
aucugagacuugagucugg

SEQ ID NO: 3191461 - RNA, 19 nt, Artificial Sequence
  Description of Artificial Sequence: Synthetic oligonucleotide
cuuugaggcaucacuuccu

SEQ ID NO: 3191462 - RNA, 19 nt, Artificial Sequence
  Description of Artificial Sequence: Synthetic oligonucleotide
acuuccucuagggcuccag

SEQ ID NO: 3191463 - RNA, 19 nt, Artificial Sequence
  Description of Artificial Sequence: Synthetic oligonucleotide
gacuugagucuggacauua

SEQ ID NO: 3191464 - RNA, 19 nt, Artificial Sequence
  Description of Artificial Sequence: Synthetic oligonucleotide
ccucuagggcuccaggagc

SEQ ID NO: 3191465 - RNA, 19 nt, Artificial Sequence
  Description of Artificial Sequence: Synthetic oligonucleotide
cuggacauuagcgagguuu

SEQ ID NO: 3191466 - RNA, 19 nt, Artificial Sequence
  Description of Artificial Sequence: Synthetic oligonucleotide
aaguuucuggugggcucca

SEQ ID NO: 3191467 - RNA, 19 nt, Artificial Sequence
  Description of Artificial Sequence: Synthetic oligonucleotide
gccuccgaauaguggaaag

SEQ ID NO: 3191468 - RNA, 19 nt, Artificial Sequence
  Description of Artificial Sequence: Synthetic oligonucleotide
agggccuuugaggcaucac

SEQ ID NO: 3191469 - RNA, 19 nt, Artificial Sequence
  Description of Artificial Sequence: Synthetic oligonucleotide
gcgagguuuuaaagaaucc

SEQ ID NO: 3191470 - RNA, 19 nt, Artificial Sequence
  Description of Artificial Sequence: Synthetic oligonucleotide
aagggccuuugaggcauca

SEQ ID NO: 3191471 - RNA, 19 nt, Artificial Sequence
  Description of Artificial Sequence: Synthetic oligonucleotide
aaaauguacagauuuaggc

SEQ ID NO: 3191472 - RNA, 19 nt, Artificial Sequence
  Description of Artificial Sequence: Synthetic oligonucleotide
aauagaauugauaaggucg

SEQ ID NO: 3191473 - RNA, 19 nt, Artificial Sequence
  Description of Artificial Sequence: Synthetic oligonucleotide
acauauaugaccaugaacc

SEQ ID NO: 3191474 - RNA, 19 nt, Artificial Sequence
  Description of Artificial Sequence: Synthetic oligonucleotide
auaaaucagaaucacaagc

SEQ ID NO: 3191475 - RNA, 19 nt, Artificial Sequence
  Description of Artificial Sequence: Synthetic oligonucleotide
auugagacgaaauaagacc

SEQ ID NO: 3191476 - RNA, 19 nt, Artificial Sequence
  Description of Artificial Sequence: Synthetic oligonucleotide
uggaauaaaagaaugauga

SEQ ID NO: 3191477 - RNA, 19 nt, Artificial Sequence
  Description of Artificial Sequence: Synthetic oligonucleotide
aauaagaccugacaaacuc

SEQ ID NO: 3191478 - RNA, 19 nt, Artificial Sequence
  Description of Artificial Sequence: Synthetic oligonucleotide
uuuuccuucauaaagaggu

SEQ ID NO: 3191479 - RNA, 19 nt, Artificial Sequence
  Description of Artificial Sequence: Synthetic oligonucleotide
aguaauagaauugauaagg

SEQ ID NO: 3191480 - RNA, 19 nt, Artificial Sequence
  Description of Artificial Sequence: Synthetic oligonucleotide
uuuguuuuccuucauaaag

SEQ ID NO: 3191481 - RNA, 19 nt, Artificial Sequence
  Description of Artificial Sequence: Synthetic oligonucleotide
aauaaaagaaugaugagug

SEQ ID NO: 3191482 - RNA, 19 nt, Artificial Sequence
  Description of Artificial Sequence: Synthetic oligonucleotide
aacucuauagauuccaaag

SEQ ID NO: 3191483 - RNA, 19 nt, Artificial Sequence
  Description of Artificial Sequence: Synthetic oligonucleotide
uaaagugacauauaugacc

SEQ ID NO: 3191484 - RNA, 19 nt, Artificial Sequence
  Description of Artificial Sequence: Synthetic oligonucleotide
ugauaaaucagaaucacaa

SEQ ID NO: 3191485 - RNA, 19 nt, Artificial Sequence
  Description of Artificial Sequence: Synthetic oligonucleotide
ugauccaaaaguaagagaa

SEQ ID NO: 3191486 - RNA, 19 nt, Artificial Sequence
  Description of Artificial Sequence: Synthetic oligonucleotide
uagauaauuggaauaaaag

SEQ ID NO: 3191487 - RNA, 19 nt, Artificial Sequence
  Description of Artificial Sequence: Synthetic oligonucleotide
aguagaaaagucuuucuac

SEQ ID NO: 3191488 - RNA, 19 nt, Artificial Sequence
  Description of Artificial Sequence: Synthetic oligonucleotide
aauacuuuagucucuuuug

SEQ ID NO: 3191489 - RNA, 19 nt, Artificial Sequence
  Description of Artificial Sequence: Synthetic oligonucleotide
aaauguacagauuuaggcu

SEQ ID NO: 3191490 - RNA, 19 nt, Artificial Sequence
  Description of Artificial Sequence: Synthetic oligonucleotide
uucauuguaaaauacuccc

SEQ ID NO: 3191491 - RNA, 19 nt, Artificial Sequence
  Description of Artificial Sequence: Synthetic oligonucleotide
uccauuacgagacacaaca

SEQ ID NO: 3191492 - RNA, 19 nt, Artificial Sequence
  Description of Artificial Sequence: Synthetic oligonucleotide
ugcacggucacacauauag

SEQ ID NO: 3191493 - RNA, 19 nt, Artificial Sequence
  Description of Artificial Sequence: Synthetic oligonucleotide
aaugugcauguacacaggc

SEQ ID NO: 3191494 - RNA, 19 nt, Artificial Sequence
  Description of Artificial Sequence: Synthetic oligonucleotide
agauaauuggaauaaaaga

SEQ ID NO: 3191495 - RNA, 19 nt, Artificial Sequence
  Description of Artificial Sequence: Synthetic oligonucleotide
aauugagacgaaauaagac

SEQ ID NO: 3191496 - RNA, 19 nt, Artificial Sequence
  Description of Artificial Sequence: Synthetic oligonucleotide
ucuccuuugauccaaaagu

SEQ ID NO: 3191497 - RNA, 19 nt, Artificial Sequence
  Description of Artificial Sequence: Synthetic oligonucleotide
uuuucauuguaaaauacuc

SEQ ID NO: 3191498 - RNA, 19 nt, Artificial Sequence
  Description of Artificial Sequence: Synthetic oligonucleotide
uauuuaauacuuuagucuc

SEQ ID NO: 3191499 - RNA, 19 nt, Artificial Sequence
  Description of Artificial Sequence: Synthetic oligonucleotide
aaucagaaucacaagcugc

SEQ ID NO: 3191500 - RNA, 19 nt, Artificial Sequence
  Description of Artificial Sequence: Synthetic oligonucleotide
auaaggucgauccauuacg

SEQ ID NO: 3191501 - RNA, 19 nt, Artificial Sequence
  Description of Artificial Sequence: Synthetic oligonucleotide
uaaaucagaaucacaagcu

SEQ ID NO: 3191502 - RNA, 19 nt, Artificial Sequence
  Description of Artificial Sequence: Synthetic oligonucleotide
uacaacaacucugugaagg

SEQ ID NO: 3191503 - RNA, 19 nt, Artificial Sequence
  Description of Artificial Sequence: Synthetic oligonucleotide
acacaugugaguuaagguc

SEQ ID NO: 3191504 - RNA, 19 nt, Artificial Sequence
  Description of Artificial Sequence: Synthetic oligonucleotide
cacacauauagaaauaagc

SEQ ID NO: 3191505 - RNA, 19 nt, Artificial Sequence
  Description of Artificial Sequence: Synthetic oligonucleotide
ucuauuuaauacuuuaguc

SEQ ID NO: 3191506 - RNA, 19 nt, Artificial Sequence
  Description of Artificial Sequence: Synthetic oligonucleotide
uuucauuguaaaauacucc

SEQ ID NO: 3191507 - RNA, 19 nt, Artificial Sequence
  Description of Artificial Sequence: Synthetic oligonucleotide
ucugugaagggcaaaaugu

SEQ ID NO: 3191508 - RNA, 19 nt, Artificial Sequence
  Description of Artificial Sequence: Synthetic oligonucleotide
gauaauuggaauaaaagaa

SEQ ID NO: 3191509 - RNA, 19 nt, Artificial Sequence
  Description of Artificial Sequence: Synthetic oligonucleotide
gugaguuaaggucauaccg

SEQ ID NO: 3191510 - RNA, 19 nt, Artificial Sequence
  Description of Artificial Sequence: Synthetic oligonucleotide
aaguaauagaauugauaag

SEQ ID NO: 3191511 - RNA, 19 nt, Artificial Sequence
  Description of Artificial Sequence: Synthetic oligonucleotide
aaaaccuugucacggagcu

SEQ ID NO: 3191512 - RNA, 19 nt, Artificial Sequence
  Description of Artificial Sequence: Synthetic oligonucleotide
aaaucagaaucacaagcug

SEQ ID NO: 3191513 - RNA, 19 nt, Artificial Sequence
  Description of Artificial Sequence: Synthetic oligonucleotide
auaaugaugauauccacaa

SEQ ID NO: 3191514 - RNA, 19 nt, Artificial Sequence
  Description of Artificial Sequence: Synthetic oligonucleotide
uguguauaaaauuuguuuu

SEQ ID NO: 3191515 - RNA, 19 nt, Artificial Sequence
  Description of Artificial Sequence: Synthetic oligonucleotide
gauaaaucagaaucacaag

SEQ ID NO: 3191516 - RNA, 19 nt, Artificial Sequence
  Description of Artificial Sequence: Synthetic oligonucleotide
aaagugacauauaugacca

SEQ ID NO: 3191517 - RNA, 19 nt, Artificial Sequence
  Description of Artificial Sequence: Synthetic oligonucleotide
cauaaagagguuugcacgg

SEQ ID NO: 3191518 - RNA, 19 nt, Artificial Sequence
  Description of Artificial Sequence: Synthetic oligonucleotide
uuauuuguggccacagugc

SEQ ID NO: 3191519 - RNA, 19 nt, Artificial Sequence
  Description of Artificial Sequence: Synthetic oligonucleotide
aaacagauaugcagcaacc

SEQ ID NO: 3191520 - RNA, 19 nt, Artificial Sequence
  Description of Artificial Sequence: Synthetic oligonucleotide
ucucuauuuaauacuuuag

SEQ ID NO: 3191521 - RNA, 19 nt, Artificial Sequence
  Description of Artificial Sequence: Synthetic oligonucleotide
aagggcaaaauguacagau

SEQ ID NO: 3191522 - RNA, 19 nt, Artificial Sequence
  Description of Artificial Sequence: Synthetic oligonucleotide
uuugauccaaaaguaagag

SEQ ID NO: 3191523 - RNA, 19 nt, Artificial Sequence
  Description of Artificial Sequence: Synthetic oligonucleotide
uguauaaaauuuguuuucc

SEQ ID NO: 3191524 - RNA, 19 nt, Artificial Sequence
  Description of Artificial Sequence: Synthetic oligonucleotide
uaugcagcaaccagcaccc

SEQ ID NO: 3191525 - RNA, 19 nt, Artificial Sequence
  Description of Artificial Sequence: Synthetic oligonucleotide
gcuaaagugacauauauga

SEQ ID NO: 3191526 - RNA, 19 nt, Artificial Sequence
  Description of Artificial Sequence: Synthetic oligonucleotide
aguggauacgaacacaugu

SEQ ID NO: 3191527 - RNA, 19 nt, Artificial Sequence
  Description of Artificial Sequence: Synthetic oligonucleotide
gucugaaacagauaugcag

SEQ ID NO: 3191528 - RNA, 19 nt, Artificial Sequence
  Description of Artificial Sequence: Synthetic oligonucleotide
uguuuuccuucauaaagag

SEQ ID NO: 3191529 - RNA, 19 nt, Artificial Sequence
  Description of Artificial Sequence: Synthetic oligonucleotide
uuguuuuccuucauaaaga

SEQ ID NO: 3191530 - RNA, 19 nt, Artificial Sequence
  Description of Artificial Sequence: Synthetic oligonucleotide
cuuauuuguggccacagug

SEQ ID NO: 3191531 - RNA, 19 nt, Artificial Sequence
  Description of Artificial Sequence: Synthetic oligonucleotide
gaaauaagaccugacaaac

SEQ ID NO: 3191532 - RNA, 19 nt, Artificial Sequence
  Description of Artificial Sequence: Synthetic oligonucleotide
gaaacagauaugcagcaac

SEQ ID NO: 3191533 - RNA, 19 nt, Artificial Sequence
  Description of Artificial Sequence: Synthetic oligonucleotide
caaaaguaagagaaaugcc

SEQ ID NO: 3191534 - RNA, 19 nt, Artificial Sequence
  Description of Artificial Sequence: Synthetic oligonucleotide
uaagcuaaguaaauuacuu

SEQ ID NO: 3191535 - RNA, 19 nt, Artificial Sequence
  Description of Artificial Sequence: Synthetic oligonucleotide
acuaagcuaaguaaauuac

SEQ ID NO: 3191536 - RNA, 19 nt, Artificial Sequence
  Description of Artificial Sequence: Synthetic oligonucleotide
ugaguuaaggucauaccgu

SEQ ID NO: 3191537 - RNA, 19 nt, Artificial Sequence
  Description of Artificial Sequence: Synthetic oligonucleotide
acaccugaaaaccacagcu

SEQ ID NO: 3191538 - RNA, 19 nt, Artificial Sequence
  Description of Artificial Sequence: Synthetic oligonucleotide
uauagauuccaaagucucc

SEQ ID NO: 3191539 - RNA, 19 nt, Artificial Sequence
  Description of Artificial Sequence: Synthetic oligonucleotide
ugaagggcaaaauguacag

SEQ ID NO: 3191540 - RNA, 19 nt, Artificial Sequence
  Description of Artificial Sequence: Synthetic oligonucleotide
uuuaggcuuacacaccuga

SEQ ID NO: 3191541 - RNA, 19 nt, Artificial Sequence
  Description of Artificial Sequence: Synthetic oligonucleotide
ucacacauauagaaauaag

SEQ ID NO: 3191542 - RNA, 19 nt, Artificial Sequence
  Description of Artificial Sequence: Synthetic oligonucleotide
aaaagaaugaugagugugu

SEQ ID NO: 3191543 - RNA, 19 nt, Artificial Sequence
  Description of Artificial Sequence: Synthetic oligonucleotide
cacaucaggaaacacagug

SEQ ID NO: 3191544 - RNA, 19 nt, Artificial Sequence
  Description of Artificial Sequence: Synthetic oligonucleotide
aauuggaauaaaagaauga

SEQ ID NO: 3191545 - RNA, 19 nt, Artificial Sequence
  Description of Artificial Sequence: Synthetic oligonucleotide
aaauguacuugcucccgag

SEQ ID NO: 3191546 - RNA, 19 nt, Artificial Sequence
  Description of Artificial Sequence: Synthetic oligonucleotide
aaggggacaaaguaauaga

SEQ ID NO: 3191547 - RNA, 19 nt, Artificial Sequence
  Description of Artificial Sequence: Synthetic oligonucleotide
uauccacaauaacaaaacc

SEQ ID NO: 3191548 - RNA, 19 nt, Artificial Sequence
  Description of Artificial Sequence: Synthetic oligonucleotide
aacacaguggauacgaaca

SEQ ID NO: 3191549 - RNA, 19 nt, Artificial Sequence
  Description of Artificial Sequence: Synthetic oligonucleotide
aaccaggaaauugagacga

SEQ ID NO: 3191550 - RNA, 19 nt, Artificial Sequence
  Description of Artificial Sequence: Synthetic oligonucleotide
gacacaacaccacaaccag

SEQ ID NO: 3191551 - RNA, 19 nt, Artificial Sequence
  Description of Artificial Sequence: Synthetic oligonucleotide
acgaaauaagaccugacaa

SEQ ID NO: 3191552 - RNA, 19 nt, Artificial Sequence
  Description of Artificial Sequence: Synthetic oligonucleotide
aaauugagacgaaauaaga

SEQ ID NO: 3191553 - RNA, 19 nt, Artificial Sequence
  Description of Artificial Sequence: Synthetic oligonucleotide
cuauagauuccaaagucuc

SEQ ID NO: 3191554 - RNA, 19 nt, Artificial Sequence
  Description of Artificial Sequence: Synthetic oligonucleotide
acaacaacucugugaaggg

SEQ ID NO: 3191555 - RNA, 19 nt, Artificial Sequence
  Description of Artificial Sequence: Synthetic oligonucleotide
uaauagaauugauaagguc

SEQ ID NO: 3191556 - RNA, 19 nt, Artificial Sequence
  Description of Artificial Sequence: Synthetic oligonucleotide
accugaaaaccacagcuag

SEQ ID NO: 3191557 - RNA, 19 nt, Artificial Sequence
  Description of Artificial Sequence: Synthetic oligonucleotide
ucauuguaaaauacuccca

SEQ ID NO: 3191558 - RNA, 19 nt, Artificial Sequence
  Description of Artificial Sequence: Synthetic oligonucleotide
gauuccaaagucuccuuug

SEQ ID NO: 3191559 - RNA, 19 nt, Artificial Sequence
  Description of Artificial Sequence: Synthetic oligonucleotide
cuauuuaauacuuuagucu

SEQ ID NO: 3191560 - RNA, 19 nt, Artificial Sequence
  Description of Artificial Sequence: Synthetic oligonucleotide
auauaugaccaugaaccac

SEQ ID NO: 3191561 - RNA, 19 nt, Artificial Sequence
  Description of Artificial Sequence: Synthetic oligonucleotide
aaagucuuucuacaugcau

SEQ ID NO: 3191562 - RNA, 19 nt, Artificial Sequence
  Description of Artificial Sequence: Synthetic oligonucleotide
aaauacucccaaaaccaag

SEQ ID NO: 3191563 - RNA, 19 nt, Artificial Sequence
  Description of Artificial Sequence: Synthetic oligonucleotide
ugaugaguguguauaaaau

SEQ ID NO: 3191564 - RNA, 19 nt, Artificial Sequence
  Description of Artificial Sequence: Synthetic oligonucleotide
acauauagaaauaagccau

SEQ ID NO: 3191565 - RNA, 19 nt, Artificial Sequence
  Description of Artificial Sequence: Synthetic oligonucleotide
gauaaggucgauccauuac

SEQ ID NO: 3191566 - RNA, 19 nt, Artificial Sequence
  Description of Artificial Sequence: Synthetic oligonucleotide
uguucucuauuuaauacuu

SEQ ID NO: 3191567 - RNA, 19 nt, Artificial Sequence
  Description of Artificial Sequence: Synthetic oligonucleotide
ugcuaaagugacauauaug

SEQ ID NO: 3191568 - RNA, 19 nt, Artificial Sequence
  Description of Artificial Sequence: Synthetic oligonucleotide
auuggaauaaaagaaugau

SEQ ID NO: 3191569 - RNA, 19 nt, Artificial Sequence
  Description of Artificial Sequence: Synthetic oligonucleotide
gauguagauaauuggaaua

SEQ ID NO: 3191570 - RNA, 19 nt, Artificial Sequence
  Description of Artificial Sequence: Synthetic oligonucleotide
gcagaaauguacuugcucc

SEQ ID NO: 3191571 - RNA, 19 nt, Artificial Sequence
  Description of Artificial Sequence: Synthetic oligonucleotide
aggauucugacccagagcc

SEQ ID NO: 3191572 - RNA, 19 nt, Artificial Sequence
  Description of Artificial Sequence: Synthetic oligonucleotide
ugugcggucaaacaguagg

SEQ ID NO: 3191573 - RNA, 19 nt, Artificial Sequence
  Description of Artificial Sequence: Synthetic oligonucleotide
aauucuucaaucuguucag

SEQ ID NO: 3191574 - RNA, 19 nt, Artificial Sequence
  Description of Artificial Sequence: Synthetic oligonucleotide
uucaaaguccaucagcuug

SEQ ID NO: 3191575 - RNA, 19 nt, Artificial Sequence
  Description of Artificial Sequence: Synthetic oligonucleotide
acaaaguccucguacgugc

SEQ ID NO: 3191576 - RNA, 19 nt, Artificial Sequence
  Description of Artificial Sequence: Synthetic oligonucleotide
gaauucuucaaucuguuca

SEQ ID NO: 3191577 - RNA, 19 nt, Artificial Sequence
  Description of Artificial Sequence: Synthetic oligonucleotide
aaguccaucagcuuggaau

SEQ ID NO: 3191578 - RNA, 19 nt, Artificial Sequence
  Description of Artificial Sequence: Synthetic oligonucleotide
aacguuucaaaguccauca

SEQ ID NO: 3191579 - RNA, 19 nt, Artificial Sequence
  Description of Artificial Sequence: Synthetic oligonucleotide
ucuucaaucuguucaggcg

SEQ ID NO: 3191580 - RNA, 19 nt, Artificial Sequence
  Description of Artificial Sequence: Synthetic oligonucleotide
ucaaaguccaucagcuugg

SEQ ID NO: 3191581 - RNA, 19 nt, Artificial Sequence
  Description of Artificial Sequence: Synthetic oligonucleotide
ugcagcaugggcaggaacg

SEQ ID NO: 3191582 - RNA, 19 nt, Artificial Sequence
  Description of Artificial Sequence: Synthetic oligonucleotide
uuuguucuuggaaaugugc

SEQ ID NO: 3191583 - RNA, 19 nt, Artificial Sequence
  Description of Artificial Sequence: Synthetic oligonucleotide
auuggagucuucuugacca

SEQ ID NO: 3191584 - RNA, 19 nt, Artificial Sequence
  Description of Artificial Sequence: Synthetic oligonucleotide
cuggguaggauucugaccc

SEQ ID NO: 3191585 - RNA, 19 nt, Artificial Sequence
  Description of Artificial Sequence: Synthetic oligonucleotide
aaugugcugcagcaugggc

SEQ ID NO: 3191586 - RNA, 19 nt, Artificial Sequence
  Description of Artificial Sequence: Synthetic oligonucleotide
aucagcuuggaauugaggu

SEQ ID NO: 3191587 - RNA, 19 nt, Artificial Sequence
  Description of Artificial Sequence: Synthetic oligonucleotide
aauuucuccaccucauccu

SEQ ID NO: 3191588 - RNA, 19 nt, Artificial Sequence
  Description of Artificial Sequence: Synthetic oligonucleotide
uucauuucgcccuugggug

SEQ ID NO: 3191589 - RNA, 19 nt, Artificial Sequence
  Description of Artificial Sequence: Synthetic oligonucleotide
aaucuguucaggcgugaac

SEQ ID NO: 3191590 - RNA, 19 nt, Artificial Sequence
  Description of Artificial Sequence: Synthetic oligonucleotide
uccacaaaguccucguacg

SEQ ID NO: 3191591 - RNA, 19 nt, Artificial Sequence
  Description of Artificial Sequence: Synthetic oligonucleotide
ucaggcgugaacucgaucu

SEQ ID NO: 3191592 - RNA, 19 nt, Artificial Sequence
  Description of Artificial Sequence: Synthetic oligonucleotide
ugaccagccaucaauuucu

SEQ ID NO: 3191593 - RNA, 19 nt, Artificial Sequence
  Description of Artificial Sequence: Synthetic oligonucleotide
auugaggucuuccuguuug

SEQ ID NO: 3191594 - RNA, 19 nt, Artificial Sequence
  Description of Artificial Sequence: Synthetic oligonucleotide
aggacauccccacacuggc

SEQ ID NO: 3191595 - RNA, 19 nt, Artificial Sequence
  Description of Artificial Sequence: Synthetic oligonucleotide
uuguucuuggaaaugugcu

SEQ ID NO: 3191596 - RNA, 19 nt, Artificial Sequence
  Description of Artificial Sequence: Synthetic oligonucleotide
gauucugacccagagcccg

SEQ ID NO: 3191597 - RNA, 19 nt, Artificial Sequence
  Description of Artificial Sequence: Synthetic oligonucleotide
caauuucuccaccucaucc

SEQ ID NO: 3191598 - RNA, 19 nt, Artificial Sequence
  Description of Artificial Sequence: Synthetic oligonucleotide
auacgugaucuucauuucg

SEQ ID NO: 3191599 - RNA, 19 nt, Artificial Sequence
  Description of Artificial Sequence: Synthetic oligonucleotide
ucaaacaguaggaaggcuu

SEQ ID NO: 3191600 - RNA, 19 nt, Artificial Sequence
  Description of Artificial Sequence: Synthetic oligonucleotide
uacgugaucuucauuucgc

SEQ ID NO: 3191601 - RNA, 19 nt, Artificial Sequence
  Description of Artificial Sequence: Synthetic oligonucleotide
uugucaaagacccgcaguc

SEQ ID NO: 3191602 - RNA, 19 nt, Artificial Sequence
  Description of Artificial Sequence: Synthetic oligonucleotide
uuggaaaugugcugcagca

SEQ ID NO: 3191603 - RNA, 19 nt, Artificial Sequence
  Description of Artificial Sequence: Synthetic oligonucleotide
uguucuuggaaaugugcug

SEQ ID NO: 3191604 - RNA, 19 nt, Artificial Sequence
  Description of Artificial Sequence: Synthetic oligonucleotide
ugggugugcggucaaacag

SEQ ID NO: 3191605 - RNA, 19 nt, Artificial Sequence
  Description of Artificial Sequence: Synthetic oligonucleotide
uucuucaaucuguucaggc

SEQ ID NO: 3191606 - RNA, 19 nt, Artificial Sequence
  Description of Artificial Sequence: Synthetic oligonucleotide
uggaauugaggucuuccug

SEQ ID NO: 3191607 - RNA, 19 nt, Artificial Sequence
  Description of Artificial Sequence: Synthetic oligonucleotide
ucuucauuucgcccuuggg

SEQ ID NO: 3191608 - RNA, 19 nt, Artificial Sequence
  Description of Artificial Sequence: Synthetic oligonucleotide
aaacaguaggaaggcuucc

SEQ ID NO: 3191609 - RNA, 19 nt, Artificial Sequence
  Description of Artificial Sequence: Synthetic oligonucleotide
ugugcugcagcaugggcag

SEQ ID NO: 3191610 - RNA, 19 nt, Artificial Sequence
  Description of Artificial Sequence: Synthetic oligonucleotide
uucuugaccagccaucaau

SEQ ID NO: 3191611 - RNA, 19 nt, Artificial Sequence
  Description of Artificial Sequence: Synthetic oligonucleotide
cuuggaaaugugcugcagc

SEQ ID NO: 3191612 - RNA, 19 nt, Artificial Sequence
  Description of Artificial Sequence: Synthetic oligonucleotide
gaaaugugcugcagcaugg

SEQ ID NO: 3191613 - RNA, 19 nt, Artificial Sequence
  Description of Artificial Sequence: Synthetic oligonucleotide
acgugaucuucauuucgcc

SEQ ID NO: 3191614 - RNA, 19 nt, Artificial Sequence
  Description of Artificial Sequence: Synthetic oligonucleotide
ucuuuguucuuggaaaugu

SEQ ID NO: 3191615 - RNA, 19 nt, Artificial Sequence
  Description of Artificial Sequence: Synthetic oligonucleotide
auuucuccaccucauccuc

SEQ ID NO: 3191616 - RNA, 19 nt, Artificial Sequence
  Description of Artificial Sequence: Synthetic oligonucleotide
uccucagucagucucucac

SEQ ID NO: 3191617 - RNA, 19 nt, Artificial Sequence
  Description of Artificial Sequence: Synthetic oligonucleotide
aguaggaaggcuuccuuga

SEQ ID NO: 3191618 - RNA, 19 nt, Artificial Sequence
  Description of Artificial Sequence: Synthetic oligonucleotide
ugugccguugcccuccuug

SEQ ID NO: 3191619 - RNA, 19 nt, Artificial Sequence
  Description of Artificial Sequence: Synthetic oligonucleotide
aaagacccgcagucccucc

SEQ ID NO: 3191620 - RNA, 19 nt, Artificial Sequence
  Description of Artificial Sequence: Synthetic oligonucleotide
guaggauucugacccagag

SEQ ID NO: 3191621 - RNA, 19 nt, Artificial Sequence
  Description of Artificial Sequence: Synthetic oligonucleotide
uugaccagccaucaauuuc

SEQ ID NO: 3191622 - RNA, 19 nt, Artificial Sequence
  Description of Artificial Sequence: Synthetic oligonucleotide
uuccccaggacacggagca

SEQ ID NO: 3191623 - RNA, 19 nt, Artificial Sequence
  Description of Artificial Sequence: Synthetic oligonucleotide
guucuuggaaaugugcugc

SEQ ID NO: 3191624 - RNA, 19 nt, Artificial Sequence
  Description of Artificial Sequence: Synthetic oligonucleotide
aggucuuccuguuugggcu

SEQ ID NO: 3191625 - RNA, 19 nt, Artificial Sequence
  Description of Artificial Sequence: Synthetic oligonucleotide
uuugggcuuccccaggaca

SEQ ID NO: 3191626 - RNA, 19 nt, Artificial Sequence
  Description of Artificial Sequence: Synthetic oligonucleotide
aaaugugcugcagcauggg

SEQ ID NO: 3191627 - RNA, 19 nt, Artificial Sequence
  Description of Artificial Sequence: Synthetic oligonucleotide
uguggccagcacauggcgg

SEQ ID NO: 3191628 - RNA, 19 nt, Artificial Sequence
  Description of Artificial Sequence: Synthetic oligonucleotide
uaggauucugacccagagc

SEQ ID NO: 3191629 - RNA, 19 nt, Artificial Sequence
  Description of Artificial Sequence: Synthetic oligonucleotide
caaacaguaggaaggcuuc

SEQ ID NO: 3191630 - RNA, 19 nt, Artificial Sequence
  Description of Artificial Sequence: Synthetic oligonucleotide
uguucaggcgugaacucga

SEQ ID NO: 3191631 - RNA, 19 nt, Artificial Sequence
  Description of Artificial Sequence: Synthetic oligonucleotide
cuuggaauugaggucuucc

SEQ ID NO: 3191632 - RNA, 19 nt, Artificial Sequence
  Description of Artificial Sequence: Synthetic oligonucleotide
ucagcuuggaauugagguc

SEQ ID NO: 3191633 - RNA, 19 nt, Artificial Sequence
  Description of Artificial Sequence: Synthetic oligonucleotide
uccuguuugggcuucccca

SEQ ID NO: 3191634 - RNA, 19 nt, Artificial Sequence
  Description of Artificial Sequence: Synthetic oligonucleotide
uucaaucuguucaggcgug

SEQ ID NO: 3191635 - RNA, 19 nt, Artificial Sequence
  Description of Artificial Sequence: Synthetic oligonucleotide
agccauuggagucuucuug

SEQ ID NO: 3191636 - RNA, 19 nt, Artificial Sequence
  Description of Artificial Sequence: Synthetic oligonucleotide
agugucuuuguucuuggaa

SEQ ID NO: 3191637 - RNA, 19 nt, Artificial Sequence
  Description of Artificial Sequence: Synthetic oligonucleotide
uuggaauugaggucuuccu

SEQ ID NO: 3191638 - RNA, 19 nt, Artificial Sequence
  Description of Artificial Sequence: Synthetic oligonucleotide
cagucucucacccagugug

SEQ ID NO: 3191639 - RNA, 19 nt, Artificial Sequence
  Description of Artificial Sequence: Synthetic oligonucleotide
gucaaagacccgcaguccc

SEQ ID NO: 3191640 - RNA, 19 nt, Artificial Sequence
  Description of Artificial Sequence: Synthetic oligonucleotide
cucagucagucucucaccc

SEQ ID NO: 3191641 - RNA, 19 nt, Artificial Sequence
  Description of Artificial Sequence: Synthetic oligonucleotide
uugaauucuucaaucuguu

SEQ ID NO: 3191642 - RNA, 19 nt, Artificial Sequence
  Description of Artificial Sequence: Synthetic oligonucleotide
aucuguucaggcgugaacu

SEQ ID NO: 3191643 - RNA, 19 nt, Artificial Sequence
  Description of Artificial Sequence: Synthetic oligonucleotide
agccaucaauuucuccacc

SEQ ID NO: 3191644 - RNA, 19 nt, Artificial Sequence
  Description of Artificial Sequence: Synthetic oligonucleotide
ggaaaugugcugcagcaug

SEQ ID NO: 3191645 - RNA, 19 nt, Artificial Sequence
  Description of Artificial Sequence: Synthetic oligonucleotide
ugaugcagccauuggaguc

SEQ ID NO: 3191646 - RNA, 19 nt, Artificial Sequence
  Description of Artificial Sequence: Synthetic oligonucleotide
cuuuguucuuggaaaugug

SEQ ID NO: 3191647 - RNA, 19 nt, Artificial Sequence
  Description of Artificial Sequence: Synthetic oligonucleotide
gaggucuuccuguuugggc

SEQ ID NO: 3191648 - RNA, 19 nt, Artificial Sequence
  Description of Artificial Sequence: Synthetic oligonucleotide
uugaggucuuccuguuugg

SEQ ID NO: 3191649 - RNA, 19 nt, Artificial Sequence
  Description of Artificial Sequence: Synthetic oligonucleotide
agcaccucugccuggguag

SEQ ID NO: 3191650 - RNA, 19 nt, Artificial Sequence
  Description of Artificial Sequence: Synthetic oligonucleotide
ugucuuuguucuuggaaau

SEQ ID NO: 3191651 - RNA, 19 nt, Artificial Sequence
  Description of Artificial Sequence: Synthetic oligonucleotide
cucauccucagucagucuc

SEQ ID NO: 3191652 - RNA, 19 nt, Artificial Sequence
  Description of Artificial Sequence: Synthetic oligonucleotide
cauuggagucuucuugacc

SEQ ID NO: 3191653 - RNA, 19 nt, Artificial Sequence
  Description of Artificial Sequence: Synthetic oligonucleotide
caggacauccccacacugg

SEQ ID NO: 3191654 - RNA, 19 nt, Artificial Sequence
  Description of Artificial Sequence: Synthetic oligonucleotide
aucuucauuucgcccuugg

SEQ ID NO: 3191655 - RNA, 19 nt, Artificial Sequence
  Description of Artificial Sequence: Synthetic oligonucleotide
cuugaauucuucaaucugu

SEQ ID NO: 3191656 - RNA, 19 nt, Artificial Sequence
  Description of Artificial Sequence: Synthetic oligonucleotide
gaacguuucaaaguccauc

SEQ ID NO: 3191657 - RNA, 19 nt, Artificial Sequence
  Description of Artificial Sequence: Synthetic oligonucleotide
ucuugaccagccaucaauu

SEQ ID NO: 3191658 - RNA, 19 nt, Artificial Sequence
  Description of Artificial Sequence: Synthetic oligonucleotide
aguccaucagcuuggaauu

SEQ ID NO: 3191659 - RNA, 19 nt, Artificial Sequence
  Description of Artificial Sequence: Synthetic oligonucleotide
uugggcuuccccaggacac

SEQ ID NO: 3191660 - RNA, 19 nt, Artificial Sequence
  Description of Artificial Sequence: Synthetic oligonucleotide
ucuucuugaccagccauca

SEQ ID NO: 3191661 - RNA, 19 nt, Artificial Sequence
  Description of Artificial Sequence: Synthetic oligonucleotide
accagccaucaauuucucc

SEQ ID NO: 3191662 - RNA, 19 nt, Artificial Sequence
  Description of Artificial Sequence: Synthetic oligonucleotide
caguguggccagcacaugg

SEQ ID NO: 3191663 - RNA, 19 nt, Artificial Sequence
  Description of Artificial Sequence: Synthetic oligonucleotide
caucagcuuggaauugagg

SEQ ID NO: 3191664 - RNA, 19 nt, Artificial Sequence
  Description of Artificial Sequence: Synthetic oligonucleotide
gugucuuuguucuuggaaa

SEQ ID NO: 3191665 - RNA, 19 nt, Artificial Sequence
  Description of Artificial Sequence: Synthetic oligonucleotide
gacauccccacacuggcca

SEQ ID NO: 3191666 - RNA, 19 nt, Artificial Sequence
  Description of Artificial Sequence: Synthetic oligonucleotide
uucuccaccucauccucag

SEQ ID NO: 3191667 - RNA, 19 nt, Artificial Sequence
  Description of Artificial Sequence: Synthetic oligonucleotide
ugaauucuucaaucuguuc

SEQ ID NO: 3191668 - RNA, 19 nt, Artificial Sequence
  Description of Artificial Sequence: Synthetic oligonucleotide
aguguggccagcacauggc

SEQ ID NO: 3191669 - RNA, 19 nt, Artificial Sequence
  Description of Artificial Sequence: Synthetic oligonucleotide
ucauccucagucagucucu

SEQ ID NO: 3191670 - RNA, 19 nt, Artificial Sequence
  Description of Artificial Sequence: Synthetic oligonucleotide
ucaauuucuccaccucauc

SEQ ID NO: 3191671 - RNA, 19 nt, Artificial Sequence
  Description of Artificial Sequence: Synthetic oligonucleotide
aagauggugauccaggugg

SEQ ID NO: 3191672 - RNA, 19 nt, Artificial Sequence
  Description of Artificial Sequence: Synthetic oligonucleotide
aaggcaggaacgcaaaucc

SEQ ID NO: 3191673 - RNA, 19 nt, Artificial Sequence
  Description of Artificial Sequence: Synthetic oligonucleotide
uuugauuuggcucugcucu

SEQ ID NO: 3191674 - RNA, 19 nt, Artificial Sequence
  Description of Artificial Sequence: Synthetic oligonucleotide
aaagaaaaggcaggaacgc

SEQ ID NO: 3191675 - RNA, 19 nt, Artificial Sequence
  Description of Artificial Sequence: Synthetic oligonucleotide
aucugaaagauggugaucc

SEQ ID NO: 3191676 - RNA, 19 nt, Artificial Sequence
  Description of Artificial Sequence: Synthetic oligonucleotide
aaccagaaaauguugacca

SEQ ID NO: 3191677 - RNA, 19 nt, Artificial Sequence
  Description of Artificial Sequence: Synthetic oligonucleotide
ugaaagauggugauccagg

SEQ ID NO: 3191678 - RNA, 19 nt, Artificial Sequence
  Description of Artificial Sequence: Synthetic oligonucleotide
ugaccaaccaaagaaaagg

SEQ ID NO: 3191679 - RNA, 19 nt, Artificial Sequence
  Description of Artificial Sequence: Synthetic oligonucleotide
caaagaaaaggcaggaacg

SEQ ID NO: 3191680 - RNA, 19 nt, Artificial Sequence
  Description of Artificial Sequence: Synthetic oligonucleotide
ucucugaagaaccagaaaa

SEQ ID NO: 3191681 - RNA, 19 nt, Artificial Sequence
  Description of Artificial Sequence: Synthetic oligonucleotide
aggacaacuacccagaaga

SEQ ID NO: 3191682 - RNA, 19 nt, Artificial Sequence
  Description of Artificial Sequence: Synthetic oligonucleotide
agaaagaacgcagagcagc

SEQ ID NO: 3191683 - RNA, 19 nt, Artificial Sequence
  Description of Artificial Sequence: Synthetic oligonucleotide
auagccuuugauuuggcuc

SEQ ID NO: 3191684 - RNA, 19 nt, Artificial Sequence
  Description of Artificial Sequence: Synthetic oligonucleotide
agaagaagaagcccacggc

SEQ ID NO: 3191685 - RNA, 19 nt, Artificial Sequence
  Description of Artificial Sequence: Synthetic oligonucleotide
agagcagagaagcgcaucc

SEQ ID NO: 3191686 - RNA, 19 nt, Artificial Sequence
  Description of Artificial Sequence: Synthetic oligonucleotide
acuacccagaagaagaagc

SEQ ID NO: 3191687 - RNA, 19 nt, Artificial Sequence
  Description of Artificial Sequence: Synthetic oligonucleotide
aaaauguugaccaaccaaa

SEQ ID NO: 3191688 - RNA, 19 nt, Artificial Sequence
  Description of Artificial Sequence: Synthetic oligonucleotide
caucccgggagaaagaacg

SEQ ID NO: 3191689 - RNA, 19 nt, Artificial Sequence
  Description of Artificial Sequence: Synthetic oligonucleotide
agaaccagaaaauguugac

SEQ ID NO: 3191690 - RNA, 19 nt, Artificial Sequence
  Description of Artificial Sequence: Synthetic oligonucleotide
aacauagccuuugauuugg

SEQ ID NO: 3191691 - RNA, 19 nt, Artificial Sequence
  Description of Artificial Sequence: Synthetic oligonucleotide
aauggugaacgagagguag

SEQ ID NO: 3191692 - RNA, 19 nt, Artificial Sequence
  Description of Artificial Sequence: Synthetic oligonucleotide
ugaagaaccagaaaauguu

SEQ ID NO: 3191693 - RNA, 19 nt, Artificial Sequence
  Description of Artificial Sequence: Synthetic oligonucleotide
aauccacccagauaguacu

SEQ ID NO: 3191694 - RNA, 19 nt, Artificial Sequence
  Description of Artificial Sequence: Synthetic oligonucleotide
uagaucugaaagaugguga

SEQ ID NO: 3191695 - RNA, 19 nt, Artificial Sequence
  Description of Artificial Sequence: Synthetic oligonucleotide
aauguugaccaaccaaaga

SEQ ID NO: 3191696 - RNA, 19 nt, Artificial Sequence
  Description of Artificial Sequence: Synthetic oligonucleotide
aaaggcaggaacgcaaauc

SEQ ID NO: 3191697 - RNA, 19 nt, Artificial Sequence
  Description of Artificial Sequence: Synthetic oligonucleotide
uucagcuucuccucguugg

SEQ ID NO: 3191698 - RNA, 19 nt, Artificial Sequence
  Description of Artificial Sequence: Synthetic oligonucleotide
aaggccucucugaagaacc

SEQ ID NO: 3191699 - RNA, 19 nt, Artificial Sequence
  Description of Artificial Sequence: Synthetic oligonucleotide
auguugaccaaccaaagaa

SEQ ID NO: 3191700 - RNA, 19 nt, Artificial Sequence
  Description of Artificial Sequence: Synthetic oligonucleotide
aaauccacccagauaguac

SEQ ID NO: 3191701 - RNA, 19 nt, Artificial Sequence
  Description of Artificial Sequence: Synthetic oligonucleotide
aaacauagccuuugauuug

SEQ ID NO: 3191702 - RNA, 19 nt, Artificial Sequence
  Description of Artificial Sequence: Synthetic oligonucleotide
cugagcgccaaacauagcc

SEQ ID NO: 3191703 - RNA, 19 nt, Artificial Sequence
  Description of Artificial Sequence: Synthetic oligonucleotide
aagagcgccccaucggggc

SEQ ID NO: 3191704 - RNA, 19 nt, Artificial Sequence
  Description of Artificial Sequence: Synthetic oligonucleotide
uugaccaaccaaagaaaag

SEQ ID NO: 3191705 - RNA, 19 nt, Artificial Sequence
  Description of Artificial Sequence: Synthetic oligonucleotide
caaccaaagaaaaggcagg

SEQ ID NO: 3191706 - RNA, 19 nt, Artificial Sequence
  Description of Artificial Sequence: Synthetic oligonucleotide
aagcccacggcugagcgcc

SEQ ID NO: 3191707 - RNA, 19 nt, Artificial Sequence
  Description of Artificial Sequence: Synthetic oligonucleotide
cagaaaauguugaccaacc

SEQ ID NO: 3191708 - RNA, 19 nt, Artificial Sequence
  Description of Artificial Sequence: Synthetic oligonucleotide
aagaacgcagagcagccug

SEQ ID NO: 3191709 - RNA, 19 nt, Artificial Sequence
  Description of Artificial Sequence: Synthetic oligonucleotide
gaagcugucagggagugcc

SEQ ID NO: 3191710 - RNA, 19 nt, Artificial Sequence
  Description of Artificial Sequence: Synthetic oligonucleotide
ucugaagaaccagaaaaug

SEQ ID NO: 3191711 - RNA, 19 nt, Artificial Sequence
  Description of Artificial Sequence: Synthetic oligonucleotide
aaagauggugauccaggug

SEQ ID NO: 3191712 - RNA, 19 nt, Artificial Sequence
  Description of Artificial Sequence: Synthetic oligonucleotide
gaaaauguugaccaaccaa

SEQ ID NO: 3191713 - RNA, 19 nt, Artificial Sequence
  Description of Artificial Sequence: Synthetic oligonucleotide
ggagaaagaacgcagagca

SEQ ID NO: 3191714 - RNA, 19 nt, Artificial Sequence
  Description of Artificial Sequence: Synthetic oligonucleotide
acaacuacccagaagaaga

SEQ ID NO: 3191715 - RNA, 19 nt, Artificial Sequence
  Description of Artificial Sequence: Synthetic oligonucleotide
cagaagaagaagcccacgg

SEQ ID NO: 3191716 - RNA, 19 nt, Artificial Sequence
  Description of Artificial Sequence: Synthetic oligonucleotide
aaauguugaccaaccaaag

SEQ ID NO: 3191717 - RNA, 19 nt, Artificial Sequence
  Description of Artificial Sequence: Synthetic oligonucleotide
uguugaccaaccaaagaaa

SEQ ID NO: 3191718 - RNA, 19 nt, Artificial Sequence
  Description of Artificial Sequence: Synthetic oligonucleotide
gugaacgagagguaguccc

SEQ ID NO: 3191719 - RNA, 19 nt, Artificial Sequence
  Description of Artificial Sequence: Synthetic oligonucleotide
gaaccagaaaauguugacc

SEQ ID NO: 3191720 - RNA, 19 nt, Artificial Sequence
  Description of Artificial Sequence: Synthetic oligonucleotide
ucagggagugcccagggga

SEQ ID NO: 3191721 - RNA, 19 nt, Artificial Sequence
  Description of Artificial Sequence: Synthetic oligonucleotide
uagccuuugauuuggcucu

SEQ ID NO: 3191722 - RNA, 19 nt, Artificial Sequence
  Description of Artificial Sequence: Synthetic oligonucleotide
cuacccagaagaagaagcc

SEQ ID NO: 3191723 - RNA, 19 nt, Artificial Sequence
  Description of Artificial Sequence: Synthetic oligonucleotide
ucugcucuguguaggcugg

SEQ ID NO: 3191724 - RNA, 19 nt, Artificial Sequence
  Description of Artificial Sequence: Synthetic oligonucleotide
gaagaaccagaaaauguug

SEQ ID NO: 3191725 - RNA, 19 nt, Artificial Sequence
  Description of Artificial Sequence: Synthetic oligonucleotide
gauaguacuuccggcacag

SEQ ID NO: 3191726 - RNA, 19 nt, Artificial Sequence
  Description of Artificial Sequence: Synthetic oligonucleotide
cgcaaauccacccagauag

SEQ ID NO: 3191727 - RNA, 19 nt, Artificial Sequence
  Description of Artificial Sequence: Synthetic oligonucleotide
agcagagaagcgcaucccg

SEQ ID NO: 3191728 - RNA, 19 nt, Artificial Sequence
  Description of Artificial Sequence: Synthetic oligonucleotide
aagaaccagaaaauguuga

SEQ ID NO: 3191729 - RNA, 19 nt, Artificial Sequence
  Description of Artificial Sequence: Synthetic oligonucleotide
uaguacuuccggcacaggu

SEQ ID NO: 3191730 - RNA, 19 nt, Artificial Sequence
  Description of Artificial Sequence: Synthetic oligonucleotide
aggaaggccucucugaaga

SEQ ID NO: 3191731 - RNA, 19 nt, Artificial Sequence
  Description of Artificial Sequence: Synthetic oligonucleotide
ccaaccaaagaaaaggcag

SEQ ID NO: 3191732 - RNA, 19 nt, Artificial Sequence
  Description of Artificial Sequence: Synthetic oligonucleotide
acagguucagcuucuccuc

SEQ ID NO: 3191733 - RNA, 19 nt, Artificial Sequence
  Description of Artificial Sequence: Synthetic oligonucleotide
uaggcuggggcgaggaagg

SEQ ID NO: 3191734 - RNA, 19 nt, Artificial Sequence
  Description of Artificial Sequence: Synthetic oligonucleotide
acccagauaguacuuccgg

SEQ ID NO: 3191735 - RNA, 19 nt, Artificial Sequence
  Description of Artificial Sequence: Synthetic oligonucleotide
guagaucugaaagauggug

SEQ ID NO: 3191736 - RNA, 19 nt, Artificial Sequence
  Description of Artificial Sequence: Synthetic oligonucleotide
cucuguguaggcuggggcg

SEQ ID NO: 3191737 - RNA, 19 nt, Artificial Sequence
  Description of Artificial Sequence: Synthetic oligonucleotide
ugaacgagagguagucccc

SEQ ID NO: 3191738 - RNA, 19 nt, Artificial Sequence
  Description of Artificial Sequence: Synthetic oligonucleotide
ggugaggacaacuacccag

SEQ ID NO: 3191739 - RNA, 19 nt, Artificial Sequence
  Description of Artificial Sequence: Synthetic oligonucleotide
gacaacuacccagaagaag

SEQ ID NO: 3191740 - RNA, 19 nt, Artificial Sequence
  Description of Artificial Sequence: Synthetic oligonucleotide
cugugaagcugucagggag

SEQ ID NO: 3191741 - RNA, 19 nt, Artificial Sequence
  Description of Artificial Sequence: Synthetic oligonucleotide
agaaaauguugaccaacca

SEQ ID NO: 3191742 - RNA, 19 nt, Artificial Sequence
  Description of Artificial Sequence: Synthetic oligonucleotide
aacgcaaauccacccagau

SEQ ID NO: 3191743 - RNA, 19 nt, Artificial Sequence
  Description of Artificial Sequence: Synthetic oligonucleotide
aaccaaagaaaaggcagga

SEQ ID NO: 3191744 - RNA, 19 nt, Artificial Sequence
  Description of Artificial Sequence: Synthetic oligonucleotide
gaaagaacgcagagcagcc

SEQ ID NO: 3191745 - RNA, 19 nt, Artificial Sequence
  Description of Artificial Sequence: Synthetic oligonucleotide
ugugaagcugucagggagu

SEQ ID NO: 3191746 - RNA, 19 nt, Artificial Sequence
  Description of Artificial Sequence: Synthetic oligonucleotide
uuuggcucugcucugugua

SEQ ID NO: 3191747 - RNA, 19 nt, Artificial Sequence
  Description of Artificial Sequence: Synthetic oligonucleotide
agaagcccacggcugagcg

SEQ ID NO: 3191748 - RNA, 19 nt, Artificial Sequence
  Description of Artificial Sequence: Synthetic oligonucleotide
aagaagaagcccacggcug

SEQ ID NO: 3191749 - RNA, 19 nt, Artificial Sequence
  Description of Artificial Sequence: Synthetic oligonucleotide
agaucugaaagauggugau

SEQ ID NO: 3191750 - RNA, 19 nt, Artificial Sequence
  Description of Artificial Sequence: Synthetic oligonucleotide
gaccaaccaaagaaaaggc

SEQ ID NO: 3191751 - RNA, 19 nt, Artificial Sequence
  Description of Artificial Sequence: Synthetic oligonucleotide
cgguagaucugaaagaugg

SEQ ID NO: 3191752 - RNA, 19 nt, Artificial Sequence
  Description of Artificial Sequence: Synthetic oligonucleotide
agguggugaggacaacuac

SEQ ID NO: 3191753 - RNA, 19 nt, Artificial Sequence
  Description of Artificial Sequence: Synthetic oligonucleotide
ccaaagaaaaggcaggaac

SEQ ID NO: 3191754 - RNA, 19 nt, Artificial Sequence
  Description of Artificial Sequence: Synthetic oligonucleotide
ugagcgccaaacauagccu

SEQ ID NO: 3191755 - RNA, 19 nt, Artificial Sequence
  Description of Artificial Sequence: Synthetic oligonucleotide
gaagaagaagcccacggcu

SEQ ID NO: 3191756 - RNA, 19 nt, Artificial Sequence
  Description of Artificial Sequence: Synthetic oligonucleotide
aagaaaaggcaggaacgca

SEQ ID NO: 3191757 - RNA, 19 nt, Artificial Sequence
  Description of Artificial Sequence: Synthetic oligonucleotide
ugucagggagugcccaggg

SEQ ID NO: 3191758 - RNA, 19 nt, Artificial Sequence
  Description of Artificial Sequence: Synthetic oligonucleotide
aagaagcccacggcugagc

SEQ ID NO: 3191759 - RNA, 19 nt, Artificial Sequence
  Description of Artificial Sequence: Synthetic oligonucleotide
gaggacaacuacccagaag

SEQ ID NO: 3191760 - RNA, 19 nt, Artificial Sequence
  Description of Artificial Sequence: Synthetic oligonucleotide
aacuacccagaagaagaag

SEQ ID NO: 3191761 - RNA, 19 nt, Artificial Sequence
  Description of Artificial Sequence: Synthetic oligonucleotide
cagagaagcgcaucccggg

SEQ ID NO: 3191762 - RNA, 19 nt, Artificial Sequence
  Description of Artificial Sequence: Synthetic oligonucleotide
caaacauagccuuugauuu

SEQ ID NO: 3191763 - RNA, 19 nt, Artificial Sequence
  Description of Artificial Sequence: Synthetic oligonucleotide
cuuugauuuggcucugcuc

SEQ ID NO: 3191764 - RNA, 19 nt, Artificial Sequence
  Description of Artificial Sequence: Synthetic oligonucleotide
uggugauccagguggugag

SEQ ID NO: 3191765 - RNA, 19 nt, Artificial Sequence
  Description of Artificial Sequence: Synthetic oligonucleotide
aaaaggcaggaacgcaaau

SEQ ID NO: 3191766 - RNA, 19 nt, Artificial Sequence
  Description of Artificial Sequence: Synthetic oligonucleotide
caggaacgcaaauccaccc

SEQ ID NO: 3191767 - RNA, 19 nt, Artificial Sequence
  Description of Artificial Sequence: Synthetic oligonucleotide
agaagaagcccacggcuga

SEQ ID NO: 3191768 - RNA, 19 nt, Artificial Sequence
  Description of Artificial Sequence: Synthetic oligonucleotide
uuggacacccgcuccaagu

SEQ ID NO: 3191769 - RNA, 19 nt, Artificial Sequence
  Description of Artificial Sequence: Synthetic oligonucleotide
gagaagcgcaucccgggag

SEQ ID NO: 3191770 - RNA, 19 nt, Artificial Sequence
  Description of Artificial Sequence: Synthetic oligonucleotide
cagccugugaagcugucag

SEQ ID NO: 3191771 - RNA, 19 nt, Artificial Sequence
  Description of Artificial Sequence: Synthetic oligonucleotide
agaaugucuacaaagaacc

SEQ ID NO: 3191772 - RNA, 19 nt, Artificial Sequence
  Description of Artificial Sequence: Synthetic oligonucleotide
aaacuuacuggccagcagg

SEQ ID NO: 3191773 - RNA, 19 nt, Artificial Sequence
  Description of Artificial Sequence: Synthetic oligonucleotide
gaagcuuuaguccuuuucg

SEQ ID NO: 3191774 - RNA, 19 nt, Artificial Sequence
  Description of Artificial Sequence: Synthetic oligonucleotide
agguagaugggccaggugc

SEQ ID NO: 3191775 - RNA, 19 nt, Artificial Sequence
  Description of Artificial Sequence: Synthetic oligonucleotide
ugguccaguagguagaugg

SEQ ID NO: 3191776 - RNA, 19 nt, Artificial Sequence
  Description of Artificial Sequence: Synthetic oligonucleotide
aagcuuuaguccuuuucgc

SEQ ID NO: 3191777 - RNA, 19 nt, Artificial Sequence
  Description of Artificial Sequence: Synthetic oligonucleotide
aucugcuccaguuugggcg

SEQ ID NO: 3191778 - RNA, 19 nt, Artificial Sequence
  Description of Artificial Sequence: Synthetic oligonucleotide
ucuacaaagaaccgacggc

SEQ ID NO: 3191779 - RNA, 19 nt, Artificial Sequence
  Description of Artificial Sequence: Synthetic oligonucleotide
gaagugguccaguagguag

SEQ ID NO: 3191780 - RNA, 19 nt, Artificial Sequence
  Description of Artificial Sequence: Synthetic oligonucleotide
uccaguuugggcgacacgg

SEQ ID NO: 3191781 - RNA, 19 nt, Artificial Sequence
  Description of Artificial Sequence: Synthetic oligonucleotide
guauacagcugcuuggagg

SEQ ID NO: 3191782 - RNA, 19 nt, Artificial Sequence
  Description of Artificial Sequence: Synthetic oligonucleotide
uauacagcugcuuggaggu

SEQ ID NO: 3191783 - RNA, 19 nt, Artificial Sequence
  Description of Artificial Sequence: Synthetic oligonucleotide
uuuaucugcuccaguuugg

SEQ ID NO: 3191784 - RNA, 19 nt, Artificial Sequence
  Description of Artificial Sequence: Synthetic oligonucleotide
gucuacaaagaaccgacgg

SEQ ID NO: 3191785 - RNA, 19 nt, Artificial Sequence
  Description of Artificial Sequence: Synthetic oligonucleotide
uguccucaaacuuacuggc

SEQ ID NO: 3191786 - RNA, 19 nt, Artificial Sequence
  Description of Artificial Sequence: Synthetic oligonucleotide
cuguccucaaacuuacugg

SEQ ID NO: 3191787 - RNA, 19 nt, Artificial Sequence
  Description of Artificial Sequence: Synthetic oligonucleotide
cagaaugucuacaaagaac

SEQ ID NO: 3191788 - RNA, 19 nt, Artificial Sequence
  Description of Artificial Sequence: Synthetic oligonucleotide
augucuacaaagaaccgac

SEQ ID NO: 3191789 - RNA, 19 nt, Artificial Sequence
  Description of Artificial Sequence: Synthetic oligonucleotide
agcuuuaguccuuuucgcg

SEQ ID NO: 3191790 - RNA, 19 nt, Artificial Sequence
  Description of Artificial Sequence: Synthetic oligonucleotide
uuacuggccagcaggaggc

SEQ ID NO: 3191791 - RNA, 19 nt, Artificial Sequence
  Description of Artificial Sequence: Synthetic oligonucleotide
uccucaaacuuacuggcca

SEQ ID NO: 3191792 - RNA, 19 nt, Artificial Sequence
  Description of Artificial Sequence: Synthetic oligonucleotide
cuuacuggccagcaggagg

SEQ ID NO: 3191793 - RNA, 19 nt, Artificial Sequence
  Description of Artificial Sequence: Synthetic oligonucleotide
ucagaaugucuacaaagaa

SEQ ID NO: 3191794 - RNA, 19 nt, Artificial Sequence
  Description of Artificial Sequence: Synthetic oligonucleotide
uccaguagguagaugggcc

SEQ ID NO: 3191795 - RNA, 19 nt, Artificial Sequence
  Description of Artificial Sequence: Synthetic oligonucleotide
gaaccgacggcucuucagg

SEQ ID NO: 3191796 - RNA, 19 nt, Artificial Sequence
  Description of Artificial Sequence: Synthetic oligonucleotide
guuuaucugcuccaguuug

SEQ ID NO: 3191797 - RNA, 19 nt, Artificial Sequence
  Description of Artificial Sequence: Synthetic oligonucleotide
ggucagaaugucuacaaag

SEQ ID NO: 3191798 - RNA, 19 nt, Artificial Sequence
  Description of Artificial Sequence: Synthetic oligonucleotide
ggugauguuguacuggucc

SEQ ID NO: 3191799 - RNA, 19 nt, Artificial Sequence
  Description of Artificial Sequence: Synthetic oligonucleotide
ugucuacaaagaaccgacg

SEQ ID NO: 3191800 - RNA, 19 nt, Artificial Sequence
  Description of Artificial Sequence: Synthetic oligonucleotide
guuguacugguccaugaag

SEQ ID NO: 3191801 - RNA, 19 nt, Artificial Sequence
  Description of Artificial Sequence: Synthetic oligonucleotide
acggccacaguauacagcu

SEQ ID NO: 3191802 - RNA, 19 nt, Artificial Sequence
  Description of Artificial Sequence: Synthetic oligonucleotide
uacugguccaugaaguggu

SEQ ID NO: 3191803 - RNA, 19 nt, Artificial Sequence
  Description of Artificial Sequence: Synthetic oligonucleotide
guccuuuucgcguagggug

SEQ ID NO: 3191804 - RNA, 19 nt, Artificial Sequence
  Description of Artificial Sequence: Synthetic oligonucleotide
uguacugguccaugaagug

SEQ ID NO: 3191805 - RNA, 19 nt, Artificial Sequence
  Description of Artificial Sequence: Synthetic oligonucleotide
ucauccaucaccgccgcag

SEQ ID NO: 3191806 - RNA, 19 nt, Artificial Sequence
  Description of Artificial Sequence: Synthetic oligonucleotide
uuggagguggugauguugu

SEQ ID NO: 3191807 - RNA, 19 nt, Artificial Sequence
  Description of Artificial Sequence: Synthetic oligonucleotide
gaaugucuacaaagaaccg

SEQ ID NO: 3191808 - RNA, 19 nt, Artificial Sequence
  Description of Artificial Sequence: Synthetic oligonucleotide
uuaucugcuccaguuuggg

SEQ ID NO: 3191809 - RNA, 19 nt, Artificial Sequence
  Description of Artificial Sequence: Synthetic oligonucleotide
cacggcucauccaucaccg

SEQ ID NO: 3191810 - RNA, 19 nt, Artificial Sequence
  Description of Artificial Sequence: Synthetic oligonucleotide
uuuaguccuuuucgcguag

SEQ ID NO: 3191811 - RNA, 19 nt, Artificial Sequence
  Description of Artificial Sequence: Synthetic oligonucleotide
ggcugaggggcacagaugg

SEQ ID NO: 3191812 - RNA, 19 nt, Artificial Sequence
  Description of Artificial Sequence: Synthetic oligonucleotide
uaguccuuuucgcguaggg

SEQ ID NO: 3191813 - RNA, 19 nt, Artificial Sequence
  Description of Artificial Sequence: Synthetic oligonucleotide
uccuuuucgcguagggugc

SEQ ID NO: 3191814 - RNA, 19 nt, Artificial Sequence
  Description of Artificial Sequence: Synthetic oligonucleotide
ugcaguggacguccgaggc

SEQ ID NO: 3191815 - RNA, 19 nt, Artificial Sequence
  Description of Artificial Sequence: Synthetic oligonucleotide
ugguccaugaaguggucca

SEQ ID NO: 3191816 - RNA, 19 nt, Artificial Sequence
  Description of Artificial Sequence: Synthetic oligonucleotide
uucaggaguggggaguggg

SEQ ID NO: 3191817 - RNA, 19 nt, Artificial Sequence
  Description of Artificial Sequence: Synthetic oligonucleotide
aguauacagcugcuuggag

SEQ ID NO: 3191818 - RNA, 19 nt, Artificial Sequence
  Description of Artificial Sequence: Synthetic oligonucleotide
uguuguacugguccaugaa

SEQ ID NO: 3191819 - RNA, 19 nt, Artificial Sequence
  Description of Artificial Sequence: Synthetic oligonucleotide
aaagaaccgacggcucuuc

SEQ ID NO: 3191820 - RNA, 19 nt, Artificial Sequence
  Description of Artificial Sequence: Synthetic oligonucleotide
acaaagaaccgacggcucu

SEQ ID NO: 3191821 - RNA, 19 nt, Artificial Sequence
  Description of Artificial Sequence: Synthetic oligonucleotide
ugucugcucagcaggguca

SEQ ID NO: 3191822 - RNA, 19 nt, Artificial Sequence
  Description of Artificial Sequence: Synthetic oligonucleotide
aggaguggggagugggcgc

SEQ ID NO: 3191823 - RNA, 19 nt, Artificial Sequence
  Description of Artificial Sequence: Synthetic oligonucleotide
guacugguccaugaagugg

SEQ ID NO: 3191824 - RNA, 19 nt, Artificial Sequence
  Description of Artificial Sequence: Synthetic oligonucleotide
agaaccgacggcucuucag

SEQ ID NO: 3191825 - RNA, 19 nt, Artificial Sequence
  Description of Artificial Sequence: Synthetic oligonucleotide
cucgggaugcaccgcaucg

SEQ ID NO: 3191826 - RNA, 19 nt, Artificial Sequence
  Description of Artificial Sequence: Synthetic oligonucleotide
gacacggucuucccugucc

SEQ ID NO: 3191827 - RNA, 19 nt, Artificial Sequence
  Description of Artificial Sequence: Synthetic oligonucleotide
gaggcuaccgggaucucgg

SEQ ID NO: 3191828 - RNA, 19 nt, Artificial Sequence
  Description of Artificial Sequence: Synthetic oligonucleotide
agcaggaggcaggagacgg

SEQ ID NO: 3191829 - RNA, 19 nt, Artificial Sequence
  Description of Artificial Sequence: Synthetic oligonucleotide
gcagugucugcucagcagg

SEQ ID NO: 3191830 - RNA, 19 nt, Artificial Sequence
  Description of Artificial Sequence: Synthetic oligonucleotide
gauggcagugucugcucag

SEQ ID NO: 3191831 - RNA, 19 nt, Artificial Sequence
  Description of Artificial Sequence: Synthetic oligonucleotide
uucccuguccucaaacuua

SEQ ID NO: 3191832 - RNA, 19 nt, Artificial Sequence
  Description of Artificial Sequence: Synthetic oligonucleotide
uacaaagaaccgacggcuc

SEQ ID NO: 3191833 - RNA, 19 nt, Artificial Sequence
  Description of Artificial Sequence: Synthetic oligonucleotide
ucuucccuguccucaaacu

SEQ ID NO: 3191834 - RNA, 19 nt, Artificial Sequence
  Description of Artificial Sequence: Synthetic oligonucleotide
gucagaaugucuacaaaga

SEQ ID NO: 3191835 - RNA, 19 nt, Artificial Sequence
  Description of Artificial Sequence: Synthetic oligonucleotide
ucugcuccaguuugggcga

SEQ ID NO: 3191836 - RNA, 19 nt, Artificial Sequence
  Description of Artificial Sequence: Synthetic oligonucleotide
ugcaccgcaucgcuguccc

SEQ ID NO: 3191837 - RNA, 19 nt, Artificial Sequence
  Description of Artificial Sequence: Synthetic oligonucleotide
uuucgcguagggugcagug

SEQ ID NO: 3191838 - RNA, 19 nt, Artificial Sequence
  Description of Artificial Sequence: Synthetic oligonucleotide
gauguuguacugguccaug

SEQ ID NO: 3191839 - RNA, 19 nt, Artificial Sequence
  Description of Artificial Sequence: Synthetic oligonucleotide
ucgcguagggugcagugga

SEQ ID NO: 3191840 - RNA, 19 nt, Artificial Sequence
  Description of Artificial Sequence: Synthetic oligonucleotide
caaacuuacuggccagcag

SEQ ID NO: 3191841 - RNA, 19 nt, Artificial Sequence
  Description of Artificial Sequence: Synthetic oligonucleotide
ucccuguccucaaacuuac

SEQ ID NO: 3191842 - RNA, 19 nt, Artificial Sequence
  Description of Artificial Sequence: Synthetic oligonucleotide
ucaggaguggggagugggc

SEQ ID NO: 3191843 - RNA, 19 nt, Artificial Sequence
  Description of Artificial Sequence: Synthetic oligonucleotide
acagauggcagugucugcu

SEQ ID NO: 3191844 - RNA, 19 nt, Artificial Sequence
  Description of Artificial Sequence: Synthetic oligonucleotide
uaucugcuccaguuugggc

SEQ ID NO: 3191845 - RNA, 19 nt, Artificial Sequence
  Description of Artificial Sequence: Synthetic oligonucleotide
uucgcguagggugcagugg

SEQ ID NO: 3191846 - RNA, 19 nt, Artificial Sequence
  Description of Artificial Sequence: Synthetic oligonucleotide
uagggugcaguggacgucc

SEQ ID NO: 3191847 - RNA, 19 nt, Artificial Sequence
  Description of Artificial Sequence: Synthetic oligonucleotide
agggucagaaugucuacaa

SEQ ID NO: 3191848 - RNA, 19 nt, Artificial Sequence
  Description of Artificial Sequence: Synthetic oligonucleotide
ucuucaggaguggggagug

SEQ ID NO: 3191849 - RNA, 19 nt, Artificial Sequence
  Description of Artificial Sequence: Synthetic oligonucleotide
aacuuacuggccagcagga

SEQ ID NO: 3191850 - RNA, 19 nt, Artificial Sequence
  Description of Artificial Sequence: Synthetic oligonucleotide
auguuguacugguccauga

SEQ ID NO: 3191851 - RNA, 19 nt, Artificial Sequence
  Description of Artificial Sequence: Synthetic oligonucleotide
aaccgacggcucuucagga

SEQ ID NO: 3191852 - RNA, 19 nt, Artificial Sequence
  Description of Artificial Sequence: Synthetic oligonucleotide
gagguggugauguuguacu

SEQ ID NO: 3191853 - RNA, 19 nt, Artificial Sequence
  Description of Artificial Sequence: Synthetic oligonucleotide
cagauccgaggcuaccggg

SEQ ID NO: 3191854 - RNA, 19 nt, Artificial Sequence
  Description of Artificial Sequence: Synthetic oligonucleotide
auggcagugucugcucagc

SEQ ID NO: 3191855 - RNA, 19 nt, Artificial Sequence
  Description of Artificial Sequence: Synthetic oligonucleotide
uuaguccuuuucgcguagg

SEQ ID NO: 3191856 - RNA, 19 nt, Artificial Sequence
  Description of Artificial Sequence: Synthetic oligonucleotide
aagugguccaguagguaga

SEQ ID NO: 3191857 - RNA, 19 nt, Artificial Sequence
  Description of Artificial Sequence: Synthetic oligonucleotide
agaugggccaggugccggg

SEQ ID NO: 3191858 - RNA, 19 nt, Artificial Sequence
  Description of Artificial Sequence: Synthetic oligonucleotide
cuuggagguggugauguug

SEQ ID NO: 3191859 - RNA, 19 nt, Artificial Sequence
  Description of Artificial Sequence: Synthetic oligonucleotide
uuggccucgcgugcuagcg

SEQ ID NO: 3191860 - RNA, 19 nt, Artificial Sequence
  Description of Artificial Sequence: Synthetic oligonucleotide
uccgaggcuaccgggaucu

SEQ ID NO: 3191861 - RNA, 19 nt, Artificial Sequence
  Description of Artificial Sequence: Synthetic oligonucleotide
agacggccacaguauacag

SEQ ID NO: 3191862 - RNA, 19 nt, Artificial Sequence
  Description of Artificial Sequence: Synthetic oligonucleotide
gaucucgggaugcaccgca

SEQ ID NO: 3191863 - RNA, 19 nt, Artificial Sequence
  Description of Artificial Sequence: Synthetic oligonucleotide
gggaucucgggaugcaccg

SEQ ID NO: 3191864 - RNA, 19 nt, Artificial Sequence
  Description of Artificial Sequence: Synthetic oligonucleotide
gagugggcgcggaaggugg

SEQ ID NO: 3191865 - RNA, 19 nt, Artificial Sequence
  Description of Artificial Sequence: Synthetic oligonucleotide
uucccaccacggcucaucc

SEQ ID NO: 3191866 - RNA, 19 nt, Artificial Sequence
  Description of Artificial Sequence: Synthetic oligonucleotide
uccucagcccguccggccc

SEQ ID NO: 3191867 - RNA, 19 nt, Artificial Sequence
  Description of Artificial Sequence: Synthetic oligonucleotide
gguggugauguuguacugg

SEQ ID NO: 3191868 - RNA, 19 nt, Artificial Sequence
  Description of Artificial Sequence: Synthetic oligonucleotide
cagugucugcucagcaggg

SEQ ID NO: 3191869 - RNA, 19 nt, Artificial Sequence
  Description of Artificial Sequence: Synthetic oligonucleotide
uccaugaagugguccagua

SEQ ID NO: 3191870 - RNA, 19 nt, Artificial Sequence
  Description of Artificial Sequence: Synthetic oligonucleotide
uugggcgacacggucuucc

SEQ ID NO: 3191871 - RNA, 19 nt, Artificial Sequence
  Description of Artificial Sequence: Synthetic oligonucleotide
ucaucuuuggauaugagcu

SEQ ID NO: 3191872 - RNA, 19 nt, Artificial Sequence
  Description of Artificial Sequence: Synthetic oligonucleotide
auucugucauuauagaugg

SEQ ID NO: 3191873 - RNA, 19 nt, Artificial Sequence
  Description of Artificial Sequence: Synthetic oligonucleotide
ucugagauggccauaaugu

SEQ ID NO: 3191874 - RNA, 19 nt, Artificial Sequence
  Description of Artificial Sequence: Synthetic oligonucleotide
uugucuucuucuaaggugg

SEQ ID NO: 3191875 - RNA, 19 nt, Artificial Sequence
  Description of Artificial Sequence: Synthetic oligonucleotide
agauaggugaagcaauugc

SEQ ID NO: 3191876 - RNA, 19 nt, Artificial Sequence
  Description of Artificial Sequence: Synthetic oligonucleotide
auacuccugaaguugagcc

SEQ ID NO: 3191877 - RNA, 19 nt, Artificial Sequence
  Description of Artificial Sequence: Synthetic oligonucleotide
aauucugucauuauagaug

SEQ ID NO: 3191878 - RNA, 19 nt, Artificial Sequence
  Description of Artificial Sequence: Synthetic oligonucleotide
uguugugacaaucuucuag

SEQ ID NO: 3191879 - RNA, 19 nt, Artificial Sequence
  Description of Artificial Sequence: Synthetic oligonucleotide
aaucccauucacuaugcuc

SEQ ID NO: 3191880 - RNA, 19 nt, Artificial Sequence
  Description of Artificial Sequence: Synthetic oligonucleotide
ugauagucacuuauuaugc

SEQ ID NO: 3191881 - RNA, 19 nt, Artificial Sequence
  Description of Artificial Sequence: Synthetic oligonucleotide
uuuggauaugagcugcugg

SEQ ID NO: 3191882 - RNA, 19 nt, Artificial Sequence
  Description of Artificial Sequence: Synthetic oligonucleotide
cuucuaguugcgaagauag

SEQ ID NO: 3191883 - RNA, 19 nt, Artificial Sequence
  Description of Artificial Sequence: Synthetic oligonucleotide
auagucacuuauuaugcgg

SEQ ID NO: 3191884 - RNA, 19 nt, Artificial Sequence
  Description of Artificial Sequence: Synthetic oligonucleotide
ucuugcaaccgucugaucu

SEQ ID NO: 3191885 - RNA, 19 nt, Artificial Sequence
  Description of Artificial Sequence: Synthetic oligonucleotide
uaacacugcagucucauga

SEQ ID NO: 3191886 - RNA, 19 nt, Artificial Sequence
  Description of Artificial Sequence: Synthetic oligonucleotide
cuaaguuucuccuucauca

SEQ ID NO: 3191887 - RNA, 19 nt, Artificial Sequence
  Description of Artificial Sequence: Synthetic oligonucleotide
uugguuaggggaaaagcag

SEQ ID NO: 3191888 - RNA, 19 nt, Artificial Sequence
  Description of Artificial Sequence: Synthetic oligonucleotide
ucaucugccucucaugaag

SEQ ID NO: 3191889 - RNA, 19 nt, Artificial Sequence
  Description of Artificial Sequence: Synthetic oligonucleotide
guuuccaugagcugauugg

SEQ ID NO: 3191890 - RNA, 19 nt, Artificial Sequence
  Description of Artificial Sequence: Synthetic oligonucleotide
uauuaugcggucucgguca

SEQ ID NO: 3191891 - RNA, 19 nt, Artificial Sequence
  Description of Artificial Sequence: Synthetic oligonucleotide
uugacuucagccaaaacuu

SEQ ID NO: 3191892 - RNA, 19 nt, Artificial Sequence
  Description of Artificial Sequence: Synthetic oligonucleotide
agaguuguggucaagugac

SEQ ID NO: 3191893 - RNA, 19 nt, Artificial Sequence
  Description of Artificial Sequence: Synthetic oligonucleotide
agcaguggcacucgggucc

SEQ ID NO: 3191894 - RNA, 19 nt, Artificial Sequence
  Description of Artificial Sequence: Synthetic oligonucleotide
augucggucuuccagcugc

SEQ ID NO: 3191895 - RNA, 19 nt, Artificial Sequence
  Description of Artificial Sequence: Synthetic oligonucleotide
ucaguaaucgaucucuguc

SEQ ID NO: 3191896 - RNA, 19 nt, Artificial Sequence
  Description of Artificial Sequence: Synthetic oligonucleotide
gugauuuuccuuuaaggug

SEQ ID NO: 3191897 - RNA, 19 nt, Artificial Sequence
  Description of Artificial Sequence: Synthetic oligonucleotide
aaguuucuccuucaucauc

SEQ ID NO: 3191898 - RNA, 19 nt, Artificial Sequence
  Description of Artificial Sequence: Synthetic oligonucleotide
gacaaguuuauagauggcc

SEQ ID NO: 3191899 - RNA, 19 nt, Artificial Sequence
  Description of Artificial Sequence: Synthetic oligonucleotide
aacacugcagucucaugag

SEQ ID NO: 3191900 - RNA, 19 nt, Artificial Sequence
  Description of Artificial Sequence: Synthetic oligonucleotide
uggagagaaucucaguuug

SEQ ID NO: 3191901 - RNA, 19 nt, Artificial Sequence
  Description of Artificial Sequence: Synthetic oligonucleotide
aucuacauuuguuggcccc

SEQ ID NO: 3191902 - RNA, 19 nt, Artificial Sequence
  Description of Artificial Sequence: Synthetic oligonucleotide
ugagauggccauaauguac

SEQ ID NO: 3191903 - RNA, 19 nt, Artificial Sequence
  Description of Artificial Sequence: Synthetic oligonucleotide
aaagugggaaggcuguucu

SEQ ID NO: 3191904 - RNA, 19 nt, Artificial Sequence
  Description of Artificial Sequence: Synthetic oligonucleotide
ucgaucucugucauucugg

SEQ ID NO: 3191905 - RNA, 19 nt, Artificial Sequence
  Description of Artificial Sequence: Synthetic oligonucleotide
aauugcucaucuuuggaua

SEQ ID NO: 3191906 - RNA, 19 nt, Artificial Sequence
  Description of Artificial Sequence: Synthetic oligonucleotide
ucagugguugguuagggga

SEQ ID NO: 3191907 - RNA, 19 nt, Artificial Sequence
  Description of Artificial Sequence: Synthetic oligonucleotide
ugugaaacacaggaugagg

SEQ ID NO: 3191908 - RNA, 19 nt, Artificial Sequence
  Description of Artificial Sequence: Synthetic oligonucleotide
uguggagagaaucucaguu

SEQ ID NO: 3191909 - RNA, 19 nt, Artificial Sequence
  Description of Artificial Sequence: Synthetic oligonucleotide
ucaaggugggacaagcugu

SEQ ID NO: 3191910 - RNA, 19 nt, Artificial Sequence
  Description of Artificial Sequence: Synthetic oligonucleotide
guugucuucuucuaaggug

SEQ ID NO: 3191911 - RNA, 19 nt, Artificial Sequence
  Description of Artificial Sequence: Synthetic oligonucleotide
aucuuuggauaugagcugc

SEQ ID NO: 3191912 - RNA, 19 nt, Artificial Sequence
  Description of Artificial Sequence: Synthetic oligonucleotide
ucugguuggcaucacugag

SEQ ID NO: 3191913 - RNA, 19 nt, Artificial Sequence
  Description of Artificial Sequence: Synthetic oligonucleotide
gagaguuucugccucauga

SEQ ID NO: 3191914 - RNA, 19 nt, Artificial Sequence
  Description of Artificial Sequence: Synthetic oligonucleotide
guuacuaggaacuuuccaa

SEQ ID NO: 3191915 - RNA, 19 nt, Artificial Sequence
  Description of Artificial Sequence: Synthetic oligonucleotide
auagcuuucuucaagcucu

SEQ ID NO: 3191916 - RNA, 19 nt, Artificial Sequence
  Description of Artificial Sequence: Synthetic oligonucleotide
ugucauuauagauggaaua

SEQ ID NO: 3191917 - RNA, 19 nt, Artificial Sequence
  Description of Artificial Sequence: Synthetic oligonucleotide
guugacuucagccaaaacu

SEQ ID NO: 3191918 - RNA, 19 nt, Artificial Sequence
  Description of Artificial Sequence: Synthetic oligonucleotide
ucguucuucuuccagcagc

SEQ ID NO: 3191919 - RNA, 19 nt, Artificial Sequence
  Description of Artificial Sequence: Synthetic oligonucleotide
cuaguugcgaagauaggug

SEQ ID NO: 3191920 - RNA, 19 nt, Artificial Sequence
  Description of Artificial Sequence: Synthetic oligonucleotide
uuauuaugcggucucgguc

SEQ ID NO: 3191921 - RNA, 19 nt, Artificial Sequence
  Description of Artificial Sequence: Synthetic oligonucleotide
cagucagcucucuagagcc

SEQ ID NO: 3191922 - RNA, 19 nt, Artificial Sequence
  Description of Artificial Sequence: Synthetic oligonucleotide
uucccuuccuccaacuucc

SEQ ID NO: 3191923 - RNA, 19 nt, Artificial Sequence
  Description of Artificial Sequence: Synthetic oligonucleotide
ucugucauuauagauggaa

SEQ ID NO: 3191924 - RNA, 19 nt, Artificial Sequence
  Description of Artificial Sequence: Synthetic oligonucleotide
uaaguuggugacuucuuga

SEQ ID NO: 3191925 - RNA, 19 nt, Artificial Sequence
  Description of Artificial Sequence: Synthetic oligonucleotide
uuuaggucagucucgaguu

SEQ ID NO: 3191926 - RNA, 19 nt, Artificial Sequence
  Description of Artificial Sequence: Synthetic oligonucleotide
ugggagaucuauuaacacu

SEQ ID NO: 3191927 - RNA, 19 nt, Artificial Sequence
  Description of Artificial Sequence: Synthetic oligonucleotide
ucucgaguuguucaccacc

SEQ ID NO: 3191928 - RNA, 19 nt, Artificial Sequence
  Description of Artificial Sequence: Synthetic oligonucleotide
ucaggaucacuauuucugc

SEQ ID NO: 3191929 - RNA, 19 nt, Artificial Sequence
  Description of Artificial Sequence: Synthetic oligonucleotide
uaggugaagcaauugcuca

SEQ ID NO: 3191930 - RNA, 19 nt, Artificial Sequence
  Description of Artificial Sequence: Synthetic oligonucleotide
gauuucaucaugcaaucua

SEQ ID NO: 3191931 - RNA, 19 nt, Artificial Sequence
  Description of Artificial Sequence: Synthetic oligonucleotide
gaucuauuaacacugcagu

SEQ ID NO: 3191932 - RNA, 19 nt, Artificial Sequence
  Description of Artificial Sequence: Synthetic oligonucleotide
aucugagauggccauaaug

SEQ ID NO: 3191933 - RNA, 19 nt, Artificial Sequence
  Description of Artificial Sequence: Synthetic oligonucleotide
uguugucuucuucuaaggu

SEQ ID NO: 3191934 - RNA, 19 nt, Artificial Sequence
  Description of Artificial Sequence: Synthetic oligonucleotide
gaucacagagagaugucgg

SEQ ID NO: 3191935 - RNA, 19 nt, Artificial Sequence
  Description of Artificial Sequence: Synthetic oligonucleotide
uucuaagguggcauucucc

SEQ ID NO: 3191936 - RNA, 19 nt, Artificial Sequence
  Description of Artificial Sequence: Synthetic oligonucleotide
ucugaucugcuccucggcc

SEQ ID NO: 3191937 - RNA, 19 nt, Artificial Sequence
  Description of Artificial Sequence: Synthetic oligonucleotide
agaucacagagagaugucg

SEQ ID NO: 3191938 - RNA, 19 nt, Artificial Sequence
  Description of Artificial Sequence: Synthetic oligonucleotide
cuuuguugugacaaucuuc

SEQ ID NO: 3191939 - RNA, 19 nt, Artificial Sequence
  Description of Artificial Sequence: Synthetic oligonucleotide
uuuccuggggcgcuccugg

SEQ ID NO: 3191940 - RNA, 19 nt, Artificial Sequence
  Description of Artificial Sequence: Synthetic oligonucleotide
uucacucauuuccuggggc

SEQ ID NO: 3191941 - RNA, 19 nt, Artificial Sequence
  Description of Artificial Sequence: Synthetic oligonucleotide
uauuguguuguuggcacag

SEQ ID NO: 3191942 - RNA, 19 nt, Artificial Sequence
  Description of Artificial Sequence: Synthetic oligonucleotide
aaguuggugacuucuugau

SEQ ID NO: 3191943 - RNA, 19 nt, Artificial Sequence
  Description of Artificial Sequence: Synthetic oligonucleotide
aacgucacucucucggaug

SEQ ID NO: 3191944 - RNA, 19 nt, Artificial Sequence
  Description of Artificial Sequence: Synthetic oligonucleotide
uuacuaggaacuuuccaau

SEQ ID NO: 3191945 - RNA, 19 nt, Artificial Sequence
  Description of Artificial Sequence: Synthetic oligonucleotide
ugaguuggucuuuuccaag

SEQ ID NO: 3191946 - RNA, 19 nt, Artificial Sequence
  Description of Artificial Sequence: Synthetic oligonucleotide
uccaaugagaugugagaug

SEQ ID NO: 3191947 - RNA, 19 nt, Artificial Sequence
  Description of Artificial Sequence: Synthetic oligonucleotide
auaggugaagcaauugcuc

SEQ ID NO: 3191948 - RNA, 19 nt, Artificial Sequence
  Description of Artificial Sequence: Synthetic oligonucleotide
gcagagugaacgcagaacc

SEQ ID NO: 3191949 - RNA, 19 nt, Artificial Sequence
  Description of Artificial Sequence: Synthetic oligonucleotide
ucucucagucuguaaacug

SEQ ID NO: 3191950 - RNA, 19 nt, Artificial Sequence
  Description of Artificial Sequence: Synthetic oligonucleotide
gucaccauaguggugcugg

SEQ ID NO: 3191951 - RNA, 19 nt, Artificial Sequence
  Description of Artificial Sequence: Synthetic oligonucleotide
ucacuaugcucuugcaacc

SEQ ID NO: 3191952 - RNA, 19 nt, Artificial Sequence
  Description of Artificial Sequence: Synthetic oligonucleotide
caaucuaccagucagcucu

SEQ ID NO: 3191953 - RNA, 19 nt, Artificial Sequence
  Description of Artificial Sequence: Synthetic oligonucleotide
gagccuuuaggucagucuc

SEQ ID NO: 3191954 - RNA, 19 nt, Artificial Sequence
  Description of Artificial Sequence: Synthetic oligonucleotide
uacuaggaacuuuccaaug

SEQ ID NO: 3191955 - RNA, 19 nt, Artificial Sequence
  Description of Artificial Sequence: Synthetic oligonucleotide
guugaaagugggaaggcug

SEQ ID NO: 3191956 - RNA, 19 nt, Artificial Sequence
  Description of Artificial Sequence: Synthetic oligonucleotide
ugagcugcugguuaaguuu

SEQ ID NO: 3191957 - RNA, 19 nt, Artificial Sequence
  Description of Artificial Sequence: Synthetic oligonucleotide
uguacugcuccuucaucug

SEQ ID NO: 3191958 - RNA, 19 nt, Artificial Sequence
  Description of Artificial Sequence: Synthetic oligonucleotide
uaauguacugcuccuucau

SEQ ID NO: 3191959 - RNA, 19 nt, Artificial Sequence
  Description of Artificial Sequence: Synthetic oligonucleotide
uccuuuaaggugucauuga

SEQ ID NO: 3191960 - RNA, 19 nt, Artificial Sequence
  Description of Artificial Sequence: Synthetic oligonucleotide
aagcaauugcucaucuuug

SEQ ID NO: 3191961 - RNA, 19 nt, Artificial Sequence
  Description of Artificial Sequence: Synthetic oligonucleotide
aguuucuccuucaucaucu

SEQ ID NO: 3191962 - RNA, 19 nt, Artificial Sequence
  Description of Artificial Sequence: Synthetic oligonucleotide
cuugcaaccgucugaucug

SEQ ID NO: 3191963 - RNA, 19 nt, Artificial Sequence
  Description of Artificial Sequence: Synthetic oligonucleotide
gagagugcauucucagcag

SEQ ID NO: 3191964 - RNA, 19 nt, Artificial Sequence
  Description of Artificial Sequence: Synthetic oligonucleotide
ugcgaagauaggugaagca

SEQ ID NO: 3191965 - RNA, 19 nt, Artificial Sequence
  Description of Artificial Sequence: Synthetic oligonucleotide
gugagauggguugaaagug

SEQ ID NO: 3191966 - RNA, 19 nt, Artificial Sequence
  Description of Artificial Sequence: Synthetic oligonucleotide
guugguuaggggaaaagca

SEQ ID NO: 3191967 - RNA, 19 nt, Artificial Sequence
  Description of Artificial Sequence: Synthetic oligonucleotide
ugacaaguuuauagauggc

SEQ ID NO: 3191968 - RNA, 19 nt, Artificial Sequence
  Description of Artificial Sequence: Synthetic oligonucleotide
cugcugaucuuuaucugag

SEQ ID NO: 3191969 - RNA, 19 nt, Artificial Sequence
  Description of Artificial Sequence: Synthetic oligonucleotide
uguguuguuggcacagcuc

SEQ ID NO: 3191970 - RNA, 19 nt, Artificial Sequence
  Description of Artificial Sequence: Synthetic oligonucleotide
uuccaaugagaugugagau

SEQ ID NO: 3191971 - RNA, 19 nt, Artificial Sequence
  Description of Artificial Sequence: Synthetic oligonucleotide
uguaugaagucucugaugc

SEQ ID NO: 3191972 - RNA, 19 nt, Artificial Sequence
  Description of Artificial Sequence: Synthetic oligonucleotide
aaucacuacauuuguaagg

SEQ ID NO: 3191973 - RNA, 19 nt, Artificial Sequence
  Description of Artificial Sequence: Synthetic oligonucleotide
cugaugaauuuuaagaugg

SEQ ID NO: 3191974 - RNA, 19 nt, Artificial Sequence
  Description of Artificial Sequence: Synthetic oligonucleotide
auuuguaaggcuucacucc

SEQ ID NO: 3191975 - RNA, 19 nt, Artificial Sequence
  Description of Artificial Sequence: Synthetic oligonucleotide
aacgauuugucacagucag

SEQ ID NO: 3191976 - RNA, 19 nt, Artificial Sequence
  Description of Artificial Sequence: Synthetic oligonucleotide
uuuaagauggccugucugg

SEQ ID NO: 3191977 - RNA, 19 nt, Artificial Sequence
  Description of Artificial Sequence: Synthetic oligonucleotide
ucucugaugaauuuuaaga

SEQ ID NO: 3191978 - RNA, 19 nt, Artificial Sequence
  Description of Artificial Sequence: Synthetic oligonucleotide
aguaugaauucucugauga

SEQ ID NO: 3191979 - RNA, 19 nt, Artificial Sequence
  Description of Artificial Sequence: Synthetic oligonucleotide
ucuaagaugguccuuugug

SEQ ID NO: 3191980 - RNA, 19 nt, Artificial Sequence
  Description of Artificial Sequence: Synthetic oligonucleotide
aucacuacauuuguaaggc

SEQ ID NO: 3191981 - RNA, 19 nt, Artificial Sequence
  Description of Artificial Sequence: Synthetic oligonucleotide
ugaauuuuaagauggccug

SEQ ID NO: 3191982 - RNA, 19 nt, Artificial Sequence
  Description of Artificial Sequence: Synthetic oligonucleotide
uaaaggaucugucacaauc

SEQ ID NO: 3191983 - RNA, 19 nt, Artificial Sequence
  Description of Artificial Sequence: Synthetic oligonucleotide
uaaacgauuugucacaguc

SEQ ID NO: 3191984 - RNA, 19 nt, Artificial Sequence
  Description of Artificial Sequence: Synthetic oligonucleotide
auucacuacaccuguaagg

SEQ ID NO: 3191985 - RNA, 19 nt, Artificial Sequence
  Description of Artificial Sequence: Synthetic oligonucleotide
ugaguaaacgauuugucac

SEQ ID NO: 3191986 - RNA, 19 nt, Artificial Sequence
  Description of Artificial Sequence: Synthetic oligonucleotide
ucucugaugaguuaugaga

SEQ ID NO: 3191987 - RNA, 19 nt, Artificial Sequence
  Description of Artificial Sequence: Synthetic oligonucleotide
ugaguuaugagacugcuuu

SEQ ID NO: 3191988 - RNA, 19 nt, Artificial Sequence
  Description of Artificial Sequence: Synthetic oligonucleotide
ucugaugaauuuuaagaug

SEQ ID NO: 3191989 - RNA, 19 nt, Artificial Sequence
  Description of Artificial Sequence: Synthetic oligonucleotide
uaaagcacgugucacauuc

SEQ ID NO: 3191990 - RNA, 19 nt, Artificial Sequence
  Description of Artificial Sequence: Synthetic oligonucleotide
cuaagaugguccuuugugg

SEQ ID NO: 3191991 - RNA, 19 nt, Artificial Sequence
  Description of Artificial Sequence: Synthetic oligonucleotide
uuuuaagauggccugucug

SEQ ID NO: 3191992 - RNA, 19 nt, Artificial Sequence
  Description of Artificial Sequence: Synthetic oligonucleotide
uccaguaugaauucucuga

SEQ ID NO: 3191993 - RNA, 19 nt, Artificial Sequence
  Description of Artificial Sequence: Synthetic oligonucleotide
aauuuuaagauggccuguc

SEQ ID NO: 3191994 - RNA, 19 nt, Artificial Sequence
  Description of Artificial Sequence: Synthetic oligonucleotide
aaggaucugucacaaucac

SEQ ID NO: 3191995 - RNA, 19 nt, Artificial Sequence
  Description of Artificial Sequence: Synthetic oligonucleotide
uaugagacugcuuuucuga

SEQ ID NO: 3191996 - RNA, 19 nt, Artificial Sequence
  Description of Artificial Sequence: Synthetic oligonucleotide
accuguaagguuucucucc

SEQ ID NO: 3191997 - RNA, 19 nt, Artificial Sequence
  Description of Artificial Sequence: Synthetic oligonucleotide
ugucacauucacuacaccu

SEQ ID NO: 3191998 - RNA, 19 nt, Artificial Sequence
  Description of Artificial Sequence: Synthetic oligonucleotide
uuucucucccauaugaagu

SEQ ID NO: 3191999 - RNA, 19 nt, Artificial Sequence
  Description of Artificial Sequence: Synthetic oligonucleotide
uuuguaaggcuucacucca

SEQ ID NO: 3192000 - RNA, 19 nt, Artificial Sequence
  Description of Artificial Sequence: Synthetic oligonucleotide
aaggcuucacuccaguaug

SEQ ID NO: 3192001 - RNA, 19 nt, Artificial Sequence
  Description of Artificial Sequence: Synthetic oligonucleotide
acaaucacuacauuuguaa

SEQ ID NO: 3192002 - RNA, 19 nt, Artificial Sequence
  Description of Artificial Sequence: Synthetic oligonucleotide
cauaugaagucucugauga

SEQ ID NO: 3192003 - RNA, 19 nt, Artificial Sequence
  Description of Artificial Sequence: Synthetic oligonucleotide
ucugaugcguucuaagaug

SEQ ID NO: 3192004 - RNA, 19 nt, Artificial Sequence
  Description of Artificial Sequence: Synthetic oligonucleotide
gaugaauuuuaagauggcc

SEQ ID NO: 3192005 - RNA, 19 nt, Artificial Sequence
  Description of Artificial Sequence: Synthetic oligonucleotide
auuugucacagucaguaca

SEQ ID NO: 3192006 - RNA, 19 nt, Artificial Sequence
  Description of Artificial Sequence: Synthetic oligonucleotide
ucugucacaaucacuacau

SEQ ID NO: 3192007 - RNA, 19 nt, Artificial Sequence
  Description of Artificial Sequence: Synthetic oligonucleotide
uccuuugugguaaaggauc

SEQ ID NO: 3192008 - RNA, 19 nt, Artificial Sequence
  Description of Artificial Sequence: Synthetic oligonucleotide
aagcacgugucacauucac

SEQ ID NO: 3192009 - RNA, 19 nt, Artificial Sequence
  Description of Artificial Sequence: Synthetic oligonucleotide
cucugaugaguuaugagac

SEQ ID NO: 3192010 - RNA, 19 nt, Artificial Sequence
  Description of Artificial Sequence: Synthetic oligonucleotide
ugugguaaaggaucuguca

SEQ ID NO: 3192011 - RNA, 19 nt, Artificial Sequence
  Description of Artificial Sequence: Synthetic oligonucleotide
uaagguuucucucccauau

SEQ ID NO: 3192012 - RNA, 19 nt, Artificial Sequence
  Description of Artificial Sequence: Synthetic oligonucleotide
ugcuuuucugaguaaacga

SEQ ID NO: 3192013 - RNA, 19 nt, Artificial Sequence
  Description of Artificial Sequence: Synthetic oligonucleotide
uuuucugaguaaacgauuu

SEQ ID NO: 3192014 - RNA, 19 nt, Artificial Sequence
  Description of Artificial Sequence: Synthetic oligonucleotide
uucucugaugaauuuuaag

SEQ ID NO: 3192015 - RNA, 19 nt, Artificial Sequence
  Description of Artificial Sequence: Synthetic oligonucleotide
uucacuacaccuguaaggu

SEQ ID NO: 3192016 - RNA, 19 nt, Artificial Sequence
  Description of Artificial Sequence: Synthetic oligonucleotide
cugaugcguucuaagaugg

SEQ ID NO: 3192017 - RNA, 19 nt, Artificial Sequence
  Description of Artificial Sequence: Synthetic oligonucleotide
cauuuguaaggcuucacuc

SEQ ID NO: 3192018 - RNA, 19 nt, Artificial Sequence
  Description of Artificial Sequence: Synthetic oligonucleotide
ucugaguaaacgauuuguc

SEQ ID NO: 3192019 - RNA, 19 nt, Artificial Sequence
  Description of Artificial Sequence: Synthetic oligonucleotide
guuucucucccauaugaag

SEQ ID NO: 3192020 - RNA, 19 nt, Artificial Sequence
  Description of Artificial Sequence: Synthetic oligonucleotide
augaauuuuaagauggccu

SEQ ID NO: 3192021 - RNA, 19 nt, Artificial Sequence
  Description of Artificial Sequence: Synthetic oligonucleotide
uaugaagucucugaugagu

SEQ ID NO: 3192022 - RNA, 19 nt, Artificial Sequence
  Description of Artificial Sequence: Synthetic oligonucleotide
uuugucacagucaguacau

SEQ ID NO: 3192023 - RNA, 19 nt, Artificial Sequence
  Description of Artificial Sequence: Synthetic oligonucleotide
gucacaaucacuacauuug

SEQ ID NO: 3192024 - RNA, 19 nt, Artificial Sequence
  Description of Artificial Sequence: Synthetic oligonucleotide
uaugaauucucugaugaau

SEQ ID NO: 3192025 - RNA, 19 nt, Artificial Sequence
  Description of Artificial Sequence: Synthetic oligonucleotide
aguuaugagacugcuuuuc

SEQ ID NO: 3192026 - RNA, 19 nt, Artificial Sequence
  Description of Artificial Sequence: Synthetic oligonucleotide
uaagaugguccuuuguggu

SEQ ID NO: 3192027 - RNA, 19 nt, Artificial Sequence
  Description of Artificial Sequence: Synthetic oligonucleotide
uaaggcuucacuccaguau

SEQ ID NO: 3192028 - RNA, 19 nt, Artificial Sequence
  Description of Artificial Sequence: Synthetic oligonucleotide
acauuuguaaggcuucacu

SEQ ID NO: 3192029 - RNA, 19 nt, Artificial Sequence
  Description of Artificial Sequence: Synthetic oligonucleotide
uuaagauggccugucuggg

SEQ ID NO: 3192030 - RNA, 19 nt, Artificial Sequence
  Description of Artificial Sequence: Synthetic oligonucleotide
uaugaagucucugaugcgu

SEQ ID NO: 3192031 - RNA, 19 nt, Artificial Sequence
  Description of Artificial Sequence: Synthetic oligonucleotide
augcguucuaagauggucc

SEQ ID NO: 3192032 - RNA, 19 nt, Artificial Sequence
  Description of Artificial Sequence: Synthetic oligonucleotide
ugucacaaucacuacauuu

SEQ ID NO: 3192033 - RNA, 19 nt, Artificial Sequence
  Description of Artificial Sequence: Synthetic oligonucleotide
caaucacuacauuuguaag

SEQ ID NO: 3192034 - RNA, 19 nt, Artificial Sequence
  Description of Artificial Sequence: Synthetic oligonucleotide
ugaugaauuuuaagauggc

SEQ ID NO: 3192035 - RNA, 19 nt, Artificial Sequence
  Description of Artificial Sequence: Synthetic oligonucleotide
uuaugagacugcuuuucug

SEQ ID NO: 3192036 - RNA, 19 nt, Artificial Sequence
  Description of Artificial Sequence: Synthetic oligonucleotide
ucacaaucacuacauuugu

SEQ ID NO: 3192037 - RNA, 19 nt, Artificial Sequence
  Description of Artificial Sequence: Synthetic oligonucleotide
aaaggaucugucacaauca

SEQ ID NO: 3192038 - RNA, 19 nt, Artificial Sequence
  Description of Artificial Sequence: Synthetic oligonucleotide
uucugaguaaacgauuugu

SEQ ID NO: 3192039 - RNA, 19 nt, Artificial Sequence
  Description of Artificial Sequence: Synthetic oligonucleotide
ucacauucacuacaccugu

SEQ ID NO: 3192040 - RNA, 19 nt, Artificial Sequence
  Description of Artificial Sequence: Synthetic oligonucleotide
uccuguaugaagucucuga

SEQ ID NO: 3192041 - RNA, 19 nt, Artificial Sequence
  Description of Artificial Sequence: Synthetic oligonucleotide
uuugugguaaaggaucugu

SEQ ID NO: 3192042 - RNA, 19 nt, Artificial Sequence
  Description of Artificial Sequence: Synthetic oligonucleotide
ucucugaugcguucuaaga

SEQ ID NO: 3192043 - RNA, 19 nt, Artificial Sequence
  Description of Artificial Sequence: Synthetic oligonucleotide
ugaugaguuaugagacugc

SEQ ID NO: 3192044 - RNA, 19 nt, Artificial Sequence
  Description of Artificial Sequence: Synthetic oligonucleotide
acuacauuuguaaggcuuc

SEQ ID NO: 3192045 - RNA, 19 nt, Artificial Sequence
  Description of Artificial Sequence: Synthetic oligonucleotide
uuucugaguaaacgauuug

SEQ ID NO: 3192046 - RNA, 19 nt, Artificial Sequence
  Description of Artificial Sequence: Synthetic oligonucleotide
ucccauaugaagucucuga

SEQ ID NO: 3192047 - RNA, 19 nt, Artificial Sequence
  Description of Artificial Sequence: Synthetic oligonucleotide
gaguaaacgauuugucaca

SEQ ID NO: 3192048 - RNA, 19 nt, Artificial Sequence
  Description of Artificial Sequence: Synthetic oligonucleotide
agguuucucucccauauga

SEQ ID NO: 3192049 - RNA, 19 nt, Artificial Sequence
  Description of Artificial Sequence: Synthetic oligonucleotide
acaccuguaagguuucucu

SEQ ID NO: 3192050 - RNA, 19 nt, Artificial Sequence
  Description of Artificial Sequence: Synthetic oligonucleotide
gugguaaaggaucugucac

SEQ ID NO: 3192051 - RNA, 19 nt, Artificial Sequence
  Description of Artificial Sequence: Synthetic oligonucleotide
aauucucugaugaauuuua

SEQ ID NO: 3192052 - RNA, 19 nt, Artificial Sequence
  Description of Artificial Sequence: Synthetic oligonucleotide
ugguaaaggaucugucaca

SEQ ID NO: 3192053 - RNA, 19 nt, Artificial Sequence
  Description of Artificial Sequence: Synthetic oligonucleotide
uguaagguuucucucccau

SEQ ID NO: 3192054 - RNA, 19 nt, Artificial Sequence
  Description of Artificial Sequence: Synthetic oligonucleotide
cugcuuuucugaguaaacg

SEQ ID NO: 3192055 - RNA, 19 nt, Artificial Sequence
  Description of Artificial Sequence: Synthetic oligonucleotide
aucugucacaaucacuaca

SEQ ID NO: 3192056 - RNA, 19 nt, Artificial Sequence
  Description of Artificial Sequence: Synthetic oligonucleotide
ucuggguaaagcacguguc

SEQ ID NO: 3192057 - RNA, 19 nt, Artificial Sequence
  Description of Artificial Sequence: Synthetic oligonucleotide
ugguccuuugugguaaagg

SEQ ID NO: 3192058 - RNA, 19 nt, Artificial Sequence
  Description of Artificial Sequence: Synthetic oligonucleotide
aguaaacgauuugucacag

SEQ ID NO: 3192059 - RNA, 19 nt, Artificial Sequence
  Description of Artificial Sequence: Synthetic oligonucleotide
cugaguaaacgauuuguca

SEQ ID NO: 3192060 - RNA, 19 nt, Artificial Sequence
  Description of Artificial Sequence: Synthetic oligonucleotide
uucuccuguaugaagucuc

SEQ ID NO: 3192061 - RNA, 19 nt, Artificial Sequence
  Description of Artificial Sequence: Synthetic oligonucleotide
cugaugaguuaugagacug

SEQ ID NO: 3192062 - RNA, 19 nt, Artificial Sequence
  Description of Artificial Sequence: Synthetic oligonucleotide
cauucacuacaccuguaag

SEQ ID NO: 3192063 - RNA, 19 nt, Artificial Sequence
  Description of Artificial Sequence: Synthetic oligonucleotide
uguaaggcuucacuccagu

SEQ ID NO: 3192064 - RNA, 19 nt, Artificial Sequence
  Description of Artificial Sequence: Synthetic oligonucleotide
ucugaugaguuaugagacu

SEQ ID NO: 3192065 - RNA, 19 nt, Artificial Sequence
  Description of Artificial Sequence: Synthetic oligonucleotide
augagacugcuuuucugag

SEQ ID NO: 3192066 - RNA, 19 nt, Artificial Sequence
  Description of Artificial Sequence: Synthetic oligonucleotide
gucacauucacuacaccug

SEQ ID NO: 3192067 - RNA, 19 nt, Artificial Sequence
  Description of Artificial Sequence: Synthetic oligonucleotide
aaacgauuugucacaguca

SEQ ID NO: 3192068 - RNA, 19 nt, Artificial Sequence
  Description of Artificial Sequence: Synthetic oligonucleotide
guaugaagucucugaugcg

SEQ ID NO: 3192069 - RNA, 19 nt, Artificial Sequence
  Description of Artificial Sequence: Synthetic oligonucleotide
aagauggccugucugggua

SEQ ID NO: 3192070 - RNA, 19 nt, Artificial Sequence
  Description of Artificial Sequence: Synthetic oligonucleotide
gagacugcuuuucugagua

SEQ ID NO: 3192071 - RNA, 19 nt, Artificial Sequence
  Description of Artificial Sequence: Synthetic oligonucleotide
aaagugucgguauauuugg

SEQ ID NO: 3192072 - RNA, 19 nt, Artificial Sequence
  Description of Artificial Sequence: Synthetic oligonucleotide
uauuugguagguuugaggc

SEQ ID NO: 3192073 - RNA, 19 nt, Artificial Sequence
  Description of Artificial Sequence: Synthetic oligonucleotide
ucugauaaggccacgauga

SEQ ID NO: 3192074 - RNA, 19 nt, Artificial Sequence
  Description of Artificial Sequence: Synthetic oligonucleotide
aacagugacuucuugcugg

SEQ ID NO: 3192075 - RNA, 19 nt, Artificial Sequence
  Description of Artificial Sequence: Synthetic oligonucleotide
aaagaugaggucaucuucc

SEQ ID NO: 3192076 - RNA, 19 nt, Artificial Sequence
  Description of Artificial Sequence: Synthetic oligonucleotide
gaugcuugugccuacauug

SEQ ID NO: 3192077 - RNA, 19 nt, Artificial Sequence
  Description of Artificial Sequence: Synthetic oligonucleotide
uaauccaaacuucugauaa

SEQ ID NO: 3192078 - RNA, 19 nt, Artificial Sequence
  Description of Artificial Sequence: Synthetic oligonucleotide
uugaucuucccaaacagug

SEQ ID NO: 3192079 - RNA, 19 nt, Artificial Sequence
  Description of Artificial Sequence: Synthetic oligonucleotide
agagguaaaggauuugauc

SEQ ID NO: 3192080 - RNA, 19 nt, Artificial Sequence
  Description of Artificial Sequence: Synthetic oligonucleotide
gaggucaucuuccacaucc

SEQ ID NO: 3192081 - RNA, 19 nt, Artificial Sequence
  Description of Artificial Sequence: Synthetic oligonucleotide
aaacaaggguaauccaaac

SEQ ID NO: 3192082 - RNA, 19 nt, Artificial Sequence
  Description of Artificial Sequence: Synthetic oligonucleotide
aaggauuugaucuucccaa

SEQ ID NO: 3192083 - RNA, 19 nt, Artificial Sequence
  Description of Artificial Sequence: Synthetic oligonucleotide
auuugaucuucccaaacag

SEQ ID NO: 3192084 - RNA, 19 nt, Artificial Sequence
  Description of Artificial Sequence: Synthetic oligonucleotide
guuugaggcaagcagagag

SEQ ID NO: 3192085 - RNA, 19 nt, Artificial Sequence
  Description of Artificial Sequence: Synthetic oligonucleotide
aaaggauuugaucuuccca

SEQ ID NO: 3192086 - RNA, 19 nt, Artificial Sequence
  Description of Artificial Sequence: Synthetic oligonucleotide
uccaugauggcacagcugu

SEQ ID NO: 3192087 - RNA, 19 nt, Artificial Sequence
  Description of Artificial Sequence: Synthetic oligonucleotide
auauuugguagguuugagg

SEQ ID NO: 3192088 - RNA, 19 nt, Artificial Sequence
  Description of Artificial Sequence: Synthetic oligonucleotide
uccucuuagagguaaagga

SEQ ID NO: 3192089 - RNA, 19 nt, Artificial Sequence
  Description of Artificial Sequence: Synthetic oligonucleotide
agucaaauccaucaggagu

SEQ ID NO: 3192090 - RNA, 19 nt, Artificial Sequence
  Description of Artificial Sequence: Synthetic oligonucleotide
uucuugcugguaaagauga

SEQ ID NO: 3192091 - RNA, 19 nt, Artificial Sequence
  Description of Artificial Sequence: Synthetic oligonucleotide
gaggcaagcagagagaaag

SEQ ID NO: 3192092 - RNA, 19 nt, Artificial Sequence
  Description of Artificial Sequence: Synthetic oligonucleotide
agugcaggaugcuugugcc

SEQ ID NO: 3192093 - RNA, 19 nt, Artificial Sequence
  Description of Artificial Sequence: Synthetic oligonucleotide
auugccacaggccugcagg

SEQ ID NO: 3192094 - RNA, 19 nt, Artificial Sequence
  Description of Artificial Sequence: Synthetic oligonucleotide
agagauucccagcaguggg

SEQ ID NO: 3192095 - RNA, 19 nt, Artificial Sequence
  Description of Artificial Sequence: Synthetic oligonucleotide
ucaggaguccucuuagagg

SEQ ID NO: 3192096 - RNA, 19 nt, Artificial Sequence
  Description of Artificial Sequence: Synthetic oligonucleotide
gagguaaaggauuugaucu

SEQ ID NO: 3192097 - RNA, 19 nt, Artificial Sequence
  Description of Artificial Sequence: Synthetic oligonucleotide
aauccaaacuucugauaag

SEQ ID NO: 3192098 - RNA, 19 nt, Artificial Sequence
  Description of Artificial Sequence: Synthetic oligonucleotide
gaugaagagauucccagca

SEQ ID NO: 3192099 - RNA, 19 nt, Artificial Sequence
  Description of Artificial Sequence: Synthetic oligonucleotide
uccucuccuuccaugaugg

SEQ ID NO: 3192100 - RNA, 19 nt, Artificial Sequence
  Description of Artificial Sequence: Synthetic oligonucleotide
aacaaggguaauccaaacu

SEQ ID NO: 3192101 - RNA, 19 nt, Artificial Sequence
  Description of Artificial Sequence: Synthetic oligonucleotide
guagguuugaggcaagcag

SEQ ID NO: 3192102 - RNA, 19 nt, Artificial Sequence
  Description of Artificial Sequence: Synthetic oligonucleotide
gauaaggccacgaugaaga

SEQ ID NO: 3192103 - RNA, 19 nt, Artificial Sequence
  Description of Artificial Sequence: Synthetic oligonucleotide
caaagugucgguauauuug

SEQ ID NO: 3192104 - RNA, 19 nt, Artificial Sequence
  Description of Artificial Sequence: Synthetic oligonucleotide
ugaagaugucuucagcggc

SEQ ID NO: 3192105 - RNA, 19 nt, Artificial Sequence
  Description of Artificial Sequence: Synthetic oligonucleotide
uaaagaugaggucaucuuc

SEQ ID NO: 3192106 - RNA, 19 nt, Artificial Sequence
  Description of Artificial Sequence: Synthetic oligonucleotide
gaugaggucaucuuccaca

SEQ ID NO: 3192107 - RNA, 19 nt, Artificial Sequence
  Description of Artificial Sequence: Synthetic oligonucleotide
caaacuucugauaaggcca

SEQ ID NO: 3192108 - RNA, 19 nt, Artificial Sequence
  Description of Artificial Sequence: Synthetic oligonucleotide
uugcugguaaagaugaggu

SEQ ID NO: 3192109 - RNA, 19 nt, Artificial Sequence
  Description of Artificial Sequence: Synthetic oligonucleotide
ucuccuuccaugauggcac

SEQ ID NO: 3192110 - RNA, 19 nt, Artificial Sequence
  Description of Artificial Sequence: Synthetic oligonucleotide
gaugucuucagcggcaccg

SEQ ID NO: 3192111 - RNA, 19 nt, Artificial Sequence
  Description of Artificial Sequence: Synthetic oligonucleotide
acaaggguaauccaaacuu

SEQ ID NO: 3192112 - RNA, 19 nt, Artificial Sequence
  Description of Artificial Sequence: Synthetic oligonucleotide
uucugauaaggccacgaug

SEQ ID NO: 3192113 - RNA, 19 nt, Artificial Sequence
  Description of Artificial Sequence: Synthetic oligonucleotide
acgaugaagagauucccag

SEQ ID NO: 3192114 - RNA, 19 nt, Artificial Sequence
  Description of Artificial Sequence: Synthetic oligonucleotide
gagagaaagguuuggguac

SEQ ID NO: 3192115 - RNA, 19 nt, Artificial Sequence
  Description of Artificial Sequence: Synthetic oligonucleotide
uagguuugaggcaagcaga

SEQ ID NO: 3192116 - RNA, 19 nt, Artificial Sequence
  Description of Artificial Sequence: Synthetic oligonucleotide
gauuugaucuucccaaaca

SEQ ID NO: 3192117 - RNA, 19 nt, Artificial Sequence
  Description of Artificial Sequence: Synthetic oligonucleotide
cugaagaugucuucagcgg

SEQ ID NO: 3192118 - RNA, 19 nt, Artificial Sequence
  Description of Artificial Sequence: Synthetic oligonucleotide
ugaagagauucccagcagu

SEQ ID NO: 3192119 - RNA, 19 nt, Artificial Sequence
  Description of Artificial Sequence: Synthetic oligonucleotide
uuagagguaaaggauuuga

SEQ ID NO: 3192120 - RNA, 19 nt, Artificial Sequence
  Description of Artificial Sequence: Synthetic oligonucleotide
auccaaacuucugauaagg

SEQ ID NO: 3192121 - RNA, 19 nt, Artificial Sequence
  Description of Artificial Sequence: Synthetic oligonucleotide
ugucgguauauuugguagg

SEQ ID NO: 3192122 - RNA, 19 nt, Artificial Sequence
  Description of Artificial Sequence: Synthetic oligonucleotide
gaucuucccaaacagugac

SEQ ID NO: 3192123 - RNA, 19 nt, Artificial Sequence
  Description of Artificial Sequence: Synthetic oligonucleotide
gaaagguuuggguacucug

SEQ ID NO: 3192124 - RNA, 19 nt, Artificial Sequence
  Description of Artificial Sequence: Synthetic oligonucleotide
aaggccacgaugaagagau

SEQ ID NO: 3192125 - RNA, 19 nt, Artificial Sequence
  Description of Artificial Sequence: Synthetic oligonucleotide
acagguccaugucugggcc

SEQ ID NO: 3192126 - RNA, 19 nt, Artificial Sequence
  Description of Artificial Sequence: Synthetic oligonucleotide
uuugaucuucccaaacagu

SEQ ID NO: 3192127 - RNA, 19 nt, Artificial Sequence
  Description of Artificial Sequence: Synthetic oligonucleotide
aucaggaguccucuuagag

SEQ ID NO: 3192128 - RNA, 19 nt, Artificial Sequence
  Description of Artificial Sequence: Synthetic oligonucleotide
aaacagugacuucuugcug

SEQ ID NO: 3192129 - RNA, 19 nt, Artificial Sequence
  Description of Artificial Sequence: Synthetic oligonucleotide
aaacuucugauaaggccac

SEQ ID NO: 3192130 - RNA, 19 nt, Artificial Sequence
  Description of Artificial Sequence: Synthetic oligonucleotide
agagagaaagguuugggua

SEQ ID NO: 3192131 - RNA, 19 nt, Artificial Sequence
  Description of Artificial Sequence: Synthetic oligonucleotide
aagagauucccagcagugg

SEQ ID NO: 3192132 - RNA, 19 nt, Artificial Sequence
  Description of Artificial Sequence: Synthetic oligonucleotide
gugucgguauauuugguag

SEQ ID NO: 3192133 - RNA, 19 nt, Artificial Sequence
  Description of Artificial Sequence: Synthetic oligonucleotide
cuugcugguaaagaugagg

SEQ ID NO: 3192134 - RNA, 19 nt, Artificial Sequence
  Description of Artificial Sequence: Synthetic oligonucleotide
uaaaggauuugaucuuccc

SEQ ID NO: 3192135 - RNA, 19 nt, Artificial Sequence
  Description of Artificial Sequence: Synthetic oligonucleotide
ugugccuacauugccacag

SEQ ID NO: 3192136 - RNA, 19 nt, Artificial Sequence
  Description of Artificial Sequence: Synthetic oligonucleotide
aaauccaucaggaguccuc

SEQ ID NO: 3192137 - RNA, 19 nt, Artificial Sequence
  Description of Artificial Sequence: Synthetic oligonucleotide
ucucacagguccaugucug

SEQ ID NO: 3192138 - RNA, 19 nt, Artificial Sequence
  Description of Artificial Sequence: Synthetic oligonucleotide
aaaacaaggguaauccaaa

SEQ ID NO: 3192139 - RNA, 19 nt, Artificial Sequence
  Description of Artificial Sequence: Synthetic oligonucleotide
uuugaggcaagcagagaga

SEQ ID NO: 3192140 - RNA, 19 nt, Artificial Sequence
  Description of Artificial Sequence: Synthetic oligonucleotide
uccaaacuucugauaaggc

SEQ ID NO: 3192141 - RNA, 19 nt, Artificial Sequence
  Description of Artificial Sequence: Synthetic oligonucleotide
ucuucagcggcaccgaguc

SEQ ID NO: 3192142 - RNA, 19 nt, Artificial Sequence
  Description of Artificial Sequence: Synthetic oligonucleotide
uauauuugguagguuugag

SEQ ID NO: 3192143 - RNA, 19 nt, Artificial Sequence
  Description of Artificial Sequence: Synthetic oligonucleotide
ugaucuucccaaacaguga

SEQ ID NO: 3192144 - RNA, 19 nt, Artificial Sequence
  Description of Artificial Sequence: Synthetic oligonucleotide
uuugguagguuugaggcaa

SEQ ID NO: 3192145 - RNA, 19 nt, Artificial Sequence
  Description of Artificial Sequence: Synthetic oligonucleotide
cuucuugcugguaaagaug

SEQ ID NO: 3192146 - RNA, 19 nt, Artificial Sequence
  Description of Artificial Sequence: Synthetic oligonucleotide
ucuuagagguaaaggauuu

SEQ ID NO: 3192147 - RNA, 19 nt, Artificial Sequence
  Description of Artificial Sequence: Synthetic oligonucleotide
aggcaggcgaggcagggcc

SEQ ID NO: 3192148 - RNA, 19 nt, Artificial Sequence
  Description of Artificial Sequence: Synthetic oligonucleotide
uucccaaacagugacuucu

SEQ ID NO: 3192149 - RNA, 19 nt, Artificial Sequence
  Description of Artificial Sequence: Synthetic oligonucleotide
ucaucuuccacauccucuc

SEQ ID NO: 3192150 - RNA, 19 nt, Artificial Sequence
  Description of Artificial Sequence: Synthetic oligonucleotide
ccugaagaugucuucagcg

SEQ ID NO: 3192151 - RNA, 19 nt, Artificial Sequence
  Description of Artificial Sequence: Synthetic oligonucleotide
acuucuugcugguaaagau

SEQ ID NO: 3192152 - RNA, 19 nt, Artificial Sequence
  Description of Artificial Sequence: Synthetic oligonucleotide
aaagguuuggguacucugu

SEQ ID NO: 3192153 - RNA, 19 nt, Artificial Sequence
  Description of Artificial Sequence: Synthetic oligonucleotide
aggaugaugugcccaggcg

SEQ ID NO: 3192154 - RNA, 19 nt, Artificial Sequence
  Description of Artificial Sequence: Synthetic oligonucleotide
gagugcaggaugcuugugc

SEQ ID NO: 3192155 - RNA, 19 nt, Artificial Sequence
  Description of Artificial Sequence: Synthetic oligonucleotide
gucaaauccaucaggaguc

SEQ ID NO: 3192156 - RNA, 19 nt, Artificial Sequence
  Description of Artificial Sequence: Synthetic oligonucleotide
aaggguaauccaaacuucu

SEQ ID NO: 3192157 - RNA, 19 nt, Artificial Sequence
  Description of Artificial Sequence: Synthetic oligonucleotide
gagucaaauccaucaggag

SEQ ID NO: 3192158 - RNA, 19 nt, Artificial Sequence
  Description of Artificial Sequence: Synthetic oligonucleotide
aagaugaggucaucuucca

SEQ ID NO: 3192159 - RNA, 19 nt, Artificial Sequence
  Description of Artificial Sequence: Synthetic oligonucleotide
gaagagauucccagcagug

SEQ ID NO: 3192160 - RNA, 19 nt, Artificial Sequence
  Description of Artificial Sequence: Synthetic oligonucleotide
agugacuucuugcugguaa

SEQ ID NO: 3192161 - RNA, 19 nt, Artificial Sequence
  Description of Artificial Sequence: Synthetic oligonucleotide
ugauaaggccacgaugaag

SEQ ID NO: 3192162 - RNA, 19 nt, Artificial Sequence
  Description of Artificial Sequence: Synthetic oligonucleotide
gaugaugugcccaggcgag

SEQ ID NO: 3192163 - RNA, 19 nt, Artificial Sequence
  Description of Artificial Sequence: Synthetic oligonucleotide
ugucugggccuccugaaga

SEQ ID NO: 3192164 - RNA, 19 nt, Artificial Sequence
  Description of Artificial Sequence: Synthetic oligonucleotide
aagaugucuucagcggcac

SEQ ID NO: 3192165 - RNA, 19 nt, Artificial Sequence
  Description of Artificial Sequence: Synthetic oligonucleotide
ugcaggaugaugugcccag

SEQ ID NO: 3192166 - RNA, 19 nt, Artificial Sequence
  Description of Artificial Sequence: Synthetic oligonucleotide
ccaaacuucugauaaggcc

SEQ ID NO: 3192167 - RNA, 19 nt, Artificial Sequence
  Description of Artificial Sequence: Synthetic oligonucleotide
uccugaagaugucuucagc

SEQ ID NO: 3192168 - RNA, 19 nt, Artificial Sequence
  Description of Artificial Sequence: Synthetic oligonucleotide
agaugaggucaucuuccac

SEQ ID NO: 3192169 - RNA, 19 nt, Artificial Sequence
  Description of Artificial Sequence: Synthetic oligonucleotide
aauccaucaggaguccucu

SEQ ID NO: 3192170 - RNA, 19 nt, Artificial Sequence
  Description of Artificial Sequence: Synthetic oligonucleotide
uuccacauccucuccuucc

SEQ ID NO: 3192171 - RNA, 19 nt, Artificial Sequence
  Description of Artificial Sequence: Synthetic oligonucleotide
aacaacaacagccaggagg

SEQ ID NO: 3192172 - RNA, 19 nt, Artificial Sequence
  Description of Artificial Sequence: Synthetic oligonucleotide
uuucagacauuucauaagg

SEQ ID NO: 3192173 - RNA, 19 nt, Artificial Sequence
  Description of Artificial Sequence: Synthetic oligonucleotide
ucuaaagagauuuuaaggu

SEQ ID NO: 3192174 - RNA, 19 nt, Artificial Sequence
  Description of Artificial Sequence: Synthetic oligonucleotide
uuucauauccggcucaucg

SEQ ID NO: 3192175 - RNA, 19 nt, Artificial Sequence
  Description of Artificial Sequence: Synthetic oligonucleotide
gacaagaucguccucaagg

SEQ ID NO: 3192176 - RNA, 19 nt, Artificial Sequence
  Description of Artificial Sequence: Synthetic oligonucleotide
uuuaaggucacuuaaucga

SEQ ID NO: 3192177 - RNA, 19 nt, Artificial Sequence
  Description of Artificial Sequence: Synthetic oligonucleotide
uuuuaaggucacuuaaucg

SEQ ID NO: 3192178 - RNA, 19 nt, Artificial Sequence
  Description of Artificial Sequence: Synthetic oligonucleotide
guuacagaugacaagaucg

SEQ ID NO: 3192179 - RNA, 19 nt, Artificial Sequence
  Description of Artificial Sequence: Synthetic oligonucleotide
ugcgguaagaaguugaaag

SEQ ID NO: 3192180 - RNA, 19 nt, Artificial Sequence
  Description of Artificial Sequence: Synthetic oligonucleotide
uucgauuucaucaccaaug

SEQ ID NO: 3192181 - RNA, 19 nt, Artificial Sequence
  Description of Artificial Sequence: Synthetic oligonucleotide
auuuuaaggucacuuaauc

SEQ ID NO: 3192182 - RNA, 19 nt, Artificial Sequence
  Description of Artificial Sequence: Synthetic oligonucleotide
uaaucgauauuucagacau

SEQ ID NO: 3192183 - RNA, 19 nt, Artificial Sequence
  Description of Artificial Sequence: Synthetic oligonucleotide
uucauaagggucaccagcg

SEQ ID NO: 3192184 - RNA, 19 nt, Artificial Sequence
  Description of Artificial Sequence: Synthetic oligonucleotide
gagguaaacaacaacagcc

SEQ ID NO: 3192185 - RNA, 19 nt, Artificial Sequence
  Description of Artificial Sequence: Synthetic oligonucleotide
uaucuaaagagauuuuaag

SEQ ID NO: 3192186 - RNA, 19 nt, Artificial Sequence
  Description of Artificial Sequence: Synthetic oligonucleotide
uaaagagauuuuaagguca

SEQ ID NO: 3192187 - RNA, 19 nt, Artificial Sequence
  Description of Artificial Sequence: Synthetic oligonucleotide
ucacuuuuguuauagaacu

SEQ ID NO: 3192188 - RNA, 19 nt, Artificial Sequence
  Description of Artificial Sequence: Synthetic oligonucleotide
agagguaaacaacaacagc

SEQ ID NO: 3192189 - RNA, 19 nt, Artificial Sequence
  Description of Artificial Sequence: Synthetic oligonucleotide
uuucauaagggucaccagc

SEQ ID NO: 3192190 - RNA, 19 nt, Artificial Sequence
  Description of Artificial Sequence: Synthetic oligonucleotide
uucgggaacacaaacauaa

SEQ ID NO: 3192191 - RNA, 19 nt, Artificial Sequence
  Description of Artificial Sequence: Synthetic oligonucleotide
ugagcagcgaagaagaagu

SEQ ID NO: 3192192 - RNA, 19 nt, Artificial Sequence
  Description of Artificial Sequence: Synthetic oligonucleotide
uguguaccaggcaaggugg

SEQ ID NO: 3192193 - RNA, 19 nt, Artificial Sequence
  Description of Artificial Sequence: Synthetic oligonucleotide
uucacuuuuguuauagaac

SEQ ID NO: 3192194 - RNA, 19 nt, Artificial Sequence
  Description of Artificial Sequence: Synthetic oligonucleotide
ugaguuacagaugacaaga

SEQ ID NO: 3192195 - RNA, 19 nt, Artificial Sequence
  Description of Artificial Sequence: Synthetic oligonucleotide
acagacaugguuguguacc

SEQ ID NO: 3192196 - RNA, 19 nt, Artificial Sequence
  Description of Artificial Sequence: Synthetic oligonucleotide
uccucaaggucuuaaagcc

SEQ ID NO: 3192197 - RNA, 19 nt, Artificial Sequence
  Description of Artificial Sequence: Synthetic oligonucleotide
auacauguggaagaguagc

SEQ ID NO: 3192198 - RNA, 19 nt, Artificial Sequence
  Description of Artificial Sequence: Synthetic oligonucleotide
uagagguaaacaacaacag

SEQ ID NO: 3192199 - RNA, 19 nt, Artificial Sequence
  Description of Artificial Sequence: Synthetic oligonucleotide
uuuuguuauagaacuuugc

SEQ ID NO: 3192200 - RNA, 19 nt, Artificial Sequence
  Description of Artificial Sequence: Synthetic oligonucleotide
aacaacagccaggaggccc

SEQ ID NO: 3192201 - RNA, 19 nt, Artificial Sequence
  Description of Artificial Sequence: Synthetic oligonucleotide
aaggucuuaaagcccauug

SEQ ID NO: 3192202 - RNA, 19 nt, Artificial Sequence
  Description of Artificial Sequence: Synthetic oligonucleotide
uaaacaacaacagccagga

SEQ ID NO: 3192203 - RNA, 19 nt, Artificial Sequence
  Description of Artificial Sequence: Synthetic oligonucleotide
agaacuuugcgguaagaag

SEQ ID NO: 3192204 - RNA, 19 nt, Artificial Sequence
  Description of Artificial Sequence: Synthetic oligonucleotide
uauuucagacauuucauaa

SEQ ID NO: 3192205 - RNA, 19 nt, Artificial Sequence
  Description of Artificial Sequence: Synthetic oligonucleotide
acagaugacaagaucgucc

SEQ ID NO: 3192206 - RNA, 19 nt, Artificial Sequence
  Description of Artificial Sequence: Synthetic oligonucleotide
aaagcccauugcaauaucc

SEQ ID NO: 3192207 - RNA, 19 nt, Artificial Sequence
  Description of Artificial Sequence: Synthetic oligonucleotide
auuucagacauuucauaag

SEQ ID NO: 3192208 - RNA, 19 nt, Artificial Sequence
  Description of Artificial Sequence: Synthetic oligonucleotide
uauagagguaaacaacaac

SEQ ID NO: 3192209 - RNA, 19 nt, Artificial Sequence
  Description of Artificial Sequence: Synthetic oligonucleotide
auagagguaaacaacaaca

SEQ ID NO: 3192210 - RNA, 19 nt, Artificial Sequence
  Description of Artificial Sequence: Synthetic oligonucleotide
aagaagaaguuguuguagu

SEQ ID NO: 3192211 - RNA, 19 nt, Artificial Sequence
  Description of Artificial Sequence: Synthetic oligonucleotide
acuuaaucgauauuucaga

SEQ ID NO: 3192212 - RNA, 19 nt, Artificial Sequence
  Description of Artificial Sequence: Synthetic oligonucleotide
uuguguaccaggcaaggug

SEQ ID NO: 3192213 - RNA, 19 nt, Artificial Sequence
  Description of Artificial Sequence: Synthetic oligonucleotide
uucagacauuucauaaggg

SEQ ID NO: 3192214 - RNA, 19 nt, Artificial Sequence
  Description of Artificial Sequence: Synthetic oligonucleotide
cacuuaaucgauauuucag

SEQ ID NO: 3192215 - RNA, 19 nt, Artificial Sequence
  Description of Artificial Sequence: Synthetic oligonucleotide
aggucuuaaagcccauugc

SEQ ID NO: 3192216 - RNA, 19 nt, Artificial Sequence
  Description of Artificial Sequence: Synthetic oligonucleotide
ucagacauuucauaagggu

SEQ ID NO: 3192217 - RNA, 19 nt, Artificial Sequence
  Description of Artificial Sequence: Synthetic oligonucleotide
uuaaucgauauuucagaca

SEQ ID NO: 3192218 - RNA, 19 nt, Artificial Sequence
  Description of Artificial Sequence: Synthetic oligonucleotide
cuaaagagauuuuaagguc

SEQ ID NO: 3192219 - RNA, 19 nt, Artificial Sequence
  Description of Artificial Sequence: Synthetic oligonucleotide
ugugaguuacagaugacaa

SEQ ID NO: 3192220 - RNA, 19 nt, Artificial Sequence
  Description of Artificial Sequence: Synthetic oligonucleotide
aaguuguuguaguggcccc

SEQ ID NO: 3192221 - RNA, 19 nt, Artificial Sequence
  Description of Artificial Sequence: Synthetic oligonucleotide
cuuaaucgauauuucagac

SEQ ID NO: 3192222 - RNA, 19 nt, Artificial Sequence
  Description of Artificial Sequence: Synthetic oligonucleotide
aguuacagaugacaagauc

SEQ ID NO: 3192223 - RNA, 19 nt, Artificial Sequence
  Description of Artificial Sequence: Synthetic oligonucleotide
uguuuuaauggaguugucc

SEQ ID NO: 3192224 - RNA, 19 nt, Artificial Sequence
  Description of Artificial Sequence: Synthetic oligonucleotide
ucgauuucaucaccaaugc

SEQ ID NO: 3192225 - RNA, 19 nt, Artificial Sequence
  Description of Artificial Sequence: Synthetic oligonucleotide
acaguauagagguaaacaa

SEQ ID NO: 3192226 - RNA, 19 nt, Artificial Sequence
  Description of Artificial Sequence: Synthetic oligonucleotide
agcauagcuauaucuaaag

SEQ ID NO: 3192227 - RNA, 19 nt, Artificial Sequence
  Description of Artificial Sequence: Synthetic oligonucleotide
acuuagcauagcuauaucu

SEQ ID NO: 3192228 - RNA, 19 nt, Artificial Sequence
  Description of Artificial Sequence: Synthetic oligonucleotide
caucacauuucauauccgg

SEQ ID NO: 3192229 - RNA, 19 nt, Artificial Sequence
  Description of Artificial Sequence: Synthetic oligonucleotide
aaagagauuuuaaggucac

SEQ ID NO: 3192230 - RNA, 19 nt, Artificial Sequence
  Description of Artificial Sequence: Synthetic oligonucleotide
gaagaagaaguuguuguag

SEQ ID NO: 3192231 - RNA, 19 nt, Artificial Sequence
  Description of Artificial Sequence: Synthetic oligonucleotide
auauccaacagaugagcag

SEQ ID NO: 3192232 - RNA, 19 nt, Artificial Sequence
  Description of Artificial Sequence: Synthetic oligonucleotide
ucacauuucauauccggcu

SEQ ID NO: 3192233 - RNA, 19 nt, Artificial Sequence
  Description of Artificial Sequence: Synthetic oligonucleotide
uauccaacagaugagcagc

SEQ ID NO: 3192234 - RNA, 19 nt, Artificial Sequence
  Description of Artificial Sequence: Synthetic oligonucleotide
gaaguugaaagccaccaca

SEQ ID NO: 3192235 - RNA, 19 nt, Artificial Sequence
  Description of Artificial Sequence: Synthetic oligonucleotide
aguauagagguaaacaaca

SEQ ID NO: 3192236 - RNA, 19 nt, Artificial Sequence
  Description of Artificial Sequence: Synthetic oligonucleotide
aagaaguugaaagccacca

SEQ ID NO: 3192237 - RNA, 19 nt, Artificial Sequence
  Description of Artificial Sequence: Synthetic oligonucleotide
auagcuauaucuaaagaga

SEQ ID NO: 3192238 - RNA, 19 nt, Artificial Sequence
  Description of Artificial Sequence: Synthetic oligonucleotide
auugcaauauccaacagau

SEQ ID NO: 3192239 - RNA, 19 nt, Artificial Sequence
  Description of Artificial Sequence: Synthetic oligonucleotide
aguagcaugucaucauguc

SEQ ID NO: 3192240 - RNA, 19 nt, Artificial Sequence
  Description of Artificial Sequence: Synthetic oligonucleotide
ucacuuaaucgauauuuca

SEQ ID NO: 3192241 - RNA, 19 nt, Artificial Sequence
  Description of Artificial Sequence: Synthetic oligonucleotide
guaaacaacaacagccagg

SEQ ID NO: 3192242 - RNA, 19 nt, Artificial Sequence
  Description of Artificial Sequence: Synthetic oligonucleotide
agauuuuaaggucacuuaa

SEQ ID NO: 3192243 - RNA, 19 nt, Artificial Sequence
  Description of Artificial Sequence: Synthetic oligonucleotide
uuagcauagcuauaucuaa

SEQ ID NO: 3192244 - RNA, 19 nt, Artificial Sequence
  Description of Artificial Sequence: Synthetic oligonucleotide
ucaucuucacuuuuguuau

SEQ ID NO: 3192245 - RNA, 19 nt, Artificial Sequence
  Description of Artificial Sequence: Synthetic oligonucleotide
agcuguuugccauugugag

SEQ ID NO: 3192246 - RNA, 19 nt, Artificial Sequence
  Description of Artificial Sequence: Synthetic oligonucleotide
agaaguugaaagccaccac

SEQ ID NO: 3192247 - RNA, 19 nt, Artificial Sequence
  Description of Artificial Sequence: Synthetic oligonucleotide
agaggaucagcacagcugu

SEQ ID NO: 3192248 - RNA, 19 nt, Artificial Sequence
  Description of Artificial Sequence: Synthetic oligonucleotide
aaagccaccacaguauaga

SEQ ID NO: 3192249 - RNA, 19 nt, Artificial Sequence
  Description of Artificial Sequence: Synthetic oligonucleotide
aacuuagcauagcuauauc

SEQ ID NO: 3192250 - RNA, 19 nt, Artificial Sequence
  Description of Artificial Sequence: Synthetic oligonucleotide
uagcaugucaucaugucau

SEQ ID NO: 3192251 - RNA, 19 nt, Artificial Sequence
  Description of Artificial Sequence: Synthetic oligonucleotide
aagaucguccucaaggucu

SEQ ID NO: 3192252 - RNA, 19 nt, Artificial Sequence
  Description of Artificial Sequence: Synthetic oligonucleotide
cuuuuguuauagaacuuug

SEQ ID NO: 3192253 - RNA, 19 nt, Artificial Sequence
  Description of Artificial Sequence: Synthetic oligonucleotide
uuacagaugacaagaucgu

SEQ ID NO: 3192254 - RNA, 19 nt, Artificial Sequence
  Description of Artificial Sequence: Synthetic oligonucleotide
aaggucacuuaaucgauau

SEQ ID NO: 3192255 - RNA, 19 nt, Artificial Sequence
  Description of Artificial Sequence: Synthetic oligonucleotide
ucuuaaagcccauugcaau

SEQ ID NO: 3192256 - RNA, 19 nt, Artificial Sequence
  Description of Artificial Sequence: Synthetic oligonucleotide
uauagaacuuugcgguaag

SEQ ID NO: 3192257 - RNA, 19 nt, Artificial Sequence
  Description of Artificial Sequence: Synthetic oligonucleotide
uuaauggaguuguccuucg

SEQ ID NO: 3192258 - RNA, 19 nt, Artificial Sequence
  Description of Artificial Sequence: Synthetic oligonucleotide
aucacauuucauauccggc

SEQ ID NO: 3192259 - RNA, 19 nt, Artificial Sequence
  Description of Artificial Sequence: Synthetic oligonucleotide
uauaucuaaagagauuuua

SEQ ID NO: 3192260 - RNA, 19 nt, Artificial Sequence
  Description of Artificial Sequence: Synthetic oligonucleotide
aaguugaaagccaccacag

SEQ ID NO: 3192261 - RNA, 19 nt, Artificial Sequence
  Description of Artificial Sequence: Synthetic oligonucleotide
uaagaaguugaaagccacc

SEQ ID NO: 3192262 - RNA, 19 nt, Artificial Sequence
  Description of Artificial Sequence: Synthetic oligonucleotide
cagacauuucauaaggguc

SEQ ID NO: 3192263 - RNA, 19 nt, Artificial Sequence
  Description of Artificial Sequence: Synthetic oligonucleotide
uugaaagccaccacaguau

SEQ ID NO: 3192264 - RNA, 19 nt, Artificial Sequence
  Description of Artificial Sequence: Synthetic oligonucleotide
ucaccaaugccuccacccg

SEQ ID NO: 3192265 - RNA, 19 nt, Artificial Sequence
  Description of Artificial Sequence: Synthetic oligonucleotide
cauugugaguuacagauga

SEQ ID NO: 3192266 - RNA, 19 nt, Artificial Sequence
  Description of Artificial Sequence: Synthetic oligonucleotide
uguuguaguggccccagga

SEQ ID NO: 3192267 - RNA, 19 nt, Artificial Sequence
  Description of Artificial Sequence: Synthetic oligonucleotide
uagcuauaucuaaagagau

SEQ ID NO: 3192268 - RNA, 19 nt, Artificial Sequence
  Description of Artificial Sequence: Synthetic oligonucleotide
ucaucacauuucauauccg

SEQ ID NO: 3192269 - RNA, 19 nt, Artificial Sequence
  Description of Artificial Sequence: Synthetic oligonucleotide
ggugguuccugauacaaag

SEQ ID NO: 3192270 - RNA, 19 nt, Artificial Sequence
  Description of Artificial Sequence: Synthetic oligonucleotide
guccucaaggucuuaaagc

SEQ ID NO: 3192271 - RNA, 19 nt, Artificial Sequence
  Description of Artificial Sequence: Synthetic oligonucleotide
auacuuucuucucugaccc

SEQ ID NO: 3192272 - RNA, 19 nt, Artificial Sequence
  Description of Artificial Sequence: Synthetic oligonucleotide
aaaggaaagaggaggaggc

SEQ ID NO: 3192273 - RNA, 19 nt, Artificial Sequence
  Description of Artificial Sequence: Synthetic oligonucleotide
ucuucucugacccaucugg

SEQ ID NO: 3192274 - RNA, 19 nt, Artificial Sequence
  Description of Artificial Sequence: Synthetic oligonucleotide
uguagagucacccagcagu

SEQ ID NO: 3192275 - RNA, 19 nt, Artificial Sequence
  Description of Artificial Sequence: Synthetic oligonucleotide
uuugacacugcaugcaugg

SEQ ID NO: 3192276 - RNA, 19 nt, Artificial Sequence
  Description of Artificial Sequence: Synthetic oligonucleotide
aauacggcuucaucuuggc

SEQ ID NO: 3192277 - RNA, 19 nt, Artificial Sequence
  Description of Artificial Sequence: Synthetic oligonucleotide
aggguguaauucuucagcc

SEQ ID NO: 3192278 - RNA, 19 nt, Artificial Sequence
  Description of Artificial Sequence: Synthetic oligonucleotide
ucauggacagccucaaggg

SEQ ID NO: 3192279 - RNA, 19 nt, Artificial Sequence
  Description of Artificial Sequence: Synthetic oligonucleotide
uugacaaggagccucgagc

SEQ ID NO: 3192280 - RNA, 19 nt, Artificial Sequence
  Description of Artificial Sequence: Synthetic oligonucleotide
ucugccaugacuucacgag

SEQ ID NO: 3192281 - RNA, 19 nt, Artificial Sequence
  Description of Artificial Sequence: Synthetic oligonucleotide
uucccuuugacacugcaug

SEQ ID NO: 3192282 - RNA, 19 nt, Artificial Sequence
  Description of Artificial Sequence: Synthetic oligonucleotide
ugaacauggcuucugugag

SEQ ID NO: 3192283 - RNA, 19 nt, Artificial Sequence
  Description of Artificial Sequence: Synthetic oligonucleotide
aacauggcuucugugagcg

SEQ ID NO: 3192284 - RNA, 19 nt, Artificial Sequence
  Description of Artificial Sequence: Synthetic oligonucleotide
ugaucaucugugaaacagg

SEQ ID NO: 3192285 - RNA, 19 nt, Artificial Sequence
  Description of Artificial Sequence: Synthetic oligonucleotide
ucuagcacaggcauguugu

SEQ ID NO: 3192286 - RNA, 19 nt, Artificial Sequence
  Description of Artificial Sequence: Synthetic oligonucleotide
cugggcuuggcuuucaugg

SEQ ID NO: 3192287 - RNA, 19 nt, Artificial Sequence
  Description of Artificial Sequence: Synthetic oligonucleotide
ugcucugcuuuccagacag

SEQ ID NO: 3192288 - RNA, 19 nt, Artificial Sequence
  Description of Artificial Sequence: Synthetic oligonucleotide
cuugaggaggaagagaagg

SEQ ID NO: 3192289 - RNA, 19 nt, Artificial Sequence
  Description of Artificial Sequence: Synthetic oligonucleotide
ugugcaucagcaauacggc

SEQ ID NO: 3192290 - RNA, 19 nt, Artificial Sequence
  Description of Artificial Sequence: Synthetic oligonucleotide
gaagacgucagccgagugg

SEQ ID NO: 3192291 - RNA, 19 nt, Artificial Sequence
  Description of Artificial Sequence: Synthetic oligonucleotide
aaucgaggaggccugucuc

SEQ ID NO: 3192292 - RNA, 19 nt, Artificial Sequence
  Description of Artificial Sequence: Synthetic oligonucleotide
uacggcuucaucuuggccu

SEQ ID NO: 3192293 - RNA, 19 nt, Artificial Sequence
  Description of Artificial Sequence: Synthetic oligonucleotide
cugcuuuccagacagugcg

SEQ ID NO: 3192294 - RNA, 19 nt, Artificial Sequence
  Description of Artificial Sequence: Synthetic oligonucleotide
aacagauccagcuggcgga

SEQ ID NO: 3192295 - RNA, 19 nt, Artificial Sequence
  Description of Artificial Sequence: Synthetic oligonucleotide
ucauuuagcacgcugucua

SEQ ID NO: 3192296 - RNA, 19 nt, Artificial Sequence
  Description of Artificial Sequence: Synthetic oligonucleotide
gaagagagaauucccuccc

SEQ ID NO: 3192297 - RNA, 19 nt, Artificial Sequence
  Description of Artificial Sequence: Synthetic oligonucleotide
uaggcaaaaucgaggaggc

SEQ ID NO: 3192298 - RNA, 19 nt, Artificial Sequence
  Description of Artificial Sequence: Synthetic oligonucleotide
ucaguagggagcuguaggc

SEQ ID NO: 3192299 - RNA, 19 nt, Artificial Sequence
  Description of Artificial Sequence: Synthetic oligonucleotide
gcaugcauggucuuuaucc

SEQ ID NO: 3192300 - RNA, 19 nt, Artificial Sequence
  Description of Artificial Sequence: Synthetic oligonucleotide
gacuucacgagugaugaag

SEQ ID NO: 3192301 - RNA, 19 nt, Artificial Sequence
  Description of Artificial Sequence: Synthetic oligonucleotide
aaaucgaggaggccugucu

SEQ ID NO: 3192302 - RNA, 19 nt, Artificial Sequence
  Description of Artificial Sequence: Synthetic oligonucleotide
acaggcauguugucgagag

SEQ ID NO: 3192303 - RNA, 19 nt, Artificial Sequence
  Description of Artificial Sequence: Synthetic oligonucleotide
uuuagcacgcugucuagca

SEQ ID NO: 3192304 - RNA, 19 nt, Artificial Sequence
  Description of Artificial Sequence: Synthetic oligonucleotide
ucugcuuuccagacagugc

SEQ ID NO: 3192305 - RNA, 19 nt, Artificial Sequence
  Description of Artificial Sequence: Synthetic oligonucleotide
augcauggucuuuaucccc

SEQ ID NO: 3192306 - RNA, 19 nt, Artificial Sequence
  Description of Artificial Sequence: Synthetic oligonucleotide
uguguagauuucugggucc

SEQ ID NO: 3192307 - RNA, 19 nt, Artificial Sequence
  Description of Artificial Sequence: Synthetic oligonucleotide
cucaguagggagcuguagg

SEQ ID NO: 3192308 - RNA, 19 nt, Artificial Sequence
  Description of Artificial Sequence: Synthetic oligonucleotide
caugcauggucuuuauccc

SEQ ID NO: 3192309 - RNA, 19 nt, Artificial Sequence
  Description of Artificial Sequence: Synthetic oligonucleotide
gaucaucugugaaacaggc

SEQ ID NO: 3192310 - RNA, 19 nt, Artificial Sequence
  Description of Artificial Sequence: Synthetic oligonucleotide
gaaucgguuguauuuaaaa

SEQ ID NO: 3192311 - RNA, 19 nt, Artificial Sequence
  Description of Artificial Sequence: Synthetic oligonucleotide
gacucaggaaaggaaagag

SEQ ID NO: 3192312 - RNA, 19 nt, Artificial Sequence
  Description of Artificial Sequence: Synthetic oligonucleotide
ucuguagagucacccagca

SEQ ID NO: 3192313 - RNA, 19 nt, Artificial Sequence
  Description of Artificial Sequence: Synthetic oligonucleotide
aggcauguugucgagaguc

SEQ ID NO: 3192314 - RNA, 19 nt, Artificial Sequence
  Description of Artificial Sequence: Synthetic oligonucleotide
agagaaggagccagaaggc

SEQ ID NO: 3192315 - RNA, 19 nt, Artificial Sequence
  Description of Artificial Sequence: Synthetic oligonucleotide
ugucgagagucuucugugg

SEQ ID NO: 3192316 - RNA, 19 nt, Artificial Sequence
  Description of Artificial Sequence: Synthetic oligonucleotide
caauacggcuucaucuugg

SEQ ID NO: 3192317 - RNA, 19 nt, Artificial Sequence
  Description of Artificial Sequence: Synthetic oligonucleotide
aucgaggaggccugucucc

SEQ ID NO: 3192318 - RNA, 19 nt, Artificial Sequence
  Description of Artificial Sequence: Synthetic oligonucleotide
caacagauccagcuggcgg

SEQ ID NO: 3192319 - RNA, 19 nt, Artificial Sequence
  Description of Artificial Sequence: Synthetic oligonucleotide
ugccaugacuucacgagug

SEQ ID NO: 3192320 - RNA, 19 nt, Artificial Sequence
  Description of Artificial Sequence: Synthetic oligonucleotide
uugucgagagucuucugug

SEQ ID NO: 3192321 - RNA, 19 nt, Artificial Sequence
  Description of Artificial Sequence: Synthetic oligonucleotide
uucugugggagggugauca

SEQ ID NO: 3192322 - RNA, 19 nt, Artificial Sequence
  Description of Artificial Sequence: Synthetic oligonucleotide
auuuagcacgcugucuagc

SEQ ID NO: 3192323 - RNA, 19 nt, Artificial Sequence
  Description of Artificial Sequence: Synthetic oligonucleotide
gaggaagagaaggagccag

SEQ ID NO: 3192324 - RNA, 19 nt, Artificial Sequence
  Description of Artificial Sequence: Synthetic oligonucleotide
augacuucacgagugauga

SEQ ID NO: 3192325 - RNA, 19 nt, Artificial Sequence
  Description of Artificial Sequence: Synthetic oligonucleotide
caugacuucacgagugaug

SEQ ID NO: 3192326 - RNA, 19 nt, Artificial Sequence
  Description of Artificial Sequence: Synthetic oligonucleotide
cacgcugucuagcacaggc

SEQ ID NO: 3192327 - RNA, 19 nt, Artificial Sequence
  Description of Artificial Sequence: Synthetic oligonucleotide
uucuggguccuucugggga

SEQ ID NO: 3192328 - RNA, 19 nt, Artificial Sequence
  Description of Artificial Sequence: Synthetic oligonucleotide
agaaggagccagaaggccg

SEQ ID NO: 3192329 - RNA, 19 nt, Artificial Sequence
  Description of Artificial Sequence: Synthetic oligonucleotide
caucugugaaacaggcugc

SEQ ID NO: 3192330 - RNA, 19 nt, Artificial Sequence
  Description of Artificial Sequence: Synthetic oligonucleotide
ugcaucagcaauacggcuu

SEQ ID NO: 3192331 - RNA, 19 nt, Artificial Sequence
  Description of Artificial Sequence: Synthetic oligonucleotide
agauccagcuggcggaagg

SEQ ID NO: 3192332 - RNA, 19 nt, Artificial Sequence
  Description of Artificial Sequence: Synthetic oligonucleotide
aaggccuccacuccauaga

SEQ ID NO: 3192333 - RNA, 19 nt, Artificial Sequence
  Description of Artificial Sequence: Synthetic oligonucleotide
agagucacccagcaguacu

SEQ ID NO: 3192334 - RNA, 19 nt, Artificial Sequence
  Description of Artificial Sequence: Synthetic oligonucleotide
auacggcuucaucuuggcc

SEQ ID NO: 3192335 - RNA, 19 nt, Artificial Sequence
  Description of Artificial Sequence: Synthetic oligonucleotide
ugacacugcaugcaugguc

SEQ ID NO: 3192336 - RNA, 19 nt, Artificial Sequence
  Description of Artificial Sequence: Synthetic oligonucleotide
gucgagagucuucuguggg

SEQ ID NO: 3192337 - RNA, 19 nt, Artificial Sequence
  Description of Artificial Sequence: Synthetic oligonucleotide
uccuucuggggacucagga

SEQ ID NO: 3192338 - RNA, 19 nt, Artificial Sequence
  Description of Artificial Sequence: Synthetic oligonucleotide
aagaaucgguuguauuuaa

SEQ ID NO: 3192339 - RNA, 19 nt, Artificial Sequence
  Description of Artificial Sequence: Synthetic oligonucleotide
gccuccacuccauagaggg

SEQ ID NO: 3192340 - RNA, 19 nt, Artificial Sequence
  Description of Artificial Sequence: Synthetic oligonucleotide
cuucacgagugaugaaggg

SEQ ID NO: 3192341 - RNA, 19 nt, Artificial Sequence
  Description of Artificial Sequence: Synthetic oligonucleotide
acucaggaaaggaaagagg

SEQ ID NO: 3192342 - RNA, 19 nt, Artificial Sequence
  Description of Artificial Sequence: Synthetic oligonucleotide
acuucacgagugaugaagg

SEQ ID NO: 3192343 - RNA, 19 nt, Artificial Sequence
  Description of Artificial Sequence: Synthetic oligonucleotide
aguggacacgguccugggc

SEQ ID NO: 3192344 - RNA, 19 nt, Artificial Sequence
  Description of Artificial Sequence: Synthetic oligonucleotide
ucagguagccggcucucag

SEQ ID NO: 3192345 - RNA, 19 nt, Artificial Sequence
  Description of Artificial Sequence: Synthetic oligonucleotide
ucgaagagagaauucccuc

SEQ ID NO: 3192346 - RNA, 19 nt, Artificial Sequence
  Description of Artificial Sequence: Synthetic oligonucleotide
aauucccucccaucugcca

SEQ ID NO: 3192347 - RNA, 19 nt, Artificial Sequence
  Description of Artificial Sequence: Synthetic oligonucleotide
aaccucaggcucuguguag

SEQ ID NO: 3192348 - RNA, 19 nt, Artificial Sequence
  Description of Artificial Sequence: Synthetic oligonucleotide
ggagccucgagccaguuug

SEQ ID NO: 3192349 - RNA, 19 nt, Artificial Sequence
  Description of Artificial Sequence: Synthetic oligonucleotide
aaaaucgaggaggccuguc

SEQ ID NO: 3192350 - RNA, 19 nt, Artificial Sequence
  Description of Artificial Sequence: Synthetic oligonucleotide
uauucccuuugacacugca

SEQ ID NO: 3192351 - RNA, 19 nt, Artificial Sequence
  Description of Artificial Sequence: Synthetic oligonucleotide
cuguguagauuucuggguc

SEQ ID NO: 3192352 - RNA, 19 nt, Artificial Sequence
  Description of Artificial Sequence: Synthetic oligonucleotide
uggguucaagaaucgguug

SEQ ID NO: 3192353 - RNA, 19 nt, Artificial Sequence
  Description of Artificial Sequence: Synthetic oligonucleotide
aagagagaauucccuccca

SEQ ID NO: 3192354 - RNA, 19 nt, Artificial Sequence
  Description of Artificial Sequence: Synthetic oligonucleotide
uacggcaggguguaauucu

SEQ ID NO: 3192355 - RNA, 19 nt, Artificial Sequence
  Description of Artificial Sequence: Synthetic oligonucleotide
uagcacgcugucuagcaca

SEQ ID NO: 3192356 - RNA, 19 nt, Artificial Sequence
  Description of Artificial Sequence: Synthetic oligonucleotide
aaggccgugggacccauau

SEQ ID NO: 3192357 - RNA, 19 nt, Artificial Sequence
  Description of Artificial Sequence: Synthetic oligonucleotide
gucaccgcgucgaagagag

SEQ ID NO: 3192358 - RNA, 19 nt, Artificial Sequence
  Description of Artificial Sequence: Synthetic oligonucleotide
agcaauacggcuucaucuu

SEQ ID NO: 3192359 - RNA, 19 nt, Artificial Sequence
  Description of Artificial Sequence: Synthetic oligonucleotide
ucccuuugacacugcaugc

SEQ ID NO: 3192360 - RNA, 19 nt, Artificial Sequence
  Description of Artificial Sequence: Synthetic oligonucleotide
gaacauggcuucugugagc

SEQ ID NO: 3192361 - RNA, 19 nt, Artificial Sequence
  Description of Artificial Sequence: Synthetic oligonucleotide
ugggcuuggcuuucauggg

SEQ ID NO: 3192362 - RNA, 19 nt, Artificial Sequence
  Description of Artificial Sequence: Synthetic oligonucleotide
guugacaaggagccucgag

SEQ ID NO: 3192363 - RNA, 19 nt, Artificial Sequence
  Description of Artificial Sequence: Synthetic oligonucleotide
cucuguagagucacccagc

SEQ ID NO: 3192364 - RNA, 19 nt, Artificial Sequence
  Description of Artificial Sequence: Synthetic oligonucleotide
ucucugugcaucagcaaua

SEQ ID NO: 3192365 - RNA, 19 nt, Artificial Sequence
  Description of Artificial Sequence: Synthetic oligonucleotide
agggugaucaucugugaaa

SEQ ID NO: 3192366 - RNA, 19 nt, Artificial Sequence
  Description of Artificial Sequence: Synthetic oligonucleotide
uagauuucuggguccuucu

SEQ ID NO: 3192367 - RNA, 19 nt, Artificial Sequence
  Description of Artificial Sequence: Synthetic oligonucleotide
cuuugacacugcaugcaug

SEQ ID NO: 3192368 - RNA, 19 nt, Artificial Sequence
  Description of Artificial Sequence: Synthetic oligonucleotide
agccucaagggccucagga

SEQ ID NO: 3192369 - RNA, 19 nt, Artificial Sequence
  Description of Artificial Sequence: Synthetic oligonucleotide
cauggacagccucaagggc

SEQ ID NO: 3192370 - RNA, 19 nt, Artificial Sequence
  Description of Artificial Sequence: Synthetic oligonucleotide
cauuuagcacgcugucuag

SEQ ID NO: 3192371 - RNA, 19 nt, Artificial Sequence
  Description of Artificial Sequence: Synthetic oligonucleotide
agaaugagaacacaaaugg

SEQ ID NO: 3192372 - RNA, 19 nt, Artificial Sequence
  Description of Artificial Sequence: Synthetic oligonucleotide
aaucccaagaaugaguccc

SEQ ID NO: 3192373 - RNA, 19 nt, Artificial Sequence
  Description of Artificial Sequence: Synthetic oligonucleotide
aaacauagacaacucggcc

SEQ ID NO: 3192374 - RNA, 19 nt, Artificial Sequence
  Description of Artificial Sequence: Synthetic oligonucleotide
agcacaaccacggugaucc

SEQ ID NO: 3192375 - RNA, 19 nt, Artificial Sequence
  Description of Artificial Sequence: Synthetic oligonucleotide
guaugguuaggucaaaugg

SEQ ID NO: 3192376 - RNA, 19 nt, Artificial Sequence
  Description of Artificial Sequence: Synthetic oligonucleotide
uucacaaagaugcucacca

SEQ ID NO: 3192377 - RNA, 19 nt, Artificial Sequence
  Description of Artificial Sequence: Synthetic oligonucleotide
ugucauuugcaucaucagg

SEQ ID NO: 3192378 - RNA, 19 nt, Artificial Sequence
  Description of Artificial Sequence: Synthetic oligonucleotide
uucaucauucuuuauuucc

SEQ ID NO: 3192379 - RNA, 19 nt, Artificial Sequence
  Description of Artificial Sequence: Synthetic oligonucleotide
aacauagacaacucggcca

SEQ ID NO: 3192380 - RNA, 19 nt, Artificial Sequence
  Description of Artificial Sequence: Synthetic oligonucleotide
gaugccauagccaaaguag

SEQ ID NO: 3192381 - RNA, 19 nt, Artificial Sequence
  Description of Artificial Sequence: Synthetic oligonucleotide
ugcaucaucagguaaauau

SEQ ID NO: 3192382 - RNA, 19 nt, Artificial Sequence
  Description of Artificial Sequence: Synthetic oligonucleotide
auaucugagaaugagaaca

SEQ ID NO: 3192383 - RNA, 19 nt, Artificial Sequence
  Description of Artificial Sequence: Synthetic oligonucleotide
gauaacuaccaacaauccc

SEQ ID NO: 3192384 - RNA, 19 nt, Artificial Sequence
  Description of Artificial Sequence: Synthetic oligonucleotide
acaaauggacaccagggag

SEQ ID NO: 3192385 - RNA, 19 nt, Artificial Sequence
  Description of Artificial Sequence: Synthetic oligonucleotide
ugacaugagguccacaaga

SEQ ID NO: 3192386 - RNA, 19 nt, Artificial Sequence
  Description of Artificial Sequence: Synthetic oligonucleotide
aaauggugugaacacagga

SEQ ID NO: 3192387 - RNA, 19 nt, Artificial Sequence
  Description of Artificial Sequence: Synthetic oligonucleotide
guaaauauucacaaagaug

SEQ ID NO: 3192388 - RNA, 19 nt, Artificial Sequence
  Description of Artificial Sequence: Synthetic oligonucleotide
aacuaaguggaguugucca

SEQ ID NO: 3192389 - RNA, 19 nt, Artificial Sequence
  Description of Artificial Sequence: Synthetic oligonucleotide
acuaccaacaaucccaaga

SEQ ID NO: 3192390 - RNA, 19 nt, Artificial Sequence
  Description of Artificial Sequence: Synthetic oligonucleotide
auaacuaccaacaauccca

SEQ ID NO: 3192391 - RNA, 19 nt, Artificial Sequence
  Description of Artificial Sequence: Synthetic oligonucleotide
guaggaauggagcugacug

SEQ ID NO: 3192392 - RNA, 19 nt, Artificial Sequence
  Description of Artificial Sequence: Synthetic oligonucleotide
ugagaaugagaacacaaau

SEQ ID NO: 3192393 - RNA, 19 nt, Artificial Sequence
  Description of Artificial Sequence: Synthetic oligonucleotide
uugaugauucuuaacuucu

SEQ ID NO: 3192394 - RNA, 19 nt, Artificial Sequence
  Description of Artificial Sequence: Synthetic oligonucleotide
ugggaguagaggcagaaca

SEQ ID NO: 3192395 - RNA, 19 nt, Artificial Sequence
  Description of Artificial Sequence: Synthetic oligonucleotide
ccaaucagcauccagaucc

SEQ ID NO: 3192396 - RNA, 19 nt, Artificial Sequence
  Description of Artificial Sequence: Synthetic oligonucleotide
agacaacucggccagaaag

SEQ ID NO: 3192397 - RNA, 19 nt, Artificial Sequence
  Description of Artificial Sequence: Synthetic oligonucleotide
uuugaugauucuuaacuuc

SEQ ID NO: 3192398 - RNA, 19 nt, Artificial Sequence
  Description of Artificial Sequence: Synthetic oligonucleotide
aaauccaaucagcauccag

SEQ ID NO: 3192399 - RNA, 19 nt, Artificial Sequence
  Description of Artificial Sequence: Synthetic oligonucleotide
guagauagcaaauccaauc

SEQ ID NO: 3192400 - RNA, 19 nt, Artificial Sequence
  Description of Artificial Sequence: Synthetic oligonucleotide
auggugugaacacaggaag

SEQ ID NO: 3192401 - RNA, 19 nt, Artificial Sequence
  Description of Artificial Sequence: Synthetic oligonucleotide
aaugucccaauugacauga

SEQ ID NO: 3192402 - RNA, 19 nt, Artificial Sequence
  Description of Artificial Sequence: Synthetic oligonucleotide
agcaaacauagacaacucg

SEQ ID NO: 3192403 - RNA, 19 nt, Artificial Sequence
  Description of Artificial Sequence: Synthetic oligonucleotide
ucaucauucuuuauuuccu

SEQ ID NO: 3192404 - RNA, 19 nt, Artificial Sequence
  Description of Artificial Sequence: Synthetic oligonucleotide
aauccaaucagcauccaga

SEQ ID NO: 3192405 - RNA, 19 nt, Artificial Sequence
  Description of Artificial Sequence: Synthetic oligonucleotide
gaguaagcaagcaaugucc

SEQ ID NO: 3192406 - RNA, 19 nt, Artificial Sequence
  Description of Artificial Sequence: Synthetic oligonucleotide
accacggugauccacacug

SEQ ID NO: 3192407 - RNA, 19 nt, Artificial Sequence
  Description of Artificial Sequence: Synthetic oligonucleotide
aucauucuuuauuuccugg

SEQ ID NO: 3192408 - RNA, 19 nt, Artificial Sequence
  Description of Artificial Sequence: Synthetic oligonucleotide
gagaaugagaacacaaaug

SEQ ID NO: 3192409 - RNA, 19 nt, Artificial Sequence
  Description of Artificial Sequence: Synthetic oligonucleotide
ugucccaauugacaugagg

SEQ ID NO: 3192410 - RNA, 19 nt, Artificial Sequence
  Description of Artificial Sequence: Synthetic oligonucleotide
aucagguaaauauucacaa

SEQ ID NO: 3192411 - RNA, 19 nt, Artificial Sequence
  Description of Artificial Sequence: Synthetic oligonucleotide
aaaguagauagcaaaucca

SEQ ID NO: 3192412 - RNA, 19 nt, Artificial Sequence
  Description of Artificial Sequence: Synthetic oligonucleotide
acauagacaacucggccag

SEQ ID NO: 3192413 - RNA, 19 nt, Artificial Sequence
  Description of Artificial Sequence: Synthetic oligonucleotide
acuaaguggaguuguccac

SEQ ID NO: 3192414 - RNA, 19 nt, Artificial Sequence
  Description of Artificial Sequence: Synthetic oligonucleotide
ucuucaucauucuuuauuu

SEQ ID NO: 3192415 - RNA, 19 nt, Artificial Sequence
  Description of Artificial Sequence: Synthetic oligonucleotide
auucuuuauuuccugguca

SEQ ID NO: 3192416 - RNA, 19 nt, Artificial Sequence
  Description of Artificial Sequence: Synthetic oligonucleotide
aaagugaagggguguguug

SEQ ID NO: 3192417 - RNA, 19 nt, Artificial Sequence
  Description of Artificial Sequence: Synthetic oligonucleotide
cugacuggacaaaacagag

SEQ ID NO: 3192418 - RNA, 19 nt, Artificial Sequence
  Description of Artificial Sequence: Synthetic oligonucleotide
auugacaugagguccacaa

SEQ ID NO: 3192419 - RNA, 19 nt, Artificial Sequence
  Description of Artificial Sequence: Synthetic oligonucleotide
aacuucuuccacacugugc

SEQ ID NO: 3192420 - RNA, 19 nt, Artificial Sequence
  Description of Artificial Sequence: Synthetic oligonucleotide
auucuuaacuucuuccaca

SEQ ID NO: 3192421 - RNA, 19 nt, Artificial Sequence
  Description of Artificial Sequence: Synthetic oligonucleotide
aguaagcaagcaauguccc

SEQ ID NO: 3192422 - RNA, 19 nt, Artificial Sequence
  Description of Artificial Sequence: Synthetic oligonucleotide
aacagucagcaguacagca

SEQ ID NO: 3192423 - RNA, 19 nt, Artificial Sequence
  Description of Artificial Sequence: Synthetic oligonucleotide
cuuuauuuccuggucaggc

SEQ ID NO: 3192424 - RNA, 19 nt, Artificial Sequence
  Description of Artificial Sequence: Synthetic oligonucleotide
gauucuuaacuucuuccac

SEQ ID NO: 3192425 - RNA, 19 nt, Artificial Sequence
  Description of Artificial Sequence: Synthetic oligonucleotide
ugugaacacaggaagcagu

SEQ ID NO: 3192426 - RNA, 19 nt, Artificial Sequence
  Description of Artificial Sequence: Synthetic oligonucleotide
acaaucccaagaaugaguc

SEQ ID NO: 3192427 - RNA, 19 nt, Artificial Sequence
  Description of Artificial Sequence: Synthetic oligonucleotide
aagaacagucagcaguaca

SEQ ID NO: 3192428 - RNA, 19 nt, Artificial Sequence
  Description of Artificial Sequence: Synthetic oligonucleotide
agauagcaaauccaaucag

SEQ ID NO: 3192429 - RNA, 19 nt, Artificial Sequence
  Description of Artificial Sequence: Synthetic oligonucleotide
uaggaauggagcugacugg

SEQ ID NO: 3192430 - RNA, 19 nt, Artificial Sequence
  Description of Artificial Sequence: Synthetic oligonucleotide
agaacagucagcaguacag

SEQ ID NO: 3192431 - RNA, 19 nt, Artificial Sequence
  Description of Artificial Sequence: Synthetic oligonucleotide
gaaaggaggguaggaaugg

SEQ ID NO: 3192432 - RNA, 19 nt, Artificial Sequence
  Description of Artificial Sequence: Synthetic oligonucleotide
auauucacaaagaugcuca

SEQ ID NO: 3192433 - RNA, 19 nt, Artificial Sequence
  Description of Artificial Sequence: Synthetic oligonucleotide
uguuuccagauaacuacca

SEQ ID NO: 3192434 - RNA, 19 nt, Artificial Sequence
  Description of Artificial Sequence: Synthetic oligonucleotide
ucugcuucaagugucuucu

SEQ ID NO: 3192435 - RNA, 19 nt, Artificial Sequence
  Description of Artificial Sequence: Synthetic oligonucleotide
acaugagaggcccagcucu

SEQ ID NO: 3192436 - RNA, 19 nt, Artificial Sequence
  Description of Artificial Sequence: Synthetic oligonucleotide
gaguuguccaccaugucag

SEQ ID NO: 3192437 - RNA, 19 nt, Artificial Sequence
  Description of Artificial Sequence: Synthetic oligonucleotide
gcauccagaucccaaaucg

SEQ ID NO: 3192438 - RNA, 19 nt, Artificial Sequence
  Description of Artificial Sequence: Synthetic oligonucleotide
accaacaaucccaagaaug

SEQ ID NO: 3192439 - RNA, 19 nt, Artificial Sequence
  Description of Artificial Sequence: Synthetic oligonucleotide
ugcuucaagugucuucucc

SEQ ID NO: 3192440 - RNA, 19 nt, Artificial Sequence
  Description of Artificial Sequence: Synthetic oligonucleotide
gaugauucuuaacuucuuc

SEQ ID NO: 3192441 - RNA, 19 nt, Artificial Sequence
  Description of Artificial Sequence: Synthetic oligonucleotide
gacaacucggccagaaagg

SEQ ID NO: 3192442 - RNA, 19 nt, Artificial Sequence
  Description of Artificial Sequence: Synthetic oligonucleotide
gcaaacauagacaacucgg

SEQ ID NO: 3192443 - RNA, 19 nt, Artificial Sequence
  Description of Artificial Sequence: Synthetic oligonucleotide
caccaugucagcaccaggc

SEQ ID NO: 3192444 - RNA, 19 nt, Artificial Sequence
  Description of Artificial Sequence: Synthetic oligonucleotide
uuuauuuccuggucaggcu

SEQ ID NO: 3192445 - RNA, 19 nt, Artificial Sequence
  Description of Artificial Sequence: Synthetic oligonucleotide
agugcucuccauuauugug

SEQ ID NO: 3192446 - RNA, 19 nt, Artificial Sequence
  Description of Artificial Sequence: Synthetic oligonucleotide
uuccuggucaggcugauau

SEQ ID NO: 3192447 - RNA, 19 nt, Artificial Sequence
  Description of Artificial Sequence: Synthetic oligonucleotide
ugggucaccagaacuaagu

SEQ ID NO: 3192448 - RNA, 19 nt, Artificial Sequence
  Description of Artificial Sequence: Synthetic oligonucleotide
aacaaucccaagaaugagu

SEQ ID NO: 3192449 - RNA, 19 nt, Artificial Sequence
  Description of Artificial Sequence: Synthetic oligonucleotide
uccagaucccaaaucgggc

SEQ ID NO: 3192450 - RNA, 19 nt, Artificial Sequence
  Description of Artificial Sequence: Synthetic oligonucleotide
aaguagauagcaaauccaa

SEQ ID NO: 3192451 - RNA, 19 nt, Artificial Sequence
  Description of Artificial Sequence: Synthetic oligonucleotide
gauaucugagaaugagaac

SEQ ID NO: 3192452 - RNA, 19 nt, Artificial Sequence
  Description of Artificial Sequence: Synthetic oligonucleotide
gaucagcacaaccacggug

SEQ ID NO: 3192453 - RNA, 19 nt, Artificial Sequence
  Description of Artificial Sequence: Synthetic oligonucleotide
aguggaguuguccaccaug

SEQ ID NO: 3192454 - RNA, 19 nt, Artificial Sequence
  Description of Artificial Sequence: Synthetic oligonucleotide
auagcaaauccaaucagca

SEQ ID NO: 3192455 - RNA, 19 nt, Artificial Sequence
  Description of Artificial Sequence: Synthetic oligonucleotide
caguacagcaagcagcgag

SEQ ID NO: 3192456 - RNA, 19 nt, Artificial Sequence
  Description of Artificial Sequence: Synthetic oligonucleotide
aauggugugaacacaggaa

SEQ ID NO: 3192457 - RNA, 19 nt, Artificial Sequence
  Description of Artificial Sequence: Synthetic oligonucleotide
aaagaacagucagcaguac

SEQ ID NO: 3192458 - RNA, 19 nt, Artificial Sequence
  Description of Artificial Sequence: Synthetic oligonucleotide
uugacaugagguccacaag

SEQ ID NO: 3192459 - RNA, 19 nt, Artificial Sequence
  Description of Artificial Sequence: Synthetic oligonucleotide
ugacuggacaaaacagagc

SEQ ID NO: 3192460 - RNA, 19 nt, Artificial Sequence
  Description of Artificial Sequence: Synthetic oligonucleotide
guagaggcagaacaggcac

SEQ ID NO: 3192461 - RNA, 19 nt, Artificial Sequence
  Description of Artificial Sequence: Synthetic oligonucleotide
ucaagagugcucuccauua

SEQ ID NO: 3192462 - RNA, 19 nt, Artificial Sequence
  Description of Artificial Sequence: Synthetic oligonucleotide
augucauuugcaucaucag

SEQ ID NO: 3192463 - RNA, 19 nt, Artificial Sequence
  Description of Artificial Sequence: Synthetic oligonucleotide
gaagcagugagaucaaggu

SEQ ID NO: 3192464 - RNA, 19 nt, Artificial Sequence
  Description of Artificial Sequence: Synthetic oligonucleotide
gacaaaacagagccuggac

SEQ ID NO: 3192465 - RNA, 19 nt, Artificial Sequence
  Description of Artificial Sequence: Synthetic oligonucleotide
gguuugaugauucuuaacu

SEQ ID NO: 3192466 - RNA, 19 nt, Artificial Sequence
  Description of Artificial Sequence: Synthetic oligonucleotide
cauccagaucccaaaucgg

SEQ ID NO: 3192467 - RNA, 19 nt, Artificial Sequence
  Description of Artificial Sequence: Synthetic oligonucleotide
cagcgaggagcaaacauag

SEQ ID NO: 3192468 - RNA, 19 nt, Artificial Sequence
  Description of Artificial Sequence: Synthetic oligonucleotide
uaacuucuuccacacugug

SEQ ID NO: 3192469 - RNA, 19 nt, Artificial Sequence
  Description of Artificial Sequence: Synthetic oligonucleotide
caaauggugugaacacagg

SEQ ID NO: 3192470 - RNA, 19 nt, Artificial Sequence
  Description of Artificial Sequence: Synthetic oligonucleotide
gaacuaaguggaguugucc

SEQ ID NO: 3192471 - RNA, 19 nt, Artificial Sequence
  Description of Artificial Sequence: Synthetic oligonucleotide
aguccuuugauguauagcc

SEQ ID NO: 3192472 - RNA, 19 nt, Artificial Sequence
  Description of Artificial Sequence: Synthetic oligonucleotide
uuaaagaagaccaaaccag

SEQ ID NO: 3192473 - RNA, 19 nt, Artificial Sequence
  Description of Artificial Sequence: Synthetic oligonucleotide
uuugcuaacauucaucaag

SEQ ID NO: 3192474 - RNA, 19 nt, Artificial Sequence
  Description of Artificial Sequence: Synthetic oligonucleotide
gaugaauuauaucuaaagg

SEQ ID NO: 3192475 - RNA, 19 nt, Artificial Sequence
  Description of Artificial Sequence: Synthetic oligonucleotide
aguuaaagaagaccaaacc

SEQ ID NO: 3192476 - RNA, 19 nt, Artificial Sequence
  Description of Artificial Sequence: Synthetic oligonucleotide
uucaaauucucuuauauac

SEQ ID NO: 3192477 - RNA, 19 nt, Artificial Sequence
  Description of Artificial Sequence: Synthetic oligonucleotide
ugucagauauauuagauga

SEQ ID NO: 3192478 - RNA, 19 nt, Artificial Sequence
  Description of Artificial Sequence: Synthetic oligonucleotide
cauauguuugguaagagag

SEQ ID NO: 3192479 - RNA, 19 nt, Artificial Sequence
  Description of Artificial Sequence: Synthetic oligonucleotide
uauauuagaugaacuacgg

SEQ ID NO: 3192480 - RNA, 19 nt, Artificial Sequence
  Description of Artificial Sequence: Synthetic oligonucleotide
aaugcgauugucuugagau

SEQ ID NO: 3192481 - RNA, 19 nt, Artificial Sequence
  Description of Artificial Sequence: Synthetic oligonucleotide
augaauuauaucuaaagga

SEQ ID NO: 3192482 - RNA, 19 nt, Artificial Sequence
  Description of Artificial Sequence: Synthetic oligonucleotide
augaacuauguccaaaggc

SEQ ID NO: 3192483 - RNA, 19 nt, Artificial Sequence
  Description of Artificial Sequence: Synthetic oligonucleotide
augaacuauacuugaaagc

SEQ ID NO: 3192484 - RNA, 19 nt, Artificial Sequence
  Description of Artificial Sequence: Synthetic oligonucleotide
aaggccuucaauuugcuug

SEQ ID NO: 3192485 - RNA, 19 nt, Artificial Sequence
  Description of Artificial Sequence: Synthetic oligonucleotide
ugaacuauguccaaaggcu

SEQ ID NO: 3192486 - RNA, 19 nt, Artificial Sequence
  Description of Artificial Sequence: Synthetic oligonucleotide
gaaguuguaguuuugucag

SEQ ID NO: 3192487 - RNA, 19 nt, Artificial Sequence
  Description of Artificial Sequence: Synthetic oligonucleotide
gaacuuuucuucuugaaug

SEQ ID NO: 3192488 - RNA, 19 nt, Artificial Sequence
  Description of Artificial Sequence: Synthetic oligonucleotide
gaugaacuauacuugaaag

SEQ ID NO: 3192489 - RNA, 19 nt, Artificial Sequence
  Description of Artificial Sequence: Synthetic oligonucleotide
aauaaggccuucaauuugc

SEQ ID NO: 3192490 - RNA, 19 nt, Artificial Sequence
  Description of Artificial Sequence: Synthetic oligonucleotide
cuaaaguuaaagaagacca

SEQ ID NO: 3192491 - RNA, 19 nt, Artificial Sequence
  Description of Artificial Sequence: Synthetic oligonucleotide
agaugaauuauaucuaaag

SEQ ID NO: 3192492 - RNA, 19 nt, Artificial Sequence
  Description of Artificial Sequence: Synthetic oligonucleotide
auugucuugagauuucuuc

SEQ ID NO: 3192493 - RNA, 19 nt, Artificial Sequence
  Description of Artificial Sequence: Synthetic oligonucleotide
auuguuaucucuugaguuc

SEQ ID NO: 3192494 - RNA, 19 nt, Artificial Sequence
  Description of Artificial Sequence: Synthetic oligonucleotide
auugcuuaaguuccuuugc

SEQ ID NO: 3192495 - RNA, 19 nt, Artificial Sequence
  Description of Artificial Sequence: Synthetic oligonucleotide
auuauuguuaucucuugag

SEQ ID NO: 3192496 - RNA, 19 nt, Artificial Sequence
  Description of Artificial Sequence: Synthetic oligonucleotide
acucaucgcauuuauaagg

SEQ ID NO: 3192497 - RNA, 19 nt, Artificial Sequence
  Description of Artificial Sequence: Synthetic oligonucleotide
augaacuacggcuagauga

SEQ ID NO: 3192498 - RNA, 19 nt, Artificial Sequence
  Description of Artificial Sequence: Synthetic oligonucleotide
ugagugaacuuucauaugu

SEQ ID NO: 3192499 - RNA, 19 nt, Artificial Sequence
  Description of Artificial Sequence: Synthetic oligonucleotide
aaugaguccuuguuuauga

SEQ ID NO: 3192500 - RNA, 19 nt, Artificial Sequence
  Description of Artificial Sequence: Synthetic oligonucleotide
uaagggaugaacuauacuu

SEQ ID NO: 3192501 - RNA, 19 nt, Artificial Sequence
  Description of Artificial Sequence: Synthetic oligonucleotide
auuuuguucacacuacuug

SEQ ID NO: 3192502 - RNA, 19 nt, Artificial Sequence
  Description of Artificial Sequence: Synthetic oligonucleotide
auucauuacauucgguagg

SEQ ID NO: 3192503 - RNA, 19 nt, Artificial Sequence
  Description of Artificial Sequence: Synthetic oligonucleotide
uuaucucuugaguucaagg

SEQ ID NO: 3192504 - RNA, 19 nt, Artificial Sequence
  Description of Artificial Sequence: Synthetic oligonucleotide
auauuagaugaacuacggc

SEQ ID NO: 3192505 - RNA, 19 nt, Artificial Sequence
  Description of Artificial Sequence: Synthetic oligonucleotide
uuugcuauuuuguucacac

SEQ ID NO: 3192506 - RNA, 19 nt, Artificial Sequence
  Description of Artificial Sequence: Synthetic oligonucleotide
uuauauacaaggaaugauu

SEQ ID NO: 3192507 - RNA, 19 nt, Artificial Sequence
  Description of Artificial Sequence: Synthetic oligonucleotide
uuuguucacacuacuuggg

SEQ ID NO: 3192508 - RNA, 19 nt, Artificial Sequence
  Description of Artificial Sequence: Synthetic oligonucleotide
ucucuuauauacaaggaau

SEQ ID NO: 3192509 - RNA, 19 nt, Artificial Sequence
  Description of Artificial Sequence: Synthetic oligonucleotide
ucugagugaacuuucauau

SEQ ID NO: 3192510 - RNA, 19 nt, Artificial Sequence
  Description of Artificial Sequence: Synthetic oligonucleotide
uuugcugaaagucuuccca

SEQ ID NO: 3192511 - RNA, 19 nt, Artificial Sequence
  Description of Artificial Sequence: Synthetic oligonucleotide
auguaguucccuuaaugcg

SEQ ID NO: 3192512 - RNA, 19 nt, Artificial Sequence
  Description of Artificial Sequence: Synthetic oligonucleotide
agaaguuguaguuuuguca

SEQ ID NO: 3192513 - RNA, 19 nt, Artificial Sequence
  Description of Artificial Sequence: Synthetic oligonucleotide
uauauacaaggaaugauuu

SEQ ID NO: 3192514 - RNA, 19 nt, Artificial Sequence
  Description of Artificial Sequence: Synthetic oligonucleotide
uccaacaaagcacagucac

SEQ ID NO: 3192515 - RNA, 19 nt, Artificial Sequence
  Description of Artificial Sequence: Synthetic oligonucleotide
ugugagauucucuacauua

SEQ ID NO: 3192516 - RNA, 19 nt, Artificial Sequence
  Description of Artificial Sequence: Synthetic oligonucleotide
acaucuuaucuaaauauac

SEQ ID NO: 3192517 - RNA, 19 nt, Artificial Sequence
  Description of Artificial Sequence: Synthetic oligonucleotide
gaauguaguucccuuaaug

SEQ ID NO: 3192518 - RNA, 19 nt, Artificial Sequence
  Description of Artificial Sequence: Synthetic oligonucleotide
ucauaugguauuucacccg

SEQ ID NO: 3192519 - RNA, 19 nt, Artificial Sequence
  Description of Artificial Sequence: Synthetic oligonucleotide
uuauuguuaucucuugagu

SEQ ID NO: 3192520 - RNA, 19 nt, Artificial Sequence
  Description of Artificial Sequence: Synthetic oligonucleotide
uuuugucagauauauuaga

SEQ ID NO: 3192521 - RNA, 19 nt, Artificial Sequence
  Description of Artificial Sequence: Synthetic oligonucleotide
ugcuauuuuguucacacua

SEQ ID NO: 3192522 - RNA, 19 nt, Artificial Sequence
  Description of Artificial Sequence: Synthetic oligonucleotide
uucucuuauauacaaggaa

SEQ ID NO: 3192523 - RNA, 19 nt, Artificial Sequence
  Description of Artificial Sequence: Synthetic oligonucleotide
acuauauucaaauucucuu

SEQ ID NO: 3192524 - RNA, 19 nt, Artificial Sequence
  Description of Artificial Sequence: Synthetic oligonucleotide
augaccaugagcuuugcca

SEQ ID NO: 3192525 - RNA, 19 nt, Artificial Sequence
  Description of Artificial Sequence: Synthetic oligonucleotide
ugagauuucuucuuuuccu

SEQ ID NO: 3192526 - RNA, 19 nt, Artificial Sequence
  Description of Artificial Sequence: Synthetic oligonucleotide
auaagguuugagcuguguc

SEQ ID NO: 3192527 - RNA, 19 nt, Artificial Sequence
  Description of Artificial Sequence: Synthetic oligonucleotide
gaugaacuauguccaaagg

SEQ ID NO: 3192528 - RNA, 19 nt, Artificial Sequence
  Description of Artificial Sequence: Synthetic oligonucleotide
uucaguaagagaugaauua

SEQ ID NO: 3192529 - RNA, 19 nt, Artificial Sequence
  Description of Artificial Sequence: Synthetic oligonucleotide
acaaucaccugugugaguc

SEQ ID NO: 3192530 - RNA, 19 nt, Artificial Sequence
  Description of Artificial Sequence: Synthetic oligonucleotide
cuuagauggucagugaggg

SEQ ID NO: 3192531 - RNA, 19 nt, Artificial Sequence
  Description of Artificial Sequence: Synthetic oligonucleotide
uucgguagggcuuuucucc

SEQ ID NO: 3192532 - RNA, 19 nt, Artificial Sequence
  Description of Artificial Sequence: Synthetic oligonucleotide
ucagauauauuagaugaac

SEQ ID NO: 3192533 - RNA, 19 nt, Artificial Sequence
  Description of Artificial Sequence: Synthetic oligonucleotide
ucuagcauugcaucauugc

SEQ ID NO: 3192534 - RNA, 19 nt, Artificial Sequence
  Description of Artificial Sequence: Synthetic oligonucleotide
agauauauuagaugaacua

SEQ ID NO: 3192535 - RNA, 19 nt, Artificial Sequence
  Description of Artificial Sequence: Synthetic oligonucleotide
auucucuacauuaauuuuc

SEQ ID NO: 3192536 - RNA, 19 nt, Artificial Sequence
  Description of Artificial Sequence: Synthetic oligonucleotide
uucucuacauuaauuuucu

SEQ ID NO: 3192537 - RNA, 19 nt, Artificial Sequence
  Description of Artificial Sequence: Synthetic oligonucleotide
uagauggucagugaggggc

SEQ ID NO: 3192538 - RNA, 19 nt, Artificial Sequence
  Description of Artificial Sequence: Synthetic oligonucleotide
aaugaggugugacuuuuga

SEQ ID NO: 3192539 - RNA, 19 nt, Artificial Sequence
  Description of Artificial Sequence: Synthetic oligonucleotide
uuagaugaacuacggcuag

SEQ ID NO: 3192540 - RNA, 19 nt, Artificial Sequence
  Description of Artificial Sequence: Synthetic oligonucleotide
uguacaacgaggugggacu

SEQ ID NO: 3192541 - RNA, 19 nt, Artificial Sequence
  Description of Artificial Sequence: Synthetic oligonucleotide
cucuuauauacaaggaaug

SEQ ID NO: 3192542 - RNA, 19 nt, Artificial Sequence
  Description of Artificial Sequence: Synthetic oligonucleotide
gauuuugucuucuuuagcu

SEQ ID NO: 3192543 - RNA, 19 nt, Artificial Sequence
  Description of Artificial Sequence: Synthetic oligonucleotide
acuguggcaguucucuagc

SEQ ID NO: 3192544 - RNA, 19 nt, Artificial Sequence
  Description of Artificial Sequence: Synthetic oligonucleotide
uacauguugcauaagguuu

SEQ ID NO: 3192545 - RNA, 19 nt, Artificial Sequence
  Description of Artificial Sequence: Synthetic oligonucleotide
aggcauucuguuugaaggc

SEQ ID NO: 3192546 - RNA, 19 nt, Artificial Sequence
  Description of Artificial Sequence: Synthetic oligonucleotide
cucgcaaguguuuaguaag

SEQ ID NO: 3192547 - RNA, 19 nt, Artificial Sequence
  Description of Artificial Sequence: Synthetic oligonucleotide
auguauaacaagcugugau

SEQ ID NO: 3192548 - RNA, 19 nt, Artificial Sequence
  Description of Artificial Sequence: Synthetic oligonucleotide
acuuagagaccguaccuuc

SEQ ID NO: 3192549 - RNA, 19 nt, Artificial Sequence
  Description of Artificial Sequence: Synthetic oligonucleotide
cauaugguaaguaagagau

SEQ ID NO: 3192550 - RNA, 19 nt, Artificial Sequence
  Description of Artificial Sequence: Synthetic oligonucleotide
uguauaacaagcugugauu

SEQ ID NO: 3192551 - RNA, 19 nt, Artificial Sequence
  Description of Artificial Sequence: Synthetic oligonucleotide
uugucuugagauuucuucu

SEQ ID NO: 3192552 - RNA, 19 nt, Artificial Sequence
  Description of Artificial Sequence: Synthetic oligonucleotide
uuugauguauagccaggug

SEQ ID NO: 3192553 - RNA, 19 nt, Artificial Sequence
  Description of Artificial Sequence: Synthetic oligonucleotide
cauucaaagggacaaucac

SEQ ID NO: 3192554 - RNA, 19 nt, Artificial Sequence
  Description of Artificial Sequence: Synthetic oligonucleotide
uccuuguuuaugacugagg

SEQ ID NO: 3192555 - RNA, 19 nt, Artificial Sequence
  Description of Artificial Sequence: Synthetic oligonucleotide
uggucuacaucuuaucuaa

SEQ ID NO: 3192556 - RNA, 19 nt, Artificial Sequence
  Description of Artificial Sequence: Synthetic oligonucleotide
uacaucuuaucuaaauaua

SEQ ID NO: 3192557 - RNA, 19 nt, Artificial Sequence
  Description of Artificial Sequence: Synthetic oligonucleotide
ucucacauguucaguaaga

SEQ ID NO: 3192558 - RNA, 19 nt, Artificial Sequence
  Description of Artificial Sequence: Synthetic oligonucleotide
auugcaucauugcuuaagu

SEQ ID NO: 3192559 - RNA, 19 nt, Artificial Sequence
  Description of Artificial Sequence: Synthetic oligonucleotide
uuacauguugcauaagguu

SEQ ID NO: 3192560 - RNA, 19 nt, Artificial Sequence
  Description of Artificial Sequence: Synthetic oligonucleotide
aguuuugcuaacauucauc

SEQ ID NO: 3192561 - RNA, 19 nt, Artificial Sequence
  Description of Artificial Sequence: Synthetic oligonucleotide
gacaaauaaauuauuguua

SEQ ID NO: 3192562 - RNA, 19 nt, Artificial Sequence
  Description of Artificial Sequence: Synthetic oligonucleotide
agagaugaauuauaucuaa

SEQ ID NO: 3192563 - RNA, 19 nt, Artificial Sequence
  Description of Artificial Sequence: Synthetic oligonucleotide
cauucaucaaguugagaac

SEQ ID NO: 3192564 - RNA, 19 nt, Artificial Sequence
  Description of Artificial Sequence: Synthetic oligonucleotide
cauugcuuaaguuccuuug

SEQ ID NO: 3192565 - RNA, 19 nt, Artificial Sequence
  Description of Artificial Sequence: Synthetic oligonucleotide
gaugagauuugauggcgug

SEQ ID NO: 3192566 - RNA, 19 nt, Artificial Sequence
  Description of Artificial Sequence: Synthetic oligonucleotide
uuugucuucuuuagcuaug

SEQ ID NO: 3192567 - RNA, 19 nt, Artificial Sequence
  Description of Artificial Sequence: Synthetic oligonucleotide
auucaucaaguugagaaca

SEQ ID NO: 3192568 - RNA, 19 nt, Artificial Sequence
  Description of Artificial Sequence: Synthetic oligonucleotide
caaggaaugauuuucuaaa

SEQ ID NO: 3192569 - RNA, 19 nt, Artificial Sequence
  Description of Artificial Sequence: Synthetic oligonucleotide
ugaacuacggcuagaugau

SEQ ID NO: 3192570 - RNA, 19 nt, Artificial Sequence
  Description of Artificial Sequence: Synthetic oligonucleotide
uguucucacauguucagua

SEQ ID NO: 3192571 - RNA, 19 nt, Artificial Sequence
  Description of Artificial Sequence: Synthetic oligonucleotide
aaacaaaccaaacaauaac

SEQ ID NO: 3192572 - RNA, 19 nt, Artificial Sequence
  Description of Artificial Sequence: Synthetic oligonucleotide
uugaaaacaaaccaaacaa

SEQ ID NO: 3192573 - RNA, 19 nt, Artificial Sequence
  Description of Artificial Sequence: Synthetic oligonucleotide
uuugaaaacaaaccaaaca

SEQ ID NO: 3192574 - RNA, 19 nt, Artificial Sequence
  Description of Artificial Sequence: Synthetic oligonucleotide
aagccugucucacaaagcc

SEQ ID NO: 3192575 - RNA, 19 nt, Artificial Sequence
  Description of Artificial Sequence: Synthetic oligonucleotide
aagagaugggguuuccucc

SEQ ID NO: 3192576 - RNA, 19 nt, Artificial Sequence
  Description of Artificial Sequence: Synthetic oligonucleotide
ugucuuugaaaacaaacca

SEQ ID NO: 3192577 - RNA, 19 nt, Artificial Sequence
  Description of Artificial Sequence: Synthetic oligonucleotide
uugucuuugaaaacaaacc

SEQ ID NO: 3192578 - RNA, 19 nt, Artificial Sequence
  Description of Artificial Sequence: Synthetic oligonucleotide
aaagagaugggguuuccuc

SEQ ID NO: 3192579 - RNA, 19 nt, Artificial Sequence
  Description of Artificial Sequence: Synthetic oligonucleotide
cacaaagccaaagagaugg

SEQ ID NO: 3192580 - RNA, 19 nt, Artificial Sequence
  Description of Artificial Sequence: Synthetic oligonucleotide
uuugaguccagccuggucu

SEQ ID NO: 3192581 - RNA, 19 nt, Artificial Sequence
  Description of Artificial Sequence: Synthetic oligonucleotide
aaaccaaacaauaacagaa

SEQ ID NO: 3192582 - RNA, 19 nt, Artificial Sequence
  Description of Artificial Sequence: Synthetic oligonucleotide
agagcuguuauacagagaa

SEQ ID NO: 3192583 - RNA, 19 nt, Artificial Sequence
  Description of Artificial Sequence: Synthetic oligonucleotide
aaucccagcacucgggagg

SEQ ID NO: 3192584 - RNA, 19 nt, Artificial Sequence
  Description of Artificial Sequence: Synthetic oligonucleotide
agcuguuauacagagaaac

SEQ ID NO: 3192585 - RNA, 19 nt, Artificial Sequence
  Description of Artificial Sequence: Synthetic oligonucleotide
ucuuugaaaacaaaccaaa

SEQ ID NO: 3192586 - RNA, 19 nt, Artificial Sequence
  Description of Artificial Sequence: Synthetic oligonucleotide
aaaagggccagccugggcu

SEQ ID NO: 3192587 - RNA, 19 nt, Artificial Sequence
  Description of Artificial Sequence: Synthetic oligonucleotide
uuuaaucccagcacucggg

SEQ ID NO: 3192588 - RNA, 19 nt, Artificial Sequence
  Description of Artificial Sequence: Synthetic oligonucleotide
cuugucuuugaaaacaaac

SEQ ID NO: 3192589 - RNA, 19 nt, Artificial Sequence
  Description of Artificial Sequence: Synthetic oligonucleotide
gaaaccuugucuuugaaaa

SEQ ID NO: 3192590 - RNA, 19 nt, Artificial Sequence
  Description of Artificial Sequence: Synthetic oligonucleotide
aaaccuugucuuugaaaac

SEQ ID NO: 3192591 - RNA, 19 nt, Artificial Sequence
  Description of Artificial Sequence: Synthetic oligonucleotide
aacaaaccaaacaauaaca

SEQ ID NO: 3192592 - RNA, 19 nt, Artificial Sequence
  Description of Artificial Sequence: Synthetic oligonucleotide
ugaguuugaguccagccug

SEQ ID NO: 3192593 - RNA, 19 nt, Artificial Sequence
  Description of Artificial Sequence: Synthetic oligonucleotide
uggugcaugccuuuaaucc

SEQ ID NO: 3192594 - RNA, 19 nt, Artificial Sequence
  Description of Artificial Sequence: Synthetic oligonucleotide
ucucacaaagccaaagaga

SEQ ID NO: 3192595 - RNA, 19 nt, Artificial Sequence
  Description of Artificial Sequence: Synthetic oligonucleotide
gucucugugaguuugaguc

SEQ ID NO: 3192596 - RNA, 19 nt, Artificial Sequence
  Description of Artificial Sequence: Synthetic oligonucleotide
gaaagccugucucacaaag

SEQ ID NO: 3192597 - RNA, 19 nt, Artificial Sequence
  Description of Artificial Sequence: Synthetic oligonucleotide
ugaaaacaaaccaaacaau

SEQ ID NO: 3192598 - RNA, 19 nt, Artificial Sequence
  Description of Artificial Sequence: Synthetic oligonucleotide
agugaguuccuggauaggc

SEQ ID NO: 3192599 - RNA, 19 nt, Artificial Sequence
  Description of Artificial Sequence: Synthetic oligonucleotide
auacagagaaaccuugucu

SEQ ID NO: 3192600 - RNA, 19 nt, Artificial Sequence
  Description of Artificial Sequence: Synthetic oligonucleotide
aaaacaaaccaaacaauaa

SEQ ID NO: 3192601 - RNA, 19 nt, Artificial Sequence
  Description of Artificial Sequence: Synthetic oligonucleotide
ugugaguuugaguccagcc

SEQ ID NO: 3192602 - RNA, 19 nt, Artificial Sequence
  Description of Artificial Sequence: Synthetic oligonucleotide
cuuugaaaacaaaccaaac

SEQ ID NO: 3192603 - RNA, 19 nt, Artificial Sequence
  Description of Artificial Sequence: Synthetic oligonucleotide
augccuuuaaucccagcac

SEQ ID NO: 3192604 - RNA, 19 nt, Artificial Sequence
  Description of Artificial Sequence: Synthetic oligonucleotide
uguuauacagagaaaccuu

SEQ ID NO: 3192605 - RNA, 19 nt, Artificial Sequence
  Description of Artificial Sequence: Synthetic oligonucleotide
agagugaguuccuggauag

SEQ ID NO: 3192606 - RNA, 19 nt, Artificial Sequence
  Description of Artificial Sequence: Synthetic oligonucleotide
uauacagagaaaccuuguc

SEQ ID NO: 3192607 - RNA, 19 nt, Artificial Sequence
  Description of Artificial Sequence: Synthetic oligonucleotide
aaccuugucuuugaaaaca

SEQ ID NO: 3192608 - RNA, 19 nt, Artificial Sequence
  Description of Artificial Sequence: Synthetic oligonucleotide
acaaaccaaacaauaacag

SEQ ID NO: 3192609 - RNA, 19 nt, Artificial Sequence
  Description of Artificial Sequence: Synthetic oligonucleotide
gucucacaaagccaaagag

SEQ ID NO: 3192610 - RNA, 19 nt, Artificial Sequence
  Description of Artificial Sequence: Synthetic oligonucleotide
ugucucacaaagccaaaga

SEQ ID NO: 3192611 - RNA, 19 nt, Artificial Sequence
  Description of Artificial Sequence: Synthetic oligonucleotide
aaagccugucucacaaagc

SEQ ID NO: 3192612 - RNA, 19 nt, Artificial Sequence
  Description of Artificial Sequence: Synthetic oligonucleotide
aaagccaaagagauggggu

SEQ ID NO: 3192613 - RNA, 19 nt, Artificial Sequence
  Description of Artificial Sequence: Synthetic oligonucleotide
gaaaacaaaccaaacaaua

SEQ ID NO: 3192614 - RNA, 19 nt, Artificial Sequence
  Description of Artificial Sequence: Synthetic oligonucleotide
uuauacagagaaaccuugu

SEQ ID NO: 3192615 - RNA, 19 nt, Artificial Sequence
  Description of Artificial Sequence: Synthetic oligonucleotide
uccuggauaggcuccagag

SEQ ID NO: 3192616 - RNA, 19 nt, Artificial Sequence
  Description of Artificial Sequence: Synthetic oligonucleotide
cuuuaaucccagcacucgg

SEQ ID NO: 3192617 - RNA, 19 nt, Artificial Sequence
  Description of Artificial Sequence: Synthetic oligonucleotide
uacagagaaaccuugucuu

SEQ ID NO: 3192618 - RNA, 19 nt, Artificial Sequence
  Description of Artificial Sequence: Synthetic oligonucleotide
aaugaaagccugucucaca

SEQ ID NO: 3192619 - RNA, 19 nt, Artificial Sequence
  Description of Artificial Sequence: Synthetic oligonucleotide
ugggcuacggaaugaaagc

SEQ ID NO: 3192620 - RNA, 19 nt, Artificial Sequence
  Description of Artificial Sequence: Synthetic oligonucleotide
cugggcuacggaaugaaag

SEQ ID NO: 3192621 - RNA, 19 nt, Artificial Sequence
  Description of Artificial Sequence: Synthetic oligonucleotide
cuccagagcuguuauacag

SEQ ID NO: 3192622 - RNA, 19 nt, Artificial Sequence
  Description of Artificial Sequence: Synthetic oligonucleotide
guuauacagagaaaccuug

SEQ ID NO: 3192623 - RNA, 19 nt, Artificial Sequence
  Description of Artificial Sequence: Synthetic oligonucleotide
uuaaucccagcacucggga

SEQ ID NO: 3192624 - RNA, 19 nt, Artificial Sequence
  Description of Artificial Sequence: Synthetic oligonucleotide
ugccuuuaaucccagcacu

SEQ ID NO: 3192625 - RNA, 19 nt, Artificial Sequence
  Description of Artificial Sequence: Synthetic oligonucleotide
accaaacaauaacagaaaa

SEQ ID NO: 3192626 - RNA, 19 nt, Artificial Sequence
  Description of Artificial Sequence: Synthetic oligonucleotide
caaaccaaacaauaacaga

SEQ ID NO: 3192627 - RNA, 19 nt, Artificial Sequence
  Description of Artificial Sequence: Synthetic oligonucleotide
uccagagugaguuccugga

SEQ ID NO: 3192628 - RNA, 19 nt, Artificial Sequence
  Description of Artificial Sequence: Synthetic oligonucleotide
aagccaaagagaugggguu

SEQ ID NO: 3192629 - RNA, 19 nt, Artificial Sequence
  Description of Artificial Sequence: Synthetic oligonucleotide
augaaagccugucucacaa

SEQ ID NO: 3192630 - RNA, 19 nt, Artificial Sequence
  Description of Artificial Sequence: Synthetic oligonucleotide
uccagagcuguuauacaga

SEQ ID NO: 3192631 - RNA, 19 nt, Artificial Sequence
  Description of Artificial Sequence: Synthetic oligonucleotide
ugaguuccuggauaggcuc

SEQ ID NO: 3192632 - RNA, 19 nt, Artificial Sequence
  Description of Artificial Sequence: Synthetic oligonucleotide
ucucugugaguuugagucc

SEQ ID NO: 3192633 - RNA, 19 nt, Artificial Sequence
  Description of Artificial Sequence: Synthetic oligonucleotide
caugccuuuaaucccagca

SEQ ID NO: 3192634 - RNA, 19 nt, Artificial Sequence
  Description of Artificial Sequence: Synthetic oligonucleotide
caaagccaaagagaugggg

SEQ ID NO: 3192635 - RNA, 19 nt, Artificial Sequence
  Description of Artificial Sequence: Synthetic oligonucleotide
agagaaaccuugucuuuga

SEQ ID NO: 3192636 - RNA, 19 nt, Artificial Sequence
  Description of Artificial Sequence: Synthetic oligonucleotide
ucacaaagccaaagagaug

SEQ ID NO: 3192637 - RNA, 19 nt, Artificial Sequence
  Description of Artificial Sequence: Synthetic oligonucleotide
agaaaccuugucuuugaaa

SEQ ID NO: 3192638 - RNA, 19 nt, Artificial Sequence
  Description of Artificial Sequence: Synthetic oligonucleotide
cucacaaagccaaagagau

SEQ ID NO: 3192639 - RNA, 19 nt, Artificial Sequence
  Description of Artificial Sequence: Synthetic oligonucleotide
gaaugaaagccugucucac

SEQ ID NO: 3192640 - RNA, 19 nt, Artificial Sequence
  Description of Artificial Sequence: Synthetic oligonucleotide
aaccaaacaauaacagaaa

SEQ ID NO: 3192641 - RNA, 19 nt, Artificial Sequence
  Description of Artificial Sequence: Synthetic oligonucleotide
uccagccuggucuccagag

SEQ ID NO: 3192642 - RNA, 19 nt, Artificial Sequence
  Description of Artificial Sequence: Synthetic oligonucleotide
ggugcaugccuuuaauccc

SEQ ID NO: 3192643 - RNA, 19 nt, Artificial Sequence
  Description of Artificial Sequence: Synthetic oligonucleotide
uaaucccagcacucgggag

SEQ ID NO: 3192644 - RNA, 19 nt, Artificial Sequence
  Description of Artificial Sequence: Synthetic oligonucleotide
agagaugggguuuccuccu

SEQ ID NO: 3192645 - RNA, 19 nt, Artificial Sequence
  Description of Artificial Sequence: Synthetic oligonucleotide
cuccagagugaguuccugg

SEQ ID NO: 3192646 - RNA, 19 nt, Artificial Sequence
  Description of Artificial Sequence: Synthetic oligonucleotide
gaguuugaguccagccugg

SEQ ID NO: 3192647 - RNA, 19 nt, Artificial Sequence
  Description of Artificial Sequence: Synthetic oligonucleotide
acggaaugaaagccugucu

SEQ ID NO: 3192648 - RNA, 19 nt, Artificial Sequence
  Description of Artificial Sequence: Synthetic oligonucleotide
gucuuugaaaacaaaccaa

SEQ ID NO: 3192649 - RNA, 19 nt, Artificial Sequence
  Description of Artificial Sequence: Synthetic oligonucleotide
cagagaaaccuugucuuug

SEQ ID NO: 3192650 - RNA, 19 nt, Artificial Sequence
  Description of Artificial Sequence: Synthetic oligonucleotide
uacggaaugaaagccuguc

SEQ ID NO: 3192651 - RNA, 19 nt, Artificial Sequence
  Description of Artificial Sequence: Synthetic oligonucleotide
uggauaggcuccagagcug

SEQ ID NO: 3192652 - RNA, 19 nt, Artificial Sequence
  Description of Artificial Sequence: Synthetic oligonucleotide
cuggauaggcuccagagcu

SEQ ID NO: 3192653 - RNA, 19 nt, Artificial Sequence
  Description of Artificial Sequence: Synthetic oligonucleotide
ucugugaguuugaguccag

SEQ ID NO: 3192654 - RNA, 19 nt, Artificial Sequence
  Description of Artificial Sequence: Synthetic oligonucleotide
ggaaugaaagccugucuca

SEQ ID NO: 3192655 - RNA, 19 nt, Artificial Sequence
  Description of Artificial Sequence: Synthetic oligonucleotide
ugcaugccuuuaaucccag

SEQ ID NO: 3192656 - RNA, 19 nt, Artificial Sequence
  Description of Artificial Sequence: Synthetic oligonucleotide
aucccagcacucgggaggc

SEQ ID NO: 3192657 - RNA, 19 nt, Artificial Sequence
  Description of Artificial Sequence: Synthetic oligonucleotide
gcuguuauacagagaaacc

SEQ ID NO: 3192658 - RNA, 19 nt, Artificial Sequence
  Description of Artificial Sequence: Synthetic oligonucleotide
acagagaaaccuugucuuu

SEQ ID NO: 3192659 - RNA, 19 nt, Artificial Sequence
  Description of Artificial Sequence: Synthetic oligonucleotide
cagccuggucuccagagug

SEQ ID NO: 3192660 - RNA, 19 nt, Artificial Sequence
  Description of Artificial Sequence: Synthetic oligonucleotide
ccagagcuguuauacagag

SEQ ID NO: 3192661 - RNA, 19 nt, Artificial Sequence
  Description of Artificial Sequence: Synthetic oligonucleotide
cugucucacaaagccaaag

SEQ ID NO: 3192662 - RNA, 19 nt, Artificial Sequence
  Description of Artificial Sequence: Synthetic oligonucleotide
uaggcuccagagcuguuau

SEQ ID NO: 3192663 - RNA, 19 nt, Artificial Sequence
  Description of Artificial Sequence: Synthetic oligonucleotide
acucgggaggcagaggcag

SEQ ID NO: 3192664 - RNA, 19 nt, Artificial Sequence
  Description of Artificial Sequence: Synthetic oligonucleotide
uuccuggauaggcuccaga

SEQ ID NO: 3192665 - RNA, 19 nt, Artificial Sequence
  Description of Artificial Sequence: Synthetic oligonucleotide
cuguuauacagagaaaccu

SEQ ID NO: 3192666 - RNA, 19 nt, Artificial Sequence
  Description of Artificial Sequence: Synthetic oligonucleotide
gggaggcagaggcaggugg

SEQ ID NO: 3192667 - RNA, 19 nt, Artificial Sequence
  Description of Artificial Sequence: Synthetic oligonucleotide
gugaguuugaguccagccu

SEQ ID NO: 3192668 - RNA, 19 nt, Artificial Sequence
  Description of Artificial Sequence: Synthetic oligonucleotide
aggcaggugggucucugug

SEQ ID NO: 3192669 - RNA, 19 nt, Artificial Sequence
  Description of Artificial Sequence: Synthetic oligonucleotide
uugaguccagccuggucuc

SEQ ID NO: 3192670 - RNA, 19 nt, Artificial Sequence
  Description of Artificial Sequence: Synthetic oligonucleotide
acaaagccaaagagauggg

SEQ ID NO: 3192671 - RNA, 19 nt, Artificial Sequence
  Description of Artificial Sequence: Synthetic oligonucleotide
uacuccuugagcuucuugg

SEQ ID NO: 3192672 - RNA, 19 nt, Artificial Sequence
  Description of Artificial Sequence: Synthetic oligonucleotide
uucauuucagacaccagug

SEQ ID NO: 3192673 - RNA, 19 nt, Artificial Sequence
  Description of Artificial Sequence: Synthetic oligonucleotide
aacggcauccuccaggcug

SEQ ID NO: 3192674 - RNA, 19 nt, Artificial Sequence
  Description of Artificial Sequence: Synthetic oligonucleotide
acaacggcauccuccaggc

SEQ ID NO: 3192675 - RNA, 19 nt, Artificial Sequence
  Description of Artificial Sequence: Synthetic oligonucleotide
agcagcuccucauacagag

SEQ ID NO: 3192676 - RNA, 19 nt, Artificial Sequence
  Description of Artificial Sequence: Synthetic oligonucleotide
auuucagacaccagugccc

SEQ ID NO: 3192677 - RNA, 19 nt, Artificial Sequence
  Description of Artificial Sequence: Synthetic oligonucleotide
agcagcacaucuuggaguc

SEQ ID NO: 3192678 - RNA, 19 nt, Artificial Sequence
  Description of Artificial Sequence: Synthetic oligonucleotide
cauuucagacaccagugcc

SEQ ID NO: 3192679 - RNA, 19 nt, Artificial Sequence
  Description of Artificial Sequence: Synthetic oligonucleotide
acuccuugagcuucuuggc

SEQ ID NO: 3192680 - RNA, 19 nt, Artificial Sequence
  Description of Artificial Sequence: Synthetic oligonucleotide
ucauuucagacaccagugc

SEQ ID NO: 3192681 - RNA, 19 nt, Artificial Sequence
  Description of Artificial Sequence: Synthetic oligonucleotide
uguaccagcugccuccgag

SEQ ID NO: 3192682 - RNA, 19 nt, Artificial Sequence
  Description of Artificial Sequence: Synthetic oligonucleotide
guaguuucgcagcagcucc

SEQ ID NO: 3192683 - RNA, 19 nt, Artificial Sequence
  Description of Artificial Sequence: Synthetic oligonucleotide
acaucuuggagucuccugu

SEQ ID NO: 3192684 - RNA, 19 nt, Artificial Sequence
  Description of Artificial Sequence: Synthetic oligonucleotide
ucauacagagcccggggca

SEQ ID NO: 3192685 - RNA, 19 nt, Artificial Sequence
  Description of Artificial Sequence: Synthetic oligonucleotide
uccuguugaggucucggag

SEQ ID NO: 3192686 - RNA, 19 nt, Artificial Sequence
  Description of Artificial Sequence: Synthetic oligonucleotide
cagcuccucauacagagcc

SEQ ID NO: 3192687 - RNA, 19 nt, Artificial Sequence
  Description of Artificial Sequence: Synthetic oligonucleotide
ugcuguaccagcugccucc

SEQ ID NO: 3192688 - RNA, 19 nt, Artificial Sequence
  Description of Artificial Sequence: Synthetic oligonucleotide
ucuuggagucuccuguuga

SEQ ID NO: 3192689 - RNA, 19 nt, Artificial Sequence
  Description of Artificial Sequence: Synthetic oligonucleotide
uccuucauuucagacacca

SEQ ID NO: 3192690 - RNA, 19 nt, Artificial Sequence
  Description of Artificial Sequence: Synthetic oligonucleotide
agcuccuucauuucagaca

SEQ ID NO: 3192691 - RNA, 19 nt, Artificial Sequence
  Description of Artificial Sequence: Synthetic oligonucleotide
cacaacggcauccuccagg

SEQ ID NO: 3192692 - RNA, 19 nt, Artificial Sequence
  Description of Artificial Sequence: Synthetic oligonucleotide
uuucagacaccagugcccc

SEQ ID NO: 3192693 - RNA, 19 nt, Artificial Sequence
  Description of Artificial Sequence: Synthetic oligonucleotide
uccuugagcuucuuggccu

SEQ ID NO: 3192694 - RNA, 19 nt, Artificial Sequence
  Description of Artificial Sequence: Synthetic oligonucleotide
uggagucuccuguugaggu

SEQ ID NO: 3192695 - RNA, 19 nt, Artificial Sequence
  Description of Artificial Sequence: Synthetic oligonucleotide
cuuggagucuccuguugag

SEQ ID NO: 3192696 - RNA, 19 nt, Artificial Sequence
  Description of Artificial Sequence: Synthetic oligonucleotide
uccagcuccugcuggagug

SEQ ID NO: 3192697 - RNA, 19 nt, Artificial Sequence
  Description of Artificial Sequence: Synthetic oligonucleotide
gcuccuucauuucagacac

SEQ ID NO: 3192698 - RNA, 19 nt, Artificial Sequence
  Description of Artificial Sequence: Synthetic oligonucleotide
uuggagucuccuguugagg

SEQ ID NO: 3192699 - RNA, 19 nt, Artificial Sequence
  Description of Artificial Sequence: Synthetic oligonucleotide
guugaggucucggagcucc

SEQ ID NO: 3192700 - RNA, 19 nt, Artificial Sequence
  Description of Artificial Sequence: Synthetic oligonucleotide
uguugcugcugguaguuuc

SEQ ID NO: 3192701 - RNA, 19 nt, Artificial Sequence
  Description of Artificial Sequence: Synthetic oligonucleotide
cugguaguuucgcagcagc

SEQ ID NO: 3192702 - RNA, 19 nt, Artificial Sequence
  Description of Artificial Sequence: Synthetic oligonucleotide
cucauacagagcccggggc

SEQ ID NO: 3192703 - RNA, 19 nt, Artificial Sequence
  Description of Artificial Sequence: Synthetic oligonucleotide
ucucggagcuccuucauuu

SEQ ID NO: 3192704 - RNA, 19 nt, Artificial Sequence
  Description of Artificial Sequence: Synthetic oligonucleotide
acaccagugccccguacuc

SEQ ID NO: 3192705 - RNA, 19 nt, Artificial Sequence
  Description of Artificial Sequence: Synthetic oligonucleotide
accgcugccaagccgcagg

SEQ ID NO: 3192706 - RNA, 19 nt, Artificial Sequence
  Description of Artificial Sequence: Synthetic oligonucleotide
uccucauacagagcccggg

SEQ ID NO: 3192707 - RNA, 19 nt, Artificial Sequence
  Description of Artificial Sequence: Synthetic oligonucleotide
ucuccuguugaggucucgg

SEQ ID NO: 3192708 - RNA, 19 nt, Artificial Sequence
  Description of Artificial Sequence: Synthetic oligonucleotide
ucggagcuccuucauuuca

SEQ ID NO: 3192709 - RNA, 19 nt, Artificial Sequence
  Description of Artificial Sequence: Synthetic oligonucleotide
aggagcagcacaucuugga

SEQ ID NO: 3192710 - RNA, 19 nt, Artificial Sequence
  Description of Artificial Sequence: Synthetic oligonucleotide
cuucauuucagacaccagu

SEQ ID NO: 3192711 - RNA, 19 nt, Artificial Sequence
  Description of Artificial Sequence: Synthetic oligonucleotide
guugcugcugguaguuucg

SEQ ID NO: 3192712 - RNA, 19 nt, Artificial Sequence
  Description of Artificial Sequence: Synthetic oligonucleotide
cuucuuggccugcuguacc

SEQ ID NO: 3192713 - RNA, 19 nt, Artificial Sequence
  Description of Artificial Sequence: Synthetic oligonucleotide
ugguaguuucgcagcagcu

SEQ ID NO: 3192714 - RNA, 19 nt, Artificial Sequence
  Description of Artificial Sequence: Synthetic oligonucleotide
gcugcugguaguuucgcag

SEQ ID NO: 3192715 - RNA, 19 nt, Artificial Sequence
  Description of Artificial Sequence: Synthetic oligonucleotide
cuccuugagcuucuuggcc

SEQ ID NO: 3192716 - RNA, 19 nt, Artificial Sequence
  Description of Artificial Sequence: Synthetic oligonucleotide
accagcugccuccgagucc

SEQ ID NO: 3192717 - RNA, 19 nt, Artificial Sequence
  Description of Artificial Sequence: Synthetic oligonucleotide
ugcugguaguuucgcagca

SEQ ID NO: 3192718 - RNA, 19 nt, Artificial Sequence
  Description of Artificial Sequence: Synthetic oligonucleotide
cuccaggcuguccaugucc

SEQ ID NO: 3192719 - RNA, 19 nt, Artificial Sequence
  Description of Artificial Sequence: Synthetic oligonucleotide
gcagcagcuccucauacag

SEQ ID NO: 3192720 - RNA, 19 nt, Artificial Sequence
  Description of Artificial Sequence: Synthetic oligonucleotide
uucuuggccugcuguacca

SEQ ID NO: 3192721 - RNA, 19 nt, Artificial Sequence
  Description of Artificial Sequence: Synthetic oligonucleotide
cugcugguaguuucgcagc

SEQ ID NO: 3192722 - RNA, 19 nt, Artificial Sequence
  Description of Artificial Sequence: Synthetic oligonucleotide
uccaggcuguccauguccu

SEQ ID NO: 3192723 - RNA, 19 nt, Artificial Sequence
  Description of Artificial Sequence: Synthetic oligonucleotide
uuggccugcuguaccagcu

SEQ ID NO: 3192724 - RNA, 19 nt, Artificial Sequence
  Description of Artificial Sequence: Synthetic oligonucleotide
aguccgcuccagcuccugc

SEQ ID NO: 3192725 - RNA, 19 nt, Artificial Sequence
  Description of Artificial Sequence: Synthetic oligonucleotide
caucuccuccuguugcugc

SEQ ID NO: 3192726 - RNA, 19 nt, Artificial Sequence
  Description of Artificial Sequence: Synthetic oligonucleotide
cuccuguugcugcugguag

SEQ ID NO: 3192727 - RNA, 19 nt, Artificial Sequence
  Description of Artificial Sequence: Synthetic oligonucleotide
ugccccguacuccuugagc

SEQ ID NO: 3192728 - RNA, 19 nt, Artificial Sequence
  Description of Artificial Sequence: Synthetic oligonucleotide
aucuuggagucuccuguug

SEQ ID NO: 3192729 - RNA, 19 nt, Artificial Sequence
  Description of Artificial Sequence: Synthetic oligonucleotide
ugagcuucuuggccugcug

SEQ ID NO: 3192730 - RNA, 19 nt, Artificial Sequence
  Description of Artificial Sequence: Synthetic oligonucleotide
ggagcagcacaucuuggag

SEQ ID NO: 3192731 - RNA, 19 nt, Artificial Sequence
  Description of Artificial Sequence: Synthetic oligonucleotide
ucagacaccagugccccgu

SEQ ID NO: 3192732 - RNA, 19 nt, Artificial Sequence
  Description of Artificial Sequence: Synthetic oligonucleotide
gagcuccuucauuucagac

SEQ ID NO: 3192733 - RNA, 19 nt, Artificial Sequence
  Description of Artificial Sequence: Synthetic oligonucleotide
uuucgcagcagcuccucau

SEQ ID NO: 3192734 - RNA, 19 nt, Artificial Sequence
  Description of Artificial Sequence: Synthetic oligonucleotide
cacaucuuggagucuccug

SEQ ID NO: 3192735 - RNA, 19 nt, Artificial Sequence
  Description of Artificial Sequence: Synthetic oligonucleotide
accagugccccguacuccu

SEQ ID NO: 3192736 - RNA, 19 nt, Artificial Sequence
  Description of Artificial Sequence: Synthetic oligonucleotide
ccuguugaggucucggagc

SEQ ID NO: 3192737 - RNA, 19 nt, Artificial Sequence
  Description of Artificial Sequence: Synthetic oligonucleotide
cuuggccugcuguaccagc

SEQ ID NO: 3192738 - RNA, 19 nt, Artificial Sequence
  Description of Artificial Sequence: Synthetic oligonucleotide
cagagcccggggcacaacg

SEQ ID NO: 3192739 - RNA, 19 nt, Artificial Sequence
  Description of Artificial Sequence: Synthetic oligonucleotide
gcuggaguggcgcaucucc

SEQ ID NO: 3192740 - RNA, 19 nt, Artificial Sequence
  Description of Artificial Sequence: Synthetic oligonucleotide
caggagcagcacaucuugg

SEQ ID NO: 3192741 - RNA, 19 nt, Artificial Sequence
  Description of Artificial Sequence: Synthetic oligonucleotide
uccuccaggcuguccaugu

SEQ ID NO: 3192742 - RNA, 19 nt, Artificial Sequence
  Description of Artificial Sequence: Synthetic oligonucleotide
aagccgcaggagcagcaca

SEQ ID NO: 3192743 - RNA, 19 nt, Artificial Sequence
  Description of Artificial Sequence: Synthetic oligonucleotide
gcugccaagccgcaggagc

SEQ ID NO: 3192744 - RNA, 19 nt, Artificial Sequence
  Description of Artificial Sequence: Synthetic oligonucleotide
gcaggagcagcacaucuug

SEQ ID NO: 3192745 - RNA, 19 nt, Artificial Sequence
  Description of Artificial Sequence: Synthetic oligonucleotide
uucagacaccagugccccg

SEQ ID NO: 3192746 - RNA, 19 nt, Artificial Sequence
  Description of Artificial Sequence: Synthetic oligonucleotide
uccgaguccgcuccagcuc

SEQ ID NO: 3192747 - RNA, 19 nt, Artificial Sequence
  Description of Artificial Sequence: Synthetic oligonucleotide
agcuccucauacagagccc

SEQ ID NO: 3192748 - RNA, 19 nt, Artificial Sequence
  Description of Artificial Sequence: Synthetic oligonucleotide
uaguuucgcagcagcuccu

SEQ ID NO: 3192749 - RNA, 19 nt, Artificial Sequence
  Description of Artificial Sequence: Synthetic oligonucleotide
agcacaucuuggagucucc

SEQ ID NO: 3192750 - RNA, 19 nt, Artificial Sequence
  Description of Artificial Sequence: Synthetic oligonucleotide
ucgcagcagcuccucauac

SEQ ID NO: 3192751 - RNA, 19 nt, Artificial Sequence
  Description of Artificial Sequence: Synthetic oligonucleotide
uccgcuccagcuccugcug

SEQ ID NO: 3192752 - RNA, 19 nt, Artificial Sequence
  Description of Artificial Sequence: Synthetic oligonucleotide
uaccagcugccuccgaguc

SEQ ID NO: 3192753 - RNA, 19 nt, Artificial Sequence
  Description of Artificial Sequence: Synthetic oligonucleotide
uucgcagcagcuccucaua

SEQ ID NO: 3192754 - RNA, 19 nt, Artificial Sequence
  Description of Artificial Sequence: Synthetic oligonucleotide
uccuguugcugcugguagu

SEQ ID NO: 3192755 - RNA, 19 nt, Artificial Sequence
  Description of Artificial Sequence: Synthetic oligonucleotide
agacaccagugccccguac

SEQ ID NO: 3192756 - RNA, 19 nt, Artificial Sequence
  Description of Artificial Sequence: Synthetic oligonucleotide
aguuucgcagcagcuccuc

SEQ ID NO: 3192757 - RNA, 19 nt, Artificial Sequence
  Description of Artificial Sequence: Synthetic oligonucleotide
gaggucucggagcuccuuc

SEQ ID NO: 3192758 - RNA, 19 nt, Artificial Sequence
  Description of Artificial Sequence: Synthetic oligonucleotide
cauacagagcccggggcac

SEQ ID NO: 3192759 - RNA, 19 nt, Artificial Sequence
  Description of Artificial Sequence: Synthetic oligonucleotide
ugcugcugguaguuucgca

SEQ ID NO: 3192760 - RNA, 19 nt, Artificial Sequence
  Description of Artificial Sequence: Synthetic oligonucleotide
cuccucauacagagcccgg

SEQ ID NO: 3192761 - RNA, 19 nt, Artificial Sequence
  Description of Artificial Sequence: Synthetic oligonucleotide
gagcccggggcacaacggc

SEQ ID NO: 3192762 - RNA, 19 nt, Artificial Sequence
  Description of Artificial Sequence: Synthetic oligonucleotide
uggaguggcgcaucuccuc

SEQ ID NO: 3192763 - RNA, 19 nt, Artificial Sequence
  Description of Artificial Sequence: Synthetic oligonucleotide
gcuccucauacagagcccg

SEQ ID NO: 3192764 - RNA, 19 nt, Artificial Sequence
  Description of Artificial Sequence: Synthetic oligonucleotide
cugccuccgaguccgcucc

SEQ ID NO: 3192765 - RNA, 19 nt, Artificial Sequence
  Description of Artificial Sequence: Synthetic oligonucleotide
gagcagcacaucuuggagu

SEQ ID NO: 3192766 - RNA, 19 nt, Artificial Sequence
  Description of Artificial Sequence: Synthetic oligonucleotide
aguggcgcaucuccuccug

SEQ ID NO: 3192767 - RNA, 19 nt, Artificial Sequence
  Description of Artificial Sequence: Synthetic oligonucleotide
ucuuggccugcuguaccag

SEQ ID NO: 3192768 - RNA, 19 nt, Artificial Sequence
  Description of Artificial Sequence: Synthetic oligonucleotide
uggccugcuguaccagcug

SEQ ID NO: 3192769 - RNA, 19 nt, Artificial Sequence
  Description of Artificial Sequence: Synthetic oligonucleotide
aggucucggagcuccuuca

SEQ ID NO: 3192770 - RNA, 19 nt, Artificial Sequence
  Description of Artificial Sequence: Synthetic oligonucleotide
ggaguggcgcaucuccucc

SEQ ID NO: 3192771 - RNA, 19 nt, Artificial Sequence
  Description of Artificial Sequence: Synthetic oligonucleotide
aaaacugguaauugcgugc

SEQ ID NO: 3192772 - RNA, 19 nt, Artificial Sequence
  Description of Artificial Sequence: Synthetic oligonucleotide
agucuuuccguucaaaagc

SEQ ID NO: 3192773 - RNA, 19 nt, Artificial Sequence
  Description of Artificial Sequence: Synthetic oligonucleotide
uacaaaacugguaauugcg

SEQ ID NO: 3192774 - RNA, 19 nt, Artificial Sequence
  Description of Artificial Sequence: Synthetic oligonucleotide
ucgcuggugauucugaucg

SEQ ID NO: 3192775 - RNA, 19 nt, Artificial Sequence
  Description of Artificial Sequence: Synthetic oligonucleotide
agcauuagcaguaaauucc

SEQ ID NO: 3192776 - RNA, 19 nt, Artificial Sequence
  Description of Artificial Sequence: Synthetic oligonucleotide
auacaaaacugguaauugc

SEQ ID NO: 3192777 - RNA, 19 nt, Artificial Sequence
  Description of Artificial Sequence: Synthetic oligonucleotide
aaucucuggauacaaaacu

SEQ ID NO: 3192778 - RNA, 19 nt, Artificial Sequence
  Description of Artificial Sequence: Synthetic oligonucleotide
aaucccagagaccagcguc

SEQ ID NO: 3192779 - RNA, 19 nt, Artificial Sequence
  Description of Artificial Sequence: Synthetic oligonucleotide
ucugugacacuccaaaacc

SEQ ID NO: 3192780 - RNA, 19 nt, Artificial Sequence
  Description of Artificial Sequence: Synthetic oligonucleotide
aaauucaggcucuucagcu

SEQ ID NO: 3192781 - RNA, 19 nt, Artificial Sequence
  Description of Artificial Sequence: Synthetic oligonucleotide
agcuugaucacauaguuga

SEQ ID NO: 3192782 - RNA, 19 nt, Artificial Sequence
  Description of Artificial Sequence: Synthetic oligonucleotide
aagucuuuccguucaaaag

SEQ ID NO: 3192783 - RNA, 19 nt, Artificial Sequence
  Description of Artificial Sequence: Synthetic oligonucleotide
gagaccagcgucaugaugg

SEQ ID NO: 3192784 - RNA, 19 nt, Artificial Sequence
  Description of Artificial Sequence: Synthetic oligonucleotide
ucucuggauacaaaacugg

SEQ ID NO: 3192785 - RNA, 19 nt, Artificial Sequence
  Description of Artificial Sequence: Synthetic oligonucleotide
auaguugauaaaucucugg

SEQ ID NO: 3192786 - RNA, 19 nt, Artificial Sequence
  Description of Artificial Sequence: Synthetic oligonucleotide
aacaguugcucauccacuc

SEQ ID NO: 3192787 - RNA, 19 nt, Artificial Sequence
  Description of Artificial Sequence: Synthetic oligonucleotide
uaguugauaaaucucugga

SEQ ID NO: 3192788 - RNA, 19 nt, Artificial Sequence
  Description of Artificial Sequence: Synthetic oligonucleotide
aaaucucuggauacaaaac

SEQ ID NO: 3192789 - RNA, 19 nt, Artificial Sequence
  Description of Artificial Sequence: Synthetic oligonucleotide
uaaaucucuggauacaaaa

SEQ ID NO: 3192790 - RNA, 19 nt, Artificial Sequence
  Description of Artificial Sequence: Synthetic oligonucleotide
ucacauaguugauaaaucu

SEQ ID NO: 3192791 - RNA, 19 nt, Artificial Sequence
  Description of Artificial Sequence: Synthetic oligonucleotide
cacuccaaaaccuagcuug

SEQ ID NO: 3192792 - RNA, 19 nt, Artificial Sequence
  Description of Artificial Sequence: Synthetic oligonucleotide
uuagcaguaaauuccugug

SEQ ID NO: 3192793 - RNA, 19 nt, Artificial Sequence
  Description of Artificial Sequence: Synthetic oligonucleotide
caaacagcaaagcaaacug

SEQ ID NO: 3192794 - RNA, 19 nt, Artificial Sequence
  Description of Artificial Sequence: Synthetic oligonucleotide
gauacaaaacugguaauug

SEQ ID NO: 3192795 - RNA, 19 nt, Artificial Sequence
  Description of Artificial Sequence: Synthetic oligonucleotide
ucauccacuccaaacagca

SEQ ID NO: 3192796 - RNA, 19 nt, Artificial Sequence
  Description of Artificial Sequence: Synthetic oligonucleotide
uugauaaaucucuggauac

SEQ ID NO: 3192797 - RNA, 19 nt, Artificial Sequence
  Description of Artificial Sequence: Synthetic oligonucleotide
aacagcaaagcaaacuguc

SEQ ID NO: 3192798 - RNA, 19 nt, Artificial Sequence
  Description of Artificial Sequence: Synthetic oligonucleotide
uugaucacauaguugauaa

SEQ ID NO: 3192799 - RNA, 19 nt, Artificial Sequence
  Description of Artificial Sequence: Synthetic oligonucleotide
ucaacaguugcucauccac

SEQ ID NO: 3192800 - RNA, 19 nt, Artificial Sequence
  Description of Artificial Sequence: Synthetic oligonucleotide
auuagcaguaaauuccugu

SEQ ID NO: 3192801 - RNA, 19 nt, Artificial Sequence
  Description of Artificial Sequence: Synthetic oligonucleotide
auuggaaucccagagacca

SEQ ID NO: 3192802 - RNA, 19 nt, Artificial Sequence
  Description of Artificial Sequence: Synthetic oligonucleotide
aaaagccuccagcaucugg

SEQ ID NO: 3192803 - RNA, 19 nt, Artificial Sequence
  Description of Artificial Sequence: Synthetic oligonucleotide
aguuauagguacugccuac

SEQ ID NO: 3192804 - RNA, 19 nt, Artificial Sequence
  Description of Artificial Sequence: Synthetic oligonucleotide
uuguccuuagcauuagcag

SEQ ID NO: 3192805 - RNA, 19 nt, Artificial Sequence
  Description of Artificial Sequence: Synthetic oligonucleotide
auagguacugccuacugcu

SEQ ID NO: 3192806 - RNA, 19 nt, Artificial Sequence
  Description of Artificial Sequence: Synthetic oligonucleotide
ugcucauccacuccaaaca

SEQ ID NO: 3192807 - RNA, 19 nt, Artificial Sequence
  Description of Artificial Sequence: Synthetic oligonucleotide
uauagguacugccuacugc

SEQ ID NO: 3192808 - RNA, 19 nt, Artificial Sequence
  Description of Artificial Sequence: Synthetic oligonucleotide
uucaaaagccuccagcauc

SEQ ID NO: 3192809 - RNA, 19 nt, Artificial Sequence
  Description of Artificial Sequence: Synthetic oligonucleotide
ucaaaagccuccagcaucu

SEQ ID NO: 3192810 - RNA, 19 nt, Artificial Sequence
  Description of Artificial Sequence: Synthetic oligonucleotide
gaaauucaggcucuucagc

SEQ ID NO: 3192811 - RNA, 19 nt, Artificial Sequence
  Description of Artificial Sequence: Synthetic oligonucleotide
uguggcuuucugcagagga

SEQ ID NO: 3192812 - RNA, 19 nt, Artificial Sequence
  Description of Artificial Sequence: Synthetic oligonucleotide
uuuccguucaaaagccucc

SEQ ID NO: 3192813 - RNA, 19 nt, Artificial Sequence
  Description of Artificial Sequence: Synthetic oligonucleotide
uguagugaagucuuuccgu

SEQ ID NO: 3192814 - RNA, 19 nt, Artificial Sequence
  Description of Artificial Sequence: Synthetic oligonucleotide
agcaguaaauuccugugug

SEQ ID NO: 3192815 - RNA, 19 nt, Artificial Sequence
  Description of Artificial Sequence: Synthetic oligonucleotide
augaucagagcacucaaca

SEQ ID NO: 3192816 - RNA, 19 nt, Artificial Sequence
  Description of Artificial Sequence: Synthetic oligonucleotide
uuucugcagaggaagccgg

SEQ ID NO: 3192817 - RNA, 19 nt, Artificial Sequence
  Description of Artificial Sequence: Synthetic oligonucleotide
acucaacaguugcucaucc

SEQ ID NO: 3192818 - RNA, 19 nt, Artificial Sequence
  Description of Artificial Sequence: Synthetic oligonucleotide
aggaaauucaggcucuuca

SEQ ID NO: 3192819 - RNA, 19 nt, Artificial Sequence
  Description of Artificial Sequence: Synthetic oligonucleotide
uguccuuagcauuagcagu

SEQ ID NO: 3192820 - RNA, 19 nt, Artificial Sequence
  Description of Artificial Sequence: Synthetic oligonucleotide
aaacugucgcuggugauuc

SEQ ID NO: 3192821 - RNA, 19 nt, Artificial Sequence
  Description of Artificial Sequence: Synthetic oligonucleotide
uccacuccaaacagcaaag

SEQ ID NO: 3192822 - RNA, 19 nt, Artificial Sequence
  Description of Artificial Sequence: Synthetic oligonucleotide
ugaucagagcacucaacag

SEQ ID NO: 3192823 - RNA, 19 nt, Artificial Sequence
  Description of Artificial Sequence: Synthetic oligonucleotide
agguacugccuacugcucc

SEQ ID NO: 3192824 - RNA, 19 nt, Artificial Sequence
  Description of Artificial Sequence: Synthetic oligonucleotide
aauugcgugcuguagugaa

SEQ ID NO: 3192825 - RNA, 19 nt, Artificial Sequence
  Description of Artificial Sequence: Synthetic oligonucleotide
acauaguugauaaaucucu

SEQ ID NO: 3192826 - RNA, 19 nt, Artificial Sequence
  Description of Artificial Sequence: Synthetic oligonucleotide
accuagcuugaucacauag

SEQ ID NO: 3192827 - RNA, 19 nt, Artificial Sequence
  Description of Artificial Sequence: Synthetic oligonucleotide
gguaguuauagguacugcc

SEQ ID NO: 3192828 - RNA, 19 nt, Artificial Sequence
  Description of Artificial Sequence: Synthetic oligonucleotide
aaaaccuagcuugaucaca

SEQ ID NO: 3192829 - RNA, 19 nt, Artificial Sequence
  Description of Artificial Sequence: Synthetic oligonucleotide
uuagcauuagcaguaaauu

SEQ ID NO: 3192830 - RNA, 19 nt, Artificial Sequence
  Description of Artificial Sequence: Synthetic oligonucleotide
gauggcuuuggucugugac

SEQ ID NO: 3192831 - RNA, 19 nt, Artificial Sequence
  Description of Artificial Sequence: Synthetic oligonucleotide
caaaacugguaauugcgug

SEQ ID NO: 3192832 - RNA, 19 nt, Artificial Sequence
  Description of Artificial Sequence: Synthetic oligonucleotide
uuauagguacugccuacug

SEQ ID NO: 3192833 - RNA, 19 nt, Artificial Sequence
  Description of Artificial Sequence: Synthetic oligonucleotide
guugauaaaucucuggaua

SEQ ID NO: 3192834 - RNA, 19 nt, Artificial Sequence
  Description of Artificial Sequence: Synthetic oligonucleotide
caaagcaaacugucgcugg

SEQ ID NO: 3192835 - RNA, 19 nt, Artificial Sequence
  Description of Artificial Sequence: Synthetic oligonucleotide
uagcauuagcaguaaauuc

SEQ ID NO: 3192836 - RNA, 19 nt, Artificial Sequence
  Description of Artificial Sequence: Synthetic oligonucleotide
aaagcaaacugucgcuggu

SEQ ID NO: 3192837 - RNA, 19 nt, Artificial Sequence
  Description of Artificial Sequence: Synthetic oligonucleotide
agugaagucuuuccguuca

SEQ ID NO: 3192838 - RNA, 19 nt, Artificial Sequence
  Description of Artificial Sequence: Synthetic oligonucleotide
acaguugcucauccacucc

SEQ ID NO: 3192839 - RNA, 19 nt, Artificial Sequence
  Description of Artificial Sequence: Synthetic oligonucleotide
cuggauacaaaacugguaa

SEQ ID NO: 3192840 - RNA, 19 nt, Artificial Sequence
  Description of Artificial Sequence: Synthetic oligonucleotide
cuguagugaagucuuuccg

SEQ ID NO: 3192841 - RNA, 19 nt, Artificial Sequence
  Description of Artificial Sequence: Synthetic oligonucleotide
cauaguugauaaaucucug

SEQ ID NO: 3192842 - RNA, 19 nt, Artificial Sequence
  Description of Artificial Sequence: Synthetic oligonucleotide
cagcaaagcaaacugucgc

SEQ ID NO: 3192843 - RNA, 19 nt, Artificial Sequence
  Description of Artificial Sequence: Synthetic oligonucleotide
cacauaguugauaaaucuc

SEQ ID NO: 3192844 - RNA, 19 nt, Artificial Sequence
  Description of Artificial Sequence: Synthetic oligonucleotide
aguugauaaaucucuggau

SEQ ID NO: 3192845 - RNA, 19 nt, Artificial Sequence
  Description of Artificial Sequence: Synthetic oligonucleotide
aucacauaguugauaaauc

SEQ ID NO: 3192846 - RNA, 19 nt, Artificial Sequence
  Description of Artificial Sequence: Synthetic oligonucleotide
guaauugcgugcuguagug

SEQ ID NO: 3192847 - RNA, 19 nt, Artificial Sequence
  Description of Artificial Sequence: Synthetic oligonucleotide
gucaugauggcuuuggucu

SEQ ID NO: 3192848 - RNA, 19 nt, Artificial Sequence
  Description of Artificial Sequence: Synthetic oligonucleotide
uccuguguggcuuucugca

SEQ ID NO: 3192849 - RNA, 19 nt, Artificial Sequence
  Description of Artificial Sequence: Synthetic oligonucleotide
ugcucccaugaucagagca

SEQ ID NO: 3192850 - RNA, 19 nt, Artificial Sequence
  Description of Artificial Sequence: Synthetic oligonucleotide
ugacacuccaaaaccuagc

SEQ ID NO: 3192851 - RNA, 19 nt, Artificial Sequence
  Description of Artificial Sequence: Synthetic oligonucleotide
ucuggauacaaaacuggua

SEQ ID NO: 3192852 - RNA, 19 nt, Artificial Sequence
  Description of Artificial Sequence: Synthetic oligonucleotide
uggucugugacacuccaaa

SEQ ID NO: 3192853 - RNA, 19 nt, Artificial Sequence
  Description of Artificial Sequence: Synthetic oligonucleotide
aguaaauuccuguguggcu

SEQ ID NO: 3192854 - RNA, 19 nt, Artificial Sequence
  Description of Artificial Sequence: Synthetic oligonucleotide
uccccagguaguuauaggu

SEQ ID NO: 3192855 - RNA, 19 nt, Artificial Sequence
  Description of Artificial Sequence: Synthetic oligonucleotide
aaagccuccagcaucuggu

SEQ ID NO: 3192856 - RNA, 19 nt, Artificial Sequence
  Description of Artificial Sequence: Synthetic oligonucleotide
uuuggucugugacacucca

SEQ ID NO: 3192857 - RNA, 19 nt, Artificial Sequence
  Description of Artificial Sequence: Synthetic oligonucleotide
uccaaaaccuagcuugauc

SEQ ID NO: 3192858 - RNA, 19 nt, Artificial Sequence
  Description of Artificial Sequence: Synthetic oligonucleotide
uggugauucugaucgacac

SEQ ID NO: 3192859 - RNA, 19 nt, Artificial Sequence
  Description of Artificial Sequence: Synthetic oligonucleotide
aaacugguaauugcgugcu

SEQ ID NO: 3192860 - RNA, 19 nt, Artificial Sequence
  Description of Artificial Sequence: Synthetic oligonucleotide
cuuucugcagaggaagccg

SEQ ID NO: 3192861 - RNA, 19 nt, Artificial Sequence
  Description of Artificial Sequence: Synthetic oligonucleotide
auucaggcucuucagcuug

SEQ ID NO: 3192862 - RNA, 19 nt, Artificial Sequence
  Description of Artificial Sequence: Synthetic oligonucleotide
guugcucccaugaucagag

SEQ ID NO: 3192863 - RNA, 19 nt, Artificial Sequence
  Description of Artificial Sequence: Synthetic oligonucleotide
uaguuauagguacugccua

SEQ ID NO: 3192864 - RNA, 19 nt, Artificial Sequence
  Description of Artificial Sequence: Synthetic oligonucleotide
gucugugacacuccaaaac

SEQ ID NO: 3192865 - RNA, 19 nt, Artificial Sequence
  Description of Artificial Sequence: Synthetic oligonucleotide
cagagcacucaacaguugc

SEQ ID NO: 3192866 - RNA, 19 nt, Artificial Sequence
  Description of Artificial Sequence: Synthetic oligonucleotide
cuuguccuuagcauuagca

SEQ ID NO: 3192867 - RNA, 19 nt, Artificial Sequence
  Description of Artificial Sequence: Synthetic oligonucleotide
uagcaguaaauuccugugu

SEQ ID NO: 3192868 - RNA, 19 nt, Artificial Sequence
  Description of Artificial Sequence: Synthetic oligonucleotide
caguaaauuccuguguggc

SEQ ID NO: 3192869 - RNA, 19 nt, Artificial Sequence
  Description of Artificial Sequence: Synthetic oligonucleotide
ugauaaaucucuggauaca

SEQ ID NO: 3192870 - RNA, 19 nt, Artificial Sequence
  Description of Artificial Sequence: Synthetic oligonucleotide
aggcucuucagcuuguccu

SEQ ID NO: 3192871 - RNA, 19 nt, Artificial Sequence
  Description of Artificial Sequence: Synthetic oligonucleotide
uuauaaaggaugaagguca

SEQ ID NO: 3192872 - RNA, 19 nt, Artificial Sequence
  Description of Artificial Sequence: Synthetic oligonucleotide
uuaaugauggccaugggca

SEQ ID NO: 3192873 - RNA, 19 nt, Artificial Sequence
  Description of Artificial Sequence: Synthetic oligonucleotide
aaggcucugaaacaucucc

SEQ ID NO: 3192874 - RNA, 19 nt, Artificial Sequence
  Description of Artificial Sequence: Synthetic oligonucleotide
aaggucauuaaccccauuc

SEQ ID NO: 3192875 - RNA, 19 nt, Artificial Sequence
  Description of Artificial Sequence: Synthetic oligonucleotide
uuuacuucuuuuaucagca

SEQ ID NO: 3192876 - RNA, 19 nt, Artificial Sequence
  Description of Artificial Sequence: Synthetic oligonucleotide
gauuuuauaaaggaugaag

SEQ ID NO: 3192877 - RNA, 19 nt, Artificial Sequence
  Description of Artificial Sequence: Synthetic oligonucleotide
auuuuauaaaggaugaagg

SEQ ID NO: 3192878 - RNA, 19 nt, Artificial Sequence
  Description of Artificial Sequence: Synthetic oligonucleotide
aaggaugaaggucauuaac

SEQ ID NO: 3192879 - RNA, 19 nt, Artificial Sequence
  Description of Artificial Sequence: Synthetic oligonucleotide
uaaaccuggguauaguagg

SEQ ID NO: 3192880 - RNA, 19 nt, Artificial Sequence
  Description of Artificial Sequence: Synthetic oligonucleotide
guauaguaggguuucaugg

SEQ ID NO: 3192881 - RNA, 19 nt, Artificial Sequence
  Description of Artificial Sequence: Synthetic oligonucleotide
auuaaccccauuccuaccc

SEQ ID NO: 3192882 - RNA, 19 nt, Artificial Sequence
  Description of Artificial Sequence: Synthetic oligonucleotide
uauaguaggguuucauggg

SEQ ID NO: 3192883 - RNA, 19 nt, Artificial Sequence
  Description of Artificial Sequence: Synthetic oligonucleotide
uuuuauaaaggaugaaggu

SEQ ID NO: 3192884 - RNA, 19 nt, Artificial Sequence
  Description of Artificial Sequence: Synthetic oligonucleotide
ucuuuuaucagcacuccug

SEQ ID NO: 3192885 - RNA, 19 nt, Artificial Sequence
  Description of Artificial Sequence: Synthetic oligonucleotide
aacuggagccuuucaaagc

SEQ ID NO: 3192886 - RNA, 19 nt, Artificial Sequence
  Description of Artificial Sequence: Synthetic oligonucleotide
ucugaaacaucuccgcagg

SEQ ID NO: 3192887 - RNA, 19 nt, Artificial Sequence
  Description of Artificial Sequence: Synthetic oligonucleotide
aggucauuaaccccauucc

SEQ ID NO: 3192888 - RNA, 19 nt, Artificial Sequence
  Description of Artificial Sequence: Synthetic oligonucleotide
cuuuacuucuuuuaucagc

SEQ ID NO: 3192889 - RNA, 19 nt, Artificial Sequence
  Description of Artificial Sequence: Synthetic oligonucleotide
aggaugaaggucauuaacc

SEQ ID NO: 3192890 - RNA, 19 nt, Artificial Sequence
  Description of Artificial Sequence: Synthetic oligonucleotide
aaagcuuuacuucuuuuau

SEQ ID NO: 3192891 - RNA, 19 nt, Artificial Sequence
  Description of Artificial Sequence: Synthetic oligonucleotide
uuuauaaaggaugaagguc

SEQ ID NO: 3192892 - RNA, 19 nt, Artificial Sequence
  Description of Artificial Sequence: Synthetic oligonucleotide
aagcuuuacuucuuuuauc

SEQ ID NO: 3192893 - RNA, 19 nt, Artificial Sequence
  Description of Artificial Sequence: Synthetic oligonucleotide
agcuuuacuucuuuuauca

SEQ ID NO: 3192894 - RNA, 19 nt, Artificial Sequence
  Description of Artificial Sequence: Synthetic oligonucleotide
uucauggggacccagacau

SEQ ID NO: 3192895 - RNA, 19 nt, Artificial Sequence
  Description of Artificial Sequence: Synthetic oligonucleotide
guuaaugauggccaugggc

SEQ ID NO: 3192896 - RNA, 19 nt, Artificial Sequence
  Description of Artificial Sequence: Synthetic oligonucleotide
gaaacaucuccgcaggacc

SEQ ID NO: 3192897 - RNA, 19 nt, Artificial Sequence
  Description of Artificial Sequence: Synthetic oligonucleotide
auaguaggguuucaugggg

SEQ ID NO: 3192898 - RNA, 19 nt, Artificial Sequence
  Description of Artificial Sequence: Synthetic oligonucleotide
aauuuccugguaaaccugg

SEQ ID NO: 3192899 - RNA, 19 nt, Artificial Sequence
  Description of Artificial Sequence: Synthetic oligonucleotide
uuaucagcacuccugauuu

SEQ ID NO: 3192900 - RNA, 19 nt, Artificial Sequence
  Description of Artificial Sequence: Synthetic oligonucleotide
uaaaggaugaaggucauua

SEQ ID NO: 3192901 - RNA, 19 nt, Artificial Sequence
  Description of Artificial Sequence: Synthetic oligonucleotide
ucauuaaccccauuccuac

SEQ ID NO: 3192902 - RNA, 19 nt, Artificial Sequence
  Description of Artificial Sequence: Synthetic oligonucleotide
cauuccuacccaaauuucc

SEQ ID NO: 3192903 - RNA, 19 nt, Artificial Sequence
  Description of Artificial Sequence: Synthetic oligonucleotide
gaacuggagccuuucaaag

SEQ ID NO: 3192904 - RNA, 19 nt, Artificial Sequence
  Description of Artificial Sequence: Synthetic oligonucleotide
gaugaaggucauuaacccc

SEQ ID NO: 3192905 - RNA, 19 nt, Artificial Sequence
  Description of Artificial Sequence: Synthetic oligonucleotide
cagacauuccugauaaggc

SEQ ID NO: 3192906 - RNA, 19 nt, Artificial Sequence
  Description of Artificial Sequence: Synthetic oligonucleotide
ccugauuuuauaaaggaug

SEQ ID NO: 3192907 - RNA, 19 nt, Artificial Sequence
  Description of Artificial Sequence: Synthetic oligonucleotide
acuucuuuuaucagcacuc

SEQ ID NO: 3192908 - RNA, 19 nt, Artificial Sequence
  Description of Artificial Sequence: Synthetic oligonucleotide
uuuaucagcacuccugauu

SEQ ID NO: 3192909 - RNA, 19 nt, Artificial Sequence
  Description of Artificial Sequence: Synthetic oligonucleotide
uacuucuuuuaucagcacu

SEQ ID NO: 3192910 - RNA, 19 nt, Artificial Sequence
  Description of Artificial Sequence: Synthetic oligonucleotide
uccuacccaaauuuccugg

SEQ ID NO: 3192911 - RNA, 19 nt, Artificial Sequence
  Description of Artificial Sequence: Synthetic oligonucleotide
cuccgcaggaccaaggccg

SEQ ID NO: 3192912 - RNA, 19 nt, Artificial Sequence
  Description of Artificial Sequence: Synthetic oligonucleotide
aguaggguuucauggggac

SEQ ID NO: 3192913 - RNA, 19 nt, Artificial Sequence
  Description of Artificial Sequence: Synthetic oligonucleotide
ccugauaaggcucugaaac

SEQ ID NO: 3192914 - RNA, 19 nt, Artificial Sequence
  Description of Artificial Sequence: Synthetic oligonucleotide
acuggagccuuucaaagcu

SEQ ID NO: 3192915 - RNA, 19 nt, Artificial Sequence
  Description of Artificial Sequence: Synthetic oligonucleotide
cacuccugauuuuauaaag

SEQ ID NO: 3192916 - RNA, 19 nt, Artificial Sequence
  Description of Artificial Sequence: Synthetic oligonucleotide
cugauuuuauaaaggauga

SEQ ID NO: 3192917 - RNA, 19 nt, Artificial Sequence
  Description of Artificial Sequence: Synthetic oligonucleotide
cucugaaacaucuccgcag

SEQ ID NO: 3192918 - RNA, 19 nt, Artificial Sequence
  Description of Artificial Sequence: Synthetic oligonucleotide
agacauuccugauaaggcu

SEQ ID NO: 3192919 - RNA, 19 nt, Artificial Sequence
  Description of Artificial Sequence: Synthetic oligonucleotide
aaaggaugaaggucauuaa

SEQ ID NO: 3192920 - RNA, 19 nt, Artificial Sequence
  Description of Artificial Sequence: Synthetic oligonucleotide
aaugauggccaugggcagg

SEQ ID NO: 3192921 - RNA, 19 nt, Artificial Sequence
  Description of Artificial Sequence: Synthetic oligonucleotide
ggaugaaggucauuaaccc

SEQ ID NO: 3192922 - RNA, 19 nt, Artificial Sequence
  Description of Artificial Sequence: Synthetic oligonucleotide
aucuccgcaggaccaaggc

SEQ ID NO: 3192923 - RNA, 19 nt, Artificial Sequence
  Description of Artificial Sequence: Synthetic oligonucleotide
aaggccgccggccacacca

SEQ ID NO: 3192924 - RNA, 19 nt, Artificial Sequence
  Description of Artificial Sequence: Synthetic oligonucleotide
aaaccuggguauaguaggg

SEQ ID NO: 3192925 - RNA, 19 nt, Artificial Sequence
  Description of Artificial Sequence: Synthetic oligonucleotide
uaaugauggccaugggcag

SEQ ID NO: 3192926 - RNA, 19 nt, Artificial Sequence
  Description of Artificial Sequence: Synthetic oligonucleotide
acuccugauuuuauaaagg

SEQ ID NO: 3192927 - RNA, 19 nt, Artificial Sequence
  Description of Artificial Sequence: Synthetic oligonucleotide
uaggguuucauggggaccc

SEQ ID NO: 3192928 - RNA, 19 nt, Artificial Sequence
  Description of Artificial Sequence: Synthetic oligonucleotide
uccugauuuuauaaaggau

SEQ ID NO: 3192929 - RNA, 19 nt, Artificial Sequence
  Description of Artificial Sequence: Synthetic oligonucleotide
uacccaaauuuccugguaa

SEQ ID NO: 3192930 - RNA, 19 nt, Artificial Sequence
  Description of Artificial Sequence: Synthetic oligonucleotide
uuccugguaaaccugggua

SEQ ID NO: 3192931 - RNA, 19 nt, Artificial Sequence
  Description of Artificial Sequence: Synthetic oligonucleotide
guaaaccuggguauaguag

SEQ ID NO: 3192932 - RNA, 19 nt, Artificial Sequence
  Description of Artificial Sequence: Synthetic oligonucleotide
augaaggucauuaacccca

SEQ ID NO: 3192933 - RNA, 19 nt, Artificial Sequence
  Description of Artificial Sequence: Synthetic oligonucleotide
agaacuggagccuuucaaa

SEQ ID NO: 3192934 - RNA, 19 nt, Artificial Sequence
  Description of Artificial Sequence: Synthetic oligonucleotide
aaauuuccugguaaaccug

SEQ ID NO: 3192935 - RNA, 19 nt, Artificial Sequence
  Description of Artificial Sequence: Synthetic oligonucleotide
uucuuuuaucagcacuccu

SEQ ID NO: 3192936 - RNA, 19 nt, Artificial Sequence
  Description of Artificial Sequence: Synthetic oligonucleotide
agcacuccugauuuuauaa

SEQ ID NO: 3192937 - RNA, 19 nt, Artificial Sequence
  Description of Artificial Sequence: Synthetic oligonucleotide
uuucauggggacccagaca

SEQ ID NO: 3192938 - RNA, 19 nt, Artificial Sequence
  Description of Artificial Sequence: Synthetic oligonucleotide
ugauaaggcucugaaacau

SEQ ID NO: 3192939 - RNA, 19 nt, Artificial Sequence
  Description of Artificial Sequence: Synthetic oligonucleotide
uuccugauaaggcucugaa

SEQ ID NO: 3192940 - RNA, 19 nt, Artificial Sequence
  Description of Artificial Sequence: Synthetic oligonucleotide
ugaaacaucuccgcaggac

SEQ ID NO: 3192941 - RNA, 19 nt, Artificial Sequence
  Description of Artificial Sequence: Synthetic oligonucleotide
cuuuuaucagcacuccuga

SEQ ID NO: 3192942 - RNA, 19 nt, Artificial Sequence
  Description of Artificial Sequence: Synthetic oligonucleotide
uauaaaggaugaaggucau

SEQ ID NO: 3192943 - RNA, 19 nt, Artificial Sequence
  Description of Artificial Sequence: Synthetic oligonucleotide
uuuccugguaaaccugggu

SEQ ID NO: 3192944 - RNA, 19 nt, Artificial Sequence
  Description of Artificial Sequence: Synthetic oligonucleotide
gguauaguaggguuucaug

SEQ ID NO: 3192945 - RNA, 19 nt, Artificial Sequence
  Description of Artificial Sequence: Synthetic oligonucleotide
cuuucaaagcuuuacuucu

SEQ ID NO: 3192946 - RNA, 19 nt, Artificial Sequence
  Description of Artificial Sequence: Synthetic oligonucleotide
acccagacauuccugauaa

SEQ ID NO: 3192947 - RNA, 19 nt, Artificial Sequence
  Description of Artificial Sequence: Synthetic oligonucleotide
cuccugauuuuauaaagga

SEQ ID NO: 3192948 - RNA, 19 nt, Artificial Sequence
  Description of Artificial Sequence: Synthetic oligonucleotide
uaguaggguuucaugggga

SEQ ID NO: 3192949 - RNA, 19 nt, Artificial Sequence
  Description of Artificial Sequence: Synthetic oligonucleotide
auaaggcucugaaacaucu

SEQ ID NO: 3192950 - RNA, 19 nt, Artificial Sequence
  Description of Artificial Sequence: Synthetic oligonucleotide
caaauuuccugguaaaccu

SEQ ID NO: 3192951 - RNA, 19 nt, Artificial Sequence
  Description of Artificial Sequence: Synthetic oligonucleotide
uuaaccccauuccuaccca

SEQ ID NO: 3192952 - RNA, 19 nt, Artificial Sequence
  Description of Artificial Sequence: Synthetic oligonucleotide
uuccuacccaaauuuccug

SEQ ID NO: 3192953 - RNA, 19 nt, Artificial Sequence
  Description of Artificial Sequence: Synthetic oligonucleotide
caggugcagaacuggagcc

SEQ ID NO: 3192954 - RNA, 19 nt, Artificial Sequence
  Description of Artificial Sequence: Synthetic oligonucleotide
uccugguaaaccuggguau

SEQ ID NO: 3192955 - RNA, 19 nt, Artificial Sequence
  Description of Artificial Sequence: Synthetic oligonucleotide
guuucauggggacccagac

SEQ ID NO: 3192956 - RNA, 19 nt, Artificial Sequence
  Description of Artificial Sequence: Synthetic oligonucleotide
gacauuccugauaaggcuc

SEQ ID NO: 3192957 - RNA, 19 nt, Artificial Sequence
  Description of Artificial Sequence: Synthetic oligonucleotide
uucaaagcuuuacuucuuu

SEQ ID NO: 3192958 - RNA, 19 nt, Artificial Sequence
  Description of Artificial Sequence: Synthetic oligonucleotide
agccuuucaaagcuuuacu

SEQ ID NO: 3192959 - RNA, 19 nt, Artificial Sequence
  Description of Artificial Sequence: Synthetic oligonucleotide
ucuccgcaggaccaaggcc

SEQ ID NO: 3192960 - RNA, 19 nt, Artificial Sequence
  Description of Artificial Sequence: Synthetic oligonucleotide
gauggccaugggcaggugc

SEQ ID NO: 3192961 - RNA, 19 nt, Artificial Sequence
  Description of Artificial Sequence: Synthetic oligonucleotide
cuucuuuuaucagcacucc

SEQ ID NO: 3192962 - RNA, 19 nt, Artificial Sequence
  Description of Artificial Sequence: Synthetic oligonucleotide
ccagacauuccugauaagg

SEQ ID NO: 3192963 - RNA, 19 nt, Artificial Sequence
  Description of Artificial Sequence: Synthetic oligonucleotide
aaacaucuccgcaggacca

SEQ ID NO: 3192964 - RNA, 19 nt, Artificial Sequence
  Description of Artificial Sequence: Synthetic oligonucleotide
aggaccaaggccgccggcc

SEQ ID NO: 3192965 - RNA, 19 nt, Artificial Sequence
  Description of Artificial Sequence: Synthetic oligonucleotide
uuucaaagcuuuacuucuu

SEQ ID NO: 3192966 - RNA, 19 nt, Artificial Sequence
  Description of Artificial Sequence: Synthetic oligonucleotide
ccaaauuuccugguaaacc

SEQ ID NO: 3192967 - RNA, 19 nt, Artificial Sequence
  Description of Artificial Sequence: Synthetic oligonucleotide
cauuaaccccauuccuacc

SEQ ID NO: 3192968 - RNA, 19 nt, Artificial Sequence
  Description of Artificial Sequence: Synthetic oligonucleotide
ugauuuuauaaaggaugaa

SEQ ID NO: 3192969 - RNA, 19 nt, Artificial Sequence
  Description of Artificial Sequence: Synthetic oligonucleotide
ugggcaggugcagaacugg

SEQ ID NO: 3192970 - RNA, 19 nt, Artificial Sequence
  Description of Artificial Sequence: Synthetic oligonucleotide
cugauaaggcucugaaaca

SEQ ID NO: 3192971 - RNA, 19 nt, Artificial Sequence
  Description of Artificial Sequence: Synthetic oligonucleotide
aauaguuugaaguagcgga

SEQ ID NO: 3192972 - RNA, 19 nt, Artificial Sequence
  Description of Artificial Sequence: Synthetic oligonucleotide
aacacuuaaaguuucaugu

SEQ ID NO: 3192973 - RNA, 19 nt, Artificial Sequence
  Description of Artificial Sequence: Synthetic oligonucleotide
aaauaaccacaucauaggc

SEQ ID NO: 3192974 - RNA, 19 nt, Artificial Sequence
  Description of Artificial Sequence: Synthetic oligonucleotide
aacgaaaucaaaaugguuc

SEQ ID NO: 3192975 - RNA, 19 nt, Artificial Sequence
  Description of Artificial Sequence: Synthetic oligonucleotide
auuucacuaguauucaucc

SEQ ID NO: 3192976 - RNA, 19 nt, Artificial Sequence
  Description of Artificial Sequence: Synthetic oligonucleotide
aaaguuucauguaucaagc

SEQ ID NO: 3192977 - RNA, 19 nt, Artificial Sequence
  Description of Artificial Sequence: Synthetic oligonucleotide
aaucaaaaugguuccaauc

SEQ ID NO: 3192978 - RNA, 19 nt, Artificial Sequence
  Description of Artificial Sequence: Synthetic oligonucleotide
ucauguaucaagcaaguug

SEQ ID NO: 3192979 - RNA, 19 nt, Artificial Sequence
  Description of Artificial Sequence: Synthetic oligonucleotide
uucacuaacacuuaaaguu

SEQ ID NO: 3192980 - RNA, 19 nt, Artificial Sequence
  Description of Artificial Sequence: Synthetic oligonucleotide
agugauucauauuuucugc

SEQ ID NO: 3192981 - RNA, 19 nt, Artificial Sequence
  Description of Artificial Sequence: Synthetic oligonucleotide
ucuggaaauaguuugaagu

SEQ ID NO: 3192982 - RNA, 19 nt, Artificial Sequence
  Description of Artificial Sequence: Synthetic oligonucleotide
uauucauccacacuuccgg

SEQ ID NO: 3192983 - RNA, 19 nt, Artificial Sequence
  Description of Artificial Sequence: Synthetic oligonucleotide
aaucgaagaguucacuaac

SEQ ID NO: 3192984 - RNA, 19 nt, Artificial Sequence
  Description of Artificial Sequence: Synthetic oligonucleotide
ucuugugguguuaugaggg

SEQ ID NO: 3192985 - RNA, 19 nt, Artificial Sequence
  Description of Artificial Sequence: Synthetic oligonucleotide
aaugguuccaaucuggaaa

SEQ ID NO: 3192986 - RNA, 19 nt, Artificial Sequence
  Description of Artificial Sequence: Synthetic oligonucleotide
acgaaaucaaaaugguucc

SEQ ID NO: 3192987 - RNA, 19 nt, Artificial Sequence
  Description of Artificial Sequence: Synthetic oligonucleotide
aauucaucagaucggucuc

SEQ ID NO: 3192988 - RNA, 19 nt, Artificial Sequence
  Description of Artificial Sequence: Synthetic oligonucleotide
aguucacuaacacuuaaag

SEQ ID NO: 3192989 - RNA, 19 nt, Artificial Sequence
  Description of Artificial Sequence: Synthetic oligonucleotide
uguuaugagggcaucaugu

SEQ ID NO: 3192990 - RNA, 19 nt, Artificial Sequence
  Description of Artificial Sequence: Synthetic oligonucleotide
aucagaucggucucaagcc

SEQ ID NO: 3192991 - RNA, 19 nt, Artificial Sequence
  Description of Artificial Sequence: Synthetic oligonucleotide
uacuguacagccuuugggg

SEQ ID NO: 3192992 - RNA, 19 nt, Artificial Sequence
  Description of Artificial Sequence: Synthetic oligonucleotide
ugagaauguacccaucugc

SEQ ID NO: 3192993 - RNA, 19 nt, Artificial Sequence
  Description of Artificial Sequence: Synthetic oligonucleotide
ugugaguccagcuugugcc

SEQ ID NO: 3192994 - RNA, 19 nt, Artificial Sequence
  Description of Artificial Sequence: Synthetic oligonucleotide
aaauaguuugaaguagcgg

SEQ ID NO: 3192995 - RNA, 19 nt, Artificial Sequence
  Description of Artificial Sequence: Synthetic oligonucleotide
ugcaucaaggccccaaacg

SEQ ID NO: 3192996 - RNA, 19 nt, Artificial Sequence
  Description of Artificial Sequence: Synthetic oligonucleotide
uuacuguacagccuuuggg

SEQ ID NO: 3192997 - RNA, 19 nt, Artificial Sequence
  Description of Artificial Sequence: Synthetic oligonucleotide
aguauucauccacacuucc

SEQ ID NO: 3192998 - RNA, 19 nt, Artificial Sequence
  Description of Artificial Sequence: Synthetic oligonucleotide
cacuucauuuuccaaaucg

SEQ ID NO: 3192999 - RNA, 19 nt, Artificial Sequence
  Description of Artificial Sequence: Synthetic oligonucleotide
ccaaacgaaaucaaaaugg

SEQ ID NO: 3193000 - RNA, 19 nt, Artificial Sequence
  Description of Artificial Sequence: Synthetic oligonucleotide
uguccaccagcccaaaugg

SEQ ID NO: 3193001 - RNA, 19 nt, Artificial Sequence
  Description of Artificial Sequence: Synthetic oligonucleotide
aguagcggagauuuguaac

SEQ ID NO: 3193002 - RNA, 19 nt, Artificial Sequence
  Description of Artificial Sequence: Synthetic oligonucleotide
uuuacuguacagccuuugg

SEQ ID NO: 3193003 - RNA, 19 nt, Artificial Sequence
  Description of Artificial Sequence: Synthetic oligonucleotide
ucggucucaagccaguagg

SEQ ID NO: 3193004 - RNA, 19 nt, Artificial Sequence
  Description of Artificial Sequence: Synthetic oligonucleotide
uuuuccaaaucgaagaguu

SEQ ID NO: 3193005 - RNA, 19 nt, Artificial Sequence
  Description of Artificial Sequence: Synthetic oligonucleotide
ugcauauacacaacuggcc

SEQ ID NO: 3193006 - RNA, 19 nt, Artificial Sequence
  Description of Artificial Sequence: Synthetic oligonucleotide
uugagggugagaauguacc

SEQ ID NO: 3193007 - RNA, 19 nt, Artificial Sequence
  Description of Artificial Sequence: Synthetic oligonucleotide
uagugauucauauuuucug

SEQ ID NO: 3193008 - RNA, 19 nt, Artificial Sequence
  Description of Artificial Sequence: Synthetic oligonucleotide
aaaucgaagaguucacuaa

SEQ ID NO: 3193009 - RNA, 19 nt, Artificial Sequence
  Description of Artificial Sequence: Synthetic oligonucleotide
uguaacuuggggaaguauc

SEQ ID NO: 3193010 - RNA, 19 nt, Artificial Sequence
  Description of Artificial Sequence: Synthetic oligonucleotide
caucagaucggucucaagc

SEQ ID NO: 3193011 - RNA, 19 nt, Artificial Sequence
  Description of Artificial Sequence: Synthetic oligonucleotide
auaaccacaucauaggcau

SEQ ID NO: 3193012 - RNA, 19 nt, Artificial Sequence
  Description of Artificial Sequence: Synthetic oligonucleotide
uugucugcaaacaaggcau

SEQ ID NO: 3193013 - RNA, 19 nt, Artificial Sequence
  Description of Artificial Sequence: Synthetic oligonucleotide
uuaugagggcaucaugucc

SEQ ID NO: 3193014 - RNA, 19 nt, Artificial Sequence
  Description of Artificial Sequence: Synthetic oligonucleotide
gaaauaguuugaaguagcg

SEQ ID NO: 3193015 - RNA, 19 nt, Artificial Sequence
  Description of Artificial Sequence: Synthetic oligonucleotide
uuggggugcaucaaggccc

SEQ ID NO: 3193016 - RNA, 19 nt, Artificial Sequence
  Description of Artificial Sequence: Synthetic oligonucleotide
aauggcagugggcaccuuc

SEQ ID NO: 3193017 - RNA, 19 nt, Artificial Sequence
  Description of Artificial Sequence: Synthetic oligonucleotide
uuuggggugcaucaaggcc

SEQ ID NO: 3193018 - RNA, 19 nt, Artificial Sequence
  Description of Artificial Sequence: Synthetic oligonucleotide
uuugaaguagcggagauuu

SEQ ID NO: 3193019 - RNA, 19 nt, Artificial Sequence
  Description of Artificial Sequence: Synthetic oligonucleotide
agauuuguaacuuggggaa

SEQ ID NO: 3193020 - RNA, 19 nt, Artificial Sequence
  Description of Artificial Sequence: Synthetic oligonucleotide
uuccaaaucgaagaguuca

SEQ ID NO: 3193021 - RNA, 19 nt, Artificial Sequence
  Description of Artificial Sequence: Synthetic oligonucleotide
gcagucaggucauagaugg

SEQ ID NO: 3193022 - RNA, 19 nt, Artificial Sequence
  Description of Artificial Sequence: Synthetic oligonucleotide
aauaaccacaucauaggca

SEQ ID NO: 3193023 - RNA, 19 nt, Artificial Sequence
  Description of Artificial Sequence: Synthetic oligonucleotide
uggaaauaguuugaaguag

SEQ ID NO: 3193024 - RNA, 19 nt, Artificial Sequence
  Description of Artificial Sequence: Synthetic oligonucleotide
cauauacacaacuggccgg

SEQ ID NO: 3193025 - RNA, 19 nt, Artificial Sequence
  Description of Artificial Sequence: Synthetic oligonucleotide
uuucauguaucaagcaagu

SEQ ID NO: 3193026 - RNA, 19 nt, Artificial Sequence
  Description of Artificial Sequence: Synthetic oligonucleotide
cugcauauacacaacuggc

SEQ ID NO: 3193027 - RNA, 19 nt, Artificial Sequence
  Description of Artificial Sequence: Synthetic oligonucleotide
uguagugauucauauuuuc

SEQ ID NO: 3193028 - RNA, 19 nt, Artificial Sequence
  Description of Artificial Sequence: Synthetic oligonucleotide
gauucauauuuucugcuuc

SEQ ID NO: 3193029 - RNA, 19 nt, Artificial Sequence
  Description of Artificial Sequence: Synthetic oligonucleotide
gaauucaucagaucggucu

SEQ ID NO: 3193030 - RNA, 19 nt, Artificial Sequence
  Description of Artificial Sequence: Synthetic oligonucleotide
aaguauccuggcuacgucu

SEQ ID NO: 3193031 - RNA, 19 nt, Artificial Sequence
  Description of Artificial Sequence: Synthetic oligonucleotide
cuaugauuuuacuguacag

SEQ ID NO: 3193032 - RNA, 19 nt, Artificial Sequence
  Description of Artificial Sequence: Synthetic oligonucleotide
ggagauuuguaacuugggg

SEQ ID NO: 3193033 - RNA, 19 nt, Artificial Sequence
  Description of Artificial Sequence: Synthetic oligonucleotide
aguuucauguaucaagcaa

SEQ ID NO: 3193034 - RNA, 19 nt, Artificial Sequence
  Description of Artificial Sequence: Synthetic oligonucleotide
gcauauacacaacuggccg

SEQ ID NO: 3193035 - RNA, 19 nt, Artificial Sequence
  Description of Artificial Sequence: Synthetic oligonucleotide
ugcaguggugacuucauac

SEQ ID NO: 3193036 - RNA, 19 nt, Artificial Sequence
  Description of Artificial Sequence: Synthetic oligonucleotide
uguaucaagcaaguuguug

SEQ ID NO: 3193037 - RNA, 19 nt, Artificial Sequence
  Description of Artificial Sequence: Synthetic oligonucleotide
gcugcauauacacaacugg

SEQ ID NO: 3193038 - RNA, 19 nt, Artificial Sequence
  Description of Artificial Sequence: Synthetic oligonucleotide
cuuaaaguuucauguauca

SEQ ID NO: 3193039 - RNA, 19 nt, Artificial Sequence
  Description of Artificial Sequence: Synthetic oligonucleotide
uucugcuucacuuccccag

SEQ ID NO: 3193040 - RNA, 19 nt, Artificial Sequence
  Description of Artificial Sequence: Synthetic oligonucleotide
ucgaagaguucacuaacac

SEQ ID NO: 3193041 - RNA, 19 nt, Artificial Sequence
  Description of Artificial Sequence: Synthetic oligonucleotide
caaggcaugcugcauauac

SEQ ID NO: 3193042 - RNA, 19 nt, Artificial Sequence
  Description of Artificial Sequence: Synthetic oligonucleotide
ucauauuuucugcuucacu

SEQ ID NO: 3193043 - RNA, 19 nt, Artificial Sequence
  Description of Artificial Sequence: Synthetic oligonucleotide
ucacuaacacuuaaaguuu

SEQ ID NO: 3193044 - RNA, 19 nt, Artificial Sequence
  Description of Artificial Sequence: Synthetic oligonucleotide
aaguuucauguaucaagca

SEQ ID NO: 3193045 - RNA, 19 nt, Artificial Sequence
  Description of Artificial Sequence: Synthetic oligonucleotide
uagccguuguagaugauga

SEQ ID NO: 3193046 - RNA, 19 nt, Artificial Sequence
  Description of Artificial Sequence: Synthetic oligonucleotide
ugauuuuacuguacagccu

SEQ ID NO: 3193047 - RNA, 19 nt, Artificial Sequence
  Description of Artificial Sequence: Synthetic oligonucleotide
acuuaaaguuucauguauc

SEQ ID NO: 3193048 - RNA, 19 nt, Artificial Sequence
  Description of Artificial Sequence: Synthetic oligonucleotide
ucaggucauagaugggagg

SEQ ID NO: 3193049 - RNA, 19 nt, Artificial Sequence
  Description of Artificial Sequence: Synthetic oligonucleotide
ugaaguagcggagauuugu

SEQ ID NO: 3193050 - RNA, 19 nt, Artificial Sequence
  Description of Artificial Sequence: Synthetic oligonucleotide
auauacacaacuggccggg

SEQ ID NO: 3193051 - RNA, 19 nt, Artificial Sequence
  Description of Artificial Sequence: Synthetic oligonucleotide
auucauauuuucugcuuca

SEQ ID NO: 3193052 - RNA, 19 nt, Artificial Sequence
  Description of Artificial Sequence: Synthetic oligonucleotide
guuguagugauucauauuu

SEQ ID NO: 3193053 - RNA, 19 nt, Artificial Sequence
  Description of Artificial Sequence: Synthetic oligonucleotide
auagaugggaggacgacuc

SEQ ID NO: 3193054 - RNA, 19 nt, Artificial Sequence
  Description of Artificial Sequence: Synthetic oligonucleotide
acucugguuguagugauuc

SEQ ID NO: 3193055 - RNA, 19 nt, Artificial Sequence
  Description of Artificial Sequence: Synthetic oligonucleotide
ucacuaguauucauccaca

SEQ ID NO: 3193056 - RNA, 19 nt, Artificial Sequence
  Description of Artificial Sequence: Synthetic oligonucleotide
ugaugauuucacuaguauu

SEQ ID NO: 3193057 - RNA, 19 nt, Artificial Sequence
  Description of Artificial Sequence: Synthetic oligonucleotide
uccaccagcccaaauggca

SEQ ID NO: 3193058 - RNA, 19 nt, Artificial Sequence
  Description of Artificial Sequence: Synthetic oligonucleotide
agaauguacccaucugcag

SEQ ID NO: 3193059 - RNA, 19 nt, Artificial Sequence
  Description of Artificial Sequence: Synthetic oligonucleotide
uacacaacuggccggguac

SEQ ID NO: 3193060 - RNA, 19 nt, Artificial Sequence
  Description of Artificial Sequence: Synthetic oligonucleotide
guugucugcaaacaaggca

SEQ ID NO: 3193061 - RNA, 19 nt, Artificial Sequence
  Description of Artificial Sequence: Synthetic oligonucleotide
aaacaaggcaugcugcaua

SEQ ID NO: 3193062 - RNA, 19 nt, Artificial Sequence
  Description of Artificial Sequence: Synthetic oligonucleotide
guaacuuggggaaguaucc

SEQ ID NO: 3193063 - RNA, 19 nt, Artificial Sequence
  Description of Artificial Sequence: Synthetic oligonucleotide
auacucuucacugggguag

SEQ ID NO: 3193064 - RNA, 19 nt, Artificial Sequence
  Description of Artificial Sequence: Synthetic oligonucleotide
aaaugguuccaaucuggaa

SEQ ID NO: 3193065 - RNA, 19 nt, Artificial Sequence
  Description of Artificial Sequence: Synthetic oligonucleotide
cauguaucaagcaaguugu

SEQ ID NO: 3193066 - RNA, 19 nt, Artificial Sequence
  Description of Artificial Sequence: Synthetic oligonucleotide
agcuugugcccuuccaugg

SEQ ID NO: 3193067 - RNA, 19 nt, Artificial Sequence
  Description of Artificial Sequence: Synthetic oligonucleotide
acuaguauucauccacacu

SEQ ID NO: 3193068 - RNA, 19 nt, Artificial Sequence
  Description of Artificial Sequence: Synthetic oligonucleotide
gucuugugguguuaugagg

SEQ ID NO: 3193069 - RNA, 19 nt, Artificial Sequence
  Description of Artificial Sequence: Synthetic oligonucleotide
aucuggaaauaguuugaag

SEQ ID NO: 3193070 - RNA, 19 nt, Artificial Sequence
  Description of Artificial Sequence: Synthetic oligonucleotide
aacaaggcaugcugcauau

SEQ ID NO: 3193071 - RNA, 19 nt, Artificial Sequence
  Description of Artificial Sequence: Synthetic oligonucleotide
aguaaauucccauagaaag

SEQ ID NO: 3193072 - RNA, 19 nt, Artificial Sequence
  Description of Artificial Sequence: Synthetic oligonucleotide
aaaguaaacuaccccacgc

SEQ ID NO: 3193073 - RNA, 19 nt, Artificial Sequence
  Description of Artificial Sequence: Synthetic oligonucleotide
aaaccaauaaggaugaaac

SEQ ID NO: 3193074 - RNA, 19 nt, Artificial Sequence
  Description of Artificial Sequence: Synthetic oligonucleotide
aacaacuugaauucuauug

SEQ ID NO: 3193075 - RNA, 19 nt, Artificial Sequence
  Description of Artificial Sequence: Synthetic oligonucleotide
aacgguaaggaguggaucc

SEQ ID NO: 3193076 - RNA, 19 nt, Artificial Sequence
  Description of Artificial Sequence: Synthetic oligonucleotide
auagaaaacgacuguaagc

SEQ ID NO: 3193077 - RNA, 19 nt, Artificial Sequence
  Description of Artificial Sequence: Synthetic oligonucleotide
uuuaaaacgguaaggagug

SEQ ID NO: 3193078 - RNA, 19 nt, Artificial Sequence
  Description of Artificial Sequence: Synthetic oligonucleotide
aauauguuagacauguacg

SEQ ID NO: 3193079 - RNA, 19 nt, Artificial Sequence
  Description of Artificial Sequence: Synthetic oligonucleotide
aacacaaugauuuauuaaa

SEQ ID NO: 3193080 - RNA, 19 nt, Artificial Sequence
  Description of Artificial Sequence: Synthetic oligonucleotide
uaaacaguuuauaugaaug

SEQ ID NO: 3193081 - RNA, 19 nt, Artificial Sequence
  Description of Artificial Sequence: Synthetic oligonucleotide
uuuguaaccauucauuaca

SEQ ID NO: 3193082 - RNA, 19 nt, Artificial Sequence
  Description of Artificial Sequence: Synthetic oligonucleotide
cauauuuagaaguaaauuc

SEQ ID NO: 3193083 - RNA, 19 nt, Artificial Sequence
  Description of Artificial Sequence: Synthetic oligonucleotide
uacagacaaaccaauaagg

SEQ ID NO: 3193084 - RNA, 19 nt, Artificial Sequence
  Description of Artificial Sequence: Synthetic oligonucleotide
ucaguuacaaguaaaugug

SEQ ID NO: 3193085 - RNA, 19 nt, Artificial Sequence
  Description of Artificial Sequence: Synthetic oligonucleotide
agaaaagacugauaagggc

SEQ ID NO: 3193086 - RNA, 19 nt, Artificial Sequence
  Description of Artificial Sequence: Synthetic oligonucleotide
agggcuguuaauuacauuc

SEQ ID NO: 3193087 - RNA, 19 nt, Artificial Sequence
  Description of Artificial Sequence: Synthetic oligonucleotide
uaaggaugaaacuagguca

SEQ ID NO: 3193088 - RNA, 19 nt, Artificial Sequence
  Description of Artificial Sequence: Synthetic oligonucleotide
aaacauaacccuuauuugu

SEQ ID NO: 3193089 - RNA, 19 nt, Artificial Sequence
  Description of Artificial Sequence: Synthetic oligonucleotide
aaaggcaaaguucagauuu

SEQ ID NO: 3193090 - RNA, 19 nt, Artificial Sequence
  Description of Artificial Sequence: Synthetic oligonucleotide
uaaacaacaacuugaauuc

SEQ ID NO: 3193091 - RNA, 19 nt, Artificial Sequence
  Description of Artificial Sequence: Synthetic oligonucleotide
aacaaaacauccuuuaaaa

SEQ ID NO: 3193092 - RNA, 19 nt, Artificial Sequence
  Description of Artificial Sequence: Synthetic oligonucleotide
guagguuucauagaaaacg

SEQ ID NO: 3193093 - RNA, 19 nt, Artificial Sequence
  Description of Artificial Sequence: Synthetic oligonucleotide
cauagguuggacuugaaag

SEQ ID NO: 3193094 - RNA, 19 nt, Artificial Sequence
  Description of Artificial Sequence: Synthetic oligonucleotide
cagauuuuaggaaagaaac

SEQ ID NO: 3193095 - RNA, 19 nt, Artificial Sequence
  Description of Artificial Sequence: Synthetic oligonucleotide
aaaaccccaguacacauag

SEQ ID NO: 3193096 - RNA, 19 nt, Artificial Sequence
  Description of Artificial Sequence: Synthetic oligonucleotide
uagaaaacgacuguaagcc

SEQ ID NO: 3193097 - RNA, 19 nt, Artificial Sequence
  Description of Artificial Sequence: Synthetic oligonucleotide
uuguuuuacaacuugcacc

SEQ ID NO: 3193098 - RNA, 19 nt, Artificial Sequence
  Description of Artificial Sequence: Synthetic oligonucleotide
uuacagacaaaccaauaag

SEQ ID NO: 3193099 - RNA, 19 nt, Artificial Sequence
  Description of Artificial Sequence: Synthetic oligonucleotide
uagaaaagacugauaaggg

SEQ ID NO: 3193100 - RNA, 19 nt, Artificial Sequence
  Description of Artificial Sequence: Synthetic oligonucleotide
auucauuacagacaaacca

SEQ ID NO: 3193101 - RNA, 19 nt, Artificial Sequence
  Description of Artificial Sequence: Synthetic oligonucleotide
uacacguuaaccaagcaga

SEQ ID NO: 3193102 - RNA, 19 nt, Artificial Sequence
  Description of Artificial Sequence: Synthetic oligonucleotide
uguuuuacaacuugcaccu

SEQ ID NO: 3193103 - RNA, 19 nt, Artificial Sequence
  Description of Artificial Sequence: Synthetic oligonucleotide
uguuaggguaaacauaacc

SEQ ID NO: 3193104 - RNA, 19 nt, Artificial Sequence
  Description of Artificial Sequence: Synthetic oligonucleotide
cuuguuacaaggagaaugg

SEQ ID NO: 3193105 - RNA, 19 nt, Artificial Sequence
  Description of Artificial Sequence: Synthetic oligonucleotide
auagguuggacuugaaagg

SEQ ID NO: 3193106 - RNA, 19 nt, Artificial Sequence
  Description of Artificial Sequence: Synthetic oligonucleotide
aaacugcuaaaucugaaga

SEQ ID NO: 3193107 - RNA, 19 nt, Artificial Sequence
  Description of Artificial Sequence: Synthetic oligonucleotide
aguaaacuaccccacgccc

SEQ ID NO: 3193108 - RNA, 19 nt, Artificial Sequence
  Description of Artificial Sequence: Synthetic oligonucleotide
aaauacacguuaaccaagc

SEQ ID NO: 3193109 - RNA, 19 nt, Artificial Sequence
  Description of Artificial Sequence: Synthetic oligonucleotide
ucaaaguacacaucaaaac

SEQ ID NO: 3193110 - RNA, 19 nt, Artificial Sequence
  Description of Artificial Sequence: Synthetic oligonucleotide
augcuuccaaauuucaggc

SEQ ID NO: 3193111 - RNA, 19 nt, Artificial Sequence
  Description of Artificial Sequence: Synthetic oligonucleotide
auuuguaaccauucauuac

SEQ ID NO: 3193112 - RNA, 19 nt, Artificial Sequence
  Description of Artificial Sequence: Synthetic oligonucleotide
uacacaucaaaacuaacaa

SEQ ID NO: 3193113 - RNA, 19 nt, Artificial Sequence
  Description of Artificial Sequence: Synthetic oligonucleotide
guaaccauucauuacagac

SEQ ID NO: 3193114 - RNA, 19 nt, Artificial Sequence
  Description of Artificial Sequence: Synthetic oligonucleotide
ugaagggcuacaaauacac

SEQ ID NO: 3193115 - RNA, 19 nt, Artificial Sequence
  Description of Artificial Sequence: Synthetic oligonucleotide
uuuaaaccugcucugaaaa

SEQ ID NO: 3193116 - RNA, 19 nt, Artificial Sequence
  Description of Artificial Sequence: Synthetic oligonucleotide
uauaugaaugagaacacau

SEQ ID NO: 3193117 - RNA, 19 nt, Artificial Sequence
  Description of Artificial Sequence: Synthetic oligonucleotide
aacuacacaguacauauuu

SEQ ID NO: 3193118 - RNA, 19 nt, Artificial Sequence
  Description of Artificial Sequence: Synthetic oligonucleotide
uaaauucccauagaaagug

SEQ ID NO: 3193119 - RNA, 19 nt, Artificial Sequence
  Description of Artificial Sequence: Synthetic oligonucleotide
gauggcgcuacauagguug

SEQ ID NO: 3193120 - RNA, 19 nt, Artificial Sequence
  Description of Artificial Sequence: Synthetic oligonucleotide
ucaaaacuaacaaaacauc

SEQ ID NO: 3193121 - RNA, 19 nt, Artificial Sequence
  Description of Artificial Sequence: Synthetic oligonucleotide
uuuguuuuacaacuugcac

SEQ ID NO: 3193122 - RNA, 19 nt, Artificial Sequence
  Description of Artificial Sequence: Synthetic oligonucleotide
auccaaguagguuucauag

SEQ ID NO: 3193123 - RNA, 19 nt, Artificial Sequence
  Description of Artificial Sequence: Synthetic oligonucleotide
aaguagguuucauagaaaa

SEQ ID NO: 3193124 - RNA, 19 nt, Artificial Sequence
  Description of Artificial Sequence: Synthetic oligonucleotide
guuaggguaaacauaaccc

SEQ ID NO: 3193125 - RNA, 19 nt, Artificial Sequence
  Description of Artificial Sequence: Synthetic oligonucleotide
aacaguuuauaugaaugag

SEQ ID NO: 3193126 - RNA, 19 nt, Artificial Sequence
  Description of Artificial Sequence: Synthetic oligonucleotide
agcaguuacauuuucaaau

SEQ ID NO: 3193127 - RNA, 19 nt, Artificial Sequence
  Description of Artificial Sequence: Synthetic oligonucleotide
uaagccagguaucaagucc

SEQ ID NO: 3193128 - RNA, 19 nt, Artificial Sequence
  Description of Artificial Sequence: Synthetic oligonucleotide
aaccaagcagaauacauau

SEQ ID NO: 3193129 - RNA, 19 nt, Artificial Sequence
  Description of Artificial Sequence: Synthetic oligonucleotide
uuaaccagcugucuugcag

SEQ ID NO: 3193130 - RNA, 19 nt, Artificial Sequence
  Description of Artificial Sequence: Synthetic oligonucleotide
aaccccaguacacauagcu

SEQ ID NO: 3193131 - RNA, 19 nt, Artificial Sequence
  Description of Artificial Sequence: Synthetic oligonucleotide
uaagcaaaccgcuuguuac

SEQ ID NO: 3193132 - RNA, 19 nt, Artificial Sequence
  Description of Artificial Sequence: Synthetic oligonucleotide
uguggaacuuucaagucug

SEQ ID NO: 3193133 - RNA, 19 nt, Artificial Sequence
  Description of Artificial Sequence: Synthetic oligonucleotide
auuacagacaaaccaauaa

SEQ ID NO: 3193134 - RNA, 19 nt, Artificial Sequence
  Description of Artificial Sequence: Synthetic oligonucleotide
uacaacuugcaccuaaaac

SEQ ID NO: 3193135 - RNA, 19 nt, Artificial Sequence
  Description of Artificial Sequence: Synthetic oligonucleotide
aauucccauagaaagugac

SEQ ID NO: 3193136 - RNA, 19 nt, Artificial Sequence
  Description of Artificial Sequence: Synthetic oligonucleotide
uuaaccaagcagaauacau

SEQ ID NO: 3193137 - RNA, 19 nt, Artificial Sequence
  Description of Artificial Sequence: Synthetic oligonucleotide
uuuuaggaaagaaacguuu

SEQ ID NO: 3193138 - RNA, 19 nt, Artificial Sequence
  Description of Artificial Sequence: Synthetic oligonucleotide
acacaugcuuaacacaaac

SEQ ID NO: 3193139 - RNA, 19 nt, Artificial Sequence
  Description of Artificial Sequence: Synthetic oligonucleotide
uuacaaguaaauguggaac

SEQ ID NO: 3193140 - RNA, 19 nt, Artificial Sequence
  Description of Artificial Sequence: Synthetic oligonucleotide
ugaauucuauugcaugaag

SEQ ID NO: 3193141 - RNA, 19 nt, Artificial Sequence
  Description of Artificial Sequence: Synthetic oligonucleotide
auacacguuaaccaagcag

SEQ ID NO: 3193142 - RNA, 19 nt, Artificial Sequence
  Description of Artificial Sequence: Synthetic oligonucleotide
cugucuugcagcuauacug

SEQ ID NO: 3193143 - RNA, 19 nt, Artificial Sequence
  Description of Artificial Sequence: Synthetic oligonucleotide
uuuagaaguaaauucccau

SEQ ID NO: 3193144 - RNA, 19 nt, Artificial Sequence
  Description of Artificial Sequence: Synthetic oligonucleotide
uacaaguaaauguggaacu

SEQ ID NO: 3193145 - RNA, 19 nt, Artificial Sequence
  Description of Artificial Sequence: Synthetic oligonucleotide
gacauguacggucaaacac

SEQ ID NO: 3193146 - RNA, 19 nt, Artificial Sequence
  Description of Artificial Sequence: Synthetic oligonucleotide
aaguaaauguggaacuuuc

SEQ ID NO: 3193147 - RNA, 19 nt, Artificial Sequence
  Description of Artificial Sequence: Synthetic oligonucleotide
aaguucagauuuuaggaaa

SEQ ID NO: 3193148 - RNA, 19 nt, Artificial Sequence
  Description of Artificial Sequence: Synthetic oligonucleotide
agcaguuuggggcuacugc

SEQ ID NO: 3193149 - RNA, 19 nt, Artificial Sequence
  Description of Artificial Sequence: Synthetic oligonucleotide
ugagaacacaugcuuaaca

SEQ ID NO: 3193150 - RNA, 19 nt, Artificial Sequence
  Description of Artificial Sequence: Synthetic oligonucleotide
gagaacacaugcuuaacac

SEQ ID NO: 3193151 - RNA, 19 nt, Artificial Sequence
  Description of Artificial Sequence: Synthetic oligonucleotide
aguuuauaugaaugagaac

SEQ ID NO: 3193152 - RNA, 19 nt, Artificial Sequence
  Description of Artificial Sequence: Synthetic oligonucleotide
uuaguguuaggguaaacau

SEQ ID NO: 3193153 - RNA, 19 nt, Artificial Sequence
  Description of Artificial Sequence: Synthetic oligonucleotide
ugucuugcagcuauacugc

SEQ ID NO: 3193154 - RNA, 19 nt, Artificial Sequence
  Description of Artificial Sequence: Synthetic oligonucleotide
acuugaauucuauugcaug

SEQ ID NO: 3193155 - RNA, 19 nt, Artificial Sequence
  Description of Artificial Sequence: Synthetic oligonucleotide
augauaagcaaaccgcuug

SEQ ID NO: 3193156 - RNA, 19 nt, Artificial Sequence
  Description of Artificial Sequence: Synthetic oligonucleotide
uguuacaaggagaauggaa

SEQ ID NO: 3193157 - RNA, 19 nt, Artificial Sequence
  Description of Artificial Sequence: Synthetic oligonucleotide
uaaggaguggauccuagga

SEQ ID NO: 3193158 - RNA, 19 nt, Artificial Sequence
  Description of Artificial Sequence: Synthetic oligonucleotide
uauuuguaaccauucauua

SEQ ID NO: 3193159 - RNA, 19 nt, Artificial Sequence
  Description of Artificial Sequence: Synthetic oligonucleotide
agcuaugcauagcaguuac

SEQ ID NO: 3193160 - RNA, 19 nt, Artificial Sequence
  Description of Artificial Sequence: Synthetic oligonucleotide
uccuuuaaaacgguaagga

SEQ ID NO: 3193161 - RNA, 19 nt, Artificial Sequence
  Description of Artificial Sequence: Synthetic oligonucleotide
uucaagucugcacagacuu

SEQ ID NO: 3193162 - RNA, 19 nt, Artificial Sequence
  Description of Artificial Sequence: Synthetic oligonucleotide
uguuaauuacauuccugug

SEQ ID NO: 3193163 - RNA, 19 nt, Artificial Sequence
  Description of Artificial Sequence: Synthetic oligonucleotide
gauaagggcuguuaauuac

SEQ ID NO: 3193164 - RNA, 19 nt, Artificial Sequence
  Description of Artificial Sequence: Synthetic oligonucleotide
aacuuucaagucugcacag

SEQ ID NO: 3193165 - RNA, 19 nt, Artificial Sequence
  Description of Artificial Sequence: Synthetic oligonucleotide
uuguaaccauucauuacag

SEQ ID NO: 3193166 - RNA, 19 nt, Artificial Sequence
  Description of Artificial Sequence: Synthetic oligonucleotide
uacauaugcuuccaaauuu

SEQ ID NO: 3193167 - RNA, 19 nt, Artificial Sequence
  Description of Artificial Sequence: Synthetic oligonucleotide
caaacugcuaaaucugaag

SEQ ID NO: 3193168 - RNA, 19 nt, Artificial Sequence
  Description of Artificial Sequence: Synthetic oligonucleotide
uacacaguacauauuuaga

SEQ ID NO: 3193169 - RNA, 19 nt, Artificial Sequence
  Description of Artificial Sequence: Synthetic oligonucleotide
guaucaaguccuuacaaca

SEQ ID NO: 3193170 - RNA, 19 nt, Artificial Sequence
  Description of Artificial Sequence: Synthetic oligonucleotide
caugucaagaugauaagca

SEQ ID NO: 3193171 - RNA, 19 nt, Artificial Sequence
  Description of Artificial Sequence: Synthetic oligonucleotide
uuuauaaacaccuuuagug

SEQ ID NO: 3193172 - RNA, 19 nt, Artificial Sequence
  Description of Artificial Sequence: Synthetic oligonucleotide
uuaaaauuuauaaacaccu

SEQ ID NO: 3193173 - RNA, 19 nt, Artificial Sequence
  Description of Artificial Sequence: Synthetic oligonucleotide
auugcuaccucuuacauac

SEQ ID NO: 3193174 - RNA, 19 nt, Artificial Sequence
  Description of Artificial Sequence: Synthetic oligonucleotide
uuuauucucaaaauugagg

SEQ ID NO: 3193175 - RNA, 19 nt, Artificial Sequence
  Description of Artificial Sequence: Synthetic oligonucleotide
uccauuaaaauuuauaaac

SEQ ID NO: 3193176 - RNA, 19 nt, Artificial Sequence
  Description of Artificial Sequence: Synthetic oligonucleotide
uuauucucaaaauugaggc

SEQ ID NO: 3193177 - RNA, 19 nt, Artificial Sequence
  Description of Artificial Sequence: Synthetic oligonucleotide
auuaaaauuuauaaacacc

SEQ ID NO: 3193178 - RNA, 19 nt, Artificial Sequence
  Description of Artificial Sequence: Synthetic oligonucleotide
aauuuauaaacaccuuuag

SEQ ID NO: 3193179 - RNA, 19 nt, Artificial Sequence
  Description of Artificial Sequence: Synthetic oligonucleotide
aaacauuucccaucuggcc

SEQ ID NO: 3193180 - RNA, 19 nt, Artificial Sequence
  Description of Artificial Sequence: Synthetic oligonucleotide
aaauugaggccacaaguac

SEQ ID NO: 3193181 - RNA, 19 nt, Artificial Sequence
  Description of Artificial Sequence: Synthetic oligonucleotide
ugaaagaaccauaucuugg

SEQ ID NO: 3193182 - RNA, 19 nt, Artificial Sequence
  Description of Artificial Sequence: Synthetic oligonucleotide
uagugaaagaaccauaucu

SEQ ID NO: 3193183 - RNA, 19 nt, Artificial Sequence
  Description of Artificial Sequence: Synthetic oligonucleotide
aaaauuuauaaacaccuuu

SEQ ID NO: 3193184 - RNA, 19 nt, Artificial Sequence
  Description of Artificial Sequence: Synthetic oligonucleotide
gacagaguagacuucaucc

SEQ ID NO: 3193185 - RNA, 19 nt, Artificial Sequence
  Description of Artificial Sequence: Synthetic oligonucleotide
acaaguacaaacauuuccc

SEQ ID NO: 3193186 - RNA, 19 nt, Artificial Sequence
  Description of Artificial Sequence: Synthetic oligonucleotide
aguacaaacauuucccauc

SEQ ID NO: 3193187 - RNA, 19 nt, Artificial Sequence
  Description of Artificial Sequence: Synthetic oligonucleotide
uuauaaacaccuuuaguga

SEQ ID NO: 3193188 - RNA, 19 nt, Artificial Sequence
  Description of Artificial Sequence: Synthetic oligonucleotide
acaaacauuucccaucugg

SEQ ID NO: 3193189 - RNA, 19 nt, Artificial Sequence
  Description of Artificial Sequence: Synthetic oligonucleotide
cauuaaaauuuauaaacac

SEQ ID NO: 3193190 - RNA, 19 nt, Artificial Sequence
  Description of Artificial Sequence: Synthetic oligonucleotide
aguccagaaagccacuucc

SEQ ID NO: 3193191 - RNA, 19 nt, Artificial Sequence
  Description of Artificial Sequence: Synthetic oligonucleotide
gauccauuaaaauuuauaa

SEQ ID NO: 3193192 - RNA, 19 nt, Artificial Sequence
  Description of Artificial Sequence: Synthetic oligonucleotide
gaaagaaccauaucuuggc

SEQ ID NO: 3193193 - RNA, 19 nt, Artificial Sequence
  Description of Artificial Sequence: Synthetic oligonucleotide
gacaaaauuguccaggguc

SEQ ID NO: 3193194 - RNA, 19 nt, Artificial Sequence
  Description of Artificial Sequence: Synthetic oligonucleotide
aaauuguccagggucuucc

SEQ ID NO: 3193195 - RNA, 19 nt, Artificial Sequence
  Description of Artificial Sequence: Synthetic oligonucleotide
uuuagugaaagaaccauau

SEQ ID NO: 3193196 - RNA, 19 nt, Artificial Sequence
  Description of Artificial Sequence: Synthetic oligonucleotide
uguuucuuagccaggaucu

SEQ ID NO: 3193197 - RNA, 19 nt, Artificial Sequence
  Description of Artificial Sequence: Synthetic oligonucleotide
aacauuucccaucuggccu

SEQ ID NO: 3193198 - RNA, 19 nt, Artificial Sequence
  Description of Artificial Sequence: Synthetic oligonucleotide
acagaguagacuucauccc

SEQ ID NO: 3193199 - RNA, 19 nt, Artificial Sequence
  Description of Artificial Sequence: Synthetic oligonucleotide
aggaucucaguccagaaag

SEQ ID NO: 3193200 - RNA, 19 nt, Artificial Sequence
  Description of Artificial Sequence: Synthetic oligonucleotide
ucugacaaaauuguccagg

SEQ ID NO: 3193201 - RNA, 19 nt, Artificial Sequence
  Description of Artificial Sequence: Synthetic oligonucleotide
ucuuccaugauccauuaaa

SEQ ID NO: 3193202 - RNA, 19 nt, Artificial Sequence
  Description of Artificial Sequence: Synthetic oligonucleotide
uuuugaguggcucauugcu

SEQ ID NO: 3193203 - RNA, 19 nt, Artificial Sequence
  Description of Artificial Sequence: Synthetic oligonucleotide
ucaaaauugaggccacaag

SEQ ID NO: 3193204 - RNA, 19 nt, Artificial Sequence
  Description of Artificial Sequence: Synthetic oligonucleotide
cucucugacaaaauugucc

SEQ ID NO: 3193205 - RNA, 19 nt, Artificial Sequence
  Description of Artificial Sequence: Synthetic oligonucleotide
cacaaguacaaacauuucc

SEQ ID NO: 3193206 - RNA, 19 nt, Artificial Sequence
  Description of Artificial Sequence: Synthetic oligonucleotide
ucucugacaaaauugucca

SEQ ID NO: 3193207 - RNA, 19 nt, Artificial Sequence
  Description of Artificial Sequence: Synthetic oligonucleotide
auaucuaggacuccaucuc

SEQ ID NO: 3193208 - RNA, 19 nt, Artificial Sequence
  Description of Artificial Sequence: Synthetic oligonucleotide
acauuuauucucaaaauug

SEQ ID NO: 3193209 - RNA, 19 nt, Artificial Sequence
  Description of Artificial Sequence: Synthetic oligonucleotide
uccccuuucagucucuggg

SEQ ID NO: 3193210 - RNA, 19 nt, Artificial Sequence
  Description of Artificial Sequence: Synthetic oligonucleotide
auuuugaguggcucauugc

SEQ ID NO: 3193211 - RNA, 19 nt, Artificial Sequence
  Description of Artificial Sequence: Synthetic oligonucleotide
auuuauaaacaccuuuagu

SEQ ID NO: 3193212 - RNA, 19 nt, Artificial Sequence
  Description of Artificial Sequence: Synthetic oligonucleotide
acuuccuccccuuucaguc

SEQ ID NO: 3193213 - RNA, 19 nt, Artificial Sequence
  Description of Artificial Sequence: Synthetic oligonucleotide
agaaccuugcauucacagc

SEQ ID NO: 3193214 - RNA, 19 nt, Artificial Sequence
  Description of Artificial Sequence: Synthetic oligonucleotide
uccaucucuuaaaaugggg

SEQ ID NO: 3193215 - RNA, 19 nt, Artificial Sequence
  Description of Artificial Sequence: Synthetic oligonucleotide
uuagccaggaucucagucc

SEQ ID NO: 3193216 - RNA, 19 nt, Artificial Sequence
  Description of Artificial Sequence: Synthetic oligonucleotide
aacaccuuuagugaaagaa

SEQ ID NO: 3193217 - RNA, 19 nt, Artificial Sequence
  Description of Artificial Sequence: Synthetic oligonucleotide
aucaucaucuugcugaggu

SEQ ID NO: 3193218 - RNA, 19 nt, Artificial Sequence
  Description of Artificial Sequence: Synthetic oligonucleotide
caccuuuagugaaagaacc

SEQ ID NO: 3193219 - RNA, 19 nt, Artificial Sequence
  Description of Artificial Sequence: Synthetic oligonucleotide
gauuuugaguggcucauug

SEQ ID NO: 3193220 - RNA, 19 nt, Artificial Sequence
  Description of Artificial Sequence: Synthetic oligonucleotide
cuuggguuguuucuuagcc

SEQ ID NO: 3193221 - RNA, 19 nt, Artificial Sequence
  Description of Artificial Sequence: Synthetic oligonucleotide
cauaucuuggcuucucugc

SEQ ID NO: 3193222 - RNA, 19 nt, Artificial Sequence
  Description of Artificial Sequence: Synthetic oligonucleotide
aaauuuauaaacaccuuua

SEQ ID NO: 3193223 - RNA, 19 nt, Artificial Sequence
  Description of Artificial Sequence: Synthetic oligonucleotide
ucugcucugagguuggcag

SEQ ID NO: 3193224 - RNA, 19 nt, Artificial Sequence
  Description of Artificial Sequence: Synthetic oligonucleotide
uauaaacaccuuuagugaa

SEQ ID NO: 3193225 - RNA, 19 nt, Artificial Sequence
  Description of Artificial Sequence: Synthetic oligonucleotide
uggguuguuucuuagccag

SEQ ID NO: 3193226 - RNA, 19 nt, Artificial Sequence
  Description of Artificial Sequence: Synthetic oligonucleotide
uccaugauccauuaaaauu

SEQ ID NO: 3193227 - RNA, 19 nt, Artificial Sequence
  Description of Artificial Sequence: Synthetic oligonucleotide
uauucucaaaauugaggcc

SEQ ID NO: 3193228 - RNA, 19 nt, Artificial Sequence
  Description of Artificial Sequence: Synthetic oligonucleotide
caaacauuucccaucuggc

SEQ ID NO: 3193229 - RNA, 19 nt, Artificial Sequence
  Description of Artificial Sequence: Synthetic oligonucleotide
ucucaguccagaaagccac

SEQ ID NO: 3193230 - RNA, 19 nt, Artificial Sequence
  Description of Artificial Sequence: Synthetic oligonucleotide
agugguggcaccgaucugc

SEQ ID NO: 3193231 - RNA, 19 nt, Artificial Sequence
  Description of Artificial Sequence: Synthetic oligonucleotide
ugauccauuaaaauuuaua

SEQ ID NO: 3193232 - RNA, 19 nt, Artificial Sequence
  Description of Artificial Sequence: Synthetic oligonucleotide
ugagugguggcaccgaucu

SEQ ID NO: 3193233 - RNA, 19 nt, Artificial Sequence
  Description of Artificial Sequence: Synthetic oligonucleotide
auucucaaaauugaggcca

SEQ ID NO: 3193234 - RNA, 19 nt, Artificial Sequence
  Description of Artificial Sequence: Synthetic oligonucleotide
cugacaaaauuguccaggg

SEQ ID NO: 3193235 - RNA, 19 nt, Artificial Sequence
  Description of Artificial Sequence: Synthetic oligonucleotide
aauccccaaggauaucuag

SEQ ID NO: 3193236 - RNA, 19 nt, Artificial Sequence
  Description of Artificial Sequence: Synthetic oligonucleotide
aaagaaccauaucuuggcu

SEQ ID NO: 3193237 - RNA, 19 nt, Artificial Sequence
  Description of Artificial Sequence: Synthetic oligonucleotide
caucucucugacaaaauug

SEQ ID NO: 3193238 - RNA, 19 nt, Artificial Sequence
  Description of Artificial Sequence: Synthetic oligonucleotide
uuaggguucccauuccgag

SEQ ID NO: 3193239 - RNA, 19 nt, Artificial Sequence
  Description of Artificial Sequence: Synthetic oligonucleotide
ucugauuuugaguggcuca

SEQ ID NO: 3193240 - RNA, 19 nt, Artificial Sequence
  Description of Artificial Sequence: Synthetic oligonucleotide
uuguuucuuagccaggauc

SEQ ID NO: 3193241 - RNA, 19 nt, Artificial Sequence
  Description of Artificial Sequence: Synthetic oligonucleotide
accguuaggguucccauuc

SEQ ID NO: 3193242 - RNA, 19 nt, Artificial Sequence
  Description of Artificial Sequence: Synthetic oligonucleotide
uucuuagccaggaucucag

SEQ ID NO: 3193243 - RNA, 19 nt, Artificial Sequence
  Description of Artificial Sequence: Synthetic oligonucleotide
cauuuauucucaaaauuga

SEQ ID NO: 3193244 - RNA, 19 nt, Artificial Sequence
  Description of Artificial Sequence: Synthetic oligonucleotide
uugcauucacagcucauug

SEQ ID NO: 3193245 - RNA, 19 nt, Artificial Sequence
  Description of Artificial Sequence: Synthetic oligonucleotide
aucucugauuuugaguggc

SEQ ID NO: 3193246 - RNA, 19 nt, Artificial Sequence
  Description of Artificial Sequence: Synthetic oligonucleotide
caguccuucaccguuaggg

SEQ ID NO: 3193247 - RNA, 19 nt, Artificial Sequence
  Description of Artificial Sequence: Synthetic oligonucleotide
uaaacaccuuuagugaaag

SEQ ID NO: 3193248 - RNA, 19 nt, Artificial Sequence
  Description of Artificial Sequence: Synthetic oligonucleotide
gugaaagaaccauaucuug

SEQ ID NO: 3193249 - RNA, 19 nt, Artificial Sequence
  Description of Artificial Sequence: Synthetic oligonucleotide
auccauuaaaauuuauaaa

SEQ ID NO: 3193250 - RNA, 19 nt, Artificial Sequence
  Description of Artificial Sequence: Synthetic oligonucleotide
aaguacaaacauuucccau

SEQ ID NO: 3193251 - RNA, 19 nt, Artificial Sequence
  Description of Artificial Sequence: Synthetic oligonucleotide
uaaaauuuauaaacaccuu

SEQ ID NO: 3193252 - RNA, 19 nt, Artificial Sequence
  Description of Artificial Sequence: Synthetic oligonucleotide
gaaccuugcauucacagcu

SEQ ID NO: 3193253 - RNA, 19 nt, Artificial Sequence
  Description of Artificial Sequence: Synthetic oligonucleotide
accucuuacauacuucuca

SEQ ID NO: 3193254 - RNA, 19 nt, Artificial Sequence
  Description of Artificial Sequence: Synthetic oligonucleotide
auuuauucucaaaauugag

SEQ ID NO: 3193255 - RNA, 19 nt, Artificial Sequence
  Description of Artificial Sequence: Synthetic oligonucleotide
aaaauugaggccacaagua

SEQ ID NO: 3193256 - RNA, 19 nt, Artificial Sequence
  Description of Artificial Sequence: Synthetic oligonucleotide
aagaaccauaucuuggcuu

SEQ ID NO: 3193257 - RNA, 19 nt, Artificial Sequence
  Description of Artificial Sequence: Synthetic oligonucleotide
auucacagcucauugugcu

SEQ ID NO: 3193258 - RNA, 19 nt, Artificial Sequence
  Description of Artificial Sequence: Synthetic oligonucleotide
acaccuuuagugaaagaac

SEQ ID NO: 3193259 - RNA, 19 nt, Artificial Sequence
  Description of Artificial Sequence: Synthetic oligonucleotide
agacagaguagacuucauc

SEQ ID NO: 3193260 - RNA, 19 nt, Artificial Sequence
  Description of Artificial Sequence: Synthetic oligonucleotide
ugugcucuggcuuggguug

SEQ ID NO: 3193261 - RNA, 19 nt, Artificial Sequence
  Description of Artificial Sequence: Synthetic oligonucleotide
cagaaagccacuuccuccc

SEQ ID NO: 3193262 - RNA, 19 nt, Artificial Sequence
  Description of Artificial Sequence: Synthetic oligonucleotide
gauaucuaggacuccaucu

SEQ ID NO: 3193263 - RNA, 19 nt, Artificial Sequence
  Description of Artificial Sequence: Synthetic oligonucleotide
uugaguggcucauugcuac

SEQ ID NO: 3193264 - RNA, 19 nt, Artificial Sequence
  Description of Artificial Sequence: Synthetic oligonucleotide
ggcuccaucucuuaaaaug

SEQ ID NO: 3193265 - RNA, 19 nt, Artificial Sequence
  Description of Artificial Sequence: Synthetic oligonucleotide
uggucuccucuucagaggc

SEQ ID NO: 3193266 - RNA, 19 nt, Artificial Sequence
  Description of Artificial Sequence: Synthetic oligonucleotide
aaggauaucuaggacucca

SEQ ID NO: 3193267 - RNA, 19 nt, Artificial Sequence
  Description of Artificial Sequence: Synthetic oligonucleotide
ugaggccacaaguacaaac

SEQ ID NO: 3193268 - RNA, 19 nt, Artificial Sequence
  Description of Artificial Sequence: Synthetic oligonucleotide
aauugaggccacaaguaca

SEQ ID NO: 3193269 - RNA, 19 nt, Artificial Sequence
  Description of Artificial Sequence: Synthetic oligonucleotide
ucaucaucaucuugcugag

SEQ ID NO: 3193270 - RNA, 19 nt, Artificial Sequence
  Description of Artificial Sequence: Synthetic oligonucleotide
ccaucucugauuuugagug

SEQ ID NO: 3193271 - RNA, 19 nt, Artificial Sequence
  Description of Artificial Sequence: Synthetic oligonucleotide
auagauugagucuugaugu

SEQ ID NO: 3193272 - RNA, 19 nt, Artificial Sequence
  Description of Artificial Sequence: Synthetic oligonucleotide
cuuguuuccccauugagcc

SEQ ID NO: 3193273 - RNA, 19 nt, Artificial Sequence
  Description of Artificial Sequence: Synthetic oligonucleotide
ugaagaagggccuuugggg

SEQ ID NO: 3193274 - RNA, 19 nt, Artificial Sequence
  Description of Artificial Sequence: Synthetic oligonucleotide
uuucuguaccuccugaggg

SEQ ID NO: 3193275 - RNA, 19 nt, Artificial Sequence
  Description of Artificial Sequence: Synthetic oligonucleotide
agauuuuccuuucggaugg

SEQ ID NO: 3193276 - RNA, 19 nt, Artificial Sequence
  Description of Artificial Sequence: Synthetic oligonucleotide
cuugcugauccauagauug

SEQ ID NO: 3193277 - RNA, 19 nt, Artificial Sequence
  Description of Artificial Sequence: Synthetic oligonucleotide
ucugcauccagggacaugg

SEQ ID NO: 3193278 - RNA, 19 nt, Artificial Sequence
  Description of Artificial Sequence: Synthetic oligonucleotide
uugaagaagggccuuuggg

SEQ ID NO: 3193279 - RNA, 19 nt, Artificial Sequence
  Description of Artificial Sequence: Synthetic oligonucleotide
uuuccuuucggaugguugg

SEQ ID NO: 3193280 - RNA, 19 nt, Artificial Sequence
  Description of Artificial Sequence: Synthetic oligonucleotide
uggcuauugaagaagggcc

SEQ ID NO: 3193281 - RNA, 19 nt, Artificial Sequence
  Description of Artificial Sequence: Synthetic oligonucleotide
cauagauugagucuugaug

SEQ ID NO: 3193282 - RNA, 19 nt, Artificial Sequence
  Description of Artificial Sequence: Synthetic oligonucleotide
aaauccugggucuugcuga

SEQ ID NO: 3193283 - RNA, 19 nt, Artificial Sequence
  Description of Artificial Sequence: Synthetic oligonucleotide
uccuucucaaaagaggugg

SEQ ID NO: 3193284 - RNA, 19 nt, Artificial Sequence
  Description of Artificial Sequence: Synthetic oligonucleotide
acauggucgacuuguuucc

SEQ ID NO: 3193285 - RNA, 19 nt, Artificial Sequence
  Description of Artificial Sequence: Synthetic oligonucleotide
aaaauccugggucuugcug

SEQ ID NO: 3193286 - RNA, 19 nt, Artificial Sequence
  Description of Artificial Sequence: Synthetic oligonucleotide
gagucuugaugucacaacc

SEQ ID NO: 3193287 - RNA, 19 nt, Artificial Sequence
  Description of Artificial Sequence: Synthetic oligonucleotide
uuuuccuuucggaugguug

SEQ ID NO: 3193288 - RNA, 19 nt, Artificial Sequence
  Description of Artificial Sequence: Synthetic oligonucleotide
acuuguuuccccauugagc

SEQ ID NO: 3193289 - RNA, 19 nt, Artificial Sequence
  Description of Artificial Sequence: Synthetic oligonucleotide
accagacuggcugagaggc

SEQ ID NO: 3193290 - RNA, 19 nt, Artificial Sequence
  Description of Artificial Sequence: Synthetic oligonucleotide
aaugggaagcaagagucag

SEQ ID NO: 3193291 - RNA, 19 nt, Artificial Sequence
  Description of Artificial Sequence: Synthetic oligonucleotide
cuggcugagaggcagaaag

SEQ ID NO: 3193292 - RNA, 19 nt, Artificial Sequence
  Description of Artificial Sequence: Synthetic oligonucleotide
ugggaagcaagagucaggg

SEQ ID NO: 3193293 - RNA, 19 nt, Artificial Sequence
  Description of Artificial Sequence: Synthetic oligonucleotide
ugauccauagauugagucu

SEQ ID NO: 3193294 - RNA, 19 nt, Artificial Sequence
  Description of Artificial Sequence: Synthetic oligonucleotide
ugaugucucuuucuguacc

SEQ ID NO: 3193295 - RNA, 19 nt, Artificial Sequence
  Description of Artificial Sequence: Synthetic oligonucleotide
gacauggucgacuuguuuc

SEQ ID NO: 3193296 - RNA, 19 nt, Artificial Sequence
  Description of Artificial Sequence: Synthetic oligonucleotide
cuugaugucacaaccccug

SEQ ID NO: 3193297 - RNA, 19 nt, Artificial Sequence
  Description of Artificial Sequence: Synthetic oligonucleotide
cuggucuccaaaauccugg

SEQ ID NO: 3193298 - RNA, 19 nt, Artificial Sequence
  Description of Artificial Sequence: Synthetic oligonucleotide
ugggguacaggucugcagc

SEQ ID NO: 3193299 - RNA, 19 nt, Artificial Sequence
  Description of Artificial Sequence: Synthetic oligonucleotide
ugaccagacuggcugagag

SEQ ID NO: 3193300 - RNA, 19 nt, Artificial Sequence
  Description of Artificial Sequence: Synthetic oligonucleotide
aaagggaaugggaagcaag

SEQ ID NO: 3193301 - RNA, 19 nt, Artificial Sequence
  Description of Artificial Sequence: Synthetic oligonucleotide
ugacugaugucucuuucug

SEQ ID NO: 3193302 - RNA, 19 nt, Artificial Sequence
  Description of Artificial Sequence: Synthetic oligonucleotide
uccugggucuugcugaucc

SEQ ID NO: 3193303 - RNA, 19 nt, Artificial Sequence
  Description of Artificial Sequence: Synthetic oligonucleotide
auugaagaagggccuuugg

SEQ ID NO: 3193304 - RNA, 19 nt, Artificial Sequence
  Description of Artificial Sequence: Synthetic oligonucleotide
cuuucuguaccuccugagg

SEQ ID NO: 3193305 - RNA, 19 nt, Artificial Sequence
  Description of Artificial Sequence: Synthetic oligonucleotide
gaugucacaaccccugaca

SEQ ID NO: 3193306 - RNA, 19 nt, Artificial Sequence
  Description of Artificial Sequence: Synthetic oligonucleotide
cagauuuuccuuucggaug

SEQ ID NO: 3193307 - RNA, 19 nt, Artificial Sequence
  Description of Artificial Sequence: Synthetic oligonucleotide
uucugugcgguucuggccu

SEQ ID NO: 3193308 - RNA, 19 nt, Artificial Sequence
  Description of Artificial Sequence: Synthetic oligonucleotide
ucuuucuguaccuccugag

SEQ ID NO: 3193309 - RNA, 19 nt, Artificial Sequence
  Description of Artificial Sequence: Synthetic oligonucleotide
ugcagcucuguccuggcag

SEQ ID NO: 3193310 - RNA, 19 nt, Artificial Sequence
  Description of Artificial Sequence: Synthetic oligonucleotide
ucuccaaaauccugggucu

SEQ ID NO: 3193311 - RNA, 19 nt, Artificial Sequence
  Description of Artificial Sequence: Synthetic oligonucleotide
gaugguugguucugugcgg

SEQ ID NO: 3193312 - RNA, 19 nt, Artificial Sequence
  Description of Artificial Sequence: Synthetic oligonucleotide
agucuugaugucacaaccc

SEQ ID NO: 3193313 - RNA, 19 nt, Artificial Sequence
  Description of Artificial Sequence: Synthetic oligonucleotide
gacuuguuuccccauugag

SEQ ID NO: 3193314 - RNA, 19 nt, Artificial Sequence
  Description of Artificial Sequence: Synthetic oligonucleotide
uucucaaaagagguggcgc

SEQ ID NO: 3193315 - RNA, 19 nt, Artificial Sequence
  Description of Artificial Sequence: Synthetic oligonucleotide
ugcugauccauagauugag

SEQ ID NO: 3193316 - RNA, 19 nt, Artificial Sequence
  Description of Artificial Sequence: Synthetic oligonucleotide
ggaugguugguucugugcg

SEQ ID NO: 3193317 - RNA, 19 nt, Artificial Sequence
  Description of Artificial Sequence: Synthetic oligonucleotide
ucgcagauuuuccuuucgg

SEQ ID NO: 3193318 - RNA, 19 nt, Artificial Sequence
  Description of Artificial Sequence: Synthetic oligonucleotide
gucuccaaaauccuggguc

SEQ ID NO: 3193319 - RNA, 19 nt, Artificial Sequence
  Description of Artificial Sequence: Synthetic oligonucleotide
ucucaaaagagguggcgcu

SEQ ID NO: 3193320 - RNA, 19 nt, Artificial Sequence
  Description of Artificial Sequence: Synthetic oligonucleotide
augucacaaccccugacag

SEQ ID NO: 3193321 - RNA, 19 nt, Artificial Sequence
  Description of Artificial Sequence: Synthetic oligonucleotide
cugauccauagauugaguc

SEQ ID NO: 3193322 - RNA, 19 nt, Artificial Sequence
  Description of Artificial Sequence: Synthetic oligonucleotide
cuggcuauugaagaagggc

SEQ ID NO: 3193323 - RNA, 19 nt, Artificial Sequence
  Description of Artificial Sequence: Synthetic oligonucleotide
ugucucuuucuguaccucc

SEQ ID NO: 3193324 - RNA, 19 nt, Artificial Sequence
  Description of Artificial Sequence: Synthetic oligonucleotide
ucgacuuguuuccccauug

SEQ ID NO: 3193325 - RNA, 19 nt, Artificial Sequence
  Description of Artificial Sequence: Synthetic oligonucleotide
gucuugaugucacaacccc

SEQ ID NO: 3193326 - RNA, 19 nt, Artificial Sequence
  Description of Artificial Sequence: Synthetic oligonucleotide
cacaccucugcauccaggg

SEQ ID NO: 3193327 - RNA, 19 nt, Artificial Sequence
  Description of Artificial Sequence: Synthetic oligonucleotide
aagcaagagucaggggugc

SEQ ID NO: 3193328 - RNA, 19 nt, Artificial Sequence
  Description of Artificial Sequence: Synthetic oligonucleotide
auggucgacuuguuucccc

SEQ ID NO: 3193329 - RNA, 19 nt, Artificial Sequence
  Description of Artificial Sequence: Synthetic oligonucleotide
uucuguaccuccugagggc

SEQ ID NO: 3193330 - RNA, 19 nt, Artificial Sequence
  Description of Artificial Sequence: Synthetic oligonucleotide
acugaugucucuuucugua

SEQ ID NO: 3193331 - RNA, 19 nt, Artificial Sequence
  Description of Artificial Sequence: Synthetic oligonucleotide
ugcgguucuggccugccag

SEQ ID NO: 3193332 - RNA, 19 nt, Artificial Sequence
  Description of Artificial Sequence: Synthetic oligonucleotide
ugagucuugaugucacaac

SEQ ID NO: 3193333 - RNA, 19 nt, Artificial Sequence
  Description of Artificial Sequence: Synthetic oligonucleotide
cagaaagggaaugggaagc

SEQ ID NO: 3193334 - RNA, 19 nt, Artificial Sequence
  Description of Artificial Sequence: Synthetic oligonucleotide
gaagcaagagucaggggug

SEQ ID NO: 3193335 - RNA, 19 nt, Artificial Sequence
  Description of Artificial Sequence: Synthetic oligonucleotide
cuugucacaccucugcauc

SEQ ID NO: 3193336 - RNA, 19 nt, Artificial Sequence
  Description of Artificial Sequence: Synthetic oligonucleotide
ucuugaugucacaaccccu

SEQ ID NO: 3193337 - RNA, 19 nt, Artificial Sequence
  Description of Artificial Sequence: Synthetic oligonucleotide
uggcugagaggcagaaagg

SEQ ID NO: 3193338 - RNA, 19 nt, Artificial Sequence
  Description of Artificial Sequence: Synthetic oligonucleotide
uggucuccaaaauccuggg

SEQ ID NO: 3193339 - RNA, 19 nt, Artificial Sequence
  Description of Artificial Sequence: Synthetic oligonucleotide
gaggcagaaagggaauggg

SEQ ID NO: 3193340 - RNA, 19 nt, Artificial Sequence
  Description of Artificial Sequence: Synthetic oligonucleotide
ugacagucgcagauuuucc

SEQ ID NO: 3193341 - RNA, 19 nt, Artificial Sequence
  Description of Artificial Sequence: Synthetic oligonucleotide
agcuccuucucaaaagagg

SEQ ID NO: 3193342 - RNA, 19 nt, Artificial Sequence
  Description of Artificial Sequence: Synthetic oligonucleotide
agaggcagaaagggaaugg

SEQ ID NO: 3193343 - RNA, 19 nt, Artificial Sequence
  Description of Artificial Sequence: Synthetic oligonucleotide
ucaggggugcugcagggca

SEQ ID NO: 3193344 - RNA, 19 nt, Artificial Sequence
  Description of Artificial Sequence: Synthetic oligonucleotide
aagggaaugggaagcaaga

SEQ ID NO: 3193345 - RNA, 19 nt, Artificial Sequence
  Description of Artificial Sequence: Synthetic oligonucleotide
gauugagucuugaugucac

SEQ ID NO: 3193346 - RNA, 19 nt, Artificial Sequence
  Description of Artificial Sequence: Synthetic oligonucleotide
gagucaggggugcugcagg

SEQ ID NO: 3193347 - RNA, 19 nt, Artificial Sequence
  Description of Artificial Sequence: Synthetic oligonucleotide
aggucugcagcucuguccu

SEQ ID NO: 3193348 - RNA, 19 nt, Artificial Sequence
  Description of Artificial Sequence: Synthetic oligonucleotide
ucacaccucugcauccagg

SEQ ID NO: 3193349 - RNA, 19 nt, Artificial Sequence
  Description of Artificial Sequence: Synthetic oligonucleotide
auugagcccuccuggugac

SEQ ID NO: 3193350 - RNA, 19 nt, Artificial Sequence
  Description of Artificial Sequence: Synthetic oligonucleotide
ggaaugggaagcaagaguc

SEQ ID NO: 3193351 - RNA, 19 nt, Artificial Sequence
  Description of Artificial Sequence: Synthetic oligonucleotide
uauugaagaagggccuuug

SEQ ID NO: 3193352 - RNA, 19 nt, Artificial Sequence
  Description of Artificial Sequence: Synthetic oligonucleotide
cuucucaaaagagguggcg

SEQ ID NO: 3193353 - RNA, 19 nt, Artificial Sequence
  Description of Artificial Sequence: Synthetic oligonucleotide
uguuuccccauugagcccu

SEQ ID NO: 3193354 - RNA, 19 nt, Artificial Sequence
  Description of Artificial Sequence: Synthetic oligonucleotide
ucaaaagagguggcgcuug

SEQ ID NO: 3193355 - RNA, 19 nt, Artificial Sequence
  Description of Artificial Sequence: Synthetic oligonucleotide
gucacaaccccugacaguc

SEQ ID NO: 3193356 - RNA, 19 nt, Artificial Sequence
  Description of Artificial Sequence: Synthetic oligonucleotide
agucgcagauuuuccuuuc

SEQ ID NO: 3193357 - RNA, 19 nt, Artificial Sequence
  Description of Artificial Sequence: Synthetic oligonucleotide
ucucuuucuguaccuccug

SEQ ID NO: 3193358 - RNA, 19 nt, Artificial Sequence
  Description of Artificial Sequence: Synthetic oligonucleotide
ugaugucacaaccccugac

SEQ ID NO: 3193359 - RNA, 19 nt, Artificial Sequence
  Description of Artificial Sequence: Synthetic oligonucleotide
uugucacaccucugcaucc

SEQ ID NO: 3193360 - RNA, 19 nt, Artificial Sequence
  Description of Artificial Sequence: Synthetic oligonucleotide
guucuggccugccagcucc

SEQ ID NO: 3193361 - RNA, 19 nt, Artificial Sequence
  Description of Artificial Sequence: Synthetic oligonucleotide
caccucugcauccagggac

SEQ ID NO: 3193362 - RNA, 19 nt, Artificial Sequence
  Description of Artificial Sequence: Synthetic oligonucleotide
gaccagacuggcugagagg

SEQ ID NO: 3193363 - RNA, 19 nt, Artificial Sequence
  Description of Artificial Sequence: Synthetic oligonucleotide
caggucugcagcucugucc

SEQ ID NO: 3193364 - RNA, 19 nt, Artificial Sequence
  Description of Artificial Sequence: Synthetic oligonucleotide
uugggguacaggucugcag

SEQ ID NO: 3193365 - RNA, 19 nt, Artificial Sequence
  Description of Artificial Sequence: Synthetic oligonucleotide
gcauccagggacauggucg

SEQ ID NO: 3193366 - RNA, 19 nt, Artificial Sequence
  Description of Artificial Sequence: Synthetic oligonucleotide
ucuguaccuccugagggcc

SEQ ID NO: 3193367 - RNA, 19 nt, Artificial Sequence
  Description of Artificial Sequence: Synthetic oligonucleotide
gaagaagggccuuuggggu

SEQ ID NO: 3193368 - RNA, 19 nt, Artificial Sequence
  Description of Artificial Sequence: Synthetic oligonucleotide
uugcugauccauagauuga

SEQ ID NO: 3193369 - RNA, 19 nt, Artificial Sequence
  Description of Artificial Sequence: Synthetic oligonucleotide
cugagaggcagaaagggaa

SEQ ID NO: 3193370 - RNA, 19 nt, Artificial Sequence
  Description of Artificial Sequence: Synthetic oligonucleotide
cugacagucgcagauuuuc

SEQ ID NO: 3193371 - RNA, 19 nt, Artificial Sequence
  Description of Artificial Sequence: Synthetic oligonucleotide
aagacuguggaccagaacc

SEQ ID NO: 3193372 - RNA, 19 nt, Artificial Sequence
  Description of Artificial Sequence: Synthetic oligonucleotide
guaaauagaaugcaggaug

SEQ ID NO: 3193373 - RNA, 19 nt, Artificial Sequence
  Description of Artificial Sequence: Synthetic oligonucleotide
agcacagguaaauagaaug

SEQ ID NO: 3193374 - RNA, 19 nt, Artificial Sequence
  Description of Artificial Sequence: Synthetic oligonucleotide
uaaauagaaugcaggauga

SEQ ID NO: 3193375 - RNA, 19 nt, Artificial Sequence
  Description of Artificial Sequence: Synthetic oligonucleotide
uguagcuguagucgaagcg

SEQ ID NO: 3193376 - RNA, 19 nt, Artificial Sequence
  Description of Artificial Sequence: Synthetic oligonucleotide
agucccacgguccugacac

SEQ ID NO: 3193377 - RNA, 19 nt, Artificial Sequence
  Description of Artificial Sequence: Synthetic oligonucleotide
aaguaguccaucuucucug

SEQ ID NO: 3193378 - RNA, 19 nt, Artificial Sequence
  Description of Artificial Sequence: Synthetic oligonucleotide
agcaguguggcuccgaagg

SEQ ID NO: 3193379 - RNA, 19 nt, Artificial Sequence
  Description of Artificial Sequence: Synthetic oligonucleotide
cagguaaauagaaugcagg

SEQ ID NO: 3193380 - RNA, 19 nt, Artificial Sequence
  Description of Artificial Sequence: Synthetic oligonucleotide
agagguguguagcagcagc

SEQ ID NO: 3193381 - RNA, 19 nt, Artificial Sequence
  Description of Artificial Sequence: Synthetic oligonucleotide
accacggccacacacuugc

SEQ ID NO: 3193382 - RNA, 19 nt, Artificial Sequence
  Description of Artificial Sequence: Synthetic oligonucleotide
ucgacggaccagaagaggg

SEQ ID NO: 3193383 - RNA, 19 nt, Artificial Sequence
  Description of Artificial Sequence: Synthetic oligonucleotide
auagaaugcaggaugacag

SEQ ID NO: 3193384 - RNA, 19 nt, Artificial Sequence
  Description of Artificial Sequence: Synthetic oligonucleotide
aauagaaugcaggaugaca

SEQ ID NO: 3193385 - RNA, 19 nt, Artificial Sequence
  Description of Artificial Sequence: Synthetic oligonucleotide
cauguuguagcuguagucg

SEQ ID NO: 3193386 - RNA, 19 nt, Artificial Sequence
  Description of Artificial Sequence: Synthetic oligonucleotide
aggaugacagcagaggcgc

SEQ ID NO: 3193387 - RNA, 19 nt, Artificial Sequence
  Description of Artificial Sequence: Synthetic oligonucleotide
cagagcaucaccaggcugg

SEQ ID NO: 3193388 - RNA, 19 nt, Artificial Sequence
  Description of Artificial Sequence: Synthetic oligonucleotide
ucagguaagagguguguag

SEQ ID NO: 3193389 - RNA, 19 nt, Artificial Sequence
  Description of Artificial Sequence: Synthetic oligonucleotide
aagucgagcagcuccagca

SEQ ID NO: 3193390 - RNA, 19 nt, Artificial Sequence
  Description of Artificial Sequence: Synthetic oligonucleotide
ugggaagucgagcagcucc

SEQ ID NO: 3193391 - RNA, 19 nt, Artificial Sequence
  Description of Artificial Sequence: Synthetic oligonucleotide
aaugcaggaugacagcaga

SEQ ID NO: 3193392 - RNA, 19 nt, Artificial Sequence
  Description of Artificial Sequence: Synthetic oligonucleotide
caagcauugagggacaccc

SEQ ID NO: 3193393 - RNA, 19 nt, Artificial Sequence
  Description of Artificial Sequence: Synthetic oligonucleotide
gaaccaagcauugagggac

SEQ ID NO: 3193394 - RNA, 19 nt, Artificial Sequence
  Description of Artificial Sequence: Synthetic oligonucleotide
uugagggacacccaagcga

SEQ ID NO: 3193395 - RNA, 19 nt, Artificial Sequence
  Description of Artificial Sequence: Synthetic oligonucleotide
agguaaauagaaugcagga

SEQ ID NO: 3193396 - RNA, 19 nt, Artificial Sequence
  Description of Artificial Sequence: Synthetic oligonucleotide
aaauagaaugcaggaugac

SEQ ID NO: 3193397 - RNA, 19 nt, Artificial Sequence
  Description of Artificial Sequence: Synthetic oligonucleotide
guauggaagacuguggacc

SEQ ID NO: 3193398 - RNA, 19 nt, Artificial Sequence
  Description of Artificial Sequence: Synthetic oligonucleotide
ugguauggaagacugugga

SEQ ID NO: 3193399 - RNA, 19 nt, Artificial Sequence
  Description of Artificial Sequence: Synthetic oligonucleotide
guagcuguagucgaagcgg

SEQ ID NO: 3193400 - RNA, 19 nt, Artificial Sequence
  Description of Artificial Sequence: Synthetic oligonucleotide
acagcagaggcgcagaagu

SEQ ID NO: 3193401 - RNA, 19 nt, Artificial Sequence
  Description of Artificial Sequence: Synthetic oligonucleotide
acagaggcacgguagcggc

SEQ ID NO: 3193402 - RNA, 19 nt, Artificial Sequence
  Description of Artificial Sequence: Synthetic oligonucleotide
uggaccagaaccaagcauu

SEQ ID NO: 3193403 - RNA, 19 nt, Artificial Sequence
  Description of Artificial Sequence: Synthetic oligonucleotide
agcuccagcagggacagcc

SEQ ID NO: 3193404 - RNA, 19 nt, Artificial Sequence
  Description of Artificial Sequence: Synthetic oligonucleotide
uaagagguguguagcagca

SEQ ID NO: 3193405 - RNA, 19 nt, Artificial Sequence
  Description of Artificial Sequence: Synthetic oligonucleotide
auugagggacacccaagcg

SEQ ID NO: 3193406 - RNA, 19 nt, Artificial Sequence
  Description of Artificial Sequence: Synthetic oligonucleotide
uauggaagacuguggacca

SEQ ID NO: 3193407 - RNA, 19 nt, Artificial Sequence
  Description of Artificial Sequence: Synthetic oligonucleotide
uucaccaggccuauagcca

SEQ ID NO: 3193408 - RNA, 19 nt, Artificial Sequence
  Description of Artificial Sequence: Synthetic oligonucleotide
acacuugcgcgugugaggc

SEQ ID NO: 3193409 - RNA, 19 nt, Artificial Sequence
  Description of Artificial Sequence: Synthetic oligonucleotide
guucaccaggccuauagcc

SEQ ID NO: 3193410 - RNA, 19 nt, Artificial Sequence
  Description of Artificial Sequence: Synthetic oligonucleotide
aucagcagcaguguggcuc

SEQ ID NO: 3193411 - RNA, 19 nt, Artificial Sequence
  Description of Artificial Sequence: Synthetic oligonucleotide
agaaguaguccaucuucuc

SEQ ID NO: 3193412 - RNA, 19 nt, Artificial Sequence
  Description of Artificial Sequence: Synthetic oligonucleotide
aguccaucuucucugugag

SEQ ID NO: 3193413 - RNA, 19 nt, Artificial Sequence
  Description of Artificial Sequence: Synthetic oligonucleotide
guaagagguguguagcagc

SEQ ID NO: 3193414 - RNA, 19 nt, Artificial Sequence
  Description of Artificial Sequence: Synthetic oligonucleotide
agguucaccaggccuauag

SEQ ID NO: 3193415 - RNA, 19 nt, Artificial Sequence
  Description of Artificial Sequence: Synthetic oligonucleotide
cauugagggacacccaagc

SEQ ID NO: 3193416 - RNA, 19 nt, Artificial Sequence
  Description of Artificial Sequence: Synthetic oligonucleotide
agcaucaccaggcuggcca

SEQ ID NO: 3193417 - RNA, 19 nt, Artificial Sequence
  Description of Artificial Sequence: Synthetic oligonucleotide
cuguggaccagaaccaagc

SEQ ID NO: 3193418 - RNA, 19 nt, Artificial Sequence
  Description of Artificial Sequence: Synthetic oligonucleotide
ucgagcagcuccagcaggg

SEQ ID NO: 3193419 - RNA, 19 nt, Artificial Sequence
  Description of Artificial Sequence: Synthetic oligonucleotide
ucauguuguagcuguaguc

SEQ ID NO: 3193420 - RNA, 19 nt, Artificial Sequence
  Description of Artificial Sequence: Synthetic oligonucleotide
caggccuauagccacauug

SEQ ID NO: 3193421 - RNA, 19 nt, Artificial Sequence
  Description of Artificial Sequence: Synthetic oligonucleotide
acggccacacacuugcgcg

SEQ ID NO: 3193422 - RNA, 19 nt, Artificial Sequence
  Description of Artificial Sequence: Synthetic oligonucleotide
aagcggacgaggcucaggu

SEQ ID NO: 3193423 - RNA, 19 nt, Artificial Sequence
  Description of Artificial Sequence: Synthetic oligonucleotide
uuccguaggcaccaggcca

SEQ ID NO: 3193424 - RNA, 19 nt, Artificial Sequence
  Description of Artificial Sequence: Synthetic oligonucleotide
caggaugacagcagaggcg

SEQ ID NO: 3193425 - RNA, 19 nt, Artificial Sequence
  Description of Artificial Sequence: Synthetic oligonucleotide
ucccugguauggaagacug

SEQ ID NO: 3193426 - RNA, 19 nt, Artificial Sequence
  Description of Artificial Sequence: Synthetic oligonucleotide
acgaggcucagguaagagg

SEQ ID NO: 3193427 - RNA, 19 nt, Artificial Sequence
  Description of Artificial Sequence: Synthetic oligonucleotide
uucucugugaggucagugu

SEQ ID NO: 3193428 - RNA, 19 nt, Artificial Sequence
  Description of Artificial Sequence: Synthetic oligonucleotide
agaggcgcagaaguagucc

SEQ ID NO: 3193429 - RNA, 19 nt, Artificial Sequence
  Description of Artificial Sequence: Synthetic oligonucleotide
ugugaggucagugucccug

SEQ ID NO: 3193430 - RNA, 19 nt, Artificial Sequence
  Description of Artificial Sequence: Synthetic oligonucleotide
cugguauggaagacugugg

SEQ ID NO: 3193431 - RNA, 19 nt, Artificial Sequence
  Description of Artificial Sequence: Synthetic oligonucleotide
uaguccaucuucucuguga

SEQ ID NO: 3193432 - RNA, 19 nt, Artificial Sequence
  Description of Artificial Sequence: Synthetic oligonucleotide
uagaaugcaggaugacagc

SEQ ID NO: 3193433 - RNA, 19 nt, Artificial Sequence
  Description of Artificial Sequence: Synthetic oligonucleotide
uagucgaagcggacgaggc

SEQ ID NO: 3193434 - RNA, 19 nt, Artificial Sequence
  Description of Artificial Sequence: Synthetic oligonucleotide
uccguaggcaccaggccag

SEQ ID NO: 3193435 - RNA, 19 nt, Artificial Sequence
  Description of Artificial Sequence: Synthetic oligonucleotide
augcagguaugguacagug

SEQ ID NO: 3193436 - RNA, 19 nt, Artificial Sequence
  Description of Artificial Sequence: Synthetic oligonucleotide
agaaccaagcauugaggga

SEQ ID NO: 3193437 - RNA, 19 nt, Artificial Sequence
  Description of Artificial Sequence: Synthetic oligonucleotide
uggcacagaggcacgguag

SEQ ID NO: 3193438 - RNA, 19 nt, Artificial Sequence
  Description of Artificial Sequence: Synthetic oligonucleotide
uguggaccagaaccaagca

SEQ ID NO: 3193439 - RNA, 19 nt, Artificial Sequence
  Description of Artificial Sequence: Synthetic oligonucleotide
ucugugaggucaguguccc

SEQ ID NO: 3193440 - RNA, 19 nt, Artificial Sequence
  Description of Artificial Sequence: Synthetic oligonucleotide
ucagcagcaguguggcucc

SEQ ID NO: 3193441 - RNA, 19 nt, Artificial Sequence
  Description of Artificial Sequence: Synthetic oligonucleotide
aguguggcuccgaaggccc

SEQ ID NO: 3193442 - RNA, 19 nt, Artificial Sequence
  Description of Artificial Sequence: Synthetic oligonucleotide
uuguagcuguagucgaagc

SEQ ID NO: 3193443 - RNA, 19 nt, Artificial Sequence
  Description of Artificial Sequence: Synthetic oligonucleotide
agaaugcaggaugacagca

SEQ ID NO: 3193444 - RNA, 19 nt, Artificial Sequence
  Description of Artificial Sequence: Synthetic oligonucleotide
gaggcuggcacagaggcac

SEQ ID NO: 3193445 - RNA, 19 nt, Artificial Sequence
  Description of Artificial Sequence: Synthetic oligonucleotide
agcaucagcagcagugugg

SEQ ID NO: 3193446 - RNA, 19 nt, Artificial Sequence
  Description of Artificial Sequence: Synthetic oligonucleotide
agccacauuggccaucaug

SEQ ID NO: 3193447 - RNA, 19 nt, Artificial Sequence
  Description of Artificial Sequence: Synthetic oligonucleotide
gagggugggaagucgagca

SEQ ID NO: 3193448 - RNA, 19 nt, Artificial Sequence
  Description of Artificial Sequence: Synthetic oligonucleotide
agcagcaucagcagcagug

SEQ ID NO: 3193449 - RNA, 19 nt, Artificial Sequence
  Description of Artificial Sequence: Synthetic oligonucleotide
gaugacagcagaggcgcag

SEQ ID NO: 3193450 - RNA, 19 nt, Artificial Sequence
  Description of Artificial Sequence: Synthetic oligonucleotide
agcagcaccacggccacac

SEQ ID NO: 3193451 - RNA, 19 nt, Artificial Sequence
  Description of Artificial Sequence: Synthetic oligonucleotide
agagggugggaagucgagc

SEQ ID NO: 3193452 - RNA, 19 nt, Artificial Sequence
  Description of Artificial Sequence: Synthetic oligonucleotide
uggcagugggcgucgacgg

SEQ ID NO: 3193453 - RNA, 19 nt, Artificial Sequence
  Description of Artificial Sequence: Synthetic oligonucleotide
cucugugaggucagugucc

SEQ ID NO: 3193454 - RNA, 19 nt, Artificial Sequence
  Description of Artificial Sequence: Synthetic oligonucleotide
gaaguaguccaucuucucu

SEQ ID NO: 3193455 - RNA, 19 nt, Artificial Sequence
  Description of Artificial Sequence: Synthetic oligonucleotide
aggucagugucccugguau

SEQ ID NO: 3193456 - RNA, 19 nt, Artificial Sequence
  Description of Artificial Sequence: Synthetic oligonucleotide
cacacuugcgcgugugagg

SEQ ID NO: 3193457 - RNA, 19 nt, Artificial Sequence
  Description of Artificial Sequence: Synthetic oligonucleotide
acugacgggugcugcaguc

SEQ ID NO: 3193458 - RNA, 19 nt, Artificial Sequence
  Description of Artificial Sequence: Synthetic oligonucleotide
ucaccaggccuauagccac

SEQ ID NO: 3193459 - RNA, 19 nt, Artificial Sequence
  Description of Artificial Sequence: Synthetic oligonucleotide
aggccuauagccacauugg

SEQ ID NO: 3193460 - RNA, 19 nt, Artificial Sequence
  Description of Artificial Sequence: Synthetic oligonucleotide
ugacgggugcugcaguccc

SEQ ID NO: 3193461 - RNA, 19 nt, Artificial Sequence
  Description of Artificial Sequence: Synthetic oligonucleotide
guagucgaagcggacgagg

SEQ ID NO: 3193462 - RNA, 19 nt, Artificial Sequence
  Description of Artificial Sequence: Synthetic oligonucleotide
uagcuguagucgaagcgga

SEQ ID NO: 3193463 - RNA, 19 nt, Artificial Sequence
  Description of Artificial Sequence: Synthetic oligonucleotide
cagguaagagguguguagc

SEQ ID NO: 3193464 - RNA, 19 nt, Artificial Sequence
  Description of Artificial Sequence: Synthetic oligonucleotide
acccaagcgaaggccaugc

SEQ ID NO: 3193465 - RNA, 19 nt, Artificial Sequence
  Description of Artificial Sequence: Synthetic oligonucleotide
acgguccugacacagcaca

SEQ ID NO: 3193466 - RNA, 19 nt, Artificial Sequence
  Description of Artificial Sequence: Synthetic oligonucleotide
uguuguagcuguagucgaa

SEQ ID NO: 3193467 - RNA, 19 nt, Artificial Sequence
  Description of Artificial Sequence: Synthetic oligonucleotide
ccuauagccacauuggcca

SEQ ID NO: 3193468 - RNA, 19 nt, Artificial Sequence
  Description of Artificial Sequence: Synthetic oligonucleotide
agcagaggcgcagaaguag

SEQ ID NO: 3193469 - RNA, 19 nt, Artificial Sequence
  Description of Artificial Sequence: Synthetic oligonucleotide
agggacacccaagcgaagg

SEQ ID NO: 3193470 - RNA, 19 nt, Artificial Sequence
  Description of Artificial Sequence: Synthetic oligonucleotide
guuguagcuguagucgaag

SEQ ID NO: 3193471 - RNA, 19 nt, Artificial Sequence
  Description of Artificial Sequence: Synthetic oligonucleotide
aacaauuuuaguuaggucc

SEQ ID NO: 3193472 - RNA, 19 nt, Artificial Sequence
  Description of Artificial Sequence: Synthetic oligonucleotide
uuuaguuagguccacauca

SEQ ID NO: 3193473 - RNA, 19 nt, Artificial Sequence
  Description of Artificial Sequence: Synthetic oligonucleotide
aagaaagaaaggcugaaag

SEQ ID NO: 3193474 - RNA, 19 nt, Artificial Sequence
  Description of Artificial Sequence: Synthetic oligonucleotide
agaaagaaaggcugaaagc

SEQ ID NO: 3193475 - RNA, 19 nt, Artificial Sequence
  Description of Artificial Sequence: Synthetic oligonucleotide
ucagggauagcucagagcu

SEQ ID NO: 3193476 - RNA, 19 nt, Artificial Sequence
  Description of Artificial Sequence: Synthetic oligonucleotide
ugaaguucugccuggaagg

SEQ ID NO: 3193477 - RNA, 19 nt, Artificial Sequence
  Description of Artificial Sequence: Synthetic oligonucleotide
gaagcugggauucagcacc

SEQ ID NO: 3193478 - RNA, 19 nt, Artificial Sequence
  Description of Artificial Sequence: Synthetic oligonucleotide
aagaaaggcugaaagcacc

SEQ ID NO: 3193479 - RNA, 19 nt, Artificial Sequence
  Description of Artificial Sequence: Synthetic oligonucleotide
gaaagaaaggcugaaagca

SEQ ID NO: 3193480 - RNA, 19 nt, Artificial Sequence
  Description of Artificial Sequence: Synthetic oligonucleotide
aaagaaaggcugaaagcac

SEQ ID NO: 3193481 - RNA, 19 nt, Artificial Sequence
  Description of Artificial Sequence: Synthetic oligonucleotide
ucuuccagcagccuguggc

SEQ ID NO: 3193482 - RNA, 19 nt, Artificial Sequence
  Description of Artificial Sequence: Synthetic oligonucleotide
gaaccucucgcccagaccc

SEQ ID NO: 3193483 - RNA, 19 nt, Artificial Sequence
  Description of Artificial Sequence: Synthetic oligonucleotide
gacugcauuaguuagcuuc

SEQ ID NO: 3193484 - RNA, 19 nt, Artificial Sequence
  Description of Artificial Sequence: Synthetic oligonucleotide
uuuguucuggaugugagug

SEQ ID NO: 3193485 - RNA, 19 nt, Artificial Sequence
  Description of Artificial Sequence: Synthetic oligonucleotide
aaggcacccaacuuccagg

SEQ ID NO: 3193486 - RNA, 19 nt, Artificial Sequence
  Description of Artificial Sequence: Synthetic oligonucleotide
aacccugccuuguucaggg

SEQ ID NO: 3193487 - RNA, 19 nt, Artificial Sequence
  Description of Artificial Sequence: Synthetic oligonucleotide
ugaacaauuuuaguuaggu

SEQ ID NO: 3193488 - RNA, 19 nt, Artificial Sequence
  Description of Artificial Sequence: Synthetic oligonucleotide
aaaggcugaaagcaccgug

SEQ ID NO: 3193489 - RNA, 19 nt, Artificial Sequence
  Description of Artificial Sequence: Synthetic oligonucleotide
ucuucuaggaacccugaac

SEQ ID NO: 3193490 - RNA, 19 nt, Artificial Sequence
  Description of Artificial Sequence: Synthetic oligonucleotide
cagggcaugagguagacug

SEQ ID NO: 3193491 - RNA, 19 nt, Artificial Sequence
  Description of Artificial Sequence: Synthetic oligonucleotide
uuaguuagguccacaucag

SEQ ID NO: 3193492 - RNA, 19 nt, Artificial Sequence
  Description of Artificial Sequence: Synthetic oligonucleotide
gauagcucagagcucuggg

SEQ ID NO: 3193493 - RNA, 19 nt, Artificial Sequence
  Description of Artificial Sequence: Synthetic oligonucleotide
gagggugccaagcagcagg

SEQ ID NO: 3193494 - RNA, 19 nt, Artificial Sequence
  Description of Artificial Sequence: Synthetic oligonucleotide
gugagugacacugugauac

SEQ ID NO: 3193495 - RNA, 19 nt, Artificial Sequence
  Description of Artificial Sequence: Synthetic oligonucleotide
aggaaggaaccucucgccc

SEQ ID NO: 3193496 - RNA, 19 nt, Artificial Sequence
  Description of Artificial Sequence: Synthetic oligonucleotide
auccguugaagccucuccc

SEQ ID NO: 3193497 - RNA, 19 nt, Artificial Sequence
  Description of Artificial Sequence: Synthetic oligonucleotide
aguccaaggaggaaggaac

SEQ ID NO: 3193498 - RNA, 19 nt, Artificial Sequence
  Description of Artificial Sequence: Synthetic oligonucleotide
acugcauuaguuagcuucc

SEQ ID NO: 3193499 - RNA, 19 nt, Artificial Sequence
  Description of Artificial Sequence: Synthetic oligonucleotide
ugguccuuuguucuggaug

SEQ ID NO: 3193500 - RNA, 19 nt, Artificial Sequence
  Description of Artificial Sequence: Synthetic oligonucleotide
cuggaugugagugacacug

SEQ ID NO: 3193501 - RNA, 19 nt, Artificial Sequence
  Description of Artificial Sequence: Synthetic oligonucleotide
ugaaagcaccgugagaacc

SEQ ID NO: 3193502 - RNA, 19 nt, Artificial Sequence
  Description of Artificial Sequence: Synthetic oligonucleotide
aguuagguccacaucaguc

SEQ ID NO: 3193503 - RNA, 19 nt, Artificial Sequence
  Description of Artificial Sequence: Synthetic oligonucleotide
ucugggaucaccugagggu

SEQ ID NO: 3193504 - RNA, 19 nt, Artificial Sequence
  Description of Artificial Sequence: Synthetic oligonucleotide
uggaaggcacccaacuucc

SEQ ID NO: 3193505 - RNA, 19 nt, Artificial Sequence
  Description of Artificial Sequence: Synthetic oligonucleotide
auuuuaguuagguccacau

SEQ ID NO: 3193506 - RNA, 19 nt, Artificial Sequence
  Description of Artificial Sequence: Synthetic oligonucleotide
cuucuaggaacccugaaca

SEQ ID NO: 3193507 - RNA, 19 nt, Artificial Sequence
  Description of Artificial Sequence: Synthetic oligonucleotide
cugaaguucugccuggaag

SEQ ID NO: 3193508 - RNA, 19 nt, Artificial Sequence
  Description of Artificial Sequence: Synthetic oligonucleotide
agcacccauccguugaagc

SEQ ID NO: 3193509 - RNA, 19 nt, Artificial Sequence
  Description of Artificial Sequence: Synthetic oligonucleotide
uuuuaguuagguccacauc

SEQ ID NO: 3193510 - RNA, 19 nt, Artificial Sequence
  Description of Artificial Sequence: Synthetic oligonucleotide
gaacccugaacaauuuuag

SEQ ID NO: 3193511 - RNA, 19 nt, Artificial Sequence
  Description of Artificial Sequence: Synthetic oligonucleotide
gauucagcaccuucugccc

SEQ ID NO: 3193512 - RNA, 19 nt, Artificial Sequence
  Description of Artificial Sequence: Synthetic oligonucleotide
gguagacugcauuaguuag

SEQ ID NO: 3193513 - RNA, 19 nt, Artificial Sequence
  Description of Artificial Sequence: Synthetic oligonucleotide
aaaagaaagaaaggcugaa

SEQ ID NO: 3193514 - RNA, 19 nt, Artificial Sequence
  Description of Artificial Sequence: Synthetic oligonucleotide
uggucuucuaggaacccug

SEQ ID NO: 3193515 - RNA, 19 nt, Artificial Sequence
  Description of Artificial Sequence: Synthetic oligonucleotide
ugcauuaguuagcuucccc

SEQ ID NO: 3193516 - RNA, 19 nt, Artificial Sequence
  Description of Artificial Sequence: Synthetic oligonucleotide
guuagguccacaucaguca

SEQ ID NO: 3193517 - RNA, 19 nt, Artificial Sequence
  Description of Artificial Sequence: Synthetic oligonucleotide
aggucccugaaguucugcc

SEQ ID NO: 3193518 - RNA, 19 nt, Artificial Sequence
  Description of Artificial Sequence: Synthetic oligonucleotide
ggauucagcaccuucugcc

SEQ ID NO: 3193519 - RNA, 19 nt, Artificial Sequence
  Description of Artificial Sequence: Synthetic oligonucleotide
acccugaacaauuuuaguu

SEQ ID NO: 3193520 - RNA, 19 nt, Artificial Sequence
  Description of Artificial Sequence: Synthetic oligonucleotide
augugagugacacugugau

SEQ ID NO: 3193521 - RNA, 19 nt, Artificial Sequence
  Description of Artificial Sequence: Synthetic oligonucleotide
gaacaauuuuaguuagguc

SEQ ID NO: 3193522 - RNA, 19 nt, Artificial Sequence
  Description of Artificial Sequence: Synthetic oligonucleotide
gaaggcacccaacuuccag

SEQ ID NO: 3193523 - RNA, 19 nt, Artificial Sequence
  Description of Artificial Sequence: Synthetic oligonucleotide
aacccugaacaauuuuagu

SEQ ID NO: 3193524 - RNA, 19 nt, Artificial Sequence
  Description of Artificial Sequence: Synthetic oligonucleotide
aggaggaaggaaccucucg

SEQ ID NO: 3193525 - RNA, 19 nt, Artificial Sequence
  Description of Artificial Sequence: Synthetic oligonucleotide
gaggaaggaaccucucgcc

SEQ ID NO: 3193526 - RNA, 19 nt, Artificial Sequence
  Description of Artificial Sequence: Synthetic oligonucleotide
aguucugccuggaaggcac

SEQ ID NO: 3193527 - RNA, 19 nt, Artificial Sequence
  Description of Artificial Sequence: Synthetic oligonucleotide
acaauuuuaguuaggucca

SEQ ID NO: 3193528 - RNA, 19 nt, Artificial Sequence
  Description of Artificial Sequence: Synthetic oligonucleotide
ugagguagacugcauuagu

SEQ ID NO: 3193529 - RNA, 19 nt, Artificial Sequence
  Description of Artificial Sequence: Synthetic oligonucleotide
uucuggaugugagugacac

SEQ ID NO: 3193530 - RNA, 19 nt, Artificial Sequence
  Description of Artificial Sequence: Synthetic oligonucleotide
cugaacaauuuuaguuagg

SEQ ID NO: 3193531 - RNA, 19 nt, Artificial Sequence
  Description of Artificial Sequence: Synthetic oligonucleotide
gaaagcaccgugagaaccc

SEQ ID NO: 3193532 - RNA, 19 nt, Artificial Sequence
  Description of Artificial Sequence: Synthetic oligonucleotide
ccaacuuccagguuccucg

SEQ ID NO: 3193533 - RNA, 19 nt, Artificial Sequence
  Description of Artificial Sequence: Synthetic oligonucleotide
aaagaaagaaaggcugaaa

SEQ ID NO: 3193534 - RNA, 19 nt, Artificial Sequence
  Description of Artificial Sequence: Synthetic oligonucleotide
aauuuuaguuagguccaca

SEQ ID NO: 3193535 - RNA, 19 nt, Artificial Sequence
  Description of Artificial Sequence: Synthetic oligonucleotide
uagacugcauuaguuagcu

SEQ ID NO: 3193536 - RNA, 19 nt, Artificial Sequence
  Description of Artificial Sequence: Synthetic oligonucleotide
uuagguccacaucagucaa

SEQ ID NO: 3193537 - RNA, 19 nt, Artificial Sequence
  Description of Artificial Sequence: Synthetic oligonucleotide
cuuguucagggauagcuca

SEQ ID NO: 3193538 - RNA, 19 nt, Artificial Sequence
  Description of Artificial Sequence: Synthetic oligonucleotide
uucagggauagcucagagc

SEQ ID NO: 3193539 - RNA, 19 nt, Artificial Sequence
  Description of Artificial Sequence: Synthetic oligonucleotide
cucugggaucaccugaggg

SEQ ID NO: 3193540 - RNA, 19 nt, Artificial Sequence
  Description of Artificial Sequence: Synthetic oligonucleotide
uuguucagggauagcucag

SEQ ID NO: 3193541 - RNA, 19 nt, Artificial Sequence
  Description of Artificial Sequence: Synthetic oligonucleotide
gaaggaaccucucgcccag

SEQ ID NO: 3193542 - RNA, 19 nt, Artificial Sequence
  Description of Artificial Sequence: Synthetic oligonucleotide
ucgcccagacccauggucc

SEQ ID NO: 3193543 - RNA, 19 nt, Artificial Sequence
  Description of Artificial Sequence: Synthetic oligonucleotide
agaaaggcugaaagcaccg

SEQ ID NO: 3193544 - RNA, 19 nt, Artificial Sequence
  Description of Artificial Sequence: Synthetic oligonucleotide
uuccagguuccucggaagc

SEQ ID NO: 3193545 - RNA, 19 nt, Artificial Sequence
  Description of Artificial Sequence: Synthetic oligonucleotide
ugggauucagcaccuucug

SEQ ID NO: 3193546 - RNA, 19 nt, Artificial Sequence
  Description of Artificial Sequence: Synthetic oligonucleotide
uguucuggaugugagugac

SEQ ID NO: 3193547 - RNA, 19 nt, Artificial Sequence
  Description of Artificial Sequence: Synthetic oligonucleotide
cuggaaggcacccaacuuc

SEQ ID NO: 3193548 - RNA, 19 nt, Artificial Sequence
  Description of Artificial Sequence: Synthetic oligonucleotide
agcaccuucugcccagcac

SEQ ID NO: 3193549 - RNA, 19 nt, Artificial Sequence
  Description of Artificial Sequence: Synthetic oligonucleotide
agcaccgugagaacccugc

SEQ ID NO: 3193550 - RNA, 19 nt, Artificial Sequence
  Description of Artificial Sequence: Synthetic oligonucleotide
uagcucagagcucugggau

SEQ ID NO: 3193551 - RNA, 19 nt, Artificial Sequence
  Description of Artificial Sequence: Synthetic oligonucleotide
auagcucagagcucuggga

SEQ ID NO: 3193552 - RNA, 19 nt, Artificial Sequence
  Description of Artificial Sequence: Synthetic oligonucleotide
aaggcugaaagcaccguga

SEQ ID NO: 3193553 - RNA, 19 nt, Artificial Sequence
  Description of Artificial Sequence: Synthetic oligonucleotide
uccguugaagccucucccc

SEQ ID NO: 3193554 - RNA, 19 nt, Artificial Sequence
  Description of Artificial Sequence: Synthetic oligonucleotide
caggccauggcucuuccag

SEQ ID NO: 3193555 - RNA, 19 nt, Artificial Sequence
  Description of Artificial Sequence: Synthetic oligonucleotide
aaggucccugaaguucugc

SEQ ID NO: 3193556 - RNA, 19 nt, Artificial Sequence
  Description of Artificial Sequence: Synthetic oligonucleotide
aggccauggcucuuccagc

SEQ ID NO: 3193557 - RNA, 19 nt, Artificial Sequence
  Description of Artificial Sequence: Synthetic oligonucleotide
ggaggaaggaaccucucgc

SEQ ID NO: 3193558 - RNA, 19 nt, Artificial Sequence
  Description of Artificial Sequence: Synthetic oligonucleotide
uucagcaccuucugcccag

SEQ ID NO: 3193559 - RNA, 19 nt, Artificial Sequence
  Description of Artificial Sequence: Synthetic oligonucleotide
agccucuccccacaacugg

SEQ ID NO: 3193560 - RNA, 19 nt, Artificial Sequence
  Description of Artificial Sequence: Synthetic oligonucleotide
ucuaggaacccugaacaau

SEQ ID NO: 3193561 - RNA, 19 nt, Artificial Sequence
  Description of Artificial Sequence: Synthetic oligonucleotide
gagaacccugccuuguuca

SEQ ID NO: 3193562 - RNA, 19 nt, Artificial Sequence
  Description of Artificial Sequence: Synthetic oligonucleotide
cauggcucuuccagcagcc

SEQ ID NO: 3193563 - RNA, 19 nt, Artificial Sequence
  Description of Artificial Sequence: Synthetic oligonucleotide
agggauagcucagagcucu

SEQ ID NO: 3193564 - RNA, 19 nt, Artificial Sequence
  Description of Artificial Sequence: Synthetic oligonucleotide
cuuccagcagccuguggcc

SEQ ID NO: 3193565 - RNA, 19 nt, Artificial Sequence
  Description of Artificial Sequence: Synthetic oligonucleotide
cauccguugaagccucucc

SEQ ID NO: 3193566 - RNA, 19 nt, Artificial Sequence
  Description of Artificial Sequence: Synthetic oligonucleotide
augagguagacugcauuag

SEQ ID NO: 3193567 - RNA, 19 nt, Artificial Sequence
  Description of Artificial Sequence: Synthetic oligonucleotide
agcucagagcucugggauc

SEQ ID NO: 3193568 - RNA, 19 nt, Artificial Sequence
  Description of Artificial Sequence: Synthetic oligonucleotide
agguagacugcauuaguua

SEQ ID NO: 3193569 - RNA, 19 nt, Artificial Sequence
  Description of Artificial Sequence: Synthetic oligonucleotide
guucagggauagcucagag

SEQ ID NO: 3193570 - RNA, 19 nt, Artificial Sequence
  Description of Artificial Sequence: Synthetic oligonucleotide
ccugaacaauuuuaguuag

SEQ ID NO: 3193571 - RNA, 19 nt, Artificial Sequence
  Description of Artificial Sequence: Synthetic oligonucleotide
ucacauauaaucaaaauag

SEQ ID NO: 3193572 - RNA, 19 nt, Artificial Sequence
  Description of Artificial Sequence: Synthetic oligonucleotide
aaaauggucugcuuuaagc

SEQ ID NO: 3193573 - RNA, 19 nt, Artificial Sequence
  Description of Artificial Sequence: Synthetic oligonucleotide
aacauauuauuuuacuuuc

SEQ ID NO: 3193574 - RNA, 19 nt, Artificial Sequence
  Description of Artificial Sequence: Synthetic oligonucleotide
aaauccaggauuuaggucu

SEQ ID NO: 3193575 - RNA, 19 nt, Artificial Sequence
  Description of Artificial Sequence: Synthetic oligonucleotide
aauaguuccauaaauaucu

SEQ ID NO: 3193576 - RNA, 19 nt, Artificial Sequence
  Description of Artificial Sequence: Synthetic oligonucleotide
uauuaauuuaaauauuuug

SEQ ID NO: 3193577 - RNA, 19 nt, Artificial Sequence
  Description of Artificial Sequence: Synthetic oligonucleotide
aaaaucaacgcugaaguac

SEQ ID NO: 3193578 - RNA, 19 nt, Artificial Sequence
  Description of Artificial Sequence: Synthetic oligonucleotide
aauaccccagccuauagcg

SEQ ID NO: 3193579 - RNA, 19 nt, Artificial Sequence
  Description of Artificial Sequence: Synthetic oligonucleotide
acuuauaugccucaguaac

SEQ ID NO: 3193580 - RNA, 19 nt, Artificial Sequence
  Description of Artificial Sequence: Synthetic oligonucleotide
uuauuuacucuauuaaaag

SEQ ID NO: 3193581 - RNA, 19 nt, Artificial Sequence
  Description of Artificial Sequence: Synthetic oligonucleotide
ucuauuaaaagaucuauuc

SEQ ID NO: 3193582 - RNA, 19 nt, Artificial Sequence
  Description of Artificial Sequence: Synthetic oligonucleotide
aaaagaucuauucaucaca

SEQ ID NO: 3193583 - RNA, 19 nt, Artificial Sequence
  Description of Artificial Sequence: Synthetic oligonucleotide
aauaucuuagagucaauca

SEQ ID NO: 3193584 - RNA, 19 nt, Artificial Sequence
  Description of Artificial Sequence: Synthetic oligonucleotide
aauauuuugcuauaauaau

SEQ ID NO: 3193585 - RNA, 19 nt, Artificial Sequence
  Description of Artificial Sequence: Synthetic oligonucleotide
aggauuuaggucuaacacc

SEQ ID NO: 3193586 - RNA, 19 nt, Artificial Sequence
  Description of Artificial Sequence: Synthetic oligonucleotide
auaaacgccgaguacagcg

SEQ ID NO: 3193587 - RNA, 19 nt, Artificial Sequence
  Description of Artificial Sequence: Synthetic oligonucleotide
aaacauauuauuuuacuuu

SEQ ID NO: 3193588 - RNA, 19 nt, Artificial Sequence
  Description of Artificial Sequence: Synthetic oligonucleotide
aaucaaaauaguuccauaa

SEQ ID NO: 3193589 - RNA, 19 nt, Artificial Sequence
  Description of Artificial Sequence: Synthetic oligonucleotide
uauuaaaagaucuauucau

SEQ ID NO: 3193590 - RNA, 19 nt, Artificial Sequence
  Description of Artificial Sequence: Synthetic oligonucleotide
uuaaaagaucuauucauca

SEQ ID NO: 3193591 - RNA, 19 nt, Artificial Sequence
  Description of Artificial Sequence: Synthetic oligonucleotide
uuuugcuauaauaauguac

SEQ ID NO: 3193592 - RNA, 19 nt, Artificial Sequence
  Description of Artificial Sequence: Synthetic oligonucleotide
aaauauuuugcuauaauaa

SEQ ID NO: 3193593 - RNA, 19 nt, Artificial Sequence
  Description of Artificial Sequence: Synthetic oligonucleotide
aaauaccccagccuauagc

SEQ ID NO: 3193594 - RNA, 19 nt, Artificial Sequence
  Description of Artificial Sequence: Synthetic oligonucleotide
uugaaauccaggauuuagg

SEQ ID NO: 3193595 - RNA, 19 nt, Artificial Sequence
  Description of Artificial Sequence: Synthetic oligonucleotide
aaauaucuuagagucaauc

SEQ ID NO: 3193596 - RNA, 19 nt, Artificial Sequence
  Description of Artificial Sequence: Synthetic oligonucleotide
caaagcuucgucaaaauac

SEQ ID NO: 3193597 - RNA, 19 nt, Artificial Sequence
  Description of Artificial Sequence: Synthetic oligonucleotide
ucuguuguaauacggaacu

SEQ ID NO: 3193598 - RNA, 19 nt, Artificial Sequence
  Description of Artificial Sequence: Synthetic oligonucleotide
ucagauguaggcuuaagga

SEQ ID NO: 3193599 - RNA, 19 nt, Artificial Sequence
  Description of Artificial Sequence: Synthetic oligonucleotide
acuuucacuucuaaaaugc

SEQ ID NO: 3193600 - RNA, 19 nt, Artificial Sequence
  Description of Artificial Sequence: Synthetic oligonucleotide
uauuuacucuauuaaaaga

SEQ ID NO: 3193601 - RNA, 19 nt, Artificial Sequence
  Description of Artificial Sequence: Synthetic oligonucleotide
ucuaacaccuucuugaaau

SEQ ID NO: 3193602 - RNA, 19 nt, Artificial Sequence
  Description of Artificial Sequence: Synthetic oligonucleotide
ucuuugucuaaaauggucu

SEQ ID NO: 3193603 - RNA, 19 nt, Artificial Sequence
  Description of Artificial Sequence: Synthetic oligonucleotide
uguacauugauauuauuua

SEQ ID NO: 3193604 - RNA, 19 nt, Artificial Sequence
  Description of Artificial Sequence: Synthetic oligonucleotide
ucugcuuuaagcucaacac

SEQ ID NO: 3193605 - RNA, 19 nt, Artificial Sequence
  Description of Artificial Sequence: Synthetic oligonucleotide
auaugcgguggccaaaucc

SEQ ID NO: 3193606 - RNA, 19 nt, Artificial Sequence
  Description of Artificial Sequence: Synthetic oligonucleotide
uuacucuauuaaaagaucu

SEQ ID NO: 3193607 - RNA, 19 nt, Artificial Sequence
  Description of Artificial Sequence: Synthetic oligonucleotide
uuaagcucaacacagcauc

SEQ ID NO: 3193608 - RNA, 19 nt, Artificial Sequence
  Description of Artificial Sequence: Synthetic oligonucleotide
gagucaaucagauguaggc

SEQ ID NO: 3193609 - RNA, 19 nt, Artificial Sequence
  Description of Artificial Sequence: Synthetic oligonucleotide
uccauaaauaucuuagagu

SEQ ID NO: 3193610 - RNA, 19 nt, Artificial Sequence
  Description of Artificial Sequence: Synthetic oligonucleotide
uguaauacggaacuucaaa

SEQ ID NO: 3193611 - RNA, 19 nt, Artificial Sequence
  Description of Artificial Sequence: Synthetic oligonucleotide
guaauacggaacuucaaag

SEQ ID NO: 3193612 - RNA, 19 nt, Artificial Sequence
  Description of Artificial Sequence: Synthetic oligonucleotide
ucaacgcugaaguacuugg

SEQ ID NO: 3193613 - RNA, 19 nt, Artificial Sequence
  Description of Artificial Sequence: Synthetic oligonucleotide
aauacggaacuucaaaguu

SEQ ID NO: 3193614 - RNA, 19 nt, Artificial Sequence
  Description of Artificial Sequence: Synthetic oligonucleotide
aucuauucaucacagucuc

SEQ ID NO: 3193615 - RNA, 19 nt, Artificial Sequence
  Description of Artificial Sequence: Synthetic oligonucleotide
uucaguaacuuauaugccu

SEQ ID NO: 3193616 - RNA, 19 nt, Artificial Sequence
  Description of Artificial Sequence: Synthetic oligonucleotide
auuaaacauauuauuuuac

SEQ ID NO: 3193617 - RNA, 19 nt, Artificial Sequence
  Description of Artificial Sequence: Synthetic oligonucleotide
aguuccauaaauaucuuag

SEQ ID NO: 3193618 - RNA, 19 nt, Artificial Sequence
  Description of Artificial Sequence: Synthetic oligonucleotide
cuuagagucaaucagaugu

SEQ ID NO: 3193619 - RNA, 19 nt, Artificial Sequence
  Description of Artificial Sequence: Synthetic oligonucleotide
aucagauguaggcuuaagg

SEQ ID NO: 3193620 - RNA, 19 nt, Artificial Sequence
  Description of Artificial Sequence: Synthetic oligonucleotide
aggaucuuaaguuaaaauu

SEQ ID NO: 3193621 - RNA, 19 nt, Artificial Sequence
  Description of Artificial Sequence: Synthetic oligonucleotide
aaaccucuguuguaauacg

SEQ ID NO: 3193622 - RNA, 19 nt, Artificial Sequence
  Description of Artificial Sequence: Synthetic oligonucleotide
uauagcguaucaaaccucu

SEQ ID NO: 3193623 - RNA, 19 nt, Artificial Sequence
  Description of Artificial Sequence: Synthetic oligonucleotide
uauaaucaaaauaguucca

SEQ ID NO: 3193624 - RNA, 19 nt, Artificial Sequence
  Description of Artificial Sequence: Synthetic oligonucleotide
uuuacucuauuaaaagauc

SEQ ID NO: 3193625 - RNA, 19 nt, Artificial Sequence
  Description of Artificial Sequence: Synthetic oligonucleotide
ugaaauccaggauuuaggu

SEQ ID NO: 3193626 - RNA, 19 nt, Artificial Sequence
  Description of Artificial Sequence: Synthetic oligonucleotide
uaacuuauaugccucagua

SEQ ID NO: 3193627 - RNA, 19 nt, Artificial Sequence
  Description of Artificial Sequence: Synthetic oligonucleotide
gauguguagucguccaugg

SEQ ID NO: 3193628 - RNA, 19 nt, Artificial Sequence
  Description of Artificial Sequence: Synthetic oligonucleotide
uaauacggaacuucaaagu

SEQ ID NO: 3193629 - RNA, 19 nt, Artificial Sequence
  Description of Artificial Sequence: Synthetic oligonucleotide
aggucuaacaccuucuuga

SEQ ID NO: 3193630 - RNA, 19 nt, Artificial Sequence
  Description of Artificial Sequence: Synthetic oligonucleotide
cucucuugaaauaacuuug

SEQ ID NO: 3193631 - RNA, 19 nt, Artificial Sequence
  Description of Artificial Sequence: Synthetic oligonucleotide
ccauaaauaucuuagaguc

SEQ ID NO: 3193632 - RNA, 19 nt, Artificial Sequence
  Description of Artificial Sequence: Synthetic oligonucleotide
uaaaagaucuauucaucac

SEQ ID NO: 3193633 - RNA, 19 nt, Artificial Sequence
  Description of Artificial Sequence: Synthetic oligonucleotide
aaggaucuuaaguuaaaau

SEQ ID NO: 3193634 - RNA, 19 nt, Artificial Sequence
  Description of Artificial Sequence: Synthetic oligonucleotide
auaauguacauugauauua

SEQ ID NO: 3193635 - RNA, 19 nt, Artificial Sequence
  Description of Artificial Sequence: Synthetic oligonucleotide
ucaaaguuaggcaggauuu

SEQ ID NO: 3193636 - RNA, 19 nt, Artificial Sequence
  Description of Artificial Sequence: Synthetic oligonucleotide
auaaauaucuuagagucaa

SEQ ID NO: 3193637 - RNA, 19 nt, Artificial Sequence
  Description of Artificial Sequence: Synthetic oligonucleotide
auauuuugcuauaauaaug

SEQ ID NO: 3193638 - RNA, 19 nt, Artificial Sequence
  Description of Artificial Sequence: Synthetic oligonucleotide
ucuaaaaugcagucucuca

SEQ ID NO: 3193639 - RNA, 19 nt, Artificial Sequence
  Description of Artificial Sequence: Synthetic oligonucleotide
aaaauaccccagccuauag

SEQ ID NO: 3193640 - RNA, 19 nt, Artificial Sequence
  Description of Artificial Sequence: Synthetic oligonucleotide
aaacgccgaguacagcgcc

SEQ ID NO: 3193641 - RNA, 19 nt, Artificial Sequence
  Description of Artificial Sequence: Synthetic oligonucleotide
uuaaaauuucaguaacuua

SEQ ID NO: 3193642 - RNA, 19 nt, Artificial Sequence
  Description of Artificial Sequence: Synthetic oligonucleotide
aggcaggauuucuauagcc

SEQ ID NO: 3193643 - RNA, 19 nt, Artificial Sequence
  Description of Artificial Sequence: Synthetic oligonucleotide
uucaaaguuaggcaggauu

SEQ ID NO: 3193644 - RNA, 19 nt, Artificial Sequence
  Description of Artificial Sequence: Synthetic oligonucleotide
uacuuucacuucuaaaaug

SEQ ID NO: 3193645 - RNA, 19 nt, Artificial Sequence
  Description of Artificial Sequence: Synthetic oligonucleotide
caggauuuaggucuaacac

SEQ ID NO: 3193646 - RNA, 19 nt, Artificial Sequence
  Description of Artificial Sequence: Synthetic oligonucleotide
uuuaggucuaacaccuucu

SEQ ID NO: 3193647 - RNA, 19 nt, Artificial Sequence
  Description of Artificial Sequence: Synthetic oligonucleotide
ucuaaaauggucugcuuua

SEQ ID NO: 3193648 - RNA, 19 nt, Artificial Sequence
  Description of Artificial Sequence: Synthetic oligonucleotide
uaugcgguggccaaauccu

SEQ ID NO: 3193649 - RNA, 19 nt, Artificial Sequence
  Description of Artificial Sequence: Synthetic oligonucleotide
auuuacucuauuaaaagau

SEQ ID NO: 3193650 - RNA, 19 nt, Artificial Sequence
  Description of Artificial Sequence: Synthetic oligonucleotide
aauaaacgccgaguacagc

SEQ ID NO: 3193651 - RNA, 19 nt, Artificial Sequence
  Description of Artificial Sequence: Synthetic oligonucleotide
uaaaauggucugcuuuaag

SEQ ID NO: 3193652 - RNA, 19 nt, Artificial Sequence
  Description of Artificial Sequence: Synthetic oligonucleotide
aaaucaacgcugaaguacu

SEQ ID NO: 3193653 - RNA, 19 nt, Artificial Sequence
  Description of Artificial Sequence: Synthetic oligonucleotide
agauguaggcuuaaggauc

SEQ ID NO: 3193654 - RNA, 19 nt, Artificial Sequence
  Description of Artificial Sequence: Synthetic oligonucleotide
ucgucaaaauaccccagcc

SEQ ID NO: 3193655 - RNA, 19 nt, Artificial Sequence
  Description of Artificial Sequence: Synthetic oligonucleotide
uguuguuauaugcgguggc

SEQ ID NO: 3193656 - RNA, 19 nt, Artificial Sequence
  Description of Artificial Sequence: Synthetic oligonucleotide
ugcagucucucacauauaa

SEQ ID NO: 3193657 - RNA, 19 nt, Artificial Sequence
  Description of Artificial Sequence: Synthetic oligonucleotide
aggcuuaaggaucuuaagu

SEQ ID NO: 3193658 - RNA, 19 nt, Artificial Sequence
  Description of Artificial Sequence: Synthetic oligonucleotide
gaaaucuuccaaagcuucg

SEQ ID NO: 3193659 - RNA, 19 nt, Artificial Sequence
  Description of Artificial Sequence: Synthetic oligonucleotide
uucaucacagucucucuug

SEQ ID NO: 3193660 - RNA, 19 nt, Artificial Sequence
  Description of Artificial Sequence: Synthetic oligonucleotide
uaauguacauugauauuau

SEQ ID NO: 3193661 - RNA, 19 nt, Artificial Sequence
  Description of Artificial Sequence: Synthetic oligonucleotide
uuuaagcucaacacagcau

SEQ ID NO: 3193662 - RNA, 19 nt, Artificial Sequence
  Description of Artificial Sequence: Synthetic oligonucleotide
uucuauagccgauguguag

SEQ ID NO: 3193663 - RNA, 19 nt, Artificial Sequence
  Description of Artificial Sequence: Synthetic oligonucleotide
gaucuuaaguuaaaauuuc

SEQ ID NO: 3193664 - RNA, 19 nt, Artificial Sequence
  Description of Artificial Sequence: Synthetic oligonucleotide
uguuguaauacggaacuuc

SEQ ID NO: 3193665 - RNA, 19 nt, Artificial Sequence
  Description of Artificial Sequence: Synthetic oligonucleotide
ucuauagccgauguguagu

SEQ ID NO: 3193666 - RNA, 19 nt, Artificial Sequence
  Description of Artificial Sequence: Synthetic oligonucleotide
aaaucuuccaaagcuucgu

SEQ ID NO: 3193667 - RNA, 19 nt, Artificial Sequence
  Description of Artificial Sequence: Synthetic oligonucleotide
uuugucuaaaauggucugc

SEQ ID NO: 3193668 - RNA, 19 nt, Artificial Sequence
  Description of Artificial Sequence: Synthetic oligonucleotide
caauaaacgccgaguacag

SEQ ID NO: 3193669 - RNA, 19 nt, Artificial Sequence
  Description of Artificial Sequence: Synthetic oligonucleotide
ucucacauauaaucaaaau

SEQ ID NO: 3193670 - RNA, 19 nt, Artificial Sequence
  Description of Artificial Sequence: Synthetic oligonucleotide
uagcguaucaaaccucugu

SEQ ID NO: 3193671 - RNA, 19 nt, Artificial Sequence
  Description of Artificial Sequence: Synthetic oligonucleotide
aucuacaggaauuagaucc

SEQ ID NO: 3193672 - RNA, 19 nt, Artificial Sequence
  Description of Artificial Sequence: Synthetic oligonucleotide
cuugcaaauguccagaugg

SEQ ID NO: 3193673 - RNA, 19 nt, Artificial Sequence
  Description of Artificial Sequence: Synthetic oligonucleotide
uguguuucuacaaaguuca

SEQ ID NO: 3193674 - RNA, 19 nt, Artificial Sequence
  Description of Artificial Sequence: Synthetic oligonucleotide
aaaaucauuccucuggugu

SEQ ID NO: 3193675 - RNA, 19 nt, Artificial Sequence
  Description of Artificial Sequence: Synthetic oligonucleotide
uauaagagcgcucaguucu

SEQ ID NO: 3193676 - RNA, 19 nt, Artificial Sequence
  Description of Artificial Sequence: Synthetic oligonucleotide
aaggacaucggcuuuaaug

SEQ ID NO: 3193677 - RNA, 19 nt, Artificial Sequence
  Description of Artificial Sequence: Synthetic oligonucleotide
aaaucugccgacuccacgg

SEQ ID NO: 3193678 - RNA, 19 nt, Artificial Sequence
  Description of Artificial Sequence: Synthetic oligonucleotide
aaggaaagagaagauagcg

SEQ ID NO: 3193679 - RNA, 19 nt, Artificial Sequence
  Description of Artificial Sequence: Synthetic oligonucleotide
aggacaucggcuuuaaugg

SEQ ID NO: 3193680 - RNA, 19 nt, Artificial Sequence
  Description of Artificial Sequence: Synthetic oligonucleotide
uguagcuugaucauccugc

SEQ ID NO: 3193681 - RNA, 19 nt, Artificial Sequence
  Description of Artificial Sequence: Synthetic oligonucleotide
uucuacaaaguucagcacc

SEQ ID NO: 3193682 - RNA, 19 nt, Artificial Sequence
  Description of Artificial Sequence: Synthetic oligonucleotide
aaugccuaaaucugccgac

SEQ ID NO: 3193683 - RNA, 19 nt, Artificial Sequence
  Description of Artificial Sequence: Synthetic oligonucleotide
acuauguguagcuugauca

SEQ ID NO: 3193684 - RNA, 19 nt, Artificial Sequence
  Description of Artificial Sequence: Synthetic oligonucleotide
ucuggcuaaagucucacag

SEQ ID NO: 3193685 - RNA, 19 nt, Artificial Sequence
  Description of Artificial Sequence: Synthetic oligonucleotide
aaggucucuggcuaaaguc

SEQ ID NO: 3193686 - RNA, 19 nt, Artificial Sequence
  Description of Artificial Sequence: Synthetic oligonucleotide
ucugguguuguuuauaaga

SEQ ID NO: 3193687 - RNA, 19 nt, Artificial Sequence
  Description of Artificial Sequence: Synthetic oligonucleotide
ugaacuguagaguacguug

SEQ ID NO: 3193688 - RNA, 19 nt, Artificial Sequence
  Description of Artificial Sequence: Synthetic oligonucleotide
aaagagaagauagcgaaug

SEQ ID NO: 3193689 - RNA, 19 nt, Artificial Sequence
  Description of Artificial Sequence: Synthetic oligonucleotide
agguuuuaaacgcugcccc

SEQ ID NO: 3193690 - RNA, 19 nt, Artificial Sequence
  Description of Artificial Sequence: Synthetic oligonucleotide
ugaguauucagccaagcgu

SEQ ID NO: 3193691 - RNA, 19 nt, Artificial Sequence
  Description of Artificial Sequence: Synthetic oligonucleotide
guuaacugaguauucagcc

SEQ ID NO: 3193692 - RNA, 19 nt, Artificial Sequence
  Description of Artificial Sequence: Synthetic oligonucleotide
aguguaccuguucucaucc

SEQ ID NO: 3193693 - RNA, 19 nt, Artificial Sequence
  Description of Artificial Sequence: Synthetic oligonucleotide
augguugacaucuacagga

SEQ ID NO: 3193694 - RNA, 19 nt, Artificial Sequence
  Description of Artificial Sequence: Synthetic oligonucleotide
uguuaacugaguauucagc

SEQ ID NO: 3193695 - RNA, 19 nt, Artificial Sequence
  Description of Artificial Sequence: Synthetic oligonucleotide
aagauagcgaauguuaacu

SEQ ID NO: 3193696 - RNA, 19 nt, Artificial Sequence
  Description of Artificial Sequence: Synthetic oligonucleotide
agaugguugacaucuacag

SEQ ID NO: 3193697 - RNA, 19 nt, Artificial Sequence
  Description of Artificial Sequence: Synthetic oligonucleotide
ucuuugacuuccaacgaag

SEQ ID NO: 3193698 - RNA, 19 nt, Artificial Sequence
  Description of Artificial Sequence: Synthetic oligonucleotide
aauuagauccccaaugccu

SEQ ID NO: 3193699 - RNA, 19 nt, Artificial Sequence
  Description of Artificial Sequence: Synthetic oligonucleotide
uuuauaagagcgcucaguu

SEQ ID NO: 3193700 - RNA, 19 nt, Artificial Sequence
  Description of Artificial Sequence: Synthetic oligonucleotide
aaagcauccuuugucuucg

SEQ ID NO: 3193701 - RNA, 19 nt, Artificial Sequence
  Description of Artificial Sequence: Synthetic oligonucleotide
uccuguagcuucuugagug

SEQ ID NO: 3193702 - RNA, 19 nt, Artificial Sequence
  Description of Artificial Sequence: Synthetic oligonucleotide
uccaacgaaggaaagagaa

SEQ ID NO: 3193703 - RNA, 19 nt, Artificial Sequence
  Description of Artificial Sequence: Synthetic oligonucleotide
cuguagaguacguugauac

SEQ ID NO: 3193704 - RNA, 19 nt, Artificial Sequence
  Description of Artificial Sequence: Synthetic oligonucleotide
ucuacaaaguucagcaccu

SEQ ID NO: 3193705 - RNA, 19 nt, Artificial Sequence
  Description of Artificial Sequence: Synthetic oligonucleotide
cuuacugucgugcuggcgc

SEQ ID NO: 3193706 - RNA, 19 nt, Artificial Sequence
  Description of Artificial Sequence: Synthetic oligonucleotide
uuugacaagaagaccuccc

SEQ ID NO: 3193707 - RNA, 19 nt, Artificial Sequence
  Description of Artificial Sequence: Synthetic oligonucleotide
caugucuugggccagcacg

SEQ ID NO: 3193708 - RNA, 19 nt, Artificial Sequence
  Description of Artificial Sequence: Synthetic oligonucleotide
uuugcuagccaugucuugg

SEQ ID NO: 3193709 - RNA, 19 nt, Artificial Sequence
  Description of Artificial Sequence: Synthetic oligonucleotide
aauguuaacugaguauuca

SEQ ID NO: 3193710 - RNA, 19 nt, Artificial Sequence
  Description of Artificial Sequence: Synthetic oligonucleotide
ugugauauccuuugcuagc

SEQ ID NO: 3193711 - RNA, 19 nt, Artificial Sequence
  Description of Artificial Sequence: Synthetic oligonucleotide
gaugguugacaucuacagg

SEQ ID NO: 3193712 - RNA, 19 nt, Artificial Sequence
  Description of Artificial Sequence: Synthetic oligonucleotide
uaaaucugccgacuccacg

SEQ ID NO: 3193713 - RNA, 19 nt, Artificial Sequence
  Description of Artificial Sequence: Synthetic oligonucleotide
ucuacaggaauuagauccc

SEQ ID NO: 3193714 - RNA, 19 nt, Artificial Sequence
  Description of Artificial Sequence: Synthetic oligonucleotide
uuugucuucggcuugcaaa

SEQ ID NO: 3193715 - RNA, 19 nt, Artificial Sequence
  Description of Artificial Sequence: Synthetic oligonucleotide
agaugaacuguagaguacg

SEQ ID NO: 3193716 - RNA, 19 nt, Artificial Sequence
  Description of Artificial Sequence: Synthetic oligonucleotide
uuugacuuccaacgaagga

SEQ ID NO: 3193717 - RNA, 19 nt, Artificial Sequence
  Description of Artificial Sequence: Synthetic oligonucleotide
uaacugaguauucagccaa

SEQ ID NO: 3193718 - RNA, 19 nt, Artificial Sequence
  Description of Artificial Sequence: Synthetic oligonucleotide
uuaacugaguauucagcca

SEQ ID NO: 3193719 - RNA, 19 nt, Artificial Sequence
  Description of Artificial Sequence: Synthetic oligonucleotide
uaaauguugguuguguuuc

SEQ ID NO: 3193720 - RNA, 19 nt, Artificial Sequence
  Description of Artificial Sequence: Synthetic oligonucleotide
ugcaggagaauccuugcug

SEQ ID NO: 3193721 - RNA, 19 nt, Artificial Sequence
  Description of Artificial Sequence: Synthetic oligonucleotide
cugguguuguuuauaagag

SEQ ID NO: 3193722 - RNA, 19 nt, Artificial Sequence
  Description of Artificial Sequence: Synthetic oligonucleotide
auccccaaugccuaaaucu

SEQ ID NO: 3193723 - RNA, 19 nt, Artificial Sequence
  Description of Artificial Sequence: Synthetic oligonucleotide
agaggcuuccaacagcauc

SEQ ID NO: 3193724 - RNA, 19 nt, Artificial Sequence
  Description of Artificial Sequence: Synthetic oligonucleotide
gaguauucagccaagcgug

SEQ ID NO: 3193725 - RNA, 19 nt, Artificial Sequence
  Description of Artificial Sequence: Synthetic oligonucleotide
uaugugauauccuuugcua

SEQ ID NO: 3193726 - RNA, 19 nt, Artificial Sequence
  Description of Artificial Sequence: Synthetic oligonucleotide
auguuaacugaguauucag

SEQ ID NO: 3193727 - RNA, 19 nt, Artificial Sequence
  Description of Artificial Sequence: Synthetic oligonucleotide
ugccgauaaauguugguug

SEQ ID NO: 3193728 - RNA, 19 nt, Artificial Sequence
  Description of Artificial Sequence: Synthetic oligonucleotide
cuugagugcaggagaaucc

SEQ ID NO: 3193729 - RNA, 19 nt, Artificial Sequence
  Description of Artificial Sequence: Synthetic oligonucleotide
gcuaaagucucacagauga

SEQ ID NO: 3193730 - RNA, 19 nt, Artificial Sequence
  Description of Artificial Sequence: Synthetic oligonucleotide
uguuguuuauaagagcgcu

SEQ ID NO: 3193731 - RNA, 19 nt, Artificial Sequence
  Description of Artificial Sequence: Synthetic oligonucleotide
aaagucucacagaugaacu

SEQ ID NO: 3193732 - RNA, 19 nt, Artificial Sequence
  Description of Artificial Sequence: Synthetic oligonucleotide
uucgcaaacuccacaaagu

SEQ ID NO: 3193733 - RNA, 19 nt, Artificial Sequence
  Description of Artificial Sequence: Synthetic oligonucleotide
aagaagaccucccaugcua

SEQ ID NO: 3193734 - RNA, 19 nt, Artificial Sequence
  Description of Artificial Sequence: Synthetic oligonucleotide
uguuucuacaaaguucagc

SEQ ID NO: 3193735 - RNA, 19 nt, Artificial Sequence
  Description of Artificial Sequence: Synthetic oligonucleotide
aaguucuugucuuucgcaa

SEQ ID NO: 3193736 - RNA, 19 nt, Artificial Sequence
  Description of Artificial Sequence: Synthetic oligonucleotide
uucagcaccuggaaguucu

SEQ ID NO: 3193737 - RNA, 19 nt, Artificial Sequence
  Description of Artificial Sequence: Synthetic oligonucleotide
uugacuuccaacgaaggaa

SEQ ID NO: 3193738 - RNA, 19 nt, Artificial Sequence
  Description of Artificial Sequence: Synthetic oligonucleotide
gaagauagcgaauguuaac

SEQ ID NO: 3193739 - RNA, 19 nt, Artificial Sequence
  Description of Artificial Sequence: Synthetic oligonucleotide
uuuccuagaggcuuccaac

SEQ ID NO: 3193740 - RNA, 19 nt, Artificial Sequence
  Description of Artificial Sequence: Synthetic oligonucleotide
cuuugacuuccaacgaagg

SEQ ID NO: 3193741 - RNA, 19 nt, Artificial Sequence
  Description of Artificial Sequence: Synthetic oligonucleotide
aguucugguuuccuagagg

SEQ ID NO: 3193742 - RNA, 19 nt, Artificial Sequence
  Description of Artificial Sequence: Synthetic oligonucleotide
gauagcgaauguuaacuga

SEQ ID NO: 3193743 - RNA, 19 nt, Artificial Sequence
  Description of Artificial Sequence: Synthetic oligonucleotide
uggaaguucuugucuuucg

SEQ ID NO: 3193744 - RNA, 19 nt, Artificial Sequence
  Description of Artificial Sequence: Synthetic oligonucleotide
caagcgugauccauggugc

SEQ ID NO: 3193745 - RNA, 19 nt, Artificial Sequence
  Description of Artificial Sequence: Synthetic oligonucleotide
uugacaagaagaccuccca

SEQ ID NO: 3193746 - RNA, 19 nt, Artificial Sequence
  Description of Artificial Sequence: Synthetic oligonucleotide
uccccaaugccuaaaucug

SEQ ID NO: 3193747 - RNA, 19 nt, Artificial Sequence
  Description of Artificial Sequence: Synthetic oligonucleotide
aagagaagauagcgaaugu

SEQ ID NO: 3193748 - RNA, 19 nt, Artificial Sequence
  Description of Artificial Sequence: Synthetic oligonucleotide
ucuuucgcaaacuccacaa

SEQ ID NO: 3193749 - RNA, 19 nt, Artificial Sequence
  Description of Artificial Sequence: Synthetic oligonucleotide
aaaucauuccucugguguu

SEQ ID NO: 3193750 - RNA, 19 nt, Artificial Sequence
  Description of Artificial Sequence: Synthetic oligonucleotide
cucaguucugguuuccuag

SEQ ID NO: 3193751 - RNA, 19 nt, Artificial Sequence
  Description of Artificial Sequence: Synthetic oligonucleotide
auguugguuguguuucuac

SEQ ID NO: 3193752 - RNA, 19 nt, Artificial Sequence
  Description of Artificial Sequence: Synthetic oligonucleotide
uggcuaaagucucacagau

SEQ ID NO: 3193753 - RNA, 19 nt, Artificial Sequence
  Description of Artificial Sequence: Synthetic oligonucleotide
cugaguauucagccaagcg

SEQ ID NO: 3193754 - RNA, 19 nt, Artificial Sequence
  Description of Artificial Sequence: Synthetic oligonucleotide
uguugguuguguuucuaca

SEQ ID NO: 3193755 - RNA, 19 nt, Artificial Sequence
  Description of Artificial Sequence: Synthetic oligonucleotide
agauagcgaauguuaacug

SEQ ID NO: 3193756 - RNA, 19 nt, Artificial Sequence
  Description of Artificial Sequence: Synthetic oligonucleotide
aaucugccgacuccacggg

SEQ ID NO: 3193757 - RNA, 19 nt, Artificial Sequence
  Description of Artificial Sequence: Synthetic oligonucleotide
ugacuuccaacgaaggaaa

SEQ ID NO: 3193758 - RNA, 19 nt, Artificial Sequence
  Description of Artificial Sequence: Synthetic oligonucleotide
auagcgaauguuaacugag

SEQ ID NO: 3193759 - RNA, 19 nt, Artificial Sequence
  Description of Artificial Sequence: Synthetic oligonucleotide
uguuuauaagagcgcucag

SEQ ID NO: 3193760 - RNA, 19 nt, Artificial Sequence
  Description of Artificial Sequence: Synthetic oligonucleotide
auaaauguugguuguguuu

SEQ ID NO: 3193761 - RNA, 19 nt, Artificial Sequence
  Description of Artificial Sequence: Synthetic oligonucleotide
ugauccauggugcgggaca

SEQ ID NO: 3193762 - RNA, 19 nt, Artificial Sequence
  Description of Artificial Sequence: Synthetic oligonucleotide
uucggcuugcaaaugucca

SEQ ID NO: 3193763 - RNA, 19 nt, Artificial Sequence
  Description of Artificial Sequence: Synthetic oligonucleotide
uucuuugacuuccaacgaa

SEQ ID NO: 3193764 - RNA, 19 nt, Artificial Sequence
  Description of Artificial Sequence: Synthetic oligonucleotide
uguagcuucuugagugcag

SEQ ID NO: 3193765 - RNA, 19 nt, Artificial Sequence
  Description of Artificial Sequence: Synthetic oligonucleotide
uccuagaggcuuccaacag

SEQ ID NO: 3193766 - RNA, 19 nt, Artificial Sequence
  Description of Artificial Sequence: Synthetic oligonucleotide
ucgcaaacuccacaaaguc

SEQ ID NO: 3193767 - RNA, 19 nt, Artificial Sequence
  Description of Artificial Sequence: Synthetic oligonucleotide
ugguguuguuuauaagagc

SEQ ID NO: 3193768 - RNA, 19 nt, Artificial Sequence
  Description of Artificial Sequence: Synthetic oligonucleotide
uuuugacaagaagaccucc

SEQ ID NO: 3193769 - RNA, 19 nt, Artificial Sequence
  Description of Artificial Sequence: Synthetic oligonucleotide
cauccuguagcuucuugag

SEQ ID NO: 3193770 - RNA, 19 nt, Artificial Sequence
  Description of Artificial Sequence: Synthetic oligonucleotide
uuccuagaggcuuccaaca

SEQ ID NO: 3193771 - RNA, 19 nt, Artificial Sequence
  Description of Artificial Sequence: Synthetic oligonucleotide
  modified_base (3)..(3): a, c, u, g, unknown or other
  modified_base (7)..(7): a, c, u, g, unknown or other
uunuuunuuauauauauau

SEQ ID NO: 3193772 - RNA, 19 nt, Artificial Sequence
  Description of Artificial Sequence: Synthetic oligonucleotide
  modified_base (3)..(3): a, c, u, g, unknown or other
  modified_base (7)..(7): a, c, u, g, unknown or other
  modified_base (11)..(11): a, c, u, g, unknown or other
uunuuunuuunuuauauau

SEQ ID NO: 3193773 - RNA, 19 nt, Artificial Sequence
  Description of Artificial Sequence: Synthetic oligonucleotide
uuauuuauuuguuucuugg

SEQ ID NO: 3193774 - RNA, 19 nt, Artificial Sequence
  Description of Artificial Sequence: Synthetic oligonucleotide
  modified_base (5)..(5): a, c, u, g, unknown or other
  modified_base (9)..(9): a, c, u, g, unknown or other
  modified_base (13)..(13): a, c, u, g, unknown or other
uuuunuuunuuunuuauau

SEQ ID NO: 3193775 - RNA, 19 nt, Artificial Sequence
  Description of Artificial Sequence: Synthetic oligonucleotide
  modified_base (3)..(3): a, c, u, g, unknown or other
uunuuauauauauauauau

SEQ ID NO: 3193776 - RNA, 19 nt, Artificial Sequence
  Description of Artificial Sequence: Synthetic oligonucleotide
uuuuaaguuauuuauuugu

SEQ ID NO: 3193777 - RNA, 19 nt, Artificial Sequence
  Description of Artificial Sequence: Synthetic oligonucleotide
  modified_base (4)..(4): a, c, u, g, unknown or other
uuunuuauauauauauaua

SEQ ID NO: 3193778 - RNA, 19 nt, Artificial Sequence
  Description of Artificial Sequence: Synthetic oligonucleotide
uauuuauuuguuucuuggg

SEQ ID NO: 3193779 - RNA, 19 nt, Artificial Sequence
  Description of Artificial Sequence: Synthetic oligonucleotide
uaaguuauuuauuuguuuc

SEQ ID NO: 3193780 - RNA, 19 nt, Artificial Sequence
  Description of Artificial Sequence: Synthetic oligonucleotide
uuauuuguuucuugggacg

SEQ ID NO: 3193781 - RNA, 19 nt, Artificial Sequence
  Description of Artificial Sequence: Synthetic oligonucleotide
uuauauauauauauauuuu

SEQ ID NO: 3193782 - RNA, 19 nt, Artificial Sequence
  Description of Artificial Sequence: Synthetic oligonucleotide
  modified_base (2)..(2): a, c, u, g, unknown or other
  modified_base (6)..(6): a, c, u, g, unknown or other
  modified_base (10)..(10): a, c, u, g, unknown or other
unuuunuuunuuauauaua

SEQ ID NO: 3193783 - RNA, 19 nt, Artificial Sequence
  Description of Artificial Sequence: Synthetic oligonucleotide
uuuauuuguuucuugggac

SEQ ID NO: 3193784 - RNA, 19 nt, Artificial Sequence
  Description of Artificial Sequence: Synthetic oligonucleotide
  modified_base (2)..(2): a, c, u, g, unknown or other
unuuauauauauauauauu

SEQ ID NO: 3193785 - RNA, 19 nt, Artificial Sequence
  Description of Artificial Sequence: Synthetic oligonucleotide
auuuauuuguuucuuggga

SEQ ID NO: 3193786 - RNA, 19 nt, Artificial Sequence
  Description of Artificial Sequence: Synthetic oligonucleotide
aaguuauuuauuuguuucu

SEQ ID NO: 3193787 - RNA, 19 nt, Artificial Sequence
  Description of Artificial Sequence: Synthetic oligonucleotide
  modified_base (4)..(4): a, c, u, g, unknown or other
  modified_base (8)..(8): a, c, u, g, unknown or other
uuunuuunuuauauauaua

SEQ ID NO: 3193788 - RNA, 19 nt, Artificial Sequence
  Description of Artificial Sequence: Synthetic oligonucleotide
  modified_base (2)..(2): a, c, u, g, unknown or other
  modified_base (6)..(6): a, c, u, g, unknown or other
unuuunuuauauauauaua

SEQ ID NO: 3193789 - RNA, 19 nt, Artificial Sequence
  Description of Artificial Sequence: Synthetic oligonucleotide
uuuaaguuauuuauuuguu

SEQ ID NO: 3193790 - RNA, 19 nt, Artificial Sequence
  Description of Artificial Sequence: Synthetic oligonucleotide
uugguguucguucucgugc

SEQ ID NO: 3193791 - RNA, 19 nt, Artificial Sequence
  Description of Artificial Sequence: Synthetic oligonucleotide
  modified_base (4)..(4): a, c, u, g, unknown or other
  modified_base (8)..(8): a, c, u, g, unknown or other
  modified_base (12)..(12): a, c, u, g, unknown or other
uuunuuunuuunuuauaua

SEQ ID NO: 3193792 - RNA, 19 nt, Artificial Sequence
  Description of Artificial Sequence: Synthetic oligonucleotide
uauuuguuucuugggacgg

SEQ ID NO: 3193793 - RNA, 19 nt, Artificial Sequence
  Description of Artificial Sequence: Synthetic oligonucleotide
guuauuuauuuguuucuug

SEQ ID NO: 3193794 - RNA, 19 nt, Artificial Sequence
  Description of Artificial Sequence: Synthetic oligonucleotide
uguuucuugggacggaggu

SEQ ID NO: 3193795 - RNA, 19 nt, Artificial Sequence
  Description of Artificial Sequence: Synthetic oligonucleotide
uuaaguuauuuauuuguuu

SEQ ID NO: 3193796 - RNA, 19 nt, Artificial Sequence
  Description of Artificial Sequence: Synthetic oligonucleotide
uucacuugguguucguucu

SEQ ID NO: 3193797 - RNA, 19 nt, Artificial Sequence
  Description of Artificial Sequence: Synthetic oligonucleotide
uuuguuucuugggacggag

SEQ ID NO: 3193798 - RNA, 19 nt, Artificial Sequence
  Description of Artificial Sequence: Synthetic oligonucleotide
uuguuucuugggacggagg

SEQ ID NO: 3193799 - RNA, 19 nt, Artificial Sequence
  Description of Artificial Sequence: Synthetic oligonucleotide
uuucuugggacggagguuc

SEQ ID NO: 3193800 - RNA, 19 nt, Artificial Sequence
  Description of Artificial Sequence: Synthetic oligonucleotide
cuucacuugguguucguuc

SEQ ID NO: 3193801 - RNA, 19 nt, Artificial Sequence
  Description of Artificial Sequence: Synthetic oligonucleotide
ugguguucguucucgugcc

SEQ ID NO: 3193802 - RNA, 19 nt, Artificial Sequence
  Description of Artificial Sequence: Synthetic oligonucleotide
accuggugcucguugcucg

SEQ ID NO: 3193803 - RNA, 19 nt, Artificial Sequence
  Description of Artificial Sequence: Synthetic oligonucleotide
acggagguuccccaucggg

SEQ ID NO: 3193804 - RNA, 19 nt, Artificial Sequence
  Description of Artificial Sequence: Synthetic oligonucleotide
uucguucucgugccggccc

SEQ ID NO: 3193805 - RNA, 19 nt, Artificial Sequence
  Description of Artificial Sequence: Synthetic oligonucleotide
ggagguuccccaucgggcg

SEQ ID NO: 3193806 - RNA, 19 nt, Artificial Sequence
  Description of Artificial Sequence: Synthetic oligonucleotide
aguuauuuauuuguuucuu

SEQ ID NO: 3193807 - RNA, 19 nt, Artificial Sequence
  Description of Artificial Sequence: Synthetic oligonucleotide
uguucguucucgugccggc

SEQ ID NO: 3193808 - RNA, 19 nt, Artificial Sequence
  Description of Artificial Sequence: Synthetic oligonucleotide
cuugguguucguucucgug

SEQ ID NO: 3193809 - RNA, 19 nt, Artificial Sequence
  Description of Artificial Sequence: Synthetic oligonucleotide
guugcucggccccagcccc

SEQ ID NO: 3193810 - RNA, 19 nt, Artificial Sequence
  Description of Artificial Sequence: Synthetic oligonucleotide
ucguugcucggccccagcc

SEQ ID NO: 3193811 - RNA, 19 nt, Artificial Sequence
  Description of Artificial Sequence: Synthetic oligonucleotide
cacuugguguucguucucg

SEQ ID NO: 3193812 - RNA, 19 nt, Artificial Sequence
  Description of Artificial Sequence: Synthetic oligonucleotide
gagguuccccaucgggcgg

SEQ ID NO: 3193813 - RNA, 19 nt, Artificial Sequence
  Description of Artificial Sequence: Synthetic oligonucleotide
agguagggcacauuccuuu

SEQ ID NO: 3193814 - RNA, 19 nt, Artificial Sequence
  Description of Artificial Sequence: Synthetic oligonucleotide
uggugcucguugcucggcc

SEQ ID NO: 3193815 - RNA, 19 nt, Artificial Sequence
  Description of Artificial Sequence: Synthetic oligonucleotide
cuugggacggagguucccc

SEQ ID NO: 3193816 - RNA, 19 nt, Artificial Sequence
  Description of Artificial Sequence: Synthetic oligonucleotide
ucggccccagccccgaggc

SEQ ID NO: 3193817 - RNA, 19 nt, Artificial Sequence
  Description of Artificial Sequence: Synthetic oligonucleotide
cucgugccggcccaccugg

SEQ ID NO: 3193818 - RNA, 19 nt, Artificial Sequence
  Description of Artificial Sequence: Synthetic oligonucleotide
gaggcgcggugccaggcgg

SEQ ID NO: 3193819 - RNA, 19 nt, Artificial Sequence
  Description of Artificial Sequence: Synthetic oligonucleotide
uucuugggacggagguucc

SEQ ID NO: 3193820 - RNA, 19 nt, Artificial Sequence
  Description of Artificial Sequence: Synthetic oligonucleotide
ucucgugccggcccaccug

SEQ ID NO: 3193821 - RNA, 19 nt, Artificial Sequence
  Description of Artificial Sequence: Synthetic oligonucleotide
ggacggagguuccccaucg

SEQ ID NO: 3193822 - RNA, 19 nt, Artificial Sequence
  Description of Artificial Sequence: Synthetic oligonucleotide
guguucguucucgugccgg

SEQ ID NO: 3193823 - RNA, 19 nt, Artificial Sequence
  Description of Artificial Sequence: Synthetic oligonucleotide
gacggagguuccccaucgg

SEQ ID NO: 3193824 - RNA, 19 nt, Artificial Sequence
  Description of Artificial Sequence: Synthetic oligonucleotide
acuugguguucguucucgu

SEQ ID NO: 3193825 - RNA, 19 nt, Artificial Sequence
  Description of Artificial Sequence: Synthetic oligonucleotide
uugggacggagguucccca

SEQ ID NO: 3193826 - RNA, 19 nt, Artificial Sequence
  Description of Artificial Sequence: Synthetic oligonucleotide
ucacuugguguucguucuc

SEQ ID NO: 3193827 - RNA, 19 nt, Artificial Sequence
  Description of Artificial Sequence: Synthetic oligonucleotide
agccccgaggcgcggugcc

SEQ ID NO: 3193828 - RNA, 19 nt, Artificial Sequence
  Description of Artificial Sequence: Synthetic oligonucleotide
uucucgugccggcccaccu

SEQ ID NO: 3193829 - RNA, 19 nt, Artificial Sequence
  Description of Artificial Sequence: Synthetic oligonucleotide
auuuguuucuugggacgga

SEQ ID NO: 3193830 - RNA, 19 nt, Artificial Sequence
  Description of Artificial Sequence: Synthetic oligonucleotide
ucguucucgugccggccca

SEQ ID NO: 3193831 - RNA, 19 nt, Artificial Sequence
  Description of Artificial Sequence: Synthetic oligonucleotide
gugccggcccaccuggugc

SEQ ID NO: 3193832 - RNA, 19 nt, Artificial Sequence
  Description of Artificial Sequence: Synthetic oligonucleotide
ugccaggcggggcgggccg

SEQ ID NO: 3193833 - RNA, 19 nt, Artificial Sequence
  Description of Artificial Sequence: Synthetic oligonucleotide
uugcucggccccagccccg

SEQ ID NO: 3193834 - RNA, 19 nt, Artificial Sequence
  Description of Artificial Sequence: Synthetic oligonucleotide
ucuugggacggagguuccc

SEQ ID NO: 3193835 - RNA, 19 nt, Artificial Sequence
  Description of Artificial Sequence: Synthetic oligonucleotide
gugcucguugcucggcccc

SEQ ID NO: 3193836 - RNA, 19 nt, Artificial Sequence
  Description of Artificial Sequence: Synthetic oligonucleotide
gguguucguucucgugccg

SEQ ID NO: 3193837 - RNA, 19 nt, Artificial Sequence
  Description of Artificial Sequence: Synthetic oligonucleotide
cagggccggcuucacuugg

SEQ ID NO: 3193838 - RNA, 19 nt, Artificial Sequence
  Description of Artificial Sequence: Synthetic oligonucleotide
agguuccccaucgggcggg

SEQ ID NO: 3193839 - RNA, 19 nt, Artificial Sequence
  Description of Artificial Sequence: Synthetic oligonucleotide
cucggccccagccccgagg

SEQ ID NO: 3193840 - RNA, 19 nt, Artificial Sequence
  Description of Artificial Sequence: Synthetic oligonucleotide
guucguucucgugccggcc

SEQ ID NO: 3193841 - RNA, 19 nt, Artificial Sequence
  Description of Artificial Sequence: Synthetic oligonucleotide
ugccggcccaccuggugcu

SEQ ID NO: 3193842 - RNA, 19 nt, Artificial Sequence
  Description of Artificial Sequence: Synthetic oligonucleotide
ugggacggagguuccccau

SEQ ID NO: 3193843 - RNA, 19 nt, Artificial Sequence
  Description of Artificial Sequence: Synthetic oligonucleotide
ggugcucguugcucggccc

SEQ ID NO: 3193844 - RNA, 19 nt, Artificial Sequence
  Description of Artificial Sequence: Synthetic oligonucleotide
cggagguuccccaucgggc

SEQ ID NO: 3193845 - RNA, 19 nt, Artificial Sequence
  Description of Artificial Sequence: Synthetic oligonucleotide
cucguugcucggccccagc

SEQ ID NO: 3193846 - RNA, 19 nt, Artificial Sequence
  Description of Artificial Sequence: Synthetic oligonucleotide
cccaccuggugcucguugc

SEQ ID NO: 3193847 - RNA, 19 nt, Artificial Sequence
  Description of Artificial Sequence: Synthetic oligonucleotide
ucccagggccggcuucacu

SEQ ID NO: 3193848 - RNA, 19 nt, Artificial Sequence
  Description of Artificial Sequence: Synthetic oligonucleotide
ugcucguugcucggcccca

SEQ ID NO: 3193849 - RNA, 19 nt, Artificial Sequence
  Description of Artificial Sequence: Synthetic oligonucleotide
cuggugcucguugcucggc

SEQ ID NO: 3193850 - RNA, 19 nt, Artificial Sequence
  Description of Artificial Sequence: Synthetic oligonucleotide
ccuggugcucguugcucgg

SEQ ID NO: 3193851 - RNA, 19 nt, Artificial Sequence
  Description of Artificial Sequence: Synthetic oligonucleotide
caccuggugcucguugcuc

SEQ ID NO: 3193852 - RNA, 19 nt, Artificial Sequence
  Description of Artificial Sequence: Synthetic oligonucleotide
guucucgugccggcccacc

SEQ ID NO: 3193853 - RNA, 19 nt, Artificial Sequence
  Description of Artificial Sequence: Synthetic oligonucleotide
ggccccagccccgaggcgc

SEQ ID NO: 3193854 - RNA, 19 nt, Artificial Sequence
  Description of Artificial Sequence: Synthetic oligonucleotide
gggacggagguuccccauc

SEQ ID NO: 3193855 - RNA, 19 nt, Artificial Sequence
  Description of Artificial Sequence: Synthetic oligonucleotide
cguugcucggccccagccc

SEQ ID NO: 3193856 - RNA, 19 nt, Artificial Sequence
  Description of Artificial Sequence: Synthetic oligonucleotide
gggccggcuucacuuggug

SEQ ID NO: 3193857 - RNA, 19 nt, Artificial Sequence
  Description of Artificial Sequence: Synthetic oligonucleotide
ucgugccggcccaccuggu

SEQ ID NO: 3193858 - RNA, 19 nt, Artificial Sequence
  Description of Artificial Sequence: Synthetic oligonucleotide
ugcucggccccagccccga

SEQ ID NO: 3193859 - RNA, 19 nt, Artificial Sequence
  Description of Artificial Sequence: Synthetic oligonucleotide
gcccaccuggugcucguug

SEQ ID NO: 3193860 - RNA, 19 nt, Artificial Sequence
  Description of Artificial Sequence: Synthetic oligonucleotide
aggcgcggugccaggcggg

SEQ ID NO: 3193861 - RNA, 19 nt, Artificial Sequence
  Description of Artificial Sequence: Synthetic oligonucleotide
guuucuugggacggagguu

SEQ ID NO: 3193862 - RNA, 19 nt, Artificial Sequence
  Description of Artificial Sequence: Synthetic oligonucleotide
gugccaggcggggcgggcc

SEQ ID NO: 3193863 - RNA, 19 nt, Artificial Sequence
  Description of Artificial Sequence: Synthetic oligonucleotide
cgcggugccaggcggggcg

SEQ ID NO: 3193864 - RNA, 19 nt, Artificial Sequence
  Description of Artificial Sequence: Synthetic oligonucleotide
ccagggccggcuucacuug

SEQ ID NO: 3193865 - RNA, 19 nt, Artificial Sequence
  Description of Artificial Sequence: Synthetic oligonucleotide
agggccggcuucacuuggu

SEQ ID NO: 3193866 - RNA, 19 nt, Artificial Sequence
  Description of Artificial Sequence: Synthetic oligonucleotide
gguagggcacauuccuuuu

SEQ ID NO: 3193867 - RNA, 19 nt, Artificial Sequence
  Description of Artificial Sequence: Synthetic oligonucleotide
gccggcuucacuugguguu

SEQ ID NO: 3193868 - RNA, 19 nt, Artificial Sequence
  Description of Artificial Sequence: Synthetic oligonucleotide
ggcgcggugccaggcgggg

SEQ ID NO: 3193869 - RNA, 19 nt, Artificial Sequence
  Description of Artificial Sequence: Synthetic oligonucleotide
cagccccgaggcgcggugc

SEQ ID NO: 3193870 - RNA, 19 nt, Artificial Sequence
  Description of Artificial Sequence: Synthetic oligonucleotide
ggucccagggccggcuuca

SEQ ID NO: 3193871 - RNA, 19 nt, Artificial Sequence
  Description of Artificial Sequence: Synthetic oligonucleotide
aagaaguugacuuucuguc

SEQ ID NO: 3193872 - RNA, 19 nt, Artificial Sequence
  Description of Artificial Sequence: Synthetic oligonucleotide
aaagugucgaucuuuaccu

SEQ ID NO: 3193873 - RNA, 19 nt, Artificial Sequence
  Description of Artificial Sequence: Synthetic oligonucleotide
ucuucuuucacacugauuu

SEQ ID NO: 3193874 - RNA, 19 nt, Artificial Sequence
  Description of Artificial Sequence: Synthetic oligonucleotide
aauuuucugcugcuguugc

SEQ ID NO: 3193875 - RNA, 19 nt, Artificial Sequence
  Description of Artificial Sequence: Synthetic oligonucleotide
uuaucaucccacaagaagu

SEQ ID NO: 3193876 - RNA, 19 nt, Artificial Sequence
  Description of Artificial Sequence: Synthetic oligonucleotide
uuguauaccaaaagggugc

SEQ ID NO: 3193877 - RNA, 19 nt, Artificial Sequence
  Description of Artificial Sequence: Synthetic oligonucleotide
caauuugacaaguagaauc

SEQ ID NO: 3193878 - RNA, 19 nt, Artificial Sequence
  Description of Artificial Sequence: Synthetic oligonucleotide
uuaucugacguguugauac

SEQ ID NO: 3193879 - RNA, 19 nt, Artificial Sequence
  Description of Artificial Sequence: Synthetic oligonucleotide
ucauauguggagaaccagg

SEQ ID NO: 3193880 - RNA, 19 nt, Artificial Sequence
  Description of Artificial Sequence: Synthetic oligonucleotide
uauaccaaaagggugcugg

SEQ ID NO: 3193881 - RNA, 19 nt, Artificial Sequence
  Description of Artificial Sequence: Synthetic oligonucleotide
agugcgaagcuucucaucg

SEQ ID NO: 3193882 - RNA, 19 nt, Artificial Sequence
  Description of Artificial Sequence: Synthetic oligonucleotide
uguuguauaccaaaagggu

SEQ ID NO: 3193883 - RNA, 19 nt, Artificial Sequence
  Description of Artificial Sequence: Synthetic oligonucleotide
uuuaccuucagguucuuca

SEQ ID NO: 3193884 - RNA, 19 nt, Artificial Sequence
  Description of Artificial Sequence: Synthetic oligonucleotide
ucuuggauaauuuucugcu

SEQ ID NO: 3193885 - RNA, 19 nt, Artificial Sequence
  Description of Artificial Sequence: Synthetic oligonucleotide
agaaguugacuuucugucc

SEQ ID NO: 3193886 - RNA, 19 nt, Artificial Sequence
  Description of Artificial Sequence: Synthetic oligonucleotide
aaaacccaaaccucugguc

SEQ ID NO: 3193887 - RNA, 19 nt, Artificial Sequence
  Description of Artificial Sequence: Synthetic oligonucleotide
uauguggagaaccaggggu

SEQ ID NO: 3193888 - RNA, 19 nt, Artificial Sequence
  Description of Artificial Sequence: Synthetic oligonucleotide
guugauacagcucuuagca

SEQ ID NO: 3193889 - RNA, 19 nt, Artificial Sequence
  Description of Artificial Sequence: Synthetic oligonucleotide
uugacaaguagaaucauau

SEQ ID NO: 3193890 - RNA, 19 nt, Artificial Sequence
  Description of Artificial Sequence: Synthetic oligonucleotide
ucaggguuagcuuaggugu

SEQ ID NO: 3193891 - RNA, 19 nt, Artificial Sequence
  Description of Artificial Sequence: Synthetic oligonucleotide
ucuggcuccucacagagcc

SEQ ID NO: 3193892 - RNA, 19 nt, Artificial Sequence
  Description of Artificial Sequence: Synthetic oligonucleotide
ucgaucuuuaccuucaggu

SEQ ID NO: 3193893 - RNA, 19 nt, Artificial Sequence
  Description of Artificial Sequence: Synthetic oligonucleotide
ugcuucuucgcucaucagg

SEQ ID NO: 3193894 - RNA, 19 nt, Artificial Sequence
  Description of Artificial Sequence: Synthetic oligonucleotide
agcucuuagcaguaagucc

SEQ ID NO: 3193895 - RNA, 19 nt, Artificial Sequence
  Description of Artificial Sequence: Synthetic oligonucleotide
uuaaacgaugccaggagca

SEQ ID NO: 3193896 - RNA, 19 nt, Artificial Sequence
  Description of Artificial Sequence: Synthetic oligonucleotide
ucuuaaacgaugccaggag

SEQ ID NO: 3193897 - RNA, 19 nt, Artificial Sequence
  Description of Artificial Sequence: Synthetic oligonucleotide
cacaagguuggcaaggucg

SEQ ID NO: 3193898 - RNA, 19 nt, Artificial Sequence
  Description of Artificial Sequence: Synthetic oligonucleotide
uuuuggcgacuaaugaugg

SEQ ID NO: 3193899 - RNA, 19 nt, Artificial Sequence
  Description of Artificial Sequence: Synthetic oligonucleotide
ugcaacgaccacaauagcc

SEQ ID NO: 3193900 - RNA, 19 nt, Artificial Sequence
  Description of Artificial Sequence: Synthetic oligonucleotide
gguguuguauaccaaaagg

SEQ ID NO: 3193901 - RNA, 19 nt, Artificial Sequence
  Description of Artificial Sequence: Synthetic oligonucleotide
cauauguggagaaccaggg

SEQ ID NO: 3193902 - RNA, 19 nt, Artificial Sequence
  Description of Artificial Sequence: Synthetic oligonucleotide
gaucucauucuguucaucc

SEQ ID NO: 3193903 - RNA, 19 nt, Artificial Sequence
  Description of Artificial Sequence: Synthetic oligonucleotide
uuucacacugauuucguug

SEQ ID NO: 3193904 - RNA, 19 nt, Artificial Sequence
  Description of Artificial Sequence: Synthetic oligonucleotide
ucaaaacccaaaccucugg

SEQ ID NO: 3193905 - RNA, 19 nt, Artificial Sequence
  Description of Artificial Sequence: Synthetic oligonucleotide
gaaucauauguggagaacc

SEQ ID NO: 3193906 - RNA, 19 nt, Artificial Sequence
  Description of Artificial Sequence: Synthetic oligonucleotide
uucauucccgauuuccugg

SEQ ID NO: 3193907 - RNA, 19 nt, Artificial Sequence
  Description of Artificial Sequence: Synthetic oligonucleotide
accauuaucaucccacaag

SEQ ID NO: 3193908 - RNA, 19 nt, Artificial Sequence
  Description of Artificial Sequence: Synthetic oligonucleotide
ugacuuucuguccaccagg

SEQ ID NO: 3193909 - RNA, 19 nt, Artificial Sequence
  Description of Artificial Sequence: Synthetic oligonucleotide
caaagugucgaucuuuacc

SEQ ID NO: 3193910 - RNA, 19 nt, Artificial Sequence
  Description of Artificial Sequence: Synthetic oligonucleotide
uuuauugauaucaguuggu

SEQ ID NO: 3193911 - RNA, 19 nt, Artificial Sequence
  Description of Artificial Sequence: Synthetic oligonucleotide
guguuguauaccaaaaggg

SEQ ID NO: 3193912 - RNA, 19 nt, Artificial Sequence
  Description of Artificial Sequence: Synthetic oligonucleotide
gacaaguagaaucauaugu

SEQ ID NO: 3193913 - RNA, 19 nt, Artificial Sequence
  Description of Artificial Sequence: Synthetic oligonucleotide
ugggcaauuugacaaguag

SEQ ID NO: 3193914 - RNA, 19 nt, Artificial Sequence
  Description of Artificial Sequence: Synthetic oligonucleotide
aaggguugggaguuccucg

SEQ ID NO: 3193915 - RNA, 19 nt, Artificial Sequence
  Description of Artificial Sequence: Synthetic oligonucleotide
ucguuguugaauuuucuca

SEQ ID NO: 3193916 - RNA, 19 nt, Artificial Sequence
  Description of Artificial Sequence: Synthetic oligonucleotide
uauugauaucaguugguug

SEQ ID NO: 3193917 - RNA, 19 nt, Artificial Sequence
  Description of Artificial Sequence: Synthetic oligonucleotide
ugauacagcucuuagcagu

SEQ ID NO: 3193918 - RNA, 19 nt, Artificial Sequence
  Description of Artificial Sequence: Synthetic oligonucleotide
gugggaaauuuauugagag

SEQ ID NO: 3193919 - RNA, 19 nt, Artificial Sequence
  Description of Artificial Sequence: Synthetic oligonucleotide
aucucgucaaaacccaaac

SEQ ID NO: 3193920 - RNA, 19 nt, Artificial Sequence
  Description of Artificial Sequence: Synthetic oligonucleotide
uucuugggcaauuugacaa

SEQ ID NO: 3193921 - RNA, 19 nt, Artificial Sequence
  Description of Artificial Sequence: Synthetic oligonucleotide
uuguugaauuuucucagca

SEQ ID NO: 3193922 - RNA, 19 nt, Artificial Sequence
  Description of Artificial Sequence: Synthetic oligonucleotide
auaucaguugguuggccac

SEQ ID NO: 3193923 - RNA, 19 nt, Artificial Sequence
  Description of Artificial Sequence: Synthetic oligonucleotide
acugcaacgaccacaauag

SEQ ID NO: 3193924 - RNA, 19 nt, Artificial Sequence
  Description of Artificial Sequence: Synthetic oligonucleotide
aacgaugccaggagcaggc

SEQ ID NO: 3193925 - RNA, 19 nt, Artificial Sequence
  Description of Artificial Sequence: Synthetic oligonucleotide
uguugauacagcucuuagc

SEQ ID NO: 3193926 - RNA, 19 nt, Artificial Sequence
  Description of Artificial Sequence: Synthetic oligonucleotide
ucgucaaugaucucauucu

SEQ ID NO: 3193927 - RNA, 19 nt, Artificial Sequence
  Description of Artificial Sequence: Synthetic oligonucleotide
auucccgauuuccuggccc

SEQ ID NO: 3193928 - RNA, 19 nt, Artificial Sequence
  Description of Artificial Sequence: Synthetic oligonucleotide
gaggaaagggcauccaggc

SEQ ID NO: 3193929 - RNA, 19 nt, Artificial Sequence
  Description of Artificial Sequence: Synthetic oligonucleotide
auuucuugggcaauuugac

SEQ ID NO: 3193930 - RNA, 19 nt, Artificial Sequence
  Description of Artificial Sequence: Synthetic oligonucleotide
auaaaaucaccauuaucau

SEQ ID NO: 3193931 - RNA, 19 nt, Artificial Sequence
  Description of Artificial Sequence: Synthetic oligonucleotide
acaaguagaaucauaugug

SEQ ID NO: 3193932 - RNA, 19 nt, Artificial Sequence
  Description of Artificial Sequence: Synthetic oligonucleotide
agugucgaucuuuaccuuc

SEQ ID NO: 3193933 - RNA, 19 nt, Artificial Sequence
  Description of Artificial Sequence: Synthetic oligonucleotide
ucaucccacaagaaguuga

SEQ ID NO: 3193934 - RNA, 19 nt, Artificial Sequence
  Description of Artificial Sequence: Synthetic oligonucleotide
agguucuucagcaaaguuc

SEQ ID NO: 3193935 - RNA, 19 nt, Artificial Sequence
  Description of Artificial Sequence: Synthetic oligonucleotide
ucgcucaucaggcuggacc

SEQ ID NO: 3193936 - RNA, 19 nt, Artificial Sequence
  Description of Artificial Sequence: Synthetic oligonucleotide
guuguauaccaaaagggug

SEQ ID NO: 3193937 - RNA, 19 nt, Artificial Sequence
  Description of Artificial Sequence: Synthetic oligonucleotide
aacccaaaccucuggucuc

SEQ ID NO: 3193938 - RNA, 19 nt, Artificial Sequence
  Description of Artificial Sequence: Synthetic oligonucleotide
uccuucaaagugucgaucu

SEQ ID NO: 3193939 - RNA, 19 nt, Artificial Sequence
  Description of Artificial Sequence: Synthetic oligonucleotide
caguaaguccuucaaagug

SEQ ID NO: 3193940 - RNA, 19 nt, Artificial Sequence
  Description of Artificial Sequence: Synthetic oligonucleotide
cuuaaacgaugccaggagc

SEQ ID NO: 3193941 - RNA, 19 nt, Artificial Sequence
  Description of Artificial Sequence: Synthetic oligonucleotide
acgagcagcaauaaaauca

SEQ ID NO: 3193942 - RNA, 19 nt, Artificial Sequence
  Description of Artificial Sequence: Synthetic oligonucleotide
ucucgucaaaacccaaacc

SEQ ID NO: 3193943 - RNA, 19 nt, Artificial Sequence
  Description of Artificial Sequence: Synthetic oligonucleotide
gaaguugacuuucugucca

SEQ ID NO: 3193944 - RNA, 19 nt, Artificial Sequence
  Description of Artificial Sequence: Synthetic oligonucleotide
auuuucugcugcuguugcc

SEQ ID NO: 3193945 - RNA, 19 nt, Artificial Sequence
  Description of Artificial Sequence: Synthetic oligonucleotide
auucuuaaacgaugccagg

SEQ ID NO: 3193946 - RNA, 19 nt, Artificial Sequence
  Description of Artificial Sequence: Synthetic oligonucleotide
aaguugacuuucuguccac

SEQ ID NO: 3193947 - RNA, 19 nt, Artificial Sequence
  Description of Artificial Sequence: Synthetic oligonucleotide
uuagcaguaaguccuucaa

SEQ ID NO: 3193948 - RNA, 19 nt, Artificial Sequence
  Description of Artificial Sequence: Synthetic oligonucleotide
cuuucauucaucacuggca

SEQ ID NO: 3193949 - RNA, 19 nt, Artificial Sequence
  Description of Artificial Sequence: Synthetic oligonucleotide
uggcgacuaaugauggagg

SEQ ID NO: 3193950 - RNA, 19 nt, Artificial Sequence
  Description of Artificial Sequence: Synthetic oligonucleotide
uuaccuucagguucuucag

SEQ ID NO: 3193951 - RNA, 19 nt, Artificial Sequence
  Description of Artificial Sequence: Synthetic oligonucleotide
gggaaauuuauugagagca

SEQ ID NO: 3193952 - RNA, 19 nt, Artificial Sequence
  Description of Artificial Sequence: Synthetic oligonucleotide
auauguggagaaccagggg

SEQ ID NO: 3193953 - RNA, 19 nt, Artificial Sequence
  Description of Artificial Sequence: Synthetic oligonucleotide
cagguucugucuucgaucc

SEQ ID NO: 3193954 - RNA, 19 nt, Artificial Sequence
  Description of Artificial Sequence: Synthetic oligonucleotide
acuaaugauggaggaaagg

SEQ ID NO: 3193955 - RNA, 19 nt, Artificial Sequence
  Description of Artificial Sequence: Synthetic oligonucleotide
accacaauagccacgagca

SEQ ID NO: 3193956 - RNA, 19 nt, Artificial Sequence
  Description of Artificial Sequence: Synthetic oligonucleotide
uucuuaaacgaugccagga

SEQ ID NO: 3193957 - RNA, 19 nt, Artificial Sequence
  Description of Artificial Sequence: Synthetic oligonucleotide
caauaaaaucaccauuauc

SEQ ID NO: 3193958 - RNA, 19 nt, Artificial Sequence
  Description of Artificial Sequence: Synthetic oligonucleotide
ugggaaauuuauugagagc

SEQ ID NO: 3193959 - RNA, 19 nt, Artificial Sequence
  Description of Artificial Sequence: Synthetic oligonucleotide
gauaucaguugguuggcca

SEQ ID NO: 3193960 - RNA, 19 nt, Artificial Sequence
  Description of Artificial Sequence: Synthetic oligonucleotide
gaucagaucuggcucagca

SEQ ID NO: 3193961 - RNA, 19 nt, Artificial Sequence
  Description of Artificial Sequence: Synthetic oligonucleotide
agguguuguauaccaaaag

SEQ ID NO: 3193962 - RNA, 19 nt, Artificial Sequence
  Description of Artificial Sequence: Synthetic oligonucleotide
ucagcaauuucuugggcaa

SEQ ID NO: 3193963 - RNA, 19 nt, Artificial Sequence
  Description of Artificial Sequence: Synthetic oligonucleotide
aaucauauguggagaacca

SEQ ID NO: 3193964 - RNA, 19 nt, Artificial Sequence
  Description of Artificial Sequence: Synthetic oligonucleotide
uggaggaaagggcauccag

SEQ ID NO: 3193965 - RNA, 19 nt, Artificial Sequence
  Description of Artificial Sequence: Synthetic oligonucleotide
uuucuugggcaauuugaca

SEQ ID NO: 3193966 - RNA, 19 nt, Artificial Sequence
  Description of Artificial Sequence: Synthetic oligonucleotide
agcaauaaaaucaccauua

SEQ ID NO: 3193967 - RNA, 19 nt, Artificial Sequence
  Description of Artificial Sequence: Synthetic oligonucleotide
ugacaaguagaaucauaug

SEQ ID NO: 3193968 - RNA, 19 nt, Artificial Sequence
  Description of Artificial Sequence: Synthetic oligonucleotide
ucugacguguugauacagc

SEQ ID NO: 3193969 - RNA, 19 nt, Artificial Sequence
  Description of Artificial Sequence: Synthetic oligonucleotide
auuucguuguugaauuuuc

SEQ ID NO: 3193970 - RNA, 19 nt, Artificial Sequence
  Description of Artificial Sequence: Synthetic oligonucleotide
uugauacagcucuuagcag

SEQ ID NO: 3193971 - RNA, 19 nt, Artificial Sequence
  Description of Artificial Sequence: Synthetic oligonucleotide
acuagcacaaaauucgucc

SEQ ID NO: 3193972 - RNA, 19 nt, Artificial Sequence
  Description of Artificial Sequence: Synthetic oligonucleotide
gaugcuuugagauauuggg

SEQ ID NO: 3193973 - RNA, 19 nt, Artificial Sequence
  Description of Artificial Sequence: Synthetic oligonucleotide
uccacaucaucaaugaggg

SEQ ID NO: 3193974 - RNA, 19 nt, Artificial Sequence
  Description of Artificial Sequence: Synthetic oligonucleotide
aaugucuccauauguauca

SEQ ID NO: 3193975 - RNA, 19 nt, Artificial Sequence
  Description of Artificial Sequence: Synthetic oligonucleotide
gacgauuuuggacacauag

SEQ ID NO: 3193976 - RNA, 19 nt, Artificial Sequence
  Description of Artificial Sequence: Synthetic oligonucleotide
auauugggcaagcaaaugg

SEQ ID NO: 3193977 - RNA, 19 nt, Artificial Sequence
  Description of Artificial Sequence: Synthetic oligonucleotide
aauucguccuucuuaauga

SEQ ID NO: 3193978 - RNA, 19 nt, Artificial Sequence
  Description of Artificial Sequence: Synthetic oligonucleotide
aaauucguccuucuuaaug

SEQ ID NO: 3193979 - RNA, 19 nt, Artificial Sequence
  Description of Artificial Sequence: Synthetic oligonucleotide
uguacuguugcucacacuc

SEQ ID NO: 3193980 - RNA, 19 nt, Artificial Sequence
  Description of Artificial Sequence: Synthetic oligonucleotide
uauugggcaagcaaauggg

SEQ ID NO: 3193981 - RNA, 19 nt, Artificial Sequence
  Description of Artificial Sequence: Synthetic oligonucleotide
caaaugggcauaaugacag

SEQ ID NO: 3193982 - RNA, 19 nt, Artificial Sequence
  Description of Artificial Sequence: Synthetic oligonucleotide
ucguccuucuuaaugaccg

SEQ ID NO: 3193983 - RNA, 19 nt, Artificial Sequence
  Description of Artificial Sequence: Synthetic oligonucleotide
uuaaugaccgguuccagcc

SEQ ID NO: 3193984 - RNA, 19 nt, Artificial Sequence
  Description of Artificial Sequence: Synthetic oligonucleotide
aagcuuaugaugcuuugag

SEQ ID NO: 3193985 - RNA, 19 nt, Artificial Sequence
  Description of Artificial Sequence: Synthetic oligonucleotide
uacuucaacuucuuggagg

SEQ ID NO: 3193986 - RNA, 19 nt, Artificial Sequence
  Description of Artificial Sequence: Synthetic oligonucleotide
uggaugacgauuuuggaca

SEQ ID NO: 3193987 - RNA, 19 nt, Artificial Sequence
  Description of Artificial Sequence: Synthetic oligonucleotide
gucacuagcacaaaauucg

SEQ ID NO: 3193988 - RNA, 19 nt, Artificial Sequence
  Description of Artificial Sequence: Synthetic oligonucleotide
auaaugacagaggugaagg

SEQ ID NO: 3193989 - RNA, 19 nt, Artificial Sequence
  Description of Artificial Sequence: Synthetic oligonucleotide
cuccacaucaucaaugagg

SEQ ID NO: 3193990 - RNA, 19 nt, Artificial Sequence
  Description of Artificial Sequence: Synthetic oligonucleotide
ucacccagcaagaagcugg

SEQ ID NO: 3193991 - RNA, 19 nt, Artificial Sequence
  Description of Artificial Sequence: Synthetic oligonucleotide
aucuuaaugucacuagcac

SEQ ID NO: 3193992 - RNA, 19 nt, Artificial Sequence
  Description of Artificial Sequence: Synthetic oligonucleotide
agcaaaugggcauaaugac

SEQ ID NO: 3193993 - RNA, 19 nt, Artificial Sequence
  Description of Artificial Sequence: Synthetic oligonucleotide
auggaugacgauuuuggac

SEQ ID NO: 3193994 - RNA, 19 nt, Artificial Sequence
  Description of Artificial Sequence: Synthetic oligonucleotide
ucauguuuuguccccaucc

SEQ ID NO: 3193995 - RNA, 19 nt, Artificial Sequence
  Description of Artificial Sequence: Synthetic oligonucleotide
aaugaccgguuccagcccc

SEQ ID NO: 3193996 - RNA, 19 nt, Artificial Sequence
  Description of Artificial Sequence: Synthetic oligonucleotide
ugcuuugagauauugggca

SEQ ID NO: 3193997 - RNA, 19 nt, Artificial Sequence
  Description of Artificial Sequence: Synthetic oligonucleotide
aaugagggguacuucaacu

SEQ ID NO: 3193998 - RNA, 19 nt, Artificial Sequence
  Description of Artificial Sequence: Synthetic oligonucleotide
acacauaguauuccuugcc

SEQ ID NO: 3193999 - RNA, 19 nt, Artificial Sequence
  Description of Artificial Sequence: Synthetic oligonucleotide
ucaucuuaaugucacuagc

SEQ ID NO: 3194000 - RNA, 19 nt, Artificial Sequence
  Description of Artificial Sequence: Synthetic oligonucleotide
ugaugcuuugagauauugg

SEQ ID NO: 3194001 - RNA, 19 nt, Artificial Sequence
  Description of Artificial Sequence: Synthetic oligonucleotide
uucaucuuaaugucacuag

SEQ ID NO: 3194002 - RNA, 19 nt, Artificial Sequence
  Description of Artificial Sequence: Synthetic oligonucleotide
aaugacagaggugaaggug

SEQ ID NO: 3194003 - RNA, 19 nt, Artificial Sequence
  Description of Artificial Sequence: Synthetic oligonucleotide
aagcaaaugggcauaauga

SEQ ID NO: 3194004 - RNA, 19 nt, Artificial Sequence
  Description of Artificial Sequence: Synthetic oligonucleotide
aaugggcauaaugacagag

SEQ ID NO: 3194005 - RNA, 19 nt, Artificial Sequence
  Description of Artificial Sequence: Synthetic oligonucleotide
ucuuaaugucacuagcaca

SEQ ID NO: 3194006 - RNA, 19 nt, Artificial Sequence
  Description of Artificial Sequence: Synthetic oligonucleotide
agcuggaagcuuaugaugc

SEQ ID NO: 3194007 - RNA, 19 nt, Artificial Sequence
  Description of Artificial Sequence: Synthetic oligonucleotide
gggaugaacaugcugaggg

SEQ ID NO: 3194008 - RNA, 19 nt, Artificial Sequence
  Description of Artificial Sequence: Synthetic oligonucleotide
cauccagucacccagcaag

SEQ ID NO: 3194009 - RNA, 19 nt, Artificial Sequence
  Description of Artificial Sequence: Synthetic oligonucleotide
ugagauauugggcaagcaa

SEQ ID NO: 3194010 - RNA, 19 nt, Artificial Sequence
  Description of Artificial Sequence: Synthetic oligonucleotide
ucaacuucuuggaggaaag

SEQ ID NO: 3194011 - RNA, 19 nt, Artificial Sequence
  Description of Artificial Sequence: Synthetic oligonucleotide
cuuaaugucacuagcacaa

SEQ ID NO: 3194012 - RNA, 19 nt, Artificial Sequence
  Description of Artificial Sequence: Synthetic oligonucleotide
auuuuggacacauaguauu

SEQ ID NO: 3194013 - RNA, 19 nt, Artificial Sequence
  Description of Artificial Sequence: Synthetic oligonucleotide
accuuucauguuuuguccc

SEQ ID NO: 3194014 - RNA, 19 nt, Artificial Sequence
  Description of Artificial Sequence: Synthetic oligonucleotide
cuucuuggaggaaagcagg

SEQ ID NO: 3194015 - RNA, 19 nt, Artificial Sequence
  Description of Artificial Sequence: Synthetic oligonucleotide
ugucacuagcacaaaauuc

SEQ ID NO: 3194016 - RNA, 19 nt, Artificial Sequence
  Description of Artificial Sequence: Synthetic oligonucleotide
ugggcauaaugacagaggu

SEQ ID NO: 3194017 - RNA, 19 nt, Artificial Sequence
  Description of Artificial Sequence: Synthetic oligonucleotide
aagcuggaagcuuaugaug

SEQ ID NO: 3194018 - RNA, 19 nt, Artificial Sequence
  Description of Artificial Sequence: Synthetic oligonucleotide
cagucacccagcaagaagc

SEQ ID NO: 3194019 - RNA, 19 nt, Artificial Sequence
  Description of Artificial Sequence: Synthetic oligonucleotide
agaagcuggaagcuuauga

SEQ ID NO: 3194020 - RNA, 19 nt, Artificial Sequence
  Description of Artificial Sequence: Synthetic oligonucleotide
aggaaagcaggguacugac

SEQ ID NO: 3194021 - RNA, 19 nt, Artificial Sequence
  Description of Artificial Sequence: Synthetic oligonucleotide
uugcucacacuccacauca

SEQ ID NO: 3194022 - RNA, 19 nt, Artificial Sequence
  Description of Artificial Sequence: Synthetic oligonucleotide
uuuguccccauccagucac

SEQ ID NO: 3194023 - RNA, 19 nt, Artificial Sequence
  Description of Artificial Sequence: Synthetic oligonucleotide
uuaugaugcuuugagauau

SEQ ID NO: 3194024 - RNA, 19 nt, Artificial Sequence
  Description of Artificial Sequence: Synthetic oligonucleotide
acuucaacuucuuggagga

SEQ ID NO: 3194025 - RNA, 19 nt, Artificial Sequence
  Description of Artificial Sequence: Synthetic oligonucleotide
uucuuggaggaaagcaggg

SEQ ID NO: 3194026 - RNA, 19 nt, Artificial Sequence
  Description of Artificial Sequence: Synthetic oligonucleotide
uguuuuguccccauccagu

SEQ ID NO: 3194027 - RNA, 19 nt, Artificial Sequence
  Description of Artificial Sequence: Synthetic oligonucleotide
caagcaaaugggcauaaug

SEQ ID NO: 3194028 - RNA, 19 nt, Artificial Sequence
  Description of Artificial Sequence: Synthetic oligonucleotide
acaaaauucguccuucuua

SEQ ID NO: 3194029 - RNA, 19 nt, Artificial Sequence
  Description of Artificial Sequence: Synthetic oligonucleotide
gaccuuucauguuuugucc

SEQ ID NO: 3194030 - RNA, 19 nt, Artificial Sequence
  Description of Artificial Sequence: Synthetic oligonucleotide
uuuuggacacauaguauuc

SEQ ID NO: 3194031 - RNA, 19 nt, Artificial Sequence
  Description of Artificial Sequence: Synthetic oligonucleotide
ggguacuucaacuucuugg

SEQ ID NO: 3194032 - RNA, 19 nt, Artificial Sequence
  Description of Artificial Sequence: Synthetic oligonucleotide
aacuucuuggaggaaagca

SEQ ID NO: 3194033 - RNA, 19 nt, Artificial Sequence
  Description of Artificial Sequence: Synthetic oligonucleotide
aucaaugagggguacuuca

SEQ ID NO: 3194034 - RNA, 19 nt, Artificial Sequence
  Description of Artificial Sequence: Synthetic oligonucleotide
cuuaaugaccgguuccagc

SEQ ID NO: 3194035 - RNA, 19 nt, Artificial Sequence
  Description of Artificial Sequence: Synthetic oligonucleotide
ugaccuuucauguuuuguc

SEQ ID NO: 3194036 - RNA, 19 nt, Artificial Sequence
  Description of Artificial Sequence: Synthetic oligonucleotide
cuucuuaaugaccgguucc

SEQ ID NO: 3194037 - RNA, 19 nt, Artificial Sequence
  Description of Artificial Sequence: Synthetic oligonucleotide
gacacauaguauuccuugc

SEQ ID NO: 3194038 - RNA, 19 nt, Artificial Sequence
  Description of Artificial Sequence: Synthetic oligonucleotide
aaugucacuagcacaaaau

SEQ ID NO: 3194039 - RNA, 19 nt, Artificial Sequence
  Description of Artificial Sequence: Synthetic oligonucleotide
uccccauccagucacccag

SEQ ID NO: 3194040 - RNA, 19 nt, Artificial Sequence
  Description of Artificial Sequence: Synthetic oligonucleotide
uugggcaagcaaaugggca

SEQ ID NO: 3194041 - RNA, 19 nt, Artificial Sequence
  Description of Artificial Sequence: Synthetic oligonucleotide
auucguccuucuuaaugac

SEQ ID NO: 3194042 - RNA, 19 nt, Artificial Sequence
  Description of Artificial Sequence: Synthetic oligonucleotide
gaaagcaggguacugaccu

SEQ ID NO: 3194043 - RNA, 19 nt, Artificial Sequence
  Description of Artificial Sequence: Synthetic oligonucleotide
acagaggugaaggugacug

SEQ ID NO: 3194044 - RNA, 19 nt, Artificial Sequence
  Description of Artificial Sequence: Synthetic oligonucleotide
uuuggacacauaguauucc

SEQ ID NO: 3194045 - RNA, 19 nt, Artificial Sequence
  Description of Artificial Sequence: Synthetic oligonucleotide
augcuuugagauauugggc

SEQ ID NO: 3194046 - RNA, 19 nt, Artificial Sequence
  Description of Artificial Sequence: Synthetic oligonucleotide
uucagcagggcaaugucuc

SEQ ID NO: 3194047 - RNA, 19 nt, Artificial Sequence
  Description of Artificial Sequence: Synthetic oligonucleotide
aggugacugggguagacag

SEQ ID NO: 3194048 - RNA, 19 nt, Artificial Sequence
  Description of Artificial Sequence: Synthetic oligonucleotide
uuggaggaaagcaggguac

SEQ ID NO: 3194049 - RNA, 19 nt, Artificial Sequence
  Description of Artificial Sequence: Synthetic oligonucleotide
uuugagauauugggcaagc

SEQ ID NO: 3194050 - RNA, 19 nt, Artificial Sequence
  Description of Artificial Sequence: Synthetic oligonucleotide
ggcauaaugacagagguga

SEQ ID NO: 3194051 - RNA, 19 nt, Artificial Sequence
  Description of Artificial Sequence: Synthetic oligonucleotide
uaaugucacuagcacaaaa

SEQ ID NO: 3194052 - RNA, 19 nt, Artificial Sequence
  Description of Artificial Sequence: Synthetic oligonucleotide
auugggcaagcaaaugggc

SEQ ID NO: 3194053 - RNA, 19 nt, Artificial Sequence
  Description of Artificial Sequence: Synthetic oligonucleotide
uuucagcagggcaaugucu

SEQ ID NO: 3194054 - RNA, 19 nt, Artificial Sequence
  Description of Artificial Sequence: Synthetic oligonucleotide
acuucuuggaggaaagcag

SEQ ID NO: 3194055 - RNA, 19 nt, Artificial Sequence
  Description of Artificial Sequence: Synthetic oligonucleotide
uacuguugcucacacucca

SEQ ID NO: 3194056 - RNA, 19 nt, Artificial Sequence
  Description of Artificial Sequence: Synthetic oligonucleotide
ggauggaugacgauuuugg

SEQ ID NO: 3194057 - RNA, 19 nt, Artificial Sequence
  Description of Artificial Sequence: Synthetic oligonucleotide
agcacaaaauucguccuuc

SEQ ID NO: 3194058 - RNA, 19 nt, Artificial Sequence
  Description of Artificial Sequence: Synthetic oligonucleotide
uucuuaaugaccgguucca

SEQ ID NO: 3194059 - RNA, 19 nt, Artificial Sequence
  Description of Artificial Sequence: Synthetic oligonucleotide
agaggugaaggugacuggg

SEQ ID NO: 3194060 - RNA, 19 nt, Artificial Sequence
  Description of Artificial Sequence: Synthetic oligonucleotide
cauaaugacagaggugaag

SEQ ID NO: 3194061 - RNA, 19 nt, Artificial Sequence
  Description of Artificial Sequence: Synthetic oligonucleotide
uuucaucuuaaugucacua

SEQ ID NO: 3194062 - RNA, 19 nt, Artificial Sequence
  Description of Artificial Sequence: Synthetic oligonucleotide
caaaauucguccuucuuaa

SEQ ID NO: 3194063 - RNA, 19 nt, Artificial Sequence
  Description of Artificial Sequence: Synthetic oligonucleotide
gagauauugggcaagcaaa

SEQ ID NO: 3194064 - RNA, 19 nt, Artificial Sequence
  Description of Artificial Sequence: Synthetic oligonucleotide
uuggacacauaguauuccu

SEQ ID NO: 3194065 - RNA, 19 nt, Artificial Sequence
  Description of Artificial Sequence: Synthetic oligonucleotide
uucguccuucuuaaugacc

SEQ ID NO: 3194066 - RNA, 19 nt, Artificial Sequence
  Description of Artificial Sequence: Synthetic oligonucleotide
caucuuaaugucacuagca

SEQ ID NO: 3194067 - RNA, 19 nt, Artificial Sequence
  Description of Artificial Sequence: Synthetic oligonucleotide
aggguacugaccuuucaug

SEQ ID NO: 3194068 - RNA, 19 nt, Artificial Sequence
  Description of Artificial Sequence: Synthetic oligonucleotide
auguuuuguccccauccag

SEQ ID NO: 3194069 - RNA, 19 nt, Artificial Sequence
  Description of Artificial Sequence: Synthetic oligonucleotide
ugagggguacuucaacuuc

SEQ ID NO: 3194070 - RNA, 19 nt, Artificial Sequence
  Description of Artificial Sequence: Synthetic oligonucleotide
gauauugggcaagcaaaug

SEQ ID NO: 3194071 - RNA, 19 nt, Artificial Sequence
  Description of Artificial Sequence: Synthetic oligonucleotide
aaauagaccuaacauaguc

SEQ ID NO: 3194072 - RNA, 19 nt, Artificial Sequence
  Description of Artificial Sequence: Synthetic oligonucleotide
aacauagucauccaggcug

SEQ ID NO: 3194073 - RNA, 19 nt, Artificial Sequence
  Description of Artificial Sequence: Synthetic oligonucleotide
agaccuaacauagucaucc

SEQ ID NO: 3194074 - RNA, 19 nt, Artificial Sequence
  Description of Artificial Sequence: Synthetic oligonucleotide
agagcugucugcuacagac

SEQ ID NO: 3194075 - RNA, 19 nt, Artificial Sequence
  Description of Artificial Sequence: Synthetic oligonucleotide
ugugauaacucuucgcaag

SEQ ID NO: 3194076 - RNA, 19 nt, Artificial Sequence
  Description of Artificial Sequence: Synthetic oligonucleotide
aaggagagcugucugcuac

SEQ ID NO: 3194077 - RNA, 19 nt, Artificial Sequence
  Description of Artificial Sequence: Synthetic oligonucleotide
gaagagccaguccagaggg

SEQ ID NO: 3194078 - RNA, 19 nt, Artificial Sequence
  Description of Artificial Sequence: Synthetic oligonucleotide
uuguccagcacugaggugg

SEQ ID NO: 3194079 - RNA, 19 nt, Artificial Sequence
  Description of Artificial Sequence: Synthetic oligonucleotide
cuaacauagucauccaggc

SEQ ID NO: 3194080 - RNA, 19 nt, Artificial Sequence
  Description of Artificial Sequence: Synthetic oligonucleotide
ugggacuucccgaagagcc

SEQ ID NO: 3194081 - RNA, 19 nt, Artificial Sequence
  Description of Artificial Sequence: Synthetic oligonucleotide
auaacucuucgcaaguucc

SEQ ID NO: 3194082 - RNA, 19 nt, Artificial Sequence
  Description of Artificial Sequence: Synthetic oligonucleotide
ugugccagcuggcaaauag

SEQ ID NO: 3194083 - RNA, 19 nt, Artificial Sequence
  Description of Artificial Sequence: Synthetic oligonucleotide
uagucauccaggcugggag

SEQ ID NO: 3194084 - RNA, 19 nt, Artificial Sequence
  Description of Artificial Sequence: Synthetic oligonucleotide
auugcugugggucagcaga

SEQ ID NO: 3194085 - RNA, 19 nt, Artificial Sequence
  Description of Artificial Sequence: Synthetic oligonucleotide
ugugggucagcagacaggg

SEQ ID NO: 3194086 - RNA, 19 nt, Artificial Sequence
  Description of Artificial Sequence: Synthetic oligonucleotide
uucucucuaguccaggcug

SEQ ID NO: 3194087 - RNA, 19 nt, Artificial Sequence
  Description of Artificial Sequence: Synthetic oligonucleotide
ugggucagcagacagggug

SEQ ID NO: 3194088 - RNA, 19 nt, Artificial Sequence
  Description of Artificial Sequence: Synthetic oligonucleotide
ucugcuacagacucggccu

SEQ ID NO: 3194089 - RNA, 19 nt, Artificial Sequence
  Description of Artificial Sequence: Synthetic oligonucleotide
gcaaauagaccuaacauag

SEQ ID NO: 3194090 - RNA, 19 nt, Artificial Sequence
  Description of Artificial Sequence: Synthetic oligonucleotide
ucuuguccagcacugaggu

SEQ ID NO: 3194091 - RNA, 19 nt, Artificial Sequence
  Description of Artificial Sequence: Synthetic oligonucleotide
uggcaaauagaccuaacau

SEQ ID NO: 3194092 - RNA, 19 nt, Artificial Sequence
  Description of Artificial Sequence: Synthetic oligonucleotide
auagaccuaacauagucau

SEQ ID NO: 3194093 - RNA, 19 nt, Artificial Sequence
  Description of Artificial Sequence: Synthetic oligonucleotide
agcaaggagagcugucugc

SEQ ID NO: 3194094 - RNA, 19 nt, Artificial Sequence
  Description of Artificial Sequence: Synthetic oligonucleotide
ucggcuucggaucuugucc

SEQ ID NO: 3194095 - RNA, 19 nt, Artificial Sequence
  Description of Artificial Sequence: Synthetic oligonucleotide
aauagaccuaacauaguca

SEQ ID NO: 3194096 - RNA, 19 nt, Artificial Sequence
  Description of Artificial Sequence: Synthetic oligonucleotide
aaguucccgaauugucggc

SEQ ID NO: 3194097 - RNA, 19 nt, Artificial Sequence
  Description of Artificial Sequence: Synthetic oligonucleotide
uucccgaagagccagucca

SEQ ID NO: 3194098 - RNA, 19 nt, Artificial Sequence
  Description of Artificial Sequence: Synthetic oligonucleotide
caaguucccgaauugucgg

SEQ ID NO: 3194099 - RNA, 19 nt, Artificial Sequence
  Description of Artificial Sequence: Synthetic oligonucleotide
aauugucggcaaguguggc

SEQ ID NO: 3194100 - RNA, 19 nt, Artificial Sequence
  Description of Artificial Sequence: Synthetic oligonucleotide
agcugucugcuacagacuc

SEQ ID NO: 3194101 - RNA, 19 nt, Artificial Sequence
  Description of Artificial Sequence: Synthetic oligonucleotide
caugugauaacucuucgca

SEQ ID NO: 3194102 - RNA, 19 nt, Artificial Sequence
  Description of Artificial Sequence: Synthetic oligonucleotide
ugcugaagcaaggagagcu

SEQ ID NO: 3194103 - RNA, 19 nt, Artificial Sequence
  Description of Artificial Sequence: Synthetic oligonucleotide
gguauggucuaugaggucg

SEQ ID NO: 3194104 - RNA, 19 nt, Artificial Sequence
  Description of Artificial Sequence: Synthetic oligonucleotide
caucucuucucucuagucc

SEQ ID NO: 3194105 - RNA, 19 nt, Artificial Sequence
  Description of Artificial Sequence: Synthetic oligonucleotide
ccuaacauagucauccagg

SEQ ID NO: 3194106 - RNA, 19 nt, Artificial Sequence
  Description of Artificial Sequence: Synthetic oligonucleotide
gaucuuguccagcacugag

SEQ ID NO: 3194107 - RNA, 19 nt, Artificial Sequence
  Description of Artificial Sequence: Synthetic oligonucleotide
gauaacucuucgcaaguuc

SEQ ID NO: 3194108 - RNA, 19 nt, Artificial Sequence
  Description of Artificial Sequence: Synthetic oligonucleotide
cucuaguccaggcuggccg

SEQ ID NO: 3194109 - RNA, 19 nt, Artificial Sequence
  Description of Artificial Sequence: Synthetic oligonucleotide
augaggucggcuucggauc

SEQ ID NO: 3194110 - RNA, 19 nt, Artificial Sequence
  Description of Artificial Sequence: Synthetic oligonucleotide
ucucucuaguccaggcugg

SEQ ID NO: 3194111 - RNA, 19 nt, Artificial Sequence
  Description of Artificial Sequence: Synthetic oligonucleotide
aacucuucgcaaguucccg

SEQ ID NO: 3194112 - RNA, 19 nt, Artificial Sequence
  Description of Artificial Sequence: Synthetic oligonucleotide
uguaggcugcugaagcaag

SEQ ID NO: 3194113 - RNA, 19 nt, Artificial Sequence
  Description of Artificial Sequence: Synthetic oligonucleotide
gcaaguguggcacaggcag

SEQ ID NO: 3194114 - RNA, 19 nt, Artificial Sequence
  Description of Artificial Sequence: Synthetic oligonucleotide
uaugaggucggcuucggau

SEQ ID NO: 3194115 - RNA, 19 nt, Artificial Sequence
  Description of Artificial Sequence: Synthetic oligonucleotide
aucucuucucucuagucca

SEQ ID NO: 3194116 - RNA, 19 nt, Artificial Sequence
  Description of Artificial Sequence: Synthetic oligonucleotide
ugucagugccaggagaggg

SEQ ID NO: 3194117 - RNA, 19 nt, Artificial Sequence
  Description of Artificial Sequence: Synthetic oligonucleotide
gccgguauggucuaugagg

SEQ ID NO: 3194118 - RNA, 19 nt, Artificial Sequence
  Description of Artificial Sequence: Synthetic oligonucleotide
uucgcaaguucccgaauug

SEQ ID NO: 3194119 - RNA, 19 nt, Artificial Sequence
  Description of Artificial Sequence: Synthetic oligonucleotide
gaauugucggcaagugugg

SEQ ID NO: 3194120 - RNA, 19 nt, Artificial Sequence
  Description of Artificial Sequence: Synthetic oligonucleotide
uaacucuucgcaaguuccc

SEQ ID NO: 3194121 - RNA, 19 nt, Artificial Sequence
  Description of Artificial Sequence: Synthetic oligonucleotide
uggcacaggcagcagaagc

SEQ ID NO: 3194122 - RNA, 19 nt, Artificial Sequence
  Description of Artificial Sequence: Synthetic oligonucleotide
ucuaguccaggcuggccgg

SEQ ID NO: 3194123 - RNA, 19 nt, Artificial Sequence
  Description of Artificial Sequence: Synthetic oligonucleotide
gaagccgggaccucauugc

SEQ ID NO: 3194124 - RNA, 19 nt, Artificial Sequence
  Description of Artificial Sequence: Synthetic oligonucleotide
ucuucucucuaguccaggc

SEQ ID NO: 3194125 - RNA, 19 nt, Artificial Sequence
  Description of Artificial Sequence: Synthetic oligonucleotide
caggcugggagaauuuggg

SEQ ID NO: 3194126 - RNA, 19 nt, Artificial Sequence
  Description of Artificial Sequence: Synthetic oligonucleotide
acagacucggccuggcauc

SEQ ID NO: 3194127 - RNA, 19 nt, Artificial Sequence
  Description of Artificial Sequence: Synthetic oligonucleotide
gguggugagagucuggaug

SEQ ID NO: 3194128 - RNA, 19 nt, Artificial Sequence
  Description of Artificial Sequence: Synthetic oligonucleotide
ucagcagacagggugguga

SEQ ID NO: 3194129 - RNA, 19 nt, Artificial Sequence
  Description of Artificial Sequence: Synthetic oligonucleotide
ucggaucuuguccagcacu

SEQ ID NO: 3194130 - RNA, 19 nt, Artificial Sequence
  Description of Artificial Sequence: Synthetic oligonucleotide
aagcaaggagagcugucug

SEQ ID NO: 3194131 - RNA, 19 nt, Artificial Sequence
  Description of Artificial Sequence: Synthetic oligonucleotide
accuaacauagucauccag

SEQ ID NO: 3194132 - RNA, 19 nt, Artificial Sequence
  Description of Artificial Sequence: Synthetic oligonucleotide
uaacauagucauccaggcu

SEQ ID NO: 3194133 - RNA, 19 nt, Artificial Sequence
  Description of Artificial Sequence: Synthetic oligonucleotide
guugucagugccaggagag

SEQ ID NO: 3194134 - RNA, 19 nt, Artificial Sequence
  Description of Artificial Sequence: Synthetic oligonucleotide
ugccagcuggcaaauagac

SEQ ID NO: 3194135 - RNA, 19 nt, Artificial Sequence
  Description of Artificial Sequence: Synthetic oligonucleotide
uguggcacaggcagcagaa

SEQ ID NO: 3194136 - RNA, 19 nt, Artificial Sequence
  Description of Artificial Sequence: Synthetic oligonucleotide
agaagccgggaccucauug

SEQ ID NO: 3194137 - RNA, 19 nt, Artificial Sequence
  Description of Artificial Sequence: Synthetic oligonucleotide
agacaggguggugagaguc

SEQ ID NO: 3194138 - RNA, 19 nt, Artificial Sequence
  Description of Artificial Sequence: Synthetic oligonucleotide
gucugcuacagacucggcc

SEQ ID NO: 3194139 - RNA, 19 nt, Artificial Sequence
  Description of Artificial Sequence: Synthetic oligonucleotide
agugccaggagagggcagc

SEQ ID NO: 3194140 - RNA, 19 nt, Artificial Sequence
  Description of Artificial Sequence: Synthetic oligonucleotide
ugccccaugugauaacucu

SEQ ID NO: 3194141 - RNA, 19 nt, Artificial Sequence
  Description of Artificial Sequence: Synthetic oligonucleotide
gagagucuggaugagaaaa

SEQ ID NO: 3194142 - RNA, 19 nt, Artificial Sequence
  Description of Artificial Sequence: Synthetic oligonucleotide
uggucuaugaggucggcuu

SEQ ID NO: 3194143 - RNA, 19 nt, Artificial Sequence
  Description of Artificial Sequence: Synthetic oligonucleotide
cugucugcuacagacucgg

SEQ ID NO: 3194144 - RNA, 19 nt, Artificial Sequence
  Description of Artificial Sequence: Synthetic oligonucleotide
uacagacucggccuggcau

SEQ ID NO: 3194145 - RNA, 19 nt, Artificial Sequence
  Description of Artificial Sequence: Synthetic oligonucleotide
aaguguggcacaggcagca

SEQ ID NO: 3194146 - RNA, 19 nt, Artificial Sequence
  Description of Artificial Sequence: Synthetic oligonucleotide
uguccagcacugagguggg

SEQ ID NO: 3194147 - RNA, 19 nt, Artificial Sequence
  Description of Artificial Sequence: Synthetic oligonucleotide
ucucuucucucuaguccag

SEQ ID NO: 3194148 - RNA, 19 nt, Artificial Sequence
  Description of Artificial Sequence: Synthetic oligonucleotide
aggcugggagaauuugggg

SEQ ID NO: 3194149 - RNA, 19 nt, Artificial Sequence
  Description of Artificial Sequence: Synthetic oligonucleotide
guggugagagucuggauga

SEQ ID NO: 3194150 - RNA, 19 nt, Artificial Sequence
  Description of Artificial Sequence: Synthetic oligonucleotide
aucuuguccagcacugagg

SEQ ID NO: 3194151 - RNA, 19 nt, Artificial Sequence
  Description of Artificial Sequence: Synthetic oligonucleotide
acauagucauccaggcugg

SEQ ID NO: 3194152 - RNA, 19 nt, Artificial Sequence
  Description of Artificial Sequence: Synthetic oligonucleotide
uugucggcaaguguggcac

SEQ ID NO: 3194153 - RNA, 19 nt, Artificial Sequence
  Description of Artificial Sequence: Synthetic oligonucleotide
cuggcaaauagaccuaaca

SEQ ID NO: 3194154 - RNA, 19 nt, Artificial Sequence
  Description of Artificial Sequence: Synthetic oligonucleotide
gcaaguucccgaauugucg

SEQ ID NO: 3194155 - RNA, 19 nt, Artificial Sequence
  Description of Artificial Sequence: Synthetic oligonucleotide
cgaauugucggcaagugug

SEQ ID NO: 3194156 - RNA, 19 nt, Artificial Sequence
  Description of Artificial Sequence: Synthetic oligonucleotide
ggcaaauagaccuaacaua

SEQ ID NO: 3194157 - RNA, 19 nt, Artificial Sequence
  Description of Artificial Sequence: Synthetic oligonucleotide
ugaggucggcuucggaucu

SEQ ID NO: 3194158 - RNA, 19 nt, Artificial Sequence
  Description of Artificial Sequence: Synthetic oligonucleotide
caguccagaggguugucag

SEQ ID NO: 3194159 - RNA, 19 nt, Artificial Sequence
  Description of Artificial Sequence: Synthetic oligonucleotide
augugauaacucuucgcaa

SEQ ID NO: 3194160 - RNA, 19 nt, Artificial Sequence
  Description of Artificial Sequence: Synthetic oligonucleotide
auugucggcaaguguggca

SEQ ID NO: 3194161 - RNA, 19 nt, Artificial Sequence
  Description of Artificial Sequence: Synthetic oligonucleotide
agaggguugucagugccag

SEQ ID NO: 3194162 - RNA, 19 nt, Artificial Sequence
  Description of Artificial Sequence: Synthetic oligonucleotide
cugugggucagcagacagg

SEQ ID NO: 3194163 - RNA, 19 nt, Artificial Sequence
  Description of Artificial Sequence: Synthetic oligonucleotide
ugaagcaaggagagcuguc

SEQ ID NO: 3194164 - RNA, 19 nt, Artificial Sequence
  Description of Artificial Sequence: Synthetic oligonucleotide
agagucuggaugagaaaag

SEQ ID NO: 3194165 - RNA, 19 nt, Artificial Sequence
  Description of Artificial Sequence: Synthetic oligonucleotide
ucuaugaggucggcuucgg

SEQ ID NO: 3194166 - RNA, 19 nt, Artificial Sequence
  Description of Artificial Sequence: Synthetic oligonucleotide
aggguugucagugccagga

SEQ ID NO: 3194167 - RNA, 19 nt, Artificial Sequence
  Description of Artificial Sequence: Synthetic oligonucleotide
acugaggugggcugugcca

SEQ ID NO: 3194168 - RNA, 19 nt, Artificial Sequence
  Description of Artificial Sequence: Synthetic oligonucleotide
uucccgaauugucggcaag

SEQ ID NO: 3194169 - RNA, 19 nt, Artificial Sequence
  Description of Artificial Sequence: Synthetic oligonucleotide
gaccucauugcuguggguc

SEQ ID NO: 3194170 - RNA, 19 nt, Artificial Sequence
  Description of Artificial Sequence: Synthetic oligonucleotide
guauggucuaugaggucgg

SEQ ID NO: 3194171 - RNA, 19 nt, Artificial Sequence
  Description of Artificial Sequence: Synthetic oligonucleotide
aaaguuauaaagaaguccc

SEQ ID NO: 3194172 - RNA, 19 nt, Artificial Sequence
  Description of Artificial Sequence: Synthetic oligonucleotide
aaucaaaacauuucagugc

SEQ ID NO: 3194173 - RNA, 19 nt, Artificial Sequence
  Description of Artificial Sequence: Synthetic oligonucleotide
auuaagauuuuacauagac

SEQ ID NO: 3194174 - RNA, 19 nt, Artificial Sequence
  Description of Artificial Sequence: Synthetic oligonucleotide
auguuuauaaaccagugac

SEQ ID NO: 3194175 - RNA, 19 nt, Artificial Sequence
  Description of Artificial Sequence: Synthetic oligonucleotide
aauauuuguacauuaagau

SEQ ID NO: 3194176 - RNA, 19 nt, Artificial Sequence
  Description of Artificial Sequence: Synthetic oligonucleotide
acaaaugguaaacuaaagc

SEQ ID NO: 3194177 - RNA, 19 nt, Artificial Sequence
  Description of Artificial Sequence: Synthetic oligonucleotide
agugacaaaauauuuguac

SEQ ID NO: 3194178 - RNA, 19 nt, Artificial Sequence
  Description of Artificial Sequence: Synthetic oligonucleotide
uuacugaaaauucaggugc

SEQ ID NO: 3194179 - RNA, 19 nt, Artificial Sequence
  Description of Artificial Sequence: Synthetic oligonucleotide
uaaagcauaaucaaaacau

SEQ ID NO: 3194180 - RNA, 19 nt, Artificial Sequence
  Description of Artificial Sequence: Synthetic oligonucleotide
uuuguuuugucaaugcggg

SEQ ID NO: 3194181 - RNA, 19 nt, Artificial Sequence
  Description of Artificial Sequence: Synthetic oligonucleotide
uauuuguacauuaagauuu

SEQ ID NO: 3194182 - RNA, 19 nt, Artificial Sequence
  Description of Artificial Sequence: Synthetic oligonucleotide
aucaaaauguuuauaaacc

SEQ ID NO: 3194183 - RNA, 19 nt, Artificial Sequence
  Description of Artificial Sequence: Synthetic oligonucleotide
auugguagaagauggacac

SEQ ID NO: 3194184 - RNA, 19 nt, Artificial Sequence
  Description of Artificial Sequence: Synthetic oligonucleotide
aaaauucaggugcauuagc

SEQ ID NO: 3194185 - RNA, 19 nt, Artificial Sequence
  Description of Artificial Sequence: Synthetic oligonucleotide
auguuuguaacauugguag

SEQ ID NO: 3194186 - RNA, 19 nt, Artificial Sequence
  Description of Artificial Sequence: Synthetic oligonucleotide
auagacugcaaacugaauc

SEQ ID NO: 3194187 - RNA, 19 nt, Artificial Sequence
  Description of Artificial Sequence: Synthetic oligonucleotide
uuuuaaaguuauaaagaag

SEQ ID NO: 3194188 - RNA, 19 nt, Artificial Sequence
  Description of Artificial Sequence: Synthetic oligonucleotide
aaugucuguuauuuguugg

SEQ ID NO: 3194189 - RNA, 19 nt, Artificial Sequence
  Description of Artificial Sequence: Synthetic oligonucleotide
uaucaaaauguuuauaaac

SEQ ID NO: 3194190 - RNA, 19 nt, Artificial Sequence
  Description of Artificial Sequence: Synthetic oligonucleotide
uuucagugugaacaaaugg

SEQ ID NO: 3194191 - RNA, 19 nt, Artificial Sequence
  Description of Artificial Sequence: Synthetic oligonucleotide
aaaucaaagugccuuaagu

SEQ ID NO: 3194192 - RNA, 19 nt, Artificial Sequence
  Description of Artificial Sequence: Synthetic oligonucleotide
ugcaauguuuguaacauug

SEQ ID NO: 3194193 - RNA, 19 nt, Artificial Sequence
  Description of Artificial Sequence: Synthetic oligonucleotide
aacugaaucuuuuccauug

SEQ ID NO: 3194194 - RNA, 19 nt, Artificial Sequence
  Description of Artificial Sequence: Synthetic oligonucleotide
uaaaguuauaaagaagucc

SEQ ID NO: 3194195 - RNA, 19 nt, Artificial Sequence
  Description of Artificial Sequence: Synthetic oligonucleotide
aaucguuuucucuuaaugu

SEQ ID NO: 3194196 - RNA, 19 nt, Artificial Sequence
  Description of Artificial Sequence: Synthetic oligonucleotide
uguagguuuuaucaaaaug

SEQ ID NO: 3194197 - RNA, 19 nt, Artificial Sequence
  Description of Artificial Sequence: Synthetic oligonucleotide
guuauuuuguagugaaucg

SEQ ID NO: 3194198 - RNA, 19 nt, Artificial Sequence
  Description of Artificial Sequence: Synthetic oligonucleotide
uaaacuaaagcauaaucaa

SEQ ID NO: 3194199 - RNA, 19 nt, Artificial Sequence
  Description of Artificial Sequence: Synthetic oligonucleotide
uuagcaauuuguuauuuug

SEQ ID NO: 3194200 - RNA, 19 nt, Artificial Sequence
  Description of Artificial Sequence: Synthetic oligonucleotide
ucaaagugccuuaaguuag

SEQ ID NO: 3194201 - RNA, 19 nt, Artificial Sequence
  Description of Artificial Sequence: Synthetic oligonucleotide
ucuuuacugaaaauucagg

SEQ ID NO: 3194202 - RNA, 19 nt, Artificial Sequence
  Description of Artificial Sequence: Synthetic oligonucleotide
auaaucaaaacauuucagu

SEQ ID NO: 3194203 - RNA, 19 nt, Artificial Sequence
  Description of Artificial Sequence: Synthetic oligonucleotide
uuauaaaccagugacaaaa

SEQ ID NO: 3194204 - RNA, 19 nt, Artificial Sequence
  Description of Artificial Sequence: Synthetic oligonucleotide
aauguuuauaaaccaguga

SEQ ID NO: 3194205 - RNA, 19 nt, Artificial Sequence
  Description of Artificial Sequence: Synthetic oligonucleotide
acuaaagcauaaucaaaac

SEQ ID NO: 3194206 - RNA, 19 nt, Artificial Sequence
  Description of Artificial Sequence: Synthetic oligonucleotide
uguuuguuuugucaaugcg

SEQ ID NO: 3194207 - RNA, 19 nt, Artificial Sequence
  Description of Artificial Sequence: Synthetic oligonucleotide
uagaagauggacacuaggc

SEQ ID NO: 3194208 - RNA, 19 nt, Artificial Sequence
  Description of Artificial Sequence: Synthetic oligonucleotide
uuuuacauagacugcaaac

SEQ ID NO: 3194209 - RNA, 19 nt, Artificial Sequence
  Description of Artificial Sequence: Synthetic oligonucleotide
uucagugugaacaaauggu

SEQ ID NO: 3194210 - RNA, 19 nt, Artificial Sequence
  Description of Artificial Sequence: Synthetic oligonucleotide
ugcauuagcaauuuguuau

SEQ ID NO: 3194211 - RNA, 19 nt, Artificial Sequence
  Description of Artificial Sequence: Synthetic oligonucleotide
aucguuuucucuuaauguc

SEQ ID NO: 3194212 - RNA, 19 nt, Artificial Sequence
  Description of Artificial Sequence: Synthetic oligonucleotide
gaagauggacacuaggcag

SEQ ID NO: 3194213 - RNA, 19 nt, Artificial Sequence
  Description of Artificial Sequence: Synthetic oligonucleotide
ugaacaaaugguaaacuaa

SEQ ID NO: 3194214 - RNA, 19 nt, Artificial Sequence
  Description of Artificial Sequence: Synthetic oligonucleotide
uaaagccuccuuuucaggg

SEQ ID NO: 3194215 - RNA, 19 nt, Artificial Sequence
  Description of Artificial Sequence: Synthetic oligonucleotide
aaaauguuuauaaaccagu

SEQ ID NO: 3194216 - RNA, 19 nt, Artificial Sequence
  Description of Artificial Sequence: Synthetic oligonucleotide
uuaagauuuuacauagacu

SEQ ID NO: 3194217 - RNA, 19 nt, Artificial Sequence
  Description of Artificial Sequence: Synthetic oligonucleotide
uuuguuauuuuguagugaa

SEQ ID NO: 3194218 - RNA, 19 nt, Artificial Sequence
  Description of Artificial Sequence: Synthetic oligonucleotide
aaucaaagugccuuaaguu

SEQ ID NO: 3194219 - RNA, 19 nt, Artificial Sequence
  Description of Artificial Sequence: Synthetic oligonucleotide
caaaauguuuauaaaccag

SEQ ID NO: 3194220 - RNA, 19 nt, Artificial Sequence
  Description of Artificial Sequence: Synthetic oligonucleotide
ugcaaacugaaucuuuucc

SEQ ID NO: 3194221 - RNA, 19 nt, Artificial Sequence
  Description of Artificial Sequence: Synthetic oligonucleotide
aucaaaacauuucagugcu

SEQ ID NO: 3194222 - RNA, 19 nt, Artificial Sequence
  Description of Artificial Sequence: Synthetic oligonucleotide
uuauaaagaagucccauuu

SEQ ID NO: 3194223 - RNA, 19 nt, Artificial Sequence
  Description of Artificial Sequence: Synthetic oligonucleotide
aaaaucaaagugccuuaag

SEQ ID NO: 3194224 - RNA, 19 nt, Artificial Sequence
  Description of Artificial Sequence: Synthetic oligonucleotide
uuacauagacugcaaacug

SEQ ID NO: 3194225 - RNA, 19 nt, Artificial Sequence
  Description of Artificial Sequence: Synthetic oligonucleotide
aagauuuuacauagacugc

SEQ ID NO: 3194226 - RNA, 19 nt, Artificial Sequence
  Description of Artificial Sequence: Synthetic oligonucleotide
uuuacauagacugcaaacu

SEQ ID NO: 3194227 - RNA, 19 nt, Artificial Sequence
  Description of Artificial Sequence: Synthetic oligonucleotide
cauaaucaaaacauuucag

SEQ ID NO: 3194228 - RNA, 19 nt, Artificial Sequence
  Description of Artificial Sequence: Synthetic oligonucleotide
uacauuaagauuuuacaua

SEQ ID NO: 3194229 - RNA, 19 nt, Artificial Sequence
  Description of Artificial Sequence: Synthetic oligonucleotide
ugugugagcauguugcugc

SEQ ID NO: 3194230 - RNA, 19 nt, Artificial Sequence
  Description of Artificial Sequence: Synthetic oligonucleotide
auugucuccuuucugagug

SEQ ID NO: 3194231 - RNA, 19 nt, Artificial Sequence
  Description of Artificial Sequence: Synthetic oligonucleotide
uguaaagccuccuuuucag

SEQ ID NO: 3194232 - RNA, 19 nt, Artificial Sequence
  Description of Artificial Sequence: Synthetic oligonucleotide
uguuuauaaaccagugaca

SEQ ID NO: 3194233 - RNA, 19 nt, Artificial Sequence
  Description of Artificial Sequence: Synthetic oligonucleotide
auaaagaagucccauuugu

SEQ ID NO: 3194234 - RNA, 19 nt, Artificial Sequence
  Description of Artificial Sequence: Synthetic oligonucleotide
uauaaagaagucccauuug

SEQ ID NO: 3194235 - RNA, 19 nt, Artificial Sequence
  Description of Artificial Sequence: Synthetic oligonucleotide
cauuuguacuuguaaagcc

SEQ ID NO: 3194236 - RNA, 19 nt, Artificial Sequence
  Description of Artificial Sequence: Synthetic oligonucleotide
uguuauuuuguagugaauc

SEQ ID NO: 3194237 - RNA, 19 nt, Artificial Sequence
  Description of Artificial Sequence: Synthetic oligonucleotide
gaaucguuuucucuuaaug

SEQ ID NO: 3194238 - RNA, 19 nt, Artificial Sequence
  Description of Artificial Sequence: Synthetic oligonucleotide
augucuguuauuuguuggc

SEQ ID NO: 3194239 - RNA, 19 nt, Artificial Sequence
  Description of Artificial Sequence: Synthetic oligonucleotide
ugaaucuuuuccauugucu

SEQ ID NO: 3194240 - RNA, 19 nt, Artificial Sequence
  Description of Artificial Sequence: Synthetic oligonucleotide
uguuuuguuuguuuuguca

SEQ ID NO: 3194241 - RNA, 19 nt, Artificial Sequence
  Description of Artificial Sequence: Synthetic oligonucleotide
aacugauagugagagaaag

SEQ ID NO: 3194242 - RNA, 19 nt, Artificial Sequence
  Description of Artificial Sequence: Synthetic oligonucleotide
uuaaaguuauaaagaaguc

SEQ ID NO: 3194243 - RNA, 19 nt, Artificial Sequence
  Description of Artificial Sequence: Synthetic oligonucleotide
uacauguagaaaagcugcg

SEQ ID NO: 3194244 - RNA, 19 nt, Artificial Sequence
  Description of Artificial Sequence: Synthetic oligonucleotide
guaaacuaaagcauaauca

SEQ ID NO: 3194245 - RNA, 19 nt, Artificial Sequence
  Description of Artificial Sequence: Synthetic oligonucleotide
uuguacauuaagauuuuac

SEQ ID NO: 3194246 - RNA, 19 nt, Artificial Sequence
  Description of Artificial Sequence: Synthetic oligonucleotide
ugaaaauucaggugcauua

SEQ ID NO: 3194247 - RNA, 19 nt, Artificial Sequence
  Description of Artificial Sequence: Synthetic oligonucleotide
aacuaaagcauaaucaaaa

SEQ ID NO: 3194248 - RNA, 19 nt, Artificial Sequence
  Description of Artificial Sequence: Synthetic oligonucleotide
aagauggacacuaggcagc

SEQ ID NO: 3194249 - RNA, 19 nt, Artificial Sequence
  Description of Artificial Sequence: Synthetic oligonucleotide
uuuucagugugaacaaaug

SEQ ID NO: 3194250 - RNA, 19 nt, Artificial Sequence
  Description of Artificial Sequence: Synthetic oligonucleotide
uagacugcaaacugaaucu

SEQ ID NO: 3194251 - RNA, 19 nt, Artificial Sequence
  Description of Artificial Sequence: Synthetic oligonucleotide
auggacacuaggcagcugg

SEQ ID NO: 3194252 - RNA, 19 nt, Artificial Sequence
  Description of Artificial Sequence: Synthetic oligonucleotide
guuuuaaaguuauaaagaa

SEQ ID NO: 3194253 - RNA, 19 nt, Artificial Sequence
  Description of Artificial Sequence: Synthetic oligonucleotide
uuucugagugcaauguuug

SEQ ID NO: 3194254 - RNA, 19 nt, Artificial Sequence
  Description of Artificial Sequence: Synthetic oligonucleotide
uguaacauugguagaagau

SEQ ID NO: 3194255 - RNA, 19 nt, Artificial Sequence
  Description of Artificial Sequence: Synthetic oligonucleotide
aaauguuuauaaaccagug

SEQ ID NO: 3194256 - RNA, 19 nt, Artificial Sequence
  Description of Artificial Sequence: Synthetic oligonucleotide
uuuuguuuuguuuguuuug

SEQ ID NO: 3194257 - RNA, 19 nt, Artificial Sequence
  Description of Artificial Sequence: Synthetic oligonucleotide
ucucuuuacugaaaauuca

SEQ ID NO: 3194258 - RNA, 19 nt, Artificial Sequence
  Description of Artificial Sequence: Synthetic oligonucleotide
cauguagaaaagcugcgcc

SEQ ID NO: 3194259 - RNA, 19 nt, Artificial Sequence
  Description of Artificial Sequence: Synthetic oligonucleotide
agaagauggacacuaggca

SEQ ID NO: 3194260 - RNA, 19 nt, Artificial Sequence
  Description of Artificial Sequence: Synthetic oligonucleotide
uuuguagugaaucguuuuc

SEQ ID NO: 3194261 - RNA, 19 nt, Artificial Sequence
  Description of Artificial Sequence: Synthetic oligonucleotide
cucuuuacugaaaauucag

SEQ ID NO: 3194262 - RNA, 19 nt, Artificial Sequence
  Description of Artificial Sequence: Synthetic oligonucleotide
gaaucuuuuccauugucuc

SEQ ID NO: 3194263 - RNA, 19 nt, Artificial Sequence
  Description of Artificial Sequence: Synthetic oligonucleotide
aaaugguaaacuaaagcau

SEQ ID NO: 3194264 - RNA, 19 nt, Artificial Sequence
  Description of Artificial Sequence: Synthetic oligonucleotide
agcauaaucaaaacauuuc

SEQ ID NO: 3194265 - RNA, 19 nt, Artificial Sequence
  Description of Artificial Sequence: Synthetic oligonucleotide
agaaaggucucuuuacuga

SEQ ID NO: 3194266 - RNA, 19 nt, Artificial Sequence
  Description of Artificial Sequence: Synthetic oligonucleotide
uacauagacugcaaacuga

SEQ ID NO: 3194267 - RNA, 19 nt, Artificial Sequence
  Description of Artificial Sequence: Synthetic oligonucleotide
ugacaaaauauuuguacau

SEQ ID NO: 3194268 - RNA, 19 nt, Artificial Sequence
  Description of Artificial Sequence: Synthetic oligonucleotide
acaaaauauuuguacauua

SEQ ID NO: 3194269 - RNA, 19 nt, Artificial Sequence
  Description of Artificial Sequence: Synthetic oligonucleotide
uccauugucuccuuucuga

SEQ ID NO: 3194270 - RNA, 19 nt, Artificial Sequence
  Description of Artificial Sequence: Synthetic oligonucleotide
auauuuguacauuaagauu

SEQ ID NO: 3194271 - RNA, 19 nt, Artificial Sequence
  Description of Artificial Sequence: Synthetic oligonucleotide
ucaaaugagacacaagugg

SEQ ID NO: 3194272 - RNA, 19 nt, Artificial Sequence
  Description of Artificial Sequence: Synthetic oligonucleotide
uuugccaauacuaaaacca

SEQ ID NO: 3194273 - RNA, 19 nt, Artificial Sequence
  Description of Artificial Sequence: Synthetic oligonucleotide
aaagauuauggaaaagucc

SEQ ID NO: 3194274 - RNA, 19 nt, Artificial Sequence
  Description of Artificial Sequence: Synthetic oligonucleotide
aaucuucacauucuuuacc

SEQ ID NO: 3194275 - RNA, 19 nt, Artificial Sequence
  Description of Artificial Sequence: Synthetic oligonucleotide
aaagcagcaaaguccaugg

SEQ ID NO: 3194276 - RNA, 19 nt, Artificial Sequence
  Description of Artificial Sequence: Synthetic oligonucleotide
gauaucuucuuccaaacag

SEQ ID NO: 3194277 - RNA, 19 nt, Artificial Sequence
  Description of Artificial Sequence: Synthetic oligonucleotide
uacaagaaaauucacaaaa

SEQ ID NO: 3194278 - RNA, 19 nt, Artificial Sequence
  Description of Artificial Sequence: Synthetic oligonucleotide
aacauuuugagccuuugug

SEQ ID NO: 3194279 - RNA, 19 nt, Artificial Sequence
  Description of Artificial Sequence: Synthetic oligonucleotide
ucuucuuccaaacagauuu

SEQ ID NO: 3194280 - RNA, 19 nt, Artificial Sequence
  Description of Artificial Sequence: Synthetic oligonucleotide
aauggugacacugccaccc

SEQ ID NO: 3194281 - RNA, 19 nt, Artificial Sequence
  Description of Artificial Sequence: Synthetic oligonucleotide
ugauugauaaaacuugaug

SEQ ID NO: 3194282 - RNA, 19 nt, Artificial Sequence
  Description of Artificial Sequence: Synthetic oligonucleotide
aagauaucuucuuccaaac

SEQ ID NO: 3194283 - RNA, 19 nt, Artificial Sequence
  Description of Artificial Sequence: Synthetic oligonucleotide
caagaaacaccuuugauug

SEQ ID NO: 3194284 - RNA, 19 nt, Artificial Sequence
  Description of Artificial Sequence: Synthetic oligonucleotide
uucaugucagcuaaucugg

SEQ ID NO: 3194285 - RNA, 19 nt, Artificial Sequence
  Description of Artificial Sequence: Synthetic oligonucleotide
aaacuugauguucacaucu

SEQ ID NO: 3194286 - RNA, 19 nt, Artificial Sequence
  Description of Artificial Sequence: Synthetic oligonucleotide
aaauccucgucaaaguucc

SEQ ID NO: 3194287 - RNA, 19 nt, Artificial Sequence
  Description of Artificial Sequence: Synthetic oligonucleotide
aaacaauggugacacugcc

SEQ ID NO: 3194288 - RNA, 19 nt, Artificial Sequence
  Description of Artificial Sequence: Synthetic oligonucleotide
ucgucaaaguuccagagag

SEQ ID NO: 3194289 - RNA, 19 nt, Artificial Sequence
  Description of Artificial Sequence: Synthetic oligonucleotide
cagaaaagcagcaaagucc

SEQ ID NO: 3194290 - RNA, 19 nt, Artificial Sequence
  Description of Artificial Sequence: Synthetic oligonucleotide
uuucaugucagcuaaucug

SEQ ID NO: 3194291 - RNA, 19 nt, Artificial Sequence
  Description of Artificial Sequence: Synthetic oligonucleotide
uccagagagacaaacaaug

SEQ ID NO: 3194292 - RNA, 19 nt, Artificial Sequence
  Description of Artificial Sequence: Synthetic oligonucleotide
acaauggugacacugccac

SEQ ID NO: 3194293 - RNA, 19 nt, Artificial Sequence
  Description of Artificial Sequence: Synthetic oligonucleotide
uuuuccauuacaucuuuag

SEQ ID NO: 3194294 - RNA, 19 nt, Artificial Sequence
  Description of Artificial Sequence: Synthetic oligonucleotide
acaucuuggaacuuugccg

SEQ ID NO: 3194295 - RNA, 19 nt, Artificial Sequence
  Description of Artificial Sequence: Synthetic oligonucleotide
cuuugauugauaaaacuug

SEQ ID NO: 3194296 - RNA, 19 nt, Artificial Sequence
  Description of Artificial Sequence: Synthetic oligonucleotide
acacaauuagcagaaaagc

SEQ ID NO: 3194297 - RNA, 19 nt, Artificial Sequence
  Description of Artificial Sequence: Synthetic oligonucleotide
gauugauaaaacuugaugu

SEQ ID NO: 3194298 - RNA, 19 nt, Artificial Sequence
  Description of Artificial Sequence: Synthetic oligonucleotide
auuugccaauacuaaaacc

SEQ ID NO: 3194299 - RNA, 19 nt, Artificial Sequence
  Description of Artificial Sequence: Synthetic oligonucleotide
ucuuacaagaaaauucaca

SEQ ID NO: 3194300 - RNA, 19 nt, Artificial Sequence
  Description of Artificial Sequence: Synthetic oligonucleotide
uaaaacuugauguucacau

SEQ ID NO: 3194301 - RNA, 19 nt, Artificial Sequence
  Description of Artificial Sequence: Synthetic oligonucleotide
ugggaggucaucaagaaac

SEQ ID NO: 3194302 - RNA, 19 nt, Artificial Sequence
  Description of Artificial Sequence: Synthetic oligonucleotide
acuaaaaccagcuuuucca

SEQ ID NO: 3194303 - RNA, 19 nt, Artificial Sequence
  Description of Artificial Sequence: Synthetic oligonucleotide
aacgacauuaucugaaacu

SEQ ID NO: 3194304 - RNA, 19 nt, Artificial Sequence
  Description of Artificial Sequence: Synthetic oligonucleotide
uugauauucuguuucaugu

SEQ ID NO: 3194305 - RNA, 19 nt, Artificial Sequence
  Description of Artificial Sequence: Synthetic oligonucleotide
aaauucacaaaacaagauu

SEQ ID NO: 3194306 - RNA, 19 nt, Artificial Sequence
  Description of Artificial Sequence: Synthetic oligonucleotide
uccauggucacuuucaugu

SEQ ID NO: 3194307 - RNA, 19 nt, Artificial Sequence
  Description of Artificial Sequence: Synthetic oligonucleotide
agcucaucaaaugagacac

SEQ ID NO: 3194308 - RNA, 19 nt, Artificial Sequence
  Description of Artificial Sequence: Synthetic oligonucleotide
gaaaaguccucuuacaaga

SEQ ID NO: 3194309 - RNA, 19 nt, Artificial Sequence
  Description of Artificial Sequence: Synthetic oligonucleotide
ucauguuguacucauucag

SEQ ID NO: 3194310 - RNA, 19 nt, Artificial Sequence
  Description of Artificial Sequence: Synthetic oligonucleotide
uuugauugauaaaacuuga

SEQ ID NO: 3194311 - RNA, 19 nt, Artificial Sequence
  Description of Artificial Sequence: Synthetic oligonucleotide
aaaacuugauguucacauc

SEQ ID NO: 3194312 - RNA, 19 nt, Artificial Sequence
  Description of Artificial Sequence: Synthetic oligonucleotide
auucuuuaccugcaaauuc

SEQ ID NO: 3194313 - RNA, 19 nt, Artificial Sequence
  Description of Artificial Sequence: Synthetic oligonucleotide
uccucuuacaagaaaauuc

SEQ ID NO: 3194314 - RNA, 19 nt, Artificial Sequence
  Description of Artificial Sequence: Synthetic oligonucleotide
agacaaacaauggugacac

SEQ ID NO: 3194315 - RNA, 19 nt, Artificial Sequence
  Description of Artificial Sequence: Synthetic oligonucleotide
auuaucugaaacuccuggg

SEQ ID NO: 3194316 - RNA, 19 nt, Artificial Sequence
  Description of Artificial Sequence: Synthetic oligonucleotide
uuccauuacaucuuuagaa

SEQ ID NO: 3194317 - RNA, 19 nt, Artificial Sequence
  Description of Artificial Sequence: Synthetic oligonucleotide
uuucauguuguacucauuc

SEQ ID NO: 3194318 - RNA, 19 nt, Artificial Sequence
  Description of Artificial Sequence: Synthetic oligonucleotide
gauguucacaucuuggaac

SEQ ID NO: 3194319 - RNA, 19 nt, Artificial Sequence
  Description of Artificial Sequence: Synthetic oligonucleotide
aauucacaaaacaagauua

SEQ ID NO: 3194320 - RNA, 19 nt, Artificial Sequence
  Description of Artificial Sequence: Synthetic oligonucleotide
guuguacucauucagugcc

SEQ ID NO: 3194321 - RNA, 19 nt, Artificial Sequence
  Description of Artificial Sequence: Synthetic oligonucleotide
uauggaaaaguccucuuac

SEQ ID NO: 3194322 - RNA, 19 nt, Artificial Sequence
  Description of Artificial Sequence: Synthetic oligonucleotide
caucuuggaacuuugccgg

SEQ ID NO: 3194323 - RNA, 19 nt, Artificial Sequence
  Description of Artificial Sequence: Synthetic oligonucleotide
ucaagaaacaccuuugauu

SEQ ID NO: 3194324 - RNA, 19 nt, Artificial Sequence
  Description of Artificial Sequence: Synthetic oligonucleotide
cuaaucuggacacaauuag

SEQ ID NO: 3194325 - RNA, 19 nt, Artificial Sequence
  Description of Artificial Sequence: Synthetic oligonucleotide
acaauuagcagaaaagcag

SEQ ID NO: 3194326 - RNA, 19 nt, Artificial Sequence
  Description of Artificial Sequence: Synthetic oligonucleotide
cuuacaagaaaauucacaa

SEQ ID NO: 3194327 - RNA, 19 nt, Artificial Sequence
  Description of Artificial Sequence: Synthetic oligonucleotide
uucuuuaccugcaaauuca

SEQ ID NO: 3194328 - RNA, 19 nt, Artificial Sequence
  Description of Artificial Sequence: Synthetic oligonucleotide
uuuaccugcaaauucaauu

SEQ ID NO: 3194329 - RNA, 19 nt, Artificial Sequence
  Description of Artificial Sequence: Synthetic oligonucleotide
gaaaauucacaaaacaaga

SEQ ID NO: 3194330 - RNA, 19 nt, Artificial Sequence
  Description of Artificial Sequence: Synthetic oligonucleotide
cuugauguucacaucuugg

SEQ ID NO: 3194331 - RNA, 19 nt, Artificial Sequence
  Description of Artificial Sequence: Synthetic oligonucleotide
caauuagcagaaaagcagc

SEQ ID NO: 3194332 - RNA, 19 nt, Artificial Sequence
  Description of Artificial Sequence: Synthetic oligonucleotide
cauuaucugaaacuccugg

SEQ ID NO: 3194333 - RNA, 19 nt, Artificial Sequence
  Description of Artificial Sequence: Synthetic oligonucleotide
caaaugagacacaaguggc

SEQ ID NO: 3194334 - RNA, 19 nt, Artificial Sequence
  Description of Artificial Sequence: Synthetic oligonucleotide
aagaaaauucacaaaacaa

SEQ ID NO: 3194335 - RNA, 19 nt, Artificial Sequence
  Description of Artificial Sequence: Synthetic oligonucleotide
gacacaauuagcagaaaag

SEQ ID NO: 3194336 - RNA, 19 nt, Artificial Sequence
  Description of Artificial Sequence: Synthetic oligonucleotide
uccugggugaagcaaaucc

SEQ ID NO: 3194337 - RNA, 19 nt, Artificial Sequence
  Description of Artificial Sequence: Synthetic oligonucleotide
auugaaguccucugggagg

SEQ ID NO: 3194338 - RNA, 19 nt, Artificial Sequence
  Description of Artificial Sequence: Synthetic oligonucleotide
ucaucaagaaacaccuuug

SEQ ID NO: 3194339 - RNA, 19 nt, Artificial Sequence
  Description of Artificial Sequence: Synthetic oligonucleotide
uuagcagaaaagcagcaaa

SEQ ID NO: 3194340 - RNA, 19 nt, Artificial Sequence
  Description of Artificial Sequence: Synthetic oligonucleotide
uuaucugaaacuccugggu

SEQ ID NO: 3194341 - RNA, 19 nt, Artificial Sequence
  Description of Artificial Sequence: Synthetic oligonucleotide
ucuguuucaugucagcuaa

SEQ ID NO: 3194342 - RNA, 19 nt, Artificial Sequence
  Description of Artificial Sequence: Synthetic oligonucleotide
aaaugagacacaaguggcg

SEQ ID NO: 3194343 - RNA, 19 nt, Artificial Sequence
  Description of Artificial Sequence: Synthetic oligonucleotide
aaacagauuugccaauacu

SEQ ID NO: 3194344 - RNA, 19 nt, Artificial Sequence
  Description of Artificial Sequence: Synthetic oligonucleotide
cauuuugagccuuugugag

SEQ ID NO: 3194345 - RNA, 19 nt, Artificial Sequence
  Description of Artificial Sequence: Synthetic oligonucleotide
caaagauuauggaaaaguc

SEQ ID NO: 3194346 - RNA, 19 nt, Artificial Sequence
  Description of Artificial Sequence: Synthetic oligonucleotide
gauauucuguuucauguca

SEQ ID NO: 3194347 - RNA, 19 nt, Artificial Sequence
  Description of Artificial Sequence: Synthetic oligonucleotide
aaaaccagcuuuuccauua

SEQ ID NO: 3194348 - RNA, 19 nt, Artificial Sequence
  Description of Artificial Sequence: Synthetic oligonucleotide
cuucacauucuuuaccugc

SEQ ID NO: 3194349 - RNA, 19 nt, Artificial Sequence
  Description of Artificial Sequence: Synthetic oligonucleotide
aaucuggacacaauuagca

SEQ ID NO: 3194350 - RNA, 19 nt, Artificial Sequence
  Description of Artificial Sequence: Synthetic oligonucleotide
aagcaaauccucgucaaag

SEQ ID NO: 3194351 - RNA, 19 nt, Artificial Sequence
  Description of Artificial Sequence: Synthetic oligonucleotide
ucuggacacaauuagcaga

SEQ ID NO: 3194352 - RNA, 19 nt, Artificial Sequence
  Description of Artificial Sequence: Synthetic oligonucleotide
aaaguccauggucacuuuc

SEQ ID NO: 3194353 - RNA, 19 nt, Artificial Sequence
  Description of Artificial Sequence: Synthetic oligonucleotide
uaucugaaacuccugggug

SEQ ID NO: 3194354 - RNA, 19 nt, Artificial Sequence
  Description of Artificial Sequence: Synthetic oligonucleotide
uggcuggcaaagauuaugg

SEQ ID NO: 3194355 - RNA, 19 nt, Artificial Sequence
  Description of Artificial Sequence: Synthetic oligonucleotide
uaaucuggacacaauuagc

SEQ ID NO: 3194356 - RNA, 19 nt, Artificial Sequence
  Description of Artificial Sequence: Synthetic oligonucleotide
agcagcaaaguccaugguc

SEQ ID NO: 3194357 - RNA, 19 nt, Artificial Sequence
  Description of Artificial Sequence: Synthetic oligonucleotide
aaaagcagcaaaguccaug

SEQ ID NO: 3194358 - RNA, 19 nt, Artificial Sequence
  Description of Artificial Sequence: Synthetic oligonucleotide
uugccaauacuaaaaccag

SEQ ID NO: 3194359 - RNA, 19 nt, Artificial Sequence
  Description of Artificial Sequence: Synthetic oligonucleotide
uacuaaaaccagcuuuucc

SEQ ID NO: 3194360 - RNA, 19 nt, Artificial Sequence
  Description of Artificial Sequence: Synthetic oligonucleotide
aaguuccagagagacaaac

SEQ ID NO: 3194361 - RNA, 19 nt, Artificial Sequence
  Description of Artificial Sequence: Synthetic oligonucleotide
acauuuugagccuuuguga

SEQ ID NO: 3194362 - RNA, 19 nt, Artificial Sequence
  Description of Artificial Sequence: Synthetic oligonucleotide
acaagaaaauucacaaaac

SEQ ID NO: 3194363 - RNA, 19 nt, Artificial Sequence
  Description of Artificial Sequence: Synthetic oligonucleotide
acgacauuaucugaaacuc

SEQ ID NO: 3194364 - RNA, 19 nt, Artificial Sequence
  Description of Artificial Sequence: Synthetic oligonucleotide
agagacaaacaauggugac

SEQ ID NO: 3194365 - RNA, 19 nt, Artificial Sequence
  Description of Artificial Sequence: Synthetic oligonucleotide
auugauaaaacuugauguu

SEQ ID NO: 3194366 - RNA, 19 nt, Artificial Sequence
  Description of Artificial Sequence: Synthetic oligonucleotide
uccauuacaucuuuagaaa

SEQ ID NO: 3194367 - RNA, 19 nt, Artificial Sequence
  Description of Artificial Sequence: Synthetic oligonucleotide
gaagauaucuucuuccaaa

SEQ ID NO: 3194368 - RNA, 19 nt, Artificial Sequence
  Description of Artificial Sequence: Synthetic oligonucleotide
caaacaauggugacacugc

SEQ ID NO: 3194369 - RNA, 19 nt, Artificial Sequence
  Description of Artificial Sequence: Synthetic oligonucleotide
gauuugccaauacuaaaac

SEQ ID NO: 3194370 - RNA, 19 nt, Artificial Sequence
  Description of Artificial Sequence: Synthetic oligonucleotide
uuuccauuacaucuuuaga

SEQ ID NO: 3194371 - RNA, 19 nt, Artificial Sequence
  Description of Artificial Sequence: Synthetic oligonucleotide
aaaguuuaaauccuagggc

SEQ ID NO: 3194372 - RNA, 19 nt, Artificial Sequence
  Description of Artificial Sequence: Synthetic oligonucleotide
uuaacuaucagugagacuc

SEQ ID NO: 3194373 - RNA, 19 nt, Artificial Sequence
  Description of Artificial Sequence: Synthetic oligonucleotide
gaaguuugaauucuaagcc

SEQ ID NO: 3194374 - RNA, 19 nt, Artificial Sequence
  Description of Artificial Sequence: Synthetic oligonucleotide
uauuacuugaauuaugacu

SEQ ID NO: 3194375 - RNA, 19 nt, Artificial Sequence
  Description of Artificial Sequence: Synthetic oligonucleotide
caaaguuuaaauccuaggg

SEQ ID NO: 3194376 - RNA, 19 nt, Artificial Sequence
  Description of Artificial Sequence: Synthetic oligonucleotide
aaccaguacaaacuugagc

SEQ ID NO: 3194377 - RNA, 19 nt, Artificial Sequence
  Description of Artificial Sequence: Synthetic oligonucleotide
cuguacaaaguuuaaaucc

SEQ ID NO: 3194378 - RNA, 19 nt, Artificial Sequence
  Description of Artificial Sequence: Synthetic oligonucleotide
accaguacaaacuugagca

SEQ ID NO: 3194379 - RNA, 19 nt, Artificial Sequence
  Description of Artificial Sequence: Synthetic oligonucleotide
aacaaagggguucagcuag

SEQ ID NO: 3194380 - RNA, 19 nt, Artificial Sequence
  Description of Artificial Sequence: Synthetic oligonucleotide
aaacuugagcaccuuuucc

SEQ ID NO: 3194381 - RNA, 19 nt, Artificial Sequence
  Description of Artificial Sequence: Synthetic oligonucleotide
cuuaccaugcacaaggacc

SEQ ID NO: 3194382 - RNA, 19 nt, Artificial Sequence
  Description of Artificial Sequence: Synthetic oligonucleotide
auuacuugaauuaugacug

SEQ ID NO: 3194383 - RNA, 19 nt, Artificial Sequence
  Description of Artificial Sequence: Synthetic oligonucleotide
uguaaacucggguaggagg

SEQ ID NO: 3194384 - RNA, 19 nt, Artificial Sequence
  Description of Artificial Sequence: Synthetic oligonucleotide
aauauuacuugaauuauga

SEQ ID NO: 3194385 - RNA, 19 nt, Artificial Sequence
  Description of Artificial Sequence: Synthetic oligonucleotide
aagaaguuugaauucuaag

SEQ ID NO: 3194386 - RNA, 19 nt, Artificial Sequence
  Description of Artificial Sequence: Synthetic oligonucleotide
aaccaaagaaguuugaauu

SEQ ID NO: 3194387 - RNA, 19 nt, Artificial Sequence
  Description of Artificial Sequence: Synthetic oligonucleotide
aucagugagacucugagcu

SEQ ID NO: 3194388 - RNA, 19 nt, Artificial Sequence
  Description of Artificial Sequence: Synthetic oligonucleotide
uguacaaaguuuaaauccu

SEQ ID NO: 3194389 - RNA, 19 nt, Artificial Sequence
  Description of Artificial Sequence: Synthetic oligonucleotide
acuguacaaaguuuaaauc

SEQ ID NO: 3194390 - RNA, 19 nt, Artificial Sequence
  Description of Artificial Sequence: Synthetic oligonucleotide
uuaaaauauuacuugaauu

SEQ ID NO: 3194391 - RNA, 19 nt, Artificial Sequence
  Description of Artificial Sequence: Synthetic oligonucleotide
gaauuaugacuguacaaag

SEQ ID NO: 3194392 - RNA, 19 nt, Artificial Sequence
  Description of Artificial Sequence: Synthetic oligonucleotide
ucucagucgaagaacagcc

SEQ ID NO: 3194393 - RNA, 19 nt, Artificial Sequence
  Description of Artificial Sequence: Synthetic oligonucleotide
acaaaguuuaaauccuagg

SEQ ID NO: 3194394 - RNA, 19 nt, Artificial Sequence
  Description of Artificial Sequence: Synthetic oligonucleotide
cuaaagacaccuaucuggg

SEQ ID NO: 3194395 - RNA, 19 nt, Artificial Sequence
  Description of Artificial Sequence: Synthetic oligonucleotide
uauuuaagcccuuucucag

SEQ ID NO: 3194396 - RNA, 19 nt, Artificial Sequence
  Description of Artificial Sequence: Synthetic oligonucleotide
uuaccaugcacaaggaccc

SEQ ID NO: 3194397 - RNA, 19 nt, Artificial Sequence
  Description of Artificial Sequence: Synthetic oligonucleotide
ugaauuaugacuguacaaa

SEQ ID NO: 3194398 - RNA, 19 nt, Artificial Sequence
  Description of Artificial Sequence: Synthetic oligonucleotide
aaaccaaagaaguuugaau

SEQ ID NO: 3194399 - RNA, 19 nt, Artificial Sequence
  Description of Artificial Sequence: Synthetic oligonucleotide
uaggagguuguauaaacag

SEQ ID NO: 3194400 - RNA, 19 nt, Artificial Sequence
  Description of Artificial Sequence: Synthetic oligonucleotide
aacagccuaugucaggcac

SEQ ID NO: 3194401 - RNA, 19 nt, Artificial Sequence
  Description of Artificial Sequence: Synthetic oligonucleotide
aacuugagcaccuuuuccu

SEQ ID NO: 3194402 - RNA, 19 nt, Artificial Sequence
  Description of Artificial Sequence: Synthetic oligonucleotide
gcugcugugaaacaaaggg

SEQ ID NO: 3194403 - RNA, 19 nt, Artificial Sequence
  Description of Artificial Sequence: Synthetic oligonucleotide
uacaaaguuuaaauccuag

SEQ ID NO: 3194404 - RNA, 19 nt, Artificial Sequence
  Description of Artificial Sequence: Synthetic oligonucleotide
guauaaacagcuuuguaca

SEQ ID NO: 3194405 - RNA, 19 nt, Artificial Sequence
  Description of Artificial Sequence: Synthetic oligonucleotide
ugcugugaaacaaaggggu

SEQ ID NO: 3194406 - RNA, 19 nt, Artificial Sequence
  Description of Artificial Sequence: Synthetic oligonucleotide
aaguuugaauucuaagcca

SEQ ID NO: 3194407 - RNA, 19 nt, Artificial Sequence
  Description of Artificial Sequence: Synthetic oligonucleotide
uuuguacacaugcugguca

SEQ ID NO: 3194408 - RNA, 19 nt, Artificial Sequence
  Description of Artificial Sequence: Synthetic oligonucleotide
accaaagaaguuugaauuc

SEQ ID NO: 3194409 - RNA, 19 nt, Artificial Sequence
  Description of Artificial Sequence: Synthetic oligonucleotide
aauccuagggcugaggaug

SEQ ID NO: 3194410 - RNA, 19 nt, Artificial Sequence
  Description of Artificial Sequence: Synthetic oligonucleotide
uaugacuguacaaaguuua

SEQ ID NO: 3194411 - RNA, 19 nt, Artificial Sequence
  Description of Artificial Sequence: Synthetic oligonucleotide
uacucuccuucacagaagg

SEQ ID NO: 3194412 - RNA, 19 nt, Artificial Sequence
  Description of Artificial Sequence: Synthetic oligonucleotide
uuuccugcuguaaacucgg

SEQ ID NO: 3194413 - RNA, 19 nt, Artificial Sequence
  Description of Artificial Sequence: Synthetic oligonucleotide
aaaauauuacuugaauuau

SEQ ID NO: 3194414 - RNA, 19 nt, Artificial Sequence
  Description of Artificial Sequence: Synthetic oligonucleotide
uaugcaaaacuuacucucc

SEQ ID NO: 3194415 - RNA, 19 nt, Artificial Sequence
  Description of Artificial Sequence: Synthetic oligonucleotide
auauuacuugaauuaugac

SEQ ID NO: 3194416 - RNA, 19 nt, Artificial Sequence
  Description of Artificial Sequence: Synthetic oligonucleotide
aagcguuccacuuguauca

SEQ ID NO: 3194417 - RNA, 19 nt, Artificial Sequence
  Description of Artificial Sequence: Synthetic oligonucleotide
aauucuaagccaacuuaac

SEQ ID NO: 3194418 - RNA, 19 nt, Artificial Sequence
  Description of Artificial Sequence: Synthetic oligonucleotide
aacuuuuaaaauauuacuu

SEQ ID NO: 3194419 - RNA, 19 nt, Artificial Sequence
  Description of Artificial Sequence: Synthetic oligonucleotide
ucucccaacaguagguggg

SEQ ID NO: 3194420 - RNA, 19 nt, Artificial Sequence
  Description of Artificial Sequence: Synthetic oligonucleotide
auuaugacuguacaaaguu

SEQ ID NO: 3194421 - RNA, 19 nt, Artificial Sequence
  Description of Artificial Sequence: Synthetic oligonucleotide
caacuuaacuaucagugag

SEQ ID NO: 3194422 - RNA, 19 nt, Artificial Sequence
  Description of Artificial Sequence: Synthetic oligonucleotide
ugaauucuaagccaacuua

SEQ ID NO: 3194423 - RNA, 19 nt, Artificial Sequence
  Description of Artificial Sequence: Synthetic oligonucleotide
aagggguucagcuagcuuu

SEQ ID NO: 3194424 - RNA, 19 nt, Artificial Sequence
  Description of Artificial Sequence: Synthetic oligonucleotide
aaauauuacuugaauuaug

SEQ ID NO: 3194425 - RNA, 19 nt, Artificial Sequence
  Description of Artificial Sequence: Synthetic oligonucleotide
acuuaacuaucagugagac

SEQ ID NO: 3194426 - RNA, 19 nt, Artificial Sequence
  Description of Artificial Sequence: Synthetic oligonucleotide
uggugucucaaccucaagc

SEQ ID NO: 3194427 - RNA, 19 nt, Artificial Sequence
  Description of Artificial Sequence: Synthetic oligonucleotide
guaugcaaaacuuacucuc

SEQ ID NO: 3194428 - RNA, 19 nt, Artificial Sequence
  Description of Artificial Sequence: Synthetic oligonucleotide
uauccuggccuuuucagcc

SEQ ID NO: 3194429 - RNA, 19 nt, Artificial Sequence
  Description of Artificial Sequence: Synthetic oligonucleotide
ucaggcacaucugucaacg

SEQ ID NO: 3194430 - RNA, 19 nt, Artificial Sequence
  Description of Artificial Sequence: Synthetic oligonucleotide
uuuucagccucugugaaga

SEQ ID NO: 3194431 - RNA, 19 nt, Artificial Sequence
  Description of Artificial Sequence: Synthetic oligonucleotide
acaucugucaacgaguuca

SEQ ID NO: 3194432 - RNA, 19 nt, Artificial Sequence
  Description of Artificial Sequence: Synthetic oligonucleotide
ucuaagccaacuuaacuau

SEQ ID NO: 3194433 - RNA, 19 nt, Artificial Sequence
  Description of Artificial Sequence: Synthetic oligonucleotide
cuaucagugagacucugag

SEQ ID NO: 3194434 - RNA, 19 nt, Artificial Sequence
  Description of Artificial Sequence: Synthetic oligonucleotide
ggugucucaaccucaagcg

SEQ ID NO: 3194435 - RNA, 19 nt, Artificial Sequence
  Description of Artificial Sequence: Synthetic oligonucleotide
auucuaagccaacuuaacu

SEQ ID NO: 3194436 - RNA, 19 nt, Artificial Sequence
  Description of Artificial Sequence: Synthetic oligonucleotide
ucuauccuggccuuuucag

SEQ ID NO: 3194437 - RNA, 19 nt, Artificial Sequence
  Description of Artificial Sequence: Synthetic oligonucleotide
aauuaugacuguacaaagu

SEQ ID NO: 3194438 - RNA, 19 nt, Artificial Sequence
  Description of Artificial Sequence: Synthetic oligonucleotide
ugucaacgaguucaggacc

SEQ ID NO: 3194439 - RNA, 19 nt, Artificial Sequence
  Description of Artificial Sequence: Synthetic oligonucleotide
gaaacaaagggguucagcu

SEQ ID NO: 3194440 - RNA, 19 nt, Artificial Sequence
  Description of Artificial Sequence: Synthetic oligonucleotide
acuugaauuaugacuguac

SEQ ID NO: 3194441 - RNA, 19 nt, Artificial Sequence
  Description of Artificial Sequence: Synthetic oligonucleotide
acccgauuuguguuaaaac

SEQ ID NO: 3194442 - RNA, 19 nt, Artificial Sequence
  Description of Artificial Sequence: Synthetic oligonucleotide
gaauuuucuauccuggccu

SEQ ID NO: 3194443 - RNA, 19 nt, Artificial Sequence
  Description of Artificial Sequence: Synthetic oligonucleotide
uucacagaaggguugggga

SEQ ID NO: 3194444 - RNA, 19 nt, Artificial Sequence
  Description of Artificial Sequence: Synthetic oligonucleotide
acuuguaucaggaguuccc

SEQ ID NO: 3194445 - RNA, 19 nt, Artificial Sequence
  Description of Artificial Sequence: Synthetic oligonucleotide
uuuaagcccuuucucaguc

SEQ ID NO: 3194446 - RNA, 19 nt, Artificial Sequence
  Description of Artificial Sequence: Synthetic oligonucleotide
uaaacagcuuuguacacau

SEQ ID NO: 3194447 - RNA, 19 nt, Artificial Sequence
  Description of Artificial Sequence: Synthetic oligonucleotide
aaaaccaaagaaguuugaa

SEQ ID NO: 3194448 - RNA, 19 nt, Artificial Sequence
  Description of Artificial Sequence: Synthetic oligonucleotide
ugagacucugagcuucggg

SEQ ID NO: 3194449 - RNA, 19 nt, Artificial Sequence
  Description of Artificial Sequence: Synthetic oligonucleotide
uuugaauucuaagccaacu

SEQ ID NO: 3194450 - RNA, 19 nt, Artificial Sequence
  Description of Artificial Sequence: Synthetic oligonucleotide
agcaccacaaaaccaaaga

SEQ ID NO: 3194451 - RNA, 19 nt, Artificial Sequence
  Description of Artificial Sequence: Synthetic oligonucleotide
accuuuuccugcuguaaac

SEQ ID NO: 3194452 - RNA, 19 nt, Artificial Sequence
  Description of Artificial Sequence: Synthetic oligonucleotide
cugcugugaaacaaagggg

SEQ ID NO: 3194453 - RNA, 19 nt, Artificial Sequence
  Description of Artificial Sequence: Synthetic oligonucleotide
uccccaaccaguacaaacu

SEQ ID NO: 3194454 - RNA, 19 nt, Artificial Sequence
  Description of Artificial Sequence: Synthetic oligonucleotide
gagaauuuucuauccuggc

SEQ ID NO: 3194455 - RNA, 19 nt, Artificial Sequence
  Description of Artificial Sequence: Synthetic oligonucleotide
ucaauucccagcaccacaa

SEQ ID NO: 3194456 - RNA, 19 nt, Artificial Sequence
  Description of Artificial Sequence: Synthetic oligonucleotide
uauaaacagcuuuguacac

SEQ ID NO: 3194457 - RNA, 19 nt, Artificial Sequence
  Description of Artificial Sequence: Synthetic oligonucleotide
ucacagaaggguuggggag

SEQ ID NO: 3194458 - RNA, 19 nt, Artificial Sequence
  Description of Artificial Sequence: Synthetic oligonucleotide
ugugaaacaaagggguuca

SEQ ID NO: 3194459 - RNA, 19 nt, Artificial Sequence
  Description of Artificial Sequence: Synthetic oligonucleotide
uaaagacaccuaucugggg

SEQ ID NO: 3194460 - RNA, 19 nt, Artificial Sequence
  Description of Artificial Sequence: Synthetic oligonucleotide
uuuccuaaagacaccuauc

SEQ ID NO: 3194461 - RNA, 19 nt, Artificial Sequence
  Description of Artificial Sequence: Synthetic oligonucleotide
agcuuuguacacaugcugg

SEQ ID NO: 3194462 - RNA, 19 nt, Artificial Sequence
  Description of Artificial Sequence: Synthetic oligonucleotide
uugaauucuaagccaacuu

SEQ ID NO: 3194463 - RNA, 19 nt, Artificial Sequence
  Description of Artificial Sequence: Synthetic oligonucleotide
uuaaaacuuuuaaaauauu

SEQ ID NO: 3194464 - RNA, 19 nt, Artificial Sequence
  Description of Artificial Sequence: Synthetic oligonucleotide
uuaggguuccauuuccuuc

SEQ ID NO: 3194465 - RNA, 19 nt, Artificial Sequence
  Description of Artificial Sequence: Synthetic oligonucleotide
uccacuuguaucaggaguu

SEQ ID NO: 3194466 - RNA, 19 nt, Artificial Sequence
  Description of Artificial Sequence: Synthetic oligonucleotide
uaggguuccauuuccuucu

SEQ ID NO: 3194467 - RNA, 19 nt, Artificial Sequence
  Description of Artificial Sequence: Synthetic oligonucleotide
cuugaauuaugacuguaca

SEQ ID NO: 3194468 - RNA, 19 nt, Artificial Sequence
  Description of Artificial Sequence: Synthetic oligonucleotide
uguaucaggaguuccccaa

SEQ ID NO: 3194469 - RNA, 19 nt, Artificial Sequence
  Description of Artificial Sequence: Synthetic oligonucleotide
uaucaggaguuccccaacc

SEQ ID NO: 3194470 - RNA, 19 nt, Artificial Sequence
  Description of Artificial Sequence: Synthetic oligonucleotide
ugcugcugugaaacaaagg

SEQ ID NO: 3194471 - RNA, 19 nt, Artificial Sequence
  Description of Artificial Sequence: Synthetic oligonucleotide
aaauguuuuaacuugguaa

SEQ ID NO: 3194472 - RNA, 19 nt, Artificial Sequence
  Description of Artificial Sequence: Synthetic oligonucleotide
aaagccaugaguuugccca

SEQ ID NO: 3194473 - RNA, 19 nt, Artificial Sequence
  Description of Artificial Sequence: Synthetic oligonucleotide
ugcuaaaugaacuuguuca

SEQ ID NO: 3194474 - RNA, 19 nt, Artificial Sequence
  Description of Artificial Sequence: Synthetic oligonucleotide
ucucuuacgaugcacaaag

SEQ ID NO: 3194475 - RNA, 19 nt, Artificial Sequence
  Description of Artificial Sequence: Synthetic oligonucleotide
aauguuuuaacuugguaau

SEQ ID NO: 3194476 - RNA, 19 nt, Artificial Sequence
  Description of Artificial Sequence: Synthetic oligonucleotide
uuuaacuugguaauugacu

SEQ ID NO: 3194477 - RNA, 19 nt, Artificial Sequence
  Description of Artificial Sequence: Synthetic oligonucleotide
uaaaugaacuuguucagcc

SEQ ID NO: 3194478 - RNA, 19 nt, Artificial Sequence
  Description of Artificial Sequence: Synthetic oligonucleotide
uguucagccauucaaugag

SEQ ID NO: 3194479 - RNA, 19 nt, Artificial Sequence
  Description of Artificial Sequence: Synthetic oligonucleotide
uugguaauugacuaugcag

SEQ ID NO: 3194480 - RNA, 19 nt, Artificial Sequence
  Description of Artificial Sequence: Synthetic oligonucleotide
ucaauguagggcuugucgg

SEQ ID NO: 3194481 - RNA, 19 nt, Artificial Sequence
  Description of Artificial Sequence: Synthetic oligonucleotide
cauucaaugagguuccucc

SEQ ID NO: 3194482 - RNA, 19 nt, Artificial Sequence
  Description of Artificial Sequence: Synthetic oligonucleotide
ucuuacgaugcacaaagcc

SEQ ID NO: 3194483 - RNA, 19 nt, Artificial Sequence
  Description of Artificial Sequence: Synthetic oligonucleotide
ugguaauugacuaugcagu

SEQ ID NO: 3194484 - RNA, 19 nt, Artificial Sequence
  Description of Artificial Sequence: Synthetic oligonucleotide
aaugagguuccuccucgcc

SEQ ID NO: 3194485 - RNA, 19 nt, Artificial Sequence
  Description of Artificial Sequence: Synthetic oligonucleotide
ucaaugagguuccuccucg

SEQ ID NO: 3194486 - RNA, 19 nt, Artificial Sequence
  Description of Artificial Sequence: Synthetic oligonucleotide
uuaacuugguaauugacua

SEQ ID NO: 3194487 - RNA, 19 nt, Artificial Sequence
  Description of Artificial Sequence: Synthetic oligonucleotide
cagaaaauguuuuaacuug

SEQ ID NO: 3194488 - RNA, 19 nt, Artificial Sequence
  Description of Artificial Sequence: Synthetic oligonucleotide
uguuuuaacuugguaauug

SEQ ID NO: 3194489 - RNA, 19 nt, Artificial Sequence
  Description of Artificial Sequence: Synthetic oligonucleotide
aaugaacuuguucagccau

SEQ ID NO: 3194490 - RNA, 19 nt, Artificial Sequence
  Description of Artificial Sequence: Synthetic oligonucleotide
uuuuaacuugguaauugac

SEQ ID NO: 3194491 - RNA, 19 nt, Artificial Sequence
  Description of Artificial Sequence: Synthetic oligonucleotide
aacuuguucagccauucaa

SEQ ID NO: 3194492 - RNA, 19 nt, Artificial Sequence
  Description of Artificial Sequence: Synthetic oligonucleotide
cucaauguagggcuugucg

SEQ ID NO: 3194493 - RNA, 19 nt, Artificial Sequence
  Description of Artificial Sequence: Synthetic oligonucleotide
aaaauguuuuaacuuggua

SEQ ID NO: 3194494 - RNA, 19 nt, Artificial Sequence
  Description of Artificial Sequence: Synthetic oligonucleotide
agaaaauguuuuaacuugg

SEQ ID NO: 3194495 - RNA, 19 nt, Artificial Sequence
  Description of Artificial Sequence: Synthetic oligonucleotide
aacuugguaauugacuaug

SEQ ID NO: 3194496 - RNA, 19 nt, Artificial Sequence
  Description of Artificial Sequence: Synthetic oligonucleotide
aaaugaacuuguucagcca

SEQ ID NO: 3194497 - RNA, 19 nt, Artificial Sequence
  Description of Artificial Sequence: Synthetic oligonucleotide
uuacgaugcacaaagccau

SEQ ID NO: 3194498 - RNA, 19 nt, Artificial Sequence
  Description of Artificial Sequence: Synthetic oligonucleotide
uaauugacuaugcaguguu

SEQ ID NO: 3194499 - RNA, 19 nt, Artificial Sequence
  Description of Artificial Sequence: Synthetic oligonucleotide
acagucuucucucuuacga

SEQ ID NO: 3194500 - RNA, 19 nt, Artificial Sequence
  Description of Artificial Sequence: Synthetic oligonucleotide
ugaguuugcccagaaaaug

SEQ ID NO: 3194501 - RNA, 19 nt, Artificial Sequence
  Description of Artificial Sequence: Synthetic oligonucleotide
cuuacgaugcacaaagcca

SEQ ID NO: 3194502 - RNA, 19 nt, Artificial Sequence
  Description of Artificial Sequence: Synthetic oligonucleotide
aacagucuucucucuuacg

SEQ ID NO: 3194503 - RNA, 19 nt, Artificial Sequence
  Description of Artificial Sequence: Synthetic oligonucleotide
uucucucuuacgaugcaca

SEQ ID NO: 3194504 - RNA, 19 nt, Artificial Sequence
  Description of Artificial Sequence: Synthetic oligonucleotide
caugaguuugcccagaaaa

SEQ ID NO: 3194505 - RNA, 19 nt, Artificial Sequence
  Description of Artificial Sequence: Synthetic oligonucleotide
aggggaacagucuucucuc

SEQ ID NO: 3194506 - RNA, 19 nt, Artificial Sequence
  Description of Artificial Sequence: Synthetic oligonucleotide
cuuguucagccauucaaug

SEQ ID NO: 3194507 - RNA, 19 nt, Artificial Sequence
  Description of Artificial Sequence: Synthetic oligonucleotide
agucuucucucuuacgaug

SEQ ID NO: 3194508 - RNA, 19 nt, Artificial Sequence
  Description of Artificial Sequence: Synthetic oligonucleotide
uuguucagccauucaauga

SEQ ID NO: 3194509 - RNA, 19 nt, Artificial Sequence
  Description of Artificial Sequence: Synthetic oligonucleotide
cuaaaugaacuuguucagc

SEQ ID NO: 3194510 - RNA, 19 nt, Artificial Sequence
  Description of Artificial Sequence: Synthetic oligonucleotide
ugcugcuaaaugaacuugu

SEQ ID NO: 3194511 - RNA, 19 nt, Artificial Sequence
  Description of Artificial Sequence: Synthetic oligonucleotide
uuugcccagaaaauguuuu

SEQ ID NO: 3194512 - RNA, 19 nt, Artificial Sequence
  Description of Artificial Sequence: Synthetic oligonucleotide
caauguagggcuugucggc

SEQ ID NO: 3194513 - RNA, 19 nt, Artificial Sequence
  Description of Artificial Sequence: Synthetic oligonucleotide
uucagccauucaaugaggu

SEQ ID NO: 3194514 - RNA, 19 nt, Artificial Sequence
  Description of Artificial Sequence: Synthetic oligonucleotide
guuuuaacuugguaauuga

SEQ ID NO: 3194515 - RNA, 19 nt, Artificial Sequence
  Description of Artificial Sequence: Synthetic oligonucleotide
acuugguaauugacuaugc

SEQ ID NO: 3194516 - RNA, 19 nt, Artificial Sequence
  Description of Artificial Sequence: Synthetic oligonucleotide
cucgccuccucaauguagg

SEQ ID NO: 3194517 - RNA, 19 nt, Artificial Sequence
  Description of Artificial Sequence: Synthetic oligonucleotide
gcuaaaugaacuuguucag

SEQ ID NO: 3194518 - RNA, 19 nt, Artificial Sequence
  Description of Artificial Sequence: Synthetic oligonucleotide
agccauucaaugagguucc

SEQ ID NO: 3194519 - RNA, 19 nt, Artificial Sequence
  Description of Artificial Sequence: Synthetic oligonucleotide
cacaaagccaugaguuugc

SEQ ID NO: 3194520 - RNA, 19 nt, Artificial Sequence
  Description of Artificial Sequence: Synthetic oligonucleotide
cagccauucaaugagguuc

SEQ ID NO: 3194521 - RNA, 19 nt, Artificial Sequence
  Description of Artificial Sequence: Synthetic oligonucleotide
uucaaugagguuccuccuc

SEQ ID NO: 3194522 - RNA, 19 nt, Artificial Sequence
  Description of Artificial Sequence: Synthetic oligonucleotide
uuuucaguuucugggucag

SEQ ID NO: 3194523 - RNA, 19 nt, Artificial Sequence
  Description of Artificial Sequence: Synthetic oligonucleotide
gguaauugacuaugcagug

SEQ ID NO: 3194524 - RNA, 19 nt, Artificial Sequence
  Description of Artificial Sequence: Synthetic oligonucleotide
uguagggcuugucggcagg

SEQ ID NO: 3194525 - RNA, 19 nt, Artificial Sequence
  Description of Artificial Sequence: Synthetic oligonucleotide
ugagugcugcuaaaugaac

SEQ ID NO: 3194526 - RNA, 19 nt, Artificial Sequence
  Description of Artificial Sequence: Synthetic oligonucleotide
aauguagggcuugucggca

SEQ ID NO: 3194527 - RNA, 19 nt, Artificial Sequence
  Description of Artificial Sequence: Synthetic oligonucleotide
agugcugcuaaaugaacuu

SEQ ID NO: 3194528 - RNA, 19 nt, Artificial Sequence
  Description of Artificial Sequence: Synthetic oligonucleotide
aagccaugaguuugcccag

SEQ ID NO: 3194529 - RNA, 19 nt, Artificial Sequence
  Description of Artificial Sequence: Synthetic oligonucleotide
gaacagucuucucucuuac

SEQ ID NO: 3194530 - RNA, 19 nt, Artificial Sequence
  Description of Artificial Sequence: Synthetic oligonucleotide
ugugccugagugcugcuaa

SEQ ID NO: 3194531 - RNA, 19 nt, Artificial Sequence
  Description of Artificial Sequence: Synthetic oligonucleotide
auucaaugagguuccuccu

SEQ ID NO: 3194532 - RNA, 19 nt, Artificial Sequence
  Description of Artificial Sequence: Synthetic oligonucleotide
augagguuccuccucgccu

SEQ ID NO: 3194533 - RNA, 19 nt, Artificial Sequence
  Description of Artificial Sequence: Synthetic oligonucleotide
cugcuaaaugaacuuguuc

SEQ ID NO: 3194534 - RNA, 19 nt, Artificial Sequence
  Description of Artificial Sequence: Synthetic oligonucleotide
uaacuugguaauugacuau

SEQ ID NO: 3194535 - RNA, 19 nt, Artificial Sequence
  Description of Artificial Sequence: Synthetic oligonucleotide
acaaagccaugaguuugcc

SEQ ID NO: 3194536 - RNA, 19 nt, Artificial Sequence
  Description of Artificial Sequence: Synthetic oligonucleotide
gaugcacaaagccaugagu

SEQ ID NO: 3194537 - RNA, 19 nt, Artificial Sequence
  Description of Artificial Sequence: Synthetic oligonucleotide
ugaacuuguucagccauuc

SEQ ID NO: 3194538 - RNA, 19 nt, Artificial Sequence
  Description of Artificial Sequence: Synthetic oligonucleotide
ugagguuccuccucgccuc

SEQ ID NO: 3194539 - RNA, 19 nt, Artificial Sequence
  Description of Artificial Sequence: Synthetic oligonucleotide
caaagccaugaguuugccc

SEQ ID NO: 3194540 - RNA, 19 nt, Artificial Sequence
  Description of Artificial Sequence: Synthetic oligonucleotide
ucuucucucuuacgaugca

SEQ ID NO: 3194541 - RNA, 19 nt, Artificial Sequence
  Description of Artificial Sequence: Synthetic oligonucleotide
cuugguaauugacuaugca

SEQ ID NO: 3194542 - RNA, 19 nt, Artificial Sequence
  Description of Artificial Sequence: Synthetic oligonucleotide
ucucucuuacgaugcacaa

SEQ ID NO: 3194543 - RNA, 19 nt, Artificial Sequence
  Description of Artificial Sequence: Synthetic oligonucleotide
uacgaugcacaaagccaug

SEQ ID NO: 3194544 - RNA, 19 nt, Artificial Sequence
  Description of Artificial Sequence: Synthetic oligonucleotide
augcacaaagccaugaguu

SEQ ID NO: 3194545 - RNA, 19 nt, Artificial Sequence
  Description of Artificial Sequence: Synthetic oligonucleotide
gucuucucucuuacgaugc

SEQ ID NO: 3194546 - RNA, 19 nt, Artificial Sequence
  Description of Artificial Sequence: Synthetic oligonucleotide
ugcacaaagccaugaguuu

SEQ ID NO: 3194547 - RNA, 19 nt, Artificial Sequence
  Description of Artificial Sequence: Synthetic oligonucleotide
auugacuaugcaguguuuu

SEQ ID NO: 3194548 - RNA, 19 nt, Artificial Sequence
  Description of Artificial Sequence: Synthetic oligonucleotide
guucagccauucaaugagg

SEQ ID NO: 3194549 - RNA, 19 nt, Artificial Sequence
  Description of Artificial Sequence: Synthetic oligonucleotide
ugcccagaaaauguuuuaa

SEQ ID NO: 3194550 - RNA, 19 nt, Artificial Sequence
  Description of Artificial Sequence: Synthetic oligonucleotide
acuuguucagccauucaau

SEQ ID NO: 3194551 - RNA, 19 nt, Artificial Sequence
  Description of Artificial Sequence: Synthetic oligonucleotide
cucuuacgaugcacaaagc

SEQ ID NO: 3194552 - RNA, 19 nt, Artificial Sequence
  Description of Artificial Sequence: Synthetic oligonucleotide
cugagugcugcuaaaugaa

SEQ ID NO: 3194553 - RNA, 19 nt, Artificial Sequence
  Description of Artificial Sequence: Synthetic oligonucleotide
ugcccugugccugagugcu

SEQ ID NO: 3194554 - RNA, 19 nt, Artificial Sequence
  Description of Artificial Sequence: Synthetic oligonucleotide
ucggcaggggaacagucuu

SEQ ID NO: 3194555 - RNA, 19 nt, Artificial Sequence
  Description of Artificial Sequence: Synthetic oligonucleotide
auguagggcuugucggcag

SEQ ID NO: 3194556 - RNA, 19 nt, Artificial Sequence
  Description of Artificial Sequence: Synthetic oligonucleotide
caaugagguuccuccucgc

SEQ ID NO: 3194557 - RNA, 19 nt, Artificial Sequence
  Description of Artificial Sequence: Synthetic oligonucleotide
augaguuugcccagaaaau

SEQ ID NO: 3194558 - RNA, 19 nt, Artificial Sequence
  Description of Artificial Sequence: Synthetic oligonucleotide
ucagccauucaaugagguu

SEQ ID NO: 3194559 - RNA, 19 nt, Artificial Sequence
  Description of Artificial Sequence: Synthetic oligonucleotide
uugcccagaaaauguuuua

SEQ ID NO: 3194560 - RNA, 19 nt, Artificial Sequence
  Description of Artificial Sequence: Synthetic oligonucleotide
ugucggcaggggaacaguc

SEQ ID NO: 3194561 - RNA, 19 nt, Artificial Sequence
  Description of Artificial Sequence: Synthetic oligonucleotide
gaaaauguuuuaacuuggu

SEQ ID NO: 3194562 - RNA, 19 nt, Artificial Sequence
  Description of Artificial Sequence: Synthetic oligonucleotide
gaguuugcccagaaaaugu

SEQ ID NO: 3194563 - RNA, 19 nt, Artificial Sequence
  Description of Artificial Sequence: Synthetic oligonucleotide
gaacuuguucagccauuca

SEQ ID NO: 3194564 - RNA, 19 nt, Artificial Sequence
  Description of Artificial Sequence: Synthetic oligonucleotide
ucgccuccucaauguaggg

SEQ ID NO: 3194565 - RNA, 19 nt, Artificial Sequence
  Description of Artificial Sequence: Synthetic oligonucleotide
cuucucucuuacgaugcac

SEQ ID NO: 3194566 - RNA, 19 nt, Artificial Sequence
  Description of Artificial Sequence: Synthetic oligonucleotide
agggcuugucggcagggga

SEQ ID NO: 3194567 - RNA, 19 nt, Artificial Sequence
  Description of Artificial Sequence: Synthetic oligonucleotide
gcacaaagccaugaguuug

SEQ ID NO: 3194568 - RNA, 19 nt, Artificial Sequence
  Description of Artificial Sequence: Synthetic oligonucleotide
gugcugcuaaaugaacuug

SEQ ID NO: 3194569 - RNA, 19 nt, Artificial Sequence
  Description of Artificial Sequence: Synthetic oligonucleotide
cuugucggcaggggaacag

SEQ ID NO: 3194570 - RNA, 19 nt, Artificial Sequence
  Description of Artificial Sequence: Synthetic oligonucleotide
ccugagugcugcuaaauga

SEQ ID NO: 3194571 - RNA, 19 nt, Artificial Sequence
  Description of Artificial Sequence: Synthetic oligonucleotide
acuauuucaauacacauac

SEQ ID NO: 3194572 - RNA, 19 nt, Artificial Sequence
  Description of Artificial Sequence: Synthetic oligonucleotide
aauuuugcaaucaaaacac

SEQ ID NO: 3194573 - RNA, 19 nt, Artificial Sequence
  Description of Artificial Sequence: Synthetic oligonucleotide
  modified_base (14)..(14): a, c, u, g, unknown or other
aaacaaaacaaaanaaaag

SEQ ID NO: 3194574 - RNA, 19 nt, Artificial Sequence
  Description of Artificial Sequence: Synthetic oligonucleotide
  modified_base (4)..(4): a, c, u, g, unknown or other
aaanaaaaguuaauuuugc

SEQ ID NO: 3194575 - RNA, 19 nt, Artificial Sequence
  Description of Artificial Sequence: Synthetic oligonucleotide
uguauauauaacaagguac

SEQ ID NO: 3194576 - RNA, 19 nt, Artificial Sequence
  Description of Artificial Sequence: Synthetic oligonucleotide
uaauuuugcaaucaaaaca

SEQ ID NO: 3194577 - RNA, 19 nt, Artificial Sequence
  Description of Artificial Sequence: Synthetic oligonucleotide
uugcaaucaaaacacaucg

SEQ ID NO: 3194578 - RNA, 19 nt, Artificial Sequence
  Description of Artificial Sequence: Synthetic oligonucleotide
uauauaacaagguacuucc

SEQ ID NO: 3194579 - RNA, 19 nt, Artificial Sequence
  Description of Artificial Sequence: Synthetic oligonucleotide
uacacauacaaaaugacca

SEQ ID NO: 3194580 - RNA, 19 nt, Artificial Sequence
  Description of Artificial Sequence: Synthetic oligonucleotide
  modified_base (5)..(5): a, c, u, g, unknown or other
aaaanaaaaguuaauuuug

SEQ ID NO: 3194581 - RNA, 19 nt, Artificial Sequence
  Description of Artificial Sequence: Synthetic oligonucleotide
uuuaucaccacccaggccu

SEQ ID NO: 3194582 - RNA, 19 nt, Artificial Sequence
  Description of Artificial Sequence: Synthetic oligonucleotide
cuaaguaccauuuaucacc

SEQ ID NO: 3194583 - RNA, 19 nt, Artificial Sequence
  Description of Artificial Sequence: Synthetic oligonucleotide
  modified_base (2)..(2): a, c, u, g, unknown or other
anaaaaguuaauuuugcaa

SEQ ID NO: 3194584 - RNA, 19 nt, Artificial Sequence
  Description of Artificial Sequence: Synthetic oligonucleotide
uacaaaaugaccauaaaau

SEQ ID NO: 3194585 - RNA, 19 nt, Artificial Sequence
  Description of Artificial Sequence: Synthetic oligonucleotide
agaucucugauuuacauuc

SEQ ID NO: 3194586 - RNA, 19 nt, Artificial Sequence
  Description of Artificial Sequence: Synthetic oligonucleotide
aaaaguuaauuuugcaauc

SEQ ID NO: 3194587 - RNA, 19 nt, Artificial Sequence
  Description of Artificial Sequence: Synthetic oligonucleotide
  modified_base (13)..(13): a, c, u, g, unknown or other
aacaaaacaaaanaaaagu

SEQ ID NO: 3194588 - RNA, 19 nt, Artificial Sequence
  Description of Artificial Sequence: Synthetic oligonucleotide
  modified_base (10)..(10): a, c, u, g, unknown or other
aaaacaaaanaaaaguuaa

SEQ ID NO: 3194589 - RNA, 19 nt, Artificial Sequence
  Description of Artificial Sequence: Synthetic oligonucleotide
ugaucaauaaugcaucucc

SEQ ID NO: 3194590 - RNA, 19 nt, Artificial Sequence
  Description of Artificial Sequence: Synthetic oligonucleotide
aaauuaucuguauauauaa

SEQ ID NO: 3194591 - RNA, 19 nt, Artificial Sequence
  Description of Artificial Sequence: Synthetic oligonucleotide
uuucaauacacauacaaaa

SEQ ID NO: 3194592 - RNA, 19 nt, Artificial Sequence
  Description of Artificial Sequence: Synthetic oligonucleotide
aguaccauuuaucaccacc

SEQ ID NO: 3194593 - RNA, 19 nt, Artificial Sequence
  Description of Artificial Sequence: Synthetic oligonucleotide
uauuucaauacacauacaa

SEQ ID NO: 3194594 - RNA, 19 nt, Artificial Sequence
  Description of Artificial Sequence: Synthetic oligonucleotide
uauuuaaguuacuuuaugc

SEQ ID NO: 3194595 - RNA, 19 nt, Artificial Sequence
  Description of Artificial Sequence: Synthetic oligonucleotide
ucaauacacauacaaaaug

SEQ ID NO: 3194596 - RNA, 19 nt, Artificial Sequence
  Description of Artificial Sequence: Synthetic oligonucleotide
auuaucuguauauauaaca

SEQ ID NO: 3194597 - RNA, 19 nt, Artificial Sequence
  Description of Artificial Sequence: Synthetic oligonucleotide
ucaauaaugcaucuccucc

SEQ ID NO: 3194598 - RNA, 19 nt, Artificial Sequence
  Description of Artificial Sequence: Synthetic oligonucleotide
  modified_base (3)..(3): a, c, u, g, unknown or other
aanaaaaguuaauuuugca

SEQ ID NO: 3194599 - RNA, 19 nt, Artificial Sequence
  Description of Artificial Sequence: Synthetic oligonucleotide
  modified_base (7)..(7): a, c, u, g, unknown or other
acaaaanaaaaguuaauuu

SEQ ID NO: 3194600 - RNA, 19 nt, Artificial Sequence
  Description of Artificial Sequence: Synthetic oligonucleotide
aaucaaaacacaucggaaa

SEQ ID NO: 3194601 - RNA, 19 nt, Artificial Sequence
  Description of Artificial Sequence: Synthetic oligonucleotide
uuuaaguuacuuuaugcac

SEQ ID NO: 3194602 - RNA, 19 nt, Artificial Sequence
  Description of Artificial Sequence: Synthetic oligonucleotide
uuaaguuacuuuaugcaca

SEQ ID NO: 3194603 - RNA, 19 nt, Artificial Sequence
  Description of Artificial Sequence: Synthetic oligonucleotide
cuuucugccuuaaugaggg

SEQ ID NO: 3194604 - RNA, 19 nt, Artificial Sequence
  Description of Artificial Sequence: Synthetic oligonucleotide
cacauuacacacuagagac

SEQ ID NO: 3194605 - RNA, 19 nt, Artificial Sequence
  Description of Artificial Sequence: Synthetic oligonucleotide
aauacacauacaaaaugac

SEQ ID NO: 3194606 - RNA, 19 nt, Artificial Sequence
  Description of Artificial Sequence: Synthetic oligonucleotide
auuuaaguuacuuuaugca

SEQ ID NO: 3194607 - RNA, 19 nt, Artificial Sequence
  Description of Artificial Sequence: Synthetic oligonucleotide
ucugugaucaauaaugcau

SEQ ID NO: 3194608 - RNA, 19 nt, Artificial Sequence
  Description of Artificial Sequence: Synthetic oligonucleotide
gagacuuuaagcuacagaa

SEQ ID NO: 3194609 - RNA, 19 nt, Artificial Sequence
  Description of Artificial Sequence: Synthetic oligonucleotide
uuaauuuugcaaucaaaac

SEQ ID NO: 3194610 - RNA, 19 nt, Artificial Sequence
  Description of Artificial Sequence: Synthetic oligonucleotide
aauaaugcaucuccuccuc

SEQ ID NO: 3194611 - RNA, 19 nt, Artificial Sequence
  Description of Artificial Sequence: Synthetic oligonucleotide
uacuuuaugcacauuacac

SEQ ID NO: 3194612 - RNA, 19 nt, Artificial Sequence
  Description of Artificial Sequence: Synthetic oligonucleotide
aacucaacacuauuuaagu

SEQ ID NO: 3194613 - RNA, 19 nt, Artificial Sequence
  Description of Artificial Sequence: Synthetic oligonucleotide
uuaucuguauauauaacaa

SEQ ID NO: 3194614 - RNA, 19 nt, Artificial Sequence
  Description of Artificial Sequence: Synthetic oligonucleotide
cacacuagagacuuuaagc

SEQ ID NO: 3194615 - RNA, 19 nt, Artificial Sequence
  Description of Artificial Sequence: Synthetic oligonucleotide
  modified_base (8)..(8): a, c, u, g, unknown or other
aacaaaanaaaaguuaauu

SEQ ID NO: 3194616 - RNA, 19 nt, Artificial Sequence
  Description of Artificial Sequence: Synthetic oligonucleotide
aucuguauauauaacaagg

SEQ ID NO: 3194617 - RNA, 19 nt, Artificial Sequence
  Description of Artificial Sequence: Synthetic oligonucleotide
aaaugcuuccacuauuuca

SEQ ID NO: 3194618 - RNA, 19 nt, Artificial Sequence
  Description of Artificial Sequence: Synthetic oligonucleotide
uaaaauuaucuguauauau

SEQ ID NO: 3194619 - RNA, 19 nt, Artificial Sequence
  Description of Artificial Sequence: Synthetic oligonucleotide
uaagcuacagaaaugcuuc

SEQ ID NO: 3194620 - RNA, 19 nt, Artificial Sequence
  Description of Artificial Sequence: Synthetic oligonucleotide
cuuuaugcacauuacacac

SEQ ID NO: 3194621 - RNA, 19 nt, Artificial Sequence
  Description of Artificial Sequence: Synthetic oligonucleotide
cuuuaagcuacagaaaugc

SEQ ID NO: 3194622 - RNA, 19 nt, Artificial Sequence
  Description of Artificial Sequence: Synthetic oligonucleotide
aaaaugaccauaaaauuau

SEQ ID NO: 3194623 - RNA, 19 nt, Artificial Sequence
  Description of Artificial Sequence: Synthetic oligonucleotide
augaccauaaaauuaucug

SEQ ID NO: 3194624 - RNA, 19 nt, Artificial Sequence
  Description of Artificial Sequence: Synthetic oligonucleotide
auauauaacaagguacuuc

SEQ ID NO: 3194625 - RNA, 19 nt, Artificial Sequence
  Description of Artificial Sequence: Synthetic oligonucleotide
aaacucaacacuauuuaag

SEQ ID NO: 3194626 - RNA, 19 nt, Artificial Sequence
  Description of Artificial Sequence: Synthetic oligonucleotide
uaucuguauauauaacaag

SEQ ID NO: 3194627 - RNA, 19 nt, Artificial Sequence
  Description of Artificial Sequence: Synthetic oligonucleotide
ugaccauaaaauuaucugu

SEQ ID NO: 3194628 - RNA, 19 nt, Artificial Sequence
  Description of Artificial Sequence: Synthetic oligonucleotide
caucucaucucuaaguacc

SEQ ID NO: 3194629 - RNA, 19 nt, Artificial Sequence
  Description of Artificial Sequence: Synthetic oligonucleotide
ucuguauauauaacaaggu

SEQ ID NO: 3194630 - RNA, 19 nt, Artificial Sequence
  Description of Artificial Sequence: Synthetic oligonucleotide
acaucggaaaacucaacac

SEQ ID NO: 3194631 - RNA, 19 nt, Artificial Sequence
  Description of Artificial Sequence: Synthetic oligonucleotide
aauuaucuguauauauaac

SEQ ID NO: 3194632 - RNA, 19 nt, Artificial Sequence
  Description of Artificial Sequence: Synthetic oligonucleotide
aauuauccaucugugauca

SEQ ID NO: 3194633 - RNA, 19 nt, Artificial Sequence
  Description of Artificial Sequence: Synthetic oligonucleotide
ucaacacuauuuaaguuac

SEQ ID NO: 3194634 - RNA, 19 nt, Artificial Sequence
  Description of Artificial Sequence: Synthetic oligonucleotide
uuccuaauuauccaucugu

SEQ ID NO: 3194635 - RNA, 19 nt, Artificial Sequence
  Description of Artificial Sequence: Synthetic oligonucleotide
uuugcaaucaaaacacauc

SEQ ID NO: 3194636 - RNA, 19 nt, Artificial Sequence
  Description of Artificial Sequence: Synthetic oligonucleotide
auacacauacaaaaugacc

SEQ ID NO: 3194637 - RNA, 19 nt, Artificial Sequence
  Description of Artificial Sequence: Synthetic oligonucleotide
uaaugagggcuacagaucu

SEQ ID NO: 3194638 - RNA, 19 nt, Artificial Sequence
  Description of Artificial Sequence: Synthetic oligonucleotide
acacuagagacuuuaagcu

SEQ ID NO: 3194639 - RNA, 19 nt, Artificial Sequence
  Description of Artificial Sequence: Synthetic oligonucleotide
ugcacauuacacacuagag

SEQ ID NO: 3194640 - RNA, 19 nt, Artificial Sequence
  Description of Artificial Sequence: Synthetic oligonucleotide
auacaaaaugaccauaaaa

SEQ ID NO: 3194641 - RNA, 19 nt, Artificial Sequence
  Description of Artificial Sequence: Synthetic oligonucleotide
uuacuuuaugcacauuaca

SEQ ID NO: 3194642 - RNA, 19 nt, Artificial Sequence
  Description of Artificial Sequence: Synthetic oligonucleotide
aaaacucaacacuauuuaa

SEQ ID NO: 3194643 - RNA, 19 nt, Artificial Sequence
  Description of Artificial Sequence: Synthetic oligonucleotide
aaaguuaauuuugcaauca

SEQ ID NO: 3194644 - RNA, 19 nt, Artificial Sequence
  Description of Artificial Sequence: Synthetic oligonucleotide
aucaauaaugcaucuccuc

SEQ ID NO: 3194645 - RNA, 19 nt, Artificial Sequence
  Description of Artificial Sequence: Synthetic oligonucleotide
uucaauacacauacaaaau

SEQ ID NO: 3194646 - RNA, 19 nt, Artificial Sequence
  Description of Artificial Sequence: Synthetic oligonucleotide
acuagagacuuuaagcuac

SEQ ID NO: 3194647 - RNA, 19 nt, Artificial Sequence
  Description of Artificial Sequence: Synthetic oligonucleotide
  modified_base (11)..(11): a, c, u, g, unknown or other
caaaacaaaanaaaaguua

SEQ ID NO: 3194648 - RNA, 19 nt, Artificial Sequence
  Description of Artificial Sequence: Synthetic oligonucleotide
uccacuauuucaauacaca

SEQ ID NO: 3194649 - RNA, 19 nt, Artificial Sequence
  Description of Artificial Sequence: Synthetic oligonucleotide
agguacuuccuaauuaucc

SEQ ID NO: 3194650 - RNA, 19 nt, Artificial Sequence
  Description of Artificial Sequence: Synthetic oligonucleotide
uuaagcuacagaaaugcuu

SEQ ID NO: 3194651 - RNA, 19 nt, Artificial Sequence
  Description of Artificial Sequence: Synthetic oligonucleotide
aguuacuuuaugcacauua

SEQ ID NO: 3194652 - RNA, 19 nt, Artificial Sequence
  Description of Artificial Sequence: Synthetic oligonucleotide
uuuugcaaucaaaacacau

SEQ ID NO: 3194653 - RNA, 19 nt, Artificial Sequence
  Description of Artificial Sequence: Synthetic oligonucleotide
aaugaccauaaaauuaucu

SEQ ID NO: 3194654 - RNA, 19 nt, Artificial Sequence
  Description of Artificial Sequence: Synthetic oligonucleotide
acuuuaugcacauuacaca

SEQ ID NO: 3194655 - RNA, 19 nt, Artificial Sequence
  Description of Artificial Sequence: Synthetic oligonucleotide
caauacacauacaaaauga

SEQ ID NO: 3194656 - RNA, 19 nt, Artificial Sequence
  Description of Artificial Sequence: Synthetic oligonucleotide
ugcaaucaaaacacaucgg

SEQ ID NO: 3194657 - RNA, 19 nt, Artificial Sequence
  Description of Artificial Sequence: Synthetic oligonucleotide
aagcuacagaaaugcuucc

SEQ ID NO: 3194658 - RNA, 19 nt, Artificial Sequence
  Description of Artificial Sequence: Synthetic oligonucleotide
aaaauuaucuguauauaua

SEQ ID NO: 3194659 - RNA, 19 nt, Artificial Sequence
  Description of Artificial Sequence: Synthetic oligonucleotide
aaacacaucggaaaacuca

SEQ ID NO: 3194660 - RNA, 19 nt, Artificial Sequence
  Description of Artificial Sequence: Synthetic oligonucleotide
aaugcuuccacuauuucaa

SEQ ID NO: 3194661 - RNA, 19 nt, Artificial Sequence
  Description of Artificial Sequence: Synthetic oligonucleotide
uauaacaagguacuuccua

SEQ ID NO: 3194662 - RNA, 19 nt, Artificial Sequence
  Description of Artificial Sequence: Synthetic oligonucleotide
uccuaauuauccaucugug

SEQ ID NO: 3194663 - RNA, 19 nt, Artificial Sequence
  Description of Artificial Sequence: Synthetic oligonucleotide
acaaaaugaccauaaaauu

SEQ ID NO: 3194664 - RNA, 19 nt, Artificial Sequence
  Description of Artificial Sequence: Synthetic oligonucleotide
uaaguaccauuuaucacca

SEQ ID NO: 3194665 - RNA, 19 nt, Artificial Sequence
  Description of Artificial Sequence: Synthetic oligonucleotide
ucuaaguaccauuuaucac

SEQ ID NO: 3194666 - RNA, 19 nt, Artificial Sequence
  Description of Artificial Sequence: Synthetic oligonucleotide
uuaugcacauuacacacua

SEQ ID NO: 3194667 - RNA, 19 nt, Artificial Sequence
  Description of Artificial Sequence: Synthetic oligonucleotide
acaucucaucucuaaguac

SEQ ID NO: 3194668 - RNA, 19 nt, Artificial Sequence
  Description of Artificial Sequence: Synthetic oligonucleotide
guuaauuuugcaaucaaaa

SEQ ID NO: 3194669 - RNA, 19 nt, Artificial Sequence
  Description of Artificial Sequence: Synthetic oligonucleotide
auuuaucaccacccaggcc

SEQ ID NO: 3194670 - RNA, 19 nt, Artificial Sequence
  Description of Artificial Sequence: Synthetic oligonucleotide
caaaaugaccauaaaauua

SEQ ID NO: 3194671 - RNA, 19 nt, Artificial Sequence
  Description of Artificial Sequence: Synthetic oligonucleotide
aauucugcuuucuucaucc

SEQ ID NO: 3194672 - RNA, 19 nt, Artificial Sequence
  Description of Artificial Sequence: Synthetic oligonucleotide
uuucauaaaguucuggugg

SEQ ID NO: 3194673 - RNA, 19 nt, Artificial Sequence
  Description of Artificial Sequence: Synthetic oligonucleotide
aacaaagucagguguaggc

SEQ ID NO: 3194674 - RNA, 19 nt, Artificial Sequence
  Description of Artificial Sequence: Synthetic oligonucleotide
aaccucucaauucauauac

SEQ ID NO: 3194675 - RNA, 19 nt, Artificial Sequence
  Description of Artificial Sequence: Synthetic oligonucleotide
aauucugcagcugagaagg

SEQ ID NO: 3194676 - RNA, 19 nt, Artificial Sequence
  Description of Artificial Sequence: Synthetic oligonucleotide
uaugacaauaacuugauuc

SEQ ID NO: 3194677 - RNA, 19 nt, Artificial Sequence
  Description of Artificial Sequence: Synthetic oligonucleotide
ucucaauucauauacagca

SEQ ID NO: 3194678 - RNA, 19 nt, Artificial Sequence
  Description of Artificial Sequence: Synthetic oligonucleotide
uaacauuuaaauagcaaag

SEQ ID NO: 3194679 - RNA, 19 nt, Artificial Sequence
  Description of Artificial Sequence: Synthetic oligonucleotide
ucaauuuuccuggagaugg

SEQ ID NO: 3194680 - RNA, 19 nt, Artificial Sequence
  Description of Artificial Sequence: Synthetic oligonucleotide
aaaaguacuaaguuauuga

SEQ ID NO: 3194681 - RNA, 19 nt, Artificial Sequence
  Description of Artificial Sequence: Synthetic oligonucleotide
cugaaaggaaauuugauac

SEQ ID NO: 3194682 - RNA, 19 nt, Artificial Sequence
  Description of Artificial Sequence: Synthetic oligonucleotide
uggaauauggagaaguggc

SEQ ID NO: 3194683 - RNA, 19 nt, Artificial Sequence
  Description of Artificial Sequence: Synthetic oligonucleotide
uccaauuuugaauagacuc

SEQ ID NO: 3194684 - RNA, 19 nt, Artificial Sequence
  Description of Artificial Sequence: Synthetic oligonucleotide
uuucuuuuaauuuggccag

SEQ ID NO: 3194685 - RNA, 19 nt, Artificial Sequence
  Description of Artificial Sequence: Synthetic oligonucleotide
agcuuuaacuuacacugcc

SEQ ID NO: 3194686 - RNA, 19 nt, Artificial Sequence
  Description of Artificial Sequence: Synthetic oligonucleotide
uucgaguuuauguaaaucu

SEQ ID NO: 3194687 - RNA, 19 nt, Artificial Sequence
  Description of Artificial Sequence: Synthetic oligonucleotide
uucauugacaucucuauac

SEQ ID NO: 3194688 - RNA, 19 nt, Artificial Sequence
  Description of Artificial Sequence: Synthetic oligonucleotide
aucauaauaaauaauaaau

SEQ ID NO: 3194689 - RNA, 19 nt, Artificial Sequence
  Description of Artificial Sequence: Synthetic oligonucleotide
gauaccacuucucauguug

SEQ ID NO: 3194690 - RNA, 19 nt, Artificial Sequence
  Description of Artificial Sequence: Synthetic oligonucleotide
aaaaccucucaauucauau

SEQ ID NO: 3194691 - RNA, 19 nt, Artificial Sequence
  Description of Artificial Sequence: Synthetic oligonucleotide
ugagguacauguagcaagg

SEQ ID NO: 3194692 - RNA, 19 nt, Artificial Sequence
  Description of Artificial Sequence: Synthetic oligonucleotide
uuauuuaaaauagucucca

SEQ ID NO: 3194693 - RNA, 19 nt, Artificial Sequence
  Description of Artificial Sequence: Synthetic oligonucleotide
ggaacuuugcuugagaugg

SEQ ID NO: 3194694 - RNA, 19 nt, Artificial Sequence
  Description of Artificial Sequence: Synthetic oligonucleotide
uuacauuaucucauagucc

SEQ ID NO: 3194695 - RNA, 19 nt, Artificial Sequence
  Description of Artificial Sequence: Synthetic oligonucleotide
uguauuuuggccaacuguu

SEQ ID NO: 3194696 - RNA, 19 nt, Artificial Sequence
  Description of Artificial Sequence: Synthetic oligonucleotide
uuuucaacaaagucaggug

SEQ ID NO: 3194697 - RNA, 19 nt, Artificial Sequence
  Description of Artificial Sequence: Synthetic oligonucleotide
ugaaacaaccaacaaacua

SEQ ID NO: 3194698 - RNA, 19 nt, Artificial Sequence
  Description of Artificial Sequence: Synthetic oligonucleotide
augacaauaacuugauucu

SEQ ID NO: 3194699 - RNA, 19 nt, Artificial Sequence
  Description of Artificial Sequence: Synthetic oligonucleotide
cuagcaauuacauuaucuc

SEQ ID NO: 3194700 - RNA, 19 nt, Artificial Sequence
  Description of Artificial Sequence: Synthetic oligonucleotide
ucaacucauuauuaguugc

SEQ ID NO: 3194701 - RNA, 19 nt, Artificial Sequence
  Description of Artificial Sequence: Synthetic oligonucleotide
ucaacugccaguuucugcu

SEQ ID NO: 3194702 - RNA, 19 nt, Artificial Sequence
  Description of Artificial Sequence: Synthetic oligonucleotide
aagcucuucauauaucagu

SEQ ID NO: 3194703 - RNA, 19 nt, Artificial Sequence
  Description of Artificial Sequence: Synthetic oligonucleotide
acuuccaaguuauaaaagu

SEQ ID NO: 3194704 - RNA, 19 nt, Artificial Sequence
  Description of Artificial Sequence: Synthetic oligonucleotide
caugcuuuaaucaaauaca

SEQ ID NO: 3194705 - RNA, 19 nt, Artificial Sequence
  Description of Artificial Sequence: Synthetic oligonucleotide
uuuaauuuggccagucguc

SEQ ID NO: 3194706 - RNA, 19 nt, Artificial Sequence
  Description of Artificial Sequence: Synthetic oligonucleotide
uguggguccagaaagccug

SEQ ID NO: 3194707 - RNA, 19 nt, Artificial Sequence
  Description of Artificial Sequence: Synthetic oligonucleotide
aacuuuugauaccacuucu

SEQ ID NO: 3194708 - RNA, 19 nt, Artificial Sequence
  Description of Artificial Sequence: Synthetic oligonucleotide
uuugcuaugagaaggcaua

SEQ ID NO: 3194709 - RNA, 19 nt, Artificial Sequence
  Description of Artificial Sequence: Synthetic oligonucleotide
aauauggagaaguggccca

SEQ ID NO: 3194710 - RNA, 19 nt, Artificial Sequence
  Description of Artificial Sequence: Synthetic oligonucleotide
cuuaaaaccucucaauuca

SEQ ID NO: 3194711 - RNA, 19 nt, Artificial Sequence
  Description of Artificial Sequence: Synthetic oligonucleotide
cuuuaacuuacacugccgc

SEQ ID NO: 3194712 - RNA, 19 nt, Artificial Sequence
  Description of Artificial Sequence: Synthetic oligonucleotide
cuuggaauggcccugugug

SEQ ID NO: 3194713 - RNA, 19 nt, Artificial Sequence
  Description of Artificial Sequence: Synthetic oligonucleotide
uuuuguucgcucuucccag

SEQ ID NO: 3194714 - RNA, 19 nt, Artificial Sequence
  Description of Artificial Sequence: Synthetic oligonucleotide
uuaacuuacacugccgcug

SEQ ID NO: 3194715 - RNA, 19 nt, Artificial Sequence
  Description of Artificial Sequence: Synthetic oligonucleotide
ucuguucuucuuuaaaagu

SEQ ID NO: 3194716 - RNA, 19 nt, Artificial Sequence
  Description of Artificial Sequence: Synthetic oligonucleotide
uacccaaagcccaagaguc

SEQ ID NO: 3194717 - RNA, 19 nt, Artificial Sequence
  Description of Artificial Sequence: Synthetic oligonucleotide
cucaagcuuaguuacuucc

SEQ ID NO: 3194718 - RNA, 19 nt, Artificial Sequence
  Description of Artificial Sequence: Synthetic oligonucleotide
ucuggcuacaggaacuuug

SEQ ID NO: 3194719 - RNA, 19 nt, Artificial Sequence
  Description of Artificial Sequence: Synthetic oligonucleotide
uacuuccaaguuauaaaag

SEQ ID NO: 3194720 - RNA, 19 nt, Artificial Sequence
  Description of Artificial Sequence: Synthetic oligonucleotide
uuacccaaagcccaagagu

SEQ ID NO: 3194721 - RNA, 19 nt, Artificial Sequence
  Description of Artificial Sequence: Synthetic oligonucleotide
aauaauaaaugagguacau

SEQ ID NO: 3194722 - RNA, 19 nt, Artificial Sequence
  Description of Artificial Sequence: Synthetic oligonucleotide
uagcaauuacauuaucuca

SEQ ID NO: 3194723 - RNA, 19 nt, Artificial Sequence
  Description of Artificial Sequence: Synthetic oligonucleotide
ucugcugugcguaugaauu

SEQ ID NO: 3194724 - RNA, 19 nt, Artificial Sequence
  Description of Artificial Sequence: Synthetic oligonucleotide
uaucacuucuucuggaaga

SEQ ID NO: 3194725 - RNA, 19 nt, Artificial Sequence
  Description of Artificial Sequence: Synthetic oligonucleotide
acacaaagauuuuauaaau

SEQ ID NO: 3194726 - RNA, 19 nt, Artificial Sequence
  Description of Artificial Sequence: Synthetic oligonucleotide
acaucuuucagcuggugcu

SEQ ID NO: 3194727 - RNA, 19 nt, Artificial Sequence
  Description of Artificial Sequence: Synthetic oligonucleotide
uuuacguuuuguuacucaa

SEQ ID NO: 3194728 - RNA, 19 nt, Artificial Sequence
  Description of Artificial Sequence: Synthetic oligonucleotide
ucuaaauuccuugucgcca

SEQ ID NO: 3194729 - RNA, 19 nt, Artificial Sequence
  Description of Artificial Sequence: Synthetic oligonucleotide
auuaguugcuuucucuucu

SEQ ID NO: 3194730 - RNA, 19 nt, Artificial Sequence
  Description of Artificial Sequence: Synthetic oligonucleotide
ugucuuuugauugucuucu

SEQ ID NO: 3194731 - RNA, 19 nt, Artificial Sequence
  Description of Artificial Sequence: Synthetic oligonucleotide
ucuaugacaauaacuugau

SEQ ID NO: 3194732 - RNA, 19 nt, Artificial Sequence
  Description of Artificial Sequence: Synthetic oligonucleotide
uuccaaguuauaaaaguua

SEQ ID NO: 3194733 - RNA, 19 nt, Artificial Sequence
  Description of Artificial Sequence: Synthetic oligonucleotide
ucuuugguuguagaaauga

SEQ ID NO: 3194734 - RNA, 19 nt, Artificial Sequence
  Description of Artificial Sequence: Synthetic oligonucleotide
uugauugucuucugguuug

SEQ ID NO: 3194735 - RNA, 19 nt, Artificial Sequence
  Description of Artificial Sequence: Synthetic oligonucleotide
auuacccaaagcccaagag

SEQ ID NO: 3194736 - RNA, 19 nt, Artificial Sequence
  Description of Artificial Sequence: Synthetic oligonucleotide
ucguuuuccaauuuugaau

SEQ ID NO: 3194737 - RNA, 19 nt, Artificial Sequence
  Description of Artificial Sequence: Synthetic oligonucleotide
uucacuaagauaugauaaa

SEQ ID NO: 3194738 - RNA, 19 nt, Artificial Sequence
  Description of Artificial Sequence: Synthetic oligonucleotide
gaaaugacuguguuuaucu

SEQ ID NO: 3194739 - RNA, 19 nt, Artificial Sequence
  Description of Artificial Sequence: Synthetic oligonucleotide
uuauguaaaucucuuucuu

SEQ ID NO: 3194740 - RNA, 19 nt, Artificial Sequence
  Description of Artificial Sequence: Synthetic oligonucleotide
ugggaagcaugcuucauug

SEQ ID NO: 3194741 - RNA, 19 nt, Artificial Sequence
  Description of Artificial Sequence: Synthetic oligonucleotide
cugaaauagcaauacuaac

SEQ ID NO: 3194742 - RNA, 19 nt, Artificial Sequence
  Description of Artificial Sequence: Synthetic oligonucleotide
uccagaaagccugaaagga

SEQ ID NO: 3194743 - RNA, 19 nt, Artificial Sequence
  Description of Artificial Sequence: Synthetic oligonucleotide
aauuacccaaagcccaaga

SEQ ID NO: 3194744 - RNA, 19 nt, Artificial Sequence
  Description of Artificial Sequence: Synthetic oligonucleotide
aaagacacuuuacguuuug

SEQ ID NO: 3194745 - RNA, 19 nt, Artificial Sequence
  Description of Artificial Sequence: Synthetic oligonucleotide
ucgaguuuauguaaaucuc

SEQ ID NO: 3194746 - RNA, 19 nt, Artificial Sequence
  Description of Artificial Sequence: Synthetic oligonucleotide
uuugagcugggaagcaugc

SEQ ID NO: 3194747 - RNA, 19 nt, Artificial Sequence
  Description of Artificial Sequence: Synthetic oligonucleotide
agguguaggcuucacaucu

SEQ ID NO: 3194748 - RNA, 19 nt, Artificial Sequence
  Description of Artificial Sequence: Synthetic oligonucleotide
uucuuuuaacuucaguauu

SEQ ID NO: 3194749 - RNA, 19 nt, Artificial Sequence
  Description of Artificial Sequence: Synthetic oligonucleotide
uuuaacuuacacugccgcu

SEQ ID NO: 3194750 - RNA, 19 nt, Artificial Sequence
  Description of Artificial Sequence: Synthetic oligonucleotide
uucauaaaguucugguggu

SEQ ID NO: 3194751 - RNA, 19 nt, Artificial Sequence
  Description of Artificial Sequence: Synthetic oligonucleotide
guugcugaaccucauccag

SEQ ID NO: 3194752 - RNA, 19 nt, Artificial Sequence
  Description of Artificial Sequence: Synthetic oligonucleotide
ugauucucccaaauuauuu

SEQ ID NO: 3194753 - RNA, 19 nt, Artificial Sequence
  Description of Artificial Sequence: Synthetic oligonucleotide
auagcaaaguuaaucaccu

SEQ ID NO: 3194754 - RNA, 19 nt, Artificial Sequence
  Description of Artificial Sequence: Synthetic oligonucleotide
cugguggucaaagucaucc

SEQ ID NO: 3194755 - RNA, 19 nt, Artificial Sequence
  Description of Artificial Sequence: Synthetic oligonucleotide
gguacauguagcaagggag

SEQ ID NO: 3194756 - RNA, 19 nt, Artificial Sequence
  Description of Artificial Sequence: Synthetic oligonucleotide
uuauaaaucugugggucca

SEQ ID NO: 3194757 - RNA, 19 nt, Artificial Sequence
  Description of Artificial Sequence: Synthetic oligonucleotide
accaaccucacuaagcuag

SEQ ID NO: 3194758 - RNA, 19 nt, Artificial Sequence
  Description of Artificial Sequence: Synthetic oligonucleotide
aagcccaagagucaauuuu

SEQ ID NO: 3194759 - RNA, 19 nt, Artificial Sequence
  Description of Artificial Sequence: Synthetic oligonucleotide
aaggacgaguuccagcaga

SEQ ID NO: 3194760 - RNA, 19 nt, Artificial Sequence
  Description of Artificial Sequence: Synthetic oligonucleotide
uuaauuuggccagucgucu

SEQ ID NO: 3194761 - RNA, 19 nt, Artificial Sequence
  Description of Artificial Sequence: Synthetic oligonucleotide
ucuagagccaggaacuuuu

SEQ ID NO: 3194762 - RNA, 19 nt, Artificial Sequence
  Description of Artificial Sequence: Synthetic oligonucleotide
uuucagcuggugcugaagu

SEQ ID NO: 3194763 - RNA, 19 nt, Artificial Sequence
  Description of Artificial Sequence: Synthetic oligonucleotide
uugaaaccuggaaaucuca

SEQ ID NO: 3194764 - RNA, 19 nt, Artificial Sequence
  Description of Artificial Sequence: Synthetic oligonucleotide
gagucaauuuuccuggaga

SEQ ID NO: 3194765 - RNA, 19 nt, Artificial Sequence
  Description of Artificial Sequence: Synthetic oligonucleotide
ugcguaugaauucugcuuu

SEQ ID NO: 3194766 - RNA, 19 nt, Artificial Sequence
  Description of Artificial Sequence: Synthetic oligonucleotide
aauugacacuuaaaaccuc

SEQ ID NO: 3194767 - RNA, 19 nt, Artificial Sequence
  Description of Artificial Sequence: Synthetic oligonucleotide
aacucuuccagcaugcaau

SEQ ID NO: 3194768 - RNA, 19 nt, Artificial Sequence
  Description of Artificial Sequence: Synthetic oligonucleotide
acuagcaauuacauuaucu

SEQ ID NO: 3194769 - RNA, 19 nt, Artificial Sequence
  Description of Artificial Sequence: Synthetic oligonucleotide
cuugaaaccuggaaaucuc

SEQ ID NO: 3194770 - RNA, 19 nt, Artificial Sequence
  Description of Artificial Sequence: Synthetic oligonucleotide
uauuaguugcuuucucuuc

SEQ ID NO: 3194771 - RNA, 19 nt, Artificial Sequence
  Description of Artificial Sequence: Synthetic oligonucleotide
auuuaucacacuuauaagg

SEQ ID NO: 3194772 - RNA, 19 nt, Artificial Sequence
  Description of Artificial Sequence: Synthetic oligonucleotide
ucauguuuaauuaaaguag

SEQ ID NO: 3194773 - RNA, 19 nt, Artificial Sequence
  Description of Artificial Sequence: Synthetic oligonucleotide
guuuaauuaaaguagauga

SEQ ID NO: 3194774 - RNA, 19 nt, Artificial Sequence
  Description of Artificial Sequence: Synthetic oligonucleotide
uuuaucacacuuauaaggc

SEQ ID NO: 3194775 - RNA, 19 nt, Artificial Sequence
  Description of Artificial Sequence: Synthetic oligonucleotide
uguacuaugggauacuuca

SEQ ID NO: 3194776 - RNA, 19 nt, Artificial Sequence
  Description of Artificial Sequence: Synthetic oligonucleotide
uaauuaaaguagaugaucu

SEQ ID NO: 3194777 - RNA, 19 nt, Artificial Sequence
  Description of Artificial Sequence: Synthetic oligonucleotide
auuucucucucugagaucc

SEQ ID NO: 3194778 - RNA, 19 nt, Artificial Sequence
  Description of Artificial Sequence: Synthetic oligonucleotide
uaacuaauuguuauagucc

SEQ ID NO: 3194779 - RNA, 19 nt, Artificial Sequence
  Description of Artificial Sequence: Synthetic oligonucleotide
agauccauggcucuucucc

SEQ ID NO: 3194780 - RNA, 19 nt, Artificial Sequence
  Description of Artificial Sequence: Synthetic oligonucleotide
auaagcaucaucuuuguga

SEQ ID NO: 3194781 - RNA, 19 nt, Artificial Sequence
  Description of Artificial Sequence: Synthetic oligonucleotide
uauggcaugugacagaaca

SEQ ID NO: 3194782 - RNA, 19 nt, Artificial Sequence
  Description of Artificial Sequence: Synthetic oligonucleotide
aacuaauuguuauagucca

SEQ ID NO: 3194783 - RNA, 19 nt, Artificial Sequence
  Description of Artificial Sequence: Synthetic oligonucleotide
gauacuucagauuugccac

SEQ ID NO: 3194784 - RNA, 19 nt, Artificial Sequence
  Description of Artificial Sequence: Synthetic oligonucleotide
uuuccuuccagaauaaacu

SEQ ID NO: 3194785 - RNA, 19 nt, Artificial Sequence
  Description of Artificial Sequence: Synthetic oligonucleotide
aaugauuuccuacauuuau

SEQ ID NO: 3194786 - RNA, 19 nt, Artificial Sequence
  Description of Artificial Sequence: Synthetic oligonucleotide
uaaaugauuuccuacauuu

SEQ ID NO: 3194787 - RNA, 19 nt, Artificial Sequence
  Description of Artificial Sequence: Synthetic oligonucleotide
uguaccauugggauaagca

SEQ ID NO: 3194788 - RNA, 19 nt, Artificial Sequence
  Description of Artificial Sequence: Synthetic oligonucleotide
aauuuucucauguuuaauu

SEQ ID NO: 3194789 - RNA, 19 nt, Artificial Sequence
  Description of Artificial Sequence: Synthetic oligonucleotide
uaugggauacuucagauuu

SEQ ID NO: 3194790 - RNA, 19 nt, Artificial Sequence
  Description of Artificial Sequence: Synthetic oligonucleotide
aguacauucaugauguuuc

SEQ ID NO: 3194791 - RNA, 19 nt, Artificial Sequence
  Description of Artificial Sequence: Synthetic oligonucleotide
uucacugggcuuuacaucc

SEQ ID NO: 3194792 - RNA, 19 nt, Artificial Sequence
  Description of Artificial Sequence: Synthetic oligonucleotide
guaacuaauuguuauaguc

SEQ ID NO: 3194793 - RNA, 19 nt, Artificial Sequence
  Description of Artificial Sequence: Synthetic oligonucleotide
aucacgucccuguauaagc

SEQ ID NO: 3194794 - RNA, 19 nt, Artificial Sequence
  Description of Artificial Sequence: Synthetic oligonucleotide
ugauuuccuacauuuauca

SEQ ID NO: 3194795 - RNA, 19 nt, Artificial Sequence
  Description of Artificial Sequence: Synthetic oligonucleotide
cagauaucucccaauaugg

SEQ ID NO: 3194796 - RNA, 19 nt, Artificial Sequence
  Description of Artificial Sequence: Synthetic oligonucleotide
aaugucacugacuccuggg

SEQ ID NO: 3194797 - RNA, 19 nt, Artificial Sequence
  Description of Artificial Sequence: Synthetic oligonucleotide
auuuccuacauuuaucaca

SEQ ID NO: 3194798 - RNA, 19 nt, Artificial Sequence
  Description of Artificial Sequence: Synthetic oligonucleotide
ugaucugugaauaaaugau

SEQ ID NO: 3194799 - RNA, 19 nt, Artificial Sequence
  Description of Artificial Sequence: Synthetic oligonucleotide
aacgacuuggugucaggcc

SEQ ID NO: 3194800 - RNA, 19 nt, Artificial Sequence
  Description of Artificial Sequence: Synthetic oligonucleotide
uguuuaauuaaaguagaug

SEQ ID NO: 3194801 - RNA, 19 nt, Artificial Sequence
  Description of Artificial Sequence: Synthetic oligonucleotide
uuugccacgcugaauaccc

SEQ ID NO: 3194802 - RNA, 19 nt, Artificial Sequence
  Description of Artificial Sequence: Synthetic oligonucleotide
uuuaauuaaaguagaugau

SEQ ID NO: 3194803 - RNA, 19 nt, Artificial Sequence
  Description of Artificial Sequence: Synthetic oligonucleotide
auucaugauguuuccuucc

SEQ ID NO: 3194804 - RNA, 19 nt, Artificial Sequence
  Description of Artificial Sequence: Synthetic oligonucleotide
uaagcuguguuuuccagag

SEQ ID NO: 3194805 - RNA, 19 nt, Artificial Sequence
  Description of Artificial Sequence: Synthetic oligonucleotide
ugugaauaaaugauuuccu

SEQ ID NO: 3194806 - RNA, 19 nt, Artificial Sequence
  Description of Artificial Sequence: Synthetic oligonucleotide
uuauaguccacauuauuuc

SEQ ID NO: 3194807 - RNA, 19 nt, Artificial Sequence
  Description of Artificial Sequence: Synthetic oligonucleotide
cuuugaaugucacugacuc

SEQ ID NO: 3194808 - RNA, 19 nt, Artificial Sequence
  Description of Artificial Sequence: Synthetic oligonucleotide
uugaagaucaccucuggcu

SEQ ID NO: 3194809 - RNA, 19 nt, Artificial Sequence
  Description of Artificial Sequence: Synthetic oligonucleotide
cuugauacccaagagaaac

SEQ ID NO: 3194810 - RNA, 19 nt, Artificial Sequence
  Description of Artificial Sequence: Synthetic oligonucleotide
auuauuuccaagucuuuca

SEQ ID NO: 3194811 - RNA, 19 nt, Artificial Sequence
  Description of Artificial Sequence: Synthetic oligonucleotide
cugugaauaaaugauuucc

SEQ ID NO: 3194812 - RNA, 19 nt, Artificial Sequence
  Description of Artificial Sequence: Synthetic oligonucleotide
uuacaucccagauaucucc

SEQ ID NO: 3194813 - RNA, 19 nt, Artificial Sequence
  Description of Artificial Sequence: Synthetic oligonucleotide
uggucuuccagucuggaca

SEQ ID NO: 3194814 - RNA, 19 nt, Artificial Sequence
  Description of Artificial Sequence: Synthetic oligonucleotide
uacucugaguaacuaauug

SEQ ID NO: 3194815 - RNA, 19 nt, Artificial Sequence
  Description of Artificial Sequence: Synthetic oligonucleotide
cagaacauuuguacuaugg

SEQ ID NO: 3194816 - RNA, 19 nt, Artificial Sequence
  Description of Artificial Sequence: Synthetic oligonucleotide
aaaguagaugaucugugaa

SEQ ID NO: 3194817 - RNA, 19 nt, Artificial Sequence
  Description of Artificial Sequence: Synthetic oligonucleotide
uuccagucuggacagaaag

SEQ ID NO: 3194818 - RNA, 19 nt, Artificial Sequence
  Description of Artificial Sequence: Synthetic oligonucleotide
ugaauacccaacgacuugg

SEQ ID NO: 3194819 - RNA, 19 nt, Artificial Sequence
  Description of Artificial Sequence: Synthetic oligonucleotide
ugcuccaauuugaagauca

SEQ ID NO: 3194820 - RNA, 19 nt, Artificial Sequence
  Description of Artificial Sequence: Synthetic oligonucleotide
uugaaugucacugacuccu

SEQ ID NO: 3194821 - RNA, 19 nt, Artificial Sequence
  Description of Artificial Sequence: Synthetic oligonucleotide
agggauacuacucugagua

SEQ ID NO: 3194822 - RNA, 19 nt, Artificial Sequence
  Description of Artificial Sequence: Synthetic oligonucleotide
gaacauuuguacuauggga

SEQ ID NO: 3194823 - RNA, 19 nt, Artificial Sequence
  Description of Artificial Sequence: Synthetic oligonucleotide
uuugcagggauacuacucu

SEQ ID NO: 3194824 - RNA, 19 nt, Artificial Sequence
  Description of Artificial Sequence: Synthetic oligonucleotide
ucucauguuuaauuaaagu

SEQ ID NO: 3194825 - RNA, 19 nt, Artificial Sequence
  Description of Artificial Sequence: Synthetic oligonucleotide
aacauuuguacuaugggau

SEQ ID NO: 3194826 - RNA, 19 nt, Artificial Sequence
  Description of Artificial Sequence: Synthetic oligonucleotide
aggucuuuggauuucucuc

SEQ ID NO: 3194827 - RNA, 19 nt, Artificial Sequence
  Description of Artificial Sequence: Synthetic oligonucleotide
gauguuuccuuccagaaua

SEQ ID NO: 3194828 - RNA, 19 nt, Artificial Sequence
  Description of Artificial Sequence: Synthetic oligonucleotide
augaucugugaauaaauga

SEQ ID NO: 3194829 - RNA, 19 nt, Artificial Sequence
  Description of Artificial Sequence: Synthetic oligonucleotide
aucuuugaaugucacugac

SEQ ID NO: 3194830 - RNA, 19 nt, Artificial Sequence
  Description of Artificial Sequence: Synthetic oligonucleotide
auuuccaagucuuucacau

SEQ ID NO: 3194831 - RNA, 19 nt, Artificial Sequence
  Description of Artificial Sequence: Synthetic oligonucleotide
uuccaagucuuucacauuc

SEQ ID NO: 3194832 - RNA, 19 nt, Artificial Sequence
  Description of Artificial Sequence: Synthetic oligonucleotide
uuucucauguuuaauuaaa

SEQ ID NO: 3194833 - RNA, 19 nt, Artificial Sequence
  Description of Artificial Sequence: Synthetic oligonucleotide
aaguagaugaucugugaau

SEQ ID NO: 3194834 - RNA, 19 nt, Artificial Sequence
  Description of Artificial Sequence: Synthetic oligonucleotide
gauaucucccaauauggca

SEQ ID NO: 3194835 - RNA, 19 nt, Artificial Sequence
  Description of Artificial Sequence: Synthetic oligonucleotide
auacccaacgacuuggugu

SEQ ID NO: 3194836 - RNA, 19 nt, Artificial Sequence
  Description of Artificial Sequence: Synthetic oligonucleotide
uaagcaucaucuuugugaa

SEQ ID NO: 3194837 - RNA, 19 nt, Artificial Sequence
  Description of Artificial Sequence: Synthetic oligonucleotide
aucaguacauucaugaugu

SEQ ID NO: 3194838 - RNA, 19 nt, Artificial Sequence
  Description of Artificial Sequence: Synthetic oligonucleotide
uaaaguagaugaucuguga

SEQ ID NO: 3194839 - RNA, 19 nt, Artificial Sequence
  Description of Artificial Sequence: Synthetic oligonucleotide
uucagauuugccacgcuga

SEQ ID NO: 3194840 - RNA, 19 nt, Artificial Sequence
  Description of Artificial Sequence: Synthetic oligonucleotide
uuccagaauaaacuccuug

SEQ ID NO: 3194841 - RNA, 19 nt, Artificial Sequence
  Description of Artificial Sequence: Synthetic oligonucleotide
aaggucuuuggauuucucu

SEQ ID NO: 3194842 - RNA, 19 nt, Artificial Sequence
  Description of Artificial Sequence: Synthetic oligonucleotide
cauuuaucacacuuauaag

SEQ ID NO: 3194843 - RNA, 19 nt, Artificial Sequence
  Description of Artificial Sequence: Synthetic oligonucleotide
auuugaagaucaccucugg

SEQ ID NO: 3194844 - RNA, 19 nt, Artificial Sequence
  Description of Artificial Sequence: Synthetic oligonucleotide
gaauaaacuccuuggucug

SEQ ID NO: 3194845 - RNA, 19 nt, Artificial Sequence
  Description of Artificial Sequence: Synthetic oligonucleotide
auucacugggcuuuacauc

SEQ ID NO: 3194846 - RNA, 19 nt, Artificial Sequence
  Description of Artificial Sequence: Synthetic oligonucleotide
cucauguuuaauuaaagua

SEQ ID NO: 3194847 - RNA, 19 nt, Artificial Sequence
  Description of Artificial Sequence: Synthetic oligonucleotide
gacacuugauacccaagag

SEQ ID NO: 3194848 - RNA, 19 nt, Artificial Sequence
  Description of Artificial Sequence: Synthetic oligonucleotide
uacuaugggauacuucaga

SEQ ID NO: 3194849 - RNA, 19 nt, Artificial Sequence
  Description of Artificial Sequence: Synthetic oligonucleotide
auuuucucauguuuaauua

SEQ ID NO: 3194850 - RNA, 19 nt, Artificial Sequence
  Description of Artificial Sequence: Synthetic oligonucleotide
aauauggcaugugacagaa

SEQ ID NO: 3194851 - RNA, 19 nt, Artificial Sequence
  Description of Artificial Sequence: Synthetic oligonucleotide
uccuuccagaauaaacucc

SEQ ID NO: 3194852 - RNA, 19 nt, Artificial Sequence
  Description of Artificial Sequence: Synthetic oligonucleotide
uucuccuugcuccaauuug

SEQ ID NO: 3194853 - RNA, 19 nt, Artificial Sequence
  Description of Artificial Sequence: Synthetic oligonucleotide
gaugaucugugaauaaaug

SEQ ID NO: 3194854 - RNA, 19 nt, Artificial Sequence
  Description of Artificial Sequence: Synthetic oligonucleotide
acucugaguaacuaauugu

SEQ ID NO: 3194855 - RNA, 19 nt, Artificial Sequence
  Description of Artificial Sequence: Synthetic oligonucleotide
uuuugcagggauacuacuc

SEQ ID NO: 3194856 - RNA, 19 nt, Artificial Sequence
  Description of Artificial Sequence: Synthetic oligonucleotide
agcuguguuuuccagagga

SEQ ID NO: 3194857 - RNA, 19 nt, Artificial Sequence
  Description of Artificial Sequence: Synthetic oligonucleotide
ugugagcuggcuacggucc

SEQ ID NO: 3194858 - RNA, 19 nt, Artificial Sequence
  Description of Artificial Sequence: Synthetic oligonucleotide
acgcugaauacccaacgac

SEQ ID NO: 3194859 - RNA, 19 nt, Artificial Sequence
  Description of Artificial Sequence: Synthetic oligonucleotide
cauguuuaauuaaaguaga

SEQ ID NO: 3194860 - RNA, 19 nt, Artificial Sequence
  Description of Artificial Sequence: Synthetic oligonucleotide
uccacauuauuuccaaguc

SEQ ID NO: 3194861 - RNA, 19 nt, Artificial Sequence
  Description of Artificial Sequence: Synthetic oligonucleotide
auacccaagagaaaccagg

SEQ ID NO: 3194862 - RNA, 19 nt, Artificial Sequence
  Description of Artificial Sequence: Synthetic oligonucleotide
aauuguuauaguccacauu

SEQ ID NO: 3194863 - RNA, 19 nt, Artificial Sequence
  Description of Artificial Sequence: Synthetic oligonucleotide
uugauacccaagagaaacc

SEQ ID NO: 3194864 - RNA, 19 nt, Artificial Sequence
  Description of Artificial Sequence: Synthetic oligonucleotide
aauacccaacgacuuggug

SEQ ID NO: 3194865 - RNA, 19 nt, Artificial Sequence
  Description of Artificial Sequence: Synthetic oligonucleotide
acacuugauacccaagaga

SEQ ID NO: 3194866 - RNA, 19 nt, Artificial Sequence
  Description of Artificial Sequence: Synthetic oligonucleotide
cugggcaggguccacaugg

SEQ ID NO: 3194867 - RNA, 19 nt, Artificial Sequence
  Description of Artificial Sequence: Synthetic oligonucleotide
uuaucacacuuauaaggcu

SEQ ID NO: 3194868 - RNA, 19 nt, Artificial Sequence
  Description of Artificial Sequence: Synthetic oligonucleotide
uaucacacuuauaaggcuu

SEQ ID NO: 3194869 - RNA, 19 nt, Artificial Sequence
  Description of Artificial Sequence: Synthetic oligonucleotide
uaccauugggauaagcauc

SEQ ID NO: 3194870 - RNA, 19 nt, Artificial Sequence
  Description of Artificial Sequence: Synthetic oligonucleotide
uuuacaucccagauaucuc

SEQ ID NO: 3194871 - RNA, 19 nt, Artificial Sequence
  Description of Artificial Sequence: Synthetic oligonucleotide
ucaaguauggagaagagaa

SEQ ID NO: 3194872 - RNA, 19 nt, Artificial Sequence
  Description of Artificial Sequence: Synthetic oligonucleotide
ugcauaguugcucaguagg

SEQ ID NO: 3194873 - RNA, 19 nt, Artificial Sequence
  Description of Artificial Sequence: Synthetic oligonucleotide
ugcagcuuguccaagagag

SEQ ID NO: 3194874 - RNA, 19 nt, Artificial Sequence
  Description of Artificial Sequence: Synthetic oligonucleotide
ucaacgagguccaugauca

SEQ ID NO: 3194875 - RNA, 19 nt, Artificial Sequence
  Description of Artificial Sequence: Synthetic oligonucleotide
auuucagauggcuacuggc

SEQ ID NO: 3194876 - RNA, 19 nt, Artificial Sequence
  Description of Artificial Sequence: Synthetic oligonucleotide
aaguauggagaagagaauc

SEQ ID NO: 3194877 - RNA, 19 nt, Artificial Sequence
  Description of Artificial Sequence: Synthetic oligonucleotide
cauaauaccaguuccguug

SEQ ID NO: 3194878 - RNA, 19 nt, Artificial Sequence
  Description of Artificial Sequence: Synthetic oligonucleotide
ucagaugucaggaucacac

SEQ ID NO: 3194879 - RNA, 19 nt, Artificial Sequence
  Description of Artificial Sequence: Synthetic oligonucleotide
acucagagagcccuggucc

SEQ ID NO: 3194880 - RNA, 19 nt, Artificial Sequence
  Description of Artificial Sequence: Synthetic oligonucleotide
agcaguaggauucugaggu

SEQ ID NO: 3194881 - RNA, 19 nt, Artificial Sequence
  Description of Artificial Sequence: Synthetic oligonucleotide
aauuucagauggcuacugg

SEQ ID NO: 3194882 - RNA, 19 nt, Artificial Sequence
  Description of Artificial Sequence: Synthetic oligonucleotide
aggucuuuaggugacaccc

SEQ ID NO: 3194883 - RNA, 19 nt, Artificial Sequence
  Description of Artificial Sequence: Synthetic oligonucleotide
gauuucagagaagagcugg

SEQ ID NO: 3194884 - RNA, 19 nt, Artificial Sequence
  Description of Artificial Sequence: Synthetic oligonucleotide
agggauuucagagaagagc

SEQ ID NO: 3194885 - RNA, 19 nt, Artificial Sequence
  Description of Artificial Sequence: Synthetic oligonucleotide
auucgcaugaauuggaacu

SEQ ID NO: 3194886 - RNA, 19 nt, Artificial Sequence
  Description of Artificial Sequence: Synthetic oligonucleotide
cucuguacugcauaguugc

SEQ ID NO: 3194887 - RNA, 19 nt, Artificial Sequence
  Description of Artificial Sequence: Synthetic oligonucleotide
gcuacuggcuuauagaugg

SEQ ID NO: 3194888 - RNA, 19 nt, Artificial Sequence
  Description of Artificial Sequence: Synthetic oligonucleotide
aaccagaaaugauguagcg

SEQ ID NO: 3194889 - RNA, 19 nt, Artificial Sequence
  Description of Artificial Sequence: Synthetic oligonucleotide
  modified_base (16)..(16): a, c, u, g, unknown or other
uguggcuucagcccgnacu

SEQ ID NO: 3194890 - RNA, 19 nt, Artificial Sequence
  Description of Artificial Sequence: Synthetic oligonucleotide
uguagcauaauaccaguuc

SEQ ID NO: 3194891 - RNA, 19 nt, Artificial Sequence
  Description of Artificial Sequence: Synthetic oligonucleotide
agccaagagaagcucaagc

SEQ ID NO: 3194892 - RNA, 19 nt, Artificial Sequence
  Description of Artificial Sequence: Synthetic oligonucleotide
auuuauucgcaugaauugg

SEQ ID NO: 3194893 - RNA, 19 nt, Artificial Sequence
  Description of Artificial Sequence: Synthetic oligonucleotide
guagcauaauaccaguucc

SEQ ID NO: 3194894 - RNA, 19 nt, Artificial Sequence
  Description of Artificial Sequence: Synthetic oligonucleotide
aaggucuuuaggugacacc

SEQ ID NO: 3194895 - RNA, 19 nt, Artificial Sequence
  Description of Artificial Sequence: Synthetic oligonucleotide
uccuguagcauaauaccag

SEQ ID NO: 3194896 - RNA, 19 nt, Artificial Sequence
  Description of Artificial Sequence: Synthetic oligonucleotide
uuauagauggagaaacuua

SEQ ID NO: 3194897 - RNA, 19 nt, Artificial Sequence
  Description of Artificial Sequence: Synthetic oligonucleotide
uagcauaauaccaguuccg

SEQ ID NO: 3194898 - RNA, 19 nt, Artificial Sequence
  Description of Artificial Sequence: Synthetic oligonucleotide
  modified_base (14)..(14): a, c, u, g, unknown or other
uacacagcagccunacccc

SEQ ID NO: 3194899 - RNA, 19 nt, Artificial Sequence
  Description of Artificial Sequence: Synthetic oligonucleotide
ucaauggccuuccgaaugg

SEQ ID NO: 3194900 - RNA, 19 nt, Artificial Sequence
  Description of Artificial Sequence: Synthetic oligonucleotide
gugauaguagaucagugug

SEQ ID NO: 3194901 - RNA, 19 nt, Artificial Sequence
  Description of Artificial Sequence: Synthetic oligonucleotide
auaauaccaguuccguugg

SEQ ID NO: 3194902 - RNA, 19 nt, Artificial Sequence
  Description of Artificial Sequence: Synthetic oligonucleotide
uguacugcauaguugcuca

SEQ ID NO: 3194903 - RNA, 19 nt, Artificial Sequence
  Description of Artificial Sequence: Synthetic oligonucleotide
ugauaguagaucaguguga

SEQ ID NO: 3194904 - RNA, 19 nt, Artificial Sequence
  Description of Artificial Sequence: Synthetic oligonucleotide
uuucagauggcuacuggcu

SEQ ID NO: 3194905 - RNA, 19 nt, Artificial Sequence
  Description of Artificial Sequence: Synthetic oligonucleotide
auugaggugauaguagauc

SEQ ID NO: 3194906 - RNA, 19 nt, Artificial Sequence
  Description of Artificial Sequence: Synthetic oligonucleotide
aaagugucucaccuuguca

SEQ ID NO: 3194907 - RNA, 19 nt, Artificial Sequence
  Description of Artificial Sequence: Synthetic oligonucleotide
cuccuguucacucagcacc

SEQ ID NO: 3194908 - RNA, 19 nt, Artificial Sequence
  Description of Artificial Sequence: Synthetic oligonucleotide
aagagcugggauucccugg

SEQ ID NO: 3194909 - RNA, 19 nt, Artificial Sequence
  Description of Artificial Sequence: Synthetic oligonucleotide
uugggguccaucuggacag

SEQ ID NO: 3194910 - RNA, 19 nt, Artificial Sequence
  Description of Artificial Sequence: Synthetic oligonucleotide
uguucacucagcaccagac

SEQ ID NO: 3194911 - RNA, 19 nt, Artificial Sequence
  Description of Artificial Sequence: Synthetic oligonucleotide
ucaucgagggucaggacug

SEQ ID NO: 3194912 - RNA, 19 nt, Artificial Sequence
  Description of Artificial Sequence: Synthetic oligonucleotide
aguagguuuccacuuaggu

SEQ ID NO: 3194913 - RNA, 19 nt, Artificial Sequence
  Description of Artificial Sequence: Synthetic oligonucleotide
ucaguuaggcuggagcugg

SEQ ID NO: 3194914 - RNA, 19 nt, Artificial Sequence
  Description of Artificial Sequence: Synthetic oligonucleotide
cugcuuguaucaucgaggg

SEQ ID NO: 3194915 - RNA, 19 nt, Artificial Sequence
  Description of Artificial Sequence: Synthetic oligonucleotide
uaugcagcuuguccaagag

SEQ ID NO: 3194916 - RNA, 19 nt, Artificial Sequence
  Description of Artificial Sequence: Synthetic oligonucleotide
uuccugagaacucaaguau

SEQ ID NO: 3194917 - RNA, 19 nt, Artificial Sequence
  Description of Artificial Sequence: Synthetic oligonucleotide
cucaccuugucacucagag

SEQ ID NO: 3194918 - RNA, 19 nt, Artificial Sequence
  Description of Artificial Sequence: Synthetic oligonucleotide
agacuaugcagcuugucca

SEQ ID NO: 3194919 - RNA, 19 nt, Artificial Sequence
  Description of Artificial Sequence: Synthetic oligonucleotide
  modified_base (7)..(7): a, c, u, g, unknown or other
agcccgnacugccucauac

SEQ ID NO: 3194920 - RNA, 19 nt, Artificial Sequence
  Description of Artificial Sequence: Synthetic oligonucleotide
ucagcaccagacuaugcag

SEQ ID NO: 3194921 - RNA, 19 nt, Artificial Sequence
  Description of Artificial Sequence: Synthetic oligonucleotide
cagacuaugcagcuugucc

SEQ ID NO: 3194922 - RNA, 19 nt, Artificial Sequence
  Description of Artificial Sequence: Synthetic oligonucleotide
gagaugaagggugacgucc

SEQ ID NO: 3194923 - RNA, 19 nt, Artificial Sequence
  Description of Artificial Sequence: Synthetic oligonucleotide
cuuggguguggcuucagcc

SEQ ID NO: 3194924 - RNA, 19 nt, Artificial Sequence
  Description of Artificial Sequence: Synthetic oligonucleotide
agauugaggugauaguaga

SEQ ID NO: 3194925 - RNA, 19 nt, Artificial Sequence
  Description of Artificial Sequence: Synthetic oligonucleotide
gaugugaggccacaguuga

SEQ ID NO: 3194926 - RNA, 19 nt, Artificial Sequence
  Description of Artificial Sequence: Synthetic oligonucleotide
uccugagaacucaaguaug

SEQ ID NO: 3194927 - RNA, 19 nt, Artificial Sequence
  Description of Artificial Sequence: Synthetic oligonucleotide
ugagauugaggugauagua

SEQ ID NO: 3194928 - RNA, 19 nt, Artificial Sequence
  Description of Artificial Sequence: Synthetic oligonucleotide
aauaccaguuccguuggca

SEQ ID NO: 3194929 - RNA, 19 nt, Artificial Sequence
  Description of Artificial Sequence: Synthetic oligonucleotide
agagcugggauucccuggg

SEQ ID NO: 3194930 - RNA, 19 nt, Artificial Sequence
  Description of Artificial Sequence: Synthetic oligonucleotide
uucacucagcaccagacua

SEQ ID NO: 3194931 - RNA, 19 nt, Artificial Sequence
  Description of Artificial Sequence: Synthetic oligonucleotide
agccacaaggucuuuaggu

SEQ ID NO: 3194932 - RNA, 19 nt, Artificial Sequence
  Description of Artificial Sequence: Synthetic oligonucleotide
ugccucauacuccuguuca

SEQ ID NO: 3194933 - RNA, 19 nt, Artificial Sequence
  Description of Artificial Sequence: Synthetic oligonucleotide
uggguguggcuucagcccg

SEQ ID NO: 3194934 - RNA, 19 nt, Artificial Sequence
  Description of Artificial Sequence: Synthetic oligonucleotide
agagcuuccucaucuuguc

SEQ ID NO: 3194935 - RNA, 19 nt, Artificial Sequence
  Description of Artificial Sequence: Synthetic oligonucleotide
aggcaggauuccuugaguc

SEQ ID NO: 3194936 - RNA, 19 nt, Artificial Sequence
  Description of Artificial Sequence: Synthetic oligonucleotide
agagggauuucagagaaga

SEQ ID NO: 3194937 - RNA, 19 nt, Artificial Sequence
  Description of Artificial Sequence: Synthetic oligonucleotide
auugggguccaucuggaca

SEQ ID NO: 3194938 - RNA, 19 nt, Artificial Sequence
  Description of Artificial Sequence: Synthetic oligonucleotide
auggccuuccgaauggugc

SEQ ID NO: 3194939 - RNA, 19 nt, Artificial Sequence
  Description of Artificial Sequence: Synthetic oligonucleotide
ucaggguccuacaaagacu

SEQ ID NO: 3194940 - RNA, 19 nt, Artificial Sequence
  Description of Artificial Sequence: Synthetic oligonucleotide
aagccacaaggucuuuagg

SEQ ID NO: 3194941 - RNA, 19 nt, Artificial Sequence
  Description of Artificial Sequence: Synthetic oligonucleotide
guagguuuccacuuagguc

SEQ ID NO: 3194942 - RNA, 19 nt, Artificial Sequence
  Description of Artificial Sequence: Synthetic oligonucleotide
uggcucaagagcuuccuca

SEQ ID NO: 3194943 - RNA, 19 nt, Artificial Sequence
  Description of Artificial Sequence: Synthetic oligonucleotide
uuggguguggcuucagccc

SEQ ID NO: 3194944 - RNA, 19 nt, Artificial Sequence
  Description of Artificial Sequence: Synthetic oligonucleotide
uucagagaagagcugggau

SEQ ID NO: 3194945 - RNA, 19 nt, Artificial Sequence
  Description of Artificial Sequence: Synthetic oligonucleotide
cagcuuguccaagagaggg

SEQ ID NO: 3194946 - RNA, 19 nt, Artificial Sequence
  Description of Artificial Sequence: Synthetic oligonucleotide
agcugggauucccuggggc

SEQ ID NO: 3194947 - RNA, 19 nt, Artificial Sequence
  Description of Artificial Sequence: Synthetic oligonucleotide
caagccacaaggucuuuag

SEQ ID NO: 3194948 - RNA, 19 nt, Artificial Sequence
  Description of Artificial Sequence: Synthetic oligonucleotide
ugugaggccacaguugaca

SEQ ID NO: 3194949 - RNA, 19 nt, Artificial Sequence
  Description of Artificial Sequence: Synthetic oligonucleotide
ucagagaagagcugggauu

SEQ ID NO: 3194950 - RNA, 19 nt, Artificial Sequence
  Description of Artificial Sequence: Synthetic oligonucleotide
uggcuuauuuauucgcaug

SEQ ID NO: 3194951 - RNA, 19 nt, Artificial Sequence
  Description of Artificial Sequence: Synthetic oligonucleotide
cauacuccuguucacucag

SEQ ID NO: 3194952 - RNA, 19 nt, Artificial Sequence
  Description of Artificial Sequence: Synthetic oligonucleotide
uacuccuguucacucagca

SEQ ID NO: 3194953 - RNA, 19 nt, Artificial Sequence
  Description of Artificial Sequence: Synthetic oligonucleotide
cuacaaagacucuguacug

SEQ ID NO: 3194954 - RNA, 19 nt, Artificial Sequence
  Description of Artificial Sequence: Synthetic oligonucleotide
caggguccuacaaagacuc

SEQ ID NO: 3194955 - RNA, 19 nt, Artificial Sequence
  Description of Artificial Sequence: Synthetic oligonucleotide
caagagaagcucaagcaga

SEQ ID NO: 3194956 - RNA, 19 nt, Artificial Sequence
  Description of Artificial Sequence: Synthetic oligonucleotide
uccguuggcaugauuucca

SEQ ID NO: 3194957 - RNA, 19 nt, Artificial Sequence
  Description of Artificial Sequence: Synthetic oligonucleotide
auggcuacuggcuuauaga

SEQ ID NO: 3194958 - RNA, 19 nt, Artificial Sequence
  Description of Artificial Sequence: Synthetic oligonucleotide
acuccuguucacucagcac

SEQ ID NO: 3194959 - RNA, 19 nt, Artificial Sequence
  Description of Artificial Sequence: Synthetic oligonucleotide
agaaaugauguagcgugag

SEQ ID NO: 3194960 - RNA, 19 nt, Artificial Sequence
  Description of Artificial Sequence: Synthetic oligonucleotide
ucauacuccuguucacuca

SEQ ID NO: 3194961 - RNA, 19 nt, Artificial Sequence
  Description of Artificial Sequence: Synthetic oligonucleotide
gucuuuaggugacacccag

SEQ ID NO: 3194962 - RNA, 19 nt, Artificial Sequence
  Description of Artificial Sequence: Synthetic oligonucleotide
uggaugugaggccacaguu

SEQ ID NO: 3194963 - RNA, 19 nt, Artificial Sequence
  Description of Artificial Sequence: Synthetic oligonucleotide
uuccucaucuugucuuggg

SEQ ID NO: 3194964 - RNA, 19 nt, Artificial Sequence
  Description of Artificial Sequence: Synthetic oligonucleotide
gcuuguaucaucgaggguc

SEQ ID NO: 3194965 - RNA, 19 nt, Artificial Sequence
  Description of Artificial Sequence: Synthetic oligonucleotide
gaagagcugggauucccug

SEQ ID NO: 3194966 - RNA, 19 nt, Artificial Sequence
  Description of Artificial Sequence: Synthetic oligonucleotide
uggcuacuggcuuauagau

SEQ ID NO: 3194967 - RNA, 19 nt, Artificial Sequence
  Description of Artificial Sequence: Synthetic oligonucleotide
ccugcuuguaucaucgagg

SEQ ID NO: 3194968 - RNA, 19 nt, Artificial Sequence
  Description of Artificial Sequence: Synthetic oligonucleotide
aagagcuuccucaucuugu

SEQ ID NO: 3194969 - RNA, 19 nt, Artificial Sequence
  Description of Artificial Sequence: Synthetic oligonucleotide
gcuccuguagcauaauacc

SEQ ID NO: 3194970 - RNA, 19 nt, Artificial Sequence
  Description of Artificial Sequence: Synthetic oligonucleotide
gaucaggugaggauggguc

SEQ ID NO: 3194971 - RNA, 19 nt, Artificial Sequence
  Description of Artificial Sequence: Synthetic oligonucleotide
aguaguaacagacaugccc

SEQ ID NO: 3194972 - RNA, 19 nt, Artificial Sequence
  Description of Artificial Sequence: Synthetic oligonucleotide
uuauauaguaguaacagac

SEQ ID NO: 3194973 - RNA, 19 nt, Artificial Sequence
  Description of Artificial Sequence: Synthetic oligonucleotide
auaguaguaacagacaugc

SEQ ID NO: 3194974 - RNA, 19 nt, Artificial Sequence
  Description of Artificial Sequence: Synthetic oligonucleotide
aauucugagacccuucuuc

SEQ ID NO: 3194975 - RNA, 19 nt, Artificial Sequence
  Description of Artificial Sequence: Synthetic oligonucleotide
aguuguuuaaucuuagcac

SEQ ID NO: 3194976 - RNA, 19 nt, Artificial Sequence
  Description of Artificial Sequence: Synthetic oligonucleotide
aaucuuagcaccugcacag

SEQ ID NO: 3194977 - RNA, 19 nt, Artificial Sequence
  Description of Artificial Sequence: Synthetic oligonucleotide
ucuucaugacauuauauag

SEQ ID NO: 3194978 - RNA, 19 nt, Artificial Sequence
  Description of Artificial Sequence: Synthetic oligonucleotide
uucuuuacaauucauugca

SEQ ID NO: 3194979 - RNA, 19 nt, Artificial Sequence
  Description of Artificial Sequence: Synthetic oligonucleotide
uacaauucauugcauaugc

SEQ ID NO: 3194980 - RNA, 19 nt, Artificial Sequence
  Description of Artificial Sequence: Synthetic oligonucleotide
aguucuuuacaauucauug

SEQ ID NO: 3194981 - RNA, 19 nt, Artificial Sequence
  Description of Artificial Sequence: Synthetic oligonucleotide
uuauacaguugcuagaaca

SEQ ID NO: 3194982 - RNA, 19 nt, Artificial Sequence
  Description of Artificial Sequence: Synthetic oligonucleotide
guuguuuaaucuuagcacc

SEQ ID NO: 3194983 - RNA, 19 nt, Artificial Sequence
  Description of Artificial Sequence: Synthetic oligonucleotide
uaguuguuuaaucuuagca

SEQ ID NO: 3194984 - RNA, 19 nt, Artificial Sequence
  Description of Artificial Sequence: Synthetic oligonucleotide
gaauccaccaccucaaagc

SEQ ID NO: 3194985 - RNA, 19 nt, Artificial Sequence
  Description of Artificial Sequence: Synthetic oligonucleotide
gacauuauauaguaguaac

SEQ ID NO: 3194986 - RNA, 19 nt, Artificial Sequence
  Description of Artificial Sequence: Synthetic oligonucleotide
cauuauauaguaguaacag

SEQ ID NO: 3194987 - RNA, 19 nt, Artificial Sequence
  Description of Artificial Sequence: Synthetic oligonucleotide
uuuaguuguuuaaucuuag

SEQ ID NO: 3194988 - RNA, 19 nt, Artificial Sequence
  Description of Artificial Sequence: Synthetic oligonucleotide
uauauaguaguaacagaca

SEQ ID NO: 3194989 - RNA, 19 nt, Artificial Sequence
  Description of Artificial Sequence: Synthetic oligonucleotide
uauacaguugcuagaacac

SEQ ID NO: 3194990 - RNA, 19 nt, Artificial Sequence
  Description of Artificial Sequence: Synthetic oligonucleotide
uuuacaauucauugcauau

SEQ ID NO: 3194991 - RNA, 19 nt, Artificial Sequence
  Description of Artificial Sequence: Synthetic oligonucleotide
aauucauugcauaugcucu

SEQ ID NO: 3194992 - RNA, 19 nt, Artificial Sequence
  Description of Artificial Sequence: Synthetic oligonucleotide
aaaauucugagacccuucu

SEQ ID NO: 3194993 - RNA, 19 nt, Artificial Sequence
  Description of Artificial Sequence: Synthetic oligonucleotide
uauaguaguaacagacaug

SEQ ID NO: 3194994 - RNA, 19 nt, Artificial Sequence
  Description of Artificial Sequence: Synthetic oligonucleotide
uccaccaccucaaagcucc

SEQ ID NO: 3194995 - RNA, 19 nt, Artificial Sequence
  Description of Artificial Sequence: Synthetic oligonucleotide
cuccacaaaauucugagac

SEQ ID NO: 3194996 - RNA, 19 nt, Artificial Sequence
  Description of Artificial Sequence: Synthetic oligonucleotide
uaaucuuagcaccugcaca

SEQ ID NO: 3194997 - RNA, 19 nt, Artificial Sequence
  Description of Artificial Sequence: Synthetic oligonucleotide
uuuuaguuguuuaaucuua

SEQ ID NO: 3194998 - RNA, 19 nt, Artificial Sequence
  Description of Artificial Sequence: Synthetic oligonucleotide
auauaguaguaacagacau

SEQ ID NO: 3194999 - RNA, 19 nt, Artificial Sequence
  Description of Artificial Sequence: Synthetic oligonucleotide
ugccccacaguuuauacag

SEQ ID NO: 3195000 - RNA, 19 nt, Artificial Sequence
  Description of Artificial Sequence: Synthetic oligonucleotide
uuuaaucuuagcaccugca

SEQ ID NO: 3195001 - RNA, 19 nt, Artificial Sequence
  Description of Artificial Sequence: Synthetic oligonucleotide
ucaaagcuccacaaaauuc

SEQ ID NO: 3195002 - RNA, 19 nt, Artificial Sequence
  Description of Artificial Sequence: Synthetic oligonucleotide
uucaugacauuauauagua

SEQ ID NO: 3195003 - RNA, 19 nt, Artificial Sequence
  Description of Artificial Sequence: Synthetic oligonucleotide
auuauauaguaguaacaga

SEQ ID NO: 3195004 - RNA, 19 nt, Artificial Sequence
  Description of Artificial Sequence: Synthetic oligonucleotide
guucuuuacaauucauugc

SEQ ID NO: 3195005 - RNA, 19 nt, Artificial Sequence
  Description of Artificial Sequence: Synthetic oligonucleotide
uuaaucuuagcaccugcac

SEQ ID NO: 3195006 - RNA, 19 nt, Artificial Sequence
  Description of Artificial Sequence: Synthetic oligonucleotide
caguuuauacaguugcuag

SEQ ID NO: 3195007 - RNA, 19 nt, Artificial Sequence
  Description of Artificial Sequence: Synthetic oligonucleotide
caauucauugcauaugcuc

SEQ ID NO: 3195008 - RNA, 19 nt, Artificial Sequence
  Description of Artificial Sequence: Synthetic oligonucleotide
aauccaccaccucaaagcu

SEQ ID NO: 3195009 - RNA, 19 nt, Artificial Sequence
  Description of Artificial Sequence: Synthetic oligonucleotide
agcuccacaaaauucugag

SEQ ID NO: 3195010 - RNA, 19 nt, Artificial Sequence
  Description of Artificial Sequence: Synthetic oligonucleotide
uucuucaugacauuauaua

SEQ ID NO: 3195011 - RNA, 19 nt, Artificial Sequence
  Description of Artificial Sequence: Synthetic oligonucleotide
uaugcucucgccuucuccc

SEQ ID NO: 3195012 - RNA, 19 nt, Artificial Sequence
  Description of Artificial Sequence: Synthetic oligonucleotide
auucauugcauaugcucuc

SEQ ID NO: 3195013 - RNA, 19 nt, Artificial Sequence
  Description of Artificial Sequence: Synthetic oligonucleotide
guaguaacagacaugcccc

SEQ ID NO: 3195014 - RNA, 19 nt, Artificial Sequence
  Description of Artificial Sequence: Synthetic oligonucleotide
auaugcucucgccuucucc

SEQ ID NO: 3195015 - RNA, 19 nt, Artificial Sequence
  Description of Artificial Sequence: Synthetic oligonucleotide
ucugagacccuucuucaug

SEQ ID NO: 3195016 - RNA, 19 nt, Artificial Sequence
  Description of Artificial Sequence: Synthetic oligonucleotide
auugcauaugcucucgccu

SEQ ID NO: 3195017 - RNA, 19 nt, Artificial Sequence
  Description of Artificial Sequence: Synthetic oligonucleotide
uuaguuguuuaaucuuagc

SEQ ID NO: 3195018 - RNA, 19 nt, Artificial Sequence
  Description of Artificial Sequence: Synthetic oligonucleotide
uaacagacaugccccacag

SEQ ID NO: 3195019 - RNA, 19 nt, Artificial Sequence
  Description of Artificial Sequence: Synthetic oligonucleotide
uuguuuaaucuuagcaccu

SEQ ID NO: 3195020 - RNA, 19 nt, Artificial Sequence
  Description of Artificial Sequence: Synthetic oligonucleotide
ucaugacauuauauaguag

SEQ ID NO: 3195021 - RNA, 19 nt, Artificial Sequence
  Description of Artificial Sequence: Synthetic oligonucleotide
aguuuauacaguugcuaga

SEQ ID NO: 3195022 - RNA, 19 nt, Artificial Sequence
  Description of Artificial Sequence: Synthetic oligonucleotide
uuacaauucauugcauaug

SEQ ID NO: 3195023 - RNA, 19 nt, Artificial Sequence
  Description of Artificial Sequence: Synthetic oligonucleotide
uccacacagcaccugaggc

SEQ ID NO: 3195024 - RNA, 19 nt, Artificial Sequence
  Description of Artificial Sequence: Synthetic oligonucleotide
uccacaaaauucugagacc

SEQ ID NO: 3195025 - RNA, 19 nt, Artificial Sequence
  Description of Artificial Sequence: Synthetic oligonucleotide
caugacauuauauaguagu

SEQ ID NO: 3195026 - RNA, 19 nt, Artificial Sequence
  Description of Artificial Sequence: Synthetic oligonucleotide
acagacaugccccacaguu

SEQ ID NO: 3195027 - RNA, 19 nt, Artificial Sequence
  Description of Artificial Sequence: Synthetic oligonucleotide
agaauccaccaccucaaag

SEQ ID NO: 3195028 - RNA, 19 nt, Artificial Sequence
  Description of Artificial Sequence: Synthetic oligonucleotide
guuuaaucuuagcaccugc

SEQ ID NO: 3195029 - RNA, 19 nt, Artificial Sequence
  Description of Artificial Sequence: Synthetic oligonucleotide
uuagcaccugcacagcaga

SEQ ID NO: 3195030 - RNA, 19 nt, Artificial Sequence
  Description of Artificial Sequence: Synthetic oligonucleotide
uuuauacaguugcuagaac

SEQ ID NO: 3195031 - RNA, 19 nt, Artificial Sequence
  Description of Artificial Sequence: Synthetic oligonucleotide
ugacauuauauaguaguaa

SEQ ID NO: 3195032 - RNA, 19 nt, Artificial Sequence
  Description of Artificial Sequence: Synthetic oligonucleotide
uucauugcauaugcucucg

SEQ ID NO: 3195033 - RNA, 19 nt, Artificial Sequence
  Description of Artificial Sequence: Synthetic oligonucleotide
cauugcauaugcucucgcc

SEQ ID NO: 3195034 - RNA, 19 nt, Artificial Sequence
  Description of Artificial Sequence: Synthetic oligonucleotide
accucaaagcuccacaaaa

SEQ ID NO: 3195035 - RNA, 19 nt, Artificial Sequence
  Description of Artificial Sequence: Synthetic oligonucleotide
acagcagaguucuuuacaa

SEQ ID NO: 3195036 - RNA, 19 nt, Artificial Sequence
  Description of Artificial Sequence: Synthetic oligonucleotide
ucuuagcaccugcacagca

SEQ ID NO: 3195037 - RNA, 19 nt, Artificial Sequence
  Description of Artificial Sequence: Synthetic oligonucleotide
agcagaguucuuuacaauu

SEQ ID NO: 3195038 - RNA, 19 nt, Artificial Sequence
  Description of Artificial Sequence: Synthetic oligonucleotide
auucugagacccuucuuca

SEQ ID NO: 3195039 - RNA, 19 nt, Artificial Sequence
  Description of Artificial Sequence: Synthetic oligonucleotide
acauuauauaguaguaaca

SEQ ID NO: 3195040 - RNA, 19 nt, Artificial Sequence
  Description of Artificial Sequence: Synthetic oligonucleotide
cuuagcaccugcacagcag

SEQ ID NO: 3195041 - RNA, 19 nt, Artificial Sequence
  Description of Artificial Sequence: Synthetic oligonucleotide
uguuuaaucuuagcaccug

SEQ ID NO: 3195042 - RNA, 19 nt, Artificial Sequence
  Description of Artificial Sequence: Synthetic oligonucleotide
auccacacagcaccugagg

SEQ ID NO: 3195043 - RNA, 19 nt, Artificial Sequence
  Description of Artificial Sequence: Synthetic oligonucleotide
ugaggcccaagaauccacc

SEQ ID NO: 3195044 - RNA, 19 nt, Artificial Sequence
  Description of Artificial Sequence: Synthetic oligonucleotide
aaagcuccacaaaauucug

SEQ ID NO: 3195045 - RNA, 19 nt, Artificial Sequence
  Description of Artificial Sequence: Synthetic oligonucleotide
guuuauacaguugcuagaa

SEQ ID NO: 3195046 - RNA, 19 nt, Artificial Sequence
  Description of Artificial Sequence: Synthetic oligonucleotide
caaaauucugagacccuuc

SEQ ID NO: 3195047 - RNA, 19 nt, Artificial Sequence
  Description of Artificial Sequence: Synthetic oligonucleotide
ccacaguuuauacaguugc

SEQ ID NO: 3195048 - RNA, 19 nt, Artificial Sequence
  Description of Artificial Sequence: Synthetic oligonucleotide
caaagcuccacaaaauucu

SEQ ID NO: 3195049 - RNA, 19 nt, Artificial Sequence
  Description of Artificial Sequence: Synthetic oligonucleotide
ucuuuacaauucauugcau

SEQ ID NO: 3195050 - RNA, 19 nt, Artificial Sequence
  Description of Artificial Sequence: Synthetic oligonucleotide
aggcccaagaauccaccac

SEQ ID NO: 3195051 - RNA, 19 nt, Artificial Sequence
  Description of Artificial Sequence: Synthetic oligonucleotide
ucauugcauaugcucucgc

SEQ ID NO: 3195052 - RNA, 19 nt, Artificial Sequence
  Description of Artificial Sequence: Synthetic oligonucleotide
caccugaggcccaagaauc

SEQ ID NO: 3195053 - RNA, 19 nt, Artificial Sequence
  Description of Artificial Sequence: Synthetic oligonucleotide
aguaacagacaugccccac

SEQ ID NO: 3195054 - RNA, 19 nt, Artificial Sequence
  Description of Artificial Sequence: Synthetic oligonucleotide
cacacagcaccugaggccc

SEQ ID NO: 3195055 - RNA, 19 nt, Artificial Sequence
  Description of Artificial Sequence: Synthetic oligonucleotide
cuuuacaauucauugcaua

SEQ ID NO: 3195056 - RNA, 19 nt, Artificial Sequence
  Description of Artificial Sequence: Synthetic oligonucleotide
aaauucugagacccuucuu

SEQ ID NO: 3195057 - RNA, 19 nt, Artificial Sequence
  Description of Artificial Sequence: Synthetic oligonucleotide
agacaugccccacaguuua

SEQ ID NO: 3195058 - RNA, 19 nt, Artificial Sequence
  Description of Artificial Sequence: Synthetic oligonucleotide
ccacaaaauucugagaccc

SEQ ID NO: 3195059 - RNA, 19 nt, Artificial Sequence
  Description of Artificial Sequence: Synthetic oligonucleotide
accaccucaaagcuccaca

SEQ ID NO: 3195060 - RNA, 19 nt, Artificial Sequence
  Description of Artificial Sequence: Synthetic oligonucleotide
cuucaugacauuauauagu

SEQ ID NO: 3195061 - RNA, 19 nt, Artificial Sequence
  Description of Artificial Sequence: Synthetic oligonucleotide
uaguaguaacagacaugcc

SEQ ID NO: 3195062 - RNA, 19 nt, Artificial Sequence
  Description of Artificial Sequence: Synthetic oligonucleotide
augcucucgccuucucccc

SEQ ID NO: 3195063 - RNA, 19 nt, Artificial Sequence
  Description of Artificial Sequence: Synthetic oligonucleotide
uaguaacagacaugcccca

SEQ ID NO: 3195064 - RNA, 19 nt, Artificial Sequence
  Description of Artificial Sequence: Synthetic oligonucleotide
caugccccacaguuuauac

SEQ ID NO: 3195065 - RNA, 19 nt, Artificial Sequence
  Description of Artificial Sequence: Synthetic oligonucleotide
ugcacagcagaguucuuua

SEQ ID NO: 3195066 - RNA, 19 nt, Artificial Sequence
  Description of Artificial Sequence: Synthetic oligonucleotide
acaguuuauacaguugcua

SEQ ID NO: 3195067 - RNA, 19 nt, Artificial Sequence
  Description of Artificial Sequence: Synthetic oligonucleotide
guaacagacaugccccaca

SEQ ID NO: 3195068 - RNA, 19 nt, Artificial Sequence
  Description of Artificial Sequence: Synthetic oligonucleotide
uugcauaugcucucgccuu

SEQ ID NO: 3195069 - RNA, 19 nt, Artificial Sequence
  Description of Artificial Sequence: Synthetic oligonucleotide
accugcacagcagaguucu

SEQ ID NO: 3195070 - RNA, 19 nt, Artificial Sequence
  Description of Artificial Sequence: Synthetic oligonucleotide
agacccuucuucaugacau

SEQ ID NO: 3195071 - RNA, 19 nt, Artificial Sequence
  Description of Artificial Sequence: Synthetic oligonucleotide
aguauuguaagucugcacc

SEQ ID NO: 3195072 - RNA, 19 nt, Artificial Sequence
  Description of Artificial Sequence: Synthetic oligonucleotide
aaaaguucuaguuacaaca

SEQ ID NO: 3195073 - RNA, 19 nt, Artificial Sequence
  Description of Artificial Sequence: Synthetic oligonucleotide
aacaucuuaacaccaaagc

SEQ ID NO: 3195074 - RNA, 19 nt, Artificial Sequence
  Description of Artificial Sequence: Synthetic oligonucleotide
aguguuauggcuuuuauca

SEQ ID NO: 3195075 - RNA, 19 nt, Artificial Sequence
  Description of Artificial Sequence: Synthetic oligonucleotide
cuuaacauuaaccaguagc

SEQ ID NO: 3195076 - RNA, 19 nt, Artificial Sequence
  Description of Artificial Sequence: Synthetic oligonucleotide
uuaacauuaaccaguagca

SEQ ID NO: 3195077 - RNA, 19 nt, Artificial Sequence
  Description of Artificial Sequence: Synthetic oligonucleotide
acaucuuaacaccaaagcc

SEQ ID NO: 3195078 - RNA, 19 nt, Artificial Sequence
  Description of Artificial Sequence: Synthetic oligonucleotide
aacaccaaagccuggaagg

SEQ ID NO: 3195079 - RNA, 19 nt, Artificial Sequence
  Description of Artificial Sequence: Synthetic oligonucleotide
aauguuugcacaggaaggc

SEQ ID NO: 3195080 - RNA, 19 nt, Artificial Sequence
  Description of Artificial Sequence: Synthetic oligonucleotide
ugagauauugagaaggucu

SEQ ID NO: 3195081 - RNA, 19 nt, Artificial Sequence
  Description of Artificial Sequence: Synthetic oligonucleotide
ugaaagucuacaaagcccc

SEQ ID NO: 3195082 - RNA, 19 nt, Artificial Sequence
  Description of Artificial Sequence: Synthetic oligonucleotide
ucaauaguuugcaaguggg

SEQ ID NO: 3195083 - RNA, 19 nt, Artificial Sequence
  Description of Artificial Sequence: Synthetic oligonucleotide
uuuaauagugcugucaaag

SEQ ID NO: 3195084 - RNA, 19 nt, Artificial Sequence
  Description of Artificial Sequence: Synthetic oligonucleotide
aacauuaaccaguagcaug

SEQ ID NO: 3195085 - RNA, 19 nt, Artificial Sequence
  Description of Artificial Sequence: Synthetic oligonucleotide
auaguuugcaagugggucc

SEQ ID NO: 3195086 - RNA, 19 nt, Artificial Sequence
  Description of Artificial Sequence: Synthetic oligonucleotide
caaaccaucacaauaugcc

SEQ ID NO: 3195087 - RNA, 19 nt, Artificial Sequence
  Description of Artificial Sequence: Synthetic oligonucleotide
aauaguuugcaaguggguc

SEQ ID NO: 3195088 - RNA, 19 nt, Artificial Sequence
  Description of Artificial Sequence: Synthetic oligonucleotide
agacuuugaugcuucaucc

SEQ ID NO: 3195089 - RNA, 19 nt, Artificial Sequence
  Description of Artificial Sequence: Synthetic oligonucleotide
ucugaaagucuacaaagcc

SEQ ID NO: 3195090 - RNA, 19 nt, Artificial Sequence
  Description of Artificial Sequence: Synthetic oligonucleotide
uuggaagugguauuuaugc

SEQ ID NO: 3195091 - RNA, 19 nt, Artificial Sequence
  Description of Artificial Sequence: Synthetic oligonucleotide
uauugagaaggucuuuugg

SEQ ID NO: 3195092 - RNA, 19 nt, Artificial Sequence
  Description of Artificial Sequence: Synthetic oligonucleotide
uaaacagguaucuuguuca

SEQ ID NO: 3195093 - RNA, 19 nt, Artificial Sequence
  Description of Artificial Sequence: Synthetic oligonucleotide
uguaagacaucuccaacag

SEQ ID NO: 3195094 - RNA, 19 nt, Artificial Sequence
  Description of Artificial Sequence: Synthetic oligonucleotide
auaaacagguaucuuguuc

SEQ ID NO: 3195095 - RNA, 19 nt, Artificial Sequence
  Description of Artificial Sequence: Synthetic oligonucleotide
auaggaauauacugacugc

SEQ ID NO: 3195096 - RNA, 19 nt, Artificial Sequence
  Description of Artificial Sequence: Synthetic oligonucleotide
uguuauggcuuuuaucagg

SEQ ID NO: 3195097 - RNA, 19 nt, Artificial Sequence
  Description of Artificial Sequence: Synthetic oligonucleotide
aaucacacuaguccaaaug

SEQ ID NO: 3195098 - RNA, 19 nt, Artificial Sequence
  Description of Artificial Sequence: Synthetic oligonucleotide
aacagcacaguucguauag

SEQ ID NO: 3195099 - RNA, 19 nt, Artificial Sequence
  Description of Artificial Sequence: Synthetic oligonucleotide
uuuggaaggucucaagacc

SEQ ID NO: 3195100 - RNA, 19 nt, Artificial Sequence
  Description of Artificial Sequence: Synthetic oligonucleotide
aaucuuagugucuccauga

SEQ ID NO: 3195101 - RNA, 19 nt, Artificial Sequence
  Description of Artificial Sequence: Synthetic oligonucleotide
ucacaauaugccaugauuc

SEQ ID NO: 3195102 - RNA, 19 nt, Artificial Sequence
  Description of Artificial Sequence: Synthetic oligonucleotide
uuggucaauaguuugcaag

SEQ ID NO: 3195103 - RNA, 19 nt, Artificial Sequence
  Description of Artificial Sequence: Synthetic oligonucleotide
ucugggcuuugaaagaugg

SEQ ID NO: 3195104 - RNA, 19 nt, Artificial Sequence
  Description of Artificial Sequence: Synthetic oligonucleotide
aauauacugacugcuuuuc

SEQ ID NO: 3195105 - RNA, 19 nt, Artificial Sequence
  Description of Artificial Sequence: Synthetic oligonucleotide
aaggacagcacauggacgu

SEQ ID NO: 3195106 - RNA, 19 nt, Artificial Sequence
  Description of Artificial Sequence: Synthetic oligonucleotide
aacagagcagacuuugaug

SEQ ID NO: 3195107 - RNA, 19 nt, Artificial Sequence
  Description of Artificial Sequence: Synthetic oligonucleotide
auuugcuucaaaugggcag

SEQ ID NO: 3195108 - RNA, 19 nt, Artificial Sequence
  Description of Artificial Sequence: Synthetic oligonucleotide
aguucguauaguguuaugg

SEQ ID NO: 3195109 - RNA, 19 nt, Artificial Sequence
  Description of Artificial Sequence: Synthetic oligonucleotide
agguugaucagucuucagg

SEQ ID NO: 3195110 - RNA, 19 nt, Artificial Sequence
  Description of Artificial Sequence: Synthetic oligonucleotide
uacucaacaucuuaacacc

SEQ ID NO: 3195111 - RNA, 19 nt, Artificial Sequence
  Description of Artificial Sequence: Synthetic oligonucleotide
ucaaaccaucacaauaugc

SEQ ID NO: 3195112 - RNA, 19 nt, Artificial Sequence
  Description of Artificial Sequence: Synthetic oligonucleotide
ucuuguucaggacuacuag

SEQ ID NO: 3195113 - RNA, 19 nt, Artificial Sequence
  Description of Artificial Sequence: Synthetic oligonucleotide
guacucaacaucuuaacac

SEQ ID NO: 3195114 - RNA, 19 nt, Artificial Sequence
  Description of Artificial Sequence: Synthetic oligonucleotide
gacugcuaaaagcuaaucc

SEQ ID NO: 3195115 - RNA, 19 nt, Artificial Sequence
  Description of Artificial Sequence: Synthetic oligonucleotide
cugaaagucuacaaagccc

SEQ ID NO: 3195116 - RNA, 19 nt, Artificial Sequence
  Description of Artificial Sequence: Synthetic oligonucleotide
agcaguaggccuuuggauc

SEQ ID NO: 3195117 - RNA, 19 nt, Artificial Sequence
  Description of Artificial Sequence: Synthetic oligonucleotide
auaguauacacaaucuuag

SEQ ID NO: 3195118 - RNA, 19 nt, Artificial Sequence
  Description of Artificial Sequence: Synthetic oligonucleotide
aguugcucugauuugcuuc

SEQ ID NO: 3195119 - RNA, 19 nt, Artificial Sequence
  Description of Artificial Sequence: Synthetic oligonucleotide
auaagcacuucgcacacag

SEQ ID NO: 3195120 - RNA, 19 nt, Artificial Sequence
  Description of Artificial Sequence: Synthetic oligonucleotide
uuuaugcugggucuggcug

SEQ ID NO: 3195121 - RNA, 19 nt, Artificial Sequence
  Description of Artificial Sequence: Synthetic oligonucleotide
uguuuggaaggucucaaga

SEQ ID NO: 3195122 - RNA, 19 nt, Artificial Sequence
  Description of Artificial Sequence: Synthetic oligonucleotide
cacaauaugccaugauucg

SEQ ID NO: 3195123 - RNA, 19 nt, Artificial Sequence
  Description of Artificial Sequence: Synthetic oligonucleotide
aggcuggucaguuuaauag

SEQ ID NO: 3195124 - RNA, 19 nt, Artificial Sequence
  Description of Artificial Sequence: Synthetic oligonucleotide
uaugccaugauucggcagu

SEQ ID NO: 3195125 - RNA, 19 nt, Artificial Sequence
  Description of Artificial Sequence: Synthetic oligonucleotide
aucacacuaguccaaauga

SEQ ID NO: 3195126 - RNA, 19 nt, Artificial Sequence
  Description of Artificial Sequence: Synthetic oligonucleotide
gucaauaguuugcaagugg

SEQ ID NO: 3195127 - RNA, 19 nt, Artificial Sequence
  Description of Artificial Sequence: Synthetic oligonucleotide
acagguaucuuguucagga

SEQ ID NO: 3195128 - RNA, 19 nt, Artificial Sequence
  Description of Artificial Sequence: Synthetic oligonucleotide
uguaagucacaagacagug

SEQ ID NO: 3195129 - RNA, 19 nt, Artificial Sequence
  Description of Artificial Sequence: Synthetic oligonucleotide
ccuagaaucacacuagucc

SEQ ID NO: 3195130 - RNA, 19 nt, Artificial Sequence
  Description of Artificial Sequence: Synthetic oligonucleotide
uucaaaugggcagaugucc

SEQ ID NO: 3195131 - RNA, 19 nt, Artificial Sequence
  Description of Artificial Sequence: Synthetic oligonucleotide
gaacccaugauucaaaagu

SEQ ID NO: 3195132 - RNA, 19 nt, Artificial Sequence
  Description of Artificial Sequence: Synthetic oligonucleotide
uggaucgacugcuaaaagc

SEQ ID NO: 3195133 - RNA, 19 nt, Artificial Sequence
  Description of Artificial Sequence: Synthetic oligonucleotide
uaacaccaaagccuggaag

SEQ ID NO: 3195134 - RNA, 19 nt, Artificial Sequence
  Description of Artificial Sequence: Synthetic oligonucleotide
uccaaaugaacccaugauu

SEQ ID NO: 3195135 - RNA, 19 nt, Artificial Sequence
  Description of Artificial Sequence: Synthetic oligonucleotide
cuggaaggaaggaagacug

SEQ ID NO: 3195136 - RNA, 19 nt, Artificial Sequence
  Description of Artificial Sequence: Synthetic oligonucleotide
aguuuaauagugcugucaa

SEQ ID NO: 3195137 - RNA, 19 nt, Artificial Sequence
  Description of Artificial Sequence: Synthetic oligonucleotide
aucaucuaguuuguaagac

SEQ ID NO: 3195138 - RNA, 19 nt, Artificial Sequence
  Description of Artificial Sequence: Synthetic oligonucleotide
uguaagucugcaccacuag

SEQ ID NO: 3195139 - RNA, 19 nt, Artificial Sequence
  Description of Artificial Sequence: Synthetic oligonucleotide
aggauaagcacuucgcaca

SEQ ID NO: 3195140 - RNA, 19 nt, Artificial Sequence
  Description of Artificial Sequence: Synthetic oligonucleotide
uggucaauaguuugcaagu

SEQ ID NO: 3195141 - RNA, 19 nt, Artificial Sequence
  Description of Artificial Sequence: Synthetic oligonucleotide
aguacucaacaucuuaaca

SEQ ID NO: 3195142 - RNA, 19 nt, Artificial Sequence
  Description of Artificial Sequence: Synthetic oligonucleotide
uucguauaguguuauggcu

SEQ ID NO: 3195143 - RNA, 19 nt, Artificial Sequence
  Description of Artificial Sequence: Synthetic oligonucleotide
aggccuguaagucacaaga

SEQ ID NO: 3195144 - RNA, 19 nt, Artificial Sequence
  Description of Artificial Sequence: Synthetic oligonucleotide
guucguauaguguuauggc

SEQ ID NO: 3195145 - RNA, 19 nt, Artificial Sequence
  Description of Artificial Sequence: Synthetic oligonucleotide
uccaguauuguaagucugc

SEQ ID NO: 3195146 - RNA, 19 nt, Artificial Sequence
  Description of Artificial Sequence: Synthetic oligonucleotide
uccugucugagauauugag

SEQ ID NO: 3195147 - RNA, 19 nt, Artificial Sequence
  Description of Artificial Sequence: Synthetic oligonucleotide
aaacagguaucuuguucag

SEQ ID NO: 3195148 - RNA, 19 nt, Artificial Sequence
  Description of Artificial Sequence: Synthetic oligonucleotide
aagacugaggagaaggcug

SEQ ID NO: 3195149 - RNA, 19 nt, Artificial Sequence
  Description of Artificial Sequence: Synthetic oligonucleotide
ugguucaaauaguauacac

SEQ ID NO: 3195150 - RNA, 19 nt, Artificial Sequence
  Description of Artificial Sequence: Synthetic oligonucleotide
uaagguggccaaauaguug

SEQ ID NO: 3195151 - RNA, 19 nt, Artificial Sequence
  Description of Artificial Sequence: Synthetic oligonucleotide
acauccuucucaguuaagg

SEQ ID NO: 3195152 - RNA, 19 nt, Artificial Sequence
  Description of Artificial Sequence: Synthetic oligonucleotide
acugccagcauuccacaac

SEQ ID NO: 3195153 - RNA, 19 nt, Artificial Sequence
  Description of Artificial Sequence: Synthetic oligonucleotide
uuaugcugggucuggcugg

SEQ ID NO: 3195154 - RNA, 19 nt, Artificial Sequence
  Description of Artificial Sequence: Synthetic oligonucleotide
uuuuaucaggccuguaagu

SEQ ID NO: 3195155 - RNA, 19 nt, Artificial Sequence
  Description of Artificial Sequence: Synthetic oligonucleotide
uggacguccaguauuguaa

SEQ ID NO: 3195156 - RNA, 19 nt, Artificial Sequence
  Description of Artificial Sequence: Synthetic oligonucleotide
cacuaguccaaaugaaccc

SEQ ID NO: 3195157 - RNA, 19 nt, Artificial Sequence
  Description of Artificial Sequence: Synthetic oligonucleotide
uuaagguggccaaauaguu

SEQ ID NO: 3195158 - RNA, 19 nt, Artificial Sequence
  Description of Artificial Sequence: Synthetic oligonucleotide
gaggauaagcacuucgcac

SEQ ID NO: 3195159 - RNA, 19 nt, Artificial Sequence
  Description of Artificial Sequence: Synthetic oligonucleotide
uaguuacaacauauaaaca

SEQ ID NO: 3195160 - RNA, 19 nt, Artificial Sequence
  Description of Artificial Sequence: Synthetic oligonucleotide
uuuaucaggccuguaaguc

SEQ ID NO: 3195161 - RNA, 19 nt, Artificial Sequence
  Description of Artificial Sequence: Synthetic oligonucleotide
uuaucaggccuguaaguca

SEQ ID NO: 3195162 - RNA, 19 nt, Artificial Sequence
  Description of Artificial Sequence: Synthetic oligonucleotide
caacaucuuaacaccaaag

SEQ ID NO: 3195163 - RNA, 19 nt, Artificial Sequence
  Description of Artificial Sequence: Synthetic oligonucleotide
auauaaacagguaucuugu

SEQ ID NO: 3195164 - RNA, 19 nt, Artificial Sequence
  Description of Artificial Sequence: Synthetic oligonucleotide
ugaacccaugauucaaaag

SEQ ID NO: 3195165 - RNA, 19 nt, Artificial Sequence
  Description of Artificial Sequence: Synthetic oligonucleotide
ugaugcuucauccccagua

SEQ ID NO: 3195166 - RNA, 19 nt, Artificial Sequence
  Description of Artificial Sequence: Synthetic oligonucleotide
uuuucauguuggcaguacu

SEQ ID NO: 3195167 - RNA, 19 nt, Artificial Sequence
  Description of Artificial Sequence: Synthetic oligonucleotide
caaaacagguugaucaguc

SEQ ID NO: 3195168 - RNA, 19 nt, Artificial Sequence
  Description of Artificial Sequence: Synthetic oligonucleotide
caggaaggcaugaacagac

SEQ ID NO: 3195169 - RNA, 19 nt, Artificial Sequence
  Description of Artificial Sequence: Synthetic oligonucleotide
uauacugacugcuuuucau

SEQ ID NO: 3195170 - RNA, 19 nt, Artificial Sequence
  Description of Artificial Sequence: Synthetic oligonucleotide
cuagaaucacacuagucca

SEQ ID NO: 3195171 - RNA, 19 nt, Artificial Sequence
  Description of Artificial Sequence: Synthetic oligonucleotide
uuaauaauuacuaagugag

SEQ ID NO: 3195172 - RNA, 19 nt, Artificial Sequence
  Description of Artificial Sequence: Synthetic oligonucleotide
aaagcuaucaacucuaaag

SEQ ID NO: 3195173 - RNA, 19 nt, Artificial Sequence
  Description of Artificial Sequence: Synthetic oligonucleotide
uuuuauaucaugaacaaga

SEQ ID NO: 3195174 - RNA, 19 nt, Artificial Sequence
  Description of Artificial Sequence: Synthetic oligonucleotide
aacuuuacaguucacaaac

SEQ ID NO: 3195175 - RNA, 19 nt, Artificial Sequence
  Description of Artificial Sequence: Synthetic oligonucleotide
aagcuaucaacucuaaagc

SEQ ID NO: 3195176 - RNA, 19 nt, Artificial Sequence
  Description of Artificial Sequence: Synthetic oligonucleotide
agguggauaacuuacaacc

SEQ ID NO: 3195177 - RNA, 19 nt, Artificial Sequence
  Description of Artificial Sequence: Synthetic oligonucleotide
aauuagcucucucuuaucc

SEQ ID NO: 3195178 - RNA, 19 nt, Artificial Sequence
  Description of Artificial Sequence: Synthetic oligonucleotide
uauaucaugaacaagaauu

SEQ ID NO: 3195179 - RNA, 19 nt, Artificial Sequence
  Description of Artificial Sequence: Synthetic oligonucleotide
augaaugaagauuugauuc

SEQ ID NO: 3195180 - RNA, 19 nt, Artificial Sequence
  Description of Artificial Sequence: Synthetic oligonucleotide
uuuaauaauuacuaaguga

SEQ ID NO: 3195181 - RNA, 19 nt, Artificial Sequence
  Description of Artificial Sequence: Synthetic oligonucleotide
aaauguucgcuuuugugac

SEQ ID NO: 3195182 - RNA, 19 nt, Artificial Sequence
  Description of Artificial Sequence: Synthetic oligonucleotide
ucaaauaguaguaggaggc

SEQ ID NO: 3195183 - RNA, 19 nt, Artificial Sequence
  Description of Artificial Sequence: Synthetic oligonucleotide
aauaauuacuaagugagcu

SEQ ID NO: 3195184 - RNA, 19 nt, Artificial Sequence
  Description of Artificial Sequence: Synthetic oligonucleotide
uuuaauaggccucuguagc

SEQ ID NO: 3195185 - RNA, 19 nt, Artificial Sequence
  Description of Artificial Sequence: Synthetic oligonucleotide
aaacgcuagagucagcuuc

SEQ ID NO: 3195186 - RNA, 19 nt, Artificial Sequence
  Description of Artificial Sequence: Synthetic oligonucleotide
aaagcaauucuucagugcu

SEQ ID NO: 3195187 - RNA, 19 nt, Artificial Sequence
  Description of Artificial Sequence: Synthetic oligonucleotide
uucaaauaguaguaggagg

SEQ ID NO: 3195188 - RNA, 19 nt, Artificial Sequence
  Description of Artificial Sequence: Synthetic oligonucleotide
uacuauacugucaagucag

SEQ ID NO: 3195189 - RNA, 19 nt, Artificial Sequence
  Description of Artificial Sequence: Synthetic oligonucleotide
uauugagccagcaaggucu

SEQ ID NO: 3195190 - RNA, 19 nt, Artificial Sequence
  Description of Artificial Sequence: Synthetic oligonucleotide
aacucuaaagcaguaaguc

SEQ ID NO: 3195191 - RNA, 19 nt, Artificial Sequence
  Description of Artificial Sequence: Synthetic oligonucleotide
uaauuacuaagugagcugg

SEQ ID NO: 3195192 - RNA, 19 nt, Artificial Sequence
  Description of Artificial Sequence: Synthetic oligonucleotide
auaauucucguguuuuccc

SEQ ID NO: 3195193 - RNA, 19 nt, Artificial Sequence
  Description of Artificial Sequence: Synthetic oligonucleotide
auaagcuugauuccacugg

SEQ ID NO: 3195194 - RNA, 19 nt, Artificial Sequence
  Description of Artificial Sequence: Synthetic oligonucleotide
ucaucuuuuaauuuuggaa

SEQ ID NO: 3195195 - RNA, 19 nt, Artificial Sequence
  Description of Artificial Sequence: Synthetic oligonucleotide
aguaauuccacuuguccag

SEQ ID NO: 3195196 - RNA, 19 nt, Artificial Sequence
  Description of Artificial Sequence: Synthetic oligonucleotide
gaaauguucgcuuuuguga

SEQ ID NO: 3195197 - RNA, 19 nt, Artificial Sequence
  Description of Artificial Sequence: Synthetic oligonucleotide
aauaagcuugauuccacug

SEQ ID NO: 3195198 - RNA, 19 nt, Artificial Sequence
  Description of Artificial Sequence: Synthetic oligonucleotide
uccaacuauucuaacaggc

SEQ ID NO: 3195199 - RNA, 19 nt, Artificial Sequence
  Description of Artificial Sequence: Synthetic oligonucleotide
aagggaugaguccuuuagc

SEQ ID NO: 3195200 - RNA, 19 nt, Artificial Sequence
  Description of Artificial Sequence: Synthetic oligonucleotide
uccaauauacacaacuuaa

SEQ ID NO: 3195201 - RNA, 19 nt, Artificial Sequence
  Description of Artificial Sequence: Synthetic oligonucleotide
agaaugacuucuaauuucc

SEQ ID NO: 3195202 - RNA, 19 nt, Artificial Sequence
  Description of Artificial Sequence: Synthetic oligonucleotide
auccuacucguuuuaaagc

SEQ ID NO: 3195203 - RNA, 19 nt, Artificial Sequence
  Description of Artificial Sequence: Synthetic oligonucleotide
aauuccaugccugcuuugc

SEQ ID NO: 3195204 - RNA, 19 nt, Artificial Sequence
  Description of Artificial Sequence: Synthetic oligonucleotide
ucggaaguugaacaaaccc

SEQ ID NO: 3195205 - RNA, 19 nt, Artificial Sequence
  Description of Artificial Sequence: Synthetic oligonucleotide
caagagaugagcuuuggug

SEQ ID NO: 3195206 - RNA, 19 nt, Artificial Sequence
  Description of Artificial Sequence: Synthetic oligonucleotide
aauucggccauauucuagu

SEQ ID NO: 3195207 - RNA, 19 nt, Artificial Sequence
  Description of Artificial Sequence: Synthetic oligonucleotide
cuuuaauaauuacuaagug

SEQ ID NO: 3195208 - RNA, 19 nt, Artificial Sequence
  Description of Artificial Sequence: Synthetic oligonucleotide
ugagcuggaaaguuuaaca

SEQ ID NO: 3195209 - RNA, 19 nt, Artificial Sequence
  Description of Artificial Sequence: Synthetic oligonucleotide
acuguuuagggucuucuuc

SEQ ID NO: 3195210 - RNA, 19 nt, Artificial Sequence
  Description of Artificial Sequence: Synthetic oligonucleotide
ucuaguggcucaaugcugc

SEQ ID NO: 3195211 - RNA, 19 nt, Artificial Sequence
  Description of Artificial Sequence: Synthetic oligonucleotide
uguaagaagggaugagucc

SEQ ID NO: 3195212 - RNA, 19 nt, Artificial Sequence
  Description of Artificial Sequence: Synthetic oligonucleotide
augagacaaauaucaaaac

SEQ ID NO: 3195213 - RNA, 19 nt, Artificial Sequence
  Description of Artificial Sequence: Synthetic oligonucleotide
auaauuacuaagugagcug

SEQ ID NO: 3195214 - RNA, 19 nt, Artificial Sequence
  Description of Artificial Sequence: Synthetic oligonucleotide
gaaaucgaggaguaacugc

SEQ ID NO: 3195215 - RNA, 19 nt, Artificial Sequence
  Description of Artificial Sequence: Synthetic oligonucleotide
uaauaauuacuaagugagc

SEQ ID NO: 3195216 - RNA, 19 nt, Artificial Sequence
  Description of Artificial Sequence: Synthetic oligonucleotide
ugcauuccuaucccaaacg

SEQ ID NO: 3195217 - RNA, 19 nt, Artificial Sequence
  Description of Artificial Sequence: Synthetic oligonucleotide
gaacaaacccaucugcuug

SEQ ID NO: 3195218 - RNA, 19 nt, Artificial Sequence
  Description of Artificial Sequence: Synthetic oligonucleotide
gaugagacaaauaucaaaa

SEQ ID NO: 3195219 - RNA, 19 nt, Artificial Sequence
  Description of Artificial Sequence: Synthetic oligonucleotide
aauguugcuggaaucauca

SEQ ID NO: 3195220 - RNA, 19 nt, Artificial Sequence
  Description of Artificial Sequence: Synthetic oligonucleotide
ugauucaaugggaagacau

SEQ ID NO: 3195221 - RNA, 19 nt, Artificial Sequence
  Description of Artificial Sequence: Synthetic oligonucleotide
gaagggaugaguccuuuag

SEQ ID NO: 3195222 - RNA, 19 nt, Artificial Sequence
  Description of Artificial Sequence: Synthetic oligonucleotide
ucgagcauuagcuaaugca

SEQ ID NO: 3195223 - RNA, 19 nt, Artificial Sequence
  Description of Artificial Sequence: Synthetic oligonucleotide
acaaacagcucuuccacag

SEQ ID NO: 3195224 - RNA, 19 nt, Artificial Sequence
  Description of Artificial Sequence: Synthetic oligonucleotide
aaaaguaaguccaugugau

SEQ ID NO: 3195225 - RNA, 19 nt, Artificial Sequence
  Description of Artificial Sequence: Synthetic oligonucleotide
ucauccauauucaaccacu

SEQ ID NO: 3195226 - RNA, 19 nt, Artificial Sequence
  Description of Artificial Sequence: Synthetic oligonucleotide
ugcaacuucaaugcagugg

SEQ ID NO: 3195227 - RNA, 19 nt, Artificial Sequence
  Description of Artificial Sequence: Synthetic oligonucleotide
ugaaauggagaguucauua

SEQ ID NO: 3195228 - RNA, 19 nt, Artificial Sequence
  Description of Artificial Sequence: Synthetic oligonucleotide
uggagaaugacuucuaauu

SEQ ID NO: 3195229 - RNA, 19 nt, Artificial Sequence
  Description of Artificial Sequence: Synthetic oligonucleotide
uguaugguccucauugugu

SEQ ID NO: 3195230 - RNA, 19 nt, Artificial Sequence
  Description of Artificial Sequence: Synthetic oligonucleotide
agugucguaaucugggcag

SEQ ID NO: 3195231 - RNA, 19 nt, Artificial Sequence
  Description of Artificial Sequence: Synthetic oligonucleotide
gaaaaggugaagacggugc

SEQ ID NO: 3195232 - RNA, 19 nt, Artificial Sequence
  Description of Artificial Sequence: Synthetic oligonucleotide
aacucaaccagagacuucu

SEQ ID NO: 3195233 - RNA, 19 nt, Artificial Sequence
  Description of Artificial Sequence: Synthetic oligonucleotide
aaaucgaggaguaacugca

SEQ ID NO: 3195234 - RNA, 19 nt, Artificial Sequence
  Description of Artificial Sequence: Synthetic oligonucleotide
agcucgacccaucaucugc

SEQ ID NO: 3195235 - RNA, 19 nt, Artificial Sequence
  Description of Artificial Sequence: Synthetic oligonucleotide
ugaugagacaaauaucaaa

SEQ ID NO: 3195236 - RNA, 19 nt, Artificial Sequence
  Description of Artificial Sequence: Synthetic oligonucleotide
aagucagugaagucaucag

SEQ ID NO: 3195237 - RNA, 19 nt, Artificial Sequence
  Description of Artificial Sequence: Synthetic oligonucleotide
caucuuuuaauuuuggaaa

SEQ ID NO: 3195238 - RNA, 19 nt, Artificial Sequence
  Description of Artificial Sequence: Synthetic oligonucleotide
ugggguucaugauaagacg

SEQ ID NO: 3195239 - RNA, 19 nt, Artificial Sequence
  Description of Artificial Sequence: Synthetic oligonucleotide
acaaccaucaucuccaaua

SEQ ID NO: 3195240 - RNA, 19 nt, Artificial Sequence
  Description of Artificial Sequence: Synthetic oligonucleotide
uauaauccauugcaucuug

SEQ ID NO: 3195241 - RNA, 19 nt, Artificial Sequence
  Description of Artificial Sequence: Synthetic oligonucleotide
ucggccauauucuaguggc

SEQ ID NO: 3195242 - RNA, 19 nt, Artificial Sequence
  Description of Artificial Sequence: Synthetic oligonucleotide
agccaagacucuuagucac

SEQ ID NO: 3195243 - RNA, 19 nt, Artificial Sequence
  Description of Artificial Sequence: Synthetic oligonucleotide
gaagauauaucuuccaggu

SEQ ID NO: 3195244 - RNA, 19 nt, Artificial Sequence
  Description of Artificial Sequence: Synthetic oligonucleotide
aaaaggugaagacggugcu

SEQ ID NO: 3195245 - RNA, 19 nt, Artificial Sequence
  Description of Artificial Sequence: Synthetic oligonucleotide
aaguggcuuguuuagguca

SEQ ID NO: 3195246 - RNA, 19 nt, Artificial Sequence
  Description of Artificial Sequence: Synthetic oligonucleotide
cugacuguaacucauucuc

SEQ ID NO: 3195247 - RNA, 19 nt, Artificial Sequence
  Description of Artificial Sequence: Synthetic oligonucleotide
ggagaguucauuauguccg

SEQ ID NO: 3195248 - RNA, 19 nt, Artificial Sequence
  Description of Artificial Sequence: Synthetic oligonucleotide
uauuguaccuccagcaauc

SEQ ID NO: 3195249 - RNA, 19 nt, Artificial Sequence
  Description of Artificial Sequence: Synthetic oligonucleotide
uucaugauaagacgucgga

SEQ ID NO: 3195250 - RNA, 19 nt, Artificial Sequence
  Description of Artificial Sequence: Synthetic oligonucleotide
ucaaucagaugugacagga

SEQ ID NO: 3195251 - RNA, 19 nt, Artificial Sequence
  Description of Artificial Sequence: Synthetic oligonucleotide
cuuccagaggaacugggcg

SEQ ID NO: 3195252 - RNA, 19 nt, Artificial Sequence
  Description of Artificial Sequence: Synthetic oligonucleotide
augauugaacagccaagac

SEQ ID NO: 3195253 - RNA, 19 nt, Artificial Sequence
  Description of Artificial Sequence: Synthetic oligonucleotide
cuucaaauaguaguaggag

SEQ ID NO: 3195254 - RNA, 19 nt, Artificial Sequence
  Description of Artificial Sequence: Synthetic oligonucleotide
uuuccugaaaugcaggcuu

SEQ ID NO: 3195255 - RNA, 19 nt, Artificial Sequence
  Description of Artificial Sequence: Synthetic oligonucleotide
aagauauaucuuccaggug

SEQ ID NO: 3195256 - RNA, 19 nt, Artificial Sequence
  Description of Artificial Sequence: Synthetic oligonucleotide
uuauuguaccuccagcaau

SEQ ID NO: 3195257 - RNA, 19 nt, Artificial Sequence
  Description of Artificial Sequence: Synthetic oligonucleotide
aacuuguucauggagucgu

SEQ ID NO: 3195258 - RNA, 19 nt, Artificial Sequence
  Description of Artificial Sequence: Synthetic oligonucleotide
augcauuccuaucccaaac

SEQ ID NO: 3195259 - RNA, 19 nt, Artificial Sequence
  Description of Artificial Sequence: Synthetic oligonucleotide
uuagcucucucuuauccac

SEQ ID NO: 3195260 - RNA, 19 nt, Artificial Sequence
  Description of Artificial Sequence: Synthetic oligonucleotide
ugcuugaagcaagagauga

SEQ ID NO: 3195261 - RNA, 19 nt, Artificial Sequence
  Description of Artificial Sequence: Synthetic oligonucleotide
cuuaggccaacauuuauca

SEQ ID NO: 3195262 - RNA, 19 nt, Artificial Sequence
  Description of Artificial Sequence: Synthetic oligonucleotide
ugcuuagauguuauuguac

SEQ ID NO: 3195263 - RNA, 19 nt, Artificial Sequence
  Description of Artificial Sequence: Synthetic oligonucleotide
gugacauugagauaaauau

SEQ ID NO: 3195264 - RNA, 19 nt, Artificial Sequence
  Description of Artificial Sequence: Synthetic oligonucleotide
ucaaguggcuuguuuaggu

SEQ ID NO: 3195265 - RNA, 19 nt, Artificial Sequence
  Description of Artificial Sequence: Synthetic oligonucleotide
uaaagcaguaagucgaguu

SEQ ID NO: 3195266 - RNA, 19 nt, Artificial Sequence
  Description of Artificial Sequence: Synthetic oligonucleotide
auacuagccaugcgugggc

SEQ ID NO: 3195267 - RNA, 19 nt, Artificial Sequence
  Description of Artificial Sequence: Synthetic oligonucleotide
ucguauugucccaaugaug

SEQ ID NO: 3195268 - RNA, 19 nt, Artificial Sequence
  Description of Artificial Sequence: Synthetic oligonucleotide
gagauaaaguuuguucgag

SEQ ID NO: 3195269 - RNA, 19 nt, Artificial Sequence
  Description of Artificial Sequence: Synthetic oligonucleotide
aggccaagauaacagucac

SEQ ID NO: 3195270 - RNA, 19 nt, Artificial Sequence
  Description of Artificial Sequence: Synthetic oligonucleotide
ugaacaucuucacuguuuu

SEQ ID NO: 3195271 - RNA, 19 nt, Artificial Sequence
  Description of Artificial Sequence: Synthetic oligonucleotide
ugaguguccaucaugaagu

SEQ ID NO: 3195272 - RNA, 19 nt, Artificial Sequence
  Description of Artificial Sequence: Synthetic oligonucleotide
ucuuguauccguuugguga

SEQ ID NO: 3195273 - RNA, 19 nt, Artificial Sequence
  Description of Artificial Sequence: Synthetic oligonucleotide
uuguagauuaaccacgucu

SEQ ID NO: 3195274 - RNA, 19 nt, Artificial Sequence
  Description of Artificial Sequence: Synthetic oligonucleotide
caugaaguugugaacaugc

SEQ ID NO: 3195275 - RNA, 19 nt, Artificial Sequence
  Description of Artificial Sequence: Synthetic oligonucleotide
aaccacagcuaccacaagg

SEQ ID NO: 3195276 - RNA, 19 nt, Artificial Sequence
  Description of Artificial Sequence: Synthetic oligonucleotide
uucuuuagcagcuuugugu

SEQ ID NO: 3195277 - RNA, 19 nt, Artificial Sequence
  Description of Artificial Sequence: Synthetic oligonucleotide
uguguuguagauuaaccac

SEQ ID NO: 3195278 - RNA, 19 nt, Artificial Sequence
  Description of Artificial Sequence: Synthetic oligonucleotide
uguagauuaaccacgucuc

SEQ ID NO: 3195279 - RNA, 19 nt, Artificial Sequence
  Description of Artificial Sequence: Synthetic oligonucleotide
ucuuuagcagcuuugugug

SEQ ID NO: 3195280 - RNA, 19 nt, Artificial Sequence
  Description of Artificial Sequence: Synthetic oligonucleotide
uguguguuguagauuaacc

SEQ ID NO: 3195281 - RNA, 19 nt, Artificial Sequence
  Description of Artificial Sequence: Synthetic oligonucleotide
agauuaaccacgucucccg

SEQ ID NO: 3195282 - RNA, 19 nt, Artificial Sequence
  Description of Artificial Sequence: Synthetic oligonucleotide
gaaguugugaacaugcuuc

SEQ ID NO: 3195283 - RNA, 19 nt, Artificial Sequence
  Description of Artificial Sequence: Synthetic oligonucleotide
uggucaauuucuuuagcag

SEQ ID NO: 3195284 - RNA, 19 nt, Artificial Sequence
  Description of Artificial Sequence: Synthetic oligonucleotide
gauuuuguuggucaauuuc

SEQ ID NO: 3195285 - RNA, 19 nt, Artificial Sequence
  Description of Artificial Sequence: Synthetic oligonucleotide
uguuggucaauuucuuuag

SEQ ID NO: 3195286 - RNA, 19 nt, Artificial Sequence
  Description of Artificial Sequence: Synthetic oligonucleotide
uccaucaugaaguugugaa

SEQ ID NO: 3195287 - RNA, 19 nt, Artificial Sequence
  Description of Artificial Sequence: Synthetic oligonucleotide
ccuauucugauuuuguugg

SEQ ID NO: 3195288 - RNA, 19 nt, Artificial Sequence
  Description of Artificial Sequence: Synthetic oligonucleotide
uuaaccacgucucccggag

SEQ ID NO: 3195289 - RNA, 19 nt, Artificial Sequence
  Description of Artificial Sequence: Synthetic oligonucleotide
uuuggugagcucaagcuuc

SEQ ID NO: 3195290 - RNA, 19 nt, Artificial Sequence
  Description of Artificial Sequence: Synthetic oligonucleotide
uuggucaauuucuuuagca

SEQ ID NO: 3195291 - RNA, 19 nt, Artificial Sequence
  Description of Artificial Sequence: Synthetic oligonucleotide
accuauucugauuuuguug

SEQ ID NO: 3195292 - RNA, 19 nt, Artificial Sequence
  Description of Artificial Sequence: Synthetic oligonucleotide
ucccggaggacauuggccg

SEQ ID NO: 3195293 - RNA, 19 nt, Artificial Sequence
  Description of Artificial Sequence: Synthetic oligonucleotide
uguuguagauuaaccacgu

SEQ ID NO: 3195294 - RNA, 19 nt, Artificial Sequence
  Description of Artificial Sequence: Synthetic oligonucleotide
auucugauuuuguugguca

SEQ ID NO: 3195295 - RNA, 19 nt, Artificial Sequence
  Description of Artificial Sequence: Synthetic oligonucleotide
cuuguauccguuuggugag

SEQ ID NO: 3195296 - RNA, 19 nt, Artificial Sequence
  Description of Artificial Sequence: Synthetic oligonucleotide
guguuguagauuaaccacg

SEQ ID NO: 3195297 - RNA, 19 nt, Artificial Sequence
  Description of Artificial Sequence: Synthetic oligonucleotide
ugcuucucugcuuugguga

SEQ ID NO: 3195298 - RNA, 19 nt, Artificial Sequence
  Description of Artificial Sequence: Synthetic oligonucleotide
aauuucuuuagcagcuuug

SEQ ID NO: 3195299 - RNA, 19 nt, Artificial Sequence
  Description of Artificial Sequence: Synthetic oligonucleotide
gugagcucaagcuuccggg

SEQ ID NO: 3195300 - RNA, 19 nt, Artificial Sequence
  Description of Artificial Sequence: Synthetic oligonucleotide
accacaagggcagugcagc

SEQ ID NO: 3195301 - RNA, 19 nt, Artificial Sequence
  Description of Artificial Sequence: Synthetic oligonucleotide
auuuuguuggucaauuucu

SEQ ID NO: 3195302 - RNA, 19 nt, Artificial Sequence
  Description of Artificial Sequence: Synthetic oligonucleotide
cugaguguccaucaugaag

SEQ ID NO: 3195303 - RNA, 19 nt, Artificial Sequence
  Description of Artificial Sequence: Synthetic oligonucleotide
uuguuggucaauuucuuua

SEQ ID NO: 3195304 - RNA, 19 nt, Artificial Sequence
  Description of Artificial Sequence: Synthetic oligonucleotide
cauucuuguauccguuugg

SEQ ID NO: 3195305 - RNA, 19 nt, Artificial Sequence
  Description of Artificial Sequence: Synthetic oligonucleotide
aaguugugaacaugcuucu

SEQ ID NO: 3195306 - RNA, 19 nt, Artificial Sequence
  Description of Artificial Sequence: Synthetic oligonucleotide
uuucuuuagcagcuuugug

SEQ ID NO: 3195307 - RNA, 19 nt, Artificial Sequence
  Description of Artificial Sequence: Synthetic oligonucleotide
uagauuaaccacgucuccc

SEQ ID NO: 3195308 - RNA, 19 nt, Artificial Sequence
  Description of Artificial Sequence: Synthetic oligonucleotide
cuuuguguguuguagauua

SEQ ID NO: 3195309 - RNA, 19 nt, Artificial Sequence
  Description of Artificial Sequence: Synthetic oligonucleotide
gauuaaccacgucucccgg

SEQ ID NO: 3195310 - RNA, 19 nt, Artificial Sequence
  Description of Artificial Sequence: Synthetic oligonucleotide
ugaaguugugaacaugcuu

SEQ ID NO: 3195311 - RNA, 19 nt, Artificial Sequence
  Description of Artificial Sequence: Synthetic oligonucleotide
ggucaauuucuuuagcagc

SEQ ID NO: 3195312 - RNA, 19 nt, Artificial Sequence
  Description of Artificial Sequence: Synthetic oligonucleotide
uugugaacaugcuucucug

SEQ ID NO: 3195313 - RNA, 19 nt, Artificial Sequence
  Description of Artificial Sequence: Synthetic oligonucleotide
acagcuaccacaagggcag

SEQ ID NO: 3195314 - RNA, 19 nt, Artificial Sequence
  Description of Artificial Sequence: Synthetic oligonucleotide
ugcuuuggugagcucaagc

SEQ ID NO: 3195315 - RNA, 19 nt, Artificial Sequence
  Description of Artificial Sequence: Synthetic oligonucleotide
guguguuguagauuaacca

SEQ ID NO: 3195316 - RNA, 19 nt, Artificial Sequence
  Description of Artificial Sequence: Synthetic oligonucleotide
uauccguuuggugagcuga

SEQ ID NO: 3195317 - RNA, 19 nt, Artificial Sequence
  Description of Artificial Sequence: Synthetic oligonucleotide
accacagcuaccacaaggg

SEQ ID NO: 3195318 - RNA, 19 nt, Artificial Sequence
  Description of Artificial Sequence: Synthetic oligonucleotide
guagauuaaccacgucucc

SEQ ID NO: 3195319 - RNA, 19 nt, Artificial Sequence
  Description of Artificial Sequence: Synthetic oligonucleotide
aaccacgucucccggagga

SEQ ID NO: 3195320 - RNA, 19 nt, Artificial Sequence
  Description of Artificial Sequence: Synthetic oligonucleotide
ugugaacaugcuucucugc

SEQ ID NO: 3195321 - RNA, 19 nt, Artificial Sequence
  Description of Artificial Sequence: Synthetic oligonucleotide
uuuggugagcugagugucc

SEQ ID NO: 3195322 - RNA, 19 nt, Artificial Sequence
  Description of Artificial Sequence: Synthetic oligonucleotide
uuuuguuggucaauuucuu

SEQ ID NO: 3195323 - RNA, 19 nt, Artificial Sequence
  Description of Artificial Sequence: Synthetic oligonucleotide
caucaugaaguugugaaca

SEQ ID NO: 3195324 - RNA, 19 nt, Artificial Sequence
  Description of Artificial Sequence: Synthetic oligonucleotide
auuucuuuagcagcuuugu

SEQ ID NO: 3195325 - RNA, 19 nt, Artificial Sequence
  Description of Artificial Sequence: Synthetic oligonucleotide
ugagcucaagcuuccgggc

SEQ ID NO: 3195326 - RNA, 19 nt, Artificial Sequence
  Description of Artificial Sequence: Synthetic oligonucleotide
acaagggcagugcagccug

SEQ ID NO: 3195327 - RNA, 19 nt, Artificial Sequence
  Description of Artificial Sequence: Synthetic oligonucleotide
uucuuguauccguuuggug

SEQ ID NO: 3195328 - RNA, 19 nt, Artificial Sequence
  Description of Artificial Sequence: Synthetic oligonucleotide
uaccacaagggcagugcag

SEQ ID NO: 3195329 - RNA, 19 nt, Artificial Sequence
  Description of Artificial Sequence: Synthetic oligonucleotide
ucaugaaguugugaacaug

SEQ ID NO: 3195330 - RNA, 19 nt, Artificial Sequence
  Description of Artificial Sequence: Synthetic oligonucleotide
uuuguuggucaauuucuuu

SEQ ID NO: 3195331 - RNA, 19 nt, Artificial Sequence
  Description of Artificial Sequence: Synthetic oligonucleotide
uauucugauuuuguugguc

SEQ ID NO: 3195332 - RNA, 19 nt, Artificial Sequence
  Description of Artificial Sequence: Synthetic oligonucleotide
ucucccggaggacauuggc

SEQ ID NO: 3195333 - RNA, 19 nt, Artificial Sequence
  Description of Artificial Sequence: Synthetic oligonucleotide
guuggucaauuucuuuagc

SEQ ID NO: 3195334 - RNA, 19 nt, Artificial Sequence
  Description of Artificial Sequence: Synthetic oligonucleotide
uuggugagcucaagcuucc

SEQ ID NO: 3195335 - RNA, 19 nt, Artificial Sequence
  Description of Artificial Sequence: Synthetic oligonucleotide
uuguguguuguagauuaac

SEQ ID NO: 3195336 - RNA, 19 nt, Artificial Sequence
  Description of Artificial Sequence: Synthetic oligonucleotide
uuuagcagcuuuguguguu

SEQ ID NO: 3195337 - RNA, 19 nt, Artificial Sequence
  Description of Artificial Sequence: Synthetic oligonucleotide
ucugcuuuggugagcucaa

SEQ ID NO: 3195338 - RNA, 19 nt, Artificial Sequence
  Description of Artificial Sequence: Synthetic oligonucleotide
aacaugcuucucugcuuug

SEQ ID NO: 3195339 - RNA, 19 nt, Artificial Sequence
  Description of Artificial Sequence: Synthetic oligonucleotide
caagcuuccgggcaaccac

SEQ ID NO: 3195340 - RNA, 19 nt, Artificial Sequence
  Description of Artificial Sequence: Synthetic oligonucleotide
agcuuuguguguuguagau

SEQ ID NO: 3195341 - RNA, 19 nt, Artificial Sequence
  Description of Artificial Sequence: Synthetic oligonucleotide
uuagcagcuuuguguguug

SEQ ID NO: 3195342 - RNA, 19 nt, Artificial Sequence
  Description of Artificial Sequence: Synthetic oligonucleotide
uucucugcuuuggugagcu

SEQ ID NO: 3195343 - RNA, 19 nt, Artificial Sequence
  Description of Artificial Sequence: Synthetic oligonucleotide
guugugaacaugcuucucu

SEQ ID NO: 3195344 - RNA, 19 nt, Artificial Sequence
  Description of Artificial Sequence: Synthetic oligonucleotide
cacagcuaccacaagggca

SEQ ID NO: 3195345 - RNA, 19 nt, Artificial Sequence
  Description of Artificial Sequence: Synthetic oligonucleotide
uuggccgccgcauucuugu

SEQ ID NO: 3195346 - RNA, 19 nt, Artificial Sequence
  Description of Artificial Sequence: Synthetic oligonucleotide
aucaugaaguugugaacau

SEQ ID NO: 3195347 - RNA, 19 nt, Artificial Sequence
  Description of Artificial Sequence: Synthetic oligonucleotide
auuaaccacgucucccgga

SEQ ID NO: 3195348 - RNA, 19 nt, Artificial Sequence
  Description of Artificial Sequence: Synthetic oligonucleotide
acaugcuucucugcuuugg

SEQ ID NO: 3195349 - RNA, 19 nt, Artificial Sequence
  Description of Artificial Sequence: Synthetic oligonucleotide
uguccaucaugaaguugug

SEQ ID NO: 3195350 - RNA, 19 nt, Artificial Sequence
  Description of Artificial Sequence: Synthetic oligonucleotide
gagcugaguguccaucaug

SEQ ID NO: 3195351 - RNA, 19 nt, Artificial Sequence
  Description of Artificial Sequence: Synthetic oligonucleotide
auucuuguauccguuuggu

SEQ ID NO: 3195352 - RNA, 19 nt, Artificial Sequence
  Description of Artificial Sequence: Synthetic oligonucleotide
agcugaguguccaucauga

SEQ ID NO: 3195353 - RNA, 19 nt, Artificial Sequence
  Description of Artificial Sequence: Synthetic oligonucleotide
ugauuuuguuggucaauuu

SEQ ID NO: 3195354 - RNA, 19 nt, Artificial Sequence
  Description of Artificial Sequence: Synthetic oligonucleotide
uucugauuuuguuggucaa

SEQ ID NO: 3195355 - RNA, 19 nt, Artificial Sequence
  Description of Artificial Sequence: Synthetic oligonucleotide
ugaacaugcuucucugcuu

SEQ ID NO: 3195356 - RNA, 19 nt, Artificial Sequence
  Description of Artificial Sequence: Synthetic oligonucleotide
augcuucucugcuuuggug

SEQ ID NO: 3195357 - RNA, 19 nt, Artificial Sequence
  Description of Artificial Sequence: Synthetic oligonucleotide
ggugagcucaagcuuccgg

SEQ ID NO: 3195358 - RNA, 19 nt, Artificial Sequence
  Description of Artificial Sequence: Synthetic oligonucleotide
cucccggaggacauuggcc

SEQ ID NO: 3195359 - RNA, 19 nt, Artificial Sequence
  Description of Artificial Sequence: Synthetic oligonucleotide
uuuguguguuguagauuaa

SEQ ID NO: 3195360 - RNA, 19 nt, Artificial Sequence
  Description of Artificial Sequence: Synthetic oligonucleotide
uaaccacgucucccggagg

SEQ ID NO: 3195361 - RNA, 19 nt, Artificial Sequence
  Description of Artificial Sequence: Synthetic oligonucleotide
gacauuggccgccgcauuc

SEQ ID NO: 3195362 - RNA, 19 nt, Artificial Sequence
  Description of Artificial Sequence: Synthetic oligonucleotide
ucugauuuuguuggucaau

SEQ ID NO: 3195363 - RNA, 19 nt, Artificial Sequence
  Description of Artificial Sequence: Synthetic oligonucleotide
guuuggugagcugaguguc

SEQ ID NO: 3195364 - RNA, 19 nt, Artificial Sequence
  Description of Artificial Sequence: Synthetic oligonucleotide
guguccaucaugaaguugu

SEQ ID NO: 3195365 - RNA, 19 nt, Artificial Sequence
  Description of Artificial Sequence: Synthetic oligonucleotide
aguugugaacaugcuucuc

SEQ ID NO: 3195366 - RNA, 19 nt, Artificial Sequence
  Description of Artificial Sequence: Synthetic oligonucleotide
ucaagcuuccgggcaacca

SEQ ID NO: 3195367 - RNA, 19 nt, Artificial Sequence
  Description of Artificial Sequence: Synthetic oligonucleotide
uuggugagcugagugucca

SEQ ID NO: 3195368 - RNA, 19 nt, Artificial Sequence
  Description of Artificial Sequence: Synthetic oligonucleotide
gcagcuuuguguguuguag

SEQ ID NO: 3195369 - RNA, 19 nt, Artificial Sequence
  Description of Artificial Sequence: Synthetic oligonucleotide
uguauccguuuggugagcu

SEQ ID NO: 3195370 - RNA, 19 nt, Artificial Sequence
  Description of Artificial Sequence: Synthetic oligonucleotide
ggcagugcagccugcaccc

SEQ ID NO: 3195371 - RNA, 19 nt, Artificial Sequence
  Description of Artificial Sequence: Synthetic oligonucleotide
aaaggguccauccagauac

SEQ ID NO: 3195372 - RNA, 19 nt, Artificial Sequence
  Description of Artificial Sequence: Synthetic oligonucleotide
aacuguaaaagccaaacag

SEQ ID NO: 3195373 - RNA, 19 nt, Artificial Sequence
  Description of Artificial Sequence: Synthetic oligonucleotide
aaaugaauucaucacuagc

SEQ ID NO: 3195374 - RNA, 19 nt, Artificial Sequence
  Description of Artificial Sequence: Synthetic oligonucleotide
auaaggaucuaacuaagcc

SEQ ID NO: 3195375 - RNA, 19 nt, Artificial Sequence
  Description of Artificial Sequence: Synthetic oligonucleotide
caaaauaacuguaaaagcc

SEQ ID NO: 3195376 - RNA, 19 nt, Artificial Sequence
  Description of Artificial Sequence: Synthetic oligonucleotide
aagugaugccaacagaucc

SEQ ID NO: 3195377 - RNA, 19 nt, Artificial Sequence
  Description of Artificial Sequence: Synthetic oligonucleotide
uaucagaaaacuaugagga

SEQ ID NO: 3195378 - RNA, 19 nt, Artificial Sequence
  Description of Artificial Sequence: Synthetic oligonucleotide
uuaucagaaaacuaugagg

SEQ ID NO: 3195379 - RNA, 19 nt, Artificial Sequence
  Description of Artificial Sequence: Synthetic oligonucleotide
aaagcaaaugaauucauca

SEQ ID NO: 3195380 - RNA, 19 nt, Artificial Sequence
  Description of Artificial Sequence: Synthetic oligonucleotide
aagaacaggaauaagauug

SEQ ID NO: 3195381 - RNA, 19 nt, Artificial Sequence
  Description of Artificial Sequence: Synthetic oligonucleotide
uguauaugugagcauaugg

SEQ ID NO: 3195382 - RNA, 19 nt, Artificial Sequence
  Description of Artificial Sequence: Synthetic oligonucleotide
aauaagauuggguaguacu

SEQ ID NO: 3195383 - RNA, 19 nt, Artificial Sequence
  Description of Artificial Sequence: Synthetic oligonucleotide
aaaauaacagaagaacagg

SEQ ID NO: 3195384 - RNA, 19 nt, Artificial Sequence
  Description of Artificial Sequence: Synthetic oligonucleotide
aagccaaacaguuuacuac

SEQ ID NO: 3195385 - RNA, 19 nt, Artificial Sequence
  Description of Artificial Sequence: Synthetic oligonucleotide
ugaaaauaacagaagaaca

SEQ ID NO: 3195386 - RNA, 19 nt, Artificial Sequence
  Description of Artificial Sequence: Synthetic oligonucleotide
aucaaaauaacuguaaaag

SEQ ID NO: 3195387 - RNA, 19 nt, Artificial Sequence
  Description of Artificial Sequence: Synthetic oligonucleotide
uauaugugagcauaugggg

SEQ ID NO: 3195388 - RNA, 19 nt, Artificial Sequence
  Description of Artificial Sequence: Synthetic oligonucleotide
aagcaaaugaauucaucac

SEQ ID NO: 3195389 - RNA, 19 nt, Artificial Sequence
  Description of Artificial Sequence: Synthetic oligonucleotide
gaaaauaacagaagaacag

SEQ ID NO: 3195390 - RNA, 19 nt, Artificial Sequence
  Description of Artificial Sequence: Synthetic oligonucleotide
ucaaaauaacuguaaaagc

SEQ ID NO: 3195391 - RNA, 19 nt, Artificial Sequence
  Description of Artificial Sequence: Synthetic oligonucleotide
uaaauaaggaucuaacuaa

SEQ ID NO: 3195392 - RNA, 19 nt, Artificial Sequence
  Description of Artificial Sequence: Synthetic oligonucleotide
uuugccauguauaugugag

SEQ ID NO: 3195393 - RNA, 19 nt, Artificial Sequence
  Description of Artificial Sequence: Synthetic oligonucleotide
uuuuccuaaauaaggaucu

SEQ ID NO: 3195394 - RNA, 19 nt, Artificial Sequence
  Description of Artificial Sequence: Synthetic oligonucleotide
aaugaauucaucacuagca

SEQ ID NO: 3195395 - RNA, 19 nt, Artificial Sequence
  Description of Artificial Sequence: Synthetic oligonucleotide
aaggaucuaacuaagccac

SEQ ID NO: 3195396 - RNA, 19 nt, Artificial Sequence
  Description of Artificial Sequence: Synthetic oligonucleotide
auaacuguaaaagccaaac

SEQ ID NO: 3195397 - RNA, 19 nt, Artificial Sequence
  Description of Artificial Sequence: Synthetic oligonucleotide
aaugucuuugcaaagcauc

SEQ ID NO: 3195398 - RNA, 19 nt, Artificial Sequence
  Description of Artificial Sequence: Synthetic oligonucleotide
uuacuacugaauuacaaac

SEQ ID NO: 3195399 - RNA, 19 nt, Artificial Sequence
  Description of Artificial Sequence: Synthetic oligonucleotide
aaaacacauggccacacug

SEQ ID NO: 3195400 - RNA, 19 nt, Artificial Sequence
  Description of Artificial Sequence: Synthetic oligonucleotide
aaaauaacuguaaaagcca

SEQ ID NO: 3195401 - RNA, 19 nt, Artificial Sequence
  Description of Artificial Sequence: Synthetic oligonucleotide
aacaguuuacuacugaauu

SEQ ID NO: 3195402 - RNA, 19 nt, Artificial Sequence
  Description of Artificial Sequence: Synthetic oligonucleotide
aauaaggaucuaacuaagc

SEQ ID NO: 3195403 - RNA, 19 nt, Artificial Sequence
  Description of Artificial Sequence: Synthetic oligonucleotide
uaaggaucuaacuaagcca

SEQ ID NO: 3195404 - RNA, 19 nt, Artificial Sequence
  Description of Artificial Sequence: Synthetic oligonucleotide
ugaacaugggcccugaaaa

SEQ ID NO: 3195405 - RNA, 19 nt, Artificial Sequence
  Description of Artificial Sequence: Synthetic oligonucleotide
augaauucaucacuagcac

SEQ ID NO: 3195406 - RNA, 19 nt, Artificial Sequence
  Description of Artificial Sequence: Synthetic oligonucleotide
uugcaaagcaucuauaaaa

SEQ ID NO: 3195407 - RNA, 19 nt, Artificial Sequence
  Description of Artificial Sequence: Synthetic oligonucleotide
uucaucacuagcaccauca

SEQ ID NO: 3195408 - RNA, 19 nt, Artificial Sequence
  Description of Artificial Sequence: Synthetic oligonucleotide
cuuaucagaaaacuaugag

SEQ ID NO: 3195409 - RNA, 19 nt, Artificial Sequence
  Description of Artificial Sequence: Synthetic oligonucleotide
uuuacuacugaauuacaaa

SEQ ID NO: 3195410 - RNA, 19 nt, Artificial Sequence
  Description of Artificial Sequence: Synthetic oligonucleotide
uugaguaccagaguugagg

SEQ ID NO: 3195411 - RNA, 19 nt, Artificial Sequence
  Description of Artificial Sequence: Synthetic oligonucleotide
guauaugugagcauauggg

SEQ ID NO: 3195412 - RNA, 19 nt, Artificial Sequence
  Description of Artificial Sequence: Synthetic oligonucleotide
cugaaaauaacagaagaac

SEQ ID NO: 3195413 - RNA, 19 nt, Artificial Sequence
  Description of Artificial Sequence: Synthetic oligonucleotide
aagccacugguguaaaggg

SEQ ID NO: 3195414 - RNA, 19 nt, Artificial Sequence
  Description of Artificial Sequence: Synthetic oligonucleotide
auaacagaagaacaggaau

SEQ ID NO: 3195415 - RNA, 19 nt, Artificial Sequence
  Description of Artificial Sequence: Synthetic oligonucleotide
uccuaaauaaggaucuaac

SEQ ID NO: 3195416 - RNA, 19 nt, Artificial Sequence
  Description of Artificial Sequence: Synthetic oligonucleotide
aaauaacagaagaacagga

SEQ ID NO: 3195417 - RNA, 19 nt, Artificial Sequence
  Description of Artificial Sequence: Synthetic oligonucleotide
uacuuaucagaaaacuaug

SEQ ID NO: 3195418 - RNA, 19 nt, Artificial Sequence
  Description of Artificial Sequence: Synthetic oligonucleotide
aaaacuaugaggacucuga

SEQ ID NO: 3195419 - RNA, 19 nt, Artificial Sequence
  Description of Artificial Sequence: Synthetic oligonucleotide
uaagccacugguguaaagg

SEQ ID NO: 3195420 - RNA, 19 nt, Artificial Sequence
  Description of Artificial Sequence: Synthetic oligonucleotide
acaggaauaagauugggua

SEQ ID NO: 3195421 - RNA, 19 nt, Artificial Sequence
  Description of Artificial Sequence: Synthetic oligonucleotide
uuggguaguacuuaucaga

SEQ ID NO: 3195422 - RNA, 19 nt, Artificial Sequence
  Description of Artificial Sequence: Synthetic oligonucleotide
aaaagcaaaugaauucauc

SEQ ID NO: 3195423 - RNA, 19 nt, Artificial Sequence
  Description of Artificial Sequence: Synthetic oligonucleotide
aaauaaggaucuaacuaag

SEQ ID NO: 3195424 - RNA, 19 nt, Artificial Sequence
  Description of Artificial Sequence: Synthetic oligonucleotide
auaugugagcauauggggc

SEQ ID NO: 3195425 - RNA, 19 nt, Artificial Sequence
  Description of Artificial Sequence: Synthetic oligonucleotide
agcaaaugaauucaucacu

SEQ ID NO: 3195426 - RNA, 19 nt, Artificial Sequence
  Description of Artificial Sequence: Synthetic oligonucleotide
uacugaauuacaaacuuuu

SEQ ID NO: 3195427 - RNA, 19 nt, Artificial Sequence
  Description of Artificial Sequence: Synthetic oligonucleotide
ucuaacuaagccacuggug

SEQ ID NO: 3195428 - RNA, 19 nt, Artificial Sequence
  Description of Artificial Sequence: Synthetic oligonucleotide
ucagaaaacuaugaggacu

SEQ ID NO: 3195429 - RNA, 19 nt, Artificial Sequence
  Description of Artificial Sequence: Synthetic oligonucleotide
uaugugagcauauggggca

SEQ ID NO: 3195430 - RNA, 19 nt, Artificial Sequence
  Description of Artificial Sequence: Synthetic oligonucleotide
gauuggguaguacuuauca

SEQ ID NO: 3195431 - RNA, 19 nt, Artificial Sequence
  Description of Artificial Sequence: Synthetic oligonucleotide
ugaauucaucacuagcacc

SEQ ID NO: 3195432 - RNA, 19 nt, Artificial Sequence
  Description of Artificial Sequence: Synthetic oligonucleotide
ugcacaaugucuuugcaaa

SEQ ID NO: 3195433 - RNA, 19 nt, Artificial Sequence
  Description of Artificial Sequence: Synthetic oligonucleotide
uaacagaagaacaggaaua

SEQ ID NO: 3195434 - RNA, 19 nt, Artificial Sequence
  Description of Artificial Sequence: Synthetic oligonucleotide
agcaccaucaaaauaacug

SEQ ID NO: 3195435 - RNA, 19 nt, Artificial Sequence
  Description of Artificial Sequence: Synthetic oligonucleotide
acagaucccagcuauucuc

SEQ ID NO: 3195436 - RNA, 19 nt, Artificial Sequence
  Description of Artificial Sequence: Synthetic oligonucleotide
uacuacugaauuacaaacu

SEQ ID NO: 3195437 - RNA, 19 nt, Artificial Sequence
  Description of Artificial Sequence: Synthetic oligonucleotide
gauaccaaugcacaauguc

SEQ ID NO: 3195438 - RNA, 19 nt, Artificial Sequence
  Description of Artificial Sequence: Synthetic oligonucleotide
acuagcaccaucaaaauaa

SEQ ID NO: 3195439 - RNA, 19 nt, Artificial Sequence
  Description of Artificial Sequence: Synthetic oligonucleotide
gaucuaacuaagccacugg

SEQ ID NO: 3195440 - RNA, 19 nt, Artificial Sequence
  Description of Artificial Sequence: Synthetic oligonucleotide
gaauucaucacuagcacca

SEQ ID NO: 3195441 - RNA, 19 nt, Artificial Sequence
  Description of Artificial Sequence: Synthetic oligonucleotide
cuaaauaaggaucuaacua

SEQ ID NO: 3195442 - RNA, 19 nt, Artificial Sequence
  Description of Artificial Sequence: Synthetic oligonucleotide
ugaguaccagaguugaggc

SEQ ID NO: 3195443 - RNA, 19 nt, Artificial Sequence
  Description of Artificial Sequence: Synthetic oligonucleotide
uuugcaaagcaucuauaaa

SEQ ID NO: 3195444 - RNA, 19 nt, Artificial Sequence
  Description of Artificial Sequence: Synthetic oligonucleotide
aaagccaaacaguuuacua

SEQ ID NO: 3195445 - RNA, 19 nt, Artificial Sequence
  Description of Artificial Sequence: Synthetic oligonucleotide
aucagaaaacuaugaggac

SEQ ID NO: 3195446 - RNA, 19 nt, Artificial Sequence
  Description of Artificial Sequence: Synthetic oligonucleotide
guaaaagccaaacaguuua

SEQ ID NO: 3195447 - RNA, 19 nt, Artificial Sequence
  Description of Artificial Sequence: Synthetic oligonucleotide
gaugccaacagaucccagc

SEQ ID NO: 3195448 - RNA, 19 nt, Artificial Sequence
  Description of Artificial Sequence: Synthetic oligonucleotide
ugggcccugaaaauaacag

SEQ ID NO: 3195449 - RNA, 19 nt, Artificial Sequence
  Description of Artificial Sequence: Synthetic oligonucleotide
uaacuguaaaagccaaaca

SEQ ID NO: 3195450 - RNA, 19 nt, Artificial Sequence
  Description of Artificial Sequence: Synthetic oligonucleotide
cagaagaacaggaauaaga

SEQ ID NO: 3195451 - RNA, 19 nt, Artificial Sequence
  Description of Artificial Sequence: Synthetic oligonucleotide
uguaaaggguccauccaga

SEQ ID NO: 3195452 - RNA, 19 nt, Artificial Sequence
  Description of Artificial Sequence: Synthetic oligonucleotide
acuacugaauuacaaacuu

SEQ ID NO: 3195453 - RNA, 19 nt, Artificial Sequence
  Description of Artificial Sequence: Synthetic oligonucleotide
ugguguaaaggguccaucc

SEQ ID NO: 3195454 - RNA, 19 nt, Artificial Sequence
  Description of Artificial Sequence: Synthetic oligonucleotide
cauccagauaccaaugcac

SEQ ID NO: 3195455 - RNA, 19 nt, Artificial Sequence
  Description of Artificial Sequence: Synthetic oligonucleotide
agugaugccaacagauccc

SEQ ID NO: 3195456 - RNA, 19 nt, Artificial Sequence
  Description of Artificial Sequence: Synthetic oligonucleotide
aucacuagcaccaucaaaa

SEQ ID NO: 3195457 - RNA, 19 nt, Artificial Sequence
  Description of Artificial Sequence: Synthetic oligonucleotide
aauaacagaagaacaggaa

SEQ ID NO: 3195458 - RNA, 19 nt, Artificial Sequence
  Description of Artificial Sequence: Synthetic oligonucleotide
cagaaaacuaugaggacuc

SEQ ID NO: 3195459 - RNA, 19 nt, Artificial Sequence
  Description of Artificial Sequence: Synthetic oligonucleotide
caggaauaagauuggguag

SEQ ID NO: 3195460 - RNA, 19 nt, Artificial Sequence
  Description of Artificial Sequence: Synthetic oligonucleotide
aacagaagaacaggaauaa

SEQ ID NO: 3195461 - RNA, 19 nt, Artificial Sequence
  Description of Artificial Sequence: Synthetic oligonucleotide
auuggguaguacuuaucag

SEQ ID NO: 3195462 - RNA, 19 nt, Artificial Sequence
  Description of Artificial Sequence: Synthetic oligonucleotide
uggguaguacuuaucagaa

SEQ ID NO: 3195463 - RNA, 19 nt, Artificial Sequence
  Description of Artificial Sequence: Synthetic oligonucleotide
uaguacuuaucagaaaacu

SEQ ID NO: 3195464 - RNA, 19 nt, Artificial Sequence
  Description of Artificial Sequence: Synthetic oligonucleotide
agccaaacaguuuacuacu

SEQ ID NO: 3195465 - RNA, 19 nt, Artificial Sequence
  Description of Artificial Sequence: Synthetic oligonucleotide
acaaugucuuugcaaagca

SEQ ID NO: 3195466 - RNA, 19 nt, Artificial Sequence
  Description of Artificial Sequence: Synthetic oligonucleotide
aacagaucccagcuauucu

SEQ ID NO: 3195467 - RNA, 19 nt, Artificial Sequence
  Description of Artificial Sequence: Synthetic oligonucleotide
caaaugaauucaucacuag

SEQ ID NO: 3195468 - RNA, 19 nt, Artificial Sequence
  Description of Artificial Sequence: Synthetic oligonucleotide
uccauccagauaccaaugc

SEQ ID NO: 3195469 - RNA, 19 nt, Artificial Sequence
  Description of Artificial Sequence: Synthetic oligonucleotide
aaugcacaaugucuuugca

SEQ ID NO: 3195470 - RNA, 19 nt, Artificial Sequence
  Description of Artificial Sequence: Synthetic oligonucleotide
ucaguguuugccauguaua

SEQ ID NO: 3195471 - RNA, 19 nt, Artificial Sequence
  Description of Artificial Sequence: Synthetic oligonucleotide
aagaaauagguguugaacc

SEQ ID NO: 3195472 - RNA, 19 nt, Artificial Sequence
  Description of Artificial Sequence: Synthetic oligonucleotide
gaagaaguaaauuaauugc

SEQ ID NO: 3195473 - RNA, 19 nt, Artificial Sequence
  Description of Artificial Sequence: Synthetic oligonucleotide
ugucauaucuccaauauug

SEQ ID NO: 3195474 - RNA, 19 nt, Artificial Sequence
  Description of Artificial Sequence: Synthetic oligonucleotide
guuguuucgauuuucauag

SEQ ID NO: 3195475 - RNA, 19 nt, Artificial Sequence
  Description of Artificial Sequence: Synthetic oligonucleotide
ugaagaaguaaauuaauug

SEQ ID NO: 3195476 - RNA, 19 nt, Artificial Sequence
  Description of Artificial Sequence: Synthetic oligonucleotide
ucugaaaucaguuuggggu

SEQ ID NO: 3195477 - RNA, 19 nt, Artificial Sequence
  Description of Artificial Sequence: Synthetic oligonucleotide
uuuucauagagccaguacc

SEQ ID NO: 3195478 - RNA, 19 nt, Artificial Sequence
  Description of Artificial Sequence: Synthetic oligonucleotide
aucaguuugggguagcucc

SEQ ID NO: 3195479 - RNA, 19 nt, Artificial Sequence
  Description of Artificial Sequence: Synthetic oligonucleotide
aauaucgcucaucucuucc

SEQ ID NO: 3195480 - RNA, 19 nt, Artificial Sequence
  Description of Artificial Sequence: Synthetic oligonucleotide
aaguaaauuaauugcuguc

SEQ ID NO: 3195481 - RNA, 19 nt, Artificial Sequence
  Description of Artificial Sequence: Synthetic oligonucleotide
uuucgauuuucauagagcc

SEQ ID NO: 3195482 - RNA, 19 nt, Artificial Sequence
  Description of Artificial Sequence: Synthetic oligonucleotide
uucgaauccaaucaaacac

SEQ ID NO: 3195483 - RNA, 19 nt, Artificial Sequence
  Description of Artificial Sequence: Synthetic oligonucleotide
aaauuaauugcugucuccg

SEQ ID NO: 3195484 - RNA, 19 nt, Artificial Sequence
  Description of Artificial Sequence: Synthetic oligonucleotide
aauuaauugcugucuccgc

SEQ ID NO: 3195485 - RNA, 19 nt, Artificial Sequence
  Description of Artificial Sequence: Synthetic oligonucleotide
aauacuaaagacccuuuga

SEQ ID NO: 3195486 - RNA, 19 nt, Artificial Sequence
  Description of Artificial Sequence: Synthetic oligonucleotide
auaucuccaauauugguuc

SEQ ID NO: 3195487 - RNA, 19 nt, Artificial Sequence
  Description of Artificial Sequence: Synthetic oligonucleotide
acuaaagacccuuugaaga

SEQ ID NO: 3195488 - RNA, 19 nt, Artificial Sequence
  Description of Artificial Sequence: Synthetic oligonucleotide
aauauugguuccuuuaaaa

SEQ ID NO: 3195489 - RNA, 19 nt, Artificial Sequence
  Description of Artificial Sequence: Synthetic oligonucleotide
aauccaaucaaacacugua

SEQ ID NO: 3195490 - RNA, 19 nt, Artificial Sequence
  Description of Artificial Sequence: Synthetic oligonucleotide
uagguguugaaccucaccc

SEQ ID NO: 3195491 - RNA, 19 nt, Artificial Sequence
  Description of Artificial Sequence: Synthetic oligonucleotide
uccagugaggauuuggagg

SEQ ID NO: 3195492 - RNA, 19 nt, Artificial Sequence
  Description of Artificial Sequence: Synthetic oligonucleotide
ucgauuuucauagagccag

SEQ ID NO: 3195493 - RNA, 19 nt, Artificial Sequence
  Description of Artificial Sequence: Synthetic oligonucleotide
uguuucgauuuucauagag

SEQ ID NO: 3195494 - RNA, 19 nt, Artificial Sequence
  Description of Artificial Sequence: Synthetic oligonucleotide
auuuucauagagccaguac

SEQ ID NO: 3195495 - RNA, 19 nt, Artificial Sequence
  Description of Artificial Sequence: Synthetic oligonucleotide
uauugcggaagaaauaggu

SEQ ID NO: 3195496 - RNA, 19 nt, Artificial Sequence
  Description of Artificial Sequence: Synthetic oligonucleotide
accauauugguuccucucc

SEQ ID NO: 3195497 - RNA, 19 nt, Artificial Sequence
  Description of Artificial Sequence: Synthetic oligonucleotide
uaaaaggcaguguccaggg

SEQ ID NO: 3195498 - RNA, 19 nt, Artificial Sequence
  Description of Artificial Sequence: Synthetic oligonucleotide
aagaaguaaauuaauugcu

SEQ ID NO: 3195499 - RNA, 19 nt, Artificial Sequence
  Description of Artificial Sequence: Synthetic oligonucleotide
uuucauagagccaguacca

SEQ ID NO: 3195500 - RNA, 19 nt, Artificial Sequence
  Description of Artificial Sequence: Synthetic oligonucleotide
aucuauacguugcaugggg

SEQ ID NO: 3195501 - RNA, 19 nt, Artificial Sequence
  Description of Artificial Sequence: Synthetic oligonucleotide
uaaauuaauugcugucucc

SEQ ID NO: 3195502 - RNA, 19 nt, Artificial Sequence
  Description of Artificial Sequence: Synthetic oligonucleotide
uacuaaagacccuuugaag

SEQ ID NO: 3195503 - RNA, 19 nt, Artificial Sequence
  Description of Artificial Sequence: Synthetic oligonucleotide
uuugaagaaguaaauuaau

SEQ ID NO: 3195504 - RNA, 19 nt, Artificial Sequence
  Description of Artificial Sequence: Synthetic oligonucleotide
uuucgaauccaaucaaaca

SEQ ID NO: 3195505 - RNA, 19 nt, Artificial Sequence
  Description of Artificial Sequence: Synthetic oligonucleotide
uugcggaagaaauaggugu

SEQ ID NO: 3195506 - RNA, 19 nt, Artificial Sequence
  Description of Artificial Sequence: Synthetic oligonucleotide
auaucgcucaucucuuccc

SEQ ID NO: 3195507 - RNA, 19 nt, Artificial Sequence
  Description of Artificial Sequence: Synthetic oligonucleotide
aguaaauuaauugcugucu

SEQ ID NO: 3195508 - RNA, 19 nt, Artificial Sequence
  Description of Artificial Sequence: Synthetic oligonucleotide
  modified_base (3)..(3): a, c, u, g, unknown or other
ucnuaaaaggcagugucca

SEQ ID NO: 3195509 - RNA, 19 nt, Artificial Sequence
  Description of Artificial Sequence: Synthetic oligonucleotide
gaagaaauagguguugaac

SEQ ID NO: 3195510 - RNA, 19 nt, Artificial Sequence
  Description of Artificial Sequence: Synthetic oligonucleotide
auagguguugaaccucacc

SEQ ID NO: 3195511 - RNA, 19 nt, Artificial Sequence
  Description of Artificial Sequence: Synthetic oligonucleotide
agaaauagguguugaaccu

SEQ ID NO: 3195512 - RNA, 19 nt, Artificial Sequence
  Description of Artificial Sequence: Synthetic oligonucleotide
uuccacgccauccagugag

SEQ ID NO: 3195513 - RNA, 19 nt, Artificial Sequence
  Description of Artificial Sequence: Synthetic oligonucleotide
  modified_base (4)..(4): a, c, u, g, unknown or other
cucnuaaaaggcagugucc

SEQ ID NO: 3195514 - RNA, 19 nt, Artificial Sequence
  Description of Artificial Sequence: Synthetic oligonucleotide
cacuucaccauauugguuc

SEQ ID NO: 3195515 - RNA, 19 nt, Artificial Sequence
  Description of Artificial Sequence: Synthetic oligonucleotide
cuuucgaauccaaucaaac

SEQ ID NO: 3195516 - RNA, 19 nt, Artificial Sequence
  Description of Artificial Sequence: Synthetic oligonucleotide
aaauaucgcucaucucuuc

SEQ ID NO: 3195517 - RNA, 19 nt, Artificial Sequence
  Description of Artificial Sequence: Synthetic oligonucleotide
auugguuccucuccuuucg

SEQ ID NO: 3195518 - RNA, 19 nt, Artificial Sequence
  Description of Artificial Sequence: Synthetic oligonucleotide
uucugaaaucaguuugggg

SEQ ID NO: 3195519 - RNA, 19 nt, Artificial Sequence
  Description of Artificial Sequence: Synthetic oligonucleotide
uccuuguugaucuucugug

SEQ ID NO: 3195520 - RNA, 19 nt, Artificial Sequence
  Description of Artificial Sequence: Synthetic oligonucleotide
uugaagaaguaaauuaauu

SEQ ID NO: 3195521 - RNA, 19 nt, Artificial Sequence
  Description of Artificial Sequence: Synthetic oligonucleotide
auuaauugcugucuccgcu

SEQ ID NO: 3195522 - RNA, 19 nt, Artificial Sequence
  Description of Artificial Sequence: Synthetic oligonucleotide
uucugugugugccugguca

SEQ ID NO: 3195523 - RNA, 19 nt, Artificial Sequence
  Description of Artificial Sequence: Synthetic oligonucleotide
uguuguuucgauuuucaua

SEQ ID NO: 3195524 - RNA, 19 nt, Artificial Sequence
  Description of Artificial Sequence: Synthetic oligonucleotide
ucgaauccaaucaaacacu

SEQ ID NO: 3195525 - RNA, 19 nt, Artificial Sequence
  Description of Artificial Sequence: Synthetic oligonucleotide
auacuaaagacccuuugaa

SEQ ID NO: 3195526 - RNA, 19 nt, Artificial Sequence
  Description of Artificial Sequence: Synthetic oligonucleotide
uccaaucaaacacuguauc

SEQ ID NO: 3195527 - RNA, 19 nt, Artificial Sequence
  Description of Artificial Sequence: Synthetic oligonucleotide
gccaguaccagcuauugcg

SEQ ID NO: 3195528 - RNA, 19 nt, Artificial Sequence
  Description of Artificial Sequence: Synthetic oligonucleotide
acuucaccauauugguucc

SEQ ID NO: 3195529 - RNA, 19 nt, Artificial Sequence
  Description of Artificial Sequence: Synthetic oligonucleotide
uggacgaaggcaucuauac

SEQ ID NO: 3195530 - RNA, 19 nt, Artificial Sequence
  Description of Artificial Sequence: Synthetic oligonucleotide
gauuccacgccauccagug

SEQ ID NO: 3195531 - RNA, 19 nt, Artificial Sequence
  Description of Artificial Sequence: Synthetic oligonucleotide
guugcauggggauuccacg

SEQ ID NO: 3195532 - RNA, 19 nt, Artificial Sequence
  Description of Artificial Sequence: Synthetic oligonucleotide
  modified_base (12)..(12): a, c, u, g, unknown or other
ugucuccgcucnuaaaagg

SEQ ID NO: 3195533 - RNA, 19 nt, Artificial Sequence
  Description of Artificial Sequence: Synthetic oligonucleotide
cuuugaagaaguaaauuaa

SEQ ID NO: 3195534 - RNA, 19 nt, Artificial Sequence
  Description of Artificial Sequence: Synthetic oligonucleotide
  modified_base (10)..(10): a, c, u, g, unknown or other
ucuccgcucnuaaaaggca

SEQ ID NO: 3195535 - RNA, 19 nt, Artificial Sequence
  Description of Artificial Sequence: Synthetic oligonucleotide
gcaucuauacguugcaugg

SEQ ID NO: 3195536 - RNA, 19 nt, Artificial Sequence
  Description of Artificial Sequence: Synthetic oligonucleotide
ucaucucuuccccaugacc

SEQ ID NO: 3195537 - RNA, 19 nt, Artificial Sequence
  Description of Artificial Sequence: Synthetic oligonucleotide
ucuccuuucgaauccaauc

SEQ ID NO: 3195538 - RNA, 19 nt, Artificial Sequence
  Description of Artificial Sequence: Synthetic oligonucleotide
ucauaucuccaauauuggu

SEQ ID NO: 3195539 - RNA, 19 nt, Artificial Sequence
  Description of Artificial Sequence: Synthetic oligonucleotide
agaaguaaauuaauugcug

SEQ ID NO: 3195540 - RNA, 19 nt, Artificial Sequence
  Description of Artificial Sequence: Synthetic oligonucleotide
guaaauuaauugcugucuc

SEQ ID NO: 3195541 - RNA, 19 nt, Artificial Sequence
  Description of Artificial Sequence: Synthetic oligonucleotide
uugaaccucacccucacuu

SEQ ID NO: 3195542 - RNA, 19 nt, Artificial Sequence
  Description of Artificial Sequence: Synthetic oligonucleotide
gaaguaaauuaauugcugu

SEQ ID NO: 3195543 - RNA, 19 nt, Artificial Sequence
  Description of Artificial Sequence: Synthetic oligonucleotide
gaaggcaucuauacguugc

SEQ ID NO: 3195544 - RNA, 19 nt, Artificial Sequence
  Description of Artificial Sequence: Synthetic oligonucleotide
uugaucuucugugugugcc

SEQ ID NO: 3195545 - RNA, 19 nt, Artificial Sequence
  Description of Artificial Sequence: Synthetic oligonucleotide
ucauagagccaguaccagc

SEQ ID NO: 3195546 - RNA, 19 nt, Artificial Sequence
  Description of Artificial Sequence: Synthetic oligonucleotide
aaaaggcaguguccagggg

SEQ ID NO: 3195547 - RNA, 19 nt, Artificial Sequence
  Description of Artificial Sequence: Synthetic oligonucleotide
gacgaaggcaucuauacgu

SEQ ID NO: 3195548 - RNA, 19 nt, Artificial Sequence
  Description of Artificial Sequence: Synthetic oligonucleotide
uccaauauugguuccuuua

SEQ ID NO: 3195549 - RNA, 19 nt, Artificial Sequence
  Description of Artificial Sequence: Synthetic oligonucleotide
uuccuuguugaucuucugu

SEQ ID NO: 3195550 - RNA, 19 nt, Artificial Sequence
  Description of Artificial Sequence: Synthetic oligonucleotide
uucgauuuucauagagcca

SEQ ID NO: 3195551 - RNA, 19 nt, Artificial Sequence
  Description of Artificial Sequence: Synthetic oligonucleotide
aaauagguguugaaccuca

SEQ ID NO: 3195552 - RNA, 19 nt, Artificial Sequence
  Description of Artificial Sequence: Synthetic oligonucleotide
aaucaguuugggguagcuc

SEQ ID NO: 3195553 - RNA, 19 nt, Artificial Sequence
  Description of Artificial Sequence: Synthetic oligonucleotide
cuuguugaucuucugugug

SEQ ID NO: 3195554 - RNA, 19 nt, Artificial Sequence
  Description of Artificial Sequence: Synthetic oligonucleotide
gcuauugcggaagaaauag

SEQ ID NO: 3195555 - RNA, 19 nt, Artificial Sequence
  Description of Artificial Sequence: Synthetic oligonucleotide
uuaauugcugucuccgcuc

SEQ ID NO: 3195556 - RNA, 19 nt, Artificial Sequence
  Description of Artificial Sequence: Synthetic oligonucleotide
aguccuguuguuucgauuu

SEQ ID NO: 3195557 - RNA, 19 nt, Artificial Sequence
  Description of Artificial Sequence: Synthetic oligonucleotide
cuauugcggaagaaauagg

SEQ ID NO: 3195558 - RNA, 19 nt, Artificial Sequence
  Description of Artificial Sequence: Synthetic oligonucleotide
ucuauacguugcaugggga

SEQ ID NO: 3195559 - RNA, 19 nt, Artificial Sequence
  Description of Artificial Sequence: Synthetic oligonucleotide
guuucgauuuucauagagc

SEQ ID NO: 3195560 - RNA, 19 nt, Artificial Sequence
  Description of Artificial Sequence: Synthetic oligonucleotide
ugccuggucauucucgcug

SEQ ID NO: 3195561 - RNA, 19 nt, Artificial Sequence
  Description of Artificial Sequence: Synthetic oligonucleotide
uaaagacccuuugaagaag

SEQ ID NO: 3195562 - RNA, 19 nt, Artificial Sequence
  Description of Artificial Sequence: Synthetic oligonucleotide
ccucacuucaccauauugg

SEQ ID NO: 3195563 - RNA, 19 nt, Artificial Sequence
  Description of Artificial Sequence: Synthetic oligonucleotide
caucucuuccccaugacca

SEQ ID NO: 3195564 - RNA, 19 nt, Artificial Sequence
  Description of Artificial Sequence: Synthetic oligonucleotide
gucauaucuccaauauugg

SEQ ID NO: 3195565 - RNA, 19 nt, Artificial Sequence
  Description of Artificial Sequence: Synthetic oligonucleotide
uaucgcucaucucuucccc

SEQ ID NO: 3195566 - RNA, 19 nt, Artificial Sequence
  Description of Artificial Sequence: Synthetic oligonucleotide
aaggcaucuauacguugca

SEQ ID NO: 3195567 - RNA, 19 nt, Artificial Sequence
  Description of Artificial Sequence: Synthetic oligonucleotide
ccagugaggauuuggaggg

SEQ ID NO: 3195568 - RNA, 19 nt, Artificial Sequence
  Description of Artificial Sequence: Synthetic oligonucleotide
auacguugcauggggauuc

SEQ ID NO: 3195569 - RNA, 19 nt, Artificial Sequence
  Description of Artificial Sequence: Synthetic oligonucleotide
uuccccaugaccagacaug

SEQ ID NO: 3195570 - RNA, 19 nt, Artificial Sequence
  Description of Artificial Sequence: Synthetic oligonucleotide
uucucgcugucauaucucc

SEQ ID NO: 3195571 - RNA, 19 nt, Artificial Sequence
  Description of Artificial Sequence: Synthetic oligonucleotide
uuuaaauuaacuaauaaaa

SEQ ID NO: 3195572 - RNA, 19 nt, Artificial Sequence
  Description of Artificial Sequence: Synthetic oligonucleotide
aaucaugacauucacaaag

SEQ ID NO: 3195573 - RNA, 19 nt, Artificial Sequence
  Description of Artificial Sequence: Synthetic oligonucleotide
aauaaaacagggaaaaugg

SEQ ID NO: 3195574 - RNA, 19 nt, Artificial Sequence
  Description of Artificial Sequence: Synthetic oligonucleotide
aaauuaacuaauaaaacag

SEQ ID NO: 3195575 - RNA, 19 nt, Artificial Sequence
  Description of Artificial Sequence: Synthetic oligonucleotide
uaaauuaacuaauaaaaca

SEQ ID NO: 3195576 - RNA, 19 nt, Artificial Sequence
  Description of Artificial Sequence: Synthetic oligonucleotide
aacaaacugaacuagagga

SEQ ID NO: 3195577 - RNA, 19 nt, Artificial Sequence
  Description of Artificial Sequence: Synthetic oligonucleotide
uuuggcaucaacuugaaca

SEQ ID NO: 3195578 - RNA, 19 nt, Artificial Sequence
  Description of Artificial Sequence: Synthetic oligonucleotide
uaaacauugaucuaaauau

SEQ ID NO: 3195579 - RNA, 19 nt, Artificial Sequence
  Description of Artificial Sequence: Synthetic oligonucleotide
uuauuuauaagacuggaac

SEQ ID NO: 3195580 - RNA, 19 nt, Artificial Sequence
  Description of Artificial Sequence: Synthetic oligonucleotide
uuuaacuuaaguaaacaca

SEQ ID NO: 3195581 - RNA, 19 nt, Artificial Sequence
  Description of Artificial Sequence: Synthetic oligonucleotide
uuauccaugucuaaguggg

SEQ ID NO: 3195582 - RNA, 19 nt, Artificial Sequence
  Description of Artificial Sequence: Synthetic oligonucleotide
aacuugaacagguuucucc

SEQ ID NO: 3195583 - RNA, 19 nt, Artificial Sequence
  Description of Artificial Sequence: Synthetic oligonucleotide
aaguaaacacauuauaugu

SEQ ID NO: 3195584 - RNA, 19 nt, Artificial Sequence
  Description of Artificial Sequence: Synthetic oligonucleotide
uuuacagaaaacaaacuga

SEQ ID NO: 3195585 - RNA, 19 nt, Artificial Sequence
  Description of Artificial Sequence: Synthetic oligonucleotide
aggauaucaguuuuguucc

SEQ ID NO: 3195586 - RNA, 19 nt, Artificial Sequence
  Description of Artificial Sequence: Synthetic oligonucleotide
aagcgauuguuuuauaaac

SEQ ID NO: 3195587 - RNA, 19 nt, Artificial Sequence
  Description of Artificial Sequence: Synthetic oligonucleotide
acagaaaacaaacugaacu

SEQ ID NO: 3195588 - RNA, 19 nt, Artificial Sequence
  Description of Artificial Sequence: Synthetic oligonucleotide
uuaaauuaacuaauaaaac

SEQ ID NO: 3195589 - RNA, 19 nt, Artificial Sequence
  Description of Artificial Sequence: Synthetic oligonucleotide
uguuuuauaaacauugauc

SEQ ID NO: 3195590 - RNA, 19 nt, Artificial Sequence
  Description of Artificial Sequence: Synthetic oligonucleotide
gauuguuuuauaaacauug

SEQ ID NO: 3195591 - RNA, 19 nt, Artificial Sequence
  Description of Artificial Sequence: Synthetic oligonucleotide
auuuacagaaaacaaacug

SEQ ID NO: 3195592 - RNA, 19 nt, Artificial Sequence
  Description of Artificial Sequence: Synthetic oligonucleotide
uaacuaauaaaacagggaa

SEQ ID NO: 3195593 - RNA, 19 nt, Artificial Sequence
  Description of Artificial Sequence: Synthetic oligonucleotide
aaacaaacugaacuagagg

SEQ ID NO: 3195594 - RNA, 19 nt, Artificial Sequence
  Description of Artificial Sequence: Synthetic oligonucleotide
cuauuuacagaaaacaaac

SEQ ID NO: 3195595 - RNA, 19 nt, Artificial Sequence
  Description of Artificial Sequence: Synthetic oligonucleotide
uuaacuuaaguaaacacau

SEQ ID NO: 3195596 - RNA, 19 nt, Artificial Sequence
  Description of Artificial Sequence: Synthetic oligonucleotide
uaaguaaacacauuauaug

SEQ ID NO: 3195597 - RNA, 19 nt, Artificial Sequence
  Description of Artificial Sequence: Synthetic oligonucleotide
ugaucuaaauauuuuauac

SEQ ID NO: 3195598 - RNA, 19 nt, Artificial Sequence
  Description of Artificial Sequence: Synthetic oligonucleotide
aaauauuuuauaccugugu

SEQ ID NO: 3195599 - RNA, 19 nt, Artificial Sequence
  Description of Artificial Sequence: Synthetic oligonucleotide
acuggaacagucuagagug

SEQ ID NO: 3195600 - RNA, 19 nt, Artificial Sequence
  Description of Artificial Sequence: Synthetic oligonucleotide
aauuaacuaauaaaacagg

SEQ ID NO: 3195601 - RNA, 19 nt, Artificial Sequence
  Description of Artificial Sequence: Synthetic oligonucleotide
uuaaguaaacacauuauau

SEQ ID NO: 3195602 - RNA, 19 nt, Artificial Sequence
  Description of Artificial Sequence: Synthetic oligonucleotide
aucuaaauauuuuauaccu

SEQ ID NO: 3195603 - RNA, 19 nt, Artificial Sequence
  Description of Artificial Sequence: Synthetic oligonucleotide
ucaguuuuguuccaaagca

SEQ ID NO: 3195604 - RNA, 19 nt, Artificial Sequence
  Description of Artificial Sequence: Synthetic oligonucleotide
gaucuaaauauuuuauacc

SEQ ID NO: 3195605 - RNA, 19 nt, Artificial Sequence
  Description of Artificial Sequence: Synthetic oligonucleotide
uuaacuaauaaaacaggga

SEQ ID NO: 3195606 - RNA, 19 nt, Artificial Sequence
  Description of Artificial Sequence: Synthetic oligonucleotide
aauauuuuauaccugugua

SEQ ID NO: 3195607 - RNA, 19 nt, Artificial Sequence
  Description of Artificial Sequence: Synthetic oligonucleotide
aucaguuuuguuccaaagc

SEQ ID NO: 3195608 - RNA, 19 nt, Artificial Sequence
  Description of Artificial Sequence: Synthetic oligonucleotide
uaauaaaacagggaaaaug

SEQ ID NO: 3195609 - RNA, 19 nt, Artificial Sequence
  Description of Artificial Sequence: Synthetic oligonucleotide
uaaaacagggaaaauggca

SEQ ID NO: 3195610 - RNA, 19 nt, Artificial Sequence
  Description of Artificial Sequence: Synthetic oligonucleotide
uuuauaaacauugaucuaa

SEQ ID NO: 3195611 - RNA, 19 nt, Artificial Sequence
  Description of Artificial Sequence: Synthetic oligonucleotide
aauacuuuggcaucaacuu

SEQ ID NO: 3195612 - RNA, 19 nt, Artificial Sequence
  Description of Artificial Sequence: Synthetic oligonucleotide
auuaacuaauaaaacaggg

SEQ ID NO: 3195613 - RNA, 19 nt, Artificial Sequence
  Description of Artificial Sequence: Synthetic oligonucleotide
uauuuauaagacuggaaca

SEQ ID NO: 3195614 - RNA, 19 nt, Artificial Sequence
  Description of Artificial Sequence: Synthetic oligonucleotide
gaggauaucaguuuuguuc

SEQ ID NO: 3195615 - RNA, 19 nt, Artificial Sequence
  Description of Artificial Sequence: Synthetic oligonucleotide
aacuuaaguaaacacauua

SEQ ID NO: 3195616 - RNA, 19 nt, Artificial Sequence
  Description of Artificial Sequence: Synthetic oligonucleotide
uuuuaacuuaaguaaacac

SEQ ID NO: 3195617 - RNA, 19 nt, Artificial Sequence
  Description of Artificial Sequence: Synthetic oligonucleotide
uuuauccaugucuaagugg

SEQ ID NO: 3195618 - RNA, 19 nt, Artificial Sequence
  Description of Artificial Sequence: Synthetic oligonucleotide
guuuuauaaacauugaucu

SEQ ID NO: 3195619 - RNA, 19 nt, Artificial Sequence
  Description of Artificial Sequence: Synthetic oligonucleotide
aaaauggcauaggagcugc

SEQ ID NO: 3195620 - RNA, 19 nt, Artificial Sequence
  Description of Artificial Sequence: Synthetic oligonucleotide
auuuauaagacuggaacag

SEQ ID NO: 3195621 - RNA, 19 nt, Artificial Sequence
  Description of Artificial Sequence: Synthetic oligonucleotide
uuggcaguaaauacuuugg

SEQ ID NO: 3195622 - RNA, 19 nt, Artificial Sequence
  Description of Artificial Sequence: Synthetic oligonucleotide
aaaacaaacugaacuagag

SEQ ID NO: 3195623 - RNA, 19 nt, Artificial Sequence
  Description of Artificial Sequence: Synthetic oligonucleotide
ucaguuuaaauuaacuaau

SEQ ID NO: 3195624 - RNA, 19 nt, Artificial Sequence
  Description of Artificial Sequence: Synthetic oligonucleotide
auaguguuuauccaugucu

SEQ ID NO: 3195625 - RNA, 19 nt, Artificial Sequence
  Description of Artificial Sequence: Synthetic oligonucleotide
acugucaccaagcauagug

SEQ ID NO: 3195626 - RNA, 19 nt, Artificial Sequence
  Description of Artificial Sequence: Synthetic oligonucleotide
auaaacauugaucuaaaua

SEQ ID NO: 3195627 - RNA, 19 nt, Artificial Sequence
  Description of Artificial Sequence: Synthetic oligonucleotide
ucuaaauauuuuauaccug

SEQ ID NO: 3195628 - RNA, 19 nt, Artificial Sequence
  Description of Artificial Sequence: Synthetic oligonucleotide
uuacagaaaacaaacugaa

SEQ ID NO: 3195629 - RNA, 19 nt, Artificial Sequence
  Description of Artificial Sequence: Synthetic oligonucleotide
aacagguuucuccuuggac

SEQ ID NO: 3195630 - RNA, 19 nt, Artificial Sequence
  Description of Artificial Sequence: Synthetic oligonucleotide
guuuaaauuaacuaauaaa

SEQ ID NO: 3195631 - RNA, 19 nt, Artificial Sequence
  Description of Artificial Sequence: Synthetic oligonucleotide
aaagcgauuguuuuauaaa

SEQ ID NO: 3195632 - RNA, 19 nt, Artificial Sequence
  Description of Artificial Sequence: Synthetic oligonucleotide
uccaaagcaggaaucauga

SEQ ID NO: 3195633 - RNA, 19 nt, Artificial Sequence
  Description of Artificial Sequence: Synthetic oligonucleotide
ugaacuagaggauaucagu

SEQ ID NO: 3195634 - RNA, 19 nt, Artificial Sequence
  Description of Artificial Sequence: Synthetic oligonucleotide
uuggcaucaacuugaacag

SEQ ID NO: 3195635 - RNA, 19 nt, Artificial Sequence
  Description of Artificial Sequence: Synthetic oligonucleotide
ucaugacauucacaaagcg

SEQ ID NO: 3195636 - RNA, 19 nt, Artificial Sequence
  Description of Artificial Sequence: Synthetic oligonucleotide
aaauacuuuggcaucaacu

SEQ ID NO: 3195637 - RNA, 19 nt, Artificial Sequence
  Description of Artificial Sequence: Synthetic oligonucleotide
gggaaaauggcauaggagc

SEQ ID NO: 3195638 - RNA, 19 nt, Artificial Sequence
  Description of Artificial Sequence: Synthetic oligonucleotide
uagagugucaguuuaaauu

SEQ ID NO: 3195639 - RNA, 19 nt, Artificial Sequence
  Description of Artificial Sequence: Synthetic oligonucleotide
uacuuuggcaucaacuuga

SEQ ID NO: 3195640 - RNA, 19 nt, Artificial Sequence
  Description of Artificial Sequence: Synthetic oligonucleotide
uaaauauuuuauaccugug

SEQ ID NO: 3195641 - RNA, 19 nt, Artificial Sequence
  Description of Artificial Sequence: Synthetic oligonucleotide
uuuauuuauaagacuggaa

SEQ ID NO: 3195642 - RNA, 19 nt, Artificial Sequence
  Description of Artificial Sequence: Synthetic oligonucleotide
ucuaagugggcacugugug

SEQ ID NO: 3195643 - RNA, 19 nt, Artificial Sequence
  Description of Artificial Sequence: Synthetic oligonucleotide
uggacugucaccaagcaua

SEQ ID NO: 3195644 - RNA, 19 nt, Artificial Sequence
  Description of Artificial Sequence: Synthetic oligonucleotide
aaagcaggaaucaugacau

SEQ ID NO: 3195645 - RNA, 19 nt, Artificial Sequence
  Description of Artificial Sequence: Synthetic oligonucleotide
uuuuauuuauaagacugga

SEQ ID NO: 3195646 - RNA, 19 nt, Artificial Sequence
  Description of Artificial Sequence: Synthetic oligonucleotide
uauuuacagaaaacaaacu

SEQ ID NO: 3195647 - RNA, 19 nt, Artificial Sequence
  Description of Artificial Sequence: Synthetic oligonucleotide
uguuuauccaugucuaagu

SEQ ID NO: 3195648 - RNA, 19 nt, Artificial Sequence
  Description of Artificial Sequence: Synthetic oligonucleotide
uuauaagacuggaacaguc

SEQ ID NO: 3195649 - RNA, 19 nt, Artificial Sequence
  Description of Artificial Sequence: Synthetic oligonucleotide
aguuuaaauuaacuaauaa

SEQ ID NO: 3195650 - RNA, 19 nt, Artificial Sequence
  Description of Artificial Sequence: Synthetic oligonucleotide
acuaauaaaacagggaaaa

SEQ ID NO: 3195651 - RNA, 19 nt, Artificial Sequence
  Description of Artificial Sequence: Synthetic oligonucleotide
ugcuauuuacagaaaacaa

SEQ ID NO: 3195652 - RNA, 19 nt, Artificial Sequence
  Description of Artificial Sequence: Synthetic oligonucleotide
gucaguuuaaauuaacuaa

SEQ ID NO: 3195653 - RNA, 19 nt, Artificial Sequence
  Description of Artificial Sequence: Synthetic oligonucleotide
ugucaguuuaaauuaacua

SEQ ID NO: 3195654 - RNA, 19 nt, Artificial Sequence
  Description of Artificial Sequence: Synthetic oligonucleotide
uauaagacuggaacagucu

SEQ ID NO: 3195655 - RNA, 19 nt, Artificial Sequence
  Description of Artificial Sequence: Synthetic oligonucleotide
auaaaacagggaaaauggc

SEQ ID NO: 3195656 - RNA, 19 nt, Artificial Sequence
  Description of Artificial Sequence: Synthetic oligonucleotide
acagguuucuccuuggacu

SEQ ID NO: 3195657 - RNA, 19 nt, Artificial Sequence
  Description of Artificial Sequence: Synthetic oligonucleotide
agaaaacaaacugaacuag

SEQ ID NO: 3195658 - RNA, 19 nt, Artificial Sequence
  Description of Artificial Sequence: Synthetic oligonucleotide
uuguuuuauaaacauugau

SEQ ID NO: 3195659 - RNA, 19 nt, Artificial Sequence
  Description of Artificial Sequence: Synthetic oligonucleotide
aaaacagggaaaauggcau

SEQ ID NO: 3195660 - RNA, 19 nt, Artificial Sequence
  Description of Artificial Sequence: Synthetic oligonucleotide
uaagacuggaacagucuag

SEQ ID NO: 3195661 - RNA, 19 nt, Artificial Sequence
  Description of Artificial Sequence: Synthetic oligonucleotide
guuggcaguaaauacuuug

SEQ ID NO: 3195662 - RNA, 19 nt, Artificial Sequence
  Description of Artificial Sequence: Synthetic oligonucleotide
agagugucaguuuaaauua

SEQ ID NO: 3195663 - RNA, 19 nt, Artificial Sequence
  Description of Artificial Sequence: Synthetic oligonucleotide
uuuguuccaaagcaggaau

SEQ ID NO: 3195664 - RNA, 19 nt, Artificial Sequence
  Description of Artificial Sequence: Synthetic oligonucleotide
aguuuuguuccaaagcagg

SEQ ID NO: 3195665 - RNA, 19 nt, Artificial Sequence
  Description of Artificial Sequence: Synthetic oligonucleotide
uaucaguuuuguuccaaag

SEQ ID NO: 3195666 - RNA, 19 nt, Artificial Sequence
  Description of Artificial Sequence: Synthetic oligonucleotide
uuauaaacauugaucuaaa

SEQ ID NO: 3195667 - RNA, 19 nt, Artificial Sequence
  Description of Artificial Sequence: Synthetic oligonucleotide
aacagggaaaauggcauag

SEQ ID NO: 3195668 - RNA, 19 nt, Artificial Sequence
  Description of Artificial Sequence: Synthetic oligonucleotide
uuccaaagcaggaaucaug

SEQ ID NO: 3195669 - RNA, 19 nt, Artificial Sequence
  Description of Artificial Sequence: Synthetic oligonucleotide
ggaaucaugacauucacaa

SEQ ID NO: 3195670 - RNA, 19 nt, Artificial Sequence
  Description of Artificial Sequence: Synthetic oligonucleotide
auauuuuauaccuguguau

SEQ ID NO: 3195671 - RNA, 19 nt, Artificial Sequence
  Description of Artificial Sequence: Synthetic oligonucleotide
aaaacaaacaaauaccaac

SEQ ID NO: 3195672 - RNA, 19 nt, Artificial Sequence
  Description of Artificial Sequence: Synthetic oligonucleotide
uuuaaagcaaauauuaagg

SEQ ID NO: 3195673 - RNA, 19 nt, Artificial Sequence
  Description of Artificial Sequence: Synthetic oligonucleotide
aauaauuuaaagcaaauau

SEQ ID NO: 3195674 - RNA, 19 nt, Artificial Sequence
  Description of Artificial Sequence: Synthetic oligonucleotide
auucuuaauaauuuaaagc

SEQ ID NO: 3195675 - RNA, 19 nt, Artificial Sequence
  Description of Artificial Sequence: Synthetic oligonucleotide
gaaauuaagauuuagauaa

SEQ ID NO: 3195676 - RNA, 19 nt, Artificial Sequence
  Description of Artificial Sequence: Synthetic oligonucleotide
uaagaaaacaaacaaauac

SEQ ID NO: 3195677 - RNA, 19 nt, Artificial Sequence
  Description of Artificial Sequence: Synthetic oligonucleotide
uucuuaauaauuuaaagca

SEQ ID NO: 3195678 - RNA, 19 nt, Artificial Sequence
  Description of Artificial Sequence: Synthetic oligonucleotide
aauucuuaauaauuuaaag

SEQ ID NO: 3195679 - RNA, 19 nt, Artificial Sequence
  Description of Artificial Sequence: Synthetic oligonucleotide
uaagauuuagauaagaaaa

SEQ ID NO: 3195680 - RNA, 19 nt, Artificial Sequence
  Description of Artificial Sequence: Synthetic oligonucleotide
cuuaagauguuuuagaaug

SEQ ID NO: 3195681 - RNA, 19 nt, Artificial Sequence
  Description of Artificial Sequence: Synthetic oligonucleotide
uuaaagucuauaaaaguag

SEQ ID NO: 3195682 - RNA, 19 nt, Artificial Sequence
  Description of Artificial Sequence: Synthetic oligonucleotide
uuuguuuccaaacaagaag

SEQ ID NO: 3195683 - RNA, 19 nt, Artificial Sequence
  Description of Artificial Sequence: Synthetic oligonucleotide
uguauuaaagucuauaaaa

SEQ ID NO: 3195684 - RNA, 19 nt, Artificial Sequence
  Description of Artificial Sequence: Synthetic oligonucleotide
uuguuuccaaacaagaagg

SEQ ID NO: 3195685 - RNA, 19 nt, Artificial Sequence
  Description of Artificial Sequence: Synthetic oligonucleotide
uuagauaagaaaacaaaca

SEQ ID NO: 3195686 - RNA, 19 nt, Artificial Sequence
  Description of Artificial Sequence: Synthetic oligonucleotide
aaauggcuuaaacucaagc

SEQ ID NO: 3195687 - RNA, 19 nt, Artificial Sequence
  Description of Artificial Sequence: Synthetic oligonucleotide
uuuagauaagaaaacaaac

SEQ ID NO: 3195688 - RNA, 19 nt, Artificial Sequence
  Description of Artificial Sequence: Synthetic oligonucleotide
aaagcaaauauuaaggcag

SEQ ID NO: 3195689 - RNA, 19 nt, Artificial Sequence
  Description of Artificial Sequence: Synthetic oligonucleotide
auuuaaagcaaauauuaag

SEQ ID NO: 3195690 - RNA, 19 nt, Artificial Sequence
  Description of Artificial Sequence: Synthetic oligonucleotide
ucaaacauuauuauuccag

SEQ ID NO: 3195691 - RNA, 19 nt, Artificial Sequence
  Description of Artificial Sequence: Synthetic oligonucleotide
uaauuuaaagcaaauauua

SEQ ID NO: 3195692 - RNA, 19 nt, Artificial Sequence
  Description of Artificial Sequence: Synthetic oligonucleotide
ugagcuaauauaaaguuga

SEQ ID NO: 3195693 - RNA, 19 nt, Artificial Sequence
  Description of Artificial Sequence: Synthetic oligonucleotide
uugaaaauggcuuaaacuc

SEQ ID NO: 3195694 - RNA, 19 nt, Artificial Sequence
  Description of Artificial Sequence: Synthetic oligonucleotide
aauauaaaguugauuuugc

SEQ ID NO: 3195695 - RNA, 19 nt, Artificial Sequence
  Description of Artificial Sequence: Synthetic oligonucleotide
uauuuuguuacgaugugag

SEQ ID NO: 3195696 - RNA, 19 nt, Artificial Sequence
  Description of Artificial Sequence: Synthetic oligonucleotide
uuagguuuuagauaguuga

SEQ ID NO: 3195697 - RNA, 19 nt, Artificial Sequence
  Description of Artificial Sequence: Synthetic oligonucleotide
aauauuaaggcagagcuga

SEQ ID NO: 3195698 - RNA, 19 nt, Artificial Sequence
  Description of Artificial Sequence: Synthetic oligonucleotide
aaacuguaaacucacuguc

SEQ ID NO: 3195699 - RNA, 19 nt, Artificial Sequence
  Description of Artificial Sequence: Synthetic oligonucleotide
uaauuuaaauuacuuaugu

SEQ ID NO: 3195700 - RNA, 19 nt, Artificial Sequence
  Description of Artificial Sequence: Synthetic oligonucleotide
aaaaguaggaggucagagg

SEQ ID NO: 3195701 - RNA, 19 nt, Artificial Sequence
  Description of Artificial Sequence: Synthetic oligonucleotide
uuuccaaacaagaagggug

SEQ ID NO: 3195702 - RNA, 19 nt, Artificial Sequence
  Description of Artificial Sequence: Synthetic oligonucleotide
uuuuagauaguugauauga

SEQ ID NO: 3195703 - RNA, 19 nt, Artificial Sequence
  Description of Artificial Sequence: Synthetic oligonucleotide
auauucauggaacagaagu

SEQ ID NO: 3195704 - RNA, 19 nt, Artificial Sequence
  Description of Artificial Sequence: Synthetic oligonucleotide
agucuauaaaaguaggagg

SEQ ID NO: 3195705 - RNA, 19 nt, Artificial Sequence
  Description of Artificial Sequence: Synthetic oligonucleotide
agagcugacauuuuguuuc

SEQ ID NO: 3195706 - RNA, 19 nt, Artificial Sequence
  Description of Artificial Sequence: Synthetic oligonucleotide
aauauaaauucuuaauaau

SEQ ID NO: 3195707 - RNA, 19 nt, Artificial Sequence
  Description of Artificial Sequence: Synthetic oligonucleotide
auaaaguugauuuugcaga

SEQ ID NO: 3195708 - RNA, 19 nt, Artificial Sequence
  Description of Artificial Sequence: Synthetic oligonucleotide
aauggcuuaaacucaagca

SEQ ID NO: 3195709 - RNA, 19 nt, Artificial Sequence
  Description of Artificial Sequence: Synthetic oligonucleotide
uaaagucuauaaaaguagg

SEQ ID NO: 3195710 - RNA, 19 nt, Artificial Sequence
  Description of Artificial Sequence: Synthetic oligonucleotide
aaaguaggaggucagaggu

SEQ ID NO: 3195711 - RNA, 19 nt, Artificial Sequence
  Description of Artificial Sequence: Synthetic oligonucleotide
uuaaagcaaauauuaaggc

SEQ ID NO: 3195712 - RNA, 19 nt, Artificial Sequence
  Description of Artificial Sequence: Synthetic oligonucleotide
ucuaugaaggaauuuuggg

SEQ ID NO: 3195713 - RNA, 19 nt, Artificial Sequence
  Description of Artificial Sequence: Synthetic oligonucleotide
uuugaaaauggcuuaaacu

SEQ ID NO: 3195714 - RNA, 19 nt, Artificial Sequence
  Description of Artificial Sequence: Synthetic oligonucleotide
ugaacaucaaacauuauua

SEQ ID NO: 3195715 - RNA, 19 nt, Artificial Sequence
  Description of Artificial Sequence: Synthetic oligonucleotide
acaucaaacauuauuauuc

SEQ ID NO: 3195716 - RNA, 19 nt, Artificial Sequence
  Description of Artificial Sequence: Synthetic oligonucleotide
uagauaagaaaacaaacaa

SEQ ID NO: 3195717 - RNA, 19 nt, Artificial Sequence
  Description of Artificial Sequence: Synthetic oligonucleotide
uuacuuauguauuaaaguc

SEQ ID NO: 3195718 - RNA, 19 nt, Artificial Sequence
  Description of Artificial Sequence: Synthetic oligonucleotide
gaugugagcuaauauaaag

SEQ ID NO: 3195719 - RNA, 19 nt, Artificial Sequence
  Description of Artificial Sequence: Synthetic oligonucleotide
uagauaguugauaugaaac

SEQ ID NO: 3195720 - RNA, 19 nt, Artificial Sequence
  Description of Artificial Sequence: Synthetic oligonucleotide
cugguuacaauauaaauuc

SEQ ID NO: 3195721 - RNA, 19 nt, Artificial Sequence
  Description of Artificial Sequence: Synthetic oligonucleotide
auuacuuauguauuaaagu

SEQ ID NO: 3195722 - RNA, 19 nt, Artificial Sequence
  Description of Artificial Sequence: Synthetic oligonucleotide
aacucaagcaguuuucuug

SEQ ID NO: 3195723 - RNA, 19 nt, Artificial Sequence
  Description of Artificial Sequence: Synthetic oligonucleotide
aagucuauaaaaguaggag

SEQ ID NO: 3195724 - RNA, 19 nt, Artificial Sequence
  Description of Artificial Sequence: Synthetic oligonucleotide
uuaagauuuagauaagaaa

SEQ ID NO: 3195725 - RNA, 19 nt, Artificial Sequence
  Description of Artificial Sequence: Synthetic oligonucleotide
uaugaaggaauuuugggcu

SEQ ID NO: 3195726 - RNA, 19 nt, Artificial Sequence
  Description of Artificial Sequence: Synthetic oligonucleotide
ugaaacuguaaacucacug

SEQ ID NO: 3195727 - RNA, 19 nt, Artificial Sequence
  Description of Artificial Sequence: Synthetic oligonucleotide
ucaauuugcaguuagguuu

SEQ ID NO: 3195728 - RNA, 19 nt, Artificial Sequence
  Description of Artificial Sequence: Synthetic oligonucleotide
uaaauucuuaauaauuuaa

SEQ ID NO: 3195729 - RNA, 19 nt, Artificial Sequence
  Description of Artificial Sequence: Synthetic oligonucleotide
uuaagauguuuuagaaugg

SEQ ID NO: 3195730 - RNA, 19 nt, Artificial Sequence
  Description of Artificial Sequence: Synthetic oligonucleotide
uaauauaaaguugauuuug

SEQ ID NO: 3195731 - RNA, 19 nt, Artificial Sequence
  Description of Artificial Sequence: Synthetic oligonucleotide
uauuaaagucuauaaaagu

SEQ ID NO: 3195732 - RNA, 19 nt, Artificial Sequence
  Description of Artificial Sequence: Synthetic oligonucleotide
uaaagcaaauauuaaggca

SEQ ID NO: 3195733 - RNA, 19 nt, Artificial Sequence
  Description of Artificial Sequence: Synthetic oligonucleotide
cuaugaaggaauuuugggc

SEQ ID NO: 3195734 - RNA, 19 nt, Artificial Sequence
  Description of Artificial Sequence: Synthetic oligonucleotide
gaacagaagucuaugaagg

SEQ ID NO: 3195735 - RNA, 19 nt, Artificial Sequence
  Description of Artificial Sequence: Synthetic oligonucleotide
uauguauuaaagucuauaa

SEQ ID NO: 3195736 - RNA, 19 nt, Artificial Sequence
  Description of Artificial Sequence: Synthetic oligonucleotide
uauuauuccaggaaauuaa

SEQ ID NO: 3195737 - RNA, 19 nt, Artificial Sequence
  Description of Artificial Sequence: Synthetic oligonucleotide
aacauuauuauuccaggaa

SEQ ID NO: 3195738 - RNA, 19 nt, Artificial Sequence
  Description of Artificial Sequence: Synthetic oligonucleotide
aauuuugggcucugguuac

SEQ ID NO: 3195739 - RNA, 19 nt, Artificial Sequence
  Description of Artificial Sequence: Synthetic oligonucleotide
aaaauauucauggaacaga

SEQ ID NO: 3195740 - RNA, 19 nt, Artificial Sequence
  Description of Artificial Sequence: Synthetic oligonucleotide
aaguugauuuugcagagcu

SEQ ID NO: 3195741 - RNA, 19 nt, Artificial Sequence
  Description of Artificial Sequence: Synthetic oligonucleotide
aggaaauuaagauuuagau

SEQ ID NO: 3195742 - RNA, 19 nt, Artificial Sequence
  Description of Artificial Sequence: Synthetic oligonucleotide
uuuaaauuacuuauguauu

SEQ ID NO: 3195743 - RNA, 19 nt, Artificial Sequence
  Description of Artificial Sequence: Synthetic oligonucleotide
guugauuuugcagagcucg

SEQ ID NO: 3195744 - RNA, 19 nt, Artificial Sequence
  Description of Artificial Sequence: Synthetic oligonucleotide
auuuuaacaagguaacacu

SEQ ID NO: 3195745 - RNA, 19 nt, Artificial Sequence
  Description of Artificial Sequence: Synthetic oligonucleotide
agauguuuuagaauggugg

SEQ ID NO: 3195746 - RNA, 19 nt, Artificial Sequence
  Description of Artificial Sequence: Synthetic oligonucleotide
auggcuuaaacucaagcag

SEQ ID NO: 3195747 - RNA, 19 nt, Artificial Sequence
  Description of Artificial Sequence: Synthetic oligonucleotide
ucugguuacaauauaaauu

SEQ ID NO: 3195748 - RNA, 19 nt, Artificial Sequence
  Description of Artificial Sequence: Synthetic oligonucleotide
caaacauuauuauuccagg

SEQ ID NO: 3195749 - RNA, 19 nt, Artificial Sequence
  Description of Artificial Sequence: Synthetic oligonucleotide
uauaaaaguaggaggucag

SEQ ID NO: 3195750 - RNA, 19 nt, Artificial Sequence
  Description of Artificial Sequence: Synthetic oligonucleotide
ugauaugaaacuguaaacu

SEQ ID NO: 3195751 - RNA, 19 nt, Artificial Sequence
  Description of Artificial Sequence: Synthetic oligonucleotide
uuuuguuacgaugugagcu

SEQ ID NO: 3195752 - RNA, 19 nt, Artificial Sequence
  Description of Artificial Sequence: Synthetic oligonucleotide
acucaagcaguuuucuugc

SEQ ID NO: 3195753 - RNA, 19 nt, Artificial Sequence
  Description of Artificial Sequence: Synthetic oligonucleotide
acaauauaaauucuuaaua

SEQ ID NO: 3195754 - RNA, 19 nt, Artificial Sequence
  Description of Artificial Sequence: Synthetic oligonucleotide
uuaacaagguaacacuucu

SEQ ID NO: 3195755 - RNA, 19 nt, Artificial Sequence
  Description of Artificial Sequence: Synthetic oligonucleotide
uaugaaacuguaaacucac

SEQ ID NO: 3195756 - RNA, 19 nt, Artificial Sequence
  Description of Artificial Sequence: Synthetic oligonucleotide
uauuccaggaaauuaagau

SEQ ID NO: 3195757 - RNA, 19 nt, Artificial Sequence
  Description of Artificial Sequence: Synthetic oligonucleotide
ugaaaauggcuuaaacuca

SEQ ID NO: 3195758 - RNA, 19 nt, Artificial Sequence
  Description of Artificial Sequence: Synthetic oligonucleotide
gauaugaaacuguaaacuc

SEQ ID NO: 3195759 - RNA, 19 nt, Artificial Sequence
  Description of Artificial Sequence: Synthetic oligonucleotide
uacuuauguauuaaagucu

SEQ ID NO: 3195760 - RNA, 19 nt, Artificial Sequence
  Description of Artificial Sequence: Synthetic oligonucleotide
uacaauauaaauucuuaau

SEQ ID NO: 3195761 - RNA, 19 nt, Artificial Sequence
  Description of Artificial Sequence: Synthetic oligonucleotide
aaugguggucauuuuaaca

SEQ ID NO: 3195762 - RNA, 19 nt, Artificial Sequence
  Description of Artificial Sequence: Synthetic oligonucleotide
cuaauuuaaauuacuuaug

SEQ ID NO: 3195763 - RNA, 19 nt, Artificial Sequence
  Description of Artificial Sequence: Synthetic oligonucleotide
guauuaaagucuauaaaag

SEQ ID NO: 3195764 - RNA, 19 nt, Artificial Sequence
  Description of Artificial Sequence: Synthetic oligonucleotide
aacacuucuuaauuaagaa

SEQ ID NO: 3195765 - RNA, 19 nt, Artificial Sequence
  Description of Artificial Sequence: Synthetic oligonucleotide
uaaaguugauuuugcagag

SEQ ID NO: 3195766 - RNA, 19 nt, Artificial Sequence
  Description of Artificial Sequence: Synthetic oligonucleotide
uuuugaaaauggcuuaaac

SEQ ID NO: 3195767 - RNA, 19 nt, Artificial Sequence
  Description of Artificial Sequence: Synthetic oligonucleotide
aaacauuauuauuccagga

SEQ ID NO: 3195768 - RNA, 19 nt, Artificial Sequence
  Description of Artificial Sequence: Synthetic oligonucleotide
ucuuaauaauuuaaagcaa

SEQ ID NO: 3195769 - RNA, 19 nt, Artificial Sequence
  Description of Artificial Sequence: Synthetic oligonucleotide
guugauaugaaacuguaaa

SEQ ID NO: 3195770 - RNA, 19 nt, Artificial Sequence
  Description of Artificial Sequence: Synthetic oligonucleotide
uaacacuucuuaauuaaga

SEQ ID NO: 3195771 - RNA, 19 nt, Artificial Sequence
  Description of Artificial Sequence: Synthetic oligonucleotide
ugaucuacguuccagagcc

SEQ ID NO: 3195772 - RNA, 19 nt, Artificial Sequence
  Description of Artificial Sequence: Synthetic oligonucleotide
aaagugcugaccaucaucc

SEQ ID NO: 3195773 - RNA, 19 nt, Artificial Sequence
  Description of Artificial Sequence: Synthetic oligonucleotide
uauguuggaguuuugaugu

SEQ ID NO: 3195774 - RNA, 19 nt, Artificial Sequence
  Description of Artificial Sequence: Synthetic oligonucleotide
aagacuuggcacuucuccc

SEQ ID NO: 3195775 - RNA, 19 nt, Artificial Sequence
  Description of Artificial Sequence: Synthetic oligonucleotide
auugaaccccauuucaacc

SEQ ID NO: 3195776 - RNA, 19 nt, Artificial Sequence
  Description of Artificial Sequence: Synthetic oligonucleotide
uuaucagcaggauuagugg

SEQ ID NO: 3195777 - RNA, 19 nt, Artificial Sequence
  Description of Artificial Sequence: Synthetic oligonucleotide
cuugaaaagacucuggguc

SEQ ID NO: 3195778 - RNA, 19 nt, Artificial Sequence
  Description of Artificial Sequence: Synthetic oligonucleotide
ugaccauucucugagaccg

SEQ ID NO: 3195779 - RNA, 19 nt, Artificial Sequence
  Description of Artificial Sequence: Synthetic oligonucleotide
uuuagcauaugcaggaaga

SEQ ID NO: 3195780 - RNA, 19 nt, Artificial Sequence
  Description of Artificial Sequence: Synthetic oligonucleotide
acuguuuacuuccugaucu

SEQ ID NO: 3195781 - RNA, 19 nt, Artificial Sequence
  Description of Artificial Sequence: Synthetic oligonucleotide
aacucaggaaaauggcugg

SEQ ID NO: 3195782 - RNA, 19 nt, Artificial Sequence
  Description of Artificial Sequence: Synthetic oligonucleotide
uccuugaaaagacucuggg

SEQ ID NO: 3195783 - RNA, 19 nt, Artificial Sequence
  Description of Artificial Sequence: Synthetic oligonucleotide
auuucaaccagcgugacca

SEQ ID NO: 3195784 - RNA, 19 nt, Artificial Sequence
  Description of Artificial Sequence: Synthetic oligonucleotide
uuucucagcacucucaaau

SEQ ID NO: 3195785 - RNA, 19 nt, Artificial Sequence
  Description of Artificial Sequence: Synthetic oligonucleotide
ucugucaauguuuccacag

SEQ ID NO: 3195786 - RNA, 19 nt, Artificial Sequence
  Description of Artificial Sequence: Synthetic oligonucleotide
aaagacucugggucucgcc

SEQ ID NO: 3195787 - RNA, 19 nt, Artificial Sequence
  Description of Artificial Sequence: Synthetic oligonucleotide
uuugauguaggugugggga

SEQ ID NO: 3195788 - RNA, 19 nt, Artificial Sequence
  Description of Artificial Sequence: Synthetic oligonucleotide
auuuccgagauguagcucu

SEQ ID NO: 3195789 - RNA, 19 nt, Artificial Sequence
  Description of Artificial Sequence: Synthetic oligonucleotide
gacaaugugggcugggucc

SEQ ID NO: 3195790 - RNA, 19 nt, Artificial Sequence
  Description of Artificial Sequence: Synthetic oligonucleotide
uuuacuuccugaucuacgu

SEQ ID NO: 3195791 - RNA, 19 nt, Artificial Sequence
  Description of Artificial Sequence: Synthetic oligonucleotide
aagaguguccacauugaac

SEQ ID NO: 3195792 - RNA, 19 nt, Artificial Sequence
  Description of Artificial Sequence: Synthetic oligonucleotide
aaggggaaagugcugacca

SEQ ID NO: 3195793 - RNA, 19 nt, Artificial Sequence
  Description of Artificial Sequence: Synthetic oligonucleotide
agcacucucaaauccugcc

SEQ ID NO: 3195794 - RNA, 19 nt, Artificial Sequence
  Description of Artificial Sequence: Synthetic oligonucleotide
aaauccugccucugucagc

SEQ ID NO: 3195795 - RNA, 19 nt, Artificial Sequence
  Description of Artificial Sequence: Synthetic oligonucleotide
augaccauucucugagacc

SEQ ID NO: 3195796 - RNA, 19 nt, Artificial Sequence
  Description of Artificial Sequence: Synthetic oligonucleotide
ucucagcacucucaaaucc

SEQ ID NO: 3195797 - RNA, 19 nt, Artificial Sequence
  Description of Artificial Sequence: Synthetic oligonucleotide
uuggccaugaaacggguga

SEQ ID NO: 3195798 - RNA, 19 nt, Artificial Sequence
  Description of Artificial Sequence: Synthetic oligonucleotide
ugugcucgcaguaagacuu

SEQ ID NO: 3195799 - RNA, 19 nt, Artificial Sequence
  Description of Artificial Sequence: Synthetic oligonucleotide
uccacauugaaccccauuu

SEQ ID NO: 3195800 - RNA, 19 nt, Artificial Sequence
  Description of Artificial Sequence: Synthetic oligonucleotide
cagcaaggaacucacaacc

SEQ ID NO: 3195801 - RNA, 19 nt, Artificial Sequence
  Description of Artificial Sequence: Synthetic oligonucleotide
acgauauccgacaaugugg

SEQ ID NO: 3195802 - RNA, 19 nt, Artificial Sequence
  Description of Artificial Sequence: Synthetic oligonucleotide
gagaccguuuagcauaugc

SEQ ID NO: 3195803 - RNA, 19 nt, Artificial Sequence
  Description of Artificial Sequence: Synthetic oligonucleotide
agcauaugcaggaagagug

SEQ ID NO: 3195804 - RNA, 19 nt, Artificial Sequence
  Description of Artificial Sequence: Synthetic oligonucleotide
ugucuuggccaugaaacgg

SEQ ID NO: 3195805 - RNA, 19 nt, Artificial Sequence
  Description of Artificial Sequence: Synthetic oligonucleotide
uugaaaagacucugggucu

SEQ ID NO: 3195806 - RNA, 19 nt, Artificial Sequence
  Description of Artificial Sequence: Synthetic oligonucleotide
accacuugcagaguccucc

SEQ ID NO: 3195807 - RNA, 19 nt, Artificial Sequence
  Description of Artificial Sequence: Synthetic oligonucleotide
uccacagaugcuuucucag

SEQ ID NO: 3195808 - RNA, 19 nt, Artificial Sequence
  Description of Artificial Sequence: Synthetic oligonucleotide
ucauccuugaaaagacucu

SEQ ID NO: 3195809 - RNA, 19 nt, Artificial Sequence
  Description of Artificial Sequence: Synthetic oligonucleotide
ucaggaaaauggcugggga

SEQ ID NO: 3195810 - RNA, 19 nt, Artificial Sequence
  Description of Artificial Sequence: Synthetic oligonucleotide
agacuuggcacuucucccg

SEQ ID NO: 3195811 - RNA, 19 nt, Artificial Sequence
  Description of Artificial Sequence: Synthetic oligonucleotide
aagacucugggucucgccu

SEQ ID NO: 3195812 - RNA, 19 nt, Artificial Sequence
  Description of Artificial Sequence: Synthetic oligonucleotide
gaugaccauucucugagac

SEQ ID NO: 3195813 - RNA, 19 nt, Artificial Sequence
  Description of Artificial Sequence: Synthetic oligonucleotide
guuuagcauaugcaggaag

SEQ ID NO: 3195814 - RNA, 19 nt, Artificial Sequence
  Description of Artificial Sequence: Synthetic oligonucleotide
agagccaccaggcccggcc

SEQ ID NO: 3195815 - RNA, 19 nt, Artificial Sequence
  Description of Artificial Sequence: Synthetic oligonucleotide
ugcagcaucucugucaaug

SEQ ID NO: 3195816 - RNA, 19 nt, Artificial Sequence
  Description of Artificial Sequence: Synthetic oligonucleotide
aguguccacauugaacccc

SEQ ID NO: 3195817 - RNA, 19 nt, Artificial Sequence
  Description of Artificial Sequence: Synthetic oligonucleotide
aaaagacucugggucucgc

SEQ ID NO: 3195818 - RNA, 19 nt, Artificial Sequence
  Description of Artificial Sequence: Synthetic oligonucleotide
uggcugauuagucacugga

SEQ ID NO: 3195819 - RNA, 19 nt, Artificial Sequence
  Description of Artificial Sequence: Synthetic oligonucleotide
gcugauuagucacuggagg

SEQ ID NO: 3195820 - RNA, 19 nt, Artificial Sequence
  Description of Artificial Sequence: Synthetic oligonucleotide
guaguuaucagcaggauua

SEQ ID NO: 3195821 - RNA, 19 nt, Artificial Sequence
  Description of Artificial Sequence: Synthetic oligonucleotide
cugguucacgguauguugg

SEQ ID NO: 3195822 - RNA, 19 nt, Artificial Sequence
  Description of Artificial Sequence: Synthetic oligonucleotide
gauccggaaacucaggaaa

SEQ ID NO: 3195823 - RNA, 19 nt, Artificial Sequence
  Description of Artificial Sequence: Synthetic oligonucleotide
cauugaaccccauuucaac

SEQ ID NO: 3195824 - RNA, 19 nt, Artificial Sequence
  Description of Artificial Sequence: Synthetic oligonucleotide
gaaagugcugaccaucauc

SEQ ID NO: 3195825 - RNA, 19 nt, Artificial Sequence
  Description of Artificial Sequence: Synthetic oligonucleotide
gauuagucacuggaggugc

SEQ ID NO: 3195826 - RNA, 19 nt, Artificial Sequence
  Description of Artificial Sequence: Synthetic oligonucleotide
uuagcauaugcaggaagag

SEQ ID NO: 3195827 - RNA, 19 nt, Artificial Sequence
  Description of Artificial Sequence: Synthetic oligonucleotide
guuuugauguagguguggg

SEQ ID NO: 3195828 - RNA, 19 nt, Artificial Sequence
  Description of Artificial Sequence: Synthetic oligonucleotide
acugguucacgguauguug

SEQ ID NO: 3195829 - RNA, 19 nt, Artificial Sequence
  Description of Artificial Sequence: Synthetic oligonucleotide
uauccgacaaugugggcug

SEQ ID NO: 3195830 - RNA, 19 nt, Artificial Sequence
  Description of Artificial Sequence: Synthetic oligonucleotide
uacuuccugaucuacguuc

SEQ ID NO: 3195831 - RNA, 19 nt, Artificial Sequence
  Description of Artificial Sequence: Synthetic oligonucleotide
aguaagacuuggcacuucu

SEQ ID NO: 3195832 - RNA, 19 nt, Artificial Sequence
  Description of Artificial Sequence: Synthetic oligonucleotide
ucagcacucucaaauccug

SEQ ID NO: 3195833 - RNA, 19 nt, Artificial Sequence
  Description of Artificial Sequence: Synthetic oligonucleotide
ucucugagaccguuuagca

SEQ ID NO: 3195834 - RNA, 19 nt, Artificial Sequence
  Description of Artificial Sequence: Synthetic oligonucleotide
accacgauauccgacaaug

SEQ ID NO: 3195835 - RNA, 19 nt, Artificial Sequence
  Description of Artificial Sequence: Synthetic oligonucleotide
ugauuagucacuggaggug

SEQ ID NO: 3195836 - RNA, 19 nt, Artificial Sequence
  Description of Artificial Sequence: Synthetic oligonucleotide
uguuggaguuuugauguag

SEQ ID NO: 3195837 - RNA, 19 nt, Artificial Sequence
  Description of Artificial Sequence: Synthetic oligonucleotide
ugaaccccauuucaaccag

SEQ ID NO: 3195838 - RNA, 19 nt, Artificial Sequence
  Description of Artificial Sequence: Synthetic oligonucleotide
uggggauccggaaacucag

SEQ ID NO: 3195839 - RNA, 19 nt, Artificial Sequence
  Description of Artificial Sequence: Synthetic oligonucleotide
ugaaaggucuggcagcaau

SEQ ID NO: 3195840 - RNA, 19 nt, Artificial Sequence
  Description of Artificial Sequence: Synthetic oligonucleotide
acuucucccgauuuccgag

SEQ ID NO: 3195841 - RNA, 19 nt, Artificial Sequence
  Description of Artificial Sequence: Synthetic oligonucleotide
ggaacucacaaccacuugc

SEQ ID NO: 3195842 - RNA, 19 nt, Artificial Sequence
  Description of Artificial Sequence: Synthetic oligonucleotide
accaucauccuugaaaaga

SEQ ID NO: 3195843 - RNA, 19 nt, Artificial Sequence
  Description of Artificial Sequence: Synthetic oligonucleotide
acgggugagggcucgcucc

SEQ ID NO: 3195844 - RNA, 19 nt, Artificial Sequence
  Description of Artificial Sequence: Synthetic oligonucleotide
guuuacuuccugaucuacg

SEQ ID NO: 3195845 - RNA, 19 nt, Artificial Sequence
  Description of Artificial Sequence: Synthetic oligonucleotide
acucacaaccacuugcaga

SEQ ID NO: 3195846 - RNA, 19 nt, Artificial Sequence
  Description of Artificial Sequence: Synthetic oligonucleotide
caucucgccucugagaugc

SEQ ID NO: 3195847 - RNA, 19 nt, Artificial Sequence
  Description of Artificial Sequence: Synthetic oligonucleotide
aaaggucuggcagcaauca

SEQ ID NO: 3195848 - RNA, 19 nt, Artificial Sequence
  Description of Artificial Sequence: Synthetic oligonucleotide
ucacuggcugauuagucac

SEQ ID NO: 3195849 - RNA, 19 nt, Artificial Sequence
  Description of Artificial Sequence: Synthetic oligonucleotide
ggaguuuugauguaggugu

SEQ ID NO: 3195850 - RNA, 19 nt, Artificial Sequence
  Description of Artificial Sequence: Synthetic oligonucleotide
cucaggaccugguagucag

SEQ ID NO: 3195851 - RNA, 19 nt, Artificial Sequence
  Description of Artificial Sequence: Synthetic oligonucleotide
uaggggauggugaaagguc

SEQ ID NO: 3195852 - RNA, 19 nt, Artificial Sequence
  Description of Artificial Sequence: Synthetic oligonucleotide
cuugcagaguccuccuccg

SEQ ID NO: 3195853 - RNA, 19 nt, Artificial Sequence
  Description of Artificial Sequence: Synthetic oligonucleotide
gauggugaaaggucuggca

SEQ ID NO: 3195854 - RNA, 19 nt, Artificial Sequence
  Description of Artificial Sequence: Synthetic oligonucleotide
guuggaguuuugauguagg

SEQ ID NO: 3195855 - RNA, 19 nt, Artificial Sequence
  Description of Artificial Sequence: Synthetic oligonucleotide
ucgcaguaagacuuggcac

SEQ ID NO: 3195856 - RNA, 19 nt, Artificial Sequence
  Description of Artificial Sequence: Synthetic oligonucleotide
accguuuagcauaugcagg

SEQ ID NO: 3195857 - RNA, 19 nt, Artificial Sequence
  Description of Artificial Sequence: Synthetic oligonucleotide
aauggcuggggagugugug

SEQ ID NO: 3195858 - RNA, 19 nt, Artificial Sequence
  Description of Artificial Sequence: Synthetic oligonucleotide
caaauccugccucugucag

SEQ ID NO: 3195859 - RNA, 19 nt, Artificial Sequence
  Description of Artificial Sequence: Synthetic oligonucleotide
aucagcaggauuaguggac

SEQ ID NO: 3195860 - RNA, 19 nt, Artificial Sequence
  Description of Artificial Sequence: Synthetic oligonucleotide
uccgagauguagcucugca

SEQ ID NO: 3195861 - RNA, 19 nt, Artificial Sequence
  Description of Artificial Sequence: Synthetic oligonucleotide
ucuacguuccagagccacc

SEQ ID NO: 3195862 - RNA, 19 nt, Artificial Sequence
  Description of Artificial Sequence: Synthetic oligonucleotide
aacgggugagggcucgcuc

SEQ ID NO: 3195863 - RNA, 19 nt, Artificial Sequence
  Description of Artificial Sequence: Synthetic oligonucleotide
aucuacguuccagagccac

SEQ ID NO: 3195864 - RNA, 19 nt, Artificial Sequence
  Description of Artificial Sequence: Synthetic oligonucleotide
aguuuugauguaggugugg

SEQ ID NO: 3195865 - RNA, 19 nt, Artificial Sequence
  Description of Artificial Sequence: Synthetic oligonucleotide
aggauuaguggacuguuua

SEQ ID NO: 3195866 - RNA, 19 nt, Artificial Sequence
  Description of Artificial Sequence: Synthetic oligonucleotide
cugaccaucauccuugaaa

SEQ ID NO: 3195867 - RNA, 19 nt, Artificial Sequence
  Description of Artificial Sequence: Synthetic oligonucleotide
ggaccugguagucagacac

SEQ ID NO: 3195868 - RNA, 19 nt, Artificial Sequence
  Description of Artificial Sequence: Synthetic oligonucleotide
ugugagguaggggauggug

SEQ ID NO: 3195869 - RNA, 19 nt, Artificial Sequence
  Description of Artificial Sequence: Synthetic oligonucleotide
uucugccccgcagugaggg

SEQ ID NO: 3195870 - RNA, 19 nt, Artificial Sequence
  Description of Artificial Sequence: Synthetic oligonucleotide
gucagacacugguucacgg

SEQ ID NO: 3195871 - RNA, 19 nt, Artificial Sequence
  Description of Artificial Sequence: Synthetic oligonucleotide
uuaauuuucauugugacaa

SEQ ID NO: 3195872 - RNA, 19 nt, Artificial Sequence
  Description of Artificial Sequence: Synthetic oligonucleotide
auuuaauuuucauugugac

SEQ ID NO: 3195873 - RNA, 19 nt, Artificial Sequence
  Description of Artificial Sequence: Synthetic oligonucleotide
uucauugugacaauguagc

SEQ ID NO: 3195874 - RNA, 19 nt, Artificial Sequence
  Description of Artificial Sequence: Synthetic oligonucleotide
aauguagccgucuccaaac

SEQ ID NO: 3195875 - RNA, 19 nt, Artificial Sequence
  Description of Artificial Sequence: Synthetic oligonucleotide
uuucauugugacaauguag

SEQ ID NO: 3195876 - RNA, 19 nt, Artificial Sequence
  Description of Artificial Sequence: Synthetic oligonucleotide
ugggaaguuacccuggaag

SEQ ID NO: 3195877 - RNA, 19 nt, Artificial Sequence
  Description of Artificial Sequence: Synthetic oligonucleotide
ggggauuuaauuuucauug

SEQ ID NO: 3195878 - RNA, 19 nt, Artificial Sequence
  Description of Artificial Sequence: Synthetic oligonucleotide
uuuaauuuucauugugaca

SEQ ID NO: 3195879 - RNA, 19 nt, Artificial Sequence
  Description of Artificial Sequence: Synthetic oligonucleotide
auugugacaauguagccgu

SEQ ID NO: 3195880 - RNA, 19 nt, Artificial Sequence
  Description of Artificial Sequence: Synthetic oligonucleotide
aagcaagucguccuuuggg

SEQ ID NO: 3195881 - RNA, 19 nt, Artificial Sequence
  Description of Artificial Sequence: Synthetic oligonucleotide
aacuguagcaugcuguggu

SEQ ID NO: 3195882 - RNA, 19 nt, Artificial Sequence
  Description of Artificial Sequence: Synthetic oligonucleotide
ucgacuggauucaagucgg

SEQ ID NO: 3195883 - RNA, 19 nt, Artificial Sequence
  Description of Artificial Sequence: Synthetic oligonucleotide
cucgacuggauucaagucg

SEQ ID NO: 3195884 - RNA, 19 nt, Artificial Sequence
  Description of Artificial Sequence: Synthetic oligonucleotide
ucaaugagcaggcuguccu

SEQ ID NO: 3195885 - RNA, 19 nt, Artificial Sequence
  Description of Artificial Sequence: Synthetic oligonucleotide
agaggaggagaccuggaac

SEQ ID NO: 3195886 - RNA, 19 nt, Artificial Sequence
  Description of Artificial Sequence: Synthetic oligonucleotide
cauugugacaauguagccg

SEQ ID NO: 3195887 - RNA, 19 nt, Artificial Sequence
  Description of Artificial Sequence: Synthetic oligonucleotide
uggaagaacugcucgacug

SEQ ID NO: 3195888 - RNA, 19 nt, Artificial Sequence
  Description of Artificial Sequence: Synthetic oligonucleotide
aauuuucauugugacaaug

SEQ ID NO: 3195889 - RNA, 19 nt, Artificial Sequence
  Description of Artificial Sequence: Synthetic oligonucleotide
gauuuaauuuucauuguga

SEQ ID NO: 3195890 - RNA, 19 nt, Artificial Sequence
  Description of Artificial Sequence: Synthetic oligonucleotide
agcaagucguccuuugggg

SEQ ID NO: 3195891 - RNA, 19 nt, Artificial Sequence
  Description of Artificial Sequence: Synthetic oligonucleotide
ugaguacuccucaaugagc

SEQ ID NO: 3195892 - RNA, 19 nt, Artificial Sequence
  Description of Artificial Sequence: Synthetic oligonucleotide
uuuucauugugacaaugua

SEQ ID NO: 3195893 - RNA, 19 nt, Artificial Sequence
  Description of Artificial Sequence: Synthetic oligonucleotide
uccucaaugagcaggcugu

SEQ ID NO: 3195894 - RNA, 19 nt, Artificial Sequence
  Description of Artificial Sequence: Synthetic oligonucleotide
uggaacuguagcaugcugu

SEQ ID NO: 3195895 - RNA, 19 nt, Artificial Sequence
  Description of Artificial Sequence: Synthetic oligonucleotide
acgagcagcuggaagaucc

SEQ ID NO: 3195896 - RNA, 19 nt, Artificial Sequence
  Description of Artificial Sequence: Synthetic oligonucleotide
caagucgggaagcaagucg

SEQ ID NO: 3195897 - RNA, 19 nt, Artificial Sequence
  Description of Artificial Sequence: Synthetic oligonucleotide
gacugaguacuccucaaug

SEQ ID NO: 3195898 - RNA, 19 nt, Artificial Sequence
  Description of Artificial Sequence: Synthetic oligonucleotide
acugccugggaaguuaccc

SEQ ID NO: 3195899 - RNA, 19 nt, Artificial Sequence
  Description of Artificial Sequence: Synthetic oligonucleotide
acugaguacuccucaauga

SEQ ID NO: 3195900 - RNA, 19 nt, Artificial Sequence
  Description of Artificial Sequence: Synthetic oligonucleotide
agcuggaagauccuggcca

SEQ ID NO: 3195901 - RNA, 19 nt, Artificial Sequence
  Description of Artificial Sequence: Synthetic oligonucleotide
gaagcaagucguccuuugg

SEQ ID NO: 3195902 - RNA, 19 nt, Artificial Sequence
  Description of Artificial Sequence: Synthetic oligonucleotide
uacuccucaaugagcaggc

SEQ ID NO: 3195903 - RNA, 19 nt, Artificial Sequence
  Description of Artificial Sequence: Synthetic oligonucleotide
cugaguacuccucaaugag

SEQ ID NO: 3195904 - RNA, 19 nt, Artificial Sequence
  Description of Artificial Sequence: Synthetic oligonucleotide
uguagcaugcuguggugcc

SEQ ID NO: 3195905 - RNA, 19 nt, Artificial Sequence
  Description of Artificial Sequence: Synthetic oligonucleotide
uuuggggauuuaauuuuca

SEQ ID NO: 3195906 - RNA, 19 nt, Artificial Sequence
  Description of Artificial Sequence: Synthetic oligonucleotide
ucauugugacaauguagcc

SEQ ID NO: 3195907 - RNA, 19 nt, Artificial Sequence
  Description of Artificial Sequence: Synthetic oligonucleotide
cuggauucaagucgggaag

SEQ ID NO: 3195908 - RNA, 19 nt, Artificial Sequence
  Description of Artificial Sequence: Synthetic oligonucleotide
uuacccuggaagaacugcu

SEQ ID NO: 3195909 - RNA, 19 nt, Artificial Sequence
  Description of Artificial Sequence: Synthetic oligonucleotide
acuggauucaagucgggaa

SEQ ID NO: 3195910 - RNA, 19 nt, Artificial Sequence
  Description of Artificial Sequence: Synthetic oligonucleotide
uucaagucgggaagcaagu

SEQ ID NO: 3195911 - RNA, 19 nt, Artificial Sequence
  Description of Artificial Sequence: Synthetic oligonucleotide
uccuuuggggauuuaauuu

SEQ ID NO: 3195912 - RNA, 19 nt, Artificial Sequence
  Description of Artificial Sequence: Synthetic oligonucleotide
ggauuuaauuuucauugug

SEQ ID NO: 3195913 - RNA, 19 nt, Artificial Sequence
  Description of Artificial Sequence: Synthetic oligonucleotide
ugcucgacuggauucaagu

SEQ ID NO: 3195914 - RNA, 19 nt, Artificial Sequence
  Description of Artificial Sequence: Synthetic oligonucleotide
ugagugacugaguacuccu

SEQ ID NO: 3195915 - RNA, 19 nt, Artificial Sequence
  Description of Artificial Sequence: Synthetic oligonucleotide
gugggugacgagcagcugg

SEQ ID NO: 3195916 - RNA, 19 nt, Artificial Sequence
  Description of Artificial Sequence: Synthetic oligonucleotide
auucaagucgggaagcaag

SEQ ID NO: 3195917 - RNA, 19 nt, Artificial Sequence
  Description of Artificial Sequence: Synthetic oligonucleotide
ugacaauguagccgucucc

SEQ ID NO: 3195918 - RNA, 19 nt, Artificial Sequence
  Description of Artificial Sequence: Synthetic oligonucleotide
gagaccuggaacuguagca

SEQ ID NO: 3195919 - RNA, 19 nt, Artificial Sequence
  Description of Artificial Sequence: Synthetic oligonucleotide
guacuccucaaugagcagg

SEQ ID NO: 3195920 - RNA, 19 nt, Artificial Sequence
  Description of Artificial Sequence: Synthetic oligonucleotide
agugacugaguacuccuca

SEQ ID NO: 3195921 - RNA, 19 nt, Artificial Sequence
  Description of Artificial Sequence: Synthetic oligonucleotide
acccuggaagaacugcucg

SEQ ID NO: 3195922 - RNA, 19 nt, Artificial Sequence
  Description of Artificial Sequence: Synthetic oligonucleotide
gaguacuccucaaugagca

SEQ ID NO: 3195923 - RNA, 19 nt, Artificial Sequence
  Description of Artificial Sequence: Synthetic oligonucleotide
uggaagauccuggccaggg

SEQ ID NO: 3195924 - RNA, 19 nt, Artificial Sequence
  Description of Artificial Sequence: Synthetic oligonucleotide
gaaguuacccuggaagaac

SEQ ID NO: 3195925 - RNA, 19 nt, Artificial Sequence
  Description of Artificial Sequence: Synthetic oligonucleotide
auuuucauugugacaaugu

SEQ ID NO: 3195926 - RNA, 19 nt, Artificial Sequence
  Description of Artificial Sequence: Synthetic oligonucleotide
agcaggcuguccuuguggg

SEQ ID NO: 3195927 - RNA, 19 nt, Artificial Sequence
  Description of Artificial Sequence: Synthetic oligonucleotide
uggucugagugacugagua

SEQ ID NO: 3195928 - RNA, 19 nt, Artificial Sequence
  Description of Artificial Sequence: Synthetic oligonucleotide
gaagauccuggccagggga

SEQ ID NO: 3195929 - RNA, 19 nt, Artificial Sequence
  Description of Artificial Sequence: Synthetic oligonucleotide
uggggauuuaauuuucauu

SEQ ID NO: 3195930 - RNA, 19 nt, Artificial Sequence
  Description of Artificial Sequence: Synthetic oligonucleotide
caugcuguggugccgcucc

SEQ ID NO: 3195931 - RNA, 19 nt, Artificial Sequence
  Description of Artificial Sequence: Synthetic oligonucleotide
aagaggaggagaccuggaa

SEQ ID NO: 3195932 - RNA, 19 nt, Artificial Sequence
  Description of Artificial Sequence: Synthetic oligonucleotide
gugacgagcagcuggaaga

SEQ ID NO: 3195933 - RNA, 19 nt, Artificial Sequence
  Description of Artificial Sequence: Synthetic oligonucleotide
aaugagcaggcuguccuug

SEQ ID NO: 3195934 - RNA, 19 nt, Artificial Sequence
  Description of Artificial Sequence: Synthetic oligonucleotide
ucccucugcacacugccug

SEQ ID NO: 3195935 - RNA, 19 nt, Artificial Sequence
  Description of Artificial Sequence: Synthetic oligonucleotide
gagcaggcuguccuugugg

SEQ ID NO: 3195936 - RNA, 19 nt, Artificial Sequence
  Description of Artificial Sequence: Synthetic oligonucleotide
uugugggugacgagcagcu

SEQ ID NO: 3195937 - RNA, 19 nt, Artificial Sequence
  Description of Artificial Sequence: Synthetic oligonucleotide
aagucgggaagcaagucgu

SEQ ID NO: 3195938 - RNA, 19 nt, Artificial Sequence
  Description of Artificial Sequence: Synthetic oligonucleotide
gacaauguagccgucucca

SEQ ID NO: 3195939 - RNA, 19 nt, Artificial Sequence
  Description of Artificial Sequence: Synthetic oligonucleotide
ggaagaacugcucgacugg

SEQ ID NO: 3195940 - RNA, 19 nt, Artificial Sequence
  Description of Artificial Sequence: Synthetic oligonucleotide
cuuuggggauuuaauuuuc

SEQ ID NO: 3195941 - RNA, 19 nt, Artificial Sequence
  Description of Artificial Sequence: Synthetic oligonucleotide
gaacugcucgacuggauuc

SEQ ID NO: 3195942 - RNA, 19 nt, Artificial Sequence
  Description of Artificial Sequence: Synthetic oligonucleotide
uguggugccgcucccucug

SEQ ID NO: 3195943 - RNA, 19 nt, Artificial Sequence
  Description of Artificial Sequence: Synthetic oligonucleotide
uccuugugggugacgagca

SEQ ID NO: 3195944 - RNA, 19 nt, Artificial Sequence
  Description of Artificial Sequence: Synthetic oligonucleotide
aaguuacccuggaagaacu

SEQ ID NO: 3195945 - RNA, 19 nt, Artificial Sequence
  Description of Artificial Sequence: Synthetic oligonucleotide
accuggaacuguagcaugc

SEQ ID NO: 3195946 - RNA, 19 nt, Artificial Sequence
  Description of Artificial Sequence: Synthetic oligonucleotide
uggauucaagucgggaagc

SEQ ID NO: 3195947 - RNA, 19 nt, Artificial Sequence
  Description of Artificial Sequence: Synthetic oligonucleotide
caggggaagaggaggagac

SEQ ID NO: 3195948 - RNA, 19 nt, Artificial Sequence
  Description of Artificial Sequence: Synthetic oligonucleotide
ugccugggaaguuacccug

SEQ ID NO: 3195949 - RNA, 19 nt, Artificial Sequence
  Description of Artificial Sequence: Synthetic oligonucleotide
guuacccuggaagaacugc

SEQ ID NO: 3195950 - RNA, 19 nt, Artificial Sequence
  Description of Artificial Sequence: Synthetic oligonucleotide
ucugcacacugccugggaa

SEQ ID NO: 3195951 - RNA, 19 nt, Artificial Sequence
  Description of Artificial Sequence: Synthetic oligonucleotide
ucgggaagcaagucguccu

SEQ ID NO: 3195952 - RNA, 19 nt, Artificial Sequence
  Description of Artificial Sequence: Synthetic oligonucleotide
ugugacaauguagccgucu

SEQ ID NO: 3195953 - RNA, 19 nt, Artificial Sequence
  Description of Artificial Sequence: Synthetic oligonucleotide
ggaacuguagcaugcugug

SEQ ID NO: 3195954 - RNA, 19 nt, Artificial Sequence
  Description of Artificial Sequence: Synthetic oligonucleotide
uuggggauuuaauuuucau

SEQ ID NO: 3195955 - RNA, 19 nt, Artificial Sequence
  Description of Artificial Sequence: Synthetic oligonucleotide
agaacugcucgacuggauu

SEQ ID NO: 3195956 - RNA, 19 nt, Artificial Sequence
  Description of Artificial Sequence: Synthetic oligonucleotide
gaacuguagcaugcugugg

SEQ ID NO: 3195957 - RNA, 19 nt, Artificial Sequence
  Description of Artificial Sequence: Synthetic oligonucleotide
gaggaggagaccuggaacu

SEQ ID NO: 3195958 - RNA, 19 nt, Artificial Sequence
  Description of Artificial Sequence: Synthetic oligonucleotide
uggccaggggaagaggagg

SEQ ID NO: 3195959 - RNA, 19 nt, Artificial Sequence
  Description of Artificial Sequence: Synthetic oligonucleotide
uccagcguggucugaguga

SEQ ID NO: 3195960 - RNA, 19 nt, Artificial Sequence
  Description of Artificial Sequence: Synthetic oligonucleotide
agcagcuggaagauccugg

SEQ ID NO: 3195961 - RNA, 19 nt, Artificial Sequence
  Description of Artificial Sequence: Synthetic oligonucleotide
acuguagcaugcuguggug

SEQ ID NO: 3195962 - RNA, 19 nt, Artificial Sequence
  Description of Artificial Sequence: Synthetic oligonucleotide
aguacuccucaaugagcag

SEQ ID NO: 3195963 - RNA, 19 nt, Artificial Sequence
  Description of Artificial Sequence: Synthetic oligonucleotide
ugggugacgagcagcugga

SEQ ID NO: 3195964 - RNA, 19 nt, Artificial Sequence
  Description of Artificial Sequence: Synthetic oligonucleotide
cuugugggugacgagcagc

SEQ ID NO: 3195965 - RNA, 19 nt, Artificial Sequence
  Description of Artificial Sequence: Synthetic oligonucleotide
gaccuggaacuguagcaug

SEQ ID NO: 3195966 - RNA, 19 nt, Artificial Sequence
  Description of Artificial Sequence: Synthetic oligonucleotide
uaauuuucauugugacaau

SEQ ID NO: 3195967 - RNA, 19 nt, Artificial Sequence
  Description of Artificial Sequence: Synthetic oligonucleotide
aacugcucgacuggauuca

SEQ ID NO: 3195968 - RNA, 19 nt, Artificial Sequence
  Description of Artificial Sequence: Synthetic oligonucleotide
cuccucaaugagcaggcug

SEQ ID NO: 3195969 - RNA, 19 nt, Artificial Sequence
  Description of Artificial Sequence: Synthetic oligonucleotide
ugacugaguacuccucaau

SEQ ID NO: 3195970 - RNA, 19 nt, Artificial Sequence
  Description of Artificial Sequence: Synthetic oligonucleotide
cugcacacugccugggaag

SEQ ID NO: 3195971 - RNA, 19 nt, Artificial Sequence
  Description of Artificial Sequence: Synthetic oligonucleotide
aguaagaugcuugacaggc

SEQ ID NO: 3195972 - RNA, 19 nt, Artificial Sequence
  Description of Artificial Sequence: Synthetic oligonucleotide
agccguuucaauuucaugg

SEQ ID NO: 3195973 - RNA, 19 nt, Artificial Sequence
  Description of Artificial Sequence: Synthetic oligonucleotide
uuggagcucaguaagaugc

SEQ ID NO: 3195974 - RNA, 19 nt, Artificial Sequence
  Description of Artificial Sequence: Synthetic oligonucleotide
ucaguaagaugcuugacag

SEQ ID NO: 3195975 - RNA, 19 nt, Artificial Sequence
  Description of Artificial Sequence: Synthetic oligonucleotide
aucgaugauaucuuuguac

SEQ ID NO: 3195976 - RNA, 19 nt, Artificial Sequence
  Description of Artificial Sequence: Synthetic oligonucleotide
aaaggcaucgaugauaucu

SEQ ID NO: 3195977 - RNA, 19 nt, Artificial Sequence
  Description of Artificial Sequence: Synthetic oligonucleotide
uuugcauucacccucugga

SEQ ID NO: 3195978 - RNA, 19 nt, Artificial Sequence
  Description of Artificial Sequence: Synthetic oligonucleotide
uuugcucuugguaaaaggc

SEQ ID NO: 3195979 - RNA, 19 nt, Artificial Sequence
  Description of Artificial Sequence: Synthetic oligonucleotide
uuuguacuucuccagaacc

SEQ ID NO: 3195980 - RNA, 19 nt, Artificial Sequence
  Description of Artificial Sequence: Synthetic oligonucleotide
ucacguuugagaauggccc

SEQ ID NO: 3195981 - RNA, 19 nt, Artificial Sequence
  Description of Artificial Sequence: Synthetic oligonucleotide
gauaucuuuguacuucucc

SEQ ID NO: 3195982 - RNA, 19 nt, Artificial Sequence
  Description of Artificial Sequence: Synthetic oligonucleotide
uucaauuucaugguggggc

SEQ ID NO: 3195983 - RNA, 19 nt, Artificial Sequence
  Description of Artificial Sequence: Synthetic oligonucleotide
uugagaauggcccacuucu

SEQ ID NO: 3195984 - RNA, 19 nt, Artificial Sequence
  Description of Artificial Sequence: Synthetic oligonucleotide
ugguaaaaggcaucgauga

SEQ ID NO: 3195985 - RNA, 19 nt, Artificial Sequence
  Description of Artificial Sequence: Synthetic oligonucleotide
agaugccacaagcauagcc

SEQ ID NO: 3195986 - RNA, 19 nt, Artificial Sequence
  Description of Artificial Sequence: Synthetic oligonucleotide
uuuugcucuugguaaaagg

SEQ ID NO: 3195987 - RNA, 19 nt, Artificial Sequence
  Description of Artificial Sequence: Synthetic oligonucleotide
uccaguagaugccacaagc

SEQ ID NO: 3195988 - RNA, 19 nt, Artificial Sequence
  Description of Artificial Sequence: Synthetic oligonucleotide
aaauggagaagucacguuu

SEQ ID NO: 3195989 - RNA, 19 nt, Artificial Sequence
  Description of Artificial Sequence: Synthetic oligonucleotide
ugaacuaggggugaaacca

SEQ ID NO: 3195990 - RNA, 19 nt, Artificial Sequence
  Description of Artificial Sequence: Synthetic oligonucleotide
aaaccagcuugucagaggu

SEQ ID NO: 3195991 - RNA, 19 nt, Artificial Sequence
  Description of Artificial Sequence: Synthetic oligonucleotide
gauggccugauacacagcc

SEQ ID NO: 3195992 - RNA, 19 nt, Artificial Sequence
  Description of Artificial Sequence: Synthetic oligonucleotide
uuguacuucuccagaaccg

SEQ ID NO: 3195993 - RNA, 19 nt, Artificial Sequence
  Description of Artificial Sequence: Synthetic oligonucleotide
uaaaaggcaucgaugauau

SEQ ID NO: 3195994 - RNA, 19 nt, Artificial Sequence
  Description of Artificial Sequence: Synthetic oligonucleotide
uugguaaaaggcaucgaug

SEQ ID NO: 3195995 - RNA, 19 nt, Artificial Sequence
  Description of Artificial Sequence: Synthetic oligonucleotide
uaagaugcuugacaggcug

SEQ ID NO: 3195996 - RNA, 19 nt, Artificial Sequence
  Description of Artificial Sequence: Synthetic oligonucleotide
gaagucacguuugagaaug

SEQ ID NO: 3195997 - RNA, 19 nt, Artificial Sequence
  Description of Artificial Sequence: Synthetic oligonucleotide
ggugaaaccagcuugucag

SEQ ID NO: 3195998 - RNA, 19 nt, Artificial Sequence
  Description of Artificial Sequence: Synthetic oligonucleotide
guuucaauuucaugguggg

SEQ ID NO: 3195999 - RNA, 19 nt, Artificial Sequence
  Description of Artificial Sequence: Synthetic oligonucleotide
ucgaugauaucuuuguacu

SEQ ID NO: 3196000 - RNA, 19 nt, Artificial Sequence
  Description of Artificial Sequence: Synthetic oligonucleotide
uucuccaccggaaauggag

SEQ ID NO: 3196001 - RNA, 19 nt, Artificial Sequence
  Description of Artificial Sequence: Synthetic oligonucleotide
uaugcccugaacuaggggu

SEQ ID NO: 3196002 - RNA, 19 nt, Artificial Sequence
  Description of Artificial Sequence: Synthetic oligonucleotide
agaugucagugcuaugccc

SEQ ID NO: 3196003 - RNA, 19 nt, Artificial Sequence
  Description of Artificial Sequence: Synthetic oligonucleotide
auaucuuuguacuucucca

SEQ ID NO: 3196004 - RNA, 19 nt, Artificial Sequence
  Description of Artificial Sequence: Synthetic oligonucleotide
ucuucccuccaguagaugc

SEQ ID NO: 3196005 - RNA, 19 nt, Artificial Sequence
  Description of Artificial Sequence: Synthetic oligonucleotide
gaugccacaagcauagccc

SEQ ID NO: 3196006 - RNA, 19 nt, Artificial Sequence
  Description of Artificial Sequence: Synthetic oligonucleotide
aggaggaagacacuuggag

SEQ ID NO: 3196007 - RNA, 19 nt, Artificial Sequence
  Description of Artificial Sequence: Synthetic oligonucleotide
uucuccagaaccguuagcc

SEQ ID NO: 3196008 - RNA, 19 nt, Artificial Sequence
  Description of Artificial Sequence: Synthetic oligonucleotide
uaggggugaaaccagcuug

SEQ ID NO: 3196009 - RNA, 19 nt, Artificial Sequence
  Description of Artificial Sequence: Synthetic oligonucleotide
uaucuuuguacuucuccag

SEQ ID NO: 3196010 - RNA, 19 nt, Artificial Sequence
  Description of Artificial Sequence: Synthetic oligonucleotide
uucuggaugugguagggcc

SEQ ID NO: 3196011 - RNA, 19 nt, Artificial Sequence
  Description of Artificial Sequence: Synthetic oligonucleotide
aagcauagccccugacuac

SEQ ID NO: 3196012 - RNA, 19 nt, Artificial Sequence
  Description of Artificial Sequence: Synthetic oligonucleotide
gaugauaucuuuguacuuc

SEQ ID NO: 3196013 - RNA, 19 nt, Artificial Sequence
  Description of Artificial Sequence: Synthetic oligonucleotide
guagaugccacaagcauag

SEQ ID NO: 3196014 - RNA, 19 nt, Artificial Sequence
  Description of Artificial Sequence: Synthetic oligonucleotide
gagaauggcccacuucugg

SEQ ID NO: 3196015 - RNA, 19 nt, Artificial Sequence
  Description of Artificial Sequence: Synthetic oligonucleotide
uggauggccugauacacag

SEQ ID NO: 3196016 - RNA, 19 nt, Artificial Sequence
  Description of Artificial Sequence: Synthetic oligonucleotide
acacuuggagcucaguaag

SEQ ID NO: 3196017 - RNA, 19 nt, Artificial Sequence
  Description of Artificial Sequence: Synthetic oligonucleotide
augccacaagcauagcccc

SEQ ID NO: 3196018 - RNA, 19 nt, Artificial Sequence
  Description of Artificial Sequence: Synthetic oligonucleotide
ucaauuucaugguggggcc

SEQ ID NO: 3196019 - RNA, 19 nt, Artificial Sequence
  Description of Artificial Sequence: Synthetic oligonucleotide
gaaaccagcuugucagagg

SEQ ID NO: 3196020 - RNA, 19 nt, Artificial Sequence
  Description of Artificial Sequence: Synthetic oligonucleotide
ucuggaugugguagggccg

SEQ ID NO: 3196021 - RNA, 19 nt, Artificial Sequence
  Description of Artificial Sequence: Synthetic oligonucleotide
uugcucuugguaaaaggca

SEQ ID NO: 3196022 - RNA, 19 nt, Artificial Sequence
  Description of Artificial Sequence: Synthetic oligonucleotide
ugcuaugcccugaacuagg

SEQ ID NO: 3196023 - RNA, 19 nt, Artificial Sequence
  Description of Artificial Sequence: Synthetic oligonucleotide
gagaagucacguuugagaa

SEQ ID NO: 3196024 - RNA, 19 nt, Artificial Sequence
  Description of Artificial Sequence: Synthetic oligonucleotide
aauggagaagucacguuug

SEQ ID NO: 3196025 - RNA, 19 nt, Artificial Sequence
  Description of Artificial Sequence: Synthetic oligonucleotide
ugcguuugcauucacccuc

SEQ ID NO: 3196026 - RNA, 19 nt, Artificial Sequence
  Description of Artificial Sequence: Synthetic oligonucleotide
ucuccagaaccguuagccg

SEQ ID NO: 3196027 - RNA, 19 nt, Artificial Sequence
  Description of Artificial Sequence: Synthetic oligonucleotide
aauggcccacuucuggaug

SEQ ID NO: 3196028 - RNA, 19 nt, Artificial Sequence
  Description of Artificial Sequence: Synthetic oligonucleotide
acaagcauagccccugacu

SEQ ID NO: 3196029 - RNA, 19 nt, Artificial Sequence
  Description of Artificial Sequence: Synthetic oligonucleotide
aacuaggggugaaaccagc

SEQ ID NO: 3196030 - RNA, 19 nt, Artificial Sequence
  Description of Artificial Sequence: Synthetic oligonucleotide
augauaucuuuguacuucu

SEQ ID NO: 3196031 - RNA, 19 nt, Artificial Sequence
  Description of Artificial Sequence: Synthetic oligonucleotide
ucuuuguacuucuccagaa

SEQ ID NO: 3196032 - RNA, 19 nt, Artificial Sequence
  Description of Artificial Sequence: Synthetic oligonucleotide
cucuugguaaaaggcaucg

SEQ ID NO: 3196033 - RNA, 19 nt, Artificial Sequence
  Description of Artificial Sequence: Synthetic oligonucleotide
uggauccccuccuggaugg

SEQ ID NO: 3196034 - RNA, 19 nt, Artificial Sequence
  Description of Artificial Sequence: Synthetic oligonucleotide
uuucaauuucauggugggg

SEQ ID NO: 3196035 - RNA, 19 nt, Artificial Sequence
  Description of Artificial Sequence: Synthetic oligonucleotide
accagcuugucagagguuc

SEQ ID NO: 3196036 - RNA, 19 nt, Artificial Sequence
  Description of Artificial Sequence: Synthetic oligonucleotide
gaggaagacacuuggagcu

SEQ ID NO: 3196037 - RNA, 19 nt, Artificial Sequence
  Description of Artificial Sequence: Synthetic oligonucleotide
guuugcauucacccucugg

SEQ ID NO: 3196038 - RNA, 19 nt, Artificial Sequence
  Description of Artificial Sequence: Synthetic oligonucleotide
ugcucuugguaaaaggcau

SEQ ID NO: 3196039 - RNA, 19 nt, Artificial Sequence
  Description of Artificial Sequence: Synthetic oligonucleotide
ugaaaccagcuugucagag

SEQ ID NO: 3196040 - RNA, 19 nt, Artificial Sequence
  Description of Artificial Sequence: Synthetic oligonucleotide
uuugagaauggcccacuuc

SEQ ID NO: 3196041 - RNA, 19 nt, Artificial Sequence
  Description of Artificial Sequence: Synthetic oligonucleotide
agugcuaugcccugaacua

SEQ ID NO: 3196042 - RNA, 19 nt, Artificial Sequence
  Description of Artificial Sequence: Synthetic oligonucleotide
gagaugucagugcuaugcc

SEQ ID NO: 3196043 - RNA, 19 nt, Artificial Sequence
  Description of Artificial Sequence: Synthetic oligonucleotide
aguucuccaccggaaaugg

SEQ ID NO: 3196044 - RNA, 19 nt, Artificial Sequence
  Description of Artificial Sequence: Synthetic oligonucleotide
cugaacuaggggugaaacc

SEQ ID NO: 3196045 - RNA, 19 nt, Artificial Sequence
  Description of Artificial Sequence: Synthetic oligonucleotide
cucaguaagaugcuugaca

SEQ ID NO: 3196046 - RNA, 19 nt, Artificial Sequence
  Description of Artificial Sequence: Synthetic oligonucleotide
ggagaugucagugcuaugc

SEQ ID NO: 3196047 - RNA, 19 nt, Artificial Sequence
  Description of Artificial Sequence: Synthetic oligonucleotide
gguuccuguguccaggagg

SEQ ID NO: 3196048 - RNA, 19 nt, Artificial Sequence
  Description of Artificial Sequence: Synthetic oligonucleotide
aucuuuguacuucuccaga

SEQ ID NO: 3196049 - RNA, 19 nt, Artificial Sequence
  Description of Artificial Sequence: Synthetic oligonucleotide
acuucuccagaaccguuag

SEQ ID NO: 3196050 - RNA, 19 nt, Artificial Sequence
  Description of Artificial Sequence: Synthetic oligonucleotide
aauuucaugguggggccca

SEQ ID NO: 3196051 - RNA, 19 nt, Artificial Sequence
  Description of Artificial Sequence: Synthetic oligonucleotide
gcugcguuugcauucaccc

SEQ ID NO: 3196052 - RNA, 19 nt, Artificial Sequence
  Description of Artificial Sequence: Synthetic oligonucleotide
ucuccaccggaaauggaga

SEQ ID NO: 3196053 - RNA, 19 nt, Artificial Sequence
  Description of Artificial Sequence: Synthetic oligonucleotide
gacacuuggagcucaguaa

SEQ ID NO: 3196054 - RNA, 19 nt, Artificial Sequence
  Description of Artificial Sequence: Synthetic oligonucleotide
cuuuguacuucuccagaac

SEQ ID NO: 3196055 - RNA, 19 nt, Artificial Sequence
  Description of Artificial Sequence: Synthetic oligonucleotide
ugcauucacccucuggauc

SEQ ID NO: 3196056 - RNA, 19 nt, Artificial Sequence
  Description of Artificial Sequence: Synthetic oligonucleotide
uggccugauacacagccuc

SEQ ID NO: 3196057 - RNA, 19 nt, Artificial Sequence
  Description of Artificial Sequence: Synthetic oligonucleotide
ggaggaagacacuuggagc

SEQ ID NO: 3196058 - RNA, 19 nt, Artificial Sequence
  Description of Artificial Sequence: Synthetic oligonucleotide
ugucagagguuccuguguc

SEQ ID NO: 3196059 - RNA, 19 nt, Artificial Sequence
  Description of Artificial Sequence: Synthetic oligonucleotide
agaaccguuagccguuuca

SEQ ID NO: 3196060 - RNA, 19 nt, Artificial Sequence
  Description of Artificial Sequence: Synthetic oligonucleotide
agucacguuugagaauggc

SEQ ID NO: 3196061 - RNA, 19 nt, Artificial Sequence
  Description of Artificial Sequence: Synthetic oligonucleotide
ugagaauggcccacuucug

SEQ ID NO: 3196062 - RNA, 19 nt, Artificial Sequence
  Description of Artificial Sequence: Synthetic oligonucleotide
uugucagagguuccugugu

SEQ ID NO: 3196063 - RNA, 19 nt, Artificial Sequence
  Description of Artificial Sequence: Synthetic oligonucleotide
uguacuucuccagaaccgu

SEQ ID NO: 3196064 - RNA, 19 nt, Artificial Sequence
  Description of Artificial Sequence: Synthetic oligonucleotide
uccaggaggaagacacuug

SEQ ID NO: 3196065 - RNA, 19 nt, Artificial Sequence
  Description of Artificial Sequence: Synthetic oligonucleotide
uuagccguuucaauuucau

SEQ ID NO: 3196066 - RNA, 19 nt, Artificial Sequence
  Description of Artificial Sequence: Synthetic oligonucleotide
agaauggcccacuucugga

SEQ ID NO: 3196067 - RNA, 19 nt, Artificial Sequence
  Description of Artificial Sequence: Synthetic oligonucleotide
ggagaagucacguuugaga

SEQ ID NO: 3196068 - RNA, 19 nt, Artificial Sequence
  Description of Artificial Sequence: Synthetic oligonucleotide
guguccaggaggaagacac

SEQ ID NO: 3196069 - RNA, 19 nt, Artificial Sequence
  Description of Artificial Sequence: Synthetic oligonucleotide
cuucccuccaguagaugcc

SEQ ID NO: 3196070 - RNA, 19 nt, Artificial Sequence
  Description of Artificial Sequence: Synthetic oligonucleotide
aaaaggcaucgaugauauc

SEQ ID NO: 3196071 - RNA, 19 nt, Artificial Sequence
  Description of Artificial Sequence: Synthetic oligonucleotide
aacguuauacauuuuaugg

SEQ ID NO: 3196072 - RNA, 19 nt, Artificial Sequence
  Description of Artificial Sequence: Synthetic oligonucleotide
aaaauggaaaacuuguggg

SEQ ID NO: 3196073 - RNA, 19 nt, Artificial Sequence
  Description of Artificial Sequence: Synthetic oligonucleotide
uuuguaauaauauagaaua

SEQ ID NO: 3196074 - RNA, 19 nt, Artificial Sequence
  Description of Artificial Sequence: Synthetic oligonucleotide
aauguuagaaagcaucaac

SEQ ID NO: 3196075 - RNA, 19 nt, Artificial Sequence
  Description of Artificial Sequence: Synthetic oligonucleotide
acaauuauuaaucaucuuc

SEQ ID NO: 3196076 - RNA, 19 nt, Artificial Sequence
  Description of Artificial Sequence: Synthetic oligonucleotide
uuauguagaacuuuaaaug

SEQ ID NO: 3196077 - RNA, 19 nt, Artificial Sequence
  Description of Artificial Sequence: Synthetic oligonucleotide
guuccuauuauuuauagag

SEQ ID NO: 3196078 - RNA, 19 nt, Artificial Sequence
  Description of Artificial Sequence: Synthetic oligonucleotide
uccuacuucaagaaaaugg

SEQ ID NO: 3196079 - RNA, 19 nt, Artificial Sequence
  Description of Artificial Sequence: Synthetic oligonucleotide
aacacuaaaacuauagcgg

SEQ ID NO: 3196080 - RNA, 19 nt, Artificial Sequence
  Description of Artificial Sequence: Synthetic oligonucleotide
ugugugauuauuaaaauaa

SEQ ID NO: 3196081 - RNA, 19 nt, Artificial Sequence
  Description of Artificial Sequence: Synthetic oligonucleotide
aaacucuugauacaauuuc

SEQ ID NO: 3196082 - RNA, 19 nt, Artificial Sequence
  Description of Artificial Sequence: Synthetic oligonucleotide
aaaacuauagcggugcaac

SEQ ID NO: 3196083 - RNA, 19 nt, Artificial Sequence
  Description of Artificial Sequence: Synthetic oligonucleotide
uauauaagagauauguuac

SEQ ID NO: 3196084 - RNA, 19 nt, Artificial Sequence
  Description of Artificial Sequence: Synthetic oligonucleotide
uugaccaugagguuaaagg

SEQ ID NO: 3196085 - RNA, 19 nt, Artificial Sequence
  Description of Artificial Sequence: Synthetic oligonucleotide
uacauauacauaaacaagu

SEQ ID NO: 3196086 - RNA, 19 nt, Artificial Sequence
  Description of Artificial Sequence: Synthetic oligonucleotide
aaaaucuccaucccaacag

SEQ ID NO: 3196087 - RNA, 19 nt, Artificial Sequence
  Description of Artificial Sequence: Synthetic oligonucleotide
uuuuaauuuuaauaaagcu

SEQ ID NO: 3196088 - RNA, 19 nt, Artificial Sequence
  Description of Artificial Sequence: Synthetic oligonucleotide
ugcaauaugaaauauaauu

SEQ ID NO: 3196089 - RNA, 19 nt, Artificial Sequence
  Description of Artificial Sequence: Synthetic oligonucleotide
aauaugaaauauaauuuuc

SEQ ID NO: 3196090 - RNA, 19 nt, Artificial Sequence
  Description of Artificial Sequence: Synthetic oligonucleotide
aauagaaacacuaaaacua

SEQ ID NO: 3196091 - RNA, 19 nt, Artificial Sequence
  Description of Artificial Sequence: Synthetic oligonucleotide
aguaacgucaccuacauau

SEQ ID NO: 3196092 - RNA, 19 nt, Artificial Sequence
  Description of Artificial Sequence: Synthetic oligonucleotide
uuaagcucaaguaacguca

SEQ ID NO: 3196093 - RNA, 19 nt, Artificial Sequence
  Description of Artificial Sequence: Synthetic oligonucleotide
accuuuauuauguagaacu

SEQ ID NO: 3196094 - RNA, 19 nt, Artificial Sequence
  Description of Artificial Sequence: Synthetic oligonucleotide
aaacacacgaaacagucca

SEQ ID NO: 3196095 - RNA, 19 nt, Artificial Sequence
  Description of Artificial Sequence: Synthetic oligonucleotide
aguaaaguacauuuaagcu

SEQ ID NO: 3196096 - RNA, 19 nt, Artificial Sequence
  Description of Artificial Sequence: Synthetic oligonucleotide
uuuaauguuuuauuuauau

SEQ ID NO: 3196097 - RNA, 19 nt, Artificial Sequence
  Description of Artificial Sequence: Synthetic oligonucleotide
gagcaugcaauucaggugg

SEQ ID NO: 3196098 - RNA, 19 nt, Artificial Sequence
  Description of Artificial Sequence: Synthetic oligonucleotide
acuaaaacuauagcggugc

SEQ ID NO: 3196099 - RNA, 19 nt, Artificial Sequence
  Description of Artificial Sequence: Synthetic oligonucleotide
uaaacuuugcucaguaaag

SEQ ID NO: 3196100 - RNA, 19 nt, Artificial Sequence
  Description of Artificial Sequence: Synthetic oligonucleotide
auauauaagagauauguua

SEQ ID NO: 3196101 - RNA, 19 nt, Artificial Sequence
  Description of Artificial Sequence: Synthetic oligonucleotide
uuaaacuuugcucaguaaa

SEQ ID NO: 3196102 - RNA, 19 nt, Artificial Sequence
  Description of Artificial Sequence: Synthetic oligonucleotide
uuuuguaauaauauagaau

SEQ ID NO: 3196103 - RNA, 19 nt, Artificial Sequence
  Description of Artificial Sequence: Synthetic oligonucleotide
agaucuagaagauuuuguc

SEQ ID NO: 3196104 - RNA, 19 nt, Artificial Sequence
  Description of Artificial Sequence: Synthetic oligonucleotide
aaacguuauacauuuuaug

SEQ ID NO: 3196105 - RNA, 19 nt, Artificial Sequence
  Description of Artificial Sequence: Synthetic oligonucleotide
uauuauuuauagagcaugc

SEQ ID NO: 3196106 - RNA, 19 nt, Artificial Sequence
  Description of Artificial Sequence: Synthetic oligonucleotide
aaccuauaaaaucuccauc

SEQ ID NO: 3196107 - RNA, 19 nt, Artificial Sequence
  Description of Artificial Sequence: Synthetic oligonucleotide
uguucuuugccauaaggcc

SEQ ID NO: 3196108 - RNA, 19 nt, Artificial Sequence
  Description of Artificial Sequence: Synthetic oligonucleotide
uauaaaaucuccaucccaa

SEQ ID NO: 3196109 - RNA, 19 nt, Artificial Sequence
  Description of Artificial Sequence: Synthetic oligonucleotide
uuauuuauagagcaugcaa

SEQ ID NO: 3196110 - RNA, 19 nt, Artificial Sequence
  Description of Artificial Sequence: Synthetic oligonucleotide
gacauguuuauacauuucc

SEQ ID NO: 3196111 - RNA, 19 nt, Artificial Sequence
  Description of Artificial Sequence: Synthetic oligonucleotide
ugaaguagcaccauuacuu

SEQ ID NO: 3196112 - RNA, 19 nt, Artificial Sequence
  Description of Artificial Sequence: Synthetic oligonucleotide
uccuauuauuuauagagca

SEQ ID NO: 3196113 - RNA, 19 nt, Artificial Sequence
  Description of Artificial Sequence: Synthetic oligonucleotide
uuuauaucacugaauagaa

SEQ ID NO: 3196114 - RNA, 19 nt, Artificial Sequence
  Description of Artificial Sequence: Synthetic oligonucleotide
acuagaaugucgccguucc

SEQ ID NO: 3196115 - RNA, 19 nt, Artificial Sequence
  Description of Artificial Sequence: Synthetic oligonucleotide
uacauuuaagcucaaguaa

SEQ ID NO: 3196116 - RNA, 19 nt, Artificial Sequence
  Description of Artificial Sequence: Synthetic oligonucleotide
aaaauaugcuuuauaucac

SEQ ID NO: 3196117 - RNA, 19 nt, Artificial Sequence
  Description of Artificial Sequence: Synthetic oligonucleotide
uuuguaauccgucacaauu

SEQ ID NO: 3196118 - RNA, 19 nt, Artificial Sequence
  Description of Artificial Sequence: Synthetic oligonucleotide
aaaacuaucguuacuagaa

SEQ ID NO: 3196119 - RNA, 19 nt, Artificial Sequence
  Description of Artificial Sequence: Synthetic oligonucleotide
aucuagaagauuuugucug

SEQ ID NO: 3196120 - RNA, 19 nt, Artificial Sequence
  Description of Artificial Sequence: Synthetic oligonucleotide
uauuuauagagcaugcaau

SEQ ID NO: 3196121 - RNA, 19 nt, Artificial Sequence
  Description of Artificial Sequence: Synthetic oligonucleotide
aauauaauuuucaagucaa

SEQ ID NO: 3196122 - RNA, 19 nt, Artificial Sequence
  Description of Artificial Sequence: Synthetic oligonucleotide
aauucuauuuauacaaaug

SEQ ID NO: 3196123 - RNA, 19 nt, Artificial Sequence
  Description of Artificial Sequence: Synthetic oligonucleotide
cauauacauaaacaagugg

SEQ ID NO: 3196124 - RNA, 19 nt, Artificial Sequence
  Description of Artificial Sequence: Synthetic oligonucleotide
uaauccgucacaauugugu

SEQ ID NO: 3196125 - RNA, 19 nt, Artificial Sequence
  Description of Artificial Sequence: Synthetic oligonucleotide
uuaaauuaaaauacuugua

SEQ ID NO: 3196126 - RNA, 19 nt, Artificial Sequence
  Description of Artificial Sequence: Synthetic oligonucleotide
ucuguauuaaugcaauuuc

SEQ ID NO: 3196127 - RNA, 19 nt, Artificial Sequence
  Description of Artificial Sequence: Synthetic oligonucleotide
ucaguaaaguacauuuaag

SEQ ID NO: 3196128 - RNA, 19 nt, Artificial Sequence
  Description of Artificial Sequence: Synthetic oligonucleotide
aaauaaaacucuugauaca

SEQ ID NO: 3196129 - RNA, 19 nt, Artificial Sequence
  Description of Artificial Sequence: Synthetic oligonucleotide
guaaaguacauuuaagcuc

SEQ ID NO: 3196130 - RNA, 19 nt, Artificial Sequence
  Description of Artificial Sequence: Synthetic oligonucleotide
uguauuaaugcaauuucuc

SEQ ID NO: 3196131 - RNA, 19 nt, Artificial Sequence
  Description of Artificial Sequence: Synthetic oligonucleotide
aacuaucguuacuagaaug

SEQ ID NO: 3196132 - RNA, 19 nt, Artificial Sequence
  Description of Artificial Sequence: Synthetic oligonucleotide
gaaacacuaaaacuauagc

SEQ ID NO: 3196133 - RNA, 19 nt, Artificial Sequence
  Description of Artificial Sequence: Synthetic oligonucleotide
ugcuuuauaucacugaaua

SEQ ID NO: 3196134 - RNA, 19 nt, Artificial Sequence
  Description of Artificial Sequence: Synthetic oligonucleotide
uaagagauauguuacaguu

SEQ ID NO: 3196135 - RNA, 19 nt, Artificial Sequence
  Description of Artificial Sequence: Synthetic oligonucleotide
uguaauuugcacugaauuc

SEQ ID NO: 3196136 - RNA, 19 nt, Artificial Sequence
  Description of Artificial Sequence: Synthetic oligonucleotide
aaaaggauccacuuguguu

SEQ ID NO: 3196137 - RNA, 19 nt, Artificial Sequence
  Description of Artificial Sequence: Synthetic oligonucleotide
uaggaacccacccacaaag

SEQ ID NO: 3196138 - RNA, 19 nt, Artificial Sequence
  Description of Artificial Sequence: Synthetic oligonucleotide
ucuucauaauuacuguuca

SEQ ID NO: 3196139 - RNA, 19 nt, Artificial Sequence
  Description of Artificial Sequence: Synthetic oligonucleotide
uauagagcaugcaauucag

SEQ ID NO: 3196140 - RNA, 19 nt, Artificial Sequence
  Description of Artificial Sequence: Synthetic oligonucleotide
uaugaaauauaauuuucaa

SEQ ID NO: 3196141 - RNA, 19 nt, Artificial Sequence
  Description of Artificial Sequence: Synthetic oligonucleotide
uguaauaauauagaauaaa

SEQ ID NO: 3196142 - RNA, 19 nt, Artificial Sequence
  Description of Artificial Sequence: Synthetic oligonucleotide
ugugauuauuaaaauaaua

SEQ ID NO: 3196143 - RNA, 19 nt, Artificial Sequence
  Description of Artificial Sequence: Synthetic oligonucleotide
auuacuuaaguuuaccuuu

SEQ ID NO: 3196144 - RNA, 19 nt, Artificial Sequence
  Description of Artificial Sequence: Synthetic oligonucleotide
ugaccaugagguuaaaggc

SEQ ID NO: 3196145 - RNA, 19 nt, Artificial Sequence
  Description of Artificial Sequence: Synthetic oligonucleotide
aucguuacuagaaugucgc

SEQ ID NO: 3196146 - RNA, 19 nt, Artificial Sequence
  Description of Artificial Sequence: Synthetic oligonucleotide
agcacaauuauuaaucauc

SEQ ID NO: 3196147 - RNA, 19 nt, Artificial Sequence
  Description of Artificial Sequence: Synthetic oligonucleotide
aaguuuaccuuuauuaugu

SEQ ID NO: 3196148 - RNA, 19 nt, Artificial Sequence
  Description of Artificial Sequence: Synthetic oligonucleotide
aauuucaaaucuugucuca

SEQ ID NO: 3196149 - RNA, 19 nt, Artificial Sequence
  Description of Artificial Sequence: Synthetic oligonucleotide
ugaaccuauaaaaucucca

SEQ ID NO: 3196150 - RNA, 19 nt, Artificial Sequence
  Description of Artificial Sequence: Synthetic oligonucleotide
acauuuaagcucaaguaac

SEQ ID NO: 3196151 - RNA, 19 nt, Artificial Sequence
  Description of Artificial Sequence: Synthetic oligonucleotide
uuguaauccgucacaauug

SEQ ID NO: 3196152 - RNA, 19 nt, Artificial Sequence
  Description of Artificial Sequence: Synthetic oligonucleotide
uuguguucuagaacgagug

SEQ ID NO: 3196153 - RNA, 19 nt, Artificial Sequence
  Description of Artificial Sequence: Synthetic oligonucleotide
cuuaaauuaaaauacuugu

SEQ ID NO: 3196154 - RNA, 19 nt, Artificial Sequence
  Description of Artificial Sequence: Synthetic oligonucleotide
uguacagaacgccuggccc

SEQ ID NO: 3196155 - RNA, 19 nt, Artificial Sequence
  Description of Artificial Sequence: Synthetic oligonucleotide
auuuaacccagcuacaaaa

SEQ ID NO: 3196156 - RNA, 19 nt, Artificial Sequence
  Description of Artificial Sequence: Synthetic oligonucleotide
uaaaaucuccaucccaaca

SEQ ID NO: 3196157 - RNA, 19 nt, Artificial Sequence
  Description of Artificial Sequence: Synthetic oligonucleotide
acugcucaaaacguuauac

SEQ ID NO: 3196158 - RNA, 19 nt, Artificial Sequence
  Description of Artificial Sequence: Synthetic oligonucleotide
ugucucagcaaauauaaua

SEQ ID NO: 3196159 - RNA, 19 nt, Artificial Sequence
  Description of Artificial Sequence: Synthetic oligonucleotide
ucccauagcacaauuauua

SEQ ID NO: 3196160 - RNA, 19 nt, Artificial Sequence
  Description of Artificial Sequence: Synthetic oligonucleotide
agagauauguuacaguuuu

SEQ ID NO: 3196161 - RNA, 19 nt, Artificial Sequence
  Description of Artificial Sequence: Synthetic oligonucleotide
cugaauucuauuuauacaa

SEQ ID NO: 3196162 - RNA, 19 nt, Artificial Sequence
  Description of Artificial Sequence: Synthetic oligonucleotide
cuuuauaucacugaauaga

SEQ ID NO: 3196163 - RNA, 19 nt, Artificial Sequence
  Description of Artificial Sequence: Synthetic oligonucleotide
acugaauucuauuuauaca

SEQ ID NO: 3196164 - RNA, 19 nt, Artificial Sequence
  Description of Artificial Sequence: Synthetic oligonucleotide
auaaaaucuccaucccaac

SEQ ID NO: 3196165 - RNA, 19 nt, Artificial Sequence
  Description of Artificial Sequence: Synthetic oligonucleotide
uuccuauuauuuauagagc

SEQ ID NO: 3196166 - RNA, 19 nt, Artificial Sequence
  Description of Artificial Sequence: Synthetic oligonucleotide
ucaaguaacgucaccuaca

SEQ ID NO: 3196167 - RNA, 19 nt, Artificial Sequence
  Description of Artificial Sequence: Synthetic oligonucleotide
aauccgucacaauugugug

SEQ ID NO: 3196168 - RNA, 19 nt, Artificial Sequence
  Description of Artificial Sequence: Synthetic oligonucleotide
uuuaugguuuguaauccgu

SEQ ID NO: 3196169 - RNA, 19 nt, Artificial Sequence
  Description of Artificial Sequence: Synthetic oligonucleotide
uauuaaugcaauuucucuu

SEQ ID NO: 3196170 - RNA, 19 nt, Artificial Sequence
  Description of Artificial Sequence: Synthetic oligonucleotide
uagagcaugcaauucaggu

SEQ ID NO: 3196171 - RNA, 19 nt, Artificial Sequence
  Description of Artificial Sequence: Synthetic oligonucleotide
aaacuuuccaucuauuaac

SEQ ID NO: 3196172 - RNA, 19 nt, Artificial Sequence
  Description of Artificial Sequence: Synthetic oligonucleotide
aaaaccuugacuauagugg

SEQ ID NO: 3196173 - RNA, 19 nt, Artificial Sequence
  Description of Artificial Sequence: Synthetic oligonucleotide
aaugaugcagaauaguuga

SEQ ID NO: 3196174 - RNA, 19 nt, Artificial Sequence
  Description of Artificial Sequence: Synthetic oligonucleotide
uguuuugccaucaucuugg

SEQ ID NO: 3196175 - RNA, 19 nt, Artificial Sequence
  Description of Artificial Sequence: Synthetic oligonucleotide
ucucuuaagacauccacgg

SEQ ID NO: 3196176 - RNA, 19 nt, Artificial Sequence
  Description of Artificial Sequence: Synthetic oligonucleotide
aaucaggaggauuucuggc

SEQ ID NO: 3196177 - RNA, 19 nt, Artificial Sequence
  Description of Artificial Sequence: Synthetic oligonucleotide
gaagacauucuucaguagg

SEQ ID NO: 3196178 - RNA, 19 nt, Artificial Sequence
  Description of Artificial Sequence: Synthetic oligonucleotide
agaggauugacugucaggc

SEQ ID NO: 3196179 - RNA, 19 nt, Artificial Sequence
  Description of Artificial Sequence: Synthetic oligonucleotide
uuuccaucuauuaaccuag

SEQ ID NO: 3196180 - RNA, 19 nt, Artificial Sequence
  Description of Artificial Sequence: Synthetic oligonucleotide
uuagcgaaaaccuugacua

SEQ ID NO: 3196181 - RNA, 19 nt, Artificial Sequence
  Description of Artificial Sequence: Synthetic oligonucleotide
uuuuccacaaucaggagga

SEQ ID NO: 3196182 - RNA, 19 nt, Artificial Sequence
  Description of Artificial Sequence: Synthetic oligonucleotide
ucuuaagacauccacggug

SEQ ID NO: 3196183 - RNA, 19 nt, Artificial Sequence
  Description of Artificial Sequence: Synthetic oligonucleotide
uuuaaaugaugcagaauag

SEQ ID NO: 3196184 - RNA, 19 nt, Artificial Sequence
  Description of Artificial Sequence: Synthetic oligonucleotide
uuguucgucaccuugaaga

SEQ ID NO: 3196185 - RNA, 19 nt, Artificial Sequence
  Description of Artificial Sequence: Synthetic oligonucleotide
uuggacuggagacaggugg

SEQ ID NO: 3196186 - RNA, 19 nt, Artificial Sequence
  Description of Artificial Sequence: Synthetic oligonucleotide
ugcagaauaguugaugugg

SEQ ID NO: 3196187 - RNA, 19 nt, Artificial Sequence
  Description of Artificial Sequence: Synthetic oligonucleotide
acuucaagaggauugacug

SEQ ID NO: 3196188 - RNA, 19 nt, Artificial Sequence
  Description of Artificial Sequence: Synthetic oligonucleotide
gaaaaccuugacuauagug

SEQ ID NO: 3196189 - RNA, 19 nt, Artificial Sequence
  Description of Artificial Sequence: Synthetic oligonucleotide
ucaguaggcagguaaaugc

SEQ ID NO: 3196190 - RNA, 19 nt, Artificial Sequence
  Description of Artificial Sequence: Synthetic oligonucleotide
aagacauucuucaguaggc

SEQ ID NO: 3196191 - RNA, 19 nt, Artificial Sequence
  Description of Artificial Sequence: Synthetic oligonucleotide
ucaucuuggauuuggacug

SEQ ID NO: 3196192 - RNA, 19 nt, Artificial Sequence
  Description of Artificial Sequence: Synthetic oligonucleotide
uuaaccuagguaauauuug

SEQ ID NO: 3196193 - RNA, 19 nt, Artificial Sequence
  Description of Artificial Sequence: Synthetic oligonucleotide
uuugccaucaucuuggauu

SEQ ID NO: 3196194 - RNA, 19 nt, Artificial Sequence
  Description of Artificial Sequence: Synthetic oligonucleotide
aaugcucucucucuuaaga

SEQ ID NO: 3196195 - RNA, 19 nt, Artificial Sequence
  Description of Artificial Sequence: Synthetic oligonucleotide
ucuuccagacuucaagagg

SEQ ID NO: 3196196 - RNA, 19 nt, Artificial Sequence
  Description of Artificial Sequence: Synthetic oligonucleotide
aacuuuccaucuauuaacc

SEQ ID NO: 3196197 - RNA, 19 nt, Artificial Sequence
  Description of Artificial Sequence: Synthetic oligonucleotide
acagguggaguccagaguc

SEQ ID NO: 3196198 - RNA, 19 nt, Artificial Sequence
  Description of Artificial Sequence: Synthetic oligonucleotide
gaggauuucuggcuuagcg

SEQ ID NO: 3196199 - RNA, 19 nt, Artificial Sequence
  Description of Artificial Sequence: Synthetic oligonucleotide
guuuuccacaaucaggagg

SEQ ID NO: 3196200 - RNA, 19 nt, Artificial Sequence
  Description of Artificial Sequence: Synthetic oligonucleotide
cuuuaaaugaugcagaaua

SEQ ID NO: 3196201 - RNA, 19 nt, Artificial Sequence
  Description of Artificial Sequence: Synthetic oligonucleotide
cuuaagacauccacggugc

SEQ ID NO: 3196202 - RNA, 19 nt, Artificial Sequence
  Description of Artificial Sequence: Synthetic oligonucleotide
uaaaugaugcagaauaguu

SEQ ID NO: 3196203 - RNA, 19 nt, Artificial Sequence
  Description of Artificial Sequence: Synthetic oligonucleotide
aucaucuuggauuuggacu

SEQ ID NO: 3196204 - RNA, 19 nt, Artificial Sequence
  Description of Artificial Sequence: Synthetic oligonucleotide
aaaccuugacuauagugga

SEQ ID NO: 3196205 - RNA, 19 nt, Artificial Sequence
  Description of Artificial Sequence: Synthetic oligonucleotide
uuggauuuggacuggagac

SEQ ID NO: 3196206 - RNA, 19 nt, Artificial Sequence
  Description of Artificial Sequence: Synthetic oligonucleotide
aggauugacugucaggcgg

SEQ ID NO: 3196207 - RNA, 19 nt, Artificial Sequence
  Description of Artificial Sequence: Synthetic oligonucleotide
ucuggcuuagcgaaaaccu

SEQ ID NO: 3196208 - RNA, 19 nt, Artificial Sequence
  Description of Artificial Sequence: Synthetic oligonucleotide
aagaggauugacugucagg

SEQ ID NO: 3196209 - RNA, 19 nt, Artificial Sequence
  Description of Artificial Sequence: Synthetic oligonucleotide
uugacuauaguggaggucu

SEQ ID NO: 3196210 - RNA, 19 nt, Artificial Sequence
  Description of Artificial Sequence: Synthetic oligonucleotide
aaaugaugcagaauaguug

SEQ ID NO: 3196211 - RNA, 19 nt, Artificial Sequence
  Description of Artificial Sequence: Synthetic oligonucleotide
uauaguggaggucuuccag

SEQ ID NO: 3196212 - RNA, 19 nt, Artificial Sequence
  Description of Artificial Sequence: Synthetic oligonucleotide
uaaccuagguaauauuugc

SEQ ID NO: 3196213 - RNA, 19 nt, Artificial Sequence
  Description of Artificial Sequence: Synthetic oligonucleotide
agagucugcacccaguuug

SEQ ID NO: 3196214 - RNA, 19 nt, Artificial Sequence
  Description of Artificial Sequence: Synthetic oligonucleotide
caucuauuaaccuagguaa

SEQ ID NO: 3196215 - RNA, 19 nt, Artificial Sequence
  Description of Artificial Sequence: Synthetic oligonucleotide
guaauauuugcucugggga

SEQ ID NO: 3196216 - RNA, 19 nt, Artificial Sequence
  Description of Artificial Sequence: Synthetic oligonucleotide
cuugaagaaacuuuccauc

SEQ ID NO: 3196217 - RNA, 19 nt, Artificial Sequence
  Description of Artificial Sequence: Synthetic oligonucleotide
accuagguaauauuugcuc

SEQ ID NO: 3196218 - RNA, 19 nt, Artificial Sequence
  Description of Artificial Sequence: Synthetic oligonucleotide
uucgucaccuugaagaaac

SEQ ID NO: 3196219 - RNA, 19 nt, Artificial Sequence
  Description of Artificial Sequence: Synthetic oligonucleotide
uugaagaaacuuuccaucu

SEQ ID NO: 3196220 - RNA, 19 nt, Artificial Sequence
  Description of Artificial Sequence: Synthetic oligonucleotide
aauauuugcucuggggaag

SEQ ID NO: 3196221 - RNA, 19 nt, Artificial Sequence
  Description of Artificial Sequence: Synthetic oligonucleotide
aagugaauguuuugccauc

SEQ ID NO: 3196222 - RNA, 19 nt, Artificial Sequence
  Description of Artificial Sequence: Synthetic oligonucleotide
uugacucugccuuuaaaug

SEQ ID NO: 3196223 - RNA, 19 nt, Artificial Sequence
  Description of Artificial Sequence: Synthetic oligonucleotide
uuugacucugccuuuaaau

SEQ ID NO: 3196224 - RNA, 19 nt, Artificial Sequence
  Description of Artificial Sequence: Synthetic oligonucleotide
acuauaguggaggucuucc

SEQ ID NO: 3196225 - RNA, 19 nt, Artificial Sequence
  Description of Artificial Sequence: Synthetic oligonucleotide
cucucuuaagacauccacg

SEQ ID NO: 3196226 - RNA, 19 nt, Artificial Sequence
  Description of Artificial Sequence: Synthetic oligonucleotide
uccacaaucaggaggauuu

SEQ ID NO: 3196227 - RNA, 19 nt, Artificial Sequence
  Description of Artificial Sequence: Synthetic oligonucleotide
uuugcucuggggaagacau

SEQ ID NO: 3196228 - RNA, 19 nt, Artificial Sequence
  Description of Artificial Sequence: Synthetic oligonucleotide
ucucucuuaagacauccac

SEQ ID NO: 3196229 - RNA, 19 nt, Artificial Sequence
  Description of Artificial Sequence: Synthetic oligonucleotide
ucugcacccaguuugacuc

SEQ ID NO: 3196230 - RNA, 19 nt, Artificial Sequence
  Description of Artificial Sequence: Synthetic oligonucleotide
gguaauauuugcucugggg

SEQ ID NO: 3196231 - RNA, 19 nt, Artificial Sequence
  Description of Artificial Sequence: Synthetic oligonucleotide
acuggagacagguggaguc

SEQ ID NO: 3196232 - RNA, 19 nt, Artificial Sequence
  Description of Artificial Sequence: Synthetic oligonucleotide
gaaacuuuccaucuauuaa

SEQ ID NO: 3196233 - RNA, 19 nt, Artificial Sequence
  Description of Artificial Sequence: Synthetic oligonucleotide
ugacucugccuuuaaauga

SEQ ID NO: 3196234 - RNA, 19 nt, Artificial Sequence
  Description of Artificial Sequence: Synthetic oligonucleotide
uaauauuugcucuggggaa

SEQ ID NO: 3196235 - RNA, 19 nt, Artificial Sequence
  Description of Artificial Sequence: Synthetic oligonucleotide
uuaaaugaugcagaauagu

SEQ ID NO: 3196236 - RNA, 19 nt, Artificial Sequence
  Description of Artificial Sequence: Synthetic oligonucleotide
ucaccuugaagaaacuuuc

SEQ ID NO: 3196237 - RNA, 19 nt, Artificial Sequence
  Description of Artificial Sequence: Synthetic oligonucleotide
cuguuuuccacaaucagga

SEQ ID NO: 3196238 - RNA, 19 nt, Artificial Sequence
  Description of Artificial Sequence: Synthetic oligonucleotide
uugacugucaggcggcaag

SEQ ID NO: 3196239 - RNA, 19 nt, Artificial Sequence
  Description of Artificial Sequence: Synthetic oligonucleotide
gacauucuucaguaggcag

SEQ ID NO: 3196240 - RNA, 19 nt, Artificial Sequence
  Description of Artificial Sequence: Synthetic oligonucleotide
caaucaggaggauuucugg

SEQ ID NO: 3196241 - RNA, 19 nt, Artificial Sequence
  Description of Artificial Sequence: Synthetic oligonucleotide
ugcuguuuuccacaaucag

SEQ ID NO: 3196242 - RNA, 19 nt, Artificial Sequence
  Description of Artificial Sequence: Synthetic oligonucleotide
ugccuuuaaaugaugcaga

SEQ ID NO: 3196243 - RNA, 19 nt, Artificial Sequence
  Description of Artificial Sequence: Synthetic oligonucleotide
uucuucaguaggcagguaa

SEQ ID NO: 3196244 - RNA, 19 nt, Artificial Sequence
  Description of Artificial Sequence: Synthetic oligonucleotide
aagacauccacggugcugu

SEQ ID NO: 3196245 - RNA, 19 nt, Artificial Sequence
  Description of Artificial Sequence: Synthetic oligonucleotide
uggcuuagcgaaaaccuug

SEQ ID NO: 3196246 - RNA, 19 nt, Artificial Sequence
  Description of Artificial Sequence: Synthetic oligonucleotide
aauguuuugccaucaucuu

SEQ ID NO: 3196247 - RNA, 19 nt, Artificial Sequence
  Description of Artificial Sequence: Synthetic oligonucleotide
cuagguaauauuugcucug

SEQ ID NO: 3196248 - RNA, 19 nt, Artificial Sequence
  Description of Artificial Sequence: Synthetic oligonucleotide
aggucuuccagacuucaag

SEQ ID NO: 3196249 - RNA, 19 nt, Artificial Sequence
  Description of Artificial Sequence: Synthetic oligonucleotide
ugaauguuuugccaucauc

SEQ ID NO: 3196250 - RNA, 19 nt, Artificial Sequence
  Description of Artificial Sequence: Synthetic oligonucleotide
augcucucucucuuaagac

SEQ ID NO: 3196251 - RNA, 19 nt, Artificial Sequence
  Description of Artificial Sequence: Synthetic oligonucleotide
uagguaauauuugcucugg

SEQ ID NO: 3196252 - RNA, 19 nt, Artificial Sequence
  Description of Artificial Sequence: Synthetic oligonucleotide
aaaugcucucucucuuaag

SEQ ID NO: 3196253 - RNA, 19 nt, Artificial Sequence
  Description of Artificial Sequence: Synthetic oligonucleotide
auguuuugccaucaucuug

SEQ ID NO: 3196254 - RNA, 19 nt, Artificial Sequence
  Description of Artificial Sequence: Synthetic oligonucleotide
gaugcagaauaguugaugu

SEQ ID NO: 3196255 - RNA, 19 nt, Artificial Sequence
  Description of Artificial Sequence: Synthetic oligonucleotide
ucugccuuuaaaugaugca

SEQ ID NO: 3196256 - RNA, 19 nt, Artificial Sequence
  Description of Artificial Sequence: Synthetic oligonucleotide
accuugacuauaguggagg

SEQ ID NO: 3196257 - RNA, 19 nt, Artificial Sequence
  Description of Artificial Sequence: Synthetic oligonucleotide
gaauguuuugccaucaucu

SEQ ID NO: 3196258 - RNA, 19 nt, Artificial Sequence
  Description of Artificial Sequence: Synthetic oligonucleotide
cuuccagacuucaagagga

SEQ ID NO: 3196259 - RNA, 19 nt, Artificial Sequence
  Description of Artificial Sequence: Synthetic oligonucleotide
ugaugcagaauaguugaug

SEQ ID NO: 3196260 - RNA, 19 nt, Artificial Sequence
  Description of Artificial Sequence: Synthetic oligonucleotide
acauucuucaguaggcagg

SEQ ID NO: 3196261 - RNA, 19 nt, Artificial Sequence
  Description of Artificial Sequence: Synthetic oligonucleotide
cugccuuuaaaugaugcag

SEQ ID NO: 3196262 - RNA, 19 nt, Artificial Sequence
  Description of Artificial Sequence: Synthetic oligonucleotide
uucaagaggauugacuguc

SEQ ID NO: 3196263 - RNA, 19 nt, Artificial Sequence
  Description of Artificial Sequence: Synthetic oligonucleotide
ugcucucucucuuaagaca

SEQ ID NO: 3196264 - RNA, 19 nt, Artificial Sequence
  Description of Artificial Sequence: Synthetic oligonucleotide
agaaacuuuccaucuauua

SEQ ID NO: 3196265 - RNA, 19 nt, Artificial Sequence
  Description of Artificial Sequence: Synthetic oligonucleotide
uaaaugcucucucucuuaa

SEQ ID NO: 3196266 - RNA, 19 nt, Artificial Sequence
  Description of Artificial Sequence: Synthetic oligonucleotide
accuugaagaaacuuucca

SEQ ID NO: 3196267 - RNA, 19 nt, Artificial Sequence
  Description of Artificial Sequence: Synthetic oligonucleotide
ucucucucuuaagacaucc

SEQ ID NO: 3196268 - RNA, 19 nt, Artificial Sequence
  Description of Artificial Sequence: Synthetic oligonucleotide
aucaggaggauuucuggcu

SEQ ID NO: 3196269 - RNA, 19 nt, Artificial Sequence
  Description of Artificial Sequence: Synthetic oligonucleotide
cucugccuuuaaaugaugc

SEQ ID NO: 3196270 - RNA, 19 nt, Artificial Sequence
  Description of Artificial Sequence: Synthetic oligonucleotide
aggauuucuggcuuagcga

SEQ ID NO: 3196271 - RNA, 19 nt, Artificial Sequence
  Description of Artificial Sequence: Synthetic oligonucleotide
uuucucuuaagcaugacag

SEQ ID NO: 3196272 - RNA, 19 nt, Artificial Sequence
  Description of Artificial Sequence: Synthetic oligonucleotide
aaaaucuacccuguuaccc

SEQ ID NO: 3196273 - RNA, 19 nt, Artificial Sequence
  Description of Artificial Sequence: Synthetic oligonucleotide
uucacgaugacguugcagg

SEQ ID NO: 3196274 - RNA, 19 nt, Artificial Sequence
  Description of Artificial Sequence: Synthetic oligonucleotide
uguacaagugcacacaaga

SEQ ID NO: 3196275 - RNA, 19 nt, Artificial Sequence
  Description of Artificial Sequence: Synthetic oligonucleotide
uuucguacucaucagacug

SEQ ID NO: 3196276 - RNA, 19 nt, Artificial Sequence
  Description of Artificial Sequence: Synthetic oligonucleotide
uuuuguuucguuauuaguu

SEQ ID NO: 3196277 - RNA, 19 nt, Artificial Sequence
  Description of Artificial Sequence: Synthetic oligonucleotide
ugaaacagaaucccgggug

SEQ ID NO: 3196278 - RNA, 19 nt, Artificial Sequence
  Description of Artificial Sequence: Synthetic oligonucleotide
ugaucuuucucacuuuccc

SEQ ID NO: 3196279 - RNA, 19 nt, Artificial Sequence
  Description of Artificial Sequence: Synthetic oligonucleotide
agugaaacagaaucccggg

SEQ ID NO: 3196280 - RNA, 19 nt, Artificial Sequence
  Description of Artificial Sequence: Synthetic oligonucleotide
ugcacauuucucuuaagca

SEQ ID NO: 3196281 - RNA, 19 nt, Artificial Sequence
  Description of Artificial Sequence: Synthetic oligonucleotide
aaaucuacccuguuacccu

SEQ ID NO: 3196282 - RNA, 19 nt, Artificial Sequence
  Description of Artificial Sequence: Synthetic oligonucleotide
ucuuaagcaugacaggaga

SEQ ID NO: 3196283 - RNA, 19 nt, Artificial Sequence
  Description of Artificial Sequence: Synthetic oligonucleotide
uugcacauuucucuuaagc

SEQ ID NO: 3196284 - RNA, 19 nt, Artificial Sequence
  Description of Artificial Sequence: Synthetic oligonucleotide
uuuucauugguucguccag

SEQ ID NO: 3196285 - RNA, 19 nt, Artificial Sequence
  Description of Artificial Sequence: Synthetic oligonucleotide
gaugacgccguccugcggg

SEQ ID NO: 3196286 - RNA, 19 nt, Artificial Sequence
  Description of Artificial Sequence: Synthetic oligonucleotide
uacaagugcacacaagaaa

SEQ ID NO: 3196287 - RNA, 19 nt, Artificial Sequence
  Description of Artificial Sequence: Synthetic oligonucleotide
aagugcacacaagaaaauc

SEQ ID NO: 3196288 - RNA, 19 nt, Artificial Sequence
  Description of Artificial Sequence: Synthetic oligonucleotide
aauugcacauuucucuuaa

SEQ ID NO: 3196289 - RNA, 19 nt, Artificial Sequence
  Description of Artificial Sequence: Synthetic oligonucleotide
ugucucaccaacucagugc

SEQ ID NO: 3196290 - RNA, 19 nt, Artificial Sequence
  Description of Artificial Sequence: Synthetic oligonucleotide
aagaaaaucuacccuguua

SEQ ID NO: 3196291 - RNA, 19 nt, Artificial Sequence
  Description of Artificial Sequence: Synthetic oligonucleotide
uaagcaugacaggagaaag

SEQ ID NO: 3196292 - RNA, 19 nt, Artificial Sequence
  Description of Artificial Sequence: Synthetic oligonucleotide
cagugaaacagaaucccgg

SEQ ID NO: 3196293 - RNA, 19 nt, Artificial Sequence
  Description of Artificial Sequence: Synthetic oligonucleotide
aaucuacccuguuacccuc

SEQ ID NO: 3196294 - RNA, 19 nt, Artificial Sequence
  Description of Artificial Sequence: Synthetic oligonucleotide
uucucuuaagcaugacagg

SEQ ID NO: 3196295 - RNA, 19 nt, Artificial Sequence
  Description of Artificial Sequence: Synthetic oligonucleotide
ucucuuaagcaugacagga

SEQ ID NO: 3196296 - RNA, 19 nt, Artificial Sequence
  Description of Artificial Sequence: Synthetic oligonucleotide
aagcaugacaggagaaagc

SEQ ID NO: 3196297 - RNA, 19 nt, Artificial Sequence
  Description of Artificial Sequence: Synthetic oligonucleotide
uugacgugcgcaugcagcg

SEQ ID NO: 3196298 - RNA, 19 nt, Artificial Sequence
  Description of Artificial Sequence: Synthetic oligonucleotide
uucguacucaucagacugg

SEQ ID NO: 3196299 - RNA, 19 nt, Artificial Sequence
  Description of Artificial Sequence: Synthetic oligonucleotide
ucuagaggacuucuggacu

SEQ ID NO: 3196300 - RNA, 19 nt, Artificial Sequence
  Description of Artificial Sequence: Synthetic oligonucleotide
acugucaggucgaugacgc

SEQ ID NO: 3196301 - RNA, 19 nt, Artificial Sequence
  Description of Artificial Sequence: Synthetic oligonucleotide
uuauuaguuguuuuauuuu

SEQ ID NO: 3196302 - RNA, 19 nt, Artificial Sequence
  Description of Artificial Sequence: Synthetic oligonucleotide
auuucucuuaagcaugaca

SEQ ID NO: 3196303 - RNA, 19 nt, Artificial Sequence
  Description of Artificial Sequence: Synthetic oligonucleotide
uuacccuccacccacugac

SEQ ID NO: 3196304 - RNA, 19 nt, Artificial Sequence
  Description of Artificial Sequence: Synthetic oligonucleotide
uggacucgcagcuacaacu

SEQ ID NO: 3196305 - RNA, 19 nt, Artificial Sequence
  Description of Artificial Sequence: Synthetic oligonucleotide
agugccaguccacauguuc

SEQ ID NO: 3196306 - RNA, 19 nt, Artificial Sequence
  Description of Artificial Sequence: Synthetic oligonucleotide
cacauuucucuuaagcaug

SEQ ID NO: 3196307 - RNA, 19 nt, Artificial Sequence
  Description of Artificial Sequence: Synthetic oligonucleotide
ugucaggucgaugacgccg

SEQ ID NO: 3196308 - RNA, 19 nt, Artificial Sequence
  Description of Artificial Sequence: Synthetic oligonucleotide
uacccuguuacccuccacc

SEQ ID NO: 3196309 - RNA, 19 nt, Artificial Sequence
  Description of Artificial Sequence: Synthetic oligonucleotide
acgaugacguugcaggcgg

SEQ ID NO: 3196310 - RNA, 19 nt, Artificial Sequence
  Description of Artificial Sequence: Synthetic oligonucleotide
guccacauguucuagagga

SEQ ID NO: 3196311 - RNA, 19 nt, Artificial Sequence
  Description of Artificial Sequence: Synthetic oligonucleotide
uccagcucauucaccacgg

SEQ ID NO: 3196312 - RNA, 19 nt, Artificial Sequence
  Description of Artificial Sequence: Synthetic oligonucleotide
uucguuauuaguuguuuua

SEQ ID NO: 3196313 - RNA, 19 nt, Artificial Sequence
  Description of Artificial Sequence: Synthetic oligonucleotide
ugaggaucgaauugcacau

SEQ ID NO: 3196314 - RNA, 19 nt, Artificial Sequence
  Description of Artificial Sequence: Synthetic oligonucleotide
gcuacaacuguacaagugc

SEQ ID NO: 3196315 - RNA, 19 nt, Artificial Sequence
  Description of Artificial Sequence: Synthetic oligonucleotide
ugacugaggaucgaauugc

SEQ ID NO: 3196316 - RNA, 19 nt, Artificial Sequence
  Description of Artificial Sequence: Synthetic oligonucleotide
gucucaccaacucagugcc

SEQ ID NO: 3196317 - RNA, 19 nt, Artificial Sequence
  Description of Artificial Sequence: Synthetic oligonucleotide
ucgcguuccgccuugacgu

SEQ ID NO: 3196318 - RNA, 19 nt, Artificial Sequence
  Description of Artificial Sequence: Synthetic oligonucleotide
uacucaucagacuggggca

SEQ ID NO: 3196319 - RNA, 19 nt, Artificial Sequence
  Description of Artificial Sequence: Synthetic oligonucleotide
agguccaccaccuccccac

SEQ ID NO: 3196320 - RNA, 19 nt, Artificial Sequence
  Description of Artificial Sequence: Synthetic oligonucleotide
gaaagcaaacagugaaaca

SEQ ID NO: 3196321 - RNA, 19 nt, Artificial Sequence
  Description of Artificial Sequence: Synthetic oligonucleotide
caugacaggagaaagcaaa

SEQ ID NO: 3196322 - RNA, 19 nt, Artificial Sequence
  Description of Artificial Sequence: Synthetic oligonucleotide
cucuuaagcaugacaggag

SEQ ID NO: 3196323 - RNA, 19 nt, Artificial Sequence
  Description of Artificial Sequence: Synthetic oligonucleotide
gaaacagaaucccggguga

SEQ ID NO: 3196324 - RNA, 19 nt, Artificial Sequence
  Description of Artificial Sequence: Synthetic oligonucleotide
uuaagcaugacaggagaaa

SEQ ID NO: 3196325 - RNA, 19 nt, Artificial Sequence
  Description of Artificial Sequence: Synthetic oligonucleotide
guuuucauugguucgucca

SEQ ID NO: 3196326 - RNA, 19 nt, Artificial Sequence
  Description of Artificial Sequence: Synthetic oligonucleotide
acaagugcacacaagaaaa

SEQ ID NO: 3196327 - RNA, 19 nt, Artificial Sequence
  Description of Artificial Sequence: Synthetic oligonucleotide
cauugguucguccagcuca

SEQ ID NO: 3196328 - RNA, 19 nt, Artificial Sequence
  Description of Artificial Sequence: Synthetic oligonucleotide
uguuuucauugguucgucc

SEQ ID NO: 3196329 - RNA, 19 nt, Artificial Sequence
  Description of Artificial Sequence: Synthetic oligonucleotide
gaucgaauugcacauuucu

SEQ ID NO: 3196330 - RNA, 19 nt, Artificial Sequence
  Description of Artificial Sequence: Synthetic oligonucleotide
uacaacuguacaagugcac

SEQ ID NO: 3196331 - RNA, 19 nt, Artificial Sequence
  Description of Artificial Sequence: Synthetic oligonucleotide
auucaccacgggcucuucc

SEQ ID NO: 3196332 - RNA, 19 nt, Artificial Sequence
  Description of Artificial Sequence: Synthetic oligonucleotide
ucuuccgaggacagcagcu

SEQ ID NO: 3196333 - RNA, 19 nt, Artificial Sequence
  Description of Artificial Sequence: Synthetic oligonucleotide
aguccacauguucuagagg

SEQ ID NO: 3196334 - RNA, 19 nt, Artificial Sequence
  Description of Artificial Sequence: Synthetic oligonucleotide
ggagaaagcaaacagugaa

SEQ ID NO: 3196335 - RNA, 19 nt, Artificial Sequence
  Description of Artificial Sequence: Synthetic oligonucleotide
guccagcucauucaccacg

SEQ ID NO: 3196336 - RNA, 19 nt, Artificial Sequence
  Description of Artificial Sequence: Synthetic oligonucleotide
caguccacauguucuagag

SEQ ID NO: 3196337 - RNA, 19 nt, Artificial Sequence
  Description of Artificial Sequence: Synthetic oligonucleotide
acagugaaacagaaucccg

SEQ ID NO: 3196338 - RNA, 19 nt, Artificial Sequence
  Description of Artificial Sequence: Synthetic oligonucleotide
cuagaggacuucuggacuc

SEQ ID NO: 3196339 - RNA, 19 nt, Artificial Sequence
  Description of Artificial Sequence: Synthetic oligonucleotide
acuggggcacuccacaacu

SEQ ID NO: 3196340 - RNA, 19 nt, Artificial Sequence
  Description of Artificial Sequence: Synthetic oligonucleotide
ucguacucaucagacuggg

SEQ ID NO: 3196341 - RNA, 19 nt, Artificial Sequence
  Description of Artificial Sequence: Synthetic oligonucleotide
acagaaucccgggugaucu

SEQ ID NO: 3196342 - RNA, 19 nt, Artificial Sequence
  Description of Artificial Sequence: Synthetic oligonucleotide
uuucguuauuaguuguuuu

SEQ ID NO: 3196343 - RNA, 19 nt, Artificial Sequence
  Description of Artificial Sequence: Synthetic oligonucleotide
agguccugcgcuccgcggc

SEQ ID NO: 3196344 - RNA, 19 nt, Artificial Sequence
  Description of Artificial Sequence: Synthetic oligonucleotide
uguuucguuauuaguuguu

SEQ ID NO: 3196345 - RNA, 19 nt, Artificial Sequence
  Description of Artificial Sequence: Synthetic oligonucleotide
ugacaggagaaagcaaaca

SEQ ID NO: 3196346 - RNA, 19 nt, Artificial Sequence
  Description of Artificial Sequence: Synthetic oligonucleotide
gaugacguugcaggcggcg

SEQ ID NO: 3196347 - RNA, 19 nt, Artificial Sequence
  Description of Artificial Sequence: Synthetic oligonucleotide
acuguacaagugcacacaa

SEQ ID NO: 3196348 - RNA, 19 nt, Artificial Sequence
  Description of Artificial Sequence: Synthetic oligonucleotide
agcucauucaccacgggcu

SEQ ID NO: 3196349 - RNA, 19 nt, Artificial Sequence
  Description of Artificial Sequence: Synthetic oligonucleotide
ucgaugacgccguccugcg

SEQ ID NO: 3196350 - RNA, 19 nt, Artificial Sequence
  Description of Artificial Sequence: Synthetic oligonucleotide
cucgcguuccgccuugacg

SEQ ID NO: 3196351 - RNA, 19 nt, Artificial Sequence
  Description of Artificial Sequence: Synthetic oligonucleotide
ucguuauuaguuguuuuau

SEQ ID NO: 3196352 - RNA, 19 nt, Artificial Sequence
  Description of Artificial Sequence: Synthetic oligonucleotide
ugguucguccagcucauuc

SEQ ID NO: 3196353 - RNA, 19 nt, Artificial Sequence
  Description of Artificial Sequence: Synthetic oligonucleotide
cucgcagcuacaacuguac

SEQ ID NO: 3196354 - RNA, 19 nt, Artificial Sequence
  Description of Artificial Sequence: Synthetic oligonucleotide
ucacgaugacguugcaggc

SEQ ID NO: 3196355 - RNA, 19 nt, Artificial Sequence
  Description of Artificial Sequence: Synthetic oligonucleotide
cucaccaacucagugccag

SEQ ID NO: 3196356 - RNA, 19 nt, Artificial Sequence
  Description of Artificial Sequence: Synthetic oligonucleotide
aggucgaugacgccguccu

SEQ ID NO: 3196357 - RNA, 19 nt, Artificial Sequence
  Description of Artificial Sequence: Synthetic oligonucleotide
uccacaacugucucaccaa

SEQ ID NO: 3196358 - RNA, 19 nt, Artificial Sequence
  Description of Artificial Sequence: Synthetic oligonucleotide
acaagaaaaucuacccugu

SEQ ID NO: 3196359 - RNA, 19 nt, Artificial Sequence
  Description of Artificial Sequence: Synthetic oligonucleotide
aacucagugccaguccaca

SEQ ID NO: 3196360 - RNA, 19 nt, Artificial Sequence
  Description of Artificial Sequence: Synthetic oligonucleotide
cuucuggacucgcagcuac

SEQ ID NO: 3196361 - RNA, 19 nt, Artificial Sequence
  Description of Artificial Sequence: Synthetic oligonucleotide
ugacguugcaggcggcggc

SEQ ID NO: 3196362 - RNA, 19 nt, Artificial Sequence
  Description of Artificial Sequence: Synthetic oligonucleotide
cagcucauucaccacgggc

SEQ ID NO: 3196363 - RNA, 19 nt, Artificial Sequence
  Description of Artificial Sequence: Synthetic oligonucleotide
acauguucuagaggacuuc

SEQ ID NO: 3196364 - RNA, 19 nt, Artificial Sequence
  Description of Artificial Sequence: Synthetic oligonucleotide
uagaggacuucuggacucg

SEQ ID NO: 3196365 - RNA, 19 nt, Artificial Sequence
  Description of Artificial Sequence: Synthetic oligonucleotide
cucagugccaguccacaug

SEQ ID NO: 3196366 - RNA, 19 nt, Artificial Sequence
  Description of Artificial Sequence: Synthetic oligonucleotide
aaucccgggugaucuuucu

SEQ ID NO: 3196367 - RNA, 19 nt, Artificial Sequence
  Description of Artificial Sequence: Synthetic oligonucleotide
cuguacaagugcacacaag

SEQ ID NO: 3196368 - RNA, 19 nt, Artificial Sequence
  Description of Artificial Sequence: Synthetic oligonucleotide
cacuccacaacugucucac

SEQ ID NO: 3196369 - RNA, 19 nt, Artificial Sequence
  Description of Artificial Sequence: Synthetic oligonucleotide
agcuacaacuguacaagug

SEQ ID NO: 3196370 - RNA, 19 nt, Artificial Sequence
  Description of Artificial Sequence: Synthetic oligonucleotide
uguuacccuccacccacug

SEQ ID NO: 3196371 - RNA, 19 nt, Artificial Sequence
  Description of Artificial Sequence: Synthetic oligonucleotide
aaagacaguauucaucugg

SEQ ID NO: 3196372 - RNA, 19 nt, Artificial Sequence
  Description of Artificial Sequence: Synthetic oligonucleotide
uuuugaguugaauucauag

SEQ ID NO: 3196373 - RNA, 19 nt, Artificial Sequence
  Description of Artificial Sequence: Synthetic oligonucleotide
ucaaagacaguauucaucu

SEQ ID NO: 3196374 - RNA, 19 nt, Artificial Sequence
  Description of Artificial Sequence: Synthetic oligonucleotide
aauucauagauuuccccag

SEQ ID NO: 3196375 - RNA, 19 nt, Artificial Sequence
  Description of Artificial Sequence: Synthetic oligonucleotide
aaugggucuuuccacuucc

SEQ ID NO: 3196376 - RNA, 19 nt, Artificial Sequence
  Description of Artificial Sequence: Synthetic oligonucleotide
acaguauucaucuggacag

SEQ ID NO: 3196377 - RNA, 19 nt, Artificial Sequence
  Description of Artificial Sequence: Synthetic oligonucleotide
acagacuaccaccacagcc

SEQ ID NO: 3196378 - RNA, 19 nt, Artificial Sequence
  Description of Artificial Sequence: Synthetic oligonucleotide
uugaguugaauucauagau

SEQ ID NO: 3196379 - RNA, 19 nt, Artificial Sequence
  Description of Artificial Sequence: Synthetic oligonucleotide
uguggcuucuccaucaaag

SEQ ID NO: 3196380 - RNA, 19 nt, Artificial Sequence
  Description of Artificial Sequence: Synthetic oligonucleotide
aucuggacagacuaccacc

SEQ ID NO: 3196381 - RNA, 19 nt, Artificial Sequence
  Description of Artificial Sequence: Synthetic oligonucleotide
guugaauucauagauuucc

SEQ ID NO: 3196382 - RNA, 19 nt, Artificial Sequence
  Description of Artificial Sequence: Synthetic oligonucleotide
uuugaguugaauucauaga

SEQ ID NO: 3196383 - RNA, 19 nt, Artificial Sequence
  Description of Artificial Sequence: Synthetic oligonucleotide
uauucaucuggacagacua

SEQ ID NO: 3196384 - RNA, 19 nt, Artificial Sequence
  Description of Artificial Sequence: Synthetic oligonucleotide
gaauucauagauuucccca

SEQ ID NO: 3196385 - RNA, 19 nt, Artificial Sequence
  Description of Artificial Sequence: Synthetic oligonucleotide
ugaauucauagauuucccc

SEQ ID NO: 3196386 - RNA, 19 nt, Artificial Sequence
  Description of Artificial Sequence: Synthetic oligonucleotide
uugaauucauagauuuccc

SEQ ID NO: 3196387 - RNA, 19 nt, Artificial Sequence
  Description of Artificial Sequence: Synthetic oligonucleotide
ugggcaguuggguuaaugg

SEQ ID NO: 3196388 - RNA, 19 nt, Artificial Sequence
  Description of Artificial Sequence: Synthetic oligonucleotide
gauuuccccagucacuggg

SEQ ID NO: 3196389 - RNA, 19 nt, Artificial Sequence
  Description of Artificial Sequence: Synthetic oligonucleotide
gacaguauucaucuggaca

SEQ ID NO: 3196390 - RNA, 19 nt, Artificial Sequence
  Description of Artificial Sequence: Synthetic oligonucleotide
cauagauuuccccagucac

SEQ ID NO: 3196391 - RNA, 19 nt, Artificial Sequence
  Description of Artificial Sequence: Synthetic oligonucleotide
aucaaagacaguauucauc

SEQ ID NO: 3196392 - RNA, 19 nt, Artificial Sequence
  Description of Artificial Sequence: Synthetic oligonucleotide
uucuccaucaaagacagua

SEQ ID NO: 3196393 - RNA, 19 nt, Artificial Sequence
  Description of Artificial Sequence: Synthetic oligonucleotide
ucauagauuuccccaguca

SEQ ID NO: 3196394 - RNA, 19 nt, Artificial Sequence
  Description of Artificial Sequence: Synthetic oligonucleotide
uccaucaaagacaguauuc

SEQ ID NO: 3196395 - RNA, 19 nt, Artificial Sequence
  Description of Artificial Sequence: Synthetic oligonucleotide
ucuggacagacuaccacca

SEQ ID NO: 3196396 - RNA, 19 nt, Artificial Sequence
  Description of Artificial Sequence: Synthetic oligonucleotide
uucaucuggacagacuacc

SEQ ID NO: 3196397 - RNA, 19 nt, Artificial Sequence
  Description of Artificial Sequence: Synthetic oligonucleotide
uagauuuccccagucacug

SEQ ID NO: 3196398 - RNA, 19 nt, Artificial Sequence
  Description of Artificial Sequence: Synthetic oligonucleotide
aguauucaucuggacagac

SEQ ID NO: 3196399 - RNA, 19 nt, Artificial Sequence
  Description of Artificial Sequence: Synthetic oligonucleotide
uggacagacuaccaccaca

SEQ ID NO: 3196400 - RNA, 19 nt, Artificial Sequence
  Description of Artificial Sequence: Synthetic oligonucleotide
ugaguugaauucauagauu

SEQ ID NO: 3196401 - RNA, 19 nt, Artificial Sequence
  Description of Artificial Sequence: Synthetic oligonucleotide
aagacaguauucaucugga

SEQ ID NO: 3196402 - RNA, 19 nt, Artificial Sequence
  Description of Artificial Sequence: Synthetic oligonucleotide
agacaguauucaucuggac

SEQ ID NO: 3196403 - RNA, 19 nt, Artificial Sequence
  Description of Artificial Sequence: Synthetic oligonucleotide
cuuuccacuuccuggcacc

SEQ ID NO: 3196404 - RNA, 19 nt, Artificial Sequence
  Description of Artificial Sequence: Synthetic oligonucleotide
uggcuucuccaucaaagac

SEQ ID NO: 3196405 - RNA, 19 nt, Artificial Sequence
  Description of Artificial Sequence: Synthetic oligonucleotide
cugggcucaggccaguugg

SEQ ID NO: 3196406 - RNA, 19 nt, Artificial Sequence
  Description of Artificial Sequence: Synthetic oligonucleotide
uucauagauuuccccaguc

SEQ ID NO: 3196407 - RNA, 19 nt, Artificial Sequence
  Description of Artificial Sequence: Synthetic oligonucleotide
accacagccucuuucuuca

SEQ ID NO: 3196408 - RNA, 19 nt, Artificial Sequence
  Description of Artificial Sequence: Synthetic oligonucleotide
aggccaguugggcaguugg

SEQ ID NO: 3196409 - RNA, 19 nt, Artificial Sequence
  Description of Artificial Sequence: Synthetic oligonucleotide
gggucuuuccacuuccugg

SEQ ID NO: 3196410 - RNA, 19 nt, Artificial Sequence
  Description of Artificial Sequence: Synthetic oligonucleotide
ucaucuggacagacuacca

SEQ ID NO: 3196411 - RNA, 19 nt, Artificial Sequence
  Description of Artificial Sequence: Synthetic oligonucleotide
uggguuaaugggucuuucc

SEQ ID NO: 3196412 - RNA, 19 nt, Artificial Sequence
  Description of Artificial Sequence: Synthetic oligonucleotide
gaguugaauucauagauuu

SEQ ID NO: 3196413 - RNA, 19 nt, Artificial Sequence
  Description of Artificial Sequence: Synthetic oligonucleotide
ucuccaucaaagacaguau

SEQ ID NO: 3196414 - RNA, 19 nt, Artificial Sequence
  Description of Artificial Sequence: Synthetic oligonucleotide
aguugaauucauagauuuc

SEQ ID NO: 3196415 - RNA, 19 nt, Artificial Sequence
  Description of Artificial Sequence: Synthetic oligonucleotide
ucuuuccacuuccuggcac

SEQ ID NO: 3196416 - RNA, 19 nt, Artificial Sequence
  Description of Artificial Sequence: Synthetic oligonucleotide
caugcugggaacugggcuc

SEQ ID NO: 3196417 - RNA, 19 nt, Artificial Sequence
  Description of Artificial Sequence: Synthetic oligonucleotide
auucauagauuuccccagu

SEQ ID NO: 3196418 - RNA, 19 nt, Artificial Sequence
  Description of Artificial Sequence: Synthetic oligonucleotide
agacuaccaccacagccuc

SEQ ID NO: 3196419 - RNA, 19 nt, Artificial Sequence
  Description of Artificial Sequence: Synthetic oligonucleotide
ugcgccuccaugcugggaa

SEQ ID NO: 3196420 - RNA, 19 nt, Artificial Sequence
  Description of Artificial Sequence: Synthetic oligonucleotide
cugggaacugggcucaggc

SEQ ID NO: 3196421 - RNA, 19 nt, Artificial Sequence
  Description of Artificial Sequence: Synthetic oligonucleotide
accaccacagccucuuucu

SEQ ID NO: 3196422 - RNA, 19 nt, Artificial Sequence
  Description of Artificial Sequence: Synthetic oligonucleotide
uccacuuccuggcaccagu

SEQ ID NO: 3196423 - RNA, 19 nt, Artificial Sequence
  Description of Artificial Sequence: Synthetic oligonucleotide
ggucuuuccacuuccuggc

SEQ ID NO: 3196424 - RNA, 19 nt, Artificial Sequence
  Description of Artificial Sequence: Synthetic oligonucleotide
gggcaguuggguuaauggg

SEQ ID NO: 3196425 - RNA, 19 nt, Artificial Sequence
  Description of Artificial Sequence: Synthetic oligonucleotide
ugggucuuuccacuuccug

SEQ ID NO: 3196426 - RNA, 19 nt, Artificial Sequence
  Description of Artificial Sequence: Synthetic oligonucleotide
gguuaaugggucuuuccac

SEQ ID NO: 3196427 - RNA, 19 nt, Artificial Sequence
  Description of Artificial Sequence: Synthetic oligonucleotide
uaaugggucuuuccacuuc

SEQ ID NO: 3196428 - RNA, 19 nt, Artificial Sequence
  Description of Artificial Sequence: Synthetic oligonucleotide
cuccaugcugggaacuggg

SEQ ID NO: 3196429 - RNA, 19 nt, Artificial Sequence
  Description of Artificial Sequence: Synthetic oligonucleotide
agauuuccccagucacugg

SEQ ID NO: 3196430 - RNA, 19 nt, Artificial Sequence
  Description of Artificial Sequence: Synthetic oligonucleotide
auucaucuggacagacuac

SEQ ID NO: 3196431 - RNA, 19 nt, Artificial Sequence
  Description of Artificial Sequence: Synthetic oligonucleotide
guuaaugggucuuuccacu

SEQ ID NO: 3196432 - RNA, 19 nt, Artificial Sequence
  Description of Artificial Sequence: Synthetic oligonucleotide
caucuggacagacuaccac

SEQ ID NO: 3196433 - RNA, 19 nt, Artificial Sequence
  Description of Artificial Sequence: Synthetic oligonucleotide
uuaaugggucuuuccacuu

SEQ ID NO: 3196434 - RNA, 19 nt, Artificial Sequence
  Description of Artificial Sequence: Synthetic oligonucleotide
cagucacugggucuguggc

SEQ ID NO: 3196435 - RNA, 19 nt, Artificial Sequence
  Description of Artificial Sequence: Synthetic oligonucleotide
gcuucuccaucaaagacag

SEQ ID NO: 3196436 - RNA, 19 nt, Artificial Sequence
  Description of Artificial Sequence: Synthetic oligonucleotide
acuuccuggcaccaguuuu

SEQ ID NO: 3196437 - RNA, 19 nt, Artificial Sequence
  Description of Artificial Sequence: Synthetic oligonucleotide
auagauuuccccagucacu

SEQ ID NO: 3196438 - RNA, 19 nt, Artificial Sequence
  Description of Artificial Sequence: Synthetic oligonucleotide
uccaugcugggaacugggc

SEQ ID NO: 3196439 - RNA, 19 nt, Artificial Sequence
  Description of Artificial Sequence: Synthetic oligonucleotide
ugggaacugggcucaggcc

SEQ ID NO: 3196440 - RNA, 19 nt, Artificial Sequence
  Description of Artificial Sequence: Synthetic oligonucleotide
ugggcucaggccaguuggg

SEQ ID NO: 3196441 - RNA, 19 nt, Artificial Sequence
  Description of Artificial Sequence: Synthetic oligonucleotide
ggacagacuaccaccacag

SEQ ID NO: 3196442 - RNA, 19 nt, Artificial Sequence
  Description of Artificial Sequence: Synthetic oligonucleotide
uuuccccagucacuggguc

SEQ ID NO: 3196443 - RNA, 19 nt, Artificial Sequence
  Description of Artificial Sequence: Synthetic oligonucleotide
ugccgcugcgccuccaugc

SEQ ID NO: 3196444 - RNA, 19 nt, Artificial Sequence
  Description of Artificial Sequence: Synthetic oligonucleotide
caaagacaguauucaucug

SEQ ID NO: 3196445 - RNA, 19 nt, Artificial Sequence
  Description of Artificial Sequence: Synthetic oligonucleotide
ggguuaaugggucuuucca

SEQ ID NO: 3196446 - RNA, 19 nt, Artificial Sequence
  Description of Artificial Sequence: Synthetic oligonucleotide
ugggucuguggcuucucca

SEQ ID NO: 3196447 - RNA, 19 nt, Artificial Sequence
  Description of Artificial Sequence: Synthetic oligonucleotide
gacagacuaccaccacagc

SEQ ID NO: 3196448 - RNA, 19 nt, Artificial Sequence
  Description of Artificial Sequence: Synthetic oligonucleotide
uaccaccacagccucuuuc

SEQ ID NO: 3196449 - RNA, 19 nt, Artificial Sequence
  Description of Artificial Sequence: Synthetic oligonucleotide
agucacugggucuguggcu

SEQ ID NO: 3196450 - RNA, 19 nt, Artificial Sequence
  Description of Artificial Sequence: Synthetic oligonucleotide
cagacuaccaccacagccu

SEQ ID NO: 3196451 - RNA, 19 nt, Artificial Sequence
  Description of Artificial Sequence: Synthetic oligonucleotide
gucuguggcuucuccauca

SEQ ID NO: 3196452 - RNA, 19 nt, Artificial Sequence
  Description of Artificial Sequence: Synthetic oligonucleotide
guggcuucuccaucaaaga

SEQ ID NO: 3196453 - RNA, 19 nt, Artificial Sequence
  Description of Artificial Sequence: Synthetic oligonucleotide
gggaacugggcucaggcca

SEQ ID NO: 3196454 - RNA, 19 nt, Artificial Sequence
  Description of Artificial Sequence: Synthetic oligonucleotide
uccccagucacugggucug

SEQ ID NO: 3196455 - RNA, 19 nt, Artificial Sequence
  Description of Artificial Sequence: Synthetic oligonucleotide
uuccccagucacugggucu

SEQ ID NO: 3196456 - RNA, 19 nt, Artificial Sequence
  Description of Artificial Sequence: Synthetic oligonucleotide
acugggcucaggccaguug

SEQ ID NO: 3196457 - RNA, 19 nt, Artificial Sequence
  Description of Artificial Sequence: Synthetic oligonucleotide
caccacagccucuuucuuc

SEQ ID NO: 3196458 - RNA, 19 nt, Artificial Sequence
  Description of Artificial Sequence: Synthetic oligonucleotide
uugggcaguuggguuaaug

SEQ ID NO: 3196459 - RNA, 19 nt, Artificial Sequence
  Description of Artificial Sequence: Synthetic oligonucleotide
ucuguggcuucuccaucaa

SEQ ID NO: 3196460 - RNA, 19 nt, Artificial Sequence
  Description of Artificial Sequence: Synthetic oligonucleotide
ggcuucuccaucaaagaca

SEQ ID NO: 3196461 - RNA, 19 nt, Artificial Sequence
  Description of Artificial Sequence: Synthetic oligonucleotide
gcucaggccaguugggcag

SEQ ID NO: 3196462 - RNA, 19 nt, Artificial Sequence
  Description of Artificial Sequence: Synthetic oligonucleotide
uuuccacuuccuggcacca

SEQ ID NO: 3196463 - RNA, 19 nt, Artificial Sequence
  Description of Artificial Sequence: Synthetic oligonucleotide
acuaccaccacagccucuu

SEQ ID NO: 3196464 - RNA, 19 nt, Artificial Sequence
  Description of Artificial Sequence: Synthetic oligonucleotide
uuggguuaaugggucuuuc

SEQ ID NO: 3196465 - RNA, 19 nt, Artificial Sequence
  Description of Artificial Sequence: Synthetic oligonucleotide
cugggucuguggcuucucc

SEQ ID NO: 3196466 - RNA, 19 nt, Artificial Sequence
  Description of Artificial Sequence: Synthetic oligonucleotide
ccaucaaagacaguauuca

SEQ ID NO: 3196467 - RNA, 19 nt, Artificial Sequence
  Description of Artificial Sequence: Synthetic oligonucleotide
ccagucacugggucugugg

SEQ ID NO: 3196468 - RNA, 19 nt, Artificial Sequence
  Description of Artificial Sequence: Synthetic oligonucleotide
cuggacagacuaccaccac

SEQ ID NO: 3196469 - RNA, 19 nt, Artificial Sequence
  Description of Artificial Sequence: Synthetic oligonucleotide
aguuggguuaaugggucuu

SEQ ID NO: 3196470 - RNA, 19 nt, Artificial Sequence
  Description of Artificial Sequence: Synthetic oligonucleotide
caucaaagacaguauucau

SEQ ID NO: 3196471 - RNA, 19 nt, Artificial Sequence
  Description of Artificial Sequence: Synthetic oligonucleotide
uccaguaugaacaaguuug

SEQ ID NO: 3196472 - RNA, 19 nt, Artificial Sequence
  Description of Artificial Sequence: Synthetic oligonucleotide
uuugacuucuguuuaaagg

SEQ ID NO: 3196473 - RNA, 19 nt, Artificial Sequence
  Description of Artificial Sequence: Synthetic oligonucleotide
aguaugaacaaguuugugg

SEQ ID NO: 3196474 - RNA, 19 nt, Artificial Sequence
  Description of Artificial Sequence: Synthetic oligonucleotide
uugacuucuguuuaaaggc

SEQ ID NO: 3196475 - RNA, 19 nt, Artificial Sequence
  Description of Artificial Sequence: Synthetic oligonucleotide
agucacugcacacauaugg

SEQ ID NO: 3196476 - RNA, 19 nt, Artificial Sequence
  Description of Artificial Sequence: Synthetic oligonucleotide
aguagaacggccucucucc

SEQ ID NO: 3196477 - RNA, 19 nt, Artificial Sequence
  Description of Artificial Sequence: Synthetic oligonucleotide
uccacugugaauccgcugg

SEQ ID NO: 3196478 - RNA, 19 nt, Artificial Sequence
  Description of Artificial Sequence: Synthetic oligonucleotide
guaugaacaaguuuguggc

SEQ ID NO: 3196479 - RNA, 19 nt, Artificial Sequence
  Description of Artificial Sequence: Synthetic oligonucleotide
uucucuuuaguacgaaagg

SEQ ID NO: 3196480 - RNA, 19 nt, Artificial Sequence
  Description of Artificial Sequence: Synthetic oligonucleotide
ugagguucucuuuaguacg

SEQ ID NO: 3196481 - RNA, 19 nt, Artificial Sequence
  Description of Artificial Sequence: Synthetic oligonucleotide
aaggccuucccacagucac

SEQ ID NO: 3196482 - RNA, 19 nt, Artificial Sequence
  Description of Artificial Sequence: Synthetic oligonucleotide
aaggccuucccacacuggc

SEQ ID NO: 3196483 - RNA, 19 nt, Artificial Sequence
  Description of Artificial Sequence: Synthetic oligonucleotide
gauuuugcgaugcugugcc

SEQ ID NO: 3196484 - RNA, 19 nt, Artificial Sequence
  Description of Artificial Sequence: Synthetic oligonucleotide
uuuaaaggccuucccacag

SEQ ID NO: 3196485 - RNA, 19 nt, Artificial Sequence
  Description of Artificial Sequence: Synthetic oligonucleotide
ucuuuaguacgaaaggccu

SEQ ID NO: 3196486 - RNA, 19 nt, Artificial Sequence
  Description of Artificial Sequence: Synthetic oligonucleotide
agguauagggcuucucucc

SEQ ID NO: 3196487 - RNA, 19 nt, Artificial Sequence
  Description of Artificial Sequence: Synthetic oligonucleotide
aaguuuguggcggaggagg

SEQ ID NO: 3196488 - RNA, 19 nt, Artificial Sequence
  Description of Artificial Sequence: Synthetic oligonucleotide
cucuuuaguacgaaaggcc

SEQ ID NO: 3196489 - RNA, 19 nt, Artificial Sequence
  Description of Artificial Sequence: Synthetic oligonucleotide
acauggagggcccagcuac

SEQ ID NO: 3196490 - RNA, 19 nt, Artificial Sequence
  Description of Artificial Sequence: Synthetic oligonucleotide
uguuuaaaggccuucccac

SEQ ID NO: 3196491 - RNA, 19 nt, Artificial Sequence
  Description of Artificial Sequence: Synthetic oligonucleotide
acaguugucacaguagaac

SEQ ID NO: 3196492 - RNA, 19 nt, Artificial Sequence
  Description of Artificial Sequence: Synthetic oligonucleotide
acagugcucacacucauag

SEQ ID NO: 3196493 - RNA, 19 nt, Artificial Sequence
  Description of Artificial Sequence: Synthetic oligonucleotide
acugcacacauauggacgg

SEQ ID NO: 3196494 - RNA, 19 nt, Artificial Sequence
  Description of Artificial Sequence: Synthetic oligonucleotide
augcugaagcccuugggcc

SEQ ID NO: 3196495 - RNA, 19 nt, Artificial Sequence
  Description of Artificial Sequence: Synthetic oligonucleotide
gaugcugaagcccuugggc

SEQ ID NO: 3196496 - RNA, 19 nt, Artificial Sequence
  Description of Artificial Sequence: Synthetic oligonucleotide
ucauagaaucucuuuguca

SEQ ID NO: 3196497 - RNA, 19 nt, Artificial Sequence
  Description of Artificial Sequence: Synthetic oligonucleotide
uaugaacaaguuuguggcg

SEQ ID NO: 3196498 - RNA, 19 nt, Artificial Sequence
  Description of Artificial Sequence: Synthetic oligonucleotide
caguugucacaguagaacg

SEQ ID NO: 3196499 - RNA, 19 nt, Artificial Sequence
  Description of Artificial Sequence: Synthetic oligonucleotide
agugcucacacucauagaa

SEQ ID NO: 3196500 - RNA, 19 nt, Artificial Sequence
  Description of Artificial Sequence: Synthetic oligonucleotide
aaggccuucccacaguugu

SEQ ID NO: 3196501 - RNA, 19 nt, Artificial Sequence
  Description of Artificial Sequence: Synthetic oligonucleotide
cucuuugucaagugcagcc

SEQ ID NO: 3196502 - RNA, 19 nt, Artificial Sequence
  Description of Artificial Sequence: Synthetic oligonucleotide
cuauacuucuccacgcccg

SEQ ID NO: 3196503 - RNA, 19 nt, Artificial Sequence
  Description of Artificial Sequence: Synthetic oligonucleotide
acugugaauccgcuggugg

SEQ ID NO: 3196504 - RNA, 19 nt, Artificial Sequence
  Description of Artificial Sequence: Synthetic oligonucleotide
ucuauacuucuccacgccc

SEQ ID NO: 3196505 - RNA, 19 nt, Artificial Sequence
  Description of Artificial Sequence: Synthetic oligonucleotide
ucucuuuaguacgaaaggc

SEQ ID NO: 3196506 - RNA, 19 nt, Artificial Sequence
  Description of Artificial Sequence: Synthetic oligonucleotide
acuggccacagguauaggg

SEQ ID NO: 3196507 - RNA, 19 nt, Artificial Sequence
  Description of Artificial Sequence: Synthetic oligonucleotide
gaaucucuuugucaagugc

SEQ ID NO: 3196508 - RNA, 19 nt, Artificial Sequence
  Description of Artificial Sequence: Synthetic oligonucleotide
ucuguuuaaaggccuuccc

SEQ ID NO: 3196509 - RNA, 19 nt, Artificial Sequence
  Description of Artificial Sequence: Synthetic oligonucleotide
aaucucuuugucaagugca

SEQ ID NO: 3196510 - RNA, 19 nt, Artificial Sequence
  Description of Artificial Sequence: Synthetic oligonucleotide
ugacuucuguuuaaaggcc

SEQ ID NO: 3196511 - RNA, 19 nt, Artificial Sequence
  Description of Artificial Sequence: Synthetic oligonucleotide
augaacaaguuuguggcgg

SEQ ID NO: 3196512 - RNA, 19 nt, Artificial Sequence
  Description of Artificial Sequence: Synthetic oligonucleotide
cauagaaucucuuugucaa

SEQ ID NO: 3196513 - RNA, 19 nt, Artificial Sequence
  Description of Artificial Sequence: Synthetic oligonucleotide
acagucacugcacacauau

SEQ ID NO: 3196514 - RNA, 19 nt, Artificial Sequence
  Description of Artificial Sequence: Synthetic oligonucleotide
auauggacggugcucagug

SEQ ID NO: 3196515 - RNA, 19 nt, Artificial Sequence
  Description of Artificial Sequence: Synthetic oligonucleotide
guucucuuuaguacgaaag

SEQ ID NO: 3196516 - RNA, 19 nt, Artificial Sequence
  Description of Artificial Sequence: Synthetic oligonucleotide
cacugcacacauauggacg

SEQ ID NO: 3196517 - RNA, 19 nt, Artificial Sequence
  Description of Artificial Sequence: Synthetic oligonucleotide
acucauagaaucucuuugu

SEQ ID NO: 3196518 - RNA, 19 nt, Artificial Sequence
  Description of Artificial Sequence: Synthetic oligonucleotide
aacaaguuuguggcggagg

SEQ ID NO: 3196519 - RNA, 19 nt, Artificial Sequence
  Description of Artificial Sequence: Synthetic oligonucleotide
ucaguguggauuuugcgau

SEQ ID NO: 3196520 - RNA, 19 nt, Artificial Sequence
  Description of Artificial Sequence: Synthetic oligonucleotide
aguguggauuuugcgaugc

SEQ ID NO: 3196521 - RNA, 19 nt, Artificial Sequence
  Description of Artificial Sequence: Synthetic oligonucleotide
aguacgaaaggccuuccca

SEQ ID NO: 3196522 - RNA, 19 nt, Artificial Sequence
  Description of Artificial Sequence: Synthetic oligonucleotide
ucaagugcagccucuggug

SEQ ID NO: 3196523 - RNA, 19 nt, Artificial Sequence
  Description of Artificial Sequence: Synthetic oligonucleotide
cugagguucucuuuaguac

SEQ ID NO: 3196524 - RNA, 19 nt, Artificial Sequence
  Description of Artificial Sequence: Synthetic oligonucleotide
cacucauagaaucucuuug

SEQ ID NO: 3196525 - RNA, 19 nt, Artificial Sequence
  Description of Artificial Sequence: Synthetic oligonucleotide
acagguauagggcuucucu

SEQ ID NO: 3196526 - RNA, 19 nt, Artificial Sequence
  Description of Artificial Sequence: Synthetic oligonucleotide
gacgccucuauacuucucc

SEQ ID NO: 3196527 - RNA, 19 nt, Artificial Sequence
  Description of Artificial Sequence: Synthetic oligonucleotide
aagcccuucccacagugcu

SEQ ID NO: 3196528 - RNA, 19 nt, Artificial Sequence
  Description of Artificial Sequence: Synthetic oligonucleotide
aagcccagguggcggaagc

SEQ ID NO: 3196529 - RNA, 19 nt, Artificial Sequence
  Description of Artificial Sequence: Synthetic oligonucleotide
uuugcgaugcugugccagg

SEQ ID NO: 3196530 - RNA, 19 nt, Artificial Sequence
  Description of Artificial Sequence: Synthetic oligonucleotide
cucugguggaugcugaagc

SEQ ID NO: 3196531 - RNA, 19 nt, Artificial Sequence
  Description of Artificial Sequence: Synthetic oligonucleotide
uuuaguacgaaaggccuuc

SEQ ID NO: 3196532 - RNA, 19 nt, Artificial Sequence
  Description of Artificial Sequence: Synthetic oligonucleotide
ugucacaguagaacggccu

SEQ ID NO: 3196533 - RNA, 19 nt, Artificial Sequence
  Description of Artificial Sequence: Synthetic oligonucleotide
uccuucaagcugaaggccu

SEQ ID NO: 3196534 - RNA, 19 nt, Artificial Sequence
  Description of Artificial Sequence: Synthetic oligonucleotide
ugcucacacucauagaauc

SEQ ID NO: 3196535 - RNA, 19 nt, Artificial Sequence
  Description of Artificial Sequence: Synthetic oligonucleotide
auagaaucucuuugucaag

SEQ ID NO: 3196536 - RNA, 19 nt, Artificial Sequence
  Description of Artificial Sequence: Synthetic oligonucleotide
acaaguuuguggcggagga

SEQ ID NO: 3196537 - RNA, 19 nt, Artificial Sequence
  Description of Artificial Sequence: Synthetic oligonucleotide
guuugacuucuguuuaaag

SEQ ID NO: 3196538 - RNA, 19 nt, Artificial Sequence
  Description of Artificial Sequence: Synthetic oligonucleotide
cuggccacagguauagggc

SEQ ID NO: 3196539 - RNA, 19 nt, Artificial Sequence
  Description of Artificial Sequence: Synthetic oligonucleotide
uuuugcgaugcugugccag

SEQ ID NO: 3196540 - RNA, 19 nt, Artificial Sequence
  Description of Artificial Sequence: Synthetic oligonucleotide
agaaucucuuugucaagug

SEQ ID NO: 3196541 - RNA, 19 nt, Artificial Sequence
  Description of Artificial Sequence: Synthetic oligonucleotide
ucacugcacacauauggac

SEQ ID NO: 3196542 - RNA, 19 nt, Artificial Sequence
  Description of Artificial Sequence: Synthetic oligonucleotide
ugucaagugcagccucugg

SEQ ID NO: 3196543 - RNA, 19 nt, Artificial Sequence
  Description of Artificial Sequence: Synthetic oligonucleotide
uagaaucucuuugucaagu

SEQ ID NO: 3196544 - RNA, 19 nt, Artificial Sequence
  Description of Artificial Sequence: Synthetic oligonucleotide
ucugguggaugcugaagcc

SEQ ID NO: 3196545 - RNA, 19 nt, Artificial Sequence
  Description of Artificial Sequence: Synthetic oligonucleotide
aagcccuugggccaccuga

SEQ ID NO: 3196546 - RNA, 19 nt, Artificial Sequence
  Description of Artificial Sequence: Synthetic oligonucleotide
cuucccacaguugucacag

SEQ ID NO: 3196547 - RNA, 19 nt, Artificial Sequence
  Description of Artificial Sequence: Synthetic oligonucleotide
uuugucaagugcagccucu

SEQ ID NO: 3196548 - RNA, 19 nt, Artificial Sequence
  Description of Artificial Sequence: Synthetic oligonucleotide
ucccacacuggccacaggu

SEQ ID NO: 3196549 - RNA, 19 nt, Artificial Sequence
  Description of Artificial Sequence: Synthetic oligonucleotide
uucuguuuaaaggccuucc

SEQ ID NO: 3196550 - RNA, 19 nt, Artificial Sequence
  Description of Artificial Sequence: Synthetic oligonucleotide
aguugucacaguagaacgg

SEQ ID NO: 3196551 - RNA, 19 nt, Artificial Sequence
  Description of Artificial Sequence: Synthetic oligonucleotide
ucacacucauagaaucucu

SEQ ID NO: 3196552 - RNA, 19 nt, Artificial Sequence
  Description of Artificial Sequence: Synthetic oligonucleotide
uggacggugcucagugugg

SEQ ID NO: 3196553 - RNA, 19 nt, Artificial Sequence
  Description of Artificial Sequence: Synthetic oligonucleotide
uguggauuuugcgaugcug

SEQ ID NO: 3196554 - RNA, 19 nt, Artificial Sequence
  Description of Artificial Sequence: Synthetic oligonucleotide
ugcucaguguggauuuugc

SEQ ID NO: 3196555 - RNA, 19 nt, Artificial Sequence
  Description of Artificial Sequence: Synthetic oligonucleotide
guugucacaguagaacggc

SEQ ID NO: 3196556 - RNA, 19 nt, Artificial Sequence
  Description of Artificial Sequence: Synthetic oligonucleotide
cucaguguggauuuugcga

SEQ ID NO: 3196557 - RNA, 19 nt, Artificial Sequence
  Description of Artificial Sequence: Synthetic oligonucleotide
uaaaggccuucccacaguc

SEQ ID NO: 3196558 - RNA, 19 nt, Artificial Sequence
  Description of Artificial Sequence: Synthetic oligonucleotide
uccucugaugccuugugaa

SEQ ID NO: 3196559 - RNA, 19 nt, Artificial Sequence
  Description of Artificial Sequence: Synthetic oligonucleotide
ucccacagugcucacacuc

SEQ ID NO: 3196560 - RNA, 19 nt, Artificial Sequence
  Description of Artificial Sequence: Synthetic oligonucleotide
uggaugcugaagcccuugg

SEQ ID NO: 3196561 - RNA, 19 nt, Artificial Sequence
  Description of Artificial Sequence: Synthetic oligonucleotide
guacgaaaggccuucccac

SEQ ID NO: 3196562 - RNA, 19 nt, Artificial Sequence
  Description of Artificial Sequence: Synthetic oligonucleotide
caagugcagccucuggugg

SEQ ID NO: 3196563 - RNA, 19 nt, Artificial Sequence
  Description of Artificial Sequence: Synthetic oligonucleotide
cuucccacagugcucacac

SEQ ID NO: 3196564 - RNA, 19 nt, Artificial Sequence
  Description of Artificial Sequence: Synthetic oligonucleotide
ugguggaugcugaagcccu

SEQ ID NO: 3196565 - RNA, 19 nt, Artificial Sequence
  Description of Artificial Sequence: Synthetic oligonucleotide
gguccuucaagcugaaggc

SEQ ID NO: 3196566 - RNA, 19 nt, Artificial Sequence
  Description of Artificial Sequence: Synthetic oligonucleotide
ugaacaaguuuguggcgga

SEQ ID NO: 3196567 - RNA, 19 nt, Artificial Sequence
  Description of Artificial Sequence: Synthetic oligonucleotide
uacuucuccacgcccguga

SEQ ID NO: 3196568 - RNA, 19 nt, Artificial Sequence
  Description of Artificial Sequence: Synthetic oligonucleotide
uggauuuugcgaugcugug

SEQ ID NO: 3196569 - RNA, 19 nt, Artificial Sequence
  Description of Artificial Sequence: Synthetic oligonucleotide
uuaaaggccuucccacagu

SEQ ID NO: 3196570 - RNA, 19 nt, Artificial Sequence
  Description of Artificial Sequence: Synthetic oligonucleotide
cucuauacuucuccacgcc

SEQ ID NO: 3196571 - RNA, 19 nt, Artificial Sequence
  Description of Artificial Sequence: Synthetic oligonucleotide
uuuucuguuacaaagaugu

SEQ ID NO: 3196572 - RNA, 19 nt, Artificial Sequence
  Description of Artificial Sequence: Synthetic oligonucleotide
aagaugucuuuauuaaagg

SEQ ID NO: 3196573 - RNA, 19 nt, Artificial Sequence
  Description of Artificial Sequence: Synthetic oligonucleotide
aaagaugucuuuauuaaag

SEQ ID NO: 3196574 - RNA, 19 nt, Artificial Sequence
  Description of Artificial Sequence: Synthetic oligonucleotide
aaagggaguccacugaggg

SEQ ID NO: 3196575 - RNA, 19 nt, Artificial Sequence
  Description of Artificial Sequence: Synthetic oligonucleotide
acagcugggaaucaggugg

SEQ ID NO: 3196576 - RNA, 19 nt, Artificial Sequence
  Description of Artificial Sequence: Synthetic oligonucleotide
aguucugcggcuuggaugg

SEQ ID NO: 3196577 - RNA, 19 nt, Artificial Sequence
  Description of Artificial Sequence: Synthetic oligonucleotide
agaugucuuuauuaaaggg

SEQ ID NO: 3196578 - RNA, 19 nt, Artificial Sequence
  Description of Artificial Sequence: Synthetic oligonucleotide
acugaggguguacaggucc

SEQ ID NO: 3196579 - RNA, 19 nt, Artificial Sequence
  Description of Artificial Sequence: Synthetic oligonucleotide
uuaaagggaguccacugag

SEQ ID NO: 3196580 - RNA, 19 nt, Artificial Sequence
  Description of Artificial Sequence: Synthetic oligonucleotide
uauuaaagggaguccacug

SEQ ID NO: 3196581 - RNA, 19 nt, Artificial Sequence
  Description of Artificial Sequence: Synthetic oligonucleotide
ucuguuacaaagaugucuu

SEQ ID NO: 3196582 - RNA, 19 nt, Artificial Sequence
  Description of Artificial Sequence: Synthetic oligonucleotide
uacaaagaugucuuuauua

SEQ ID NO: 3196583 - RNA, 19 nt, Artificial Sequence
  Description of Artificial Sequence: Synthetic oligonucleotide
acaaagaugucuuuauuaa

SEQ ID NO: 3196584 - RNA, 19 nt, Artificial Sequence
  Description of Artificial Sequence: Synthetic oligonucleotide
gaugucuuuauuaaaggga

SEQ ID NO: 3196585 - RNA, 19 nt, Artificial Sequence
  Description of Artificial Sequence: Synthetic oligonucleotide
cuggaggacacacagcugg

SEQ ID NO: 3196586 - RNA, 19 nt, Artificial Sequence
  Description of Artificial Sequence: Synthetic oligonucleotide
gaaucagguggccacggcg

SEQ ID NO: 3196587 - RNA, 19 nt, Artificial Sequence
  Description of Artificial Sequence: Synthetic oligonucleotide
uuuauuaaagggaguccac

SEQ ID NO: 3196588 - RNA, 19 nt, Artificial Sequence
  Description of Artificial Sequence: Synthetic oligonucleotide
uucuguuacaaagaugucu

SEQ ID NO: 3196589 - RNA, 19 nt, Artificial Sequence
  Description of Artificial Sequence: Synthetic oligonucleotide
augucuuuauuaaagggag

SEQ ID NO: 3196590 - RNA, 19 nt, Artificial Sequence
  Description of Artificial Sequence: Synthetic oligonucleotide
uaaagggaguccacugagg

SEQ ID NO: 3196591 - RNA, 19 nt, Artificial Sequence
  Description of Artificial Sequence: Synthetic oligonucleotide
aggagcacaucgcuggggc

SEQ ID NO: 3196592 - RNA, 19 nt, Artificial Sequence
  Description of Artificial Sequence: Synthetic oligonucleotide
uuggcucagaccucagucg

SEQ ID NO: 3196593 - RNA, 19 nt, Artificial Sequence
  Description of Artificial Sequence: Synthetic oligonucleotide
ucuuuauuaaagggagucc

SEQ ID NO: 3196594 - RNA, 19 nt, Artificial Sequence
  Description of Artificial Sequence: Synthetic oligonucleotide
auuaaagggaguccacuga

SEQ ID NO: 3196595 - RNA, 19 nt, Artificial Sequence
  Description of Artificial Sequence: Synthetic oligonucleotide
aaucagguggccacggcgg

SEQ ID NO: 3196596 - RNA, 19 nt, Artificial Sequence
  Description of Artificial Sequence: Synthetic oligonucleotide
agucggagcgggcaggggc

SEQ ID NO: 3196597 - RNA, 19 nt, Artificial Sequence
  Description of Artificial Sequence: Synthetic oligonucleotide
aucgcuggggcccuggagg

SEQ ID NO: 3196598 - RNA, 19 nt, Artificial Sequence
  Description of Artificial Sequence: Synthetic oligonucleotide
uacaggucccguagcaggg

SEQ ID NO: 3196599 - RNA, 19 nt, Artificial Sequence
  Description of Artificial Sequence: Synthetic oligonucleotide
uuauuaaagggaguccacu

SEQ ID NO: 3196600 - RNA, 19 nt, Artificial Sequence
  Description of Artificial Sequence: Synthetic oligonucleotide
gauggggugagccgugccg

SEQ ID NO: 3196601 - RNA, 19 nt, Artificial Sequence
  Description of Artificial Sequence: Synthetic oligonucleotide
guacaggucccguagcagg

SEQ ID NO: 3196602 - RNA, 19 nt, Artificial Sequence
  Description of Artificial Sequence: Synthetic oligonucleotide
agcaguagcuuccggccgc

SEQ ID NO: 3196603 - RNA, 19 nt, Artificial Sequence
  Description of Artificial Sequence: Synthetic oligonucleotide
agggguguuggcucagacc

SEQ ID NO: 3196604 - RNA, 19 nt, Artificial Sequence
  Description of Artificial Sequence: Synthetic oligonucleotide
gucgaaugcggccugcagg

SEQ ID NO: 3196605 - RNA, 19 nt, Artificial Sequence
  Description of Artificial Sequence: Synthetic oligonucleotide
ucgagggcggggcacacgg

SEQ ID NO: 3196606 - RNA, 19 nt, Artificial Sequence
  Description of Artificial Sequence: Synthetic oligonucleotide
cuuuauuaaagggagucca

SEQ ID NO: 3196607 - RNA, 19 nt, Artificial Sequence
  Description of Artificial Sequence: Synthetic oligonucleotide
cuggcugggagucggagcg

SEQ ID NO: 3196608 - RNA, 19 nt, Artificial Sequence
  Description of Artificial Sequence: Synthetic oligonucleotide
gucuuuauuaaagggaguc

SEQ ID NO: 3196609 - RNA, 19 nt, Artificial Sequence
  Description of Artificial Sequence: Synthetic oligonucleotide
uccacugaggguguacagg

SEQ ID NO: 3196610 - RNA, 19 nt, Artificial Sequence
  Description of Artificial Sequence: Synthetic oligonucleotide
ucgaaugcggccugcaggu

SEQ ID NO: 3196611 - RNA, 19 nt, Artificial Sequence
  Description of Artificial Sequence: Synthetic oligonucleotide
cagaccucagucgagggcg

SEQ ID NO: 3196612 - RNA, 19 nt, Artificial Sequence
  Description of Artificial Sequence: Synthetic oligonucleotide
uguuacaaagaugucuuua

SEQ ID NO: 3196613 - RNA, 19 nt, Artificial Sequence
  Description of Artificial Sequence: Synthetic oligonucleotide
ugucuuuauuaaagggagu

SEQ ID NO: 3196614 - RNA, 19 nt, Artificial Sequence
  Description of Artificial Sequence: Synthetic oligonucleotide
aguagcuuccggccgcgac

SEQ ID NO: 3196615 - RNA, 19 nt, Artificial Sequence
  Description of Artificial Sequence: Synthetic oligonucleotide
agggaguccacugagggug

SEQ ID NO: 3196616 - RNA, 19 nt, Artificial Sequence
  Description of Artificial Sequence: Synthetic oligonucleotide
ucagaccucagucgagggc

SEQ ID NO: 3196617 - RNA, 19 nt, Artificial Sequence
  Description of Artificial Sequence: Synthetic oligonucleotide
uuacaaagaugucuuuauu

SEQ ID NO: 3196618 - RNA, 19 nt, Artificial Sequence
  Description of Artificial Sequence: Synthetic oligonucleotide
guuggcucagaccucaguc

SEQ ID NO: 3196619 - RNA, 19 nt, Artificial Sequence
  Description of Artificial Sequence: Synthetic oligonucleotide
agcgggcaggggcagaggc

SEQ ID NO: 3196620 - RNA, 19 nt, Artificial Sequence
  Description of Artificial Sequence: Synthetic oligonucleotide
cacacagcugggaaucagg

SEQ ID NO: 3196621 - RNA, 19 nt, Artificial Sequence
  Description of Artificial Sequence: Synthetic oligonucleotide
uggaggacacacagcuggg

SEQ ID NO: 3196622 - RNA, 19 nt, Artificial Sequence
  Description of Artificial Sequence: Synthetic oligonucleotide
uguacaggucccguagcag

SEQ ID NO: 3196623 - RNA, 19 nt, Artificial Sequence
  Description of Artificial Sequence: Synthetic oligonucleotide
uggcucagaccucagucga

SEQ ID NO: 3196624 - RNA, 19 nt, Artificial Sequence
  Description of Artificial Sequence: Synthetic oligonucleotide
aagggaguccacugagggu

SEQ ID NO: 3196625 - RNA, 19 nt, Artificial Sequence
  Description of Artificial Sequence: Synthetic oligonucleotide
cugggaaucagguggccac

SEQ ID NO: 3196626 - RNA, 19 nt, Artificial Sequence
  Description of Artificial Sequence: Synthetic oligonucleotide
ugucgaaugcggccugcag

SEQ ID NO: 3196627 - RNA, 19 nt, Artificial Sequence
  Description of Artificial Sequence: Synthetic oligonucleotide
caguucugcggcuuggaug

SEQ ID NO: 3196628 - RNA, 19 nt, Artificial Sequence
  Description of Artificial Sequence: Synthetic oligonucleotide
aaggcgagggacccuggcu

SEQ ID NO: 3196629 - RNA, 19 nt, Artificial Sequence
  Description of Artificial Sequence: Synthetic oligonucleotide
gagggcggggcacacgggg

SEQ ID NO: 3196630 - RNA, 19 nt, Artificial Sequence
  Description of Artificial Sequence: Synthetic oligonucleotide
guuacaaagaugucuuuau

SEQ ID NO: 3196631 - RNA, 19 nt, Artificial Sequence
  Description of Artificial Sequence: Synthetic oligonucleotide
uuucuguuacaaagauguc

SEQ ID NO: 3196632 - RNA, 19 nt, Artificial Sequence
  Description of Artificial Sequence: Synthetic oligonucleotide
gcgaggagcacaucgcugg

SEQ ID NO: 3196633 - RNA, 19 nt, Artificial Sequence
  Description of Artificial Sequence: Synthetic oligonucleotide
guagcuuccggccgcgacc

SEQ ID NO: 3196634 - RNA, 19 nt, Artificial Sequence
  Description of Artificial Sequence: Synthetic oligonucleotide
aaugcggccugcaggucuc

SEQ ID NO: 3196635 - RNA, 19 nt, Artificial Sequence
  Description of Artificial Sequence: Synthetic oligonucleotide
cucagaccucagucgaggg

SEQ ID NO: 3196636 - RNA, 19 nt, Artificial Sequence
  Description of Artificial Sequence: Synthetic oligonucleotide
acggcgggcacaguucugc

SEQ ID NO: 3196637 - RNA, 19 nt, Artificial Sequence
  Description of Artificial Sequence: Synthetic oligonucleotide
caaagaugucuuuauuaaa

SEQ ID NO: 3196638 - RNA, 19 nt, Artificial Sequence
  Description of Artificial Sequence: Synthetic oligonucleotide
aggcgagggacccuggcug

SEQ ID NO: 3196639 - RNA, 19 nt, Artificial Sequence
  Description of Artificial Sequence: Synthetic oligonucleotide
ucugcggcuuggauggggu

SEQ ID NO: 3196640 - RNA, 19 nt, Artificial Sequence
  Description of Artificial Sequence: Synthetic oligonucleotide
cugaggguguacagguccc

SEQ ID NO: 3196641 - RNA, 19 nt, Artificial Sequence
  Description of Artificial Sequence: Synthetic oligonucleotide
uguuggcucagaccucagu

SEQ ID NO: 3196642 - RNA, 19 nt, Artificial Sequence
  Description of Artificial Sequence: Synthetic oligonucleotide
gagcacaucgcuggggccc

SEQ ID NO: 3196643 - RNA, 19 nt, Artificial Sequence
  Description of Artificial Sequence: Synthetic oligonucleotide
guagcaggggcgugggcag

SEQ ID NO: 3196644 - RNA, 19 nt, Artificial Sequence
  Description of Artificial Sequence: Synthetic oligonucleotide
ugggaaucagguggccacg

SEQ ID NO: 3196645 - RNA, 19 nt, Artificial Sequence
  Description of Artificial Sequence: Synthetic oligonucleotide
ugggagucggagcgggcag

SEQ ID NO: 3196646 - RNA, 19 nt, Artificial Sequence
  Description of Artificial Sequence: Synthetic oligonucleotide
aucagguggccacggcggg

SEQ ID NO: 3196647 - RNA, 19 nt, Artificial Sequence
  Description of Artificial Sequence: Synthetic oligonucleotide
uccaggggaggaaggcgag

SEQ ID NO: 3196648 - RNA, 19 nt, Artificial Sequence
  Description of Artificial Sequence: Synthetic oligonucleotide
ugaggguguacaggucccg

SEQ ID NO: 3196649 - RNA, 19 nt, Artificial Sequence
  Description of Artificial Sequence: Synthetic oligonucleotide
gcagcaguagcuuccggcc

SEQ ID NO: 3196650 - RNA, 19 nt, Artificial Sequence
  Description of Artificial Sequence: Synthetic oligonucleotide
caggggaggaaggcgaggg

SEQ ID NO: 3196651 - RNA, 19 nt, Artificial Sequence
  Description of Artificial Sequence: Synthetic oligonucleotide
gaggacacacagcugggaa

SEQ ID NO: 3196652 - RNA, 19 nt, Artificial Sequence
  Description of Artificial Sequence: Synthetic oligonucleotide
ggcagcaguagcuuccggc

SEQ ID NO: 3196653 - RNA, 19 nt, Artificial Sequence
  Description of Artificial Sequence: Synthetic oligonucleotide
aggacacacagcugggaau

SEQ ID NO: 3196654 - RNA, 19 nt, Artificial Sequence
  Description of Artificial Sequence: Synthetic oligonucleotide
auggggugagccgugccgg

SEQ ID NO: 3196655 - RNA, 19 nt, Artificial Sequence
  Description of Artificial Sequence: Synthetic oligonucleotide
gaaggcgagggacccuggc

SEQ ID NO: 3196656 - RNA, 19 nt, Artificial Sequence
  Description of Artificial Sequence: Synthetic oligonucleotide
uucugcggcuuggaugggg

SEQ ID NO: 3196657 - RNA, 19 nt, Artificial Sequence
  Description of Artificial Sequence: Synthetic oligonucleotide
uuggauggggugagccgug

SEQ ID NO: 3196658 - RNA, 19 nt, Artificial Sequence
  Description of Artificial Sequence: Synthetic oligonucleotide
ggguguacaggucccguag

SEQ ID NO: 3196659 - RNA, 19 nt, Artificial Sequence
  Description of Artificial Sequence: Synthetic oligonucleotide
cagcaguagcuuccggccg

SEQ ID NO: 3196660 - RNA, 19 nt, Artificial Sequence
  Description of Artificial Sequence: Synthetic oligonucleotide
gaggagcacaucgcugggg

SEQ ID NO: 3196661 - RNA, 19 nt, Artificial Sequence
  Description of Artificial Sequence: Synthetic oligonucleotide
cacagcugggaaucaggug

SEQ ID NO: 3196662 - RNA, 19 nt, Artificial Sequence
  Description of Artificial Sequence: Synthetic oligonucleotide
ugggcagcaguagcuuccg

SEQ ID NO: 3196663 - RNA, 19 nt, Artificial Sequence
  Description of Artificial Sequence: Synthetic oligonucleotide
gcuuggauggggugagccg

SEQ ID NO: 3196664 - RNA, 19 nt, Artificial Sequence
  Description of Artificial Sequence: Synthetic oligonucleotide
gggguguuggcucagaccu

SEQ ID NO: 3196665 - RNA, 19 nt, Artificial Sequence
  Description of Artificial Sequence: Synthetic oligonucleotide
ugcggcuuggaugggguga

SEQ ID NO: 3196666 - RNA, 19 nt, Artificial Sequence
  Description of Artificial Sequence: Synthetic oligonucleotide
ggcccuggaggacacacag

SEQ ID NO: 3196667 - RNA, 19 nt, Artificial Sequence
  Description of Artificial Sequence: Synthetic oligonucleotide
cagcugggaaucagguggc

SEQ ID NO: 3196668 - RNA, 19 nt, Artificial Sequence
  Description of Artificial Sequence: Synthetic oligonucleotide
ucccguagcaggggcgugg

SEQ ID NO: 3196669 - RNA, 19 nt, Artificial Sequence
  Description of Artificial Sequence: Synthetic oligonucleotide
guguacaggucccguagca

SEQ ID NO: 3196670 - RNA, 19 nt, Artificial Sequence
  Description of Artificial Sequence: Synthetic oligonucleotide
uccggccgcgaccaccucc

SEQ ID NO: 3196671 - RNA, 19 nt, Artificial Sequence
  Description of Artificial Sequence: Synthetic oligonucleotide
uuugaagggaagauggagg

SEQ ID NO: 3196672 - RNA, 19 nt, Artificial Sequence
  Description of Artificial Sequence: Synthetic oligonucleotide
uguugaagcacucacuugc

SEQ ID NO: 3196673 - RNA, 19 nt, Artificial Sequence
  Description of Artificial Sequence: Synthetic oligonucleotide
ucugcugacaggauggagg

SEQ ID NO: 3196674 - RNA, 19 nt, Artificial Sequence
  Description of Artificial Sequence: Synthetic oligonucleotide
uuuucuucucuucucuugg

SEQ ID NO: 3196675 - RNA, 19 nt, Artificial Sequence
  Description of Artificial Sequence: Synthetic oligonucleotide
augguaguaggugagaugg

SEQ ID NO: 3196676 - RNA, 19 nt, Artificial Sequence
  Description of Artificial Sequence: Synthetic oligonucleotide
gucuuugaagggaagaugg

SEQ ID NO: 3196677 - RNA, 19 nt, Artificial Sequence
  Description of Artificial Sequence: Synthetic oligonucleotide
gaggagguugcacaggagg

SEQ ID NO: 3196678 - RNA, 19 nt, Artificial Sequence
  Description of Artificial Sequence: Synthetic oligonucleotide
ucuucucuucucuuggucc

SEQ ID NO: 3196679 - RNA, 19 nt, Artificial Sequence
  Description of Artificial Sequence: Synthetic oligonucleotide
ugaagcacucacuugcucu

SEQ ID NO: 3196680 - RNA, 19 nt, Artificial Sequence
  Description of Artificial Sequence: Synthetic oligonucleotide
gaggacaaggcucaggaca

SEQ ID NO: 3196681 - RNA, 19 nt, Artificial Sequence
  Description of Artificial Sequence: Synthetic oligonucleotide
auuuucuucucuucucuug

SEQ ID NO: 3196682 - RNA, 19 nt, Artificial Sequence
  Description of Artificial Sequence: Synthetic oligonucleotide
cucacuugcucuugggugg

SEQ ID NO: 3196683 - RNA, 19 nt, Artificial Sequence
  Description of Artificial Sequence: Synthetic oligonucleotide
uugaagggaagauggaggu

SEQ ID NO: 3196684 - RNA, 19 nt, Artificial Sequence
  Description of Artificial Sequence: Synthetic oligonucleotide
caugagagucuuugaaggg

SEQ ID NO: 3196685 - RNA, 19 nt, Artificial Sequence
  Description of Artificial Sequence: Synthetic oligonucleotide
acucacuugcucuugggug

SEQ ID NO: 3196686 - RNA, 19 nt, Artificial Sequence
  Description of Artificial Sequence: Synthetic oligonucleotide
aagauggagguguugcuau

SEQ ID NO: 3196687 - RNA, 19 nt, Artificial Sequence
  Description of Artificial Sequence: Synthetic oligonucleotide
guugcuaugguaguaggug

SEQ ID NO: 3196688 - RNA, 19 nt, Artificial Sequence
  Description of Artificial Sequence: Synthetic oligonucleotide
ugacuguugaagcacucac

SEQ ID NO: 3196689 - RNA, 19 nt, Artificial Sequence
  Description of Artificial Sequence: Synthetic oligonucleotide
gauggaggagguugcacag

SEQ ID NO: 3196690 - RNA, 19 nt, Artificial Sequence
  Description of Artificial Sequence: Synthetic oligonucleotide
ugcuaugguaguaggugag

SEQ ID NO: 3196691 - RNA, 19 nt, Artificial Sequence
  Description of Artificial Sequence: Synthetic oligonucleotide
gacaggauggaggagguug

SEQ ID NO: 3196692 - RNA, 19 nt, Artificial Sequence
  Description of Artificial Sequence: Synthetic oligonucleotide
acuucugcugacaggaugg

SEQ ID NO: 3196693 - RNA, 19 nt, Artificial Sequence
  Description of Artificial Sequence: Synthetic oligonucleotide
uaugguaguaggugagaug

SEQ ID NO: 3196694 - RNA, 19 nt, Artificial Sequence
  Description of Artificial Sequence: Synthetic oligonucleotide
auggauuuucuucucuucu

SEQ ID NO: 3196695 - RNA, 19 nt, Artificial Sequence
  Description of Artificial Sequence: Synthetic oligonucleotide
cuuugaagggaagauggag

SEQ ID NO: 3196696 - RNA, 19 nt, Artificial Sequence
  Description of Artificial Sequence: Synthetic oligonucleotide
acuguugaagcacucacuu

SEQ ID NO: 3196697 - RNA, 19 nt, Artificial Sequence
  Description of Artificial Sequence: Synthetic oligonucleotide
uaguaggugagauggauuu

SEQ ID NO: 3196698 - RNA, 19 nt, Artificial Sequence
  Description of Artificial Sequence: Synthetic oligonucleotide
ccaugagagucuuugaagg

SEQ ID NO: 3196699 - RNA, 19 nt, Artificial Sequence
  Description of Artificial Sequence: Synthetic oligonucleotide
aggagggcauuucugcugg

SEQ ID NO: 3196700 - RNA, 19 nt, Artificial Sequence
  Description of Artificial Sequence: Synthetic oligonucleotide
gauggagguguugcuaugg

SEQ ID NO: 3196701 - RNA, 19 nt, Artificial Sequence
  Description of Artificial Sequence: Synthetic oligonucleotide
aggaggacaaggcucagga

SEQ ID NO: 3196702 - RNA, 19 nt, Artificial Sequence
  Description of Artificial Sequence: Synthetic oligonucleotide
ugagagucuuugaagggaa

SEQ ID NO: 3196703 - RNA, 19 nt, Artificial Sequence
  Description of Artificial Sequence: Synthetic oligonucleotide
cacaggagggcauuucugc

SEQ ID NO: 3196704 - RNA, 19 nt, Artificial Sequence
  Description of Artificial Sequence: Synthetic oligonucleotide
gauggauuuucuucucuuc

SEQ ID NO: 3196705 - RNA, 19 nt, Artificial Sequence
  Description of Artificial Sequence: Synthetic oligonucleotide
uguugcuaugguaguaggu

SEQ ID NO: 3196706 - RNA, 19 nt, Artificial Sequence
  Description of Artificial Sequence: Synthetic oligonucleotide
uugcuaugguaguagguga

SEQ ID NO: 3196707 - RNA, 19 nt, Artificial Sequence
  Description of Artificial Sequence: Synthetic oligonucleotide
ucuuugaagggaagaugga

SEQ ID NO: 3196708 - RNA, 19 nt, Artificial Sequence
  Description of Artificial Sequence: Synthetic oligonucleotide
auggcugaggaggacaagg

SEQ ID NO: 3196709 - RNA, 19 nt, Artificial Sequence
  Description of Artificial Sequence: Synthetic oligonucleotide
uggaggagguugcacagga

SEQ ID NO: 3196710 - RNA, 19 nt, Artificial Sequence
  Description of Artificial Sequence: Synthetic oligonucleotide
ggugagauggauuuucuuc

SEQ ID NO: 3196711 - RNA, 19 nt, Artificial Sequence
  Description of Artificial Sequence: Synthetic oligonucleotide
uccuggugacuguugaagc

SEQ ID NO: 3196712 - RNA, 19 nt, Artificial Sequence
  Description of Artificial Sequence: Synthetic oligonucleotide
ggagguguugcuaugguag

SEQ ID NO: 3196713 - RNA, 19 nt, Artificial Sequence
  Description of Artificial Sequence: Synthetic oligonucleotide
auuucugcuggcauggcug

SEQ ID NO: 3196714 - RNA, 19 nt, Artificial Sequence
  Description of Artificial Sequence: Synthetic oligonucleotide
ucuucucuugguccuggug

SEQ ID NO: 3196715 - RNA, 19 nt, Artificial Sequence
  Description of Artificial Sequence: Synthetic oligonucleotide
uggauuuucuucucuucuc

SEQ ID NO: 3196716 - RNA, 19 nt, Artificial Sequence
  Description of Artificial Sequence: Synthetic oligonucleotide
ugggcacuucugcugacag

SEQ ID NO: 3196717 - RNA, 19 nt, Artificial Sequence
  Description of Artificial Sequence: Synthetic oligonucleotide
ugcacaggagggcauuucu

SEQ ID NO: 3196718 - RNA, 19 nt, Artificial Sequence
  Description of Artificial Sequence: Synthetic oligonucleotide
cuucucuugguccugguga

SEQ ID NO: 3196719 - RNA, 19 nt, Artificial Sequence
  Description of Artificial Sequence: Synthetic oligonucleotide
gcuggcauggcugaggagg

SEQ ID NO: 3196720 - RNA, 19 nt, Artificial Sequence
  Description of Artificial Sequence: Synthetic oligonucleotide
cuugggugggcacuucugc

SEQ ID NO: 3196721 - RNA, 19 nt, Artificial Sequence
  Description of Artificial Sequence: Synthetic oligonucleotide
acaggauggaggagguugc

SEQ ID NO: 3196722 - RNA, 19 nt, Artificial Sequence
  Description of Artificial Sequence: Synthetic oligonucleotide
uucuucucuucucuugguc

SEQ ID NO: 3196723 - RNA, 19 nt, Artificial Sequence
  Description of Artificial Sequence: Synthetic oligonucleotide
ucugcuggcauggcugagg

SEQ ID NO: 3196724 - RNA, 19 nt, Artificial Sequence
  Description of Artificial Sequence: Synthetic oligonucleotide
agucuuugaagggaagaug

SEQ ID NO: 3196725 - RNA, 19 nt, Artificial Sequence
  Description of Artificial Sequence: Synthetic oligonucleotide
agcacucacuugcucuugg

SEQ ID NO: 3196726 - RNA, 19 nt, Artificial Sequence
  Description of Artificial Sequence: Synthetic oligonucleotide
guguugcuaugguaguagg

SEQ ID NO: 3196727 - RNA, 19 nt, Artificial Sequence
  Description of Artificial Sequence: Synthetic oligonucleotide
uggcugaggaggacaaggc

SEQ ID NO: 3196728 - RNA, 19 nt, Artificial Sequence
  Description of Artificial Sequence: Synthetic oligonucleotide
ucuugggugggcacuucug

SEQ ID NO: 3196729 - RNA, 19 nt, Artificial Sequence
  Description of Artificial Sequence: Synthetic oligonucleotide
gcugacaggauggaggagg

SEQ ID NO: 3196730 - RNA, 19 nt, Artificial Sequence
  Description of Artificial Sequence: Synthetic oligonucleotide
aggagguugcacaggaggg

SEQ ID NO: 3196731 - RNA, 19 nt, Artificial Sequence
  Description of Artificial Sequence: Synthetic oligonucleotide
uaggugagauggauuuucu

SEQ ID NO: 3196732 - RNA, 19 nt, Artificial Sequence
  Description of Artificial Sequence: Synthetic oligonucleotide
augagagucuuugaaggga

SEQ ID NO: 3196733 - RNA, 19 nt, Artificial Sequence
  Description of Artificial Sequence: Synthetic oligonucleotide
uucucuugguccuggugac

SEQ ID NO: 3196734 - RNA, 19 nt, Artificial Sequence
  Description of Artificial Sequence: Synthetic oligonucleotide
gaagggaagauggaggugu

SEQ ID NO: 3196735 - RNA, 19 nt, Artificial Sequence
  Description of Artificial Sequence: Synthetic oligonucleotide
ugagauggauuuucuucuc

SEQ ID NO: 3196736 - RNA, 19 nt, Artificial Sequence
  Description of Artificial Sequence: Synthetic oligonucleotide
agauggauuuucuucucuu

SEQ ID NO: 3196737 - RNA, 19 nt, Artificial Sequence
  Description of Artificial Sequence: Synthetic oligonucleotide
gugagauggauuuucuucu

SEQ ID NO: 3196738 - RNA, 19 nt, Artificial Sequence
  Description of Artificial Sequence: Synthetic oligonucleotide
uuucugcuggcauggcuga

SEQ ID NO: 3196739 - RNA, 19 nt, Artificial Sequence
  Description of Artificial Sequence: Synthetic oligonucleotide
agagucuuugaagggaaga

SEQ ID NO: 3196740 - RNA, 19 nt, Artificial Sequence
  Description of Artificial Sequence: Synthetic oligonucleotide
ugguccuggugacuguuga

SEQ ID NO: 3196741 - RNA, 19 nt, Artificial Sequence
  Description of Artificial Sequence: Synthetic oligonucleotide
uuucuucucuucucuuggu

SEQ ID NO: 3196742 - RNA, 19 nt, Artificial Sequence
  Description of Artificial Sequence: Synthetic oligonucleotide
ugggugggcacuucugcug

SEQ ID NO: 3196743 - RNA, 19 nt, Artificial Sequence
  Description of Artificial Sequence: Synthetic oligonucleotide
guaggugagauggauuuuc

SEQ ID NO: 3196744 - RNA, 19 nt, Artificial Sequence
  Description of Artificial Sequence: Synthetic oligonucleotide
ucucuucucuugguccugg

SEQ ID NO: 3196745 - RNA, 19 nt, Artificial Sequence
  Description of Artificial Sequence: Synthetic oligonucleotide
uggugacuguugaagcacu

SEQ ID NO: 3196746 - RNA, 19 nt, Artificial Sequence
  Description of Artificial Sequence: Synthetic oligonucleotide
cacuucugcugacaggaug

SEQ ID NO: 3196747 - RNA, 19 nt, Artificial Sequence
  Description of Artificial Sequence: Synthetic oligonucleotide
uugaagcacucacuugcuc

SEQ ID NO: 3196748 - RNA, 19 nt, Artificial Sequence
  Description of Artificial Sequence: Synthetic oligonucleotide
acaggagggcauuucugcu

SEQ ID NO: 3196749 - RNA, 19 nt, Artificial Sequence
  Description of Artificial Sequence: Synthetic oligonucleotide
ggcauuucugcuggcaugg

SEQ ID NO: 3196750 - RNA, 19 nt, Artificial Sequence
  Description of Artificial Sequence: Synthetic oligonucleotide
guccuggugacuguugaag

SEQ ID NO: 3196751 - RNA, 19 nt, Artificial Sequence
  Description of Artificial Sequence: Synthetic oligonucleotide
cuguugaagcacucacuug

SEQ ID NO: 3196752 - RNA, 19 nt, Artificial Sequence
  Description of Artificial Sequence: Synthetic oligonucleotide
gguguugcuaugguaguag

SEQ ID NO: 3196753 - RNA, 19 nt, Artificial Sequence
  Description of Artificial Sequence: Synthetic oligonucleotide
cugaggaggacaaggcuca

SEQ ID NO: 3196754 - RNA, 19 nt, Artificial Sequence
  Description of Artificial Sequence: Synthetic oligonucleotide
uugggugggcacuucugcu

SEQ ID NO: 3196755 - RNA, 19 nt, Artificial Sequence
  Description of Artificial Sequence: Synthetic oligonucleotide
ugaagggaagauggaggug

SEQ ID NO: 3196756 - RNA, 19 nt, Artificial Sequence
  Description of Artificial Sequence: Synthetic oligonucleotide
aggauggaggagguugcac

SEQ ID NO: 3196757 - RNA, 19 nt, Artificial Sequence
  Description of Artificial Sequence: Synthetic oligonucleotide
gggaagauggagguguugc

SEQ ID NO: 3196758 - RNA, 19 nt, Artificial Sequence
  Description of Artificial Sequence: Synthetic oligonucleotide
cuggugacuguugaagcac

SEQ ID NO: 3196759 - RNA, 19 nt, Artificial Sequence
  Description of Artificial Sequence: Synthetic oligonucleotide
caggagggcauuucugcug

SEQ ID NO: 3196760 - RNA, 19 nt, Artificial Sequence
  Description of Artificial Sequence: Synthetic oligonucleotide
ucacuugcucuuggguggg

SEQ ID NO: 3196761 - RNA, 19 nt, Artificial Sequence
  Description of Artificial Sequence: Synthetic oligonucleotide
agauggagguguugcuaug

SEQ ID NO: 3196762 - RNA, 19 nt, Artificial Sequence
  Description of Artificial Sequence: Synthetic oligonucleotide
uugguccuggugacuguug

SEQ ID NO: 3196763 - RNA, 19 nt, Artificial Sequence
  Description of Artificial Sequence: Synthetic oligonucleotide
cuugcucuugggugggcac

SEQ ID NO: 3196764 - RNA, 19 nt, Artificial Sequence
  Description of Artificial Sequence: Synthetic oligonucleotide
uucugcugacaggauggag

SEQ ID NO: 3196765 - RNA, 19 nt, Artificial Sequence
  Description of Artificial Sequence: Synthetic oligonucleotide
gaggaggacaaggcucagg

SEQ ID NO: 3196766 - RNA, 19 nt, Artificial Sequence
  Description of Artificial Sequence: Synthetic oligonucleotide
cucuugguccuggugacug

SEQ ID NO: 3196767 - RNA, 19 nt, Artificial Sequence
  Description of Artificial Sequence: Synthetic oligonucleotide
ugguaguaggugagaugga

SEQ ID NO: 3196768 - RNA, 19 nt, Artificial Sequence
  Description of Artificial Sequence: Synthetic oligonucleotide
ggauggaggagguugcaca

SEQ ID NO: 3196769 - RNA, 19 nt, Artificial Sequence
  Description of Artificial Sequence: Synthetic oligonucleotide
auggagguguugcuauggu

SEQ ID NO: 3196770 - RNA, 19 nt, Artificial Sequence
  Description of Artificial Sequence: Synthetic oligonucleotide
gagagucuuugaagggaag

SEQ ID NO: 3196771 - RNA, 19 nt, Artificial Sequence
  Description of Artificial Sequence: Synthetic oligonucleotide
aguauuaacauuuuggagc

SEQ ID NO: 3196772 - RNA, 19 nt, Artificial Sequence
  Description of Artificial Sequence: Synthetic oligonucleotide
aaaauuaugccccacauga

SEQ ID NO: 3196773 - RNA, 19 nt, Artificial Sequence
  Description of Artificial Sequence: Synthetic oligonucleotide
ucgauuguaaaauaaaugc

SEQ ID NO: 3196774 - RNA, 19 nt, Artificial Sequence
  Description of Artificial Sequence: Synthetic oligonucleotide
auaauuauaaaaguucccc

SEQ ID NO: 3196775 - RNA, 19 nt, Artificial Sequence
  Description of Artificial Sequence: Synthetic oligonucleotide
auagauaaaauuaugcccc

SEQ ID NO: 3196776 - RNA, 19 nt, Artificial Sequence
  Description of Artificial Sequence: Synthetic oligonucleotide
aagaacauuacauuaucuc

SEQ ID NO: 3196777 - RNA, 19 nt, Artificial Sequence
  Description of Artificial Sequence: Synthetic oligonucleotide
caaacuaguauuuagcucc

SEQ ID NO: 3196778 - RNA, 19 nt, Artificial Sequence
  Description of Artificial Sequence: Synthetic oligonucleotide
uguuauucgguaaagaugu

SEQ ID NO: 3196779 - RNA, 19 nt, Artificial Sequence
  Description of Artificial Sequence: Synthetic oligonucleotide
aauacguauuuacaaaauc

SEQ ID NO: 3196780 - RNA, 19 nt, Artificial Sequence
  Description of Artificial Sequence: Synthetic oligonucleotide
aaaagaacauuacauuauc

SEQ ID NO: 3196781 - RNA, 19 nt, Artificial Sequence
  Description of Artificial Sequence: Synthetic oligonucleotide
aaucaaauacauuauacaa

SEQ ID NO: 3196782 - RNA, 19 nt, Artificial Sequence
  Description of Artificial Sequence: Synthetic oligonucleotide
ugucuuauuaguauuaaca

SEQ ID NO: 3196783 - RNA, 19 nt, Artificial Sequence
  Description of Artificial Sequence: Synthetic oligonucleotide
uacauuaucucacacauac

SEQ ID NO: 3196784 - RNA, 19 nt, Artificial Sequence
  Description of Artificial Sequence: Synthetic oligonucleotide
aaaacgugcggacacuugc

SEQ ID NO: 3196785 - RNA, 19 nt, Artificial Sequence
  Description of Artificial Sequence: Synthetic oligonucleotide
aaaucaaauacauuauaca

SEQ ID NO: 3196786 - RNA, 19 nt, Artificial Sequence
  Description of Artificial Sequence: Synthetic oligonucleotide
auucagagauaucugaagc

SEQ ID NO: 3196787 - RNA, 19 nt, Artificial Sequence
  Description of Artificial Sequence: Synthetic oligonucleotide
uuuacaaaaucaaauacau

SEQ ID NO: 3196788 - RNA, 19 nt, Artificial Sequence
  Description of Artificial Sequence: Synthetic oligonucleotide
aguuuauucaacuguaguc

SEQ ID NO: 3196789 - RNA, 19 nt, Artificial Sequence
  Description of Artificial Sequence: Synthetic oligonucleotide
  modified_base (19)..(19): a, c, u, g, unknown or other
aaagauuuagcguuucucn

SEQ ID NO: 3196790 - RNA, 19 nt, Artificial Sequence
  Description of Artificial Sequence: Synthetic oligonucleotide
acucauuucuuccuaaggc

SEQ ID NO: 3196791 - RNA, 19 nt, Artificial Sequence
  Description of Artificial Sequence: Synthetic oligonucleotide
ugaaauuuaaaugauggca

SEQ ID NO: 3196792 - RNA, 19 nt, Artificial Sequence
  Description of Artificial Sequence: Synthetic oligonucleotide
uacauaauauauucagucg

SEQ ID NO: 3196793 - RNA, 19 nt, Artificial Sequence
  Description of Artificial Sequence: Synthetic oligonucleotide
acuaagugaaauuuaaaug

SEQ ID NO: 3196794 - RNA, 19 nt, Artificial Sequence
  Description of Artificial Sequence: Synthetic oligonucleotide
aauauauucagucgauugu

SEQ ID NO: 3196795 - RNA, 19 nt, Artificial Sequence
  Description of Artificial Sequence: Synthetic oligonucleotide
uuaguauuaacauuuugga

SEQ ID NO: 3196796 - RNA, 19 nt, Artificial Sequence
  Description of Artificial Sequence: Synthetic oligonucleotide
aucagaauagguuaugcuc

SEQ ID NO: 3196797 - RNA, 19 nt, Artificial Sequence
  Description of Artificial Sequence: Synthetic oligonucleotide
  modified_base (18)..(18): a, c, u, g, unknown or other
aagauuuagcguuucucnc

SEQ ID NO: 3196798 - RNA, 19 nt, Artificial Sequence
  Description of Artificial Sequence: Synthetic oligonucleotide
aauaaaugcucaaauaucu

SEQ ID NO: 3196799 - RNA, 19 nt, Artificial Sequence
  Description of Artificial Sequence: Synthetic oligonucleotide
caguacacaauacaaaucg

SEQ ID NO: 3196800 - RNA, 19 nt, Artificial Sequence
  Description of Artificial Sequence: Synthetic oligonucleotide
uaaaugauggcacuuaaaa

SEQ ID NO: 3196801 - RNA, 19 nt, Artificial Sequence
  Description of Artificial Sequence: Synthetic oligonucleotide
aaauaaaugcucaaauauc

SEQ ID NO: 3196802 - RNA, 19 nt, Artificial Sequence
  Description of Artificial Sequence: Synthetic oligonucleotide
uuacauaauauauucaguc

SEQ ID NO: 3196803 - RNA, 19 nt, Artificial Sequence
  Description of Artificial Sequence: Synthetic oligonucleotide
ucagaauagguuaugcucc

SEQ ID NO: 3196804 - RNA, 19 nt, Artificial Sequence
  Description of Artificial Sequence: Synthetic oligonucleotide
cuaagugaaauuuaaauga

SEQ ID NO: 3196805 - RNA, 19 nt, Artificial Sequence
  Description of Artificial Sequence: Synthetic oligonucleotide
gauagaugcaacuccaaag

SEQ ID NO: 3196806 - RNA, 19 nt, Artificial Sequence
  Description of Artificial Sequence: Synthetic oligonucleotide
ucauuuacauaauauauuc

SEQ ID NO: 3196807 - RNA, 19 nt, Artificial Sequence
  Description of Artificial Sequence: Synthetic oligonucleotide
uaauauauucagucgauug

SEQ ID NO: 3196808 - RNA, 19 nt, Artificial Sequence
  Description of Artificial Sequence: Synthetic oligonucleotide
aacauuuuggagcauagau

SEQ ID NO: 3196809 - RNA, 19 nt, Artificial Sequence
  Description of Artificial Sequence: Synthetic oligonucleotide
uauaauuauaaaaguuccc

SEQ ID NO: 3196810 - RNA, 19 nt, Artificial Sequence
  Description of Artificial Sequence: Synthetic oligonucleotide
auuuuauaauuauaaaagu

SEQ ID NO: 3196811 - RNA, 19 nt, Artificial Sequence
  Description of Artificial Sequence: Synthetic oligonucleotide
cauacaaucucuacaaaag

SEQ ID NO: 3196812 - RNA, 19 nt, Artificial Sequence
  Description of Artificial Sequence: Synthetic oligonucleotide
aaaagauuuagcguuucuc

SEQ ID NO: 3196813 - RNA, 19 nt, Artificial Sequence
  Description of Artificial Sequence: Synthetic oligonucleotide
acuaguauuuagcuccugc

SEQ ID NO: 3196814 - RNA, 19 nt, Artificial Sequence
  Description of Artificial Sequence: Synthetic oligonucleotide
auuacauuaucucacacau

SEQ ID NO: 3196815 - RNA, 19 nt, Artificial Sequence
  Description of Artificial Sequence: Synthetic oligonucleotide
aaaccagcaauguuguaag

SEQ ID NO: 3196816 - RNA, 19 nt, Artificial Sequence
  Description of Artificial Sequence: Synthetic oligonucleotide
uauuguacaguacacaaua

SEQ ID NO: 3196817 - RNA, 19 nt, Artificial Sequence
  Description of Artificial Sequence: Synthetic oligonucleotide
aacucauuucuuccuaagg

SEQ ID NO: 3196818 - RNA, 19 nt, Artificial Sequence
  Description of Artificial Sequence: Synthetic oligonucleotide
uacacaauacaaaucgccc

SEQ ID NO: 3196819 - RNA, 19 nt, Artificial Sequence
  Description of Artificial Sequence: Synthetic oligonucleotide
gaaauuuaaaugauggcac

SEQ ID NO: 3196820 - RNA, 19 nt, Artificial Sequence
  Description of Artificial Sequence: Synthetic oligonucleotide
aacacacuaaaguuaauau

SEQ ID NO: 3196821 - RNA, 19 nt, Artificial Sequence
  Description of Artificial Sequence: Synthetic oligonucleotide
agaacauuacauuaucuca

SEQ ID NO: 3196822 - RNA, 19 nt, Artificial Sequence
  Description of Artificial Sequence: Synthetic oligonucleotide
cuuaaagcaagugagugcc

SEQ ID NO: 3196823 - RNA, 19 nt, Artificial Sequence
  Description of Artificial Sequence: Synthetic oligonucleotide
acauaauauauucagucga

SEQ ID NO: 3196824 - RNA, 19 nt, Artificial Sequence
  Description of Artificial Sequence: Synthetic oligonucleotide
uuuacauaauauauucagu

SEQ ID NO: 3196825 - RNA, 19 nt, Artificial Sequence
  Description of Artificial Sequence: Synthetic oligonucleotide
aaauuuaaaugauggcacu

SEQ ID NO: 3196826 - RNA, 19 nt, Artificial Sequence
  Description of Artificial Sequence: Synthetic oligonucleotide
acaaaaguugcuuaccuca

SEQ ID NO: 3196827 - RNA, 19 nt, Artificial Sequence
  Description of Artificial Sequence: Synthetic oligonucleotide
aaauaucuccuaguguuac

SEQ ID NO: 3196828 - RNA, 19 nt, Artificial Sequence
  Description of Artificial Sequence: Synthetic oligonucleotide
aguugcuuaccucauuuac

SEQ ID NO: 3196829 - RNA, 19 nt, Artificial Sequence
  Description of Artificial Sequence: Synthetic oligonucleotide
aauguuguaagcagaauga

SEQ ID NO: 3196830 - RNA, 19 nt, Artificial Sequence
  Description of Artificial Sequence: Synthetic oligonucleotide
uaauuauaaaaguucccca

SEQ ID NO: 3196831 - RNA, 19 nt, Artificial Sequence
  Description of Artificial Sequence: Synthetic oligonucleotide
guuuauucaacuguagucc

SEQ ID NO: 3196832 - RNA, 19 nt, Artificial Sequence
  Description of Artificial Sequence: Synthetic oligonucleotide
aaguuuauucaacuguagu

SEQ ID NO: 3196833 - RNA, 19 nt, Artificial Sequence
  Description of Artificial Sequence: Synthetic oligonucleotide
uuaacauuuuggagcauag

SEQ ID NO: 3196834 - RNA, 19 nt, Artificial Sequence
  Description of Artificial Sequence: Synthetic oligonucleotide
uaugucgugugcuuguggg

SEQ ID NO: 3196835 - RNA, 19 nt, Artificial Sequence
  Description of Artificial Sequence: Synthetic oligonucleotide
uaguauuaacauuuuggag

SEQ ID NO: 3196836 - RNA, 19 nt, Artificial Sequence
  Description of Artificial Sequence: Synthetic oligonucleotide
acaaacuaguauuuagcuc

SEQ ID NO: 3196837 - RNA, 19 nt, Artificial Sequence
  Description of Artificial Sequence: Synthetic oligonucleotide
ucuguguccugucacacag

SEQ ID NO: 3196838 - RNA, 19 nt, Artificial Sequence
  Description of Artificial Sequence: Synthetic oligonucleotide
acuccaaagagccuaacug

SEQ ID NO: 3196839 - RNA, 19 nt, Artificial Sequence
  Description of Artificial Sequence: Synthetic oligonucleotide
auagaugcaacuccaaaga

SEQ ID NO: 3196840 - RNA, 19 nt, Artificial Sequence
  Description of Artificial Sequence: Synthetic oligonucleotide
agugcuuaaagcaagugag

SEQ ID NO: 3196841 - RNA, 19 nt, Artificial Sequence
  Description of Artificial Sequence: Synthetic oligonucleotide
uucguuggaacucauuucu

SEQ ID NO: 3196842 - RNA, 19 nt, Artificial Sequence
  Description of Artificial Sequence: Synthetic oligonucleotide
aauuaugccccacaugaau

SEQ ID NO: 3196843 - RNA, 19 nt, Artificial Sequence
  Description of Artificial Sequence: Synthetic oligonucleotide
caauguuguaagcagaaug

SEQ ID NO: 3196844 - RNA, 19 nt, Artificial Sequence
  Description of Artificial Sequence: Synthetic oligonucleotide
aauuccgucaagaaaccag

SEQ ID NO: 3196845 - RNA, 19 nt, Artificial Sequence
  Description of Artificial Sequence: Synthetic oligonucleotide
auaaaaguuccccaguuau

SEQ ID NO: 3196846 - RNA, 19 nt, Artificial Sequence
  Description of Artificial Sequence: Synthetic oligonucleotide
aacauuacauuaucucaca

SEQ ID NO: 3196847 - RNA, 19 nt, Artificial Sequence
  Description of Artificial Sequence: Synthetic oligonucleotide
auuuacaaaaucaaauaca

SEQ ID NO: 3196848 - RNA, 19 nt, Artificial Sequence
  Description of Artificial Sequence: Synthetic oligonucleotide
ucagagauaucugaagcag

SEQ ID NO: 3196849 - RNA, 19 nt, Artificial Sequence
  Description of Artificial Sequence: Synthetic oligonucleotide
accaucacauguuauucgg

SEQ ID NO: 3196850 - RNA, 19 nt, Artificial Sequence
  Description of Artificial Sequence: Synthetic oligonucleotide
gacacuugcacuaugcuac

SEQ ID NO: 3196851 - RNA, 19 nt, Artificial Sequence
  Description of Artificial Sequence: Synthetic oligonucleotide
uguguccugucacacagag

SEQ ID NO: 3196852 - RNA, 19 nt, Artificial Sequence
  Description of Artificial Sequence: Synthetic oligonucleotide
caaucucuacaaaaguugc

SEQ ID NO: 3196853 - RNA, 19 nt, Artificial Sequence
  Description of Artificial Sequence: Synthetic oligonucleotide
uuaugcucccguaugggcc

SEQ ID NO: 3196854 - RNA, 19 nt, Artificial Sequence
  Description of Artificial Sequence: Synthetic oligonucleotide
cuaguauuuagcuccugcc

SEQ ID NO: 3196855 - RNA, 19 nt, Artificial Sequence
  Description of Artificial Sequence: Synthetic oligonucleotide
cauuuuggagcauagauaa

SEQ ID NO: 3196856 - RNA, 19 nt, Artificial Sequence
  Description of Artificial Sequence: Synthetic oligonucleotide
uccaaacaauauuuuauga

SEQ ID NO: 3196857 - RNA, 19 nt, Artificial Sequence
  Description of Artificial Sequence: Synthetic oligonucleotide
uaaaguuaauauauauuuu

SEQ ID NO: 3196858 - RNA, 19 nt, Artificial Sequence
  Description of Artificial Sequence: Synthetic oligonucleotide
aagcaguagucacagccuc

SEQ ID NO: 3196859 - RNA, 19 nt, Artificial Sequence
  Description of Artificial Sequence: Synthetic oligonucleotide
aggaaauacguauuuacaa

SEQ ID NO: 3196860 - RNA, 19 nt, Artificial Sequence
  Description of Artificial Sequence: Synthetic oligonucleotide
uaagugaaauuuaaaugau

SEQ ID NO: 3196861 - RNA, 19 nt, Artificial Sequence
  Description of Artificial Sequence: Synthetic oligonucleotide
uucagagauaucugaagca

SEQ ID NO: 3196862 - RNA, 19 nt, Artificial Sequence
  Description of Artificial Sequence: Synthetic oligonucleotide
acuggaaaagaacauuaca

SEQ ID NO: 3196863 - RNA, 19 nt, Artificial Sequence
  Description of Artificial Sequence: Synthetic oligonucleotide
uuuaaaugauggcacuuaa

SEQ ID NO: 3196864 - RNA, 19 nt, Artificial Sequence
  Description of Artificial Sequence: Synthetic oligonucleotide
uguucguuggaacucauuu

SEQ ID NO: 3196865 - RNA, 19 nt, Artificial Sequence
  Description of Artificial Sequence: Synthetic oligonucleotide
aacugucccaaguucaagu

SEQ ID NO: 3196866 - RNA, 19 nt, Artificial Sequence
  Description of Artificial Sequence: Synthetic oligonucleotide
gcauagauaaaauuaugcc

SEQ ID NO: 3196867 - RNA, 19 nt, Artificial Sequence
  Description of Artificial Sequence: Synthetic oligonucleotide
ucugaagcaguagucacag

SEQ ID NO: 3196868 - RNA, 19 nt, Artificial Sequence
  Description of Artificial Sequence: Synthetic oligonucleotide
guauuaacauuuuggagca

SEQ ID NO: 3196869 - RNA, 19 nt, Artificial Sequence
  Description of Artificial Sequence: Synthetic oligonucleotide
acacauacaaucucuacaa

SEQ ID NO: 3196870 - RNA, 19 nt, Artificial Sequence
  Description of Artificial Sequence: Synthetic oligonucleotide
acauuacauuaucucacac

SEQ ID NO: 3196871 - RNA, 19 nt, Artificial Sequence
  Description of Artificial Sequence: Synthetic oligonucleotide
aaaagauuaaaauugauuc

SEQ ID NO: 3196872 - RNA, 19 nt, Artificial Sequence
  Description of Artificial Sequence: Synthetic oligonucleotide
uauuaaaagauuaaaauug

SEQ ID NO: 3196873 - RNA, 19 nt, Artificial Sequence
  Description of Artificial Sequence: Synthetic oligonucleotide
uuaaaauugauucaugugc

SEQ ID NO: 3196874 - RNA, 19 nt, Artificial Sequence
  Description of Artificial Sequence: Synthetic oligonucleotide
uuuauauagaauaacuuag

SEQ ID NO: 3196875 - RNA, 19 nt, Artificial Sequence
  Description of Artificial Sequence: Synthetic oligonucleotide
uauagaauaacuuagucac

SEQ ID NO: 3196876 - RNA, 19 nt, Artificial Sequence
  Description of Artificial Sequence: Synthetic oligonucleotide
gauaucaugaaauucagug

SEQ ID NO: 3196877 - RNA, 19 nt, Artificial Sequence
  Description of Artificial Sequence: Synthetic oligonucleotide
gaaagaauguuccagaacc

SEQ ID NO: 3196878 - RNA, 19 nt, Artificial Sequence
  Description of Artificial Sequence: Synthetic oligonucleotide
auucaguggagcuacaugc

SEQ ID NO: 3196879 - RNA, 19 nt, Artificial Sequence
  Description of Artificial Sequence: Synthetic oligonucleotide
aacgguucagaucagacag

SEQ ID NO: 3196880 - RNA, 19 nt, Artificial Sequence
  Description of Artificial Sequence: Synthetic oligonucleotide
uuuacuaaccuuauuaaaa

SEQ ID NO: 3196881 - RNA, 19 nt, Artificial Sequence
  Description of Artificial Sequence: Synthetic oligonucleotide
uauuuuacuaaccuuauua

SEQ ID NO: 3196882 - RNA, 19 nt, Artificial Sequence
  Description of Artificial Sequence: Synthetic oligonucleotide
ugcagaacgguucagauca

SEQ ID NO: 3196883 - RNA, 19 nt, Artificial Sequence
  Description of Artificial Sequence: Synthetic oligonucleotide
aacuuagucacugcaaacc

SEQ ID NO: 3196884 - RNA, 19 nt, Artificial Sequence
  Description of Artificial Sequence: Synthetic oligonucleotide
uggagcuacaugcagaacg

SEQ ID NO: 3196885 - RNA, 19 nt, Artificial Sequence
  Description of Artificial Sequence: Synthetic oligonucleotide
aaggaagaaagaauguucc

SEQ ID NO: 3196886 - RNA, 19 nt, Artificial Sequence
  Description of Artificial Sequence: Synthetic oligonucleotide
aaagauuaaaauugauuca

SEQ ID NO: 3196887 - RNA, 19 nt, Artificial Sequence
  Description of Artificial Sequence: Synthetic oligonucleotide
aauugauucaugugcagug

SEQ ID NO: 3196888 - RNA, 19 nt, Artificial Sequence
  Description of Artificial Sequence: Synthetic oligonucleotide
ucagaauaggauaucauga

SEQ ID NO: 3196889 - RNA, 19 nt, Artificial Sequence
  Description of Artificial Sequence: Synthetic oligonucleotide
uaggauaucaugaaauuca

SEQ ID NO: 3196890 - RNA, 19 nt, Artificial Sequence
  Description of Artificial Sequence: Synthetic oligonucleotide
uuauuaaaagauuaaaauu

SEQ ID NO: 3196891 - RNA, 19 nt, Artificial Sequence
  Description of Artificial Sequence: Synthetic oligonucleotide
uaucaugaaauucagugga

SEQ ID NO: 3196892 - RNA, 19 nt, Artificial Sequence
  Description of Artificial Sequence: Synthetic oligonucleotide
uuggaaggaagaaagaaug

SEQ ID NO: 3196893 - RNA, 19 nt, Artificial Sequence
  Description of Artificial Sequence: Synthetic oligonucleotide
uaagucaggaguuuggaag

SEQ ID NO: 3196894 - RNA, 19 nt, Artificial Sequence
  Description of Artificial Sequence: Synthetic oligonucleotide
aaggacagaacucuucuuc

SEQ ID NO: 3196895 - RNA, 19 nt, Artificial Sequence
  Description of Artificial Sequence: Synthetic oligonucleotide
uuacuaaccuuauuaaaag

SEQ ID NO: 3196896 - RNA, 19 nt, Artificial Sequence
  Description of Artificial Sequence: Synthetic oligonucleotide
auaucaugaaauucagugg

SEQ ID NO: 3196897 - RNA, 19 nt, Artificial Sequence
  Description of Artificial Sequence: Synthetic oligonucleotide
uaaaauugauucaugugca

SEQ ID NO: 3196898 - RNA, 19 nt, Artificial Sequence
  Description of Artificial Sequence: Synthetic oligonucleotide
auauagaauaacuuaguca

SEQ ID NO: 3196899 - RNA, 19 nt, Artificial Sequence
  Description of Artificial Sequence: Synthetic oligonucleotide
auuaaaauugauucaugug

SEQ ID NO: 3196900 - RNA, 19 nt, Artificial Sequence
  Description of Artificial Sequence: Synthetic oligonucleotide
uaaaagauuaaaauugauu

SEQ ID NO: 3196901 - RNA, 19 nt, Artificial Sequence
  Description of Artificial Sequence: Synthetic oligonucleotide
aagucaggaguuuggaagg

SEQ ID NO: 3196902 - RNA, 19 nt, Artificial Sequence
  Description of Artificial Sequence: Synthetic oligonucleotide
acuuagucacugcaaaccc

SEQ ID NO: 3196903 - RNA, 19 nt, Artificial Sequence
  Description of Artificial Sequence: Synthetic oligonucleotide
uauauagaauaacuuaguc

SEQ ID NO: 3196904 - RNA, 19 nt, Artificial Sequence
  Description of Artificial Sequence: Synthetic oligonucleotide
guucagaucagacagugcc

SEQ ID NO: 3196905 - RNA, 19 nt, Artificial Sequence
  Description of Artificial Sequence: Synthetic oligonucleotide
uuauauagaauaacuuagu

SEQ ID NO: 3196906 - RNA, 19 nt, Artificial Sequence
  Description of Artificial Sequence: Synthetic oligonucleotide
aaaauugauucaugugcag

SEQ ID NO: 3196907 - RNA, 19 nt, Artificial Sequence
  Description of Artificial Sequence: Synthetic oligonucleotide
agugaugugaucuucuaca

SEQ ID NO: 3196908 - RNA, 19 nt, Artificial Sequence
  Description of Artificial Sequence: Synthetic oligonucleotide
uuugucucuccuaagucag

SEQ ID NO: 3196909 - RNA, 19 nt, Artificial Sequence
  Description of Artificial Sequence: Synthetic oligonucleotide
aagauuaaaauugauucau

SEQ ID NO: 3196910 - RNA, 19 nt, Artificial Sequence
  Description of Artificial Sequence: Synthetic oligonucleotide
aagugaugugaucuucuac

SEQ ID NO: 3196911 - RNA, 19 nt, Artificial Sequence
  Description of Artificial Sequence: Synthetic oligonucleotide
aaagaauguuccagaaccc

SEQ ID NO: 3196912 - RNA, 19 nt, Artificial Sequence
  Description of Artificial Sequence: Synthetic oligonucleotide
uaaccuuauuaaaagauua

SEQ ID NO: 3196913 - RNA, 19 nt, Artificial Sequence
  Description of Artificial Sequence: Synthetic oligonucleotide
agaaagaauguuccagaac

SEQ ID NO: 3196914 - RNA, 19 nt, Artificial Sequence
  Description of Artificial Sequence: Synthetic oligonucleotide
ucuucuacauguauuuuac

SEQ ID NO: 3196915 - RNA, 19 nt, Artificial Sequence
  Description of Artificial Sequence: Synthetic oligonucleotide
agaauaacuuagucacugc

SEQ ID NO: 3196916 - RNA, 19 nt, Artificial Sequence
  Description of Artificial Sequence: Synthetic oligonucleotide
ucuucuucccacuugucag

SEQ ID NO: 3196917 - RNA, 19 nt, Artificial Sequence
  Description of Artificial Sequence: Synthetic oligonucleotide
ucuuuauauagaauaacuu

SEQ ID NO: 3196918 - RNA, 19 nt, Artificial Sequence
  Description of Artificial Sequence: Synthetic oligonucleotide
aauaggauaucaugaaauu

SEQ ID NO: 3196919 - RNA, 19 nt, Artificial Sequence
  Description of Artificial Sequence: Synthetic oligonucleotide
aauucaguggagcuacaug

SEQ ID NO: 3196920 - RNA, 19 nt, Artificial Sequence
  Description of Artificial Sequence: Synthetic oligonucleotide
ucuacauguauuuuacuaa

SEQ ID NO: 3196921 - RNA, 19 nt, Artificial Sequence
  Description of Artificial Sequence: Synthetic oligonucleotide
aggacagaacucuucuucc

SEQ ID NO: 3196922 - RNA, 19 nt, Artificial Sequence
  Description of Artificial Sequence: Synthetic oligonucleotide
uccagaacccuacaaagga

SEQ ID NO: 3196923 - RNA, 19 nt, Artificial Sequence
  Description of Artificial Sequence: Synthetic oligonucleotide
uuuugucucuccuaaguca

SEQ ID NO: 3196924 - RNA, 19 nt, Artificial Sequence
  Description of Artificial Sequence: Synthetic oligonucleotide
gaguuuggaaggaagaaag

SEQ ID NO: 3196925 - RNA, 19 nt, Artificial Sequence
  Description of Artificial Sequence: Synthetic oligonucleotide
uuuggaaggaagaaagaau

SEQ ID NO: 3196926 - RNA, 19 nt, Artificial Sequence
  Description of Artificial Sequence: Synthetic oligonucleotide
acauguauuuuacuaaccu

SEQ ID NO: 3196927 - RNA, 19 nt, Artificial Sequence
  Description of Artificial Sequence: Synthetic oligonucleotide
uagaauaacuuagucacug

SEQ ID NO: 3196928 - RNA, 19 nt, Artificial Sequence
  Description of Artificial Sequence: Synthetic oligonucleotide
gaugugaucuucuacaugu

SEQ ID NO: 3196929 - RNA, 19 nt, Artificial Sequence
  Description of Artificial Sequence: Synthetic oligonucleotide
cuuauuaaaagauuaaaau

SEQ ID NO: 3196930 - RNA, 19 nt, Artificial Sequence
  Description of Artificial Sequence: Synthetic oligonucleotide
cuuuauauagaauaacuua

SEQ ID NO: 3196931 - RNA, 19 nt, Artificial Sequence
  Description of Artificial Sequence: Synthetic oligonucleotide
gucagaauaggauaucaug

SEQ ID NO: 3196932 - RNA, 19 nt, Artificial Sequence
  Description of Artificial Sequence: Synthetic oligonucleotide
uuccagaacccuacaaagg

SEQ ID NO: 3196933 - RNA, 19 nt, Artificial Sequence
  Description of Artificial Sequence: Synthetic oligonucleotide
uuaaaagauuaaaauugau

SEQ ID NO: 3196934 - RNA, 19 nt, Artificial Sequence
  Description of Artificial Sequence: Synthetic oligonucleotide
auaggauaucaugaaauuc

SEQ ID NO: 3196935 - RNA, 19 nt, Artificial Sequence
  Description of Artificial Sequence: Synthetic oligonucleotide
uuuuacuaaccuuauuaaa

SEQ ID NO: 3196936 - RNA, 19 nt, Artificial Sequence
  Description of Artificial Sequence: Synthetic oligonucleotide
uucuacauguauuuuacua

SEQ ID NO: 3196937 - RNA, 19 nt, Artificial Sequence
  Description of Artificial Sequence: Synthetic oligonucleotide
auuuuacuaaccuuauuaa

SEQ ID NO: 3196938 - RNA, 19 nt, Artificial Sequence
  Description of Artificial Sequence: Synthetic oligonucleotide
gauuaaaauugauucaugu

SEQ ID NO: 3196939 - RNA, 19 nt, Artificial Sequence
  Description of Artificial Sequence: Synthetic oligonucleotide
guuccagaacccuacaaag

SEQ ID NO: 3196940 - RNA, 19 nt, Artificial Sequence
  Description of Artificial Sequence: Synthetic oligonucleotide
gaagaaagaauguuccaga

SEQ ID NO: 3196941 - RNA, 19 nt, Artificial Sequence
  Description of Artificial Sequence: Synthetic oligonucleotide
ugaaauucaguggagcuac

SEQ ID NO: 3196942 - RNA, 19 nt, Artificial Sequence
  Description of Artificial Sequence: Synthetic oligonucleotide
uacauguauuuuacuaacc

SEQ ID NO: 3196943 - RNA, 19 nt, Artificial Sequence
  Description of Artificial Sequence: Synthetic oligonucleotide
ucaggaguuuggaaggaag

SEQ ID NO: 3196944 - RNA, 19 nt, Artificial Sequence
  Description of Artificial Sequence: Synthetic oligonucleotide
aagaaagaauguuccagaa

SEQ ID NO: 3196945 - RNA, 19 nt, Artificial Sequence
  Description of Artificial Sequence: Synthetic oligonucleotide
cuacauguauuuuacuaac

SEQ ID NO: 3196946 - RNA, 19 nt, Artificial Sequence
  Description of Artificial Sequence: Synthetic oligonucleotide
aacucuucuucccacuugu

SEQ ID NO: 3196947 - RNA, 19 nt, Artificial Sequence
  Description of Artificial Sequence: Synthetic oligonucleotide
auuaaaagauuaaaauuga

SEQ ID NO: 3196948 - RNA, 19 nt, Artificial Sequence
  Description of Artificial Sequence: Synthetic oligonucleotide
aaauugauucaugugcagu

SEQ ID NO: 3196949 - RNA, 19 nt, Artificial Sequence
  Description of Artificial Sequence: Synthetic oligonucleotide
uccuaagucaggaguuugg

SEQ ID NO: 3196950 - RNA, 19 nt, Artificial Sequence
  Description of Artificial Sequence: Synthetic oligonucleotide
auaacuuagucacugcaaa

SEQ ID NO: 3196951 - RNA, 19 nt, Artificial Sequence
  Description of Artificial Sequence: Synthetic oligonucleotide
uguuccagaacccuacaaa

SEQ ID NO: 3196952 - RNA, 19 nt, Artificial Sequence
  Description of Artificial Sequence: Synthetic oligonucleotide
aacccaagugaugugaucu

SEQ ID NO: 3196953 - RNA, 19 nt, Artificial Sequence
  Description of Artificial Sequence: Synthetic oligonucleotide
uguauuuuacuaaccuuau

SEQ ID NO: 3196954 - RNA, 19 nt, Artificial Sequence
  Description of Artificial Sequence: Synthetic oligonucleotide
gaauaacuuagucacugca

SEQ ID NO: 3196955 - RNA, 19 nt, Artificial Sequence
  Description of Artificial Sequence: Synthetic oligonucleotide
uuagucacugcaaacccaa

SEQ ID NO: 3196956 - RNA, 19 nt, Artificial Sequence
  Description of Artificial Sequence: Synthetic oligonucleotide
gaaggaagaaagaauguuc

SEQ ID NO: 3196957 - RNA, 19 nt, Artificial Sequence
  Description of Artificial Sequence: Synthetic oligonucleotide
gaccucuuuauauagaaua

SEQ ID NO: 3196958 - RNA, 19 nt, Artificial Sequence
  Description of Artificial Sequence: Synthetic oligonucleotide
aaacccaagugaugugauc

SEQ ID NO: 3196959 - RNA, 19 nt, Artificial Sequence
  Description of Artificial Sequence: Synthetic oligonucleotide
ucucuccuaagucaggagu

SEQ ID NO: 3196960 - RNA, 19 nt, Artificial Sequence
  Description of Artificial Sequence: Synthetic oligonucleotide
ugaucuucuacauguauuu

SEQ ID NO: 3196961 - RNA, 19 nt, Artificial Sequence
  Description of Artificial Sequence: Synthetic oligonucleotide
acagaacucuucuucccac

SEQ ID NO: 3196962 - RNA, 19 nt, Artificial Sequence
  Description of Artificial Sequence: Synthetic oligonucleotide
uacuaaccuuauuaaaaga

SEQ ID NO: 3196963 - RNA, 19 nt, Artificial Sequence
  Description of Artificial Sequence: Synthetic oligonucleotide
aacccuacaaaggacagaa

SEQ ID NO: 3196964 - RNA, 19 nt, Artificial Sequence
  Description of Artificial Sequence: Synthetic oligonucleotide
gucacugcaaacccaagug

SEQ ID NO: 3196965 - RNA, 19 nt, Artificial Sequence
  Description of Artificial Sequence: Synthetic oligonucleotide
ucaugaaauucaguggagc

SEQ ID NO: 3196966 - RNA, 19 nt, Artificial Sequence
  Description of Artificial Sequence: Synthetic oligonucleotide
ucaguggagcuacaugcag

SEQ ID NO: 3196967 - RNA, 19 nt, Artificial Sequence
  Description of Artificial Sequence: Synthetic oligonucleotide
aauaacuuagucacugcaa

SEQ ID NO: 3196968 - RNA, 19 nt, Artificial Sequence
  Description of Artificial Sequence: Synthetic oligonucleotide
uugauucaugugcagugug

SEQ ID NO: 3196969 - RNA, 19 nt, Artificial Sequence
  Description of Artificial Sequence: Synthetic oligonucleotide
ucacugcaaacccaaguga

SEQ ID NO: 3196970 - RNA, 19 nt, Artificial Sequence
  Description of Artificial Sequence: Synthetic oligonucleotide
uucaugugcagugugugug

SEQ ID NO: 3196971 - RNA, 19 nt, Artificial Sequence
  Description of Artificial Sequence: Synthetic oligonucleotide
aaaauaaacacuuucccac

SEQ ID NO: 3196972 - RNA, 19 nt, Artificial Sequence
  Description of Artificial Sequence: Synthetic oligonucleotide
uguauuuagaaaauaaaca

SEQ ID NO: 3196973 - RNA, 19 nt, Artificial Sequence
  Description of Artificial Sequence: Synthetic oligonucleotide
aacauuuucuuuugguucc

SEQ ID NO: 3196974 - RNA, 19 nt, Artificial Sequence
  Description of Artificial Sequence: Synthetic oligonucleotide
agaaaauaaacacuuuccc

SEQ ID NO: 3196975 - RNA, 19 nt, Artificial Sequence
  Description of Artificial Sequence: Synthetic oligonucleotide
aagaacugauuccauaccc

SEQ ID NO: 3196976 - RNA, 19 nt, Artificial Sequence
  Description of Artificial Sequence: Synthetic oligonucleotide
aacacuuucccacauauug

SEQ ID NO: 3196977 - RNA, 19 nt, Artificial Sequence
  Description of Artificial Sequence: Synthetic oligonucleotide
ucaaacaggauccagagaa

SEQ ID NO: 3196978 - RNA, 19 nt, Artificial Sequence
  Description of Artificial Sequence: Synthetic oligonucleotide
ucuuccagcacaaagaacu

SEQ ID NO: 3196979 - RNA, 19 nt, Artificial Sequence
  Description of Artificial Sequence: Synthetic oligonucleotide
acugauuccauacccagcc

SEQ ID NO: 3196980 - RNA, 19 nt, Artificial Sequence
  Description of Artificial Sequence: Synthetic oligonucleotide
guauuuagaaaauaaacac

SEQ ID NO: 3196981 - RNA, 19 nt, Artificial Sequence
  Description of Artificial Sequence: Synthetic oligonucleotide
aaagaacugauuccauacc

SEQ ID NO: 3196982 - RNA, 19 nt, Artificial Sequence
  Description of Artificial Sequence: Synthetic oligonucleotide
uagaaaauaaacacuuucc

SEQ ID NO: 3196983 - RNA, 19 nt, Artificial Sequence
  Description of Artificial Sequence: Synthetic oligonucleotide
uaauaaauacuccagugcu

SEQ ID NO: 3196984 - RNA, 19 nt, Artificial Sequence
  Description of Artificial Sequence: Synthetic oligonucleotide
gagaaagaggcauaaagag

SEQ ID NO: 3196985 - RNA, 19 nt, Artificial Sequence
  Description of Artificial Sequence: Synthetic oligonucleotide
acaguagaguaauaaauac

SEQ ID NO: 3196986 - RNA, 19 nt, Artificial Sequence
  Description of Artificial Sequence: Synthetic oligonucleotide
uauuuagaaaauaaacacu

SEQ ID NO: 3196987 - RNA, 19 nt, Artificial Sequence
  Description of Artificial Sequence: Synthetic oligonucleotide
aguagaguaauaaauacuc

SEQ ID NO: 3196988 - RNA, 19 nt, Artificial Sequence
  Description of Artificial Sequence: Synthetic oligonucleotide
uuagaaaauaaacacuuuc

SEQ ID NO: 3196989 - RNA, 19 nt, Artificial Sequence
  Description of Artificial Sequence: Synthetic oligonucleotide
auuggcaaaggcuuucucc

SEQ ID NO: 3196990 - RNA, 19 nt, Artificial Sequence
  Description of Artificial Sequence: Synthetic oligonucleotide
agcacaaagaacugauucc

SEQ ID NO: 3196991 - RNA, 19 nt, Artificial Sequence
  Description of Artificial Sequence: Synthetic oligonucleotide
aguaauaaauacuccagug

SEQ ID NO: 3196992 - RNA, 19 nt, Artificial Sequence
  Description of Artificial Sequence: Synthetic oligonucleotide
auguauuuagaaaauaaac

SEQ ID NO: 3196993 - RNA, 19 nt, Artificial Sequence
  Description of Artificial Sequence: Synthetic oligonucleotide
uauucuuccagcacaaaga

SEQ ID NO: 3196994 - RNA, 19 nt, Artificial Sequence
  Description of Artificial Sequence: Synthetic oligonucleotide
uagaguaauaaauacucca

SEQ ID NO: 3196995 - RNA, 19 nt, Artificial Sequence
  Description of Artificial Sequence: Synthetic oligonucleotide
guaauaaauacuccagugc

SEQ ID NO: 3196996 - RNA, 19 nt, Artificial Sequence
  Description of Artificial Sequence: Synthetic oligonucleotide
aauacuccagugcuuaaug

SEQ ID NO: 3196997 - RNA, 19 nt, Artificial Sequence
  Description of Artificial Sequence: Synthetic oligonucleotide
cuuaauguagagucguggg

SEQ ID NO: 3196998 - RNA, 19 nt, Artificial Sequence
  Description of Artificial Sequence: Synthetic oligonucleotide
auaaagaguuccuuguaag

SEQ ID NO: 3196999 - RNA, 19 nt, Artificial Sequence
  Description of Artificial Sequence: Synthetic oligonucleotide
gaaaauaaacacuuuccca

SEQ ID NO: 3197000 - RNA, 19 nt, Artificial Sequence
  Description of Artificial Sequence: Synthetic oligonucleotide
aagaggcauaaagaguucc

SEQ ID NO: 3197001 - RNA, 19 nt, Artificial Sequence
  Description of Artificial Sequence: Synthetic oligonucleotide
aaauaaacacuuucccaca

SEQ ID NO: 3197002 - RNA, 19 nt, Artificial Sequence
  Description of Artificial Sequence: Synthetic oligonucleotide
auuaacauuuucuuuuggu

SEQ ID NO: 3197003 - RNA, 19 nt, Artificial Sequence
  Description of Artificial Sequence: Synthetic oligonucleotide
uuuucuuuugguuccgcag

SEQ ID NO: 3197004 - RNA, 19 nt, Artificial Sequence
  Description of Artificial Sequence: Synthetic oligonucleotide
cagagaaagaggcauaaag

SEQ ID NO: 3197005 - RNA, 19 nt, Artificial Sequence
  Description of Artificial Sequence: Synthetic oligonucleotide
uaagcauuggcaaaggcuu

SEQ ID NO: 3197006 - RNA, 19 nt, Artificial Sequence
  Description of Artificial Sequence: Synthetic oligonucleotide
caaagaacugauuccauac

SEQ ID NO: 3197007 - RNA, 19 nt, Artificial Sequence
  Description of Artificial Sequence: Synthetic oligonucleotide
uuucuuuugguuccgcagc

SEQ ID NO: 3197008 - RNA, 19 nt, Artificial Sequence
  Description of Artificial Sequence: Synthetic oligonucleotide
uaacauuuucuuuugguuc

SEQ ID NO: 3197009 - RNA, 19 nt, Artificial Sequence
  Description of Artificial Sequence: Synthetic oligonucleotide
uggauuaacauuuucuuuu

SEQ ID NO: 3197010 - RNA, 19 nt, Artificial Sequence
  Description of Artificial Sequence: Synthetic oligonucleotide
aauguagagucgugggauc

SEQ ID NO: 3197011 - RNA, 19 nt, Artificial Sequence
  Description of Artificial Sequence: Synthetic oligonucleotide
aaagaguuccuuguaagca

SEQ ID NO: 3197012 - RNA, 19 nt, Artificial Sequence
  Description of Artificial Sequence: Synthetic oligonucleotide
aauguauuuagaaaauaaa

SEQ ID NO: 3197013 - RNA, 19 nt, Artificial Sequence
  Description of Artificial Sequence: Synthetic oligonucleotide
uaaagaguuccuuguaagc

SEQ ID NO: 3197014 - RNA, 19 nt, Artificial Sequence
  Description of Artificial Sequence: Synthetic oligonucleotide
uuccuuguaagcauuggca

SEQ ID NO: 3197015 - RNA, 19 nt, Artificial Sequence
  Description of Artificial Sequence: Synthetic oligonucleotide
aaggcuuucucccacagua

SEQ ID NO: 3197016 - RNA, 19 nt, Artificial Sequence
  Description of Artificial Sequence: Synthetic oligonucleotide
cacauauugagguucggag

SEQ ID NO: 3197017 - RNA, 19 nt, Artificial Sequence
  Description of Artificial Sequence: Synthetic oligonucleotide
uaaacacuuucccacauau

SEQ ID NO: 3197018 - RNA, 19 nt, Artificial Sequence
  Description of Artificial Sequence: Synthetic oligonucleotide
uuggcaaaggcuuucuccc

SEQ ID NO: 3197019 - RNA, 19 nt, Artificial Sequence
  Description of Artificial Sequence: Synthetic oligonucleotide
uuaauguagagucguggga

SEQ ID NO: 3197020 - RNA, 19 nt, Artificial Sequence
  Description of Artificial Sequence: Synthetic oligonucleotide
gauuaacauuuucuuuugg

SEQ ID NO: 3197021 - RNA, 19 nt, Artificial Sequence
  Description of Artificial Sequence: Synthetic oligonucleotide
aggauccagagaaagaggc

SEQ ID NO: 3197022 - RNA, 19 nt, Artificial Sequence
  Description of Artificial Sequence: Synthetic oligonucleotide
uuaacauuuucuuuugguu

SEQ ID NO: 3197023 - RNA, 19 nt, Artificial Sequence
  Description of Artificial Sequence: Synthetic oligonucleotide
gcugaaguggguuaggagg

SEQ ID NO: 3197024 - RNA, 19 nt, Artificial Sequence
  Description of Artificial Sequence: Synthetic oligonucleotide
auuuagaaaauaaacacuu

SEQ ID NO: 3197025 - RNA, 19 nt, Artificial Sequence
  Description of Artificial Sequence: Synthetic oligonucleotide
cagugcuuaauguagaguc

SEQ ID NO: 3197026 - RNA, 19 nt, Artificial Sequence
  Description of Artificial Sequence: Synthetic oligonucleotide
aaacaggauccagagaaag

SEQ ID NO: 3197027 - RNA, 19 nt, Artificial Sequence
  Description of Artificial Sequence: Synthetic oligonucleotide
guauucuuccagcacaaag

SEQ ID NO: 3197028 - RNA, 19 nt, Artificial Sequence
  Description of Artificial Sequence: Synthetic oligonucleotide
caucaaacaggauccagag

SEQ ID NO: 3197029 - RNA, 19 nt, Artificial Sequence
  Description of Artificial Sequence: Synthetic oligonucleotide
acaggauccagagaaagag

SEQ ID NO: 3197030 - RNA, 19 nt, Artificial Sequence
  Description of Artificial Sequence: Synthetic oligonucleotide
gaacugauuccauacccag

SEQ ID NO: 3197031 - RNA, 19 nt, Artificial Sequence
  Description of Artificial Sequence: Synthetic oligonucleotide
uuuaacccguuggaaaugg

SEQ ID NO: 3197032 - RNA, 19 nt, Artificial Sequence
  Description of Artificial Sequence: Synthetic oligonucleotide
aauaaacacuuucccacau

SEQ ID NO: 3197033 - RNA, 19 nt, Artificial Sequence
  Description of Artificial Sequence: Synthetic oligonucleotide
ucuguuguggcuguggcug

SEQ ID NO: 3197034 - RNA, 19 nt, Artificial Sequence
  Description of Artificial Sequence: Synthetic oligonucleotide
agagucgugggauccaggg

SEQ ID NO: 3197035 - RNA, 19 nt, Artificial Sequence
  Description of Artificial Sequence: Synthetic oligonucleotide
uacccagccacguuuaacc

SEQ ID NO: 3197036 - RNA, 19 nt, Artificial Sequence
  Description of Artificial Sequence: Synthetic oligonucleotide
agaguaauaaauacuccag

SEQ ID NO: 3197037 - RNA, 19 nt, Artificial Sequence
  Description of Artificial Sequence: Synthetic oligonucleotide
aaugggaucgucuccccga

SEQ ID NO: 3197038 - RNA, 19 nt, Artificial Sequence
  Description of Artificial Sequence: Synthetic oligonucleotide
aaaugggaucgucuccccg

SEQ ID NO: 3197039 - RNA, 19 nt, Artificial Sequence
  Description of Artificial Sequence: Synthetic oligonucleotide
cauauugagguucggaguc

SEQ ID NO: 3197040 - RNA, 19 nt, Artificial Sequence
  Description of Artificial Sequence: Synthetic oligonucleotide
agucuguuguggcuguggc

SEQ ID NO: 3197041 - RNA, 19 nt, Artificial Sequence
  Description of Artificial Sequence: Synthetic oligonucleotide
aagaguuccuuguaagcau

SEQ ID NO: 3197042 - RNA, 19 nt, Artificial Sequence
  Description of Artificial Sequence: Synthetic oligonucleotide
cuuguaagcauuggcaaag

SEQ ID NO: 3197043 - RNA, 19 nt, Artificial Sequence
  Description of Artificial Sequence: Synthetic oligonucleotide
aacugauuccauacccagc

SEQ ID NO: 3197044 - RNA, 19 nt, Artificial Sequence
  Description of Artificial Sequence: Synthetic oligonucleotide
uguaagcauuggcaaaggc

SEQ ID NO: 3197045 - RNA, 19 nt, Artificial Sequence
  Description of Artificial Sequence: Synthetic oligonucleotide
cugaaguggguuaggaggc

SEQ ID NO: 3197046 - RNA, 19 nt, Artificial Sequence
  Description of Artificial Sequence: Synthetic oligonucleotide
agcugaagucuguuguggc

SEQ ID NO: 3197047 - RNA, 19 nt, Artificial Sequence
  Description of Artificial Sequence: Synthetic oligonucleotide
uuuagaaaauaaacacuuu

SEQ ID NO: 3197048 - RNA, 19 nt, Artificial Sequence
  Description of Artificial Sequence: Synthetic oligonucleotide
gaggccuccaucaaacagg

SEQ ID NO: 3197049 - RNA, 19 nt, Artificial Sequence
  Description of Artificial Sequence: Synthetic oligonucleotide
acauauugagguucggagu

SEQ ID NO: 3197050 - RNA, 19 nt, Artificial Sequence
  Description of Artificial Sequence: Synthetic oligonucleotide
ugauuccauacccagccac

SEQ ID NO: 3197051 - RNA, 19 nt, Artificial Sequence
  Description of Artificial Sequence: Synthetic oligonucleotide
cacuuucccacauauugag

SEQ ID NO: 3197052 - RNA, 19 nt, Artificial Sequence
  Description of Artificial Sequence: Synthetic oligonucleotide
agagaaagaggcauaaaga

SEQ ID NO: 3197053 - RNA, 19 nt, Artificial Sequence
  Description of Artificial Sequence: Synthetic oligonucleotide
cagcacaaagaacugauuc

SEQ ID NO: 3197054 - RNA, 19 nt, Artificial Sequence
  Description of Artificial Sequence: Synthetic oligonucleotide
uaacccguuggaaauggga

SEQ ID NO: 3197055 - RNA, 19 nt, Artificial Sequence
  Description of Artificial Sequence: Synthetic oligonucleotide
uuggaaaugggaucgucuc

SEQ ID NO: 3197056 - RNA, 19 nt, Artificial Sequence
  Description of Artificial Sequence: Synthetic oligonucleotide
ucccacauauugagguucg

SEQ ID NO: 3197057 - RNA, 19 nt, Artificial Sequence
  Description of Artificial Sequence: Synthetic oligonucleotide
cauguauucuuccagcaca

SEQ ID NO: 3197058 - RNA, 19 nt, Artificial Sequence
  Description of Artificial Sequence: Synthetic oligonucleotide
ucgucuccccgacaggugg

SEQ ID NO: 3197059 - RNA, 19 nt, Artificial Sequence
  Description of Artificial Sequence: Synthetic oligonucleotide
uccagcacaaagaacugau

SEQ ID NO: 3197060 - RNA, 19 nt, Artificial Sequence
  Description of Artificial Sequence: Synthetic oligonucleotide
gauuccauacccagccacg

SEQ ID NO: 3197061 - RNA, 19 nt, Artificial Sequence
  Description of Artificial Sequence: Synthetic oligonucleotide
guggcuguggcugaagugg

SEQ ID NO: 3197062 - RNA, 19 nt, Artificial Sequence
  Description of Artificial Sequence: Synthetic oligonucleotide
uaauguagagucgugggau

SEQ ID NO: 3197063 - RNA, 19 nt, Artificial Sequence
  Description of Artificial Sequence: Synthetic oligonucleotide
uggaaaugggaucgucucc

SEQ ID NO: 3197064 - RNA, 19 nt, Artificial Sequence
  Description of Artificial Sequence: Synthetic oligonucleotide
uccuuguaagcauuggcaa

SEQ ID NO: 3197065 - RNA, 19 nt, Artificial Sequence
  Description of Artificial Sequence: Synthetic oligonucleotide
aggcauaaagaguuccuug

SEQ ID NO: 3197066 - RNA, 19 nt, Artificial Sequence
  Description of Artificial Sequence: Synthetic oligonucleotide
uaggaggccuccaucaaac

SEQ ID NO: 3197067 - RNA, 19 nt, Artificial Sequence
  Description of Artificial Sequence: Synthetic oligonucleotide
auucuuccagcacaaagaa

SEQ ID NO: 3197068 - RNA, 19 nt, Artificial Sequence
  Description of Artificial Sequence: Synthetic oligonucleotide
guuccuuguaagcauuggc

SEQ ID NO: 3197069 - RNA, 19 nt, Artificial Sequence
  Description of Artificial Sequence: Synthetic oligonucleotide
uccagugcuuaauguagag

SEQ ID NO: 3197070 - RNA, 19 nt, Artificial Sequence
  Description of Artificial Sequence: Synthetic oligonucleotide
auguagagucgugggaucc

SEQ ID NO: 3197071 - RNA, 19 nt, Artificial Sequence
  Description of Artificial Sequence: Synthetic oligonucleotide
aauuccauuauauccaugg

SEQ ID NO: 3197072 - RNA, 19 nt, Artificial Sequence
  Description of Artificial Sequence: Synthetic oligonucleotide
acugguaucagccagacac

SEQ ID NO: 3197073 - RNA, 19 nt, Artificial Sequence
  Description of Artificial Sequence: Synthetic oligonucleotide
aaucaaaucucuuagcauc

SEQ ID NO: 3197074 - RNA, 19 nt, Artificial Sequence
  Description of Artificial Sequence: Synthetic oligonucleotide
aaaggcacacaguacaacc

SEQ ID NO: 3197075 - RNA, 19 nt, Artificial Sequence
  Description of Artificial Sequence: Synthetic oligonucleotide
uuaaaugucugucuucucg

SEQ ID NO: 3197076 - RNA, 19 nt, Artificial Sequence
  Description of Artificial Sequence: Synthetic oligonucleotide
uguuugauuaucauuagca

SEQ ID NO: 3197077 - RNA, 19 nt, Artificial Sequence
  Description of Artificial Sequence: Synthetic oligonucleotide
aaaauagcaaagcaauuca

SEQ ID NO: 3197078 - RNA, 19 nt, Artificial Sequence
  Description of Artificial Sequence: Synthetic oligonucleotide
caucaauuccauuauaucc

SEQ ID NO: 3197079 - RNA, 19 nt, Artificial Sequence
  Description of Artificial Sequence: Synthetic oligonucleotide
aaucucuuagcaucucugc

SEQ ID NO: 3197080 - RNA, 19 nt, Artificial Sequence
  Description of Artificial Sequence: Synthetic oligonucleotide
uuuaaguaaacacucuucu

SEQ ID NO: 3197081 - RNA, 19 nt, Artificial Sequence
  Description of Artificial Sequence: Synthetic oligonucleotide
caaacuucgaggaaugugg

SEQ ID NO: 3197082 - RNA, 19 nt, Artificial Sequence
  Description of Artificial Sequence: Synthetic oligonucleotide
aauuaguucaugaacaagu

SEQ ID NO: 3197083 - RNA, 19 nt, Artificial Sequence
  Description of Artificial Sequence: Synthetic oligonucleotide
guaaucaacucauaaaaug

SEQ ID NO: 3197084 - RNA, 19 nt, Artificial Sequence
  Description of Artificial Sequence: Synthetic oligonucleotide
aaaacuucuagaggaaaac

SEQ ID NO: 3197085 - RNA, 19 nt, Artificial Sequence
  Description of Artificial Sequence: Synthetic oligonucleotide
aaaagauaacuucaaggga

SEQ ID NO: 3197086 - RNA, 19 nt, Artificial Sequence
  Description of Artificial Sequence: Synthetic oligonucleotide
ugaaguacauuguaaacca

SEQ ID NO: 3197087 - RNA, 19 nt, Artificial Sequence
  Description of Artificial Sequence: Synthetic oligonucleotide
aacuaccuaacuuuaaaga

SEQ ID NO: 3197088 - RNA, 19 nt, Artificial Sequence
  Description of Artificial Sequence: Synthetic oligonucleotide
auuggugucacauuucaag

SEQ ID NO: 3197089 - RNA, 19 nt, Artificial Sequence
  Description of Artificial Sequence: Synthetic oligonucleotide
uguagauuuguuaaauaga

SEQ ID NO: 3197090 - RNA, 19 nt, Artificial Sequence
  Description of Artificial Sequence: Synthetic oligonucleotide
cacaaauacaaauagccac

SEQ ID NO: 3197091 - RNA, 19 nt, Artificial Sequence
  Description of Artificial Sequence: Synthetic oligonucleotide
cuaacugcagcucuaaccc

SEQ ID NO: 3197092 - RNA, 19 nt, Artificial Sequence
  Description of Artificial Sequence: Synthetic oligonucleotide
ugacaaguaucuaugaagu

SEQ ID NO: 3197093 - RNA, 19 nt, Artificial Sequence
  Description of Artificial Sequence: Synthetic oligonucleotide
uuuccguauaauaaguaga

SEQ ID NO: 3197094 - RNA, 19 nt, Artificial Sequence
  Description of Artificial Sequence: Synthetic oligonucleotide
ucaggaaauaguaauuaac

SEQ ID NO: 3197095 - RNA, 19 nt, Artificial Sequence
  Description of Artificial Sequence: Synthetic oligonucleotide
cauaaaaugcauuccggcc

SEQ ID NO: 3197096 - RNA, 19 nt, Artificial Sequence
  Description of Artificial Sequence: Synthetic oligonucleotide
guguagauuuguuaaauag

SEQ ID NO: 3197097 - RNA, 19 nt, Artificial Sequence
  Description of Artificial Sequence: Synthetic oligonucleotide
aaaacugugcccauaaaca

SEQ ID NO: 3197098 - RNA, 19 nt, Artificial Sequence
  Description of Artificial Sequence: Synthetic oligonucleotide
uaaauaaaaggggaagucc

SEQ ID NO: 3197099 - RNA, 19 nt, Artificial Sequence
  Description of Artificial Sequence: Synthetic oligonucleotide
uccauuauauccauggcaa

SEQ ID NO: 3197100 - RNA, 19 nt, Artificial Sequence
  Description of Artificial Sequence: Synthetic oligonucleotide
aaagauaacuucaagggaa

SEQ ID NO: 3197101 - RNA, 19 nt, Artificial Sequence
  Description of Artificial Sequence: Synthetic oligonucleotide
uguuaguacacaauguuua

SEQ ID NO: 3197102 - RNA, 19 nt, Artificial Sequence
  Description of Artificial Sequence: Synthetic oligonucleotide
guucucaguaauuauacug

SEQ ID NO: 3197103 - RNA, 19 nt, Artificial Sequence
  Description of Artificial Sequence: Synthetic oligonucleotide
aauuauacuggcgugggca

SEQ ID NO: 3197104 - RNA, 19 nt, Artificial Sequence
  Description of Artificial Sequence: Synthetic oligonucleotide
ugaggacggagcaaaauag

SEQ ID NO: 3197105 - RNA, 19 nt, Artificial Sequence
  Description of Artificial Sequence: Synthetic oligonucleotide
gugacaaguaucuaugaag

SEQ ID NO: 3197106 - RNA, 19 nt, Artificial Sequence
  Description of Artificial Sequence: Synthetic oligonucleotide
cauagauugauuuacagua

SEQ ID NO: 3197107 - RNA, 19 nt, Artificial Sequence
  Description of Artificial Sequence: Synthetic oligonucleotide
uacaguauguauaaccuaa

SEQ ID NO: 3197108 - RNA, 19 nt, Artificial Sequence
  Description of Artificial Sequence: Synthetic oligonucleotide
aaacuucuagaggaaaacg

SEQ ID NO: 3197109 - RNA, 19 nt, Artificial Sequence
  Description of Artificial Sequence: Synthetic oligonucleotide
auaaaauuauuaacuaaag

SEQ ID NO: 3197110 - RNA, 19 nt, Artificial Sequence
  Description of Artificial Sequence: Synthetic oligonucleotide
accuaaauugcuugaauug

SEQ ID NO: 3197111 - RNA, 19 nt, Artificial Sequence
  Description of Artificial Sequence: Synthetic oligonucleotide
uuuaugcauagauugauuu

SEQ ID NO: 3197112 - RNA, 19 nt, Artificial Sequence
  Description of Artificial Sequence: Synthetic oligonucleotide
guagauuuguuaaauagac

SEQ ID NO: 3197113 - RNA, 19 nt, Artificial Sequence
  Description of Artificial Sequence: Synthetic oligonucleotide
aguaaguucagccaucaau

SEQ ID NO: 3197114 - RNA, 19 nt, Artificial Sequence
  Description of Artificial Sequence: Synthetic oligonucleotide
uagauugauuuacaguaug

SEQ ID NO: 3197115 - RNA, 19 nt, Artificial Sequence
  Description of Artificial Sequence: Synthetic oligonucleotide
acuaauggcauggaacuac

SEQ ID NO: 3197116 - RNA, 19 nt, Artificial Sequence
  Description of Artificial Sequence: Synthetic oligonucleotide
acuaccuaacuuuaaagaa

SEQ ID NO: 3197117 - RNA, 19 nt, Artificial Sequence
  Description of Artificial Sequence: Synthetic oligonucleotide
uggaaaagguuuacggaag

SEQ ID NO: 3197118 - RNA, 19 nt, Artificial Sequence
  Description of Artificial Sequence: Synthetic oligonucleotide
ugggcuuccauucugggac

SEQ ID NO: 3197119 - RNA, 19 nt, Artificial Sequence
  Description of Artificial Sequence: Synthetic oligonucleotide
cacaagauaaguauggcga

SEQ ID NO: 3197120 - RNA, 19 nt, Artificial Sequence
  Description of Artificial Sequence: Synthetic oligonucleotide
uguauaaccuaaccaaaau

SEQ ID NO: 3197121 - RNA, 19 nt, Artificial Sequence
  Description of Artificial Sequence: Synthetic oligonucleotide
ccguauaauaaguagauag

SEQ ID NO: 3197122 - RNA, 19 nt, Artificial Sequence
  Description of Artificial Sequence: Synthetic oligonucleotide
uaauuaguauguaauccuc

SEQ ID NO: 3197123 - RNA, 19 nt, Artificial Sequence
  Description of Artificial Sequence: Synthetic oligonucleotide
ucuauaggccuuauaaaau

SEQ ID NO: 3197124 - RNA, 19 nt, Artificial Sequence
  Description of Artificial Sequence: Synthetic oligonucleotide
gaauacacacucuaaaugu

SEQ ID NO: 3197125 - RNA, 19 nt, Artificial Sequence
  Description of Artificial Sequence: Synthetic oligonucleotide
agcauagacagacaugcug

SEQ ID NO: 3197126 - RNA, 19 nt, Artificial Sequence
  Description of Artificial Sequence: Synthetic oligonucleotide
aagauaacuucaagggaac

SEQ ID NO: 3197127 - RNA, 19 nt, Artificial Sequence
  Description of Artificial Sequence: Synthetic oligonucleotide
caaaauagcaaagcaauuc

SEQ ID NO: 3197128 - RNA, 19 nt, Artificial Sequence
  Description of Artificial Sequence: Synthetic oligonucleotide
guaauuaacagaauacaca

SEQ ID NO: 3197129 - RNA, 19 nt, Artificial Sequence
  Description of Artificial Sequence: Synthetic oligonucleotide
ugugcuugugcauucucag

SEQ ID NO: 3197130 - RNA, 19 nt, Artificial Sequence
  Description of Artificial Sequence: Synthetic oligonucleotide
auggaaaagguuuacggaa

SEQ ID NO: 3197131 - RNA, 19 nt, Artificial Sequence
  Description of Artificial Sequence: Synthetic oligonucleotide
acaagauaaguauggcgag

SEQ ID NO: 3197132 - RNA, 19 nt, Artificial Sequence
  Description of Artificial Sequence: Synthetic oligonucleotide
guaugcuucuaugaggacg

SEQ ID NO: 3197133 - RNA, 19 nt, Artificial Sequence
  Description of Artificial Sequence: Synthetic oligonucleotide
uggauaucucuauagcuga

SEQ ID NO: 3197134 - RNA, 19 nt, Artificial Sequence
  Description of Artificial Sequence: Synthetic oligonucleotide
auaggcacaaacccaagga

SEQ ID NO: 3197135 - RNA, 19 nt, Artificial Sequence
  Description of Artificial Sequence: Synthetic oligonucleotide
uuacggaaggacaaggaau

SEQ ID NO: 3197136 - RNA, 19 nt, Artificial Sequence
  Description of Artificial Sequence: Synthetic oligonucleotide
aagcauucuaggcuaucag

SEQ ID NO: 3197137 - RNA, 19 nt, Artificial Sequence
  Description of Artificial Sequence: Synthetic oligonucleotide
ucuuaacugucucuaaaau

SEQ ID NO: 3197138 - RNA, 19 nt, Artificial Sequence
  Description of Artificial Sequence: Synthetic oligonucleotide
auaguaguaucucccagca

SEQ ID NO: 3197139 - RNA, 19 nt, Artificial Sequence
  Description of Artificial Sequence: Synthetic oligonucleotide
aucauuagcaccaacccug

SEQ ID NO: 3197140 - RNA, 19 nt, Artificial Sequence
  Description of Artificial Sequence: Synthetic oligonucleotide
aauggaaguauaaaucaaa

SEQ ID NO: 3197141 - RNA, 19 nt, Artificial Sequence
  Description of Artificial Sequence: Synthetic oligonucleotide
ucggccuaugacaaaguag

SEQ ID NO: 3197142 - RNA, 19 nt, Artificial Sequence
  Description of Artificial Sequence: Synthetic oligonucleotide
auguauuccagacuuucca

SEQ ID NO: 3197143 - RNA, 19 nt, Artificial Sequence
  Description of Artificial Sequence: Synthetic oligonucleotide
auaggaaccaaagaacuga

SEQ ID NO: 3197144 - RNA, 19 nt, Artificial Sequence
  Description of Artificial Sequence: Synthetic oligonucleotide
ucaaguugaugagagaaaa

SEQ ID NO: 3197145 - RNA, 19 nt, Artificial Sequence
  Description of Artificial Sequence: Synthetic oligonucleotide
uuaguacacaauguuuaag

SEQ ID NO: 3197146 - RNA, 19 nt, Artificial Sequence
  Description of Artificial Sequence: Synthetic oligonucleotide
uguaauccucacaacucug

SEQ ID NO: 3197147 - RNA, 19 nt, Artificial Sequence
  Description of Artificial Sequence: Synthetic oligonucleotide
auauguggcgauguacacc

SEQ ID NO: 3197148 - RNA, 19 nt, Artificial Sequence
  Description of Artificial Sequence: Synthetic oligonucleotide
guaaaauuuccguauaaua

SEQ ID NO: 3197149 - RNA, 19 nt, Artificial Sequence
  Description of Artificial Sequence: Synthetic oligonucleotide
cugguguuaguacacaaug

SEQ ID NO: 3197150 - RNA, 19 nt, Artificial Sequence
  Description of Artificial Sequence: Synthetic oligonucleotide
uuauuaacuaaaguucaaa

SEQ ID NO: 3197151 - RNA, 19 nt, Artificial Sequence
  Description of Artificial Sequence: Synthetic oligonucleotide
aucaauuccauuauaucca

SEQ ID NO: 3197152 - RNA, 19 nt, Artificial Sequence
  Description of Artificial Sequence: Synthetic oligonucleotide
aaaaccguugggcaggcuu

SEQ ID NO: 3197153 - RNA, 19 nt, Artificial Sequence
  Description of Artificial Sequence: Synthetic oligonucleotide
uaccuaacuuuaaagaauu

SEQ ID NO: 3197154 - RNA, 19 nt, Artificial Sequence
  Description of Artificial Sequence: Synthetic oligonucleotide
cucacugagaccagggcag

SEQ ID NO: 3197155 - RNA, 19 nt, Artificial Sequence
  Description of Artificial Sequence: Synthetic oligonucleotide
aggaaucacugguaucagc

SEQ ID NO: 3197156 - RNA, 19 nt, Artificial Sequence
  Description of Artificial Sequence: Synthetic oligonucleotide
gaaguccauauggaaaagg

SEQ ID NO: 3197157 - RNA, 19 nt, Artificial Sequence
  Description of Artificial Sequence: Synthetic oligonucleotide
guaauuauacuggcguggg

SEQ ID NO: 3197158 - RNA, 19 nt, Artificial Sequence
  Description of Artificial Sequence: Synthetic oligonucleotide
aaaguaaguucagccauca

SEQ ID NO: 3197159 - RNA, 19 nt, Artificial Sequence
  Description of Artificial Sequence: Synthetic oligonucleotide
aaauacugacugcucugug

SEQ ID NO: 3197160 - RNA, 19 nt, Artificial Sequence
  Description of Artificial Sequence: Synthetic oligonucleotide
ucuauagcugagauuuuaa

SEQ ID NO: 3197161 - RNA, 19 nt, Artificial Sequence
  Description of Artificial Sequence: Synthetic oligonucleotide
uaggcaauuggucuucagu

SEQ ID NO: 3197162 - RNA, 19 nt, Artificial Sequence
  Description of Artificial Sequence: Synthetic oligonucleotide
gaauuggugucacauuuca

SEQ ID NO: 3197163 - RNA, 19 nt, Artificial Sequence
  Description of Artificial Sequence: Synthetic oligonucleotide
ucugucuucucguuguagu

SEQ ID NO: 3197164 - RNA, 19 nt, Artificial Sequence
  Description of Artificial Sequence: Synthetic oligonucleotide
augguaaucagugaguaau

SEQ ID NO: 3197165 - RNA, 19 nt, Artificial Sequence
  Description of Artificial Sequence: Synthetic oligonucleotide
uucauacuuauauuuguuu

SEQ ID NO: 3197166 - RNA, 19 nt, Artificial Sequence
  Description of Artificial Sequence: Synthetic oligonucleotide
agacauaccccagauaugu

SEQ ID NO: 3197167 - RNA, 19 nt, Artificial Sequence
  Description of Artificial Sequence: Synthetic oligonucleotide
agacuuggccccuaauuag

SEQ ID NO: 3197168 - RNA, 19 nt, Artificial Sequence
  Description of Artificial Sequence: Synthetic oligonucleotide
cauaggcacaaacccaagg

SEQ ID NO: 3197169 - RNA, 19 nt, Artificial Sequence
  Description of Artificial Sequence: Synthetic oligonucleotide
acauccccaacccuugggg

SEQ ID NO: 3197170 - RNA, 19 nt, Artificial Sequence
  Description of Artificial Sequence: Synthetic oligonucleotide
ugcacuacugaacccauua

SEQ ID NO: 3197171 - RNA, 19 nt, Artificial Sequence
  Description of Artificial Sequence: Synthetic oligonucleotide
aacaaaacaaaacaaaugc

SEQ ID NO: 3197172 - RNA, 19 nt, Artificial Sequence
  Description of Artificial Sequence: Synthetic oligonucleotide
uuuauaaacauuuugauaa

SEQ ID NO: 3197173 - RNA, 19 nt, Artificial Sequence
  Description of Artificial Sequence: Synthetic oligonucleotide
aaacauugcacucagaaag

SEQ ID NO: 3197174 - RNA, 19 nt, Artificial Sequence
  Description of Artificial Sequence: Synthetic oligonucleotide
aaacaaaacaaaugcaggc

SEQ ID NO: 3197175 - RNA, 19 nt, Artificial Sequence
  Description of Artificial Sequence: Synthetic oligonucleotide
uuugauaaaaccuacagaa

SEQ ID NO: 3197176 - RNA, 19 nt, Artificial Sequence
  Description of Artificial Sequence: Synthetic oligonucleotide
aaacaaacaaaacaaaaca

SEQ ID NO: 3197177 - RNA, 19 nt, Artificial Sequence
  Description of Artificial Sequence: Synthetic oligonucleotide
aaaacaaacaaaacaaaac

SEQ ID NO: 3197178 - RNA, 19 nt, Artificial Sequence
  Description of Artificial Sequence: Synthetic oligonucleotide
aaaagauucaguuugcagu

SEQ ID NO: 3197179 - RNA, 19 nt, Artificial Sequence
  Description of Artificial Sequence: Synthetic oligonucleotide
aaaccuacagaaaacaagc

SEQ ID NO: 3197180 - RNA, 19 nt, Artificial Sequence
  Description of Artificial Sequence: Synthetic oligonucleotide
aauguuacaaacauugcac

SEQ ID NO: 3197181 - RNA, 19 nt, Artificial Sequence
  Description of Artificial Sequence: Synthetic oligonucleotide
aaaacaagcacugaaaugu

SEQ ID NO: 3197182 - RNA, 19 nt, Artificial Sequence
  Description of Artificial Sequence: Synthetic oligonucleotide
aacaugcucacacacaagg

SEQ ID NO: 3197183 - RNA, 19 nt, Artificial Sequence
  Description of Artificial Sequence: Synthetic oligonucleotide
aaagauucaguuugcaguc

SEQ ID NO: 3197184 - RNA, 19 nt, Artificial Sequence
  Description of Artificial Sequence: Synthetic oligonucleotide
ugacaaaacaaacaaaaca

SEQ ID NO: 3197185 - RNA, 19 nt, Artificial Sequence
  Description of Artificial Sequence: Synthetic oligonucleotide
uaaacauuuugauaaaacc

SEQ ID NO: 3197186 - RNA, 19 nt, Artificial Sequence
  Description of Artificial Sequence: Synthetic oligonucleotide
uuaauguacaaauauuuug

SEQ ID NO: 3197187 - RNA, 19 nt, Artificial Sequence
  Description of Artificial Sequence: Synthetic oligonucleotide
ucuauguaaaucuuaaugu

SEQ ID NO: 3197188 - RNA, 19 nt, Artificial Sequence
  Description of Artificial Sequence: Synthetic oligonucleotide
caaaacaaaacaaaugcag

SEQ ID NO: 3197189 - RNA, 19 nt, Artificial Sequence
  Description of Artificial Sequence: Synthetic oligonucleotide
uuuucauuuguuuuaauac

SEQ ID NO: 3197190 - RNA, 19 nt, Artificial Sequence
  Description of Artificial Sequence: Synthetic oligonucleotide
uguacaaauauuuugucac

SEQ ID NO: 3197191 - RNA, 19 nt, Artificial Sequence
  Description of Artificial Sequence: Synthetic oligonucleotide
aaucuuaauguacaaauau

SEQ ID NO: 3197192 - RNA, 19 nt, Artificial Sequence
  Description of Artificial Sequence: Synthetic oligonucleotide
aaaacaaaacaaaugcagg

SEQ ID NO: 3197193 - RNA, 19 nt, Artificial Sequence
  Description of Artificial Sequence: Synthetic oligonucleotide
aauguacaaauauuuuguc

SEQ ID NO: 3197194 - RNA, 19 nt, Artificial Sequence
  Description of Artificial Sequence: Synthetic oligonucleotide
auuuugauaaaaccuacag

SEQ ID NO: 3197195 - RNA, 19 nt, Artificial Sequence
  Description of Artificial Sequence: Synthetic oligonucleotide
aauauuuugucacugguuu

SEQ ID NO: 3197196 - RNA, 19 nt, Artificial Sequence
  Description of Artificial Sequence: Synthetic oligonucleotide
uaauguacaaauauuuugu

SEQ ID NO: 3197197 - RNA, 19 nt, Artificial Sequence
  Description of Artificial Sequence: Synthetic oligonucleotide
uguuuuaauacccgcauug

SEQ ID NO: 3197198 - RNA, 19 nt, Artificial Sequence
  Description of Artificial Sequence: Synthetic oligonucleotide
acaaaacaaaugcaggcgc

SEQ ID NO: 3197199 - RNA, 19 nt, Artificial Sequence
  Description of Artificial Sequence: Synthetic oligonucleotide
ugaaauguuuugauuaugc

SEQ ID NO: 3197200 - RNA, 19 nt, Artificial Sequence
  Description of Artificial Sequence: Synthetic oligonucleotide
uaaaucuuaauguacaaau

SEQ ID NO: 3197201 - RNA, 19 nt, Artificial Sequence
  Description of Artificial Sequence: Synthetic oligonucleotide
ugauaaaaccuacagaaaa

SEQ ID NO: 3197202 - RNA, 19 nt, Artificial Sequence
  Description of Artificial Sequence: Synthetic oligonucleotide
uuuuggaagaagcagcugc

SEQ ID NO: 3197203 - RNA, 19 nt, Artificial Sequence
  Description of Artificial Sequence: Synthetic oligonucleotide
auggaaaagauucaguuug

SEQ ID NO: 3197204 - RNA, 19 nt, Artificial Sequence
  Description of Artificial Sequence: Synthetic oligonucleotide
aaaagggugcuucacaucu

SEQ ID NO: 3197205 - RNA, 19 nt, Artificial Sequence
  Description of Artificial Sequence: Synthetic oligonucleotide
uuuaauacccgcauugaca

SEQ ID NO: 3197206 - RNA, 19 nt, Artificial Sequence
  Description of Artificial Sequence: Synthetic oligonucleotide
ugguuuauaaacauuuuga

SEQ ID NO: 3197207 - RNA, 19 nt, Artificial Sequence
  Description of Artificial Sequence: Synthetic oligonucleotide
uucauuuguuuuaauaccc

SEQ ID NO: 3197208 - RNA, 19 nt, Artificial Sequence
  Description of Artificial Sequence: Synthetic oligonucleotide
aacaaaacaaaugcaggcg

SEQ ID NO: 3197209 - RNA, 19 nt, Artificial Sequence
  Description of Artificial Sequence: Synthetic oligonucleotide
aaggaaauguagaaaaggg

SEQ ID NO: 3197210 - RNA, 19 nt, Artificial Sequence
  Description of Artificial Sequence: Synthetic oligonucleotide
aaaauuuucauuuguuuua

SEQ ID NO: 3197211 - RNA, 19 nt, Artificial Sequence
  Description of Artificial Sequence: Synthetic oligonucleotide
uuucauuuguuuuaauacc

SEQ ID NO: 3197212 - RNA, 19 nt, Artificial Sequence
  Description of Artificial Sequence: Synthetic oligonucleotide
uuaccauuuguucacacug

SEQ ID NO: 3197213 - RNA, 19 nt, Artificial Sequence
  Description of Artificial Sequence: Synthetic oligonucleotide
aaacauuuugauaaaaccu

SEQ ID NO: 3197214 - RNA, 19 nt, Artificial Sequence
  Description of Artificial Sequence: Synthetic oligonucleotide
uauguaaaucuuaauguac

SEQ ID NO: 3197215 - RNA, 19 nt, Artificial Sequence
  Description of Artificial Sequence: Synthetic oligonucleotide
uuaguuuaccauuuguuca

SEQ ID NO: 3197216 - RNA, 19 nt, Artificial Sequence
  Description of Artificial Sequence: Synthetic oligonucleotide
gagacaauggaaaagauuc

SEQ ID NO: 3197217 - RNA, 19 nt, Artificial Sequence
  Description of Artificial Sequence: Synthetic oligonucleotide
ucuuaauguacaaauauuu

SEQ ID NO: 3197218 - RNA, 19 nt, Artificial Sequence
  Description of Artificial Sequence: Synthetic oligonucleotide
aaaaccuacagaaaacaag

SEQ ID NO: 3197219 - RNA, 19 nt, Artificial Sequence
  Description of Artificial Sequence: Synthetic oligonucleotide
gucuauguaaaucuuaaug

SEQ ID NO: 3197220 - RNA, 19 nt, Artificial Sequence
  Description of Artificial Sequence: Synthetic oligonucleotide
aaagcagcaacaugcucac

SEQ ID NO: 3197221 - RNA, 19 nt, Artificial Sequence
  Description of Artificial Sequence: Synthetic oligonucleotide
uuuugauaaaaccuacaga

SEQ ID NO: 3197222 - RNA, 19 nt, Artificial Sequence
  Description of Artificial Sequence: Synthetic oligonucleotide
aaauguuuugauuaugcuu

SEQ ID NO: 3197223 - RNA, 19 nt, Artificial Sequence
  Description of Artificial Sequence: Synthetic oligonucleotide
aaacaaaacaaaacaaaug

SEQ ID NO: 3197224 - RNA, 19 nt, Artificial Sequence
  Description of Artificial Sequence: Synthetic oligonucleotide
uuuaguuuaccauuuguuc

SEQ ID NO: 3197225 - RNA, 19 nt, Artificial Sequence
  Description of Artificial Sequence: Synthetic oligonucleotide
aauguuuugauuaugcuuu

SEQ ID NO: 3197226 - RNA, 19 nt, Artificial Sequence
  Description of Artificial Sequence: Synthetic oligonucleotide
uugauuaugcuuuaguuua

SEQ ID NO: 3197227 - RNA, 19 nt, Artificial Sequence
  Description of Artificial Sequence: Synthetic oligonucleotide
ucauuuguuuuaauacccg

SEQ ID NO: 3197228 - RNA, 19 nt, Artificial Sequence
  Description of Artificial Sequence: Synthetic oligonucleotide
uucacaucuguccacacug

SEQ ID NO: 3197229 - RNA, 19 nt, Artificial Sequence
  Description of Artificial Sequence: Synthetic oligonucleotide
ucagaaaggagacaaugga

SEQ ID NO: 3197230 - RNA, 19 nt, Artificial Sequence
  Description of Artificial Sequence: Synthetic oligonucleotide
aaaagcagcaacaugcuca

SEQ ID NO: 3197231 - RNA, 19 nt, Artificial Sequence
  Description of Artificial Sequence: Synthetic oligonucleotide
auaaacauuuugauaaaac

SEQ ID NO: 3197232 - RNA, 19 nt, Artificial Sequence
  Description of Artificial Sequence: Synthetic oligonucleotide
gaaaagauucaguuugcag

SEQ ID NO: 3197233 - RNA, 19 nt, Artificial Sequence
  Description of Artificial Sequence: Synthetic oligonucleotide
agcagcaacaugcucacac

SEQ ID NO: 3197234 - RNA, 19 nt, Artificial Sequence
  Description of Artificial Sequence: Synthetic oligonucleotide
ucuaccaauguuacaaaca

SEQ ID NO: 3197235 - RNA, 19 nt, Artificial Sequence
  Description of Artificial Sequence: Synthetic oligonucleotide
gacaaaacaaacaaaacaa

SEQ ID NO: 3197236 - RNA, 19 nt, Artificial Sequence
  Description of Artificial Sequence: Synthetic oligonucleotide
accuacagaaaacaagcac

SEQ ID NO: 3197237 - RNA, 19 nt, Artificial Sequence
  Description of Artificial Sequence: Synthetic oligonucleotide
acaaauauuuugucacugg

SEQ ID NO: 3197238 - RNA, 19 nt, Artificial Sequence
  Description of Artificial Sequence: Synthetic oligonucleotide
accaauguuacaaacauug

SEQ ID NO: 3197239 - RNA, 19 nt, Artificial Sequence
  Description of Artificial Sequence: Synthetic oligonucleotide
uuaauacccgcauugacaa

SEQ ID NO: 3197240 - RNA, 19 nt, Artificial Sequence
  Description of Artificial Sequence: Synthetic oligonucleotide
ucuucuaccaauguuacaa

SEQ ID NO: 3197241 - RNA, 19 nt, Artificial Sequence
  Description of Artificial Sequence: Synthetic oligonucleotide
gaaaacaagcacugaaaug

SEQ ID NO: 3197242 - RNA, 19 nt, Artificial Sequence
  Description of Artificial Sequence: Synthetic oligonucleotide
auugacaaaacaaacaaaa

SEQ ID NO: 3197243 - RNA, 19 nt, Artificial Sequence
  Description of Artificial Sequence: Synthetic oligonucleotide
uucacacugaaaauuuuca

SEQ ID NO: 3197244 - RNA, 19 nt, Artificial Sequence
  Description of Artificial Sequence: Synthetic oligonucleotide
acaaacauugcacucagaa

SEQ ID NO: 3197245 - RNA, 19 nt, Artificial Sequence
  Description of Artificial Sequence: Synthetic oligonucleotide
uuugauuaugcuuuaguuu

SEQ ID NO: 3197246 - RNA, 19 nt, Artificial Sequence
  Description of Artificial Sequence: Synthetic oligonucleotide
aauggaaaagauucaguuu

SEQ ID NO: 3197247 - RNA, 19 nt, Artificial Sequence
  Description of Artificial Sequence: Synthetic oligonucleotide
uuuguuuuaauacccgcau

SEQ ID NO: 3197248 - RNA, 19 nt, Artificial Sequence
  Description of Artificial Sequence: Synthetic oligonucleotide
aaaggagacaauggaaaag

SEQ ID NO: 3197249 - RNA, 19 nt, Artificial Sequence
  Description of Artificial Sequence: Synthetic oligonucleotide
gaaauguagaaaagggugc

SEQ ID NO: 3197250 - RNA, 19 nt, Artificial Sequence
  Description of Artificial Sequence: Synthetic oligonucleotide
cuaguguccaucuucuacc

SEQ ID NO: 3197251 - RNA, 19 nt, Artificial Sequence
  Description of Artificial Sequence: Synthetic oligonucleotide
cucagaaaggagacaaugg

SEQ ID NO: 3197252 - RNA, 19 nt, Artificial Sequence
  Description of Artificial Sequence: Synthetic oligonucleotide
uuacaaacauugcacucag

SEQ ID NO: 3197253 - RNA, 19 nt, Artificial Sequence
  Description of Artificial Sequence: Synthetic oligonucleotide
caaggaaauguagaaaagg

SEQ ID NO: 3197254 - RNA, 19 nt, Artificial Sequence
  Description of Artificial Sequence: Synthetic oligonucleotide
uaugcuuuaguuuaccauu

SEQ ID NO: 3197255 - RNA, 19 nt, Artificial Sequence
  Description of Artificial Sequence: Synthetic oligonucleotide
uuuugauuaugcuuuaguu

SEQ ID NO: 3197256 - RNA, 19 nt, Artificial Sequence
  Description of Artificial Sequence: Synthetic oligonucleotide
uugacaaaacaaacaaaac

SEQ ID NO: 3197257 - RNA, 19 nt, Artificial Sequence
  Description of Artificial Sequence: Synthetic oligonucleotide
uuuuaauacccgcauugac

SEQ ID NO: 3197258 - RNA, 19 nt, Artificial Sequence
  Description of Artificial Sequence: Synthetic oligonucleotide
aacaaacaaaacaaaacaa

SEQ ID NO: 3197259 - RNA, 19 nt, Artificial Sequence
  Description of Artificial Sequence: Synthetic oligonucleotide
acugaaaauuuucauuugu

SEQ ID NO: 3197260 - RNA, 19 nt, Artificial Sequence
  Description of Artificial Sequence: Synthetic oligonucleotide
aaggagacaauggaaaaga

SEQ ID NO: 3197261 - RNA, 19 nt, Artificial Sequence
  Description of Artificial Sequence: Synthetic oligonucleotide
ugaaaauuuucauuuguuu

SEQ ID NO: 3197262 - RNA, 19 nt, Artificial Sequence
  Description of Artificial Sequence: Synthetic oligonucleotide
acacugaaaauuuucauuu

SEQ ID NO: 3197263 - RNA, 19 nt, Artificial Sequence
  Description of Artificial Sequence: Synthetic oligonucleotide
aaacaaaugcaggcgcagc

SEQ ID NO: 3197264 - RNA, 19 nt, Artificial Sequence
  Description of Artificial Sequence: Synthetic oligonucleotide
gauaaaaccuacagaaaac

SEQ ID NO: 3197265 - RNA, 19 nt, Artificial Sequence
  Description of Artificial Sequence: Synthetic oligonucleotide
uuuggaagaagcagcugcc

SEQ ID NO: 3197266 - RNA, 19 nt, Artificial Sequence
  Description of Artificial Sequence: Synthetic oligonucleotide
aacauuuugauaaaaccua

SEQ ID NO: 3197267 - RNA, 19 nt, Artificial Sequence
  Description of Artificial Sequence: Synthetic oligonucleotide
aacaaaugcaggcgcagcu

SEQ ID NO: 3197268 - RNA, 19 nt, Artificial Sequence
  Description of Artificial Sequence: Synthetic oligonucleotide
uugucacugguuuauaaac

SEQ ID NO: 3197269 - RNA, 19 nt, Artificial Sequence
  Description of Artificial Sequence: Synthetic oligonucleotide
agaaaacaagcacugaaau

SEQ ID NO: 3197270 - RNA, 19 nt, Artificial Sequence
  Description of Artificial Sequence: Synthetic oligonucleotide
auuuucauuuguuuuaaua

SEQ ID NO: 3197271 - RNA, 19 nt, Artificial Sequence
  Description of Artificial Sequence: Synthetic oligonucleotide
uaaaauaucaguaauacuu

SEQ ID NO: 3197272 - RNA, 19 nt, Artificial Sequence
  Description of Artificial Sequence: Synthetic oligonucleotide
ucugaaguaguucagaacc

SEQ ID NO: 3197273 - RNA, 19 nt, Artificial Sequence
  Description of Artificial Sequence: Synthetic oligonucleotide
aaauaucaguaauacuucc

SEQ ID NO: 3197274 - RNA, 19 nt, Artificial Sequence
  Description of Artificial Sequence: Synthetic oligonucleotide
aauauucaggcauuucagc

SEQ ID NO: 3197275 - RNA, 19 nt, Artificial Sequence
  Description of Artificial Sequence: Synthetic oligonucleotide
aauacuucccaacacagug

SEQ ID NO: 3197276 - RNA, 19 nt, Artificial Sequence
  Description of Artificial Sequence: Synthetic oligonucleotide
aagucaaagacauuccagg

SEQ ID NO: 3197277 - RNA, 19 nt, Artificial Sequence
  Description of Artificial Sequence: Synthetic oligonucleotide
acuaaaauaucaguaauac

SEQ ID NO: 3197278 - RNA, 19 nt, Artificial Sequence
  Description of Artificial Sequence: Synthetic oligonucleotide
ugugaagacaauauucagg

SEQ ID NO: 3197279 - RNA, 19 nt, Artificial Sequence
  Description of Artificial Sequence: Synthetic oligonucleotide
uucaauaugcauuccauag

SEQ ID NO: 3197280 - RNA, 19 nt, Artificial Sequence
  Description of Artificial Sequence: Synthetic oligonucleotide
cauuccauagagaacaugg

SEQ ID NO: 3197281 - RNA, 19 nt, Artificial Sequence
  Description of Artificial Sequence: Synthetic oligonucleotide
aguucagaaccccaaaggc

SEQ ID NO: 3197282 - RNA, 19 nt, Artificial Sequence
  Description of Artificial Sequence: Synthetic oligonucleotide
ucuguuacuaaaauaucag

SEQ ID NO: 3197283 - RNA, 19 nt, Artificial Sequence
  Description of Artificial Sequence: Synthetic oligonucleotide
aauaucaguaauacuuccc

SEQ ID NO: 3197284 - RNA, 19 nt, Artificial Sequence
  Description of Artificial Sequence: Synthetic oligonucleotide
aaaauaucaguaauacuuc

SEQ ID NO: 3197285 - RNA, 19 nt, Artificial Sequence
  Description of Artificial Sequence: Synthetic oligonucleotide
gugaagacaauauucaggc

SEQ ID NO: 3197286 - RNA, 19 nt, Artificial Sequence
  Description of Artificial Sequence: Synthetic oligonucleotide
uguuacuaaaauaucagua

SEQ ID NO: 3197287 - RNA, 19 nt, Artificial Sequence
  Description of Artificial Sequence: Synthetic oligonucleotide
ucagcucguacucauacgg

SEQ ID NO: 3197288 - RNA, 19 nt, Artificial Sequence
  Description of Artificial Sequence: Synthetic oligonucleotide
uccauagagaacauggaug

SEQ ID NO: 3197289 - RNA, 19 nt, Artificial Sequence
  Description of Artificial Sequence: Synthetic oligonucleotide
aucaguaauacuucccaac

SEQ ID NO: 3197290 - RNA, 19 nt, Artificial Sequence
  Description of Artificial Sequence: Synthetic oligonucleotide
agucaaagacauuccaggc

SEQ ID NO: 3197291 - RNA, 19 nt, Artificial Sequence
  Description of Artificial Sequence: Synthetic oligonucleotide
uaguucagaaccccaaagg

SEQ ID NO: 3197292 - RNA, 19 nt, Artificial Sequence
  Description of Artificial Sequence: Synthetic oligonucleotide
agaacauggaugugaagac

SEQ ID NO: 3197293 - RNA, 19 nt, Artificial Sequence
  Description of Artificial Sequence: Synthetic oligonucleotide
aaggcgaugaucuucaaua

SEQ ID NO: 3197294 - RNA, 19 nt, Artificial Sequence
  Description of Artificial Sequence: Synthetic oligonucleotide
acaauauucaggcauuuca

SEQ ID NO: 3197295 - RNA, 19 nt, Artificial Sequence
  Description of Artificial Sequence: Synthetic oligonucleotide
gacaaagucaaagacauuc

SEQ ID NO: 3197296 - RNA, 19 nt, Artificial Sequence
  Description of Artificial Sequence: Synthetic oligonucleotide
ucaguaauacuucccaaca

SEQ ID NO: 3197297 - RNA, 19 nt, Artificial Sequence
  Description of Artificial Sequence: Synthetic oligonucleotide
auaugcauuccauagagaa

SEQ ID NO: 3197298 - RNA, 19 nt, Artificial Sequence
  Description of Artificial Sequence: Synthetic oligonucleotide
uucagaaccccaaaggcga

SEQ ID NO: 3197299 - RNA, 19 nt, Artificial Sequence
  Description of Artificial Sequence: Synthetic oligonucleotide
caauaugcauuccauagag

SEQ ID NO: 3197300 - RNA, 19 nt, Artificial Sequence
  Description of Artificial Sequence: Synthetic oligonucleotide
aguaauacuucccaacaca

SEQ ID NO: 3197301 - RNA, 19 nt, Artificial Sequence
  Description of Artificial Sequence: Synthetic oligonucleotide
ugaucuucaauaugcauuc

SEQ ID NO: 3197302 - RNA, 19 nt, Artificial Sequence
  Description of Artificial Sequence: Synthetic oligonucleotide
ucaaagacauuccaggcau

SEQ ID NO: 3197303 - RNA, 19 nt, Artificial Sequence
  Description of Artificial Sequence: Synthetic oligonucleotide
uuacuaaaauaucaguaau

SEQ ID NO: 3197304 - RNA, 19 nt, Artificial Sequence
  Description of Artificial Sequence: Synthetic oligonucleotide
aaagucaaagacauuccag

SEQ ID NO: 3197305 - RNA, 19 nt, Artificial Sequence
  Description of Artificial Sequence: Synthetic oligonucleotide
auaucaguaauacuuccca

SEQ ID NO: 3197306 - RNA, 19 nt, Artificial Sequence
  Description of Artificial Sequence: Synthetic oligonucleotide
auauucaggcauuucagca

SEQ ID NO: 3197307 - RNA, 19 nt, Artificial Sequence
  Description of Artificial Sequence: Synthetic oligonucleotide
aacacagugacaaagucaa

SEQ ID NO: 3197308 - RNA, 19 nt, Artificial Sequence
  Description of Artificial Sequence: Synthetic oligonucleotide
guuacuaaaauaucaguaa

SEQ ID NO: 3197309 - RNA, 19 nt, Artificial Sequence
  Description of Artificial Sequence: Synthetic oligonucleotide
ucaauaugcauuccauaga

SEQ ID NO: 3197310 - RNA, 19 nt, Artificial Sequence
  Description of Artificial Sequence: Synthetic oligonucleotide
caauauucaggcauuucag

SEQ ID NO: 3197311 - RNA, 19 nt, Artificial Sequence
  Description of Artificial Sequence: Synthetic oligonucleotide
gagaacauggaugugaaga

SEQ ID NO: 3197312 - RNA, 19 nt, Artificial Sequence
  Description of Artificial Sequence: Synthetic oligonucleotide
uucagcaucagcucguacu

SEQ ID NO: 3197313 - RNA, 19 nt, Artificial Sequence
  Description of Artificial Sequence: Synthetic oligonucleotide
uacuaaaauaucaguaaua

SEQ ID NO: 3197314 - RNA, 19 nt, Artificial Sequence
  Description of Artificial Sequence: Synthetic oligonucleotide
gaugugaagacaauauuca

SEQ ID NO: 3197315 - RNA, 19 nt, Artificial Sequence
  Description of Artificial Sequence: Synthetic oligonucleotide
auucaggcauuucagcauc

SEQ ID NO: 3197316 - RNA, 19 nt, Artificial Sequence
  Description of Artificial Sequence: Synthetic oligonucleotide
acaaagucaaagacauucc

SEQ ID NO: 3197317 - RNA, 19 nt, Artificial Sequence
  Description of Artificial Sequence: Synthetic oligonucleotide
augcauuccauagagaaca

SEQ ID NO: 3197318 - RNA, 19 nt, Artificial Sequence
  Description of Artificial Sequence: Synthetic oligonucleotide
aucucuguuacuaaaauau

SEQ ID NO: 3197319 - RNA, 19 nt, Artificial Sequence
  Description of Artificial Sequence: Synthetic oligonucleotide
ucuucaauaugcauuccau

SEQ ID NO: 3197320 - RNA, 19 nt, Artificial Sequence
  Description of Artificial Sequence: Synthetic oligonucleotide
aaucucuguuacuaaaaua

SEQ ID NO: 3197321 - RNA, 19 nt, Artificial Sequence
  Description of Artificial Sequence: Synthetic oligonucleotide
acagugacaaagucaaaga

SEQ ID NO: 3197322 - RNA, 19 nt, Artificial Sequence
  Description of Artificial Sequence: Synthetic oligonucleotide
auagagaacauggauguga

SEQ ID NO: 3197323 - RNA, 19 nt, Artificial Sequence
  Description of Artificial Sequence: Synthetic oligonucleotide
uaugcauuccauagagaac

SEQ ID NO: 3197324 - RNA, 19 nt, Artificial Sequence
  Description of Artificial Sequence: Synthetic oligonucleotide
gaagacaauauucaggcau

SEQ ID NO: 3197325 - RNA, 19 nt, Artificial Sequence
  Description of Artificial Sequence: Synthetic oligonucleotide
augugaagacaauauucag

SEQ ID NO: 3197326 - RNA, 19 nt, Artificial Sequence
  Description of Artificial Sequence: Synthetic oligonucleotide
guaauacuucccaacacag

SEQ ID NO: 3197327 - RNA, 19 nt, Artificial Sequence
  Description of Artificial Sequence: Synthetic oligonucleotide
cucuguuacuaaaauauca

SEQ ID NO: 3197328 - RNA, 19 nt, Artificial Sequence
  Description of Artificial Sequence: Synthetic oligonucleotide
agacauuccaggcaucucu

SEQ ID NO: 3197329 - RNA, 19 nt, Artificial Sequence
  Description of Artificial Sequence: Synthetic oligonucleotide
guucagaaccccaaaggcg

SEQ ID NO: 3197330 - RNA, 19 nt, Artificial Sequence
  Description of Artificial Sequence: Synthetic oligonucleotide
cacagugacaaagucaaag

SEQ ID NO: 3197331 - RNA, 19 nt, Artificial Sequence
  Description of Artificial Sequence: Synthetic oligonucleotide
guaguucagaaccccaaag

SEQ ID NO: 3197332 - RNA, 19 nt, Artificial Sequence
  Description of Artificial Sequence: Synthetic oligonucleotide
aaagacauuccaggcaucu

SEQ ID NO: 3197333 - RNA, 19 nt, Artificial Sequence
  Description of Artificial Sequence: Synthetic oligonucleotide
uuccauagagaacauggau

SEQ ID NO: 3197334 - RNA, 19 nt, Artificial Sequence
  Description of Artificial Sequence: Synthetic oligonucleotide
agugacaaagucaaagaca

SEQ ID NO: 3197335 - RNA, 19 nt, Artificial Sequence
  Description of Artificial Sequence: Synthetic oligonucleotide
ugaaguaguucagaacccc

SEQ ID NO: 3197336 - RNA, 19 nt, Artificial Sequence
  Description of Artificial Sequence: Synthetic oligonucleotide
auuccaggcaucucugaag

SEQ ID NO: 3197337 - RNA, 19 nt, Artificial Sequence
  Description of Artificial Sequence: Synthetic oligonucleotide
uuccaggcaucucugaagu

SEQ ID NO: 3197338 - RNA, 19 nt, Artificial Sequence
  Description of Artificial Sequence: Synthetic oligonucleotide
aucuucaauaugcauucca

SEQ ID NO: 3197339 - RNA, 19 nt, Artificial Sequence
  Description of Artificial Sequence: Synthetic oligonucleotide
uacuucccaacacagugac

SEQ ID NO: 3197340 - RNA, 19 nt, Artificial Sequence
  Description of Artificial Sequence: Synthetic oligonucleotide
aaccccaaaggcgaugauc

SEQ ID NO: 3197341 - RNA, 19 nt, Artificial Sequence
  Description of Artificial Sequence: Synthetic oligonucleotide
cugaaguaguucagaaccc

SEQ ID NO: 3197342 - RNA, 19 nt, Artificial Sequence
  Description of Artificial Sequence: Synthetic oligonucleotide
ucagcaucagcucguacuc

SEQ ID NO: 3197343 - RNA, 19 nt, Artificial Sequence
  Description of Artificial Sequence: Synthetic oligonucleotide
uaauacuucccaacacagu

SEQ ID NO: 3197344 - RNA, 19 nt, Artificial Sequence
  Description of Artificial Sequence: Synthetic oligonucleotide
uauucaggcauuucagcau

SEQ ID NO: 3197345 - RNA, 19 nt, Artificial Sequence
  Description of Artificial Sequence: Synthetic oligonucleotide
aacauggaugugaagacaa

SEQ ID NO: 3197346 - RNA, 19 nt, Artificial Sequence
  Description of Artificial Sequence: Synthetic oligonucleotide
uagagaacauggaugugaa

SEQ ID NO: 3197347 - RNA, 19 nt, Artificial Sequence
  Description of Artificial Sequence: Synthetic oligonucleotide
ucucuguuacuaaaauauc

SEQ ID NO: 3197348 - RNA, 19 nt, Artificial Sequence
  Description of Artificial Sequence: Synthetic oligonucleotide
aggcauuucagcaucagcu

SEQ ID NO: 3197349 - RNA, 19 nt, Artificial Sequence
  Description of Artificial Sequence: Synthetic oligonucleotide
ucucugaaguaguucagaa

SEQ ID NO: 3197350 - RNA, 19 nt, Artificial Sequence
  Description of Artificial Sequence: Synthetic oligonucleotide
cagugacaaagucaaagac

SEQ ID NO: 3197351 - RNA, 19 nt, Artificial Sequence
  Description of Artificial Sequence: Synthetic oligonucleotide
ucccaacacagugacaaag

SEQ ID NO: 3197352 - RNA, 19 nt, Artificial Sequence
  Description of Artificial Sequence: Synthetic oligonucleotide
aaaggcgaugaucuucaau

SEQ ID NO: 3197353 - RNA, 19 nt, Artificial Sequence
  Description of Artificial Sequence: Synthetic oligonucleotide
agcucguacucauacggug

SEQ ID NO: 3197354 - RNA, 19 nt, Artificial Sequence
  Description of Artificial Sequence: Synthetic oligonucleotide
aucagcucguacucauacg

SEQ ID NO: 3197355 - RNA, 19 nt, Artificial Sequence
  Description of Artificial Sequence: Synthetic oligonucleotide
gcgaugaucuucaauaugc

SEQ ID NO: 3197356 - RNA, 19 nt, Artificial Sequence
  Description of Artificial Sequence: Synthetic oligonucleotide
uaucaguaauacuucccaa

SEQ ID NO: 3197357 - RNA, 19 nt, Artificial Sequence
  Description of Artificial Sequence: Synthetic oligonucleotide
gucaaagacauuccaggca

SEQ ID NO: 3197358 - RNA, 19 nt, Artificial Sequence
  Description of Artificial Sequence: Synthetic oligonucleotide
caucagcucguacucauac

SEQ ID NO: 3197359 - RNA, 19 nt, Artificial Sequence
  Description of Artificial Sequence: Synthetic oligonucleotide
cucugaaguaguucagaac

SEQ ID NO: 3197360 - RNA, 19 nt, Artificial Sequence
  Description of Artificial Sequence: Synthetic oligonucleotide
augaucuucaauaugcauu

SEQ ID NO: 3197361 - RNA, 19 nt, Artificial Sequence
  Description of Artificial Sequence: Synthetic oligonucleotide
ugaagacaauauucaggca

SEQ ID NO: 3197362 - RNA, 19 nt, Artificial Sequence
  Description of Artificial Sequence: Synthetic oligonucleotide
uggaugugaagacaauauu

SEQ ID NO: 3197363 - RNA, 19 nt, Artificial Sequence
  Description of Artificial Sequence: Synthetic oligonucleotide
gcauuucagcaucagcucg

SEQ ID NO: 3197364 - RNA, 19 nt, Artificial Sequence
  Description of Artificial Sequence: Synthetic oligonucleotide
ggaugugaagacaauauuc

SEQ ID NO: 3197365 - RNA, 19 nt, Artificial Sequence
  Description of Artificial Sequence: Synthetic oligonucleotide
caacacagugacaaaguca

SEQ ID NO: 3197366 - RNA, 19 nt, Artificial Sequence
  Description of Artificial Sequence: Synthetic oligonucleotide
aauaugcauuccauagaga

SEQ ID NO: 3197367 - RNA, 19 nt, Artificial Sequence
  Description of Artificial Sequence: Synthetic oligonucleotide
aagacauuccaggcaucuc

SEQ ID NO: 3197368 - RNA, 19 nt, Artificial Sequence
  Description of Artificial Sequence: Synthetic oligonucleotide
caaagucaaagacauucca

SEQ ID NO: 3197369 - RNA, 19 nt, Artificial Sequence
  Description of Artificial Sequence: Synthetic oligonucleotide
caguaauacuucccaacac

SEQ ID NO: 3197370 - RNA, 19 nt, Artificial Sequence
  Description of Artificial Sequence: Synthetic oligonucleotide
cuucccaacacagugacaa

SEQ ID NO: 3197371 - RNA, 19 nt, Artificial Sequence
  Description of Artificial Sequence: Synthetic oligonucleotide
auuuccauaccacaccagc

SEQ ID NO: 3197372 - RNA, 19 nt, Artificial Sequence
  Description of Artificial Sequence: Synthetic oligonucleotide
uuguagaagaugcuggugc

SEQ ID NO: 3197373 - RNA, 19 nt, Artificial Sequence
  Description of Artificial Sequence: Synthetic oligonucleotide
auguaggucauccagcuuc

SEQ ID NO: 3197374 - RNA, 19 nt, Artificial Sequence
  Description of Artificial Sequence: Synthetic oligonucleotide
gaugaaguagcguaccgug

SEQ ID NO: 3197375 - RNA, 19 nt, Artificial Sequence
  Description of Artificial Sequence: Synthetic oligonucleotide
aucucuauggccuuguaga

SEQ ID NO: 3197376 - RNA, 19 nt, Artificial Sequence
  Description of Artificial Sequence: Synthetic oligonucleotide
ucuauggccuuguagaaga

SEQ ID NO: 3197377 - RNA, 19 nt, Artificial Sequence
  Description of Artificial Sequence: Synthetic oligonucleotide
ugugggaauuuccauacca

SEQ ID NO: 3197378 - RNA, 19 nt, Artificial Sequence
  Description of Artificial Sequence: Synthetic oligonucleotide
ggagggaucaucucuaugg

SEQ ID NO: 3197379 - RNA, 19 nt, Artificial Sequence
  Description of Artificial Sequence: Synthetic oligonucleotide
aggguggaaguccucaugc

SEQ ID NO: 3197380 - RNA, 19 nt, Artificial Sequence
  Description of Artificial Sequence: Synthetic oligonucleotide
cuugauguaggucauccag

SEQ ID NO: 3197381 - RNA, 19 nt, Artificial Sequence
  Description of Artificial Sequence: Synthetic oligonucleotide
ugaaguagcguaccgugcc

SEQ ID NO: 3197382 - RNA, 19 nt, Artificial Sequence
  Description of Artificial Sequence: Synthetic oligonucleotide
auggccuuguagaagaugc

SEQ ID NO: 3197383 - RNA, 19 nt, Artificial Sequence
  Description of Artificial Sequence: Synthetic oligonucleotide
uuccauaccacaccagcag

SEQ ID NO: 3197384 - RNA, 19 nt, Artificial Sequence
  Description of Artificial Sequence: Synthetic oligonucleotide
uaccgugccauccucauug

SEQ ID NO: 3197385 - RNA, 19 nt, Artificial Sequence
  Description of Artificial Sequence: Synthetic oligonucleotide
aucuguaccaccuccaggu

SEQ ID NO: 3197386 - RNA, 19 nt, Artificial Sequence
  Description of Artificial Sequence: Synthetic oligonucleotide
uugauguaggucauccagc

SEQ ID NO: 3197387 - RNA, 19 nt, Artificial Sequence
  Description of Artificial Sequence: Synthetic oligonucleotide
cuggcaucgaugaaguagc

SEQ ID NO: 3197388 - RNA, 19 nt, Artificial Sequence
  Description of Artificial Sequence: Synthetic oligonucleotide
uguaggucauccagcuucg

SEQ ID NO: 3197389 - RNA, 19 nt, Artificial Sequence
  Description of Artificial Sequence: Synthetic oligonucleotide
uguagaagaugcuggugcc

SEQ ID NO: 3197390 - RNA, 19 nt, Artificial Sequence
  Description of Artificial Sequence: Synthetic oligonucleotide
uuuccauaccacaccagca

SEQ ID NO: 3197391 - RNA, 19 nt, Artificial Sequence
  Description of Artificial Sequence: Synthetic oligonucleotide
agggaucaucucuauggcc

SEQ ID NO: 3197392 - RNA, 19 nt, Artificial Sequence
  Description of Artificial Sequence: Synthetic oligonucleotide
auaccacaccagcaguucc

SEQ ID NO: 3197393 - RNA, 19 nt, Artificial Sequence
  Description of Artificial Sequence: Synthetic oligonucleotide
auuccuggcacacuugaug

SEQ ID NO: 3197394 - RNA, 19 nt, Artificial Sequence
  Description of Artificial Sequence: Synthetic oligonucleotide
uguaccaccuccagguucu

SEQ ID NO: 3197395 - RNA, 19 nt, Artificial Sequence
  Description of Artificial Sequence: Synthetic oligonucleotide
ucgaugaaguagcguaccg

SEQ ID NO: 3197396 - RNA, 19 nt, Artificial Sequence
  Description of Artificial Sequence: Synthetic oligonucleotide
ugauguaggucauccagcu

SEQ ID NO: 3197397 - RNA, 19 nt, Artificial Sequence
  Description of Artificial Sequence: Synthetic oligonucleotide
guugugggaauuuccauac

SEQ ID NO: 3197398 - RNA, 19 nt, Artificial Sequence
  Description of Artificial Sequence: Synthetic oligonucleotide
gaauuuccauaccacacca

SEQ ID NO: 3197399 - RNA, 19 nt, Artificial Sequence
  Description of Artificial Sequence: Synthetic oligonucleotide
aggucauccagcuucggug

SEQ ID NO: 3197400 - RNA, 19 nt, Artificial Sequence
  Description of Artificial Sequence: Synthetic oligonucleotide
aagaugcuggugccgaucu

SEQ ID NO: 3197401 - RNA, 19 nt, Artificial Sequence
  Description of Artificial Sequence: Synthetic oligonucleotide
ugggaauuuccauaccaca

SEQ ID NO: 3197402 - RNA, 19 nt, Artificial Sequence
  Description of Artificial Sequence: Synthetic oligonucleotide
gaucuguaccaccuccagg

SEQ ID NO: 3197403 - RNA, 19 nt, Artificial Sequence
  Description of Artificial Sequence: Synthetic oligonucleotide
uuucuucugcuccuccucc

SEQ ID NO: 3197404 - RNA, 19 nt, Artificial Sequence
  Description of Artificial Sequence: Synthetic oligonucleotide
ucauuccuggcacacuuga

SEQ ID NO: 3197405 - RNA, 19 nt, Artificial Sequence
  Description of Artificial Sequence: Synthetic oligonucleotide
aucgaugaaguagcguacc

SEQ ID NO: 3197406 - RNA, 19 nt, Artificial Sequence
  Description of Artificial Sequence: Synthetic oligonucleotide
uguugugggaauuuccaua

SEQ ID NO: 3197407 - RNA, 19 nt, Artificial Sequence
  Description of Artificial Sequence: Synthetic oligonucleotide
uuccuggcacacuugaugu

SEQ ID NO: 3197408 - RNA, 19 nt, Artificial Sequence
  Description of Artificial Sequence: Synthetic oligonucleotide
accagggaugcccaggaag

SEQ ID NO: 3197409 - RNA, 19 nt, Artificial Sequence
  Description of Artificial Sequence: Synthetic oligonucleotide
ugcuccugcucauuccugg

SEQ ID NO: 3197410 - RNA, 19 nt, Artificial Sequence
  Description of Artificial Sequence: Synthetic oligonucleotide
ggaauuuccauaccacacc

SEQ ID NO: 3197411 - RNA, 19 nt, Artificial Sequence
  Description of Artificial Sequence: Synthetic oligonucleotide
uggucuggagggaucaucu

SEQ ID NO: 3197412 - RNA, 19 nt, Artificial Sequence
  Description of Artificial Sequence: Synthetic oligonucleotide
uuuucuucugcuccuccuc

SEQ ID NO: 3197413 - RNA, 19 nt, Artificial Sequence
  Description of Artificial Sequence: Synthetic oligonucleotide
aagguguugugggaauuuc

SEQ ID NO: 3197414 - RNA, 19 nt, Artificial Sequence
  Description of Artificial Sequence: Synthetic oligonucleotide
aaguccucaugcuuguuuu

SEQ ID NO: 3197415 - RNA, 19 nt, Artificial Sequence
  Description of Artificial Sequence: Synthetic oligonucleotide
ugcggaguccgcagggugg

SEQ ID NO: 3197416 - RNA, 19 nt, Artificial Sequence
  Description of Artificial Sequence: Synthetic oligonucleotide
gagggaucaucucuauggc

SEQ ID NO: 3197417 - RNA, 19 nt, Artificial Sequence
  Description of Artificial Sequence: Synthetic oligonucleotide
ucugcuccugcucauuccu

SEQ ID NO: 3197418 - RNA, 19 nt, Artificial Sequence
  Description of Artificial Sequence: Synthetic oligonucleotide
ucgguggucuuccuggcug

SEQ ID NO: 3197419 - RNA, 19 nt, Artificial Sequence
  Description of Artificial Sequence: Synthetic oligonucleotide
cacuugauguaggucaucc

SEQ ID NO: 3197420 - RNA, 19 nt, Artificial Sequence
  Description of Artificial Sequence: Synthetic oligonucleotide
aguugcggaguccgcaggg

SEQ ID NO: 3197421 - RNA, 19 nt, Artificial Sequence
  Description of Artificial Sequence: Synthetic oligonucleotide
augaaguagcguaccgugc

SEQ ID NO: 3197422 - RNA, 19 nt, Artificial Sequence
  Description of Artificial Sequence: Synthetic oligonucleotide
ucuggagggaucaucucua

SEQ ID NO: 3197423 - RNA, 19 nt, Artificial Sequence
  Description of Artificial Sequence: Synthetic oligonucleotide
caucucuauggccuuguag

SEQ ID NO: 3197424 - RNA, 19 nt, Artificial Sequence
  Description of Artificial Sequence: Synthetic oligonucleotide
ucuucugcuccuccuccag

SEQ ID NO: 3197425 - RNA, 19 nt, Artificial Sequence
  Description of Artificial Sequence: Synthetic oligonucleotide
aauuuccauaccacaccag

SEQ ID NO: 3197426 - RNA, 19 nt, Artificial Sequence
  Description of Artificial Sequence: Synthetic oligonucleotide
caguuccuggucuggaggg

SEQ ID NO: 3197427 - RNA, 19 nt, Artificial Sequence
  Description of Artificial Sequence: Synthetic oligonucleotide
uccauaccacaccagcagu

SEQ ID NO: 3197428 - RNA, 19 nt, Artificial Sequence
  Description of Artificial Sequence: Synthetic oligonucleotide
agguguugugggaauuucc

SEQ ID NO: 3197429 - RNA, 19 nt, Artificial Sequence
  Description of Artificial Sequence: Synthetic oligonucleotide
caucgaugaaguagcguac

SEQ ID NO: 3197430 - RNA, 19 nt, Artificial Sequence
  Description of Artificial Sequence: Synthetic oligonucleotide
gcacacuugauguagguca

SEQ ID NO: 3197431 - RNA, 19 nt, Artificial Sequence
  Description of Artificial Sequence: Synthetic oligonucleotide
gcuucgguggucuuccugg

SEQ ID NO: 3197432 - RNA, 19 nt, Artificial Sequence
  Description of Artificial Sequence: Synthetic oligonucleotide
uccuccuccaguccuggca

SEQ ID NO: 3197433 - RNA, 19 nt, Artificial Sequence
  Description of Artificial Sequence: Synthetic oligonucleotide
uagaagaugcuggugccga

SEQ ID NO: 3197434 - RNA, 19 nt, Artificial Sequence
  Description of Artificial Sequence: Synthetic oligonucleotide
uaggucauccagcuucggu

SEQ ID NO: 3197435 - RNA, 19 nt, Artificial Sequence
  Description of Artificial Sequence: Synthetic oligonucleotide
uccugcucauuccuggcac

SEQ ID NO: 3197436 - RNA, 19 nt, Artificial Sequence
  Description of Artificial Sequence: Synthetic oligonucleotide
ggucauccagcuucggugg

SEQ ID NO: 3197437 - RNA, 19 nt, Artificial Sequence
  Description of Artificial Sequence: Synthetic oligonucleotide
uccuggcuggcaucgauga

SEQ ID NO: 3197438 - RNA, 19 nt, Artificial Sequence
  Description of Artificial Sequence: Synthetic oligonucleotide
acaccagcaguuccugguc

SEQ ID NO: 3197439 - RNA, 19 nt, Artificial Sequence
  Description of Artificial Sequence: Synthetic oligonucleotide
ucucuauggccuuguagaa

SEQ ID NO: 3197440 - RNA, 19 nt, Artificial Sequence
  Description of Artificial Sequence: Synthetic oligonucleotide
accaccuccagguucugcu

SEQ ID NO: 3197441 - RNA, 19 nt, Artificial Sequence
  Description of Artificial Sequence: Synthetic oligonucleotide
guggaaguccucaugcuug

SEQ ID NO: 3197442 - RNA, 19 nt, Artificial Sequence
  Description of Artificial Sequence: Synthetic oligonucleotide
cuggcuggcaucgaugaag

SEQ ID NO: 3197443 - RNA, 19 nt, Artificial Sequence
  Description of Artificial Sequence: Synthetic oligonucleotide
gcuggcaucgaugaaguag

SEQ ID NO: 3197444 - RNA, 19 nt, Artificial Sequence
  Description of Artificial Sequence: Synthetic oligonucleotide
uaccacaccagcaguuccu

SEQ ID NO: 3197445 - RNA, 19 nt, Artificial Sequence
  Description of Artificial Sequence: Synthetic oligonucleotide
guagaagaugcuggugccg

SEQ ID NO: 3197446 - RNA, 19 nt, Artificial Sequence
  Description of Artificial Sequence: Synthetic oligonucleotide
aguagcguaccgugccauc

SEQ ID NO: 3197447 - RNA, 19 nt, Artificial Sequence
  Description of Artificial Sequence: Synthetic oligonucleotide
ucugcuccuccuccagucc

SEQ ID NO: 3197448 - RNA, 19 nt, Artificial Sequence
  Description of Artificial Sequence: Synthetic oligonucleotide
uggcuggcaucgaugaagu

SEQ ID NO: 3197449 - RNA, 19 nt, Artificial Sequence
  Description of Artificial Sequence: Synthetic oligonucleotide
uucugcuccugcucauucc

SEQ ID NO: 3197450 - RNA, 19 nt, Artificial Sequence
  Description of Artificial Sequence: Synthetic oligonucleotide
uggcaucgaugaaguagcg

SEQ ID NO: 3197451 - RNA, 19 nt, Artificial Sequence
  Description of Artificial Sequence: Synthetic oligonucleotide
uauggccuuguagaagaug

SEQ ID NO: 3197452 - RNA, 19 nt, Artificial Sequence
  Description of Artificial Sequence: Synthetic oligonucleotide
agcaguuccuggucuggag

SEQ ID NO: 3197453 - RNA, 19 nt, Artificial Sequence
  Description of Artificial Sequence: Synthetic oligonucleotide
uggagggaucaucucuaug

SEQ ID NO: 3197454 - RNA, 19 nt, Artificial Sequence
  Description of Artificial Sequence: Synthetic oligonucleotide
gcuggugccgaucuguacc

SEQ ID NO: 3197455 - RNA, 19 nt, Artificial Sequence
  Description of Artificial Sequence: Synthetic oligonucleotide
uugugggaauuuccauacc

SEQ ID NO: 3197456 - RNA, 19 nt, Artificial Sequence
  Description of Artificial Sequence: Synthetic oligonucleotide
aguccuggcacaccaggga

SEQ ID NO: 3197457 - RNA, 19 nt, Artificial Sequence
  Description of Artificial Sequence: Synthetic oligonucleotide
cuggcacacuugauguagg

SEQ ID NO: 3197458 - RNA, 19 nt, Artificial Sequence
  Description of Artificial Sequence: Synthetic oligonucleotide
uggcacaccagggaugccc

SEQ ID NO: 3197459 - RNA, 19 nt, Artificial Sequence
  Description of Artificial Sequence: Synthetic oligonucleotide
uucugcuccuccuccaguc

SEQ ID NO: 3197460 - RNA, 19 nt, Artificial Sequence
  Description of Artificial Sequence: Synthetic oligonucleotide
cuuguagaagaugcuggug

SEQ ID NO: 3197461 - RNA, 19 nt, Artificial Sequence
  Description of Artificial Sequence: Synthetic oligonucleotide
uuccuggcuggcaucgaug

SEQ ID NO: 3197462 - RNA, 19 nt, Artificial Sequence
  Description of Artificial Sequence: Synthetic oligonucleotide
acuugauguaggucaucca

SEQ ID NO: 3197463 - RNA, 19 nt, Artificial Sequence
  Description of Artificial Sequence: Synthetic oligonucleotide
ccagggaugcccaggaagg

SEQ ID NO: 3197464 - RNA, 19 nt, Artificial Sequence
  Description of Artificial Sequence: Synthetic oligonucleotide
uggaaguccucaugcuugu

SEQ ID NO: 3197465 - RNA, 19 nt, Artificial Sequence
  Description of Artificial Sequence: Synthetic oligonucleotide
caguccuggcacaccaggg

SEQ ID NO: 3197466 - RNA, 19 nt, Artificial Sequence
  Description of Artificial Sequence: Synthetic oligonucleotide
uggucuuccuggcuggcau

SEQ ID NO: 3197467 - RNA, 19 nt, Artificial Sequence
  Description of Artificial Sequence: Synthetic oligonucleotide
uccuggcacaccagggaug

SEQ ID NO: 3197468 - RNA, 19 nt, Artificial Sequence
  Description of Artificial Sequence: Synthetic oligonucleotide
uugcggaguccgcagggug

SEQ ID NO: 3197469 - RNA, 19 nt, Artificial Sequence
  Description of Artificial Sequence: Synthetic oligonucleotide
gccuuguagaagaugcugg

SEQ ID NO: 3197470 - RNA, 19 nt, Artificial Sequence
  Description of Artificial Sequence: Synthetic oligonucleotide
gcaucgaugaaguagcgua

SEQ ID NO: 3197471 - RNA, 19 nt, Artificial Sequence
  Description of Artificial Sequence: Synthetic oligonucleotide
aaauucguaacacagagag

SEQ ID NO: 3197472 - RNA, 19 nt, Artificial Sequence
  Description of Artificial Sequence: Synthetic oligonucleotide
auucguaacacagagaguc

SEQ ID NO: 3197473 - RNA, 19 nt, Artificial Sequence
  Description of Artificial Sequence: Synthetic oligonucleotide
aaaggugucuucugaaggg

SEQ ID NO: 3197474 - RNA, 19 nt, Artificial Sequence
  Description of Artificial Sequence: Synthetic oligonucleotide
aaggcuaugcuucccagcg

SEQ ID NO: 3197475 - RNA, 19 nt, Artificial Sequence
  Description of Artificial Sequence: Synthetic oligonucleotide
ucuggaacgacuuucucag

SEQ ID NO: 3197476 - RNA, 19 nt, Artificial Sequence
  Description of Artificial Sequence: Synthetic oligonucleotide
gaaaggugucuucugaagg

SEQ ID NO: 3197477 - RNA, 19 nt, Artificial Sequence
  Description of Artificial Sequence: Synthetic oligonucleotide
aaaguacugacuagcaacg

SEQ ID NO: 3197478 - RNA, 19 nt, Artificial Sequence
  Description of Artificial Sequence: Synthetic oligonucleotide
ugacuagcaacgcagggag

SEQ ID NO: 3197479 - RNA, 19 nt, Artificial Sequence
  Description of Artificial Sequence: Synthetic oligonucleotide
ggaaauucguaacacagag

SEQ ID NO: 3197480 - RNA, 19 nt, Artificial Sequence
  Description of Artificial Sequence: Synthetic oligonucleotide
agcaucgccagcuucuccc

SEQ ID NO: 3197481 - RNA, 19 nt, Artificial Sequence
  Description of Artificial Sequence: Synthetic oligonucleotide
accaggucucgguagagcc

SEQ ID NO: 3197482 - RNA, 19 nt, Artificial Sequence
  Description of Artificial Sequence: Synthetic oligonucleotide
uacgcucuccuccagggcg

SEQ ID NO: 3197483 - RNA, 19 nt, Artificial Sequence
  Description of Artificial Sequence: Synthetic oligonucleotide
gguagagccgcuucgagcg

SEQ ID NO: 3197484 - RNA, 19 nt, Artificial Sequence
  Description of Artificial Sequence: Synthetic oligonucleotide
agcaccgucacgucuggcc

SEQ ID NO: 3197485 - RNA, 19 nt, Artificial Sequence
  Description of Artificial Sequence: Synthetic oligonucleotide
ugagaaaggugucuucuga

SEQ ID NO: 3197486 - RNA, 19 nt, Artificial Sequence
  Description of Artificial Sequence: Synthetic oligonucleotide
aaggugucuucugaagggc

SEQ ID NO: 3197487 - RNA, 19 nt, Artificial Sequence
  Description of Artificial Sequence: Synthetic oligonucleotide
agaaaggugucuucugaag

SEQ ID NO: 3197488 - RNA, 19 nt, Artificial Sequence
  Description of Artificial Sequence: Synthetic oligonucleotide
cauccgaugcaugagaaag

SEQ ID NO: 3197489 - RNA, 19 nt, Artificial Sequence
  Description of Artificial Sequence: Synthetic oligonucleotide
aacgcagggaguugugaag

SEQ ID NO: 3197490 - RNA, 19 nt, Artificial Sequence
  Description of Artificial Sequence: Synthetic oligonucleotide
uucagaaccugcuccuccg

SEQ ID NO: 3197491 - RNA, 19 nt, Artificial Sequence
  Description of Artificial Sequence: Synthetic oligonucleotide
uggaacgacuuucucagcu

SEQ ID NO: 3197492 - RNA, 19 nt, Artificial Sequence
  Description of Artificial Sequence: Synthetic oligonucleotide
aacacagagaguccggguu

SEQ ID NO: 3197493 - RNA, 19 nt, Artificial Sequence
  Description of Artificial Sequence: Synthetic oligonucleotide
aaguacugacuagcaacgc

SEQ ID NO: 3197494 - RNA, 19 nt, Artificial Sequence
  Description of Artificial Sequence: Synthetic oligonucleotide
ucguaacacagagaguccg

SEQ ID NO: 3197495 - RNA, 19 nt, Artificial Sequence
  Description of Artificial Sequence: Synthetic oligonucleotide
uccuccagggcgcagcggg

SEQ ID NO: 3197496 - RNA, 19 nt, Artificial Sequence
  Description of Artificial Sequence: Synthetic oligonucleotide
acugacuagcaacgcaggg

SEQ ID NO: 3197497 - RNA, 19 nt, Artificial Sequence
  Description of Artificial Sequence: Synthetic oligonucleotide
uacugacuagcaacgcagg

SEQ ID NO: 3197498 - RNA, 19 nt, Artificial Sequence
  Description of Artificial Sequence: Synthetic oligonucleotide
aguacugacuagcaacgca

SEQ ID NO: 3197499 - RNA, 19 nt, Artificial Sequence
  Description of Artificial Sequence: Synthetic oligonucleotide
gaacgacuuucucagcugc

SEQ ID NO: 3197500 - RNA, 19 nt, Artificial Sequence
  Description of Artificial Sequence: Synthetic oligonucleotide
ucucgguagagccgcuucg

SEQ ID NO: 3197501 - RNA, 19 nt, Artificial Sequence
  Description of Artificial Sequence: Synthetic oligonucleotide
guugugaaggcuaugcuuc

SEQ ID NO: 3197502 - RNA, 19 nt, Artificial Sequence
  Description of Artificial Sequence: Synthetic oligonucleotide
aggugcggaaauucguaac

SEQ ID NO: 3197503 - RNA, 19 nt, Artificial Sequence
  Description of Artificial Sequence: Synthetic oligonucleotide
uucguaacacagagagucc

SEQ ID NO: 3197504 - RNA, 19 nt, Artificial Sequence
  Description of Artificial Sequence: Synthetic oligonucleotide
ggcuugaagccuuagcggg

SEQ ID NO: 3197505 - RNA, 19 nt, Artificial Sequence
  Description of Artificial Sequence: Synthetic oligonucleotide
ucuucugaagggcggggcc

SEQ ID NO: 3197506 - RNA, 19 nt, Artificial Sequence
  Description of Artificial Sequence: Synthetic oligonucleotide
guacugacuagcaacgcag

SEQ ID NO: 3197507 - RNA, 19 nt, Artificial Sequence
  Description of Artificial Sequence: Synthetic oligonucleotide
ugcccgagcaccuccuucg

SEQ ID NO: 3197508 - RNA, 19 nt, Artificial Sequence
  Description of Artificial Sequence: Synthetic oligonucleotide
aguugugaaggcuaugcuu

SEQ ID NO: 3197509 - RNA, 19 nt, Artificial Sequence
  Description of Artificial Sequence: Synthetic oligonucleotide
uccggguugcacagcaccg

SEQ ID NO: 3197510 - RNA, 19 nt, Artificial Sequence
  Description of Artificial Sequence: Synthetic oligonucleotide
uuaggugcggaaauucgua

SEQ ID NO: 3197511 - RNA, 19 nt, Artificial Sequence
  Description of Artificial Sequence: Synthetic oligonucleotide
agcgcggcacguucaaccc

SEQ ID NO: 3197512 - RNA, 19 nt, Artificial Sequence
  Description of Artificial Sequence: Synthetic oligonucleotide
agagaguccggguugcaca

SEQ ID NO: 3197513 - RNA, 19 nt, Artificial Sequence
  Description of Artificial Sequence: Synthetic oligonucleotide
ugaaggcuaugcuucccag

SEQ ID NO: 3197514 - RNA, 19 nt, Artificial Sequence
  Description of Artificial Sequence: Synthetic oligonucleotide
ugcggaaauucguaacaca

SEQ ID NO: 3197515 - RNA, 19 nt, Artificial Sequence
  Description of Artificial Sequence: Synthetic oligonucleotide
gaaggcuaugcuucccagc

SEQ ID NO: 3197516 - RNA, 19 nt, Artificial Sequence
  Description of Artificial Sequence: Synthetic oligonucleotide
guaacacagagaguccggg

SEQ ID NO: 3197517 - RNA, 19 nt, Artificial Sequence
  Description of Artificial Sequence: Synthetic oligonucleotide
ucagaaccugcuccuccgg

SEQ ID NO: 3197518 - RNA, 19 nt, Artificial Sequence
  Description of Artificial Sequence: Synthetic oligonucleotide
augagaaaggugucuucug

SEQ ID NO: 3197519 - RNA, 19 nt, Artificial Sequence
  Description of Artificial Sequence: Synthetic oligonucleotide
uugcacagcaccgucacgu

SEQ ID NO: 3197520 - RNA, 19 nt, Artificial Sequence
  Description of Artificial Sequence: Synthetic oligonucleotide
cuucagaaccugcuccucc

SEQ ID NO: 3197521 - RNA, 19 nt, Artificial Sequence
  Description of Artificial Sequence: Synthetic oligonucleotide
gagcgcggcacguucaacc

SEQ ID NO: 3197522 - RNA, 19 nt, Artificial Sequence
  Description of Artificial Sequence: Synthetic oligonucleotide
gagaguccggguugcacag

SEQ ID NO: 3197523 - RNA, 19 nt, Artificial Sequence
  Description of Artificial Sequence: Synthetic oligonucleotide
aaccugcuccuccggcacc

SEQ ID NO: 3197524 - RNA, 19 nt, Artificial Sequence
  Description of Artificial Sequence: Synthetic oligonucleotide
uccgaugcaugagaaaggu

SEQ ID NO: 3197525 - RNA, 19 nt, Artificial Sequence
  Description of Artificial Sequence: Synthetic oligonucleotide
gccagcuucucccucagcg

SEQ ID NO: 3197526 - RNA, 19 nt, Artificial Sequence
  Description of Artificial Sequence: Synthetic oligonucleotide
acacagagaguccggguug

SEQ ID NO: 3197527 - RNA, 19 nt, Artificial Sequence
  Description of Artificial Sequence: Synthetic oligonucleotide
gucuggaacgacuuucuca

SEQ ID NO: 3197528 - RNA, 19 nt, Artificial Sequence
  Description of Artificial Sequence: Synthetic oligonucleotide
uugugaaggcuaugcuucc

SEQ ID NO: 3197529 - RNA, 19 nt, Artificial Sequence
  Description of Artificial Sequence: Synthetic oligonucleotide
ucagcauccgaugcaugag

SEQ ID NO: 3197530 - RNA, 19 nt, Artificial Sequence
  Description of Artificial Sequence: Synthetic oligonucleotide
uaugcuucccagcgccuca

SEQ ID NO: 3197531 - RNA, 19 nt, Artificial Sequence
  Description of Artificial Sequence: Synthetic oligonucleotide
ugcagacucaccaggucuc

SEQ ID NO: 3197532 - RNA, 19 nt, Artificial Sequence
  Description of Artificial Sequence: Synthetic oligonucleotide
acucaccaggucucgguag

SEQ ID NO: 3197533 - RNA, 19 nt, Artificial Sequence
  Description of Artificial Sequence: Synthetic oligonucleotide
ggcacguucaaccccuccg

SEQ ID NO: 3197534 - RNA, 19 nt, Artificial Sequence
  Description of Artificial Sequence: Synthetic oligonucleotide
ggaguugugaaggcuaugc

SEQ ID NO: 3197535 - RNA, 19 nt, Artificial Sequence
  Description of Artificial Sequence: Synthetic oligonucleotide
ucuccuccagggcgcagcg

SEQ ID NO: 3197536 - RNA, 19 nt, Artificial Sequence
  Description of Artificial Sequence: Synthetic oligonucleotide
aauucguaacacagagagu

SEQ ID NO: 3197537 - RNA, 19 nt, Artificial Sequence
  Description of Artificial Sequence: Synthetic oligonucleotide
acgcagggaguugugaagg

SEQ ID NO: 3197538 - RNA, 19 nt, Artificial Sequence
  Description of Artificial Sequence: Synthetic oligonucleotide
gcggaaauucguaacacag

SEQ ID NO: 3197539 - RNA, 19 nt, Artificial Sequence
  Description of Artificial Sequence: Synthetic oligonucleotide
gagaaaggugucuucugaa

SEQ ID NO: 3197540 - RNA, 19 nt, Artificial Sequence
  Description of Artificial Sequence: Synthetic oligonucleotide
cacagcaccgucacgucug

SEQ ID NO: 3197541 - RNA, 19 nt, Artificial Sequence
  Description of Artificial Sequence: Synthetic oligonucleotide
uaacacagagaguccgggu

SEQ ID NO: 3197542 - RNA, 19 nt, Artificial Sequence
  Description of Artificial Sequence: Synthetic oligonucleotide
agaaccugcuccuccggca

SEQ ID NO: 3197543 - RNA, 19 nt, Artificial Sequence
  Description of Artificial Sequence: Synthetic oligonucleotide
gggcuugaagccuuagcgg

SEQ ID NO: 3197544 - RNA, 19 nt, Artificial Sequence
  Description of Artificial Sequence: Synthetic oligonucleotide
ucgguagagccgcuucgag

SEQ ID NO: 3197545 - RNA, 19 nt, Artificial Sequence
  Description of Artificial Sequence: Synthetic oligonucleotide
uucccagcgccucagcauc

SEQ ID NO: 3197546 - RNA, 19 nt, Artificial Sequence
  Description of Artificial Sequence: Synthetic oligonucleotide
uccuccggcaccugcagac

SEQ ID NO: 3197547 - RNA, 19 nt, Artificial Sequence
  Description of Artificial Sequence: Synthetic oligonucleotide
aggcuaugcuucccagcgc

SEQ ID NO: 3197548 - RNA, 19 nt, Artificial Sequence
  Description of Artificial Sequence: Synthetic oligonucleotide
gaaauucguaacacagaga

SEQ ID NO: 3197549 - RNA, 19 nt, Artificial Sequence
  Description of Artificial Sequence: Synthetic oligonucleotide
acgacuuucucagcugcuc

SEQ ID NO: 3197550 - RNA, 19 nt, Artificial Sequence
  Description of Artificial Sequence: Synthetic oligonucleotide
gaugcaugagaaagguguc

SEQ ID NO: 3197551 - RNA, 19 nt, Artificial Sequence
  Description of Artificial Sequence: Synthetic oligonucleotide
cucagcauccgaugcauga

SEQ ID NO: 3197552 - RNA, 19 nt, Artificial Sequence
  Description of Artificial Sequence: Synthetic oligonucleotide
cagcuucucccucagcgcc

SEQ ID NO: 3197553 - RNA, 19 nt, Artificial Sequence
  Description of Artificial Sequence: Synthetic oligonucleotide
uaggugcggaaauucguaa

SEQ ID NO: 3197554 - RNA, 19 nt, Artificial Sequence
  Description of Artificial Sequence: Synthetic oligonucleotide
ugucuucugaagggcgggg

SEQ ID NO: 3197555 - RNA, 19 nt, Artificial Sequence
  Description of Artificial Sequence: Synthetic oligonucleotide
cuccgcuacgcucuccucc

SEQ ID NO: 3197556 - RNA, 19 nt, Artificial Sequence
  Description of Artificial Sequence: Synthetic oligonucleotide
uccgcuacgcucuccucca

SEQ ID NO: 3197557 - RNA, 19 nt, Artificial Sequence
  Description of Artificial Sequence: Synthetic oligonucleotide
caccugcagacucaccagg

SEQ ID NO: 3197558 - RNA, 19 nt, Artificial Sequence
  Description of Artificial Sequence: Synthetic oligonucleotide
ucacgucuggccccugccc

SEQ ID NO: 3197559 - RNA, 19 nt, Artificial Sequence
  Description of Artificial Sequence: Synthetic oligonucleotide
cuucugaagggcggggccg

SEQ ID NO: 3197560 - RNA, 19 nt, Artificial Sequence
  Description of Artificial Sequence: Synthetic oligonucleotide
ggcuaugcuucccagcgcc

SEQ ID NO: 3197561 - RNA, 19 nt, Artificial Sequence
  Description of Artificial Sequence: Synthetic oligonucleotide
agacucaccaggucucggu

SEQ ID NO: 3197562 - RNA, 19 nt, Artificial Sequence
  Description of Artificial Sequence: Synthetic oligonucleotide
auccgaugcaugagaaagg

SEQ ID NO: 3197563 - RNA, 19 nt, Artificial Sequence
  Description of Artificial Sequence: Synthetic oligonucleotide
acuagcaacgcagggaguu

SEQ ID NO: 3197564 - RNA, 19 nt, Artificial Sequence
  Description of Artificial Sequence: Synthetic oligonucleotide
gcuacgcucuccuccaggg

SEQ ID NO: 3197565 - RNA, 19 nt, Artificial Sequence
  Description of Artificial Sequence: Synthetic oligonucleotide
guccggguugcacagcacc

SEQ ID NO: 3197566 - RNA, 19 nt, Artificial Sequence
  Description of Artificial Sequence: Synthetic oligonucleotide
ugugaaggcuaugcuuccc

SEQ ID NO: 3197567 - RNA, 19 nt, Artificial Sequence
  Description of Artificial Sequence: Synthetic oligonucleotide
ugcaugagaaaggugucuu

SEQ ID NO: 3197568 - RNA, 19 nt, Artificial Sequence
  Description of Artificial Sequence: Synthetic oligonucleotide
gaaccugcuccuccggcac

SEQ ID NO: 3197569 - RNA, 19 nt, Artificial Sequence
  Description of Artificial Sequence: Synthetic oligonucleotide
cacgucuggccccugcccg

SEQ ID NO: 3197570 - RNA, 19 nt, Artificial Sequence
  Description of Artificial Sequence: Synthetic oligonucleotide
uagagccgcuucgagcgcg

SEQ ID NO: 3197571 - RNA, 19 nt, Artificial Sequence
  Description of Artificial Sequence: Synthetic oligonucleotide
aauauguaaguacugaucc

SEQ ID NO: 3197572 - RNA, 19 nt, Artificial Sequence
  Description of Artificial Sequence: Synthetic oligonucleotide
aauauuugaacuucuuggc

SEQ ID NO: 3197573 - RNA, 19 nt, Artificial Sequence
  Description of Artificial Sequence: Synthetic oligonucleotide
aauagcaagcaaaugaggc

SEQ ID NO: 3197574 - RNA, 19 nt, Artificial Sequence
  Description of Artificial Sequence: Synthetic oligonucleotide
aauacuugcaaggacacac

SEQ ID NO: 3197575 - RNA, 19 nt, Artificial Sequence
  Description of Artificial Sequence: Synthetic oligonucleotide
aucgauuuuauccacauuc

SEQ ID NO: 3197576 - RNA, 19 nt, Artificial Sequence
  Description of Artificial Sequence: Synthetic oligonucleotide
gacaauaauacuugcaagg

SEQ ID NO: 3197577 - RNA, 19 nt, Artificial Sequence
  Description of Artificial Sequence: Synthetic oligonucleotide
acuauaaggacgaaaaugc

SEQ ID NO: 3197578 - RNA, 19 nt, Artificial Sequence
  Description of Artificial Sequence: Synthetic oligonucleotide
uacaauagcaagcaaauga

SEQ ID NO: 3197579 - RNA, 19 nt, Artificial Sequence
  Description of Artificial Sequence: Synthetic oligonucleotide
aaugcaagauauuagacaa

SEQ ID NO: 3197580 - RNA, 19 nt, Artificial Sequence
  Description of Artificial Sequence: Synthetic oligonucleotide
cuugcaaggacacacaugg

SEQ ID NO: 3197581 - RNA, 19 nt, Artificial Sequence
  Description of Artificial Sequence: Synthetic oligonucleotide
agauccuugagcaagagcc

SEQ ID NO: 3197582 - RNA, 19 nt, Artificial Sequence
  Description of Artificial Sequence: Synthetic oligonucleotide
uguauuaacauucccuucc

SEQ ID NO: 3197583 - RNA, 19 nt, Artificial Sequence
  Description of Artificial Sequence: Synthetic oligonucleotide
aaaugcaagauauuagaca

SEQ ID NO: 3197584 - RNA, 19 nt, Artificial Sequence
  Description of Artificial Sequence: Synthetic oligonucleotide
ugcauagaugacuauaagg

SEQ ID NO: 3197585 - RNA, 19 nt, Artificial Sequence
  Description of Artificial Sequence: Synthetic oligonucleotide
uauguguuuuccauguugg

SEQ ID NO: 3197586 - RNA, 19 nt, Artificial Sequence
  Description of Artificial Sequence: Synthetic oligonucleotide
aguacugauccauaugccc

SEQ ID NO: 3197587 - RNA, 19 nt, Artificial Sequence
  Description of Artificial Sequence: Synthetic oligonucleotide
agaacaaggacaacaaugc

SEQ ID NO: 3197588 - RNA, 19 nt, Artificial Sequence
  Description of Artificial Sequence: Synthetic oligonucleotide
cucuuuaacgagaacaagg

SEQ ID NO: 3197589 - RNA, 19 nt, Artificial Sequence
  Description of Artificial Sequence: Synthetic oligonucleotide
uaagucgacaggaagaaca

SEQ ID NO: 3197590 - RNA, 19 nt, Artificial Sequence
  Description of Artificial Sequence: Synthetic oligonucleotide
aucaaaacuaagucgacag

SEQ ID NO: 3197591 - RNA, 19 nt, Artificial Sequence
  Description of Artificial Sequence: Synthetic oligonucleotide
aaauauguaaguacugauc

SEQ ID NO: 3197592 - RNA, 19 nt, Artificial Sequence
  Description of Artificial Sequence: Synthetic oligonucleotide
uuguaaauauguaaguacu

SEQ ID NO: 3197593 - RNA, 19 nt, Artificial Sequence
  Description of Artificial Sequence: Synthetic oligonucleotide
aaaaugcaagauauuagac

SEQ ID NO: 3197594 - RNA, 19 nt, Artificial Sequence
  Description of Artificial Sequence: Synthetic oligonucleotide
ucuuuaacgagaacaagga

SEQ ID NO: 3197595 - RNA, 19 nt, Artificial Sequence
  Description of Artificial Sequence: Synthetic oligonucleotide
gaaaaugcaagauauuaga

SEQ ID NO: 3197596 - RNA, 19 nt, Artificial Sequence
  Description of Artificial Sequence: Synthetic oligonucleotide
gacaacaaugcucagcaag

SEQ ID NO: 3197597 - RNA, 19 nt, Artificial Sequence
  Description of Artificial Sequence: Synthetic oligonucleotide
uuaacgagaacaaggacaa

SEQ ID NO: 3197598 - RNA, 19 nt, Artificial Sequence
  Description of Artificial Sequence: Synthetic oligonucleotide
aaacuaagucgacaggaag

SEQ ID NO: 3197599 - RNA, 19 nt, Artificial Sequence
  Description of Artificial Sequence: Synthetic oligonucleotide
uguaaauauguaaguacug

SEQ ID NO: 3197600 - RNA, 19 nt, Artificial Sequence
  Description of Artificial Sequence: Synthetic oligonucleotide
ucauuaacugaauauuuga

SEQ ID NO: 3197601 - RNA, 19 nt, Artificial Sequence
  Description of Artificial Sequence: Synthetic oligonucleotide
acaagugcaacuccaaaag

SEQ ID NO: 3197602 - RNA, 19 nt, Artificial Sequence
  Description of Artificial Sequence: Synthetic oligonucleotide
aaugaggcagcaaugauca

SEQ ID NO: 3197603 - RNA, 19 nt, Artificial Sequence
  Description of Artificial Sequence: Synthetic oligonucleotide
uuggcagcaaagcauauug

SEQ ID NO: 3197604 - RNA, 19 nt, Artificial Sequence
  Description of Artificial Sequence: Synthetic oligonucleotide
ugcuguauagaccagcugu

SEQ ID NO: 3197605 - RNA, 19 nt, Artificial Sequence
  Description of Artificial Sequence: Synthetic oligonucleotide
aagcauauuguaaauaugu

SEQ ID NO: 3197606 - RNA, 19 nt, Artificial Sequence
  Description of Artificial Sequence: Synthetic oligonucleotide
aacugaauauuugaacuuc

SEQ ID NO: 3197607 - RNA, 19 nt, Artificial Sequence
  Description of Artificial Sequence: Synthetic oligonucleotide
cuucccacgacaauaauac

SEQ ID NO: 3197608 - RNA, 19 nt, Artificial Sequence
  Description of Artificial Sequence: Synthetic oligonucleotide
auuuuauccacauuccagu

SEQ ID NO: 3197609 - RNA, 19 nt, Artificial Sequence
  Description of Artificial Sequence: Synthetic oligonucleotide
agcugaacagacuugaugu

SEQ ID NO: 3197610 - RNA, 19 nt, Artificial Sequence
  Description of Artificial Sequence: Synthetic oligonucleotide
aaaugaggcagcaaugauc

SEQ ID NO: 3197611 - RNA, 19 nt, Artificial Sequence
  Description of Artificial Sequence: Synthetic oligonucleotide
gacuauaaggacgaaaaug

SEQ ID NO: 3197612 - RNA, 19 nt, Artificial Sequence
  Description of Artificial Sequence: Synthetic oligonucleotide
uguugguacaauagcaagc

SEQ ID NO: 3197613 - RNA, 19 nt, Artificial Sequence
  Description of Artificial Sequence: Synthetic oligonucleotide
gauuuuauccacauuccag

SEQ ID NO: 3197614 - RNA, 19 nt, Artificial Sequence
  Description of Artificial Sequence: Synthetic oligonucleotide
ugcaaggacacacaugggc

SEQ ID NO: 3197615 - RNA, 19 nt, Artificial Sequence
  Description of Artificial Sequence: Synthetic oligonucleotide
gauccauaugccccaaucg

SEQ ID NO: 3197616 - RNA, 19 nt, Artificial Sequence
  Description of Artificial Sequence: Synthetic oligonucleotide
gagaacaaggacaacaaug

SEQ ID NO: 3197617 - RNA, 19 nt, Artificial Sequence
  Description of Artificial Sequence: Synthetic oligonucleotide
uauaaggacgaaaaugcaa

SEQ ID NO: 3197618 - RNA, 19 nt, Artificial Sequence
  Description of Artificial Sequence: Synthetic oligonucleotide
uagaugacuauaaggacga

SEQ ID NO: 3197619 - RNA, 19 nt, Artificial Sequence
  Description of Artificial Sequence: Synthetic oligonucleotide
ucaaaacuaagucgacagg

SEQ ID NO: 3197620 - RNA, 19 nt, Artificial Sequence
  Description of Artificial Sequence: Synthetic oligonucleotide
uguucauugguggagcacg

SEQ ID NO: 3197621 - RNA, 19 nt, Artificial Sequence
  Description of Artificial Sequence: Synthetic oligonucleotide
ugcaagauauuagacaagc

SEQ ID NO: 3197622 - RNA, 19 nt, Artificial Sequence
  Description of Artificial Sequence: Synthetic oligonucleotide
ugcaacuccaaaagcuucg

SEQ ID NO: 3197623 - RNA, 19 nt, Artificial Sequence
  Description of Artificial Sequence: Synthetic oligonucleotide
aacgagaacaaggacaaca

SEQ ID NO: 3197624 - RNA, 19 nt, Artificial Sequence
  Description of Artificial Sequence: Synthetic oligonucleotide
agaggauguucauuggugg

SEQ ID NO: 3197625 - RNA, 19 nt, Artificial Sequence
  Description of Artificial Sequence: Synthetic oligonucleotide
aaaagcuucggugagcacu

SEQ ID NO: 3197626 - RNA, 19 nt, Artificial Sequence
  Description of Artificial Sequence: Synthetic oligonucleotide
ugcucagcaaggauaagag

SEQ ID NO: 3197627 - RNA, 19 nt, Artificial Sequence
  Description of Artificial Sequence: Synthetic oligonucleotide
auauuguaaauauguaagu

SEQ ID NO: 3197628 - RNA, 19 nt, Artificial Sequence
  Description of Artificial Sequence: Synthetic oligonucleotide
aggacaacaaugcucagca

SEQ ID NO: 3197629 - RNA, 19 nt, Artificial Sequence
  Description of Artificial Sequence: Synthetic oligonucleotide
auaaggacgaaaaugcaag

SEQ ID NO: 3197630 - RNA, 19 nt, Artificial Sequence
  Description of Artificial Sequence: Synthetic oligonucleotide
uuccauguugguacaauag

SEQ ID NO: 3197631 - RNA, 19 nt, Artificial Sequence
  Description of Artificial Sequence: Synthetic oligonucleotide
uacagcaaagguccuauug

SEQ ID NO: 3197632 - RNA, 19 nt, Artificial Sequence
  Description of Artificial Sequence: Synthetic oligonucleotide
uccauguugguacaauagc

SEQ ID NO: 3197633 - RNA, 19 nt, Artificial Sequence
  Description of Artificial Sequence: Synthetic oligonucleotide
agauauuagacaagccacc

SEQ ID NO: 3197634 - RNA, 19 nt, Artificial Sequence
  Description of Artificial Sequence: Synthetic oligonucleotide
ucgauuuuauccacauucc

SEQ ID NO: 3197635 - RNA, 19 nt, Artificial Sequence
  Description of Artificial Sequence: Synthetic oligonucleotide
aacuguauuaacauucccu

SEQ ID NO: 3197636 - RNA, 19 nt, Artificial Sequence
  Description of Artificial Sequence: Synthetic oligonucleotide
gguccuauugcauagauga

SEQ ID NO: 3197637 - RNA, 19 nt, Artificial Sequence
  Description of Artificial Sequence: Synthetic oligonucleotide
uaaauauguaaguacugau

SEQ ID NO: 3197638 - RNA, 19 nt, Artificial Sequence
  Description of Artificial Sequence: Synthetic oligonucleotide
aacuacuucuaauccauau

SEQ ID NO: 3197639 - RNA, 19 nt, Artificial Sequence
  Description of Artificial Sequence: Synthetic oligonucleotide
aagagcagugcuucuagcu

SEQ ID NO: 3197640 - RNA, 19 nt, Artificial Sequence
  Description of Artificial Sequence: Synthetic oligonucleotide
ugguacaauagcaagcaaa

SEQ ID NO: 3197641 - RNA, 19 nt, Artificial Sequence
  Description of Artificial Sequence: Synthetic oligonucleotide
uguccaacuacuucuaauc

SEQ ID NO: 3197642 - RNA, 19 nt, Artificial Sequence
  Description of Artificial Sequence: Synthetic oligonucleotide
augaucaaaacuaagucga

SEQ ID NO: 3197643 - RNA, 19 nt, Artificial Sequence
  Description of Artificial Sequence: Synthetic oligonucleotide
uguucauucagcucuuuaa

SEQ ID NO: 3197644 - RNA, 19 nt, Artificial Sequence
  Description of Artificial Sequence: Synthetic oligonucleotide
acgacaauaauacuugcaa

SEQ ID NO: 3197645 - RNA, 19 nt, Artificial Sequence
  Description of Artificial Sequence: Synthetic oligonucleotide
guguuuuccauguugguac

SEQ ID NO: 3197646 - RNA, 19 nt, Artificial Sequence
  Description of Artificial Sequence: Synthetic oligonucleotide
aaguacugauccauaugcc

SEQ ID NO: 3197647 - RNA, 19 nt, Artificial Sequence
  Description of Artificial Sequence: Synthetic oligonucleotide
uuuuaaaucccggaacugu

SEQ ID NO: 3197648 - RNA, 19 nt, Artificial Sequence
  Description of Artificial Sequence: Synthetic oligonucleotide
cauagaugacuauaaggac

SEQ ID NO: 3197649 - RNA, 19 nt, Artificial Sequence
  Description of Artificial Sequence: Synthetic oligonucleotide
uaauccauauguguuuucc

SEQ ID NO: 3197650 - RNA, 19 nt, Artificial Sequence
  Description of Artificial Sequence: Synthetic oligonucleotide
gacuugauguucuacaaaa

SEQ ID NO: 3197651 - RNA, 19 nt, Artificial Sequence
  Description of Artificial Sequence: Synthetic oligonucleotide
aauccauauguguuuucca

SEQ ID NO: 3197652 - RNA, 19 nt, Artificial Sequence
  Description of Artificial Sequence: Synthetic oligonucleotide
caauagcaagcaaaugagg

SEQ ID NO: 3197653 - RNA, 19 nt, Artificial Sequence
  Description of Artificial Sequence: Synthetic oligonucleotide
auauuugaacuucuuggca

SEQ ID NO: 3197654 - RNA, 19 nt, Artificial Sequence
  Description of Artificial Sequence: Synthetic oligonucleotide
auguugguacaauagcaag

SEQ ID NO: 3197655 - RNA, 19 nt, Artificial Sequence
  Description of Artificial Sequence: Synthetic oligonucleotide
uauuguaaauauguaagua

SEQ ID NO: 3197656 - RNA, 19 nt, Artificial Sequence
  Description of Artificial Sequence: Synthetic oligonucleotide
auaauacuugcaaggacac

SEQ ID NO: 3197657 - RNA, 19 nt, Artificial Sequence
  Description of Artificial Sequence: Synthetic oligonucleotide
acuguauuaacauucccuu

SEQ ID NO: 3197658 - RNA, 19 nt, Artificial Sequence
  Description of Artificial Sequence: Synthetic oligonucleotide
uagcaagcaaaugaggcag

SEQ ID NO: 3197659 - RNA, 19 nt, Artificial Sequence
  Description of Artificial Sequence: Synthetic oligonucleotide
auagcaagcaaaugaggca

SEQ ID NO: 3197660 - RNA, 19 nt, Artificial Sequence
  Description of Artificial Sequence: Synthetic oligonucleotide
aagugcaacuccaaaagcu

SEQ ID NO: 3197661 - RNA, 19 nt, Artificial Sequence
  Description of Artificial Sequence: Synthetic oligonucleotide
aaagcauauuguaaauaug

SEQ ID NO: 3197662 - RNA, 19 nt, Artificial Sequence
  Description of Artificial Sequence: Synthetic oligonucleotide
acuccaaaagcuucgguga

SEQ ID NO: 3197663 - RNA, 19 nt, Artificial Sequence
  Description of Artificial Sequence: Synthetic oligonucleotide
uuuggaauguguccaacua

SEQ ID NO: 3197664 - RNA, 19 nt, Artificial Sequence
  Description of Artificial Sequence: Synthetic oligonucleotide
aacagacuugauguucuac

SEQ ID NO: 3197665 - RNA, 19 nt, Artificial Sequence
  Description of Artificial Sequence: Synthetic oligonucleotide
acagacuugauguucuaca

SEQ ID NO: 3197666 - RNA, 19 nt, Artificial Sequence
  Description of Artificial Sequence: Synthetic oligonucleotide
uagcugaacagacuugaug

SEQ ID NO: 3197667 - RNA, 19 nt, Artificial Sequence
  Description of Artificial Sequence: Synthetic oligonucleotide
aacuaagucgacaggaaga

SEQ ID NO: 3197668 - RNA, 19 nt, Artificial Sequence
  Description of Artificial Sequence: Synthetic oligonucleotide
uguauagaccagcuguccu

SEQ ID NO: 3197669 - RNA, 19 nt, Artificial Sequence
  Description of Artificial Sequence: Synthetic oligonucleotide
uuucuuuuaaacuguucau

SEQ ID NO: 3197670 - RNA, 19 nt, Artificial Sequence
  Description of Artificial Sequence: Synthetic oligonucleotide
uccaacuacuucuaaucca

SEQ ID NO: 3197671 - RNA, 19 nt, Artificial Sequence
  Description of Artificial Sequence: Synthetic oligonucleotide
agaaacuucaucuucaccu

SEQ ID NO: 3197672 - RNA, 19 nt, Artificial Sequence
  Description of Artificial Sequence: Synthetic oligonucleotide
aaagcugagauccgagggc

SEQ ID NO: 3197673 - RNA, 19 nt, Artificial Sequence
  Description of Artificial Sequence: Synthetic oligonucleotide
ugucuuguugaaaagacug

SEQ ID NO: 3197674 - RNA, 19 nt, Artificial Sequence
  Description of Artificial Sequence: Synthetic oligonucleotide
aaugguugacaguagcuuc

SEQ ID NO: 3197675 - RNA, 19 nt, Artificial Sequence
  Description of Artificial Sequence: Synthetic oligonucleotide
ugauucagaaacuucaucu

SEQ ID NO: 3197676 - RNA, 19 nt, Artificial Sequence
  Description of Artificial Sequence: Synthetic oligonucleotide
gaugaggaacgguagaugg

SEQ ID NO: 3197677 - RNA, 19 nt, Artificial Sequence
  Description of Artificial Sequence: Synthetic oligonucleotide
aaaagacuggacaaucucc

SEQ ID NO: 3197678 - RNA, 19 nt, Artificial Sequence
  Description of Artificial Sequence: Synthetic oligonucleotide
aacgguagauggaagaacc

SEQ ID NO: 3197679 - RNA, 19 nt, Artificial Sequence
  Description of Artificial Sequence: Synthetic oligonucleotide
aggagauucgucuuugggc

SEQ ID NO: 3197680 - RNA, 19 nt, Artificial Sequence
  Description of Artificial Sequence: Synthetic oligonucleotide
aaccucgaucucuaaaggc

SEQ ID NO: 3197681 - RNA, 19 nt, Artificial Sequence
  Description of Artificial Sequence: Synthetic oligonucleotide
uucugauucagaaacuuca

SEQ ID NO: 3197682 - RNA, 19 nt, Artificial Sequence
  Description of Artificial Sequence: Synthetic oligonucleotide
uuugucauccagcaaagcu

SEQ ID NO: 3197683 - RNA, 19 nt, Artificial Sequence
  Description of Artificial Sequence: Synthetic oligonucleotide
uuuuguuucccuuuccuug

SEQ ID NO: 3197684 - RNA, 19 nt, Artificial Sequence
  Description of Artificial Sequence: Synthetic oligonucleotide
acuacucuugcuuucagag

SEQ ID NO: 3197685 - RNA, 19 nt, Artificial Sequence
  Description of Artificial Sequence: Synthetic oligonucleotide
ugaagaaggagauucgucu

SEQ ID NO: 3197686 - RNA, 19 nt, Artificial Sequence
  Description of Artificial Sequence: Synthetic oligonucleotide
uuguugaaaagacuggaca

SEQ ID NO: 3197687 - RNA, 19 nt, Artificial Sequence
  Description of Artificial Sequence: Synthetic oligonucleotide
uccagcaaagcugagaucc

SEQ ID NO: 3197688 - RNA, 19 nt, Artificial Sequence
  Description of Artificial Sequence: Synthetic oligonucleotide
uucaucuucaccuuccucu

SEQ ID NO: 3197689 - RNA, 19 nt, Artificial Sequence
  Description of Artificial Sequence: Synthetic oligonucleotide
agaaccucgaucucuaaag

SEQ ID NO: 3197690 - RNA, 19 nt, Artificial Sequence
  Description of Artificial Sequence: Synthetic oligonucleotide
guagaagaggcagagaagg

SEQ ID NO: 3197691 - RNA, 19 nt, Artificial Sequence
  Description of Artificial Sequence: Synthetic oligonucleotide
uucagaguuggaaugguug

SEQ ID NO: 3197692 - RNA, 19 nt, Artificial Sequence
  Description of Artificial Sequence: Synthetic oligonucleotide
aaggagauucgucuuuggg

SEQ ID NO: 3197693 - RNA, 19 nt, Artificial Sequence
  Description of Artificial Sequence: Synthetic oligonucleotide
agauggaagaaccucgauc

SEQ ID NO: 3197694 - RNA, 19 nt, Artificial Sequence
  Description of Artificial Sequence: Synthetic oligonucleotide
uugucauccagcaaagcug

SEQ ID NO: 3197695 - RNA, 19 nt, Artificial Sequence
  Description of Artificial Sequence: Synthetic oligonucleotide
auucagaaacuucaucuuc

SEQ ID NO: 3197696 - RNA, 19 nt, Artificial Sequence
  Description of Artificial Sequence: Synthetic oligonucleotide
ugguagaagaggcagagaa

SEQ ID NO: 3197697 - RNA, 19 nt, Artificial Sequence
  Description of Artificial Sequence: Synthetic oligonucleotide
uucagaaacuucaucuuca

SEQ ID NO: 3197698 - RNA, 19 nt, Artificial Sequence
  Description of Artificial Sequence: Synthetic oligonucleotide
ucucuaaaggcuucccugg

SEQ ID NO: 3197699 - RNA, 19 nt, Artificial Sequence
  Description of Artificial Sequence: Synthetic oligonucleotide
ucugaacuggagcugcugg

SEQ ID NO: 3197700 - RNA, 19 nt, Artificial Sequence
  Description of Artificial Sequence: Synthetic oligonucleotide
ucugucuuguugaaaagac

SEQ ID NO: 3197701 - RNA, 19 nt, Artificial Sequence
  Description of Artificial Sequence: Synthetic oligonucleotide
aucuucaccuuccucuucc

SEQ ID NO: 3197702 - RNA, 19 nt, Artificial Sequence
  Description of Artificial Sequence: Synthetic oligonucleotide
caguuucugauucagaaac

SEQ ID NO: 3197703 - RNA, 19 nt, Artificial Sequence
  Description of Artificial Sequence: Synthetic oligonucleotide
ucuucugucuuguugaaaa

SEQ ID NO: 3197704 - RNA, 19 nt, Artificial Sequence
  Description of Artificial Sequence: Synthetic oligonucleotide
aauaguuuuguuucccuuu

SEQ ID NO: 3197705 - RNA, 19 nt, Artificial Sequence
  Description of Artificial Sequence: Synthetic oligonucleotide
uguugaaaagacuggacaa

SEQ ID NO: 3197706 - RNA, 19 nt, Artificial Sequence
  Description of Artificial Sequence: Synthetic oligonucleotide
agguauucugagcuggggc

SEQ ID NO: 3197707 - RNA, 19 nt, Artificial Sequence
  Description of Artificial Sequence: Synthetic oligonucleotide
auaguuuuguuucccuuuc

SEQ ID NO: 3197708 - RNA, 19 nt, Artificial Sequence
  Description of Artificial Sequence: Synthetic oligonucleotide
aacuucaucuucaccuucc

SEQ ID NO: 3197709 - RNA, 19 nt, Artificial Sequence
  Description of Artificial Sequence: Synthetic oligonucleotide
gauggaagaaccucgaucu

SEQ ID NO: 3197710 - RNA, 19 nt, Artificial Sequence
  Description of Artificial Sequence: Synthetic oligonucleotide
uccaugaagaaggagauuc

SEQ ID NO: 3197711 - RNA, 19 nt, Artificial Sequence
  Description of Artificial Sequence: Synthetic oligonucleotide
uccaugauacuacucuugc

SEQ ID NO: 3197712 - RNA, 19 nt, Artificial Sequence
  Description of Artificial Sequence: Synthetic oligonucleotide
uuaucugccuccuucucag

SEQ ID NO: 3197713 - RNA, 19 nt, Artificial Sequence
  Description of Artificial Sequence: Synthetic oligonucleotide
ugcuccaugauacuacucu

SEQ ID NO: 3197714 - RNA, 19 nt, Artificial Sequence
  Description of Artificial Sequence: Synthetic oligonucleotide
acaaucuccugguagaaga

SEQ ID NO: 3197715 - RNA, 19 nt, Artificial Sequence
  Description of Artificial Sequence: Synthetic oligonucleotide
aaacuucaucuucaccuuc

SEQ ID NO: 3197716 - RNA, 19 nt, Artificial Sequence
  Description of Artificial Sequence: Synthetic oligonucleotide
ucuuccucugaacuggagc

SEQ ID NO: 3197717 - RNA, 19 nt, Artificial Sequence
  Description of Artificial Sequence: Synthetic oligonucleotide
agauccgagggcuugauga

SEQ ID NO: 3197718 - RNA, 19 nt, Artificial Sequence
  Description of Artificial Sequence: Synthetic oligonucleotide
agacuggacaaucuccugg

SEQ ID NO: 3197719 - RNA, 19 nt, Artificial Sequence
  Description of Artificial Sequence: Synthetic oligonucleotide
caaagcugagauccgaggg

SEQ ID NO: 3197720 - RNA, 19 nt, Artificial Sequence
  Description of Artificial Sequence: Synthetic oligonucleotide
uuuaucugccuccuucuca

SEQ ID NO: 3197721 - RNA, 19 nt, Artificial Sequence
  Description of Artificial Sequence: Synthetic oligonucleotide
ucuuugucauccagcaaag

SEQ ID NO: 3197722 - RNA, 19 nt, Artificial Sequence
  Description of Artificial Sequence: Synthetic oligonucleotide
uugucuuugucauccagca

SEQ ID NO: 3197723 - RNA, 19 nt, Artificial Sequence
  Description of Artificial Sequence: Synthetic oligonucleotide
ugaaaagacuggacaaucu

SEQ ID NO: 3197724 - RNA, 19 nt, Artificial Sequence
  Description of Artificial Sequence: Synthetic oligonucleotide
ugucauccagcaaagcuga

SEQ ID NO: 3197725 - RNA, 19 nt, Artificial Sequence
  Description of Artificial Sequence: Synthetic oligonucleotide
guugacaguagcuucuggc

SEQ ID NO: 3197726 - RNA, 19 nt, Artificial Sequence
  Description of Artificial Sequence: Synthetic oligonucleotide
cuugucuuugucauccagc

SEQ ID NO: 3197727 - RNA, 19 nt, Artificial Sequence
  Description of Artificial Sequence: Synthetic oligonucleotide
uacucuugcuuucagaguu

SEQ ID NO: 3197728 - RNA, 19 nt, Artificial Sequence
  Description of Artificial Sequence: Synthetic oligonucleotide
gaaaagacuggacaaucuc

SEQ ID NO: 3197729 - RNA, 19 nt, Artificial Sequence
  Description of Artificial Sequence: Synthetic oligonucleotide
aucucuaaaggcuucccug

SEQ ID NO: 3197730 - RNA, 19 nt, Artificial Sequence
  Description of Artificial Sequence: Synthetic oligonucleotide
gaaccucgaucucuaaagg

SEQ ID NO: 3197731 - RNA, 19 nt, Artificial Sequence
  Description of Artificial Sequence: Synthetic oligonucleotide
agaagguauucugagcugg

SEQ ID NO: 3197732 - RNA, 19 nt, Artificial Sequence
  Description of Artificial Sequence: Synthetic oligonucleotide
aaggcuucccuggaguugg

SEQ ID NO: 3197733 - RNA, 19 nt, Artificial Sequence
  Description of Artificial Sequence: Synthetic oligonucleotide
ucuaaaggcuucccuggag

SEQ ID NO: 3197734 - RNA, 19 nt, Artificial Sequence
  Description of Artificial Sequence: Synthetic oligonucleotide
ucagaguuggaaugguuga

SEQ ID NO: 3197735 - RNA, 19 nt, Artificial Sequence
  Description of Artificial Sequence: Synthetic oligonucleotide
ccagucuccaugaagaagg

SEQ ID NO: 3197736 - RNA, 19 nt, Artificial Sequence
  Description of Artificial Sequence: Synthetic oligonucleotide
aaauaguuuuguuucccuu

SEQ ID NO: 3197737 - RNA, 19 nt, Artificial Sequence
  Description of Artificial Sequence: Synthetic oligonucleotide
ugcuuucagaguuggaaug

SEQ ID NO: 3197738 - RNA, 19 nt, Artificial Sequence
  Description of Artificial Sequence: Synthetic oligonucleotide
gaguuggaaugguugacag

SEQ ID NO: 3197739 - RNA, 19 nt, Artificial Sequence
  Description of Artificial Sequence: Synthetic oligonucleotide
uggaaugguugacaguagc

SEQ ID NO: 3197740 - RNA, 19 nt, Artificial Sequence
  Description of Artificial Sequence: Synthetic oligonucleotide
ucuuguugaaaagacugga

SEQ ID NO: 3197741 - RNA, 19 nt, Artificial Sequence
  Description of Artificial Sequence: Synthetic oligonucleotide
uugacaguagcuucuggcu

SEQ ID NO: 3197742 - RNA, 19 nt, Artificial Sequence
  Description of Artificial Sequence: Synthetic oligonucleotide
aaagacuggacaaucuccu

SEQ ID NO: 3197743 - RNA, 19 nt, Artificial Sequence
  Description of Artificial Sequence: Synthetic oligonucleotide
uuccuugucuuugucaucc

SEQ ID NO: 3197744 - RNA, 19 nt, Artificial Sequence
  Description of Artificial Sequence: Synthetic oligonucleotide
aguucuuguuuucuuccuc

SEQ ID NO: 3197745 - RNA, 19 nt, Artificial Sequence
  Description of Artificial Sequence: Synthetic oligonucleotide
aaucuccugguagaagagg

SEQ ID NO: 3197746 - RNA, 19 nt, Artificial Sequence
  Description of Artificial Sequence: Synthetic oligonucleotide
cuuguugaaaagacuggac

SEQ ID NO: 3197747 - RNA, 19 nt, Artificial Sequence
  Description of Artificial Sequence: Synthetic oligonucleotide
uuuguuucccuuuccuugu

SEQ ID NO: 3197748 - RNA, 19 nt, Artificial Sequence
  Description of Artificial Sequence: Synthetic oligonucleotide
uucaccuuccucuuccucu

SEQ ID NO: 3197749 - RNA, 19 nt, Artificial Sequence
  Description of Artificial Sequence: Synthetic oligonucleotide
uggacaaucuccugguaga

SEQ ID NO: 3197750 - RNA, 19 nt, Artificial Sequence
  Description of Artificial Sequence: Synthetic oligonucleotide
aucuccugguagaagaggc

SEQ ID NO: 3197751 - RNA, 19 nt, Artificial Sequence
  Description of Artificial Sequence: Synthetic oligonucleotide
uuggccacuucacucagca

SEQ ID NO: 3197752 - RNA, 19 nt, Artificial Sequence
  Description of Artificial Sequence: Synthetic oligonucleotide
gagggcuugaugaggaacg

SEQ ID NO: 3197753 - RNA, 19 nt, Artificial Sequence
  Description of Artificial Sequence: Synthetic oligonucleotide
uccucuuccucugaacugg

SEQ ID NO: 3197754 - RNA, 19 nt, Artificial Sequence
  Description of Artificial Sequence: Synthetic oligonucleotide
ucacucagcauguugugac

SEQ ID NO: 3197755 - RNA, 19 nt, Artificial Sequence
  Description of Artificial Sequence: Synthetic oligonucleotide
uguuuucuuccucuguuuc

SEQ ID NO: 3197756 - RNA, 19 nt, Artificial Sequence
  Description of Artificial Sequence: Synthetic oligonucleotide
uuuccugagucccagucuc

SEQ ID NO: 3197757 - RNA, 19 nt, Artificial Sequence
  Description of Artificial Sequence: Synthetic oligonucleotide
gugacugccaguuuuccug

SEQ ID NO: 3197758 - RNA, 19 nt, Artificial Sequence
  Description of Artificial Sequence: Synthetic oligonucleotide
ucuccaugaagaaggagau

SEQ ID NO: 3197759 - RNA, 19 nt, Artificial Sequence
  Description of Artificial Sequence: Synthetic oligonucleotide
aguuuuguuucccuuuccu

SEQ ID NO: 3197760 - RNA, 19 nt, Artificial Sequence
  Description of Artificial Sequence: Synthetic oligonucleotide
uuucugauucagaaacuuc

SEQ ID NO: 3197761 - RNA, 19 nt, Artificial Sequence
  Description of Artificial Sequence: Synthetic oligonucleotide
agcauguugugacugccag

SEQ ID NO: 3197762 - RNA, 19 nt, Artificial Sequence
  Description of Artificial Sequence: Synthetic oligonucleotide
uguugugacugccaguuuu

SEQ ID NO: 3197763 - RNA, 19 nt, Artificial Sequence
  Description of Artificial Sequence: Synthetic oligonucleotide
gucuuugucauccagcaaa

SEQ ID NO: 3197764 - RNA, 19 nt, Artificial Sequence
  Description of Artificial Sequence: Synthetic oligonucleotide
gguagauggaagaaccucg

SEQ ID NO: 3197765 - RNA, 19 nt, Artificial Sequence
  Description of Artificial Sequence: Synthetic oligonucleotide
uuuuccugagucccagucu

SEQ ID NO: 3197766 - RNA, 19 nt, Artificial Sequence
  Description of Artificial Sequence: Synthetic oligonucleotide
ucugauucagaaacuucau

SEQ ID NO: 3197767 - RNA, 19 nt, Artificial Sequence
  Description of Artificial Sequence: Synthetic oligonucleotide
ucuuguuuucuuccucugu

SEQ ID NO: 3197768 - RNA, 19 nt, Artificial Sequence
  Description of Artificial Sequence: Synthetic oligonucleotide
cuggacaaucuccugguag

SEQ ID NO: 3197769 - RNA, 19 nt, Artificial Sequence
  Description of Artificial Sequence: Synthetic oligonucleotide
aagaaccucgaucucuaaa

SEQ ID NO: 3197770 - RNA, 19 nt, Artificial Sequence
  Description of Artificial Sequence: Synthetic oligonucleotide
uugaaaagacuggacaauc

SEQ ID NO: 3197771 - RNA, 19 nt, Artificial Sequence
  Description of Artificial Sequence: Synthetic oligonucleotide
aguuucaacaacuagcugc

SEQ ID NO: 3197772 - RNA, 19 nt, Artificial Sequence
  Description of Artificial Sequence: Synthetic oligonucleotide
uuuuccaagaauaacacag

SEQ ID NO: 3197773 - RNA, 19 nt, Artificial Sequence
  Description of Artificial Sequence: Synthetic oligonucleotide
uguaguuucaacaacuagc

SEQ ID NO: 3197774 - RNA, 19 nt, Artificial Sequence
  Description of Artificial Sequence: Synthetic oligonucleotide
aagaauaacacagcaauag

SEQ ID NO: 3197775 - RNA, 19 nt, Artificial Sequence
  Description of Artificial Sequence: Synthetic oligonucleotide
uagacuauguuacuggucc

SEQ ID NO: 3197776 - RNA, 19 nt, Artificial Sequence
  Description of Artificial Sequence: Synthetic oligonucleotide
aagucuugggcuuggagac

SEQ ID NO: 3197777 - RNA, 19 nt, Artificial Sequence
  Description of Artificial Sequence: Synthetic oligonucleotide
ugugggucagcucaaaggg

SEQ ID NO: 3197778 - RNA, 19 nt, Artificial Sequence
  Description of Artificial Sequence: Synthetic oligonucleotide
ugaaucaugguguauguug

SEQ ID NO: 3197779 - RNA, 19 nt, Artificial Sequence
  Description of Artificial Sequence: Synthetic oligonucleotide
uguauguuggacacugugg

SEQ ID NO: 3197780 - RNA, 19 nt, Artificial Sequence
  Description of Artificial Sequence: Synthetic oligonucleotide
uugaauacgauugugugcc

SEQ ID NO: 3197781 - RNA, 19 nt, Artificial Sequence
  Description of Artificial Sequence: Synthetic oligonucleotide
accaucugcaacuuguccc

SEQ ID NO: 3197782 - RNA, 19 nt, Artificial Sequence
  Description of Artificial Sequence: Synthetic oligonucleotide
uugaccuuggccuucacag

SEQ ID NO: 3197783 - RNA, 19 nt, Artificial Sequence
  Description of Artificial Sequence: Synthetic oligonucleotide
aauacgauugugugccagg

SEQ ID NO: 3197784 - RNA, 19 nt, Artificial Sequence
  Description of Artificial Sequence: Synthetic oligonucleotide
aauaacacagcaauagacu

SEQ ID NO: 3197785 - RNA, 19 nt, Artificial Sequence
  Description of Artificial Sequence: Synthetic oligonucleotide
guauguuggacacuguggg

SEQ ID NO: 3197786 - RNA, 19 nt, Artificial Sequence
  Description of Artificial Sequence: Synthetic oligonucleotide
ucuugaauacgauugugug

SEQ ID NO: 3197787 - RNA, 19 nt, Artificial Sequence
  Description of Artificial Sequence: Synthetic oligonucleotide
aauauugcugaugcccacc

SEQ ID NO: 3197788 - RNA, 19 nt, Artificial Sequence
  Description of Artificial Sequence: Synthetic oligonucleotide
uguuacugguccaagauau

SEQ ID NO: 3197789 - RNA, 19 nt, Artificial Sequence
  Description of Artificial Sequence: Synthetic oligonucleotide
acaaccagaggagagagcg

SEQ ID NO: 3197790 - RNA, 19 nt, Artificial Sequence
  Description of Artificial Sequence: Synthetic oligonucleotide
aauagacuauguuacuggu

SEQ ID NO: 3197791 - RNA, 19 nt, Artificial Sequence
  Description of Artificial Sequence: Synthetic oligonucleotide
acgauugugugccagggac

SEQ ID NO: 3197792 - RNA, 19 nt, Artificial Sequence
  Description of Artificial Sequence: Synthetic oligonucleotide
gagguugaggugcaaaagg

SEQ ID NO: 3197793 - RNA, 19 nt, Artificial Sequence
  Description of Artificial Sequence: Synthetic oligonucleotide
ucugacuccaggaggaugc

SEQ ID NO: 3197794 - RNA, 19 nt, Artificial Sequence
  Description of Artificial Sequence: Synthetic oligonucleotide
aaaccuucccaucacggug

SEQ ID NO: 3197795 - RNA, 19 nt, Artificial Sequence
  Description of Artificial Sequence: Synthetic oligonucleotide
gacacugugggucaaagca

SEQ ID NO: 3197796 - RNA, 19 nt, Artificial Sequence
  Description of Artificial Sequence: Synthetic oligonucleotide
auaucucccaagaagauag

SEQ ID NO: 3197797 - RNA, 19 nt, Artificial Sequence
  Description of Artificial Sequence: Synthetic oligonucleotide
uucuuuacaacuuccccug

SEQ ID NO: 3197798 - RNA, 19 nt, Artificial Sequence
  Description of Artificial Sequence: Synthetic oligonucleotide
cuugaauacgauugugugc

SEQ ID NO: 3197799 - RNA, 19 nt, Artificial Sequence
  Description of Artificial Sequence: Synthetic oligonucleotide
aggaaggcgaucgagaccg

SEQ ID NO: 3197800 - RNA, 19 nt, Artificial Sequence
  Description of Artificial Sequence: Synthetic oligonucleotide
aaggaccuuguucccaggc

SEQ ID NO: 3197801 - RNA, 19 nt, Artificial Sequence
  Description of Artificial Sequence: Synthetic oligonucleotide
acagcaauagacuauguua

SEQ ID NO: 3197802 - RNA, 19 nt, Artificial Sequence
  Description of Artificial Sequence: Synthetic oligonucleotide
gaaucaugguguauguugg

SEQ ID NO: 3197803 - RNA, 19 nt, Artificial Sequence
  Description of Artificial Sequence: Synthetic oligonucleotide
uccaccaagguaauauugc

SEQ ID NO: 3197804 - RNA, 19 nt, Artificial Sequence
  Description of Artificial Sequence: Synthetic oligonucleotide
ucaucuucugcucagggau

SEQ ID NO: 3197805 - RNA, 19 nt, Artificial Sequence
  Description of Artificial Sequence: Synthetic oligonucleotide
auugcugaugcccaccauc

SEQ ID NO: 3197806 - RNA, 19 nt, Artificial Sequence
  Description of Artificial Sequence: Synthetic oligonucleotide
uuuacaacuuccccugucu

SEQ ID NO: 3197807 - RNA, 19 nt, Artificial Sequence
  Description of Artificial Sequence: Synthetic oligonucleotide
uuccaagaauaacacagca

SEQ ID NO: 3197808 - RNA, 19 nt, Artificial Sequence
  Description of Artificial Sequence: Synthetic oligonucleotide
aacacagcaauagacuaug

SEQ ID NO: 3197809 - RNA, 19 nt, Artificial Sequence
  Description of Artificial Sequence: Synthetic oligonucleotide
uauguuacugguccaagau

SEQ ID NO: 3197810 - RNA, 19 nt, Artificial Sequence
  Description of Artificial Sequence: Synthetic oligonucleotide
uucaacaacuagcugcucu

SEQ ID NO: 3197811 - RNA, 19 nt, Artificial Sequence
  Description of Artificial Sequence: Synthetic oligonucleotide
augguuaccuucccuuugc

SEQ ID NO: 3197812 - RNA, 19 nt, Artificial Sequence
  Description of Artificial Sequence: Synthetic oligonucleotide
cagcaauagacuauguuac

SEQ ID NO: 3197813 - RNA, 19 nt, Artificial Sequence
  Description of Artificial Sequence: Synthetic oligonucleotide
aggagagagcgguucagcc

SEQ ID NO: 3197814 - RNA, 19 nt, Artificial Sequence
  Description of Artificial Sequence: Synthetic oligonucleotide
gaaaaccuucccaucacgg

SEQ ID NO: 3197815 - RNA, 19 nt, Artificial Sequence
  Description of Artificial Sequence: Synthetic oligonucleotide
caucuuuucugacuugucc

SEQ ID NO: 3197816 - RNA, 19 nt, Artificial Sequence
  Description of Artificial Sequence: Synthetic oligonucleotide
ucaacaacuagcugcucug

SEQ ID NO: 3197817 - RNA, 19 nt, Artificial Sequence
  Description of Artificial Sequence: Synthetic oligonucleotide
agaauaacacagcaauaga

SEQ ID NO: 3197818 - RNA, 19 nt, Artificial Sequence
  Description of Artificial Sequence: Synthetic oligonucleotide
aucuuuucugacuugucca

SEQ ID NO: 3197819 - RNA, 19 nt, Artificial Sequence
  Description of Artificial Sequence: Synthetic oligonucleotide
aacuagcugcucugacucc

SEQ ID NO: 3197820 - RNA, 19 nt, Artificial Sequence
  Description of Artificial Sequence: Synthetic oligonucleotide
ucugcaucuuuucugacuu

SEQ ID NO: 3197821 - RNA, 19 nt, Artificial Sequence
  Description of Artificial Sequence: Synthetic oligonucleotide
auaacacagcaauagacua

SEQ ID NO: 3197822 - RNA, 19 nt, Artificial Sequence
  Description of Artificial Sequence: Synthetic oligonucleotide
uuuucugacuuguccacca

SEQ ID NO: 3197823 - RNA, 19 nt, Artificial Sequence
  Description of Artificial Sequence: Synthetic oligonucleotide
ugugccagggacaaccaga

SEQ ID NO: 3197824 - RNA, 19 nt, Artificial Sequence
  Description of Artificial Sequence: Synthetic oligonucleotide
caugguguauguuggacac

SEQ ID NO: 3197825 - RNA, 19 nt, Artificial Sequence
  Description of Artificial Sequence: Synthetic oligonucleotide
gauagcugugcccuccucc

SEQ ID NO: 3197826 - RNA, 19 nt, Artificial Sequence
  Description of Artificial Sequence: Synthetic oligonucleotide
ucaugguguauguuggaca

SEQ ID NO: 3197827 - RNA, 19 nt, Artificial Sequence
  Description of Artificial Sequence: Synthetic oligonucleotide
cuuugaggcaucuucuuuc

SEQ ID NO: 3197828 - RNA, 19 nt, Artificial Sequence
  Description of Artificial Sequence: Synthetic oligonucleotide
uauugcacggcggugagga

SEQ ID NO: 3197829 - RNA, 19 nt, Artificial Sequence
  Description of Artificial Sequence: Synthetic oligonucleotide
cuuucuuagggguuccuug

SEQ ID NO: 3197830 - RNA, 19 nt, Artificial Sequence
  Description of Artificial Sequence: Synthetic oligonucleotide
gagaccguuccugugaucc

SEQ ID NO: 3197831 - RNA, 19 nt, Artificial Sequence
  Description of Artificial Sequence: Synthetic oligonucleotide
uauugucugcaucuuuucu

SEQ ID NO: 3197832 - RNA, 19 nt, Artificial Sequence
  Description of Artificial Sequence: Synthetic oligonucleotide
aaagggacgcaggaccucg

SEQ ID NO: 3197833 - RNA, 19 nt, Artificial Sequence
  Description of Artificial Sequence: Synthetic oligonucleotide
gugaggaaggcuuccagcc

SEQ ID NO: 3197834 - RNA, 19 nt, Artificial Sequence
  Description of Artificial Sequence: Synthetic oligonucleotide
uccugaaucaugguguaug

SEQ ID NO: 3197835 - RNA, 19 nt, Artificial Sequence
  Description of Artificial Sequence: Synthetic oligonucleotide
ucccuugucuugaauacga

SEQ ID NO: 3197836 - RNA, 19 nt, Artificial Sequence
  Description of Artificial Sequence: Synthetic oligonucleotide
uccaagaauaacacagcaa

SEQ ID NO: 3197837 - RNA, 19 nt, Artificial Sequence
  Description of Artificial Sequence: Synthetic oligonucleotide
ugugggucaaagcaguuuu

SEQ ID NO: 3197838 - RNA, 19 nt, Artificial Sequence
  Description of Artificial Sequence: Synthetic oligonucleotide
aggccuagauagcugugcc

SEQ ID NO: 3197839 - RNA, 19 nt, Artificial Sequence
  Description of Artificial Sequence: Synthetic oligonucleotide
aggcgaucgagaccguucc

SEQ ID NO: 3197840 - RNA, 19 nt, Artificial Sequence
  Description of Artificial Sequence: Synthetic oligonucleotide
uucacaggaucccuuggca

SEQ ID NO: 3197841 - RNA, 19 nt, Artificial Sequence
  Description of Artificial Sequence: Synthetic oligonucleotide
uucccaggcaggaaaaccu

SEQ ID NO: 3197842 - RNA, 19 nt, Artificial Sequence
  Description of Artificial Sequence: Synthetic oligonucleotide
uuaaccaucucuguaguuu

SEQ ID NO: 3197843 - RNA, 19 nt, Artificial Sequence
  Description of Artificial Sequence: Synthetic oligonucleotide
ugcacggcggugaggaagg

SEQ ID NO: 3197844 - RNA, 19 nt, Artificial Sequence
  Description of Artificial Sequence: Synthetic oligonucleotide
uuacugguccaagauaucu

SEQ ID NO: 3197845 - RNA, 19 nt, Artificial Sequence
  Description of Artificial Sequence: Synthetic oligonucleotide
acuucucuuccuucuuuac

SEQ ID NO: 3197846 - RNA, 19 nt, Artificial Sequence
  Description of Artificial Sequence: Synthetic oligonucleotide
uccaggagaggguuaacca

SEQ ID NO: 3197847 - RNA, 19 nt, Artificial Sequence
  Description of Artificial Sequence: Synthetic oligonucleotide
aguuccugaaucauggugu

SEQ ID NO: 3197848 - RNA, 19 nt, Artificial Sequence
  Description of Artificial Sequence: Synthetic oligonucleotide
ugcucugacuccaggagga

SEQ ID NO: 3197849 - RNA, 19 nt, Artificial Sequence
  Description of Artificial Sequence: Synthetic oligonucleotide
aagauagggcugcccgugg

SEQ ID NO: 3197850 - RNA, 19 nt, Artificial Sequence
  Description of Artificial Sequence: Synthetic oligonucleotide
ugguguauguuggacacug

SEQ ID NO: 3197851 - RNA, 19 nt, Artificial Sequence
  Description of Artificial Sequence: Synthetic oligonucleotide
aucaugguguauguuggac

SEQ ID NO: 3197852 - RNA, 19 nt, Artificial Sequence
  Description of Artificial Sequence: Synthetic oligonucleotide
uuggccgaagucuugggcu

SEQ ID NO: 3197853 - RNA, 19 nt, Artificial Sequence
  Description of Artificial Sequence: Synthetic oligonucleotide
ucugugauccgguuucgga

SEQ ID NO: 3197854 - RNA, 19 nt, Artificial Sequence
  Description of Artificial Sequence: Synthetic oligonucleotide
ucucuguaguuucaacaac

SEQ ID NO: 3197855 - RNA, 19 nt, Artificial Sequence
  Description of Artificial Sequence: Synthetic oligonucleotide
ucaaagggacgcaggaccu

SEQ ID NO: 3197856 - RNA, 19 nt, Artificial Sequence
  Description of Artificial Sequence: Synthetic oligonucleotide
caacuagcugcucugacuc

SEQ ID NO: 3197857 - RNA, 19 nt, Artificial Sequence
  Description of Artificial Sequence: Synthetic oligonucleotide
uuuuauugucugcaucuuu

SEQ ID NO: 3197858 - RNA, 19 nt, Artificial Sequence
  Description of Artificial Sequence: Synthetic oligonucleotide
cuguaguuucaacaacuag

SEQ ID NO: 3197859 - RNA, 19 nt, Artificial Sequence
  Description of Artificial Sequence: Synthetic oligonucleotide
guguauguuggacacugug

SEQ ID NO: 3197860 - RNA, 19 nt, Artificial Sequence
  Description of Artificial Sequence: Synthetic oligonucleotide
uaaccaucucuguaguuuc

SEQ ID NO: 3197861 - RNA, 19 nt, Artificial Sequence
  Description of Artificial Sequence: Synthetic oligonucleotide
gagagagcgguucagccuc

SEQ ID NO: 3197862 - RNA, 19 nt, Artificial Sequence
  Description of Artificial Sequence: Synthetic oligonucleotide
aaggcgaucgagaccguuc

SEQ ID NO: 3197863 - RNA, 19 nt, Artificial Sequence
  Description of Artificial Sequence: Synthetic oligonucleotide
ugguccaagauaucuccca

SEQ ID NO: 3197864 - RNA, 19 nt, Artificial Sequence
  Description of Artificial Sequence: Synthetic oligonucleotide
gacuccaggaggaugcugc

SEQ ID NO: 3197865 - RNA, 19 nt, Artificial Sequence
  Description of Artificial Sequence: Synthetic oligonucleotide
cacaggaucccuuggcagc

SEQ ID NO: 3197866 - RNA, 19 nt, Artificial Sequence
  Description of Artificial Sequence: Synthetic oligonucleotide
gcaucuucuuucuuagggg

SEQ ID NO: 3197867 - RNA, 19 nt, Artificial Sequence
  Description of Artificial Sequence: Synthetic oligonucleotide
auacgauugugugccaggg

SEQ ID NO: 3197868 - RNA, 19 nt, Artificial Sequence
  Description of Artificial Sequence: Synthetic oligonucleotide
uaguuucaacaacuagcug

SEQ ID NO: 3197869 - RNA, 19 nt, Artificial Sequence
  Description of Artificial Sequence: Synthetic oligonucleotide
uuccugugauccuuucucc

SEQ ID NO: 3197870 - RNA, 19 nt, Artificial Sequence
  Description of Artificial Sequence: Synthetic oligonucleotide
gaauacgauugugugccag

SEQ ID NO: 3197871 - RNA, 19 nt, Artificial Sequence
  Description of Artificial Sequence: Synthetic oligonucleotide
aaaagugcugcauauaaac

SEQ ID NO: 3197872 - RNA, 19 nt, Artificial Sequence
  Description of Artificial Sequence: Synthetic oligonucleotide
uuuucaauaacccagcuga

SEQ ID NO: 3197873 - RNA, 19 nt, Artificial Sequence
  Description of Artificial Sequence: Synthetic oligonucleotide
aauaaccuaacuucagugc

SEQ ID NO: 3197874 - RNA, 19 nt, Artificial Sequence
  Description of Artificial Sequence: Synthetic oligonucleotide
uuaauaauauaacaggccc

SEQ ID NO: 3197875 - RNA, 19 nt, Artificial Sequence
  Description of Artificial Sequence: Synthetic oligonucleotide
aaaccugugacuuugcaac

SEQ ID NO: 3197876 - RNA, 19 nt, Artificial Sequence
  Description of Artificial Sequence: Synthetic oligonucleotide
uaaguuaccauuuacaagu

SEQ ID NO: 3197877 - RNA, 19 nt, Artificial Sequence
  Description of Artificial Sequence: Synthetic oligonucleotide
aauaucaaagaucacagau

SEQ ID NO: 3197878 - RNA, 19 nt, Artificial Sequence
  Description of Artificial Sequence: Synthetic oligonucleotide
aaaauaggcaaauacugug

SEQ ID NO: 3197879 - RNA, 19 nt, Artificial Sequence
  Description of Artificial Sequence: Synthetic oligonucleotide
aaguuuguuuagcacaagc

SEQ ID NO: 3197880 - RNA, 19 nt, Artificial Sequence
  Description of Artificial Sequence: Synthetic oligonucleotide
uuaauuguuacuuuuauuu

SEQ ID NO: 3197881 - RNA, 19 nt, Artificial Sequence
  Description of Artificial Sequence: Synthetic oligonucleotide
uacaaaucaaaauaguucu

SEQ ID NO: 3197882 - RNA, 19 nt, Artificial Sequence
  Description of Artificial Sequence: Synthetic oligonucleotide
uuuaauauaacugguaacu

SEQ ID NO: 3197883 - RNA, 19 nt, Artificial Sequence
  Description of Artificial Sequence: Synthetic oligonucleotide
aauugcuugcaguugacag

SEQ ID NO: 3197884 - RNA, 19 nt, Artificial Sequence
  Description of Artificial Sequence: Synthetic oligonucleotide
cuuaauaauauaacaggcc

SEQ ID NO: 3197885 - RNA, 19 nt, Artificial Sequence
  Description of Artificial Sequence: Synthetic oligonucleotide
cagacaaacaccaaguuag

SEQ ID NO: 3197886 - RNA, 19 nt, Artificial Sequence
  Description of Artificial Sequence: Synthetic oligonucleotide
uguccugauaccuaggagg

SEQ ID NO: 3197887 - RNA, 19 nt, Artificial Sequence
  Description of Artificial Sequence: Synthetic oligonucleotide
auguauuaaauuaagacag

SEQ ID NO: 3197888 - RNA, 19 nt, Artificial Sequence
  Description of Artificial Sequence: Synthetic oligonucleotide
uugauuaagcaucaguacc

SEQ ID NO: 3197889 - RNA, 19 nt, Artificial Sequence
  Description of Artificial Sequence: Synthetic oligonucleotide
ucuauuaaaucaaacugga

SEQ ID NO: 3197890 - RNA, 19 nt, Artificial Sequence
  Description of Artificial Sequence: Synthetic oligonucleotide
uucagaauaaccuaacuuc

SEQ ID NO: 3197891 - RNA, 19 nt, Artificial Sequence
  Description of Artificial Sequence: Synthetic oligonucleotide
uagcaggaaagcuagaagg

SEQ ID NO: 3197892 - RNA, 19 nt, Artificial Sequence
  Description of Artificial Sequence: Synthetic oligonucleotide
uaugggauucgccaggugg

SEQ ID NO: 3197893 - RNA, 19 nt, Artificial Sequence
  Description of Artificial Sequence: Synthetic oligonucleotide
uacuauauaaccuccuugc

SEQ ID NO: 3197894 - RNA, 19 nt, Artificial Sequence
  Description of Artificial Sequence: Synthetic oligonucleotide
gauuacaaaagccagcuuc

SEQ ID NO: 3197895 - RNA, 19 nt, Artificial Sequence
  Description of Artificial Sequence: Synthetic oligonucleotide
uuuaccuuuauuuuaaguu

SEQ ID NO: 3197896 - RNA, 19 nt, Artificial Sequence
  Description of Artificial Sequence: Synthetic oligonucleotide
ucaaacuggagaaacuucc

SEQ ID NO: 3197897 - RNA, 19 nt, Artificial Sequence
  Description of Artificial Sequence: Synthetic oligonucleotide
aagggauaaaauguugccc

SEQ ID NO: 3197898 - RNA, 19 nt, Artificial Sequence
  Description of Artificial Sequence: Synthetic oligonucleotide
accaucagauuacaaaagc

SEQ ID NO: 3197899 - RNA, 19 nt, Artificial Sequence
  Description of Artificial Sequence: Synthetic oligonucleotide
uuagucuguaucuaaaacu

SEQ ID NO: 3197900 - RNA, 19 nt, Artificial Sequence
  Description of Artificial Sequence: Synthetic oligonucleotide
aaauaguucuuauuguuaa

SEQ ID NO: 3197901 - RNA, 19 nt, Artificial Sequence
  Description of Artificial Sequence: Synthetic oligonucleotide
gauaguuacggcuuuugcc

SEQ ID NO: 3197902 - RNA, 19 nt, Artificial Sequence
  Description of Artificial Sequence: Synthetic oligonucleotide
agucuaauuauaguuacac

SEQ ID NO: 3197903 - RNA, 19 nt, Artificial Sequence
  Description of Artificial Sequence: Synthetic oligonucleotide
ugaaaggcuauucaguugu

SEQ ID NO: 3197904 - RNA, 19 nt, Artificial Sequence
  Description of Artificial Sequence: Synthetic oligonucleotide
cuacaaaucaaaauaguuc

SEQ ID NO: 3197905 - RNA, 19 nt, Artificial Sequence
  Description of Artificial Sequence: Synthetic oligonucleotide
uaaccugugauaguuacgg

SEQ ID NO: 3197906 - RNA, 19 nt, Artificial Sequence
  Description of Artificial Sequence: Synthetic oligonucleotide
uaauaauauaacaggcccc

SEQ ID NO: 3197907 - RNA, 19 nt, Artificial Sequence
  Description of Artificial Sequence: Synthetic oligonucleotide
aaagcuagaagguauuaaa

SEQ ID NO: 3197908 - RNA, 19 nt, Artificial Sequence
  Description of Artificial Sequence: Synthetic oligonucleotide
auuuuaauauaacugguaa

SEQ ID NO: 3197909 - RNA, 19 nt, Artificial Sequence
  Description of Artificial Sequence: Synthetic oligonucleotide
aacaccaaguuaguaagac

SEQ ID NO: 3197910 - RNA, 19 nt, Artificial Sequence
  Description of Artificial Sequence: Synthetic oligonucleotide
uuccuuuucaugacgagcc

SEQ ID NO: 3197911 - RNA, 19 nt, Artificial Sequence
  Description of Artificial Sequence: Synthetic oligonucleotide
aucuauuaaaucaaacugg

SEQ ID NO: 3197912 - RNA, 19 nt, Artificial Sequence
  Description of Artificial Sequence: Synthetic oligonucleotide
acuaucaagaaguacauuu

SEQ ID NO: 3197913 - RNA, 19 nt, Artificial Sequence
  Description of Artificial Sequence: Synthetic oligonucleotide
uuuucuauccuauucuaga

SEQ ID NO: 3197914 - RNA, 19 nt, Artificial Sequence
  Description of Artificial Sequence: Synthetic oligonucleotide
ugauuaagcaucaguacca

SEQ ID NO: 3197915 - RNA, 19 nt, Artificial Sequence
  Description of Artificial Sequence: Synthetic oligonucleotide
uauucaguuguccugacuc

SEQ ID NO: 3197916 - RNA, 19 nt, Artificial Sequence
  Description of Artificial Sequence: Synthetic oligonucleotide
acagacuuuagucuguauc

SEQ ID NO: 3197917 - RNA, 19 nt, Artificial Sequence
  Description of Artificial Sequence: Synthetic oligonucleotide
uagguucacacuaaguaag

SEQ ID NO: 3197918 - RNA, 19 nt, Artificial Sequence
  Description of Artificial Sequence: Synthetic oligonucleotide
auaagggauaaaauguugc

SEQ ID NO: 3197919 - RNA, 19 nt, Artificial Sequence
  Description of Artificial Sequence: Synthetic oligonucleotide
gaauaaccuaacuucagug

SEQ ID NO: 3197920 - RNA, 19 nt, Artificial Sequence
  Description of Artificial Sequence: Synthetic oligonucleotide
aacacaucagaccaccuca

SEQ ID NO: 3197921 - RNA, 19 nt, Artificial Sequence
  Description of Artificial Sequence: Synthetic oligonucleotide
acuauuuguggcaagaguc

SEQ ID NO: 3197922 - RNA, 19 nt, Artificial Sequence
  Description of Artificial Sequence: Synthetic oligonucleotide
ugcaguaucaauaaauguu

SEQ ID NO: 3197923 - RNA, 19 nt, Artificial Sequence
  Description of Artificial Sequence: Synthetic oligonucleotide
acuauauaaccuccuugcc

SEQ ID NO: 3197924 - RNA, 19 nt, Artificial Sequence
  Description of Artificial Sequence: Synthetic oligonucleotide
auaguuacggcuuuugccu

SEQ ID NO: 3197925 - RNA, 19 nt, Artificial Sequence
  Description of Artificial Sequence: Synthetic oligonucleotide
aauacuagaacagacuuua

SEQ ID NO: 3197926 - RNA, 19 nt, Artificial Sequence
  Description of Artificial Sequence: Synthetic oligonucleotide
aagaacagacauuaaaaua

SEQ ID NO: 3197927 - RNA, 19 nt, Artificial Sequence
  Description of Artificial Sequence: Synthetic oligonucleotide
ucuacaaaucaaaauaguu

SEQ ID NO: 3197928 - RNA, 19 nt, Artificial Sequence
  Description of Artificial Sequence: Synthetic oligonucleotide
ucuacugaaaggcuauuca

SEQ ID NO: 3197929 - RNA, 19 nt, Artificial Sequence
  Description of Artificial Sequence: Synthetic oligonucleotide
uuuuaauauaacugguaac

SEQ ID NO: 3197930 - RNA, 19 nt, Artificial Sequence
  Description of Artificial Sequence: Synthetic oligonucleotide
uagaagguauuaaauauaa

SEQ ID NO: 3197931 - RNA, 19 nt, Artificial Sequence
  Description of Artificial Sequence: Synthetic oligonucleotide
ucuaguuaagcuuggcuug

SEQ ID NO: 3197932 - RNA, 19 nt, Artificial Sequence
  Description of Artificial Sequence: Synthetic oligonucleotide
uaccuuuauuuuaaguuag

SEQ ID NO: 3197933 - RNA, 19 nt, Artificial Sequence
  Description of Artificial Sequence: Synthetic oligonucleotide
aguuugcuaggucuagucc

SEQ ID NO: 3197934 - RNA, 19 nt, Artificial Sequence
  Description of Artificial Sequence: Synthetic oligonucleotide
aacaauggguuucuuccuc

SEQ ID NO: 3197935 - RNA, 19 nt, Artificial Sequence
  Description of Artificial Sequence: Synthetic oligonucleotide
aaagcuuuaaccugugaua

SEQ ID NO: 3197936 - RNA, 19 nt, Artificial Sequence
  Description of Artificial Sequence: Synthetic oligonucleotide
auauaaaccccugaugcac

SEQ ID NO: 3197937 - RNA, 19 nt, Artificial Sequence
  Description of Artificial Sequence: Synthetic oligonucleotide
ucaauaacccagcugagau

SEQ ID NO: 3197938 - RNA, 19 nt, Artificial Sequence
  Description of Artificial Sequence: Synthetic oligonucleotide
uguggcaagagucuggccu

SEQ ID NO: 3197939 - RNA, 19 nt, Artificial Sequence
  Description of Artificial Sequence: Synthetic oligonucleotide
uaccuccacauucugaagg

SEQ ID NO: 3197940 - RNA, 19 nt, Artificial Sequence
  Description of Artificial Sequence: Synthetic oligonucleotide
ucuguaucuaaaacuacac

SEQ ID NO: 3197941 - RNA, 19 nt, Artificial Sequence
  Description of Artificial Sequence: Synthetic oligonucleotide
uuacaagucuuccauugcc

SEQ ID NO: 3197942 - RNA, 19 nt, Artificial Sequence
  Description of Artificial Sequence: Synthetic oligonucleotide
cuauauaaccuccuugccc

SEQ ID NO: 3197943 - RNA, 19 nt, Artificial Sequence
  Description of Artificial Sequence: Synthetic oligonucleotide
accacaaagaugcaucauc

SEQ ID NO: 3197944 - RNA, 19 nt, Artificial Sequence
  Description of Artificial Sequence: Synthetic oligonucleotide
uaagggauaaaauguugcc

SEQ ID NO: 3197945 - RNA, 19 nt, Artificial Sequence
  Description of Artificial Sequence: Synthetic oligonucleotide
uuuaaccugugauaguuac

SEQ ID NO: 3197946 - RNA, 19 nt, Artificial Sequence
  Description of Artificial Sequence: Synthetic oligonucleotide
acuacucaacaccacaaag

SEQ ID NO: 3197947 - RNA, 19 nt, Artificial Sequence
  Description of Artificial Sequence: Synthetic oligonucleotide
gccuuaauaauauaacagg

SEQ ID NO: 3197948 - RNA, 19 nt, Artificial Sequence
  Description of Artificial Sequence: Synthetic oligonucleotide
aauggaaagcuagaaccuc

SEQ ID NO: 3197949 - RNA, 19 nt, Artificial Sequence
  Description of Artificial Sequence: Synthetic oligonucleotide
uugcauauccucaacacau

SEQ ID NO: 3197950 - RNA, 19 nt, Artificial Sequence
  Description of Artificial Sequence: Synthetic oligonucleotide
acuauuacucauuuuaaua

SEQ ID NO: 3197951 - RNA, 19 nt, Artificial Sequence
  Description of Artificial Sequence: Synthetic oligonucleotide
gcauauaaaccccugaugc

SEQ ID NO: 3197952 - RNA, 19 nt, Artificial Sequence
  Description of Artificial Sequence: Synthetic oligonucleotide
uuuaaguuagguucacacu

SEQ ID NO: 3197953 - RNA, 19 nt, Artificial Sequence
  Description of Artificial Sequence: Synthetic oligonucleotide
auaaccuaacuucagugca

SEQ ID NO: 3197954 - RNA, 19 nt, Artificial Sequence
  Description of Artificial Sequence: Synthetic oligonucleotide
ugguguucccaauauauca

SEQ ID NO: 3197955 - RNA, 19 nt, Artificial Sequence
  Description of Artificial Sequence: Synthetic oligonucleotide
auuauagcacaaagaagcc

SEQ ID NO: 3197956 - RNA, 19 nt, Artificial Sequence
  Description of Artificial Sequence: Synthetic oligonucleotide
cacuacagcaagcaaaacc

SEQ ID NO: 3197957 - RNA, 19 nt, Artificial Sequence
  Description of Artificial Sequence: Synthetic oligonucleotide
aacuacacuauuuguggca

SEQ ID NO: 3197958 - RNA, 19 nt, Artificial Sequence
  Description of Artificial Sequence: Synthetic oligonucleotide
agggauaaaauguugccca

SEQ ID NO: 3197959 - RNA, 19 nt, Artificial Sequence
  Description of Artificial Sequence: Synthetic oligonucleotide
uuaccuuuauuuuaaguua

SEQ ID NO: 3197960 - RNA, 19 nt, Artificial Sequence
  Description of Artificial Sequence: Synthetic oligonucleotide
aauacuauauaaccuccuu

SEQ ID NO: 3197961 - RNA, 19 nt, Artificial Sequence
  Description of Artificial Sequence: Synthetic oligonucleotide
uuuacaagucuuccauugc

SEQ ID NO: 3197962 - RNA, 19 nt, Artificial Sequence
  Description of Artificial Sequence: Synthetic oligonucleotide
uuagguucacacuaaguaa

SEQ ID NO: 3197963 - RNA, 19 nt, Artificial Sequence
  Description of Artificial Sequence: Synthetic oligonucleotide
aaugucacuacagcaagca

SEQ ID NO: 3197964 - RNA, 19 nt, Artificial Sequence
  Description of Artificial Sequence: Synthetic oligonucleotide
auacuauauaaccuccuug

SEQ ID NO: 3197965 - RNA, 19 nt, Artificial Sequence
  Description of Artificial Sequence: Synthetic oligonucleotide
aaccagaaauaucccuuac

SEQ ID NO: 3197966 - RNA, 19 nt, Artificial Sequence
  Description of Artificial Sequence: Synthetic oligonucleotide
uuaaccugugauaguuacg

SEQ ID NO: 3197967 - RNA, 19 nt, Artificial Sequence
  Description of Artificial Sequence: Synthetic oligonucleotide
uacucaacaccacaaagau

SEQ ID NO: 3197968 - RNA, 19 nt, Artificial Sequence
  Description of Artificial Sequence: Synthetic oligonucleotide
uacuagaacagacuuuagu

SEQ ID NO: 3197969 - RNA, 19 nt, Artificial Sequence
  Description of Artificial Sequence: Synthetic oligonucleotide
acuacagcaagcaaaaccu

SEQ ID NO: 3197970 - RNA, 19 nt, Artificial Sequence
  Description of Artificial Sequence: Synthetic oligonucleotide
ugcacaaauugauauaaau

SEQ ID NO: 3197971 - RNA, 19 nt, Artificial Sequence
  Description of Artificial Sequence: Synthetic oligonucleotide
aaagguagcaauugcaucc

SEQ ID NO: 3197972 - RNA, 19 nt, Artificial Sequence
  Description of Artificial Sequence: Synthetic oligonucleotide
aaugauuuugacuaaguca

SEQ ID NO: 3197973 - RNA, 19 nt, Artificial Sequence
  Description of Artificial Sequence: Synthetic oligonucleotide
aauugugaaagguuugugg

SEQ ID NO: 3197974 - RNA, 19 nt, Artificial Sequence
  Description of Artificial Sequence: Synthetic oligonucleotide
aauuaugacaacagggagc

SEQ ID NO: 3197975 - RNA, 19 nt, Artificial Sequence
  Description of Artificial Sequence: Synthetic oligonucleotide
aguuuguuugacuaaauag

SEQ ID NO: 3197976 - RNA, 19 nt, Artificial Sequence
  Description of Artificial Sequence: Synthetic oligonucleotide
gaagguuaaauugugaaag

SEQ ID NO: 3197977 - RNA, 19 nt, Artificial Sequence
  Description of Artificial Sequence: Synthetic oligonucleotide
auugugaaagguuuguggg

SEQ ID NO: 3197978 - RNA, 19 nt, Artificial Sequence
  Description of Artificial Sequence: Synthetic oligonucleotide
aauccaaucaaugauuuug

SEQ ID NO: 3197979 - RNA, 19 nt, Artificial Sequence
  Description of Artificial Sequence: Synthetic oligonucleotide
gauacuagaaacacuuucg

SEQ ID NO: 3197980 - RNA, 19 nt, Artificial Sequence
  Description of Artificial Sequence: Synthetic oligonucleotide
uuggcuauuacauauucug

SEQ ID NO: 3197981 - RNA, 19 nt, Artificial Sequence
  Description of Artificial Sequence: Synthetic oligonucleotide
auuccaaagguccaugaac

SEQ ID NO: 3197982 - RNA, 19 nt, Artificial Sequence
  Description of Artificial Sequence: Synthetic oligonucleotide
aagguuaaauugugaaagg

SEQ ID NO: 3197983 - RNA, 19 nt, Artificial Sequence
  Description of Artificial Sequence: Synthetic oligonucleotide
uuguauuuacaguugagga

SEQ ID NO: 3197984 - RNA, 19 nt, Artificial Sequence
  Description of Artificial Sequence: Synthetic oligonucleotide
uuucugagagaguagaucu

SEQ ID NO: 3197985 - RNA, 19 nt, Artificial Sequence
  Description of Artificial Sequence: Synthetic oligonucleotide
ucuaaauuuggugaugaag

SEQ ID NO: 3197986 - RNA, 19 nt, Artificial Sequence
  Description of Artificial Sequence: Synthetic oligonucleotide
gaauuaugacaacagggag

SEQ ID NO: 3197987 - RNA, 19 nt, Artificial Sequence
  Description of Artificial Sequence: Synthetic oligonucleotide
ucauuauugcguauauucc

SEQ ID NO: 3197988 - RNA, 19 nt, Artificial Sequence
  Description of Artificial Sequence: Synthetic oligonucleotide
aucgcagccacucuuugcc

SEQ ID NO: 3197989 - RNA, 19 nt, Artificial Sequence
  Description of Artificial Sequence: Synthetic oligonucleotide
ucagccguagaguaaagag

SEQ ID NO: 3197990 - RNA, 19 nt, Artificial Sequence
  Description of Artificial Sequence: Synthetic oligonucleotide
gaaauugugauguagcucu

SEQ ID NO: 3197991 - RNA, 19 nt, Artificial Sequence
  Description of Artificial Sequence: Synthetic oligonucleotide
  modified_base (4)..(4): a, c, u, g, unknown or other
aacncuuuucauccauuag

SEQ ID NO: 3197992 - RNA, 19 nt, Artificial Sequence
  Description of Artificial Sequence: Synthetic oligonucleotide
uucggcaagauacugcugc

SEQ ID NO: 3197993 - RNA, 19 nt, Artificial Sequence
  Description of Artificial Sequence: Synthetic oligonucleotide
ucccuaauuccaaaggucc

SEQ ID NO: 3197994 - RNA, 19 nt, Artificial Sequence
  Description of Artificial Sequence: Synthetic oligonucleotide
ugauacuagaaacacuuuc

SEQ ID NO: 3197995 - RNA, 19 nt, Artificial Sequence
  Description of Artificial Sequence: Synthetic oligonucleotide
gaggguagcaacuuucucc

SEQ ID NO: 3197996 - RNA, 19 nt, Artificial Sequence
  Description of Artificial Sequence: Synthetic oligonucleotide
gaugaugccaugucuuagg

SEQ ID NO: 3197997 - RNA, 19 nt, Artificial Sequence
  Description of Artificial Sequence: Synthetic oligonucleotide
  modified_base (9)..(9): a, c, u, g, unknown or other
ugccuaacncuuuucaucc

SEQ ID NO: 3197998 - RNA, 19 nt, Artificial Sequence
  Description of Artificial Sequence: Synthetic oligonucleotide
aacuuccucaugcuguccg

SEQ ID NO: 3197999 - RNA, 19 nt, Artificial Sequence
  Description of Artificial Sequence: Synthetic oligonucleotide
cuagagaccaaugacagug

SEQ ID NO: 3198000 - RNA, 19 nt, Artificial Sequence
  Description of Artificial Sequence: Synthetic oligonucleotide
agcacugcauugcucagcc

SEQ ID NO: 3198001 - RNA, 19 nt, Artificial Sequence
  Description of Artificial Sequence: Synthetic oligonucleotide
  modified_base (3)..(3): a, c, u, g, unknown or other
acncuuuucauccauuaga

SEQ ID NO: 3198002 - RNA, 19 nt, Artificial Sequence
  Description of Artificial Sequence: Synthetic oligonucleotide
auugagaugaugccauguc

SEQ ID NO: 3198003 - RNA, 19 nt, Artificial Sequence
  Description of Artificial Sequence: Synthetic oligonucleotide
uuuucauccauuagagggu

SEQ ID NO: 3198004 - RNA, 19 nt, Artificial Sequence
  Description of Artificial Sequence: Synthetic oligonucleotide
uuuccuuggagucagcauc

SEQ ID NO: 3198005 - RNA, 19 nt, Artificial Sequence
  Description of Artificial Sequence: Synthetic oligonucleotide
ugagcauuugcugacagcu

SEQ ID NO: 3198006 - RNA, 19 nt, Artificial Sequence
  Description of Artificial Sequence: Synthetic oligonucleotide
auauaaggacauuuguugu

SEQ ID NO: 3198007 - RNA, 19 nt, Artificial Sequence
  Description of Artificial Sequence: Synthetic oligonucleotide
augaaccacacccuagaac

SEQ ID NO: 3198008 - RNA, 19 nt, Artificial Sequence
  Description of Artificial Sequence: Synthetic oligonucleotide
aaagguuugugggacucac

SEQ ID NO: 3198009 - RNA, 19 nt, Artificial Sequence
  Description of Artificial Sequence: Synthetic oligonucleotide
gagcgcaucauacugggcc

SEQ ID NO: 3198010 - RNA, 19 nt, Artificial Sequence
  Description of Artificial Sequence: Synthetic oligonucleotide
uaucaguuuccuucgaaga

SEQ ID NO: 3198011 - RNA, 19 nt, Artificial Sequence
  Description of Artificial Sequence: Synthetic oligonucleotide
gaagaugugcuagagacca

SEQ ID NO: 3198012 - RNA, 19 nt, Artificial Sequence
  Description of Artificial Sequence: Synthetic oligonucleotide
  modified_base (10)..(10): a, c, u, g, unknown or other
uugccuaacncuuuucauc

SEQ ID NO: 3198013 - RNA, 19 nt, Artificial Sequence
  Description of Artificial Sequence: Synthetic oligonucleotide
agaauuaugacaacaggga

SEQ ID NO: 3198014 - RNA, 19 nt, Artificial Sequence
  Description of Artificial Sequence: Synthetic oligonucleotide
auucccuaaacucuuuuca

SEQ ID NO: 3198015 - RNA, 19 nt, Artificial Sequence
  Description of Artificial Sequence: Synthetic oligonucleotide
uguccgggaaugcuguugg

SEQ ID NO: 3198016 - RNA, 19 nt, Artificial Sequence
  Description of Artificial Sequence: Synthetic oligonucleotide
ucaaugauuuugacuaagu

SEQ ID NO: 3198017 - RNA, 19 nt, Artificial Sequence
  Description of Artificial Sequence: Synthetic oligonucleotide
agcaauugcauccucaguu

SEQ ID NO: 3198018 - RNA, 19 nt, Artificial Sequence
  Description of Artificial Sequence: Synthetic oligonucleotide
gaguaaagagaagaugugc

SEQ ID NO: 3198019 - RNA, 19 nt, Artificial Sequence
  Description of Artificial Sequence: Synthetic oligonucleotide
guugaggaaaccauugaag

SEQ ID NO: 3198020 - RNA, 19 nt, Artificial Sequence
  Description of Artificial Sequence: Synthetic oligonucleotide
uuucauuagcauauucauc

SEQ ID NO: 3198021 - RNA, 19 nt, Artificial Sequence
  Description of Artificial Sequence: Synthetic oligonucleotide
aaagcugcuacaaggugag

SEQ ID NO: 3198022 - RNA, 19 nt, Artificial Sequence
  Description of Artificial Sequence: Synthetic oligonucleotide
uuguuguauuuacaguuga

SEQ ID NO: 3198023 - RNA, 19 nt, Artificial Sequence
  Description of Artificial Sequence: Synthetic oligonucleotide
uuucaaugguuucccguag

SEQ ID NO: 3198024 - RNA, 19 nt, Artificial Sequence
  Description of Artificial Sequence: Synthetic oligonucleotide
aguaaagagaagaugugcu

SEQ ID NO: 3198025 - RNA, 19 nt, Artificial Sequence
  Description of Artificial Sequence: Synthetic oligonucleotide
uguugauacuagaaacacu

SEQ ID NO: 3198026 - RNA, 19 nt, Artificial Sequence
  Description of Artificial Sequence: Synthetic oligonucleotide
uuggagcgcaucauacugg

SEQ ID NO: 3198027 - RNA, 19 nt, Artificial Sequence
  Description of Artificial Sequence: Synthetic oligonucleotide
aaguuuguuugacuaaaua

SEQ ID NO: 3198028 - RNA, 19 nt, Artificial Sequence
  Description of Artificial Sequence: Synthetic oligonucleotide
uggcuauuacauauucugc

SEQ ID NO: 3198029 - RNA, 19 nt, Artificial Sequence
  Description of Artificial Sequence: Synthetic oligonucleotide
uuuggcuauuacauauucu

SEQ ID NO: 3198030 - RNA, 19 nt, Artificial Sequence
  Description of Artificial Sequence: Synthetic oligonucleotide
ucuccugggaugcaacgag

SEQ ID NO: 3198031 - RNA, 19 nt, Artificial Sequence
  Description of Artificial Sequence: Synthetic oligonucleotide
aauuccaaagguccaugaa

SEQ ID NO: 3198032 - RNA, 19 nt, Artificial Sequence
  Description of Artificial Sequence: Synthetic oligonucleotide
gaggguggauucaagagag

SEQ ID NO: 3198033 - RNA, 19 nt, Artificial Sequence
  Description of Artificial Sequence: Synthetic oligonucleotide
aguuucauuagcauauuca

SEQ ID NO: 3198034 - RNA, 19 nt, Artificial Sequence
  Description of Artificial Sequence: Synthetic oligonucleotide
aagagaagaugugcuagag

SEQ ID NO: 3198035 - RNA, 19 nt, Artificial Sequence
  Description of Artificial Sequence: Synthetic oligonucleotide
aggaagguuaaauugugaa

SEQ ID NO: 3198036 - RNA, 19 nt, Artificial Sequence
  Description of Artificial Sequence: Synthetic oligonucleotide
guuggagcgcaucauacug

SEQ ID NO: 3198037 - RNA, 19 nt, Artificial Sequence
  Description of Artificial Sequence: Synthetic oligonucleotide
cauugcucagccagguucg

SEQ ID NO: 3198038 - RNA, 19 nt, Artificial Sequence
  Description of Artificial Sequence: Synthetic oligonucleotide
aaggacauuuguuguauuu

SEQ ID NO: 3198039 - RNA, 19 nt, Artificial Sequence
  Description of Artificial Sequence: Synthetic oligonucleotide
acauuaaagguagcaauug

SEQ ID NO: 3198040 - RNA, 19 nt, Artificial Sequence
  Description of Artificial Sequence: Synthetic oligonucleotide
uuggaaaagugguauuuuc

SEQ ID NO: 3198041 - RNA, 19 nt, Artificial Sequence
  Description of Artificial Sequence: Synthetic oligonucleotide
aggaauccaaaaugucuuc

SEQ ID NO: 3198042 - RNA, 19 nt, Artificial Sequence
  Description of Artificial Sequence: Synthetic oligonucleotide
uagaaacacuuucggagga

SEQ ID NO: 3198043 - RNA, 19 nt, Artificial Sequence
  Description of Artificial Sequence: Synthetic oligonucleotide
gagaguagaucucacacua

SEQ ID NO: 3198044 - RNA, 19 nt, Artificial Sequence
  Description of Artificial Sequence: Synthetic oligonucleotide
caaugauuuugacuaaguc

SEQ ID NO: 3198045 - RNA, 19 nt, Artificial Sequence
  Description of Artificial Sequence: Synthetic oligonucleotide
uccaugaaccacacccuag

SEQ ID NO: 3198046 - RNA, 19 nt, Artificial Sequence
  Description of Artificial Sequence: Synthetic oligonucleotide
aagucauuauugcguauau

SEQ ID NO: 3198047 - RNA, 19 nt, Artificial Sequence
  Description of Artificial Sequence: Synthetic oligonucleotide
agagaguagaucucacacu

SEQ ID NO: 3198048 - RNA, 19 nt, Artificial Sequence
  Description of Artificial Sequence: Synthetic oligonucleotide
auaucacucaaagagccca

SEQ ID NO: 3198049 - RNA, 19 nt, Artificial Sequence
  Description of Artificial Sequence: Synthetic oligonucleotide
guuugcacauaauacccac

SEQ ID NO: 3198050 - RNA, 19 nt, Artificial Sequence
  Description of Artificial Sequence: Synthetic oligonucleotide
uauugucagcacugcauug

SEQ ID NO: 3198051 - RNA, 19 nt, Artificial Sequence
  Description of Artificial Sequence: Synthetic oligonucleotide
acuaagucauuauugcgua

SEQ ID NO: 3198052 - RNA, 19 nt, Artificial Sequence
  Description of Artificial Sequence: Synthetic oligonucleotide
ugaaauugugauguagcuc

SEQ ID NO: 3198053 - RNA, 19 nt, Artificial Sequence
  Description of Artificial Sequence: Synthetic oligonucleotide
gagaugugaggguagcaac

SEQ ID NO: 3198054 - RNA, 19 nt, Artificial Sequence
  Description of Artificial Sequence: Synthetic oligonucleotide
aucuagaauuaugacaaca

SEQ ID NO: 3198055 - RNA, 19 nt, Artificial Sequence
  Description of Artificial Sequence: Synthetic oligonucleotide
uggauuugcuccgaaugag

SEQ ID NO: 3198056 - RNA, 19 nt, Artificial Sequence
  Description of Artificial Sequence: Synthetic oligonucleotide
aaagguccaugaaccacac

SEQ ID NO: 3198057 - RNA, 19 nt, Artificial Sequence
  Description of Artificial Sequence: Synthetic oligonucleotide
cucccugauucauuguucc

SEQ ID NO: 3198058 - RNA, 19 nt, Artificial Sequence
  Description of Artificial Sequence: Synthetic oligonucleotide
  modified_base (5)..(5): a, c, u, g, unknown or other
uaacncuuuucauccauua

SEQ ID NO: 3198059 - RNA, 19 nt, Artificial Sequence
  Description of Artificial Sequence: Synthetic oligonucleotide
ucuugguuggccugccgag

SEQ ID NO: 3198060 - RNA, 19 nt, Artificial Sequence
  Description of Artificial Sequence: Synthetic oligonucleotide
uagaucucacacuacccgu

SEQ ID NO: 3198061 - RNA, 19 nt, Artificial Sequence
  Description of Artificial Sequence: Synthetic oligonucleotide
cuguugauacuagaaacac

SEQ ID NO: 3198062 - RNA, 19 nt, Artificial Sequence
  Description of Artificial Sequence: Synthetic oligonucleotide
aagguccaugaaccacacc

SEQ ID NO: 3198063 - RNA, 19 nt, Artificial Sequence
  Description of Artificial Sequence: Synthetic oligonucleotide
ggaucccuaauuccaaagg

SEQ ID NO: 3198064 - RNA, 19 nt, Artificial Sequence
  Description of Artificial Sequence: Synthetic oligonucleotide
uugcguauauuccuuucaa

SEQ ID NO: 3198065 - RNA, 19 nt, Artificial Sequence
  Description of Artificial Sequence: Synthetic oligonucleotide
uuucauccauuagagggug

SEQ ID NO: 3198066 - RNA, 19 nt, Artificial Sequence
  Description of Artificial Sequence: Synthetic oligonucleotide
accauuauugucagcacug

SEQ ID NO: 3198067 - RNA, 19 nt, Artificial Sequence
  Description of Artificial Sequence: Synthetic oligonucleotide
uauugagaugaugccaugu

SEQ ID NO: 3198068 - RNA, 19 nt, Artificial Sequence
  Description of Artificial Sequence: Synthetic oligonucleotide
uaagucauuauugcguaua

SEQ ID NO: 3198069 - RNA, 19 nt, Artificial Sequence
  Description of Artificial Sequence: Synthetic oligonucleotide
uccacauuaaagguagcaa

SEQ ID NO: 3198070 - RNA, 19 nt, Artificial Sequence
  Description of Artificial Sequence: Synthetic oligonucleotide
uuugugggacucaccaagu

SEQ ID NO: 3198071 - RNA, 19 nt, Artificial Sequence
  Description of Artificial Sequence: Synthetic oligonucleotide
  modified_base (10)..(10): a, c, u, g, unknown or other
aauuuuaacngcuaagcuc

SEQ ID NO: 3198072 - RNA, 19 nt, Artificial Sequence
  Description of Artificial Sequence: Synthetic oligonucleotide
aaauguuugugguaagacc

SEQ ID NO: 3198073 - RNA, 19 nt, Artificial Sequence
  Description of Artificial Sequence: Synthetic oligonucleotide
uauuuuaaggaucaaaaga

SEQ ID NO: 3198074 - RNA, 19 nt, Artificial Sequence
  Description of Artificial Sequence: Synthetic oligonucleotide
aaagaucaauuccaguccc

SEQ ID NO: 3198075 - RNA, 19 nt, Artificial Sequence
  Description of Artificial Sequence: Synthetic oligonucleotide
uuaaggaucaaaagaauca

SEQ ID NO: 3198076 - RNA, 19 nt, Artificial Sequence
  Description of Artificial Sequence: Synthetic oligonucleotide
uuuaguauuuuaaggauca

SEQ ID NO: 3198077 - RNA, 19 nt, Artificial Sequence
  Description of Artificial Sequence: Synthetic oligonucleotide
aaauaagcugcuccaaacg

SEQ ID NO: 3198078 - RNA, 19 nt, Artificial Sequence
  Description of Artificial Sequence: Synthetic oligonucleotide
ugugguaagaccacaagag

SEQ ID NO: 3198079 - RNA, 19 nt, Artificial Sequence
  Description of Artificial Sequence: Synthetic oligonucleotide
aaaagaaucacuagcaucu

SEQ ID NO: 3198080 - RNA, 19 nt, Artificial Sequence
  Description of Artificial Sequence: Synthetic oligonucleotide
auaggagucagaaauaagc

SEQ ID NO: 3198081 - RNA, 19 nt, Artificial Sequence
  Description of Artificial Sequence: Synthetic oligonucleotide
aagacuagcagguuuccac

SEQ ID NO: 3198082 - RNA, 19 nt, Artificial Sequence
  Description of Artificial Sequence: Synthetic oligonucleotide
aacgaacucgcucaugggc

SEQ ID NO: 3198083 - RNA, 19 nt, Artificial Sequence
  Description of Artificial Sequence: Synthetic oligonucleotide
  modified_base (13)..(13): a, c, u, g, unknown or other
uguaauuuuaacngcuaag

SEQ ID NO: 3198084 - RNA, 19 nt, Artificial Sequence
  Description of Artificial Sequence: Synthetic oligonucleotide
gaucaaaagaaucacuagc

SEQ ID NO: 3198085 - RNA, 19 nt, Artificial Sequence
  Description of Artificial Sequence: Synthetic oligonucleotide
ucucauaggagucagaaau

SEQ ID NO: 3198086 - RNA, 19 nt, Artificial Sequence
  Description of Artificial Sequence: Synthetic oligonucleotide
aucacuagcaucuggaaag

SEQ ID NO: 3198087 - RNA, 19 nt, Artificial Sequence
  Description of Artificial Sequence: Synthetic oligonucleotide
gaaugaaccuauuucuugg

SEQ ID NO: 3198088 - RNA, 19 nt, Artificial Sequence
  Description of Artificial Sequence: Synthetic oligonucleotide
auugaaugaaccuauuucu

SEQ ID NO: 3198089 - RNA, 19 nt, Artificial Sequence
  Description of Artificial Sequence: Synthetic oligonucleotide
  modified_base (6)..(6): a, c, u, g, unknown or other
uaaacnggcaauaacuugu

SEQ ID NO: 3198090 - RNA, 19 nt, Artificial Sequence
  Description of Artificial Sequence: Synthetic oligonucleotide
aucuggaaagaucaauucc

SEQ ID NO: 3198091 - RNA, 19 nt, Artificial Sequence
  Description of Artificial Sequence: Synthetic oligonucleotide
ucuggaaagaucaauucca

SEQ ID NO: 3198092 - RNA, 19 nt, Artificial Sequence
  Description of Artificial Sequence: Synthetic oligonucleotide
uucucuuccauuuucgugc

SEQ ID NO: 3198093 - RNA, 19 nt, Artificial Sequence
  Description of Artificial Sequence: Synthetic oligonucleotide
uuuaaggaucaaaagaauc

SEQ ID NO: 3198094 - RNA, 19 nt, Artificial Sequence
  Description of Artificial Sequence: Synthetic oligonucleotide
aauguuugugguaagacca

SEQ ID NO: 3198095 - RNA, 19 nt, Artificial Sequence
  Description of Artificial Sequence: Synthetic oligonucleotide
cuuguuguccacuugcugg

SEQ ID NO: 3198096 - RNA, 19 nt, Artificial Sequence
  Description of Artificial Sequence: Synthetic oligonucleotide
gaaagaucaauuccagucc

SEQ ID NO: 3198097 - RNA, 19 nt, Artificial Sequence
  Description of Artificial Sequence: Synthetic oligonucleotide
  modified_base (7)..(7): a, c, u, g, unknown or other
uuaaacnggcaauaacuug

SEQ ID NO: 3198098 - RNA, 19 nt, Artificial Sequence
  Description of Artificial Sequence: Synthetic oligonucleotide
  modified_base (16)..(16): a, c, u, g, unknown or other
uuguguaauuuuaacngcu

SEQ ID NO: 3198099 - RNA, 19 nt, Artificial Sequence
  Description of Artificial Sequence: Synthetic oligonucleotide
aauaagcugcuccaaacga

SEQ ID NO: 3198100 - RNA, 19 nt, Artificial Sequence
  Description of Artificial Sequence: Synthetic oligonucleotide
  modified_base (10)..(10): a, c, u, g, unknown or other
ucauuaaacnggcaauaac

SEQ ID NO: 3198101 - RNA, 19 nt, Artificial Sequence
  Description of Artificial Sequence: Synthetic oligonucleotide
  modified_base (12)..(12): a, c, u, g, unknown or other
guaauuuuaacngcuaagc

SEQ ID NO: 3198102 - RNA, 19 nt, Artificial Sequence
  Description of Artificial Sequence: Synthetic oligonucleotide
  modified_base (11)..(11): a, c, u, g, unknown or other
uaauuuuaacngcuaagcu

SEQ ID NO: 3198103 - RNA, 19 nt, Artificial Sequence
  Description of Artificial Sequence: Synthetic oligonucleotide
aucuucuaaauguuugugg

SEQ ID NO: 3198104 - RNA, 19 nt, Artificial Sequence
  Description of Artificial Sequence: Synthetic oligonucleotide
  modified_base (17)..(17): a, c, u, g, unknown or other
uucgugcucauuaaacngg

SEQ ID NO: 3198105 - RNA, 19 nt, Artificial Sequence
  Description of Artificial Sequence: Synthetic oligonucleotide
  modified_base (9)..(9): a, c, u, g, unknown or other
auuuuaacngcuaagcucu

SEQ ID NO: 3198106 - RNA, 19 nt, Artificial Sequence
  Description of Artificial Sequence: Synthetic oligonucleotide
ucuucuaaauguuuguggu

SEQ ID NO: 3198107 - RNA, 19 nt, Artificial Sequence
  Description of Artificial Sequence: Synthetic oligonucleotide
  modified_base (18)..(18): a, c, u, g, unknown or other
uuucgugcucauuaaacng

SEQ ID NO: 3198108 - RNA, 19 nt, Artificial Sequence
  Description of Artificial Sequence: Synthetic oligonucleotide
uuuuaguauuuuaaggauc

SEQ ID NO: 3198109 - RNA, 19 nt, Artificial Sequence
  Description of Artificial Sequence: Synthetic oligonucleotide
gaauuaucauggaagacag

SEQ ID NO: 3198110 - RNA, 19 nt, Artificial Sequence
  Description of Artificial Sequence: Synthetic oligonucleotide
uccuuugguaccgugaugg

SEQ ID NO: 3198111 - RNA, 19 nt, Artificial Sequence
  Description of Artificial Sequence: Synthetic oligonucleotide
augggcagcgugcugaucc

SEQ ID NO: 3198112 - RNA, 19 nt, Artificial Sequence
  Description of Artificial Sequence: Synthetic oligonucleotide
guauuuuaaggaucaaaag

SEQ ID NO: 3198113 - RNA, 19 nt, Artificial Sequence
  Description of Artificial Sequence: Synthetic oligonucleotide
aagaaucacuagcaucugg

SEQ ID NO: 3198114 - RNA, 19 nt, Artificial Sequence
  Description of Artificial Sequence: Synthetic oligonucleotide
uaacuuguuguccacuugc

SEQ ID NO: 3198115 - RNA, 19 nt, Artificial Sequence
  Description of Artificial Sequence: Synthetic oligonucleotide
caaacgaacucgcucaugg

SEQ ID NO: 3198116 - RNA, 19 nt, Artificial Sequence
  Description of Artificial Sequence: Synthetic oligonucleotide
ugcugauccaccaagacua

SEQ ID NO: 3198117 - RNA, 19 nt, Artificial Sequence
  Description of Artificial Sequence: Synthetic oligonucleotide
ugaaugaaccuauuucuug

SEQ ID NO: 3198118 - RNA, 19 nt, Artificial Sequence
  Description of Artificial Sequence: Synthetic oligonucleotide
  modified_base (19)..(19): a, c, u, g, unknown or other
uuuucgugcucauuaaacn

SEQ ID NO: 3198119 - RNA, 19 nt, Artificial Sequence
  Description of Artificial Sequence: Synthetic oligonucleotide
ucuuggugaagcgauacgg

SEQ ID NO: 3198120 - RNA, 19 nt, Artificial Sequence
  Description of Artificial Sequence: Synthetic oligonucleotide
acaagagucuccuuugcuc

SEQ ID NO: 3198121 - RNA, 19 nt, Artificial Sequence
  Description of Artificial Sequence: Synthetic oligonucleotide
uagaggaggaauuaucaug

SEQ ID NO: 3198122 - RNA, 19 nt, Artificial Sequence
  Description of Artificial Sequence: Synthetic oligonucleotide
cauugaaugaaccuauuuc

SEQ ID NO: 3198123 - RNA, 19 nt, Artificial Sequence
  Description of Artificial Sequence: Synthetic oligonucleotide
auuuuaaggaucaaaagaa

SEQ ID NO: 3198124 - RNA, 19 nt, Artificial Sequence
  Description of Artificial Sequence: Synthetic oligonucleotide
accuauuucuuggugaagc

SEQ ID NO: 3198125 - RNA, 19 nt, Artificial Sequence
  Description of Artificial Sequence: Synthetic oligonucleotide
ucagaaauaagcugcucca

SEQ ID NO: 3198126 - RNA, 19 nt, Artificial Sequence
  Description of Artificial Sequence: Synthetic oligonucleotide
agaggaggaauuaucaugg

SEQ ID NO: 3198127 - RNA, 19 nt, Artificial Sequence
  Description of Artificial Sequence: Synthetic oligonucleotide
  modified_base (3)..(3): a, c, u, g, unknown or other
acnggcaauaacuuguugu

SEQ ID NO: 3198128 - RNA, 19 nt, Artificial Sequence
  Description of Artificial Sequence: Synthetic oligonucleotide
gaaauaagcugcuccaaac

SEQ ID NO: 3198129 - RNA, 19 nt, Artificial Sequence
  Description of Artificial Sequence: Synthetic oligonucleotide
ugaaccuauuucuugguga

SEQ ID NO: 3198130 - RNA, 19 nt, Artificial Sequence
  Description of Artificial Sequence: Synthetic oligonucleotide
ugauccaccaagacuagca

SEQ ID NO: 3198131 - RNA, 19 nt, Artificial Sequence
  Description of Artificial Sequence: Synthetic oligonucleotide
agacuagcagguuuccacc

SEQ ID NO: 3198132 - RNA, 19 nt, Artificial Sequence
  Description of Artificial Sequence: Synthetic oligonucleotide
ucccagaucuucuaaaugu

SEQ ID NO: 3198133 - RNA, 19 nt, Artificial Sequence
  Description of Artificial Sequence: Synthetic oligonucleotide
gucagaaauaagcugcucc

SEQ ID NO: 3198134 - RNA, 19 nt, Artificial Sequence
  Description of Artificial Sequence: Synthetic oligonucleotide
cuagcaucuggaaagauca

SEQ ID NO: 3198135 - RNA, 19 nt, Artificial Sequence
  Description of Artificial Sequence: Synthetic oligonucleotide
uuugugguaagaccacaag

SEQ ID NO: 3198136 - RNA, 19 nt, Artificial Sequence
  Description of Artificial Sequence: Synthetic oligonucleotide
uugugguaagaccacaaga

SEQ ID NO: 3198137 - RNA, 19 nt, Artificial Sequence
  Description of Artificial Sequence: Synthetic oligonucleotide
uccauuuucgugcucauua

SEQ ID NO: 3198138 - RNA, 19 nt, Artificial Sequence
  Description of Artificial Sequence: Synthetic oligonucleotide
ugguaagaccacaagaguc

SEQ ID NO: 3198139 - RNA, 19 nt, Artificial Sequence
  Description of Artificial Sequence: Synthetic oligonucleotide
auuuucgugcucauuaaac

SEQ ID NO: 3198140 - RNA, 19 nt, Artificial Sequence
  Description of Artificial Sequence: Synthetic oligonucleotide
uaucauggaagacaguaau

SEQ ID NO: 3198141 - RNA, 19 nt, Artificial Sequence
  Description of Artificial Sequence: Synthetic oligonucleotide
uaggagucagaaauaagcu

SEQ ID NO: 3198142 - RNA, 19 nt, Artificial Sequence
  Description of Artificial Sequence: Synthetic oligonucleotide
aguauuuuaaggaucaaaa

SEQ ID NO: 3198143 - RNA, 19 nt, Artificial Sequence
  Description of Artificial Sequence: Synthetic oligonucleotide
uauuucuuggugaagcgau

SEQ ID NO: 3198144 - RNA, 19 nt, Artificial Sequence
  Description of Artificial Sequence: Synthetic oligonucleotide
caaaagaaucacuagcauc

SEQ ID NO: 3198145 - RNA, 19 nt, Artificial Sequence
  Description of Artificial Sequence: Synthetic oligonucleotide
aagcgauacggauagagua

SEQ ID NO: 3198146 - RNA, 19 nt, Artificial Sequence
  Description of Artificial Sequence: Synthetic oligonucleotide
aauaacuuguuguccacuu

SEQ ID NO: 3198147 - RNA, 19 nt, Artificial Sequence
  Description of Artificial Sequence: Synthetic oligonucleotide
uccaccaagacuagcaggu

SEQ ID NO: 3198148 - RNA, 19 nt, Artificial Sequence
  Description of Artificial Sequence: Synthetic oligonucleotide
ggaaagaucaauuccaguc

SEQ ID NO: 3198149 - RNA, 19 nt, Artificial Sequence
  Description of Artificial Sequence: Synthetic oligonucleotide
  modified_base (17)..(17): a, c, u, g, unknown or other
guuguguaauuuuaacngc

SEQ ID NO: 3198150 - RNA, 19 nt, Artificial Sequence
  Description of Artificial Sequence: Synthetic oligonucleotide
auacggauagaguacguug

SEQ ID NO: 3198151 - RNA, 19 nt, Artificial Sequence
  Description of Artificial Sequence: Synthetic oligonucleotide
ugaagcgauacggauagag

SEQ ID NO: 3198152 - RNA, 19 nt, Artificial Sequence
  Description of Artificial Sequence: Synthetic oligonucleotide
uuuuaaggaucaaaagaau

SEQ ID NO: 3198153 - RNA, 19 nt, Artificial Sequence
  Description of Artificial Sequence: Synthetic oligonucleotide
uuugguaccgugauggcua

SEQ ID NO: 3198154 - RNA, 19 nt, Artificial Sequence
  Description of Artificial Sequence: Synthetic oligonucleotide
aucaauuccagucccagau

SEQ ID NO: 3198155 - RNA, 19 nt, Artificial Sequence
  Description of Artificial Sequence: Synthetic oligonucleotide
auuaucauggaagacagua

SEQ ID NO: 3198156 - RNA, 19 nt, Artificial Sequence
  Description of Artificial Sequence: Synthetic oligonucleotide
aaucacuagcaucuggaaa

SEQ ID NO: 3198157 - RNA, 19 nt, Artificial Sequence
  Description of Artificial Sequence: Synthetic oligonucleotide
aaugaaccuauuucuuggu

SEQ ID NO: 3198158 - RNA, 19 nt, Artificial Sequence
  Description of Artificial Sequence: Synthetic oligonucleotide
uucuaaauguuugugguaa

SEQ ID NO: 3198159 - RNA, 19 nt, Artificial Sequence
  Description of Artificial Sequence: Synthetic oligonucleotide
  modified_base (16)..(16): a, c, u, g, unknown or other
ucgugcucauuaaacnggc

SEQ ID NO: 3198160 - RNA, 19 nt, Artificial Sequence
  Description of Artificial Sequence: Synthetic oligonucleotide
caagagucuccuuugcucc

SEQ ID NO: 3198161 - RNA, 19 nt, Artificial Sequence
  Description of Artificial Sequence: Synthetic oligonucleotide
  modified_base (9)..(9): a, c, u, g, unknown or other
cauuaaacnggcaauaacu

SEQ ID NO: 3198162 - RNA, 19 nt, Artificial Sequence
  Description of Artificial Sequence: Synthetic oligonucleotide
aaacgaacucgcucauggg

SEQ ID NO: 3198163 - RNA, 19 nt, Artificial Sequence
  Description of Artificial Sequence: Synthetic oligonucleotide
uaaauguuugugguaagac

SEQ ID NO: 3198164 - RNA, 19 nt, Artificial Sequence
  Description of Artificial Sequence: Synthetic oligonucleotide
  modified_base (19)..(19): a, c, u, g, unknown or other
acguuguguaauuuuaacn

SEQ ID NO: 3198165 - RNA, 19 nt, Artificial Sequence
  Description of Artificial Sequence: Synthetic oligonucleotide
ucaaaagaaucacuagcau

SEQ ID NO: 3198166 - RNA, 19 nt, Artificial Sequence
  Description of Artificial Sequence: Synthetic oligonucleotide
uaccgugauggcuagagga

SEQ ID NO: 3198167 - RNA, 19 nt, Artificial Sequence
  Description of Artificial Sequence: Synthetic oligonucleotide
aucaaaagaaucacuagca

SEQ ID NO: 3198168 - RNA, 19 nt, Artificial Sequence
  Description of Artificial Sequence: Synthetic oligonucleotide
ggaggaauuaucauggaag

SEQ ID NO: 3198169 - RNA, 19 nt, Artificial Sequence
  Description of Artificial Sequence: Synthetic oligonucleotide
gaggaauuaucauggaaga

SEQ ID NO: 3198170 - RNA, 19 nt, Artificial Sequence
  Description of Artificial Sequence: Synthetic oligonucleotide
cagaucuucuaaauguuug

SEQ ID NO: 3198171 - RNA, 19 nt, Artificial Sequence
  Description of Artificial Sequence: Synthetic oligonucleotide
aaauuuauaccuuucauac

SEQ ID NO: 3198172 - RNA, 19 nt, Artificial Sequence
  Description of Artificial Sequence: Synthetic oligonucleotide
aauaaaaucucacucagga

SEQ ID NO: 3198173 - RNA, 19 nt, Artificial Sequence
  Description of Artificial Sequence: Synthetic oligonucleotide
auucaaauggaauacaggg

SEQ ID NO: 3198174 - RNA, 19 nt, Artificial Sequence
  Description of Artificial Sequence: Synthetic oligonucleotide
aaacuggccauucaaaugg

SEQ ID NO: 3198175 - RNA, 19 nt, Artificial Sequence
  Description of Artificial Sequence: Synthetic oligonucleotide
agggaugucaaauuuauac

SEQ ID NO: 3198176 - RNA, 19 nt, Artificial Sequence
  Description of Artificial Sequence: Synthetic oligonucleotide
uaaaaucucacucaggaac

SEQ ID NO: 3198177 - RNA, 19 nt, Artificial Sequence
  Description of Artificial Sequence: Synthetic oligonucleotide
uuuccuugaaaccagagca

SEQ ID NO: 3198178 - RNA, 19 nt, Artificial Sequence
  Description of Artificial Sequence: Synthetic oligonucleotide
aauuuauaccuuucauacc

SEQ ID NO: 3198179 - RNA, 19 nt, Artificial Sequence
  Description of Artificial Sequence: Synthetic oligonucleotide
uccuuugugaauaagguca

SEQ ID NO: 3198180 - RNA, 19 nt, Artificial Sequence
  Description of Artificial Sequence: Synthetic oligonucleotide
ugagauauuuacucgaugc

SEQ ID NO: 3198181 - RNA, 19 nt, Artificial Sequence
  Description of Artificial Sequence: Synthetic oligonucleotide
uguaaaauaaaccugucuu

SEQ ID NO: 3198182 - RNA, 19 nt, Artificial Sequence
  Description of Artificial Sequence: Synthetic oligonucleotide
aacaacugcaaacagaaau

SEQ ID NO: 3198183 - RNA, 19 nt, Artificial Sequence
  Description of Artificial Sequence: Synthetic oligonucleotide
auuuauaccuuucauacca

SEQ ID NO: 3198184 - RNA, 19 nt, Artificial Sequence
  Description of Artificial Sequence: Synthetic oligonucleotide
uuaauccugagccagagga

SEQ ID NO: 3198185 - RNA, 19 nt, Artificial Sequence
  Description of Artificial Sequence: Synthetic oligonucleotide
gaaauaaaaucucacucag

SEQ ID NO: 3198186 - RNA, 19 nt, Artificial Sequence
  Description of Artificial Sequence: Synthetic oligonucleotide
aaaccugucuuuauaaggc

SEQ ID NO: 3198187 - RNA, 19 nt, Artificial Sequence
  Description of Artificial Sequence: Synthetic oligonucleotide
ucuuuauaaggcuugagga

SEQ ID NO: 3198188 - RNA, 19 nt, Artificial Sequence
  Description of Artificial Sequence: Synthetic oligonucleotide
uaaaccugucuuuauaagg

SEQ ID NO: 3198189 - RNA, 19 nt, Artificial Sequence
  Description of Artificial Sequence: Synthetic oligonucleotide
uuucuucugauguauaucc

SEQ ID NO: 3198190 - RNA, 19 nt, Artificial Sequence
  Description of Artificial Sequence: Synthetic oligonucleotide
uuucauaccaaguagaauu

SEQ ID NO: 3198191 - RNA, 19 nt, Artificial Sequence
  Description of Artificial Sequence: Synthetic oligonucleotide
aagugugauguccaccucc

SEQ ID NO: 3198192 - RNA, 19 nt, Artificial Sequence
  Description of Artificial Sequence: Synthetic oligonucleotide
agaaauaaaaucucacuca

SEQ ID NO: 3198193 - RNA, 19 nt, Artificial Sequence
  Description of Artificial Sequence: Synthetic oligonucleotide
auuuccuugaaaccagagc

SEQ ID NO: 3198194 - RNA, 19 nt, Artificial Sequence
  Description of Artificial Sequence: Synthetic oligonucleotide
ugcaucaucagaaacuggc

SEQ ID NO: 3198195 - RNA, 19 nt, Artificial Sequence
  Description of Artificial Sequence: Synthetic oligonucleotide
agcuuugagauauuuacuc

SEQ ID NO: 3198196 - RNA, 19 nt, Artificial Sequence
  Description of Artificial Sequence: Synthetic oligonucleotide
aacagaaauaaaaucucac

SEQ ID NO: 3198197 - RNA, 19 nt, Artificial Sequence
  Description of Artificial Sequence: Synthetic oligonucleotide
accaaguagaauuuucugg

SEQ ID NO: 3198198 - RNA, 19 nt, Artificial Sequence
  Description of Artificial Sequence: Synthetic oligonucleotide
ugugaauaaggucagcaca

SEQ ID NO: 3198199 - RNA, 19 nt, Artificial Sequence
  Description of Artificial Sequence: Synthetic oligonucleotide
ucaaauggaauacagggau

SEQ ID NO: 3198200 - RNA, 19 nt, Artificial Sequence
  Description of Artificial Sequence: Synthetic oligonucleotide
aauaaaccugucuuuauaa

SEQ ID NO: 3198201 - RNA, 19 nt, Artificial Sequence
  Description of Artificial Sequence: Synthetic oligonucleotide
uuucgcaagaguccaaagg

SEQ ID NO: 3198202 - RNA, 19 nt, Artificial Sequence
  Description of Artificial Sequence: Synthetic oligonucleotide
caagcuuugagauauuuac

SEQ ID NO: 3198203 - RNA, 19 nt, Artificial Sequence
  Description of Artificial Sequence: Synthetic oligonucleotide
aaguagaauuuucuggaag

SEQ ID NO: 3198204 - RNA, 19 nt, Artificial Sequence
  Description of Artificial Sequence: Synthetic oligonucleotide
uuggcuucaucacagagug

SEQ ID NO: 3198205 - RNA, 19 nt, Artificial Sequence
  Description of Artificial Sequence: Synthetic oligonucleotide
uuuugguuucuucugaugu

SEQ ID NO: 3198206 - RNA, 19 nt, Artificial Sequence
  Description of Artificial Sequence: Synthetic oligonucleotide
acagagugggcauggaucc

SEQ ID NO: 3198207 - RNA, 19 nt, Artificial Sequence
  Description of Artificial Sequence: Synthetic oligonucleotide
aaaacaacugcaaacagaa

SEQ ID NO: 3198208 - RNA, 19 nt, Artificial Sequence
  Description of Artificial Sequence: Synthetic oligonucleotide
uuuucuggaagugugaugu

SEQ ID NO: 3198209 - RNA, 19 nt, Artificial Sequence
  Description of Artificial Sequence: Synthetic oligonucleotide
gucuuuauaaggcuugagg

SEQ ID NO: 3198210 - RNA, 19 nt, Artificial Sequence
  Description of Artificial Sequence: Synthetic oligonucleotide
auaaggucagcacaggcag

SEQ ID NO: 3198211 - RNA, 19 nt, Artificial Sequence
  Description of Artificial Sequence: Synthetic oligonucleotide
uccuguaaaauaaaccugu

SEQ ID NO: 3198212 - RNA, 19 nt, Artificial Sequence
  Description of Artificial Sequence: Synthetic oligonucleotide
ugagauuucgcaagagucc

SEQ ID NO: 3198213 - RNA, 19 nt, Artificial Sequence
  Description of Artificial Sequence: Synthetic oligonucleotide
uucgcaagaguccaaagga

SEQ ID NO: 3198214 - RNA, 19 nt, Artificial Sequence
  Description of Artificial Sequence: Synthetic oligonucleotide
uucaaaacaacugcaaaca

SEQ ID NO: 3198215 - RNA, 19 nt, Artificial Sequence
  Description of Artificial Sequence: Synthetic oligonucleotide
auuuacucgaugcaucauc

SEQ ID NO: 3198216 - RNA, 19 nt, Artificial Sequence
  Description of Artificial Sequence: Synthetic oligonucleotide
cuucaaaacaacugcaaac

SEQ ID NO: 3198217 - RNA, 19 nt, Artificial Sequence
  Description of Artificial Sequence: Synthetic oligonucleotide
aguagaauuuucuggaagu

SEQ ID NO: 3198218 - RNA, 19 nt, Artificial Sequence
  Description of Artificial Sequence: Synthetic oligonucleotide
cagaaauaaaaucucacuc

SEQ ID NO: 3198219 - RNA, 19 nt, Artificial Sequence
  Description of Artificial Sequence: Synthetic oligonucleotide
ucucucuucaaaacaacug

SEQ ID NO: 3198220 - RNA, 19 nt, Artificial Sequence
  Description of Artificial Sequence: Synthetic oligonucleotide
uuuucaagcuuugagauau

SEQ ID NO: 3198221 - RNA, 19 nt, Artificial Sequence
  Description of Artificial Sequence: Synthetic oligonucleotide
ucaaaacaacugcaaacag

SEQ ID NO: 3198222 - RNA, 19 nt, Artificial Sequence
  Description of Artificial Sequence: Synthetic oligonucleotide
acagaaauaaaaucucacu

SEQ ID NO: 3198223 - RNA, 19 nt, Artificial Sequence
  Description of Artificial Sequence: Synthetic oligonucleotide
uuuacucgaugcaucauca

SEQ ID NO: 3198224 - RNA, 19 nt, Artificial Sequence
  Description of Artificial Sequence: Synthetic oligonucleotide
uuuauaaggcuugaggacu

SEQ ID NO: 3198225 - RNA, 19 nt, Artificial Sequence
  Description of Artificial Sequence: Synthetic oligonucleotide
cauucaaauggaauacagg

SEQ ID NO: 3198226 - RNA, 19 nt, Artificial Sequence
  Description of Artificial Sequence: Synthetic oligonucleotide
caggcuauuuccuugaaac

SEQ ID NO: 3198227 - RNA, 19 nt, Artificial Sequence
  Description of Artificial Sequence: Synthetic oligonucleotide
ugcaaacagaaauaaaauc

SEQ ID NO: 3198228 - RNA, 19 nt, Artificial Sequence
  Description of Artificial Sequence: Synthetic oligonucleotide
caaacagaaauaaaaucuc

SEQ ID NO: 3198229 - RNA, 19 nt, Artificial Sequence
  Description of Artificial Sequence: Synthetic oligonucleotide
gauuuggcaaucugcaggc

SEQ ID NO: 3198230 - RNA, 19 nt, Artificial Sequence
  Description of Artificial Sequence: Synthetic oligonucleotide
ucaaauuuauaccuuucau

SEQ ID NO: 3198231 - RNA, 19 nt, Artificial Sequence
  Description of Artificial Sequence: Synthetic oligonucleotide
uucaaauggaauacaggga

SEQ ID NO: 3198232 - RNA, 19 nt, Artificial Sequence
  Description of Artificial Sequence: Synthetic oligonucleotide
uucuuuggcuucaucacag

SEQ ID NO: 3198233 - RNA, 19 nt, Artificial Sequence
  Description of Artificial Sequence: Synthetic oligonucleotide
aucaguuugucuucagcac

SEQ ID NO: 3198234 - RNA, 19 nt, Artificial Sequence
  Description of Artificial Sequence: Synthetic oligonucleotide
cucucuucaaaacaacugc

SEQ ID NO: 3198235 - RNA, 19 nt, Artificial Sequence
  Description of Artificial Sequence: Synthetic oligonucleotide
caaucugcaggcuauuucc

SEQ ID NO: 3198236 - RNA, 19 nt, Artificial Sequence
  Description of Artificial Sequence: Synthetic oligonucleotide
gauaucucucuucaaaaca

SEQ ID NO: 3198237 - RNA, 19 nt, Artificial Sequence
  Description of Artificial Sequence: Synthetic oligonucleotide
aaauggaauacagggaugu

SEQ ID NO: 3198238 - RNA, 19 nt, Artificial Sequence
  Description of Artificial Sequence: Synthetic oligonucleotide
ucaguuugucuucagcacc

SEQ ID NO: 3198239 - RNA, 19 nt, Artificial Sequence
  Description of Artificial Sequence: Synthetic oligonucleotide
cuuuauaaggcuugaggac

SEQ ID NO: 3198240 - RNA, 19 nt, Artificial Sequence
  Description of Artificial Sequence: Synthetic oligonucleotide
uaccuuucauaccaaguag

SEQ ID NO: 3198241 - RNA, 19 nt, Artificial Sequence
  Description of Artificial Sequence: Synthetic oligonucleotide
uuugugaauaaggucagca

SEQ ID NO: 3198242 - RNA, 19 nt, Artificial Sequence
  Description of Artificial Sequence: Synthetic oligonucleotide
aauacagggaugucaaauu

SEQ ID NO: 3198243 - RNA, 19 nt, Artificial Sequence
  Description of Artificial Sequence: Synthetic oligonucleotide
uauaccuuucauaccaagu

SEQ ID NO: 3198244 - RNA, 19 nt, Artificial Sequence
  Description of Artificial Sequence: Synthetic oligonucleotide
aaauaaaccugucuuuaua

SEQ ID NO: 3198245 - RNA, 19 nt, Artificial Sequence
  Description of Artificial Sequence: Synthetic oligonucleotide
aaaauaaaccugucuuuau

SEQ ID NO: 3198246 - RNA, 19 nt, Artificial Sequence
  Description of Artificial Sequence: Synthetic oligonucleotide
gaaacuggccauucaaaug

SEQ ID NO: 3198247 - RNA, 19 nt, Artificial Sequence
  Description of Artificial Sequence: Synthetic oligonucleotide
aaauaaaaucucacucagg

SEQ ID NO: 3198248 - RNA, 19 nt, Artificial Sequence
  Description of Artificial Sequence: Synthetic oligonucleotide
ucuucaaaacaacugcaaa

SEQ ID NO: 3198249 - RNA, 19 nt, Artificial Sequence
  Description of Artificial Sequence: Synthetic oligonucleotide
uauuccagcuggcuuuugg

SEQ ID NO: 3198250 - RNA, 19 nt, Artificial Sequence
  Description of Artificial Sequence: Synthetic oligonucleotide
auaaaccugucuuuauaag

SEQ ID NO: 3198251 - RNA, 19 nt, Artificial Sequence
  Description of Artificial Sequence: Synthetic oligonucleotide
uuuggcuucaucacagagu

SEQ ID NO: 3198252 - RNA, 19 nt, Artificial Sequence
  Description of Artificial Sequence: Synthetic oligonucleotide
aauaaggucagcacaggca

SEQ ID NO: 3198253 - RNA, 19 nt, Artificial Sequence
  Description of Artificial Sequence: Synthetic oligonucleotide
ucucuucaaaacaacugca

SEQ ID NO: 3198254 - RNA, 19 nt, Artificial Sequence
  Description of Artificial Sequence: Synthetic oligonucleotide
uuugucuucagcaccugcu

SEQ ID NO: 3198255 - RNA, 19 nt, Artificial Sequence
  Description of Artificial Sequence: Synthetic oligonucleotide
ucacucaggaacuauucca

SEQ ID NO: 3198256 - RNA, 19 nt, Artificial Sequence
  Description of Artificial Sequence: Synthetic oligonucleotide
gaugcaucaucagaaacug

SEQ ID NO: 3198257 - RNA, 19 nt, Artificial Sequence
  Description of Artificial Sequence: Synthetic oligonucleotide
acugcaaacagaaauaaaa

SEQ ID NO: 3198258 - RNA, 19 nt, Artificial Sequence
  Description of Artificial Sequence: Synthetic oligonucleotide
ucaggaacuauuccagcug

SEQ ID NO: 3198259 - RNA, 19 nt, Artificial Sequence
  Description of Artificial Sequence: Synthetic oligonucleotide
aggcuauuuccuugaaacc

SEQ ID NO: 3198260 - RNA, 19 nt, Artificial Sequence
  Description of Artificial Sequence: Synthetic oligonucleotide
uauuuccuugaaaccagag

SEQ ID NO: 3198261 - RNA, 19 nt, Artificial Sequence
  Description of Artificial Sequence: Synthetic oligonucleotide
ggauuuggcaaucugcagg

SEQ ID NO: 3198262 - RNA, 19 nt, Artificial Sequence
  Description of Artificial Sequence: Synthetic oligonucleotide
auauuuacucgaugcauca

SEQ ID NO: 3198263 - RNA, 19 nt, Artificial Sequence
  Description of Artificial Sequence: Synthetic oligonucleotide
ugugauguccaccuccugu

SEQ ID NO: 3198264 - RNA, 19 nt, Artificial Sequence
  Description of Artificial Sequence: Synthetic oligonucleotide
uccaccuccuguaaaauaa

SEQ ID NO: 3198265 - RNA, 19 nt, Artificial Sequence
  Description of Artificial Sequence: Synthetic oligonucleotide
gacuucuuuggcuucauca

SEQ ID NO: 3198266 - RNA, 19 nt, Artificial Sequence
  Description of Artificial Sequence: Synthetic oligonucleotide
aacuauuccagcuggcuuu

SEQ ID NO: 3198267 - RNA, 19 nt, Artificial Sequence
  Description of Artificial Sequence: Synthetic oligonucleotide
ucuucugauguauaucccu

SEQ ID NO: 3198268 - RNA, 19 nt, Artificial Sequence
  Description of Artificial Sequence: Synthetic oligonucleotide
cugcucaaguuucagaagc

SEQ ID NO: 3198269 - RNA, 19 nt, Artificial Sequence
  Description of Artificial Sequence: Synthetic oligonucleotide
gaauaaggucagcacaggc

SEQ ID NO: 3198270 - RNA, 19 nt, Artificial Sequence
  Description of Artificial Sequence: Synthetic oligonucleotide
uuuaauccugagccagagg

SEQ ID NO: 3198271 - RNA, 19 nt, Artificial Sequence
  Description of Artificial Sequence: Synthetic oligonucleotide
uaagaaaugaacaucaccu

SEQ ID NO: 3198272 - RNA, 19 nt, Artificial Sequence
  Description of Artificial Sequence: Synthetic oligonucleotide
guaagcuucacauagaggc

SEQ ID NO: 3198273 - RNA, 19 nt, Artificial Sequence
  Description of Artificial Sequence: Synthetic oligonucleotide
acugcuugagaucagauac

SEQ ID NO: 3198274 - RNA, 19 nt, Artificial Sequence
  Description of Artificial Sequence: Synthetic oligonucleotide
aaggccaugugacuuaggc

SEQ ID NO: 3198275 - RNA, 19 nt, Artificial Sequence
  Description of Artificial Sequence: Synthetic oligonucleotide
uuaagaaaugaacaucacc

SEQ ID NO: 3198276 - RNA, 19 nt, Artificial Sequence
  Description of Artificial Sequence: Synthetic oligonucleotide
auugcaggggaccagcacc

SEQ ID NO: 3198277 - RNA, 19 nt, Artificial Sequence
  Description of Artificial Sequence: Synthetic oligonucleotide
aagaguuaagaaaugaaca

SEQ ID NO: 3198278 - RNA, 19 nt, Artificial Sequence
  Description of Artificial Sequence: Synthetic oligonucleotide
auagaggcaggucauuagc

SEQ ID NO: 3198279 - RNA, 19 nt, Artificial Sequence
  Description of Artificial Sequence: Synthetic oligonucleotide
ugacuuaggcaacuggacg

SEQ ID NO: 3198280 - RNA, 19 nt, Artificial Sequence
  Description of Artificial Sequence: Synthetic oligonucleotide
aacaucaccugacugccuc

SEQ ID NO: 3198281 - RNA, 19 nt, Artificial Sequence
  Description of Artificial Sequence: Synthetic oligonucleotide
agaaucugugucgaggucc

SEQ ID NO: 3198282 - RNA, 19 nt, Artificial Sequence
  Description of Artificial Sequence: Synthetic oligonucleotide
aguagugucuccuugcucu

SEQ ID NO: 3198283 - RNA, 19 nt, Artificial Sequence
  Description of Artificial Sequence: Synthetic oligonucleotide
ugacucaccagcucggacg

SEQ ID NO: 3198284 - RNA, 19 nt, Artificial Sequence
  Description of Artificial Sequence: Synthetic oligonucleotide
ugugacuuaggcaacugga

SEQ ID NO: 3198285 - RNA, 19 nt, Artificial Sequence
  Description of Artificial Sequence: Synthetic oligonucleotide
uguucuaugggaccagggc

SEQ ID NO: 3198286 - RNA, 19 nt, Artificial Sequence
  Description of Artificial Sequence: Synthetic oligonucleotide
gggaaagcaagacagaugc

SEQ ID NO: 3198287 - RNA, 19 nt, Artificial Sequence
  Description of Artificial Sequence: Synthetic oligonucleotide
aguuaagaaaugaacauca

SEQ ID NO: 3198288 - RNA, 19 nt, Artificial Sequence
  Description of Artificial Sequence: Synthetic oligonucleotide
aucagcagaaucugugucg

SEQ ID NO: 3198289 - RNA, 19 nt, Artificial Sequence
  Description of Artificial Sequence: Synthetic oligonucleotide
agaguuaagaaaugaacau

SEQ ID NO: 3198290 - RNA, 19 nt, Artificial Sequence
  Description of Artificial Sequence: Synthetic oligonucleotide
agcucauagaggucaaugg

SEQ ID NO: 3198291 - RNA, 19 nt, Artificial Sequence
  Description of Artificial Sequence: Synthetic oligonucleotide
gucaauggagaccucaucc

SEQ ID NO: 3198292 - RNA, 19 nt, Artificial Sequence
  Description of Artificial Sequence: Synthetic oligonucleotide
ugucucauccucaaucuug

SEQ ID NO: 3198293 - RNA, 19 nt, Artificial Sequence
  Description of Artificial Sequence: Synthetic oligonucleotide
agugaaguuguccaugaug

SEQ ID NO: 3198294 - RNA, 19 nt, Artificial Sequence
  Description of Artificial Sequence: Synthetic oligonucleotide
aaucuuggcggucuugaug

SEQ ID NO: 3198295 - RNA, 19 nt, Artificial Sequence
  Description of Artificial Sequence: Synthetic oligonucleotide
agaaaggaugccaucaaac

SEQ ID NO: 3198296 - RNA, 19 nt, Artificial Sequence
  Description of Artificial Sequence: Synthetic oligonucleotide
gauaccagcuucaucagug

SEQ ID NO: 3198297 - RNA, 19 nt, Artificial Sequence
  Description of Artificial Sequence: Synthetic oligonucleotide
ugcauccaaagaaaggaug

SEQ ID NO: 3198298 - RNA, 19 nt, Artificial Sequence
  Description of Artificial Sequence: Synthetic oligonucleotide
agaugcaagaguuaagaaa

SEQ ID NO: 3198299 - RNA, 19 nt, Artificial Sequence
  Description of Artificial Sequence: Synthetic oligonucleotide
cuugcggucacacucuucc

SEQ ID NO: 3198300 - RNA, 19 nt, Artificial Sequence
  Description of Artificial Sequence: Synthetic oligonucleotide
auagaggucaauggagacc

SEQ ID NO: 3198301 - RNA, 19 nt, Artificial Sequence
  Description of Artificial Sequence: Synthetic oligonucleotide
ugagcuuugccacaagaaa

SEQ ID NO: 3198302 - RNA, 19 nt, Artificial Sequence
  Description of Artificial Sequence: Synthetic oligonucleotide
gucauugaggaucaggaac

SEQ ID NO: 3198303 - RNA, 19 nt, Artificial Sequence
  Description of Artificial Sequence: Synthetic oligonucleotide
agcuucaucagugacucac

SEQ ID NO: 3198304 - RNA, 19 nt, Artificial Sequence
  Description of Artificial Sequence: Synthetic oligonucleotide
aauuguccuguucacccug

SEQ ID NO: 3198305 - RNA, 19 nt, Artificial Sequence
  Description of Artificial Sequence: Synthetic oligonucleotide
agcuuugccacaagaaacc

SEQ ID NO: 3198306 - RNA, 19 nt, Artificial Sequence
  Description of Artificial Sequence: Synthetic oligonucleotide
uguguaagacugcaguagu

SEQ ID NO: 3198307 - RNA, 19 nt, Artificial Sequence
  Description of Artificial Sequence: Synthetic oligonucleotide
aagcaagacagaugcaaga

SEQ ID NO: 3198308 - RNA, 19 nt, Artificial Sequence
  Description of Artificial Sequence: Synthetic oligonucleotide
aaagcaagacagaugcaag

SEQ ID NO: 3198309 - RNA, 19 nt, Artificial Sequence
  Description of Artificial Sequence: Synthetic oligonucleotide
aucaggaacugcuugagau

SEQ ID NO: 3198310 - RNA, 19 nt, Artificial Sequence
  Description of Artificial Sequence: Synthetic oligonucleotide
guucuaugggaccagggcc

SEQ ID NO: 3198311 - RNA, 19 nt, Artificial Sequence
  Description of Artificial Sequence: Synthetic oligonucleotide
ucugugucgagguccagcc

SEQ ID NO: 3198312 - RNA, 19 nt, Artificial Sequence
  Description of Artificial Sequence: Synthetic oligonucleotide
uuggcggucuugaugaucu

SEQ ID NO: 3198313 - RNA, 19 nt, Artificial Sequence
  Description of Artificial Sequence: Synthetic oligonucleotide
aaagaaaggaugccaucaa

SEQ ID NO: 3198314 - RNA, 19 nt, Artificial Sequence
  Description of Artificial Sequence: Synthetic oligonucleotide
agcucgaacgugcaucucg

SEQ ID NO: 3198315 - RNA, 19 nt, Artificial Sequence
  Description of Artificial Sequence: Synthetic oligonucleotide
uagaggucaauggagaccu

SEQ ID NO: 3198316 - RNA, 19 nt, Artificial Sequence
  Description of Artificial Sequence: Synthetic oligonucleotide
auuagcuucgcagagacuu

SEQ ID NO: 3198317 - RNA, 19 nt, Artificial Sequence
  Description of Artificial Sequence: Synthetic oligonucleotide
uguaagacugcaguagugu

SEQ ID NO: 3198318 - RNA, 19 nt, Artificial Sequence
  Description of Artificial Sequence: Synthetic oligonucleotide
ugggaagucauugaggauc

SEQ ID NO: 3198319 - RNA, 19 nt, Artificial Sequence
  Description of Artificial Sequence: Synthetic oligonucleotide
uccaaagaaaggaugccau

SEQ ID NO: 3198320 - RNA, 19 nt, Artificial Sequence
  Description of Artificial Sequence: Synthetic oligonucleotide
acaccugugucucauccuc

SEQ ID NO: 3198321 - RNA, 19 nt, Artificial Sequence
  Description of Artificial Sequence: Synthetic oligonucleotide
ugacaccugugucucaucc

SEQ ID NO: 3198322 - RNA, 19 nt, Artificial Sequence
  Description of Artificial Sequence: Synthetic oligonucleotide
gagaucagauaccagcuuc

SEQ ID NO: 3198323 - RNA, 19 nt, Artificial Sequence
  Description of Artificial Sequence: Synthetic oligonucleotide
gaugucgucuuugagucgc

SEQ ID NO: 3198324 - RNA, 19 nt, Artificial Sequence
  Description of Artificial Sequence: Synthetic oligonucleotide
gaugcaagaguuaagaaau

SEQ ID NO: 3198325 - RNA, 19 nt, Artificial Sequence
  Description of Artificial Sequence: Synthetic oligonucleotide
acagaugcaagaguuaaga

SEQ ID NO: 3198326 - RNA, 19 nt, Artificial Sequence
  Description of Artificial Sequence: Synthetic oligonucleotide
cuugcauccaaagaaagga

SEQ ID NO: 3198327 - RNA, 19 nt, Artificial Sequence
  Description of Artificial Sequence: Synthetic oligonucleotide
gaaguuguccaugauggac

SEQ ID NO: 3198328 - RNA, 19 nt, Artificial Sequence
  Description of Artificial Sequence: Synthetic oligonucleotide
gagaccucaucccgaaggg

SEQ ID NO: 3198329 - RNA, 19 nt, Artificial Sequence
  Description of Artificial Sequence: Synthetic oligonucleotide
gacuuaggcaacuggacga

SEQ ID NO: 3198330 - RNA, 19 nt, Artificial Sequence
  Description of Artificial Sequence: Synthetic oligonucleotide
gaaagcaagacagaugcaa

SEQ ID NO: 3198331 - RNA, 19 nt, Artificial Sequence
  Description of Artificial Sequence: Synthetic oligonucleotide
aaguuguccaugauggacu

SEQ ID NO: 3198332 - RNA, 19 nt, Artificial Sequence
  Description of Artificial Sequence: Synthetic oligonucleotide
aucaaacaaggccauguga

SEQ ID NO: 3198333 - RNA, 19 nt, Artificial Sequence
  Description of Artificial Sequence: Synthetic oligonucleotide
aagaaaggaugccaucaaa

SEQ ID NO: 3198334 - RNA, 19 nt, Artificial Sequence
  Description of Artificial Sequence: Synthetic oligonucleotide
ugagaggccaucagcagaa

SEQ ID NO: 3198335 - RNA, 19 nt, Artificial Sequence
  Description of Artificial Sequence: Synthetic oligonucleotide
acgaguaguacuccuccuc

SEQ ID NO: 3198336 - RNA, 19 nt, Artificial Sequence
  Description of Artificial Sequence: Synthetic oligonucleotide
aaagccaggguggggaaag

SEQ ID NO: 3198337 - RNA, 19 nt, Artificial Sequence
  Description of Artificial Sequence: Synthetic oligonucleotide
augugacuuaggcaacugg

SEQ ID NO: 3198338 - RNA, 19 nt, Artificial Sequence
  Description of Artificial Sequence: Synthetic oligonucleotide
ugugucgagguccagccuc

SEQ ID NO: 3198339 - RNA, 19 nt, Artificial Sequence
  Description of Artificial Sequence: Synthetic oligonucleotide
gguggggaaagcaagacag

SEQ ID NO: 3198340 - RNA, 19 nt, Artificial Sequence
  Description of Artificial Sequence: Synthetic oligonucleotide
ugcaucucguaauuguccu

SEQ ID NO: 3198341 - RNA, 19 nt, Artificial Sequence
  Description of Artificial Sequence: Synthetic oligonucleotide
guuacgcuggucgauagcc

SEQ ID NO: 3198342 - RNA, 19 nt, Artificial Sequence
  Description of Artificial Sequence: Synthetic oligonucleotide
ugcaguagugucuccuugc

SEQ ID NO: 3198343 - RNA, 19 nt, Artificial Sequence
  Description of Artificial Sequence: Synthetic oligonucleotide
ggagaccucaucccgaagg

SEQ ID NO: 3198344 - RNA, 19 nt, Artificial Sequence
  Description of Artificial Sequence: Synthetic oligonucleotide
ugucuccuugcucuggggc

SEQ ID NO: 3198345 - RNA, 19 nt, Artificial Sequence
  Description of Artificial Sequence: Synthetic oligonucleotide
ucccgaagggugaugagcu

SEQ ID NO: 3198346 - RNA, 19 nt, Artificial Sequence
  Description of Artificial Sequence: Synthetic oligonucleotide
gauagccucauucacagau

SEQ ID NO: 3198347 - RNA, 19 nt, Artificial Sequence
  Description of Artificial Sequence: Synthetic oligonucleotide
uggucgauagccucauuca

SEQ ID NO: 3198348 - RNA, 19 nt, Artificial Sequence
  Description of Artificial Sequence: Synthetic oligonucleotide
cucagguauguucuauggg

SEQ ID NO: 3198349 - RNA, 19 nt, Artificial Sequence
  Description of Artificial Sequence: Synthetic oligonucleotide
aucagauaccagcuucauc

SEQ ID NO: 3198350 - RNA, 19 nt, Artificial Sequence
  Description of Artificial Sequence: Synthetic oligonucleotide
agcaagacagaugcaagag

SEQ ID NO: 3198351 - RNA, 19 nt, Artificial Sequence
  Description of Artificial Sequence: Synthetic oligonucleotide
cucguaauuguccuguuca

SEQ ID NO: 3198352 - RNA, 19 nt, Artificial Sequence
  Description of Artificial Sequence: Synthetic oligonucleotide
gaggaucaggaacugcuug

SEQ ID NO: 3198353 - RNA, 19 nt, Artificial Sequence
  Description of Artificial Sequence: Synthetic oligonucleotide
cugcugguuacgcuggucg

SEQ ID NO: 3198354 - RNA, 19 nt, Artificial Sequence
  Description of Artificial Sequence: Synthetic oligonucleotide
cuuugccacaagaaacccc

SEQ ID NO: 3198355 - RNA, 19 nt, Artificial Sequence
  Description of Artificial Sequence: Synthetic oligonucleotide
aucccgaagggugaugagc

SEQ ID NO: 3198356 - RNA, 19 nt, Artificial Sequence
  Description of Artificial Sequence: Synthetic oligonucleotide
cauagaggcaggucauuag

SEQ ID NO: 3198357 - RNA, 19 nt, Artificial Sequence
  Description of Artificial Sequence: Synthetic oligonucleotide
uucacagaugggaagucau

SEQ ID NO: 3198358 - RNA, 19 nt, Artificial Sequence
  Description of Artificial Sequence: Synthetic oligonucleotide
agucgcuuguguaagacug

SEQ ID NO: 3198359 - RNA, 19 nt, Artificial Sequence
  Description of Artificial Sequence: Synthetic oligonucleotide
ucgaacgugcaucucguaa

SEQ ID NO: 3198360 - RNA, 19 nt, Artificial Sequence
  Description of Artificial Sequence: Synthetic oligonucleotide
ucaaucuuggcggucuuga

SEQ ID NO: 3198361 - RNA, 19 nt, Artificial Sequence
  Description of Artificial Sequence: Synthetic oligonucleotide
aucagugacucaccagcuc

SEQ ID NO: 3198362 - RNA, 19 nt, Artificial Sequence
  Description of Artificial Sequence: Synthetic oligonucleotide
uuaggcaacuggacgagua

SEQ ID NO: 3198363 - RNA, 19 nt, Artificial Sequence
  Description of Artificial Sequence: Synthetic oligonucleotide
agaagcucagguauguucu

SEQ ID NO: 3198364 - RNA, 19 nt, Artificial Sequence
  Description of Artificial Sequence: Synthetic oligonucleotide
ugcggucacacucuuccug

SEQ ID NO: 3198365 - RNA, 19 nt, Artificial Sequence
  Description of Artificial Sequence: Synthetic oligonucleotide
agaugggaagucauugagg

SEQ ID NO: 3198366 - RNA, 19 nt, Artificial Sequence
  Description of Artificial Sequence: Synthetic oligonucleotide
ucuuggcugaccccucugc

SEQ ID NO: 3198367 - RNA, 19 nt, Artificial Sequence
  Description of Artificial Sequence: Synthetic oligonucleotide
augccaucaaacaaggcca

SEQ ID NO: 3198368 - RNA, 19 nt, Artificial Sequence
  Description of Artificial Sequence: Synthetic oligonucleotide
agaggccaucagcagaauc

SEQ ID NO: 3198369 - RNA, 19 nt, Artificial Sequence
  Description of Artificial Sequence: Synthetic oligonucleotide
aucugugucgagguccagc

SEQ ID NO: 3198370 - RNA, 19 nt, Artificial Sequence
  Description of Artificial Sequence: Synthetic oligonucleotide
caaagaaaggaugccauca

SEQ ID NO: 3198371 - RNA, 19 nt, Artificial Sequence
  Description of Artificial Sequence: Synthetic oligonucleotide
aauaucgucauccagggcc

SEQ ID NO: 3198372 - RNA, 19 nt, Artificial Sequence
  Description of Artificial Sequence: Synthetic oligonucleotide
auugaaagaugccagggcc

SEQ ID NO: 3198373 - RNA, 19 nt, Artificial Sequence
  Description of Artificial Sequence: Synthetic oligonucleotide
uuagauuccagcaugaauc

SEQ ID NO: 3198374 - RNA, 19 nt, Artificial Sequence
  Description of Artificial Sequence: Synthetic oligonucleotide
ugacguagcagacauaggg

SEQ ID NO: 3198375 - RNA, 19 nt, Artificial Sequence
  Description of Artificial Sequence: Synthetic oligonucleotide
uucauuagcgcaaucuucg

SEQ ID NO: 3198376 - RNA, 19 nt, Artificial Sequence
  Description of Artificial Sequence: Synthetic oligonucleotide
ucaucaguaauucuucggg

SEQ ID NO: 3198377 - RNA, 19 nt, Artificial Sequence
  Description of Artificial Sequence: Synthetic oligonucleotide
auaaugagccaacaccucc

SEQ ID NO: 3198378 - RNA, 19 nt, Artificial Sequence
  Description of Artificial Sequence: Synthetic oligonucleotide
aauucuucgggauggaugu

SEQ ID NO: 3198379 - RNA, 19 nt, Artificial Sequence
  Description of Artificial Sequence: Synthetic oligonucleotide
aaggcugccauuccagugc

SEQ ID NO: 3198380 - RNA, 19 nt, Artificial Sequence
  Description of Artificial Sequence: Synthetic oligonucleotide
uuuuguggggcaaaacugg

SEQ ID NO: 3198381 - RNA, 19 nt, Artificial Sequence
  Description of Artificial Sequence: Synthetic oligonucleotide
auugauuugcccuuauuag

SEQ ID NO: 3198382 - RNA, 19 nt, Artificial Sequence
  Description of Artificial Sequence: Synthetic oligonucleotide
aaucggaaagcaccaauuc

SEQ ID NO: 3198383 - RNA, 19 nt, Artificial Sequence
  Description of Artificial Sequence: Synthetic oligonucleotide
ucucuguuaccauugaaag

SEQ ID NO: 3198384 - RNA, 19 nt, Artificial Sequence
  Description of Artificial Sequence: Synthetic oligonucleotide
aauuccuguauuuggguug

SEQ ID NO: 3198385 - RNA, 19 nt, Artificial Sequence
  Description of Artificial Sequence: Synthetic oligonucleotide
ucuguuaccauugaaagau

SEQ ID NO: 3198386 - RNA, 19 nt, Artificial Sequence
  Description of Artificial Sequence: Synthetic oligonucleotide
auuagcgcaaucuucgcag

SEQ ID NO: 3198387 - RNA, 19 nt, Artificial Sequence
  Description of Artificial Sequence: Synthetic oligonucleotide
uggauguucauugaacacg

SEQ ID NO: 3198388 - RNA, 19 nt, Artificial Sequence
  Description of Artificial Sequence: Synthetic oligonucleotide
aacuggaaacucccaaaac

SEQ ID NO: 3198389 - RNA, 19 nt, Artificial Sequence
  Description of Artificial Sequence: Synthetic oligonucleotide
aaacucccaaaacaacuuc

SEQ ID NO: 3198390 - RNA, 19 nt, Artificial Sequence
  Description of Artificial Sequence: Synthetic oligonucleotide
augcauguugcccaacugc

SEQ ID NO: 3198391 - RNA, 19 nt, Artificial Sequence
  Description of Artificial Sequence: Synthetic oligonucleotide
uguuaccauugaaagaugc

SEQ ID NO: 3198392 - RNA, 19 nt, Artificial Sequence
  Description of Artificial Sequence: Synthetic oligonucleotide
guuggaagggaccaucucg

SEQ ID NO: 3198393 - RNA, 19 nt, Artificial Sequence
  Description of Artificial Sequence: Synthetic oligonucleotide
augagaauaucuuucuucu

SEQ ID NO: 3198394 - RNA, 19 nt, Artificial Sequence
  Description of Artificial Sequence: Synthetic oligonucleotide
uagauuccagcaugaaucg

SEQ ID NO: 3198395 - RNA, 19 nt, Artificial Sequence
  Description of Artificial Sequence: Synthetic oligonucleotide
ucauugaacacggaguuca

SEQ ID NO: 3198396 - RNA, 19 nt, Artificial Sequence
  Description of Artificial Sequence: Synthetic oligonucleotide
agugacguagcagacauag

SEQ ID NO: 3198397 - RNA, 19 nt, Artificial Sequence
  Description of Artificial Sequence: Synthetic oligonucleotide
uaccauugaaagaugccag

SEQ ID NO: 3198398 - RNA, 19 nt, Artificial Sequence
  Description of Artificial Sequence: Synthetic oligonucleotide
uguauuuggguugucagcu

SEQ ID NO: 3198399 - RNA, 19 nt, Artificial Sequence
  Description of Artificial Sequence: Synthetic oligonucleotide
aaaacuggaaacucccaaa

SEQ ID NO: 3198400 - RNA, 19 nt, Artificial Sequence
  Description of Artificial Sequence: Synthetic oligonucleotide
gauggauguucauugaaca

SEQ ID NO: 3198401 - RNA, 19 nt, Artificial Sequence
  Description of Artificial Sequence: Synthetic oligonucleotide
uuaccauugaaagaugcca

SEQ ID NO: 3198402 - RNA, 19 nt, Artificial Sequence
  Description of Artificial Sequence: Synthetic oligonucleotide
uugauuugcccuuauuaga

SEQ ID NO: 3198403 - RNA, 19 nt, Artificial Sequence
  Description of Artificial Sequence: Synthetic oligonucleotide
auggauguucauugaacac

SEQ ID NO: 3198404 - RNA, 19 nt, Artificial Sequence
  Description of Artificial Sequence: Synthetic oligonucleotide
ucaguaauucuucgggaug

SEQ ID NO: 3198405 - RNA, 19 nt, Artificial Sequence
  Description of Artificial Sequence: Synthetic oligonucleotide
ugcauguugcccaacugcc

SEQ ID NO: 3198406 - RNA, 19 nt, Artificial Sequence
  Description of Artificial Sequence: Synthetic oligonucleotide
ugaaacuccagcauugauu

SEQ ID NO: 3198407 - RNA, 19 nt, Artificial Sequence
  Description of Artificial Sequence: Synthetic oligonucleotide
aaacuggaaacucccaaaa

SEQ ID NO: 3198408 - RNA, 19 nt, Artificial Sequence
  Description of Artificial Sequence: Synthetic oligonucleotide
uugguggcgaauaucguca

SEQ ID NO: 3198409 - RNA, 19 nt, Artificial Sequence
  Description of Artificial Sequence: Synthetic oligonucleotide
ugcuucaucugccagaauu

SEQ ID NO: 3198410 - RNA, 19 nt, Artificial Sequence
  Description of Artificial Sequence: Synthetic oligonucleotide
cugucuuucccucauggcc

SEQ ID NO: 3198411 - RNA, 19 nt, Artificial Sequence
  Description of Artificial Sequence: Synthetic oligonucleotide
uggguugucagcuuccucu

SEQ ID NO: 3198412 - RNA, 19 nt, Artificial Sequence
  Description of Artificial Sequence: Synthetic oligonucleotide
ugucuuucccucauggccu

SEQ ID NO: 3198413 - RNA, 19 nt, Artificial Sequence
  Description of Artificial Sequence: Synthetic oligonucleotide
cucaccaccgccuccacgg

SEQ ID NO: 3198414 - RNA, 19 nt, Artificial Sequence
  Description of Artificial Sequence: Synthetic oligonucleotide
acugucuuucccucauggc

SEQ ID NO: 3198415 - RNA, 19 nt, Artificial Sequence
  Description of Artificial Sequence: Synthetic oligonucleotide
guagcagacauagggaggg

SEQ ID NO: 3198416 - RNA, 19 nt, Artificial Sequence
  Description of Artificial Sequence: Synthetic oligonucleotide
aauaaacucaucaguaauu

SEQ ID NO: 3198417 - RNA, 19 nt, Artificial Sequence
  Description of Artificial Sequence: Synthetic oligonucleotide
acguagcagacauagggag

SEQ ID NO: 3198418 - RNA, 19 nt, Artificial Sequence
  Description of Artificial Sequence: Synthetic oligonucleotide
uguggggcaaaacuggaaa

SEQ ID NO: 3198419 - RNA, 19 nt, Artificial Sequence
  Description of Artificial Sequence: Synthetic oligonucleotide
cuuguggaagcgcagcucc

SEQ ID NO: 3198420 - RNA, 19 nt, Artificial Sequence
  Description of Artificial Sequence: Synthetic oligonucleotide
auuagauuccagcaugaau

SEQ ID NO: 3198421 - RNA, 19 nt, Artificial Sequence
  Description of Artificial Sequence: Synthetic oligonucleotide
cuuaaggcugccauuccag

SEQ ID NO: 3198422 - RNA, 19 nt, Artificial Sequence
  Description of Artificial Sequence: Synthetic oligonucleotide
ucauccagggcccggugcg

SEQ ID NO: 3198423 - RNA, 19 nt, Artificial Sequence
  Description of Artificial Sequence: Synthetic oligonucleotide
acucaucaguaauucuucg

SEQ ID NO: 3198424 - RNA, 19 nt, Artificial Sequence
  Description of Artificial Sequence: Synthetic oligonucleotide
gaagggaccaucucguaca

SEQ ID NO: 3198425 - RNA, 19 nt, Artificial Sequence
  Description of Artificial Sequence: Synthetic oligonucleotide
caccaauuccuguauuugg

SEQ ID NO: 3198426 - RNA, 19 nt, Artificial Sequence
  Description of Artificial Sequence: Synthetic oligonucleotide
ugagacacucuucucaaua

SEQ ID NO: 3198427 - RNA, 19 nt, Artificial Sequence
  Description of Artificial Sequence: Synthetic oligonucleotide
ucguacaccaccagagccc

SEQ ID NO: 3198428 - RNA, 19 nt, Artificial Sequence
  Description of Artificial Sequence: Synthetic oligonucleotide
auucacucggccguagccc

SEQ ID NO: 3198429 - RNA, 19 nt, Artificial Sequence
  Description of Artificial Sequence: Synthetic oligonucleotide
uaaugagccaacaccuccu

SEQ ID NO: 3198430 - RNA, 19 nt, Artificial Sequence
  Description of Artificial Sequence: Synthetic oligonucleotide
uuggaagggaccaucucgu

SEQ ID NO: 3198431 - RNA, 19 nt, Artificial Sequence
  Description of Artificial Sequence: Synthetic oligonucleotide
uugaaagaugccagggccu

SEQ ID NO: 3198432 - RNA, 19 nt, Artificial Sequence
  Description of Artificial Sequence: Synthetic oligonucleotide
agcaugagaauaucuuucu

SEQ ID NO: 3198433 - RNA, 19 nt, Artificial Sequence
  Description of Artificial Sequence: Synthetic oligonucleotide
aaugagccaacaccuccug

SEQ ID NO: 3198434 - RNA, 19 nt, Artificial Sequence
  Description of Artificial Sequence: Synthetic oligonucleotide
cucguacaccaccagagcc

SEQ ID NO: 3198435 - RNA, 19 nt, Artificial Sequence
  Description of Artificial Sequence: Synthetic oligonucleotide
aagggaccaucucguacac

SEQ ID NO: 3198436 - RNA, 19 nt, Artificial Sequence
  Description of Artificial Sequence: Synthetic oligonucleotide
cacucuucucaauaaacuc

SEQ ID NO: 3198437 - RNA, 19 nt, Artificial Sequence
  Description of Artificial Sequence: Synthetic oligonucleotide
uucaagucagcgccccggg

SEQ ID NO: 3198438 - RNA, 19 nt, Artificial Sequence
  Description of Artificial Sequence: Synthetic oligonucleotide
aucaguaauucuucgggau

SEQ ID NO: 3198439 - RNA, 19 nt, Artificial Sequence
  Description of Artificial Sequence: Synthetic oligonucleotide
uggaaacucccaaaacaac

SEQ ID NO: 3198440 - RNA, 19 nt, Artificial Sequence
  Description of Artificial Sequence: Synthetic oligonucleotide
gaaacuccagcauugauuu

SEQ ID NO: 3198441 - RNA, 19 nt, Artificial Sequence
  Description of Artificial Sequence: Synthetic oligonucleotide
ugagccaacaccuccuguc

SEQ ID NO: 3198442 - RNA, 19 nt, Artificial Sequence
  Description of Artificial Sequence: Synthetic oligonucleotide
uaaggcugccauuccagug

SEQ ID NO: 3198443 - RNA, 19 nt, Artificial Sequence
  Description of Artificial Sequence: Synthetic oligonucleotide
cacugucuuucccucaugg

SEQ ID NO: 3198444 - RNA, 19 nt, Artificial Sequence
  Description of Artificial Sequence: Synthetic oligonucleotide
ugccauuccagugcaacag

SEQ ID NO: 3198445 - RNA, 19 nt, Artificial Sequence
  Description of Artificial Sequence: Synthetic oligonucleotide
aguucauuagcgcaaucuu

SEQ ID NO: 3198446 - RNA, 19 nt, Artificial Sequence
  Description of Artificial Sequence: Synthetic oligonucleotide
cauuagcuccugaaacucc

SEQ ID NO: 3198447 - RNA, 19 nt, Artificial Sequence
  Description of Artificial Sequence: Synthetic oligonucleotide
gauuccagcaugaaucgga

SEQ ID NO: 3198448 - RNA, 19 nt, Artificial Sequence
  Description of Artificial Sequence: Synthetic oligonucleotide
gaugcauguugcccaacug

SEQ ID NO: 3198449 - RNA, 19 nt, Artificial Sequence
  Description of Artificial Sequence: Synthetic oligonucleotide
ggauguucauugaacacgg

SEQ ID NO: 3198450 - RNA, 19 nt, Artificial Sequence
  Description of Artificial Sequence: Synthetic oligonucleotide
aucucguacaccaccagag

SEQ ID NO: 3198451 - RNA, 19 nt, Artificial Sequence
  Description of Artificial Sequence: Synthetic oligonucleotide
gaauuccugaagugccucc

SEQ ID NO: 3198452 - RNA, 19 nt, Artificial Sequence
  Description of Artificial Sequence: Synthetic oligonucleotide
acucuucucaauaaacuca

SEQ ID NO: 3198453 - RNA, 19 nt, Artificial Sequence
  Description of Artificial Sequence: Synthetic oligonucleotide
acugucauuagcuccugaa

SEQ ID NO: 3198454 - RNA, 19 nt, Artificial Sequence
  Description of Artificial Sequence: Synthetic oligonucleotide
guuaccauugaaagaugcc

SEQ ID NO: 3198455 - RNA, 19 nt, Artificial Sequence
  Description of Artificial Sequence: Synthetic oligonucleotide
auuuggguugucagcuucc

SEQ ID NO: 3198456 - RNA, 19 nt, Artificial Sequence
  Description of Artificial Sequence: Synthetic oligonucleotide
ucggccguagcccugcgug

SEQ ID NO: 3198457 - RNA, 19 nt, Artificial Sequence
  Description of Artificial Sequence: Synthetic oligonucleotide
ccagucuaaagccauuugg

SEQ ID NO: 3198458 - RNA, 19 nt, Artificial Sequence
  Description of Artificial Sequence: Synthetic oligonucleotide
accuacgccgggcugcagc

SEQ ID NO: 3198459 - RNA, 19 nt, Artificial Sequence
  Description of Artificial Sequence: Synthetic oligonucleotide
gcaugaaucggaaagcacc

SEQ ID NO: 3198460 - RNA, 19 nt, Artificial Sequence
  Description of Artificial Sequence: Synthetic oligonucleotide
auuccugaagugccuccac

SEQ ID NO: 3198461 - RNA, 19 nt, Artificial Sequence
  Description of Artificial Sequence: Synthetic oligonucleotide
aaagccauuugguggcgaa

SEQ ID NO: 3198462 - RNA, 19 nt, Artificial Sequence
  Description of Artificial Sequence: Synthetic oligonucleotide
caugaaucggaaagcacca

SEQ ID NO: 3198463 - RNA, 19 nt, Artificial Sequence
  Description of Artificial Sequence: Synthetic oligonucleotide
cauucacucggccguagcc

SEQ ID NO: 3198464 - RNA, 19 nt, Artificial Sequence
  Description of Artificial Sequence: Synthetic oligonucleotide
agaauuccugaagugccuc

SEQ ID NO: 3198465 - RNA, 19 nt, Artificial Sequence
  Description of Artificial Sequence: Synthetic oligonucleotide
aaagaugccagggccucug

SEQ ID NO: 3198466 - RNA, 19 nt, Artificial Sequence
  Description of Artificial Sequence: Synthetic oligonucleotide
ucauuagcgcaaucuucgc

SEQ ID NO: 3198467 - RNA, 19 nt, Artificial Sequence
  Description of Artificial Sequence: Synthetic oligonucleotide
aauuccugaagugccucca

SEQ ID NO: 3198468 - RNA, 19 nt, Artificial Sequence
  Description of Artificial Sequence: Synthetic oligonucleotide
ucucguucaguggaggcca

SEQ ID NO: 3198469 - RNA, 19 nt, Artificial Sequence
  Description of Artificial Sequence: Synthetic oligonucleotide
cucucuguuaccauugaaa

SEQ ID NO: 3198470 - RNA, 19 nt, Artificial Sequence
  Description of Artificial Sequence: Synthetic oligonucleotide
ucuucaagucagcgccccg

SEQ ID NO: 3198471 - RNA, 19 nt, Artificial Sequence
  Description of Artificial Sequence: Synthetic oligonucleotide
uuucuagucagaaugaugg

SEQ ID NO: 3198472 - RNA, 19 nt, Artificial Sequence
  Description of Artificial Sequence: Synthetic oligonucleotide
aaaacagggaaauauucac

SEQ ID NO: 3198473 - RNA, 19 nt, Artificial Sequence
  Description of Artificial Sequence: Synthetic oligonucleotide
aauauucacaaacaaacug

SEQ ID NO: 3198474 - RNA, 19 nt, Artificial Sequence
  Description of Artificial Sequence: Synthetic oligonucleotide
gauguuucuagucagaaug

SEQ ID NO: 3198475 - RNA, 19 nt, Artificial Sequence
  Description of Artificial Sequence: Synthetic oligonucleotide
aauagggaacucuauaaag

SEQ ID NO: 3198476 - RNA, 19 nt, Artificial Sequence
  Description of Artificial Sequence: Synthetic oligonucleotide
gaaugauggacauaaacag

SEQ ID NO: 3198477 - RNA, 19 nt, Artificial Sequence
  Description of Artificial Sequence: Synthetic oligonucleotide
aaagaagccugucagaugu

SEQ ID NO: 3198478 - RNA, 19 nt, Artificial Sequence
  Description of Artificial Sequence: Synthetic oligonucleotide
aaaacaggcucacucuacc

SEQ ID NO: 3198479 - RNA, 19 nt, Artificial Sequence
  Description of Artificial Sequence: Synthetic oligonucleotide
aauguuacaugugagaaca

SEQ ID NO: 3198480 - RNA, 19 nt, Artificial Sequence
  Description of Artificial Sequence: Synthetic oligonucleotide
gaucauaagauguuucuag

SEQ ID NO: 3198481 - RNA, 19 nt, Artificial Sequence
  Description of Artificial Sequence: Synthetic oligonucleotide
agaaacacaaccuucccag

SEQ ID NO: 3198482 - RNA, 19 nt, Artificial Sequence
  Description of Artificial Sequence: Synthetic oligonucleotide
ucugauacaguguaggcca

SEQ ID NO: 3198483 - RNA, 19 nt, Artificial Sequence
  Description of Artificial Sequence: Synthetic oligonucleotide
acuaaaggcagcucuuugc

SEQ ID NO: 3198484 - RNA, 19 nt, Artificial Sequence
  Description of Artificial Sequence: Synthetic oligonucleotide
ugcugagaaaaccugaggc

SEQ ID NO: 3198485 - RNA, 19 nt, Artificial Sequence
  Description of Artificial Sequence: Synthetic oligonucleotide
ucuauaaagugcuucuugc

SEQ ID NO: 3198486 - RNA, 19 nt, Artificial Sequence
  Description of Artificial Sequence: Synthetic oligonucleotide
gaucuugccaacuuguacc

SEQ ID NO: 3198487 - RNA, 19 nt, Artificial Sequence
  Description of Artificial Sequence: Synthetic oligonucleotide
uacaguguaggccaggacc

SEQ ID NO: 3198488 - RNA, 19 nt, Artificial Sequence
  Description of Artificial Sequence: Synthetic oligonucleotide
cagacauuuauaaaacagg

SEQ ID NO: 3198489 - RNA, 19 nt, Artificial Sequence
  Description of Artificial Sequence: Synthetic oligonucleotide
uaaaacagggaaauauuca

SEQ ID NO: 3198490 - RNA, 19 nt, Artificial Sequence
  Description of Artificial Sequence: Synthetic oligonucleotide
uuauaaaacagggaaauau

SEQ ID NO: 3198491 - RNA, 19 nt, Artificial Sequence
  Description of Artificial Sequence: Synthetic oligonucleotide
uauaaagugcuucuugccu

SEQ ID NO: 3198492 - RNA, 19 nt, Artificial Sequence
  Description of Artificial Sequence: Synthetic oligonucleotide
agacauuuauaaaacaggg

SEQ ID NO: 3198493 - RNA, 19 nt, Artificial Sequence
  Description of Artificial Sequence: Synthetic oligonucleotide
uauucacaaacaaacugug

SEQ ID NO: 3198494 - RNA, 19 nt, Artificial Sequence
  Description of Artificial Sequence: Synthetic oligonucleotide
aacucuauaaagugcuucu

SEQ ID NO: 3198495 - RNA, 19 nt, Artificial Sequence
  Description of Artificial Sequence: Synthetic oligonucleotide
aacagggaaauauucacaa

SEQ ID NO: 3198496 - RNA, 19 nt, Artificial Sequence
  Description of Artificial Sequence: Synthetic oligonucleotide
auaagauguuucuagucag

SEQ ID NO: 3198497 - RNA, 19 nt, Artificial Sequence
  Description of Artificial Sequence: Synthetic oligonucleotide
aacaaacugugggagaaac

SEQ ID NO: 3198498 - RNA, 19 nt, Artificial Sequence
  Description of Artificial Sequence: Synthetic oligonucleotide
uuugcugagaaaaccugag

SEQ ID NO: 3198499 - RNA, 19 nt, Artificial Sequence
  Description of Artificial Sequence: Synthetic oligonucleotide
auaaaacagggaaauauuc

SEQ ID NO: 3198500 - RNA, 19 nt, Artificial Sequence
  Description of Artificial Sequence: Synthetic oligonucleotide
aaaggaggcaugaagccac

SEQ ID NO: 3198501 - RNA, 19 nt, Artificial Sequence
  Description of Artificial Sequence: Synthetic oligonucleotide
uuaauguuacaugugagaa

SEQ ID NO: 3198502 - RNA, 19 nt, Artificial Sequence
  Description of Artificial Sequence: Synthetic oligonucleotide
ucaggcuaggcaaaaggag

SEQ ID NO: 3198503 - RNA, 19 nt, Artificial Sequence
  Description of Artificial Sequence: Synthetic oligonucleotide
augucaaggagguggaggg

SEQ ID NO: 3198504 - RNA, 19 nt, Artificial Sequence
  Description of Artificial Sequence: Synthetic oligonucleotide
agaugugcuggacagcugg

SEQ ID NO: 3198505 - RNA, 19 nt, Artificial Sequence
  Description of Artificial Sequence: Synthetic oligonucleotide
auuuauaaaacagggaaau

SEQ ID NO: 3198506 - RNA, 19 nt, Artificial Sequence
  Description of Artificial Sequence: Synthetic oligonucleotide
gaaagcuguccugaaaugg

SEQ ID NO: 3198507 - RNA, 19 nt, Artificial Sequence
  Description of Artificial Sequence: Synthetic oligonucleotide
aaagcuguccugaaauggg

SEQ ID NO: 3198508 - RNA, 19 nt, Artificial Sequence
  Description of Artificial Sequence: Synthetic oligonucleotide
aaccccagggcucugaaca

SEQ ID NO: 3198509 - RNA, 19 nt, Artificial Sequence
  Description of Artificial Sequence: Synthetic oligonucleotide
ugucagaugugcuggacag

SEQ ID NO: 3198510 - RNA, 19 nt, Artificial Sequence
  Description of Artificial Sequence: Synthetic oligonucleotide
uaggaaaggucacagggga

SEQ ID NO: 3198511 - RNA, 19 nt, Artificial Sequence
  Description of Artificial Sequence: Synthetic oligonucleotide
aaacacaaccuucccagca

SEQ ID NO: 3198512 - RNA, 19 nt, Artificial Sequence
  Description of Artificial Sequence: Synthetic oligonucleotide
uuaacaacucugaggcuag

SEQ ID NO: 3198513 - RNA, 19 nt, Artificial Sequence
  Description of Artificial Sequence: Synthetic oligonucleotide
ggcauuaacaacucugagg

SEQ ID NO: 3198514 - RNA, 19 nt, Artificial Sequence
  Description of Artificial Sequence: Synthetic oligonucleotide
uuguaccuugggaagagag

SEQ ID NO: 3198515 - RNA, 19 nt, Artificial Sequence
  Description of Artificial Sequence: Synthetic oligonucleotide
aaauauucacaaacaaacu

SEQ ID NO: 3198516 - RNA, 19 nt, Artificial Sequence
  Description of Artificial Sequence: Synthetic oligonucleotide
caaaaggaggcaugaagcc

SEQ ID NO: 3198517 - RNA, 19 nt, Artificial Sequence
  Description of Artificial Sequence: Synthetic oligonucleotide
acucaggcuaggcaaaagg

SEQ ID NO: 3198518 - RNA, 19 nt, Artificial Sequence
  Description of Artificial Sequence: Synthetic oligonucleotide
auauucacaaacaaacugu

SEQ ID NO: 3198519 - RNA, 19 nt, Artificial Sequence
  Description of Artificial Sequence: Synthetic oligonucleotide
caugcuaggucccagcagc

SEQ ID NO: 3198520 - RNA, 19 nt, Artificial Sequence
  Description of Artificial Sequence: Synthetic oligonucleotide
ucacaaacaaacuguggga

SEQ ID NO: 3198521 - RNA, 19 nt, Artificial Sequence
  Description of Artificial Sequence: Synthetic oligonucleotide
ucuuugcugagaaaaccug

SEQ ID NO: 3198522 - RNA, 19 nt, Artificial Sequence
  Description of Artificial Sequence: Synthetic oligonucleotide
ucuuacccaugcuaggucc

SEQ ID NO: 3198523 - RNA, 19 nt, Artificial Sequence
  Description of Artificial Sequence: Synthetic oligonucleotide
agaucucuuggcucuuucc

SEQ ID NO: 3198524 - RNA, 19 nt, Artificial Sequence
  Description of Artificial Sequence: Synthetic oligonucleotide
accugugucauuucuccac

SEQ ID NO: 3198525 - RNA, 19 nt, Artificial Sequence
  Description of Artificial Sequence: Synthetic oligonucleotide
cugugggagaaacacaacc

SEQ ID NO: 3198526 - RNA, 19 nt, Artificial Sequence
  Description of Artificial Sequence: Synthetic oligonucleotide
auuccuuggaaagcugucc

SEQ ID NO: 3198527 - RNA, 19 nt, Artificial Sequence
  Description of Artificial Sequence: Synthetic oligonucleotide
aagggcauuaacaacucug

SEQ ID NO: 3198528 - RNA, 19 nt, Artificial Sequence
  Description of Artificial Sequence: Synthetic oligonucleotide
gagguagagaggaaaaggc

SEQ ID NO: 3198529 - RNA, 19 nt, Artificial Sequence
  Description of Artificial Sequence: Synthetic oligonucleotide
uguaccuugggaagagagc

SEQ ID NO: 3198530 - RNA, 19 nt, Artificial Sequence
  Description of Artificial Sequence: Synthetic oligonucleotide
cauuccaucccauagaucu

SEQ ID NO: 3198531 - RNA, 19 nt, Artificial Sequence
  Description of Artificial Sequence: Synthetic oligonucleotide
uggucugauacaguguagg

SEQ ID NO: 3198532 - RNA, 19 nt, Artificial Sequence
  Description of Artificial Sequence: Synthetic oligonucleotide
cuuaauguuacaugugaga

SEQ ID NO: 3198533 - RNA, 19 nt, Artificial Sequence
  Description of Artificial Sequence: Synthetic oligonucleotide
ucauaagauguuucuaguc

SEQ ID NO: 3198534 - RNA, 19 nt, Artificial Sequence
  Description of Artificial Sequence: Synthetic oligonucleotide
ugaucuugccaacuuguac

SEQ ID NO: 3198535 - RNA, 19 nt, Artificial Sequence
  Description of Artificial Sequence: Synthetic oligonucleotide
aacccucaaagccacucag

SEQ ID NO: 3198536 - RNA, 19 nt, Artificial Sequence
  Description of Artificial Sequence: Synthetic oligonucleotide
aaagccacucaggcuaggc

SEQ ID NO: 3198537 - RNA, 19 nt, Artificial Sequence
  Description of Artificial Sequence: Synthetic oligonucleotide
acacacaucaccuguguca

SEQ ID NO: 3198538 - RNA, 19 nt, Artificial Sequence
  Description of Artificial Sequence: Synthetic oligonucleotide
uaauguuacaugugagaac

SEQ ID NO: 3198539 - RNA, 19 nt, Artificial Sequence
  Description of Artificial Sequence: Synthetic oligonucleotide
uugcugagaaaaccugagg

SEQ ID NO: 3198540 - RNA, 19 nt, Artificial Sequence
  Description of Artificial Sequence: Synthetic oligonucleotide
aaugauggacauaaacagu

SEQ ID NO: 3198541 - RNA, 19 nt, Artificial Sequence
  Description of Artificial Sequence: Synthetic oligonucleotide
gaagagagccaucauacaa

SEQ ID NO: 3198542 - RNA, 19 nt, Artificial Sequence
  Description of Artificial Sequence: Synthetic oligonucleotide
uggacuguuucauuccuug

SEQ ID NO: 3198543 - RNA, 19 nt, Artificial Sequence
  Description of Artificial Sequence: Synthetic oligonucleotide
aucauaagauguuucuagu

SEQ ID NO: 3198544 - RNA, 19 nt, Artificial Sequence
  Description of Artificial Sequence: Synthetic oligonucleotide
ucuagucagaaugauggac

SEQ ID NO: 3198545 - RNA, 19 nt, Artificial Sequence
  Description of Artificial Sequence: Synthetic oligonucleotide
agguagagaggaaaaggcc

SEQ ID NO: 3198546 - RNA, 19 nt, Artificial Sequence
  Description of Artificial Sequence: Synthetic oligonucleotide
aaaaggaggcaugaagcca

SEQ ID NO: 3198547 - RNA, 19 nt, Artificial Sequence
  Description of Artificial Sequence: Synthetic oligonucleotide
agcaagaucucuuggcucu

SEQ ID NO: 3198548 - RNA, 19 nt, Artificial Sequence
  Description of Artificial Sequence: Synthetic oligonucleotide
aagccugucagaugugcug

SEQ ID NO: 3198549 - RNA, 19 nt, Artificial Sequence
  Description of Artificial Sequence: Synthetic oligonucleotide
guaccuugggaagagagcc

SEQ ID NO: 3198550 - RNA, 19 nt, Artificial Sequence
  Description of Artificial Sequence: Synthetic oligonucleotide
uaagauguuucuagucaga

SEQ ID NO: 3198551 - RNA, 19 nt, Artificial Sequence
  Description of Artificial Sequence: Synthetic oligonucleotide
uggacauaaacaguuggac

SEQ ID NO: 3198552 - RNA, 19 nt, Artificial Sequence
  Description of Artificial Sequence: Synthetic oligonucleotide
acaggcucacucuaccuuc

SEQ ID NO: 3198553 - RNA, 19 nt, Artificial Sequence
  Description of Artificial Sequence: Synthetic oligonucleotide
cuagucagaaugauggaca

SEQ ID NO: 3198554 - RNA, 19 nt, Artificial Sequence
  Description of Artificial Sequence: Synthetic oligonucleotide
aagcuguccugaaaugggc

SEQ ID NO: 3198555 - RNA, 19 nt, Artificial Sequence
  Description of Artificial Sequence: Synthetic oligonucleotide
auuaacaacucugaggcua

SEQ ID NO: 3198556 - RNA, 19 nt, Artificial Sequence
  Description of Artificial Sequence: Synthetic oligonucleotide
cuugccaacuuguaccuug

SEQ ID NO: 3198557 - RNA, 19 nt, Artificial Sequence
  Description of Artificial Sequence: Synthetic oligonucleotide
ucuagacaggggcagacau

SEQ ID NO: 3198558 - RNA, 19 nt, Artificial Sequence
  Description of Artificial Sequence: Synthetic oligonucleotide
uaaagugcuucuugccugc

SEQ ID NO: 3198559 - RNA, 19 nt, Artificial Sequence
  Description of Artificial Sequence: Synthetic oligonucleotide
agaagccugucagaugugc

SEQ ID NO: 3198560 - RNA, 19 nt, Artificial Sequence
  Description of Artificial Sequence: Synthetic oligonucleotide
cacaaacaaacugugggag

SEQ ID NO: 3198561 - RNA, 19 nt, Artificial Sequence
  Description of Artificial Sequence: Synthetic oligonucleotide
ugcucugagacaacccuca

SEQ ID NO: 3198562 - RNA, 19 nt, Artificial Sequence
  Description of Artificial Sequence: Synthetic oligonucleotide
ucagaugugcuggacagcu

SEQ ID NO: 3198563 - RNA, 19 nt, Artificial Sequence
  Description of Artificial Sequence: Synthetic oligonucleotide
caugucaaggagguggagg

SEQ ID NO: 3198564 - RNA, 19 nt, Artificial Sequence
  Description of Artificial Sequence: Synthetic oligonucleotide
gucagaaugauggacauaa

SEQ ID NO: 3198565 - RNA, 19 nt, Artificial Sequence
  Description of Artificial Sequence: Synthetic oligonucleotide
ucugaacacacaucaccug

SEQ ID NO: 3198566 - RNA, 19 nt, Artificial Sequence
  Description of Artificial Sequence: Synthetic oligonucleotide
cuaccuucccuccagcaag

SEQ ID NO: 3198567 - RNA, 19 nt, Artificial Sequence
  Description of Artificial Sequence: Synthetic oligonucleotide
aaacagggaaauauucaca

SEQ ID NO: 3198568 - RNA, 19 nt, Artificial Sequence
  Description of Artificial Sequence: Synthetic oligonucleotide
aacacaaccuucccagcaa

SEQ ID NO: 3198569 - RNA, 19 nt, Artificial Sequence
  Description of Artificial Sequence: Synthetic oligonucleotide
ucugaggcuaggaaagguc

SEQ ID NO: 3198570 - RNA, 19 nt, Artificial Sequence
  Description of Artificial Sequence: Synthetic oligonucleotide
caacuuguaccuugggaag

SEQ ID NO: 3198571 - RNA, 19 nt, Artificial Sequence
  Description of Artificial Sequence: Synthetic oligonucleotide
aaauggaacaaccauaugg

SEQ ID NO: 3198572 - RNA, 19 nt, Artificial Sequence
  Description of Artificial Sequence: Synthetic oligonucleotide
ucaaauaugagccauaaau

SEQ ID NO: 3198573 - RNA, 19 nt, Artificial Sequence
  Description of Artificial Sequence: Synthetic oligonucleotide
ucuaaauaaguauagauaa

SEQ ID NO: 3198574 - RNA, 19 nt, Artificial Sequence
  Description of Artificial Sequence: Synthetic oligonucleotide
cauuaauaaaauuauagac

SEQ ID NO: 3198575 - RNA, 19 nt, Artificial Sequence
  Description of Artificial Sequence: Synthetic oligonucleotide
uaaaauacaaucauaaauu

SEQ ID NO: 3198576 - RNA, 19 nt, Artificial Sequence
  Description of Artificial Sequence: Synthetic oligonucleotide
uauagauaaaauacaauca

SEQ ID NO: 3198577 - RNA, 19 nt, Artificial Sequence
  Description of Artificial Sequence: Synthetic oligonucleotide
aauaagcccaauuuaggag

SEQ ID NO: 3198578 - RNA, 19 nt, Artificial Sequence
  Description of Artificial Sequence: Synthetic oligonucleotide
augagaauuacacuucagc

SEQ ID NO: 3198579 - RNA, 19 nt, Artificial Sequence
  Description of Artificial Sequence: Synthetic oligonucleotide
ugugcuauuauucacuugu

SEQ ID NO: 3198580 - RNA, 19 nt, Artificial Sequence
  Description of Artificial Sequence: Synthetic oligonucleotide
guauagauaaaauacaauc

SEQ ID NO: 3198581 - RNA, 19 nt, Artificial Sequence
  Description of Artificial Sequence: Synthetic oligonucleotide
gaagaguugaaucagcagc

SEQ ID NO: 3198582 - RNA, 19 nt, Artificial Sequence
  Description of Artificial Sequence: Synthetic oligonucleotide
aauaacaacgccgauacca

SEQ ID NO: 3198583 - RNA, 19 nt, Artificial Sequence
  Description of Artificial Sequence: Synthetic oligonucleotide
aauaaaauaucuucuuuaa

SEQ ID NO: 3198584 - RNA, 19 nt, Artificial Sequence
  Description of Artificial Sequence: Synthetic oligonucleotide
acccuuuaaaaguagaggg

SEQ ID NO: 3198585 - RNA, 19 nt, Artificial Sequence
  Description of Artificial Sequence: Synthetic oligonucleotide
auauaaacccuuuaaaagu

SEQ ID NO: 3198586 - RNA, 19 nt, Artificial Sequence
  Description of Artificial Sequence: Synthetic oligonucleotide
aaugauuuggugguauagc

SEQ ID NO: 3198587 - RNA, 19 nt, Artificial Sequence
  Description of Artificial Sequence: Synthetic oligonucleotide
uucuaauuuaauauuuuca

SEQ ID NO: 3198588 - RNA, 19 nt, Artificial Sequence
  Description of Artificial Sequence: Synthetic oligonucleotide
augauuuggugguauagcc

SEQ ID NO: 3198589 - RNA, 19 nt, Artificial Sequence
  Description of Artificial Sequence: Synthetic oligonucleotide
agaccacugaaauagcugc

SEQ ID NO: 3198590 - RNA, 19 nt, Artificial Sequence
  Description of Artificial Sequence: Synthetic oligonucleotide
uucuuugugacucuaguca

SEQ ID NO: 3198591 - RNA, 19 nt, Artificial Sequence
  Description of Artificial Sequence: Synthetic oligonucleotide
agaacuucaaaauauacuu

SEQ ID NO: 3198592 - RNA, 19 nt, Artificial Sequence
  Description of Artificial Sequence: Synthetic oligonucleotide
uuauucuacauuauauaca

SEQ ID NO: 3198593 - RNA, 19 nt, Artificial Sequence
  Description of Artificial Sequence: Synthetic oligonucleotide
uuuacagcacuuauaaacu

SEQ ID NO: 3198594 - RNA, 19 nt, Artificial Sequence
  Description of Artificial Sequence: Synthetic oligonucleotide
ugagccauaaauaaaguua

SEQ ID NO: 3198595 - RNA, 19 nt, Artificial Sequence
  Description of Artificial Sequence: Synthetic oligonucleotide
gaauuuacuacuucauuug

SEQ ID NO: 3198596 - RNA, 19 nt, Artificial Sequence
  Description of Artificial Sequence: Synthetic oligonucleotide
uaguuuacaacuauucugu

SEQ ID NO: 3198597 - RNA, 19 nt, Artificial Sequence
  Description of Artificial Sequence: Synthetic oligonucleotide
augaucaauacuuuguuca

SEQ ID NO: 3198598 - RNA, 19 nt, Artificial Sequence
  Description of Artificial Sequence: Synthetic oligonucleotide
cuuuauuaauuucaauugc

SEQ ID NO: 3198599 - RNA, 19 nt, Artificial Sequence
  Description of Artificial Sequence: Synthetic oligonucleotide
uagaguacacuuuaguagc

SEQ ID NO: 3198600 - RNA, 19 nt, Artificial Sequence
  Description of Artificial Sequence: Synthetic oligonucleotide
guuguuucaaguaagguug

SEQ ID NO: 3198601 - RNA, 19 nt, Artificial Sequence
  Description of Artificial Sequence: Synthetic oligonucleotide
aaucauaaauuucuguaaa

SEQ ID NO: 3198602 - RNA, 19 nt, Artificial Sequence
  Description of Artificial Sequence: Synthetic oligonucleotide
uacuuuacagcacuuauaa

SEQ ID NO: 3198603 - RNA, 19 nt, Artificial Sequence
  Description of Artificial Sequence: Synthetic oligonucleotide
uacacuucagcugagaaug

SEQ ID NO: 3198604 - RNA, 19 nt, Artificial Sequence
  Description of Artificial Sequence: Synthetic oligonucleotide
ucugcaauuaggcagccca

SEQ ID NO: 3198605 - RNA, 19 nt, Artificial Sequence
  Description of Artificial Sequence: Synthetic oligonucleotide
aacauauaaacccuuuaaa

SEQ ID NO: 3198606 - RNA, 19 nt, Artificial Sequence
  Description of Artificial Sequence: Synthetic oligonucleotide
ugacucuagucauuuaugg

SEQ ID NO: 3198607 - RNA, 19 nt, Artificial Sequence
  Description of Artificial Sequence: Synthetic oligonucleotide
uggaauuccucuuaguuga

SEQ ID NO: 3198608 - RNA, 19 nt, Artificial Sequence
  Description of Artificial Sequence: Synthetic oligonucleotide
uauggagcggcuuaggagc

SEQ ID NO: 3198609 - RNA, 19 nt, Artificial Sequence
  Description of Artificial Sequence: Synthetic oligonucleotide
uuuacuacuucauuuguaa

SEQ ID NO: 3198610 - RNA, 19 nt, Artificial Sequence
  Description of Artificial Sequence: Synthetic oligonucleotide
uaaagcauuccgcagauau

SEQ ID NO: 3198611 - RNA, 19 nt, Artificial Sequence
  Description of Artificial Sequence: Synthetic oligonucleotide
ucugauuauccaaugguga

SEQ ID NO: 3198612 - RNA, 19 nt, Artificial Sequence
  Description of Artificial Sequence: Synthetic oligonucleotide
uguaacuggauuucugucc

SEQ ID NO: 3198613 - RNA, 19 nt, Artificial Sequence
  Description of Artificial Sequence: Synthetic oligonucleotide
uaaaguuacuccuuaggca

SEQ ID NO: 3198614 - RNA, 19 nt, Artificial Sequence
  Description of Artificial Sequence: Synthetic oligonucleotide
uggaacaaccauaugguug

SEQ ID NO: 3198615 - RNA, 19 nt, Artificial Sequence
  Description of Artificial Sequence: Synthetic oligonucleotide
aacccuuuaaaaguagagg

SEQ ID NO: 3198616 - RNA, 19 nt, Artificial Sequence
  Description of Artificial Sequence: Synthetic oligonucleotide
gaagcuauuuucuuccgcc

SEQ ID NO: 3198617 - RNA, 19 nt, Artificial Sequence
  Description of Artificial Sequence: Synthetic oligonucleotide
auaugauuauccaaauggc

SEQ ID NO: 3198618 - RNA, 19 nt, Artificial Sequence
  Description of Artificial Sequence: Synthetic oligonucleotide
guagagggcacuaugaagg

SEQ ID NO: 3198619 - RNA, 19 nt, Artificial Sequence
  Description of Artificial Sequence: Synthetic oligonucleotide
cuccaaaugagaauuacac

SEQ ID NO: 3198620 - RNA, 19 nt, Artificial Sequence
  Description of Artificial Sequence: Synthetic oligonucleotide
ugugguuucaucucuaaaa

SEQ ID NO: 3198621 - RNA, 19 nt, Artificial Sequence
  Description of Artificial Sequence: Synthetic oligonucleotide
ggaagaaccauuauuaucc

SEQ ID NO: 3198622 - RNA, 19 nt, Artificial Sequence
  Description of Artificial Sequence: Synthetic oligonucleotide
aacucgauagccccacugg

SEQ ID NO: 3198623 - RNA, 19 nt, Artificial Sequence
  Description of Artificial Sequence: Synthetic oligonucleotide
accuauaacugguaucagc

SEQ ID NO: 3198624 - RNA, 19 nt, Artificial Sequence
  Description of Artificial Sequence: Synthetic oligonucleotide
auuauuauccuaccaucag

SEQ ID NO: 3198625 - RNA, 19 nt, Artificial Sequence
  Description of Artificial Sequence: Synthetic oligonucleotide
uaauucuuauuucuagucu

SEQ ID NO: 3198626 - RNA, 19 nt, Artificial Sequence
  Description of Artificial Sequence: Synthetic oligonucleotide
aaggguaacaaacauucaa

SEQ ID NO: 3198627 - RNA, 19 nt, Artificial Sequence
  Description of Artificial Sequence: Synthetic oligonucleotide
aauuuacuacuucauuugu

SEQ ID NO: 3198628 - RNA, 19 nt, Artificial Sequence
  Description of Artificial Sequence: Synthetic oligonucleotide
uuaguucuggaauagcaca

SEQ ID NO: 3198629 - RNA, 19 nt, Artificial Sequence
  Description of Artificial Sequence: Synthetic oligonucleotide
acaauuaucugcugcaugu

SEQ ID NO: 3198630 - RNA, 19 nt, Artificial Sequence
  Description of Artificial Sequence: Synthetic oligonucleotide
uacuguguugcaaacaacu

SEQ ID NO: 3198631 - RNA, 19 nt, Artificial Sequence
  Description of Artificial Sequence: Synthetic oligonucleotide
aauggaacaaccauauggu

SEQ ID NO: 3198632 - RNA, 19 nt, Artificial Sequence
  Description of Artificial Sequence: Synthetic oligonucleotide
uucuaagacaugaaugaga

SEQ ID NO: 3198633 - RNA, 19 nt, Artificial Sequence
  Description of Artificial Sequence: Synthetic oligonucleotide
uauguugcugcacagaguu

SEQ ID NO: 3198634 - RNA, 19 nt, Artificial Sequence
  Description of Artificial Sequence: Synthetic oligonucleotide
uguuaucuccaaaugagaa

SEQ ID NO: 3198635 - RNA, 19 nt, Artificial Sequence
  Description of Artificial Sequence: Synthetic oligonucleotide
uaaugagcuauuuuccacc

SEQ ID NO: 3198636 - RNA, 19 nt, Artificial Sequence
  Description of Artificial Sequence: Synthetic oligonucleotide
cugguuguggaaaagcagg

SEQ ID NO: 3198637 - RNA, 19 nt, Artificial Sequence
  Description of Artificial Sequence: Synthetic oligonucleotide
uauccuguuggcaaguuac

SEQ ID NO: 3198638 - RNA, 19 nt, Artificial Sequence
  Description of Artificial Sequence: Synthetic oligonucleotide
aguucuuuccuuuggaacu

SEQ ID NO: 3198639 - RNA, 19 nt, Artificial Sequence
  Description of Artificial Sequence: Synthetic oligonucleotide
uguucugcaauuaggcagc

SEQ ID NO: 3198640 - RNA, 19 nt, Artificial Sequence
  Description of Artificial Sequence: Synthetic oligonucleotide
uauaaacccuuuaaaagua

SEQ ID NO: 3198641 - RNA, 19 nt, Artificial Sequence
  Description of Artificial Sequence: Synthetic oligonucleotide
acuaggagcuauuuaucac

SEQ ID NO: 3198642 - RNA, 19 nt, Artificial Sequence
  Description of Artificial Sequence: Synthetic oligonucleotide
aagaacuucaaaauauacu

SEQ ID NO: 3198643 - RNA, 19 nt, Artificial Sequence
  Description of Artificial Sequence: Synthetic oligonucleotide
auaagcugaaauucuuauc

SEQ ID NO: 3198644 - RNA, 19 nt, Artificial Sequence
  Description of Artificial Sequence: Synthetic oligonucleotide
agauaaaauacaaucauaa

SEQ ID NO: 3198645 - RNA, 19 nt, Artificial Sequence
  Description of Artificial Sequence: Synthetic oligonucleotide
ucaaguauuuuauuguuuu

SEQ ID NO: 3198646 - RNA, 19 nt, Artificial Sequence
  Description of Artificial Sequence: Synthetic oligonucleotide
guguucugcaauuaggcag

SEQ ID NO: 3198647 - RNA, 19 nt, Artificial Sequence
  Description of Artificial Sequence: Synthetic oligonucleotide
uccaccuuagauaacgaac

SEQ ID NO: 3198648 - RNA, 19 nt, Artificial Sequence
  Description of Artificial Sequence: Synthetic oligonucleotide
ugcuuugacaaaauuucug

SEQ ID NO: 3198649 - RNA, 19 nt, Artificial Sequence
  Description of Artificial Sequence: Synthetic oligonucleotide
uuucuugucauuagaaaua

SEQ ID NO: 3198650 - RNA, 19 nt, Artificial Sequence
  Description of Artificial Sequence: Synthetic oligonucleotide
aucaaucuuugcuugacug

SEQ ID NO: 3198651 - RNA, 19 nt, Artificial Sequence
  Description of Artificial Sequence: Synthetic oligonucleotide
aguacacuuuaguagcuuc

SEQ ID NO: 3198652 - RNA, 19 nt, Artificial Sequence
  Description of Artificial Sequence: Synthetic oligonucleotide
uauuaauuucaauugcaau

SEQ ID NO: 3198653 - RNA, 19 nt, Artificial Sequence
  Description of Artificial Sequence: Synthetic oligonucleotide
auccucuggauuugaagcc

SEQ ID NO: 3198654 - RNA, 19 nt, Artificial Sequence
  Description of Artificial Sequence: Synthetic oligonucleotide
ucuggaaacacuucucaga

SEQ ID NO: 3198655 - RNA, 19 nt, Artificial Sequence
  Description of Artificial Sequence: Synthetic oligonucleotide
aagcuauuuucuuccgccg

SEQ ID NO: 3198656 - RNA, 19 nt, Artificial Sequence
  Description of Artificial Sequence: Synthetic oligonucleotide
aacgccgauaccaagccac

SEQ ID NO: 3198657 - RNA, 19 nt, Artificial Sequence
  Description of Artificial Sequence: Synthetic oligonucleotide
agaauguuucaucugauua

SEQ ID NO: 3198658 - RNA, 19 nt, Artificial Sequence
  Description of Artificial Sequence: Synthetic oligonucleotide
uucacuacugaguacacua

SEQ ID NO: 3198659 - RNA, 19 nt, Artificial Sequence
  Description of Artificial Sequence: Synthetic oligonucleotide
caacuuuccaucaggagug

SEQ ID NO: 3198660 - RNA, 19 nt, Artificial Sequence
  Description of Artificial Sequence: Synthetic oligonucleotide
aguaucaaaaugaagucca

SEQ ID NO: 3198661 - RNA, 19 nt, Artificial Sequence
  Description of Artificial Sequence: Synthetic oligonucleotide
uauucuacugaucccacau

SEQ ID NO: 3198662 - RNA, 19 nt, Artificial Sequence
  Description of Artificial Sequence: Synthetic oligonucleotide
ugaucaauacuuuguucag

SEQ ID NO: 3198663 - RNA, 19 nt, Artificial Sequence
  Description of Artificial Sequence: Synthetic oligonucleotide
uguuuuauucuacauuaua

SEQ ID NO: 3198664 - RNA, 19 nt, Artificial Sequence
  Description of Artificial Sequence: Synthetic oligonucleotide
aaugagcuauuuuccaccu

SEQ ID NO: 3198665 - RNA, 19 nt, Artificial Sequence
  Description of Artificial Sequence: Synthetic oligonucleotide
cugguuaaagucagcaacc

SEQ ID NO: 3198666 - RNA, 19 nt, Artificial Sequence
  Description of Artificial Sequence: Synthetic oligonucleotide
ucauucagauccaauuugu

SEQ ID NO: 3198667 - RNA, 19 nt, Artificial Sequence
  Description of Artificial Sequence: Synthetic oligonucleotide
uuuauggcgccacaugaga

SEQ ID NO: 3198668 - RNA, 19 nt, Artificial Sequence
  Description of Artificial Sequence: Synthetic oligonucleotide
aaguauuuuauuguuuuau

SEQ ID NO: 3198669 - RNA, 19 nt, Artificial Sequence
  Description of Artificial Sequence: Synthetic oligonucleotide
ugauuuggugguauagccc

SEQ ID NO: 3198670 - RNA, 19 nt, Artificial Sequence
  Description of Artificial Sequence: Synthetic oligonucleotide
gcuaucaaguauuuuauug

SEQ ID NO: 3198671 - RNA, 19 nt, Artificial Sequence
  Description of Artificial Sequence: Synthetic oligonucleotide
acagauaucaucuucuagc

SEQ ID NO: 3198672 - RNA, 19 nt, Artificial Sequence
  Description of Artificial Sequence: Synthetic oligonucleotide
aaaucugucagguaguguc

SEQ ID NO: 3198673 - RNA, 19 nt, Artificial Sequence
  Description of Artificial Sequence: Synthetic oligonucleotide
aaacuuguaaaucugucag

SEQ ID NO: 3198674 - RNA, 19 nt, Artificial Sequence
  Description of Artificial Sequence: Synthetic oligonucleotide
uuuacgacaguucugagca

SEQ ID NO: 3198675 - RNA, 19 nt, Artificial Sequence
  Description of Artificial Sequence: Synthetic oligonucleotide
uguugaaagagucaacagg

SEQ ID NO: 3198676 - RNA, 19 nt, Artificial Sequence
  Description of Artificial Sequence: Synthetic oligonucleotide
uuguaaaucugucagguag

SEQ ID NO: 3198677 - RNA, 19 nt, Artificial Sequence
  Description of Artificial Sequence: Synthetic oligonucleotide
gacaauuucaucuacagaa

SEQ ID NO: 3198678 - RNA, 19 nt, Artificial Sequence
  Description of Artificial Sequence: Synthetic oligonucleotide
cuuaacaugcuguugaaag

SEQ ID NO: 3198679 - RNA, 19 nt, Artificial Sequence
  Description of Artificial Sequence: Synthetic oligonucleotide
uguuucaucaugccaauag

SEQ ID NO: 3198680 - RNA, 19 nt, Artificial Sequence
  Description of Artificial Sequence: Synthetic oligonucleotide
uuaguuuacguuuacgaca

SEQ ID NO: 3198681 - RNA, 19 nt, Artificial Sequence
  Description of Artificial Sequence: Synthetic oligonucleotide
auuucaucuacagaaaagg

SEQ ID NO: 3198682 - RNA, 19 nt, Artificial Sequence
  Description of Artificial Sequence: Synthetic oligonucleotide
aaugauguuuaguuuacgu

SEQ ID NO: 3198683 - RNA, 19 nt, Artificial Sequence
  Description of Artificial Sequence: Synthetic oligonucleotide
agcuuugugacauugagcu

SEQ ID NO: 3198684 - RNA, 19 nt, Artificial Sequence
  Description of Artificial Sequence: Synthetic oligonucleotide
aaaagggauaugcaggucu

SEQ ID NO: 3198685 - RNA, 19 nt, Artificial Sequence
  Description of Artificial Sequence: Synthetic oligonucleotide
uuaagagccucuuucuugg

SEQ ID NO: 3198686 - RNA, 19 nt, Artificial Sequence
  Description of Artificial Sequence: Synthetic oligonucleotide
uuucaucuacagaaaaggg

SEQ ID NO: 3198687 - RNA, 19 nt, Artificial Sequence
  Description of Artificial Sequence: Synthetic oligonucleotide
augccaauagcuuugugac

SEQ ID NO: 3198688 - RNA, 19 nt, Artificial Sequence
  Description of Artificial Sequence: Synthetic oligonucleotide
uucuucugggucaucaugg

SEQ ID NO: 3198689 - RNA, 19 nt, Artificial Sequence
  Description of Artificial Sequence: Synthetic oligonucleotide
acagaaaagggauaugcag

SEQ ID NO: 3198690 - RNA, 19 nt, Artificial Sequence
  Description of Artificial Sequence: Synthetic oligonucleotide
uaguuuacguuuacgacag

SEQ ID NO: 3198691 - RNA, 19 nt, Artificial Sequence
  Description of Artificial Sequence: Synthetic oligonucleotide
ucaucuacagaaaagggau

SEQ ID NO: 3198692 - RNA, 19 nt, Artificial Sequence
  Description of Artificial Sequence: Synthetic oligonucleotide
uucaucuacagaaaaggga

SEQ ID NO: 3198693 - RNA, 19 nt, Artificial Sequence
  Description of Artificial Sequence: Synthetic oligonucleotide
agagucaacaggcauuugg

SEQ ID NO: 3198694 - RNA, 19 nt, Artificial Sequence
  Description of Artificial Sequence: Synthetic oligonucleotide
uucuugacuucucagacca

SEQ ID NO: 3198695 - RNA, 19 nt, Artificial Sequence
  Description of Artificial Sequence: Synthetic oligonucleotide
acucuuaagagccucuuuc

SEQ ID NO: 3198696 - RNA, 19 nt, Artificial Sequence
  Description of Artificial Sequence: Synthetic oligonucleotide
ucuagccuuagaaugaugu

SEQ ID NO: 3198697 - RNA, 19 nt, Artificial Sequence
  Description of Artificial Sequence: Synthetic oligonucleotide
uuuucuugacuucucagac

SEQ ID NO: 3198698 - RNA, 19 nt, Artificial Sequence
  Description of Artificial Sequence: Synthetic oligonucleotide
cagaaaagggauaugcagg

SEQ ID NO: 3198699 - RNA, 19 nt, Artificial Sequence
  Description of Artificial Sequence: Synthetic oligonucleotide
uuuaguuuacguuuacgac

SEQ ID NO: 3198700 - RNA, 19 nt, Artificial Sequence
  Description of Artificial Sequence: Synthetic oligonucleotide
aacuuguaaaucugucagg

SEQ ID NO: 3198701 - RNA, 19 nt, Artificial Sequence
  Description of Artificial Sequence: Synthetic oligonucleotide
uaugcaggucuuuagcacg

SEQ ID NO: 3198702 - RNA, 19 nt, Artificial Sequence
  Description of Artificial Sequence: Synthetic oligonucleotide
guugaaagagucaacaggc

SEQ ID NO: 3198703 - RNA, 19 nt, Artificial Sequence
  Description of Artificial Sequence: Synthetic oligonucleotide
aguuacagauaucaucuuc

SEQ ID NO: 3198704 - RNA, 19 nt, Artificial Sequence
  Description of Artificial Sequence: Synthetic oligonucleotide
ucaucuucuagccuuagaa

SEQ ID NO: 3198705 - RNA, 19 nt, Artificial Sequence
  Description of Artificial Sequence: Synthetic oligonucleotide
uuuagcacgcuguucauca

SEQ ID NO: 3198706 - RNA, 19 nt, Artificial Sequence
  Description of Artificial Sequence: Synthetic oligonucleotide
aucuucuagccuuagaaug

SEQ ID NO: 3198707 - RNA, 19 nt, Artificial Sequence
  Description of Artificial Sequence: Synthetic oligonucleotide
aauuucaucuacagaaaag

SEQ ID NO: 3198708 - RNA, 19 nt, Artificial Sequence
  Description of Artificial Sequence: Synthetic oligonucleotide
uugcucacucuuaagagcc

SEQ ID NO: 3198709 - RNA, 19 nt, Artificial Sequence
  Description of Artificial Sequence: Synthetic oligonucleotide
auagcuuugugacauugag

SEQ ID NO: 3198710 - RNA, 19 nt, Artificial Sequence
  Description of Artificial Sequence: Synthetic oligonucleotide
uggacaauuucaucuacag

SEQ ID NO: 3198711 - RNA, 19 nt, Artificial Sequence
  Description of Artificial Sequence: Synthetic oligonucleotide
uuucaucaugccaauagcu

SEQ ID NO: 3198712 - RNA, 19 nt, Artificial Sequence
  Description of Artificial Sequence: Synthetic oligonucleotide
auaugcaggucuuuagcac

SEQ ID NO: 3198713 - RNA, 19 nt, Artificial Sequence
  Description of Artificial Sequence: Synthetic oligonucleotide
ucaaguuucuucuggguca

SEQ ID NO: 3198714 - RNA, 19 nt, Artificial Sequence
  Description of Artificial Sequence: Synthetic oligonucleotide
ugauguuuaguuuacguuu

SEQ ID NO: 3198715 - RNA, 19 nt, Artificial Sequence
  Description of Artificial Sequence: Synthetic oligonucleotide
uuacguuuacgacaguucu

SEQ ID NO: 3198716 - RNA, 19 nt, Artificial Sequence
  Description of Artificial Sequence: Synthetic oligonucleotide
gaugagagaaacuuguaaa

SEQ ID NO: 3198717 - RNA, 19 nt, Artificial Sequence
  Description of Artificial Sequence: Synthetic oligonucleotide
ugguuugcaaguuacagau

SEQ ID NO: 3198718 - RNA, 19 nt, Artificial Sequence
  Description of Artificial Sequence: Synthetic oligonucleotide
guuuaguuuacguuuacga

SEQ ID NO: 3198719 - RNA, 19 nt, Artificial Sequence
  Description of Artificial Sequence: Synthetic oligonucleotide
uagaaugauguuuaguuua

SEQ ID NO: 3198720 - RNA, 19 nt, Artificial Sequence
  Description of Artificial Sequence: Synthetic oligonucleotide
ucuucuagccuuagaauga

SEQ ID NO: 3198721 - RNA, 19 nt, Artificial Sequence
  Description of Artificial Sequence: Synthetic oligonucleotide
uaacaugcuguugaaagag

SEQ ID NO: 3198722 - RNA, 19 nt, Artificial Sequence
  Description of Artificial Sequence: Synthetic oligonucleotide
ucaacaggcauuuggacaa

SEQ ID NO: 3198723 - RNA, 19 nt, Artificial Sequence
  Description of Artificial Sequence: Synthetic oligonucleotide
uagugucugcuuaacaugc

SEQ ID NO: 3198724 - RNA, 19 nt, Artificial Sequence
  Description of Artificial Sequence: Synthetic oligonucleotide
ugcuguuucaucaugccaa

SEQ ID NO: 3198725 - RNA, 19 nt, Artificial Sequence
  Description of Artificial Sequence: Synthetic oligonucleotide
gaaacuuguaaaucuguca

SEQ ID NO: 3198726 - RNA, 19 nt, Artificial Sequence
  Description of Artificial Sequence: Synthetic oligonucleotide
gauuuucuugacuucucag

SEQ ID NO: 3198727 - RNA, 19 nt, Artificial Sequence
  Description of Artificial Sequence: Synthetic oligonucleotide
gucaucauggcacucacug

SEQ ID NO: 3198728 - RNA, 19 nt, Artificial Sequence
  Description of Artificial Sequence: Synthetic oligonucleotide
uugcaaguuacagauauca

SEQ ID NO: 3198729 - RNA, 19 nt, Artificial Sequence
  Description of Artificial Sequence: Synthetic oligonucleotide
cuacagaaaagggauaugc

SEQ ID NO: 3198730 - RNA, 19 nt, Artificial Sequence
  Description of Artificial Sequence: Synthetic oligonucleotide
gugacauugagcuugcuca

SEQ ID NO: 3198731 - RNA, 19 nt, Artificial Sequence
  Description of Artificial Sequence: Synthetic oligonucleotide
uucugggucaucauggcac

SEQ ID NO: 3198732 - RNA, 19 nt, Artificial Sequence
  Description of Artificial Sequence: Synthetic oligonucleotide
uacagauaucaucuucuag

SEQ ID NO: 3198733 - RNA, 19 nt, Artificial Sequence
  Description of Artificial Sequence: Synthetic oligonucleotide
uuuacguuuacgacaguuc

SEQ ID NO: 3198734 - RNA, 19 nt, Artificial Sequence
  Description of Artificial Sequence: Synthetic oligonucleotide
auuuucuugacuucucaga

SEQ ID NO: 3198735 - RNA, 19 nt, Artificial Sequence
  Description of Artificial Sequence: Synthetic oligonucleotide
cuuugugacauugagcuug

SEQ ID NO: 3198736 - RNA, 19 nt, Artificial Sequence
  Description of Artificial Sequence: Synthetic oligonucleotide
agaaaagggauaugcaggu

SEQ ID NO: 3198737 - RNA, 19 nt, Artificial Sequence
  Description of Artificial Sequence: Synthetic oligonucleotide
cagauaucaucuucuagcc

SEQ ID NO: 3198738 - RNA, 19 nt, Artificial Sequence
  Description of Artificial Sequence: Synthetic oligonucleotide
uuaacaugcuguugaaaga

SEQ ID NO: 3198739 - RNA, 19 nt, Artificial Sequence
  Description of Artificial Sequence: Synthetic oligonucleotide
ugagcagcaacuuuguuuu

SEQ ID NO: 3198740 - RNA, 19 nt, Artificial Sequence
  Description of Artificial Sequence: Synthetic oligonucleotide
cuuaagagccucuuucuug

SEQ ID NO: 3198741 - RNA, 19 nt, Artificial Sequence
  Description of Artificial Sequence: Synthetic oligonucleotide
uacagaaaagggauaugca

SEQ ID NO: 3198742 - RNA, 19 nt, Artificial Sequence
  Description of Artificial Sequence: Synthetic oligonucleotide
ucuuucuugguuugcaagu

SEQ ID NO: 3198743 - RNA, 19 nt, Artificial Sequence
  Description of Artificial Sequence: Synthetic oligonucleotide
gauaugcaggucuuuagca

SEQ ID NO: 3198744 - RNA, 19 nt, Artificial Sequence
  Description of Artificial Sequence: Synthetic oligonucleotide
uguaaaucugucagguagu

SEQ ID NO: 3198745 - RNA, 19 nt, Artificial Sequence
  Description of Artificial Sequence: Synthetic oligonucleotide
uucaucacggcucaaguuu

SEQ ID NO: 3198746 - RNA, 19 nt, Artificial Sequence
  Description of Artificial Sequence: Synthetic oligonucleotide
uuuccucuucgucugaugu

SEQ ID NO: 3198747 - RNA, 19 nt, Artificial Sequence
  Description of Artificial Sequence: Synthetic oligonucleotide
uguuuaguuuacguuuacg

SEQ ID NO: 3198748 - RNA, 19 nt, Artificial Sequence
  Description of Artificial Sequence: Synthetic oligonucleotide
cuugcucacucuuaagagc

SEQ ID NO: 3198749 - RNA, 19 nt, Artificial Sequence
  Description of Artificial Sequence: Synthetic oligonucleotide
ugaaagagucaacaggcau

SEQ ID NO: 3198750 - RNA, 19 nt, Artificial Sequence
  Description of Artificial Sequence: Synthetic oligonucleotide
agucaacaggcauuuggac

SEQ ID NO: 3198751 - RNA, 19 nt, Artificial Sequence
  Description of Artificial Sequence: Synthetic oligonucleotide
ugauuuucuugacuucuca

SEQ ID NO: 3198752 - RNA, 19 nt, Artificial Sequence
  Description of Artificial Sequence: Synthetic oligonucleotide
uuucuucugggucaucaug

SEQ ID NO: 3198753 - RNA, 19 nt, Artificial Sequence
  Description of Artificial Sequence: Synthetic oligonucleotide
caaguuacagauaucaucu

SEQ ID NO: 3198754 - RNA, 19 nt, Artificial Sequence
  Description of Artificial Sequence: Synthetic oligonucleotide
acauugagcuugcucacuc

SEQ ID NO: 3198755 - RNA, 19 nt, Artificial Sequence
  Description of Artificial Sequence: Synthetic oligonucleotide
guuuacgacaguucugagc

SEQ ID NO: 3198756 - RNA, 19 nt, Artificial Sequence
  Description of Artificial Sequence: Synthetic oligonucleotide
uucuugguuugcaaguuac

SEQ ID NO: 3198757 - RNA, 19 nt, Artificial Sequence
  Description of Artificial Sequence: Synthetic oligonucleotide
cuugguuugcaaguuacag

SEQ ID NO: 3198758 - RNA, 19 nt, Artificial Sequence
  Description of Artificial Sequence: Synthetic oligonucleotide
gagagaaacuuguaaaucu

SEQ ID NO: 3198759 - RNA, 19 nt, Artificial Sequence
  Description of Artificial Sequence: Synthetic oligonucleotide
uugguuugcaaguuacaga

SEQ ID NO: 3198760 - RNA, 19 nt, Artificial Sequence
  Description of Artificial Sequence: Synthetic oligonucleotide
guuucaucaugccaauagc

SEQ ID NO: 3198761 - RNA, 19 nt, Artificial Sequence
  Description of Artificial Sequence: Synthetic oligonucleotide
agaaugauguuuaguuuac

SEQ ID NO: 3198762 - RNA, 19 nt, Artificial Sequence
  Description of Artificial Sequence: Synthetic oligonucleotide
agaaacuuguaaaucuguc

SEQ ID NO: 3198763 - RNA, 19 nt, Artificial Sequence
  Description of Artificial Sequence: Synthetic oligonucleotide
ucacugauuuucuugacuu

SEQ ID NO: 3198764 - RNA, 19 nt, Artificial Sequence
  Description of Artificial Sequence: Synthetic oligonucleotide
augagagaaacuuguaaau

SEQ ID NO: 3198765 - RNA, 19 nt, Artificial Sequence
  Description of Artificial Sequence: Synthetic oligonucleotide
acuuguaaaucugucaggu

SEQ ID NO: 3198766 - RNA, 19 nt, Artificial Sequence
  Description of Artificial Sequence: Synthetic oligonucleotide
uguucaucacggcucaagu

SEQ ID NO: 3198767 - RNA, 19 nt, Artificial Sequence
  Description of Artificial Sequence: Synthetic oligonucleotide
ugugacauugagcuugcuc

SEQ ID NO: 3198768 - RNA, 19 nt, Artificial Sequence
  Description of Artificial Sequence: Synthetic oligonucleotide
uuagaaugauguuuaguuu

SEQ ID NO: 3198769 - RNA, 19 nt, Artificial Sequence
  Description of Artificial Sequence: Synthetic oligonucleotide
uuuggacaauuucaucuac

SEQ ID NO: 3198770 - RNA, 19 nt, Artificial Sequence
  Description of Artificial Sequence: Synthetic oligonucleotide
uuucuugacuucucagacc

SEQ ID NO: 3198771 - RNA, 19 nt, Artificial Sequence
  Description of Artificial Sequence: Synthetic oligonucleotide
auuugaaccaggcggaucc

SEQ ID NO: 3198772 - RNA, 19 nt, Artificial Sequence
  Description of Artificial Sequence: Synthetic oligonucleotide
cagaauuugaaccaggcgg

SEQ ID NO: 3198773 - RNA, 19 nt, Artificial Sequence
  Description of Artificial Sequence: Synthetic oligonucleotide
uuugacucuggccauaagg

SEQ ID NO: 3198774 - RNA, 19 nt, Artificial Sequence
  Description of Artificial Sequence: Synthetic oligonucleotide
agcuuuaggaaguagaucu

SEQ ID NO: 3198775 - RNA, 19 nt, Artificial Sequence
  Description of Artificial Sequence: Synthetic oligonucleotide
uaggaaguagaucuucucg

SEQ ID NO: 3198776 - RNA, 19 nt, Artificial Sequence
  Description of Artificial Sequence: Synthetic oligonucleotide
uucaggaugaugcucgggg

SEQ ID NO: 3198777 - RNA, 19 nt, Artificial Sequence
  Description of Artificial Sequence: Synthetic oligonucleotide
aaggaagacagucucagga

SEQ ID NO: 3198778 - RNA, 19 nt, Artificial Sequence
  Description of Artificial Sequence: Synthetic oligonucleotide
ugagugacaaggaugcuag

SEQ ID NO: 3198779 - RNA, 19 nt, Artificial Sequence
  Description of Artificial Sequence: Synthetic oligonucleotide
auuucuuuccaaugucugc

SEQ ID NO: 3198780 - RNA, 19 nt, Artificial Sequence
  Description of Artificial Sequence: Synthetic oligonucleotide
agcuccacaaacuucaaag

SEQ ID NO: 3198781 - RNA, 19 nt, Artificial Sequence
  Description of Artificial Sequence: Synthetic oligonucleotide
aaaaggaagacagucucag

SEQ ID NO: 3198782 - RNA, 19 nt, Artificial Sequence
  Description of Artificial Sequence: Synthetic oligonucleotide
acuaacucagacuucccac

SEQ ID NO: 3198783 - RNA, 19 nt, Artificial Sequence
  Description of Artificial Sequence: Synthetic oligonucleotide
ugccauuugacucuggcca

SEQ ID NO: 3198784 - RNA, 19 nt, Artificial Sequence
  Description of Artificial Sequence: Synthetic oligonucleotide
uuggguaccaggcagugag

SEQ ID NO: 3198785 - RNA, 19 nt, Artificial Sequence
  Description of Artificial Sequence: Synthetic oligonucleotide
acucagacuucccacaugg

SEQ ID NO: 3198786 - RNA, 19 nt, Artificial Sequence
  Description of Artificial Sequence: Synthetic oligonucleotide
uucaaagggagaaugcucu

SEQ ID NO: 3198787 - RNA, 19 nt, Artificial Sequence
  Description of Artificial Sequence: Synthetic oligonucleotide
aggaaguagaucuucucgg

SEQ ID NO: 3198788 - RNA, 19 nt, Artificial Sequence
  Description of Artificial Sequence: Synthetic oligonucleotide
gaagacagggcacagagga

SEQ ID NO: 3198789 - RNA, 19 nt, Artificial Sequence
  Description of Artificial Sequence: Synthetic oligonucleotide
cuucugcagaauuugaacc

SEQ ID NO: 3198790 - RNA, 19 nt, Artificial Sequence
  Description of Artificial Sequence: Synthetic oligonucleotide
aaguagaucuucucgguga

SEQ ID NO: 3198791 - RNA, 19 nt, Artificial Sequence
  Description of Artificial Sequence: Synthetic oligonucleotide
uguagauuucuuuccaaug

SEQ ID NO: 3198792 - RNA, 19 nt, Artificial Sequence
  Description of Artificial Sequence: Synthetic oligonucleotide
uguguuggaggcuuuguag

SEQ ID NO: 3198793 - RNA, 19 nt, Artificial Sequence
  Description of Artificial Sequence: Synthetic oligonucleotide
uugacucuggccauaagga

SEQ ID NO: 3198794 - RNA, 19 nt, Artificial Sequence
  Description of Artificial Sequence: Synthetic oligonucleotide
auaaggaggauguugggga

SEQ ID NO: 3198795 - RNA, 19 nt, Artificial Sequence
  Description of Artificial Sequence: Synthetic oligonucleotide
aaagggagaaugcucuuca

SEQ ID NO: 3198796 - RNA, 19 nt, Artificial Sequence
  Description of Artificial Sequence: Synthetic oligonucleotide
ucaugguggucacagaucu

SEQ ID NO: 3198797 - RNA, 19 nt, Artificial Sequence
  Description of Artificial Sequence: Synthetic oligonucleotide
aacuucaaagggagaaugc

SEQ ID NO: 3198798 - RNA, 19 nt, Artificial Sequence
  Description of Artificial Sequence: Synthetic oligonucleotide
gaggaggucaccccaaggg

SEQ ID NO: 3198799 - RNA, 19 nt, Artificial Sequence
  Description of Artificial Sequence: Synthetic oligonucleotide
aaacuucaaagggagaaug

SEQ ID NO: 3198800 - RNA, 19 nt, Artificial Sequence
  Description of Artificial Sequence: Synthetic oligonucleotide
gaugcuaggguccuuggug

SEQ ID NO: 3198801 - RNA, 19 nt, Artificial Sequence
  Description of Artificial Sequence: Synthetic oligonucleotide
cucuucaggaugaugcucg

SEQ ID NO: 3198802 - RNA, 19 nt, Artificial Sequence
  Description of Artificial Sequence: Synthetic oligonucleotide
uggagcuccacaaacuuca

SEQ ID NO: 3198803 - RNA, 19 nt, Artificial Sequence
  Description of Artificial Sequence: Synthetic oligonucleotide
cagugagugacaaggaugc

SEQ ID NO: 3198804 - RNA, 19 nt, Artificial Sequence
  Description of Artificial Sequence: Synthetic oligonucleotide
uuuaggaaguagaucuucu

SEQ ID NO: 3198805 - RNA, 19 nt, Artificial Sequence
  Description of Artificial Sequence: Synthetic oligonucleotide
ucaggaugcguucauggug

SEQ ID NO: 3198806 - RNA, 19 nt, Artificial Sequence
  Description of Artificial Sequence: Synthetic oligonucleotide
gagaaugcucuucaggaug

SEQ ID NO: 3198807 - RNA, 19 nt, Artificial Sequence
  Description of Artificial Sequence: Synthetic oligonucleotide
cuccacaaacuucaaaggg

SEQ ID NO: 3198808 - RNA, 19 nt, Artificial Sequence
  Description of Artificial Sequence: Synthetic oligonucleotide
ugcagaauuugaaccaggc

SEQ ID NO: 3198809 - RNA, 19 nt, Artificial Sequence
  Description of Artificial Sequence: Synthetic oligonucleotide
ucaggguggagcuuuagga

SEQ ID NO: 3198810 - RNA, 19 nt, Artificial Sequence
  Description of Artificial Sequence: Synthetic oligonucleotide
cucaggauggucagggugg

SEQ ID NO: 3198811 - RNA, 19 nt, Artificial Sequence
  Description of Artificial Sequence: Synthetic oligonucleotide
ucagacuucccacaugggu

SEQ ID NO: 3198812 - RNA, 19 nt, Artificial Sequence
  Description of Artificial Sequence: Synthetic oligonucleotide
uggagcuuuaggaaguaga

SEQ ID NO: 3198813 - RNA, 19 nt, Artificial Sequence
  Description of Artificial Sequence: Synthetic oligonucleotide
gaagacagucucaggaugg

SEQ ID NO: 3198814 - RNA, 19 nt, Artificial Sequence
  Description of Artificial Sequence: Synthetic oligonucleotide
uucugcagaauuugaacca

SEQ ID NO: 3198815 - RNA, 19 nt, Artificial Sequence
  Description of Artificial Sequence: Synthetic oligonucleotide
ugcacuaacucagacuucc

SEQ ID NO: 3198816 - RNA, 19 nt, Artificial Sequence
  Description of Artificial Sequence: Synthetic oligonucleotide
agugacaaggaugcuaggg

SEQ ID NO: 3198817 - RNA, 19 nt, Artificial Sequence
  Description of Artificial Sequence: Synthetic oligonucleotide
agggccauuguguuggagg

SEQ ID NO: 3198818 - RNA, 19 nt, Artificial Sequence
  Description of Artificial Sequence: Synthetic oligonucleotide
ucggugacuguccucaacc

SEQ ID NO: 3198819 - RNA, 19 nt, Artificial Sequence
  Description of Artificial Sequence: Synthetic oligonucleotide
caggaugcguucauggugg

SEQ ID NO: 3198820 - RNA, 19 nt, Artificial Sequence
  Description of Artificial Sequence: Synthetic oligonucleotide
augccauuugacucuggcc

SEQ ID NO: 3198821 - RNA, 19 nt, Artificial Sequence
  Description of Artificial Sequence: Synthetic oligonucleotide
caggcagugagugacaagg

SEQ ID NO: 3198822 - RNA, 19 nt, Artificial Sequence
  Description of Artificial Sequence: Synthetic oligonucleotide
aggaggucaccccaagggc

SEQ ID NO: 3198823 - RNA, 19 nt, Artificial Sequence
  Description of Artificial Sequence: Synthetic oligonucleotide
gauggacagacccuucugc

SEQ ID NO: 3198824 - RNA, 19 nt, Artificial Sequence
  Description of Artificial Sequence: Synthetic oligonucleotide
ucucaggauggucagggug

SEQ ID NO: 3198825 - RNA, 19 nt, Artificial Sequence
  Description of Artificial Sequence: Synthetic oligonucleotide
uuucuuuccaaugucugcu

SEQ ID NO: 3198826 - RNA, 19 nt, Artificial Sequence
  Description of Artificial Sequence: Synthetic oligonucleotide
gacucuggccauaaggagg

SEQ ID NO: 3198827 - RNA, 19 nt, Artificial Sequence
  Description of Artificial Sequence: Synthetic oligonucleotide
gaugccauuugacucuggc

SEQ ID NO: 3198828 - RNA, 19 nt, Artificial Sequence
  Description of Artificial Sequence: Synthetic oligonucleotide
agggagaaugcucuucagg

SEQ ID NO: 3198829 - RNA, 19 nt, Artificial Sequence
  Description of Artificial Sequence: Synthetic oligonucleotide
aauuugaaccaggcggauc

SEQ ID NO: 3198830 - RNA, 19 nt, Artificial Sequence
  Description of Artificial Sequence: Synthetic oligonucleotide
acuguccucaaccucagga

SEQ ID NO: 3198831 - RNA, 19 nt, Artificial Sequence
  Description of Artificial Sequence: Synthetic oligonucleotide
aggauggucaggguggagc

SEQ ID NO: 3198832 - RNA, 19 nt, Artificial Sequence
  Description of Artificial Sequence: Synthetic oligonucleotide
cauaaggaggauguugggg

SEQ ID NO: 3198833 - RNA, 19 nt, Artificial Sequence
  Description of Artificial Sequence: Synthetic oligonucleotide
augguggucacagaucugg

SEQ ID NO: 3198834 - RNA, 19 nt, Artificial Sequence
  Description of Artificial Sequence: Synthetic oligonucleotide
uagauuucuuuccaauguc

SEQ ID NO: 3198835 - RNA, 19 nt, Artificial Sequence
  Description of Artificial Sequence: Synthetic oligonucleotide
uguccucaaccucaggaug

SEQ ID NO: 3198836 - RNA, 19 nt, Artificial Sequence
  Description of Artificial Sequence: Synthetic oligonucleotide
uagaucuucucggugacug

SEQ ID NO: 3198837 - RNA, 19 nt, Artificial Sequence
  Description of Artificial Sequence: Synthetic oligonucleotide
augcuaggguccuuggugg

SEQ ID NO: 3198838 - RNA, 19 nt, Artificial Sequence
  Description of Artificial Sequence: Synthetic oligonucleotide
ucuuuccaaugucugcucc

SEQ ID NO: 3198839 - RNA, 19 nt, Artificial Sequence
  Description of Artificial Sequence: Synthetic oligonucleotide
gaugcguucauggugguca

SEQ ID NO: 3198840 - RNA, 19 nt, Artificial Sequence
  Description of Artificial Sequence: Synthetic oligonucleotide
guggucacagaucuggagc

SEQ ID NO: 3198841 - RNA, 19 nt, Artificial Sequence
  Description of Artificial Sequence: Synthetic oligonucleotide
ucccacauggguugcagag

SEQ ID NO: 3198842 - RNA, 19 nt, Artificial Sequence
  Description of Artificial Sequence: Synthetic oligonucleotide
acaaacuucaaagggagaa

SEQ ID NO: 3198843 - RNA, 19 nt, Artificial Sequence
  Description of Artificial Sequence: Synthetic oligonucleotide
agucucaggauggucaggg

SEQ ID NO: 3198844 - RNA, 19 nt, Artificial Sequence
  Description of Artificial Sequence: Synthetic oligonucleotide
gguggugauggacagaccc

SEQ ID NO: 3198845 - RNA, 19 nt, Artificial Sequence
  Description of Artificial Sequence: Synthetic oligonucleotide
aggguggagcuuuaggaag

SEQ ID NO: 3198846 - RNA, 19 nt, Artificial Sequence
  Description of Artificial Sequence: Synthetic oligonucleotide
agacagggcacagaggagg

SEQ ID NO: 3198847 - RNA, 19 nt, Artificial Sequence
  Description of Artificial Sequence: Synthetic oligonucleotide
gaucuggagcuccacaaac

SEQ ID NO: 3198848 - RNA, 19 nt, Artificial Sequence
  Description of Artificial Sequence: Synthetic oligonucleotide
ugacucuggccauaaggag

SEQ ID NO: 3198849 - RNA, 19 nt, Artificial Sequence
  Description of Artificial Sequence: Synthetic oligonucleotide
cuucaaagggagaaugcuc

SEQ ID NO: 3198850 - RNA, 19 nt, Artificial Sequence
  Description of Artificial Sequence: Synthetic oligonucleotide
uuuguagauuucuuuccaa

SEQ ID NO: 3198851 - RNA, 19 nt, Artificial Sequence
  Description of Artificial Sequence: Synthetic oligonucleotide
ucugcagaauuugaaccag

SEQ ID NO: 3198852 - RNA, 19 nt, Artificial Sequence
  Description of Artificial Sequence: Synthetic oligonucleotide
uccuugguggugauggaca

SEQ ID NO: 3198853 - RNA, 19 nt, Artificial Sequence
  Description of Artificial Sequence: Synthetic oligonucleotide
uuguagauuucuuuccaau

SEQ ID NO: 3198854 - RNA, 19 nt, Artificial Sequence
  Description of Artificial Sequence: Synthetic oligonucleotide
cuggcucugccccugaugc

SEQ ID NO: 3198855 - RNA, 19 nt, Artificial Sequence
  Description of Artificial Sequence: Synthetic oligonucleotide
uggauggucuguuccaugu

SEQ ID NO: 3198856 - RNA, 19 nt, Artificial Sequence
  Description of Artificial Sequence: Synthetic oligonucleotide
uuaggaaguagaucuucuc

SEQ ID NO: 3198857 - RNA, 19 nt, Artificial Sequence
  Description of Artificial Sequence: Synthetic oligonucleotide
ugacaaggaugcuaggguc

SEQ ID NO: 3198858 - RNA, 19 nt, Artificial Sequence
  Description of Artificial Sequence: Synthetic oligonucleotide
uccaaugucugcuccuucu

SEQ ID NO: 3198859 - RNA, 19 nt, Artificial Sequence
  Description of Artificial Sequence: Synthetic oligonucleotide
ugauggacagacccuucug

SEQ ID NO: 3198860 - RNA, 19 nt, Artificial Sequence
  Description of Artificial Sequence: Synthetic oligonucleotide
uucucggugacuguccuca

SEQ ID NO: 3198861 - RNA, 19 nt, Artificial Sequence
  Description of Artificial Sequence: Synthetic oligonucleotide
aagggagaaugcucuucag

SEQ ID NO: 3198862 - RNA, 19 nt, Artificial Sequence
  Description of Artificial Sequence: Synthetic oligonucleotide
agacuucccacauggguug

SEQ ID NO: 3198863 - RNA, 19 nt, Artificial Sequence
  Description of Artificial Sequence: Synthetic oligonucleotide
uggucacagaucuggagcu

SEQ ID NO: 3198864 - RNA, 19 nt, Artificial Sequence
  Description of Artificial Sequence: Synthetic oligonucleotide
guuggggaggggaagacag

SEQ ID NO: 3198865 - RNA, 19 nt, Artificial Sequence
  Description of Artificial Sequence: Synthetic oligonucleotide
agaauuugaaccaggcgga

SEQ ID NO: 3198866 - RNA, 19 nt, Artificial Sequence
  Description of Artificial Sequence: Synthetic oligonucleotide
ucaggaugaugcucggggc

SEQ ID NO: 3198867 - RNA, 19 nt, Artificial Sequence
  Description of Artificial Sequence: Synthetic oligonucleotide
acuucaaagggagaaugcu

SEQ ID NO: 3198868 - RNA, 19 nt, Artificial Sequence
  Description of Artificial Sequence: Synthetic oligonucleotide
uggggaggggaagacaggg

SEQ ID NO: 3198869 - RNA, 19 nt, Artificial Sequence
  Description of Artificial Sequence: Synthetic oligonucleotide
guagauuucuuuccaaugu

SEQ ID NO: 3198870 - RNA, 19 nt, Artificial Sequence
  Description of Artificial Sequence: Synthetic oligonucleotide
acauggguugcagaggcuc

SEQ ID NO: 3198871 - RNA, 19 nt, Artificial Sequence
  Description of Artificial Sequence: Synthetic oligonucleotide
aacaguuagggauacacag

SEQ ID NO: 3198872 - RNA, 19 nt, Artificial Sequence
  Description of Artificial Sequence: Synthetic oligonucleotide
uuuauucccagcauuuggg

SEQ ID NO: 3198873 - RNA, 19 nt, Artificial Sequence
  Description of Artificial Sequence: Synthetic oligonucleotide
uuugaggccaguuuggucu

SEQ ID NO: 3198874 - RNA, 19 nt, Artificial Sequence
  Description of Artificial Sequence: Synthetic oligonucleotide
ugaguuugaggccaguuug

SEQ ID NO: 3198875 - RNA, 19 nt, Artificial Sequence
  Description of Artificial Sequence: Synthetic oligonucleotide
agaacaguuagggauacac

SEQ ID NO: 3198876 - RNA, 19 nt, Artificial Sequence
  Description of Artificial Sequence: Synthetic oligonucleotide
aguuccagaacaguuaggg

SEQ ID NO: 3198877 - RNA, 19 nt, Artificial Sequence
  Description of Artificial Sequence: Synthetic oligonucleotide
guucccagcgaccacaugg

SEQ ID NO: 3198878 - RNA, 19 nt, Artificial Sequence
  Description of Artificial Sequence: Synthetic oligonucleotide
auucccagcauuugggagg

SEQ ID NO: 3198879 - RNA, 19 nt, Artificial Sequence
  Description of Artificial Sequence: Synthetic oligonucleotide
cuuuauucccagcauuugg

SEQ ID NO: 3198880 - RNA, 19 nt, Artificial Sequence
  Description of Artificial Sequence: Synthetic oligonucleotide
uagggauacacagagaaac

SEQ ID NO: 3198881 - RNA, 19 nt, Artificial Sequence
  Description of Artificial Sequence: Synthetic oligonucleotide
cacaugguggcucacaacc

SEQ ID NO: 3198882 - RNA, 19 nt, Artificial Sequence
  Description of Artificial Sequence: Synthetic oligonucleotide
agguccuguguucaguucc

SEQ ID NO: 3198883 - RNA, 19 nt, Artificial Sequence
  Description of Artificial Sequence: Synthetic oligonucleotide
uuccagaacaguuagggau

SEQ ID NO: 3198884 - RNA, 19 nt, Artificial Sequence
  Description of Artificial Sequence: Synthetic oligonucleotide
cucacaaccaucugguggc

SEQ ID NO: 3198885 - RNA, 19 nt, Artificial Sequence
  Description of Artificial Sequence: Synthetic oligonucleotide
ggaucucugaguuugaggc

SEQ ID NO: 3198886 - RNA, 19 nt, Artificial Sequence
  Description of Artificial Sequence: Synthetic oligonucleotide
guuagggauacacagagaa

SEQ ID NO: 3198887 - RNA, 19 nt, Artificial Sequence
  Description of Artificial Sequence: Synthetic oligonucleotide
caguuagggauacacagag

SEQ ID NO: 3198888 - RNA, 19 nt, Artificial Sequence
  Description of Artificial Sequence: Synthetic oligonucleotide
gccaguuuggucuacagag

SEQ ID NO: 3198889 - RNA, 19 nt, Artificial Sequence
  Description of Artificial Sequence: Synthetic oligonucleotide
caguuuggucuacagagcg

SEQ ID NO: 3198890 - RNA, 19 nt, Artificial Sequence
  Description of Artificial Sequence: Synthetic oligonucleotide
uauucccagcauuugggag

SEQ ID NO: 3198891 - RNA, 19 nt, Artificial Sequence
  Description of Artificial Sequence: Synthetic oligonucleotide
acagagaaacccugucugg

SEQ ID NO: 3198892 - RNA, 19 nt, Artificial Sequence
  Description of Artificial Sequence: Synthetic oligonucleotide
gauacacagagaaacccug

SEQ ID NO: 3198893 - RNA, 19 nt, Artificial Sequence
  Description of Artificial Sequence: Synthetic oligonucleotide
cuguguucaguucccagcg

SEQ ID NO: 3198894 - RNA, 19 nt, Artificial Sequence
  Description of Artificial Sequence: Synthetic oligonucleotide
guggcucacaaccaucugg

SEQ ID NO: 3198895 - RNA, 19 nt, Artificial Sequence
  Description of Artificial Sequence: Synthetic oligonucleotide
uacagagcgaguuccagaa

SEQ ID NO: 3198896 - RNA, 19 nt, Artificial Sequence
  Description of Artificial Sequence: Synthetic oligonucleotide
cacagagaaacccugucug

SEQ ID NO: 3198897 - RNA, 19 nt, Artificial Sequence
  Description of Artificial Sequence: Synthetic oligonucleotide
accaucugguggcacacac

SEQ ID NO: 3198898 - RNA, 19 nt, Artificial Sequence
  Description of Artificial Sequence: Synthetic oligonucleotide
guuuggucuacagagcgag

SEQ ID NO: 3198899 - RNA, 19 nt, Artificial Sequence
  Description of Artificial Sequence: Synthetic oligonucleotide
ucugguggcacacaccuuu

SEQ ID NO: 3198900 - RNA, 19 nt, Artificial Sequence
  Description of Artificial Sequence: Synthetic oligonucleotide
uuauucccagcauuuggga

SEQ ID NO: 3198901 - RNA, 19 nt, Artificial Sequence
  Description of Artificial Sequence: Synthetic oligonucleotide
uggcacacaccuuuauucc

SEQ ID NO: 3198902 - RNA, 19 nt, Artificial Sequence
  Description of Artificial Sequence: Synthetic oligonucleotide
gcauuugggaggcagaggc

SEQ ID NO: 3198903 - RNA, 19 nt, Artificial Sequence
  Description of Artificial Sequence: Synthetic oligonucleotide
uguucaguucccagcgacc

SEQ ID NO: 3198904 - RNA, 19 nt, Artificial Sequence
  Description of Artificial Sequence: Synthetic oligonucleotide
auuugggaggcagaggcag

SEQ ID NO: 3198905 - RNA, 19 nt, Artificial Sequence
  Description of Artificial Sequence: Synthetic oligonucleotide
uggcucacaaccaucuggu

SEQ ID NO: 3198906 - RNA, 19 nt, Artificial Sequence
  Description of Artificial Sequence: Synthetic oligonucleotide
guggcacacaccuuuauuc

SEQ ID NO: 3198907 - RNA, 19 nt, Artificial Sequence
  Description of Artificial Sequence: Synthetic oligonucleotide
agggauacacagagaaacc

SEQ ID NO: 3198908 - RNA, 19 nt, Artificial Sequence
  Description of Artificial Sequence: Synthetic oligonucleotide
gcucacaaccaucuggugg

SEQ ID NO: 3198909 - RNA, 19 nt, Artificial Sequence
  Description of Artificial Sequence: Synthetic oligonucleotide
uuugggaggcagaggcagg

SEQ ID NO: 3198910 - RNA, 19 nt, Artificial Sequence
  Description of Artificial Sequence: Synthetic oligonucleotide
uccagaacaguuagggaua

SEQ ID NO: 3198911 - RNA, 19 nt, Artificial Sequence
  Description of Artificial Sequence: Synthetic oligonucleotide
gaucucugaguuugaggcc

SEQ ID NO: 3198912 - RNA, 19 nt, Artificial Sequence
  Description of Artificial Sequence: Synthetic oligonucleotide
uuagggauacacagagaaa

SEQ ID NO: 3198913 - RNA, 19 nt, Artificial Sequence
  Description of Artificial Sequence: Synthetic oligonucleotide
uacacagagaaacccuguc

SEQ ID NO: 3198914 - RNA, 19 nt, Artificial Sequence
  Description of Artificial Sequence: Synthetic oligonucleotide
acacagagaaacccugucu

SEQ ID NO: 3198915 - RNA, 19 nt, Artificial Sequence
  Description of Artificial Sequence: Synthetic oligonucleotide
gaguuugaggccaguuugg

SEQ ID NO: 3198916 - RNA, 19 nt, Artificial Sequence
  Description of Artificial Sequence: Synthetic oligonucleotide
ugguggcucacaaccaucu

SEQ ID NO: 3198917 - RNA, 19 nt, Artificial Sequence
  Description of Artificial Sequence: Synthetic oligonucleotide
ucuacagagcgaguuccag

SEQ ID NO: 3198918 - RNA, 19 nt, Artificial Sequence
  Description of Artificial Sequence: Synthetic oligonucleotide
acaaccaucugguggcaca

SEQ ID NO: 3198919 - RNA, 19 nt, Artificial Sequence
  Description of Artificial Sequence: Synthetic oligonucleotide
cacaccuuuauucccagca

SEQ ID NO: 3198920 - RNA, 19 nt, Artificial Sequence
  Description of Artificial Sequence: Synthetic oligonucleotide
ucaguucccagcgaccaca

SEQ ID NO: 3198921 - RNA, 19 nt, Artificial Sequence
  Description of Artificial Sequence: Synthetic oligonucleotide
aucucugaguuugaggcca

SEQ ID NO: 3198922 - RNA, 19 nt, Artificial Sequence
  Description of Artificial Sequence: Synthetic oligonucleotide
uccuguguucaguucccag

SEQ ID NO: 3198923 - RNA, 19 nt, Artificial Sequence
  Description of Artificial Sequence: Synthetic oligonucleotide
agaaacccugucuggaaaa

SEQ ID NO: 3198924 - RNA, 19 nt, Artificial Sequence
  Description of Artificial Sequence: Synthetic oligonucleotide
acacaccuuuauucccagc

SEQ ID NO: 3198925 - RNA, 19 nt, Artificial Sequence
  Description of Artificial Sequence: Synthetic oligonucleotide
cagagcgaguuccagaaca

SEQ ID NO: 3198926 - RNA, 19 nt, Artificial Sequence
  Description of Artificial Sequence: Synthetic oligonucleotide
acagagcgaguuccagaac

SEQ ID NO: 3198927 - RNA, 19 nt, Artificial Sequence
  Description of Artificial Sequence: Synthetic oligonucleotide
uucccagcgaccacauggu

SEQ ID NO: 3198928 - RNA, 19 nt, Artificial Sequence
  Description of Artificial Sequence: Synthetic oligonucleotide
agagaaacccugucuggaa

SEQ ID NO: 3198929 - RNA, 19 nt, Artificial Sequence
  Description of Artificial Sequence: Synthetic oligonucleotide
ucagagguccuguguucag

SEQ ID NO: 3198930 - RNA, 19 nt, Artificial Sequence
  Description of Artificial Sequence: Synthetic oligonucleotide
uggucuacagagcgaguuc

SEQ ID NO: 3198931 - RNA, 19 nt, Artificial Sequence
  Description of Artificial Sequence: Synthetic oligonucleotide
uguguucaguucccagcga

SEQ ID NO: 3198932 - RNA, 19 nt, Artificial Sequence
  Description of Artificial Sequence: Synthetic oligonucleotide
guguucaguucccagcgac

SEQ ID NO: 3198933 - RNA, 19 nt, Artificial Sequence
  Description of Artificial Sequence: Synthetic oligonucleotide
gggauacacagagaaaccc

SEQ ID NO: 3198934 - RNA, 19 nt, Artificial Sequence
  Description of Artificial Sequence: Synthetic oligonucleotide
aggcggaucucugaguuug

SEQ ID NO: 3198935 - RNA, 19 nt, Artificial Sequence
  Description of Artificial Sequence: Synthetic oligonucleotide
uuggucuacagagcgaguu

SEQ ID NO: 3198936 - RNA, 19 nt, Artificial Sequence
  Description of Artificial Sequence: Synthetic oligonucleotide
gaacaguuagggauacaca

SEQ ID NO: 3198937 - RNA, 19 nt, Artificial Sequence
  Description of Artificial Sequence: Synthetic oligonucleotide
gagaaacccugucuggaaa

SEQ ID NO: 3198938 - RNA, 19 nt, Artificial Sequence
  Description of Artificial Sequence: Synthetic oligonucleotide
ucucugaguuugaggccag

SEQ ID NO: 3198939 - RNA, 19 nt, Artificial Sequence
  Description of Artificial Sequence: Synthetic oligonucleotide
ugucagagguccuguguuc

SEQ ID NO: 3198940 - RNA, 19 nt, Artificial Sequence
  Description of Artificial Sequence: Synthetic oligonucleotide
ccuguguucaguucccagc

SEQ ID NO: 3198941 - RNA, 19 nt, Artificial Sequence
  Description of Artificial Sequence: Synthetic oligonucleotide
uucccagcauuugggaggc

SEQ ID NO: 3198942 - RNA, 19 nt, Artificial Sequence
  Description of Artificial Sequence: Synthetic oligonucleotide
uuuggucuacagagcgagu

SEQ ID NO: 3198943 - RNA, 19 nt, Artificial Sequence
  Description of Artificial Sequence: Synthetic oligonucleotide
agcauuugggaggcagagg

SEQ ID NO: 3198944 - RNA, 19 nt, Artificial Sequence
  Description of Artificial Sequence: Synthetic oligonucleotide
gaguuccagaacaguuagg

SEQ ID NO: 3198945 - RNA, 19 nt, Artificial Sequence
  Description of Artificial Sequence: Synthetic oligonucleotide
acaguuagggauacacaga

SEQ ID NO: 3198946 - RNA, 19 nt, Artificial Sequence
  Description of Artificial Sequence: Synthetic oligonucleotide
aggcaggcggaucucugag

SEQ ID NO: 3198947 - RNA, 19 nt, Artificial Sequence
  Description of Artificial Sequence: Synthetic oligonucleotide
acaccuuuauucccagcau

SEQ ID NO: 3198948 - RNA, 19 nt, Artificial Sequence
  Description of Artificial Sequence: Synthetic oligonucleotide
uugggaggcagaggcaggc

SEQ ID NO: 3198949 - RNA, 19 nt, Artificial Sequence
  Description of Artificial Sequence: Synthetic oligonucleotide
ccagcgaccacaugguggc

SEQ ID NO: 3198950 - RNA, 19 nt, Artificial Sequence
  Description of Artificial Sequence: Synthetic oligonucleotide
cacacaccuuuauucccag

SEQ ID NO: 3198951 - RNA, 19 nt, Artificial Sequence
  Description of Artificial Sequence: Synthetic oligonucleotide
accacaugguggcucacaa

SEQ ID NO: 3198952 - RNA, 19 nt, Artificial Sequence
  Description of Artificial Sequence: Synthetic oligonucleotide
agagcgaguuccagaacag

SEQ ID NO: 3198953 - RNA, 19 nt, Artificial Sequence
  Description of Artificial Sequence: Synthetic oligonucleotide
guuccagaacaguuaggga

SEQ ID NO: 3198954 - RNA, 19 nt, Artificial Sequence
  Description of Artificial Sequence: Synthetic oligonucleotide
guuugaggccaguuugguc

SEQ ID NO: 3198955 - RNA, 19 nt, Artificial Sequence
  Description of Artificial Sequence: Synthetic oligonucleotide
ggucuacagagcgaguucc

SEQ ID NO: 3198956 - RNA, 19 nt, Artificial Sequence
  Description of Artificial Sequence: Synthetic oligonucleotide
uucaguucccagcgaccac

SEQ ID NO: 3198957 - RNA, 19 nt, Artificial Sequence
  Description of Artificial Sequence: Synthetic oligonucleotide
ggcacacaccuuuauuccc

SEQ ID NO: 3198958 - RNA, 19 nt, Artificial Sequence
  Description of Artificial Sequence: Synthetic oligonucleotide
aggccaguuuggucuacag

SEQ ID NO: 3198959 - RNA, 19 nt, Artificial Sequence
  Description of Artificial Sequence: Synthetic oligonucleotide
cagcauuugggaggcagag

SEQ ID NO: 3198960 - RNA, 19 nt, Artificial Sequence
  Description of Artificial Sequence: Synthetic oligonucleotide
agagguccuguguucaguu

SEQ ID NO: 3198961 - RNA, 19 nt, Artificial Sequence
  Description of Artificial Sequence: Synthetic oligonucleotide
guucaguucccagcgacca

SEQ ID NO: 3198962 - RNA, 19 nt, Artificial Sequence
  Description of Artificial Sequence: Synthetic oligonucleotide
aguuugaggccaguuuggu

SEQ ID NO: 3198963 - RNA, 19 nt, Artificial Sequence
  Description of Artificial Sequence: Synthetic oligonucleotide
agcgaccacaugguggcuc

SEQ ID NO: 3198964 - RNA, 19 nt, Artificial Sequence
  Description of Artificial Sequence: Synthetic oligonucleotide
cuacagagcgaguuccaga

SEQ ID NO: 3198965 - RNA, 19 nt, Artificial Sequence
  Description of Artificial Sequence: Synthetic oligonucleotide
caucugguggcacacaccu

SEQ ID NO: 3198966 - RNA, 19 nt, Artificial Sequence
  Description of Artificial Sequence: Synthetic oligonucleotide
cccagcgaccacauggugg

SEQ ID NO: 3198967 - RNA, 19 nt, Artificial Sequence
  Description of Artificial Sequence: Synthetic oligonucleotide
ucugaguuugaggccaguu

SEQ ID NO: 3198968 - RNA, 19 nt, Artificial Sequence
  Description of Artificial Sequence: Synthetic oligonucleotide
gggaggcagaggcaggcgg

SEQ ID NO: 3198969 - RNA, 19 nt, Artificial Sequence
  Description of Artificial Sequence: Synthetic oligonucleotide
auacacagagaaacccugu

SEQ ID NO: 3198970 - RNA, 19 nt, Artificial Sequence
  Description of Artificial Sequence: Synthetic oligonucleotide
accuuuauucccagcauuu

SEQ ID NO: 3198971 - RNA, 19 nt, Artificial Sequence
  Description of Artificial Sequence: Synthetic oligonucleotide
aauauauauauauauauau

SEQ ID NO: 3198972 - RNA, 19 nt, Artificial Sequence
  Description of Artificial Sequence: Synthetic oligonucleotide
uauauauauauauauauga

SEQ ID NO: 3198973 - RNA, 19 nt, Artificial Sequence
  Description of Artificial Sequence: Synthetic oligonucleotide
acugauugcauuuaaaggg

SEQ ID NO: 3198974 - RNA, 19 nt, Artificial Sequence
  Description of Artificial Sequence: Synthetic oligonucleotide
aauaacauagaauugccca

SEQ ID NO: 3198975 - RNA, 19 nt, Artificial Sequence
  Description of Artificial Sequence: Synthetic oligonucleotide
uaaguguggauucugaacg

SEQ ID NO: 3198976 - RNA, 19 nt, Artificial Sequence
  Description of Artificial Sequence: Synthetic oligonucleotide
uauauauauauauauauau

SEQ ID NO: 3198977 - RNA, 19 nt, Artificial Sequence
  Description of Artificial Sequence: Synthetic oligonucleotide
aacguuuguacccaguaac

SEQ ID NO: 3198978 - RNA, 19 nt, Artificial Sequence
  Description of Artificial Sequence: Synthetic oligonucleotide
auauauaugacucugugga

SEQ ID NO: 3198979 - RNA, 19 nt, Artificial Sequence
  Description of Artificial Sequence: Synthetic oligonucleotide
auauauauauauaugacuc

SEQ ID NO: 3198980 - RNA, 19 nt, Artificial Sequence
  Description of Artificial Sequence: Synthetic oligonucleotide
ugucaaauaacauagaauu

SEQ ID NO: 3198981 - RNA, 19 nt, Artificial Sequence
  Description of Artificial Sequence: Synthetic oligonucleotide
augaaggucaaacaaggcc

SEQ ID NO: 3198982 - RNA, 19 nt, Artificial Sequence
  Description of Artificial Sequence: Synthetic oligonucleotide
uauauauauauauaugacu

SEQ ID NO: 3198983 - RNA, 19 nt, Artificial Sequence
  Description of Artificial Sequence: Synthetic oligonucleotide
uagaauugcccauugaagg

SEQ ID NO: 3198984 - RNA, 19 nt, Artificial Sequence
  Description of Artificial Sequence: Synthetic oligonucleotide
ucaaauaacauagaauugc

SEQ ID NO: 3198985 - RNA, 19 nt, Artificial Sequence
  Description of Artificial Sequence: Synthetic oligonucleotide
ugaaacauuucccacacug

SEQ ID NO: 3198986 - RNA, 19 nt, Artificial Sequence
  Description of Artificial Sequence: Synthetic oligonucleotide
ucaugaaggucaaacaagg

SEQ ID NO: 3198987 - RNA, 19 nt, Artificial Sequence
  Description of Artificial Sequence: Synthetic oligonucleotide
cauaauuucaugaagguca

SEQ ID NO: 3198988 - RNA, 19 nt, Artificial Sequence
  Description of Artificial Sequence: Synthetic oligonucleotide
cugaugucaaauaacauag

SEQ ID NO: 3198989 - RNA, 19 nt, Artificial Sequence
  Description of Artificial Sequence: Synthetic oligonucleotide
uauauauaugacucugugg

SEQ ID NO: 3198990 - RNA, 19 nt, Artificial Sequence
  Description of Artificial Sequence: Synthetic oligonucleotide
ugaaggucaaacaaggcca

SEQ ID NO: 3198991 - RNA, 19 nt, Artificial Sequence
  Description of Artificial Sequence: Synthetic oligonucleotide
ucucucuugaauuuaagug

SEQ ID NO: 3198992 - RNA, 19 nt, Artificial Sequence
  Description of Artificial Sequence: Synthetic oligonucleotide
ucuguugugaguuaucuga

SEQ ID NO: 3198993 - RNA, 19 nt, Artificial Sequence
  Description of Artificial Sequence: Synthetic oligonucleotide
auauauauauauauaugac

SEQ ID NO: 3198994 - RNA, 19 nt, Artificial Sequence
  Description of Artificial Sequence: Synthetic oligonucleotide
uauguagauucucugaugu

SEQ ID NO: 3198995 - RNA, 19 nt, Artificial Sequence
  Description of Artificial Sequence: Synthetic oligonucleotide
aaauaacauagaauugccc

SEQ ID NO: 3198996 - RNA, 19 nt, Artificial Sequence
  Description of Artificial Sequence: Synthetic oligonucleotide
uucaugaaggucaaacaag

SEQ ID NO: 3198997 - RNA, 19 nt, Artificial Sequence
  Description of Artificial Sequence: Synthetic oligonucleotide
ucucugaugucaaauaaca

SEQ ID NO: 3198998 - RNA, 19 nt, Artificial Sequence
  Description of Artificial Sequence: Synthetic oligonucleotide
agugaaacauuucccacac

SEQ ID NO: 3198999 - RNA, 19 nt, Artificial Sequence
  Description of Artificial Sequence: Synthetic oligonucleotide
uucuaccccaauaacaugc

SEQ ID NO: 3199000 - RNA, 19 nt, Artificial Sequence
  Description of Artificial Sequence: Synthetic oligonucleotide
gaggugagaacucugagug

SEQ ID NO: 3199001 - RNA, 19 nt, Artificial Sequence
  Description of Artificial Sequence: Synthetic oligonucleotide
ugugaguuaucugaugucg

SEQ ID NO: 3199002 - RNA, 19 nt, Artificial Sequence
  Description of Artificial Sequence: Synthetic oligonucleotide
acauuucccacacugauug

SEQ ID NO: 3199003 - RNA, 19 nt, Artificial Sequence
  Description of Artificial Sequence: Synthetic oligonucleotide
cugcauaauuucaugaagg

SEQ ID NO: 3199004 - RNA, 19 nt, Artificial Sequence
  Description of Artificial Sequence: Synthetic oligonucleotide
uaauauauauauauauaua

SEQ ID NO: 3199005 - RNA, 19 nt, Artificial Sequence
  Description of Artificial Sequence: Synthetic oligonucleotide
ucugaacgagcuuugagcc

SEQ ID NO: 3199006 - RNA, 19 nt, Artificial Sequence
  Description of Artificial Sequence: Synthetic oligonucleotide
uuucaugaaggucaaacaa

SEQ ID NO: 3199007 - RNA, 19 nt, Artificial Sequence
  Description of Artificial Sequence: Synthetic oligonucleotide
uucggcuucguccaugugg

SEQ ID NO: 3199008 - RNA, 19 nt, Artificial Sequence
  Description of Artificial Sequence: Synthetic oligonucleotide
auauauauaugacucugug

SEQ ID NO: 3199009 - RNA, 19 nt, Artificial Sequence
  Description of Artificial Sequence: Synthetic oligonucleotide
caaauaacauagaauugcc

SEQ ID NO: 3199010 - RNA, 19 nt, Artificial Sequence
  Description of Artificial Sequence: Synthetic oligonucleotide
uuaucuuaaguuuccuucc

SEQ ID NO: 3199011 - RNA, 19 nt, Artificial Sequence
  Description of Artificial Sequence: Synthetic oligonucleotide
acacugauugcauuuaaag

SEQ ID NO: 3199012 - RNA, 19 nt, Artificial Sequence
  Description of Artificial Sequence: Synthetic oligonucleotide
ucugaugucaaauaacaua

SEQ ID NO: 3199013 - RNA, 19 nt, Artificial Sequence
  Description of Artificial Sequence: Synthetic oligonucleotide
uucugaacgagcuuugagc

SEQ ID NO: 3199014 - RNA, 19 nt, Artificial Sequence
  Description of Artificial Sequence: Synthetic oligonucleotide
guuaucuuaaguuuccuuc

SEQ ID NO: 3199015 - RNA, 19 nt, Artificial Sequence
  Description of Artificial Sequence: Synthetic oligonucleotide
uauauauauauaugacucu

SEQ ID NO: 3199016 - RNA, 19 nt, Artificial Sequence
  Description of Artificial Sequence: Synthetic oligonucleotide
ugaauuuaaguguggauuc

SEQ ID NO: 3199017 - RNA, 19 nt, Artificial Sequence
  Description of Artificial Sequence: Synthetic oligonucleotide
cacugauugcauuuaaagg

SEQ ID NO: 3199018 - RNA, 19 nt, Artificial Sequence
  Description of Artificial Sequence: Synthetic oligonucleotide
ucucuugaauuuaagugug

SEQ ID NO: 3199019 - RNA, 19 nt, Artificial Sequence
  Description of Artificial Sequence: Synthetic oligonucleotide
uucuucuaccccaauaaca

SEQ ID NO: 3199020 - RNA, 19 nt, Artificial Sequence
  Description of Artificial Sequence: Synthetic oligonucleotide
ucuucuaccccaauaacau

SEQ ID NO: 3199021 - RNA, 19 nt, Artificial Sequence
  Description of Artificial Sequence: Synthetic oligonucleotide
uguagauucucugauguca

SEQ ID NO: 3199022 - RNA, 19 nt, Artificial Sequence
  Description of Artificial Sequence: Synthetic oligonucleotide
cauuuaaagggccugucgc

SEQ ID NO: 3199023 - RNA, 19 nt, Artificial Sequence
  Description of Artificial Sequence: Synthetic oligonucleotide
auauauauauaugacucug

SEQ ID NO: 3199024 - RNA, 19 nt, Artificial Sequence
  Description of Artificial Sequence: Synthetic oligonucleotide
aaacauuucccacacugau

SEQ ID NO: 3199025 - RNA, 19 nt, Artificial Sequence
  Description of Artificial Sequence: Synthetic oligonucleotide
uuuguacccaguaacucca

SEQ ID NO: 3199026 - RNA, 19 nt, Artificial Sequence
  Description of Artificial Sequence: Synthetic oligonucleotide
uggacuuaacguuuguacc

SEQ ID NO: 3199027 - RNA, 19 nt, Artificial Sequence
  Description of Artificial Sequence: Synthetic oligonucleotide
uuaaguguggauucugaac

SEQ ID NO: 3199028 - RNA, 19 nt, Artificial Sequence
  Description of Artificial Sequence: Synthetic oligonucleotide
auauauauauauauauaug

SEQ ID NO: 3199029 - RNA, 19 nt, Artificial Sequence
  Description of Artificial Sequence: Synthetic oligonucleotide
aaguuuccuuccuauguag

SEQ ID NO: 3199030 - RNA, 19 nt, Artificial Sequence
  Description of Artificial Sequence: Synthetic oligonucleotide
ucaaacaaggccagugccc

SEQ ID NO: 3199031 - RNA, 19 nt, Artificial Sequence
  Description of Artificial Sequence: Synthetic oligonucleotide
uguggauucugaacgagcu

SEQ ID NO: 3199032 - RNA, 19 nt, Artificial Sequence
  Description of Artificial Sequence: Synthetic oligonucleotide
aguaacuccagaguuaucu

SEQ ID NO: 3199033 - RNA, 19 nt, Artificial Sequence
  Description of Artificial Sequence: Synthetic oligonucleotide
gaugucaaauaacauagaa

SEQ ID NO: 3199034 - RNA, 19 nt, Artificial Sequence
  Description of Artificial Sequence: Synthetic oligonucleotide
cugauugcauuuaaagggc

SEQ ID NO: 3199035 - RNA, 19 nt, Artificial Sequence
  Description of Artificial Sequence: Synthetic oligonucleotide
ugacucuguggacuuaacg

SEQ ID NO: 3199036 - RNA, 19 nt, Artificial Sequence
  Description of Artificial Sequence: Synthetic oligonucleotide
aacauagaauugcccauug

SEQ ID NO: 3199037 - RNA, 19 nt, Artificial Sequence
  Description of Artificial Sequence: Synthetic oligonucleotide
augcacagggguuuucucc

SEQ ID NO: 3199038 - RNA, 19 nt, Artificial Sequence
  Description of Artificial Sequence: Synthetic oligonucleotide
uugaauuuaaguguggauu

SEQ ID NO: 3199039 - RNA, 19 nt, Artificial Sequence
  Description of Artificial Sequence: Synthetic oligonucleotide
cuaauauauauauauauau

SEQ ID NO: 3199040 - RNA, 19 nt, Artificial Sequence
  Description of Artificial Sequence: Synthetic oligonucleotide
guuuguacccaguaacucc

SEQ ID NO: 3199041 - RNA, 19 nt, Artificial Sequence
  Description of Artificial Sequence: Synthetic oligonucleotide
accccaauaacaugcacag

SEQ ID NO: 3199042 - RNA, 19 nt, Artificial Sequence
  Description of Artificial Sequence: Synthetic oligonucleotide
ugaagguucuucuacccca

SEQ ID NO: 3199043 - RNA, 19 nt, Artificial Sequence
  Description of Artificial Sequence: Synthetic oligonucleotide
uuugccugggccaugggga

SEQ ID NO: 3199044 - RNA, 19 nt, Artificial Sequence
  Description of Artificial Sequence: Synthetic oligonucleotide
auuucaugaaggucaaaca

SEQ ID NO: 3199045 - RNA, 19 nt, Artificial Sequence
  Description of Artificial Sequence: Synthetic oligonucleotide
cccaauaacaugcacaggg

SEQ ID NO: 3199046 - RNA, 19 nt, Artificial Sequence
  Description of Artificial Sequence: Synthetic oligonucleotide
aacaaggccagugcccugc

SEQ ID NO: 3199047 - RNA, 19 nt, Artificial Sequence
  Description of Artificial Sequence: Synthetic oligonucleotide
uugagccccgaccacaggg

SEQ ID NO: 3199048 - RNA, 19 nt, Artificial Sequence
  Description of Artificial Sequence: Synthetic oligonucleotide
ugcauaauuucaugaaggu

SEQ ID NO: 3199049 - RNA, 19 nt, Artificial Sequence
  Description of Artificial Sequence: Synthetic oligonucleotide
uccagaguuaucuuaaguu

SEQ ID NO: 3199050 - RNA, 19 nt, Artificial Sequence
  Description of Artificial Sequence: Synthetic oligonucleotide
uaccccaauaacaugcaca

SEQ ID NO: 3199051 - RNA, 19 nt, Artificial Sequence
  Description of Artificial Sequence: Synthetic oligonucleotide
aauuuaaguguggauucug

SEQ ID NO: 3199052 - RNA, 19 nt, Artificial Sequence
  Description of Artificial Sequence: Synthetic oligonucleotide
aguuaucugaugucggaug

SEQ ID NO: 3199053 - RNA, 19 nt, Artificial Sequence
  Description of Artificial Sequence: Synthetic oligonucleotide
cauugaagguucuucuacc

SEQ ID NO: 3199054 - RNA, 19 nt, Artificial Sequence
  Description of Artificial Sequence: Synthetic oligonucleotide
aaggccagugcccugcuug

SEQ ID NO: 3199055 - RNA, 19 nt, Artificial Sequence
  Description of Artificial Sequence: Synthetic oligonucleotide
auagaauugcccauugaag

SEQ ID NO: 3199056 - RNA, 19 nt, Artificial Sequence
  Description of Artificial Sequence: Synthetic oligonucleotide
uaucugaugucggaugagg

SEQ ID NO: 3199057 - RNA, 19 nt, Artificial Sequence
  Description of Artificial Sequence: Synthetic oligonucleotide
uucucugaugucaaauaac

SEQ ID NO: 3199058 - RNA, 19 nt, Artificial Sequence
  Description of Artificial Sequence: Synthetic oligonucleotide
uuaacguuuguacccagua

SEQ ID NO: 3199059 - RNA, 19 nt, Artificial Sequence
  Description of Artificial Sequence: Synthetic oligonucleotide
ugauugcauuuaaagggcc

SEQ ID NO: 3199060 - RNA, 19 nt, Artificial Sequence
  Description of Artificial Sequence: Synthetic oligonucleotide
agaauugcccauugaaggu

SEQ ID NO: 3199061 - RNA, 19 nt, Artificial Sequence
  Description of Artificial Sequence: Synthetic oligonucleotide
auaacauagaauugcccau

SEQ ID NO: 3199062 - RNA, 19 nt, Artificial Sequence
  Description of Artificial Sequence: Synthetic oligonucleotide
ugaacgagcuuugagcccc

SEQ ID NO: 3199063 - RNA, 19 nt, Artificial Sequence
  Description of Artificial Sequence: Synthetic oligonucleotide
guggacuuaacguuuguac

SEQ ID NO: 3199064 - RNA, 19 nt, Artificial Sequence
  Description of Artificial Sequence: Synthetic oligonucleotide
uugaagguucuucuacccc

SEQ ID NO: 3199065 - RNA, 19 nt, Artificial Sequence
  Description of Artificial Sequence: Synthetic oligonucleotide
uuccuuccuauguagauuc

SEQ ID NO: 3199066 - RNA, 19 nt, Artificial Sequence
  Description of Artificial Sequence: Synthetic oligonucleotide
ugagugaaacauuucccac

SEQ ID NO: 3199067 - RNA, 19 nt, Artificial Sequence
  Description of Artificial Sequence: Synthetic oligonucleotide
ucuuaaguuuccuuccuau

SEQ ID NO: 3199068 - RNA, 19 nt, Artificial Sequence
  Description of Artificial Sequence: Synthetic oligonucleotide
uccuauguagauucucuga

SEQ ID NO: 3199069 - RNA, 19 nt, Artificial Sequence
  Description of Artificial Sequence: Synthetic oligonucleotide
ucuugaauuuaagugugga

SEQ ID NO: 3199070 - RNA, 19 nt, Artificial Sequence
  Description of Artificial Sequence: Synthetic oligonucleotide
uuuaaguguggauucugaa

SEQ ID NO: 3199071 - RNA, 19 nt, Artificial Sequence
  Description of Artificial Sequence: Synthetic oligonucleotide
aagauuauggcuuucaggg

SEQ ID NO: 3199072 - RNA, 19 nt, Artificial Sequence
  Description of Artificial Sequence: Synthetic oligonucleotide
uuuauuggccauaacaaag

SEQ ID NO: 3199073 - RNA, 19 nt, Artificial Sequence
  Description of Artificial Sequence: Synthetic oligonucleotide
ucuuuuauuggccauaaca

SEQ ID NO: 3199074 - RNA, 19 nt, Artificial Sequence
  Description of Artificial Sequence: Synthetic oligonucleotide
aguuuggaggauuuggucc

SEQ ID NO: 3199075 - RNA, 19 nt, Artificial Sequence
  Description of Artificial Sequence: Synthetic oligonucleotide
uuggccauaacaaagcagc

SEQ ID NO: 3199076 - RNA, 19 nt, Artificial Sequence
  Description of Artificial Sequence: Synthetic oligonucleotide
uuuagucucaaaagguggg

SEQ ID NO: 3199077 - RNA, 19 nt, Artificial Sequence
  Description of Artificial Sequence: Synthetic oligonucleotide
ugguuuuggaguuuggagg

SEQ ID NO: 3199078 - RNA, 19 nt, Artificial Sequence
  Description of Artificial Sequence: Synthetic oligonucleotide
uuguuuaugguuuuggagu

SEQ ID NO: 3199079 - RNA, 19 nt, Artificial Sequence
  Description of Artificial Sequence: Synthetic oligonucleotide
gaggauuugguccaggugc

SEQ ID NO: 3199080 - RNA, 19 nt, Artificial Sequence
  Description of Artificial Sequence: Synthetic oligonucleotide
gaagauuauggcuuucagg

SEQ ID NO: 3199081 - RNA, 19 nt, Artificial Sequence
  Description of Artificial Sequence: Synthetic oligonucleotide
ucuuuucccaacuuggucc

SEQ ID NO: 3199082 - RNA, 19 nt, Artificial Sequence
  Description of Artificial Sequence: Synthetic oligonucleotide
uaacaaagcagcaggaagc

SEQ ID NO: 3199083 - RNA, 19 nt, Artificial Sequence
  Description of Artificial Sequence: Synthetic oligonucleotide
auaacaaagcagcaggaag

SEQ ID NO: 3199084 - RNA, 19 nt, Artificial Sequence
  Description of Artificial Sequence: Synthetic oligonucleotide
ucugguuuagucucaaaag

SEQ ID NO: 3199085 - RNA, 19 nt, Artificial Sequence
  Description of Artificial Sequence: Synthetic oligonucleotide
auuguuuaugguuuuggag

SEQ ID NO: 3199086 - RNA, 19 nt, Artificial Sequence
  Description of Artificial Sequence: Synthetic oligonucleotide
cuuuauggcauccuggacc

SEQ ID NO: 3199087 - RNA, 19 nt, Artificial Sequence
  Description of Artificial Sequence: Synthetic oligonucleotide
caaagcagcaggaagcugg

SEQ ID NO: 3199088 - RNA, 19 nt, Artificial Sequence
  Description of Artificial Sequence: Synthetic oligonucleotide
uuauuggccauaacaaagc

SEQ ID NO: 3199089 - RNA, 19 nt, Artificial Sequence
  Description of Artificial Sequence: Synthetic oligonucleotide
gauuauggcuuucagggug

SEQ ID NO: 3199090 - RNA, 19 nt, Artificial Sequence
  Description of Artificial Sequence: Synthetic oligonucleotide
uugguccugaagauuaugg

SEQ ID NO: 3199091 - RNA, 19 nt, Artificial Sequence
  Description of Artificial Sequence: Synthetic oligonucleotide
cugguuuagucucaaaagg

SEQ ID NO: 3199092 - RNA, 19 nt, Artificial Sequence
  Description of Artificial Sequence: Synthetic oligonucleotide
uugggaaucuuuuauuggc

SEQ ID NO: 3199093 - RNA, 19 nt, Artificial Sequence
  Description of Artificial Sequence: Synthetic oligonucleotide
uuuguaguucuucaguagu

SEQ ID NO: 3199094 - RNA, 19 nt, Artificial Sequence
  Description of Artificial Sequence: Synthetic oligonucleotide
uuuauggcauccuggaccc

SEQ ID NO: 3199095 - RNA, 19 nt, Artificial Sequence
  Description of Artificial Sequence: Synthetic oligonucleotide
aaggugggauuguuuaugg

SEQ ID NO: 3199096 - RNA, 19 nt, Artificial Sequence
  Description of Artificial Sequence: Synthetic oligonucleotide
uuuuguaguucuucaguag

SEQ ID NO: 3199097 - RNA, 19 nt, Artificial Sequence
  Description of Artificial Sequence: Synthetic oligonucleotide
uuggggucagcacagaucu

SEQ ID NO: 3199098 - RNA, 19 nt, Artificial Sequence
  Description of Artificial Sequence: Synthetic oligonucleotide
uguaguucuucaguagugg

SEQ ID NO: 3199099 - RNA, 19 nt, Artificial Sequence
  Description of Artificial Sequence: Synthetic oligonucleotide
ugguccaggugcuuuaugg

SEQ ID NO: 3199100 - RNA, 19 nt, Artificial Sequence
  Description of Artificial Sequence: Synthetic oligonucleotide
ugaagauuauggcuuucag

SEQ ID NO: 3199101 - RNA, 19 nt, Artificial Sequence
  Description of Artificial Sequence: Synthetic oligonucleotide
cuugggaaucuuuuauugg

SEQ ID NO: 3199102 - RNA, 19 nt, Artificial Sequence
  Description of Artificial Sequence: Synthetic oligonucleotide
augguuuuggaguuuggag

SEQ ID NO: 3199103 - RNA, 19 nt, Artificial Sequence
  Description of Artificial Sequence: Synthetic oligonucleotide
guuuagucucaaaaggugg

SEQ ID NO: 3199104 - RNA, 19 nt, Artificial Sequence
  Description of Artificial Sequence: Synthetic oligonucleotide
ugguuuagucucaaaaggu

SEQ ID NO: 3199105 - RNA, 19 nt, Artificial Sequence
  Description of Artificial Sequence: Synthetic oligonucleotide
uuuuauuggccauaacaaa

SEQ ID NO: 3199106 - RNA, 19 nt, Artificial Sequence
  Description of Artificial Sequence: Synthetic oligonucleotide
cuuuuauuggccauaacaa

SEQ ID NO: 3199107 - RNA, 19 nt, Artificial Sequence
  Description of Artificial Sequence: Synthetic oligonucleotide
agcacagaucucuuuuccc

SEQ ID NO: 3199108 - RNA, 19 nt, Artificial Sequence
  Description of Artificial Sequence: Synthetic oligonucleotide
uggaguuuggaggauuugg

SEQ ID NO: 3199109 - RNA, 19 nt, Artificial Sequence
  Description of Artificial Sequence: Synthetic oligonucleotide
uucaguaguggcuugggaa

SEQ ID NO: 3199110 - RNA, 19 nt, Artificial Sequence
  Description of Artificial Sequence: Synthetic oligonucleotide
aaaggugggauuguuuaug

SEQ ID NO: 3199111 - RNA, 19 nt, Artificial Sequence
  Description of Artificial Sequence: Synthetic oligonucleotide
uuguaguucuucaguagug

SEQ ID NO: 3199112 - RNA, 19 nt, Artificial Sequence
  Description of Artificial Sequence: Synthetic oligonucleotide
gccauaacaaagcagcagg

SEQ ID NO: 3199113 - RNA, 19 nt, Artificial Sequence
  Description of Artificial Sequence: Synthetic oligonucleotide
ugggaaucuuuuauuggcc

SEQ ID NO: 3199114 - RNA, 19 nt, Artificial Sequence
  Description of Artificial Sequence: Synthetic oligonucleotide
uuuaugguuuuggaguuug

SEQ ID NO: 3199115 - RNA, 19 nt, Artificial Sequence
  Description of Artificial Sequence: Synthetic oligonucleotide
uauuggccauaacaaagca

SEQ ID NO: 3199116 - RNA, 19 nt, Artificial Sequence
  Description of Artificial Sequence: Synthetic oligonucleotide
gaucucuuuucccaacuug

SEQ ID NO: 3199117 - RNA, 19 nt, Artificial Sequence
  Description of Artificial Sequence: Synthetic oligonucleotide
ugcuuuauggcauccugga

SEQ ID NO: 3199118 - RNA, 19 nt, Artificial Sequence
  Description of Artificial Sequence: Synthetic oligonucleotide
aucucuuuucccaacuugg

SEQ ID NO: 3199119 - RNA, 19 nt, Artificial Sequence
  Description of Artificial Sequence: Synthetic oligonucleotide
gauuguuuaugguuuugga

SEQ ID NO: 3199120 - RNA, 19 nt, Artificial Sequence
  Description of Artificial Sequence: Synthetic oligonucleotide
uaguucuucaguaguggcu

SEQ ID NO: 3199121 - RNA, 19 nt, Artificial Sequence
  Description of Artificial Sequence: Synthetic oligonucleotide
uucagggugcaucugcugu

SEQ ID NO: 3199122 - RNA, 19 nt, Artificial Sequence
  Description of Artificial Sequence: Synthetic oligonucleotide
auuauggcuuucagggugc

SEQ ID NO: 3199123 - RNA, 19 nt, Artificial Sequence
  Description of Artificial Sequence: Synthetic oligonucleotide
aaaaggugggauuguuuau

SEQ ID NO: 3199124 - RNA, 19 nt, Artificial Sequence
  Description of Artificial Sequence: Synthetic oligonucleotide
acagaucucuuuucccaac

SEQ ID NO: 3199125 - RNA, 19 nt, Artificial Sequence
  Description of Artificial Sequence: Synthetic oligonucleotide
uuaugguuuuggaguuugg

SEQ ID NO: 3199126 - RNA, 19 nt, Artificial Sequence
  Description of Artificial Sequence: Synthetic oligonucleotide
aacaaagcagcaggaagcu

SEQ ID NO: 3199127 - RNA, 19 nt, Artificial Sequence
  Description of Artificial Sequence: Synthetic oligonucleotide
auggcuuucagggugcauc

SEQ ID NO: 3199128 - RNA, 19 nt, Artificial Sequence
  Description of Artificial Sequence: Synthetic oligonucleotide
ugguccugaagauuauggc

SEQ ID NO: 3199129 - RNA, 19 nt, Artificial Sequence
  Description of Artificial Sequence: Synthetic oligonucleotide
ucaguaguggcuugggaau

SEQ ID NO: 3199130 - RNA, 19 nt, Artificial Sequence
  Description of Artificial Sequence: Synthetic oligonucleotide
uguuuaugguuuuggaguu

SEQ ID NO: 3199131 - RNA, 19 nt, Artificial Sequence
  Description of Artificial Sequence: Synthetic oligonucleotide
uaugguuuuggaguuugga

SEQ ID NO: 3199132 - RNA, 19 nt, Artificial Sequence
  Description of Artificial Sequence: Synthetic oligonucleotide
guaguucuucaguaguggc

SEQ ID NO: 3199133 - RNA, 19 nt, Artificial Sequence
  Description of Artificial Sequence: Synthetic oligonucleotide
aaucuuuuauuggccauaa

SEQ ID NO: 3199134 - RNA, 19 nt, Artificial Sequence
  Description of Artificial Sequence: Synthetic oligonucleotide
ucucuuuucccaacuuggu

SEQ ID NO: 3199135 - RNA, 19 nt, Artificial Sequence
  Description of Artificial Sequence: Synthetic oligonucleotide
aaagcagcaggaagcuggg

SEQ ID NO: 3199136 - RNA, 19 nt, Artificial Sequence
  Description of Artificial Sequence: Synthetic oligonucleotide
aacuugguccugaagauua

SEQ ID NO: 3199137 - RNA, 19 nt, Artificial Sequence
  Description of Artificial Sequence: Synthetic oligonucleotide
gucucaaaaggugggauug

SEQ ID NO: 3199138 - RNA, 19 nt, Artificial Sequence
  Description of Artificial Sequence: Synthetic oligonucleotide
uucggcucugguuuagucu

SEQ ID NO: 3199139 - RNA, 19 nt, Artificial Sequence
  Description of Artificial Sequence: Synthetic oligonucleotide
uauggcauccuggacccag

SEQ ID NO: 3199140 - RNA, 19 nt, Artificial Sequence
  Description of Artificial Sequence: Synthetic oligonucleotide
ucaaaaggugggauuguuu

SEQ ID NO: 3199141 - RNA, 19 nt, Artificial Sequence
  Description of Artificial Sequence: Synthetic oligonucleotide
gaguuuggaggauuugguc

SEQ ID NO: 3199142 - RNA, 19 nt, Artificial Sequence
  Description of Artificial Sequence: Synthetic oligonucleotide
guuuggaggauuuggucca

SEQ ID NO: 3199143 - RNA, 19 nt, Artificial Sequence
  Description of Artificial Sequence: Synthetic oligonucleotide
ucuucaguaguggcuuggg

SEQ ID NO: 3199144 - RNA, 19 nt, Artificial Sequence
  Description of Artificial Sequence: Synthetic oligonucleotide
caaaaggugggauuguuua

SEQ ID NO: 3199145 - RNA, 19 nt, Artificial Sequence
  Description of Artificial Sequence: Synthetic oligonucleotide
uuuggaguuuggaggauuu

SEQ ID NO: 3199146 - RNA, 19 nt, Artificial Sequence
  Description of Artificial Sequence: Synthetic oligonucleotide
ucggcucugguuuagucuc

SEQ ID NO: 3199147 - RNA, 19 nt, Artificial Sequence
  Description of Artificial Sequence: Synthetic oligonucleotide
uucuucaguaguggcuugg

SEQ ID NO: 3199148 - RNA, 19 nt, Artificial Sequence
  Description of Artificial Sequence: Synthetic oligonucleotide
uuagucucaaaagguggga

SEQ ID NO: 3199149 - RNA, 19 nt, Artificial Sequence
  Description of Artificial Sequence: Synthetic oligonucleotide
gcuugggaaucuuuuauug

SEQ ID NO: 3199150 - RNA, 19 nt, Artificial Sequence
  Description of Artificial Sequence: Synthetic oligonucleotide
aucuuuuauuggccauaac

SEQ ID NO: 3199151 - RNA, 19 nt, Artificial Sequence
  Description of Artificial Sequence: Synthetic oligonucleotide
agauuauggcuuucagggu

SEQ ID NO: 3199152 - RNA, 19 nt, Artificial Sequence
  Description of Artificial Sequence: Synthetic oligonucleotide
auuggccauaacaaagcag

SEQ ID NO: 3199153 - RNA, 19 nt, Artificial Sequence
  Description of Artificial Sequence: Synthetic oligonucleotide
ggauuguuuaugguuuugg

SEQ ID NO: 3199154 - RNA, 19 nt, Artificial Sequence
  Description of Artificial Sequence: Synthetic oligonucleotide
uggcuugggaaucuuuuau

SEQ ID NO: 3199155 - RNA, 19 nt, Artificial Sequence
  Description of Artificial Sequence: Synthetic oligonucleotide
agcagcaggaagcugggau

SEQ ID NO: 3199156 - RNA, 19 nt, Artificial Sequence
  Description of Artificial Sequence: Synthetic oligonucleotide
gacccaguccugcuugggg

SEQ ID NO: 3199157 - RNA, 19 nt, Artificial Sequence
  Description of Artificial Sequence: Synthetic oligonucleotide
gguuuagucucaaaaggug

SEQ ID NO: 3199158 - RNA, 19 nt, Artificial Sequence
  Description of Artificial Sequence: Synthetic oligonucleotide
cuuggggucagcacagauc

SEQ ID NO: 3199159 - RNA, 19 nt, Artificial Sequence
  Description of Artificial Sequence: Synthetic oligonucleotide
uccaggugcuuuauggcau

SEQ ID NO: 3199160 - RNA, 19 nt, Artificial Sequence
  Description of Artificial Sequence: Synthetic oligonucleotide
ucagcacagaucucuuuuc

SEQ ID NO: 3199161 - RNA, 19 nt, Artificial Sequence
  Description of Artificial Sequence: Synthetic oligonucleotide
gguuuuggaguuuggagga

SEQ ID NO: 3199162 - RNA, 19 nt, Artificial Sequence
  Description of Artificial Sequence: Synthetic oligonucleotide
cagcacagaucucuuuucc

SEQ ID NO: 3199163 - RNA, 19 nt, Artificial Sequence
  Description of Artificial Sequence: Synthetic oligonucleotide
uggccauaacaaagcagca

SEQ ID NO: 3199164 - RNA, 19 nt, Artificial Sequence
  Description of Artificial Sequence: Synthetic oligonucleotide
cucuuuucccaacuugguc

SEQ ID NO: 3199165 - RNA, 19 nt, Artificial Sequence
  Description of Artificial Sequence: Synthetic oligonucleotide
gugcuuuauggcauccugg

SEQ ID NO: 3199166 - RNA, 19 nt, Artificial Sequence
  Description of Artificial Sequence: Synthetic oligonucleotide
ucugcuguuggugaucuuu

SEQ ID NO: 3199167 - RNA, 19 nt, Artificial Sequence
  Description of Artificial Sequence: Synthetic oligonucleotide
uggaggauuugguccaggu

SEQ ID NO: 3199168 - RNA, 19 nt, Artificial Sequence
  Description of Artificial Sequence: Synthetic oligonucleotide
aguucuucaguaguggcuu

SEQ ID NO: 3199169 - RNA, 19 nt, Artificial Sequence
  Description of Artificial Sequence: Synthetic oligonucleotide
uuucagggugcaucugcug

SEQ ID NO: 3199170 - RNA, 19 nt, Artificial Sequence
  Description of Artificial Sequence: Synthetic oligonucleotide
cucugguuuagucucaaaa

SEQ ID NO: 3199171 - RNA, 19 nt, Artificial Sequence
  Description of Artificial Sequence: Synthetic oligonucleotide
aaacagaagaugaugaagc

SEQ ID NO: 3199172 - RNA, 19 nt, Artificial Sequence
  Description of Artificial Sequence: Synthetic oligonucleotide
uguuaauaggagcaguucg

SEQ ID NO: 3199173 - RNA, 19 nt, Artificial Sequence
  Description of Artificial Sequence: Synthetic oligonucleotide
aacagaagaugaugaagcc

SEQ ID NO: 3199174 - RNA, 19 nt, Artificial Sequence
  Description of Artificial Sequence: Synthetic oligonucleotide
aauaggagcaguucgggcu

SEQ ID NO: 3199175 - RNA, 19 nt, Artificial Sequence
  Description of Artificial Sequence: Synthetic oligonucleotide
aaaacagaagaugaugaag

SEQ ID NO: 3199176 - RNA, 19 nt, Artificial Sequence
  Description of Artificial Sequence: Synthetic oligonucleotide
aaagccaaaacagaagaug

SEQ ID NO: 3199177 - RNA, 19 nt, Artificial Sequence
  Description of Artificial Sequence: Synthetic oligonucleotide
acagaagaugaugaagccc

SEQ ID NO: 3199178 - RNA, 19 nt, Artificial Sequence
  Description of Artificial Sequence: Synthetic oligonucleotide
uuaauaggagcaguucggg

SEQ ID NO: 3199179 - RNA, 19 nt, Artificial Sequence
  Description of Artificial Sequence: Synthetic oligonucleotide
guuaauaggagcaguucgg

SEQ ID NO: 3199180 - RNA, 19 nt, Artificial Sequence
  Description of Artificial Sequence: Synthetic oligonucleotide
aagccaaaacagaagauga

SEQ ID NO: 3199181 - RNA, 19 nt, Artificial Sequence
  Description of Artificial Sequence: Synthetic oligonucleotide
uccuucguguuaauaggag

SEQ ID NO: 3199182 - RNA, 19 nt, Artificial Sequence
  Description of Artificial Sequence: Synthetic oligonucleotide
cuucguguuaauaggagca

SEQ ID NO: 3199183 - RNA, 19 nt, Artificial Sequence
  Description of Artificial Sequence: Synthetic oligonucleotide
uaauaggagcaguucgggc

SEQ ID NO: 3199184 - RNA, 19 nt, Artificial Sequence
  Description of Artificial Sequence: Synthetic oligonucleotide
ggcuccuucguguuaauag

SEQ ID NO: 3199185 - RNA, 19 nt, Artificial Sequence
  Description of Artificial Sequence: Synthetic oligonucleotide
uucguguuaauaggagcag

SEQ ID NO: 3199186 - RNA, 19 nt, Artificial Sequence
  Description of Artificial Sequence: Synthetic oligonucleotide
aaaagccaaaacagaagau

SEQ ID NO: 3199187 - RNA, 19 nt, Artificial Sequence
  Description of Artificial Sequence: Synthetic oligonucleotide
gcuccuucguguuaauagg

SEQ ID NO: 3199188 - RNA, 19 nt, Artificial Sequence
  Description of Artificial Sequence: Synthetic oligonucleotide
ccaaaacagaagaugauga

SEQ ID NO: 3199189 - RNA, 19 nt, Artificial Sequence
  Description of Artificial Sequence: Synthetic oligonucleotide
caaaacagaagaugaugaa

SEQ ID NO: 3199190 - RNA, 19 nt, Artificial Sequence
  Description of Artificial Sequence: Synthetic oligonucleotide
gccaaaacagaagaugaug

SEQ ID NO: 3199191 - RNA, 19 nt, Artificial Sequence
  Description of Artificial Sequence: Synthetic oligonucleotide
ccuucguguuaauaggagc

SEQ ID NO: 3199192 - RNA, 19 nt, Artificial Sequence
  Description of Artificial Sequence: Synthetic oligonucleotide
ucguguuaauaggagcagu

SEQ ID NO: 3199193 - RNA, 19 nt, Artificial Sequence
  Description of Artificial Sequence: Synthetic oligonucleotide
guguuaauaggagcaguuc

SEQ ID NO: 3199194 - RNA, 19 nt, Artificial Sequence
  Description of Artificial Sequence: Synthetic oligonucleotide
cuccuucguguuaauagga

SEQ ID NO: 3199195 - RNA, 19 nt, Artificial Sequence
  Description of Artificial Sequence: Synthetic oligonucleotide
agccaaaacagaagaugau

SEQ ID NO: 3199196 - RNA, 19 nt, Artificial Sequence
  Description of Artificial Sequence: Synthetic oligonucleotide
aggcuccuucguguuaaua

SEQ ID NO: 3199197 - RNA, 19 nt, Artificial Sequence
  Description of Artificial Sequence: Synthetic oligonucleotide
aaugagaacaggugaaugg

SEQ ID NO: 3199198 - RNA, 19 nt, Artificial Sequence
  Description of Artificial Sequence: Synthetic oligonucleotide
aaugucgggauucaagagg

SEQ ID NO: 3199199 - RNA, 19 nt, Artificial Sequence
  Description of Artificial Sequence: Synthetic oligonucleotide
agugguaugagccuucugg

SEQ ID NO: 3199200 - RNA, 19 nt, Artificial Sequence
  Description of Artificial Sequence: Synthetic oligonucleotide
gauucaagaggccaucagg

SEQ ID NO: 3199201 - RNA, 19 nt, Artificial Sequence
  Description of Artificial Sequence: Synthetic oligonucleotide
ugauugaugaggcugccag

SEQ ID NO: 3199202 - RNA, 19 nt, Artificial Sequence
  Description of Artificial Sequence: Synthetic oligonucleotide
ugugauucuugagagauag

SEQ ID NO: 3199203 - RNA, 19 nt, Artificial Sequence
  Description of Artificial Sequence: Synthetic oligonucleotide
uguagguacggccacauac

SEQ ID NO: 3199204 - RNA, 19 nt, Artificial Sequence
  Description of Artificial Sequence: Synthetic oligonucleotide
uuuggaacagcgcaaacaa

SEQ ID NO: 3199205 - RNA, 19 nt, Artificial Sequence
  Description of Artificial Sequence: Synthetic oligonucleotide
uguucggaaagccuuacca

SEQ ID NO: 3199206 - RNA, 19 nt, Artificial Sequence
  Description of Artificial Sequence: Synthetic oligonucleotide
uugagagauaguagguugg

SEQ ID NO: 3199207 - RNA, 19 nt, Artificial Sequence
  Description of Artificial Sequence: Synthetic oligonucleotide
caggcuaccagcauggcgg

SEQ ID NO: 3199208 - RNA, 19 nt, Artificial Sequence
  Description of Artificial Sequence: Synthetic oligonucleotide
ucaagaggccaucagguug

SEQ ID NO: 3199209 - RNA, 19 nt, Artificial Sequence
  Description of Artificial Sequence: Synthetic oligonucleotide
guuacuacaagcaaagauc

SEQ ID NO: 3199210 - RNA, 19 nt, Artificial Sequence
  Description of Artificial Sequence: Synthetic oligonucleotide
acaagcaaagaucugggca

SEQ ID NO: 3199211 - RNA, 19 nt, Artificial Sequence
  Description of Artificial Sequence: Synthetic oligonucleotide
agccacaaaggguacaacg

SEQ ID NO: 3199212 - RNA, 19 nt, Artificial Sequence
  Description of Artificial Sequence: Synthetic oligonucleotide
uccuacaucagcuggcucc

SEQ ID NO: 3199213 - RNA, 19 nt, Artificial Sequence
  Description of Artificial Sequence: Synthetic oligonucleotide
aaaggguacaacgcacagc

SEQ ID NO: 3199214 - RNA, 19 nt, Artificial Sequence
  Description of Artificial Sequence: Synthetic oligonucleotide
aauagcucuuuggaacagc

SEQ ID NO: 3199215 - RNA, 19 nt, Artificial Sequence
  Description of Artificial Sequence: Synthetic oligonucleotide
cuugagagauaguagguug

SEQ ID NO: 3199216 - RNA, 19 nt, Artificial Sequence
  Description of Artificial Sequence: Synthetic oligonucleotide
ugcuacaguuacuacaagc

SEQ ID NO: 3199217 - RNA, 19 nt, Artificial Sequence
  Description of Artificial Sequence: Synthetic oligonucleotide
cucaguauggacccgcugg

SEQ ID NO: 3199218 - RNA, 19 nt, Artificial Sequence
  Description of Artificial Sequence: Synthetic oligonucleotide
ucaacaggcuaccagcaug

SEQ ID NO: 3199219 - RNA, 19 nt, Artificial Sequence
  Description of Artificial Sequence: Synthetic oligonucleotide
gagauaguagguugggcag

SEQ ID NO: 3199220 - RNA, 19 nt, Artificial Sequence
  Description of Artificial Sequence: Synthetic oligonucleotide
ugaaugugcucccuaggcc

SEQ ID NO: 3199221 - RNA, 19 nt, Artificial Sequence
  Description of Artificial Sequence: Synthetic oligonucleotide
cuacaagcaaagaucuggg

SEQ ID NO: 3199222 - RNA, 19 nt, Artificial Sequence
  Description of Artificial Sequence: Synthetic oligonucleotide
aguaggucuuuccacacug

SEQ ID NO: 3199223 - RNA, 19 nt, Artificial Sequence
  Description of Artificial Sequence: Synthetic oligonucleotide
gguaugagccuucuggugg

SEQ ID NO: 3199224 - RNA, 19 nt, Artificial Sequence
  Description of Artificial Sequence: Synthetic oligonucleotide
agcucuuuggaacagcgca

SEQ ID NO: 3199225 - RNA, 19 nt, Artificial Sequence
  Description of Artificial Sequence: Synthetic oligonucleotide
uuucuuguuaaugucggga

SEQ ID NO: 3199226 - RNA, 19 nt, Artificial Sequence
  Description of Artificial Sequence: Synthetic oligonucleotide
ugauucuugagagauagua

SEQ ID NO: 3199227 - RNA, 19 nt, Artificial Sequence
  Description of Artificial Sequence: Synthetic oligonucleotide
uucggaaagccuuaccaca

SEQ ID NO: 3199228 - RNA, 19 nt, Artificial Sequence
  Description of Artificial Sequence: Synthetic oligonucleotide
cuuguccuacaucagcugg

SEQ ID NO: 3199229 - RNA, 19 nt, Artificial Sequence
  Description of Artificial Sequence: Synthetic oligonucleotide
gguaagagcgcccacacug

SEQ ID NO: 3199230 - RNA, 19 nt, Artificial Sequence
  Description of Artificial Sequence: Synthetic oligonucleotide
uuugcccuccucaugcucc

SEQ ID NO: 3199231 - RNA, 19 nt, Artificial Sequence
  Description of Artificial Sequence: Synthetic oligonucleotide
acaguuacuacaagcaaag

SEQ ID NO: 3199232 - RNA, 19 nt, Artificial Sequence
  Description of Artificial Sequence: Synthetic oligonucleotide
aggagguuuggauggggcc

SEQ ID NO: 3199233 - RNA, 19 nt, Artificial Sequence
  Description of Artificial Sequence: Synthetic oligonucleotide
agggguccaagagagaggc

SEQ ID NO: 3199234 - RNA, 19 nt, Artificial Sequence
  Description of Artificial Sequence: Synthetic oligonucleotide
ucggaaagccuuaccacag

SEQ ID NO: 3199235 - RNA, 19 nt, Artificial Sequence
  Description of Artificial Sequence: Synthetic oligonucleotide
uaaugucgggauucaagag

SEQ ID NO: 3199236 - RNA, 19 nt, Artificial Sequence
  Description of Artificial Sequence: Synthetic oligonucleotide
augucgggauucaagaggc

SEQ ID NO: 3199237 - RNA, 19 nt, Artificial Sequence
  Description of Artificial Sequence: Synthetic oligonucleotide
ugguucaacaggcuaccag

SEQ ID NO: 3199238 - RNA, 19 nt, Artificial Sequence
  Description of Artificial Sequence: Synthetic oligonucleotide
acagcaaaagggacguucc

SEQ ID NO: 3199239 - RNA, 19 nt, Artificial Sequence
  Description of Artificial Sequence: Synthetic oligonucleotide
gaguccagugguaugagcc

SEQ ID NO: 3199240 - RNA, 19 nt, Artificial Sequence
  Description of Artificial Sequence: Synthetic oligonucleotide
uucuugagagauaguaggu

SEQ ID NO: 3199241 - RNA, 19 nt, Artificial Sequence
  Description of Artificial Sequence: Synthetic oligonucleotide
uguagaggaauccccucug

SEQ ID NO: 3199242 - RNA, 19 nt, Artificial Sequence
  Description of Artificial Sequence: Synthetic oligonucleotide
cuuugcuacaguuacuaca

SEQ ID NO: 3199243 - RNA, 19 nt, Artificial Sequence
  Description of Artificial Sequence: Synthetic oligonucleotide
acggccacauacuucacag

SEQ ID NO: 3199244 - RNA, 19 nt, Artificial Sequence
  Description of Artificial Sequence: Synthetic oligonucleotide
aggaagcucguuugguggc

SEQ ID NO: 3199245 - RNA, 19 nt, Artificial Sequence
  Description of Artificial Sequence: Synthetic oligonucleotide
uuggcaguaggucuuucca

SEQ ID NO: 3199246 - RNA, 19 nt, Artificial Sequence
  Description of Artificial Sequence: Synthetic oligonucleotide
caggaagcucguuuggugg

SEQ ID NO: 3199247 - RNA, 19 nt, Artificial Sequence
  Description of Artificial Sequence: Synthetic oligonucleotide
ugagagauaguagguuggg

SEQ ID NO: 3199248 - RNA, 19 nt, Artificial Sequence
  Description of Artificial Sequence: Synthetic oligonucleotide
agagcgcccacacugagca

SEQ ID NO: 3199249 - RNA, 19 nt, Artificial Sequence
  Description of Artificial Sequence: Synthetic oligonucleotide
ugugguuguggacuguagu

SEQ ID NO: 3199250 - RNA, 19 nt, Artificial Sequence
  Description of Artificial Sequence: Synthetic oligonucleotide
acaacgcacagcugcugcc

SEQ ID NO: 3199251 - RNA, 19 nt, Artificial Sequence
  Description of Artificial Sequence: Synthetic oligonucleotide
agguuugaaaagcccuugg

SEQ ID NO: 3199252 - RNA, 19 nt, Artificial Sequence
  Description of Artificial Sequence: Synthetic oligonucleotide
uacaacgcacagcugcugc

SEQ ID NO: 3199253 - RNA, 19 nt, Artificial Sequence
  Description of Artificial Sequence: Synthetic oligonucleotide
agccuuaccacagauguug

SEQ ID NO: 3199254 - RNA, 19 nt, Artificial Sequence
  Description of Artificial Sequence: Synthetic oligonucleotide
ugccuuccguaucaugugg

SEQ ID NO: 3199255 - RNA, 19 nt, Artificial Sequence
  Description of Artificial Sequence: Synthetic oligonucleotide
agaguccagugguaugagc

SEQ ID NO: 3199256 - RNA, 19 nt, Artificial Sequence
  Description of Artificial Sequence: Synthetic oligonucleotide
agcgcaaacaacugugaca

SEQ ID NO: 3199257 - RNA, 19 nt, Artificial Sequence
  Description of Artificial Sequence: Synthetic oligonucleotide
caguuugcccuccucaugc

SEQ ID NO: 3199258 - RNA, 19 nt, Artificial Sequence
  Description of Artificial Sequence: Synthetic oligonucleotide
uuuccuuacugccuuccgu

SEQ ID NO: 3199259 - RNA, 19 nt, Artificial Sequence
  Description of Artificial Sequence: Synthetic oligonucleotide
ugcauggaugcgccggugg

SEQ ID NO: 3199260 - RNA, 19 nt, Artificial Sequence
  Description of Artificial Sequence: Synthetic oligonucleotide
auagcucuuuggaacagcg

SEQ ID NO: 3199261 - RNA, 19 nt, Artificial Sequence
  Description of Artificial Sequence: Synthetic oligonucleotide
acaggugaauggucccucc

SEQ ID NO: 3199262 - RNA, 19 nt, Artificial Sequence
  Description of Artificial Sequence: Synthetic oligonucleotide
agggagcagggguagaguc

SEQ ID NO: 3199263 - RNA, 19 nt, Artificial Sequence
  Description of Artificial Sequence: Synthetic oligonucleotide
uacaagcaaagaucugggc

SEQ ID NO: 3199264 - RNA, 19 nt, Artificial Sequence
  Description of Artificial Sequence: Synthetic oligonucleotide
gugguuguggacuguagug

SEQ ID NO: 3199265 - RNA, 19 nt, Artificial Sequence
  Description of Artificial Sequence: Synthetic oligonucleotide
ggucacagcacucaauagc

SEQ ID NO: 3199266 - RNA, 19 nt, Artificial Sequence
  Description of Artificial Sequence: Synthetic oligonucleotide
auucaagaggccaucaggu

SEQ ID NO: 3199267 - RNA, 19 nt, Artificial Sequence
  Description of Artificial Sequence: Synthetic oligonucleotide
agggacaugagguuugaaa

SEQ ID NO: 3199268 - RNA, 19 nt, Artificial Sequence
  Description of Artificial Sequence: Synthetic oligonucleotide
auucacugcagcggaagcg

SEQ ID NO: 3199269 - RNA, 19 nt, Artificial Sequence
  Description of Artificial Sequence: Synthetic oligonucleotide
uggucaacagcaugagucu

SEQ ID NO: 3199270 - RNA, 19 nt, Artificial Sequence
  Description of Artificial Sequence: Synthetic oligonucleotide
ugacuucaguuugacagcc

SEQ ID NO: 3199271 - RNA, 19 nt, Artificial Sequence
  Description of Artificial Sequence: Synthetic oligonucleotide
ugaagaccuucugaccugg

SEQ ID NO: 3199272 - RNA, 19 nt, Artificial Sequence
  Description of Artificial Sequence: Synthetic oligonucleotide
cacaaaggguacaacgcac

SEQ ID NO: 3199273 - RNA, 19 nt, Artificial Sequence
  Description of Artificial Sequence: Synthetic oligonucleotide
uaggagguuuggauggggc

SEQ ID NO: 3199274 - RNA, 19 nt, Artificial Sequence
  Description of Artificial Sequence: Synthetic oligonucleotide
ugcccuuaccccuccgucg

SEQ ID NO: 3199275 - RNA, 19 nt, Artificial Sequence
  Description of Artificial Sequence: Synthetic oligonucleotide
uggcgccugauuaugguca

SEQ ID NO: 3199276 - RNA, 19 nt, Artificial Sequence
  Description of Artificial Sequence: Synthetic oligonucleotide
uucacugcagcggaagcgc

SEQ ID NO: 3199277 - RNA, 19 nt, Artificial Sequence
  Description of Artificial Sequence: Synthetic oligonucleotide
agcuagacaugguccacuc

SEQ ID NO: 3199278 - RNA, 19 nt, Artificial Sequence
  Description of Artificial Sequence: Synthetic oligonucleotide
ucaguauggacccgcuggu

SEQ ID NO: 3199279 - RNA, 19 nt, Artificial Sequence
  Description of Artificial Sequence: Synthetic oligonucleotide
ugacagucuuucuuguuaa

SEQ ID NO: 3199280 - RNA, 19 nt, Artificial Sequence
  Description of Artificial Sequence: Synthetic oligonucleotide
cuaccaucccagcuugugg

SEQ ID NO: 3199281 - RNA, 19 nt, Artificial Sequence
  Description of Artificial Sequence: Synthetic oligonucleotide
ugagguuugaaaagcccuu

SEQ ID NO: 3199282 - RNA, 19 nt, Artificial Sequence
  Description of Artificial Sequence: Synthetic oligonucleotide
agaucugggcagcagugug

SEQ ID NO: 3199283 - RNA, 19 nt, Artificial Sequence
  Description of Artificial Sequence: Synthetic oligonucleotide
agcggaagcgccgaggguc

SEQ ID NO: 3199284 - RNA, 19 nt, Artificial Sequence
  Description of Artificial Sequence: Synthetic oligonucleotide
uaagagcgcccacacugag

SEQ ID NO: 3199285 - RNA, 19 nt, Artificial Sequence
  Description of Artificial Sequence: Synthetic oligonucleotide
gaaaagcccuuggagcagg

SEQ ID NO: 3199286 - RNA, 19 nt, Artificial Sequence
  Description of Artificial Sequence: Synthetic oligonucleotide
guucggaaagccuuaccac

SEQ ID NO: 3199287 - RNA, 19 nt, Artificial Sequence
  Description of Artificial Sequence: Synthetic oligonucleotide
acucaauagcucuuuggaa

SEQ ID NO: 3199288 - RNA, 19 nt, Artificial Sequence
  Description of Artificial Sequence: Synthetic oligonucleotide
agcagugugguuguggacu

SEQ ID NO: 3199289 - RNA, 19 nt, Artificial Sequence
  Description of Artificial Sequence: Synthetic oligonucleotide
gcugcugucaaauuugcuc

SEQ ID NO: 3199290 - RNA, 19 nt, Artificial Sequence
  Description of Artificial Sequence: Synthetic oligonucleotide
acagauguugcagcuguag

SEQ ID NO: 3199291 - RNA, 19 nt, Artificial Sequence
  Description of Artificial Sequence: Synthetic oligonucleotide
ucguuugguggcgaaaaug

SEQ ID NO: 3199292 - RNA, 19 nt, Artificial Sequence
  Description of Artificial Sequence: Synthetic oligonucleotide
aagagcgcccacacugagc

SEQ ID NO: 3199293 - RNA, 19 nt, Artificial Sequence
  Description of Artificial Sequence: Synthetic oligonucleotide
caaaggguacaacgcacag

SEQ ID NO: 3199294 - RNA, 19 nt, Artificial Sequence
  Description of Artificial Sequence: Synthetic oligonucleotide
uggucacagcacucaauag

SEQ ID NO: 3199295 - RNA, 19 nt, Artificial Sequence
  Description of Artificial Sequence: Synthetic oligonucleotide
ucuuaagggacaugagguu

SEQ ID NO: 3199296 - RNA, 19 nt, Artificial Sequence
  Description of Artificial Sequence: Synthetic oligonucleotide
ucuaccaucccagcuugug

SEQ ID NO: 3199297 - RNA, 19 nt, Artificial Sequence
  Description of Artificial Sequence: Synthetic oligonucleotide
aaauacuuuaucuauaacg

SEQ ID NO: 3199298 - RNA, 19 nt, Artificial Sequence
  Description of Artificial Sequence: Synthetic oligonucleotide
aacaaaaucacucaaugag

SEQ ID NO: 3199299 - RNA, 19 nt, Artificial Sequence
  Description of Artificial Sequence: Synthetic oligonucleotide
ucuauuuucagccaauugg

SEQ ID NO: 3199300 - RNA, 19 nt, Artificial Sequence
  Description of Artificial Sequence: Synthetic oligonucleotide
aguuuuguguaucugauac

SEQ ID NO: 3199301 - RNA, 19 nt, Artificial Sequence
  Description of Artificial Sequence: Synthetic oligonucleotide
uuuauuuuaaauugaguug

SEQ ID NO: 3199302 - RNA, 19 nt, Artificial Sequence
  Description of Artificial Sequence: Synthetic oligonucleotide
uuuuauuuuaaauugaguu

SEQ ID NO: 3199303 - RNA, 19 nt, Artificial Sequence
  Description of Artificial Sequence: Synthetic oligonucleotide
uacucuguugcauauaucg

SEQ ID NO: 3199304 - RNA, 19 nt, Artificial Sequence
  Description of Artificial Sequence: Synthetic oligonucleotide
acaguaaguacaaacaucc

SEQ ID NO: 3199305 - RNA, 19 nt, Artificial Sequence
  Description of Artificial Sequence: Synthetic oligonucleotide
uuuuguaaauacuuuaucu

SEQ ID NO: 3199306 - RNA, 19 nt, Artificial Sequence
  Description of Artificial Sequence: Synthetic oligonucleotide
aucaauaacuguuacugac

SEQ ID NO: 3199307 - RNA, 19 nt, Artificial Sequence
  Description of Artificial Sequence: Synthetic oligonucleotide
aauuggcaggaucagauag

SEQ ID NO: 3199308 - RNA, 19 nt, Artificial Sequence
  Description of Artificial Sequence: Synthetic oligonucleotide
acagggucuauuuucagcc

SEQ ID NO: 3199309 - RNA, 19 nt, Artificial Sequence
  Description of Artificial Sequence: Synthetic oligonucleotide
aauacuuuaucuauaacga

SEQ ID NO: 3199310 - RNA, 19 nt, Artificial Sequence
  Description of Artificial Sequence: Synthetic oligonucleotide
aguacaaacauccuauuug

SEQ ID NO: 3199311 - RNA, 19 nt, Artificial Sequence
  Description of Artificial Sequence: Synthetic oligonucleotide
uuauuuuaaauugaguuga

SEQ ID NO: 3199312 - RNA, 19 nt, Artificial Sequence
  Description of Artificial Sequence: Synthetic oligonucleotide
ugauuuuaggauuuggagc

SEQ ID NO: 3199313 - RNA, 19 nt, Artificial Sequence
  Description of Artificial Sequence: Synthetic oligonucleotide
uuuaauguuuguuucauuc

SEQ ID NO: 3199314 - RNA, 19 nt, Artificial Sequence
  Description of Artificial Sequence: Synthetic oligonucleotide
aauaguagugaucugccca

SEQ ID NO: 3199315 - RNA, 19 nt, Artificial Sequence
  Description of Artificial Sequence: Synthetic oligonucleotide
auaacuguuacugacacag

SEQ ID NO: 3199316 - RNA, 19 nt, Artificial Sequence
  Description of Artificial Sequence: Synthetic oligonucleotide
aauugguuuuaccacagug

SEQ ID NO: 3199317 - RNA, 19 nt, Artificial Sequence
  Description of Artificial Sequence: Synthetic oligonucleotide
uuuucauugacaucaauaa

SEQ ID NO: 3199318 - RNA, 19 nt, Artificial Sequence
  Description of Artificial Sequence: Synthetic oligonucleotide
uuuguuucaaagucaauug

SEQ ID NO: 3199319 - RNA, 19 nt, Artificial Sequence
  Description of Artificial Sequence: Synthetic oligonucleotide
gauuuuaggauuuggagca

SEQ ID NO: 3199320 - RNA, 19 nt, Artificial Sequence
  Description of Artificial Sequence: Synthetic oligonucleotide
aauucccuuggcuaauggc

SEQ ID NO: 3199321 - RNA, 19 nt, Artificial Sequence
  Description of Artificial Sequence: Synthetic oligonucleotide
aacguggucagcauggugc

SEQ ID NO: 3199322 - RNA, 19 nt, Artificial Sequence
  Description of Artificial Sequence: Synthetic oligonucleotide
uuuaccacagugacgagcc

SEQ ID NO: 3199323 - RNA, 19 nt, Artificial Sequence
  Description of Artificial Sequence: Synthetic oligonucleotide
ugcagcaacaguaaguaca

SEQ ID NO: 3199324 - RNA, 19 nt, Artificial Sequence
  Description of Artificial Sequence: Synthetic oligonucleotide
agucaauugguuuuaccac

SEQ ID NO: 3199325 - RNA, 19 nt, Artificial Sequence
  Description of Artificial Sequence: Synthetic oligonucleotide
caagguaacaaaaucacuc

SEQ ID NO: 3199326 - RNA, 19 nt, Artificial Sequence
  Description of Artificial Sequence: Synthetic oligonucleotide
gaaaacucccuuuaucugc

SEQ ID NO: 3199327 - RNA, 19 nt, Artificial Sequence
  Description of Artificial Sequence: Synthetic oligonucleotide
acaucaauaacuguuacug

SEQ ID NO: 3199328 - RNA, 19 nt, Artificial Sequence
  Description of Artificial Sequence: Synthetic oligonucleotide
guaacaaaaucacucaaug

SEQ ID NO: 3199329 - RNA, 19 nt, Artificial Sequence
  Description of Artificial Sequence: Synthetic oligonucleotide
guuuuaagauuuuagcccc

SEQ ID NO: 3199330 - RNA, 19 nt, Artificial Sequence
  Description of Artificial Sequence: Synthetic oligonucleotide
cuauuuucagccaauuggc

SEQ ID NO: 3199331 - RNA, 19 nt, Artificial Sequence
  Description of Artificial Sequence: Synthetic oligonucleotide
uaauguuuguuucauucug

SEQ ID NO: 3199332 - RNA, 19 nt, Artificial Sequence
  Description of Artificial Sequence: Synthetic oligonucleotide
augaaaacucccuuuaucu

SEQ ID NO: 3199333 - RNA, 19 nt, Artificial Sequence
  Description of Artificial Sequence: Synthetic oligonucleotide
acucccuuuaucugcaacc

SEQ ID NO: 3199334 - RNA, 19 nt, Artificial Sequence
  Description of Artificial Sequence: Synthetic oligonucleotide
guaucugauacucuguugc

SEQ ID NO: 3199335 - RNA, 19 nt, Artificial Sequence
  Description of Artificial Sequence: Synthetic oligonucleotide
aagguaacaaaaucacuca

SEQ ID NO: 3199336 - RNA, 19 nt, Artificial Sequence
  Description of Artificial Sequence: Synthetic oligonucleotide
uccuauuuguuucaaaguc

SEQ ID NO: 3199337 - RNA, 19 nt, Artificial Sequence
  Description of Artificial Sequence: Synthetic oligonucleotide
uugcauauaucgaucgggg

SEQ ID NO: 3199338 - RNA, 19 nt, Artificial Sequence
  Description of Artificial Sequence: Synthetic oligonucleotide
aaaacagcaauaguaguga

SEQ ID NO: 3199339 - RNA, 19 nt, Artificial Sequence
  Description of Artificial Sequence: Synthetic oligonucleotide
cauccuauuuguuucaaag

SEQ ID NO: 3199340 - RNA, 19 nt, Artificial Sequence
  Description of Artificial Sequence: Synthetic oligonucleotide
uguuucaaagucaauuggu

SEQ ID NO: 3199341 - RNA, 19 nt, Artificial Sequence
  Description of Artificial Sequence: Synthetic oligonucleotide
auucacagggucuauuuuc

SEQ ID NO: 3199342 - RNA, 19 nt, Artificial Sequence
  Description of Artificial Sequence: Synthetic oligonucleotide
acagugacgagccccaucg

SEQ ID NO: 3199343 - RNA, 19 nt, Artificial Sequence
  Description of Artificial Sequence: Synthetic oligonucleotide
caaaacagcaauaguagug

SEQ ID NO: 3199344 - RNA, 19 nt, Artificial Sequence
  Description of Artificial Sequence: Synthetic oligonucleotide
gauucucuauccaaaacag

SEQ ID NO: 3199345 - RNA, 19 nt, Artificial Sequence
  Description of Artificial Sequence: Synthetic oligonucleotide
acagcaauaguagugaucu

SEQ ID NO: 3199346 - RNA, 19 nt, Artificial Sequence
  Description of Artificial Sequence: Synthetic oligonucleotide
ucaauaacuguuacugaca

SEQ ID NO: 3199347 - RNA, 19 nt, Artificial Sequence
  Description of Artificial Sequence: Synthetic oligonucleotide
uugguuuuaccacagugac

SEQ ID NO: 3199348 - RNA, 19 nt, Artificial Sequence
  Description of Artificial Sequence: Synthetic oligonucleotide
uguuuuguaaauacuuuau

SEQ ID NO: 3199349 - RNA, 19 nt, Artificial Sequence
  Description of Artificial Sequence: Synthetic oligonucleotide
uuguaaauacuuuaucuau

SEQ ID NO: 3199350 - RNA, 19 nt, Artificial Sequence
  Description of Artificial Sequence: Synthetic oligonucleotide
ugagcugugaacgugguca

SEQ ID NO: 3199351 - RNA, 19 nt, Artificial Sequence
  Description of Artificial Sequence: Synthetic oligonucleotide
uuacauuuggcgauucucu

SEQ ID NO: 3199352 - RNA, 19 nt, Artificial Sequence
  Description of Artificial Sequence: Synthetic oligonucleotide
aaugauuuuaggauuugga

SEQ ID NO: 3199353 - RNA, 19 nt, Artificial Sequence
  Description of Artificial Sequence: Synthetic oligonucleotide
aggguuuucauugacauca

SEQ ID NO: 3199354 - RNA, 19 nt, Artificial Sequence
  Description of Artificial Sequence: Synthetic oligonucleotide
aaauuuuauuuuaaauuga

SEQ ID NO: 3199355 - RNA, 19 nt, Artificial Sequence
  Description of Artificial Sequence: Synthetic oligonucleotide
uuuggagcaaaguaagggu

SEQ ID NO: 3199356 - RNA, 19 nt, Artificial Sequence
  Description of Artificial Sequence: Synthetic oligonucleotide
aaaucacucaaugaguuaa

SEQ ID NO: 3199357 - RNA, 19 nt, Artificial Sequence
  Description of Artificial Sequence: Synthetic oligonucleotide
uugauuuucugcagcaaca

SEQ ID NO: 3199358 - RNA, 19 nt, Artificial Sequence
  Description of Artificial Sequence: Synthetic oligonucleotide
ucaauugguuuuaccacag

SEQ ID NO: 3199359 - RNA, 19 nt, Artificial Sequence
  Description of Artificial Sequence: Synthetic oligonucleotide
uuuaggauuuggagcaaag

SEQ ID NO: 3199360 - RNA, 19 nt, Artificial Sequence
  Description of Artificial Sequence: Synthetic oligonucleotide
uuggcgaaugauuuuagga

SEQ ID NO: 3199361 - RNA, 19 nt, Artificial Sequence
  Description of Artificial Sequence: Synthetic oligonucleotide
caaacauccuauuuguuuc

SEQ ID NO: 3199362 - RNA, 19 nt, Artificial Sequence
  Description of Artificial Sequence: Synthetic oligonucleotide
uuaauguuuguuucauucu

SEQ ID NO: 3199363 - RNA, 19 nt, Artificial Sequence
  Description of Artificial Sequence: Synthetic oligonucleotide
uuguguaucugauacucug

SEQ ID NO: 3199364 - RNA, 19 nt, Artificial Sequence
  Description of Artificial Sequence: Synthetic oligonucleotide
uaacaaaaucacucaauga

SEQ ID NO: 3199365 - RNA, 19 nt, Artificial Sequence
  Description of Artificial Sequence: Synthetic oligonucleotide
aguaaggguuuucauugac

SEQ ID NO: 3199366 - RNA, 19 nt, Artificial Sequence
  Description of Artificial Sequence: Synthetic oligonucleotide
uaggauuuggagcaaagua

SEQ ID NO: 3199367 - RNA, 19 nt, Artificial Sequence
  Description of Artificial Sequence: Synthetic oligonucleotide
uguaaauacuuuaucuaua

SEQ ID NO: 3199368 - RNA, 19 nt, Artificial Sequence
  Description of Artificial Sequence: Synthetic oligonucleotide
aauggcacuugauuuucug

SEQ ID NO: 3199369 - RNA, 19 nt, Artificial Sequence
  Description of Artificial Sequence: Synthetic oligonucleotide
auggcacuugauuuucugc

SEQ ID NO: 3199370 - RNA, 19 nt, Artificial Sequence
  Description of Artificial Sequence: Synthetic oligonucleotide
uguugcauauaucgaucgg

SEQ ID NO: 3199371 - RNA, 19 nt, Artificial Sequence
  Description of Artificial Sequence: Synthetic oligonucleotide
cuguuacugacacaguugc

SEQ ID NO: 3199372 - RNA, 19 nt, Artificial Sequence
  Description of Artificial Sequence: Synthetic oligonucleotide
guugcauauaucgaucggg

SEQ ID NO: 3199373 - RNA, 19 nt, Artificial Sequence
  Description of Artificial Sequence: Synthetic oligonucleotide
uucaaagucaauugguuuu

SEQ ID NO: 3199374 - RNA, 19 nt, Artificial Sequence
  Description of Artificial Sequence: Synthetic oligonucleotide
cuauccaaaacagcaauag

SEQ ID NO: 3199375 - RNA, 19 nt, Artificial Sequence
  Description of Artificial Sequence: Synthetic oligonucleotide
ugaaaacucccuuuaucug

SEQ ID NO: 3199376 - RNA, 19 nt, Artificial Sequence
  Description of Artificial Sequence: Synthetic oligonucleotide
aacucccuuuaucugcaac

SEQ ID NO: 3199377 - RNA, 19 nt, Artificial Sequence
  Description of Artificial Sequence: Synthetic oligonucleotide
cauauaucgaucggggucc

SEQ ID NO: 3199378 - RNA, 19 nt, Artificial Sequence
  Description of Artificial Sequence: Synthetic oligonucleotide
aguaaguacaaacauccua

SEQ ID NO: 3199379 - RNA, 19 nt, Artificial Sequence
  Description of Artificial Sequence: Synthetic oligonucleotide
auuuggcgauucucuaucc

SEQ ID NO: 3199380 - RNA, 19 nt, Artificial Sequence
  Description of Artificial Sequence: Synthetic oligonucleotide
auuuguuucaaagucaauu

SEQ ID NO: 3199381 - RNA, 19 nt, Artificial Sequence
  Description of Artificial Sequence: Synthetic oligonucleotide
acaaacauccuauuuguuu

SEQ ID NO: 3199382 - RNA, 19 nt, Artificial Sequence
  Description of Artificial Sequence: Synthetic oligonucleotide
aaaagcucaacaguugaau

SEQ ID NO: 3199383 - RNA, 19 nt, Artificial Sequence
  Description of Artificial Sequence: Synthetic oligonucleotide
cuguugcauauaucgaucg

SEQ ID NO: 3199384 - RNA, 19 nt, Artificial Sequence
  Description of Artificial Sequence: Synthetic oligonucleotide
cuugauuuucugcagcaac

SEQ ID NO: 3199385 - RNA, 19 nt, Artificial Sequence
  Description of Artificial Sequence: Synthetic oligonucleotide
uaaauacuuuaucuauaac

SEQ ID NO: 3199386 - RNA, 19 nt, Artificial Sequence
  Description of Artificial Sequence: Synthetic oligonucleotide
uauuuucagccaauuggca

SEQ ID NO: 3199387 - RNA, 19 nt, Artificial Sequence
  Description of Artificial Sequence: Synthetic oligonucleotide
aaggguuuucauugacauc

SEQ ID NO: 3199388 - RNA, 19 nt, Artificial Sequence
  Description of Artificial Sequence: Synthetic oligonucleotide
uuuucugcagcaacaguaa

SEQ ID NO: 3199389 - RNA, 19 nt, Artificial Sequence
  Description of Artificial Sequence: Synthetic oligonucleotide
uucacagggucuauuuuca

SEQ ID NO: 3199390 - RNA, 19 nt, Artificial Sequence
  Description of Artificial Sequence: Synthetic oligonucleotide
aacagcaauaguagugauc

SEQ ID NO: 3199391 - RNA, 19 nt, Artificial Sequence
  Description of Artificial Sequence: Synthetic oligonucleotide
ucuguugcauauaucgauc

SEQ ID NO: 3199392 - RNA, 19 nt, Artificial Sequence
  Description of Artificial Sequence: Synthetic oligonucleotide
acacaguugcuguugacug

SEQ ID NO: 3199393 - RNA, 19 nt, Artificial Sequence
  Description of Artificial Sequence: Synthetic oligonucleotide
aaguacaaacauccuauuu

SEQ ID NO: 3199394 - RNA, 19 nt, Artificial Sequence
  Description of Artificial Sequence: Synthetic oligonucleotide
aaacauccuauuuguuuca

SEQ ID NO: 3199395 - RNA, 19 nt, Artificial Sequence
  Description of Artificial Sequence: Synthetic oligonucleotide
uguaucugauacucuguug

SEQ ID NO: 3199396 - RNA, 19 nt, Artificial Sequence
  Description of Artificial Sequence: Synthetic oligonucleotide
accccaagguaacaaaauc

SEQ ID NO: 3199397 - RNA, 19 nt, Artificial Sequence
  Description of Artificial Sequence: Synthetic oligonucleotide
auuagcuuuaaucugcgcc

SEQ ID NO: 3199398 - RNA, 19 nt, Artificial Sequence
  Description of Artificial Sequence: Synthetic oligonucleotide
aaagagaaugaggaaaucc

SEQ ID NO: 3199399 - RNA, 19 nt, Artificial Sequence
  Description of Artificial Sequence: Synthetic oligonucleotide
aauguugcaaccuagcagu

SEQ ID NO: 3199400 - RNA, 19 nt, Artificial Sequence
  Description of Artificial Sequence: Synthetic oligonucleotide
aucguaauuagcuuuaauc

SEQ ID NO: 3199401 - RNA, 19 nt, Artificial Sequence
  Description of Artificial Sequence: Synthetic oligonucleotide
agaggaauaauguugcaac

SEQ ID NO: 3199402 - RNA, 19 nt, Artificial Sequence
  Description of Artificial Sequence: Synthetic oligonucleotide
agacagaugauguugugcc

SEQ ID NO: 3199403 - RNA, 19 nt, Artificial Sequence
  Description of Artificial Sequence: Synthetic oligonucleotide
aagagaaugaggaaauccc

SEQ ID NO: 3199404 - RNA, 19 nt, Artificial Sequence
  Description of Artificial Sequence: Synthetic oligonucleotide
gauuaaaagagaaugagga

SEQ ID NO: 3199405 - RNA, 19 nt, Artificial Sequence
  Description of Artificial Sequence: Synthetic oligonucleotide
uucaucauccacuugcagg

SEQ ID NO: 3199406 - RNA, 19 nt, Artificial Sequence
  Description of Artificial Sequence: Synthetic oligonucleotide
aauaauguugcaaccuagc

SEQ ID NO: 3199407 - RNA, 19 nt, Artificial Sequence
  Description of Artificial Sequence: Synthetic oligonucleotide
ucguaauuagcuuuaaucu

SEQ ID NO: 3199408 - RNA, 19 nt, Artificial Sequence
  Description of Artificial Sequence: Synthetic oligonucleotide
agugcuaggauuaaaagag

SEQ ID NO: 3199409 - RNA, 19 nt, Artificial Sequence
  Description of Artificial Sequence: Synthetic oligonucleotide
aggaaaucccaccaggccc

SEQ ID NO: 3199410 - RNA, 19 nt, Artificial Sequence
  Description of Artificial Sequence: Synthetic oligonucleotide
cuaggauuaaaagagaaug

SEQ ID NO: 3199411 - RNA, 19 nt, Artificial Sequence
  Description of Artificial Sequence: Synthetic oligonucleotide
aaccuagcaguccuuuucc

SEQ ID NO: 3199412 - RNA, 19 nt, Artificial Sequence
  Description of Artificial Sequence: Synthetic oligonucleotide
aaguuuuggguguucacag

SEQ ID NO: 3199413 - RNA, 19 nt, Artificial Sequence
  Description of Artificial Sequence: Synthetic oligonucleotide
uacaaauccacaucggccc

SEQ ID NO: 3199414 - RNA, 19 nt, Artificial Sequence
  Description of Artificial Sequence: Synthetic oligonucleotide
uuuggguguucacagagcc

SEQ ID NO: 3199415 - RNA, 19 nt, Artificial Sequence
  Description of Artificial Sequence: Synthetic oligonucleotide
aauuagcuuuaaucugcgc

SEQ ID NO: 3199416 - RNA, 19 nt, Artificial Sequence
  Description of Artificial Sequence: Synthetic oligonucleotide
uaauuagcuuuaaucugcg

SEQ ID NO: 3199417 - RNA, 19 nt, Artificial Sequence
  Description of Artificial Sequence: Synthetic oligonucleotide
uaaaagagaaugaggaaau

SEQ ID NO: 3199418 - RNA, 19 nt, Artificial Sequence
  Description of Artificial Sequence: Synthetic oligonucleotide
aaugaggaaaucccaccag

SEQ ID NO: 3199419 - RNA, 19 nt, Artificial Sequence
  Description of Artificial Sequence: Synthetic oligonucleotide
cugguacaaauccacaucg

SEQ ID NO: 3199420 - RNA, 19 nt, Artificial Sequence
  Description of Artificial Sequence: Synthetic oligonucleotide
uuagcuuuaaucugcgccu

SEQ ID NO: 3199421 - RNA, 19 nt, Artificial Sequence
  Description of Artificial Sequence: Synthetic oligonucleotide
uguugugccucgcuguucg

SEQ ID NO: 3199422 - RNA, 19 nt, Artificial Sequence
  Description of Artificial Sequence: Synthetic oligonucleotide
uguaguuggugcaaggccu

SEQ ID NO: 3199423 - RNA, 19 nt, Artificial Sequence
  Description of Artificial Sequence: Synthetic oligonucleotide
uuugguguuuugauacagg

SEQ ID NO: 3199424 - RNA, 19 nt, Artificial Sequence
  Description of Artificial Sequence: Synthetic oligonucleotide
uucuguagacagaugaugu

SEQ ID NO: 3199425 - RNA, 19 nt, Artificial Sequence
  Description of Artificial Sequence: Synthetic oligonucleotide
uuuggcaaaggccuggggu

SEQ ID NO: 3199426 - RNA, 19 nt, Artificial Sequence
  Description of Artificial Sequence: Synthetic oligonucleotide
aggauuaaaagagaaugag

SEQ ID NO: 3199427 - RNA, 19 nt, Artificial Sequence
  Description of Artificial Sequence: Synthetic oligonucleotide
cucuucuugggcuucagcc

SEQ ID NO: 3199428 - RNA, 19 nt, Artificial Sequence
  Description of Artificial Sequence: Synthetic oligonucleotide
ugaaccagggcugauacug

SEQ ID NO: 3199429 - RNA, 19 nt, Artificial Sequence
  Description of Artificial Sequence: Synthetic oligonucleotide
gauacuguucacuuuggca

SEQ ID NO: 3199430 - RNA, 19 nt, Artificial Sequence
  Description of Artificial Sequence: Synthetic oligonucleotide
cuugugaucauucuguaga

SEQ ID NO: 3199431 - RNA, 19 nt, Artificial Sequence
  Description of Artificial Sequence: Synthetic oligonucleotide
uguucacagagccaaacuc

SEQ ID NO: 3199432 - RNA, 19 nt, Artificial Sequence
  Description of Artificial Sequence: Synthetic oligonucleotide
uguagacagaugauguugu

SEQ ID NO: 3199433 - RNA, 19 nt, Artificial Sequence
  Description of Artificial Sequence: Synthetic oligonucleotide
augaggaaaucccaccagg

SEQ ID NO: 3199434 - RNA, 19 nt, Artificial Sequence
  Description of Artificial Sequence: Synthetic oligonucleotide
cuagcaguccuuuuccugc

SEQ ID NO: 3199435 - RNA, 19 nt, Artificial Sequence
  Description of Artificial Sequence: Synthetic oligonucleotide
guuuuggguguucacagag

SEQ ID NO: 3199436 - RNA, 19 nt, Artificial Sequence
  Description of Artificial Sequence: Synthetic oligonucleotide
ugaggaaaucccaccaggc

SEQ ID NO: 3199437 - RNA, 19 nt, Artificial Sequence
  Description of Artificial Sequence: Synthetic oligonucleotide
auaauguugcaaccuagca

SEQ ID NO: 3199438 - RNA, 19 nt, Artificial Sequence
  Description of Artificial Sequence: Synthetic oligonucleotide
ucggaccugguacaaaucc

SEQ ID NO: 3199439 - RNA, 19 nt, Artificial Sequence
  Description of Artificial Sequence: Synthetic oligonucleotide
auuaaaagagaaugaggaa

SEQ ID NO: 3199440 - RNA, 19 nt, Artificial Sequence
  Description of Artificial Sequence: Synthetic oligonucleotide
uccaggacaucguaauuag

SEQ ID NO: 3199441 - RNA, 19 nt, Artificial Sequence
  Description of Artificial Sequence: Synthetic oligonucleotide
ugcuaggauuaaaagagaa

SEQ ID NO: 3199442 - RNA, 19 nt, Artificial Sequence
  Description of Artificial Sequence: Synthetic oligonucleotide
gaauaauguugcaaccuag

SEQ ID NO: 3199443 - RNA, 19 nt, Artificial Sequence
  Description of Artificial Sequence: Synthetic oligonucleotide
aacuccacaauuucaucau

SEQ ID NO: 3199444 - RNA, 19 nt, Artificial Sequence
  Description of Artificial Sequence: Synthetic oligonucleotide
aaaggccugggguaggaca

SEQ ID NO: 3199445 - RNA, 19 nt, Artificial Sequence
  Description of Artificial Sequence: Synthetic oligonucleotide
cacgcugccaacauucugc

SEQ ID NO: 3199446 - RNA, 19 nt, Artificial Sequence
  Description of Artificial Sequence: Synthetic oligonucleotide
uuuaaucugcgccucgauc

SEQ ID NO: 3199447 - RNA, 19 nt, Artificial Sequence
  Description of Artificial Sequence: Synthetic oligonucleotide
ggauuaaaagagaaugagg

SEQ ID NO: 3199448 - RNA, 19 nt, Artificial Sequence
  Description of Artificial Sequence: Synthetic oligonucleotide
ugguacaaauccacaucgg

SEQ ID NO: 3199449 - RNA, 19 nt, Artificial Sequence
  Description of Artificial Sequence: Synthetic oligonucleotide
cuaugcugcaccacgcugc

SEQ ID NO: 3199450 - RNA, 19 nt, Artificial Sequence
  Description of Artificial Sequence: Synthetic oligonucleotide
gaaugaggaaaucccacca

SEQ ID NO: 3199451 - RNA, 19 nt, Artificial Sequence
  Description of Artificial Sequence: Synthetic oligonucleotide
uccaccugcuucaucacug

SEQ ID NO: 3199452 - RNA, 19 nt, Artificial Sequence
  Description of Artificial Sequence: Synthetic oligonucleotide
ucuucuugggcuucagcca

SEQ ID NO: 3199453 - RNA, 19 nt, Artificial Sequence
  Description of Artificial Sequence: Synthetic oligonucleotide
ucuaacuuggaggucugcc

SEQ ID NO: 3199454 - RNA, 19 nt, Artificial Sequence
  Description of Artificial Sequence: Synthetic oligonucleotide
guacaaauccacaucggcc

SEQ ID NO: 3199455 - RNA, 19 nt, Artificial Sequence
  Description of Artificial Sequence: Synthetic oligonucleotide
gaggaaaucccaccaggcc

SEQ ID NO: 3199456 - RNA, 19 nt, Artificial Sequence
  Description of Artificial Sequence: Synthetic oligonucleotide
auucugcagagacuggaag

SEQ ID NO: 3199457 - RNA, 19 nt, Artificial Sequence
  Description of Artificial Sequence: Synthetic oligonucleotide
ucuguagaccaguuggccu

SEQ ID NO: 3199458 - RNA, 19 nt, Artificial Sequence
  Description of Artificial Sequence: Synthetic oligonucleotide
agaccaguuggccucuaac

SEQ ID NO: 3199459 - RNA, 19 nt, Artificial Sequence
  Description of Artificial Sequence: Synthetic oligonucleotide
ugauacuguucacuuuggc

SEQ ID NO: 3199460 - RNA, 19 nt, Artificial Sequence
  Description of Artificial Sequence: Synthetic oligonucleotide
uuuuggguguucacagagc

SEQ ID NO: 3199461 - RNA, 19 nt, Artificial Sequence
  Description of Artificial Sequence: Synthetic oligonucleotide
uuucaucauccacuugcag

SEQ ID NO: 3199462 - RNA, 19 nt, Artificial Sequence
  Description of Artificial Sequence: Synthetic oligonucleotide
ucgaucuccuccuugccgc

SEQ ID NO: 3199463 - RNA, 19 nt, Artificial Sequence
  Description of Artificial Sequence: Synthetic oligonucleotide
uguuucuccccucuucgga

SEQ ID NO: 3199464 - RNA, 19 nt, Artificial Sequence
  Description of Artificial Sequence: Synthetic oligonucleotide
cucgcuaugcugcaccacg

SEQ ID NO: 3199465 - RNA, 19 nt, Artificial Sequence
  Description of Artificial Sequence: Synthetic oligonucleotide
auucuguagacagaugaug

SEQ ID NO: 3199466 - RNA, 19 nt, Artificial Sequence
  Description of Artificial Sequence: Synthetic oligonucleotide
uagacagaugauguugugc

SEQ ID NO: 3199467 - RNA, 19 nt, Artificial Sequence
  Description of Artificial Sequence: Synthetic oligonucleotide
acagaugauguugugccuc

SEQ ID NO: 3199468 - RNA, 19 nt, Artificial Sequence
  Description of Artificial Sequence: Synthetic oligonucleotide
uuggcucuccaggacaucg

SEQ ID NO: 3199469 - RNA, 19 nt, Artificial Sequence
  Description of Artificial Sequence: Synthetic oligonucleotide
gguaggacagggcuguugg

SEQ ID NO: 3199470 - RNA, 19 nt, Artificial Sequence
  Description of Artificial Sequence: Synthetic oligonucleotide
gguacaaauccacaucggc

SEQ ID NO: 3199471 - RNA, 19 nt, Artificial Sequence
  Description of Artificial Sequence: Synthetic oligonucleotide
gcugauacuguucacuuug

SEQ ID NO: 3199472 - RNA, 19 nt, Artificial Sequence
  Description of Artificial Sequence: Synthetic oligonucleotide
caguuggccucuaacuugg

SEQ ID NO: 3199473 - RNA, 19 nt, Artificial Sequence
  Description of Artificial Sequence: Synthetic oligonucleotide
cuuccccucgcuaugcugc

SEQ ID NO: 3199474 - RNA, 19 nt, Artificial Sequence
  Description of Artificial Sequence: Synthetic oligonucleotide
ucggaucacugucacauuc

SEQ ID NO: 3199475 - RNA, 19 nt, Artificial Sequence
  Description of Artificial Sequence: Synthetic oligonucleotide
ugauguugugccucgcugu

SEQ ID NO: 3199476 - RNA, 19 nt, Artificial Sequence
  Description of Artificial Sequence: Synthetic oligonucleotide
uggccucuaacuuggaggu

SEQ ID NO: 3199477 - RNA, 19 nt, Artificial Sequence
  Description of Artificial Sequence: Synthetic oligonucleotide
uugcaggcccgcaauacug

SEQ ID NO: 3199478 - RNA, 19 nt, Artificial Sequence
  Description of Artificial Sequence: Synthetic oligonucleotide
aaucugcgccucgaucucc

SEQ ID NO: 3199479 - RNA, 19 nt, Artificial Sequence
  Description of Artificial Sequence: Synthetic oligonucleotide
uugugaucauucuguagac

SEQ ID NO: 3199480 - RNA, 19 nt, Artificial Sequence
  Description of Artificial Sequence: Synthetic oligonucleotide
cuguagacagaugauguug

SEQ ID NO: 3199481 - RNA, 19 nt, Artificial Sequence
  Description of Artificial Sequence: Synthetic oligonucleotide
uuucucgcaggccccgggg

SEQ ID NO: 3199482 - RNA, 19 nt, Artificial Sequence
  Description of Artificial Sequence: Synthetic oligonucleotide
uaggacagggcuguuggag

SEQ ID NO: 3199483 - RNA, 19 nt, Artificial Sequence
  Description of Artificial Sequence: Synthetic oligonucleotide
cauguaguuggugcaaggc

SEQ ID NO: 3199484 - RNA, 19 nt, Artificial Sequence
  Description of Artificial Sequence: Synthetic oligonucleotide
uacuggcuggugaaccagg

SEQ ID NO: 3199485 - RNA, 19 nt, Artificial Sequence
  Description of Artificial Sequence: Synthetic oligonucleotide
uuuccugcccagcgcgucg

SEQ ID NO: 3199486 - RNA, 19 nt, Artificial Sequence
  Description of Artificial Sequence: Synthetic oligonucleotide
uuggagcccagccugcggc

SEQ ID NO: 3199487 - RNA, 19 nt, Artificial Sequence
  Description of Artificial Sequence: Synthetic oligonucleotide
cagaugauguugugccucg

SEQ ID NO: 3199488 - RNA, 19 nt, Artificial Sequence
  Description of Artificial Sequence: Synthetic oligonucleotide
uaugcugcaccacgcugcc

SEQ ID NO: 3199489 - RNA, 19 nt, Artificial Sequence
  Description of Artificial Sequence: Synthetic oligonucleotide
gagacuggaaguuuugggu

SEQ ID NO: 3199490 - RNA, 19 nt, Artificial Sequence
  Description of Artificial Sequence: Synthetic oligonucleotide
cugauacuguucacuuugg

SEQ ID NO: 3199491 - RNA, 19 nt, Artificial Sequence
  Description of Artificial Sequence: Synthetic oligonucleotide
gccgcauccagcuaccugg

SEQ ID NO: 3199492 - RNA, 19 nt, Artificial Sequence
  Description of Artificial Sequence: Synthetic oligonucleotide
uggguguucacagagccaa

SEQ ID NO: 3199493 - RNA, 19 nt, Artificial Sequence
  Description of Artificial Sequence: Synthetic oligonucleotide
gucggagucagucugagcu

SEQ ID NO: 3199494 - RNA, 19 nt, Artificial Sequence
  Description of Artificial Sequence: Synthetic oligonucleotide
acuccacaauuucaucauc

SEQ ID NO: 3199495 - RNA, 19 nt, Artificial Sequence
  Description of Artificial Sequence: Synthetic oligonucleotide
aaauccacaucggcccggg

SEQ ID NO: 3199496 - RNA, 19 nt, Artificial Sequence
  Description of Artificial Sequence: Synthetic oligonucleotide
caauacuggcuggugaacc

SEQ ID NO: 3199497 - RNA, 19 nt, Artificial Sequence
  Description of Artificial Sequence: Synthetic oligonucleotide
auuuacaugaauugcaaac

SEQ ID NO: 3199498 - RNA, 19 nt, Artificial Sequence
  Description of Artificial Sequence: Synthetic oligonucleotide
uuauugaucauauuuacau

SEQ ID NO: 3199499 - RNA, 19 nt, Artificial Sequence
  Description of Artificial Sequence: Synthetic oligonucleotide
auugcaaacagugaggagg

SEQ ID NO: 3199500 - RNA, 19 nt, Artificial Sequence
  Description of Artificial Sequence: Synthetic oligonucleotide
augaauugcaaacagugag

SEQ ID NO: 3199501 - RNA, 19 nt, Artificial Sequence
  Description of Artificial Sequence: Synthetic oligonucleotide
auugaucauauuuacauga

SEQ ID NO: 3199502 - RNA, 19 nt, Artificial Sequence
  Description of Artificial Sequence: Synthetic oligonucleotide
ucauuucuggaccagcugg

SEQ ID NO: 3199503 - RNA, 19 nt, Artificial Sequence
  Description of Artificial Sequence: Synthetic oligonucleotide
agacaaagcccuuaaacuc

SEQ ID NO: 3199504 - RNA, 19 nt, Artificial Sequence
  Description of Artificial Sequence: Synthetic oligonucleotide
uguguuaggggcaccaagg

SEQ ID NO: 3199505 - RNA, 19 nt, Artificial Sequence
  Description of Artificial Sequence: Synthetic oligonucleotide
ugaaaccccagacaaagcc

SEQ ID NO: 3199506 - RNA, 19 nt, Artificial Sequence
  Description of Artificial Sequence: Synthetic oligonucleotide
aaacuccugggucauggcc

SEQ ID NO: 3199507 - RNA, 19 nt, Artificial Sequence
  Description of Artificial Sequence: Synthetic oligonucleotide
ucuaaauggggacucaaga

SEQ ID NO: 3199508 - RNA, 19 nt, Artificial Sequence
  Description of Artificial Sequence: Synthetic oligonucleotide
uaaauggggacucaagaga

SEQ ID NO: 3199509 - RNA, 19 nt, Artificial Sequence
  Description of Artificial Sequence: Synthetic oligonucleotide
agaugauuccuguugcccc

SEQ ID NO: 3199510 - RNA, 19 nt, Artificial Sequence
  Description of Artificial Sequence: Synthetic oligonucleotide
uuggcuagaagaaacuggc

SEQ ID NO: 3199511 - RNA, 19 nt, Artificial Sequence
  Description of Artificial Sequence: Synthetic oligonucleotide
uuuauugaucauauuuaca

SEQ ID NO: 3199512 - RNA, 19 nt, Artificial Sequence
  Description of Artificial Sequence: Synthetic oligonucleotide
uuccuaaagaauuuauuga

SEQ ID NO: 3199513 - RNA, 19 nt, Artificial Sequence
  Description of Artificial Sequence: Synthetic oligonucleotide
auugucugagcccagcagg

SEQ ID NO: 3199514 - RNA, 19 nt, Artificial Sequence
  Description of Artificial Sequence: Synthetic oligonucleotide
ucauauuuacaugaauugc

SEQ ID NO: 3199515 - RNA, 19 nt, Artificial Sequence
  Description of Artificial Sequence: Synthetic oligonucleotide
cuaaauggggacucaagag

SEQ ID NO: 3199516 - RNA, 19 nt, Artificial Sequence
  Description of Artificial Sequence: Synthetic oligonucleotide
aauuuauugaucauauuua

SEQ ID NO: 3199517 - RNA, 19 nt, Artificial Sequence
  Description of Artificial Sequence: Synthetic oligonucleotide
agaagaaacuggcugagca

SEQ ID NO: 3199518 - RNA, 19 nt, Artificial Sequence
  Description of Artificial Sequence: Synthetic oligonucleotide
cagauaccaaucuuguugg

SEQ ID NO: 3199519 - RNA, 19 nt, Artificial Sequence
  Description of Artificial Sequence: Synthetic oligonucleotide
cauauuuacaugaauugca

SEQ ID NO: 3199520 - RNA, 19 nt, Artificial Sequence
  Description of Artificial Sequence: Synthetic oligonucleotide
ucaagagaugccaggaucu

SEQ ID NO: 3199521 - RNA, 19 nt, Artificial Sequence
  Description of Artificial Sequence: Synthetic oligonucleotide
caaacacuguguuaggggc

SEQ ID NO: 3199522 - RNA, 19 nt, Artificial Sequence
  Description of Artificial Sequence: Synthetic oligonucleotide
gaauuuauugaucauauuu

SEQ ID NO: 3199523 - RNA, 19 nt, Artificial Sequence
  Description of Artificial Sequence: Synthetic oligonucleotide
uauugaucauauuuacaug

SEQ ID NO: 3199524 - RNA, 19 nt, Artificial Sequence
  Description of Artificial Sequence: Synthetic oligonucleotide
uccuaaagaauuuauugau

SEQ ID NO: 3199525 - RNA, 19 nt, Artificial Sequence
  Description of Artificial Sequence: Synthetic oligonucleotide
ucuuguuggcuacagugcc

SEQ ID NO: 3199526 - RNA, 19 nt, Artificial Sequence
  Description of Artificial Sequence: Synthetic oligonucleotide
aaagaauuuauugaucaua

SEQ ID NO: 3199527 - RNA, 19 nt, Artificial Sequence
  Description of Artificial Sequence: Synthetic oligonucleotide
aaguucucggagcugagcu

SEQ ID NO: 3199528 - RNA, 19 nt, Artificial Sequence
  Description of Artificial Sequence: Synthetic oligonucleotide
acaugaauugcaaacagug

SEQ ID NO: 3199529 - RNA, 19 nt, Artificial Sequence
  Description of Artificial Sequence: Synthetic oligonucleotide
aagaauuuauugaucauau

SEQ ID NO: 3199530 - RNA, 19 nt, Artificial Sequence
  Description of Artificial Sequence: Synthetic oligonucleotide
cauguaaccucuucucugg

SEQ ID NO: 3199531 - RNA, 19 nt, Artificial Sequence
  Description of Artificial Sequence: Synthetic oligonucleotide
uaggauggaguccagguac

SEQ ID NO: 3199532 - RNA, 19 nt, Artificial Sequence
  Description of Artificial Sequence: Synthetic oligonucleotide
ucaaggaauggucggaaga

SEQ ID NO: 3199533 - RNA, 19 nt, Artificial Sequence
  Description of Artificial Sequence: Synthetic oligonucleotide
agagaugccaggaucuucc

SEQ ID NO: 3199534 - RNA, 19 nt, Artificial Sequence
  Description of Artificial Sequence: Synthetic oligonucleotide
uccagcuccuuccacacag

SEQ ID NO: 3199535 - RNA, 19 nt, Artificial Sequence
  Description of Artificial Sequence: Synthetic oligonucleotide
agagaugauuccuguugcc

SEQ ID NO: 3199536 - RNA, 19 nt, Artificial Sequence
  Description of Artificial Sequence: Synthetic oligonucleotide
aauugcaaacagugaggag

SEQ ID NO: 3199537 - RNA, 19 nt, Artificial Sequence
  Description of Artificial Sequence: Synthetic oligonucleotide
uguggaugggaucggacgc

SEQ ID NO: 3199538 - RNA, 19 nt, Artificial Sequence
  Description of Artificial Sequence: Synthetic oligonucleotide
auacugaaaccccagacaa

SEQ ID NO: 3199539 - RNA, 19 nt, Artificial Sequence
  Description of Artificial Sequence: Synthetic oligonucleotide
uccagguaccaucaguacc

SEQ ID NO: 3199540 - RNA, 19 nt, Artificial Sequence
  Description of Artificial Sequence: Synthetic oligonucleotide
cuauccuugguagacagag

SEQ ID NO: 3199541 - RNA, 19 nt, Artificial Sequence
  Description of Artificial Sequence: Synthetic oligonucleotide
cacagucaaggaauggucg

SEQ ID NO: 3199542 - RNA, 19 nt, Artificial Sequence
  Description of Artificial Sequence: Synthetic oligonucleotide
uaggaguaguuuccuaucc

SEQ ID NO: 3199543 - RNA, 19 nt, Artificial Sequence
  Description of Artificial Sequence: Synthetic oligonucleotide
gagagggugguucaagcag

SEQ ID NO: 3199544 - RNA, 19 nt, Artificial Sequence
  Description of Artificial Sequence: Synthetic oligonucleotide
aggucgaagguguggaugg

SEQ ID NO: 3199545 - RNA, 19 nt, Artificial Sequence
  Description of Artificial Sequence: Synthetic oligonucleotide
ucaaggcacaaacacugug

SEQ ID NO: 3199546 - RNA, 19 nt, Artificial Sequence
  Description of Artificial Sequence: Synthetic oligonucleotide
ugugccacggaaguucucg

SEQ ID NO: 3199547 - RNA, 19 nt, Artificial Sequence
  Description of Artificial Sequence: Synthetic oligonucleotide
guuggcuagaagaaacugg

SEQ ID NO: 3199548 - RNA, 19 nt, Artificial Sequence
  Description of Artificial Sequence: Synthetic oligonucleotide
uuccacacagucaaggaau

SEQ ID NO: 3199549 - RNA, 19 nt, Artificial Sequence
  Description of Artificial Sequence: Synthetic oligonucleotide
auggaguccagguaccauc

SEQ ID NO: 3199550 - RNA, 19 nt, Artificial Sequence
  Description of Artificial Sequence: Synthetic oligonucleotide
uacaugaauugcaaacagu

SEQ ID NO: 3199551 - RNA, 19 nt, Artificial Sequence
  Description of Artificial Sequence: Synthetic oligonucleotide
guaaccucuucucuggccc

SEQ ID NO: 3199552 - RNA, 19 nt, Artificial Sequence
  Description of Artificial Sequence: Synthetic oligonucleotide
caaacagugaggaggcagc

SEQ ID NO: 3199553 - RNA, 19 nt, Artificial Sequence
  Description of Artificial Sequence: Synthetic oligonucleotide
cugccauacaggucgaagg

SEQ ID NO: 3199554 - RNA, 19 nt, Artificial Sequence
  Description of Artificial Sequence: Synthetic oligonucleotide
ggagaaguuggcuagaaga

SEQ ID NO: 3199555 - RNA, 19 nt, Artificial Sequence
  Description of Artificial Sequence: Synthetic oligonucleotide
ucuucucuggcccugcuuc

SEQ ID NO: 3199556 - RNA, 19 nt, Artificial Sequence
  Description of Artificial Sequence: Synthetic oligonucleotide
guuucuuggcuuccuaaag

SEQ ID NO: 3199557 - RNA, 19 nt, Artificial Sequence
  Description of Artificial Sequence: Synthetic oligonucleotide
aaggaauggucggaagacg

SEQ ID NO: 3199558 - RNA, 19 nt, Artificial Sequence
  Description of Artificial Sequence: Synthetic oligonucleotide
aucuuguuggcuacagugc

SEQ ID NO: 3199559 - RNA, 19 nt, Artificial Sequence
  Description of Artificial Sequence: Synthetic oligonucleotide
acuuguagugguguguggg

SEQ ID NO: 3199560 - RNA, 19 nt, Artificial Sequence
  Description of Artificial Sequence: Synthetic oligonucleotide
uccuauccuugguagacag

SEQ ID NO: 3199561 - RNA, 19 nt, Artificial Sequence
  Description of Artificial Sequence: Synthetic oligonucleotide
ucuggucccacacugggaa

SEQ ID NO: 3199562 - RNA, 19 nt, Artificial Sequence
  Description of Artificial Sequence: Synthetic oligonucleotide
ugaugccauugucugagcc

SEQ ID NO: 3199563 - RNA, 19 nt, Artificial Sequence
  Description of Artificial Sequence: Synthetic oligonucleotide
guguggaugggaucggacg

SEQ ID NO: 3199564 - RNA, 19 nt, Artificial Sequence
  Description of Artificial Sequence: Synthetic oligonucleotide
uauuuacaugaauugcaaa

SEQ ID NO: 3199565 - RNA, 19 nt, Artificial Sequence
  Description of Artificial Sequence: Synthetic oligonucleotide
uucauuucuggaccagcug

SEQ ID NO: 3199566 - RNA, 19 nt, Artificial Sequence
  Description of Artificial Sequence: Synthetic oligonucleotide
uugaucauauuuacaugaa

SEQ ID NO: 3199567 - RNA, 19 nt, Artificial Sequence
  Description of Artificial Sequence: Synthetic oligonucleotide
cuggcugagcaacaggagg

SEQ ID NO: 3199568 - RNA, 19 nt, Artificial Sequence
  Description of Artificial Sequence: Synthetic oligonucleotide
gguaccaucaguacccugg

SEQ ID NO: 3199569 - RNA, 19 nt, Artificial Sequence
  Description of Artificial Sequence: Synthetic oligonucleotide
cauuucuggaccagcuggg

SEQ ID NO: 3199570 - RNA, 19 nt, Artificial Sequence
  Description of Artificial Sequence: Synthetic oligonucleotide
gaauugcaaacagugagga

SEQ ID NO: 3199571 - RNA, 19 nt, Artificial Sequence
  Description of Artificial Sequence: Synthetic oligonucleotide
uguuaggggcaccaaggca

SEQ ID NO: 3199572 - RNA, 19 nt, Artificial Sequence
  Description of Artificial Sequence: Synthetic oligonucleotide
uucuuggcuuccuaaagaa

SEQ ID NO: 3199573 - RNA, 19 nt, Artificial Sequence
  Description of Artificial Sequence: Synthetic oligonucleotide
uguaaccucuucucuggcc

SEQ ID NO: 3199574 - RNA, 19 nt, Artificial Sequence
  Description of Artificial Sequence: Synthetic oligonucleotide
uucgugguggccugagagg

SEQ ID NO: 3199575 - RNA, 19 nt, Artificial Sequence
  Description of Artificial Sequence: Synthetic oligonucleotide
uccuuccacacagucaagg

SEQ ID NO: 3199576 - RNA, 19 nt, Artificial Sequence
  Description of Artificial Sequence: Synthetic oligonucleotide
ucuucccuucuccugggag

SEQ ID NO: 3199577 - RNA, 19 nt, Artificial Sequence
  Description of Artificial Sequence: Synthetic oligonucleotide
uuuccuauccuugguagac

SEQ ID NO: 3199578 - RNA, 19 nt, Artificial Sequence
  Description of Artificial Sequence: Synthetic oligonucleotide
aaauggggacucaagagau

SEQ ID NO: 3199579 - RNA, 19 nt, Artificial Sequence
  Description of Artificial Sequence: Synthetic oligonucleotide
agagcuggggagaaguugg

SEQ ID NO: 3199580 - RNA, 19 nt, Artificial Sequence
  Description of Artificial Sequence: Synthetic oligonucleotide
cuucccuucuccugggagg

SEQ ID NO: 3199581 - RNA, 19 nt, Artificial Sequence
  Description of Artificial Sequence: Synthetic oligonucleotide
cuucgugguggccugagag

SEQ ID NO: 3199582 - RNA, 19 nt, Artificial Sequence
  Description of Artificial Sequence: Synthetic oligonucleotide
aaggccaggcuagugagug

SEQ ID NO: 3199583 - RNA, 19 nt, Artificial Sequence
  Description of Artificial Sequence: Synthetic oligonucleotide
cagagaugauuccuguugc

SEQ ID NO: 3199584 - RNA, 19 nt, Artificial Sequence
  Description of Artificial Sequence: Synthetic oligonucleotide
agacgagcugacuagcaug

SEQ ID NO: 3199585 - RNA, 19 nt, Artificial Sequence
  Description of Artificial Sequence: Synthetic oligonucleotide
gagaugauuccuguugccc

SEQ ID NO: 3199586 - RNA, 19 nt, Artificial Sequence
  Description of Artificial Sequence: Synthetic oligonucleotide
ugccauacaggucgaaggu

SEQ ID NO: 3199587 - RNA, 19 nt, Artificial Sequence
  Description of Artificial Sequence: Synthetic oligonucleotide
ucgugguggccugagaggg

SEQ ID NO: 3199588 - RNA, 19 nt, Artificial Sequence
  Description of Artificial Sequence: Synthetic oligonucleotide
gaaaccccagacaaagccc

SEQ ID NO: 3199589 - RNA, 19 nt, Artificial Sequence
  Description of Artificial Sequence: Synthetic oligonucleotide
ggcuagaagaaacuggcug

SEQ ID NO: 3199590 - RNA, 19 nt, Artificial Sequence
  Description of Artificial Sequence: Synthetic oligonucleotide
cucaagagaugccaggauc

SEQ ID NO: 3199591 - RNA, 19 nt, Artificial Sequence
  Description of Artificial Sequence: Synthetic oligonucleotide
ggaacagauaccaaucuug

SEQ ID NO: 3199592 - RNA, 19 nt, Artificial Sequence
  Description of Artificial Sequence: Synthetic oligonucleotide
ucggaagacgagcugacua

SEQ ID NO: 3199593 - RNA, 19 nt, Artificial Sequence
  Description of Artificial Sequence: Synthetic oligonucleotide
aggagguggcguuucgugg

SEQ ID NO: 3199594 - RNA, 19 nt, Artificial Sequence
  Description of Artificial Sequence: Synthetic oligonucleotide
caaggcauggauucauuuc

SEQ ID NO: 3199595 - RNA, 19 nt, Artificial Sequence
  Description of Artificial Sequence: Synthetic oligonucleotide
aauggucggaagacgagcu

SEQ ID NO: 3199596 - RNA, 19 nt, Artificial Sequence
  Description of Artificial Sequence: Synthetic oligonucleotide
uugguagacagagcugggg

SEQ ID NO: 3199597 - RNA, 19 nt, Artificial Sequence
  Description of Artificial Sequence: Synthetic oligonucleotide
uguaauacuguugacaggg

SEQ ID NO: 3199598 - RNA, 19 nt, Artificial Sequence
  Description of Artificial Sequence: Synthetic oligonucleotide
uuuacugacuucaagcagg

SEQ ID NO: 3199599 - RNA, 19 nt, Artificial Sequence
  Description of Artificial Sequence: Synthetic oligonucleotide
gauuuuacugacuucaagc

SEQ ID NO: 3199600 - RNA, 19 nt, Artificial Sequence
  Description of Artificial Sequence: Synthetic oligonucleotide
aaccacacaguccucaccc

SEQ ID NO: 3199601 - RNA, 19 nt, Artificial Sequence
  Description of Artificial Sequence: Synthetic oligonucleotide
acuucaagcaggcagcugc

SEQ ID NO: 3199602 - RNA, 19 nt, Artificial Sequence
  Description of Artificial Sequence: Synthetic oligonucleotide
uuugaguaugagaagauga

SEQ ID NO: 3199603 - RNA, 19 nt, Artificial Sequence
  Description of Artificial Sequence: Synthetic oligonucleotide
uucgcuuugaguaugagaa

SEQ ID NO: 3199604 - RNA, 19 nt, Artificial Sequence
  Description of Artificial Sequence: Synthetic oligonucleotide
uuacugauggagaaggcgg

SEQ ID NO: 3199605 - RNA, 19 nt, Artificial Sequence
  Description of Artificial Sequence: Synthetic oligonucleotide
aauacuguugacagggccc

SEQ ID NO: 3199606 - RNA, 19 nt, Artificial Sequence
  Description of Artificial Sequence: Synthetic oligonucleotide
uauccauggaagcugagag

SEQ ID NO: 3199607 - RNA, 19 nt, Artificial Sequence
  Description of Artificial Sequence: Synthetic oligonucleotide
ugaggaggcuuacugaugg

SEQ ID NO: 3199608 - RNA, 19 nt, Artificial Sequence
  Description of Artificial Sequence: Synthetic oligonucleotide
acugacuucaagcaggcag

SEQ ID NO: 3199609 - RNA, 19 nt, Artificial Sequence
  Description of Artificial Sequence: Synthetic oligonucleotide
ucuggcuggggcaagaucc

SEQ ID NO: 3199610 - RNA, 19 nt, Artificial Sequence
  Description of Artificial Sequence: Synthetic oligonucleotide
aaaggcagcugccucaguc

SEQ ID NO: 3199611 - RNA, 19 nt, Artificial Sequence
  Description of Artificial Sequence: Synthetic oligonucleotide
uugaguaugagaagaugag

SEQ ID NO: 3199612 - RNA, 19 nt, Artificial Sequence
  Description of Artificial Sequence: Synthetic oligonucleotide
uuuuacugacuucaagcag

SEQ ID NO: 3199613 - RNA, 19 nt, Artificial Sequence
  Description of Artificial Sequence: Synthetic oligonucleotide
agguggaaaaggcagcugc

SEQ ID NO: 3199614 - RNA, 19 nt, Artificial Sequence
  Description of Artificial Sequence: Synthetic oligonucleotide
uggcucuuacgaaagaccg

SEQ ID NO: 3199615 - RNA, 19 nt, Artificial Sequence
  Description of Artificial Sequence: Synthetic oligonucleotide
acuucuccagauccgagcc

SEQ ID NO: 3199616 - RNA, 19 nt, Artificial Sequence
  Description of Artificial Sequence: Synthetic oligonucleotide
aagcauguggcucuuacga

SEQ ID NO: 3199617 - RNA, 19 nt, Artificial Sequence
  Description of Artificial Sequence: Synthetic oligonucleotide
aagagcuggcauuuccagc

SEQ ID NO: 3199618 - RNA, 19 nt, Artificial Sequence
  Description of Artificial Sequence: Synthetic oligonucleotide
aagguuuuauccauggaag

SEQ ID NO: 3199619 - RNA, 19 nt, Artificial Sequence
  Description of Artificial Sequence: Synthetic oligonucleotide
auuuuacugacuucaagca

SEQ ID NO: 3199620 - RNA, 19 nt, Artificial Sequence
  Description of Artificial Sequence: Synthetic oligonucleotide
uugaagguuuuauccaugg

SEQ ID NO: 3199621 - RNA, 19 nt, Artificial Sequence
  Description of Artificial Sequence: Synthetic oligonucleotide
ucgucuucgggguauaggg

SEQ ID NO: 3199622 - RNA, 19 nt, Artificial Sequence
  Description of Artificial Sequence: Synthetic oligonucleotide
agguuuuauccauggaagc

SEQ ID NO: 3199623 - RNA, 19 nt, Artificial Sequence
  Description of Artificial Sequence: Synthetic oligonucleotide
uagggaaccacacaguccu

SEQ ID NO: 3199624 - RNA, 19 nt, Artificial Sequence
  Description of Artificial Sequence: Synthetic oligonucleotide
uucagcuucgcuuugagua

SEQ ID NO: 3199625 - RNA, 19 nt, Artificial Sequence
  Description of Artificial Sequence: Synthetic oligonucleotide
accacuguaauacuguuga

SEQ ID NO: 3199626 - RNA, 19 nt, Artificial Sequence
  Description of Artificial Sequence: Synthetic oligonucleotide
ugagaagaugagcugcggg

SEQ ID NO: 3199627 - RNA, 19 nt, Artificial Sequence
  Description of Artificial Sequence: Synthetic oligonucleotide
uccacgaaggaugaggagg

SEQ ID NO: 3199628 - RNA, 19 nt, Artificial Sequence
  Description of Artificial Sequence: Synthetic oligonucleotide
uaauacuguugacagggcc

SEQ ID NO: 3199629 - RNA, 19 nt, Artificial Sequence
  Description of Artificial Sequence: Synthetic oligonucleotide
gguauagggaaccacacag

SEQ ID NO: 3199630 - RNA, 19 nt, Artificial Sequence
  Description of Artificial Sequence: Synthetic oligonucleotide
gaagguuuuauccauggaa

SEQ ID NO: 3199631 - RNA, 19 nt, Artificial Sequence
  Description of Artificial Sequence: Synthetic oligonucleotide
ucauccacgaaggaugagg

SEQ ID NO: 3199632 - RNA, 19 nt, Artificial Sequence
  Description of Artificial Sequence: Synthetic oligonucleotide
uauagggaaccacacaguc

SEQ ID NO: 3199633 - RNA, 19 nt, Artificial Sequence
  Description of Artificial Sequence: Synthetic oligonucleotide
gagaagaugagcugcgggc

SEQ ID NO: 3199634 - RNA, 19 nt, Artificial Sequence
  Description of Artificial Sequence: Synthetic oligonucleotide
agaagcauguggcucuuac

SEQ ID NO: 3199635 - RNA, 19 nt, Artificial Sequence
  Description of Artificial Sequence: Synthetic oligonucleotide
cuuacgaaagaccggacac

SEQ ID NO: 3199636 - RNA, 19 nt, Artificial Sequence
  Description of Artificial Sequence: Synthetic oligonucleotide
agcugagagaagcaugugg

SEQ ID NO: 3199637 - RNA, 19 nt, Artificial Sequence
  Description of Artificial Sequence: Synthetic oligonucleotide
aaggcagcugccucagucg

SEQ ID NO: 3199638 - RNA, 19 nt, Artificial Sequence
  Description of Artificial Sequence: Synthetic oligonucleotide
ucuuacgaaagaccggaca

SEQ ID NO: 3199639 - RNA, 19 nt, Artificial Sequence
  Description of Artificial Sequence: Synthetic oligonucleotide
uuuuauccauggaagcuga

SEQ ID NO: 3199640 - RNA, 19 nt, Artificial Sequence
  Description of Artificial Sequence: Synthetic oligonucleotide
agauuuuacugacuucaag

SEQ ID NO: 3199641 - RNA, 19 nt, Artificial Sequence
  Description of Artificial Sequence: Synthetic oligonucleotide
cuuacugauggagaaggcg

SEQ ID NO: 3199642 - RNA, 19 nt, Artificial Sequence
  Description of Artificial Sequence: Synthetic oligonucleotide
agugcuuucagcuucgcuu

SEQ ID NO: 3199643 - RNA, 19 nt, Artificial Sequence
  Description of Artificial Sequence: Synthetic oligonucleotide
aguaugagaagaugagcug

SEQ ID NO: 3199644 - RNA, 19 nt, Artificial Sequence
  Description of Artificial Sequence: Synthetic oligonucleotide
acaguccucaccccuuucc

SEQ ID NO: 3199645 - RNA, 19 nt, Artificial Sequence
  Description of Artificial Sequence: Synthetic oligonucleotide
caucaggguccuuugaggg

SEQ ID NO: 3199646 - RNA, 19 nt, Artificial Sequence
  Description of Artificial Sequence: Synthetic oligonucleotide
ucgcagguggaaaaggcag

SEQ ID NO: 3199647 - RNA, 19 nt, Artificial Sequence
  Description of Artificial Sequence: Synthetic oligonucleotide
cauggaagcugagagaagc

SEQ ID NO: 3199648 - RNA, 19 nt, Artificial Sequence
  Description of Artificial Sequence: Synthetic oligonucleotide
uccagcagugcuuucagcu

SEQ ID NO: 3199649 - RNA, 19 nt, Artificial Sequence
  Description of Artificial Sequence: Synthetic oligonucleotide
cugacuucaagcaggcagc

SEQ ID NO: 3199650 - RNA, 19 nt, Artificial Sequence
  Description of Artificial Sequence: Synthetic oligonucleotide
aggaugaggaggcuuacug

SEQ ID NO: 3199651 - RNA, 19 nt, Artificial Sequence
  Description of Artificial Sequence: Synthetic oligonucleotide
ugaguaugagaagaugagc

SEQ ID NO: 3199652 - RNA, 19 nt, Artificial Sequence
  Description of Artificial Sequence: Synthetic oligonucleotide
gaagcauguggcucuuacg

SEQ ID NO: 3199653 - RNA, 19 nt, Artificial Sequence
  Description of Artificial Sequence: Synthetic oligonucleotide
gaagagcuggcauuuccag

SEQ ID NO: 3199654 - RNA, 19 nt, Artificial Sequence
  Description of Artificial Sequence: Synthetic oligonucleotide
ugagcugcgggcaucccag

SEQ ID NO: 3199655 - RNA, 19 nt, Artificial Sequence
  Description of Artificial Sequence: Synthetic oligonucleotide
guugacagggccccugugg

SEQ ID NO: 3199656 - RNA, 19 nt, Artificial Sequence
  Description of Artificial Sequence: Synthetic oligonucleotide
guaugagaagaugagcugc

SEQ ID NO: 3199657 - RNA, 19 nt, Artificial Sequence
  Description of Artificial Sequence: Synthetic oligonucleotide
auacuguugacagggcccc

SEQ ID NO: 3199658 - RNA, 19 nt, Artificial Sequence
  Description of Artificial Sequence: Synthetic oligonucleotide
uuacugacuucaagcaggc

SEQ ID NO: 3199659 - RNA, 19 nt, Artificial Sequence
  Description of Artificial Sequence: Synthetic oligonucleotide
aucaggguccuuugagggc

SEQ ID NO: 3199660 - RNA, 19 nt, Artificial Sequence
  Description of Artificial Sequence: Synthetic oligonucleotide
uccauggaagcugagagaa

SEQ ID NO: 3199661 - RNA, 19 nt, Artificial Sequence
  Description of Artificial Sequence: Synthetic oligonucleotide
gagaagagcuggcauuucc

SEQ ID NO: 3199662 - RNA, 19 nt, Artificial Sequence
  Description of Artificial Sequence: Synthetic oligonucleotide
guuuuauccauggaagcug

SEQ ID NO: 3199663 - RNA, 19 nt, Artificial Sequence
  Description of Artificial Sequence: Synthetic oligonucleotide
uuugagggccacuguagcc

SEQ ID NO: 3199664 - RNA, 19 nt, Artificial Sequence
  Description of Artificial Sequence: Synthetic oligonucleotide
uggagaaggcggcaucagg

SEQ ID NO: 3199665 - RNA, 19 nt, Artificial Sequence
  Description of Artificial Sequence: Synthetic oligonucleotide
auagggaaccacacagucc

SEQ ID NO: 3199666 - RNA, 19 nt, Artificial Sequence
  Description of Artificial Sequence: Synthetic oligonucleotide
ucccaggcagauuuuacug

SEQ ID NO: 3199667 - RNA, 19 nt, Artificial Sequence
  Description of Artificial Sequence: Synthetic oligonucleotide
uggggcaagaucccgggug

SEQ ID NO: 3199668 - RNA, 19 nt, Artificial Sequence
  Description of Artificial Sequence: Synthetic oligonucleotide
uggcauuuccagcagugcu

SEQ ID NO: 3199669 - RNA, 19 nt, Artificial Sequence
  Description of Artificial Sequence: Synthetic oligonucleotide
uacugauggagaaggcggc

SEQ ID NO: 3199670 - RNA, 19 nt, Artificial Sequence
  Description of Artificial Sequence: Synthetic oligonucleotide
cauguggcucuuacgaaag

SEQ ID NO: 3199671 - RNA, 19 nt, Artificial Sequence
  Description of Artificial Sequence: Synthetic oligonucleotide
uuuccucugagaagagcug

SEQ ID NO: 3199672 - RNA, 19 nt, Artificial Sequence
  Description of Artificial Sequence: Synthetic oligonucleotide
cucggcucauccacgaagg

SEQ ID NO: 3199673 - RNA, 19 nt, Artificial Sequence
  Description of Artificial Sequence: Synthetic oligonucleotide
ugaagguuuuauccaugga

SEQ ID NO: 3199674 - RNA, 19 nt, Artificial Sequence
  Description of Artificial Sequence: Synthetic oligonucleotide
ucaggguccuuugagggcc

SEQ ID NO: 3199675 - RNA, 19 nt, Artificial Sequence
  Description of Artificial Sequence: Synthetic oligonucleotide
uccagauccgagccagcgg

SEQ ID NO: 3199676 - RNA, 19 nt, Artificial Sequence
  Description of Artificial Sequence: Synthetic oligonucleotide
ucugagaagagcuggcauu

SEQ ID NO: 3199677 - RNA, 19 nt, Artificial Sequence
  Description of Artificial Sequence: Synthetic oligonucleotide
uacgaaagaccggacacca

SEQ ID NO: 3199678 - RNA, 19 nt, Artificial Sequence
  Description of Artificial Sequence: Synthetic oligonucleotide
gaguaugagaagaugagcu

SEQ ID NO: 3199679 - RNA, 19 nt, Artificial Sequence
  Description of Artificial Sequence: Synthetic oligonucleotide
gaggcacgugaccagcugg

SEQ ID NO: 3199680 - RNA, 19 nt, Artificial Sequence
  Description of Artificial Sequence: Synthetic oligonucleotide
uuauccauggaagcugaga

SEQ ID NO: 3199681 - RNA, 19 nt, Artificial Sequence
  Description of Artificial Sequence: Synthetic oligonucleotide
agaaggcggcaucaggguc

SEQ ID NO: 3199682 - RNA, 19 nt, Artificial Sequence
  Description of Artificial Sequence: Synthetic oligonucleotide
cuugaagguuuuauccaug

SEQ ID NO: 3199683 - RNA, 19 nt, Artificial Sequence
  Description of Artificial Sequence: Synthetic oligonucleotide
accagcuggagcucggcuc

SEQ ID NO: 3199684 - RNA, 19 nt, Artificial Sequence
  Description of Artificial Sequence: Synthetic oligonucleotide
uucuccagauccgagccag

SEQ ID NO: 3199685 - RNA, 19 nt, Artificial Sequence
  Description of Artificial Sequence: Synthetic oligonucleotide
cuguaauacuguugacagg

SEQ ID NO: 3199686 - RNA, 19 nt, Artificial Sequence
  Description of Artificial Sequence: Synthetic oligonucleotide
cuuugagggccacuguagc

SEQ ID NO: 3199687 - RNA, 19 nt, Artificial Sequence
  Description of Artificial Sequence: Synthetic oligonucleotide
uggagcucggcucauccac

SEQ ID NO: 3199688 - RNA, 19 nt, Artificial Sequence
  Description of Artificial Sequence: Synthetic oligonucleotide
aaagaccggacaccacugu

SEQ ID NO: 3199689 - RNA, 19 nt, Artificial Sequence
  Description of Artificial Sequence: Synthetic oligonucleotide
uguagccucuggcuggggc

SEQ ID NO: 3199690 - RNA, 19 nt, Artificial Sequence
  Description of Artificial Sequence: Synthetic oligonucleotide
uuacgaaagaccggacacc

SEQ ID NO: 3199691 - RNA, 19 nt, Artificial Sequence
  Description of Artificial Sequence: Synthetic oligonucleotide
uuuauccauggaagcugag

SEQ ID NO: 3199692 - RNA, 19 nt, Artificial Sequence
  Description of Artificial Sequence: Synthetic oligonucleotide
ugagagaagcauguggcuc

SEQ ID NO: 3199693 - RNA, 19 nt, Artificial Sequence
  Description of Artificial Sequence: Synthetic oligonucleotide
uguggcucuuacgaaagac

SEQ ID NO: 3199694 - RNA, 19 nt, Artificial Sequence
  Description of Artificial Sequence: Synthetic oligonucleotide
ggcuuacugauggagaagg

SEQ ID NO: 3199695 - RNA, 19 nt, Artificial Sequence
  Description of Artificial Sequence: Synthetic oligonucleotide
cuuugaguaugagaagaug

SEQ ID NO: 3199696 - RNA, 19 nt, Artificial Sequence
  Description of Artificial Sequence: Synthetic oligonucleotide
uggaaaaggcagcugccuc

SEQ ID NO: 3199697 - RNA, 19 nt, Artificial Sequence
  Description of Artificial Sequence: Synthetic oligonucleotide
aaacuggccagcuucaagc

SEQ ID NO: 3199698 - RNA, 19 nt, Artificial Sequence
  Description of Artificial Sequence: Synthetic oligonucleotide
uuuguuacagguuuggacc

SEQ ID NO: 3199699 - RNA, 19 nt, Artificial Sequence
  Description of Artificial Sequence: Synthetic oligonucleotide
uucaaggucacacacagca

SEQ ID NO: 3199700 - RNA, 19 nt, Artificial Sequence
  Description of Artificial Sequence: Synthetic oligonucleotide
aaggaaacuggccagcuuc

SEQ ID NO: 3199701 - RNA, 19 nt, Artificial Sequence
  Description of Artificial Sequence: Synthetic oligonucleotide
cuaagcaacaaguuucucg

SEQ ID NO: 3199702 - RNA, 19 nt, Artificial Sequence
  Description of Artificial Sequence: Synthetic oligonucleotide
aagaguuuggucuggaacu

SEQ ID NO: 3199703 - RNA, 19 nt, Artificial Sequence
  Description of Artificial Sequence: Synthetic oligonucleotide
uauaccaaggacuccuucg

SEQ ID NO: 3199704 - RNA, 19 nt, Artificial Sequence
  Description of Artificial Sequence: Synthetic oligonucleotide
aaguuucucgaauauacca

SEQ ID NO: 3199705 - RNA, 19 nt, Artificial Sequence
  Description of Artificial Sequence: Synthetic oligonucleotide
acaaguuucucgaauauac

SEQ ID NO: 3199706 - RNA, 19 nt, Artificial Sequence
  Description of Artificial Sequence: Synthetic oligonucleotide
uaagcaacaaguuucucga

SEQ ID NO: 3199707 - RNA, 19 nt, Artificial Sequence
  Description of Artificial Sequence: Synthetic oligonucleotide
aaggcuuuggcaaggaaac

SEQ ID NO: 3199708 - RNA, 19 nt, Artificial Sequence
  Description of Artificial Sequence: Synthetic oligonucleotide
uuggcaaggaaacuggcca

SEQ ID NO: 3199709 - RNA, 19 nt, Artificial Sequence
  Description of Artificial Sequence: Synthetic oligonucleotide
acagguuuggaccacgcuc

SEQ ID NO: 3199710 - RNA, 19 nt, Artificial Sequence
  Description of Artificial Sequence: Synthetic oligonucleotide
auaccaaggacuccuucgc

SEQ ID NO: 3199711 - RNA, 19 nt, Artificial Sequence
  Description of Artificial Sequence: Synthetic oligonucleotide
ucgaauauaccaaggacuc

SEQ ID NO: 3199712 - RNA, 19 nt, Artificial Sequence
  Description of Artificial Sequence: Synthetic oligonucleotide
uuucucgaauauaccaagg

SEQ ID NO: 3199713 - RNA, 19 nt, Artificial Sequence
  Description of Artificial Sequence: Synthetic oligonucleotide
ucucgaauauaccaaggac

SEQ ID NO: 3199714 - RNA, 19 nt, Artificial Sequence
  Description of Artificial Sequence: Synthetic oligonucleotide
cuuuguuacagguuuggac

SEQ ID NO: 3199715 - RNA, 19 nt, Artificial Sequence
  Description of Artificial Sequence: Synthetic oligonucleotide
caagcuguacccgacaugg

SEQ ID NO: 3199716 - RNA, 19 nt, Artificial Sequence
  Description of Artificial Sequence: Synthetic oligonucleotide
uucucgaauauaccaagga

SEQ ID NO: 3199717 - RNA, 19 nt, Artificial Sequence
  Description of Artificial Sequence: Synthetic oligonucleotide
uuuggcaaggaaacuggcc

SEQ ID NO: 3199718 - RNA, 19 nt, Artificial Sequence
  Description of Artificial Sequence: Synthetic oligonucleotide
ucuccuuccaagaguuugg

SEQ ID NO: 3199719 - RNA, 19 nt, Artificial Sequence
  Description of Artificial Sequence: Synthetic oligonucleotide
aaggacgcccagcuuaggg

SEQ ID NO: 3199720 - RNA, 19 nt, Artificial Sequence
  Description of Artificial Sequence: Synthetic oligonucleotide
guuucucgaauauaccaag

SEQ ID NO: 3199721 - RNA, 19 nt, Artificial Sequence
  Description of Artificial Sequence: Synthetic oligonucleotide
aaaagggagcccggcagcc

SEQ ID NO: 3199722 - RNA, 19 nt, Artificial Sequence
  Description of Artificial Sequence: Synthetic oligonucleotide
uggucgacugcucuaagca

SEQ ID NO: 3199723 - RNA, 19 nt, Artificial Sequence
  Description of Artificial Sequence: Synthetic oligonucleotide
uuuuccaaggucgaaggcu

SEQ ID NO: 3199724 - RNA, 19 nt, Artificial Sequence
  Description of Artificial Sequence: Synthetic oligonucleotide
caagaguuuggucuggaac

SEQ ID NO: 3199725 - RNA, 19 nt, Artificial Sequence
  Description of Artificial Sequence: Synthetic oligonucleotide
auggucgacugcucuaagc

SEQ ID NO: 3199726 - RNA, 19 nt, Artificial Sequence
  Description of Artificial Sequence: Synthetic oligonucleotide
aaggucgaaggcuuuggca

SEQ ID NO: 3199727 - RNA, 19 nt, Artificial Sequence
  Description of Artificial Sequence: Synthetic oligonucleotide
cagguuuggaccacgcucc

SEQ ID NO: 3199728 - RNA, 19 nt, Artificial Sequence
  Description of Artificial Sequence: Synthetic oligonucleotide
acagcaguagcugcuaccg

SEQ ID NO: 3199729 - RNA, 19 nt, Artificial Sequence
  Description of Artificial Sequence: Synthetic oligonucleotide
caaguuucucgaauauacc

SEQ ID NO: 3199730 - RNA, 19 nt, Artificial Sequence
  Description of Artificial Sequence: Synthetic oligonucleotide
uggucuggaacugcgaugc

SEQ ID NO: 3199731 - RNA, 19 nt, Artificial Sequence
  Description of Artificial Sequence: Synthetic oligonucleotide
gagcccggcagccagacag

SEQ ID NO: 3199732 - RNA, 19 nt, Artificial Sequence
  Description of Artificial Sequence: Synthetic oligonucleotide
acugcucuaagcaacaagu

SEQ ID NO: 3199733 - RNA, 19 nt, Artificial Sequence
  Description of Artificial Sequence: Synthetic oligonucleotide
auauaccaaggacuccuuc

SEQ ID NO: 3199734 - RNA, 19 nt, Artificial Sequence
  Description of Artificial Sequence: Synthetic oligonucleotide
cagagggccuccuucaagg

SEQ ID NO: 3199735 - RNA, 19 nt, Artificial Sequence
  Description of Artificial Sequence: Synthetic oligonucleotide
gaaacuggccagcuucaag

SEQ ID NO: 3199736 - RNA, 19 nt, Artificial Sequence
  Description of Artificial Sequence: Synthetic oligonucleotide
uuuggucuggaacugcgau

SEQ ID NO: 3199737 - RNA, 19 nt, Artificial Sequence
  Description of Artificial Sequence: Synthetic oligonucleotide
ugcucuaagcaacaaguuu

SEQ ID NO: 3199738 - RNA, 19 nt, Artificial Sequence
  Description of Artificial Sequence: Synthetic oligonucleotide
ucaaggucacacacagcag

SEQ ID NO: 3199739 - RNA, 19 nt, Artificial Sequence
  Description of Artificial Sequence: Synthetic oligonucleotide
uuguuacagguuuggacca

SEQ ID NO: 3199740 - RNA, 19 nt, Artificial Sequence
  Description of Artificial Sequence: Synthetic oligonucleotide
uucuccuuccaagaguuug

SEQ ID NO: 3199741 - RNA, 19 nt, Artificial Sequence
  Description of Artificial Sequence: Synthetic oligonucleotide
cuguacccgacauggaugc

SEQ ID NO: 3199742 - RNA, 19 nt, Artificial Sequence
  Description of Artificial Sequence: Synthetic oligonucleotide
gacauggaugcagagggcc

SEQ ID NO: 3199743 - RNA, 19 nt, Artificial Sequence
  Description of Artificial Sequence: Synthetic oligonucleotide
gacugcucuaagcaacaag

SEQ ID NO: 3199744 - RNA, 19 nt, Artificial Sequence
  Description of Artificial Sequence: Synthetic oligonucleotide
accaaggacuccuucgcag

SEQ ID NO: 3199745 - RNA, 19 nt, Artificial Sequence
  Description of Artificial Sequence: Synthetic oligonucleotide
ucuggaacugcgaugcuuu

SEQ ID NO: 3199746 - RNA, 19 nt, Artificial Sequence
  Description of Artificial Sequence: Synthetic oligonucleotide
uuuccaaggucgaaggcuu

SEQ ID NO: 3199747 - RNA, 19 nt, Artificial Sequence
  Description of Artificial Sequence: Synthetic oligonucleotide
cagacaguagcccucuuug

SEQ ID NO: 3199748 - RNA, 19 nt, Artificial Sequence
  Description of Artificial Sequence: Synthetic oligonucleotide
aggacgcccagcuuagggg

SEQ ID NO: 3199749 - RNA, 19 nt, Artificial Sequence
  Description of Artificial Sequence: Synthetic oligonucleotide
uagcugcuaccgaaggacg

SEQ ID NO: 3199750 - RNA, 19 nt, Artificial Sequence
  Description of Artificial Sequence: Synthetic oligonucleotide
gcuggggucaucauggucg

SEQ ID NO: 3199751 - RNA, 19 nt, Artificial Sequence
  Description of Artificial Sequence: Synthetic oligonucleotide
aggucgaaggcuuuggcaa

SEQ ID NO: 3199752 - RNA, 19 nt, Artificial Sequence
  Description of Artificial Sequence: Synthetic oligonucleotide
cucgaauauaccaaggacu

SEQ ID NO: 3199753 - RNA, 19 nt, Artificial Sequence
  Description of Artificial Sequence: Synthetic oligonucleotide
cuuccaagaguuuggucug

SEQ ID NO: 3199754 - RNA, 19 nt, Artificial Sequence
  Description of Artificial Sequence: Synthetic oligonucleotide
ccgacauggaugcagaggg

SEQ ID NO: 3199755 - RNA, 19 nt, Artificial Sequence
  Description of Artificial Sequence: Synthetic oligonucleotide
aagggagcccggcagccag

SEQ ID NO: 3199756 - RNA, 19 nt, Artificial Sequence
  Description of Artificial Sequence: Synthetic oligonucleotide
gaauauaccaaggacuccu

SEQ ID NO: 3199757 - RNA, 19 nt, Artificial Sequence
  Description of Artificial Sequence: Synthetic oligonucleotide
gaugcagagggccuccuuc

SEQ ID NO: 3199758 - RNA, 19 nt, Artificial Sequence
  Description of Artificial Sequence: Synthetic oligonucleotide
agcaacaaguuucucgaau

SEQ ID NO: 3199759 - RNA, 19 nt, Artificial Sequence
  Description of Artificial Sequence: Synthetic oligonucleotide
ucaagcuguacccgacaug

SEQ ID NO: 3199760 - RNA, 19 nt, Artificial Sequence
  Description of Artificial Sequence: Synthetic oligonucleotide
aacuggccagcuucaagcu

SEQ ID NO: 3199761 - RNA, 19 nt, Artificial Sequence
  Description of Artificial Sequence: Synthetic oligonucleotide
cuuuggcaaggaaacuggc

SEQ ID NO: 3199762 - RNA, 19 nt, Artificial Sequence
  Description of Artificial Sequence: Synthetic oligonucleotide
uuacagguuuggaccacgc

SEQ ID NO: 3199763 - RNA, 19 nt, Artificial Sequence
  Description of Artificial Sequence: Synthetic oligonucleotide
guagcugcuaccgaaggac

SEQ ID NO: 3199764 - RNA, 19 nt, Artificial Sequence
  Description of Artificial Sequence: Synthetic oligonucleotide
uccuucaaggucacacaca

SEQ ID NO: 3199765 - RNA, 19 nt, Artificial Sequence
  Description of Artificial Sequence: Synthetic oligonucleotide
ucacacacagcaguagcug

SEQ ID NO: 3199766 - RNA, 19 nt, Artificial Sequence
  Description of Artificial Sequence: Synthetic oligonucleotide
cucuuuguuacagguuugg

SEQ ID NO: 3199767 - RNA, 19 nt, Artificial Sequence
  Description of Artificial Sequence: Synthetic oligonucleotide
aguuuggucuggaacugcg

SEQ ID NO: 3199768 - RNA, 19 nt, Artificial Sequence
  Description of Artificial Sequence: Synthetic oligonucleotide
cacacacagcaguagcugc

SEQ ID NO: 3199769 - RNA, 19 nt, Artificial Sequence
  Description of Artificial Sequence: Synthetic oligonucleotide
uaccgaaggacgcccagcu

SEQ ID NO: 3199770 - RNA, 19 nt, Artificial Sequence
  Description of Artificial Sequence: Synthetic oligonucleotide
uggcaaggaaacuggccag

SEQ ID NO: 3199771 - RNA, 19 nt, Artificial Sequence
  Description of Artificial Sequence: Synthetic oligonucleotide
uuggucuggaacugcgaug

SEQ ID NO: 3199772 - RNA, 19 nt, Artificial Sequence
  Description of Artificial Sequence: Synthetic oligonucleotide
uucaagcuguacccgacau

SEQ ID NO: 3199773 - RNA, 19 nt, Artificial Sequence
  Description of Artificial Sequence: Synthetic oligonucleotide
ucgacugcucuaagcaaca

SEQ ID NO: 3199774 - RNA, 19 nt, Artificial Sequence
  Description of Artificial Sequence: Synthetic oligonucleotide
gaaggcuuuggcaaggaaa

SEQ ID NO: 3199775 - RNA, 19 nt, Artificial Sequence
  Description of Artificial Sequence: Synthetic oligonucleotide
agcaguagcugcuaccgaa

SEQ ID NO: 3199776 - RNA, 19 nt, Artificial Sequence
  Description of Artificial Sequence: Synthetic oligonucleotide
ccagcuucaagcuguaccc

SEQ ID NO: 3199777 - RNA, 19 nt, Artificial Sequence
  Description of Artificial Sequence: Synthetic oligonucleotide
ucccuucuccuuccaagag

SEQ ID NO: 3199778 - RNA, 19 nt, Artificial Sequence
  Description of Artificial Sequence: Synthetic oligonucleotide
ccuucaaggucacacacag

SEQ ID NO: 3199779 - RNA, 19 nt, Artificial Sequence
  Description of Artificial Sequence: Synthetic oligonucleotide
aguagcugcuaccgaagga

SEQ ID NO: 3199780 - RNA, 19 nt, Artificial Sequence
  Description of Artificial Sequence: Synthetic oligonucleotide
aacaaguuucucgaauaua

SEQ ID NO: 3199781 - RNA, 19 nt, Artificial Sequence
  Description of Artificial Sequence: Synthetic oligonucleotide
cuccuucaaggucacacac

SEQ ID NO: 3199782 - RNA, 19 nt, Artificial Sequence
  Description of Artificial Sequence: Synthetic oligonucleotide
aguuucucgaauauaccaa

SEQ ID NO: 3199783 - RNA, 19 nt, Artificial Sequence
  Description of Artificial Sequence: Synthetic oligonucleotide
acaguagcccucuuuguua

SEQ ID NO: 3199784 - RNA, 19 nt, Artificial Sequence
  Description of Artificial Sequence: Synthetic oligonucleotide
guuacagguuuggaccacg

SEQ ID NO: 3199785 - RNA, 19 nt, Artificial Sequence
  Description of Artificial Sequence: Synthetic oligonucleotide
caaggacuccuucgcaggg

SEQ ID NO: 3199786 - RNA, 19 nt, Artificial Sequence
  Description of Artificial Sequence: Synthetic oligonucleotide
cacagcaguagcugcuacc

SEQ ID NO: 3199787 - RNA, 19 nt, Artificial Sequence
  Description of Artificial Sequence: Synthetic oligonucleotide
agcccucuuuguuacaggu

SEQ ID NO: 3199788 - RNA, 19 nt, Artificial Sequence
  Description of Artificial Sequence: Synthetic oligonucleotide
agcuguacccgacauggau

SEQ ID NO: 3199789 - RNA, 19 nt, Artificial Sequence
  Description of Artificial Sequence: Synthetic oligonucleotide
ucuuuguuacagguuugga

SEQ ID NO: 3199790 - RNA, 19 nt, Artificial Sequence
  Description of Artificial Sequence: Synthetic oligonucleotide
acacagcaguagcugcuac

SEQ ID NO: 3199791 - RNA, 19 nt, Artificial Sequence
  Description of Artificial Sequence: Synthetic oligonucleotide
agguuuggaccacgcuccc

SEQ ID NO: 3199792 - RNA, 19 nt, Artificial Sequence
  Description of Artificial Sequence: Synthetic oligonucleotide
uacagguuuggaccacgcu

SEQ ID NO: 3199793 - RNA, 19 nt, Artificial Sequence
  Description of Artificial Sequence: Synthetic oligonucleotide
gcucuaagcaacaaguuuc

SEQ ID NO: 3199794 - RNA, 19 nt, Artificial Sequence
  Description of Artificial Sequence: Synthetic oligonucleotide
guagcccucuuuguuacag

SEQ ID NO: 3199795 - RNA, 19 nt, Artificial Sequence
  Description of Artificial Sequence: Synthetic oligonucleotide
caguagcugcuaccgaagg

SEQ ID NO: 3199796 - RNA, 19 nt, Artificial Sequence
  Description of Artificial Sequence: Synthetic oligonucleotide
uacccgacauggaugcaga

SEQ ID NO: 3199797 - RNA, 19 nt, Artificial Sequence
  Description of Artificial Sequence: Synthetic oligonucleotide
uuuacuucaaacauagccc

SEQ ID NO: 3199798 - RNA, 19 nt, Artificial Sequence
  Description of Artificial Sequence: Synthetic oligonucleotide
aaugguaacacucccauca

SEQ ID NO: 3199799 - RNA, 19 nt, Artificial Sequence
  Description of Artificial Sequence: Synthetic oligonucleotide
aaauuuucuguccaugauc

SEQ ID NO: 3199800 - RNA, 19 nt, Artificial Sequence
  Description of Artificial Sequence: Synthetic oligonucleotide
aaauuaguaaugguaacac

SEQ ID NO: 3199801 - RNA, 19 nt, Artificial Sequence
  Description of Artificial Sequence: Synthetic oligonucleotide
uuauuuugaaaucauaaaa

SEQ ID NO: 3199802 - RNA, 19 nt, Artificial Sequence
  Description of Artificial Sequence: Synthetic oligonucleotide
guuuacuucaaacauagcc

SEQ ID NO: 3199803 - RNA, 19 nt, Artificial Sequence
  Description of Artificial Sequence: Synthetic oligonucleotide
aauuauuucuucuuucaug

SEQ ID NO: 3199804 - RNA, 19 nt, Artificial Sequence
  Description of Artificial Sequence: Synthetic oligonucleotide
ucaaacauagcccugaaaa

SEQ ID NO: 3199805 - RNA, 19 nt, Artificial Sequence
  Description of Artificial Sequence: Synthetic oligonucleotide
uucaugauuauuuugaaau

SEQ ID NO: 3199806 - RNA, 19 nt, Artificial Sequence
  Description of Artificial Sequence: Synthetic oligonucleotide
ucuuucaugauuauuuuga

SEQ ID NO: 3199807 - RNA, 19 nt, Artificial Sequence
  Description of Artificial Sequence: Synthetic oligonucleotide
ucaagaaaugccuuuacug

SEQ ID NO: 3199808 - RNA, 19 nt, Artificial Sequence
  Description of Artificial Sequence: Synthetic oligonucleotide
auuauuucuucuuucauga

SEQ ID NO: 3199809 - RNA, 19 nt, Artificial Sequence
  Description of Artificial Sequence: Synthetic oligonucleotide
acuggaagaacauuucuac

SEQ ID NO: 3199810 - RNA, 19 nt, Artificial Sequence
  Description of Artificial Sequence: Synthetic oligonucleotide
uucucuaaaacucuguagu

SEQ ID NO: 3199811 - RNA, 19 nt, Artificial Sequence
  Description of Artificial Sequence: Synthetic oligonucleotide
acacuuaaaauuuucuguc

SEQ ID NO: 3199812 - RNA, 19 nt, Artificial Sequence
  Description of Artificial Sequence: Synthetic oligonucleotide
auuaguaaugguaacacuc

SEQ ID NO: 3199813 - RNA, 19 nt, Artificial Sequence
  Description of Artificial Sequence: Synthetic oligonucleotide
aacgaugacaacuggaaga

SEQ ID NO: 3199814 - RNA, 19 nt, Artificial Sequence
  Description of Artificial Sequence: Synthetic oligonucleotide
uguaguacacuuaaaauuu

SEQ ID NO: 3199815 - RNA, 19 nt, Artificial Sequence
  Description of Artificial Sequence: Synthetic oligonucleotide
uacacuuaaaauuuucugu

SEQ ID NO: 3199816 - RNA, 19 nt, Artificial Sequence
  Description of Artificial Sequence: Synthetic oligonucleotide
ucuucuuucaugauuauuu

SEQ ID NO: 3199817 - RNA, 19 nt, Artificial Sequence
  Description of Artificial Sequence: Synthetic oligonucleotide
uuaguaaugguaacacucc

SEQ ID NO: 3199818 - RNA, 19 nt, Artificial Sequence
  Description of Artificial Sequence: Synthetic oligonucleotide
aaagucacugcaugccgcc

SEQ ID NO: 3199819 - RNA, 19 nt, Artificial Sequence
  Description of Artificial Sequence: Synthetic oligonucleotide
uucauguuuacuucaaaca

SEQ ID NO: 3199820 - RNA, 19 nt, Artificial Sequence
  Description of Artificial Sequence: Synthetic oligonucleotide
caagaaaugccuuuacugc

SEQ ID NO: 3199821 - RNA, 19 nt, Artificial Sequence
  Description of Artificial Sequence: Synthetic oligonucleotide
ugaagaaacgaugacaacu

SEQ ID NO: 3199822 - RNA, 19 nt, Artificial Sequence
  Description of Artificial Sequence: Synthetic oligonucleotide
uguuauucuugcuuuuccg

SEQ ID NO: 3199823 - RNA, 19 nt, Artificial Sequence
  Description of Artificial Sequence: Synthetic oligonucleotide
aauuuucuguccaugaucu

SEQ ID NO: 3199824 - RNA, 19 nt, Artificial Sequence
  Description of Artificial Sequence: Synthetic oligonucleotide
ucuaaaacucuguaguaca

SEQ ID NO: 3199825 - RNA, 19 nt, Artificial Sequence
  Description of Artificial Sequence: Synthetic oligonucleotide
acaaauuaguaaugguaac

SEQ ID NO: 3199826 - RNA, 19 nt, Artificial Sequence
  Description of Artificial Sequence: Synthetic oligonucleotide
uaaaauuuucuguccauga

SEQ ID NO: 3199827 - RNA, 19 nt, Artificial Sequence
  Description of Artificial Sequence: Synthetic oligonucleotide
uuaucaucuguuauucuug

SEQ ID NO: 3199828 - RNA, 19 nt, Artificial Sequence
  Description of Artificial Sequence: Synthetic oligonucleotide
gaugacauggaauuauuuc

SEQ ID NO: 3199829 - RNA, 19 nt, Artificial Sequence
  Description of Artificial Sequence: Synthetic oligonucleotide
ucauguuuacuucaaacau

SEQ ID NO: 3199830 - RNA, 19 nt, Artificial Sequence
  Description of Artificial Sequence: Synthetic oligonucleotide
augacauggaauuauuucu

SEQ ID NO: 3199831 - RNA, 19 nt, Artificial Sequence
  Description of Artificial Sequence: Synthetic oligonucleotide
aagaaaugccuuuacugcu

SEQ ID NO: 3199832 - RNA, 19 nt, Artificial Sequence
  Description of Artificial Sequence: Synthetic oligonucleotide
uuucauguuuacuucaaac

SEQ ID NO: 3199833 - RNA, 19 nt, Artificial Sequence
  Description of Artificial Sequence: Synthetic oligonucleotide
auuauuuugaaaucauaaa

SEQ ID NO: 3199834 - RNA, 19 nt, Artificial Sequence
  Description of Artificial Sequence: Synthetic oligonucleotide
aaugccuuuacugcuuugg

SEQ ID NO: 3199835 - RNA, 19 nt, Artificial Sequence
  Description of Artificial Sequence: Synthetic oligonucleotide
acaagagggaaccugaaga

SEQ ID NO: 3199836 - RNA, 19 nt, Artificial Sequence
  Description of Artificial Sequence: Synthetic oligonucleotide
guuauucuugcuuuuccgg

SEQ ID NO: 3199837 - RNA, 19 nt, Artificial Sequence
  Description of Artificial Sequence: Synthetic oligonucleotide
uggaagaacauuucuacgu

SEQ ID NO: 3199838 - RNA, 19 nt, Artificial Sequence
  Description of Artificial Sequence: Synthetic oligonucleotide
aauuaguaaugguaacacu

SEQ ID NO: 3199839 - RNA, 19 nt, Artificial Sequence
  Description of Artificial Sequence: Synthetic oligonucleotide
acacacaacgaugacaugg

SEQ ID NO: 3199840 - RNA, 19 nt, Artificial Sequence
  Description of Artificial Sequence: Synthetic oligonucleotide
aaaacauucuguucucuaa

SEQ ID NO: 3199841 - RNA, 19 nt, Artificial Sequence
  Description of Artificial Sequence: Synthetic oligonucleotide
aaaagucacugcaugccgc

SEQ ID NO: 3199842 - RNA, 19 nt, Artificial Sequence
  Description of Artificial Sequence: Synthetic oligonucleotide
gauuauuuugaaaucauaa

SEQ ID NO: 3199843 - RNA, 19 nt, Artificial Sequence
  Description of Artificial Sequence: Synthetic oligonucleotide
aaacgaugacaacuggaag

SEQ ID NO: 3199844 - RNA, 19 nt, Artificial Sequence
  Description of Artificial Sequence: Synthetic oligonucleotide
aacauuucuacguuaucau

SEQ ID NO: 3199845 - RNA, 19 nt, Artificial Sequence
  Description of Artificial Sequence: Synthetic oligonucleotide
uuacuucaaacauagcccu

SEQ ID NO: 3199846 - RNA, 19 nt, Artificial Sequence
  Description of Artificial Sequence: Synthetic oligonucleotide
acauucuguucucuaaaac

SEQ ID NO: 3199847 - RNA, 19 nt, Artificial Sequence
  Description of Artificial Sequence: Synthetic oligonucleotide
aaaacucuguaguacacuu

SEQ ID NO: 3199848 - RNA, 19 nt, Artificial Sequence
  Description of Artificial Sequence: Synthetic oligonucleotide
aagaaacgaugacaacugg

SEQ ID NO: 3199849 - RNA, 19 nt, Artificial Sequence
  Description of Artificial Sequence: Synthetic oligonucleotide
acaacgaugacauggaauu

SEQ ID NO: 3199850 - RNA, 19 nt, Artificial Sequence
  Description of Artificial Sequence: Synthetic oligonucleotide
aaaauuuucuguccaugau

SEQ ID NO: 3199851 - RNA, 19 nt, Artificial Sequence
  Description of Artificial Sequence: Synthetic oligonucleotide
aacucuguaguacacuuaa

SEQ ID NO: 3199852 - RNA, 19 nt, Artificial Sequence
  Description of Artificial Sequence: Synthetic oligonucleotide
uggaggacaaauuaguaau

SEQ ID NO: 3199853 - RNA, 19 nt, Artificial Sequence
  Description of Artificial Sequence: Synthetic oligonucleotide
gaggacaaauuaguaaugg

SEQ ID NO: 3199854 - RNA, 19 nt, Artificial Sequence
  Description of Artificial Sequence: Synthetic oligonucleotide
acuuaaaauuuucugucca

SEQ ID NO: 3199855 - RNA, 19 nt, Artificial Sequence
  Description of Artificial Sequence: Synthetic oligonucleotide
aaccugaagaaacgaugac

SEQ ID NO: 3199856 - RNA, 19 nt, Artificial Sequence
  Description of Artificial Sequence: Synthetic oligonucleotide
gaagaaacgaugacaacug

SEQ ID NO: 3199857 - RNA, 19 nt, Artificial Sequence
  Description of Artificial Sequence: Synthetic oligonucleotide
auucuguucucuaaaacuc

SEQ ID NO: 3199858 - RNA, 19 nt, Artificial Sequence
  Description of Artificial Sequence: Synthetic oligonucleotide
uuaaaauuuucuguccaug

SEQ ID NO: 3199859 - RNA, 19 nt, Artificial Sequence
  Description of Artificial Sequence: Synthetic oligonucleotide
ucuguaguacacuuaaaau

SEQ ID NO: 3199860 - RNA, 19 nt, Artificial Sequence
  Description of Artificial Sequence: Synthetic oligonucleotide
auguuuacuucaaacauag

SEQ ID NO: 3199861 - RNA, 19 nt, Artificial Sequence
  Description of Artificial Sequence: Synthetic oligonucleotide
guacacuuaaaauuuucug

SEQ ID NO: 3199862 - RNA, 19 nt, Artificial Sequence
  Description of Artificial Sequence: Synthetic oligonucleotide
ucaucucuuucuuucaugu

SEQ ID NO: 3199863 - RNA, 19 nt, Artificial Sequence
  Description of Artificial Sequence: Synthetic oligonucleotide
gaugacaacuggaagaaca

SEQ ID NO: 3199864 - RNA, 19 nt, Artificial Sequence
  Description of Artificial Sequence: Synthetic oligonucleotide
acauuucuacguuaucauc

SEQ ID NO: 3199865 - RNA, 19 nt, Artificial Sequence
  Description of Artificial Sequence: Synthetic oligonucleotide
gacaaauuaguaaugguaa

SEQ ID NO: 3199866 - RNA, 19 nt, Artificial Sequence
  Description of Artificial Sequence: Synthetic oligonucleotide
agagggaaccugaagaaac

SEQ ID NO: 3199867 - RNA, 19 nt, Artificial Sequence
  Description of Artificial Sequence: Synthetic oligonucleotide
uauuucuucuuucaugauu

SEQ ID NO: 3199868 - RNA, 19 nt, Artificial Sequence
  Description of Artificial Sequence: Synthetic oligonucleotide
aaacauucuguucucuaaa

SEQ ID NO: 3199869 - RNA, 19 nt, Artificial Sequence
  Description of Artificial Sequence: Synthetic oligonucleotide
gcaagcuuggacaagaggg

SEQ ID NO: 3199870 - RNA, 19 nt, Artificial Sequence
  Description of Artificial Sequence: Synthetic oligonucleotide
ucaucuguuauucuugcuu

SEQ ID NO: 3199871 - RNA, 19 nt, Artificial Sequence
  Description of Artificial Sequence: Synthetic oligonucleotide
aaaagucacugcaagcuug

SEQ ID NO: 3199872 - RNA, 19 nt, Artificial Sequence
  Description of Artificial Sequence: Synthetic oligonucleotide
cacuuaaaauuuucugucc

SEQ ID NO: 3199873 - RNA, 19 nt, Artificial Sequence
  Description of Artificial Sequence: Synthetic oligonucleotide
ucuguucucuaaaacucug

SEQ ID NO: 3199874 - RNA, 19 nt, Artificial Sequence
  Description of Artificial Sequence: Synthetic oligonucleotide
guucucuaaaacucuguag

SEQ ID NO: 3199875 - RNA, 19 nt, Artificial Sequence
  Description of Artificial Sequence: Synthetic oligonucleotide
uuauucuugcuuuuccggu

SEQ ID NO: 3199876 - RNA, 19 nt, Artificial Sequence
  Description of Artificial Sequence: Synthetic oligonucleotide
agucacugcaagcuuggac

SEQ ID NO: 3199877 - RNA, 19 nt, Artificial Sequence
  Description of Artificial Sequence: Synthetic oligonucleotide
gaacauuucuacguuauca

SEQ ID NO: 3199878 - RNA, 19 nt, Artificial Sequence
  Description of Artificial Sequence: Synthetic oligonucleotide
uuucuguccaugaucuucu

SEQ ID NO: 3199879 - RNA, 19 nt, Artificial Sequence
  Description of Artificial Sequence: Synthetic oligonucleotide
uucuuucaugauuauuuug

SEQ ID NO: 3199880 - RNA, 19 nt, Artificial Sequence
  Description of Artificial Sequence: Synthetic oligonucleotide
agucaagaaaugccuuuac

SEQ ID NO: 3199881 - RNA, 19 nt, Artificial Sequence
  Description of Artificial Sequence: Synthetic oligonucleotide
aggcauagucaagaaaugc

SEQ ID NO: 3199882 - RNA, 19 nt, Artificial Sequence
  Description of Artificial Sequence: Synthetic oligonucleotide
ugcaagcuuggacaagagg

SEQ ID NO: 3199883 - RNA, 19 nt, Artificial Sequence
  Description of Artificial Sequence: Synthetic oligonucleotide
uaucaucuguuauucuugc

SEQ ID NO: 3199884 - RNA, 19 nt, Artificial Sequence
  Description of Artificial Sequence: Synthetic oligonucleotide
uaguaaugguaacacuccc

SEQ ID NO: 3199885 - RNA, 19 nt, Artificial Sequence
  Description of Artificial Sequence: Synthetic oligonucleotide
uuggaggacaaauuaguaa

SEQ ID NO: 3199886 - RNA, 19 nt, Artificial Sequence
  Description of Artificial Sequence: Synthetic oligonucleotide
gucacugcaagcuuggaca

SEQ ID NO: 3199887 - RNA, 19 nt, Artificial Sequence
  Description of Artificial Sequence: Synthetic oligonucleotide
ucaugauuauuuugaaauc

SEQ ID NO: 3199888 - RNA, 19 nt, Artificial Sequence
  Description of Artificial Sequence: Synthetic oligonucleotide
aacauucuguucucuaaaa

SEQ ID NO: 3199889 - RNA, 19 nt, Artificial Sequence
  Description of Artificial Sequence: Synthetic oligonucleotide
auuucuacguuaucaucug

SEQ ID NO: 3199890 - RNA, 19 nt, Artificial Sequence
  Description of Artificial Sequence: Synthetic oligonucleotide
uauucuugcuuuuccggug

SEQ ID NO: 3199891 - RNA, 19 nt, Artificial Sequence
  Description of Artificial Sequence: Synthetic oligonucleotide
uuucuuucauguuuacuuc

SEQ ID NO: 3199892 - RNA, 19 nt, Artificial Sequence
  Description of Artificial Sequence: Synthetic oligonucleotide
uccgguguaggcauaguca

SEQ ID NO: 3199893 - RNA, 19 nt, Artificial Sequence
  Description of Artificial Sequence: Synthetic oligonucleotide
cuggaagaacauuucuacg

SEQ ID NO: 3199894 - RNA, 19 nt, Artificial Sequence
  Description of Artificial Sequence: Synthetic oligonucleotide
aaagucacugcaagcuugg

SEQ ID NO: 3199895 - RNA, 19 nt, Artificial Sequence
  Description of Artificial Sequence: Synthetic oligonucleotide
uucuuucauguuuacuuca

SEQ ID NO: 3199896 - RNA, 19 nt, Artificial Sequence
  Description of Artificial Sequence: Synthetic oligonucleotide
uuucaugauuauuuugaaa

SEQ ID NO: 3199897 - RNA, 19 nt, Artificial Sequence
  Description of Artificial Sequence: Synthetic oligonucleotide
aauauuuccaguuaacacc

SEQ ID NO: 3199898 - RNA, 19 nt, Artificial Sequence
  Description of Artificial Sequence: Synthetic oligonucleotide
aaucaaauaacugaaaggc

SEQ ID NO: 3199899 - RNA, 19 nt, Artificial Sequence
  Description of Artificial Sequence: Synthetic oligonucleotide
uauuauugaagccaggagg

SEQ ID NO: 3199900 - RNA, 19 nt, Artificial Sequence
  Description of Artificial Sequence: Synthetic oligonucleotide
cauauuaucacauugcacc

SEQ ID NO: 3199901 - RNA, 19 nt, Artificial Sequence
  Description of Artificial Sequence: Synthetic oligonucleotide
uacuguauaauuauaaaag

SEQ ID NO: 3199902 - RNA, 19 nt, Artificial Sequence
  Description of Artificial Sequence: Synthetic oligonucleotide
uguauaauuauaaaagaca

SEQ ID NO: 3199903 - RNA, 19 nt, Artificial Sequence
  Description of Artificial Sequence: Synthetic oligonucleotide
agaaauaagaaacauuuag

SEQ ID NO: 3199904 - RNA, 19 nt, Artificial Sequence
  Description of Artificial Sequence: Synthetic oligonucleotide
aaagaaauugcucugccag

SEQ ID NO: 3199905 - RNA, 19 nt, Artificial Sequence
  Description of Artificial Sequence: Synthetic oligonucleotide
aaacauuugucacaccacc

SEQ ID NO: 3199906 - RNA, 19 nt, Artificial Sequence
  Description of Artificial Sequence: Synthetic oligonucleotide
agauauaagacuucucugc

SEQ ID NO: 3199907 - RNA, 19 nt, Artificial Sequence
  Description of Artificial Sequence: Synthetic oligonucleotide
uuuuaaaggaucaaguaga

SEQ ID NO: 3199908 - RNA, 19 nt, Artificial Sequence
  Description of Artificial Sequence: Synthetic oligonucleotide
auaagcacuauacuaagac

SEQ ID NO: 3199909 - RNA, 19 nt, Artificial Sequence
  Description of Artificial Sequence: Synthetic oligonucleotide
aaaauugaauaacauguug

SEQ ID NO: 3199910 - RNA, 19 nt, Artificial Sequence
  Description of Artificial Sequence: Synthetic oligonucleotide
auaauuaaccaaaaguacc

SEQ ID NO: 3199911 - RNA, 19 nt, Artificial Sequence
  Description of Artificial Sequence: Synthetic oligonucleotide
aacacaguuccucuugugc

SEQ ID NO: 3199912 - RNA, 19 nt, Artificial Sequence
  Description of Artificial Sequence: Synthetic oligonucleotide
ugaagaauauacuagaaau

SEQ ID NO: 3199913 - RNA, 19 nt, Artificial Sequence
  Description of Artificial Sequence: Synthetic oligonucleotide
ucaacagaugcaaacacag

SEQ ID NO: 3199914 - RNA, 19 nt, Artificial Sequence
  Description of Artificial Sequence: Synthetic oligonucleotide
uuucugaagaauauacuag

SEQ ID NO: 3199915 - RNA, 19 nt, Artificial Sequence
  Description of Artificial Sequence: Synthetic oligonucleotide
aauacgaugaacauauuca

SEQ ID NO: 3199916 - RNA, 19 nt, Artificial Sequence
  Description of Artificial Sequence: Synthetic oligonucleotide
cacacuauucuuuuaaagg

SEQ ID NO: 3199917 - RNA, 19 nt, Artificial Sequence
  Description of Artificial Sequence: Synthetic oligonucleotide
aaccauuuucauuacaugu

SEQ ID NO: 3199918 - RNA, 19 nt, Artificial Sequence
  Description of Artificial Sequence: Synthetic oligonucleotide
ugucuuaacuuucugaaga

SEQ ID NO: 3199919 - RNA, 19 nt, Artificial Sequence
  Description of Artificial Sequence: Synthetic oligonucleotide
auaaaagacaaacauuugu

SEQ ID NO: 3199920 - RNA, 19 nt, Artificial Sequence
  Description of Artificial Sequence: Synthetic oligonucleotide
uaagaaacauuuagaaugc

SEQ ID NO: 3199921 - RNA, 19 nt, Artificial Sequence
  Description of Artificial Sequence: Synthetic oligonucleotide
uaauuaaccaaaaguaccu

SEQ ID NO: 3199922 - RNA, 19 nt, Artificial Sequence
  Description of Artificial Sequence: Synthetic oligonucleotide
uuggacaugaaacaugucu

SEQ ID NO: 3199923 - RNA, 19 nt, Artificial Sequence
  Description of Artificial Sequence: Synthetic oligonucleotide
guacauaugugcuaaaggc

SEQ ID NO: 3199924 - RNA, 19 nt, Artificial Sequence
  Description of Artificial Sequence: Synthetic oligonucleotide
ucaauaucaagcccucugg

SEQ ID NO: 3199925 - RNA, 19 nt, Artificial Sequence
  Description of Artificial Sequence: Synthetic oligonucleotide
ucugauaguacuuuaacua

SEQ ID NO: 3199926 - RNA, 19 nt, Artificial Sequence
  Description of Artificial Sequence: Synthetic oligonucleotide
aagaauauacuagaaauaa

SEQ ID NO: 3199927 - RNA, 19 nt, Artificial Sequence
  Description of Artificial Sequence: Synthetic oligonucleotide
ucugcaucaaaacuaugag

SEQ ID NO: 3199928 - RNA, 19 nt, Artificial Sequence
  Description of Artificial Sequence: Synthetic oligonucleotide
auuuagaaugcuuuaauau

SEQ ID NO: 3199929 - RNA, 19 nt, Artificial Sequence
  Description of Artificial Sequence: Synthetic oligonucleotide
uuuaacuagagguugugcu

SEQ ID NO: 3199930 - RNA, 19 nt, Artificial Sequence
  Description of Artificial Sequence: Synthetic oligonucleotide
ucuugugcuauuauugaag

SEQ ID NO: 3199931 - RNA, 19 nt, Artificial Sequence
  Description of Artificial Sequence: Synthetic oligonucleotide
aauacuguauaauuauaaa

SEQ ID NO: 3199932 - RNA, 19 nt, Artificial Sequence
  Description of Artificial Sequence: Synthetic oligonucleotide
aagacuuagcacuuggaca

SEQ ID NO: 3199933 - RNA, 19 nt, Artificial Sequence
  Description of Artificial Sequence: Synthetic oligonucleotide
uucagcaucucacauaacu

SEQ ID NO: 3199934 - RNA, 19 nt, Artificial Sequence
  Description of Artificial Sequence: Synthetic oligonucleotide
uuccacaacgcccaguacg

SEQ ID NO: 3199935 - RNA, 19 nt, Artificial Sequence
  Description of Artificial Sequence: Synthetic oligonucleotide
guuuuaugggaucauaagc

SEQ ID NO: 3199936 - RNA, 19 nt, Artificial Sequence
  Description of Artificial Sequence: Synthetic oligonucleotide
aauuagacccaauaauuaa

SEQ ID NO: 3199937 - RNA, 19 nt, Artificial Sequence
  Description of Artificial Sequence: Synthetic oligonucleotide
uagucgucaauguagcugg

SEQ ID NO: 3199938 - RNA, 19 nt, Artificial Sequence
  Description of Artificial Sequence: Synthetic oligonucleotide
cuguauaauuauaaaagac

SEQ ID NO: 3199939 - RNA, 19 nt, Artificial Sequence
  Description of Artificial Sequence: Synthetic oligonucleotide
ucaaauaacugaaaggcuu

SEQ ID NO: 3199940 - RNA, 19 nt, Artificial Sequence
  Description of Artificial Sequence: Synthetic oligonucleotide
agcaacaagaacugggcac

SEQ ID NO: 3199941 - RNA, 19 nt, Artificial Sequence
  Description of Artificial Sequence: Synthetic oligonucleotide
agaaugcuuuaauauuucc

SEQ ID NO: 3199942 - RNA, 19 nt, Artificial Sequence
  Description of Artificial Sequence: Synthetic oligonucleotide
acaaacauuugucacacca

SEQ ID NO: 3199943 - RNA, 19 nt, Artificial Sequence
  Description of Artificial Sequence: Synthetic oligonucleotide
aaggguugggaguaagaac

SEQ ID NO: 3199944 - RNA, 19 nt, Artificial Sequence
  Description of Artificial Sequence: Synthetic oligonucleotide
uguuuuaugggaucauaag

SEQ ID NO: 3199945 - RNA, 19 nt, Artificial Sequence
  Description of Artificial Sequence: Synthetic oligonucleotide
acuguauaauuauaaaaga

SEQ ID NO: 3199946 - RNA, 19 nt, Artificial Sequence
  Description of Artificial Sequence: Synthetic oligonucleotide
uuagaaugcuuuaauauuu

SEQ ID NO: 3199947 - RNA, 19 nt, Artificial Sequence
  Description of Artificial Sequence: Synthetic oligonucleotide
caauaauuaaccaaaagua

SEQ ID NO: 3199948 - RNA, 19 nt, Artificial Sequence
  Description of Artificial Sequence: Synthetic oligonucleotide
uuugcuuuaaucccaugac

SEQ ID NO: 3199949 - RNA, 19 nt, Artificial Sequence
  Description of Artificial Sequence: Synthetic oligonucleotide
ucaguaacugcaauguugu

SEQ ID NO: 3199950 - RNA, 19 nt, Artificial Sequence
  Description of Artificial Sequence: Synthetic oligonucleotide
gaacauuuucaauaucaag

SEQ ID NO: 3199951 - RNA, 19 nt, Artificial Sequence
  Description of Artificial Sequence: Synthetic oligonucleotide
aauaucaagcccucuggca

SEQ ID NO: 3199952 - RNA, 19 nt, Artificial Sequence
  Description of Artificial Sequence: Synthetic oligonucleotide
ugcaggaacauccuguuga

SEQ ID NO: 3199953 - RNA, 19 nt, Artificial Sequence
  Description of Artificial Sequence: Synthetic oligonucleotide
uguuguaacuuucagcauc

SEQ ID NO: 3199954 - RNA, 19 nt, Artificial Sequence
  Description of Artificial Sequence: Synthetic oligonucleotide
caaacaaccauuuucauua

SEQ ID NO: 3199955 - RNA, 19 nt, Artificial Sequence
  Description of Artificial Sequence: Synthetic oligonucleotide
aaaugauuaucagauucag

SEQ ID NO: 3199956 - RNA, 19 nt, Artificial Sequence
  Description of Artificial Sequence: Synthetic oligonucleotide
auuuguaucaguaacugca

SEQ ID NO: 3199957 - RNA, 19 nt, Artificial Sequence
  Description of Artificial Sequence: Synthetic oligonucleotide
uacauaugugcuaaaggca

SEQ ID NO: 3199958 - RNA, 19 nt, Artificial Sequence
  Description of Artificial Sequence: Synthetic oligonucleotide
uaagacuuagcacuuggac

SEQ ID NO: 3199959 - RNA, 19 nt, Artificial Sequence
  Description of Artificial Sequence: Synthetic oligonucleotide
auaucaagcccucuggcag

SEQ ID NO: 3199960 - RNA, 19 nt, Artificial Sequence
  Description of Artificial Sequence: Synthetic oligonucleotide
uuaacuuucugaagaauau

SEQ ID NO: 3199961 - RNA, 19 nt, Artificial Sequence
  Description of Artificial Sequence: Synthetic oligonucleotide
uucugaagaauauacuaga

SEQ ID NO: 3199962 - RNA, 19 nt, Artificial Sequence
  Description of Artificial Sequence: Synthetic oligonucleotide
agaacaggagauauaagac

SEQ ID NO: 3199963 - RNA, 19 nt, Artificial Sequence
  Description of Artificial Sequence: Synthetic oligonucleotide
uauugcuuguuuuauggga

SEQ ID NO: 3199964 - RNA, 19 nt, Artificial Sequence
  Description of Artificial Sequence: Synthetic oligonucleotide
auacuguauaauuauaaaa

SEQ ID NO: 3199965 - RNA, 19 nt, Artificial Sequence
  Description of Artificial Sequence: Synthetic oligonucleotide
uauaauuauaaaagacaaa

SEQ ID NO: 3199966 - RNA, 19 nt, Artificial Sequence
  Description of Artificial Sequence: Synthetic oligonucleotide
acuaagacuuagcacuugg

SEQ ID NO: 3199967 - RNA, 19 nt, Artificial Sequence
  Description of Artificial Sequence: Synthetic oligonucleotide
aacuagucgucaauguagc

SEQ ID NO: 3199968 - RNA, 19 nt, Artificial Sequence
  Description of Artificial Sequence: Synthetic oligonucleotide
aaaagaaauugcucugcca

SEQ ID NO: 3199969 - RNA, 19 nt, Artificial Sequence
  Description of Artificial Sequence: Synthetic oligonucleotide
ucaucgacuggauugggag

SEQ ID NO: 3199970 - RNA, 19 nt, Artificial Sequence
  Description of Artificial Sequence: Synthetic oligonucleotide
ugcuuuaaucccaugacuc

SEQ ID NO: 3199971 - RNA, 19 nt, Artificial Sequence
  Description of Artificial Sequence: Synthetic oligonucleotide
gaaauaagaaacauuuaga

SEQ ID NO: 3199972 - RNA, 19 nt, Artificial Sequence
  Description of Artificial Sequence: Synthetic oligonucleotide
cugauaguacuuuaacuag

SEQ ID NO: 3199973 - RNA, 19 nt, Artificial Sequence
  Description of Artificial Sequence: Synthetic oligonucleotide
gauaguacuuuaacuagag

SEQ ID NO: 3199974 - RNA, 19 nt, Artificial Sequence
  Description of Artificial Sequence: Synthetic oligonucleotide
aaauacuguauaauuauaa

SEQ ID NO: 3199975 - RNA, 19 nt, Artificial Sequence
  Description of Artificial Sequence: Synthetic oligonucleotide
cuugugcuauuauugaagc

SEQ ID NO: 3199976 - RNA, 19 nt, Artificial Sequence
  Description of Artificial Sequence: Synthetic oligonucleotide
ucauaagcacuauacuaag

SEQ ID NO: 3199977 - RNA, 19 nt, Artificial Sequence
  Description of Artificial Sequence: Synthetic oligonucleotide
aggaacauccuguugagca

SEQ ID NO: 3199978 - RNA, 19 nt, Artificial Sequence
  Description of Artificial Sequence: Synthetic oligonucleotide
aauuaaccaaaaguaccuc

SEQ ID NO: 3199979 - RNA, 19 nt, Artificial Sequence
  Description of Artificial Sequence: Synthetic oligonucleotide
uagccaugcaggaacaucc

SEQ ID NO: 3199980 - RNA, 19 nt, Artificial Sequence
  Description of Artificial Sequence: Synthetic oligonucleotide
gagauauaagacuucucug

SEQ ID NO: 3199981 - RNA, 19 nt, Artificial Sequence
  Description of Artificial Sequence: Synthetic oligonucleotide
uuucauuacaugucugaug

SEQ ID NO: 3199982 - RNA, 19 nt, Artificial Sequence
  Description of Artificial Sequence: Synthetic oligonucleotide
uugagcaucugauaguacu

SEQ ID NO: 3199983 - RNA, 19 nt, Artificial Sequence
  Description of Artificial Sequence: Synthetic oligonucleotide
aguagcaacaagaacuggg

SEQ ID NO: 3199984 - RNA, 19 nt, Artificial Sequence
  Description of Artificial Sequence: Synthetic oligonucleotide
auugaauaacauguugaac

SEQ ID NO: 3199985 - RNA, 19 nt, Artificial Sequence
  Description of Artificial Sequence: Synthetic oligonucleotide
uguaacuuucagcaucuca

SEQ ID NO: 3199986 - RNA, 19 nt, Artificial Sequence
  Description of Artificial Sequence: Synthetic oligonucleotide
aucauauuaucacauugca

SEQ ID NO: 3199987 - RNA, 19 nt, Artificial Sequence
  Description of Artificial Sequence: Synthetic oligonucleotide
ugauaguacuuuaacuaga

SEQ ID NO: 3199988 - RNA, 19 nt, Artificial Sequence
  Description of Artificial Sequence: Synthetic oligonucleotide
guaagaacagaagaacagg

SEQ ID NO: 3199989 - RNA, 19 nt, Artificial Sequence
  Description of Artificial Sequence: Synthetic oligonucleotide
cacuguuucaugaaaauca

SEQ ID NO: 3199990 - RNA, 19 nt, Artificial Sequence
  Description of Artificial Sequence: Synthetic oligonucleotide
caguauuuccacaacgccc

SEQ ID NO: 3199991 - RNA, 19 nt, Artificial Sequence
  Description of Artificial Sequence: Synthetic oligonucleotide
auguugaacauuuucaaua

SEQ ID NO: 3199992 - RNA, 19 nt, Artificial Sequence
  Description of Artificial Sequence: Synthetic oligonucleotide
auuaaccaaaaguaccuca

SEQ ID NO: 3199993 - RNA, 19 nt, Artificial Sequence
  Description of Artificial Sequence: Synthetic oligonucleotide
uaacauguugaacauuuuc

SEQ ID NO: 3199994 - RNA, 19 nt, Artificial Sequence
  Description of Artificial Sequence: Synthetic oligonucleotide
auuuucaauaucaagcccu

SEQ ID NO: 3199995 - RNA, 19 nt, Artificial Sequence
  Description of Artificial Sequence: Synthetic oligonucleotide
cuauacuaagacuuagcac

SEQ ID NO: 3199996 - RNA, 19 nt, Artificial Sequence
  Description of Artificial Sequence: Synthetic oligonucleotide
acacacuauucuuuuaaag

SEQ ID NO: 3199997 - RNA, 19 nt, Artificial Sequence
  Description of Artificial Sequence: Synthetic oligonucleotide
aauagaauaggccugcugc

SEQ ID NO: 3199998 - RNA, 19 nt, Artificial Sequence
  Description of Artificial Sequence: Synthetic oligonucleotide
aaugaagaaacacaaauag

SEQ ID NO: 3199999 - RNA, 19 nt, Artificial Sequence
  Description of Artificial Sequence: Synthetic oligonucleotide
aaaaugaagaaacacaaau

SEQ ID NO: 3200000 - RNA, 19 nt, Artificial Sequence
  Description of Artificial Sequence: Synthetic oligonucleotide
ugaagaaacacaaauagaa

SEQ ID NO: 3200001 - RNA, 19 nt, Artificial Sequence
  Description of Artificial Sequence: Synthetic oligonucleotide
ugaaauauaucucaacagc

SEQ ID NO: 3200002 - RNA, 19 nt, Artificial Sequence
  Description of Artificial Sequence: Synthetic oligonucleotide
uaugaaauauaucucaaca

SEQ ID NO: 3200003 - RNA, 19 nt, Artificial Sequence
  Description of Artificial Sequence: Synthetic oligonucleotide
aauauaucucaacagcauc

SEQ ID NO: 3200004 - RNA, 19 nt, Artificial Sequence
  Description of Artificial Sequence: Synthetic oligonucleotide
uguacaaaagucuucaaug

SEQ ID NO: 3200005 - RNA, 19 nt, Artificial Sequence
  Description of Artificial Sequence: Synthetic oligonucleotide
uuuuaugaaauauaucuca

SEQ ID NO: 3200006 - RNA, 19 nt, Artificial Sequence
  Description of Artificial Sequence: Synthetic oligonucleotide
uuucagaaaaugaagaaac

SEQ ID NO: 3200007 - RNA, 19 nt, Artificial Sequence
  Description of Artificial Sequence: Synthetic oligonucleotide
aacacaaauagaauaggcc

SEQ ID NO: 3200008 - RNA, 19 nt, Artificial Sequence
  Description of Artificial Sequence: Synthetic oligonucleotide
acuuuagcaaucuguaagc

SEQ ID NO: 3200009 - RNA, 19 nt, Artificial Sequence
  Description of Artificial Sequence: Synthetic oligonucleotide
uuugauauguacuaauacu

SEQ ID NO: 3200010 - RNA, 19 nt, Artificial Sequence
  Description of Artificial Sequence: Synthetic oligonucleotide
uaagcuuuagcuaguagag

SEQ ID NO: 3200011 - RNA, 19 nt, Artificial Sequence
  Description of Artificial Sequence: Synthetic oligonucleotide
uuuuggaugagccauguac

SEQ ID NO: 3200012 - RNA, 19 nt, Artificial Sequence
  Description of Artificial Sequence: Synthetic oligonucleotide
ugugccauaacccuuggcc

SEQ ID NO: 3200013 - RNA, 19 nt, Artificial Sequence
  Description of Artificial Sequence: Synthetic oligonucleotide
ucucauagucuucagagcc

SEQ ID NO: 3200014 - RNA, 19 nt, Artificial Sequence
  Description of Artificial Sequence: Synthetic oligonucleotide
aagaaacacaaauagaaua

SEQ ID NO: 3200015 - RNA, 19 nt, Artificial Sequence
  Description of Artificial Sequence: Synthetic oligonucleotide
ugauuucagaaaaugaaga

SEQ ID NO: 3200016 - RNA, 19 nt, Artificial Sequence
  Description of Artificial Sequence: Synthetic oligonucleotide
gacuuuagcaaucuguaag

SEQ ID NO: 3200017 - RNA, 19 nt, Artificial Sequence
  Description of Artificial Sequence: Synthetic oligonucleotide
guuuucaccauuuuggaug

SEQ ID NO: 3200018 - RNA, 19 nt, Artificial Sequence
  Description of Artificial Sequence: Synthetic oligonucleotide
cugguuuucaccauuuugg

SEQ ID NO: 3200019 - RNA, 19 nt, Artificial Sequence
  Description of Artificial Sequence: Synthetic oligonucleotide
uucaguguagacuuuagca

SEQ ID NO: 3200020 - RNA, 19 nt, Artificial Sequence
  Description of Artificial Sequence: Synthetic oligonucleotide
uucauauaggcuaaucagc

SEQ ID NO: 3200021 - RNA, 19 nt, Artificial Sequence
  Description of Artificial Sequence: Synthetic oligonucleotide
uccaccacagucaucauag

SEQ ID NO: 3200022 - RNA, 19 nt, Artificial Sequence
  Description of Artificial Sequence: Synthetic oligonucleotide
augaaauauaucucaacag

SEQ ID NO: 3200023 - RNA, 19 nt, Artificial Sequence
  Description of Artificial Sequence: Synthetic oligonucleotide
uaacccuuggccaugauga

SEQ ID NO: 3200024 - RNA, 19 nt, Artificial Sequence
  Description of Artificial Sequence: Synthetic oligonucleotide
ucuucauauaggcuaauca

SEQ ID NO: 3200025 - RNA, 19 nt, Artificial Sequence
  Description of Artificial Sequence: Synthetic oligonucleotide
cuucauauaggcuaaucag

SEQ ID NO: 3200026 - RNA, 19 nt, Artificial Sequence
  Description of Artificial Sequence: Synthetic oligonucleotide
auaagcuuuagcuaguaga

SEQ ID NO: 3200027 - RNA, 19 nt, Artificial Sequence
  Description of Artificial Sequence: Synthetic oligonucleotide
acucucauagucuucagag

SEQ ID NO: 3200028 - RNA, 19 nt, Artificial Sequence
  Description of Artificial Sequence: Synthetic oligonucleotide
auauaucucaacagcaucc

SEQ ID NO: 3200029 - RNA, 19 nt, Artificial Sequence
  Description of Artificial Sequence: Synthetic oligonucleotide
uuuuccaccacagucauca

SEQ ID NO: 3200030 - RNA, 19 nt, Artificial Sequence
  Description of Artificial Sequence: Synthetic oligonucleotide
guacaaaagucuucaaugg

SEQ ID NO: 3200031 - RNA, 19 nt, Artificial Sequence
  Description of Artificial Sequence: Synthetic oligonucleotide
uuagcaaucuguaagccuc

SEQ ID NO: 3200032 - RNA, 19 nt, Artificial Sequence
  Description of Artificial Sequence: Synthetic oligonucleotide
ucauauaggcuaaucagcu

SEQ ID NO: 3200033 - RNA, 19 nt, Artificial Sequence
  Description of Artificial Sequence: Synthetic oligonucleotide
uugauauguacuaauacuu

SEQ ID NO: 3200034 - RNA, 19 nt, Artificial Sequence
  Description of Artificial Sequence: Synthetic oligonucleotide
aaagguuucggcuacuuuu

SEQ ID NO: 3200035 - RNA, 19 nt, Artificial Sequence
  Description of Artificial Sequence: Synthetic oligonucleotide
gaugacacuaccaauugcc

SEQ ID NO: 3200036 - RNA, 19 nt, Artificial Sequence
  Description of Artificial Sequence: Synthetic oligonucleotide
ugagccauguacaaaaguc

SEQ ID NO: 3200037 - RNA, 19 nt, Artificial Sequence
  Description of Artificial Sequence: Synthetic oligonucleotide
gauuucuucauauaggcua

SEQ ID NO: 3200038 - RNA, 19 nt, Artificial Sequence
  Description of Artificial Sequence: Synthetic oligonucleotide
agaaacacaaauagaauag

SEQ ID NO: 3200039 - RNA, 19 nt, Artificial Sequence
  Description of Artificial Sequence: Synthetic oligonucleotide
caaucuguaagccuccugg

SEQ ID NO: 3200040 - RNA, 19 nt, Artificial Sequence
  Description of Artificial Sequence: Synthetic oligonucleotide
aacagcaucccugugcugg

SEQ ID NO: 3200041 - RNA, 19 nt, Artificial Sequence
  Description of Artificial Sequence: Synthetic oligonucleotide
cugauuucagaaaaugaag

SEQ ID NO: 3200042 - RNA, 19 nt, Artificial Sequence
  Description of Artificial Sequence: Synthetic oligonucleotide
aauacuggauggcuugcuc

SEQ ID NO: 3200043 - RNA, 19 nt, Artificial Sequence
  Description of Artificial Sequence: Synthetic oligonucleotide
aaucugagcgauuucuuca

SEQ ID NO: 3200044 - RNA, 19 nt, Artificial Sequence
  Description of Artificial Sequence: Synthetic oligonucleotide
auauaggcuaaucagcucu

SEQ ID NO: 3200045 - RNA, 19 nt, Artificial Sequence
  Description of Artificial Sequence: Synthetic oligonucleotide
uggcauaagcuuuagcuag

SEQ ID NO: 3200046 - RNA, 19 nt, Artificial Sequence
  Description of Artificial Sequence: Synthetic oligonucleotide
uuuggaugagccauguaca

SEQ ID NO: 3200047 - RNA, 19 nt, Artificial Sequence
  Description of Artificial Sequence: Synthetic oligonucleotide
accaauugccuuuucaaag

SEQ ID NO: 3200048 - RNA, 19 nt, Artificial Sequence
  Description of Artificial Sequence: Synthetic oligonucleotide
uuuaugaaauauaucucaa

SEQ ID NO: 3200049 - RNA, 19 nt, Artificial Sequence
  Description of Artificial Sequence: Synthetic oligonucleotide
caaaagucuucaauggcgg

SEQ ID NO: 3200050 - RNA, 19 nt, Artificial Sequence
  Description of Artificial Sequence: Synthetic oligonucleotide
acaaaagucuucaauggcg

SEQ ID NO: 3200051 - RNA, 19 nt, Artificial Sequence
  Description of Artificial Sequence: Synthetic oligonucleotide
acaaauagaauaggccugc

SEQ ID NO: 3200052 - RNA, 19 nt, Artificial Sequence
  Description of Artificial Sequence: Synthetic oligonucleotide
uacaaaagucuucaauggc

SEQ ID NO: 3200053 - RNA, 19 nt, Artificial Sequence
  Description of Artificial Sequence: Synthetic oligonucleotide
auucaguguagacuuuagc

SEQ ID NO: 3200054 - RNA, 19 nt, Artificial Sequence
  Description of Artificial Sequence: Synthetic oligonucleotide
gaaacacaaauagaauagg

SEQ ID NO: 3200055 - RNA, 19 nt, Artificial Sequence
  Description of Artificial Sequence: Synthetic oligonucleotide
ugcugcaaauacuggaugg

SEQ ID NO: 3200056 - RNA, 19 nt, Artificial Sequence
  Description of Artificial Sequence: Synthetic oligonucleotide
uaucucaacagcaucccug

SEQ ID NO: 3200057 - RNA, 19 nt, Artificial Sequence
  Description of Artificial Sequence: Synthetic oligonucleotide
uacuuuuccaccacaguca

SEQ ID NO: 3200058 - RNA, 19 nt, Artificial Sequence
  Description of Artificial Sequence: Synthetic oligonucleotide
ucuucaauggcggugagac

SEQ ID NO: 3200059 - RNA, 19 nt, Artificial Sequence
  Description of Artificial Sequence: Synthetic oligonucleotide
ucaccauuuuggaugagcc

SEQ ID NO: 3200060 - RNA, 19 nt, Artificial Sequence
  Description of Artificial Sequence: Synthetic oligonucleotide
aaauagaauaggccugcug

SEQ ID NO: 3200061 - RNA, 19 nt, Artificial Sequence
  Description of Artificial Sequence: Synthetic oligonucleotide
agcuuuagcuaguagagca

SEQ ID NO: 3200062 - RNA, 19 nt, Artificial Sequence
  Description of Artificial Sequence: Synthetic oligonucleotide
gaaauauaucucaacagca

SEQ ID NO: 3200063 - RNA, 19 nt, Artificial Sequence
  Description of Artificial Sequence: Synthetic oligonucleotide
guuugauauguacuaauac

SEQ ID NO: 3200064 - RNA, 19 nt, Artificial Sequence
  Description of Artificial Sequence: Synthetic oligonucleotide
uuaugaaauauaucucaac

SEQ ID NO: 3200065 - RNA, 19 nt, Artificial Sequence
  Description of Artificial Sequence: Synthetic oligonucleotide
gagcgauuucuucauauag

SEQ ID NO: 3200066 - RNA, 19 nt, Artificial Sequence
  Description of Artificial Sequence: Synthetic oligonucleotide
uucagaaaaugaagaaaca

SEQ ID NO: 3200067 - RNA, 19 nt, Artificial Sequence
  Description of Artificial Sequence: Synthetic oligonucleotide
ucugaugugccauaacccu

SEQ ID NO: 3200068 - RNA, 19 nt, Artificial Sequence
  Description of Artificial Sequence: Synthetic oligonucleotide
agaaaaugaagaaacacaa

SEQ ID NO: 3200069 - RNA, 19 nt, Artificial Sequence
  Description of Artificial Sequence: Synthetic oligonucleotide
ucaacagcaucccugugcu

SEQ ID NO: 3200070 - RNA, 19 nt, Artificial Sequence
  Description of Artificial Sequence: Synthetic oligonucleotide
uuuagcaaucuguaagccu

SEQ ID NO: 3200071 - RNA, 19 nt, Artificial Sequence
  Description of Artificial Sequence: Synthetic oligonucleotide
uuagcuaguagagcacucg

SEQ ID NO: 3200072 - RNA, 19 nt, Artificial Sequence
  Description of Artificial Sequence: Synthetic oligonucleotide
gauuucagaaaaugaagaa

SEQ ID NO: 3200073 - RNA, 19 nt, Artificial Sequence
  Description of Artificial Sequence: Synthetic oligonucleotide
ucaugguuccuccucagcu

SEQ ID NO: 3200074 - RNA, 19 nt, Artificial Sequence
  Description of Artificial Sequence: Synthetic oligonucleotide
uagacuuuagcaaucugua

SEQ ID NO: 3200075 - RNA, 19 nt, Artificial Sequence
  Description of Artificial Sequence: Synthetic oligonucleotide
auggcuugcucaugguucc

SEQ ID NO: 3200076 - RNA, 19 nt, Artificial Sequence
  Description of Artificial Sequence: Synthetic oligonucleotide
aagcuuuagcuaguagagc

SEQ ID NO: 3200077 - RNA, 19 nt, Artificial Sequence
  Description of Artificial Sequence: Synthetic oligonucleotide
cuacuuuuccaccacaguc

SEQ ID NO: 3200078 - RNA, 19 nt, Artificial Sequence
  Description of Artificial Sequence: Synthetic oligonucleotide
ugugcugggauucuccgga

SEQ ID NO: 3200079 - RNA, 19 nt, Artificial Sequence
  Description of Artificial Sequence: Synthetic oligonucleotide
uuuucaccauuuuggauga

SEQ ID NO: 3200080 - RNA, 19 nt, Artificial Sequence
  Description of Artificial Sequence: Synthetic oligonucleotide
uguuugauauguacuaaua

SEQ ID NO: 3200081 - RNA, 19 nt, Artificial Sequence
  Description of Artificial Sequence: Synthetic oligonucleotide
aagccuccugguuuucacc

SEQ ID NO: 3200082 - RNA, 19 nt, Artificial Sequence
  Description of Artificial Sequence: Synthetic oligonucleotide
cuaaucagcucugaugugc

SEQ ID NO: 3200083 - RNA, 19 nt, Artificial Sequence
  Description of Artificial Sequence: Synthetic oligonucleotide
ugaugugccauaacccuug

SEQ ID NO: 3200084 - RNA, 19 nt, Artificial Sequence
  Description of Artificial Sequence: Synthetic oligonucleotide
aaagucuucaauggcggug

SEQ ID NO: 3200085 - RNA, 19 nt, Artificial Sequence
  Description of Artificial Sequence: Synthetic oligonucleotide
gaugccagaauucagugua

SEQ ID NO: 3200086 - RNA, 19 nt, Artificial Sequence
  Description of Artificial Sequence: Synthetic oligonucleotide
auaggccugcugcaaauac

SEQ ID NO: 3200087 - RNA, 19 nt, Artificial Sequence
  Description of Artificial Sequence: Synthetic oligonucleotide
cacaaauagaauaggccug

SEQ ID NO: 3200088 - RNA, 19 nt, Artificial Sequence
  Description of Artificial Sequence: Synthetic oligonucleotide
uucaauggcggugagacuc

SEQ ID NO: 3200089 - RNA, 19 nt, Artificial Sequence
  Description of Artificial Sequence: Synthetic oligonucleotide
aaaugaagaaacacaaaua

SEQ ID NO: 3200090 - RNA, 19 nt, Artificial Sequence
  Description of Artificial Sequence: Synthetic oligonucleotide
aaauauaucucaacagcau

SEQ ID NO: 3200091 - RNA, 19 nt, Artificial Sequence
  Description of Artificial Sequence: Synthetic oligonucleotide
ucauagaugccagaauuca

SEQ ID NO: 3200092 - RNA, 19 nt, Artificial Sequence
  Description of Artificial Sequence: Synthetic oligonucleotide
cucugaugugccauaaccc

SEQ ID NO: 3200093 - RNA, 19 nt, Artificial Sequence
  Description of Artificial Sequence: Synthetic oligonucleotide
acagucaucauagaugcca

SEQ ID NO: 3200094 - RNA, 19 nt, Artificial Sequence
  Description of Artificial Sequence: Synthetic oligonucleotide
uaaucagcucugaugugcc

SEQ ID NO: 3200095 - RNA, 19 nt, Artificial Sequence
  Description of Artificial Sequence: Synthetic oligonucleotide
uauaucucaacagcauccc

SEQ ID NO: 3200096 - RNA, 19 nt, Artificial Sequence
  Description of Artificial Sequence: Synthetic oligonucleotide
cagcugcucaaucugagcg

SEQ ID NO: 3200097 - RNA, 19 nt, Artificial Sequence
  Description of Artificial Sequence: Synthetic oligonucleotide
aauaauaugauuuucuugu

SEQ ID NO: 3200098 - RNA, 19 nt, Artificial Sequence
  Description of Artificial Sequence: Synthetic oligonucleotide
uauauugccaaacugagca

SEQ ID NO: 3200099 - RNA, 19 nt, Artificial Sequence
  Description of Artificial Sequence: Synthetic oligonucleotide
aagaaaacugaacccaacc

SEQ ID NO: 3200100 - RNA, 19 nt, Artificial Sequence
  Description of Artificial Sequence: Synthetic oligonucleotide
uacuccaucaauaauauga

SEQ ID NO: 3200101 - RNA, 19 nt, Artificial Sequence
  Description of Artificial Sequence: Synthetic oligonucleotide
uuuuauauugccaaacuga

SEQ ID NO: 3200102 - RNA, 19 nt, Artificial Sequence
  Description of Artificial Sequence: Synthetic oligonucleotide
aauaugauuuucuuguugu

SEQ ID NO: 3200103 - RNA, 19 nt, Artificial Sequence
  Description of Artificial Sequence: Synthetic oligonucleotide
uuuauauugccaaacugag

SEQ ID NO: 3200104 - RNA, 19 nt, Artificial Sequence
  Description of Artificial Sequence: Synthetic oligonucleotide
aaaauguuuucucagcuca

SEQ ID NO: 3200105 - RNA, 19 nt, Artificial Sequence
  Description of Artificial Sequence: Synthetic oligonucleotide
uuaacauccaucuuuacuc

SEQ ID NO: 3200106 - RNA, 19 nt, Artificial Sequence
  Description of Artificial Sequence: Synthetic oligonucleotide
agaaaacugaacccaaccc

SEQ ID NO: 3200107 - RNA, 19 nt, Artificial Sequence
  Description of Artificial Sequence: Synthetic oligonucleotide
aacugaacccaacccaugc

SEQ ID NO: 3200108 - RNA, 19 nt, Artificial Sequence
  Description of Artificial Sequence: Synthetic oligonucleotide
uuuaacauccaucuuuacu

SEQ ID NO: 3200109 - RNA, 19 nt, Artificial Sequence
  Description of Artificial Sequence: Synthetic oligonucleotide
uccaucaauaauaugauuu

SEQ ID NO: 3200110 - RNA, 19 nt, Artificial Sequence
  Description of Artificial Sequence: Synthetic oligonucleotide
cucugaagaaaacugaacc

SEQ ID NO: 3200111 - RNA, 19 nt, Artificial Sequence
  Description of Artificial Sequence: Synthetic oligonucleotide
agcaaaauguuuucucagc

SEQ ID NO: 3200112 - RNA, 19 nt, Artificial Sequence
  Description of Artificial Sequence: Synthetic oligonucleotide
ucugaagaaaacugaaccc

SEQ ID NO: 3200113 - RNA, 19 nt, Artificial Sequence
  Description of Artificial Sequence: Synthetic oligonucleotide
uuguagugcauucugaagu

SEQ ID NO: 3200114 - RNA, 19 nt, Artificial Sequence
  Description of Artificial Sequence: Synthetic oligonucleotide
ucaaaagguacauuacacc

SEQ ID NO: 3200115 - RNA, 19 nt, Artificial Sequence
  Description of Artificial Sequence: Synthetic oligonucleotide
uaauaugauuuucuuguug

SEQ ID NO: 3200116 - RNA, 19 nt, Artificial Sequence
  Description of Artificial Sequence: Synthetic oligonucleotide
ucugucaaaagguacauua

SEQ ID NO: 3200117 - RNA, 19 nt, Artificial Sequence
  Description of Artificial Sequence: Synthetic oligonucleotide
uguuuucucagcucacucg

SEQ ID NO: 3200118 - RNA, 19 nt, Artificial Sequence
  Description of Artificial Sequence: Synthetic oligonucleotide
ugucaaaagguacauuaca

SEQ ID NO: 3200119 - RNA, 19 nt, Artificial Sequence
  Description of Artificial Sequence: Synthetic oligonucleotide
uuucucagcucacucgucg

SEQ ID NO: 3200120 - RNA, 19 nt, Artificial Sequence
  Description of Artificial Sequence: Synthetic oligonucleotide
uaugauuuucuuguuguag

SEQ ID NO: 3200121 - RNA, 19 nt, Artificial Sequence
  Description of Artificial Sequence: Synthetic oligonucleotide
aacugagcaaaauguuuuc

SEQ ID NO: 3200122 - RNA, 19 nt, Artificial Sequence
  Description of Artificial Sequence: Synthetic oligonucleotide
ugagcaaaauguuuucuca

SEQ ID NO: 3200123 - RNA, 19 nt, Artificial Sequence
  Description of Artificial Sequence: Synthetic oligonucleotide
uuuacuccaucaauaauau

SEQ ID NO: 3200124 - RNA, 19 nt, Artificial Sequence
  Description of Artificial Sequence: Synthetic oligonucleotide
gaaaacugaacccaaccca

SEQ ID NO: 3200125 - RNA, 19 nt, Artificial Sequence
  Description of Artificial Sequence: Synthetic oligonucleotide
caauaauaugauuuucuug

SEQ ID NO: 3200126 - RNA, 19 nt, Artificial Sequence
  Description of Artificial Sequence: Synthetic oligonucleotide
aaagguacauuacaccuuu

SEQ ID NO: 3200127 - RNA, 19 nt, Artificial Sequence
  Description of Artificial Sequence: Synthetic oligonucleotide
auuuucuuguuguagugca

SEQ ID NO: 3200128 - RNA, 19 nt, Artificial Sequence
  Description of Artificial Sequence: Synthetic oligonucleotide
ugcauucugaaguucuucc

SEQ ID NO: 3200129 - RNA, 19 nt, Artificial Sequence
  Description of Artificial Sequence: Synthetic oligonucleotide
uuauauugccaaacugagc

SEQ ID NO: 3200130 - RNA, 19 nt, Artificial Sequence
  Description of Artificial Sequence: Synthetic oligonucleotide
ugccaaacugagcaaaaug

SEQ ID NO: 3200131 - RNA, 19 nt, Artificial Sequence
  Description of Artificial Sequence: Synthetic oligonucleotide
cuuccucugaagaaaacug

SEQ ID NO: 3200132 - RNA, 19 nt, Artificial Sequence
  Description of Artificial Sequence: Synthetic oligonucleotide
augauuuucuuguuguagu

SEQ ID NO: 3200133 - RNA, 19 nt, Artificial Sequence
  Description of Artificial Sequence: Synthetic oligonucleotide
gagcaaaauguuuucucag

SEQ ID NO: 3200134 - RNA, 19 nt, Artificial Sequence
  Description of Artificial Sequence: Synthetic oligonucleotide
ucaauaauaugauuuucuu

SEQ ID NO: 3200135 - RNA, 19 nt, Artificial Sequence
  Description of Artificial Sequence: Synthetic oligonucleotide
cuuuacuccaucaauaaua

SEQ ID NO: 3200136 - RNA, 19 nt, Artificial Sequence
  Description of Artificial Sequence: Synthetic oligonucleotide
ugauuuucuuguuguagug

SEQ ID NO: 3200137 - RNA, 19 nt, Artificial Sequence
  Description of Artificial Sequence: Synthetic oligonucleotide
acugaacccaacccaugcc

SEQ ID NO: 3200138 - RNA, 19 nt, Artificial Sequence
  Description of Artificial Sequence: Synthetic oligonucleotide
agcuuuaacauccaucuuu

SEQ ID NO: 3200139 - RNA, 19 nt, Artificial Sequence
  Description of Artificial Sequence: Synthetic oligonucleotide
aauucuccugacgaaagca

SEQ ID NO: 3200140 - RNA, 19 nt, Artificial Sequence
  Description of Artificial Sequence: Synthetic oligonucleotide
ugaaguucuuccucugaag

SEQ ID NO: 3200141 - RNA, 19 nt, Artificial Sequence
  Description of Artificial Sequence: Synthetic oligonucleotide
gaaguucuuccucugaaga

SEQ ID NO: 3200142 - RNA, 19 nt, Artificial Sequence
  Description of Artificial Sequence: Synthetic oligonucleotide
ugaagaaaacugaacccaa

SEQ ID NO: 3200143 - RNA, 19 nt, Artificial Sequence
  Description of Artificial Sequence: Synthetic oligonucleotide
aucaauaauaugauuuucu

SEQ ID NO: 3200144 - RNA, 19 nt, Artificial Sequence
  Description of Artificial Sequence: Synthetic oligonucleotide
uaacauccaucuuuacucc

SEQ ID NO: 3200145 - RNA, 19 nt, Artificial Sequence
  Description of Artificial Sequence: Synthetic oligonucleotide
cuuguuguagugcauucug

SEQ ID NO: 3200146 - RNA, 19 nt, Artificial Sequence
  Description of Artificial Sequence: Synthetic oligonucleotide
gauuuucuuguuguagugc

SEQ ID NO: 3200147 - RNA, 19 nt, Artificial Sequence
  Description of Artificial Sequence: Synthetic oligonucleotide
auguuuucucagcucacuc

SEQ ID NO: 3200148 - RNA, 19 nt, Artificial Sequence
  Description of Artificial Sequence: Synthetic oligonucleotide
aaauguuuucucagcucac

SEQ ID NO: 3200149 - RNA, 19 nt, Artificial Sequence
  Description of Artificial Sequence: Synthetic oligonucleotide
uuccucugaagaaaacuga

SEQ ID NO: 3200150 - RNA, 19 nt, Artificial Sequence
  Description of Artificial Sequence: Synthetic oligonucleotide
uguuguagugcauucugaa

SEQ ID NO: 3200151 - RNA, 19 nt, Artificial Sequence
  Description of Artificial Sequence: Synthetic oligonucleotide
cagucucucugucaaaagg

SEQ ID NO: 3200152 - RNA, 19 nt, Artificial Sequence
  Description of Artificial Sequence: Synthetic oligonucleotide
uagugcauucugaaguucu

SEQ ID NO: 3200153 - RNA, 19 nt, Artificial Sequence
  Description of Artificial Sequence: Synthetic oligonucleotide
guuguagugcauucugaag

SEQ ID NO: 3200154 - RNA, 19 nt, Artificial Sequence
  Description of Artificial Sequence: Synthetic oligonucleotide
aaagccagucucucuguca

SEQ ID NO: 3200155 - RNA, 19 nt, Artificial Sequence
  Description of Artificial Sequence: Synthetic oligonucleotide
ucugugaaagccagucucu

SEQ ID NO: 3200156 - RNA, 19 nt, Artificial Sequence
  Description of Artificial Sequence: Synthetic oligonucleotide
auucugaaguucuuccucu

SEQ ID NO: 3200157 - RNA, 19 nt, Artificial Sequence
  Description of Artificial Sequence: Synthetic oligonucleotide
aaaacugaacccaacccau

SEQ ID NO: 3200158 - RNA, 19 nt, Artificial Sequence
  Description of Artificial Sequence: Synthetic oligonucleotide
aaacugagcaaaauguuuu

SEQ ID NO: 3200159 - RNA, 19 nt, Artificial Sequence
  Description of Artificial Sequence: Synthetic oligonucleotide
ucucucugucaaaagguac

SEQ ID NO: 3200160 - RNA, 19 nt, Artificial Sequence
  Description of Artificial Sequence: Synthetic oligonucleotide
ucuuccucugaagaaaacu

SEQ ID NO: 3200161 - RNA, 19 nt, Artificial Sequence
  Description of Artificial Sequence: Synthetic oligonucleotide
aauguuuucucagcucacu

SEQ ID NO: 3200162 - RNA, 19 nt, Artificial Sequence
  Description of Artificial Sequence: Synthetic oligonucleotide
aaguucuuccucugaagaa

SEQ ID NO: 3200163 - RNA, 19 nt, Artificial Sequence
  Description of Artificial Sequence: Synthetic oligonucleotide
gugaaagccagucucucug

SEQ ID NO: 3200164 - RNA, 19 nt, Artificial Sequence
  Description of Artificial Sequence: Synthetic oligonucleotide
gucaaaagguacauuacac

SEQ ID NO: 3200165 - RNA, 19 nt, Artificial Sequence
  Description of Artificial Sequence: Synthetic oligonucleotide
caaggaauucuccugacga

SEQ ID NO: 3200166 - RNA, 19 nt, Artificial Sequence
  Description of Artificial Sequence: Synthetic oligonucleotide
uccucugaagaaaacugaa

SEQ ID NO: 3200167 - RNA, 19 nt, Artificial Sequence
  Description of Artificial Sequence: Synthetic oligonucleotide
gaauucuccugacgaaagc

SEQ ID NO: 3200168 - RNA, 19 nt, Artificial Sequence
  Description of Artificial Sequence: Synthetic oligonucleotide
aucuuuacuccaucaauaa

SEQ ID NO: 3200169 - RNA, 19 nt, Artificial Sequence
  Description of Artificial Sequence: Synthetic oligonucleotide
ucugaaguucuuccucuga

SEQ ID NO: 3200170 - RNA, 19 nt, Artificial Sequence
  Description of Artificial Sequence: Synthetic oligonucleotide
caaaauguuuucucagcuc

SEQ ID NO: 3200171 - RNA, 19 nt, Artificial Sequence
  Description of Artificial Sequence: Synthetic oligonucleotide
cucugugaaagccagucuc

SEQ ID NO: 3200172 - RNA, 19 nt, Artificial Sequence
  Description of Artificial Sequence: Synthetic oligonucleotide
aacauccaucuuuacucca

SEQ ID NO: 3200173 - RNA, 19 nt, Artificial Sequence
  Description of Artificial Sequence: Synthetic oligonucleotide
cugagcaaaauguuuucuc

SEQ ID NO: 3200174 - RNA, 19 nt, Artificial Sequence
  Description of Artificial Sequence: Synthetic oligonucleotide
caaaagguacauuacaccu

SEQ ID NO: 3200175 - RNA, 19 nt, Artificial Sequence
  Description of Artificial Sequence: Synthetic oligonucleotide
uuguuguagugcauucuga

SEQ ID NO: 3200176 - RNA, 19 nt, Artificial Sequence
  Description of Artificial Sequence: Synthetic oligonucleotide
ucuuuacuccaucaauaau

SEQ ID NO: 3200177 - RNA, 19 nt, Artificial Sequence
  Description of Artificial Sequence: Synthetic oligonucleotide
uccaucuuuacuccaucaa

SEQ ID NO: 3200178 - RNA, 19 nt, Artificial Sequence
  Description of Artificial Sequence: Synthetic oligonucleotide
aaggaauucuccugacgaa

SEQ ID NO: 3200179 - RNA, 19 nt, Artificial Sequence
  Description of Artificial Sequence: Synthetic oligonucleotide
cugucaaaagguacauuac

SEQ ID NO: 3200180 - RNA, 19 nt, Artificial Sequence
  Description of Artificial Sequence: Synthetic oligonucleotide
aagccagucucucugucaa

SEQ ID NO: 3200181 - RNA, 19 nt, Artificial Sequence
  Description of Artificial Sequence: Synthetic oligonucleotide
cauucugaaguucuuccuc

SEQ ID NO: 3200182 - RNA, 19 nt, Artificial Sequence
  Description of Artificial Sequence: Synthetic oligonucleotide
uguagugcauucugaaguu

SEQ ID NO: 3200183 - RNA, 19 nt, Artificial Sequence
  Description of Artificial Sequence: Synthetic oligonucleotide
cugaagaaaacugaaccca

SEQ ID NO: 3200184 - RNA, 19 nt, Artificial Sequence
  Description of Artificial Sequence: Synthetic oligonucleotide
ugugaaagccagucucucu

SEQ ID NO: 3200185 - RNA, 19 nt, Artificial Sequence
  Description of Artificial Sequence: Synthetic oligonucleotide
uauugccaaacugagcaaa

SEQ ID NO: 3200186 - RNA, 19 nt, Artificial Sequence
  Description of Artificial Sequence: Synthetic oligonucleotide
aaaagguacauuacaccuu

SEQ ID NO: 3200187 - RNA, 19 nt, Artificial Sequence
  Description of Artificial Sequence: Synthetic oligonucleotide
auaauaugauuuucuuguu

SEQ ID NO: 3200188 - RNA, 19 nt, Artificial Sequence
  Description of Artificial Sequence: Synthetic oligonucleotide
acccaugccucugugaaag

SEQ ID NO: 3200189 - RNA, 19 nt, Artificial Sequence
  Description of Artificial Sequence: Synthetic oligonucleotide
gaagaaaacugaacccaac

SEQ ID NO: 3200190 - RNA, 19 nt, Artificial Sequence
  Description of Artificial Sequence: Synthetic oligonucleotide
ucucagcucacucgucgcc

SEQ ID NO: 3200191 - RNA, 19 nt, Artificial Sequence
  Description of Artificial Sequence: Synthetic oligonucleotide
uucuuguuguagugcauuc

SEQ ID NO: 3200192 - RNA, 19 nt, Artificial Sequence
  Description of Artificial Sequence: Synthetic oligonucleotide
caucaauaauaugauuuuc

SEQ ID NO: 3200193 - RNA, 19 nt, Artificial Sequence
  Description of Artificial Sequence: Synthetic oligonucleotide
cucucugucaaaagguaca

SEQ ID NO: 3200194 - RNA, 19 nt, Artificial Sequence
  Description of Artificial Sequence: Synthetic oligonucleotide
caucuuuacuccaucaaua

SEQ ID NO: 3200195 - RNA, 19 nt, Artificial Sequence
  Description of Artificial Sequence: Synthetic oligonucleotide
aguucuuccucugaagaaa

SEQ ID NO: 3200196 - RNA, 19 nt, Artificial Sequence
  Description of Artificial Sequence: Synthetic oligonucleotide
agucucucugucaaaaggu

SEQ ID NO: 3200197 - RNA, 19 nt, Artificial Sequence
  Description of Artificial Sequence: Synthetic oligonucleotide
acuauauagaacuccaaac

SEQ ID NO: 3200198 - RNA, 19 nt, Artificial Sequence
  Description of Artificial Sequence: Synthetic oligonucleotide
acuuuauaaauacuggaac

SEQ ID NO: 3200199 - RNA, 19 nt, Artificial Sequence
  Description of Artificial Sequence: Synthetic oligonucleotide
uucacuugaaguuugaucu

SEQ ID NO: 3200200 - RNA, 19 nt, Artificial Sequence
  Description of Artificial Sequence: Synthetic oligonucleotide
aacuaaaugcacuguaaac

SEQ ID NO: 3200201 - RNA, 19 nt, Artificial Sequence
  Description of Artificial Sequence: Synthetic oligonucleotide
ucuaccuucauucugcgag

SEQ ID NO: 3200202 - RNA, 19 nt, Artificial Sequence
  Description of Artificial Sequence: Synthetic oligonucleotide
auuuugguccacuagaauc

SEQ ID NO: 3200203 - RNA, 19 nt, Artificial Sequence
  Description of Artificial Sequence: Synthetic oligonucleotide
uaaccgaucauccugacug

SEQ ID NO: 3200204 - RNA, 19 nt, Artificial Sequence
  Description of Artificial Sequence: Synthetic oligonucleotide
ugaaauggcaacuuuauaa

SEQ ID NO: 3200205 - RNA, 19 nt, Artificial Sequence
  Description of Artificial Sequence: Synthetic oligonucleotide
augacuuuaacagauauag

SEQ ID NO: 3200206 - RNA, 19 nt, Artificial Sequence
  Description of Artificial Sequence: Synthetic oligonucleotide
auaauauuucacuugaagu

SEQ ID NO: 3200207 - RNA, 19 nt, Artificial Sequence
  Description of Artificial Sequence: Synthetic oligonucleotide
acagauauagaaccacucc

SEQ ID NO: 3200208 - RNA, 19 nt, Artificial Sequence
  Description of Artificial Sequence: Synthetic oligonucleotide
caauuuuacgccuaucucg

SEQ ID NO: 3200209 - RNA, 19 nt, Artificial Sequence
  Description of Artificial Sequence: Synthetic oligonucleotide
uagaaucagaaccugaaug

SEQ ID NO: 3200210 - RNA, 19 nt, Artificial Sequence
  Description of Artificial Sequence: Synthetic oligonucleotide
auggcaacuuuauaaauac

SEQ ID NO: 3200211 - RNA, 19 nt, Artificial Sequence
  Description of Artificial Sequence: Synthetic oligonucleotide
uaaacuauauagaacucca

SEQ ID NO: 3200212 - RNA, 19 nt, Artificial Sequence
  Description of Artificial Sequence: Synthetic oligonucleotide
auuaguuacacuguguuag

SEQ ID NO: 3200213 - RNA, 19 nt, Artificial Sequence
  Description of Artificial Sequence: Synthetic oligonucleotide
ugcuacuucuauuagaucu

SEQ ID NO: 3200214 - RNA, 19 nt, Artificial Sequence
  Description of Artificial Sequence: Synthetic oligonucleotide
ucaguaaaauuuuauuuug

SEQ ID NO: 3200215 - RNA, 19 nt, Artificial Sequence
  Description of Artificial Sequence: Synthetic oligonucleotide
uaaauacuggaacuaaaug

SEQ ID NO: 3200216 - RNA, 19 nt, Artificial Sequence
  Description of Artificial Sequence: Synthetic oligonucleotide
acuguguuagcucaccuac

SEQ ID NO: 3200217 - RNA, 19 nt, Artificial Sequence
  Description of Artificial Sequence: Synthetic oligonucleotide
aauacuggaacuaaaugca

SEQ ID NO: 3200218 - RNA, 19 nt, Artificial Sequence
  Description of Artificial Sequence: Synthetic oligonucleotide
cuaaaugcacuguaaacag

SEQ ID NO: 3200219 - RNA, 19 nt, Artificial Sequence
  Description of Artificial Sequence: Synthetic oligonucleotide
uguuagcucaccuacauaa

SEQ ID NO: 3200220 - RNA, 19 nt, Artificial Sequence
  Description of Artificial Sequence: Synthetic oligonucleotide
uuuaucuacgcuucgacuc

SEQ ID NO: 3200221 - RNA, 19 nt, Artificial Sequence
  Description of Artificial Sequence: Synthetic oligonucleotide
ucuuaugacuuuaacagau

SEQ ID NO: 3200222 - RNA, 19 nt, Artificial Sequence
  Description of Artificial Sequence: Synthetic oligonucleotide
uuuaacagauauagaacca

SEQ ID NO: 3200223 - RNA, 19 nt, Artificial Sequence
  Description of Artificial Sequence: Synthetic oligonucleotide
aacuauauagaacuccaaa

SEQ ID NO: 3200224 - RNA, 19 nt, Artificial Sequence
  Description of Artificial Sequence: Synthetic oligonucleotide
uacaacuuaucuauuacaa

SEQ ID NO: 3200225 - RNA, 19 nt, Artificial Sequence
  Description of Artificial Sequence: Synthetic oligonucleotide
uucaauuaguuacacugug

SEQ ID NO: 3200226 - RNA, 19 nt, Artificial Sequence
  Description of Artificial Sequence: Synthetic oligonucleotide
uauauagaacuccaaacua

SEQ ID NO: 3200227 - RNA, 19 nt, Artificial Sequence
  Description of Artificial Sequence: Synthetic oligonucleotide
acuucuauuagaucuccuc

SEQ ID NO: 3200228 - RNA, 19 nt, Artificial Sequence
  Description of Artificial Sequence: Synthetic oligonucleotide
uuaugcuuaugacugcucc

SEQ ID NO: 3200229 - RNA, 19 nt, Artificial Sequence
  Description of Artificial Sequence: Synthetic oligonucleotide
guccacuagaaucagaacc

SEQ ID NO: 3200230 - RNA, 19 nt, Artificial Sequence
  Description of Artificial Sequence: Synthetic oligonucleotide
auauugcacauuuugucuc

SEQ ID NO: 3200231 - RNA, 19 nt, Artificial Sequence
  Description of Artificial Sequence: Synthetic oligonucleotide
uuugaucuaaaacacuuua

SEQ ID NO: 3200232 - RNA, 19 nt, Artificial Sequence
  Description of Artificial Sequence: Synthetic oligonucleotide
acuaaaugcacuguaaaca

SEQ ID NO: 3200233 - RNA, 19 nt, Artificial Sequence
  Description of Artificial Sequence: Synthetic oligonucleotide
uuucucuuuucuuuugucc

SEQ ID NO: 3200234 - RNA, 19 nt, Artificial Sequence
  Description of Artificial Sequence: Synthetic oligonucleotide
uauuuuauucugugaaaug

SEQ ID NO: 3200235 - RNA, 19 nt, Artificial Sequence
  Description of Artificial Sequence: Synthetic oligonucleotide
uauucugugaaauggcaac

SEQ ID NO: 3200236 - RNA, 19 nt, Artificial Sequence
  Description of Artificial Sequence: Synthetic oligonucleotide
uuuuaaccgaucauccuga

SEQ ID NO: 3200237 - RNA, 19 nt, Artificial Sequence
  Description of Artificial Sequence: Synthetic oligonucleotide
uuucuuacuauccugucua

SEQ ID NO: 3200238 - RNA, 19 nt, Artificial Sequence
  Description of Artificial Sequence: Synthetic oligonucleotide
aauuaaucagaagucuuca

SEQ ID NO: 3200239 - RNA, 19 nt, Artificial Sequence
  Description of Artificial Sequence: Synthetic oligonucleotide
cauucucucacuuucucgc

SEQ ID NO: 3200240 - RNA, 19 nt, Artificial Sequence
  Description of Artificial Sequence: Synthetic oligonucleotide
aacagauauagaaccacuc

SEQ ID NO: 3200241 - RNA, 19 nt, Artificial Sequence
  Description of Artificial Sequence: Synthetic oligonucleotide
cuucuauuagaucuccucc

SEQ ID NO: 3200242 - RNA, 19 nt, Artificial Sequence
  Description of Artificial Sequence: Synthetic oligonucleotide
ucagcuucacccuagcucu

SEQ ID NO: 3200243 - RNA, 19 nt, Artificial Sequence
  Description of Artificial Sequence: Synthetic oligonucleotide
uuuucaguaaaauuuuauu

SEQ ID NO: 3200244 - RNA, 19 nt, Artificial Sequence
  Description of Artificial Sequence: Synthetic oligonucleotide
ugcacauuuugucuccagg

SEQ ID NO: 3200245 - RNA, 19 nt, Artificial Sequence
  Description of Artificial Sequence: Synthetic oligonucleotide
uuaugacuuuaacagauau

SEQ ID NO: 3200246 - RNA, 19 nt, Artificial Sequence
  Description of Artificial Sequence: Synthetic oligonucleotide
cucgucuaucccuugagcg

SEQ ID NO: 3200247 - RNA, 19 nt, Artificial Sequence
  Description of Artificial Sequence: Synthetic oligonucleotide
aaucagaagucuucaauua

SEQ ID NO: 3200248 - RNA, 19 nt, Artificial Sequence
  Description of Artificial Sequence: Synthetic oligonucleotide
uaucucgacuccuacugcg

SEQ ID NO: 3200249 - RNA, 19 nt, Artificial Sequence
  Description of Artificial Sequence: Synthetic oligonucleotide
guaaacuauauagaacucc

SEQ ID NO: 3200250 - RNA, 19 nt, Artificial Sequence
  Description of Artificial Sequence: Synthetic oligonucleotide
uuuauaaauacuggaacua

SEQ ID NO: 3200251 - RNA, 19 nt, Artificial Sequence
  Description of Artificial Sequence: Synthetic oligonucleotide
acuggaacuaaaugcacug

SEQ ID NO: 3200252 - RNA, 19 nt, Artificial Sequence
  Description of Artificial Sequence: Synthetic oligonucleotide
uccuacugcgacuggaacg

SEQ ID NO: 3200253 - RNA, 19 nt, Artificial Sequence
  Description of Artificial Sequence: Synthetic oligonucleotide
uaaaacacuuuaagguaug

SEQ ID NO: 3200254 - RNA, 19 nt, Artificial Sequence
  Description of Artificial Sequence: Synthetic oligonucleotide
guuacuaaugaguaaacua

SEQ ID NO: 3200255 - RNA, 19 nt, Artificial Sequence
  Description of Artificial Sequence: Synthetic oligonucleotide
acgauuggcucgucuaucc

SEQ ID NO: 3200256 - RNA, 19 nt, Artificial Sequence
  Description of Artificial Sequence: Synthetic oligonucleotide
ucaauuuuacgccuaucuc

SEQ ID NO: 3200257 - RNA, 19 nt, Artificial Sequence
  Description of Artificial Sequence: Synthetic oligonucleotide
aauuuuacgccuaucucga

SEQ ID NO: 3200258 - RNA, 19 nt, Artificial Sequence
  Description of Artificial Sequence: Synthetic oligonucleotide
uaaucagaagucuucaauu

SEQ ID NO: 3200259 - RNA, 19 nt, Artificial Sequence
  Description of Artificial Sequence: Synthetic oligonucleotide
uucucuuuucuuuuguccu

SEQ ID NO: 3200260 - RNA, 19 nt, Artificial Sequence
  Description of Artificial Sequence: Synthetic oligonucleotide
aucagaagucuucaauuag

SEQ ID NO: 3200261 - RNA, 19 nt, Artificial Sequence
  Description of Artificial Sequence: Synthetic oligonucleotide
ucuuuaucuacgcuucgac

SEQ ID NO: 3200262 - RNA, 19 nt, Artificial Sequence
  Description of Artificial Sequence: Synthetic oligonucleotide
ucaaugcuacuucuauuag

SEQ ID NO: 3200263 - RNA, 19 nt, Artificial Sequence
  Description of Artificial Sequence: Synthetic oligonucleotide
ucuacugcugucuaccuuc

SEQ ID NO: 3200264 - RNA, 19 nt, Artificial Sequence
  Description of Artificial Sequence: Synthetic oligonucleotide
uuaacagauauagaaccac

SEQ ID NO: 3200265 - RNA, 19 nt, Artificial Sequence
  Description of Artificial Sequence: Synthetic oligonucleotide
aaccgaucauccugacugc

SEQ ID NO: 3200266 - RNA, 19 nt, Artificial Sequence
  Description of Artificial Sequence: Synthetic oligonucleotide
uacuauccugucuagaguc

SEQ ID NO: 3200267 - RNA, 19 nt, Artificial Sequence
  Description of Artificial Sequence: Synthetic oligonucleotide
aagguaugaaaauuuuaua

SEQ ID NO: 3200268 - RNA, 19 nt, Artificial Sequence
  Description of Artificial Sequence: Synthetic oligonucleotide
auacaacuuaucuauuaca

SEQ ID NO: 3200269 - RNA, 19 nt, Artificial Sequence
  Description of Artificial Sequence: Synthetic oligonucleotide
uaacagauauagaaccacu

SEQ ID NO: 3200270 - RNA, 19 nt, Artificial Sequence
  Description of Artificial Sequence: Synthetic oligonucleotide
uuauucugugaaauggcaa

SEQ ID NO: 3200271 - RNA, 19 nt, Artificial Sequence
  Description of Artificial Sequence: Synthetic oligonucleotide
uuuuacgccuaucucgacu

SEQ ID NO: 3200272 - RNA, 19 nt, Artificial Sequence
  Description of Artificial Sequence: Synthetic oligonucleotide
guaaaauuuuauuuugaaa

SEQ ID NO: 3200273 - RNA, 19 nt, Artificial Sequence
  Description of Artificial Sequence: Synthetic oligonucleotide
uauagaacuccaaacuauu

SEQ ID NO: 3200274 - RNA, 19 nt, Artificial Sequence
  Description of Artificial Sequence: Synthetic oligonucleotide
uuagcucaccuacauaaaa

SEQ ID NO: 3200275 - RNA, 19 nt, Artificial Sequence
  Description of Artificial Sequence: Synthetic oligonucleotide
cugucuaccuucauucugc

SEQ ID NO: 3200276 - RNA, 19 nt, Artificial Sequence
  Description of Artificial Sequence: Synthetic oligonucleotide
aauuaguuacacuguguua

SEQ ID NO: 3200277 - RNA, 19 nt, Artificial Sequence
  Description of Artificial Sequence: Synthetic oligonucleotide
uugaucuaaaacacuuuaa

SEQ ID NO: 3200278 - RNA, 19 nt, Artificial Sequence
  Description of Artificial Sequence: Synthetic oligonucleotide
agagucgugucuuaugacu

SEQ ID NO: 3200279 - RNA, 19 nt, Artificial Sequence
  Description of Artificial Sequence: Synthetic oligonucleotide
ugguccacuagaaucagaa

SEQ ID NO: 3200280 - RNA, 19 nt, Artificial Sequence
  Description of Artificial Sequence: Synthetic oligonucleotide
cuacagaacauucucucac

SEQ ID NO: 3200281 - RNA, 19 nt, Artificial Sequence
  Description of Artificial Sequence: Synthetic oligonucleotide
ucucuuucaaugcuacuuc

SEQ ID NO: 3200282 - RNA, 19 nt, Artificial Sequence
  Description of Artificial Sequence: Synthetic oligonucleotide
uauugcacauuuugucucc

SEQ ID NO: 3200283 - RNA, 19 nt, Artificial Sequence
  Description of Artificial Sequence: Synthetic oligonucleotide
agcgacuucugcuucuacg

SEQ ID NO: 3200284 - RNA, 19 nt, Artificial Sequence
  Description of Artificial Sequence: Synthetic oligonucleotide
uaugcuuaugacugcuccc

SEQ ID NO: 3200285 - RNA, 19 nt, Artificial Sequence
  Description of Artificial Sequence: Synthetic oligonucleotide
uagaacuccaaacuauuuu

SEQ ID NO: 3200286 - RNA, 19 nt, Artificial Sequence
  Description of Artificial Sequence: Synthetic oligonucleotide
uuuacgccuaucucgacuc

SEQ ID NO: 3200287 - RNA, 19 nt, Artificial Sequence
  Description of Artificial Sequence: Synthetic oligonucleotide
uucacccuagcucuacugc

SEQ ID NO: 3200288 - RNA, 19 nt, Artificial Sequence
  Description of Artificial Sequence: Synthetic oligonucleotide
uuuguccuguucacggucc

SEQ ID NO: 3200289 - RNA, 19 nt, Artificial Sequence
  Description of Artificial Sequence: Synthetic oligonucleotide
uauuagaucuccuccuguc

SEQ ID NO: 3200290 - RNA, 19 nt, Artificial Sequence
  Description of Artificial Sequence: Synthetic oligonucleotide
guaaacagccauuuugguc

SEQ ID NO: 3200291 - RNA, 19 nt, Artificial Sequence
  Description of Artificial Sequence: Synthetic oligonucleotide
uuacuauccugucuagagu

SEQ ID NO: 3200292 - RNA, 19 nt, Artificial Sequence
  Description of Artificial Sequence: Synthetic oligonucleotide
uguguuagcucaccuacau

SEQ ID NO: 3200293 - RNA, 19 nt, Artificial Sequence
  Description of Artificial Sequence: Synthetic oligonucleotide
cacuaagauuuccacgugg

SEQ ID NO: 3200294 - RNA, 19 nt, Artificial Sequence
  Description of Artificial Sequence: Synthetic oligonucleotide
ugucuuuaucuacgcuucg

SEQ ID NO: 3200295 - RNA, 19 nt, Artificial Sequence
  Description of Artificial Sequence: Synthetic oligonucleotide
ucaccuuuaugcuuaugac

SEQ ID NO: 3200296 - RNA, 19 nt, Artificial Sequence
  Description of Artificial Sequence: Synthetic oligonucleotide
uuagaucuccuccugucuc

SEQ ID NO: 3200297 - RNA, 19 nt, Artificial Sequence
  Description of Artificial Sequence: Synthetic oligonucleotide
cuuaauagcucccagaggg

SEQ ID NO: 3200298 - RNA, 19 nt, Artificial Sequence
  Description of Artificial Sequence: Synthetic oligonucleotide
guguacuucacacagaagg

SEQ ID NO: 3200299 - RNA, 19 nt, Artificial Sequence
  Description of Artificial Sequence: Synthetic oligonucleotide
uucuuaauagcucccagag

SEQ ID NO: 3200300 - RNA, 19 nt, Artificial Sequence
  Description of Artificial Sequence: Synthetic oligonucleotide
aaaccgugcaaccuuuuac

SEQ ID NO: 3200301 - RNA, 19 nt, Artificial Sequence
  Description of Artificial Sequence: Synthetic oligonucleotide
aggcaucagagguagaugc

SEQ ID NO: 3200302 - RNA, 19 nt, Artificial Sequence
  Description of Artificial Sequence: Synthetic oligonucleotide
ugugauacuggccugguac

SEQ ID NO: 3200303 - RNA, 19 nt, Artificial Sequence
  Description of Artificial Sequence: Synthetic oligonucleotide
acauugaacaccucagagg

SEQ ID NO: 3200304 - RNA, 19 nt, Artificial Sequence
  Description of Artificial Sequence: Synthetic oligonucleotide
aucccuucuuaauagcucc

SEQ ID NO: 3200305 - RNA, 19 nt, Artificial Sequence
  Description of Artificial Sequence: Synthetic oligonucleotide
gacauugaacaccucagag

SEQ ID NO: 3200306 - RNA, 19 nt, Artificial Sequence
  Description of Artificial Sequence: Synthetic oligonucleotide
  modified_base (10)..(10): a, c, u, g, unknown or other
acuucguucnggaaggugg

SEQ ID NO: 3200307 - RNA, 19 nt, Artificial Sequence
  Description of Artificial Sequence: Synthetic oligonucleotide
guagguguacuucacacag

SEQ ID NO: 3200308 - RNA, 19 nt, Artificial Sequence
  Description of Artificial Sequence: Synthetic oligonucleotide
  modified_base (14)..(14): a, c, u, g, unknown or other
agggacuucguucnggaag

SEQ ID NO: 3200309 - RNA, 19 nt, Artificial Sequence
  Description of Artificial Sequence: Synthetic oligonucleotide
ugcaacaccaggaacgucu

SEQ ID NO: 3200310 - RNA, 19 nt, Artificial Sequence
  Description of Artificial Sequence: Synthetic oligonucleotide
uaugagggagcacagcacc

SEQ ID NO: 3200311 - RNA, 19 nt, Artificial Sequence
  Description of Artificial Sequence: Synthetic oligonucleotide
aacaaggacggccuugcag

SEQ ID NO: 3200312 - RNA, 19 nt, Artificial Sequence
  Description of Artificial Sequence: Synthetic oligonucleotide
ucuuaauagcucccagagg

SEQ ID NO: 3200313 - RNA, 19 nt, Artificial Sequence
  Description of Artificial Sequence: Synthetic oligonucleotide
cuguucaggaucucgagcc

SEQ ID NO: 3200314 - RNA, 19 nt, Artificial Sequence
  Description of Artificial Sequence: Synthetic oligonucleotide
uuugcagcaagacauugaa

SEQ ID NO: 3200315 - RNA, 19 nt, Artificial Sequence
  Description of Artificial Sequence: Synthetic oligonucleotide
aacgucuccuccuuccagg

SEQ ID NO: 3200316 - RNA, 19 nt, Artificial Sequence
  Description of Artificial Sequence: Synthetic oligonucleotide
cuggagaaggggaacaagg

SEQ ID NO: 3200317 - RNA, 19 nt, Artificial Sequence
  Description of Artificial Sequence: Synthetic oligonucleotide
ucagaggucaucuccaccu

SEQ ID NO: 3200318 - RNA, 19 nt, Artificial Sequence
  Description of Artificial Sequence: Synthetic oligonucleotide
aaccgugcaaccuuuuaca

SEQ ID NO: 3200319 - RNA, 19 nt, Artificial Sequence
  Description of Artificial Sequence: Synthetic oligonucleotide
ugcagcacagaauggaggc

SEQ ID NO: 3200320 - RNA, 19 nt, Artificial Sequence
  Description of Artificial Sequence: Synthetic oligonucleotide
aggaacgucuccuccuucc

SEQ ID NO: 3200321 - RNA, 19 nt, Artificial Sequence
  Description of Artificial Sequence: Synthetic oligonucleotide
acaaggacggccuugcaga

SEQ ID NO: 3200322 - RNA, 19 nt, Artificial Sequence
  Description of Artificial Sequence: Synthetic oligonucleotide
aggacggccuugcagacac

SEQ ID NO: 3200323 - RNA, 19 nt, Artificial Sequence
  Description of Artificial Sequence: Synthetic oligonucleotide
agagguagaugcuuugucu

SEQ ID NO: 3200324 - RNA, 19 nt, Artificial Sequence
  Description of Artificial Sequence: Synthetic oligonucleotide
uuucccacacagcugugag

SEQ ID NO: 3200325 - RNA, 19 nt, Artificial Sequence
  Description of Artificial Sequence: Synthetic oligonucleotide
accuuuuacaggcucucuc

SEQ ID NO: 3200326 - RNA, 19 nt, Artificial Sequence
  Description of Artificial Sequence: Synthetic oligonucleotide
aaucuggaccugcaugucu

SEQ ID NO: 3200327 - RNA, 19 nt, Artificial Sequence
  Description of Artificial Sequence: Synthetic oligonucleotide
uguagguguacuucacaca

SEQ ID NO: 3200328 - RNA, 19 nt, Artificial Sequence
  Description of Artificial Sequence: Synthetic oligonucleotide
uggagaaggggaacaagga

SEQ ID NO: 3200329 - RNA, 19 nt, Artificial Sequence
  Description of Artificial Sequence: Synthetic oligonucleotide
acuuggucaucacugucag

SEQ ID NO: 3200330 - RNA, 19 nt, Artificial Sequence
  Description of Artificial Sequence: Synthetic oligonucleotide
cuguagguguacuucacac

SEQ ID NO: 3200331 - RNA, 19 nt, Artificial Sequence
  Description of Artificial Sequence: Synthetic oligonucleotide
ccaauuucaaccccuaccc

SEQ ID NO: 3200332 - RNA, 19 nt, Artificial Sequence
  Description of Artificial Sequence: Synthetic oligonucleotide
uuuuacaggcucucucuga

SEQ ID NO: 3200333 - RNA, 19 nt, Artificial Sequence
  Description of Artificial Sequence: Synthetic oligonucleotide
ucccacacagcugugagug

SEQ ID NO: 3200334 - RNA, 19 nt, Artificial Sequence
  Description of Artificial Sequence: Synthetic oligonucleotide
aacaccaggaacgucuccu

SEQ ID NO: 3200335 - RNA, 19 nt, Artificial Sequence
  Description of Artificial Sequence: Synthetic oligonucleotide
ugacagcuugccgacagcg

SEQ ID NO: 3200336 - RNA, 19 nt, Artificial Sequence
  Description of Artificial Sequence: Synthetic oligonucleotide
acugacagcuugccgacag

SEQ ID NO: 3200337 - RNA, 19 nt, Artificial Sequence
  Description of Artificial Sequence: Synthetic oligonucleotide
uguuugcagagccuuugca

SEQ ID NO: 3200338 - RNA, 19 nt, Artificial Sequence
  Description of Artificial Sequence: Synthetic oligonucleotide
uuaugagggagcacagcac

SEQ ID NO: 3200339 - RNA, 19 nt, Artificial Sequence
  Description of Artificial Sequence: Synthetic oligonucleotide
auacuggccugguacuugg

SEQ ID NO: 3200340 - RNA, 19 nt, Artificial Sequence
  Description of Artificial Sequence: Synthetic oligonucleotide
  modified_base (4)..(4): a, c, u, g, unknown or other
uucnggaagguggcguugg

SEQ ID NO: 3200341 - RNA, 19 nt, Artificial Sequence
  Description of Artificial Sequence: Synthetic oligonucleotide
agggccucauccuuuauga

SEQ ID NO: 3200342 - RNA, 19 nt, Artificial Sequence
  Description of Artificial Sequence: Synthetic oligonucleotide
cauugaacaccucagaggu

SEQ ID NO: 3200343 - RNA, 19 nt, Artificial Sequence
  Description of Artificial Sequence: Synthetic oligonucleotide
  modified_base (9)..(9): a, c, u, g, unknown or other
cuucguucnggaagguggc

SEQ ID NO: 3200344 - RNA, 19 nt, Artificial Sequence
  Description of Artificial Sequence: Synthetic oligonucleotide
acagcggagaggcuccuuc

SEQ ID NO: 3200345 - RNA, 19 nt, Artificial Sequence
  Description of Artificial Sequence: Synthetic oligonucleotide
uuccaugguuccaggcugg

SEQ ID NO: 3200346 - RNA, 19 nt, Artificial Sequence
  Description of Artificial Sequence: Synthetic oligonucleotide
gucugcaugggacccaugc

SEQ ID NO: 3200347 - RNA, 19 nt, Artificial Sequence
  Description of Artificial Sequence: Synthetic oligonucleotide
ggccucauccuuuaugagg

SEQ ID NO: 3200348 - RNA, 19 nt, Artificial Sequence
  Description of Artificial Sequence: Synthetic oligonucleotide
acagcuugccgacagcgga

SEQ ID NO: 3200349 - RNA, 19 nt, Artificial Sequence
  Description of Artificial Sequence: Synthetic oligonucleotide
acacuguagguguacuuca

SEQ ID NO: 3200350 - RNA, 19 nt, Artificial Sequence
  Description of Artificial Sequence: Synthetic oligonucleotide
cucccagagggcauggagc

SEQ ID NO: 3200351 - RNA, 19 nt, Artificial Sequence
  Description of Artificial Sequence: Synthetic oligonucleotide
agugcugguccuccuguuc

SEQ ID NO: 3200352 - RNA, 19 nt, Artificial Sequence
  Description of Artificial Sequence: Synthetic oligonucleotide
ugcaaccuuuuacaggcuc

SEQ ID NO: 3200353 - RNA, 19 nt, Artificial Sequence
  Description of Artificial Sequence: Synthetic oligonucleotide
accgugcaaccuuuuacag

SEQ ID NO: 3200354 - RNA, 19 nt, Artificial Sequence
  Description of Artificial Sequence: Synthetic oligonucleotide
agguagaugcuuugucuug

SEQ ID NO: 3200355 - RNA, 19 nt, Artificial Sequence
  Description of Artificial Sequence: Synthetic oligonucleotide
cacagaaggaggugagggc

SEQ ID NO: 3200356 - RNA, 19 nt, Artificial Sequence
  Description of Artificial Sequence: Synthetic oligonucleotide
cuuuuacaggcucucucug

SEQ ID NO: 3200357 - RNA, 19 nt, Artificial Sequence
  Description of Artificial Sequence: Synthetic oligonucleotide
acagaaggaggugagggca

SEQ ID NO: 3200358 - RNA, 19 nt, Artificial Sequence
  Description of Artificial Sequence: Synthetic oligonucleotide
gccaauuucaaccccuacc

SEQ ID NO: 3200359 - RNA, 19 nt, Artificial Sequence
  Description of Artificial Sequence: Synthetic oligonucleotide
uccuccaaaccgugcaacc

SEQ ID NO: 3200360 - RNA, 19 nt, Artificial Sequence
  Description of Artificial Sequence: Synthetic oligonucleotide
ucuagggccacagccaggu

SEQ ID NO: 3200361 - RNA, 19 nt, Artificial Sequence
  Description of Artificial Sequence: Synthetic oligonucleotide
caauuucaaccccuacccc

SEQ ID NO: 3200362 - RNA, 19 nt, Artificial Sequence
  Description of Artificial Sequence: Synthetic oligonucleotide
  modified_base (3)..(3): a, c, u, g, unknown or other
ucnggaagguggcguuggg

SEQ ID NO: 3200363 - RNA, 19 nt, Artificial Sequence
  Description of Artificial Sequence: Synthetic oligonucleotide
agccuuugcagcaagacau

SEQ ID NO: 3200364 - RNA, 19 nt, Artificial Sequence
  Description of Artificial Sequence: Synthetic oligonucleotide
uggcguugggcgucuaggg

SEQ ID NO: 3200365 - RNA, 19 nt, Artificial Sequence
  Description of Artificial Sequence: Synthetic oligonucleotide
cuucuuaauagcucccaga

SEQ ID NO: 3200366 - RNA, 19 nt, Artificial Sequence
  Description of Artificial Sequence: Synthetic oligonucleotide
agccaauuucaaccccuac

SEQ ID NO: 3200367 - RNA, 19 nt, Artificial Sequence
  Description of Artificial Sequence: Synthetic oligonucleotide
ugcguuucccacacagcug

SEQ ID NO: 3200368 - RNA, 19 nt, Artificial Sequence
  Description of Artificial Sequence: Synthetic oligonucleotide
ggcuccaauccccacaucc

SEQ ID NO: 3200369 - RNA, 19 nt, Artificial Sequence
  Description of Artificial Sequence: Synthetic oligonucleotide
ugagugcugguccuccugu

SEQ ID NO: 3200370 - RNA, 19 nt, Artificial Sequence
  Description of Artificial Sequence: Synthetic oligonucleotide
cucagcgcugccugcaggg

SEQ ID NO: 3200371 - RNA, 19 nt, Artificial Sequence
  Description of Artificial Sequence: Synthetic oligonucleotide
caucccuucuuaauagcuc

SEQ ID NO: 3200372 - RNA, 19 nt, Artificial Sequence
  Description of Artificial Sequence: Synthetic oligonucleotide
acuguagguguacuucaca

SEQ ID NO: 3200373 - RNA, 19 nt, Artificial Sequence
  Description of Artificial Sequence: Synthetic oligonucleotide
ugucagcagcagcuuggcg

SEQ ID NO: 3200374 - RNA, 19 nt, Artificial Sequence
  Description of Artificial Sequence: Synthetic oligonucleotide
ugccuccugcauccgacgg

SEQ ID NO: 3200375 - RNA, 19 nt, Artificial Sequence
  Description of Artificial Sequence: Synthetic oligonucleotide
uuugucuugcugggcaagc

SEQ ID NO: 3200376 - RNA, 19 nt, Artificial Sequence
  Description of Artificial Sequence: Synthetic oligonucleotide
ucucagcgcugccugcagg

SEQ ID NO: 3200377 - RNA, 19 nt, Artificial Sequence
  Description of Artificial Sequence: Synthetic oligonucleotide
cacaucccuucuuaauagc

SEQ ID NO: 3200378 - RNA, 19 nt, Artificial Sequence
  Description of Artificial Sequence: Synthetic oligonucleotide
  modified_base (17)..(17): a, c, u, g, unknown or other
ugcagggacuucguucngg

SEQ ID NO: 3200379 - RNA, 19 nt, Artificial Sequence
  Description of Artificial Sequence: Synthetic oligonucleotide
acaccaggaacgucuccuc

SEQ ID NO: 3200380 - RNA, 19 nt, Artificial Sequence
  Description of Artificial Sequence: Synthetic oligonucleotide
  modified_base (7)..(7): a, c, u, g, unknown or other
ucguucnggaagguggcgu

SEQ ID NO: 3200381 - RNA, 19 nt, Artificial Sequence
  Description of Artificial Sequence: Synthetic oligonucleotide
ggcucagcugcccacacag

SEQ ID NO: 3200382 - RNA, 19 nt, Artificial Sequence
  Description of Artificial Sequence: Synthetic oligonucleotide
cuuuaugagggagcacagc

SEQ ID NO: 3200383 - RNA, 19 nt, Artificial Sequence
  Description of Artificial Sequence: Synthetic oligonucleotide
ggcgucuagggccacagcc

SEQ ID NO: 3200384 - RNA, 19 nt, Artificial Sequence
  Description of Artificial Sequence: Synthetic oligonucleotide
aggucaucuccaccugccg

SEQ ID NO: 3200385 - RNA, 19 nt, Artificial Sequence
  Description of Artificial Sequence: Synthetic oligonucleotide
uggaccugcaugucuggcu

SEQ ID NO: 3200386 - RNA, 19 nt, Artificial Sequence
  Description of Artificial Sequence: Synthetic oligonucleotide
cucauccuuuaugagggag

SEQ ID NO: 3200387 - RNA, 19 nt, Artificial Sequence
  Description of Artificial Sequence: Synthetic oligonucleotide
ucagagguagaugcuuugu

SEQ ID NO: 3200388 - RNA, 19 nt, Artificial Sequence
  Description of Artificial Sequence: Synthetic oligonucleotide
uugcagcaagacauugaac

SEQ ID NO: 3200389 - RNA, 19 nt, Artificial Sequence
  Description of Artificial Sequence: Synthetic oligonucleotide
uccgacggggacuuccaug

SEQ ID NO: 3200390 - RNA, 19 nt, Artificial Sequence
  Description of Artificial Sequence: Synthetic oligonucleotide
aggagugccugcaacacca

SEQ ID NO: 3200391 - RNA, 19 nt, Artificial Sequence
  Description of Artificial Sequence: Synthetic oligonucleotide
uggucaucacugucagcag

SEQ ID NO: 3200392 - RNA, 19 nt, Artificial Sequence
  Description of Artificial Sequence: Synthetic oligonucleotide
uuccugguccuuucccucc

SEQ ID NO: 3200393 - RNA, 19 nt, Artificial Sequence
  Description of Artificial Sequence: Synthetic oligonucleotide
ugacucagggcugccgggg

SEQ ID NO: 3200394 - RNA, 19 nt, Artificial Sequence
  Description of Artificial Sequence: Synthetic oligonucleotide
ggcucucucugacucaggg

SEQ ID NO: 3200395 - RNA, 19 nt, Artificial Sequence
  Description of Artificial Sequence: Synthetic oligonucleotide
uggcguaggccauggaggu

SEQ ID NO: 3200396 - RNA, 19 nt, Artificial Sequence
  Description of Artificial Sequence: Synthetic oligonucleotide
cuuugcagcaagacauuga

SEQ ID NO: 3200397 - RNA, 19 nt, Artificial Sequence
  Description of Artificial Sequence: Synthetic oligonucleotide
gaugaauucacccagcucc

SEQ ID NO: 3200398 - RNA, 19 nt, Artificial Sequence
  Description of Artificial Sequence: Synthetic oligonucleotide
acggauaaaagacucaugc

SEQ ID NO: 3200399 - RNA, 19 nt, Artificial Sequence
  Description of Artificial Sequence: Synthetic oligonucleotide
aaaagaugaauucacccag

SEQ ID NO: 3200400 - RNA, 19 nt, Artificial Sequence
  Description of Artificial Sequence: Synthetic oligonucleotide
uuaaaagaugaauucaccc

SEQ ID NO: 3200401 - RNA, 19 nt, Artificial Sequence
  Description of Artificial Sequence: Synthetic oligonucleotide
agaggcaagaauuaaaaga

SEQ ID NO: 3200402 - RNA, 19 nt, Artificial Sequence
  Description of Artificial Sequence: Synthetic oligonucleotide
uaaaagaugaauucaccca

SEQ ID NO: 3200403 - RNA, 19 nt, Artificial Sequence
  Description of Artificial Sequence: Synthetic oligonucleotide
uucgcuucuuccuaaaggg

SEQ ID NO: 3200404 - RNA, 19 nt, Artificial Sequence
  Description of Artificial Sequence: Synthetic oligonucleotide
agguaugugucguucagcc

SEQ ID NO: 3200405 - RNA, 19 nt, Artificial Sequence
  Description of Artificial Sequence: Synthetic oligonucleotide
aaauuguuccucaaguguc

SEQ ID NO: 3200406 - RNA, 19 nt, Artificial Sequence
  Description of Artificial Sequence: Synthetic oligonucleotide
aauuucugccuuugucugc

SEQ ID NO: 3200407 - RNA, 19 nt, Artificial Sequence
  Description of Artificial Sequence: Synthetic oligonucleotide
aaagacucaugcuucuguc

SEQ ID NO: 3200408 - RNA, 19 nt, Artificial Sequence
  Description of Artificial Sequence: Synthetic oligonucleotide
ucuuggguagacauucugg

SEQ ID NO: 3200409 - RNA, 19 nt, Artificial Sequence
  Description of Artificial Sequence: Synthetic oligonucleotide
aagucuuggguagacauuc

SEQ ID NO: 3200410 - RNA, 19 nt, Artificial Sequence
  Description of Artificial Sequence: Synthetic oligonucleotide
uggaccauggguuucagug

SEQ ID NO: 3200411 - RNA, 19 nt, Artificial Sequence
  Description of Artificial Sequence: Synthetic oligonucleotide
aagaauuaaaagaugaauu

SEQ ID NO: 3200412 - RNA, 19 nt, Artificial Sequence
  Description of Artificial Sequence: Synthetic oligonucleotide
aagugucccaccgaggacc

SEQ ID NO: 3200413 - RNA, 19 nt, Artificial Sequence
  Description of Artificial Sequence: Synthetic oligonucleotide
uugacaaggaagacaaagc

SEQ ID NO: 3200414 - RNA, 19 nt, Artificial Sequence
  Description of Artificial Sequence: Synthetic oligonucleotide
aauuguuccucaagugucc

SEQ ID NO: 3200415 - RNA, 19 nt, Artificial Sequence
  Description of Artificial Sequence: Synthetic oligonucleotide
uuccuaaagggaaugaagu

SEQ ID NO: 3200416 - RNA, 19 nt, Artificial Sequence
  Description of Artificial Sequence: Synthetic oligonucleotide
uggaaauuguuccucaagu

SEQ ID NO: 3200417 - RNA, 19 nt, Artificial Sequence
  Description of Artificial Sequence: Synthetic oligonucleotide
aaaagacucaugcuucugu

SEQ ID NO: 3200418 - RNA, 19 nt, Artificial Sequence
  Description of Artificial Sequence: Synthetic oligonucleotide
auucgcuucuuccuaaagg

SEQ ID NO: 3200419 - RNA, 19 nt, Artificial Sequence
  Description of Artificial Sequence: Synthetic oligonucleotide
aaacucaggaagucuuggg

SEQ ID NO: 3200420 - RNA, 19 nt, Artificial Sequence
  Description of Artificial Sequence: Synthetic oligonucleotide
uucugcuggaaauuguucc

SEQ ID NO: 3200421 - RNA, 19 nt, Artificial Sequence
  Description of Artificial Sequence: Synthetic oligonucleotide
aaagaugaauucacccagc

SEQ ID NO: 3200422 - RNA, 19 nt, Artificial Sequence
  Description of Artificial Sequence: Synthetic oligonucleotide
uucuguguugcuccaaugc

SEQ ID NO: 3200423 - RNA, 19 nt, Artificial Sequence
  Description of Artificial Sequence: Synthetic oligonucleotide
gaagacacuggacauaguc

SEQ ID NO: 3200424 - RNA, 19 nt, Artificial Sequence
  Description of Artificial Sequence: Synthetic oligonucleotide
aaagggaaugaaguccugg

SEQ ID NO: 3200425 - RNA, 19 nt, Artificial Sequence
  Description of Artificial Sequence: Synthetic oligonucleotide
caggaggcaagucugaggg

SEQ ID NO: 3200426 - RNA, 19 nt, Artificial Sequence
  Description of Artificial Sequence: Synthetic oligonucleotide
cuuccuaaagggaaugaag

SEQ ID NO: 3200427 - RNA, 19 nt, Artificial Sequence
  Description of Artificial Sequence: Synthetic oligonucleotide
ucaugcuucugucuccagg

SEQ ID NO: 3200428 - RNA, 19 nt, Artificial Sequence
  Description of Artificial Sequence: Synthetic oligonucleotide
agacacuggacauagucug

SEQ ID NO: 3200429 - RNA, 19 nt, Artificial Sequence
  Description of Artificial Sequence: Synthetic oligonucleotide
aagaugaauucacccagcu

SEQ ID NO: 3200430 - RNA, 19 nt, Artificial Sequence
  Description of Artificial Sequence: Synthetic oligonucleotide
uuagguaugugucguucag

SEQ ID NO: 3200431 - RNA, 19 nt, Artificial Sequence
  Description of Artificial Sequence: Synthetic oligonucleotide
gaggguacggauaaaagac

SEQ ID NO: 3200432 - RNA, 19 nt, Artificial Sequence
  Description of Artificial Sequence: Synthetic oligonucleotide
agacucaugcuucugucuc

SEQ ID NO: 3200433 - RNA, 19 nt, Artificial Sequence
  Description of Artificial Sequence: Synthetic oligonucleotide
ugucguucagccaccuugg

SEQ ID NO: 3200434 - RNA, 19 nt, Artificial Sequence
  Description of Artificial Sequence: Synthetic oligonucleotide
uuuucggcuggcaggacag

SEQ ID NO: 3200435 - RNA, 19 nt, Artificial Sequence
  Description of Artificial Sequence: Synthetic oligonucleotide
aagggaaugaaguccuggu

SEQ ID NO: 3200436 - RNA, 19 nt, Artificial Sequence
  Description of Artificial Sequence: Synthetic oligonucleotide
aauucgcuucuuccuaaag

SEQ ID NO: 3200437 - RNA, 19 nt, Artificial Sequence
  Description of Artificial Sequence: Synthetic oligonucleotide
uccaguucuguguugcucc

SEQ ID NO: 3200438 - RNA, 19 nt, Artificial Sequence
  Description of Artificial Sequence: Synthetic oligonucleotide
acgccaauucgcuucuucc

SEQ ID NO: 3200439 - RNA, 19 nt, Artificial Sequence
  Description of Artificial Sequence: Synthetic oligonucleotide
uggguuuucggcuggcagg

SEQ ID NO: 3200440 - RNA, 19 nt, Artificial Sequence
  Description of Artificial Sequence: Synthetic oligonucleotide
cauagucuggguuuucggc

SEQ ID NO: 3200441 - RNA, 19 nt, Artificial Sequence
  Description of Artificial Sequence: Synthetic oligonucleotide
gaccauggguuucaguggg

SEQ ID NO: 3200442 - RNA, 19 nt, Artificial Sequence
  Description of Artificial Sequence: Synthetic oligonucleotide
ucuguguugcuccaaugcu

SEQ ID NO: 3200443 - RNA, 19 nt, Artificial Sequence
  Description of Artificial Sequence: Synthetic oligonucleotide
caccuugggagcaaagugg

SEQ ID NO: 3200444 - RNA, 19 nt, Artificial Sequence
  Description of Artificial Sequence: Synthetic oligonucleotide
uuccucaagugucccaccg

SEQ ID NO: 3200445 - RNA, 19 nt, Artificial Sequence
  Description of Artificial Sequence: Synthetic oligonucleotide
agucacguuguucguaagg

SEQ ID NO: 3200446 - RNA, 19 nt, Artificial Sequence
  Description of Artificial Sequence: Synthetic oligonucleotide
uggaggacgguucuugaug

SEQ ID NO: 3200447 - RNA, 19 nt, Artificial Sequence
  Description of Artificial Sequence: Synthetic oligonucleotide
ucaccuaccgagacuuagg

SEQ ID NO: 3200448 - RNA, 19 nt, Artificial Sequence
  Description of Artificial Sequence: Synthetic oligonucleotide
agacaaagccuuuccuugg

SEQ ID NO: 3200449 - RNA, 19 nt, Artificial Sequence
  Description of Artificial Sequence: Synthetic oligonucleotide
ucuugauggucuuacacuu

SEQ ID NO: 3200450 - RNA, 19 nt, Artificial Sequence
  Description of Artificial Sequence: Synthetic oligonucleotide
aaagccuuuccuuggcccu

SEQ ID NO: 3200451 - RNA, 19 nt, Artificial Sequence
  Description of Artificial Sequence: Synthetic oligonucleotide
agacauucuggucuccauc

SEQ ID NO: 3200452 - RNA, 19 nt, Artificial Sequence
  Description of Artificial Sequence: Synthetic oligonucleotide
ugugauaccggggcggagg

SEQ ID NO: 3200453 - RNA, 19 nt, Artificial Sequence
  Description of Artificial Sequence: Synthetic oligonucleotide
auaaaagacucaugcuucu

SEQ ID NO: 3200454 - RNA, 19 nt, Artificial Sequence
  Description of Artificial Sequence: Synthetic oligonucleotide
aagacucaugcuucugucu

SEQ ID NO: 3200455 - RNA, 19 nt, Artificial Sequence
  Description of Artificial Sequence: Synthetic oligonucleotide
agaugaauucacccagcuc

SEQ ID NO: 3200456 - RNA, 19 nt, Artificial Sequence
  Description of Artificial Sequence: Synthetic oligonucleotide
uuuggcgcccagauguucc

SEQ ID NO: 3200457 - RNA, 19 nt, Artificial Sequence
  Description of Artificial Sequence: Synthetic oligonucleotide
agugccuccgggcuuuggc

SEQ ID NO: 3200458 - RNA, 19 nt, Artificial Sequence
  Description of Artificial Sequence: Synthetic oligonucleotide
gucacguuguucguaaggg

SEQ ID NO: 3200459 - RNA, 19 nt, Artificial Sequence
  Description of Artificial Sequence: Synthetic oligonucleotide
acauagucuggguuuucgg

SEQ ID NO: 3200460 - RNA, 19 nt, Artificial Sequence
  Description of Artificial Sequence: Synthetic oligonucleotide
cauaccuccuuggaggugg

SEQ ID NO: 3200461 - RNA, 19 nt, Artificial Sequence
  Description of Artificial Sequence: Synthetic oligonucleotide
agucugagggguucccacc

SEQ ID NO: 3200462 - RNA, 19 nt, Artificial Sequence
  Description of Artificial Sequence: Synthetic oligonucleotide
agggguucccaccuuuggc

SEQ ID NO: 3200463 - RNA, 19 nt, Artificial Sequence
  Description of Artificial Sequence: Synthetic oligonucleotide
ugcuucugucuccaggugc

SEQ ID NO: 3200464 - RNA, 19 nt, Artificial Sequence
  Description of Artificial Sequence: Synthetic oligonucleotide
gugucguucagccaccuug

SEQ ID NO: 3200465 - RNA, 19 nt, Artificial Sequence
  Description of Artificial Sequence: Synthetic oligonucleotide
caaagccuuuccuuggccc

SEQ ID NO: 3200466 - RNA, 19 nt, Artificial Sequence
  Description of Artificial Sequence: Synthetic oligonucleotide
accuuuggcgaugaccugc

SEQ ID NO: 3200467 - RNA, 19 nt, Artificial Sequence
  Description of Artificial Sequence: Synthetic oligonucleotide
gauggucuuacacuuaggu

SEQ ID NO: 3200468 - RNA, 19 nt, Artificial Sequence
  Description of Artificial Sequence: Synthetic oligonucleotide
ugauggucuuacacuuagg

SEQ ID NO: 3200469 - RNA, 19 nt, Artificial Sequence
  Description of Artificial Sequence: Synthetic oligonucleotide
acuuagguaugugucguuc

SEQ ID NO: 3200470 - RNA, 19 nt, Artificial Sequence
  Description of Artificial Sequence: Synthetic oligonucleotide
ucacccagcuccucaaacc

SEQ ID NO: 3200471 - RNA, 19 nt, Artificial Sequence
  Description of Artificial Sequence: Synthetic oligonucleotide
uaagggucgugcuuagcug

SEQ ID NO: 3200472 - RNA, 19 nt, Artificial Sequence
  Description of Artificial Sequence: Synthetic oligonucleotide
uaaguggagacacccuccu

SEQ ID NO: 3200473 - RNA, 19 nt, Artificial Sequence
  Description of Artificial Sequence: Synthetic oligonucleotide
ggaaauuguuccucaagug

SEQ ID NO: 3200474 - RNA, 19 nt, Artificial Sequence
  Description of Artificial Sequence: Synthetic oligonucleotide
cucgccuguacugagagac

SEQ ID NO: 3200475 - RNA, 19 nt, Artificial Sequence
  Description of Artificial Sequence: Synthetic oligonucleotide
cuuugugauaccggggcgg

SEQ ID NO: 3200476 - RNA, 19 nt, Artificial Sequence
  Description of Artificial Sequence: Synthetic oligonucleotide
cacguuguucguaaggguc

SEQ ID NO: 3200477 - RNA, 19 nt, Artificial Sequence
  Description of Artificial Sequence: Synthetic oligonucleotide
cuggaaauuguuccucaag

SEQ ID NO: 3200478 - RNA, 19 nt, Artificial Sequence
  Description of Artificial Sequence: Synthetic oligonucleotide
uuucaguggguaugcccgg

SEQ ID NO: 3200479 - RNA, 19 nt, Artificial Sequence
  Description of Artificial Sequence: Synthetic oligonucleotide
guugcuccaaugcuucugc

SEQ ID NO: 3200480 - RNA, 19 nt, Artificial Sequence
  Description of Artificial Sequence: Synthetic oligonucleotide
uggucguuugcuuugugau

SEQ ID NO: 3200481 - RNA, 19 nt, Artificial Sequence
  Description of Artificial Sequence: Synthetic oligonucleotide
acaaggaagacaaagccuu

SEQ ID NO: 3200482 - RNA, 19 nt, Artificial Sequence
  Description of Artificial Sequence: Synthetic oligonucleotide
ucuggucuccaucaccagu

SEQ ID NO: 3200483 - RNA, 19 nt, Artificial Sequence
  Description of Artificial Sequence: Synthetic oligonucleotide
ggaggacgguucuugaugg

SEQ ID NO: 3200484 - RNA, 19 nt, Artificial Sequence
  Description of Artificial Sequence: Synthetic oligonucleotide
caaaguggcggcugcagug

SEQ ID NO: 3200485 - RNA, 19 nt, Artificial Sequence
  Description of Artificial Sequence: Synthetic oligonucleotide
agagacuuccgguggacca

SEQ ID NO: 3200486 - RNA, 19 nt, Artificial Sequence
  Description of Artificial Sequence: Synthetic oligonucleotide
accuccuccugccuggcac

SEQ ID NO: 3200487 - RNA, 19 nt, Artificial Sequence
  Description of Artificial Sequence: Synthetic oligonucleotide
gcugggaagagucacguug

SEQ ID NO: 3200488 - RNA, 19 nt, Artificial Sequence
  Description of Artificial Sequence: Synthetic oligonucleotide
uccuuggagguggaggacg

SEQ ID NO: 3200489 - RNA, 19 nt, Artificial Sequence
  Description of Artificial Sequence: Synthetic oligonucleotide
gaggcaagaauuaaaagau

SEQ ID NO: 3200490 - RNA, 19 nt, Artificial Sequence
  Description of Artificial Sequence: Synthetic oligonucleotide
ccuaaagggaaugaagucc

SEQ ID NO: 3200491 - RNA, 19 nt, Artificial Sequence
  Description of Artificial Sequence: Synthetic oligonucleotide
aaugcuucugcuggaaauu

SEQ ID NO: 3200492 - RNA, 19 nt, Artificial Sequence
  Description of Artificial Sequence: Synthetic oligonucleotide
agacuuaggcgagaauuuc

SEQ ID NO: 3200493 - RNA, 19 nt, Artificial Sequence
  Description of Artificial Sequence: Synthetic oligonucleotide
guuugcuuugugauaccgg

SEQ ID NO: 3200494 - RNA, 19 nt, Artificial Sequence
  Description of Artificial Sequence: Synthetic oligonucleotide
uccaggugcucuuccgagg

SEQ ID NO: 3200495 - RNA, 19 nt, Artificial Sequence
  Description of Artificial Sequence: Synthetic oligonucleotide
ucagcugucauaccuccuu

SEQ ID NO: 3200496 - RNA, 19 nt, Artificial Sequence
  Description of Artificial Sequence: Synthetic oligonucleotide
uguuccucaagugucccac

SEQ ID NO: 3200497 - RNA, 19 nt, Artificial Sequence
  Description of Artificial Sequence: Synthetic oligonucleotide
accaaauacacuuaaauuc

SEQ ID NO: 3200498 - RNA, 19 nt, Artificial Sequence
  Description of Artificial Sequence: Synthetic oligonucleotide
acuuaaauucuauauagac

SEQ ID NO: 3200499 - RNA, 19 nt, Artificial Sequence
  Description of Artificial Sequence: Synthetic oligonucleotide
uuaaaugaguacuauauug

SEQ ID NO: 3200500 - RNA, 19 nt, Artificial Sequence
  Description of Artificial Sequence: Synthetic oligonucleotide
ucuauauagacaaaguaca

SEQ ID NO: 3200501 - RNA, 19 nt, Artificial Sequence
  Description of Artificial Sequence: Synthetic oligonucleotide
aucuuuuagccuuacagcc

SEQ ID NO: 3200502 - RNA, 19 nt, Artificial Sequence
  Description of Artificial Sequence: Synthetic oligonucleotide
uuuacuucaauucacuugu

SEQ ID NO: 3200503 - RNA, 19 nt, Artificial Sequence
  Description of Artificial Sequence: Synthetic oligonucleotide
uuuacaguaguccucuugg

SEQ ID NO: 3200504 - RNA, 19 nt, Artificial Sequence
  Description of Artificial Sequence: Synthetic oligonucleotide
auagacaaaguacagguuc

SEQ ID NO: 3200505 - RNA, 19 nt, Artificial Sequence
  Description of Artificial Sequence: Synthetic oligonucleotide
uucuauauagacaaaguac

SEQ ID NO: 3200506 - RNA, 19 nt, Artificial Sequence
  Description of Artificial Sequence: Synthetic oligonucleotide
uaaaacagcaucuggaagc

SEQ ID NO: 3200507 - RNA, 19 nt, Artificial Sequence
  Description of Artificial Sequence: Synthetic oligonucleotide
uauuuuaacuuucuuggag

SEQ ID NO: 3200508 - RNA, 19 nt, Artificial Sequence
  Description of Artificial Sequence: Synthetic oligonucleotide
aaaauguagugauauuguc

SEQ ID NO: 3200509 - RNA, 19 nt, Artificial Sequence
  Description of Artificial Sequence: Synthetic oligonucleotide
uuugcaaugauccuuuaca

SEQ ID NO: 3200510 - RNA, 19 nt, Artificial Sequence
  Description of Artificial Sequence: Synthetic oligonucleotide
uaaaugaguacuauauugc

SEQ ID NO: 3200511 - RNA, 19 nt, Artificial Sequence
  Description of Artificial Sequence: Synthetic oligonucleotide
acuauauugcaauaaaaug

SEQ ID NO: 3200512 - RNA, 19 nt, Artificial Sequence
  Description of Artificial Sequence: Synthetic oligonucleotide
uuucaaaugaacuuuuaca

SEQ ID NO: 3200513 - RNA, 19 nt, Artificial Sequence
  Description of Artificial Sequence: Synthetic oligonucleotide
auugcaauaaaauguagug

SEQ ID NO: 3200514 - RNA, 19 nt, Artificial Sequence
  Description of Artificial Sequence: Synthetic oligonucleotide
uacaaaaugauuuacgaau

SEQ ID NO: 3200515 - RNA, 19 nt, Artificial Sequence
  Description of Artificial Sequence: Synthetic oligonucleotide
aaauucuauauagacaaag

SEQ ID NO: 3200516 - RNA, 19 nt, Artificial Sequence
  Description of Artificial Sequence: Synthetic oligonucleotide
uuuuaagugcuuaaaugag

SEQ ID NO: 3200517 - RNA, 19 nt, Artificial Sequence
  Description of Artificial Sequence: Synthetic oligonucleotide
aacuuguuuacaguagucc

SEQ ID NO: 3200518 - RNA, 19 nt, Artificial Sequence
  Description of Artificial Sequence: Synthetic oligonucleotide
aaguacagguucuucacgg

SEQ ID NO: 3200519 - RNA, 19 nt, Artificial Sequence
  Description of Artificial Sequence: Synthetic oligonucleotide
uccucuuggauucugaacc

SEQ ID NO: 3200520 - RNA, 19 nt, Artificial Sequence
  Description of Artificial Sequence: Synthetic oligonucleotide
guagcuuuuagucugacug

SEQ ID NO: 3200521 - RNA, 19 nt, Artificial Sequence
  Description of Artificial Sequence: Synthetic oligonucleotide
aauguguucacuuuucuuu

SEQ ID NO: 3200522 - RNA, 19 nt, Artificial Sequence
  Description of Artificial Sequence: Synthetic oligonucleotide
uucaaaugaacuuuuacau

SEQ ID NO: 3200523 - RNA, 19 nt, Artificial Sequence
  Description of Artificial Sequence: Synthetic oligonucleotide
aaugauuuacgaaugguug

SEQ ID NO: 3200524 - RNA, 19 nt, Artificial Sequence
  Description of Artificial Sequence: Synthetic oligonucleotide
ugaaccauauaaacaauug

SEQ ID NO: 3200525 - RNA, 19 nt, Artificial Sequence
  Description of Artificial Sequence: Synthetic oligonucleotide
ugaaguuugagacaucagu

SEQ ID NO: 3200526 - RNA, 19 nt, Artificial Sequence
  Description of Artificial Sequence: Synthetic oligonucleotide
uuuuacuucaauucacuug

SEQ ID NO: 3200527 - RNA, 19 nt, Artificial Sequence
  Description of Artificial Sequence: Synthetic oligonucleotide
uuuaugucagcuucugagg

SEQ ID NO: 3200528 - RNA, 19 nt, Artificial Sequence
  Description of Artificial Sequence: Synthetic oligonucleotide
gauucugaaccauauaaac

SEQ ID NO: 3200529 - RNA, 19 nt, Artificial Sequence
  Description of Artificial Sequence: Synthetic oligonucleotide
acaucaguccucuuuacac

SEQ ID NO: 3200530 - RNA, 19 nt, Artificial Sequence
  Description of Artificial Sequence: Synthetic oligonucleotide
uauauugcaauaaaaugua

SEQ ID NO: 3200531 - RNA, 19 nt, Artificial Sequence
  Description of Artificial Sequence: Synthetic oligonucleotide
aaccauauaaacaauugug

SEQ ID NO: 3200532 - RNA, 19 nt, Artificial Sequence
  Description of Artificial Sequence: Synthetic oligonucleotide
uacuauauugcaauaaaau

SEQ ID NO: 3200533 - RNA, 19 nt, Artificial Sequence
  Description of Artificial Sequence: Synthetic oligonucleotide
uuauuguucagugacagga

SEQ ID NO: 3200534 - RNA, 19 nt, Artificial Sequence
  Description of Artificial Sequence: Synthetic oligonucleotide
uaaaauguagugauauugu

SEQ ID NO: 3200535 - RNA, 19 nt, Artificial Sequence
  Description of Artificial Sequence: Synthetic oligonucleotide
auuuuguuguuucugagca

SEQ ID NO: 3200536 - RNA, 19 nt, Artificial Sequence
  Description of Artificial Sequence: Synthetic oligonucleotide
cuuucuuggaguuucuucc

SEQ ID NO: 3200537 - RNA, 19 nt, Artificial Sequence
  Description of Artificial Sequence: Synthetic oligonucleotide
uauugcaauaaaauguagu

SEQ ID NO: 3200538 - RNA, 19 nt, Artificial Sequence
  Description of Artificial Sequence: Synthetic oligonucleotide
aaugauccuuuacaaaaug

SEQ ID NO: 3200539 - RNA, 19 nt, Artificial Sequence
  Description of Artificial Sequence: Synthetic oligonucleotide
aaaugaguacuauauugca

SEQ ID NO: 3200540 - RNA, 19 nt, Artificial Sequence
  Description of Artificial Sequence: Synthetic oligonucleotide
cuuucuuuucuucugcucg

SEQ ID NO: 3200541 - RNA, 19 nt, Artificial Sequence
  Description of Artificial Sequence: Synthetic oligonucleotide
aaaguacagguucuucacg

SEQ ID NO: 3200542 - RNA, 19 nt, Artificial Sequence
  Description of Artificial Sequence: Synthetic oligonucleotide
gaucuuuuagccuuacagc

SEQ ID NO: 3200543 - RNA, 19 nt, Artificial Sequence
  Description of Artificial Sequence: Synthetic oligonucleotide
uggauucugaaccauauaa

SEQ ID NO: 3200544 - RNA, 19 nt, Artificial Sequence
  Description of Artificial Sequence: Synthetic oligonucleotide
acuucaauucacuuguaag

SEQ ID NO: 3200545 - RNA, 19 nt, Artificial Sequence
  Description of Artificial Sequence: Synthetic oligonucleotide
aguuaguugcucuaaaaca

SEQ ID NO: 3200546 - RNA, 19 nt, Artificial Sequence
  Description of Artificial Sequence: Synthetic oligonucleotide
uccucuuuacaccaaauac

SEQ ID NO: 3200547 - RNA, 19 nt, Artificial Sequence
  Description of Artificial Sequence: Synthetic oligonucleotide
uagccuuacagccaaguag

SEQ ID NO: 3200548 - RNA, 19 nt, Artificial Sequence
  Description of Artificial Sequence: Synthetic oligonucleotide
uaaacaauuguggaugaag

SEQ ID NO: 3200549 - RNA, 19 nt, Artificial Sequence
  Description of Artificial Sequence: Synthetic oligonucleotide
agccaaguagcuuuuaguc

SEQ ID NO: 3200550 - RNA, 19 nt, Artificial Sequence
  Description of Artificial Sequence: Synthetic oligonucleotide
aacaauuguggaugaagug

SEQ ID NO: 3200551 - RNA, 19 nt, Artificial Sequence
  Description of Artificial Sequence: Synthetic oligonucleotide
uuuaagugcuuaaaugagu

SEQ ID NO: 3200552 - RNA, 19 nt, Artificial Sequence
  Description of Artificial Sequence: Synthetic oligonucleotide
cucuuuacaccaaauacac

SEQ ID NO: 3200553 - RNA, 19 nt, Artificial Sequence
  Description of Artificial Sequence: Synthetic oligonucleotide
uuaagugcuuaaaugagua

SEQ ID NO: 3200554 - RNA, 19 nt, Artificial Sequence
  Description of Artificial Sequence: Synthetic oligonucleotide
ugaggcuguaguuaguugc

SEQ ID NO: 3200555 - RNA, 19 nt, Artificial Sequence
  Description of Artificial Sequence: Synthetic oligonucleotide
uaguuaguugcucuaaaac

SEQ ID NO: 3200556 - RNA, 19 nt, Artificial Sequence
  Description of Artificial Sequence: Synthetic oligonucleotide
auacacuuaaauucuauau

SEQ ID NO: 3200557 - RNA, 19 nt, Artificial Sequence
  Description of Artificial Sequence: Synthetic oligonucleotide
ucuuauuguucagugacag

SEQ ID NO: 3200558 - RNA, 19 nt, Artificial Sequence
  Description of Artificial Sequence: Synthetic oligonucleotide
cuauauugcaauaaaaugu

SEQ ID NO: 3200559 - RNA, 19 nt, Artificial Sequence
  Description of Artificial Sequence: Synthetic oligonucleotide
uacacuuaaauucuauaua

SEQ ID NO: 3200560 - RNA, 19 nt, Artificial Sequence
  Description of Artificial Sequence: Synthetic oligonucleotide
aauucuauauagacaaagu

SEQ ID NO: 3200561 - RNA, 19 nt, Artificial Sequence
  Description of Artificial Sequence: Synthetic oligonucleotide
uauugucuuuuccagacaa

SEQ ID NO: 3200562 - RNA, 19 nt, Artificial Sequence
  Description of Artificial Sequence: Synthetic oligonucleotide
acuuucuuggaguuucuuc

SEQ ID NO: 3200563 - RNA, 19 nt, Artificial Sequence
  Description of Artificial Sequence: Synthetic oligonucleotide
ugauccuuuacaaaaugau

SEQ ID NO: 3200564 - RNA, 19 nt, Artificial Sequence
  Description of Artificial Sequence: Synthetic oligonucleotide
uagucugacugccugagug

SEQ ID NO: 3200565 - RNA, 19 nt, Artificial Sequence
  Description of Artificial Sequence: Synthetic oligonucleotide
uggaguuucuuccuuuugc

SEQ ID NO: 3200566 - RNA, 19 nt, Artificial Sequence
  Description of Artificial Sequence: Synthetic oligonucleotide
ucaguucuugaucuuuuag

SEQ ID NO: 3200567 - RNA, 19 nt, Artificial Sequence
  Description of Artificial Sequence: Synthetic oligonucleotide
cuauauagacaaaguacag

SEQ ID NO: 3200568 - RNA, 19 nt, Artificial Sequence
  Description of Artificial Sequence: Synthetic oligonucleotide
uucagugacaggaacuugu

SEQ ID NO: 3200569 - RNA, 19 nt, Artificial Sequence
  Description of Artificial Sequence: Synthetic oligonucleotide
ucuggugauuccuuuaugu

SEQ ID NO: 3200570 - RNA, 19 nt, Artificial Sequence
  Description of Artificial Sequence: Synthetic oligonucleotide
aaccucuuauuguucagug

SEQ ID NO: 3200571 - RNA, 19 nt, Artificial Sequence
  Description of Artificial Sequence: Synthetic oligonucleotide
aaacaauuguggaugaagu

SEQ ID NO: 3200572 - RNA, 19 nt, Artificial Sequence
  Description of Artificial Sequence: Synthetic oligonucleotide
agccuuacagccaaguagc

SEQ ID NO: 3200573 - RNA, 19 nt, Artificial Sequence
  Description of Artificial Sequence: Synthetic oligonucleotide
auucuauauagacaaagua

SEQ ID NO: 3200574 - RNA, 19 nt, Artificial Sequence
  Description of Artificial Sequence: Synthetic oligonucleotide
auuuacgaaugguugaagu

SEQ ID NO: 3200575 - RNA, 19 nt, Artificial Sequence
  Description of Artificial Sequence: Synthetic oligonucleotide
uggugauuccuuuauguca

SEQ ID NO: 3200576 - RNA, 19 nt, Artificial Sequence
  Description of Artificial Sequence: Synthetic oligonucleotide
gugauauugucuuuuccag

SEQ ID NO: 3200577 - RNA, 19 nt, Artificial Sequence
  Description of Artificial Sequence: Synthetic oligonucleotide
uauaaacaauuguggauga

SEQ ID NO: 3200578 - RNA, 19 nt, Artificial Sequence
  Description of Artificial Sequence: Synthetic oligonucleotide
aguacuauauugcaauaaa

SEQ ID NO: 3200579 - RNA, 19 nt, Artificial Sequence
  Description of Artificial Sequence: Synthetic oligonucleotide
cauuuuguuguuucugagc

SEQ ID NO: 3200580 - RNA, 19 nt, Artificial Sequence
  Description of Artificial Sequence: Synthetic oligonucleotide
uuaacuuucuuggaguuuc

SEQ ID NO: 3200581 - RNA, 19 nt, Artificial Sequence
  Description of Artificial Sequence: Synthetic oligonucleotide
acuuguuuacaguaguccu

SEQ ID NO: 3200582 - RNA, 19 nt, Artificial Sequence
  Description of Artificial Sequence: Synthetic oligonucleotide
uucugagcaccccaggugc

SEQ ID NO: 3200583 - RNA, 19 nt, Artificial Sequence
  Description of Artificial Sequence: Synthetic oligonucleotide
acaccaaauacacuuaaau

SEQ ID NO: 3200584 - RNA, 19 nt, Artificial Sequence
  Description of Artificial Sequence: Synthetic oligonucleotide
uacgaaugguugaaguuug

SEQ ID NO: 3200585 - RNA, 19 nt, Artificial Sequence
  Description of Artificial Sequence: Synthetic oligonucleotide
gaaugguugaaguuugaga

SEQ ID NO: 3200586 - RNA, 19 nt, Artificial Sequence
  Description of Artificial Sequence: Synthetic oligonucleotide
acaauuguggaugaagugu

SEQ ID NO: 3200587 - RNA, 19 nt, Artificial Sequence
  Description of Artificial Sequence: Synthetic oligonucleotide
uacagguucuucacggugc

SEQ ID NO: 3200588 - RNA, 19 nt, Artificial Sequence
  Description of Artificial Sequence: Synthetic oligonucleotide
agucugacugccugagugc

SEQ ID NO: 3200589 - RNA, 19 nt, Artificial Sequence
  Description of Artificial Sequence: Synthetic oligonucleotide
gaaguuugagacaucaguc

SEQ ID NO: 3200590 - RNA, 19 nt, Artificial Sequence
  Description of Artificial Sequence: Synthetic oligonucleotide
cuauugagaaacugggcug

SEQ ID NO: 3200591 - RNA, 19 nt, Artificial Sequence
  Description of Artificial Sequence: Synthetic oligonucleotide
agcuuuuagucugacugcc

SEQ ID NO: 3200592 - RNA, 19 nt, Artificial Sequence
  Description of Artificial Sequence: Synthetic oligonucleotide
ucuuuuagccuuacagcca

SEQ ID NO: 3200593 - RNA, 19 nt, Artificial Sequence
  Description of Artificial Sequence: Synthetic oligonucleotide
aguuugagacaucaguccu

SEQ ID NO: 3200594 - RNA, 19 nt, Artificial Sequence
  Description of Artificial Sequence: Synthetic oligonucleotide
uccuuuugcaauguguuca

SEQ ID NO: 3200595 - RNA, 19 nt, Artificial Sequence
  Description of Artificial Sequence: Synthetic oligonucleotide
uagacaaaguacagguucu

SEQ ID NO: 3200596 - RNA, 19 nt, Artificial Sequence
  Description of Artificial Sequence: Synthetic oligonucleotide
aaaugauuuacgaaugguu

SEQ ID NO: 3200597 - RNA, 19 nt, Artificial Sequence
  Description of Artificial Sequence: Synthetic oligonucleotide
aauuaaaugaguguuaccc

SEQ ID NO: 3200598 - RNA, 19 nt, Artificial Sequence
  Description of Artificial Sequence: Synthetic oligonucleotide
aagauaaccaaauuaaaug

SEQ ID NO: 3200599 - RNA, 19 nt, Artificial Sequence
  Description of Artificial Sequence: Synthetic oligonucleotide
auaaucuacaccaugaucc

SEQ ID NO: 3200600 - RNA, 19 nt, Artificial Sequence
  Description of Artificial Sequence: Synthetic oligonucleotide
uaauucacauguaacaugg

SEQ ID NO: 3200601 - RNA, 19 nt, Artificial Sequence
  Description of Artificial Sequence: Synthetic oligonucleotide
uuuaguuacagguaaauac

SEQ ID NO: 3200602 - RNA, 19 nt, Artificial Sequence
  Description of Artificial Sequence: Synthetic oligonucleotide
gaugucacuaccuacaaag

SEQ ID NO: 3200603 - RNA, 19 nt, Artificial Sequence
  Description of Artificial Sequence: Synthetic oligonucleotide
aauucauugaaaugauuuc

SEQ ID NO: 3200604 - RNA, 19 nt, Artificial Sequence
  Description of Artificial Sequence: Synthetic oligonucleotide
aaaagcacuuaugugaccc

SEQ ID NO: 3200605 - RNA, 19 nt, Artificial Sequence
  Description of Artificial Sequence: Synthetic oligonucleotide
aacguuacaacauugggga

SEQ ID NO: 3200606 - RNA, 19 nt, Artificial Sequence
  Description of Artificial Sequence: Synthetic oligonucleotide
uaagauaaccgaaagauaa

SEQ ID NO: 3200607 - RNA, 19 nt, Artificial Sequence
  Description of Artificial Sequence: Synthetic oligonucleotide
aaagaccuaacuuccuucc

SEQ ID NO: 3200608 - RNA, 19 nt, Artificial Sequence
  Description of Artificial Sequence: Synthetic oligonucleotide
aggcuaaauaaauaaauac

SEQ ID NO: 3200609 - RNA, 19 nt, Artificial Sequence
  Description of Artificial Sequence: Synthetic oligonucleotide
aauaugcagauccauggag

SEQ ID NO: 3200610 - RNA, 19 nt, Artificial Sequence
  Description of Artificial Sequence: Synthetic oligonucleotide
acucaugucagcuuuuccc

SEQ ID NO: 3200611 - RNA, 19 nt, Artificial Sequence
  Description of Artificial Sequence: Synthetic oligonucleotide
auuaagggguaauuaaugg

SEQ ID NO: 3200612 - RNA, 19 nt, Artificial Sequence
  Description of Artificial Sequence: Synthetic oligonucleotide
acgacuuuagauuauugac

SEQ ID NO: 3200613 - RNA, 19 nt, Artificial Sequence
  Description of Artificial Sequence: Synthetic oligonucleotide
auuuuacuuaaauuaacag

SEQ ID NO: 3200614 - RNA, 19 nt, Artificial Sequence
  Description of Artificial Sequence: Synthetic oligonucleotide
aaacuuaaauuucaaacau

SEQ ID NO: 3200615 - RNA, 19 nt, Artificial Sequence
  Description of Artificial Sequence: Synthetic oligonucleotide
auucauugaaaugauuucc

SEQ ID NO: 3200616 - RNA, 19 nt, Artificial Sequence
  Description of Artificial Sequence: Synthetic oligonucleotide
aacugauugacuugaauga

SEQ ID NO: 3200617 - RNA, 19 nt, Artificial Sequence
  Description of Artificial Sequence: Synthetic oligonucleotide
uaaccgaaagauaaaauac

SEQ ID NO: 3200618 - RNA, 19 nt, Artificial Sequence
  Description of Artificial Sequence: Synthetic oligonucleotide
acucuacagacacaaaacc

SEQ ID NO: 3200619 - RNA, 19 nt, Artificial Sequence
  Description of Artificial Sequence: Synthetic oligonucleotide
uuuauuaguuugaacacac

SEQ ID NO: 3200620 - RNA, 19 nt, Artificial Sequence
  Description of Artificial Sequence: Synthetic oligonucleotide
uauaguuagaacuuaacuu

SEQ ID NO: 3200621 - RNA, 19 nt, Artificial Sequence
  Description of Artificial Sequence: Synthetic oligonucleotide
auuuguuaagauuuuaagu

SEQ ID NO: 3200622 - RNA, 19 nt, Artificial Sequence
  Description of Artificial Sequence: Synthetic oligonucleotide
uuaagggguaauuaauggg

SEQ ID NO: 3200623 - RNA, 19 nt, Artificial Sequence
  Description of Artificial Sequence: Synthetic oligonucleotide
acaauagucagucauguca

SEQ ID NO: 3200624 - RNA, 19 nt, Artificial Sequence
  Description of Artificial Sequence: Synthetic oligonucleotide
aaauagauugguuguuuag

SEQ ID NO: 3200625 - RNA, 19 nt, Artificial Sequence
  Description of Artificial Sequence: Synthetic oligonucleotide
acuaagagaugccaucugc

SEQ ID NO: 3200626 - RNA, 19 nt, Artificial Sequence
  Description of Artificial Sequence: Synthetic oligonucleotide
ugaacguuacaacauuggg

SEQ ID NO: 3200627 - RNA, 19 nt, Artificial Sequence
  Description of Artificial Sequence: Synthetic oligonucleotide
agauaaccaaauuaaauga

SEQ ID NO: 3200628 - RNA, 19 nt, Artificial Sequence
  Description of Artificial Sequence: Synthetic oligonucleotide
uauuaagggguaauuaaug

SEQ ID NO: 3200629 - RNA, 19 nt, Artificial Sequence
  Description of Artificial Sequence: Synthetic oligonucleotide
uuaggauagaucuguauug

SEQ ID NO: 3200630 - RNA, 19 nt, Artificial Sequence
  Description of Artificial Sequence: Synthetic oligonucleotide
agauuauugacaaugaaca

SEQ ID NO: 3200631 - RNA, 19 nt, Artificial Sequence
  Description of Artificial Sequence: Synthetic oligonucleotide
ucugaaauuacagggauca

SEQ ID NO: 3200632 - RNA, 19 nt, Artificial Sequence
  Description of Artificial Sequence: Synthetic oligonucleotide
aaacaaguccuccuaccac

SEQ ID NO: 3200633 - RNA, 19 nt, Artificial Sequence
  Description of Artificial Sequence: Synthetic oligonucleotide
acugaaacaauccaaguau

SEQ ID NO: 3200634 - RNA, 19 nt, Artificial Sequence
  Description of Artificial Sequence: Synthetic oligonucleotide
auaguuagaacuuaacuuu

SEQ ID NO: 3200635 - RNA, 19 nt, Artificial Sequence
  Description of Artificial Sequence: Synthetic oligonucleotide
ucucagauggccauggucu

SEQ ID NO: 3200636 - RNA, 19 nt, Artificial Sequence
  Description of Artificial Sequence: Synthetic oligonucleotide
uggauagagacuauagucu

SEQ ID NO: 3200637 - RNA, 19 nt, Artificial Sequence
  Description of Artificial Sequence: Synthetic oligonucleotide
uguuuaauucacauuuucu

SEQ ID NO: 3200638 - RNA, 19 nt, Artificial Sequence
  Description of Artificial Sequence: Synthetic oligonucleotide
aacucaguaaaccuuacuu

SEQ ID NO: 3200639 - RNA, 19 nt, Artificial Sequence
  Description of Artificial Sequence: Synthetic oligonucleotide
ucauaugccagguaguugu

SEQ ID NO: 3200640 - RNA, 19 nt, Artificial Sequence
  Description of Artificial Sequence: Synthetic oligonucleotide
ugucacagcauccaggcca

SEQ ID NO: 3200641 - RNA, 19 nt, Artificial Sequence
  Description of Artificial Sequence: Synthetic oligonucleotide
aaaacaaguccuccuacca

SEQ ID NO: 3200642 - RNA, 19 nt, Artificial Sequence
  Description of Artificial Sequence: Synthetic oligonucleotide
acuuaaguaauguggaaca

SEQ ID NO: 3200643 - RNA, 19 nt, Artificial Sequence
  Description of Artificial Sequence: Synthetic oligonucleotide
gaacguuacaacauugggg

SEQ ID NO: 3200644 - RNA, 19 nt, Artificial Sequence
  Description of Artificial Sequence: Synthetic oligonucleotide
gggauuuacauucacauug

SEQ ID NO: 3200645 - RNA, 19 nt, Artificial Sequence
  Description of Artificial Sequence: Synthetic oligonucleotide
auaaauaaauaccaaccaa

SEQ ID NO: 3200646 - RNA, 19 nt, Artificial Sequence
  Description of Artificial Sequence: Synthetic oligonucleotide
acagucuauacaaagcagc

SEQ ID NO: 3200647 - RNA, 19 nt, Artificial Sequence
  Description of Artificial Sequence: Synthetic oligonucleotide
uaaagcaucaguauuuguu

SEQ ID NO: 3200648 - RNA, 19 nt, Artificial Sequence
  Description of Artificial Sequence: Synthetic oligonucleotide
gacaaagguguguuggugg

SEQ ID NO: 3200649 - RNA, 19 nt, Artificial Sequence
  Description of Artificial Sequence: Synthetic oligonucleotide
acauuuugaauccuguuga

SEQ ID NO: 3200650 - RNA, 19 nt, Artificial Sequence
  Description of Artificial Sequence: Synthetic oligonucleotide
auaaccgaaagauaaaaua

SEQ ID NO: 3200651 - RNA, 19 nt, Artificial Sequence
  Description of Artificial Sequence: Synthetic oligonucleotide
uucauugaaaugauuucca

SEQ ID NO: 3200652 - RNA, 19 nt, Artificial Sequence
  Description of Artificial Sequence: Synthetic oligonucleotide
accuaaauauuccuuacug

SEQ ID NO: 3200653 - RNA, 19 nt, Artificial Sequence
  Description of Artificial Sequence: Synthetic oligonucleotide
gauaaccaaauuaaaugag

SEQ ID NO: 3200654 - RNA, 19 nt, Artificial Sequence
  Description of Artificial Sequence: Synthetic oligonucleotide
aucugcgagguaucgaugc

SEQ ID NO: 3200655 - RNA, 19 nt, Artificial Sequence
  Description of Artificial Sequence: Synthetic oligonucleotide
guaaugaucuuacaguaac

SEQ ID NO: 3200656 - RNA, 19 nt, Artificial Sequence
  Description of Artificial Sequence: Synthetic oligonucleotide
aaagcaucaguauuuguuu

SEQ ID NO: 3200657 - RNA, 19 nt, Artificial Sequence
  Description of Artificial Sequence: Synthetic oligonucleotide
ugagcuuaccaccagcuga

SEQ ID NO: 3200658 - RNA, 19 nt, Artificial Sequence
  Description of Artificial Sequence: Synthetic oligonucleotide
auaauucacauguaacaug

SEQ ID NO: 3200659 - RNA, 19 nt, Artificial Sequence
  Description of Artificial Sequence: Synthetic oligonucleotide
agagaaaagugcuuaugag

SEQ ID NO: 3200660 - RNA, 19 nt, Artificial Sequence
  Description of Artificial Sequence: Synthetic oligonucleotide
auuugagaaacacaaacuu

SEQ ID NO: 3200661 - RNA, 19 nt, Artificial Sequence
  Description of Artificial Sequence: Synthetic oligonucleotide
ucaacaguaagacgaggcc

SEQ ID NO: 3200662 - RNA, 19 nt, Artificial Sequence
  Description of Artificial Sequence: Synthetic oligonucleotide
auuaacuaaaacucaguaa

SEQ ID NO: 3200663 - RNA, 19 nt, Artificial Sequence
  Description of Artificial Sequence: Synthetic oligonucleotide
uauuauguggcuagaauuu

SEQ ID NO: 3200664 - RNA, 19 nt, Artificial Sequence
  Description of Artificial Sequence: Synthetic oligonucleotide
aacgcaauacaguuacuca

SEQ ID NO: 3200665 - RNA, 19 nt, Artificial Sequence
  Description of Artificial Sequence: Synthetic oligonucleotide
ucuaacucaguuuguaaac

SEQ ID NO: 3200666 - RNA, 19 nt, Artificial Sequence
  Description of Artificial Sequence: Synthetic oligonucleotide
cuagcaacagaugagcagg

SEQ ID NO: 3200667 - RNA, 19 nt, Artificial Sequence
  Description of Artificial Sequence: Synthetic oligonucleotide
uuaaaugaguguuacccaa

SEQ ID NO: 3200668 - RNA, 19 nt, Artificial Sequence
  Description of Artificial Sequence: Synthetic oligonucleotide
uggacauccaugaaugcca

SEQ ID NO: 3200669 - RNA, 19 nt, Artificial Sequence
  Description of Artificial Sequence: Synthetic oligonucleotide
ugucacuaccuacaaagca

SEQ ID NO: 3200670 - RNA, 19 nt, Artificial Sequence
  Description of Artificial Sequence: Synthetic oligonucleotide
uucaacagacagcuaacgc

SEQ ID NO: 3200671 - RNA, 19 nt, Artificial Sequence
  Description of Artificial Sequence: Synthetic oligonucleotide
acgacuacuguuuaauuca

SEQ ID NO: 3200672 - RNA, 19 nt, Artificial Sequence
  Description of Artificial Sequence: Synthetic oligonucleotide
aacaauagucagucauguc

SEQ ID NO: 3200673 - RNA, 19 nt, Artificial Sequence
  Description of Artificial Sequence: Synthetic oligonucleotide
ucuauuauguggcuagaau

SEQ ID NO: 3200674 - RNA, 19 nt, Artificial Sequence
  Description of Artificial Sequence: Synthetic oligonucleotide
ggucuauugauuaacauug

SEQ ID NO: 3200675 - RNA, 19 nt, Artificial Sequence
  Description of Artificial Sequence: Synthetic oligonucleotide
auaugcagauccauggagc

SEQ ID NO: 3200676 - RNA, 19 nt, Artificial Sequence
  Description of Artificial Sequence: Synthetic oligonucleotide
acccaaggaagucaaacuc

SEQ ID NO: 3200677 - RNA, 19 nt, Artificial Sequence
  Description of Artificial Sequence: Synthetic oligonucleotide
gagagaaaagugcuuauga

SEQ ID NO: 3200678 - RNA, 19 nt, Artificial Sequence
  Description of Artificial Sequence: Synthetic oligonucleotide
uaaaugaguguuacccaag

SEQ ID NO: 3200679 - RNA, 19 nt, Artificial Sequence
  Description of Artificial Sequence: Synthetic oligonucleotide
auuaaaugaguguuaccca

SEQ ID NO: 3200680 - RNA, 19 nt, Artificial Sequence
  Description of Artificial Sequence: Synthetic oligonucleotide
ucuaucuggauagagacua

SEQ ID NO: 3200681 - RNA, 19 nt, Artificial Sequence
  Description of Artificial Sequence: Synthetic oligonucleotide
acuagcaacagaugagcag

SEQ ID NO: 3200682 - RNA, 19 nt, Artificial Sequence
  Description of Artificial Sequence: Synthetic oligonucleotide
acagaagacgacuuuagau

SEQ ID NO: 3200683 - RNA, 19 nt, Artificial Sequence
  Description of Artificial Sequence: Synthetic oligonucleotide
aaaauagauugguuguuua

SEQ ID NO: 3200684 - RNA, 19 nt, Artificial Sequence
  Description of Artificial Sequence: Synthetic oligonucleotide
uuuaaagcacuugucugag

SEQ ID NO: 3200685 - RNA, 19 nt, Artificial Sequence
  Description of Artificial Sequence: Synthetic oligonucleotide
  modified_base (3)..(3): a, c, u, g, unknown or other
agngcuagucauuauuugu

SEQ ID NO: 3200686 - RNA, 19 nt, Artificial Sequence
  Description of Artificial Sequence: Synthetic oligonucleotide
uguacccucuuuagaaucc

SEQ ID NO: 3200687 - RNA, 19 nt, Artificial Sequence
  Description of Artificial Sequence: Synthetic oligonucleotide
uuccuuagcuuaacaaaag

SEQ ID NO: 3200688 - RNA, 19 nt, Artificial Sequence
  Description of Artificial Sequence: Synthetic oligonucleotide
cuuaagaucuaugccacag

SEQ ID NO: 3200689 - RNA, 19 nt, Artificial Sequence
  Description of Artificial Sequence: Synthetic oligonucleotide
aaggcaacugauauucuag

SEQ ID NO: 3200690 - RNA, 19 nt, Artificial Sequence
  Description of Artificial Sequence: Synthetic oligonucleotide
agauaaaacaaguccuccu

SEQ ID NO: 3200691 - RNA, 19 nt, Artificial Sequence
  Description of Artificial Sequence: Synthetic oligonucleotide
aaacuaagagaugccaucu

SEQ ID NO: 3200692 - RNA, 19 nt, Artificial Sequence
  Description of Artificial Sequence: Synthetic oligonucleotide
aguuccuuagcuuaacaaa

SEQ ID NO: 3200693 - RNA, 19 nt, Artificial Sequence
  Description of Artificial Sequence: Synthetic oligonucleotide
aauagucagucaugucaag

SEQ ID NO: 3200694 - RNA, 19 nt, Artificial Sequence
  Description of Artificial Sequence: Synthetic oligonucleotide
aaguuccuuagcuuaacaa

SEQ ID NO: 3200695 - RNA, 19 nt, Artificial Sequence
  Description of Artificial Sequence: Synthetic oligonucleotide
gucauuauuuguuccauuc

SEQ ID NO: 3200696 - RNA, 19 nt, Artificial Sequence
  Description of Artificial Sequence: Synthetic oligonucleotide
ugaaugaggcuguugauuu

SEQ ID NO: 3200697 - RNA, 19 nt, Artificial Sequence
  Description of Artificial Sequence: Synthetic oligonucleotide
aguaauaaugaccacuuuc

SEQ ID NO: 3200698 - RNA, 19 nt, Artificial Sequence
  Description of Artificial Sequence: Synthetic oligonucleotide
auaaugaccacuuucugag

SEQ ID NO: 3200699 - RNA, 19 nt, Artificial Sequence
  Description of Artificial Sequence: Synthetic oligonucleotide
aguaguagcgguuuucagc

SEQ ID NO: 3200700 - RNA, 19 nt, Artificial Sequence
  Description of Artificial Sequence: Synthetic oligonucleotide
aauaaugaccacuuucuga

SEQ ID NO: 3200701 - RNA, 19 nt, Artificial Sequence
  Description of Artificial Sequence: Synthetic oligonucleotide
auaggccugacccugaccc

SEQ ID NO: 3200702 - RNA, 19 nt, Artificial Sequence
  Description of Artificial Sequence: Synthetic oligonucleotide
uuggaaauggccuccauca

SEQ ID NO: 3200703 - RNA, 19 nt, Artificial Sequence
  Description of Artificial Sequence: Synthetic oligonucleotide
gacucgaaggaugagaagg

SEQ ID NO: 3200704 - RNA, 19 nt, Artificial Sequence
  Description of Artificial Sequence: Synthetic oligonucleotide
aacccucagggccacauac

SEQ ID NO: 3200705 - RNA, 19 nt, Artificial Sequence
  Description of Artificial Sequence: Synthetic oligonucleotide
auugucuuuggaaauggcc

SEQ ID NO: 3200706 - RNA, 19 nt, Artificial Sequence
  Description of Artificial Sequence: Synthetic oligonucleotide
auaggcaguguccuuaggg

SEQ ID NO: 3200707 - RNA, 19 nt, Artificial Sequence
  Description of Artificial Sequence: Synthetic oligonucleotide
guaaggaugagguaacgug

SEQ ID NO: 3200708 - RNA, 19 nt, Artificial Sequence
  Description of Artificial Sequence: Synthetic oligonucleotide
agagcgggaacccucaggg

SEQ ID NO: 3200709 - RNA, 19 nt, Artificial Sequence
  Description of Artificial Sequence: Synthetic oligonucleotide
agcgggaacccucagggcc

SEQ ID NO: 3200710 - RNA, 19 nt, Artificial Sequence
  Description of Artificial Sequence: Synthetic oligonucleotide
acuacagaggucauaggcc

SEQ ID NO: 3200711 - RNA, 19 nt, Artificial Sequence
  Description of Artificial Sequence: Synthetic oligonucleotide
aguaguguaaggaugaggu

SEQ ID NO: 3200712 - RNA, 19 nt, Artificial Sequence
  Description of Artificial Sequence: Synthetic oligonucleotide
  modified_base (2)..(2): a, c, u, g, unknown or other
unuaagccugcccugcucc

SEQ ID NO: 3200713 - RNA, 19 nt, Artificial Sequence
  Description of Artificial Sequence: Synthetic oligonucleotide
  modified_base (12)..(12): a, c, u, g, unknown or other
aguguggagaunuaagccu

SEQ ID NO: 3200714 - RNA, 19 nt, Artificial Sequence
  Description of Artificial Sequence: Synthetic oligonucleotide
guaccauugguucucaggc

SEQ ID NO: 3200715 - RNA, 19 nt, Artificial Sequence
  Description of Artificial Sequence: Synthetic oligonucleotide
cauugaacagguaccauug

SEQ ID NO: 3200716 - RNA, 19 nt, Artificial Sequence
  Description of Artificial Sequence: Synthetic oligonucleotide
agggccacauaccugcucc

SEQ ID NO: 3200717 - RNA, 19 nt, Artificial Sequence
  Description of Artificial Sequence: Synthetic oligonucleotide
uaauaaugaccacuuucug

SEQ ID NO: 3200718 - RNA, 19 nt, Artificial Sequence
  Description of Artificial Sequence: Synthetic oligonucleotide
cacuacagaggucauaggc

SEQ ID NO: 3200719 - RNA, 19 nt, Artificial Sequence
  Description of Artificial Sequence: Synthetic oligonucleotide
uugguucucaggcucaggc

SEQ ID NO: 3200720 - RNA, 19 nt, Artificial Sequence
  Description of Artificial Sequence: Synthetic oligonucleotide
cugaggauacgccagagug

SEQ ID NO: 3200721 - RNA, 19 nt, Artificial Sequence
  Description of Artificial Sequence: Synthetic oligonucleotide
  modified_base (5)..(5): a, c, u, g, unknown or other
agaunuaagccugcccugc

SEQ ID NO: 3200722 - RNA, 19 nt, Artificial Sequence
  Description of Artificial Sequence: Synthetic oligonucleotide
gaggugacauugcugacag

SEQ ID NO: 3200723 - RNA, 19 nt, Artificial Sequence
  Description of Artificial Sequence: Synthetic oligonucleotide
  modified_base (14)..(14): a, c, u, g, unknown or other
ggaguguggagaunuaagc

SEQ ID NO: 3200724 - RNA, 19 nt, Artificial Sequence
  Description of Artificial Sequence: Synthetic oligonucleotide
accauugguucucaggcuc

SEQ ID NO: 3200725 - RNA, 19 nt, Artificial Sequence
  Description of Artificial Sequence: Synthetic oligonucleotide
ucuaguacagagcgggaac

SEQ ID NO: 3200726 - RNA, 19 nt, Artificial Sequence
  Description of Artificial Sequence: Synthetic oligonucleotide
uugaccaggucuaguacag

SEQ ID NO: 3200727 - RNA, 19 nt, Artificial Sequence
  Description of Artificial Sequence: Synthetic oligonucleotide
caugacucacaguaguagc

SEQ ID NO: 3200728 - RNA, 19 nt, Artificial Sequence
  Description of Artificial Sequence: Synthetic oligonucleotide
aggucuaguacagagcggg

SEQ ID NO: 3200729 - RNA, 19 nt, Artificial Sequence
  Description of Artificial Sequence: Synthetic oligonucleotide
uaguguaaggaugagguaa

SEQ ID NO: 3200730 - RNA, 19 nt, Artificial Sequence
  Description of Artificial Sequence: Synthetic oligonucleotide
aggacauugucuuuggaaa

SEQ ID NO: 3200731 - RNA, 19 nt, Artificial Sequence
  Description of Artificial Sequence: Synthetic oligonucleotide
cuuucugaggauacgccag

SEQ ID NO: 3200732 - RNA, 19 nt, Artificial Sequence
  Description of Artificial Sequence: Synthetic oligonucleotide
  modified_base (13)..(13): a, c, u, g, unknown or other
gaguguggagaunuaagcc

SEQ ID NO: 3200733 - RNA, 19 nt, Artificial Sequence
  Description of Artificial Sequence: Synthetic oligonucleotide
uugaacagguaccauuggu

SEQ ID NO: 3200734 - RNA, 19 nt, Artificial Sequence
  Description of Artificial Sequence: Synthetic oligonucleotide
gaccaggucuaguacagag

SEQ ID NO: 3200735 - RNA, 19 nt, Artificial Sequence
  Description of Artificial Sequence: Synthetic oligonucleotide
  modified_base (10)..(10): a, c, u, g, unknown or other
uguggagaunuaagccugc

SEQ ID NO: 3200736 - RNA, 19 nt, Artificial Sequence
  Description of Artificial Sequence: Synthetic oligonucleotide
ggugucauugaacagguac

SEQ ID NO: 3200737 - RNA, 19 nt, Artificial Sequence
  Description of Artificial Sequence: Synthetic oligonucleotide
cacacuacagaggucauag

SEQ ID NO: 3200738 - RNA, 19 nt, Artificial Sequence
  Description of Artificial Sequence: Synthetic oligonucleotide
guaacguggacccuggcuc

SEQ ID NO: 3200739 - RNA, 19 nt, Artificial Sequence
  Description of Artificial Sequence: Synthetic oligonucleotide
ucauugaacagguaccauu

SEQ ID NO: 3200740 - RNA, 19 nt, Artificial Sequence
  Description of Artificial Sequence: Synthetic oligonucleotide
agcaguaauaaugaccacu

SEQ ID NO: 3200741 - RNA, 19 nt, Artificial Sequence
  Description of Artificial Sequence: Synthetic oligonucleotide
acuuucugaggauacgcca

SEQ ID NO: 3200742 - RNA, 19 nt, Artificial Sequence
  Description of Artificial Sequence: Synthetic oligonucleotide
ugacucacaguaguagcgg

SEQ ID NO: 3200743 - RNA, 19 nt, Artificial Sequence
  Description of Artificial Sequence: Synthetic oligonucleotide
  modified_base (6)..(6): a, c, u, g, unknown or other
gagaunuaagccugcccug

SEQ ID NO: 3200744 - RNA, 19 nt, Artificial Sequence
  Description of Artificial Sequence: Synthetic oligonucleotide
  modified_base (8)..(8): a, c, u, g, unknown or other
uggagaunuaagccugccc

SEQ ID NO: 3200745 - RNA, 19 nt, Artificial Sequence
  Description of Artificial Sequence: Synthetic oligonucleotide
acauugucuuuggaaaugg

SEQ ID NO: 3200746 - RNA, 19 nt, Artificial Sequence
  Description of Artificial Sequence: Synthetic oligonucleotide
  modified_base (3)..(3): a, c, u, g, unknown or other
aunuaagccugcccugcuc

SEQ ID NO: 3200747 - RNA, 19 nt, Artificial Sequence
  Description of Artificial Sequence: Synthetic oligonucleotide
aguguaaggaugagguaac

SEQ ID NO: 3200748 - RNA, 19 nt, Artificial Sequence
  Description of Artificial Sequence: Synthetic oligonucleotide
gaucccaggacaggggucg

SEQ ID NO: 3200749 - RNA, 19 nt, Artificial Sequence
  Description of Artificial Sequence: Synthetic oligonucleotide
ugacagacucgaaggauga

SEQ ID NO: 3200750 - RNA, 19 nt, Artificial Sequence
  Description of Artificial Sequence: Synthetic oligonucleotide
cugacagacucgaaggaug

SEQ ID NO: 3200751 - RNA, 19 nt, Artificial Sequence
  Description of Artificial Sequence: Synthetic oligonucleotide
ugucauugaacagguacca

SEQ ID NO: 3200752 - RNA, 19 nt, Artificial Sequence
  Description of Artificial Sequence: Synthetic oligonucleotide
uaggcaguguccuuaggga

SEQ ID NO: 3200753 - RNA, 19 nt, Artificial Sequence
  Description of Artificial Sequence: Synthetic oligonucleotide
gguaccauugguucucagg

SEQ ID NO: 3200754 - RNA, 19 nt, Artificial Sequence
  Description of Artificial Sequence: Synthetic oligonucleotide
augacucacaguaguagcg

SEQ ID NO: 3200755 - RNA, 19 nt, Artificial Sequence
  Description of Artificial Sequence: Synthetic oligonucleotide
acaggaaguaguugaccag

SEQ ID NO: 3200756 - RNA, 19 nt, Artificial Sequence
  Description of Artificial Sequence: Synthetic oligonucleotide
ucugggagagccaggcuca

SEQ ID NO: 3200757 - RNA, 19 nt, Artificial Sequence
  Description of Artificial Sequence: Synthetic oligonucleotide
aggcgcaugacucacagua

SEQ ID NO: 3200758 - RNA, 19 nt, Artificial Sequence
  Description of Artificial Sequence: Synthetic oligonucleotide
agcugucagccucucaggg

SEQ ID NO: 3200759 - RNA, 19 nt, Artificial Sequence
  Description of Artificial Sequence: Synthetic oligonucleotide
ugcagagaggcgcaugacu

SEQ ID NO: 3200760 - RNA, 19 nt, Artificial Sequence
  Description of Artificial Sequence: Synthetic oligonucleotide
gacauugucuuuggaaaug

SEQ ID NO: 3200761 - RNA, 19 nt, Artificial Sequence
  Description of Artificial Sequence: Synthetic oligonucleotide
gaggacauugucuuuggaa

SEQ ID NO: 3200762 - RNA, 19 nt, Artificial Sequence
  Description of Artificial Sequence: Synthetic oligonucleotide
gacauugcugacagacucg

SEQ ID NO: 3200763 - RNA, 19 nt, Artificial Sequence
  Description of Artificial Sequence: Synthetic oligonucleotide
ccaggucuaguacagagcg

SEQ ID NO: 3200764 - RNA, 19 nt, Artificial Sequence
  Description of Artificial Sequence: Synthetic oligonucleotide
guaauaaugaccacuuucu

SEQ ID NO: 3200765 - RNA, 19 nt, Artificial Sequence
  Description of Artificial Sequence: Synthetic oligonucleotide
caggaaguaguugaccagg

SEQ ID NO: 3200766 - RNA, 19 nt, Artificial Sequence
  Description of Artificial Sequence: Synthetic oligonucleotide
uacgccagagugcaccacc

SEQ ID NO: 3200767 - RNA, 19 nt, Artificial Sequence
  Description of Artificial Sequence: Synthetic oligonucleotide
uuuucagcugucagccucu

SEQ ID NO: 3200768 - RNA, 19 nt, Artificial Sequence
  Description of Artificial Sequence: Synthetic oligonucleotide
agaggcgcaugacucacag

SEQ ID NO: 3200769 - RNA, 19 nt, Artificial Sequence
  Description of Artificial Sequence: Synthetic oligonucleotide
ggugacauugcugacagac

SEQ ID NO: 3200770 - RNA, 19 nt, Artificial Sequence
  Description of Artificial Sequence: Synthetic oligonucleotide
  modified_base (7)..(7): a, c, u, g, unknown or other
ggagaunuaagccugcccu

SEQ ID NO: 3200771 - RNA, 19 nt, Artificial Sequence
  Description of Artificial Sequence: Synthetic oligonucleotide
ugagguaacguggacccug

SEQ ID NO: 3200772 - RNA, 19 nt, Artificial Sequence
  Description of Artificial Sequence: Synthetic oligonucleotide
uuucugaggauacgccaga

SEQ ID NO: 3200773 - RNA, 19 nt, Artificial Sequence
  Description of Artificial Sequence: Synthetic oligonucleotide
cacuuucugaggauacgcc

SEQ ID NO: 3200774 - RNA, 19 nt, Artificial Sequence
  Description of Artificial Sequence: Synthetic oligonucleotide
guuuucagcugucagccuc

SEQ ID NO: 3200775 - RNA, 19 nt, Artificial Sequence
  Description of Artificial Sequence: Synthetic oligonucleotide
gugucauugaacagguacc

SEQ ID NO: 3200776 - RNA, 19 nt, Artificial Sequence
  Description of Artificial Sequence: Synthetic oligonucleotide
guaguagcgguuuucagcu

SEQ ID NO: 3200777 - RNA, 19 nt, Artificial Sequence
  Description of Artificial Sequence: Synthetic oligonucleotide
acagguaccauugguucuc

SEQ ID NO: 3200778 - RNA, 19 nt, Artificial Sequence
  Description of Artificial Sequence: Synthetic oligonucleotide
auggugacaucauccagga

SEQ ID NO: 3200779 - RNA, 19 nt, Artificial Sequence
  Description of Artificial Sequence: Synthetic oligonucleotide
auaccugcucccugggcgg

SEQ ID NO: 3200780 - RNA, 19 nt, Artificial Sequence
  Description of Artificial Sequence: Synthetic oligonucleotide
uaguugaccaggucuagua

SEQ ID NO: 3200781 - RNA, 19 nt, Artificial Sequence
  Description of Artificial Sequence: Synthetic oligonucleotide
agagccaggcucaaccucg

SEQ ID NO: 3200782 - RNA, 19 nt, Artificial Sequence
  Description of Artificial Sequence: Synthetic oligonucleotide
aagcgcaguaguguaagga

SEQ ID NO: 3200783 - RNA, 19 nt, Artificial Sequence
  Description of Artificial Sequence: Synthetic oligonucleotide
acauaccugcucccugggc

SEQ ID NO: 3200784 - RNA, 19 nt, Artificial Sequence
  Description of Artificial Sequence: Synthetic oligonucleotide
guugaccaggucuaguaca

SEQ ID NO: 3200785 - RNA, 19 nt, Artificial Sequence
  Description of Artificial Sequence: Synthetic oligonucleotide
cuaguacagagcgggaacc

SEQ ID NO: 3200786 - RNA, 19 nt, Artificial Sequence
  Description of Artificial Sequence: Synthetic oligonucleotide
agaagcgcaguaguguaag

SEQ ID NO: 3200787 - RNA, 19 nt, Artificial Sequence
  Description of Artificial Sequence: Synthetic oligonucleotide
aaauggccuccaucagguc

SEQ ID NO: 3200788 - RNA, 19 nt, Artificial Sequence
  Description of Artificial Sequence: Synthetic oligonucleotide
agcgguuuucagcugucag

SEQ ID NO: 3200789 - RNA, 19 nt, Artificial Sequence
  Description of Artificial Sequence: Synthetic oligonucleotide
aggaugagguaacguggac

SEQ ID NO: 3200790 - RNA, 19 nt, Artificial Sequence
  Description of Artificial Sequence: Synthetic oligonucleotide
cauugucuuuggaaauggc

SEQ ID NO: 3200791 - RNA, 19 nt, Artificial Sequence
  Description of Artificial Sequence: Synthetic oligonucleotide
gaggauacgccagagugca

SEQ ID NO: 3200792 - RNA, 19 nt, Artificial Sequence
  Description of Artificial Sequence: Synthetic oligonucleotide
ucugcucggaacucuggga

SEQ ID NO: 3200793 - RNA, 19 nt, Artificial Sequence
  Description of Artificial Sequence: Synthetic oligonucleotide
uccguggaucccaggacag

SEQ ID NO: 3200794 - RNA, 19 nt, Artificial Sequence
  Description of Artificial Sequence: Synthetic oligonucleotide
gaagcgcaguaguguaagg

SEQ ID NO: 3200795 - RNA, 19 nt, Artificial Sequence
  Description of Artificial Sequence: Synthetic oligonucleotide
ggaugagaaggacacccgg

SEQ ID NO: 3200796 - RNA, 19 nt, Artificial Sequence
  Description of Artificial Sequence: Synthetic oligonucleotide
acauaggcaguguccuuag

SEQ ID NO: 3200797 - RNA, 19 nt, Artificial Sequence
  Description of Artificial Sequence: Synthetic oligonucleotide
gaucucacuagccaagucg

SEQ ID NO: 3200798 - RNA, 19 nt, Artificial Sequence
  Description of Artificial Sequence: Synthetic oligonucleotide
ugaccuugauguuaguacg

SEQ ID NO: 3200799 - RNA, 19 nt, Artificial Sequence
  Description of Artificial Sequence: Synthetic oligonucleotide
ucggcguccacucugaucu

SEQ ID NO: 3200800 - RNA, 19 nt, Artificial Sequence
  Description of Artificial Sequence: Synthetic oligonucleotide
uugaccuugauguuaguac

SEQ ID NO: 3200801 - RNA, 19 nt, Artificial Sequence
  Description of Artificial Sequence: Synthetic oligonucleotide
ucugaucucacuagccaag

SEQ ID NO: 3200802 - RNA, 19 nt, Artificial Sequence
  Description of Artificial Sequence: Synthetic oligonucleotide
agcagcagcagaugagccc

SEQ ID NO: 3200803 - RNA, 19 nt, Artificial Sequence
  Description of Artificial Sequence: Synthetic oligonucleotide
aucucacuagccaagucgc

SEQ ID NO: 3200804 - RNA, 19 nt, Artificial Sequence
  Description of Artificial Sequence: Synthetic oligonucleotide
uccacucugaucucacuag

SEQ ID NO: 3200805 - RNA, 19 nt, Artificial Sequence
  Description of Artificial Sequence: Synthetic oligonucleotide
acugccuagugccaggcag

SEQ ID NO: 3200806 - RNA, 19 nt, Artificial Sequence
  Description of Artificial Sequence: Synthetic oligonucleotide
acuagggccacgucgucgg

SEQ ID NO: 3200807 - RNA, 19 nt, Artificial Sequence
  Description of Artificial Sequence: Synthetic oligonucleotide
ugugcggggcacuagggcc

SEQ ID NO: 3200808 - RNA, 19 nt, Artificial Sequence
  Description of Artificial Sequence: Synthetic oligonucleotide
cucuugaccuugauguuag

SEQ ID NO: 3200809 - RNA, 19 nt, Artificial Sequence
  Description of Artificial Sequence: Synthetic oligonucleotide
guacuugcggcgcagggag

SEQ ID NO: 3200810 - RNA, 19 nt, Artificial Sequence
  Description of Artificial Sequence: Synthetic oligonucleotide
uagccaagucgccacacgc

SEQ ID NO: 3200811 - RNA, 19 nt, Artificial Sequence
  Description of Artificial Sequence: Synthetic oligonucleotide
acucugaucucacuagcca

SEQ ID NO: 3200812 - RNA, 19 nt, Artificial Sequence
  Description of Artificial Sequence: Synthetic oligonucleotide
agcugggugacgcggcugc

SEQ ID NO: 3200813 - RNA, 19 nt, Artificial Sequence
  Description of Artificial Sequence: Synthetic oligonucleotide
uagccgaaggcaccgcggg

SEQ ID NO: 3200814 - RNA, 19 nt, Artificial Sequence
  Description of Artificial Sequence: Synthetic oligonucleotide
gaccuugauguuaguacgg

SEQ ID NO: 3200815 - RNA, 19 nt, Artificial Sequence
  Description of Artificial Sequence: Synthetic oligonucleotide
cacucugaucucacuagcc

SEQ ID NO: 3200816 - RNA, 19 nt, Artificial Sequence
  Description of Artificial Sequence: Synthetic oligonucleotide
agggccacgucgucggggc

SEQ ID NO: 3200817 - RNA, 19 nt, Artificial Sequence
  Description of Artificial Sequence: Synthetic oligonucleotide
ucugcgucggguaccccag

SEQ ID NO: 3200818 - RNA, 19 nt, Artificial Sequence
  Description of Artificial Sequence: Synthetic oligonucleotide
ucacuagccaagucgccac

SEQ ID NO: 3200819 - RNA, 19 nt, Artificial Sequence
  Description of Artificial Sequence: Synthetic oligonucleotide
accuugauguuaguacggg

SEQ ID NO: 3200820 - RNA, 19 nt, Artificial Sequence
  Description of Artificial Sequence: Synthetic oligonucleotide
uaccccaggagcuggguga

SEQ ID NO: 3200821 - RNA, 19 nt, Artificial Sequence
  Description of Artificial Sequence: Synthetic oligonucleotide
acgucgucggggcugccgc

SEQ ID NO: 3200822 - RNA, 19 nt, Artificial Sequence
  Description of Artificial Sequence: Synthetic oligonucleotide
ugccaggcaggccagcaug

SEQ ID NO: 3200823 - RNA, 19 nt, Artificial Sequence
  Description of Artificial Sequence: Synthetic oligonucleotide
uucugcgucggguacccca

SEQ ID NO: 3200824 - RNA, 19 nt, Artificial Sequence
  Description of Artificial Sequence: Synthetic oligonucleotide
ucucacuagccaagucgcc

SEQ ID NO: 3200825 - RNA, 19 nt, Artificial Sequence
  Description of Artificial Sequence: Synthetic oligonucleotide
gagcggcugacguucugcg

SEQ ID NO: 3200826 - RNA, 19 nt, Artificial Sequence
  Description of Artificial Sequence: Synthetic oligonucleotide
cuagccaagucgccacacg

SEQ ID NO: 3200827 - RNA, 19 nt, Artificial Sequence
  Description of Artificial Sequence: Synthetic oligonucleotide
cugccuagugccaggcagg

SEQ ID NO: 3200828 - RNA, 19 nt, Artificial Sequence
  Description of Artificial Sequence: Synthetic oligonucleotide
uggccuugcacccggccgc

SEQ ID NO: 3200829 - RNA, 19 nt, Artificial Sequence
  Description of Artificial Sequence: Synthetic oligonucleotide
agccaagucgccacacgcc

SEQ ID NO: 3200830 - RNA, 19 nt, Artificial Sequence
  Description of Artificial Sequence: Synthetic oligonucleotide
ucggggcugccgcagggcg

SEQ ID NO: 3200831 - RNA, 19 nt, Artificial Sequence
  Description of Artificial Sequence: Synthetic oligonucleotide
acuugcggcgcagggagcg

SEQ ID NO: 3200832 - RNA, 19 nt, Artificial Sequence
  Description of Artificial Sequence: Synthetic oligonucleotide
acuagccaagucgccacac

SEQ ID NO: 3200833 - RNA, 19 nt, Artificial Sequence
  Description of Artificial Sequence: Synthetic oligonucleotide
ugaucucacuagccaaguc

SEQ ID NO: 3200834 - RNA, 19 nt, Artificial Sequence
  Description of Artificial Sequence: Synthetic oligonucleotide
agucgccacacgccccucc

SEQ ID NO: 3200835 - RNA, 19 nt, Artificial Sequence
  Description of Artificial Sequence: Synthetic oligonucleotide
cuggccuugcacccggccg

SEQ ID NO: 3200836 - RNA, 19 nt, Artificial Sequence
  Description of Artificial Sequence: Synthetic oligonucleotide
aggcaggccagcaugagca

SEQ ID NO: 3200837 - RNA, 19 nt, Artificial Sequence
  Description of Artificial Sequence: Synthetic oligonucleotide
agacugccuagugccaggc

SEQ ID NO: 3200838 - RNA, 19 nt, Artificial Sequence
  Description of Artificial Sequence: Synthetic oligonucleotide
cuucgcaggcugcggaggg

SEQ ID NO: 3200839 - RNA, 19 nt, Artificial Sequence
  Description of Artificial Sequence: Synthetic oligonucleotide
ugggugacgcggcugccgc

SEQ ID NO: 3200840 - RNA, 19 nt, Artificial Sequence
  Description of Artificial Sequence: Synthetic oligonucleotide
gggcacuagggccacgucg

SEQ ID NO: 3200841 - RNA, 19 nt, Artificial Sequence
  Description of Artificial Sequence: Synthetic oligonucleotide
gaggcgcguacuugcggcg

SEQ ID NO: 3200842 - RNA, 19 nt, Artificial Sequence
  Description of Artificial Sequence: Synthetic oligonucleotide
gacguucugcgucggguac

SEQ ID NO: 3200843 - RNA, 19 nt, Artificial Sequence
  Description of Artificial Sequence: Synthetic oligonucleotide
gaggggcccgcuucgcagg

SEQ ID NO: 3200844 - RNA, 19 nt, Artificial Sequence
  Description of Artificial Sequence: Synthetic oligonucleotide
cagcagcagcagaugagcc

SEQ ID NO: 3200845 - RNA, 19 nt, Artificial Sequence
  Description of Artificial Sequence: Synthetic oligonucleotide
agccgaaggcaccgcgggc

SEQ ID NO: 3200846 - RNA, 19 nt, Artificial Sequence
  Description of Artificial Sequence: Synthetic oligonucleotide
cagacugccuagugccagg

SEQ ID NO: 3200847 - RNA, 19 nt, Artificial Sequence
  Description of Artificial Sequence: Synthetic oligonucleotide
ccuugauguuaguacgggg

SEQ ID NO: 3200848 - RNA, 19 nt, Artificial Sequence
  Description of Artificial Sequence: Synthetic oligonucleotide
guagccgaaggcaccgcgg

SEQ ID NO: 3200849 - RNA, 19 nt, Artificial Sequence
  Description of Artificial Sequence: Synthetic oligonucleotide
acguucugcgucggguacc

SEQ ID NO: 3200850 - RNA, 19 nt, Artificial Sequence
  Description of Artificial Sequence: Synthetic oligonucleotide
ugacguucugcgucgggua

SEQ ID NO: 3200851 - RNA, 19 nt, Artificial Sequence
  Description of Artificial Sequence: Synthetic oligonucleotide
ugcgucggguaccccagga

SEQ ID NO: 3200852 - RNA, 19 nt, Artificial Sequence
  Description of Artificial Sequence: Synthetic oligonucleotide
cucugaucucacuagccaa

SEQ ID NO: 3200853 - RNA, 19 nt, Artificial Sequence
  Description of Artificial Sequence: Synthetic oligonucleotide
cuugcacccggccgccucg

SEQ ID NO: 3200854 - RNA, 19 nt, Artificial Sequence
  Description of Artificial Sequence: Synthetic oligonucleotide
accgcgggcgccaccagcc

SEQ ID NO: 3200855 - RNA, 19 nt, Artificial Sequence
  Description of Artificial Sequence: Synthetic oligonucleotide
ccccagacugccuagugcc

SEQ ID NO: 3200856 - RNA, 19 nt, Artificial Sequence
  Description of Artificial Sequence: Synthetic oligonucleotide
gcgcucuugaccuugaugu

SEQ ID NO: 3200857 - RNA, 19 nt, Artificial Sequence
  Description of Artificial Sequence: Synthetic oligonucleotide
cacuagggccacgucgucg

SEQ ID NO: 3200858 - RNA, 19 nt, Artificial Sequence
  Description of Artificial Sequence: Synthetic oligonucleotide
gcagcagcagaugagcccc

SEQ ID NO: 3200859 - RNA, 19 nt, Artificial Sequence
  Description of Artificial Sequence: Synthetic oligonucleotide
ggaggcgcguacuugcggc

SEQ ID NO: 3200860 - RNA, 19 nt, Artificial Sequence
  Description of Artificial Sequence: Synthetic oligonucleotide
cuagugccaggcaggccag

SEQ ID NO: 3200861 - RNA, 19 nt, Artificial Sequence
  Description of Artificial Sequence: Synthetic oligonucleotide
caggcaggccagcaugagc

SEQ ID NO: 3200862 - RNA, 19 nt, Artificial Sequence
  Description of Artificial Sequence: Synthetic oligonucleotide
accccguagccgaaggcac

SEQ ID NO: 3200863 - RNA, 19 nt, Artificial Sequence
  Description of Artificial Sequence: Synthetic oligonucleotide
gucgccacacgccccuccg

SEQ ID NO: 3200864 - RNA, 19 nt, Artificial Sequence
  Description of Artificial Sequence: Synthetic oligonucleotide
aggagcugggugacgcggc

SEQ ID NO: 3200865 - RNA, 19 nt, Artificial Sequence
  Description of Artificial Sequence: Synthetic oligonucleotide
gugugcggggcacuagggc

SEQ ID NO: 3200866 - RNA, 19 nt, Artificial Sequence
  Description of Artificial Sequence: Synthetic oligonucleotide
uagggccacgucgucgggg

SEQ ID NO: 3200867 - RNA, 19 nt, Artificial Sequence
  Description of Artificial Sequence: Synthetic oligonucleotide
caggagcugggugacgcgg

SEQ ID NO: 3200868 - RNA, 19 nt, Artificial Sequence
  Description of Artificial Sequence: Synthetic oligonucleotide
ggcgccaccagccccgccg

SEQ ID NO: 3200869 - RNA, 19 nt, Artificial Sequence
  Description of Artificial Sequence: Synthetic oligonucleotide
gccaagucgccacacgccc

SEQ ID NO: 3200870 - RNA, 19 nt, Artificial Sequence
  Description of Artificial Sequence: Synthetic oligonucleotide
gaccccgccgccgaccccg

SEQ ID NO: 3200871 - RNA, 19 nt, Artificial Sequence
  Description of Artificial Sequence: Synthetic oligonucleotide
gaccccguagccgaaggca

SEQ ID NO: 3200872 - RNA, 19 nt, Artificial Sequence
  Description of Artificial Sequence: Synthetic oligonucleotide
cucacuagccaagucgcca

SEQ ID NO: 3200873 - RNA, 19 nt, Artificial Sequence
  Description of Artificial Sequence: Synthetic oligonucleotide
aggggcccgcuucgcaggc

SEQ ID NO: 3200874 - RNA, 19 nt, Artificial Sequence
  Description of Artificial Sequence: Synthetic oligonucleotide
ccuagugccaggcaggcca

SEQ ID NO: 3200875 - RNA, 19 nt, Artificial Sequence
  Description of Artificial Sequence: Synthetic oligonucleotide
ugccuagugccaggcaggc

SEQ ID NO: 3200876 - RNA, 19 nt, Artificial Sequence
  Description of Artificial Sequence: Synthetic oligonucleotide
guaccccaggagcugggug

SEQ ID NO: 3200877 - RNA, 19 nt, Artificial Sequence
  Description of Artificial Sequence: Synthetic oligonucleotide
gcagcagcagcagaugagc

SEQ ID NO: 3200878 - RNA, 19 nt, Artificial Sequence
  Description of Artificial Sequence: Synthetic oligonucleotide
gggugugcggggcacuagg

SEQ ID NO: 3200879 - RNA, 19 nt, Artificial Sequence
  Description of Artificial Sequence: Synthetic oligonucleotide
uccgcagcagcagcagaug

SEQ ID NO: 3200880 - RNA, 19 nt, Artificial Sequence
  Description of Artificial Sequence: Synthetic oligonucleotide
guccacucugaucucacua

SEQ ID NO: 3200881 - RNA, 19 nt, Artificial Sequence
  Description of Artificial Sequence: Synthetic oligonucleotide
cagggagcggcugacguuc

SEQ ID NO: 3200882 - RNA, 19 nt, Artificial Sequence
  Description of Artificial Sequence: Synthetic oligonucleotide
ugccgcagggcggaggcgc

SEQ ID NO: 3200883 - RNA, 19 nt, Artificial Sequence
  Description of Artificial Sequence: Synthetic oligonucleotide
ucgucggggcugccgcagg

SEQ ID NO: 3200884 - RNA, 19 nt, Artificial Sequence
  Description of Artificial Sequence: Synthetic oligonucleotide
aggcgcguacuugcggcgc

SEQ ID NO: 3200885 - RNA, 19 nt, Artificial Sequence
  Description of Artificial Sequence: Synthetic oligonucleotide
ggcggaggcgcguacuugc

SEQ ID NO: 3200886 - RNA, 19 nt, Artificial Sequence
  Description of Artificial Sequence: Synthetic oligonucleotide
cuugaccuugauguuagua

SEQ ID NO: 3200887 - RNA, 19 nt, Artificial Sequence
  Description of Artificial Sequence: Synthetic oligonucleotide
uacuugcggcgcagggagc

SEQ ID NO: 3200888 - RNA, 19 nt, Artificial Sequence
  Description of Artificial Sequence: Synthetic oligonucleotide
ucgcaggcugcggagggug

SEQ ID NO: 3200889 - RNA, 19 nt, Artificial Sequence
  Description of Artificial Sequence: Synthetic oligonucleotide
cucggcguccacucugauc

SEQ ID NO: 3200890 - RNA, 19 nt, Artificial Sequence
  Description of Artificial Sequence: Synthetic oligonucleotide
ucuugaccuugauguuagu

SEQ ID NO: 3200891 - RNA, 19 nt, Artificial Sequence
  Description of Artificial Sequence: Synthetic oligonucleotide
gacgcggcugccgcgcccg

SEQ ID NO: 3200892 - RNA, 19 nt, Artificial Sequence
  Description of Artificial Sequence: Synthetic oligonucleotide
gcugcggagggugugcggg

SEQ ID NO: 3200893 - RNA, 19 nt, Artificial Sequence
  Description of Artificial Sequence: Synthetic oligonucleotide
ucggguaccccaggagcug

SEQ ID NO: 3200894 - RNA, 19 nt, Artificial Sequence
  Description of Artificial Sequence: Synthetic oligonucleotide
ggaggggcccgcuucgcag

SEQ ID NO: 3200895 - RNA, 19 nt, Artificial Sequence
  Description of Artificial Sequence: Synthetic oligonucleotide
agccccgccgccuccgcag

SEQ ID NO: 3200896 - RNA, 19 nt, Artificial Sequence
  Description of Artificial Sequence: Synthetic oligonucleotide
agugccaggcaggccagca

SEQ ID NO: 3200897 - RNA, 19 nt, Artificial Sequence
  Description of Artificial Sequence: Synthetic oligonucleotide
aggagggccacucagaucc

SEQ ID NO: 3200898 - RNA, 19 nt, Artificial Sequence
  Description of Artificial Sequence: Synthetic oligonucleotide
uuaauuucugucuucuugg

SEQ ID NO: 3200899 - RNA, 19 nt, Artificial Sequence
  Description of Artificial Sequence: Synthetic oligonucleotide
ucuguuguagcuuuaggcg

SEQ ID NO: 3200900 - RNA, 19 nt, Artificial Sequence
  Description of Artificial Sequence: Synthetic oligonucleotide
acugcuauuauucuagcag

SEQ ID NO: 3200901 - RNA, 19 nt, Artificial Sequence
  Description of Artificial Sequence: Synthetic oligonucleotide
aagagaaagccucuaaacu

SEQ ID NO: 3200902 - RNA, 19 nt, Artificial Sequence
  Description of Artificial Sequence: Synthetic oligonucleotide
aacuguaugugguuugggg

SEQ ID NO: 3200903 - RNA, 19 nt, Artificial Sequence
  Description of Artificial Sequence: Synthetic oligonucleotide
acuguaugugguuuggggc

SEQ ID NO: 3200904 - RNA, 19 nt, Artificial Sequence
  Description of Artificial Sequence: Synthetic oligonucleotide
auucagucccgguaaaucc

SEQ ID NO: 3200905 - RNA, 19 nt, Artificial Sequence
  Description of Artificial Sequence: Synthetic oligonucleotide
uugauugcagauaagaaua

SEQ ID NO: 3200906 - RNA, 19 nt, Artificial Sequence
  Description of Artificial Sequence: Synthetic oligonucleotide
ugcagauaagaauaucacg

SEQ ID NO: 3200907 - RNA, 19 nt, Artificial Sequence
  Description of Artificial Sequence: Synthetic oligonucleotide
uucagcaacaguuagugac

SEQ ID NO: 3200908 - RNA, 19 nt, Artificial Sequence
  Description of Artificial Sequence: Synthetic oligonucleotide
ugaaggagccaacaggagg

SEQ ID NO: 3200909 - RNA, 19 nt, Artificial Sequence
  Description of Artificial Sequence: Synthetic oligonucleotide
aaggaucugaauucuauca

SEQ ID NO: 3200910 - RNA, 19 nt, Artificial Sequence
  Description of Artificial Sequence: Synthetic oligonucleotide
gacauuacuacuuuuccac

SEQ ID NO: 3200911 - RNA, 19 nt, Artificial Sequence
  Description of Artificial Sequence: Synthetic oligonucleotide
ucaacuuuucgagagagcc

SEQ ID NO: 3200912 - RNA, 19 nt, Artificial Sequence
  Description of Artificial Sequence: Synthetic oligonucleotide
agauaagaauaucacgagg

SEQ ID NO: 3200913 - RNA, 19 nt, Artificial Sequence
  Description of Artificial Sequence: Synthetic oligonucleotide
aggacauuacuacuuuucc

SEQ ID NO: 3200914 - RNA, 19 nt, Artificial Sequence
  Description of Artificial Sequence: Synthetic oligonucleotide
aacuucaucugacucacug

SEQ ID NO: 3200915 - RNA, 19 nt, Artificial Sequence
  Description of Artificial Sequence: Synthetic oligonucleotide
agagaaagccucuaaacug

SEQ ID NO: 3200916 - RNA, 19 nt, Artificial Sequence
  Description of Artificial Sequence: Synthetic oligonucleotide
uuaggcgucgugaagguag

SEQ ID NO: 3200917 - RNA, 19 nt, Artificial Sequence
  Description of Artificial Sequence: Synthetic oligonucleotide
ugaagguaggagcauuugg

SEQ ID NO: 3200918 - RNA, 19 nt, Artificial Sequence
  Description of Artificial Sequence: Synthetic oligonucleotide
ugugaaauuaugugacuag

SEQ ID NO: 3200919 - RNA, 19 nt, Artificial Sequence
  Description of Artificial Sequence: Synthetic oligonucleotide
auuacuacuuuuccacugg

SEQ ID NO: 3200920 - RNA, 19 nt, Artificial Sequence
  Description of Artificial Sequence: Synthetic oligonucleotide
ugacuaggaaucuucaccc

SEQ ID NO: 3200921 - RNA, 19 nt, Artificial Sequence
  Description of Artificial Sequence: Synthetic oligonucleotide
aauucuaucaucguccaau

SEQ ID NO: 3200922 - RNA, 19 nt, Artificial Sequence
  Description of Artificial Sequence: Synthetic oligonucleotide
gauaagaauaucacgagga

SEQ ID NO: 3200923 - RNA, 19 nt, Artificial Sequence
  Description of Artificial Sequence: Synthetic oligonucleotide
agacguaugacucacggcu

SEQ ID NO: 3200924 - RNA, 19 nt, Artificial Sequence
  Description of Artificial Sequence: Synthetic oligonucleotide
aagaauaucacgaggaaaa

SEQ ID NO: 3200925 - RNA, 19 nt, Artificial Sequence
  Description of Artificial Sequence: Synthetic oligonucleotide
uugguugugaaauuaugug

SEQ ID NO: 3200926 - RNA, 19 nt, Artificial Sequence
  Description of Artificial Sequence: Synthetic oligonucleotide
uaagagaaagccucuaaac

SEQ ID NO: 3200927 - RNA, 19 nt, Artificial Sequence
  Description of Artificial Sequence: Synthetic oligonucleotide
aacaggcucggacuguggc

SEQ ID NO: 3200928 - RNA, 19 nt, Artificial Sequence
  Description of Artificial Sequence: Synthetic oligonucleotide
ugaaauuaugugacuagga

SEQ ID NO: 3200929 - RNA, 19 nt, Artificial Sequence
  Description of Artificial Sequence: Synthetic oligonucleotide
ugugccagaccacaaaccc

SEQ ID NO: 3200930 - RNA, 19 nt, Artificial Sequence
  Description of Artificial Sequence: Synthetic oligonucleotide
agugacuuggaucuggucu

SEQ ID NO: 3200931 - RNA, 19 nt, Artificial Sequence
  Description of Artificial Sequence: Synthetic oligonucleotide
uaugacucacggcugaacc

SEQ ID NO: 3200932 - RNA, 19 nt, Artificial Sequence
  Description of Artificial Sequence: Synthetic oligonucleotide
aaaagucuucgcuugcuca

SEQ ID NO: 3200933 - RNA, 19 nt, Artificial Sequence
  Description of Artificial Sequence: Synthetic oligonucleotide
ugacugaaacuguaugugg

SEQ ID NO: 3200934 - RNA, 19 nt, Artificial Sequence
  Description of Artificial Sequence: Synthetic oligonucleotide
ugauaaagugacuuggauc

SEQ ID NO: 3200935 - RNA, 19 nt, Artificial Sequence
  Description of Artificial Sequence: Synthetic oligonucleotide
gaaggagccaacaggaggg

SEQ ID NO: 3200936 - RNA, 19 nt, Artificial Sequence
  Description of Artificial Sequence: Synthetic oligonucleotide
uuuccacauauguaaauca

SEQ ID NO: 3200937 - RNA, 19 nt, Artificial Sequence
  Description of Artificial Sequence: Synthetic oligonucleotide
cucuguuguagcuuuaggc

SEQ ID NO: 3200938 - RNA, 19 nt, Artificial Sequence
  Description of Artificial Sequence: Synthetic oligonucleotide
uguaucuccagaagcaccu

SEQ ID NO: 3200939 - RNA, 19 nt, Artificial Sequence
  Description of Artificial Sequence: Synthetic oligonucleotide
auuauucuagcagcugucc

SEQ ID NO: 3200940 - RNA, 19 nt, Artificial Sequence
  Description of Artificial Sequence: Synthetic oligonucleotide
ugguugugaaauuauguga

SEQ ID NO: 3200941 - RNA, 19 nt, Artificial Sequence
  Description of Artificial Sequence: Synthetic oligonucleotide
ugugacugaaacuguaugu

SEQ ID NO: 3200942 - RNA, 19 nt, Artificial Sequence
  Description of Artificial Sequence: Synthetic oligonucleotide
gaaauuaugugacuaggaa

SEQ ID NO: 3200943 - RNA, 19 nt, Artificial Sequence
  Description of Artificial Sequence: Synthetic oligonucleotide
gugacuaggaaucuucacc

SEQ ID NO: 3200944 - RNA, 19 nt, Artificial Sequence
  Description of Artificial Sequence: Synthetic oligonucleotide
uccagaagcaccucugugc

SEQ ID NO: 3200945 - RNA, 19 nt, Artificial Sequence
  Description of Artificial Sequence: Synthetic oligonucleotide
uuucaacuuuucgagagag

SEQ ID NO: 3200946 - RNA, 19 nt, Artificial Sequence
  Description of Artificial Sequence: Synthetic oligonucleotide
uugcagauaagaauaucac

SEQ ID NO: 3200947 - RNA, 19 nt, Artificial Sequence
  Description of Artificial Sequence: Synthetic oligonucleotide
uaaagugacuuggaucugg

SEQ ID NO: 3200948 - RNA, 19 nt, Artificial Sequence
  Description of Artificial Sequence: Synthetic oligonucleotide
augacucacggcugaaccc

SEQ ID NO: 3200949 - RNA, 19 nt, Artificial Sequence
  Description of Artificial Sequence: Synthetic oligonucleotide
uuccaguagacuuuaauuu

SEQ ID NO: 3200950 - RNA, 19 nt, Artificial Sequence
  Description of Artificial Sequence: Synthetic oligonucleotide
cauauguaaaucaccaaca

SEQ ID NO: 3200951 - RNA, 19 nt, Artificial Sequence
  Description of Artificial Sequence: Synthetic oligonucleotide
uuuucgagagagccgauaa

SEQ ID NO: 3200952 - RNA, 19 nt, Artificial Sequence
  Description of Artificial Sequence: Synthetic oligonucleotide
ucauauuuccacauaugua

SEQ ID NO: 3200953 - RNA, 19 nt, Artificial Sequence
  Description of Artificial Sequence: Synthetic oligonucleotide
guagacuuuaauuucuguc

SEQ ID NO: 3200954 - RNA, 19 nt, Artificial Sequence
  Description of Artificial Sequence: Synthetic oligonucleotide
cugcuauuauucuagcagc

SEQ ID NO: 3200955 - RNA, 19 nt, Artificial Sequence
  Description of Artificial Sequence: Synthetic oligonucleotide
aaaaucauauuuccacaua

SEQ ID NO: 3200956 - RNA, 19 nt, Artificial Sequence
  Description of Artificial Sequence: Synthetic oligonucleotide
uucgagagagccgauaagc

SEQ ID NO: 3200957 - RNA, 19 nt, Artificial Sequence
  Description of Artificial Sequence: Synthetic oligonucleotide
auaagcauguaucuccaga

SEQ ID NO: 3200958 - RNA, 19 nt, Artificial Sequence
  Description of Artificial Sequence: Synthetic oligonucleotide
ucaucguccaauauuucaa

SEQ ID NO: 3200959 - RNA, 19 nt, Artificial Sequence
  Description of Artificial Sequence: Synthetic oligonucleotide
uaagcauguaucuccagaa

SEQ ID NO: 3200960 - RNA, 19 nt, Artificial Sequence
  Description of Artificial Sequence: Synthetic oligonucleotide
cacccaguagauuuuauac

SEQ ID NO: 3200961 - RNA, 19 nt, Artificial Sequence
  Description of Artificial Sequence: Synthetic oligonucleotide
uacuacuuuuccacugggg

SEQ ID NO: 3200962 - RNA, 19 nt, Artificial Sequence
  Description of Artificial Sequence: Synthetic oligonucleotide
aagcauguaucuccagaag

SEQ ID NO: 3200963 - RNA, 19 nt, Artificial Sequence
  Description of Artificial Sequence: Synthetic oligonucleotide
uaaauccauuccuaggaac

SEQ ID NO: 3200964 - RNA, 19 nt, Artificial Sequence
  Description of Artificial Sequence: Synthetic oligonucleotide
acuucucaacaacugugac

SEQ ID NO: 3200965 - RNA, 19 nt, Artificial Sequence
  Description of Artificial Sequence: Synthetic oligonucleotide
ugaaggaucugaauucuau

SEQ ID NO: 3200966 - RNA, 19 nt, Artificial Sequence
  Description of Artificial Sequence: Synthetic oligonucleotide
auuccaguagacuuuaauu

SEQ ID NO: 3200967 - RNA, 19 nt, Artificial Sequence
  Description of Artificial Sequence: Synthetic oligonucleotide
ugaaacuguaugugguuug

SEQ ID NO: 3200968 - RNA, 19 nt, Artificial Sequence
  Description of Artificial Sequence: Synthetic oligonucleotide
ucacgagcuucuaagagaa

SEQ ID NO: 3200969 - RNA, 19 nt, Artificial Sequence
  Description of Artificial Sequence: Synthetic oligonucleotide
gugaaauuaugugacuagg

SEQ ID NO: 3200970 - RNA, 19 nt, Artificial Sequence
  Description of Artificial Sequence: Synthetic oligonucleotide
ucauacuugguugauugca

SEQ ID NO: 3200971 - RNA, 19 nt, Artificial Sequence
  Description of Artificial Sequence: Synthetic oligonucleotide
uauuauucuagcagcuguc

SEQ ID NO: 3200972 - RNA, 19 nt, Artificial Sequence
  Description of Artificial Sequence: Synthetic oligonucleotide
ggaaucuucacccaguaga

SEQ ID NO: 3200973 - RNA, 19 nt, Artificial Sequence
  Description of Artificial Sequence: Synthetic oligonucleotide
ugccagaccacaaacccca

SEQ ID NO: 3200974 - RNA, 19 nt, Artificial Sequence
  Description of Artificial Sequence: Synthetic oligonucleotide
ucucuguuguagcuuuagg

SEQ ID NO: 3200975 - RNA, 19 nt, Artificial Sequence
  Description of Artificial Sequence: Synthetic oligonucleotide
ucagcaacaguuagugacu

SEQ ID NO: 3200976 - RNA, 19 nt, Artificial Sequence
  Description of Artificial Sequence: Synthetic oligonucleotide
ucuuggauggagacguaug

SEQ ID NO: 3200977 - RNA, 19 nt, Artificial Sequence
  Description of Artificial Sequence: Synthetic oligonucleotide
cauuacuacuuuuccacug

SEQ ID NO: 3200978 - RNA, 19 nt, Artificial Sequence
  Description of Artificial Sequence: Synthetic oligonucleotide
ugguugauugcagauaaga

SEQ ID NO: 3200979 - RNA, 19 nt, Artificial Sequence
  Description of Artificial Sequence: Synthetic oligonucleotide
uuauucuagcagcugucca

SEQ ID NO: 3200980 - RNA, 19 nt, Artificial Sequence
  Description of Artificial Sequence: Synthetic oligonucleotide
cauacuugguugauugcag

SEQ ID NO: 3200981 - RNA, 19 nt, Artificial Sequence
  Description of Artificial Sequence: Synthetic oligonucleotide
aaagucuucgcuugcucau

SEQ ID NO: 3200982 - RNA, 19 nt, Artificial Sequence
  Description of Artificial Sequence: Synthetic oligonucleotide
uccacugggguaaccagcc

SEQ ID NO: 3200983 - RNA, 19 nt, Artificial Sequence
  Description of Artificial Sequence: Synthetic oligonucleotide
acgagcuucuaagagaaag

SEQ ID NO: 3200984 - RNA, 19 nt, Artificial Sequence
  Description of Artificial Sequence: Synthetic oligonucleotide
ugcuauuauucuagcagcu

SEQ ID NO: 3200985 - RNA, 19 nt, Artificial Sequence
  Description of Artificial Sequence: Synthetic oligonucleotide
gguaaauccauuccuagga

SEQ ID NO: 3200986 - RNA, 19 nt, Artificial Sequence
  Description of Artificial Sequence: Synthetic oligonucleotide
uuggugaacaggcucggac

SEQ ID NO: 3200987 - RNA, 19 nt, Artificial Sequence
  Description of Artificial Sequence: Synthetic oligonucleotide
gagcuucuaagagaaagcc

SEQ ID NO: 3200988 - RNA, 19 nt, Artificial Sequence
  Description of Artificial Sequence: Synthetic oligonucleotide
gagagagccgauaagcaug

SEQ ID NO: 3200989 - RNA, 19 nt, Artificial Sequence
  Description of Artificial Sequence: Synthetic oligonucleotide
uaagaauaucacgaggaaa

SEQ ID NO: 3200990 - RNA, 19 nt, Artificial Sequence
  Description of Artificial Sequence: Synthetic oligonucleotide
cuuggaucuggucuccagg

SEQ ID NO: 3200991 - RNA, 19 nt, Artificial Sequence
  Description of Artificial Sequence: Synthetic oligonucleotide
uucagucccgguaaaucca

SEQ ID NO: 3200992 - RNA, 19 nt, Artificial Sequence
  Description of Artificial Sequence: Synthetic oligonucleotide
uauucuagcagcuguccau

SEQ ID NO: 3200993 - RNA, 19 nt, Artificial Sequence
  Description of Artificial Sequence: Synthetic oligonucleotide
acaggcucggacuguggcc

SEQ ID NO: 3200994 - RNA, 19 nt, Artificial Sequence
  Description of Artificial Sequence: Synthetic oligonucleotide
ucgagagagccgauaagca

SEQ ID NO: 3200995 - RNA, 19 nt, Artificial Sequence
  Description of Artificial Sequence: Synthetic oligonucleotide
uuucgagagagccgauaag

SEQ ID NO: 3200996 - RNA, 19 nt, Artificial Sequence
  Description of Artificial Sequence: Synthetic oligonucleotide
acugugauuuggugaacag

SEQ ID NO: 3200997 - RNA, 19 nt, Artificial Sequence
  Description of Artificial Sequence: Synthetic oligonucleotide
cuagcaauaaacuaaaccc

SEQ ID NO: 3200998 - RNA, 19 nt, Artificial Sequence
  Description of Artificial Sequence: Synthetic oligonucleotide
aauacaucuagcaauaaac

SEQ ID NO: 3200999 - RNA, 19 nt, Artificial Sequence
  Description of Artificial Sequence: Synthetic oligonucleotide
ugaaauagcuagcaaaugg

SEQ ID NO: 3201000 - RNA, 19 nt, Artificial Sequence
  Description of Artificial Sequence: Synthetic oligonucleotide
aauguuguagguuucauca

SEQ ID NO: 3201001 - RNA, 19 nt, Artificial Sequence
  Description of Artificial Sequence: Synthetic oligonucleotide
gaaaauuuuagccaugaag

SEQ ID NO: 3201002 - RNA, 19 nt, Artificial Sequence
  Description of Artificial Sequence: Synthetic oligonucleotide
uuuaaagacaaaguggucg

SEQ ID NO: 3201003 - RNA, 19 nt, Artificial Sequence
  Description of Artificial Sequence: Synthetic oligonucleotide
aagagcacaaaauacaucu

SEQ ID NO: 3201004 - RNA, 19 nt, Artificial Sequence
  Description of Artificial Sequence: Synthetic oligonucleotide
aaaauuuuagccaugaagu

SEQ ID NO: 3201005 - RNA, 19 nt, Artificial Sequence
  Description of Artificial Sequence: Synthetic oligonucleotide
gauuuuaaagacaaagugg

SEQ ID NO: 3201006 - RNA, 19 nt, Artificial Sequence
  Description of Artificial Sequence: Synthetic oligonucleotide
aguaguaaaagucuauggg

SEQ ID NO: 3201007 - RNA, 19 nt, Artificial Sequence
  Description of Artificial Sequence: Synthetic oligonucleotide
ucuagcaauaaacuaaacc

SEQ ID NO: 3201008 - RNA, 19 nt, Artificial Sequence
  Description of Artificial Sequence: Synthetic oligonucleotide
aaagccuuuacgauuaccc

SEQ ID NO: 3201009 - RNA, 19 nt, Artificial Sequence
  Description of Artificial Sequence: Synthetic oligonucleotide
aaguaguaaaagucuaugg

SEQ ID NO: 3201010 - RNA, 19 nt, Artificial Sequence
  Description of Artificial Sequence: Synthetic oligonucleotide
uuuugcaucaauugcaacc

SEQ ID NO: 3201011 - RNA, 19 nt, Artificial Sequence
  Description of Artificial Sequence: Synthetic oligonucleotide
aucaauugcaaccugagca

SEQ ID NO: 3201012 - RNA, 19 nt, Artificial Sequence
  Description of Artificial Sequence: Synthetic oligonucleotide
aauuuuagccaugaaguag

SEQ ID NO: 3201013 - RNA, 19 nt, Artificial Sequence
  Description of Artificial Sequence: Synthetic oligonucleotide
ucuugguccaugaagagca

SEQ ID NO: 3201014 - RNA, 19 nt, Artificial Sequence
  Description of Artificial Sequence: Synthetic oligonucleotide
acaaaauacaucuagcaau

SEQ ID NO: 3201015 - RNA, 19 nt, Artificial Sequence
  Description of Artificial Sequence: Synthetic oligonucleotide
aaauagcuagcaaauggcc

SEQ ID NO: 3201016 - RNA, 19 nt, Artificial Sequence
  Description of Artificial Sequence: Synthetic oligonucleotide
guggaugaaaauuuuagcc

SEQ ID NO: 3201017 - RNA, 19 nt, Artificial Sequence
  Description of Artificial Sequence: Synthetic oligonucleotide
uuguggaugaaaauuuuag

SEQ ID NO: 3201018 - RNA, 19 nt, Artificial Sequence
  Description of Artificial Sequence: Synthetic oligonucleotide
aaacccugggauuuuaaag

SEQ ID NO: 3201019 - RNA, 19 nt, Artificial Sequence
  Description of Artificial Sequence: Synthetic oligonucleotide
auagcuagcaaauggccac

SEQ ID NO: 3201020 - RNA, 19 nt, Artificial Sequence
  Description of Artificial Sequence: Synthetic oligonucleotide
aagccuuuacgauuacccc

SEQ ID NO: 3201021 - RNA, 19 nt, Artificial Sequence
  Description of Artificial Sequence: Synthetic oligonucleotide
aauaaacuaaacccuggga

SEQ ID NO: 3201022 - RNA, 19 nt, Artificial Sequence
  Description of Artificial Sequence: Synthetic oligonucleotide
ugggauuuuaaagacaaag

SEQ ID NO: 3201023 - RNA, 19 nt, Artificial Sequence
  Description of Artificial Sequence: Synthetic oligonucleotide
uuagccaugaaguaguaaa

SEQ ID NO: 3201024 - RNA, 19 nt, Artificial Sequence
  Description of Artificial Sequence: Synthetic oligonucleotide
auaaacuaaacccugggau

SEQ ID NO: 3201025 - RNA, 19 nt, Artificial Sequence
  Description of Artificial Sequence: Synthetic oligonucleotide
aagacaaaguggucgcuac

SEQ ID NO: 3201026 - RNA, 19 nt, Artificial Sequence
  Description of Artificial Sequence: Synthetic oligonucleotide
acgauuaccccauauaaug

SEQ ID NO: 3201027 - RNA, 19 nt, Artificial Sequence
  Description of Artificial Sequence: Synthetic oligonucleotide
uggaugaaaauuuuagcca

SEQ ID NO: 3201028 - RNA, 19 nt, Artificial Sequence
  Description of Artificial Sequence: Synthetic oligonucleotide
uuucucuugguccaugaag

SEQ ID NO: 3201029 - RNA, 19 nt, Artificial Sequence
  Description of Artificial Sequence: Synthetic oligonucleotide
auuuuaaagacaaaguggu

SEQ ID NO: 3201030 - RNA, 19 nt, Artificial Sequence
  Description of Artificial Sequence: Synthetic oligonucleotide
uuaaagacaaaguggucgc

SEQ ID NO: 3201031 - RNA, 19 nt, Artificial Sequence
  Description of Artificial Sequence: Synthetic oligonucleotide
acuaaguaaggcuucucgg

SEQ ID NO: 3201032 - RNA, 19 nt, Artificial Sequence
  Description of Artificial Sequence: Synthetic oligonucleotide
caugaagagcacaaaauac

SEQ ID NO: 3201033 - RNA, 19 nt, Artificial Sequence
  Description of Artificial Sequence: Synthetic oligonucleotide
aacccugggauuuuaaaga

SEQ ID NO: 3201034 - RNA, 19 nt, Artificial Sequence
  Description of Artificial Sequence: Synthetic oligonucleotide
uuacgauuaccccauauaa

SEQ ID NO: 3201035 - RNA, 19 nt, Artificial Sequence
  Description of Artificial Sequence: Synthetic oligonucleotide
ggauuuuaaagacaaagug

SEQ ID NO: 3201036 - RNA, 19 nt, Artificial Sequence
  Description of Artificial Sequence: Synthetic oligonucleotide
uguggaugaaaauuuuagc

SEQ ID NO: 3201037 - RNA, 19 nt, Artificial Sequence
  Description of Artificial Sequence: Synthetic oligonucleotide
uucucuugguccaugaaga

SEQ ID NO: 3201038 - RNA, 19 nt, Artificial Sequence
  Description of Artificial Sequence: Synthetic oligonucleotide
uguagguuucaucacuaag

SEQ ID NO: 3201039 - RNA, 19 nt, Artificial Sequence
  Description of Artificial Sequence: Synthetic oligonucleotide
gagcacaaaauacaucuag

SEQ ID NO: 3201040 - RNA, 19 nt, Artificial Sequence
  Description of Artificial Sequence: Synthetic oligonucleotide
uucaucacuaaguaaggcu

SEQ ID NO: 3201041 - RNA, 19 nt, Artificial Sequence
  Description of Artificial Sequence: Synthetic oligonucleotide
aaauacaucuagcaauaaa

SEQ ID NO: 3201042 - RNA, 19 nt, Artificial Sequence
  Description of Artificial Sequence: Synthetic oligonucleotide
gaaauagcuagcaaauggc

SEQ ID NO: 3201043 - RNA, 19 nt, Artificial Sequence
  Description of Artificial Sequence: Synthetic oligonucleotide
uagcaauaaacuaaacccu

SEQ ID NO: 3201044 - RNA, 19 nt, Artificial Sequence
  Description of Artificial Sequence: Synthetic oligonucleotide
gguuucaucacuaaguaag

SEQ ID NO: 3201045 - RNA, 19 nt, Artificial Sequence
  Description of Artificial Sequence: Synthetic oligonucleotide
aaaguggucgcuacuacuc

SEQ ID NO: 3201046 - RNA, 19 nt, Artificial Sequence
  Description of Artificial Sequence: Synthetic oligonucleotide
caauaaacuaaacccuggg

SEQ ID NO: 3201047 - RNA, 19 nt, Artificial Sequence
  Description of Artificial Sequence: Synthetic oligonucleotide
ugaagagcacaaaauacau

SEQ ID NO: 3201048 - RNA, 19 nt, Artificial Sequence
  Description of Artificial Sequence: Synthetic oligonucleotide
aaauuuuagccaugaagua

SEQ ID NO: 3201049 - RNA, 19 nt, Artificial Sequence
  Description of Artificial Sequence: Synthetic oligonucleotide
uguuguagguuucaucacu

SEQ ID NO: 3201050 - RNA, 19 nt, Artificial Sequence
  Description of Artificial Sequence: Synthetic oligonucleotide
uuuacgauuaccccauaua

SEQ ID NO: 3201051 - RNA, 19 nt, Artificial Sequence
  Description of Artificial Sequence: Synthetic oligonucleotide
auugcaaccugagcaaagc

SEQ ID NO: 3201052 - RNA, 19 nt, Artificial Sequence
  Description of Artificial Sequence: Synthetic oligonucleotide
ucaucacuaaguaaggcuu

SEQ ID NO: 3201053 - RNA, 19 nt, Artificial Sequence
  Description of Artificial Sequence: Synthetic oligonucleotide
uuugcaucaauugcaaccu

SEQ ID NO: 3201054 - RNA, 19 nt, Artificial Sequence
  Description of Artificial Sequence: Synthetic oligonucleotide
uggugaaauagcuagcaaa

SEQ ID NO: 3201055 - RNA, 19 nt, Artificial Sequence
  Description of Artificial Sequence: Synthetic oligonucleotide
uaaguaaggcuucucggac

SEQ ID NO: 3201056 - RNA, 19 nt, Artificial Sequence
  Description of Artificial Sequence: Synthetic oligonucleotide
gaaguaguaaaagucuaug

SEQ ID NO: 3201057 - RNA, 19 nt, Artificial Sequence
  Description of Artificial Sequence: Synthetic oligonucleotide
agcacaaaauacaucuagc

SEQ ID NO: 3201058 - RNA, 19 nt, Artificial Sequence
  Description of Artificial Sequence: Synthetic oligonucleotide
cacuaaguaaggcuucucg

SEQ ID NO: 3201059 - RNA, 19 nt, Artificial Sequence
  Description of Artificial Sequence: Synthetic oligonucleotide
aguaaggcuucucggacuc

SEQ ID NO: 3201060 - RNA, 19 nt, Artificial Sequence
  Description of Artificial Sequence: Synthetic oligonucleotide
aaguggucgcuacuacucg

SEQ ID NO: 3201061 - RNA, 19 nt, Artificial Sequence
  Description of Artificial Sequence: Synthetic oligonucleotide
caagcucugccuuuugugg

SEQ ID NO: 3201062 - RNA, 19 nt, Artificial Sequence
  Description of Artificial Sequence: Synthetic oligonucleotide
caccuggugaaauagcuag

SEQ ID NO: 3201063 - RNA, 19 nt, Artificial Sequence
  Description of Artificial Sequence: Synthetic oligonucleotide
ucaggauuucaacacauuu

SEQ ID NO: 3201064 - RNA, 19 nt, Artificial Sequence
  Description of Artificial Sequence: Synthetic oligonucleotide
aauagcuagcaaauggcca

SEQ ID NO: 3201065 - RNA, 19 nt, Artificial Sequence
  Description of Artificial Sequence: Synthetic oligonucleotide
uccaugaagagcacaaaau

SEQ ID NO: 3201066 - RNA, 19 nt, Artificial Sequence
  Description of Artificial Sequence: Synthetic oligonucleotide
ucaauugcaaccugagcaa

SEQ ID NO: 3201067 - RNA, 19 nt, Artificial Sequence
  Description of Artificial Sequence: Synthetic oligonucleotide
uaaacuaaacccugggauu

SEQ ID NO: 3201068 - RNA, 19 nt, Artificial Sequence
  Description of Artificial Sequence: Synthetic oligonucleotide
uacaucuagcaauaaacua

SEQ ID NO: 3201069 - RNA, 19 nt, Artificial Sequence
  Description of Artificial Sequence: Synthetic oligonucleotide
ugcaucaauugcaaccuga

SEQ ID NO: 3201070 - RNA, 19 nt, Artificial Sequence
  Description of Artificial Sequence: Synthetic oligonucleotide
ugcaaccugagcaaagccu

SEQ ID NO: 3201071 - RNA, 19 nt, Artificial Sequence
  Description of Artificial Sequence: Synthetic oligonucleotide
acaaaguggucgcuacuac

SEQ ID NO: 3201072 - RNA, 19 nt, Artificial Sequence
  Description of Artificial Sequence: Synthetic oligonucleotide
ugaaguaguaaaagucuau

SEQ ID NO: 3201073 - RNA, 19 nt, Artificial Sequence
  Description of Artificial Sequence: Synthetic oligonucleotide
uuuguggaugaaaauuuua

SEQ ID NO: 3201074 - RNA, 19 nt, Artificial Sequence
  Description of Artificial Sequence: Synthetic oligonucleotide
uagguuucaucacuaagua

SEQ ID NO: 3201075 - RNA, 19 nt, Artificial Sequence
  Description of Artificial Sequence: Synthetic oligonucleotide
uccaccuggugaaauagcu

SEQ ID NO: 3201076 - RNA, 19 nt, Artificial Sequence
  Description of Artificial Sequence: Synthetic oligonucleotide
uuuuaaagacaaagugguc

SEQ ID NO: 3201077 - RNA, 19 nt, Artificial Sequence
  Description of Artificial Sequence: Synthetic oligonucleotide
acccugggauuuuaaagac

SEQ ID NO: 3201078 - RNA, 19 nt, Artificial Sequence
  Description of Artificial Sequence: Synthetic oligonucleotide
auuuuagccaugaaguagu

SEQ ID NO: 3201079 - RNA, 19 nt, Artificial Sequence
  Description of Artificial Sequence: Synthetic oligonucleotide
caaauggccacuccucagg

SEQ ID NO: 3201080 - RNA, 19 nt, Artificial Sequence
  Description of Artificial Sequence: Synthetic oligonucleotide
acaucuagcaauaaacuaa

SEQ ID NO: 3201081 - RNA, 19 nt, Artificial Sequence
  Description of Artificial Sequence: Synthetic oligonucleotide
aaguaaggcuucucggacu

SEQ ID NO: 3201082 - RNA, 19 nt, Artificial Sequence
  Description of Artificial Sequence: Synthetic oligonucleotide
uauaauguuguagguuuca

SEQ ID NO: 3201083 - RNA, 19 nt, Artificial Sequence
  Description of Artificial Sequence: Synthetic oligonucleotide
ugagcaaagccuuuacgau

SEQ ID NO: 3201084 - RNA, 19 nt, Artificial Sequence
  Description of Artificial Sequence: Synthetic oligonucleotide
auguuguagguuucaucac

SEQ ID NO: 3201085 - RNA, 19 nt, Artificial Sequence
  Description of Artificial Sequence: Synthetic oligonucleotide
ugccuuuuguggaugaaaa

SEQ ID NO: 3201086 - RNA, 19 nt, Artificial Sequence
  Description of Artificial Sequence: Synthetic oligonucleotide
augaagagcacaaaauaca

SEQ ID NO: 3201087 - RNA, 19 nt, Artificial Sequence
  Description of Artificial Sequence: Synthetic oligonucleotide
guuucaucacuaaguaagg

SEQ ID NO: 3201088 - RNA, 19 nt, Artificial Sequence
  Description of Artificial Sequence: Synthetic oligonucleotide
cugagcaaagccuuuacga

SEQ ID NO: 3201089 - RNA, 19 nt, Artificial Sequence
  Description of Artificial Sequence: Synthetic oligonucleotide
uuaccccauauaauguugu

SEQ ID NO: 3201090 - RNA, 19 nt, Artificial Sequence
  Description of Artificial Sequence: Synthetic oligonucleotide
uuucaucacuaaguaaggc

SEQ ID NO: 3201091 - RNA, 19 nt, Artificial Sequence
  Description of Artificial Sequence: Synthetic oligonucleotide
aauugcaaccugagcaaag

SEQ ID NO: 3201092 - RNA, 19 nt, Artificial Sequence
  Description of Artificial Sequence: Synthetic oligonucleotide
uaauguuguagguuucauc

SEQ ID NO: 3201093 - RNA, 19 nt, Artificial Sequence
  Description of Artificial Sequence: Synthetic oligonucleotide
acuccucaggauuucaaca

SEQ ID NO: 3201094 - RNA, 19 nt, Artificial Sequence
  Description of Artificial Sequence: Synthetic oligonucleotide
aaauggccacuccucagga

SEQ ID NO: 3201095 - RNA, 19 nt, Artificial Sequence
  Description of Artificial Sequence: Synthetic oligonucleotide
gucgcuacuacucggcaag

SEQ ID NO: 3201096 - RNA, 19 nt, Artificial Sequence
  Description of Artificial Sequence: Synthetic oligonucleotide
uacgauuaccccauauaau

SEQ ID NO: 3201097 - RNA, 19 nt, Artificial Sequence
  Description of Artificial Sequence: Synthetic oligonucleotide
aagcuauacauauauauac

SEQ ID NO: 3201098 - RNA, 19 nt, Artificial Sequence
  Description of Artificial Sequence: Synthetic oligonucleotide
aauaaaaugagaacgugac

SEQ ID NO: 3201099 - RNA, 19 nt, Artificial Sequence
  Description of Artificial Sequence: Synthetic oligonucleotide
aauuuuggagccuaagagg

SEQ ID NO: 3201100 - RNA, 19 nt, Artificial Sequence
  Description of Artificial Sequence: Synthetic oligonucleotide
uacugguacaauuugaugg

SEQ ID NO: 3201101 - RNA, 19 nt, Artificial Sequence
  Description of Artificial Sequence: Synthetic oligonucleotide
uuaauaacuguauccagcg

SEQ ID NO: 3201102 - RNA, 19 nt, Artificial Sequence
  Description of Artificial Sequence: Synthetic oligonucleotide
aagacgaaaagcuucaugu

SEQ ID NO: 3201103 - RNA, 19 nt, Artificial Sequence
  Description of Artificial Sequence: Synthetic oligonucleotide
aauuauacuggguuccaac

SEQ ID NO: 3201104 - RNA, 19 nt, Artificial Sequence
  Description of Artificial Sequence: Synthetic oligonucleotide
uauacaaacaacucugaag

SEQ ID NO: 3201105 - RNA, 19 nt, Artificial Sequence
  Description of Artificial Sequence: Synthetic oligonucleotide
aacacuugaaaugagcuuc

SEQ ID NO: 3201106 - RNA, 19 nt, Artificial Sequence
  Description of Artificial Sequence: Synthetic oligonucleotide
auaagaaagaaaccuacag

SEQ ID NO: 3201107 - RNA, 19 nt, Artificial Sequence
  Description of Artificial Sequence: Synthetic oligonucleotide
ugauagagaaggaugaccc

SEQ ID NO: 3201108 - RNA, 19 nt, Artificial Sequence
  Description of Artificial Sequence: Synthetic oligonucleotide
gacaugauaagaaagaaac

SEQ ID NO: 3201109 - RNA, 19 nt, Artificial Sequence
  Description of Artificial Sequence: Synthetic oligonucleotide
auuauacuggguuccaacc

SEQ ID NO: 3201110 - RNA, 19 nt, Artificial Sequence
  Description of Artificial Sequence: Synthetic oligonucleotide
uuauucaacacuugaaaug

SEQ ID NO: 3201111 - RNA, 19 nt, Artificial Sequence
  Description of Artificial Sequence: Synthetic oligonucleotide
uuuugauagagaaggauga

SEQ ID NO: 3201112 - RNA, 19 nt, Artificial Sequence
  Description of Artificial Sequence: Synthetic oligonucleotide
uuaacuccaaauuuuggag

SEQ ID NO: 3201113 - RNA, 19 nt, Artificial Sequence
  Description of Artificial Sequence: Synthetic oligonucleotide
gaugaugcuuuauacaaag

SEQ ID NO: 3201114 - RNA, 19 nt, Artificial Sequence
  Description of Artificial Sequence: Synthetic oligonucleotide
aagaugaugcuuuauacaa

SEQ ID NO: 3201115 - RNA, 19 nt, Artificial Sequence
  Description of Artificial Sequence: Synthetic oligonucleotide
acaaauuauacuggguucc

SEQ ID NO: 3201116 - RNA, 19 nt, Artificial Sequence
  Description of Artificial Sequence: Synthetic oligonucleotide
uccauaauuaauaauggua

SEQ ID NO: 3201117 - RNA, 19 nt, Artificial Sequence
  Description of Artificial Sequence: Synthetic oligonucleotide
uguucaaauacccugucgu

SEQ ID NO: 3201118 - RNA, 19 nt, Artificial Sequence
  Description of Artificial Sequence: Synthetic oligonucleotide
uggauuaaauuaaauaaaa

SEQ ID NO: 3201119 - RNA, 19 nt, Artificial Sequence
  Description of Artificial Sequence: Synthetic oligonucleotide
ugauaagaaagaaaccuac

SEQ ID NO: 3201120 - RNA, 19 nt, Artificial Sequence
  Description of Artificial Sequence: Synthetic oligonucleotide
aauuaauaaugguaaaaua

SEQ ID NO: 3201121 - RNA, 19 nt, Artificial Sequence
  Description of Artificial Sequence: Synthetic oligonucleotide
uacaaagcuauacauauau

SEQ ID NO: 3201122 - RNA, 19 nt, Artificial Sequence
  Description of Artificial Sequence: Synthetic oligonucleotide
ugagcuucggauaaguucu

SEQ ID NO: 3201123 - RNA, 19 nt, Artificial Sequence
  Description of Artificial Sequence: Synthetic oligonucleotide
aagguagaggcguuaacuc

SEQ ID NO: 3201124 - RNA, 19 nt, Artificial Sequence
  Description of Artificial Sequence: Synthetic oligonucleotide
caagcuaucagagucaacc

SEQ ID NO: 3201125 - RNA, 19 nt, Artificial Sequence
  Description of Artificial Sequence: Synthetic oligonucleotide
gguaugaccgcccugaacg

SEQ ID NO: 3201126 - RNA, 19 nt, Artificial Sequence
  Description of Artificial Sequence: Synthetic oligonucleotide
ugagguaacagcauuugga

SEQ ID NO: 3201127 - RNA, 19 nt, Artificial Sequence
  Description of Artificial Sequence: Synthetic oligonucleotide
uuggccuuaacauugugcc

SEQ ID NO: 3201128 - RNA, 19 nt, Artificial Sequence
  Description of Artificial Sequence: Synthetic oligonucleotide
ucaacacuugaaaugagcu

SEQ ID NO: 3201129 - RNA, 19 nt, Artificial Sequence
  Description of Artificial Sequence: Synthetic oligonucleotide
uauucaacacuugaaauga

SEQ ID NO: 3201130 - RNA, 19 nt, Artificial Sequence
  Description of Artificial Sequence: Synthetic oligonucleotide
uuuaagaugaugcuuuaua

SEQ ID NO: 3201131 - RNA, 19 nt, Artificial Sequence
  Description of Artificial Sequence: Synthetic oligonucleotide
ucaaauacccugucgucgg

SEQ ID NO: 3201132 - RNA, 19 nt, Artificial Sequence
  Description of Artificial Sequence: Synthetic oligonucleotide
uaauuaauaaugguaaaau

SEQ ID NO: 3201133 - RNA, 19 nt, Artificial Sequence
  Description of Artificial Sequence: Synthetic oligonucleotide
uuggcugaaguccaccugg

SEQ ID NO: 3201134 - RNA, 19 nt, Artificial Sequence
  Description of Artificial Sequence: Synthetic oligonucleotide
aaauaaaaugagaacguga

SEQ ID NO: 3201135 - RNA, 19 nt, Artificial Sequence
  Description of Artificial Sequence: Synthetic oligonucleotide
uucaaauacccugucgucg

SEQ ID NO: 3201136 - RNA, 19 nt, Artificial Sequence
  Description of Artificial Sequence: Synthetic oligonucleotide
uaagaugaugcuuuauaca

SEQ ID NO: 3201137 - RNA, 19 nt, Artificial Sequence
  Description of Artificial Sequence: Synthetic oligonucleotide
caaccagugauuaaaguug

SEQ ID NO: 3201138 - RNA, 19 nt, Artificial Sequence
  Description of Artificial Sequence: Synthetic oligonucleotide
uaaugguaaaauagaacac

SEQ ID NO: 3201139 - RNA, 19 nt, Artificial Sequence
  Description of Artificial Sequence: Synthetic oligonucleotide
cagaauucuacuauuccag

SEQ ID NO: 3201140 - RNA, 19 nt, Artificial Sequence
  Description of Artificial Sequence: Synthetic oligonucleotide
caacucugaagguagaggc

SEQ ID NO: 3201141 - RNA, 19 nt, Artificial Sequence
  Description of Artificial Sequence: Synthetic oligonucleotide
ugaaaugagcuucggauaa

SEQ ID NO: 3201142 - RNA, 19 nt, Artificial Sequence
  Description of Artificial Sequence: Synthetic oligonucleotide
agguagaggcguuaacucc

SEQ ID NO: 3201143 - RNA, 19 nt, Artificial Sequence
  Description of Artificial Sequence: Synthetic oligonucleotide
agaauucuacuauuccagg

SEQ ID NO: 3201144 - RNA, 19 nt, Artificial Sequence
  Description of Artificial Sequence: Synthetic oligonucleotide
auuaaaguugagguaacag

SEQ ID NO: 3201145 - RNA, 19 nt, Artificial Sequence
  Description of Artificial Sequence: Synthetic oligonucleotide
ucggauaaguucuuggcug

SEQ ID NO: 3201146 - RNA, 19 nt, Artificial Sequence
  Description of Artificial Sequence: Synthetic oligonucleotide
acagaauucuacuauucca

SEQ ID NO: 3201147 - RNA, 19 nt, Artificial Sequence
  Description of Artificial Sequence: Synthetic oligonucleotide
auccggagcauccaccucc

SEQ ID NO: 3201148 - RNA, 19 nt, Artificial Sequence
  Description of Artificial Sequence: Synthetic oligonucleotide
agcgacaagggccuggugg

SEQ ID NO: 3201149 - RNA, 19 nt, Artificial Sequence
  Description of Artificial Sequence: Synthetic oligonucleotide
auuuugauagagaaggaug

SEQ ID NO: 3201150 - RNA, 19 nt, Artificial Sequence
  Description of Artificial Sequence: Synthetic oligonucleotide
aggccaagcuaucagaguc

SEQ ID NO: 3201151 - RNA, 19 nt, Artificial Sequence
  Description of Artificial Sequence: Synthetic oligonucleotide
ucuggauuggaggacgucg

SEQ ID NO: 3201152 - RNA, 19 nt, Artificial Sequence
  Description of Artificial Sequence: Synthetic oligonucleotide
guuaauaacuguauccagc

SEQ ID NO: 3201153 - RNA, 19 nt, Artificial Sequence
  Description of Artificial Sequence: Synthetic oligonucleotide
uaagaggugcuacaaauua

SEQ ID NO: 3201154 - RNA, 19 nt, Artificial Sequence
  Description of Artificial Sequence: Synthetic oligonucleotide
aaaugagaacgugacauga

SEQ ID NO: 3201155 - RNA, 19 nt, Artificial Sequence
  Description of Artificial Sequence: Synthetic oligonucleotide
aaaauagaacacuccugga

SEQ ID NO: 3201156 - RNA, 19 nt, Artificial Sequence
  Description of Artificial Sequence: Synthetic oligonucleotide
guuaacuccaaauuuugga

SEQ ID NO: 3201157 - RNA, 19 nt, Artificial Sequence
  Description of Artificial Sequence: Synthetic oligonucleotide
auagagaaggaugacccac

SEQ ID NO: 3201158 - RNA, 19 nt, Artificial Sequence
  Description of Artificial Sequence: Synthetic oligonucleotide
aaacuuguauuggaauccg

SEQ ID NO: 3201159 - RNA, 19 nt, Artificial Sequence
  Description of Artificial Sequence: Synthetic oligonucleotide
uuauacuggguuccaacca

SEQ ID NO: 3201160 - RNA, 19 nt, Artificial Sequence
  Description of Artificial Sequence: Synthetic oligonucleotide
uugagguaacagcauuugg

SEQ ID NO: 3201161 - RNA, 19 nt, Artificial Sequence
  Description of Artificial Sequence: Synthetic oligonucleotide
auaaguucuuggcugaagu

SEQ ID NO: 3201162 - RNA, 19 nt, Artificial Sequence
  Description of Artificial Sequence: Synthetic oligonucleotide
uugaggguuauucaacacu

SEQ ID NO: 3201163 - RNA, 19 nt, Artificial Sequence
  Description of Artificial Sequence: Synthetic oligonucleotide
acagcuuucugugaggcgg

SEQ ID NO: 3201164 - RNA, 19 nt, Artificial Sequence
  Description of Artificial Sequence: Synthetic oligonucleotide
ugugaggcggaucuguccc

SEQ ID NO: 3201165 - RNA, 19 nt, Artificial Sequence
  Description of Artificial Sequence: Synthetic oligonucleotide
acaugauaagaaagaaacc

SEQ ID NO: 3201166 - RNA, 19 nt, Artificial Sequence
  Description of Artificial Sequence: Synthetic oligonucleotide
uacaaauuauacuggguuc

SEQ ID NO: 3201167 - RNA, 19 nt, Artificial Sequence
  Description of Artificial Sequence: Synthetic oligonucleotide
uccuggauuaaauuaaaua

SEQ ID NO: 3201168 - RNA, 19 nt, Artificial Sequence
  Description of Artificial Sequence: Synthetic oligonucleotide
uuucauacugguacaauuu

SEQ ID NO: 3201169 - RNA, 19 nt, Artificial Sequence
  Description of Artificial Sequence: Synthetic oligonucleotide
auuggaauccggagcaucc

SEQ ID NO: 3201170 - RNA, 19 nt, Artificial Sequence
  Description of Artificial Sequence: Synthetic oligonucleotide
gagaacgugacaugauaag

SEQ ID NO: 3201171 - RNA, 19 nt, Artificial Sequence
  Description of Artificial Sequence: Synthetic oligonucleotide
gacgaaaagcuucauguuc

SEQ ID NO: 3201172 - RNA, 19 nt, Artificial Sequence
  Description of Artificial Sequence: Synthetic oligonucleotide
uugauagagaaggaugacc

SEQ ID NO: 3201173 - RNA, 19 nt, Artificial Sequence
  Description of Artificial Sequence: Synthetic oligonucleotide
ugagaacgugacaugauaa

SEQ ID NO: 3201174 - RNA, 19 nt, Artificial Sequence
  Description of Artificial Sequence: Synthetic oligonucleotide
uucccagcgggucaaaagc

SEQ ID NO: 3201175 - RNA, 19 nt, Artificial Sequence
  Description of Artificial Sequence: Synthetic oligonucleotide
agccugaggaauucugacc

SEQ ID NO: 3201176 - RNA, 19 nt, Artificial Sequence
  Description of Artificial Sequence: Synthetic oligonucleotide
ugacaugauaagaaagaaa

SEQ ID NO: 3201177 - RNA, 19 nt, Artificial Sequence
  Description of Artificial Sequence: Synthetic oligonucleotide
cuuuauacaaagcuauaca

SEQ ID NO: 3201178 - RNA, 19 nt, Artificial Sequence
  Description of Artificial Sequence: Synthetic oligonucleotide
uucggauaaguucuuggcu

SEQ ID NO: 3201179 - RNA, 19 nt, Artificial Sequence
  Description of Artificial Sequence: Synthetic oligonucleotide
aacgugacaugauaagaaa

SEQ ID NO: 3201180 - RNA, 19 nt, Artificial Sequence
  Description of Artificial Sequence: Synthetic oligonucleotide
cuucggauaaguucuuggc

SEQ ID NO: 3201181 - RNA, 19 nt, Artificial Sequence
  Description of Artificial Sequence: Synthetic oligonucleotide
aaaagcccgggagagggcg

SEQ ID NO: 3201182 - RNA, 19 nt, Artificial Sequence
  Description of Artificial Sequence: Synthetic oligonucleotide
gaguacuguggccaagacg

SEQ ID NO: 3201183 - RNA, 19 nt, Artificial Sequence
  Description of Artificial Sequence: Synthetic oligonucleotide
aauuugauggcaaucccaa

SEQ ID NO: 3201184 - RNA, 19 nt, Artificial Sequence
  Description of Artificial Sequence: Synthetic oligonucleotide
auuuccagcagccucugga

SEQ ID NO: 3201185 - RNA, 19 nt, Artificial Sequence
  Description of Artificial Sequence: Synthetic oligonucleotide
uucggugauuuccagcagc

SEQ ID NO: 3201186 - RNA, 19 nt, Artificial Sequence
  Description of Artificial Sequence: Synthetic oligonucleotide
gaggaauucugacccuucg

SEQ ID NO: 3201187 - RNA, 19 nt, Artificial Sequence
  Description of Artificial Sequence: Synthetic oligonucleotide
auuuuggagccuaagaggu

SEQ ID NO: 3201188 - RNA, 19 nt, Artificial Sequence
  Description of Artificial Sequence: Synthetic oligonucleotide
auaaaaugagaacgugaca

SEQ ID NO: 3201189 - RNA, 19 nt, Artificial Sequence
  Description of Artificial Sequence: Synthetic oligonucleotide
aacgccgcggccguuagcg

SEQ ID NO: 3201190 - RNA, 19 nt, Artificial Sequence
  Description of Artificial Sequence: Synthetic oligonucleotide
aagaaaccuacagaauucu

SEQ ID NO: 3201191 - RNA, 19 nt, Artificial Sequence
  Description of Artificial Sequence: Synthetic oligonucleotide
aacaacucugaagguagag

SEQ ID NO: 3201192 - RNA, 19 nt, Artificial Sequence
  Description of Artificial Sequence: Synthetic oligonucleotide
acaacucugaagguagagg

SEQ ID NO: 3201193 - RNA, 19 nt, Artificial Sequence
  Description of Artificial Sequence: Synthetic oligonucleotide
agagucaaccaccacucug

SEQ ID NO: 3201194 - RNA, 19 nt, Artificial Sequence
  Description of Artificial Sequence: Synthetic oligonucleotide
uugaaaugagcuucggaua

SEQ ID NO: 3201195 - RNA, 19 nt, Artificial Sequence
  Description of Artificial Sequence: Synthetic oligonucleotide
aacacuccuggauuaaauu

SEQ ID NO: 3201196 - RNA, 19 nt, Artificial Sequence
  Description of Artificial Sequence: Synthetic oligonucleotide
uguauccagcgaaaacuug

SEQ ID NO: 3201197 - RNA, 19 nt, Artificial Sequence
  Description of Artificial Sequence: Synthetic oligonucleotide
aaagaaugcaaccaaggac

SEQ ID NO: 3201198 - RNA, 19 nt, Artificial Sequence
  Description of Artificial Sequence: Synthetic oligonucleotide
ucugauuucucauagcugg

SEQ ID NO: 3201199 - RNA, 19 nt, Artificial Sequence
  Description of Artificial Sequence: Synthetic oligonucleotide
aagaaugcaaccaaggacg

SEQ ID NO: 3201200 - RNA, 19 nt, Artificial Sequence
  Description of Artificial Sequence: Synthetic oligonucleotide
aaaagaaugcaaccaagga

SEQ ID NO: 3201201 - RNA, 19 nt, Artificial Sequence
  Description of Artificial Sequence: Synthetic oligonucleotide
aaggacgugaguucuaaag

SEQ ID NO: 3201202 - RNA, 19 nt, Artificial Sequence
  Description of Artificial Sequence: Synthetic oligonucleotide
gaguucuaaagcuacuggg

SEQ ID NO: 3201203 - RNA, 19 nt, Artificial Sequence
  Description of Artificial Sequence: Synthetic oligonucleotide
ugaguucuaaagcuacugg

SEQ ID NO: 3201204 - RNA, 19 nt, Artificial Sequence
  Description of Artificial Sequence: Synthetic oligonucleotide
aggacgugaguucuaaagc

SEQ ID NO: 3201205 - RNA, 19 nt, Artificial Sequence
  Description of Artificial Sequence: Synthetic oligonucleotide
aaugcaaccaaggacguga

SEQ ID NO: 3201206 - RNA, 19 nt, Artificial Sequence
  Description of Artificial Sequence: Synthetic oligonucleotide
ucuaaagcuacuggggugg

SEQ ID NO: 3201207 - RNA, 19 nt, Artificial Sequence
  Description of Artificial Sequence: Synthetic oligonucleotide
aacagcaucugauuucuca

SEQ ID NO: 3201208 - RNA, 19 nt, Artificial Sequence
  Description of Artificial Sequence: Synthetic oligonucleotide
uuucucgugcuucagaguc

SEQ ID NO: 3201209 - RNA, 19 nt, Artificial Sequence
  Description of Artificial Sequence: Synthetic oligonucleotide
gagaacuagaagcagaaaa

SEQ ID NO: 3201210 - RNA, 19 nt, Artificial Sequence
  Description of Artificial Sequence: Synthetic oligonucleotide
uguaaacagcaucugauuu

SEQ ID NO: 3201211 - RNA, 19 nt, Artificial Sequence
  Description of Artificial Sequence: Synthetic oligonucleotide
agcaucugauuucucauag

SEQ ID NO: 3201212 - RNA, 19 nt, Artificial Sequence
  Description of Artificial Sequence: Synthetic oligonucleotide
cauagcuggcuauagcugc

SEQ ID NO: 3201213 - RNA, 19 nt, Artificial Sequence
  Description of Artificial Sequence: Synthetic oligonucleotide
aguucuaaagcuacugggg

SEQ ID NO: 3201214 - RNA, 19 nt, Artificial Sequence
  Description of Artificial Sequence: Synthetic oligonucleotide
uucagagucucguaugucu

SEQ ID NO: 3201215 - RNA, 19 nt, Artificial Sequence
  Description of Artificial Sequence: Synthetic oligonucleotide
uauagcugccuuucggacc

SEQ ID NO: 3201216 - RNA, 19 nt, Artificial Sequence
  Description of Artificial Sequence: Synthetic oligonucleotide
ucguaugucucuugguucc

SEQ ID NO: 3201217 - RNA, 19 nt, Artificial Sequence
  Description of Artificial Sequence: Synthetic oligonucleotide
ucauagcuggcuauagcug

SEQ ID NO: 3201218 - RNA, 19 nt, Artificial Sequence
  Description of Artificial Sequence: Synthetic oligonucleotide
uaaacagcaucugauuucu

SEQ ID NO: 3201219 - RNA, 19 nt, Artificial Sequence
  Description of Artificial Sequence: Synthetic oligonucleotide
uucuaaagcuacuggggug

SEQ ID NO: 3201220 - RNA, 19 nt, Artificial Sequence
  Description of Artificial Sequence: Synthetic oligonucleotide
ugucucuugguuccgggug

SEQ ID NO: 3201221 - RNA, 19 nt, Artificial Sequence
  Description of Artificial Sequence: Synthetic oligonucleotide
agucucguaugucucuugg

SEQ ID NO: 3201222 - RNA, 19 nt, Artificial Sequence
  Description of Artificial Sequence: Synthetic oligonucleotide
guaaacagcaucugauuuc

SEQ ID NO: 3201223 - RNA, 19 nt, Artificial Sequence
  Description of Artificial Sequence: Synthetic oligonucleotide
uaugucucuugguuccggg

SEQ ID NO: 3201224 - RNA, 19 nt, Artificial Sequence
  Description of Artificial Sequence: Synthetic oligonucleotide
auagcugccuuucggaccu

SEQ ID NO: 3201225 - RNA, 19 nt, Artificial Sequence
  Description of Artificial Sequence: Synthetic oligonucleotide
ucucauagcuggcuauagc

SEQ ID NO: 3201226 - RNA, 19 nt, Artificial Sequence
  Description of Artificial Sequence: Synthetic oligonucleotide
ucucguaugucucuugguu

SEQ ID NO: 3201227 - RNA, 19 nt, Artificial Sequence
  Description of Artificial Sequence: Synthetic oligonucleotide
gguuucucgugcuucagag

SEQ ID NO: 3201228 - RNA, 19 nt, Artificial Sequence
  Description of Artificial Sequence: Synthetic oligonucleotide
aaagcuacuggggugguuu

SEQ ID NO: 3201229 - RNA, 19 nt, Artificial Sequence
  Description of Artificial Sequence: Synthetic oligonucleotide
ugcuucagagucucguaug

SEQ ID NO: 3201230 - RNA, 19 nt, Artificial Sequence
  Description of Artificial Sequence: Synthetic oligonucleotide
ugccuuucggaccuggauc

SEQ ID NO: 3201231 - RNA, 19 nt, Artificial Sequence
  Description of Artificial Sequence: Synthetic oligonucleotide
ucagagucucguaugucuc

SEQ ID NO: 3201232 - RNA, 19 nt, Artificial Sequence
  Description of Artificial Sequence: Synthetic oligonucleotide
cuauagcugccuuucggac

SEQ ID NO: 3201233 - RNA, 19 nt, Artificial Sequence
  Description of Artificial Sequence: Synthetic oligonucleotide
acgugaguucuaaagcuac

SEQ ID NO: 3201234 - RNA, 19 nt, Artificial Sequence
  Description of Artificial Sequence: Synthetic oligonucleotide
aagcuacuggggugguuuc

SEQ ID NO: 3201235 - RNA, 19 nt, Artificial Sequence
  Description of Artificial Sequence: Synthetic oligonucleotide
acagcaucugauuucucau

SEQ ID NO: 3201236 - RNA, 19 nt, Artificial Sequence
  Description of Artificial Sequence: Synthetic oligonucleotide
cucguaugucucuugguuc

SEQ ID NO: 3201237 - RNA, 19 nt, Artificial Sequence
  Description of Artificial Sequence: Synthetic oligonucleotide
auuucucauagcuggcuau

SEQ ID NO: 3201238 - RNA, 19 nt, Artificial Sequence
  Description of Artificial Sequence: Synthetic oligonucleotide
cucaggcccguguaaacag

SEQ ID NO: 3201239 - RNA, 19 nt, Artificial Sequence
  Description of Artificial Sequence: Synthetic oligonucleotide
uucucauagcuggcuauag

SEQ ID NO: 3201240 - RNA, 19 nt, Artificial Sequence
  Description of Artificial Sequence: Synthetic oligonucleotide
ugauuucucauagcuggcu

SEQ ID NO: 3201241 - RNA, 19 nt, Artificial Sequence
  Description of Artificial Sequence: Synthetic oligonucleotide
auagcuggcuauagcugcc

SEQ ID NO: 3201242 - RNA, 19 nt, Artificial Sequence
  Description of Artificial Sequence: Synthetic oligonucleotide
cugauuucucauagcuggc

SEQ ID NO: 3201243 - RNA, 19 nt, Artificial Sequence
  Description of Artificial Sequence: Synthetic oligonucleotide
gugaguucuaaagcuacug

SEQ ID NO: 3201244 - RNA, 19 nt, Artificial Sequence
  Description of Artificial Sequence: Synthetic oligonucleotide
aaccaaggacgugaguucu

SEQ ID NO: 3201245 - RNA, 19 nt, Artificial Sequence
  Description of Artificial Sequence: Synthetic oligonucleotide
guuccgggugcucaggccc

SEQ ID NO: 3201246 - RNA, 19 nt, Artificial Sequence
  Description of Artificial Sequence: Synthetic oligonucleotide
uuucggaccuggaucugga

SEQ ID NO: 3201247 - RNA, 19 nt, Artificial Sequence
  Description of Artificial Sequence: Synthetic oligonucleotide
ggcuauagcugccuuucgg

SEQ ID NO: 3201248 - RNA, 19 nt, Artificial Sequence
  Description of Artificial Sequence: Synthetic oligonucleotide
acuggggugguuucucgug

SEQ ID NO: 3201249 - RNA, 19 nt, Artificial Sequence
  Description of Artificial Sequence: Synthetic oligonucleotide
cucauagcuggcuauagcu

SEQ ID NO: 3201250 - RNA, 19 nt, Artificial Sequence
  Description of Artificial Sequence: Synthetic oligonucleotide
uggcuauagcugccuuucg

SEQ ID NO: 3201251 - RNA, 19 nt, Artificial Sequence
  Description of Artificial Sequence: Synthetic oligonucleotide
caaccaaggacgugaguuc

SEQ ID NO: 3201252 - RNA, 19 nt, Artificial Sequence
  Description of Artificial Sequence: Synthetic oligonucleotide
caucugauuucucauagcu

SEQ ID NO: 3201253 - RNA, 19 nt, Artificial Sequence
  Description of Artificial Sequence: Synthetic oligonucleotide
ugguuucucgugcuucaga

SEQ ID NO: 3201254 - RNA, 19 nt, Artificial Sequence
  Description of Artificial Sequence: Synthetic oligonucleotide
gauuucucauagcuggcua

SEQ ID NO: 3201255 - RNA, 19 nt, Artificial Sequence
  Description of Artificial Sequence: Synthetic oligonucleotide
ucaggcccguguaaacagc

SEQ ID NO: 3201256 - RNA, 19 nt, Artificial Sequence
  Description of Artificial Sequence: Synthetic oligonucleotide
cuuucggaccuggaucugg

SEQ ID NO: 3201257 - RNA, 19 nt, Artificial Sequence
  Description of Artificial Sequence: Synthetic oligonucleotide
ucuugguuccgggugcuca

SEQ ID NO: 3201258 - RNA, 19 nt, Artificial Sequence
  Description of Artificial Sequence: Synthetic oligonucleotide
cuacuggggugguuucucg

SEQ ID NO: 3201259 - RNA, 19 nt, Artificial Sequence
  Description of Artificial Sequence: Synthetic oligonucleotide
cuugguuccgggugcucag

SEQ ID NO: 3201260 - RNA, 19 nt, Artificial Sequence
  Description of Artificial Sequence: Synthetic oligonucleotide
guucuaaagcuacuggggu

SEQ ID NO: 3201261 - RNA, 19 nt, Artificial Sequence
  Description of Artificial Sequence: Synthetic oligonucleotide
aucugauuucucauagcug

SEQ ID NO: 3201262 - RNA, 19 nt, Artificial Sequence
  Description of Artificial Sequence: Synthetic oligonucleotide
gucucuugguuccgggugc

SEQ ID NO: 3201263 - RNA, 19 nt, Artificial Sequence
  Description of Artificial Sequence: Synthetic oligonucleotide
uucucgugcuucagagucu

SEQ ID NO: 3201264 - RNA, 19 nt, Artificial Sequence
  Description of Artificial Sequence: Synthetic oligonucleotide
uuccgggugcucaggcccg

SEQ ID NO: 3201265 - RNA, 19 nt, Artificial Sequence
  Description of Artificial Sequence: Synthetic oligonucleotide
cuggcuauagcugccuuuc

SEQ ID NO: 3201266 - RNA, 19 nt, Artificial Sequence
  Description of Artificial Sequence: Synthetic oligonucleotide
cuggggugguuucucgugc

SEQ ID NO: 3201267 - RNA, 19 nt, Artificial Sequence
  Description of Artificial Sequence: Synthetic oligonucleotide
ucgugcuucagagucucgu

SEQ ID NO: 3201268 - RNA, 19 nt, Artificial Sequence
  Description of Artificial Sequence: Synthetic oligonucleotide
ugguuccgggugcucaggc

SEQ ID NO: 3201269 - RNA, 19 nt, Artificial Sequence
  Description of Artificial Sequence: Synthetic oligonucleotide
gagucucguaugucucuug

SEQ ID NO: 3201270 - RNA, 19 nt, Artificial Sequence
  Description of Artificial Sequence: Synthetic oligonucleotide
uuucucauagcuggcuaua

SEQ ID NO: 3201271 - RNA, 19 nt, Artificial Sequence
  Description of Artificial Sequence: Synthetic oligonucleotide
guaugucucuugguuccgg

SEQ ID NO: 3201272 - RNA, 19 nt, Artificial Sequence
  Description of Artificial Sequence: Synthetic oligonucleotide
gcuauagcugccuuucgga

SEQ ID NO: 3201273 - RNA, 19 nt, Artificial Sequence
  Description of Artificial Sequence: Synthetic oligonucleotide
augucucuugguuccgggu

SEQ ID NO: 3201274 - RNA, 19 nt, Artificial Sequence
  Description of Artificial Sequence: Synthetic oligonucleotide
uucggaccuggaucuggag

SEQ ID NO: 3201275 - RNA, 19 nt, Artificial Sequence
  Description of Artificial Sequence: Synthetic oligonucleotide
aaacagcaucugauuucuc

SEQ ID NO: 3201276 - RNA, 19 nt, Artificial Sequence
  Description of Artificial Sequence: Synthetic oligonucleotide
uacuggggugguuucucgu

SEQ ID NO: 3201277 - RNA, 19 nt, Artificial Sequence
  Description of Artificial Sequence: Synthetic oligonucleotide
ucucgugcuucagagucuc

SEQ ID NO: 3201278 - RNA, 19 nt, Artificial Sequence
  Description of Artificial Sequence: Synthetic oligonucleotide
gaaugcaaccaaggacgug

SEQ ID NO: 3201279 - RNA, 19 nt, Artificial Sequence
  Description of Artificial Sequence: Synthetic oligonucleotide
ugcucaggcccguguaaac

SEQ ID NO: 3201280 - RNA, 19 nt, Artificial Sequence
  Description of Artificial Sequence: Synthetic oligonucleotide
agaaugcaaccaaggacgu

SEQ ID NO: 3201281 - RNA, 19 nt, Artificial Sequence
  Description of Artificial Sequence: Synthetic oligonucleotide
ugcaaccaaggacgugagu

SEQ ID NO: 3201282 - RNA, 19 nt, Artificial Sequence
  Description of Artificial Sequence: Synthetic oligonucleotide
uugguuccgggugcucagg

SEQ ID NO: 3201283 - RNA, 19 nt, Artificial Sequence
  Description of Artificial Sequence: Synthetic oligonucleotide
uggggugguuucucgugcu

SEQ ID NO: 3201284 - RNA, 19 nt, Artificial Sequence
  Description of Artificial Sequence: Synthetic oligonucleotide
ggacgugaguucuaaagcu

SEQ ID NO: 3201285 - RNA, 19 nt, Artificial Sequence
  Description of Artificial Sequence: Synthetic oligonucleotide
gacgugaguucuaaagcua

SEQ ID NO: 3201286 - RNA, 19 nt, Artificial Sequence
  Description of Artificial Sequence: Synthetic oligonucleotide
gcaucugauuucucauagc

SEQ ID NO: 3201287 - RNA, 19 nt, Artificial Sequence
  Description of Artificial Sequence: Synthetic oligonucleotide
ggugguuucucgugcuuca

SEQ ID NO: 3201288 - RNA, 19 nt, Artificial Sequence
  Description of Artificial Sequence: Synthetic oligonucleotide
agagaacuagaagcagaaa

SEQ ID NO: 3201289 - RNA, 19 nt, Artificial Sequence
  Description of Artificial Sequence: Synthetic oligonucleotide
cuucagagucucguauguc

SEQ ID NO: 3201290 - RNA, 19 nt, Artificial Sequence
  Description of Artificial Sequence: Synthetic oligonucleotide
guguaaacagcaucugauu

SEQ ID NO: 3201291 - RNA, 19 nt, Artificial Sequence
  Description of Artificial Sequence: Synthetic oligonucleotide
caggcccguguaaacagca

SEQ ID NO: 3201292 - RNA, 19 nt, Artificial Sequence
  Description of Artificial Sequence: Synthetic oligonucleotide
cucgugcuucagagucucg

SEQ ID NO: 3201293 - RNA, 19 nt, Artificial Sequence
  Description of Artificial Sequence: Synthetic oligonucleotide
ucucuugguuccgggugcu

SEQ ID NO: 3201294 - RNA, 19 nt, Artificial Sequence
  Description of Artificial Sequence: Synthetic oligonucleotide
augcaaccaaggacgugag

SEQ ID NO: 3201295 - RNA, 19 nt, Artificial Sequence
  Description of Artificial Sequence: Synthetic oligonucleotide
agagucucguaugucucuu

SEQ ID NO: 3201296 - RNA, 19 nt, Artificial Sequence
  Description of Artificial Sequence: Synthetic oligonucleotide
ggcccguguaaacagcauc

SEQ ID NO: 3201297 - RNA, 19 nt, Artificial Sequence
  Description of Artificial Sequence: Synthetic oligonucleotide
ucauuuauaaaucacagga

SEQ ID NO: 3201298 - RNA, 19 nt, Artificial Sequence
  Description of Artificial Sequence: Synthetic oligonucleotide
uuaaaauucauuuauaaau

SEQ ID NO: 3201299 - RNA, 19 nt, Artificial Sequence
  Description of Artificial Sequence: Synthetic oligonucleotide
aaaauuaaaauucauuuau

SEQ ID NO: 3201300 - RNA, 19 nt, Artificial Sequence
  Description of Artificial Sequence: Synthetic oligonucleotide
uuuucuuacaccaagcaga

SEQ ID NO: 3201301 - RNA, 19 nt, Artificial Sequence
  Description of Artificial Sequence: Synthetic oligonucleotide
aauuaaaauucauuuauaa

SEQ ID NO: 3201302 - RNA, 19 nt, Artificial Sequence
  Description of Artificial Sequence: Synthetic oligonucleotide
aaaauucauuuauaaauca

SEQ ID NO: 3201303 - RNA, 19 nt, Artificial Sequence
  Description of Artificial Sequence: Synthetic oligonucleotide
aagcagaguuuauugaggc

SEQ ID NO: 3201304 - RNA, 19 nt, Artificial Sequence
  Description of Artificial Sequence: Synthetic oligonucleotide
aaagcagaugaccuguugg

SEQ ID NO: 3201305 - RNA, 19 nt, Artificial Sequence
  Description of Artificial Sequence: Synthetic oligonucleotide
uaaaauucauuuauaaauc

SEQ ID NO: 3201306 - RNA, 19 nt, Artificial Sequence
  Description of Artificial Sequence: Synthetic oligonucleotide
uauaaaucacaggagacgg

SEQ ID NO: 3201307 - RNA, 19 nt, Artificial Sequence
  Description of Artificial Sequence: Synthetic oligonucleotide
auuuauaaaucacaggaga

SEQ ID NO: 3201308 - RNA, 19 nt, Artificial Sequence
  Description of Artificial Sequence: Synthetic oligonucleotide
ugggugagcaucaagaacc

SEQ ID NO: 3201309 - RNA, 19 nt, Artificial Sequence
  Description of Artificial Sequence: Synthetic oligonucleotide
uuauaaaucacaggagacg

SEQ ID NO: 3201310 - RNA, 19 nt, Artificial Sequence
  Description of Artificial Sequence: Synthetic oligonucleotide
aaauucauuuauaaaucac

SEQ ID NO: 3201311 - RNA, 19 nt, Artificial Sequence
  Description of Artificial Sequence: Synthetic oligonucleotide
uuagcggcaaagcagauga

SEQ ID NO: 3201312 - RNA, 19 nt, Artificial Sequence
  Description of Artificial Sequence: Synthetic oligonucleotide
uuuauaaaucacaggagac

SEQ ID NO: 3201313 - RNA, 19 nt, Artificial Sequence
  Description of Artificial Sequence: Synthetic oligonucleotide
agcaucaagaaccaccugg

SEQ ID NO: 3201314 - RNA, 19 nt, Artificial Sequence
  Description of Artificial Sequence: Synthetic oligonucleotide
uuuauugaggccguggcgg

SEQ ID NO: 3201315 - RNA, 19 nt, Artificial Sequence
  Description of Artificial Sequence: Synthetic oligonucleotide
uucauuuauaaaucacagg

SEQ ID NO: 3201316 - RNA, 19 nt, Artificial Sequence
  Description of Artificial Sequence: Synthetic oligonucleotide
ucaagaaccaccugguugc

SEQ ID NO: 3201317 - RNA, 19 nt, Artificial Sequence
  Description of Artificial Sequence: Synthetic oligonucleotide
aguuuauugaggccguggc

SEQ ID NO: 3201318 - RNA, 19 nt, Artificial Sequence
  Description of Artificial Sequence: Synthetic oligonucleotide
aauucauuuauaaaucaca

SEQ ID NO: 3201319 - RNA, 19 nt, Artificial Sequence
  Description of Artificial Sequence: Synthetic oligonucleotide
ucuuacaccaagcagaguu

SEQ ID NO: 3201320 - RNA, 19 nt, Artificial Sequence
  Description of Artificial Sequence: Synthetic oligonucleotide
aagcagaugaccuguuggg

SEQ ID NO: 3201321 - RNA, 19 nt, Artificial Sequence
  Description of Artificial Sequence: Synthetic oligonucleotide
auuaaaauucauuuauaaa

SEQ ID NO: 3201322 - RNA, 19 nt, Artificial Sequence
  Description of Artificial Sequence: Synthetic oligonucleotide
uuucuuacaccaagcagag

SEQ ID NO: 3201323 - RNA, 19 nt, Artificial Sequence
  Description of Artificial Sequence: Synthetic oligonucleotide
aagguucucuucguaaacc

SEQ ID NO: 3201324 - RNA, 19 nt, Artificial Sequence
  Description of Artificial Sequence: Synthetic oligonucleotide
uugggagcacccuugaggg

SEQ ID NO: 3201325 - RNA, 19 nt, Artificial Sequence
  Description of Artificial Sequence: Synthetic oligonucleotide
cauuuauaaaucacaggag

SEQ ID NO: 3201326 - RNA, 19 nt, Artificial Sequence
  Description of Artificial Sequence: Synthetic oligonucleotide
aaucacaggagacgggcag

SEQ ID NO: 3201327 - RNA, 19 nt, Artificial Sequence
  Description of Artificial Sequence: Synthetic oligonucleotide
agggcagauacucacucgc

SEQ ID NO: 3201328 - RNA, 19 nt, Artificial Sequence
  Description of Artificial Sequence: Synthetic oligonucleotide
aucaagaaccaccugguug

SEQ ID NO: 3201329 - RNA, 19 nt, Artificial Sequence
  Description of Artificial Sequence: Synthetic oligonucleotide
auucauuuauaaaucacag

SEQ ID NO: 3201330 - RNA, 19 nt, Artificial Sequence
  Description of Artificial Sequence: Synthetic oligonucleotide
agguucucuucguaaaccc

SEQ ID NO: 3201331 - RNA, 19 nt, Artificial Sequence
  Description of Artificial Sequence: Synthetic oligonucleotide
ugagcaucaagaaccaccu

SEQ ID NO: 3201332 - RNA, 19 nt, Artificial Sequence
  Description of Artificial Sequence: Synthetic oligonucleotide
guugggagcacccuugagg

SEQ ID NO: 3201333 - RNA, 19 nt, Artificial Sequence
  Description of Artificial Sequence: Synthetic oligonucleotide
uauggguuggggcuagggg

SEQ ID NO: 3201334 - RNA, 19 nt, Artificial Sequence
  Description of Artificial Sequence: Synthetic oligonucleotide
agaaccaccugguugcccg

SEQ ID NO: 3201335 - RNA, 19 nt, Artificial Sequence
  Description of Artificial Sequence: Synthetic oligonucleotide
uaaaucacaggagacgggc

SEQ ID NO: 3201336 - RNA, 19 nt, Artificial Sequence
  Description of Artificial Sequence: Synthetic oligonucleotide
aaaccccucccucuuuccc

SEQ ID NO: 3201337 - RNA, 19 nt, Artificial Sequence
  Description of Artificial Sequence: Synthetic oligonucleotide
ucucuuaggauucacuaua

SEQ ID NO: 3201338 - RNA, 19 nt, Artificial Sequence
  Description of Artificial Sequence: Synthetic oligonucleotide
cuuccugcgaucaaaggug

SEQ ID NO: 3201339 - RNA, 19 nt, Artificial Sequence
  Description of Artificial Sequence: Synthetic oligonucleotide
caagcagaguuuauugagg

SEQ ID NO: 3201340 - RNA, 19 nt, Artificial Sequence
  Description of Artificial Sequence: Synthetic oligonucleotide
aaccccucccucuuucccc

SEQ ID NO: 3201341 - RNA, 19 nt, Artificial Sequence
  Description of Artificial Sequence: Synthetic oligonucleotide
uccccugagcuccuuaugg

SEQ ID NO: 3201342 - RNA, 19 nt, Artificial Sequence
  Description of Artificial Sequence: Synthetic oligonucleotide
cuuaggauucacuauaaaa

SEQ ID NO: 3201343 - RNA, 19 nt, Artificial Sequence
  Description of Artificial Sequence: Synthetic oligonucleotide
agcagaguuuauugaggcc

SEQ ID NO: 3201344 - RNA, 19 nt, Artificial Sequence
  Description of Artificial Sequence: Synthetic oligonucleotide
ugcccgaagguucucuucg

SEQ ID NO: 3201345 - RNA, 19 nt, Artificial Sequence
  Description of Artificial Sequence: Synthetic oligonucleotide
acaggagacgggcaggagg

SEQ ID NO: 3201346 - RNA, 19 nt, Artificial Sequence
  Description of Artificial Sequence: Synthetic oligonucleotide
guuuauugaggccguggcg

SEQ ID NO: 3201347 - RNA, 19 nt, Artificial Sequence
  Description of Artificial Sequence: Synthetic oligonucleotide
cuuugggugagcaucaaga

SEQ ID NO: 3201348 - RNA, 19 nt, Artificial Sequence
  Description of Artificial Sequence: Synthetic oligonucleotide
agcggcaaagcagaugacc

SEQ ID NO: 3201349 - RNA, 19 nt, Artificial Sequence
  Description of Artificial Sequence: Synthetic oligonucleotide
aaauuaaaauucauuuaua

SEQ ID NO: 3201350 - RNA, 19 nt, Artificial Sequence
  Description of Artificial Sequence: Synthetic oligonucleotide
gcagaguuuauugaggccg

SEQ ID NO: 3201351 - RNA, 19 nt, Artificial Sequence
  Description of Artificial Sequence: Synthetic oligonucleotide
gacugcagggguguuagcg

SEQ ID NO: 3201352 - RNA, 19 nt, Artificial Sequence
  Description of Artificial Sequence: Synthetic oligonucleotide
ggugggaugaucucuuagg

SEQ ID NO: 3201353 - RNA, 19 nt, Artificial Sequence
  Description of Artificial Sequence: Synthetic oligonucleotide
ucuucguaaaccccucccu

SEQ ID NO: 3201354 - RNA, 19 nt, Artificial Sequence
  Description of Artificial Sequence: Synthetic oligonucleotide
uuauugaggccguggcggg

SEQ ID NO: 3201355 - RNA, 19 nt, Artificial Sequence
  Description of Artificial Sequence: Synthetic oligonucleotide
acugcagggguguuagcgg

SEQ ID NO: 3201356 - RNA, 19 nt, Artificial Sequence
  Description of Artificial Sequence: Synthetic oligonucleotide
uuccugcgaucaaaggugg

SEQ ID NO: 3201357 - RNA, 19 nt, Artificial Sequence
  Description of Artificial Sequence: Synthetic oligonucleotide
caggagacgggcaggaggg

SEQ ID NO: 3201358 - RNA, 19 nt, Artificial Sequence
  Description of Artificial Sequence: Synthetic oligonucleotide
gugagcaucaagaaccacc

SEQ ID NO: 3201359 - RNA, 19 nt, Artificial Sequence
  Description of Artificial Sequence: Synthetic oligonucleotide
ugaucucuuaggauucacu

SEQ ID NO: 3201360 - RNA, 19 nt, Artificial Sequence
  Description of Artificial Sequence: Synthetic oligonucleotide
gaucucuuaggauucacua

SEQ ID NO: 3201361 - RNA, 19 nt, Artificial Sequence
  Description of Artificial Sequence: Synthetic oligonucleotide
ucacucgcuggacugcagg

SEQ ID NO: 3201362 - RNA, 19 nt, Artificial Sequence
  Description of Artificial Sequence: Synthetic oligonucleotide
auacgcagggcagauacuc

SEQ ID NO: 3201363 - RNA, 19 nt, Artificial Sequence
  Description of Artificial Sequence: Synthetic oligonucleotide
uugggugagcaucaagaac

SEQ ID NO: 3201364 - RNA, 19 nt, Artificial Sequence
  Description of Artificial Sequence: Synthetic oligonucleotide
uuugggugagcaucaagaa

SEQ ID NO: 3201365 - RNA, 19 nt, Artificial Sequence
  Description of Artificial Sequence: Synthetic oligonucleotide
auggguuggggcuaggggu

SEQ ID NO: 3201366 - RNA, 19 nt, Artificial Sequence
  Description of Artificial Sequence: Synthetic oligonucleotide
ucccucuuuccccugagcu

SEQ ID NO: 3201367 - RNA, 19 nt, Artificial Sequence
  Description of Artificial Sequence: Synthetic oligonucleotide
gaguuuauugaggccgugg

SEQ ID NO: 3201368 - RNA, 19 nt, Artificial Sequence
  Description of Artificial Sequence: Synthetic oligonucleotide
uccuccuagcagcauuggg

SEQ ID NO: 3201369 - RNA, 19 nt, Artificial Sequence
  Description of Artificial Sequence: Synthetic oligonucleotide
caccaagcagaguuuauug

SEQ ID NO: 3201370 - RNA, 19 nt, Artificial Sequence
  Description of Artificial Sequence: Synthetic oligonucleotide
gaagguucucuucguaaac

SEQ ID NO: 3201371 - RNA, 19 nt, Artificial Sequence
  Description of Artificial Sequence: Synthetic oligonucleotide
uucguaaaccccucccucu

SEQ ID NO: 3201372 - RNA, 19 nt, Artificial Sequence
  Description of Artificial Sequence: Synthetic oligonucleotide
auacucacucgcuggacug

SEQ ID NO: 3201373 - RNA, 19 nt, Artificial Sequence
  Description of Artificial Sequence: Synthetic oligonucleotide
acgcagggcagauacucac

SEQ ID NO: 3201374 - RNA, 19 nt, Artificial Sequence
  Description of Artificial Sequence: Synthetic oligonucleotide
accaagcagaguuuauuga

SEQ ID NO: 3201375 - RNA, 19 nt, Artificial Sequence
  Description of Artificial Sequence: Synthetic oligonucleotide
cagaugaccuguugggagc

SEQ ID NO: 3201376 - RNA, 19 nt, Artificial Sequence
  Description of Artificial Sequence: Synthetic oligonucleotide
aagaaccaccugguugccc

SEQ ID NO: 3201377 - RNA, 19 nt, Artificial Sequence
  Description of Artificial Sequence: Synthetic oligonucleotide
gcagauacucacucgcugg

SEQ ID NO: 3201378 - RNA, 19 nt, Artificial Sequence
  Description of Artificial Sequence: Synthetic oligonucleotide
aucaaaggugggaugaucu

SEQ ID NO: 3201379 - RNA, 19 nt, Artificial Sequence
  Description of Artificial Sequence: Synthetic oligonucleotide
ugaccuguugggagcaccc

SEQ ID NO: 3201380 - RNA, 19 nt, Artificial Sequence
  Description of Artificial Sequence: Synthetic oligonucleotide
gguguuagcggcaaagcag

SEQ ID NO: 3201381 - RNA, 19 nt, Artificial Sequence
  Description of Artificial Sequence: Synthetic oligonucleotide
ucuuaggauucacuauaaa

SEQ ID NO: 3201382 - RNA, 19 nt, Artificial Sequence
  Description of Artificial Sequence: Synthetic oligonucleotide
uuauggguuggggcuaggg

SEQ ID NO: 3201383 - RNA, 19 nt, Artificial Sequence
  Description of Artificial Sequence: Synthetic oligonucleotide
cuugagggugcccuccucc

SEQ ID NO: 3201384 - RNA, 19 nt, Artificial Sequence
  Description of Artificial Sequence: Synthetic oligonucleotide
ccuccuagcagcauugggg

SEQ ID NO: 3201385 - RNA, 19 nt, Artificial Sequence
  Description of Artificial Sequence: Synthetic oligonucleotide
uggacugcagggguguuag

SEQ ID NO: 3201386 - RNA, 19 nt, Artificial Sequence
  Description of Artificial Sequence: Synthetic oligonucleotide
aucucuuaggauucacuau

SEQ ID NO: 3201387 - RNA, 19 nt, Artificial Sequence
  Description of Artificial Sequence: Synthetic oligonucleotide
cuaggggucccuuccugcg

SEQ ID NO: 3201388 - RNA, 19 nt, Artificial Sequence
  Description of Artificial Sequence: Synthetic oligonucleotide
auaaaucacaggagacggg

SEQ ID NO: 3201389 - RNA, 19 nt, Artificial Sequence
  Description of Artificial Sequence: Synthetic oligonucleotide
cucuucguaaaccccuccc

SEQ ID NO: 3201390 - RNA, 19 nt, Artificial Sequence
  Description of Artificial Sequence: Synthetic oligonucleotide
cagcagguggcauacgcag

SEQ ID NO: 3201391 - RNA, 19 nt, Artificial Sequence
  Description of Artificial Sequence: Synthetic oligonucleotide
cacagcagguggcauacgc

SEQ ID NO: 3201392 - RNA, 19 nt, Artificial Sequence
  Description of Artificial Sequence: Synthetic oligonucleotide
ccaagcagaguuuauugag

SEQ ID NO: 3201393 - RNA, 19 nt, Artificial Sequence
  Description of Artificial Sequence: Synthetic oligonucleotide
auugaggccguggcggggc

SEQ ID NO: 3201394 - RNA, 19 nt, Artificial Sequence
  Description of Artificial Sequence: Synthetic oligonucleotide
ucccuuccugcgaucaaag

SEQ ID NO: 3201395 - RNA, 19 nt, Artificial Sequence
  Description of Artificial Sequence: Synthetic oligonucleotide
ucaaaggugggaugaucuc

SEQ ID NO: 3201396 - RNA, 19 nt, Artificial Sequence
  Description of Artificial Sequence: Synthetic oligonucleotide
ugcgaucaaaggugggaug

SEQ ID NO: 3201397 - RNA, 19 nt, Artificial Sequence
  Description of Artificial Sequence: Synthetic oligonucleotide
aaucaauuaaauuauauau

SEQ ID NO: 3201398 - RNA, 19 nt, Artificial Sequence
  Description of Artificial Sequence: Synthetic oligonucleotide
aaauuauauauuuaaaagu

SEQ ID NO: 3201399 - RNA, 19 nt, Artificial Sequence
  Description of Artificial Sequence: Synthetic oligonucleotide
ugauauaauaagcacaagc

SEQ ID NO: 3201400 - RNA, 19 nt, Artificial Sequence
  Description of Artificial Sequence: Synthetic oligonucleotide
aucuauuuucuuuagcucc

SEQ ID NO: 3201401 - RNA, 19 nt, Artificial Sequence
  Description of Artificial Sequence: Synthetic oligonucleotide
ugugauucaaauaauucag

SEQ ID NO: 3201402 - RNA, 19 nt, Artificial Sequence
  Description of Artificial Sequence: Synthetic oligonucleotide
cuuaagguguacuagaacc

SEQ ID NO: 3201403 - RNA, 19 nt, Artificial Sequence
  Description of Artificial Sequence: Synthetic oligonucleotide
uguaaagcuucuuuuaagg

SEQ ID NO: 3201404 - RNA, 19 nt, Artificial Sequence
  Description of Artificial Sequence: Synthetic oligonucleotide
uaaaaguuucaaaauauca

SEQ ID NO: 3201405 - RNA, 19 nt, Artificial Sequence
  Description of Artificial Sequence: Synthetic oligonucleotide
uauuaugcaaggcaaaaga

SEQ ID NO: 3201406 - RNA, 19 nt, Artificial Sequence
  Description of Artificial Sequence: Synthetic oligonucleotide
aaacuuucuagguuuguuc

SEQ ID NO: 3201407 - RNA, 19 nt, Artificial Sequence
  Description of Artificial Sequence: Synthetic oligonucleotide
ucuacauagagacuagagc

SEQ ID NO: 3201408 - RNA, 19 nt, Artificial Sequence
  Description of Artificial Sequence: Synthetic oligonucleotide
auaaaucuaugguuaagac

SEQ ID NO: 3201409 - RNA, 19 nt, Artificial Sequence
  Description of Artificial Sequence: Synthetic oligonucleotide
ucuguaacacgacugaccc

SEQ ID NO: 3201410 - RNA, 19 nt, Artificial Sequence
  Description of Artificial Sequence: Synthetic oligonucleotide
auauaauaagcacaagcag

SEQ ID NO: 3201411 - RNA, 19 nt, Artificial Sequence
  Description of Artificial Sequence: Synthetic oligonucleotide
uugauaaccagaaacugga

SEQ ID NO: 3201412 - RNA, 19 nt, Artificial Sequence
  Description of Artificial Sequence: Synthetic oligonucleotide
aagacauuuguucugcaug

SEQ ID NO: 3201413 - RNA, 19 nt, Artificial Sequence
  Description of Artificial Sequence: Synthetic oligonucleotide
gauauaauaagcacaagca

SEQ ID NO: 3201414 - RNA, 19 nt, Artificial Sequence
  Description of Artificial Sequence: Synthetic oligonucleotide
augagagucaacucuuugc

SEQ ID NO: 3201415 - RNA, 19 nt, Artificial Sequence
  Description of Artificial Sequence: Synthetic oligonucleotide
gaagauaaauauuuuagaa

SEQ ID NO: 3201416 - RNA, 19 nt, Artificial Sequence
  Description of Artificial Sequence: Synthetic oligonucleotide
aauaagcacaagcagcuga

SEQ ID NO: 3201417 - RNA, 19 nt, Artificial Sequence
  Description of Artificial Sequence: Synthetic oligonucleotide
agaugauugagaauguagc

SEQ ID NO: 3201418 - RNA, 19 nt, Artificial Sequence
  Description of Artificial Sequence: Synthetic oligonucleotide
acuucuaguuacuagaaga

SEQ ID NO: 3201419 - RNA, 19 nt, Artificial Sequence
  Description of Artificial Sequence: Synthetic oligonucleotide
gaugauugagaauguagcc

SEQ ID NO: 3201420 - RNA, 19 nt, Artificial Sequence
  Description of Artificial Sequence: Synthetic oligonucleotide
aacacauuagguagaaagg

SEQ ID NO: 3201421 - RNA, 19 nt, Artificial Sequence
  Description of Artificial Sequence: Synthetic oligonucleotide
gagauucaaauaaucaggg

SEQ ID NO: 3201422 - RNA, 19 nt, Artificial Sequence
  Description of Artificial Sequence: Synthetic oligonucleotide
aagacuguuauuuguccag

SEQ ID NO: 3201423 - RNA, 19 nt, Artificial Sequence
  Description of Artificial Sequence: Synthetic oligonucleotide
uaaaagggauaacuuuugg

SEQ ID NO: 3201424 - RNA, 19 nt, Artificial Sequence
  Description of Artificial Sequence: Synthetic oligonucleotide
uauaaaucuaugguuaaga

SEQ ID NO: 3201425 - RNA, 19 nt, Artificial Sequence
  Description of Artificial Sequence: Synthetic oligonucleotide
uguccagucuugcuuaugg

SEQ ID NO: 3201426 - RNA, 19 nt, Artificial Sequence
  Description of Artificial Sequence: Synthetic oligonucleotide
uucuacauagagacuagag

SEQ ID NO: 3201427 - RNA, 19 nt, Artificial Sequence
  Description of Artificial Sequence: Synthetic oligonucleotide
ugaaucaauuaaauuauau

SEQ ID NO: 3201428 - RNA, 19 nt, Artificial Sequence
  Description of Artificial Sequence: Synthetic oligonucleotide
cauaccauguuuuggcucg

SEQ ID NO: 3201429 - RNA, 19 nt, Artificial Sequence
  Description of Artificial Sequence: Synthetic oligonucleotide
auugcuggaagcuagguaa

SEQ ID NO: 3201430 - RNA, 19 nt, Artificial Sequence
  Description of Artificial Sequence: Synthetic oligonucleotide
cauaucaauguguuaauuc

SEQ ID NO: 3201431 - RNA, 19 nt, Artificial Sequence
  Description of Artificial Sequence: Synthetic oligonucleotide
caccauaaaguagagaagg

SEQ ID NO: 3201432 - RNA, 19 nt, Artificial Sequence
  Description of Artificial Sequence: Synthetic oligonucleotide
ugaagcuagcugauaaugc

SEQ ID NO: 3201433 - RNA, 19 nt, Artificial Sequence
  Description of Artificial Sequence: Synthetic oligonucleotide
uuuguaaagcuucuuuuaa

SEQ ID NO: 3201434 - RNA, 19 nt, Artificial Sequence
  Description of Artificial Sequence: Synthetic oligonucleotide
ucuuagaagcagaagaaua

SEQ ID NO: 3201435 - RNA, 19 nt, Artificial Sequence
  Description of Artificial Sequence: Synthetic oligonucleotide
caucuugaaaaugaguucc

SEQ ID NO: 3201436 - RNA, 19 nt, Artificial Sequence
  Description of Artificial Sequence: Synthetic oligonucleotide
aaagacacaauggcgcagg

SEQ ID NO: 3201437 - RNA, 19 nt, Artificial Sequence
  Description of Artificial Sequence: Synthetic oligonucleotide
acagucaccuuucagcauc

SEQ ID NO: 3201438 - RNA, 19 nt, Artificial Sequence
  Description of Artificial Sequence: Synthetic oligonucleotide
uuuguaagaaaaccuuuuc

SEQ ID NO: 3201439 - RNA, 19 nt, Artificial Sequence
  Description of Artificial Sequence: Synthetic oligonucleotide
uucacaauauuuucuaaau

SEQ ID NO: 3201440 - RNA, 19 nt, Artificial Sequence
  Description of Artificial Sequence: Synthetic oligonucleotide
auugcauugacaccccaag

SEQ ID NO: 3201441 - RNA, 19 nt, Artificial Sequence
  Description of Artificial Sequence: Synthetic oligonucleotide
gucgaggcaauucagguag

SEQ ID NO: 3201442 - RNA, 19 nt, Artificial Sequence
  Description of Artificial Sequence: Synthetic oligonucleotide
agagaaaacaugugguucu

SEQ ID NO: 3201443 - RNA, 19 nt, Artificial Sequence
  Description of Artificial Sequence: Synthetic oligonucleotide
uguaugucucgccugaccu

SEQ ID NO: 3201444 - RNA, 19 nt, Artificial Sequence
  Description of Artificial Sequence: Synthetic oligonucleotide
aucagaagaugacaggcag

SEQ ID NO: 3201445 - RNA, 19 nt, Artificial Sequence
  Description of Artificial Sequence: Synthetic oligonucleotide
uguuauuuguccagucuug

SEQ ID NO: 3201446 - RNA, 19 nt, Artificial Sequence
  Description of Artificial Sequence: Synthetic oligonucleotide
ucuagguguaaccuucuug

SEQ ID NO: 3201447 - RNA, 19 nt, Artificial Sequence
  Description of Artificial Sequence: Synthetic oligonucleotide
agagauuagguucuagacu

SEQ ID NO: 3201448 - RNA, 19 nt, Artificial Sequence
  Description of Artificial Sequence: Synthetic oligonucleotide
gagauuagguucuagacua

SEQ ID NO: 3201449 - RNA, 19 nt, Artificial Sequence
  Description of Artificial Sequence: Synthetic oligonucleotide
uuuuguaagaaaaccuuuu

SEQ ID NO: 3201450 - RNA, 19 nt, Artificial Sequence
  Description of Artificial Sequence: Synthetic oligonucleotide
agacauacaagucgcuccg

SEQ ID NO: 3201451 - RNA, 19 nt, Artificial Sequence
  Description of Artificial Sequence: Synthetic oligonucleotide
aaaucaguuggaugguaca

SEQ ID NO: 3201452 - RNA, 19 nt, Artificial Sequence
  Description of Artificial Sequence: Synthetic oligonucleotide
uucugcaugcugaacacug

SEQ ID NO: 3201453 - RNA, 19 nt, Artificial Sequence
  Description of Artificial Sequence: Synthetic oligonucleotide
auaugcauguucugcacag

SEQ ID NO: 3201454 - RNA, 19 nt, Artificial Sequence
  Description of Artificial Sequence: Synthetic oligonucleotide
ucgcucaucaucaggaaca

SEQ ID NO: 3201455 - RNA, 19 nt, Artificial Sequence
  Description of Artificial Sequence: Synthetic oligonucleotide
uuauuccccaaacagucac

SEQ ID NO: 3201456 - RNA, 19 nt, Artificial Sequence
  Description of Artificial Sequence: Synthetic oligonucleotide
ucuauuuucuuuagcuccu

SEQ ID NO: 3201457 - RNA, 19 nt, Artificial Sequence
  Description of Artificial Sequence: Synthetic oligonucleotide
uaaagauugcauugacacc

SEQ ID NO: 3201458 - RNA, 19 nt, Artificial Sequence
  Description of Artificial Sequence: Synthetic oligonucleotide
acaaacacuguacaaagua

SEQ ID NO: 3201459 - RNA, 19 nt, Artificial Sequence
  Description of Artificial Sequence: Synthetic oligonucleotide
acaaauuauuccccaaaca

SEQ ID NO: 3201460 - RNA, 19 nt, Artificial Sequence
  Description of Artificial Sequence: Synthetic oligonucleotide
auagugaagauaaauauuu

SEQ ID NO: 3201461 - RNA, 19 nt, Artificial Sequence
  Description of Artificial Sequence: Synthetic oligonucleotide
aggcaauucagguaguucu

SEQ ID NO: 3201462 - RNA, 19 nt, Artificial Sequence
  Description of Artificial Sequence: Synthetic oligonucleotide
agcuaagcagggucaagcc

SEQ ID NO: 3201463 - RNA, 19 nt, Artificial Sequence
  Description of Artificial Sequence: Synthetic oligonucleotide
uaaugaagcaacccauacu

SEQ ID NO: 3201464 - RNA, 19 nt, Artificial Sequence
  Description of Artificial Sequence: Synthetic oligonucleotide
caucuaagcauucuggauc

SEQ ID NO: 3201465 - RNA, 19 nt, Artificial Sequence
  Description of Artificial Sequence: Synthetic oligonucleotide
gaaccaaagggcucuuccg

SEQ ID NO: 3201466 - RNA, 19 nt, Artificial Sequence
  Description of Artificial Sequence: Synthetic oligonucleotide
aaucaguuggaugguacag

SEQ ID NO: 3201467 - RNA, 19 nt, Artificial Sequence
  Description of Artificial Sequence: Synthetic oligonucleotide
uaaucuuguuucuucuuca

SEQ ID NO: 3201468 - RNA, 19 nt, Artificial Sequence
  Description of Artificial Sequence: Synthetic oligonucleotide
cuaaaagggauaacuuuug

SEQ ID NO: 3201469 - RNA, 19 nt, Artificial Sequence
  Description of Artificial Sequence: Synthetic oligonucleotide
uguuaauuccaaacagccu

SEQ ID NO: 3201470 - RNA, 19 nt, Artificial Sequence
  Description of Artificial Sequence: Synthetic oligonucleotide
acuacuagaggacuucaca

SEQ ID NO: 3201471 - RNA, 19 nt, Artificial Sequence
  Description of Artificial Sequence: Synthetic oligonucleotide
gagacuagagcccacuuuc

SEQ ID NO: 3201472 - RNA, 19 nt, Artificial Sequence
  Description of Artificial Sequence: Synthetic oligonucleotide
uuggaugguacagacauac

SEQ ID NO: 3201473 - RNA, 19 nt, Artificial Sequence
  Description of Artificial Sequence: Synthetic oligonucleotide
gaaaacaugugguucugca

SEQ ID NO: 3201474 - RNA, 19 nt, Artificial Sequence
  Description of Artificial Sequence: Synthetic oligonucleotide
caucacaaaagagauuagg

SEQ ID NO: 3201475 - RNA, 19 nt, Artificial Sequence
  Description of Artificial Sequence: Synthetic oligonucleotide
cugugauucaaauaauuca

SEQ ID NO: 3201476 - RNA, 19 nt, Artificial Sequence
  Description of Artificial Sequence: Synthetic oligonucleotide
gagccuuuagcagauaagc

SEQ ID NO: 3201477 - RNA, 19 nt, Artificial Sequence
  Description of Artificial Sequence: Synthetic oligonucleotide
uaugucucgccugaccucg

SEQ ID NO: 3201478 - RNA, 19 nt, Artificial Sequence
  Description of Artificial Sequence: Synthetic oligonucleotide
ucuggaauacuugugaaua

SEQ ID NO: 3201479 - RNA, 19 nt, Artificial Sequence
  Description of Artificial Sequence: Synthetic oligonucleotide
caugugagucacuacuucc

SEQ ID NO: 3201480 - RNA, 19 nt, Artificial Sequence
  Description of Artificial Sequence: Synthetic oligonucleotide
uaccuaaggagauucaaau

SEQ ID NO: 3201481 - RNA, 19 nt, Artificial Sequence
  Description of Artificial Sequence: Synthetic oligonucleotide
uuagucaucucuacucccu

SEQ ID NO: 3201482 - RNA, 19 nt, Artificial Sequence
  Description of Artificial Sequence: Synthetic oligonucleotide
uugaagcuagcugauaaug

SEQ ID NO: 3201483 - RNA, 19 nt, Artificial Sequence
  Description of Artificial Sequence: Synthetic oligonucleotide
aaaacaugugguucugcau

SEQ ID NO: 3201484 - RNA, 19 nt, Artificial Sequence
  Description of Artificial Sequence: Synthetic oligonucleotide
ucucacuucuaguuacuag

SEQ ID NO: 3201485 - RNA, 19 nt, Artificial Sequence
  Description of Artificial Sequence: Synthetic oligonucleotide
caauggacaaacacuguac

SEQ ID NO: 3201486 - RNA, 19 nt, Artificial Sequence
  Description of Artificial Sequence: Synthetic oligonucleotide
uacucgaaggagucaagag

SEQ ID NO: 3201487 - RNA, 19 nt, Artificial Sequence
  Description of Artificial Sequence: Synthetic oligonucleotide
uagcagauaagcucucaag

SEQ ID NO: 3201488 - RNA, 19 nt, Artificial Sequence
  Description of Artificial Sequence: Synthetic oligonucleotide
ugcagcaugagaugguaca

SEQ ID NO: 3201489 - RNA, 19 nt, Artificial Sequence
  Description of Artificial Sequence: Synthetic oligonucleotide
gauuacaggagcaggugag

SEQ ID NO: 3201490 - RNA, 19 nt, Artificial Sequence
  Description of Artificial Sequence: Synthetic oligonucleotide
uuucuuaugguugaagcua

SEQ ID NO: 3201491 - RNA, 19 nt, Artificial Sequence
  Description of Artificial Sequence: Synthetic oligonucleotide
gauccauguaccucucucc

SEQ ID NO: 3201492 - RNA, 19 nt, Artificial Sequence
  Description of Artificial Sequence: Synthetic oligonucleotide
ugaagcaugguggagucug

SEQ ID NO: 3201493 - RNA, 19 nt, Artificial Sequence
  Description of Artificial Sequence: Synthetic oligonucleotide
ucucaaaccaaugggcugc

SEQ ID NO: 3201494 - RNA, 19 nt, Artificial Sequence
  Description of Artificial Sequence: Synthetic oligonucleotide
uuauggccaugccugaagc

SEQ ID NO: 3201495 - RNA, 19 nt, Artificial Sequence
  Description of Artificial Sequence: Synthetic oligonucleotide
cuggccuuaaugaagcaac

SEQ ID NO: 3201496 - RNA, 19 nt, Artificial Sequence
  Description of Artificial Sequence: Synthetic oligonucleotide
ugguccaugagcacauuug

SEQ ID NO: 3201497 - RNA, 19 nt, Artificial Sequence
  Description of Artificial Sequence: Synthetic oligonucleotide
aaagguuugagcuaguuau

SEQ ID NO: 3201498 - RNA, 19 nt, Artificial Sequence
  Description of Artificial Sequence: Synthetic oligonucleotide
aagagcuggaauuaaaggu

SEQ ID NO: 3201499 - RNA, 19 nt, Artificial Sequence
  Description of Artificial Sequence: Synthetic oligonucleotide
uggucuugaacucacagag

SEQ ID NO: 3201500 - RNA, 19 nt, Artificial Sequence
  Description of Artificial Sequence: Synthetic oligonucleotide
aauuaaagguuugagcuag

SEQ ID NO: 3201501 - RNA, 19 nt, Artificial Sequence
  Description of Artificial Sequence: Synthetic oligonucleotide
cuugaacucacagagaucc

SEQ ID NO: 3201502 - RNA, 19 nt, Artificial Sequence
  Description of Artificial Sequence: Synthetic oligonucleotide
uggaauuaaagguuugagc

SEQ ID NO: 3201503 - RNA, 19 nt, Artificial Sequence
  Description of Artificial Sequence: Synthetic oligonucleotide
aguuauguauuauuccuca

SEQ ID NO: 3201504 - RNA, 19 nt, Artificial Sequence
  Description of Artificial Sequence: Synthetic oligonucleotide
caagagcuggaauuaaagg

SEQ ID NO: 3201505 - RNA, 19 nt, Artificial Sequence
  Description of Artificial Sequence: Synthetic oligonucleotide
ucacuguagaccaggcugg

SEQ ID NO: 3201506 - RNA, 19 nt, Artificial Sequence
  Description of Artificial Sequence: Synthetic oligonucleotide
acagagauccaccugccuc

SEQ ID NO: 3201507 - RNA, 19 nt, Artificial Sequence
  Description of Artificial Sequence: Synthetic oligonucleotide
uggaacucacuguagacca

SEQ ID NO: 3201508 - RNA, 19 nt, Artificial Sequence
  Description of Artificial Sequence: Synthetic oligonucleotide
cucacagagauccaccugc

SEQ ID NO: 3201509 - RNA, 19 nt, Artificial Sequence
  Description of Artificial Sequence: Synthetic oligonucleotide
cucacuguagaccaggcug

SEQ ID NO: 3201510 - RNA, 19 nt, Artificial Sequence
  Description of Artificial Sequence: Synthetic oligonucleotide
ggaauuaaagguuugagcu

SEQ ID NO: 3201511 - RNA, 19 nt, Artificial Sequence
  Description of Artificial Sequence: Synthetic oligonucleotide
ucugucucccaagagcugg

SEQ ID NO: 3201512 - RNA, 19 nt, Artificial Sequence
  Description of Artificial Sequence: Synthetic oligonucleotide
agcuaguuauguauuauuc

SEQ ID NO: 3201513 - RNA, 19 nt, Artificial Sequence
  Description of Artificial Sequence: Synthetic oligonucleotide
aacucacagagauccaccu

SEQ ID NO: 3201514 - RNA, 19 nt, Artificial Sequence
  Description of Artificial Sequence: Synthetic oligonucleotide
uguggcuuggcuguccugg

SEQ ID NO: 3201515 - RNA, 19 nt, Artificial Sequence
  Description of Artificial Sequence: Synthetic oligonucleotide
uguguguguggcuuggcug

SEQ ID NO: 3201516 - RNA, 19 nt, Artificial Sequence
  Description of Artificial Sequence: Synthetic oligonucleotide
uaguuauguauuauuccuc

SEQ ID NO: 3201517 - RNA, 19 nt, Artificial Sequence
  Description of Artificial Sequence: Synthetic oligonucleotide
uaaagguuugagcuaguua

SEQ ID NO: 3201518 - RNA, 19 nt, Artificial Sequence
  Description of Artificial Sequence: Synthetic oligonucleotide
uuugagcuaguuauguauu

SEQ ID NO: 3201519 - RNA, 19 nt, Artificial Sequence
  Description of Artificial Sequence: Synthetic oligonucleotide
gcuaguuauguauuauucc

SEQ ID NO: 3201520 - RNA, 19 nt, Artificial Sequence
  Description of Artificial Sequence: Synthetic oligonucleotide
agauccaccugccucuguc

SEQ ID NO: 3201521 - RNA, 19 nt, Artificial Sequence
  Description of Artificial Sequence: Synthetic oligonucleotide
uguccuggaacucacugua

SEQ ID NO: 3201522 - RNA, 19 nt, Artificial Sequence
  Description of Artificial Sequence: Synthetic oligonucleotide
cuaguuauguauuauuccu

SEQ ID NO: 3201523 - RNA, 19 nt, Artificial Sequence
  Description of Artificial Sequence: Synthetic oligonucleotide
gaacucacuguagaccagg

SEQ ID NO: 3201524 - RNA, 19 nt, Artificial Sequence
  Description of Artificial Sequence: Synthetic oligonucleotide
uccuggaacucacuguaga

SEQ ID NO: 3201525 - RNA, 19 nt, Artificial Sequence
  Description of Artificial Sequence: Synthetic oligonucleotide
accaggcuggucuugaacu

SEQ ID NO: 3201526 - RNA, 19 nt, Artificial Sequence
  Description of Artificial Sequence: Synthetic oligonucleotide
aacucacuguagaccaggc

SEQ ID NO: 3201527 - RNA, 19 nt, Artificial Sequence
  Description of Artificial Sequence: Synthetic oligonucleotide
ucucccaagagcuggaauu

SEQ ID NO: 3201528 - RNA, 19 nt, Artificial Sequence
  Description of Artificial Sequence: Synthetic oligonucleotide
cuggaauuaaagguuugag

SEQ ID NO: 3201529 - RNA, 19 nt, Artificial Sequence
  Description of Artificial Sequence: Synthetic oligonucleotide
ugugugugugugugugugg

SEQ ID NO: 3201530 - RNA, 19 nt, Artificial Sequence
  Description of Artificial Sequence: Synthetic oligonucleotide
ugaacucacagagauccac

SEQ ID NO: 3201531 - RNA, 19 nt, Artificial Sequence
  Description of Artificial Sequence: Synthetic oligonucleotide
gaauuaaagguuugagcua

SEQ ID NO: 3201532 - RNA, 19 nt, Artificial Sequence
  Description of Artificial Sequence: Synthetic oligonucleotide
cuggaacucacuguagacc

SEQ ID NO: 3201533 - RNA, 19 nt, Artificial Sequence
  Description of Artificial Sequence: Synthetic oligonucleotide
ucacagagauccaccugcc

SEQ ID NO: 3201534 - RNA, 19 nt, Artificial Sequence
  Description of Artificial Sequence: Synthetic oligonucleotide
gaacucacagagauccacc

SEQ ID NO: 3201535 - RNA, 19 nt, Artificial Sequence
  Description of Artificial Sequence: Synthetic oligonucleotide
ucuugaacucacagagauc

SEQ ID NO: 3201536 - RNA, 19 nt, Artificial Sequence
  Description of Artificial Sequence: Synthetic oligonucleotide
guuugagcuaguuauguau

SEQ ID NO: 3201537 - RNA, 19 nt, Artificial Sequence
  Description of Artificial Sequence: Synthetic oligonucleotide
uugagcuaguuauguauua

SEQ ID NO: 3201538 - RNA, 19 nt, Artificial Sequence
  Description of Artificial Sequence: Synthetic oligonucleotide
aagguuugagcuaguuaug

SEQ ID NO: 3201539 - RNA, 19 nt, Artificial Sequence
  Description of Artificial Sequence: Synthetic oligonucleotide
agagcuggaauuaaagguu

SEQ ID NO: 3201540 - RNA, 19 nt, Artificial Sequence
  Description of Artificial Sequence: Synthetic oligonucleotide
ccaagagcuggaauuaaag

SEQ ID NO: 3201541 - RNA, 19 nt, Artificial Sequence
  Description of Artificial Sequence: Synthetic oligonucleotide
uguguguguguguggcuug

SEQ ID NO: 3201542 - RNA, 19 nt, Artificial Sequence
  Description of Artificial Sequence: Synthetic oligonucleotide
ugagcuaguuauguauuau

SEQ ID NO: 3201543 - RNA, 19 nt, Artificial Sequence
  Description of Artificial Sequence: Synthetic oligonucleotide
gucuugaacucacagagau

SEQ ID NO: 3201544 - RNA, 19 nt, Artificial Sequence
  Description of Artificial Sequence: Synthetic oligonucleotide
agguuugagcuaguuaugu

SEQ ID NO: 3201545 - RNA, 19 nt, Artificial Sequence
  Description of Artificial Sequence: Synthetic oligonucleotide
acucacagagauccaccug

SEQ ID NO: 3201546 - RNA, 19 nt, Artificial Sequence
  Description of Artificial Sequence: Synthetic oligonucleotide
auccaccugccucugucuc

SEQ ID NO: 3201547 - RNA, 19 nt, Artificial Sequence
  Description of Artificial Sequence: Synthetic oligonucleotide
uuggcuguccuggaacuca

SEQ ID NO: 3201548 - RNA, 19 nt, Artificial Sequence
  Description of Artificial Sequence: Synthetic oligonucleotide
uugaacucacagagaucca

SEQ ID NO: 3201549 - RNA, 19 nt, Artificial Sequence
  Description of Artificial Sequence: Synthetic oligonucleotide
uguguggcuuggcuguccu

SEQ ID NO: 3201550 - RNA, 19 nt, Artificial Sequence
  Description of Artificial Sequence: Synthetic oligonucleotide
gcuggucuugaacucacag

SEQ ID NO: 3201551 - RNA, 19 nt, Artificial Sequence
  Description of Artificial Sequence: Synthetic oligonucleotide
uuaaagguuugagcuaguu

SEQ ID NO: 3201552 - RNA, 19 nt, Artificial Sequence
  Description of Artificial Sequence: Synthetic oligonucleotide
ugugugugugugugugugu

SEQ ID NO: 3201553 - RNA, 19 nt, Artificial Sequence
  Description of Artificial Sequence: Synthetic oligonucleotide
cuggucuugaacucacaga

SEQ ID NO: 3201554 - RNA, 19 nt, Artificial Sequence
  Description of Artificial Sequence: Synthetic oligonucleotide
uccaccugccucugucucc

SEQ ID NO: 3201555 - RNA, 19 nt, Artificial Sequence
  Description of Artificial Sequence: Synthetic oligonucleotide
guguguguguguguguggc

SEQ ID NO: 3201556 - RNA, 19 nt, Artificial Sequence
  Description of Artificial Sequence: Synthetic oligonucleotide
acucacuguagaccaggcu

SEQ ID NO: 3201557 - RNA, 19 nt, Artificial Sequence
  Description of Artificial Sequence: Synthetic oligonucleotide
ugccucugucucccaagag

SEQ ID NO: 3201558 - RNA, 19 nt, Artificial Sequence
  Description of Artificial Sequence: Synthetic oligonucleotide
gccucugucucccaagagc

SEQ ID NO: 3201559 - RNA, 19 nt, Artificial Sequence
  Description of Artificial Sequence: Synthetic oligonucleotide
gugugugugugugugugug

SEQ ID NO: 3201560 - RNA, 19 nt, Artificial Sequence
  Description of Artificial Sequence: Synthetic oligonucleotide
uguguguguguguguggcu

SEQ ID NO: 3201561 - RNA, 19 nt, Artificial Sequence
  Description of Artificial Sequence: Synthetic oligonucleotide
gaccaggcuggucuugaac

SEQ ID NO: 3201562 - RNA, 19 nt, Artificial Sequence
  Description of Artificial Sequence: Synthetic oligonucleotide
cuguagaccaggcuggucu

SEQ ID NO: 3201563 - RNA, 19 nt, Artificial Sequence
  Description of Artificial Sequence: Synthetic oligonucleotide
gcuguccuggaacucacug

SEQ ID NO: 3201564 - RNA, 19 nt, Artificial Sequence
  Description of Artificial Sequence: Synthetic oligonucleotide
uguagaccaggcuggucuu

SEQ ID NO: 3201565 - RNA, 19 nt, Artificial Sequence
  Description of Artificial Sequence: Synthetic oligonucleotide
uagaccaggcuggucuuga

SEQ ID NO: 3201566 - RNA, 19 nt, Artificial Sequence
  Description of Artificial Sequence: Synthetic oligonucleotide
acuguagaccaggcugguc

SEQ ID NO: 3201567 - RNA, 19 nt, Artificial Sequence
  Description of Artificial Sequence: Synthetic oligonucleotide
uggcuguccuggaacucac

SEQ ID NO: 3201568 - RNA, 19 nt, Artificial Sequence
  Description of Artificial Sequence: Synthetic oligonucleotide
guguguguguguggcuugg

SEQ ID NO: 3201569 - RNA, 19 nt, Artificial Sequence
  Description of Artificial Sequence: Synthetic oligonucleotide
aggcuggucuugaacucac

SEQ ID NO: 3201570 - RNA, 19 nt, Artificial Sequence
  Description of Artificial Sequence: Synthetic oligonucleotide
ccuggaacucacuguagac

SEQ ID NO: 3201571 - RNA, 19 nt, Artificial Sequence
  Description of Artificial Sequence: Synthetic oligonucleotide
gagcuaguuauguauuauu

SEQ ID NO: 3201572 - RNA, 19 nt, Artificial Sequence
  Description of Artificial Sequence: Synthetic oligonucleotide
guguguguggcuuggcugu

SEQ ID NO: 3201573 - RNA, 19 nt, Artificial Sequence
  Description of Artificial Sequence: Synthetic oligonucleotide
agcuggaauuaaagguuug

SEQ ID NO: 3201574 - RNA, 19 nt, Artificial Sequence
  Description of Artificial Sequence: Synthetic oligonucleotide
cucugucucccaagagcug

SEQ ID NO: 3201575 - RNA, 19 nt, Artificial Sequence
  Description of Artificial Sequence: Synthetic oligonucleotide
uguguguguguggcuuggc

SEQ ID NO: 3201576 - RNA, 19 nt, Artificial Sequence
  Description of Artificial Sequence: Synthetic oligonucleotide
cagagauccaccugccucu

SEQ ID NO: 3201577 - RNA, 19 nt, Artificial Sequence
  Description of Artificial Sequence: Synthetic oligonucleotide
ggcuuggcuguccuggaac

SEQ ID NO: 3201578 - RNA, 19 nt, Artificial Sequence
  Description of Artificial Sequence: Synthetic oligonucleotide
guuauguauuauuccucau

SEQ ID NO: 3201579 - RNA, 19 nt, Artificial Sequence
  Description of Artificial Sequence: Synthetic oligonucleotide
auuaaagguuugagcuagu

SEQ ID NO: 3201580 - RNA, 19 nt, Artificial Sequence
  Description of Artificial Sequence: Synthetic oligonucleotide
ucccaagagcuggaauuaa

SEQ ID NO: 3201581 - RNA, 19 nt, Artificial Sequence
  Description of Artificial Sequence: Synthetic oligonucleotide
gcuggaauuaaagguuuga

SEQ ID NO: 3201582 - RNA, 19 nt, Artificial Sequence
  Description of Artificial Sequence: Synthetic oligonucleotide
uggcuuggcuguccuggaa

SEQ ID NO: 3201583 - RNA, 19 nt, Artificial Sequence
  Description of Artificial Sequence: Synthetic oligonucleotide
gauccaccugccucugucu

SEQ ID NO: 3201584 - RNA, 19 nt, Artificial Sequence
  Description of Artificial Sequence: Synthetic oligonucleotide
guccuggaacucacuguag

SEQ ID NO: 3201585 - RNA, 19 nt, Artificial Sequence
  Description of Artificial Sequence: Synthetic oligonucleotide
agagauccaccugccucug

SEQ ID NO: 3201586 - RNA, 19 nt, Artificial Sequence
  Description of Artificial Sequence: Synthetic oligonucleotide
gguuugagcuaguuaugua

SEQ ID NO: 3201587 - RNA, 19 nt, Artificial Sequence
  Description of Artificial Sequence: Synthetic oligonucleotide
guagaccaggcuggucuug

SEQ ID NO: 3201588 - RNA, 19 nt, Artificial Sequence
  Description of Artificial Sequence: Synthetic oligonucleotide
cuuggcuguccuggaacuc

SEQ ID NO: 3201589 - RNA, 19 nt, Artificial Sequence
  Description of Artificial Sequence: Synthetic oligonucleotide
ggaacucacuguagaccag

SEQ ID NO: 3201590 - RNA, 19 nt, Artificial Sequence
  Description of Artificial Sequence: Synthetic oligonucleotide
ugucucccaagagcuggaa

SEQ ID NO: 3201591 - RNA, 19 nt, Artificial Sequence
  Description of Artificial Sequence: Synthetic oligonucleotide
cuguccuggaacucacugu

SEQ ID NO: 3201592 - RNA, 19 nt, Artificial Sequence
  Description of Artificial Sequence: Synthetic oligonucleotide
cugccucugucucccaaga

SEQ ID NO: 3201593 - RNA, 19 nt, Artificial Sequence
  Description of Artificial Sequence: Synthetic oligonucleotide
ccugccucugucucccaag

SEQ ID NO: 3201594 - RNA, 19 nt, Artificial Sequence
  Description of Artificial Sequence: Synthetic oligonucleotide
guguguguguggcuuggcu

SEQ ID NO: 3201595 - RNA, 19 nt, Artificial Sequence
  Description of Artificial Sequence: Synthetic oligonucleotide
uguguguggcuuggcuguc

SEQ ID NO: 3201596 - RNA, 19 nt, Artificial Sequence
  Description of Artificial Sequence: Synthetic oligonucleotide
gagcuggaauuaaagguuu

SEQ ID NO: 3201597 - RNA, 19 nt, Artificial Sequence
  Description of Artificial Sequence: Synthetic oligonucleotide
ucagucaauagcaagaugg

SEQ ID NO: 3201598 - RNA, 19 nt, Artificial Sequence
  Description of Artificial Sequence: Synthetic oligonucleotide
uauauuauauauaaacaag

SEQ ID NO: 3201599 - RNA, 19 nt, Artificial Sequence
  Description of Artificial Sequence: Synthetic oligonucleotide
aacagagacacaguuaucc

SEQ ID NO: 3201600 - RNA, 19 nt, Artificial Sequence
  Description of Artificial Sequence: Synthetic oligonucleotide
uauugcacauuuaagacag

SEQ ID NO: 3201601 - RNA, 19 nt, Artificial Sequence
  Description of Artificial Sequence: Synthetic oligonucleotide
uauuauauauaaacaagug

SEQ ID NO: 3201602 - RNA, 19 nt, Artificial Sequence
  Description of Artificial Sequence: Synthetic oligonucleotide
uaagacagaacuuucaaca

SEQ ID NO: 3201603 - RNA, 19 nt, Artificial Sequence
  Description of Artificial Sequence: Synthetic oligonucleotide
agagucuugagccacaggg

SEQ ID NO: 3201604 - RNA, 19 nt, Artificial Sequence
  Description of Artificial Sequence: Synthetic oligonucleotide
ugugcuuuagugacgaggg

SEQ ID NO: 3201605 - RNA, 19 nt, Artificial Sequence
  Description of Artificial Sequence: Synthetic oligonucleotide
auuauauauaaacaagugu

SEQ ID NO: 3201606 - RNA, 19 nt, Artificial Sequence
  Description of Artificial Sequence: Synthetic oligonucleotide
aauacagccgcuuuguccu

SEQ ID NO: 3201607 - RNA, 19 nt, Artificial Sequence
  Description of Artificial Sequence: Synthetic oligonucleotide
uuagugacgagggagaagg

SEQ ID NO: 3201608 - RNA, 19 nt, Artificial Sequence
  Description of Artificial Sequence: Synthetic oligonucleotide
uucuauugcacauuuaaga

SEQ ID NO: 3201609 - RNA, 19 nt, Artificial Sequence
  Description of Artificial Sequence: Synthetic oligonucleotide
gagagagaaggcaagaugg

SEQ ID NO: 3201610 - RNA, 19 nt, Artificial Sequence
  Description of Artificial Sequence: Synthetic oligonucleotide
ucuauugcacauuuaagac

SEQ ID NO: 3201611 - RNA, 19 nt, Artificial Sequence
  Description of Artificial Sequence: Synthetic oligonucleotide
ucaacagagacacaguuau

SEQ ID NO: 3201612 - RNA, 19 nt, Artificial Sequence
  Description of Artificial Sequence: Synthetic oligonucleotide
accugaaguaucuuuggcc

SEQ ID NO: 3201613 - RNA, 19 nt, Artificial Sequence
  Description of Artificial Sequence: Synthetic oligonucleotide
gaaggcugcgcccagacgg

SEQ ID NO: 3201614 - RNA, 19 nt, Artificial Sequence
  Description of Artificial Sequence: Synthetic oligonucleotide
auaaacaaguguaacuagc

SEQ ID NO: 3201615 - RNA, 19 nt, Artificial Sequence
  Description of Artificial Sequence: Synthetic oligonucleotide
uaaacaaguguaacuagca

SEQ ID NO: 3201616 - RNA, 19 nt, Artificial Sequence
  Description of Artificial Sequence: Synthetic oligonucleotide
aaccugaaguaucuuuggc

SEQ ID NO: 3201617 - RNA, 19 nt, Artificial Sequence
  Description of Artificial Sequence: Synthetic oligonucleotide
ucugauugccuaaacaaac

SEQ ID NO: 3201618 - RNA, 19 nt, Artificial Sequence
  Description of Artificial Sequence: Synthetic oligonucleotide
gaacuuucaacagagacac

SEQ ID NO: 3201619 - RNA, 19 nt, Artificial Sequence
  Description of Artificial Sequence: Synthetic oligonucleotide
aagacagaacuuucaacag

SEQ ID NO: 3201620 - RNA, 19 nt, Artificial Sequence
  Description of Artificial Sequence: Synthetic oligonucleotide
aaggauucucacuucuggg

SEQ ID NO: 3201621 - RNA, 19 nt, Artificial Sequence
  Description of Artificial Sequence: Synthetic oligonucleotide
gacacaguuauccaauggc

SEQ ID NO: 3201622 - RNA, 19 nt, Artificial Sequence
  Description of Artificial Sequence: Synthetic oligonucleotide
uggccuaucagucaauagc

SEQ ID NO: 3201623 - RNA, 19 nt, Artificial Sequence
  Description of Artificial Sequence: Synthetic oligonucleotide
uuuaagacagaacuuucaa

SEQ ID NO: 3201624 - RNA, 19 nt, Artificial Sequence
  Description of Artificial Sequence: Synthetic oligonucleotide
gaucacguuguccucacgg

SEQ ID NO: 3201625 - RNA, 19 nt, Artificial Sequence
  Description of Artificial Sequence: Synthetic oligonucleotide
acuuucaacagagacacag

SEQ ID NO: 3201626 - RNA, 19 nt, Artificial Sequence
  Description of Artificial Sequence: Synthetic oligonucleotide
auauuauauauaaacaagu

SEQ ID NO: 3201627 - RNA, 19 nt, Artificial Sequence
  Description of Artificial Sequence: Synthetic oligonucleotide
cuagcauucaagucugccg

SEQ ID NO: 3201628 - RNA, 19 nt, Artificial Sequence
  Description of Artificial Sequence: Synthetic oligonucleotide
auucugauugccuaaacaa

SEQ ID NO: 3201629 - RNA, 19 nt, Artificial Sequence
  Description of Artificial Sequence: Synthetic oligonucleotide
aaguucucauucugauugc

SEQ ID NO: 3201630 - RNA, 19 nt, Artificial Sequence
  Description of Artificial Sequence: Synthetic oligonucleotide
ucaauagcaagauggcuug

SEQ ID NO: 3201631 - RNA, 19 nt, Artificial Sequence
  Description of Artificial Sequence: Synthetic oligonucleotide
ucagcaaggauucucacuu

SEQ ID NO: 3201632 - RNA, 19 nt, Artificial Sequence
  Description of Artificial Sequence: Synthetic oligonucleotide
aggauucucacuucugggg

SEQ ID NO: 3201633 - RNA, 19 nt, Artificial Sequence
  Description of Artificial Sequence: Synthetic oligonucleotide
aagucugccgagccugugc

SEQ ID NO: 3201634 - RNA, 19 nt, Artificial Sequence
  Description of Artificial Sequence: Synthetic oligonucleotide
guaacuagcauucaagucu

SEQ ID NO: 3201635 - RNA, 19 nt, Artificial Sequence
  Description of Artificial Sequence: Synthetic oligonucleotide
agaagggaaccucugugcg

SEQ ID NO: 3201636 - RNA, 19 nt, Artificial Sequence
  Description of Artificial Sequence: Synthetic oligonucleotide
uaacuagcauucaagucug

SEQ ID NO: 3201637 - RNA, 19 nt, Artificial Sequence
  Description of Artificial Sequence: Synthetic oligonucleotide
aguaucuuuggccuaucag

SEQ ID NO: 3201638 - RNA, 19 nt, Artificial Sequence
  Description of Artificial Sequence: Synthetic oligonucleotide
uuaagacagaacuuucaac

SEQ ID NO: 3201639 - RNA, 19 nt, Artificial Sequence
  Description of Artificial Sequence: Synthetic oligonucleotide
uagcauucaagucugccga

SEQ ID NO: 3201640 - RNA, 19 nt, Artificial Sequence
  Description of Artificial Sequence: Synthetic oligonucleotide
ugauugccuaaacaaaccu

SEQ ID NO: 3201641 - RNA, 19 nt, Artificial Sequence
  Description of Artificial Sequence: Synthetic oligonucleotide
auauaaacaaguguaacua

SEQ ID NO: 3201642 - RNA, 19 nt, Artificial Sequence
  Description of Artificial Sequence: Synthetic oligonucleotide
uaucuuuggccuaucaguc

SEQ ID NO: 3201643 - RNA, 19 nt, Artificial Sequence
  Description of Artificial Sequence: Synthetic oligonucleotide
caaggauucucacuucugg

SEQ ID NO: 3201644 - RNA, 19 nt, Artificial Sequence
  Description of Artificial Sequence: Synthetic oligonucleotide
ugcauggcgagcgagaagc

SEQ ID NO: 3201645 - RNA, 19 nt, Artificial Sequence
  Description of Artificial Sequence: Synthetic oligonucleotide
ugcguuuggcaucagcaag

SEQ ID NO: 3201646 - RNA, 19 nt, Artificial Sequence
  Description of Artificial Sequence: Synthetic oligonucleotide
aaggcaagauggcaacauc

SEQ ID NO: 3201647 - RNA, 19 nt, Artificial Sequence
  Description of Artificial Sequence: Synthetic oligonucleotide
uguaacuagcauucaaguc

SEQ ID NO: 3201648 - RNA, 19 nt, Artificial Sequence
  Description of Artificial Sequence: Synthetic oligonucleotide
caauacagccgcuuugucc

SEQ ID NO: 3201649 - RNA, 19 nt, Artificial Sequence
  Description of Artificial Sequence: Synthetic oligonucleotide
ugccuaaacaaaccugaag

SEQ ID NO: 3201650 - RNA, 19 nt, Artificial Sequence
  Description of Artificial Sequence: Synthetic oligonucleotide
gggaaauggagagagaagg

SEQ ID NO: 3201651 - RNA, 19 nt, Artificial Sequence
  Description of Artificial Sequence: Synthetic oligonucleotide
aagcccugcggacagguag

SEQ ID NO: 3201652 - RNA, 19 nt, Artificial Sequence
  Description of Artificial Sequence: Synthetic oligonucleotide
cuucuauugcacauuuaag

SEQ ID NO: 3201653 - RNA, 19 nt, Artificial Sequence
  Description of Artificial Sequence: Synthetic oligonucleotide
acuagcauucaagucugcc

SEQ ID NO: 3201654 - RNA, 19 nt, Artificial Sequence
  Description of Artificial Sequence: Synthetic oligonucleotide
uuucaacagagacacaguu

SEQ ID NO: 3201655 - RNA, 19 nt, Artificial Sequence
  Description of Artificial Sequence: Synthetic oligonucleotide
agacacaguuauccaaugg

SEQ ID NO: 3201656 - RNA, 19 nt, Artificial Sequence
  Description of Artificial Sequence: Synthetic oligonucleotide
aguguaacuagcauucaag

SEQ ID NO: 3201657 - RNA, 19 nt, Artificial Sequence
  Description of Artificial Sequence: Synthetic oligonucleotide
cugauugccuaaacaaacc

SEQ ID NO: 3201658 - RNA, 19 nt, Artificial Sequence
  Description of Artificial Sequence: Synthetic oligonucleotide
gagaagggaaccucugugc

SEQ ID NO: 3201659 - RNA, 19 nt, Artificial Sequence
  Description of Artificial Sequence: Synthetic oligonucleotide
uuggcaucagcaaggauuc

SEQ ID NO: 3201660 - RNA, 19 nt, Artificial Sequence
  Description of Artificial Sequence: Synthetic oligonucleotide
aagccgaagaggcucccgg

SEQ ID NO: 3201661 - RNA, 19 nt, Artificial Sequence
  Description of Artificial Sequence: Synthetic oligonucleotide
cuaucagucaauagcaaga

SEQ ID NO: 3201662 - RNA, 19 nt, Artificial Sequence
  Description of Artificial Sequence: Synthetic oligonucleotide
cacaguuauccaauggcag

SEQ ID NO: 3201663 - RNA, 19 nt, Artificial Sequence
  Description of Artificial Sequence: Synthetic oligonucleotide
cucacuucuggggaaaugg

SEQ ID NO: 3201664 - RNA, 19 nt, Artificial Sequence
  Description of Artificial Sequence: Synthetic oligonucleotide
ugcacauuuaagacagaac

SEQ ID NO: 3201665 - RNA, 19 nt, Artificial Sequence
  Description of Artificial Sequence: Synthetic oligonucleotide
agguagagcaggcacaacu

SEQ ID NO: 3201666 - RNA, 19 nt, Artificial Sequence
  Description of Artificial Sequence: Synthetic oligonucleotide
auagcaagauggcuugaag

SEQ ID NO: 3201667 - RNA, 19 nt, Artificial Sequence
  Description of Artificial Sequence: Synthetic oligonucleotide
caaacgaccucccaaguuc

SEQ ID NO: 3201668 - RNA, 19 nt, Artificial Sequence
  Description of Artificial Sequence: Synthetic oligonucleotide
auugccuaaacaaaccuga

SEQ ID NO: 3201669 - RNA, 19 nt, Artificial Sequence
  Description of Artificial Sequence: Synthetic oligonucleotide
cuucuggggaaauggagag

SEQ ID NO: 3201670 - RNA, 19 nt, Artificial Sequence
  Description of Artificial Sequence: Synthetic oligonucleotide
uuauccaauggcagagucu

SEQ ID NO: 3201671 - RNA, 19 nt, Artificial Sequence
  Description of Artificial Sequence: Synthetic oligonucleotide
acaguuauccaauggcaga

SEQ ID NO: 3201672 - RNA, 19 nt, Artificial Sequence
  Description of Artificial Sequence: Synthetic oligonucleotide
aaguguaacuagcauucaa

SEQ ID NO: 3201673 - RNA, 19 nt, Artificial Sequence
  Description of Artificial Sequence: Synthetic oligonucleotide
ucuuuggccuaucagucaa

SEQ ID NO: 3201674 - RNA, 19 nt, Artificial Sequence
  Description of Artificial Sequence: Synthetic oligonucleotide
uagagcaggcacaacuggc

SEQ ID NO: 3201675 - RNA, 19 nt, Artificial Sequence
  Description of Artificial Sequence: Synthetic oligonucleotide
cauuuaagacagaacuuuc

SEQ ID NO: 3201676 - RNA, 19 nt, Artificial Sequence
  Description of Artificial Sequence: Synthetic oligonucleotide
aucacguuguccucacggg

SEQ ID NO: 3201677 - RNA, 19 nt, Artificial Sequence
  Description of Artificial Sequence: Synthetic oligonucleotide
agucuugagccacagggca

SEQ ID NO: 3201678 - RNA, 19 nt, Artificial Sequence
  Description of Artificial Sequence: Synthetic oligonucleotide
gaaauggagagagaaggca

SEQ ID NO: 3201679 - RNA, 19 nt, Artificial Sequence
  Description of Artificial Sequence: Synthetic oligonucleotide
gauugccuaaacaaaccug

SEQ ID NO: 3201680 - RNA, 19 nt, Artificial Sequence
  Description of Artificial Sequence: Synthetic oligonucleotide
guagagcaggcacaacugg

SEQ ID NO: 3201681 - RNA, 19 nt, Artificial Sequence
  Description of Artificial Sequence: Synthetic oligonucleotide
gagccugugcuuuagugac

SEQ ID NO: 3201682 - RNA, 19 nt, Artificial Sequence
  Description of Artificial Sequence: Synthetic oligonucleotide
cagucaauagcaagauggc

SEQ ID NO: 3201683 - RNA, 19 nt, Artificial Sequence
  Description of Artificial Sequence: Synthetic oligonucleotide
aaauggagagagaaggcaa

SEQ ID NO: 3201684 - RNA, 19 nt, Artificial Sequence
  Description of Artificial Sequence: Synthetic oligonucleotide
uucaagucugccgagccug

SEQ ID NO: 3201685 - RNA, 19 nt, Artificial Sequence
  Description of Artificial Sequence: Synthetic oligonucleotide
agacagaacuuucaacaga

SEQ ID NO: 3201686 - RNA, 19 nt, Artificial Sequence
  Description of Artificial Sequence: Synthetic oligonucleotide
cuauugcacauuuaagaca

SEQ ID NO: 3201687 - RNA, 19 nt, Artificial Sequence
  Description of Artificial Sequence: Synthetic oligonucleotide
agagagaaggcaagauggc

SEQ ID NO: 3201688 - RNA, 19 nt, Artificial Sequence
  Description of Artificial Sequence: Synthetic oligonucleotide
uucaacagagacacaguua

SEQ ID NO: 3201689 - RNA, 19 nt, Artificial Sequence
  Description of Artificial Sequence: Synthetic oligonucleotide
accucccaaguucucauuc

SEQ ID NO: 3201690 - RNA, 19 nt, Artificial Sequence
  Description of Artificial Sequence: Synthetic oligonucleotide
uucucauucugauugccua

SEQ ID NO: 3201691 - RNA, 19 nt, Artificial Sequence
  Description of Artificial Sequence: Synthetic oligonucleotide
uauccaauggcagagucuu

SEQ ID NO: 3201692 - RNA, 19 nt, Artificial Sequence
  Description of Artificial Sequence: Synthetic oligonucleotide
guaucuuuggccuaucagu

SEQ ID NO: 3201693 - RNA, 19 nt, Artificial Sequence
  Description of Artificial Sequence: Synthetic oligonucleotide
cugugcuuuagugacgagg

SEQ ID NO: 3201694 - RNA, 19 nt, Artificial Sequence
  Description of Artificial Sequence: Synthetic oligonucleotide
auuuaagacagaacuuuca

SEQ ID NO: 3201695 - RNA, 19 nt, Artificial Sequence
  Description of Artificial Sequence: Synthetic oligonucleotide
gagaaggcaagauggcaac

SEQ ID NO: 3201696 - RNA, 19 nt, Artificial Sequence
  Description of Artificial Sequence: Synthetic oligonucleotide
aaguaucuuuggccuauca

SEQ ID NO: 3201697 - RNA, 19 nt, Artificial Sequence
  Description of Artificial Sequence: Synthetic oligonucleotide
auuuguuacaauuccagcc

SEQ ID NO: 3201698 - RNA, 19 nt, Artificial Sequence
  Description of Artificial Sequence: Synthetic oligonucleotide
auuaacauaaucuaacaag

SEQ ID NO: 3201699 - RNA, 19 nt, Artificial Sequence
  Description of Artificial Sequence: Synthetic oligonucleotide
uauagcaagauuaacauaa

SEQ ID NO: 3201700 - RNA, 19 nt, Artificial Sequence
  Description of Artificial Sequence: Synthetic oligonucleotide
aaaacuucaaugcuuuguc

SEQ ID NO: 3201701 - RNA, 19 nt, Artificial Sequence
  Description of Artificial Sequence: Synthetic oligonucleotide
uuaacauaaucuaacaagu

SEQ ID NO: 3201702 - RNA, 19 nt, Artificial Sequence
  Description of Artificial Sequence: Synthetic oligonucleotide
aagauuaacauaaucuaac

SEQ ID NO: 3201703 - RNA, 19 nt, Artificial Sequence
  Description of Artificial Sequence: Synthetic oligonucleotide
agaauucacggccacaugc

SEQ ID NO: 3201704 - RNA, 19 nt, Artificial Sequence
  Description of Artificial Sequence: Synthetic oligonucleotide
ucuaguugugaacacaaag

SEQ ID NO: 3201705 - RNA, 19 nt, Artificial Sequence
  Description of Artificial Sequence: Synthetic oligonucleotide
uaaucuaacaaguauggac

SEQ ID NO: 3201706 - RNA, 19 nt, Artificial Sequence
  Description of Artificial Sequence: Synthetic oligonucleotide
uacaauuccagccagugca

SEQ ID NO: 3201707 - RNA, 19 nt, Artificial Sequence
  Description of Artificial Sequence: Synthetic oligonucleotide
ugguaauucaccaagaauu

SEQ ID NO: 3201708 - RNA, 19 nt, Artificial Sequence
  Description of Artificial Sequence: Synthetic oligonucleotide
uuugucaaggccuacaauc

SEQ ID NO: 3201709 - RNA, 19 nt, Artificial Sequence
  Description of Artificial Sequence: Synthetic oligonucleotide
guuuucaucagaaucaacc

SEQ ID NO: 3201710 - RNA, 19 nt, Artificial Sequence
  Description of Artificial Sequence: Synthetic oligonucleotide
aaucuaacaaguauggacu

SEQ ID NO: 3201711 - RNA, 19 nt, Artificial Sequence
  Description of Artificial Sequence: Synthetic oligonucleotide
uuauccaucauguccaucu

SEQ ID NO: 3201712 - RNA, 19 nt, Artificial Sequence
  Description of Artificial Sequence: Synthetic oligonucleotide
ucaccaagaauucacggcc

SEQ ID NO: 3201713 - RNA, 19 nt, Artificial Sequence
  Description of Artificial Sequence: Synthetic oligonucleotide
uuggacauggccaggaugc

SEQ ID NO: 3201714 - RNA, 19 nt, Artificial Sequence
  Description of Artificial Sequence: Synthetic oligonucleotide
ucacauagacucuccaucg

SEQ ID NO: 3201715 - RNA, 19 nt, Artificial Sequence
  Description of Artificial Sequence: Synthetic oligonucleotide
agccagugcaaauacaaac

SEQ ID NO: 3201716 - RNA, 19 nt, Artificial Sequence
  Description of Artificial Sequence: Synthetic oligonucleotide
uguuggaggagcuagcugu

SEQ ID NO: 3201717 - RNA, 19 nt, Artificial Sequence
  Description of Artificial Sequence: Synthetic oligonucleotide
agaaccacagacuggauga

SEQ ID NO: 3201718 - RNA, 19 nt, Artificial Sequence
  Description of Artificial Sequence: Synthetic oligonucleotide
agcaagauuaacauaaucu

SEQ ID NO: 3201719 - RNA, 19 nt, Artificial Sequence
  Description of Artificial Sequence: Synthetic oligonucleotide
uuaaacacugcaguccagg

SEQ ID NO: 3201720 - RNA, 19 nt, Artificial Sequence
  Description of Artificial Sequence: Synthetic oligonucleotide
ucuagaaccacagacugga

SEQ ID NO: 3201721 - RNA, 19 nt, Artificial Sequence
  Description of Artificial Sequence: Synthetic oligonucleotide
acaaucucuaacaugugac

SEQ ID NO: 3201722 - RNA, 19 nt, Artificial Sequence
  Description of Artificial Sequence: Synthetic oligonucleotide
uucacauagacucuccauc

SEQ ID NO: 3201723 - RNA, 19 nt, Artificial Sequence
  Description of Artificial Sequence: Synthetic oligonucleotide
uacaaucucuaacauguga

SEQ ID NO: 3201724 - RNA, 19 nt, Artificial Sequence
  Description of Artificial Sequence: Synthetic oligonucleotide
uucaccaagaauucacggc

SEQ ID NO: 3201725 - RNA, 19 nt, Artificial Sequence
  Description of Artificial Sequence: Synthetic oligonucleotide
caacauuuguuacaauucc

SEQ ID NO: 3201726 - RNA, 19 nt, Artificial Sequence
  Description of Artificial Sequence: Synthetic oligonucleotide
aacaaguauggacucccag

SEQ ID NO: 3201727 - RNA, 19 nt, Artificial Sequence
  Description of Artificial Sequence: Synthetic oligonucleotide
auucaccaagaauucacgg

SEQ ID NO: 3201728 - RNA, 19 nt, Artificial Sequence
  Description of Artificial Sequence: Synthetic oligonucleotide
acucccaggauggaaaugc

SEQ ID NO: 3201729 - RNA, 19 nt, Artificial Sequence
  Description of Artificial Sequence: Synthetic oligonucleotide
aucaaccuccuugacaucc

SEQ ID NO: 3201730 - RNA, 19 nt, Artificial Sequence
  Description of Artificial Sequence: Synthetic oligonucleotide
uuuggucacugcuauagca

SEQ ID NO: 3201731 - RNA, 19 nt, Artificial Sequence
  Description of Artificial Sequence: Synthetic oligonucleotide
aaugcuuugucuccuccca

SEQ ID NO: 3201732 - RNA, 19 nt, Artificial Sequence
  Description of Artificial Sequence: Synthetic oligonucleotide
uggucaagcacgcuuaaac

SEQ ID NO: 3201733 - RNA, 19 nt, Artificial Sequence
  Description of Artificial Sequence: Synthetic oligonucleotide
uccaagagcacccgacugg

SEQ ID NO: 3201734 - RNA, 19 nt, Artificial Sequence
  Description of Artificial Sequence: Synthetic oligonucleotide
aaaggcaaagggccugggg

SEQ ID NO: 3201735 - RNA, 19 nt, Artificial Sequence
  Description of Artificial Sequence: Synthetic oligonucleotide
guucuagaaccacagacug

SEQ ID NO: 3201736 - RNA, 19 nt, Artificial Sequence
  Description of Artificial Sequence: Synthetic oligonucleotide
uaaacacugcaguccaggg

SEQ ID NO: 3201737 - RNA, 19 nt, Artificial Sequence
  Description of Artificial Sequence: Synthetic oligonucleotide
ucaagcacgcuuaaacacu

SEQ ID NO: 3201738 - RNA, 19 nt, Artificial Sequence
  Description of Artificial Sequence: Synthetic oligonucleotide
gauuaacauaaucuaacaa

SEQ ID NO: 3201739 - RNA, 19 nt, Artificial Sequence
  Description of Artificial Sequence: Synthetic oligonucleotide
uagaaccacagacuggaug

SEQ ID NO: 3201740 - RNA, 19 nt, Artificial Sequence
  Description of Artificial Sequence: Synthetic oligonucleotide
aaacuucaaugcuuugucu

SEQ ID NO: 3201741 - RNA, 19 nt, Artificial Sequence
  Description of Artificial Sequence: Synthetic oligonucleotide
ucucuaacaugugacauac

SEQ ID NO: 3201742 - RNA, 19 nt, Artificial Sequence
  Description of Artificial Sequence: Synthetic oligonucleotide
gaacacaaaggcaaagggc

SEQ ID NO: 3201743 - RNA, 19 nt, Artificial Sequence
  Description of Artificial Sequence: Synthetic oligonucleotide
uucuagaaccacagacugg

SEQ ID NO: 3201744 - RNA, 19 nt, Artificial Sequence
  Description of Artificial Sequence: Synthetic oligonucleotide
aggauggaaaugcaggaug

SEQ ID NO: 3201745 - RNA, 19 nt, Artificial Sequence
  Description of Artificial Sequence: Synthetic oligonucleotide
agaaucaaccuccuugaca

SEQ ID NO: 3201746 - RNA, 19 nt, Artificial Sequence
  Description of Artificial Sequence: Synthetic oligonucleotide
aucuaacaaguauggacuc

SEQ ID NO: 3201747 - RNA, 19 nt, Artificial Sequence
  Description of Artificial Sequence: Synthetic oligonucleotide
uuugacgacuuccucgcug

SEQ ID NO: 3201748 - RNA, 19 nt, Artificial Sequence
  Description of Artificial Sequence: Synthetic oligonucleotide
gaggguacaggguaacugc

SEQ ID NO: 3201749 - RNA, 19 nt, Artificial Sequence
  Description of Artificial Sequence: Synthetic oligonucleotide
acaguacucugccuguugg

SEQ ID NO: 3201750 - RNA, 19 nt, Artificial Sequence
  Description of Artificial Sequence: Synthetic oligonucleotide
ugacaucuaguugugaaca

SEQ ID NO: 3201751 - RNA, 19 nt, Artificial Sequence
  Description of Artificial Sequence: Synthetic oligonucleotide
caguuguugucgcagagcc

SEQ ID NO: 3201752 - RNA, 19 nt, Artificial Sequence
  Description of Artificial Sequence: Synthetic oligonucleotide
ucccagaauggcuuugacg

SEQ ID NO: 3201753 - RNA, 19 nt, Artificial Sequence
  Description of Artificial Sequence: Synthetic oligonucleotide
uugucaaggccuacaaucu

SEQ ID NO: 3201754 - RNA, 19 nt, Artificial Sequence
  Description of Artificial Sequence: Synthetic oligonucleotide
uugacauccccauccaaug

SEQ ID NO: 3201755 - RNA, 19 nt, Artificial Sequence
  Description of Artificial Sequence: Synthetic oligonucleotide
acauuuguuacaauuccag

SEQ ID NO: 3201756 - RNA, 19 nt, Artificial Sequence
  Description of Artificial Sequence: Synthetic oligonucleotide
cuaacaaguauggacuccc

SEQ ID NO: 3201757 - RNA, 19 nt, Artificial Sequence
  Description of Artificial Sequence: Synthetic oligonucleotide
accacagacuggaugagcc

SEQ ID NO: 3201758 - RNA, 19 nt, Artificial Sequence
  Description of Artificial Sequence: Synthetic oligonucleotide
uuguuacaauuccagccag

SEQ ID NO: 3201759 - RNA, 19 nt, Artificial Sequence
  Description of Artificial Sequence: Synthetic oligonucleotide
uggagaagaccucugguuc

SEQ ID NO: 3201760 - RNA, 19 nt, Artificial Sequence
  Description of Artificial Sequence: Synthetic oligonucleotide
agugcaaauacaaacuggu

SEQ ID NO: 3201761 - RNA, 19 nt, Artificial Sequence
  Description of Artificial Sequence: Synthetic oligonucleotide
uggcauuuuccccaagccc

SEQ ID NO: 3201762 - RNA, 19 nt, Artificial Sequence
  Description of Artificial Sequence: Synthetic oligonucleotide
aagagcacccgacugguaa

SEQ ID NO: 3201763 - RNA, 19 nt, Artificial Sequence
  Description of Artificial Sequence: Synthetic oligonucleotide
uccaucucuaguuugucaa

SEQ ID NO: 3201764 - RNA, 19 nt, Artificial Sequence
  Description of Artificial Sequence: Synthetic oligonucleotide
uuacaauuccagccagugc

SEQ ID NO: 3201765 - RNA, 19 nt, Artificial Sequence
  Description of Artificial Sequence: Synthetic oligonucleotide
agugacaucuaguugugaa

SEQ ID NO: 3201766 - RNA, 19 nt, Artificial Sequence
  Description of Artificial Sequence: Synthetic oligonucleotide
guugugaacacaaaggcaa

SEQ ID NO: 3201767 - RNA, 19 nt, Artificial Sequence
  Description of Artificial Sequence: Synthetic oligonucleotide
aaucucuaacaugugacau

SEQ ID NO: 3201768 - RNA, 19 nt, Artificial Sequence
  Description of Artificial Sequence: Synthetic oligonucleotide
uucaguuguugucgcagag

SEQ ID NO: 3201769 - RNA, 19 nt, Artificial Sequence
  Description of Artificial Sequence: Synthetic oligonucleotide
gucaagcacgcuuaaacac

SEQ ID NO: 3201770 - RNA, 19 nt, Artificial Sequence
  Description of Artificial Sequence: Synthetic oligonucleotide
aacauuuguuacaauucca

SEQ ID NO: 3201771 - RNA, 19 nt, Artificial Sequence
  Description of Artificial Sequence: Synthetic oligonucleotide
aaccacagacuggaugagc

SEQ ID NO: 3201772 - RNA, 19 nt, Artificial Sequence
  Description of Artificial Sequence: Synthetic oligonucleotide
agcagcagucugcaggugg

SEQ ID NO: 3201773 - RNA, 19 nt, Artificial Sequence
  Description of Artificial Sequence: Synthetic oligonucleotide
acgacuuccucgcugcggg

SEQ ID NO: 3201774 - RNA, 19 nt, Artificial Sequence
  Description of Artificial Sequence: Synthetic oligonucleotide
uugacgacuuccucgcugc

SEQ ID NO: 3201775 - RNA, 19 nt, Artificial Sequence
  Description of Artificial Sequence: Synthetic oligonucleotide
aggagcuagcuguuucgcc

SEQ ID NO: 3201776 - RNA, 19 nt, Artificial Sequence
  Description of Artificial Sequence: Synthetic oligonucleotide
guuacaauuccagccagug

SEQ ID NO: 3201777 - RNA, 19 nt, Artificial Sequence
  Description of Artificial Sequence: Synthetic oligonucleotide
acgcuuaaacacugcaguc

SEQ ID NO: 3201778 - RNA, 19 nt, Artificial Sequence
  Description of Artificial Sequence: Synthetic oligonucleotide
uuggucacugcuauagcaa

SEQ ID NO: 3201779 - RNA, 19 nt, Artificial Sequence
  Description of Artificial Sequence: Synthetic oligonucleotide
uggucacugcuauagcaag

SEQ ID NO: 3201780 - RNA, 19 nt, Artificial Sequence
  Description of Artificial Sequence: Synthetic oligonucleotide
uuuuggucacugcuauagc

SEQ ID NO: 3201781 - RNA, 19 nt, Artificial Sequence
  Description of Artificial Sequence: Synthetic oligonucleotide
ucuaguuugucaaggccua

SEQ ID NO: 3201782 - RNA, 19 nt, Artificial Sequence
  Description of Artificial Sequence: Synthetic oligonucleotide
caagauuaacauaaucuaa

SEQ ID NO: 3201783 - RNA, 19 nt, Artificial Sequence
  Description of Artificial Sequence: Synthetic oligonucleotide
ucuaacaaguauggacucc

SEQ ID NO: 3201784 - RNA, 19 nt, Artificial Sequence
  Description of Artificial Sequence: Synthetic oligonucleotide
auacagugacaucuaguug

SEQ ID NO: 3201785 - RNA, 19 nt, Artificial Sequence
  Description of Artificial Sequence: Synthetic oligonucleotide
aauuccagccagugcaaau

SEQ ID NO: 3201786 - RNA, 19 nt, Artificial Sequence
  Description of Artificial Sequence: Synthetic oligonucleotide
accaagaauucacggccac

SEQ ID NO: 3201787 - RNA, 19 nt, Artificial Sequence
  Description of Artificial Sequence: Synthetic oligonucleotide
agugcuccggaacuccagg

SEQ ID NO: 3201788 - RNA, 19 nt, Artificial Sequence
  Description of Artificial Sequence: Synthetic oligonucleotide
aauggcagcaacauuuguu

SEQ ID NO: 3201789 - RNA, 19 nt, Artificial Sequence
  Description of Artificial Sequence: Synthetic oligonucleotide
uccaucauguccaucucua

SEQ ID NO: 3201790 - RNA, 19 nt, Artificial Sequence
  Description of Artificial Sequence: Synthetic oligonucleotide
auggcagcaacauuuguua

SEQ ID NO: 3201791 - RNA, 19 nt, Artificial Sequence
  Description of Artificial Sequence: Synthetic oligonucleotide
uccaaugacuucacauaga

SEQ ID NO: 3201792 - RNA, 19 nt, Artificial Sequence
  Description of Artificial Sequence: Synthetic oligonucleotide
uguuucgccucauucaguu

SEQ ID NO: 3201793 - RNA, 19 nt, Artificial Sequence
  Description of Artificial Sequence: Synthetic oligonucleotide
gacauccccauccaaugac

SEQ ID NO: 3201794 - RNA, 19 nt, Artificial Sequence
  Description of Artificial Sequence: Synthetic oligonucleotide
aaucaaccuccuugacauc

SEQ ID NO: 3201795 - RNA, 19 nt, Artificial Sequence
  Description of Artificial Sequence: Synthetic oligonucleotide
aggaugcuuauccaucaug

SEQ ID NO: 3201796 - RNA, 19 nt, Artificial Sequence
  Description of Artificial Sequence: Synthetic oligonucleotide
agacucuccaucgucugac

SEQ ID NO: 3201797 - RNA, 19 nt, Artificial Sequence
  Description of Artificial Sequence: Synthetic oligonucleotide
auuaacagcagguugcugc

SEQ ID NO: 3201798 - RNA, 19 nt, Artificial Sequence
  Description of Artificial Sequence: Synthetic oligonucleotide
uuugacagggauaugaggc

SEQ ID NO: 3201799 - RNA, 19 nt, Artificial Sequence
  Description of Artificial Sequence: Synthetic oligonucleotide
uuuaucaacuuuauauagg

SEQ ID NO: 3201800 - RNA, 19 nt, Artificial Sequence
  Description of Artificial Sequence: Synthetic oligonucleotide
uguaaaaggacacagucac

SEQ ID NO: 3201801 - RNA, 19 nt, Artificial Sequence
  Description of Artificial Sequence: Synthetic oligonucleotide
ugaauuacagauauucugc

SEQ ID NO: 3201802 - RNA, 19 nt, Artificial Sequence
  Description of Artificial Sequence: Synthetic oligonucleotide
auuguuuuagguaauagac

SEQ ID NO: 3201803 - RNA, 19 nt, Artificial Sequence
  Description of Artificial Sequence: Synthetic oligonucleotide
uugagaaaguaaaugaaag

SEQ ID NO: 3201804 - RNA, 19 nt, Artificial Sequence
  Description of Artificial Sequence: Synthetic oligonucleotide
auuuuggucggcuagcacc

SEQ ID NO: 3201805 - RNA, 19 nt, Artificial Sequence
  Description of Artificial Sequence: Synthetic oligonucleotide
uguucuaucugaaugaagu

SEQ ID NO: 3201806 - RNA, 19 nt, Artificial Sequence
  Description of Artificial Sequence: Synthetic oligonucleotide
ugagaaaguaaaugaaagg

SEQ ID NO: 3201807 - RNA, 19 nt, Artificial Sequence
  Description of Artificial Sequence: Synthetic oligonucleotide
aaauauaguaacucuuucu

SEQ ID NO: 3201808 - RNA, 19 nt, Artificial Sequence
  Description of Artificial Sequence: Synthetic oligonucleotide
gaaacaaggauaugcacag

SEQ ID NO: 3201809 - RNA, 19 nt, Artificial Sequence
  Description of Artificial Sequence: Synthetic oligonucleotide
aaggaguguguguauauac

SEQ ID NO: 3201810 - RNA, 19 nt, Artificial Sequence
  Description of Artificial Sequence: Synthetic oligonucleotide
aacuguaucaaagaaacga

SEQ ID NO: 3201811 - RNA, 19 nt, Artificial Sequence
  Description of Artificial Sequence: Synthetic oligonucleotide
aauguacucauuuguaugu

SEQ ID NO: 3201812 - RNA, 19 nt, Artificial Sequence
  Description of Artificial Sequence: Synthetic oligonucleotide
aaaguguucuaccaaauau

SEQ ID NO: 3201813 - RNA, 19 nt, Artificial Sequence
  Description of Artificial Sequence: Synthetic oligonucleotide
uguuuuagguaauagacaa

SEQ ID NO: 3201814 - RNA, 19 nt, Artificial Sequence
  Description of Artificial Sequence: Synthetic oligonucleotide
uucaaaauuuccuauuuga

SEQ ID NO: 3201815 - RNA, 19 nt, Artificial Sequence
  Description of Artificial Sequence: Synthetic oligonucleotide
cauugcauuggaaacaagg

SEQ ID NO: 3201816 - RNA, 19 nt, Artificial Sequence
  Description of Artificial Sequence: Synthetic oligonucleotide
uuaucaacuuuauauaggu

SEQ ID NO: 3201817 - RNA, 19 nt, Artificial Sequence
  Description of Artificial Sequence: Synthetic oligonucleotide
guugcaguacuuaagaagg

SEQ ID NO: 3201818 - RNA, 19 nt, Artificial Sequence
  Description of Artificial Sequence: Synthetic oligonucleotide
cuuuaucaacuuuauauag

SEQ ID NO: 3201819 - RNA, 19 nt, Artificial Sequence
  Description of Artificial Sequence: Synthetic oligonucleotide
auggugauaagguuuaaag

SEQ ID NO: 3201820 - RNA, 19 nt, Artificial Sequence
  Description of Artificial Sequence: Synthetic oligonucleotide
auagcaagugacauuagcc

SEQ ID NO: 3201821 - RNA, 19 nt, Artificial Sequence
  Description of Artificial Sequence: Synthetic oligonucleotide
uuucauuucauuucuuucu

SEQ ID NO: 3201822 - RNA, 19 nt, Artificial Sequence
  Description of Artificial Sequence: Synthetic oligonucleotide
ugucauugcaauaugccca

SEQ ID NO: 3201823 - RNA, 19 nt, Artificial Sequence
  Description of Artificial Sequence: Synthetic oligonucleotide
uuuaccacuccaugaaggg

SEQ ID NO: 3201824 - RNA, 19 nt, Artificial Sequence
  Description of Artificial Sequence: Synthetic oligonucleotide
gaauguacucauuuguaug

SEQ ID NO: 3201825 - RNA, 19 nt, Artificial Sequence
  Description of Artificial Sequence: Synthetic oligonucleotide
uaaaaugcacaguauuuca

SEQ ID NO: 3201826 - RNA, 19 nt, Artificial Sequence
  Description of Artificial Sequence: Synthetic oligonucleotide
uaauagacaaaggagugug

SEQ ID NO: 3201827 - RNA, 19 nt, Artificial Sequence
  Description of Artificial Sequence: Synthetic oligonucleotide
uguucagcuacauaugcac

SEQ ID NO: 3201828 - RNA, 19 nt, Artificial Sequence
  Description of Artificial Sequence: Synthetic oligonucleotide
acaguauuucaaaauuucc

SEQ ID NO: 3201829 - RNA, 19 nt, Artificial Sequence
  Description of Artificial Sequence: Synthetic oligonucleotide
ugaacuugugcaauguagu

SEQ ID NO: 3201830 - RNA, 19 nt, Artificial Sequence
  Description of Artificial Sequence: Synthetic oligonucleotide
uuguuuuagguaauagaca

SEQ ID NO: 3201831 - RNA, 19 nt, Artificial Sequence
  Description of Artificial Sequence: Synthetic oligonucleotide
aaaugcagaauguacucau

SEQ ID NO: 3201832 - RNA, 19 nt, Artificial Sequence
  Description of Artificial Sequence: Synthetic oligonucleotide
aguauuucaaaauuuccua

SEQ ID NO: 3201833 - RNA, 19 nt, Artificial Sequence
  Description of Artificial Sequence: Synthetic oligonucleotide
uucacuuuucauuucauuu

SEQ ID NO: 3201834 - RNA, 19 nt, Artificial Sequence
  Description of Artificial Sequence: Synthetic oligonucleotide
cagucuaacuguaucaaag

SEQ ID NO: 3201835 - RNA, 19 nt, Artificial Sequence
  Description of Artificial Sequence: Synthetic oligonucleotide
uuuucauuucauuucuuuc

SEQ ID NO: 3201836 - RNA, 19 nt, Artificial Sequence
  Description of Artificial Sequence: Synthetic oligonucleotide
acugucaaaaugucagguc

SEQ ID NO: 3201837 - RNA, 19 nt, Artificial Sequence
  Description of Artificial Sequence: Synthetic oligonucleotide
uaccuaugauaccauaccc

SEQ ID NO: 3201838 - RNA, 19 nt, Artificial Sequence
  Description of Artificial Sequence: Synthetic oligonucleotide
uaagguuuaaagucugccu

SEQ ID NO: 3201839 - RNA, 19 nt, Artificial Sequence
  Description of Artificial Sequence: Synthetic oligonucleotide
caauauacgcacacguacc

SEQ ID NO: 3201840 - RNA, 19 nt, Artificial Sequence
  Description of Artificial Sequence: Synthetic oligonucleotide
uggacacaugagaagagcc

SEQ ID NO: 3201841 - RNA, 19 nt, Artificial Sequence
  Description of Artificial Sequence: Synthetic oligonucleotide
acguaagcuuccuugagag

SEQ ID NO: 3201842 - RNA, 19 nt, Artificial Sequence
  Description of Artificial Sequence: Synthetic oligonucleotide
ucuacuuggggauuucugu

SEQ ID NO: 3201843 - RNA, 19 nt, Artificial Sequence
  Description of Artificial Sequence: Synthetic oligonucleotide
auuaaauucuaguggucca

SEQ ID NO: 3201844 - RNA, 19 nt, Artificial Sequence
  Description of Artificial Sequence: Synthetic oligonucleotide
ucacuuuucauuucauuuc

SEQ ID NO: 3201845 - RNA, 19 nt, Artificial Sequence
  Description of Artificial Sequence: Synthetic oligonucleotide
aagugguucugcaaguagg

SEQ ID NO: 3201846 - RNA, 19 nt, Artificial Sequence
  Description of Artificial Sequence: Synthetic oligonucleotide
auggguuuuaauuugucau

SEQ ID NO: 3201847 - RNA, 19 nt, Artificial Sequence
  Description of Artificial Sequence: Synthetic oligonucleotide
auguguauugguguguaac

SEQ ID NO: 3201848 - RNA, 19 nt, Artificial Sequence
  Description of Artificial Sequence: Synthetic oligonucleotide
auaggugagugcuaggccu

SEQ ID NO: 3201849 - RNA, 19 nt, Artificial Sequence
  Description of Artificial Sequence: Synthetic oligonucleotide
guaccuaugauaccauacc

SEQ ID NO: 3201850 - RNA, 19 nt, Artificial Sequence
  Description of Artificial Sequence: Synthetic oligonucleotide
aaauaaccuuuuccacuuc

SEQ ID NO: 3201851 - RNA, 19 nt, Artificial Sequence
  Description of Artificial Sequence: Synthetic oligonucleotide
guaaacuuuguaaaaggac

SEQ ID NO: 3201852 - RNA, 19 nt, Artificial Sequence
  Description of Artificial Sequence: Synthetic oligonucleotide
accauaaaauaaccuuuuc

SEQ ID NO: 3201853 - RNA, 19 nt, Artificial Sequence
  Description of Artificial Sequence: Synthetic oligonucleotide
gauaacacauguaugcaga

SEQ ID NO: 3201854 - RNA, 19 nt, Artificial Sequence
  Description of Artificial Sequence: Synthetic oligonucleotide
ucgcaauaguccaagcagc

SEQ ID NO: 3201855 - RNA, 19 nt, Artificial Sequence
  Description of Artificial Sequence: Synthetic oligonucleotide
gaucaagcaaagaauauaa

SEQ ID NO: 3201856 - RNA, 19 nt, Artificial Sequence
  Description of Artificial Sequence: Synthetic oligonucleotide
uggcuugaauuacagauau

SEQ ID NO: 3201857 - RNA, 19 nt, Artificial Sequence
  Description of Artificial Sequence: Synthetic oligonucleotide
aaaaccuguguugugaauu

SEQ ID NO: 3201858 - RNA, 19 nt, Artificial Sequence
  Description of Artificial Sequence: Synthetic oligonucleotide
guuuacuuaaggggaaggg

SEQ ID NO: 3201859 - RNA, 19 nt, Artificial Sequence
  Description of Artificial Sequence: Synthetic oligonucleotide
agaacacucguagaagagg

SEQ ID NO: 3201860 - RNA, 19 nt, Artificial Sequence
  Description of Artificial Sequence: Synthetic oligonucleotide
gauaggugagugcuaggcc

SEQ ID NO: 3201861 - RNA, 19 nt, Artificial Sequence
  Description of Artificial Sequence: Synthetic oligonucleotide
ugcacaaaauagaaauaaa

SEQ ID NO: 3201862 - RNA, 19 nt, Artificial Sequence
  Description of Artificial Sequence: Synthetic oligonucleotide
uucuaccaaauauucuccc

SEQ ID NO: 3201863 - RNA, 19 nt, Artificial Sequence
  Description of Artificial Sequence: Synthetic oligonucleotide
aaaggcaugugauucuguu

SEQ ID NO: 3201864 - RNA, 19 nt, Artificial Sequence
  Description of Artificial Sequence: Synthetic oligonucleotide
agucuaacuguaucaaaga

SEQ ID NO: 3201865 - RNA, 19 nt, Artificial Sequence
  Description of Artificial Sequence: Synthetic oligonucleotide
uacguaagcuuccuugaga

SEQ ID NO: 3201866 - RNA, 19 nt, Artificial Sequence
  Description of Artificial Sequence: Synthetic oligonucleotide
ugugaacacuggcugaacu

SEQ ID NO: 3201867 - RNA, 19 nt, Artificial Sequence
  Description of Artificial Sequence: Synthetic oligonucleotide
aucacuucuacuuggggau

SEQ ID NO: 3201868 - RNA, 19 nt, Artificial Sequence
  Description of Artificial Sequence: Synthetic oligonucleotide
agcguggggaaguugccgc

SEQ ID NO: 3201869 - RNA, 19 nt, Artificial Sequence
  Description of Artificial Sequence: Synthetic oligonucleotide
gauauucugcccaucuuug

SEQ ID NO: 3201870 - RNA, 19 nt, Artificial Sequence
  Description of Artificial Sequence: Synthetic oligonucleotide
agagccagaaaucuccaga

SEQ ID NO: 3201871 - RNA, 19 nt, Artificial Sequence
  Description of Artificial Sequence: Synthetic oligonucleotide
ucgagcguggggaaguugc

SEQ ID NO: 3201872 - RNA, 19 nt, Artificial Sequence
  Description of Artificial Sequence: Synthetic oligonucleotide
cauuguuuuagguaauaga

SEQ ID NO: 3201873 - RNA, 19 nt, Artificial Sequence
  Description of Artificial Sequence: Synthetic oligonucleotide
cucucgccaauuauugugg

SEQ ID NO: 3201874 - RNA, 19 nt, Artificial Sequence
  Description of Artificial Sequence: Synthetic oligonucleotide
uucuacuuggggauuucug

SEQ ID NO: 3201875 - RNA, 19 nt, Artificial Sequence
  Description of Artificial Sequence: Synthetic oligonucleotide
aauuuccuauuugauacau

SEQ ID NO: 3201876 - RNA, 19 nt, Artificial Sequence
  Description of Artificial Sequence: Synthetic oligonucleotide
uaugcacaguaaagcaacc

SEQ ID NO: 3201877 - RNA, 19 nt, Artificial Sequence
  Description of Artificial Sequence: Synthetic oligonucleotide
ucuaugauccuaccauaaa

SEQ ID NO: 3201878 - RNA, 19 nt, Artificial Sequence
  Description of Artificial Sequence: Synthetic oligonucleotide
uauguaguugugacaaaua

SEQ ID NO: 3201879 - RNA, 19 nt, Artificial Sequence
  Description of Artificial Sequence: Synthetic oligonucleotide
uaugaggcuccaccggucc

SEQ ID NO: 3201880 - RNA, 19 nt, Artificial Sequence
  Description of Artificial Sequence: Synthetic oligonucleotide
agcggugugaucuucuccu

SEQ ID NO: 3201881 - RNA, 19 nt, Artificial Sequence
  Description of Artificial Sequence: Synthetic oligonucleotide
ucgaacugccuccggagag

SEQ ID NO: 3201882 - RNA, 19 nt, Artificial Sequence
  Description of Artificial Sequence: Synthetic oligonucleotide
ucauuucauuucuuucuug

SEQ ID NO: 3201883 - RNA, 19 nt, Artificial Sequence
  Description of Artificial Sequence: Synthetic oligonucleotide
agcaaugcuucccuggacu

SEQ ID NO: 3201884 - RNA, 19 nt, Artificial Sequence
  Description of Artificial Sequence: Synthetic oligonucleotide
uucauuucauuucuuucuu

SEQ ID NO: 3201885 - RNA, 19 nt, Artificial Sequence
  Description of Artificial Sequence: Synthetic oligonucleotide
ugugacaaauacucuuuaa

SEQ ID NO: 3201886 - RNA, 19 nt, Artificial Sequence
  Description of Artificial Sequence: Synthetic oligonucleotide
cagaaguugucuugaacac

SEQ ID NO: 3201887 - RNA, 19 nt, Artificial Sequence
  Description of Artificial Sequence: Synthetic oligonucleotide
auugcauuggaaacaagga

SEQ ID NO: 3201888 - RNA, 19 nt, Artificial Sequence
  Description of Artificial Sequence: Synthetic oligonucleotide
ugaucaagcaaagaauaua

SEQ ID NO: 3201889 - RNA, 19 nt, Artificial Sequence
  Description of Artificial Sequence: Synthetic oligonucleotide
gagccagaaaucuccagac

SEQ ID NO: 3201890 - RNA, 19 nt, Artificial Sequence
  Description of Artificial Sequence: Synthetic oligonucleotide
guaguaauugcuaaaguua

SEQ ID NO: 3201891 - RNA, 19 nt, Artificial Sequence
  Description of Artificial Sequence: Synthetic oligonucleotide
uacuuaaggggaaggggcu

SEQ ID NO: 3201892 - RNA, 19 nt, Artificial Sequence
  Description of Artificial Sequence: Synthetic oligonucleotide
ucugcaagaugagcaaugc

SEQ ID NO: 3201893 - RNA, 19 nt, Artificial Sequence
  Description of Artificial Sequence: Synthetic oligonucleotide
aagcccacgaagugguucu

SEQ ID NO: 3201894 - RNA, 19 nt, Artificial Sequence
  Description of Artificial Sequence: Synthetic oligonucleotide
aaaccuguguugugaauua

SEQ ID NO: 3201895 - RNA, 19 nt, Artificial Sequence
  Description of Artificial Sequence: Synthetic oligonucleotide
caaugaucuuguugcaaag

SEQ ID NO: 3201896 - RNA, 19 nt, Artificial Sequence
  Description of Artificial Sequence: Synthetic oligonucleotide
cucaggaugccguccagcc

SEQ ID NO: 3201897 - RNA, 19 nt, Artificial Sequence
  Description of Artificial Sequence: Synthetic oligonucleotide
uuauuuauuauauauagug

SEQ ID NO: 3201898 - RNA, 19 nt, Artificial Sequence
  Description of Artificial Sequence: Synthetic oligonucleotide
uuuuauuuauuauauauag

SEQ ID NO: 3201899 - RNA, 19 nt, Artificial Sequence
  Description of Artificial Sequence: Synthetic oligonucleotide
uauuuauuauauauagugg

SEQ ID NO: 3201900 - RNA, 19 nt, Artificial Sequence
  Description of Artificial Sequence: Synthetic oligonucleotide
aaucccagcacucaggagg

SEQ ID NO: 3201901 - RNA, 19 nt, Artificial Sequence
  Description of Artificial Sequence: Synthetic oligonucleotide
auuuauuauauauaguggu

SEQ ID NO: 3201902 - RNA, 19 nt, Artificial Sequence
  Description of Artificial Sequence: Synthetic oligonucleotide
uuauuauauauaguggugg

SEQ ID NO: 3201903 - RNA, 19 nt, Artificial Sequence
  Description of Artificial Sequence: Synthetic oligonucleotide
uuuauuauauauaguggug

SEQ ID NO: 3201904 - RNA, 19 nt, Artificial Sequence
  Description of Artificial Sequence: Synthetic oligonucleotide
gucucuguuaguuugaggc

SEQ ID NO: 3201905 - RNA, 19 nt, Artificial Sequence
  Description of Artificial Sequence: Synthetic oligonucleotide
uuuauuuauuauauauagu

SEQ ID NO: 3201906 - RNA, 19 nt, Artificial Sequence
  Description of Artificial Sequence: Synthetic oligonucleotide
uuuaaucccagcacucagg

SEQ ID NO: 3201907 - RNA, 19 nt, Artificial Sequence
  Description of Artificial Sequence: Synthetic oligonucleotide
acagucagggcauauacag

SEQ ID NO: 3201908 - RNA, 19 nt, Artificial Sequence
  Description of Artificial Sequence: Synthetic oligonucleotide
uauuauauauagugguggc

SEQ ID NO: 3201909 - RNA, 19 nt, Artificial Sequence
  Description of Artificial Sequence: Synthetic oligonucleotide
uuaguuugaggccagccug

SEQ ID NO: 3201910 - RNA, 19 nt, Artificial Sequence
  Description of Artificial Sequence: Synthetic oligonucleotide
uuugaggccagccuggucu

SEQ ID NO: 3201911 - RNA, 19 nt, Artificial Sequence
  Description of Artificial Sequence: Synthetic oligonucleotide
uauacagugaaagucaguc

SEQ ID NO: 3201912 - RNA, 19 nt, Artificial Sequence
  Description of Artificial Sequence: Synthetic oligonucleotide
augucuuuaaucccagcac

SEQ ID NO: 3201913 - RNA, 19 nt, Artificial Sequence
  Description of Artificial Sequence: Synthetic oligonucleotide
uggcucaugucuuuaaucc

SEQ ID NO: 3201914 - RNA, 19 nt, Artificial Sequence
  Description of Artificial Sequence: Synthetic oligonucleotide
ugaaagucagucuaagaaa

SEQ ID NO: 3201915 - RNA, 19 nt, Artificial Sequence
  Description of Artificial Sequence: Synthetic oligonucleotide
uacagagugaguuccagga

SEQ ID NO: 3201916 - RNA, 19 nt, Artificial Sequence
  Description of Artificial Sequence: Synthetic oligonucleotide
agucagggcauauacagug

SEQ ID NO: 3201917 - RNA, 19 nt, Artificial Sequence
  Description of Artificial Sequence: Synthetic oligonucleotide
aguuccaggacagucaggg

SEQ ID NO: 3201918 - RNA, 19 nt, Artificial Sequence
  Description of Artificial Sequence: Synthetic oligonucleotide
ugucuuuaaucccagcacu

SEQ ID NO: 3201919 - RNA, 19 nt, Artificial Sequence
  Description of Artificial Sequence: Synthetic oligonucleotide
uuauauauagugguggcuc

SEQ ID NO: 3201920 - RNA, 19 nt, Artificial Sequence
  Description of Artificial Sequence: Synthetic oligonucleotide
uacagugaaagucagucua

SEQ ID NO: 3201921 - RNA, 19 nt, Artificial Sequence
  Description of Artificial Sequence: Synthetic oligonucleotide
auagugguggcucaugucu

SEQ ID NO: 3201922 - RNA, 19 nt, Artificial Sequence
  Description of Artificial Sequence: Synthetic oligonucleotide
uuaaucccagcacucagga

SEQ ID NO: 3201923 - RNA, 19 nt, Artificial Sequence
  Description of Artificial Sequence: Synthetic oligonucleotide
uuccaggacagucagggca

SEQ ID NO: 3201924 - RNA, 19 nt, Artificial Sequence
  Description of Artificial Sequence: Synthetic oligonucleotide
ugaguuccaggacagucag

SEQ ID NO: 3201925 - RNA, 19 nt, Artificial Sequence
  Description of Artificial Sequence: Synthetic oligonucleotide
gugaaagucagucuaagaa

SEQ ID NO: 3201926 - RNA, 19 nt, Artificial Sequence
  Description of Artificial Sequence: Synthetic oligonucleotide
agggcauauacagugaaag

SEQ ID NO: 3201927 - RNA, 19 nt, Artificial Sequence
  Description of Artificial Sequence: Synthetic oligonucleotide
cauauacagugaaagucag

SEQ ID NO: 3201928 - RNA, 19 nt, Artificial Sequence
  Description of Artificial Sequence: Synthetic oligonucleotide
uauauauagugguggcuca

SEQ ID NO: 3201929 - RNA, 19 nt, Artificial Sequence
  Description of Artificial Sequence: Synthetic oligonucleotide
uaguuugaggccagccugg

SEQ ID NO: 3201930 - RNA, 19 nt, Artificial Sequence
  Description of Artificial Sequence: Synthetic oligonucleotide
agugaguuccaggacaguc

SEQ ID NO: 3201931 - RNA, 19 nt, Artificial Sequence
  Description of Artificial Sequence: Synthetic oligonucleotide
gaaagucagucuaagaaaa

SEQ ID NO: 3201932 - RNA, 19 nt, Artificial Sequence
  Description of Artificial Sequence: Synthetic oligonucleotide
ucucuguuaguuugaggcc

SEQ ID NO: 3201933 - RNA, 19 nt, Artificial Sequence
  Description of Artificial Sequence: Synthetic oligonucleotide
acagagugaguuccaggac

SEQ ID NO: 3201934 - RNA, 19 nt, Artificial Sequence
  Description of Artificial Sequence: Synthetic oligonucleotide
cuuuaaucccagcacucag

SEQ ID NO: 3201935 - RNA, 19 nt, Artificial Sequence
  Description of Artificial Sequence: Synthetic oligonucleotide
ucuguuaguuugaggccag

SEQ ID NO: 3201936 - RNA, 19 nt, Artificial Sequence
  Description of Artificial Sequence: Synthetic oligonucleotide
auauagugguggcucaugu

SEQ ID NO: 3201937 - RNA, 19 nt, Artificial Sequence
  Description of Artificial Sequence: Synthetic oligonucleotide
caugucuuuaaucccagca

SEQ ID NO: 3201938 - RNA, 19 nt, Artificial Sequence
  Description of Artificial Sequence: Synthetic oligonucleotide
auuauauauagugguggcu

SEQ ID NO: 3201939 - RNA, 19 nt, Artificial Sequence
  Description of Artificial Sequence: Synthetic oligonucleotide
ucuuuaaucccagcacuca

SEQ ID NO: 3201940 - RNA, 19 nt, Artificial Sequence
  Description of Artificial Sequence: Synthetic oligonucleotide
agugaaagucagucuaaga

SEQ ID NO: 3201941 - RNA, 19 nt, Artificial Sequence
  Description of Artificial Sequence: Synthetic oligonucleotide
uguuaguuugaggccagcc

SEQ ID NO: 3201942 - RNA, 19 nt, Artificial Sequence
  Description of Artificial Sequence: Synthetic oligonucleotide
cuacagagugaguuccagg

SEQ ID NO: 3201943 - RNA, 19 nt, Artificial Sequence
  Description of Artificial Sequence: Synthetic oligonucleotide
ucuacagagugaguuccag

SEQ ID NO: 3201944 - RNA, 19 nt, Artificial Sequence
  Description of Artificial Sequence: Synthetic oligonucleotide
auacagugaaagucagucu

SEQ ID NO: 3201945 - RNA, 19 nt, Artificial Sequence
  Description of Artificial Sequence: Synthetic oligonucleotide
ucagggcauauacagugaa

SEQ ID NO: 3201946 - RNA, 19 nt, Artificial Sequence
  Description of Artificial Sequence: Synthetic oligonucleotide
gugggucucuguuaguuug

SEQ ID NO: 3201947 - RNA, 19 nt, Artificial Sequence
  Description of Artificial Sequence: Synthetic oligonucleotide
ggcauauacagugaaaguc

SEQ ID NO: 3201948 - RNA, 19 nt, Artificial Sequence
  Description of Artificial Sequence: Synthetic oligonucleotide
uauauagugguggcucaug

SEQ ID NO: 3201949 - RNA, 19 nt, Artificial Sequence
  Description of Artificial Sequence: Synthetic oligonucleotide
cucaugucuuuaaucccag

SEQ ID NO: 3201950 - RNA, 19 nt, Artificial Sequence
  Description of Artificial Sequence: Synthetic oligonucleotide
gcacucaggaggcagaggc

SEQ ID NO: 3201951 - RNA, 19 nt, Artificial Sequence
  Description of Artificial Sequence: Synthetic oligonucleotide
uauagugguggcucauguc

SEQ ID NO: 3201952 - RNA, 19 nt, Artificial Sequence
  Description of Artificial Sequence: Synthetic oligonucleotide
agagugaguuccaggacag

SEQ ID NO: 3201953 - RNA, 19 nt, Artificial Sequence
  Description of Artificial Sequence: Synthetic oligonucleotide
uggucuacagagugaguuc

SEQ ID NO: 3201954 - RNA, 19 nt, Artificial Sequence
  Description of Artificial Sequence: Synthetic oligonucleotide
aucccagcacucaggaggc

SEQ ID NO: 3201955 - RNA, 19 nt, Artificial Sequence
  Description of Artificial Sequence: Synthetic oligonucleotide
uccaggacagucagggcau

SEQ ID NO: 3201956 - RNA, 19 nt, Artificial Sequence
  Description of Artificial Sequence: Synthetic oligonucleotide
ggaggcagaggcgaggugg

SEQ ID NO: 3201957 - RNA, 19 nt, Artificial Sequence
  Description of Artificial Sequence: Synthetic oligonucleotide
cagagugaguuccaggaca

SEQ ID NO: 3201958 - RNA, 19 nt, Artificial Sequence
  Description of Artificial Sequence: Synthetic oligonucleotide
uaaucccagcacucaggag

SEQ ID NO: 3201959 - RNA, 19 nt, Artificial Sequence
  Description of Artificial Sequence: Synthetic oligonucleotide
ucaugucuuuaaucccagc

SEQ ID NO: 3201960 - RNA, 19 nt, Artificial Sequence
  Description of Artificial Sequence: Synthetic oligonucleotide
gcauauacagugaaaguca

SEQ ID NO: 3201961 - RNA, 19 nt, Artificial Sequence
  Description of Artificial Sequence: Synthetic oligonucleotide
ucaggaggcagaggcgagg

SEQ ID NO: 3201962 - RNA, 19 nt, Artificial Sequence
  Description of Artificial Sequence: Synthetic oligonucleotide
guggcucaugucuuuaauc

SEQ ID NO: 3201963 - RNA, 19 nt, Artificial Sequence
  Description of Artificial Sequence: Synthetic oligonucleotide
ggacagucagggcauauac

SEQ ID NO: 3201964 - RNA, 19 nt, Artificial Sequence
  Description of Artificial Sequence: Synthetic oligonucleotide
guuaguuugaggccagccu

SEQ ID NO: 3201965 - RNA, 19 nt, Artificial Sequence
  Description of Artificial Sequence: Synthetic oligonucleotide
cagccuggucuacagagug

SEQ ID NO: 3201966 - RNA, 19 nt, Artificial Sequence
  Description of Artificial Sequence: Synthetic oligonucleotide
ugggucucuguuaguuuga

SEQ ID NO: 3201967 - RNA, 19 nt, Artificial Sequence
  Description of Artificial Sequence: Synthetic oligonucleotide
cacucaggaggcagaggcg

SEQ ID NO: 3201968 - RNA, 19 nt, Artificial Sequence
  Description of Artificial Sequence: Synthetic oligonucleotide
gccagccuggucuacagag

SEQ ID NO: 3201969 - RNA, 19 nt, Artificial Sequence
  Description of Artificial Sequence: Synthetic oligonucleotide
ggucuacagagugaguucc

SEQ ID NO: 3201970 - RNA, 19 nt, Artificial Sequence
  Description of Artificial Sequence: Synthetic oligonucleotide
cagugaaagucagucuaag

SEQ ID NO: 3201971 - RNA, 19 nt, Artificial Sequence
  Description of Artificial Sequence: Synthetic oligonucleotide
acucaggaggcagaggcga

SEQ ID NO: 3201972 - RNA, 19 nt, Artificial Sequence
  Description of Artificial Sequence: Synthetic oligonucleotide
cucuguuaguuugaggcca

SEQ ID NO: 3201973 - RNA, 19 nt, Artificial Sequence
  Description of Artificial Sequence: Synthetic oligonucleotide
gaggcagaggcgagguggg

SEQ ID NO: 3201974 - RNA, 19 nt, Artificial Sequence
  Description of Artificial Sequence: Synthetic oligonucleotide
ggcucaugucuuuaauccc

SEQ ID NO: 3201975 - RNA, 19 nt, Artificial Sequence
  Description of Artificial Sequence: Synthetic oligonucleotide
ggucucuguuaguuugagg

SEQ ID NO: 3201976 - RNA, 19 nt, Artificial Sequence
  Description of Artificial Sequence: Synthetic oligonucleotide
gucuuuaaucccagcacuc

SEQ ID NO: 3201977 - RNA, 19 nt, Artificial Sequence
  Description of Artificial Sequence: Synthetic oligonucleotide
gugaguuccaggacaguca

SEQ ID NO: 3201978 - RNA, 19 nt, Artificial Sequence
  Description of Artificial Sequence: Synthetic oligonucleotide
gacagucagggcauauaca

SEQ ID NO: 3201979 - RNA, 19 nt, Artificial Sequence
  Description of Artificial Sequence: Synthetic oligonucleotide
uagugguggcucaugucuu

SEQ ID NO: 3201980 - RNA, 19 nt, Artificial Sequence
  Description of Artificial Sequence: Synthetic oligonucleotide
auauacagugaaagucagu

SEQ ID NO: 3201981 - RNA, 19 nt, Artificial Sequence
  Description of Artificial Sequence: Synthetic oligonucleotide
cucaggaggcagaggcgag

SEQ ID NO: 3201982 - RNA, 19 nt, Artificial Sequence
  Description of Artificial Sequence: Synthetic oligonucleotide
auauauagugguggcucau

SEQ ID NO: 3201983 - RNA, 19 nt, Artificial Sequence
  Description of Artificial Sequence: Synthetic oligonucleotide
aggccagccuggucuacag

SEQ ID NO: 3201984 - RNA, 19 nt, Artificial Sequence
  Description of Artificial Sequence: Synthetic oligonucleotide
guuccaggacagucagggc

SEQ ID NO: 3201985 - RNA, 19 nt, Artificial Sequence
  Description of Artificial Sequence: Synthetic oligonucleotide
acagugaaagucagucuaa

SEQ ID NO: 3201986 - RNA, 19 nt, Artificial Sequence
  Description of Artificial Sequence: Synthetic oligonucleotide
gaguuccaggacagucagg

SEQ ID NO: 3201987 - RNA, 19 nt, Artificial Sequence
  Description of Artificial Sequence: Synthetic oligonucleotide
ugguggcucaugucuuuaa

SEQ ID NO: 3201988 - RNA, 19 nt, Artificial Sequence
  Description of Artificial Sequence: Synthetic oligonucleotide
agugguggcucaugucuuu

SEQ ID NO: 3201989 - RNA, 19 nt, Artificial Sequence
  Description of Artificial Sequence: Synthetic oligonucleotide
gcucaugucuuuaauccca

SEQ ID NO: 3201990 - RNA, 19 nt, Artificial Sequence
  Description of Artificial Sequence: Synthetic oligonucleotide
gccuggucuacagagugag

SEQ ID NO: 3201991 - RNA, 19 nt, Artificial Sequence
  Description of Artificial Sequence: Synthetic oligonucleotide
agcacucaggaggcagagg

SEQ ID NO: 3201992 - RNA, 19 nt, Artificial Sequence
  Description of Artificial Sequence: Synthetic oligonucleotide
aggugggucucuguuaguu

SEQ ID NO: 3201993 - RNA, 19 nt, Artificial Sequence
  Description of Artificial Sequence: Synthetic oligonucleotide
uugaggccagccuggucua

SEQ ID NO: 3201994 - RNA, 19 nt, Artificial Sequence
  Description of Artificial Sequence: Synthetic oligonucleotide
aguuugaggccagccuggu

SEQ ID NO: 3201995 - RNA, 19 nt, Artificial Sequence
  Description of Artificial Sequence: Synthetic oligonucleotide
cagcacucaggaggcagag

SEQ ID NO: 3201996 - RNA, 19 nt, Artificial Sequence
  Description of Artificial Sequence: Synthetic oligonucleotide
cgaggugggucucuguuag

SEQ ID NO: 3201997 - RNA, 19 nt, Artificial Sequence
  Description of Artificial Sequence: Synthetic oligonucleotide
uauauauauauauauauac

SEQ ID NO: 3201998 - RNA, 19 nt, Artificial Sequence
  Description of Artificial Sequence: Synthetic oligonucleotide
auauauauuauauauauau

SEQ ID NO: 3201999 - RNA, 19 nt, Artificial Sequence
  Description of Artificial Sequence: Synthetic oligonucleotide
uauauauacauauauauau

SEQ ID NO: 3202000 - RNA, 19 nt, Artificial Sequence
  Description of Artificial Sequence: Synthetic oligonucleotide
uauauauauacauauauau

SEQ ID NO: 3202001 - RNA, 19 nt, Artificial Sequence
  Description of Artificial Sequence: Synthetic oligonucleotide
uauauauauauauauauau

SEQ ID NO: 3202002 - RNA, 19 nt, Artificial Sequence
  Description of Artificial Sequence: Synthetic oligonucleotide
uauauauauauacauauau

SEQ ID NO: 3202003 - RNA, 19 nt, Artificial Sequence
  Description of Artificial Sequence: Synthetic oligonucleotide
uauauauauauuauucaag

SEQ ID NO: 3202004 - RNA, 19 nt, Artificial Sequence
  Description of Artificial Sequence: Synthetic oligonucleotide
uauauauauauauacauau

SEQ ID NO: 3202005 - RNA, 19 nt, Artificial Sequence
  Description of Artificial Sequence: Synthetic oligonucleotide
auauauauauauuauauau

SEQ ID NO: 3202006 - RNA, 19 nt, Artificial Sequence
  Description of Artificial Sequence: Synthetic oligonucleotide
auuauauauauauauauau

SEQ ID NO: 3202007 - RNA, 19 nt, Artificial Sequence
  Description of Artificial Sequence: Synthetic oligonucleotide
uauacauauauauauauau

SEQ ID NO: 3202008 - RNA, 19 nt, Artificial Sequence
  Description of Artificial Sequence: Synthetic oligonucleotide
uauauauauauauauauua

SEQ ID NO: 3202009 - RNA, 19 nt, Artificial Sequence
  Description of Artificial Sequence: Synthetic oligonucleotide
acuguugucuccuucagcc

SEQ ID NO: 3202010 - RNA, 19 nt, Artificial Sequence
  Description of Artificial Sequence: Synthetic oligonucleotide
auauauauauuauauauau

SEQ ID NO: 3202011 - RNA, 19 nt, Artificial Sequence
  Description of Artificial Sequence: Synthetic oligonucleotide
uauauauauauauauacau

SEQ ID NO: 3202012 - RNA, 19 nt, Artificial Sequence
  Description of Artificial Sequence: Synthetic oligonucleotide
auauauauauauauuauuc

SEQ ID NO: 3202013 - RNA, 19 nt, Artificial Sequence
  Description of Artificial Sequence: Synthetic oligonucleotide
auauauuauauauauauau

SEQ ID NO: 3202014 - RNA, 19 nt, Artificial Sequence
  Description of Artificial Sequence: Synthetic oligonucleotide
auauauauauuauucaagu

SEQ ID NO: 3202015 - RNA, 19 nt, Artificial Sequence
  Description of Artificial Sequence: Synthetic oligonucleotide
auauauauuauucaaguau

SEQ ID NO: 3202016 - RNA, 19 nt, Artificial Sequence
  Description of Artificial Sequence: Synthetic oligonucleotide
uauauauauauauuauuca

SEQ ID NO: 3202017 - RNA, 19 nt, Artificial Sequence
  Description of Artificial Sequence: Synthetic oligonucleotide
auauuauauauauauauau

SEQ ID NO: 3202018 - RNA, 19 nt, Artificial Sequence
  Description of Artificial Sequence: Synthetic oligonucleotide
uaugcauauauauauauau

SEQ ID NO: 3202019 - RNA, 19 nt, Artificial Sequence
  Description of Artificial Sequence: Synthetic oligonucleotide
uacauauauauauauauau

SEQ ID NO: 3202020 - RNA, 19 nt, Artificial Sequence
  Description of Artificial Sequence: Synthetic oligonucleotide
ugcauauauauauauauau

SEQ ID NO: 3202021 - RNA, 19 nt, Artificial Sequence
  Description of Artificial Sequence: Synthetic oligonucleotide
uauauacauauauauauau

SEQ ID NO: 3202022 - RNA, 19 nt, Artificial Sequence
  Description of Artificial Sequence: Synthetic oligonucleotide
auauuauucaaguauugca

SEQ ID NO: 3202023 - RNA, 19 nt, Artificial Sequence
  Description of Artificial Sequence: Synthetic oligonucleotide
uauauuauauauauauaua

SEQ ID NO: 3202024 - RNA, 19 nt, Artificial Sequence
  Description of Artificial Sequence: Synthetic oligonucleotide
uauuauucaaguauugcau

SEQ ID NO: 3202025 - RNA, 19 nt, Artificial Sequence
  Description of Artificial Sequence: Synthetic oligonucleotide
cucuucauuuucuugaggg

SEQ ID NO: 3202026 - RNA, 19 nt, Artificial Sequence
  Description of Artificial Sequence: Synthetic oligonucleotide
auuauucaaguauugcauc

SEQ ID NO: 3202027 - RNA, 19 nt, Artificial Sequence
  Description of Artificial Sequence: Synthetic oligonucleotide
uaucuaugcauauauauau

SEQ ID NO: 3202028 - RNA, 19 nt, Artificial Sequence
  Description of Artificial Sequence: Synthetic oligonucleotide
uauguaucuaugcauauau

SEQ ID NO: 3202029 - RNA, 19 nt, Artificial Sequence
  Description of Artificial Sequence: Synthetic oligonucleotide
uauauauuauucaaguauu

SEQ ID NO: 3202030 - RNA, 19 nt, Artificial Sequence
  Description of Artificial Sequence: Synthetic oligonucleotide
auauauauauauuauucaa

SEQ ID NO: 3202031 - RNA, 19 nt, Artificial Sequence
  Description of Artificial Sequence: Synthetic oligonucleotide
uguaucuaugcauauauau

SEQ ID NO: 3202032 - RNA, 19 nt, Artificial Sequence
  Description of Artificial Sequence: Synthetic oligonucleotide
uauauauauauauauuaua

SEQ ID NO: 3202033 - RNA, 19 nt, Artificial Sequence
  Description of Artificial Sequence: Synthetic oligonucleotide
cuuuaaaccaccuaugcca

SEQ ID NO: 3202034 - RNA, 19 nt, Artificial Sequence
  Description of Artificial Sequence: Synthetic oligonucleotide
uauuauauauauauauaua

SEQ ID NO: 3202035 - RNA, 19 nt, Artificial Sequence
  Description of Artificial Sequence: Synthetic oligonucleotide
uuauauauauauauauaua

SEQ ID NO: 3202036 - RNA, 19 nt, Artificial Sequence
  Description of Artificial Sequence: Synthetic oligonucleotide
uauauauauauuauauaua

SEQ ID NO: 3202037 - RNA, 19 nt, Artificial Sequence
  Description of Artificial Sequence: Synthetic oligonucleotide
uuauucaaguauugcaucc

SEQ ID NO: 3202038 - RNA, 19 nt, Artificial Sequence
  Description of Artificial Sequence: Synthetic oligonucleotide
uauauauauauauauuauu

SEQ ID NO: 3202039 - RNA, 19 nt, Artificial Sequence
  Description of Artificial Sequence: Synthetic oligonucleotide
uauauuauucaaguauugc

SEQ ID NO: 3202040 - RNA, 19 nt, Artificial Sequence
  Description of Artificial Sequence: Synthetic oligonucleotide
uggucuuugagcaucugag

SEQ ID NO: 3202041 - RNA, 19 nt, Artificial Sequence
  Description of Artificial Sequence: Synthetic oligonucleotide
uauauauuauauauauaua

SEQ ID NO: 3202042 - RNA, 19 nt, Artificial Sequence
  Description of Artificial Sequence: Synthetic oligonucleotide
ucacuucuggucuuggugg

SEQ ID NO: 3202043 - RNA, 19 nt, Artificial Sequence
  Description of Artificial Sequence: Synthetic oligonucleotide
uauauauauauauuauaua

SEQ ID NO: 3202044 - RNA, 19 nt, Artificial Sequence
  Description of Artificial Sequence: Synthetic oligonucleotide
auauauauauauauuauau

SEQ ID NO: 3202045 - RNA, 19 nt, Artificial Sequence
  Description of Artificial Sequence: Synthetic oligonucleotide
agccuuuccuuccucaucc

SEQ ID NO: 3202046 - RNA, 19 nt, Artificial Sequence
  Description of Artificial Sequence: Synthetic oligonucleotide
ugguuauugucacuucugg

SEQ ID NO: 3202047 - RNA, 19 nt, Artificial Sequence
  Description of Artificial Sequence: Synthetic oligonucleotide
auucucuucauuuucuuga

SEQ ID NO: 3202048 - RNA, 19 nt, Artificial Sequence
  Description of Artificial Sequence: Synthetic oligonucleotide
uuauugucacuucuggucu

SEQ ID NO: 3202049 - RNA, 19 nt, Artificial Sequence
  Description of Artificial Sequence: Synthetic oligonucleotide
auugcaucccuucaugcuc

SEQ ID NO: 3202050 - RNA, 19 nt, Artificial Sequence
  Description of Artificial Sequence: Synthetic oligonucleotide
ucuaugcauauauauauau

SEQ ID NO: 3202051 - RNA, 19 nt, Artificial Sequence
  Description of Artificial Sequence: Synthetic oligonucleotide
ugcuuuaaaccaccuaugc

SEQ ID NO: 3202052 - RNA, 19 nt, Artificial Sequence
  Description of Artificial Sequence: Synthetic oligonucleotide
guuauugucacuucugguc

SEQ ID NO: 3202053 - RNA, 19 nt, Artificial Sequence
  Description of Artificial Sequence: Synthetic oligonucleotide
ucuugguggucuuugagca

SEQ ID NO: 3202054 - RNA, 19 nt, Artificial Sequence
  Description of Artificial Sequence: Synthetic oligonucleotide
uuuaaaccaccuaugccac

SEQ ID NO: 3202055 - RNA, 19 nt, Artificial Sequence
  Description of Artificial Sequence: Synthetic oligonucleotide
uauauauauuauucaagua

SEQ ID NO: 3202056 - RNA, 19 nt, Artificial Sequence
  Description of Artificial Sequence: Synthetic oligonucleotide
aagaguccuuguuuuguuc

SEQ ID NO: 3202057 - RNA, 19 nt, Artificial Sequence
  Description of Artificial Sequence: Synthetic oligonucleotide
guuuuguucauucucuuca

SEQ ID NO: 3202058 - RNA, 19 nt, Artificial Sequence
  Description of Artificial Sequence: Synthetic oligonucleotide
auauauauauauauauaca

SEQ ID NO: 3202059 - RNA, 19 nt, Artificial Sequence
  Description of Artificial Sequence: Synthetic oligonucleotide
uauauauauuauauauaua

SEQ ID NO: 3202060 - RNA, 19 nt, Artificial Sequence
  Description of Artificial Sequence: Synthetic oligonucleotide
ucuuacgucccauguaugc

SEQ ID NO: 3202061 - RNA, 19 nt, Artificial Sequence
  Description of Artificial Sequence: Synthetic oligonucleotide
cauauauauauauauauau

SEQ ID NO: 3202062 - RNA, 19 nt, Artificial Sequence
  Description of Artificial Sequence: Synthetic oligonucleotide
uuaucuuguccacuguugu

SEQ ID NO: 3202063 - RNA, 19 nt, Artificial Sequence
  Description of Artificial Sequence: Synthetic oligonucleotide
uaugcccugcuuuaaacca

SEQ ID NO: 3202064 - RNA, 19 nt, Artificial Sequence
  Description of Artificial Sequence: Synthetic oligonucleotide
uucauuuucuugagggcug

SEQ ID NO: 3202065 - RNA, 19 nt, Artificial Sequence
  Description of Artificial Sequence: Synthetic oligonucleotide
ucaaguauugcaucccuuc

SEQ ID NO: 3202066 - RNA, 19 nt, Artificial Sequence
  Description of Artificial Sequence: Synthetic oligonucleotide
aguauugcaucccuucaug

SEQ ID NO: 3202067 - RNA, 19 nt, Artificial Sequence
  Description of Artificial Sequence: Synthetic oligonucleotide
ucuuugagcaucugagucu

SEQ ID NO: 3202068 - RNA, 19 nt, Artificial Sequence
  Description of Artificial Sequence: Synthetic oligonucleotide
uuuccuuccucauccacug

SEQ ID NO: 3202069 - RNA, 19 nt, Artificial Sequence
  Description of Artificial Sequence: Synthetic oligonucleotide
uucauucucuucauuuucu

SEQ ID NO: 3202070 - RNA, 19 nt, Artificial Sequence
  Description of Artificial Sequence: Synthetic oligonucleotide
auauauauauauauauuau

SEQ ID NO: 3202071 - RNA, 19 nt, Artificial Sequence
  Description of Artificial Sequence: Synthetic oligonucleotide
uuuucuugagggcugguua

SEQ ID NO: 3202072 - RNA, 19 nt, Artificial Sequence
  Description of Artificial Sequence: Synthetic oligonucleotide
ucuucauuuucuugagggc

SEQ ID NO: 3202073 - RNA, 19 nt, Artificial Sequence
  Description of Artificial Sequence: Synthetic oligonucleotide
cuuaucuuguccacuguug

SEQ ID NO: 3202074 - RNA, 19 nt, Artificial Sequence
  Description of Artificial Sequence: Synthetic oligonucleotide
uaaaccaccuaugccacag

SEQ ID NO: 3202075 - RNA, 19 nt, Artificial Sequence
  Description of Artificial Sequence: Synthetic oligonucleotide
ucucuucauuuucuugagg

SEQ ID NO: 3202076 - RNA, 19 nt, Artificial Sequence
  Description of Artificial Sequence: Synthetic oligonucleotide
aucugagucugccuuaucu

SEQ ID NO: 3202077 - RNA, 19 nt, Artificial Sequence
  Description of Artificial Sequence: Synthetic oligonucleotide
uuacgucccauguaugccc

SEQ ID NO: 3202078 - RNA, 19 nt, Artificial Sequence
  Description of Artificial Sequence: Synthetic oligonucleotide
uuguucauucucuucauuu

SEQ ID NO: 3202079 - RNA, 19 nt, Artificial Sequence
  Description of Artificial Sequence: Synthetic oligonucleotide
uucucuucauuuucuugag

SEQ ID NO: 3202080 - RNA, 19 nt, Artificial Sequence
  Description of Artificial Sequence: Synthetic oligonucleotide
uauucaaguauugcauccc

SEQ ID NO: 3202081 - RNA, 19 nt, Artificial Sequence
  Description of Artificial Sequence: Synthetic oligonucleotide
uauugcaucccuucaugcu

SEQ ID NO: 3202082 - RNA, 19 nt, Artificial Sequence
  Description of Artificial Sequence: Synthetic oligonucleotide
aaaccaccuaugccacagc

SEQ ID NO: 3202083 - RNA, 19 nt, Artificial Sequence
  Description of Artificial Sequence: Synthetic oligonucleotide
aaguauugcaucccuucau

SEQ ID NO: 3202084 - RNA, 19 nt, Artificial Sequence
  Description of Artificial Sequence: Synthetic oligonucleotide
uguaugcccugcuuuaaac

SEQ ID NO: 3202085 - RNA, 19 nt, Artificial Sequence
  Description of Artificial Sequence: Synthetic oligonucleotide
auauauuauucaaguauug

SEQ ID NO: 3202086 - RNA, 19 nt, Artificial Sequence
  Description of Artificial Sequence: Synthetic oligonucleotide
uaugccacagcagaagagu

SEQ ID NO: 3202087 - RNA, 19 nt, Artificial Sequence
  Description of Artificial Sequence: Synthetic oligonucleotide
ugagggcugguuauuguca

SEQ ID NO: 3202088 - RNA, 19 nt, Artificial Sequence
  Description of Artificial Sequence: Synthetic oligonucleotide
agaguccuuguuuuguuca

SEQ ID NO: 3202089 - RNA, 19 nt, Artificial Sequence
  Description of Artificial Sequence: Synthetic oligonucleotide
aaccaccuaugccacagca

SEQ ID NO: 3202090 - RNA, 19 nt, Artificial Sequence
  Description of Artificial Sequence: Synthetic oligonucleotide
auauauauauauauauaua

SEQ ID NO: 3202091 - RNA, 19 nt, Artificial Sequence
  Description of Artificial Sequence: Synthetic oligonucleotide
gucuuugagcaucugaguc

SEQ ID NO: 3202092 - RNA, 19 nt, Artificial Sequence
  Description of Artificial Sequence: Synthetic oligonucleotide
auauauauauauauauauu

SEQ ID NO: 3202093 - RNA, 19 nt, Artificial Sequence
  Description of Artificial Sequence: Synthetic oligonucleotide
auauauauauauauacaua

SEQ ID NO: 3202094 - RNA, 19 nt, Artificial Sequence
  Description of Artificial Sequence: Synthetic oligonucleotide
ugccuuaucuuguccacug

SEQ ID NO: 3202095 - RNA, 19 nt, Artificial Sequence
  Description of Artificial Sequence: Synthetic oligonucleotide
uccacuguugucuccuuca

SEQ ID NO: 3202096 - RNA, 19 nt, Artificial Sequence
  Description of Artificial Sequence: Synthetic oligonucleotide
guaugcccugcuuuaaacc

SEQ ID NO: 3202097 - RNA, 19 nt, Artificial Sequence
  Description of Artificial Sequence: Synthetic oligonucleotide
aaaguaggagcucugcaug

SEQ ID NO: 3202098 - RNA, 19 nt, Artificial Sequence
  Description of Artificial Sequence: Synthetic oligonucleotide
cucugcauggaguagagcc

SEQ ID NO: 3202099 - RNA, 19 nt, Artificial Sequence
  Description of Artificial Sequence: Synthetic oligonucleotide
ucucaggaggcaaaguagg

SEQ ID NO: 3202100 - RNA, 19 nt, Artificial Sequence
  Description of Artificial Sequence: Synthetic oligonucleotide
gaugggguuccccacacgg

SEQ ID NO: 3202101 - RNA, 19 nt, Artificial Sequence
  Description of Artificial Sequence: Synthetic oligonucleotide
ucugcauggaguagagccg

SEQ ID NO: 3202102 - RNA, 19 nt, Artificial Sequence
  Description of Artificial Sequence: Synthetic oligonucleotide
aaguaggagcucugcaugg

SEQ ID NO: 3202103 - RNA, 19 nt, Artificial Sequence
  Description of Artificial Sequence: Synthetic oligonucleotide
gaagcagucgcugaggcug

SEQ ID NO: 3202104 - RNA, 19 nt, Artificial Sequence
  Description of Artificial Sequence: Synthetic oligonucleotide
uguggucccacccuaggcc

SEQ ID NO: 3202105 - RNA, 19 nt, Artificial Sequence
  Description of Artificial Sequence: Synthetic oligonucleotide
gaguagagccggucgaugg

SEQ ID NO: 3202106 - RNA, 19 nt, Artificial Sequence
  Description of Artificial Sequence: Synthetic oligonucleotide
aggaagcagucgcugaggc

SEQ ID NO: 3202107 - RNA, 19 nt, Artificial Sequence
  Description of Artificial Sequence: Synthetic oligonucleotide
caggaggcaaaguaggagc

SEQ ID NO: 3202108 - RNA, 19 nt, Artificial Sequence
  Description of Artificial Sequence: Synthetic oligonucleotide
guccaugcggcccagcugg

SEQ ID NO: 3202109 - RNA, 19 nt, Artificial Sequence
  Description of Artificial Sequence: Synthetic oligonucleotide
cauggaguagagccggucg

SEQ ID NO: 3202110 - RNA, 19 nt, Artificial Sequence
  Description of Artificial Sequence: Synthetic oligonucleotide
cucucaggaggcaaaguag

SEQ ID NO: 3202111 - RNA, 19 nt, Artificial Sequence
  Description of Artificial Sequence: Synthetic oligonucleotide
ucaggaggcaaaguaggag

SEQ ID NO: 3202112 - RNA, 19 nt, Artificial Sequence
  Description of Artificial Sequence: Synthetic oligonucleotide
aguagagccggucgauggg

SEQ ID NO: 3202113 - RNA, 19 nt, Artificial Sequence
  Description of Artificial Sequence: Synthetic oligonucleotide
ucagaggagccgaggaagc

SEQ ID NO: 3202114 - RNA, 19 nt, Artificial Sequence
  Description of Artificial Sequence: Synthetic oligonucleotide
aucagaggagccgaggaag

SEQ ID NO: 3202115 - RNA, 19 nt, Artificial Sequence
  Description of Artificial Sequence: Synthetic oligonucleotide
ugggguuccccacacgggc

SEQ ID NO: 3202116 - RNA, 19 nt, Artificial Sequence
  Description of Artificial Sequence: Synthetic oligonucleotide
uaggccuaggcccaagcgu

SEQ ID NO: 3202117 - RNA, 19 nt, Artificial Sequence
  Description of Artificial Sequence: Synthetic oligonucleotide
gagggagguaucgcuaucg

SEQ ID NO: 3202118 - RNA, 19 nt, Artificial Sequence
  Description of Artificial Sequence: Synthetic oligonucleotide
gagccgaggaagcagucgc

SEQ ID NO: 3202119 - RNA, 19 nt, Artificial Sequence
  Description of Artificial Sequence: Synthetic oligonucleotide
acaucagaggagccgagga

SEQ ID NO: 3202120 - RNA, 19 nt, Artificial Sequence
  Description of Artificial Sequence: Synthetic oligonucleotide
gagucugaguggguggugg

SEQ ID NO: 3202121 - RNA, 19 nt, Artificial Sequence
  Description of Artificial Sequence: Synthetic oligonucleotide
cagggagcccacaucagag

SEQ ID NO: 3202122 - RNA, 19 nt, Artificial Sequence
  Description of Artificial Sequence: Synthetic oligonucleotide
cuaggccuaggcccaagcg

SEQ ID NO: 3202123 - RNA, 19 nt, Artificial Sequence
  Description of Artificial Sequence: Synthetic oligonucleotide
uaggagcucugcauggagu

SEQ ID NO: 3202124 - RNA, 19 nt, Artificial Sequence
  Description of Artificial Sequence: Synthetic oligonucleotide
agggagcccacaucagagg

SEQ ID NO: 3202125 - RNA, 19 nt, Artificial Sequence
  Description of Artificial Sequence: Synthetic oligonucleotide
uggugagggagguaucgcu

SEQ ID NO: 3202126 - RNA, 19 nt, Artificial Sequence
  Description of Artificial Sequence: Synthetic oligonucleotide
guaggagcucugcauggag

SEQ ID NO: 3202127 - RNA, 19 nt, Artificial Sequence
  Description of Artificial Sequence: Synthetic oligonucleotide
agucugagugggugguggg

SEQ ID NO: 3202128 - RNA, 19 nt, Artificial Sequence
  Description of Artificial Sequence: Synthetic oligonucleotide
gagcccacaucagaggagc

SEQ ID NO: 3202129 - RNA, 19 nt, Artificial Sequence
  Description of Artificial Sequence: Synthetic oligonucleotide
gaggaagcagucgcugagg

SEQ ID NO: 3202130 - RNA, 19 nt, Artificial Sequence
  Description of Artificial Sequence: Synthetic oligonucleotide
auggaguagagccggucga

SEQ ID NO: 3202131 - RNA, 19 nt, Artificial Sequence
  Description of Artificial Sequence: Synthetic oligonucleotide
cugcauggaguagagccgg

SEQ ID NO: 3202132 - RNA, 19 nt, Artificial Sequence
  Description of Artificial Sequence: Synthetic oligonucleotide
ucgcugaggcuggugaggg

SEQ ID NO: 3202133 - RNA, 19 nt, Artificial Sequence
  Description of Artificial Sequence: Synthetic oligonucleotide
ucugaguggguggugggcu

SEQ ID NO: 3202134 - RNA, 19 nt, Artificial Sequence
  Description of Artificial Sequence: Synthetic oligonucleotide
guagagccggucgaugggg

SEQ ID NO: 3202135 - RNA, 19 nt, Artificial Sequence
  Description of Artificial Sequence: Synthetic oligonucleotide
ccagcuggcucucaggagg

SEQ ID NO: 3202136 - RNA, 19 nt, Artificial Sequence
  Description of Artificial Sequence: Synthetic oligonucleotide
agaggagccgaggaagcag

SEQ ID NO: 3202137 - RNA, 19 nt, Artificial Sequence
  Description of Artificial Sequence: Synthetic oligonucleotide
ggcccaagcguccaugcgg

SEQ ID NO: 3202138 - RNA, 19 nt, Artificial Sequence
  Description of Artificial Sequence: Synthetic oligonucleotide
aggccuaggcccaagcguc

SEQ ID NO: 3202139 - RNA, 19 nt, Artificial Sequence
  Description of Artificial Sequence: Synthetic oligonucleotide
gaggccuguggucccaccc

SEQ ID NO: 3202140 - RNA, 19 nt, Artificial Sequence
  Description of Artificial Sequence: Synthetic oligonucleotide
uaggcccaagcguccaugc

SEQ ID NO: 3202141 - RNA, 19 nt, Artificial Sequence
  Description of Artificial Sequence: Synthetic oligonucleotide
agucgcugaggcuggugag

SEQ ID NO: 3202142 - RNA, 19 nt, Artificial Sequence
  Description of Artificial Sequence: Synthetic oligonucleotide
ugcagggagcccacaucag

SEQ ID NO: 3202143 - RNA, 19 nt, Artificial Sequence
  Description of Artificial Sequence: Synthetic oligonucleotide
ccacccuaggccuaggccc

SEQ ID NO: 3202144 - RNA, 19 nt, Artificial Sequence
  Description of Artificial Sequence: Synthetic oligonucleotide
cugcagaggccuguggucc

SEQ ID NO: 3202145 - RNA, 19 nt, Artificial Sequence
  Description of Artificial Sequence: Synthetic oligonucleotide
ucgaugggguuccccacac

SEQ ID NO: 3202146 - RNA, 19 nt, Artificial Sequence
  Description of Artificial Sequence: Synthetic oligonucleotide
gagguaucgcuaucgauau

SEQ ID NO: 3202147 - RNA, 19 nt, Artificial Sequence
  Description of Artificial Sequence: Synthetic oligonucleotide
aggagcucugcauggagua

SEQ ID NO: 3202148 - RNA, 19 nt, Artificial Sequence
  Description of Artificial Sequence: Synthetic oligonucleotide
ugaguggguggugggcugg

SEQ ID NO: 3202149 - RNA, 19 nt, Artificial Sequence
  Description of Artificial Sequence: Synthetic oligonucleotide
cuguggucccacccuaggc

SEQ ID NO: 3202150 - RNA, 19 nt, Artificial Sequence
  Description of Artificial Sequence: Synthetic oligonucleotide
cacacgggccugcagggag

SEQ ID NO: 3202151 - RNA, 19 nt, Artificial Sequence
  Description of Artificial Sequence: Synthetic oligonucleotide
agaggccuguggucccacc

SEQ ID NO: 3202152 - RNA, 19 nt, Artificial Sequence
  Description of Artificial Sequence: Synthetic oligonucleotide
cacaucagaggagccgagg

SEQ ID NO: 3202153 - RNA, 19 nt, Artificial Sequence
  Description of Artificial Sequence: Synthetic oligonucleotide
cugcagggagcccacauca

SEQ ID NO: 3202154 - RNA, 19 nt, Artificial Sequence
  Description of Artificial Sequence: Synthetic oligonucleotide
cugaggcuggugagggagg

SEQ ID NO: 3202155 - RNA, 19 nt, Artificial Sequence
  Description of Artificial Sequence: Synthetic oligonucleotide
aagcagucgcugaggcugg

SEQ ID NO: 3202156 - RNA, 19 nt, Artificial Sequence
  Description of Artificial Sequence: Synthetic oligonucleotide
caaaguaggagcucugcau

SEQ ID NO: 3202157 - RNA, 19 nt, Artificial Sequence
  Description of Artificial Sequence: Synthetic oligonucleotide
aggcccaagcguccaugcg

SEQ ID NO: 3202158 - RNA, 19 nt, Artificial Sequence
  Description of Artificial Sequence: Synthetic oligonucleotide
agggagguaucgcuaucga

SEQ ID NO: 3202159 - RNA, 19 nt, Artificial Sequence
  Description of Artificial Sequence: Synthetic oligonucleotide
uggcugcagaggccugugg

SEQ ID NO: 3202160 - RNA, 19 nt, Artificial Sequence
  Description of Artificial Sequence: Synthetic oligonucleotide
ugcagaggccugugguccc

SEQ ID NO: 3202161 - RNA, 19 nt, Artificial Sequence
  Description of Artificial Sequence: Synthetic oligonucleotide
gucgcugaggcuggugagg

SEQ ID NO: 3202162 - RNA, 19 nt, Artificial Sequence
  Description of Artificial Sequence: Synthetic oligonucleotide
ggagguaucgcuaucgaua

SEQ ID NO: 3202163 - RNA, 19 nt, Artificial Sequence
  Description of Artificial Sequence: Synthetic oligonucleotide
ugagggagguaucgcuauc

SEQ ID NO: 3202164 - RNA, 19 nt, Artificial Sequence
  Description of Artificial Sequence: Synthetic oligonucleotide
agguaucgcuaucgauauc

SEQ ID NO: 3202165 - RNA, 19 nt, Artificial Sequence
  Description of Artificial Sequence: Synthetic oligonucleotide
aggaggcaaaguaggagcu

SEQ ID NO: 3202166 - RNA, 19 nt, Artificial Sequence
  Description of Artificial Sequence: Synthetic oligonucleotide
gcuggugagggagguaucg

SEQ ID NO: 3202167 - RNA, 19 nt, Artificial Sequence
  Description of Artificial Sequence: Synthetic oligonucleotide
uagagccggucgauggggu

SEQ ID NO: 3202168 - RNA, 19 nt, Artificial Sequence
  Description of Artificial Sequence: Synthetic oligonucleotide
agccggucgaugggguucc

SEQ ID NO: 3202169 - RNA, 19 nt, Artificial Sequence
  Description of Artificial Sequence: Synthetic oligonucleotide
cucaggaggcaaaguagga

SEQ ID NO: 3202170 - RNA, 19 nt, Artificial Sequence
  Description of Artificial Sequence: Synthetic oligonucleotide
gaggcaaaguaggagcucu

SEQ ID NO: 3202171 - RNA, 19 nt, Artificial Sequence
  Description of Artificial Sequence: Synthetic oligonucleotide
aguaggagcucugcaugga

SEQ ID NO: 3202172 - RNA, 19 nt, Artificial Sequence
  Description of Artificial Sequence: Synthetic oligonucleotide
gagcucugcauggaguaga

SEQ ID NO: 3202173 - RNA, 19 nt, Artificial Sequence
  Description of Artificial Sequence: Synthetic oligonucleotide
cagcuggcucucaggaggc

SEQ ID NO: 3202174 - RNA, 19 nt, Artificial Sequence
  Description of Artificial Sequence: Synthetic oligonucleotide
gcugaggcuggugagggag

SEQ ID NO: 3202175 - RNA, 19 nt, Artificial Sequence
  Description of Artificial Sequence: Synthetic oligonucleotide
caugcggcccagcuggcuc

SEQ ID NO: 3202176 - RNA, 19 nt, Artificial Sequence
  Description of Artificial Sequence: Synthetic oligonucleotide
ucccacccuaggccuaggc

SEQ ID NO: 3202177 - RNA, 19 nt, Artificial Sequence
  Description of Artificial Sequence: Synthetic oligonucleotide
uggcucucaggaggcaaag

SEQ ID NO: 3202178 - RNA, 19 nt, Artificial Sequence
  Description of Artificial Sequence: Synthetic oligonucleotide
gcaaaguaggagcucugca

SEQ ID NO: 3202179 - RNA, 19 nt, Artificial Sequence
  Description of Artificial Sequence: Synthetic oligonucleotide
ugaggcuggugagggaggu

SEQ ID NO: 3202180 - RNA, 19 nt, Artificial Sequence
  Description of Artificial Sequence: Synthetic oligonucleotide
augggguuccccacacggg

SEQ ID NO: 3202181 - RNA, 19 nt, Artificial Sequence
  Description of Artificial Sequence: Synthetic oligonucleotide
aggcuggugagggagguau

SEQ ID NO: 3202182 - RNA, 19 nt, Artificial Sequence
  Description of Artificial Sequence: Synthetic oligonucleotide
agcucugcauggaguagag

SEQ ID NO: 3202183 - RNA, 19 nt, Artificial Sequence
  Description of Artificial Sequence: Synthetic oligonucleotide
cuggugagggagguaucgc

SEQ ID NO: 3202184 - RNA, 19 nt, Artificial Sequence
  Description of Artificial Sequence: Synthetic oligonucleotide
ugcauggaguagagccggu

SEQ ID NO: 3202185 - RNA, 19 nt, Artificial Sequence
  Description of Artificial Sequence: Synthetic oligonucleotide
cugaguggguggugggcug

SEQ ID NO: 3202186 - RNA, 19 nt, Artificial Sequence
  Description of Artificial Sequence: Synthetic oligonucleotide
ggcaaaguaggagcucugc

SEQ ID NO: 3202187 - RNA, 19 nt, Artificial Sequence
  Description of Artificial Sequence: Synthetic oligonucleotide
aggccuguggucccacccu

SEQ ID NO: 3202188 - RNA, 19 nt, Artificial Sequence
  Description of Artificial Sequence: Synthetic oligonucleotide
acacgggccugcagggagc

SEQ ID NO: 3202189 - RNA, 19 nt, Artificial Sequence
  Description of Artificial Sequence: Synthetic oligonucleotide
ggagccgaggaagcagucg

SEQ ID NO: 3202190 - RNA, 19 nt, Artificial Sequence
  Description of Artificial Sequence: Synthetic oligonucleotide
uggaguagagccggucgau

SEQ ID NO: 3202191 - RNA, 19 nt, Artificial Sequence
  Description of Artificial Sequence: Synthetic oligonucleotide
cagucgcugaggcugguga

SEQ ID NO: 3202192 - RNA, 19 nt, Artificial Sequence
  Description of Artificial Sequence: Synthetic oligonucleotide
gucgaugggguuccccaca

SEQ ID NO: 3202193 - RNA, 19 nt, Artificial Sequence
  Description of Artificial Sequence: Synthetic oligonucleotide
caagcguccaugcggccca

SEQ ID NO: 3202194 - RNA, 19 nt, Artificial Sequence
  Description of Artificial Sequence: Synthetic oligonucleotide
gggagcccacaucagagga

SEQ ID NO: 3202195 - RNA, 19 nt, Artificial Sequence
  Description of Artificial Sequence: Synthetic oligonucleotide
agcccacaucagaggagcc

SEQ ID NO: 3202196 - RNA, 19 nt, Artificial Sequence
  Description of Artificial Sequence: Synthetic oligonucleotide
gcucucaggaggcaaagua

SEQ ID NO: 3202197 - RNA, 19 nt, Artificial Sequence
  Description of Artificial Sequence: Synthetic oligonucleotide
aaguaaaugaaucaguucc

SEQ ID NO: 3202198 - RNA, 19 nt, Artificial Sequence
  Description of Artificial Sequence: Synthetic oligonucleotide
aaaauccguaccuagaacc

SEQ ID NO: 3202199 - RNA, 19 nt, Artificial Sequence
  Description of Artificial Sequence: Synthetic oligonucleotide
aacaaaguagccaagauac

SEQ ID NO: 3202200 - RNA, 19 nt, Artificial Sequence
  Description of Artificial Sequence: Synthetic oligonucleotide
aaguuucuaaaucagcacc

SEQ ID NO: 3202201 - RNA, 19 nt, Artificial Sequence
  Description of Artificial Sequence: Synthetic oligonucleotide
aauuacaaaccucuucugc

SEQ ID NO: 3202202 - RNA, 19 nt, Artificial Sequence
  Description of Artificial Sequence: Synthetic oligonucleotide
acuuguauuaccuuccucc

SEQ ID NO: 3202203 - RNA, 19 nt, Artificial Sequence
  Description of Artificial Sequence: Synthetic oligonucleotide
auuccauauaauuacaaac

SEQ ID NO: 3202204 - RNA, 19 nt, Artificial Sequence
  Description of Artificial Sequence: Synthetic oligonucleotide
auucaaacaguccagaguc

SEQ ID NO: 3202205 - RNA, 19 nt, Artificial Sequence
  Description of Artificial Sequence: Synthetic oligonucleotide
uccuaaucuaacuaaaggg

SEQ ID NO: 3202206 - RNA, 19 nt, Artificial Sequence
  Description of Artificial Sequence: Synthetic oligonucleotide
ucugaauucaaacagucca

SEQ ID NO: 3202207 - RNA, 19 nt, Artificial Sequence
  Description of Artificial Sequence: Synthetic oligonucleotide
caaguuuuccaauugaagg

SEQ ID NO: 3202208 - RNA, 19 nt, Artificial Sequence
  Description of Artificial Sequence: Synthetic oligonucleotide
ugaagguucauauuaacgc

SEQ ID NO: 3202209 - RNA, 19 nt, Artificial Sequence
  Description of Artificial Sequence: Synthetic oligonucleotide
uaaaucagcaccuucagga

SEQ ID NO: 3202210 - RNA, 19 nt, Artificial Sequence
  Description of Artificial Sequence: Synthetic oligonucleotide
uuccauauaauuacaaacc

SEQ ID NO: 3202211 - RNA, 19 nt, Artificial Sequence
  Description of Artificial Sequence: Synthetic oligonucleotide
uguucuuaaaacaaggauc

SEQ ID NO: 3202212 - RNA, 19 nt, Artificial Sequence
  Description of Artificial Sequence: Synthetic oligonucleotide
uuuuauagaaguaaaugaa

SEQ ID NO: 3202213 - RNA, 19 nt, Artificial Sequence
  Description of Artificial Sequence: Synthetic oligonucleotide
auaauuacaaaccucuucu

SEQ ID NO: 3202214 - RNA, 19 nt, Artificial Sequence
  Description of Artificial Sequence: Synthetic oligonucleotide
aaauauguacuuucaauga

SEQ ID NO: 3202215 - RNA, 19 nt, Artificial Sequence
  Description of Artificial Sequence: Synthetic oligonucleotide
gaagauuccauauaauuac

SEQ ID NO: 3202216 - RNA, 19 nt, Artificial Sequence
  Description of Artificial Sequence: Synthetic oligonucleotide
aaggaucuaacaaaguagc

SEQ ID NO: 3202217 - RNA, 19 nt, Artificial Sequence
  Description of Artificial Sequence: Synthetic oligonucleotide
auagaaucugaauuggagg

SEQ ID NO: 3202218 - RNA, 19 nt, Artificial Sequence
  Description of Artificial Sequence: Synthetic oligonucleotide
uuccuaaucuaacuaaagg

SEQ ID NO: 3202219 - RNA, 19 nt, Artificial Sequence
  Description of Artificial Sequence: Synthetic oligonucleotide
uugaagguucauauuaacg

SEQ ID NO: 3202220 - RNA, 19 nt, Artificial Sequence
  Description of Artificial Sequence: Synthetic oligonucleotide
uauagaaguaaaugaauca

SEQ ID NO: 3202221 - RNA, 19 nt, Artificial Sequence
  Description of Artificial Sequence: Synthetic oligonucleotide
uuauagaaguaaaugaauc

SEQ ID NO: 3202222 - RNA, 19 nt, Artificial Sequence
  Description of Artificial Sequence: Synthetic oligonucleotide
ucuuuuauagaaguaaaug

SEQ ID NO: 3202223 - RNA, 19 nt, Artificial Sequence
  Description of Artificial Sequence: Synthetic oligonucleotide
uucauauuaacgcugcugu

SEQ ID NO: 3202224 - RNA, 19 nt, Artificial Sequence
  Description of Artificial Sequence: Synthetic oligonucleotide
uuuacuuguauuaccuucc

SEQ ID NO: 3202225 - RNA, 19 nt, Artificial Sequence
  Description of Artificial Sequence: Synthetic oligonucleotide
uacucuggcagaaauacag

SEQ ID NO: 3202226 - RNA, 19 nt, Artificial Sequence
  Description of Artificial Sequence: Synthetic oligonucleotide
uuggauuugagcauggcac

SEQ ID NO: 3202227 - RNA, 19 nt, Artificial Sequence
  Description of Artificial Sequence: Synthetic oligonucleotide
aaguuuuccaauugaaggu

SEQ ID NO: 3202228 - RNA, 19 nt, Artificial Sequence
  Description of Artificial Sequence: Synthetic oligonucleotide
uauaaguuucuaaaucagc

SEQ ID NO: 3202229 - RNA, 19 nt, Artificial Sequence
  Description of Artificial Sequence: Synthetic oligonucleotide
cuaaucuaacuaaagggcc

SEQ ID NO: 3202230 - RNA, 19 nt, Artificial Sequence
  Description of Artificial Sequence: Synthetic oligonucleotide
gagcauggcacuuaguagg

SEQ ID NO: 3202231 - RNA, 19 nt, Artificial Sequence
  Description of Artificial Sequence: Synthetic oligonucleotide
uauaauuacaaaccucuuc

SEQ ID NO: 3202232 - RNA, 19 nt, Artificial Sequence
  Description of Artificial Sequence: Synthetic oligonucleotide
cuuuuauagaaguaaauga

SEQ ID NO: 3202233 - RNA, 19 nt, Artificial Sequence
  Description of Artificial Sequence: Synthetic oligonucleotide
auggagaacauucccaacg

SEQ ID NO: 3202234 - RNA, 19 nt, Artificial Sequence
  Description of Artificial Sequence: Synthetic oligonucleotide
uuuauagaaguaaaugaau

SEQ ID NO: 3202235 - RNA, 19 nt, Artificial Sequence
  Description of Artificial Sequence: Synthetic oligonucleotide
aacuuucugaauucaaaca

SEQ ID NO: 3202236 - RNA, 19 nt, Artificial Sequence
  Description of Artificial Sequence: Synthetic oligonucleotide
uauccauagaaucugaauu

SEQ ID NO: 3202237 - RNA, 19 nt, Artificial Sequence
  Description of Artificial Sequence: Synthetic oligonucleotide
aaccaaugacuuccaagcc

SEQ ID NO: 3202238 - RNA, 19 nt, Artificial Sequence
  Description of Artificial Sequence: Synthetic oligonucleotide
agcaauggagaacauuccc

SEQ ID NO: 3202239 - RNA, 19 nt, Artificial Sequence
  Description of Artificial Sequence: Synthetic oligonucleotide
cauagaaucugaauuggag

SEQ ID NO: 3202240 - RNA, 19 nt, Artificial Sequence
  Description of Artificial Sequence: Synthetic oligonucleotide
uccauauaauuacaaaccu

SEQ ID NO: 3202241 - RNA, 19 nt, Artificial Sequence
  Description of Artificial Sequence: Synthetic oligonucleotide
ugagcuauccauagaaucu

SEQ ID NO: 3202242 - RNA, 19 nt, Artificial Sequence
  Description of Artificial Sequence: Synthetic oligonucleotide
aauauguacuuucaaugaa

SEQ ID NO: 3202243 - RNA, 19 nt, Artificial Sequence
  Description of Artificial Sequence: Synthetic oligonucleotide
acuacucuggcagaaauac

SEQ ID NO: 3202244 - RNA, 19 nt, Artificial Sequence
  Description of Artificial Sequence: Synthetic oligonucleotide
aacuguucuuaaaacaagg

SEQ ID NO: 3202245 - RNA, 19 nt, Artificial Sequence
  Description of Artificial Sequence: Synthetic oligonucleotide
guuuauaaguuucuaaauc

SEQ ID NO: 3202246 - RNA, 19 nt, Artificial Sequence
  Description of Artificial Sequence: Synthetic oligonucleotide
auugaagguucauauuaac

SEQ ID NO: 3202247 - RNA, 19 nt, Artificial Sequence
  Description of Artificial Sequence: Synthetic oligonucleotide
uagaaucugaauuggaggu

SEQ ID NO: 3202248 - RNA, 19 nt, Artificial Sequence
  Description of Artificial Sequence: Synthetic oligonucleotide
aauggagaacauucccaac

SEQ ID NO: 3202249 - RNA, 19 nt, Artificial Sequence
  Description of Artificial Sequence: Synthetic oligonucleotide
auuacaaaccucuucugca

SEQ ID NO: 3202250 - RNA, 19 nt, Artificial Sequence
  Description of Artificial Sequence: Synthetic oligonucleotide
ucaaagauaaacuguccac

SEQ ID NO: 3202251 - RNA, 19 nt, Artificial Sequence
  Description of Artificial Sequence: Synthetic oligonucleotide
aaucuggagcagcuaaagg

SEQ ID NO: 3202252 - RNA, 19 nt, Artificial Sequence
  Description of Artificial Sequence: Synthetic oligonucleotide
uuaacuuucugaauucaaa

SEQ ID NO: 3202253 - RNA, 19 nt, Artificial Sequence
  Description of Artificial Sequence: Synthetic oligonucleotide
uguauuaccuuccuccagu

SEQ ID NO: 3202254 - RNA, 19 nt, Artificial Sequence
  Description of Artificial Sequence: Synthetic oligonucleotide
uaacuuucugaauucaaac

SEQ ID NO: 3202255 - RNA, 19 nt, Artificial Sequence
  Description of Artificial Sequence: Synthetic oligonucleotide
guaucaagaacguugucug

SEQ ID NO: 3202256 - RNA, 19 nt, Artificial Sequence
  Description of Artificial Sequence: Synthetic oligonucleotide
uucccuuucaaccaaugac

SEQ ID NO: 3202257 - RNA, 19 nt, Artificial Sequence
  Description of Artificial Sequence: Synthetic oligonucleotide
uuaguagggcaucaguuca

SEQ ID NO: 3202258 - RNA, 19 nt, Artificial Sequence
  Description of Artificial Sequence: Synthetic oligonucleotide
uaaucuaacuaaagggcca

SEQ ID NO: 3202259 - RNA, 19 nt, Artificial Sequence
  Description of Artificial Sequence: Synthetic oligonucleotide
auauuaacgcugcuguauc

SEQ ID NO: 3202260 - RNA, 19 nt, Artificial Sequence
  Description of Artificial Sequence: Synthetic oligonucleotide
aucaguucaaguucaaaga

SEQ ID NO: 3202261 - RNA, 19 nt, Artificial Sequence
  Description of Artificial Sequence: Synthetic oligonucleotide
auccauagaaucugaauug

SEQ ID NO: 3202262 - RNA, 19 nt, Artificial Sequence
  Description of Artificial Sequence: Synthetic oligonucleotide
uuaaaacaaggaucuaaca

SEQ ID NO: 3202263 - RNA, 19 nt, Artificial Sequence
  Description of Artificial Sequence: Synthetic oligonucleotide
ucuugcagggcuuuaggag

SEQ ID NO: 3202264 - RNA, 19 nt, Artificial Sequence
  Description of Artificial Sequence: Synthetic oligonucleotide
uagaaguaaaugaaucagu

SEQ ID NO: 3202265 - RNA, 19 nt, Artificial Sequence
  Description of Artificial Sequence: Synthetic oligonucleotide
auaaguuucuaaaucagca

SEQ ID NO: 3202266 - RNA, 19 nt, Artificial Sequence
  Description of Artificial Sequence: Synthetic oligonucleotide
cauauaauuacaaaccucu

SEQ ID NO: 3202267 - RNA, 19 nt, Artificial Sequence
  Description of Artificial Sequence: Synthetic oligonucleotide
uguuuauaaguuucuaaau

SEQ ID NO: 3202268 - RNA, 19 nt, Artificial Sequence
  Description of Artificial Sequence: Synthetic oligonucleotide
aaugcuuggauuugagcau

SEQ ID NO: 3202269 - RNA, 19 nt, Artificial Sequence
  Description of Artificial Sequence: Synthetic oligonucleotide
gaauucaaacaguccagag

SEQ ID NO: 3202270 - RNA, 19 nt, Artificial Sequence
  Description of Artificial Sequence: Synthetic oligonucleotide
aauuuggcaggccccggcg

SEQ ID NO: 3202271 - RNA, 19 nt, Artificial Sequence
  Description of Artificial Sequence: Synthetic oligonucleotide
gaucuaacaaaguagccaa

SEQ ID NO: 3202272 - RNA, 19 nt, Artificial Sequence
  Description of Artificial Sequence: Synthetic oligonucleotide
ucaaguucccuuucaacca

SEQ ID NO: 3202273 - RNA, 19 nt, Artificial Sequence
  Description of Artificial Sequence: Synthetic oligonucleotide
cauuuucccacagucaugg

SEQ ID NO: 3202274 - RNA, 19 nt, Artificial Sequence
  Description of Artificial Sequence: Synthetic oligonucleotide
uugagcauggcacuuagua

SEQ ID NO: 3202275 - RNA, 19 nt, Artificial Sequence
  Description of Artificial Sequence: Synthetic oligonucleotide
ucuguuuauaaguuucuaa

SEQ ID NO: 3202276 - RNA, 19 nt, Artificial Sequence
  Description of Artificial Sequence: Synthetic oligonucleotide
aaucaguuccuaaucuaac

SEQ ID NO: 3202277 - RNA, 19 nt, Artificial Sequence
  Description of Artificial Sequence: Synthetic oligonucleotide
uaaguuucuaaaucagcac

SEQ ID NO: 3202278 - RNA, 19 nt, Artificial Sequence
  Description of Artificial Sequence: Synthetic oligonucleotide
agggcaucaguucaaguuc

SEQ ID NO: 3202279 - RNA, 19 nt, Artificial Sequence
  Description of Artificial Sequence: Synthetic oligonucleotide
caaugcuuggauuugagca

SEQ ID NO: 3202280 - RNA, 19 nt, Artificial Sequence
  Description of Artificial Sequence: Synthetic oligonucleotide
ucuuaaaacaaggaucuaa

SEQ ID NO: 3202281 - RNA, 19 nt, Artificial Sequence
  Description of Artificial Sequence: Synthetic oligonucleotide
caaagauaaacuguccacc

SEQ ID NO: 3202282 - RNA, 19 nt, Artificial Sequence
  Description of Artificial Sequence: Synthetic oligonucleotide
ucaguucaaguucaaagau

SEQ ID NO: 3202283 - RNA, 19 nt, Artificial Sequence
  Description of Artificial Sequence: Synthetic oligonucleotide
ccuaaucuaacuaaagggc

SEQ ID NO: 3202284 - RNA, 19 nt, Artificial Sequence
  Description of Artificial Sequence: Synthetic oligonucleotide
cuugcagggcuuuaggagc

SEQ ID NO: 3202285 - RNA, 19 nt, Artificial Sequence
  Description of Artificial Sequence: Synthetic oligonucleotide
guugcaauuuggcaggccc

SEQ ID NO: 3202286 - RNA, 19 nt, Artificial Sequence
  Description of Artificial Sequence: Synthetic oligonucleotide
uccauuuucccacagucau

SEQ ID NO: 3202287 - RNA, 19 nt, Artificial Sequence
  Description of Artificial Sequence: Synthetic oligonucleotide
aacaccuucaguucuuaaa

SEQ ID NO: 3202288 - RNA, 19 nt, Artificial Sequence
  Description of Artificial Sequence: Synthetic oligonucleotide
uaacaaaguagccaagaua

SEQ ID NO: 3202289 - RNA, 19 nt, Artificial Sequence
  Description of Artificial Sequence: Synthetic oligonucleotide
acaaggaucuaacaaagua

SEQ ID NO: 3202290 - RNA, 19 nt, Artificial Sequence
  Description of Artificial Sequence: Synthetic oligonucleotide
auucccaacgcugucuugc

SEQ ID NO: 3202291 - RNA, 19 nt, Artificial Sequence
  Description of Artificial Sequence: Synthetic oligonucleotide
agaaauacagucugucccu

SEQ ID NO: 3202292 - RNA, 19 nt, Artificial Sequence
  Description of Artificial Sequence: Synthetic oligonucleotide
gaaguaaaugaaucaguuc

SEQ ID NO: 3202293 - RNA, 19 nt, Artificial Sequence
  Description of Artificial Sequence: Synthetic oligonucleotide
acagucauggaaucuggag

SEQ ID NO: 3202294 - RNA, 19 nt, Artificial Sequence
  Description of Artificial Sequence: Synthetic oligonucleotide
aaucuaacuaaagggccag

SEQ ID NO: 3202295 - RNA, 19 nt, Artificial Sequence
  Description of Artificial Sequence: Synthetic oligonucleotide
aaacuguucuuaaaacaag

SEQ ID NO: 3202296 - RNA, 19 nt, Artificial Sequence
  Description of Artificial Sequence: Synthetic oligonucleotide
uuucccacagucauggaau

SEQ ID NO: 3202297 - RNA, 19 nt, Artificial Sequence
  Description of Artificial Sequence: Synthetic oligonucleotide
aacauggcuagauaauugc

SEQ ID NO: 3202298 - RNA, 19 nt, Artificial Sequence
  Description of Artificial Sequence: Synthetic oligonucleotide
aauugcucuguguuguucc

SEQ ID NO: 3202299 - RNA, 19 nt, Artificial Sequence
  Description of Artificial Sequence: Synthetic oligonucleotide
ucugggaacccucacaugg

SEQ ID NO: 3202300 - RNA, 19 nt, Artificial Sequence
  Description of Artificial Sequence: Synthetic oligonucleotide
aaagcgacucaacauguuc

SEQ ID NO: 3202301 - RNA, 19 nt, Artificial Sequence
  Description of Artificial Sequence: Synthetic oligonucleotide
uguuccaagcccaucuugg

SEQ ID NO: 3202302 - RNA, 19 nt, Artificial Sequence
  Description of Artificial Sequence: Synthetic oligonucleotide
ugcaaagcgacucaacaug

SEQ ID NO: 3202303 - RNA, 19 nt, Artificial Sequence
  Description of Artificial Sequence: Synthetic oligonucleotide
ucaacauguucucucuggg

SEQ ID NO: 3202304 - RNA, 19 nt, Artificial Sequence
  Description of Artificial Sequence: Synthetic oligonucleotide
ucugcaaagcgacucaaca

SEQ ID NO: 3202305 - RNA, 19 nt, Artificial Sequence
  Description of Artificial Sequence: Synthetic oligonucleotide
uccgauagcuaccaucagg

SEQ ID NO: 3202306 - RNA, 19 nt, Artificial Sequence
  Description of Artificial Sequence: Synthetic oligonucleotide
aacauguucucucugggaa

SEQ ID NO: 3202307 - RNA, 19 nt, Artificial Sequence
  Description of Artificial Sequence: Synthetic oligonucleotide
uugucuauguguuccaagc

SEQ ID NO: 3202308 - RNA, 19 nt, Artificial Sequence
  Description of Artificial Sequence: Synthetic oligonucleotide
accauugucuauguguucc

SEQ ID NO: 3202309 - RNA, 19 nt, Artificial Sequence
  Description of Artificial Sequence: Synthetic oligonucleotide
aagaccucugcaaagcgac

SEQ ID NO: 3202310 - RNA, 19 nt, Artificial Sequence
  Description of Artificial Sequence: Synthetic oligonucleotide
uagauaauugcucuguguu

SEQ ID NO: 3202311 - RNA, 19 nt, Artificial Sequence
  Description of Artificial Sequence: Synthetic oligonucleotide
acaugguuuaaccucagga

SEQ ID NO: 3202312 - RNA, 19 nt, Artificial Sequence
  Description of Artificial Sequence: Synthetic oligonucleotide
uguuccgagccuccgauag

SEQ ID NO: 3202313 - RNA, 19 nt, Artificial Sequence
  Description of Artificial Sequence: Synthetic oligonucleotide
ucuauguguuccaagccca

SEQ ID NO: 3202314 - RNA, 19 nt, Artificial Sequence
  Description of Artificial Sequence: Synthetic oligonucleotide
gaaaccauugucuaugugu

SEQ ID NO: 3202315 - RNA, 19 nt, Artificial Sequence
  Description of Artificial Sequence: Synthetic oligonucleotide
acccgugucaccaacaugg

SEQ ID NO: 3202316 - RNA, 19 nt, Artificial Sequence
  Description of Artificial Sequence: Synthetic oligonucleotide
cucaacauguucucucugg

SEQ ID NO: 3202317 - RNA, 19 nt, Artificial Sequence
  Description of Artificial Sequence: Synthetic oligonucleotide
ugguuuaaccucaggaaac

SEQ ID NO: 3202318 - RNA, 19 nt, Artificial Sequence
  Description of Artificial Sequence: Synthetic oligonucleotide
uccaagcccaucuugggcc

SEQ ID NO: 3202319 - RNA, 19 nt, Artificial Sequence
  Description of Artificial Sequence: Synthetic oligonucleotide
acccucacaugguuuaacc

SEQ ID NO: 3202320 - RNA, 19 nt, Artificial Sequence
  Description of Artificial Sequence: Synthetic oligonucleotide
ugucuauguguuccaagcc

SEQ ID NO: 3202321 - RNA, 19 nt, Artificial Sequence
  Description of Artificial Sequence: Synthetic oligonucleotide
uuuaaccucaggaaaccau

SEQ ID NO: 3202322 - RNA, 19 nt, Artificial Sequence
  Description of Artificial Sequence: Synthetic oligonucleotide
agauaauugcucuguguug

SEQ ID NO: 3202323 - RNA, 19 nt, Artificial Sequence
  Description of Artificial Sequence: Synthetic oligonucleotide
auggcuagauaauugcucu

SEQ ID NO: 3202324 - RNA, 19 nt, Artificial Sequence
  Description of Artificial Sequence: Synthetic oligonucleotide
accucaggaaaccauuguc

SEQ ID NO: 3202325 - RNA, 19 nt, Artificial Sequence
  Description of Artificial Sequence: Synthetic oligonucleotide
auagcuaccaucaggcaag

SEQ ID NO: 3202326 - RNA, 19 nt, Artificial Sequence
  Description of Artificial Sequence: Synthetic oligonucleotide
gucuauguguuccaagccc

SEQ ID NO: 3202327 - RNA, 19 nt, Artificial Sequence
  Description of Artificial Sequence: Synthetic oligonucleotide
cucuguguuguuccgagcc

SEQ ID NO: 3202328 - RNA, 19 nt, Artificial Sequence
  Description of Artificial Sequence: Synthetic oligonucleotide
caucuugggcccuaugucc

SEQ ID NO: 3202329 - RNA, 19 nt, Artificial Sequence
  Description of Artificial Sequence: Synthetic oligonucleotide
auugucuauguguuccaag

SEQ ID NO: 3202330 - RNA, 19 nt, Artificial Sequence
  Description of Artificial Sequence: Synthetic oligonucleotide
acauguucucucugggaac

SEQ ID NO: 3202331 - RNA, 19 nt, Artificial Sequence
  Description of Artificial Sequence: Synthetic oligonucleotide
gauagcuaccaucaggcaa

SEQ ID NO: 3202332 - RNA, 19 nt, Artificial Sequence
  Description of Artificial Sequence: Synthetic oligonucleotide
augguuuaaccucaggaaa

SEQ ID NO: 3202333 - RNA, 19 nt, Artificial Sequence
  Description of Artificial Sequence: Synthetic oligonucleotide
uuaaccucaggaaaccauu

SEQ ID NO: 3202334 - RNA, 19 nt, Artificial Sequence
  Description of Artificial Sequence: Synthetic oligonucleotide
gcuaccaucaggcaagacc

SEQ ID NO: 3202335 - RNA, 19 nt, Artificial Sequence
  Description of Artificial Sequence: Synthetic oligonucleotide
aaccauugucuauguguuc

SEQ ID NO: 3202336 - RNA, 19 nt, Artificial Sequence
  Description of Artificial Sequence: Synthetic oligonucleotide
cauggcuagauaauugcuc

SEQ ID NO: 3202337 - RNA, 19 nt, Artificial Sequence
  Description of Artificial Sequence: Synthetic oligonucleotide
uaaccucaggaaaccauug

SEQ ID NO: 3202338 - RNA, 19 nt, Artificial Sequence
  Description of Artificial Sequence: Synthetic oligonucleotide
auguccccaacugugauuc

SEQ ID NO: 3202339 - RNA, 19 nt, Artificial Sequence
  Description of Artificial Sequence: Synthetic oligonucleotide
auguguuccaagcccaucu

SEQ ID NO: 3202340 - RNA, 19 nt, Artificial Sequence
  Description of Artificial Sequence: Synthetic oligonucleotide
caacauggcuagauaauug

SEQ ID NO: 3202341 - RNA, 19 nt, Artificial Sequence
  Description of Artificial Sequence: Synthetic oligonucleotide
ucucugggaacccucacau

SEQ ID NO: 3202342 - RNA, 19 nt, Artificial Sequence
  Description of Artificial Sequence: Synthetic oligonucleotide
ucaggcaagaccucugcaa

SEQ ID NO: 3202343 - RNA, 19 nt, Artificial Sequence
  Description of Artificial Sequence: Synthetic oligonucleotide
auugcucuguguuguuccg

SEQ ID NO: 3202344 - RNA, 19 nt, Artificial Sequence
  Description of Artificial Sequence: Synthetic oligonucleotide
aaccucaggaaaccauugu

SEQ ID NO: 3202345 - RNA, 19 nt, Artificial Sequence
  Description of Artificial Sequence: Synthetic oligonucleotide
agcgacucaacauguucuc

SEQ ID NO: 3202346 - RNA, 19 nt, Artificial Sequence
  Description of Artificial Sequence: Synthetic oligonucleotide
uuccaagcccaucuugggc

SEQ ID NO: 3202347 - RNA, 19 nt, Artificial Sequence
  Description of Artificial Sequence: Synthetic oligonucleotide
aaaccauugucuauguguu

SEQ ID NO: 3202348 - RNA, 19 nt, Artificial Sequence
  Description of Artificial Sequence: Synthetic oligonucleotide
ugcucuguguuguuccgag

SEQ ID NO: 3202349 - RNA, 19 nt, Artificial Sequence
  Description of Artificial Sequence: Synthetic oligonucleotide
caugguuuaaccucaggaa

SEQ ID NO: 3202350 - RNA, 19 nt, Artificial Sequence
  Description of Artificial Sequence: Synthetic oligonucleotide
gauaauugcucuguguugu

SEQ ID NO: 3202351 - RNA, 19 nt, Artificial Sequence
  Description of Artificial Sequence: Synthetic oligonucleotide
aagcgacucaacauguucu

SEQ ID NO: 3202352 - RNA, 19 nt, Artificial Sequence
  Description of Artificial Sequence: Synthetic oligonucleotide
uguguuguuccgagccucc

SEQ ID NO: 3202353 - RNA, 19 nt, Artificial Sequence
  Description of Artificial Sequence: Synthetic oligonucleotide
guuccaagcccaucuuggg

SEQ ID NO: 3202354 - RNA, 19 nt, Artificial Sequence
  Description of Artificial Sequence: Synthetic oligonucleotide
caggaaaccauugucuaug

SEQ ID NO: 3202355 - RNA, 19 nt, Artificial Sequence
  Description of Artificial Sequence: Synthetic oligonucleotide
aacccucacaugguuuaac

SEQ ID NO: 3202356 - RNA, 19 nt, Artificial Sequence
  Description of Artificial Sequence: Synthetic oligonucleotide
cauguucucucugggaacc

SEQ ID NO: 3202357 - RNA, 19 nt, Artificial Sequence
  Description of Artificial Sequence: Synthetic oligonucleotide
ccgauagcuaccaucaggc

SEQ ID NO: 3202358 - RNA, 19 nt, Artificial Sequence
  Description of Artificial Sequence: Synthetic oligonucleotide
aucuugggcccuauguccc

SEQ ID NO: 3202359 - RNA, 19 nt, Artificial Sequence
  Description of Artificial Sequence: Synthetic oligonucleotide
cuaccaucaggcaagaccu

SEQ ID NO: 3202360 - RNA, 19 nt, Artificial Sequence
  Description of Artificial Sequence: Synthetic oligonucleotide
cucacaugguuuaaccuca

SEQ ID NO: 3202361 - RNA, 19 nt, Artificial Sequence
  Description of Artificial Sequence: Synthetic oligonucleotide
ucuguguuguuccgagccu

SEQ ID NO: 3202362 - RNA, 19 nt, Artificial Sequence
  Description of Artificial Sequence: Synthetic oligonucleotide
ucaggaaaccauugucuau

SEQ ID NO: 3202363 - RNA, 19 nt, Artificial Sequence
  Description of Artificial Sequence: Synthetic oligonucleotide
uguuguuccgagccuccga

SEQ ID NO: 3202364 - RNA, 19 nt, Artificial Sequence
  Description of Artificial Sequence: Synthetic oligonucleotide
gugucaccaacauggcuag

SEQ ID NO: 3202365 - RNA, 19 nt, Artificial Sequence
  Description of Artificial Sequence: Synthetic oligonucleotide
uucucucugggaacccuca

SEQ ID NO: 3202366 - RNA, 19 nt, Artificial Sequence
  Description of Artificial Sequence: Synthetic oligonucleotide
ucacaugguuuaaccucag

SEQ ID NO: 3202367 - RNA, 19 nt, Artificial Sequence
  Description of Artificial Sequence: Synthetic oligonucleotide
uccccaacugugauuccug

SEQ ID NO: 3202368 - RNA, 19 nt, Artificial Sequence
  Description of Artificial Sequence: Synthetic oligonucleotide
caucaggcaagaccucugc

SEQ ID NO: 3202369 - RNA, 19 nt, Artificial Sequence
  Description of Artificial Sequence: Synthetic oligonucleotide
aggcaagaccucugcaaag

SEQ ID NO: 3202370 - RNA, 19 nt, Artificial Sequence
  Description of Artificial Sequence: Synthetic oligonucleotide
uggcuagauaauugcucug

SEQ ID NO: 3202371 - RNA, 19 nt, Artificial Sequence
  Description of Artificial Sequence: Synthetic oligonucleotide
acucaacauguucucucug

SEQ ID NO: 3202372 - RNA, 19 nt, Artificial Sequence
  Description of Artificial Sequence: Synthetic oligonucleotide
aggaaaccauugucuaugu

SEQ ID NO: 3202373 - RNA, 19 nt, Artificial Sequence
  Description of Artificial Sequence: Synthetic oligonucleotide
ucaccaacauggcuagaua

SEQ ID NO: 3202374 - RNA, 19 nt, Artificial Sequence
  Description of Artificial Sequence: Synthetic oligonucleotide
uuccgagccuccgauagcu

SEQ ID NO: 3202375 - RNA, 19 nt, Artificial Sequence
  Description of Artificial Sequence: Synthetic oligonucleotide
gguuuaaccucaggaaacc

SEQ ID NO: 3202376 - RNA, 19 nt, Artificial Sequence
  Description of Artificial Sequence: Synthetic oligonucleotide
cacaugguuuaaccucagg

SEQ ID NO: 3202377 - RNA, 19 nt, Artificial Sequence
  Description of Artificial Sequence: Synthetic oligonucleotide
guguuccaagcccaucuug

SEQ ID NO: 3202378 - RNA, 19 nt, Artificial Sequence
  Description of Artificial Sequence: Synthetic oligonucleotide
ccucacaugguuuaaccuc

SEQ ID NO: 3202379 - RNA, 19 nt, Artificial Sequence
  Description of Artificial Sequence: Synthetic oligonucleotide
gcaagaccucugcaaagcg

SEQ ID NO: 3202380 - RNA, 19 nt, Artificial Sequence
  Description of Artificial Sequence: Synthetic oligonucleotide
uaauugcucuguguuguuc

SEQ ID NO: 3202381 - RNA, 19 nt, Artificial Sequence
  Description of Artificial Sequence: Synthetic oligonucleotide
caccaacauggcuagauaa

SEQ ID NO: 3202382 - RNA, 19 nt, Artificial Sequence
  Description of Artificial Sequence: Synthetic oligonucleotide
cuagauaauugcucugugu

SEQ ID NO: 3202383 - RNA, 19 nt, Artificial Sequence
  Description of Artificial Sequence: Synthetic oligonucleotide
uguguuccaagcccaucuu

SEQ ID NO: 3202384 - RNA, 19 nt, Artificial Sequence
  Description of Artificial Sequence: Synthetic oligonucleotide
aucaggcaagaccucugca

SEQ ID NO: 3202385 - RNA, 19 nt, Artificial Sequence
  Description of Artificial Sequence: Synthetic oligonucleotide
cucaggaaaccauugucua

SEQ ID NO: 3202386 - RNA, 19 nt, Artificial Sequence
  Description of Artificial Sequence: Synthetic oligonucleotide
uauguccccaacugugauu

SEQ ID NO: 3202387 - RNA, 19 nt, Artificial Sequence
  Description of Artificial Sequence: Synthetic oligonucleotide
acauggcuagauaauugcu

SEQ ID NO: 3202388 - RNA, 19 nt, Artificial Sequence
  Description of Artificial Sequence: Synthetic oligonucleotide
auguucucucugggaaccc

SEQ ID NO: 3202389 - RNA, 19 nt, Artificial Sequence
  Description of Artificial Sequence: Synthetic oligonucleotide
accucugcaaagcgacuca

SEQ ID NO: 3202390 - RNA, 19 nt, Artificial Sequence
  Description of Artificial Sequence: Synthetic oligonucleotide
gacucaacauguucucucu

SEQ ID NO: 3202391 - RNA, 19 nt, Artificial Sequence
  Description of Artificial Sequence: Synthetic oligonucleotide
gcuagauaauugcucugug

SEQ ID NO: 3202392 - RNA, 19 nt, Artificial Sequence
  Description of Artificial Sequence: Synthetic oligonucleotide
ucuugggcccuaugucccc

SEQ ID NO: 3202393 - RNA, 19 nt, Artificial Sequence
  Description of Artificial Sequence: Synthetic oligonucleotide
caagaccucugcaaagcga

SEQ ID NO: 3202394 - RNA, 19 nt, Artificial Sequence
  Description of Artificial Sequence: Synthetic oligonucleotide
cucugcaaagcgacucaac

SEQ ID NO: 3202395 - RNA, 19 nt, Artificial Sequence
  Description of Artificial Sequence: Synthetic oligonucleotide
ucucucugggaacccucac

SEQ ID NO: 3202396 - RNA, 19 nt, Artificial Sequence
  Description of Artificial Sequence: Synthetic oligonucleotide
gaccucugcaaagcgacuc

SEQ ID NO: 3202397 - RNA, 19 nt, Artificial Sequence
  Description of Artificial Sequence: Synthetic oligonucleotide
aauagauccaccuccagcc

SEQ ID NO: 3202398 - RNA, 19 nt, Artificial Sequence
  Description of Artificial Sequence: Synthetic oligonucleotide
aauguccccaauuugagcc

SEQ ID NO: 3202399 - RNA, 19 nt, Artificial Sequence
  Description of Artificial Sequence: Synthetic oligonucleotide
uaaaugaucaucccaaugg

SEQ ID NO: 3202400 - RNA, 19 nt, Artificial Sequence
  Description of Artificial Sequence: Synthetic oligonucleotide
aucuugaacaauuaauucc

SEQ ID NO: 3202401 - RNA, 19 nt, Artificial Sequence
  Description of Artificial Sequence: Synthetic oligonucleotide
uuaaaauaugaaaucauug

SEQ ID NO: 3202402 - RNA, 19 nt, Artificial Sequence
  Description of Artificial Sequence: Synthetic oligonucleotide
aauauaaaacccuggcuuc

SEQ ID NO: 3202403 - RNA, 19 nt, Artificial Sequence
  Description of Artificial Sequence: Synthetic oligonucleotide
acuauuacuauuuauaaaa

SEQ ID NO: 3202404 - RNA, 19 nt, Artificial Sequence
  Description of Artificial Sequence: Synthetic oligonucleotide
uaaauaaugucuuuuccag

SEQ ID NO: 3202405 - RNA, 19 nt, Artificial Sequence
  Description of Artificial Sequence: Synthetic oligonucleotide
gagauaucgaguuuaaaag

SEQ ID NO: 3202406 - RNA, 19 nt, Artificial Sequence
  Description of Artificial Sequence: Synthetic oligonucleotide
agauaucgaguuuaaaagc

SEQ ID NO: 3202407 - RNA, 19 nt, Artificial Sequence
  Description of Artificial Sequence: Synthetic oligonucleotide
ucucauaccaauuaaggug

SEQ ID NO: 3202408 - RNA, 19 nt, Artificial Sequence
  Description of Artificial Sequence: Synthetic oligonucleotide
uguguauuaaggauuuggg

SEQ ID NO: 3202409 - RNA, 19 nt, Artificial Sequence
  Description of Artificial Sequence: Synthetic oligonucleotide
ucuuagauccacaaguugc

SEQ ID NO: 3202410 - RNA, 19 nt, Artificial Sequence
  Description of Artificial Sequence: Synthetic oligonucleotide
aauguaguaccugaaaguc

SEQ ID NO: 3202411 - RNA, 19 nt, Artificial Sequence
  Description of Artificial Sequence: Synthetic oligonucleotide
ugaguagacauccaccugg

SEQ ID NO: 3202412 - RNA, 19 nt, Artificial Sequence
  Description of Artificial Sequence: Synthetic oligonucleotide
uuucuuaagaugcauuaag

SEQ ID NO: 3202413 - RNA, 19 nt, Artificial Sequence
  Description of Artificial Sequence: Synthetic oligonucleotide
ucuugaacaauuaauucca

SEQ ID NO: 3202414 - RNA, 19 nt, Artificial Sequence
  Description of Artificial Sequence: Synthetic oligonucleotide
auacagauuaugcuggucg

SEQ ID NO: 3202415 - RNA, 19 nt, Artificial Sequence
  Description of Artificial Sequence: Synthetic oligonucleotide
aaugaguagacauccaccu

SEQ ID NO: 3202416 - RNA, 19 nt, Artificial Sequence
  Description of Artificial Sequence: Synthetic oligonucleotide
augaaggucauuuccaaac

SEQ ID NO: 3202417 - RNA, 19 nt, Artificial Sequence
  Description of Artificial Sequence: Synthetic oligonucleotide
cuugguuuguguauuaagg

SEQ ID NO: 3202418 - RNA, 19 nt, Artificial Sequence
  Description of Artificial Sequence: Synthetic oligonucleotide
auuaaguuacaacagucag

SEQ ID NO: 3202419 - RNA, 19 nt, Artificial Sequence
  Description of Artificial Sequence: Synthetic oligonucleotide
uuuagauucgcacucguac

SEQ ID NO: 3202420 - RNA, 19 nt, Artificial Sequence
  Description of Artificial Sequence: Synthetic oligonucleotide
uuaaacuucuuaauuguga

SEQ ID NO: 3202421 - RNA, 19 nt, Artificial Sequence
  Description of Artificial Sequence: Synthetic oligonucleotide
agaaacauguccccguacc

SEQ ID NO: 3202422 - RNA, 19 nt, Artificial Sequence
  Description of Artificial Sequence: Synthetic oligonucleotide
cacuguguaacuuagcccg

SEQ ID NO: 3202423 - RNA, 19 nt, Artificial Sequence
  Description of Artificial Sequence: Synthetic oligonucleotide
uagucauuauacaagauuc

SEQ ID NO: 3202424 - RNA, 19 nt, Artificial Sequence
  Description of Artificial Sequence: Synthetic oligonucleotide
caaacuuuuagucuccagg

SEQ ID NO: 3202425 - RNA, 19 nt, Artificial Sequence
  Description of Artificial Sequence: Synthetic oligonucleotide
aacuggcuaaucauuaugc

SEQ ID NO: 3202426 - RNA, 19 nt, Artificial Sequence
  Description of Artificial Sequence: Synthetic oligonucleotide
uuugugaugacauaauuuu

SEQ ID NO: 3202427 - RNA, 19 nt, Artificial Sequence
  Description of Artificial Sequence: Synthetic oligonucleotide
uauuacuauuuauaaaaga

SEQ ID NO: 3202428 - RNA, 19 nt, Artificial Sequence
  Description of Artificial Sequence: Synthetic oligonucleotide
aaucagauuaacuccuuca

SEQ ID NO: 3202429 - RNA, 19 nt, Artificial Sequence
  Description of Artificial Sequence: Synthetic oligonucleotide
uggggauuugucaagaaga

SEQ ID NO: 3202430 - RNA, 19 nt, Artificial Sequence
  Description of Artificial Sequence: Synthetic oligonucleotide
agugcugccauucuaaaca

SEQ ID NO: 3202431 - RNA, 19 nt, Artificial Sequence
  Description of Artificial Sequence: Synthetic oligonucleotide
uuguguauuaaggauuugg

SEQ ID NO: 3202432 - RNA, 19 nt, Artificial Sequence
  Description of Artificial Sequence: Synthetic oligonucleotide
auggugauuucccuggggc

SEQ ID NO: 3202433 - RNA, 19 nt, Artificial Sequence
  Description of Artificial Sequence: Synthetic oligonucleotide
gauaagucaaaagcagucg

SEQ ID NO: 3202434 - RNA, 19 nt, Artificial Sequence
  Description of Artificial Sequence: Synthetic oligonucleotide
cuugcaaaguaaaugauca

SEQ ID NO: 3202435 - RNA, 19 nt, Artificial Sequence
  Description of Artificial Sequence: Synthetic oligonucleotide
uguaguaccugaaagucaa

SEQ ID NO: 3202436 - RNA, 19 nt, Artificial Sequence
  Description of Artificial Sequence: Synthetic oligonucleotide
uaccauguagagaaaacug

SEQ ID NO: 3202437 - RNA, 19 nt, Artificial Sequence
  Description of Artificial Sequence: Synthetic oligonucleotide
uauauucugaccugcauau

SEQ ID NO: 3202438 - RNA, 19 nt, Artificial Sequence
  Description of Artificial Sequence: Synthetic oligonucleotide
uuuacaucaaggguuaaac

SEQ ID NO: 3202439 - RNA, 19 nt, Artificial Sequence
  Description of Artificial Sequence: Synthetic oligonucleotide
aaagcagucgcauuuuaaa

SEQ ID NO: 3202440 - RNA, 19 nt, Artificial Sequence
  Description of Artificial Sequence: Synthetic oligonucleotide
cuauuacuauuuauaaaag

SEQ ID NO: 3202441 - RNA, 19 nt, Artificial Sequence
  Description of Artificial Sequence: Synthetic oligonucleotide
uuaggaauguaguaccuga

SEQ ID NO: 3202442 - RNA, 19 nt, Artificial Sequence
  Description of Artificial Sequence: Synthetic oligonucleotide
guguauuaaggauuugggg

SEQ ID NO: 3202443 - RNA, 19 nt, Artificial Sequence
  Description of Artificial Sequence: Synthetic oligonucleotide
uuaaguuacaacagucagu

SEQ ID NO: 3202444 - RNA, 19 nt, Artificial Sequence
  Description of Artificial Sequence: Synthetic oligonucleotide
ucuaauuucuugcuccaga

SEQ ID NO: 3202445 - RNA, 19 nt, Artificial Sequence
  Description of Artificial Sequence: Synthetic oligonucleotide
gaaaucauugucaauaaaa

SEQ ID NO: 3202446 - RNA, 19 nt, Artificial Sequence
  Description of Artificial Sequence: Synthetic oligonucleotide
ucagcaaaagcucaagcau

SEQ ID NO: 3202447 - RNA, 19 nt, Artificial Sequence
  Description of Artificial Sequence: Synthetic oligonucleotide
cuucacacacauaaauucc

SEQ ID NO: 3202448 - RNA, 19 nt, Artificial Sequence
  Description of Artificial Sequence: Synthetic oligonucleotide
ucuuuaucaauuaucuaua

SEQ ID NO: 3202449 - RNA, 19 nt, Artificial Sequence
  Description of Artificial Sequence: Synthetic oligonucleotide
uucuuaagaugcauuaagu

SEQ ID NO: 3202450 - RNA, 19 nt, Artificial Sequence
  Description of Artificial Sequence: Synthetic oligonucleotide
caaacaagaucuuuuccag

SEQ ID NO: 3202451 - RNA, 19 nt, Artificial Sequence
  Description of Artificial Sequence: Synthetic oligonucleotide
cuauugaauauuaauauua

SEQ ID NO: 3202452 - RNA, 19 nt, Artificial Sequence
  Description of Artificial Sequence: Synthetic oligonucleotide
gaucuugaacaauuaauuc

SEQ ID NO: 3202453 - RNA, 19 nt, Artificial Sequence
  Description of Artificial Sequence: Synthetic oligonucleotide
cucccaaucagauuaacuc

SEQ ID NO: 3202454 - RNA, 19 nt, Artificial Sequence
  Description of Artificial Sequence: Synthetic oligonucleotide
aaucauuaugccaugaauu

SEQ ID NO: 3202455 - RNA, 19 nt, Artificial Sequence
  Description of Artificial Sequence: Synthetic oligonucleotide
aucgugaccaucuucucag

SEQ ID NO: 3202456 - RNA, 19 nt, Artificial Sequence
  Description of Artificial Sequence: Synthetic oligonucleotide
uugguuuguguauuaagga

SEQ ID NO: 3202457 - RNA, 19 nt, Artificial Sequence
  Description of Artificial Sequence: Synthetic oligonucleotide
uugaacaauuaauuccacc

SEQ ID NO: 3202458 - RNA, 19 nt, Artificial Sequence
  Description of Artificial Sequence: Synthetic oligonucleotide
aagaaacauguccccguac

SEQ ID NO: 3202459 - RNA, 19 nt, Artificial Sequence
  Description of Artificial Sequence: Synthetic oligonucleotide
gauggagucucacagccug

SEQ ID NO: 3202460 - RNA, 19 nt, Artificial Sequence
  Description of Artificial Sequence: Synthetic oligonucleotide
ugcacaguagagugcaagg

SEQ ID NO: 3202461 - RNA, 19 nt, Artificial Sequence
  Description of Artificial Sequence: Synthetic oligonucleotide
ggucguauacaccucaugg

SEQ ID NO: 3202462 - RNA, 19 nt, Artificial Sequence
  Description of Artificial Sequence: Synthetic oligonucleotide
gagauaaugacagugucuc

SEQ ID NO: 3202463 - RNA, 19 nt, Artificial Sequence
  Description of Artificial Sequence: Synthetic oligonucleotide
cuugcauucagcaaaagcu

SEQ ID NO: 3202464 - RNA, 19 nt, Artificial Sequence
  Description of Artificial Sequence: Synthetic oligonucleotide
aggagauaaugacaguguc

SEQ ID NO: 3202465 - RNA, 19 nt, Artificial Sequence
  Description of Artificial Sequence: Synthetic oligonucleotide
auuaucuauaagaauauaa

SEQ ID NO: 3202466 - RNA, 19 nt, Artificial Sequence
  Description of Artificial Sequence: Synthetic oligonucleotide
auaagaauauaaaacccug

SEQ ID NO: 3202467 - RNA, 19 nt, Artificial Sequence
  Description of Artificial Sequence: Synthetic oligonucleotide
uaaaccauauuagucauua

SEQ ID NO: 3202468 - RNA, 19 nt, Artificial Sequence
  Description of Artificial Sequence: Synthetic oligonucleotide
ugucuuuuccagaacauuu

SEQ ID NO: 3202469 - RNA, 19 nt, Artificial Sequence
  Description of Artificial Sequence: Synthetic oligonucleotide
uuccucacaaugaugggga

SEQ ID NO: 3202470 - RNA, 19 nt, Artificial Sequence
  Description of Artificial Sequence: Synthetic oligonucleotide
acuguuugauuauauucug

SEQ ID NO: 3202471 - RNA, 19 nt, Artificial Sequence
  Description of Artificial Sequence: Synthetic oligonucleotide
aaggguuaaacuucuuaau

SEQ ID NO: 3202472 - RNA, 19 nt, Artificial Sequence
  Description of Artificial Sequence: Synthetic oligonucleotide
gucguauacaccucauggg

SEQ ID NO: 3202473 - RNA, 19 nt, Artificial Sequence
  Description of Artificial Sequence: Synthetic oligonucleotide
ugaucaucccaauggcagg

SEQ ID NO: 3202474 - RNA, 19 nt, Artificial Sequence
  Description of Artificial Sequence: Synthetic oligonucleotide
uguaacuuagcccggcaaa

SEQ ID NO: 3202475 - RNA, 19 nt, Artificial Sequence
  Description of Artificial Sequence: Synthetic oligonucleotide
ugcaaaguaaaugaucauc

SEQ ID NO: 3202476 - RNA, 19 nt, Artificial Sequence
  Description of Artificial Sequence: Synthetic oligonucleotide
ugcauucagcaaaagcuca

SEQ ID NO: 3202477 - RNA, 19 nt, Artificial Sequence
  Description of Artificial Sequence: Synthetic oligonucleotide
accauguagagaaaacugg

SEQ ID NO: 3202478 - RNA, 19 nt, Artificial Sequence
  Description of Artificial Sequence: Synthetic oligonucleotide
ugagccaucguuuugucuu

SEQ ID NO: 3202479 - RNA, 19 nt, Artificial Sequence
  Description of Artificial Sequence: Synthetic oligonucleotide
uucggugguaggaaugaag

SEQ ID NO: 3202480 - RNA, 19 nt, Artificial Sequence
  Description of Artificial Sequence: Synthetic oligonucleotide
guaaaugaucaucccaaug

SEQ ID NO: 3202481 - RNA, 19 nt, Artificial Sequence
  Description of Artificial Sequence: Synthetic oligonucleotide
ucaaucuccagaugguuaa

SEQ ID NO: 3202482 - RNA, 19 nt, Artificial Sequence
  Description of Artificial Sequence: Synthetic oligonucleotide
gaaucucuggauccuuagg

SEQ ID NO: 3202483 - RNA, 19 nt, Artificial Sequence
  Description of Artificial Sequence: Synthetic oligonucleotide
cauucuaaacaacuuugug

SEQ ID NO: 3202484 - RNA, 19 nt, Artificial Sequence
  Description of Artificial Sequence: Synthetic oligonucleotide
gacuuuagcaccaugucuc

SEQ ID NO: 3202485 - RNA, 19 nt, Artificial Sequence
  Description of Artificial Sequence: Synthetic oligonucleotide
acuucaguuuuagauucgc

SEQ ID NO: 3202486 - RNA, 19 nt, Artificial Sequence
  Description of Artificial Sequence: Synthetic oligonucleotide
uugaccacaggacugcccu

SEQ ID NO: 3202487 - RNA, 19 nt, Artificial Sequence
  Description of Artificial Sequence: Synthetic oligonucleotide
caauucaccacuguguaac

SEQ ID NO: 3202488 - RNA, 19 nt, Artificial Sequence
  Description of Artificial Sequence: Synthetic oligonucleotide
gauggucaccuuugaauag

SEQ ID NO: 3202489 - RNA, 19 nt, Artificial Sequence
  Description of Artificial Sequence: Synthetic oligonucleotide
uugcauucagcaaaagcuc

SEQ ID NO: 3202490 - RNA, 19 nt, Artificial Sequence
  Description of Artificial Sequence: Synthetic oligonucleotide
ucuucuacgacgggagagg

SEQ ID NO: 3202491 - RNA, 19 nt, Artificial Sequence
  Description of Artificial Sequence: Synthetic oligonucleotide
agcugguagacccucacug

SEQ ID NO: 3202492 - RNA, 19 nt, Artificial Sequence
  Description of Artificial Sequence: Synthetic oligonucleotide
aacgcacuagccuugguuu

SEQ ID NO: 3202493 - RNA, 19 nt, Artificial Sequence
  Description of Artificial Sequence: Synthetic oligonucleotide
ucaaggguuaaacuucuua

SEQ ID NO: 3202494 - RNA, 19 nt, Artificial Sequence
  Description of Artificial Sequence: Synthetic oligonucleotide
ugaaucucuggauccuuag

SEQ ID NO: 3202495 - RNA, 19 nt, Artificial Sequence
  Description of Artificial Sequence: Synthetic oligonucleotide
auggcagguauuaucaagg

SEQ ID NO: 3202496 - RNA, 19 nt, Artificial Sequence
  Description of Artificial Sequence: Synthetic oligonucleotide
uuacaucaaggguuaaacu

SEQ ID NO: 3202497 - RNA, 19 nt, Artificial Sequence
  Description of Artificial Sequence: Synthetic oligonucleotide
aagauuuuagcacaaacgg

SEQ ID NO: 3202498 - RNA, 19 nt, Artificial Sequence
  Description of Artificial Sequence: Synthetic oligonucleotide
aagaguaggacuuuccucc

SEQ ID NO: 3202499 - RNA, 19 nt, Artificial Sequence
  Description of Artificial Sequence: Synthetic oligonucleotide
agaauugucauucacaucu

SEQ ID NO: 3202500 - RNA, 19 nt, Artificial Sequence
  Description of Artificial Sequence: Synthetic oligonucleotide
ucuggaauagaacagacca

SEQ ID NO: 3202501 - RNA, 19 nt, Artificial Sequence
  Description of Artificial Sequence: Synthetic oligonucleotide
aauagaacagaccauccug

SEQ ID NO: 3202502 - RNA, 19 nt, Artificial Sequence
  Description of Artificial Sequence: Synthetic oligonucleotide
aaaaucauaacuaaaguau

SEQ ID NO: 3202503 - RNA, 19 nt, Artificial Sequence
  Description of Artificial Sequence: Synthetic oligonucleotide
aaucauaacuaaaguaucc

SEQ ID NO: 3202504 - RNA, 19 nt, Artificial Sequence
  Description of Artificial Sequence: Synthetic oligonucleotide
auuugaacucauuuguccc

SEQ ID NO: 3202505 - RNA, 19 nt, Artificial Sequence
  Description of Artificial Sequence: Synthetic oligonucleotide
uaaaugaugacacagcaau

SEQ ID NO: 3202506 - RNA, 19 nt, Artificial Sequence
  Description of Artificial Sequence: Synthetic oligonucleotide
uuuguccugagcauggucg

SEQ ID NO: 3202507 - RNA, 19 nt, Artificial Sequence
  Description of Artificial Sequence: Synthetic oligonucleotide
acucauuugucccaguacc

SEQ ID NO: 3202508 - RNA, 19 nt, Artificial Sequence
  Description of Artificial Sequence: Synthetic oligonucleotide
gaagauuuuagcacaaacg

SEQ ID NO: 3202509 - RNA, 19 nt, Artificial Sequence
  Description of Artificial Sequence: Synthetic oligonucleotide
auaacuaaaguauccgggg

SEQ ID NO: 3202510 - RNA, 19 nt, Artificial Sequence
  Description of Artificial Sequence: Synthetic oligonucleotide
aaagaguaggacuuuccuc

SEQ ID NO: 3202511 - RNA, 19 nt, Artificial Sequence
  Description of Artificial Sequence: Synthetic oligonucleotide
uauuguaaagaguaggacu

SEQ ID NO: 3202512 - RNA, 19 nt, Artificial Sequence
  Description of Artificial Sequence: Synthetic oligonucleotide
cauaacuaaaguauccggg

SEQ ID NO: 3202513 - RNA, 19 nt, Artificial Sequence
  Description of Artificial Sequence: Synthetic oligonucleotide
aagacacugacgccaaagc

SEQ ID NO: 3202514 - RNA, 19 nt, Artificial Sequence
  Description of Artificial Sequence: Synthetic oligonucleotide
aacuauuguaaagaguagg

SEQ ID NO: 3202515 - RNA, 19 nt, Artificial Sequence
  Description of Artificial Sequence: Synthetic oligonucleotide
aguaccucccaucauacac

SEQ ID NO: 3202516 - RNA, 19 nt, Artificial Sequence
  Description of Artificial Sequence: Synthetic oligonucleotide
uuucaaucgaagauuuuag

SEQ ID NO: 3202517 - RNA, 19 nt, Artificial Sequence
  Description of Artificial Sequence: Synthetic oligonucleotide
uugucauucacaucuauca

SEQ ID NO: 3202518 - RNA, 19 nt, Artificial Sequence
  Description of Artificial Sequence: Synthetic oligonucleotide
ucaaucgaagauuuuagca

SEQ ID NO: 3202519 - RNA, 19 nt, Artificial Sequence
  Description of Artificial Sequence: Synthetic oligonucleotide
aacaacagcacaaacaaga

SEQ ID NO: 3202520 - RNA, 19 nt, Artificial Sequence
  Description of Artificial Sequence: Synthetic oligonucleotide
ucauaacuaaaguauccgg

SEQ ID NO: 3202521 - RNA, 19 nt, Artificial Sequence
  Description of Artificial Sequence: Synthetic oligonucleotide
aaaucauaacuaaaguauc

SEQ ID NO: 3202522 - RNA, 19 nt, Artificial Sequence
  Description of Artificial Sequence: Synthetic oligonucleotide
aaucgaagauuuuagcaca

SEQ ID NO: 3202523 - RNA, 19 nt, Artificial Sequence
  Description of Artificial Sequence: Synthetic oligonucleotide
aguaauuuucaaucgaaga

SEQ ID NO: 3202524 - RNA, 19 nt, Artificial Sequence
  Description of Artificial Sequence: Synthetic oligonucleotide
aacucauuugucccaguac

SEQ ID NO: 3202525 - RNA, 19 nt, Artificial Sequence
  Description of Artificial Sequence: Synthetic oligonucleotide
ugauaaaugaugacacagc

SEQ ID NO: 3202526 - RNA, 19 nt, Artificial Sequence
  Description of Artificial Sequence: Synthetic oligonucleotide
aauuuucugggacuggacu

SEQ ID NO: 3202527 - RNA, 19 nt, Artificial Sequence
  Description of Artificial Sequence: Synthetic oligonucleotide
gauaaaugaugacacagca

SEQ ID NO: 3202528 - RNA, 19 nt, Artificial Sequence
  Description of Artificial Sequence: Synthetic oligonucleotide
ugacacagcaaucucagga

SEQ ID NO: 3202529 - RNA, 19 nt, Artificial Sequence
  Description of Artificial Sequence: Synthetic oligonucleotide
aauaaccccaaacuauugu

SEQ ID NO: 3202530 - RNA, 19 nt, Artificial Sequence
  Description of Artificial Sequence: Synthetic oligonucleotide
gaaaguguccuucaggcac

SEQ ID NO: 3202531 - RNA, 19 nt, Artificial Sequence
  Description of Artificial Sequence: Synthetic oligonucleotide
caaacuauuguaaagagua

SEQ ID NO: 3202532 - RNA, 19 nt, Artificial Sequence
  Description of Artificial Sequence: Synthetic oligonucleotide
aggaauuugaacucauuug

SEQ ID NO: 3202533 - RNA, 19 nt, Artificial Sequence
  Description of Artificial Sequence: Synthetic oligonucleotide
gauuuuagcacaaacggga

SEQ ID NO: 3202534 - RNA, 19 nt, Artificial Sequence
  Description of Artificial Sequence: Synthetic oligonucleotide
ugguaguaauuuucaaucg

SEQ ID NO: 3202535 - RNA, 19 nt, Artificial Sequence
  Description of Artificial Sequence: Synthetic oligonucleotide
uaguaauuuucaaucgaag

SEQ ID NO: 3202536 - RNA, 19 nt, Artificial Sequence
  Description of Artificial Sequence: Synthetic oligonucleotide
caaucgaagauuuuagcac

SEQ ID NO: 3202537 - RNA, 19 nt, Artificial Sequence
  Description of Artificial Sequence: Synthetic oligonucleotide
uuuuagcacaaacgggagg

SEQ ID NO: 3202538 - RNA, 19 nt, Artificial Sequence
  Description of Artificial Sequence: Synthetic oligonucleotide
uaagugguaguaauuuuca

SEQ ID NO: 3202539 - RNA, 19 nt, Artificial Sequence
  Description of Artificial Sequence: Synthetic oligonucleotide
uccuccauuacuuucccag

SEQ ID NO: 3202540 - RNA, 19 nt, Artificial Sequence
  Description of Artificial Sequence: Synthetic oligonucleotide
uauccggggaauuuucugg

SEQ ID NO: 3202541 - RNA, 19 nt, Artificial Sequence
  Description of Artificial Sequence: Synthetic oligonucleotide
agcacaugcagagugacac

SEQ ID NO: 3202542 - RNA, 19 nt, Artificial Sequence
  Description of Artificial Sequence: Synthetic oligonucleotide
aucauaacuaaaguauccg

SEQ ID NO: 3202543 - RNA, 19 nt, Artificial Sequence
  Description of Artificial Sequence: Synthetic oligonucleotide
uaaagaguaggacuuuccu

SEQ ID NO: 3202544 - RNA, 19 nt, Artificial Sequence
  Description of Artificial Sequence: Synthetic oligonucleotide
uuuagcacaaacgggaggu

SEQ ID NO: 3202545 - RNA, 19 nt, Artificial Sequence
  Description of Artificial Sequence: Synthetic oligonucleotide
auagaacagaccauccugc

SEQ ID NO: 3202546 - RNA, 19 nt, Artificial Sequence
  Description of Artificial Sequence: Synthetic oligonucleotide
cugauaaaugaugacacag

SEQ ID NO: 3202547 - RNA, 19 nt, Artificial Sequence
  Description of Artificial Sequence: Synthetic oligonucleotide
gugguaguaauuuucaauc

SEQ ID NO: 3202548 - RNA, 19 nt, Artificial Sequence
  Description of Artificial Sequence: Synthetic oligonucleotide
caucauacacaccucauac

SEQ ID NO: 3202549 - RNA, 19 nt, Artificial Sequence
  Description of Artificial Sequence: Synthetic oligonucleotide
cuaagugguaguaauuuuc

SEQ ID NO: 3202550 - RNA, 19 nt, Artificial Sequence
  Description of Artificial Sequence: Synthetic oligonucleotide
gacacagcaaucucaggag

SEQ ID NO: 3202551 - RNA, 19 nt, Artificial Sequence
  Description of Artificial Sequence: Synthetic oligonucleotide
uucaaucgaagauuuuagc

SEQ ID NO: 3202552 - RNA, 19 nt, Artificial Sequence
  Description of Artificial Sequence: Synthetic oligonucleotide
ugaugacacagcaaucuca

SEQ ID NO: 3202553 - RNA, 19 nt, Artificial Sequence
  Description of Artificial Sequence: Synthetic oligonucleotide
gacugauaaaugaugacac

SEQ ID NO: 3202554 - RNA, 19 nt, Artificial Sequence
  Description of Artificial Sequence: Synthetic oligonucleotide
uuuucaaucgaagauuuua

SEQ ID NO: 3202555 - RNA, 19 nt, Artificial Sequence
  Description of Artificial Sequence: Synthetic oligonucleotide
agagaggcugcccuugccc

SEQ ID NO: 3202556 - RNA, 19 nt, Artificial Sequence
  Description of Artificial Sequence: Synthetic oligonucleotide
gaugacacagcaaucucag

SEQ ID NO: 3202557 - RNA, 19 nt, Artificial Sequence
  Description of Artificial Sequence: Synthetic oligonucleotide
aacuaaaguauccggggaa

SEQ ID NO: 3202558 - RNA, 19 nt, Artificial Sequence
  Description of Artificial Sequence: Synthetic oligonucleotide
uaacuaaaguauccgggga

SEQ ID NO: 3202559 - RNA, 19 nt, Artificial Sequence
  Description of Artificial Sequence: Synthetic oligonucleotide
guguccuucaggcacagag

SEQ ID NO: 3202560 - RNA, 19 nt, Artificial Sequence
  Description of Artificial Sequence: Synthetic oligonucleotide
aaucucaggagaauuguca

SEQ ID NO: 3202561 - RNA, 19 nt, Artificial Sequence
  Description of Artificial Sequence: Synthetic oligonucleotide
uuugaacucauuuguccca

SEQ ID NO: 3202562 - RNA, 19 nt, Artificial Sequence
  Description of Artificial Sequence: Synthetic oligonucleotide
agugguaguaauuuucaau

SEQ ID NO: 3202563 - RNA, 19 nt, Artificial Sequence
  Description of Artificial Sequence: Synthetic oligonucleotide
uaacucugggacaagguuc

SEQ ID NO: 3202564 - RNA, 19 nt, Artificial Sequence
  Description of Artificial Sequence: Synthetic oligonucleotide
agauuuuagcacaaacggg

SEQ ID NO: 3202565 - RNA, 19 nt, Artificial Sequence
  Description of Artificial Sequence: Synthetic oligonucleotide
uaauuuucaaucgaagauu

SEQ ID NO: 3202566 - RNA, 19 nt, Artificial Sequence
  Description of Artificial Sequence: Synthetic oligonucleotide
aauuuucaaucgaagauuu

SEQ ID NO: 3202567 - RNA, 19 nt, Artificial Sequence
  Description of Artificial Sequence: Synthetic oligonucleotide
auuacuuucccagggaacu

SEQ ID NO: 3202568 - RNA, 19 nt, Artificial Sequence
  Description of Artificial Sequence: Synthetic oligonucleotide
gaguccuugucuuggauac

SEQ ID NO: 3202569 - RNA, 19 nt, Artificial Sequence
  Description of Artificial Sequence: Synthetic oligonucleotide
uuucccagggaacuggggu

SEQ ID NO: 3202570 - RNA, 19 nt, Artificial Sequence
  Description of Artificial Sequence: Synthetic oligonucleotide
aaaugaugacacagcaauc

SEQ ID NO: 3202571 - RNA, 19 nt, Artificial Sequence
  Description of Artificial Sequence: Synthetic oligonucleotide
ugucauucacaucuaucac

SEQ ID NO: 3202572 - RNA, 19 nt, Artificial Sequence
  Description of Artificial Sequence: Synthetic oligonucleotide
uggaauagaacagaccauc

SEQ ID NO: 3202573 - RNA, 19 nt, Artificial Sequence
  Description of Artificial Sequence: Synthetic oligonucleotide
ucugggacaagguucccgc

SEQ ID NO: 3202574 - RNA, 19 nt, Artificial Sequence
  Description of Artificial Sequence: Synthetic oligonucleotide
gaacuggggugguagauug

SEQ ID NO: 3202575 - RNA, 19 nt, Artificial Sequence
  Description of Artificial Sequence: Synthetic oligonucleotide
aaacuauuguaaagaguag

SEQ ID NO: 3202576 - RNA, 19 nt, Artificial Sequence
  Description of Artificial Sequence: Synthetic oligonucleotide
aggacuuuccuccauuacu

SEQ ID NO: 3202577 - RNA, 19 nt, Artificial Sequence
  Description of Artificial Sequence: Synthetic oligonucleotide
augaugacacagcaaucuc

SEQ ID NO: 3202578 - RNA, 19 nt, Artificial Sequence
  Description of Artificial Sequence: Synthetic oligonucleotide
gacgccaaagcaaugacca

SEQ ID NO: 3202579 - RNA, 19 nt, Artificial Sequence
  Description of Artificial Sequence: Synthetic oligonucleotide
cauuugucccaguaccucc

SEQ ID NO: 3202580 - RNA, 19 nt, Artificial Sequence
  Description of Artificial Sequence: Synthetic oligonucleotide
acuauuguaaagaguagga

SEQ ID NO: 3202581 - RNA, 19 nt, Artificial Sequence
  Description of Artificial Sequence: Synthetic oligonucleotide
aauugucauucacaucuau

SEQ ID NO: 3202582 - RNA, 19 nt, Artificial Sequence
  Description of Artificial Sequence: Synthetic oligonucleotide
agagucagcacaucuuugu

SEQ ID NO: 3202583 - RNA, 19 nt, Artificial Sequence
  Description of Artificial Sequence: Synthetic oligonucleotide
guaauuuucaaucgaagau

SEQ ID NO: 3202584 - RNA, 19 nt, Artificial Sequence
  Description of Artificial Sequence: Synthetic oligonucleotide
auuguaaagaguaggacuu

SEQ ID NO: 3202585 - RNA, 19 nt, Artificial Sequence
  Description of Artificial Sequence: Synthetic oligonucleotide
caacagcacaaacaagagg

SEQ ID NO: 3202586 - RNA, 19 nt, Artificial Sequence
  Description of Artificial Sequence: Synthetic oligonucleotide
gaagacacugacgccaaag

SEQ ID NO: 3202587 - RNA, 19 nt, Artificial Sequence
  Description of Artificial Sequence: Synthetic oligonucleotide
ugcuguucucuccugaguc

SEQ ID NO: 3202588 - RNA, 19 nt, Artificial Sequence
  Description of Artificial Sequence: Synthetic oligonucleotide
cacaucuuuguccugagca

SEQ ID NO: 3202589 - RNA, 19 nt, Artificial Sequence
  Description of Artificial Sequence: Synthetic oligonucleotide
ugacgccaaagcaaugacc

SEQ ID NO: 3202590 - RNA, 19 nt, Artificial Sequence
  Description of Artificial Sequence: Synthetic oligonucleotide
uaaccccaaacuauuguaa

SEQ ID NO: 3202591 - RNA, 19 nt, Artificial Sequence
  Description of Artificial Sequence: Synthetic oligonucleotide
cucaggagaauugucauuc

SEQ ID NO: 3202592 - RNA, 19 nt, Artificial Sequence
  Description of Artificial Sequence: Synthetic oligonucleotide
aaauaaccccaaacuauug

SEQ ID NO: 3202593 - RNA, 19 nt, Artificial Sequence
  Description of Artificial Sequence: Synthetic oligonucleotide
uguccuucaggcacagagc

SEQ ID NO: 3202594 - RNA, 19 nt, Artificial Sequence
  Description of Artificial Sequence: Synthetic oligonucleotide
cuccauuacuuucccaggg

SEQ ID NO: 3202595 - RNA, 19 nt, Artificial Sequence
  Description of Artificial Sequence: Synthetic oligonucleotide
acugauaaaugaugacaca

SEQ ID NO: 3202596 - RNA, 19 nt, Artificial Sequence
  Description of Artificial Sequence: Synthetic oligonucleotide
cuauuguaaagaguaggac

SEQ ID NO: 3202597 - RNA, 19 nt, Artificial Sequence
  Description of Artificial Sequence: Synthetic oligonucleotide
auauccauugcacauagcc

SEQ ID NO: 3202598 - RNA, 19 nt, Artificial Sequence
  Description of Artificial Sequence: Synthetic oligonucleotide
ucuaguuuacccuuugagg

SEQ ID NO: 3202599 - RNA, 19 nt, Artificial Sequence
  Description of Artificial Sequence: Synthetic oligonucleotide
auuuacaacgguccggucc

SEQ ID NO: 3202600 - RNA, 19 nt, Artificial Sequence
  Description of Artificial Sequence: Synthetic oligonucleotide
uuuacaguggaaaaccgag

SEQ ID NO: 3202601 - RNA, 19 nt, Artificial Sequence
  Description of Artificial Sequence: Synthetic oligonucleotide
uacauuuuauucacaaucc

SEQ ID NO: 3202602 - RNA, 19 nt, Artificial Sequence
  Description of Artificial Sequence: Synthetic oligonucleotide
aagaugcuacauuuuauuc

SEQ ID NO: 3202603 - RNA, 19 nt, Artificial Sequence
  Description of Artificial Sequence: Synthetic oligonucleotide
uuauucacaauccgggucc

SEQ ID NO: 3202604 - RNA, 19 nt, Artificial Sequence
  Description of Artificial Sequence: Synthetic oligonucleotide
agcgacuguauuuacaacg

SEQ ID NO: 3202605 - RNA, 19 nt, Artificial Sequence
  Description of Artificial Sequence: Synthetic oligonucleotide
cauuuuauucacaauccgg

SEQ ID NO: 3202606 - RNA, 19 nt, Artificial Sequence
  Description of Artificial Sequence: Synthetic oligonucleotide
auccauugcacauagccac

SEQ ID NO: 3202607 - RNA, 19 nt, Artificial Sequence
  Description of Artificial Sequence: Synthetic oligonucleotide
aaagcguucuccccucucc

SEQ ID NO: 3202608 - RNA, 19 nt, Artificial Sequence
  Description of Artificial Sequence: Synthetic oligonucleotide
auuuuauucacaauccggg

SEQ ID NO: 3202609 - RNA, 19 nt, Artificial Sequence
  Description of Artificial Sequence: Synthetic oligonucleotide
acuguauuuacaacggucc

SEQ ID NO: 3202610 - RNA, 19 nt, Artificial Sequence
  Description of Artificial Sequence: Synthetic oligonucleotide
cuacauuuuauucacaauc

SEQ ID NO: 3202611 - RNA, 19 nt, Artificial Sequence
  Description of Artificial Sequence: Synthetic oligonucleotide
acccuuugaggucugaugc

SEQ ID NO: 3202612 - RNA, 19 nt, Artificial Sequence
  Description of Artificial Sequence: Synthetic oligonucleotide
aguauuuacaguggaaaac

SEQ ID NO: 3202613 - RNA, 19 nt, Artificial Sequence
  Description of Artificial Sequence: Synthetic oligonucleotide
uuauauccauugcacauag

SEQ ID NO: 3202614 - RNA, 19 nt, Artificial Sequence
  Description of Artificial Sequence: Synthetic oligonucleotide
uauuuacaguggaaaaccg

SEQ ID NO: 3202615 - RNA, 19 nt, Artificial Sequence
  Description of Artificial Sequence: Synthetic oligonucleotide
uacaguggaaaaccgagcc

SEQ ID NO: 3202616 - RNA, 19 nt, Artificial Sequence
  Description of Artificial Sequence: Synthetic oligonucleotide
gaugcuacauuuuauucac

SEQ ID NO: 3202617 - RNA, 19 nt, Artificial Sequence
  Description of Artificial Sequence: Synthetic oligonucleotide
aauggcuuguuccucgcuc

SEQ ID NO: 3202618 - RNA, 19 nt, Artificial Sequence
  Description of Artificial Sequence: Synthetic oligonucleotide
acauuuuauucacaauccg

SEQ ID NO: 3202619 - RNA, 19 nt, Artificial Sequence
  Description of Artificial Sequence: Synthetic oligonucleotide
aacgguccgguccuaaugg

SEQ ID NO: 3202620 - RNA, 19 nt, Artificial Sequence
  Description of Artificial Sequence: Synthetic oligonucleotide
aggaacaagaguuucagaa

SEQ ID NO: 3202621 - RNA, 19 nt, Artificial Sequence
  Description of Artificial Sequence: Synthetic oligonucleotide
uuuauucacaauccggguc

SEQ ID NO: 3202622 - RNA, 19 nt, Artificial Sequence
  Description of Artificial Sequence: Synthetic oligonucleotide
gaguuucagaaguggaugg

SEQ ID NO: 3202623 - RNA, 19 nt, Artificial Sequence
  Description of Artificial Sequence: Synthetic oligonucleotide
guauuuacaguggaaaacc

SEQ ID NO: 3202624 - RNA, 19 nt, Artificial Sequence
  Description of Artificial Sequence: Synthetic oligonucleotide
uguauuuacaacgguccgg

SEQ ID NO: 3202625 - RNA, 19 nt, Artificial Sequence
  Description of Artificial Sequence: Synthetic oligonucleotide
ucagaaguggaugggacgg

SEQ ID NO: 3202626 - RNA, 19 nt, Artificial Sequence
  Description of Artificial Sequence: Synthetic oligonucleotide
agaugcuacauuuuauuca

SEQ ID NO: 3202627 - RNA, 19 nt, Artificial Sequence
  Description of Artificial Sequence: Synthetic oligonucleotide
uuuacaacgguccgguccu

SEQ ID NO: 3202628 - RNA, 19 nt, Artificial Sequence
  Description of Artificial Sequence: Synthetic oligonucleotide
uuaggaacaagaguuucag

SEQ ID NO: 3202629 - RNA, 19 nt, Artificial Sequence
  Description of Artificial Sequence: Synthetic oligonucleotide
uugucguuaggaacaagag

SEQ ID NO: 3202630 - RNA, 19 nt, Artificial Sequence
  Description of Artificial Sequence: Synthetic oligonucleotide
uucagaaguggaugggacg

SEQ ID NO: 3202631 - RNA, 19 nt, Artificial Sequence
  Description of Artificial Sequence: Synthetic oligonucleotide
ugugaaagcguucuccccu

SEQ ID NO: 3202632 - RNA, 19 nt, Artificial Sequence
  Description of Artificial Sequence: Synthetic oligonucleotide
uauccauugcacauagcca

SEQ ID NO: 3202633 - RNA, 19 nt, Artificial Sequence
  Description of Artificial Sequence: Synthetic oligonucleotide
ugugugaaagcguucuccc

SEQ ID NO: 3202634 - RNA, 19 nt, Artificial Sequence
  Description of Artificial Sequence: Synthetic oligonucleotide
ugucguuaggaacaagagu

SEQ ID NO: 3202635 - RNA, 19 nt, Artificial Sequence
  Description of Artificial Sequence: Synthetic oligonucleotide
uggaguucaaaggaggggc

SEQ ID NO: 3202636 - RNA, 19 nt, Artificial Sequence
  Description of Artificial Sequence: Synthetic oligonucleotide
acaagaguuucagaagugg

SEQ ID NO: 3202637 - RNA, 19 nt, Artificial Sequence
  Description of Artificial Sequence: Synthetic oligonucleotide
auugcacauagccacguug

SEQ ID NO: 3202638 - RNA, 19 nt, Artificial Sequence
  Description of Artificial Sequence: Synthetic oligonucleotide
gaugcccuggaguucaaag

SEQ ID NO: 3202639 - RNA, 19 nt, Artificial Sequence
  Description of Artificial Sequence: Synthetic oligonucleotide
uuuuauucacaauccgggu

SEQ ID NO: 3202640 - RNA, 19 nt, Artificial Sequence
  Description of Artificial Sequence: Synthetic oligonucleotide
gucuaguuuacccuuugag

SEQ ID NO: 3202641 - RNA, 19 nt, Artificial Sequence
  Description of Artificial Sequence: Synthetic oligonucleotide
aaguggaugggacggggag

SEQ ID NO: 3202642 - RNA, 19 nt, Artificial Sequence
  Description of Artificial Sequence: Synthetic oligonucleotide
uggggugugugugaaagcg

SEQ ID NO: 3202643 - RNA, 19 nt, Artificial Sequence
  Description of Artificial Sequence: Synthetic oligonucleotide
ugcuacauuuuauucacaa

SEQ ID NO: 3202644 - RNA, 19 nt, Artificial Sequence
  Description of Artificial Sequence: Synthetic oligonucleotide
uuucagaaguggaugggac

SEQ ID NO: 3202645 - RNA, 19 nt, Artificial Sequence
  Description of Artificial Sequence: Synthetic oligonucleotide
uggaaaaccgagccggccc

SEQ ID NO: 3202646 - RNA, 19 nt, Artificial Sequence
  Description of Artificial Sequence: Synthetic oligonucleotide
aagcgacuguauuuacaac

SEQ ID NO: 3202647 - RNA, 19 nt, Artificial Sequence
  Description of Artificial Sequence: Synthetic oligonucleotide
uuguuccucgcucugggcc

SEQ ID NO: 3202648 - RNA, 19 nt, Artificial Sequence
  Description of Artificial Sequence: Synthetic oligonucleotide
uuacaguggaaaaccgagc

SEQ ID NO: 3202649 - RNA, 19 nt, Artificial Sequence
  Description of Artificial Sequence: Synthetic oligonucleotide
ucuccgguuucuuucacug

SEQ ID NO: 3202650 - RNA, 19 nt, Artificial Sequence
  Description of Artificial Sequence: Synthetic oligonucleotide
ugcccuggaguucaaagga

SEQ ID NO: 3202651 - RNA, 19 nt, Artificial Sequence
  Description of Artificial Sequence: Synthetic oligonucleotide
uugcacauagccacguugu

SEQ ID NO: 3202652 - RNA, 19 nt, Artificial Sequence
  Description of Artificial Sequence: Synthetic oligonucleotide
agaguuucagaaguggaug

SEQ ID NO: 3202653 - RNA, 19 nt, Artificial Sequence
  Description of Artificial Sequence: Synthetic oligonucleotide
acaguggaaaaccgagccg

SEQ ID NO: 3202654 - RNA, 19 nt, Artificial Sequence
  Description of Artificial Sequence: Synthetic oligonucleotide
uccauugcacauagccacg

SEQ ID NO: 3202655 - RNA, 19 nt, Artificial Sequence
  Description of Artificial Sequence: Synthetic oligonucleotide
uccgguuucuuucacuggu

SEQ ID NO: 3202656 - RNA, 19 nt, Artificial Sequence
  Description of Artificial Sequence: Synthetic oligonucleotide
gaacaagaguuucagaagu

SEQ ID NO: 3202657 - RNA, 19 nt, Artificial Sequence
  Description of Artificial Sequence: Synthetic oligonucleotide
cuaguuuacccuuugaggu

SEQ ID NO: 3202658 - RNA, 19 nt, Artificial Sequence
  Description of Artificial Sequence: Synthetic oligonucleotide
aagcguucuccccucuccg

SEQ ID NO: 3202659 - RNA, 19 nt, Artificial Sequence
  Description of Artificial Sequence: Synthetic oligonucleotide
gguccuaauggcuuguucc

SEQ ID NO: 3202660 - RNA, 19 nt, Artificial Sequence
  Description of Artificial Sequence: Synthetic oligonucleotide
augcccuggaguucaaagg

SEQ ID NO: 3202661 - RNA, 19 nt, Artificial Sequence
  Description of Artificial Sequence: Synthetic oligonucleotide
caguggaaaaccgagccgg

SEQ ID NO: 3202662 - RNA, 19 nt, Artificial Sequence
  Description of Artificial Sequence: Synthetic oligonucleotide
cuguauuuacaacgguccg

SEQ ID NO: 3202663 - RNA, 19 nt, Artificial Sequence
  Description of Artificial Sequence: Synthetic oligonucleotide
ggaacaagaguuucagaag

SEQ ID NO: 3202664 - RNA, 19 nt, Artificial Sequence
  Description of Artificial Sequence: Synthetic oligonucleotide
auagccacguugucguuag

SEQ ID NO: 3202665 - RNA, 19 nt, Artificial Sequence
  Description of Artificial Sequence: Synthetic oligonucleotide
uucacaauccgggucccgg

SEQ ID NO: 3202666 - RNA, 19 nt, Artificial Sequence
  Description of Artificial Sequence: Synthetic oligonucleotide
uuuauauccauugcacaua

SEQ ID NO: 3202667 - RNA, 19 nt, Artificial Sequence
  Description of Artificial Sequence: Synthetic oligonucleotide
aguggggugugugugaaag

SEQ ID NO: 3202668 - RNA, 19 nt, Artificial Sequence
  Description of Artificial Sequence: Synthetic oligonucleotide
gaggcaguauuuacagugg

SEQ ID NO: 3202669 - RNA, 19 nt, Artificial Sequence
  Description of Artificial Sequence: Synthetic oligonucleotide
gacuguauuuacaacgguc

SEQ ID NO: 3202670 - RNA, 19 nt, Artificial Sequence
  Description of Artificial Sequence: Synthetic oligonucleotide
uggugggucuaguuuaccc

SEQ ID NO: 3202671 - RNA, 19 nt, Artificial Sequence
  Description of Artificial Sequence: Synthetic oligonucleotide
aacaagaguuucagaagug

SEQ ID NO: 3202672 - RNA, 19 nt, Artificial Sequence
  Description of Artificial Sequence: Synthetic oligonucleotide
aagaguuucagaaguggau

SEQ ID NO: 3202673 - RNA, 19 nt, Artificial Sequence
  Description of Artificial Sequence: Synthetic oligonucleotide
uacccuuugaggucugaug

SEQ ID NO: 3202674 - RNA, 19 nt, Artificial Sequence
  Description of Artificial Sequence: Synthetic oligonucleotide
ucugaugcccuggaguuca

SEQ ID NO: 3202675 - RNA, 19 nt, Artificial Sequence
  Description of Artificial Sequence: Synthetic oligonucleotide
aguuucagaaguggauggg

SEQ ID NO: 3202676 - RNA, 19 nt, Artificial Sequence
  Description of Artificial Sequence: Synthetic oligonucleotide
guugucguuaggaacaaga

SEQ ID NO: 3202677 - RNA, 19 nt, Artificial Sequence
  Description of Artificial Sequence: Synthetic oligonucleotide
caaaggaggggcgaggcag

SEQ ID NO: 3202678 - RNA, 19 nt, Artificial Sequence
  Description of Artificial Sequence: Synthetic oligonucleotide
cacguugucguuaggaaca

SEQ ID NO: 3202679 - RNA, 19 nt, Artificial Sequence
  Description of Artificial Sequence: Synthetic oligonucleotide
cugcagccagcgaagaugc

SEQ ID NO: 3202680 - RNA, 19 nt, Artificial Sequence
  Description of Artificial Sequence: Synthetic oligonucleotide
ucacaauccgggucccggg

SEQ ID NO: 3202681 - RNA, 19 nt, Artificial Sequence
  Description of Artificial Sequence: Synthetic oligonucleotide
guuuauauccauugcacau

SEQ ID NO: 3202682 - RNA, 19 nt, Artificial Sequence
  Description of Artificial Sequence: Synthetic oligonucleotide
aggucugaugcccuggagu

SEQ ID NO: 3202683 - RNA, 19 nt, Artificial Sequence
  Description of Artificial Sequence: Synthetic oligonucleotide
aguggaugggacggggagc

SEQ ID NO: 3202684 - RNA, 19 nt, Artificial Sequence
  Description of Artificial Sequence: Synthetic oligonucleotide
uucaaaggaggggcgaggc

SEQ ID NO: 3202685 - RNA, 19 nt, Artificial Sequence
  Description of Artificial Sequence: Synthetic oligonucleotide
uuugaggucugaugcccug

SEQ ID NO: 3202686 - RNA, 19 nt, Artificial Sequence
  Description of Artificial Sequence: Synthetic oligonucleotide
caagcgacuguauuuacaa

SEQ ID NO: 3202687 - RNA, 19 nt, Artificial Sequence
  Description of Artificial Sequence: Synthetic oligonucleotide
uaguuuacccuuugagguc

SEQ ID NO: 3202688 - RNA, 19 nt, Artificial Sequence
  Description of Artificial Sequence: Synthetic oligonucleotide
accuacucaggccggagug

SEQ ID NO: 3202689 - RNA, 19 nt, Artificial Sequence
  Description of Artificial Sequence: Synthetic oligonucleotide
cugauggggaccagcgggg

SEQ ID NO: 3202690 - RNA, 19 nt, Artificial Sequence
  Description of Artificial Sequence: Synthetic oligonucleotide
aguuuacccuuugaggucu

SEQ ID NO: 3202691 - RNA, 19 nt, Artificial Sequence
  Description of Artificial Sequence: Synthetic oligonucleotide
auuuacaguggaaaaccga

SEQ ID NO: 3202692 - RNA, 19 nt, Artificial Sequence
  Description of Artificial Sequence: Synthetic oligonucleotide
uguuccucgcucugggcca

SEQ ID NO: 3202693 - RNA, 19 nt, Artificial Sequence
  Description of Artificial Sequence: Synthetic oligonucleotide
uauauccauugcacauagc

SEQ ID NO: 3202694 - RNA, 19 nt, Artificial Sequence
  Description of Artificial Sequence: Synthetic oligonucleotide
gaagaugcuacauuuuauu

SEQ ID NO: 3202695 - RNA, 19 nt, Artificial Sequence
  Description of Artificial Sequence: Synthetic oligonucleotide
gguuucuuucacugguggg

SEQ ID NO: 3202696 - RNA, 19 nt, Artificial Sequence
  Description of Artificial Sequence: Synthetic oligonucleotide
caagaguuucagaagugga

SEQ ID NO: 3202697 - RNA, 19 nt, Artificial Sequence
  Description of Artificial Sequence: Synthetic oligonucleotide
caagaaaucaccaaggugg

SEQ ID NO: 3202698 - RNA, 19 nt, Artificial Sequence
  Description of Artificial Sequence: Synthetic oligonucleotide
aauaaaaucaaacaagaaa

SEQ ID NO: 3202699 - RNA, 19 nt, Artificial Sequence
  Description of Artificial Sequence: Synthetic oligonucleotide
ucuuucuugaccaagaggc

SEQ ID NO: 3202700 - RNA, 19 nt, Artificial Sequence
  Description of Artificial Sequence: Synthetic oligonucleotide
caaaauaaaaucaaacaag

SEQ ID NO: 3202701 - RNA, 19 nt, Artificial Sequence
  Description of Artificial Sequence: Synthetic oligonucleotide
aaucaaacaagaaaucacc

SEQ ID NO: 3202702 - RNA, 19 nt, Artificial Sequence
  Description of Artificial Sequence: Synthetic oligonucleotide
cuuuauuuugcacagaccc

SEQ ID NO: 3202703 - RNA, 19 nt, Artificial Sequence
  Description of Artificial Sequence: Synthetic oligonucleotide
aauucuuuauuuugcacag

SEQ ID NO: 3202704 - RNA, 19 nt, Artificial Sequence
  Description of Artificial Sequence: Synthetic oligonucleotide
aaaucaaacaagaaaucac

SEQ ID NO: 3202705 - RNA, 19 nt, Artificial Sequence
  Description of Artificial Sequence: Synthetic oligonucleotide
aaaauaaaaucaaacaaga

SEQ ID NO: 3202706 - RNA, 19 nt, Artificial Sequence
  Description of Artificial Sequence: Synthetic oligonucleotide
acaaggaauacaaagaagg

SEQ ID NO: 3202707 - RNA, 19 nt, Artificial Sequence
  Description of Artificial Sequence: Synthetic oligonucleotide
agagacaaggaauacaaag

SEQ ID NO: 3202708 - RNA, 19 nt, Artificial Sequence
  Description of Artificial Sequence: Synthetic oligonucleotide
aaaaucaaacaagaaauca

SEQ ID NO: 3202709 - RNA, 19 nt, Artificial Sequence
  Description of Artificial Sequence: Synthetic oligonucleotide
auaaaaucaaacaagaaau

SEQ ID NO: 3202710 - RNA, 19 nt, Artificial Sequence
  Description of Artificial Sequence: Synthetic oligonucleotide
caaacaagaaaucaccaag

SEQ ID NO: 3202711 - RNA, 19 nt, Artificial Sequence
  Description of Artificial Sequence: Synthetic oligonucleotide
aagguggugaagcaagagg

SEQ ID NO: 3202712 - RNA, 19 nt, Artificial Sequence
  Description of Artificial Sequence: Synthetic oligonucleotide
aaacaagaaaucaccaagg

SEQ ID NO: 3202713 - RNA, 19 nt, Artificial Sequence
  Description of Artificial Sequence: Synthetic oligonucleotide
uucuuuauuuugcacagac

SEQ ID NO: 3202714 - RNA, 19 nt, Artificial Sequence
  Description of Artificial Sequence: Synthetic oligonucleotide
uugcacagaccccagacgg

SEQ ID NO: 3202715 - RNA, 19 nt, Artificial Sequence
  Description of Artificial Sequence: Synthetic oligonucleotide
aaaauggggaggaaacucg

SEQ ID NO: 3202716 - RNA, 19 nt, Artificial Sequence
  Description of Artificial Sequence: Synthetic oligonucleotide
aacaagaaaucaccaaggu

SEQ ID NO: 3202717 - RNA, 19 nt, Artificial Sequence
  Description of Artificial Sequence: Synthetic oligonucleotide
caagaggcaaaauaaaauc

SEQ ID NO: 3202718 - RNA, 19 nt, Artificial Sequence
  Description of Artificial Sequence: Synthetic oligonucleotide
uuuauuuugcacagacccc

SEQ ID NO: 3202719 - RNA, 19 nt, Artificial Sequence
  Description of Artificial Sequence: Synthetic oligonucleotide
uaaaaucaaacaagaaauc

SEQ ID NO: 3202720 - RNA, 19 nt, Artificial Sequence
  Description of Artificial Sequence: Synthetic oligonucleotide
aagggugggaaggagaggg

SEQ ID NO: 3202721 - RNA, 19 nt, Artificial Sequence
  Description of Artificial Sequence: Synthetic oligonucleotide
ugaguccccaaccaggcgg

SEQ ID NO: 3202722 - RNA, 19 nt, Artificial Sequence
  Description of Artificial Sequence: Synthetic oligonucleotide
aucaccaagguggugaagc

SEQ ID NO: 3202723 - RNA, 19 nt, Artificial Sequence
  Description of Artificial Sequence: Synthetic oligonucleotide
ugaccaagaggcaaaauaa

SEQ ID NO: 3202724 - RNA, 19 nt, Artificial Sequence
  Description of Artificial Sequence: Synthetic oligonucleotide
caaggaauacaaagaaggg

SEQ ID NO: 3202725 - RNA, 19 nt, Artificial Sequence
  Description of Artificial Sequence: Synthetic oligonucleotide
aggaauacaaagaagggug

SEQ ID NO: 3202726 - RNA, 19 nt, Artificial Sequence
  Description of Artificial Sequence: Synthetic oligonucleotide
aaguccggaagcucguugg

SEQ ID NO: 3202727 - RNA, 19 nt, Artificial Sequence
  Description of Artificial Sequence: Synthetic oligonucleotide
uucugaguccccaaccagg

SEQ ID NO: 3202728 - RNA, 19 nt, Artificial Sequence
  Description of Artificial Sequence: Synthetic oligonucleotide
aaggaauacaaagaagggu

SEQ ID NO: 3202729 - RNA, 19 nt, Artificial Sequence
  Description of Artificial Sequence: Synthetic oligonucleotide
uuugcacagaccccagacg

SEQ ID NO: 3202730 - RNA, 19 nt, Artificial Sequence
  Description of Artificial Sequence: Synthetic oligonucleotide
acucgaaguagcuuuuaac

SEQ ID NO: 3202731 - RNA, 19 nt, Artificial Sequence
  Description of Artificial Sequence: Synthetic oligonucleotide
aggcaaaauaaaaucaaac

SEQ ID NO: 3202732 - RNA, 19 nt, Artificial Sequence
  Description of Artificial Sequence: Synthetic oligonucleotide
uugaccaagaggcaaaaua

SEQ ID NO: 3202733 - RNA, 19 nt, Artificial Sequence
  Description of Artificial Sequence: Synthetic oligonucleotide
ucuggcugcagagacaagg

SEQ ID NO: 3202734 - RNA, 19 nt, Artificial Sequence
  Description of Artificial Sequence: Synthetic oligonucleotide
aagaggcaaaauaaaauca

SEQ ID NO: 3202735 - RNA, 19 nt, Artificial Sequence
  Description of Artificial Sequence: Synthetic oligonucleotide
uuauuuugcacagacccca

SEQ ID NO: 3202736 - RNA, 19 nt, Artificial Sequence
  Description of Artificial Sequence: Synthetic oligonucleotide
acaagaaaucaccaaggug

SEQ ID NO: 3202737 - RNA, 19 nt, Artificial Sequence
  Description of Artificial Sequence: Synthetic oligonucleotide
acaaagaagggugggaagg

SEQ ID NO: 3202738 - RNA, 19 nt, Artificial Sequence
  Description of Artificial Sequence: Synthetic oligonucleotide
uuuugcacagaccccagac

SEQ ID NO: 3202739 - RNA, 19 nt, Artificial Sequence
  Description of Artificial Sequence: Synthetic oligonucleotide
uguucauuuccgaggcugg

SEQ ID NO: 3202740 - RNA, 19 nt, Artificial Sequence
  Description of Artificial Sequence: Synthetic oligonucleotide
ucaaacaagaaaucaccaa

SEQ ID NO: 3202741 - RNA, 19 nt, Artificial Sequence
  Description of Artificial Sequence: Synthetic oligonucleotide
ucuuuauuuugcacagacc

SEQ ID NO: 3202742 - RNA, 19 nt, Artificial Sequence
  Description of Artificial Sequence: Synthetic oligonucleotide
ggcaaaauaaaaucaaaca

SEQ ID NO: 3202743 - RNA, 19 nt, Artificial Sequence
  Description of Artificial Sequence: Synthetic oligonucleotide
gaccccaacacccucugcg

SEQ ID NO: 3202744 - RNA, 19 nt, Artificial Sequence
  Description of Artificial Sequence: Synthetic oligonucleotide
aauacaaagaaggguggga

SEQ ID NO: 3202745 - RNA, 19 nt, Artificial Sequence
  Description of Artificial Sequence: Synthetic oligonucleotide
ucugcuucuuuucuugcug

SEQ ID NO: 3202746 - RNA, 19 nt, Artificial Sequence
  Description of Artificial Sequence: Synthetic oligonucleotide
gaaaucaccaaggugguga

SEQ ID NO: 3202747 - RNA, 19 nt, Artificial Sequence
  Description of Artificial Sequence: Synthetic oligonucleotide
agacaaggaauacaaagaa

SEQ ID NO: 3202748 - RNA, 19 nt, Artificial Sequence
  Description of Artificial Sequence: Synthetic oligonucleotide
gcaaaauaaaaucaaacaa

SEQ ID NO: 3202749 - RNA, 19 nt, Artificial Sequence
  Description of Artificial Sequence: Synthetic oligonucleotide
gaauacaaagaaggguggg

SEQ ID NO: 3202750 - RNA, 19 nt, Artificial Sequence
  Description of Artificial Sequence: Synthetic oligonucleotide
agguggugaagcaagaggg

SEQ ID NO: 3202751 - RNA, 19 nt, Artificial Sequence
  Description of Artificial Sequence: Synthetic oligonucleotide
uccuucggucucuagaaag

SEQ ID NO: 3202752 - RNA, 19 nt, Artificial Sequence
  Description of Artificial Sequence: Synthetic oligonucleotide
aaauaaaaucaaacaagaa

SEQ ID NO: 3202753 - RNA, 19 nt, Artificial Sequence
  Description of Artificial Sequence: Synthetic oligonucleotide
ucuagaaagccuagcucug

SEQ ID NO: 3202754 - RNA, 19 nt, Artificial Sequence
  Description of Artificial Sequence: Synthetic oligonucleotide
uguggcuuccacgaggucc

SEQ ID NO: 3202755 - RNA, 19 nt, Artificial Sequence
  Description of Artificial Sequence: Synthetic oligonucleotide
aaccaaguccggaagcucg

SEQ ID NO: 3202756 - RNA, 19 nt, Artificial Sequence
  Description of Artificial Sequence: Synthetic oligonucleotide
ucugaguccccaaccaggc

SEQ ID NO: 3202757 - RNA, 19 nt, Artificial Sequence
  Description of Artificial Sequence: Synthetic oligonucleotide
acagaccccagacggaugg

SEQ ID NO: 3202758 - RNA, 19 nt, Artificial Sequence
  Description of Artificial Sequence: Synthetic oligonucleotide
uacaaagaagggugggaag

SEQ ID NO: 3202759 - RNA, 19 nt, Artificial Sequence
  Description of Artificial Sequence: Synthetic oligonucleotide
gacaaggaauacaaagaag

SEQ ID NO: 3202760 - RNA, 19 nt, Artificial Sequence
  Description of Artificial Sequence: Synthetic oligonucleotide
ucucuagaaagccuagcuc

SEQ ID NO: 3202761 - RNA, 19 nt, Artificial Sequence
  Description of Artificial Sequence: Synthetic oligonucleotide
gagacaaggaauacaaaga

SEQ ID NO: 3202762 - RNA, 19 nt, Artificial Sequence
  Description of Artificial Sequence: Synthetic oligonucleotide
cucuuucuugaccaagagg

SEQ ID NO: 3202763 - RNA, 19 nt, Artificial Sequence
  Description of Artificial Sequence: Synthetic oligonucleotide
auggggaggaaacucgaag

SEQ ID NO: 3202764 - RNA, 19 nt, Artificial Sequence
  Description of Artificial Sequence: Synthetic oligonucleotide
gaaagccuagcucugcuuc

SEQ ID NO: 3202765 - RNA, 19 nt, Artificial Sequence
  Description of Artificial Sequence: Synthetic oligonucleotide
gauuccuucggucucuaga

SEQ ID NO: 3202766 - RNA, 19 nt, Artificial Sequence
  Description of Artificial Sequence: Synthetic oligonucleotide
ucauuuccgaggcuggccu

SEQ ID NO: 3202767 - RNA, 19 nt, Artificial Sequence
  Description of Artificial Sequence: Synthetic oligonucleotide
uccggaagcucguuggaag

SEQ ID NO: 3202768 - RNA, 19 nt, Artificial Sequence
  Description of Artificial Sequence: Synthetic oligonucleotide
agacggauggcccggggac

SEQ ID NO: 3202769 - RNA, 19 nt, Artificial Sequence
  Description of Artificial Sequence: Synthetic oligonucleotide
uggggaggaaacucgaagu

SEQ ID NO: 3202770 - RNA, 19 nt, Artificial Sequence
  Description of Artificial Sequence: Synthetic oligonucleotide
aaagaagggugggaaggag

SEQ ID NO: 3202771 - RNA, 19 nt, Artificial Sequence
  Description of Artificial Sequence: Synthetic oligonucleotide
aaagccuagcucugcuucu

SEQ ID NO: 3202772 - RNA, 19 nt, Artificial Sequence
  Description of Artificial Sequence: Synthetic oligonucleotide
auuccuucggucucuagaa

SEQ ID NO: 3202773 - RNA, 19 nt, Artificial Sequence
  Description of Artificial Sequence: Synthetic oligonucleotide
uauuuugcacagaccccag

SEQ ID NO: 3202774 - RNA, 19 nt, Artificial Sequence
  Description of Artificial Sequence: Synthetic oligonucleotide
ugcaaccaaguccggaagc

SEQ ID NO: 3202775 - RNA, 19 nt, Artificial Sequence
  Description of Artificial Sequence: Synthetic oligonucleotide
ucgaaguagcuuuuaacuu

SEQ ID NO: 3202776 - RNA, 19 nt, Artificial Sequence
  Description of Artificial Sequence: Synthetic oligonucleotide
uccuucugaguccccaacc

SEQ ID NO: 3202777 - RNA, 19 nt, Artificial Sequence
  Description of Artificial Sequence: Synthetic oligonucleotide
ugcuucuuuucuugcuggg

SEQ ID NO: 3202778 - RNA, 19 nt, Artificial Sequence
  Description of Artificial Sequence: Synthetic oligonucleotide
aacucgaaguagcuuuuaa

SEQ ID NO: 3202779 - RNA, 19 nt, Artificial Sequence
  Description of Artificial Sequence: Synthetic oligonucleotide
auguucauuuccgaggcug

SEQ ID NO: 3202780 - RNA, 19 nt, Artificial Sequence
  Description of Artificial Sequence: Synthetic oligonucleotide
cugcuucuuuucuugcugg

SEQ ID NO: 3202781 - RNA, 19 nt, Artificial Sequence
  Description of Artificial Sequence: Synthetic oligonucleotide
uucuugaccaagaggcaaa

SEQ ID NO: 3202782 - RNA, 19 nt, Artificial Sequence
  Description of Artificial Sequence: Synthetic oligonucleotide
accccaacacccucugcgc

SEQ ID NO: 3202783 - RNA, 19 nt, Artificial Sequence
  Description of Artificial Sequence: Synthetic oligonucleotide
agcucugcuucuuuucuug

SEQ ID NO: 3202784 - RNA, 19 nt, Artificial Sequence
  Description of Artificial Sequence: Synthetic oligonucleotide
uccgggguccuucugaguc

SEQ ID NO: 3202785 - RNA, 19 nt, Artificial Sequence
  Description of Artificial Sequence: Synthetic oligonucleotide
cucgaaguagcuuuuaacu

SEQ ID NO: 3202786 - RNA, 19 nt, Artificial Sequence
  Description of Artificial Sequence: Synthetic oligonucleotide
aaaucaccaagguggugaa

SEQ ID NO: 3202787 - RNA, 19 nt, Artificial Sequence
  Description of Artificial Sequence: Synthetic oligonucleotide
uagaaagccuagcucugcu

SEQ ID NO: 3202788 - RNA, 19 nt, Artificial Sequence
  Description of Artificial Sequence: Synthetic oligonucleotide
uuucuugaccaagaggcaa

SEQ ID NO: 3202789 - RNA, 19 nt, Artificial Sequence
  Description of Artificial Sequence: Synthetic oligonucleotide
agaagggugggaaggagag

SEQ ID NO: 3202790 - RNA, 19 nt, Artificial Sequence
  Description of Artificial Sequence: Synthetic oligonucleotide
ugcagagacaaggaauaca

SEQ ID NO: 3202791 - RNA, 19 nt, Artificial Sequence
  Description of Artificial Sequence: Synthetic oligonucleotide
aucaaacaagaaaucacca

SEQ ID NO: 3202792 - RNA, 19 nt, Artificial Sequence
  Description of Artificial Sequence: Synthetic oligonucleotide
ugcugcucccugcacaucu

SEQ ID NO: 3202793 - RNA, 19 nt, Artificial Sequence
  Description of Artificial Sequence: Synthetic oligonucleotide
ucggucucuagaaagccua

SEQ ID NO: 3202794 - RNA, 19 nt, Artificial Sequence
  Description of Artificial Sequence: Synthetic oligonucleotide
cucuagaaagccuagcucu

SEQ ID NO: 3202795 - RNA, 19 nt, Artificial Sequence
  Description of Artificial Sequence: Synthetic oligonucleotide
aagaaaucaccaagguggu

SEQ ID NO: 3202796 - RNA, 19 nt, Artificial Sequence
  Description of Artificial Sequence: Synthetic oligonucleotide
agaggcaaaauaaaaucaa

SEQ ID NO: 3202797 - RNA, 19 nt, Artificial Sequence
  Description of Artificial Sequence: Synthetic oligonucleotide
auaauguucuuccacaucc

SEQ ID NO: 3202798 - RNA, 19 nt, Artificial Sequence
  Description of Artificial Sequence: Synthetic oligonucleotide
gucaaugucaaucagcugg

SEQ ID NO: 3202799 - RNA, 19 nt, Artificial Sequence
  Description of Artificial Sequence: Synthetic oligonucleotide
acaggaauaauguucuucc

SEQ ID NO: 3202800 - RNA, 19 nt, Artificial Sequence
  Description of Artificial Sequence: Synthetic oligonucleotide
aaugucaaugucaaucagc

SEQ ID NO: 3202801 - RNA, 19 nt, Artificial Sequence
  Description of Artificial Sequence: Synthetic oligonucleotide
acucaugacauacaacacc

SEQ ID NO: 3202802 - RNA, 19 nt, Artificial Sequence
  Description of Artificial Sequence: Synthetic oligonucleotide
aaccugaggcucuagcucc

SEQ ID NO: 3202803 - RNA, 19 nt, Artificial Sequence
  Description of Artificial Sequence: Synthetic oligonucleotide
aauaauguucuuccacauc

SEQ ID NO: 3202804 - RNA, 19 nt, Artificial Sequence
  Description of Artificial Sequence: Synthetic oligonucleotide
uacaacaggaauaauguuc

SEQ ID NO: 3202805 - RNA, 19 nt, Artificial Sequence
  Description of Artificial Sequence: Synthetic oligonucleotide
aaggcguucccauaacugg

SEQ ID NO: 3202806 - RNA, 19 nt, Artificial Sequence
  Description of Artificial Sequence: Synthetic oligonucleotide
caaggcuuaaacaagucag

SEQ ID NO: 3202807 - RNA, 19 nt, Artificial Sequence
  Description of Artificial Sequence: Synthetic oligonucleotide
aggaauaauguucuuccac

SEQ ID NO: 3202808 - RNA, 19 nt, Artificial Sequence
  Description of Artificial Sequence: Synthetic oligonucleotide
uucaguaguuacaacagga

SEQ ID NO: 3202809 - RNA, 19 nt, Artificial Sequence
  Description of Artificial Sequence: Synthetic oligonucleotide
uguucuuccacauccagga

SEQ ID NO: 3202810 - RNA, 19 nt, Artificial Sequence
  Description of Artificial Sequence: Synthetic oligonucleotide
cuguucaccaaccugaggc

SEQ ID NO: 3202811 - RNA, 19 nt, Artificial Sequence
  Description of Artificial Sequence: Synthetic oligonucleotide
ugaaugucaaugucaauca

SEQ ID NO: 3202812 - RNA, 19 nt, Artificial Sequence
  Description of Artificial Sequence: Synthetic oligonucleotide
aacaggaauaauguucuuc

SEQ ID NO: 3202813 - RNA, 19 nt, Artificial Sequence
  Description of Artificial Sequence: Synthetic oligonucleotide
aacaagucagugcauucag

SEQ ID NO: 3202814 - RNA, 19 nt, Artificial Sequence
  Description of Artificial Sequence: Synthetic oligonucleotide
aauguucuuccacauccag

SEQ ID NO: 3202815 - RNA, 19 nt, Artificial Sequence
  Description of Artificial Sequence: Synthetic oligonucleotide
ugacauacaacaccucacc

SEQ ID NO: 3202816 - RNA, 19 nt, Artificial Sequence
  Description of Artificial Sequence: Synthetic oligonucleotide
cauucaguaguuacaacag

SEQ ID NO: 3202817 - RNA, 19 nt, Artificial Sequence
  Description of Artificial Sequence: Synthetic oligonucleotide
aguuacaacaggaauaaug

SEQ ID NO: 3202818 - RNA, 19 nt, Artificial Sequence
  Description of Artificial Sequence: Synthetic oligonucleotide
aacuggagcaacuguucac

SEQ ID NO: 3202819 - RNA, 19 nt, Artificial Sequence
  Description of Artificial Sequence: Synthetic oligonucleotide
cauacaacaccucaccaag

SEQ ID NO: 3202820 - RNA, 19 nt, Artificial Sequence
  Description of Artificial Sequence: Synthetic oligonucleotide
aguucugaaugucaauguc

SEQ ID NO: 3202821 - RNA, 19 nt, Artificial Sequence
  Description of Artificial Sequence: Synthetic oligonucleotide
aaugucaaucagcuggagu

SEQ ID NO: 3202822 - RNA, 19 nt, Artificial Sequence
  Description of Artificial Sequence: Synthetic oligonucleotide
aagucagugcauucaguag

SEQ ID NO: 3202823 - RNA, 19 nt, Artificial Sequence
  Description of Artificial Sequence: Synthetic oligonucleotide
uacaacaccucaccaaggc

SEQ ID NO: 3202824 - RNA, 19 nt, Artificial Sequence
  Description of Artificial Sequence: Synthetic oligonucleotide
uaagcuacagaacccacuc

SEQ ID NO: 3202825 - RNA, 19 nt, Artificial Sequence
  Description of Artificial Sequence: Synthetic oligonucleotide
cugaaugucaaugucaauc

SEQ ID NO: 3202826 - RNA, 19 nt, Artificial Sequence
  Description of Artificial Sequence: Synthetic oligonucleotide
auucaguaguuacaacagg

SEQ ID NO: 3202827 - RNA, 19 nt, Artificial Sequence
  Description of Artificial Sequence: Synthetic oligonucleotide
uucugaaugucaaugucaa

SEQ ID NO: 3202828 - RNA, 19 nt, Artificial Sequence
  Description of Artificial Sequence: Synthetic oligonucleotide
acuggagcaacuguucacc

SEQ ID NO: 3202829 - RNA, 19 nt, Artificial Sequence
  Description of Artificial Sequence: Synthetic oligonucleotide
ucaccaaggcuuaaacaag

SEQ ID NO: 3202830 - RNA, 19 nt, Artificial Sequence
  Description of Artificial Sequence: Synthetic oligonucleotide
augucaaucagcuggaguu

SEQ ID NO: 3202831 - RNA, 19 nt, Artificial Sequence
  Description of Artificial Sequence: Synthetic oligonucleotide
agucagugcauucaguagu

SEQ ID NO: 3202832 - RNA, 19 nt, Artificial Sequence
  Description of Artificial Sequence: Synthetic oligonucleotide
ucaaugucaaucagcugga

SEQ ID NO: 3202833 - RNA, 19 nt, Artificial Sequence
  Description of Artificial Sequence: Synthetic oligonucleotide
acagaacccacucaugaca

SEQ ID NO: 3202834 - RNA, 19 nt, Artificial Sequence
  Description of Artificial Sequence: Synthetic oligonucleotide
ucaguaguuacaacaggaa

SEQ ID NO: 3202835 - RNA, 19 nt, Artificial Sequence
  Description of Artificial Sequence: Synthetic oligonucleotide
uucuuccacauccaggagu

SEQ ID NO: 3202836 - RNA, 19 nt, Artificial Sequence
  Description of Artificial Sequence: Synthetic oligonucleotide
gcuuaaacaagucagugca

SEQ ID NO: 3202837 - RNA, 19 nt, Artificial Sequence
  Description of Artificial Sequence: Synthetic oligonucleotide
aaacaagucagugcauuca

SEQ ID NO: 3202838 - RNA, 19 nt, Artificial Sequence
  Description of Artificial Sequence: Synthetic oligonucleotide
cucaccaaggcuuaaacaa

SEQ ID NO: 3202839 - RNA, 19 nt, Artificial Sequence
  Description of Artificial Sequence: Synthetic oligonucleotide
acaacaggaauaauguucu

SEQ ID NO: 3202840 - RNA, 19 nt, Artificial Sequence
  Description of Artificial Sequence: Synthetic oligonucleotide
cauccaggaguucugaaug

SEQ ID NO: 3202841 - RNA, 19 nt, Artificial Sequence
  Description of Artificial Sequence: Synthetic oligonucleotide
gaaugucaaugucaaucag

SEQ ID NO: 3202842 - RNA, 19 nt, Artificial Sequence
  Description of Artificial Sequence: Synthetic oligonucleotide
uuuucucccaauggaaggc

SEQ ID NO: 3202843 - RNA, 19 nt, Artificial Sequence
  Description of Artificial Sequence: Synthetic oligonucleotide
accucaccaaggcuuaaac

SEQ ID NO: 3202844 - RNA, 19 nt, Artificial Sequence
  Description of Artificial Sequence: Synthetic oligonucleotide
accaaccugaggcucuagc

SEQ ID NO: 3202845 - RNA, 19 nt, Artificial Sequence
  Description of Artificial Sequence: Synthetic oligonucleotide
augacauacaacaccucac

SEQ ID NO: 3202846 - RNA, 19 nt, Artificial Sequence
  Description of Artificial Sequence: Synthetic oligonucleotide
augucaaugucaaucagcu

SEQ ID NO: 3202847 - RNA, 19 nt, Artificial Sequence
  Description of Artificial Sequence: Synthetic oligonucleotide
uaaacaagucagugcauuc

SEQ ID NO: 3202848 - RNA, 19 nt, Artificial Sequence
  Description of Artificial Sequence: Synthetic oligonucleotide
uaacuggagcaacuguuca

SEQ ID NO: 3202849 - RNA, 19 nt, Artificial Sequence
  Description of Artificial Sequence: Synthetic oligonucleotide
aguaguuacaacaggaaua

SEQ ID NO: 3202850 - RNA, 19 nt, Artificial Sequence
  Description of Artificial Sequence: Synthetic oligonucleotide
caacuguucaccaaccuga

SEQ ID NO: 3202851 - RNA, 19 nt, Artificial Sequence
  Description of Artificial Sequence: Synthetic oligonucleotide
guuacaacaggaauaaugu

SEQ ID NO: 3202852 - RNA, 19 nt, Artificial Sequence
  Description of Artificial Sequence: Synthetic oligonucleotide
acucuaagcuacagaaccc

SEQ ID NO: 3202853 - RNA, 19 nt, Artificial Sequence
  Description of Artificial Sequence: Synthetic oligonucleotide
auaacuggagcaacuguuc

SEQ ID NO: 3202854 - RNA, 19 nt, Artificial Sequence
  Description of Artificial Sequence: Synthetic oligonucleotide
acauacaacaccucaccaa

SEQ ID NO: 3202855 - RNA, 19 nt, Artificial Sequence
  Description of Artificial Sequence: Synthetic oligonucleotide
ucuuccacauccaggaguu

SEQ ID NO: 3202856 - RNA, 19 nt, Artificial Sequence
  Description of Artificial Sequence: Synthetic oligonucleotide
ggaauaauguucuuccaca

SEQ ID NO: 3202857 - RNA, 19 nt, Artificial Sequence
  Description of Artificial Sequence: Synthetic oligonucleotide
caugacauacaacaccuca

SEQ ID NO: 3202858 - RNA, 19 nt, Artificial Sequence
  Description of Artificial Sequence: Synthetic oligonucleotide
uaauguucuuccacaucca

SEQ ID NO: 3202859 - RNA, 19 nt, Artificial Sequence
  Description of Artificial Sequence: Synthetic oligonucleotide
uuaaacaagucagugcauu

SEQ ID NO: 3202860 - RNA, 19 nt, Artificial Sequence
  Description of Artificial Sequence: Synthetic oligonucleotide
gcauucaguaguuacaaca

SEQ ID NO: 3202861 - RNA, 19 nt, Artificial Sequence
  Description of Artificial Sequence: Synthetic oligonucleotide
uuucucccaauggaaggcg

SEQ ID NO: 3202862 - RNA, 19 nt, Artificial Sequence
  Description of Artificial Sequence: Synthetic oligonucleotide
agcuacagaacccacucau

SEQ ID NO: 3202863 - RNA, 19 nt, Artificial Sequence
  Description of Artificial Sequence: Synthetic oligonucleotide
gaacccacucaugacauac

SEQ ID NO: 3202864 - RNA, 19 nt, Artificial Sequence
  Description of Artificial Sequence: Synthetic oligonucleotide
gaaggcguucccauaacug

SEQ ID NO: 3202865 - RNA, 19 nt, Artificial Sequence
  Description of Artificial Sequence: Synthetic oligonucleotide
ucuaagcuacagaacccac

SEQ ID NO: 3202866 - RNA, 19 nt, Artificial Sequence
  Description of Artificial Sequence: Synthetic oligonucleotide
guaguuacaacaggaauaa

SEQ ID NO: 3202867 - RNA, 19 nt, Artificial Sequence
  Description of Artificial Sequence: Synthetic oligonucleotide
cagugcauucaguaguuac

SEQ ID NO: 3202868 - RNA, 19 nt, Artificial Sequence
  Description of Artificial Sequence: Synthetic oligonucleotide
uacagaacccacucaugac

SEQ ID NO: 3202869 - RNA, 19 nt, Artificial Sequence
  Description of Artificial Sequence: Synthetic oligonucleotide
gacauacaacaccucacca

SEQ ID NO: 3202870 - RNA, 19 nt, Artificial Sequence
  Description of Artificial Sequence: Synthetic oligonucleotide
uguucaccaaccugaggcu

SEQ ID NO: 3202871 - RNA, 19 nt, Artificial Sequence
  Description of Artificial Sequence: Synthetic oligonucleotide
cuacagaacccacucauga

SEQ ID NO: 3202872 - RNA, 19 nt, Artificial Sequence
  Description of Artificial Sequence: Synthetic oligonucleotide
aaggcuuaaacaagucagu

SEQ ID NO: 3202873 - RNA, 19 nt, Artificial Sequence
  Description of Artificial Sequence: Synthetic oligonucleotide
ggcuuaaacaagucagugc

SEQ ID NO: 3202874 - RNA, 19 nt, Artificial Sequence
  Description of Artificial Sequence: Synthetic oligonucleotide
uccacauccaggaguucug

SEQ ID NO: 3202875 - RNA, 19 nt, Artificial Sequence
  Description of Artificial Sequence: Synthetic oligonucleotide
uucaccaaccugaggcucu

SEQ ID NO: 3202876 - RNA, 19 nt, Artificial Sequence
  Description of Artificial Sequence: Synthetic oligonucleotide
ccacucaugacauacaaca

SEQ ID NO: 3202877 - RNA, 19 nt, Artificial Sequence
  Description of Artificial Sequence: Synthetic oligonucleotide
guucugaaugucaauguca

SEQ ID NO: 3202878 - RNA, 19 nt, Artificial Sequence
  Description of Artificial Sequence: Synthetic oligonucleotide
ggaguucugaaugucaaug

SEQ ID NO: 3202879 - RNA, 19 nt, Artificial Sequence
  Description of Artificial Sequence: Synthetic oligonucleotide
acauccaggaguucugaau

SEQ ID NO: 3202880 - RNA, 19 nt, Artificial Sequence
  Description of Artificial Sequence: Synthetic oligonucleotide
acuguucaccaaccugagg

SEQ ID NO: 3202881 - RNA, 19 nt, Artificial Sequence
  Description of Artificial Sequence: Synthetic oligonucleotide
agugcauucaguaguuaca

SEQ ID NO: 3202882 - RNA, 19 nt, Artificial Sequence
  Description of Artificial Sequence: Synthetic oligonucleotide
aauggaaggcguucccaua

SEQ ID NO: 3202883 - RNA, 19 nt, Artificial Sequence
  Description of Artificial Sequence: Synthetic oligonucleotide
cucaugacauacaacaccu

SEQ ID NO: 3202884 - RNA, 19 nt, Artificial Sequence
  Description of Artificial Sequence: Synthetic oligonucleotide
auguucuuccacauccagg

SEQ ID NO: 3202885 - RNA, 19 nt, Artificial Sequence
  Description of Artificial Sequence: Synthetic oligonucleotide
uuacaacaggaauaauguu

SEQ ID NO: 3202886 - RNA, 19 nt, Artificial Sequence
  Description of Artificial Sequence: Synthetic oligonucleotide
uuccacauccaggaguucu

SEQ ID NO: 3202887 - RNA, 19 nt, Artificial Sequence
  Description of Artificial Sequence: Synthetic oligonucleotide
cacucaugacauacaacac

SEQ ID NO: 3202888 - RNA, 19 nt, Artificial Sequence
  Description of Artificial Sequence: Synthetic oligonucleotide
aagcuacagaacccacuca

SEQ ID NO: 3202889 - RNA, 19 nt, Artificial Sequence
  Description of Artificial Sequence: Synthetic oligonucleotide
aggcuuaaacaagucagug

SEQ ID NO: 3202890 - RNA, 19 nt, Artificial Sequence
  Description of Artificial Sequence: Synthetic oligonucleotide
ucccauaacuggagcaacu

SEQ ID NO: 3202891 - RNA, 19 nt, Artificial Sequence
  Description of Artificial Sequence: Synthetic oligonucleotide
ugucaaugucaaucagcug

SEQ ID NO: 3202892 - RNA, 19 nt, Artificial Sequence
  Description of Artificial Sequence: Synthetic oligonucleotide
aacuguucaccaaccugag

SEQ ID NO: 3202893 - RNA, 19 nt, Artificial Sequence
  Description of Artificial Sequence: Synthetic oligonucleotide
acaacaccucaccaaggcu

SEQ ID NO: 3202894 - RNA, 19 nt, Artificial Sequence
  Description of Artificial Sequence: Synthetic oligonucleotide
ggagcaacuguucaccaac

SEQ ID NO: 3202895 - RNA, 19 nt, Artificial Sequence
  Description of Artificial Sequence: Synthetic oligonucleotide
auggaaggcguucccauaa

SEQ ID NO: 3202896 - RNA, 19 nt, Artificial Sequence
  Description of Artificial Sequence: Synthetic oligonucleotide
caagucagugcauucagua

SEQ ID NO: 3202897 - RNA, 19 nt, Artificial Sequence
  Description of Artificial Sequence: Synthetic oligonucleotide
uuuuaauucuuucaccucc

SEQ ID NO: 3202898 - RNA, 19 nt, Artificial Sequence
  Description of Artificial Sequence: Synthetic oligonucleotide
aaagucuucauauacugga

SEQ ID NO: 3202899 - RNA, 19 nt, Artificial Sequence
  Description of Artificial Sequence: Synthetic oligonucleotide
aauucuuucaccuccaguu

SEQ ID NO: 3202900 - RNA, 19 nt, Artificial Sequence
  Description of Artificial Sequence: Synthetic oligonucleotide
auuuccaggguacagacuc

SEQ ID NO: 3202901 - RNA, 19 nt, Artificial Sequence
  Description of Artificial Sequence: Synthetic oligonucleotide
aauggcguagguguuaacc

SEQ ID NO: 3202902 - RNA, 19 nt, Artificial Sequence
  Description of Artificial Sequence: Synthetic oligonucleotide
agucaaagucuucauauac

SEQ ID NO: 3202903 - RNA, 19 nt, Artificial Sequence
  Description of Artificial Sequence: Synthetic oligonucleotide
auuguaaccagcaauggcg

SEQ ID NO: 3202904 - RNA, 19 nt, Artificial Sequence
  Description of Artificial Sequence: Synthetic oligonucleotide
ugaacauccuguaucuugg

SEQ ID NO: 3202905 - RNA, 19 nt, Artificial Sequence
  Description of Artificial Sequence: Synthetic oligonucleotide
guagguguuaaccaaaggc

SEQ ID NO: 3202906 - RNA, 19 nt, Artificial Sequence
  Description of Artificial Sequence: Synthetic oligonucleotide
aaaggcugaguaaacaugg

SEQ ID NO: 3202907 - RNA, 19 nt, Artificial Sequence
  Description of Artificial Sequence: Synthetic oligonucleotide
cuuugcagcaguaagugcc

SEQ ID NO: 3202908 - RNA, 19 nt, Artificial Sequence
  Description of Artificial Sequence: Synthetic oligonucleotide
ucaaagucuucauauacug

SEQ ID NO: 3202909 - RNA, 19 nt, Artificial Sequence
  Description of Artificial Sequence: Synthetic oligonucleotide
ugggucauccacaauagcc

SEQ ID NO: 3202910 - RNA, 19 nt, Artificial Sequence
  Description of Artificial Sequence: Synthetic oligonucleotide
uagguguuaaccaaaggcu

SEQ ID NO: 3202911 - RNA, 19 nt, Artificial Sequence
  Description of Artificial Sequence: Synthetic oligonucleotide
aaucucuacugucccaagg

SEQ ID NO: 3202912 - RNA, 19 nt, Artificial Sequence
  Description of Artificial Sequence: Synthetic oligonucleotide
cuuaggauuuccucggacg

SEQ ID NO: 3202913 - RNA, 19 nt, Artificial Sequence
  Description of Artificial Sequence: Synthetic oligonucleotide
ugggcuuaggauuuccucg

SEQ ID NO: 3202914 - RNA, 19 nt, Artificial Sequence
  Description of Artificial Sequence: Synthetic oligonucleotide
uguaucuugggucauccac

SEQ ID NO: 3202915 - RNA, 19 nt, Artificial Sequence
  Description of Artificial Sequence: Synthetic oligonucleotide
acauccuguaucuuggguc

SEQ ID NO: 3202916 - RNA, 19 nt, Artificial Sequence
  Description of Artificial Sequence: Synthetic oligonucleotide
aagugccuccaucauaggg

SEQ ID NO: 3202917 - RNA, 19 nt, Artificial Sequence
  Description of Artificial Sequence: Synthetic oligonucleotide
uuaggauuuccucggacgc

SEQ ID NO: 3202918 - RNA, 19 nt, Artificial Sequence
  Description of Artificial Sequence: Synthetic oligonucleotide
acaauagccacuuuguuuu

SEQ ID NO: 3202919 - RNA, 19 nt, Artificial Sequence
  Description of Artificial Sequence: Synthetic oligonucleotide
ucuugggucauccacaaua

SEQ ID NO: 3202920 - RNA, 19 nt, Artificial Sequence
  Description of Artificial Sequence: Synthetic oligonucleotide
uuugcacucaaucucuacu

SEQ ID NO: 3202921 - RNA, 19 nt, Artificial Sequence
  Description of Artificial Sequence: Synthetic oligonucleotide
uucaccuccaguuugcacu

SEQ ID NO: 3202922 - RNA, 19 nt, Artificial Sequence
  Description of Artificial Sequence: Synthetic oligonucleotide
acucaaucucuacuguccc

SEQ ID NO: 3202923 - RNA, 19 nt, Artificial Sequence
  Description of Artificial Sequence: Synthetic oligonucleotide
ugauuuugggcuuaggauu

SEQ ID NO: 3202924 - RNA, 19 nt, Artificial Sequence
  Description of Artificial Sequence: Synthetic oligonucleotide
acugcuuugcagcaguaag

SEQ ID NO: 3202925 - RNA, 19 nt, Artificial Sequence
  Description of Artificial Sequence: Synthetic oligonucleotide
uuuaauucuuucaccucca

SEQ ID NO: 3202926 - RNA, 19 nt, Artificial Sequence
  Description of Artificial Sequence: Synthetic oligonucleotide
guaagugccuccaucauag

SEQ ID NO: 3202927 - RNA, 19 nt, Artificial Sequence
  Description of Artificial Sequence: Synthetic oligonucleotide
uccacaauagccacuuugu

SEQ ID NO: 3202928 - RNA, 19 nt, Artificial Sequence
  Description of Artificial Sequence: Synthetic oligonucleotide
ucauccaggugauuuuggg

SEQ ID NO: 3202929 - RNA, 19 nt, Artificial Sequence
  Description of Artificial Sequence: Synthetic oligonucleotide
gacgcugcaguucagggug

SEQ ID NO: 3202930 - RNA, 19 nt, Artificial Sequence
  Description of Artificial Sequence: Synthetic oligonucleotide
uccaguuugcacucaaucu

SEQ ID NO: 3202931 - RNA, 19 nt, Artificial Sequence
  Description of Artificial Sequence: Synthetic oligonucleotide
cucuacugucccaaggucg

SEQ ID NO: 3202932 - RNA, 19 nt, Artificial Sequence
  Description of Artificial Sequence: Synthetic oligonucleotide
auccaggugauuuugggcu

SEQ ID NO: 3202933 - RNA, 19 nt, Artificial Sequence
  Description of Artificial Sequence: Synthetic oligonucleotide
caaagucuucauauacugg

SEQ ID NO: 3202934 - RNA, 19 nt, Artificial Sequence
  Description of Artificial Sequence: Synthetic oligonucleotide
cacucaaucucuacugucc

SEQ ID NO: 3202935 - RNA, 19 nt, Artificial Sequence
  Description of Artificial Sequence: Synthetic oligonucleotide
ucguugacugcuuugcagc

SEQ ID NO: 3202936 - RNA, 19 nt, Artificial Sequence
  Description of Artificial Sequence: Synthetic oligonucleotide
uuaaccaaaggcugaguaa

SEQ ID NO: 3202937 - RNA, 19 nt, Artificial Sequence
  Description of Artificial Sequence: Synthetic oligonucleotide
uucuuucaccuccaguuug

SEQ ID NO: 3202938 - RNA, 19 nt, Artificial Sequence
  Description of Artificial Sequence: Synthetic oligonucleotide
uucaggguggcauuguaac

SEQ ID NO: 3202939 - RNA, 19 nt, Artificial Sequence
  Description of Artificial Sequence: Synthetic oligonucleotide
cugaacauccuguaucuug

SEQ ID NO: 3202940 - RNA, 19 nt, Artificial Sequence
  Description of Artificial Sequence: Synthetic oligonucleotide
cauuguaaccagcaauggc

SEQ ID NO: 3202941 - RNA, 19 nt, Artificial Sequence
  Description of Artificial Sequence: Synthetic oligonucleotide
uugcacucaaucucuacug

SEQ ID NO: 3202942 - RNA, 19 nt, Artificial Sequence
  Description of Artificial Sequence: Synthetic oligonucleotide
gaagucaaagucuucauau

SEQ ID NO: 3202943 - RNA, 19 nt, Artificial Sequence
  Description of Artificial Sequence: Synthetic oligonucleotide
uugcugaacauccuguauc

SEQ ID NO: 3202944 - RNA, 19 nt, Artificial Sequence
  Description of Artificial Sequence: Synthetic oligonucleotide
auccacaauagccacuuug

SEQ ID NO: 3202945 - RNA, 19 nt, Artificial Sequence
  Description of Artificial Sequence: Synthetic oligonucleotide
aggcugaguaaacaugggg

SEQ ID NO: 3202946 - RNA, 19 nt, Artificial Sequence
  Description of Artificial Sequence: Synthetic oligonucleotide
uucauccaggugauuuugg

SEQ ID NO: 3202947 - RNA, 19 nt, Artificial Sequence
  Description of Artificial Sequence: Synthetic oligonucleotide
gguacagacuccuugguug

SEQ ID NO: 3202948 - RNA, 19 nt, Artificial Sequence
  Description of Artificial Sequence: Synthetic oligonucleotide
agcaguaagugccuccauc

SEQ ID NO: 3202949 - RNA, 19 nt, Artificial Sequence
  Description of Artificial Sequence: Synthetic oligonucleotide
uuaauucuuucaccuccag

SEQ ID NO: 3202950 - RNA, 19 nt, Artificial Sequence
  Description of Artificial Sequence: Synthetic oligonucleotide
ucuuucaccuccaguuugc

SEQ ID NO: 3202951 - RNA, 19 nt, Artificial Sequence
  Description of Artificial Sequence: Synthetic oligonucleotide
ucuacugucccaaggucgu

SEQ ID NO: 3202952 - RNA, 19 nt, Artificial Sequence
  Description of Artificial Sequence: Synthetic oligonucleotide
cuugggucauccacaauag

SEQ ID NO: 3202953 - RNA, 19 nt, Artificial Sequence
  Description of Artificial Sequence: Synthetic oligonucleotide
uaaccaaaggcugaguaaa

SEQ ID NO: 3202954 - RNA, 19 nt, Artificial Sequence
  Description of Artificial Sequence: Synthetic oligonucleotide
caaaggcugaguaaacaug

SEQ ID NO: 3202955 - RNA, 19 nt, Artificial Sequence
  Description of Artificial Sequence: Synthetic oligonucleotide
uugguugcugaacauccug

SEQ ID NO: 3202956 - RNA, 19 nt, Artificial Sequence
  Description of Artificial Sequence: Synthetic oligonucleotide
uaauucuuucaccuccagu

SEQ ID NO: 3202957 - RNA, 19 nt, Artificial Sequence
  Description of Artificial Sequence: Synthetic oligonucleotide
aacauccuguaucuugggu

SEQ ID NO: 3202958 - RNA, 19 nt, Artificial Sequence
  Description of Artificial Sequence: Synthetic oligonucleotide
ugcugaacauccuguaucu

SEQ ID NO: 3202959 - RNA, 19 nt, Artificial Sequence
  Description of Artificial Sequence: Synthetic oligonucleotide
uccaucauagggacugggc

SEQ ID NO: 3202960 - RNA, 19 nt, Artificial Sequence
  Description of Artificial Sequence: Synthetic oligonucleotide
uuguaaccagcaauggcgu

SEQ ID NO: 3202961 - RNA, 19 nt, Artificial Sequence
  Description of Artificial Sequence: Synthetic oligonucleotide
ugcuuugcagcaguaagug

SEQ ID NO: 3202962 - RNA, 19 nt, Artificial Sequence
  Description of Artificial Sequence: Synthetic oligonucleotide
ugaagucaaagucuucaua

SEQ ID NO: 3202963 - RNA, 19 nt, Artificial Sequence
  Description of Artificial Sequence: Synthetic oligonucleotide
auagggacugggcuugcgg

SEQ ID NO: 3202964 - RNA, 19 nt, Artificial Sequence
  Description of Artificial Sequence: Synthetic oligonucleotide
aucucuacugucccaaggu

SEQ ID NO: 3202965 - RNA, 19 nt, Artificial Sequence
  Description of Artificial Sequence: Synthetic oligonucleotide
caggguacagacuccuugg

SEQ ID NO: 3202966 - RNA, 19 nt, Artificial Sequence
  Description of Artificial Sequence: Synthetic oligonucleotide
uggcauuguaaccagcaau

SEQ ID NO: 3202967 - RNA, 19 nt, Artificial Sequence
  Description of Artificial Sequence: Synthetic oligonucleotide
aggucguugacugcuuugc

SEQ ID NO: 3202968 - RNA, 19 nt, Artificial Sequence
  Description of Artificial Sequence: Synthetic oligonucleotide
uuugcagcaguaagugccu

SEQ ID NO: 3202969 - RNA, 19 nt, Artificial Sequence
  Description of Artificial Sequence: Synthetic oligonucleotide
uugacugcuuugcagcagu

SEQ ID NO: 3202970 - RNA, 19 nt, Artificial Sequence
  Description of Artificial Sequence: Synthetic oligonucleotide
cauccaggugauuuugggc

SEQ ID NO: 3202971 - RNA, 19 nt, Artificial Sequence
  Description of Artificial Sequence: Synthetic oligonucleotide
aaggucguugacugcuuug

SEQ ID NO: 3202972 - RNA, 19 nt, Artificial Sequence
  Description of Artificial Sequence: Synthetic oligonucleotide
acuccuugguugcugaaca

SEQ ID NO: 3202973 - RNA, 19 nt, Artificial Sequence
  Description of Artificial Sequence: Synthetic oligonucleotide
ugggcuugcggauuuccag

SEQ ID NO: 3202974 - RNA, 19 nt, Artificial Sequence
  Description of Artificial Sequence: Synthetic oligonucleotide
aagucaaagucuucauaua

SEQ ID NO: 3202975 - RNA, 19 nt, Artificial Sequence
  Description of Artificial Sequence: Synthetic oligonucleotide
guaaccagcaauggcguag

SEQ ID NO: 3202976 - RNA, 19 nt, Artificial Sequence
  Description of Artificial Sequence: Synthetic oligonucleotide
auggcguagguguuaacca

SEQ ID NO: 3202977 - RNA, 19 nt, Artificial Sequence
  Description of Artificial Sequence: Synthetic oligonucleotide
gucguugacugcuuugcag

SEQ ID NO: 3202978 - RNA, 19 nt, Artificial Sequence
  Description of Artificial Sequence: Synthetic oligonucleotide
uuucauccaggugauuuug

SEQ ID NO: 3202979 - RNA, 19 nt, Artificial Sequence
  Description of Artificial Sequence: Synthetic oligonucleotide
gaacauccuguaucuuggg

SEQ ID NO: 3202980 - RNA, 19 nt, Artificial Sequence
  Description of Artificial Sequence: Synthetic oligonucleotide
aaccaaaggcugaguaaac

SEQ ID NO: 3202981 - RNA, 19 nt, Artificial Sequence
  Description of Artificial Sequence: Synthetic oligonucleotide
uaaccagcaauggcguagg

SEQ ID NO: 3202982 - RNA, 19 nt, Artificial Sequence
  Description of Artificial Sequence: Synthetic oligonucleotide
ucaaucucuacugucccaa

SEQ ID NO: 3202983 - RNA, 19 nt, Artificial Sequence
  Description of Artificial Sequence: Synthetic oligonucleotide
ugcacucaaucucuacugu

SEQ ID NO: 3202984 - RNA, 19 nt, Artificial Sequence
  Description of Artificial Sequence: Synthetic oligonucleotide
ugguugcugaacauccugu

SEQ ID NO: 3202985 - RNA, 19 nt, Artificial Sequence
  Description of Artificial Sequence: Synthetic oligonucleotide
ucaggguggcauuguaacc

SEQ ID NO: 3202986 - RNA, 19 nt, Artificial Sequence
  Description of Artificial Sequence: Synthetic oligonucleotide
gucccaaggucguugacug

SEQ ID NO: 3202987 - RNA, 19 nt, Artificial Sequence
  Description of Artificial Sequence: Synthetic oligonucleotide
uccgugaagucaaagucuu

SEQ ID NO: 3202988 - RNA, 19 nt, Artificial Sequence
  Description of Artificial Sequence: Synthetic oligonucleotide
guuaaccaaaggcugagua

SEQ ID NO: 3202989 - RNA, 19 nt, Artificial Sequence
  Description of Artificial Sequence: Synthetic oligonucleotide
uuuucauccaggugauuuu

SEQ ID NO: 3202990 - RNA, 19 nt, Artificial Sequence
  Description of Artificial Sequence: Synthetic oligonucleotide
uuugggcuuaggauuuccu

SEQ ID NO: 3202991 - RNA, 19 nt, Artificial Sequence
  Description of Artificial Sequence: Synthetic oligonucleotide
uuuccucggacgcugcagu

SEQ ID NO: 3202992 - RNA, 19 nt, Artificial Sequence
  Description of Artificial Sequence: Synthetic oligonucleotide
aaggcugaguaaacauggg

SEQ ID NO: 3202993 - RNA, 19 nt, Artificial Sequence
  Description of Artificial Sequence: Synthetic oligonucleotide
ggugauuuugggcuuagga

SEQ ID NO: 3202994 - RNA, 19 nt, Artificial Sequence
  Description of Artificial Sequence: Synthetic oligonucleotide
ucucuacugucccaagguc

SEQ ID NO: 3202995 - RNA, 19 nt, Artificial Sequence
  Description of Artificial Sequence: Synthetic oligonucleotide
uaucuugggucauccacaa

SEQ ID NO: 3202996 - RNA, 19 nt, Artificial Sequence
  Description of Artificial Sequence: Synthetic oligonucleotide
guacagacuccuugguugc

SEQ ID NO: 3202997 - RNA, 19 nt, Artificial Sequence
  Description of Artificial Sequence: Synthetic oligonucleotide
agaaauuuuccucauaacc

SEQ ID NO: 3202998 - RNA, 19 nt, Artificial Sequence
  Description of Artificial Sequence: Synthetic oligonucleotide
uuuauuacaaaacauauau

SEQ ID NO: 3202999 - RNA, 19 nt, Artificial Sequence
  Description of Artificial Sequence: Synthetic oligonucleotide
uaugauuccaaccagaguc

SEQ ID NO: 3203000 - RNA, 19 nt, Artificial Sequence
  Description of Artificial Sequence: Synthetic oligonucleotide
uuauuuucagguauguugg

SEQ ID NO: 3203001 - RNA, 19 nt, Artificial Sequence
  Description of Artificial Sequence: Synthetic oligonucleotide
aaggcauaugcuuugaggg

SEQ ID NO: 3203002 - RNA, 19 nt, Artificial Sequence
  Description of Artificial Sequence: Synthetic oligonucleotide
uuuugaaucauuuauuaca

SEQ ID NO: 3203003 - RNA, 19 nt, Artificial Sequence
  Description of Artificial Sequence: Synthetic oligonucleotide
aaauuuuccucauaaccac

SEQ ID NO: 3203004 - RNA, 19 nt, Artificial Sequence
  Description of Artificial Sequence: Synthetic oligonucleotide
aaucauuuauuacaaaaca

SEQ ID NO: 3203005 - RNA, 19 nt, Artificial Sequence
  Description of Artificial Sequence: Synthetic oligonucleotide
cuuauuuucagguauguug

SEQ ID NO: 3203006 - RNA, 19 nt, Artificial Sequence
  Description of Artificial Sequence: Synthetic oligonucleotide
aaaggcauaugcuuugagg

SEQ ID NO: 3203007 - RNA, 19 nt, Artificial Sequence
  Description of Artificial Sequence: Synthetic oligonucleotide
cuagucaccauucugacag

SEQ ID NO: 3203008 - RNA, 19 nt, Artificial Sequence
  Description of Artificial Sequence: Synthetic oligonucleotide
aaagccgauggcuaguagg

SEQ ID NO: 3203009 - RNA, 19 nt, Artificial Sequence
  Description of Artificial Sequence: Synthetic oligonucleotide
uuuuguuccauuuucuaug

SEQ ID NO: 3203010 - RNA, 19 nt, Artificial Sequence
  Description of Artificial Sequence: Synthetic oligonucleotide
cucauaaccacaaugauga

SEQ ID NO: 3203011 - RNA, 19 nt, Artificial Sequence
  Description of Artificial Sequence: Synthetic oligonucleotide
ugaaucauuuauuacaaaa

SEQ ID NO: 3203012 - RNA, 19 nt, Artificial Sequence
  Description of Artificial Sequence: Synthetic oligonucleotide
ugggagaacagcuugaucu

SEQ ID NO: 3203013 - RNA, 19 nt, Artificial Sequence
  Description of Artificial Sequence: Synthetic oligonucleotide
uuggcaguuccucaaaggg

SEQ ID NO: 3203014 - RNA, 19 nt, Artificial Sequence
  Description of Artificial Sequence: Synthetic oligonucleotide
uuuucagguauguugggag

SEQ ID NO: 3203015 - RNA, 19 nt, Artificial Sequence
  Description of Artificial Sequence: Synthetic oligonucleotide
auaaccacaaugaugauca

SEQ ID NO: 3203016 - RNA, 19 nt, Artificial Sequence
  Description of Artificial Sequence: Synthetic oligonucleotide
uuuccucauaaccacaaug

SEQ ID NO: 3203017 - RNA, 19 nt, Artificial Sequence
  Description of Artificial Sequence: Synthetic oligonucleotide
aaccagagucacuacugcc

SEQ ID NO: 3203018 - RNA, 19 nt, Artificial Sequence
  Description of Artificial Sequence: Synthetic oligonucleotide
uuccucauaaccacaauga

SEQ ID NO: 3203019 - RNA, 19 nt, Artificial Sequence
  Description of Artificial Sequence: Synthetic oligonucleotide
agugguuguacucuuaugu

SEQ ID NO: 3203020 - RNA, 19 nt, Artificial Sequence
  Description of Artificial Sequence: Synthetic oligonucleotide
gaaauuuuccucauaacca

SEQ ID NO: 3203021 - RNA, 19 nt, Artificial Sequence
  Description of Artificial Sequence: Synthetic oligonucleotide
ucuuccuccauaagcagag

SEQ ID NO: 3203022 - RNA, 19 nt, Artificial Sequence
  Description of Artificial Sequence: Synthetic oligonucleotide
ucuguucagcucuucaggg

SEQ ID NO: 3203023 - RNA, 19 nt, Artificial Sequence
  Description of Artificial Sequence: Synthetic oligonucleotide
gaaucauuuauuacaaaac

SEQ ID NO: 3203024 - RNA, 19 nt, Artificial Sequence
  Description of Artificial Sequence: Synthetic oligonucleotide
uuuuccaaaggcauaugcu

SEQ ID NO: 3203025 - RNA, 19 nt, Artificial Sequence
  Description of Artificial Sequence: Synthetic oligonucleotide
accacaaugaugaucacuc

SEQ ID NO: 3203026 - RNA, 19 nt, Artificial Sequence
  Description of Artificial Sequence: Synthetic oligonucleotide
uacucuuauguucuucucc

SEQ ID NO: 3203027 - RNA, 19 nt, Artificial Sequence
  Description of Artificial Sequence: Synthetic oligonucleotide
ugugugugguaccagaggu

SEQ ID NO: 3203028 - RNA, 19 nt, Artificial Sequence
  Description of Artificial Sequence: Synthetic oligonucleotide
uguugucuguguuucauca

SEQ ID NO: 3203029 - RNA, 19 nt, Artificial Sequence
  Description of Artificial Sequence: Synthetic oligonucleotide
uguccuuuggcaccucugg

SEQ ID NO: 3203030 - RNA, 19 nt, Artificial Sequence
  Description of Artificial Sequence: Synthetic oligonucleotide
agcacucuuauuuucaggu

SEQ ID NO: 3203031 - RNA, 19 nt, Artificial Sequence
  Description of Artificial Sequence: Synthetic oligonucleotide
uuccuuaucugcagagugg

SEQ ID NO: 3203032 - RNA, 19 nt, Artificial Sequence
  Description of Artificial Sequence: Synthetic oligonucleotide
aaagggaucuuugugugug

SEQ ID NO: 3203033 - RNA, 19 nt, Artificial Sequence
  Description of Artificial Sequence: Synthetic oligonucleotide
aucuguucagcucuucagg

SEQ ID NO: 3203034 - RNA, 19 nt, Artificial Sequence
  Description of Artificial Sequence: Synthetic oligonucleotide
uugucuguguuucaucagc

SEQ ID NO: 3203035 - RNA, 19 nt, Artificial Sequence
  Description of Artificial Sequence: Synthetic oligonucleotide
uuugugugugguaccagag

SEQ ID NO: 3203036 - RNA, 19 nt, Artificial Sequence
  Description of Artificial Sequence: Synthetic oligonucleotide
uccaacuaugauuccaacc

SEQ ID NO: 3203037 - RNA, 19 nt, Artificial Sequence
  Description of Artificial Sequence: Synthetic oligonucleotide
gacuuguuuccuuaucugc

SEQ ID NO: 3203038 - RNA, 19 nt, Artificial Sequence
  Description of Artificial Sequence: Synthetic oligonucleotide
aagcacucuuauuuucagg

SEQ ID NO: 3203039 - RNA, 19 nt, Artificial Sequence
  Description of Artificial Sequence: Synthetic oligonucleotide
auuuucuaugcaugguguc

SEQ ID NO: 3203040 - RNA, 19 nt, Artificial Sequence
  Description of Artificial Sequence: Synthetic oligonucleotide
aagcaggggauguuggaag

SEQ ID NO: 3203041 - RNA, 19 nt, Artificial Sequence
  Description of Artificial Sequence: Synthetic oligonucleotide
gaucuguucagcucuucag

SEQ ID NO: 3203042 - RNA, 19 nt, Artificial Sequence
  Description of Artificial Sequence: Synthetic oligonucleotide
uuaucugcagaguggcuag

SEQ ID NO: 3203043 - RNA, 19 nt, Artificial Sequence
  Description of Artificial Sequence: Synthetic oligonucleotide
uuuccaaaggcauaugcuu

SEQ ID NO: 3203044 - RNA, 19 nt, Artificial Sequence
  Description of Artificial Sequence: Synthetic oligonucleotide
uugugugugguaccagagg

SEQ ID NO: 3203045 - RNA, 19 nt, Artificial Sequence
  Description of Artificial Sequence: Synthetic oligonucleotide
gcuguguuaucuuuguugg

SEQ ID NO: 3203046 - RNA, 19 nt, Artificial Sequence
  Description of Artificial Sequence: Synthetic oligonucleotide
ugugugguaccagaggucc

SEQ ID NO: 3203047 - RNA, 19 nt, Artificial Sequence
  Description of Artificial Sequence: Synthetic oligonucleotide
uaugcauggugucuuuuga

SEQ ID NO: 3203048 - RNA, 19 nt, Artificial Sequence
  Description of Artificial Sequence: Synthetic oligonucleotide
acucuuauguucuucucca

SEQ ID NO: 3203049 - RNA, 19 nt, Artificial Sequence
  Description of Artificial Sequence: Synthetic oligonucleotide
uauuuucagguauguuggg

SEQ ID NO: 3203050 - RNA, 19 nt, Artificial Sequence
  Description of Artificial Sequence: Synthetic oligonucleotide
cuuauguucuucuccauca

SEQ ID NO: 3203051 - RNA, 19 nt, Artificial Sequence
  Description of Artificial Sequence: Synthetic oligonucleotide
cuccauaagcagaggaugg

SEQ ID NO: 3203052 - RNA, 19 nt, Artificial Sequence
  Description of Artificial Sequence: Synthetic oligonucleotide
auguucuucuccaucaggg

SEQ ID NO: 3203053 - RNA, 19 nt, Artificial Sequence
  Description of Artificial Sequence: Synthetic oligonucleotide
aaccuuccagaaauuuucc

SEQ ID NO: 3203054 - RNA, 19 nt, Artificial Sequence
  Description of Artificial Sequence: Synthetic oligonucleotide
uuauguucuucuccaucag

SEQ ID NO: 3203055 - RNA, 19 nt, Artificial Sequence
  Description of Artificial Sequence: Synthetic oligonucleotide
gaagcacucuuauuuucag

SEQ ID NO: 3203056 - RNA, 19 nt, Artificial Sequence
  Description of Artificial Sequence: Synthetic oligonucleotide
acuacugccaagccaucuc

SEQ ID NO: 3203057 - RNA, 19 nt, Artificial Sequence
  Description of Artificial Sequence: Synthetic oligonucleotide
ucuuauguucuucuccauc

SEQ ID NO: 3203058 - RNA, 19 nt, Artificial Sequence
  Description of Artificial Sequence: Synthetic oligonucleotide
uuauuacaaaacauauauu

SEQ ID NO: 3203059 - RNA, 19 nt, Artificial Sequence
  Description of Artificial Sequence: Synthetic oligonucleotide
agcaggggauguuggaagc

SEQ ID NO: 3203060 - RNA, 19 nt, Artificial Sequence
  Description of Artificial Sequence: Synthetic oligonucleotide
guuggcaguuccucaaagg

SEQ ID NO: 3203061 - RNA, 19 nt, Artificial Sequence
  Description of Artificial Sequence: Synthetic oligonucleotide
ugacuuguuuccuuaucug

SEQ ID NO: 3203062 - RNA, 19 nt, Artificial Sequence
  Description of Artificial Sequence: Synthetic oligonucleotide
uucaucagcuguguuaucu

SEQ ID NO: 3203063 - RNA, 19 nt, Artificial Sequence
  Description of Artificial Sequence: Synthetic oligonucleotide
agaacagcuugaucuguuc

SEQ ID NO: 3203064 - RNA, 19 nt, Artificial Sequence
  Description of Artificial Sequence: Synthetic oligonucleotide
uuuucuaugcauggugucu

SEQ ID NO: 3203065 - RNA, 19 nt, Artificial Sequence
  Description of Artificial Sequence: Synthetic oligonucleotide
uccaacaaagccgauggcu

SEQ ID NO: 3203066 - RNA, 19 nt, Artificial Sequence
  Description of Artificial Sequence: Synthetic oligonucleotide
guuggggugacuuguuucc

SEQ ID NO: 3203067 - RNA, 19 nt, Artificial Sequence
  Description of Artificial Sequence: Synthetic oligonucleotide
auuacaaaacauauauuaa

SEQ ID NO: 3203068 - RNA, 19 nt, Artificial Sequence
  Description of Artificial Sequence: Synthetic oligonucleotide
aggcauaugcuuugagggg

SEQ ID NO: 3203069 - RNA, 19 nt, Artificial Sequence
  Description of Artificial Sequence: Synthetic oligonucleotide
uaguaggacuccaacuaug

SEQ ID NO: 3203070 - RNA, 19 nt, Artificial Sequence
  Description of Artificial Sequence: Synthetic oligonucleotide
ugaucuguucagcucuuca

SEQ ID NO: 3203071 - RNA, 19 nt, Artificial Sequence
  Description of Artificial Sequence: Synthetic oligonucleotide
uccaaaggcauaugcuuug

SEQ ID NO: 3203072 - RNA, 19 nt, Artificial Sequence
  Description of Artificial Sequence: Synthetic oligonucleotide
cuuccagaaauuuuccuca

SEQ ID NO: 3203073 - RNA, 19 nt, Artificial Sequence
  Description of Artificial Sequence: Synthetic oligonucleotide
ugguuguacucuuauguuc

SEQ ID NO: 3203074 - RNA, 19 nt, Artificial Sequence
  Description of Artificial Sequence: Synthetic oligonucleotide
auucugacagugguuguac

SEQ ID NO: 3203075 - RNA, 19 nt, Artificial Sequence
  Description of Artificial Sequence: Synthetic oligonucleotide
ugugucuguccuuuggcac

SEQ ID NO: 3203076 - RNA, 19 nt, Artificial Sequence
  Description of Artificial Sequence: Synthetic oligonucleotide
agcuugaucuguucagcuc

SEQ ID NO: 3203077 - RNA, 19 nt, Artificial Sequence
  Description of Artificial Sequence: Synthetic oligonucleotide
accauucugacagugguug

SEQ ID NO: 3203078 - RNA, 19 nt, Artificial Sequence
  Description of Artificial Sequence: Synthetic oligonucleotide
uuccuccauaagcagagga

SEQ ID NO: 3203079 - RNA, 19 nt, Artificial Sequence
  Description of Artificial Sequence: Synthetic oligonucleotide
ugucuguguuucaucagcu

SEQ ID NO: 3203080 - RNA, 19 nt, Artificial Sequence
  Description of Artificial Sequence: Synthetic oligonucleotide
auguugggagaacagcuug

SEQ ID NO: 3203081 - RNA, 19 nt, Artificial Sequence
  Description of Artificial Sequence: Synthetic oligonucleotide
uccauaagcagaggauggg

SEQ ID NO: 3203082 - RNA, 19 nt, Artificial Sequence
  Description of Artificial Sequence: Synthetic oligonucleotide
uuucagguauguugggaga

SEQ ID NO: 3203083 - RNA, 19 nt, Artificial Sequence
  Description of Artificial Sequence: Synthetic oligonucleotide
uccuuaucugcagaguggc

SEQ ID NO: 3203084 - RNA, 19 nt, Artificial Sequence
  Description of Artificial Sequence: Synthetic oligonucleotide
uguugggagaacagcuuga

SEQ ID NO: 3203085 - RNA, 19 nt, Artificial Sequence
  Description of Artificial Sequence: Synthetic oligonucleotide
uccuuuggcaccucuggca

SEQ ID NO: 3203086 - RNA, 19 nt, Artificial Sequence
  Description of Artificial Sequence: Synthetic oligonucleotide
ucuguuuuccaaaggcaua

SEQ ID NO: 3203087 - RNA, 19 nt, Artificial Sequence
  Description of Artificial Sequence: Synthetic oligonucleotide
ucagcuguguuaucuuugu

SEQ ID NO: 3203088 - RNA, 19 nt, Artificial Sequence
  Description of Artificial Sequence: Synthetic oligonucleotide
aacuaugauuccaaccaga

SEQ ID NO: 3203089 - RNA, 19 nt, Artificial Sequence
  Description of Artificial Sequence: Synthetic oligonucleotide
uggcaguuccucaaaggga

SEQ ID NO: 3203090 - RNA, 19 nt, Artificial Sequence
  Description of Artificial Sequence: Synthetic oligonucleotide
ucugacagugguuguacuc

SEQ ID NO: 3203091 - RNA, 19 nt, Artificial Sequence
  Description of Artificial Sequence: Synthetic oligonucleotide
guuggaagcacucuuauuu

SEQ ID NO: 3203092 - RNA, 19 nt, Artificial Sequence
  Description of Artificial Sequence: Synthetic oligonucleotide
caugugucuguccuuuggc

SEQ ID NO: 3203093 - RNA, 19 nt, Artificial Sequence
  Description of Artificial Sequence: Synthetic oligonucleotide
cuaugcauggugucuuuug

SEQ ID NO: 3203094 - RNA, 19 nt, Artificial Sequence
  Description of Artificial Sequence: Synthetic oligonucleotide
uuaucuguugucuguguuu

SEQ ID NO: 3203095 - RNA, 19 nt, Artificial Sequence
  Description of Artificial Sequence: Synthetic oligonucleotide
aaccacaaugaugaucacu

SEQ ID NO: 3203096 - RNA, 19 nt, Artificial Sequence
  Description of Artificial Sequence: Synthetic oligonucleotide
gaucuuugugugugguacc

SEQ ID NO: 3203097 - RNA, 19 nt, Artificial Sequence
  Description of Artificial Sequence: Synthetic oligonucleotide
acucuuacaauuuugauuc

SEQ ID NO: 3203098 - RNA, 19 nt, Artificial Sequence
  Description of Artificial Sequence: Synthetic oligonucleotide
uuuuacuuuauuuauaugu

SEQ ID NO: 3203099 - RNA, 19 nt, Artificial Sequence
  Description of Artificial Sequence: Synthetic oligonucleotide
auauguauuuauuugacuc

SEQ ID NO: 3203100 - RNA, 19 nt, Artificial Sequence
  Description of Artificial Sequence: Synthetic oligonucleotide
uuacuaauggaaaagugag

SEQ ID NO: 3203101 - RNA, 19 nt, Artificial Sequence
  Description of Artificial Sequence: Synthetic oligonucleotide
acaauuuugauucagcaug

SEQ ID NO: 3203102 - RNA, 19 nt, Artificial Sequence
  Description of Artificial Sequence: Synthetic oligonucleotide
aauaaacggaucuucagca

SEQ ID NO: 3203103 - RNA, 19 nt, Artificial Sequence
  Description of Artificial Sequence: Synthetic oligonucleotide
uuuauauguauuuauuuga

SEQ ID NO: 3203104 - RNA, 19 nt, Artificial Sequence
  Description of Artificial Sequence: Synthetic oligonucleotide
auuuauuugacucuuacaa

SEQ ID NO: 3203105 - RNA, 19 nt, Artificial Sequence
  Description of Artificial Sequence: Synthetic oligonucleotide
auuuauauguauuuauuug

SEQ ID NO: 3203106 - RNA, 19 nt, Artificial Sequence
  Description of Artificial Sequence: Synthetic oligonucleotide
uuugauucagcauggauug

SEQ ID NO: 3203107 - RNA, 19 nt, Artificial Sequence
  Description of Artificial Sequence: Synthetic oligonucleotide
agugcaauugccaucaacc

SEQ ID NO: 3203108 - RNA, 19 nt, Artificial Sequence
  Description of Artificial Sequence: Synthetic oligonucleotide
uugacuuuaauuccagugc

SEQ ID NO: 3203109 - RNA, 19 nt, Artificial Sequence
  Description of Artificial Sequence: Synthetic oligonucleotide
uuuaauuccagugcaauug

SEQ ID NO: 3203110 - RNA, 19 nt, Artificial Sequence
  Description of Artificial Sequence: Synthetic oligonucleotide
cauggauugcaauaaacgg

SEQ ID NO: 3203111 - RNA, 19 nt, Artificial Sequence
  Description of Artificial Sequence: Synthetic oligonucleotide
ucagcagaguuacuaaugg

SEQ ID NO: 3203112 - RNA, 19 nt, Artificial Sequence
  Description of Artificial Sequence: Synthetic oligonucleotide
uuuauuuauauguauuuau

SEQ ID NO: 3203113 - RNA, 19 nt, Artificial Sequence
  Description of Artificial Sequence: Synthetic oligonucleotide
auugacuuuaauuccagug

SEQ ID NO: 3203114 - RNA, 19 nt, Artificial Sequence
  Description of Artificial Sequence: Synthetic oligonucleotide
auugccaucaaccuugucu

SEQ ID NO: 3203115 - RNA, 19 nt, Artificial Sequence
  Description of Artificial Sequence: Synthetic oligonucleotide
uuuugauucagcauggauu

SEQ ID NO: 3203116 - RNA, 19 nt, Artificial Sequence
  Description of Artificial Sequence: Synthetic oligonucleotide
uuauauguauuuauuugac

SEQ ID NO: 3203117 - RNA, 19 nt, Artificial Sequence
  Description of Artificial Sequence: Synthetic oligonucleotide
uuuacuuuauuuauaugua

SEQ ID NO: 3203118 - RNA, 19 nt, Artificial Sequence
  Description of Artificial Sequence: Synthetic oligonucleotide
uuacaauuuugauucagca

SEQ ID NO: 3203119 - RNA, 19 nt, Artificial Sequence
  Description of Artificial Sequence: Synthetic oligonucleotide
acuaauggaaaagugagca

SEQ ID NO: 3203120 - RNA, 19 nt, Artificial Sequence
  Description of Artificial Sequence: Synthetic oligonucleotide
uauuuauauguauuuauuu

SEQ ID NO: 3203121 - RNA, 19 nt, Artificial Sequence
  Description of Artificial Sequence: Synthetic oligonucleotide
uuauuugacucuuacaauu

SEQ ID NO: 3203122 - RNA, 19 nt, Artificial Sequence
  Description of Artificial Sequence: Synthetic oligonucleotide
uauguauuuauuugacucu

SEQ ID NO: 3203123 - RNA, 19 nt, Artificial Sequence
  Description of Artificial Sequence: Synthetic oligonucleotide
uuugacucuuacaauuuug

SEQ ID NO: 3203124 - RNA, 19 nt, Artificial Sequence
  Description of Artificial Sequence: Synthetic oligonucleotide
cuuacaauuuugauucagc

SEQ ID NO: 3203125 - RNA, 19 nt, Artificial Sequence
  Description of Artificial Sequence: Synthetic oligonucleotide
aaaagugagcauugccauc

SEQ ID NO: 3203126 - RNA, 19 nt, Artificial Sequence
  Description of Artificial Sequence: Synthetic oligonucleotide
uuaauuccagugcaauugc

SEQ ID NO: 3203127 - RNA, 19 nt, Artificial Sequence
  Description of Artificial Sequence: Synthetic oligonucleotide
ugacuuuaauuccagugca

SEQ ID NO: 3203128 - RNA, 19 nt, Artificial Sequence
  Description of Artificial Sequence: Synthetic oligonucleotide
uuauuuauauguauuuauu

SEQ ID NO: 3203129 - RNA, 19 nt, Artificial Sequence
  Description of Artificial Sequence: Synthetic oligonucleotide
caauaaacggaucuucagc

SEQ ID NO: 3203130 - RNA, 19 nt, Artificial Sequence
  Description of Artificial Sequence: Synthetic oligonucleotide
aaagugagcauugccauca

SEQ ID NO: 3203131 - RNA, 19 nt, Artificial Sequence
  Description of Artificial Sequence: Synthetic oligonucleotide
uugacucuuacaauuuuga

SEQ ID NO: 3203132 - RNA, 19 nt, Artificial Sequence
  Description of Artificial Sequence: Synthetic oligonucleotide
ccaacauugacuuuaauuc

SEQ ID NO: 3203133 - RNA, 19 nt, Artificial Sequence
  Description of Artificial Sequence: Synthetic oligonucleotide
caauuuugauucagcaugg

SEQ ID NO: 3203134 - RNA, 19 nt, Artificial Sequence
  Description of Artificial Sequence: Synthetic oligonucleotide
uauauguauuuauuugacu

SEQ ID NO: 3203135 - RNA, 19 nt, Artificial Sequence
  Description of Artificial Sequence: Synthetic oligonucleotide
uggauugcaauaaacggau

SEQ ID NO: 3203136 - RNA, 19 nt, Artificial Sequence
  Description of Artificial Sequence: Synthetic oligonucleotide
caacauugacuuuaauucc

SEQ ID NO: 3203137 - RNA, 19 nt, Artificial Sequence
  Description of Artificial Sequence: Synthetic oligonucleotide
uauuuauuugacucuuaca

SEQ ID NO: 3203138 - RNA, 19 nt, Artificial Sequence
  Description of Artificial Sequence: Synthetic oligonucleotide
uucagcagaguuacuaaug

SEQ ID NO: 3203139 - RNA, 19 nt, Artificial Sequence
  Description of Artificial Sequence: Synthetic oligonucleotide
ugcaauaaacggaucuuca

SEQ ID NO: 3203140 - RNA, 19 nt, Artificial Sequence
  Description of Artificial Sequence: Synthetic oligonucleotide
uggaaaagugagcauugcc

SEQ ID NO: 3203141 - RNA, 19 nt, Artificial Sequence
  Description of Artificial Sequence: Synthetic oligonucleotide
aauggaaaagugagcauug

SEQ ID NO: 3203142 - RNA, 19 nt, Artificial Sequence
  Description of Artificial Sequence: Synthetic oligonucleotide
acuuuauuuauauguauuu

SEQ ID NO: 3203143 - RNA, 19 nt, Artificial Sequence
  Description of Artificial Sequence: Synthetic oligonucleotide
uaaacggaucuucagcaga

SEQ ID NO: 3203144 - RNA, 19 nt, Artificial Sequence
  Description of Artificial Sequence: Synthetic oligonucleotide
agaguuacuaauggaaaag

SEQ ID NO: 3203145 - RNA, 19 nt, Artificial Sequence
  Description of Artificial Sequence: Synthetic oligonucleotide
uacuuuauuuauauguauu

SEQ ID NO: 3203146 - RNA, 19 nt, Artificial Sequence
  Description of Artificial Sequence: Synthetic oligonucleotide
uuuauuugacucuuacaau

SEQ ID NO: 3203147 - RNA, 19 nt, Artificial Sequence
  Description of Artificial Sequence: Synthetic oligonucleotide
uacuaauggaaaagugagc

SEQ ID NO: 3203148 - RNA, 19 nt, Artificial Sequence
  Description of Artificial Sequence: Synthetic oligonucleotide
guuacuaauggaaaaguga

SEQ ID NO: 3203149 - RNA, 19 nt, Artificial Sequence
  Description of Artificial Sequence: Synthetic oligonucleotide
uuacuuuauuuauauguau

SEQ ID NO: 3203150 - RNA, 19 nt, Artificial Sequence
  Description of Artificial Sequence: Synthetic oligonucleotide
guauuuauuugacucuuac

SEQ ID NO: 3203151 - RNA, 19 nt, Artificial Sequence
  Description of Artificial Sequence: Synthetic oligonucleotide
ucgauguucacagacccag

SEQ ID NO: 3203152 - RNA, 19 nt, Artificial Sequence
  Description of Artificial Sequence: Synthetic oligonucleotide
aacauugacuuuaauucca

SEQ ID NO: 3203153 - RNA, 19 nt, Artificial Sequence
  Description of Artificial Sequence: Synthetic oligonucleotide
ucuuacaauuuugauucag

SEQ ID NO: 3203154 - RNA, 19 nt, Artificial Sequence
  Description of Artificial Sequence: Synthetic oligonucleotide
auugccaucauugccaaca

SEQ ID NO: 3203155 - RNA, 19 nt, Artificial Sequence
  Description of Artificial Sequence: Synthetic oligonucleotide
uguucacagacccagucau

SEQ ID NO: 3203156 - RNA, 19 nt, Artificial Sequence
  Description of Artificial Sequence: Synthetic oligonucleotide
caucgauguucacagaccc

SEQ ID NO: 3203157 - RNA, 19 nt, Artificial Sequence
  Description of Artificial Sequence: Synthetic oligonucleotide
uacaauuuugauucagcau

SEQ ID NO: 3203158 - RNA, 19 nt, Artificial Sequence
  Description of Artificial Sequence: Synthetic oligonucleotide
ugagcauugccaucauugc

SEQ ID NO: 3203159 - RNA, 19 nt, Artificial Sequence
  Description of Artificial Sequence: Synthetic oligonucleotide
gugagcauugccaucauug

SEQ ID NO: 3203160 - RNA, 19 nt, Artificial Sequence
  Description of Artificial Sequence: Synthetic oligonucleotide
gauugcaauaaacggaucu

SEQ ID NO: 3203161 - RNA, 19 nt, Artificial Sequence
  Description of Artificial Sequence: Synthetic oligonucleotide
auaaacggaucuucagcag

SEQ ID NO: 3203162 - RNA, 19 nt, Artificial Sequence
  Description of Artificial Sequence: Synthetic oligonucleotide
ucauugccaacauugacuu

SEQ ID NO: 3203163 - RNA, 19 nt, Artificial Sequence
  Description of Artificial Sequence: Synthetic oligonucleotide
uucacagacccagucauug

SEQ ID NO: 3203164 - RNA, 19 nt, Artificial Sequence
  Description of Artificial Sequence: Synthetic oligonucleotide
uugccaucaaccuugucuc

SEQ ID NO: 3203165 - RNA, 19 nt, Artificial Sequence
  Description of Artificial Sequence: Synthetic oligonucleotide
aauuccagugcaauugcca

SEQ ID NO: 3203166 - RNA, 19 nt, Artificial Sequence
  Description of Artificial Sequence: Synthetic oligonucleotide
uauuugacucuuacaauuu

SEQ ID NO: 3203167 - RNA, 19 nt, Artificial Sequence
  Description of Artificial Sequence: Synthetic oligonucleotide
uucagcauggauugcaaua

SEQ ID NO: 3203168 - RNA, 19 nt, Artificial Sequence
  Description of Artificial Sequence: Synthetic oligonucleotide
uaauggaaaagugagcauu

SEQ ID NO: 3203169 - RNA, 19 nt, Artificial Sequence
  Description of Artificial Sequence: Synthetic oligonucleotide
aaacggaucuucagcagag

SEQ ID NO: 3203170 - RNA, 19 nt, Artificial Sequence
  Description of Artificial Sequence: Synthetic oligonucleotide
uaauuccagugcaauugcc

SEQ ID NO: 3203171 - RNA, 19 nt, Artificial Sequence
  Description of Artificial Sequence: Synthetic oligonucleotide
uccagugcaauugccauca

SEQ ID NO: 3203172 - RNA, 19 nt, Artificial Sequence
  Description of Artificial Sequence: Synthetic oligonucleotide
aucauugccaacauugacu

SEQ ID NO: 3203173 - RNA, 19 nt, Artificial Sequence
  Description of Artificial Sequence: Synthetic oligonucleotide
auuuugauucagcauggau

SEQ ID NO: 3203174 - RNA, 19 nt, Artificial Sequence
  Description of Artificial Sequence: Synthetic oligonucleotide
agcauggauugcaauaaac

SEQ ID NO: 3203175 - RNA, 19 nt, Artificial Sequence
  Description of Artificial Sequence: Synthetic oligonucleotide
ugauucagcauggauugca

SEQ ID NO: 3203176 - RNA, 19 nt, Artificial Sequence
  Description of Artificial Sequence: Synthetic oligonucleotide
gauguucacagacccaguc

SEQ ID NO: 3203177 - RNA, 19 nt, Artificial Sequence
  Description of Artificial Sequence: Synthetic oligonucleotide
gcauggauugcaauaaacg

SEQ ID NO: 3203178 - RNA, 19 nt, Artificial Sequence
  Description of Artificial Sequence: Synthetic oligonucleotide
aguuacuaauggaaaagug

SEQ ID NO: 3203179 - RNA, 19 nt, Artificial Sequence
  Description of Artificial Sequence: Synthetic oligonucleotide
gagcauugccaucauugcc

SEQ ID NO: 3203180 - RNA, 19 nt, Artificial Sequence
  Description of Artificial Sequence: Synthetic oligonucleotide
ucuucagcagaguuacuaa

SEQ ID NO: 3203181 - RNA, 19 nt, Artificial Sequence
  Description of Artificial Sequence: Synthetic oligonucleotide
auggauugcaauaaacgga

SEQ ID NO: 3203182 - RNA, 19 nt, Artificial Sequence
  Description of Artificial Sequence: Synthetic oligonucleotide
auugccaacauugacuuua

SEQ ID NO: 3203183 - RNA, 19 nt, Artificial Sequence
  Description of Artificial Sequence: Synthetic oligonucleotide
ucagcauggauugcaauaa

SEQ ID NO: 3203184 - RNA, 19 nt, Artificial Sequence
  Description of Artificial Sequence: Synthetic oligonucleotide
auggaaaagugagcauugc

SEQ ID NO: 3203185 - RNA, 19 nt, Artificial Sequence
  Description of Artificial Sequence: Synthetic oligonucleotide
cacagacccagucauugcc

SEQ ID NO: 3203186 - RNA, 19 nt, Artificial Sequence
  Description of Artificial Sequence: Synthetic oligonucleotide
agcauugccaucauugcca

SEQ ID NO: 3203187 - RNA, 19 nt, Artificial Sequence
  Description of Artificial Sequence: Synthetic oligonucleotide
gcaauugccaucaaccuug

SEQ ID NO: 3203188 - RNA, 19 nt, Artificial Sequence
  Description of Artificial Sequence: Synthetic oligonucleotide
gccaucauugccaacauug

SEQ ID NO: 3203189 - RNA, 19 nt, Artificial Sequence
  Description of Artificial Sequence: Synthetic oligonucleotide
ugcaauugccaucaaccuu

SEQ ID NO: 3203190 - RNA, 19 nt, Artificial Sequence
  Description of Artificial Sequence: Synthetic oligonucleotide
auuccagugcaauugccau

SEQ ID NO: 3203191 - RNA, 19 nt, Artificial Sequence
  Description of Artificial Sequence: Synthetic oligonucleotide
caucauugccaacauugac

SEQ ID NO: 3203192 - RNA, 19 nt, Artificial Sequence
  Description of Artificial Sequence: Synthetic oligonucleotide
uguauuuauuugacucuua

SEQ ID NO: 3203193 - RNA, 19 nt, Artificial Sequence
  Description of Artificial Sequence: Synthetic oligonucleotide
agcagaguuacuaauggaa

SEQ ID NO: 3203194 - RNA, 19 nt, Artificial Sequence
  Description of Artificial Sequence: Synthetic oligonucleotide
gaaaagugagcauugccau

SEQ ID NO: 3203195 - RNA, 19 nt, Artificial Sequence
  Description of Artificial Sequence: Synthetic oligonucleotide
gcaauaaacggaucuucag

SEQ ID NO: 3203196 - RNA, 19 nt, Artificial Sequence
  Description of Artificial Sequence: Synthetic oligonucleotide
gacucuuacaauuuugauu

SEQ ID NO: 3203197 - RNA, 19 nt, Artificial Sequence
  Description of Artificial Sequence: Synthetic oligonucleotide
aaagcuaagagcuaaaacu

SEQ ID NO: 3203198 - RNA, 19 nt, Artificial Sequence
  Description of Artificial Sequence: Synthetic oligonucleotide
aagagcuaaaacuaaauuc

SEQ ID NO: 3203199 - RNA, 19 nt, Artificial Sequence
  Description of Artificial Sequence: Synthetic oligonucleotide
aauguuucccaccaaaggg

SEQ ID NO: 3203200 - RNA, 19 nt, Artificial Sequence
  Description of Artificial Sequence: Synthetic oligonucleotide
aaacccuuaacuuacauca

SEQ ID NO: 3203201 - RNA, 19 nt, Artificial Sequence
  Description of Artificial Sequence: Synthetic oligonucleotide
aaaacuaaauuccccaagg

SEQ ID NO: 3203202 - RNA, 19 nt, Artificial Sequence
  Description of Artificial Sequence: Synthetic oligonucleotide
aauguggaaaacuagauau

SEQ ID NO: 3203203 - RNA, 19 nt, Artificial Sequence
  Description of Artificial Sequence: Synthetic oligonucleotide
acuuacaucacacacaaag

SEQ ID NO: 3203204 - RNA, 19 nt, Artificial Sequence
  Description of Artificial Sequence: Synthetic oligonucleotide
aaagauuaacucaaaaugg

SEQ ID NO: 3203205 - RNA, 19 nt, Artificial Sequence
  Description of Artificial Sequence: Synthetic oligonucleotide
aaagagcaaagcuaagagc

SEQ ID NO: 3203206 - RNA, 19 nt, Artificial Sequence
  Description of Artificial Sequence: Synthetic oligonucleotide
agaaugggaagucaaaccc

SEQ ID NO: 3203207 - RNA, 19 nt, Artificial Sequence
  Description of Artificial Sequence: Synthetic oligonucleotide
agagcuaaaacuaaauucc

SEQ ID NO: 3203208 - RNA, 19 nt, Artificial Sequence
  Description of Artificial Sequence: Synthetic oligonucleotide
caaagauuaacucaaaaug

SEQ ID NO: 3203209 - RNA, 19 nt, Artificial Sequence
  Description of Artificial Sequence: Synthetic oligonucleotide
ucaaaauggaccaaagagc

SEQ ID NO: 3203210 - RNA, 19 nt, Artificial Sequence
  Description of Artificial Sequence: Synthetic oligonucleotide
aaacuaaauuccccaaggc

SEQ ID NO: 3203211 - RNA, 19 nt, Artificial Sequence
  Description of Artificial Sequence: Synthetic oligonucleotide
aaacuagauauccacauga

SEQ ID NO: 3203212 - RNA, 19 nt, Artificial Sequence
  Description of Artificial Sequence: Synthetic oligonucleotide
cucaaaauggaccaaagag

SEQ ID NO: 3203213 - RNA, 19 nt, Artificial Sequence
  Description of Artificial Sequence: Synthetic oligonucleotide
guggauaauacuuuugugg

SEQ ID NO: 3203214 - RNA, 19 nt, Artificial Sequence
  Description of Artificial Sequence: Synthetic oligonucleotide
aauacuuuuguggauauga

SEQ ID NO: 3203215 - RNA, 19 nt, Artificial Sequence
  Description of Artificial Sequence: Synthetic oligonucleotide
auuaacucaaaauggacca

SEQ ID NO: 3203216 - RNA, 19 nt, Artificial Sequence
  Description of Artificial Sequence: Synthetic oligonucleotide
aagagcaaagcuaagagcu

SEQ ID NO: 3203217 - RNA, 19 nt, Artificial Sequence
  Description of Artificial Sequence: Synthetic oligonucleotide
uaaaacuaaauuccccaag

SEQ ID NO: 3203218 - RNA, 19 nt, Artificial Sequence
  Description of Artificial Sequence: Synthetic oligonucleotide
uuaacuuacaucacacaca

SEQ ID NO: 3203219 - RNA, 19 nt, Artificial Sequence
  Description of Artificial Sequence: Synthetic oligonucleotide
aacuaaauuccccaaggca

SEQ ID NO: 3203220 - RNA, 19 nt, Artificial Sequence
  Description of Artificial Sequence: Synthetic oligonucleotide
cuuaacuuacaucacacac

SEQ ID NO: 3203221 - RNA, 19 nt, Artificial Sequence
  Description of Artificial Sequence: Synthetic oligonucleotide
cuagauauccacaugagga

SEQ ID NO: 3203222 - RNA, 19 nt, Artificial Sequence
  Description of Artificial Sequence: Synthetic oligonucleotide
gauuaacucaaaauggacc

SEQ ID NO: 3203223 - RNA, 19 nt, Artificial Sequence
  Description of Artificial Sequence: Synthetic oligonucleotide
gaauguuucccaccaaagg

SEQ ID NO: 3203224 - RNA, 19 nt, Artificial Sequence
  Description of Artificial Sequence: Synthetic oligonucleotide
cuuagaaacagccguaccc

SEQ ID NO: 3203225 - RNA, 19 nt, Artificial Sequence
  Description of Artificial Sequence: Synthetic oligonucleotide
uggauaauacuuuugugga

SEQ ID NO: 3203226 - RNA, 19 nt, Artificial Sequence
  Description of Artificial Sequence: Synthetic oligonucleotide
aaaacuagauauccacaug

SEQ ID NO: 3203227 - RNA, 19 nt, Artificial Sequence
  Description of Artificial Sequence: Synthetic oligonucleotide
uguggaaaacuagauaucc

SEQ ID NO: 3203228 - RNA, 19 nt, Artificial Sequence
  Description of Artificial Sequence: Synthetic oligonucleotide
ucacacacaaagauuaacu

SEQ ID NO: 3203229 - RNA, 19 nt, Artificial Sequence
  Description of Artificial Sequence: Synthetic oligonucleotide
acaaagauuaacucaaaau

SEQ ID NO: 3203230 - RNA, 19 nt, Artificial Sequence
  Description of Artificial Sequence: Synthetic oligonucleotide
uaacuuacaucacacacaa

SEQ ID NO: 3203231 - RNA, 19 nt, Artificial Sequence
  Description of Artificial Sequence: Synthetic oligonucleotide
gagacucaggcuuagaaac

SEQ ID NO: 3203232 - RNA, 19 nt, Artificial Sequence
  Description of Artificial Sequence: Synthetic oligonucleotide
acuagauauccacaugagg

SEQ ID NO: 3203233 - RNA, 19 nt, Artificial Sequence
  Description of Artificial Sequence: Synthetic oligonucleotide
uggaaaacuagauauccac

SEQ ID NO: 3203234 - RNA, 19 nt, Artificial Sequence
  Description of Artificial Sequence: Synthetic oligonucleotide
uuacaucacacacaaagau

SEQ ID NO: 3203235 - RNA, 19 nt, Artificial Sequence
  Description of Artificial Sequence: Synthetic oligonucleotide
aacucaaccagagucaacu

SEQ ID NO: 3203236 - RNA, 19 nt, Artificial Sequence
  Description of Artificial Sequence: Synthetic oligonucleotide
caaagagcaaagcuaagag

SEQ ID NO: 3203237 - RNA, 19 nt, Artificial Sequence
  Description of Artificial Sequence: Synthetic oligonucleotide
uauaauagcuccacugggu

SEQ ID NO: 3203238 - RNA, 19 nt, Artificial Sequence
  Description of Artificial Sequence: Synthetic oligonucleotide
uagauauccacaugaggag

SEQ ID NO: 3203239 - RNA, 19 nt, Artificial Sequence
  Description of Artificial Sequence: Synthetic oligonucleotide
agcuauaauagcuccacug

SEQ ID NO: 3203240 - RNA, 19 nt, Artificial Sequence
  Description of Artificial Sequence: Synthetic oligonucleotide
caaaauggaccaaagagca

SEQ ID NO: 3203241 - RNA, 19 nt, Artificial Sequence
  Description of Artificial Sequence: Synthetic oligonucleotide
gagaaugggaagucaaacc

SEQ ID NO: 3203242 - RNA, 19 nt, Artificial Sequence
  Description of Artificial Sequence: Synthetic oligonucleotide
cuauaauagcuccacuggg

SEQ ID NO: 3203243 - RNA, 19 nt, Artificial Sequence
  Description of Artificial Sequence: Synthetic oligonucleotide
uggaccaaagagcaaagcu

SEQ ID NO: 3203244 - RNA, 19 nt, Artificial Sequence
  Description of Artificial Sequence: Synthetic oligonucleotide
aagauuaacucaaaaugga

SEQ ID NO: 3203245 - RNA, 19 nt, Artificial Sequence
  Description of Artificial Sequence: Synthetic oligonucleotide
aagucaaacccuuaacuua

SEQ ID NO: 3203246 - RNA, 19 nt, Artificial Sequence
  Description of Artificial Sequence: Synthetic oligonucleotide
ucaggcuuagaaacagccg

SEQ ID NO: 3203247 - RNA, 19 nt, Artificial Sequence
  Description of Artificial Sequence: Synthetic oligonucleotide
acacacaaagauuaacuca

SEQ ID NO: 3203248 - RNA, 19 nt, Artificial Sequence
  Description of Artificial Sequence: Synthetic oligonucleotide
aaauggaccaaagagcaaa

SEQ ID NO: 3203249 - RNA, 19 nt, Artificial Sequence
  Description of Artificial Sequence: Synthetic oligonucleotide
aaggcaagcuauaauagcu

SEQ ID NO: 3203250 - RNA, 19 nt, Artificial Sequence
  Description of Artificial Sequence: Synthetic oligonucleotide
auaauagcuccacugggug

SEQ ID NO: 3203251 - RNA, 19 nt, Artificial Sequence
  Description of Artificial Sequence: Synthetic oligonucleotide
agauuaacucaaaauggac

SEQ ID NO: 3203252 - RNA, 19 nt, Artificial Sequence
  Description of Artificial Sequence: Synthetic oligonucleotide
uuuguggauaugacuacca

SEQ ID NO: 3203253 - RNA, 19 nt, Artificial Sequence
  Description of Artificial Sequence: Synthetic oligonucleotide
uaagagcuaaaacuaaauu

SEQ ID NO: 3203254 - RNA, 19 nt, Artificial Sequence
  Description of Artificial Sequence: Synthetic oligonucleotide
agucaaacccuuaacuuac

SEQ ID NO: 3203255 - RNA, 19 nt, Artificial Sequence
  Description of Artificial Sequence: Synthetic oligonucleotide
cucaggcuuagaaacagcc

SEQ ID NO: 3203256 - RNA, 19 nt, Artificial Sequence
  Description of Artificial Sequence: Synthetic oligonucleotide
gcuauaauagcuccacugg

SEQ ID NO: 3203257 - RNA, 19 nt, Artificial Sequence
  Description of Artificial Sequence: Synthetic oligonucleotide
agcuaaaacuaaauucccc

SEQ ID NO: 3203258 - RNA, 19 nt, Artificial Sequence
  Description of Artificial Sequence: Synthetic oligonucleotide
cuaaauuccccaaggcaag

SEQ ID NO: 3203259 - RNA, 19 nt, Artificial Sequence
  Description of Artificial Sequence: Synthetic oligonucleotide
auguuucccaccaaagggc

SEQ ID NO: 3203260 - RNA, 19 nt, Artificial Sequence
  Description of Artificial Sequence: Synthetic oligonucleotide
uaauagcuccacugggugg

SEQ ID NO: 3203261 - RNA, 19 nt, Artificial Sequence
  Description of Artificial Sequence: Synthetic oligonucleotide
uacuuuuguggauaugacu

SEQ ID NO: 3203262 - RNA, 19 nt, Artificial Sequence
  Description of Artificial Sequence: Synthetic oligonucleotide
uuagaaacagccguacccu

SEQ ID NO: 3203263 - RNA, 19 nt, Artificial Sequence
  Description of Artificial Sequence: Synthetic oligonucleotide
caaggcaagcuauaauagc

SEQ ID NO: 3203264 - RNA, 19 nt, Artificial Sequence
  Description of Artificial Sequence: Synthetic oligonucleotide
caaagcuaagagcuaaaac

SEQ ID NO: 3203265 - RNA, 19 nt, Artificial Sequence
  Description of Artificial Sequence: Synthetic oligonucleotide
acuaaauuccccaaggcaa

SEQ ID NO: 3203266 - RNA, 19 nt, Artificial Sequence
  Description of Artificial Sequence: Synthetic oligonucleotide
acagccguacccugcaugg

SEQ ID NO: 3203267 - RNA, 19 nt, Artificial Sequence
  Description of Artificial Sequence: Synthetic oligonucleotide
aauagcuccacugggugga

SEQ ID NO: 3203268 - RNA, 19 nt, Artificial Sequence
  Description of Artificial Sequence: Synthetic oligonucleotide
uguggauaugacuaccaaa

SEQ ID NO: 3203269 - RNA, 19 nt, Artificial Sequence
  Description of Artificial Sequence: Synthetic oligonucleotide
aucacacacaaagauuaac

SEQ ID NO: 3203270 - RNA, 19 nt, Artificial Sequence
  Description of Artificial Sequence: Synthetic oligonucleotide
cacacacaaagauuaacuc

SEQ ID NO: 3203271 - RNA, 19 nt, Artificial Sequence
  Description of Artificial Sequence: Synthetic oligonucleotide
cacacaaagauuaacucaa

SEQ ID NO: 3203272 - RNA, 19 nt, Artificial Sequence
  Description of Artificial Sequence: Synthetic oligonucleotide
uguuucccaccaaagggca

SEQ ID NO: 3203273 - RNA, 19 nt, Artificial Sequence
  Description of Artificial Sequence: Synthetic oligonucleotide
acuuuuguggauaugacua

SEQ ID NO: 3203274 - RNA, 19 nt, Artificial Sequence
  Description of Artificial Sequence: Synthetic oligonucleotide
aacuagauauccacaugag

SEQ ID NO: 3203275 - RNA, 19 nt, Artificial Sequence
  Description of Artificial Sequence: Synthetic oligonucleotide
uggaauguuucccaccaaa

SEQ ID NO: 3203276 - RNA, 19 nt, Artificial Sequence
  Description of Artificial Sequence: Synthetic oligonucleotide
uuuuguggauaugacuacc

SEQ ID NO: 3203277 - RNA, 19 nt, Artificial Sequence
  Description of Artificial Sequence: Synthetic oligonucleotide
uacaucacacacaaagauu

SEQ ID NO: 3203278 - RNA, 19 nt, Artificial Sequence
  Description of Artificial Sequence: Synthetic oligonucleotide
gauaauacuuuuguggaua

SEQ ID NO: 3203279 - RNA, 19 nt, Artificial Sequence
  Description of Artificial Sequence: Synthetic oligonucleotide
uccacaugaggagaauggg

SEQ ID NO: 3203280 - RNA, 19 nt, Artificial Sequence
  Description of Artificial Sequence: Synthetic oligonucleotide
gaaaacuagauauccacau

SEQ ID NO: 3203281 - RNA, 19 nt, Artificial Sequence
  Description of Artificial Sequence: Synthetic oligonucleotide
aacucaaaauggaccaaag

SEQ ID NO: 3203282 - RNA, 19 nt, Artificial Sequence
  Description of Artificial Sequence: Synthetic oligonucleotide
aacagccguacccugcaug

SEQ ID NO: 3203283 - RNA, 19 nt, Artificial Sequence
  Description of Artificial Sequence: Synthetic oligonucleotide
uccacuggguggauaauac

SEQ ID NO: 3203284 - RNA, 19 nt, Artificial Sequence
  Description of Artificial Sequence: Synthetic oligonucleotide
acucaaaauggaccaaaga

SEQ ID NO: 3203285 - RNA, 19 nt, Artificial Sequence
  Description of Artificial Sequence: Synthetic oligonucleotide
aagcuaagagcuaaaacua

SEQ ID NO: 3203286 - RNA, 19 nt, Artificial Sequence
  Description of Artificial Sequence: Synthetic oligonucleotide
gcuaaaacuaaauucccca

SEQ ID NO: 3203287 - RNA, 19 nt, Artificial Sequence
  Description of Artificial Sequence: Synthetic oligonucleotide
cuuacaucacacacaaaga

SEQ ID NO: 3203288 - RNA, 19 nt, Artificial Sequence
  Description of Artificial Sequence: Synthetic oligonucleotide
cuuuuguggauaugacuac

SEQ ID NO: 3203289 - RNA, 19 nt, Artificial Sequence
  Description of Artificial Sequence: Synthetic oligonucleotide
aauggaccaaagagcaaag

SEQ ID NO: 3203290 - RNA, 19 nt, Artificial Sequence
  Description of Artificial Sequence: Synthetic oligonucleotide
acaucacacacaaagauua

SEQ ID NO: 3203291 - RNA, 19 nt, Artificial Sequence
  Description of Artificial Sequence: Synthetic oligonucleotide
augguggaauguuucccac

SEQ ID NO: 3203292 - RNA, 19 nt, Artificial Sequence
  Description of Artificial Sequence: Synthetic oligonucleotide
aaaacucaaccagagucaa

SEQ ID NO: 3203293 - RNA, 19 nt, Artificial Sequence
  Description of Artificial Sequence: Synthetic oligonucleotide
auccacaugaggagaaugg

SEQ ID NO: 3203294 - RNA, 19 nt, Artificial Sequence
  Description of Artificial Sequence: Synthetic oligonucleotide
ugcaugguggaauguuucc

SEQ ID NO: 3203295 - RNA, 19 nt, Artificial Sequence
  Description of Artificial Sequence: Synthetic oligonucleotide
agaaacagccguacccugc

SEQ ID NO: 3203296 - RNA, 19 nt, Artificial Sequence
  Description of Artificial Sequence: Synthetic oligonucleotide
aagggcaauguggaaaacu

SEQ ID NO: 3203297 - RNA, 19 nt, Artificial Sequence
  Description of Artificial Sequence: Synthetic oligonucleotide
gauaagagcaaucagcaag

SEQ ID NO: 3203298 - RNA, 19 nt, Artificial Sequence
  Description of Artificial Sequence: Synthetic oligonucleotide
aauccgugccacuauagcc

SEQ ID NO: 3203299 - RNA, 19 nt, Artificial Sequence
  Description of Artificial Sequence: Synthetic oligonucleotide
gauggugaggaucagcugg

SEQ ID NO: 3203300 - RNA, 19 nt, Artificial Sequence
  Description of Artificial Sequence: Synthetic oligonucleotide
agagcaaucagcaagauga

SEQ ID NO: 3203301 - RNA, 19 nt, Artificial Sequence
  Description of Artificial Sequence: Synthetic oligonucleotide
agcaagaugagaauaaggg

SEQ ID NO: 3203302 - RNA, 19 nt, Artificial Sequence
  Description of Artificial Sequence: Synthetic oligonucleotide
aaucaacugcuguuccucc

SEQ ID NO: 3203303 - RNA, 19 nt, Artificial Sequence
  Description of Artificial Sequence: Synthetic oligonucleotide
uucuuuucuucuuugagcu

SEQ ID NO: 3203304 - RNA, 19 nt, Artificial Sequence
  Description of Artificial Sequence: Synthetic oligonucleotide
uuuaugguuguuuucugug

SEQ ID NO: 3203305 - RNA, 19 nt, Artificial Sequence
  Description of Artificial Sequence: Synthetic oligonucleotide
uuugagcucacugagacga

SEQ ID NO: 3203306 - RNA, 19 nt, Artificial Sequence
  Description of Artificial Sequence: Synthetic oligonucleotide
cucacugagacgauaagag

SEQ ID NO: 3203307 - RNA, 19 nt, Artificial Sequence
  Description of Artificial Sequence: Synthetic oligonucleotide
ucuucuuuucuucuuugag

SEQ ID NO: 3203308 - RNA, 19 nt, Artificial Sequence
  Description of Artificial Sequence: Synthetic oligonucleotide
ucuuugagcucacugagac

SEQ ID NO: 3203309 - RNA, 19 nt, Artificial Sequence
  Description of Artificial Sequence: Synthetic oligonucleotide
uguguccucaaucaacugc

SEQ ID NO: 3203310 - RNA, 19 nt, Artificial Sequence
  Description of Artificial Sequence: Synthetic oligonucleotide
gaaaggacacucuucacac

SEQ ID NO: 3203311 - RNA, 19 nt, Artificial Sequence
  Description of Artificial Sequence: Synthetic oligonucleotide
gacgauaagagcaaucagc

SEQ ID NO: 3203312 - RNA, 19 nt, Artificial Sequence
  Description of Artificial Sequence: Synthetic oligonucleotide
cuucuuuucuucuuugagc

SEQ ID NO: 3203313 - RNA, 19 nt, Artificial Sequence
  Description of Artificial Sequence: Synthetic oligonucleotide
aauuggucuuugcaauccg

SEQ ID NO: 3203314 - RNA, 19 nt, Artificial Sequence
  Description of Artificial Sequence: Synthetic oligonucleotide
ucuucuuugagcucacuga

SEQ ID NO: 3203315 - RNA, 19 nt, Artificial Sequence
  Description of Artificial Sequence: Synthetic oligonucleotide
auauuuaugguuguuuucu

SEQ ID NO: 3203316 - RNA, 19 nt, Artificial Sequence
  Description of Artificial Sequence: Synthetic oligonucleotide
uguguguccucaaucaacu

SEQ ID NO: 3203317 - RNA, 19 nt, Artificial Sequence
  Description of Artificial Sequence: Synthetic oligonucleotide
uuauauuuaugguuguuuu

SEQ ID NO: 3203318 - RNA, 19 nt, Artificial Sequence
  Description of Artificial Sequence: Synthetic oligonucleotide
uaugguuguuuucugugug

SEQ ID NO: 3203319 - RNA, 19 nt, Artificial Sequence
  Description of Artificial Sequence: Synthetic oligonucleotide
aagaugagaauaagggcuc

SEQ ID NO: 3203320 - RNA, 19 nt, Artificial Sequence
  Description of Artificial Sequence: Synthetic oligonucleotide
uucuucuuugagcucacug

SEQ ID NO: 3203321 - RNA, 19 nt, Artificial Sequence
  Description of Artificial Sequence: Synthetic oligonucleotide
acuauagccgaaaggacac

SEQ ID NO: 3203322 - RNA, 19 nt, Artificial Sequence
  Description of Artificial Sequence: Synthetic oligonucleotide
uauauuuaugguuguuuuc

SEQ ID NO: 3203323 - RNA, 19 nt, Artificial Sequence
  Description of Artificial Sequence: Synthetic oligonucleotide
uguuccuccacguucuucu

SEQ ID NO: 3203324 - RNA, 19 nt, Artificial Sequence
  Description of Artificial Sequence: Synthetic oligonucleotide
uuuauauuuaugguuguuu

SEQ ID NO: 3203325 - RNA, 19 nt, Artificial Sequence
  Description of Artificial Sequence: Synthetic oligonucleotide
aagagcaaucagcaagaug

SEQ ID NO: 3203326 - RNA, 19 nt, Artificial Sequence
  Description of Artificial Sequence: Synthetic oligonucleotide
uuuucugugugugugugug

SEQ ID NO: 3203327 - RNA, 19 nt, Artificial Sequence
  Description of Artificial Sequence: Synthetic oligonucleotide
ugagaauaagggcuccggc

SEQ ID NO: 3203328 - RNA, 19 nt, Artificial Sequence
  Description of Artificial Sequence: Synthetic oligonucleotide
cuucuuugagcucacugag

SEQ ID NO: 3203329 - RNA, 19 nt, Artificial Sequence
  Description of Artificial Sequence: Synthetic oligonucleotide
caagaugagaauaagggcu

SEQ ID NO: 3203330 - RNA, 19 nt, Artificial Sequence
  Description of Artificial Sequence: Synthetic oligonucleotide
aaggacacucuucacacuu

SEQ ID NO: 3203331 - RNA, 19 nt, Artificial Sequence
  Description of Artificial Sequence: Synthetic oligonucleotide
uauuuaugguuguuuucug

SEQ ID NO: 3203332 - RNA, 19 nt, Artificial Sequence
  Description of Artificial Sequence: Synthetic oligonucleotide
cagcaagaugagaauaagg

SEQ ID NO: 3203333 - RNA, 19 nt, Artificial Sequence
  Description of Artificial Sequence: Synthetic oligonucleotide
ugccacuauagccgaaagg

SEQ ID NO: 3203334 - RNA, 19 nt, Artificial Sequence
  Description of Artificial Sequence: Synthetic oligonucleotide
auuuaugguuguuuucugu

SEQ ID NO: 3203335 - RNA, 19 nt, Artificial Sequence
  Description of Artificial Sequence: Synthetic oligonucleotide
cacugagacgauaagagca

SEQ ID NO: 3203336 - RNA, 19 nt, Artificial Sequence
  Description of Artificial Sequence: Synthetic oligonucleotide
uuggucuuugcaauccgug

SEQ ID NO: 3203337 - RNA, 19 nt, Artificial Sequence
  Description of Artificial Sequence: Synthetic oligonucleotide
gagaauaagggcuccggca

SEQ ID NO: 3203338 - RNA, 19 nt, Artificial Sequence
  Description of Artificial Sequence: Synthetic oligonucleotide
uuaugguuguuuucugugu

SEQ ID NO: 3203339 - RNA, 19 nt, Artificial Sequence
  Description of Artificial Sequence: Synthetic oligonucleotide
aauggugcccacgauggug

SEQ ID NO: 3203340 - RNA, 19 nt, Artificial Sequence
  Description of Artificial Sequence: Synthetic oligonucleotide
gaauuggucuuugcaaucc

SEQ ID NO: 3203341 - RNA, 19 nt, Artificial Sequence
  Description of Artificial Sequence: Synthetic oligonucleotide
uguguguguguccucaauc

SEQ ID NO: 3203342 - RNA, 19 nt, Artificial Sequence
  Description of Artificial Sequence: Synthetic oligonucleotide
uggaauuggucuuugcaau

SEQ ID NO: 3203343 - RNA, 19 nt, Artificial Sequence
  Description of Artificial Sequence: Synthetic oligonucleotide
gagacgauaagagcaauca

SEQ ID NO: 3203344 - RNA, 19 nt, Artificial Sequence
  Description of Artificial Sequence: Synthetic oligonucleotide
agaauaagggcuccggcaa

SEQ ID NO: 3203345 - RNA, 19 nt, Artificial Sequence
  Description of Artificial Sequence: Synthetic oligonucleotide
guuguuuucugugugugug

SEQ ID NO: 3203346 - RNA, 19 nt, Artificial Sequence
  Description of Artificial Sequence: Synthetic oligonucleotide
ucacugagacgauaagagc

SEQ ID NO: 3203347 - RNA, 19 nt, Artificial Sequence
  Description of Artificial Sequence: Synthetic oligonucleotide
ucagcaagaugagaauaag

SEQ ID NO: 3203348 - RNA, 19 nt, Artificial Sequence
  Description of Artificial Sequence: Synthetic oligonucleotide
agacgauaagagcaaucag

SEQ ID NO: 3203349 - RNA, 19 nt, Artificial Sequence
  Description of Artificial Sequence: Synthetic oligonucleotide
acgauaagagcaaucagca

SEQ ID NO: 3203350 - RNA, 19 nt, Artificial Sequence
  Description of Artificial Sequence: Synthetic oligonucleotide
uggucuuugcaauccgugc

SEQ ID NO: 3203351 - RNA, 19 nt, Artificial Sequence
  Description of Artificial Sequence: Synthetic oligonucleotide
ugaggaucagcuggaauug

SEQ ID NO: 3203352 - RNA, 19 nt, Artificial Sequence
  Description of Artificial Sequence: Synthetic oligonucleotide
gaugagaauaagggcuccg

SEQ ID NO: 3203353 - RNA, 19 nt, Artificial Sequence
  Description of Artificial Sequence: Synthetic oligonucleotide
auaagagcaaucagcaaga

SEQ ID NO: 3203354 - RNA, 19 nt, Artificial Sequence
  Description of Artificial Sequence: Synthetic oligonucleotide
gcaagaugagaauaagggc

SEQ ID NO: 3203355 - RNA, 19 nt, Artificial Sequence
  Description of Artificial Sequence: Synthetic oligonucleotide
aauaagggcuccggcaaug

SEQ ID NO: 3203356 - RNA, 19 nt, Artificial Sequence
  Description of Artificial Sequence: Synthetic oligonucleotide
aaucagcaagaugagaaua

SEQ ID NO: 3203357 - RNA, 19 nt, Artificial Sequence
  Description of Artificial Sequence: Synthetic oligonucleotide
uucuucuuuucuucuuuga

SEQ ID NO: 3203358 - RNA, 19 nt, Artificial Sequence
  Description of Artificial Sequence: Synthetic oligonucleotide
cacuauagccgaaaggaca

SEQ ID NO: 3203359 - RNA, 19 nt, Artificial Sequence
  Description of Artificial Sequence: Synthetic oligonucleotide
agaugagaauaagggcucc

SEQ ID NO: 3203360 - RNA, 19 nt, Artificial Sequence
  Description of Artificial Sequence: Synthetic oligonucleotide
auccgugccacuauagccg

SEQ ID NO: 3203361 - RNA, 19 nt, Artificial Sequence
  Description of Artificial Sequence: Synthetic oligonucleotide
ucaaucaacugcuguuccu

SEQ ID NO: 3203362 - RNA, 19 nt, Artificial Sequence
  Description of Artificial Sequence: Synthetic oligonucleotide
augagaauaagggcuccgg

SEQ ID NO: 3203363 - RNA, 19 nt, Artificial Sequence
  Description of Artificial Sequence: Synthetic oligonucleotide
ugagacgauaagagcaauc

SEQ ID NO: 3203364 - RNA, 19 nt, Artificial Sequence
  Description of Artificial Sequence: Synthetic oligonucleotide
cucaaucaacugcuguucc

SEQ ID NO: 3203365 - RNA, 19 nt, Artificial Sequence
  Description of Artificial Sequence: Synthetic oligonucleotide
ucaacugcuguuccuccac

SEQ ID NO: 3203366 - RNA, 19 nt, Artificial Sequence
  Description of Artificial Sequence: Synthetic oligonucleotide
uguuuucugugugugugug

SEQ ID NO: 3203367 - RNA, 19 nt, Artificial Sequence
  Description of Artificial Sequence: Synthetic oligonucleotide
aaaggacacucuucacacu

SEQ ID NO: 3203368 - RNA, 19 nt, Artificial Sequence
  Description of Artificial Sequence: Synthetic oligonucleotide
cuuuucuucuuugagcuca

SEQ ID NO: 3203369 - RNA, 19 nt, Artificial Sequence
  Description of Artificial Sequence: Synthetic oligonucleotide
ugcuguuccuccacguucu

SEQ ID NO: 3203370 - RNA, 19 nt, Artificial Sequence
  Description of Artificial Sequence: Synthetic oligonucleotide
uucuuugagcucacugaga

SEQ ID NO: 3203371 - RNA, 19 nt, Artificial Sequence
  Description of Artificial Sequence: Synthetic oligonucleotide
uucugugugugugugugug

SEQ ID NO: 3203372 - RNA, 19 nt, Artificial Sequence
  Description of Artificial Sequence: Synthetic oligonucleotide
cuuugagcucacugagacg

SEQ ID NO: 3203373 - RNA, 19 nt, Artificial Sequence
  Description of Artificial Sequence: Synthetic oligonucleotide
uccucaaucaacugcuguu

SEQ ID NO: 3203374 - RNA, 19 nt, Artificial Sequence
  Description of Artificial Sequence: Synthetic oligonucleotide
uuugcaauccgugccacua

SEQ ID NO: 3203375 - RNA, 19 nt, Artificial Sequence
  Description of Artificial Sequence: Synthetic oligonucleotide
caauccgugccacuauagc

SEQ ID NO: 3203376 - RNA, 19 nt, Artificial Sequence
  Description of Artificial Sequence: Synthetic oligonucleotide
aacugcuguuccuccacgu

SEQ ID NO: 3203377 - RNA, 19 nt, Artificial Sequence
  Description of Artificial Sequence: Synthetic oligonucleotide
uguguguguccucaaucaa

SEQ ID NO: 3203378 - RNA, 19 nt, Artificial Sequence
  Description of Artificial Sequence: Synthetic oligonucleotide
agggcuccggcaauggugc

SEQ ID NO: 3203379 - RNA, 19 nt, Artificial Sequence
  Description of Artificial Sequence: Synthetic oligonucleotide
guucuucuuuucuucuuug

SEQ ID NO: 3203380 - RNA, 19 nt, Artificial Sequence
  Description of Artificial Sequence: Synthetic oligonucleotide
agcuggaauuggucuuugc

SEQ ID NO: 3203381 - RNA, 19 nt, Artificial Sequence
  Description of Artificial Sequence: Synthetic oligonucleotide
ggucuuugcaauccgugcc

SEQ ID NO: 3203382 - RNA, 19 nt, Artificial Sequence
  Description of Artificial Sequence: Synthetic oligonucleotide
aagggcuccggcaauggug

SEQ ID NO: 3203383 - RNA, 19 nt, Artificial Sequence
  Description of Artificial Sequence: Synthetic oligonucleotide
guguguguguccucaauca

SEQ ID NO: 3203384 - RNA, 19 nt, Artificial Sequence
  Description of Artificial Sequence: Synthetic oligonucleotide
gcaauggugcccacgaugg

SEQ ID NO: 3203385 - RNA, 19 nt, Artificial Sequence
  Description of Artificial Sequence: Synthetic oligonucleotide
uuuucuucuuugagcucac

SEQ ID NO: 3203386 - RNA, 19 nt, Artificial Sequence
  Description of Artificial Sequence: Synthetic oligonucleotide
ugugugugugugugugucc

SEQ ID NO: 3203387 - RNA, 19 nt, Artificial Sequence
  Description of Artificial Sequence: Synthetic oligonucleotide
ugguuguuuucugugugug

SEQ ID NO: 3203388 - RNA, 19 nt, Artificial Sequence
  Description of Artificial Sequence: Synthetic oligonucleotide
uauagccgaaaggacacuc

SEQ ID NO: 3203389 - RNA, 19 nt, Artificial Sequence
  Description of Artificial Sequence: Synthetic oligonucleotide
cuggaauuggucuuugcaa

SEQ ID NO: 3203390 - RNA, 19 nt, Artificial Sequence
  Description of Artificial Sequence: Synthetic oligonucleotide
uuguuuucugugugugugu

SEQ ID NO: 3203391 - RNA, 19 nt, Artificial Sequence
  Description of Artificial Sequence: Synthetic oligonucleotide
gaucagcuggaauuggucu

SEQ ID NO: 3203392 - RNA, 19 nt, Artificial Sequence
  Description of Artificial Sequence: Synthetic oligonucleotide
gccacuauagccgaaagga

SEQ ID NO: 3203393 - RNA, 19 nt, Artificial Sequence
  Description of Artificial Sequence: Synthetic oligonucleotide
acgauggugaggaucagcu

SEQ ID NO: 3203394 - RNA, 19 nt, Artificial Sequence
  Description of Artificial Sequence: Synthetic oligonucleotide
augguuguuuucugugugu

SEQ ID NO: 3203395 - RNA, 19 nt, Artificial Sequence
  Description of Artificial Sequence: Synthetic oligonucleotide
uccacguucuucuuuucuu

SEQ ID NO: 3203396 - RNA, 19 nt, Artificial Sequence
  Description of Artificial Sequence: Synthetic oligonucleotide
caaucaacugcuguuccuc

SEQ ID NO: 3203397 - RNA, 19 nt, Artificial Sequence
  Description of Artificial Sequence: Synthetic oligonucleotide
aauaugaaugaucauggcc

SEQ ID NO: 3203398 - RNA, 19 nt, Artificial Sequence
  Description of Artificial Sequence: Synthetic oligonucleotide
gaagaaauaguuuaugugg

SEQ ID NO: 3203399 - RNA, 19 nt, Artificial Sequence
  Description of Artificial Sequence: Synthetic oligonucleotide
aaauaguuuauguggagcc

SEQ ID NO: 3203400 - RNA, 19 nt, Artificial Sequence
  Description of Artificial Sequence: Synthetic oligonucleotide
auaugaaugaucauggccc

SEQ ID NO: 3203401 - RNA, 19 nt, Artificial Sequence
  Description of Artificial Sequence: Synthetic oligonucleotide
aaauauuggugauacauca

SEQ ID NO: 3203402 - RNA, 19 nt, Artificial Sequence
  Description of Artificial Sequence: Synthetic oligonucleotide
uuugugauguuuuauagug

SEQ ID NO: 3203403 - RNA, 19 nt, Artificial Sequence
  Description of Artificial Sequence: Synthetic oligonucleotide
uauagugacagaauaaaga

SEQ ID NO: 3203404 - RNA, 19 nt, Artificial Sequence
  Description of Artificial Sequence: Synthetic oligonucleotide
caaauaugaaugaucaugg

SEQ ID NO: 3203405 - RNA, 19 nt, Artificial Sequence
  Description of Artificial Sequence: Synthetic oligonucleotide
gacagaauaaagaaagucg

SEQ ID NO: 3203406 - RNA, 19 nt, Artificial Sequence
  Description of Artificial Sequence: Synthetic oligonucleotide
gauacaucagguaagcugg

SEQ ID NO: 3203407 - RNA, 19 nt, Artificial Sequence
  Description of Artificial Sequence: Synthetic oligonucleotide
uuuuguaugaagaaauagu

SEQ ID NO: 3203408 - RNA, 19 nt, Artificial Sequence
  Description of Artificial Sequence: Synthetic oligonucleotide
aaaccuuuccccaagaguc

SEQ ID NO: 3203409 - RNA, 19 nt, Artificial Sequence
  Description of Artificial Sequence: Synthetic oligonucleotide
aaauaugaaugaucauggc

SEQ ID NO: 3203410 - RNA, 19 nt, Artificial Sequence
  Description of Artificial Sequence: Synthetic oligonucleotide
uguaugaagaaauaguuua

SEQ ID NO: 3203411 - RNA, 19 nt, Artificial Sequence
  Description of Artificial Sequence: Synthetic oligonucleotide
cauguuaggacacacacag

SEQ ID NO: 3203412 - RNA, 19 nt, Artificial Sequence
  Description of Artificial Sequence: Synthetic oligonucleotide
cugguuauagcaaagcagg

SEQ ID NO: 3203413 - RNA, 19 nt, Artificial Sequence
  Description of Artificial Sequence: Synthetic oligonucleotide
ugauguuuuauagugacag

SEQ ID NO: 3203414 - RNA, 19 nt, Artificial Sequence
  Description of Artificial Sequence: Synthetic oligonucleotide
uuuauguggagccaaauau

SEQ ID NO: 3203415 - RNA, 19 nt, Artificial Sequence
  Description of Artificial Sequence: Synthetic oligonucleotide
acagaauaaagaaagucgc

SEQ ID NO: 3203416 - RNA, 19 nt, Artificial Sequence
  Description of Artificial Sequence: Synthetic oligonucleotide
uuaggacacacacagaugu

SEQ ID NO: 3203417 - RNA, 19 nt, Artificial Sequence
  Description of Artificial Sequence: Synthetic oligonucleotide
ugaagaaauaguuuaugug

SEQ ID NO: 3203418 - RNA, 19 nt, Artificial Sequence
  Description of Artificial Sequence: Synthetic oligonucleotide
auuuaaggagcuaagauag

SEQ ID NO: 3203419 - RNA, 19 nt, Artificial Sequence
  Description of Artificial Sequence: Synthetic oligonucleotide
agugacagaauaaagaaag

SEQ ID NO: 3203420 - RNA, 19 nt, Artificial Sequence
  Description of Artificial Sequence: Synthetic oligonucleotide
auauuggugauacaucagg

SEQ ID NO: 3203421 - RNA, 19 nt, Artificial Sequence
  Description of Artificial Sequence: Synthetic oligonucleotide
ugauacaucagguaagcug

SEQ ID NO: 3203422 - RNA, 19 nt, Artificial Sequence
  Description of Artificial Sequence: Synthetic oligonucleotide
gaaauacagauccaguuug

SEQ ID NO: 3203423 - RNA, 19 nt, Artificial Sequence
  Description of Artificial Sequence: Synthetic oligonucleotide
ugacaagugacuauuuaag

SEQ ID NO: 3203424 - RNA, 19 nt, Artificial Sequence
  Description of Artificial Sequence: Synthetic oligonucleotide
guuauagcaaagcagggag

SEQ ID NO: 3203425 - RNA, 19 nt, Artificial Sequence
  Description of Artificial Sequence: Synthetic oligonucleotide
agcauguuaggacacacac

SEQ ID NO: 3203426 - RNA, 19 nt, Artificial Sequence
  Description of Artificial Sequence: Synthetic oligonucleotide
uuauaaauauuggugauac

SEQ ID NO: 3203427 - RNA, 19 nt, Artificial Sequence
  Description of Artificial Sequence: Synthetic oligonucleotide
aaauaaccauguuccaacg

SEQ ID NO: 3203428 - RNA, 19 nt, Artificial Sequence
  Description of Artificial Sequence: Synthetic oligonucleotide
uuuguaugaagaaauaguu

SEQ ID NO: 3203429 - RNA, 19 nt, Artificial Sequence
  Description of Artificial Sequence: Synthetic oligonucleotide
ugugugaugacuuccuuag

SEQ ID NO: 3203430 - RNA, 19 nt, Artificial Sequence
  Description of Artificial Sequence: Synthetic oligonucleotide
aaagaaagucgcuuuauaa

SEQ ID NO: 3203431 - RNA, 19 nt, Artificial Sequence
  Description of Artificial Sequence: Synthetic oligonucleotide
uuauagugacagaauaaag

SEQ ID NO: 3203432 - RNA, 19 nt, Artificial Sequence
  Description of Artificial Sequence: Synthetic oligonucleotide
auuuugugauguuuuauag

SEQ ID NO: 3203433 - RNA, 19 nt, Artificial Sequence
  Description of Artificial Sequence: Synthetic oligonucleotide
caagugacuauuuaaggag

SEQ ID NO: 3203434 - RNA, 19 nt, Artificial Sequence
  Description of Artificial Sequence: Synthetic oligonucleotide
gacaagugacuauuuaagg

SEQ ID NO: 3203435 - RNA, 19 nt, Artificial Sequence
  Description of Artificial Sequence: Synthetic oligonucleotide
uacagauccaguuugcccc

SEQ ID NO: 3203436 - RNA, 19 nt, Artificial Sequence
  Description of Artificial Sequence: Synthetic oligonucleotide
aauacagauccaguuugcc

SEQ ID NO: 3203437 - RNA, 19 nt, Artificial Sequence
  Description of Artificial Sequence: Synthetic oligonucleotide
ugugaugacuuccuuagca

SEQ ID NO: 3203438 - RNA, 19 nt, Artificial Sequence
  Description of Artificial Sequence: Synthetic oligonucleotide
augaucauggcccagaaau

SEQ ID NO: 3203439 - RNA, 19 nt, Artificial Sequence
  Description of Artificial Sequence: Synthetic oligonucleotide
uguuaggacacacacagau

SEQ ID NO: 3203440 - RNA, 19 nt, Artificial Sequence
  Description of Artificial Sequence: Synthetic oligonucleotide
auacagauccaguuugccc

SEQ ID NO: 3203441 - RNA, 19 nt, Artificial Sequence
  Description of Artificial Sequence: Synthetic oligonucleotide
aaaaccuuuccccaagagu

SEQ ID NO: 3203442 - RNA, 19 nt, Artificial Sequence
  Description of Artificial Sequence: Synthetic oligonucleotide
aauuuugugauguuuuaua

SEQ ID NO: 3203443 - RNA, 19 nt, Artificial Sequence
  Description of Artificial Sequence: Synthetic oligonucleotide
ugcuaugggucccagaugc

SEQ ID NO: 3203444 - RNA, 19 nt, Artificial Sequence
  Description of Artificial Sequence: Synthetic oligonucleotide
uauuuaaggagcuaagaua

SEQ ID NO: 3203445 - RNA, 19 nt, Artificial Sequence
  Description of Artificial Sequence: Synthetic oligonucleotide
uauguggagccaaauauga

SEQ ID NO: 3203446 - RNA, 19 nt, Artificial Sequence
  Description of Artificial Sequence: Synthetic oligonucleotide
uaggaaucugcuuacaugu

SEQ ID NO: 3203447 - RNA, 19 nt, Artificial Sequence
  Description of Artificial Sequence: Synthetic oligonucleotide
aagaaagucgcuuuauaaa

SEQ ID NO: 3203448 - RNA, 19 nt, Artificial Sequence
  Description of Artificial Sequence: Synthetic oligonucleotide
auaaauauuggugauacau

SEQ ID NO: 3203449 - RNA, 19 nt, Artificial Sequence
  Description of Artificial Sequence: Synthetic oligonucleotide
auagugacagaauaaagaa

SEQ ID NO: 3203450 - RNA, 19 nt, Artificial Sequence
  Description of Artificial Sequence: Synthetic oligonucleotide
uuuuauagugacagaauaa

SEQ ID NO: 3203451 - RNA, 19 nt, Artificial Sequence
  Description of Artificial Sequence: Synthetic oligonucleotide
ugugauguuuuauagugac

SEQ ID NO: 3203452 - RNA, 19 nt, Artificial Sequence
  Description of Artificial Sequence: Synthetic oligonucleotide
aaggagcuaagauagcuca

SEQ ID NO: 3203453 - RNA, 19 nt, Artificial Sequence
  Description of Artificial Sequence: Synthetic oligonucleotide
uuccccaagagucacagca

SEQ ID NO: 3203454 - RNA, 19 nt, Artificial Sequence
  Description of Artificial Sequence: Synthetic oligonucleotide
caaauaaccauguuccaac

SEQ ID NO: 3203455 - RNA, 19 nt, Artificial Sequence
  Description of Artificial Sequence: Synthetic oligonucleotide
aaagucgcuuuauaaauau

SEQ ID NO: 3203456 - RNA, 19 nt, Artificial Sequence
  Description of Artificial Sequence: Synthetic oligonucleotide
uccaguuugccccaaauaa

SEQ ID NO: 3203457 - RNA, 19 nt, Artificial Sequence
  Description of Artificial Sequence: Synthetic oligonucleotide
aagugacuauuuaaggagc

SEQ ID NO: 3203458 - RNA, 19 nt, Artificial Sequence
  Description of Artificial Sequence: Synthetic oligonucleotide
uaaccauguuccaacgugg

SEQ ID NO: 3203459 - RNA, 19 nt, Artificial Sequence
  Description of Artificial Sequence: Synthetic oligonucleotide
auaaccauguuccaacgug

SEQ ID NO: 3203460 - RNA, 19 nt, Artificial Sequence
  Description of Artificial Sequence: Synthetic oligonucleotide
uuuauagugacagaauaaa

SEQ ID NO: 3203461 - RNA, 19 nt, Artificial Sequence
  Description of Artificial Sequence: Synthetic oligonucleotide
agucacagcauguuaggac

SEQ ID NO: 3203462 - RNA, 19 nt, Artificial Sequence
  Description of Artificial Sequence: Synthetic oligonucleotide
acaagugacuauuuaagga

SEQ ID NO: 3203463 - RNA, 19 nt, Artificial Sequence
  Description of Artificial Sequence: Synthetic oligonucleotide
uuauguggagccaaauaug

SEQ ID NO: 3203464 - RNA, 19 nt, Artificial Sequence
  Description of Artificial Sequence: Synthetic oligonucleotide
ugucccaaaaccuuucccc

SEQ ID NO: 3203465 - RNA, 19 nt, Artificial Sequence
  Description of Artificial Sequence: Synthetic oligonucleotide
uuggugauacaucagguaa

SEQ ID NO: 3203466 - RNA, 19 nt, Artificial Sequence
  Description of Artificial Sequence: Synthetic oligonucleotide
uaaauauuggugauacauc

SEQ ID NO: 3203467 - RNA, 19 nt, Artificial Sequence
  Description of Artificial Sequence: Synthetic oligonucleotide
augaagaaauaguuuaugu

SEQ ID NO: 3203468 - RNA, 19 nt, Artificial Sequence
  Description of Artificial Sequence: Synthetic oligonucleotide
aauaaagaaagucgcuuua

SEQ ID NO: 3203469 - RNA, 19 nt, Artificial Sequence
  Description of Artificial Sequence: Synthetic oligonucleotide
aauaauuuugugauguuuu

SEQ ID NO: 3203470 - RNA, 19 nt, Artificial Sequence
  Description of Artificial Sequence: Synthetic oligonucleotide
aaauacagauccaguuugc

SEQ ID NO: 3203471 - RNA, 19 nt, Artificial Sequence
  Description of Artificial Sequence: Synthetic oligonucleotide
ucauggcccagaaauacag

SEQ ID NO: 3203472 - RNA, 19 nt, Artificial Sequence
  Description of Artificial Sequence: Synthetic oligonucleotide
cuuagcaguaggaaucugc

SEQ ID NO: 3203473 - RNA, 19 nt, Artificial Sequence
  Description of Artificial Sequence: Synthetic oligonucleotide
agaaagucgcuuuauaaau

SEQ ID NO: 3203474 - RNA, 19 nt, Artificial Sequence
  Description of Artificial Sequence: Synthetic oligonucleotide
gaaauaguuuauguggagc

SEQ ID NO: 3203475 - RNA, 19 nt, Artificial Sequence
  Description of Artificial Sequence: Synthetic oligonucleotide
uaugaagaaauaguuuaug

SEQ ID NO: 3203476 - RNA, 19 nt, Artificial Sequence
  Description of Artificial Sequence: Synthetic oligonucleotide
uuagcaguaggaaucugcu

SEQ ID NO: 3203477 - RNA, 19 nt, Artificial Sequence
  Description of Artificial Sequence: Synthetic oligonucleotide
aagagucacagcauguuag

SEQ ID NO: 3203478 - RNA, 19 nt, Artificial Sequence
  Description of Artificial Sequence: Synthetic oligonucleotide
uuugccccaaauaaccaug

SEQ ID NO: 3203479 - RNA, 19 nt, Artificial Sequence
  Description of Artificial Sequence: Synthetic oligonucleotide
caguuugccccaaauaacc

SEQ ID NO: 3203480 - RNA, 19 nt, Artificial Sequence
  Description of Artificial Sequence: Synthetic oligonucleotide
uuuugugauguuuuauagu

SEQ ID NO: 3203481 - RNA, 19 nt, Artificial Sequence
  Description of Artificial Sequence: Synthetic oligonucleotide
aagaaauaguuuaugugga

SEQ ID NO: 3203482 - RNA, 19 nt, Artificial Sequence
  Description of Artificial Sequence: Synthetic oligonucleotide
aauaaccauguuccaacgu

SEQ ID NO: 3203483 - RNA, 19 nt, Artificial Sequence
  Description of Artificial Sequence: Synthetic oligonucleotide
agaaauaguuuauguggag

SEQ ID NO: 3203484 - RNA, 19 nt, Artificial Sequence
  Description of Artificial Sequence: Synthetic oligonucleotide
uauuggugauacaucaggu

SEQ ID NO: 3203485 - RNA, 19 nt, Artificial Sequence
  Description of Artificial Sequence: Synthetic oligonucleotide
uuccuuagcaguaggaauc

SEQ ID NO: 3203486 - RNA, 19 nt, Artificial Sequence
  Description of Artificial Sequence: Synthetic oligonucleotide
uguggagccaaauaugaau

SEQ ID NO: 3203487 - RNA, 19 nt, Artificial Sequence
  Description of Artificial Sequence: Synthetic oligonucleotide
aagcugguuauagcaaagc

SEQ ID NO: 3203488 - RNA, 19 nt, Artificial Sequence
  Description of Artificial Sequence: Synthetic oligonucleotide
uuaaggagcuaagauagcu

SEQ ID NO: 3203489 - RNA, 19 nt, Artificial Sequence
  Description of Artificial Sequence: Synthetic oligonucleotide
ugguuauagcaaagcaggg

SEQ ID NO: 3203490 - RNA, 19 nt, Artificial Sequence
  Description of Artificial Sequence: Synthetic oligonucleotide
gcuuacaugucccaaaacc

SEQ ID NO: 3203491 - RNA, 19 nt, Artificial Sequence
  Description of Artificial Sequence: Synthetic oligonucleotide
ucagguaagcugguuauag

SEQ ID NO: 3203492 - RNA, 19 nt, Artificial Sequence
  Description of Artificial Sequence: Synthetic oligonucleotide
uggugauacaucagguaag

SEQ ID NO: 3203493 - RNA, 19 nt, Artificial Sequence
  Description of Artificial Sequence: Synthetic oligonucleotide
agucgcuuuauaaauauug

SEQ ID NO: 3203494 - RNA, 19 nt, Artificial Sequence
  Description of Artificial Sequence: Synthetic oligonucleotide
uguuuuauagugacagaau

SEQ ID NO: 3203495 - RNA, 19 nt, Artificial Sequence
  Description of Artificial Sequence: Synthetic oligonucleotide
agguaagcugguuauagca

SEQ ID NO: 3203496 - RNA, 19 nt, Artificial Sequence
  Description of Artificial Sequence: Synthetic oligonucleotide
uccaacgugguaauaauuu

SEQ ID NO: 3203497 - RNA, 19 nt, Artificial Sequence
  Description of Artificial Sequence: Synthetic oligonucleotide
aagacuaucaaccucuucc

SEQ ID NO: 3203498 - RNA, 19 nt, Artificial Sequence
  Description of Artificial Sequence: Synthetic oligonucleotide
agaaaaguaauauaaguuc

SEQ ID NO: 3203499 - RNA, 19 nt, Artificial Sequence
  Description of Artificial Sequence: Synthetic oligonucleotide
aauagaggcgaccagcacc

SEQ ID NO: 3203500 - RNA, 19 nt, Artificial Sequence
  Description of Artificial Sequence: Synthetic oligonucleotide
aauaacgucccauccaccc

SEQ ID NO: 3203501 - RNA, 19 nt, Artificial Sequence
  Description of Artificial Sequence: Synthetic oligonucleotide
aauauuuuguccaccaacc

SEQ ID NO: 3203502 - RNA, 19 nt, Artificial Sequence
  Description of Artificial Sequence: Synthetic oligonucleotide
ugaugauccgcaaagacag

SEQ ID NO: 3203503 - RNA, 19 nt, Artificial Sequence
  Description of Artificial Sequence: Synthetic oligonucleotide
gaaccuuuuacuuuguucc

SEQ ID NO: 3203504 - RNA, 19 nt, Artificial Sequence
  Description of Artificial Sequence: Synthetic oligonucleotide
ugugaagugggcaucaggg

SEQ ID NO: 3203505 - RNA, 19 nt, Artificial Sequence
  Description of Artificial Sequence: Synthetic oligonucleotide
aaaaguaauauaaguuccc

SEQ ID NO: 3203506 - RNA, 19 nt, Artificial Sequence
  Description of Artificial Sequence: Synthetic oligonucleotide
ugaaagggaacuuagaguc

SEQ ID NO: 3203507 - RNA, 19 nt, Artificial Sequence
  Description of Artificial Sequence: Synthetic oligonucleotide
gaugaaagggaacuuagag

SEQ ID NO: 3203508 - RNA, 19 nt, Artificial Sequence
  Description of Artificial Sequence: Synthetic oligonucleotide
uguuccuuguugaauaacg

SEQ ID NO: 3203509 - RNA, 19 nt, Artificial Sequence
  Description of Artificial Sequence: Synthetic oligonucleotide
cuugaagcacaauagaggc

SEQ ID NO: 3203510 - RNA, 19 nt, Artificial Sequence
  Description of Artificial Sequence: Synthetic oligonucleotide
uccuuguugaauaacgucc

SEQ ID NO: 3203511 - RNA, 19 nt, Artificial Sequence
  Description of Artificial Sequence: Synthetic oligonucleotide
uaacacacugauuugagca

SEQ ID NO: 3203512 - RNA, 19 nt, Artificial Sequence
  Description of Artificial Sequence: Synthetic oligonucleotide
aacuuagagucacaggaag

SEQ ID NO: 3203513 - RNA, 19 nt, Artificial Sequence
  Description of Artificial Sequence: Synthetic oligonucleotide
uucacauccaauauuuugu

SEQ ID NO: 3203514 - RNA, 19 nt, Artificial Sequence
  Description of Artificial Sequence: Synthetic oligonucleotide
aacacacugauuugagcac

SEQ ID NO: 3203515 - RNA, 19 nt, Artificial Sequence
  Description of Artificial Sequence: Synthetic oligonucleotide
aacuaagacuaucaaccuc

SEQ ID NO: 3203516 - RNA, 19 nt, Artificial Sequence
  Description of Artificial Sequence: Synthetic oligonucleotide
agauuuuggaacuaagacu

SEQ ID NO: 3203517 - RNA, 19 nt, Artificial Sequence
  Description of Artificial Sequence: Synthetic oligonucleotide
agcauggaagccuaucugc

SEQ ID NO: 3203518 - RNA, 19 nt, Artificial Sequence
  Description of Artificial Sequence: Synthetic oligonucleotide
cagaacagaacccagacug

SEQ ID NO: 3203519 - RNA, 19 nt, Artificial Sequence
  Description of Artificial Sequence: Synthetic oligonucleotide
agacuaucaaccucuuccc

SEQ ID NO: 3203520 - RNA, 19 nt, Artificial Sequence
  Description of Artificial Sequence: Synthetic oligonucleotide
auuucuuguagguucacug

SEQ ID NO: 3203521 - RNA, 19 nt, Artificial Sequence
  Description of Artificial Sequence: Synthetic oligonucleotide
gauagaaaacagcuugaag

SEQ ID NO: 3203522 - RNA, 19 nt, Artificial Sequence
  Description of Artificial Sequence: Synthetic oligonucleotide
uguagagaaacucuugcuc

SEQ ID NO: 3203523 - RNA, 19 nt, Artificial Sequence
  Description of Artificial Sequence: Synthetic oligonucleotide
ugaauaacgucccauccac

SEQ ID NO: 3203524 - RNA, 19 nt, Artificial Sequence
  Description of Artificial Sequence: Synthetic oligonucleotide
aacagcuugaagcacaaua

SEQ ID NO: 3203525 - RNA, 19 nt, Artificial Sequence
  Description of Artificial Sequence: Synthetic oligonucleotide
cuuggugagaccaauccag

SEQ ID NO: 3203526 - RNA, 19 nt, Artificial Sequence
  Description of Artificial Sequence: Synthetic oligonucleotide
accagcaccaaugacagac

SEQ ID NO: 3203527 - RNA, 19 nt, Artificial Sequence
  Description of Artificial Sequence: Synthetic oligonucleotide
accaauccagcauggaagc

SEQ ID NO: 3203528 - RNA, 19 nt, Artificial Sequence
  Description of Artificial Sequence: Synthetic oligonucleotide
aguauuguuggguucaccu

SEQ ID NO: 3203529 - RNA, 19 nt, Artificial Sequence
  Description of Artificial Sequence: Synthetic oligonucleotide
ucgcuuacagaugaaaggg

SEQ ID NO: 3203530 - RNA, 19 nt, Artificial Sequence
  Description of Artificial Sequence: Synthetic oligonucleotide
aagaaaaguaauauaaguu

SEQ ID NO: 3203531 - RNA, 19 nt, Artificial Sequence
  Description of Artificial Sequence: Synthetic oligonucleotide
cagauuuuggaacuaagac

SEQ ID NO: 3203532 - RNA, 19 nt, Artificial Sequence
  Description of Artificial Sequence: Synthetic oligonucleotide
guagagaaacucuugcucc

SEQ ID NO: 3203533 - RNA, 19 nt, Artificial Sequence
  Description of Artificial Sequence: Synthetic oligonucleotide
gacagaucuggcuugggag

SEQ ID NO: 3203534 - RNA, 19 nt, Artificial Sequence
  Description of Artificial Sequence: Synthetic oligonucleotide
gucgcuuacagaugaaagg

SEQ ID NO: 3203535 - RNA, 19 nt, Artificial Sequence
  Description of Artificial Sequence: Synthetic oligonucleotide
ucuuguagguucacugagg

SEQ ID NO: 3203536 - RNA, 19 nt, Artificial Sequence
  Description of Artificial Sequence: Synthetic oligonucleotide
cugaacuucagccuccucc

SEQ ID NO: 3203537 - RNA, 19 nt, Artificial Sequence
  Description of Artificial Sequence: Synthetic oligonucleotide
acuaucaaccucuucccag

SEQ ID NO: 3203538 - RNA, 19 nt, Artificial Sequence
  Description of Artificial Sequence: Synthetic oligonucleotide
uugaauaacgucccaucca

SEQ ID NO: 3203539 - RNA, 19 nt, Artificial Sequence
  Description of Artificial Sequence: Synthetic oligonucleotide
caauauuuuguccaccaac

SEQ ID NO: 3203540 - RNA, 19 nt, Artificial Sequence
  Description of Artificial Sequence: Synthetic oligonucleotide
ggaacuuagagucacagga

SEQ ID NO: 3203541 - RNA, 19 nt, Artificial Sequence
  Description of Artificial Sequence: Synthetic oligonucleotide
uucagccuccuccacacgg

SEQ ID NO: 3203542 - RNA, 19 nt, Artificial Sequence
  Description of Artificial Sequence: Synthetic oligonucleotide
uuacagaugaaagggaacu

SEQ ID NO: 3203543 - RNA, 19 nt, Artificial Sequence
  Description of Artificial Sequence: Synthetic oligonucleotide
aacaucugagcaucgcucu

SEQ ID NO: 3203544 - RNA, 19 nt, Artificial Sequence
  Description of Artificial Sequence: Synthetic oligonucleotide
uccgauuucuuguagguuc

SEQ ID NO: 3203545 - RNA, 19 nt, Artificial Sequence
  Description of Artificial Sequence: Synthetic oligonucleotide
gaugaagggucgcuuacag

SEQ ID NO: 3203546 - RNA, 19 nt, Artificial Sequence
  Description of Artificial Sequence: Synthetic oligonucleotide
ugagcaucccuagaaaugc

SEQ ID NO: 3203547 - RNA, 19 nt, Artificial Sequence
  Description of Artificial Sequence: Synthetic oligonucleotide
uucguguuaacacacugau

SEQ ID NO: 3203548 - RNA, 19 nt, Artificial Sequence
  Description of Artificial Sequence: Synthetic oligonucleotide
aaugcaggacugcuccgcg

SEQ ID NO: 3203549 - RNA, 19 nt, Artificial Sequence
  Description of Artificial Sequence: Synthetic oligonucleotide
ucucuuugcagauuuugga

SEQ ID NO: 3203550 - RNA, 19 nt, Artificial Sequence
  Description of Artificial Sequence: Synthetic oligonucleotide
acagaucuggcuugggagg

SEQ ID NO: 3203551 - RNA, 19 nt, Artificial Sequence
  Description of Artificial Sequence: Synthetic oligonucleotide
uuguccaccaaccugggau

SEQ ID NO: 3203552 - RNA, 19 nt, Artificial Sequence
  Description of Artificial Sequence: Synthetic oligonucleotide
uggaacuaagacuaucaac

SEQ ID NO: 3203553 - RNA, 19 nt, Artificial Sequence
  Description of Artificial Sequence: Synthetic oligonucleotide
acuaagacuaucaaccucu

SEQ ID NO: 3203554 - RNA, 19 nt, Artificial Sequence
  Description of Artificial Sequence: Synthetic oligonucleotide
uuucguguuaacacacuga

SEQ ID NO: 3203555 - RNA, 19 nt, Artificial Sequence
  Description of Artificial Sequence: Synthetic oligonucleotide
aaucugaacuucagccucc

SEQ ID NO: 3203556 - RNA, 19 nt, Artificial Sequence
  Description of Artificial Sequence: Synthetic oligonucleotide
gaucucucaacaucugagc

SEQ ID NO: 3203557 - RNA, 19 nt, Artificial Sequence
  Description of Artificial Sequence: Synthetic oligonucleotide
guuggguucaccuggaauc

SEQ ID NO: 3203558 - RNA, 19 nt, Artificial Sequence
  Description of Artificial Sequence: Synthetic oligonucleotide
uguuaacacacugauuuga

SEQ ID NO: 3203559 - RNA, 19 nt, Artificial Sequence
  Description of Artificial Sequence: Synthetic oligonucleotide
gaccaauccagcauggaag

SEQ ID NO: 3203560 - RNA, 19 nt, Artificial Sequence
  Description of Artificial Sequence: Synthetic oligonucleotide
uuguucccaguauuguugg

SEQ ID NO: 3203561 - RNA, 19 nt, Artificial Sequence
  Description of Artificial Sequence: Synthetic oligonucleotide
aagggucgcuuacagauga

SEQ ID NO: 3203562 - RNA, 19 nt, Artificial Sequence
  Description of Artificial Sequence: Synthetic oligonucleotide
acauucuccaagcuguucu

SEQ ID NO: 3203563 - RNA, 19 nt, Artificial Sequence
  Description of Artificial Sequence: Synthetic oligonucleotide
gaaucugaacuucagccuc

SEQ ID NO: 3203564 - RNA, 19 nt, Artificial Sequence
  Description of Artificial Sequence: Synthetic oligonucleotide
uccagaacagaacccagac

SEQ ID NO: 3203565 - RNA, 19 nt, Artificial Sequence
  Description of Artificial Sequence: Synthetic oligonucleotide
gaccuucgcauucaaggcg

SEQ ID NO: 3203566 - RNA, 19 nt, Artificial Sequence
  Description of Artificial Sequence: Synthetic oligonucleotide
uguugaauaacgucccauc

SEQ ID NO: 3203567 - RNA, 19 nt, Artificial Sequence
  Description of Artificial Sequence: Synthetic oligonucleotide
acaggaagcaucauuccac

SEQ ID NO: 3203568 - RNA, 19 nt, Artificial Sequence
  Description of Artificial Sequence: Synthetic oligonucleotide
guucacugaggucagauga

SEQ ID NO: 3203569 - RNA, 19 nt, Artificial Sequence
  Description of Artificial Sequence: Synthetic oligonucleotide
ugagaccaauccagcaugg

SEQ ID NO: 3203570 - RNA, 19 nt, Artificial Sequence
  Description of Artificial Sequence: Synthetic oligonucleotide
uucgcauucaaggcgcugg

SEQ ID NO: 3203571 - RNA, 19 nt, Artificial Sequence
  Description of Artificial Sequence: Synthetic oligonucleotide
uucacugaggucagaugag

SEQ ID NO: 3203572 - RNA, 19 nt, Artificial Sequence
  Description of Artificial Sequence: Synthetic oligonucleotide
uaacgucccauccacccag

SEQ ID NO: 3203573 - RNA, 19 nt, Artificial Sequence
  Description of Artificial Sequence: Synthetic oligonucleotide
gauccgcaaagacagaauc

SEQ ID NO: 3203574 - RNA, 19 nt, Artificial Sequence
  Description of Artificial Sequence: Synthetic oligonucleotide
cuuuggagcagcuuguuga

SEQ ID NO: 3203575 - RNA, 19 nt, Artificial Sequence
  Description of Artificial Sequence: Synthetic oligonucleotide
acuuagagucacaggaagc

SEQ ID NO: 3203576 - RNA, 19 nt, Artificial Sequence
  Description of Artificial Sequence: Synthetic oligonucleotide
ugaggucagaugagcaucc

SEQ ID NO: 3203577 - RNA, 19 nt, Artificial Sequence
  Description of Artificial Sequence: Synthetic oligonucleotide
gucacucugucuuuggagc

SEQ ID NO: 3203578 - RNA, 19 nt, Artificial Sequence
  Description of Artificial Sequence: Synthetic oligonucleotide
gucccauccacccaguacc

SEQ ID NO: 3203579 - RNA, 19 nt, Artificial Sequence
  Description of Artificial Sequence: Synthetic oligonucleotide
uauccagaucucuuugcag

SEQ ID NO: 3203580 - RNA, 19 nt, Artificial Sequence
  Description of Artificial Sequence: Synthetic oligonucleotide
cuuacagaugaaagggaac

SEQ ID NO: 3203581 - RNA, 19 nt, Artificial Sequence
  Description of Artificial Sequence: Synthetic oligonucleotide
uccgcaaagacagaaucug

SEQ ID NO: 3203582 - RNA, 19 nt, Artificial Sequence
  Description of Artificial Sequence: Synthetic oligonucleotide
aagccuaucugcugacuug

SEQ ID NO: 3203583 - RNA, 19 nt, Artificial Sequence
  Description of Artificial Sequence: Synthetic oligonucleotide
agacagaugaaggccacac

SEQ ID NO: 3203584 - RNA, 19 nt, Artificial Sequence
  Description of Artificial Sequence: Synthetic oligonucleotide
aagcacaauagaggcgacc

SEQ ID NO: 3203585 - RNA, 19 nt, Artificial Sequence
  Description of Artificial Sequence: Synthetic oligonucleotide
uuguagagaaacucuugcu

SEQ ID NO: 3203586 - RNA, 19 nt, Artificial Sequence
  Description of Artificial Sequence: Synthetic oligonucleotide
ugagcaucgcucuucacau

SEQ ID NO: 3203587 - RNA, 19 nt, Artificial Sequence
  Description of Artificial Sequence: Synthetic oligonucleotide
acagaaucugggaacgcgc

SEQ ID NO: 3203588 - RNA, 19 nt, Artificial Sequence
  Description of Artificial Sequence: Synthetic oligonucleotide
ugcuccgauuucuuguagg

SEQ ID NO: 3203589 - RNA, 19 nt, Artificial Sequence
  Description of Artificial Sequence: Synthetic oligonucleotide
gaaucugggaacgcgcccg

SEQ ID NO: 3203590 - RNA, 19 nt, Artificial Sequence
  Description of Artificial Sequence: Synthetic oligonucleotide
agcuugaagcacaauagag

SEQ ID NO: 3203591 - RNA, 19 nt, Artificial Sequence
  Description of Artificial Sequence: Synthetic oligonucleotide
guuucguguuaacacacug

SEQ ID NO: 3203592 - RNA, 19 nt, Artificial Sequence
  Description of Artificial Sequence: Synthetic oligonucleotide
uucaccuggaauccagaac

SEQ ID NO: 3203593 - RNA, 19 nt, Artificial Sequence
  Description of Artificial Sequence: Synthetic oligonucleotide
aaccuuuuacuuuguuccu

SEQ ID NO: 3203594 - RNA, 19 nt, Artificial Sequence
  Description of Artificial Sequence: Synthetic oligonucleotide
ugcugauauuguccgcacg

SEQ ID NO: 3203595 - RNA, 19 nt, Artificial Sequence
  Description of Artificial Sequence: Synthetic oligonucleotide
uuuuguccaccaaccuggg

SEQ ID NO: 3203596 - RNA, 19 nt, Artificial Sequence
  Description of Artificial Sequence: Synthetic oligonucleotide
acagaacccagacugcuga

SEQ ID NO: 3203597 - RNA, 19 nt, Artificial Sequence
  Description of Artificial Sequence: Synthetic oligonucleotide
aaauacuugaauuuugugc

SEQ ID NO: 3203598 - RNA, 19 nt, Artificial Sequence
  Description of Artificial Sequence: Synthetic oligonucleotide
aauuuugugcauuucuugc

SEQ ID NO: 3203599 - RNA, 19 nt, Artificial Sequence
  Description of Artificial Sequence: Synthetic oligonucleotide
aagauauaagagcaaauac

SEQ ID NO: 3203600 - RNA, 19 nt, Artificial Sequence
  Description of Artificial Sequence: Synthetic oligonucleotide
aauacuugaauuuugugca

SEQ ID NO: 3203601 - RNA, 19 nt, Artificial Sequence
  Description of Artificial Sequence: Synthetic oligonucleotide
uuuuaucugaaaaugauuc

SEQ ID NO: 3203602 - RNA, 19 nt, Artificial Sequence
  Description of Artificial Sequence: Synthetic oligonucleotide
uguucaagauauaagagca

SEQ ID NO: 3203603 - RNA, 19 nt, Artificial Sequence
  Description of Artificial Sequence: Synthetic oligonucleotide
aaaguggggaacaucaucc

SEQ ID NO: 3203604 - RNA, 19 nt, Artificial Sequence
  Description of Artificial Sequence: Synthetic oligonucleotide
cucaauaaaagauacuacc

SEQ ID NO: 3203605 - RNA, 19 nt, Artificial Sequence
  Description of Artificial Sequence: Synthetic oligonucleotide
uauaagagcaaauacuuga

SEQ ID NO: 3203606 - RNA, 19 nt, Artificial Sequence
  Description of Artificial Sequence: Synthetic oligonucleotide
ucaauaaaagauacuacca

SEQ ID NO: 3203607 - RNA, 19 nt, Artificial Sequence
  Description of Artificial Sequence: Synthetic oligonucleotide
aaugaauaacaguaguugu

SEQ ID NO: 3203608 - RNA, 19 nt, Artificial Sequence
  Description of Artificial Sequence: Synthetic oligonucleotide
ugaaaaugauuccaaaaca

SEQ ID NO: 3203609 - RNA, 19 nt, Artificial Sequence
  Description of Artificial Sequence: Synthetic oligonucleotide
aauaaaagauacuaccaau

SEQ ID NO: 3203610 - RNA, 19 nt, Artificial Sequence
  Description of Artificial Sequence: Synthetic oligonucleotide
agaaagguucaacugagcg

SEQ ID NO: 3203611 - RNA, 19 nt, Artificial Sequence
  Description of Artificial Sequence: Synthetic oligonucleotide
uguguuguguucaagauau

SEQ ID NO: 3203612 - RNA, 19 nt, Artificial Sequence
  Description of Artificial Sequence: Synthetic oligonucleotide
ugaauaacaguaguugugg

SEQ ID NO: 3203613 - RNA, 19 nt, Artificial Sequence
  Description of Artificial Sequence: Synthetic oligonucleotide
uaaaagauacuaccaauga

SEQ ID NO: 3203614 - RNA, 19 nt, Artificial Sequence
  Description of Artificial Sequence: Synthetic oligonucleotide
gaaaaugauuccaaaacag

SEQ ID NO: 3203615 - RNA, 19 nt, Artificial Sequence
  Description of Artificial Sequence: Synthetic oligonucleotide
uuguguucaagauauaaga

SEQ ID NO: 3203616 - RNA, 19 nt, Artificial Sequence
  Description of Artificial Sequence: Synthetic oligonucleotide
uugaaaguggggaacauca

SEQ ID NO: 3203617 - RNA, 19 nt, Artificial Sequence
  Description of Artificial Sequence: Synthetic oligonucleotide
uguguucaagauauaagag

SEQ ID NO: 3203618 - RNA, 19 nt, Artificial Sequence
  Description of Artificial Sequence: Synthetic oligonucleotide
aaagguucaacugagcgug

SEQ ID NO: 3203619 - RNA, 19 nt, Artificial Sequence
  Description of Artificial Sequence: Synthetic oligonucleotide
aaugacuuccaguugggug

SEQ ID NO: 3203620 - RNA, 19 nt, Artificial Sequence
  Description of Artificial Sequence: Synthetic oligonucleotide
auuuugugcauuucuugcc

SEQ ID NO: 3203621 - RNA, 19 nt, Artificial Sequence
  Description of Artificial Sequence: Synthetic oligonucleotide
gauacuaccaaugaauaac

SEQ ID NO: 3203622 - RNA, 19 nt, Artificial Sequence
  Description of Artificial Sequence: Synthetic oligonucleotide
augacuuccaguugggugg

SEQ ID NO: 3203623 - RNA, 19 nt, Artificial Sequence
  Description of Artificial Sequence: Synthetic oligonucleotide
aguguuuccagaaagguuc

SEQ ID NO: 3203624 - RNA, 19 nt, Artificial Sequence
  Description of Artificial Sequence: Synthetic oligonucleotide
augauuccaaaacagauga

SEQ ID NO: 3203625 - RNA, 19 nt, Artificial Sequence
  Description of Artificial Sequence: Synthetic oligonucleotide
cugaaaaugauuccaaaac

SEQ ID NO: 3203626 - RNA, 19 nt, Artificial Sequence
  Description of Artificial Sequence: Synthetic oligonucleotide
aauaacaguaguugugggu

SEQ ID NO: 3203627 - RNA, 19 nt, Artificial Sequence
  Description of Artificial Sequence: Synthetic oligonucleotide
aaagauacuaccaaugaau

SEQ ID NO: 3203628 - RNA, 19 nt, Artificial Sequence
  Description of Artificial Sequence: Synthetic oligonucleotide
ugagaguguuuccagaaag

SEQ ID NO: 3203629 - RNA, 19 nt, Artificial Sequence
  Description of Artificial Sequence: Synthetic oligonucleotide
aggaaugacuuccaguugg

SEQ ID NO: 3203630 - RNA, 19 nt, Artificial Sequence
  Description of Artificial Sequence: Synthetic oligonucleotide
auuucucaauaaaagauac

SEQ ID NO: 3203631 - RNA, 19 nt, Artificial Sequence
  Description of Artificial Sequence: Synthetic oligonucleotide
ugccauuucucaauaaaag

SEQ ID NO: 3203632 - RNA, 19 nt, Artificial Sequence
  Description of Artificial Sequence: Synthetic oligonucleotide
gaugguauaugucaggguc

SEQ ID NO: 3203633 - RNA, 19 nt, Artificial Sequence
  Description of Artificial Sequence: Synthetic oligonucleotide
cuaacuacagugcaucagg

SEQ ID NO: 3203634 - RNA, 19 nt, Artificial Sequence
  Description of Artificial Sequence: Synthetic oligonucleotide
aacagaugaugguauaugu

SEQ ID NO: 3203635 - RNA, 19 nt, Artificial Sequence
  Description of Artificial Sequence: Synthetic oligonucleotide
uuuaucugaaaaugauucc

SEQ ID NO: 3203636 - RNA, 19 nt, Artificial Sequence
  Description of Artificial Sequence: Synthetic oligonucleotide
aagagcaaauacuugaauu

SEQ ID NO: 3203637 - RNA, 19 nt, Artificial Sequence
  Description of Artificial Sequence: Synthetic oligonucleotide
uccuagguggguuauacag

SEQ ID NO: 3203638 - RNA, 19 nt, Artificial Sequence
  Description of Artificial Sequence: Synthetic oligonucleotide
aaaagauacuaccaaugaa

SEQ ID NO: 3203639 - RNA, 19 nt, Artificial Sequence
  Description of Artificial Sequence: Synthetic oligonucleotide
uugaauuuugugcauuucu

SEQ ID NO: 3203640 - RNA, 19 nt, Artificial Sequence
  Description of Artificial Sequence: Synthetic oligonucleotide
gauuccaaaacagaugaug

SEQ ID NO: 3203641 - RNA, 19 nt, Artificial Sequence
  Description of Artificial Sequence: Synthetic oligonucleotide
aaugauuccaaaacagaug

SEQ ID NO: 3203642 - RNA, 19 nt, Artificial Sequence
  Description of Artificial Sequence: Synthetic oligonucleotide
uccagaaagguucaacuga

SEQ ID NO: 3203643 - RNA, 19 nt, Artificial Sequence
  Description of Artificial Sequence: Synthetic oligonucleotide
auuccaaaacagaugaugg

SEQ ID NO: 3203644 - RNA, 19 nt, Artificial Sequence
  Description of Artificial Sequence: Synthetic oligonucleotide
gaauuuugugcauuucuug

SEQ ID NO: 3203645 - RNA, 19 nt, Artificial Sequence
  Description of Artificial Sequence: Synthetic oligonucleotide
aacaucauccuaugggcug

SEQ ID NO: 3203646 - RNA, 19 nt, Artificial Sequence
  Description of Artificial Sequence: Synthetic oligonucleotide
aacugagcguggaagaccc

SEQ ID NO: 3203647 - RNA, 19 nt, Artificial Sequence
  Description of Artificial Sequence: Synthetic oligonucleotide
uucucaauaaaagauacua

SEQ ID NO: 3203648 - RNA, 19 nt, Artificial Sequence
  Description of Artificial Sequence: Synthetic oligonucleotide
uuaucugaaaaugauucca

SEQ ID NO: 3203649 - RNA, 19 nt, Artificial Sequence
  Description of Artificial Sequence: Synthetic oligonucleotide
guguucaagauauaagagc

SEQ ID NO: 3203650 - RNA, 19 nt, Artificial Sequence
  Description of Artificial Sequence: Synthetic oligonucleotide
ucauucuugccuuuccuag

SEQ ID NO: 3203651 - RNA, 19 nt, Artificial Sequence
  Description of Artificial Sequence: Synthetic oligonucleotide
ucucaauaaaagauacuac

SEQ ID NO: 3203652 - RNA, 19 nt, Artificial Sequence
  Description of Artificial Sequence: Synthetic oligonucleotide
ucugaaaaugauuccaaaa

SEQ ID NO: 3203653 - RNA, 19 nt, Artificial Sequence
  Description of Artificial Sequence: Synthetic oligonucleotide
uuuccagaaagguucaacu

SEQ ID NO: 3203654 - RNA, 19 nt, Artificial Sequence
  Description of Artificial Sequence: Synthetic oligonucleotide
ucuugccuuuccuaggugg

SEQ ID NO: 3203655 - RNA, 19 nt, Artificial Sequence
  Description of Artificial Sequence: Synthetic oligonucleotide
gaugaugguauaugucagg

SEQ ID NO: 3203656 - RNA, 19 nt, Artificial Sequence
  Description of Artificial Sequence: Synthetic oligonucleotide
aaaugauuccaaaacagau

SEQ ID NO: 3203657 - RNA, 19 nt, Artificial Sequence
  Description of Artificial Sequence: Synthetic oligonucleotide
ucaggaaugacuuccaguu

SEQ ID NO: 3203658 - RNA, 19 nt, Artificial Sequence
  Description of Artificial Sequence: Synthetic oligonucleotide
aaaaugauuccaaaacaga

SEQ ID NO: 3203659 - RNA, 19 nt, Artificial Sequence
  Description of Artificial Sequence: Synthetic oligonucleotide
agauauaagagcaaauacu

SEQ ID NO: 3203660 - RNA, 19 nt, Artificial Sequence
  Description of Artificial Sequence: Synthetic oligonucleotide
caaugaauaacaguaguug

SEQ ID NO: 3203661 - RNA, 19 nt, Artificial Sequence
  Description of Artificial Sequence: Synthetic oligonucleotide
ucuaugagaguguuuccag

SEQ ID NO: 3203662 - RNA, 19 nt, Artificial Sequence
  Description of Artificial Sequence: Synthetic oligonucleotide
cuaccaaugaauaacagua

SEQ ID NO: 3203663 - RNA, 19 nt, Artificial Sequence
  Description of Artificial Sequence: Synthetic oligonucleotide
auaaaagauacuaccaaug

SEQ ID NO: 3203664 - RNA, 19 nt, Artificial Sequence
  Description of Artificial Sequence: Synthetic oligonucleotide
auaacaguaguugugggug

SEQ ID NO: 3203665 - RNA, 19 nt, Artificial Sequence
  Description of Artificial Sequence: Synthetic oligonucleotide
gaauaacaguaguuguggg

SEQ ID NO: 3203666 - RNA, 19 nt, Artificial Sequence
  Description of Artificial Sequence: Synthetic oligonucleotide
uuuugugcauuucuugcca

SEQ ID NO: 3203667 - RNA, 19 nt, Artificial Sequence
  Description of Artificial Sequence: Synthetic oligonucleotide
acuaccaaugaauaacagu

SEQ ID NO: 3203668 - RNA, 19 nt, Artificial Sequence
  Description of Artificial Sequence: Synthetic oligonucleotide
aguugggugguguuagugg

SEQ ID NO: 3203669 - RNA, 19 nt, Artificial Sequence
  Description of Artificial Sequence: Synthetic oligonucleotide
uaccaaugaauaacaguag

SEQ ID NO: 3203670 - RNA, 19 nt, Artificial Sequence
  Description of Artificial Sequence: Synthetic oligonucleotide
agagcaaauacuugaauuu

SEQ ID NO: 3203671 - RNA, 19 nt, Artificial Sequence
  Description of Artificial Sequence: Synthetic oligonucleotide
aaacagaugaugguauaug

SEQ ID NO: 3203672 - RNA, 19 nt, Artificial Sequence
  Description of Artificial Sequence: Synthetic oligonucleotide
gggaacaucauccuauggg

SEQ ID NO: 3203673 - RNA, 19 nt, Artificial Sequence
  Description of Artificial Sequence: Synthetic oligonucleotide
ugcaucaggaaugacuucc

SEQ ID NO: 3203674 - RNA, 19 nt, Artificial Sequence
  Description of Artificial Sequence: Synthetic oligonucleotide
acuacagugcaucaggaau

SEQ ID NO: 3203675 - RNA, 19 nt, Artificial Sequence
  Description of Artificial Sequence: Synthetic oligonucleotide
uauacagugugugugugug

SEQ ID NO: 3203676 - RNA, 19 nt, Artificial Sequence
  Description of Artificial Sequence: Synthetic oligonucleotide
guuagugggaguuuuaucu

SEQ ID NO: 3203677 - RNA, 19 nt, Artificial Sequence
  Description of Artificial Sequence: Synthetic oligonucleotide
uaugucagggucccgcugc

SEQ ID NO: 3203678 - RNA, 19 nt, Artificial Sequence
  Description of Artificial Sequence: Synthetic oligonucleotide
ugggaguuuuaucugaaaa

SEQ ID NO: 3203679 - RNA, 19 nt, Artificial Sequence
  Description of Artificial Sequence: Synthetic oligonucleotide
augaugguauaugucaggg

SEQ ID NO: 3203680 - RNA, 19 nt, Artificial Sequence
  Description of Artificial Sequence: Synthetic oligonucleotide
cuagguggguuauacagug

SEQ ID NO: 3203681 - RNA, 19 nt, Artificial Sequence
  Description of Artificial Sequence: Synthetic oligonucleotide
ugaauuuugugcauuucuu

SEQ ID NO: 3203682 - RNA, 19 nt, Artificial Sequence
  Description of Artificial Sequence: Synthetic oligonucleotide
guugggugguguuaguggg

SEQ ID NO: 3203683 - RNA, 19 nt, Artificial Sequence
  Description of Artificial Sequence: Synthetic oligonucleotide
uaucugaaaaugauuccaa

SEQ ID NO: 3203684 - RNA, 19 nt, Artificial Sequence
  Description of Artificial Sequence: Synthetic oligonucleotide
cagaugaugguauauguca

SEQ ID NO: 3203685 - RNA, 19 nt, Artificial Sequence
  Description of Artificial Sequence: Synthetic oligonucleotide
uaugagaguguuuccagaa

SEQ ID NO: 3203686 - RNA, 19 nt, Artificial Sequence
  Description of Artificial Sequence: Synthetic oligonucleotide
accaaugaauaacaguagu

SEQ ID NO: 3203687 - RNA, 19 nt, Artificial Sequence
  Description of Artificial Sequence: Synthetic oligonucleotide
ugcauuucuugccauuucu

SEQ ID NO: 3203688 - RNA, 19 nt, Artificial Sequence
  Description of Artificial Sequence: Synthetic oligonucleotide
ucaagauauaagagcaaau

SEQ ID NO: 3203689 - RNA, 19 nt, Artificial Sequence
  Description of Artificial Sequence: Synthetic oligonucleotide
uucaagauauaagagcaaa

SEQ ID NO: 3203690 - RNA, 19 nt, Artificial Sequence
  Description of Artificial Sequence: Synthetic oligonucleotide
uuccagaaagguucaacug

SEQ ID NO: 3203691 - RNA, 19 nt, Artificial Sequence
  Description of Artificial Sequence: Synthetic oligonucleotide
uuagugggaguuuuaucug

SEQ ID NO: 3203692 - RNA, 19 nt, Artificial Sequence
  Description of Artificial Sequence: Synthetic oligonucleotide
uugccauuucucaauaaaa

SEQ ID NO: 3203693 - RNA, 19 nt, Artificial Sequence
  Description of Artificial Sequence: Synthetic oligonucleotide
ucuaacuacagugcaucag

SEQ ID NO: 3203694 - RNA, 19 nt, Artificial Sequence
  Description of Artificial Sequence: Synthetic oligonucleotide
ggaacaucauccuaugggc

SEQ ID NO: 3203695 - RNA, 19 nt, Artificial Sequence
  Description of Artificial Sequence: Synthetic oligonucleotide
guuguguucaagauauaag

SEQ ID NO: 3203696 - RNA, 19 nt, Artificial Sequence
  Description of Artificial Sequence: Synthetic oligonucleotide
cuacagugcaucaggaaug

SEQ ID NO: 3203697 - RNA, 19 nt, Artificial Sequence
  Description of Artificial Sequence: Synthetic oligonucleotide
aauaaauaaauaagguucc

SEQ ID NO: 3203698 - RNA, 19 nt, Artificial Sequence
  Description of Artificial Sequence: Synthetic oligonucleotide
uguaaaagcacucccaggg

SEQ ID NO: 3203699 - RNA, 19 nt, Artificial Sequence
  Description of Artificial Sequence: Synthetic oligonucleotide
aaauaaauaagguuccuca

SEQ ID NO: 3203700 - RNA, 19 nt, Artificial Sequence
  Description of Artificial Sequence: Synthetic oligonucleotide
gaauaaauaaauaagguuc

SEQ ID NO: 3203701 - RNA, 19 nt, Artificial Sequence
  Description of Artificial Sequence: Synthetic oligonucleotide
aacaaauuagagcuaggcg

SEQ ID NO: 3203702 - RNA, 19 nt, Artificial Sequence
  Description of Artificial Sequence: Synthetic oligonucleotide
aauaagguuccucagguug

SEQ ID NO: 3203703 - RNA, 19 nt, Artificial Sequence
  Description of Artificial Sequence: Synthetic oligonucleotide
gaaaugugcagccuaacgg

SEQ ID NO: 3203704 - RNA, 19 nt, Artificial Sequence
  Description of Artificial Sequence: Synthetic oligonucleotide
aauaaauaagguuccucag

SEQ ID NO: 3203705 - RNA, 19 nt, Artificial Sequence
  Description of Artificial Sequence: Synthetic oligonucleotide
acaaauuagagcuaggcga

SEQ ID NO: 3203706 - RNA, 19 nt, Artificial Sequence
  Description of Artificial Sequence: Synthetic oligonucleotide
auaaauaagguuccucagg

SEQ ID NO: 3203707 - RNA, 19 nt, Artificial Sequence
  Description of Artificial Sequence: Synthetic oligonucleotide
uuuugguucguucacgaag

SEQ ID NO: 3203708 - RNA, 19 nt, Artificial Sequence
  Description of Artificial Sequence: Synthetic oligonucleotide
cuugggaugaguuagggug

SEQ ID NO: 3203709 - RNA, 19 nt, Artificial Sequence
  Description of Artificial Sequence: Synthetic oligonucleotide
aagaucgucuuauuagcgg

SEQ ID NO: 3203710 - RNA, 19 nt, Artificial Sequence
  Description of Artificial Sequence: Synthetic oligonucleotide
uaaauaagguuccucaggu

SEQ ID NO: 3203711 - RNA, 19 nt, Artificial Sequence
  Description of Artificial Sequence: Synthetic oligonucleotide
accccaacaaauuagagcu

SEQ ID NO: 3203712 - RNA, 19 nt, Artificial Sequence
  Description of Artificial Sequence: Synthetic oligonucleotide
ucuguaaaagcacucccag

SEQ ID NO: 3203713 - RNA, 19 nt, Artificial Sequence
  Description of Artificial Sequence: Synthetic oligonucleotide
aacggaagggacuggugcc

SEQ ID NO: 3203714 - RNA, 19 nt, Artificial Sequence
  Description of Artificial Sequence: Synthetic oligonucleotide
aaaugugcagccuaacgga

SEQ ID NO: 3203715 - RNA, 19 nt, Artificial Sequence
  Description of Artificial Sequence: Synthetic oligonucleotide
uuagcggucuguaaaagca

SEQ ID NO: 3203716 - RNA, 19 nt, Artificial Sequence
  Description of Artificial Sequence: Synthetic oligonucleotide
ucauuggucccacugagcc

SEQ ID NO: 3203717 - RNA, 19 nt, Artificial Sequence
  Description of Artificial Sequence: Synthetic oligonucleotide
gguucguucacgaagaucg

SEQ ID NO: 3203718 - RNA, 19 nt, Artificial Sequence
  Description of Artificial Sequence: Synthetic oligonucleotide
uaggcgaauaaauaaauaa

SEQ ID NO: 3203719 - RNA, 19 nt, Artificial Sequence
  Description of Artificial Sequence: Synthetic oligonucleotide
auuagcggucuguaaaagc

SEQ ID NO: 3203720 - RNA, 19 nt, Artificial Sequence
  Description of Artificial Sequence: Synthetic oligonucleotide
acgaagaucgucuuauuag

SEQ ID NO: 3203721 - RNA, 19 nt, Artificial Sequence
  Description of Artificial Sequence: Synthetic oligonucleotide
uuugguucguucacgaaga

SEQ ID NO: 3203722 - RNA, 19 nt, Artificial Sequence
  Description of Artificial Sequence: Synthetic oligonucleotide
ucuucucucucccagguga

SEQ ID NO: 3203723 - RNA, 19 nt, Artificial Sequence
  Description of Artificial Sequence: Synthetic oligonucleotide
ugugcagccuaacggaagg

SEQ ID NO: 3203724 - RNA, 19 nt, Artificial Sequence
  Description of Artificial Sequence: Synthetic oligonucleotide
uguagcaccagggacaagc

SEQ ID NO: 3203725 - RNA, 19 nt, Artificial Sequence
  Description of Artificial Sequence: Synthetic oligonucleotide
uaggggagcaauuaccucc

SEQ ID NO: 3203726 - RNA, 19 nt, Artificial Sequence
  Description of Artificial Sequence: Synthetic oligonucleotide
agugaccccagauuggagg

SEQ ID NO: 3203727 - RNA, 19 nt, Artificial Sequence
  Description of Artificial Sequence: Synthetic oligonucleotide
ggcgaauaaauaaauaagg

SEQ ID NO: 3203728 - RNA, 19 nt, Artificial Sequence
  Description of Artificial Sequence: Synthetic oligonucleotide
ugucccuugacucauuggu

SEQ ID NO: 3203729 - RNA, 19 nt, Artificial Sequence
  Description of Artificial Sequence: Synthetic oligonucleotide
uaacggaagggacuggugc

SEQ ID NO: 3203730 - RNA, 19 nt, Artificial Sequence
  Description of Artificial Sequence: Synthetic oligonucleotide
auuaccucccuccccacac

SEQ ID NO: 3203731 - RNA, 19 nt, Artificial Sequence
  Description of Artificial Sequence: Synthetic oligonucleotide
uguaggggagcaauuaccu

SEQ ID NO: 3203732 - RNA, 19 nt, Artificial Sequence
  Description of Artificial Sequence: Synthetic oligonucleotide
uuugcagcagcggagcugg

SEQ ID NO: 3203733 - RNA, 19 nt, Artificial Sequence
  Description of Artificial Sequence: Synthetic oligonucleotide
ugauggggagcagagaggg

SEQ ID NO: 3203734 - RNA, 19 nt, Artificial Sequence
  Description of Artificial Sequence: Synthetic oligonucleotide
uuguaggggagcaauuacc

SEQ ID NO: 3203735 - RNA, 19 nt, Artificial Sequence
  Description of Artificial Sequence: Synthetic oligonucleotide
agcaauuaccucccucccc

SEQ ID NO: 3203736 - RNA, 19 nt, Artificial Sequence
  Description of Artificial Sequence: Synthetic oligonucleotide
cacaggaaggcucuguggg

SEQ ID NO: 3203737 - RNA, 19 nt, Artificial Sequence
  Description of Artificial Sequence: Synthetic oligonucleotide
gaagaucgucuuauuagcg

SEQ ID NO: 3203738 - RNA, 19 nt, Artificial Sequence
  Description of Artificial Sequence: Synthetic oligonucleotide
uuggaggaagccgugagag

SEQ ID NO: 3203739 - RNA, 19 nt, Artificial Sequence
  Description of Artificial Sequence: Synthetic oligonucleotide
caacaaauuagagcuaggc

SEQ ID NO: 3203740 - RNA, 19 nt, Artificial Sequence
  Description of Artificial Sequence: Synthetic oligonucleotide
uaaaagcacucccaggguc

SEQ ID NO: 3203741 - RNA, 19 nt, Artificial Sequence
  Description of Artificial Sequence: Synthetic oligonucleotide
ucccuugacucauuggucc

SEQ ID NO: 3203742 - RNA, 19 nt, Artificial Sequence
  Description of Artificial Sequence: Synthetic oligonucleotide
uaaauaaauaagguuccuc

SEQ ID NO: 3203743 - RNA, 19 nt, Artificial Sequence
  Description of Artificial Sequence: Synthetic oligonucleotide
ucguucacgaagaucgucu

SEQ ID NO: 3203744 - RNA, 19 nt, Artificial Sequence
  Description of Artificial Sequence: Synthetic oligonucleotide
ugacucauuggucccacug

SEQ ID NO: 3203745 - RNA, 19 nt, Artificial Sequence
  Description of Artificial Sequence: Synthetic oligonucleotide
caccccaacaaauuagagc

SEQ ID NO: 3203746 - RNA, 19 nt, Artificial Sequence
  Description of Artificial Sequence: Synthetic oligonucleotide
uuauuagcggucuguaaaa

SEQ ID NO: 3203747 - RNA, 19 nt, Artificial Sequence
  Description of Artificial Sequence: Synthetic oligonucleotide
uagagcuaggcgaauaaau

SEQ ID NO: 3203748 - RNA, 19 nt, Artificial Sequence
  Description of Artificial Sequence: Synthetic oligonucleotide
gauuggaggaagccgugag

SEQ ID NO: 3203749 - RNA, 19 nt, Artificial Sequence
  Description of Artificial Sequence: Synthetic oligonucleotide
aggcgaauaaauaaauaag

SEQ ID NO: 3203750 - RNA, 19 nt, Artificial Sequence
  Description of Artificial Sequence: Synthetic oligonucleotide
ggugauggggagcagagag

SEQ ID NO: 3203751 - RNA, 19 nt, Artificial Sequence
  Description of Artificial Sequence: Synthetic oligonucleotide
ucucucucccaggugaugg

SEQ ID NO: 3203752 - RNA, 19 nt, Artificial Sequence
  Description of Artificial Sequence: Synthetic oligonucleotide
agaucgucuuauuagcggu

SEQ ID NO: 3203753 - RNA, 19 nt, Artificial Sequence
  Description of Artificial Sequence: Synthetic oligonucleotide
cucagguuggucuccacag

SEQ ID NO: 3203754 - RNA, 19 nt, Artificial Sequence
  Description of Artificial Sequence: Synthetic oligonucleotide
acucauuggucccacugag

SEQ ID NO: 3203755 - RNA, 19 nt, Artificial Sequence
  Description of Artificial Sequence: Synthetic oligonucleotide
agcagagagggauuugcag

SEQ ID NO: 3203756 - RNA, 19 nt, Artificial Sequence
  Description of Artificial Sequence: Synthetic oligonucleotide
cuuauuagcggucuguaaa

SEQ ID NO: 3203757 - RNA, 19 nt, Artificial Sequence
  Description of Artificial Sequence: Synthetic oligonucleotide
ggagcaauuaccucccucc

SEQ ID NO: 3203758 - RNA, 19 nt, Artificial Sequence
  Description of Artificial Sequence: Synthetic oligonucleotide
aguuagggugucuucucuc

SEQ ID NO: 3203759 - RNA, 19 nt, Artificial Sequence
  Description of Artificial Sequence: Synthetic oligonucleotide
ugagaggucuguagcacca

SEQ ID NO: 3203760 - RNA, 19 nt, Artificial Sequence
  Description of Artificial Sequence: Synthetic oligonucleotide
ucagguuggucuccacagg

SEQ ID NO: 3203761 - RNA, 19 nt, Artificial Sequence
  Description of Artificial Sequence: Synthetic oligonucleotide
cuguaaaagcacucccagg

SEQ ID NO: 3203762 - RNA, 19 nt, Artificial Sequence
  Description of Artificial Sequence: Synthetic oligonucleotide
auaagguuccucagguugg

SEQ ID NO: 3203763 - RNA, 19 nt, Artificial Sequence
  Description of Artificial Sequence: Synthetic oligonucleotide
aagggacuggugcccuugc

SEQ ID NO: 3203764 - RNA, 19 nt, Artificial Sequence
  Description of Artificial Sequence: Synthetic oligonucleotide
agggugucuucucucuccc

SEQ ID NO: 3203765 - RNA, 19 nt, Artificial Sequence
  Description of Artificial Sequence: Synthetic oligonucleotide
uucacgaagaucgucuuau

SEQ ID NO: 3203766 - RNA, 19 nt, Artificial Sequence
  Description of Artificial Sequence: Synthetic oligonucleotide
aaaagcacucccaggguca

SEQ ID NO: 3203767 - RNA, 19 nt, Artificial Sequence
  Description of Artificial Sequence: Synthetic oligonucleotide
auuagagcuaggcgaauaa

SEQ ID NO: 3203768 - RNA, 19 nt, Artificial Sequence
  Description of Artificial Sequence: Synthetic oligonucleotide
acaagccagggcccgaggg

SEQ ID NO: 3203769 - RNA, 19 nt, Artificial Sequence
  Description of Artificial Sequence: Synthetic oligonucleotide
uauuagcggucuguaaaag

SEQ ID NO: 3203770 - RNA, 19 nt, Artificial Sequence
  Description of Artificial Sequence: Synthetic oligonucleotide
uccacaggaaggcucugug

SEQ ID NO: 3203771 - RNA, 19 nt, Artificial Sequence
  Description of Artificial Sequence: Synthetic oligonucleotide
uugggaugaguuagggugu

SEQ ID NO: 3203772 - RNA, 19 nt, Artificial Sequence
  Description of Artificial Sequence: Synthetic oligonucleotide
accagggacaagccagggc

SEQ ID NO: 3203773 - RNA, 19 nt, Artificial Sequence
  Description of Artificial Sequence: Synthetic oligonucleotide
ugggauguccuuggcagcg

SEQ ID NO: 3203774 - RNA, 19 nt, Artificial Sequence
  Description of Artificial Sequence: Synthetic oligonucleotide
gagcuaggcgaauaaauaa

SEQ ID NO: 3203775 - RNA, 19 nt, Artificial Sequence
  Description of Artificial Sequence: Synthetic oligonucleotide
agggauuugcagcagcgga

SEQ ID NO: 3203776 - RNA, 19 nt, Artificial Sequence
  Description of Artificial Sequence: Synthetic oligonucleotide
acaggaaggcucugugggg

SEQ ID NO: 3203777 - RNA, 19 nt, Artificial Sequence
  Description of Artificial Sequence: Synthetic oligonucleotide
auaaauaaauaagguuccu

SEQ ID NO: 3203778 - RNA, 19 nt, Artificial Sequence
  Description of Artificial Sequence: Synthetic oligonucleotide
uagggugucuucucucucc

SEQ ID NO: 3203779 - RNA, 19 nt, Artificial Sequence
  Description of Artificial Sequence: Synthetic oligonucleotide
agaggucuguagcaccagg

SEQ ID NO: 3203780 - RNA, 19 nt, Artificial Sequence
  Description of Artificial Sequence: Synthetic oligonucleotide
auguccuuggcagcggggc

SEQ ID NO: 3203781 - RNA, 19 nt, Artificial Sequence
  Description of Artificial Sequence: Synthetic oligonucleotide
gaggucuguagcaccaggg

SEQ ID NO: 3203782 - RNA, 19 nt, Artificial Sequence
  Description of Artificial Sequence: Synthetic oligonucleotide
aaauaagguuccucagguu

SEQ ID NO: 3203783 - RNA, 19 nt, Artificial Sequence
  Description of Artificial Sequence: Synthetic oligonucleotide
uugcucagcgcugggaagg

SEQ ID NO: 3203784 - RNA, 19 nt, Artificial Sequence
  Description of Artificial Sequence: Synthetic oligonucleotide
ggucagugaccccagauug

SEQ ID NO: 3203785 - RNA, 19 nt, Artificial Sequence
  Description of Artificial Sequence: Synthetic oligonucleotide
aauuaccucccuccccaca

SEQ ID NO: 3203786 - RNA, 19 nt, Artificial Sequence
  Description of Artificial Sequence: Synthetic oligonucleotide
ugucuucucucucccaggu

SEQ ID NO: 3203787 - RNA, 19 nt, Artificial Sequence
  Description of Artificial Sequence: Synthetic oligonucleotide
ucuuauuagcggucuguaa

SEQ ID NO: 3203788 - RNA, 19 nt, Artificial Sequence
  Description of Artificial Sequence: Synthetic oligonucleotide
guuggucuccacaggaagg

SEQ ID NO: 3203789 - RNA, 19 nt, Artificial Sequence
  Description of Artificial Sequence: Synthetic oligonucleotide
ucuguggggauccccugcc

SEQ ID NO: 3203790 - RNA, 19 nt, Artificial Sequence
  Description of Artificial Sequence: Synthetic oligonucleotide
caaauuagagcuaggcgaa

SEQ ID NO: 3203791 - RNA, 19 nt, Artificial Sequence
  Description of Artificial Sequence: Synthetic oligonucleotide
gcugggauguccuuggcag

SEQ ID NO: 3203792 - RNA, 19 nt, Artificial Sequence
  Description of Artificial Sequence: Synthetic oligonucleotide
gagggcgaaaugugcagcc

SEQ ID NO: 3203793 - RNA, 19 nt, Artificial Sequence
  Description of Artificial Sequence: Synthetic oligonucleotide
uguggggauccccugcccc

SEQ ID NO: 3203794 - RNA, 19 nt, Artificial Sequence
  Description of Artificial Sequence: Synthetic oligonucleotide
guuguaggggagcaauuac

SEQ ID NO: 3203795 - RNA, 19 nt, Artificial Sequence
  Description of Artificial Sequence: Synthetic oligonucleotide
uuggucuccacaggaaggc

SEQ ID NO: 3203796 - RNA, 19 nt, Artificial Sequence
  Description of Artificial Sequence: Synthetic oligonucleotide
agcaccagggacaagccag

SEQ ID NO: 3203797 - RNA, 19 nt, Artificial Sequence
  Description of Artificial Sequence: Synthetic oligonucleotide
uuaacaagcuacaauaugg

SEQ ID NO: 3203798 - RNA, 19 nt, Artificial Sequence
  Description of Artificial Sequence: Synthetic oligonucleotide
aaugaaaacaaauucacau

SEQ ID NO: 3203799 - RNA, 19 nt, Artificial Sequence
  Description of Artificial Sequence: Synthetic oligonucleotide
uucuuuuguacaauggugg

SEQ ID NO: 3203800 - RNA, 19 nt, Artificial Sequence
  Description of Artificial Sequence: Synthetic oligonucleotide
uccacguggaaucacaugg

SEQ ID NO: 3203801 - RNA, 19 nt, Artificial Sequence
  Description of Artificial Sequence: Synthetic oligonucleotide
aauucuuuuguacaauggu

SEQ ID NO: 3203802 - RNA, 19 nt, Artificial Sequence
  Description of Artificial Sequence: Synthetic oligonucleotide
uuuaacaagcuacaauaug

SEQ ID NO: 3203803 - RNA, 19 nt, Artificial Sequence
  Description of Artificial Sequence: Synthetic oligonucleotide
aaacaaauucacauuuaac

SEQ ID NO: 3203804 - RNA, 19 nt, Artificial Sequence
  Description of Artificial Sequence: Synthetic oligonucleotide
aaauucuuuuguacaaugg

SEQ ID NO: 3203805 - RNA, 19 nt, Artificial Sequence
  Description of Artificial Sequence: Synthetic oligonucleotide
ucuuuuguacaaugguggg

SEQ ID NO: 3203806 - RNA, 19 nt, Artificial Sequence
  Description of Artificial Sequence: Synthetic oligonucleotide
uaacaagcuacaauauggc

SEQ ID NO: 3203807 - RNA, 19 nt, Artificial Sequence
  Description of Artificial Sequence: Synthetic oligonucleotide
acaauggugggagaagucc

SEQ ID NO: 3203808 - RNA, 19 nt, Artificial Sequence
  Description of Artificial Sequence: Synthetic oligonucleotide
gauacguuccugcucacgc

SEQ ID NO: 3203809 - RNA, 19 nt, Artificial Sequence
  Description of Artificial Sequence: Synthetic oligonucleotide
ucacucauucucuuguuag

SEQ ID NO: 3203810 - RNA, 19 nt, Artificial Sequence
  Description of Artificial Sequence: Synthetic oligonucleotide
cauuuaacaagcuacaaua

SEQ ID NO: 3203811 - RNA, 19 nt, Artificial Sequence
  Description of Artificial Sequence: Synthetic oligonucleotide
aacaagcuacaauauggca

SEQ ID NO: 3203812 - RNA, 19 nt, Artificial Sequence
  Description of Artificial Sequence: Synthetic oligonucleotide
auggcguucaggguaaugc

SEQ ID NO: 3203813 - RNA, 19 nt, Artificial Sequence
  Description of Artificial Sequence: Synthetic oligonucleotide
aagucuccggcuguguucc

SEQ ID NO: 3203814 - RNA, 19 nt, Artificial Sequence
  Description of Artificial Sequence: Synthetic oligonucleotide
acaugcuccucucaccacc

SEQ ID NO: 3203815 - RNA, 19 nt, Artificial Sequence
  Description of Artificial Sequence: Synthetic oligonucleotide
acaagcuacaauauggcag

SEQ ID NO: 3203816 - RNA, 19 nt, Artificial Sequence
  Description of Artificial Sequence: Synthetic oligonucleotide
aaggccugcgcacugcagg

SEQ ID NO: 3203817 - RNA, 19 nt, Artificial Sequence
  Description of Artificial Sequence: Synthetic oligonucleotide
agugguagcggucauccag

SEQ ID NO: 3203818 - RNA, 19 nt, Artificial Sequence
  Description of Artificial Sequence: Synthetic oligonucleotide
aaucacauggccacgugag

SEQ ID NO: 3203819 - RNA, 19 nt, Artificial Sequence
  Description of Artificial Sequence: Synthetic oligonucleotide
aagcgggcaucacugggcc

SEQ ID NO: 3203820 - RNA, 19 nt, Artificial Sequence
  Description of Artificial Sequence: Synthetic oligonucleotide
cuuguuagagcuguagccc

SEQ ID NO: 3203821 - RNA, 19 nt, Artificial Sequence
  Description of Artificial Sequence: Synthetic oligonucleotide
agagcuguagccccagccg

SEQ ID NO: 3203822 - RNA, 19 nt, Artificial Sequence
  Description of Artificial Sequence: Synthetic oligonucleotide
acgccggccauccacaucg

SEQ ID NO: 3203823 - RNA, 19 nt, Artificial Sequence
  Description of Artificial Sequence: Synthetic oligonucleotide
aaccaaaaugaaaacaaau

SEQ ID NO: 3203824 - RNA, 19 nt, Artificial Sequence
  Description of Artificial Sequence: Synthetic oligonucleotide
uccaucaugccuccgucag

SEQ ID NO: 3203825 - RNA, 19 nt, Artificial Sequence
  Description of Artificial Sequence: Synthetic oligonucleotide
uggccaguaggcaucauca

SEQ ID NO: 3203826 - RNA, 19 nt, Artificial Sequence
  Description of Artificial Sequence: Synthetic oligonucleotide
ugacaggacacagagguca

SEQ ID NO: 3203827 - RNA, 19 nt, Artificial Sequence
  Description of Artificial Sequence: Synthetic oligonucleotide
aauauggcagcagauuuaa

SEQ ID NO: 3203828 - RNA, 19 nt, Artificial Sequence
  Description of Artificial Sequence: Synthetic oligonucleotide
guaggcaucaucacgccgg

SEQ ID NO: 3203829 - RNA, 19 nt, Artificial Sequence
  Description of Artificial Sequence: Synthetic oligonucleotide
ugacaugccaccucgguuc

SEQ ID NO: 3203830 - RNA, 19 nt, Artificial Sequence
  Description of Artificial Sequence: Synthetic oligonucleotide
acaauauggcagcagauuu

SEQ ID NO: 3203831 - RNA, 19 nt, Artificial Sequence
  Description of Artificial Sequence: Synthetic oligonucleotide
gugggagaaguccugacag

SEQ ID NO: 3203832 - RNA, 19 nt, Artificial Sequence
  Description of Artificial Sequence: Synthetic oligonucleotide
acgguggauacguuccugc

SEQ ID NO: 3203833 - RNA, 19 nt, Artificial Sequence
  Description of Artificial Sequence: Synthetic oligonucleotide
augaaaacaaauucacauu

SEQ ID NO: 3203834 - RNA, 19 nt, Artificial Sequence
  Description of Artificial Sequence: Synthetic oligonucleotide
auucuuuuguacaauggug

SEQ ID NO: 3203835 - RNA, 19 nt, Artificial Sequence
  Description of Artificial Sequence: Synthetic oligonucleotide
uguggccaggcccugagug

SEQ ID NO: 3203836 - RNA, 19 nt, Artificial Sequence
  Description of Artificial Sequence: Synthetic oligonucleotide
auacguuccugcucacgcc

SEQ ID NO: 3203837 - RNA, 19 nt, Artificial Sequence
  Description of Artificial Sequence: Synthetic oligonucleotide
ucggccuucacucauucuc

SEQ ID NO: 3203838 - RNA, 19 nt, Artificial Sequence
  Description of Artificial Sequence: Synthetic oligonucleotide
cucacgguggauacguucc

SEQ ID NO: 3203839 - RNA, 19 nt, Artificial Sequence
  Description of Artificial Sequence: Synthetic oligonucleotide
accucuugugcucacgcuc

SEQ ID NO: 3203840 - RNA, 19 nt, Artificial Sequence
  Description of Artificial Sequence: Synthetic oligonucleotide
ugcccggucaucuucaagu

SEQ ID NO: 3203841 - RNA, 19 nt, Artificial Sequence
  Description of Artificial Sequence: Synthetic oligonucleotide
ugaguggccagacaugcuc

SEQ ID NO: 3203842 - RNA, 19 nt, Artificial Sequence
  Description of Artificial Sequence: Synthetic oligonucleotide
uagagcuguagccccagcc

SEQ ID NO: 3203843 - RNA, 19 nt, Artificial Sequence
  Description of Artificial Sequence: Synthetic oligonucleotide
acacagaggucacacagcu

SEQ ID NO: 3203844 - RNA, 19 nt, Artificial Sequence
  Description of Artificial Sequence: Synthetic oligonucleotide
ucugucucccaucaucggu

SEQ ID NO: 3203845 - RNA, 19 nt, Artificial Sequence
  Description of Artificial Sequence: Synthetic oligonucleotide
ucaucggucugagugguag

SEQ ID NO: 3203846 - RNA, 19 nt, Artificial Sequence
  Description of Artificial Sequence: Synthetic oligonucleotide
cucuuguuagagcuguagc

SEQ ID NO: 3203847 - RNA, 19 nt, Artificial Sequence
  Description of Artificial Sequence: Synthetic oligonucleotide
aaagccucccugcaucccu

SEQ ID NO: 3203848 - RNA, 19 nt, Artificial Sequence
  Description of Artificial Sequence: Synthetic oligonucleotide
gaaacugccacgcccugac

SEQ ID NO: 3203849 - RNA, 19 nt, Artificial Sequence
  Description of Artificial Sequence: Synthetic oligonucleotide
ucucuuguuagagcuguag

SEQ ID NO: 3203850 - RNA, 19 nt, Artificial Sequence
  Description of Artificial Sequence: Synthetic oligonucleotide
cucauucucuuguuagagc

SEQ ID NO: 3203851 - RNA, 19 nt, Artificial Sequence
  Description of Artificial Sequence: Synthetic oligonucleotide
uguagccccagccgucucg

SEQ ID NO: 3203852 - RNA, 19 nt, Artificial Sequence
  Description of Artificial Sequence: Synthetic oligonucleotide
accaaaaugaaaacaaauu

SEQ ID NO: 3203853 - RNA, 19 nt, Artificial Sequence
  Description of Artificial Sequence: Synthetic oligonucleotide
guucaggcccuccauggcg

SEQ ID NO: 3203854 - RNA, 19 nt, Artificial Sequence
  Description of Artificial Sequence: Synthetic oligonucleotide
ggacacagaggucacacag

SEQ ID NO: 3203855 - RNA, 19 nt, Artificial Sequence
  Description of Artificial Sequence: Synthetic oligonucleotide
auucacauuuaacaagcua

SEQ ID NO: 3203856 - RNA, 19 nt, Artificial Sequence
  Description of Artificial Sequence: Synthetic oligonucleotide
ggcgcucuugcucauagcg

SEQ ID NO: 3203857 - RNA, 19 nt, Artificial Sequence
  Description of Artificial Sequence: Synthetic oligonucleotide
aucuucaagucuccggcug

SEQ ID NO: 3203858 - RNA, 19 nt, Artificial Sequence
  Description of Artificial Sequence: Synthetic oligonucleotide
guggauacguuccugcuca

SEQ ID NO: 3203859 - RNA, 19 nt, Artificial Sequence
  Description of Artificial Sequence: Synthetic oligonucleotide
ugggagaaguccugacagg

SEQ ID NO: 3203860 - RNA, 19 nt, Artificial Sequence
  Description of Artificial Sequence: Synthetic oligonucleotide
ccaguaggcaucaucacgc

SEQ ID NO: 3203861 - RNA, 19 nt, Artificial Sequence
  Description of Artificial Sequence: Synthetic oligonucleotide
accuugccaccucuugugc

SEQ ID NO: 3203862 - RNA, 19 nt, Artificial Sequence
  Description of Artificial Sequence: Synthetic oligonucleotide
ucuucaagucuccggcugu

SEQ ID NO: 3203863 - RNA, 19 nt, Artificial Sequence
  Description of Artificial Sequence: Synthetic oligonucleotide
uacguuccugcucacgccu

SEQ ID NO: 3203864 - RNA, 19 nt, Artificial Sequence
  Description of Artificial Sequence: Synthetic oligonucleotide
auucucuuguuagagcugu

SEQ ID NO: 3203865 - RNA, 19 nt, Artificial Sequence
  Description of Artificial Sequence: Synthetic oligonucleotide
gaaucacauggccacguga

SEQ ID NO: 3203866 - RNA, 19 nt, Artificial Sequence
  Description of Artificial Sequence: Synthetic oligonucleotide
aggggcgaaacugccacgc

SEQ ID NO: 3203867 - RNA, 19 nt, Artificial Sequence
  Description of Artificial Sequence: Synthetic oligonucleotide
caucccuccacguggaauc

SEQ ID NO: 3203868 - RNA, 19 nt, Artificial Sequence
  Description of Artificial Sequence: Synthetic oligonucleotide
guagcggucauccagugcu

SEQ ID NO: 3203869 - RNA, 19 nt, Artificial Sequence
  Description of Artificial Sequence: Synthetic oligonucleotide
uacaauauggcagcagauu

SEQ ID NO: 3203870 - RNA, 19 nt, Artificial Sequence
  Description of Artificial Sequence: Synthetic oligonucleotide
uucacucauucucuuguua

SEQ ID NO: 3203871 - RNA, 19 nt, Artificial Sequence
  Description of Artificial Sequence: Synthetic oligonucleotide
aucggucugagugguagcg

SEQ ID NO: 3203872 - RNA, 19 nt, Artificial Sequence
  Description of Artificial Sequence: Synthetic oligonucleotide
cacguggaaucacauggcc

SEQ ID NO: 3203873 - RNA, 19 nt, Artificial Sequence
  Description of Artificial Sequence: Synthetic oligonucleotide
caucguaaggccugcgcac

SEQ ID NO: 3203874 - RNA, 19 nt, Artificial Sequence
  Description of Artificial Sequence: Synthetic oligonucleotide
auuuaacaagcuacaauau

SEQ ID NO: 3203875 - RNA, 19 nt, Artificial Sequence
  Description of Artificial Sequence: Synthetic oligonucleotide
uacaauggugggagaaguc

SEQ ID NO: 3203876 - RNA, 19 nt, Artificial Sequence
  Description of Artificial Sequence: Synthetic oligonucleotide
ucgagagucccggccaugg

SEQ ID NO: 3203877 - RNA, 19 nt, Artificial Sequence
  Description of Artificial Sequence: Synthetic oligonucleotide
gccaguaggcaucaucacg

SEQ ID NO: 3203878 - RNA, 19 nt, Artificial Sequence
  Description of Artificial Sequence: Synthetic oligonucleotide
uggcuucuggccaguaggc

SEQ ID NO: 3203879 - RNA, 19 nt, Artificial Sequence
  Description of Artificial Sequence: Synthetic oligonucleotide
cucgguucaucauguggcc

SEQ ID NO: 3203880 - RNA, 19 nt, Artificial Sequence
  Description of Artificial Sequence: Synthetic oligonucleotide
gcuacaauauggcagcaga

SEQ ID NO: 3203881 - RNA, 19 nt, Artificial Sequence
  Description of Artificial Sequence: Synthetic oligonucleotide
ccucgguucaucauguggc

SEQ ID NO: 3203882 - RNA, 19 nt, Artificial Sequence
  Description of Artificial Sequence: Synthetic oligonucleotide
uggccagacaugcuccucu

SEQ ID NO: 3203883 - RNA, 19 nt, Artificial Sequence
  Description of Artificial Sequence: Synthetic oligonucleotide
cugucucccaucaucgguc

SEQ ID NO: 3203884 - RNA, 19 nt, Artificial Sequence
  Description of Artificial Sequence: Synthetic oligonucleotide
uuuguacaauggugggaga

SEQ ID NO: 3203885 - RNA, 19 nt, Artificial Sequence
  Description of Artificial Sequence: Synthetic oligonucleotide
agugcugcccgcuuggcuu

SEQ ID NO: 3203886 - RNA, 19 nt, Artificial Sequence
  Description of Artificial Sequence: Synthetic oligonucleotide
cacaucguaaggccugcgc

SEQ ID NO: 3203887 - RNA, 19 nt, Artificial Sequence
  Description of Artificial Sequence: Synthetic oligonucleotide
cacgugaggcuccaccagg

SEQ ID NO: 3203888 - RNA, 19 nt, Artificial Sequence
  Description of Artificial Sequence: Synthetic oligonucleotide
cuugccaccucuugugcuc

SEQ ID NO: 3203889 - RNA, 19 nt, Artificial Sequence
  Description of Artificial Sequence: Synthetic oligonucleotide
cucauagcgcagcuccugc

SEQ ID NO: 3203890 - RNA, 19 nt, Artificial Sequence
  Description of Artificial Sequence: Synthetic oligonucleotide
aggguaaugcuguccuucu

SEQ ID NO: 3203891 - RNA, 19 nt, Artificial Sequence
  Description of Artificial Sequence: Synthetic oligonucleotide
ucuguccuccaaagccucc

SEQ ID NO: 3203892 - RNA, 19 nt, Artificial Sequence
  Description of Artificial Sequence: Synthetic oligonucleotide
uggcguucaggguaaugcu

SEQ ID NO: 3203893 - RNA, 19 nt, Artificial Sequence
  Description of Artificial Sequence: Synthetic oligonucleotide
gugaggcuccaccaggggc

SEQ ID NO: 3203894 - RNA, 19 nt, Artificial Sequence
  Description of Artificial Sequence: Synthetic oligonucleotide
uaggcaucaucacgccggc

SEQ ID NO: 3203895 - RNA, 19 nt, Artificial Sequence
  Description of Artificial Sequence: Synthetic oligonucleotide
caccuugccaccucuugug

SEQ ID NO: 3203896 - RNA, 19 nt, Artificial Sequence
  Description of Artificial Sequence: Synthetic oligonucleotide
caggugcucaguagcggcg

SEQ ID NO: 3203897 - RNA, 19 nt, Artificial Sequence
  Description of Artificial Sequence: Synthetic oligonucleotide
auuaauaugaucuaaacau

SEQ ID NO: 3203898 - RNA, 19 nt, Artificial Sequence
  Description of Artificial Sequence: Synthetic oligonucleotide
aaauaaaucuaucauagga

SEQ ID NO: 3203899 - RNA, 19 nt, Artificial Sequence
  Description of Artificial Sequence: Synthetic oligonucleotide
uaaaacacaauauaguuca

SEQ ID NO: 3203900 - RNA, 19 nt, Artificial Sequence
  Description of Artificial Sequence: Synthetic oligonucleotide
aaugauaagaucuucaguu

SEQ ID NO: 3203901 - RNA, 19 nt, Artificial Sequence
  Description of Artificial Sequence: Synthetic oligonucleotide
uauaauauuuauuuaaaac

SEQ ID NO: 3203902 - RNA, 19 nt, Artificial Sequence
  Description of Artificial Sequence: Synthetic oligonucleotide
uuaacuagcuaauacagag

SEQ ID NO: 3203903 - RNA, 19 nt, Artificial Sequence
  Description of Artificial Sequence: Synthetic oligonucleotide
ucaguauacaaucacuugg

SEQ ID NO: 3203904 - RNA, 19 nt, Artificial Sequence
  Description of Artificial Sequence: Synthetic oligonucleotide
ggaaauaugauucaaauug

SEQ ID NO: 3203905 - RNA, 19 nt, Artificial Sequence
  Description of Artificial Sequence: Synthetic oligonucleotide
aaguuuauuaauaugaucu

SEQ ID NO: 3203906 - RNA, 19 nt, Artificial Sequence
  Description of Artificial Sequence: Synthetic oligonucleotide
cuuuuaauaaugaaaggcc

SEQ ID NO: 3203907 - RNA, 19 nt, Artificial Sequence
  Description of Artificial Sequence: Synthetic oligonucleotide
aggauuguaagacagaaag

SEQ ID NO: 3203908 - RNA, 19 nt, Artificial Sequence
  Description of Artificial Sequence: Synthetic oligonucleotide
acagaaaggacuuaaagug

SEQ ID NO: 3203909 - RNA, 19 nt, Artificial Sequence
  Description of Artificial Sequence: Synthetic oligonucleotide
uauacaaucacuugguucu

SEQ ID NO: 3203910 - RNA, 19 nt, Artificial Sequence
  Description of Artificial Sequence: Synthetic oligonucleotide
aaacuuguucauugcaucc

SEQ ID NO: 3203911 - RNA, 19 nt, Artificial Sequence
  Description of Artificial Sequence: Synthetic oligonucleotide
cuaaacauggaucauauug

SEQ ID NO: 3203912 - RNA, 19 nt, Artificial Sequence
  Description of Artificial Sequence: Synthetic oligonucleotide
uucaaauugagccagcgug

SEQ ID NO: 3203913 - RNA, 19 nt, Artificial Sequence
  Description of Artificial Sequence: Synthetic oligonucleotide
uauugauaaagauaggaca

SEQ ID NO: 3203914 - RNA, 19 nt, Artificial Sequence
  Description of Artificial Sequence: Synthetic oligonucleotide
aauaugauucaaauugagc

SEQ ID NO: 3203915 - RNA, 19 nt, Artificial Sequence
  Description of Artificial Sequence: Synthetic oligonucleotide
aaagauaggacagaaaaga

SEQ ID NO: 3203916 - RNA, 19 nt, Artificial Sequence
  Description of Artificial Sequence: Synthetic oligonucleotide
uuuauugacaucaguauac

SEQ ID NO: 3203917 - RNA, 19 nt, Artificial Sequence
  Description of Artificial Sequence: Synthetic oligonucleotide
agauuuaacuagcuaauac

SEQ ID NO: 3203918 - RNA, 19 nt, Artificial Sequence
  Description of Artificial Sequence: Synthetic oligonucleotide
aaaauaaaucuaucauagg

SEQ ID NO: 3203919 - RNA, 19 nt, Artificial Sequence
  Description of Artificial Sequence: Synthetic oligonucleotide
aaauuuuaaauuggaaguc

SEQ ID NO: 3203920 - RNA, 19 nt, Artificial Sequence
  Description of Artificial Sequence: Synthetic oligonucleotide
cuagcuaauacagagaacc

SEQ ID NO: 3203921 - RNA, 19 nt, Artificial Sequence
  Description of Artificial Sequence: Synthetic oligonucleotide
uuuuaauaaugaaaggcca

SEQ ID NO: 3203922 - RNA, 19 nt, Artificial Sequence
  Description of Artificial Sequence: Synthetic oligonucleotide
aacacaauauaguucagga

SEQ ID NO: 3203923 - RNA, 19 nt, Artificial Sequence
  Description of Artificial Sequence: Synthetic oligonucleotide
uauaguucaggauuguaag

SEQ ID NO: 3203924 - RNA, 19 nt, Artificial Sequence
  Description of Artificial Sequence: Synthetic oligonucleotide
ggaaauuuuaaauuggaag

SEQ ID NO: 3203925 - RNA, 19 nt, Artificial Sequence
  Description of Artificial Sequence: Synthetic oligonucleotide
ugauaagaucuucaguugg

SEQ ID NO: 3203926 - RNA, 19 nt, Artificial Sequence
  Description of Artificial Sequence: Synthetic oligonucleotide
aacauaagauacuauacaa

SEQ ID NO: 3203927 - RNA, 19 nt, Artificial Sequence
  Description of Artificial Sequence: Synthetic oligonucleotide
aaaacuuugauuccauuaa

SEQ ID NO: 3203928 - RNA, 19 nt, Artificial Sequence
  Description of Artificial Sequence: Synthetic oligonucleotide
acauggaucauauugauaa

SEQ ID NO: 3203929 - RNA, 19 nt, Artificial Sequence
  Description of Artificial Sequence: Synthetic oligonucleotide
ucuaaaauauaauauuuau

SEQ ID NO: 3203930 - RNA, 19 nt, Artificial Sequence
  Description of Artificial Sequence: Synthetic oligonucleotide
aggacaagcuuauugaagg

SEQ ID NO: 3203931 - RNA, 19 nt, Artificial Sequence
  Description of Artificial Sequence: Synthetic oligonucleotide
aaagguucuguuuuauaag

SEQ ID NO: 3203932 - RNA, 19 nt, Artificial Sequence
  Description of Artificial Sequence: Synthetic oligonucleotide
cuaggauaacauaagauac

SEQ ID NO: 3203933 - RNA, 19 nt, Artificial Sequence
  Description of Artificial Sequence: Synthetic oligonucleotide
uaacauaagauacuauaca

SEQ ID NO: 3203934 - RNA, 19 nt, Artificial Sequence
  Description of Artificial Sequence: Synthetic oligonucleotide
auuuaaacuuguucauugc

SEQ ID NO: 3203935 - RNA, 19 nt, Artificial Sequence
  Description of Artificial Sequence: Synthetic oligonucleotide
agaagauuuaacuagcuaa

SEQ ID NO: 3203936 - RNA, 19 nt, Artificial Sequence
  Description of Artificial Sequence: Synthetic oligonucleotide
agacaguagucacaaaacc

SEQ ID NO: 3203937 - RNA, 19 nt, Artificial Sequence
  Description of Artificial Sequence: Synthetic oligonucleotide
aucauaggaaauaugauuc

SEQ ID NO: 3203938 - RNA, 19 nt, Artificial Sequence
  Description of Artificial Sequence: Synthetic oligonucleotide
uaaagauaggacagaaaag

SEQ ID NO: 3203939 - RNA, 19 nt, Artificial Sequence
  Description of Artificial Sequence: Synthetic oligonucleotide
aaaauucaguuucucagcu

SEQ ID NO: 3203940 - RNA, 19 nt, Artificial Sequence
  Description of Artificial Sequence: Synthetic oligonucleotide
ucuaggauaacauaagaua

SEQ ID NO: 3203941 - RNA, 19 nt, Artificial Sequence
  Description of Artificial Sequence: Synthetic oligonucleotide
uuaaaacacaauauaguuc

SEQ ID NO: 3203942 - RNA, 19 nt, Artificial Sequence
  Description of Artificial Sequence: Synthetic oligonucleotide
uaugaucuaaacauggauc

SEQ ID NO: 3203943 - RNA, 19 nt, Artificial Sequence
  Description of Artificial Sequence: Synthetic oligonucleotide
uuuuauaaggccuuuggau

SEQ ID NO: 3203944 - RNA, 19 nt, Artificial Sequence
  Description of Artificial Sequence: Synthetic oligonucleotide
auaacauaagauacuauac

SEQ ID NO: 3203945 - RNA, 19 nt, Artificial Sequence
  Description of Artificial Sequence: Synthetic oligonucleotide
ucaaauugagccagcgugg

SEQ ID NO: 3203946 - RNA, 19 nt, Artificial Sequence
  Description of Artificial Sequence: Synthetic oligonucleotide
uuguaagacagaaaggacu

SEQ ID NO: 3203947 - RNA, 19 nt, Artificial Sequence
  Description of Artificial Sequence: Synthetic oligonucleotide
ucagcaaacucccaagaag

SEQ ID NO: 3203948 - RNA, 19 nt, Artificial Sequence
  Description of Artificial Sequence: Synthetic oligonucleotide
aacuagcuaauacagagaa

SEQ ID NO: 3203949 - RNA, 19 nt, Artificial Sequence
  Description of Artificial Sequence: Synthetic oligonucleotide
uuauuaauaugaucuaaac

SEQ ID NO: 3203950 - RNA, 19 nt, Artificial Sequence
  Description of Artificial Sequence: Synthetic oligonucleotide
acucccaagaagcagagag

SEQ ID NO: 3203951 - RNA, 19 nt, Artificial Sequence
  Description of Artificial Sequence: Synthetic oligonucleotide
gauaacauaagauacuaua

SEQ ID NO: 3203952 - RNA, 19 nt, Artificial Sequence
  Description of Artificial Sequence: Synthetic oligonucleotide
uuuaaacuuguucauugca

SEQ ID NO: 3203953 - RNA, 19 nt, Artificial Sequence
  Description of Artificial Sequence: Synthetic oligonucleotide
gaaaacgccaugcagagga

SEQ ID NO: 3203954 - RNA, 19 nt, Artificial Sequence
  Description of Artificial Sequence: Synthetic oligonucleotide
auauugauaaagauaggac

SEQ ID NO: 3203955 - RNA, 19 nt, Artificial Sequence
  Description of Artificial Sequence: Synthetic oligonucleotide
auugauaaagauaggacag

SEQ ID NO: 3203956 - RNA, 19 nt, Artificial Sequence
  Description of Artificial Sequence: Synthetic oligonucleotide
uaugauucaaauugagcca

SEQ ID NO: 3203957 - RNA, 19 nt, Artificial Sequence
  Description of Artificial Sequence: Synthetic oligonucleotide
gauaggacagaaaagaaga

SEQ ID NO: 3203958 - RNA, 19 nt, Artificial Sequence
  Description of Artificial Sequence: Synthetic oligonucleotide
aaggccuuuggauaucagg

SEQ ID NO: 3203959 - RNA, 19 nt, Artificial Sequence
  Description of Artificial Sequence: Synthetic oligonucleotide
ugagacaguagucacaaaa

SEQ ID NO: 3203960 - RNA, 19 nt, Artificial Sequence
  Description of Artificial Sequence: Synthetic oligonucleotide
cauuuaaacuuguucauug

SEQ ID NO: 3203961 - RNA, 19 nt, Artificial Sequence
  Description of Artificial Sequence: Synthetic oligonucleotide
augaucuaaacauggauca

SEQ ID NO: 3203962 - RNA, 19 nt, Artificial Sequence
  Description of Artificial Sequence: Synthetic oligonucleotide
aauaaaucuaucauaggaa

SEQ ID NO: 3203963 - RNA, 19 nt, Artificial Sequence
  Description of Artificial Sequence: Synthetic oligonucleotide
aaacacaauauaguucagg

SEQ ID NO: 3203964 - RNA, 19 nt, Artificial Sequence
  Description of Artificial Sequence: Synthetic oligonucleotide
uugacaucaguauacaauc

SEQ ID NO: 3203965 - RNA, 19 nt, Artificial Sequence
  Description of Artificial Sequence: Synthetic oligonucleotide
agcuuauugaaggauagac

SEQ ID NO: 3203966 - RNA, 19 nt, Artificial Sequence
  Description of Artificial Sequence: Synthetic oligonucleotide
aacccaaagaaugauaaga

SEQ ID NO: 3203967 - RNA, 19 nt, Artificial Sequence
  Description of Artificial Sequence: Synthetic oligonucleotide
uuuauaaggccuuuggaua

SEQ ID NO: 3203968 - RNA, 19 nt, Artificial Sequence
  Description of Artificial Sequence: Synthetic oligonucleotide
aagaucuucaguuggugga

SEQ ID NO: 3203969 - RNA, 19 nt, Artificial Sequence
  Description of Artificial Sequence: Synthetic oligonucleotide
uaagaucuucaguuggugg

SEQ ID NO: 3203970 - RNA, 19 nt, Artificial Sequence
  Description of Artificial Sequence: Synthetic oligonucleotide
ugguggaaauuuuaaauug

SEQ ID NO: 3203971 - RNA, 19 nt, Artificial Sequence
  Description of Artificial Sequence: Synthetic oligonucleotide
aaagaaugauaagaucuuc

SEQ ID NO: 3203972 - RNA, 19 nt, Artificial Sequence
  Description of Artificial Sequence: Synthetic oligonucleotide
auuuaacuagcuaauacag

SEQ ID NO: 3203973 - RNA, 19 nt, Artificial Sequence
  Description of Artificial Sequence: Synthetic oligonucleotide
uccauuaaguuuauuaaua

SEQ ID NO: 3203974 - RNA, 19 nt, Artificial Sequence
  Description of Artificial Sequence: Synthetic oligonucleotide
auaaaucuaucauaggaaa

SEQ ID NO: 3203975 - RNA, 19 nt, Artificial Sequence
  Description of Artificial Sequence: Synthetic oligonucleotide
gauuccauuaaguuuauua

SEQ ID NO: 3203976 - RNA, 19 nt, Artificial Sequence
  Description of Artificial Sequence: Synthetic oligonucleotide
agaaaagaagauuuaacua

SEQ ID NO: 3203977 - RNA, 19 nt, Artificial Sequence
  Description of Artificial Sequence: Synthetic oligonucleotide
uuuaguccauuuaaacuug

SEQ ID NO: 3203978 - RNA, 19 nt, Artificial Sequence
  Description of Artificial Sequence: Synthetic oligonucleotide
gaacaucucacguucacug

SEQ ID NO: 3203979 - RNA, 19 nt, Artificial Sequence
  Description of Artificial Sequence: Synthetic oligonucleotide
uuuaauaaugaaaggccau

SEQ ID NO: 3203980 - RNA, 19 nt, Artificial Sequence
  Description of Artificial Sequence: Synthetic oligonucleotide
agacagaaaggacuuaaag

SEQ ID NO: 3203981 - RNA, 19 nt, Artificial Sequence
  Description of Artificial Sequence: Synthetic oligonucleotide
ucucucuaggauaacauaa

SEQ ID NO: 3203982 - RNA, 19 nt, Artificial Sequence
  Description of Artificial Sequence: Synthetic oligonucleotide
aaccugagagagaaaacgc

SEQ ID NO: 3203983 - RNA, 19 nt, Artificial Sequence
  Description of Artificial Sequence: Synthetic oligonucleotide
cacagcagcaaccugagag

SEQ ID NO: 3203984 - RNA, 19 nt, Artificial Sequence
  Description of Artificial Sequence: Synthetic oligonucleotide
uuuaacuagcuaauacaga

SEQ ID NO: 3203985 - RNA, 19 nt, Artificial Sequence
  Description of Artificial Sequence: Synthetic oligonucleotide
cuugaaucgaccacucugc

SEQ ID NO: 3203986 - RNA, 19 nt, Artificial Sequence
  Description of Artificial Sequence: Synthetic oligonucleotide
auuccauuaaguuuauuaa

SEQ ID NO: 3203987 - RNA, 19 nt, Artificial Sequence
  Description of Artificial Sequence: Synthetic oligonucleotide
uuaaacuuguucauugcau

SEQ ID NO: 3203988 - RNA, 19 nt, Artificial Sequence
  Description of Artificial Sequence: Synthetic oligonucleotide
cauaagauacuauacaaaa

SEQ ID NO: 3203989 - RNA, 19 nt, Artificial Sequence
  Description of Artificial Sequence: Synthetic oligonucleotide
aaaucuaucauaggaaaua

SEQ ID NO: 3203990 - RNA, 19 nt, Artificial Sequence
  Description of Artificial Sequence: Synthetic oligonucleotide
aacaucucacguucacugg

SEQ ID NO: 3203991 - RNA, 19 nt, Artificial Sequence
  Description of Artificial Sequence: Synthetic oligonucleotide
uuaauaaugaaaggccaug

SEQ ID NO: 3203992 - RNA, 19 nt, Artificial Sequence
  Description of Artificial Sequence: Synthetic oligonucleotide
gagaaaacgccaugcagag

SEQ ID NO: 3203993 - RNA, 19 nt, Artificial Sequence
  Description of Artificial Sequence: Synthetic oligonucleotide
uaggaaauaugauucaaau

SEQ ID NO: 3203994 - RNA, 19 nt, Artificial Sequence
  Description of Artificial Sequence: Synthetic oligonucleotide
uuggaagucaguuuauuaa

SEQ ID NO: 3203995 - RNA, 19 nt, Artificial Sequence
  Description of Artificial Sequence: Synthetic oligonucleotide
guccauuuaaacuuguuca

SEQ ID NO: 3203996 - RNA, 19 nt, Artificial Sequence
  Description of Artificial Sequence: Synthetic oligonucleotide
cauuaaguuuauuaauaug

SEQ ID NO: 3203997 - RNA, 19 nt, Artificial Sequence
  Description of Artificial Sequence: Synthetic oligonucleotide
aguaauucauucuucaccc

SEQ ID NO: 3203998 - RNA, 19 nt, Artificial Sequence
  Description of Artificial Sequence: Synthetic oligonucleotide
acaaagauggauuuguagc

SEQ ID NO: 3203999 - RNA, 19 nt, Artificial Sequence
  Description of Artificial Sequence: Synthetic oligonucleotide
aauauuguggaauggguuc

SEQ ID NO: 3204000 - RNA, 19 nt, Artificial Sequence
  Description of Artificial Sequence: Synthetic oligonucleotide
gauaaaaugccucucgugg

SEQ ID NO: 3204001 - RNA, 19 nt, Artificial Sequence
  Description of Artificial Sequence: Synthetic oligonucleotide
aaauguaugauauucucca

SEQ ID NO: 3204002 - RNA, 19 nt, Artificial Sequence
  Description of Artificial Sequence: Synthetic oligonucleotide
aaugguugcucuuagguug

SEQ ID NO: 3204003 - RNA, 19 nt, Artificial Sequence
  Description of Artificial Sequence: Synthetic oligonucleotide
uaggaauggaauauugugg

SEQ ID NO: 3204004 - RNA, 19 nt, Artificial Sequence
  Description of Artificial Sequence: Synthetic oligonucleotide
aaguagaguucauaauggc

SEQ ID NO: 3204005 - RNA, 19 nt, Artificial Sequence
  Description of Artificial Sequence: Synthetic oligonucleotide
aauggaauauuguggaaug

SEQ ID NO: 3204006 - RNA, 19 nt, Artificial Sequence
  Description of Artificial Sequence: Synthetic oligonucleotide
aauggcaccacucacucug

SEQ ID NO: 3204007 - RNA, 19 nt, Artificial Sequence
  Description of Artificial Sequence: Synthetic oligonucleotide
uaugauauucuccacgaug

SEQ ID NO: 3204008 - RNA, 19 nt, Artificial Sequence
  Description of Artificial Sequence: Synthetic oligonucleotide
uaugucaucuuucucuagg

SEQ ID NO: 3204009 - RNA, 19 nt, Artificial Sequence
  Description of Artificial Sequence: Synthetic oligonucleotide
aaaguagaguucauaaugg

SEQ ID NO: 3204010 - RNA, 19 nt, Artificial Sequence
  Description of Artificial Sequence: Synthetic oligonucleotide
uaguaauucauucuucacc

SEQ ID NO: 3204011 - RNA, 19 nt, Artificial Sequence
  Description of Artificial Sequence: Synthetic oligonucleotide
ggagacaacacaaagaugg

SEQ ID NO: 3204012 - RNA, 19 nt, Artificial Sequence
  Description of Artificial Sequence: Synthetic oligonucleotide
cuugccagggauaaaaugc

SEQ ID NO: 3204013 - RNA, 19 nt, Artificial Sequence
  Description of Artificial Sequence: Synthetic oligonucleotide
gagaguuuuaagcuugugg

SEQ ID NO: 3204014 - RNA, 19 nt, Artificial Sequence
  Description of Artificial Sequence: Synthetic oligonucleotide
agaguuuuaagcuuguggu

SEQ ID NO: 3204015 - RNA, 19 nt, Artificial Sequence
  Description of Artificial Sequence: Synthetic oligonucleotide
uuaaugguugcucuuaggu

SEQ ID NO: 3204016 - RNA, 19 nt, Artificial Sequence
  Description of Artificial Sequence: Synthetic oligonucleotide
ccuaacuugaccuuaaugg

SEQ ID NO: 3204017 - RNA, 19 nt, Artificial Sequence
  Description of Artificial Sequence: Synthetic oligonucleotide
aauguaugauauucuccac

SEQ ID NO: 3204018 - RNA, 19 nt, Artificial Sequence
  Description of Artificial Sequence: Synthetic oligonucleotide
ucaggauuaaguuaucgga

SEQ ID NO: 3204019 - RNA, 19 nt, Artificial Sequence
  Description of Artificial Sequence: Synthetic oligonucleotide
augauauucuccacgaugc

SEQ ID NO: 3204020 - RNA, 19 nt, Artificial Sequence
  Description of Artificial Sequence: Synthetic oligonucleotide
gaugaaauguaugauauuc

SEQ ID NO: 3204021 - RNA, 19 nt, Artificial Sequence
  Description of Artificial Sequence: Synthetic oligonucleotide
agugacaugugguuucugc

SEQ ID NO: 3204022 - RNA, 19 nt, Artificial Sequence
  Description of Artificial Sequence: Synthetic oligonucleotide
uuuguggaagagauugugg

SEQ ID NO: 3204023 - RNA, 19 nt, Artificial Sequence
  Description of Artificial Sequence: Synthetic oligonucleotide
uuaagcuugugguaguugc

SEQ ID NO: 3204024 - RNA, 19 nt, Artificial Sequence
  Description of Artificial Sequence: Synthetic oligonucleotide
aauggguuccagcaagauc

SEQ ID NO: 3204025 - RNA, 19 nt, Artificial Sequence
  Description of Artificial Sequence: Synthetic oligonucleotide
uguaugauauucuccacga

SEQ ID NO: 3204026 - RNA, 19 nt, Artificial Sequence
  Description of Artificial Sequence: Synthetic oligonucleotide
cuugcuuuucuccacaggc

SEQ ID NO: 3204027 - RNA, 19 nt, Artificial Sequence
  Description of Artificial Sequence: Synthetic oligonucleotide
aucaggauuaaguuaucgg

SEQ ID NO: 3204028 - RNA, 19 nt, Artificial Sequence
  Description of Artificial Sequence: Synthetic oligonucleotide
auguaugauauucuccacg

SEQ ID NO: 3204029 - RNA, 19 nt, Artificial Sequence
  Description of Artificial Sequence: Synthetic oligonucleotide
uucucgaugaaauguauga

SEQ ID NO: 3204030 - RNA, 19 nt, Artificial Sequence
  Description of Artificial Sequence: Synthetic oligonucleotide
uaaguuaucggauccuuug

SEQ ID NO: 3204031 - RNA, 19 nt, Artificial Sequence
  Description of Artificial Sequence: Synthetic oligonucleotide
aaaugccucucguggaggc

SEQ ID NO: 3204032 - RNA, 19 nt, Artificial Sequence
  Description of Artificial Sequence: Synthetic oligonucleotide
cuuucucuagguuugguag

SEQ ID NO: 3204033 - RNA, 19 nt, Artificial Sequence
  Description of Artificial Sequence: Synthetic oligonucleotide
cuaggaauggaauauugug

SEQ ID NO: 3204034 - RNA, 19 nt, Artificial Sequence
  Description of Artificial Sequence: Synthetic oligonucleotide
ugccaugagaguuuuaagc

SEQ ID NO: 3204035 - RNA, 19 nt, Artificial Sequence
  Description of Artificial Sequence: Synthetic oligonucleotide
uguggaauggguuccagca

SEQ ID NO: 3204036 - RNA, 19 nt, Artificial Sequence
  Description of Artificial Sequence: Synthetic oligonucleotide
ucgaugaaauguaugauau

SEQ ID NO: 3204037 - RNA, 19 nt, Artificial Sequence
  Description of Artificial Sequence: Synthetic oligonucleotide
uccuuuguggaagagauug

SEQ ID NO: 3204038 - RNA, 19 nt, Artificial Sequence
  Description of Artificial Sequence: Synthetic oligonucleotide
ucacucuggaugaaguggg

SEQ ID NO: 3204039 - RNA, 19 nt, Artificial Sequence
  Description of Artificial Sequence: Synthetic oligonucleotide
auaauggcaccacucacuc

SEQ ID NO: 3204040 - RNA, 19 nt, Artificial Sequence
  Description of Artificial Sequence: Synthetic oligonucleotide
uucauaauggcaccacuca

SEQ ID NO: 3204041 - RNA, 19 nt, Artificial Sequence
  Description of Artificial Sequence: Synthetic oligonucleotide
ucaucuuucucuagguuug

SEQ ID NO: 3204042 - RNA, 19 nt, Artificial Sequence
  Description of Artificial Sequence: Synthetic oligonucleotide
aacacaaagauggauuugu

SEQ ID NO: 3204043 - RNA, 19 nt, Artificial Sequence
  Description of Artificial Sequence: Synthetic oligonucleotide
ugaaauguaugauauucuc

SEQ ID NO: 3204044 - RNA, 19 nt, Artificial Sequence
  Description of Artificial Sequence: Synthetic oligonucleotide
uuugguaguaauucauucu

SEQ ID NO: 3204045 - RNA, 19 nt, Artificial Sequence
  Description of Artificial Sequence: Synthetic oligonucleotide
aguuuuaagcuugugguag

SEQ ID NO: 3204046 - RNA, 19 nt, Artificial Sequence
  Description of Artificial Sequence: Synthetic oligonucleotide
aggauuaaguuaucggauc

SEQ ID NO: 3204047 - RNA, 19 nt, Artificial Sequence
  Description of Artificial Sequence: Synthetic oligonucleotide
uggaauauuguggaauggg

SEQ ID NO: 3204048 - RNA, 19 nt, Artificial Sequence
  Description of Artificial Sequence: Synthetic oligonucleotide
aagaucaggauuaaguuau

SEQ ID NO: 3204049 - RNA, 19 nt, Artificial Sequence
  Description of Artificial Sequence: Synthetic oligonucleotide
guuaucggauccuuugugg

SEQ ID NO: 3204050 - RNA, 19 nt, Artificial Sequence
  Description of Artificial Sequence: Synthetic oligonucleotide
uaaaaugccucucguggag

SEQ ID NO: 3204051 - RNA, 19 nt, Artificial Sequence
  Description of Artificial Sequence: Synthetic oligonucleotide
gaaauguaugauauucucc

SEQ ID NO: 3204052 - RNA, 19 nt, Artificial Sequence
  Description of Artificial Sequence: Synthetic oligonucleotide
aggaauggaauauugugga

SEQ ID NO: 3204053 - RNA, 19 nt, Artificial Sequence
  Description of Artificial Sequence: Synthetic oligonucleotide
uccaaauaaguccuccgug

SEQ ID NO: 3204054 - RNA, 19 nt, Artificial Sequence
  Description of Artificial Sequence: Synthetic oligonucleotide
auucuuaucccuguaagug

SEQ ID NO: 3204055 - RNA, 19 nt, Artificial Sequence
  Description of Artificial Sequence: Synthetic oligonucleotide
aaagauggauuuguagcuc

SEQ ID NO: 3204056 - RNA, 19 nt, Artificial Sequence
  Description of Artificial Sequence: Synthetic oligonucleotide
agggauaaaaugccucucg

SEQ ID NO: 3204057 - RNA, 19 nt, Artificial Sequence
  Description of Artificial Sequence: Synthetic oligonucleotide
ugugguuucugccugguuc

SEQ ID NO: 3204058 - RNA, 19 nt, Artificial Sequence
  Description of Artificial Sequence: Synthetic oligonucleotide
ggauuuguagcucuucucg

SEQ ID NO: 3204059 - RNA, 19 nt, Artificial Sequence
  Description of Artificial Sequence: Synthetic oligonucleotide
uggaauggguuccagcaag

SEQ ID NO: 3204060 - RNA, 19 nt, Artificial Sequence
  Description of Artificial Sequence: Synthetic oligonucleotide
auuccaaauaaguccuccg

SEQ ID NO: 3204061 - RNA, 19 nt, Artificial Sequence
  Description of Artificial Sequence: Synthetic oligonucleotide
uccacgaugcucuugccag

SEQ ID NO: 3204062 - RNA, 19 nt, Artificial Sequence
  Description of Artificial Sequence: Synthetic oligonucleotide
auauuguggaauggguucc

SEQ ID NO: 3204063 - RNA, 19 nt, Artificial Sequence
  Description of Artificial Sequence: Synthetic oligonucleotide
auggguuccagcaagauca

SEQ ID NO: 3204064 - RNA, 19 nt, Artificial Sequence
  Description of Artificial Sequence: Synthetic oligonucleotide
caugagaguuuuaagcuug

SEQ ID NO: 3204065 - RNA, 19 nt, Artificial Sequence
  Description of Artificial Sequence: Synthetic oligonucleotide
aagauggauuuguagcucu

SEQ ID NO: 3204066 - RNA, 19 nt, Artificial Sequence
  Description of Artificial Sequence: Synthetic oligonucleotide
uuguggaagagauuguggu

SEQ ID NO: 3204067 - RNA, 19 nt, Artificial Sequence
  Description of Artificial Sequence: Synthetic oligonucleotide
guagaguucauaauggcac

SEQ ID NO: 3204068 - RNA, 19 nt, Artificial Sequence
  Description of Artificial Sequence: Synthetic oligonucleotide
guggaagagauuguggugg

SEQ ID NO: 3204069 - RNA, 19 nt, Artificial Sequence
  Description of Artificial Sequence: Synthetic oligonucleotide
uccagcaagaucaggauua

SEQ ID NO: 3204070 - RNA, 19 nt, Artificial Sequence
  Description of Artificial Sequence: Synthetic oligonucleotide
uucuccacgaugcucuugc

SEQ ID NO: 3204071 - RNA, 19 nt, Artificial Sequence
  Description of Artificial Sequence: Synthetic oligonucleotide
ucuuaucccuguaagugac

SEQ ID NO: 3204072 - RNA, 19 nt, Artificial Sequence
  Description of Artificial Sequence: Synthetic oligonucleotide
aacuugaccuuaaugguug

SEQ ID NO: 3204073 - RNA, 19 nt, Artificial Sequence
  Description of Artificial Sequence: Synthetic oligonucleotide
cacaaagauggauuuguag

SEQ ID NO: 3204074 - RNA, 19 nt, Artificial Sequence
  Description of Artificial Sequence: Synthetic oligonucleotide
ucucguggaggcaaacccg

SEQ ID NO: 3204075 - RNA, 19 nt, Artificial Sequence
  Description of Artificial Sequence: Synthetic oligonucleotide
uuuguagcucuucucgaug

SEQ ID NO: 3204076 - RNA, 19 nt, Artificial Sequence
  Description of Artificial Sequence: Synthetic oligonucleotide
aaauaaguccuccgugcca

SEQ ID NO: 3204077 - RNA, 19 nt, Artificial Sequence
  Description of Artificial Sequence: Synthetic oligonucleotide
uugguaguaauucauucuu

SEQ ID NO: 3204078 - RNA, 19 nt, Artificial Sequence
  Description of Artificial Sequence: Synthetic oligonucleotide
uauucuuaucccuguaagu

SEQ ID NO: 3204079 - RNA, 19 nt, Artificial Sequence
  Description of Artificial Sequence: Synthetic oligonucleotide
ugcuaggaauggaauauug

SEQ ID NO: 3204080 - RNA, 19 nt, Artificial Sequence
  Description of Artificial Sequence: Synthetic oligonucleotide
gaucaggauuaaguuaucg

SEQ ID NO: 3204081 - RNA, 19 nt, Artificial Sequence
  Description of Artificial Sequence: Synthetic oligonucleotide
ugcuuuucuccacaggcca

SEQ ID NO: 3204082 - RNA, 19 nt, Artificial Sequence
  Description of Artificial Sequence: Synthetic oligonucleotide
uuccaaauaaguccuccgu

SEQ ID NO: 3204083 - RNA, 19 nt, Artificial Sequence
  Description of Artificial Sequence: Synthetic oligonucleotide
uugccagggauaaaaugcc

SEQ ID NO: 3204084 - RNA, 19 nt, Artificial Sequence
  Description of Artificial Sequence: Synthetic oligonucleotide
guugcucuuagguuggccc

SEQ ID NO: 3204085 - RNA, 19 nt, Artificial Sequence
  Description of Artificial Sequence: Synthetic oligonucleotide
uucuuaucccuguaaguga

SEQ ID NO: 3204086 - RNA, 19 nt, Artificial Sequence
  Description of Artificial Sequence: Synthetic oligonucleotide
ugugguaguugcuaggaau

SEQ ID NO: 3204087 - RNA, 19 nt, Artificial Sequence
  Description of Artificial Sequence: Synthetic oligonucleotide
ucuugccagggauaaaaug

SEQ ID NO: 3204088 - RNA, 19 nt, Artificial Sequence
  Description of Artificial Sequence: Synthetic oligonucleotide
cuagguuugguaguaauuc

SEQ ID NO: 3204089 - RNA, 19 nt, Artificial Sequence
  Description of Artificial Sequence: Synthetic oligonucleotide
agcaagaucaggauuaagu

SEQ ID NO: 3204090 - RNA, 19 nt, Artificial Sequence
  Description of Artificial Sequence: Synthetic oligonucleotide
auaaaaugccucucgugga

SEQ ID NO: 3204091 - RNA, 19 nt, Artificial Sequence
  Description of Artificial Sequence: Synthetic oligonucleotide
uucuccacaggccauucca

SEQ ID NO: 3204092 - RNA, 19 nt, Artificial Sequence
  Description of Artificial Sequence: Synthetic oligonucleotide
aaguuaucggauccuuugu

SEQ ID NO: 3204093 - RNA, 19 nt, Artificial Sequence
  Description of Artificial Sequence: Synthetic oligonucleotide
uuaucggauccuuugugga

SEQ ID NO: 3204094 - RNA, 19 nt, Artificial Sequence
  Description of Artificial Sequence: Synthetic oligonucleotide
auuguggugggcaaaguag

SEQ ID NO: 3204095 - RNA, 19 nt, Artificial Sequence
  Description of Artificial Sequence: Synthetic oligonucleotide
uguggaagagauuguggug

SEQ ID NO: 3204096 - RNA, 19 nt, Artificial Sequence
  Description of Artificial Sequence: Synthetic oligonucleotide
ggccauuccaaauaagucc

SEQ ID NO: 3204097 - RNA, 19 nt, Artificial Sequence
  Description of Artificial Sequence: Synthetic oligonucleotide
aauauaaucauguagagag

SEQ ID NO: 3204098 - RNA, 19 nt, Artificial Sequence
  Description of Artificial Sequence: Synthetic oligonucleotide
uuauaaagaaauauaauca

SEQ ID NO: 3204099 - RNA, 19 nt, Artificial Sequence
  Description of Artificial Sequence: Synthetic oligonucleotide
uaugguaagucauugaagg

SEQ ID NO: 3204100 - RNA, 19 nt, Artificial Sequence
  Description of Artificial Sequence: Synthetic oligonucleotide
aaacaguaaauucccaggc

SEQ ID NO: 3204101 - RNA, 19 nt, Artificial Sequence
  Description of Artificial Sequence: Synthetic oligonucleotide
uaaagaaauauaaucaugu

SEQ ID NO: 3204102 - RNA, 19 nt, Artificial Sequence
  Description of Artificial Sequence: Synthetic oligonucleotide
aguaacugcauucauacgg

SEQ ID NO: 3204103 - RNA, 19 nt, Artificial Sequence
  Description of Artificial Sequence: Synthetic oligonucleotide
ugagagauuauuaaaagcu

SEQ ID NO: 3204104 - RNA, 19 nt, Artificial Sequence
  Description of Artificial Sequence: Synthetic oligonucleotide
uuauuauaaagaaauauaa

SEQ ID NO: 3204105 - RNA, 19 nt, Artificial Sequence
  Description of Artificial Sequence: Synthetic oligonucleotide
aagaagugaaacuauaccu

SEQ ID NO: 3204106 - RNA, 19 nt, Artificial Sequence
  Description of Artificial Sequence: Synthetic oligonucleotide
aacuauaccuuuugaagac

SEQ ID NO: 3204107 - RNA, 19 nt, Artificial Sequence
  Description of Artificial Sequence: Synthetic oligonucleotide
acaguaacugcauucauac

SEQ ID NO: 3204108 - RNA, 19 nt, Artificial Sequence
  Description of Artificial Sequence: Synthetic oligonucleotide
uuuagauuggcuuuucuug

SEQ ID NO: 3204109 - RNA, 19 nt, Artificial Sequence
  Description of Artificial Sequence: Synthetic oligonucleotide
aaacuauaccuuuugaaga

SEQ ID NO: 3204110 - RNA, 19 nt, Artificial Sequence
  Description of Artificial Sequence: Synthetic oligonucleotide
uucgauaacaacuuuacaa

SEQ ID NO: 3204111 - RNA, 19 nt, Artificial Sequence
  Description of Artificial Sequence: Synthetic oligonucleotide
ucgauaacaacuuuacaag

SEQ ID NO: 3204112 - RNA, 19 nt, Artificial Sequence
  Description of Artificial Sequence: Synthetic oligonucleotide
ucucagaugguucucagag

SEQ ID NO: 3204113 - RNA, 19 nt, Artificial Sequence
  Description of Artificial Sequence: Synthetic oligonucleotide
ucagaugguucucagagag

SEQ ID NO: 3204114 - RNA, 19 nt, Artificial Sequence
  Description of Artificial Sequence: Synthetic oligonucleotide
auauccaccuguuauguac

SEQ ID NO: 3204115 - RNA, 19 nt, Artificial Sequence
  Description of Artificial Sequence: Synthetic oligonucleotide
uuuggggucagccugaugu

SEQ ID NO: 3204116 - RNA, 19 nt, Artificial Sequence
  Description of Artificial Sequence: Synthetic oligonucleotide
uggcaaguuucucagaugg

SEQ ID NO: 3204117 - RNA, 19 nt, Artificial Sequence
  Description of Artificial Sequence: Synthetic oligonucleotide
ucuccugacaauaacaaac

SEQ ID NO: 3204118 - RNA, 19 nt, Artificial Sequence
  Description of Artificial Sequence: Synthetic oligonucleotide
aacuuuacaagaugcagcu

SEQ ID NO: 3204119 - RNA, 19 nt, Artificial Sequence
  Description of Artificial Sequence: Synthetic oligonucleotide
ugccuuauuauaaagaaau

SEQ ID NO: 3204120 - RNA, 19 nt, Artificial Sequence
  Description of Artificial Sequence: Synthetic oligonucleotide
uauaaagaaauauaaucau

SEQ ID NO: 3204121 - RNA, 19 nt, Artificial Sequence
  Description of Artificial Sequence: Synthetic oligonucleotide
gaagaagugaaacuauacc

SEQ ID NO: 3204122 - RNA, 19 nt, Artificial Sequence
  Description of Artificial Sequence: Synthetic oligonucleotide
uuagauuggcuuuucuugg

SEQ ID NO: 3204123 - RNA, 19 nt, Artificial Sequence
  Description of Artificial Sequence: Synthetic oligonucleotide
uuucuuggaacacuuuggg

SEQ ID NO: 3204124 - RNA, 19 nt, Artificial Sequence
  Description of Artificial Sequence: Synthetic oligonucleotide
uaacaacuuuacaagaugc

SEQ ID NO: 3204125 - RNA, 19 nt, Artificial Sequence
  Description of Artificial Sequence: Synthetic oligonucleotide
ugauacuuaauucuuuaga

SEQ ID NO: 3204126 - RNA, 19 nt, Artificial Sequence
  Description of Artificial Sequence: Synthetic oligonucleotide
gacaauaacaaacaguaaa

SEQ ID NO: 3204127 - RNA, 19 nt, Artificial Sequence
  Description of Artificial Sequence: Synthetic oligonucleotide
uauaugguaagucauugaa

SEQ ID NO: 3204128 - RNA, 19 nt, Artificial Sequence
  Description of Artificial Sequence: Synthetic oligonucleotide
uguacacuagagaagaagu

SEQ ID NO: 3204129 - RNA, 19 nt, Artificial Sequence
  Description of Artificial Sequence: Synthetic oligonucleotide
uacucuuuugugcacagag

SEQ ID NO: 3204130 - RNA, 19 nt, Artificial Sequence
  Description of Artificial Sequence: Synthetic oligonucleotide
ucaguaauuucucaccacc

SEQ ID NO: 3204131 - RNA, 19 nt, Artificial Sequence
  Description of Artificial Sequence: Synthetic oligonucleotide
cuugugcacaguuagagag

SEQ ID NO: 3204132 - RNA, 19 nt, Artificial Sequence
  Description of Artificial Sequence: Synthetic oligonucleotide
uauuauaaagaaauauaau

SEQ ID NO: 3204133 - RNA, 19 nt, Artificial Sequence
  Description of Artificial Sequence: Synthetic oligonucleotide
caaacaguaaauucccagg

SEQ ID NO: 3204134 - RNA, 19 nt, Artificial Sequence
  Description of Artificial Sequence: Synthetic oligonucleotide
uucucuugugcacaguuag

SEQ ID NO: 3204135 - RNA, 19 nt, Artificial Sequence
  Description of Artificial Sequence: Synthetic oligonucleotide
ugcacaguuagagagaagc

SEQ ID NO: 3204136 - RNA, 19 nt, Artificial Sequence
  Description of Artificial Sequence: Synthetic oligonucleotide
uuauguacucuuuugugca

SEQ ID NO: 3204137 - RNA, 19 nt, Artificial Sequence
  Description of Artificial Sequence: Synthetic oligonucleotide
acaaacaguaaauucccag

SEQ ID NO: 3204138 - RNA, 19 nt, Artificial Sequence
  Description of Artificial Sequence: Synthetic oligonucleotide
ugaugagccacccuagaag

SEQ ID NO: 3204139 - RNA, 19 nt, Artificial Sequence
  Description of Artificial Sequence: Synthetic oligonucleotide
auaacaacuuuacaagaug

SEQ ID NO: 3204140 - RNA, 19 nt, Artificial Sequence
  Description of Artificial Sequence: Synthetic oligonucleotide
guuauguacucuuuugugc

SEQ ID NO: 3204141 - RNA, 19 nt, Artificial Sequence
  Description of Artificial Sequence: Synthetic oligonucleotide
ucuucgauaacaacuuuac

SEQ ID NO: 3204142 - RNA, 19 nt, Artificial Sequence
  Description of Artificial Sequence: Synthetic oligonucleotide
gaagacaaggucauaaaug

SEQ ID NO: 3204143 - RNA, 19 nt, Artificial Sequence
  Description of Artificial Sequence: Synthetic oligonucleotide
uaauuucucaccaccauuc

SEQ ID NO: 3204144 - RNA, 19 nt, Artificial Sequence
  Description of Artificial Sequence: Synthetic oligonucleotide
uguuauguacucuuuugug

SEQ ID NO: 3204145 - RNA, 19 nt, Artificial Sequence
  Description of Artificial Sequence: Synthetic oligonucleotide
auaccuuuugaagacaagg

SEQ ID NO: 3204146 - RNA, 19 nt, Artificial Sequence
  Description of Artificial Sequence: Synthetic oligonucleotide
uaaauucccaggcauguga

SEQ ID NO: 3204147 - RNA, 19 nt, Artificial Sequence
  Description of Artificial Sequence: Synthetic oligonucleotide
ugaaacuauaccuuuugaa

SEQ ID NO: 3204148 - RNA, 19 nt, Artificial Sequence
  Description of Artificial Sequence: Synthetic oligonucleotide
guuggguuaggauaggagc

SEQ ID NO: 3204149 - RNA, 19 nt, Artificial Sequence
  Description of Artificial Sequence: Synthetic oligonucleotide
cugagagauuauuaaaagc

SEQ ID NO: 3204150 - RNA, 19 nt, Artificial Sequence
  Description of Artificial Sequence: Synthetic oligonucleotide
cuuauuauaaagaaauaua

SEQ ID NO: 3204151 - RNA, 19 nt, Artificial Sequence
  Description of Artificial Sequence: Synthetic oligonucleotide
accuuuugaagacaagguc

SEQ ID NO: 3204152 - RNA, 19 nt, Artificial Sequence
  Description of Artificial Sequence: Synthetic oligonucleotide
ucauuaauuucauggcaag

SEQ ID NO: 3204153 - RNA, 19 nt, Artificial Sequence
  Description of Artificial Sequence: Synthetic oligonucleotide
aaggucuccugacaauaac

SEQ ID NO: 3204154 - RNA, 19 nt, Artificial Sequence
  Description of Artificial Sequence: Synthetic oligonucleotide
uaaguguuggguuaggaua

SEQ ID NO: 3204155 - RNA, 19 nt, Artificial Sequence
  Description of Artificial Sequence: Synthetic oligonucleotide
agagguaggaguuacuggu

SEQ ID NO: 3204156 - RNA, 19 nt, Artificial Sequence
  Description of Artificial Sequence: Synthetic oligonucleotide
uauucuuugccuuauuaua

SEQ ID NO: 3204157 - RNA, 19 nt, Artificial Sequence
  Description of Artificial Sequence: Synthetic oligonucleotide
aaagaaauauaaucaugua

SEQ ID NO: 3204158 - RNA, 19 nt, Artificial Sequence
  Description of Artificial Sequence: Synthetic oligonucleotide
acaguuagagagaagcuac

SEQ ID NO: 3204159 - RNA, 19 nt, Artificial Sequence
  Description of Artificial Sequence: Synthetic oligonucleotide
auucauauccaccuguuau

SEQ ID NO: 3204160 - RNA, 19 nt, Artificial Sequence
  Description of Artificial Sequence: Synthetic oligonucleotide
uuaggauaggagcucuucc

SEQ ID NO: 3204161 - RNA, 19 nt, Artificial Sequence
  Description of Artificial Sequence: Synthetic oligonucleotide
agugaaacuauaccuuuug

SEQ ID NO: 3204162 - RNA, 19 nt, Artificial Sequence
  Description of Artificial Sequence: Synthetic oligonucleotide
uuugaagacaaggucauaa

SEQ ID NO: 3204163 - RNA, 19 nt, Artificial Sequence
  Description of Artificial Sequence: Synthetic oligonucleotide
ugauguuucccacaauccu

SEQ ID NO: 3204164 - RNA, 19 nt, Artificial Sequence
  Description of Artificial Sequence: Synthetic oligonucleotide
aacaguaaauucccaggca

SEQ ID NO: 3204165 - RNA, 19 nt, Artificial Sequence
  Description of Artificial Sequence: Synthetic oligonucleotide
agaagaagugaaacuauac

SEQ ID NO: 3204166 - RNA, 19 nt, Artificial Sequence
  Description of Artificial Sequence: Synthetic oligonucleotide
uucauauccaccuguuaug

SEQ ID NO: 3204167 - RNA, 19 nt, Artificial Sequence
  Description of Artificial Sequence: Synthetic oligonucleotide
agucauuaagugcuucuuc

SEQ ID NO: 3204168 - RNA, 19 nt, Artificial Sequence
  Description of Artificial Sequence: Synthetic oligonucleotide
uguuggguuaggauaggag

SEQ ID NO: 3204169 - RNA, 19 nt, Artificial Sequence
  Description of Artificial Sequence: Synthetic oligonucleotide
auaaagaaauauaaucaug

SEQ ID NO: 3204170 - RNA, 19 nt, Artificial Sequence
  Description of Artificial Sequence: Synthetic oligonucleotide
uguuguaucaagccugguc

SEQ ID NO: 3204171 - RNA, 19 nt, Artificial Sequence
  Description of Artificial Sequence: Synthetic oligonucleotide
uuugugcacagagagguag

SEQ ID NO: 3204172 - RNA, 19 nt, Artificial Sequence
  Description of Artificial Sequence: Synthetic oligonucleotide
ugcacagagagguaggagu

SEQ ID NO: 3204173 - RNA, 19 nt, Artificial Sequence
  Description of Artificial Sequence: Synthetic oligonucleotide
uuauucuuugccuuauuau

SEQ ID NO: 3204174 - RNA, 19 nt, Artificial Sequence
  Description of Artificial Sequence: Synthetic oligonucleotide
uaucaagccuggucuaugg

SEQ ID NO: 3204175 - RNA, 19 nt, Artificial Sequence
  Description of Artificial Sequence: Synthetic oligonucleotide
uuggguuaggauaggagcu

SEQ ID NO: 3204176 - RNA, 19 nt, Artificial Sequence
  Description of Artificial Sequence: Synthetic oligonucleotide
uuacuggugaaagauuucc

SEQ ID NO: 3204177 - RNA, 19 nt, Artificial Sequence
  Description of Artificial Sequence: Synthetic oligonucleotide
gauacuuaauucuuuagau

SEQ ID NO: 3204178 - RNA, 19 nt, Artificial Sequence
  Description of Artificial Sequence: Synthetic oligonucleotide
uaauuucauggcaaguuuc

SEQ ID NO: 3204179 - RNA, 19 nt, Artificial Sequence
  Description of Artificial Sequence: Synthetic oligonucleotide
uccauguuguaucaagccu

SEQ ID NO: 3204180 - RNA, 19 nt, Artificial Sequence
  Description of Artificial Sequence: Synthetic oligonucleotide
aaguguuggguuaggauag

SEQ ID NO: 3204181 - RNA, 19 nt, Artificial Sequence
  Description of Artificial Sequence: Synthetic oligonucleotide
uaccuuuugaagacaaggu

SEQ ID NO: 3204182 - RNA, 19 nt, Artificial Sequence
  Description of Artificial Sequence: Synthetic oligonucleotide
gagagguaggaguuacugg

SEQ ID NO: 3204183 - RNA, 19 nt, Artificial Sequence
  Description of Artificial Sequence: Synthetic oligonucleotide
ucuccauguuguaucaagc

SEQ ID NO: 3204184 - RNA, 19 nt, Artificial Sequence
  Description of Artificial Sequence: Synthetic oligonucleotide
guauguauucucuugugca

SEQ ID NO: 3204185 - RNA, 19 nt, Artificial Sequence
  Description of Artificial Sequence: Synthetic oligonucleotide
uuucucaccaccauucaua

SEQ ID NO: 3204186 - RNA, 19 nt, Artificial Sequence
  Description of Artificial Sequence: Synthetic oligonucleotide
uaaucauguagagaggccu

SEQ ID NO: 3204187 - RNA, 19 nt, Artificial Sequence
  Description of Artificial Sequence: Synthetic oligonucleotide
cucucaguaauuucucacc

SEQ ID NO: 3204188 - RNA, 19 nt, Artificial Sequence
  Description of Artificial Sequence: Synthetic oligonucleotide
ucuguaguuuucuccaugu

SEQ ID NO: 3204189 - RNA, 19 nt, Artificial Sequence
  Description of Artificial Sequence: Synthetic oligonucleotide
agugcuucuucacagcuga

SEQ ID NO: 3204190 - RNA, 19 nt, Artificial Sequence
  Description of Artificial Sequence: Synthetic oligonucleotide
gauguguacacuagagaag

SEQ ID NO: 3204191 - RNA, 19 nt, Artificial Sequence
  Description of Artificial Sequence: Synthetic oligonucleotide
cugauguuucccacaaucc

SEQ ID NO: 3204192 - RNA, 19 nt, Artificial Sequence
  Description of Artificial Sequence: Synthetic oligonucleotide
auaaucauguagagaggcc

SEQ ID NO: 3204193 - RNA, 19 nt, Artificial Sequence
  Description of Artificial Sequence: Synthetic oligonucleotide
uggucuaugguugaugugu

SEQ ID NO: 3204194 - RNA, 19 nt, Artificial Sequence
  Description of Artificial Sequence: Synthetic oligonucleotide
uuuacaagaugcagcucug

SEQ ID NO: 3204195 - RNA, 19 nt, Artificial Sequence
  Description of Artificial Sequence: Synthetic oligonucleotide
acaguaaauucccaggcau

SEQ ID NO: 3204196 - RNA, 19 nt, Artificial Sequence
  Description of Artificial Sequence: Synthetic oligonucleotide
aauuucucaccaccauuca

SEQ ID NO: 3204197 - RNA, 19 nt, Artificial Sequence
  Description of Artificial Sequence: Synthetic oligonucleotide
uaauacauaaaauggaugg

SEQ ID NO: 3204198 - RNA, 19 nt, Artificial Sequence
  Description of Artificial Sequence: Synthetic oligonucleotide
uuuaucaucacugaaaucc

SEQ ID NO: 3204199 - RNA, 19 nt, Artificial Sequence
  Description of Artificial Sequence: Synthetic oligonucleotide
auauccuuuauuuugauuc

SEQ ID NO: 3204200 - RNA, 19 nt, Artificial Sequence
  Description of Artificial Sequence: Synthetic oligonucleotide
aauuaagcaagugaugugc

SEQ ID NO: 3204201 - RNA, 19 nt, Artificial Sequence
  Description of Artificial Sequence: Synthetic oligonucleotide
auucaauucagauuugagc

SEQ ID NO: 3204202 - RNA, 19 nt, Artificial Sequence
  Description of Artificial Sequence: Synthetic oligonucleotide
aaaguuaugcauaucaaac

SEQ ID NO: 3204203 - RNA, 19 nt, Artificial Sequence
  Description of Artificial Sequence: Synthetic oligonucleotide
aagaggaaaauucuuauug

SEQ ID NO: 3204204 - RNA, 19 nt, Artificial Sequence
  Description of Artificial Sequence: Synthetic oligonucleotide
uuaugcauaucaaacauag

SEQ ID NO: 3204205 - RNA, 19 nt, Artificial Sequence
  Description of Artificial Sequence: Synthetic oligonucleotide
aauauucggaagaagaucg

SEQ ID NO: 3204206 - RNA, 19 nt, Artificial Sequence
  Description of Artificial Sequence: Synthetic oligonucleotide
ugugaauauauacugagug

SEQ ID NO: 3204207 - RNA, 19 nt, Artificial Sequence
  Description of Artificial Sequence: Synthetic oligonucleotide
ugaaaaguuaugcauauca

SEQ ID NO: 3204208 - RNA, 19 nt, Artificial Sequence
  Description of Artificial Sequence: Synthetic oligonucleotide
agcauuccaauucugaugc

SEQ ID NO: 3204209 - RNA, 19 nt, Artificial Sequence
  Description of Artificial Sequence: Synthetic oligonucleotide
aauucugaugcacuucacc

SEQ ID NO: 3204210 - RNA, 19 nt, Artificial Sequence
  Description of Artificial Sequence: Synthetic oligonucleotide
uguuuuaagaggaaaauuc

SEQ ID NO: 3204211 - RNA, 19 nt, Artificial Sequence
  Description of Artificial Sequence: Synthetic oligonucleotide
ucaucuuuuguuuuaagag

SEQ ID NO: 3204212 - RNA, 19 nt, Artificial Sequence
  Description of Artificial Sequence: Synthetic oligonucleotide
aagaggaggaacuugaacu

SEQ ID NO: 3204213 - RNA, 19 nt, Artificial Sequence
  Description of Artificial Sequence: Synthetic oligonucleotide
cauaauauccuuuauuuug

SEQ ID NO: 3204214 - RNA, 19 nt, Artificial Sequence
  Description of Artificial Sequence: Synthetic oligonucleotide
uugaauauucggaagaaga

SEQ ID NO: 3204215 - RNA, 19 nt, Artificial Sequence
  Description of Artificial Sequence: Synthetic oligonucleotide
uucauuaagaagcaacuca

SEQ ID NO: 3204216 - RNA, 19 nt, Artificial Sequence
  Description of Artificial Sequence: Synthetic oligonucleotide
ugugauauccuuuugaaua

SEQ ID NO: 3204217 - RNA, 19 nt, Artificial Sequence
  Description of Artificial Sequence: Synthetic oligonucleotide
aaugucuucaggcagagua

SEQ ID NO: 3204218 - RNA, 19 nt, Artificial Sequence
  Description of Artificial Sequence: Synthetic oligonucleotide
aagcaagugaugugcagcc

SEQ ID NO: 3204219 - RNA, 19 nt, Artificial Sequence
  Description of Artificial Sequence: Synthetic oligonucleotide
ugcauaucaaacauaggag

SEQ ID NO: 3204220 - RNA, 19 nt, Artificial Sequence
  Description of Artificial Sequence: Synthetic oligonucleotide
ugaguucuucaacagaagg

SEQ ID NO: 3204221 - RNA, 19 nt, Artificial Sequence
  Description of Artificial Sequence: Synthetic oligonucleotide
uaauucaaugucuucaggc

SEQ ID NO: 3204222 - RNA, 19 nt, Artificial Sequence
  Description of Artificial Sequence: Synthetic oligonucleotide
augcauaucaaacauagga

SEQ ID NO: 3204223 - RNA, 19 nt, Artificial Sequence
  Description of Artificial Sequence: Synthetic oligonucleotide
uauccuuuugaauauucgg

SEQ ID NO: 3204224 - RNA, 19 nt, Artificial Sequence
  Description of Artificial Sequence: Synthetic oligonucleotide
auacauaaaauggaugggc

SEQ ID NO: 3204225 - RNA, 19 nt, Artificial Sequence
  Description of Artificial Sequence: Synthetic oligonucleotide
uaaauuaagcaagugaugu

SEQ ID NO: 3204226 - RNA, 19 nt, Artificial Sequence
  Description of Artificial Sequence: Synthetic oligonucleotide
uuuaauucaaugucuucag

SEQ ID NO: 3204227 - RNA, 19 nt, Artificial Sequence
  Description of Artificial Sequence: Synthetic oligonucleotide
aauacauaaaauggauggg

SEQ ID NO: 3204228 - RNA, 19 nt, Artificial Sequence
  Description of Artificial Sequence: Synthetic oligonucleotide
aggcaguucauuaagaagc

SEQ ID NO: 3204229 - RNA, 19 nt, Artificial Sequence
  Description of Artificial Sequence: Synthetic oligonucleotide
aauauauacugagugaagu

SEQ ID NO: 3204230 - RNA, 19 nt, Artificial Sequence
  Description of Artificial Sequence: Synthetic oligonucleotide
cauaucaaacauaggaggg

SEQ ID NO: 3204231 - RNA, 19 nt, Artificial Sequence
  Description of Artificial Sequence: Synthetic oligonucleotide
aaaauucuuauuguccuuc

SEQ ID NO: 3204232 - RNA, 19 nt, Artificial Sequence
  Description of Artificial Sequence: Synthetic oligonucleotide
auuaagaagcaacucaucu

SEQ ID NO: 3204233 - RNA, 19 nt, Artificial Sequence
  Description of Artificial Sequence: Synthetic oligonucleotide
aaaaguuaugcauaucaaa

SEQ ID NO: 3204234 - RNA, 19 nt, Artificial Sequence
  Description of Artificial Sequence: Synthetic oligonucleotide
aaugcuugaaaccuuccca

SEQ ID NO: 3204235 - RNA, 19 nt, Artificial Sequence
  Description of Artificial Sequence: Synthetic oligonucleotide
ugagugaagucuuucauug

SEQ ID NO: 3204236 - RNA, 19 nt, Artificial Sequence
  Description of Artificial Sequence: Synthetic oligonucleotide
ugguaaauuaagcaaguga

SEQ ID NO: 3204237 - RNA, 19 nt, Artificial Sequence
  Description of Artificial Sequence: Synthetic oligonucleotide
caucuuuuguuuuaagagg

SEQ ID NO: 3204238 - RNA, 19 nt, Artificial Sequence
  Description of Artificial Sequence: Synthetic oligonucleotide
uucaacagaaggcaguuca

SEQ ID NO: 3204239 - RNA, 19 nt, Artificial Sequence
  Description of Artificial Sequence: Synthetic oligonucleotide
ugaugugcagccauguuag

SEQ ID NO: 3204240 - RNA, 19 nt, Artificial Sequence
  Description of Artificial Sequence: Synthetic oligonucleotide
ugaaaccuucccaagaggc

SEQ ID NO: 3204241 - RNA, 19 nt, Artificial Sequence
  Description of Artificial Sequence: Synthetic oligonucleotide
aacagugaguucuucaaca

SEQ ID NO: 3204242 - RNA, 19 nt, Artificial Sequence
  Description of Artificial Sequence: Synthetic oligonucleotide
uuuaagaggaaaauucuua

SEQ ID NO: 3204243 - RNA, 19 nt, Artificial Sequence
  Description of Artificial Sequence: Synthetic oligonucleotide
aaguuaugcauaucaaaca

SEQ ID NO: 3204244 - RNA, 19 nt, Artificial Sequence
  Description of Artificial Sequence: Synthetic oligonucleotide
aacuuguacaucuuccucu

SEQ ID NO: 3204245 - RNA, 19 nt, Artificial Sequence
  Description of Artificial Sequence: Synthetic oligonucleotide
auauauacugagugaaguc

SEQ ID NO: 3204246 - RNA, 19 nt, Artificial Sequence
  Description of Artificial Sequence: Synthetic oligonucleotide
uuuuguuuuaagaggaaaa

SEQ ID NO: 3204247 - RNA, 19 nt, Artificial Sequence
  Description of Artificial Sequence: Synthetic oligonucleotide
aauaaugcuugaaaccuuc

SEQ ID NO: 3204248 - RNA, 19 nt, Artificial Sequence
  Description of Artificial Sequence: Synthetic oligonucleotide
aggaaaauucuuauugucc

SEQ ID NO: 3204249 - RNA, 19 nt, Artificial Sequence
  Description of Artificial Sequence: Synthetic oligonucleotide
aaggcaguucauuaagaag

SEQ ID NO: 3204250 - RNA, 19 nt, Artificial Sequence
  Description of Artificial Sequence: Synthetic oligonucleotide
uuaauucaaugucuucagg

SEQ ID NO: 3204251 - RNA, 19 nt, Artificial Sequence
  Description of Artificial Sequence: Synthetic oligonucleotide
aaauuaagcaagugaugug

SEQ ID NO: 3204252 - RNA, 19 nt, Artificial Sequence
  Description of Artificial Sequence: Synthetic oligonucleotide
ggaagugauacacaggagg

SEQ ID NO: 3204253 - RNA, 19 nt, Artificial Sequence
  Description of Artificial Sequence: Synthetic oligonucleotide
uacauaaaauggaugggca

SEQ ID NO: 3204254 - RNA, 19 nt, Artificial Sequence
  Description of Artificial Sequence: Synthetic oligonucleotide
cuugauucauucaauucag

SEQ ID NO: 3204255 - RNA, 19 nt, Artificial Sequence
  Description of Artificial Sequence: Synthetic oligonucleotide
ugaauauauacugagugaa

SEQ ID NO: 3204256 - RNA, 19 nt, Artificial Sequence
  Description of Artificial Sequence: Synthetic oligonucleotide
aagcauuccaauucugaug

SEQ ID NO: 3204257 - RNA, 19 nt, Artificial Sequence
  Description of Artificial Sequence: Synthetic oligonucleotide
uguugugauauccuuuuga

SEQ ID NO: 3204258 - RNA, 19 nt, Artificial Sequence
  Description of Artificial Sequence: Synthetic oligonucleotide
ucgauaagcauuccaauuc

SEQ ID NO: 3204259 - RNA, 19 nt, Artificial Sequence
  Description of Artificial Sequence: Synthetic oligonucleotide
uaagaagcaacucaucuuu

SEQ ID NO: 3204260 - RNA, 19 nt, Artificial Sequence
  Description of Artificial Sequence: Synthetic oligonucleotide
aauucuuauuguccuucuc

SEQ ID NO: 3204261 - RNA, 19 nt, Artificial Sequence
  Description of Artificial Sequence: Synthetic oligonucleotide
ucauuaagaagcaacucau

SEQ ID NO: 3204262 - RNA, 19 nt, Artificial Sequence
  Description of Artificial Sequence: Synthetic oligonucleotide
uauauacugagugaagucu

SEQ ID NO: 3204263 - RNA, 19 nt, Artificial Sequence
  Description of Artificial Sequence: Synthetic oligonucleotide
uucaggcagaguaacagug

SEQ ID NO: 3204264 - RNA, 19 nt, Artificial Sequence
  Description of Artificial Sequence: Synthetic oligonucleotide
auucuuauuguccuucuca

SEQ ID NO: 3204265 - RNA, 19 nt, Artificial Sequence
  Description of Artificial Sequence: Synthetic oligonucleotide
gaggcuuuaauucaauguc

SEQ ID NO: 3204266 - RNA, 19 nt, Artificial Sequence
  Description of Artificial Sequence: Synthetic oligonucleotide
agggagugaaaaguuaugc

SEQ ID NO: 3204267 - RNA, 19 nt, Artificial Sequence
  Description of Artificial Sequence: Synthetic oligonucleotide
aauacauaauauccuuuau

SEQ ID NO: 3204268 - RNA, 19 nt, Artificial Sequence
  Description of Artificial Sequence: Synthetic oligonucleotide
gcauaucaaacauaggagg

SEQ ID NO: 3204269 - RNA, 19 nt, Artificial Sequence
  Description of Artificial Sequence: Synthetic oligonucleotide
uaugguaaauuaagcaagu

SEQ ID NO: 3204270 - RNA, 19 nt, Artificial Sequence
  Description of Artificial Sequence: Synthetic oligonucleotide
ugaauauucggaagaagau

SEQ ID NO: 3204271 - RNA, 19 nt, Artificial Sequence
  Description of Artificial Sequence: Synthetic oligonucleotide
uuaagaggaaaauucuuau

SEQ ID NO: 3204272 - RNA, 19 nt, Artificial Sequence
  Description of Artificial Sequence: Synthetic oligonucleotide
uucggaagaagaucgauaa

SEQ ID NO: 3204273 - RNA, 19 nt, Artificial Sequence
  Description of Artificial Sequence: Synthetic oligonucleotide
augcacuucaccacaaucc

SEQ ID NO: 3204274 - RNA, 19 nt, Artificial Sequence
  Description of Artificial Sequence: Synthetic oligonucleotide
auucugaugcacuucacca

SEQ ID NO: 3204275 - RNA, 19 nt, Artificial Sequence
  Description of Artificial Sequence: Synthetic oligonucleotide
agaggcuuuaauucaaugu

SEQ ID NO: 3204276 - RNA, 19 nt, Artificial Sequence
  Description of Artificial Sequence: Synthetic oligonucleotide
aguuaugcauaucaaacau

SEQ ID NO: 3204277 - RNA, 19 nt, Artificial Sequence
  Description of Artificial Sequence: Synthetic oligonucleotide
acuggaggaagugauacac

SEQ ID NO: 3204278 - RNA, 19 nt, Artificial Sequence
  Description of Artificial Sequence: Synthetic oligonucleotide
aggaugaugaugaagagga

SEQ ID NO: 3204279 - RNA, 19 nt, Artificial Sequence
  Description of Artificial Sequence: Synthetic oligonucleotide
uaaugcuugaaaccuuccc

SEQ ID NO: 3204280 - RNA, 19 nt, Artificial Sequence
  Description of Artificial Sequence: Synthetic oligonucleotide
cucaacuuguacaucuucc

SEQ ID NO: 3204281 - RNA, 19 nt, Artificial Sequence
  Description of Artificial Sequence: Synthetic oligonucleotide
auucaaugucuucaggcag

SEQ ID NO: 3204282 - RNA, 19 nt, Artificial Sequence
  Description of Artificial Sequence: Synthetic oligonucleotide
ugauucauucaauucagau

SEQ ID NO: 3204283 - RNA, 19 nt, Artificial Sequence
  Description of Artificial Sequence: Synthetic oligonucleotide
cuugaaaccuucccaagag

SEQ ID NO: 3204284 - RNA, 19 nt, Artificial Sequence
  Description of Artificial Sequence: Synthetic oligonucleotide
uugaaaccuucccaagagg

SEQ ID NO: 3204285 - RNA, 19 nt, Artificial Sequence
  Description of Artificial Sequence: Synthetic oligonucleotide
uaugcauaucaaacauagg

SEQ ID NO: 3204286 - RNA, 19 nt, Artificial Sequence
  Description of Artificial Sequence: Synthetic oligonucleotide
agaagaucgauaagcauuc

SEQ ID NO: 3204287 - RNA, 19 nt, Artificial Sequence
  Description of Artificial Sequence: Synthetic oligonucleotide
aagaagaucgauaagcauu

SEQ ID NO: 3204288 - RNA, 19 nt, Artificial Sequence
  Description of Artificial Sequence: Synthetic oligonucleotide
auucucuguugugauaucc

SEQ ID NO: 3204289 - RNA, 19 nt, Artificial Sequence
  Description of Artificial Sequence: Synthetic oligonucleotide
uuaggugcagcccauccca

SEQ ID NO: 3204290 - RNA, 19 nt, Artificial Sequence
  Description of Artificial Sequence: Synthetic oligonucleotide
ugugcagccauguuaggug

SEQ ID NO: 3204291 - RNA, 19 nt, Artificial Sequence
  Description of Artificial Sequence: Synthetic oligonucleotide
ucuucaggcagaguaacag

SEQ ID NO: 3204292 - RNA, 19 nt, Artificial Sequence
  Description of Artificial Sequence: Synthetic oligonucleotide
uauccuuuauuuugauucc

SEQ ID NO: 3204293 - RNA, 19 nt, Artificial Sequence
  Description of Artificial Sequence: Synthetic oligonucleotide
aagaucgauaagcauucca

SEQ ID NO: 3204294 - RNA, 19 nt, Artificial Sequence
  Description of Artificial Sequence: Synthetic oligonucleotide
ucugaugcacuucaccaca

SEQ ID NO: 3204295 - RNA, 19 nt, Artificial Sequence
  Description of Artificial Sequence: Synthetic oligonucleotide
auaucaaacauaggagggg

SEQ ID NO: 3204296 - RNA, 19 nt, Artificial Sequence
  Description of Artificial Sequence: Synthetic oligonucleotide
agccauguuaggugcagcc

SEQ ID NO: 3204297 - RNA, 19 nt, Artificial Sequence
  Description of Artificial Sequence: Synthetic oligonucleotide
uuauucaucacuagaaaag

SEQ ID NO: 3204298 - RNA, 19 nt, Artificial Sequence
  Description of Artificial Sequence: Synthetic oligonucleotide
cauuguacaguucaaaugg

SEQ ID NO: 3204299 - RNA, 19 nt, Artificial Sequence
  Description of Artificial Sequence: Synthetic oligonucleotide
agagaguugucccaggucc

SEQ ID NO: 3204300 - RNA, 19 nt, Artificial Sequence
  Description of Artificial Sequence: Synthetic oligonucleotide
ucaucacuagaaaagagag

SEQ ID NO: 3204301 - RNA, 19 nt, Artificial Sequence
  Description of Artificial Sequence: Synthetic oligonucleotide
aacacaaaaugcuguggcc

SEQ ID NO: 3204302 - RNA, 19 nt, Artificial Sequence
  Description of Artificial Sequence: Synthetic oligonucleotide
aauaaacuguugaagcugc

SEQ ID NO: 3204303 - RNA, 19 nt, Artificial Sequence
  Description of Artificial Sequence: Synthetic oligonucleotide
uucaaauggaaauagugca

SEQ ID NO: 3204304 - RNA, 19 nt, Artificial Sequence
  Description of Artificial Sequence: Synthetic oligonucleotide
uaaauauucuucauuguac

SEQ ID NO: 3204305 - RNA, 19 nt, Artificial Sequence
  Description of Artificial Sequence: Synthetic oligonucleotide
aaauauucuucauuguaca

SEQ ID NO: 3204306 - RNA, 19 nt, Artificial Sequence
  Description of Artificial Sequence: Synthetic oligonucleotide
aauauucuucauuguacag

SEQ ID NO: 3204307 - RNA, 19 nt, Artificial Sequence
  Description of Artificial Sequence: Synthetic oligonucleotide
cucuaaauauucuucauug

SEQ ID NO: 3204308 - RNA, 19 nt, Artificial Sequence
  Description of Artificial Sequence: Synthetic oligonucleotide
ugauuauucaucacuagaa

SEQ ID NO: 3204309 - RNA, 19 nt, Artificial Sequence
  Description of Artificial Sequence: Synthetic oligonucleotide
uucuucauuguacaguuca

SEQ ID NO: 3204310 - RNA, 19 nt, Artificial Sequence
  Description of Artificial Sequence: Synthetic oligonucleotide
uugggagcaacacaaaaug

SEQ ID NO: 3204311 - RNA, 19 nt, Artificial Sequence
  Description of Artificial Sequence: Synthetic oligonucleotide
uucaucacuagaaaagaga

SEQ ID NO: 3204312 - RNA, 19 nt, Artificial Sequence
  Description of Artificial Sequence: Synthetic oligonucleotide
aaacuguugaagcugcucu

SEQ ID NO: 3204313 - RNA, 19 nt, Artificial Sequence
  Description of Artificial Sequence: Synthetic oligonucleotide
uugauuauucaucacuaga

SEQ ID NO: 3204314 - RNA, 19 nt, Artificial Sequence
  Description of Artificial Sequence: Synthetic oligonucleotide
auggaaauagugcauuggg

SEQ ID NO: 3204315 - RNA, 19 nt, Artificial Sequence
  Description of Artificial Sequence: Synthetic oligonucleotide
uuggcacugagucagguag

SEQ ID NO: 3204316 - RNA, 19 nt, Artificial Sequence
  Description of Artificial Sequence: Synthetic oligonucleotide
uguggcaauaaacuguuga

SEQ ID NO: 3204317 - RNA, 19 nt, Artificial Sequence
  Description of Artificial Sequence: Synthetic oligonucleotide
aauggaaauagugcauugg

SEQ ID NO: 3204318 - RNA, 19 nt, Artificial Sequence
  Description of Artificial Sequence: Synthetic oligonucleotide
ucauuguacaguucaaaug

SEQ ID NO: 3204319 - RNA, 19 nt, Artificial Sequence
  Description of Artificial Sequence: Synthetic oligonucleotide
uagaaaagagaguuguccc

SEQ ID NO: 3204320 - RNA, 19 nt, Artificial Sequence
  Description of Artificial Sequence: Synthetic oligonucleotide
uuugcucuaaauauucuuc

SEQ ID NO: 3204321 - RNA, 19 nt, Artificial Sequence
  Description of Artificial Sequence: Synthetic oligonucleotide
cuagaaaagagaguugucc

SEQ ID NO: 3204322 - RNA, 19 nt, Artificial Sequence
  Description of Artificial Sequence: Synthetic oligonucleotide
aaauggaaauagugcauug

SEQ ID NO: 3204323 - RNA, 19 nt, Artificial Sequence
  Description of Artificial Sequence: Synthetic oligonucleotide
gaaauagugcauugggagc

SEQ ID NO: 3204324 - RNA, 19 nt, Artificial Sequence
  Description of Artificial Sequence: Synthetic oligonucleotide
ggaaauagugcauugggag

SEQ ID NO: 3204325 - RNA, 19 nt, Artificial Sequence
  Description of Artificial Sequence: Synthetic oligonucleotide
acacaaaaugcuguggccc

SEQ ID NO: 3204326 - RNA, 19 nt, Artificial Sequence
  Description of Artificial Sequence: Synthetic oligonucleotide
ucagguagagaucucuuug

SEQ ID NO: 3204327 - RNA, 19 nt, Artificial Sequence
  Description of Artificial Sequence: Synthetic oligonucleotide
ugcauugggagcaacacaa

SEQ ID NO: 3204328 - RNA, 19 nt, Artificial Sequence
  Description of Artificial Sequence: Synthetic oligonucleotide
auuauucaucacuagaaaa

SEQ ID NO: 3204329 - RNA, 19 nt, Artificial Sequence
  Description of Artificial Sequence: Synthetic oligonucleotide
aucucuuugcucuaaauau

SEQ ID NO: 3204330 - RNA, 19 nt, Artificial Sequence
  Description of Artificial Sequence: Synthetic oligonucleotide
aaauagugcauugggagca

SEQ ID NO: 3204331 - RNA, 19 nt, Artificial Sequence
  Description of Artificial Sequence: Synthetic oligonucleotide
uguacaguucaaauggaaa

SEQ ID NO: 3204332 - RNA, 19 nt, Artificial Sequence
  Description of Artificial Sequence: Synthetic oligonucleotide
aaaagagaguugucccagg

SEQ ID NO: 3204333 - RNA, 19 nt, Artificial Sequence
  Description of Artificial Sequence: Synthetic oligonucleotide
guucaaauggaaauagugc

SEQ ID NO: 3204334 - RNA, 19 nt, Artificial Sequence
  Description of Artificial Sequence: Synthetic oligonucleotide
aguucaaauggaaauagug

SEQ ID NO: 3204335 - RNA, 19 nt, Artificial Sequence
  Description of Artificial Sequence: Synthetic oligonucleotide
uccacauguggcaauaaac

SEQ ID NO: 3204336 - RNA, 19 nt, Artificial Sequence
  Description of Artificial Sequence: Synthetic oligonucleotide
auugauuauucaucacuag

SEQ ID NO: 3204337 - RNA, 19 nt, Artificial Sequence
  Description of Artificial Sequence: Synthetic oligonucleotide
aagagaguugucccagguc

SEQ ID NO: 3204338 - RNA, 19 nt, Artificial Sequence
  Description of Artificial Sequence: Synthetic oligonucleotide
ggcaauaaacuguugaagc

SEQ ID NO: 3204339 - RNA, 19 nt, Artificial Sequence
  Description of Artificial Sequence: Synthetic oligonucleotide
aucacuagaaaagagaguu

SEQ ID NO: 3204340 - RNA, 19 nt, Artificial Sequence
  Description of Artificial Sequence: Synthetic oligonucleotide
uauucaucacuagaaaaga

SEQ ID NO: 3204341 - RNA, 19 nt, Artificial Sequence
  Description of Artificial Sequence: Synthetic oligonucleotide
uauucuucauuguacaguu

SEQ ID NO: 3204342 - RNA, 19 nt, Artificial Sequence
  Description of Artificial Sequence: Synthetic oligonucleotide
ucuaaauauucuucauugu

SEQ ID NO: 3204343 - RNA, 19 nt, Artificial Sequence
  Description of Artificial Sequence: Synthetic oligonucleotide
caacacaaaaugcuguggc

SEQ ID NO: 3204344 - RNA, 19 nt, Artificial Sequence
  Description of Artificial Sequence: Synthetic oligonucleotide
uucauuguacaguucaaau

SEQ ID NO: 3204345 - RNA, 19 nt, Artificial Sequence
  Description of Artificial Sequence: Synthetic oligonucleotide
uggaaauagugcauuggga

SEQ ID NO: 3204346 - RNA, 19 nt, Artificial Sequence
  Description of Artificial Sequence: Synthetic oligonucleotide
aaagagaguugucccaggu

SEQ ID NO: 3204347 - RNA, 19 nt, Artificial Sequence
  Description of Artificial Sequence: Synthetic oligonucleotide
gaaaagagaguugucccag

SEQ ID NO: 3204348 - RNA, 19 nt, Artificial Sequence
  Description of Artificial Sequence: Synthetic oligonucleotide
ucaaauggaaauagugcau

SEQ ID NO: 3204349 - RNA, 19 nt, Artificial Sequence
  Description of Artificial Sequence: Synthetic oligonucleotide
acaguucaaauggaaauag

SEQ ID NO: 3204350 - RNA, 19 nt, Artificial Sequence
  Description of Artificial Sequence: Synthetic oligonucleotide
uugcucuaaauauucuuca

SEQ ID NO: 3204351 - RNA, 19 nt, Artificial Sequence
  Description of Artificial Sequence: Synthetic oligonucleotide
agaaaagagaguuguccca

SEQ ID NO: 3204352 - RNA, 19 nt, Artificial Sequence
  Description of Artificial Sequence: Synthetic oligonucleotide
gauuauucaucacuagaaa

SEQ ID NO: 3204353 - RNA, 19 nt, Artificial Sequence
  Description of Artificial Sequence: Synthetic oligonucleotide
uggcaauaaacuguugaag

SEQ ID NO: 3204354 - RNA, 19 nt, Artificial Sequence
  Description of Artificial Sequence: Synthetic oligonucleotide
agugcauugggagcaacac

SEQ ID NO: 3204355 - RNA, 19 nt, Artificial Sequence
  Description of Artificial Sequence: Synthetic oligonucleotide
agcaacacaaaaugcugug

SEQ ID NO: 3204356 - RNA, 19 nt, Artificial Sequence
  Description of Artificial Sequence: Synthetic oligonucleotide
ugggagcaacacaaaaugc

SEQ ID NO: 3204357 - RNA, 19 nt, Artificial Sequence
  Description of Artificial Sequence: Synthetic oligonucleotide
cucuuugcucuaaauauuc

SEQ ID NO: 3204358 - RNA, 19 nt, Artificial Sequence
  Description of Artificial Sequence: Synthetic oligonucleotide
caauaaacuguugaagcug

SEQ ID NO: 3204359 - RNA, 19 nt, Artificial Sequence
  Description of Artificial Sequence: Synthetic oligonucleotide
auauucuucauuguacagu

SEQ ID NO: 3204360 - RNA, 19 nt, Artificial Sequence
  Description of Artificial Sequence: Synthetic oligonucleotide
cacauguggcaauaaacug

SEQ ID NO: 3204361 - RNA, 19 nt, Artificial Sequence
  Description of Artificial Sequence: Synthetic oligonucleotide
ucacuagaaaagagaguug

SEQ ID NO: 3204362 - RNA, 19 nt, Artificial Sequence
  Description of Artificial Sequence: Synthetic oligonucleotide
cuaaauauucuucauugua

SEQ ID NO: 3204363 - RNA, 19 nt, Artificial Sequence
  Description of Artificial Sequence: Synthetic oligonucleotide
guagagaucucuuugcucu

SEQ ID NO: 3204364 - RNA, 19 nt, Artificial Sequence
  Description of Artificial Sequence: Synthetic oligonucleotide
uuguacaguucaaauggaa

SEQ ID NO: 3204365 - RNA, 19 nt, Artificial Sequence
  Description of Artificial Sequence: Synthetic oligonucleotide
cacaaaaugcuguggcccc

SEQ ID NO: 3204366 - RNA, 19 nt, Artificial Sequence
  Description of Artificial Sequence: Synthetic oligonucleotide
ucuuugcucuaaauauucu

SEQ ID NO: 3204367 - RNA, 19 nt, Artificial Sequence
  Description of Artificial Sequence: Synthetic oligonucleotide
gaucucuuugcucuaaaua

SEQ ID NO: 3204368 - RNA, 19 nt, Artificial Sequence
  Description of Artificial Sequence: Synthetic oligonucleotide
cagguagagaucucuuugc

SEQ ID NO: 3204369 - RNA, 19 nt, Artificial Sequence
  Description of Artificial Sequence: Synthetic oligonucleotide
uugucccagguccacaugu

SEQ ID NO: 3204370 - RNA, 19 nt, Artificial Sequence
  Description of Artificial Sequence: Synthetic oligonucleotide
uguugaagcugcucuuggc

SEQ ID NO: 3204371 - RNA, 19 nt, Artificial Sequence
  Description of Artificial Sequence: Synthetic oligonucleotide
uugaagcugcucuuggcac

SEQ ID NO: 3204372 - RNA, 19 nt, Artificial Sequence
  Description of Artificial Sequence: Synthetic oligonucleotide
acauguggcaauaaacugu

SEQ ID NO: 3204373 - RNA, 19 nt, Artificial Sequence
  Description of Artificial Sequence: Synthetic oligonucleotide
ucucuuugcucuaaauauu

SEQ ID NO: 3204374 - RNA, 19 nt, Artificial Sequence
  Description of Artificial Sequence: Synthetic oligonucleotide
auucaucacuagaaaagag

SEQ ID NO: 3204375 - RNA, 19 nt, Artificial Sequence
  Description of Artificial Sequence: Synthetic oligonucleotide
guugaagcugcucuuggca

SEQ ID NO: 3204376 - RNA, 19 nt, Artificial Sequence
  Description of Artificial Sequence: Synthetic oligonucleotide
ucuucauuguacaguucaa

SEQ ID NO: 3204377 - RNA, 19 nt, Artificial Sequence
  Description of Artificial Sequence: Synthetic oligonucleotide
cugcucuuggcacugaguc

SEQ ID NO: 3204378 - RNA, 19 nt, Artificial Sequence
  Description of Artificial Sequence: Synthetic oligonucleotide
uacaguucaaauggaaaua

SEQ ID NO: 3204379 - RNA, 19 nt, Artificial Sequence
  Description of Artificial Sequence: Synthetic oligonucleotide
ucccagguccacauguggc

SEQ ID NO: 3204380 - RNA, 19 nt, Artificial Sequence
  Description of Artificial Sequence: Synthetic oligonucleotide
uagugcauugggagcaaca

SEQ ID NO: 3204381 - RNA, 19 nt, Artificial Sequence
  Description of Artificial Sequence: Synthetic oligonucleotide
acuagaaaagagaguuguc

SEQ ID NO: 3204382 - RNA, 19 nt, Artificial Sequence
  Description of Artificial Sequence: Synthetic oligonucleotide
cuguugaagcugcucuugg

SEQ ID NO: 3204383 - RNA, 19 nt, Artificial Sequence
  Description of Artificial Sequence: Synthetic oligonucleotide
ugaagcugcucuuggcacu

SEQ ID NO: 3204384 - RNA, 19 nt, Artificial Sequence
  Description of Artificial Sequence: Synthetic oligonucleotide
agguagagaucucuuugcu

SEQ ID NO: 3204385 - RNA, 19 nt, Artificial Sequence
  Description of Artificial Sequence: Synthetic oligonucleotide
aacuguugaagcugcucuu

SEQ ID NO: 3204386 - RNA, 19 nt, Artificial Sequence
  Description of Artificial Sequence: Synthetic oligonucleotide
ugcucuaaauauucuucau

SEQ ID NO: 3204387 - RNA, 19 nt, Artificial Sequence
  Description of Artificial Sequence: Synthetic oligonucleotide
uaaacuguugaagcugcuc

SEQ ID NO: 3204388 - RNA, 19 nt, Artificial Sequence
  Description of Artificial Sequence: Synthetic oligonucleotide
auugggagcaacacaaaau

SEQ ID NO: 3204389 - RNA, 19 nt, Artificial Sequence
  Description of Artificial Sequence: Synthetic oligonucleotide
guacaguucaaauggaaau

SEQ ID NO: 3204390 - RNA, 19 nt, Artificial Sequence
  Description of Artificial Sequence: Synthetic oligonucleotide
guggcaauaaacuguugaa

SEQ ID NO: 3204391 - RNA, 19 nt, Artificial Sequence
  Description of Artificial Sequence: Synthetic oligonucleotide
acuguugaagcugcucuug

SEQ ID NO: 3204392 - RNA, 19 nt, Artificial Sequence
  Description of Artificial Sequence: Synthetic oligonucleotide
ggagcaacacaaaaugcug

SEQ ID NO: 3204393 - RNA, 19 nt, Artificial Sequence
  Description of Artificial Sequence: Synthetic oligonucleotide
ugcucuuggcacugaguca

SEQ ID NO: 3204394 - RNA, 19 nt, Artificial Sequence
  Description of Artificial Sequence: Synthetic oligonucleotide
agaucucuuugcucuaaau

SEQ ID NO: 3204395 - RNA, 19 nt, Artificial Sequence
  Description of Artificial Sequence: Synthetic oligonucleotide
ugucccagguccacaugug

SEQ ID NO: 3204396 - RNA, 19 nt, Artificial Sequence
  Description of Artificial Sequence: Synthetic oligonucleotide
gucccagguccacaugugg

SEQ ID NO: 3204397 - RNA, 19 nt, Artificial Sequence
  Description of Artificial Sequence: Synthetic oligonucleotide
aaaacugaacacuagacgc

SEQ ID NO: 3204398 - RNA, 19 nt, Artificial Sequence
  Description of Artificial Sequence: Synthetic oligonucleotide
aaaucaaagagacugaucu

SEQ ID NO: 3204399 - RNA, 19 nt, Artificial Sequence
  Description of Artificial Sequence: Synthetic oligonucleotide
aaugcuggaaaacacagac

SEQ ID NO: 3204400 - RNA, 19 nt, Artificial Sequence
  Description of Artificial Sequence: Synthetic oligonucleotide
ucauauaccacucggaugg

SEQ ID NO: 3204401 - RNA, 19 nt, Artificial Sequence
  Description of Artificial Sequence: Synthetic oligonucleotide
aaugauaucaugcaggaau

SEQ ID NO: 3204402 - RNA, 19 nt, Artificial Sequence
  Description of Artificial Sequence: Synthetic oligonucleotide
aaggagaugcaguaggucc

SEQ ID NO: 3204403 - RNA, 19 nt, Artificial Sequence
  Description of Artificial Sequence: Synthetic oligonucleotide
uaugucgagacucacaaag

SEQ ID NO: 3204404 - RNA, 19 nt, Artificial Sequence
  Description of Artificial Sequence: Synthetic oligonucleotide
aagagaaagaaguuacagg

SEQ ID NO: 3204405 - RNA, 19 nt, Artificial Sequence
  Description of Artificial Sequence: Synthetic oligonucleotide
uuugaagaacuucucaagg

SEQ ID NO: 3204406 - RNA, 19 nt, Artificial Sequence
  Description of Artificial Sequence: Synthetic oligonucleotide
auuuguuugauucuccuuc

SEQ ID NO: 3204407 - RNA, 19 nt, Artificial Sequence
  Description of Artificial Sequence: Synthetic oligonucleotide
auuguguccuaccagagac

SEQ ID NO: 3204408 - RNA, 19 nt, Artificial Sequence
  Description of Artificial Sequence: Synthetic oligonucleotide
gaugacaggaaauaggcug

SEQ ID NO: 3204409 - RNA, 19 nt, Artificial Sequence
  Description of Artificial Sequence: Synthetic oligonucleotide
uaucaugcaggaaugagag

SEQ ID NO: 3204410 - RNA, 19 nt, Artificial Sequence
  Description of Artificial Sequence: Synthetic oligonucleotide
ugguaaaucaaagagacug

SEQ ID NO: 3204411 - RNA, 19 nt, Artificial Sequence
  Description of Artificial Sequence: Synthetic oligonucleotide
agcaccuacguccauagcc

SEQ ID NO: 3204412 - RNA, 19 nt, Artificial Sequence
  Description of Artificial Sequence: Synthetic oligonucleotide
aacuccgaguccaagaucc

SEQ ID NO: 3204413 - RNA, 19 nt, Artificial Sequence
  Description of Artificial Sequence: Synthetic oligonucleotide
auuaaugauaucaugcagg

SEQ ID NO: 3204414 - RNA, 19 nt, Artificial Sequence
  Description of Artificial Sequence: Synthetic oligonucleotide
gaugguaaaucaaagagac

SEQ ID NO: 3204415 - RNA, 19 nt, Artificial Sequence
  Description of Artificial Sequence: Synthetic oligonucleotide
aaagagacugaucugcgug

SEQ ID NO: 3204416 - RNA, 19 nt, Artificial Sequence
  Description of Artificial Sequence: Synthetic oligonucleotide
aacaucuugauaaaguuca

SEQ ID NO: 3204417 - RNA, 19 nt, Artificial Sequence
  Description of Artificial Sequence: Synthetic oligonucleotide
acaucauacacuuacuucu

SEQ ID NO: 3204418 - RNA, 19 nt, Artificial Sequence
  Description of Artificial Sequence: Synthetic oligonucleotide
ucaaugcuggaaaacacag

SEQ ID NO: 3204419 - RNA, 19 nt, Artificial Sequence
  Description of Artificial Sequence: Synthetic oligonucleotide
uuugauucuccuucaaugc

SEQ ID NO: 3204420 - RNA, 19 nt, Artificial Sequence
  Description of Artificial Sequence: Synthetic oligonucleotide
uuaaugauaucaugcagga

SEQ ID NO: 3204421 - RNA, 19 nt, Artificial Sequence
  Description of Artificial Sequence: Synthetic oligonucleotide
uuggugucgaugaugacag

SEQ ID NO: 3204422 - RNA, 19 nt, Artificial Sequence
  Description of Artificial Sequence: Synthetic oligonucleotide
auuguaaauugcugaacac

SEQ ID NO: 3204423 - RNA, 19 nt, Artificial Sequence
  Description of Artificial Sequence: Synthetic oligonucleotide
gaugaugacaggaaauagg

SEQ ID NO: 3204424 - RNA, 19 nt, Artificial Sequence
  Description of Artificial Sequence: Synthetic oligonucleotide
uccaagaucccaaacguug

SEQ ID NO: 3204425 - RNA, 19 nt, Artificial Sequence
  Description of Artificial Sequence: Synthetic oligonucleotide
acacagacaauccaauccg

SEQ ID NO: 3204426 - RNA, 19 nt, Artificial Sequence
  Description of Artificial Sequence: Synthetic oligonucleotide
aaacacagacaauccaauc

SEQ ID NO: 3204427 - RNA, 19 nt, Artificial Sequence
  Description of Artificial Sequence: Synthetic oligonucleotide
aagucugccucauuaauga

SEQ ID NO: 3204428 - RNA, 19 nt, Artificial Sequence
  Description of Artificial Sequence: Synthetic oligonucleotide
uccaucaucauauuguguc

SEQ ID NO: 3204429 - RNA, 19 nt, Artificial Sequence
  Description of Artificial Sequence: Synthetic oligonucleotide
guuugauucuccuucaaug

SEQ ID NO: 3204430 - RNA, 19 nt, Artificial Sequence
  Description of Artificial Sequence: Synthetic oligonucleotide
acauauuguaaauugcuga

SEQ ID NO: 3204431 - RNA, 19 nt, Artificial Sequence
  Description of Artificial Sequence: Synthetic oligonucleotide
uccgacauauuguaaauug

SEQ ID NO: 3204432 - RNA, 19 nt, Artificial Sequence
  Description of Artificial Sequence: Synthetic oligonucleotide
gaguccaagaucccaaacg

SEQ ID NO: 3204433 - RNA, 19 nt, Artificial Sequence
  Description of Artificial Sequence: Synthetic oligonucleotide
uaaauugcugaacacucug

SEQ ID NO: 3204434 - RNA, 19 nt, Artificial Sequence
  Description of Artificial Sequence: Synthetic oligonucleotide
uguaugucgagacucacaa

SEQ ID NO: 3204435 - RNA, 19 nt, Artificial Sequence
  Description of Artificial Sequence: Synthetic oligonucleotide
aaacugaacacuagacgcc

SEQ ID NO: 3204436 - RNA, 19 nt, Artificial Sequence
  Description of Artificial Sequence: Synthetic oligonucleotide
acaggaaugggcuacauau

SEQ ID NO: 3204437 - RNA, 19 nt, Artificial Sequence
  Description of Artificial Sequence: Synthetic oligonucleotide
ugcaguagguccaucauca

SEQ ID NO: 3204438 - RNA, 19 nt, Artificial Sequence
  Description of Artificial Sequence: Synthetic oligonucleotide
aagagacugaucugcgugg

SEQ ID NO: 3204439 - RNA, 19 nt, Artificial Sequence
  Description of Artificial Sequence: Synthetic oligonucleotide
gaugaguuugaacacaguc

SEQ ID NO: 3204440 - RNA, 19 nt, Artificial Sequence
  Description of Artificial Sequence: Synthetic oligonucleotide
gaugucuucugucacauuc

SEQ ID NO: 3204441 - RNA, 19 nt, Artificial Sequence
  Description of Artificial Sequence: Synthetic oligonucleotide
ucugcuuaaacucaucgua

SEQ ID NO: 3204442 - RNA, 19 nt, Artificial Sequence
  Description of Artificial Sequence: Synthetic oligonucleotide
ugggcucucaccaacaucu

SEQ ID NO: 3204443 - RNA, 19 nt, Artificial Sequence
  Description of Artificial Sequence: Synthetic oligonucleotide
ucaaagagacugaucugcg

SEQ ID NO: 3204444 - RNA, 19 nt, Artificial Sequence
  Description of Artificial Sequence: Synthetic oligonucleotide
aaugcauuuccuuccagau

SEQ ID NO: 3204445 - RNA, 19 nt, Artificial Sequence
  Description of Artificial Sequence: Synthetic oligonucleotide
aaaugcauuuccuuccaga

SEQ ID NO: 3204446 - RNA, 19 nt, Artificial Sequence
  Description of Artificial Sequence: Synthetic oligonucleotide
uguagggaagagaaagaag

SEQ ID NO: 3204447 - RNA, 19 nt, Artificial Sequence
  Description of Artificial Sequence: Synthetic oligonucleotide
cucaccaacaucuugauaa

SEQ ID NO: 3204448 - RNA, 19 nt, Artificial Sequence
  Description of Artificial Sequence: Synthetic oligonucleotide
gaacuucucaaggagaugc

SEQ ID NO: 3204449 - RNA, 19 nt, Artificial Sequence
  Description of Artificial Sequence: Synthetic oligonucleotide
uuguaggaaaugcauuucc

SEQ ID NO: 3204450 - RNA, 19 nt, Artificial Sequence
  Description of Artificial Sequence: Synthetic oligonucleotide
ucgagacucacaaagucug

SEQ ID NO: 3204451 - RNA, 19 nt, Artificial Sequence
  Description of Artificial Sequence: Synthetic oligonucleotide
auagccacuaguuccgagg

SEQ ID NO: 3204452 - RNA, 19 nt, Artificial Sequence
  Description of Artificial Sequence: Synthetic oligonucleotide
uccauagccacuaguuccg

SEQ ID NO: 3204453 - RNA, 19 nt, Artificial Sequence
  Description of Artificial Sequence: Synthetic oligonucleotide
ucauauuguguccuaccag

SEQ ID NO: 3204454 - RNA, 19 nt, Artificial Sequence
  Description of Artificial Sequence: Synthetic oligonucleotide
guuugaagaacuucucaag

SEQ ID NO: 3204455 - RNA, 19 nt, Artificial Sequence
  Description of Artificial Sequence: Synthetic oligonucleotide
aaucaaagagacugaucug

SEQ ID NO: 3204456 - RNA, 19 nt, Artificial Sequence
  Description of Artificial Sequence: Synthetic oligonucleotide
aaagagaacuccgagucca

SEQ ID NO: 3204457 - RNA, 19 nt, Artificial Sequence
  Description of Artificial Sequence: Synthetic oligonucleotide
agaaagaaguuacaggaau

SEQ ID NO: 3204458 - RNA, 19 nt, Artificial Sequence
  Description of Artificial Sequence: Synthetic oligonucleotide
uucaaugcuggaaaacaca

SEQ ID NO: 3204459 - RNA, 19 nt, Artificial Sequence
  Description of Artificial Sequence: Synthetic oligonucleotide
ucauacacuuacuucugag

SEQ ID NO: 3204460 - RNA, 19 nt, Artificial Sequence
  Description of Artificial Sequence: Synthetic oligonucleotide
uugaacacaguccugugaa

SEQ ID NO: 3204461 - RNA, 19 nt, Artificial Sequence
  Description of Artificial Sequence: Synthetic oligonucleotide
cauuaaugauaucaugcag

SEQ ID NO: 3204462 - RNA, 19 nt, Artificial Sequence
  Description of Artificial Sequence: Synthetic oligonucleotide
aacacuagacgccuggaaa

SEQ ID NO: 3204463 - RNA, 19 nt, Artificial Sequence
  Description of Artificial Sequence: Synthetic oligonucleotide
ugauucuccuucaaugcug

SEQ ID NO: 3204464 - RNA, 19 nt, Artificial Sequence
  Description of Artificial Sequence: Synthetic oligonucleotide
aagagguuugaagaacuuc

SEQ ID NO: 3204465 - RNA, 19 nt, Artificial Sequence
  Description of Artificial Sequence: Synthetic oligonucleotide
gagguuggaggcuuguagg

SEQ ID NO: 3204466 - RNA, 19 nt, Artificial Sequence
  Description of Artificial Sequence: Synthetic oligonucleotide
aguccugugaacuguaugu

SEQ ID NO: 3204467 - RNA, 19 nt, Artificial Sequence
  Description of Artificial Sequence: Synthetic oligonucleotide
uggauguucugcuuaaacu

SEQ ID NO: 3204468 - RNA, 19 nt, Artificial Sequence
  Description of Artificial Sequence: Synthetic oligonucleotide
uccugugaacuguaugucg

SEQ ID NO: 3204469 - RNA, 19 nt, Artificial Sequence
  Description of Artificial Sequence: Synthetic oligonucleotide
uucauauaccacucggaug

SEQ ID NO: 3204470 - RNA, 19 nt, Artificial Sequence
  Description of Artificial Sequence: Synthetic oligonucleotide
ucuucauauaccacucgga

SEQ ID NO: 3204471 - RNA, 19 nt, Artificial Sequence
  Description of Artificial Sequence: Synthetic oligonucleotide
gucuucauauaccacucgg

SEQ ID NO: 3204472 - RNA, 19 nt, Artificial Sequence
  Description of Artificial Sequence: Synthetic oligonucleotide
uuaguggcauucaagucac

SEQ ID NO: 3204473 - RNA, 19 nt, Artificial Sequence
  Description of Artificial Sequence: Synthetic oligonucleotide
uguaggaaaugcauuuccu

SEQ ID NO: 3204474 - RNA, 19 nt, Artificial Sequence
  Description of Artificial Sequence: Synthetic oligonucleotide
gauaucaugcaggaaugag

SEQ ID NO: 3204475 - RNA, 19 nt, Artificial Sequence
  Description of Artificial Sequence: Synthetic oligonucleotide
aacacaguccugugaacug

SEQ ID NO: 3204476 - RNA, 19 nt, Artificial Sequence
  Description of Artificial Sequence: Synthetic oligonucleotide
uuaaacucaucguagcuuu

SEQ ID NO: 3204477 - RNA, 19 nt, Artificial Sequence
  Description of Artificial Sequence: Synthetic oligonucleotide
auauuguaaauugcugaac

SEQ ID NO: 3204478 - RNA, 19 nt, Artificial Sequence
  Description of Artificial Sequence: Synthetic oligonucleotide
aacguuguagggaagagaa

SEQ ID NO: 3204479 - RNA, 19 nt, Artificial Sequence
  Description of Artificial Sequence: Synthetic oligonucleotide
uucaagucacugcucagca

SEQ ID NO: 3204480 - RNA, 19 nt, Artificial Sequence
  Description of Artificial Sequence: Synthetic oligonucleotide
agacaauccaauccgacau

SEQ ID NO: 3204481 - RNA, 19 nt, Artificial Sequence
  Description of Artificial Sequence: Synthetic oligonucleotide
agagguuggaggcuuguag

SEQ ID NO: 3204482 - RNA, 19 nt, Artificial Sequence
  Description of Artificial Sequence: Synthetic oligonucleotide
aguuacaggaaugggcuac

SEQ ID NO: 3204483 - RNA, 19 nt, Artificial Sequence
  Description of Artificial Sequence: Synthetic oligonucleotide
uauaccacucggaugguaa

SEQ ID NO: 3204484 - RNA, 19 nt, Artificial Sequence
  Description of Artificial Sequence: Synthetic oligonucleotide
acacuagacgccuggaaag

SEQ ID NO: 3204485 - RNA, 19 nt, Artificial Sequence
  Description of Artificial Sequence: Synthetic oligonucleotide
uggcauucaagucacugcu

SEQ ID NO: 3204486 - RNA, 19 nt, Artificial Sequence
  Description of Artificial Sequence: Synthetic oligonucleotide
uacauauuuguuugauucu

SEQ ID NO: 3204487 - RNA, 19 nt, Artificial Sequence
  Description of Artificial Sequence: Synthetic oligonucleotide
gaaagaaguuacaggaaug

SEQ ID NO: 3204488 - RNA, 19 nt, Artificial Sequence
  Description of Artificial Sequence: Synthetic oligonucleotide
gacauauuguaaauugcug

SEQ ID NO: 3204489 - RNA, 19 nt, Artificial Sequence
  Description of Artificial Sequence: Synthetic oligonucleotide
aauccgacauauuguaaau

SEQ ID NO: 3204490 - RNA, 19 nt, Artificial Sequence
  Description of Artificial Sequence: Synthetic oligonucleotide
uuuguuugauucuccuuca

SEQ ID NO: 3204491 - RNA, 19 nt, Artificial Sequence
  Description of Artificial Sequence: Synthetic oligonucleotide
aucauauuguguccuacca

SEQ ID NO: 3204492 - RNA, 19 nt, Artificial Sequence
  Description of Artificial Sequence: Synthetic oligonucleotide
ugcuuaaacucaucguagc

SEQ ID NO: 3204493 - RNA, 19 nt, Artificial Sequence
  Description of Artificial Sequence: Synthetic oligonucleotide
uaaaucaaagagacugauc

SEQ ID NO: 3204494 - RNA, 19 nt, Artificial Sequence
  Description of Artificial Sequence: Synthetic oligonucleotide
aaugagagggucucugcaa

SEQ ID NO: 3204495 - RNA, 19 nt, Artificial Sequence
  Description of Artificial Sequence: Synthetic oligonucleotide
agacugaucugcguggggc

SEQ ID NO: 3204496 - RNA, 19 nt, Artificial Sequence
  Description of Artificial Sequence: Synthetic oligonucleotide
uguccuaccagagacuucu

SEQ ID NO: 3204497 - RNA, 19 nt, Artificial Sequence
  Description of Artificial Sequence: Synthetic oligonucleotide
aauacugcgguuuaaaagc

SEQ ID NO: 3204498 - RNA, 19 nt, Artificial Sequence
  Description of Artificial Sequence: Synthetic oligonucleotide
auuuccaguauauacaaac

SEQ ID NO: 3204499 - RNA, 19 nt, Artificial Sequence
  Description of Artificial Sequence: Synthetic oligonucleotide
aagaauaccaauugucaac

SEQ ID NO: 3204500 - RNA, 19 nt, Artificial Sequence
  Description of Artificial Sequence: Synthetic oligonucleotide
uuuuaugugaauuucugag

SEQ ID NO: 3204501 - RNA, 19 nt, Artificial Sequence
  Description of Artificial Sequence: Synthetic oligonucleotide
aaucucaacagguuaaguc

SEQ ID NO: 3204502 - RNA, 19 nt, Artificial Sequence
  Description of Artificial Sequence: Synthetic oligonucleotide
uuuacuuucaucuuggaaa

SEQ ID NO: 3204503 - RNA, 19 nt, Artificial Sequence
  Description of Artificial Sequence: Synthetic oligonucleotide
aucuauaucaaucagggca

SEQ ID NO: 3204504 - RNA, 19 nt, Artificial Sequence
  Description of Artificial Sequence: Synthetic oligonucleotide
acauauaauguguacacac

SEQ ID NO: 3204505 - RNA, 19 nt, Artificial Sequence
  Description of Artificial Sequence: Synthetic oligonucleotide
aaagcagcaucauagaugu

SEQ ID NO: 3204506 - RNA, 19 nt, Artificial Sequence
  Description of Artificial Sequence: Synthetic oligonucleotide
aaugauuagaaccccaaca

SEQ ID NO: 3204507 - RNA, 19 nt, Artificial Sequence
  Description of Artificial Sequence: Synthetic oligonucleotide
agcaggaucgguuacauac

SEQ ID NO: 3204508 - RNA, 19 nt, Artificial Sequence
  Description of Artificial Sequence: Synthetic oligonucleotide
uauguaaaugucuacaugu

SEQ ID NO: 3204509 - RNA, 19 nt, Artificial Sequence
  Description of Artificial Sequence: Synthetic oligonucleotide
uccaccauaacucuggaag

SEQ ID NO: 3204510 - RNA, 19 nt, Artificial Sequence
  Description of Artificial Sequence: Synthetic oligonucleotide
uacacaaacauauacauau

SEQ ID NO: 3204511 - RNA, 19 nt, Artificial Sequence
  Description of Artificial Sequence: Synthetic oligonucleotide
auacauauaauguguacac

SEQ ID NO: 3204512 - RNA, 19 nt, Artificial Sequence
  Description of Artificial Sequence: Synthetic oligonucleotide
uauaaauauguaaaugucu

SEQ ID NO: 3204513 - RNA, 19 nt, Artificial Sequence
  Description of Artificial Sequence: Synthetic oligonucleotide
aaaaugugcgaacugcuuc

SEQ ID NO: 3204514 - RNA, 19 nt, Artificial Sequence
  Description of Artificial Sequence: Synthetic oligonucleotide
aauaacuaaugccccauuc

SEQ ID NO: 3204515 - RNA, 19 nt, Artificial Sequence
  Description of Artificial Sequence: Synthetic oligonucleotide
auauaauguguacacacac

SEQ ID NO: 3204516 - RNA, 19 nt, Artificial Sequence
  Description of Artificial Sequence: Synthetic oligonucleotide
aaagaauaacuaaugcccc

SEQ ID NO: 3204517 - RNA, 19 nt, Artificial Sequence
  Description of Artificial Sequence: Synthetic oligonucleotide
uguuauuuccaguauauac

SEQ ID NO: 3204518 - RNA, 19 nt, Artificial Sequence
  Description of Artificial Sequence: Synthetic oligonucleotide
ucuauaguaauacugcggu

SEQ ID NO: 3204519 - RNA, 19 nt, Artificial Sequence
  Description of Artificial Sequence: Synthetic oligonucleotide
auaucuauaucaaucaggg

SEQ ID NO: 3204520 - RNA, 19 nt, Artificial Sequence
  Description of Artificial Sequence: Synthetic oligonucleotide
ucaucuaaagagaaagacc

SEQ ID NO: 3204521 - RNA, 19 nt, Artificial Sequence
  Description of Artificial Sequence: Synthetic oligonucleotide
acuagcauucagaagaucc

SEQ ID NO: 3204522 - RNA, 19 nt, Artificial Sequence
  Description of Artificial Sequence: Synthetic oligonucleotide
aacagguuaagucacauuu

SEQ ID NO: 3204523 - RNA, 19 nt, Artificial Sequence
  Description of Artificial Sequence: Synthetic oligonucleotide
cuccuauucaucuaaagag

SEQ ID NO: 3204524 - RNA, 19 nt, Artificial Sequence
  Description of Artificial Sequence: Synthetic oligonucleotide
auacacacuagucacaaag

SEQ ID NO: 3204525 - RNA, 19 nt, Artificial Sequence
  Description of Artificial Sequence: Synthetic oligonucleotide
uucuauaguaauacugcgg

SEQ ID NO: 3204526 - RNA, 19 nt, Artificial Sequence
  Description of Artificial Sequence: Synthetic oligonucleotide
aaauuauuuccuuguguag

SEQ ID NO: 3204527 - RNA, 19 nt, Artificial Sequence
  Description of Artificial Sequence: Synthetic oligonucleotide
uaauacugcgguuuaaaag

SEQ ID NO: 3204528 - RNA, 19 nt, Artificial Sequence
  Description of Artificial Sequence: Synthetic oligonucleotide
uaaagcagcaucauagaug

SEQ ID NO: 3204529 - RNA, 19 nt, Artificial Sequence
  Description of Artificial Sequence: Synthetic oligonucleotide
uguguacacaaacauauac

SEQ ID NO: 3204530 - RNA, 19 nt, Artificial Sequence
  Description of Artificial Sequence: Synthetic oligonucleotide
agcucuuugguaaauaccc

SEQ ID NO: 3204531 - RNA, 19 nt, Artificial Sequence
  Description of Artificial Sequence: Synthetic oligonucleotide
uguuuauauaacuaucagu

SEQ ID NO: 3204532 - RNA, 19 nt, Artificial Sequence
  Description of Artificial Sequence: Synthetic oligonucleotide
gauuagaaccccaacaagc

SEQ ID NO: 3204533 - RNA, 19 nt, Artificial Sequence
  Description of Artificial Sequence: Synthetic oligonucleotide
aagauccaaaucuucagcu

SEQ ID NO: 3204534 - RNA, 19 nt, Artificial Sequence
  Description of Artificial Sequence: Synthetic oligonucleotide
uguacacaaacauauacau

SEQ ID NO: 3204535 - RNA, 19 nt, Artificial Sequence
  Description of Artificial Sequence: Synthetic oligonucleotide
uauauaacuaucagugcac

SEQ ID NO: 3204536 - RNA, 19 nt, Artificial Sequence
  Description of Artificial Sequence: Synthetic oligonucleotide
uauuuugauaacacugagc

SEQ ID NO: 3204537 - RNA, 19 nt, Artificial Sequence
  Description of Artificial Sequence: Synthetic oligonucleotide
gauaacacugagcauuugc

SEQ ID NO: 3204538 - RNA, 19 nt, Artificial Sequence
  Description of Artificial Sequence: Synthetic oligonucleotide
caguauuuugauaacacug

SEQ ID NO: 3204539 - RNA, 19 nt, Artificial Sequence
  Description of Artificial Sequence: Synthetic oligonucleotide
ucuccuauucaucuaaaga

SEQ ID NO: 3204540 - RNA, 19 nt, Artificial Sequence
  Description of Artificial Sequence: Synthetic oligonucleotide
aauuauuuccuuguguaga

SEQ ID NO: 3204541 - RNA, 19 nt, Artificial Sequence
  Description of Artificial Sequence: Synthetic oligonucleotide
uuugauaacacugagcauu

SEQ ID NO: 3204542 - RNA, 19 nt, Artificial Sequence
  Description of Artificial Sequence: Synthetic oligonucleotide
gaaaccuuaaagcagcauc

SEQ ID NO: 3204543 - RNA, 19 nt, Artificial Sequence
  Description of Artificial Sequence: Synthetic oligonucleotide
uguguaaaggauuuuacuu

SEQ ID NO: 3204544 - RNA, 19 nt, Artificial Sequence
  Description of Artificial Sequence: Synthetic oligonucleotide
aauggcuccugcucucucc

SEQ ID NO: 3204545 - RNA, 19 nt, Artificial Sequence
  Description of Artificial Sequence: Synthetic oligonucleotide
uuuguuauuuccaguauau

SEQ ID NO: 3204546 - RNA, 19 nt, Artificial Sequence
  Description of Artificial Sequence: Synthetic oligonucleotide
acuuaaugaucacuuauug

SEQ ID NO: 3204547 - RNA, 19 nt, Artificial Sequence
  Description of Artificial Sequence: Synthetic oligonucleotide
auauacaaaccccagcucu

SEQ ID NO: 3204548 - RNA, 19 nt, Artificial Sequence
  Description of Artificial Sequence: Synthetic oligonucleotide
auugagaccaguacugugc

SEQ ID NO: 3204549 - RNA, 19 nt, Artificial Sequence
  Description of Artificial Sequence: Synthetic oligonucleotide
uuuugauugagaccaguac

SEQ ID NO: 3204550 - RNA, 19 nt, Artificial Sequence
  Description of Artificial Sequence: Synthetic oligonucleotide
uacuucuucacaaaauuaa

SEQ ID NO: 3204551 - RNA, 19 nt, Artificial Sequence
  Description of Artificial Sequence: Synthetic oligonucleotide
aaugaucacuuauugcaca

SEQ ID NO: 3204552 - RNA, 19 nt, Artificial Sequence
  Description of Artificial Sequence: Synthetic oligonucleotide
auuauuuccuuguguagag

SEQ ID NO: 3204553 - RNA, 19 nt, Artificial Sequence
  Description of Artificial Sequence: Synthetic oligonucleotide
cuagucacaaagauguuac

SEQ ID NO: 3204554 - RNA, 19 nt, Artificial Sequence
  Description of Artificial Sequence: Synthetic oligonucleotide
agguauagccucugaaacc

SEQ ID NO: 3204555 - RNA, 19 nt, Artificial Sequence
  Description of Artificial Sequence: Synthetic oligonucleotide
ucuauaucaaucagggcaa

SEQ ID NO: 3204556 - RNA, 19 nt, Artificial Sequence
  Description of Artificial Sequence: Synthetic oligonucleotide
uagucuucagaaaacaguc

SEQ ID NO: 3204557 - RNA, 19 nt, Artificial Sequence
  Description of Artificial Sequence: Synthetic oligonucleotide
ugcacauaaagaauaacua

SEQ ID NO: 3204558 - RNA, 19 nt, Artificial Sequence
  Description of Artificial Sequence: Synthetic oligonucleotide
acuaucagugcacuuaaug

SEQ ID NO: 3204559 - RNA, 19 nt, Artificial Sequence
  Description of Artificial Sequence: Synthetic oligonucleotide
guuaagucacauuuugaag

SEQ ID NO: 3204560 - RNA, 19 nt, Artificial Sequence
  Description of Artificial Sequence: Synthetic oligonucleotide
ugauggauuaguuugcuau

SEQ ID NO: 3204561 - RNA, 19 nt, Artificial Sequence
  Description of Artificial Sequence: Synthetic oligonucleotide
ugaauuucugaguaaggac

SEQ ID NO: 3204562 - RNA, 19 nt, Artificial Sequence
  Description of Artificial Sequence: Synthetic oligonucleotide
accaaaaugugcgaacugc

SEQ ID NO: 3204563 - RNA, 19 nt, Artificial Sequence
  Description of Artificial Sequence: Synthetic oligonucleotide
aaucugaugagaaugacuu

SEQ ID NO: 3204564 - RNA, 19 nt, Artificial Sequence
  Description of Artificial Sequence: Synthetic oligonucleotide
cuucuauaguaauacugcg

SEQ ID NO: 3204565 - RNA, 19 nt, Artificial Sequence
  Description of Artificial Sequence: Synthetic oligonucleotide
aauugucaacagcacagug

SEQ ID NO: 3204566 - RNA, 19 nt, Artificial Sequence
  Description of Artificial Sequence: Synthetic oligonucleotide
uuuaugugaauuucugagu

SEQ ID NO: 3204567 - RNA, 19 nt, Artificial Sequence
  Description of Artificial Sequence: Synthetic oligonucleotide
ucuaguguuuauauaacua

SEQ ID NO: 3204568 - RNA, 19 nt, Artificial Sequence
  Description of Artificial Sequence: Synthetic oligonucleotide
aaaugugcgaacugcuuca

SEQ ID NO: 3204569 - RNA, 19 nt, Artificial Sequence
  Description of Artificial Sequence: Synthetic oligonucleotide
uacgaaucugaugagaaug

SEQ ID NO: 3204570 - RNA, 19 nt, Artificial Sequence
  Description of Artificial Sequence: Synthetic oligonucleotide
uccuauucaucuaaagaga

SEQ ID NO: 3204571 - RNA, 19 nt, Artificial Sequence
  Description of Artificial Sequence: Synthetic oligonucleotide
cagaacuccaguuaauaag

SEQ ID NO: 3204572 - RNA, 19 nt, Artificial Sequence
  Description of Artificial Sequence: Synthetic oligonucleotide
ucuacgaaucugaugagaa

SEQ ID NO: 3204573 - RNA, 19 nt, Artificial Sequence
  Description of Artificial Sequence: Synthetic oligonucleotide
cuauacauacaguauuuug

SEQ ID NO: 3204574 - RNA, 19 nt, Artificial Sequence
  Description of Artificial Sequence: Synthetic oligonucleotide
gaagauccaaaucuucagc

SEQ ID NO: 3204575 - RNA, 19 nt, Artificial Sequence
  Description of Artificial Sequence: Synthetic oligonucleotide
uauuuccuuguguagagcu

SEQ ID NO: 3204576 - RNA, 19 nt, Artificial Sequence
  Description of Artificial Sequence: Synthetic oligonucleotide
agaagacaaaauccacagc

SEQ ID NO: 3204577 - RNA, 19 nt, Artificial Sequence
  Description of Artificial Sequence: Synthetic oligonucleotide
ggcugaaaugauuagaacc

SEQ ID NO: 3204578 - RNA, 19 nt, Artificial Sequence
  Description of Artificial Sequence: Synthetic oligonucleotide
aguuguguuggccuuaugu

SEQ ID NO: 3204579 - RNA, 19 nt, Artificial Sequence
  Description of Artificial Sequence: Synthetic oligonucleotide
uacccaagaauaccaauug

SEQ ID NO: 3204580 - RNA, 19 nt, Artificial Sequence
  Description of Artificial Sequence: Synthetic oligonucleotide
gagcuuuugauugagacca

SEQ ID NO: 3204581 - RNA, 19 nt, Artificial Sequence
  Description of Artificial Sequence: Synthetic oligonucleotide
uauaaaacucacgggagug

SEQ ID NO: 3204582 - RNA, 19 nt, Artificial Sequence
  Description of Artificial Sequence: Synthetic oligonucleotide
aagcucuuugguaaauacc

SEQ ID NO: 3204583 - RNA, 19 nt, Artificial Sequence
  Description of Artificial Sequence: Synthetic oligonucleotide
gguuuaaaagcuacuaugg

SEQ ID NO: 3204584 - RNA, 19 nt, Artificial Sequence
  Description of Artificial Sequence: Synthetic oligonucleotide
uguaacccacauuuuaucu

SEQ ID NO: 3204585 - RNA, 19 nt, Artificial Sequence
  Description of Artificial Sequence: Synthetic oligonucleotide
gagguauagccucugaaac

SEQ ID NO: 3204586 - RNA, 19 nt, Artificial Sequence
  Description of Artificial Sequence: Synthetic oligonucleotide
aaacucacgggagugacug

SEQ ID NO: 3204587 - RNA, 19 nt, Artificial Sequence
  Description of Artificial Sequence: Synthetic oligonucleotide
auaacuaaugccccauucu

SEQ ID NO: 3204588 - RNA, 19 nt, Artificial Sequence
  Description of Artificial Sequence: Synthetic oligonucleotide
guuuaaaagcuacuauggc

SEQ ID NO: 3204589 - RNA, 19 nt, Artificial Sequence
  Description of Artificial Sequence: Synthetic oligonucleotide
uaaagagaaagaccagaac

SEQ ID NO: 3204590 - RNA, 19 nt, Artificial Sequence
  Description of Artificial Sequence: Synthetic oligonucleotide
uuacauaccggcagugcag

SEQ ID NO: 3204591 - RNA, 19 nt, Artificial Sequence
  Description of Artificial Sequence: Synthetic oligonucleotide
auaacacugagcauuugcg

SEQ ID NO: 3204592 - RNA, 19 nt, Artificial Sequence
  Description of Artificial Sequence: Synthetic oligonucleotide
uaaugaucacuuauugcac

SEQ ID NO: 3204593 - RNA, 19 nt, Artificial Sequence
  Description of Artificial Sequence: Synthetic oligonucleotide
uauacaaaccccagcucug

SEQ ID NO: 3204594 - RNA, 19 nt, Artificial Sequence
  Description of Artificial Sequence: Synthetic oligonucleotide
ucagugcacuuaaugauca

SEQ ID NO: 3204595 - RNA, 19 nt, Artificial Sequence
  Description of Artificial Sequence: Synthetic oligonucleotide
guaaauacccaagaauacc

SEQ ID NO: 3204596 - RNA, 19 nt, Artificial Sequence
  Description of Artificial Sequence: Synthetic oligonucleotide
aguaguuuuaagcacuuuu

SEQ ID NO: 3204597 - RNA, 19 nt, Artificial Sequence
  Description of Artificial Sequence: Synthetic oligonucleotide
uacuccacaguguauaugg

SEQ ID NO: 3204598 - RNA, 19 nt, Artificial Sequence
  Description of Artificial Sequence: Synthetic oligonucleotide
gacauagacacucucagug

SEQ ID NO: 3204599 - RNA, 19 nt, Artificial Sequence
  Description of Artificial Sequence: Synthetic oligonucleotide
acugcuguccaccagacuc

SEQ ID NO: 3204600 - RNA, 19 nt, Artificial Sequence
  Description of Artificial Sequence: Synthetic oligonucleotide
uugucugugacuuuucuug

SEQ ID NO: 3204601 - RNA, 19 nt, Artificial Sequence
  Description of Artificial Sequence: Synthetic oligonucleotide
uuggccaggacauagacac

SEQ ID NO: 3204602 - RNA, 19 nt, Artificial Sequence
  Description of Artificial Sequence: Synthetic oligonucleotide
gauacugauggccuguuug

SEQ ID NO: 3204603 - RNA, 19 nt, Artificial Sequence
  Description of Artificial Sequence: Synthetic oligonucleotide
uuucuugcccuucagcugc

SEQ ID NO: 3204604 - RNA, 19 nt, Artificial Sequence
  Description of Artificial Sequence: Synthetic oligonucleotide
uccacaguguauauggcgc

SEQ ID NO: 3204605 - RNA, 19 nt, Artificial Sequence
  Description of Artificial Sequence: Synthetic oligonucleotide
acuuuucuugcccuucagc

SEQ ID NO: 3204606 - RNA, 19 nt, Artificial Sequence
  Description of Artificial Sequence: Synthetic oligonucleotide
uggucgcggauacugaugg

SEQ ID NO: 3204607 - RNA, 19 nt, Artificial Sequence
  Description of Artificial Sequence: Synthetic oligonucleotide
acugauggccuguuugagc

SEQ ID NO: 3204608 - RNA, 19 nt, Artificial Sequence
  Description of Artificial Sequence: Synthetic oligonucleotide
uccuguagccgguacaggg

SEQ ID NO: 3204609 - RNA, 19 nt, Artificial Sequence
  Description of Artificial Sequence: Synthetic oligonucleotide
aggacauagacacucucag

SEQ ID NO: 3204610 - RNA, 19 nt, Artificial Sequence
  Description of Artificial Sequence: Synthetic oligonucleotide
cucugguucuuccauagcg

SEQ ID NO: 3204611 - RNA, 19 nt, Artificial Sequence
  Description of Artificial Sequence: Synthetic oligonucleotide
cucucagugaacuugucug

SEQ ID NO: 3204612 - RNA, 19 nt, Artificial Sequence
  Description of Artificial Sequence: Synthetic oligonucleotide
uccaccagacucuucacag

SEQ ID NO: 3204613 - RNA, 19 nt, Artificial Sequence
  Description of Artificial Sequence: Synthetic oligonucleotide
ucugugacuuuucuugccc

SEQ ID NO: 3204614 - RNA, 19 nt, Artificial Sequence
  Description of Artificial Sequence: Synthetic oligonucleotide
ucagcugcaucucugguuc

SEQ ID NO: 3204615 - RNA, 19 nt, Artificial Sequence
  Description of Artificial Sequence: Synthetic oligonucleotide
acugcggaaguacacacug

SEQ ID NO: 3204616 - RNA, 19 nt, Artificial Sequence
  Description of Artificial Sequence: Synthetic oligonucleotide
cacauguuccuguagccgg

SEQ ID NO: 3204617 - RNA, 19 nt, Artificial Sequence
  Description of Artificial Sequence: Synthetic oligonucleotide
cucuucacagcacugcagg

SEQ ID NO: 3204618 - RNA, 19 nt, Artificial Sequence
  Description of Artificial Sequence: Synthetic oligonucleotide
ugcaugucagccuugugcu

SEQ ID NO: 3204619 - RNA, 19 nt, Artificial Sequence
  Description of Artificial Sequence: Synthetic oligonucleotide
cugcaugucagccuugugc

SEQ ID NO: 3204620 - RNA, 19 nt, Artificial Sequence
  Description of Artificial Sequence: Synthetic oligonucleotide
uuuucuugcccuucagcug

SEQ ID NO: 3204621 - RNA, 19 nt, Artificial Sequence
  Description of Artificial Sequence: Synthetic oligonucleotide
ucugguucuuccauagcga

SEQ ID NO: 3204622 - RNA, 19 nt, Artificial Sequence
  Description of Artificial Sequence: Synthetic oligonucleotide
gguucuuccauagcgaagg

SEQ ID NO: 3204623 - RNA, 19 nt, Artificial Sequence
  Description of Artificial Sequence: Synthetic oligonucleotide
aaguacacacugcugucca

SEQ ID NO: 3204624 - RNA, 19 nt, Artificial Sequence
  Description of Artificial Sequence: Synthetic oligonucleotide
ugcggaaguacacacugcu

SEQ ID NO: 3204625 - RNA, 19 nt, Artificial Sequence
  Description of Artificial Sequence: Synthetic oligonucleotide
gguacagggccacugacgg

SEQ ID NO: 3204626 - RNA, 19 nt, Artificial Sequence
  Description of Artificial Sequence: Synthetic oligonucleotide
cuccacaguguauauggcg

SEQ ID NO: 3204627 - RNA, 19 nt, Artificial Sequence
  Description of Artificial Sequence: Synthetic oligonucleotide
agcacugcaggcauacucc

SEQ ID NO: 3204628 - RNA, 19 nt, Artificial Sequence
  Description of Artificial Sequence: Synthetic oligonucleotide
ugagcggcgcacauguucc

SEQ ID NO: 3204629 - RNA, 19 nt, Artificial Sequence
  Description of Artificial Sequence: Synthetic oligonucleotide
acacugcggaaguacacac

SEQ ID NO: 3204630 - RNA, 19 nt, Artificial Sequence
  Description of Artificial Sequence: Synthetic oligonucleotide
gacacucucagugaacuug

SEQ ID NO: 3204631 - RNA, 19 nt, Artificial Sequence
  Description of Artificial Sequence: Synthetic oligonucleotide
agacucuucacagcacugc

SEQ ID NO: 3204632 - RNA, 19 nt, Artificial Sequence
  Description of Artificial Sequence: Synthetic oligonucleotide
aucucugguucuuccauag

SEQ ID NO: 3204633 - RNA, 19 nt, Artificial Sequence
  Description of Artificial Sequence: Synthetic oligonucleotide
cuugugcugggccagcucc

SEQ ID NO: 3204634 - RNA, 19 nt, Artificial Sequence
  Description of Artificial Sequence: Synthetic oligonucleotide
uugcccuucagcugcaucu

SEQ ID NO: 3204635 - RNA, 19 nt, Artificial Sequence
  Description of Artificial Sequence: Synthetic oligonucleotide
ugucugugacuuuucuugc

SEQ ID NO: 3204636 - RNA, 19 nt, Artificial Sequence
  Description of Artificial Sequence: Synthetic oligonucleotide
uuugagcaggccuuccaca

SEQ ID NO: 3204637 - RNA, 19 nt, Artificial Sequence
  Description of Artificial Sequence: Synthetic oligonucleotide
guauauggcgcccuggcuc

SEQ ID NO: 3204638 - RNA, 19 nt, Artificial Sequence
  Description of Artificial Sequence: Synthetic oligonucleotide
caugucagccuugugcugg

SEQ ID NO: 3204639 - RNA, 19 nt, Artificial Sequence
  Description of Artificial Sequence: Synthetic oligonucleotide
uagacacucucagugaacu

SEQ ID NO: 3204640 - RNA, 19 nt, Artificial Sequence
  Description of Artificial Sequence: Synthetic oligonucleotide
auacugauggccuguuuga

SEQ ID NO: 3204641 - RNA, 19 nt, Artificial Sequence
  Description of Artificial Sequence: Synthetic oligonucleotide
acugcaggcauacuccaca

SEQ ID NO: 3204642 - RNA, 19 nt, Artificial Sequence
  Description of Artificial Sequence: Synthetic oligonucleotide
gaaguacacacugcugucc

SEQ ID NO: 3204643 - RNA, 19 nt, Artificial Sequence
  Description of Artificial Sequence: Synthetic oligonucleotide
acauagacacucucaguga

SEQ ID NO: 3204644 - RNA, 19 nt, Artificial Sequence
  Description of Artificial Sequence: Synthetic oligonucleotide
uauauggcgcccuggcucu

SEQ ID NO: 3204645 - RNA, 19 nt, Artificial Sequence
  Description of Artificial Sequence: Synthetic oligonucleotide
uguuugagcaggccuucca

SEQ ID NO: 3204646 - RNA, 19 nt, Artificial Sequence
  Description of Artificial Sequence: Synthetic oligonucleotide
uucauguggucgcggauac

SEQ ID NO: 3204647 - RNA, 19 nt, Artificial Sequence
  Description of Artificial Sequence: Synthetic oligonucleotide
agcuccggcagugagcggc

SEQ ID NO: 3204648 - RNA, 19 nt, Artificial Sequence
  Description of Artificial Sequence: Synthetic oligonucleotide
gauggccuguuugagcagg

SEQ ID NO: 3204649 - RNA, 19 nt, Artificial Sequence
  Description of Artificial Sequence: Synthetic oligonucleotide
uguuccuguagccgguaca

SEQ ID NO: 3204650 - RNA, 19 nt, Artificial Sequence
  Description of Artificial Sequence: Synthetic oligonucleotide
acugacggcucauuggcca

SEQ ID NO: 3204651 - RNA, 19 nt, Artificial Sequence
  Description of Artificial Sequence: Synthetic oligonucleotide
ucagugaacuugucuguga

SEQ ID NO: 3204652 - RNA, 19 nt, Artificial Sequence
  Description of Artificial Sequence: Synthetic oligonucleotide
ucucagugaacuugucugu

SEQ ID NO: 3204653 - RNA, 19 nt, Artificial Sequence
  Description of Artificial Sequence: Synthetic oligonucleotide
uucacagcacugcaggcau

SEQ ID NO: 3204654 - RNA, 19 nt, Artificial Sequence
  Description of Artificial Sequence: Synthetic oligonucleotide
uguauauggcgcccuggcu

SEQ ID NO: 3204655 - RNA, 19 nt, Artificial Sequence
  Description of Artificial Sequence: Synthetic oligonucleotide
cugauggccuguuugagca

SEQ ID NO: 3204656 - RNA, 19 nt, Artificial Sequence
  Description of Artificial Sequence: Synthetic oligonucleotide
ugguucuuccauagcgaag

SEQ ID NO: 3204657 - RNA, 19 nt, Artificial Sequence
  Description of Artificial Sequence: Synthetic oligonucleotide
cugguguucauguggucgc

SEQ ID NO: 3204658 - RNA, 19 nt, Artificial Sequence
  Description of Artificial Sequence: Synthetic oligonucleotide
uugagcaggccuuccacac

SEQ ID NO: 3204659 - RNA, 19 nt, Artificial Sequence
  Description of Artificial Sequence: Synthetic oligonucleotide
ugacuuuucuugcccuuca

SEQ ID NO: 3204660 - RNA, 19 nt, Artificial Sequence
  Description of Artificial Sequence: Synthetic oligonucleotide
aggccuuccacacugcgga

SEQ ID NO: 3204661 - RNA, 19 nt, Artificial Sequence
  Description of Artificial Sequence: Synthetic oligonucleotide
acucucagugaacuugucu

SEQ ID NO: 3204662 - RNA, 19 nt, Artificial Sequence
  Description of Artificial Sequence: Synthetic oligonucleotide
uacagggccacugacggcu

SEQ ID NO: 3204663 - RNA, 19 nt, Artificial Sequence
  Description of Artificial Sequence: Synthetic oligonucleotide
ucuucacagcacugcaggc

SEQ ID NO: 3204664 - RNA, 19 nt, Artificial Sequence
  Description of Artificial Sequence: Synthetic oligonucleotide
aguacacacugcuguccac

SEQ ID NO: 3204665 - RNA, 19 nt, Artificial Sequence
  Description of Artificial Sequence: Synthetic oligonucleotide
uccacacugcggaaguaca

SEQ ID NO: 3204666 - RNA, 19 nt, Artificial Sequence
  Description of Artificial Sequence: Synthetic oligonucleotide
cauguggucgcggauacug

SEQ ID NO: 3204667 - RNA, 19 nt, Artificial Sequence
  Description of Artificial Sequence: Synthetic oligonucleotide
cucauuggccaggacauag

SEQ ID NO: 3204668 - RNA, 19 nt, Artificial Sequence
  Description of Artificial Sequence: Synthetic oligonucleotide
ucagccuugugcugggcca

SEQ ID NO: 3204669 - RNA, 19 nt, Artificial Sequence
  Description of Artificial Sequence: Synthetic oligonucleotide
cuuuucuugcccuucagcu

SEQ ID NO: 3204670 - RNA, 19 nt, Artificial Sequence
  Description of Artificial Sequence: Synthetic oligonucleotide
gcaggcauacuccacagug

SEQ ID NO: 3204671 - RNA, 19 nt, Artificial Sequence
  Description of Artificial Sequence: Synthetic oligonucleotide
guguauauggcgcccuggc

SEQ ID NO: 3204672 - RNA, 19 nt, Artificial Sequence
  Description of Artificial Sequence: Synthetic oligonucleotide
gagcaggccuuccacacug

SEQ ID NO: 3204673 - RNA, 19 nt, Artificial Sequence
  Description of Artificial Sequence: Synthetic oligonucleotide
cauuggccaggacauagac

SEQ ID NO: 3204674 - RNA, 19 nt, Artificial Sequence
  Description of Artificial Sequence: Synthetic oligonucleotide
ucauuggccaggacauaga

SEQ ID NO: 3204675 - RNA, 19 nt, Artificial Sequence
  Description of Artificial Sequence: Synthetic oligonucleotide
acuugucugugacuuuucu

SEQ ID NO: 3204676 - RNA, 19 nt, Artificial Sequence
  Description of Artificial Sequence: Synthetic oligonucleotide
auagacacucucagugaac

SEQ ID NO: 3204677 - RNA, 19 nt, Artificial Sequence
  Description of Artificial Sequence: Synthetic oligonucleotide
aguguauauggcgcccugg

SEQ ID NO: 3204678 - RNA, 19 nt, Artificial Sequence
  Description of Artificial Sequence: Synthetic oligonucleotide
guuccuguagccgguacag

SEQ ID NO: 3204679 - RNA, 19 nt, Artificial Sequence
  Description of Artificial Sequence: Synthetic oligonucleotide
agugaacuugucugugacu

SEQ ID NO: 3204680 - RNA, 19 nt, Artificial Sequence
  Description of Artificial Sequence: Synthetic oligonucleotide
cuguagccgguacagggcc

SEQ ID NO: 3204681 - RNA, 19 nt, Artificial Sequence
  Description of Artificial Sequence: Synthetic oligonucleotide
gacuuuucuugcccuucag

SEQ ID NO: 3204682 - RNA, 19 nt, Artificial Sequence
  Description of Artificial Sequence: Synthetic oligonucleotide
uugugcugggccagcuccg

SEQ ID NO: 3204683 - RNA, 19 nt, Artificial Sequence
  Description of Artificial Sequence: Synthetic oligonucleotide
cagugaacuugucugugac

SEQ ID NO: 3204684 - RNA, 19 nt, Artificial Sequence
  Description of Artificial Sequence: Synthetic oligonucleotide
guuugagcaggccuuccac

SEQ ID NO: 3204685 - RNA, 19 nt, Artificial Sequence
  Description of Artificial Sequence: Synthetic oligonucleotide
ggcgcugguguucaugugg

SEQ ID NO: 3204686 - RNA, 19 nt, Artificial Sequence
  Description of Artificial Sequence: Synthetic oligonucleotide
uacacacugcuguccacca

SEQ ID NO: 3204687 - RNA, 19 nt, Artificial Sequence
  Description of Artificial Sequence: Synthetic oligonucleotide
gacucuucacagcacugca

SEQ ID NO: 3204688 - RNA, 19 nt, Artificial Sequence
  Description of Artificial Sequence: Synthetic oligonucleotide
ugcaucucugguucuucca

SEQ ID NO: 3204689 - RNA, 19 nt, Artificial Sequence
  Description of Artificial Sequence: Synthetic oligonucleotide
aacuugucugugacuuuuc

SEQ ID NO: 3204690 - RNA, 19 nt, Artificial Sequence
  Description of Artificial Sequence: Synthetic oligonucleotide
ucgcggauacugauggccu

SEQ ID NO: 3204691 - RNA, 19 nt, Artificial Sequence
  Description of Artificial Sequence: Synthetic oligonucleotide
gcugguguucauguggucg

SEQ ID NO: 3204692 - RNA, 19 nt, Artificial Sequence
  Description of Artificial Sequence: Synthetic oligonucleotide
auguuccuguagccgguac

SEQ ID NO: 3204693 - RNA, 19 nt, Artificial Sequence
  Description of Artificial Sequence: Synthetic oligonucleotide
gucugugacuuuucuugcc

SEQ ID NO: 3204694 - RNA, 19 nt, Artificial Sequence
  Description of Artificial Sequence: Synthetic oligonucleotide
uacugauggccuguuugag

SEQ ID NO: 3204695 - RNA, 19 nt, Artificial Sequence
  Description of Artificial Sequence: Synthetic oligonucleotide
gucgcggauacugauggcc

SEQ ID NO: 3204696 - RNA, 19 nt, Artificial Sequence
  Description of Artificial Sequence: Synthetic oligonucleotide
uucagcugcaucucugguu

SEQ ID NO: 3204697 - RNA, 19 nt, Artificial Sequence
  Description of Artificial Sequence: Synthetic oligonucleotide
aaucaagggacuucaagac

SEQ ID NO: 3204698 - RNA, 19 nt, Artificial Sequence
  Description of Artificial Sequence: Synthetic oligonucleotide
auucggauaucccagaugg

SEQ ID NO: 3204699 - RNA, 19 nt, Artificial Sequence
  Description of Artificial Sequence: Synthetic oligonucleotide
aagggaaguagccagaggu

SEQ ID NO: 3204700 - RNA, 19 nt, Artificial Sequence
  Description of Artificial Sequence: Synthetic oligonucleotide
aaguacagagccaucaggc

SEQ ID NO: 3204701 - RNA, 19 nt, Artificial Sequence
  Description of Artificial Sequence: Synthetic oligonucleotide
cucacuugggccuugaagg

SEQ ID NO: 3204702 - RNA, 19 nt, Artificial Sequence
  Description of Artificial Sequence: Synthetic oligonucleotide
aggagaucgagucuguagc

SEQ ID NO: 3204703 - RNA, 19 nt, Artificial Sequence
  Description of Artificial Sequence: Synthetic oligonucleotide
aaacaggaaguuguguucc

SEQ ID NO: 3204704 - RNA, 19 nt, Artificial Sequence
  Description of Artificial Sequence: Synthetic oligonucleotide
agucaaguguuuuccagcc

SEQ ID NO: 3204705 - RNA, 19 nt, Artificial Sequence
  Description of Artificial Sequence: Synthetic oligonucleotide
uagauaacuggcauugaag

SEQ ID NO: 3204706 - RNA, 19 nt, Artificial Sequence
  Description of Artificial Sequence: Synthetic oligonucleotide
uucaagaccuccuuggccc

SEQ ID NO: 3204707 - RNA, 19 nt, Artificial Sequence
  Description of Artificial Sequence: Synthetic oligonucleotide
ucaagggacuucaagaccu

SEQ ID NO: 3204708 - RNA, 19 nt, Artificial Sequence
  Description of Artificial Sequence: Synthetic oligonucleotide
augacagguagauaacugg

SEQ ID NO: 3204709 - RNA, 19 nt, Artificial Sequence
  Description of Artificial Sequence: Synthetic oligonucleotide
gacuucaagaccuccuugg

SEQ ID NO: 3204710 - RNA, 19 nt, Artificial Sequence
  Description of Artificial Sequence: Synthetic oligonucleotide
ucucagcugaaacaggaag

SEQ ID NO: 3204711 - RNA, 19 nt, Artificial Sequence
  Description of Artificial Sequence: Synthetic oligonucleotide
agcagcgucagcaaggugc

SEQ ID NO: 3204712 - RNA, 19 nt, Artificial Sequence
  Description of Artificial Sequence: Synthetic oligonucleotide
gaaguuguguuccuccagg

SEQ ID NO: 3204713 - RNA, 19 nt, Artificial Sequence
  Description of Artificial Sequence: Synthetic oligonucleotide
aucaagggacuucaagacc

SEQ ID NO: 3204714 - RNA, 19 nt, Artificial Sequence
  Description of Artificial Sequence: Synthetic oligonucleotide
gaaguacagagccaucagg

SEQ ID NO: 3204715 - RNA, 19 nt, Artificial Sequence
  Description of Artificial Sequence: Synthetic oligonucleotide
ugaacugccggcauuucag

SEQ ID NO: 3204716 - RNA, 19 nt, Artificial Sequence
  Description of Artificial Sequence: Synthetic oligonucleotide
auaacuggcauugaaguug

SEQ ID NO: 3204717 - RNA, 19 nt, Artificial Sequence
  Description of Artificial Sequence: Synthetic oligonucleotide
ucaaguguuuuccagccac

SEQ ID NO: 3204718 - RNA, 19 nt, Artificial Sequence
  Description of Artificial Sequence: Synthetic oligonucleotide
uuguccaccagaaguacag

SEQ ID NO: 3204719 - RNA, 19 nt, Artificial Sequence
  Description of Artificial Sequence: Synthetic oligonucleotide
uaacuggcauugaaguugg

SEQ ID NO: 3204720 - RNA, 19 nt, Artificial Sequence
  Description of Artificial Sequence: Synthetic oligonucleotide
ugacagguagauaacuggc

SEQ ID NO: 3204721 - RNA, 19 nt, Artificial Sequence
  Description of Artificial Sequence: Synthetic oligonucleotide
uguucaacacggaaagucu

SEQ ID NO: 3204722 - RNA, 19 nt, Artificial Sequence
  Description of Artificial Sequence: Synthetic oligonucleotide
agagguguguggcaggaac

SEQ ID NO: 3204723 - RNA, 19 nt, Artificial Sequence
  Description of Artificial Sequence: Synthetic oligonucleotide
uuuccagccacagugaacu

SEQ ID NO: 3204724 - RNA, 19 nt, Artificial Sequence
  Description of Artificial Sequence: Synthetic oligonucleotide
aaguuguguuccuccaggg

SEQ ID NO: 3204725 - RNA, 19 nt, Artificial Sequence
  Description of Artificial Sequence: Synthetic oligonucleotide
aacacggaaagucucccca

SEQ ID NO: 3204726 - RNA, 19 nt, Artificial Sequence
  Description of Artificial Sequence: Synthetic oligonucleotide
agagccaucaggcaugaca

SEQ ID NO: 3204727 - RNA, 19 nt, Artificial Sequence
  Description of Artificial Sequence: Synthetic oligonucleotide
acuucaagaccuccuuggc

SEQ ID NO: 3204728 - RNA, 19 nt, Artificial Sequence
  Description of Artificial Sequence: Synthetic oligonucleotide
uguguggcaggaaccacgg

SEQ ID NO: 3204729 - RNA, 19 nt, Artificial Sequence
  Description of Artificial Sequence: Synthetic oligonucleotide
cuguucagcaccuugagca

SEQ ID NO: 3204730 - RNA, 19 nt, Artificial Sequence
  Description of Artificial Sequence: Synthetic oligonucleotide
acagaaggagcccauggag

SEQ ID NO: 3204731 - RNA, 19 nt, Artificial Sequence
  Description of Artificial Sequence: Synthetic oligonucleotide
ugaaacaggaaguuguguu

SEQ ID NO: 3204732 - RNA, 19 nt, Artificial Sequence
  Description of Artificial Sequence: Synthetic oligonucleotide
cucuguucaacacggaaag

SEQ ID NO: 3204733 - RNA, 19 nt, Artificial Sequence
  Description of Artificial Sequence: Synthetic oligonucleotide
uucaacacggaaagucucc

SEQ ID NO: 3204734 - RNA, 19 nt, Artificial Sequence
  Description of Artificial Sequence: Synthetic oligonucleotide
aggcaugacagguagauaa

SEQ ID NO: 3204735 - RNA, 19 nt, Artificial Sequence
  Description of Artificial Sequence: Synthetic oligonucleotide
aaguggacaagggaaguag

SEQ ID NO: 3204736 - RNA, 19 nt, Artificial Sequence
  Description of Artificial Sequence: Synthetic oligonucleotide
aagucuccccaggagaucg

SEQ ID NO: 3204737 - RNA, 19 nt, Artificial Sequence
  Description of Artificial Sequence: Synthetic oligonucleotide
ucggauaucccagauggag

SEQ ID NO: 3204738 - RNA, 19 nt, Artificial Sequence
  Description of Artificial Sequence: Synthetic oligonucleotide
ggcauuucagaacuggagg

SEQ ID NO: 3204739 - RNA, 19 nt, Artificial Sequence
  Description of Artificial Sequence: Synthetic oligonucleotide
aaccacggcaaucaaggga

SEQ ID NO: 3204740 - RNA, 19 nt, Artificial Sequence
  Description of Artificial Sequence: Synthetic oligonucleotide
accacggcaaucaagggac

SEQ ID NO: 3204741 - RNA, 19 nt, Artificial Sequence
  Description of Artificial Sequence: Synthetic oligonucleotide
uccuccagggcacuaagug

SEQ ID NO: 3204742 - RNA, 19 nt, Artificial Sequence
  Description of Artificial Sequence: Synthetic oligonucleotide
auggagaucucuuccuggg

SEQ ID NO: 3204743 - RNA, 19 nt, Artificial Sequence
  Description of Artificial Sequence: Synthetic oligonucleotide
gaaacaggaaguuguguuc

SEQ ID NO: 3204744 - RNA, 19 nt, Artificial Sequence
  Description of Artificial Sequence: Synthetic oligonucleotide
uggagacuuccccagacug

SEQ ID NO: 3204745 - RNA, 19 nt, Artificial Sequence
  Description of Artificial Sequence: Synthetic oligonucleotide
uugaaguuggggaggauuc

SEQ ID NO: 3204746 - RNA, 19 nt, Artificial Sequence
  Description of Artificial Sequence: Synthetic oligonucleotide
agcacagucaaguguuuuc

SEQ ID NO: 3204747 - RNA, 19 nt, Artificial Sequence
  Description of Artificial Sequence: Synthetic oligonucleotide
caaucaagggacuucaaga

SEQ ID NO: 3204748 - RNA, 19 nt, Artificial Sequence
  Description of Artificial Sequence: Synthetic oligonucleotide
acagucaaguguuuuccag

SEQ ID NO: 3204749 - RNA, 19 nt, Artificial Sequence
  Description of Artificial Sequence: Synthetic oligonucleotide
aaggcgcucuguucaacac

SEQ ID NO: 3204750 - RNA, 19 nt, Artificial Sequence
  Description of Artificial Sequence: Synthetic oligonucleotide
uugagcacagucaaguguu

SEQ ID NO: 3204751 - RNA, 19 nt, Artificial Sequence
  Description of Artificial Sequence: Synthetic oligonucleotide
uacagagccaucaggcaug

SEQ ID NO: 3204752 - RNA, 19 nt, Artificial Sequence
  Description of Artificial Sequence: Synthetic oligonucleotide
ggaaccacggcaaucaagg

SEQ ID NO: 3204753 - RNA, 19 nt, Artificial Sequence
  Description of Artificial Sequence: Synthetic oligonucleotide
aguagccagagguaccagg

SEQ ID NO: 3204754 - RNA, 19 nt, Artificial Sequence
  Description of Artificial Sequence: Synthetic oligonucleotide
uggcauugaaguuggggag

SEQ ID NO: 3204755 - RNA, 19 nt, Artificial Sequence
  Description of Artificial Sequence: Synthetic oligonucleotide
caugacagguagauaacug

SEQ ID NO: 3204756 - RNA, 19 nt, Artificial Sequence
  Description of Artificial Sequence: Synthetic oligonucleotide
agaaguacagagccaucag

SEQ ID NO: 3204757 - RNA, 19 nt, Artificial Sequence
  Description of Artificial Sequence: Synthetic oligonucleotide
caaggugcucacuugggcc

SEQ ID NO: 3204758 - RNA, 19 nt, Artificial Sequence
  Description of Artificial Sequence: Synthetic oligonucleotide
gaucccugacuucuggugc

SEQ ID NO: 3204759 - RNA, 19 nt, Artificial Sequence
  Description of Artificial Sequence: Synthetic oligonucleotide
agcccauggagacuucccc

SEQ ID NO: 3204760 - RNA, 19 nt, Artificial Sequence
  Description of Artificial Sequence: Synthetic oligonucleotide
agguagauaacuggcauug

SEQ ID NO: 3204761 - RNA, 19 nt, Artificial Sequence
  Description of Artificial Sequence: Synthetic oligonucleotide
uguagcaagcgcagguagc

SEQ ID NO: 3204762 - RNA, 19 nt, Artificial Sequence
  Description of Artificial Sequence: Synthetic oligonucleotide
gagccaucaggcaugacag

SEQ ID NO: 3204763 - RNA, 19 nt, Artificial Sequence
  Description of Artificial Sequence: Synthetic oligonucleotide
uuggggaggauucggauau

SEQ ID NO: 3204764 - RNA, 19 nt, Artificial Sequence
  Description of Artificial Sequence: Synthetic oligonucleotide
aaggugcucacuugggccu

SEQ ID NO: 3204765 - RNA, 19 nt, Artificial Sequence
  Description of Artificial Sequence: Synthetic oligonucleotide
agaucgagucuguagcaag

SEQ ID NO: 3204766 - RNA, 19 nt, Artificial Sequence
  Description of Artificial Sequence: Synthetic oligonucleotide
gcauuucagaacuggaggg

SEQ ID NO: 3204767 - RNA, 19 nt, Artificial Sequence
  Description of Artificial Sequence: Synthetic oligonucleotide
ucucuuccugggaagagcu

SEQ ID NO: 3204768 - RNA, 19 nt, Artificial Sequence
  Description of Artificial Sequence: Synthetic oligonucleotide
acuggcauugaaguugggg

SEQ ID NO: 3204769 - RNA, 19 nt, Artificial Sequence
  Description of Artificial Sequence: Synthetic oligonucleotide
gaggauucggauaucccag

SEQ ID NO: 3204770 - RNA, 19 nt, Artificial Sequence
  Description of Artificial Sequence: Synthetic oligonucleotide
uucagcaccuugagcacag

SEQ ID NO: 3204771 - RNA, 19 nt, Artificial Sequence
  Description of Artificial Sequence: Synthetic oligonucleotide
gauucggauaucccagaug

SEQ ID NO: 3204772 - RNA, 19 nt, Artificial Sequence
  Description of Artificial Sequence: Synthetic oligonucleotide
aucccugacuucuggugcc

SEQ ID NO: 3204773 - RNA, 19 nt, Artificial Sequence
  Description of Artificial Sequence: Synthetic oligonucleotide
uguuuuccagccacaguga

SEQ ID NO: 3204774 - RNA, 19 nt, Artificial Sequence
  Description of Artificial Sequence: Synthetic oligonucleotide
gguaccaggaagccgacag

SEQ ID NO: 3204775 - RNA, 19 nt, Artificial Sequence
  Description of Artificial Sequence: Synthetic oligonucleotide
ugaucccugacuucuggug

SEQ ID NO: 3204776 - RNA, 19 nt, Artificial Sequence
  Description of Artificial Sequence: Synthetic oligonucleotide
gacguuguccaccagaagu

SEQ ID NO: 3204777 - RNA, 19 nt, Artificial Sequence
  Description of Artificial Sequence: Synthetic oligonucleotide
acuaaguggacaagggaag

SEQ ID NO: 3204778 - RNA, 19 nt, Artificial Sequence
  Description of Artificial Sequence: Synthetic oligonucleotide
cagucaaguguuuuccagc

SEQ ID NO: 3204779 - RNA, 19 nt, Artificial Sequence
  Description of Artificial Sequence: Synthetic oligonucleotide
aaguguuuuccagccacag

SEQ ID NO: 3204780 - RNA, 19 nt, Artificial Sequence
  Description of Artificial Sequence: Synthetic oligonucleotide
auaucccagauggagaucu

SEQ ID NO: 3204781 - RNA, 19 nt, Artificial Sequence
  Description of Artificial Sequence: Synthetic oligonucleotide
cuucaagaccuccuuggcc

SEQ ID NO: 3204782 - RNA, 19 nt, Artificial Sequence
  Description of Artificial Sequence: Synthetic oligonucleotide
acuggugacagacguuguc

SEQ ID NO: 3204783 - RNA, 19 nt, Artificial Sequence
  Description of Artificial Sequence: Synthetic oligonucleotide
cuggcauugaaguugggga

SEQ ID NO: 3204784 - RNA, 19 nt, Artificial Sequence
  Description of Artificial Sequence: Synthetic oligonucleotide
gaaguuggggaggauucgg

SEQ ID NO: 3204785 - RNA, 19 nt, Artificial Sequence
  Description of Artificial Sequence: Synthetic oligonucleotide
cauuucagaacuggagggg

SEQ ID NO: 3204786 - RNA, 19 nt, Artificial Sequence
  Description of Artificial Sequence: Synthetic oligonucleotide
cuugaucccugacuucugg

SEQ ID NO: 3204787 - RNA, 19 nt, Artificial Sequence
  Description of Artificial Sequence: Synthetic oligonucleotide
gagaucucuuccugggaag

SEQ ID NO: 3204788 - RNA, 19 nt, Artificial Sequence
  Description of Artificial Sequence: Synthetic oligonucleotide
aucucuuccugggaagagc

SEQ ID NO: 3204789 - RNA, 19 nt, Artificial Sequence
  Description of Artificial Sequence: Synthetic oligonucleotide
ugggaagagcuguucagca

SEQ ID NO: 3204790 - RNA, 19 nt, Artificial Sequence
  Description of Artificial Sequence: Synthetic oligonucleotide
caggaaguuguguuccucc

SEQ ID NO: 3204791 - RNA, 19 nt, Artificial Sequence
  Description of Artificial Sequence: Synthetic oligonucleotide
cuugaaggcgcucuguuca

SEQ ID NO: 3204792 - RNA, 19 nt, Artificial Sequence
  Description of Artificial Sequence: Synthetic oligonucleotide
acagguagauaacuggcau

SEQ ID NO: 3204793 - RNA, 19 nt, Artificial Sequence
  Description of Artificial Sequence: Synthetic oligonucleotide
agccagagguaccaggaag

SEQ ID NO: 3204794 - RNA, 19 nt, Artificial Sequence
  Description of Artificial Sequence: Synthetic oligonucleotide
agagguaccaggaagccga

SEQ ID NO: 3204795 - RNA, 19 nt, Artificial Sequence
  Description of Artificial Sequence: Synthetic oligonucleotide
ugaaguuggggaggauucg

SEQ ID NO: 3204796 - RNA, 19 nt, Artificial Sequence
  Description of Artificial Sequence: Synthetic oligonucleotide
aguacagagccaucaggca

SEQ ID NO: 3204797 - RNA, 19 nt, Artificial Sequence
  Description of Artificial Sequence: Synthetic oligonucleotide
ucugaauggauauuuauca

SEQ ID NO: 3204798 - RNA, 19 nt, Artificial Sequence
  Description of Artificial Sequence: Synthetic oligonucleotide
uggauauuuaucaccaugc

SEQ ID NO: 3204799 - RNA, 19 nt, Artificial Sequence
  Description of Artificial Sequence: Synthetic oligonucleotide
aguaguuggcugcagagac

SEQ ID NO: 3204800 - RNA, 19 nt, Artificial Sequence
  Description of Artificial Sequence: Synthetic oligonucleotide
uuugggguaaucuucaaac

SEQ ID NO: 3204801 - RNA, 19 nt, Artificial Sequence
  Description of Artificial Sequence: Synthetic oligonucleotide
aaaccaaucaggaaacagg

SEQ ID NO: 3204802 - RNA, 19 nt, Artificial Sequence
  Description of Artificial Sequence: Synthetic oligonucleotide
ugaauggauauuuaucacc

SEQ ID NO: 3204803 - RNA, 19 nt, Artificial Sequence
  Description of Artificial Sequence: Synthetic oligonucleotide
auauuuaucaccaugccug

SEQ ID NO: 3204804 - RNA, 19 nt, Artificial Sequence
  Description of Artificial Sequence: Synthetic oligonucleotide
aucuucaaacuucucaugg

SEQ ID NO: 3204805 - RNA, 19 nt, Artificial Sequence
  Description of Artificial Sequence: Synthetic oligonucleotide
caaggcaaaaccaaucagg

SEQ ID NO: 3204806 - RNA, 19 nt, Artificial Sequence
  Description of Artificial Sequence: Synthetic oligonucleotide
agggcaaacacuccgggcc

SEQ ID NO: 3204807 - RNA, 19 nt, Artificial Sequence
  Description of Artificial Sequence: Synthetic oligonucleotide
aaucaggaaacagggaugg

SEQ ID NO: 3204808 - RNA, 19 nt, Artificial Sequence
  Description of Artificial Sequence: Synthetic oligonucleotide
guaaacaaugcgcugaaug

SEQ ID NO: 3204809 - RNA, 19 nt, Artificial Sequence
  Description of Artificial Sequence: Synthetic oligonucleotide
uaaacaaugcgcugaaugu

SEQ ID NO: 3204810 - RNA, 19 nt, Artificial Sequence
  Description of Artificial Sequence: Synthetic oligonucleotide
cuagccacaaggcaaaacc

SEQ ID NO: 3204811 - RNA, 19 nt, Artificial Sequence
  Description of Artificial Sequence: Synthetic oligonucleotide
aaccaaucaggaaacaggg

SEQ ID NO: 3204812 - RNA, 19 nt, Artificial Sequence
  Description of Artificial Sequence: Synthetic oligonucleotide
aaaaccaaucaggaaacag

SEQ ID NO: 3204813 - RNA, 19 nt, Artificial Sequence
  Description of Artificial Sequence: Synthetic oligonucleotide
uuuucuuugauuuggggua

SEQ ID NO: 3204814 - RNA, 19 nt, Artificial Sequence
  Description of Artificial Sequence: Synthetic oligonucleotide
augugaacagggcaaacac

SEQ ID NO: 3204815 - RNA, 19 nt, Artificial Sequence
  Description of Artificial Sequence: Synthetic oligonucleotide
ucucagauuccucaggaug

SEQ ID NO: 3204816 - RNA, 19 nt, Artificial Sequence
  Description of Artificial Sequence: Synthetic oligonucleotide
acaaauggaauuuagcauu

SEQ ID NO: 3204817 - RNA, 19 nt, Artificial Sequence
  Description of Artificial Sequence: Synthetic oligonucleotide
ucaaacaagccuccccugg

SEQ ID NO: 3204818 - RNA, 19 nt, Artificial Sequence
  Description of Artificial Sequence: Synthetic oligonucleotide
cuacaaauggaauuuagca

SEQ ID NO: 3204819 - RNA, 19 nt, Artificial Sequence
  Description of Artificial Sequence: Synthetic oligonucleotide
uauucaaacaagccucccc

SEQ ID NO: 3204820 - RNA, 19 nt, Artificial Sequence
  Description of Artificial Sequence: Synthetic oligonucleotide
aaugcgcugaaugugaaca

SEQ ID NO: 3204821 - RNA, 19 nt, Artificial Sequence
  Description of Artificial Sequence: Synthetic oligonucleotide
ucaggauguggucugaaug

SEQ ID NO: 3204822 - RNA, 19 nt, Artificial Sequence
  Description of Artificial Sequence: Synthetic oligonucleotide
uuuucucagauuccucagg

SEQ ID NO: 3204823 - RNA, 19 nt, Artificial Sequence
  Description of Artificial Sequence: Synthetic oligonucleotide
uaaucuucaaacuucucau

SEQ ID NO: 3204824 - RNA, 19 nt, Artificial Sequence
  Description of Artificial Sequence: Synthetic oligonucleotide
uacaaauggaauuuagcau

SEQ ID NO: 3204825 - RNA, 19 nt, Artificial Sequence
  Description of Artificial Sequence: Synthetic oligonucleotide
guaaucuucaaacuucuca

SEQ ID NO: 3204826 - RNA, 19 nt, Artificial Sequence
  Description of Artificial Sequence: Synthetic oligonucleotide
ucaaacuucucaugguacc

SEQ ID NO: 3204827 - RNA, 19 nt, Artificial Sequence
  Description of Artificial Sequence: Synthetic oligonucleotide
ucuuguauccuguuucccc

SEQ ID NO: 3204828 - RNA, 19 nt, Artificial Sequence
  Description of Artificial Sequence: Synthetic oligonucleotide
aaucuucaaacuucucaug

SEQ ID NO: 3204829 - RNA, 19 nt, Artificial Sequence
  Description of Artificial Sequence: Synthetic oligonucleotide
gaaguaguuggcugcagag

SEQ ID NO: 3204830 - RNA, 19 nt, Artificial Sequence
  Description of Artificial Sequence: Synthetic oligonucleotide
augccugcuagccacaagg

SEQ ID NO: 3204831 - RNA, 19 nt, Artificial Sequence
  Description of Artificial Sequence: Synthetic oligonucleotide
aaagcuacaaauggaauuu

SEQ ID NO: 3204832 - RNA, 19 nt, Artificial Sequence
  Description of Artificial Sequence: Synthetic oligonucleotide
uaaagcuacaaauggaauu

SEQ ID NO: 3204833 - RNA, 19 nt, Artificial Sequence
  Description of Artificial Sequence: Synthetic oligonucleotide
cuuguauccuguuuccccg

SEQ ID NO: 3204834 - RNA, 19 nt, Artificial Sequence
  Description of Artificial Sequence: Synthetic oligonucleotide
auggauauuuaucaccaug

SEQ ID NO: 3204835 - RNA, 19 nt, Artificial Sequence
  Description of Artificial Sequence: Synthetic oligonucleotide
gaacagggcaaacacuccg

SEQ ID NO: 3204836 - RNA, 19 nt, Artificial Sequence
  Description of Artificial Sequence: Synthetic oligonucleotide
uuucucagauuccucagga

SEQ ID NO: 3204837 - RNA, 19 nt, Artificial Sequence
  Description of Artificial Sequence: Synthetic oligonucleotide
cagcuaaagcuacaaaugg

SEQ ID NO: 3204838 - RNA, 19 nt, Artificial Sequence
  Description of Artificial Sequence: Synthetic oligonucleotide
uugauuugggguaaucuuc

SEQ ID NO: 3204839 - RNA, 19 nt, Artificial Sequence
  Description of Artificial Sequence: Synthetic oligonucleotide
auucaaacaagccuccccu

SEQ ID NO: 3204840 - RNA, 19 nt, Artificial Sequence
  Description of Artificial Sequence: Synthetic oligonucleotide
caggauguggucugaaugg

SEQ ID NO: 3204841 - RNA, 19 nt, Artificial Sequence
  Description of Artificial Sequence: Synthetic oligonucleotide
acguauucaaacaagccuc

SEQ ID NO: 3204842 - RNA, 19 nt, Artificial Sequence
  Description of Artificial Sequence: Synthetic oligonucleotide
uccguaaucuccccgaagu

SEQ ID NO: 3204843 - RNA, 19 nt, Artificial Sequence
  Description of Artificial Sequence: Synthetic oligonucleotide
ugauuugggguaaucuuca

SEQ ID NO: 3204844 - RNA, 19 nt, Artificial Sequence
  Description of Artificial Sequence: Synthetic oligonucleotide
agcagcuaaagcuacaaau

SEQ ID NO: 3204845 - RNA, 19 nt, Artificial Sequence
  Description of Artificial Sequence: Synthetic oligonucleotide
ugcagagacguauucaaac

SEQ ID NO: 3204846 - RNA, 19 nt, Artificial Sequence
  Description of Artificial Sequence: Synthetic oligonucleotide
aaacaagccuccccugggg

SEQ ID NO: 3204847 - RNA, 19 nt, Artificial Sequence
  Description of Artificial Sequence: Synthetic oligonucleotide
aucaccaugccugcuagcc

SEQ ID NO: 3204848 - RNA, 19 nt, Artificial Sequence
  Description of Artificial Sequence: Synthetic oligonucleotide
uucaaacuucucaugguac

SEQ ID NO: 3204849 - RNA, 19 nt, Artificial Sequence
  Description of Artificial Sequence: Synthetic oligonucleotide
aaugugaacagggcaaaca

SEQ ID NO: 3204850 - RNA, 19 nt, Artificial Sequence
  Description of Artificial Sequence: Synthetic oligonucleotide
gaauggauauuuaucacca

SEQ ID NO: 3204851 - RNA, 19 nt, Artificial Sequence
  Description of Artificial Sequence: Synthetic oligonucleotide
uuugauuugggguaaucuu

SEQ ID NO: 3204852 - RNA, 19 nt, Artificial Sequence
  Description of Artificial Sequence: Synthetic oligonucleotide
aaacaaugcgcugaaugug

SEQ ID NO: 3204853 - RNA, 19 nt, Artificial Sequence
  Description of Artificial Sequence: Synthetic oligonucleotide
uuaucaccaugccugcuag

SEQ ID NO: 3204854 - RNA, 19 nt, Artificial Sequence
  Description of Artificial Sequence: Synthetic oligonucleotide
aaacuucucaugguaccac

SEQ ID NO: 3204855 - RNA, 19 nt, Artificial Sequence
  Description of Artificial Sequence: Synthetic oligonucleotide
agacguauucaaacaagcc

SEQ ID NO: 3204856 - RNA, 19 nt, Artificial Sequence
  Description of Artificial Sequence: Synthetic oligonucleotide
gacccugguaaacaaugcg

SEQ ID NO: 3204857 - RNA, 19 nt, Artificial Sequence
  Description of Artificial Sequence: Synthetic oligonucleotide
aaggcaaaaccaaucagga

SEQ ID NO: 3204858 - RNA, 19 nt, Artificial Sequence
  Description of Artificial Sequence: Synthetic oligonucleotide
ucgacccugguaaacaaug

SEQ ID NO: 3204859 - RNA, 19 nt, Artificial Sequence
  Description of Artificial Sequence: Synthetic oligonucleotide
ucaggaaacagggaugggc

SEQ ID NO: 3204860 - RNA, 19 nt, Artificial Sequence
  Description of Artificial Sequence: Synthetic oligonucleotide
caggaaacagggaugggcc

SEQ ID NO: 3204861 - RNA, 19 nt, Artificial Sequence
  Description of Artificial Sequence: Synthetic oligonucleotide
gaucuuguauccuguuucc

SEQ ID NO: 3204862 - RNA, 19 nt, Artificial Sequence
  Description of Artificial Sequence: Synthetic oligonucleotide
aucuccccgaaguaguugg

SEQ ID NO: 3204863 - RNA, 19 nt, Artificial Sequence
  Description of Artificial Sequence: Synthetic oligonucleotide
uauuuaucaccaugccugc

SEQ ID NO: 3204864 - RNA, 19 nt, Artificial Sequence
  Description of Artificial Sequence: Synthetic oligonucleotide
gagacguauucaaacaagc

SEQ ID NO: 3204865 - RNA, 19 nt, Artificial Sequence
  Description of Artificial Sequence: Synthetic oligonucleotide
acaaggcaaaaccaaucag

SEQ ID NO: 3204866 - RNA, 19 nt, Artificial Sequence
  Description of Artificial Sequence: Synthetic oligonucleotide
uuuaucaccaugccugcua

SEQ ID NO: 3204867 - RNA, 19 nt, Artificial Sequence
  Description of Artificial Sequence: Synthetic oligonucleotide
gacguauucaaacaagccu

SEQ ID NO: 3204868 - RNA, 19 nt, Artificial Sequence
  Description of Artificial Sequence: Synthetic oligonucleotide
acagggaugggccacccag

SEQ ID NO: 3204869 - RNA, 19 nt, Artificial Sequence
  Description of Artificial Sequence: Synthetic oligonucleotide
ggcaaaaccaaucaggaaa

SEQ ID NO: 3204870 - RNA, 19 nt, Artificial Sequence
  Description of Artificial Sequence: Synthetic oligonucleotide
gauauuuaucaccaugccu

SEQ ID NO: 3204871 - RNA, 19 nt, Artificial Sequence
  Description of Artificial Sequence: Synthetic oligonucleotide
ucucaugguaccacuggug

SEQ ID NO: 3204872 - RNA, 19 nt, Artificial Sequence
  Description of Artificial Sequence: Synthetic oligonucleotide
acccugguaaacaaugcgc

SEQ ID NO: 3204873 - RNA, 19 nt, Artificial Sequence
  Description of Artificial Sequence: Synthetic oligonucleotide
aaacacuccgggccugggg

SEQ ID NO: 3204874 - RNA, 19 nt, Artificial Sequence
  Description of Artificial Sequence: Synthetic oligonucleotide
ugugaacagggcaaacacu

SEQ ID NO: 3204875 - RNA, 19 nt, Artificial Sequence
  Description of Artificial Sequence: Synthetic oligonucleotide
ucuucaaacuucucauggu

SEQ ID NO: 3204876 - RNA, 19 nt, Artificial Sequence
  Description of Artificial Sequence: Synthetic oligonucleotide
ggugaugcugcuucgaccc

SEQ ID NO: 3204877 - RNA, 19 nt, Artificial Sequence
  Description of Artificial Sequence: Synthetic oligonucleotide
cuucucaugguaccacugg

SEQ ID NO: 3204878 - RNA, 19 nt, Artificial Sequence
  Description of Artificial Sequence: Synthetic oligonucleotide
ugcaaaguccacaccacuc

SEQ ID NO: 3204879 - RNA, 19 nt, Artificial Sequence
  Description of Artificial Sequence: Synthetic oligonucleotide
aacaaugcgcugaauguga

SEQ ID NO: 3204880 - RNA, 19 nt, Artificial Sequence
  Description of Artificial Sequence: Synthetic oligonucleotide
caaucaggaaacagggaug

SEQ ID NO: 3204881 - RNA, 19 nt, Artificial Sequence
  Description of Artificial Sequence: Synthetic oligonucleotide
aacuucucaugguaccacu

SEQ ID NO: 3204882 - RNA, 19 nt, Artificial Sequence
  Description of Artificial Sequence: Synthetic oligonucleotide
cugaauggauauuuaucac

SEQ ID NO: 3204883 - RNA, 19 nt, Artificial Sequence
  Description of Artificial Sequence: Synthetic oligonucleotide
guuuucucagauuccucag

SEQ ID NO: 3204884 - RNA, 19 nt, Artificial Sequence
  Description of Artificial Sequence: Synthetic oligonucleotide
uguauccuguuuccccggg

SEQ ID NO: 3204885 - RNA, 19 nt, Artificial Sequence
  Description of Artificial Sequence: Synthetic oligonucleotide
ugggguaaucuucaaacuu

SEQ ID NO: 3204886 - RNA, 19 nt, Artificial Sequence
  Description of Artificial Sequence: Synthetic oligonucleotide
ugaacagggcaaacacucc

SEQ ID NO: 3204887 - RNA, 19 nt, Artificial Sequence
  Description of Artificial Sequence: Synthetic oligonucleotide
aacagggcaaacacuccgg

SEQ ID NO: 3204888 - RNA, 19 nt, Artificial Sequence
  Description of Artificial Sequence: Synthetic oligonucleotide
uagccacaaggcaaaacca

SEQ ID NO: 3204889 - RNA, 19 nt, Artificial Sequence
  Description of Artificial Sequence: Synthetic oligonucleotide
aauggauauuuaucaccau

SEQ ID NO: 3204890 - RNA, 19 nt, Artificial Sequence
  Description of Artificial Sequence: Synthetic oligonucleotide
caaaguccacaccacuccg

SEQ ID NO: 3204891 - RNA, 19 nt, Artificial Sequence
  Description of Artificial Sequence: Synthetic oligonucleotide
uucucaugguaccacuggu

SEQ ID NO: 3204892 - RNA, 19 nt, Artificial Sequence
  Description of Artificial Sequence: Synthetic oligonucleotide
caaacaagccuccccuggg

SEQ ID NO: 3204893 - RNA, 19 nt, Artificial Sequence
  Description of Artificial Sequence: Synthetic oligonucleotide
acagggcaaacacuccggg

SEQ ID NO: 3204894 - RNA, 19 nt, Artificial Sequence
  Description of Artificial Sequence: Synthetic oligonucleotide
uugggguaaucuucaaacu

SEQ ID NO: 3204895 - RNA, 19 nt, Artificial Sequence
  Description of Artificial Sequence: Synthetic oligonucleotide
agagacguauucaaacaag

SEQ ID NO: 3204896 - RNA, 19 nt, Artificial Sequence
  Description of Artificial Sequence: Synthetic oligonucleotide
augguaccacuggugaugc

SEQ ID NO: 3204897 - RNA, 19 nt, Artificial Sequence
  Description of Artificial Sequence: Synthetic oligonucleotide
acuuguguccucuugcucc

SEQ ID NO: 3204898 - RNA, 19 nt, Artificial Sequence
  Description of Artificial Sequence: Synthetic oligonucleotide
ugcuauuuucggaagggag

SEQ ID NO: 3204899 - RNA, 19 nt, Artificial Sequence
  Description of Artificial Sequence: Synthetic oligonucleotide
ucugcuauuuucggaaggg

SEQ ID NO: 3204900 - RNA, 19 nt, Artificial Sequence
  Description of Artificial Sequence: Synthetic oligonucleotide
ugcacuuguguccucuugc

SEQ ID NO: 3204901 - RNA, 19 nt, Artificial Sequence
  Description of Artificial Sequence: Synthetic oligonucleotide
uccguggaagagcugagcc

SEQ ID NO: 3204902 - RNA, 19 nt, Artificial Sequence
  Description of Artificial Sequence: Synthetic oligonucleotide
uucucugcuauuuucggaa

SEQ ID NO: 3204903 - RNA, 19 nt, Artificial Sequence
  Description of Artificial Sequence: Synthetic oligonucleotide
ugcacugcggagcucgcgg

SEQ ID NO: 3204904 - RNA, 19 nt, Artificial Sequence
  Description of Artificial Sequence: Synthetic oligonucleotide
aagagcugagcccucugcu

SEQ ID NO: 3204905 - RNA, 19 nt, Artificial Sequence
  Description of Artificial Sequence: Synthetic oligonucleotide
uguggcaccugcacugcgg

SEQ ID NO: 3204906 - RNA, 19 nt, Artificial Sequence
  Description of Artificial Sequence: Synthetic oligonucleotide
ucuugcucccugcuucagg

SEQ ID NO: 3204907 - RNA, 19 nt, Artificial Sequence
  Description of Artificial Sequence: Synthetic oligonucleotide
ucugcgugcaggcucugcc

SEQ ID NO: 3204908 - RNA, 19 nt, Artificial Sequence
  Description of Artificial Sequence: Synthetic oligonucleotide
ucugccucccagcagcuac

SEQ ID NO: 3204909 - RNA, 19 nt, Artificial Sequence
  Description of Artificial Sequence: Synthetic oligonucleotide
auuuucggaagggaggucu

SEQ ID NO: 3204910 - RNA, 19 nt, Artificial Sequence
  Description of Artificial Sequence: Synthetic oligonucleotide
caacccugcacuugugucc

SEQ ID NO: 3204911 - RNA, 19 nt, Artificial Sequence
  Description of Artificial Sequence: Synthetic oligonucleotide
cagcagcuacccaugaggg

SEQ ID NO: 3204912 - RNA, 19 nt, Artificial Sequence
  Description of Artificial Sequence: Synthetic oligonucleotide
gcuauuuucggaagggagg

SEQ ID NO: 3204913 - RNA, 19 nt, Artificial Sequence
  Description of Artificial Sequence: Synthetic oligonucleotide
gaagagcugagcccucugc

SEQ ID NO: 3204914 - RNA, 19 nt, Artificial Sequence
  Description of Artificial Sequence: Synthetic oligonucleotide
uccucuugcucccugcuuc

SEQ ID NO: 3204915 - RNA, 19 nt, Artificial Sequence
  Description of Artificial Sequence: Synthetic oligonucleotide
agcuguggcaccugcacug

SEQ ID NO: 3204916 - RNA, 19 nt, Artificial Sequence
  Description of Artificial Sequence: Synthetic oligonucleotide
ucucugcuauuuucggaag

SEQ ID NO: 3204917 - RNA, 19 nt, Artificial Sequence
  Description of Artificial Sequence: Synthetic oligonucleotide
agcuucucugcuauuuucg

SEQ ID NO: 3204918 - RNA, 19 nt, Artificial Sequence
  Description of Artificial Sequence: Synthetic oligonucleotide
cucugcuauuuucggaagg

SEQ ID NO: 3204919 - RNA, 19 nt, Artificial Sequence
  Description of Artificial Sequence: Synthetic oligonucleotide
uuuucggaagggaggucug

SEQ ID NO: 3204920 - RNA, 19 nt, Artificial Sequence
  Description of Artificial Sequence: Synthetic oligonucleotide
ugugcacggggccugggca

SEQ ID NO: 3204921 - RNA, 19 nt, Artificial Sequence
  Description of Artificial Sequence: Synthetic oligonucleotide
ucaggugucaggguuccug

SEQ ID NO: 3204922 - RNA, 19 nt, Artificial Sequence
  Description of Artificial Sequence: Synthetic oligonucleotide
cuuguguccucuugcuccc

SEQ ID NO: 3204923 - RNA, 19 nt, Artificial Sequence
  Description of Artificial Sequence: Synthetic oligonucleotide
agcugagcccucugcuucc

SEQ ID NO: 3204924 - RNA, 19 nt, Artificial Sequence
  Description of Artificial Sequence: Synthetic oligonucleotide
uucggaagggaggucugcg

SEQ ID NO: 3204925 - RNA, 19 nt, Artificial Sequence
  Description of Artificial Sequence: Synthetic oligonucleotide
ugcucccugcuucaggugu

SEQ ID NO: 3204926 - RNA, 19 nt, Artificial Sequence
  Description of Artificial Sequence: Synthetic oligonucleotide
caugagggugugcacgggg

SEQ ID NO: 3204927 - RNA, 19 nt, Artificial Sequence
  Description of Artificial Sequence: Synthetic oligonucleotide
ugcuucaggugucaggguu

SEQ ID NO: 3204928 - RNA, 19 nt, Artificial Sequence
  Description of Artificial Sequence: Synthetic oligonucleotide
caggugucaggguuccugg

SEQ ID NO: 3204929 - RNA, 19 nt, Artificial Sequence
  Description of Artificial Sequence: Synthetic oligonucleotide
ugagggugugcacggggcc

SEQ ID NO: 3204930 - RNA, 19 nt, Artificial Sequence
  Description of Artificial Sequence: Synthetic oligonucleotide
aggugucaggguuccuggc

SEQ ID NO: 3204931 - RNA, 19 nt, Artificial Sequence
  Description of Artificial Sequence: Synthetic oligonucleotide
ugcaacccugcacuugugu

SEQ ID NO: 3204932 - RNA, 19 nt, Artificial Sequence
  Description of Artificial Sequence: Synthetic oligonucleotide
ccagcagcuacccaugagg

SEQ ID NO: 3204933 - RNA, 19 nt, Artificial Sequence
  Description of Artificial Sequence: Synthetic oligonucleotide
augagggugugcacggggc

SEQ ID NO: 3204934 - RNA, 19 nt, Artificial Sequence
  Description of Artificial Sequence: Synthetic oligonucleotide
agcccucugcuuccugucc

SEQ ID NO: 3204935 - RNA, 19 nt, Artificial Sequence
  Description of Artificial Sequence: Synthetic oligonucleotide
acccaugagggugugcacg

SEQ ID NO: 3204936 - RNA, 19 nt, Artificial Sequence
  Description of Artificial Sequence: Synthetic oligonucleotide
accugcacugcggagcucg

SEQ ID NO: 3204937 - RNA, 19 nt, Artificial Sequence
  Description of Artificial Sequence: Synthetic oligonucleotide
gcuucucugcuauuuucgg

SEQ ID NO: 3204938 - RNA, 19 nt, Artificial Sequence
  Description of Artificial Sequence: Synthetic oligonucleotide
aacccugcacuuguguccu

SEQ ID NO: 3204939 - RNA, 19 nt, Artificial Sequence
  Description of Artificial Sequence: Synthetic oligonucleotide
ccugcuucaggugucaggg

SEQ ID NO: 3204940 - RNA, 19 nt, Artificial Sequence
  Description of Artificial Sequence: Synthetic oligonucleotide
gaggucugcgugcaggcuc

SEQ ID NO: 3204941 - RNA, 19 nt, Artificial Sequence
  Description of Artificial Sequence: Synthetic oligonucleotide
uguguccucuugcucccug

SEQ ID NO: 3204942 - RNA, 19 nt, Artificial Sequence
  Description of Artificial Sequence: Synthetic oligonucleotide
ugucaggguuccuggcucc

SEQ ID NO: 3204943 - RNA, 19 nt, Artificial Sequence
  Description of Artificial Sequence: Synthetic oligonucleotide
ugagcccucugcuuccugu

SEQ ID NO: 3204944 - RNA, 19 nt, Artificial Sequence
  Description of Artificial Sequence: Synthetic oligonucleotide
guuccuggcuccguggaag

SEQ ID NO: 3204945 - RNA, 19 nt, Artificial Sequence
  Description of Artificial Sequence: Synthetic oligonucleotide
gagcugagcccucugcuuc

SEQ ID NO: 3204946 - RNA, 19 nt, Artificial Sequence
  Description of Artificial Sequence: Synthetic oligonucleotide
gcagcuacccaugagggug

SEQ ID NO: 3204947 - RNA, 19 nt, Artificial Sequence
  Description of Artificial Sequence: Synthetic oligonucleotide
aggguuccuggcuccgugg

SEQ ID NO: 3204948 - RNA, 19 nt, Artificial Sequence
  Description of Artificial Sequence: Synthetic oligonucleotide
agggaggucugcgugcagg

SEQ ID NO: 3204949 - RNA, 19 nt, Artificial Sequence
  Description of Artificial Sequence: Synthetic oligonucleotide
ugcaggcucugccucccag

SEQ ID NO: 3204950 - RNA, 19 nt, Artificial Sequence
  Description of Artificial Sequence: Synthetic oligonucleotide
acugcggagcucgcggccc

SEQ ID NO: 3204951 - RNA, 19 nt, Artificial Sequence
  Description of Artificial Sequence: Synthetic oligonucleotide
uguccucuugcucccugcu

SEQ ID NO: 3204952 - RNA, 19 nt, Artificial Sequence
  Description of Artificial Sequence: Synthetic oligonucleotide
gagcucgcggcccagcuuc

SEQ ID NO: 3204953 - RNA, 19 nt, Artificial Sequence
  Description of Artificial Sequence: Synthetic oligonucleotide
cuucaggugucaggguucc

SEQ ID NO: 3204954 - RNA, 19 nt, Artificial Sequence
  Description of Artificial Sequence: Synthetic oligonucleotide
ggcucugccucccagcagc

SEQ ID NO: 3204955 - RNA, 19 nt, Artificial Sequence
  Description of Artificial Sequence: Synthetic oligonucleotide
cuucucugcuauuuucgga

SEQ ID NO: 3204956 - RNA, 19 nt, Artificial Sequence
  Description of Artificial Sequence: Synthetic oligonucleotide
cagcuucucugcuauuuuc

SEQ ID NO: 3204957 - RNA, 19 nt, Artificial Sequence
  Description of Artificial Sequence: Synthetic oligonucleotide
uuucggaagggaggucugc

SEQ ID NO: 3204958 - RNA, 19 nt, Artificial Sequence
  Description of Artificial Sequence: Synthetic oligonucleotide
cuacccaugagggugugca

SEQ ID NO: 3204959 - RNA, 19 nt, Artificial Sequence
  Description of Artificial Sequence: Synthetic oligonucleotide
ucggaagggaggucugcgu

SEQ ID NO: 3204960 - RNA, 19 nt, Artificial Sequence
  Description of Artificial Sequence: Synthetic oligonucleotide
ggaagggaggucugcgugc

SEQ ID NO: 3204961 - RNA, 19 nt, Artificial Sequence
  Description of Artificial Sequence: Synthetic oligonucleotide
ugcgugcaggcucugccuc

SEQ ID NO: 3204962 - RNA, 19 nt, Artificial Sequence
  Description of Artificial Sequence: Synthetic oligonucleotide
agcagcuacccaugagggu

SEQ ID NO: 3204963 - RNA, 19 nt, Artificial Sequence
  Description of Artificial Sequence: Synthetic oligonucleotide
agagcugagcccucugcuu

SEQ ID NO: 3204964 - RNA, 19 nt, Artificial Sequence
  Description of Artificial Sequence: Synthetic oligonucleotide
uggcccugcaacccugcac

SEQ ID NO: 3204965 - RNA, 19 nt, Artificial Sequence
  Description of Artificial Sequence: Synthetic oligonucleotide
gugucaggguuccuggcuc

SEQ ID NO: 3204966 - RNA, 19 nt, Artificial Sequence
  Description of Artificial Sequence: Synthetic oligonucleotide
aaggggagcuguggcaccu

SEQ ID NO: 3204967 - RNA, 19 nt, Artificial Sequence
  Description of Artificial Sequence: Synthetic oligonucleotide
uuccuggcuccguggaaga

SEQ ID NO: 3204968 - RNA, 19 nt, Artificial Sequence
  Description of Artificial Sequence: Synthetic oligonucleotide
ggagcuguggcaccugcac

SEQ ID NO: 3204969 - RNA, 19 nt, Artificial Sequence
  Description of Artificial Sequence: Synthetic oligonucleotide
aagggaggucugcgugcag

SEQ ID NO: 3204970 - RNA, 19 nt, Artificial Sequence
  Description of Artificial Sequence: Synthetic oligonucleotide
caaggggagcuguggcacc

SEQ ID NO: 3204971 - RNA, 19 nt, Artificial Sequence
  Description of Artificial Sequence: Synthetic oligonucleotide
cuauuuucggaagggaggu

SEQ ID NO: 3204972 - RNA, 19 nt, Artificial Sequence
  Description of Artificial Sequence: Synthetic oligonucleotide
cucccagcagcuacccaug

SEQ ID NO: 3204973 - RNA, 19 nt, Artificial Sequence
  Description of Artificial Sequence: Synthetic oligonucleotide
gaagggaggucugcgugca

SEQ ID NO: 3204974 - RNA, 19 nt, Artificial Sequence
  Description of Artificial Sequence: Synthetic oligonucleotide
cuugcucccugcuucaggu

SEQ ID NO: 3204975 - RNA, 19 nt, Artificial Sequence
  Description of Artificial Sequence: Synthetic oligonucleotide
cacuuguguccucuugcuc

SEQ ID NO: 3204976 - RNA, 19 nt, Artificial Sequence
  Description of Artificial Sequence: Synthetic oligonucleotide
uccuggcccugcaacccug

SEQ ID NO: 3204977 - RNA, 19 nt, Artificial Sequence
  Description of Artificial Sequence: Synthetic oligonucleotide
cugcacuuguguccucuug

SEQ ID NO: 3204978 - RNA, 19 nt, Artificial Sequence
  Description of Artificial Sequence: Synthetic oligonucleotide
uauuuucggaagggagguc

SEQ ID NO: 3204979 - RNA, 19 nt, Artificial Sequence
  Description of Artificial Sequence: Synthetic oligonucleotide
ucccagcagcuacccauga

SEQ ID NO: 3204980 - RNA, 19 nt, Artificial Sequence
  Description of Artificial Sequence: Synthetic oligonucleotide
guguccucuugcucccugc

SEQ ID NO: 3204981 - RNA, 19 nt, Artificial Sequence
  Description of Artificial Sequence: Synthetic oligonucleotide
uggaagagcugagcccucu

SEQ ID NO: 3204982 - RNA, 19 nt, Artificial Sequence
  Description of Artificial Sequence: Synthetic oligonucleotide
cugccucccagcagcuacc

SEQ ID NO: 3204983 - RNA, 19 nt, Artificial Sequence
  Description of Artificial Sequence: Synthetic oligonucleotide
cccaugagggugugcacgg

SEQ ID NO: 3204984 - RNA, 19 nt, Artificial Sequence
  Description of Artificial Sequence: Synthetic oligonucleotide
gugcacggggccugggcag

SEQ ID NO: 3204985 - RNA, 19 nt, Artificial Sequence
  Description of Artificial Sequence: Synthetic oligonucleotide
uugcucccugcuucaggug

SEQ ID NO: 3204986 - RNA, 19 nt, Artificial Sequence
  Description of Artificial Sequence: Synthetic oligonucleotide
uacccaugagggugugcac

SEQ ID NO: 3204987 - RNA, 19 nt, Artificial Sequence
  Description of Artificial Sequence: Synthetic oligonucleotide
ucgcggcccagcuucucug

SEQ ID NO: 3204988 - RNA, 19 nt, Artificial Sequence
  Description of Artificial Sequence: Synthetic oligonucleotide
ggcaccugcacugcggagc

SEQ ID NO: 3204989 - RNA, 19 nt, Artificial Sequence
  Description of Artificial Sequence: Synthetic oligonucleotide
cuguggcaccugcacugcg

SEQ ID NO: 3204990 - RNA, 19 nt, Artificial Sequence
  Description of Artificial Sequence: Synthetic oligonucleotide
gcaacccugcacuuguguc

SEQ ID NO: 3204991 - RNA, 19 nt, Artificial Sequence
  Description of Artificial Sequence: Synthetic oligonucleotide
caggguuccuggcuccgug

SEQ ID NO: 3204992 - RNA, 19 nt, Artificial Sequence
  Description of Artificial Sequence: Synthetic oligonucleotide
gagcccucugcuuccuguc

SEQ ID NO: 3204993 - RNA, 19 nt, Artificial Sequence
  Description of Artificial Sequence: Synthetic oligonucleotide
gugugcacggggccugggc

SEQ ID NO: 3204994 - RNA, 19 nt, Artificial Sequence
  Description of Artificial Sequence: Synthetic oligonucleotide
cuccguggaagagcugagc

SEQ ID NO: 3204995 - RNA, 19 nt, Artificial Sequence
  Description of Artificial Sequence: Synthetic oligonucleotide
uggcaccugcacugcggag

SEQ ID NO: 3204996 - RNA, 19 nt, Artificial Sequence
  Description of Artificial Sequence: Synthetic oligonucleotide
cacugcggagcucgcggcc

SEQ ID NO: 3204997 - RNA, 19 nt, Artificial Sequence
  Description of Artificial Sequence: Synthetic oligonucleotide
auaacaagaaguuaaaugc

SEQ ID NO: 3204998 - RNA, 19 nt, Artificial Sequence
  Description of Artificial Sequence: Synthetic oligonucleotide
aaagccagaauacaaaagg

SEQ ID NO: 3204999 - RNA, 19 nt, Artificial Sequence
  Description of Artificial Sequence: Synthetic oligonucleotide
aaugcuaacagugcaaugc

SEQ ID NO: 3205000 - RNA, 19 nt, Artificial Sequence
  Description of Artificial Sequence: Synthetic oligonucleotide
aauuauuauucuuauaagu

SEQ ID NO: 3205001 - RNA, 19 nt, Artificial Sequence
  Description of Artificial Sequence: Synthetic oligonucleotide
uguguauugggacagagag

SEQ ID NO: 3205002 - RNA, 19 nt, Artificial Sequence
  Description of Artificial Sequence: Synthetic oligonucleotide
ucaaauaaguuuuaucuag

SEQ ID NO: 3205003 - RNA, 19 nt, Artificial Sequence
  Description of Artificial Sequence: Synthetic oligonucleotide
uuauaaauguuaacuacag

SEQ ID NO: 3205004 - RNA, 19 nt, Artificial Sequence
  Description of Artificial Sequence: Synthetic oligonucleotide
aaacuuugagaucagcguc

SEQ ID NO: 3205005 - RNA, 19 nt, Artificial Sequence
  Description of Artificial Sequence: Synthetic oligonucleotide
ucaauuaaagaaagggucc

SEQ ID NO: 3205006 - RNA, 19 nt, Artificial Sequence
  Description of Artificial Sequence: Synthetic oligonucleotide
uaucaaaauagaaucaaga

SEQ ID NO: 3205007 - RNA, 19 nt, Artificial Sequence
  Description of Artificial Sequence: Synthetic oligonucleotide
aaaagcagaaaggaguugg

SEQ ID NO: 3205008 - RNA, 19 nt, Artificial Sequence
  Description of Artificial Sequence: Synthetic oligonucleotide
aacauuuacauacuagagu

SEQ ID NO: 3205009 - RNA, 19 nt, Artificial Sequence
  Description of Artificial Sequence: Synthetic oligonucleotide
gaagauaaauuuccgaagc

SEQ ID NO: 3205010 - RNA, 19 nt, Artificial Sequence
  Description of Artificial Sequence: Synthetic oligonucleotide
cauaacaagaaguuaaaug

SEQ ID NO: 3205011 - RNA, 19 nt, Artificial Sequence
  Description of Artificial Sequence: Synthetic oligonucleotide
ucauucuuagcaaagaaaa

SEQ ID NO: 3205012 - RNA, 19 nt, Artificial Sequence
  Description of Artificial Sequence: Synthetic oligonucleotide
ucaaaauagaaucaagaau

SEQ ID NO: 3205013 - RNA, 19 nt, Artificial Sequence
  Description of Artificial Sequence: Synthetic oligonucleotide
cagaauuacucaaacaggg

SEQ ID NO: 3205014 - RNA, 19 nt, Artificial Sequence
  Description of Artificial Sequence: Synthetic oligonucleotide
aaaacagucgggcugccuc

SEQ ID NO: 3205015 - RNA, 19 nt, Artificial Sequence
  Description of Artificial Sequence: Synthetic oligonucleotide
uuucccauagagcaaaacc

SEQ ID NO: 3205016 - RNA, 19 nt, Artificial Sequence
  Description of Artificial Sequence: Synthetic oligonucleotide
aaucccgaauuugagacgc

SEQ ID NO: 3205017 - RNA, 19 nt, Artificial Sequence
  Description of Artificial Sequence: Synthetic oligonucleotide
uugaaaucaaauaaguuuu

SEQ ID NO: 3205018 - RNA, 19 nt, Artificial Sequence
  Description of Artificial Sequence: Synthetic oligonucleotide
ucauacagcaauagaaaag

SEQ ID NO: 3205019 - RNA, 19 nt, Artificial Sequence
  Description of Artificial Sequence: Synthetic oligonucleotide
aauguaagcaucuuccaaa

SEQ ID NO: 3205020 - RNA, 19 nt, Artificial Sequence
  Description of Artificial Sequence: Synthetic oligonucleotide
cucaauuaaagaaaggguc

SEQ ID NO: 3205021 - RNA, 19 nt, Artificial Sequence
  Description of Artificial Sequence: Synthetic oligonucleotide
uaacauuuacauacuagag

SEQ ID NO: 3205022 - RNA, 19 nt, Artificial Sequence
  Description of Artificial Sequence: Synthetic oligonucleotide
uccauuaucaaaauagaau

SEQ ID NO: 3205023 - RNA, 19 nt, Artificial Sequence
  Description of Artificial Sequence: Synthetic oligonucleotide
ugaaagguuacuccagggg

SEQ ID NO: 3205024 - RNA, 19 nt, Artificial Sequence
  Description of Artificial Sequence: Synthetic oligonucleotide
ugaagauaaauuuccgaag

SEQ ID NO: 3205025 - RNA, 19 nt, Artificial Sequence
  Description of Artificial Sequence: Synthetic oligonucleotide
uuagcaaagaaaaggaaau

SEQ ID NO: 3205026 - RNA, 19 nt, Artificial Sequence
  Description of Artificial Sequence: Synthetic oligonucleotide
auuauuauucuuauaagug

SEQ ID NO: 3205027 - RNA, 19 nt, Artificial Sequence
  Description of Artificial Sequence: Synthetic oligonucleotide
gacgcuaaaaucuguagcc

SEQ ID NO: 3205028 - RNA, 19 nt, Artificial Sequence
  Description of Artificial Sequence: Synthetic oligonucleotide
aaagggagucgucaucacc

SEQ ID NO: 3205029 - RNA, 19 nt, Artificial Sequence
  Description of Artificial Sequence: Synthetic oligonucleotide
agacgcuaaaaucuguagc

SEQ ID NO: 3205030 - RNA, 19 nt, Artificial Sequence
  Description of Artificial Sequence: Synthetic oligonucleotide
uucuuagcaaagaaaagga

SEQ ID NO: 3205031 - RNA, 19 nt, Artificial Sequence
  Description of Artificial Sequence: Synthetic oligonucleotide
aaaacccucuuucuguauc

SEQ ID NO: 3205032 - RNA, 19 nt, Artificial Sequence
  Description of Artificial Sequence: Synthetic oligonucleotide
uuuguauuuauaucauccc

SEQ ID NO: 3205033 - RNA, 19 nt, Artificial Sequence
  Description of Artificial Sequence: Synthetic oligonucleotide
agagacaacaacuggaacu

SEQ ID NO: 3205034 - RNA, 19 nt, Artificial Sequence
  Description of Artificial Sequence: Synthetic oligonucleotide
cauacagcaauagaaaagc

SEQ ID NO: 3205035 - RNA, 19 nt, Artificial Sequence
  Description of Artificial Sequence: Synthetic oligonucleotide
cuuaauacaucacaaugug

SEQ ID NO: 3205036 - RNA, 19 nt, Artificial Sequence
  Description of Artificial Sequence: Synthetic oligonucleotide
caugccacauacuagagug

SEQ ID NO: 3205037 - RNA, 19 nt, Artificial Sequence
  Description of Artificial Sequence: Synthetic oligonucleotide
aaucuuuccucccacccag

SEQ ID NO: 3205038 - RNA, 19 nt, Artificial Sequence
  Description of Artificial Sequence: Synthetic oligonucleotide
uuuauaucaucccuccugu

SEQ ID NO: 3205039 - RNA, 19 nt, Artificial Sequence
  Description of Artificial Sequence: Synthetic oligonucleotide
aaacccaaacgacugaggu

SEQ ID NO: 3205040 - RNA, 19 nt, Artificial Sequence
  Description of Artificial Sequence: Synthetic oligonucleotide
uuuuaucuagagaaagcca

SEQ ID NO: 3205041 - RNA, 19 nt, Artificial Sequence
  Description of Artificial Sequence: Synthetic oligonucleotide
uacagcaauagaaaagcca

SEQ ID NO: 3205042 - RNA, 19 nt, Artificial Sequence
  Description of Artificial Sequence: Synthetic oligonucleotide
aucaaaauagaaucaagaa

SEQ ID NO: 3205043 - RNA, 19 nt, Artificial Sequence
  Description of Artificial Sequence: Synthetic oligonucleotide
ugcccuauauuuuauacac

SEQ ID NO: 3205044 - RNA, 19 nt, Artificial Sequence
  Description of Artificial Sequence: Synthetic oligonucleotide
guuuuaucuagagaaagcc

SEQ ID NO: 3205045 - RNA, 19 nt, Artificial Sequence
  Description of Artificial Sequence: Synthetic oligonucleotide
aguuuuaucuagagaaagc

SEQ ID NO: 3205046 - RNA, 19 nt, Artificial Sequence
  Description of Artificial Sequence: Synthetic oligonucleotide
aacauaugcaggcaguaaa

SEQ ID NO: 3205047 - RNA, 19 nt, Artificial Sequence
  Description of Artificial Sequence: Synthetic oligonucleotide
aaacagucgggcugccucc

SEQ ID NO: 3205048 - RNA, 19 nt, Artificial Sequence
  Description of Artificial Sequence: Synthetic oligonucleotide
ucugguaaaacagucgggc

SEQ ID NO: 3205049 - RNA, 19 nt, Artificial Sequence
  Description of Artificial Sequence: Synthetic oligonucleotide
aagauaaauuuccgaagcu

SEQ ID NO: 3205050 - RNA, 19 nt, Artificial Sequence
  Description of Artificial Sequence: Synthetic oligonucleotide
agaucuaccccuuucccuc

SEQ ID NO: 3205051 - RNA, 19 nt, Artificial Sequence
  Description of Artificial Sequence: Synthetic oligonucleotide
aaaagugggguagaugaag

SEQ ID NO: 3205052 - RNA, 19 nt, Artificial Sequence
  Description of Artificial Sequence: Synthetic oligonucleotide
agcauguaacaugucaucc

SEQ ID NO: 3205053 - RNA, 19 nt, Artificial Sequence
  Description of Artificial Sequence: Synthetic oligonucleotide
augcuaacagugcaaugcc

SEQ ID NO: 3205054 - RNA, 19 nt, Artificial Sequence
  Description of Artificial Sequence: Synthetic oligonucleotide
uaacaugucaucccgucga

SEQ ID NO: 3205055 - RNA, 19 nt, Artificial Sequence
  Description of Artificial Sequence: Synthetic oligonucleotide
auguaagcaucuuccaaac

SEQ ID NO: 3205056 - RNA, 19 nt, Artificial Sequence
  Description of Artificial Sequence: Synthetic oligonucleotide
caugucacuuccuaggcag

SEQ ID NO: 3205057 - RNA, 19 nt, Artificial Sequence
  Description of Artificial Sequence: Synthetic oligonucleotide
acauacuagagugaagcac

SEQ ID NO: 3205058 - RNA, 19 nt, Artificial Sequence
  Description of Artificial Sequence: Synthetic oligonucleotide
aacauuuugccacuuugaa

SEQ ID NO: 3205059 - RNA, 19 nt, Artificial Sequence
  Description of Artificial Sequence: Synthetic oligonucleotide
guaagcaucuuccaaacuc

SEQ ID NO: 3205060 - RNA, 19 nt, Artificial Sequence
  Description of Artificial Sequence: Synthetic oligonucleotide
ugguaaaacagucgggcug

SEQ ID NO: 3205061 - RNA, 19 nt, Artificial Sequence
  Description of Artificial Sequence: Synthetic oligonucleotide
ugugauagcacaucuggaa

SEQ ID NO: 3205062 - RNA, 19 nt, Artificial Sequence
  Description of Artificial Sequence: Synthetic oligonucleotide
ucugaacaaaaugaaaagu

SEQ ID NO: 3205063 - RNA, 19 nt, Artificial Sequence
  Description of Artificial Sequence: Synthetic oligonucleotide
gaggauuucugugauuugg

SEQ ID NO: 3205064 - RNA, 19 nt, Artificial Sequence
  Description of Artificial Sequence: Synthetic oligonucleotide
uguggaguaggcgugaagc

SEQ ID NO: 3205065 - RNA, 19 nt, Artificial Sequence
  Description of Artificial Sequence: Synthetic oligonucleotide
ugcaagugcggacaaagga

SEQ ID NO: 3205066 - RNA, 19 nt, Artificial Sequence
  Description of Artificial Sequence: Synthetic oligonucleotide
aaaagccagaauacaaaag

SEQ ID NO: 3205067 - RNA, 19 nt, Artificial Sequence
  Description of Artificial Sequence: Synthetic oligonucleotide
agaaacgucugucacagaa

SEQ ID NO: 3205068 - RNA, 19 nt, Artificial Sequence
  Description of Artificial Sequence: Synthetic oligonucleotide
acacauaggcuuuuggucu

SEQ ID NO: 3205069 - RNA, 19 nt, Artificial Sequence
  Description of Artificial Sequence: Synthetic oligonucleotide
uagcuuagcacccagguuu

SEQ ID NO: 3205070 - RNA, 19 nt, Artificial Sequence
  Description of Artificial Sequence: Synthetic oligonucleotide
cauagagcaaaaccaaaac

SEQ ID NO: 3205071 - RNA, 19 nt, Artificial Sequence
  Description of Artificial Sequence: Synthetic oligonucleotide
ucuucgaucaauugucccu

SEQ ID NO: 3205072 - RNA, 19 nt, Artificial Sequence
  Description of Artificial Sequence: Synthetic oligonucleotide
uuccauuaucaaaauagaa

SEQ ID NO: 3205073 - RNA, 19 nt, Artificial Sequence
  Description of Artificial Sequence: Synthetic oligonucleotide
ugcaugucuccauagcucc

SEQ ID NO: 3205074 - RNA, 19 nt, Artificial Sequence
  Description of Artificial Sequence: Synthetic oligonucleotide
aguaaaacccaaacgacug

SEQ ID NO: 3205075 - RNA, 19 nt, Artificial Sequence
  Description of Artificial Sequence: Synthetic oligonucleotide
acagaauuacucaaacagg

SEQ ID NO: 3205076 - RNA, 19 nt, Artificial Sequence
  Description of Artificial Sequence: Synthetic oligonucleotide
ucagcgucaucaaugagau

SEQ ID NO: 3205077 - RNA, 19 nt, Artificial Sequence
  Description of Artificial Sequence: Synthetic oligonucleotide
agagucaaaagcaaugucu

SEQ ID NO: 3205078 - RNA, 19 nt, Artificial Sequence
  Description of Artificial Sequence: Synthetic oligonucleotide
acacaugccacauacuaga

SEQ ID NO: 3205079 - RNA, 19 nt, Artificial Sequence
  Description of Artificial Sequence: Synthetic oligonucleotide
cauacuagagugaagcaca

SEQ ID NO: 3205080 - RNA, 19 nt, Artificial Sequence
  Description of Artificial Sequence: Synthetic oligonucleotide
augaaagguuacuccaggg

SEQ ID NO: 3205081 - RNA, 19 nt, Artificial Sequence
  Description of Artificial Sequence: Synthetic oligonucleotide
uuuuauacacaugggacaa

SEQ ID NO: 3205082 - RNA, 19 nt, Artificial Sequence
  Description of Artificial Sequence: Synthetic oligonucleotide
aacaugucaucccgucgac

SEQ ID NO: 3205083 - RNA, 19 nt, Artificial Sequence
  Description of Artificial Sequence: Synthetic oligonucleotide
aaaccagagggcuuuucca

SEQ ID NO: 3205084 - RNA, 19 nt, Artificial Sequence
  Description of Artificial Sequence: Synthetic oligonucleotide
ggcaguaaaacccaaacga

SEQ ID NO: 3205085 - RNA, 19 nt, Artificial Sequence
  Description of Artificial Sequence: Synthetic oligonucleotide
uaaaacccaaacgacugag

SEQ ID NO: 3205086 - RNA, 19 nt, Artificial Sequence
  Description of Artificial Sequence: Synthetic oligonucleotide
uagcacaucuggaaguuug

SEQ ID NO: 3205087 - RNA, 19 nt, Artificial Sequence
  Description of Artificial Sequence: Synthetic oligonucleotide
uaaauacaagaguucuuga

SEQ ID NO: 3205088 - RNA, 19 nt, Artificial Sequence
  Description of Artificial Sequence: Synthetic oligonucleotide
uguccgugggccuugagcu

SEQ ID NO: 3205089 - RNA, 19 nt, Artificial Sequence
  Description of Artificial Sequence: Synthetic oligonucleotide
ggcuuaauacaucacaaug

SEQ ID NO: 3205090 - RNA, 19 nt, Artificial Sequence
  Description of Artificial Sequence: Synthetic oligonucleotide
acaauuuuauugauugaag

SEQ ID NO: 3205091 - RNA, 19 nt, Artificial Sequence
  Description of Artificial Sequence: Synthetic oligonucleotide
  modified_base (5)..(5): a, c, u, g, unknown or other
aaacngccaugcuugucag

SEQ ID NO: 3205092 - RNA, 19 nt, Artificial Sequence
  Description of Artificial Sequence: Synthetic oligonucleotide
ucccagaacucccuucugg

SEQ ID NO: 3205093 - RNA, 19 nt, Artificial Sequence
  Description of Artificial Sequence: Synthetic oligonucleotide
auuuccgaagcuugagguc

SEQ ID NO: 3205094 - RNA, 19 nt, Artificial Sequence
  Description of Artificial Sequence: Synthetic oligonucleotide
ggaacaaagcauuaacaug

SEQ ID NO: 3205095 - RNA, 19 nt, Artificial Sequence
  Description of Artificial Sequence: Synthetic oligonucleotide
ugauuaugaauggggaagc

SEQ ID NO: 3205096 - RNA, 19 nt, Artificial Sequence
  Description of Artificial Sequence: Synthetic oligonucleotide
gagacgcuaaaaucuguag

SEQ ID NO: 3205097 - RNA, 19 nt, Artificial Sequence
  Description of Artificial Sequence: Synthetic oligonucleotide
auuaggacggacuagaagc

SEQ ID NO: 3205098 - RNA, 19 nt, Artificial Sequence
  Description of Artificial Sequence: Synthetic oligonucleotide
agaauggucaucuugaugg

SEQ ID NO: 3205099 - RNA, 19 nt, Artificial Sequence
  Description of Artificial Sequence: Synthetic oligonucleotide
uuauaauacuugaagaagg

SEQ ID NO: 3205100 - RNA, 19 nt, Artificial Sequence
  Description of Artificial Sequence: Synthetic oligonucleotide
aaucaguaccacuuggucc

SEQ ID NO: 3205101 - RNA, 19 nt, Artificial Sequence
  Description of Artificial Sequence: Synthetic oligonucleotide
aacaucacaaccauggagg

SEQ ID NO: 3205102 - RNA, 19 nt, Artificial Sequence
  Description of Artificial Sequence: Synthetic oligonucleotide
uuuauaauacuugaagaag

SEQ ID NO: 3205103 - RNA, 19 nt, Artificial Sequence
  Description of Artificial Sequence: Synthetic oligonucleotide
uccacuacaucauauacag

SEQ ID NO: 3205104 - RNA, 19 nt, Artificial Sequence
  Description of Artificial Sequence: Synthetic oligonucleotide
aauguacugauuuauaaua

SEQ ID NO: 3205105 - RNA, 19 nt, Artificial Sequence
  Description of Artificial Sequence: Synthetic oligonucleotide
uauaguuugucauuguaug

SEQ ID NO: 3205106 - RNA, 19 nt, Artificial Sequence
  Description of Artificial Sequence: Synthetic oligonucleotide
aacagugucaucuuccuga

SEQ ID NO: 3205107 - RNA, 19 nt, Artificial Sequence
  Description of Artificial Sequence: Synthetic oligonucleotide
ucaaucgagggacacauag

SEQ ID NO: 3205108 - RNA, 19 nt, Artificial Sequence
  Description of Artificial Sequence: Synthetic oligonucleotide
ucuuccugaagauauaggc

SEQ ID NO: 3205109 - RNA, 19 nt, Artificial Sequence
  Description of Artificial Sequence: Synthetic oligonucleotide
aauauacuggaagucuggc

SEQ ID NO: 3205110 - RNA, 19 nt, Artificial Sequence
  Description of Artificial Sequence: Synthetic oligonucleotide
uuccugaagauauaggcag

SEQ ID NO: 3205111 - RNA, 19 nt, Artificial Sequence
  Description of Artificial Sequence: Synthetic oligonucleotide
uugguaaauguucugaggu

SEQ ID NO: 3205112 - RNA, 19 nt, Artificial Sequence
  Description of Artificial Sequence: Synthetic oligonucleotide
ucuucuauuaccuuuuaaa

SEQ ID NO: 3205113 - RNA, 19 nt, Artificial Sequence
  Description of Artificial Sequence: Synthetic oligonucleotide
acagcuagcuuuaauaagc

SEQ ID NO: 3205114 - RNA, 19 nt, Artificial Sequence
  Description of Artificial Sequence: Synthetic oligonucleotide
uugaucauggguauguucu

SEQ ID NO: 3205115 - RNA, 19 nt, Artificial Sequence
  Description of Artificial Sequence: Synthetic oligonucleotide
aaucgagggacacauaggu

SEQ ID NO: 3205116 - RNA, 19 nt, Artificial Sequence
  Description of Artificial Sequence: Synthetic oligonucleotide
auuaccuuuuaaaagguac

SEQ ID NO: 3205117 - RNA, 19 nt, Artificial Sequence
  Description of Artificial Sequence: Synthetic oligonucleotide
aacucugccacguucaacu

SEQ ID NO: 3205118 - RNA, 19 nt, Artificial Sequence
  Description of Artificial Sequence: Synthetic oligonucleotide
ugauaagccccucagcuag

SEQ ID NO: 3205119 - RNA, 19 nt, Artificial Sequence
  Description of Artificial Sequence: Synthetic oligonucleotide
uuugguaaauguucugagg

SEQ ID NO: 3205120 - RNA, 19 nt, Artificial Sequence
  Description of Artificial Sequence: Synthetic oligonucleotide
uuuccgauacaguugauca

SEQ ID NO: 3205121 - RNA, 19 nt, Artificial Sequence
  Description of Artificial Sequence: Synthetic oligonucleotide
auuaaucaguaccacuugg

SEQ ID NO: 3205122 - RNA, 19 nt, Artificial Sequence
  Description of Artificial Sequence: Synthetic oligonucleotide
uauacuggaagucuggcuc

SEQ ID NO: 3205123 - RNA, 19 nt, Artificial Sequence
  Description of Artificial Sequence: Synthetic oligonucleotide
gacuugauagcauccauag

SEQ ID NO: 3205124 - RNA, 19 nt, Artificial Sequence
  Description of Artificial Sequence: Synthetic oligonucleotide
cauauacagcauuaggacg

SEQ ID NO: 3205125 - RNA, 19 nt, Artificial Sequence
  Description of Artificial Sequence: Synthetic oligonucleotide
uguguggucaacaucacaa

SEQ ID NO: 3205126 - RNA, 19 nt, Artificial Sequence
  Description of Artificial Sequence: Synthetic oligonucleotide
aucacaaccauggaggaac

SEQ ID NO: 3205127 - RNA, 19 nt, Artificial Sequence
  Description of Artificial Sequence: Synthetic oligonucleotide
acugauuuauaauacuuga

SEQ ID NO: 3205128 - RNA, 19 nt, Artificial Sequence
  Description of Artificial Sequence: Synthetic oligonucleotide
aaauauacucuguaucuau

SEQ ID NO: 3205129 - RNA, 19 nt, Artificial Sequence
  Description of Artificial Sequence: Synthetic oligonucleotide
auauacagcauuaggacgg

SEQ ID NO: 3205130 - RNA, 19 nt, Artificial Sequence
  Description of Artificial Sequence: Synthetic oligonucleotide
aaucugagugaguugacga

SEQ ID NO: 3205131 - RNA, 19 nt, Artificial Sequence
  Description of Artificial Sequence: Synthetic oligonucleotide
uuuugguaaauguucugag

SEQ ID NO: 3205132 - RNA, 19 nt, Artificial Sequence
  Description of Artificial Sequence: Synthetic oligonucleotide
auacuggugacauuuaacu

SEQ ID NO: 3205133 - RNA, 19 nt, Artificial Sequence
  Description of Artificial Sequence: Synthetic oligonucleotide
acuugaagaaggaauuucc

SEQ ID NO: 3205134 - RNA, 19 nt, Artificial Sequence
  Description of Artificial Sequence: Synthetic oligonucleotide
aucauaaggcgaaauauac

SEQ ID NO: 3205135 - RNA, 19 nt, Artificial Sequence
  Description of Artificial Sequence: Synthetic oligonucleotide
aagacuacuugaucauggg

SEQ ID NO: 3205136 - RNA, 19 nt, Artificial Sequence
  Description of Artificial Sequence: Synthetic oligonucleotide
aaaucuuuacaagugugug

SEQ ID NO: 3205137 - RNA, 19 nt, Artificial Sequence
  Description of Artificial Sequence: Synthetic oligonucleotide
uuuaacucugccacguuca

SEQ ID NO: 3205138 - RNA, 19 nt, Artificial Sequence
  Description of Artificial Sequence: Synthetic oligonucleotide
uguacugaaucugagugag

SEQ ID NO: 3205139 - RNA, 19 nt, Artificial Sequence
  Description of Artificial Sequence: Synthetic oligonucleotide
ucgagggacacauagguca

SEQ ID NO: 3205140 - RNA, 19 nt, Artificial Sequence
  Description of Artificial Sequence: Synthetic oligonucleotide
uacuguuccagugauaagc

SEQ ID NO: 3205141 - RNA, 19 nt, Artificial Sequence
  Description of Artificial Sequence: Synthetic oligonucleotide
caagacuacuugaucaugg

SEQ ID NO: 3205142 - RNA, 19 nt, Artificial Sequence
  Description of Artificial Sequence: Synthetic oligonucleotide
auuuaacucugccacguuc

SEQ ID NO: 3205143 - RNA, 19 nt, Artificial Sequence
  Description of Artificial Sequence: Synthetic oligonucleotide
ucaggaauauacuggaagu

SEQ ID NO: 3205144 - RNA, 19 nt, Artificial Sequence
  Description of Artificial Sequence: Synthetic oligonucleotide
ucagcuagcuggaucauug

SEQ ID NO: 3205145 - RNA, 19 nt, Artificial Sequence
  Description of Artificial Sequence: Synthetic oligonucleotide
ugguuaaacagugucaucu

SEQ ID NO: 3205146 - RNA, 19 nt, Artificial Sequence
  Description of Artificial Sequence: Synthetic oligonucleotide
uguggucaacaucacaacc

SEQ ID NO: 3205147 - RNA, 19 nt, Artificial Sequence
  Description of Artificial Sequence: Synthetic oligonucleotide
uguagcaucauaaggcgaa

SEQ ID NO: 3205148 - RNA, 19 nt, Artificial Sequence
  Description of Artificial Sequence: Synthetic oligonucleotide
uaaggcgaaauauacucug

SEQ ID NO: 3205149 - RNA, 19 nt, Artificial Sequence
  Description of Artificial Sequence: Synthetic oligonucleotide
cuuucucaggaauauacug

SEQ ID NO: 3205150 - RNA, 19 nt, Artificial Sequence
  Description of Artificial Sequence: Synthetic oligonucleotide
ucuaguggggcuuucucag

SEQ ID NO: 3205151 - RNA, 19 nt, Artificial Sequence
  Description of Artificial Sequence: Synthetic oligonucleotide
uguacugauuuauaauacu

SEQ ID NO: 3205152 - RNA, 19 nt, Artificial Sequence
  Description of Artificial Sequence: Synthetic oligonucleotide
ugaagaaggaauuuccaua

SEQ ID NO: 3205153 - RNA, 19 nt, Artificial Sequence
  Description of Artificial Sequence: Synthetic oligonucleotide
uuaaucaguaccacuuggu

SEQ ID NO: 3205154 - RNA, 19 nt, Artificial Sequence
  Description of Artificial Sequence: Synthetic oligonucleotide
aacuuguguggucaacauc

SEQ ID NO: 3205155 - RNA, 19 nt, Artificial Sequence
  Description of Artificial Sequence: Synthetic oligonucleotide
uuugucauuguauguaguc

SEQ ID NO: 3205156 - RNA, 19 nt, Artificial Sequence
  Description of Artificial Sequence: Synthetic oligonucleotide
uggguucuggccaauacug

SEQ ID NO: 3205157 - RNA, 19 nt, Artificial Sequence
  Description of Artificial Sequence: Synthetic oligonucleotide
aucauauacagcauuagga

SEQ ID NO: 3205158 - RNA, 19 nt, Artificial Sequence
  Description of Artificial Sequence: Synthetic oligonucleotide
caagacauugucauuccag

SEQ ID NO: 3205159 - RNA, 19 nt, Artificial Sequence
  Description of Artificial Sequence: Synthetic oligonucleotide
agcuuuaauaagcaagacu

SEQ ID NO: 3205160 - RNA, 19 nt, Artificial Sequence
  Description of Artificial Sequence: Synthetic oligonucleotide
aucauugacuccugaagag

SEQ ID NO: 3205161 - RNA, 19 nt, Artificial Sequence
  Description of Artificial Sequence: Synthetic oligonucleotide
acugugccaguacuguucc

SEQ ID NO: 3205162 - RNA, 19 nt, Artificial Sequence
  Description of Artificial Sequence: Synthetic oligonucleotide
uauauaguuugucauugua

SEQ ID NO: 3205163 - RNA, 19 nt, Artificial Sequence
  Description of Artificial Sequence: Synthetic oligonucleotide
acaagcaauguacugauuu

SEQ ID NO: 3205164 - RNA, 19 nt, Artificial Sequence
  Description of Artificial Sequence: Synthetic oligonucleotide
aagguacccguguagcauc

SEQ ID NO: 3205165 - RNA, 19 nt, Artificial Sequence
  Description of Artificial Sequence: Synthetic oligonucleotide
ucugagguaaucuggcaca

SEQ ID NO: 3205166 - RNA, 19 nt, Artificial Sequence
  Description of Artificial Sequence: Synthetic oligonucleotide
gaauauacuggaagucugg

SEQ ID NO: 3205167 - RNA, 19 nt, Artificial Sequence
  Description of Artificial Sequence: Synthetic oligonucleotide
aaugucccggccauuaauc

SEQ ID NO: 3205168 - RNA, 19 nt, Artificial Sequence
  Description of Artificial Sequence: Synthetic oligonucleotide
acuuguguggucaacauca

SEQ ID NO: 3205169 - RNA, 19 nt, Artificial Sequence
  Description of Artificial Sequence: Synthetic oligonucleotide
uuccacuacaucauauaca

SEQ ID NO: 3205170 - RNA, 19 nt, Artificial Sequence
  Description of Artificial Sequence: Synthetic oligonucleotide
acuugauagcauccauagc

SEQ ID NO: 3205171 - RNA, 19 nt, Artificial Sequence
  Description of Artificial Sequence: Synthetic oligonucleotide
ucauaaggcgaaauauacu

SEQ ID NO: 3205172 - RNA, 19 nt, Artificial Sequence
  Description of Artificial Sequence: Synthetic oligonucleotide
uaaucaguaccacuugguc

SEQ ID NO: 3205173 - RNA, 19 nt, Artificial Sequence
  Description of Artificial Sequence: Synthetic oligonucleotide
uucugagguaaucuggcac

SEQ ID NO: 3205174 - RNA, 19 nt, Artificial Sequence
  Description of Artificial Sequence: Synthetic oligonucleotide
auguacugauuuauaauac

SEQ ID NO: 3205175 - RNA, 19 nt, Artificial Sequence
  Description of Artificial Sequence: Synthetic oligonucleotide
cuuuaauaagcaagacuac

SEQ ID NO: 3205176 - RNA, 19 nt, Artificial Sequence
  Description of Artificial Sequence: Synthetic oligonucleotide
aacugugccaguacuguuc

SEQ ID NO: 3205177 - RNA, 19 nt, Artificial Sequence
  Description of Artificial Sequence: Synthetic oligonucleotide
auuguauguagucuucuau

SEQ ID NO: 3205178 - RNA, 19 nt, Artificial Sequence
  Description of Artificial Sequence: Synthetic oligonucleotide
caacaucacaaccauggag

SEQ ID NO: 3205179 - RNA, 19 nt, Artificial Sequence
  Description of Artificial Sequence: Synthetic oligonucleotide
gaaucugagugaguugacg

SEQ ID NO: 3205180 - RNA, 19 nt, Artificial Sequence
  Description of Artificial Sequence: Synthetic oligonucleotide
uugaagaaggaauuuccau

SEQ ID NO: 3205181 - RNA, 19 nt, Artificial Sequence
  Description of Artificial Sequence: Synthetic oligonucleotide
auaguuugucauuguaugu

SEQ ID NO: 3205182 - RNA, 19 nt, Artificial Sequence
  Description of Artificial Sequence: Synthetic oligonucleotide
ucacagcuagcuuuaauaa

SEQ ID NO: 3205183 - RNA, 19 nt, Artificial Sequence
  Description of Artificial Sequence: Synthetic oligonucleotide
uuaggacggacuagaagca

SEQ ID NO: 3205184 - RNA, 19 nt, Artificial Sequence
  Description of Artificial Sequence: Synthetic oligonucleotide
ugguaauggcccuugacaa

SEQ ID NO: 3205185 - RNA, 19 nt, Artificial Sequence
  Description of Artificial Sequence: Synthetic oligonucleotide
uccugaagauauaggcagg

SEQ ID NO: 3205186 - RNA, 19 nt, Artificial Sequence
  Description of Artificial Sequence: Synthetic oligonucleotide
gacuagaagcacgaguucc

SEQ ID NO: 3205187 - RNA, 19 nt, Artificial Sequence
  Description of Artificial Sequence: Synthetic oligonucleotide
aguacuguuccagugauaa

SEQ ID NO: 3205188 - RNA, 19 nt, Artificial Sequence
  Description of Artificial Sequence: Synthetic oligonucleotide
cuugacaagcaauguacug

SEQ ID NO: 3205189 - RNA, 19 nt, Artificial Sequence
  Description of Artificial Sequence: Synthetic oligonucleotide
cuuccacuacaucauauac

SEQ ID NO: 3205190 - RNA, 19 nt, Artificial Sequence
  Description of Artificial Sequence: Synthetic oligonucleotide
acuagaagcacgaguuccc

SEQ ID NO: 3205191 - RNA, 19 nt, Artificial Sequence
  Description of Artificial Sequence: Synthetic oligonucleotide
uugacuccugaagagaaug

SEQ ID NO: 3205192 - RNA, 19 nt, Artificial Sequence
  Description of Artificial Sequence: Synthetic oligonucleotide
cuucuauuaccuuuuaaaa

SEQ ID NO: 3205193 - RNA, 19 nt, Artificial Sequence
  Description of Artificial Sequence: Synthetic oligonucleotide
agcuagcuggaucauugac

SEQ ID NO: 3205194 - RNA, 19 nt, Artificial Sequence
  Description of Artificial Sequence: Synthetic oligonucleotide
gauagcauccauagcauga

SEQ ID NO: 3205195 - RNA, 19 nt, Artificial Sequence
  Description of Artificial Sequence: Synthetic oligonucleotide
uggauacuaucuagugggg

SEQ ID NO: 3205196 - RNA, 19 nt, Artificial Sequence
  Description of Artificial Sequence: Synthetic oligonucleotide
uauacucuguaucuauuuu

SEQ ID NO: 3205197 - RNA, 19 nt, Artificial Sequence
  Description of Artificial Sequence: Synthetic oligonucleotide
auaaugauaaaucuuaggc

SEQ ID NO: 3205198 - RNA, 19 nt, Artificial Sequence
  Description of Artificial Sequence: Synthetic oligonucleotide
uauuaaaacaccagcagag

SEQ ID NO: 3205199 - RNA, 19 nt, Artificial Sequence
  Description of Artificial Sequence: Synthetic oligonucleotide
aacaauguaaucuguguag

SEQ ID NO: 3205200 - RNA, 19 nt, Artificial Sequence
  Description of Artificial Sequence: Synthetic oligonucleotide
aaugauaaaucuuaggcua

SEQ ID NO: 3205201 - RNA, 19 nt, Artificial Sequence
  Description of Artificial Sequence: Synthetic oligonucleotide
aaaucaggcacauuaaaca

SEQ ID NO: 3205202 - RNA, 19 nt, Artificial Sequence
  Description of Artificial Sequence: Synthetic oligonucleotide
ugaaacacgauauuaaaac

SEQ ID NO: 3205203 - RNA, 19 nt, Artificial Sequence
  Description of Artificial Sequence: Synthetic oligonucleotide
acgauauuaaaacaccagc

SEQ ID NO: 3205204 - RNA, 19 nt, Artificial Sequence
  Description of Artificial Sequence: Synthetic oligonucleotide
uuaaaacaccagcagagcg

SEQ ID NO: 3205205 - RNA, 19 nt, Artificial Sequence
  Description of Artificial Sequence: Synthetic oligonucleotide
uguuauuugugaaacacga

SEQ ID NO: 3205206 - RNA, 19 nt, Artificial Sequence
  Description of Artificial Sequence: Synthetic oligonucleotide
ugaacuuucacaguugggg

SEQ ID NO: 3205207 - RNA, 19 nt, Artificial Sequence
  Description of Artificial Sequence: Synthetic oligonucleotide
uagugcuucaccuauaacc

SEQ ID NO: 3205208 - RNA, 19 nt, Artificial Sequence
  Description of Artificial Sequence: Synthetic oligonucleotide
ugaacuauuauagaguaca

SEQ ID NO: 3205209 - RNA, 19 nt, Artificial Sequence
  Description of Artificial Sequence: Synthetic oligonucleotide
uuacuauuuuguaaaaggc

SEQ ID NO: 3205210 - RNA, 19 nt, Artificial Sequence
  Description of Artificial Sequence: Synthetic oligonucleotide
augaguuguaauucgaggg

SEQ ID NO: 3205211 - RNA, 19 nt, Artificial Sequence
  Description of Artificial Sequence: Synthetic oligonucleotide
uaaaacaccagcagagcgg

SEQ ID NO: 3205212 - RNA, 19 nt, Artificial Sequence
  Description of Artificial Sequence: Synthetic oligonucleotide
uaaaucuuaggcuauuagc

SEQ ID NO: 3205213 - RNA, 19 nt, Artificial Sequence
  Description of Artificial Sequence: Synthetic oligonucleotide
agaaaugaguuguaauucg

SEQ ID NO: 3205214 - RNA, 19 nt, Artificial Sequence
  Description of Artificial Sequence: Synthetic oligonucleotide
augauagagagccugggac

SEQ ID NO: 3205215 - RNA, 19 nt, Artificial Sequence
  Description of Artificial Sequence: Synthetic oligonucleotide
ucaccuauaaccaaaccac

SEQ ID NO: 3205216 - RNA, 19 nt, Artificial Sequence
  Description of Artificial Sequence: Synthetic oligonucleotide
aaaucuuaggcuauuagca

SEQ ID NO: 3205217 - RNA, 19 nt, Artificial Sequence
  Description of Artificial Sequence: Synthetic oligonucleotide
aauuugaacuuucacaguu

SEQ ID NO: 3205218 - RNA, 19 nt, Artificial Sequence
  Description of Artificial Sequence: Synthetic oligonucleotide
uuauagacaggccauagaa

SEQ ID NO: 3205219 - RNA, 19 nt, Artificial Sequence
  Description of Artificial Sequence: Synthetic oligonucleotide
uaaugauaaaucuuaggcu

SEQ ID NO: 3205220 - RNA, 19 nt, Artificial Sequence
  Description of Artificial Sequence: Synthetic oligonucleotide
aaucuuaggcuauuagcag

SEQ ID NO: 3205221 - RNA, 19 nt, Artificial Sequence
  Description of Artificial Sequence: Synthetic oligonucleotide
uacuauuuuguaaaaggca

SEQ ID NO: 3205222 - RNA, 19 nt, Artificial Sequence
  Description of Artificial Sequence: Synthetic oligonucleotide
uuauuugugaaacacgaua

SEQ ID NO: 3205223 - RNA, 19 nt, Artificial Sequence
  Description of Artificial Sequence: Synthetic oligonucleotide
ugauugaacaauguaaucu

SEQ ID NO: 3205224 - RNA, 19 nt, Artificial Sequence
  Description of Artificial Sequence: Synthetic oligonucleotide
uauuauagaguacauggau

SEQ ID NO: 3205225 - RNA, 19 nt, Artificial Sequence
  Description of Artificial Sequence: Synthetic oligonucleotide
acaguuggggcuuacaaag

SEQ ID NO: 3205226 - RNA, 19 nt, Artificial Sequence
  Description of Artificial Sequence: Synthetic oligonucleotide
uaggaggugaaguauuugg

SEQ ID NO: 3205227 - RNA, 19 nt, Artificial Sequence
  Description of Artificial Sequence: Synthetic oligonucleotide
ucuguuguggagauggagc

SEQ ID NO: 3205228 - RNA, 19 nt, Artificial Sequence
  Description of Artificial Sequence: Synthetic oligonucleotide
augaaacaccagcauaugc

SEQ ID NO: 3205229 - RNA, 19 nt, Artificial Sequence
  Description of Artificial Sequence: Synthetic oligonucleotide
ugaucugcuuuucauaaug

SEQ ID NO: 3205230 - RNA, 19 nt, Artificial Sequence
  Description of Artificial Sequence: Synthetic oligonucleotide
aauaauaaugauaaaucuu

SEQ ID NO: 3205231 - RNA, 19 nt, Artificial Sequence
  Description of Artificial Sequence: Synthetic oligonucleotide
ugaaaauauaaaucagaac

SEQ ID NO: 3205232 - RNA, 19 nt, Artificial Sequence
  Description of Artificial Sequence: Synthetic oligonucleotide
aauguaaucuguguaguga

SEQ ID NO: 3205233 - RNA, 19 nt, Artificial Sequence
  Description of Artificial Sequence: Synthetic oligonucleotide
aaggaggcacaacuguggc

SEQ ID NO: 3205234 - RNA, 19 nt, Artificial Sequence
  Description of Artificial Sequence: Synthetic oligonucleotide
auagaaaugaguuguaauu

SEQ ID NO: 3205235 - RNA, 19 nt, Artificial Sequence
  Description of Artificial Sequence: Synthetic oligonucleotide
aacaccagcauaugccuag

SEQ ID NO: 3205236 - RNA, 19 nt, Artificial Sequence
  Description of Artificial Sequence: Synthetic oligonucleotide
auaaaucuuaggcuauuag

SEQ ID NO: 3205237 - RNA, 19 nt, Artificial Sequence
  Description of Artificial Sequence: Synthetic oligonucleotide
ugcugaaaauauaaaucag

SEQ ID NO: 3205238 - RNA, 19 nt, Artificial Sequence
  Description of Artificial Sequence: Synthetic oligonucleotide
uucugaacuauuauagagu

SEQ ID NO: 3205239 - RNA, 19 nt, Artificial Sequence
  Description of Artificial Sequence: Synthetic oligonucleotide
uguggcucggguuugaucu

SEQ ID NO: 3205240 - RNA, 19 nt, Artificial Sequence
  Description of Artificial Sequence: Synthetic oligonucleotide
aacagcacaguuccauagg

SEQ ID NO: 3205241 - RNA, 19 nt, Artificial Sequence
  Description of Artificial Sequence: Synthetic oligonucleotide
auuaaaacaccagcagagc

SEQ ID NO: 3205242 - RNA, 19 nt, Artificial Sequence
  Description of Artificial Sequence: Synthetic oligonucleotide
auagacaggccauagaaau

SEQ ID NO: 3205243 - RNA, 19 nt, Artificial Sequence
  Description of Artificial Sequence: Synthetic oligonucleotide
uguguagugaacagagccc

SEQ ID NO: 3205244 - RNA, 19 nt, Artificial Sequence
  Description of Artificial Sequence: Synthetic oligonucleotide
auaauaaugauaaaucuua

SEQ ID NO: 3205245 - RNA, 19 nt, Artificial Sequence
  Description of Artificial Sequence: Synthetic oligonucleotide
cacauuaaacaucuccugg

SEQ ID NO: 3205246 - RNA, 19 nt, Artificial Sequence
  Description of Artificial Sequence: Synthetic oligonucleotide
uuauagaguacauggauuu

SEQ ID NO: 3205247 - RNA, 19 nt, Artificial Sequence
  Description of Artificial Sequence: Synthetic oligonucleotide
ugugcucacagacugcaag

SEQ ID NO: 3205248 - RNA, 19 nt, Artificial Sequence
  Description of Artificial Sequence: Synthetic oligonucleotide
caagaguugaaugaacucc

SEQ ID NO: 3205249 - RNA, 19 nt, Artificial Sequence
  Description of Artificial Sequence: Synthetic oligonucleotide
uguaaaaggcaagaguuga

SEQ ID NO: 3205250 - RNA, 19 nt, Artificial Sequence
  Description of Artificial Sequence: Synthetic oligonucleotide
ucugaacuauuauagagua

SEQ ID NO: 3205251 - RNA, 19 nt, Artificial Sequence
  Description of Artificial Sequence: Synthetic oligonucleotide
uaaaucagaacuguucaca

SEQ ID NO: 3205252 - RNA, 19 nt, Artificial Sequence
  Description of Artificial Sequence: Synthetic oligonucleotide
aauagugcuucaccuauaa

SEQ ID NO: 3205253 - RNA, 19 nt, Artificial Sequence
  Description of Artificial Sequence: Synthetic oligonucleotide
uuaaaucaggcacauuaaa

SEQ ID NO: 3205254 - RNA, 19 nt, Artificial Sequence
  Description of Artificial Sequence: Synthetic oligonucleotide
auucaauagugcuucaccu

SEQ ID NO: 3205255 - RNA, 19 nt, Artificial Sequence
  Description of Artificial Sequence: Synthetic oligonucleotide
cauuaaaucaggcacauua

SEQ ID NO: 3205256 - RNA, 19 nt, Artificial Sequence
  Description of Artificial Sequence: Synthetic oligonucleotide
augauugaacaauguaauc

SEQ ID NO: 3205257 - RNA, 19 nt, Artificial Sequence
  Description of Artificial Sequence: Synthetic oligonucleotide
uaaucuguguagugaacag

SEQ ID NO: 3205258 - RNA, 19 nt, Artificial Sequence
  Description of Artificial Sequence: Synthetic oligonucleotide
aaaugaguuguaauucgag

SEQ ID NO: 3205259 - RNA, 19 nt, Artificial Sequence
  Description of Artificial Sequence: Synthetic oligonucleotide
ugugaaacacgauauuaaa

SEQ ID NO: 3205260 - RNA, 19 nt, Artificial Sequence
  Description of Artificial Sequence: Synthetic oligonucleotide
acauuaaacaucuccuggu

SEQ ID NO: 3205261 - RNA, 19 nt, Artificial Sequence
  Description of Artificial Sequence: Synthetic oligonucleotide
gaacuuucacaguuggggc

SEQ ID NO: 3205262 - RNA, 19 nt, Artificial Sequence
  Description of Artificial Sequence: Synthetic oligonucleotide
cuauuuuguaaaaggcaag

SEQ ID NO: 3205263 - RNA, 19 nt, Artificial Sequence
  Description of Artificial Sequence: Synthetic oligonucleotide
ucuuaggcuauuagcagcu

SEQ ID NO: 3205264 - RNA, 19 nt, Artificial Sequence
  Description of Artificial Sequence: Synthetic oligonucleotide
agucccuuucccuaguguc

SEQ ID NO: 3205265 - RNA, 19 nt, Artificial Sequence
  Description of Artificial Sequence: Synthetic oligonucleotide
cacgauauuaaaacaccag

SEQ ID NO: 3205266 - RNA, 19 nt, Artificial Sequence
  Description of Artificial Sequence: Synthetic oligonucleotide
aauucgagggugugauguc

SEQ ID NO: 3205267 - RNA, 19 nt, Artificial Sequence
  Description of Artificial Sequence: Synthetic oligonucleotide
cugaaaauauaaaucagaa

SEQ ID NO: 3205268 - RNA, 19 nt, Artificial Sequence
  Description of Artificial Sequence: Synthetic oligonucleotide
uggaaguugcugaaaauau

SEQ ID NO: 3205269 - RNA, 19 nt, Artificial Sequence
  Description of Artificial Sequence: Synthetic oligonucleotide
uucaaggaggcacaacugu

SEQ ID NO: 3205270 - RNA, 19 nt, Artificial Sequence
  Description of Artificial Sequence: Synthetic oligonucleotide
uaauucgagggugugaugu

SEQ ID NO: 3205271 - RNA, 19 nt, Artificial Sequence
  Description of Artificial Sequence: Synthetic oligonucleotide
gaacagcacaguuccauag

SEQ ID NO: 3205272 - RNA, 19 nt, Artificial Sequence
  Description of Artificial Sequence: Synthetic oligonucleotide
ucaaggaggcacaacugug

SEQ ID NO: 3205273 - RNA, 19 nt, Artificial Sequence
  Description of Artificial Sequence: Synthetic oligonucleotide
uagaaaugaguuguaauuc

SEQ ID NO: 3205274 - RNA, 19 nt, Artificial Sequence
  Description of Artificial Sequence: Synthetic oligonucleotide
uuucaaggaggcacaacug

SEQ ID NO: 3205275 - RNA, 19 nt, Artificial Sequence
  Description of Artificial Sequence: Synthetic oligonucleotide
cuagugucuccacagcugg

SEQ ID NO: 3205276 - RNA, 19 nt, Artificial Sequence
  Description of Artificial Sequence: Synthetic oligonucleotide
uccuaauuugaacuuucac

SEQ ID NO: 3205277 - RNA, 19 nt, Artificial Sequence
  Description of Artificial Sequence: Synthetic oligonucleotide
cucauggacaucacugagg

SEQ ID NO: 3205278 - RNA, 19 nt, Artificial Sequence
  Description of Artificial Sequence: Synthetic oligonucleotide
gagugcaucagccuggcca

SEQ ID NO: 3205279 - RNA, 19 nt, Artificial Sequence
  Description of Artificial Sequence: Synthetic oligonucleotide
caaggaggcacaacugugg

SEQ ID NO: 3205280 - RNA, 19 nt, Artificial Sequence
  Description of Artificial Sequence: Synthetic oligonucleotide
cugcuuuucauaauggaca

SEQ ID NO: 3205281 - RNA, 19 nt, Artificial Sequence
  Description of Artificial Sequence: Synthetic oligonucleotide
uauagacaggccauagaaa

SEQ ID NO: 3205282 - RNA, 19 nt, Artificial Sequence
  Description of Artificial Sequence: Synthetic oligonucleotide
aaaacaccagcagagcgga

SEQ ID NO: 3205283 - RNA, 19 nt, Artificial Sequence
  Description of Artificial Sequence: Synthetic oligonucleotide
aagaguugaaugaacucca

SEQ ID NO: 3205284 - RNA, 19 nt, Artificial Sequence
  Description of Artificial Sequence: Synthetic oligonucleotide
uguaauucgagggugugau

SEQ ID NO: 3205285 - RNA, 19 nt, Artificial Sequence
  Description of Artificial Sequence: Synthetic oligonucleotide
aucuguguagugaacagag

SEQ ID NO: 3205286 - RNA, 19 nt, Artificial Sequence
  Description of Artificial Sequence: Synthetic oligonucleotide
ucacagacugcaagcaccc

SEQ ID NO: 3205287 - RNA, 19 nt, Artificial Sequence
  Description of Artificial Sequence: Synthetic oligonucleotide
uucacaggagugcaucagc

SEQ ID NO: 3205288 - RNA, 19 nt, Artificial Sequence
  Description of Artificial Sequence: Synthetic oligonucleotide
aguccauggaaguugcuga

SEQ ID NO: 3205289 - RNA, 19 nt, Artificial Sequence
  Description of Artificial Sequence: Synthetic oligonucleotide
agagaugauagagagccug

SEQ ID NO: 3205290 - RNA, 19 nt, Artificial Sequence
  Description of Artificial Sequence: Synthetic oligonucleotide
caacauuauagacaggcca

SEQ ID NO: 3205291 - RNA, 19 nt, Artificial Sequence
  Description of Artificial Sequence: Synthetic oligonucleotide
aaguccauggaaguugcug

SEQ ID NO: 3205292 - RNA, 19 nt, Artificial Sequence
  Description of Artificial Sequence: Synthetic oligonucleotide
uucccuagugucuccacag

SEQ ID NO: 3205293 - RNA, 19 nt, Artificial Sequence
  Description of Artificial Sequence: Synthetic oligonucleotide
aucaugucgcccgaguugg

SEQ ID NO: 3205294 - RNA, 19 nt, Artificial Sequence
  Description of Artificial Sequence: Synthetic oligonucleotide
augucgcccgaguuggugc

SEQ ID NO: 3205295 - RNA, 19 nt, Artificial Sequence
  Description of Artificial Sequence: Synthetic oligonucleotide
auuauagacaggccauaga

SEQ ID NO: 3205296 - RNA, 19 nt, Artificial Sequence
  Description of Artificial Sequence: Synthetic oligonucleotide
gaaacauuagccccuguua

SEQ ID NO: 3205297 - RNA, 19 nt, Artificial Sequence
  Description of Artificial Sequence: Synthetic oligonucleotide
ucuauauauauauagauag

SEQ ID NO: 3205298 - RNA, 19 nt, Artificial Sequence
  Description of Artificial Sequence: Synthetic oligonucleotide
aaugaaaugauguuacacg

SEQ ID NO: 3205299 - RNA, 19 nt, Artificial Sequence
  Description of Artificial Sequence: Synthetic oligonucleotide
gaguuuaucauuuagcagg

SEQ ID NO: 3205300 - RNA, 19 nt, Artificial Sequence
  Description of Artificial Sequence: Synthetic oligonucleotide
uuuuauacugcauucaucc

SEQ ID NO: 3205301 - RNA, 19 nt, Artificial Sequence
  Description of Artificial Sequence: Synthetic oligonucleotide
auaauuaaguuacauuacc

SEQ ID NO: 3205302 - RNA, 19 nt, Artificial Sequence
  Description of Artificial Sequence: Synthetic oligonucleotide
uaacauuauauaaucaagg

SEQ ID NO: 3205303 - RNA, 19 nt, Artificial Sequence
  Description of Artificial Sequence: Synthetic oligonucleotide
uguuacacgaaucacauug

SEQ ID NO: 3205304 - RNA, 19 nt, Artificial Sequence
  Description of Artificial Sequence: Synthetic oligonucleotide
uaagaauuaaggcaaaccc

SEQ ID NO: 3205305 - RNA, 19 nt, Artificial Sequence
  Description of Artificial Sequence: Synthetic oligonucleotide
uuuguuguauaauauaugc

SEQ ID NO: 3205306 - RNA, 19 nt, Artificial Sequence
  Description of Artificial Sequence: Synthetic oligonucleotide
uuaaguuacauuaccgugg

SEQ ID NO: 3205307 - RNA, 19 nt, Artificial Sequence
  Description of Artificial Sequence: Synthetic oligonucleotide
acuuucaauaaauaauacc

SEQ ID NO: 3205308 - RNA, 19 nt, Artificial Sequence
  Description of Artificial Sequence: Synthetic oligonucleotide
uauauaaucaaggagacac

SEQ ID NO: 3205309 - RNA, 19 nt, Artificial Sequence
  Description of Artificial Sequence: Synthetic oligonucleotide
auaaauaauaccuuugugu

SEQ ID NO: 3205310 - RNA, 19 nt, Artificial Sequence
  Description of Artificial Sequence: Synthetic oligonucleotide
uguacaagaaaucauagaa

SEQ ID NO: 3205311 - RNA, 19 nt, Artificial Sequence
  Description of Artificial Sequence: Synthetic oligonucleotide
ugugucuauauauauauag

SEQ ID NO: 3205312 - RNA, 19 nt, Artificial Sequence
  Description of Artificial Sequence: Synthetic oligonucleotide
ugaaaugucaagcagaaau

SEQ ID NO: 3205313 - RNA, 19 nt, Artificial Sequence
  Description of Artificial Sequence: Synthetic oligonucleotide
uuuacuuucaauaaauaau

SEQ ID NO: 3205314 - RNA, 19 nt, Artificial Sequence
  Description of Artificial Sequence: Synthetic oligonucleotide
aguacauuuauauucacug

SEQ ID NO: 3205315 - RNA, 19 nt, Artificial Sequence
  Description of Artificial Sequence: Synthetic oligonucleotide
uguuucaaacacaagaagc

SEQ ID NO: 3205316 - RNA, 19 nt, Artificial Sequence
  Description of Artificial Sequence: Synthetic oligonucleotide
gauagauauacauaaugag

SEQ ID NO: 3205317 - RNA, 19 nt, Artificial Sequence
  Description of Artificial Sequence: Synthetic oligonucleotide
uuaaggcaaacccaaaagg

SEQ ID NO: 3205318 - RNA, 19 nt, Artificial Sequence
  Description of Artificial Sequence: Synthetic oligonucleotide
aaaucauagaaacucuuug

SEQ ID NO: 3205319 - RNA, 19 nt, Artificial Sequence
  Description of Artificial Sequence: Synthetic oligonucleotide
aauaaauaauaccuuugug

SEQ ID NO: 3205320 - RNA, 19 nt, Artificial Sequence
  Description of Artificial Sequence: Synthetic oligonucleotide
aauuaaguuacauuaccgu

SEQ ID NO: 3205321 - RNA, 19 nt, Artificial Sequence
  Description of Artificial Sequence: Synthetic oligonucleotide
ugagguaagaauuaaggca

SEQ ID NO: 3205322 - RNA, 19 nt, Artificial Sequence
  Description of Artificial Sequence: Synthetic oligonucleotide
uacaagaaaucauagaaac

SEQ ID NO: 3205323 - RNA, 19 nt, Artificial Sequence
  Description of Artificial Sequence: Synthetic oligonucleotide
uagauagauauacauaaug

SEQ ID NO: 3205324 - RNA, 19 nt, Artificial Sequence
  Description of Artificial Sequence: Synthetic oligonucleotide
acugcauucauccaaaaca

SEQ ID NO: 3205325 - RNA, 19 nt, Artificial Sequence
  Description of Artificial Sequence: Synthetic oligonucleotide
uaaauaauaccuuuguguc

SEQ ID NO: 3205326 - RNA, 19 nt, Artificial Sequence
  Description of Artificial Sequence: Synthetic oligonucleotide
agaaauuuauacauacucc

SEQ ID NO: 3205327 - RNA, 19 nt, Artificial Sequence
  Description of Artificial Sequence: Synthetic oligonucleotide
auuuauagguaguccaagc

SEQ ID NO: 3205328 - RNA, 19 nt, Artificial Sequence
  Description of Artificial Sequence: Synthetic oligonucleotide
uguaaauucauuagcaaau

SEQ ID NO: 3205329 - RNA, 19 nt, Artificial Sequence
  Description of Artificial Sequence: Synthetic oligonucleotide
guucuuuccagguugauag

SEQ ID NO: 3205330 - RNA, 19 nt, Artificial Sequence
  Description of Artificial Sequence: Synthetic oligonucleotide
aggaagauguauuugaaug

SEQ ID NO: 3205331 - RNA, 19 nt, Artificial Sequence
  Description of Artificial Sequence: Synthetic oligonucleotide
uagauauacauaaugaguu

SEQ ID NO: 3205332 - RNA, 19 nt, Artificial Sequence
  Description of Artificial Sequence: Synthetic oligonucleotide
uaaggcaaacccaaaaggc

SEQ ID NO: 3205333 - RNA, 19 nt, Artificial Sequence
  Description of Artificial Sequence: Synthetic oligonucleotide
auuguggcagguuaguugg

SEQ ID NO: 3205334 - RNA, 19 nt, Artificial Sequence
  Description of Artificial Sequence: Synthetic oligonucleotide
ugauaggguacaaaugagg

SEQ ID NO: 3205335 - RNA, 19 nt, Artificial Sequence
  Description of Artificial Sequence: Synthetic oligonucleotide
gaagcaaguccauuuauag

SEQ ID NO: 3205336 - RNA, 19 nt, Artificial Sequence
  Description of Artificial Sequence: Synthetic oligonucleotide
cauagaaacucuuugcggc

SEQ ID NO: 3205337 - RNA, 19 nt, Artificial Sequence
  Description of Artificial Sequence: Synthetic oligonucleotide
uguuguauaauauaugcuu

SEQ ID NO: 3205338 - RNA, 19 nt, Artificial Sequence
  Description of Artificial Sequence: Synthetic oligonucleotide
agcaaguccauuuauaggu

SEQ ID NO: 3205339 - RNA, 19 nt, Artificial Sequence
  Description of Artificial Sequence: Synthetic oligonucleotide
ucacugauaauacaagcug

SEQ ID NO: 3205340 - RNA, 19 nt, Artificial Sequence
  Description of Artificial Sequence: Synthetic oligonucleotide
auuaaguuacauuaccgug

SEQ ID NO: 3205341 - RNA, 19 nt, Artificial Sequence
  Description of Artificial Sequence: Synthetic oligonucleotide
auuaaggcaaacccaaaag

SEQ ID NO: 3205342 - RNA, 19 nt, Artificial Sequence
  Description of Artificial Sequence: Synthetic oligonucleotide
aauucauuagcaaaugaca

SEQ ID NO: 3205343 - RNA, 19 nt, Artificial Sequence
  Description of Artificial Sequence: Synthetic oligonucleotide
aauuuauacauacuccuuu

SEQ ID NO: 3205344 - RNA, 19 nt, Artificial Sequence
  Description of Artificial Sequence: Synthetic oligonucleotide
aaaacauguacaagaaauc

SEQ ID NO: 3205345 - RNA, 19 nt, Artificial Sequence
  Description of Artificial Sequence: Synthetic oligonucleotide
cuuucaauaaauaauaccu

SEQ ID NO: 3205346 - RNA, 19 nt, Artificial Sequence
  Description of Artificial Sequence: Synthetic oligonucleotide
uauauauauauagauagau

SEQ ID NO: 3205347 - RNA, 19 nt, Artificial Sequence
  Description of Artificial Sequence: Synthetic oligonucleotide
uagcaaaacauguacaaga

SEQ ID NO: 3205348 - RNA, 19 nt, Artificial Sequence
  Description of Artificial Sequence: Synthetic oligonucleotide
uuagcaaaugacauucuca

SEQ ID NO: 3205349 - RNA, 19 nt, Artificial Sequence
  Description of Artificial Sequence: Synthetic oligonucleotide
uuuauagguaguccaagca

SEQ ID NO: 3205350 - RNA, 19 nt, Artificial Sequence
  Description of Artificial Sequence: Synthetic oligonucleotide
uaaugaguuuaucauuuag

SEQ ID NO: 3205351 - RNA, 19 nt, Artificial Sequence
  Description of Artificial Sequence: Synthetic oligonucleotide
aauacaagcuguguauggg

SEQ ID NO: 3205352 - RNA, 19 nt, Artificial Sequence
  Description of Artificial Sequence: Synthetic oligonucleotide
auacauaaugaguuuauca

SEQ ID NO: 3205353 - RNA, 19 nt, Artificial Sequence
  Description of Artificial Sequence: Synthetic oligonucleotide
uauucacugauaauacaag

SEQ ID NO: 3205354 - RNA, 19 nt, Artificial Sequence
  Description of Artificial Sequence: Synthetic oligonucleotide
uuuuguuguauaauauaug

SEQ ID NO: 3205355 - RNA, 19 nt, Artificial Sequence
  Description of Artificial Sequence: Synthetic oligonucleotide
auuauauaaucaaggagac

SEQ ID NO: 3205356 - RNA, 19 nt, Artificial Sequence
  Description of Artificial Sequence: Synthetic oligonucleotide
caagaaaucauagaaacuc

SEQ ID NO: 3205357 - RNA, 19 nt, Artificial Sequence
  Description of Artificial Sequence: Synthetic oligonucleotide
uuauacauacuccuuuaug

SEQ ID NO: 3205358 - RNA, 19 nt, Artificial Sequence
  Description of Artificial Sequence: Synthetic oligonucleotide
uacacgaaucacauugugg

SEQ ID NO: 3205359 - RNA, 19 nt, Artificial Sequence
  Description of Artificial Sequence: Synthetic oligonucleotide
uaugcuuguaaauucauua

SEQ ID NO: 3205360 - RNA, 19 nt, Artificial Sequence
  Description of Artificial Sequence: Synthetic oligonucleotide
ucaagcagaaauuuauaca

SEQ ID NO: 3205361 - RNA, 19 nt, Artificial Sequence
  Description of Artificial Sequence: Synthetic oligonucleotide
aaaugacauucucaugcac

SEQ ID NO: 3205362 - RNA, 19 nt, Artificial Sequence
  Description of Artificial Sequence: Synthetic oligonucleotide
uacauaaugaguuuaucau

SEQ ID NO: 3205363 - RNA, 19 nt, Artificial Sequence
  Description of Artificial Sequence: Synthetic oligonucleotide
ugucuauauauauauagau

SEQ ID NO: 3205364 - RNA, 19 nt, Artificial Sequence
  Description of Artificial Sequence: Synthetic oligonucleotide
cuguguaugggccagacag

SEQ ID NO: 3205365 - RNA, 19 nt, Artificial Sequence
  Description of Artificial Sequence: Synthetic oligonucleotide
ucaaacacaagaagcaagu

SEQ ID NO: 3205366 - RNA, 19 nt, Artificial Sequence
  Description of Artificial Sequence: Synthetic oligonucleotide
aagcaaguccauuuauagg

SEQ ID NO: 3205367 - RNA, 19 nt, Artificial Sequence
  Description of Artificial Sequence: Synthetic oligonucleotide
aaacauguacaagaaauca

SEQ ID NO: 3205368 - RNA, 19 nt, Artificial Sequence
  Description of Artificial Sequence: Synthetic oligonucleotide
uuuuaaguuuuauacugca

SEQ ID NO: 3205369 - RNA, 19 nt, Artificial Sequence
  Description of Artificial Sequence: Synthetic oligonucleotide
uucacugauaauacaagcu

SEQ ID NO: 3205370 - RNA, 19 nt, Artificial Sequence
  Description of Artificial Sequence: Synthetic oligonucleotide
aaauaauaccuuugugucu

SEQ ID NO: 3205371 - RNA, 19 nt, Artificial Sequence
  Description of Artificial Sequence: Synthetic oligonucleotide
guugauaggguacaaauga

SEQ ID NO: 3205372 - RNA, 19 nt, Artificial Sequence
  Description of Artificial Sequence: Synthetic oligonucleotide
aacacaagaagcaagucca

SEQ ID NO: 3205373 - RNA, 19 nt, Artificial Sequence
  Description of Artificial Sequence: Synthetic oligonucleotide
aauuaaggcaaacccaaaa

SEQ ID NO: 3205374 - RNA, 19 nt, Artificial Sequence
  Description of Artificial Sequence: Synthetic oligonucleotide
uuugaaaugucaagcagaa

SEQ ID NO: 3205375 - RNA, 19 nt, Artificial Sequence
  Description of Artificial Sequence: Synthetic oligonucleotide
auuagcaaaugacauucuc

SEQ ID NO: 3205376 - RNA, 19 nt, Artificial Sequence
  Description of Artificial Sequence: Synthetic oligonucleotide
uguauuugaaugaaaugau

SEQ ID NO: 3205377 - RNA, 19 nt, Artificial Sequence
  Description of Artificial Sequence: Synthetic oligonucleotide
agugcuauuuuacaggaga

SEQ ID NO: 3205378 - RNA, 19 nt, Artificial Sequence
  Description of Artificial Sequence: Synthetic oligonucleotide
augacauucucaugcacac

SEQ ID NO: 3205379 - RNA, 19 nt, Artificial Sequence
  Description of Artificial Sequence: Synthetic oligonucleotide
uccauuuauagguagucca

SEQ ID NO: 3205380 - RNA, 19 nt, Artificial Sequence
  Description of Artificial Sequence: Synthetic oligonucleotide
uacauuuauauucacugau

SEQ ID NO: 3205381 - RNA, 19 nt, Artificial Sequence
  Description of Artificial Sequence: Synthetic oligonucleotide
ugcuuguaaauucauuagc

SEQ ID NO: 3205382 - RNA, 19 nt, Artificial Sequence
  Description of Artificial Sequence: Synthetic oligonucleotide
uccaaaacaguucuuucca

SEQ ID NO: 3205383 - RNA, 19 nt, Artificial Sequence
  Description of Artificial Sequence: Synthetic oligonucleotide
uucucaugcacacaagugu

SEQ ID NO: 3205384 - RNA, 19 nt, Artificial Sequence
  Description of Artificial Sequence: Synthetic oligonucleotide
uuguaaauucauuagcaaa

SEQ ID NO: 3205385 - RNA, 19 nt, Artificial Sequence
  Description of Artificial Sequence: Synthetic oligonucleotide
ucauuagcaaaugacauuc

SEQ ID NO: 3205386 - RNA, 19 nt, Artificial Sequence
  Description of Artificial Sequence: Synthetic oligonucleotide
gaaauuuauacauacuccu

SEQ ID NO: 3205387 - RNA, 19 nt, Artificial Sequence
  Description of Artificial Sequence: Synthetic oligonucleotide
uuuuacaggagagugguga

SEQ ID NO: 3205388 - RNA, 19 nt, Artificial Sequence
  Description of Artificial Sequence: Synthetic oligonucleotide
uuauacugcauucauccaa

SEQ ID NO: 3205389 - RNA, 19 nt, Artificial Sequence
  Description of Artificial Sequence: Synthetic oligonucleotide
cuauuuuacaggagagugg

SEQ ID NO: 3205390 - RNA, 19 nt, Artificial Sequence
  Description of Artificial Sequence: Synthetic oligonucleotide
augaaaugauguuacacga

SEQ ID NO: 3205391 - RNA, 19 nt, Artificial Sequence
  Description of Artificial Sequence: Synthetic oligonucleotide
cuacuaacauuauauaauc

SEQ ID NO: 3205392 - RNA, 19 nt, Artificial Sequence
  Description of Artificial Sequence: Synthetic oligonucleotide
uaaguuuuauacugcauuc

SEQ ID NO: 3205393 - RNA, 19 nt, Artificial Sequence
  Description of Artificial Sequence: Synthetic oligonucleotide
uauuuuacaggagaguggu

SEQ ID NO: 3205394 - RNA, 19 nt, Artificial Sequence
  Description of Artificial Sequence: Synthetic oligonucleotide
aauaauaccuuugugucua

SEQ ID NO: 3205395 - RNA, 19 nt, Artificial Sequence
  Description of Artificial Sequence: Synthetic oligonucleotide
uuuaucauuuagcaggauu

SEQ ID NO: 3205396 - RNA, 19 nt, Artificial Sequence
  Description of Artificial Sequence: Synthetic oligonucleotide
cagcccauaauuaaguuac

SEQ ID NO: 3205397 - RNA, 19 nt, Artificial Sequence
  Description of Artificial Sequence: Synthetic oligonucleotide
aauuauaaauacuuuaucc

SEQ ID NO: 3205398 - RNA, 19 nt, Artificial Sequence
  Description of Artificial Sequence: Synthetic oligonucleotide
aaaauauuuacucuucuuc

SEQ ID NO: 3205399 - RNA, 19 nt, Artificial Sequence
  Description of Artificial Sequence: Synthetic oligonucleotide
uuuaauaaauuauaaauac

SEQ ID NO: 3205400 - RNA, 19 nt, Artificial Sequence
  Description of Artificial Sequence: Synthetic oligonucleotide
aaauuauaaauacuuuauc

SEQ ID NO: 3205401 - RNA, 19 nt, Artificial Sequence
  Description of Artificial Sequence: Synthetic oligonucleotide
uaauaaauuauaaauacuu

SEQ ID NO: 3205402 - RNA, 19 nt, Artificial Sequence
  Description of Artificial Sequence: Synthetic oligonucleotide
uuuuaauaaauuauaaaua

SEQ ID NO: 3205403 - RNA, 19 nt, Artificial Sequence
  Description of Artificial Sequence: Synthetic oligonucleotide
acuuccaaaauauuuacuc

SEQ ID NO: 3205404 - RNA, 19 nt, Artificial Sequence
  Description of Artificial Sequence: Synthetic oligonucleotide
ucaaaguucaccaaagaac

SEQ ID NO: 3205405 - RNA, 19 nt, Artificial Sequence
  Description of Artificial Sequence: Synthetic oligonucleotide
aaauauuuacucuucuuca

SEQ ID NO: 3205406 - RNA, 19 nt, Artificial Sequence
  Description of Artificial Sequence: Synthetic oligonucleotide
auuauaaauacuuuaucca

SEQ ID NO: 3205407 - RNA, 19 nt, Artificial Sequence
  Description of Artificial Sequence: Synthetic oligonucleotide
uaucuuaaaccccagagcu

SEQ ID NO: 3205408 - RNA, 19 nt, Artificial Sequence
  Description of Artificial Sequence: Synthetic oligonucleotide
ucuucuucauucuucaggg

SEQ ID NO: 3205409 - RNA, 19 nt, Artificial Sequence
  Description of Artificial Sequence: Synthetic oligonucleotide
ucuccuuucucaaugaugc

SEQ ID NO: 3205410 - RNA, 19 nt, Artificial Sequence
  Description of Artificial Sequence: Synthetic oligonucleotide
auaucuuaaaccccagagc

SEQ ID NO: 3205411 - RNA, 19 nt, Artificial Sequence
  Description of Artificial Sequence: Synthetic oligonucleotide
uaaauuauaaauacuuuau

SEQ ID NO: 3205412 - RNA, 19 nt, Artificial Sequence
  Description of Artificial Sequence: Synthetic oligonucleotide
aaccccagagcucucaugc

SEQ ID NO: 3205413 - RNA, 19 nt, Artificial Sequence
  Description of Artificial Sequence: Synthetic oligonucleotide
aauacuuuauccauuuauc

SEQ ID NO: 3205414 - RNA, 19 nt, Artificial Sequence
  Description of Artificial Sequence: Synthetic oligonucleotide
uuaauaaauuauaaauacu

SEQ ID NO: 3205415 - RNA, 19 nt, Artificial Sequence
  Description of Artificial Sequence: Synthetic oligonucleotide
aaauacuuuauccauuuau

SEQ ID NO: 3205416 - RNA, 19 nt, Artificial Sequence
  Description of Artificial Sequence: Synthetic oligonucleotide
uuaucaaaguucaccaaag

SEQ ID NO: 3205417 - RNA, 19 nt, Artificial Sequence
  Description of Artificial Sequence: Synthetic oligonucleotide
cauucacucacaaaguagg

SEQ ID NO: 3205418 - RNA, 19 nt, Artificial Sequence
  Description of Artificial Sequence: Synthetic oligonucleotide
ggaucauucacucacaaag

SEQ ID NO: 3205419 - RNA, 19 nt, Artificial Sequence
  Description of Artificial Sequence: Synthetic oligonucleotide
auaaauuauaaauacuuua

SEQ ID NO: 3205420 - RNA, 19 nt, Artificial Sequence
  Description of Artificial Sequence: Synthetic oligonucleotide
uauccauuuaucaaaguuc

SEQ ID NO: 3205421 - RNA, 19 nt, Artificial Sequence
  Description of Artificial Sequence: Synthetic oligonucleotide
uuuaucaaaguucaccaaa

SEQ ID NO: 3205422 - RNA, 19 nt, Artificial Sequence
  Description of Artificial Sequence: Synthetic oligonucleotide
cacgucauaucuuaaaccc

SEQ ID NO: 3205423 - RNA, 19 nt, Artificial Sequence
  Description of Artificial Sequence: Synthetic oligonucleotide
cauaucuuaaaccccagag

SEQ ID NO: 3205424 - RNA, 19 nt, Artificial Sequence
  Description of Artificial Sequence: Synthetic oligonucleotide
uuauaaauacuuuauccau

SEQ ID NO: 3205425 - RNA, 19 nt, Artificial Sequence
  Description of Artificial Sequence: Synthetic oligonucleotide
aagaucccaaggcagcggc

SEQ ID NO: 3205426 - RNA, 19 nt, Artificial Sequence
  Description of Artificial Sequence: Synthetic oligonucleotide
ucauucacucacaaaguag

SEQ ID NO: 3205427 - RNA, 19 nt, Artificial Sequence
  Description of Artificial Sequence: Synthetic oligonucleotide
aaguucaccaaagaacuuc

SEQ ID NO: 3205428 - RNA, 19 nt, Artificial Sequence
  Description of Artificial Sequence: Synthetic oligonucleotide
aaugaugcacgcaucgcgc

SEQ ID NO: 3205429 - RNA, 19 nt, Artificial Sequence
  Description of Artificial Sequence: Synthetic oligonucleotide
ucagggaucauucacucac

SEQ ID NO: 3205430 - RNA, 19 nt, Artificial Sequence
  Description of Artificial Sequence: Synthetic oligonucleotide
aauauuuacucuucuucau

SEQ ID NO: 3205431 - RNA, 19 nt, Artificial Sequence
  Description of Artificial Sequence: Synthetic oligonucleotide
uuauccauuuaucaaaguu

SEQ ID NO: 3205432 - RNA, 19 nt, Artificial Sequence
  Description of Artificial Sequence: Synthetic oligonucleotide
ucuccugagccucaggcgg

SEQ ID NO: 3205433 - RNA, 19 nt, Artificial Sequence
  Description of Artificial Sequence: Synthetic oligonucleotide
uuuucuuuccuuuuguuuu

SEQ ID NO: 3205434 - RNA, 19 nt, Artificial Sequence
  Description of Artificial Sequence: Synthetic oligonucleotide
ucacucacaaaguaggcca

SEQ ID NO: 3205435 - RNA, 19 nt, Artificial Sequence
  Description of Artificial Sequence: Synthetic oligonucleotide
ucucaugcacuccuugugg

SEQ ID NO: 3205436 - RNA, 19 nt, Artificial Sequence
  Description of Artificial Sequence: Synthetic oligonucleotide
auacuuuauccauuuauca

SEQ ID NO: 3205437 - RNA, 19 nt, Artificial Sequence
  Description of Artificial Sequence: Synthetic oligonucleotide
acuuuauccauuuaucaaa

SEQ ID NO: 3205438 - RNA, 19 nt, Artificial Sequence
  Description of Artificial Sequence: Synthetic oligonucleotide
cuuuauccauuuaucaaag

SEQ ID NO: 3205439 - RNA, 19 nt, Artificial Sequence
  Description of Artificial Sequence: Synthetic oligonucleotide
accacgucauaucuuaaac

SEQ ID NO: 3205440 - RNA, 19 nt, Artificial Sequence
  Description of Artificial Sequence: Synthetic oligonucleotide
uuuccagccgaaagcagcg

SEQ ID NO: 3205441 - RNA, 19 nt, Artificial Sequence
  Description of Artificial Sequence: Synthetic oligonucleotide
aaaguaggccaccacguca

SEQ ID NO: 3205442 - RNA, 19 nt, Artificial Sequence
  Description of Artificial Sequence: Synthetic oligonucleotide
uauuuacucuucuucauuc

SEQ ID NO: 3205443 - RNA, 19 nt, Artificial Sequence
  Description of Artificial Sequence: Synthetic oligonucleotide
cucuucuucauucuucagg

SEQ ID NO: 3205444 - RNA, 19 nt, Artificial Sequence
  Description of Artificial Sequence: Synthetic oligonucleotide
uucucaaugaugcacgcau

SEQ ID NO: 3205445 - RNA, 19 nt, Artificial Sequence
  Description of Artificial Sequence: Synthetic oligonucleotide
aauaaauuauaaauacuuu

SEQ ID NO: 3205446 - RNA, 19 nt, Artificial Sequence
  Description of Artificial Sequence: Synthetic oligonucleotide
cauuuaucaaaguucacca

SEQ ID NO: 3205447 - RNA, 19 nt, Artificial Sequence
  Description of Artificial Sequence: Synthetic oligonucleotide
accugaguugucugcaucc

SEQ ID NO: 3205448 - RNA, 19 nt, Artificial Sequence
  Description of Artificial Sequence: Synthetic oligonucleotide
uauaaauacuuuauccauu

SEQ ID NO: 3205449 - RNA, 19 nt, Artificial Sequence
  Description of Artificial Sequence: Synthetic oligonucleotide
auaaauacuuuauccauuu

SEQ ID NO: 3205450 - RNA, 19 nt, Artificial Sequence
  Description of Artificial Sequence: Synthetic oligonucleotide
cucaaugagauguccacag

SEQ ID NO: 3205451 - RNA, 19 nt, Artificial Sequence
  Description of Artificial Sequence: Synthetic oligonucleotide
guugucugcauccacuucc

SEQ ID NO: 3205452 - RNA, 19 nt, Artificial Sequence
  Description of Artificial Sequence: Synthetic oligonucleotide
uucuucuccuuucucaaug

SEQ ID NO: 3205453 - RNA, 19 nt, Artificial Sequence
  Description of Artificial Sequence: Synthetic oligonucleotide
cacaaaguaggccaccacg

SEQ ID NO: 3205454 - RNA, 19 nt, Artificial Sequence
  Description of Artificial Sequence: Synthetic oligonucleotide
gaacuuccaaaauauuuac

SEQ ID NO: 3205455 - RNA, 19 nt, Artificial Sequence
  Description of Artificial Sequence: Synthetic oligonucleotide
ucuuaaaccccagagcucu

SEQ ID NO: 3205456 - RNA, 19 nt, Artificial Sequence
  Description of Artificial Sequence: Synthetic oligonucleotide
uacuuuauccauuuaucaa

SEQ ID NO: 3205457 - RNA, 19 nt, Artificial Sequence
  Description of Artificial Sequence: Synthetic oligonucleotide
cucaaugaugcacgcaucg

SEQ ID NO: 3205458 - RNA, 19 nt, Artificial Sequence
  Description of Artificial Sequence: Synthetic oligonucleotide
cauucuucagggaucauuc

SEQ ID NO: 3205459 - RNA, 19 nt, Artificial Sequence
  Description of Artificial Sequence: Synthetic oligonucleotide
ucuucagggaucauucacu

SEQ ID NO: 3205460 - RNA, 19 nt, Artificial Sequence
  Description of Artificial Sequence: Synthetic oligonucleotide
caaugaugcacgcaucgcg

SEQ ID NO: 3205461 - RNA, 19 nt, Artificial Sequence
  Description of Artificial Sequence: Synthetic oligonucleotide
aucaaaguucaccaaagaa

SEQ ID NO: 3205462 - RNA, 19 nt, Artificial Sequence
  Description of Artificial Sequence: Synthetic oligonucleotide
uucuucauucuucagggau

SEQ ID NO: 3205463 - RNA, 19 nt, Artificial Sequence
  Description of Artificial Sequence: Synthetic oligonucleotide
aagaacuuccaaaauauuu

SEQ ID NO: 3205464 - RNA, 19 nt, Artificial Sequence
  Description of Artificial Sequence: Synthetic oligonucleotide
uccaaaauauuuacucuuc

SEQ ID NO: 3205465 - RNA, 19 nt, Artificial Sequence
  Description of Artificial Sequence: Synthetic oligonucleotide
ucaccaaagaacuuccaaa

SEQ ID NO: 3205466 - RNA, 19 nt, Artificial Sequence
  Description of Artificial Sequence: Synthetic oligonucleotide
aguucaccaaagaacuucc

SEQ ID NO: 3205467 - RNA, 19 nt, Artificial Sequence
  Description of Artificial Sequence: Synthetic oligonucleotide
cuuuccagccgaaagcagc

SEQ ID NO: 3205468 - RNA, 19 nt, Artificial Sequence
  Description of Artificial Sequence: Synthetic oligonucleotide
uucuccuuucucaaugaug

SEQ ID NO: 3205469 - RNA, 19 nt, Artificial Sequence
  Description of Artificial Sequence: Synthetic oligonucleotide
uaucaaaguucaccaaaga

SEQ ID NO: 3205470 - RNA, 19 nt, Artificial Sequence
  Description of Artificial Sequence: Synthetic oligonucleotide
uucaccacauuuucuuucc

SEQ ID NO: 3205471 - RNA, 19 nt, Artificial Sequence
  Description of Artificial Sequence: Synthetic oligonucleotide
caaugagauguccacagug

SEQ ID NO: 3205472 - RNA, 19 nt, Artificial Sequence
  Description of Artificial Sequence: Synthetic oligonucleotide
uuccaaaauauuuacucuu

SEQ ID NO: 3205473 - RNA, 19 nt, Artificial Sequence
  Description of Artificial Sequence: Synthetic oligonucleotide
aaugagauguccacagugu

SEQ ID NO: 3205474 - RNA, 19 nt, Artificial Sequence
  Description of Artificial Sequence: Synthetic oligonucleotide
ugaguugucugcauccacu

SEQ ID NO: 3205475 - RNA, 19 nt, Artificial Sequence
  Description of Artificial Sequence: Synthetic oligonucleotide
uucuucagggaucauucac

SEQ ID NO: 3205476 - RNA, 19 nt, Artificial Sequence
  Description of Artificial Sequence: Synthetic oligonucleotide
caucuuuccagccgaaagc

SEQ ID NO: 3205477 - RNA, 19 nt, Artificial Sequence
  Description of Artificial Sequence: Synthetic oligonucleotide
aaccugaguugucugcauc

SEQ ID NO: 3205478 - RNA, 19 nt, Artificial Sequence
  Description of Artificial Sequence: Synthetic oligonucleotide
uucaccaaagaacuuccaa

SEQ ID NO: 3205479 - RNA, 19 nt, Artificial Sequence
  Description of Artificial Sequence: Synthetic oligonucleotide
ucuucauucuucagggauc

SEQ ID NO: 3205480 - RNA, 19 nt, Artificial Sequence
  Description of Artificial Sequence: Synthetic oligonucleotide
caaaguucaccaaagaacu

SEQ ID NO: 3205481 - RNA, 19 nt, Artificial Sequence
  Description of Artificial Sequence: Synthetic oligonucleotide
uacucuucuucauucuuca

SEQ ID NO: 3205482 - RNA, 19 nt, Artificial Sequence
  Description of Artificial Sequence: Synthetic oligonucleotide
uuacucuucuucauucuuc

SEQ ID NO: 3205483 - RNA, 19 nt, Artificial Sequence
  Description of Artificial Sequence: Synthetic oligonucleotide
auuuucuuuccuuuuguuu

SEQ ID NO: 3205484 - RNA, 19 nt, Artificial Sequence
  Description of Artificial Sequence: Synthetic oligonucleotide
uucacucacaaaguaggcc

SEQ ID NO: 3205485 - RNA, 19 nt, Artificial Sequence
  Description of Artificial Sequence: Synthetic oligonucleotide
acaguguucuucuccuuuc

SEQ ID NO: 3205486 - RNA, 19 nt, Artificial Sequence
  Description of Artificial Sequence: Synthetic oligonucleotide
uugucugcauccacuuccg

SEQ ID NO: 3205487 - RNA, 19 nt, Artificial Sequence
  Description of Artificial Sequence: Synthetic oligonucleotide
uucuccugagccucaggcg

SEQ ID NO: 3205488 - RNA, 19 nt, Artificial Sequence
  Description of Artificial Sequence: Synthetic oligonucleotide
ucauaucuuaaaccccaga

SEQ ID NO: 3205489 - RNA, 19 nt, Artificial Sequence
  Description of Artificial Sequence: Synthetic oligonucleotide
cuucuccugagccucaggc

SEQ ID NO: 3205490 - RNA, 19 nt, Artificial Sequence
  Description of Artificial Sequence: Synthetic oligonucleotide
aaagaucccaaggcagcgg

SEQ ID NO: 3205491 - RNA, 19 nt, Artificial Sequence
  Description of Artificial Sequence: Synthetic oligonucleotide
acauuuucuuuccuuuugu

SEQ ID NO: 3205492 - RNA, 19 nt, Artificial Sequence
  Description of Artificial Sequence: Synthetic oligonucleotide
auccauuuaucaaaguuca

SEQ ID NO: 3205493 - RNA, 19 nt, Artificial Sequence
  Description of Artificial Sequence: Synthetic oligonucleotide
uguucuucuccuuucucaa

SEQ ID NO: 3205494 - RNA, 19 nt, Artificial Sequence
  Description of Artificial Sequence: Synthetic oligonucleotide
auucacucacaaaguaggc

SEQ ID NO: 3205495 - RNA, 19 nt, Artificial Sequence
  Description of Artificial Sequence: Synthetic oligonucleotide
uuggucuccgggcaggcgc

SEQ ID NO: 3205496 - RNA, 19 nt, Artificial Sequence
  Description of Artificial Sequence: Synthetic oligonucleotide
uuuacucuucuucauucuu

SEQ ID NO: 3205497 - RNA, 19 nt, Artificial Sequence
  Description of Artificial Sequence: Synthetic oligonucleotide
gacaggagcagcaugaagg

SEQ ID NO: 3205498 - RNA, 19 nt, Artificial Sequence
  Description of Artificial Sequence: Synthetic oligonucleotide
uccgacgugaaguagacga

SEQ ID NO: 3205499 - RNA, 19 nt, Artificial Sequence
  Description of Artificial Sequence: Synthetic oligonucleotide
cucaugaggaagcaguugg

SEQ ID NO: 3205500 - RNA, 19 nt, Artificial Sequence
  Description of Artificial Sequence: Synthetic oligonucleotide
ugaggaagcaguuggccgg

SEQ ID NO: 3205501 - RNA, 19 nt, Artificial Sequence
  Description of Artificial Sequence: Synthetic oligonucleotide
ugcaugaaggacaggagca

SEQ ID NO: 3205502 - RNA, 19 nt, Artificial Sequence
  Description of Artificial Sequence: Synthetic oligonucleotide
ugcacgugcaugaaggaca

SEQ ID NO: 3205503 - RNA, 19 nt, Artificial Sequence
  Description of Artificial Sequence: Synthetic oligonucleotide
augaggaagcaguuggccg

SEQ ID NO: 3205504 - RNA, 19 nt, Artificial Sequence
  Description of Artificial Sequence: Synthetic oligonucleotide
acaggagcagcaugaaggg

SEQ ID NO: 3205505 - RNA, 19 nt, Artificial Sequence
  Description of Artificial Sequence: Synthetic oligonucleotide
uagacgagcgugucguucg

SEQ ID NO: 3205506 - RNA, 19 nt, Artificial Sequence
  Description of Artificial Sequence: Synthetic oligonucleotide
gucguagccgcucaugagg

SEQ ID NO: 3205507 - RNA, 19 nt, Artificial Sequence
  Description of Artificial Sequence: Synthetic oligonucleotide
gaaguagacgagcgugucg

SEQ ID NO: 3205508 - RNA, 19 nt, Artificial Sequence
  Description of Artificial Sequence: Synthetic oligonucleotide
gaagcaguuggccgggcgg

SEQ ID NO: 3205509 - RNA, 19 nt, Artificial Sequence
  Description of Artificial Sequence: Synthetic oligonucleotide
aaguagacgagcgugucgu

SEQ ID NO: 3205510 - RNA, 19 nt, Artificial Sequence
  Description of Artificial Sequence: Synthetic oligonucleotide
aggagcagcaugaagggcg

SEQ ID NO: 3205511 - RNA, 19 nt, Artificial Sequence
  Description of Artificial Sequence: Synthetic oligonucleotide
ugcaucucgcccuuggcgc

SEQ ID NO: 3205512 - RNA, 19 nt, Artificial Sequence
  Description of Artificial Sequence: Synthetic oligonucleotide
guggaugaagcccacggcc

SEQ ID NO: 3205513 - RNA, 19 nt, Artificial Sequence
  Description of Artificial Sequence: Synthetic oligonucleotide
gacgugaaguagacgagcg

SEQ ID NO: 3205514 - RNA, 19 nt, Artificial Sequence
  Description of Artificial Sequence: Synthetic oligonucleotide
cuguggaugaagcccacgg

SEQ ID NO: 3205515 - RNA, 19 nt, Artificial Sequence
  Description of Artificial Sequence: Synthetic oligonucleotide
agcaugaagggcgugugcg

SEQ ID NO: 3205516 - RNA, 19 nt, Artificial Sequence
  Description of Artificial Sequence: Synthetic oligonucleotide
caguccaucuccucggccg

SEQ ID NO: 3205517 - RNA, 19 nt, Artificial Sequence
  Description of Artificial Sequence: Synthetic oligonucleotide
uguggaugaagcccacggc

SEQ ID NO: 3205518 - RNA, 19 nt, Artificial Sequence
  Description of Artificial Sequence: Synthetic oligonucleotide
ugacccacgcuccagucca

SEQ ID NO: 3205519 - RNA, 19 nt, Artificial Sequence
  Description of Artificial Sequence: Synthetic oligonucleotide
gugugcacgugcaugaagg

SEQ ID NO: 3205520 - RNA, 19 nt, Artificial Sequence
  Description of Artificial Sequence: Synthetic oligonucleotide
gugcaugaaggacaggagc

SEQ ID NO: 3205521 - RNA, 19 nt, Artificial Sequence
  Description of Artificial Sequence: Synthetic oligonucleotide
ucaugaggaagcaguuggc

SEQ ID NO: 3205522 - RNA, 19 nt, Artificial Sequence
  Description of Artificial Sequence: Synthetic oligonucleotide
aaggacaggagcagcauga

SEQ ID NO: 3205523 - RNA, 19 nt, Artificial Sequence
  Description of Artificial Sequence: Synthetic oligonucleotide
aagcccacggccugcuccg

SEQ ID NO: 3205524 - RNA, 19 nt, Artificial Sequence
  Description of Artificial Sequence: Synthetic oligonucleotide
gaaguagcgcaggaagccg

SEQ ID NO: 3205525 - RNA, 19 nt, Artificial Sequence
  Description of Artificial Sequence: Synthetic oligonucleotide
uggaugaagcccacggccu

SEQ ID NO: 3205526 - RNA, 19 nt, Artificial Sequence
  Description of Artificial Sequence: Synthetic oligonucleotide
accuccuccacgugugcgc

SEQ ID NO: 3205527 - RNA, 19 nt, Artificial Sequence
  Description of Artificial Sequence: Synthetic oligonucleotide
aguccaucuccucggccgc

SEQ ID NO: 3205528 - RNA, 19 nt, Artificial Sequence
  Description of Artificial Sequence: Synthetic oligonucleotide
gaaggacaggagcagcaug

SEQ ID NO: 3205529 - RNA, 19 nt, Artificial Sequence
  Description of Artificial Sequence: Synthetic oligonucleotide
gaagcccacggccugcucc

SEQ ID NO: 3205530 - RNA, 19 nt, Artificial Sequence
  Description of Artificial Sequence: Synthetic oligonucleotide
ucgcccuuggcgcugaccu

SEQ ID NO: 3205531 - RNA, 19 nt, Artificial Sequence
  Description of Artificial Sequence: Synthetic oligonucleotide
ugccuguggaugaagccca

SEQ ID NO: 3205532 - RNA, 19 nt, Artificial Sequence
  Description of Artificial Sequence: Synthetic oligonucleotide
ugguccgacgugaaguaga

SEQ ID NO: 3205533 - RNA, 19 nt, Artificial Sequence
  Description of Artificial Sequence: Synthetic oligonucleotide
caugaggaagcaguuggcc

SEQ ID NO: 3205534 - RNA, 19 nt, Artificial Sequence
  Description of Artificial Sequence: Synthetic oligonucleotide
gugcaucucgcccuuggcg

SEQ ID NO: 3205535 - RNA, 19 nt, Artificial Sequence
  Description of Artificial Sequence: Synthetic oligonucleotide
ugcgcgacgucguagccgc

SEQ ID NO: 3205536 - RNA, 19 nt, Artificial Sequence
  Description of Artificial Sequence: Synthetic oligonucleotide
ucgaggaccugacccacgc

SEQ ID NO: 3205537 - RNA, 19 nt, Artificial Sequence
  Description of Artificial Sequence: Synthetic oligonucleotide
acgugcaugaaggacagga

SEQ ID NO: 3205538 - RNA, 19 nt, Artificial Sequence
  Description of Artificial Sequence: Synthetic oligonucleotide
ucguagccgcucaugagga

SEQ ID NO: 3205539 - RNA, 19 nt, Artificial Sequence
  Description of Artificial Sequence: Synthetic oligonucleotide
cuccaguccaucuccucgg

SEQ ID NO: 3205540 - RNA, 19 nt, Artificial Sequence
  Description of Artificial Sequence: Synthetic oligonucleotide
aagggcgugugcgcgugcc

SEQ ID NO: 3205541 - RNA, 19 nt, Artificial Sequence
  Description of Artificial Sequence: Synthetic oligonucleotide
caugaagggcgugugcgcg

SEQ ID NO: 3205542 - RNA, 19 nt, Artificial Sequence
  Description of Artificial Sequence: Synthetic oligonucleotide
guucgccaggcccaggcgg

SEQ ID NO: 3205543 - RNA, 19 nt, Artificial Sequence
  Description of Artificial Sequence: Synthetic oligonucleotide
cuuggcgcugaccuccucc

SEQ ID NO: 3205544 - RNA, 19 nt, Artificial Sequence
  Description of Artificial Sequence: Synthetic oligonucleotide
gaggaccugacccacgcuc

SEQ ID NO: 3205545 - RNA, 19 nt, Artificial Sequence
  Description of Artificial Sequence: Synthetic oligonucleotide
uagccgcucaugaggaagc

SEQ ID NO: 3205546 - RNA, 19 nt, Artificial Sequence
  Description of Artificial Sequence: Synthetic oligonucleotide
ucguucgccaggcccaggc

SEQ ID NO: 3205547 - RNA, 19 nt, Artificial Sequence
  Description of Artificial Sequence: Synthetic oligonucleotide
cacgcuccaguccaucucc

SEQ ID NO: 3205548 - RNA, 19 nt, Artificial Sequence
  Description of Artificial Sequence: Synthetic oligonucleotide
ucgggccccgcgaagugcg

SEQ ID NO: 3205549 - RNA, 19 nt, Artificial Sequence
  Description of Artificial Sequence: Synthetic oligonucleotide
ugugcacgugcaugaagga

SEQ ID NO: 3205550 - RNA, 19 nt, Artificial Sequence
  Description of Artificial Sequence: Synthetic oligonucleotide
gagcgugucguucgccagg

SEQ ID NO: 3205551 - RNA, 19 nt, Artificial Sequence
  Description of Artificial Sequence: Synthetic oligonucleotide
caugaaggacaggagcagc

SEQ ID NO: 3205552 - RNA, 19 nt, Artificial Sequence
  Description of Artificial Sequence: Synthetic oligonucleotide
aucuccucggccgcguccc

SEQ ID NO: 3205553 - RNA, 19 nt, Artificial Sequence
  Description of Artificial Sequence: Synthetic oligonucleotide
gcggaaguagcgcaggaag

SEQ ID NO: 3205554 - RNA, 19 nt, Artificial Sequence
  Description of Artificial Sequence: Synthetic oligonucleotide
aggaccugacccacgcucc

SEQ ID NO: 3205555 - RNA, 19 nt, Artificial Sequence
  Description of Artificial Sequence: Synthetic oligonucleotide
ggcgucgaggaccugaccc

SEQ ID NO: 3205556 - RNA, 19 nt, Artificial Sequence
  Description of Artificial Sequence: Synthetic oligonucleotide
aagugcgccgugugcacgu

SEQ ID NO: 3205557 - RNA, 19 nt, Artificial Sequence
  Description of Artificial Sequence: Synthetic oligonucleotide
guagccgcucaugaggaag

SEQ ID NO: 3205558 - RNA, 19 nt, Artificial Sequence
  Description of Artificial Sequence: Synthetic oligonucleotide
ggaaguagcgcaggaagcc

SEQ ID NO: 3205559 - RNA, 19 nt, Artificial Sequence
  Description of Artificial Sequence: Synthetic oligonucleotide
agacgagcgugucguucgc

SEQ ID NO: 3205560 - RNA, 19 nt, Artificial Sequence
  Description of Artificial Sequence: Synthetic oligonucleotide
gcuccaguccaucuccucg

SEQ ID NO: 3205561 - RNA, 19 nt, Artificial Sequence
  Description of Artificial Sequence: Synthetic oligonucleotide
agcgugucguucgccaggc

SEQ ID NO: 3205562 - RNA, 19 nt, Artificial Sequence
  Description of Artificial Sequence: Synthetic oligonucleotide
ugcugcgcgacgucguagc

SEQ ID NO: 3205563 - RNA, 19 nt, Artificial Sequence
  Description of Artificial Sequence: Synthetic oligonucleotide
cacgugugcgccguggucc

SEQ ID NO: 3205564 - RNA, 19 nt, Artificial Sequence
  Description of Artificial Sequence: Synthetic oligonucleotide
cugaccuccuccacgugug

SEQ ID NO: 3205565 - RNA, 19 nt, Artificial Sequence
  Description of Artificial Sequence: Synthetic oligonucleotide
gugccuguggaugaagccc

SEQ ID NO: 3205566 - RNA, 19 nt, Artificial Sequence
  Description of Artificial Sequence: Synthetic oligonucleotide
acgucguagccgcucauga

SEQ ID NO: 3205567 - RNA, 19 nt, Artificial Sequence
  Description of Artificial Sequence: Synthetic oligonucleotide
uuggccgggcggaaguagc

SEQ ID NO: 3205568 - RNA, 19 nt, Artificial Sequence
  Description of Artificial Sequence: Synthetic oligonucleotide
uggccgggcggaaguagcg

SEQ ID NO: 3205569 - RNA, 19 nt, Artificial Sequence
  Description of Artificial Sequence: Synthetic oligonucleotide
ugaaguagacgagcguguc

SEQ ID NO: 3205570 - RNA, 19 nt, Artificial Sequence
  Description of Artificial Sequence: Synthetic oligonucleotide
ucggccgcguccccguagg

SEQ ID NO: 3205571 - RNA, 19 nt, Artificial Sequence
  Description of Artificial Sequence: Synthetic oligonucleotide
uuggcgcugaccuccucca

SEQ ID NO: 3205572 - RNA, 19 nt, Artificial Sequence
  Description of Artificial Sequence: Synthetic oligonucleotide
uaggccgccggcugcugcg

SEQ ID NO: 3205573 - RNA, 19 nt, Artificial Sequence
  Description of Artificial Sequence: Synthetic oligonucleotide
gaagugcgccgugugcacg

SEQ ID NO: 3205574 - RNA, 19 nt, Artificial Sequence
  Description of Artificial Sequence: Synthetic oligonucleotide
ugcuccgccaggccccggg

SEQ ID NO: 3205575 - RNA, 19 nt, Artificial Sequence
  Description of Artificial Sequence: Synthetic oligonucleotide
guugcugccgccgugcauc

SEQ ID NO: 3205576 - RNA, 19 nt, Artificial Sequence
  Description of Artificial Sequence: Synthetic oligonucleotide
gaggaagcaguuggccggg

SEQ ID NO: 3205577 - RNA, 19 nt, Artificial Sequence
  Description of Artificial Sequence: Synthetic oligonucleotide
ugcgcgugccuguggauga

SEQ ID NO: 3205578 - RNA, 19 nt, Artificial Sequence
  Description of Artificial Sequence: Synthetic oligonucleotide
aaguagcgcaggaagccga

SEQ ID NO: 3205579 - RNA, 19 nt, Artificial Sequence
  Description of Artificial Sequence: Synthetic oligonucleotide
uccagggcgucgaggaccu

SEQ ID NO: 3205580 - RNA, 19 nt, Artificial Sequence
  Description of Artificial Sequence: Synthetic oligonucleotide
uccaguccaucuccucggc

SEQ ID NO: 3205581 - RNA, 19 nt, Artificial Sequence
  Description of Artificial Sequence: Synthetic oligonucleotide
ugcgccgugugcacgugca

SEQ ID NO: 3205582 - RNA, 19 nt, Artificial Sequence
  Description of Artificial Sequence: Synthetic oligonucleotide
augaaggacaggagcagca

SEQ ID NO: 3205583 - RNA, 19 nt, Artificial Sequence
  Description of Artificial Sequence: Synthetic oligonucleotide
gaugaagcccacggccugc

SEQ ID NO: 3205584 - RNA, 19 nt, Artificial Sequence
  Description of Artificial Sequence: Synthetic oligonucleotide
acgagcgugucguucgcca

SEQ ID NO: 3205585 - RNA, 19 nt, Artificial Sequence
  Description of Artificial Sequence: Synthetic oligonucleotide
cugacccacgcuccagucc

SEQ ID NO: 3205586 - RNA, 19 nt, Artificial Sequence
  Description of Artificial Sequence: Synthetic oligonucleotide
gcugccgccgugcaucucg

SEQ ID NO: 3205587 - RNA, 19 nt, Artificial Sequence
  Description of Artificial Sequence: Synthetic oligonucleotide
uucgccaggcccaggcggu

SEQ ID NO: 3205588 - RNA, 19 nt, Artificial Sequence
  Description of Artificial Sequence: Synthetic oligonucleotide
acgugaaguagacgagcgu

SEQ ID NO: 3205589 - RNA, 19 nt, Artificial Sequence
  Description of Artificial Sequence: Synthetic oligonucleotide
aacucgggccccgcgaagu

SEQ ID NO: 3205590 - RNA, 19 nt, Artificial Sequence
  Description of Artificial Sequence: Synthetic oligonucleotide
acgugugcgccgugguccg

SEQ ID NO: 3205591 - RNA, 19 nt, Artificial Sequence
  Description of Artificial Sequence: Synthetic oligonucleotide
gaccuccuccacgugugcg

SEQ ID NO: 3205592 - RNA, 19 nt, Artificial Sequence
  Description of Artificial Sequence: Synthetic oligonucleotide
ugaaggacaggagcagcau

SEQ ID NO: 3205593 - RNA, 19 nt, Artificial Sequence
  Description of Artificial Sequence: Synthetic oligonucleotide
aagcaguuggccgggcgga

SEQ ID NO: 3205594 - RNA, 19 nt, Artificial Sequence
  Description of Artificial Sequence: Synthetic oligonucleotide
guccccguaggccccgugg

SEQ ID NO: 3205595 - RNA, 19 nt, Artificial Sequence
  Description of Artificial Sequence: Synthetic oligonucleotide
agcagcaugaagggcgugu

SEQ ID NO: 3205596 - RNA, 19 nt, Artificial Sequence
  Description of Artificial Sequence: Synthetic oligonucleotide
uccccguaggccccgugga

SEQ ID NO: 3205597 - RNA, 19 nt, Artificial Sequence
  Description of Artificial Sequence: Synthetic oligonucleotide
ucuaauaugugauaggucc

SEQ ID NO: 3205598 - RNA, 19 nt, Artificial Sequence
  Description of Artificial Sequence: Synthetic oligonucleotide
ucuagaaguacuuucagag

SEQ ID NO: 3205599 - RNA, 19 nt, Artificial Sequence
  Description of Artificial Sequence: Synthetic oligonucleotide
aaaucccacuuuuagaagg

SEQ ID NO: 3205600 - RNA, 19 nt, Artificial Sequence
  Description of Artificial Sequence: Synthetic oligonucleotide
aacuucuagaaguacuuuc

SEQ ID NO: 3205601 - RNA, 19 nt, Artificial Sequence
  Description of Artificial Sequence: Synthetic oligonucleotide
gauaccuuuagccagcccc

SEQ ID NO: 3205602 - RNA, 19 nt, Artificial Sequence
  Description of Artificial Sequence: Synthetic oligonucleotide
ucaguguucaccaugcuga

SEQ ID NO: 3205603 - RNA, 19 nt, Artificial Sequence
  Description of Artificial Sequence: Synthetic oligonucleotide
aagcugaccaaaugugacc

SEQ ID NO: 3205604 - RNA, 19 nt, Artificial Sequence
  Description of Artificial Sequence: Synthetic oligonucleotide
uucugggccaggaugaugg

SEQ ID NO: 3205605 - RNA, 19 nt, Artificial Sequence
  Description of Artificial Sequence: Synthetic oligonucleotide
aguacuuucagagcuggcc

SEQ ID NO: 3205606 - RNA, 19 nt, Artificial Sequence
  Description of Artificial Sequence: Synthetic oligonucleotide
acucauuugcugcagucgc

SEQ ID NO: 3205607 - RNA, 19 nt, Artificial Sequence
  Description of Artificial Sequence: Synthetic oligonucleotide
gaaguucagaagcaucucg

SEQ ID NO: 3205608 - RNA, 19 nt, Artificial Sequence
  Description of Artificial Sequence: Synthetic oligonucleotide
caaggugcgaguauggugc

SEQ ID NO: 3205609 - RNA, 19 nt, Artificial Sequence
  Description of Artificial Sequence: Synthetic oligonucleotide
aaagcgguccagcauguuc

SEQ ID NO: 3205610 - RNA, 19 nt, Artificial Sequence
  Description of Artificial Sequence: Synthetic oligonucleotide
ugugauagguccucaaagc

SEQ ID NO: 3205611 - RNA, 19 nt, Artificial Sequence
  Description of Artificial Sequence: Synthetic oligonucleotide
auuugcugcagucgcacgc

SEQ ID NO: 3205612 - RNA, 19 nt, Artificial Sequence
  Description of Artificial Sequence: Synthetic oligonucleotide
uugguuuucucaaagcggu

SEQ ID NO: 3205613 - RNA, 19 nt, Artificial Sequence
  Description of Artificial Sequence: Synthetic oligonucleotide
gaagcgcucacucauuugc

SEQ ID NO: 3205614 - RNA, 19 nt, Artificial Sequence
  Description of Artificial Sequence: Synthetic oligonucleotide
uccagcauguucuucuggg

SEQ ID NO: 3205615 - RNA, 19 nt, Artificial Sequence
  Description of Artificial Sequence: Synthetic oligonucleotide
uaugacagaauggagcagc

SEQ ID NO: 3205616 - RNA, 19 nt, Artificial Sequence
  Description of Artificial Sequence: Synthetic oligonucleotide
aguauggugcaugaagcgc

SEQ ID NO: 3205617 - RNA, 19 nt, Artificial Sequence
  Description of Artificial Sequence: Synthetic oligonucleotide
ugaggaagcggccacagaa

SEQ ID NO: 3205618 - RNA, 19 nt, Artificial Sequence
  Description of Artificial Sequence: Synthetic oligonucleotide
uucaccaugcugaggaagc

SEQ ID NO: 3205619 - RNA, 19 nt, Artificial Sequence
  Description of Artificial Sequence: Synthetic oligonucleotide
agggaaaucccacuuuuag

SEQ ID NO: 3205620 - RNA, 19 nt, Artificial Sequence
  Description of Artificial Sequence: Synthetic oligonucleotide
gauggcauugacaucauca

SEQ ID NO: 3205621 - RNA, 19 nt, Artificial Sequence
  Description of Artificial Sequence: Synthetic oligonucleotide
gaguauggugcaugaagcg

SEQ ID NO: 3205622 - RNA, 19 nt, Artificial Sequence
  Description of Artificial Sequence: Synthetic oligonucleotide
ucuucguccucuaggaaug

SEQ ID NO: 3205623 - RNA, 19 nt, Artificial Sequence
  Description of Artificial Sequence: Synthetic oligonucleotide
agcugaccaaaugugaccc

SEQ ID NO: 3205624 - RNA, 19 nt, Artificial Sequence
  Description of Artificial Sequence: Synthetic oligonucleotide
gauagguccucaaagccag

SEQ ID NO: 3205625 - RNA, 19 nt, Artificial Sequence
  Description of Artificial Sequence: Synthetic oligonucleotide
ugcaggauaccuuuagcca

SEQ ID NO: 3205626 - RNA, 19 nt, Artificial Sequence
  Description of Artificial Sequence: Synthetic oligonucleotide
cuagaaguacuuucagagc

SEQ ID NO: 3205627 - RNA, 19 nt, Artificial Sequence
  Description of Artificial Sequence: Synthetic oligonucleotide
gaauggagcagcaaagcug

SEQ ID NO: 3205628 - RNA, 19 nt, Artificial Sequence
  Description of Artificial Sequence: Synthetic oligonucleotide
ccaaaugugacccugggag

SEQ ID NO: 3205629 - RNA, 19 nt, Artificial Sequence
  Description of Artificial Sequence: Synthetic oligonucleotide
ugugacugaaggccucugg

SEQ ID NO: 3205630 - RNA, 19 nt, Artificial Sequence
  Description of Artificial Sequence: Synthetic oligonucleotide
gaaaucccacuuuuagaag

SEQ ID NO: 3205631 - RNA, 19 nt, Artificial Sequence
  Description of Artificial Sequence: Synthetic oligonucleotide
gauacuggguggaaugggg

SEQ ID NO: 3205632 - RNA, 19 nt, Artificial Sequence
  Description of Artificial Sequence: Synthetic oligonucleotide
uuaggaacccugccuauga

SEQ ID NO: 3205633 - RNA, 19 nt, Artificial Sequence
  Description of Artificial Sequence: Synthetic oligonucleotide
gaugguuguggugauacug

SEQ ID NO: 3205634 - RNA, 19 nt, Artificial Sequence
  Description of Artificial Sequence: Synthetic oligonucleotide
aaucccacuuuuagaaggg

SEQ ID NO: 3205635 - RNA, 19 nt, Artificial Sequence
  Description of Artificial Sequence: Synthetic oligonucleotide
aucucuuucuccuccaccu

SEQ ID NO: 3205636 - RNA, 19 nt, Artificial Sequence
  Description of Artificial Sequence: Synthetic oligonucleotide
aucuguguggcuguggccg

SEQ ID NO: 3205637 - RNA, 19 nt, Artificial Sequence
  Description of Artificial Sequence: Synthetic oligonucleotide
cuaggaauguccccucugg

SEQ ID NO: 3205638 - RNA, 19 nt, Artificial Sequence
  Description of Artificial Sequence: Synthetic oligonucleotide
aggucuaauaugugauagg

SEQ ID NO: 3205639 - RNA, 19 nt, Artificial Sequence
  Description of Artificial Sequence: Synthetic oligonucleotide
uuguugaaguucagaagca

SEQ ID NO: 3205640 - RNA, 19 nt, Artificial Sequence
  Description of Artificial Sequence: Synthetic oligonucleotide
gugauagguccucaaagcc

SEQ ID NO: 3205641 - RNA, 19 nt, Artificial Sequence
  Description of Artificial Sequence: Synthetic oligonucleotide
aggaagcggccacagaacg

SEQ ID NO: 3205642 - RNA, 19 nt, Artificial Sequence
  Description of Artificial Sequence: Synthetic oligonucleotide
agaagcaucucguugguuu

SEQ ID NO: 3205643 - RNA, 19 nt, Artificial Sequence
  Description of Artificial Sequence: Synthetic oligonucleotide
aucaucaguguucaccaug

SEQ ID NO: 3205644 - RNA, 19 nt, Artificial Sequence
  Description of Artificial Sequence: Synthetic oligonucleotide
ugaccaaaugugacccugg

SEQ ID NO: 3205645 - RNA, 19 nt, Artificial Sequence
  Description of Artificial Sequence: Synthetic oligonucleotide
uagcaggggaaccaggucu

SEQ ID NO: 3205646 - RNA, 19 nt, Artificial Sequence
  Description of Artificial Sequence: Synthetic oligonucleotide
agguuguugaaguucagaa

SEQ ID NO: 3205647 - RNA, 19 nt, Artificial Sequence
  Description of Artificial Sequence: Synthetic oligonucleotide
cugagagacggugagacag

SEQ ID NO: 3205648 - RNA, 19 nt, Artificial Sequence
  Description of Artificial Sequence: Synthetic oligonucleotide
uaugugauagguccucaaa

SEQ ID NO: 3205649 - RNA, 19 nt, Artificial Sequence
  Description of Artificial Sequence: Synthetic oligonucleotide
uccaugugucucuuccucg

SEQ ID NO: 3205650 - RNA, 19 nt, Artificial Sequence
  Description of Artificial Sequence: Synthetic oligonucleotide
uaggaauguccccucuggg

SEQ ID NO: 3205651 - RNA, 19 nt, Artificial Sequence
  Description of Artificial Sequence: Synthetic oligonucleotide
caaaugugacccugggagg

SEQ ID NO: 3205652 - RNA, 19 nt, Artificial Sequence
  Description of Artificial Sequence: Synthetic oligonucleotide
cugauccugcggaagaugc

SEQ ID NO: 3205653 - RNA, 19 nt, Artificial Sequence
  Description of Artificial Sequence: Synthetic oligonucleotide
gugacugaaggccucuggg

SEQ ID NO: 3205654 - RNA, 19 nt, Artificial Sequence
  Description of Artificial Sequence: Synthetic oligonucleotide
agaacgacccucgaggcag

SEQ ID NO: 3205655 - RNA, 19 nt, Artificial Sequence
  Description of Artificial Sequence: Synthetic oligonucleotide
uucagagcuggccaaggcu

SEQ ID NO: 3205656 - RNA, 19 nt, Artificial Sequence
  Description of Artificial Sequence: Synthetic oligonucleotide
acagugucaggacuggugu

SEQ ID NO: 3205657 - RNA, 19 nt, Artificial Sequence
  Description of Artificial Sequence: Synthetic oligonucleotide
ugauagcaggggaaccagg

SEQ ID NO: 3205658 - RNA, 19 nt, Artificial Sequence
  Description of Artificial Sequence: Synthetic oligonucleotide
ucuaggaauguccccucug

SEQ ID NO: 3205659 - RNA, 19 nt, Artificial Sequence
  Description of Artificial Sequence: Synthetic oligonucleotide
ucccacuuuuagaaggggc

SEQ ID NO: 3205660 - RNA, 19 nt, Artificial Sequence
  Description of Artificial Sequence: Synthetic oligonucleotide
ggaaaucccacuuuuagaa

SEQ ID NO: 3205661 - RNA, 19 nt, Artificial Sequence
  Description of Artificial Sequence: Synthetic oligonucleotide
gacggugagacagugucag

SEQ ID NO: 3205662 - RNA, 19 nt, Artificial Sequence
  Description of Artificial Sequence: Synthetic oligonucleotide
ucccguuucauguccacca

SEQ ID NO: 3205663 - RNA, 19 nt, Artificial Sequence
  Description of Artificial Sequence: Synthetic oligonucleotide
ugguuguggugauacuggg

SEQ ID NO: 3205664 - RNA, 19 nt, Artificial Sequence
  Description of Artificial Sequence: Synthetic oligonucleotide
ggcauugacaucaucagug

SEQ ID NO: 3205665 - RNA, 19 nt, Artificial Sequence
  Description of Artificial Sequence: Synthetic oligonucleotide
cuucuagaaguacuuucag

SEQ ID NO: 3205666 - RNA, 19 nt, Artificial Sequence
  Description of Artificial Sequence: Synthetic oligonucleotide
ugauacuggguggaauggg

SEQ ID NO: 3205667 - RNA, 19 nt, Artificial Sequence
  Description of Artificial Sequence: Synthetic oligonucleotide
gacugagagacggugagac

SEQ ID NO: 3205668 - RNA, 19 nt, Artificial Sequence
  Description of Artificial Sequence: Synthetic oligonucleotide
gaccaaaugugacccuggg

SEQ ID NO: 3205669 - RNA, 19 nt, Artificial Sequence
  Description of Artificial Sequence: Synthetic oligonucleotide
uuucagagcuggccaaggc

SEQ ID NO: 3205670 - RNA, 19 nt, Artificial Sequence
  Description of Artificial Sequence: Synthetic oligonucleotide
aauaugugauagguccuca

SEQ ID NO: 3205671 - RNA, 19 nt, Artificial Sequence
  Description of Artificial Sequence: Synthetic oligonucleotide
gguuguugaaguucagaag

SEQ ID NO: 3205672 - RNA, 19 nt, Artificial Sequence
  Description of Artificial Sequence: Synthetic oligonucleotide
ugucucuuccucgucaucu

SEQ ID NO: 3205673 - RNA, 19 nt, Artificial Sequence
  Description of Artificial Sequence: Synthetic oligonucleotide
ugcagucgcacgcuggaca

SEQ ID NO: 3205674 - RNA, 19 nt, Artificial Sequence
  Description of Artificial Sequence: Synthetic oligonucleotide
cucguugguuuucucaaag

SEQ ID NO: 3205675 - RNA, 19 nt, Artificial Sequence
  Description of Artificial Sequence: Synthetic oligonucleotide
acuucuagaaguacuuuca

SEQ ID NO: 3205676 - RNA, 19 nt, Artificial Sequence
  Description of Artificial Sequence: Synthetic oligonucleotide
ugccuaugacagaauggag

SEQ ID NO: 3205677 - RNA, 19 nt, Artificial Sequence
  Description of Artificial Sequence: Synthetic oligonucleotide
aaugugacccugggaggac

SEQ ID NO: 3205678 - RNA, 19 nt, Artificial Sequence
  Description of Artificial Sequence: Synthetic oligonucleotide
ggugauacuggguggaaug

SEQ ID NO: 3205679 - RNA, 19 nt, Artificial Sequence
  Description of Artificial Sequence: Synthetic oligonucleotide
augguuguggugauacugg

SEQ ID NO: 3205680 - RNA, 19 nt, Artificial Sequence
  Description of Artificial Sequence: Synthetic oligonucleotide
ucguugguuuucucaaagc

SEQ ID NO: 3205681 - RNA, 19 nt, Artificial Sequence
  Description of Artificial Sequence: Synthetic oligonucleotide
uggcauagggaaaucccac

SEQ ID NO: 3205682 - RNA, 19 nt, Artificial Sequence
  Description of Artificial Sequence: Synthetic oligonucleotide
aggaauguccccucuggga

SEQ ID NO: 3205683 - RNA, 19 nt, Artificial Sequence
  Description of Artificial Sequence: Synthetic oligonucleotide
uaauaugugauagguccuc

SEQ ID NO: 3205684 - RNA, 19 nt, Artificial Sequence
  Description of Artificial Sequence: Synthetic oligonucleotide
agguccucaaagccaggac

SEQ ID NO: 3205685 - RNA, 19 nt, Artificial Sequence
  Description of Artificial Sequence: Synthetic oligonucleotide
gcaggauaccuuuagccag

SEQ ID NO: 3205686 - RNA, 19 nt, Artificial Sequence
  Description of Artificial Sequence: Synthetic oligonucleotide
uguggccguugauagcagg

SEQ ID NO: 3205687 - RNA, 19 nt, Artificial Sequence
  Description of Artificial Sequence: Synthetic oligonucleotide
uggccaaggcuguagcugc

SEQ ID NO: 3205688 - RNA, 19 nt, Artificial Sequence
  Description of Artificial Sequence: Synthetic oligonucleotide
uugauagcaggggaaccag

SEQ ID NO: 3205689 - RNA, 19 nt, Artificial Sequence
  Description of Artificial Sequence: Synthetic oligonucleotide
ggagcagcaaagcugacca

SEQ ID NO: 3205690 - RNA, 19 nt, Artificial Sequence
  Description of Artificial Sequence: Synthetic oligonucleotide
aagcgguccagcauguucu

SEQ ID NO: 3205691 - RNA, 19 nt, Artificial Sequence
  Description of Artificial Sequence: Synthetic oligonucleotide
guacuuucagagcuggcca

SEQ ID NO: 3205692 - RNA, 19 nt, Artificial Sequence
  Description of Artificial Sequence: Synthetic oligonucleotide
uggcauugacaucaucagu

SEQ ID NO: 3205693 - RNA, 19 nt, Artificial Sequence
  Description of Artificial Sequence: Synthetic oligonucleotide
gaagcggccacagaacgac

SEQ ID NO: 3205694 - RNA, 19 nt, Artificial Sequence
  Description of Artificial Sequence: Synthetic oligonucleotide
aaguacuuucagagcuggc

SEQ ID NO: 3205695 - RNA, 19 nt, Artificial Sequence
  Description of Artificial Sequence: Synthetic oligonucleotide
caggauaccuuuagccagc

SEQ ID NO: 3205696 - RNA, 19 nt, Artificial Sequence
  Description of Artificial Sequence: Synthetic oligonucleotide
cacucauuugcugcagucg

SEQ ID NO: 3205697 - RNA, 19 nt, Artificial Sequence
  Description of Artificial Sequence: Synthetic oligonucleotide
agagauauccauuuucucc

SEQ ID NO: 3205698 - RNA, 19 nt, Artificial Sequence
  Description of Artificial Sequence: Synthetic oligonucleotide
cuuccuguuaugaugaacg

SEQ ID NO: 3205699 - RNA, 19 nt, Artificial Sequence
  Description of Artificial Sequence: Synthetic oligonucleotide
uuguugaacaagaagaggu

SEQ ID NO: 3205700 - RNA, 19 nt, Artificial Sequence
  Description of Artificial Sequence: Synthetic oligonucleotide
aauaucuugcaccuggaga

SEQ ID NO: 3205701 - RNA, 19 nt, Artificial Sequence
  Description of Artificial Sequence: Synthetic oligonucleotide
uuucacaauaucuugcacc

SEQ ID NO: 3205702 - RNA, 19 nt, Artificial Sequence
  Description of Artificial Sequence: Synthetic oligonucleotide
uagagcaucacauuguuga

SEQ ID NO: 3205703 - RNA, 19 nt, Artificial Sequence
  Description of Artificial Sequence: Synthetic oligonucleotide
gagauauccauuuucuccc

SEQ ID NO: 3205704 - RNA, 19 nt, Artificial Sequence
  Description of Artificial Sequence: Synthetic oligonucleotide
aauuucuggauguugcccu

SEQ ID NO: 3205705 - RNA, 19 nt, Artificial Sequence
  Description of Artificial Sequence: Synthetic oligonucleotide
aacuucuggcccaugagcc

SEQ ID NO: 3205706 - RNA, 19 nt, Artificial Sequence
  Description of Artificial Sequence: Synthetic oligonucleotide
aucagagauauccauuuuc

SEQ ID NO: 3205707 - RNA, 19 nt, Artificial Sequence
  Description of Artificial Sequence: Synthetic oligonucleotide
aauccauucuuucuucucu

SEQ ID NO: 3205708 - RNA, 19 nt, Artificial Sequence
  Description of Artificial Sequence: Synthetic oligonucleotide
cuggagaucagagauaucc

SEQ ID NO: 3205709 - RNA, 19 nt, Artificial Sequence
  Description of Artificial Sequence: Synthetic oligonucleotide
uuucuuccuguuaugauga

SEQ ID NO: 3205710 - RNA, 19 nt, Artificial Sequence
  Description of Artificial Sequence: Synthetic oligonucleotide
acauuguugaacaagaaga

SEQ ID NO: 3205711 - RNA, 19 nt, Artificial Sequence
  Description of Artificial Sequence: Synthetic oligonucleotide
ucagagauauccauuuucu

SEQ ID NO: 3205712 - RNA, 19 nt, Artificial Sequence
  Description of Artificial Sequence: Synthetic oligonucleotide
uuggguacacaguagagca

SEQ ID NO: 3205713 - RNA, 19 nt, Artificial Sequence
  Description of Artificial Sequence: Synthetic oligonucleotide
uccuugaucagcucauugg

SEQ ID NO: 3205714 - RNA, 19 nt, Artificial Sequence
  Description of Artificial Sequence: Synthetic oligonucleotide
uuugguuucacaauaucuu

SEQ ID NO: 3205715 - RNA, 19 nt, Artificial Sequence
  Description of Artificial Sequence: Synthetic oligonucleotide
cacaauaucuugcaccugg

SEQ ID NO: 3205716 - RNA, 19 nt, Artificial Sequence
  Description of Artificial Sequence: Synthetic oligonucleotide
guuaugaugaacgugugug

SEQ ID NO: 3205717 - RNA, 19 nt, Artificial Sequence
  Description of Artificial Sequence: Synthetic oligonucleotide
uucacaauaucuugcaccu

SEQ ID NO: 3205718 - RNA, 19 nt, Artificial Sequence
  Description of Artificial Sequence: Synthetic oligonucleotide
uuaguuuggguacacagua

SEQ ID NO: 3205719 - RNA, 19 nt, Artificial Sequence
  Description of Artificial Sequence: Synthetic oligonucleotide
acaauuucuggauguugcc

SEQ ID NO: 3205720 - RNA, 19 nt, Artificial Sequence
  Description of Artificial Sequence: Synthetic oligonucleotide
uacacugaacuucuggccc

SEQ ID NO: 3205721 - RNA, 19 nt, Artificial Sequence
  Description of Artificial Sequence: Synthetic oligonucleotide
agucugaagcuccagggac

SEQ ID NO: 3205722 - RNA, 19 nt, Artificial Sequence
  Description of Artificial Sequence: Synthetic oligonucleotide
cauuguugaacaagaagag

SEQ ID NO: 3205723 - RNA, 19 nt, Artificial Sequence
  Description of Artificial Sequence: Synthetic oligonucleotide
uuguguccgagucugaagc

SEQ ID NO: 3205724 - RNA, 19 nt, Artificial Sequence
  Description of Artificial Sequence: Synthetic oligonucleotide
acaguagagcaucacauug

SEQ ID NO: 3205725 - RNA, 19 nt, Artificial Sequence
  Description of Artificial Sequence: Synthetic oligonucleotide
uugaacaagaagaggugcc

SEQ ID NO: 3205726 - RNA, 19 nt, Artificial Sequence
  Description of Artificial Sequence: Synthetic oligonucleotide
auaucuugcaccuggagau

SEQ ID NO: 3205727 - RNA, 19 nt, Artificial Sequence
  Description of Artificial Sequence: Synthetic oligonucleotide
uguugaacaagaagaggug

SEQ ID NO: 3205728 - RNA, 19 nt, Artificial Sequence
  Description of Artificial Sequence: Synthetic oligonucleotide
cuuucuuccuguuaugaug

SEQ ID NO: 3205729 - RNA, 19 nt, Artificial Sequence
  Description of Artificial Sequence: Synthetic oligonucleotide
uugaucagcucauuggcug

SEQ ID NO: 3205730 - RNA, 19 nt, Artificial Sequence
  Description of Artificial Sequence: Synthetic oligonucleotide
uugguuucacaauaucuug

SEQ ID NO: 3205731 - RNA, 19 nt, Artificial Sequence
  Description of Artificial Sequence: Synthetic oligonucleotide
gacaauuucuggauguugc

SEQ ID NO: 3205732 - RNA, 19 nt, Artificial Sequence
  Description of Artificial Sequence: Synthetic oligonucleotide
ugguuucacaauaucuugc

SEQ ID NO: 3205733 - RNA, 19 nt, Artificial Sequence
  Description of Artificial Sequence: Synthetic oligonucleotide
agcaucacauuguugaaca

SEQ ID NO: 3205734 - RNA, 19 nt, Artificial Sequence
  Description of Artificial Sequence: Synthetic oligonucleotide
ugaacaagaagaggugccg

SEQ ID NO: 3205735 - RNA, 19 nt, Artificial Sequence
  Description of Artificial Sequence: Synthetic oligonucleotide
uacacaguagagcaucaca

SEQ ID NO: 3205736 - RNA, 19 nt, Artificial Sequence
  Description of Artificial Sequence: Synthetic oligonucleotide
uuaugaugaacgugugugc

SEQ ID NO: 3205737 - RNA, 19 nt, Artificial Sequence
  Description of Artificial Sequence: Synthetic oligonucleotide
cacauuguugaacaagaag

SEQ ID NO: 3205738 - RNA, 19 nt, Artificial Sequence
  Description of Artificial Sequence: Synthetic oligonucleotide
auuguugaacaagaagagg

SEQ ID NO: 3205739 - RNA, 19 nt, Artificial Sequence
  Description of Artificial Sequence: Synthetic oligonucleotide
uuuggguacacaguagagc

SEQ ID NO: 3205740 - RNA, 19 nt, Artificial Sequence
  Description of Artificial Sequence: Synthetic oligonucleotide
uccauuuucucccguacac

SEQ ID NO: 3205741 - RNA, 19 nt, Artificial Sequence
  Description of Artificial Sequence: Synthetic oligonucleotide
ugagccuuaguuuggguac

SEQ ID NO: 3205742 - RNA, 19 nt, Artificial Sequence
  Description of Artificial Sequence: Synthetic oligonucleotide
ugaacuucuggcccaugag

SEQ ID NO: 3205743 - RNA, 19 nt, Artificial Sequence
  Description of Artificial Sequence: Synthetic oligonucleotide
gaacuucuggcccaugagc

SEQ ID NO: 3205744 - RNA, 19 nt, Artificial Sequence
  Description of Artificial Sequence: Synthetic oligonucleotide
aacaagaagaggugccggu

SEQ ID NO: 3205745 - RNA, 19 nt, Artificial Sequence
  Description of Artificial Sequence: Synthetic oligonucleotide
cauuuucucccguacacug

SEQ ID NO: 3205746 - RNA, 19 nt, Artificial Sequence
  Description of Artificial Sequence: Synthetic oligonucleotide
aguuuggguacacaguaga

SEQ ID NO: 3205747 - RNA, 19 nt, Artificial Sequence
  Description of Artificial Sequence: Synthetic oligonucleotide
ugaucagcucauuggcugg

SEQ ID NO: 3205748 - RNA, 19 nt, Artificial Sequence
  Description of Artificial Sequence: Synthetic oligonucleotide
auucuuucuucucuucuug

SEQ ID NO: 3205749 - RNA, 19 nt, Artificial Sequence
  Description of Artificial Sequence: Synthetic oligonucleotide
ucuuucuucucuucuugug

SEQ ID NO: 3205750 - RNA, 19 nt, Artificial Sequence
  Description of Artificial Sequence: Synthetic oligonucleotide
uucuuggccgacaauuucu

SEQ ID NO: 3205751 - RNA, 19 nt, Artificial Sequence
  Description of Artificial Sequence: Synthetic oligonucleotide
auuugguuucacaauaucu

SEQ ID NO: 3205752 - RNA, 19 nt, Artificial Sequence
  Description of Artificial Sequence: Synthetic oligonucleotide
agaucagagauauccauuu

SEQ ID NO: 3205753 - RNA, 19 nt, Artificial Sequence
  Description of Artificial Sequence: Synthetic oligonucleotide
uaugaugaacgugugugca

SEQ ID NO: 3205754 - RNA, 19 nt, Artificial Sequence
  Description of Artificial Sequence: Synthetic oligonucleotide
uguuaugaugaacgugugu

SEQ ID NO: 3205755 - RNA, 19 nt, Artificial Sequence
  Description of Artificial Sequence: Synthetic oligonucleotide
auuggcuggguucacgaug

SEQ ID NO: 3205756 - RNA, 19 nt, Artificial Sequence
  Description of Artificial Sequence: Synthetic oligonucleotide
uuggccgacaauuucugga

SEQ ID NO: 3205757 - RNA, 19 nt, Artificial Sequence
  Description of Artificial Sequence: Synthetic oligonucleotide
guugaacaagaagaggugc

SEQ ID NO: 3205758 - RNA, 19 nt, Artificial Sequence
  Description of Artificial Sequence: Synthetic oligonucleotide
uucucccguacacugaacu

SEQ ID NO: 3205759 - RNA, 19 nt, Artificial Sequence
  Description of Artificial Sequence: Synthetic oligonucleotide
ucuucucuucuuguguccg

SEQ ID NO: 3205760 - RNA, 19 nt, Artificial Sequence
  Description of Artificial Sequence: Synthetic oligonucleotide
uauccauuuucucccguac

SEQ ID NO: 3205761 - RNA, 19 nt, Artificial Sequence
  Description of Artificial Sequence: Synthetic oligonucleotide
uuuucucccguacacugaa

SEQ ID NO: 3205762 - RNA, 19 nt, Artificial Sequence
  Description of Artificial Sequence: Synthetic oligonucleotide
guacacugaacuucuggcc

SEQ ID NO: 3205763 - RNA, 19 nt, Artificial Sequence
  Description of Artificial Sequence: Synthetic oligonucleotide
agcauuugguuucacaaua

SEQ ID NO: 3205764 - RNA, 19 nt, Artificial Sequence
  Description of Artificial Sequence: Synthetic oligonucleotide
agauauccauuuucucccg

SEQ ID NO: 3205765 - RNA, 19 nt, Artificial Sequence
  Description of Artificial Sequence: Synthetic oligonucleotide
uuucuucucuucuuguguc

SEQ ID NO: 3205766 - RNA, 19 nt, Artificial Sequence
  Description of Artificial Sequence: Synthetic oligonucleotide
ugaugaacgugugugcagc

SEQ ID NO: 3205767 - RNA, 19 nt, Artificial Sequence
  Description of Artificial Sequence: Synthetic oligonucleotide
uguccgagucugaagcucc

SEQ ID NO: 3205768 - RNA, 19 nt, Artificial Sequence
  Description of Artificial Sequence: Synthetic oligonucleotide
gaacaagaagaggugccgg

SEQ ID NO: 3205769 - RNA, 19 nt, Artificial Sequence
  Description of Artificial Sequence: Synthetic oligonucleotide
uggagaucagagauaucca

SEQ ID NO: 3205770 - RNA, 19 nt, Artificial Sequence
  Description of Artificial Sequence: Synthetic oligonucleotide
aucacauuguugaacaaga

SEQ ID NO: 3205771 - RNA, 19 nt, Artificial Sequence
  Description of Artificial Sequence: Synthetic oligonucleotide
uuggcuggguucacgaugu

SEQ ID NO: 3205772 - RNA, 19 nt, Artificial Sequence
  Description of Artificial Sequence: Synthetic oligonucleotide
uaguuuggguacacaguag

SEQ ID NO: 3205773 - RNA, 19 nt, Artificial Sequence
  Description of Artificial Sequence: Synthetic oligonucleotide
ugcgugguaccguucuugg

SEQ ID NO: 3205774 - RNA, 19 nt, Artificial Sequence
  Description of Artificial Sequence: Synthetic oligonucleotide
acgugugugcagcauuugg

SEQ ID NO: 3205775 - RNA, 19 nt, Artificial Sequence
  Description of Artificial Sequence: Synthetic oligonucleotide
caucacauuguugaacaag

SEQ ID NO: 3205776 - RNA, 19 nt, Artificial Sequence
  Description of Artificial Sequence: Synthetic oligonucleotide
ucuuggccgacaauuucug

SEQ ID NO: 3205777 - RNA, 19 nt, Artificial Sequence
  Description of Artificial Sequence: Synthetic oligonucleotide
gauguugcccuccuugauc

SEQ ID NO: 3205778 - RNA, 19 nt, Artificial Sequence
  Description of Artificial Sequence: Synthetic oligonucleotide
caagaagaggugccggucc

SEQ ID NO: 3205779 - RNA, 19 nt, Artificial Sequence
  Description of Artificial Sequence: Synthetic oligonucleotide
uggcccaugagccuuaguu

SEQ ID NO: 3205780 - RNA, 19 nt, Artificial Sequence
  Description of Artificial Sequence: Synthetic oligonucleotide
agcuccagggaccucuuuc

SEQ ID NO: 3205781 - RNA, 19 nt, Artificial Sequence
  Description of Artificial Sequence: Synthetic oligonucleotide
auguugcccuccuugauca

SEQ ID NO: 3205782 - RNA, 19 nt, Artificial Sequence
  Description of Artificial Sequence: Synthetic oligonucleotide
augaugaacgugugugcag

SEQ ID NO: 3205783 - RNA, 19 nt, Artificial Sequence
  Description of Artificial Sequence: Synthetic oligonucleotide
ucuucuuguguccgagucu

SEQ ID NO: 3205784 - RNA, 19 nt, Artificial Sequence
  Description of Artificial Sequence: Synthetic oligonucleotide
uugcaccuggagaucagag

SEQ ID NO: 3205785 - RNA, 19 nt, Artificial Sequence
  Description of Artificial Sequence: Synthetic oligonucleotide
accucuuucuuccuguuau

SEQ ID NO: 3205786 - RNA, 19 nt, Artificial Sequence
  Description of Artificial Sequence: Synthetic oligonucleotide
ucauuggcuggguucacga

SEQ ID NO: 3205787 - RNA, 19 nt, Artificial Sequence
  Description of Artificial Sequence: Synthetic oligonucleotide
ugaauccauucuuucuucu

SEQ ID NO: 3205788 - RNA, 19 nt, Artificial Sequence
  Description of Artificial Sequence: Synthetic oligonucleotide
auuucuggauguugcccuc

SEQ ID NO: 3205789 - RNA, 19 nt, Artificial Sequence
  Description of Artificial Sequence: Synthetic oligonucleotide
aagaagaggugccgguccu

SEQ ID NO: 3205790 - RNA, 19 nt, Artificial Sequence
  Description of Artificial Sequence: Synthetic oligonucleotide
caauuucuggauguugccc

SEQ ID NO: 3205791 - RNA, 19 nt, Artificial Sequence
  Description of Artificial Sequence: Synthetic oligonucleotide
uucuucucuucuugugucc

SEQ ID NO: 3205792 - RNA, 19 nt, Artificial Sequence
  Description of Artificial Sequence: Synthetic oligonucleotide
gaauccauucuuucuucuc

SEQ ID NO: 3205793 - RNA, 19 nt, Artificial Sequence
  Description of Artificial Sequence: Synthetic oligonucleotide
accugaauccauucuuucu

SEQ ID NO: 3205794 - RNA, 19 nt, Artificial Sequence
  Description of Artificial Sequence: Synthetic oligonucleotide
cuggauguugcccuccuug

SEQ ID NO: 3205795 - RNA, 19 nt, Artificial Sequence
  Description of Artificial Sequence: Synthetic oligonucleotide
ugaagcuccagggaccucu

SEQ ID NO: 3205796 - RNA, 19 nt, Artificial Sequence
  Description of Artificial Sequence: Synthetic oligonucleotide
ucuuucuuccuguuaugau

SEQ ID NO: 3205797 - RNA, 19 nt, Artificial Sequence
  Description of Artificial Sequence: Synthetic oligonucleotide
acucauuacacucauaggg

SEQ ID NO: 3205798 - RNA, 19 nt, Artificial Sequence
  Description of Artificial Sequence: Synthetic oligonucleotide
aaugagauuugauuucugg

SEQ ID NO: 3205799 - RNA, 19 nt, Artificial Sequence
  Description of Artificial Sequence: Synthetic oligonucleotide
aagagaugagaucugagag

SEQ ID NO: 3205800 - RNA, 19 nt, Artificial Sequence
  Description of Artificial Sequence: Synthetic oligonucleotide
acucaaugcaguuauaggg

SEQ ID NO: 3205801 - RNA, 19 nt, Artificial Sequence
  Description of Artificial Sequence: Synthetic oligonucleotide
aagauuugacaucugaaug

SEQ ID NO: 3205802 - RNA, 19 nt, Artificial Sequence
  Description of Artificial Sequence: Synthetic oligonucleotide
uuugauuucuggcuaaaag

SEQ ID NO: 3205803 - RNA, 19 nt, Artificial Sequence
  Description of Artificial Sequence: Synthetic oligonucleotide
gaugagaucugagagaagg

SEQ ID NO: 3205804 - RNA, 19 nt, Artificial Sequence
  Description of Artificial Sequence: Synthetic oligonucleotide
aagaguaagagaugagauc

SEQ ID NO: 3205805 - RNA, 19 nt, Artificial Sequence
  Description of Artificial Sequence: Synthetic oligonucleotide
uugauuucuggcuaaaagc

SEQ ID NO: 3205806 - RNA, 19 nt, Artificial Sequence
  Description of Artificial Sequence: Synthetic oligonucleotide
acucguuacagccauacgg

SEQ ID NO: 3205807 - RNA, 19 nt, Artificial Sequence
  Description of Artificial Sequence: Synthetic oligonucleotide
augagauuugauuucuggc

SEQ ID NO: 3205808 - RNA, 19 nt, Artificial Sequence
  Description of Artificial Sequence: Synthetic oligonucleotide
uguucauuucacuggaagg

SEQ ID NO: 3205809 - RNA, 19 nt, Artificial Sequence
  Description of Artificial Sequence: Synthetic oligonucleotide
uuuucaugagcaaugagau

SEQ ID NO: 3205810 - RNA, 19 nt, Artificial Sequence
  Description of Artificial Sequence: Synthetic oligonucleotide
ugauuucuggcuaaaagcu

SEQ ID NO: 3205811 - RNA, 19 nt, Artificial Sequence
  Description of Artificial Sequence: Synthetic oligonucleotide
auaaaguuuguucuggcug

SEQ ID NO: 3205812 - RNA, 19 nt, Artificial Sequence
  Description of Artificial Sequence: Synthetic oligonucleotide
uguagaugcaugauggugu

SEQ ID NO: 3205813 - RNA, 19 nt, Artificial Sequence
  Description of Artificial Sequence: Synthetic oligonucleotide
acauucauagggcuggugg

SEQ ID NO: 3205814 - RNA, 19 nt, Artificial Sequence
  Description of Artificial Sequence: Synthetic oligonucleotide
aguuuguucuggcugaagg

SEQ ID NO: 3205815 - RNA, 19 nt, Artificial Sequence
  Description of Artificial Sequence: Synthetic oligonucleotide
ugagauuugauuucuggcu

SEQ ID NO: 3205816 - RNA, 19 nt, Artificial Sequence
  Description of Artificial Sequence: Synthetic oligonucleotide
ugugcuuccucauaugaag

SEQ ID NO: 3205817 - RNA, 19 nt, Artificial Sequence
  Description of Artificial Sequence: Synthetic oligonucleotide
aguuauaggggcuuuucuc

SEQ ID NO: 3205818 - RNA, 19 nt, Artificial Sequence
  Description of Artificial Sequence: Synthetic oligonucleotide
uguguguguguguagaugc

SEQ ID NO: 3205819 - RNA, 19 nt, Artificial Sequence
  Description of Artificial Sequence: Synthetic oligonucleotide
ugacuuuuggcugaaagcc

SEQ ID NO: 3205820 - RNA, 19 nt, Artificial Sequence
  Description of Artificial Sequence: Synthetic oligonucleotide
uaugaagaguaagagauga

SEQ ID NO: 3205821 - RNA, 19 nt, Artificial Sequence
  Description of Artificial Sequence: Synthetic oligonucleotide
cucaaugcaguuauagggg

SEQ ID NO: 3205822 - RNA, 19 nt, Artificial Sequence
  Description of Artificial Sequence: Synthetic oligonucleotide
aagggaugagcucugggag

SEQ ID NO: 3205823 - RNA, 19 nt, Artificial Sequence
  Description of Artificial Sequence: Synthetic oligonucleotide
agaguaagagaugagaucu

SEQ ID NO: 3205824 - RNA, 19 nt, Artificial Sequence
  Description of Artificial Sequence: Synthetic oligonucleotide
ugguggguaauaaaguuug

SEQ ID NO: 3205825 - RNA, 19 nt, Artificial Sequence
  Description of Artificial Sequence: Synthetic oligonucleotide
uaagagaugagaucugaga

SEQ ID NO: 3205826 - RNA, 19 nt, Artificial Sequence
  Description of Artificial Sequence: Synthetic oligonucleotide
agauuugacaucugaauga

SEQ ID NO: 3205827 - RNA, 19 nt, Artificial Sequence
  Description of Artificial Sequence: Synthetic oligonucleotide
uguauaguaagggaugagc

SEQ ID NO: 3205828 - RNA, 19 nt, Artificial Sequence
  Description of Artificial Sequence: Synthetic oligonucleotide
auauguaagguuuucucca

SEQ ID NO: 3205829 - RNA, 19 nt, Artificial Sequence
  Description of Artificial Sequence: Synthetic oligonucleotide
uguguguagaugcaugaug

SEQ ID NO: 3205830 - RNA, 19 nt, Artificial Sequence
  Description of Artificial Sequence: Synthetic oligonucleotide
gagguguucauuucacugg

SEQ ID NO: 3205831 - RNA, 19 nt, Artificial Sequence
  Description of Artificial Sequence: Synthetic oligonucleotide
uucacuggaaggcaguccc

SEQ ID NO: 3205832 - RNA, 19 nt, Artificial Sequence
  Description of Artificial Sequence: Synthetic oligonucleotide
agcaaugagauuugauuuc

SEQ ID NO: 3205833 - RNA, 19 nt, Artificial Sequence
  Description of Artificial Sequence: Synthetic oligonucleotide
ucauaugaagaguaagaga

SEQ ID NO: 3205834 - RNA, 19 nt, Artificial Sequence
  Description of Artificial Sequence: Synthetic oligonucleotide
uucaugagcaaugagauuu

SEQ ID NO: 3205835 - RNA, 19 nt, Artificial Sequence
  Description of Artificial Sequence: Synthetic oligonucleotide
guuauaggggcuuuucucc

SEQ ID NO: 3205836 - RNA, 19 nt, Artificial Sequence
  Description of Artificial Sequence: Synthetic oligonucleotide
guaauaaaguuuguucugg

SEQ ID NO: 3205837 - RNA, 19 nt, Artificial Sequence
  Description of Artificial Sequence: Synthetic oligonucleotide
uggguaauaaaguuuguuc

SEQ ID NO: 3205838 - RNA, 19 nt, Artificial Sequence
  Description of Artificial Sequence: Synthetic oligonucleotide
uaaaguuuguucuggcuga

SEQ ID NO: 3205839 - RNA, 19 nt, Artificial Sequence
  Description of Artificial Sequence: Synthetic oligonucleotide
aguccccacauucacagcg

SEQ ID NO: 3205840 - RNA, 19 nt, Artificial Sequence
  Description of Artificial Sequence: Synthetic oligonucleotide
ugagcaaugagauuugauu

SEQ ID NO: 3205841 - RNA, 19 nt, Artificial Sequence
  Description of Artificial Sequence: Synthetic oligonucleotide
uaggguucuccccagaaug

SEQ ID NO: 3205842 - RNA, 19 nt, Artificial Sequence
  Description of Artificial Sequence: Synthetic oligonucleotide
auuugcugcagucgaaggg

SEQ ID NO: 3205843 - RNA, 19 nt, Artificial Sequence
  Description of Artificial Sequence: Synthetic oligonucleotide
acacucauaggguucuccc

SEQ ID NO: 3205844 - RNA, 19 nt, Artificial Sequence
  Description of Artificial Sequence: Synthetic oligonucleotide
ugaagaguaagagaugaga

SEQ ID NO: 3205845 - RNA, 19 nt, Artificial Sequence
  Description of Artificial Sequence: Synthetic oligonucleotide
cauaugaagaguaagagau

SEQ ID NO: 3205846 - RNA, 19 nt, Artificial Sequence
  Description of Artificial Sequence: Synthetic oligonucleotide
guguguagaugcaugaugg

SEQ ID NO: 3205847 - RNA, 19 nt, Artificial Sequence
  Description of Artificial Sequence: Synthetic oligonucleotide
uaaaagcuuugccacauuc

SEQ ID NO: 3205848 - RNA, 19 nt, Artificial Sequence
  Description of Artificial Sequence: Synthetic oligonucleotide
ucuggcuaaaagcuuugcc

SEQ ID NO: 3205849 - RNA, 19 nt, Artificial Sequence
  Description of Artificial Sequence: Synthetic oligonucleotide
uaauaaaguuuguucuggc

SEQ ID NO: 3205850 - RNA, 19 nt, Artificial Sequence
  Description of Artificial Sequence: Synthetic oligonucleotide
uaagggaugagcucuggga

SEQ ID NO: 3205851 - RNA, 19 nt, Artificial Sequence
  Description of Artificial Sequence: Synthetic oligonucleotide
ucaaugcaguuauaggggc

SEQ ID NO: 3205852 - RNA, 19 nt, Artificial Sequence
  Description of Artificial Sequence: Synthetic oligonucleotide
uauguaagguuuucuccag

SEQ ID NO: 3205853 - RNA, 19 nt, Artificial Sequence
  Description of Artificial Sequence: Synthetic oligonucleotide
cucauaugaagaguaagag

SEQ ID NO: 3205854 - RNA, 19 nt, Artificial Sequence
  Description of Artificial Sequence: Synthetic oligonucleotide
aauucucugaugccugaca

SEQ ID NO: 3205855 - RNA, 19 nt, Artificial Sequence
  Description of Artificial Sequence: Synthetic oligonucleotide
ucauuucacuggaaggcag

SEQ ID NO: 3205856 - RNA, 19 nt, Artificial Sequence
  Description of Artificial Sequence: Synthetic oligonucleotide
guucauuucacuggaaggc

SEQ ID NO: 3205857 - RNA, 19 nt, Artificial Sequence
  Description of Artificial Sequence: Synthetic oligonucleotide
gaugguguagagugcuacg

SEQ ID NO: 3205858 - RNA, 19 nt, Artificial Sequence
  Description of Artificial Sequence: Synthetic oligonucleotide
auaguaagggaugagcucu

SEQ ID NO: 3205859 - RNA, 19 nt, Artificial Sequence
  Description of Artificial Sequence: Synthetic oligonucleotide
agucgaaggguuucucggc

SEQ ID NO: 3205860 - RNA, 19 nt, Artificial Sequence
  Description of Artificial Sequence: Synthetic oligonucleotide
cauucauagggcugguggg

SEQ ID NO: 3205861 - RNA, 19 nt, Artificial Sequence
  Description of Artificial Sequence: Synthetic oligonucleotide
uauaguaagggaugagcuc

SEQ ID NO: 3205862 - RNA, 19 nt, Artificial Sequence
  Description of Artificial Sequence: Synthetic oligonucleotide
gugaguguggauucucugg

SEQ ID NO: 3205863 - RNA, 19 nt, Artificial Sequence
  Description of Artificial Sequence: Synthetic oligonucleotide
uggcuaaaagcuuugccac

SEQ ID NO: 3205864 - RNA, 19 nt, Artificial Sequence
  Description of Artificial Sequence: Synthetic oligonucleotide
gugacuuuuggcugaaagc

SEQ ID NO: 3205865 - RNA, 19 nt, Artificial Sequence
  Description of Artificial Sequence: Synthetic oligonucleotide
agccuugccacacucaaug

SEQ ID NO: 3205866 - RNA, 19 nt, Artificial Sequence
  Description of Artificial Sequence: Synthetic oligonucleotide
uccacauuugcugcagucg

SEQ ID NO: 3205867 - RNA, 19 nt, Artificial Sequence
  Description of Artificial Sequence: Synthetic oligonucleotide
gaugagcucugggagaagg

SEQ ID NO: 3205868 - RNA, 19 nt, Artificial Sequence
  Description of Artificial Sequence: Synthetic oligonucleotide
cacucaaugcaguuauagg

SEQ ID NO: 3205869 - RNA, 19 nt, Artificial Sequence
  Description of Artificial Sequence: Synthetic oligonucleotide
ucucugaugccugacaaga

SEQ ID NO: 3205870 - RNA, 19 nt, Artificial Sequence
  Description of Artificial Sequence: Synthetic oligonucleotide
guguucauuucacuggaag

SEQ ID NO: 3205871 - RNA, 19 nt, Artificial Sequence
  Description of Artificial Sequence: Synthetic oligonucleotide
agagaugagaucugagaga

SEQ ID NO: 3205872 - RNA, 19 nt, Artificial Sequence
  Description of Artificial Sequence: Synthetic oligonucleotide
gacaagauuugacaucuga

SEQ ID NO: 3205873 - RNA, 19 nt, Artificial Sequence
  Description of Artificial Sequence: Synthetic oligonucleotide
ucccacacucguuacagcc

SEQ ID NO: 3205874 - RNA, 19 nt, Artificial Sequence
  Description of Artificial Sequence: Synthetic oligonucleotide
gguaauaaaguuuguucug

SEQ ID NO: 3205875 - RNA, 19 nt, Artificial Sequence
  Description of Artificial Sequence: Synthetic oligonucleotide
acgaggugugacuuuuggc

SEQ ID NO: 3205876 - RNA, 19 nt, Artificial Sequence
  Description of Artificial Sequence: Synthetic oligonucleotide
uuuguucuggcugaaggcu

SEQ ID NO: 3205877 - RNA, 19 nt, Artificial Sequence
  Description of Artificial Sequence: Synthetic oligonucleotide
guuuguucuggcugaaggc

SEQ ID NO: 3205878 - RNA, 19 nt, Artificial Sequence
  Description of Artificial Sequence: Synthetic oligonucleotide
ugccugacaagauuugaca

SEQ ID NO: 3205879 - RNA, 19 nt, Artificial Sequence
  Description of Artificial Sequence: Synthetic oligonucleotide
gaugcaugaugguguagag

SEQ ID NO: 3205880 - RNA, 19 nt, Artificial Sequence
  Description of Artificial Sequence: Synthetic oligonucleotide
uccacacucauuacacuca

SEQ ID NO: 3205881 - RNA, 19 nt, Artificial Sequence
  Description of Artificial Sequence: Synthetic oligonucleotide
cuggcuaaaagcuuugcca

SEQ ID NO: 3205882 - RNA, 19 nt, Artificial Sequence
  Description of Artificial Sequence: Synthetic oligonucleotide
ugcuuccucauaugaagag

SEQ ID NO: 3205883 - RNA, 19 nt, Artificial Sequence
  Description of Artificial Sequence: Synthetic oligonucleotide
uguguauaguaagggauga

SEQ ID NO: 3205884 - RNA, 19 nt, Artificial Sequence
  Description of Artificial Sequence: Synthetic oligonucleotide
gaaggcaguccccacauuc

SEQ ID NO: 3205885 - RNA, 19 nt, Artificial Sequence
  Description of Artificial Sequence: Synthetic oligonucleotide
uccucauaugaagaguaag

SEQ ID NO: 3205886 - RNA, 19 nt, Artificial Sequence
  Description of Artificial Sequence: Synthetic oligonucleotide
gacuuucccacauuuauua

SEQ ID NO: 3205887 - RNA, 19 nt, Artificial Sequence
  Description of Artificial Sequence: Synthetic oligonucleotide
ucugggagaaggacuuucc

SEQ ID NO: 3205888 - RNA, 19 nt, Artificial Sequence
  Description of Artificial Sequence: Synthetic oligonucleotide
acacucaaugcaguuauag

SEQ ID NO: 3205889 - RNA, 19 nt, Artificial Sequence
  Description of Artificial Sequence: Synthetic oligonucleotide
uuccacacucauuacacuc

SEQ ID NO: 3205890 - RNA, 19 nt, Artificial Sequence
  Description of Artificial Sequence: Synthetic oligonucleotide
uuugcugcagucgaagggu

SEQ ID NO: 3205891 - RNA, 19 nt, Artificial Sequence
  Description of Artificial Sequence: Synthetic oligonucleotide
ugacaucugaaugaaggcu

SEQ ID NO: 3205892 - RNA, 19 nt, Artificial Sequence
  Description of Artificial Sequence: Synthetic oligonucleotide
aggacuuucccacauuuau

SEQ ID NO: 3205893 - RNA, 19 nt, Artificial Sequence
  Description of Artificial Sequence: Synthetic oligonucleotide
ugggagaaggacuuuccca

SEQ ID NO: 3205894 - RNA, 19 nt, Artificial Sequence
  Description of Artificial Sequence: Synthetic oligonucleotide
cagucgaaggguuucucgg

SEQ ID NO: 3205895 - RNA, 19 nt, Artificial Sequence
  Description of Artificial Sequence: Synthetic oligonucleotide
acagccauacgguucucuc

SEQ ID NO: 3205896 - RNA, 19 nt, Artificial Sequence
  Description of Artificial Sequence: Synthetic oligonucleotide
ucuccugugugcuuccuca

SEQ ID NO: 3205897 - RNA, 19 nt, Artificial Sequence
  Description of Artificial Sequence: Synthetic oligonucleotide
aaauaugcaggauaaagac

SEQ ID NO: 3205898 - RNA, 19 nt, Artificial Sequence
  Description of Artificial Sequence: Synthetic oligonucleotide
aagacagaauauuaaaagc

SEQ ID NO: 3205899 - RNA, 19 nt, Artificial Sequence
  Description of Artificial Sequence: Synthetic oligonucleotide
aaagacagaauauuaaaag

SEQ ID NO: 3205900 - RNA, 19 nt, Artificial Sequence
  Description of Artificial Sequence: Synthetic oligonucleotide
aaaauaacuuuucccaacc

SEQ ID NO: 3205901 - RNA, 19 nt, Artificial Sequence
  Description of Artificial Sequence: Synthetic oligonucleotide
aaauauauucagcaaaauc

SEQ ID NO: 3205902 - RNA, 19 nt, Artificial Sequence
  Description of Artificial Sequence: Synthetic oligonucleotide
uuuauuugggaauugaucc

SEQ ID NO: 3205903 - RNA, 19 nt, Artificial Sequence
  Description of Artificial Sequence: Synthetic oligonucleotide
aauauauucagcaaaauca

SEQ ID NO: 3205904 - RNA, 19 nt, Artificial Sequence
  Description of Artificial Sequence: Synthetic oligonucleotide
aaaagaaaaguccucucac

SEQ ID NO: 3205905 - RNA, 19 nt, Artificial Sequence
  Description of Artificial Sequence: Synthetic oligonucleotide
caaaauacaaaauaugcag

SEQ ID NO: 3205906 - RNA, 19 nt, Artificial Sequence
  Description of Artificial Sequence: Synthetic oligonucleotide
aauggaauggaccaaaaga

SEQ ID NO: 3205907 - RNA, 19 nt, Artificial Sequence
  Description of Artificial Sequence: Synthetic oligonucleotide
uuaaguaaccuauaaaggc

SEQ ID NO: 3205908 - RNA, 19 nt, Artificial Sequence
  Description of Artificial Sequence: Synthetic oligonucleotide
aucaaaauacaaaauaugc

SEQ ID NO: 3205909 - RNA, 19 nt, Artificial Sequence
  Description of Artificial Sequence: Synthetic oligonucleotide
aauauuaaaagcugcaaaa

SEQ ID NO: 3205910 - RNA, 19 nt, Artificial Sequence
  Description of Artificial Sequence: Synthetic oligonucleotide
aaagaaaaguccucucacc

SEQ ID NO: 3205911 - RNA, 19 nt, Artificial Sequence
  Description of Artificial Sequence: Synthetic oligonucleotide
cacauaacaaucaaaauac

SEQ ID NO: 3205912 - RNA, 19 nt, Artificial Sequence
  Description of Artificial Sequence: Synthetic oligonucleotide
aaauacaaaauaugcagga

SEQ ID NO: 3205913 - RNA, 19 nt, Artificial Sequence
  Description of Artificial Sequence: Synthetic oligonucleotide
ucaaaauacaaaauaugca

SEQ ID NO: 3205914 - RNA, 19 nt, Artificial Sequence
  Description of Artificial Sequence: Synthetic oligonucleotide
aaaauacaaaauaugcagg

SEQ ID NO: 3205915 - RNA, 19 nt, Artificial Sequence
  Description of Artificial Sequence: Synthetic oligonucleotide
gguuaaguaaccuauaaag

SEQ ID NO: 3205916 - RNA, 19 nt, Artificial Sequence
  Description of Artificial Sequence: Synthetic oligonucleotide
agagagaagaaacuuacag

SEQ ID NO: 3205917 - RNA, 19 nt, Artificial Sequence
  Description of Artificial Sequence: Synthetic oligonucleotide
acagaaaauauauucagca

SEQ ID NO: 3205918 - RNA, 19 nt, Artificial Sequence
  Description of Artificial Sequence: Synthetic oligonucleotide
auccacagaaaauauauuc

SEQ ID NO: 3205919 - RNA, 19 nt, Artificial Sequence
  Description of Artificial Sequence: Synthetic oligonucleotide
cuuacagaacaccaaaugg

SEQ ID NO: 3205920 - RNA, 19 nt, Artificial Sequence
  Description of Artificial Sequence: Synthetic oligonucleotide
agaagaaacuuacagaaca

SEQ ID NO: 3205921 - RNA, 19 nt, Artificial Sequence
  Description of Artificial Sequence: Synthetic oligonucleotide
uggaccaaaagaaaagucc

SEQ ID NO: 3205922 - RNA, 19 nt, Artificial Sequence
  Description of Artificial Sequence: Synthetic oligonucleotide
aaggauaugccuaagaaga

SEQ ID NO: 3205923 - RNA, 19 nt, Artificial Sequence
  Description of Artificial Sequence: Synthetic oligonucleotide
uaacaaucaaaauacaaaa

SEQ ID NO: 3205924 - RNA, 19 nt, Artificial Sequence
  Description of Artificial Sequence: Synthetic oligonucleotide
cuaagaagagagaagaaac

SEQ ID NO: 3205925 - RNA, 19 nt, Artificial Sequence
  Description of Artificial Sequence: Synthetic oligonucleotide
uaaguaaccuauaaaggca

SEQ ID NO: 3205926 - RNA, 19 nt, Artificial Sequence
  Description of Artificial Sequence: Synthetic oligonucleotide
aagaaacuuacagaacacc

SEQ ID NO: 3205927 - RNA, 19 nt, Artificial Sequence
  Description of Artificial Sequence: Synthetic oligonucleotide
agagaagaaacuuacagaa

SEQ ID NO: 3205928 - RNA, 19 nt, Artificial Sequence
  Description of Artificial Sequence: Synthetic oligonucleotide
uuacagaacaccaaaugga

SEQ ID NO: 3205929 - RNA, 19 nt, Artificial Sequence
  Description of Artificial Sequence: Synthetic oligonucleotide
aaucaaaauacaaaauaug

SEQ ID NO: 3205930 - RNA, 19 nt, Artificial Sequence
  Description of Artificial Sequence: Synthetic oligonucleotide
aauaacuuuucccaaccga

SEQ ID NO: 3205931 - RNA, 19 nt, Artificial Sequence
  Description of Artificial Sequence: Synthetic oligonucleotide
uuuuauuugggaauugauc

SEQ ID NO: 3205932 - RNA, 19 nt, Artificial Sequence
  Description of Artificial Sequence: Synthetic oligonucleotide
aaauaacuuuucccaaccg

SEQ ID NO: 3205933 - RNA, 19 nt, Artificial Sequence
  Description of Artificial Sequence: Synthetic oligonucleotide
ugggaauugauccacagaa

SEQ ID NO: 3205934 - RNA, 19 nt, Artificial Sequence
  Description of Artificial Sequence: Synthetic oligonucleotide
agaaaauauauucagcaaa

SEQ ID NO: 3205935 - RNA, 19 nt, Artificial Sequence
  Description of Artificial Sequence: Synthetic oligonucleotide
aagaaaaguccucucacca

SEQ ID NO: 3205936 - RNA, 19 nt, Artificial Sequence
  Description of Artificial Sequence: Synthetic oligonucleotide
guuaaguaaccuauaaagg

SEQ ID NO: 3205937 - RNA, 19 nt, Artificial Sequence
  Description of Artificial Sequence: Synthetic oligonucleotide
uacaaaauaugcaggauaa

SEQ ID NO: 3205938 - RNA, 19 nt, Artificial Sequence
  Description of Artificial Sequence: Synthetic oligonucleotide
acaaucaaaauacaaaaua

SEQ ID NO: 3205939 - RNA, 19 nt, Artificial Sequence
  Description of Artificial Sequence: Synthetic oligonucleotide
aaccgagagaaggauaugc

SEQ ID NO: 3205940 - RNA, 19 nt, Artificial Sequence
  Description of Artificial Sequence: Synthetic oligonucleotide
ugauccacagaaaauauau

SEQ ID NO: 3205941 - RNA, 19 nt, Artificial Sequence
  Description of Artificial Sequence: Synthetic oligonucleotide
aacuuuucccaaccgagag

SEQ ID NO: 3205942 - RNA, 19 nt, Artificial Sequence
  Description of Artificial Sequence: Synthetic oligonucleotide
gaaggauaugccuaagaag

SEQ ID NO: 3205943 - RNA, 19 nt, Artificial Sequence
  Description of Artificial Sequence: Synthetic oligonucleotide
uaaagacagaauauuaaaa

SEQ ID NO: 3205944 - RNA, 19 nt, Artificial Sequence
  Description of Artificial Sequence: Synthetic oligonucleotide
aaaauaugcaggauaaaga

SEQ ID NO: 3205945 - RNA, 19 nt, Artificial Sequence
  Description of Artificial Sequence: Synthetic oligonucleotide
auaugcaggauaaagacag

SEQ ID NO: 3205946 - RNA, 19 nt, Artificial Sequence
  Description of Artificial Sequence: Synthetic oligonucleotide
aaauggaauggaccaaaag

SEQ ID NO: 3205947 - RNA, 19 nt, Artificial Sequence
  Description of Artificial Sequence: Synthetic oligonucleotide
uccacagaaaauauauuca

SEQ ID NO: 3205948 - RNA, 19 nt, Artificial Sequence
  Description of Artificial Sequence: Synthetic oligonucleotide
caaaauaugcaggauaaag

SEQ ID NO: 3205949 - RNA, 19 nt, Artificial Sequence
  Description of Artificial Sequence: Synthetic oligonucleotide
uauuaaaagcugcaaaaua

SEQ ID NO: 3205950 - RNA, 19 nt, Artificial Sequence
  Description of Artificial Sequence: Synthetic oligonucleotide
acagaauauuaaaagcugc

SEQ ID NO: 3205951 - RNA, 19 nt, Artificial Sequence
  Description of Artificial Sequence: Synthetic oligonucleotide
aauugauccacagaaaaua

SEQ ID NO: 3205952 - RNA, 19 nt, Artificial Sequence
  Description of Artificial Sequence: Synthetic oligonucleotide
aaaagguuaaguaaccuau

SEQ ID NO: 3205953 - RNA, 19 nt, Artificial Sequence
  Description of Artificial Sequence: Synthetic oligonucleotide
uaagaagagagaagaaacu

SEQ ID NO: 3205954 - RNA, 19 nt, Artificial Sequence
  Description of Artificial Sequence: Synthetic oligonucleotide
uuaaaagcugcaaaauaaa

SEQ ID NO: 3205955 - RNA, 19 nt, Artificial Sequence
  Description of Artificial Sequence: Synthetic oligonucleotide
uuucccaaccgagagaagg

SEQ ID NO: 3205956 - RNA, 19 nt, Artificial Sequence
  Description of Artificial Sequence: Synthetic oligonucleotide
auaaagacagaauauuaaa

SEQ ID NO: 3205957 - RNA, 19 nt, Artificial Sequence
  Description of Artificial Sequence: Synthetic oligonucleotide
aaacuuacagaacaccaaa

SEQ ID NO: 3205958 - RNA, 19 nt, Artificial Sequence
  Description of Artificial Sequence: Synthetic oligonucleotide
gauaugccuaagaagagag

SEQ ID NO: 3205959 - RNA, 19 nt, Artificial Sequence
  Description of Artificial Sequence: Synthetic oligonucleotide
acuuacagaacaccaaaug

SEQ ID NO: 3205960 - RNA, 19 nt, Artificial Sequence
  Description of Artificial Sequence: Synthetic oligonucleotide
cagaacaccaaauggaaug

SEQ ID NO: 3205961 - RNA, 19 nt, Artificial Sequence
  Description of Artificial Sequence: Synthetic oligonucleotide
uaaaagcugcaaaauaaaa

SEQ ID NO: 3205962 - RNA, 19 nt, Artificial Sequence
  Description of Artificial Sequence: Synthetic oligonucleotide
gaauauuaaaagcugcaaa

SEQ ID NO: 3205963 - RNA, 19 nt, Artificial Sequence
  Description of Artificial Sequence: Synthetic oligonucleotide
agaaaaguccucucaccac

SEQ ID NO: 3205964 - RNA, 19 nt, Artificial Sequence
  Description of Artificial Sequence: Synthetic oligonucleotide
aacaccaaauggaauggac

SEQ ID NO: 3205965 - RNA, 19 nt, Artificial Sequence
  Description of Artificial Sequence: Synthetic oligonucleotide
auuaaaagcugcaaaauaa

SEQ ID NO: 3205966 - RNA, 19 nt, Artificial Sequence
  Description of Artificial Sequence: Synthetic oligonucleotide
aauggaccaaaagaaaagu

SEQ ID NO: 3205967 - RNA, 19 nt, Artificial Sequence
  Description of Artificial Sequence: Synthetic oligonucleotide
gacagaauauuaaaagcug

SEQ ID NO: 3205968 - RNA, 19 nt, Artificial Sequence
  Description of Artificial Sequence: Synthetic oligonucleotide
aagguuaaguaaccuauaa

SEQ ID NO: 3205969 - RNA, 19 nt, Artificial Sequence
  Description of Artificial Sequence: Synthetic oligonucleotide
gaauggaccaaaagaaaag

SEQ ID NO: 3205970 - RNA, 19 nt, Artificial Sequence
  Description of Artificial Sequence: Synthetic oligonucleotide
gaagagagaagaaacuuac

SEQ ID NO: 3205971 - RNA, 19 nt, Artificial Sequence
  Description of Artificial Sequence: Synthetic oligonucleotide
auaacaaucaaaauacaaa

SEQ ID NO: 3205972 - RNA, 19 nt, Artificial Sequence
  Description of Artificial Sequence: Synthetic oligonucleotide
uaugccuaagaagagagaa

SEQ ID NO: 3205973 - RNA, 19 nt, Artificial Sequence
  Description of Artificial Sequence: Synthetic oligonucleotide
agacagaauauuaaaagcu

SEQ ID NO: 3205974 - RNA, 19 nt, Artificial Sequence
  Description of Artificial Sequence: Synthetic oligonucleotide
uacagaacaccaaauggaa

SEQ ID NO: 3205975 - RNA, 19 nt, Artificial Sequence
  Description of Artificial Sequence: Synthetic oligonucleotide
cacagaaaauauauucagc

SEQ ID NO: 3205976 - RNA, 19 nt, Artificial Sequence
  Description of Artificial Sequence: Synthetic oligonucleotide
aaguaaccuauaaaggcag

SEQ ID NO: 3205977 - RNA, 19 nt, Artificial Sequence
  Description of Artificial Sequence: Synthetic oligonucleotide
acaccaaauggaauggacc

SEQ ID NO: 3205978 - RNA, 19 nt, Artificial Sequence
  Description of Artificial Sequence: Synthetic oligonucleotide
gagagaagaaacuuacaga

SEQ ID NO: 3205979 - RNA, 19 nt, Artificial Sequence
  Description of Artificial Sequence: Synthetic oligonucleotide
agaaggauaugccuaagaa

SEQ ID NO: 3205980 - RNA, 19 nt, Artificial Sequence
  Description of Artificial Sequence: Synthetic oligonucleotide
auacaaaauaugcaggaua

SEQ ID NO: 3205981 - RNA, 19 nt, Artificial Sequence
  Description of Artificial Sequence: Synthetic oligonucleotide
auaacuuuucccaaccgag

SEQ ID NO: 3205982 - RNA, 19 nt, Artificial Sequence
  Description of Artificial Sequence: Synthetic oligonucleotide
uuugggaauugauccacag

SEQ ID NO: 3205983 - RNA, 19 nt, Artificial Sequence
  Description of Artificial Sequence: Synthetic oligonucleotide
uuauuugggaauugaucca

SEQ ID NO: 3205984 - RNA, 19 nt, Artificial Sequence
  Description of Artificial Sequence: Synthetic oligonucleotide
ugccuaagaagagagaaga

SEQ ID NO: 3205985 - RNA, 19 nt, Artificial Sequence
  Description of Artificial Sequence: Synthetic oligonucleotide
gaaaauauauucagcaaaa

SEQ ID NO: 3205986 - RNA, 19 nt, Artificial Sequence
  Description of Artificial Sequence: Synthetic oligonucleotide
gauaaagacagaauauuaa

SEQ ID NO: 3205987 - RNA, 19 nt, Artificial Sequence
  Description of Artificial Sequence: Synthetic oligonucleotide
auauucagcaaaaucauaa

SEQ ID NO: 3205988 - RNA, 19 nt, Artificial Sequence
  Description of Artificial Sequence: Synthetic oligonucleotide
gaaaaguccucucaccaca

SEQ ID NO: 3205989 - RNA, 19 nt, Artificial Sequence
  Description of Artificial Sequence: Synthetic oligonucleotide
aauaugcaggauaaagaca

SEQ ID NO: 3205990 - RNA, 19 nt, Artificial Sequence
  Description of Artificial Sequence: Synthetic oligonucleotide
cauaacaaucaaaauacaa

SEQ ID NO: 3205991 - RNA, 19 nt, Artificial Sequence
  Description of Artificial Sequence: Synthetic oligonucleotide
auucagcaaaaucauaaaa

SEQ ID NO: 3205992 - RNA, 19 nt, Artificial Sequence
  Description of Artificial Sequence: Synthetic oligonucleotide
agaacaccaaauggaaugg

SEQ ID NO: 3205993 - RNA, 19 nt, Artificial Sequence
  Description of Artificial Sequence: Synthetic oligonucleotide
aauacaaaauaugcaggau

SEQ ID NO: 3205994 - RNA, 19 nt, Artificial Sequence
  Description of Artificial Sequence: Synthetic oligonucleotide
aagaagagagaagaaacuu

SEQ ID NO: 3205995 - RNA, 19 nt, Artificial Sequence
  Description of Artificial Sequence: Synthetic oligonucleotide
aaguccucucaccacauaa

SEQ ID NO: 3205996 - RNA, 19 nt, Artificial Sequence
  Description of Artificial Sequence: Synthetic oligonucleotide
aacaaucaaaauacaaaau

SEQ ID NO: 3205997 - RNA, 19 nt, Artificial Sequence
  Description of Artificial Sequence: Synthetic oligonucleotide
ggcauguuuaucuucagcc

SEQ ID NO: 3205998 - RNA, 19 nt, Artificial Sequence
  Description of Artificial Sequence: Synthetic oligonucleotide
gaugccuuccuucucuugc

SEQ ID NO: 3205999 - RNA, 19 nt, Artificial Sequence
  Description of Artificial Sequence: Synthetic oligonucleotide
uucaugaugccuuccuucu

SEQ ID NO: 3206000 - RNA, 19 nt, Artificial Sequence
  Description of Artificial Sequence: Synthetic oligonucleotide
ucugccaggcuguucauga

SEQ ID NO: 3206001 - RNA, 19 nt, Artificial Sequence
  Description of Artificial Sequence: Synthetic oligonucleotide
ucucccaguuuucuaaacu

SEQ ID NO: 3206002 - RNA, 19 nt, Artificial Sequence
  Description of Artificial Sequence: Synthetic oligonucleotide
cauguuuaucuucagccuc

SEQ ID NO: 3206003 - RNA, 19 nt, Artificial Sequence
  Description of Artificial Sequence: Synthetic oligonucleotide
uccagaaugucucccaguu

SEQ ID NO: 3206004 - RNA, 19 nt, Artificial Sequence
  Description of Artificial Sequence: Synthetic oligonucleotide
ucccaguuuucuaaacucu

SEQ ID NO: 3206005 - RNA, 19 nt, Artificial Sequence
  Description of Artificial Sequence: Synthetic oligonucleotide
uucagccucugccaggcug

SEQ ID NO: 3206006 - RNA, 19 nt, Artificial Sequence
  Description of Artificial Sequence: Synthetic oligonucleotide
cucccaguuuucuaaacuc

SEQ ID NO: 3206007 - RNA, 19 nt, Artificial Sequence
  Description of Artificial Sequence: Synthetic oligonucleotide
guucaugaugccuuccuuc

SEQ ID NO: 3206008 - RNA, 19 nt, Artificial Sequence
  Description of Artificial Sequence: Synthetic oligonucleotide
aaugucucccaguuuucua

SEQ ID NO: 3206009 - RNA, 19 nt, Artificial Sequence
  Description of Artificial Sequence: Synthetic oligonucleotide
aguccagaaugucucccag

SEQ ID NO: 3206010 - RNA, 19 nt, Artificial Sequence
  Description of Artificial Sequence: Synthetic oligonucleotide
ucuucagccucugccaggc

SEQ ID NO: 3206011 - RNA, 19 nt, Artificial Sequence
  Description of Artificial Sequence: Synthetic oligonucleotide
ugccaggcuguucaugaug

SEQ ID NO: 3206012 - RNA, 19 nt, Artificial Sequence
  Description of Artificial Sequence: Synthetic oligonucleotide
augucucccaguuuucuaa

SEQ ID NO: 3206013 - RNA, 19 nt, Artificial Sequence
  Description of Artificial Sequence: Synthetic oligonucleotide
ucagccucugccaggcugu

SEQ ID NO: 3206014 - RNA, 19 nt, Artificial Sequence
  Description of Artificial Sequence: Synthetic oligonucleotide
aucuucagccucugccagg

SEQ ID NO: 3206015 - RNA, 19 nt, Artificial Sequence
  Description of Artificial Sequence: Synthetic oligonucleotide
uguucaugaugccuuccuu

SEQ ID NO: 3206016 - RNA, 19 nt, Artificial Sequence
  Description of Artificial Sequence: Synthetic oligonucleotide
cugggcauguuuaucuuca

SEQ ID NO: 3206017 - RNA, 19 nt, Artificial Sequence
  Description of Artificial Sequence: Synthetic oligonucleotide
agaaugucucccaguuuuc

SEQ ID NO: 3206018 - RNA, 19 nt, Artificial Sequence
  Description of Artificial Sequence: Synthetic oligonucleotide
ugggcauguuuaucuucag

SEQ ID NO: 3206019 - RNA, 19 nt, Artificial Sequence
  Description of Artificial Sequence: Synthetic oligonucleotide
gaguccagaaugucuccca

SEQ ID NO: 3206020 - RNA, 19 nt, Artificial Sequence
  Description of Artificial Sequence: Synthetic oligonucleotide
ucaugaugccuuccuucuc

SEQ ID NO: 3206021 - RNA, 19 nt, Artificial Sequence
  Description of Artificial Sequence: Synthetic oligonucleotide
ugcucugcugggcauguuu

SEQ ID NO: 3206022 - RNA, 19 nt, Artificial Sequence
  Description of Artificial Sequence: Synthetic oligonucleotide
ugaugccuuccuucucuug

SEQ ID NO: 3206023 - RNA, 19 nt, Artificial Sequence
  Description of Artificial Sequence: Synthetic oligonucleotide
ugucucccaguuuucuaaa

SEQ ID NO: 3206024 - RNA, 19 nt, Artificial Sequence
  Description of Artificial Sequence: Synthetic oligonucleotide
augccuuccuucucuugca

SEQ ID NO: 3206025 - RNA, 19 nt, Artificial Sequence
  Description of Artificial Sequence: Synthetic oligonucleotide
ucugcugggcauguuuauc

SEQ ID NO: 3206026 - RNA, 19 nt, Artificial Sequence
  Description of Artificial Sequence: Synthetic oligonucleotide
cagaaugucucccaguuuu

SEQ ID NO: 3206027 - RNA, 19 nt, Artificial Sequence
  Description of Artificial Sequence: Synthetic oligonucleotide
cccaguuuucuaaacucug

SEQ ID NO: 3206028 - RNA, 19 nt, Artificial Sequence
  Description of Artificial Sequence: Synthetic oligonucleotide
caugaugccuuccuucucu

SEQ ID NO: 3206029 - RNA, 19 nt, Artificial Sequence
  Description of Artificial Sequence: Synthetic oligonucleotide
gggcauguuuaucuucagc

SEQ ID NO: 3206030 - RNA, 19 nt, Artificial Sequence
  Description of Artificial Sequence: Synthetic oligonucleotide
gucucccaguuuucuaaac

SEQ ID NO: 3206031 - RNA, 19 nt, Artificial Sequence
  Description of Artificial Sequence: Synthetic oligonucleotide
gccaggcuguucaugaugc

SEQ ID NO: 3206032 - RNA, 19 nt, Artificial Sequence
  Description of Artificial Sequence: Synthetic oligonucleotide
acuugcucugcugggcaug

SEQ ID NO: 3206033 - RNA, 19 nt, Artificial Sequence
  Description of Artificial Sequence: Synthetic oligonucleotide
ugccuuccuucucuugcau

SEQ ID NO: 3206034 - RNA, 19 nt, Artificial Sequence
  Description of Artificial Sequence: Synthetic oligonucleotide
ugcugggcauguuuaucuu

SEQ ID NO: 3206035 - RNA, 19 nt, Artificial Sequence
  Description of Artificial Sequence: Synthetic oligonucleotide
gaaugucucccaguuuucu

SEQ ID NO: 3206036 - RNA, 19 nt, Artificial Sequence
  Description of Artificial Sequence: Synthetic oligonucleotide
cugcugggcauguuuaucu

SEQ ID NO: 3206037 - RNA, 19 nt, Artificial Sequence
  Description of Artificial Sequence: Synthetic oligonucleotide
gccucugccaggcuguuca

SEQ ID NO: 3206038 - RNA, 19 nt, Artificial Sequence
  Description of Artificial Sequence: Synthetic oligonucleotide
aggcuguucaugaugccuu

SEQ ID NO: 3206039 - RNA, 19 nt, Artificial Sequence
  Description of Artificial Sequence: Synthetic oligonucleotide
augaugccuuccuucucuu

SEQ ID NO: 3206040 - RNA, 19 nt, Artificial Sequence
  Description of Artificial Sequence: Synthetic oligonucleotide
gcauguuuaucuucagccu

SEQ ID NO: 3206041 - RNA, 19 nt, Artificial Sequence
  Description of Artificial Sequence: Synthetic oligonucleotide
gcugggcauguuuaucuuc

SEQ ID NO: 3206042 - RNA, 19 nt, Artificial Sequence
  Description of Artificial Sequence: Synthetic oligonucleotide
cuguucaugaugccuuccu

SEQ ID NO: 3206043 - RNA, 19 nt, Artificial Sequence
  Description of Artificial Sequence: Synthetic oligonucleotide
cucugccaggcuguucaug

SEQ ID NO: 3206044 - RNA, 19 nt, Artificial Sequence
  Description of Artificial Sequence: Synthetic oligonucleotide
ggcuguucaugaugccuuc

SEQ ID NO: 3206045 - RNA, 19 nt, Artificial Sequence
  Description of Artificial Sequence: Synthetic oligonucleotide
gcuguucaugaugccuucc

SEQ ID NO: 3206046 - RNA, 19 nt, Artificial Sequence
  Description of Artificial Sequence: Synthetic oligonucleotide
guccagaaugucucccagu

SEQ ID NO: 3206047 - RNA, 19 nt, Artificial Sequence
  Description of Artificial Sequence: Synthetic oligonucleotide
caggcuguucaugaugccu

SEQ ID NO: 3206048 - RNA, 19 nt, Artificial Sequence
  Description of Artificial Sequence: Synthetic oligonucleotide
agccucugccaggcuguuc

SEQ ID NO: 3206049 - RNA, 19 nt, Artificial Sequence
  Description of Artificial Sequence: Synthetic oligonucleotide
ccaggcuguucaugaugcc

SEQ ID NO: 3206050 - RNA, 19 nt, Artificial Sequence
  Description of Artificial Sequence: Synthetic oligonucleotide
ccaguuuucuaaacucugu

SEQ ID NO: 3206051 - RNA, 19 nt, Artificial Sequence
  Description of Artificial Sequence: Synthetic oligonucleotide
cuugcucugcugggcaugu

SEQ ID NO: 3206052 - RNA, 19 nt, Artificial Sequence
  Description of Artificial Sequence: Synthetic oligonucleotide
cucugcugggcauguuuau

SEQ ID NO: 3206053 - RNA, 19 nt, Artificial Sequence
  Description of Artificial Sequence: Synthetic oligonucleotide
gcucugcugggcauguuua

SEQ ID NO: 3206054 - RNA, 19 nt, Artificial Sequence
  Description of Artificial Sequence: Synthetic oligonucleotide
uugcucugcugggcauguu

SEQ ID NO: 3206055 - RNA, 19 nt, Artificial Sequence
  Description of Artificial Sequence: Synthetic oligonucleotide
cugccaggcuguucaugau

SEQ ID NO: 3206056 - RNA, 19 nt, Artificial Sequence
  Description of Artificial Sequence: Synthetic oligonucleotide
cuucagccucugccaggcu

SEQ ID NO: 3206057 - RNA, 19 nt, Artificial Sequence
  Description of Artificial Sequence: Synthetic oligonucleotide
ccagaaugucucccaguuu

SEQ ID NO: 3206058 - RNA, 19 nt, Artificial Sequence
  Description of Artificial Sequence: Synthetic oligonucleotide
aguagcaccaggcuaggcc

SEQ ID NO: 3206059 - RNA, 19 nt, Artificial Sequence
  Description of Artificial Sequence: Synthetic oligonucleotide
agaaggguggaucccagcc

SEQ ID NO: 3206060 - RNA, 19 nt, Artificial Sequence
  Description of Artificial Sequence: Synthetic oligonucleotide
gaagcugaggagcauggcc

SEQ ID NO: 3206061 - RNA, 19 nt, Artificial Sequence
  Description of Artificial Sequence: Synthetic oligonucleotide
agccccagggagcagaggc

SEQ ID NO: 3206062 - RNA, 19 nt, Artificial Sequence
  Description of Artificial Sequence: Synthetic oligonucleotide
guugguagcugguaguagc

SEQ ID NO: 3206063 - RNA, 19 nt, Artificial Sequence
  Description of Artificial Sequence: Synthetic oligonucleotide
aaggcaucucgguuugcgg

SEQ ID NO: 3206064 - RNA, 19 nt, Artificial Sequence
  Description of Artificial Sequence: Synthetic oligonucleotide
acagaguguugguagcugg

SEQ ID NO: 3206065 - RNA, 19 nt, Artificial Sequence
  Description of Artificial Sequence: Synthetic oligonucleotide
ucgguuugcgggcugugcg

SEQ ID NO: 3206066 - RNA, 19 nt, Artificial Sequence
  Description of Artificial Sequence: Synthetic oligonucleotide
agcagaggcagcaggaagc

SEQ ID NO: 3206067 - RNA, 19 nt, Artificial Sequence
  Description of Artificial Sequence: Synthetic oligonucleotide
uggaucccagccuacagca

SEQ ID NO: 3206068 - RNA, 19 nt, Artificial Sequence
  Description of Artificial Sequence: Synthetic oligonucleotide
accaggcuaggccagcccc

SEQ ID NO: 3206069 - RNA, 19 nt, Artificial Sequence
  Description of Artificial Sequence: Synthetic oligonucleotide
gucacagaaggguggaucc

SEQ ID NO: 3206070 - RNA, 19 nt, Artificial Sequence
  Description of Artificial Sequence: Synthetic oligonucleotide
cagccuacagcacaguggc

SEQ ID NO: 3206071 - RNA, 19 nt, Artificial Sequence
  Description of Artificial Sequence: Synthetic oligonucleotide
aggcaucucgguuugcggg

SEQ ID NO: 3206072 - RNA, 19 nt, Artificial Sequence
  Description of Artificial Sequence: Synthetic oligonucleotide
gaguguugguagcugguag

SEQ ID NO: 3206073 - RNA, 19 nt, Artificial Sequence
  Description of Artificial Sequence: Synthetic oligonucleotide
agcauggccacugggaagg

SEQ ID NO: 3206074 - RNA, 19 nt, Artificial Sequence
  Description of Artificial Sequence: Synthetic oligonucleotide
gaaggcaucucgguuugcg

SEQ ID NO: 3206075 - RNA, 19 nt, Artificial Sequence
  Description of Artificial Sequence: Synthetic oligonucleotide
uccaugcuaccaccgaagc

SEQ ID NO: 3206076 - RNA, 19 nt, Artificial Sequence
  Description of Artificial Sequence: Synthetic oligonucleotide
uugguagcugguaguagca

SEQ ID NO: 3206077 - RNA, 19 nt, Artificial Sequence
  Description of Artificial Sequence: Synthetic oligonucleotide
ccuggcuugucacagaagg

SEQ ID NO: 3206078 - RNA, 19 nt, Artificial Sequence
  Description of Artificial Sequence: Synthetic oligonucleotide
gguaguagcaccaggcuag

SEQ ID NO: 3206079 - RNA, 19 nt, Artificial Sequence
  Description of Artificial Sequence: Synthetic oligonucleotide
aagcugaggagcauggcca

SEQ ID NO: 3206080 - RNA, 19 nt, Artificial Sequence
  Description of Artificial Sequence: Synthetic oligonucleotide
aguguugguagcugguagu

SEQ ID NO: 3206081 - RNA, 19 nt, Artificial Sequence
  Description of Artificial Sequence: Synthetic oligonucleotide
ugcggggccacuauccaug

SEQ ID NO: 3206082 - RNA, 19 nt, Artificial Sequence
  Description of Artificial Sequence: Synthetic oligonucleotide
uauccaugcuaccaccgaa

SEQ ID NO: 3206083 - RNA, 19 nt, Artificial Sequence
  Description of Artificial Sequence: Synthetic oligonucleotide
gaagccuggcuugucacag

SEQ ID NO: 3206084 - RNA, 19 nt, Artificial Sequence
  Description of Artificial Sequence: Synthetic oligonucleotide
uggcuugucacagaagggu

SEQ ID NO: 3206085 - RNA, 19 nt, Artificial Sequence
  Description of Artificial Sequence: Synthetic oligonucleotide
gaucccagccuacagcaca

SEQ ID NO: 3206086 - RNA, 19 nt, Artificial Sequence
  Description of Artificial Sequence: Synthetic oligonucleotide
gagcagaggcagcaggaag

SEQ ID NO: 3206087 - RNA, 19 nt, Artificial Sequence
  Description of Artificial Sequence: Synthetic oligonucleotide
ugguaguagcaccaggcua

SEQ ID NO: 3206088 - RNA, 19 nt, Artificial Sequence
  Description of Artificial Sequence: Synthetic oligonucleotide
agggagcagaggcagcagg

SEQ ID NO: 3206089 - RNA, 19 nt, Artificial Sequence
  Description of Artificial Sequence: Synthetic oligonucleotide
cuggcuugucacagaaggg

SEQ ID NO: 3206090 - RNA, 19 nt, Artificial Sequence
  Description of Artificial Sequence: Synthetic oligonucleotide
acuauccaugcuaccaccg

SEQ ID NO: 3206091 - RNA, 19 nt, Artificial Sequence
  Description of Artificial Sequence: Synthetic oligonucleotide
cacuauccaugcuaccacc

SEQ ID NO: 3206092 - RNA, 19 nt, Artificial Sequence
  Description of Artificial Sequence: Synthetic oligonucleotide
aaggguggaucccagccua

SEQ ID NO: 3206093 - RNA, 19 nt, Artificial Sequence
  Description of Artificial Sequence: Synthetic oligonucleotide
guagcaccaggcuaggcca

SEQ ID NO: 3206094 - RNA, 19 nt, Artificial Sequence
  Description of Artificial Sequence: Synthetic oligonucleotide
ugaggagcauggccacugg

SEQ ID NO: 3206095 - RNA, 19 nt, Artificial Sequence
  Description of Artificial Sequence: Synthetic oligonucleotide
agcugaggagcauggccac

SEQ ID NO: 3206096 - RNA, 19 nt, Artificial Sequence
  Description of Artificial Sequence: Synthetic oligonucleotide
uguugguagcugguaguag

SEQ ID NO: 3206097 - RNA, 19 nt, Artificial Sequence
  Description of Artificial Sequence: Synthetic oligonucleotide
ugggaaggcaucucgguuu

SEQ ID NO: 3206098 - RNA, 19 nt, Artificial Sequence
  Description of Artificial Sequence: Synthetic oligonucleotide
agcugguaguagcaccagg

SEQ ID NO: 3206099 - RNA, 19 nt, Artificial Sequence
  Description of Artificial Sequence: Synthetic oligonucleotide
agaggcagcaggaagcuga

SEQ ID NO: 3206100 - RNA, 19 nt, Artificial Sequence
  Description of Artificial Sequence: Synthetic oligonucleotide
ugucacagaaggguggauc

SEQ ID NO: 3206101 - RNA, 19 nt, Artificial Sequence
  Description of Artificial Sequence: Synthetic oligonucleotide
gaggagcauggccacuggg

SEQ ID NO: 3206102 - RNA, 19 nt, Artificial Sequence
  Description of Artificial Sequence: Synthetic oligonucleotide
gguagcugguaguagcacc

SEQ ID NO: 3206103 - RNA, 19 nt, Artificial Sequence
  Description of Artificial Sequence: Synthetic oligonucleotide
acugggaaggcaucucggu

SEQ ID NO: 3206104 - RNA, 19 nt, Artificial Sequence
  Description of Artificial Sequence: Synthetic oligonucleotide
accaccgaagccuggcuug

SEQ ID NO: 3206105 - RNA, 19 nt, Artificial Sequence
  Description of Artificial Sequence: Synthetic oligonucleotide
cacugggaaggcaucucgg

SEQ ID NO: 3206106 - RNA, 19 nt, Artificial Sequence
  Description of Artificial Sequence: Synthetic oligonucleotide
cugugcggggccacuaucc

SEQ ID NO: 3206107 - RNA, 19 nt, Artificial Sequence
  Description of Artificial Sequence: Synthetic oligonucleotide
uaggccagccccagggagc

SEQ ID NO: 3206108 - RNA, 19 nt, Artificial Sequence
  Description of Artificial Sequence: Synthetic oligonucleotide
guggaucccagccuacagc

SEQ ID NO: 3206109 - RNA, 19 nt, Artificial Sequence
  Description of Artificial Sequence: Synthetic oligonucleotide
gagcauggccacugggaag

SEQ ID NO: 3206110 - RNA, 19 nt, Artificial Sequence
  Description of Artificial Sequence: Synthetic oligonucleotide
ugugcggggccacuaucca

SEQ ID NO: 3206111 - RNA, 19 nt, Artificial Sequence
  Description of Artificial Sequence: Synthetic oligonucleotide
aggaagcugaggagcaugg

SEQ ID NO: 3206112 - RNA, 19 nt, Artificial Sequence
  Description of Artificial Sequence: Synthetic oligonucleotide
ggcagcaggaagcugagga

SEQ ID NO: 3206113 - RNA, 19 nt, Artificial Sequence
  Description of Artificial Sequence: Synthetic oligonucleotide
caugcuaccaccgaagccu

SEQ ID NO: 3206114 - RNA, 19 nt, Artificial Sequence
  Description of Artificial Sequence: Synthetic oligonucleotide
cuaggccagccccagggag

SEQ ID NO: 3206115 - RNA, 19 nt, Artificial Sequence
  Description of Artificial Sequence: Synthetic oligonucleotide
cagcaggaagcugaggagc

SEQ ID NO: 3206116 - RNA, 19 nt, Artificial Sequence
  Description of Artificial Sequence: Synthetic oligonucleotide
gacagaguguugguagcug

SEQ ID NO: 3206117 - RNA, 19 nt, Artificial Sequence
  Description of Artificial Sequence: Synthetic oligonucleotide
ccagccuacagcacagugg

SEQ ID NO: 3206118 - RNA, 19 nt, Artificial Sequence
  Description of Artificial Sequence: Synthetic oligonucleotide
ggcuaggccagccccaggg

SEQ ID NO: 3206119 - RNA, 19 nt, Artificial Sequence
  Description of Artificial Sequence: Synthetic oligonucleotide
auccaugcuaccaccgaag

SEQ ID NO: 3206120 - RNA, 19 nt, Artificial Sequence
  Description of Artificial Sequence: Synthetic oligonucleotide
guagcugguaguagcacca

SEQ ID NO: 3206121 - RNA, 19 nt, Artificial Sequence
  Description of Artificial Sequence: Synthetic oligonucleotide
gcugguaguagcaccaggc

SEQ ID NO: 3206122 - RNA, 19 nt, Artificial Sequence
  Description of Artificial Sequence: Synthetic oligonucleotide
accgaagccuggcuuguca

SEQ ID NO: 3206123 - RNA, 19 nt, Artificial Sequence
  Description of Artificial Sequence: Synthetic oligonucleotide
ucacagaaggguggauccc

SEQ ID NO: 3206124 - RNA, 19 nt, Artificial Sequence
  Description of Artificial Sequence: Synthetic oligonucleotide
gccuacagcacaguggcag

SEQ ID NO: 3206125 - RNA, 19 nt, Artificial Sequence
  Description of Artificial Sequence: Synthetic oligonucleotide
uagcaccaggcuaggccag

SEQ ID NO: 3206126 - RNA, 19 nt, Artificial Sequence
  Description of Artificial Sequence: Synthetic oligonucleotide
gcuugucacagaagggugg

SEQ ID NO: 3206127 - RNA, 19 nt, Artificial Sequence
  Description of Artificial Sequence: Synthetic oligonucleotide
ugcuaccaccgaagccugg

SEQ ID NO: 3206128 - RNA, 19 nt, Artificial Sequence
  Description of Artificial Sequence: Synthetic oligonucleotide
uuugcgggcugugcggggc

SEQ ID NO: 3206129 - RNA, 19 nt, Artificial Sequence
  Description of Artificial Sequence: Synthetic oligonucleotide
gguggaucccagccuacag

SEQ ID NO: 3206130 - RNA, 19 nt, Artificial Sequence
  Description of Artificial Sequence: Synthetic oligonucleotide
cugaggagcauggccacug

SEQ ID NO: 3206131 - RNA, 19 nt, Artificial Sequence
  Description of Artificial Sequence: Synthetic oligonucleotide
guaguagcaccaggcuagg

SEQ ID NO: 3206132 - RNA, 19 nt, Artificial Sequence
  Description of Artificial Sequence: Synthetic oligonucleotide
gcagcaggaagcugaggag

SEQ ID NO: 3206133 - RNA, 19 nt, Artificial Sequence
  Description of Artificial Sequence: Synthetic oligonucleotide
aggagcauggccacuggga

SEQ ID NO: 3206134 - RNA, 19 nt, Artificial Sequence
  Description of Artificial Sequence: Synthetic oligonucleotide
cagaaggguggaucccagc

SEQ ID NO: 3206135 - RNA, 19 nt, Artificial Sequence
  Description of Artificial Sequence: Synthetic oligonucleotide
aagccuggcuugucacaga

SEQ ID NO: 3206136 - RNA, 19 nt, Artificial Sequence
  Description of Artificial Sequence: Synthetic oligonucleotide
agccuggcuugucacagaa

SEQ ID NO: 3206137 - RNA, 19 nt, Artificial Sequence
  Description of Artificial Sequence: Synthetic oligonucleotide
cuauccaugcuaccaccga

SEQ ID NO: 3206138 - RNA, 19 nt, Artificial Sequence
  Description of Artificial Sequence: Synthetic oligonucleotide
uaccaccgaagccuggcuu

SEQ ID NO: 3206139 - RNA, 19 nt, Artificial Sequence
  Description of Artificial Sequence: Synthetic oligonucleotide
ggcaucucgguuugcgggc

SEQ ID NO: 3206140 - RNA, 19 nt, Artificial Sequence
  Description of Artificial Sequence: Synthetic oligonucleotide
agcaggaagcugaggagca

SEQ ID NO: 3206141 - RNA, 19 nt, Artificial Sequence
  Description of Artificial Sequence: Synthetic oligonucleotide
agcaccaggcuaggccagc

SEQ ID NO: 3206142 - RNA, 19 nt, Artificial Sequence
  Description of Artificial Sequence: Synthetic oligonucleotide
caggaagcugaggagcaug

SEQ ID NO: 3206143 - RNA, 19 nt, Artificial Sequence
  Description of Artificial Sequence: Synthetic oligonucleotide
gaggcagcaggaagcugag

SEQ ID NO: 3206144 - RNA, 19 nt, Artificial Sequence
  Description of Artificial Sequence: Synthetic oligonucleotide
gaaggguggaucccagccu

SEQ ID NO: 3206145 - RNA, 19 nt, Artificial Sequence
  Description of Artificial Sequence: Synthetic oligonucleotide
guuugcgggcugugcgggg

SEQ ID NO: 3206146 - RNA, 19 nt, Artificial Sequence
  Description of Artificial Sequence: Synthetic oligonucleotide
ugguagcugguaguagcac

SEQ ID NO: 3206147 - RNA, 19 nt, Artificial Sequence
  Description of Artificial Sequence: Synthetic oligonucleotide
cuugucacagaagggugga

SEQ ID NO: 3206148 - RNA, 19 nt, Artificial Sequence
  Description of Artificial Sequence: Synthetic oligonucleotide
acagaaggguggaucccag

SEQ ID NO: 3206149 - RNA, 19 nt, Artificial Sequence
  Description of Artificial Sequence: Synthetic oligonucleotide
uagcugguaguagcaccag

SEQ ID NO: 3206150 - RNA, 19 nt, Artificial Sequence
  Description of Artificial Sequence: Synthetic oligonucleotide
uacagcacaguggcaguua

SEQ ID NO: 3206151 - RNA, 19 nt, Artificial Sequence
  Description of Artificial Sequence: Synthetic oligonucleotide
auggccacugggaaggcau

SEQ ID NO: 3206152 - RNA, 19 nt, Artificial Sequence
  Description of Artificial Sequence: Synthetic oligonucleotide
aucccagccuacagcacag

SEQ ID NO: 3206153 - RNA, 19 nt, Artificial Sequence
  Description of Artificial Sequence: Synthetic oligonucleotide
ccacugggaaggcaucucg

SEQ ID NO: 3206154 - RNA, 19 nt, Artificial Sequence
  Description of Artificial Sequence: Synthetic oligonucleotide
gggaaggcaucucgguuug

SEQ ID NO: 3206155 - RNA, 19 nt, Artificial Sequence
  Description of Artificial Sequence: Synthetic oligonucleotide
gccacuauccaugcuacca

SEQ ID NO: 3206156 - RNA, 19 nt, Artificial Sequence
  Description of Artificial Sequence: Synthetic oligonucleotide
ggagcauggccacugggaa

SEQ ID NO: 3206157 - RNA, 19 nt, Artificial Sequence
  Description of Artificial Sequence: Synthetic oligonucleotide
gguuugcgggcugugcggg

SEQ ID NO: 3206158 - RNA, 19 nt, Artificial Sequence
  Description of Artificial Sequence: Synthetic oligonucleotide
aaaacaauauuugcuaucc

SEQ ID NO: 3206159 - RNA, 19 nt, Artificial Sequence
  Description of Artificial Sequence: Synthetic oligonucleotide
auucuuaucaucuucuccc

SEQ ID NO: 3206160 - RNA, 19 nt, Artificial Sequence
  Description of Artificial Sequence: Synthetic oligonucleotide
uucaaaauacucuagaucu

SEQ ID NO: 3206161 - RNA, 19 nt, Artificial Sequence
  Description of Artificial Sequence: Synthetic oligonucleotide
uuuaauuuguuuuagguua

SEQ ID NO: 3206162 - RNA, 19 nt, Artificial Sequence
  Description of Artificial Sequence: Synthetic oligonucleotide
uauaccuucuucaaaauac

SEQ ID NO: 3206163 - RNA, 19 nt, Artificial Sequence
  Description of Artificial Sequence: Synthetic oligonucleotide
acugguaacaaaauuaggc

SEQ ID NO: 3206164 - RNA, 19 nt, Artificial Sequence
  Description of Artificial Sequence: Synthetic oligonucleotide
aauucaaucaguccaccag

SEQ ID NO: 3206165 - RNA, 19 nt, Artificial Sequence
  Description of Artificial Sequence: Synthetic oligonucleotide
uuuguuuuagguuaauagc

SEQ ID NO: 3206166 - RNA, 19 nt, Artificial Sequence
  Description of Artificial Sequence: Synthetic oligonucleotide
uugcauacagaaaugaugc

SEQ ID NO: 3206167 - RNA, 19 nt, Artificial Sequence
  Description of Artificial Sequence: Synthetic oligonucleotide
aacaaaauuaggcccauug

SEQ ID NO: 3206168 - RNA, 19 nt, Artificial Sequence
  Description of Artificial Sequence: Synthetic oligonucleotide
gaugcuugggaucacauag

SEQ ID NO: 3206169 - RNA, 19 nt, Artificial Sequence
  Description of Artificial Sequence: Synthetic oligonucleotide
aacaccugggcccaagacc

SEQ ID NO: 3206170 - RNA, 19 nt, Artificial Sequence
  Description of Artificial Sequence: Synthetic oligonucleotide
aaacuuuauaccuucuuca

SEQ ID NO: 3206171 - RNA, 19 nt, Artificial Sequence
  Description of Artificial Sequence: Synthetic oligonucleotide
uagguuaauagccauagac

SEQ ID NO: 3206172 - RNA, 19 nt, Artificial Sequence
  Description of Artificial Sequence: Synthetic oligonucleotide
aaauacucuagaucuaucu

SEQ ID NO: 3206173 - RNA, 19 nt, Artificial Sequence
  Description of Artificial Sequence: Synthetic oligonucleotide
uuuucaauggggaaaacaa

SEQ ID NO: 3206174 - RNA, 19 nt, Artificial Sequence
  Description of Artificial Sequence: Synthetic oligonucleotide
aaggcaggucaucauaggc

SEQ ID NO: 3206175 - RNA, 19 nt, Artificial Sequence
  Description of Artificial Sequence: Synthetic oligonucleotide
agcacaauggggcauaggg

SEQ ID NO: 3206176 - RNA, 19 nt, Artificial Sequence
  Description of Artificial Sequence: Synthetic oligonucleotide
aaaugaugccaacaccugg

SEQ ID NO: 3206177 - RNA, 19 nt, Artificial Sequence
  Description of Artificial Sequence: Synthetic oligonucleotide
auauuugcuauccuuaucu

SEQ ID NO: 3206178 - RNA, 19 nt, Artificial Sequence
  Description of Artificial Sequence: Synthetic oligonucleotide
aaauuaggcccauugauaa

SEQ ID NO: 3206179 - RNA, 19 nt, Artificial Sequence
  Description of Artificial Sequence: Synthetic oligonucleotide
aauauuugcuauccuuauc

SEQ ID NO: 3206180 - RNA, 19 nt, Artificial Sequence
  Description of Artificial Sequence: Synthetic oligonucleotide
uuuagguuaauagccauag

SEQ ID NO: 3206181 - RNA, 19 nt, Artificial Sequence
  Description of Artificial Sequence: Synthetic oligonucleotide
cacgaaaagaaaauguccc

SEQ ID NO: 3206182 - RNA, 19 nt, Artificial Sequence
  Description of Artificial Sequence: Synthetic oligonucleotide
auacucuagaucuaucuuc

SEQ ID NO: 3206183 - RNA, 19 nt, Artificial Sequence
  Description of Artificial Sequence: Synthetic oligonucleotide
acaaauucuacguugcaug

SEQ ID NO: 3206184 - RNA, 19 nt, Artificial Sequence
  Description of Artificial Sequence: Synthetic oligonucleotide
aguacaguagcuuuaauuu

SEQ ID NO: 3206185 - RNA, 19 nt, Artificial Sequence
  Description of Artificial Sequence: Synthetic oligonucleotide
aauucuacguugcauggga

SEQ ID NO: 3206186 - RNA, 19 nt, Artificial Sequence
  Description of Artificial Sequence: Synthetic oligonucleotide
gaccaugauauacaugugg

SEQ ID NO: 3206187 - RNA, 19 nt, Artificial Sequence
  Description of Artificial Sequence: Synthetic oligonucleotide
cucaggagaaacuuuauac

SEQ ID NO: 3206188 - RNA, 19 nt, Artificial Sequence
  Description of Artificial Sequence: Synthetic oligonucleotide
ucaggagaaacuuuauacc

SEQ ID NO: 3206189 - RNA, 19 nt, Artificial Sequence
  Description of Artificial Sequence: Synthetic oligonucleotide
ugguaacaaaauuaggccc

SEQ ID NO: 3206190 - RNA, 19 nt, Artificial Sequence
  Description of Artificial Sequence: Synthetic oligonucleotide
augauauacauguggauca

SEQ ID NO: 3206191 - RNA, 19 nt, Artificial Sequence
  Description of Artificial Sequence: Synthetic oligonucleotide
aacaauauuugcuauccuu

SEQ ID NO: 3206192 - RNA, 19 nt, Artificial Sequence
  Description of Artificial Sequence: Synthetic oligonucleotide
ucuagaucuaucuucucca

SEQ ID NO: 3206193 - RNA, 19 nt, Artificial Sequence
  Description of Artificial Sequence: Synthetic oligonucleotide
gaugccaacaccugggccc

SEQ ID NO: 3206194 - RNA, 19 nt, Artificial Sequence
  Description of Artificial Sequence: Synthetic oligonucleotide
ucugcaguuuuccuaaggc

SEQ ID NO: 3206195 - RNA, 19 nt, Artificial Sequence
  Description of Artificial Sequence: Synthetic oligonucleotide
aaugaugccaacaccuggg

SEQ ID NO: 3206196 - RNA, 19 nt, Artificial Sequence
  Description of Artificial Sequence: Synthetic oligonucleotide
uugaugagcauguacuuug

SEQ ID NO: 3206197 - RNA, 19 nt, Artificial Sequence
  Description of Artificial Sequence: Synthetic oligonucleotide
ugagcauguacuuugcugu

SEQ ID NO: 3206198 - RNA, 19 nt, Artificial Sequence
  Description of Artificial Sequence: Synthetic oligonucleotide
cauugauaaguacaguagc

SEQ ID NO: 3206199 - RNA, 19 nt, Artificial Sequence
  Description of Artificial Sequence: Synthetic oligonucleotide
aucaucuucucccaccacg

SEQ ID NO: 3206200 - RNA, 19 nt, Artificial Sequence
  Description of Artificial Sequence: Synthetic oligonucleotide
aguagcuuuaauuuguuuu

SEQ ID NO: 3206201 - RNA, 19 nt, Artificial Sequence
  Description of Artificial Sequence: Synthetic oligonucleotide
aaguacaguagcuuuaauu

SEQ ID NO: 3206202 - RNA, 19 nt, Artificial Sequence
  Description of Artificial Sequence: Synthetic oligonucleotide
uucaauggggaaaacaaua

SEQ ID NO: 3206203 - RNA, 19 nt, Artificial Sequence
  Description of Artificial Sequence: Synthetic oligonucleotide
uguacuuugcuguuugaga

SEQ ID NO: 3206204 - RNA, 19 nt, Artificial Sequence
  Description of Artificial Sequence: Synthetic oligonucleotide
ggugguuacaaauucuacg

SEQ ID NO: 3206205 - RNA, 19 nt, Artificial Sequence
  Description of Artificial Sequence: Synthetic oligonucleotide
cauaggggauccuugaggc

SEQ ID NO: 3206206 - RNA, 19 nt, Artificial Sequence
  Description of Artificial Sequence: Synthetic oligonucleotide
aggguaagacagcagaguc

SEQ ID NO: 3206207 - RNA, 19 nt, Artificial Sequence
  Description of Artificial Sequence: Synthetic oligonucleotide
caaauucuacguugcaugg

SEQ ID NO: 3206208 - RNA, 19 nt, Artificial Sequence
  Description of Artificial Sequence: Synthetic oligonucleotide
uggaucacugguaacaaaa

SEQ ID NO: 3206209 - RNA, 19 nt, Artificial Sequence
  Description of Artificial Sequence: Synthetic oligonucleotide
cuucaaaauacucuagauc

SEQ ID NO: 3206210 - RNA, 19 nt, Artificial Sequence
  Description of Artificial Sequence: Synthetic oligonucleotide
cuuaucaucuucucccacc

SEQ ID NO: 3206211 - RNA, 19 nt, Artificial Sequence
  Description of Artificial Sequence: Synthetic oligonucleotide
acauaggggauccuugagg

SEQ ID NO: 3206212 - RNA, 19 nt, Artificial Sequence
  Description of Artificial Sequence: Synthetic oligonucleotide
gaaaacaauauuugcuauc

SEQ ID NO: 3206213 - RNA, 19 nt, Artificial Sequence
  Description of Artificial Sequence: Synthetic oligonucleotide
aauacucuagaucuaucuu

SEQ ID NO: 3206214 - RNA, 19 nt, Artificial Sequence
  Description of Artificial Sequence: Synthetic oligonucleotide
aauucuucuucccacuuuu

SEQ ID NO: 3206215 - RNA, 19 nt, Artificial Sequence
  Description of Artificial Sequence: Synthetic oligonucleotide
gaaaagaaaaugucccuga

SEQ ID NO: 3206216 - RNA, 19 nt, Artificial Sequence
  Description of Artificial Sequence: Synthetic oligonucleotide
agaaaugaugccaacaccu

SEQ ID NO: 3206217 - RNA, 19 nt, Artificial Sequence
  Description of Artificial Sequence: Synthetic oligonucleotide
uagacaguccaauuucugc

SEQ ID NO: 3206218 - RNA, 19 nt, Artificial Sequence
  Description of Artificial Sequence: Synthetic oligonucleotide
aaggcugcaaagccaugac

SEQ ID NO: 3206219 - RNA, 19 nt, Artificial Sequence
  Description of Artificial Sequence: Synthetic oligonucleotide
ucuacguugcaugggacgg

SEQ ID NO: 3206220 - RNA, 19 nt, Artificial Sequence
  Description of Artificial Sequence: Synthetic oligonucleotide
uucuacguugcaugggacg

SEQ ID NO: 3206221 - RNA, 19 nt, Artificial Sequence
  Description of Artificial Sequence: Synthetic oligonucleotide
ugcaguuuuccuaaggcau

SEQ ID NO: 3206222 - RNA, 19 nt, Artificial Sequence
  Description of Artificial Sequence: Synthetic oligonucleotide
aacuuuauaccuucuucaa

SEQ ID NO: 3206223 - RNA, 19 nt, Artificial Sequence
  Description of Artificial Sequence: Synthetic oligonucleotide
uuaucaucuucucccacca

SEQ ID NO: 3206224 - RNA, 19 nt, Artificial Sequence
  Description of Artificial Sequence: Synthetic oligonucleotide
ccaaacaagucaaugaccc

SEQ ID NO: 3206225 - RNA, 19 nt, Artificial Sequence
  Description of Artificial Sequence: Synthetic oligonucleotide
aauuaggcccauugauaag

SEQ ID NO: 3206226 - RNA, 19 nt, Artificial Sequence
  Description of Artificial Sequence: Synthetic oligonucleotide
uuuuaucuagcugugcugu

SEQ ID NO: 3206227 - RNA, 19 nt, Artificial Sequence
  Description of Artificial Sequence: Synthetic oligonucleotide
agcuuuaauuuguuuuagg

SEQ ID NO: 3206228 - RNA, 19 nt, Artificial Sequence
  Description of Artificial Sequence: Synthetic oligonucleotide
aauuucugcuccuuugcau

SEQ ID NO: 3206229 - RNA, 19 nt, Artificial Sequence
  Description of Artificial Sequence: Synthetic oligonucleotide
cucuagaucuaucuucucc

SEQ ID NO: 3206230 - RNA, 19 nt, Artificial Sequence
  Description of Artificial Sequence: Synthetic oligonucleotide
aaauucuacguugcauggg

SEQ ID NO: 3206231 - RNA, 19 nt, Artificial Sequence
  Description of Artificial Sequence: Synthetic oligonucleotide
ggcccaguaagccagagcg

SEQ ID NO: 3206232 - RNA, 19 nt, Artificial Sequence
  Description of Artificial Sequence: Synthetic oligonucleotide
ucaauggggaaaacaauau

SEQ ID NO: 3206233 - RNA, 19 nt, Artificial Sequence
  Description of Artificial Sequence: Synthetic oligonucleotide
cuuaggaugucucaggaga

SEQ ID NO: 3206234 - RNA, 19 nt, Artificial Sequence
  Description of Artificial Sequence: Synthetic oligonucleotide
ugugcuguggcuugaugag

SEQ ID NO: 3206235 - RNA, 19 nt, Artificial Sequence
  Description of Artificial Sequence: Synthetic oligonucleotide
agugcucccaaacaaguca

SEQ ID NO: 3206236 - RNA, 19 nt, Artificial Sequence
  Description of Artificial Sequence: Synthetic oligonucleotide
caugauauacauguggauc

SEQ ID NO: 3206237 - RNA, 19 nt, Artificial Sequence
  Description of Artificial Sequence: Synthetic oligonucleotide
augagcauguacuuugcug

SEQ ID NO: 3206238 - RNA, 19 nt, Artificial Sequence
  Description of Artificial Sequence: Synthetic oligonucleotide
acuuugcuguuugagauuc

SEQ ID NO: 3206239 - RNA, 19 nt, Artificial Sequence
  Description of Artificial Sequence: Synthetic oligonucleotide
acaaaauuaggcccauuga

SEQ ID NO: 3206240 - RNA, 19 nt, Artificial Sequence
  Description of Artificial Sequence: Synthetic oligonucleotide
ucaaugaccccugggaaag

SEQ ID NO: 3206241 - RNA, 19 nt, Artificial Sequence
  Description of Artificial Sequence: Synthetic oligonucleotide
gguuacaaauucuacguug

SEQ ID NO: 3206242 - RNA, 19 nt, Artificial Sequence
  Description of Artificial Sequence: Synthetic oligonucleotide
guuacaaauucuacguugc

SEQ ID NO: 3206243 - RNA, 19 nt, Artificial Sequence
  Description of Artificial Sequence: Synthetic oligonucleotide
aaaauacucuagaucuauc

SEQ ID NO: 3206244 - RNA, 19 nt, Artificial Sequence
  Description of Artificial Sequence: Synthetic oligonucleotide
aaucaggugaccugcccca

SEQ ID NO: 3206245 - RNA, 19 nt, Artificial Sequence
  Description of Artificial Sequence: Synthetic oligonucleotide
uccaauuucugcuccuuug

SEQ ID NO: 3206246 - RNA, 19 nt, Artificial Sequence
  Description of Artificial Sequence: Synthetic oligonucleotide
accacgaaaagaaaauguc

SEQ ID NO: 3206247 - RNA, 19 nt, Artificial Sequence
  Description of Artificial Sequence: Synthetic oligonucleotide
auucaaucaguccaccagu

SEQ ID NO: 3206248 - RNA, 19 nt, Artificial Sequence
  Description of Artificial Sequence: Synthetic oligonucleotide
agacaguccaauuucugcu

SEQ ID NO: 3206249 - RNA, 19 nt, Artificial Sequence
  Description of Artificial Sequence: Synthetic oligonucleotide
agauucuuaucaucuucuc

SEQ ID NO: 3206250 - RNA, 19 nt, Artificial Sequence
  Description of Artificial Sequence: Synthetic oligonucleotide
ugauaaguacaguagcuuu

SEQ ID NO: 3206251 - RNA, 19 nt, Artificial Sequence
  Description of Artificial Sequence: Synthetic oligonucleotide
uucaaucaguccaccagug

SEQ ID NO: 3206252 - RNA, 19 nt, Artificial Sequence
  Description of Artificial Sequence: Synthetic oligonucleotide
cuccagauaagaaggcagg

SEQ ID NO: 3206253 - RNA, 19 nt, Artificial Sequence
  Description of Artificial Sequence: Synthetic oligonucleotide
aggcagagcacaauggggc

SEQ ID NO: 3206254 - RNA, 19 nt, Artificial Sequence
  Description of Artificial Sequence: Synthetic oligonucleotide
aucuaucuucuccagauaa

SEQ ID NO: 3206255 - RNA, 19 nt, Artificial Sequence
  Description of Artificial Sequence: Synthetic oligonucleotide
aaucaguccaccagugcuc

SEQ ID NO: 3206256 - RNA, 19 nt, Artificial Sequence
  Description of Artificial Sequence: Synthetic oligonucleotide
aaacaauauuugcuauccu

SEQ ID NO: 3206257 - RNA, 19 nt, Artificial Sequence
  Description of Artificial Sequence: Synthetic oligonucleotide
caucauaggcccaguaagc

SEQ ID NO: 3206258 - RNA, 19 nt, Artificial Sequence
  Description of Artificial Sequence: Synthetic oligonucleotide
aaagaaagaaccuuuaguc

SEQ ID NO: 3206259 - RNA, 19 nt, Artificial Sequence
  Description of Artificial Sequence: Synthetic oligonucleotide
uuaaacaucaccaguaacc

SEQ ID NO: 3206260 - RNA, 19 nt, Artificial Sequence
  Description of Artificial Sequence: Synthetic oligonucleotide
uaacuuaugauuauaaaac

SEQ ID NO: 3206261 - RNA, 19 nt, Artificial Sequence
  Description of Artificial Sequence: Synthetic oligonucleotide
uauaaaacagcuucauucg

SEQ ID NO: 3206262 - RNA, 19 nt, Artificial Sequence
  Description of Artificial Sequence: Synthetic oligonucleotide
ugcauuuuaacauggaugc

SEQ ID NO: 3206263 - RNA, 19 nt, Artificial Sequence
  Description of Artificial Sequence: Synthetic oligonucleotide
uaaacaaccaacuucuagc

SEQ ID NO: 3206264 - RNA, 19 nt, Artificial Sequence
  Description of Artificial Sequence: Synthetic oligonucleotide
uucaaaaugaagaagcuuc

SEQ ID NO: 3206265 - RNA, 19 nt, Artificial Sequence
  Description of Artificial Sequence: Synthetic oligonucleotide
cuuaugauuauaaaacagc

SEQ ID NO: 3206266 - RNA, 19 nt, Artificial Sequence
  Description of Artificial Sequence: Synthetic oligonucleotide
aauaguuuuccucaugaca

SEQ ID NO: 3206267 - RNA, 19 nt, Artificial Sequence
  Description of Artificial Sequence: Synthetic oligonucleotide
uuuguuuuauuugagagca

SEQ ID NO: 3206268 - RNA, 19 nt, Artificial Sequence
  Description of Artificial Sequence: Synthetic oligonucleotide
uguuaucugaugcauacag

SEQ ID NO: 3206269 - RNA, 19 nt, Artificial Sequence
  Description of Artificial Sequence: Synthetic oligonucleotide
auuuauacagaucucaagu

SEQ ID NO: 3206270 - RNA, 19 nt, Artificial Sequence
  Description of Artificial Sequence: Synthetic oligonucleotide
uuaugauuauaaaacagcu

SEQ ID NO: 3206271 - RNA, 19 nt, Artificial Sequence
  Description of Artificial Sequence: Synthetic oligonucleotide
agaaagaaccuuuagucuc

SEQ ID NO: 3206272 - RNA, 19 nt, Artificial Sequence
  Description of Artificial Sequence: Synthetic oligonucleotide
cuuaacagcgguuugcugg

SEQ ID NO: 3206273 - RNA, 19 nt, Artificial Sequence
  Description of Artificial Sequence: Synthetic oligonucleotide
uaugcauauuuaaacauca

SEQ ID NO: 3206274 - RNA, 19 nt, Artificial Sequence
  Description of Artificial Sequence: Synthetic oligonucleotide
aaaugaagaagcuucaguu

SEQ ID NO: 3206275 - RNA, 19 nt, Artificial Sequence
  Description of Artificial Sequence: Synthetic oligonucleotide
ugcauauuuaaacaucacc

SEQ ID NO: 3206276 - RNA, 19 nt, Artificial Sequence
  Description of Artificial Sequence: Synthetic oligonucleotide
cuucuuagauuaaagaaag

SEQ ID NO: 3206277 - RNA, 19 nt, Artificial Sequence
  Description of Artificial Sequence: Synthetic oligonucleotide
uaaagaaagaaccuuuagu

SEQ ID NO: 3206278 - RNA, 19 nt, Artificial Sequence
  Description of Artificial Sequence: Synthetic oligonucleotide
uuaaacaaccaacuucuag

SEQ ID NO: 3206279 - RNA, 19 nt, Artificial Sequence
  Description of Artificial Sequence: Synthetic oligonucleotide
aaaaugaagaagcuucagu

SEQ ID NO: 3206280 - RNA, 19 nt, Artificial Sequence
  Description of Artificial Sequence: Synthetic oligonucleotide
aacuuaugauuauaaaaca

SEQ ID NO: 3206281 - RNA, 19 nt, Artificial Sequence
  Description of Artificial Sequence: Synthetic oligonucleotide
aaccaauacuuucaaaaug

SEQ ID NO: 3206282 - RNA, 19 nt, Artificial Sequence
  Description of Artificial Sequence: Synthetic oligonucleotide
uuuguuuucuucaccugcg

SEQ ID NO: 3206283 - RNA, 19 nt, Artificial Sequence
  Description of Artificial Sequence: Synthetic oligonucleotide
uugaaucuggacaucauca

SEQ ID NO: 3206284 - RNA, 19 nt, Artificial Sequence
  Description of Artificial Sequence: Synthetic oligonucleotide
aagaaagaaccuuuagucu

SEQ ID NO: 3206285 - RNA, 19 nt, Artificial Sequence
  Description of Artificial Sequence: Synthetic oligonucleotide
uuuuauuugagagcagagg

SEQ ID NO: 3206286 - RNA, 19 nt, Artificial Sequence
  Description of Artificial Sequence: Synthetic oligonucleotide
uuuucucaaaucaugcucu

SEQ ID NO: 3206287 - RNA, 19 nt, Artificial Sequence
  Description of Artificial Sequence: Synthetic oligonucleotide
aaauuucuccauuuguacu

SEQ ID NO: 3206288 - RNA, 19 nt, Artificial Sequence
  Description of Artificial Sequence: Synthetic oligonucleotide
uuuguuggaauuucccagg

SEQ ID NO: 3206289 - RNA, 19 nt, Artificial Sequence
  Description of Artificial Sequence: Synthetic oligonucleotide
uauuuauacagaucucaag

SEQ ID NO: 3206290 - RNA, 19 nt, Artificial Sequence
  Description of Artificial Sequence: Synthetic oligonucleotide
uuuagucucugcuacagga

SEQ ID NO: 3206291 - RNA, 19 nt, Artificial Sequence
  Description of Artificial Sequence: Synthetic oligonucleotide
cauauuuaaacaucaccag

SEQ ID NO: 3206292 - RNA, 19 nt, Artificial Sequence
  Description of Artificial Sequence: Synthetic oligonucleotide
uuaucugaugcauacagaa

SEQ ID NO: 3206293 - RNA, 19 nt, Artificial Sequence
  Description of Artificial Sequence: Synthetic oligonucleotide
guaguaugcauauuuaaac

SEQ ID NO: 3206294 - RNA, 19 nt, Artificial Sequence
  Description of Artificial Sequence: Synthetic oligonucleotide
auacugauuaauuuuaaaa

SEQ ID NO: 3206295 - RNA, 19 nt, Artificial Sequence
  Description of Artificial Sequence: Synthetic oligonucleotide
aguuauaccaugcuuuucu

SEQ ID NO: 3206296 - RNA, 19 nt, Artificial Sequence
  Description of Artificial Sequence: Synthetic oligonucleotide
cugucaaucauaccgagag

SEQ ID NO: 3206297 - RNA, 19 nt, Artificial Sequence
  Description of Artificial Sequence: Synthetic oligonucleotide
guauuaaacaaccaacuuc

SEQ ID NO: 3206298 - RNA, 19 nt, Artificial Sequence
  Description of Artificial Sequence: Synthetic oligonucleotide
uggguuuccacuuaacagc

SEQ ID NO: 3206299 - RNA, 19 nt, Artificial Sequence
  Description of Artificial Sequence: Synthetic oligonucleotide
aucaugcucuuauuuauac

SEQ ID NO: 3206300 - RNA, 19 nt, Artificial Sequence
  Description of Artificial Sequence: Synthetic oligonucleotide
acaaccaacuucuagcuca

SEQ ID NO: 3206301 - RNA, 19 nt, Artificial Sequence
  Description of Artificial Sequence: Synthetic oligonucleotide
cuggacaucaucacaaggc

SEQ ID NO: 3206302 - RNA, 19 nt, Artificial Sequence
  Description of Artificial Sequence: Synthetic oligonucleotide
guaaccaauacuuucaaaa

SEQ ID NO: 3206303 - RNA, 19 nt, Artificial Sequence
  Description of Artificial Sequence: Synthetic oligonucleotide
aucucgagaagucauuuuc

SEQ ID NO: 3206304 - RNA, 19 nt, Artificial Sequence
  Description of Artificial Sequence: Synthetic oligonucleotide
agcagagggcuauuuaacc

SEQ ID NO: 3206305 - RNA, 19 nt, Artificial Sequence
  Description of Artificial Sequence: Synthetic oligonucleotide
aucaguauuuguucgcuuc

SEQ ID NO: 3206306 - RNA, 19 nt, Artificial Sequence
  Description of Artificial Sequence: Synthetic oligonucleotide
cuuuguuggaauuucccag

SEQ ID NO: 3206307 - RNA, 19 nt, Artificial Sequence
  Description of Artificial Sequence: Synthetic oligonucleotide
uccauuuguacuguguggg

SEQ ID NO: 3206308 - RNA, 19 nt, Artificial Sequence
  Description of Artificial Sequence: Synthetic oligonucleotide
gaagugccgauucaggucc

SEQ ID NO: 3206309 - RNA, 19 nt, Artificial Sequence
  Description of Artificial Sequence: Synthetic oligonucleotide
ugacaucuaauguuaagca

SEQ ID NO: 3206310 - RNA, 19 nt, Artificial Sequence
  Description of Artificial Sequence: Synthetic oligonucleotide
aaguauuaaacaaccaacu

SEQ ID NO: 3206311 - RNA, 19 nt, Artificial Sequence
  Description of Artificial Sequence: Synthetic oligonucleotide
ucaccaguaaccaauacuu

SEQ ID NO: 3206312 - RNA, 19 nt, Artificial Sequence
  Description of Artificial Sequence: Synthetic oligonucleotide
auugacagcacauuuccca

SEQ ID NO: 3206313 - RNA, 19 nt, Artificial Sequence
  Description of Artificial Sequence: Synthetic oligonucleotide
cuaucucacacccaggaag

SEQ ID NO: 3206314 - RNA, 19 nt, Artificial Sequence
  Description of Artificial Sequence: Synthetic oligonucleotide
agguuuucuaucucacacc

SEQ ID NO: 3206315 - RNA, 19 nt, Artificial Sequence
  Description of Artificial Sequence: Synthetic oligonucleotide
uucaguuauaccaugcuuu

SEQ ID NO: 3206316 - RNA, 19 nt, Artificial Sequence
  Description of Artificial Sequence: Synthetic oligonucleotide
ucaaaaugaagaagcuuca

SEQ ID NO: 3206317 - RNA, 19 nt, Artificial Sequence
  Description of Artificial Sequence: Synthetic oligonucleotide
agauuugacuuucaccauc

SEQ ID NO: 3206318 - RNA, 19 nt, Artificial Sequence
  Description of Artificial Sequence: Synthetic oligonucleotide
ucuggacaucaucacaagg

SEQ ID NO: 3206319 - RNA, 19 nt, Artificial Sequence
  Description of Artificial Sequence: Synthetic oligonucleotide
aaaagcuccaaagugguau

SEQ ID NO: 3206320 - RNA, 19 nt, Artificial Sequence
  Description of Artificial Sequence: Synthetic oligonucleotide
uauggcuacuguaaggacu

SEQ ID NO: 3206321 - RNA, 19 nt, Artificial Sequence
  Description of Artificial Sequence: Synthetic oligonucleotide
ugaauguuccugaggaccc

SEQ ID NO: 3206322 - RNA, 19 nt, Artificial Sequence
  Description of Artificial Sequence: Synthetic oligonucleotide
uuuuauugacagcacauuu

SEQ ID NO: 3206323 - RNA, 19 nt, Artificial Sequence
  Description of Artificial Sequence: Synthetic oligonucleotide
uuaacagcgguuugcuggg

SEQ ID NO: 3206324 - RNA, 19 nt, Artificial Sequence
  Description of Artificial Sequence: Synthetic oligonucleotide
agaucucaaguucauacug

SEQ ID NO: 3206325 - RNA, 19 nt, Artificial Sequence
  Description of Artificial Sequence: Synthetic oligonucleotide
aaugaagaagcuucaguua

SEQ ID NO: 3206326 - RNA, 19 nt, Artificial Sequence
  Description of Artificial Sequence: Synthetic oligonucleotide
guuguuaucugaugcauac

SEQ ID NO: 3206327 - RNA, 19 nt, Artificial Sequence
  Description of Artificial Sequence: Synthetic oligonucleotide
uuuaaacaucaccaguaac

SEQ ID NO: 3206328 - RNA, 19 nt, Artificial Sequence
  Description of Artificial Sequence: Synthetic oligonucleotide
aguuuugcauuuuaacaug

SEQ ID NO: 3206329 - RNA, 19 nt, Artificial Sequence
  Description of Artificial Sequence: Synthetic oligonucleotide
aaagugguaugggagguuc

SEQ ID NO: 3206330 - RNA, 19 nt, Artificial Sequence
  Description of Artificial Sequence: Synthetic oligonucleotide
auacagaaguauuaaacaa

SEQ ID NO: 3206331 - RNA, 19 nt, Artificial Sequence
  Description of Artificial Sequence: Synthetic oligonucleotide
uuccugaggacccucaucu

SEQ ID NO: 3206332 - RNA, 19 nt, Artificial Sequence
  Description of Artificial Sequence: Synthetic oligonucleotide
cacaguuguuaucugaugc

SEQ ID NO: 3206333 - RNA, 19 nt, Artificial Sequence
  Description of Artificial Sequence: Synthetic oligonucleotide
uauaccaugcuuuucucaa

SEQ ID NO: 3206334 - RNA, 19 nt, Artificial Sequence
  Description of Artificial Sequence: Synthetic oligonucleotide
ucuccauuuguacugugug

SEQ ID NO: 3206335 - RNA, 19 nt, Artificial Sequence
  Description of Artificial Sequence: Synthetic oligonucleotide
ucuuccgcaggcauggaag

SEQ ID NO: 3206336 - RNA, 19 nt, Artificial Sequence
  Description of Artificial Sequence: Synthetic oligonucleotide
aguaugcauauuuaaacau

SEQ ID NO: 3206337 - RNA, 19 nt, Artificial Sequence
  Description of Artificial Sequence: Synthetic oligonucleotide
uucaccaucaguauuuguu

SEQ ID NO: 3206338 - RNA, 19 nt, Artificial Sequence
  Description of Artificial Sequence: Synthetic oligonucleotide
uguuguugaaucuggacau

SEQ ID NO: 3206339 - RNA, 19 nt, Artificial Sequence
  Description of Artificial Sequence: Synthetic oligonucleotide
cuuuucucaaaucaugcuc

SEQ ID NO: 3206340 - RNA, 19 nt, Artificial Sequence
  Description of Artificial Sequence: Synthetic oligonucleotide
aaguaguaugcauauuuaa

SEQ ID NO: 3206341 - RNA, 19 nt, Artificial Sequence
  Description of Artificial Sequence: Synthetic oligonucleotide
uaaacaucaccaguaacca

SEQ ID NO: 3206342 - RNA, 19 nt, Artificial Sequence
  Description of Artificial Sequence: Synthetic oligonucleotide
guauuuguguuguugaauc

SEQ ID NO: 3206343 - RNA, 19 nt, Artificial Sequence
  Description of Artificial Sequence: Synthetic oligonucleotide
uguuuuauuugagagcaga

SEQ ID NO: 3206344 - RNA, 19 nt, Artificial Sequence
  Description of Artificial Sequence: Synthetic oligonucleotide
uuggaauuucccaggagca

SEQ ID NO: 3206345 - RNA, 19 nt, Artificial Sequence
  Description of Artificial Sequence: Synthetic oligonucleotide
agaaccuuuagucucugcu

SEQ ID NO: 3206346 - RNA, 19 nt, Artificial Sequence
  Description of Artificial Sequence: Synthetic oligonucleotide
aaucauaccgagagguuuc

SEQ ID NO: 3206347 - RNA, 19 nt, Artificial Sequence
  Description of Artificial Sequence: Synthetic oligonucleotide
accaucaguauuuguucgc

SEQ ID NO: 3206348 - RNA, 19 nt, Artificial Sequence
  Description of Artificial Sequence: Synthetic oligonucleotide
ucuagcucaauaguuuucc

SEQ ID NO: 3206349 - RNA, 19 nt, Artificial Sequence
  Description of Artificial Sequence: Synthetic oligonucleotide
cuggguuuccacuuaacag

SEQ ID NO: 3206350 - RNA, 19 nt, Artificial Sequence
  Description of Artificial Sequence: Synthetic oligonucleotide
uuugcugggucucugcucu

SEQ ID NO: 3206351 - RNA, 19 nt, Artificial Sequence
  Description of Artificial Sequence: Synthetic oligonucleotide
uuugacuuucaccaucagu

SEQ ID NO: 3206352 - RNA, 19 nt, Artificial Sequence
  Description of Artificial Sequence: Synthetic oligonucleotide
uaucugaugcauacagaag

SEQ ID NO: 3206353 - RNA, 19 nt, Artificial Sequence
  Description of Artificial Sequence: Synthetic oligonucleotide
auucguaggcuacucacag

SEQ ID NO: 3206354 - RNA, 19 nt, Artificial Sequence
  Description of Artificial Sequence: Synthetic oligonucleotide
ucuggguuuccacuuaaca

SEQ ID NO: 3206355 - RNA, 19 nt, Artificial Sequence
  Description of Artificial Sequence: Synthetic oligonucleotide
aagucauuuucucuuuccu

SEQ ID NO: 3206356 - RNA, 19 nt, Artificial Sequence
  Description of Artificial Sequence: Synthetic oligonucleotide
ucuagcagguuuucuaucu

SEQ ID NO: 3206357 - RNA, 19 nt, Artificial Sequence
  Description of Artificial Sequence: Synthetic oligonucleotide
uuuguucgcuuccaggucu

SEQ ID NO: 3206358 - RNA, 19 nt, Artificial Sequence
  Description of Artificial Sequence: Synthetic oligonucleotide
aauucucagauuuauugag

SEQ ID NO: 3206359 - RNA, 19 nt, Artificial Sequence
  Description of Artificial Sequence: Synthetic oligonucleotide
aauaggcuucaauaggggc

SEQ ID NO: 3206360 - RNA, 19 nt, Artificial Sequence
  Description of Artificial Sequence: Synthetic oligonucleotide
uuaaagauuguucucuuug

SEQ ID NO: 3206361 - RNA, 19 nt, Artificial Sequence
  Description of Artificial Sequence: Synthetic oligonucleotide
agaauucucagauuuauug

SEQ ID NO: 3206362 - RNA, 19 nt, Artificial Sequence
  Description of Artificial Sequence: Synthetic oligonucleotide
uuuauugagggccaggcug

SEQ ID NO: 3206363 - RNA, 19 nt, Artificial Sequence
  Description of Artificial Sequence: Synthetic oligonucleotide
aaagaggacuucuuggauc

SEQ ID NO: 3206364 - RNA, 19 nt, Artificial Sequence
  Description of Artificial Sequence: Synthetic oligonucleotide
uucuuugucccauugaagc

SEQ ID NO: 3206365 - RNA, 19 nt, Artificial Sequence
  Description of Artificial Sequence: Synthetic oligonucleotide
aaagauuguucucuuuguc

SEQ ID NO: 3206366 - RNA, 19 nt, Artificial Sequence
  Description of Artificial Sequence: Synthetic oligonucleotide
uucucagauuuauugaggg

SEQ ID NO: 3206367 - RNA, 19 nt, Artificial Sequence
  Description of Artificial Sequence: Synthetic oligonucleotide
uccaauaggcuucaauagg

SEQ ID NO: 3206368 - RNA, 19 nt, Artificial Sequence
  Description of Artificial Sequence: Synthetic oligonucleotide
aacagguugauucuugaga

SEQ ID NO: 3206369 - RNA, 19 nt, Artificial Sequence
  Description of Artificial Sequence: Synthetic oligonucleotide
aucaaagaggacuucuugg

SEQ ID NO: 3206370 - RNA, 19 nt, Artificial Sequence
  Description of Artificial Sequence: Synthetic oligonucleotide
aauucuuugucccauugaa

SEQ ID NO: 3206371 - RNA, 19 nt, Artificial Sequence
  Description of Artificial Sequence: Synthetic oligonucleotide
uugccuuugagguagagcu

SEQ ID NO: 3206372 - RNA, 19 nt, Artificial Sequence
  Description of Artificial Sequence: Synthetic oligonucleotide
auggaguagacaaagcucc

SEQ ID NO: 3206373 - RNA, 19 nt, Artificial Sequence
  Description of Artificial Sequence: Synthetic oligonucleotide
aagauuguucucuuugucu

SEQ ID NO: 3206374 - RNA, 19 nt, Artificial Sequence
  Description of Artificial Sequence: Synthetic oligonucleotide
agauuguucucuuugucuc

SEQ ID NO: 3206375 - RNA, 19 nt, Artificial Sequence
  Description of Artificial Sequence: Synthetic oligonucleotide
acagguugauucuugagag

SEQ ID NO: 3206376 - RNA, 19 nt, Artificial Sequence
  Description of Artificial Sequence: Synthetic oligonucleotide
cuucagaaaguccugauug

SEQ ID NO: 3206377 - RNA, 19 nt, Artificial Sequence
  Description of Artificial Sequence: Synthetic oligonucleotide
uggucugcguuaaagauug

SEQ ID NO: 3206378 - RNA, 19 nt, Artificial Sequence
  Description of Artificial Sequence: Synthetic oligonucleotide
aaggggauggaguagacaa

SEQ ID NO: 3206379 - RNA, 19 nt, Artificial Sequence
  Description of Artificial Sequence: Synthetic oligonucleotide
uuauugagggccaggcugg

SEQ ID NO: 3206380 - RNA, 19 nt, Artificial Sequence
  Description of Artificial Sequence: Synthetic oligonucleotide
agguugauucuugagaggc

SEQ ID NO: 3206381 - RNA, 19 nt, Artificial Sequence
  Description of Artificial Sequence: Synthetic oligonucleotide
uucuugagaggccugugcg

SEQ ID NO: 3206382 - RNA, 19 nt, Artificial Sequence
  Description of Artificial Sequence: Synthetic oligonucleotide
cucagauuuauugagggcc

SEQ ID NO: 3206383 - RNA, 19 nt, Artificial Sequence
  Description of Artificial Sequence: Synthetic oligonucleotide
aauggucugcguuaaagau

SEQ ID NO: 3206384 - RNA, 19 nt, Artificial Sequence
  Description of Artificial Sequence: Synthetic oligonucleotide
aagaggacuucuuggauca

SEQ ID NO: 3206385 - RNA, 19 nt, Artificial Sequence
  Description of Artificial Sequence: Synthetic oligonucleotide
cuugcugucaccacauugc

SEQ ID NO: 3206386 - RNA, 19 nt, Artificial Sequence
  Description of Artificial Sequence: Synthetic oligonucleotide
aaauggucugcguuaaaga

SEQ ID NO: 3206387 - RNA, 19 nt, Artificial Sequence
  Description of Artificial Sequence: Synthetic oligonucleotide
ucuuggaucaauucuuugu

SEQ ID NO: 3206388 - RNA, 19 nt, Artificial Sequence
  Description of Artificial Sequence: Synthetic oligonucleotide
ugucagaauucucagauuu

SEQ ID NO: 3206389 - RNA, 19 nt, Artificial Sequence
  Description of Artificial Sequence: Synthetic oligonucleotide
aggaaggcgaccucuacac

SEQ ID NO: 3206390 - RNA, 19 nt, Artificial Sequence
  Description of Artificial Sequence: Synthetic oligonucleotide
uucagaaaguccugauugg

SEQ ID NO: 3206391 - RNA, 19 nt, Artificial Sequence
  Description of Artificial Sequence: Synthetic oligonucleotide
gucccauugaagcagaggc

SEQ ID NO: 3206392 - RNA, 19 nt, Artificial Sequence
  Description of Artificial Sequence: Synthetic oligonucleotide
auucuugagaggccugugc

SEQ ID NO: 3206393 - RNA, 19 nt, Artificial Sequence
  Description of Artificial Sequence: Synthetic oligonucleotide
ucaaagaggacuucuugga

SEQ ID NO: 3206394 - RNA, 19 nt, Artificial Sequence
  Description of Artificial Sequence: Synthetic oligonucleotide
ucugcguuaaagauuguuc

SEQ ID NO: 3206395 - RNA, 19 nt, Artificial Sequence
  Description of Artificial Sequence: Synthetic oligonucleotide
uuugucuccagccuucaga

SEQ ID NO: 3206396 - RNA, 19 nt, Artificial Sequence
  Description of Artificial Sequence: Synthetic oligonucleotide
uggaucaauucuuuguccc

SEQ ID NO: 3206397 - RNA, 19 nt, Artificial Sequence
  Description of Artificial Sequence: Synthetic oligonucleotide
aauaggggcgcucaccaca

SEQ ID NO: 3206398 - RNA, 19 nt, Artificial Sequence
  Description of Artificial Sequence: Synthetic oligonucleotide
agaaaguccugauugguga

SEQ ID NO: 3206399 - RNA, 19 nt, Artificial Sequence
  Description of Artificial Sequence: Synthetic oligonucleotide
aaacagguugauucuugag

SEQ ID NO: 3206400 - RNA, 19 nt, Artificial Sequence
  Description of Artificial Sequence: Synthetic oligonucleotide
gaaggcgaccucuacaccc

SEQ ID NO: 3206401 - RNA, 19 nt, Artificial Sequence
  Description of Artificial Sequence: Synthetic oligonucleotide
gaaauggucugcguuaaag

SEQ ID NO: 3206402 - RNA, 19 nt, Artificial Sequence
  Description of Artificial Sequence: Synthetic oligonucleotide
ucaauaggggcgcucacca

SEQ ID NO: 3206403 - RNA, 19 nt, Artificial Sequence
  Description of Artificial Sequence: Synthetic oligonucleotide
gaagcagaggcucuuugcc

SEQ ID NO: 3206404 - RNA, 19 nt, Artificial Sequence
  Description of Artificial Sequence: Synthetic oligonucleotide
caccacagcaucaaagagg

SEQ ID NO: 3206405 - RNA, 19 nt, Artificial Sequence
  Description of Artificial Sequence: Synthetic oligonucleotide
gaauucucagauuuauuga

SEQ ID NO: 3206406 - RNA, 19 nt, Artificial Sequence
  Description of Artificial Sequence: Synthetic oligonucleotide
aaaguccugauuggugagc

SEQ ID NO: 3206407 - RNA, 19 nt, Artificial Sequence
  Description of Artificial Sequence: Synthetic oligonucleotide
gaaucugcucagcagcccg

SEQ ID NO: 3206408 - RNA, 19 nt, Artificial Sequence
  Description of Artificial Sequence: Synthetic oligonucleotide
ugauuggugagcuguucgg

SEQ ID NO: 3206409 - RNA, 19 nt, Artificial Sequence
  Description of Artificial Sequence: Synthetic oligonucleotide
acuguuccugugcugaagg

SEQ ID NO: 3206410 - RNA, 19 nt, Artificial Sequence
  Description of Artificial Sequence: Synthetic oligonucleotide
gauuuauugagggccaggc

SEQ ID NO: 3206411 - RNA, 19 nt, Artificial Sequence
  Description of Artificial Sequence: Synthetic oligonucleotide
accacauugcuuuuguuga

SEQ ID NO: 3206412 - RNA, 19 nt, Artificial Sequence
  Description of Artificial Sequence: Synthetic oligonucleotide
ucaauucuuugucccauug

SEQ ID NO: 3206413 - RNA, 19 nt, Artificial Sequence
  Description of Artificial Sequence: Synthetic oligonucleotide
uaaagauuguucucuuugu

SEQ ID NO: 3206414 - RNA, 19 nt, Artificial Sequence
  Description of Artificial Sequence: Synthetic oligonucleotide
auaggcuucaauaggggcg

SEQ ID NO: 3206415 - RNA, 19 nt, Artificial Sequence
  Description of Artificial Sequence: Synthetic oligonucleotide
aguagacaaagcucccugg

SEQ ID NO: 3206416 - RNA, 19 nt, Artificial Sequence
  Description of Artificial Sequence: Synthetic oligonucleotide
gucuccagccuucagaaag

SEQ ID NO: 3206417 - RNA, 19 nt, Artificial Sequence
  Description of Artificial Sequence: Synthetic oligonucleotide
accucuacacccuugucag

SEQ ID NO: 3206418 - RNA, 19 nt, Artificial Sequence
  Description of Artificial Sequence: Synthetic oligonucleotide
ucagauuuauugagggcca

SEQ ID NO: 3206419 - RNA, 19 nt, Artificial Sequence
  Description of Artificial Sequence: Synthetic oligonucleotide
uugagggccaggcuggucc

SEQ ID NO: 3206420 - RNA, 19 nt, Artificial Sequence
  Description of Artificial Sequence: Synthetic oligonucleotide
guccaauaggcuucaauag

SEQ ID NO: 3206421 - RNA, 19 nt, Artificial Sequence
  Description of Artificial Sequence: Synthetic oligonucleotide
ucaccacagcaucaaagag

SEQ ID NO: 3206422 - RNA, 19 nt, Artificial Sequence
  Description of Artificial Sequence: Synthetic oligonucleotide
guaccagagagggaaaugg

SEQ ID NO: 3206423 - RNA, 19 nt, Artificial Sequence
  Description of Artificial Sequence: Synthetic oligonucleotide
cuuggaucaauucuuuguc

SEQ ID NO: 3206424 - RNA, 19 nt, Artificial Sequence
  Description of Artificial Sequence: Synthetic oligonucleotide
uuggaucaauucuuugucc

SEQ ID NO: 3206425 - RNA, 19 nt, Artificial Sequence
  Description of Artificial Sequence: Synthetic oligonucleotide
aaagcucccuggaaucugc

SEQ ID NO: 3206426 - RNA, 19 nt, Artificial Sequence
  Description of Artificial Sequence: Synthetic oligonucleotide
ucggcucccacaaacaggu

SEQ ID NO: 3206427 - RNA, 19 nt, Artificial Sequence
  Description of Artificial Sequence: Synthetic oligonucleotide
cuggaaucugcucagcagc

SEQ ID NO: 3206428 - RNA, 19 nt, Artificial Sequence
  Description of Artificial Sequence: Synthetic oligonucleotide
ugcuuuuguugacuguucc

SEQ ID NO: 3206429 - RNA, 19 nt, Artificial Sequence
  Description of Artificial Sequence: Synthetic oligonucleotide
uucggcucccacaaacagg

SEQ ID NO: 3206430 - RNA, 19 nt, Artificial Sequence
  Description of Artificial Sequence: Synthetic oligonucleotide
ucuugagaggccugugcgg

SEQ ID NO: 3206431 - RNA, 19 nt, Artificial Sequence
  Description of Artificial Sequence: Synthetic oligonucleotide
uguuccugugcugaagggg

SEQ ID NO: 3206432 - RNA, 19 nt, Artificial Sequence
  Description of Artificial Sequence: Synthetic oligonucleotide
caauaggcuucaauagggg

SEQ ID NO: 3206433 - RNA, 19 nt, Artificial Sequence
  Description of Artificial Sequence: Synthetic oligonucleotide
ucuuugucccauugaagca

SEQ ID NO: 3206434 - RNA, 19 nt, Artificial Sequence
  Description of Artificial Sequence: Synthetic oligonucleotide
uuuguugacuguuccugug

SEQ ID NO: 3206435 - RNA, 19 nt, Artificial Sequence
  Description of Artificial Sequence: Synthetic oligonucleotide
ugaagcagaggcucuuugc

SEQ ID NO: 3206436 - RNA, 19 nt, Artificial Sequence
  Description of Artificial Sequence: Synthetic oligonucleotide
gauuguucucuuugucucc

SEQ ID NO: 3206437 - RNA, 19 nt, Artificial Sequence
  Description of Artificial Sequence: Synthetic oligonucleotide
guucucuuugucuccagcc

SEQ ID NO: 3206438 - RNA, 19 nt, Artificial Sequence
  Description of Artificial Sequence: Synthetic oligonucleotide
gauggaguagacaaagcuc

SEQ ID NO: 3206439 - RNA, 19 nt, Artificial Sequence
  Description of Artificial Sequence: Synthetic oligonucleotide
uuguugacuguuccugugc

SEQ ID NO: 3206440 - RNA, 19 nt, Artificial Sequence
  Description of Artificial Sequence: Synthetic oligonucleotide
cuuuuguugacuguuccug

SEQ ID NO: 3206441 - RNA, 19 nt, Artificial Sequence
  Description of Artificial Sequence: Synthetic oligonucleotide
cugauuggugagcuguucg

SEQ ID NO: 3206442 - RNA, 19 nt, Artificial Sequence
  Description of Artificial Sequence: Synthetic oligonucleotide
caccacauugcuuuuguug

SEQ ID NO: 3206443 - RNA, 19 nt, Artificial Sequence
  Description of Artificial Sequence: Synthetic oligonucleotide
gaaaguccugauuggugag

SEQ ID NO: 3206444 - RNA, 19 nt, Artificial Sequence
  Description of Artificial Sequence: Synthetic oligonucleotide
gaguagacaaagcucccug

SEQ ID NO: 3206445 - RNA, 19 nt, Artificial Sequence
  Description of Artificial Sequence: Synthetic oligonucleotide
ccaauaggcuucaauaggg

SEQ ID NO: 3206446 - RNA, 19 nt, Artificial Sequence
  Description of Artificial Sequence: Synthetic oligonucleotide
acuugcugucaccacauug

SEQ ID NO: 3206447 - RNA, 19 nt, Artificial Sequence
  Description of Artificial Sequence: Synthetic oligonucleotide
aggcucuuugccuuugagg

SEQ ID NO: 3206448 - RNA, 19 nt, Artificial Sequence
  Description of Artificial Sequence: Synthetic oligonucleotide
ucucagauuuauugagggc

SEQ ID NO: 3206449 - RNA, 19 nt, Artificial Sequence
  Description of Artificial Sequence: Synthetic oligonucleotide
uuuuguugacuguuccugu

SEQ ID NO: 3206450 - RNA, 19 nt, Artificial Sequence
  Description of Artificial Sequence: Synthetic oligonucleotide
uucucuuugucuccagccu

SEQ ID NO: 3206451 - RNA, 19 nt, Artificial Sequence
  Description of Artificial Sequence: Synthetic oligonucleotide
ucagaauucucagauuuau

SEQ ID NO: 3206452 - RNA, 19 nt, Artificial Sequence
  Description of Artificial Sequence: Synthetic oligonucleotide
uggaaucugcucagcagcc

SEQ ID NO: 3206453 - RNA, 19 nt, Artificial Sequence
  Description of Artificial Sequence: Synthetic oligonucleotide
auucucagauuuauugagg

SEQ ID NO: 3206454 - RNA, 19 nt, Artificial Sequence
  Description of Artificial Sequence: Synthetic oligonucleotide
uguugacuguuccugugcu

SEQ ID NO: 3206455 - RNA, 19 nt, Artificial Sequence
  Description of Artificial Sequence: Synthetic oligonucleotide
cccacaaacagguugauuc

SEQ ID NO: 3206456 - RNA, 19 nt, Artificial Sequence
  Description of Artificial Sequence: Synthetic oligonucleotide
uggauggagguacuugcug

SEQ ID NO: 3206457 - RNA, 19 nt, Artificial Sequence
  Description of Artificial Sequence: Synthetic oligonucleotide
uguucucuuugucuccagc

SEQ ID NO: 3206458 - RNA, 19 nt, Artificial Sequence
  Description of Artificial Sequence: Synthetic oligonucleotide
aauuacucaaauuauauac

SEQ ID NO: 3206459 - RNA, 19 nt, Artificial Sequence
  Description of Artificial Sequence: Synthetic oligonucleotide
uacuaaaugaagcagaucc

SEQ ID NO: 3206460 - RNA, 19 nt, Artificial Sequence
  Description of Artificial Sequence: Synthetic oligonucleotide
aaaagucagacaugcaugc

SEQ ID NO: 3206461 - RNA, 19 nt, Artificial Sequence
  Description of Artificial Sequence: Synthetic oligonucleotide
uucuaaauggaaaagggcc

SEQ ID NO: 3206462 - RNA, 19 nt, Artificial Sequence
  Description of Artificial Sequence: Synthetic oligonucleotide
cuugguaaugcaaagauag

SEQ ID NO: 3206463 - RNA, 19 nt, Artificial Sequence
  Description of Artificial Sequence: Synthetic oligonucleotide
uguguaagguagcagaugg

SEQ ID NO: 3206464 - RNA, 19 nt, Artificial Sequence
  Description of Artificial Sequence: Synthetic oligonucleotide
ugagcuucaguccaaaagg

SEQ ID NO: 3206465 - RNA, 19 nt, Artificial Sequence
  Description of Artificial Sequence: Synthetic oligonucleotide
uaugcauauauuuuaaugu

SEQ ID NO: 3206466 - RNA, 19 nt, Artificial Sequence
  Description of Artificial Sequence: Synthetic oligonucleotide
guguaauaaaacuuaacgg

SEQ ID NO: 3206467 - RNA, 19 nt, Artificial Sequence
  Description of Artificial Sequence: Synthetic oligonucleotide
uaagguagcagauggaucc

SEQ ID NO: 3206468 - RNA, 19 nt, Artificial Sequence
  Description of Artificial Sequence: Synthetic oligonucleotide
uugaagaaaucuaagccag

SEQ ID NO: 3206469 - RNA, 19 nt, Artificial Sequence
  Description of Artificial Sequence: Synthetic oligonucleotide
uucaguagaacccauggug

SEQ ID NO: 3206470 - RNA, 19 nt, Artificial Sequence
  Description of Artificial Sequence: Synthetic oligonucleotide
uguuugauuuguuaacagg

SEQ ID NO: 3206471 - RNA, 19 nt, Artificial Sequence
  Description of Artificial Sequence: Synthetic oligonucleotide
augaauuagagucagcuga

SEQ ID NO: 3206472 - RNA, 19 nt, Artificial Sequence
  Description of Artificial Sequence: Synthetic oligonucleotide
ucuacuucuauucccacug

SEQ ID NO: 3206473 - RNA, 19 nt, Artificial Sequence
  Description of Artificial Sequence: Synthetic oligonucleotide
aauuuaagaacaauaggcu

SEQ ID NO: 3206474 - RNA, 19 nt, Artificial Sequence
  Description of Artificial Sequence: Synthetic oligonucleotide
ucgacuucugccaaguggg

SEQ ID NO: 3206475 - RNA, 19 nt, Artificial Sequence
  Description of Artificial Sequence: Synthetic oligonucleotide
auacauaucagauucugca

SEQ ID NO: 3206476 - RNA, 19 nt, Artificial Sequence
  Description of Artificial Sequence: Synthetic oligonucleotide
uuuaugagaacggacagca

SEQ ID NO: 3206477 - RNA, 19 nt, Artificial Sequence
  Description of Artificial Sequence: Synthetic oligonucleotide
aggggugaaacacauauag

SEQ ID NO: 3206478 - RNA, 19 nt, Artificial Sequence
  Description of Artificial Sequence: Synthetic oligonucleotide
auaggaguuugauuaacac

SEQ ID NO: 3206479 - RNA, 19 nt, Artificial Sequence
  Description of Artificial Sequence: Synthetic oligonucleotide
uuugguaccauguaagaaa

SEQ ID NO: 3206480 - RNA, 19 nt, Artificial Sequence
  Description of Artificial Sequence: Synthetic oligonucleotide
auaaggauauauggcaucc

SEQ ID NO: 3206481 - RNA, 19 nt, Artificial Sequence
  Description of Artificial Sequence: Synthetic oligonucleotide
ugaacggaaauuuggacca

SEQ ID NO: 3206482 - RNA, 19 nt, Artificial Sequence
  Description of Artificial Sequence: Synthetic oligonucleotide
ucagccauugacauacuag

SEQ ID NO: 3206483 - RNA, 19 nt, Artificial Sequence
  Description of Artificial Sequence: Synthetic oligonucleotide
aaaguuauggccaguaaca

SEQ ID NO: 3206484 - RNA, 19 nt, Artificial Sequence
  Description of Artificial Sequence: Synthetic oligonucleotide
uguuacaauggccacaaaa

SEQ ID NO: 3206485 - RNA, 19 nt, Artificial Sequence
  Description of Artificial Sequence: Synthetic oligonucleotide
uguuucugaagacuuuucc

SEQ ID NO: 3206486 - RNA, 19 nt, Artificial Sequence
  Description of Artificial Sequence: Synthetic oligonucleotide
aacaauauauguagaauga

SEQ ID NO: 3206487 - RNA, 19 nt, Artificial Sequence
  Description of Artificial Sequence: Synthetic oligonucleotide
ugugauugaaucagaguca

SEQ ID NO: 3206488 - RNA, 19 nt, Artificial Sequence
  Description of Artificial Sequence: Synthetic oligonucleotide
uacgaaguaaguuuaguuc

SEQ ID NO: 3206489 - RNA, 19 nt, Artificial Sequence
  Description of Artificial Sequence: Synthetic oligonucleotide
uacucuucaaauauuuuaa

SEQ ID NO: 3206490 - RNA, 19 nt, Artificial Sequence
  Description of Artificial Sequence: Synthetic oligonucleotide
acuagagccaucuucccag

SEQ ID NO: 3206491 - RNA, 19 nt, Artificial Sequence
  Description of Artificial Sequence: Synthetic oligonucleotide
aaugguagaacuagaauaa

SEQ ID NO: 3206492 - RNA, 19 nt, Artificial Sequence
  Description of Artificial Sequence: Synthetic oligonucleotide
aagagucugacacacuccu

SEQ ID NO: 3206493 - RNA, 19 nt, Artificial Sequence
  Description of Artificial Sequence: Synthetic oligonucleotide
ucaguagaacccaugguga

SEQ ID NO: 3206494 - RNA, 19 nt, Artificial Sequence
  Description of Artificial Sequence: Synthetic oligonucleotide
uauauuccugacaugguaa

SEQ ID NO: 3206495 - RNA, 19 nt, Artificial Sequence
  Description of Artificial Sequence: Synthetic oligonucleotide
aguuggcugacccagcuuc

SEQ ID NO: 3206496 - RNA, 19 nt, Artificial Sequence
  Description of Artificial Sequence: Synthetic oligonucleotide
gguuacuuccuacagaaag

SEQ ID NO: 3206497 - RNA, 19 nt, Artificial Sequence
  Description of Artificial Sequence: Synthetic oligonucleotide
aagaaaucuuucugaacca

SEQ ID NO: 3206498 - RNA, 19 nt, Artificial Sequence
  Description of Artificial Sequence: Synthetic oligonucleotide
acaugaauugauuuaaauu

SEQ ID NO: 3206499 - RNA, 19 nt, Artificial Sequence
  Description of Artificial Sequence: Synthetic oligonucleotide
gauacuugagcccauguaa

SEQ ID NO: 3206500 - RNA, 19 nt, Artificial Sequence
  Description of Artificial Sequence: Synthetic oligonucleotide
uucggauuggaaaggaaca

SEQ ID NO: 3206501 - RNA, 19 nt, Artificial Sequence
  Description of Artificial Sequence: Synthetic oligonucleotide
ucccuaguccuccugaucc

SEQ ID NO: 3206502 - RNA, 19 nt, Artificial Sequence
  Description of Artificial Sequence: Synthetic oligonucleotide
uaaggaacagguccccagg

SEQ ID NO: 3206503 - RNA, 19 nt, Artificial Sequence
  Description of Artificial Sequence: Synthetic oligonucleotide
uugcacauaaaaucucucc

SEQ ID NO: 3206504 - RNA, 19 nt, Artificial Sequence
  Description of Artificial Sequence: Synthetic oligonucleotide
gaugugagaccugaaacag

SEQ ID NO: 3206505 - RNA, 19 nt, Artificial Sequence
  Description of Artificial Sequence: Synthetic oligonucleotide
guugauagcgaaaacaaca

SEQ ID NO: 3206506 - RNA, 19 nt, Artificial Sequence
  Description of Artificial Sequence: Synthetic oligonucleotide
aauauaaaacacuguuguu

SEQ ID NO: 3206507 - RNA, 19 nt, Artificial Sequence
  Description of Artificial Sequence: Synthetic oligonucleotide
cuugaaaaugcagagcuac

SEQ ID NO: 3206508 - RNA, 19 nt, Artificial Sequence
  Description of Artificial Sequence: Synthetic oligonucleotide
uuauacauauucugccagc

SEQ ID NO: 3206509 - RNA, 19 nt, Artificial Sequence
  Description of Artificial Sequence: Synthetic oligonucleotide
aguaggcuucacuaucagc

SEQ ID NO: 3206510 - RNA, 19 nt, Artificial Sequence
  Description of Artificial Sequence: Synthetic oligonucleotide
aaucuaagccaguuacugu

SEQ ID NO: 3206511 - RNA, 19 nt, Artificial Sequence
  Description of Artificial Sequence: Synthetic oligonucleotide
ugauagcgaaaacaacaag

SEQ ID NO: 3206512 - RNA, 19 nt, Artificial Sequence
  Description of Artificial Sequence: Synthetic oligonucleotide
acauaucagauucugcacu

SEQ ID NO: 3206513 - RNA, 19 nt, Artificial Sequence
  Description of Artificial Sequence: Synthetic oligonucleotide
aaguaaguuuaguucuuca

SEQ ID NO: 3206514 - RNA, 19 nt, Artificial Sequence
  Description of Artificial Sequence: Synthetic oligonucleotide
ugcaguaaucauauugcac

SEQ ID NO: 3206515 - RNA, 19 nt, Artificial Sequence
  Description of Artificial Sequence: Synthetic oligonucleotide
uuugugguauacaaucauc

SEQ ID NO: 3206516 - RNA, 19 nt, Artificial Sequence
  Description of Artificial Sequence: Synthetic oligonucleotide
aaaucuuucugaaccaagu

SEQ ID NO: 3206517 - RNA, 19 nt, Artificial Sequence
  Description of Artificial Sequence: Synthetic oligonucleotide
uugcugaagauacccauga

SEQ ID NO: 3206518 - RNA, 19 nt, Artificial Sequence
  Description of Artificial Sequence: Synthetic oligonucleotide
cuucggauuggaaaggaac

SEQ ID NO: 3206519 - RNA, 19 nt, Artificial Sequence
  Description of Artificial Sequence: Synthetic oligonucleotide
gguucagacuugcagaagg

SEQ ID NO: 3206520 - RNA, 19 nt, Artificial Sequence
  Description of Artificial Sequence: Synthetic oligonucleotide
accgccaggagauaagguc

SEQ ID NO: 3206521 - RNA, 19 nt, Artificial Sequence
  Description of Artificial Sequence: Synthetic oligonucleotide
aagaucagcauugcugaag

SEQ ID NO: 3206522 - RNA, 19 nt, Artificial Sequence
  Description of Artificial Sequence: Synthetic oligonucleotide
aagugucucccacggaguc

SEQ ID NO: 3206523 - RNA, 19 nt, Artificial Sequence
  Description of Artificial Sequence: Synthetic oligonucleotide
ugggguugcaauaucuucu

SEQ ID NO: 3206524 - RNA, 19 nt, Artificial Sequence
  Description of Artificial Sequence: Synthetic oligonucleotide
ugagucuaguacauucuca

SEQ ID NO: 3206525 - RNA, 19 nt, Artificial Sequence
  Description of Artificial Sequence: Synthetic oligonucleotide
uuguccaaguuguauuucc

SEQ ID NO: 3206526 - RNA, 19 nt, Artificial Sequence
  Description of Artificial Sequence: Synthetic oligonucleotide
auaaggaacagguccccag

SEQ ID NO: 3206527 - RNA, 19 nt, Artificial Sequence
  Description of Artificial Sequence: Synthetic oligonucleotide
uggguugcugauuuggaug

SEQ ID NO: 3206528 - RNA, 19 nt, Artificial Sequence
  Description of Artificial Sequence: Synthetic oligonucleotide
uuugggaauaguaguccug

SEQ ID NO: 3206529 - RNA, 19 nt, Artificial Sequence
  Description of Artificial Sequence: Synthetic oligonucleotide
aagccauuauuguugacuu

SEQ ID NO: 3206530 - RNA, 19 nt, Artificial Sequence
  Description of Artificial Sequence: Synthetic oligonucleotide
uacauaucagauucugcac

SEQ ID NO: 3206531 - RNA, 19 nt, Artificial Sequence
  Description of Artificial Sequence: Synthetic oligonucleotide
uauacauauucugccagca

SEQ ID NO: 3206532 - RNA, 19 nt, Artificial Sequence
  Description of Artificial Sequence: Synthetic oligonucleotide
cucugauuccuauugucag

SEQ ID NO: 3206533 - RNA, 19 nt, Artificial Sequence
  Description of Artificial Sequence: Synthetic oligonucleotide
ucagaaauaugagcaacca

SEQ ID NO: 3206534 - RNA, 19 nt, Artificial Sequence
  Description of Artificial Sequence: Synthetic oligonucleotide
ucaacaaacuagaauucuu

SEQ ID NO: 3206535 - RNA, 19 nt, Artificial Sequence
  Description of Artificial Sequence: Synthetic oligonucleotide
guugauguuuuggaaauug

SEQ ID NO: 3206536 - RNA, 19 nt, Artificial Sequence
  Description of Artificial Sequence: Synthetic oligonucleotide
ucugauuccuauugucagc

SEQ ID NO: 3206537 - RNA, 19 nt, Artificial Sequence
  Description of Artificial Sequence: Synthetic oligonucleotide
aacuacuccuccuuuggaa

SEQ ID NO: 3206538 - RNA, 19 nt, Artificial Sequence
  Description of Artificial Sequence: Synthetic oligonucleotide
aguaaguuuaguucuucau

SEQ ID NO: 3206539 - RNA, 19 nt, Artificial Sequence
  Description of Artificial Sequence: Synthetic oligonucleotide
cagaugugagaccugaaac

SEQ ID NO: 3206540 - RNA, 19 nt, Artificial Sequence
  Description of Artificial Sequence: Synthetic oligonucleotide
uuacaauggccacaaaauu

SEQ ID NO: 3206541 - RNA, 19 nt, Artificial Sequence
  Description of Artificial Sequence: Synthetic oligonucleotide
ugcugacacuagaucaugg

SEQ ID NO: 3206542 - RNA, 19 nt, Artificial Sequence
  Description of Artificial Sequence: Synthetic oligonucleotide
cuuuaccuaggauaaguuc

SEQ ID NO: 3206543 - RNA, 19 nt, Artificial Sequence
  Description of Artificial Sequence: Synthetic oligonucleotide
uuuuaugagaacggacagc

SEQ ID NO: 3206544 - RNA, 19 nt, Artificial Sequence
  Description of Artificial Sequence: Synthetic oligonucleotide
uaucagauucugcacuugu

SEQ ID NO: 3206545 - RNA, 19 nt, Artificial Sequence
  Description of Artificial Sequence: Synthetic oligonucleotide
uacuaaacuggacuccaac

SEQ ID NO: 3206546 - RNA, 19 nt, Artificial Sequence
  Description of Artificial Sequence: Synthetic oligonucleotide
uuacacuugcuacuccaug

SEQ ID NO: 3206547 - RNA, 19 nt, Artificial Sequence
  Description of Artificial Sequence: Synthetic oligonucleotide
aagaaggagaugcugcguu

SEQ ID NO: 3206548 - RNA, 19 nt, Artificial Sequence
  Description of Artificial Sequence: Synthetic oligonucleotide
uggauuuucguggcgacgc

SEQ ID NO: 3206549 - RNA, 19 nt, Artificial Sequence
  Description of Artificial Sequence: Synthetic oligonucleotide
acugacuugucuugggugu

SEQ ID NO: 3206550 - RNA, 19 nt, Artificial Sequence
  Description of Artificial Sequence: Synthetic oligonucleotide
aggagaucugagcggagac

SEQ ID NO: 3206551 - RNA, 19 nt, Artificial Sequence
  Description of Artificial Sequence: Synthetic oligonucleotide
ugaauuagagucagcugau

SEQ ID NO: 3206552 - RNA, 19 nt, Artificial Sequence
  Description of Artificial Sequence: Synthetic oligonucleotide
gaauaguaguccuggcaug

SEQ ID NO: 3206553 - RNA, 19 nt, Artificial Sequence
  Description of Artificial Sequence: Synthetic oligonucleotide
aauguuucugaagacuuuu

SEQ ID NO: 3206554 - RNA, 19 nt, Artificial Sequence
  Description of Artificial Sequence: Synthetic oligonucleotide
uuacauuuucaugcaauac

SEQ ID NO: 3206555 - RNA, 19 nt, Artificial Sequence
  Description of Artificial Sequence: Synthetic oligonucleotide
uguaagguagcagauggau

SEQ ID NO: 3206556 - RNA, 19 nt, Artificial Sequence
  Description of Artificial Sequence: Synthetic oligonucleotide
aaguaggcuucacuaucag

SEQ ID NO: 3206557 - RNA, 19 nt, Artificial Sequence
  Description of Artificial Sequence: Synthetic oligonucleotide
ggcacuaaauuuaagaaca

SEQ ID NO: 3206558 - RNA, 19 nt, Artificial Sequence
  Description of Artificial Sequence: Synthetic oligonucleotide
acuauuauaguucucgugc

SEQ ID NO: 3206559 - RNA, 19 nt, Artificial Sequence
  Description of Artificial Sequence: Synthetic oligonucleotide
accacaucgaauuuuaccc

SEQ ID NO: 3206560 - RNA, 19 nt, Artificial Sequence
  Description of Artificial Sequence: Synthetic oligonucleotide
uuaaguuucagauagcugu

SEQ ID NO: 3206561 - RNA, 19 nt, Artificial Sequence
  Description of Artificial Sequence: Synthetic oligonucleotide
uuaagaaugccauguaggg

SEQ ID NO: 3206562 - RNA, 19 nt, Artificial Sequence
  Description of Artificial Sequence: Synthetic oligonucleotide
uguugaaggaguuucauug

SEQ ID NO: 3206563 - RNA, 19 nt, Artificial Sequence
  Description of Artificial Sequence: Synthetic oligonucleotide
cuuaagaaugccauguagg

SEQ ID NO: 3206564 - RNA, 19 nt, Artificial Sequence
  Description of Artificial Sequence: Synthetic oligonucleotide
gauucguuucuauaaaucc

SEQ ID NO: 3206565 - RNA, 19 nt, Artificial Sequence
  Description of Artificial Sequence: Synthetic oligonucleotide
auuacuaugucuuuugcca

SEQ ID NO: 3206566 - RNA, 19 nt, Artificial Sequence
  Description of Artificial Sequence: Synthetic oligonucleotide
uauuccuugcauaacagug

SEQ ID NO: 3206567 - RNA, 19 nt, Artificial Sequence
  Description of Artificial Sequence: Synthetic oligonucleotide
aaguugaugacugacaaug

SEQ ID NO: 3206568 - RNA, 19 nt, Artificial Sequence
  Description of Artificial Sequence: Synthetic oligonucleotide
acugacaaugcccugggcc

SEQ ID NO: 3206569 - RNA, 19 nt, Artificial Sequence
  Description of Artificial Sequence: Synthetic oligonucleotide
cuugauaucaugagcaccc

SEQ ID NO: 3206570 - RNA, 19 nt, Artificial Sequence
  Description of Artificial Sequence: Synthetic oligonucleotide
uauaaauccuuaagaaugc

SEQ ID NO: 3206571 - RNA, 19 nt, Artificial Sequence
  Description of Artificial Sequence: Synthetic oligonucleotide
uuauauuccuugcauaaca

SEQ ID NO: 3206572 - RNA, 19 nt, Artificial Sequence
  Description of Artificial Sequence: Synthetic oligonucleotide
cuuaauccaagguauaaag

SEQ ID NO: 3206573 - RNA, 19 nt, Artificial Sequence
  Description of Artificial Sequence: Synthetic oligonucleotide
aagaaugccauguagggau

SEQ ID NO: 3206574 - RNA, 19 nt, Artificial Sequence
  Description of Artificial Sequence: Synthetic oligonucleotide
cacacuauggcacacaaag

SEQ ID NO: 3206575 - RNA, 19 nt, Artificial Sequence
  Description of Artificial Sequence: Synthetic oligonucleotide
ucgaauuuuacccgauucg

SEQ ID NO: 3206576 - RNA, 19 nt, Artificial Sequence
  Description of Artificial Sequence: Synthetic oligonucleotide
uuaggcagaguacaauugg

SEQ ID NO: 3206577 - RNA, 19 nt, Artificial Sequence
  Description of Artificial Sequence: Synthetic oligonucleotide
accugcuuagguuucaccc

SEQ ID NO: 3206578 - RNA, 19 nt, Artificial Sequence
  Description of Artificial Sequence: Synthetic oligonucleotide
aggucaauggucuucacag

SEQ ID NO: 3206579 - RNA, 19 nt, Artificial Sequence
  Description of Artificial Sequence: Synthetic oligonucleotide
aguagcaugaugucauugg

SEQ ID NO: 3206580 - RNA, 19 nt, Artificial Sequence
  Description of Artificial Sequence: Synthetic oligonucleotide
uccagaaucucccuuacca

SEQ ID NO: 3206581 - RNA, 19 nt, Artificial Sequence
  Description of Artificial Sequence: Synthetic oligonucleotide
aagcuugagauucugguga

SEQ ID NO: 3206582 - RNA, 19 nt, Artificial Sequence
  Description of Artificial Sequence: Synthetic oligonucleotide
aaguuuguuaggcagagua

SEQ ID NO: 3206583 - RNA, 19 nt, Artificial Sequence
  Description of Artificial Sequence: Synthetic oligonucleotide
uuuggaaggucaauggucu

SEQ ID NO: 3206584 - RNA, 19 nt, Artificial Sequence
  Description of Artificial Sequence: Synthetic oligonucleotide
uauauuccuugcauaacag

SEQ ID NO: 3206585 - RNA, 19 nt, Artificial Sequence
  Description of Artificial Sequence: Synthetic oligonucleotide
auagcuguaucccaggaug

SEQ ID NO: 3206586 - RNA, 19 nt, Artificial Sequence
  Description of Artificial Sequence: Synthetic oligonucleotide
cuuggaacgaaguugauga

SEQ ID NO: 3206587 - RNA, 19 nt, Artificial Sequence
  Description of Artificial Sequence: Synthetic oligonucleotide
uugaugacugacaaugccc

SEQ ID NO: 3206588 - RNA, 19 nt, Artificial Sequence
  Description of Artificial Sequence: Synthetic oligonucleotide
aauuuuacccgauucguuu

SEQ ID NO: 3206589 - RNA, 19 nt, Artificial Sequence
  Description of Artificial Sequence: Synthetic oligonucleotide
aaagcuugagauucuggug

SEQ ID NO: 3206590 - RNA, 19 nt, Artificial Sequence
  Description of Artificial Sequence: Synthetic oligonucleotide
uaugucuuuugccaccagg

SEQ ID NO: 3206591 - RNA, 19 nt, Artificial Sequence
  Description of Artificial Sequence: Synthetic oligonucleotide
aucgaauuuuacccgauuc

SEQ ID NO: 3206592 - RNA, 19 nt, Artificial Sequence
  Description of Artificial Sequence: Synthetic oligonucleotide
uuaaggacagugaggaucu

SEQ ID NO: 3206593 - RNA, 19 nt, Artificial Sequence
  Description of Artificial Sequence: Synthetic oligonucleotide
auaacagugagcugcuguc

SEQ ID NO: 3206594 - RNA, 19 nt, Artificial Sequence
  Description of Artificial Sequence: Synthetic oligonucleotide
aacgaaguugaugacugac

SEQ ID NO: 3206595 - RNA, 19 nt, Artificial Sequence
  Description of Artificial Sequence: Synthetic oligonucleotide
accaguagccuucuucucc

SEQ ID NO: 3206596 - RNA, 19 nt, Artificial Sequence
  Description of Artificial Sequence: Synthetic oligonucleotide
ucagauagcuguaucccag

SEQ ID NO: 3206597 - RNA, 19 nt, Artificial Sequence
  Description of Artificial Sequence: Synthetic oligonucleotide
uuguguuccagcuugagua

SEQ ID NO: 3206598 - RNA, 19 nt, Artificial Sequence
  Description of Artificial Sequence: Synthetic oligonucleotide
ucuuucuuggacuucuagc

SEQ ID NO: 3206599 - RNA, 19 nt, Artificial Sequence
  Description of Artificial Sequence: Synthetic oligonucleotide
aaucucccuuaccaguagc

SEQ ID NO: 3206600 - RNA, 19 nt, Artificial Sequence
  Description of Artificial Sequence: Synthetic oligonucleotide
cuucuaugguuguugaagg

SEQ ID NO: 3206601 - RNA, 19 nt, Artificial Sequence
  Description of Artificial Sequence: Synthetic oligonucleotide
uauuaaguuucagauagcu

SEQ ID NO: 3206602 - RNA, 19 nt, Artificial Sequence
  Description of Artificial Sequence: Synthetic oligonucleotide
gauaucaugagcacccaag

SEQ ID NO: 3206603 - RNA, 19 nt, Artificial Sequence
  Description of Artificial Sequence: Synthetic oligonucleotide
uguuuucuuaauccaaggu

SEQ ID NO: 3206604 - RNA, 19 nt, Artificial Sequence
  Description of Artificial Sequence: Synthetic oligonucleotide
acaauuggccaguuuuccc

SEQ ID NO: 3206605 - RNA, 19 nt, Artificial Sequence
  Description of Artificial Sequence: Synthetic oligonucleotide
cuugggauuucccacacag

SEQ ID NO: 3206606 - RNA, 19 nt, Artificial Sequence
  Description of Artificial Sequence: Synthetic oligonucleotide
ucaugagcacccaagauua

SEQ ID NO: 3206607 - RNA, 19 nt, Artificial Sequence
  Description of Artificial Sequence: Synthetic oligonucleotide
uggcauuaaggacagugag

SEQ ID NO: 3206608 - RNA, 19 nt, Artificial Sequence
  Description of Artificial Sequence: Synthetic oligonucleotide
uuugccaccaggaaaccac

SEQ ID NO: 3206609 - RNA, 19 nt, Artificial Sequence
  Description of Artificial Sequence: Synthetic oligonucleotide
uggacuucuagcuugacuu

SEQ ID NO: 3206610 - RNA, 19 nt, Artificial Sequence
  Description of Artificial Sequence: Synthetic oligonucleotide
cauuacuaugucuuuugcc

SEQ ID NO: 3206611 - RNA, 19 nt, Artificial Sequence
  Description of Artificial Sequence: Synthetic oligonucleotide
uacacuuauauuccuugca

SEQ ID NO: 3206612 - RNA, 19 nt, Artificial Sequence
  Description of Artificial Sequence: Synthetic oligonucleotide
ucuaugguuguugaaggag

SEQ ID NO: 3206613 - RNA, 19 nt, Artificial Sequence
  Description of Artificial Sequence: Synthetic oligonucleotide
agcaugaugucauuggccu

SEQ ID NO: 3206614 - RNA, 19 nt, Artificial Sequence
  Description of Artificial Sequence: Synthetic oligonucleotide
cuugacuuccugaaguuug

SEQ ID NO: 3206615 - RNA, 19 nt, Artificial Sequence
  Description of Artificial Sequence: Synthetic oligonucleotide
uaucccaggauguuggaca

SEQ ID NO: 3206616 - RNA, 19 nt, Artificial Sequence
  Description of Artificial Sequence: Synthetic oligonucleotide
ugaugacugacaaugcccu

SEQ ID NO: 3206617 - RNA, 19 nt, Artificial Sequence
  Description of Artificial Sequence: Synthetic oligonucleotide
auuuuacccgauucguuuc

SEQ ID NO: 3206618 - RNA, 19 nt, Artificial Sequence
  Description of Artificial Sequence: Synthetic oligonucleotide
uugaguagcaugaugucau

SEQ ID NO: 3206619 - RNA, 19 nt, Artificial Sequence
  Description of Artificial Sequence: Synthetic oligonucleotide
uuaccaguagccuucuucu

SEQ ID NO: 3206620 - RNA, 19 nt, Artificial Sequence
  Description of Artificial Sequence: Synthetic oligonucleotide
uuucagauagcuguauccc

SEQ ID NO: 3206621 - RNA, 19 nt, Artificial Sequence
  Description of Artificial Sequence: Synthetic oligonucleotide
uacuauuauaguucucgug

SEQ ID NO: 3206622 - RNA, 19 nt, Artificial Sequence
  Description of Artificial Sequence: Synthetic oligonucleotide
ucuggugaaaacccgugga

SEQ ID NO: 3206623 - RNA, 19 nt, Artificial Sequence
  Description of Artificial Sequence: Synthetic oligonucleotide
augggagugggguuuggcc

SEQ ID NO: 3206624 - RNA, 19 nt, Artificial Sequence
  Description of Artificial Sequence: Synthetic oligonucleotide
uauggcacacaaagggucc

SEQ ID NO: 3206625 - RNA, 19 nt, Artificial Sequence
  Description of Artificial Sequence: Synthetic oligonucleotide
ucaguuucuugauaucaug

SEQ ID NO: 3206626 - RNA, 19 nt, Artificial Sequence
  Description of Artificial Sequence: Synthetic oligonucleotide
caauuggccaguuuucccc

SEQ ID NO: 3206627 - RNA, 19 nt, Artificial Sequence
  Description of Artificial Sequence: Synthetic oligonucleotide
cuuagguuucacccaaucc

SEQ ID NO: 3206628 - RNA, 19 nt, Artificial Sequence
  Description of Artificial Sequence: Synthetic oligonucleotide
cuuuggaaggucaaugguc

SEQ ID NO: 3206629 - RNA, 19 nt, Artificial Sequence
  Description of Artificial Sequence: Synthetic oligonucleotide
ucauuacuaugucuuuugc

SEQ ID NO: 3206630 - RNA, 19 nt, Artificial Sequence
  Description of Artificial Sequence: Synthetic oligonucleotide
uauugaguugagcuuugug

SEQ ID NO: 3206631 - RNA, 19 nt, Artificial Sequence
  Description of Artificial Sequence: Synthetic oligonucleotide
aguuucagauagcuguauc

SEQ ID NO: 3206632 - RNA, 19 nt, Artificial Sequence
  Description of Artificial Sequence: Synthetic oligonucleotide
ugccauguagggaugggag

SEQ ID NO: 3206633 - RNA, 19 nt, Artificial Sequence
  Description of Artificial Sequence: Synthetic oligonucleotide
caaaggguccuccagaauc

SEQ ID NO: 3206634 - RNA, 19 nt, Artificial Sequence
  Description of Artificial Sequence: Synthetic oligonucleotide
uagguuucacccaauccug

SEQ ID NO: 3206635 - RNA, 19 nt, Artificial Sequence
  Description of Artificial Sequence: Synthetic oligonucleotide
ucuagcuugacuuccugaa

SEQ ID NO: 3206636 - RNA, 19 nt, Artificial Sequence
  Description of Artificial Sequence: Synthetic oligonucleotide
ugaaguuuguuaggcagag

SEQ ID NO: 3206637 - RNA, 19 nt, Artificial Sequence
  Description of Artificial Sequence: Synthetic oligonucleotide
ugagcacccaagauuacac

SEQ ID NO: 3206638 - RNA, 19 nt, Artificial Sequence
  Description of Artificial Sequence: Synthetic oligonucleotide
uagcuugacuuccugaagu

SEQ ID NO: 3206639 - RNA, 19 nt, Artificial Sequence
  Description of Artificial Sequence: Synthetic oligonucleotide
ucuuuggaaggucaauggu

SEQ ID NO: 3206640 - RNA, 19 nt, Artificial Sequence
  Description of Artificial Sequence: Synthetic oligonucleotide
uucagugcugacuggcagg

SEQ ID NO: 3206641 - RNA, 19 nt, Artificial Sequence
  Description of Artificial Sequence: Synthetic oligonucleotide
uagcaugaugucauuggcc

SEQ ID NO: 3206642 - RNA, 19 nt, Artificial Sequence
  Description of Artificial Sequence: Synthetic oligonucleotide
uucguuucuauaaauccuu

SEQ ID NO: 3206643 - RNA, 19 nt, Artificial Sequence
  Description of Artificial Sequence: Synthetic oligonucleotide
ucuugauaucaugagcacc

SEQ ID NO: 3206644 - RNA, 19 nt, Artificial Sequence
  Description of Artificial Sequence: Synthetic oligonucleotide
uggugaaaacccguggagg

SEQ ID NO: 3206645 - RNA, 19 nt, Artificial Sequence
  Description of Artificial Sequence: Synthetic oligonucleotide
guuuucuuaauccaaggua

SEQ ID NO: 3206646 - RNA, 19 nt, Artificial Sequence
  Description of Artificial Sequence: Synthetic oligonucleotide
ugacugacaaugcccuggg

SEQ ID NO: 3206647 - RNA, 19 nt, Artificial Sequence
  Description of Artificial Sequence: Synthetic oligonucleotide
uuuguguuccagcuugagu

SEQ ID NO: 3206648 - RNA, 19 nt, Artificial Sequence
  Description of Artificial Sequence: Synthetic oligonucleotide
auaucaugagcacccaaga

SEQ ID NO: 3206649 - RNA, 19 nt, Artificial Sequence
  Description of Artificial Sequence: Synthetic oligonucleotide
aucaugagcacccaagauu

SEQ ID NO: 3206650 - RNA, 19 nt, Artificial Sequence
  Description of Artificial Sequence: Synthetic oligonucleotide
cuuaccaguagccuucuuc

SEQ ID NO: 3206651 - RNA, 19 nt, Artificial Sequence
  Description of Artificial Sequence: Synthetic oligonucleotide
uugaguugagcuuuguguu

SEQ ID NO: 3206652 - RNA, 19 nt, Artificial Sequence
  Description of Artificial Sequence: Synthetic oligonucleotide
aguucucgugcuugguggc

SEQ ID NO: 3206653 - RNA, 19 nt, Artificial Sequence
  Description of Artificial Sequence: Synthetic oligonucleotide
uuacuauuauaguucucgu

SEQ ID NO: 3206654 - RNA, 19 nt, Artificial Sequence
  Description of Artificial Sequence: Synthetic oligonucleotide
cagggcuugucuucuaugg

SEQ ID NO: 3206655 - RNA, 19 nt, Artificial Sequence
  Description of Artificial Sequence: Synthetic oligonucleotide
cuauggcacacaaaggguc

SEQ ID NO: 3206656 - RNA, 19 nt, Artificial Sequence
  Description of Artificial Sequence: Synthetic oligonucleotide
aaugcccugggccacacua

SEQ ID NO: 3206657 - RNA, 19 nt, Artificial Sequence
  Description of Artificial Sequence: Synthetic oligonucleotide
aauuggccaguuuucccca

SEQ ID NO: 3206658 - RNA, 19 nt, Artificial Sequence
  Description of Artificial Sequence: Synthetic oligonucleotide
auauuaauguaccagaguc

SEQ ID NO: 3206659 - RNA, 19 nt, Artificial Sequence
  Description of Artificial Sequence: Synthetic oligonucleotide
agucuugucaguuaaagac

SEQ ID NO: 3206660 - RNA, 19 nt, Artificial Sequence
  Description of Artificial Sequence: Synthetic oligonucleotide
auggauauaauauuaaugu

SEQ ID NO: 3206661 - RNA, 19 nt, Artificial Sequence
  Description of Artificial Sequence: Synthetic oligonucleotide
uauaauauuaauguaccag

SEQ ID NO: 3206662 - RNA, 19 nt, Artificial Sequence
  Description of Artificial Sequence: Synthetic oligonucleotide
uuuaacacuauuuauuaac

SEQ ID NO: 3206663 - RNA, 19 nt, Artificial Sequence
  Description of Artificial Sequence: Synthetic oligonucleotide
ugaaaguucaauaucucgc

SEQ ID NO: 3206664 - RNA, 19 nt, Artificial Sequence
  Description of Artificial Sequence: Synthetic oligonucleotide
auuaauguaccagaguccc

SEQ ID NO: 3206665 - RNA, 19 nt, Artificial Sequence
  Description of Artificial Sequence: Synthetic oligonucleotide
agauauucuuugcugaggc

SEQ ID NO: 3206666 - RNA, 19 nt, Artificial Sequence
  Description of Artificial Sequence: Synthetic oligonucleotide
auuauguacaaacgggugg

SEQ ID NO: 3206667 - RNA, 19 nt, Artificial Sequence
  Description of Artificial Sequence: Synthetic oligonucleotide
aauggauauaauauuaaug

SEQ ID NO: 3206668 - RNA, 19 nt, Artificial Sequence
  Description of Artificial Sequence: Synthetic oligonucleotide
auaauauuaauguaccaga

SEQ ID NO: 3206669 - RNA, 19 nt, Artificial Sequence
  Description of Artificial Sequence: Synthetic oligonucleotide
uugaaaguucaauaucucg

SEQ ID NO: 3206670 - RNA, 19 nt, Artificial Sequence
  Description of Artificial Sequence: Synthetic oligonucleotide
acaagcauuacagagacag

SEQ ID NO: 3206671 - RNA, 19 nt, Artificial Sequence
  Description of Artificial Sequence: Synthetic oligonucleotide
cugaauuauguacaaacgg

SEQ ID NO: 3206672 - RNA, 19 nt, Artificial Sequence
  Description of Artificial Sequence: Synthetic oligonucleotide
aaauuuuaacacuauuuau

SEQ ID NO: 3206673 - RNA, 19 nt, Artificial Sequence
  Description of Artificial Sequence: Synthetic oligonucleotide
uuaacacuauuuauuaaca

SEQ ID NO: 3206674 - RNA, 19 nt, Artificial Sequence
  Description of Artificial Sequence: Synthetic oligonucleotide
uuucagaagauauucuuug

SEQ ID NO: 3206675 - RNA, 19 nt, Artificial Sequence
  Description of Artificial Sequence: Synthetic oligonucleotide
cacauucuaagguagaaag

SEQ ID NO: 3206676 - RNA, 19 nt, Artificial Sequence
  Description of Artificial Sequence: Synthetic oligonucleotide
agauggaaagcgcagcagc

SEQ ID NO: 3206677 - RNA, 19 nt, Artificial Sequence
  Description of Artificial Sequence: Synthetic oligonucleotide
uauuaauguaccagagucc

SEQ ID NO: 3206678 - RNA, 19 nt, Artificial Sequence
  Description of Artificial Sequence: Synthetic oligonucleotide
uucuccaagauggaaagcg

SEQ ID NO: 3206679 - RNA, 19 nt, Artificial Sequence
  Description of Artificial Sequence: Synthetic oligonucleotide
uccgggaaaguuuacaaag

SEQ ID NO: 3206680 - RNA, 19 nt, Artificial Sequence
  Description of Artificial Sequence: Synthetic oligonucleotide
ugaacaagcauuacagaga

SEQ ID NO: 3206681 - RNA, 19 nt, Artificial Sequence
  Description of Artificial Sequence: Synthetic oligonucleotide
aaagucuugucaguuaaag

SEQ ID NO: 3206682 - RNA, 19 nt, Artificial Sequence
  Description of Artificial Sequence: Synthetic oligonucleotide
cauucuaagguagaaaggc

SEQ ID NO: 3206683 - RNA, 19 nt, Artificial Sequence
  Description of Artificial Sequence: Synthetic oligonucleotide
aaaguuuacaaagucuugu

SEQ ID NO: 3206684 - RNA, 19 nt, Artificial Sequence
  Description of Artificial Sequence: Synthetic oligonucleotide
aauuuuaacacuauuuauu

SEQ ID NO: 3206685 - RNA, 19 nt, Artificial Sequence
  Description of Artificial Sequence: Synthetic oligonucleotide
aaaguucaauaucucgcuc

SEQ ID NO: 3206686 - RNA, 19 nt, Artificial Sequence
  Description of Artificial Sequence: Synthetic oligonucleotide
uuaaagacaggugaacaag

SEQ ID NO: 3206687 - RNA, 19 nt, Artificial Sequence
  Description of Artificial Sequence: Synthetic oligonucleotide
aaguucaauaucucgcucu

SEQ ID NO: 3206688 - RNA, 19 nt, Artificial Sequence
  Description of Artificial Sequence: Synthetic oligonucleotide
uagauauggacacaagcac

SEQ ID NO: 3206689 - RNA, 19 nt, Artificial Sequence
  Description of Artificial Sequence: Synthetic oligonucleotide
auuuauuaacaguuccauc

SEQ ID NO: 3206690 - RNA, 19 nt, Artificial Sequence
  Description of Artificial Sequence: Synthetic oligonucleotide
uaaagacaggugaacaagc

SEQ ID NO: 3206691 - RNA, 19 nt, Artificial Sequence
  Description of Artificial Sequence: Synthetic oligonucleotide
auuaacaguuccaucuucc

SEQ ID NO: 3206692 - RNA, 19 nt, Artificial Sequence
  Description of Artificial Sequence: Synthetic oligonucleotide
uaauguaccagagucccgg

SEQ ID NO: 3206693 - RNA, 19 nt, Artificial Sequence
  Description of Artificial Sequence: Synthetic oligonucleotide
aagcauuacagagacagcu

SEQ ID NO: 3206694 - RNA, 19 nt, Artificial Sequence
  Description of Artificial Sequence: Synthetic oligonucleotide
guagaaaggcaucugcuag

SEQ ID NO: 3206695 - RNA, 19 nt, Artificial Sequence
  Description of Artificial Sequence: Synthetic oligonucleotide
acuucagccauuuccauga

SEQ ID NO: 3206696 - RNA, 19 nt, Artificial Sequence
  Description of Artificial Sequence: Synthetic oligonucleotide
gucaguuaaagacagguga

SEQ ID NO: 3206697 - RNA, 19 nt, Artificial Sequence
  Description of Artificial Sequence: Synthetic oligonucleotide
cugugcuaaauuuuaacac

SEQ ID NO: 3206698 - RNA, 19 nt, Artificial Sequence
  Description of Artificial Sequence: Synthetic oligonucleotide
aagauauucuuugcugagg

SEQ ID NO: 3206699 - RNA, 19 nt, Artificial Sequence
  Description of Artificial Sequence: Synthetic oligonucleotide
aauguaccagagucccggc

SEQ ID NO: 3206700 - RNA, 19 nt, Artificial Sequence
  Description of Artificial Sequence: Synthetic oligonucleotide
agcugugcuaaauuuuaac

SEQ ID NO: 3206701 - RNA, 19 nt, Artificial Sequence
  Description of Artificial Sequence: Synthetic oligonucleotide
ugacugugcccuuuguucg

SEQ ID NO: 3206702 - RNA, 19 nt, Artificial Sequence
  Description of Artificial Sequence: Synthetic oligonucleotide
acaguugaaaguucaauau

SEQ ID NO: 3206703 - RNA, 19 nt, Artificial Sequence
  Description of Artificial Sequence: Synthetic oligonucleotide
cauggcuggaguuagucag

SEQ ID NO: 3206704 - RNA, 19 nt, Artificial Sequence
  Description of Artificial Sequence: Synthetic oligonucleotide
aguugaaaguucaauaucu

SEQ ID NO: 3206705 - RNA, 19 nt, Artificial Sequence
  Description of Artificial Sequence: Synthetic oligonucleotide
uguacaaacggguggagau

SEQ ID NO: 3206706 - RNA, 19 nt, Artificial Sequence
  Description of Artificial Sequence: Synthetic oligonucleotide
gauauucuuugcugaggcg

SEQ ID NO: 3206707 - RNA, 19 nt, Artificial Sequence
  Description of Artificial Sequence: Synthetic oligonucleotide
aguuccaucuuccugaguu

SEQ ID NO: 3206708 - RNA, 19 nt, Artificial Sequence
  Description of Artificial Sequence: Synthetic oligonucleotide
ucaguuaaagacaggugaa

SEQ ID NO: 3206709 - RNA, 19 nt, Artificial Sequence
  Description of Artificial Sequence: Synthetic oligonucleotide
uuuucagaagauauucuuu

SEQ ID NO: 3206710 - RNA, 19 nt, Artificial Sequence
  Description of Artificial Sequence: Synthetic oligonucleotide
uauuuauuaacaguuccau

SEQ ID NO: 3206711 - RNA, 19 nt, Artificial Sequence
  Description of Artificial Sequence: Synthetic oligonucleotide
uucuaagguagaaaggcau

SEQ ID NO: 3206712 - RNA, 19 nt, Artificial Sequence
  Description of Artificial Sequence: Synthetic oligonucleotide
uccaagauggaaagcgcag

SEQ ID NO: 3206713 - RNA, 19 nt, Artificial Sequence
  Description of Artificial Sequence: Synthetic oligonucleotide
aagucuugucaguuaaaga

SEQ ID NO: 3206714 - RNA, 19 nt, Artificial Sequence
  Description of Artificial Sequence: Synthetic oligonucleotide
uaaacuccgggaaaguuua

SEQ ID NO: 3206715 - RNA, 19 nt, Artificial Sequence
  Description of Artificial Sequence: Synthetic oligonucleotide
gguagauauggacacaagc

SEQ ID NO: 3206716 - RNA, 19 nt, Artificial Sequence
  Description of Artificial Sequence: Synthetic oligonucleotide
aggugaacaagcauuacag

SEQ ID NO: 3206717 - RNA, 19 nt, Artificial Sequence
  Description of Artificial Sequence: Synthetic oligonucleotide
gcuggaguuagucaggccg

SEQ ID NO: 3206718 - RNA, 19 nt, Artificial Sequence
  Description of Artificial Sequence: Synthetic oligonucleotide
uuaauguaccagagucccg

SEQ ID NO: 3206719 - RNA, 19 nt, Artificial Sequence
  Description of Artificial Sequence: Synthetic oligonucleotide
uuauguacaaacgggugga

SEQ ID NO: 3206720 - RNA, 19 nt, Artificial Sequence
  Description of Artificial Sequence: Synthetic oligonucleotide
ucucgcucuucacugaagc

SEQ ID NO: 3206721 - RNA, 19 nt, Artificial Sequence
  Description of Artificial Sequence: Synthetic oligonucleotide
aguugguugcauccgaaug

SEQ ID NO: 3206722 - RNA, 19 nt, Artificial Sequence
  Description of Artificial Sequence: Synthetic oligonucleotide
guagauauggacacaagca

SEQ ID NO: 3206723 - RNA, 19 nt, Artificial Sequence
  Description of Artificial Sequence: Synthetic oligonucleotide
gauauggacacaagcacac

SEQ ID NO: 3206724 - RNA, 19 nt, Artificial Sequence
  Description of Artificial Sequence: Synthetic oligonucleotide
accggcaguccccacagcc

SEQ ID NO: 3206725 - RNA, 19 nt, Artificial Sequence
  Description of Artificial Sequence: Synthetic oligonucleotide
ucgcucuucacugaagcgg

SEQ ID NO: 3206726 - RNA, 19 nt, Artificial Sequence
  Description of Artificial Sequence: Synthetic oligonucleotide
auauucuuugcugaggcga

SEQ ID NO: 3206727 - RNA, 19 nt, Artificial Sequence
  Description of Artificial Sequence: Synthetic oligonucleotide
uauuaacaguuccaucuuc

SEQ ID NO: 3206728 - RNA, 19 nt, Artificial Sequence
  Description of Artificial Sequence: Synthetic oligonucleotide
ucuccaagauggaaagcgc

SEQ ID NO: 3206729 - RNA, 19 nt, Artificial Sequence
  Description of Artificial Sequence: Synthetic oligonucleotide
acaaagucuugucaguuaa

SEQ ID NO: 3206730 - RNA, 19 nt, Artificial Sequence
  Description of Artificial Sequence: Synthetic oligonucleotide
ucuuguauguuguuauuuu

SEQ ID NO: 3206731 - RNA, 19 nt, Artificial Sequence
  Description of Artificial Sequence: Synthetic oligonucleotide
acuuucuggggccggcugc

SEQ ID NO: 3206732 - RNA, 19 nt, Artificial Sequence
  Description of Artificial Sequence: Synthetic oligonucleotide
uggaaagcgcagcagcagc

SEQ ID NO: 3206733 - RNA, 19 nt, Artificial Sequence
  Description of Artificial Sequence: Synthetic oligonucleotide
gaaaguuuacaaagucuug

SEQ ID NO: 3206734 - RNA, 19 nt, Artificial Sequence
  Description of Artificial Sequence: Synthetic oligonucleotide
uuauuaacaguuccaucuu

SEQ ID NO: 3206735 - RNA, 19 nt, Artificial Sequence
  Description of Artificial Sequence: Synthetic oligonucleotide
uugcguuuguucuuuggca

SEQ ID NO: 3206736 - RNA, 19 nt, Artificial Sequence
  Description of Artificial Sequence: Synthetic oligonucleotide
cuaaauuuuaacacuauuu

SEQ ID NO: 3206737 - RNA, 19 nt, Artificial Sequence
  Description of Artificial Sequence: Synthetic oligonucleotide
agucccggcaaacaguuga

SEQ ID NO: 3206738 - RNA, 19 nt, Artificial Sequence
  Description of Artificial Sequence: Synthetic oligonucleotide
acauucuaagguagaaagg

SEQ ID NO: 3206739 - RNA, 19 nt, Artificial Sequence
  Description of Artificial Sequence: Synthetic oligonucleotide
aaagacaggugaacaagca

SEQ ID NO: 3206740 - RNA, 19 nt, Artificial Sequence
  Description of Artificial Sequence: Synthetic oligonucleotide
guuaaagacaggugaacaa

SEQ ID NO: 3206741 - RNA, 19 nt, Artificial Sequence
  Description of Artificial Sequence: Synthetic oligonucleotide
gaagccuaaacuccgggaa

SEQ ID NO: 3206742 - RNA, 19 nt, Artificial Sequence
  Description of Artificial Sequence: Synthetic oligonucleotide
uccgaauggauauaauauu

SEQ ID NO: 3206743 - RNA, 19 nt, Artificial Sequence
  Description of Artificial Sequence: Synthetic oligonucleotide
uuacagagacagcugugcu

SEQ ID NO: 3206744 - RNA, 19 nt, Artificial Sequence
  Description of Artificial Sequence: Synthetic oligonucleotide
ucuucguccggcgucggcg

SEQ ID NO: 3206745 - RNA, 19 nt, Artificial Sequence
  Description of Artificial Sequence: Synthetic oligonucleotide
uggagauuuggagugggug

SEQ ID NO: 3206746 - RNA, 19 nt, Artificial Sequence
  Description of Artificial Sequence: Synthetic oligonucleotide
uauucuuugcugaggcgaa

SEQ ID NO: 3206747 - RNA, 19 nt, Artificial Sequence
  Description of Artificial Sequence: Synthetic oligonucleotide
gaguuagucaggccgucgc

SEQ ID NO: 3206748 - RNA, 19 nt, Artificial Sequence
  Description of Artificial Sequence: Synthetic oligonucleotide
ggagauuuggagugggugc

SEQ ID NO: 3206749 - RNA, 19 nt, Artificial Sequence
  Description of Artificial Sequence: Synthetic oligonucleotide
cugcuaguugguugcaucc

SEQ ID NO: 3206750 - RNA, 19 nt, Artificial Sequence
  Description of Artificial Sequence: Synthetic oligonucleotide
uagaaaggcaucugcuagu

SEQ ID NO: 3206751 - RNA, 19 nt, Artificial Sequence
  Description of Artificial Sequence: Synthetic oligonucleotide
ugggugcacagguagauau

SEQ ID NO: 3206752 - RNA, 19 nt, Artificial Sequence
  Description of Artificial Sequence: Synthetic oligonucleotide
auuuggagugggugcacag

SEQ ID NO: 3206753 - RNA, 19 nt, Artificial Sequence
  Description of Artificial Sequence: Synthetic oligonucleotide
gcaagcugcuagcagaggg

SEQ ID NO: 3206754 - RNA, 19 nt, Artificial Sequence
  Description of Artificial Sequence: Synthetic oligonucleotide
caagcacacuuucuggggc

SEQ ID NO: 3206755 - RNA, 19 nt, Artificial Sequence
  Description of Artificial Sequence: Synthetic oligonucleotide
cuuuuccucugccggaugc

SEQ ID NO: 3206756 - RNA, 19 nt, Artificial Sequence
  Description of Artificial Sequence: Synthetic oligonucleotide
auccgaauggauauaauau

SEQ ID NO: 3206757 - RNA, 19 nt, Artificial Sequence
  Description of Artificial Sequence: Synthetic oligonucleotide
uugggauauaauccguuuu

SEQ ID NO: 3206758 - RNA, 19 nt, Artificial Sequence
  Description of Artificial Sequence: Synthetic oligonucleotide
aagauauuccacuuugccc

SEQ ID NO: 3206759 - RNA, 19 nt, Artificial Sequence
  Description of Artificial Sequence: Synthetic oligonucleotide
uaaagagugacgcugcucc

SEQ ID NO: 3206760 - RNA, 19 nt, Artificial Sequence
  Description of Artificial Sequence: Synthetic oligonucleotide
aacccuuccacuuuagaag

SEQ ID NO: 3206761 - RNA, 19 nt, Artificial Sequence
  Description of Artificial Sequence: Synthetic oligonucleotide
agauauuccacuuugcccu

SEQ ID NO: 3206762 - RNA, 19 nt, Artificial Sequence
  Description of Artificial Sequence: Synthetic oligonucleotide
uuuuccaccacauauuccu

SEQ ID NO: 3206763 - RNA, 19 nt, Artificial Sequence
  Description of Artificial Sequence: Synthetic oligonucleotide
uguauuguccucaucugag

SEQ ID NO: 3206764 - RNA, 19 nt, Artificial Sequence
  Description of Artificial Sequence: Synthetic oligonucleotide
uagaagauauuccacuuug

SEQ ID NO: 3206765 - RNA, 19 nt, Artificial Sequence
  Description of Artificial Sequence: Synthetic oligonucleotide
gaagauauuccacuuugcc

SEQ ID NO: 3206766 - RNA, 19 nt, Artificial Sequence
  Description of Artificial Sequence: Synthetic oligonucleotide
uuccucuucuucuagaacc

SEQ ID NO: 3206767 - RNA, 19 nt, Artificial Sequence
  Description of Artificial Sequence: Synthetic oligonucleotide
aacucgucgaucaagaacu

SEQ ID NO: 3206768 - RNA, 19 nt, Artificial Sequence
  Description of Artificial Sequence: Synthetic oligonucleotide
uccacuuucuucuuguucu

SEQ ID NO: 3206769 - RNA, 19 nt, Artificial Sequence
  Description of Artificial Sequence: Synthetic oligonucleotide
uccacuuugcccuugacaa

SEQ ID NO: 3206770 - RNA, 19 nt, Artificial Sequence
  Description of Artificial Sequence: Synthetic oligonucleotide
uucuucuagaaccuccucc

SEQ ID NO: 3206771 - RNA, 19 nt, Artificial Sequence
  Description of Artificial Sequence: Synthetic oligonucleotide
aauccagguucucuucugg

SEQ ID NO: 3206772 - RNA, 19 nt, Artificial Sequence
  Description of Artificial Sequence: Synthetic oligonucleotide
aaacccuuccacuuuagaa

SEQ ID NO: 3206773 - RNA, 19 nt, Artificial Sequence
  Description of Artificial Sequence: Synthetic oligonucleotide
uccacuuuagaagauauuc

SEQ ID NO: 3206774 - RNA, 19 nt, Artificial Sequence
  Description of Artificial Sequence: Synthetic oligonucleotide
aucugagaaacccuuccac

SEQ ID NO: 3206775 - RNA, 19 nt, Artificial Sequence
  Description of Artificial Sequence: Synthetic oligonucleotide
ucaucugagaaacccuucc

SEQ ID NO: 3206776 - RNA, 19 nt, Artificial Sequence
  Description of Artificial Sequence: Synthetic oligonucleotide
ucuucuagaaccuccucca

SEQ ID NO: 3206777 - RNA, 19 nt, Artificial Sequence
  Description of Artificial Sequence: Synthetic oligonucleotide
cuuuccgguguaaagagug

SEQ ID NO: 3206778 - RNA, 19 nt, Artificial Sequence
  Description of Artificial Sequence: Synthetic oligonucleotide
agaaucggugcuccgcugc

SEQ ID NO: 3206779 - RNA, 19 nt, Artificial Sequence
  Description of Artificial Sequence: Synthetic oligonucleotide
uuuagaagauauuccacuu

SEQ ID NO: 3206780 - RNA, 19 nt, Artificial Sequence
  Description of Artificial Sequence: Synthetic oligonucleotide
uccgguguaaagagugacg

SEQ ID NO: 3206781 - RNA, 19 nt, Artificial Sequence
  Description of Artificial Sequence: Synthetic oligonucleotide
ucugagaaacccuuccacu

SEQ ID NO: 3206782 - RNA, 19 nt, Artificial Sequence
  Description of Artificial Sequence: Synthetic oligonucleotide
acuuuagaagauauuccac

SEQ ID NO: 3206783 - RNA, 19 nt, Artificial Sequence
  Description of Artificial Sequence: Synthetic oligonucleotide
uauuguccucaucugagaa

SEQ ID NO: 3206784 - RNA, 19 nt, Artificial Sequence
  Description of Artificial Sequence: Synthetic oligonucleotide
ucuucuucuagaaccuccu

SEQ ID NO: 3206785 - RNA, 19 nt, Artificial Sequence
  Description of Artificial Sequence: Synthetic oligonucleotide
agcuuuccgguguaaagag

SEQ ID NO: 3206786 - RNA, 19 nt, Artificial Sequence
  Description of Artificial Sequence: Synthetic oligonucleotide
ugcccuugacaacucgucg

SEQ ID NO: 3206787 - RNA, 19 nt, Artificial Sequence
  Description of Artificial Sequence: Synthetic oligonucleotide
cacuuuagaagauauucca

SEQ ID NO: 3206788 - RNA, 19 nt, Artificial Sequence
  Description of Artificial Sequence: Synthetic oligonucleotide
agaagauauuccacuuugc

SEQ ID NO: 3206789 - RNA, 19 nt, Artificial Sequence
  Description of Artificial Sequence: Synthetic oligonucleotide
cuugacaacucgucgauca

SEQ ID NO: 3206790 - RNA, 19 nt, Artificial Sequence
  Description of Artificial Sequence: Synthetic oligonucleotide
ucuucuggcucccauguau

SEQ ID NO: 3206791 - RNA, 19 nt, Artificial Sequence
  Description of Artificial Sequence: Synthetic oligonucleotide
cucuucuucuagaaccucc

SEQ ID NO: 3206792 - RNA, 19 nt, Artificial Sequence
  Description of Artificial Sequence: Synthetic oligonucleotide
uuguccucaucugagaaac

SEQ ID NO: 3206793 - RNA, 19 nt, Artificial Sequence
  Description of Artificial Sequence: Synthetic oligonucleotide
ucuagaaccuccuccacuu

SEQ ID NO: 3206794 - RNA, 19 nt, Artificial Sequence
  Description of Artificial Sequence: Synthetic oligonucleotide
uuccacuuugcccuugaca

SEQ ID NO: 3206795 - RNA, 19 nt, Artificial Sequence
  Description of Artificial Sequence: Synthetic oligonucleotide
uuagaagauauuccacuuu

SEQ ID NO: 3206796 - RNA, 19 nt, Artificial Sequence
  Description of Artificial Sequence: Synthetic oligonucleotide
ucgucgaucaagaacuuuu

SEQ ID NO: 3206797 - RNA, 19 nt, Artificial Sequence
  Description of Artificial Sequence: Synthetic oligonucleotide
accuccuccacuuucuucu

SEQ ID NO: 3206798 - RNA, 19 nt, Artificial Sequence
  Description of Artificial Sequence: Synthetic oligonucleotide
auccagguucucuucuggc

SEQ ID NO: 3206799 - RNA, 19 nt, Artificial Sequence
  Description of Artificial Sequence: Synthetic oligonucleotide
uucuagaaccuccuccacu

SEQ ID NO: 3206800 - RNA, 19 nt, Artificial Sequence
  Description of Artificial Sequence: Synthetic oligonucleotide
ucucuucuggcucccaugu

SEQ ID NO: 3206801 - RNA, 19 nt, Artificial Sequence
  Description of Artificial Sequence: Synthetic oligonucleotide
aaccuccuccacuuucuuc

SEQ ID NO: 3206802 - RNA, 19 nt, Artificial Sequence
  Description of Artificial Sequence: Synthetic oligonucleotide
auuccucuuccucuucuuc

SEQ ID NO: 3206803 - RNA, 19 nt, Artificial Sequence
  Description of Artificial Sequence: Synthetic oligonucleotide
uuucuucuuguucuguuuu

SEQ ID NO: 3206804 - RNA, 19 nt, Artificial Sequence
  Description of Artificial Sequence: Synthetic oligonucleotide
cauguauuguccucaucug

SEQ ID NO: 3206805 - RNA, 19 nt, Artificial Sequence
  Description of Artificial Sequence: Synthetic oligonucleotide
auguauuguccucaucuga

SEQ ID NO: 3206806 - RNA, 19 nt, Artificial Sequence
  Description of Artificial Sequence: Synthetic oligonucleotide
uuugcccuugacaacucgu

SEQ ID NO: 3206807 - RNA, 19 nt, Artificial Sequence
  Description of Artificial Sequence: Synthetic oligonucleotide
guacccgccagcuuuccgg

SEQ ID NO: 3206808 - RNA, 19 nt, Artificial Sequence
  Description of Artificial Sequence: Synthetic oligonucleotide
uccgccaagaaucggugcu

SEQ ID NO: 3206809 - RNA, 19 nt, Artificial Sequence
  Description of Artificial Sequence: Synthetic oligonucleotide
caacucgucgaucaagaac

SEQ ID NO: 3206810 - RNA, 19 nt, Artificial Sequence
  Description of Artificial Sequence: Synthetic oligonucleotide
gguguaaagagugacgcug

SEQ ID NO: 3206811 - RNA, 19 nt, Artificial Sequence
  Description of Artificial Sequence: Synthetic oligonucleotide
cuuuagaagauauuccacu

SEQ ID NO: 3206812 - RNA, 19 nt, Artificial Sequence
  Description of Artificial Sequence: Synthetic oligonucleotide
ugacgcugcuccuagcagc

SEQ ID NO: 3206813 - RNA, 19 nt, Artificial Sequence
  Description of Artificial Sequence: Synthetic oligonucleotide
caccacauauuccucuucc

SEQ ID NO: 3206814 - RNA, 19 nt, Artificial Sequence
  Description of Artificial Sequence: Synthetic oligonucleotide
ucuuccucuucuucuagaa

SEQ ID NO: 3206815 - RNA, 19 nt, Artificial Sequence
  Description of Artificial Sequence: Synthetic oligonucleotide
uccucuucuucuagaaccu

SEQ ID NO: 3206816 - RNA, 19 nt, Artificial Sequence
  Description of Artificial Sequence: Synthetic oligonucleotide
uguaaagagugacgcugcu

SEQ ID NO: 3206817 - RNA, 19 nt, Artificial Sequence
  Description of Artificial Sequence: Synthetic oligonucleotide
agagugacgcugcuccuag

SEQ ID NO: 3206818 - RNA, 19 nt, Artificial Sequence
  Description of Artificial Sequence: Synthetic oligonucleotide
agugacgcugcuccuagca

SEQ ID NO: 3206819 - RNA, 19 nt, Artificial Sequence
  Description of Artificial Sequence: Synthetic oligonucleotide
uuccucuuccucuucuucu

SEQ ID NO: 3206820 - RNA, 19 nt, Artificial Sequence
  Description of Artificial Sequence: Synthetic oligonucleotide
acccuuccacuuuagaaga

SEQ ID NO: 3206821 - RNA, 19 nt, Artificial Sequence
  Description of Artificial Sequence: Synthetic oligonucleotide
uccucaucugagaaacccu

SEQ ID NO: 3206822 - RNA, 19 nt, Artificial Sequence
  Description of Artificial Sequence: Synthetic oligonucleotide
ugacaacucgucgaucaag

SEQ ID NO: 3206823 - RNA, 19 nt, Artificial Sequence
  Description of Artificial Sequence: Synthetic oligonucleotide
aaagagugacgcugcuccu

SEQ ID NO: 3206824 - RNA, 19 nt, Artificial Sequence
  Description of Artificial Sequence: Synthetic oligonucleotide
auauuccucuuccucuucu

SEQ ID NO: 3206825 - RNA, 19 nt, Artificial Sequence
  Description of Artificial Sequence: Synthetic oligonucleotide
ugagaaacccuuccacuuu

SEQ ID NO: 3206826 - RNA, 19 nt, Artificial Sequence
  Description of Artificial Sequence: Synthetic oligonucleotide
uuuccgguguaaagaguga

SEQ ID NO: 3206827 - RNA, 19 nt, Artificial Sequence
  Description of Artificial Sequence: Synthetic oligonucleotide
uccagguucucuucuggcu

SEQ ID NO: 3206828 - RNA, 19 nt, Artificial Sequence
  Description of Artificial Sequence: Synthetic oligonucleotide
uagaaccuccuccacuuuc

SEQ ID NO: 3206829 - RNA, 19 nt, Artificial Sequence
  Description of Artificial Sequence: Synthetic oligonucleotide
uuccccauaguacccgcca

SEQ ID NO: 3206830 - RNA, 19 nt, Artificial Sequence
  Description of Artificial Sequence: Synthetic oligonucleotide
cuagcagcgcccgagaguc

SEQ ID NO: 3206831 - RNA, 19 nt, Artificial Sequence
  Description of Artificial Sequence: Synthetic oligonucleotide
aagaaucggugcuccgcug

SEQ ID NO: 3206832 - RNA, 19 nt, Artificial Sequence
  Description of Artificial Sequence: Synthetic oligonucleotide
ccacuuuagaagauauucc

SEQ ID NO: 3206833 - RNA, 19 nt, Artificial Sequence
  Description of Artificial Sequence: Synthetic oligonucleotide
uuccaccacauauuccucu

SEQ ID NO: 3206834 - RNA, 19 nt, Artificial Sequence
  Description of Artificial Sequence: Synthetic oligonucleotide
uuuuccccauaguacccgc

SEQ ID NO: 3206835 - RNA, 19 nt, Artificial Sequence
  Description of Artificial Sequence: Synthetic oligonucleotide
uucucuucuggcucccaug

SEQ ID NO: 3206836 - RNA, 19 nt, Artificial Sequence
  Description of Artificial Sequence: Synthetic oligonucleotide
guccucaucugagaaaccc

SEQ ID NO: 3206837 - RNA, 19 nt, Artificial Sequence
  Description of Artificial Sequence: Synthetic oligonucleotide
uccuccacuuucuucuugu

SEQ ID NO: 3206838 - RNA, 19 nt, Artificial Sequence
  Description of Artificial Sequence: Synthetic oligonucleotide
uauuccacuuugcccuuga

SEQ ID NO: 3206839 - RNA, 19 nt, Artificial Sequence
  Description of Artificial Sequence: Synthetic oligonucleotide
gagaguccgccaagaaucg

SEQ ID NO: 3206840 - RNA, 19 nt, Artificial Sequence
  Description of Artificial Sequence: Synthetic oligonucleotide
gacgcugcuccuagcagcg

SEQ ID NO: 3206841 - RNA, 19 nt, Artificial Sequence
  Description of Artificial Sequence: Synthetic oligonucleotide
gacaacucgucgaucaaga

SEQ ID NO: 3206842 - RNA, 19 nt, Artificial Sequence
  Description of Artificial Sequence: Synthetic oligonucleotide
auuguccucaucugagaaa

SEQ ID NO: 3206843 - RNA, 19 nt, Artificial Sequence
  Description of Artificial Sequence: Synthetic oligonucleotide
aucggugcuccgcugcuag

SEQ ID NO: 3206844 - RNA, 19 nt, Artificial Sequence
  Description of Artificial Sequence: Synthetic oligonucleotide
uuuccccauaguacccgcc

SEQ ID NO: 3206845 - RNA, 19 nt, Artificial Sequence
  Description of Artificial Sequence: Synthetic oligonucleotide
uucuggcucccauguauug

SEQ ID NO: 3206846 - RNA, 19 nt, Artificial Sequence
  Description of Artificial Sequence: Synthetic oligonucleotide
uugcccuugacaacucguc

SEQ ID NO: 3206847 - RNA, 19 nt, Artificial Sequence
  Description of Artificial Sequence: Synthetic oligonucleotide
cuuugcccuugacaacucg

SEQ ID NO: 3206848 - RNA, 19 nt, Artificial Sequence
  Description of Artificial Sequence: Synthetic oligonucleotide
acauauuccucuuccucuu

SEQ ID NO: 3206849 - RNA, 19 nt, Artificial Sequence
  Description of Artificial Sequence: Synthetic oligonucleotide
uccuagcagcgcccgagag

SEQ ID NO: 3206850 - RNA, 19 nt, Artificial Sequence
  Description of Artificial Sequence: Synthetic oligonucleotide
uccccauaguacccgccag

SEQ ID NO: 3206851 - RNA, 19 nt, Artificial Sequence
  Description of Artificial Sequence: Synthetic oligonucleotide
acuuucuucuuguucuguu

SEQ ID NO: 3206852 - RNA, 19 nt, Artificial Sequence
  Description of Artificial Sequence: Synthetic oligonucleotide
cagguucucuucuggcucc

SEQ ID NO: 3206853 - RNA, 19 nt, Artificial Sequence
  Description of Artificial Sequence: Synthetic oligonucleotide
auuccacuuugcccuugac

SEQ ID NO: 3206854 - RNA, 19 nt, Artificial Sequence
  Description of Artificial Sequence: Synthetic oligonucleotide
accacauauuccucuuccu

SEQ ID NO: 3206855 - RNA, 19 nt, Artificial Sequence
  Description of Artificial Sequence: Synthetic oligonucleotide
guguaaagagugacgcugc

SEQ ID NO: 3206856 - RNA, 19 nt, Artificial Sequence
  Description of Artificial Sequence: Synthetic oligonucleotide
uuuccaccacauauuccuc

SEQ ID NO: 3206857 - RNA, 19 nt, Artificial Sequence
  Description of Artificial Sequence: Synthetic oligonucleotide
gaaacccuuccacuuuaga

SEQ ID NO: 3206858 - RNA, 19 nt, Artificial Sequence
  Description of Artificial Sequence: Synthetic oligonucleotide
aaaagaaacaauuaggcuc

SEQ ID NO: 3206859 - RNA, 19 nt, Artificial Sequence
  Description of Artificial Sequence: Synthetic oligonucleotide
uuauguauaauaaacagug

SEQ ID NO: 3206860 - RNA, 19 nt, Artificial Sequence
  Description of Artificial Sequence: Synthetic oligonucleotide
aaauuuaauaugcaaaugu

SEQ ID NO: 3206861 - RNA, 19 nt, Artificial Sequence
  Description of Artificial Sequence: Synthetic oligonucleotide
uuuauuucgaauuucaacu

SEQ ID NO: 3206862 - RNA, 19 nt, Artificial Sequence
  Description of Artificial Sequence: Synthetic oligonucleotide
uauauauugaauuacacau

SEQ ID NO: 3206863 - RNA, 19 nt, Artificial Sequence
  Description of Artificial Sequence: Synthetic oligonucleotide
aaagaaauguaucauauaa

SEQ ID NO: 3206864 - RNA, 19 nt, Artificial Sequence
  Description of Artificial Sequence: Synthetic oligonucleotide
uuauuauugccuuugagcc

SEQ ID NO: 3206865 - RNA, 19 nt, Artificial Sequence
  Description of Artificial Sequence: Synthetic oligonucleotide
ucauugaucacucagaaaa

SEQ ID NO: 3206866 - RNA, 19 nt, Artificial Sequence
  Description of Artificial Sequence: Synthetic oligonucleotide
acaauugcuagccuaaacc

SEQ ID NO: 3206867 - RNA, 19 nt, Artificial Sequence
  Description of Artificial Sequence: Synthetic oligonucleotide
uuuaguucugccuuguggg

SEQ ID NO: 3206868 - RNA, 19 nt, Artificial Sequence
  Description of Artificial Sequence: Synthetic oligonucleotide
aaagaaacccucuucaaca

SEQ ID NO: 3206869 - RNA, 19 nt, Artificial Sequence
  Description of Artificial Sequence: Synthetic oligonucleotide
auauaaauaacuguaacug

SEQ ID NO: 3206870 - RNA, 19 nt, Artificial Sequence
  Description of Artificial Sequence: Synthetic oligonucleotide
uaauacuuaaacaauugcu

SEQ ID NO: 3206871 - RNA, 19 nt, Artificial Sequence
  Description of Artificial Sequence: Synthetic oligonucleotide
acuuaaacaauugcuagcc

SEQ ID NO: 3206872 - RNA, 19 nt, Artificial Sequence
  Description of Artificial Sequence: Synthetic oligonucleotide
uaaauuaucucgcaauucu

SEQ ID NO: 3206873 - RNA, 19 nt, Artificial Sequence
  Description of Artificial Sequence: Synthetic oligonucleotide
uuuggaaagaugaugcuca

SEQ ID NO: 3206874 - RNA, 19 nt, Artificial Sequence
  Description of Artificial Sequence: Synthetic oligonucleotide
uaaaugaucacuaucccaa

SEQ ID NO: 3206875 - RNA, 19 nt, Artificial Sequence
  Description of Artificial Sequence: Synthetic oligonucleotide
uauaaauaacuguaacugc

SEQ ID NO: 3206876 - RNA, 19 nt, Artificial Sequence
  Description of Artificial Sequence: Synthetic oligonucleotide
uauauauuuaucucuggga

SEQ ID NO: 3206877 - RNA, 19 nt, Artificial Sequence
  Description of Artificial Sequence: Synthetic oligonucleotide
uaaauagucuuaaaauuac

SEQ ID NO: 3206878 - RNA, 19 nt, Artificial Sequence
  Description of Artificial Sequence: Synthetic oligonucleotide
uuuucauaaaauugaauuc

SEQ ID NO: 3206879 - RNA, 19 nt, Artificial Sequence
  Description of Artificial Sequence: Synthetic oligonucleotide
agguguacuggucaguucc

SEQ ID NO: 3206880 - RNA, 19 nt, Artificial Sequence
  Description of Artificial Sequence: Synthetic oligonucleotide
uugaauaaagacaugguuu

SEQ ID NO: 3206881 - RNA, 19 nt, Artificial Sequence
  Description of Artificial Sequence: Synthetic oligonucleotide
caagaauauacguauuccg

SEQ ID NO: 3206882 - RNA, 19 nt, Artificial Sequence
  Description of Artificial Sequence: Synthetic oligonucleotide
auacuuaaacaauugcuag

SEQ ID NO: 3206883 - RNA, 19 nt, Artificial Sequence
  Description of Artificial Sequence: Synthetic oligonucleotide
uguuaccacaguuugaucu

SEQ ID NO: 3206884 - RNA, 19 nt, Artificial Sequence
  Description of Artificial Sequence: Synthetic oligonucleotide
aaauauuuucccauccagg

SEQ ID NO: 3206885 - RNA, 19 nt, Artificial Sequence
  Description of Artificial Sequence: Synthetic oligonucleotide
auccauaaacaguauuugc

SEQ ID NO: 3206886 - RNA, 19 nt, Artificial Sequence
  Description of Artificial Sequence: Synthetic oligonucleotide
guuugaaauagucauuaag

SEQ ID NO: 3206887 - RNA, 19 nt, Artificial Sequence
  Description of Artificial Sequence: Synthetic oligonucleotide
uauaugugcacuugugucc

SEQ ID NO: 3206888 - RNA, 19 nt, Artificial Sequence
  Description of Artificial Sequence: Synthetic oligonucleotide
uuugaauaaagacaugguu

SEQ ID NO: 3206889 - RNA, 19 nt, Artificial Sequence
  Description of Artificial Sequence: Synthetic oligonucleotide
uuauccuauauacauuucu

SEQ ID NO: 3206890 - RNA, 19 nt, Artificial Sequence
  Description of Artificial Sequence: Synthetic oligonucleotide
aaacacucacaaaauuucc

SEQ ID NO: 3206891 - RNA, 19 nt, Artificial Sequence
  Description of Artificial Sequence: Synthetic oligonucleotide
uacacaaaugggaugaccu

SEQ ID NO: 3206892 - RNA, 19 nt, Artificial Sequence
  Description of Artificial Sequence: Synthetic oligonucleotide
uauccuauauacauuucug

SEQ ID NO: 3206893 - RNA, 19 nt, Artificial Sequence
  Description of Artificial Sequence: Synthetic oligonucleotide
uugugaaagaaauguauca

SEQ ID NO: 3206894 - RNA, 19 nt, Artificial Sequence
  Description of Artificial Sequence: Synthetic oligonucleotide
agcaagaauauacguauuc

SEQ ID NO: 3206895 - RNA, 19 nt, Artificial Sequence
  Description of Artificial Sequence: Synthetic oligonucleotide
aaggagacugaagaucucc

SEQ ID NO: 3206896 - RNA, 19 nt, Artificial Sequence
  Description of Artificial Sequence: Synthetic oligonucleotide
uuugugaaagaaauguauc

SEQ ID NO: 3206897 - RNA, 19 nt, Artificial Sequence
  Description of Artificial Sequence: Synthetic oligonucleotide
uagccuaaaccccaaacag

SEQ ID NO: 3206898 - RNA, 19 nt, Artificial Sequence
  Description of Artificial Sequence: Synthetic oligonucleotide
auguucaggcuauaguccc

SEQ ID NO: 3206899 - RNA, 19 nt, Artificial Sequence
  Description of Artificial Sequence: Synthetic oligonucleotide
ggaaagaugaugcucagag

SEQ ID NO: 3206900 - RNA, 19 nt, Artificial Sequence
  Description of Artificial Sequence: Synthetic oligonucleotide
ugcaaauguaccuaugacu

SEQ ID NO: 3206901 - RNA, 19 nt, Artificial Sequence
  Description of Artificial Sequence: Synthetic oligonucleotide
aaaugucauguuuggagug

SEQ ID NO: 3206902 - RNA, 19 nt, Artificial Sequence
  Description of Artificial Sequence: Synthetic oligonucleotide
uauguauaauaaacagugc

SEQ ID NO: 3206903 - RNA, 19 nt, Artificial Sequence
  Description of Artificial Sequence: Synthetic oligonucleotide
aauuaggcucuauuggaca

SEQ ID NO: 3206904 - RNA, 19 nt, Artificial Sequence
  Description of Artificial Sequence: Synthetic oligonucleotide
aauccauaaacaguauuug

SEQ ID NO: 3206905 - RNA, 19 nt, Artificial Sequence
  Description of Artificial Sequence: Synthetic oligonucleotide
uacaagauuucauaguuau

SEQ ID NO: 3206906 - RNA, 19 nt, Artificial Sequence
  Description of Artificial Sequence: Synthetic oligonucleotide
caauugcuagccuaaaccc

SEQ ID NO: 3206907 - RNA, 19 nt, Artificial Sequence
  Description of Artificial Sequence: Synthetic oligonucleotide
augcauguuugcuaaauag

SEQ ID NO: 3206908 - RNA, 19 nt, Artificial Sequence
  Description of Artificial Sequence: Synthetic oligonucleotide
uacuuaaacaauugcuagc

SEQ ID NO: 3206909 - RNA, 19 nt, Artificial Sequence
  Description of Artificial Sequence: Synthetic oligonucleotide
uugugaaguuugaauaaag

SEQ ID NO: 3206910 - RNA, 19 nt, Artificial Sequence
  Description of Artificial Sequence: Synthetic oligonucleotide
augcgauuccuacucaggc

SEQ ID NO: 3206911 - RNA, 19 nt, Artificial Sequence
  Description of Artificial Sequence: Synthetic oligonucleotide
uaaagacaugguuucagug

SEQ ID NO: 3206912 - RNA, 19 nt, Artificial Sequence
  Description of Artificial Sequence: Synthetic oligonucleotide
uauuggacauggaaaacac

SEQ ID NO: 3206913 - RNA, 19 nt, Artificial Sequence
  Description of Artificial Sequence: Synthetic oligonucleotide
uuucugcaaauuuggaaag

SEQ ID NO: 3206914 - RNA, 19 nt, Artificial Sequence
  Description of Artificial Sequence: Synthetic oligonucleotide
aaaucagcuauacaccuua

SEQ ID NO: 3206915 - RNA, 19 nt, Artificial Sequence
  Description of Artificial Sequence: Synthetic oligonucleotide
uuaaacaauugcuagccua

SEQ ID NO: 3206916 - RNA, 19 nt, Artificial Sequence
  Description of Artificial Sequence: Synthetic oligonucleotide
auaaauaacuguaacugca

SEQ ID NO: 3206917 - RNA, 19 nt, Artificial Sequence
  Description of Artificial Sequence: Synthetic oligonucleotide
acaauuaggcucuauugga

SEQ ID NO: 3206918 - RNA, 19 nt, Artificial Sequence
  Description of Artificial Sequence: Synthetic oligonucleotide
uguuuuaguaaaugucaug

SEQ ID NO: 3206919 - RNA, 19 nt, Artificial Sequence
  Description of Artificial Sequence: Synthetic oligonucleotide
aagaauauacguauuccga

SEQ ID NO: 3206920 - RNA, 19 nt, Artificial Sequence
  Description of Artificial Sequence: Synthetic oligonucleotide
auuuggaaagaugaugcuc

SEQ ID NO: 3206921 - RNA, 19 nt, Artificial Sequence
  Description of Artificial Sequence: Synthetic oligonucleotide
ugcauguuugcuaaauagu

SEQ ID NO: 3206922 - RNA, 19 nt, Artificial Sequence
  Description of Artificial Sequence: Synthetic oligonucleotide
agcuauacaccuuaaaauu

SEQ ID NO: 3206923 - RNA, 19 nt, Artificial Sequence
  Description of Artificial Sequence: Synthetic oligonucleotide
cauguucaggcuauagucc

SEQ ID NO: 3206924 - RNA, 19 nt, Artificial Sequence
  Description of Artificial Sequence: Synthetic oligonucleotide
aagacaugguuucagugaa

SEQ ID NO: 3206925 - RNA, 19 nt, Artificial Sequence
  Description of Artificial Sequence: Synthetic oligonucleotide
  modified_base (14)..(14): a, c, u, g, unknown or other
uauacauuucuguncuguc

SEQ ID NO: 3206926 - RNA, 19 nt, Artificial Sequence
  Description of Artificial Sequence: Synthetic oligonucleotide
gaguucucuggcauuaucg

SEQ ID NO: 3206927 - RNA, 19 nt, Artificial Sequence
  Description of Artificial Sequence: Synthetic oligonucleotide
aauucaaguggagacauuu

SEQ ID NO: 3206928 - RNA, 19 nt, Artificial Sequence
  Description of Artificial Sequence: Synthetic oligonucleotide
uucaaaauauugccuugug

SEQ ID NO: 3206929 - RNA, 19 nt, Artificial Sequence
  Description of Artificial Sequence: Synthetic oligonucleotide
auuauguauaauaaacagu

SEQ ID NO: 3206930 - RNA, 19 nt, Artificial Sequence
  Description of Artificial Sequence: Synthetic oligonucleotide
acaacacuaaaaccugcuc

SEQ ID NO: 3206931 - RNA, 19 nt, Artificial Sequence
  Description of Artificial Sequence: Synthetic oligonucleotide
ucuggcauuaucgauuucu

SEQ ID NO: 3206932 - RNA, 19 nt, Artificial Sequence
  Description of Artificial Sequence: Synthetic oligonucleotide
ugaaagguguacuggucag

SEQ ID NO: 3206933 - RNA, 19 nt, Artificial Sequence
  Description of Artificial Sequence: Synthetic oligonucleotide
caagcugggaaguuacagg

SEQ ID NO: 3206934 - RNA, 19 nt, Artificial Sequence
  Description of Artificial Sequence: Synthetic oligonucleotide
acuaacacauucaagcuca

SEQ ID NO: 3206935 - RNA, 19 nt, Artificial Sequence
  Description of Artificial Sequence: Synthetic oligonucleotide
ucaguacaauucaagugga

SEQ ID NO: 3206936 - RNA, 19 nt, Artificial Sequence
  Description of Artificial Sequence: Synthetic oligonucleotide
  modified_base (19)..(19): a, c, u, g, unknown or other
uccuauauacauuucugun

SEQ ID NO: 3206937 - RNA, 19 nt, Artificial Sequence
  Description of Artificial Sequence: Synthetic oligonucleotide
aaugaucacuaucccaaaa

SEQ ID NO: 3206938 - RNA, 19 nt, Artificial Sequence
  Description of Artificial Sequence: Synthetic oligonucleotide
ggaaaugccuaguuaacag

SEQ ID NO: 3206939 - RNA, 19 nt, Artificial Sequence
  Description of Artificial Sequence: Synthetic oligonucleotide
uucgaauuucaacuuccug

SEQ ID NO: 3206940 - RNA, 19 nt, Artificial Sequence
  Description of Artificial Sequence: Synthetic oligonucleotide
agacccaucugccacgauc

SEQ ID NO: 3206941 - RNA, 19 nt, Artificial Sequence
  Description of Artificial Sequence: Synthetic oligonucleotide
auacacaaaugggaugacc

SEQ ID NO: 3206942 - RNA, 19 nt, Artificial Sequence
  Description of Artificial Sequence: Synthetic oligonucleotide
uaugccucacauuaucagu

SEQ ID NO: 3206943 - RNA, 19 nt, Artificial Sequence
  Description of Artificial Sequence: Synthetic oligonucleotide
caaguccacauguucaggc

SEQ ID NO: 3206944 - RNA, 19 nt, Artificial Sequence
  Description of Artificial Sequence: Synthetic oligonucleotide
ucccauuaaaugaucacua

SEQ ID NO: 3206945 - RNA, 19 nt, Artificial Sequence
  Description of Artificial Sequence: Synthetic oligonucleotide
cuacugacaagcugggaag

SEQ ID NO: 3206946 - RNA, 19 nt, Artificial Sequence
  Description of Artificial Sequence: Synthetic oligonucleotide
uauuauugccuuugagcca

SEQ ID NO: 3206947 - RNA, 19 nt, Artificial Sequence
  Description of Artificial Sequence: Synthetic oligonucleotide
auaaagacaugguuucagu

SEQ ID NO: 3206948 - RNA, 19 nt, Artificial Sequence
  Description of Artificial Sequence: Synthetic oligonucleotide
auuugcccggcuaucagcc

SEQ ID NO: 3206949 - RNA, 19 nt, Artificial Sequence
  Description of Artificial Sequence: Synthetic oligonucleotide
uggaaaacacucacaaaau

SEQ ID NO: 3206950 - RNA, 19 nt, Artificial Sequence
  Description of Artificial Sequence: Synthetic oligonucleotide
auauacguauuccgaugcg

SEQ ID NO: 3206951 - RNA, 19 nt, Artificial Sequence
  Description of Artificial Sequence: Synthetic oligonucleotide
auccuauauacauuucugu

SEQ ID NO: 3206952 - RNA, 19 nt, Artificial Sequence
  Description of Artificial Sequence: Synthetic oligonucleotide
acguauuccgaugcgauuc

SEQ ID NO: 3206953 - RNA, 19 nt, Artificial Sequence
  Description of Artificial Sequence: Synthetic oligonucleotide
ucuaguguaagugaauguu

SEQ ID NO: 3206954 - RNA, 19 nt, Artificial Sequence
  Description of Artificial Sequence: Synthetic oligonucleotide
acacauucaagcucaguga

SEQ ID NO: 3206955 - RNA, 19 nt, Artificial Sequence
  Description of Artificial Sequence: Synthetic oligonucleotide
ugcugauuccugugaaagg

SEQ ID NO: 3206956 - RNA, 19 nt, Artificial Sequence
  Description of Artificial Sequence: Synthetic oligonucleotide
aaauagucuuaaaauuaca

SEQ ID NO: 3206957 - RNA, 19 nt, Artificial Sequence
  Description of Artificial Sequence: Synthetic oligonucleotide
aaugccuaguuaacaguuc

SEQ ID NO: 3206958 - RNA, 19 nt, Artificial Sequence
  Description of Artificial Sequence: Synthetic oligonucleotide
ugugaaaguauacaugugg

SEQ ID NO: 3206959 - RNA, 19 nt, Artificial Sequence
  Description of Artificial Sequence: Synthetic oligonucleotide
acuguuaucauauagugga

SEQ ID NO: 3206960 - RNA, 19 nt, Artificial Sequence
  Description of Artificial Sequence: Synthetic oligonucleotide
uuugugaaaguauacaugu

SEQ ID NO: 3206961 - RNA, 19 nt, Artificial Sequence
  Description of Artificial Sequence: Synthetic oligonucleotide
aucacuaauacugacugcc

SEQ ID NO: 3206962 - RNA, 19 nt, Artificial Sequence
  Description of Artificial Sequence: Synthetic oligonucleotide
aguuaugugccacacacuc

SEQ ID NO: 3206963 - RNA, 19 nt, Artificial Sequence
  Description of Artificial Sequence: Synthetic oligonucleotide
acuucaaagauguauguug

SEQ ID NO: 3206964 - RNA, 19 nt, Artificial Sequence
  Description of Artificial Sequence: Synthetic oligonucleotide
uauacauguggucuugggg

SEQ ID NO: 3206965 - RNA, 19 nt, Artificial Sequence
  Description of Artificial Sequence: Synthetic oligonucleotide
uguuguguuggcaagaagu

SEQ ID NO: 3206966 - RNA, 19 nt, Artificial Sequence
  Description of Artificial Sequence: Synthetic oligonucleotide
uucaacuguuaucauauag

SEQ ID NO: 3206967 - RNA, 19 nt, Artificial Sequence
  Description of Artificial Sequence: Synthetic oligonucleotide
uauucuguacagcaucugg

SEQ ID NO: 3206968 - RNA, 19 nt, Artificial Sequence
  Description of Artificial Sequence: Synthetic oligonucleotide
uuuugugaaaguauacaug

SEQ ID NO: 3206969 - RNA, 19 nt, Artificial Sequence
  Description of Artificial Sequence: Synthetic oligonucleotide
aaugugcugacauugcaug

SEQ ID NO: 3206970 - RNA, 19 nt, Artificial Sequence
  Description of Artificial Sequence: Synthetic oligonucleotide
aauacugacugccaguuau

SEQ ID NO: 3206971 - RNA, 19 nt, Artificial Sequence
  Description of Artificial Sequence: Synthetic oligonucleotide
ugaugcucuaacuucaaag

SEQ ID NO: 3206972 - RNA, 19 nt, Artificial Sequence
  Description of Artificial Sequence: Synthetic oligonucleotide
uggauaaucauuccauuug

SEQ ID NO: 3206973 - RNA, 19 nt, Artificial Sequence
  Description of Artificial Sequence: Synthetic oligonucleotide
ucaacuguuaucauauagu

SEQ ID NO: 3206974 - RNA, 19 nt, Artificial Sequence
  Description of Artificial Sequence: Synthetic oligonucleotide
cuaacuucaaagauguaug

SEQ ID NO: 3206975 - RNA, 19 nt, Artificial Sequence
  Description of Artificial Sequence: Synthetic oligonucleotide
aaagauguauguuguguug

SEQ ID NO: 3206976 - RNA, 19 nt, Artificial Sequence
  Description of Artificial Sequence: Synthetic oligonucleotide
cugacugccaguuaugugc

SEQ ID NO: 3206977 - RNA, 19 nt, Artificial Sequence
  Description of Artificial Sequence: Synthetic oligonucleotide
acaucacuaauacugacug

SEQ ID NO: 3206978 - RNA, 19 nt, Artificial Sequence
  Description of Artificial Sequence: Synthetic oligonucleotide
auauaguggauaaucauuc

SEQ ID NO: 3206979 - RNA, 19 nt, Artificial Sequence
  Description of Artificial Sequence: Synthetic oligonucleotide
gaaacuuucguagaauccc

SEQ ID NO: 3206980 - RNA, 19 nt, Artificial Sequence
  Description of Artificial Sequence: Synthetic oligonucleotide
aagauguauguuguguugg

SEQ ID NO: 3206981 - RNA, 19 nt, Artificial Sequence
  Description of Artificial Sequence: Synthetic oligonucleotide
uuggcaagaaguuuuguga

SEQ ID NO: 3206982 - RNA, 19 nt, Artificial Sequence
  Description of Artificial Sequence: Synthetic oligonucleotide
ugcucuaacuucaaagaug

SEQ ID NO: 3206983 - RNA, 19 nt, Artificial Sequence
  Description of Artificial Sequence: Synthetic oligonucleotide
ucuaacuucaaagauguau

SEQ ID NO: 3206984 - RNA, 19 nt, Artificial Sequence
  Description of Artificial Sequence: Synthetic oligonucleotide
uggggagaaacuuucguag

SEQ ID NO: 3206985 - RNA, 19 nt, Artificial Sequence
  Description of Artificial Sequence: Synthetic oligonucleotide
auacauguggucuugggga

SEQ ID NO: 3206986 - RNA, 19 nt, Artificial Sequence
  Description of Artificial Sequence: Synthetic oligonucleotide
uaucauauaguggauaauc

SEQ ID NO: 3206987 - RNA, 19 nt, Artificial Sequence
  Description of Artificial Sequence: Synthetic oligonucleotide
gaugcucuaacuucaaaga

SEQ ID NO: 3206988 - RNA, 19 nt, Artificial Sequence
  Description of Artificial Sequence: Synthetic oligonucleotide
uauauucuguacagcaucu

SEQ ID NO: 3206989 - RNA, 19 nt, Artificial Sequence
  Description of Artificial Sequence: Synthetic oligonucleotide
agaaacuuucguagaaucc

SEQ ID NO: 3206990 - RNA, 19 nt, Artificial Sequence
  Description of Artificial Sequence: Synthetic oligonucleotide
agauguauguuguguuggc

SEQ ID NO: 3206991 - RNA, 19 nt, Artificial Sequence
  Description of Artificial Sequence: Synthetic oligonucleotide
caacuguuaucauauagug

SEQ ID NO: 3206992 - RNA, 19 nt, Artificial Sequence
  Description of Artificial Sequence: Synthetic oligonucleotide
aacuguuaucauauagugg

SEQ ID NO: 3206993 - RNA, 19 nt, Artificial Sequence
  Description of Artificial Sequence: Synthetic oligonucleotide
uaaucauuccauuuguuuu

SEQ ID NO: 3206994 - RNA, 19 nt, Artificial Sequence
  Description of Artificial Sequence: Synthetic oligonucleotide
agguugaugcucuaacuuc

SEQ ID NO: 3206995 - RNA, 19 nt, Artificial Sequence
  Description of Artificial Sequence: Synthetic oligonucleotide
uuucguagaaucccuuuca

SEQ ID NO: 3206996 - RNA, 19 nt, Artificial Sequence
  Description of Artificial Sequence: Synthetic oligonucleotide
aaguuuugugaaaguauac

SEQ ID NO: 3206997 - RNA, 19 nt, Artificial Sequence
  Description of Artificial Sequence: Synthetic oligonucleotide
uguauguuguguuggcaag

SEQ ID NO: 3206998 - RNA, 19 nt, Artificial Sequence
  Description of Artificial Sequence: Synthetic oligonucleotide
ucaaagauguauguugugu

SEQ ID NO: 3206999 - RNA, 19 nt, Artificial Sequence
  Description of Artificial Sequence: Synthetic oligonucleotide
auugcaugugcuuuccuug

SEQ ID NO: 3207000 - RNA, 19 nt, Artificial Sequence
  Description of Artificial Sequence: Synthetic oligonucleotide
uguguuggcaagaaguuuu

SEQ ID NO: 3207001 - RNA, 19 nt, Artificial Sequence
  Description of Artificial Sequence: Synthetic oligonucleotide
uuaugugccacacacucua

SEQ ID NO: 3207002 - RNA, 19 nt, Artificial Sequence
  Description of Artificial Sequence: Synthetic oligonucleotide
ucccuuucaacuguuauca

SEQ ID NO: 3207003 - RNA, 19 nt, Artificial Sequence
  Description of Artificial Sequence: Synthetic oligonucleotide
cuauauucuguacagcauc

SEQ ID NO: 3207004 - RNA, 19 nt, Artificial Sequence
  Description of Artificial Sequence: Synthetic oligonucleotide
ucugucucggggaaugugc

SEQ ID NO: 3207005 - RNA, 19 nt, Artificial Sequence
  Description of Artificial Sequence: Synthetic oligonucleotide
auaaucauuccauuuguuu

SEQ ID NO: 3207006 - RNA, 19 nt, Artificial Sequence
  Description of Artificial Sequence: Synthetic oligonucleotide
auaguggauaaucauucca

SEQ ID NO: 3207007 - RNA, 19 nt, Artificial Sequence
  Description of Artificial Sequence: Synthetic oligonucleotide
cacucuauauucuguacag

SEQ ID NO: 3207008 - RNA, 19 nt, Artificial Sequence
  Description of Artificial Sequence: Synthetic oligonucleotide
uauaguggauaaucauucc

SEQ ID NO: 3207009 - RNA, 19 nt, Artificial Sequence
  Description of Artificial Sequence: Synthetic oligonucleotide
aaaguauacauguggucuu

SEQ ID NO: 3207010 - RNA, 19 nt, Artificial Sequence
  Description of Artificial Sequence: Synthetic oligonucleotide
ucauauaguggauaaucau

SEQ ID NO: 3207011 - RNA, 19 nt, Artificial Sequence
  Description of Artificial Sequence: Synthetic oligonucleotide
gagaaacuuucguagaauc

SEQ ID NO: 3207012 - RNA, 19 nt, Artificial Sequence
  Description of Artificial Sequence: Synthetic oligonucleotide
uuuccuugccuucaccagc

SEQ ID NO: 3207013 - RNA, 19 nt, Artificial Sequence
  Description of Artificial Sequence: Synthetic oligonucleotide
uuuuccagacccuucucug

SEQ ID NO: 3207014 - RNA, 19 nt, Artificial Sequence
  Description of Artificial Sequence: Synthetic oligonucleotide
guuggcaagaaguuuugug

SEQ ID NO: 3207015 - RNA, 19 nt, Artificial Sequence
  Description of Artificial Sequence: Synthetic oligonucleotide
aucccuuucaacuguuauc

SEQ ID NO: 3207016 - RNA, 19 nt, Artificial Sequence
  Description of Artificial Sequence: Synthetic oligonucleotide
cucuauauucuguacagca

SEQ ID NO: 3207017 - RNA, 19 nt, Artificial Sequence
  Description of Artificial Sequence: Synthetic oligonucleotide
uaguggauaaucauuccau

SEQ ID NO: 3207018 - RNA, 19 nt, Artificial Sequence
  Description of Artificial Sequence: Synthetic oligonucleotide
guagaaucccuuucaacug

SEQ ID NO: 3207019 - RNA, 19 nt, Artificial Sequence
  Description of Artificial Sequence: Synthetic oligonucleotide
ucuauauucuguacagcau

SEQ ID NO: 3207020 - RNA, 19 nt, Artificial Sequence
  Description of Artificial Sequence: Synthetic oligonucleotide
guuaucauauaguggauaa

SEQ ID NO: 3207021 - RNA, 19 nt, Artificial Sequence
  Description of Artificial Sequence: Synthetic oligonucleotide
aaucccuuucaacuguuau

SEQ ID NO: 3207022 - RNA, 19 nt, Artificial Sequence
  Description of Artificial Sequence: Synthetic oligonucleotide
ugaaaguauacaugugguc

SEQ ID NO: 3207023 - RNA, 19 nt, Artificial Sequence
  Description of Artificial Sequence: Synthetic oligonucleotide
gaaaguauacauguggucu

SEQ ID NO: 3207024 - RNA, 19 nt, Artificial Sequence
  Description of Artificial Sequence: Synthetic oligonucleotide
aguuuugugaaaguauaca

SEQ ID NO: 3207025 - RNA, 19 nt, Artificial Sequence
  Description of Artificial Sequence: Synthetic oligonucleotide
uaacuucaaagauguaugu

SEQ ID NO: 3207026 - RNA, 19 nt, Artificial Sequence
  Description of Artificial Sequence: Synthetic oligonucleotide
acuaauacugacugccagu

SEQ ID NO: 3207027 - RNA, 19 nt, Artificial Sequence
  Description of Artificial Sequence: Synthetic oligonucleotide
cuugccuucaccagcugag

SEQ ID NO: 3207028 - RNA, 19 nt, Artificial Sequence
  Description of Artificial Sequence: Synthetic oligonucleotide
ucuuggggagaaacuuucg

SEQ ID NO: 3207029 - RNA, 19 nt, Artificial Sequence
  Description of Artificial Sequence: Synthetic oligonucleotide
ugccacacacucuauauuc

SEQ ID NO: 3207030 - RNA, 19 nt, Artificial Sequence
  Description of Artificial Sequence: Synthetic oligonucleotide
acacucuauauucuguaca

SEQ ID NO: 3207031 - RNA, 19 nt, Artificial Sequence
  Description of Artificial Sequence: Synthetic oligonucleotide
guauacauguggucuuggg

SEQ ID NO: 3207032 - RNA, 19 nt, Artificial Sequence
  Description of Artificial Sequence: Synthetic oligonucleotide
uagaaucccuuucaacugu

SEQ ID NO: 3207033 - RNA, 19 nt, Artificial Sequence
  Description of Artificial Sequence: Synthetic oligonucleotide
aagaaguuuugugaaagua

SEQ ID NO: 3207034 - RNA, 19 nt, Artificial Sequence
  Description of Artificial Sequence: Synthetic oligonucleotide
uugugaaaguauacaugug

SEQ ID NO: 3207035 - RNA, 19 nt, Artificial Sequence
  Description of Artificial Sequence: Synthetic oligonucleotide
ucuguacagcaucuggaac

SEQ ID NO: 3207036 - RNA, 19 nt, Artificial Sequence
  Description of Artificial Sequence: Synthetic oligonucleotide
uacauguggucuuggggag

SEQ ID NO: 3207037 - RNA, 19 nt, Artificial Sequence
  Description of Artificial Sequence: Synthetic oligonucleotide
caccagcugagguugaugc

SEQ ID NO: 3207038 - RNA, 19 nt, Artificial Sequence
  Description of Artificial Sequence: Synthetic oligonucleotide
ugcuuuuccagacccuucu

SEQ ID NO: 3207039 - RNA, 19 nt, Artificial Sequence
  Description of Artificial Sequence: Synthetic oligonucleotide
ugugccacacacucuauau

SEQ ID NO: 3207040 - RNA, 19 nt, Artificial Sequence
  Description of Artificial Sequence: Synthetic oligonucleotide
uucaaagauguauguugug

SEQ ID NO: 3207041 - RNA, 19 nt, Artificial Sequence
  Description of Artificial Sequence: Synthetic oligonucleotide
gaccccacaucacuaauac

SEQ ID NO: 3207042 - RNA, 19 nt, Artificial Sequence
  Description of Artificial Sequence: Synthetic oligonucleotide
ugagguugaugcucuaacu

SEQ ID NO: 3207043 - RNA, 19 nt, Artificial Sequence
  Description of Artificial Sequence: Synthetic oligonucleotide
acucuauauucuguacagc

SEQ ID NO: 3207044 - RNA, 19 nt, Artificial Sequence
  Description of Artificial Sequence: Synthetic oligonucleotide
auguauguuguguuggcaa

SEQ ID NO: 3207045 - RNA, 19 nt, Artificial Sequence
  Description of Artificial Sequence: Synthetic oligonucleotide
uucuguacagcaucuggaa

SEQ ID NO: 3207046 - RNA, 19 nt, Artificial Sequence
  Description of Artificial Sequence: Synthetic oligonucleotide
ucacuaauacugacugcca

SEQ ID NO: 3207047 - RNA, 19 nt, Artificial Sequence
  Description of Artificial Sequence: Synthetic oligonucleotide
ugacugccaguuaugugcc

SEQ ID NO: 3207048 - RNA, 19 nt, Artificial Sequence
  Description of Artificial Sequence: Synthetic oligonucleotide
cacuaauacugacugccag

SEQ ID NO: 3207049 - RNA, 19 nt, Artificial Sequence
  Description of Artificial Sequence: Synthetic oligonucleotide
ccccacaucacuaauacug

SEQ ID NO: 3207050 - RNA, 19 nt, Artificial Sequence
  Description of Artificial Sequence: Synthetic oligonucleotide
gaaguuuugugaaaguaua

SEQ ID NO: 3207051 - RNA, 19 nt, Artificial Sequence
  Description of Artificial Sequence: Synthetic oligonucleotide
ugugcugacauugcaugug

SEQ ID NO: 3207052 - RNA, 19 nt, Artificial Sequence
  Description of Artificial Sequence: Synthetic oligonucleotide
aucauauaguggauaauca

SEQ ID NO: 3207053 - RNA, 19 nt, Artificial Sequence
  Description of Artificial Sequence: Synthetic oligonucleotide
cuuuccuugccuucaccag

SEQ ID NO: 3207054 - RNA, 19 nt, Artificial Sequence
  Description of Artificial Sequence: Synthetic oligonucleotide
agaaguuuugugaaaguau

SEQ ID NO: 3207055 - RNA, 19 nt, Artificial Sequence
  Description of Artificial Sequence: Synthetic oligonucleotide
uggcaagaaguuuugugaa

SEQ ID NO: 3207056 - RNA, 19 nt, Artificial Sequence
  Description of Artificial Sequence: Synthetic oligonucleotide
cuuucaacuguuaucauau

SEQ ID NO: 3207057 - RNA, 19 nt, Artificial Sequence
  Description of Artificial Sequence: Synthetic oligonucleotide
cuuucguagaaucccuuuc

SEQ ID NO: 3207058 - RNA, 19 nt, Artificial Sequence
  Description of Artificial Sequence: Synthetic oligonucleotide
aauuccaagaaacucaaag

SEQ ID NO: 3207059 - RNA, 19 nt, Artificial Sequence
  Description of Artificial Sequence: Synthetic oligonucleotide
uaaauuaugggcaagcuug

SEQ ID NO: 3207060 - RNA, 19 nt, Artificial Sequence
  Description of Artificial Sequence: Synthetic oligonucleotide
uuagaaauuauaaggaagc

SEQ ID NO: 3207061 - RNA, 19 nt, Artificial Sequence
  Description of Artificial Sequence: Synthetic oligonucleotide
aaugcuucacuuuagcggg

SEQ ID NO: 3207062 - RNA, 19 nt, Artificial Sequence
  Description of Artificial Sequence: Synthetic oligonucleotide
uguagaaaacuucagagug

SEQ ID NO: 3207063 - RNA, 19 nt, Artificial Sequence
  Description of Artificial Sequence: Synthetic oligonucleotide
ugcacaaucauccuguggg

SEQ ID NO: 3207064 - RNA, 19 nt, Artificial Sequence
  Description of Artificial Sequence: Synthetic oligonucleotide
cuuaaaguuaggauuaagg

SEQ ID NO: 3207065 - RNA, 19 nt, Artificial Sequence
  Description of Artificial Sequence: Synthetic oligonucleotide
uauaaaauaaacaaaccuu

SEQ ID NO: 3207066 - RNA, 19 nt, Artificial Sequence
  Description of Artificial Sequence: Synthetic oligonucleotide
agauuaaucaggcccaacc

SEQ ID NO: 3207067 - RNA, 19 nt, Artificial Sequence
  Description of Artificial Sequence: Synthetic oligonucleotide
uucgaaaucaccccuaaag

SEQ ID NO: 3207068 - RNA, 19 nt, Artificial Sequence
  Description of Artificial Sequence: Synthetic oligonucleotide
uuagcaucuguuuaguggg

SEQ ID NO: 3207069 - RNA, 19 nt, Artificial Sequence
  Description of Artificial Sequence: Synthetic oligonucleotide
uguuauguaaaccacacuu

SEQ ID NO: 3207070 - RNA, 19 nt, Artificial Sequence
  Description of Artificial Sequence: Synthetic oligonucleotide
uugaguauuacauucuuca

SEQ ID NO: 3207071 - RNA, 19 nt, Artificial Sequence
  Description of Artificial Sequence: Synthetic oligonucleotide
uaacuauacacacacauau

SEQ ID NO: 3207072 - RNA, 19 nt, Artificial Sequence
  Description of Artificial Sequence: Synthetic oligonucleotide
agaucgagcaacuacagug

SEQ ID NO: 3207073 - RNA, 19 nt, Artificial Sequence
  Description of Artificial Sequence: Synthetic oligonucleotide
ugugaugacugcuauuugg

SEQ ID NO: 3207074 - RNA, 19 nt, Artificial Sequence
  Description of Artificial Sequence: Synthetic oligonucleotide
acuauugcaauuucgucuc

SEQ ID NO: 3207075 - RNA, 19 nt, Artificial Sequence
  Description of Artificial Sequence: Synthetic oligonucleotide
ugugggaacuaucacuucg

SEQ ID NO: 3207076 - RNA, 19 nt, Artificial Sequence
  Description of Artificial Sequence: Synthetic oligonucleotide
uguuuaguggguuuagugc

SEQ ID NO: 3207077 - RNA, 19 nt, Artificial Sequence
  Description of Artificial Sequence: Synthetic oligonucleotide
uuagcuuacacacuuguau

SEQ ID NO: 3207078 - RNA, 19 nt, Artificial Sequence
  Description of Artificial Sequence: Synthetic oligonucleotide
uuaaaagugcggccaaggg

SEQ ID NO: 3207079 - RNA, 19 nt, Artificial Sequence
  Description of Artificial Sequence: Synthetic oligonucleotide
uuuuaugccaguugggaug

SEQ ID NO: 3207080 - RNA, 19 nt, Artificial Sequence
  Description of Artificial Sequence: Synthetic oligonucleotide
agugcuaaaccaucagagc

SEQ ID NO: 3207081 - RNA, 19 nt, Artificial Sequence
  Description of Artificial Sequence: Synthetic oligonucleotide
caagccucaauucagaaug

SEQ ID NO: 3207082 - RNA, 19 nt, Artificial Sequence
  Description of Artificial Sequence: Synthetic oligonucleotide
gacacaaagaccaagagaa

SEQ ID NO: 3207083 - RNA, 19 nt, Artificial Sequence
  Description of Artificial Sequence: Synthetic oligonucleotide
uacuauugcaauuucgucu

SEQ ID NO: 3207084 - RNA, 19 nt, Artificial Sequence
  Description of Artificial Sequence: Synthetic oligonucleotide
aauccuggcagaguuaagg

SEQ ID NO: 3207085 - RNA, 19 nt, Artificial Sequence
  Description of Artificial Sequence: Synthetic oligonucleotide
aguaucaucucuuuacucu

SEQ ID NO: 3207086 - RNA, 19 nt, Artificial Sequence
  Description of Artificial Sequence: Synthetic oligonucleotide
ucucucucaacaaucagca

SEQ ID NO: 3207087 - RNA, 19 nt, Artificial Sequence
  Description of Artificial Sequence: Synthetic oligonucleotide
uagaucaagugcuaaacca

SEQ ID NO: 3207088 - RNA, 19 nt, Artificial Sequence
  Description of Artificial Sequence: Synthetic oligonucleotide
ucucuuguagaaaacuuca

SEQ ID NO: 3207089 - RNA, 19 nt, Artificial Sequence
  Description of Artificial Sequence: Synthetic oligonucleotide
uaaaccaucagagcaaggc

SEQ ID NO: 3207090 - RNA, 19 nt, Artificial Sequence
  Description of Artificial Sequence: Synthetic oligonucleotide
acacuuauggucuaguagu

SEQ ID NO: 3207091 - RNA, 19 nt, Artificial Sequence
  Description of Artificial Sequence: Synthetic oligonucleotide
ucgaaaucaccccuaaagc

SEQ ID NO: 3207092 - RNA, 19 nt, Artificial Sequence
  Description of Artificial Sequence: Synthetic oligonucleotide
aucccaaggaaaaucaugc

SEQ ID NO: 3207093 - RNA, 19 nt, Artificial Sequence
  Description of Artificial Sequence: Synthetic oligonucleotide
auuguuauguaaaccacac

SEQ ID NO: 3207094 - RNA, 19 nt, Artificial Sequence
  Description of Artificial Sequence: Synthetic oligonucleotide
uggacagaaaagaggaugc

SEQ ID NO: 3207095 - RNA, 19 nt, Artificial Sequence
  Description of Artificial Sequence: Synthetic oligonucleotide
uuauguaaaccacacuuuc

SEQ ID NO: 3207096 - RNA, 19 nt, Artificial Sequence
  Description of Artificial Sequence: Synthetic oligonucleotide
uauguaaaccacacuuucc

SEQ ID NO: 3207097 - RNA, 19 nt, Artificial Sequence
  Description of Artificial Sequence: Synthetic oligonucleotide
aaaguucgaaaucaccccu

SEQ ID NO: 3207098 - RNA, 19 nt, Artificial Sequence
  Description of Artificial Sequence: Synthetic oligonucleotide
aacaaaaggaggcugcaau

SEQ ID NO: 3207099 - RNA, 19 nt, Artificial Sequence
  Description of Artificial Sequence: Synthetic oligonucleotide
uucagaaugcccuucggug

SEQ ID NO: 3207100 - RNA, 19 nt, Artificial Sequence
  Description of Artificial Sequence: Synthetic oligonucleotide
uuuugaggguauuaccuag

SEQ ID NO: 3207101 - RNA, 19 nt, Artificial Sequence
  Description of Artificial Sequence: Synthetic oligonucleotide
uaaaagugcggccaaggga

SEQ ID NO: 3207102 - RNA, 19 nt, Artificial Sequence
  Description of Artificial Sequence: Synthetic oligonucleotide
cacuuuugcgcccacaucc

SEQ ID NO: 3207103 - RNA, 19 nt, Artificial Sequence
  Description of Artificial Sequence: Synthetic oligonucleotide
cuuauggucuaguagucag

SEQ ID NO: 3207104 - RNA, 19 nt, Artificial Sequence
  Description of Artificial Sequence: Synthetic oligonucleotide
aauucagaaugcccuucgg

SEQ ID NO: 3207105 - RNA, 19 nt, Artificial Sequence
  Description of Artificial Sequence: Synthetic oligonucleotide
uuagcugaggucuuuauuu

SEQ ID NO: 3207106 - RNA, 19 nt, Artificial Sequence
  Description of Artificial Sequence: Synthetic oligonucleotide
auacuauugcaauuucguc

SEQ ID NO: 3207107 - RNA, 19 nt, Artificial Sequence
  Description of Artificial Sequence: Synthetic oligonucleotide
aauuucgucucuugaagaa

SEQ ID NO: 3207108 - RNA, 19 nt, Artificial Sequence
  Description of Artificial Sequence: Synthetic oligonucleotide
uagaauuagucuagaggag

SEQ ID NO: 3207109 - RNA, 19 nt, Artificial Sequence
  Description of Artificial Sequence: Synthetic oligonucleotide
uggaaaauccaccuuugac

SEQ ID NO: 3207110 - RNA, 19 nt, Artificial Sequence
  Description of Artificial Sequence: Synthetic oligonucleotide
auguaaaccacacuuucca

SEQ ID NO: 3207111 - RNA, 19 nt, Artificial Sequence
  Description of Artificial Sequence: Synthetic oligonucleotide
aaugaaagccacaaggaau

SEQ ID NO: 3207112 - RNA, 19 nt, Artificial Sequence
  Description of Artificial Sequence: Synthetic oligonucleotide
aacaaucagcagcugaaga

SEQ ID NO: 3207113 - RNA, 19 nt, Artificial Sequence
  Description of Artificial Sequence: Synthetic oligonucleotide
aaaccaucagagcaaggcu

SEQ ID NO: 3207114 - RNA, 19 nt, Artificial Sequence
  Description of Artificial Sequence: Synthetic oligonucleotide
aggauuaagggcuucacaa

SEQ ID NO: 3207115 - RNA, 19 nt, Artificial Sequence
  Description of Artificial Sequence: Synthetic oligonucleotide
aaaagugcggccaagggau

SEQ ID NO: 3207116 - RNA, 19 nt, Artificial Sequence
  Description of Artificial Sequence: Synthetic oligonucleotide
ugcacugccaaauuuguuc

SEQ ID NO: 3207117 - RNA, 19 nt, Artificial Sequence
  Description of Artificial Sequence: Synthetic oligonucleotide
aacaaaccuuaaaagugcg

SEQ ID NO: 3207118 - RNA, 19 nt, Artificial Sequence
  Description of Artificial Sequence: Synthetic oligonucleotide
auaaaauaaacaaaccuua

SEQ ID NO: 3207119 - RNA, 19 nt, Artificial Sequence
  Description of Artificial Sequence: Synthetic oligonucleotide
uuuaugccaguugggaugg

SEQ ID NO: 3207120 - RNA, 19 nt, Artificial Sequence
  Description of Artificial Sequence: Synthetic oligonucleotide
ucaagugcuaaaccaucag

SEQ ID NO: 3207121 - RNA, 19 nt, Artificial Sequence
  Description of Artificial Sequence: Synthetic oligonucleotide
auucacucaacucucuugu

SEQ ID NO: 3207122 - RNA, 19 nt, Artificial Sequence
  Description of Artificial Sequence: Synthetic oligonucleotide
gauucacucaacucucuug

SEQ ID NO: 3207123 - RNA, 19 nt, Artificial Sequence
  Description of Artificial Sequence: Synthetic oligonucleotide
uacugaacaggacugcaca

SEQ ID NO: 3207124 - RNA, 19 nt, Artificial Sequence
  Description of Artificial Sequence: Synthetic oligonucleotide
agucgguccacauagcuga

SEQ ID NO: 3207125 - RNA, 19 nt, Artificial Sequence
  Description of Artificial Sequence: Synthetic oligonucleotide
ugcaaggacagccacaauu

SEQ ID NO: 3207126 - RNA, 19 nt, Artificial Sequence
  Description of Artificial Sequence: Synthetic oligonucleotide
ugcaauuguuauguaaacc

SEQ ID NO: 3207127 - RNA, 19 nt, Artificial Sequence
  Description of Artificial Sequence: Synthetic oligonucleotide
uucagguuagggauguugu

SEQ ID NO: 3207128 - RNA, 19 nt, Artificial Sequence
  Description of Artificial Sequence: Synthetic oligonucleotide
uuuaguggguuuagugcag

SEQ ID NO: 3207129 - RNA, 19 nt, Artificial Sequence
  Description of Artificial Sequence: Synthetic oligonucleotide
uaccugaguuaaaacauca

SEQ ID NO: 3207130 - RNA, 19 nt, Artificial Sequence
  Description of Artificial Sequence: Synthetic oligonucleotide
cacaguagaauuagucuag

SEQ ID NO: 3207131 - RNA, 19 nt, Artificial Sequence
  Description of Artificial Sequence: Synthetic oligonucleotide
uucagauuugcaucccaag

SEQ ID NO: 3207132 - RNA, 19 nt, Artificial Sequence
  Description of Artificial Sequence: Synthetic oligonucleotide
agcaacuacaguguuaaug

SEQ ID NO: 3207133 - RNA, 19 nt, Artificial Sequence
  Description of Artificial Sequence: Synthetic oligonucleotide
gguauuaccuagcauacac

SEQ ID NO: 3207134 - RNA, 19 nt, Artificial Sequence
  Description of Artificial Sequence: Synthetic oligonucleotide
guuuaguggguuuagugca

SEQ ID NO: 3207135 - RNA, 19 nt, Artificial Sequence
  Description of Artificial Sequence: Synthetic oligonucleotide
cuuugcaucaugugggcac

SEQ ID NO: 3207136 - RNA, 19 nt, Artificial Sequence
  Description of Artificial Sequence: Synthetic oligonucleotide
uuucgucucuugaagaaaa

SEQ ID NO: 3207137 - RNA, 19 nt, Artificial Sequence
  Description of Artificial Sequence: Synthetic oligonucleotide
uuugaggguauuaccuagc

SEQ ID NO: 3207138 - RNA, 19 nt, Artificial Sequence
  Description of Artificial Sequence: Synthetic oligonucleotide
gaaucagugaggcaaucuc

SEQ ID NO: 3207139 - RNA, 19 nt, Artificial Sequence
  Description of Artificial Sequence: Synthetic oligonucleotide
aaguugguaacuauacaca

SEQ ID NO: 3207140 - RNA, 19 nt, Artificial Sequence
  Description of Artificial Sequence: Synthetic oligonucleotide
gugaccuccaauaauauga

SEQ ID NO: 3207141 - RNA, 19 nt, Artificial Sequence
  Description of Artificial Sequence: Synthetic oligonucleotide
ugaauucucucucaacaau

SEQ ID NO: 3207142 - RNA, 19 nt, Artificial Sequence
  Description of Artificial Sequence: Synthetic oligonucleotide
aauacugaacaggacugca

SEQ ID NO: 3207143 - RNA, 19 nt, Artificial Sequence
  Description of Artificial Sequence: Synthetic oligonucleotide
cuuaaaagugcggccaagg

SEQ ID NO: 3207144 - RNA, 19 nt, Artificial Sequence
  Description of Artificial Sequence: Synthetic oligonucleotide
ucuagaggaggagaggagc

SEQ ID NO: 3207145 - RNA, 19 nt, Artificial Sequence
  Description of Artificial Sequence: Synthetic oligonucleotide
aauuagucuagaggaggag

SEQ ID NO: 3207146 - RNA, 19 nt, Artificial Sequence
  Description of Artificial Sequence: Synthetic oligonucleotide
acagcaaaggugcugcuga

SEQ ID NO: 3207147 - RNA, 19 nt, Artificial Sequence
  Description of Artificial Sequence: Synthetic oligonucleotide
aacucucuuguagaaaacu

SEQ ID NO: 3207148 - RNA, 19 nt, Artificial Sequence
  Description of Artificial Sequence: Synthetic oligonucleotide
gacuucacaguagaauuag

SEQ ID NO: 3207149 - RNA, 19 nt, Artificial Sequence
  Description of Artificial Sequence: Synthetic oligonucleotide
ucagaaugcccuucggugu

SEQ ID NO: 3207150 - RNA, 19 nt, Artificial Sequence
  Description of Artificial Sequence: Synthetic oligonucleotide
acacacagaaauguucaac

SEQ ID NO: 3207151 - RNA, 19 nt, Artificial Sequence
  Description of Artificial Sequence: Synthetic oligonucleotide
caauucagaaugcccuucg

SEQ ID NO: 3207152 - RNA, 19 nt, Artificial Sequence
  Description of Artificial Sequence: Synthetic oligonucleotide
ugcuaaaccaucagagcaa

SEQ ID NO: 3207153 - RNA, 19 nt, Artificial Sequence
  Description of Artificial Sequence: Synthetic oligonucleotide
uagaaauuauaaggaagca

SEQ ID NO: 3207154 - RNA, 19 nt, Artificial Sequence
  Description of Artificial Sequence: Synthetic oligonucleotide
cacgcuuucacaaguauca

SEQ ID NO: 3207155 - RNA, 19 nt, Artificial Sequence
  Description of Artificial Sequence: Synthetic oligonucleotide
gagaggagcccaugcaggg

SEQ ID NO: 3207156 - RNA, 19 nt, Artificial Sequence
  Description of Artificial Sequence: Synthetic oligonucleotide
cagccagacaacauaacug

SEQ ID NO: 3207157 - RNA, 19 nt, Artificial Sequence
  Description of Artificial Sequence: Synthetic oligonucleotide
uaggauuaagggcuucaca

SEQ ID NO: 3207158 - RNA, 19 nt, Artificial Sequence
  Description of Artificial Sequence: Synthetic oligonucleotide
aaaaguauggagcagaaag

SEQ ID NO: 3207159 - RNA, 19 nt, Artificial Sequence
  Description of Artificial Sequence: Synthetic oligonucleotide
ugaagcaaaaguauggagc

SEQ ID NO: 3207160 - RNA, 19 nt, Artificial Sequence
  Description of Artificial Sequence: Synthetic oligonucleotide
uuuggcauccaacacacgg

SEQ ID NO: 3207161 - RNA, 19 nt, Artificial Sequence
  Description of Artificial Sequence: Synthetic oligonucleotide
aaaccauuuucugugaugg

SEQ ID NO: 3207162 - RNA, 19 nt, Artificial Sequence
  Description of Artificial Sequence: Synthetic oligonucleotide
aaaaccuuauuaguucucc

SEQ ID NO: 3207163 - RNA, 19 nt, Artificial Sequence
  Description of Artificial Sequence: Synthetic oligonucleotide
aaaagugcuuaggaaaacc

SEQ ID NO: 3207164 - RNA, 19 nt, Artificial Sequence
  Description of Artificial Sequence: Synthetic oligonucleotide
uuuaggaaaagcuaugcgu

SEQ ID NO: 3207165 - RNA, 19 nt, Artificial Sequence
  Description of Artificial Sequence: Synthetic oligonucleotide
aagaguuccgccuggcgcc

SEQ ID NO: 3207166 - RNA, 19 nt, Artificial Sequence
  Description of Artificial Sequence: Synthetic oligonucleotide
gauuguaggccacacaugc

SEQ ID NO: 3207167 - RNA, 19 nt, Artificial Sequence
  Description of Artificial Sequence: Synthetic oligonucleotide
uugaaguacgacuuggucc

SEQ ID NO: 3207168 - RNA, 19 nt, Artificial Sequence
  Description of Artificial Sequence: Synthetic oligonucleotide
uuuuauucuggguagacaa

SEQ ID NO: 3207169 - RNA, 19 nt, Artificial Sequence
  Description of Artificial Sequence: Synthetic oligonucleotide
aauguaugccuugaaguac

SEQ ID NO: 3207170 - RNA, 19 nt, Artificial Sequence
  Description of Artificial Sequence: Synthetic oligonucleotide
gauggaaucagcugguuug

SEQ ID NO: 3207171 - RNA, 19 nt, Artificial Sequence
  Description of Artificial Sequence: Synthetic oligonucleotide
ucuauuuggggacugcugc

SEQ ID NO: 3207172 - RNA, 19 nt, Artificial Sequence
  Description of Artificial Sequence: Synthetic oligonucleotide
acugcugaagcuuaaggag

SEQ ID NO: 3207173 - RNA, 19 nt, Artificial Sequence
  Description of Artificial Sequence: Synthetic oligonucleotide
cugaacauggcauucacac

SEQ ID NO: 3207174 - RNA, 19 nt, Artificial Sequence
  Description of Artificial Sequence: Synthetic oligonucleotide
aauuucuguguguaguuga

SEQ ID NO: 3207175 - RNA, 19 nt, Artificial Sequence
  Description of Artificial Sequence: Synthetic oligonucleotide
acaucauugagauaggcau

SEQ ID NO: 3207176 - RNA, 19 nt, Artificial Sequence
  Description of Artificial Sequence: Synthetic oligonucleotide
uucagauuugggcucaaag

SEQ ID NO: 3207177 - RNA, 19 nt, Artificial Sequence
  Description of Artificial Sequence: Synthetic oligonucleotide
ucuccugggaaacugaacu

SEQ ID NO: 3207178 - RNA, 19 nt, Artificial Sequence
  Description of Artificial Sequence: Synthetic oligonucleotide
gaagcaaaaguauggagca

SEQ ID NO: 3207179 - RNA, 19 nt, Artificial Sequence
  Description of Artificial Sequence: Synthetic oligonucleotide
ugagaggacacauuguaga

SEQ ID NO: 3207180 - RNA, 19 nt, Artificial Sequence
  Description of Artificial Sequence: Synthetic oligonucleotide
ugaaaagugcuuaggaaaa

SEQ ID NO: 3207181 - RNA, 19 nt, Artificial Sequence
  Description of Artificial Sequence: Synthetic oligonucleotide
uuuucugugauggaaucag

SEQ ID NO: 3207182 - RNA, 19 nt, Artificial Sequence
  Description of Artificial Sequence: Synthetic oligonucleotide
uguccuuuuauucugggua

SEQ ID NO: 3207183 - RNA, 19 nt, Artificial Sequence
  Description of Artificial Sequence: Synthetic oligonucleotide
uugaccacagagcugaggu

SEQ ID NO: 3207184 - RNA, 19 nt, Artificial Sequence
  Description of Artificial Sequence: Synthetic oligonucleotide
gauguuuggauuguaggcc

SEQ ID NO: 3207185 - RNA, 19 nt, Artificial Sequence
  Description of Artificial Sequence: Synthetic oligonucleotide
ugcucaaggcuucugaaca

SEQ ID NO: 3207186 - RNA, 19 nt, Artificial Sequence
  Description of Artificial Sequence: Synthetic oligonucleotide
uuucucaugguugacgugc

SEQ ID NO: 3207187 - RNA, 19 nt, Artificial Sequence
  Description of Artificial Sequence: Synthetic oligonucleotide
uggauuguaggccacacau

SEQ ID NO: 3207188 - RNA, 19 nt, Artificial Sequence
  Description of Artificial Sequence: Synthetic oligonucleotide
uguguugcagggaucaugu

SEQ ID NO: 3207189 - RNA, 19 nt, Artificial Sequence
  Description of Artificial Sequence: Synthetic oligonucleotide
uuauucuggguagacaaag

SEQ ID NO: 3207190 - RNA, 19 nt, Artificial Sequence
  Description of Artificial Sequence: Synthetic oligonucleotide
uuaaggagaugccaacccc

SEQ ID NO: 3207191 - RNA, 19 nt, Artificial Sequence
  Description of Artificial Sequence: Synthetic oligonucleotide
uguugcagggaucauguac

SEQ ID NO: 3207192 - RNA, 19 nt, Artificial Sequence
  Description of Artificial Sequence: Synthetic oligonucleotide
uucaacuuagcccucugcu

SEQ ID NO: 3207193 - RNA, 19 nt, Artificial Sequence
  Description of Artificial Sequence: Synthetic oligonucleotide
uaguugaagcaaaaguaug

SEQ ID NO: 3207194 - RNA, 19 nt, Artificial Sequence
  Description of Artificial Sequence: Synthetic oligonucleotide
uugaagcaaaaguauggag

SEQ ID NO: 3207195 - RNA, 19 nt, Artificial Sequence
  Description of Artificial Sequence: Synthetic oligonucleotide
accuuauuaguucuccuag

SEQ ID NO: 3207196 - RNA, 19 nt, Artificial Sequence
  Description of Artificial Sequence: Synthetic oligonucleotide
ugcgucaucugucuggccc

SEQ ID NO: 3207197 - RNA, 19 nt, Artificial Sequence
  Description of Artificial Sequence: Synthetic oligonucleotide
gacaagaaccuuuucucug

SEQ ID NO: 3207198 - RNA, 19 nt, Artificial Sequence
  Description of Artificial Sequence: Synthetic oligonucleotide
gaagaguuccgccuggcgc

SEQ ID NO: 3207199 - RNA, 19 nt, Artificial Sequence
  Description of Artificial Sequence: Synthetic oligonucleotide
gaucauguaccggaagucg

SEQ ID NO: 3207200 - RNA, 19 nt, Artificial Sequence
  Description of Artificial Sequence: Synthetic oligonucleotide
uagaggagaggguugacca

SEQ ID NO: 3207201 - RNA, 19 nt, Artificial Sequence
  Description of Artificial Sequence: Synthetic oligonucleotide
uaaaccauuuucugugaug

SEQ ID NO: 3207202 - RNA, 19 nt, Artificial Sequence
  Description of Artificial Sequence: Synthetic oligonucleotide
ucugugauggaaucagcug

SEQ ID NO: 3207203 - RNA, 19 nt, Artificial Sequence
  Description of Artificial Sequence: Synthetic oligonucleotide
uuugggcucaaagugaugu

SEQ ID NO: 3207204 - RNA, 19 nt, Artificial Sequence
  Description of Artificial Sequence: Synthetic oligonucleotide
aggaaaaugauggucuguc

SEQ ID NO: 3207205 - RNA, 19 nt, Artificial Sequence
  Description of Artificial Sequence: Synthetic oligonucleotide
accaaggccagccuggaag

SEQ ID NO: 3207206 - RNA, 19 nt, Artificial Sequence
  Description of Artificial Sequence: Synthetic oligonucleotide
ucuguggugacucgggacu

SEQ ID NO: 3207207 - RNA, 19 nt, Artificial Sequence
  Description of Artificial Sequence: Synthetic oligonucleotide
ugucucaucgccucggcug

SEQ ID NO: 3207208 - RNA, 19 nt, Artificial Sequence
  Description of Artificial Sequence: Synthetic oligonucleotide
guugccgcagccaugaucc

SEQ ID NO: 3207209 - RNA, 19 nt, Artificial Sequence
  Description of Artificial Sequence: Synthetic oligonucleotide
uuugcaacgggccgaggcc

SEQ ID NO: 3207210 - RNA, 19 nt, Artificial Sequence
  Description of Artificial Sequence: Synthetic oligonucleotide
caugcuaaccccacuuccg

SEQ ID NO: 3207211 - RNA, 19 nt, Artificial Sequence
  Description of Artificial Sequence: Synthetic oligonucleotide
agaaaagaggcagcucugc

SEQ ID NO: 3207212 - RNA, 19 nt, Artificial Sequence
  Description of Artificial Sequence: Synthetic oligonucleotide
cugaagcuuaaggagaugc

SEQ ID NO: 3207213 - RNA, 19 nt, Artificial Sequence
  Description of Artificial Sequence: Synthetic oligonucleotide
gaauuuaggaaaagcuaug

SEQ ID NO: 3207214 - RNA, 19 nt, Artificial Sequence
  Description of Artificial Sequence: Synthetic oligonucleotide
agcuuaaggagaugccaac

SEQ ID NO: 3207215 - RNA, 19 nt, Artificial Sequence
  Description of Artificial Sequence: Synthetic oligonucleotide
uuggcauccaacacacggc

SEQ ID NO: 3207216 - RNA, 19 nt, Artificial Sequence
  Description of Artificial Sequence: Synthetic oligonucleotide
aguauggagcagaaagccc

SEQ ID NO: 3207217 - RNA, 19 nt, Artificial Sequence
  Description of Artificial Sequence: Synthetic oligonucleotide
cugaaaagugcuuaggaaa

SEQ ID NO: 3207218 - RNA, 19 nt, Artificial Sequence
  Description of Artificial Sequence: Synthetic oligonucleotide
auccucagcagccugucuc

SEQ ID NO: 3207219 - RNA, 19 nt, Artificial Sequence
  Description of Artificial Sequence: Synthetic oligonucleotide
ugggaaacugaacuccgug

SEQ ID NO: 3207220 - RNA, 19 nt, Artificial Sequence
  Description of Artificial Sequence: Synthetic oligonucleotide
aaccuuauuaguucuccua

SEQ ID NO: 3207221 - RNA, 19 nt, Artificial Sequence
  Description of Artificial Sequence: Synthetic oligonucleotide
guugcagggaucauguacc

SEQ ID NO: 3207222 - RNA, 19 nt, Artificial Sequence
  Description of Artificial Sequence: Synthetic oligonucleotide
ugcaacacuccucuuugca

SEQ ID NO: 3207223 - RNA, 19 nt, Artificial Sequence
  Description of Artificial Sequence: Synthetic oligonucleotide
agaugccaaccccugcugc

SEQ ID NO: 3207224 - RNA, 19 nt, Artificial Sequence
  Description of Artificial Sequence: Synthetic oligonucleotide
cuuugcaacgggccgaggc

SEQ ID NO: 3207225 - RNA, 19 nt, Artificial Sequence
  Description of Artificial Sequence: Synthetic oligonucleotide
aaucagucucaggaaaaug

SEQ ID NO: 3207226 - RNA, 19 nt, Artificial Sequence
  Description of Artificial Sequence: Synthetic oligonucleotide
guugacgugcugcagaguc

SEQ ID NO: 3207227 - RNA, 19 nt, Artificial Sequence
  Description of Artificial Sequence: Synthetic oligonucleotide
caaggacugggccuuagcc

SEQ ID NO: 3207228 - RNA, 19 nt, Artificial Sequence
  Description of Artificial Sequence: Synthetic oligonucleotide
uuguaggccacacaugcua

SEQ ID NO: 3207229 - RNA, 19 nt, Artificial Sequence
  Description of Artificial Sequence: Synthetic oligonucleotide
ucagcugcugcaacacucc

SEQ ID NO: 3207230 - RNA, 19 nt, Artificial Sequence
  Description of Artificial Sequence: Synthetic oligonucleotide
gauccguguagccaccacc

SEQ ID NO: 3207231 - RNA, 19 nt, Artificial Sequence
  Description of Artificial Sequence: Synthetic oligonucleotide
ucagucucaggaaaaugau

SEQ ID NO: 3207232 - RNA, 19 nt, Artificial Sequence
  Description of Artificial Sequence: Synthetic oligonucleotide
agucgugugcauccucagc

SEQ ID NO: 3207233 - RNA, 19 nt, Artificial Sequence
  Description of Artificial Sequence: Synthetic oligonucleotide
agccaugauccgccgaacc

SEQ ID NO: 3207234 - RNA, 19 nt, Artificial Sequence
  Description of Artificial Sequence: Synthetic oligonucleotide
aucagucucaggaaaauga

SEQ ID NO: 3207235 - RNA, 19 nt, Artificial Sequence
  Description of Artificial Sequence: Synthetic oligonucleotide
ugcgugaagguaacuuugc

SEQ ID NO: 3207236 - RNA, 19 nt, Artificial Sequence
  Description of Artificial Sequence: Synthetic oligonucleotide
uuuauucuggguagacaaa

SEQ ID NO: 3207237 - RNA, 19 nt, Artificial Sequence
  Description of Artificial Sequence: Synthetic oligonucleotide
acgugcugcagagucagcc

SEQ ID NO: 3207238 - RNA, 19 nt, Artificial Sequence
  Description of Artificial Sequence: Synthetic oligonucleotide
auguuuggauuguaggcca

SEQ ID NO: 3207239 - RNA, 19 nt, Artificial Sequence
  Description of Artificial Sequence: Synthetic oligonucleotide
cuugaaguacgacuugguc

SEQ ID NO: 3207240 - RNA, 19 nt, Artificial Sequence
  Description of Artificial Sequence: Synthetic oligonucleotide
ugggccuuagccucucccg

SEQ ID NO: 3207241 - RNA, 19 nt, Artificial Sequence
  Description of Artificial Sequence: Synthetic oligonucleotide
agaggaagaguuccgccug

SEQ ID NO: 3207242 - RNA, 19 nt, Artificial Sequence
  Description of Artificial Sequence: Synthetic oligonucleotide
gaggcccaagaaaagaggc

SEQ ID NO: 3207243 - RNA, 19 nt, Artificial Sequence
  Description of Artificial Sequence: Synthetic oligonucleotide
cugagaggacacauuguag

SEQ ID NO: 3207244 - RNA, 19 nt, Artificial Sequence
  Description of Artificial Sequence: Synthetic oligonucleotide
acgcaggcguuucucaugg

SEQ ID NO: 3207245 - RNA, 19 nt, Artificial Sequence
  Description of Artificial Sequence: Synthetic oligonucleotide
augauggucugucgucucg

SEQ ID NO: 3207246 - RNA, 19 nt, Artificial Sequence
  Description of Artificial Sequence: Synthetic oligonucleotide
cauuuucugugauggaauc

SEQ ID NO: 3207247 - RNA, 19 nt, Artificial Sequence
  Description of Artificial Sequence: Synthetic oligonucleotide
aaaggggucuugaauuucu

SEQ ID NO: 3207248 - RNA, 19 nt, Artificial Sequence
  Description of Artificial Sequence: Synthetic oligonucleotide
ucccaaagccuccagcuuc

SEQ ID NO: 3207249 - RNA, 19 nt, Artificial Sequence
  Description of Artificial Sequence: Synthetic oligonucleotide
uaggcaucugcccuuccca

SEQ ID NO: 3207250 - RNA, 19 nt, Artificial Sequence
  Description of Artificial Sequence: Synthetic oligonucleotide
ggaaaaugauggucugucg

SEQ ID NO: 3207251 - RNA, 19 nt, Artificial Sequence
  Description of Artificial Sequence: Synthetic oligonucleotide
aagucgugugcauccucag

SEQ ID NO: 3207252 - RNA, 19 nt, Artificial Sequence
  Description of Artificial Sequence: Synthetic oligonucleotide
acuugguccagucaugcuu

SEQ ID NO: 3207253 - RNA, 19 nt, Artificial Sequence
  Description of Artificial Sequence: Synthetic oligonucleotide
ugaagguaacuuugcuucu

SEQ ID NO: 3207254 - RNA, 19 nt, Artificial Sequence
  Description of Artificial Sequence: Synthetic oligonucleotide
agucaugcuuggguguugc

SEQ ID NO: 3207255 - RNA, 19 nt, Artificial Sequence
  Description of Artificial Sequence: Synthetic oligonucleotide
aagaaaagaggcagcucug

SEQ ID NO: 3207256 - RNA, 19 nt, Artificial Sequence
  Description of Artificial Sequence: Synthetic oligonucleotide
uaguucuccuagaggaaga

SEQ ID NO: 3207257 - RNA, 19 nt, Artificial Sequence
  Description of Artificial Sequence: Synthetic oligonucleotide
guauggagcagaaagccca

SEQ ID NO: 3207258 - RNA, 19 nt, Artificial Sequence
  Description of Artificial Sequence: Synthetic oligonucleotide
agugaugucaggcaguacc

SEQ ID NO: 3207259 - RNA, 19 nt, Artificial Sequence
  Description of Artificial Sequence: Synthetic oligonucleotide
aagaccacuccucagcacc

SEQ ID NO: 3207260 - RNA, 19 nt, Artificial Sequence
  Description of Artificial Sequence: Synthetic oligonucleotide
aaucaaguacccuucauga

SEQ ID NO: 3207261 - RNA, 19 nt, Artificial Sequence
  Description of Artificial Sequence: Synthetic oligonucleotide
uagucuucugcacagaugc

SEQ ID NO: 3207262 - RNA, 19 nt, Artificial Sequence
  Description of Artificial Sequence: Synthetic oligonucleotide
ugaaugaacuccuccaggg

SEQ ID NO: 3207263 - RNA, 19 nt, Artificial Sequence
  Description of Artificial Sequence: Synthetic oligonucleotide
ucuucuccaaucaaguacc

SEQ ID NO: 3207264 - RNA, 19 nt, Artificial Sequence
  Description of Artificial Sequence: Synthetic oligonucleotide
ucugcacagaugcagauga

SEQ ID NO: 3207265 - RNA, 19 nt, Artificial Sequence
  Description of Artificial Sequence: Synthetic oligonucleotide
aaugaacuccuccagggcu

SEQ ID NO: 3207266 - RNA, 19 nt, Artificial Sequence
  Description of Artificial Sequence: Synthetic oligonucleotide
uucuucuccaaucaaguac

SEQ ID NO: 3207267 - RNA, 19 nt, Artificial Sequence
  Description of Artificial Sequence: Synthetic oligonucleotide
uucaugaaugaacuccucc

SEQ ID NO: 3207268 - RNA, 19 nt, Artificial Sequence
  Description of Artificial Sequence: Synthetic oligonucleotide
ucaugaaugaacuccucca

SEQ ID NO: 3207269 - RNA, 19 nt, Artificial Sequence
  Description of Artificial Sequence: Synthetic oligonucleotide
ucaucagcaccaauggcag

SEQ ID NO: 3207270 - RNA, 19 nt, Artificial Sequence
  Description of Artificial Sequence: Synthetic oligonucleotide
ucaaguacccuucaugaau

SEQ ID NO: 3207271 - RNA, 19 nt, Artificial Sequence
  Description of Artificial Sequence: Synthetic oligonucleotide
augaaugaacuccuccagg

SEQ ID NO: 3207272 - RNA, 19 nt, Artificial Sequence
  Description of Artificial Sequence: Synthetic oligonucleotide
aggucaucagcaccaaugg

SEQ ID NO: 3207273 - RNA, 19 nt, Artificial Sequence
  Description of Artificial Sequence: Synthetic oligonucleotide
uacccuucaugaaugaacu

SEQ ID NO: 3207274 - RNA, 19 nt, Artificial Sequence
  Description of Artificial Sequence: Synthetic oligonucleotide
cuccucagcaccacgaagg

SEQ ID NO: 3207275 - RNA, 19 nt, Artificial Sequence
  Description of Artificial Sequence: Synthetic oligonucleotide
augcagaugacccgaagag

SEQ ID NO: 3207276 - RNA, 19 nt, Artificial Sequence
  Description of Artificial Sequence: Synthetic oligonucleotide
ucugacaccaguuggggaa

SEQ ID NO: 3207277 - RNA, 19 nt, Artificial Sequence
  Description of Artificial Sequence: Synthetic oligonucleotide
caaucaaguacccuucaug

SEQ ID NO: 3207278 - RNA, 19 nt, Artificial Sequence
  Description of Artificial Sequence: Synthetic oligonucleotide
aguuggggaagaccacucc

SEQ ID NO: 3207279 - RNA, 19 nt, Artificial Sequence
  Description of Artificial Sequence: Synthetic oligonucleotide
acacucugacaccaguugg

SEQ ID NO: 3207280 - RNA, 19 nt, Artificial Sequence
  Description of Artificial Sequence: Synthetic oligonucleotide
ucuccaaucaaguacccuu

SEQ ID NO: 3207281 - RNA, 19 nt, Artificial Sequence
  Description of Artificial Sequence: Synthetic oligonucleotide
caggucaucagcaccaaug

SEQ ID NO: 3207282 - RNA, 19 nt, Artificial Sequence
  Description of Artificial Sequence: Synthetic oligonucleotide
caugaaugaacuccuccag

SEQ ID NO: 3207283 - RNA, 19 nt, Artificial Sequence
  Description of Artificial Sequence: Synthetic oligonucleotide
caaguacccuucaugaaug

SEQ ID NO: 3207284 - RNA, 19 nt, Artificial Sequence
  Description of Artificial Sequence: Synthetic oligonucleotide
accacgaaggacaggaugg

SEQ ID NO: 3207285 - RNA, 19 nt, Artificial Sequence
  Description of Artificial Sequence: Synthetic oligonucleotide
ucuucugcacagaugcaga

SEQ ID NO: 3207286 - RNA, 19 nt, Artificial Sequence
  Description of Artificial Sequence: Synthetic oligonucleotide
gaugcagaugacccgaaga

SEQ ID NO: 3207287 - RNA, 19 nt, Artificial Sequence
  Description of Artificial Sequence: Synthetic oligonucleotide
gacccgaagaguccgcacg

SEQ ID NO: 3207288 - RNA, 19 nt, Artificial Sequence
  Description of Artificial Sequence: Synthetic oligonucleotide
cucagcaccacgaaggaca

SEQ ID NO: 3207289 - RNA, 19 nt, Artificial Sequence
  Description of Artificial Sequence: Synthetic oligonucleotide
ucaggcaguacccuucuuc

SEQ ID NO: 3207290 - RNA, 19 nt, Artificial Sequence
  Description of Artificial Sequence: Synthetic oligonucleotide
gaaugaacuccuccagggc

SEQ ID NO: 3207291 - RNA, 19 nt, Artificial Sequence
  Description of Artificial Sequence: Synthetic oligonucleotide
cacucugacaccaguuggg

SEQ ID NO: 3207292 - RNA, 19 nt, Artificial Sequence
  Description of Artificial Sequence: Synthetic oligonucleotide
uacccuucuucuccaauca

SEQ ID NO: 3207293 - RNA, 19 nt, Artificial Sequence
  Description of Artificial Sequence: Synthetic oligonucleotide
ugcacagaugcagaugacc

SEQ ID NO: 3207294 - RNA, 19 nt, Artificial Sequence
  Description of Artificial Sequence: Synthetic oligonucleotide
aagaguccgcacgaugcac

SEQ ID NO: 3207295 - RNA, 19 nt, Artificial Sequence
  Description of Artificial Sequence: Synthetic oligonucleotide
ugggcagcaggucaucagc

SEQ ID NO: 3207296 - RNA, 19 nt, Artificial Sequence
  Description of Artificial Sequence: Synthetic oligonucleotide
gucaucagcaccaauggca

SEQ ID NO: 3207297 - RNA, 19 nt, Artificial Sequence
  Description of Artificial Sequence: Synthetic oligonucleotide
accaauggcagcagcaggg

SEQ ID NO: 3207298 - RNA, 19 nt, Artificial Sequence
  Description of Artificial Sequence: Synthetic oligonucleotide
cacagaugcagaugacccg

SEQ ID NO: 3207299 - RNA, 19 nt, Artificial Sequence
  Description of Artificial Sequence: Synthetic oligonucleotide
cugggauccagccucaguc

SEQ ID NO: 3207300 - RNA, 19 nt, Artificial Sequence
  Description of Artificial Sequence: Synthetic oligonucleotide
agcaccacgaaggacagga

SEQ ID NO: 3207301 - RNA, 19 nt, Artificial Sequence
  Description of Artificial Sequence: Synthetic oligonucleotide
ucaguccuggccucuuggg

SEQ ID NO: 3207302 - RNA, 19 nt, Artificial Sequence
  Description of Artificial Sequence: Synthetic oligonucleotide
ucagcaccacgaaggacag

SEQ ID NO: 3207303 - RNA, 19 nt, Artificial Sequence
  Description of Artificial Sequence: Synthetic oligonucleotide
acaccaguuggggaagacc

SEQ ID NO: 3207304 - RNA, 19 nt, Artificial Sequence
  Description of Artificial Sequence: Synthetic oligonucleotide
aguagucuucugcacagau

SEQ ID NO: 3207305 - RNA, 19 nt, Artificial Sequence
  Description of Artificial Sequence: Synthetic oligonucleotide
uccaaucaaguacccuuca

SEQ ID NO: 3207306 - RNA, 19 nt, Artificial Sequence
  Description of Artificial Sequence: Synthetic oligonucleotide
agaugacccgaagaguccg

SEQ ID NO: 3207307 - RNA, 19 nt, Artificial Sequence
  Description of Artificial Sequence: Synthetic oligonucleotide
aguccuggccucuugggca

SEQ ID NO: 3207308 - RNA, 19 nt, Artificial Sequence
  Description of Artificial Sequence: Synthetic oligonucleotide
acggcaguagucuucugca

SEQ ID NO: 3207309 - RNA, 19 nt, Artificial Sequence
  Description of Artificial Sequence: Synthetic oligonucleotide
guacccuucaugaaugaac

SEQ ID NO: 3207310 - RNA, 19 nt, Artificial Sequence
  Description of Artificial Sequence: Synthetic oligonucleotide
uggggaagaccacuccuca

SEQ ID NO: 3207311 - RNA, 19 nt, Artificial Sequence
  Description of Artificial Sequence: Synthetic oligonucleotide
gauccagccucaguccugg

SEQ ID NO: 3207312 - RNA, 19 nt, Artificial Sequence
  Description of Artificial Sequence: Synthetic oligonucleotide
gucuucugcacagaugcag

SEQ ID NO: 3207313 - RNA, 19 nt, Artificial Sequence
  Description of Artificial Sequence: Synthetic oligonucleotide
aacuccuccagggcugcac

SEQ ID NO: 3207314 - RNA, 19 nt, Artificial Sequence
  Description of Artificial Sequence: Synthetic oligonucleotide
aucagcaccaauggcagca

SEQ ID NO: 3207315 - RNA, 19 nt, Artificial Sequence
  Description of Artificial Sequence: Synthetic oligonucleotide
cacggcaguagucuucugc

SEQ ID NO: 3207316 - RNA, 19 nt, Artificial Sequence
  Description of Artificial Sequence: Synthetic oligonucleotide
cacacucugacaccaguug

SEQ ID NO: 3207317 - RNA, 19 nt, Artificial Sequence
  Description of Artificial Sequence: Synthetic oligonucleotide
aaguacccuucaugaauga

SEQ ID NO: 3207318 - RNA, 19 nt, Artificial Sequence
  Description of Artificial Sequence: Synthetic oligonucleotide
uccagccucaguccuggcc

SEQ ID NO: 3207319 - RNA, 19 nt, Artificial Sequence
  Description of Artificial Sequence: Synthetic oligonucleotide
uccagggcugcacacucug

SEQ ID NO: 3207320 - RNA, 19 nt, Artificial Sequence
  Description of Artificial Sequence: Synthetic oligonucleotide
uuggggaagaccacuccuc

SEQ ID NO: 3207321 - RNA, 19 nt, Artificial Sequence
  Description of Artificial Sequence: Synthetic oligonucleotide
ugggauccagccucagucc

SEQ ID NO: 3207322 - RNA, 19 nt, Artificial Sequence
  Description of Artificial Sequence: Synthetic oligonucleotide
ggcaguacccuucuucucc

SEQ ID NO: 3207323 - RNA, 19 nt, Artificial Sequence
  Description of Artificial Sequence: Synthetic oligonucleotide
acucugacaccaguugggg

SEQ ID NO: 3207324 - RNA, 19 nt, Artificial Sequence
  Description of Artificial Sequence: Synthetic oligonucleotide
cagaugacccgaagagucc

SEQ ID NO: 3207325 - RNA, 19 nt, Artificial Sequence
  Description of Artificial Sequence: Synthetic oligonucleotide
caccaguuggggaagacca

SEQ ID NO: 3207326 - RNA, 19 nt, Artificial Sequence
  Description of Artificial Sequence: Synthetic oligonucleotide
aaggacaggaugggcagca

SEQ ID NO: 3207327 - RNA, 19 nt, Artificial Sequence
  Description of Artificial Sequence: Synthetic oligonucleotide
ugcacacucugacaccagu

SEQ ID NO: 3207328 - RNA, 19 nt, Artificial Sequence
  Description of Artificial Sequence: Synthetic oligonucleotide
acagaugcagaugacccga

SEQ ID NO: 3207329 - RNA, 19 nt, Artificial Sequence
  Description of Artificial Sequence: Synthetic oligonucleotide
acuccucagcaccacgaag

SEQ ID NO: 3207330 - RNA, 19 nt, Artificial Sequence
  Description of Artificial Sequence: Synthetic oligonucleotide
cuccaaucaaguacccuuc

SEQ ID NO: 3207331 - RNA, 19 nt, Artificial Sequence
  Description of Artificial Sequence: Synthetic oligonucleotide
ucuugggcacggcaguagu

SEQ ID NO: 3207332 - RNA, 19 nt, Artificial Sequence
  Description of Artificial Sequence: Synthetic oligonucleotide
agaugcagaugacccgaag

SEQ ID NO: 3207333 - RNA, 19 nt, Artificial Sequence
  Description of Artificial Sequence: Synthetic oligonucleotide
uccucagcaccacgaagga

SEQ ID NO: 3207334 - RNA, 19 nt, Artificial Sequence
  Description of Artificial Sequence: Synthetic oligonucleotide
cucaguccuggccucuugg

SEQ ID NO: 3207335 - RNA, 19 nt, Artificial Sequence
  Description of Artificial Sequence: Synthetic oligonucleotide
guacccuucuucuccaauc

SEQ ID NO: 3207336 - RNA, 19 nt, Artificial Sequence
  Description of Artificial Sequence: Synthetic oligonucleotide
aucaaguacccuucaugaa

SEQ ID NO: 3207337 - RNA, 19 nt, Artificial Sequence
  Description of Artificial Sequence: Synthetic oligonucleotide
gcaguagucuucugcacag

SEQ ID NO: 3207338 - RNA, 19 nt, Artificial Sequence
  Description of Artificial Sequence: Synthetic oligonucleotide
ugucaggcaguacccuucu

SEQ ID NO: 3207339 - RNA, 19 nt, Artificial Sequence
  Description of Artificial Sequence: Synthetic oligonucleotide
uugggcacggcaguagucu

SEQ ID NO: 3207340 - RNA, 19 nt, Artificial Sequence
  Description of Artificial Sequence: Synthetic oligonucleotide
gggaagaccacuccucagc

SEQ ID NO: 3207341 - RNA, 19 nt, Artificial Sequence
  Description of Artificial Sequence: Synthetic oligonucleotide
caccaauggcagcagcagg

SEQ ID NO: 3207342 - RNA, 19 nt, Artificial Sequence
  Description of Artificial Sequence: Synthetic oligonucleotide
cuucuccaaucaaguaccc

SEQ ID NO: 3207343 - RNA, 19 nt, Artificial Sequence
  Description of Artificial Sequence: Synthetic oligonucleotide
cccuucaugaaugaacucc

SEQ ID NO: 3207344 - RNA, 19 nt, Artificial Sequence
  Description of Artificial Sequence: Synthetic oligonucleotide
gaagaguccgcacgaugca

SEQ ID NO: 3207345 - RNA, 19 nt, Artificial Sequence
  Description of Artificial Sequence: Synthetic oligonucleotide
caccacgaaggacaggaug

SEQ ID NO: 3207346 - RNA, 19 nt, Artificial Sequence
  Description of Artificial Sequence: Synthetic oligonucleotide
ugcagaugacccgaagagu

SEQ ID NO: 3207347 - RNA, 19 nt, Artificial Sequence
  Description of Artificial Sequence: Synthetic oligonucleotide
gugaugucaggcaguaccc

SEQ ID NO: 3207348 - RNA, 19 nt, Artificial Sequence
  Description of Artificial Sequence: Synthetic oligonucleotide
uucugcacagaugcagaug

SEQ ID NO: 3207349 - RNA, 19 nt, Artificial Sequence
  Description of Artificial Sequence: Synthetic oligonucleotide
augggcagcaggucaucag

SEQ ID NO: 3207350 - RNA, 19 nt, Artificial Sequence
  Description of Artificial Sequence: Synthetic oligonucleotide
acgaaggacaggaugggca

SEQ ID NO: 3207351 - RNA, 19 nt, Artificial Sequence
  Description of Artificial Sequence: Synthetic oligonucleotide
acccuucaugaaugaacuc

SEQ ID NO: 3207352 - RNA, 19 nt, Artificial Sequence
  Description of Artificial Sequence: Synthetic oligonucleotide
accacuccucagcaccacg

SEQ ID NO: 3207353 - RNA, 19 nt, Artificial Sequence
  Description of Artificial Sequence: Synthetic oligonucleotide
augucaggcaguacccuuc

SEQ ID NO: 3207354 - RNA, 19 nt, Artificial Sequence
  Description of Artificial Sequence: Synthetic oligonucleotide
gcacagaugcagaugaccc

SEQ ID NO: 3207355 - RNA, 19 nt, Artificial Sequence
  Description of Artificial Sequence: Synthetic oligonucleotide
gaagaccacuccucagcac

SEQ ID NO: 3207356 - RNA, 19 nt, Artificial Sequence
  Description of Artificial Sequence: Synthetic oligonucleotide
cuucaugaaugaacuccuc

SEQ ID NO: 3207357 - RNA, 19 nt, Artificial Sequence
  Description of Artificial Sequence: Synthetic oligonucleotide
aggcaguacccuucuucuc

SEQ ID NO: 3207358 - RNA, 19 nt, Artificial Sequence
  Description of Artificial Sequence: Synthetic oligonucleotide
acugauuggauuuugagag

SEQ ID NO: 3207359 - RNA, 19 nt, Artificial Sequence
  Description of Artificial Sequence: Synthetic oligonucleotide
aaagcugguauauuguccg

SEQ ID NO: 3207360 - RNA, 19 nt, Artificial Sequence
  Description of Artificial Sequence: Synthetic oligonucleotide
aauaugcugcggcaaaagc

SEQ ID NO: 3207361 - RNA, 19 nt, Artificial Sequence
  Description of Artificial Sequence: Synthetic oligonucleotide
aaaagacugguuuucucuc

SEQ ID NO: 3207362 - RNA, 19 nt, Artificial Sequence
  Description of Artificial Sequence: Synthetic oligonucleotide
uuucaaaauaugcugcggc

SEQ ID NO: 3207363 - RNA, 19 nt, Artificial Sequence
  Description of Artificial Sequence: Synthetic oligonucleotide
aaaagcugguauauugucc

SEQ ID NO: 3207364 - RNA, 19 nt, Artificial Sequence
  Description of Artificial Sequence: Synthetic oligonucleotide
uauauuguccgguugcucc

SEQ ID NO: 3207365 - RNA, 19 nt, Artificial Sequence
  Description of Artificial Sequence: Synthetic oligonucleotide
uuucuucucucccagauga

SEQ ID NO: 3207366 - RNA, 19 nt, Artificial Sequence
  Description of Artificial Sequence: Synthetic oligonucleotide
uuuucuuuaccucuucucu

SEQ ID NO: 3207367 - RNA, 19 nt, Artificial Sequence
  Description of Artificial Sequence: Synthetic oligonucleotide
ucaguagacuccucgaagg

SEQ ID NO: 3207368 - RNA, 19 nt, Artificial Sequence
  Description of Artificial Sequence: Synthetic oligonucleotide
gaaugcaugguuguuauag

SEQ ID NO: 3207369 - RNA, 19 nt, Artificial Sequence
  Description of Artificial Sequence: Synthetic oligonucleotide
gaagguuuucaaaauaugc

SEQ ID NO: 3207370 - RNA, 19 nt, Artificial Sequence
  Description of Artificial Sequence: Synthetic oligonucleotide
aaagccaguguccucacug

SEQ ID NO: 3207371 - RNA, 19 nt, Artificial Sequence
  Description of Artificial Sequence: Synthetic oligonucleotide
auagaagcgguccucuagc

SEQ ID NO: 3207372 - RNA, 19 nt, Artificial Sequence
  Description of Artificial Sequence: Synthetic oligonucleotide
uucuuguucacauuucuca

SEQ ID NO: 3207373 - RNA, 19 nt, Artificial Sequence
  Description of Artificial Sequence: Synthetic oligonucleotide
uguucuggguccuugaaug

SEQ ID NO: 3207374 - RNA, 19 nt, Artificial Sequence
  Description of Artificial Sequence: Synthetic oligonucleotide
ucugcuggagucaaaagac

SEQ ID NO: 3207375 - RNA, 19 nt, Artificial Sequence
  Description of Artificial Sequence: Synthetic oligonucleotide
uuggauuuugagagcagcg

SEQ ID NO: 3207376 - RNA, 19 nt, Artificial Sequence
  Description of Artificial Sequence: Synthetic oligonucleotide
agguuuucaaaauaugcug

SEQ ID NO: 3207377 - RNA, 19 nt, Artificial Sequence
  Description of Artificial Sequence: Synthetic oligonucleotide
guuuucaaaauaugcugcg

SEQ ID NO: 3207378 - RNA, 19 nt, Artificial Sequence
  Description of Artificial Sequence: Synthetic oligonucleotide
auuuucuuuaccucuucuc

SEQ ID NO: 3207379 - RNA, 19 nt, Artificial Sequence
  Description of Artificial Sequence: Synthetic oligonucleotide
uaugcugcggcaaaagcug

SEQ ID NO: 3207380 - RNA, 19 nt, Artificial Sequence
  Description of Artificial Sequence: Synthetic oligonucleotide
uucuuuaccucuucucugg

SEQ ID NO: 3207381 - RNA, 19 nt, Artificial Sequence
  Description of Artificial Sequence: Synthetic oligonucleotide
acauuucucaguuuguucu

SEQ ID NO: 3207382 - RNA, 19 nt, Artificial Sequence
  Description of Artificial Sequence: Synthetic oligonucleotide
uuuaccucuucucuggcca

SEQ ID NO: 3207383 - RNA, 19 nt, Artificial Sequence
  Description of Artificial Sequence: Synthetic oligonucleotide
uauagaagcgguccucuag

SEQ ID NO: 3207384 - RNA, 19 nt, Artificial Sequence
  Description of Artificial Sequence: Synthetic oligonucleotide
uucuagaagguuuucaaaa

SEQ ID NO: 3207385 - RNA, 19 nt, Artificial Sequence
  Description of Artificial Sequence: Synthetic oligonucleotide
uucugcuggagucaaaaga

SEQ ID NO: 3207386 - RNA, 19 nt, Artificial Sequence
  Description of Artificial Sequence: Synthetic oligonucleotide
aagguuuucaaaauaugcu

SEQ ID NO: 3207387 - RNA, 19 nt, Artificial Sequence
  Description of Artificial Sequence: Synthetic oligonucleotide
auuggauuuugagagcagc

SEQ ID NO: 3207388 - RNA, 19 nt, Artificial Sequence
  Description of Artificial Sequence: Synthetic oligonucleotide
acugguguuucuucucucc

SEQ ID NO: 3207389 - RNA, 19 nt, Artificial Sequence
  Description of Artificial Sequence: Synthetic oligonucleotide
uuuucuagaagguuuucaa

SEQ ID NO: 3207390 - RNA, 19 nt, Artificial Sequence
  Description of Artificial Sequence: Synthetic oligonucleotide
ucuuguucacauuucucag

SEQ ID NO: 3207391 - RNA, 19 nt, Artificial Sequence
  Description of Artificial Sequence: Synthetic oligonucleotide
ugcaugguuguuauagaag

SEQ ID NO: 3207392 - RNA, 19 nt, Artificial Sequence
  Description of Artificial Sequence: Synthetic oligonucleotide
uagaagguuuucaaaauau

SEQ ID NO: 3207393 - RNA, 19 nt, Artificial Sequence
  Description of Artificial Sequence: Synthetic oligonucleotide
uuuaucugaccucauuuuc

SEQ ID NO: 3207394 - RNA, 19 nt, Artificial Sequence
  Description of Artificial Sequence: Synthetic oligonucleotide
guucacauuucucaguuug

SEQ ID NO: 3207395 - RNA, 19 nt, Artificial Sequence
  Description of Artificial Sequence: Synthetic oligonucleotide
ugguauauuguccgguugc

SEQ ID NO: 3207396 - RNA, 19 nt, Artificial Sequence
  Description of Artificial Sequence: Synthetic oligonucleotide
uuaucugaccucauuuucu

SEQ ID NO: 3207397 - RNA, 19 nt, Artificial Sequence
  Description of Artificial Sequence: Synthetic oligonucleotide
uuuucaaaauaugcugcgg

SEQ ID NO: 3207398 - RNA, 19 nt, Artificial Sequence
  Description of Artificial Sequence: Synthetic oligonucleotide
guuguuauagaagcggucc

SEQ ID NO: 3207399 - RNA, 19 nt, Artificial Sequence
  Description of Artificial Sequence: Synthetic oligonucleotide
uuugagagcagcguacucc

SEQ ID NO: 3207400 - RNA, 19 nt, Artificial Sequence
  Description of Artificial Sequence: Synthetic oligonucleotide
uucaaaauaugcugcggca

SEQ ID NO: 3207401 - RNA, 19 nt, Artificial Sequence
  Description of Artificial Sequence: Synthetic oligonucleotide
auauuguccgguugcuccc

SEQ ID NO: 3207402 - RNA, 19 nt, Artificial Sequence
  Description of Artificial Sequence: Synthetic oligonucleotide
uuccucaguagacuccucg

SEQ ID NO: 3207403 - RNA, 19 nt, Artificial Sequence
  Description of Artificial Sequence: Synthetic oligonucleotide
augguuguuauagaagcgg

SEQ ID NO: 3207404 - RNA, 19 nt, Artificial Sequence
  Description of Artificial Sequence: Synthetic oligonucleotide
uuucuuuaccucuucucug

SEQ ID NO: 3207405 - RNA, 19 nt, Artificial Sequence
  Description of Artificial Sequence: Synthetic oligonucleotide
cucaguuuguucugggucc

SEQ ID NO: 3207406 - RNA, 19 nt, Artificial Sequence
  Description of Artificial Sequence: Synthetic oligonucleotide
agaugauuuggccauuucu

SEQ ID NO: 3207407 - RNA, 19 nt, Artificial Sequence
  Description of Artificial Sequence: Synthetic oligonucleotide
ugcuggagucaaaagacug

SEQ ID NO: 3207408 - RNA, 19 nt, Artificial Sequence
  Description of Artificial Sequence: Synthetic oligonucleotide
auuucuuguucacauuucu

SEQ ID NO: 3207409 - RNA, 19 nt, Artificial Sequence
  Description of Artificial Sequence: Synthetic oligonucleotide
aaugcaugguuguuauaga

SEQ ID NO: 3207410 - RNA, 19 nt, Artificial Sequence
  Description of Artificial Sequence: Synthetic oligonucleotide
aaauaugcugcggcaaaag

SEQ ID NO: 3207411 - RNA, 19 nt, Artificial Sequence
  Description of Artificial Sequence: Synthetic oligonucleotide
agacugauuggauuuugag

SEQ ID NO: 3207412 - RNA, 19 nt, Artificial Sequence
  Description of Artificial Sequence: Synthetic oligonucleotide
ucuagaagguuuucaaaau

SEQ ID NO: 3207413 - RNA, 19 nt, Artificial Sequence
  Description of Artificial Sequence: Synthetic oligonucleotide
ucucaguuuguucuggguc

SEQ ID NO: 3207414 - RNA, 19 nt, Artificial Sequence
  Description of Artificial Sequence: Synthetic oligonucleotide
cuccuuuucccuuucuucc

SEQ ID NO: 3207415 - RNA, 19 nt, Artificial Sequence
  Description of Artificial Sequence: Synthetic oligonucleotide
caugguuguuauagaagcg

SEQ ID NO: 3207416 - RNA, 19 nt, Artificial Sequence
  Description of Artificial Sequence: Synthetic oligonucleotide
ugauuggauuuugagagca

SEQ ID NO: 3207417 - RNA, 19 nt, Artificial Sequence
  Description of Artificial Sequence: Synthetic oligonucleotide
gacugauuggauuuugaga

SEQ ID NO: 3207418 - RNA, 19 nt, Artificial Sequence
  Description of Artificial Sequence: Synthetic oligonucleotide
aaagacugguuuucucucu

SEQ ID NO: 3207419 - RNA, 19 nt, Artificial Sequence
  Description of Artificial Sequence: Synthetic oligonucleotide
aguagacuccucgaaggcc

SEQ ID NO: 3207420 - RNA, 19 nt, Artificial Sequence
  Description of Artificial Sequence: Synthetic oligonucleotide
augauuuggccauuucuug

SEQ ID NO: 3207421 - RNA, 19 nt, Artificial Sequence
  Description of Artificial Sequence: Synthetic oligonucleotide
uggucuuccucuccuuucg

SEQ ID NO: 3207422 - RNA, 19 nt, Artificial Sequence
  Description of Artificial Sequence: Synthetic oligonucleotide
accucauuuucuuuaccuc

SEQ ID NO: 3207423 - RNA, 19 nt, Artificial Sequence
  Description of Artificial Sequence: Synthetic oligonucleotide
aagccaguguccucacugg

SEQ ID NO: 3207424 - RNA, 19 nt, Artificial Sequence
  Description of Artificial Sequence: Synthetic oligonucleotide
ucuccuuucgcuugggcac

SEQ ID NO: 3207425 - RNA, 19 nt, Artificial Sequence
  Description of Artificial Sequence: Synthetic oligonucleotide
uguuucuucucucccagau

SEQ ID NO: 3207426 - RNA, 19 nt, Artificial Sequence
  Description of Artificial Sequence: Synthetic oligonucleotide
gcaugguuguuauagaagc

SEQ ID NO: 3207427 - RNA, 19 nt, Artificial Sequence
  Description of Artificial Sequence: Synthetic oligonucleotide
uuuuaucugaccucauuuu

SEQ ID NO: 3207428 - RNA, 19 nt, Artificial Sequence
  Description of Artificial Sequence: Synthetic oligonucleotide
uucucuggccacauguccc

SEQ ID NO: 3207429 - RNA, 19 nt, Artificial Sequence
  Description of Artificial Sequence: Synthetic oligonucleotide
uuucucaguuuguucuggg

SEQ ID NO: 3207430 - RNA, 19 nt, Artificial Sequence
  Description of Artificial Sequence: Synthetic oligonucleotide
agucaaaagacugguuuuc

SEQ ID NO: 3207431 - RNA, 19 nt, Artificial Sequence
  Description of Artificial Sequence: Synthetic oligonucleotide
ugauuuggccauuucuugu

SEQ ID NO: 3207432 - RNA, 19 nt, Artificial Sequence
  Description of Artificial Sequence: Synthetic oligonucleotide
agcguacuccuccuuuucc

SEQ ID NO: 3207433 - RNA, 19 nt, Artificial Sequence
  Description of Artificial Sequence: Synthetic oligonucleotide
aacugguguuucuucucuc

SEQ ID NO: 3207434 - RNA, 19 nt, Artificial Sequence
  Description of Artificial Sequence: Synthetic oligonucleotide
guagacuccucgaaggccg

SEQ ID NO: 3207435 - RNA, 19 nt, Artificial Sequence
  Description of Artificial Sequence: Synthetic oligonucleotide
uuucuagaagguuuucaaa

SEQ ID NO: 3207436 - RNA, 19 nt, Artificial Sequence
  Description of Artificial Sequence: Synthetic oligonucleotide
ggcaaaagcugguauauug

SEQ ID NO: 3207437 - RNA, 19 nt, Artificial Sequence
  Description of Artificial Sequence: Synthetic oligonucleotide
uuguucacauuucucaguu

SEQ ID NO: 3207438 - RNA, 19 nt, Artificial Sequence
  Description of Artificial Sequence: Synthetic oligonucleotide
ucugaccucauuuucuuua

SEQ ID NO: 3207439 - RNA, 19 nt, Artificial Sequence
  Description of Artificial Sequence: Synthetic oligonucleotide
uucccuuucuuccucagua

SEQ ID NO: 3207440 - RNA, 19 nt, Artificial Sequence
  Description of Artificial Sequence: Synthetic oligonucleotide
gagagcagcguacuccucc

SEQ ID NO: 3207441 - RNA, 19 nt, Artificial Sequence
  Description of Artificial Sequence: Synthetic oligonucleotide
gauuuugagagcagcguac

SEQ ID NO: 3207442 - RNA, 19 nt, Artificial Sequence
  Description of Artificial Sequence: Synthetic oligonucleotide
uuucuuguucacauuucuc

SEQ ID NO: 3207443 - RNA, 19 nt, Artificial Sequence
  Description of Artificial Sequence: Synthetic oligonucleotide
ugguuguuauagaagcggu

SEQ ID NO: 3207444 - RNA, 19 nt, Artificial Sequence
  Description of Artificial Sequence: Synthetic oligonucleotide
caaaagcugguauauuguc

SEQ ID NO: 3207445 - RNA, 19 nt, Artificial Sequence
  Description of Artificial Sequence: Synthetic oligonucleotide
uaacugguguuucuucucu

SEQ ID NO: 3207446 - RNA, 19 nt, Artificial Sequence
  Description of Artificial Sequence: Synthetic oligonucleotide
uugaaugcaugguuguuau

SEQ ID NO: 3207447 - RNA, 19 nt, Artificial Sequence
  Description of Artificial Sequence: Synthetic oligonucleotide
uuguuauagaagcgguccu

SEQ ID NO: 3207448 - RNA, 19 nt, Artificial Sequence
  Description of Artificial Sequence: Synthetic oligonucleotide
ucucccagaugauuuggcc

SEQ ID NO: 3207449 - RNA, 19 nt, Artificial Sequence
  Description of Artificial Sequence: Synthetic oligonucleotide
auuuggccauuucuuguuc

SEQ ID NO: 3207450 - RNA, 19 nt, Artificial Sequence
  Description of Artificial Sequence: Synthetic oligonucleotide
aagcugguauauuguccgg

SEQ ID NO: 3207451 - RNA, 19 nt, Artificial Sequence
  Description of Artificial Sequence: Synthetic oligonucleotide
cucaguagacuccucgaag

SEQ ID NO: 3207452 - RNA, 19 nt, Artificial Sequence
  Description of Artificial Sequence: Synthetic oligonucleotide
gguuuucaaaauaugcugc

SEQ ID NO: 3207453 - RNA, 19 nt, Artificial Sequence
  Description of Artificial Sequence: Synthetic oligonucleotide
uugagagcagcguacuccu

SEQ ID NO: 3207454 - RNA, 19 nt, Artificial Sequence
  Description of Artificial Sequence: Synthetic oligonucleotide
uucacauuucucaguuugu

SEQ ID NO: 3207455 - RNA, 19 nt, Artificial Sequence
  Description of Artificial Sequence: Synthetic oligonucleotide
ucaaaagacugguuuucuc

SEQ ID NO: 3207456 - RNA, 19 nt, Artificial Sequence
  Description of Artificial Sequence: Synthetic oligonucleotide
ucaaaauaugcugcggcaa

SEQ ID NO: 3207457 - RNA, 19 nt, Artificial Sequence
  Description of Artificial Sequence: Synthetic oligonucleotide
uuucuuccucaguagacuc

SEQ ID NO: 3207458 - RNA, 19 nt, Artificial Sequence
  Description of Artificial Sequence: Synthetic oligonucleotide
aaauauauaauauauauuu

SEQ ID NO: 3207459 - RNA, 19 nt, Artificial Sequence
  Description of Artificial Sequence: Synthetic oligonucleotide
aaaauuaagaaauucuaag

SEQ ID NO: 3207460 - RNA, 19 nt, Artificial Sequence
  Description of Artificial Sequence: Synthetic oligonucleotide
uuuacauacauccagcacc

SEQ ID NO: 3207461 - RNA, 19 nt, Artificial Sequence
  Description of Artificial Sequence: Synthetic oligonucleotide
uuaagaaauucuaagaaca

SEQ ID NO: 3207462 - RNA, 19 nt, Artificial Sequence
  Description of Artificial Sequence: Synthetic oligonucleotide
guuauuaaaacucacggag

SEQ ID NO: 3207463 - RNA, 19 nt, Artificial Sequence
  Description of Artificial Sequence: Synthetic oligonucleotide
auuauuacaaaauuaacaa

SEQ ID NO: 3207464 - RNA, 19 nt, Artificial Sequence
  Description of Artificial Sequence: Synthetic oligonucleotide
aaugugacaccauuuuccc

SEQ ID NO: 3207465 - RNA, 19 nt, Artificial Sequence
  Description of Artificial Sequence: Synthetic oligonucleotide
auagucaucggacagcagc

SEQ ID NO: 3207466 - RNA, 19 nt, Artificial Sequence
  Description of Artificial Sequence: Synthetic oligonucleotide
aaugugauggauguguaac

SEQ ID NO: 3207467 - RNA, 19 nt, Artificial Sequence
  Description of Artificial Sequence: Synthetic oligonucleotide
aaauacuuucuccaauuuc

SEQ ID NO: 3207468 - RNA, 19 nt, Artificial Sequence
  Description of Artificial Sequence: Synthetic oligonucleotide
uugguuaauaaauuaaugu

SEQ ID NO: 3207469 - RNA, 19 nt, Artificial Sequence
  Description of Artificial Sequence: Synthetic oligonucleotide
uuauuaaauacuuucucca

SEQ ID NO: 3207470 - RNA, 19 nt, Artificial Sequence
  Description of Artificial Sequence: Synthetic oligonucleotide
uuguaaauauauaauauau

SEQ ID NO: 3207471 - RNA, 19 nt, Artificial Sequence
  Description of Artificial Sequence: Synthetic oligonucleotide
uuauuaaaacucacggagg

SEQ ID NO: 3207472 - RNA, 19 nt, Artificial Sequence
  Description of Artificial Sequence: Synthetic oligonucleotide
auuaacaccccaaaggacc

SEQ ID NO: 3207473 - RNA, 19 nt, Artificial Sequence
  Description of Artificial Sequence: Synthetic oligonucleotide
gagaguuagaauccgaucc

SEQ ID NO: 3207474 - RNA, 19 nt, Artificial Sequence
  Description of Artificial Sequence: Synthetic oligonucleotide
uaaugugacaccauuuucc

SEQ ID NO: 3207475 - RNA, 19 nt, Artificial Sequence
  Description of Artificial Sequence: Synthetic oligonucleotide
gaaggcagaagccagaagc

SEQ ID NO: 3207476 - RNA, 19 nt, Artificial Sequence
  Description of Artificial Sequence: Synthetic oligonucleotide
aacaagagcuccuuguguc

SEQ ID NO: 3207477 - RNA, 19 nt, Artificial Sequence
  Description of Artificial Sequence: Synthetic oligonucleotide
auauauaauauauauuuau

SEQ ID NO: 3207478 - RNA, 19 nt, Artificial Sequence
  Description of Artificial Sequence: Synthetic oligonucleotide
auuaacuaguccucugugc

SEQ ID NO: 3207479 - RNA, 19 nt, Artificial Sequence
  Description of Artificial Sequence: Synthetic oligonucleotide
aacacagacaaaucaaaca

SEQ ID NO: 3207480 - RNA, 19 nt, Artificial Sequence
  Description of Artificial Sequence: Synthetic oligonucleotide
uuagcaaauaucuauuuaa

SEQ ID NO: 3207481 - RNA, 19 nt, Artificial Sequence
  Description of Artificial Sequence: Synthetic oligonucleotide
uuaagaagacagaaggagc

SEQ ID NO: 3207482 - RNA, 19 nt, Artificial Sequence
  Description of Artificial Sequence: Synthetic oligonucleotide
uuuaacacugccauuuaug

SEQ ID NO: 3207483 - RNA, 19 nt, Artificial Sequence
  Description of Artificial Sequence: Synthetic oligonucleotide
uuaucaggaaacauucucc

SEQ ID NO: 3207484 - RNA, 19 nt, Artificial Sequence
  Description of Artificial Sequence: Synthetic oligonucleotide
uauuucucuucucaaagga

SEQ ID NO: 3207485 - RNA, 19 nt, Artificial Sequence
  Description of Artificial Sequence: Synthetic oligonucleotide
cuuaagaagacagaaggag

SEQ ID NO: 3207486 - RNA, 19 nt, Artificial Sequence
  Description of Artificial Sequence: Synthetic oligonucleotide
ugugacaccauuuucccug

SEQ ID NO: 3207487 - RNA, 19 nt, Artificial Sequence
  Description of Artificial Sequence: Synthetic oligonucleotide
aaacacacuacuugaauau

SEQ ID NO: 3207488 - RNA, 19 nt, Artificial Sequence
  Description of Artificial Sequence: Synthetic oligonucleotide
uuaacuaguccucugugcu

SEQ ID NO: 3207489 - RNA, 19 nt, Artificial Sequence
  Description of Artificial Sequence: Synthetic oligonucleotide
uccaauggaagucuguccc

SEQ ID NO: 3207490 - RNA, 19 nt, Artificial Sequence
  Description of Artificial Sequence: Synthetic oligonucleotide
cauuaauaucuguagaaac

SEQ ID NO: 3207491 - RNA, 19 nt, Artificial Sequence
  Description of Artificial Sequence: Synthetic oligonucleotide
ucuaucguaaauauuucuc

SEQ ID NO: 3207492 - RNA, 19 nt, Artificial Sequence
  Description of Artificial Sequence: Synthetic oligonucleotide
auuuacauacauccagcac

SEQ ID NO: 3207493 - RNA, 19 nt, Artificial Sequence
  Description of Artificial Sequence: Synthetic oligonucleotide
guaaauauauaauauauau

SEQ ID NO: 3207494 - RNA, 19 nt, Artificial Sequence
  Description of Artificial Sequence: Synthetic oligonucleotide
aaggccagcugccagacag

SEQ ID NO: 3207495 - RNA, 19 nt, Artificial Sequence
  Description of Artificial Sequence: Synthetic oligonucleotide
aaagugagugggugugucc

SEQ ID NO: 3207496 - RNA, 19 nt, Artificial Sequence
  Description of Artificial Sequence: Synthetic oligonucleotide
uguuauuaaaacucacgga

SEQ ID NO: 3207497 - RNA, 19 nt, Artificial Sequence
  Description of Artificial Sequence: Synthetic oligonucleotide
uaaauauauaauauauauu

SEQ ID NO: 3207498 - RNA, 19 nt, Artificial Sequence
  Description of Artificial Sequence: Synthetic oligonucleotide
uugauauucugagagaaca

SEQ ID NO: 3207499 - RNA, 19 nt, Artificial Sequence
  Description of Artificial Sequence: Synthetic oligonucleotide
aaaacacacuacuugaaua

SEQ ID NO: 3207500 - RNA, 19 nt, Artificial Sequence
  Description of Artificial Sequence: Synthetic oligonucleotide
ccaauaaccaguuaagucc

SEQ ID NO: 3207501 - RNA, 19 nt, Artificial Sequence
  Description of Artificial Sequence: Synthetic oligonucleotide
aacuaguccucugugcugc

SEQ ID NO: 3207502 - RNA, 19 nt, Artificial Sequence
  Description of Artificial Sequence: Synthetic oligonucleotide
uuacacaugugccaaauau

SEQ ID NO: 3207503 - RNA, 19 nt, Artificial Sequence
  Description of Artificial Sequence: Synthetic oligonucleotide
uccaauuauuacaaaauua

SEQ ID NO: 3207504 - RNA, 19 nt, Artificial Sequence
  Description of Artificial Sequence: Synthetic oligonucleotide
acauuaacaccccaaagga

SEQ ID NO: 3207505 - RNA, 19 nt, Artificial Sequence
  Description of Artificial Sequence: Synthetic oligonucleotide
aucguaaauauuucucuuc

SEQ ID NO: 3207506 - RNA, 19 nt, Artificial Sequence
  Description of Artificial Sequence: Synthetic oligonucleotide
aacagcauuuagcaaauau

SEQ ID NO: 3207507 - RNA, 19 nt, Artificial Sequence
  Description of Artificial Sequence: Synthetic oligonucleotide
uaccaauugguuaauaaau

SEQ ID NO: 3207508 - RNA, 19 nt, Artificial Sequence
  Description of Artificial Sequence: Synthetic oligonucleotide
uccauauauacaacuggag

SEQ ID NO: 3207509 - RNA, 19 nt, Artificial Sequence
  Description of Artificial Sequence: Synthetic oligonucleotide
ggauguguaacucaggcag

SEQ ID NO: 3207510 - RNA, 19 nt, Artificial Sequence
  Description of Artificial Sequence: Synthetic oligonucleotide
guaaguagguuccuggugc

SEQ ID NO: 3207511 - RNA, 19 nt, Artificial Sequence
  Description of Artificial Sequence: Synthetic oligonucleotide
gucagauguagcuaugagg

SEQ ID NO: 3207512 - RNA, 19 nt, Artificial Sequence
  Description of Artificial Sequence: Synthetic oligonucleotide
auuuauacauaauuugaau

SEQ ID NO: 3207513 - RNA, 19 nt, Artificial Sequence
  Description of Artificial Sequence: Synthetic oligonucleotide
ucuaaacauagucaucgga

SEQ ID NO: 3207514 - RNA, 19 nt, Artificial Sequence
  Description of Artificial Sequence: Synthetic oligonucleotide
aauaucuguagaaacauuu

SEQ ID NO: 3207515 - RNA, 19 nt, Artificial Sequence
  Description of Artificial Sequence: Synthetic oligonucleotide
uaucuugucagauguagcu

SEQ ID NO: 3207516 - RNA, 19 nt, Artificial Sequence
  Description of Artificial Sequence: Synthetic oligonucleotide
gagaauacuguucgagagg

SEQ ID NO: 3207517 - RNA, 19 nt, Artificial Sequence
  Description of Artificial Sequence: Synthetic oligonucleotide
gugguuaaacguuacacug

SEQ ID NO: 3207518 - RNA, 19 nt, Artificial Sequence
  Description of Artificial Sequence: Synthetic oligonucleotide
caaaggauccaauaaccag

SEQ ID NO: 3207519 - RNA, 19 nt, Artificial Sequence
  Description of Artificial Sequence: Synthetic oligonucleotide
agaacagaguccccaaagg

SEQ ID NO: 3207520 - RNA, 19 nt, Artificial Sequence
  Description of Artificial Sequence: Synthetic oligonucleotide
ugauauucugagagaacag

SEQ ID NO: 3207521 - RNA, 19 nt, Artificial Sequence
  Description of Artificial Sequence: Synthetic oligonucleotide
uagcuaugaggccagaucu

SEQ ID NO: 3207522 - RNA, 19 nt, Artificial Sequence
  Description of Artificial Sequence: Synthetic oligonucleotide
caauuauuacaaaauuaac

SEQ ID NO: 3207523 - RNA, 19 nt, Artificial Sequence
  Description of Artificial Sequence: Synthetic oligonucleotide
uccaauaaccaguuaaguc

SEQ ID NO: 3207524 - RNA, 19 nt, Artificial Sequence
  Description of Artificial Sequence: Synthetic oligonucleotide
ucuccaauuucaaaacaca

SEQ ID NO: 3207525 - RNA, 19 nt, Artificial Sequence
  Description of Artificial Sequence: Synthetic oligonucleotide
auuaauaucuguagaaaca

SEQ ID NO: 3207526 - RNA, 19 nt, Artificial Sequence
  Description of Artificial Sequence: Synthetic oligonucleotide
uauuuacauacauccagca

SEQ ID NO: 3207527 - RNA, 19 nt, Artificial Sequence
  Description of Artificial Sequence: Synthetic oligonucleotide
uuggaagcgugguuaaacg

SEQ ID NO: 3207528 - RNA, 19 nt, Artificial Sequence
  Description of Artificial Sequence: Synthetic oligonucleotide
aaacucacggaggagaugu

SEQ ID NO: 3207529 - RNA, 19 nt, Artificial Sequence
  Description of Artificial Sequence: Synthetic oligonucleotide
agaagacagaaggagcucc

SEQ ID NO: 3207530 - RNA, 19 nt, Artificial Sequence
  Description of Artificial Sequence: Synthetic oligonucleotide
uacacaugugccaaauaug

SEQ ID NO: 3207531 - RNA, 19 nt, Artificial Sequence
  Description of Artificial Sequence: Synthetic oligonucleotide
aaugauuaaucguuucgua

SEQ ID NO: 3207532 - RNA, 19 nt, Artificial Sequence
  Description of Artificial Sequence: Synthetic oligonucleotide
uuaauaucuguagaaacau

SEQ ID NO: 3207533 - RNA, 19 nt, Artificial Sequence
  Description of Artificial Sequence: Synthetic oligonucleotide
uaaguccaagcauagauua

SEQ ID NO: 3207534 - RNA, 19 nt, Artificial Sequence
  Description of Artificial Sequence: Synthetic oligonucleotide
ugauuaaucguuucguaua

SEQ ID NO: 3207535 - RNA, 19 nt, Artificial Sequence
  Description of Artificial Sequence: Synthetic oligonucleotide
gagaacacagaaucguccc

SEQ ID NO: 3207536 - RNA, 19 nt, Artificial Sequence
  Description of Artificial Sequence: Synthetic oligonucleotide
uaaacguuacacuggggug

SEQ ID NO: 3207537 - RNA, 19 nt, Artificial Sequence
  Description of Artificial Sequence: Synthetic oligonucleotide
cauaaaaucaguguaaucu

SEQ ID NO: 3207538 - RNA, 19 nt, Artificial Sequence
  Description of Artificial Sequence: Synthetic oligonucleotide
auuaaugugacaccauuuu

SEQ ID NO: 3207539 - RNA, 19 nt, Artificial Sequence
  Description of Artificial Sequence: Synthetic oligonucleotide
acauaaaaucaguguaauc

SEQ ID NO: 3207540 - RNA, 19 nt, Artificial Sequence
  Description of Artificial Sequence: Synthetic oligonucleotide
aagacauguucgcucaugu

SEQ ID NO: 3207541 - RNA, 19 nt, Artificial Sequence
  Description of Artificial Sequence: Synthetic oligonucleotide
aauauauaauauauauuua

SEQ ID NO: 3207542 - RNA, 19 nt, Artificial Sequence
  Description of Artificial Sequence: Synthetic oligonucleotide
cauggauuaaggcaucuug

SEQ ID NO: 3207543 - RNA, 19 nt, Artificial Sequence
  Description of Artificial Sequence: Synthetic oligonucleotide
ugggcuuuugauauucuga

SEQ ID NO: 3207544 - RNA, 19 nt, Artificial Sequence
  Description of Artificial Sequence: Synthetic oligonucleotide
gaaugugggucucugugag

SEQ ID NO: 3207545 - RNA, 19 nt, Artificial Sequence
  Description of Artificial Sequence: Synthetic oligonucleotide
aguguaaucugcauucagg

SEQ ID NO: 3207546 - RNA, 19 nt, Artificial Sequence
  Description of Artificial Sequence: Synthetic oligonucleotide
gauuaacuaguccucugug

SEQ ID NO: 3207547 - RNA, 19 nt, Artificial Sequence
  Description of Artificial Sequence: Synthetic oligonucleotide
uauacugcauuugugcucu

SEQ ID NO: 3207548 - RNA, 19 nt, Artificial Sequence
  Description of Artificial Sequence: Synthetic oligonucleotide
ugucagauguagcuaugag

SEQ ID NO: 3207549 - RNA, 19 nt, Artificial Sequence
  Description of Artificial Sequence: Synthetic oligonucleotide
ggugacaugauuccaacug

SEQ ID NO: 3207550 - RNA, 19 nt, Artificial Sequence
  Description of Artificial Sequence: Synthetic oligonucleotide
aacagguuucuuguaagug

SEQ ID NO: 3207551 - RNA, 19 nt, Artificial Sequence
  Description of Artificial Sequence: Synthetic oligonucleotide
uaagugggcauugaggugu

SEQ ID NO: 3207552 - RNA, 19 nt, Artificial Sequence
  Description of Artificial Sequence: Synthetic oligonucleotide
aaacguuacacugggguga

SEQ ID NO: 3207553 - RNA, 19 nt, Artificial Sequence
  Description of Artificial Sequence: Synthetic oligonucleotide
cacuacuugaauauggaga

SEQ ID NO: 3207554 - RNA, 19 nt, Artificial Sequence
  Description of Artificial Sequence: Synthetic oligonucleotide
augauuaaucguuucguau

SEQ ID NO: 3207555 - RNA, 19 nt, Artificial Sequence
  Description of Artificial Sequence: Synthetic oligonucleotide
acaugucugccuugagucc

SEQ ID NO: 3207556 - RNA, 19 nt, Artificial Sequence
  Description of Artificial Sequence: Synthetic oligonucleotide
uuaacaccccaaaggacca

SEQ ID NO: 3207557 - RNA, 19 nt, Artificial Sequence
  Description of Artificial Sequence: Synthetic oligonucleotide
agauuaacuaguccucugu

SEQ ID NO: 3207558 - RNA, 19 nt, Artificial Sequence
  Description of Artificial Sequence: Synthetic oligonucleotide
cuugguaccguccacauag

SEQ ID NO: 3207559 - RNA, 19 nt, Artificial Sequence
  Description of Artificial Sequence: Synthetic oligonucleotide
auuaucugugauuuugggg

SEQ ID NO: 3207560 - RNA, 19 nt, Artificial Sequence
  Description of Artificial Sequence: Synthetic oligonucleotide
gaguccaugagccugauca

SEQ ID NO: 3207561 - RNA, 19 nt, Artificial Sequence
  Description of Artificial Sequence: Synthetic oligonucleotide
agcuagaguaguuucacuc

SEQ ID NO: 3207562 - RNA, 19 nt, Artificial Sequence
  Description of Artificial Sequence: Synthetic oligonucleotide
uguccaaggagcuagagua

SEQ ID NO: 3207563 - RNA, 19 nt, Artificial Sequence
  Description of Artificial Sequence: Synthetic oligonucleotide
uauuaucugugauuuuggg

SEQ ID NO: 3207564 - RNA, 19 nt, Artificial Sequence
  Description of Artificial Sequence: Synthetic oligonucleotide
aacauauuaucugugauuu

SEQ ID NO: 3207565 - RNA, 19 nt, Artificial Sequence
  Description of Artificial Sequence: Synthetic oligonucleotide
aaggagcuagaguaguuuc

SEQ ID NO: 3207566 - RNA, 19 nt, Artificial Sequence
  Description of Artificial Sequence: Synthetic oligonucleotide
aaucugcguaccuggagac

SEQ ID NO: 3207567 - RNA, 19 nt, Artificial Sequence
  Description of Artificial Sequence: Synthetic oligonucleotide
cauauuaucugugauuuug

SEQ ID NO: 3207568 - RNA, 19 nt, Artificial Sequence
  Description of Artificial Sequence: Synthetic oligonucleotide
acaccugucagguaccacg

SEQ ID NO: 3207569 - RNA, 19 nt, Artificial Sequence
  Description of Artificial Sequence: Synthetic oligonucleotide
  modified_base (10)..(10): a, c, u, g, unknown or other
uccuccuugngaaaaggcu

SEQ ID NO: 3207570 - RNA, 19 nt, Artificial Sequence
  Description of Artificial Sequence: Synthetic oligonucleotide
accacugucgccuuugcag

SEQ ID NO: 3207571 - RNA, 19 nt, Artificial Sequence
  Description of Artificial Sequence: Synthetic oligonucleotide
cuuggcauguuccaggcag

SEQ ID NO: 3207572 - RNA, 19 nt, Artificial Sequence
  Description of Artificial Sequence: Synthetic oligonucleotide
ucggugaaccccaaccugg

SEQ ID NO: 3207573 - RNA, 19 nt, Artificial Sequence
  Description of Artificial Sequence: Synthetic oligonucleotide
aguaguuucacucggugaa

SEQ ID NO: 3207574 - RNA, 19 nt, Artificial Sequence
  Description of Artificial Sequence: Synthetic oligonucleotide
ucagguaccacgugccacg

SEQ ID NO: 3207575 - RNA, 19 nt, Artificial Sequence
  Description of Artificial Sequence: Synthetic oligonucleotide
ugguguauaccccaacaug

SEQ ID NO: 3207576 - RNA, 19 nt, Artificial Sequence
  Description of Artificial Sequence: Synthetic oligonucleotide
guaccguccacauagccag

SEQ ID NO: 3207577 - RNA, 19 nt, Artificial Sequence
  Description of Artificial Sequence: Synthetic oligonucleotide
uguauaccccaacauggcc

SEQ ID NO: 3207578 - RNA, 19 nt, Artificial Sequence
  Description of Artificial Sequence: Synthetic oligonucleotide
  modified_base (4)..(4): a, c, u, g, unknown or other
uugngaaaaggcugggcug

SEQ ID NO: 3207579 - RNA, 19 nt, Artificial Sequence
  Description of Artificial Sequence: Synthetic oligonucleotide
gguguauaccccaacaugg

SEQ ID NO: 3207580 - RNA, 19 nt, Artificial Sequence
  Description of Artificial Sequence: Synthetic oligonucleotide
ugaucagccaaucugcgua

SEQ ID NO: 3207581 - RNA, 19 nt, Artificial Sequence
  Description of Artificial Sequence: Synthetic oligonucleotide
aguuucacucggugaaccc

SEQ ID NO: 3207582 - RNA, 19 nt, Artificial Sequence
  Description of Artificial Sequence: Synthetic oligonucleotide
cuagaguaguuucacucgg

SEQ ID NO: 3207583 - RNA, 19 nt, Artificial Sequence
  Description of Artificial Sequence: Synthetic oligonucleotide
aacugugcuuggcauguuc

SEQ ID NO: 3207584 - RNA, 19 nt, Artificial Sequence
  Description of Artificial Sequence: Synthetic oligonucleotide
aacagcugcacagcccucc

SEQ ID NO: 3207585 - RNA, 19 nt, Artificial Sequence
  Description of Artificial Sequence: Synthetic oligonucleotide
uccaugagccugaucagcc

SEQ ID NO: 3207586 - RNA, 19 nt, Artificial Sequence
  Description of Artificial Sequence: Synthetic oligonucleotide
agcuuggaguccaugagcc

SEQ ID NO: 3207587 - RNA, 19 nt, Artificial Sequence
  Description of Artificial Sequence: Synthetic oligonucleotide
auggccaacagcugcacag

SEQ ID NO: 3207588 - RNA, 19 nt, Artificial Sequence
  Description of Artificial Sequence: Synthetic oligonucleotide
uuugcaggcauccuuggua

SEQ ID NO: 3207589 - RNA, 19 nt, Artificial Sequence
  Description of Artificial Sequence: Synthetic oligonucleotide
gagacccugguguauaccc

SEQ ID NO: 3207590 - RNA, 19 nt, Artificial Sequence
  Description of Artificial Sequence: Synthetic oligonucleotide
ugaaccccaaccuggagcu

SEQ ID NO: 3207591 - RNA, 19 nt, Artificial Sequence
  Description of Artificial Sequence: Synthetic oligonucleotide
agaacauauuaucugugau

SEQ ID NO: 3207592 - RNA, 19 nt, Artificial Sequence
  Description of Artificial Sequence: Synthetic oligonucleotide
auauuaucugugauuuugg

SEQ ID NO: 3207593 - RNA, 19 nt, Artificial Sequence
  Description of Artificial Sequence: Synthetic oligonucleotide
  modified_base (8)..(8): a, c, u, g, unknown or other
cuccuugngaaaaggcugg

SEQ ID NO: 3207594 - RNA, 19 nt, Artificial Sequence
  Description of Artificial Sequence: Synthetic oligonucleotide
aaggcugggcuguccaagg

SEQ ID NO: 3207595 - RNA, 19 nt, Artificial Sequence
  Description of Artificial Sequence: Synthetic oligonucleotide
uaccuggagacccuggugu

SEQ ID NO: 3207596 - RNA, 19 nt, Artificial Sequence
  Description of Artificial Sequence: Synthetic oligonucleotide
aguguguggcaugugggcc

SEQ ID NO: 3207597 - RNA, 19 nt, Artificial Sequence
  Description of Artificial Sequence: Synthetic oligonucleotide
agccugaucagccaaucug

SEQ ID NO: 3207598 - RNA, 19 nt, Artificial Sequence
  Description of Artificial Sequence: Synthetic oligonucleotide
agaguaguuucacucggug

SEQ ID NO: 3207599 - RNA, 19 nt, Artificial Sequence
  Description of Artificial Sequence: Synthetic oligonucleotide
gguaguguguggcaugugg

SEQ ID NO: 3207600 - RNA, 19 nt, Artificial Sequence
  Description of Artificial Sequence: Synthetic oligonucleotide
gguguuagaacugugcuug

SEQ ID NO: 3207601 - RNA, 19 nt, Artificial Sequence
  Description of Artificial Sequence: Synthetic oligonucleotide
uuucacucggugaacccca

SEQ ID NO: 3207602 - RNA, 19 nt, Artificial Sequence
  Description of Artificial Sequence: Synthetic oligonucleotide
gaccacaccugucagguac

SEQ ID NO: 3207603 - RNA, 19 nt, Artificial Sequence
  Description of Artificial Sequence: Synthetic oligonucleotide
agccaaucugcguaccugg

SEQ ID NO: 3207604 - RNA, 19 nt, Artificial Sequence
  Description of Artificial Sequence: Synthetic oligonucleotide
ucugcguaccuggagaccc

SEQ ID NO: 3207605 - RNA, 19 nt, Artificial Sequence
  Description of Artificial Sequence: Synthetic oligonucleotide
uuagaacugugcuuggcau

SEQ ID NO: 3207606 - RNA, 19 nt, Artificial Sequence
  Description of Artificial Sequence: Synthetic oligonucleotide
gcuagaguaguuucacucg

SEQ ID NO: 3207607 - RNA, 19 nt, Artificial Sequence
  Description of Artificial Sequence: Synthetic oligonucleotide
caacauggccaacagcugc

SEQ ID NO: 3207608 - RNA, 19 nt, Artificial Sequence
  Description of Artificial Sequence: Synthetic oligonucleotide
  modified_base (3)..(3): a, c, u, g, unknown or other
ugngaaaaggcugggcugu

SEQ ID NO: 3207609 - RNA, 19 nt, Artificial Sequence
  Description of Artificial Sequence: Synthetic oligonucleotide
acauagccagcgcagaaca

SEQ ID NO: 3207610 - RNA, 19 nt, Artificial Sequence
  Description of Artificial Sequence: Synthetic oligonucleotide
  modified_base (11)..(11): a, c, u, g, unknown or other
uuccuccuugngaaaaggc

SEQ ID NO: 3207611 - RNA, 19 nt, Artificial Sequence
  Description of Artificial Sequence: Synthetic oligonucleotide
acugugcuuggcauguucc

SEQ ID NO: 3207612 - RNA, 19 nt, Artificial Sequence
  Description of Artificial Sequence: Synthetic oligonucleotide
uggagcuuggaguccauga

SEQ ID NO: 3207613 - RNA, 19 nt, Artificial Sequence
  Description of Artificial Sequence: Synthetic oligonucleotide
guuagaacugugcuuggca

SEQ ID NO: 3207614 - RNA, 19 nt, Artificial Sequence
  Description of Artificial Sequence: Synthetic oligonucleotide
cacucggugaaccccaacc

SEQ ID NO: 3207615 - RNA, 19 nt, Artificial Sequence
  Description of Artificial Sequence: Synthetic oligonucleotide
aaaggcugggcuguccaag

SEQ ID NO: 3207616 - RNA, 19 nt, Artificial Sequence
  Description of Artificial Sequence: Synthetic oligonucleotide
gugaaccccaaccuggagc

SEQ ID NO: 3207617 - RNA, 19 nt, Artificial Sequence
  Description of Artificial Sequence: Synthetic oligonucleotide
gagcuuggaguccaugagc

SEQ ID NO: 3207618 - RNA, 19 nt, Artificial Sequence
  Description of Artificial Sequence: Synthetic oligonucleotide
uaguguguggcaugugggc

SEQ ID NO: 3207619 - RNA, 19 nt, Artificial Sequence
  Description of Artificial Sequence: Synthetic oligonucleotide
uagaacugugcuuggcaug

SEQ ID NO: 3207620 - RNA, 19 nt, Artificial Sequence
  Description of Artificial Sequence: Synthetic oligonucleotide
uugcaggcauccuugguac

SEQ ID NO: 3207621 - RNA, 19 nt, Artificial Sequence
  Description of Artificial Sequence: Synthetic oligonucleotide
guaguguguggcauguggg

SEQ ID NO: 3207622 - RNA, 19 nt, Artificial Sequence
  Description of Artificial Sequence: Synthetic oligonucleotide
cugucagguaccacgugcc

SEQ ID NO: 3207623 - RNA, 19 nt, Artificial Sequence
  Description of Artificial Sequence: Synthetic oligonucleotide
uggcaugugggccaccacu

SEQ ID NO: 3207624 - RNA, 19 nt, Artificial Sequence
  Description of Artificial Sequence: Synthetic oligonucleotide
ugugcuuggcauguuccag

SEQ ID NO: 3207625 - RNA, 19 nt, Artificial Sequence
  Description of Artificial Sequence: Synthetic oligonucleotide
uaguuucacucggugaacc

SEQ ID NO: 3207626 - RNA, 19 nt, Artificial Sequence
  Description of Artificial Sequence: Synthetic oligonucleotide
uauaccccaacauggccaa

SEQ ID NO: 3207627 - RNA, 19 nt, Artificial Sequence
  Description of Artificial Sequence: Synthetic oligonucleotide
caaccuggagcuuggaguc

SEQ ID NO: 3207628 - RNA, 19 nt, Artificial Sequence
  Description of Artificial Sequence: Synthetic oligonucleotide
uguuccaggcaguccuggg

SEQ ID NO: 3207629 - RNA, 19 nt, Artificial Sequence
  Description of Artificial Sequence: Synthetic oligonucleotide
gugcuuggcauguuccagg

SEQ ID NO: 3207630 - RNA, 19 nt, Artificial Sequence
  Description of Artificial Sequence: Synthetic oligonucleotide
gaaaaggcugggcugucca

SEQ ID NO: 3207631 - RNA, 19 nt, Artificial Sequence
  Description of Artificial Sequence: Synthetic oligonucleotide
gaguaguuucacucgguga

SEQ ID NO: 3207632 - RNA, 19 nt, Artificial Sequence
  Description of Artificial Sequence: Synthetic oligonucleotide
cuuggaguccaugagccug

SEQ ID NO: 3207633 - RNA, 19 nt, Artificial Sequence
  Description of Artificial Sequence: Synthetic oligonucleotide
  modified_base (7)..(7): a, c, u, g, unknown or other
uccuugngaaaaggcuggg

SEQ ID NO: 3207634 - RNA, 19 nt, Artificial Sequence
  Description of Artificial Sequence: Synthetic oligonucleotide
  modified_base (5)..(5): a, c, u, g, unknown or other
cuugngaaaaggcugggcu

SEQ ID NO: 3207635 - RNA, 19 nt, Artificial Sequence
  Description of Artificial Sequence: Synthetic oligonucleotide
agaacugugcuuggcaugu

SEQ ID NO: 3207636 - RNA, 19 nt, Artificial Sequence
  Description of Artificial Sequence: Synthetic oligonucleotide
cagaacauauuaucuguga

SEQ ID NO: 3207637 - RNA, 19 nt, Artificial Sequence
  Description of Artificial Sequence: Synthetic oligonucleotide
ugcuuggcauguuccaggc

SEQ ID NO: 3207638 - RNA, 19 nt, Artificial Sequence
  Description of Artificial Sequence: Synthetic oligonucleotide
uguuagaacugugcuuggc

SEQ ID NO: 3207639 - RNA, 19 nt, Artificial Sequence
  Description of Artificial Sequence: Synthetic oligonucleotide
ugguaccguccacauagcc

SEQ ID NO: 3207640 - RNA, 19 nt, Artificial Sequence
  Description of Artificial Sequence: Synthetic oligonucleotide
uagaguaguuucacucggu

SEQ ID NO: 3207641 - RNA, 19 nt, Artificial Sequence
  Description of Artificial Sequence: Synthetic oligonucleotide
acagcugcacagcccuccc

SEQ ID NO: 3207642 - RNA, 19 nt, Artificial Sequence
  Description of Artificial Sequence: Synthetic oligonucleotide
uuggaguccaugagccuga

SEQ ID NO: 3207643 - RNA, 19 nt, Artificial Sequence
  Description of Artificial Sequence: Synthetic oligonucleotide
aguccaugagccugaucag

SEQ ID NO: 3207644 - RNA, 19 nt, Artificial Sequence
  Description of Artificial Sequence: Synthetic oligonucleotide
acucggugaaccccaaccu

SEQ ID NO: 3207645 - RNA, 19 nt, Artificial Sequence
  Description of Artificial Sequence: Synthetic oligonucleotide
agcgcagaacauauuaucu

SEQ ID NO: 3207646 - RNA, 19 nt, Artificial Sequence
  Description of Artificial Sequence: Synthetic oligonucleotide
gaacauauuaucugugauu

SEQ ID NO: 3207647 - RNA, 19 nt, Artificial Sequence
  Description of Artificial Sequence: Synthetic oligonucleotide
cagcgcagaacauauuauc

SEQ ID NO: 3207648 - RNA, 19 nt, Artificial Sequence
  Description of Artificial Sequence: Synthetic oligonucleotide
aaccccaaccuggagcuug

SEQ ID NO: 3207649 - RNA, 19 nt, Artificial Sequence
  Description of Artificial Sequence: Synthetic oligonucleotide
  modified_base (12)..(12): a, c, u, g, unknown or other
cuuccuccuugngaaaagg

SEQ ID NO: 3207650 - RNA, 19 nt, Artificial Sequence
  Description of Artificial Sequence: Synthetic oligonucleotide
gaucagccaaucugcguac

SEQ ID NO: 3207651 - RNA, 19 nt, Artificial Sequence
  Description of Artificial Sequence: Synthetic oligonucleotide
aaccuggagcuuggagucc

SEQ ID NO: 3207652 - RNA, 19 nt, Artificial Sequence
  Description of Artificial Sequence: Synthetic oligonucleotide
guuucacucggugaacccc

SEQ ID NO: 3207653 - RNA, 19 nt, Artificial Sequence
  Description of Artificial Sequence: Synthetic oligonucleotide
aacauggccaacagcugca

SEQ ID NO: 3207654 - RNA, 19 nt, Artificial Sequence
  Description of Artificial Sequence: Synthetic oligonucleotide
ucagccaaucugcguaccu

SEQ ID NO: 3207655 - RNA, 19 nt, Artificial Sequence
  Description of Artificial Sequence: Synthetic oligonucleotide
uagccagcgcagaacauau

SEQ ID NO: 3207656 - RNA, 19 nt, Artificial Sequence
  Description of Artificial Sequence: Synthetic oligonucleotide
ugggccaccacugucgccu

SEQ ID NO: 3207657 - RNA, 19 nt, Artificial Sequence
  Description of Artificial Sequence: Synthetic oligonucleotide
caaucugcguaccuggaga

SEQ ID NO: 3207658 - RNA, 19 nt, Artificial Sequence
  Description of Artificial Sequence: Synthetic oligonucleotide
cauaauauagguaaugcac

SEQ ID NO: 3207659 - RNA, 19 nt, Artificial Sequence
  Description of Artificial Sequence: Synthetic oligonucleotide
aauucuuuccuccucacug

SEQ ID NO: 3207660 - RNA, 19 nt, Artificial Sequence
  Description of Artificial Sequence: Synthetic oligonucleotide
aauggguuuuguuaagaac

SEQ ID NO: 3207661 - RNA, 19 nt, Artificial Sequence
  Description of Artificial Sequence: Synthetic oligonucleotide
auccaaaucaauucuuucc

SEQ ID NO: 3207662 - RNA, 19 nt, Artificial Sequence
  Description of Artificial Sequence: Synthetic oligonucleotide
aaacucugcgaucauacgg

SEQ ID NO: 3207663 - RNA, 19 nt, Artificial Sequence
  Description of Artificial Sequence: Synthetic oligonucleotide
uuaagaacgaaacucccag

SEQ ID NO: 3207664 - RNA, 19 nt, Artificial Sequence
  Description of Artificial Sequence: Synthetic oligonucleotide
uaagucauaagucuucuug

SEQ ID NO: 3207665 - RNA, 19 nt, Artificial Sequence
  Description of Artificial Sequence: Synthetic oligonucleotide
ucuugagacauccacgggg

SEQ ID NO: 3207666 - RNA, 19 nt, Artificial Sequence
  Description of Artificial Sequence: Synthetic oligonucleotide
uuuguuaagaacgaaacuc

SEQ ID NO: 3207667 - RNA, 19 nt, Artificial Sequence
  Description of Artificial Sequence: Synthetic oligonucleotide
gauggcauaauauagguaa

SEQ ID NO: 3207668 - RNA, 19 nt, Artificial Sequence
  Description of Artificial Sequence: Synthetic oligonucleotide
aauauagguaaugcacucc

SEQ ID NO: 3207669 - RNA, 19 nt, Artificial Sequence
  Description of Artificial Sequence: Synthetic oligonucleotide
ucauaagucuucuugagac

SEQ ID NO: 3207670 - RNA, 19 nt, Artificial Sequence
  Description of Artificial Sequence: Synthetic oligonucleotide
aaugauggcauaauauagg

SEQ ID NO: 3207671 - RNA, 19 nt, Artificial Sequence
  Description of Artificial Sequence: Synthetic oligonucleotide
augaucuugggacaguuac

SEQ ID NO: 3207672 - RNA, 19 nt, Artificial Sequence
  Description of Artificial Sequence: Synthetic oligonucleotide
aagucuucuugagacaucc

SEQ ID NO: 3207673 - RNA, 19 nt, Artificial Sequence
  Description of Artificial Sequence: Synthetic oligonucleotide
uucuucugcauccaaauca

SEQ ID NO: 3207674 - RNA, 19 nt, Artificial Sequence
  Description of Artificial Sequence: Synthetic oligonucleotide
uuguuaagaacgaaacucc

SEQ ID NO: 3207675 - RNA, 19 nt, Artificial Sequence
  Description of Artificial Sequence: Synthetic oligonucleotide
acggaaaagagaaugaugg

SEQ ID NO: 3207676 - RNA, 19 nt, Artificial Sequence
  Description of Artificial Sequence: Synthetic oligonucleotide
auaaccaacgcagacacgg

SEQ ID NO: 3207677 - RNA, 19 nt, Artificial Sequence
  Description of Artificial Sequence: Synthetic oligonucleotide
uaaugcacuccacagauga

SEQ ID NO: 3207678 - RNA, 19 nt, Artificial Sequence
  Description of Artificial Sequence: Synthetic oligonucleotide
uucagugccaucaucagcu

SEQ ID NO: 3207679 - RNA, 19 nt, Artificial Sequence
  Description of Artificial Sequence: Synthetic oligonucleotide
ucuucuugagacauccacg

SEQ ID NO: 3207680 - RNA, 19 nt, Artificial Sequence
  Description of Artificial Sequence: Synthetic oligonucleotide
gaucauacggauaaggccc

SEQ ID NO: 3207681 - RNA, 19 nt, Artificial Sequence
  Description of Artificial Sequence: Synthetic oligonucleotide
ucuucuuuagucagcuugg

SEQ ID NO: 3207682 - RNA, 19 nt, Artificial Sequence
  Description of Artificial Sequence: Synthetic oligonucleotide
auggguuuuguuaagaacg

SEQ ID NO: 3207683 - RNA, 19 nt, Artificial Sequence
  Description of Artificial Sequence: Synthetic oligonucleotide
ucuuuagucagcuuggguc

SEQ ID NO: 3207684 - RNA, 19 nt, Artificial Sequence
  Description of Artificial Sequence: Synthetic oligonucleotide
ucugcgaucauacggauaa

SEQ ID NO: 3207685 - RNA, 19 nt, Artificial Sequence
  Description of Artificial Sequence: Synthetic oligonucleotide
aagaacgaaacucccagga

SEQ ID NO: 3207686 - RNA, 19 nt, Artificial Sequence
  Description of Artificial Sequence: Synthetic oligonucleotide
gauacagguguacaucagg

SEQ ID NO: 3207687 - RNA, 19 nt, Artificial Sequence
  Description of Artificial Sequence: Synthetic oligonucleotide
aaucaauucuuuccuccuc

SEQ ID NO: 3207688 - RNA, 19 nt, Artificial Sequence
  Description of Artificial Sequence: Synthetic oligonucleotide
cuucuugagacauccacgg

SEQ ID NO: 3207689 - RNA, 19 nt, Artificial Sequence
  Description of Artificial Sequence: Synthetic oligonucleotide
gaaugauggcauaauauag

SEQ ID NO: 3207690 - RNA, 19 nt, Artificial Sequence
  Description of Artificial Sequence: Synthetic oligonucleotide
uccaaaucaauucuuuccu

SEQ ID NO: 3207691 - RNA, 19 nt, Artificial Sequence
  Description of Artificial Sequence: Synthetic oligonucleotide
uaagaaaacucugcgauca

SEQ ID NO: 3207692 - RNA, 19 nt, Artificial Sequence
  Description of Artificial Sequence: Synthetic oligonucleotide
aguuuggucgucuucagug

SEQ ID NO: 3207693 - RNA, 19 nt, Artificial Sequence
  Description of Artificial Sequence: Synthetic oligonucleotide
caaaucaauucuuuccucc

SEQ ID NO: 3207694 - RNA, 19 nt, Artificial Sequence
  Description of Artificial Sequence: Synthetic oligonucleotide
aaaacucugcgaucauacg

SEQ ID NO: 3207695 - RNA, 19 nt, Artificial Sequence
  Description of Artificial Sequence: Synthetic oligonucleotide
acggauaaggcccaucacg

SEQ ID NO: 3207696 - RNA, 19 nt, Artificial Sequence
  Description of Artificial Sequence: Synthetic oligonucleotide
aagucauaagucuucuuga

SEQ ID NO: 3207697 - RNA, 19 nt, Artificial Sequence
  Description of Artificial Sequence: Synthetic oligonucleotide
uuuuguuaagaacgaaacu

SEQ ID NO: 3207698 - RNA, 19 nt, Artificial Sequence
  Description of Artificial Sequence: Synthetic oligonucleotide
ucugcauccaaaucaauuc

SEQ ID NO: 3207699 - RNA, 19 nt, Artificial Sequence
  Description of Artificial Sequence: Synthetic oligonucleotide
aaaucaauucuuuccuccu

SEQ ID NO: 3207700 - RNA, 19 nt, Artificial Sequence
  Description of Artificial Sequence: Synthetic oligonucleotide
uguuaagaacgaaacuccc

SEQ ID NO: 3207701 - RNA, 19 nt, Artificial Sequence
  Description of Artificial Sequence: Synthetic oligonucleotide
cuuuagucagcuugggucc

SEQ ID NO: 3207702 - RNA, 19 nt, Artificial Sequence
  Description of Artificial Sequence: Synthetic oligonucleotide
uuuugcaaaccgcagaaua

SEQ ID NO: 3207703 - RNA, 19 nt, Artificial Sequence
  Description of Artificial Sequence: Synthetic oligonucleotide
aucaucagcuccuucguuc

SEQ ID NO: 3207704 - RNA, 19 nt, Artificial Sequence
  Description of Artificial Sequence: Synthetic oligonucleotide
uagguaaugcacuccacag

SEQ ID NO: 3207705 - RNA, 19 nt, Artificial Sequence
  Description of Artificial Sequence: Synthetic oligonucleotide
ucuugggacaguuacuggc

SEQ ID NO: 3207706 - RNA, 19 nt, Artificial Sequence
  Description of Artificial Sequence: Synthetic oligonucleotide
uguacaucaggaauggguu

SEQ ID NO: 3207707 - RNA, 19 nt, Artificial Sequence
  Description of Artificial Sequence: Synthetic oligonucleotide
agaaugauggcauaauaua

SEQ ID NO: 3207708 - RNA, 19 nt, Artificial Sequence
  Description of Artificial Sequence: Synthetic oligonucleotide
auauagguaaugcacucca

SEQ ID NO: 3207709 - RNA, 19 nt, Artificial Sequence
  Description of Artificial Sequence: Synthetic oligonucleotide
ucaggaauggguuuuguua

SEQ ID NO: 3207710 - RNA, 19 nt, Artificial Sequence
  Description of Artificial Sequence: Synthetic oligonucleotide
uuugcaaaccgcagaauaa

SEQ ID NO: 3207711 - RNA, 19 nt, Artificial Sequence
  Description of Artificial Sequence: Synthetic oligonucleotide
cucuucuuuagucagcuug

SEQ ID NO: 3207712 - RNA, 19 nt, Artificial Sequence
  Description of Artificial Sequence: Synthetic oligonucleotide
guuuuguuaagaacgaaac

SEQ ID NO: 3207713 - RNA, 19 nt, Artificial Sequence
  Description of Artificial Sequence: Synthetic oligonucleotide
aauaagucauaagucuucu

SEQ ID NO: 3207714 - RNA, 19 nt, Artificial Sequence
  Description of Artificial Sequence: Synthetic oligonucleotide
gaaaacucugcgaucauac

SEQ ID NO: 3207715 - RNA, 19 nt, Artificial Sequence
  Description of Artificial Sequence: Synthetic oligonucleotide
aagaguccagcacaggcga

SEQ ID NO: 3207716 - RNA, 19 nt, Artificial Sequence
  Description of Artificial Sequence: Synthetic oligonucleotide
ggguuucucaguuuggucg

SEQ ID NO: 3207717 - RNA, 19 nt, Artificial Sequence
  Description of Artificial Sequence: Synthetic oligonucleotide
agucauaagucuucuugag

SEQ ID NO: 3207718 - RNA, 19 nt, Artificial Sequence
  Description of Artificial Sequence: Synthetic oligonucleotide
uaauauagguaaugcacuc

SEQ ID NO: 3207719 - RNA, 19 nt, Artificial Sequence
  Description of Artificial Sequence: Synthetic oligonucleotide
augauggcauaauauaggu

SEQ ID NO: 3207720 - RNA, 19 nt, Artificial Sequence
  Description of Artificial Sequence: Synthetic oligonucleotide
uuuucuucugcauccaaau

SEQ ID NO: 3207721 - RNA, 19 nt, Artificial Sequence
  Description of Artificial Sequence: Synthetic oligonucleotide
uaagaacgaaacucccagg

SEQ ID NO: 3207722 - RNA, 19 nt, Artificial Sequence
  Description of Artificial Sequence: Synthetic oligonucleotide
aacgcagacacggaaaaga

SEQ ID NO: 3207723 - RNA, 19 nt, Artificial Sequence
  Description of Artificial Sequence: Synthetic oligonucleotide
auaauauagguaaugcacu

SEQ ID NO: 3207724 - RNA, 19 nt, Artificial Sequence
  Description of Artificial Sequence: Synthetic oligonucleotide
cucacuguuccgaagaguc

SEQ ID NO: 3207725 - RNA, 19 nt, Artificial Sequence
  Description of Artificial Sequence: Synthetic oligonucleotide
gaagaguccagcacaggcg

SEQ ID NO: 3207726 - RNA, 19 nt, Artificial Sequence
  Description of Artificial Sequence: Synthetic oligonucleotide
cuuuccuccucacuguucc

SEQ ID NO: 3207727 - RNA, 19 nt, Artificial Sequence
  Description of Artificial Sequence: Synthetic oligonucleotide
auagguaaugcacuccaca

SEQ ID NO: 3207728 - RNA, 19 nt, Artificial Sequence
  Description of Artificial Sequence: Synthetic oligonucleotide
gacaguuacuggcagccag

SEQ ID NO: 3207729 - RNA, 19 nt, Artificial Sequence
  Description of Artificial Sequence: Synthetic oligonucleotide
gaucuugggacaguuacug

SEQ ID NO: 3207730 - RNA, 19 nt, Artificial Sequence
  Description of Artificial Sequence: Synthetic oligonucleotide
ugcgaucauacggauaagg

SEQ ID NO: 3207731 - RNA, 19 nt, Artificial Sequence
  Description of Artificial Sequence: Synthetic oligonucleotide
uuccgaagaguccagcaca

SEQ ID NO: 3207732 - RNA, 19 nt, Artificial Sequence
  Description of Artificial Sequence: Synthetic oligonucleotide
uccagcacaggcgauacag

SEQ ID NO: 3207733 - RNA, 19 nt, Artificial Sequence
  Description of Artificial Sequence: Synthetic oligonucleotide
ucuucugcauccaaaucaa

SEQ ID NO: 3207734 - RNA, 19 nt, Artificial Sequence
  Description of Artificial Sequence: Synthetic oligonucleotide
guuacuggcagccaggcaa

SEQ ID NO: 3207735 - RNA, 19 nt, Artificial Sequence
  Description of Artificial Sequence: Synthetic oligonucleotide
ucccguaagaaaacucugc

SEQ ID NO: 3207736 - RNA, 19 nt, Artificial Sequence
  Description of Artificial Sequence: Synthetic oligonucleotide
uccacagaugaucuuggga

SEQ ID NO: 3207737 - RNA, 19 nt, Artificial Sequence
  Description of Artificial Sequence: Synthetic oligonucleotide
auacggauaaggcccauca

SEQ ID NO: 3207738 - RNA, 19 nt, Artificial Sequence
  Description of Artificial Sequence: Synthetic oligonucleotide
uuuggucgucuucagugcc

SEQ ID NO: 3207739 - RNA, 19 nt, Artificial Sequence
  Description of Artificial Sequence: Synthetic oligonucleotide
agacacggaaaagagaaug

SEQ ID NO: 3207740 - RNA, 19 nt, Artificial Sequence
  Description of Artificial Sequence: Synthetic oligonucleotide
aucaauucuuuccuccuca

SEQ ID NO: 3207741 - RNA, 19 nt, Artificial Sequence
  Description of Artificial Sequence: Synthetic oligonucleotide
ugcacuccacagaugaucu

SEQ ID NO: 3207742 - RNA, 19 nt, Artificial Sequence
  Description of Artificial Sequence: Synthetic oligonucleotide
acagguguacaucaggaau

SEQ ID NO: 3207743 - RNA, 19 nt, Artificial Sequence
  Description of Artificial Sequence: Synthetic oligonucleotide
uggguuuuguuaagaacga

SEQ ID NO: 3207744 - RNA, 19 nt, Artificial Sequence
  Description of Artificial Sequence: Synthetic oligonucleotide
aaagagaaugauggcauaa

SEQ ID NO: 3207745 - RNA, 19 nt, Artificial Sequence
  Description of Artificial Sequence: Synthetic oligonucleotide
uucugcauccaaaucaauu

SEQ ID NO: 3207746 - RNA, 19 nt, Artificial Sequence
  Description of Artificial Sequence: Synthetic oligonucleotide
uugcaaaccgcagaauaag

SEQ ID NO: 3207747 - RNA, 19 nt, Artificial Sequence
  Description of Artificial Sequence: Synthetic oligonucleotide
cagguguacaucaggaaug

SEQ ID NO: 3207748 - RNA, 19 nt, Artificial Sequence
  Description of Artificial Sequence: Synthetic oligonucleotide
ucuucagugccaucaucag

SEQ ID NO: 3207749 - RNA, 19 nt, Artificial Sequence
  Description of Artificial Sequence: Synthetic oligonucleotide
ucaucagcuccuucguucc

SEQ ID NO: 3207750 - RNA, 19 nt, Artificial Sequence
  Description of Artificial Sequence: Synthetic oligonucleotide
caaaccgcagaauaaguca

SEQ ID NO: 3207751 - RNA, 19 nt, Artificial Sequence
  Description of Artificial Sequence: Synthetic oligonucleotide
gaauaagucauaagucuuc

SEQ ID NO: 3207752 - RNA, 19 nt, Artificial Sequence
  Description of Artificial Sequence: Synthetic oligonucleotide
cacggaaaagagaaugaug

SEQ ID NO: 3207753 - RNA, 19 nt, Artificial Sequence
  Description of Artificial Sequence: Synthetic oligonucleotide
uucuugagacauccacggg

SEQ ID NO: 3207754 - RNA, 19 nt, Artificial Sequence
  Description of Artificial Sequence: Synthetic oligonucleotide
ucagcuuggguccuguuuu

SEQ ID NO: 3207755 - RNA, 19 nt, Artificial Sequence
  Description of Artificial Sequence: Synthetic oligonucleotide
auaaggcccaucacgaguc

SEQ ID NO: 3207756 - RNA, 19 nt, Artificial Sequence
  Description of Artificial Sequence: Synthetic oligonucleotide
aacucugcgaucauacgga

SEQ ID NO: 3207757 - RNA, 19 nt, Artificial Sequence
  Description of Artificial Sequence: Synthetic oligonucleotide
gaaacucccaggauaacca

SEQ ID NO: 3207758 - RNA, 19 nt, Artificial Sequence
  Description of Artificial Sequence: Synthetic oligonucleotide
aaaguuauuaagcauauuc

SEQ ID NO: 3207759 - RNA, 19 nt, Artificial Sequence
  Description of Artificial Sequence: Synthetic oligonucleotide
aauauaaaccauuuaauuc

SEQ ID NO: 3207760 - RNA, 19 nt, Artificial Sequence
  Description of Artificial Sequence: Synthetic oligonucleotide
uuuuauuuaaauauaaacc

SEQ ID NO: 3207761 - RNA, 19 nt, Artificial Sequence
  Description of Artificial Sequence: Synthetic oligonucleotide
aaugaucaaagacaaaugc

SEQ ID NO: 3207762 - RNA, 19 nt, Artificial Sequence
  Description of Artificial Sequence: Synthetic oligonucleotide
auauaaaccauuuaauucc

SEQ ID NO: 3207763 - RNA, 19 nt, Artificial Sequence
  Description of Artificial Sequence: Synthetic oligonucleotide
uauauauuauuccagauag

SEQ ID NO: 3207764 - RNA, 19 nt, Artificial Sequence
  Description of Artificial Sequence: Synthetic oligonucleotide
uuuauuuaaauauaaacca

SEQ ID NO: 3207765 - RNA, 19 nt, Artificial Sequence
  Description of Artificial Sequence: Synthetic oligonucleotide
aguuuauaaaaccagaagg

SEQ ID NO: 3207766 - RNA, 19 nt, Artificial Sequence
  Description of Artificial Sequence: Synthetic oligonucleotide
uugaaaaucauucuacugg

SEQ ID NO: 3207767 - RNA, 19 nt, Artificial Sequence
  Description of Artificial Sequence: Synthetic oligonucleotide
ugcaguaucaaucagguag

SEQ ID NO: 3207768 - RNA, 19 nt, Artificial Sequence
  Description of Artificial Sequence: Synthetic oligonucleotide
uuaaauauaaaccauuuaa

SEQ ID NO: 3207769 - RNA, 19 nt, Artificial Sequence
  Description of Artificial Sequence: Synthetic oligonucleotide
uuaauuauaauaaauguua

SEQ ID NO: 3207770 - RNA, 19 nt, Artificial Sequence
  Description of Artificial Sequence: Synthetic oligonucleotide
aauuauaauaaauguuaac

SEQ ID NO: 3207771 - RNA, 19 nt, Artificial Sequence
  Description of Artificial Sequence: Synthetic oligonucleotide
aauaaauguuaacaaacuc

SEQ ID NO: 3207772 - RNA, 19 nt, Artificial Sequence
  Description of Artificial Sequence: Synthetic oligonucleotide
acugccaugaaauuuaugg

SEQ ID NO: 3207773 - RNA, 19 nt, Artificial Sequence
  Description of Artificial Sequence: Synthetic oligonucleotide
uuuaauuccauuuacuuac

SEQ ID NO: 3207774 - RNA, 19 nt, Artificial Sequence
  Description of Artificial Sequence: Synthetic oligonucleotide
uauuauuccagauaggccc

SEQ ID NO: 3207775 - RNA, 19 nt, Artificial Sequence
  Description of Artificial Sequence: Synthetic oligonucleotide
uuacuuacugauuagaaag

SEQ ID NO: 3207776 - RNA, 19 nt, Artificial Sequence
  Description of Artificial Sequence: Synthetic oligonucleotide
aaacucaguuuauaaaacc

SEQ ID NO: 3207777 - RNA, 19 nt, Artificial Sequence
  Description of Artificial Sequence: Synthetic oligonucleotide
uguaaaacaaaauaucaug

SEQ ID NO: 3207778 - RNA, 19 nt, Artificial Sequence
  Description of Artificial Sequence: Synthetic oligonucleotide
aaauauguaaaacaaaaua

SEQ ID NO: 3207779 - RNA, 19 nt, Artificial Sequence
  Description of Artificial Sequence: Synthetic oligonucleotide
uaaauguuaacaaacucag

SEQ ID NO: 3207780 - RNA, 19 nt, Artificial Sequence
  Description of Artificial Sequence: Synthetic oligonucleotide
ugaucaaagacaaaugcag

SEQ ID NO: 3207781 - RNA, 19 nt, Artificial Sequence
  Description of Artificial Sequence: Synthetic oligonucleotide
ucaaacauaacacaaaaua

SEQ ID NO: 3207782 - RNA, 19 nt, Artificial Sequence
  Description of Artificial Sequence: Synthetic oligonucleotide
aauguuaacaaacucaguu

SEQ ID NO: 3207783 - RNA, 19 nt, Artificial Sequence
  Description of Artificial Sequence: Synthetic oligonucleotide
aaguauuuugauuaaucuc

SEQ ID NO: 3207784 - RNA, 19 nt, Artificial Sequence
  Description of Artificial Sequence: Synthetic oligonucleotide
aaaaggaugagaccugaac

SEQ ID NO: 3207785 - RNA, 19 nt, Artificial Sequence
  Description of Artificial Sequence: Synthetic oligonucleotide
aaggaucccagacacaagc

SEQ ID NO: 3207786 - RNA, 19 nt, Artificial Sequence
  Description of Artificial Sequence: Synthetic oligonucleotide
uuugauuaaucucucauca

SEQ ID NO: 3207787 - RNA, 19 nt, Artificial Sequence
  Description of Artificial Sequence: Synthetic oligonucleotide
auaauaaauguuaacaaac

SEQ ID NO: 3207788 - RNA, 19 nt, Artificial Sequence
  Description of Artificial Sequence: Synthetic oligonucleotide
aaaauugccaguucaagga

SEQ ID NO: 3207789 - RNA, 19 nt, Artificial Sequence
  Description of Artificial Sequence: Synthetic oligonucleotide
auuauaauaaauguuaaca

SEQ ID NO: 3207790 - RNA, 19 nt, Artificial Sequence
  Description of Artificial Sequence: Synthetic oligonucleotide
aaaguauuuugauuaaucu

SEQ ID NO: 3207791 - RNA, 19 nt, Artificial Sequence
  Description of Artificial Sequence: Synthetic oligonucleotide
aaauauauauuauuccaga

SEQ ID NO: 3207792 - RNA, 19 nt, Artificial Sequence
  Description of Artificial Sequence: Synthetic oligonucleotide
aguacaagcuauuauuuac

SEQ ID NO: 3207793 - RNA, 19 nt, Artificial Sequence
  Description of Artificial Sequence: Synthetic oligonucleotide
aaaaugaucaaagacaaau

SEQ ID NO: 3207794 - RNA, 19 nt, Artificial Sequence
  Description of Artificial Sequence: Synthetic oligonucleotide
aacacaaaauauguaaaac

SEQ ID NO: 3207795 - RNA, 19 nt, Artificial Sequence
  Description of Artificial Sequence: Synthetic oligonucleotide
uuuuaaaaggaugagaccu

SEQ ID NO: 3207796 - RNA, 19 nt, Artificial Sequence
  Description of Artificial Sequence: Synthetic oligonucleotide
aauauguaaaacaaaauau

SEQ ID NO: 3207797 - RNA, 19 nt, Artificial Sequence
  Description of Artificial Sequence: Synthetic oligonucleotide
uuuacuaugaaguaguguu

SEQ ID NO: 3207798 - RNA, 19 nt, Artificial Sequence
  Description of Artificial Sequence: Synthetic oligonucleotide
uauauuauuccagauaggc

SEQ ID NO: 3207799 - RNA, 19 nt, Artificial Sequence
  Description of Artificial Sequence: Synthetic oligonucleotide
aaauauaaaccauuuaauu

SEQ ID NO: 3207800 - RNA, 19 nt, Artificial Sequence
  Description of Artificial Sequence: Synthetic oligonucleotide
auuuaugguuaguacaagc

SEQ ID NO: 3207801 - RNA, 19 nt, Artificial Sequence
  Description of Artificial Sequence: Synthetic oligonucleotide
gauuuuaaaaggaugagac

SEQ ID NO: 3207802 - RNA, 19 nt, Artificial Sequence
  Description of Artificial Sequence: Synthetic oligonucleotide
uuauuuacuaugaaguagu

SEQ ID NO: 3207803 - RNA, 19 nt, Artificial Sequence
  Description of Artificial Sequence: Synthetic oligonucleotide
aaaacaaaauaucaugaaa

SEQ ID NO: 3207804 - RNA, 19 nt, Artificial Sequence
  Description of Artificial Sequence: Synthetic oligonucleotide
auuuuaaaaggaugagacc

SEQ ID NO: 3207805 - RNA, 19 nt, Artificial Sequence
  Description of Artificial Sequence: Synthetic oligonucleotide
ugauuagaaaguuauuaag

SEQ ID NO: 3207806 - RNA, 19 nt, Artificial Sequence
  Description of Artificial Sequence: Synthetic oligonucleotide
aacaaaauaucaugaaagu

SEQ ID NO: 3207807 - RNA, 19 nt, Artificial Sequence
  Description of Artificial Sequence: Synthetic oligonucleotide
aaaauauauauuauuccag

SEQ ID NO: 3207808 - RNA, 19 nt, Artificial Sequence
  Description of Artificial Sequence: Synthetic oligonucleotide
guuuauaaaaccagaaggg

SEQ ID NO: 3207809 - RNA, 19 nt, Artificial Sequence
  Description of Artificial Sequence: Synthetic oligonucleotide
aaaggaugagaccugaacu

SEQ ID NO: 3207810 - RNA, 19 nt, Artificial Sequence
  Description of Artificial Sequence: Synthetic oligonucleotide
uuauaauaaauguuaacaa

SEQ ID NO: 3207811 - RNA, 19 nt, Artificial Sequence
  Description of Artificial Sequence: Synthetic oligonucleotide
auuagaaaguuauuaagca

SEQ ID NO: 3207812 - RNA, 19 nt, Artificial Sequence
  Description of Artificial Sequence: Synthetic oligonucleotide
aaaucauucuacuggagga

SEQ ID NO: 3207813 - RNA, 19 nt, Artificial Sequence
  Description of Artificial Sequence: Synthetic oligonucleotide
aaacauaacacaaaauaug

SEQ ID NO: 3207814 - RNA, 19 nt, Artificial Sequence
  Description of Artificial Sequence: Synthetic oligonucleotide
uuuacuguggcuauuuaga

SEQ ID NO: 3207815 - RNA, 19 nt, Artificial Sequence
  Description of Artificial Sequence: Synthetic oligonucleotide
gauuagaaaguuauuaagc

SEQ ID NO: 3207816 - RNA, 19 nt, Artificial Sequence
  Description of Artificial Sequence: Synthetic oligonucleotide
uauaauaaauguuaacaaa

SEQ ID NO: 3207817 - RNA, 19 nt, Artificial Sequence
  Description of Artificial Sequence: Synthetic oligonucleotide
ugauuaaucucucaucaug

SEQ ID NO: 3207818 - RNA, 19 nt, Artificial Sequence
  Description of Artificial Sequence: Synthetic oligonucleotide
uuauuaagcauauucugca

SEQ ID NO: 3207819 - RNA, 19 nt, Artificial Sequence
  Description of Artificial Sequence: Synthetic oligonucleotide
caagcuauuauuuacuaug

SEQ ID NO: 3207820 - RNA, 19 nt, Artificial Sequence
  Description of Artificial Sequence: Synthetic oligonucleotide
uaaauauaaaccauuuaau

SEQ ID NO: 3207821 - RNA, 19 nt, Artificial Sequence
  Description of Artificial Sequence: Synthetic oligonucleotide
gaaauuuaugguuaguaca

SEQ ID NO: 3207822 - RNA, 19 nt, Artificial Sequence
  Description of Artificial Sequence: Synthetic oligonucleotide
uaauaaauguuaacaaacu

SEQ ID NO: 3207823 - RNA, 19 nt, Artificial Sequence
  Description of Artificial Sequence: Synthetic oligonucleotide
uuuaugguuaguacaagcu

SEQ ID NO: 3207824 - RNA, 19 nt, Artificial Sequence
  Description of Artificial Sequence: Synthetic oligonucleotide
ugaaguaguguuuuaaagu

SEQ ID NO: 3207825 - RNA, 19 nt, Artificial Sequence
  Description of Artificial Sequence: Synthetic oligonucleotide
gauuaaucucucaucaugg

SEQ ID NO: 3207826 - RNA, 19 nt, Artificial Sequence
  Description of Artificial Sequence: Synthetic oligonucleotide
auauguaaaacaaaauauc

SEQ ID NO: 3207827 - RNA, 19 nt, Artificial Sequence
  Description of Artificial Sequence: Synthetic oligonucleotide
aguuauuaagcauauucug

SEQ ID NO: 3207828 - RNA, 19 nt, Artificial Sequence
  Description of Artificial Sequence: Synthetic oligonucleotide
aaaauaaaucuucauuaaa

SEQ ID NO: 3207829 - RNA, 19 nt, Artificial Sequence
  Description of Artificial Sequence: Synthetic oligonucleotide
uauaaaaccagaaggguua

SEQ ID NO: 3207830 - RNA, 19 nt, Artificial Sequence
  Description of Artificial Sequence: Synthetic oligonucleotide
aauuccauuuacuuacuga

SEQ ID NO: 3207831 - RNA, 19 nt, Artificial Sequence
  Description of Artificial Sequence: Synthetic oligonucleotide
aauauauauuauuccagau

SEQ ID NO: 3207832 - RNA, 19 nt, Artificial Sequence
  Description of Artificial Sequence: Synthetic oligonucleotide
uaucaugaaaguauuuuga

SEQ ID NO: 3207833 - RNA, 19 nt, Artificial Sequence
  Description of Artificial Sequence: Synthetic oligonucleotide
aguauuuugauuaaucucu

SEQ ID NO: 3207834 - RNA, 19 nt, Artificial Sequence
  Description of Artificial Sequence: Synthetic oligonucleotide
aacauaacacaaaauaugu

SEQ ID NO: 3207835 - RNA, 19 nt, Artificial Sequence
  Description of Artificial Sequence: Synthetic oligonucleotide
aaauaaaucuucauuaaaa

SEQ ID NO: 3207836 - RNA, 19 nt, Artificial Sequence
  Description of Artificial Sequence: Synthetic oligonucleotide
uaucaaucagguaggaaag

SEQ ID NO: 3207837 - RNA, 19 nt, Artificial Sequence
  Description of Artificial Sequence: Synthetic oligonucleotide
acuguggcuauuuagagca

SEQ ID NO: 3207838 - RNA, 19 nt, Artificial Sequence
  Description of Artificial Sequence: Synthetic oligonucleotide
acacaaaauauguaaaaca

SEQ ID NO: 3207839 - RNA, 19 nt, Artificial Sequence
  Description of Artificial Sequence: Synthetic oligonucleotide
uuugaaaaucauucuacug

SEQ ID NO: 3207840 - RNA, 19 nt, Artificial Sequence
  Description of Artificial Sequence: Synthetic oligonucleotide
aaggaugagaccugaacug

SEQ ID NO: 3207841 - RNA, 19 nt, Artificial Sequence
  Description of Artificial Sequence: Synthetic oligonucleotide
accauuuaauuccauuuac

SEQ ID NO: 3207842 - RNA, 19 nt, Artificial Sequence
  Description of Artificial Sequence: Synthetic oligonucleotide
uuuagagcagggaagacaa

SEQ ID NO: 3207843 - RNA, 19 nt, Artificial Sequence
  Description of Artificial Sequence: Synthetic oligonucleotide
auuauuuacuaugaaguag

SEQ ID NO: 3207844 - RNA, 19 nt, Artificial Sequence
  Description of Artificial Sequence: Synthetic oligonucleotide
uuacugauuagaaaguuau

SEQ ID NO: 3207845 - RNA, 19 nt, Artificial Sequence
  Description of Artificial Sequence: Synthetic oligonucleotide
aaaugcaguaucaaucagg

SEQ ID NO: 3207846 - RNA, 19 nt, Artificial Sequence
  Description of Artificial Sequence: Synthetic oligonucleotide
uuauuuaaauauaaaccau

SEQ ID NO: 3207847 - RNA, 19 nt, Artificial Sequence
  Description of Artificial Sequence: Synthetic oligonucleotide
uagaaaguuauuaagcaua

SEQ ID NO: 3207848 - RNA, 19 nt, Artificial Sequence
  Description of Artificial Sequence: Synthetic oligonucleotide
uguacucaaacauaacaca

SEQ ID NO: 3207849 - RNA, 19 nt, Artificial Sequence
  Description of Artificial Sequence: Synthetic oligonucleotide
aaaccauuuaauuccauuu

SEQ ID NO: 3207850 - RNA, 19 nt, Artificial Sequence
  Description of Artificial Sequence: Synthetic oligonucleotide
ugaaauuuaugguuaguac

SEQ ID NO: 3207851 - RNA, 19 nt, Artificial Sequence
  Description of Artificial Sequence: Synthetic oligonucleotide
auaucaugaaaguauuuug

SEQ ID NO: 3207852 - RNA, 19 nt, Artificial Sequence
  Description of Artificial Sequence: Synthetic oligonucleotide
uauuuaaauauaaaccauu

SEQ ID NO: 3207853 - RNA, 19 nt, Artificial Sequence
  Description of Artificial Sequence: Synthetic oligonucleotide
ugaaaaucauucuacugga

SEQ ID NO: 3207854 - RNA, 19 nt, Artificial Sequence
  Description of Artificial Sequence: Synthetic oligonucleotide
acaaacucaguuuauaaaa

SEQ ID NO: 3207855 - RNA, 19 nt, Artificial Sequence
  Description of Artificial Sequence: Synthetic oligonucleotide
acuggaggaacccuugagc

SEQ ID NO: 3207856 - RNA, 19 nt, Artificial Sequence
  Description of Artificial Sequence: Synthetic oligonucleotide
uaaucucucaucauggaaa

SEQ ID NO: 3207857 - RNA, 19 nt, Artificial Sequence
  Description of Artificial Sequence: Synthetic oligonucleotide
uaauuauaauaaauguuaa

SEQ ID NO: 3207858 - RNA, 19 nt, Artificial Sequence
  Description of Artificial Sequence: Synthetic oligonucleotide
auucauuacauuuauaagg

SEQ ID NO: 3207859 - RNA, 19 nt, Artificial Sequence
  Description of Artificial Sequence: Synthetic oligonucleotide
uggugauuuguuaagaugg

SEQ ID NO: 3207860 - RNA, 19 nt, Artificial Sequence
  Description of Artificial Sequence: Synthetic oligonucleotide
auuuguaagguuucucucc

SEQ ID NO: 3207861 - RNA, 19 nt, Artificial Sequence
  Description of Artificial Sequence: Synthetic oligonucleotide
ucucagaugaucuucuugg

SEQ ID NO: 3207862 - RNA, 19 nt, Artificial Sequence
  Description of Artificial Sequence: Synthetic oligonucleotide
uucauuacauuuauaaggu

SEQ ID NO: 3207863 - RNA, 19 nt, Artificial Sequence
  Description of Artificial Sequence: Synthetic oligonucleotide
uaaagcauuucucacauuc

SEQ ID NO: 3207864 - RNA, 19 nt, Artificial Sequence
  Description of Artificial Sequence: Synthetic oligonucleotide
uaaaggaucugucacauuc

SEQ ID NO: 3207865 - RNA, 19 nt, Artificial Sequence
  Description of Artificial Sequence: Synthetic oligonucleotide
aagcauuucucacauucac

SEQ ID NO: 3207866 - RNA, 19 nt, Artificial Sequence
  Description of Artificial Sequence: Synthetic oligonucleotide
ucucaaaugaguucuaaga

SEQ ID NO: 3207867 - RNA, 19 nt, Artificial Sequence
  Description of Artificial Sequence: Synthetic oligonucleotide
uaugaauucucaaaugagu

SEQ ID NO: 3207868 - RNA, 19 nt, Artificial Sequence
  Description of Artificial Sequence: Synthetic oligonucleotide
auucacuacauuuguaagg

SEQ ID NO: 3207869 - RNA, 19 nt, Artificial Sequence
  Description of Artificial Sequence: Synthetic oligonucleotide
acauucauuacauuuauaa

SEQ ID NO: 3207870 - RNA, 19 nt, Artificial Sequence
  Description of Artificial Sequence: Synthetic oligonucleotide
guuaagauggccucucugg

SEQ ID NO: 3207871 - RNA, 19 nt, Artificial Sequence
  Description of Artificial Sequence: Synthetic oligonucleotide
caaaugaguucuaagacug

SEQ ID NO: 3207872 - RNA, 19 nt, Artificial Sequence
  Description of Artificial Sequence: Synthetic oligonucleotide
ugauuuguuaagauggccu

SEQ ID NO: 3207873 - RNA, 19 nt, Artificial Sequence
  Description of Artificial Sequence: Synthetic oligonucleotide
ucuaagacugcuucucugg

SEQ ID NO: 3207874 - RNA, 19 nt, Artificial Sequence
  Description of Artificial Sequence: Synthetic oligonucleotide
aaggacuugucacacucac

SEQ ID NO: 3207875 - RNA, 19 nt, Artificial Sequence
  Description of Artificial Sequence: Synthetic oligonucleotide
ugugugaacucucugguga

SEQ ID NO: 3207876 - RNA, 19 nt, Artificial Sequence
  Description of Artificial Sequence: Synthetic oligonucleotide
uuaagauggccucucuggg

SEQ ID NO: 3207877 - RNA, 19 nt, Artificial Sequence
  Description of Artificial Sequence: Synthetic oligonucleotide
ucaaaugaguucuaagacu

SEQ ID NO: 3207878 - RNA, 19 nt, Artificial Sequence
  Description of Artificial Sequence: Synthetic oligonucleotide
acucacuacauuuguaagg

SEQ ID NO: 3207879 - RNA, 19 nt, Artificial Sequence
  Description of Artificial Sequence: Synthetic oligonucleotide
uuuguaagguuucucuccc

SEQ ID NO: 3207880 - RNA, 19 nt, Artificial Sequence
  Description of Artificial Sequence: Synthetic oligonucleotide
auuacauuuauaagguuuc

SEQ ID NO: 3207881 - RNA, 19 nt, Artificial Sequence
  Description of Artificial Sequence: Synthetic oligonucleotide
cauucauuacauuuauaag

SEQ ID NO: 3207882 - RNA, 19 nt, Artificial Sequence
  Description of Artificial Sequence: Synthetic oligonucleotide
uccuguauggauucuguag

SEQ ID NO: 3207883 - RNA, 19 nt, Artificial Sequence
  Description of Artificial Sequence: Synthetic oligonucleotide
guagugaauucucagauga

SEQ ID NO: 3207884 - RNA, 19 nt, Artificial Sequence
  Description of Artificial Sequence: Synthetic oligonucleotide
acauuuguaagguuucucu

SEQ ID NO: 3207885 - RNA, 19 nt, Artificial Sequence
  Description of Artificial Sequence: Synthetic oligonucleotide
cucaaaugaguucuaagac

SEQ ID NO: 3207886 - RNA, 19 nt, Artificial Sequence
  Description of Artificial Sequence: Synthetic oligonucleotide
cucacauucacuacauuug

SEQ ID NO: 3207887 - RNA, 19 nt, Artificial Sequence
  Description of Artificial Sequence: Synthetic oligonucleotide
uccugugugaacucucugg

SEQ ID NO: 3207888 - RNA, 19 nt, Artificial Sequence
  Description of Artificial Sequence: Synthetic oligonucleotide
cauaugaauucucaaauga

SEQ ID NO: 3207889 - RNA, 19 nt, Artificial Sequence
  Description of Artificial Sequence: Synthetic oligonucleotide
agugaauucucagaugauc

SEQ ID NO: 3207890 - RNA, 19 nt, Artificial Sequence
  Description of Artificial Sequence: Synthetic oligonucleotide
ugaguucuaagacugcuuc

SEQ ID NO: 3207891 - RNA, 19 nt, Artificial Sequence
  Description of Artificial Sequence: Synthetic oligonucleotide
ucuguagugaauucucaga

SEQ ID NO: 3207892 - RNA, 19 nt, Artificial Sequence
  Description of Artificial Sequence: Synthetic oligonucleotide
auuucucacauucacuaca

SEQ ID NO: 3207893 - RNA, 19 nt, Artificial Sequence
  Description of Artificial Sequence: Synthetic oligonucleotide
ugucacauucauuacauuu

SEQ ID NO: 3207894 - RNA, 19 nt, Artificial Sequence
  Description of Artificial Sequence: Synthetic oligonucleotide
uuuguaagguuucucuccu

SEQ ID NO: 3207895 - RNA, 19 nt, Artificial Sequence
  Description of Artificial Sequence: Synthetic oligonucleotide
uaagguuucucucccauau

SEQ ID NO: 3207896 - RNA, 19 nt, Artificial Sequence
  Description of Artificial Sequence: Synthetic oligonucleotide
uucacuacauuuguaaggu

SEQ ID NO: 3207897 - RNA, 19 nt, Artificial Sequence
  Description of Artificial Sequence: Synthetic oligonucleotide
ucugucacauucauuacau

SEQ ID NO: 3207898 - RNA, 19 nt, Artificial Sequence
  Description of Artificial Sequence: Synthetic oligonucleotide
ugaaggacuugucacacuc

SEQ ID NO: 3207899 - RNA, 19 nt, Artificial Sequence
  Description of Artificial Sequence: Synthetic oligonucleotide
uggguaaaggaucugucac

SEQ ID NO: 3207900 - RNA, 19 nt, Artificial Sequence
  Description of Artificial Sequence: Synthetic oligonucleotide
acauucacuacauuuguaa

SEQ ID NO: 3207901 - RNA, 19 nt, Artificial Sequence
  Description of Artificial Sequence: Synthetic oligonucleotide
uucucaaaugaguucuaag

SEQ ID NO: 3207902 - RNA, 19 nt, Artificial Sequence
  Description of Artificial Sequence: Synthetic oligonucleotide
aagguuucucuccugugug

SEQ ID NO: 3207903 - RNA, 19 nt, Artificial Sequence
  Description of Artificial Sequence: Synthetic oligonucleotide
uguaagguuucucuccugu

SEQ ID NO: 3207904 - RNA, 19 nt, Artificial Sequence
  Description of Artificial Sequence: Synthetic oligonucleotide
ucagaugaucuucuuggug

SEQ ID NO: 3207905 - RNA, 19 nt, Artificial Sequence
  Description of Artificial Sequence: Synthetic oligonucleotide
uucuguagugaauucucag

SEQ ID NO: 3207906 - RNA, 19 nt, Artificial Sequence
  Description of Artificial Sequence: Synthetic oligonucleotide
aaugaguucuaagacugcu

SEQ ID NO: 3207907 - RNA, 19 nt, Artificial Sequence
  Description of Artificial Sequence: Synthetic oligonucleotide
ucucacauucacuacauuu

SEQ ID NO: 3207908 - RNA, 19 nt, Artificial Sequence
  Description of Artificial Sequence: Synthetic oligonucleotide
uaagguuucucuccugugu

SEQ ID NO: 3207909 - RNA, 19 nt, Artificial Sequence
  Description of Artificial Sequence: Synthetic oligonucleotide
augaucuucuuggugaagg

SEQ ID NO: 3207910 - RNA, 19 nt, Artificial Sequence
  Description of Artificial Sequence: Synthetic oligonucleotide
gauuuguuaagauggccuc

SEQ ID NO: 3207911 - RNA, 19 nt, Artificial Sequence
  Description of Artificial Sequence: Synthetic oligonucleotide
ugaauucucaaaugaguuc

SEQ ID NO: 3207912 - RNA, 19 nt, Artificial Sequence
  Description of Artificial Sequence: Synthetic oligonucleotide
aguucuaagacugcuucuc

SEQ ID NO: 3207913 - RNA, 19 nt, Artificial Sequence
  Description of Artificial Sequence: Synthetic oligonucleotide
ucacauucacuacauuugu

SEQ ID NO: 3207914 - RNA, 19 nt, Artificial Sequence
  Description of Artificial Sequence: Synthetic oligonucleotide
aaaugaguucuaagacugc

SEQ ID NO: 3207915 - RNA, 19 nt, Artificial Sequence
  Description of Artificial Sequence: Synthetic oligonucleotide
uguuaagauggccucucug

SEQ ID NO: 3207916 - RNA, 19 nt, Artificial Sequence
  Description of Artificial Sequence: Synthetic oligonucleotide
uuggugaaggacuugucac

SEQ ID NO: 3207917 - RNA, 19 nt, Artificial Sequence
  Description of Artificial Sequence: Synthetic oligonucleotide
cauucacuacauuuguaag

SEQ ID NO: 3207918 - RNA, 19 nt, Artificial Sequence
  Description of Artificial Sequence: Synthetic oligonucleotide
ucucccauaugaauucuca

SEQ ID NO: 3207919 - RNA, 19 nt, Artificial Sequence
  Description of Artificial Sequence: Synthetic oligonucleotide
auaugaauucucaaaugag

SEQ ID NO: 3207920 - RNA, 19 nt, Artificial Sequence
  Description of Artificial Sequence: Synthetic oligonucleotide
uucucagaugaucuucuug

SEQ ID NO: 3207921 - RNA, 19 nt, Artificial Sequence
  Description of Artificial Sequence: Synthetic oligonucleotide
uguagugaauucucagaug

SEQ ID NO: 3207922 - RNA, 19 nt, Artificial Sequence
  Description of Artificial Sequence: Synthetic oligonucleotide
uuucucucccauaugaauu

SEQ ID NO: 3207923 - RNA, 19 nt, Artificial Sequence
  Description of Artificial Sequence: Synthetic oligonucleotide
acuugucacacucacuaca

SEQ ID NO: 3207924 - RNA, 19 nt, Artificial Sequence
  Description of Artificial Sequence: Synthetic oligonucleotide
acuacauuuguaagguuuc

SEQ ID NO: 3207925 - RNA, 19 nt, Artificial Sequence
  Description of Artificial Sequence: Synthetic oligonucleotide
ucuggguaaagcauuucuc

SEQ ID NO: 3207926 - RNA, 19 nt, Artificial Sequence
  Description of Artificial Sequence: Synthetic oligonucleotide
ucacauucauuacauuuau

SEQ ID NO: 3207927 - RNA, 19 nt, Artificial Sequence
  Description of Artificial Sequence: Synthetic oligonucleotide
ucucuggugauuuguuaag

SEQ ID NO: 3207928 - RNA, 19 nt, Artificial Sequence
  Description of Artificial Sequence: Synthetic oligonucleotide
ugucacacucacuacauuu

SEQ ID NO: 3207929 - RNA, 19 nt, Artificial Sequence
  Description of Artificial Sequence: Synthetic oligonucleotide
ucccauaugaauucucaaa

SEQ ID NO: 3207930 - RNA, 19 nt, Artificial Sequence
  Description of Artificial Sequence: Synthetic oligonucleotide
cagaugaucuucuugguga

SEQ ID NO: 3207931 - RNA, 19 nt, Artificial Sequence
  Description of Artificial Sequence: Synthetic oligonucleotide
aagacugcuucucugggua

SEQ ID NO: 3207932 - RNA, 19 nt, Artificial Sequence
  Description of Artificial Sequence: Synthetic oligonucleotide
agguuucucucccauauga

SEQ ID NO: 3207933 - RNA, 19 nt, Artificial Sequence
  Description of Artificial Sequence: Synthetic oligonucleotide
aauucucagaugaucuucu

SEQ ID NO: 3207934 - RNA, 19 nt, Artificial Sequence
  Description of Artificial Sequence: Synthetic oligonucleotide
uucucuggguaaaggaucu

SEQ ID NO: 3207935 - RNA, 19 nt, Artificial Sequence
  Description of Artificial Sequence: Synthetic oligonucleotide
acacucacuacauuuguaa

SEQ ID NO: 3207936 - RNA, 19 nt, Artificial Sequence
  Description of Artificial Sequence: Synthetic oligonucleotide
cuggugauuuguuaagaug

SEQ ID NO: 3207937 - RNA, 19 nt, Artificial Sequence
  Description of Artificial Sequence: Synthetic oligonucleotide
ggaucugucacauucauua

SEQ ID NO: 3207938 - RNA, 19 nt, Artificial Sequence
  Description of Artificial Sequence: Synthetic oligonucleotide
uucuaagacugcuucucug

SEQ ID NO: 3207939 - RNA, 19 nt, Artificial Sequence
  Description of Artificial Sequence: Synthetic oligonucleotide
gaauucucaaaugaguucu

SEQ ID NO: 3207940 - RNA, 19 nt, Artificial Sequence
  Description of Artificial Sequence: Synthetic oligonucleotide
gauucuguagugaauucuc

SEQ ID NO: 3207941 - RNA, 19 nt, Artificial Sequence
  Description of Artificial Sequence: Synthetic oligonucleotide
ugcuucucuggguaaagga

SEQ ID NO: 3207942 - RNA, 19 nt, Artificial Sequence
  Description of Artificial Sequence: Synthetic oligonucleotide
aucugucacauucauuaca

SEQ ID NO: 3207943 - RNA, 19 nt, Artificial Sequence
  Description of Artificial Sequence: Synthetic oligonucleotide
uguaagguuucucucccau

SEQ ID NO: 3207944 - RNA, 19 nt, Artificial Sequence
  Description of Artificial Sequence: Synthetic oligonucleotide
cuaagacugcuucucuggg

SEQ ID NO: 3207945 - RNA, 19 nt, Artificial Sequence
  Description of Artificial Sequence: Synthetic oligonucleotide
uuucucuccugugugaacu

SEQ ID NO: 3207946 - RNA, 19 nt, Artificial Sequence
  Description of Artificial Sequence: Synthetic oligonucleotide
cauuuguaagguuucucuc

SEQ ID NO: 3207947 - RNA, 19 nt, Artificial Sequence
  Description of Artificial Sequence: Synthetic oligonucleotide
uuucucacauucacuacau

SEQ ID NO: 3207948 - RNA, 19 nt, Artificial Sequence
  Description of Artificial Sequence: Synthetic oligonucleotide
uggguaaagcauuucucac

SEQ ID NO: 3207949 - RNA, 19 nt, Artificial Sequence
  Description of Artificial Sequence: Synthetic oligonucleotide
aagauggccucucugggua

SEQ ID NO: 3207950 - RNA, 19 nt, Artificial Sequence
  Description of Artificial Sequence: Synthetic oligonucleotide
cuucucuggguaaaggauc

SEQ ID NO: 3207951 - RNA, 19 nt, Artificial Sequence
  Description of Artificial Sequence: Synthetic oligonucleotide
ucacacucacuacauuugu

SEQ ID NO: 3207952 - RNA, 19 nt, Artificial Sequence
  Description of Artificial Sequence: Synthetic oligonucleotide
aaggaucugucacauucau

SEQ ID NO: 3207953 - RNA, 19 nt, Artificial Sequence
  Description of Artificial Sequence: Synthetic oligonucleotide
gaauucucagaugaucuuc

SEQ ID NO: 3207954 - RNA, 19 nt, Artificial Sequence
  Description of Artificial Sequence: Synthetic oligonucleotide
uucucucccauaugaauuc

SEQ ID NO: 3207955 - RNA, 19 nt, Artificial Sequence
  Description of Artificial Sequence: Synthetic oligonucleotide
ucuggugauuuguuaagau

SEQ ID NO: 3207956 - RNA, 19 nt, Artificial Sequence
  Description of Artificial Sequence: Synthetic oligonucleotide
ucuggguaaaggaucuguc

SEQ ID NO: 3207957 - RNA, 19 nt, Artificial Sequence
  Description of Artificial Sequence: Synthetic oligonucleotide
uguauggauucuguaguga

SEQ ID NO: 3207958 - RNA, 19 nt, Artificial Sequence
  Description of Artificial Sequence: Synthetic oligonucleotide
uuaguugagguuaacagag

SEQ ID NO: 3207959 - RNA, 19 nt, Artificial Sequence
  Description of Artificial Sequence: Synthetic oligonucleotide
ugaucuagcaccuugucca

SEQ ID NO: 3207960 - RNA, 19 nt, Artificial Sequence
  Description of Artificial Sequence: Synthetic oligonucleotide
aggaucuuucucucgaucc

SEQ ID NO: 3207961 - RNA, 19 nt, Artificial Sequence
  Description of Artificial Sequence: Synthetic oligonucleotide
uccacuuugaugugggacg

SEQ ID NO: 3207962 - RNA, 19 nt, Artificial Sequence
  Description of Artificial Sequence: Synthetic oligonucleotide
accuuguccacuuugaugu

SEQ ID NO: 3207963 - RNA, 19 nt, Artificial Sequence
  Description of Artificial Sequence: Synthetic oligonucleotide
uacugaucugguuaaagcc

SEQ ID NO: 3207964 - RNA, 19 nt, Artificial Sequence
  Description of Artificial Sequence: Synthetic oligonucleotide
augaucuagcaccuugucc

SEQ ID NO: 3207965 - RNA, 19 nt, Artificial Sequence
  Description of Artificial Sequence: Synthetic oligonucleotide
gagccgaugaucuagcacc

SEQ ID NO: 3207966 - RNA, 19 nt, Artificial Sequence
  Description of Artificial Sequence: Synthetic oligonucleotide
uuugaugugggacguacug

SEQ ID NO: 3207967 - RNA, 19 nt, Artificial Sequence
  Description of Artificial Sequence: Synthetic oligonucleotide
caugcuggagucuagcucc

SEQ ID NO: 3207968 - RNA, 19 nt, Artificial Sequence
  Description of Artificial Sequence: Synthetic oligonucleotide
augugugugaguuugugug

SEQ ID NO: 3207969 - RNA, 19 nt, Artificial Sequence
  Description of Artificial Sequence: Synthetic oligonucleotide
uguguguguguguaugugg

SEQ ID NO: 3207970 - RNA, 19 nt, Artificial Sequence
  Description of Artificial Sequence: Synthetic oligonucleotide
acugaucugguuaaagccc

SEQ ID NO: 3207971 - RNA, 19 nt, Artificial Sequence
  Description of Artificial Sequence: Synthetic oligonucleotide
uguaggaucuuucucucga

SEQ ID NO: 3207972 - RNA, 19 nt, Artificial Sequence
  Description of Artificial Sequence: Synthetic oligonucleotide
uagacacacggcaaagggg

SEQ ID NO: 3207973 - RNA, 19 nt, Artificial Sequence
  Description of Artificial Sequence: Synthetic oligonucleotide
cuagacacacggcaaaggg

SEQ ID NO: 3207974 - RNA, 19 nt, Artificial Sequence
  Description of Artificial Sequence: Synthetic oligonucleotide
ugccuuuucagcacuuccg

SEQ ID NO: 3207975 - RNA, 19 nt, Artificial Sequence
  Description of Artificial Sequence: Synthetic oligonucleotide
gacacuucacaccugacca

SEQ ID NO: 3207976 - RNA, 19 nt, Artificial Sequence
  Description of Artificial Sequence: Synthetic oligonucleotide
uuucucucgauccuggguc

SEQ ID NO: 3207977 - RNA, 19 nt, Artificial Sequence
  Description of Artificial Sequence: Synthetic oligonucleotide
agcgucagugccuccaugc

SEQ ID NO: 3207978 - RNA, 19 nt, Artificial Sequence
  Description of Artificial Sequence: Synthetic oligonucleotide
ugacacuucacaccugacc

SEQ ID NO: 3207979 - RNA, 19 nt, Artificial Sequence
  Description of Artificial Sequence: Synthetic oligonucleotide
cuggcuuccggcaaggacc

SEQ ID NO: 3207980 - RNA, 19 nt, Artificial Sequence
  Description of Artificial Sequence: Synthetic oligonucleotide
uauguggugugugugaucu

SEQ ID NO: 3207981 - RNA, 19 nt, Artificial Sequence
  Description of Artificial Sequence: Synthetic oligonucleotide
auguguguguguuugugag

SEQ ID NO: 3207982 - RNA, 19 nt, Artificial Sequence
  Description of Artificial Sequence: Synthetic oligonucleotide
uuuucagcacuuccgucag

SEQ ID NO: 3207983 - RNA, 19 nt, Artificial Sequence
  Description of Artificial Sequence: Synthetic oligonucleotide
ugugugugaucucugugug

SEQ ID NO: 3207984 - RNA, 19 nt, Artificial Sequence
  Description of Artificial Sequence: Synthetic oligonucleotide
ugggucuagacacacggca

SEQ ID NO: 3207985 - RNA, 19 nt, Artificial Sequence
  Description of Artificial Sequence: Synthetic oligonucleotide
uuguccacuuugauguggg

SEQ ID NO: 3207986 - RNA, 19 nt, Artificial Sequence
  Description of Artificial Sequence: Synthetic oligonucleotide
ugaguggcugcucucuccg

SEQ ID NO: 3207987 - RNA, 19 nt, Artificial Sequence
  Description of Artificial Sequence: Synthetic oligonucleotide
uucagcacuuccgucaggg

SEQ ID NO: 3207988 - RNA, 19 nt, Artificial Sequence
  Description of Artificial Sequence: Synthetic oligonucleotide
acuuccgucaggguuagcg

SEQ ID NO: 3207989 - RNA, 19 nt, Artificial Sequence
  Description of Artificial Sequence: Synthetic oligonucleotide
guacugaucugguuaaagc

SEQ ID NO: 3207990 - RNA, 19 nt, Artificial Sequence
  Description of Artificial Sequence: Synthetic oligonucleotide
uggauuuagggguucugcc

SEQ ID NO: 3207991 - RNA, 19 nt, Artificial Sequence
  Description of Artificial Sequence: Synthetic oligonucleotide
guuugugugugugugagug

SEQ ID NO: 3207992 - RNA, 19 nt, Artificial Sequence
  Description of Artificial Sequence: Synthetic oligonucleotide
cuuaguugagguuaacaga

SEQ ID NO: 3207993 - RNA, 19 nt, Artificial Sequence
  Description of Artificial Sequence: Synthetic oligonucleotide
acuuugaugugggacguac

SEQ ID NO: 3207994 - RNA, 19 nt, Artificial Sequence
  Description of Artificial Sequence: Synthetic oligonucleotide
augugggacguacugaucu

SEQ ID NO: 3207995 - RNA, 19 nt, Artificial Sequence
  Description of Artificial Sequence: Synthetic oligonucleotide
aguggcugcucucuccggc

SEQ ID NO: 3207996 - RNA, 19 nt, Artificial Sequence
  Description of Artificial Sequence: Synthetic oligonucleotide
ucuagacacacggcaaagg

SEQ ID NO: 3207997 - RNA, 19 nt, Artificial Sequence
  Description of Artificial Sequence: Synthetic oligonucleotide
uggagucuagcuccucugg

SEQ ID NO: 3207998 - RNA, 19 nt, Artificial Sequence
  Description of Artificial Sequence: Synthetic oligonucleotide
uuugugugugugugagugg

SEQ ID NO: 3207999 - RNA, 19 nt, Artificial Sequence
  Description of Artificial Sequence: Synthetic oligonucleotide
ugugaguguguguaugugu

SEQ ID NO: 3208000 - RNA, 19 nt, Artificial Sequence
  Description of Artificial Sequence: Synthetic oligonucleotide
uauguguguguguuuguga

SEQ ID NO: 3208001 - RNA, 19 nt, Artificial Sequence
  Description of Artificial Sequence: Synthetic oligonucleotide
uuugugaguguguguaugu

SEQ ID NO: 3208002 - RNA, 19 nt, Artificial Sequence
  Description of Artificial Sequence: Synthetic oligonucleotide
cuuuucagcacuuccguca

SEQ ID NO: 3208003 - RNA, 19 nt, Artificial Sequence
  Description of Artificial Sequence: Synthetic oligonucleotide
uaguugagguuaacagagg

SEQ ID NO: 3208004 - RNA, 19 nt, Artificial Sequence
  Description of Artificial Sequence: Synthetic oligonucleotide
agugccuccaugcuggagu

SEQ ID NO: 3208005 - RNA, 19 nt, Artificial Sequence
  Description of Artificial Sequence: Synthetic oligonucleotide
ccuuaguugagguuaacag

SEQ ID NO: 3208006 - RNA, 19 nt, Artificial Sequence
  Description of Artificial Sequence: Synthetic oligonucleotide
agggugacacuucacaccu

SEQ ID NO: 3208007 - RNA, 19 nt, Artificial Sequence
  Description of Artificial Sequence: Synthetic oligonucleotide
uaugugugugaguuugugu

SEQ ID NO: 3208008 - RNA, 19 nt, Artificial Sequence
  Description of Artificial Sequence: Synthetic oligonucleotide
agcuccucuggcuuccggc

SEQ ID NO: 3208009 - RNA, 19 nt, Artificial Sequence
  Description of Artificial Sequence: Synthetic oligonucleotide
ucaggguuagcgucagugc

SEQ ID NO: 3208010 - RNA, 19 nt, Artificial Sequence
  Description of Artificial Sequence: Synthetic oligonucleotide
uuggauuuagggguucugc

SEQ ID NO: 3208011 - RNA, 19 nt, Artificial Sequence
  Description of Artificial Sequence: Synthetic oligonucleotide
gucagugccuccaugcugg

SEQ ID NO: 3208012 - RNA, 19 nt, Artificial Sequence
  Description of Artificial Sequence: Synthetic oligonucleotide
gaguuugugugugugugag

SEQ ID NO: 3208013 - RNA, 19 nt, Artificial Sequence
  Description of Artificial Sequence: Synthetic oligonucleotide
uugugugugugugaguggc

SEQ ID NO: 3208014 - RNA, 19 nt, Artificial Sequence
  Description of Artificial Sequence: Synthetic oligonucleotide
ugaugugggacguacugau

SEQ ID NO: 3208015 - RNA, 19 nt, Artificial Sequence
  Description of Artificial Sequence: Synthetic oligonucleotide
uguguauguggugugugug

SEQ ID NO: 3208016 - RNA, 19 nt, Artificial Sequence
  Description of Artificial Sequence: Synthetic oligonucleotide
agcagggugacacuucaca

SEQ ID NO: 3208017 - RNA, 19 nt, Artificial Sequence
  Description of Artificial Sequence: Synthetic oligonucleotide
agggguucugccuuuucag

SEQ ID NO: 3208018 - RNA, 19 nt, Artificial Sequence
  Description of Artificial Sequence: Synthetic oligonucleotide
ugugaucucuguguguaug

SEQ ID NO: 3208019 - RNA, 19 nt, Artificial Sequence
  Description of Artificial Sequence: Synthetic oligonucleotide
uccggcuuguagcagggug

SEQ ID NO: 3208020 - RNA, 19 nt, Artificial Sequence
  Description of Artificial Sequence: Synthetic oligonucleotide
cagggugacacuucacacc

SEQ ID NO: 3208021 - RNA, 19 nt, Artificial Sequence
  Description of Artificial Sequence: Synthetic oligonucleotide
caggguuagcgucagugcc

SEQ ID NO: 3208022 - RNA, 19 nt, Artificial Sequence
  Description of Artificial Sequence: Synthetic oligonucleotide
acacuucacaccugaccac

SEQ ID NO: 3208023 - RNA, 19 nt, Artificial Sequence
  Description of Artificial Sequence: Synthetic oligonucleotide
uguggugugugugaucucu

SEQ ID NO: 3208024 - RNA, 19 nt, Artificial Sequence
  Description of Artificial Sequence: Synthetic oligonucleotide
ucuuucucucgauccuggg

SEQ ID NO: 3208025 - RNA, 19 nt, Artificial Sequence
  Description of Artificial Sequence: Synthetic oligonucleotide
guguaugugugugaguuug

SEQ ID NO: 3208026 - RNA, 19 nt, Artificial Sequence
  Description of Artificial Sequence: Synthetic oligonucleotide
ugugugaucucugugugua

SEQ ID NO: 3208027 - RNA, 19 nt, Artificial Sequence
  Description of Artificial Sequence: Synthetic oligonucleotide
ugugugugaguuugugugu

SEQ ID NO: 3208028 - RNA, 19 nt, Artificial Sequence
  Description of Artificial Sequence: Synthetic oligonucleotide
ucuguaggaucuuucucuc

SEQ ID NO: 3208029 - RNA, 19 nt, Artificial Sequence
  Description of Artificial Sequence: Synthetic oligonucleotide
guguguguguuugugagug

SEQ ID NO: 3208030 - RNA, 19 nt, Artificial Sequence
  Description of Artificial Sequence: Synthetic oligonucleotide
uagggguucugccuuuuca

SEQ ID NO: 3208031 - RNA, 19 nt, Artificial Sequence
  Description of Artificial Sequence: Synthetic oligonucleotide
uguguguguauguggugug

SEQ ID NO: 3208032 - RNA, 19 nt, Artificial Sequence
  Description of Artificial Sequence: Synthetic oligonucleotide
ucacaccugaccacgcucu

SEQ ID NO: 3208033 - RNA, 19 nt, Artificial Sequence
  Description of Artificial Sequence: Synthetic oligonucleotide
ugugaguuugugugugugu

SEQ ID NO: 3208034 - RNA, 19 nt, Artificial Sequence
  Description of Artificial Sequence: Synthetic oligonucleotide
ucuggcuuccggcaaggac

SEQ ID NO: 3208035 - RNA, 19 nt, Artificial Sequence
  Description of Artificial Sequence: Synthetic oligonucleotide
uguguguuugugagugugu

SEQ ID NO: 3208036 - RNA, 19 nt, Artificial Sequence
  Description of Artificial Sequence: Synthetic oligonucleotide
uccggcaaggaccuuaguu

SEQ ID NO: 3208037 - RNA, 19 nt, Artificial Sequence
  Description of Artificial Sequence: Synthetic oligonucleotide
ucgauccugggucuagaca

SEQ ID NO: 3208038 - RNA, 19 nt, Artificial Sequence
  Description of Artificial Sequence: Synthetic oligonucleotide
ucuccggcuuguagcaggg

SEQ ID NO: 3208039 - RNA, 19 nt, Artificial Sequence
  Description of Artificial Sequence: Synthetic oligonucleotide
ugaguuuguguguguguga

SEQ ID NO: 3208040 - RNA, 19 nt, Artificial Sequence
  Description of Artificial Sequence: Synthetic oligonucleotide
gaugaucuagcaccuuguc

SEQ ID NO: 3208041 - RNA, 19 nt, Artificial Sequence
  Description of Artificial Sequence: Synthetic oligonucleotide
gaguguguguaugugugug

SEQ ID NO: 3208042 - RNA, 19 nt, Artificial Sequence
  Description of Artificial Sequence: Synthetic oligonucleotide
uguguuugugagugugugu

SEQ ID NO: 3208043 - RNA, 19 nt, Artificial Sequence
  Description of Artificial Sequence: Synthetic oligonucleotide
cuuguccacuuugaugugg

SEQ ID NO: 3208044 - RNA, 19 nt, Artificial Sequence
  Description of Artificial Sequence: Synthetic oligonucleotide
uguguguguguguguaugu

SEQ ID NO: 3208045 - RNA, 19 nt, Artificial Sequence
  Description of Artificial Sequence: Synthetic oligonucleotide
gugaguguguguaugugug

SEQ ID NO: 3208046 - RNA, 19 nt, Artificial Sequence
  Description of Artificial Sequence: Synthetic oligonucleotide
aucucuguguguaugugug

SEQ ID NO: 3208047 - RNA, 19 nt, Artificial Sequence
  Description of Artificial Sequence: Synthetic oligonucleotide
guguauguguguguguuug

SEQ ID NO: 3208048 - RNA, 19 nt, Artificial Sequence
  Description of Artificial Sequence: Synthetic oligonucleotide
gugaguuugugugugugug

SEQ ID NO: 3208049 - RNA, 19 nt, Artificial Sequence
  Description of Artificial Sequence: Synthetic oligonucleotide
uguguguauguggugugug

SEQ ID NO: 3208050 - RNA, 19 nt, Artificial Sequence
  Description of Artificial Sequence: Synthetic oligonucleotide
gucaggguuagcgucagug

SEQ ID NO: 3208051 - RNA, 19 nt, Artificial Sequence
  Description of Artificial Sequence: Synthetic oligonucleotide
uguguguguguauguggug

SEQ ID NO: 3208052 - RNA, 19 nt, Artificial Sequence
  Description of Artificial Sequence: Synthetic oligonucleotide
ucuguguguaugugugugu

SEQ ID NO: 3208053 - RNA, 19 nt, Artificial Sequence
  Description of Artificial Sequence: Synthetic oligonucleotide
caccuuguccacuuugaug

SEQ ID NO: 3208054 - RNA, 19 nt, Artificial Sequence
  Description of Artificial Sequence: Synthetic oligonucleotide
ugcucucuccggcuuguag

SEQ ID NO: 3208055 - RNA, 19 nt, Artificial Sequence
  Description of Artificial Sequence: Synthetic oligonucleotide
ugugugugugaguggcugc

SEQ ID NO: 3208056 - RNA, 19 nt, Artificial Sequence
  Description of Artificial Sequence: Synthetic oligonucleotide
uaggaucuuucucucgauc

SEQ ID NO: 3208057 - RNA, 19 nt, Artificial Sequence
  Description of Artificial Sequence: Synthetic oligonucleotide
uucacaccugaccacgcuc

SEQ ID NO: 3208058 - RNA, 19 nt, Artificial Sequence
  Description of Artificial Sequence: Synthetic oligonucleotide
aagaguguuaauaauacgg

SEQ ID NO: 3208059 - RNA, 19 nt, Artificial Sequence
  Description of Artificial Sequence: Synthetic oligonucleotide
aauaauacggauguuccgg

SEQ ID NO: 3208060 - RNA, 19 nt, Artificial Sequence
  Description of Artificial Sequence: Synthetic oligonucleotide
uuaauaauacggauguucc

SEQ ID NO: 3208061 - RNA, 19 nt, Artificial Sequence
  Description of Artificial Sequence: Synthetic oligonucleotide
uguaggauuucccacauug

SEQ ID NO: 3208062 - RNA, 19 nt, Artificial Sequence
  Description of Artificial Sequence: Synthetic oligonucleotide
uauuuccacguauagcugg

SEQ ID NO: 3208063 - RNA, 19 nt, Artificial Sequence
  Description of Artificial Sequence: Synthetic oligonucleotide
aauacggauguuccggguc

SEQ ID NO: 3208064 - RNA, 19 nt, Artificial Sequence
  Description of Artificial Sequence: Synthetic oligonucleotide
uccauguucagauucuucc

SEQ ID NO: 3208065 - RNA, 19 nt, Artificial Sequence
  Description of Artificial Sequence: Synthetic oligonucleotide
uuuugauccauguucagau

SEQ ID NO: 3208066 - RNA, 19 nt, Artificial Sequence
  Description of Artificial Sequence: Synthetic oligonucleotide
uaagaguguuaauaauacg

SEQ ID NO: 3208067 - RNA, 19 nt, Artificial Sequence
  Description of Artificial Sequence: Synthetic oligonucleotide
uaauaauacggauguuccg

SEQ ID NO: 3208068 - RNA, 19 nt, Artificial Sequence
  Description of Artificial Sequence: Synthetic oligonucleotide
uucuuccagguuuugaucc

SEQ ID NO: 3208069 - RNA, 19 nt, Artificial Sequence
  Description of Artificial Sequence: Synthetic oligonucleotide
cagcaugugcauuauaggg

SEQ ID NO: 3208070 - RNA, 19 nt, Artificial Sequence
  Description of Artificial Sequence: Synthetic oligonucleotide
gaucccauuuucuuccagg

SEQ ID NO: 3208071 - RNA, 19 nt, Artificial Sequence
  Description of Artificial Sequence: Synthetic oligonucleotide
guuaauaauacggauguuc

SEQ ID NO: 3208072 - RNA, 19 nt, Artificial Sequence
  Description of Artificial Sequence: Synthetic oligonucleotide
acauugauuccagagcccc

SEQ ID NO: 3208073 - RNA, 19 nt, Artificial Sequence
  Description of Artificial Sequence: Synthetic oligonucleotide
auacggauguuccgggucc

SEQ ID NO: 3208074 - RNA, 19 nt, Artificial Sequence
  Description of Artificial Sequence: Synthetic oligonucleotide
cauauuuccacguauagcu

SEQ ID NO: 3208075 - RNA, 19 nt, Artificial Sequence
  Description of Artificial Sequence: Synthetic oligonucleotide
auaauacggauguuccggg

SEQ ID NO: 3208076 - RNA, 19 nt, Artificial Sequence
  Description of Artificial Sequence: Synthetic oligonucleotide
aucauauuuccacguauag

SEQ ID NO: 3208077 - RNA, 19 nt, Artificial Sequence
  Description of Artificial Sequence: Synthetic oligonucleotide
cuucccaucauauuuccac

SEQ ID NO: 3208078 - RNA, 19 nt, Artificial Sequence
  Description of Artificial Sequence: Synthetic oligonucleotide
uugauccauguucagauuc

SEQ ID NO: 3208079 - RNA, 19 nt, Artificial Sequence
  Description of Artificial Sequence: Synthetic oligonucleotide
cagguuuugauccauguuc

SEQ ID NO: 3208080 - RNA, 19 nt, Artificial Sequence
  Description of Artificial Sequence: Synthetic oligonucleotide
aguguuaauaauacggaug

SEQ ID NO: 3208081 - RNA, 19 nt, Artificial Sequence
  Description of Artificial Sequence: Synthetic oligonucleotide
uuuucuuccagguuuugau

SEQ ID NO: 3208082 - RNA, 19 nt, Artificial Sequence
  Description of Artificial Sequence: Synthetic oligonucleotide
uauaggggagguaucggug

SEQ ID NO: 3208083 - RNA, 19 nt, Artificial Sequence
  Description of Artificial Sequence: Synthetic oligonucleotide
uucccaucauauuuccacg

SEQ ID NO: 3208084 - RNA, 19 nt, Artificial Sequence
  Description of Artificial Sequence: Synthetic oligonucleotide
uauagcuggcagcaugugc

SEQ ID NO: 3208085 - RNA, 19 nt, Artificial Sequence
  Description of Artificial Sequence: Synthetic oligonucleotide
guaagaguguuaauaauac

SEQ ID NO: 3208086 - RNA, 19 nt, Artificial Sequence
  Description of Artificial Sequence: Synthetic oligonucleotide
cauuauaggggagguaucg

SEQ ID NO: 3208087 - RNA, 19 nt, Artificial Sequence
  Description of Artificial Sequence: Synthetic oligonucleotide
ucccacauugauuccagag

SEQ ID NO: 3208088 - RNA, 19 nt, Artificial Sequence
  Description of Artificial Sequence: Synthetic oligonucleotide
ucauauuuccacguauagc

SEQ ID NO: 3208089 - RNA, 19 nt, Artificial Sequence
  Description of Artificial Sequence: Synthetic oligonucleotide
ugcauuauaggggagguau

SEQ ID NO: 3208090 - RNA, 19 nt, Artificial Sequence
  Description of Artificial Sequence: Synthetic oligonucleotide
uucagugugugcuccugcg

SEQ ID NO: 3208091 - RNA, 19 nt, Artificial Sequence
  Description of Artificial Sequence: Synthetic oligonucleotide
ggauuucccacauugauuc

SEQ ID NO: 3208092 - RNA, 19 nt, Artificial Sequence
  Description of Artificial Sequence: Synthetic oligonucleotide
uaggauuucccacauugau

SEQ ID NO: 3208093 - RNA, 19 nt, Artificial Sequence
  Description of Artificial Sequence: Synthetic oligonucleotide
agcaugugcauuauagggg

SEQ ID NO: 3208094 - RNA, 19 nt, Artificial Sequence
  Description of Artificial Sequence: Synthetic oligonucleotide
gacguaagaguguuaauaa

SEQ ID NO: 3208095 - RNA, 19 nt, Artificial Sequence
  Description of Artificial Sequence: Synthetic oligonucleotide
uuauaggggagguaucggu

SEQ ID NO: 3208096 - RNA, 19 nt, Artificial Sequence
  Description of Artificial Sequence: Synthetic oligonucleotide
uuucccacauugauuccag

SEQ ID NO: 3208097 - RNA, 19 nt, Artificial Sequence
  Description of Artificial Sequence: Synthetic oligonucleotide
guguuaauaauacggaugu

SEQ ID NO: 3208098 - RNA, 19 nt, Artificial Sequence
  Description of Artificial Sequence: Synthetic oligonucleotide
ugauccauguucagauucu

SEQ ID NO: 3208099 - RNA, 19 nt, Artificial Sequence
  Description of Artificial Sequence: Synthetic oligonucleotide
ucagauucuucccaucaua

SEQ ID NO: 3208100 - RNA, 19 nt, Artificial Sequence
  Description of Artificial Sequence: Synthetic oligonucleotide
uuccacguauagcuggcag

SEQ ID NO: 3208101 - RNA, 19 nt, Artificial Sequence
  Description of Artificial Sequence: Synthetic oligonucleotide
gauucuucccaucauauuu

SEQ ID NO: 3208102 - RNA, 19 nt, Artificial Sequence
  Description of Artificial Sequence: Synthetic oligonucleotide
uccggguccuggcagacag

SEQ ID NO: 3208103 - RNA, 19 nt, Artificial Sequence
  Description of Artificial Sequence: Synthetic oligonucleotide
auucuucccaucauauuuc

SEQ ID NO: 3208104 - RNA, 19 nt, Artificial Sequence
  Description of Artificial Sequence: Synthetic oligonucleotide
auuauaggggagguaucgg

SEQ ID NO: 3208105 - RNA, 19 nt, Artificial Sequence
  Description of Artificial Sequence: Synthetic oligonucleotide
agaguguuaauaauacgga

SEQ ID NO: 3208106 - RNA, 19 nt, Artificial Sequence
  Description of Artificial Sequence: Synthetic oligonucleotide
uucuucccaucauauuucc

SEQ ID NO: 3208107 - RNA, 19 nt, Artificial Sequence
  Description of Artificial Sequence: Synthetic oligonucleotide
uccacguauagcuggcagc

SEQ ID NO: 3208108 - RNA, 19 nt, Artificial Sequence
  Description of Artificial Sequence: Synthetic oligonucleotide
auuuccacguauagcuggc

SEQ ID NO: 3208109 - RNA, 19 nt, Artificial Sequence
  Description of Artificial Sequence: Synthetic oligonucleotide
aucgguguaggauuuccca

SEQ ID NO: 3208110 - RNA, 19 nt, Artificial Sequence
  Description of Artificial Sequence: Synthetic oligonucleotide
augugcauuauaggggagg

SEQ ID NO: 3208111 - RNA, 19 nt, Artificial Sequence
  Description of Artificial Sequence: Synthetic oligonucleotide
auagcuggcagcaugugca

SEQ ID NO: 3208112 - RNA, 19 nt, Artificial Sequence
  Description of Artificial Sequence: Synthetic oligonucleotide
uaucgguguaggauuuccc

SEQ ID NO: 3208113 - RNA, 19 nt, Artificial Sequence
  Description of Artificial Sequence: Synthetic oligonucleotide
acguauagcuggcagcaug

SEQ ID NO: 3208114 - RNA, 19 nt, Artificial Sequence
  Description of Artificial Sequence: Synthetic oligonucleotide
agugugugcuccugcgacg

SEQ ID NO: 3208115 - RNA, 19 nt, Artificial Sequence
  Description of Artificial Sequence: Synthetic oligonucleotide
uuucuuccagguuuugauc

SEQ ID NO: 3208116 - RNA, 19 nt, Artificial Sequence
  Description of Artificial Sequence: Synthetic oligonucleotide
auaggggagguaucggugu

SEQ ID NO: 3208117 - RNA, 19 nt, Artificial Sequence
  Description of Artificial Sequence: Synthetic oligonucleotide
ccacauugauuccagagcc

SEQ ID NO: 3208118 - RNA, 19 nt, Artificial Sequence
  Description of Artificial Sequence: Synthetic oligonucleotide
uccagguuuugauccaugu

SEQ ID NO: 3208119 - RNA, 19 nt, Artificial Sequence
  Description of Artificial Sequence: Synthetic oligonucleotide
guucagauucuucccauca

SEQ ID NO: 3208120 - RNA, 19 nt, Artificial Sequence
  Description of Artificial Sequence: Synthetic oligonucleotide
aucccauuuucuuccaggu

SEQ ID NO: 3208121 - RNA, 19 nt, Artificial Sequence
  Description of Artificial Sequence: Synthetic oligonucleotide
ugcuccugcgacguaagag

SEQ ID NO: 3208122 - RNA, 19 nt, Artificial Sequence
  Description of Artificial Sequence: Synthetic oligonucleotide
ugugcauuauaggggaggu

SEQ ID NO: 3208123 - RNA, 19 nt, Artificial Sequence
  Description of Artificial Sequence: Synthetic oligonucleotide
ugcgacguaagaguguuaa

SEQ ID NO: 3208124 - RNA, 19 nt, Artificial Sequence
  Description of Artificial Sequence: Synthetic oligonucleotide
ggcagcaugugcauuauag

SEQ ID NO: 3208125 - RNA, 19 nt, Artificial Sequence
  Description of Artificial Sequence: Synthetic oligonucleotide
ucgguguaggauuucccac

SEQ ID NO: 3208126 - RNA, 19 nt, Artificial Sequence
  Description of Artificial Sequence: Synthetic oligonucleotide
cacauugauuccagagccc

SEQ ID NO: 3208127 - RNA, 19 nt, Artificial Sequence
  Description of Artificial Sequence: Synthetic oligonucleotide
uucagauucuucccaucau

SEQ ID NO: 3208128 - RNA, 19 nt, Artificial Sequence
  Description of Artificial Sequence: Synthetic oligonucleotide
ucuuccagguuuugaucca

SEQ ID NO: 3208129 - RNA, 19 nt, Artificial Sequence
  Description of Artificial Sequence: Synthetic oligonucleotide
ucccaucauauuuccacgu

SEQ ID NO: 3208130 - RNA, 19 nt, Artificial Sequence
  Description of Artificial Sequence: Synthetic oligonucleotide
ugugcuccugcgacguaag

SEQ ID NO: 3208131 - RNA, 19 nt, Artificial Sequence
  Description of Artificial Sequence: Synthetic oligonucleotide
gauuucccacauugauucc

SEQ ID NO: 3208132 - RNA, 19 nt, Artificial Sequence
  Description of Artificial Sequence: Synthetic oligonucleotide
gcagcaugugcauuauagg

SEQ ID NO: 3208133 - RNA, 19 nt, Artificial Sequence
  Description of Artificial Sequence: Synthetic oligonucleotide
auuucccacauugauucca

SEQ ID NO: 3208134 - RNA, 19 nt, Artificial Sequence
  Description of Artificial Sequence: Synthetic oligonucleotide
acguaagaguguuaauaau

SEQ ID NO: 3208135 - RNA, 19 nt, Artificial Sequence
  Description of Artificial Sequence: Synthetic oligonucleotide
uaauacggauguuccgggu

SEQ ID NO: 3208136 - RNA, 19 nt, Artificial Sequence
  Description of Artificial Sequence: Synthetic oligonucleotide
cauguucagauucuuccca

SEQ ID NO: 3208137 - RNA, 19 nt, Artificial Sequence
  Description of Artificial Sequence: Synthetic oligonucleotide
ucagugugugcuccugcga

SEQ ID NO: 3208138 - RNA, 19 nt, Artificial Sequence
  Description of Artificial Sequence: Synthetic oligonucleotide
ucuucccaucauauuucca

SEQ ID NO: 3208139 - RNA, 19 nt, Artificial Sequence
  Description of Artificial Sequence: Synthetic oligonucleotide
agguuuugauccauguuca

SEQ ID NO: 3208140 - RNA, 19 nt, Artificial Sequence
  Description of Artificial Sequence: Synthetic oligonucleotide
gguccuggcagacagccgc

SEQ ID NO: 3208141 - RNA, 19 nt, Artificial Sequence
  Description of Artificial Sequence: Synthetic oligonucleotide
uguucagauucuucccauc

SEQ ID NO: 3208142 - RNA, 19 nt, Artificial Sequence
  Description of Artificial Sequence: Synthetic oligonucleotide
auuuucuuccagguuuuga

SEQ ID NO: 3208143 - RNA, 19 nt, Artificial Sequence
  Description of Artificial Sequence: Synthetic oligonucleotide
guuuugauccauguucaga

SEQ ID NO: 3208144 - RNA, 19 nt, Artificial Sequence
  Description of Artificial Sequence: Synthetic oligonucleotide
guaucgguguaggauuucc

SEQ ID NO: 3208145 - RNA, 19 nt, Artificial Sequence
  Description of Artificial Sequence: Synthetic oligonucleotide
cagugugugcuccugcgac

SEQ ID NO: 3208146 - RNA, 19 nt, Artificial Sequence
  Description of Artificial Sequence: Synthetic oligonucleotide
uuccagguuuugauccaug

SEQ ID NO: 3208147 - RNA, 19 nt, Artificial Sequence
  Description of Artificial Sequence: Synthetic oligonucleotide
cuucagugugugcuccugc

SEQ ID NO: 3208148 - RNA, 19 nt, Artificial Sequence
  Description of Artificial Sequence: Synthetic oligonucleotide
auguuccggguccuggcag

SEQ ID NO: 3208149 - RNA, 19 nt, Artificial Sequence
  Description of Artificial Sequence: Synthetic oligonucleotide
auguucagauucuucccau

SEQ ID NO: 3208150 - RNA, 19 nt, Artificial Sequence
  Description of Artificial Sequence: Synthetic oligonucleotide
gaguguuaauaauacggau

SEQ ID NO: 3208151 - RNA, 19 nt, Artificial Sequence
  Description of Artificial Sequence: Synthetic oligonucleotide
cccacauugauuccagagc

SEQ ID NO: 3208152 - RNA, 19 nt, Artificial Sequence
  Description of Artificial Sequence: Synthetic oligonucleotide
auauuuccacguauagcug

SEQ ID NO: 3208153 - RNA, 19 nt, Artificial Sequence
  Description of Artificial Sequence: Synthetic oligonucleotide
uuugauccauguucagauu

SEQ ID NO: 3208154 - RNA, 19 nt, Artificial Sequence
  Description of Artificial Sequence: Synthetic oligonucleotide
gcaugugcauuauagggga

SEQ ID NO: 3208155 - RNA, 19 nt, Artificial Sequence
  Description of Artificial Sequence: Synthetic oligonucleotide
caucauauuuccacguaua

SEQ ID NO: 3208156 - RNA, 19 nt, Artificial Sequence
  Description of Artificial Sequence: Synthetic oligonucleotide
caugugcauuauaggggag

SEQ ID NO: 3208157 - RNA, 19 nt, Artificial Sequence
  Description of Artificial Sequence: Synthetic oligonucleotide
agauucuucccaucauauu

SEQ ID NO: 3208158 - RNA, 19 nt, Artificial Sequence
  Description of Artificial Sequence: Synthetic oligonucleotide
aauacagcauauuugggcc

SEQ ID NO: 3208159 - RNA, 19 nt, Artificial Sequence
  Description of Artificial Sequence: Synthetic oligonucleotide
aaauacagcauauuugggc

SEQ ID NO: 3208160 - RNA, 19 nt, Artificial Sequence
  Description of Artificial Sequence: Synthetic oligonucleotide
aagauuguaauauuccagg

SEQ ID NO: 3208161 - RNA, 19 nt, Artificial Sequence
  Description of Artificial Sequence: Synthetic oligonucleotide
acaaauacagcauauuugg

SEQ ID NO: 3208162 - RNA, 19 nt, Artificial Sequence
  Description of Artificial Sequence: Synthetic oligonucleotide
uucuucuggaacuagagcg

SEQ ID NO: 3208163 - RNA, 19 nt, Artificial Sequence
  Description of Artificial Sequence: Synthetic oligonucleotide
uuuaagauuguaauauucc

SEQ ID NO: 3208164 - RNA, 19 nt, Artificial Sequence
  Description of Artificial Sequence: Synthetic oligonucleotide
ugaaacagcugcauaaugg

SEQ ID NO: 3208165 - RNA, 19 nt, Artificial Sequence
  Description of Artificial Sequence: Synthetic oligonucleotide
uuugcguacaaauacagca

SEQ ID NO: 3208166 - RNA, 19 nt, Artificial Sequence
  Description of Artificial Sequence: Synthetic oligonucleotide
agcauauuucaaaagaucc

SEQ ID NO: 3208167 - RNA, 19 nt, Artificial Sequence
  Description of Artificial Sequence: Synthetic oligonucleotide
uuguucaagaguuuauucg

SEQ ID NO: 3208168 - RNA, 19 nt, Artificial Sequence
  Description of Artificial Sequence: Synthetic oligonucleotide
auguuuugcguacaaauac

SEQ ID NO: 3208169 - RNA, 19 nt, Artificial Sequence
  Description of Artificial Sequence: Synthetic oligonucleotide
uaagauuguaauauuccag

SEQ ID NO: 3208170 - RNA, 19 nt, Artificial Sequence
  Description of Artificial Sequence: Synthetic oligonucleotide
uacaaauacagcauauuug

SEQ ID NO: 3208171 - RNA, 19 nt, Artificial Sequence
  Description of Artificial Sequence: Synthetic oligonucleotide
aaugcacuguucuucacag

SEQ ID NO: 3208172 - RNA, 19 nt, Artificial Sequence
  Description of Artificial Sequence: Synthetic oligonucleotide
aggguugcuacauacauuc

SEQ ID NO: 3208173 - RNA, 19 nt, Artificial Sequence
  Description of Artificial Sequence: Synthetic oligonucleotide
uuagucuccguuuucauca

SEQ ID NO: 3208174 - RNA, 19 nt, Artificial Sequence
  Description of Artificial Sequence: Synthetic oligonucleotide
uguaacagagugcaaucgg

SEQ ID NO: 3208175 - RNA, 19 nt, Artificial Sequence
  Description of Artificial Sequence: Synthetic oligonucleotide
auuguaauauuccagguaa

SEQ ID NO: 3208176 - RNA, 19 nt, Artificial Sequence
  Description of Artificial Sequence: Synthetic oligonucleotide
uuaagauuguaauauucca

SEQ ID NO: 3208177 - RNA, 19 nt, Artificial Sequence
  Description of Artificial Sequence: Synthetic oligonucleotide
uguucaguccacaugaaac

SEQ ID NO: 3208178 - RNA, 19 nt, Artificial Sequence
  Description of Artificial Sequence: Synthetic oligonucleotide
ucagggaugacuuccaggc

SEQ ID NO: 3208179 - RNA, 19 nt, Artificial Sequence
  Description of Artificial Sequence: Synthetic oligonucleotide
caaaagauccgcuuguccc

SEQ ID NO: 3208180 - RNA, 19 nt, Artificial Sequence
  Description of Artificial Sequence: Synthetic oligonucleotide
ugcauaauggaucugcuuc

SEQ ID NO: 3208181 - RNA, 19 nt, Artificial Sequence
  Description of Artificial Sequence: Synthetic oligonucleotide
uagaauuucuuguucaaga

SEQ ID NO: 3208182 - RNA, 19 nt, Artificial Sequence
  Description of Artificial Sequence: Synthetic oligonucleotide
auggaucugcuucagauuc

SEQ ID NO: 3208183 - RNA, 19 nt, Artificial Sequence
  Description of Artificial Sequence: Synthetic oligonucleotide
acuggucuaagguuguggc

SEQ ID NO: 3208184 - RNA, 19 nt, Artificial Sequence
  Description of Artificial Sequence: Synthetic oligonucleotide
uuugaaaucccagauacuc

SEQ ID NO: 3208185 - RNA, 19 nt, Artificial Sequence
  Description of Artificial Sequence: Synthetic oligonucleotide
auuucaaaagauccgcuug

SEQ ID NO: 3208186 - RNA, 19 nt, Artificial Sequence
  Description of Artificial Sequence: Synthetic oligonucleotide
ugcacuguucuucacagug

SEQ ID NO: 3208187 - RNA, 19 nt, Artificial Sequence
  Description of Artificial Sequence: Synthetic oligonucleotide
cuuuaagauuguaauauuc

SEQ ID NO: 3208188 - RNA, 19 nt, Artificial Sequence
  Description of Artificial Sequence: Synthetic oligonucleotide
agaauuucuuguucaagag

SEQ ID NO: 3208189 - RNA, 19 nt, Artificial Sequence
  Description of Artificial Sequence: Synthetic oligonucleotide
uuagcauauuucaaaagau

SEQ ID NO: 3208190 - RNA, 19 nt, Artificial Sequence
  Description of Artificial Sequence: Synthetic oligonucleotide
cauauuucaaaagauccgc

SEQ ID NO: 3208191 - RNA, 19 nt, Artificial Sequence
  Description of Artificial Sequence: Synthetic oligonucleotide
uguaauauuccagguaaag

SEQ ID NO: 3208192 - RNA, 19 nt, Artificial Sequence
  Description of Artificial Sequence: Synthetic oligonucleotide
aauuucuuguucaagaguu

SEQ ID NO: 3208193 - RNA, 19 nt, Artificial Sequence
  Description of Artificial Sequence: Synthetic oligonucleotide
cuuagcauauuucaaaaga

SEQ ID NO: 3208194 - RNA, 19 nt, Artificial Sequence
  Description of Artificial Sequence: Synthetic oligonucleotide
uucgccuucacacaagggu

SEQ ID NO: 3208195 - RNA, 19 nt, Artificial Sequence
  Description of Artificial Sequence: Synthetic oligonucleotide
guccacaugaaacagcugc

SEQ ID NO: 3208196 - RNA, 19 nt, Artificial Sequence
  Description of Artificial Sequence: Synthetic oligonucleotide
guuuguucaguccacauga

SEQ ID NO: 3208197 - RNA, 19 nt, Artificial Sequence
  Description of Artificial Sequence: Synthetic oligonucleotide
uguuuugcguacaaauaca

SEQ ID NO: 3208198 - RNA, 19 nt, Artificial Sequence
  Description of Artificial Sequence: Synthetic oligonucleotide
aaaagauccgcuugucccu

SEQ ID NO: 3208199 - RNA, 19 nt, Artificial Sequence
  Description of Artificial Sequence: Synthetic oligonucleotide
uauucgccuucacacaagg

SEQ ID NO: 3208200 - RNA, 19 nt, Artificial Sequence
  Description of Artificial Sequence: Synthetic oligonucleotide
ugugcuuugaaaucccaga

SEQ ID NO: 3208201 - RNA, 19 nt, Artificial Sequence
  Description of Artificial Sequence: Synthetic oligonucleotide
aacuagagcgaaugcacug

SEQ ID NO: 3208202 - RNA, 19 nt, Artificial Sequence
  Description of Artificial Sequence: Synthetic oligonucleotide
uuucaaaagauccgcuugu

SEQ ID NO: 3208203 - RNA, 19 nt, Artificial Sequence
  Description of Artificial Sequence: Synthetic oligonucleotide
augacuuccaggcuccgac

SEQ ID NO: 3208204 - RNA, 19 nt, Artificial Sequence
  Description of Artificial Sequence: Synthetic oligonucleotide
ucaaaagauccgcuugucc

SEQ ID NO: 3208205 - RNA, 19 nt, Artificial Sequence
  Description of Artificial Sequence: Synthetic oligonucleotide
uaauggaucugcuucagau

SEQ ID NO: 3208206 - RNA, 19 nt, Artificial Sequence
  Description of Artificial Sequence: Synthetic oligonucleotide
uuuauucgccuucacacaa

SEQ ID NO: 3208207 - RNA, 19 nt, Artificial Sequence
  Description of Artificial Sequence: Synthetic oligonucleotide
aaucggguauuccagcugu

SEQ ID NO: 3208208 - RNA, 19 nt, Artificial Sequence
  Description of Artificial Sequence: Synthetic oligonucleotide
aagguuguggcucuacagu

SEQ ID NO: 3208209 - RNA, 19 nt, Artificial Sequence
  Description of Artificial Sequence: Synthetic oligonucleotide
agugcaaucggguauucca

SEQ ID NO: 3208210 - RNA, 19 nt, Artificial Sequence
  Description of Artificial Sequence: Synthetic oligonucleotide
ucuacagugauggggaggc

SEQ ID NO: 3208211 - RNA, 19 nt, Artificial Sequence
  Description of Artificial Sequence: Synthetic oligonucleotide
uccaaggucucauucuuag

SEQ ID NO: 3208212 - RNA, 19 nt, Artificial Sequence
  Description of Artificial Sequence: Synthetic oligonucleotide
agcugcauaauggaucugc

SEQ ID NO: 3208213 - RNA, 19 nt, Artificial Sequence
  Description of Artificial Sequence: Synthetic oligonucleotide
auacucuccuuagugaucg

SEQ ID NO: 3208214 - RNA, 19 nt, Artificial Sequence
  Description of Artificial Sequence: Synthetic oligonucleotide
uuuugcguacaaauacagc

SEQ ID NO: 3208215 - RNA, 19 nt, Artificial Sequence
  Description of Artificial Sequence: Synthetic oligonucleotide
uccguuuucaucacuggcu

SEQ ID NO: 3208216 - RNA, 19 nt, Artificial Sequence
  Description of Artificial Sequence: Synthetic oligonucleotide
uaagguuguggcucuacag

SEQ ID NO: 3208217 - RNA, 19 nt, Artificial Sequence
  Description of Artificial Sequence: Synthetic oligonucleotide
acaugaaacagcugcauaa

SEQ ID NO: 3208218 - RNA, 19 nt, Artificial Sequence
  Description of Artificial Sequence: Synthetic oligonucleotide
ugaaaucccagauacucuc

SEQ ID NO: 3208219 - RNA, 19 nt, Artificial Sequence
  Description of Artificial Sequence: Synthetic oligonucleotide
agggaugacuuccaggcuc

SEQ ID NO: 3208220 - RNA, 19 nt, Artificial Sequence
  Description of Artificial Sequence: Synthetic oligonucleotide
acauucacagcuguaacag

SEQ ID NO: 3208221 - RNA, 19 nt, Artificial Sequence
  Description of Artificial Sequence: Synthetic oligonucleotide
ucacagcuguaacagagug

SEQ ID NO: 3208222 - RNA, 19 nt, Artificial Sequence
  Description of Artificial Sequence: Synthetic oligonucleotide
uagcauauuucaaaagauc

SEQ ID NO: 3208223 - RNA, 19 nt, Artificial Sequence
  Description of Artificial Sequence: Synthetic oligonucleotide
ucuggaacuagagcgaaug

SEQ ID NO: 3208224 - RNA, 19 nt, Artificial Sequence
  Description of Artificial Sequence: Synthetic oligonucleotide
guaauauuccagguaaagc

SEQ ID NO: 3208225 - RNA, 19 nt, Artificial Sequence
  Description of Artificial Sequence: Synthetic oligonucleotide
acagcuguaacagagugca

SEQ ID NO: 3208226 - RNA, 19 nt, Artificial Sequence
  Description of Artificial Sequence: Synthetic oligonucleotide
uuggugacuggucuaaggu

SEQ ID NO: 3208227 - RNA, 19 nt, Artificial Sequence
  Description of Artificial Sequence: Synthetic oligonucleotide
auucuccaaggucucauuc

SEQ ID NO: 3208228 - RNA, 19 nt, Artificial Sequence
  Description of Artificial Sequence: Synthetic oligonucleotide
caaauacagcauauuuggg

SEQ ID NO: 3208229 - RNA, 19 nt, Artificial Sequence
  Description of Artificial Sequence: Synthetic oligonucleotide
agagcgaaugcacuguucu

SEQ ID NO: 3208230 - RNA, 19 nt, Artificial Sequence
  Description of Artificial Sequence: Synthetic oligonucleotide
gcuuugaaaucccagauac

SEQ ID NO: 3208231 - RNA, 19 nt, Artificial Sequence
  Description of Artificial Sequence: Synthetic oligonucleotide
ucuucuggaacuagagcga

SEQ ID NO: 3208232 - RNA, 19 nt, Artificial Sequence
  Description of Artificial Sequence: Synthetic oligonucleotide
cuuguucaagaguuuauuc

SEQ ID NO: 3208233 - RNA, 19 nt, Artificial Sequence
  Description of Artificial Sequence: Synthetic oligonucleotide
aaaucccagauacucuccu

SEQ ID NO: 3208234 - RNA, 19 nt, Artificial Sequence
  Description of Artificial Sequence: Synthetic oligonucleotide
uguuucuucuggaacuaga

SEQ ID NO: 3208235 - RNA, 19 nt, Artificial Sequence
  Description of Artificial Sequence: Synthetic oligonucleotide
uugaaaucccagauacucu

SEQ ID NO: 3208236 - RNA, 19 nt, Artificial Sequence
  Description of Artificial Sequence: Synthetic oligonucleotide
cagguaaagcucuccaccg

SEQ ID NO: 3208237 - RNA, 19 nt, Artificial Sequence
  Description of Artificial Sequence: Synthetic oligonucleotide
guaacagagugcaaucggg

SEQ ID NO: 3208238 - RNA, 19 nt, Artificial Sequence
  Description of Artificial Sequence: Synthetic oligonucleotide
ugucccuuuaagauuguaa

SEQ ID NO: 3208239 - RNA, 19 nt, Artificial Sequence
  Description of Artificial Sequence: Synthetic oligonucleotide
agauuguaauauuccaggu

SEQ ID NO: 3208240 - RNA, 19 nt, Artificial Sequence
  Description of Artificial Sequence: Synthetic oligonucleotide
gugaucgcagcguacuugg

SEQ ID NO: 3208241 - RNA, 19 nt, Artificial Sequence
  Description of Artificial Sequence: Synthetic oligonucleotide
uauuucaaaagauccgcuu

SEQ ID NO: 3208242 - RNA, 19 nt, Artificial Sequence
  Description of Artificial Sequence: Synthetic oligonucleotide
acucggauguuuugcguac

SEQ ID NO: 3208243 - RNA, 19 nt, Artificial Sequence
  Description of Artificial Sequence: Synthetic oligonucleotide
uucaagaguuuauucgccu

SEQ ID NO: 3208244 - RNA, 19 nt, Artificial Sequence
  Description of Artificial Sequence: Synthetic oligonucleotide
agguaaagcucuccaccgc

SEQ ID NO: 3208245 - RNA, 19 nt, Artificial Sequence
  Description of Artificial Sequence: Synthetic oligonucleotide
cuuggugacuggucuaagg

SEQ ID NO: 3208246 - RNA, 19 nt, Artificial Sequence
  Description of Artificial Sequence: Synthetic oligonucleotide
aaagcucuccaccgccuuc

SEQ ID NO: 3208247 - RNA, 19 nt, Artificial Sequence
  Description of Artificial Sequence: Synthetic oligonucleotide
ucucauucuuagcauauuu

SEQ ID NO: 3208248 - RNA, 19 nt, Artificial Sequence
  Description of Artificial Sequence: Synthetic oligonucleotide
uaacagagugcaaucgggu

SEQ ID NO: 3208249 - RNA, 19 nt, Artificial Sequence
  Description of Artificial Sequence: Synthetic oligonucleotide
ucaguccacaugaaacagc

SEQ ID NO: 3208250 - RNA, 19 nt, Artificial Sequence
  Description of Artificial Sequence: Synthetic oligonucleotide
uacauacauucacagcugu

SEQ ID NO: 3208251 - RNA, 19 nt, Artificial Sequence
  Description of Artificial Sequence: Synthetic oligonucleotide
aauggaucugcuucagauu

SEQ ID NO: 3208252 - RNA, 19 nt, Artificial Sequence
  Description of Artificial Sequence: Synthetic oligonucleotide
cacuguucuucacaguggg

SEQ ID NO: 3208253 - RNA, 19 nt, Artificial Sequence
  Description of Artificial Sequence: Synthetic oligonucleotide
auagaauuucuuguucaag

SEQ ID NO: 3208254 - RNA, 19 nt, Artificial Sequence
  Description of Artificial Sequence: Synthetic oligonucleotide
caaggucucauucuuagca

SEQ ID NO: 3208255 - RNA, 19 nt, Artificial Sequence
  Description of Artificial Sequence: Synthetic oligonucleotide
agauacucuccuuagugau

SEQ ID NO: 3208256 - RNA, 19 nt, Artificial Sequence
  Description of Artificial Sequence: Synthetic oligonucleotide
guuuugcguacaaauacag

SEQ ID NO: 3208257 - RNA, 19 nt, Artificial Sequence
  Description of Artificial Sequence: Synthetic oligonucleotide
gauuguaauauuccaggua

SEQ ID NO: 3208258 - RNA, 19 nt, Artificial Sequence
  Description of Artificial Sequence: Synthetic oligonucleotide
auuccggucaaauagguac

SEQ ID NO: 3208259 - RNA, 19 nt, Artificial Sequence
  Description of Artificial Sequence: Synthetic oligonucleotide
accaacuccacauacagcg

SEQ ID NO: 3208260 - RNA, 19 nt, Artificial Sequence
  Description of Artificial Sequence: Synthetic oligonucleotide
uuuggaaagacagaaagcc

SEQ ID NO: 3208261 - RNA, 19 nt, Artificial Sequence
  Description of Artificial Sequence: Synthetic oligonucleotide
aauagguacagauugugga

SEQ ID NO: 3208262 - RNA, 19 nt, Artificial Sequence
  Description of Artificial Sequence: Synthetic oligonucleotide
agaagaagggcaaagaucg

SEQ ID NO: 3208263 - RNA, 19 nt, Artificial Sequence
  Description of Artificial Sequence: Synthetic oligonucleotide
aguuuggaaagacagaaag

SEQ ID NO: 3208264 - RNA, 19 nt, Artificial Sequence
  Description of Artificial Sequence: Synthetic oligonucleotide
gacauaggaaucuagccgg

SEQ ID NO: 3208265 - RNA, 19 nt, Artificial Sequence
  Description of Artificial Sequence: Synthetic oligonucleotide
ugugguguagcacaucucg

SEQ ID NO: 3208266 - RNA, 19 nt, Artificial Sequence
  Description of Artificial Sequence: Synthetic oligonucleotide
gucaaauagguacagauug

SEQ ID NO: 3208267 - RNA, 19 nt, Artificial Sequence
  Description of Artificial Sequence: Synthetic oligonucleotide
aaagccauccuucaugucu

SEQ ID NO: 3208268 - RNA, 19 nt, Artificial Sequence
  Description of Artificial Sequence: Synthetic oligonucleotide
aguaauggaguuuguaccg

SEQ ID NO: 3208269 - RNA, 19 nt, Artificial Sequence
  Description of Artificial Sequence: Synthetic oligonucleotide
uguagcacaucucggauag

SEQ ID NO: 3208270 - RNA, 19 nt, Artificial Sequence
  Description of Artificial Sequence: Synthetic oligonucleotide
agauguuucagcccgcucg

SEQ ID NO: 3208271 - RNA, 19 nt, Artificial Sequence
  Description of Artificial Sequence: Synthetic oligonucleotide
aaagaucggacauaggaau

SEQ ID NO: 3208272 - RNA, 19 nt, Artificial Sequence
  Description of Artificial Sequence: Synthetic oligonucleotide
uaguaauggaguuuguacc

SEQ ID NO: 3208273 - RNA, 19 nt, Artificial Sequence
  Description of Artificial Sequence: Synthetic oligonucleotide
auagguacagauuguggac

SEQ ID NO: 3208274 - RNA, 19 nt, Artificial Sequence
  Description of Artificial Sequence: Synthetic oligonucleotide
auucuucacgaccaacucc

SEQ ID NO: 3208275 - RNA, 19 nt, Artificial Sequence
  Description of Artificial Sequence: Synthetic oligonucleotide
ucaguauucaugacaaccu

SEQ ID NO: 3208276 - RNA, 19 nt, Artificial Sequence
  Description of Artificial Sequence: Synthetic oligonucleotide
ucggauaggacccacgccc

SEQ ID NO: 3208277 - RNA, 19 nt, Artificial Sequence
  Description of Artificial Sequence: Synthetic oligonucleotide
agguagauguuucagcccg

SEQ ID NO: 3208278 - RNA, 19 nt, Artificial Sequence
  Description of Artificial Sequence: Synthetic oligonucleotide
aaagacuacuuccgguuuc

SEQ ID NO: 3208279 - RNA, 19 nt, Artificial Sequence
  Description of Artificial Sequence: Synthetic oligonucleotide
uguaguguagacacacucc

SEQ ID NO: 3208280 - RNA, 19 nt, Artificial Sequence
  Description of Artificial Sequence: Synthetic oligonucleotide
ucuugcugacaaacgaacg

SEQ ID NO: 3208281 - RNA, 19 nt, Artificial Sequence
  Description of Artificial Sequence: Synthetic oligonucleotide
agauuguggaccgucaucg

SEQ ID NO: 3208282 - RNA, 19 nt, Artificial Sequence
  Description of Artificial Sequence: Synthetic oligonucleotide
aaauagguacagauugugg

SEQ ID NO: 3208283 - RNA, 19 nt, Artificial Sequence
  Description of Artificial Sequence: Synthetic oligonucleotide
guaguaauggaguuuguac

SEQ ID NO: 3208284 - RNA, 19 nt, Artificial Sequence
  Description of Artificial Sequence: Synthetic oligonucleotide
cugacaaacgaacgaaugg

SEQ ID NO: 3208285 - RNA, 19 nt, Artificial Sequence
  Description of Artificial Sequence: Synthetic oligonucleotide
cucgcuguaguguagacac

SEQ ID NO: 3208286 - RNA, 19 nt, Artificial Sequence
  Description of Artificial Sequence: Synthetic oligonucleotide
ucuuccuuagggauccccg

SEQ ID NO: 3208287 - RNA, 19 nt, Artificial Sequence
  Description of Artificial Sequence: Synthetic oligonucleotide
uggaaagacagaaagccau

SEQ ID NO: 3208288 - RNA, 19 nt, Artificial Sequence
  Description of Artificial Sequence: Synthetic oligonucleotide
uccauuccggucaaauagg

SEQ ID NO: 3208289 - RNA, 19 nt, Artificial Sequence
  Description of Artificial Sequence: Synthetic oligonucleotide
cuccauuccggucaaauag

SEQ ID NO: 3208290 - RNA, 19 nt, Artificial Sequence
  Description of Artificial Sequence: Synthetic oligonucleotide
guagacacacuccauuccg

SEQ ID NO: 3208291 - RNA, 19 nt, Artificial Sequence
  Description of Artificial Sequence: Synthetic oligonucleotide
uuccgguuuccaaagaccc

SEQ ID NO: 3208292 - RNA, 19 nt, Artificial Sequence
  Description of Artificial Sequence: Synthetic oligonucleotide
gaacgaauggagaagagca

SEQ ID NO: 3208293 - RNA, 19 nt, Artificial Sequence
  Description of Artificial Sequence: Synthetic oligonucleotide
aauggagaagagcauccca

SEQ ID NO: 3208294 - RNA, 19 nt, Artificial Sequence
  Description of Artificial Sequence: Synthetic oligonucleotide
aagacuacuuccgguuucc

SEQ ID NO: 3208295 - RNA, 19 nt, Artificial Sequence
  Description of Artificial Sequence: Synthetic oligonucleotide
uguagacacacuccauucc

SEQ ID NO: 3208296 - RNA, 19 nt, Artificial Sequence
  Description of Artificial Sequence: Synthetic oligonucleotide
uucguaguaauggaguuug

SEQ ID NO: 3208297 - RNA, 19 nt, Artificial Sequence
  Description of Artificial Sequence: Synthetic oligonucleotide
ggacauaggaaucuagccg

SEQ ID NO: 3208298 - RNA, 19 nt, Artificial Sequence
  Description of Artificial Sequence: Synthetic oligonucleotide
acuuccgguuuccaaagac

SEQ ID NO: 3208299 - RNA, 19 nt, Artificial Sequence
  Description of Artificial Sequence: Synthetic oligonucleotide
gucaguauucaugacaacc

SEQ ID NO: 3208300 - RNA, 19 nt, Artificial Sequence
  Description of Artificial Sequence: Synthetic oligonucleotide
ggugacaaagacuacuucc

SEQ ID NO: 3208301 - RNA, 19 nt, Artificial Sequence
  Description of Artificial Sequence: Synthetic oligonucleotide
cauacaucagcuuguacuc

SEQ ID NO: 3208302 - RNA, 19 nt, Artificial Sequence
  Description of Artificial Sequence: Synthetic oligonucleotide
aaagacagaaagccauccu

SEQ ID NO: 3208303 - RNA, 19 nt, Artificial Sequence
  Description of Artificial Sequence: Synthetic oligonucleotide
auugcugcgagugagggug

SEQ ID NO: 3208304 - RNA, 19 nt, Artificial Sequence
  Description of Artificial Sequence: Synthetic oligonucleotide
ucggacauaggaaucuagc

SEQ ID NO: 3208305 - RNA, 19 nt, Artificial Sequence
  Description of Artificial Sequence: Synthetic oligonucleotide
gauguuucagcccgcucgg

SEQ ID NO: 3208306 - RNA, 19 nt, Artificial Sequence
  Description of Artificial Sequence: Synthetic oligonucleotide
ucaaauagguacagauugu

SEQ ID NO: 3208307 - RNA, 19 nt, Artificial Sequence
  Description of Artificial Sequence: Synthetic oligonucleotide
uucacgaccaacuccacau

SEQ ID NO: 3208308 - RNA, 19 nt, Artificial Sequence
  Description of Artificial Sequence: Synthetic oligonucleotide
ugacaaacgaacgaaugga

SEQ ID NO: 3208309 - RNA, 19 nt, Artificial Sequence
  Description of Artificial Sequence: Synthetic oligonucleotide
gugacaaagacuacuuccg

SEQ ID NO: 3208310 - RNA, 19 nt, Artificial Sequence
  Description of Artificial Sequence: Synthetic oligonucleotide
auaggaaucuagccgggag

SEQ ID NO: 3208311 - RNA, 19 nt, Artificial Sequence
  Description of Artificial Sequence: Synthetic oligonucleotide
guagaugugguguagcaca

SEQ ID NO: 3208312 - RNA, 19 nt, Artificial Sequence
  Description of Artificial Sequence: Synthetic oligonucleotide
cacaucucggauaggaccc

SEQ ID NO: 3208313 - RNA, 19 nt, Artificial Sequence
  Description of Artificial Sequence: Synthetic oligonucleotide
aaacgaacgaauggagaag

SEQ ID NO: 3208314 - RNA, 19 nt, Artificial Sequence
  Description of Artificial Sequence: Synthetic oligonucleotide
uuggaaagacagaaagcca

SEQ ID NO: 3208315 - RNA, 19 nt, Artificial Sequence
  Description of Artificial Sequence: Synthetic oligonucleotide
uggaguuuguaccggcuag

SEQ ID NO: 3208316 - RNA, 19 nt, Artificial Sequence
  Description of Artificial Sequence: Synthetic oligonucleotide
acaucuugcugacaaacga

SEQ ID NO: 3208317 - RNA, 19 nt, Artificial Sequence
  Description of Artificial Sequence: Synthetic oligonucleotide
uccuucaugucuagcgggg

SEQ ID NO: 3208318 - RNA, 19 nt, Artificial Sequence
  Description of Artificial Sequence: Synthetic oligonucleotide
agaagagcaucccauacau

SEQ ID NO: 3208319 - RNA, 19 nt, Artificial Sequence
  Description of Artificial Sequence: Synthetic oligonucleotide
caucccauacaucagcuug

SEQ ID NO: 3208320 - RNA, 19 nt, Artificial Sequence
  Description of Artificial Sequence: Synthetic oligonucleotide
ucuagcggggacaucuugc

SEQ ID NO: 3208321 - RNA, 19 nt, Artificial Sequence
  Description of Artificial Sequence: Synthetic oligonucleotide
gaaagacagaaagccaucc

SEQ ID NO: 3208322 - RNA, 19 nt, Artificial Sequence
  Description of Artificial Sequence: Synthetic oligonucleotide
aagucaguauucaugacaa

SEQ ID NO: 3208323 - RNA, 19 nt, Artificial Sequence
  Description of Artificial Sequence: Synthetic oligonucleotide
uaggaaucuagccgggagc

SEQ ID NO: 3208324 - RNA, 19 nt, Artificial Sequence
  Description of Artificial Sequence: Synthetic oligonucleotide
aagggcaaagaucggacau

SEQ ID NO: 3208325 - RNA, 19 nt, Artificial Sequence
  Description of Artificial Sequence: Synthetic oligonucleotide
acauacagcgcacuguaga

SEQ ID NO: 3208326 - RNA, 19 nt, Artificial Sequence
  Description of Artificial Sequence: Synthetic oligonucleotide
uagacacacuccauuccgg

SEQ ID NO: 3208327 - RNA, 19 nt, Artificial Sequence
  Description of Artificial Sequence: Synthetic oligonucleotide
acuacuuccgguuuccaaa

SEQ ID NO: 3208328 - RNA, 19 nt, Artificial Sequence
  Description of Artificial Sequence: Synthetic oligonucleotide
agagaagaagggcaaagau

SEQ ID NO: 3208329 - RNA, 19 nt, Artificial Sequence
  Description of Artificial Sequence: Synthetic oligonucleotide
ucucggauaggacccacgc

SEQ ID NO: 3208330 - RNA, 19 nt, Artificial Sequence
  Description of Artificial Sequence: Synthetic oligonucleotide
aacgaacgaauggagaaga

SEQ ID NO: 3208331 - RNA, 19 nt, Artificial Sequence
  Description of Artificial Sequence: Synthetic oligonucleotide
auucaugacaaccuugauu

SEQ ID NO: 3208332 - RNA, 19 nt, Artificial Sequence
  Description of Artificial Sequence: Synthetic oligonucleotide
ugcacagucugucccagug

SEQ ID NO: 3208333 - RNA, 19 nt, Artificial Sequence
  Description of Artificial Sequence: Synthetic oligonucleotide
gaauugcugcgagugaggg

SEQ ID NO: 3208334 - RNA, 19 nt, Artificial Sequence
  Description of Artificial Sequence: Synthetic oligonucleotide
agucacagauucuucugag

SEQ ID NO: 3208335 - RNA, 19 nt, Artificial Sequence
  Description of Artificial Sequence: Synthetic oligonucleotide
agguacagauuguggaccg

SEQ ID NO: 3208336 - RNA, 19 nt, Artificial Sequence
  Description of Artificial Sequence: Synthetic oligonucleotide
gcaaagaucggacauagga

SEQ ID NO: 3208337 - RNA, 19 nt, Artificial Sequence
  Description of Artificial Sequence: Synthetic oligonucleotide
gacaucuugcugacaaacg

SEQ ID NO: 3208338 - RNA, 19 nt, Artificial Sequence
  Description of Artificial Sequence: Synthetic oligonucleotide
gacaaacgaacgaauggag

SEQ ID NO: 3208339 - RNA, 19 nt, Artificial Sequence
  Description of Artificial Sequence: Synthetic oligonucleotide
cuuccgguuuccaaagacc

SEQ ID NO: 3208340 - RNA, 19 nt, Artificial Sequence
  Description of Artificial Sequence: Synthetic oligonucleotide
acuguagaugugguguagc

SEQ ID NO: 3208341 - RNA, 19 nt, Artificial Sequence
  Description of Artificial Sequence: Synthetic oligonucleotide
cagaggauucuucacgacc

SEQ ID NO: 3208342 - RNA, 19 nt, Artificial Sequence
  Description of Artificial Sequence: Synthetic oligonucleotide
aagaucggacauaggaauc

SEQ ID NO: 3208343 - RNA, 19 nt, Artificial Sequence
  Description of Artificial Sequence: Synthetic oligonucleotide
cauccuucaugucuagcgg

SEQ ID NO: 3208344 - RNA, 19 nt, Artificial Sequence
  Description of Artificial Sequence: Synthetic oligonucleotide
gacaaccuugauuccagug

SEQ ID NO: 3208345 - RNA, 19 nt, Artificial Sequence
  Description of Artificial Sequence: Synthetic oligonucleotide
guaguguagacacacucca

SEQ ID NO: 3208346 - RNA, 19 nt, Artificial Sequence
  Description of Artificial Sequence: Synthetic oligonucleotide
ucaucggaauugcugcgag

SEQ ID NO: 3208347 - RNA, 19 nt, Artificial Sequence
  Description of Artificial Sequence: Synthetic oligonucleotide
cacagauucuucugagggg

SEQ ID NO: 3208348 - RNA, 19 nt, Artificial Sequence
  Description of Artificial Sequence: Synthetic oligonucleotide
acaaagacuacuuccgguu

SEQ ID NO: 3208349 - RNA, 19 nt, Artificial Sequence
  Description of Artificial Sequence: Synthetic oligonucleotide
aucuugcugacaaacgaac

SEQ ID NO: 3208350 - RNA, 19 nt, Artificial Sequence
  Description of Artificial Sequence: Synthetic oligonucleotide
aagaagggcaaagaucgga

SEQ ID NO: 3208351 - RNA, 19 nt, Artificial Sequence
  Description of Artificial Sequence: Synthetic oligonucleotide
agaagggcaaagaucggac

SEQ ID NO: 3208352 - RNA, 19 nt, Artificial Sequence
  Description of Artificial Sequence: Synthetic oligonucleotide
cacagucugucccaguggg

SEQ ID NO: 3208353 - RNA, 19 nt, Artificial Sequence
  Description of Artificial Sequence: Synthetic oligonucleotide
aggaaucuagccgggagcg

SEQ ID NO: 3208354 - RNA, 19 nt, Artificial Sequence
  Description of Artificial Sequence: Synthetic oligonucleotide
ucagcuuguacuccucuuc

SEQ ID NO: 3208355 - RNA, 19 nt, Artificial Sequence
  Description of Artificial Sequence: Synthetic oligonucleotide
uguuucagcccgcucgggc

SEQ ID NO: 3208356 - RNA, 19 nt, Artificial Sequence
  Description of Artificial Sequence: Synthetic oligonucleotide
acgaauggagaagagcauc

SEQ ID NO: 3208357 - RNA, 19 nt, Artificial Sequence
  Description of Artificial Sequence: Synthetic oligonucleotide
uagguacagauuguggacc

SEQ ID NO: 3208358 - RNA, 19 nt, Artificial Sequence
  Description of Artificial Sequence: Synthetic oligonucleotide
agaauacugcuucagaagg

SEQ ID NO: 3208359 - RNA, 19 nt, Artificial Sequence
  Description of Artificial Sequence: Synthetic oligonucleotide
acaguguaggccuucagcc

SEQ ID NO: 3208360 - RNA, 19 nt, Artificial Sequence
  Description of Artificial Sequence: Synthetic oligonucleotide
aaggucuagaacuuccggg

SEQ ID NO: 3208361 - RNA, 19 nt, Artificial Sequence
  Description of Artificial Sequence: Synthetic oligonucleotide
ucagccagggccaaggccg

SEQ ID NO: 3208362 - RNA, 19 nt, Artificial Sequence
  Description of Artificial Sequence: Synthetic oligonucleotide
uugcguagggcgaacaugg

SEQ ID NO: 3208363 - RNA, 19 nt, Artificial Sequence
  Description of Artificial Sequence: Synthetic oligonucleotide
ugaacuggcagccucccgg

SEQ ID NO: 3208364 - RNA, 19 nt, Artificial Sequence
  Description of Artificial Sequence: Synthetic oligonucleotide
acauaacccacuucguggc

SEQ ID NO: 3208365 - RNA, 19 nt, Artificial Sequence
  Description of Artificial Sequence: Synthetic oligonucleotide
agagguaggguccugaacu

SEQ ID NO: 3208366 - RNA, 19 nt, Artificial Sequence
  Description of Artificial Sequence: Synthetic oligonucleotide
accaacguugcguagggcg

SEQ ID NO: 3208367 - RNA, 19 nt, Artificial Sequence
  Description of Artificial Sequence: Synthetic oligonucleotide
uuaccgauggccccuagug

SEQ ID NO: 3208368 - RNA, 19 nt, Artificial Sequence
  Description of Artificial Sequence: Synthetic oligonucleotide
ucaaccacagggucgguag

SEQ ID NO: 3208369 - RNA, 19 nt, Artificial Sequence
  Description of Artificial Sequence: Synthetic oligonucleotide
ugcuuccccagccucaugg

SEQ ID NO: 3208370 - RNA, 19 nt, Artificial Sequence
  Description of Artificial Sequence: Synthetic oligonucleotide
gaaggucuagaacuuccgg

SEQ ID NO: 3208371 - RNA, 19 nt, Artificial Sequence
  Description of Artificial Sequence: Synthetic oligonucleotide
uccacagagagguaggguc

SEQ ID NO: 3208372 - RNA, 19 nt, Artificial Sequence
  Description of Artificial Sequence: Synthetic oligonucleotide
uuugccaccaacguugcgu

SEQ ID NO: 3208373 - RNA, 19 nt, Artificial Sequence
  Description of Artificial Sequence: Synthetic oligonucleotide
acuuccggguuaccgaugg

SEQ ID NO: 3208374 - RNA, 19 nt, Artificial Sequence
  Description of Artificial Sequence: Synthetic oligonucleotide
guagaauacugcuucagaa

SEQ ID NO: 3208375 - RNA, 19 nt, Artificial Sequence
  Description of Artificial Sequence: Synthetic oligonucleotide
cagaaggucuagaacuucc

SEQ ID NO: 3208376 - RNA, 19 nt, Artificial Sequence
  Description of Artificial Sequence: Synthetic oligonucleotide
accaugggcucuugguucc

SEQ ID NO: 3208377 - RNA, 19 nt, Artificial Sequence
  Description of Artificial Sequence: Synthetic oligonucleotide
ucaugccgcaccauggcgc

SEQ ID NO: 3208378 - RNA, 19 nt, Artificial Sequence
  Description of Artificial Sequence: Synthetic oligonucleotide
gucgguagaauacugcuuc

SEQ ID NO: 3208379 - RNA, 19 nt, Artificial Sequence
  Description of Artificial Sequence: Synthetic oligonucleotide
agaacuuccggguuaccga

SEQ ID NO: 3208380 - RNA, 19 nt, Artificial Sequence
  Description of Artificial Sequence: Synthetic oligonucleotide
aggucuagaacuuccgggu

SEQ ID NO: 3208381 - RNA, 19 nt, Artificial Sequence
  Description of Artificial Sequence: Synthetic oligonucleotide
aacggcugccucgugcugc

SEQ ID NO: 3208382 - RNA, 19 nt, Artificial Sequence
  Description of Artificial Sequence: Synthetic oligonucleotide
guuccugucgcacagcaca

SEQ ID NO: 3208383 - RNA, 19 nt, Artificial Sequence
  Description of Artificial Sequence: Synthetic oligonucleotide
cacaguguaggccuucagc

SEQ ID NO: 3208384 - RNA, 19 nt, Artificial Sequence
  Description of Artificial Sequence: Synthetic oligonucleotide
uucguggcggaagagcgcg

SEQ ID NO: 3208385 - RNA, 19 nt, Artificial Sequence
  Description of Artificial Sequence: Synthetic oligonucleotide
ucauggcgcaccaugggcu

SEQ ID NO: 3208386 - RNA, 19 nt, Artificial Sequence
  Description of Artificial Sequence: Synthetic oligonucleotide
acuucguggcggaagagcg

SEQ ID NO: 3208387 - RNA, 19 nt, Artificial Sequence
  Description of Artificial Sequence: Synthetic oligonucleotide
ugucgcacagcacacccac

SEQ ID NO: 3208388 - RNA, 19 nt, Artificial Sequence
  Description of Artificial Sequence: Synthetic oligonucleotide
uggcccagcacauaaccca

SEQ ID NO: 3208389 - RNA, 19 nt, Artificial Sequence
  Description of Artificial Sequence: Synthetic oligonucleotide
ucgcacagcacacccacca

SEQ ID NO: 3208390 - RNA, 19 nt, Artificial Sequence
  Description of Artificial Sequence: Synthetic oligonucleotide
aacgccaccucaaccacag

SEQ ID NO: 3208391 - RNA, 19 nt, Artificial Sequence
  Description of Artificial Sequence: Synthetic oligonucleotide
cacgguaccgcucgaagag

SEQ ID NO: 3208392 - RNA, 19 nt, Artificial Sequence
  Description of Artificial Sequence: Synthetic oligonucleotide
uccggguuaccgauggccc

SEQ ID NO: 3208393 - RNA, 19 nt, Artificial Sequence
  Description of Artificial Sequence: Synthetic oligonucleotide
cuugguuccugucgcacag

SEQ ID NO: 3208394 - RNA, 19 nt, Artificial Sequence
  Description of Artificial Sequence: Synthetic oligonucleotide
ggcgauggcacccagggcc

SEQ ID NO: 3208395 - RNA, 19 nt, Artificial Sequence
  Description of Artificial Sequence: Synthetic oligonucleotide
uuccccagccucauggcgc

SEQ ID NO: 3208396 - RNA, 19 nt, Artificial Sequence
  Description of Artificial Sequence: Synthetic oligonucleotide
uaggguccugaacuggcag

SEQ ID NO: 3208397 - RNA, 19 nt, Artificial Sequence
  Description of Artificial Sequence: Synthetic oligonucleotide
agcgccgucaggcaagcag

SEQ ID NO: 3208398 - RNA, 19 nt, Artificial Sequence
  Description of Artificial Sequence: Synthetic oligonucleotide
accauggcgcucucggugg

SEQ ID NO: 3208399 - RNA, 19 nt, Artificial Sequence
  Description of Artificial Sequence: Synthetic oligonucleotide
cacucaugccgcaccaugg

SEQ ID NO: 3208400 - RNA, 19 nt, Artificial Sequence
  Description of Artificial Sequence: Synthetic oligonucleotide
ugcuucagaaggucuagaa

SEQ ID NO: 3208401 - RNA, 19 nt, Artificial Sequence
  Description of Artificial Sequence: Synthetic oligonucleotide
cacagggucgguagaauac

SEQ ID NO: 3208402 - RNA, 19 nt, Artificial Sequence
  Description of Artificial Sequence: Synthetic oligonucleotide
accgauggccccuagugcu

SEQ ID NO: 3208403 - RNA, 19 nt, Artificial Sequence
  Description of Artificial Sequence: Synthetic oligonucleotide
uccaacggcugccucgugc

SEQ ID NO: 3208404 - RNA, 19 nt, Artificial Sequence
  Description of Artificial Sequence: Synthetic oligonucleotide
auaacccacuucguggcgg

SEQ ID NO: 3208405 - RNA, 19 nt, Artificial Sequence
  Description of Artificial Sequence: Synthetic oligonucleotide
cucuccaacggcugccucg

SEQ ID NO: 3208406 - RNA, 19 nt, Artificial Sequence
  Description of Artificial Sequence: Synthetic oligonucleotide
gaagaguggccgugccucg

SEQ ID NO: 3208407 - RNA, 19 nt, Artificial Sequence
  Description of Artificial Sequence: Synthetic oligonucleotide
agaaggucuagaacuuccg

SEQ ID NO: 3208408 - RNA, 19 nt, Artificial Sequence
  Description of Artificial Sequence: Synthetic oligonucleotide
ucucgcagcgccgucaggc

SEQ ID NO: 3208409 - RNA, 19 nt, Artificial Sequence
  Description of Artificial Sequence: Synthetic oligonucleotide
caccucaaccacagggucg

SEQ ID NO: 3208410 - RNA, 19 nt, Artificial Sequence
  Description of Artificial Sequence: Synthetic oligonucleotide
cucauggcgcaccaugggc

SEQ ID NO: 3208411 - RNA, 19 nt, Artificial Sequence
  Description of Artificial Sequence: Synthetic oligonucleotide
ucuuugccaccaacguugc

SEQ ID NO: 3208412 - RNA, 19 nt, Artificial Sequence
  Description of Artificial Sequence: Synthetic oligonucleotide
uaccgauggccccuagugc

SEQ ID NO: 3208413 - RNA, 19 nt, Artificial Sequence
  Description of Artificial Sequence: Synthetic oligonucleotide
ucuugguuccugucgcaca

SEQ ID NO: 3208414 - RNA, 19 nt, Artificial Sequence
  Description of Artificial Sequence: Synthetic oligonucleotide
uuccggguuaccgauggcc

SEQ ID NO: 3208415 - RNA, 19 nt, Artificial Sequence
  Description of Artificial Sequence: Synthetic oligonucleotide
ugguuccugucgcacagca

SEQ ID NO: 3208416 - RNA, 19 nt, Artificial Sequence
  Description of Artificial Sequence: Synthetic oligonucleotide
uccugaacuggcagccucc

SEQ ID NO: 3208417 - RNA, 19 nt, Artificial Sequence
  Description of Artificial Sequence: Synthetic oligonucleotide
gaacauggcacgguaccgc

SEQ ID NO: 3208418 - RNA, 19 nt, Artificial Sequence
  Description of Artificial Sequence: Synthetic oligonucleotide
agggucgguagaauacugc

SEQ ID NO: 3208419 - RNA, 19 nt, Artificial Sequence
  Description of Artificial Sequence: Synthetic oligonucleotide
gagguaggguccugaacug

SEQ ID NO: 3208420 - RNA, 19 nt, Artificial Sequence
  Description of Artificial Sequence: Synthetic oligonucleotide
guagggcgaacauggcacg

SEQ ID NO: 3208421 - RNA, 19 nt, Artificial Sequence
  Description of Artificial Sequence: Synthetic oligonucleotide
agccucauggcgcaccaug

SEQ ID NO: 3208422 - RNA, 19 nt, Artificial Sequence
  Description of Artificial Sequence: Synthetic oligonucleotide
ucuggcccaggcaguaagc

SEQ ID NO: 3208423 - RNA, 19 nt, Artificial Sequence
  Description of Artificial Sequence: Synthetic oligonucleotide
cauaacccacuucguggcg

SEQ ID NO: 3208424 - RNA, 19 nt, Artificial Sequence
  Description of Artificial Sequence: Synthetic oligonucleotide
acugcuucagaaggucuag

SEQ ID NO: 3208425 - RNA, 19 nt, Artificial Sequence
  Description of Artificial Sequence: Synthetic oligonucleotide
aacuggcagccucccgggg

SEQ ID NO: 3208426 - RNA, 19 nt, Artificial Sequence
  Description of Artificial Sequence: Synthetic oligonucleotide
gagagguaggguccugaac

SEQ ID NO: 3208427 - RNA, 19 nt, Artificial Sequence
  Description of Artificial Sequence: Synthetic oligonucleotide
ucgguagaauacugcuuca

SEQ ID NO: 3208428 - RNA, 19 nt, Artificial Sequence
  Description of Artificial Sequence: Synthetic oligonucleotide
cuggcccagcacauaaccc

SEQ ID NO: 3208429 - RNA, 19 nt, Artificial Sequence
  Description of Artificial Sequence: Synthetic oligonucleotide
caccaugggcucuugguuc

SEQ ID NO: 3208430 - RNA, 19 nt, Artificial Sequence
  Description of Artificial Sequence: Synthetic oligonucleotide
gguagaauacugcuucaga

SEQ ID NO: 3208431 - RNA, 19 nt, Artificial Sequence
  Description of Artificial Sequence: Synthetic oligonucleotide
auggcgcucucgguggucc

SEQ ID NO: 3208432 - RNA, 19 nt, Artificial Sequence
  Description of Artificial Sequence: Synthetic oligonucleotide
guugcguagggcgaacaug

SEQ ID NO: 3208433 - RNA, 19 nt, Artificial Sequence
  Description of Artificial Sequence: Synthetic oligonucleotide
aacguugcguagggcgaac

SEQ ID NO: 3208434 - RNA, 19 nt, Artificial Sequence
  Description of Artificial Sequence: Synthetic oligonucleotide
agagcgcgcugccacagug

SEQ ID NO: 3208435 - RNA, 19 nt, Artificial Sequence
  Description of Artificial Sequence: Synthetic oligonucleotide
accgcucgaagaguggccg

SEQ ID NO: 3208436 - RNA, 19 nt, Artificial Sequence
  Description of Artificial Sequence: Synthetic oligonucleotide
gaguccugcaucuggccca

SEQ ID NO: 3208437 - RNA, 19 nt, Artificial Sequence
  Description of Artificial Sequence: Synthetic oligonucleotide
ugggauggcgcgcgagucc

SEQ ID NO: 3208438 - RNA, 19 nt, Artificial Sequence
  Description of Artificial Sequence: Synthetic oligonucleotide
aggcaagcaggccuggcga

SEQ ID NO: 3208439 - RNA, 19 nt, Artificial Sequence
  Description of Artificial Sequence: Synthetic oligonucleotide
agcacugggauggcgcgcg

SEQ ID NO: 3208440 - RNA, 19 nt, Artificial Sequence
  Description of Artificial Sequence: Synthetic oligonucleotide
uccagcagggucucccgca

SEQ ID NO: 3208441 - RNA, 19 nt, Artificial Sequence
  Description of Artificial Sequence: Synthetic oligonucleotide
uaccgcucgaagaguggcc

SEQ ID NO: 3208442 - RNA, 19 nt, Artificial Sequence
  Description of Artificial Sequence: Synthetic oligonucleotide
ucgaagaguggccgugccu

SEQ ID NO: 3208443 - RNA, 19 nt, Artificial Sequence
  Description of Artificial Sequence: Synthetic oligonucleotide
gcuucagaaggucuagaac

SEQ ID NO: 3208444 - RNA, 19 nt, Artificial Sequence
  Description of Artificial Sequence: Synthetic oligonucleotide
gcacauaacccacuucgug

SEQ ID NO: 3208445 - RNA, 19 nt, Artificial Sequence
  Description of Artificial Sequence: Synthetic oligonucleotide
uuccugucgcacagcacac

SEQ ID NO: 3208446 - RNA, 19 nt, Artificial Sequence
  Description of Artificial Sequence: Synthetic oligonucleotide
ucagaaggucuagaacuuc

SEQ ID NO: 3208447 - RNA, 19 nt, Artificial Sequence
  Description of Artificial Sequence: Synthetic oligonucleotide
ugucgguggcaugagcucu

SEQ ID NO: 3208448 - RNA, 19 nt, Artificial Sequence
  Description of Artificial Sequence: Synthetic oligonucleotide
ucgugcugcagcuggccca

SEQ ID NO: 3208449 - RNA, 19 nt, Artificial Sequence
  Description of Artificial Sequence: Synthetic oligonucleotide
caccauggcgcucucggug

SEQ ID NO: 3208450 - RNA, 19 nt, Artificial Sequence
  Description of Artificial Sequence: Synthetic oligonucleotide
cacuucguggcggaagagc

SEQ ID NO: 3208451 - RNA, 19 nt, Artificial Sequence
  Description of Artificial Sequence: Synthetic oligonucleotide
gaagagcgcgcugccacag

SEQ ID NO: 3208452 - RNA, 19 nt, Artificial Sequence
  Description of Artificial Sequence: Synthetic oligonucleotide
agaguggccgugccucguc

SEQ ID NO: 3208453 - RNA, 19 nt, Artificial Sequence
  Description of Artificial Sequence: Synthetic oligonucleotide
gcgaacauggcacgguacc

SEQ ID NO: 3208454 - RNA, 19 nt, Artificial Sequence
  Description of Artificial Sequence: Synthetic oligonucleotide
uaacccacuucguggcgga

SEQ ID NO: 3208455 - RNA, 19 nt, Artificial Sequence
  Description of Artificial Sequence: Synthetic oligonucleotide
ugcaucuggcccaggcagu

SEQ ID NO: 3208456 - RNA, 19 nt, Artificial Sequence
  Description of Artificial Sequence: Synthetic oligonucleotide
ugccggguccacagagagg

SEQ ID NO: 3208457 - RNA, 19 nt, Artificial Sequence
  Description of Artificial Sequence: Synthetic oligonucleotide
cuagugcuuccccagccuc

SEQ ID NO: 3208458 - RNA, 19 nt, Artificial Sequence
  Description of Artificial Sequence: Synthetic oligonucleotide
aaggcuucauaauugacug

SEQ ID NO: 3208459 - RNA, 19 nt, Artificial Sequence
  Description of Artificial Sequence: Synthetic oligonucleotide
auugacugcagccauuggc

SEQ ID NO: 3208460 - RNA, 19 nt, Artificial Sequence
  Description of Artificial Sequence: Synthetic oligonucleotide
acgaaguccucauaggugc

SEQ ID NO: 3208461 - RNA, 19 nt, Artificial Sequence
  Description of Artificial Sequence: Synthetic oligonucleotide
aaguccagugucuuggaac

SEQ ID NO: 3208462 - RNA, 19 nt, Artificial Sequence
  Description of Artificial Sequence: Synthetic oligonucleotide
ucuucaucucuccaguugg

SEQ ID NO: 3208463 - RNA, 19 nt, Artificial Sequence
  Description of Artificial Sequence: Synthetic oligonucleotide
uucauaauugacugcagcc

SEQ ID NO: 3208464 - RNA, 19 nt, Artificial Sequence
  Description of Artificial Sequence: Synthetic oligonucleotide
auuggugggguucuggccc

SEQ ID NO: 3208465 - RNA, 19 nt, Artificial Sequence
  Description of Artificial Sequence: Synthetic oligonucleotide
ucaaacagugaaaaggccu

SEQ ID NO: 3208466 - RNA, 19 nt, Artificial Sequence
  Description of Artificial Sequence: Synthetic oligonucleotide
ucucuuuguccaaagaccc

SEQ ID NO: 3208467 - RNA, 19 nt, Artificial Sequence
  Description of Artificial Sequence: Synthetic oligonucleotide
agcaaggacaugccgaagc

SEQ ID NO: 3208468 - RNA, 19 nt, Artificial Sequence
  Description of Artificial Sequence: Synthetic oligonucleotide
auuggcaucuuccugcccg

SEQ ID NO: 3208469 - RNA, 19 nt, Artificial Sequence
  Description of Artificial Sequence: Synthetic oligonucleotide
uguccaaagacccgaagcc

SEQ ID NO: 3208470 - RNA, 19 nt, Artificial Sequence
  Description of Artificial Sequence: Synthetic oligonucleotide
aacaucucgaaguccagug

SEQ ID NO: 3208471 - RNA, 19 nt, Artificial Sequence
  Description of Artificial Sequence: Synthetic oligonucleotide
uuggaguccggucaaacag

SEQ ID NO: 3208472 - RNA, 19 nt, Artificial Sequence
  Description of Artificial Sequence: Synthetic oligonucleotide
aagugaucuucaucucucc

SEQ ID NO: 3208473 - RNA, 19 nt, Artificial Sequence
  Description of Artificial Sequence: Synthetic oligonucleotide
agugucuuggaacucaucu

SEQ ID NO: 3208474 - RNA, 19 nt, Artificial Sequence
  Description of Artificial Sequence: Synthetic oligonucleotide
ugucuuggaacucaucucu

SEQ ID NO: 3208475 - RNA, 19 nt, Artificial Sequence
  Description of Artificial Sequence: Synthetic oligonucleotide
uuguccaaagacccgaagc

SEQ ID NO: 3208476 - RNA, 19 nt, Artificial Sequence
  Description of Artificial Sequence: Synthetic oligonucleotide
agcaccucugcauuggugg

SEQ ID NO: 3208477 - RNA, 19 nt, Artificial Sequence
  Description of Artificial Sequence: Synthetic oligonucleotide
cucucuuuguccaaagacc

SEQ ID NO: 3208478 - RNA, 19 nt, Artificial Sequence
  Description of Artificial Sequence: Synthetic oligonucleotide
aaaggcuucauaauugacu

SEQ ID NO: 3208479 - RNA, 19 nt, Artificial Sequence
  Description of Artificial Sequence: Synthetic oligonucleotide
cuuagguuugcccagaaca

SEQ ID NO: 3208480 - RNA, 19 nt, Artificial Sequence
  Description of Artificial Sequence: Synthetic oligonucleotide
uugacugcagccauuggca

SEQ ID NO: 3208481 - RNA, 19 nt, Artificial Sequence
  Description of Artificial Sequence: Synthetic oligonucleotide
uggaacucaucucuucagg

SEQ ID NO: 3208482 - RNA, 19 nt, Artificial Sequence
  Description of Artificial Sequence: Synthetic oligonucleotide
aaagacccgaagccccucc

SEQ ID NO: 3208483 - RNA, 19 nt, Artificial Sequence
  Description of Artificial Sequence: Synthetic oligonucleotide
uuagguuugcccagaacac

SEQ ID NO: 3208484 - RNA, 19 nt, Artificial Sequence
  Description of Artificial Sequence: Synthetic oligonucleotide
cagaguagcaaggacaugc

SEQ ID NO: 3208485 - RNA, 19 nt, Artificial Sequence
  Description of Artificial Sequence: Synthetic oligonucleotide
gaaaaggccucuuugaacu

SEQ ID NO: 3208486 - RNA, 19 nt, Artificial Sequence
  Description of Artificial Sequence: Synthetic oligonucleotide
ugcaggaugggcaggaaca

SEQ ID NO: 3208487 - RNA, 19 nt, Artificial Sequence
  Description of Artificial Sequence: Synthetic oligonucleotide
ucaggcuuagguuugccca

SEQ ID NO: 3208488 - RNA, 19 nt, Artificial Sequence
  Description of Artificial Sequence: Synthetic oligonucleotide
agugaaaaggccucuuuga

SEQ ID NO: 3208489 - RNA, 19 nt, Artificial Sequence
  Description of Artificial Sequence: Synthetic oligonucleotide
auaagugaucuucaucucu

SEQ ID NO: 3208490 - RNA, 19 nt, Artificial Sequence
  Description of Artificial Sequence: Synthetic oligonucleotide
cuucauaauugacugcagc

SEQ ID NO: 3208491 - RNA, 19 nt, Artificial Sequence
  Description of Artificial Sequence: Synthetic oligonucleotide
ucgaaguccagugucuugg

SEQ ID NO: 3208492 - RNA, 19 nt, Artificial Sequence
  Description of Artificial Sequence: Synthetic oligonucleotide
uaagugaucuucaucucuc

SEQ ID NO: 3208493 - RNA, 19 nt, Artificial Sequence
  Description of Artificial Sequence: Synthetic oligonucleotide
uccaguuggaguccgguca

SEQ ID NO: 3208494 - RNA, 19 nt, Artificial Sequence
  Description of Artificial Sequence: Synthetic oligonucleotide
uccaaagacccgaagcccc

SEQ ID NO: 3208495 - RNA, 19 nt, Artificial Sequence
  Description of Artificial Sequence: Synthetic oligonucleotide
ucauaauugacugcagcca

SEQ ID NO: 3208496 - RNA, 19 nt, Artificial Sequence
  Description of Artificial Sequence: Synthetic oligonucleotide
ucccagaguagcaaggaca

SEQ ID NO: 3208497 - RNA, 19 nt, Artificial Sequence
  Description of Artificial Sequence: Synthetic oligonucleotide
ugaaaaggccucuuugaac

SEQ ID NO: 3208498 - RNA, 19 nt, Artificial Sequence
  Description of Artificial Sequence: Synthetic oligonucleotide
ugugccguugcucucuuug

SEQ ID NO: 3208499 - RNA, 19 nt, Artificial Sequence
  Description of Artificial Sequence: Synthetic oligonucleotide
uguguugcaggaugggcag

SEQ ID NO: 3208500 - RNA, 19 nt, Artificial Sequence
  Description of Artificial Sequence: Synthetic oligonucleotide
ugaucuucaucucuccagu

SEQ ID NO: 3208501 - RNA, 19 nt, Artificial Sequence
  Description of Artificial Sequence: Synthetic oligonucleotide
aaaaggccucuuugaacuc

SEQ ID NO: 3208502 - RNA, 19 nt, Artificial Sequence
  Description of Artificial Sequence: Synthetic oligonucleotide
gaugggcaggaacaucucg

SEQ ID NO: 3208503 - RNA, 19 nt, Artificial Sequence
  Description of Artificial Sequence: Synthetic oligonucleotide
uguccauaagugaucuuca

SEQ ID NO: 3208504 - RNA, 19 nt, Artificial Sequence
  Description of Artificial Sequence: Synthetic oligonucleotide
caaacagugaaaaggccuc

SEQ ID NO: 3208505 - RNA, 19 nt, Artificial Sequence
  Description of Artificial Sequence: Synthetic oligonucleotide
caugccgaagcucagcccc

SEQ ID NO: 3208506 - RNA, 19 nt, Artificial Sequence
  Description of Artificial Sequence: Synthetic oligonucleotide
gugaucuucaucucuccag

SEQ ID NO: 3208507 - RNA, 19 nt, Artificial Sequence
  Description of Artificial Sequence: Synthetic oligonucleotide
aauugacugcagccauugg

SEQ ID NO: 3208508 - RNA, 19 nt, Artificial Sequence
  Description of Artificial Sequence: Synthetic oligonucleotide
uccacgaaguccucauagg

SEQ ID NO: 3208509 - RNA, 19 nt, Artificial Sequence
  Description of Artificial Sequence: Synthetic oligonucleotide
uuggaacucaucucuucag

SEQ ID NO: 3208510 - RNA, 19 nt, Artificial Sequence
  Description of Artificial Sequence: Synthetic oligonucleotide
uaauugacugcagccauug

SEQ ID NO: 3208511 - RNA, 19 nt, Artificial Sequence
  Description of Artificial Sequence: Synthetic oligonucleotide
augacugugccguugcucu

SEQ ID NO: 3208512 - RNA, 19 nt, Artificial Sequence
  Description of Artificial Sequence: Synthetic oligonucleotide
aacucaucucuucaggcuu

SEQ ID NO: 3208513 - RNA, 19 nt, Artificial Sequence
  Description of Artificial Sequence: Synthetic oligonucleotide
aaggacaugccgaagcuca

SEQ ID NO: 3208514 - RNA, 19 nt, Artificial Sequence
  Description of Artificial Sequence: Synthetic oligonucleotide
aguccagugucuuggaacu

SEQ ID NO: 3208515 - RNA, 19 nt, Artificial Sequence
  Description of Artificial Sequence: Synthetic oligonucleotide
cucaucuucucucccagag

SEQ ID NO: 3208516 - RNA, 19 nt, Artificial Sequence
  Description of Artificial Sequence: Synthetic oligonucleotide
uuuguccaaagacccgaag

SEQ ID NO: 3208517 - RNA, 19 nt, Artificial Sequence
  Description of Artificial Sequence: Synthetic oligonucleotide
uuugcccagaacacgcagc

SEQ ID NO: 3208518 - RNA, 19 nt, Artificial Sequence
  Description of Artificial Sequence: Synthetic oligonucleotide
uccauaagugaucuucauc

SEQ ID NO: 3208519 - RNA, 19 nt, Artificial Sequence
  Description of Artificial Sequence: Synthetic oligonucleotide
cucauaggugcccugcucc

SEQ ID NO: 3208520 - RNA, 19 nt, Artificial Sequence
  Description of Artificial Sequence: Synthetic oligonucleotide
gacaugccgaagcucagcc

SEQ ID NO: 3208521 - RNA, 19 nt, Artificial Sequence
  Description of Artificial Sequence: Synthetic oligonucleotide
aucuucaucucuccaguug

SEQ ID NO: 3208522 - RNA, 19 nt, Artificial Sequence
  Description of Artificial Sequence: Synthetic oligonucleotide
ucuuuguccaaagacccga

SEQ ID NO: 3208523 - RNA, 19 nt, Artificial Sequence
  Description of Artificial Sequence: Synthetic oligonucleotide
aguccggucaaacagugaa

SEQ ID NO: 3208524 - RNA, 19 nt, Artificial Sequence
  Description of Artificial Sequence: Synthetic oligonucleotide
caucucuccaguuggaguc

SEQ ID NO: 3208525 - RNA, 19 nt, Artificial Sequence
  Description of Artificial Sequence: Synthetic oligonucleotide
gaguagcaaggacaugccg

SEQ ID NO: 3208526 - RNA, 19 nt, Artificial Sequence
  Description of Artificial Sequence: Synthetic oligonucleotide
ucugccucacucaucuucu

SEQ ID NO: 3208527 - RNA, 19 nt, Artificial Sequence
  Description of Artificial Sequence: Synthetic oligonucleotide
agguuugcccagaacacgc

SEQ ID NO: 3208528 - RNA, 19 nt, Artificial Sequence
  Description of Artificial Sequence: Synthetic oligonucleotide
ucucuucaggcuuagguuu

SEQ ID NO: 3208529 - RNA, 19 nt, Artificial Sequence
  Description of Artificial Sequence: Synthetic oligonucleotide
uguuucgggagauguguug

SEQ ID NO: 3208530 - RNA, 19 nt, Artificial Sequence
  Description of Artificial Sequence: Synthetic oligonucleotide
uagguuugcccagaacacg

SEQ ID NO: 3208531 - RNA, 19 nt, Artificial Sequence
  Description of Artificial Sequence: Synthetic oligonucleotide
ucgggagauguguugcagg

SEQ ID NO: 3208532 - RNA, 19 nt, Artificial Sequence
  Description of Artificial Sequence: Synthetic oligonucleotide
gagauguguugcaggaugg

SEQ ID NO: 3208533 - RNA, 19 nt, Artificial Sequence
  Description of Artificial Sequence: Synthetic oligonucleotide
ucuucucucccagaguagc

SEQ ID NO: 3208534 - RNA, 19 nt, Artificial Sequence
  Description of Artificial Sequence: Synthetic oligonucleotide
ggucaaacagugaaaaggc

SEQ ID NO: 3208535 - RNA, 19 nt, Artificial Sequence
  Description of Artificial Sequence: Synthetic oligonucleotide
accucugccucacucaucu

SEQ ID NO: 3208536 - RNA, 19 nt, Artificial Sequence
  Description of Artificial Sequence: Synthetic oligonucleotide
cuccacgaaguccucauag

SEQ ID NO: 3208537 - RNA, 19 nt, Artificial Sequence
  Description of Artificial Sequence: Synthetic oligonucleotide
uugcccagaacacgcagca

SEQ ID NO: 3208538 - RNA, 19 nt, Artificial Sequence
  Description of Artificial Sequence: Synthetic oligonucleotide
ucaucucuccaguuggagu

SEQ ID NO: 3208539 - RNA, 19 nt, Artificial Sequence
  Description of Artificial Sequence: Synthetic oligonucleotide
aggcuucauaauugacugc

SEQ ID NO: 3208540 - RNA, 19 nt, Artificial Sequence
  Description of Artificial Sequence: Synthetic oligonucleotide
agcacguccccacacuguc

SEQ ID NO: 3208541 - RNA, 19 nt, Artificial Sequence
  Description of Artificial Sequence: Synthetic oligonucleotide
agaguagcaaggacaugcc

SEQ ID NO: 3208542 - RNA, 19 nt, Artificial Sequence
  Description of Artificial Sequence: Synthetic oligonucleotide
uucaggcuuagguuugccc

SEQ ID NO: 3208543 - RNA, 19 nt, Artificial Sequence
  Description of Artificial Sequence: Synthetic oligonucleotide
aguagcaaggacaugccga

SEQ ID NO: 3208544 - RNA, 19 nt, Artificial Sequence
  Description of Artificial Sequence: Synthetic oligonucleotide
cuguccauaagugaucuuc

SEQ ID NO: 3208545 - RNA, 19 nt, Artificial Sequence
  Description of Artificial Sequence: Synthetic oligonucleotide
gauguguugcaggaugggc

SEQ ID NO: 3208546 - RNA, 19 nt, Artificial Sequence
  Description of Artificial Sequence: Synthetic oligonucleotide
agcuguuccaccucugccu

SEQ ID NO: 3208547 - RNA, 19 nt, Artificial Sequence
  Description of Artificial Sequence: Synthetic oligonucleotide
aagccccuccacgaagucc

SEQ ID NO: 3208548 - RNA, 19 nt, Artificial Sequence
  Description of Artificial Sequence: Synthetic oligonucleotide
cacgaaguccucauaggug

SEQ ID NO: 3208549 - RNA, 19 nt, Artificial Sequence
  Description of Artificial Sequence: Synthetic oligonucleotide
acaugccgaagcucagccc

SEQ ID NO: 3208550 - RNA, 19 nt, Artificial Sequence
  Description of Artificial Sequence: Synthetic oligonucleotide
ggagauguguugcaggaug

SEQ ID NO: 3208551 - RNA, 19 nt, Artificial Sequence
  Description of Artificial Sequence: Synthetic oligonucleotide
ucucucccagaguagcaag

SEQ ID NO: 3208552 - RNA, 19 nt, Artificial Sequence
  Description of Artificial Sequence: Synthetic oligonucleotide
cagugaaaaggccucuuug

SEQ ID NO: 3208553 - RNA, 19 nt, Artificial Sequence
  Description of Artificial Sequence: Synthetic oligonucleotide
cucuuuguccaaagacccg

SEQ ID NO: 3208554 - RNA, 19 nt, Artificial Sequence
  Description of Artificial Sequence: Synthetic oligonucleotide
ucacucaucuucucuccca

SEQ ID NO: 3208555 - RNA, 19 nt, Artificial Sequence
  Description of Artificial Sequence: Synthetic oligonucleotide
aucucuucaggcuuagguu

SEQ ID NO: 3208556 - RNA, 19 nt, Artificial Sequence
  Description of Artificial Sequence: Synthetic oligonucleotide
aggaacaucucgaagucca

SEQ ID NO: 3208557 - RNA, 19 nt, Artificial Sequence
  Description of Artificial Sequence: Synthetic oligonucleotide
uucaucucuccaguuggag

SEQ ID NO: 3208558 - RNA, 19 nt, Artificial Sequence
  Description of Artificial Sequence: Synthetic oligonucleotide
aauaguaugccucauauuc

SEQ ID NO: 3208559 - RNA, 19 nt, Artificial Sequence
  Description of Artificial Sequence: Synthetic oligonucleotide
aaaccauucaauaugcgcc

SEQ ID NO: 3208560 - RNA, 19 nt, Artificial Sequence
  Description of Artificial Sequence: Synthetic oligonucleotide
uagagcauggacaagagag

SEQ ID NO: 3208561 - RNA, 19 nt, Artificial Sequence
  Description of Artificial Sequence: Synthetic oligonucleotide
agcaugauuaucaagaggc

SEQ ID NO: 3208562 - RNA, 19 nt, Artificial Sequence
  Description of Artificial Sequence: Synthetic oligonucleotide
augaagaugauacacagca

SEQ ID NO: 3208563 - RNA, 19 nt, Artificial Sequence
  Description of Artificial Sequence: Synthetic oligonucleotide
aaaauuucugcccuacuug

SEQ ID NO: 3208564 - RNA, 19 nt, Artificial Sequence
  Description of Artificial Sequence: Synthetic oligonucleotide
aguaguaucaucugcuggg

SEQ ID NO: 3208565 - RNA, 19 nt, Artificial Sequence
  Description of Artificial Sequence: Synthetic oligonucleotide
cuuucuauuaugucaagcc

SEQ ID NO: 3208566 - RNA, 19 nt, Artificial Sequence
  Description of Artificial Sequence: Synthetic oligonucleotide
gaagaugauacacagcaug

SEQ ID NO: 3208567 - RNA, 19 nt, Artificial Sequence
  Description of Artificial Sequence: Synthetic oligonucleotide
uaugaaaugaucccuccca

SEQ ID NO: 3208568 - RNA, 19 nt, Artificial Sequence
  Description of Artificial Sequence: Synthetic oligonucleotide
uauuaugucaagcccaaac

SEQ ID NO: 3208569 - RNA, 19 nt, Artificial Sequence
  Description of Artificial Sequence: Synthetic oligonucleotide
uuucuauuaugucaagccc

SEQ ID NO: 3208570 - RNA, 19 nt, Artificial Sequence
  Description of Artificial Sequence: Synthetic oligonucleotide
ucauaggugaucccuagag

SEQ ID NO: 3208571 - RNA, 19 nt, Artificial Sequence
  Description of Artificial Sequence: Synthetic oligonucleotide
aagaucgcagaauaguaug

SEQ ID NO: 3208572 - RNA, 19 nt, Artificial Sequence
  Description of Artificial Sequence: Synthetic oligonucleotide
ucaauaugcgccacaaggc

SEQ ID NO: 3208573 - RNA, 19 nt, Artificial Sequence
  Description of Artificial Sequence: Synthetic oligonucleotide
auaugaaaugaucccuccc

SEQ ID NO: 3208574 - RNA, 19 nt, Artificial Sequence
  Description of Artificial Sequence: Synthetic oligonucleotide
aaauuucugcccuacuugu

SEQ ID NO: 3208575 - RNA, 19 nt, Artificial Sequence
  Description of Artificial Sequence: Synthetic oligonucleotide
caaaccauucaauaugcgc

SEQ ID NO: 3208576 - RNA, 19 nt, Artificial Sequence
  Description of Artificial Sequence: Synthetic oligonucleotide
ucucaugcagucaauggcc

SEQ ID NO: 3208577 - RNA, 19 nt, Artificial Sequence
  Description of Artificial Sequence: Synthetic oligonucleotide
aaaccucaagauuuucauc

SEQ ID NO: 3208578 - RNA, 19 nt, Artificial Sequence
  Description of Artificial Sequence: Synthetic oligonucleotide
ucuuuccugcacaaaaugc

SEQ ID NO: 3208579 - RNA, 19 nt, Artificial Sequence
  Description of Artificial Sequence: Synthetic oligonucleotide
cucaagauuuucaucuugg

SEQ ID NO: 3208580 - RNA, 19 nt, Artificial Sequence
  Description of Artificial Sequence: Synthetic oligonucleotide
auuaugucaagcccaaaca

SEQ ID NO: 3208581 - RNA, 19 nt, Artificial Sequence
  Description of Artificial Sequence: Synthetic oligonucleotide
ccaaacaucagucucaugc

SEQ ID NO: 3208582 - RNA, 19 nt, Artificial Sequence
  Description of Artificial Sequence: Synthetic oligonucleotide
aagcccaaacaucagucuc

SEQ ID NO: 3208583 - RNA, 19 nt, Artificial Sequence
  Description of Artificial Sequence: Synthetic oligonucleotide
auggccuuacuaaagaucg

SEQ ID NO: 3208584 - RNA, 19 nt, Artificial Sequence
  Description of Artificial Sequence: Synthetic oligonucleotide
ugggaaaccaugcugcagc

SEQ ID NO: 3208585 - RNA, 19 nt, Artificial Sequence
  Description of Artificial Sequence: Synthetic oligonucleotide
aguaggaguggacaagggg

SEQ ID NO: 3208586 - RNA, 19 nt, Artificial Sequence
  Description of Artificial Sequence: Synthetic oligonucleotide
agaauaguaugccucauau

SEQ ID NO: 3208587 - RNA, 19 nt, Artificial Sequence
  Description of Artificial Sequence: Synthetic oligonucleotide
aucugcauaacuguagggg

SEQ ID NO: 3208588 - RNA, 19 nt, Artificial Sequence
  Description of Artificial Sequence: Synthetic oligonucleotide
uacuaaagaucgcagaaua

SEQ ID NO: 3208589 - RNA, 19 nt, Artificial Sequence
  Description of Artificial Sequence: Synthetic oligonucleotide
aaaaugcucagugaugagu

SEQ ID NO: 3208590 - RNA, 19 nt, Artificial Sequence
  Description of Artificial Sequence: Synthetic oligonucleotide
cacagcaugauuaucaaga

SEQ ID NO: 3208591 - RNA, 19 nt, Artificial Sequence
  Description of Artificial Sequence: Synthetic oligonucleotide
uaaagaucgcagaauagua

SEQ ID NO: 3208592 - RNA, 19 nt, Artificial Sequence
  Description of Artificial Sequence: Synthetic oligonucleotide
agucucaugcagucaaugg

SEQ ID NO: 3208593 - RNA, 19 nt, Artificial Sequence
  Description of Artificial Sequence: Synthetic oligonucleotide
uaugccugggaaaccaugc

SEQ ID NO: 3208594 - RNA, 19 nt, Artificial Sequence
  Description of Artificial Sequence: Synthetic oligonucleotide
uacuugaggagcaggaaga

SEQ ID NO: 3208595 - RNA, 19 nt, Artificial Sequence
  Description of Artificial Sequence: Synthetic oligonucleotide
uuaugucaagcccaaacau

SEQ ID NO: 3208596 - RNA, 19 nt, Artificial Sequence
  Description of Artificial Sequence: Synthetic oligonucleotide
uaugaagaugauacacagc

SEQ ID NO: 3208597 - RNA, 19 nt, Artificial Sequence
  Description of Artificial Sequence: Synthetic oligonucleotide
ucugcauaacuguaggggu

SEQ ID NO: 3208598 - RNA, 19 nt, Artificial Sequence
  Description of Artificial Sequence: Synthetic oligonucleotide
aaugggugcugcucaggac

SEQ ID NO: 3208599 - RNA, 19 nt, Artificial Sequence
  Description of Artificial Sequence: Synthetic oligonucleotide
agugcgcuagaaugggugc

SEQ ID NO: 3208600 - RNA, 19 nt, Artificial Sequence
  Description of Artificial Sequence: Synthetic oligonucleotide
uuccuuucuauuaugucaa

SEQ ID NO: 3208601 - RNA, 19 nt, Artificial Sequence
  Description of Artificial Sequence: Synthetic oligonucleotide
aaccauucaauaugcgcca

SEQ ID NO: 3208602 - RNA, 19 nt, Artificial Sequence
  Description of Artificial Sequence: Synthetic oligonucleotide
cucauauucucugaugacc

SEQ ID NO: 3208603 - RNA, 19 nt, Artificial Sequence
  Description of Artificial Sequence: Synthetic oligonucleotide
ugcugggcgauucaggucu

SEQ ID NO: 3208604 - RNA, 19 nt, Artificial Sequence
  Description of Artificial Sequence: Synthetic oligonucleotide
ucuauuaugucaagcccaa

SEQ ID NO: 3208605 - RNA, 19 nt, Artificial Sequence
  Description of Artificial Sequence: Synthetic oligonucleotide
uguagggguaggaucuggg

SEQ ID NO: 3208606 - RNA, 19 nt, Artificial Sequence
  Description of Artificial Sequence: Synthetic oligonucleotide
ucaagcccaaacaucaguc

SEQ ID NO: 3208607 - RNA, 19 nt, Artificial Sequence
  Description of Artificial Sequence: Synthetic oligonucleotide
caauaugcgccacaaggcc

SEQ ID NO: 3208608 - RNA, 19 nt, Artificial Sequence
  Description of Artificial Sequence: Synthetic oligonucleotide
ucccgccuaauuaugcugg

SEQ ID NO: 3208609 - RNA, 19 nt, Artificial Sequence
  Description of Artificial Sequence: Synthetic oligonucleotide
cucauggcuaggaggaucg

SEQ ID NO: 3208610 - RNA, 19 nt, Artificial Sequence
  Description of Artificial Sequence: Synthetic oligonucleotide
gaaaccaugcugcagccca

SEQ ID NO: 3208611 - RNA, 19 nt, Artificial Sequence
  Description of Artificial Sequence: Synthetic oligonucleotide
uucucugaugaccgcaugc

SEQ ID NO: 3208612 - RNA, 19 nt, Artificial Sequence
  Description of Artificial Sequence: Synthetic oligonucleotide
acagcaugauuaucaagag

SEQ ID NO: 3208613 - RNA, 19 nt, Artificial Sequence
  Description of Artificial Sequence: Synthetic oligonucleotide
uuaucaagaggccugucuu

SEQ ID NO: 3208614 - RNA, 19 nt, Artificial Sequence
  Description of Artificial Sequence: Synthetic oligonucleotide
aagagaguaggaguggaca

SEQ ID NO: 3208615 - RNA, 19 nt, Artificial Sequence
  Description of Artificial Sequence: Synthetic oligonucleotide
aguaucaucugcugggcga

SEQ ID NO: 3208616 - RNA, 19 nt, Artificial Sequence
  Description of Artificial Sequence: Synthetic oligonucleotide
guacuugaggagcaggaag

SEQ ID NO: 3208617 - RNA, 19 nt, Artificial Sequence
  Description of Artificial Sequence: Synthetic oligonucleotide
auuucugcccuacuuguca

SEQ ID NO: 3208618 - RNA, 19 nt, Artificial Sequence
  Description of Artificial Sequence: Synthetic oligonucleotide
uccucugcagcucaucucu

SEQ ID NO: 3208619 - RNA, 19 nt, Artificial Sequence
  Description of Artificial Sequence: Synthetic oligonucleotide
aacuguagggguaggaucu

SEQ ID NO: 3208620 - RNA, 19 nt, Artificial Sequence
  Description of Artificial Sequence: Synthetic oligonucleotide
ucugaugaccgcaugcaaa

SEQ ID NO: 3208621 - RNA, 19 nt, Artificial Sequence
  Description of Artificial Sequence: Synthetic oligonucleotide
aagaugauacacagcauga

SEQ ID NO: 3208622 - RNA, 19 nt, Artificial Sequence
  Description of Artificial Sequence: Synthetic oligonucleotide
augaaaugaucccucccag

SEQ ID NO: 3208623 - RNA, 19 nt, Artificial Sequence
  Description of Artificial Sequence: Synthetic oligonucleotide
aucuuuccugcacaaaaug

SEQ ID NO: 3208624 - RNA, 19 nt, Artificial Sequence
  Description of Artificial Sequence: Synthetic oligonucleotide
gucucaugcagucaauggc

SEQ ID NO: 3208625 - RNA, 19 nt, Artificial Sequence
  Description of Artificial Sequence: Synthetic oligonucleotide
agaucgcagaauaguaugc

SEQ ID NO: 3208626 - RNA, 19 nt, Artificial Sequence
  Description of Artificial Sequence: Synthetic oligonucleotide
gaucccucccagcauacag

SEQ ID NO: 3208627 - RNA, 19 nt, Artificial Sequence
  Description of Artificial Sequence: Synthetic oligonucleotide
uaguaucaucugcugggcg

SEQ ID NO: 3208628 - RNA, 19 nt, Artificial Sequence
  Description of Artificial Sequence: Synthetic oligonucleotide
auacacagcaugauuauca

SEQ ID NO: 3208629 - RNA, 19 nt, Artificial Sequence
  Description of Artificial Sequence: Synthetic oligonucleotide
ugaaaugaucccucccagc

SEQ ID NO: 3208630 - RNA, 19 nt, Artificial Sequence
  Description of Artificial Sequence: Synthetic oligonucleotide
agaguaggaguggacaagg

SEQ ID NO: 3208631 - RNA, 19 nt, Artificial Sequence
  Description of Artificial Sequence: Synthetic oligonucleotide
cugucuuugguaugccugg

SEQ ID NO: 3208632 - RNA, 19 nt, Artificial Sequence
  Description of Artificial Sequence: Synthetic oligonucleotide
cuuacuaaagaucgcagaa

SEQ ID NO: 3208633 - RNA, 19 nt, Artificial Sequence
  Description of Artificial Sequence: Synthetic oligonucleotide
uccgcaugggcccuggggc

SEQ ID NO: 3208634 - RNA, 19 nt, Artificial Sequence
  Description of Artificial Sequence: Synthetic oligonucleotide
ucugcugggcgauucaggu

SEQ ID NO: 3208635 - RNA, 19 nt, Artificial Sequence
  Description of Artificial Sequence: Synthetic oligonucleotide
cagcauacagccccaaacc

SEQ ID NO: 3208636 - RNA, 19 nt, Artificial Sequence
  Description of Artificial Sequence: Synthetic oligonucleotide
ucaaagcaucugcauaacu

SEQ ID NO: 3208637 - RNA, 19 nt, Artificial Sequence
  Description of Artificial Sequence: Synthetic oligonucleotide
guaucuuuccugcacaaaa

SEQ ID NO: 3208638 - RNA, 19 nt, Artificial Sequence
  Description of Artificial Sequence: Synthetic oligonucleotide
uaucuuuccugcacaaaau

SEQ ID NO: 3208639 - RNA, 19 nt, Artificial Sequence
  Description of Artificial Sequence: Synthetic oligonucleotide
caguaguaucaucugcugg

SEQ ID NO: 3208640 - RNA, 19 nt, Artificial Sequence
  Description of Artificial Sequence: Synthetic oligonucleotide
aaagaucgcagaauaguau

SEQ ID NO: 3208641 - RNA, 19 nt, Artificial Sequence
  Description of Artificial Sequence: Synthetic oligonucleotide
uaacuguagggguaggauc

SEQ ID NO: 3208642 - RNA, 19 nt, Artificial Sequence
  Description of Artificial Sequence: Synthetic oligonucleotide
uaguaugccucauauucuc

SEQ ID NO: 3208643 - RNA, 19 nt, Artificial Sequence
  Description of Artificial Sequence: Synthetic oligonucleotide
aggaucgcugccuggcacc

SEQ ID NO: 3208644 - RNA, 19 nt, Artificial Sequence
  Description of Artificial Sequence: Synthetic oligonucleotide
cauaggugaucccuagagc

SEQ ID NO: 3208645 - RNA, 19 nt, Artificial Sequence
  Description of Artificial Sequence: Synthetic oligonucleotide
cccguauaugaaaugaucc

SEQ ID NO: 3208646 - RNA, 19 nt, Artificial Sequence
  Description of Artificial Sequence: Synthetic oligonucleotide
ugcccuacuugucaccugc

SEQ ID NO: 3208647 - RNA, 19 nt, Artificial Sequence
  Description of Artificial Sequence: Synthetic oligonucleotide
ugcucagugaugagucucc

SEQ ID NO: 3208648 - RNA, 19 nt, Artificial Sequence
  Description of Artificial Sequence: Synthetic oligonucleotide
ucgcagaauaguaugccuc

SEQ ID NO: 3208649 - RNA, 19 nt, Artificial Sequence
  Description of Artificial Sequence: Synthetic oligonucleotide
acaguaguaucaucugcug

SEQ ID NO: 3208650 - RNA, 19 nt, Artificial Sequence
  Description of Artificial Sequence: Synthetic oligonucleotide
uaugccucauauucucuga

SEQ ID NO: 3208651 - RNA, 19 nt, Artificial Sequence
  Description of Artificial Sequence: Synthetic oligonucleotide
aauuucugcccuacuuguc

SEQ ID NO: 3208652 - RNA, 19 nt, Artificial Sequence
  Description of Artificial Sequence: Synthetic oligonucleotide
gaucccuagagcauggaca

SEQ ID NO: 3208653 - RNA, 19 nt, Artificial Sequence
  Description of Artificial Sequence: Synthetic oligonucleotide
gaucgcagaauaguaugcc

SEQ ID NO: 3208654 - RNA, 19 nt, Artificial Sequence
  Description of Artificial Sequence: Synthetic oligonucleotide
aucagucucaugcagucaa

SEQ ID NO: 3208655 - RNA, 19 nt, Artificial Sequence
  Description of Artificial Sequence: Synthetic oligonucleotide
ucaagaggccugucuuugg

SEQ ID NO: 3208656 - RNA, 19 nt, Artificial Sequence
  Description of Artificial Sequence: Synthetic oligonucleotide
gacaagagaguaggagugg

SEQ ID NO: 3208657 - RNA, 19 nt, Artificial Sequence
  Description of Artificial Sequence: Synthetic oligonucleotide
aauaugcgccacaaggccu

SEQ ID NO: 3208658 - RNA, 19 nt, Artificial Sequence
  Description of Artificial Sequence: Synthetic oligonucleotide
auuauauuuuccuugaucc

SEQ ID NO: 3208659 - RNA, 19 nt, Artificial Sequence
  Description of Artificial Sequence: Synthetic oligonucleotide
aacauugucaccuugucac

SEQ ID NO: 3208660 - RNA, 19 nt, Artificial Sequence
  Description of Artificial Sequence: Synthetic oligonucleotide
uguuuuaaagguauaagcg

SEQ ID NO: 3208661 - RNA, 19 nt, Artificial Sequence
  Description of Artificial Sequence: Synthetic oligonucleotide
uuauuuauuaucauuauau

SEQ ID NO: 3208662 - RNA, 19 nt, Artificial Sequence
  Description of Artificial Sequence: Synthetic oligonucleotide
ucaaugaagaagaugcugg

SEQ ID NO: 3208663 - RNA, 19 nt, Artificial Sequence
  Description of Artificial Sequence: Synthetic oligonucleotide
cucucaaugaagaagaugc

SEQ ID NO: 3208664 - RNA, 19 nt, Artificial Sequence
  Description of Artificial Sequence: Synthetic oligonucleotide
aauaaaaccuucuuucucu

SEQ ID NO: 3208665 - RNA, 19 nt, Artificial Sequence
  Description of Artificial Sequence: Synthetic oligonucleotide
agucuuaacaccuguaagc

SEQ ID NO: 3208666 - RNA, 19 nt, Artificial Sequence
  Description of Artificial Sequence: Synthetic oligonucleotide
uuuagcacugcucugauac

SEQ ID NO: 3208667 - RNA, 19 nt, Artificial Sequence
  Description of Artificial Sequence: Synthetic oligonucleotide
uuuucuuuucaauaguucc

SEQ ID NO: 3208668 - RNA, 19 nt, Artificial Sequence
  Description of Artificial Sequence: Synthetic oligonucleotide
uaaacuuuagcacugcucu

SEQ ID NO: 3208669 - RNA, 19 nt, Artificial Sequence
  Description of Artificial Sequence: Synthetic oligonucleotide
aagcaggauguccugaucc

SEQ ID NO: 3208670 - RNA, 19 nt, Artificial Sequence
  Description of Artificial Sequence: Synthetic oligonucleotide
uuuucaauaguuccugugc

SEQ ID NO: 3208671 - RNA, 19 nt, Artificial Sequence
  Description of Artificial Sequence: Synthetic oligonucleotide
uacaauaaaaccuucuuuc

SEQ ID NO: 3208672 - RNA, 19 nt, Artificial Sequence
  Description of Artificial Sequence: Synthetic oligonucleotide
aaucuugucucccuucugg

SEQ ID NO: 3208673 - RNA, 19 nt, Artificial Sequence
  Description of Artificial Sequence: Synthetic oligonucleotide
auuaucauuauauuuuccu

SEQ ID NO: 3208674 - RNA, 19 nt, Artificial Sequence
  Description of Artificial Sequence: Synthetic oligonucleotide
acuagggaauuuuauauuc

SEQ ID NO: 3208675 - RNA, 19 nt, Artificial Sequence
  Description of Artificial Sequence: Synthetic oligonucleotide
aaagcuuuauuuauuauca

SEQ ID NO: 3208676 - RNA, 19 nt, Artificial Sequence
  Description of Artificial Sequence: Synthetic oligonucleotide
ucuuguacaagucugaguu

SEQ ID NO: 3208677 - RNA, 19 nt, Artificial Sequence
  Description of Artificial Sequence: Synthetic oligonucleotide
uaucauuauauuuuccuug

SEQ ID NO: 3208678 - RNA, 19 nt, Artificial Sequence
  Description of Artificial Sequence: Synthetic oligonucleotide
cuguuuuaaagguauaagc

SEQ ID NO: 3208679 - RNA, 19 nt, Artificial Sequence
  Description of Artificial Sequence: Synthetic oligonucleotide
aaaacauugucaccuuguc

SEQ ID NO: 3208680 - RNA, 19 nt, Artificial Sequence
  Description of Artificial Sequence: Synthetic oligonucleotide
ugugauacauauaaacugu

SEQ ID NO: 3208681 - RNA, 19 nt, Artificial Sequence
  Description of Artificial Sequence: Synthetic oligonucleotide
gaaguuuagucuuaacacc

SEQ ID NO: 3208682 - RNA, 19 nt, Artificial Sequence
  Description of Artificial Sequence: Synthetic oligonucleotide
uugggugugauacauauaa

SEQ ID NO: 3208683 - RNA, 19 nt, Artificial Sequence
  Description of Artificial Sequence: Synthetic oligonucleotide
cuuaacaccuguaagccag

SEQ ID NO: 3208684 - RNA, 19 nt, Artificial Sequence
  Description of Artificial Sequence: Synthetic oligonucleotide
uaaagcuuuauuuauuauc

SEQ ID NO: 3208685 - RNA, 19 nt, Artificial Sequence
  Description of Artificial Sequence: Synthetic oligonucleotide
ugucugucuguuuuaaagg

SEQ ID NO: 3208686 - RNA, 19 nt, Artificial Sequence
  Description of Artificial Sequence: Synthetic oligonucleotide
auuuauuaucauuauauuu

SEQ ID NO: 3208687 - RNA, 19 nt, Artificial Sequence
  Description of Artificial Sequence: Synthetic oligonucleotide
ugaacuaaagcuuuauuua

SEQ ID NO: 3208688 - RNA, 19 nt, Artificial Sequence
  Description of Artificial Sequence: Synthetic oligonucleotide
ucugauacaauaaaaccuu

SEQ ID NO: 3208689 - RNA, 19 nt, Artificial Sequence
  Description of Artificial Sequence: Synthetic oligonucleotide
aaaaccuucuuucucucca

SEQ ID NO: 3208690 - RNA, 19 nt, Artificial Sequence
  Description of Artificial Sequence: Synthetic oligonucleotide
uuuaaagguauaagcgaag

SEQ ID NO: 3208691 - RNA, 19 nt, Artificial Sequence
  Description of Artificial Sequence: Synthetic oligonucleotide
uucugcauaagcaggaugu

SEQ ID NO: 3208692 - RNA, 19 nt, Artificial Sequence
  Description of Artificial Sequence: Synthetic oligonucleotide
ucauccagaaaucuugucu

SEQ ID NO: 3208693 - RNA, 19 nt, Artificial Sequence
  Description of Artificial Sequence: Synthetic oligonucleotide
aaagguauaagcgaaguuu

SEQ ID NO: 3208694 - RNA, 19 nt, Artificial Sequence
  Description of Artificial Sequence: Synthetic oligonucleotide
gugugauacauauaaacug

SEQ ID NO: 3208695 - RNA, 19 nt, Artificial Sequence
  Description of Artificial Sequence: Synthetic oligonucleotide
ugcucugauacaauaaaac

SEQ ID NO: 3208696 - RNA, 19 nt, Artificial Sequence
  Description of Artificial Sequence: Synthetic oligonucleotide
gauguccugauccucuucg

SEQ ID NO: 3208697 - RNA, 19 nt, Artificial Sequence
  Description of Artificial Sequence: Synthetic oligonucleotide
uccucaugaaccauggaug

SEQ ID NO: 3208698 - RNA, 19 nt, Artificial Sequence
  Description of Artificial Sequence: Synthetic oligonucleotide
ugugcuugggcucauccag

SEQ ID NO: 3208699 - RNA, 19 nt, Artificial Sequence
  Description of Artificial Sequence: Synthetic oligonucleotide
uguuccucaugaaccaugg

SEQ ID NO: 3208700 - RNA, 19 nt, Artificial Sequence
  Description of Artificial Sequence: Synthetic oligonucleotide
uuucuuuucaauaguuccu

SEQ ID NO: 3208701 - RNA, 19 nt, Artificial Sequence
  Description of Artificial Sequence: Synthetic oligonucleotide
gaauuuuauauucagugua

SEQ ID NO: 3208702 - RNA, 19 nt, Artificial Sequence
  Description of Artificial Sequence: Synthetic oligonucleotide
uauuaucauuauauuuucc

SEQ ID NO: 3208703 - RNA, 19 nt, Artificial Sequence
  Description of Artificial Sequence: Synthetic oligonucleotide
uuauuaucauuauauuuuc

SEQ ID NO: 3208704 - RNA, 19 nt, Artificial Sequence
  Description of Artificial Sequence: Synthetic oligonucleotide
ucuguuuuaaagguauaag

SEQ ID NO: 3208705 - RNA, 19 nt, Artificial Sequence
  Description of Artificial Sequence: Synthetic oligonucleotide
gagauguuccucaugaacc

SEQ ID NO: 3208706 - RNA, 19 nt, Artificial Sequence
  Description of Artificial Sequence: Synthetic oligonucleotide
guuuuaaagguauaagcga

SEQ ID NO: 3208707 - RNA, 19 nt, Artificial Sequence
  Description of Artificial Sequence: Synthetic oligonucleotide
uguaagccaguacuggugc

SEQ ID NO: 3208708 - RNA, 19 nt, Artificial Sequence
  Description of Artificial Sequence: Synthetic oligonucleotide
ugaaccauggaugucauuc

SEQ ID NO: 3208709 - RNA, 19 nt, Artificial Sequence
  Description of Artificial Sequence: Synthetic oligonucleotide
uagucuuaacaccuguaag

SEQ ID NO: 3208710 - RNA, 19 nt, Artificial Sequence
  Description of Artificial Sequence: Synthetic oligonucleotide
uauaagcgaaguuuagucu

SEQ ID NO: 3208711 - RNA, 19 nt, Artificial Sequence
  Description of Artificial Sequence: Synthetic oligonucleotide
uuagucuuaacaccuguaa

SEQ ID NO: 3208712 - RNA, 19 nt, Artificial Sequence
  Description of Artificial Sequence: Synthetic oligonucleotide
aacaccuguaagccaguac

SEQ ID NO: 3208713 - RNA, 19 nt, Artificial Sequence
  Description of Artificial Sequence: Synthetic oligonucleotide
uucauugcuggccaucugc

SEQ ID NO: 3208714 - RNA, 19 nt, Artificial Sequence
  Description of Artificial Sequence: Synthetic oligonucleotide
uagggaauuuuauauucag

SEQ ID NO: 3208715 - RNA, 19 nt, Artificial Sequence
  Description of Artificial Sequence: Synthetic oligonucleotide
uuucaauaguuccugugcu

SEQ ID NO: 3208716 - RNA, 19 nt, Artificial Sequence
  Description of Artificial Sequence: Synthetic oligonucleotide
ugcauaagcaggauguccu

SEQ ID NO: 3208717 - RNA, 19 nt, Artificial Sequence
  Description of Artificial Sequence: Synthetic oligonucleotide
aagucugaguuuucuuuuc

SEQ ID NO: 3208718 - RNA, 19 nt, Artificial Sequence
  Description of Artificial Sequence: Synthetic oligonucleotide
guauaagcgaaguuuaguc

SEQ ID NO: 3208719 - RNA, 19 nt, Artificial Sequence
  Description of Artificial Sequence: Synthetic oligonucleotide
gugucugucuguuuuaaag

SEQ ID NO: 3208720 - RNA, 19 nt, Artificial Sequence
  Description of Artificial Sequence: Synthetic oligonucleotide
aaacauugucaccuuguca

SEQ ID NO: 3208721 - RNA, 19 nt, Artificial Sequence
  Description of Artificial Sequence: Synthetic oligonucleotide
uggaugucauuccacuagg

SEQ ID NO: 3208722 - RNA, 19 nt, Artificial Sequence
  Description of Artificial Sequence: Synthetic oligonucleotide
uguacauggugucuuguac

SEQ ID NO: 3208723 - RNA, 19 nt, Artificial Sequence
  Description of Artificial Sequence: Synthetic oligonucleotide
ucuucgaaacuucauugcu

SEQ ID NO: 3208724 - RNA, 19 nt, Artificial Sequence
  Description of Artificial Sequence: Synthetic oligonucleotide
auggaugucauuccacuag

SEQ ID NO: 3208725 - RNA, 19 nt, Artificial Sequence
  Description of Artificial Sequence: Synthetic oligonucleotide
acaccuguaagccaguacu

SEQ ID NO: 3208726 - RNA, 19 nt, Artificial Sequence
  Description of Artificial Sequence: Synthetic oligonucleotide
acaauaaaaccuucuuucu

SEQ ID NO: 3208727 - RNA, 19 nt, Artificial Sequence
  Description of Artificial Sequence: Synthetic oligonucleotide
ugucccuaaacuuuagcac

SEQ ID NO: 3208728 - RNA, 19 nt, Artificial Sequence
  Description of Artificial Sequence: Synthetic oligonucleotide
auauucaguguacauggug

SEQ ID NO: 3208729 - RNA, 19 nt, Artificial Sequence
  Description of Artificial Sequence: Synthetic oligonucleotide
aaguccacaggagauguuc

SEQ ID NO: 3208730 - RNA, 19 nt, Artificial Sequence
  Description of Artificial Sequence: Synthetic oligonucleotide
ucaugaaccauggauguca

SEQ ID NO: 3208731 - RNA, 19 nt, Artificial Sequence
  Description of Artificial Sequence: Synthetic oligonucleotide
aaguuuagucuuaacaccu

SEQ ID NO: 3208732 - RNA, 19 nt, Artificial Sequence
  Description of Artificial Sequence: Synthetic oligonucleotide
cauuauauuuuccuugauc

SEQ ID NO: 3208733 - RNA, 19 nt, Artificial Sequence
  Description of Artificial Sequence: Synthetic oligonucleotide
aauaguuccugugcuuggg

SEQ ID NO: 3208734 - RNA, 19 nt, Artificial Sequence
  Description of Artificial Sequence: Synthetic oligonucleotide
auaaaaccuucuuucucuc

SEQ ID NO: 3208735 - RNA, 19 nt, Artificial Sequence
  Description of Artificial Sequence: Synthetic oligonucleotide
cuggccaucugcuugggcg

SEQ ID NO: 3208736 - RNA, 19 nt, Artificial Sequence
  Description of Artificial Sequence: Synthetic oligonucleotide
uuccacuucugcauaagca

SEQ ID NO: 3208737 - RNA, 19 nt, Artificial Sequence
  Description of Artificial Sequence: Synthetic oligonucleotide
ugucauuccacuagggaau

SEQ ID NO: 3208738 - RNA, 19 nt, Artificial Sequence
  Description of Artificial Sequence: Synthetic oligonucleotide
agaaaucuugucucccuuc

SEQ ID NO: 3208739 - RNA, 19 nt, Artificial Sequence
  Description of Artificial Sequence: Synthetic oligonucleotide
gaaacuucauugcuggcca

SEQ ID NO: 3208740 - RNA, 19 nt, Artificial Sequence
  Description of Artificial Sequence: Synthetic oligonucleotide
auccagaaaucuugucucc

SEQ ID NO: 3208741 - RNA, 19 nt, Artificial Sequence
  Description of Artificial Sequence: Synthetic oligonucleotide
acuaaagcuuuauuuauua

SEQ ID NO: 3208742 - RNA, 19 nt, Artificial Sequence
  Description of Artificial Sequence: Synthetic oligonucleotide
ucaauaguuccugugcuug

SEQ ID NO: 3208743 - RNA, 19 nt, Artificial Sequence
  Description of Artificial Sequence: Synthetic oligonucleotide
uguugggugugauacauau

SEQ ID NO: 3208744 - RNA, 19 nt, Artificial Sequence
  Description of Artificial Sequence: Synthetic oligonucleotide
uuaaagguauaagcgaagu

SEQ ID NO: 3208745 - RNA, 19 nt, Artificial Sequence
  Description of Artificial Sequence: Synthetic oligonucleotide
auaguuccugugcuugggc

SEQ ID NO: 3208746 - RNA, 19 nt, Artificial Sequence
  Description of Artificial Sequence: Synthetic oligonucleotide
uuaucauuauauuuuccuu

SEQ ID NO: 3208747 - RNA, 19 nt, Artificial Sequence
  Description of Artificial Sequence: Synthetic oligonucleotide
ucuggcuacagcaguuuag

SEQ ID NO: 3208748 - RNA, 19 nt, Artificial Sequence
  Description of Artificial Sequence: Synthetic oligonucleotide
uccuugaucccuuugcaac

SEQ ID NO: 3208749 - RNA, 19 nt, Artificial Sequence
  Description of Artificial Sequence: Synthetic oligonucleotide
aucuugucucccuucuggc

SEQ ID NO: 3208750 - RNA, 19 nt, Artificial Sequence
  Description of Artificial Sequence: Synthetic oligonucleotide
cuaaacuuuagcacugcuc

SEQ ID NO: 3208751 - RNA, 19 nt, Artificial Sequence
  Description of Artificial Sequence: Synthetic oligonucleotide
cuuuucaauaguuccugug

SEQ ID NO: 3208752 - RNA, 19 nt, Artificial Sequence
  Description of Artificial Sequence: Synthetic oligonucleotide
cugauguugggugugauac

SEQ ID NO: 3208753 - RNA, 19 nt, Artificial Sequence
  Description of Artificial Sequence: Synthetic oligonucleotide
augucauuccacuagggaa

SEQ ID NO: 3208754 - RNA, 19 nt, Artificial Sequence
  Description of Artificial Sequence: Synthetic oligonucleotide
aaccuucuuucucuccaac

SEQ ID NO: 3208755 - RNA, 19 nt, Artificial Sequence
  Description of Artificial Sequence: Synthetic oligonucleotide
cuucuuucucuccaacugg

SEQ ID NO: 3208756 - RNA, 19 nt, Artificial Sequence
  Description of Artificial Sequence: Synthetic oligonucleotide
auugcuggccaucugcuug

SEQ ID NO: 3208757 - RNA, 19 nt, Artificial Sequence
  Description of Artificial Sequence: Synthetic oligonucleotide
auucaguguacaugguguc

SEQ ID NO: 3208758 - RNA, 19 nt, Artificial Sequence
  Description of Artificial Sequence: Synthetic oligonucleotide
aaaaucuucuguuagagcc

SEQ ID NO: 3208759 - RNA, 19 nt, Artificial Sequence
  Description of Artificial Sequence: Synthetic oligonucleotide
aaguugagaauauaguugg

SEQ ID NO: 3208760 - RNA, 19 nt, Artificial Sequence
  Description of Artificial Sequence: Synthetic oligonucleotide
uuaagaaacaaauguaucc

SEQ ID NO: 3208761 - RNA, 19 nt, Artificial Sequence
  Description of Artificial Sequence: Synthetic oligonucleotide
uuuggugguacaaucaagg

SEQ ID NO: 3208762 - RNA, 19 nt, Artificial Sequence
  Description of Artificial Sequence: Synthetic oligonucleotide
aacuuauugugcuagaaga

SEQ ID NO: 3208763 - RNA, 19 nt, Artificial Sequence
  Description of Artificial Sequence: Synthetic oligonucleotide
gauagaauguucuugcaag

SEQ ID NO: 3208764 - RNA, 19 nt, Artificial Sequence
  Description of Artificial Sequence: Synthetic oligonucleotide
guucauauuggauagaaug

SEQ ID NO: 3208765 - RNA, 19 nt, Artificial Sequence
  Description of Artificial Sequence: Synthetic oligonucleotide
gaauucuucacucccauag

SEQ ID NO: 3208766 - RNA, 19 nt, Artificial Sequence
  Description of Artificial Sequence: Synthetic oligonucleotide
uaagaaacaaauguauccg

SEQ ID NO: 3208767 - RNA, 19 nt, Artificial Sequence
  Description of Artificial Sequence: Synthetic oligonucleotide
uauguuguuuauaaguuca

SEQ ID NO: 3208768 - RNA, 19 nt, Artificial Sequence
  Description of Artificial Sequence: Synthetic oligonucleotide
cuagucauccauuuggugg

SEQ ID NO: 3208769 - RNA, 19 nt, Artificial Sequence
  Description of Artificial Sequence: Synthetic oligonucleotide
uaguugaucuuucaagugg

SEQ ID NO: 3208770 - RNA, 19 nt, Artificial Sequence
  Description of Artificial Sequence: Synthetic oligonucleotide
guauggacuaaauacaugc

SEQ ID NO: 3208771 - RNA, 19 nt, Artificial Sequence
  Description of Artificial Sequence: Synthetic oligonucleotide
caaaaugcauuauacauug

SEQ ID NO: 3208772 - RNA, 19 nt, Artificial Sequence
  Description of Artificial Sequence: Synthetic oligonucleotide
cuugccacaaguaaaacug

SEQ ID NO: 3208773 - RNA, 19 nt, Artificial Sequence
  Description of Artificial Sequence: Synthetic oligonucleotide
aaaacaccacaagagaaac

SEQ ID NO: 3208774 - RNA, 19 nt, Artificial Sequence
  Description of Artificial Sequence: Synthetic oligonucleotide
gaugguauaguucaccaug

SEQ ID NO: 3208775 - RNA, 19 nt, Artificial Sequence
  Description of Artificial Sequence: Synthetic oligonucleotide
ucaaacagcauuuaagaaa

SEQ ID NO: 3208776 - RNA, 19 nt, Artificial Sequence
  Description of Artificial Sequence: Synthetic oligonucleotide
cacaagaauagucaggagg

SEQ ID NO: 3208777 - RNA, 19 nt, Artificial Sequence
  Description of Artificial Sequence: Synthetic oligonucleotide
gauuuccugagauacuugg

SEQ ID NO: 3208778 - RNA, 19 nt, Artificial Sequence
  Description of Artificial Sequence: Synthetic oligonucleotide
gauacuuggucacugacac

SEQ ID NO: 3208779 - RNA, 19 nt, Artificial Sequence
  Description of Artificial Sequence: Synthetic oligonucleotide
uguuucuugucuuaggaga

SEQ ID NO: 3208780 - RNA, 19 nt, Artificial Sequence
  Description of Artificial Sequence: Synthetic oligonucleotide
uuugacgugguaauagcag

SEQ ID NO: 3208781 - RNA, 19 nt, Artificial Sequence
  Description of Artificial Sequence: Synthetic oligonucleotide
ucaaguggucccaaaaugc

SEQ ID NO: 3208782 - RNA, 19 nt, Artificial Sequence
  Description of Artificial Sequence: Synthetic oligonucleotide
uucauauuggauagaaugu

SEQ ID NO: 3208783 - RNA, 19 nt, Artificial Sequence
  Description of Artificial Sequence: Synthetic oligonucleotide
uaauuuggauuucauauuc

SEQ ID NO: 3208784 - RNA, 19 nt, Artificial Sequence
  Description of Artificial Sequence: Synthetic oligonucleotide
uuuauguuguuuauaaguu

SEQ ID NO: 3208785 - RNA, 19 nt, Artificial Sequence
  Description of Artificial Sequence: Synthetic oligonucleotide
aaacuugcuuuccaaacug

SEQ ID NO: 3208786 - RNA, 19 nt, Artificial Sequence
  Description of Artificial Sequence: Synthetic oligonucleotide
gaaaagaaguccuccgggg

SEQ ID NO: 3208787 - RNA, 19 nt, Artificial Sequence
  Description of Artificial Sequence: Synthetic oligonucleotide
aaucaaggaaauugggcug

SEQ ID NO: 3208788 - RNA, 19 nt, Artificial Sequence
  Description of Artificial Sequence: Synthetic oligonucleotide
guuuauaaguucaagagca

SEQ ID NO: 3208789 - RNA, 19 nt, Artificial Sequence
  Description of Artificial Sequence: Synthetic oligonucleotide
caaguugagaauauaguug

SEQ ID NO: 3208790 - RNA, 19 nt, Artificial Sequence
  Description of Artificial Sequence: Synthetic oligonucleotide
ugcuuuauccaucagcaga

SEQ ID NO: 3208791 - RNA, 19 nt, Artificial Sequence
  Description of Artificial Sequence: Synthetic oligonucleotide
uggacuaaauacaugcuga

SEQ ID NO: 3208792 - RNA, 19 nt, Artificial Sequence
  Description of Artificial Sequence: Synthetic oligonucleotide
uuauugugcuagaagagga

SEQ ID NO: 3208793 - RNA, 19 nt, Artificial Sequence
  Description of Artificial Sequence: Synthetic oligonucleotide
uuggagaugaacuuauugu

SEQ ID NO: 3208794 - RNA, 19 nt, Artificial Sequence
  Description of Artificial Sequence: Synthetic oligonucleotide
uuuguuugagagaugauuu

SEQ ID NO: 3208795 - RNA, 19 nt, Artificial Sequence
  Description of Artificial Sequence: Synthetic oligonucleotide
uuaacaaacuuccagccua

SEQ ID NO: 3208796 - RNA, 19 nt, Artificial Sequence
  Description of Artificial Sequence: Synthetic oligonucleotide
gaaacaaauguauccguug

SEQ ID NO: 3208797 - RNA, 19 nt, Artificial Sequence
  Description of Artificial Sequence: Synthetic oligonucleotide
acaaucaaggaaauugggc

SEQ ID NO: 3208798 - RNA, 19 nt, Artificial Sequence
  Description of Artificial Sequence: Synthetic oligonucleotide
uucaaguggucccaaaaug

SEQ ID NO: 3208799 - RNA, 19 nt, Artificial Sequence
  Description of Artificial Sequence: Synthetic oligonucleotide
uggagaugaacuuauugug

SEQ ID NO: 3208800 - RNA, 19 nt, Artificial Sequence
  Description of Artificial Sequence: Synthetic oligonucleotide
uauaacacuguuguuagac

SEQ ID NO: 3208801 - RNA, 19 nt, Artificial Sequence
  Description of Artificial Sequence: Synthetic oligonucleotide
gaagauuccccucaguaac

SEQ ID NO: 3208802 - RNA, 19 nt, Artificial Sequence
  Description of Artificial Sequence: Synthetic oligonucleotide
caaguaaaacugaagcuag

SEQ ID NO: 3208803 - RNA, 19 nt, Artificial Sequence
  Description of Artificial Sequence: Synthetic oligonucleotide
ucuguuagagccuugguua

SEQ ID NO: 3208804 - RNA, 19 nt, Artificial Sequence
  Description of Artificial Sequence: Synthetic oligonucleotide
auugugaugcaucaaauua

SEQ ID NO: 3208805 - RNA, 19 nt, Artificial Sequence
  Description of Artificial Sequence: Synthetic oligonucleotide
uuucgcuuuaguaucucag

SEQ ID NO: 3208806 - RNA, 19 nt, Artificial Sequence
  Description of Artificial Sequence: Synthetic oligonucleotide
gaugcaucaaauuaacaaa

SEQ ID NO: 3208807 - RNA, 19 nt, Artificial Sequence
  Description of Artificial Sequence: Synthetic oligonucleotide
uaaaacaccacaagagaaa

SEQ ID NO: 3208808 - RNA, 19 nt, Artificial Sequence
  Description of Artificial Sequence: Synthetic oligonucleotide
uacacuucaguuuauccac

SEQ ID NO: 3208809 - RNA, 19 nt, Artificial Sequence
  Description of Artificial Sequence: Synthetic oligonucleotide
uggucacugacacugagca

SEQ ID NO: 3208810 - RNA, 19 nt, Artificial Sequence
  Description of Artificial Sequence: Synthetic oligonucleotide
agcugaauaaaacaccaca

SEQ ID NO: 3208811 - RNA, 19 nt, Artificial Sequence
  Description of Artificial Sequence: Synthetic oligonucleotide
agcuaaaaucuucuguuag

SEQ ID NO: 3208812 - RNA, 19 nt, Artificial Sequence
  Description of Artificial Sequence: Synthetic oligonucleotide
ugugaugcaucaaauuaac

SEQ ID NO: 3208813 - RNA, 19 nt, Artificial Sequence
  Description of Artificial Sequence: Synthetic oligonucleotide
cuuauugugcuagaagagg

SEQ ID NO: 3208814 - RNA, 19 nt, Artificial Sequence
  Description of Artificial Sequence: Synthetic oligonucleotide
uaaguucaagagcacaaga

SEQ ID NO: 3208815 - RNA, 19 nt, Artificial Sequence
  Description of Artificial Sequence: Synthetic oligonucleotide
ugaagcuagaauagucaag

SEQ ID NO: 3208816 - RNA, 19 nt, Artificial Sequence
  Description of Artificial Sequence: Synthetic oligonucleotide
guccuugagcccuugaugg

SEQ ID NO: 3208817 - RNA, 19 nt, Artificial Sequence
  Description of Artificial Sequence: Synthetic oligonucleotide
uacuuggucacugacacug

SEQ ID NO: 3208818 - RNA, 19 nt, Artificial Sequence
  Description of Artificial Sequence: Synthetic oligonucleotide
guuuucacugcucaaagca

SEQ ID NO: 3208819 - RNA, 19 nt, Artificial Sequence
  Description of Artificial Sequence: Synthetic oligonucleotide
agaacauggaagauucccc

SEQ ID NO: 3208820 - RNA, 19 nt, Artificial Sequence
  Description of Artificial Sequence: Synthetic oligonucleotide
aacauggaagauuccccuc

SEQ ID NO: 3208821 - RNA, 19 nt, Artificial Sequence
  Description of Artificial Sequence: Synthetic oligonucleotide
auggacuaaauacaugcug

SEQ ID NO: 3208822 - RNA, 19 nt, Artificial Sequence
  Description of Artificial Sequence: Synthetic oligonucleotide
aguuggagagaugaggaac

SEQ ID NO: 3208823 - RNA, 19 nt, Artificial Sequence
  Description of Artificial Sequence: Synthetic oligonucleotide
uuaucaaggaguuccugga

SEQ ID NO: 3208824 - RNA, 19 nt, Artificial Sequence
  Description of Artificial Sequence: Synthetic oligonucleotide
aagguuuagauagccuugg

SEQ ID NO: 3208825 - RNA, 19 nt, Artificial Sequence
  Description of Artificial Sequence: Synthetic oligonucleotide
uuaaacgguuuugacgugg

SEQ ID NO: 3208826 - RNA, 19 nt, Artificial Sequence
  Description of Artificial Sequence: Synthetic oligonucleotide
ugagagaugauuucgcuuu

SEQ ID NO: 3208827 - RNA, 19 nt, Artificial Sequence
  Description of Artificial Sequence: Synthetic oligonucleotide
ugcuagaagaggaacucgc

SEQ ID NO: 3208828 - RNA, 19 nt, Artificial Sequence
  Description of Artificial Sequence: Synthetic oligonucleotide
aauguucuugaugguauag

SEQ ID NO: 3208829 - RNA, 19 nt, Artificial Sequence
  Description of Artificial Sequence: Synthetic oligonucleotide
uuuagcccguucauauugg

SEQ ID NO: 3208830 - RNA, 19 nt, Artificial Sequence
  Description of Artificial Sequence: Synthetic oligonucleotide
uugugaugcaucaaauuaa

SEQ ID NO: 3208831 - RNA, 19 nt, Artificial Sequence
  Description of Artificial Sequence: Synthetic oligonucleotide
acgaaugcaguucuccuuc

SEQ ID NO: 3208832 - RNA, 19 nt, Artificial Sequence
  Description of Artificial Sequence: Synthetic oligonucleotide
agggccaucaaguugagaa

SEQ ID NO: 3208833 - RNA, 19 nt, Artificial Sequence
  Description of Artificial Sequence: Synthetic oligonucleotide
uuuccaaacuguuuucaga

SEQ ID NO: 3208834 - RNA, 19 nt, Artificial Sequence
  Description of Artificial Sequence: Synthetic oligonucleotide
gguauaacacuguuguuag

SEQ ID NO: 3208835 - RNA, 19 nt, Artificial Sequence
  Description of Artificial Sequence: Synthetic oligonucleotide
uggagcuaaaaucuucugu

SEQ ID NO: 3208836 - RNA, 19 nt, Artificial Sequence
  Description of Artificial Sequence: Synthetic oligonucleotide
agucaaguggcguaauuug

SEQ ID NO: 3208837 - RNA, 19 nt, Artificial Sequence
  Description of Artificial Sequence: Synthetic oligonucleotide
aacuucuugccacaaguaa

SEQ ID NO: 3208838 - RNA, 19 nt, Artificial Sequence
  Description of Artificial Sequence: Synthetic oligonucleotide
aaagcagugaggcccgugu

SEQ ID NO: 3208839 - RNA, 19 nt, Artificial Sequence
  Description of Artificial Sequence: Synthetic oligonucleotide
auaguugaucuuucaagug

SEQ ID NO: 3208840 - RNA, 19 nt, Artificial Sequence
  Description of Artificial Sequence: Synthetic oligonucleotide
gauaguugaucuuucaagu

SEQ ID NO: 3208841 - RNA, 19 nt, Artificial Sequence
  Description of Artificial Sequence: Synthetic oligonucleotide
ugcaucaaauuaacaaacu

SEQ ID NO: 3208842 - RNA, 19 nt, Artificial Sequence
  Description of Artificial Sequence: Synthetic oligonucleotide
ucgugcuuuauccaucagc

SEQ ID NO: 3208843 - RNA, 19 nt, Artificial Sequence
  Description of Artificial Sequence: Synthetic oligonucleotide
ucaaguggcguaauuugga

SEQ ID NO: 3208844 - RNA, 19 nt, Artificial Sequence
  Description of Artificial Sequence: Synthetic oligonucleotide
aggaguacuugauaguuga

SEQ ID NO: 3208845 - RNA, 19 nt, Artificial Sequence
  Description of Artificial Sequence: Synthetic oligonucleotide
auuggauagaauguucuug

SEQ ID NO: 3208846 - RNA, 19 nt, Artificial Sequence
  Description of Artificial Sequence: Synthetic oligonucleotide
uggugagcugaauaaaaca

SEQ ID NO: 3208847 - RNA, 19 nt, Artificial Sequence
  Description of Artificial Sequence: Synthetic oligonucleotide
auuaacaaacuuccagccu

SEQ ID NO: 3208848 - RNA, 19 nt, Artificial Sequence
  Description of Artificial Sequence: Synthetic oligonucleotide
acuagguggcucuagguca

SEQ ID NO: 3208849 - RNA, 19 nt, Artificial Sequence
  Description of Artificial Sequence: Synthetic oligonucleotide
augcaguucuccuucuugg

SEQ ID NO: 3208850 - RNA, 19 nt, Artificial Sequence
  Description of Artificial Sequence: Synthetic oligonucleotide
ucgcuuuaguaucucagca

SEQ ID NO: 3208851 - RNA, 19 nt, Artificial Sequence
  Description of Artificial Sequence: Synthetic oligonucleotide
uucgcuuuaguaucucagc

SEQ ID NO: 3208852 - RNA, 19 nt, Artificial Sequence
  Description of Artificial Sequence: Synthetic oligonucleotide
aguggcguaauuuggauuu

SEQ ID NO: 3208853 - RNA, 19 nt, Artificial Sequence
  Description of Artificial Sequence: Synthetic oligonucleotide
uuaguaucucagcauagua

SEQ ID NO: 3208854 - RNA, 19 nt, Artificial Sequence
  Description of Artificial Sequence: Synthetic oligonucleotide
uuucaaguggucccaaaau

SEQ ID NO: 3208855 - RNA, 19 nt, Artificial Sequence
  Description of Artificial Sequence: Synthetic oligonucleotide
acaaguaaaacugaagcua

SEQ ID NO: 3208856 - RNA, 19 nt, Artificial Sequence
  Description of Artificial Sequence: Synthetic oligonucleotide
ucaaugaaaagaaguccuc

SEQ ID NO: 3208857 - RNA, 19 nt, Artificial Sequence
  Description of Artificial Sequence: Synthetic oligonucleotide
uucaguuuauccacaaauu

SEQ ID NO: 3208858 - RNA, 19 nt, Artificial Sequence
  Description of Artificial Sequence: Synthetic oligonucleotide
aaaucuacuugucaaagac

SEQ ID NO: 3208859 - RNA, 19 nt, Artificial Sequence
  Description of Artificial Sequence: Synthetic oligonucleotide
aaugcaaaugucuuucacc

SEQ ID NO: 3208860 - RNA, 19 nt, Artificial Sequence
  Description of Artificial Sequence: Synthetic oligonucleotide
uucauaaacauugugaagg

SEQ ID NO: 3208861 - RNA, 19 nt, Artificial Sequence
  Description of Artificial Sequence: Synthetic oligonucleotide
uuaaaggcaacugaaaugg

SEQ ID NO: 3208862 - RNA, 19 nt, Artificial Sequence
  Description of Artificial Sequence: Synthetic oligonucleotide
auguauauguuucauaaac

SEQ ID NO: 3208863 - RNA, 19 nt, Artificial Sequence
  Description of Artificial Sequence: Synthetic oligonucleotide
ucaaagacuguuuaaaggc

SEQ ID NO: 3208864 - RNA, 19 nt, Artificial Sequence
  Description of Artificial Sequence: Synthetic oligonucleotide
  modified_base (14)..(14): a, c, u, g, unknown or other
gauagaaaggaaanaauug

SEQ ID NO: 3208865 - RNA, 19 nt, Artificial Sequence
  Description of Artificial Sequence: Synthetic oligonucleotide
uguuucauaaacauuguga

SEQ ID NO: 3208866 - RNA, 19 nt, Artificial Sequence
  Description of Artificial Sequence: Synthetic oligonucleotide
caauccaccagauagaaag

SEQ ID NO: 3208867 - RNA, 19 nt, Artificial Sequence
  Description of Artificial Sequence: Synthetic oligonucleotide
uuucccuuagauuaaagag

SEQ ID NO: 3208868 - RNA, 19 nt, Artificial Sequence
  Description of Artificial Sequence: Synthetic oligonucleotide
  modified_base (2)..(2): a, c, u, g, unknown or other
anaauugacuauuccaaug

SEQ ID NO: 3208869 - RNA, 19 nt, Artificial Sequence
  Description of Artificial Sequence: Synthetic oligonucleotide
uauacugucagcuucaauc

SEQ ID NO: 3208870 - RNA, 19 nt, Artificial Sequence
  Description of Artificial Sequence: Synthetic oligonucleotide
cuuuuaaaggggaaaaugc

SEQ ID NO: 3208871 - RNA, 19 nt, Artificial Sequence
  Description of Artificial Sequence: Synthetic oligonucleotide
aaagagauagcucuuggca

SEQ ID NO: 3208872 - RNA, 19 nt, Artificial Sequence
  Description of Artificial Sequence: Synthetic oligonucleotide
agauuaaagagauagcucu

SEQ ID NO: 3208873 - RNA, 19 nt, Artificial Sequence
  Description of Artificial Sequence: Synthetic oligonucleotide
  modified_base (5)..(5): a, c, u, g, unknown or other
gaaanaauugacuauucca

SEQ ID NO: 3208874 - RNA, 19 nt, Artificial Sequence
  Description of Artificial Sequence: Synthetic oligonucleotide
uucucaugcauuuugaucu

SEQ ID NO: 3208875 - RNA, 19 nt, Artificial Sequence
  Description of Artificial Sequence: Synthetic oligonucleotide
gaaguugugugcuaguagg

SEQ ID NO: 3208876 - RNA, 19 nt, Artificial Sequence
  Description of Artificial Sequence: Synthetic oligonucleotide
auauguuucauaaacauug

SEQ ID NO: 3208877 - RNA, 19 nt, Artificial Sequence
  Description of Artificial Sequence: Synthetic oligonucleotide
ugaucuuucccuuagauua

SEQ ID NO: 3208878 - RNA, 19 nt, Artificial Sequence
  Description of Artificial Sequence: Synthetic oligonucleotide
aaaucucugguuuugaaau

SEQ ID NO: 3208879 - RNA, 19 nt, Artificial Sequence
  Description of Artificial Sequence: Synthetic oligonucleotide
uuagauuaaagagauagcu

SEQ ID NO: 3208880 - RNA, 19 nt, Artificial Sequence
  Description of Artificial Sequence: Synthetic oligonucleotide
uauauucucaugcauuuug

SEQ ID NO: 3208881 - RNA, 19 nt, Artificial Sequence
  Description of Artificial Sequence: Synthetic oligonucleotide
uuuaaaggcaacugaaaug

SEQ ID NO: 3208882 - RNA, 19 nt, Artificial Sequence
  Description of Artificial Sequence: Synthetic oligonucleotide
aaaugcaaaugucuuucac

SEQ ID NO: 3208883 - RNA, 19 nt, Artificial Sequence
  Description of Artificial Sequence: Synthetic oligonucleotide
  modified_base (10)..(10): a, c, u, g, unknown or other
gaaaggaaanaauugacua

SEQ ID NO: 3208884 - RNA, 19 nt, Artificial Sequence
  Description of Artificial Sequence: Synthetic oligonucleotide
ucuuucaccagcaaaguac

SEQ ID NO: 3208885 - RNA, 19 nt, Artificial Sequence
  Description of Artificial Sequence: Synthetic oligonucleotide
ugaaguucccuuauuaaug

SEQ ID NO: 3208886 - RNA, 19 nt, Artificial Sequence
  Description of Artificial Sequence: Synthetic oligonucleotide
auacugucagcuucaaucc

SEQ ID NO: 3208887 - RNA, 19 nt, Artificial Sequence
  Description of Artificial Sequence: Synthetic oligonucleotide
uuuuaaaggggaaaaugca

SEQ ID NO: 3208888 - RNA, 19 nt, Artificial Sequence
  Description of Artificial Sequence: Synthetic oligonucleotide
aaugggaacagauuuucca

SEQ ID NO: 3208889 - RNA, 19 nt, Artificial Sequence
  Description of Artificial Sequence: Synthetic oligonucleotide
  modified_base (4)..(4): a, c, u, g, unknown or other
aaanaauugacuauuccaa

SEQ ID NO: 3208890 - RNA, 19 nt, Artificial Sequence
  Description of Artificial Sequence: Synthetic oligonucleotide
aaggggaaaaugcaaaugu

SEQ ID NO: 3208891 - RNA, 19 nt, Artificial Sequence
  Description of Artificial Sequence: Synthetic oligonucleotide
uuugaaaucuacuugucaa

SEQ ID NO: 3208892 - RNA, 19 nt, Artificial Sequence
  Description of Artificial Sequence: Synthetic oligonucleotide
uuaauggucugccagagaa

SEQ ID NO: 3208893 - RNA, 19 nt, Artificial Sequence
  Description of Artificial Sequence: Synthetic oligonucleotide
aagagauagcucuuggcag

SEQ ID NO: 3208894 - RNA, 19 nt, Artificial Sequence
  Description of Artificial Sequence: Synthetic oligonucleotide
uuaacuagagagaaugagu

SEQ ID NO: 3208895 - RNA, 19 nt, Artificial Sequence
  Description of Artificial Sequence: Synthetic oligonucleotide
uacugaagugaaaugagcc

SEQ ID NO: 3208896 - RNA, 19 nt, Artificial Sequence
  Description of Artificial Sequence: Synthetic oligonucleotide
uuaaagagauagcucuugg

SEQ ID NO: 3208897 - RNA, 19 nt, Artificial Sequence
  Description of Artificial Sequence: Synthetic oligonucleotide
gaaguucccuuauuaaugg

SEQ ID NO: 3208898 - RNA, 19 nt, Artificial Sequence
  Description of Artificial Sequence: Synthetic oligonucleotide
uaaacauugugaaggacug

SEQ ID NO: 3208899 - RNA, 19 nt, Artificial Sequence
  Description of Artificial Sequence: Synthetic oligonucleotide
guaggauauauucucaugc

SEQ ID NO: 3208900 - RNA, 19 nt, Artificial Sequence
  Description of Artificial Sequence: Synthetic oligonucleotide
cuuauuaauggucugccag

SEQ ID NO: 3208901 - RNA, 19 nt, Artificial Sequence
  Description of Artificial Sequence: Synthetic oligonucleotide
uguauauguuucauaaaca

SEQ ID NO: 3208902 - RNA, 19 nt, Artificial Sequence
  Description of Artificial Sequence: Synthetic oligonucleotide
uuuaacuagagagaaugag

SEQ ID NO: 3208903 - RNA, 19 nt, Artificial Sequence
  Description of Artificial Sequence: Synthetic oligonucleotide
augaguuugcacuauacug

SEQ ID NO: 3208904 - RNA, 19 nt, Artificial Sequence
  Description of Artificial Sequence: Synthetic oligonucleotide
agauuuuccauuguaagag

SEQ ID NO: 3208905 - RNA, 19 nt, Artificial Sequence
  Description of Artificial Sequence: Synthetic oligonucleotide
acuauuccaauguauaugu

SEQ ID NO: 3208906 - RNA, 19 nt, Artificial Sequence
  Description of Artificial Sequence: Synthetic oligonucleotide
gucaaagacuguuuaaagg

SEQ ID NO: 3208907 - RNA, 19 nt, Artificial Sequence
  Description of Artificial Sequence: Synthetic oligonucleotide
  modified_base (9)..(9): a, c, u, g, unknown or other
aaaggaaanaauugacuau

SEQ ID NO: 3208908 - RNA, 19 nt, Artificial Sequence
  Description of Artificial Sequence: Synthetic oligonucleotide
ugaguuugcacuauacugu

SEQ ID NO: 3208909 - RNA, 19 nt, Artificial Sequence
  Description of Artificial Sequence: Synthetic oligonucleotide
aagaggggaaguugugugc

SEQ ID NO: 3208910 - RNA, 19 nt, Artificial Sequence
  Description of Artificial Sequence: Synthetic oligonucleotide
uuuuccauuguaagagggg

SEQ ID NO: 3208911 - RNA, 19 nt, Artificial Sequence
  Description of Artificial Sequence: Synthetic oligonucleotide
ugcauuuugaucuuucccu

SEQ ID NO: 3208912 - RNA, 19 nt, Artificial Sequence
  Description of Artificial Sequence: Synthetic oligonucleotide
aaugaguuugcacuauacu

SEQ ID NO: 3208913 - RNA, 19 nt, Artificial Sequence
  Description of Artificial Sequence: Synthetic oligonucleotide
  modified_base (12)..(12): a, c, u, g, unknown or other
uagaaaggaaanaauugac

SEQ ID NO: 3208914 - RNA, 19 nt, Artificial Sequence
  Description of Artificial Sequence: Synthetic oligonucleotide
acagauuuuccauuguaag

SEQ ID NO: 3208915 - RNA, 19 nt, Artificial Sequence
  Description of Artificial Sequence: Synthetic oligonucleotide
augcauuuugaucuuuccc

SEQ ID NO: 3208916 - RNA, 19 nt, Artificial Sequence
  Description of Artificial Sequence: Synthetic oligonucleotide
  modified_base (3)..(3): a, c, u, g, unknown or other
aanaauugacuauuccaau

SEQ ID NO: 3208917 - RNA, 19 nt, Artificial Sequence
  Description of Artificial Sequence: Synthetic oligonucleotide
ucaccagcaaaguacacag

SEQ ID NO: 3208918 - RNA, 19 nt, Artificial Sequence
  Description of Artificial Sequence: Synthetic oligonucleotide
ucagcuucaauccaccaga

SEQ ID NO: 3208919 - RNA, 19 nt, Artificial Sequence
  Description of Artificial Sequence: Synthetic oligonucleotide
aaaguacugaagugaaaug

SEQ ID NO: 3208920 - RNA, 19 nt, Artificial Sequence
  Description of Artificial Sequence: Synthetic oligonucleotide
uuuaaaggggaaaaugcaa

SEQ ID NO: 3208921 - RNA, 19 nt, Artificial Sequence
  Description of Artificial Sequence: Synthetic oligonucleotide
uucccuuagauuaaagaga

SEQ ID NO: 3208922 - RNA, 19 nt, Artificial Sequence
  Description of Artificial Sequence: Synthetic oligonucleotide
uuuugaaaucuacuuguca

SEQ ID NO: 3208923 - RNA, 19 nt, Artificial Sequence
  Description of Artificial Sequence: Synthetic oligonucleotide
auucucaugcauuuugauc

SEQ ID NO: 3208924 - RNA, 19 nt, Artificial Sequence
  Description of Artificial Sequence: Synthetic oligonucleotide
gcuucaauccaccagauag

SEQ ID NO: 3208925 - RNA, 19 nt, Artificial Sequence
  Description of Artificial Sequence: Synthetic oligonucleotide
uuaaaggggaaaaugcaaa

SEQ ID NO: 3208926 - RNA, 19 nt, Artificial Sequence
  Description of Artificial Sequence: Synthetic oligonucleotide
ugugcuugcuuccugaagu

SEQ ID NO: 3208927 - RNA, 19 nt, Artificial Sequence
  Description of Artificial Sequence: Synthetic oligonucleotide
ugucaaagacuguuuaaag

SEQ ID NO: 3208928 - RNA, 19 nt, Artificial Sequence
  Description of Artificial Sequence: Synthetic oligonucleotide
ugguuuugaaaucuacuug

SEQ ID NO: 3208929 - RNA, 19 nt, Artificial Sequence
  Description of Artificial Sequence: Synthetic oligonucleotide
agagagaaugaguuugcac

SEQ ID NO: 3208930 - RNA, 19 nt, Artificial Sequence
  Description of Artificial Sequence: Synthetic oligonucleotide
uuucauaaacauugugaag

SEQ ID NO: 3208931 - RNA, 19 nt, Artificial Sequence
  Description of Artificial Sequence: Synthetic oligonucleotide
aaguacugaagugaaauga

SEQ ID NO: 3208932 - RNA, 19 nt, Artificial Sequence
  Description of Artificial Sequence: Synthetic oligonucleotide
uaacuagagagaaugaguu

SEQ ID NO: 3208933 - RNA, 19 nt, Artificial Sequence
  Description of Artificial Sequence: Synthetic oligonucleotide
aaucucugguuuugaaauc

SEQ ID NO: 3208934 - RNA, 19 nt, Artificial Sequence
  Description of Artificial Sequence: Synthetic oligonucleotide
aacauugugaaggacugug

SEQ ID NO: 3208935 - RNA, 19 nt, Artificial Sequence
  Description of Artificial Sequence: Synthetic oligonucleotide
gauuuuccauuguaagagg

SEQ ID NO: 3208936 - RNA, 19 nt, Artificial Sequence
  Description of Artificial Sequence: Synthetic oligonucleotide
augcaaaugucuuucacca

SEQ ID NO: 3208937 - RNA, 19 nt, Artificial Sequence
  Description of Artificial Sequence: Synthetic oligonucleotide
aaggacugugcuugcuucc

SEQ ID NO: 3208938 - RNA, 19 nt, Artificial Sequence
  Description of Artificial Sequence: Synthetic oligonucleotide
auuccaauguauauguuuc

SEQ ID NO: 3208939 - RNA, 19 nt, Artificial Sequence
  Description of Artificial Sequence: Synthetic oligonucleotide
aaugucuuucaccagcaaa

SEQ ID NO: 3208940 - RNA, 19 nt, Artificial Sequence
  Description of Artificial Sequence: Synthetic oligonucleotide
cuuagauuaaagagauagc

SEQ ID NO: 3208941 - RNA, 19 nt, Artificial Sequence
  Description of Artificial Sequence: Synthetic oligonucleotide
ugaaaucuacuugucaaag

SEQ ID NO: 3208942 - RNA, 19 nt, Artificial Sequence
  Description of Artificial Sequence: Synthetic oligonucleotide
ugaagugaaaugagccagg

SEQ ID NO: 3208943 - RNA, 19 nt, Artificial Sequence
  Description of Artificial Sequence: Synthetic oligonucleotide
acuagagagaaugaguuug

SEQ ID NO: 3208944 - RNA, 19 nt, Artificial Sequence
  Description of Artificial Sequence: Synthetic oligonucleotide
aauggucugccagagaaug

SEQ ID NO: 3208945 - RNA, 19 nt, Artificial Sequence
  Description of Artificial Sequence: Synthetic oligonucleotide
  modified_base (13)..(13): a, c, u, g, unknown or other
auagaaaggaaanaauuga

SEQ ID NO: 3208946 - RNA, 19 nt, Artificial Sequence
  Description of Artificial Sequence: Synthetic oligonucleotide
guuugcacuauacugucag

SEQ ID NO: 3208947 - RNA, 19 nt, Artificial Sequence
  Description of Artificial Sequence: Synthetic oligonucleotide
uagauuaaagagauagcuc

SEQ ID NO: 3208948 - RNA, 19 nt, Artificial Sequence
  Description of Artificial Sequence: Synthetic oligonucleotide
uuauuaauggucugccaga

SEQ ID NO: 3208949 - RNA, 19 nt, Artificial Sequence
  Description of Artificial Sequence: Synthetic oligonucleotide
acuguuuaaaggcaacuga

SEQ ID NO: 3208950 - RNA, 19 nt, Artificial Sequence
  Description of Artificial Sequence: Synthetic oligonucleotide
gaaaaugcaaaugucuuuc

SEQ ID NO: 3208951 - RNA, 19 nt, Artificial Sequence
  Description of Artificial Sequence: Synthetic oligonucleotide
auuuugaucuuucccuuag

SEQ ID NO: 3208952 - RNA, 19 nt, Artificial Sequence
  Description of Artificial Sequence: Synthetic oligonucleotide
ucugguuuugaaaucuacu

SEQ ID NO: 3208953 - RNA, 19 nt, Artificial Sequence
  Description of Artificial Sequence: Synthetic oligonucleotide
guuucauaaacauugugaa

SEQ ID NO: 3208954 - RNA, 19 nt, Artificial Sequence
  Description of Artificial Sequence: Synthetic oligonucleotide
auaaacauugugaaggacu

SEQ ID NO: 3208955 - RNA, 19 nt, Artificial Sequence
  Description of Artificial Sequence: Synthetic oligonucleotide
uuuuaacuagagagaauga

SEQ ID NO: 3208956 - RNA, 19 nt, Artificial Sequence
  Description of Artificial Sequence: Synthetic oligonucleotide
uugacuauuccaauguaua

SEQ ID NO: 3208957 - RNA, 19 nt, Artificial Sequence
  Description of Artificial Sequence: Synthetic oligonucleotide
uaaagagauagcucuuggc

SEQ ID NO: 3208958 - RNA, 19 nt, Artificial Sequence
  Description of Artificial Sequence: Synthetic oligonucleotide
ugaauuuagauuauaacag

SEQ ID NO: 3208959 - RNA, 19 nt, Artificial Sequence
  Description of Artificial Sequence: Synthetic oligonucleotide
aauaaacaauuauugaaag

SEQ ID NO: 3208960 - RNA, 19 nt, Artificial Sequence
  Description of Artificial Sequence: Synthetic oligonucleotide
aauucuuuaguguugaagu

SEQ ID NO: 3208961 - RNA, 19 nt, Artificial Sequence
  Description of Artificial Sequence: Synthetic oligonucleotide
uugaauuuagauuauaaca

SEQ ID NO: 3208962 - RNA, 19 nt, Artificial Sequence
  Description of Artificial Sequence: Synthetic oligonucleotide
uaucaauaaacaauuauug

SEQ ID NO: 3208963 - RNA, 19 nt, Artificial Sequence
  Description of Artificial Sequence: Synthetic oligonucleotide
uugaagaagaguuaaaggc

SEQ ID NO: 3208964 - RNA, 19 nt, Artificial Sequence
  Description of Artificial Sequence: Synthetic oligonucleotide
agucuuugcauuuauaggg

SEQ ID NO: 3208965 - RNA, 19 nt, Artificial Sequence
  Description of Artificial Sequence: Synthetic oligonucleotide
cuugaaguauaauugaacg

SEQ ID NO: 3208966 - RNA, 19 nt, Artificial Sequence
  Description of Artificial Sequence: Synthetic oligonucleotide
uuauugaaagcuaugagac

SEQ ID NO: 3208967 - RNA, 19 nt, Artificial Sequence
  Description of Artificial Sequence: Synthetic oligonucleotide
acauucuucacauuuauag

SEQ ID NO: 3208968 - RNA, 19 nt, Artificial Sequence
  Description of Artificial Sequence: Synthetic oligonucleotide
aagaguuaaaggcuuuacc

SEQ ID NO: 3208969 - RNA, 19 nt, Artificial Sequence
  Description of Artificial Sequence: Synthetic oligonucleotide
ucuccaaugaugcuuaagg

SEQ ID NO: 3208970 - RNA, 19 nt, Artificial Sequence
  Description of Artificial Sequence: Synthetic oligonucleotide
uaaacaauuauugaaagcu

SEQ ID NO: 3208971 - RNA, 19 nt, Artificial Sequence
  Description of Artificial Sequence: Synthetic oligonucleotide
uuugaagaagaguuaaagg

SEQ ID NO: 3208972 - RNA, 19 nt, Artificial Sequence
  Description of Artificial Sequence: Synthetic oligonucleotide
auucuucacauuuauaggg

SEQ ID NO: 3208973 - RNA, 19 nt, Artificial Sequence
  Description of Artificial Sequence: Synthetic oligonucleotide
aauuauugaaagcuaugag

SEQ ID NO: 3208974 - RNA, 19 nt, Artificial Sequence
  Description of Artificial Sequence: Synthetic oligonucleotide
auaaacaauuauugaaagc

SEQ ID NO: 3208975 - RNA, 19 nt, Artificial Sequence
  Description of Artificial Sequence: Synthetic oligonucleotide
ugaaguaucaauaaacaau

SEQ ID NO: 3208976 - RNA, 19 nt, Artificial Sequence
  Description of Artificial Sequence: Synthetic oligonucleotide
ucaauaaacaauuauugaa

SEQ ID NO: 3208977 - RNA, 19 nt, Artificial Sequence
  Description of Artificial Sequence: Synthetic oligonucleotide
uauuaaaggacucugucac

SEQ ID NO: 3208978 - RNA, 19 nt, Artificial Sequence
  Description of Artificial Sequence: Synthetic oligonucleotide
auuuauaggguuuucccac

SEQ ID NO: 3208979 - RNA, 19 nt, Artificial Sequence
  Description of Artificial Sequence: Synthetic oligonucleotide
uguugaaguaucaauaaac

SEQ ID NO: 3208980 - RNA, 19 nt, Artificial Sequence
  Description of Artificial Sequence: Synthetic oligonucleotide
uauaauugaacgcuuugcc

SEQ ID NO: 3208981 - RNA, 19 nt, Artificial Sequence
  Description of Artificial Sequence: Synthetic oligonucleotide
uccaguaugaauucuuugg

SEQ ID NO: 3208982 - RNA, 19 nt, Artificial Sequence
  Description of Artificial Sequence: Synthetic oligonucleotide
aauucuuugguguugaauu

SEQ ID NO: 3208983 - RNA, 19 nt, Artificial Sequence
  Description of Artificial Sequence: Synthetic oligonucleotide
auuauugaaagcuaugaga

SEQ ID NO: 3208984 - RNA, 19 nt, Artificial Sequence
  Description of Artificial Sequence: Synthetic oligonucleotide
uauaacaguuauuaaagga

SEQ ID NO: 3208985 - RNA, 19 nt, Artificial Sequence
  Description of Artificial Sequence: Synthetic oligonucleotide
auugaaagcuaugagaccg

SEQ ID NO: 3208986 - RNA, 19 nt, Artificial Sequence
  Description of Artificial Sequence: Synthetic oligonucleotide
auuauaacaguuauuaaag

SEQ ID NO: 3208987 - RNA, 19 nt, Artificial Sequence
  Description of Artificial Sequence: Synthetic oligonucleotide
uuuuacacuaaucugaauu

SEQ ID NO: 3208988 - RNA, 19 nt, Artificial Sequence
  Description of Artificial Sequence: Synthetic oligonucleotide
auaacaguuauuaaaggac

SEQ ID NO: 3208989 - RNA, 19 nt, Artificial Sequence
  Description of Artificial Sequence: Synthetic oligonucleotide
uaagguuugaagaagaguu

SEQ ID NO: 3208990 - RNA, 19 nt, Artificial Sequence
  Description of Artificial Sequence: Synthetic oligonucleotide
aguguuugcauuuguaggg

SEQ ID NO: 3208991 - RNA, 19 nt, Artificial Sequence
  Description of Artificial Sequence: Synthetic oligonucleotide
gauuauaacaguuauuaaa

SEQ ID NO: 3208992 - RNA, 19 nt, Artificial Sequence
  Description of Artificial Sequence: Synthetic oligonucleotide
gaugcuuaagguuugaaga

SEQ ID NO: 3208993 - RNA, 19 nt, Artificial Sequence
  Description of Artificial Sequence: Synthetic oligonucleotide
auuuguagggcuucucucc

SEQ ID NO: 3208994 - RNA, 19 nt, Artificial Sequence
  Description of Artificial Sequence: Synthetic oligonucleotide
auuuguaggguuucucucc

SEQ ID NO: 3208995 - RNA, 19 nt, Artificial Sequence
  Description of Artificial Sequence: Synthetic oligonucleotide
uuuagauuauaacaguuau

SEQ ID NO: 3208996 - RNA, 19 nt, Artificial Sequence
  Description of Artificial Sequence: Synthetic oligonucleotide
uuauaacaguuauuaaagg

SEQ ID NO: 3208997 - RNA, 19 nt, Artificial Sequence
  Description of Artificial Sequence: Synthetic oligonucleotide
aaaggacucugucacaguc

SEQ ID NO: 3208998 - RNA, 19 nt, Artificial Sequence
  Description of Artificial Sequence: Synthetic oligonucleotide
ugugaugugaguucuguag

SEQ ID NO: 3208999 - RNA, 19 nt, Artificial Sequence
  Description of Artificial Sequence: Synthetic oligonucleotide
agaguuaaaggcuuuacca

SEQ ID NO: 3209000 - RNA, 19 nt, Artificial Sequence
  Description of Artificial Sequence: Synthetic oligonucleotide
ugaaguauaauugaacgcu

SEQ ID NO: 3209001 - RNA, 19 nt, Artificial Sequence
  Description of Artificial Sequence: Synthetic oligonucleotide
aaaggcuugaaguauaauu

SEQ ID NO: 3209002 - RNA, 19 nt, Artificial Sequence
  Description of Artificial Sequence: Synthetic oligonucleotide
ugaagaagaguuaaaggcu

SEQ ID NO: 3209003 - RNA, 19 nt, Artificial Sequence
  Description of Artificial Sequence: Synthetic oligonucleotide
acagucuuugcauuuauag

SEQ ID NO: 3209004 - RNA, 19 nt, Artificial Sequence
  Description of Artificial Sequence: Synthetic oligonucleotide
cucuauaugaauucuuuag

SEQ ID NO: 3209005 - RNA, 19 nt, Artificial Sequence
  Description of Artificial Sequence: Synthetic oligonucleotide
ucuauaugaauucuuuagu

SEQ ID NO: 3209006 - RNA, 19 nt, Artificial Sequence
  Description of Artificial Sequence: Synthetic oligonucleotide
uagauuauaacaguuauua

SEQ ID NO: 3209007 - RNA, 19 nt, Artificial Sequence
  Description of Artificial Sequence: Synthetic oligonucleotide
uauaugaauucuuuagugu

SEQ ID NO: 3209008 - RNA, 19 nt, Artificial Sequence
  Description of Artificial Sequence: Synthetic oligonucleotide
aguaugaauucuuuggugu

SEQ ID NO: 3209009 - RNA, 19 nt, Artificial Sequence
  Description of Artificial Sequence: Synthetic oligonucleotide
ugguguugaauuuagauua

SEQ ID NO: 3209010 - RNA, 19 nt, Artificial Sequence
  Description of Artificial Sequence: Synthetic oligonucleotide
uuauuaaaggacucuguca

SEQ ID NO: 3209011 - RNA, 19 nt, Artificial Sequence
  Description of Artificial Sequence: Synthetic oligonucleotide
cuauaugaauucuuuagug

SEQ ID NO: 3209012 - RNA, 19 nt, Artificial Sequence
  Description of Artificial Sequence: Synthetic oligonucleotide
acuaaucugaauuuucugu

SEQ ID NO: 3209013 - RNA, 19 nt, Artificial Sequence
  Description of Artificial Sequence: Synthetic oligonucleotide
uaauugaacgcuuugccac

SEQ ID NO: 3209014 - RNA, 19 nt, Artificial Sequence
  Description of Artificial Sequence: Synthetic oligonucleotide
aaagcuaugagaccggguu

SEQ ID NO: 3209015 - RNA, 19 nt, Artificial Sequence
  Description of Artificial Sequence: Synthetic oligonucleotide
aaggcuugaaguauaauug

SEQ ID NO: 3209016 - RNA, 19 nt, Artificial Sequence
  Description of Artificial Sequence: Synthetic oligonucleotide
uauggagucuccaaugaug

SEQ ID NO: 3209017 - RNA, 19 nt, Artificial Sequence
  Description of Artificial Sequence: Synthetic oligonucleotide
uugaaguauaauugaacgc

SEQ ID NO: 3209018 - RNA, 19 nt, Artificial Sequence
  Description of Artificial Sequence: Synthetic oligonucleotide
uaugaauucuuuaguguug

SEQ ID NO: 3209019 - RNA, 19 nt, Artificial Sequence
  Description of Artificial Sequence: Synthetic oligonucleotide
uaacaguuauuaaaggacu

SEQ ID NO: 3209020 - RNA, 19 nt, Artificial Sequence
  Description of Artificial Sequence: Synthetic oligonucleotide
aguucuugcauguugagaa

SEQ ID NO: 3209021 - RNA, 19 nt, Artificial Sequence
  Description of Artificial Sequence: Synthetic oligonucleotide
ucugaauuuucugugaugu

SEQ ID NO: 3209022 - RNA, 19 nt, Artificial Sequence
  Description of Artificial Sequence: Synthetic oligonucleotide
uguugaauuuagauuauaa

SEQ ID NO: 3209023 - RNA, 19 nt, Artificial Sequence
  Description of Artificial Sequence: Synthetic oligonucleotide
uuuaccacauucuucacau

SEQ ID NO: 3209024 - RNA, 19 nt, Artificial Sequence
  Description of Artificial Sequence: Synthetic oligonucleotide
aguaucaauaaacaauuau

SEQ ID NO: 3209025 - RNA, 19 nt, Artificial Sequence
  Description of Artificial Sequence: Synthetic oligonucleotide
aucaauaaacaauuauuga

SEQ ID NO: 3209026 - RNA, 19 nt, Artificial Sequence
  Description of Artificial Sequence: Synthetic oligonucleotide
ugaugcuuaagguuugaag

SEQ ID NO: 3209027 - RNA, 19 nt, Artificial Sequence
  Description of Artificial Sequence: Synthetic oligonucleotide
uuugguguugaauuuagau

SEQ ID NO: 3209028 - RNA, 19 nt, Artificial Sequence
  Description of Artificial Sequence: Synthetic oligonucleotide
guugaauuuagauuauaac

SEQ ID NO: 3209029 - RNA, 19 nt, Artificial Sequence
  Description of Artificial Sequence: Synthetic oligonucleotide
uuucucuccaguaugaauu

SEQ ID NO: 3209030 - RNA, 19 nt, Artificial Sequence
  Description of Artificial Sequence: Synthetic oligonucleotide
cauucuucacauuuauagg

SEQ ID NO: 3209031 - RNA, 19 nt, Artificial Sequence
  Description of Artificial Sequence: Synthetic oligonucleotide
ugaauuuucugugauguga

SEQ ID NO: 3209032 - RNA, 19 nt, Artificial Sequence
  Description of Artificial Sequence: Synthetic oligonucleotide
ugugaguucuguagugucg

SEQ ID NO: 3209033 - RNA, 19 nt, Artificial Sequence
  Description of Artificial Sequence: Synthetic oligonucleotide
cuaaucugaauuuucugug

SEQ ID NO: 3209034 - RNA, 19 nt, Artificial Sequence
  Description of Artificial Sequence: Synthetic oligonucleotide
uguugagaaaggcuugaag

SEQ ID NO: 3209035 - RNA, 19 nt, Artificial Sequence
  Description of Artificial Sequence: Synthetic oligonucleotide
uguagugucgagugaagcc

SEQ ID NO: 3209036 - RNA, 19 nt, Artificial Sequence
  Description of Artificial Sequence: Synthetic oligonucleotide
uuaaaggacucugucacag

SEQ ID NO: 3209037 - RNA, 19 nt, Artificial Sequence
  Description of Artificial Sequence: Synthetic oligonucleotide
acaguguuugcauuuguag

SEQ ID NO: 3209038 - RNA, 19 nt, Artificial Sequence
  Description of Artificial Sequence: Synthetic oligonucleotide
aguucuguagugucgagug

SEQ ID NO: 3209039 - RNA, 19 nt, Artificial Sequence
  Description of Artificial Sequence: Synthetic oligonucleotide
ugugaguucuugcauguug

SEQ ID NO: 3209040 - RNA, 19 nt, Artificial Sequence
  Description of Artificial Sequence: Synthetic oligonucleotide
ucuugcauguugagaaagg

SEQ ID NO: 3209041 - RNA, 19 nt, Artificial Sequence
  Description of Artificial Sequence: Synthetic oligonucleotide
guuugaagaagaguuaaag

SEQ ID NO: 3209042 - RNA, 19 nt, Artificial Sequence
  Description of Artificial Sequence: Synthetic oligonucleotide
ucuuugguguugaauuuag

SEQ ID NO: 3209043 - RNA, 19 nt, Artificial Sequence
  Description of Artificial Sequence: Synthetic oligonucleotide
gaauucuuuaguguugaag

SEQ ID NO: 3209044 - RNA, 19 nt, Artificial Sequence
  Description of Artificial Sequence: Synthetic oligonucleotide
aguauaauugaacgcuuug

SEQ ID NO: 3209045 - RNA, 19 nt, Artificial Sequence
  Description of Artificial Sequence: Synthetic oligonucleotide
uuuacacuaaucugaauuu

SEQ ID NO: 3209046 - RNA, 19 nt, Artificial Sequence
  Description of Artificial Sequence: Synthetic oligonucleotide
auaauugaacgcuuugcca

SEQ ID NO: 3209047 - RNA, 19 nt, Artificial Sequence
  Description of Artificial Sequence: Synthetic oligonucleotide
ugcauguugagaaaggcuu

SEQ ID NO: 3209048 - RNA, 19 nt, Artificial Sequence
  Description of Artificial Sequence: Synthetic oligonucleotide
uuucccacuauguauucgc

SEQ ID NO: 3209049 - RNA, 19 nt, Artificial Sequence
  Description of Artificial Sequence: Synthetic oligonucleotide
caguguuugcauuuguagg

SEQ ID NO: 3209050 - RNA, 19 nt, Artificial Sequence
  Description of Artificial Sequence: Synthetic oligonucleotide
uuaguguugaaguaucaau

SEQ ID NO: 3209051 - RNA, 19 nt, Artificial Sequence
  Description of Artificial Sequence: Synthetic oligonucleotide
aguuaaaggcuuuaccaca

SEQ ID NO: 3209052 - RNA, 19 nt, Artificial Sequence
  Description of Artificial Sequence: Synthetic oligonucleotide
aacaguuauuaaaggacuc

SEQ ID NO: 3209053 - RNA, 19 nt, Artificial Sequence
  Description of Artificial Sequence: Synthetic oligonucleotide
caauaaacaauuauugaaa

SEQ ID NO: 3209054 - RNA, 19 nt, Artificial Sequence
  Description of Artificial Sequence: Synthetic oligonucleotide
auaugaauucuuuaguguu

SEQ ID NO: 3209055 - RNA, 19 nt, Artificial Sequence
  Description of Artificial Sequence: Synthetic oligonucleotide
gaguuaaaggcuuuaccac

SEQ ID NO: 3209056 - RNA, 19 nt, Artificial Sequence
  Description of Artificial Sequence: Synthetic oligonucleotide
guuauuaaaggacucuguc

SEQ ID NO: 3209057 - RNA, 19 nt, Artificial Sequence
  Description of Artificial Sequence: Synthetic oligonucleotide
uugaaguaucaauaaacaa

SEQ ID NO: 3209058 - RNA, 19 nt, Artificial Sequence
  Description of Artificial Sequence: Synthetic oligonucleotide
uuuucaguuauccucagcg

SEQ ID NO: 3209059 - RNA, 19 nt, Artificial Sequence
  Description of Artificial Sequence: Synthetic oligonucleotide
aaggaaauagaggacggcc

SEQ ID NO: 3209060 - RNA, 19 nt, Artificial Sequence
  Description of Artificial Sequence: Synthetic oligonucleotide
acuuagcacuguuagagcc

SEQ ID NO: 3209061 - RNA, 19 nt, Artificial Sequence
  Description of Artificial Sequence: Synthetic oligonucleotide
caaggauuuuacuagaagc

SEQ ID NO: 3209062 - RNA, 19 nt, Artificial Sequence
  Description of Artificial Sequence: Synthetic oligonucleotide
auagagggcacagagacgc

SEQ ID NO: 3209063 - RNA, 19 nt, Artificial Sequence
  Description of Artificial Sequence: Synthetic oligonucleotide
uuaucuugcaggaaguucu

SEQ ID NO: 3209064 - RNA, 19 nt, Artificial Sequence
  Description of Artificial Sequence: Synthetic oligonucleotide
gagagaccagcauagaggg

SEQ ID NO: 3209065 - RNA, 19 nt, Artificial Sequence
  Description of Artificial Sequence: Synthetic oligonucleotide
uacuagaagcuucuguugg

SEQ ID NO: 3209066 - RNA, 19 nt, Artificial Sequence
  Description of Artificial Sequence: Synthetic oligonucleotide
aaggcauuaggggagaggg

SEQ ID NO: 3209067 - RNA, 19 nt, Artificial Sequence
  Description of Artificial Sequence: Synthetic oligonucleotide
ucuccaaggauuuuacuag

SEQ ID NO: 3209068 - RNA, 19 nt, Artificial Sequence
  Description of Artificial Sequence: Synthetic oligonucleotide
ucaguuauccucagcgugg

SEQ ID NO: 3209069 - RNA, 19 nt, Artificial Sequence
  Description of Artificial Sequence: Synthetic oligonucleotide
ucacuuagcacuguuagag

SEQ ID NO: 3209070 - RNA, 19 nt, Artificial Sequence
  Description of Artificial Sequence: Synthetic oligonucleotide
cuuggaguguuacagagag

SEQ ID NO: 3209071 - RNA, 19 nt, Artificial Sequence
  Description of Artificial Sequence: Synthetic oligonucleotide
acuuccaggccacucagcc

SEQ ID NO: 3209072 - RNA, 19 nt, Artificial Sequence
  Description of Artificial Sequence: Synthetic oligonucleotide
cacaguaaggucaggaagg

SEQ ID NO: 3209073 - RNA, 19 nt, Artificial Sequence
  Description of Artificial Sequence: Synthetic oligonucleotide
uggaguguuacagagagca

SEQ ID NO: 3209074 - RNA, 19 nt, Artificial Sequence
  Description of Artificial Sequence: Synthetic oligonucleotide
uuuacuagaagcuucuguu

SEQ ID NO: 3209075 - RNA, 19 nt, Artificial Sequence
  Description of Artificial Sequence: Synthetic oligonucleotide
ucugcggugacuuggagug

SEQ ID NO: 3209076 - RNA, 19 nt, Artificial Sequence
  Description of Artificial Sequence: Synthetic oligonucleotide
uuuuacuagaagcuucugu

SEQ ID NO: 3209077 - RNA, 19 nt, Artificial Sequence
  Description of Artificial Sequence: Synthetic oligonucleotide
uucaguuauccucagcgug

SEQ ID NO: 3209078 - RNA, 19 nt, Artificial Sequence
  Description of Artificial Sequence: Synthetic oligonucleotide
aaguucugcuccauggugc

SEQ ID NO: 3209079 - RNA, 19 nt, Artificial Sequence
  Description of Artificial Sequence: Synthetic oligonucleotide
aaggauuuuacuagaagcu

SEQ ID NO: 3209080 - RNA, 19 nt, Artificial Sequence
  Description of Artificial Sequence: Synthetic oligonucleotide
aggaaguucugcuccaugg

SEQ ID NO: 3209081 - RNA, 19 nt, Artificial Sequence
  Description of Artificial Sequence: Synthetic oligonucleotide
gacagcaggacaucuuugg

SEQ ID NO: 3209082 - RNA, 19 nt, Artificial Sequence
  Description of Artificial Sequence: Synthetic oligonucleotide
cucuuuaucuugcaggaag

SEQ ID NO: 3209083 - RNA, 19 nt, Artificial Sequence
  Description of Artificial Sequence: Synthetic oligonucleotide
gaaaacacccucuuuaucu

SEQ ID NO: 3209084 - RNA, 19 nt, Artificial Sequence
  Description of Artificial Sequence: Synthetic oligonucleotide
agcugaagaagggagagac

SEQ ID NO: 3209085 - RNA, 19 nt, Artificial Sequence
  Description of Artificial Sequence: Synthetic oligonucleotide
uguuagagccccaaggaaa

SEQ ID NO: 3209086 - RNA, 19 nt, Artificial Sequence
  Description of Artificial Sequence: Synthetic oligonucleotide
gacuuggaguguuacagag

SEQ ID NO: 3209087 - RNA, 19 nt, Artificial Sequence
  Description of Artificial Sequence: Synthetic oligonucleotide
ucuguugggcuucacuuag

SEQ ID NO: 3209088 - RNA, 19 nt, Artificial Sequence
  Description of Artificial Sequence: Synthetic oligonucleotide
cuucacuuagcacuguuag

SEQ ID NO: 3209089 - RNA, 19 nt, Artificial Sequence
  Description of Artificial Sequence: Synthetic oligonucleotide
aggagagcaggucaggccg

SEQ ID NO: 3209090 - RNA, 19 nt, Artificial Sequence
  Description of Artificial Sequence: Synthetic oligonucleotide
gucaggaaggcauuagggg

SEQ ID NO: 3209091 - RNA, 19 nt, Artificial Sequence
  Description of Artificial Sequence: Synthetic oligonucleotide
gaucucuggacuuccaggc

SEQ ID NO: 3209092 - RNA, 19 nt, Artificial Sequence
  Description of Artificial Sequence: Synthetic oligonucleotide
agaaggggcauuaggaagc

SEQ ID NO: 3209093 - RNA, 19 nt, Artificial Sequence
  Description of Artificial Sequence: Synthetic oligonucleotide
acccucuuuaucuugcagg

SEQ ID NO: 3209094 - RNA, 19 nt, Artificial Sequence
  Description of Artificial Sequence: Synthetic oligonucleotide
uguuacagagagcacagua

SEQ ID NO: 3209095 - RNA, 19 nt, Artificial Sequence
  Description of Artificial Sequence: Synthetic oligonucleotide
uuauccucagcguggaggc

SEQ ID NO: 3209096 - RNA, 19 nt, Artificial Sequence
  Description of Artificial Sequence: Synthetic oligonucleotide
uuccaggccacucagcccc

SEQ ID NO: 3209097 - RNA, 19 nt, Artificial Sequence
  Description of Artificial Sequence: Synthetic oligonucleotide
aacacccucuuuaucuugc

SEQ ID NO: 3209098 - RNA, 19 nt, Artificial Sequence
  Description of Artificial Sequence: Synthetic oligonucleotide
ggugcuuucaaccagcuuc

SEQ ID NO: 3209099 - RNA, 19 nt, Artificial Sequence
  Description of Artificial Sequence: Synthetic oligonucleotide
uucuccaaggauuuuacua

SEQ ID NO: 3209100 - RNA, 19 nt, Artificial Sequence
  Description of Artificial Sequence: Synthetic oligonucleotide
uuacuagaagcuucuguug

SEQ ID NO: 3209101 - RNA, 19 nt, Artificial Sequence
  Description of Artificial Sequence: Synthetic oligonucleotide
uuuucuccaaggauuuuac

SEQ ID NO: 3209102 - RNA, 19 nt, Artificial Sequence
  Description of Artificial Sequence: Synthetic oligonucleotide
uucaaccagcuucaguugc

SEQ ID NO: 3209103 - RNA, 19 nt, Artificial Sequence
  Description of Artificial Sequence: Synthetic oligonucleotide
guuauccucagcguggagg

SEQ ID NO: 3209104 - RNA, 19 nt, Artificial Sequence
  Description of Artificial Sequence: Synthetic oligonucleotide
acuguuagagccccaagga

SEQ ID NO: 3209105 - RNA, 19 nt, Artificial Sequence
  Description of Artificial Sequence: Synthetic oligonucleotide
ucuuuaucuugcaggaagu

SEQ ID NO: 3209106 - RNA, 19 nt, Artificial Sequence
  Description of Artificial Sequence: Synthetic oligonucleotide
acuagaagcuucuguuggg

SEQ ID NO: 3209107 - RNA, 19 nt, Artificial Sequence
  Description of Artificial Sequence: Synthetic oligonucleotide
aggaaauagaggacggccc

SEQ ID NO: 3209108 - RNA, 19 nt, Artificial Sequence
  Description of Artificial Sequence: Synthetic oligonucleotide
uucaguugcacugggagga

SEQ ID NO: 3209109 - RNA, 19 nt, Artificial Sequence
  Description of Artificial Sequence: Synthetic oligonucleotide
uggcuuuucaguuauccuc

SEQ ID NO: 3209110 - RNA, 19 nt, Artificial Sequence
  Description of Artificial Sequence: Synthetic oligonucleotide
gucuagagcuccuucaagc

SEQ ID NO: 3209111 - RNA, 19 nt, Artificial Sequence
  Description of Artificial Sequence: Synthetic oligonucleotide
uugcaggaaguucugcucc

SEQ ID NO: 3209112 - RNA, 19 nt, Artificial Sequence
  Description of Artificial Sequence: Synthetic oligonucleotide
gugacuuggaguguuacag

SEQ ID NO: 3209113 - RNA, 19 nt, Artificial Sequence
  Description of Artificial Sequence: Synthetic oligonucleotide
cucaguagcugaagaaggg

SEQ ID NO: 3209114 - RNA, 19 nt, Artificial Sequence
  Description of Artificial Sequence: Synthetic oligonucleotide
cacuguuagagccccaagg

SEQ ID NO: 3209115 - RNA, 19 nt, Artificial Sequence
  Description of Artificial Sequence: Synthetic oligonucleotide
aagggagagaccagcauag

SEQ ID NO: 3209116 - RNA, 19 nt, Artificial Sequence
  Description of Artificial Sequence: Synthetic oligonucleotide
uuggggagugcuuccaggg

SEQ ID NO: 3209117 - RNA, 19 nt, Artificial Sequence
  Description of Artificial Sequence: Synthetic oligonucleotide
cuccauggugcuuucaacc

SEQ ID NO: 3209118 - RNA, 19 nt, Artificial Sequence
  Description of Artificial Sequence: Synthetic oligonucleotide
ucagcguggaggcucugcg

SEQ ID NO: 3209119 - RNA, 19 nt, Artificial Sequence
  Description of Artificial Sequence: Synthetic oligonucleotide
gaaguucugcuccauggug

SEQ ID NO: 3209120 - RNA, 19 nt, Artificial Sequence
  Description of Artificial Sequence: Synthetic oligonucleotide
uuuggggagugcuuccagg

SEQ ID NO: 3209121 - RNA, 19 nt, Artificial Sequence
  Description of Artificial Sequence: Synthetic oligonucleotide
ugcucaguagcugaagaag

SEQ ID NO: 3209122 - RNA, 19 nt, Artificial Sequence
  Description of Artificial Sequence: Synthetic oligonucleotide
accagcuucaguugcacug

SEQ ID NO: 3209123 - RNA, 19 nt, Artificial Sequence
  Description of Artificial Sequence: Synthetic oligonucleotide
accaccauggcuuuucagu

SEQ ID NO: 3209124 - RNA, 19 nt, Artificial Sequence
  Description of Artificial Sequence: Synthetic oligonucleotide
agcaggacaucuuugggga

SEQ ID NO: 3209125 - RNA, 19 nt, Artificial Sequence
  Description of Artificial Sequence: Synthetic oligonucleotide
uccuuugacagcaggacau

SEQ ID NO: 3209126 - RNA, 19 nt, Artificial Sequence
  Description of Artificial Sequence: Synthetic oligonucleotide
cuuagcacuguuagagccc

SEQ ID NO: 3209127 - RNA, 19 nt, Artificial Sequence
  Description of Artificial Sequence: Synthetic oligonucleotide
acuagggcuucugugaggg

SEQ ID NO: 3209128 - RNA, 19 nt, Artificial Sequence
  Description of Artificial Sequence: Synthetic oligonucleotide
auuaggaagccuugcucag

SEQ ID NO: 3209129 - RNA, 19 nt, Artificial Sequence
  Description of Artificial Sequence: Synthetic oligonucleotide
ucuugcaggaaguucugcu

SEQ ID NO: 3209130 - RNA, 19 nt, Artificial Sequence
  Description of Artificial Sequence: Synthetic oligonucleotide
acaguaaggucaggaaggc

SEQ ID NO: 3209131 - RNA, 19 nt, Artificial Sequence
  Description of Artificial Sequence: Synthetic oligonucleotide
cuucaguugcacugggagg

SEQ ID NO: 3209132 - RNA, 19 nt, Artificial Sequence
  Description of Artificial Sequence: Synthetic oligonucleotide
ucucuggacuuccaggcca

SEQ ID NO: 3209133 - RNA, 19 nt, Artificial Sequence
  Description of Artificial Sequence: Synthetic oligonucleotide
aaacacccucuuuaucuug

SEQ ID NO: 3209134 - RNA, 19 nt, Artificial Sequence
  Description of Artificial Sequence: Synthetic oligonucleotide
cauggcuuuucaguuaucc

SEQ ID NO: 3209135 - RNA, 19 nt, Artificial Sequence
  Description of Artificial Sequence: Synthetic oligonucleotide
cauuaggaagccuugcuca

SEQ ID NO: 3209136 - RNA, 19 nt, Artificial Sequence
  Description of Artificial Sequence: Synthetic oligonucleotide
cagcaggacaucuuugggg

SEQ ID NO: 3209137 - RNA, 19 nt, Artificial Sequence
  Description of Artificial Sequence: Synthetic oligonucleotide
ugcuuccagggucacuucg

SEQ ID NO: 3209138 - RNA, 19 nt, Artificial Sequence
  Description of Artificial Sequence: Synthetic oligonucleotide
ugucuagagcuccuucaag

SEQ ID NO: 3209139 - RNA, 19 nt, Artificial Sequence
  Description of Artificial Sequence: Synthetic oligonucleotide
gaagaagggagagaccagc

SEQ ID NO: 3209140 - RNA, 19 nt, Artificial Sequence
  Description of Artificial Sequence: Synthetic oligonucleotide
aaaacacccucuuuaucuu

SEQ ID NO: 3209141 - RNA, 19 nt, Artificial Sequence
  Description of Artificial Sequence: Synthetic oligonucleotide
ugaagaagggagagaccag

SEQ ID NO: 3209142 - RNA, 19 nt, Artificial Sequence
  Description of Artificial Sequence: Synthetic oligonucleotide
acagcaggacaucuuuggg

SEQ ID NO: 3209143 - RNA, 19 nt, Artificial Sequence
  Description of Artificial Sequence: Synthetic oligonucleotide
aggucaggaaggcauuagg

SEQ ID NO: 3209144 - RNA, 19 nt, Artificial Sequence
  Description of Artificial Sequence: Synthetic oligonucleotide
aucucuggacuuccaggcc

SEQ ID NO: 3209145 - RNA, 19 nt, Artificial Sequence
  Description of Artificial Sequence: Synthetic oligonucleotide
gagaccagcauagagggca

SEQ ID NO: 3209146 - RNA, 19 nt, Artificial Sequence
  Description of Artificial Sequence: Synthetic oligonucleotide
aucuuuggggagugcuucc

SEQ ID NO: 3209147 - RNA, 19 nt, Artificial Sequence
  Description of Artificial Sequence: Synthetic oligonucleotide
ggagagaccagcauagagg

SEQ ID NO: 3209148 - RNA, 19 nt, Artificial Sequence
  Description of Artificial Sequence: Synthetic oligonucleotide
uuucaaccagcuucaguug

SEQ ID NO: 3209149 - RNA, 19 nt, Artificial Sequence
  Description of Artificial Sequence: Synthetic oligonucleotide
cauggugcuuucaaccagc

SEQ ID NO: 3209150 - RNA, 19 nt, Artificial Sequence
  Description of Artificial Sequence: Synthetic oligonucleotide
aguaaggucaggaaggcau

SEQ ID NO: 3209151 - RNA, 19 nt, Artificial Sequence
  Description of Artificial Sequence: Synthetic oligonucleotide
uccauggugcuuucaacca

SEQ ID NO: 3209152 - RNA, 19 nt, Artificial Sequence
  Description of Artificial Sequence: Synthetic oligonucleotide
uaggggagagggcagagaa

SEQ ID NO: 3209153 - RNA, 19 nt, Artificial Sequence
  Description of Artificial Sequence: Synthetic oligonucleotide
uuucaguuauccucagcgu

SEQ ID NO: 3209154 - RNA, 19 nt, Artificial Sequence
  Description of Artificial Sequence: Synthetic oligonucleotide
aguguuacagagagcacag

SEQ ID NO: 3209155 - RNA, 19 nt, Artificial Sequence
  Description of Artificial Sequence: Synthetic oligonucleotide
guagcugaagaagggagag

SEQ ID NO: 3209156 - RNA, 19 nt, Artificial Sequence
  Description of Artificial Sequence: Synthetic oligonucleotide
gaguguuacagagagcaca

SEQ ID NO: 3209157 - RNA, 19 nt, Artificial Sequence
  Description of Artificial Sequence: Synthetic oligonucleotide
uggacuuccaggccacuca

SEQ ID NO: 3209158 - RNA, 19 nt, Artificial Sequence
  Description of Artificial Sequence: Synthetic oligonucleotide
aguauguaaacuuagauga

SEQ ID NO: 3209159 - RNA, 19 nt, Artificial Sequence
  Description of Artificial Sequence: Synthetic oligonucleotide
aacaccauaauucucaaug

SEQ ID NO: 3209160 - RNA, 19 nt, Artificial Sequence
  Description of Artificial Sequence: Synthetic oligonucleotide
ucuaauuucaggaacaccu

SEQ ID NO: 3209161 - RNA, 19 nt, Artificial Sequence
  Description of Artificial Sequence: Synthetic oligonucleotide
ucuuucuucacuuugugug

SEQ ID NO: 3209162 - RNA, 19 nt, Artificial Sequence
  Description of Artificial Sequence: Synthetic oligonucleotide
uucuucuucaggaacagag

SEQ ID NO: 3209163 - RNA, 19 nt, Artificial Sequence
  Description of Artificial Sequence: Synthetic oligonucleotide
aaguuauacucucuggauc

SEQ ID NO: 3209164 - RNA, 19 nt, Artificial Sequence
  Description of Artificial Sequence: Synthetic oligonucleotide
uagaugauagccaaugccc

SEQ ID NO: 3209165 - RNA, 19 nt, Artificial Sequence
  Description of Artificial Sequence: Synthetic oligonucleotide
uuagaugauagccaaugcc

SEQ ID NO: 3209166 - RNA, 19 nt, Artificial Sequence
  Description of Artificial Sequence: Synthetic oligonucleotide
uaaacuuagaugauagcca

SEQ ID NO: 3209167 - RNA, 19 nt, Artificial Sequence
  Description of Artificial Sequence: Synthetic oligonucleotide
cauggaaacaccauaauuc

SEQ ID NO: 3209168 - RNA, 19 nt, Artificial Sequence
  Description of Artificial Sequence: Synthetic oligonucleotide
acacauuucauucaguaug

SEQ ID NO: 3209169 - RNA, 19 nt, Artificial Sequence
  Description of Artificial Sequence: Synthetic oligonucleotide
guaaacuuagaugauagcc

SEQ ID NO: 3209170 - RNA, 19 nt, Artificial Sequence
  Description of Artificial Sequence: Synthetic oligonucleotide
ugaaguuauacucucugga

SEQ ID NO: 3209171 - RNA, 19 nt, Artificial Sequence
  Description of Artificial Sequence: Synthetic oligonucleotide
uugguuagaacaccuauca

SEQ ID NO: 3209172 - RNA, 19 nt, Artificial Sequence
  Description of Artificial Sequence: Synthetic oligonucleotide
agaguugucauggaaacac

SEQ ID NO: 3209173 - RNA, 19 nt, Artificial Sequence
  Description of Artificial Sequence: Synthetic oligonucleotide
ucuucaggaacagagauga

SEQ ID NO: 3209174 - RNA, 19 nt, Artificial Sequence
  Description of Artificial Sequence: Synthetic oligonucleotide
ucauucagaguugucaugg

SEQ ID NO: 3209175 - RNA, 19 nt, Artificial Sequence
  Description of Artificial Sequence: Synthetic oligonucleotide
aucaagaucucuguaaggg

SEQ ID NO: 3209176 - RNA, 19 nt, Artificial Sequence
  Description of Artificial Sequence: Synthetic oligonucleotide
acaccauaauucucaaugc

SEQ ID NO: 3209177 - RNA, 19 nt, Artificial Sequence
  Description of Artificial Sequence: Synthetic oligonucleotide
aaugccuugguuagaacac

SEQ ID NO: 3209178 - RNA, 19 nt, Artificial Sequence
  Description of Artificial Sequence: Synthetic oligonucleotide
aggaacaccucauucagag

SEQ ID NO: 3209179 - RNA, 19 nt, Artificial Sequence
  Description of Artificial Sequence: Synthetic oligonucleotide
aguuauacucucuggauca

SEQ ID NO: 3209180 - RNA, 19 nt, Artificial Sequence
  Description of Artificial Sequence: Synthetic oligonucleotide
ugauucgucagucauugac

SEQ ID NO: 3209181 - RNA, 19 nt, Artificial Sequence
  Description of Artificial Sequence: Synthetic oligonucleotide
uucccuucuaauuucagga

SEQ ID NO: 3209182 - RNA, 19 nt, Artificial Sequence
  Description of Artificial Sequence: Synthetic oligonucleotide
ucaggaacaccucauucag

SEQ ID NO: 3209183 - RNA, 19 nt, Artificial Sequence
  Description of Artificial Sequence: Synthetic oligonucleotide
gguuagaacaccuaucaag

SEQ ID NO: 3209184 - RNA, 19 nt, Artificial Sequence
  Description of Artificial Sequence: Synthetic oligonucleotide
aaauuuguucgugcuuucc

SEQ ID NO: 3209185 - RNA, 19 nt, Artificial Sequence
  Description of Artificial Sequence: Synthetic oligonucleotide
aaacuuagaugauagccaa

SEQ ID NO: 3209186 - RNA, 19 nt, Artificial Sequence
  Description of Artificial Sequence: Synthetic oligonucleotide
aggggcaagauauacauga

SEQ ID NO: 3209187 - RNA, 19 nt, Artificial Sequence
  Description of Artificial Sequence: Synthetic oligonucleotide
aauuuguucgugcuuucca

SEQ ID NO: 3209188 - RNA, 19 nt, Artificial Sequence
  Description of Artificial Sequence: Synthetic oligonucleotide
caguauguaaacuuagaug

SEQ ID NO: 3209189 - RNA, 19 nt, Artificial Sequence
  Description of Artificial Sequence: Synthetic oligonucleotide
ucaguauguaaacuuagau

SEQ ID NO: 3209190 - RNA, 19 nt, Artificial Sequence
  Description of Artificial Sequence: Synthetic oligonucleotide
uauacaugagucuuucuuc

SEQ ID NO: 3209191 - RNA, 19 nt, Artificial Sequence
  Description of Artificial Sequence: Synthetic oligonucleotide
uucucaaugccuugguuag

SEQ ID NO: 3209192 - RNA, 19 nt, Artificial Sequence
  Description of Artificial Sequence: Synthetic oligonucleotide
agugaaguuauacucucug

SEQ ID NO: 3209193 - RNA, 19 nt, Artificial Sequence
  Description of Artificial Sequence: Synthetic oligonucleotide
gaucacacauuucauucag

SEQ ID NO: 3209194 - RNA, 19 nt, Artificial Sequence
  Description of Artificial Sequence: Synthetic oligonucleotide
uuucauucaguauguaaac

SEQ ID NO: 3209195 - RNA, 19 nt, Artificial Sequence
  Description of Artificial Sequence: Synthetic oligonucleotide
cuaucaagaucucuguaag

SEQ ID NO: 3209196 - RNA, 19 nt, Artificial Sequence
  Description of Artificial Sequence: Synthetic oligonucleotide
uucaggaacaccucauuca

SEQ ID NO: 3209197 - RNA, 19 nt, Artificial Sequence
  Description of Artificial Sequence: Synthetic oligonucleotide
uaauuucaggaacaccuca

SEQ ID NO: 3209198 - RNA, 19 nt, Artificial Sequence
  Description of Artificial Sequence: Synthetic oligonucleotide
ugagucuuucuucacuuug

SEQ ID NO: 3209199 - RNA, 19 nt, Artificial Sequence
  Description of Artificial Sequence: Synthetic oligonucleotide
uguguggucagucuggcau

SEQ ID NO: 3209200 - RNA, 19 nt, Artificial Sequence
  Description of Artificial Sequence: Synthetic oligonucleotide
cuuucuucacuuugugugg

SEQ ID NO: 3209201 - RNA, 19 nt, Artificial Sequence
  Description of Artificial Sequence: Synthetic oligonucleotide
uaucaagaucucuguaagg

SEQ ID NO: 3209202 - RNA, 19 nt, Artificial Sequence
  Description of Artificial Sequence: Synthetic oligonucleotide
uggaucacacauuucauuc

SEQ ID NO: 3209203 - RNA, 19 nt, Artificial Sequence
  Description of Artificial Sequence: Synthetic oligonucleotide
uauacucucuggaucacac

SEQ ID NO: 3209204 - RNA, 19 nt, Artificial Sequence
  Description of Artificial Sequence: Synthetic oligonucleotide
uuuguucgugcuuuccagg

SEQ ID NO: 3209205 - RNA, 19 nt, Artificial Sequence
  Description of Artificial Sequence: Synthetic oligonucleotide
agaacaccuaucaagaucu

SEQ ID NO: 3209206 - RNA, 19 nt, Artificial Sequence
  Description of Artificial Sequence: Synthetic oligonucleotide
ugucauggaaacaccauaa

SEQ ID NO: 3209207 - RNA, 19 nt, Artificial Sequence
  Description of Artificial Sequence: Synthetic oligonucleotide
uucagaguugucauggaaa

SEQ ID NO: 3209208 - RNA, 19 nt, Artificial Sequence
  Description of Artificial Sequence: Synthetic oligonucleotide
auggaaacaccauaauucu

SEQ ID NO: 3209209 - RNA, 19 nt, Artificial Sequence
  Description of Artificial Sequence: Synthetic oligonucleotide
auauacaugagucuuucuu

SEQ ID NO: 3209210 - RNA, 19 nt, Artificial Sequence
  Description of Artificial Sequence: Synthetic oligonucleotide
auaauucucaaugccuugg

SEQ ID NO: 3209211 - RNA, 19 nt, Artificial Sequence
  Description of Artificial Sequence: Synthetic oligonucleotide
uagaacaccuaucaagauc

SEQ ID NO: 3209212 - RNA, 19 nt, Artificial Sequence
  Description of Artificial Sequence: Synthetic oligonucleotide
ucagaguugucauggaaac

SEQ ID NO: 3209213 - RNA, 19 nt, Artificial Sequence
  Description of Artificial Sequence: Synthetic oligonucleotide
ucuggaaauuuguucgugc

SEQ ID NO: 3209214 - RNA, 19 nt, Artificial Sequence
  Description of Artificial Sequence: Synthetic oligonucleotide
auuuguucgugcuuuccag

SEQ ID NO: 3209215 - RNA, 19 nt, Artificial Sequence
  Description of Artificial Sequence: Synthetic oligonucleotide
agggucuggaaauuuguuc

SEQ ID NO: 3209216 - RNA, 19 nt, Artificial Sequence
  Description of Artificial Sequence: Synthetic oligonucleotide
uugacuucccuucuaauuu

SEQ ID NO: 3209217 - RNA, 19 nt, Artificial Sequence
  Description of Artificial Sequence: Synthetic oligonucleotide
uuguucgugcuuuccaggg

SEQ ID NO: 3209218 - RNA, 19 nt, Artificial Sequence
  Description of Artificial Sequence: Synthetic oligonucleotide
aaugccccauuucuucuuc

SEQ ID NO: 3209219 - RNA, 19 nt, Artificial Sequence
  Description of Artificial Sequence: Synthetic oligonucleotide
uucaguauguaaacuuaga

SEQ ID NO: 3209220 - RNA, 19 nt, Artificial Sequence
  Description of Artificial Sequence: Synthetic oligonucleotide
ucuggcaucagggaugugc

SEQ ID NO: 3209221 - RNA, 19 nt, Artificial Sequence
  Description of Artificial Sequence: Synthetic oligonucleotide
ucauucaguauguaaacuu

SEQ ID NO: 3209222 - RNA, 19 nt, Artificial Sequence
  Description of Artificial Sequence: Synthetic oligonucleotide
auuucauucaguauguaaa

SEQ ID NO: 3209223 - RNA, 19 nt, Artificial Sequence
  Description of Artificial Sequence: Synthetic oligonucleotide
gggucuggaaauuuguucg

SEQ ID NO: 3209224 - RNA, 19 nt, Artificial Sequence
  Description of Artificial Sequence: Synthetic oligonucleotide
auguaaacuuagaugauag

SEQ ID NO: 3209225 - RNA, 19 nt, Artificial Sequence
  Description of Artificial Sequence: Synthetic oligonucleotide
ucuguaagggucuggaaau

SEQ ID NO: 3209226 - RNA, 19 nt, Artificial Sequence
  Description of Artificial Sequence: Synthetic oligonucleotide
acuuagaugauagccaaug

SEQ ID NO: 3209227 - RNA, 19 nt, Artificial Sequence
  Description of Artificial Sequence: Synthetic oligonucleotide
gaccagugaaguuauacuc

SEQ ID NO: 3209228 - RNA, 19 nt, Artificial Sequence
  Description of Artificial Sequence: Synthetic oligonucleotide
agaugauagccaaugcccc

SEQ ID NO: 3209229 - RNA, 19 nt, Artificial Sequence
  Description of Artificial Sequence: Synthetic oligonucleotide
uguaaacuuagaugauagc

SEQ ID NO: 3209230 - RNA, 19 nt, Artificial Sequence
  Description of Artificial Sequence: Synthetic oligonucleotide
ucgucagucauugacuucc

SEQ ID NO: 3209231 - RNA, 19 nt, Artificial Sequence
  Description of Artificial Sequence: Synthetic oligonucleotide
cuuuguguggucagucugg

SEQ ID NO: 3209232 - RNA, 19 nt, Artificial Sequence
  Description of Artificial Sequence: Synthetic oligonucleotide
auacaugagucuuucuuca

SEQ ID NO: 3209233 - RNA, 19 nt, Artificial Sequence
  Description of Artificial Sequence: Synthetic oligonucleotide
ucauggaaacaccauaauu

SEQ ID NO: 3209234 - RNA, 19 nt, Artificial Sequence
  Description of Artificial Sequence: Synthetic oligonucleotide
agauauacaugagucuuuc

SEQ ID NO: 3209235 - RNA, 19 nt, Artificial Sequence
  Description of Artificial Sequence: Synthetic oligonucleotide
cuucccuucuaauuucagg

SEQ ID NO: 3209236 - RNA, 19 nt, Artificial Sequence
  Description of Artificial Sequence: Synthetic oligonucleotide
uuucaggaacaccucauuc

SEQ ID NO: 3209237 - RNA, 19 nt, Artificial Sequence
  Description of Artificial Sequence: Synthetic oligonucleotide
gugaaguuauacucucugg

SEQ ID NO: 3209238 - RNA, 19 nt, Artificial Sequence
  Description of Artificial Sequence: Synthetic oligonucleotide
guuagaacaccuaucaaga

SEQ ID NO: 3209239 - RNA, 19 nt, Artificial Sequence
  Description of Artificial Sequence: Synthetic oligonucleotide
ucuucuucaggaacagaga

SEQ ID NO: 3209240 - RNA, 19 nt, Artificial Sequence
  Description of Artificial Sequence: Synthetic oligonucleotide
auagccaaugccccauuuc

SEQ ID NO: 3209241 - RNA, 19 nt, Artificial Sequence
  Description of Artificial Sequence: Synthetic oligonucleotide
uacucucuggaucacacau

SEQ ID NO: 3209242 - RNA, 19 nt, Artificial Sequence
  Description of Artificial Sequence: Synthetic oligonucleotide
ucacacauuucauucagua

SEQ ID NO: 3209243 - RNA, 19 nt, Artificial Sequence
  Description of Artificial Sequence: Synthetic oligonucleotide
uagccaaugccccauuucu

SEQ ID NO: 3209244 - RNA, 19 nt, Artificial Sequence
  Description of Artificial Sequence: Synthetic oligonucleotide
caagaucucuguaaggguc

SEQ ID NO: 3209245 - RNA, 19 nt, Artificial Sequence
  Description of Artificial Sequence: Synthetic oligonucleotide
cuuagaugauagccaaugc

SEQ ID NO: 3209246 - RNA, 19 nt, Artificial Sequence
  Description of Artificial Sequence: Synthetic oligonucleotide
uucuucaggaacagagaug

SEQ ID NO: 3209247 - RNA, 19 nt, Artificial Sequence
  Description of Artificial Sequence: Synthetic oligonucleotide
auucucaaugccuugguua

SEQ ID NO: 3209248 - RNA, 19 nt, Artificial Sequence
  Description of Artificial Sequence: Synthetic oligonucleotide
ugaccagugaaguuauacu

SEQ ID NO: 3209249 - RNA, 19 nt, Artificial Sequence
  Description of Artificial Sequence: Synthetic oligonucleotide
uaagggucuggaaauuugu

SEQ ID NO: 3209250 - RNA, 19 nt, Artificial Sequence
  Description of Artificial Sequence: Synthetic oligonucleotide
caccauaauucucaaugcc

SEQ ID NO: 3209251 - RNA, 19 nt, Artificial Sequence
  Description of Artificial Sequence: Synthetic oligonucleotide
uguucgugcuuuccagggg

SEQ ID NO: 3209252 - RNA, 19 nt, Artificial Sequence
  Description of Artificial Sequence: Synthetic oligonucleotide
ucaagaucucuguaagggu

SEQ ID NO: 3209253 - RNA, 19 nt, Artificial Sequence
  Description of Artificial Sequence: Synthetic oligonucleotide
acuuuguguggucagucug

SEQ ID NO: 3209254 - RNA, 19 nt, Artificial Sequence
  Description of Artificial Sequence: Synthetic oligonucleotide
uggucagucuggcaucagg

SEQ ID NO: 3209255 - RNA, 19 nt, Artificial Sequence
  Description of Artificial Sequence: Synthetic oligonucleotide
auugacuucccuucuaauu

SEQ ID NO: 3209256 - RNA, 19 nt, Artificial Sequence
  Description of Artificial Sequence: Synthetic oligonucleotide
uuuugaccagugaaguuau

SEQ ID NO: 3209257 - RNA, 19 nt, Artificial Sequence
  Description of Artificial Sequence: Synthetic oligonucleotide
uauguaaacuuagaugaua

SEQ ID NO: 3209258 - RNA, 19 nt, Artificial Sequence
  Description of Artificial Sequence: Synthetic oligonucleotide
acaugauuaaaauagccac

SEQ ID NO: 3209259 - RNA, 19 nt, Artificial Sequence
  Description of Artificial Sequence: Synthetic oligonucleotide
gauuaaaauagccaccagg

SEQ ID NO: 3209260 - RNA, 19 nt, Artificial Sequence
  Description of Artificial Sequence: Synthetic oligonucleotide
agugacaugauuaaaauag

SEQ ID NO: 3209261 - RNA, 19 nt, Artificial Sequence
  Description of Artificial Sequence: Synthetic oligonucleotide
aauuggucccaauccaucc

SEQ ID NO: 3209262 - RNA, 19 nt, Artificial Sequence
  Description of Artificial Sequence: Synthetic oligonucleotide
aaugauacggcccacugcu

SEQ ID NO: 3209263 - RNA, 19 nt, Artificial Sequence
  Description of Artificial Sequence: Synthetic oligonucleotide
auuaaaauagccaccaggg

SEQ ID NO: 3209264 - RNA, 19 nt, Artificial Sequence
  Description of Artificial Sequence: Synthetic oligonucleotide
uaaaauagccaccagggcu

SEQ ID NO: 3209265 - RNA, 19 nt, Artificial Sequence
  Description of Artificial Sequence: Synthetic oligonucleotide
aagaccaccacgugcaugg

SEQ ID NO: 3209266 - RNA, 19 nt, Artificial Sequence
  Description of Artificial Sequence: Synthetic oligonucleotide
uuuagugacaugauuaaaa

SEQ ID NO: 3209267 - RNA, 19 nt, Artificial Sequence
  Description of Artificial Sequence: Synthetic oligonucleotide
aggucagugacacagguuc

SEQ ID NO: 3209268 - RNA, 19 nt, Artificial Sequence
  Description of Artificial Sequence: Synthetic oligonucleotide
aauucugccucuccaauug

SEQ ID NO: 3209269 - RNA, 19 nt, Artificial Sequence
  Description of Artificial Sequence: Synthetic oligonucleotide
ugacaugauuaaaauagcc

SEQ ID NO: 3209270 - RNA, 19 nt, Artificial Sequence
  Description of Artificial Sequence: Synthetic oligonucleotide
uagaggaaagaccaccacg

SEQ ID NO: 3209271 - RNA, 19 nt, Artificial Sequence
  Description of Artificial Sequence: Synthetic oligonucleotide
aggaaagaccaccacgugc

SEQ ID NO: 3209272 - RNA, 19 nt, Artificial Sequence
  Description of Artificial Sequence: Synthetic oligonucleotide
agaaguguagaggaaagac

SEQ ID NO: 3209273 - RNA, 19 nt, Artificial Sequence
  Description of Artificial Sequence: Synthetic oligonucleotide
augugguuuguuuagugac

SEQ ID NO: 3209274 - RNA, 19 nt, Artificial Sequence
  Description of Artificial Sequence: Synthetic oligonucleotide
acugcugucacagacuggc

SEQ ID NO: 3209275 - RNA, 19 nt, Artificial Sequence
  Description of Artificial Sequence: Synthetic oligonucleotide
uuguuuagugacaugauua

SEQ ID NO: 3209276 - RNA, 19 nt, Artificial Sequence
  Description of Artificial Sequence: Synthetic oligonucleotide
agugccacuggccugggcc

SEQ ID NO: 3209277 - RNA, 19 nt, Artificial Sequence
  Description of Artificial Sequence: Synthetic oligonucleotide
aaugugguuuguuuaguga

SEQ ID NO: 3209278 - RNA, 19 nt, Artificial Sequence
  Description of Artificial Sequence: Synthetic oligonucleotide
caugauuaaaauagccacc

SEQ ID NO: 3209279 - RNA, 19 nt, Artificial Sequence
  Description of Artificial Sequence: Synthetic oligonucleotide
uaaagcagcacccaggcuu

SEQ ID NO: 3209280 - RNA, 19 nt, Artificial Sequence
  Description of Artificial Sequence: Synthetic oligonucleotide
aaguguagaggaaagacca

SEQ ID NO: 3209281 - RNA, 19 nt, Artificial Sequence
  Description of Artificial Sequence: Synthetic oligonucleotide
uuaaaauagccaccagggc

SEQ ID NO: 3209282 - RNA, 19 nt, Artificial Sequence
  Description of Artificial Sequence: Synthetic oligonucleotide
aaggacagaaguguagagg

SEQ ID NO: 3209283 - RNA, 19 nt, Artificial Sequence
  Description of Artificial Sequence: Synthetic oligonucleotide
acaccuaugacagugccac

SEQ ID NO: 3209284 - RNA, 19 nt, Artificial Sequence
  Description of Artificial Sequence: Synthetic oligonucleotide
aggacagaaguguagagga

SEQ ID NO: 3209285 - RNA, 19 nt, Artificial Sequence
  Description of Artificial Sequence: Synthetic oligonucleotide
auuugcccaguucuaauuc

SEQ ID NO: 3209286 - RNA, 19 nt, Artificial Sequence
  Description of Artificial Sequence: Synthetic oligonucleotide
uuagugacaugauuaaaau

SEQ ID NO: 3209287 - RNA, 19 nt, Artificial Sequence
  Description of Artificial Sequence: Synthetic oligonucleotide
uguagaggaaagaccacca

SEQ ID NO: 3209288 - RNA, 19 nt, Artificial Sequence
  Description of Artificial Sequence: Synthetic oligonucleotide
uggaaugugguuuguuuag

SEQ ID NO: 3209289 - RNA, 19 nt, Artificial Sequence
  Description of Artificial Sequence: Synthetic oligonucleotide
gagaggggcaaugauacgg

SEQ ID NO: 3209290 - RNA, 19 nt, Artificial Sequence
  Description of Artificial Sequence: Synthetic oligonucleotide
acacagguucucccgaugc

SEQ ID NO: 3209291 - RNA, 19 nt, Artificial Sequence
  Description of Artificial Sequence: Synthetic oligonucleotide
ucccaauccauccuacucc

SEQ ID NO: 3209292 - RNA, 19 nt, Artificial Sequence
  Description of Artificial Sequence: Synthetic oligonucleotide
agugacacagguucucccg

SEQ ID NO: 3209293 - RNA, 19 nt, Artificial Sequence
  Description of Artificial Sequence: Synthetic oligonucleotide
uggcccacaccuaugacag

SEQ ID NO: 3209294 - RNA, 19 nt, Artificial Sequence
  Description of Artificial Sequence: Synthetic oligonucleotide
gaaguguagaggaaagacc

SEQ ID NO: 3209295 - RNA, 19 nt, Artificial Sequence
  Description of Artificial Sequence: Synthetic oligonucleotide
uaugacagugccacuggcc

SEQ ID NO: 3209296 - RNA, 19 nt, Artificial Sequence
  Description of Artificial Sequence: Synthetic oligonucleotide
uguuuagugacaugauuaa

SEQ ID NO: 3209297 - RNA, 19 nt, Artificial Sequence
  Description of Artificial Sequence: Synthetic oligonucleotide
uucuaauucugccucucca

SEQ ID NO: 3209298 - RNA, 19 nt, Artificial Sequence
  Description of Artificial Sequence: Synthetic oligonucleotide
ucagcuggaggucagugac

SEQ ID NO: 3209299 - RNA, 19 nt, Artificial Sequence
  Description of Artificial Sequence: Synthetic oligonucleotide
augauuaaaauagccacca

SEQ ID NO: 3209300 - RNA, 19 nt, Artificial Sequence
  Description of Artificial Sequence: Synthetic oligonucleotide
uagagcagcagcagcaggc

SEQ ID NO: 3209301 - RNA, 19 nt, Artificial Sequence
  Description of Artificial Sequence: Synthetic oligonucleotide
uccaauuggucccaaucca

SEQ ID NO: 3209302 - RNA, 19 nt, Artificial Sequence
  Description of Artificial Sequence: Synthetic oligonucleotide
uuuguuuagugacaugauu

SEQ ID NO: 3209303 - RNA, 19 nt, Artificial Sequence
  Description of Artificial Sequence: Synthetic oligonucleotide
aggagaggggcaaugauac

SEQ ID NO: 3209304 - RNA, 19 nt, Artificial Sequence
  Description of Artificial Sequence: Synthetic oligonucleotide
gacaugauuaaaauagcca

SEQ ID NO: 3209305 - RNA, 19 nt, Artificial Sequence
  Description of Artificial Sequence: Synthetic oligonucleotide
acagggacugaucuccugg

SEQ ID NO: 3209306 - RNA, 19 nt, Artificial Sequence
  Description of Artificial Sequence: Synthetic oligonucleotide
uaggaccuuacucccaucc

SEQ ID NO: 3209307 - RNA, 19 nt, Artificial Sequence
  Description of Artificial Sequence: Synthetic oligonucleotide
gaaugugguuuguuuagug

SEQ ID NO: 3209308 - RNA, 19 nt, Artificial Sequence
  Description of Artificial Sequence: Synthetic oligonucleotide
ugugguuuguuuagugaca

SEQ ID NO: 3209309 - RNA, 19 nt, Artificial Sequence
  Description of Artificial Sequence: Synthetic oligonucleotide
ugauuaaaauagccaccag

SEQ ID NO: 3209310 - RNA, 19 nt, Artificial Sequence
  Description of Artificial Sequence: Synthetic oligonucleotide
cuccaauuggucccaaucc

SEQ ID NO: 3209311 - RNA, 19 nt, Artificial Sequence
  Description of Artificial Sequence: Synthetic oligonucleotide
uggagaaggacagaagugu

SEQ ID NO: 3209312 - RNA, 19 nt, Artificial Sequence
  Description of Artificial Sequence: Synthetic oligonucleotide
gaaggacagaaguguagag

SEQ ID NO: 3209313 - RNA, 19 nt, Artificial Sequence
  Description of Artificial Sequence: Synthetic oligonucleotide
ucuccaauuggucccaauc

SEQ ID NO: 3209314 - RNA, 19 nt, Artificial Sequence
  Description of Artificial Sequence: Synthetic oligonucleotide
ugcugucacagacuggccc

SEQ ID NO: 3209315 - RNA, 19 nt, Artificial Sequence
  Description of Artificial Sequence: Synthetic oligonucleotide
accaccacgugcauggugc

SEQ ID NO: 3209316 - RNA, 19 nt, Artificial Sequence
  Description of Artificial Sequence: Synthetic oligonucleotide
ugcugguggagaaggacag

SEQ ID NO: 3209317 - RNA, 19 nt, Artificial Sequence
  Description of Artificial Sequence: Synthetic oligonucleotide
ucuaauucugccucuccaa

SEQ ID NO: 3209318 - RNA, 19 nt, Artificial Sequence
  Description of Artificial Sequence: Synthetic oligonucleotide
cacuccugaaaggagaggg

SEQ ID NO: 3209319 - RNA, 19 nt, Artificial Sequence
  Description of Artificial Sequence: Synthetic oligonucleotide
cuggaggucagugacacag

SEQ ID NO: 3209320 - RNA, 19 nt, Artificial Sequence
  Description of Artificial Sequence: Synthetic oligonucleotide
uuuguccccgauuugccca

SEQ ID NO: 3209321 - RNA, 19 nt, Artificial Sequence
  Description of Artificial Sequence: Synthetic oligonucleotide
agcagcagcaggcagguga

SEQ ID NO: 3209322 - RNA, 19 nt, Artificial Sequence
  Description of Artificial Sequence: Synthetic oligonucleotide
ucuuuguccccgauuugcc

SEQ ID NO: 3209323 - RNA, 19 nt, Artificial Sequence
  Description of Artificial Sequence: Synthetic oligonucleotide
cuuacucccauccccacug

SEQ ID NO: 3209324 - RNA, 19 nt, Artificial Sequence
  Description of Artificial Sequence: Synthetic oligonucleotide
uuuaggaccuuacucccau

SEQ ID NO: 3209325 - RNA, 19 nt, Artificial Sequence
  Description of Artificial Sequence: Synthetic oligonucleotide
augacagugccacuggccu

SEQ ID NO: 3209326 - RNA, 19 nt, Artificial Sequence
  Description of Artificial Sequence: Synthetic oligonucleotide
aaaauagccaccagggcua

SEQ ID NO: 3209327 - RNA, 19 nt, Artificial Sequence
  Description of Artificial Sequence: Synthetic oligonucleotide
aggaccuuacucccauccc

SEQ ID NO: 3209328 - RNA, 19 nt, Artificial Sequence
  Description of Artificial Sequence: Synthetic oligonucleotide
aaaggagaggggcaaugau

SEQ ID NO: 3209329 - RNA, 19 nt, Artificial Sequence
  Description of Artificial Sequence: Synthetic oligonucleotide
uuuuaggaccuuacuccca

SEQ ID NO: 3209330 - RNA, 19 nt, Artificial Sequence
  Description of Artificial Sequence: Synthetic oligonucleotide
agaggaaagaccaccacgu

SEQ ID NO: 3209331 - RNA, 19 nt, Artificial Sequence
  Description of Artificial Sequence: Synthetic oligonucleotide
uuugcccaguucuaauucu

SEQ ID NO: 3209332 - RNA, 19 nt, Artificial Sequence
  Description of Artificial Sequence: Synthetic oligonucleotide
ugauacggcccacugcugu

SEQ ID NO: 3209333 - RNA, 19 nt, Artificial Sequence
  Description of Artificial Sequence: Synthetic oligonucleotide
gagaaggacagaaguguag

SEQ ID NO: 3209334 - RNA, 19 nt, Artificial Sequence
  Description of Artificial Sequence: Synthetic oligonucleotide
guucucccgaugcuggugg

SEQ ID NO: 3209335 - RNA, 19 nt, Artificial Sequence
  Description of Artificial Sequence: Synthetic oligonucleotide
auagccaccagggcuaaag

SEQ ID NO: 3209336 - RNA, 19 nt, Artificial Sequence
  Description of Artificial Sequence: Synthetic oligonucleotide
gacagugccacuggccugg

SEQ ID NO: 3209337 - RNA, 19 nt, Artificial Sequence
  Description of Artificial Sequence: Synthetic oligonucleotide
agcuggaggucagugacac

SEQ ID NO: 3209338 - RNA, 19 nt, Artificial Sequence
  Description of Artificial Sequence: Synthetic oligonucleotide
cuggccacggaguagagca

SEQ ID NO: 3209339 - RNA, 19 nt, Artificial Sequence
  Description of Artificial Sequence: Synthetic oligonucleotide
gguuuguuuagugacauga

SEQ ID NO: 3209340 - RNA, 19 nt, Artificial Sequence
  Description of Artificial Sequence: Synthetic oligonucleotide
cauggugcuggccacggag

SEQ ID NO: 3209341 - RNA, 19 nt, Artificial Sequence
  Description of Artificial Sequence: Synthetic oligonucleotide
agaggggcaaugauacggc

SEQ ID NO: 3209342 - RNA, 19 nt, Artificial Sequence
  Description of Artificial Sequence: Synthetic oligonucleotide
agaaggacagaaguguaga

SEQ ID NO: 3209343 - RNA, 19 nt, Artificial Sequence
  Description of Artificial Sequence: Synthetic oligonucleotide
uccugaaaggagaggggca

SEQ ID NO: 3209344 - RNA, 19 nt, Artificial Sequence
  Description of Artificial Sequence: Synthetic oligonucleotide
uagugacaugauuaaaaua

SEQ ID NO: 3209345 - RNA, 19 nt, Artificial Sequence
  Description of Artificial Sequence: Synthetic oligonucleotide
cacggaguagagcagcagc

SEQ ID NO: 3209346 - RNA, 19 nt, Artificial Sequence
  Description of Artificial Sequence: Synthetic oligonucleotide
agggacugaucuccugggc

SEQ ID NO: 3209347 - RNA, 19 nt, Artificial Sequence
  Description of Artificial Sequence: Synthetic oligonucleotide
acuggaaugugguuuguuu

SEQ ID NO: 3209348 - RNA, 19 nt, Artificial Sequence
  Description of Artificial Sequence: Synthetic oligonucleotide
cugccucuccaauuggucc

SEQ ID NO: 3209349 - RNA, 19 nt, Artificial Sequence
  Description of Artificial Sequence: Synthetic oligonucleotide
ugccucuccaauugguccc

SEQ ID NO: 3209350 - RNA, 19 nt, Artificial Sequence
  Description of Artificial Sequence: Synthetic oligonucleotide
cagggcuaaagcagcaccc

SEQ ID NO: 3209351 - RNA, 19 nt, Artificial Sequence
  Description of Artificial Sequence: Synthetic oligonucleotide
cuuuguccccgauuugccc

SEQ ID NO: 3209352 - RNA, 19 nt, Artificial Sequence
  Description of Artificial Sequence: Synthetic oligonucleotide
uugcccaguucuaauucug

SEQ ID NO: 3209353 - RNA, 19 nt, Artificial Sequence
  Description of Artificial Sequence: Synthetic oligonucleotide
ugaaaggagaggggcaaug

SEQ ID NO: 3209354 - RNA, 19 nt, Artificial Sequence
  Description of Artificial Sequence: Synthetic oligonucleotide
acagaaguguagaggaaag

SEQ ID NO: 3209355 - RNA, 19 nt, Artificial Sequence
  Description of Artificial Sequence: Synthetic oligonucleotide
caaugauacggcccacugc

SEQ ID NO: 3209356 - RNA, 19 nt, Artificial Sequence
  Description of Artificial Sequence: Synthetic oligonucleotide
agcagcaggcaggugagcg

SEQ ID NO: 3209357 - RNA, 19 nt, Artificial Sequence
  Description of Artificial Sequence: Synthetic oligonucleotide
aauccauccuacucccuuu

SEQ ID NO: 3209358 - RNA, 19 nt, Artificial Sequence
  Description of Artificial Sequence: Synthetic oligonucleotide
aguauuaaaauauaggucc

SEQ ID NO: 3209359 - RNA, 19 nt, Artificial Sequence
  Description of Artificial Sequence: Synthetic oligonucleotide
  modified_base (13)..(13): a, c, u, g, unknown or other
ugaaucuucaaanagggga

SEQ ID NO: 3209360 - RNA, 19 nt, Artificial Sequence
  Description of Artificial Sequence: Synthetic oligonucleotide
cuugugauuagcaaggucc

SEQ ID NO: 3209361 - RNA, 19 nt, Artificial Sequence
  Description of Artificial Sequence: Synthetic oligonucleotide
ucauauagggcccugaugu

SEQ ID NO: 3209362 - RNA, 19 nt, Artificial Sequence
  Description of Artificial Sequence: Synthetic oligonucleotide
uaaaacucaguucagacuc

SEQ ID NO: 3209363 - RNA, 19 nt, Artificial Sequence
  Description of Artificial Sequence: Synthetic oligonucleotide
uuucaagucaauauccucc

SEQ ID NO: 3209364 - RNA, 19 nt, Artificial Sequence
  Description of Artificial Sequence: Synthetic oligonucleotide
gagucuaaccauuacaucc

SEQ ID NO: 3209365 - RNA, 19 nt, Artificial Sequence
  Description of Artificial Sequence: Synthetic oligonucleotide
uggagaagaaacaaggggc

SEQ ID NO: 3209366 - RNA, 19 nt, Artificial Sequence
  Description of Artificial Sequence: Synthetic oligonucleotide
aaucgugagaacugugggc

SEQ ID NO: 3209367 - RNA, 19 nt, Artificial Sequence
  Description of Artificial Sequence: Synthetic oligonucleotide
uacaguaccuauuaauagg

SEQ ID NO: 3209368 - RNA, 19 nt, Artificial Sequence
  Description of Artificial Sequence: Synthetic oligonucleotide
gaaacaaggggccagggag

SEQ ID NO: 3209369 - RNA, 19 nt, Artificial Sequence
  Description of Artificial Sequence: Synthetic oligonucleotide
ucuccgucuacaaaggagg

SEQ ID NO: 3209370 - RNA, 19 nt, Artificial Sequence
  Description of Artificial Sequence: Synthetic oligonucleotide
uauaaaugcagcuggagaa

SEQ ID NO: 3209371 - RNA, 19 nt, Artificial Sequence
  Description of Artificial Sequence: Synthetic oligonucleotide
aacaaauaugccacagucc

SEQ ID NO: 3209372 - RNA, 19 nt, Artificial Sequence
  Description of Artificial Sequence: Synthetic oligonucleotide
uaacaaauaugccacaguc

SEQ ID NO: 3209373 - RNA, 19 nt, Artificial Sequence
  Description of Artificial Sequence: Synthetic oligonucleotide
ucuguuucccacuccaugg

SEQ ID NO: 3209374 - RNA, 19 nt, Artificial Sequence
  Description of Artificial Sequence: Synthetic oligonucleotide
auuaaaauauagguccuac

SEQ ID NO: 3209375 - RNA, 19 nt, Artificial Sequence
  Description of Artificial Sequence: Synthetic oligonucleotide
aagucuaucaaagcucugg

SEQ ID NO: 3209376 - RNA, 19 nt, Artificial Sequence
  Description of Artificial Sequence: Synthetic oligonucleotide
cagacggucauauagggcc

SEQ ID NO: 3209377 - RNA, 19 nt, Artificial Sequence
  Description of Artificial Sequence: Synthetic oligonucleotide
cuuaaaacucaguucagac

SEQ ID NO: 3209378 - RNA, 19 nt, Artificial Sequence
  Description of Artificial Sequence: Synthetic oligonucleotide
aauaguuucaugccagaaa

SEQ ID NO: 3209379 - RNA, 19 nt, Artificial Sequence
  Description of Artificial Sequence: Synthetic oligonucleotide
  modified_base (9)..(9): a, c, u, g, unknown or other
ucuucaaanaggggaaugg

SEQ ID NO: 3209380 - RNA, 19 nt, Artificial Sequence
  Description of Artificial Sequence: Synthetic oligonucleotide
cuuguacugacaaaggcug

SEQ ID NO: 3209381 - RNA, 19 nt, Artificial Sequence
  Description of Artificial Sequence: Synthetic oligonucleotide
uaagcgaccaucagcaaug

SEQ ID NO: 3209382 - RNA, 19 nt, Artificial Sequence
  Description of Artificial Sequence: Synthetic oligonucleotide
uuaaaauauagguccuacc

SEQ ID NO: 3209383 - RNA, 19 nt, Artificial Sequence
  Description of Artificial Sequence: Synthetic oligonucleotide
aucgugagaacugugggcc

SEQ ID NO: 3209384 - RNA, 19 nt, Artificial Sequence
  Description of Artificial Sequence: Synthetic oligonucleotide
ucuugaucgaucuucugug

SEQ ID NO: 3209385 - RNA, 19 nt, Artificial Sequence
  Description of Artificial Sequence: Synthetic oligonucleotide
acgaauggcaugcccaugc

SEQ ID NO: 3209386 - RNA, 19 nt, Artificial Sequence
  Description of Artificial Sequence: Synthetic oligonucleotide
gaaucgugagaacuguggg

SEQ ID NO: 3209387 - RNA, 19 nt, Artificial Sequence
  Description of Artificial Sequence: Synthetic oligonucleotide
aguaacauuuuaguacagc

SEQ ID NO: 3209388 - RNA, 19 nt, Artificial Sequence
  Description of Artificial Sequence: Synthetic oligonucleotide
gagacaggaacaucaaacc

SEQ ID NO: 3209389 - RNA, 19 nt, Artificial Sequence
  Description of Artificial Sequence: Synthetic oligonucleotide
uucauucacaccuucugcc

SEQ ID NO: 3209390 - RNA, 19 nt, Artificial Sequence
  Description of Artificial Sequence: Synthetic oligonucleotide
ucuaggggcugcaaaagag

SEQ ID NO: 3209391 - RNA, 19 nt, Artificial Sequence
  Description of Artificial Sequence: Synthetic oligonucleotide
uuuucaauaauggcuaaac

SEQ ID NO: 3209392 - RNA, 19 nt, Artificial Sequence
  Description of Artificial Sequence: Synthetic oligonucleotide
acuacaaucuaaugucuag

SEQ ID NO: 3209393 - RNA, 19 nt, Artificial Sequence
  Description of Artificial Sequence: Synthetic oligonucleotide
uuaaaacucaguucagacu

SEQ ID NO: 3209394 - RNA, 19 nt, Artificial Sequence
  Description of Artificial Sequence: Synthetic oligonucleotide
auauaaaugcagcuggaga

SEQ ID NO: 3209395 - RNA, 19 nt, Artificial Sequence
  Description of Artificial Sequence: Synthetic oligonucleotide
aacccaagugcuuucaagu

SEQ ID NO: 3209396 - RNA, 19 nt, Artificial Sequence
  Description of Artificial Sequence: Synthetic oligonucleotide
uuccaaguggacaugugag

SEQ ID NO: 3209397 - RNA, 19 nt, Artificial Sequence
  Description of Artificial Sequence: Synthetic oligonucleotide
aacaaccaaauacuuagaa

SEQ ID NO: 3209398 - RNA, 19 nt, Artificial Sequence
  Description of Artificial Sequence: Synthetic oligonucleotide
cagauugucacacaggguc

SEQ ID NO: 3209399 - RNA, 19 nt, Artificial Sequence
  Description of Artificial Sequence: Synthetic oligonucleotide
aauauccuccgucucucuc

SEQ ID NO: 3209400 - RNA, 19 nt, Artificial Sequence
  Description of Artificial Sequence: Synthetic oligonucleotide
accaaauacuuagaaaagg

SEQ ID NO: 3209401 - RNA, 19 nt, Artificial Sequence
  Description of Artificial Sequence: Synthetic oligonucleotide
uagagucuaaccauuacau

SEQ ID NO: 3209402 - RNA, 19 nt, Artificial Sequence
  Description of Artificial Sequence: Synthetic oligonucleotide
uggugaacuccucauggcg

SEQ ID NO: 3209403 - RNA, 19 nt, Artificial Sequence
  Description of Artificial Sequence: Synthetic oligonucleotide
acugacagaaacuuccugu

SEQ ID NO: 3209404 - RNA, 19 nt, Artificial Sequence
  Description of Artificial Sequence: Synthetic oligonucleotide
ucgucuuucuuaaaacuca

SEQ ID NO: 3209405 - RNA, 19 nt, Artificial Sequence
  Description of Artificial Sequence: Synthetic oligonucleotide
uugaagaagggacaccgca

SEQ ID NO: 3209406 - RNA, 19 nt, Artificial Sequence
  Description of Artificial Sequence: Synthetic oligonucleotide
aaauaugccacagucccca

SEQ ID NO: 3209407 - RNA, 19 nt, Artificial Sequence
  Description of Artificial Sequence: Synthetic oligonucleotide
acauaaacaaccaaauacu

SEQ ID NO: 3209408 - RNA, 19 nt, Artificial Sequence
  Description of Artificial Sequence: Synthetic oligonucleotide
ugaucgaucuucugugccg

SEQ ID NO: 3209409 - RNA, 19 nt, Artificial Sequence
  Description of Artificial Sequence: Synthetic oligonucleotide
aauggcugaaucgugagaa

SEQ ID NO: 3209410 - RNA, 19 nt, Artificial Sequence
  Description of Artificial Sequence: Synthetic oligonucleotide
auugauucucagcagccag

SEQ ID NO: 3209411 - RNA, 19 nt, Artificial Sequence
  Description of Artificial Sequence: Synthetic oligonucleotide
ugccuauccacugacgucg

SEQ ID NO: 3209412 - RNA, 19 nt, Artificial Sequence
  Description of Artificial Sequence: Synthetic oligonucleotide
ucagcucuuuagcagaucu

SEQ ID NO: 3209413 - RNA, 19 nt, Artificial Sequence
  Description of Artificial Sequence: Synthetic oligonucleotide
ugucuagaauuacaaagaa

SEQ ID NO: 3209414 - RNA, 19 nt, Artificial Sequence
  Description of Artificial Sequence: Synthetic oligonucleotide
uuaauaggacacacaguug

SEQ ID NO: 3209415 - RNA, 19 nt, Artificial Sequence
  Description of Artificial Sequence: Synthetic oligonucleotide
augaccagggaaauagucc

SEQ ID NO: 3209416 - RNA, 19 nt, Artificial Sequence
  Description of Artificial Sequence: Synthetic oligonucleotide
aacuuccuguaacaaagca

SEQ ID NO: 3209417 - RNA, 19 nt, Artificial Sequence
  Description of Artificial Sequence: Synthetic oligonucleotide
uaggacacacaguugaaga

SEQ ID NO: 3209418 - RNA, 19 nt, Artificial Sequence
  Description of Artificial Sequence: Synthetic oligonucleotide
acaaacugaccuuuauuug

SEQ ID NO: 3209419 - RNA, 19 nt, Artificial Sequence
  Description of Artificial Sequence: Synthetic oligonucleotide
agacagacagaccucuagg

SEQ ID NO: 3209420 - RNA, 19 nt, Artificial Sequence
  Description of Artificial Sequence: Synthetic oligonucleotide
aaaacucaguucagacucc

SEQ ID NO: 3209421 - RNA, 19 nt, Artificial Sequence
  Description of Artificial Sequence: Synthetic oligonucleotide
guaccuauuaauaggacac

SEQ ID NO: 3209422 - RNA, 19 nt, Artificial Sequence
  Description of Artificial Sequence: Synthetic oligonucleotide
agcucuuuagcagaucugg

SEQ ID NO: 3209423 - RNA, 19 nt, Artificial Sequence
  Description of Artificial Sequence: Synthetic oligonucleotide
ucagagauuucuuacuaau

SEQ ID NO: 3209424 - RNA, 19 nt, Artificial Sequence
  Description of Artificial Sequence: Synthetic oligonucleotide
agauacccaacaaagaaug

SEQ ID NO: 3209425 - RNA, 19 nt, Artificial Sequence
  Description of Artificial Sequence: Synthetic oligonucleotide
ucucaguugucugagcuag

SEQ ID NO: 3209426 - RNA, 19 nt, Artificial Sequence
  Description of Artificial Sequence: Synthetic oligonucleotide
gaaucagugucaauggcug

SEQ ID NO: 3209427 - RNA, 19 nt, Artificial Sequence
  Description of Artificial Sequence: Synthetic oligonucleotide
augaugcuuaaauauaaau

SEQ ID NO: 3209428 - RNA, 19 nt, Artificial Sequence
  Description of Artificial Sequence: Synthetic oligonucleotide
agagucuaaccauuacauc

SEQ ID NO: 3209429 - RNA, 19 nt, Artificial Sequence
  Description of Artificial Sequence: Synthetic oligonucleotide
uacaaucuaaugucuagaa

SEQ ID NO: 3209430 - RNA, 19 nt, Artificial Sequence
  Description of Artificial Sequence: Synthetic oligonucleotide
aggaucaagucuuuugugu

SEQ ID NO: 3209431 - RNA, 19 nt, Artificial Sequence
  Description of Artificial Sequence: Synthetic oligonucleotide
ccaaauacuuagaaaaggc

SEQ ID NO: 3209432 - RNA, 19 nt, Artificial Sequence
  Description of Artificial Sequence: Synthetic oligonucleotide
guuaggguuacccugccac

SEQ ID NO: 3209433 - RNA, 19 nt, Artificial Sequence
  Description of Artificial Sequence: Synthetic oligonucleotide
uugaucgaucuucugugcc

SEQ ID NO: 3209434 - RNA, 19 nt, Artificial Sequence
  Description of Artificial Sequence: Synthetic oligonucleotide
cuaucaaagcucugguccc

SEQ ID NO: 3209435 - RNA, 19 nt, Artificial Sequence
  Description of Artificial Sequence: Synthetic oligonucleotide
acacacagaacccaauaca

SEQ ID NO: 3209436 - RNA, 19 nt, Artificial Sequence
  Description of Artificial Sequence: Synthetic oligonucleotide
agagccagccagcuguccc

SEQ ID NO: 3209437 - RNA, 19 nt, Artificial Sequence
  Description of Artificial Sequence: Synthetic oligonucleotide
aaaagguguccagagcgag

SEQ ID NO: 3209438 - RNA, 19 nt, Artificial Sequence
  Description of Artificial Sequence: Synthetic oligonucleotide
ucagacuccaccucugcca

SEQ ID NO: 3209439 - RNA, 19 nt, Artificial Sequence
  Description of Artificial Sequence: Synthetic oligonucleotide
uuaagcgaccaucagcaau

SEQ ID NO: 3209440 - RNA, 19 nt, Artificial Sequence
  Description of Artificial Sequence: Synthetic oligonucleotide
aacaaggggccagggaggc

SEQ ID NO: 3209441 - RNA, 19 nt, Artificial Sequence
  Description of Artificial Sequence: Synthetic oligonucleotide
aacccaauacaguaccuau

SEQ ID NO: 3209442 - RNA, 19 nt, Artificial Sequence
  Description of Artificial Sequence: Synthetic oligonucleotide
ucaauggcugaaucgugag

SEQ ID NO: 3209443 - RNA, 19 nt, Artificial Sequence
  Description of Artificial Sequence: Synthetic oligonucleotide
  modified_base (4)..(4): a, c, u, g, unknown or other
aaanaggggaauggaguca

SEQ ID NO: 3209444 - RNA, 19 nt, Artificial Sequence
  Description of Artificial Sequence: Synthetic oligonucleotide
uaggggcugcaaaagagcc

SEQ ID NO: 3209445 - RNA, 19 nt, Artificial Sequence
  Description of Artificial Sequence: Synthetic oligonucleotide
aaccgccuagauuuucuuc

SEQ ID NO: 3209446 - RNA, 19 nt, Artificial Sequence
  Description of Artificial Sequence: Synthetic oligonucleotide
gauguagaagcugucacca

SEQ ID NO: 3209447 - RNA, 19 nt, Artificial Sequence
  Description of Artificial Sequence: Synthetic oligonucleotide
ugucagauccauaccugcc

SEQ ID NO: 3209448 - RNA, 19 nt, Artificial Sequence
  Description of Artificial Sequence: Synthetic oligonucleotide
gcuacgaagggcuucagcc

SEQ ID NO: 3209449 - RNA, 19 nt, Artificial Sequence
  Description of Artificial Sequence: Synthetic oligonucleotide
ugugaucuccuuuauugaa

SEQ ID NO: 3209450 - RNA, 19 nt, Artificial Sequence
  Description of Artificial Sequence: Synthetic oligonucleotide
guguuuauguuuccuucgg

SEQ ID NO: 3209451 - RNA, 19 nt, Artificial Sequence
  Description of Artificial Sequence: Synthetic oligonucleotide
ucguugacccuuaagcgac

SEQ ID NO: 3209452 - RNA, 19 nt, Artificial Sequence
  Description of Artificial Sequence: Synthetic oligonucleotide
ugggaaucugcccacgcug

SEQ ID NO: 3209453 - RNA, 19 nt, Artificial Sequence
  Description of Artificial Sequence: Synthetic oligonucleotide
gacacacagaacccaauac

SEQ ID NO: 3209454 - RNA, 19 nt, Artificial Sequence
  Description of Artificial Sequence: Synthetic oligonucleotide
acuugugauuagcaagguc

SEQ ID NO: 3209455 - RNA, 19 nt, Artificial Sequence
  Description of Artificial Sequence: Synthetic oligonucleotide
aauaauggcuaaacuacaa

SEQ ID NO: 3209456 - RNA, 19 nt, Artificial Sequence
  Description of Artificial Sequence: Synthetic oligonucleotide
aaugcuuccuuuguccacu

SEQ ID NO: 3209457 - RNA, 19 nt, Artificial Sequence
  Description of Artificial Sequence: Synthetic oligonucleotide
cacaucauugauucucagc

SEQ ID NO: 3209458 - RNA, 19 nt, Artificial Sequence
  Description of Artificial Sequence: Synthetic oligonucleotide
aaagcagguacucaguggc

SEQ ID NO: 3209459 - RNA, 19 nt, Artificial Sequence
  Description of Artificial Sequence: Synthetic oligonucleotide
aaggcaaaguuuuggaggc

SEQ ID NO: 3209460 - RNA, 19 nt, Artificial Sequence
  Description of Artificial Sequence: Synthetic oligonucleotide
uaaggcaaaguuuuggagg

SEQ ID NO: 3209461 - RNA, 19 nt, Artificial Sequence
  Description of Artificial Sequence: Synthetic oligonucleotide
ucugaugucaucgaugucu

SEQ ID NO: 3209462 - RNA, 19 nt, Artificial Sequence
  Description of Artificial Sequence: Synthetic oligonucleotide
uuuuggaggcuccucauug

SEQ ID NO: 3209463 - RNA, 19 nt, Artificial Sequence
  Description of Artificial Sequence: Synthetic oligonucleotide
uccagcaggggaaagcagg

SEQ ID NO: 3209464 - RNA, 19 nt, Artificial Sequence
  Description of Artificial Sequence: Synthetic oligonucleotide
aaucccugggccccagugc

SEQ ID NO: 3209465 - RNA, 19 nt, Artificial Sequence
  Description of Artificial Sequence: Synthetic oligonucleotide
gaaagcagguacucagugg

SEQ ID NO: 3209466 - RNA, 19 nt, Artificial Sequence
  Description of Artificial Sequence: Synthetic oligonucleotide
agcaggggaaagcagguac

SEQ ID NO: 3209467 - RNA, 19 nt, Artificial Sequence
  Description of Artificial Sequence: Synthetic oligonucleotide
aaguuuuggaggcuccuca

SEQ ID NO: 3209468 - RNA, 19 nt, Artificial Sequence
  Description of Artificial Sequence: Synthetic oligonucleotide
agaaggaggagguaaggca

SEQ ID NO: 3209469 - RNA, 19 nt, Artificial Sequence
  Description of Artificial Sequence: Synthetic oligonucleotide
augucaucgaugucugugg

SEQ ID NO: 3209470 - RNA, 19 nt, Artificial Sequence
  Description of Artificial Sequence: Synthetic oligonucleotide
uccccuucuguccagcagg

SEQ ID NO: 3209471 - RNA, 19 nt, Artificial Sequence
  Description of Artificial Sequence: Synthetic oligonucleotide
guaaggcaaaguuuuggag

SEQ ID NO: 3209472 - RNA, 19 nt, Artificial Sequence
  Description of Artificial Sequence: Synthetic oligonucleotide
gaugucaucgaugucugug

SEQ ID NO: 3209473 - RNA, 19 nt, Artificial Sequence
  Description of Artificial Sequence: Synthetic oligonucleotide
cuuggcucugaugucaucg

SEQ ID NO: 3209474 - RNA, 19 nt, Artificial Sequence
  Description of Artificial Sequence: Synthetic oligonucleotide
guaggugaaucccugggcc

SEQ ID NO: 3209475 - RNA, 19 nt, Artificial Sequence
  Description of Artificial Sequence: Synthetic oligonucleotide
aaaguuuuggaggcuccuc

SEQ ID NO: 3209476 - RNA, 19 nt, Artificial Sequence
  Description of Artificial Sequence: Synthetic oligonucleotide
ugucaucgaugucuguggg

SEQ ID NO: 3209477 - RNA, 19 nt, Artificial Sequence
  Description of Artificial Sequence: Synthetic oligonucleotide
cuccucauuguucuguggg

SEQ ID NO: 3209478 - RNA, 19 nt, Artificial Sequence
  Description of Artificial Sequence: Synthetic oligonucleotide
uacucaguggcagaaggag

SEQ ID NO: 3209479 - RNA, 19 nt, Artificial Sequence
  Description of Artificial Sequence: Synthetic oligonucleotide
uggguccugguccaguagg

SEQ ID NO: 3209480 - RNA, 19 nt, Artificial Sequence
  Description of Artificial Sequence: Synthetic oligonucleotide
aucccugggccccagugcc

SEQ ID NO: 3209481 - RNA, 19 nt, Artificial Sequence
  Description of Artificial Sequence: Synthetic oligonucleotide
gguacucaguggcagaagg

SEQ ID NO: 3209482 - RNA, 19 nt, Artificial Sequence
  Description of Artificial Sequence: Synthetic oligonucleotide
ugguccaguaggcauggcc

SEQ ID NO: 3209483 - RNA, 19 nt, Artificial Sequence
  Description of Artificial Sequence: Synthetic oligonucleotide
agguaaggcaaaguuuugg

SEQ ID NO: 3209484 - RNA, 19 nt, Artificial Sequence
  Description of Artificial Sequence: Synthetic oligonucleotide
ucaucgaugucuguggguc

SEQ ID NO: 3209485 - RNA, 19 nt, Artificial Sequence
  Description of Artificial Sequence: Synthetic oligonucleotide
uucugugggcugcugucgg

SEQ ID NO: 3209486 - RNA, 19 nt, Artificial Sequence
  Description of Artificial Sequence: Synthetic oligonucleotide
augucuguggguccccuuc

SEQ ID NO: 3209487 - RNA, 19 nt, Artificial Sequence
  Description of Artificial Sequence: Synthetic oligonucleotide
uguggguccccuucugucc

SEQ ID NO: 3209488 - RNA, 19 nt, Artificial Sequence
  Description of Artificial Sequence: Synthetic oligonucleotide
aguaggcauggccuugggg

SEQ ID NO: 3209489 - RNA, 19 nt, Artificial Sequence
  Description of Artificial Sequence: Synthetic oligonucleotide
cucaucuuggcucugaugu

SEQ ID NO: 3209490 - RNA, 19 nt, Artificial Sequence
  Description of Artificial Sequence: Synthetic oligonucleotide
aggcagagcugcuuggguc

SEQ ID NO: 3209491 - RNA, 19 nt, Artificial Sequence
  Description of Artificial Sequence: Synthetic oligonucleotide
aucgaugucuguggguccc

SEQ ID NO: 3209492 - RNA, 19 nt, Artificial Sequence
  Description of Artificial Sequence: Synthetic oligonucleotide
uccucauuguucugugggc

SEQ ID NO: 3209493 - RNA, 19 nt, Artificial Sequence
  Description of Artificial Sequence: Synthetic oligonucleotide
uaggugaaucccugggccc

SEQ ID NO: 3209494 - RNA, 19 nt, Artificial Sequence
  Description of Artificial Sequence: Synthetic oligonucleotide
uccugguccaguaggcaug

SEQ ID NO: 3209495 - RNA, 19 nt, Artificial Sequence
  Description of Artificial Sequence: Synthetic oligonucleotide
cugaugucaucgaugucug

SEQ ID NO: 3209496 - RNA, 19 nt, Artificial Sequence
  Description of Artificial Sequence: Synthetic oligonucleotide
gcugcuuggguccuggucc

SEQ ID NO: 3209497 - RNA, 19 nt, Artificial Sequence
  Description of Artificial Sequence: Synthetic oligonucleotide
aggugaaucccugggcccc

SEQ ID NO: 3209498 - RNA, 19 nt, Artificial Sequence
  Description of Artificial Sequence: Synthetic oligonucleotide
ggggaaagcagguacucag

SEQ ID NO: 3209499 - RNA, 19 nt, Artificial Sequence
  Description of Artificial Sequence: Synthetic oligonucleotide
uuggcccagcucaucuugg

SEQ ID NO: 3209500 - RNA, 19 nt, Artificial Sequence
  Description of Artificial Sequence: Synthetic oligonucleotide
uguccagcaggggaaagca

SEQ ID NO: 3209501 - RNA, 19 nt, Artificial Sequence
  Description of Artificial Sequence: Synthetic oligonucleotide
cucaguggcagaaggagga

SEQ ID NO: 3209502 - RNA, 19 nt, Artificial Sequence
  Description of Artificial Sequence: Synthetic oligonucleotide
uuuggaggcuccucauugu

SEQ ID NO: 3209503 - RNA, 19 nt, Artificial Sequence
  Description of Artificial Sequence: Synthetic oligonucleotide
uguucugugggcugcuguc

SEQ ID NO: 3209504 - RNA, 19 nt, Artificial Sequence
  Description of Artificial Sequence: Synthetic oligonucleotide
ucauuguucugugggcugc

SEQ ID NO: 3209505 - RNA, 19 nt, Artificial Sequence
  Description of Artificial Sequence: Synthetic oligonucleotide
gaaucccugggccccagug

SEQ ID NO: 3209506 - RNA, 19 nt, Artificial Sequence
  Description of Artificial Sequence: Synthetic oligonucleotide
ggaaagcagguacucagug

SEQ ID NO: 3209507 - RNA, 19 nt, Artificial Sequence
  Description of Artificial Sequence: Synthetic oligonucleotide
agcugcuuggguccugguc

SEQ ID NO: 3209508 - RNA, 19 nt, Artificial Sequence
  Description of Artificial Sequence: Synthetic oligonucleotide
ugggcugcugucgggaggg

SEQ ID NO: 3209509 - RNA, 19 nt, Artificial Sequence
  Description of Artificial Sequence: Synthetic oligonucleotide
gaaggaggagguaaggcaa

SEQ ID NO: 3209510 - RNA, 19 nt, Artificial Sequence
  Description of Artificial Sequence: Synthetic oligonucleotide
gguaaggcaaaguuuugga

SEQ ID NO: 3209511 - RNA, 19 nt, Artificial Sequence
  Description of Artificial Sequence: Synthetic oligonucleotide
cagaaggaggagguaaggc

SEQ ID NO: 3209512 - RNA, 19 nt, Artificial Sequence
  Description of Artificial Sequence: Synthetic oligonucleotide
aggguaggugaaucccugg

SEQ ID NO: 3209513 - RNA, 19 nt, Artificial Sequence
  Description of Artificial Sequence: Synthetic oligonucleotide
uuguucugugggcugcugu

SEQ ID NO: 3209514 - RNA, 19 nt, Artificial Sequence
  Description of Artificial Sequence: Synthetic oligonucleotide
guuggcccagcucaucuug

SEQ ID NO: 3209515 - RNA, 19 nt, Artificial Sequence
  Description of Artificial Sequence: Synthetic oligonucleotide
cucauuguucugugggcug

SEQ ID NO: 3209516 - RNA, 19 nt, Artificial Sequence
  Description of Artificial Sequence: Synthetic oligonucleotide
ugccaggcagagcugcuug

SEQ ID NO: 3209517 - RNA, 19 nt, Artificial Sequence
  Description of Artificial Sequence: Synthetic oligonucleotide
acucaguggcagaaggagg

SEQ ID NO: 3209518 - RNA, 19 nt, Artificial Sequence
  Description of Artificial Sequence: Synthetic oligonucleotide
agcagguacucaguggcag

SEQ ID NO: 3209519 - RNA, 19 nt, Artificial Sequence
  Description of Artificial Sequence: Synthetic oligonucleotide
ucuguggguccccuucugu

SEQ ID NO: 3209520 - RNA, 19 nt, Artificial Sequence
  Description of Artificial Sequence: Synthetic oligonucleotide
ucugugggcugcugucggg

SEQ ID NO: 3209521 - RNA, 19 nt, Artificial Sequence
  Description of Artificial Sequence: Synthetic oligonucleotide
uuggcucugaugucaucga

SEQ ID NO: 3209522 - RNA, 19 nt, Artificial Sequence
  Description of Artificial Sequence: Synthetic oligonucleotide
gguaggugaaucccugggc

SEQ ID NO: 3209523 - RNA, 19 nt, Artificial Sequence
  Description of Artificial Sequence: Synthetic oligonucleotide
uuggguccugguccaguag

SEQ ID NO: 3209524 - RNA, 19 nt, Artificial Sequence
  Description of Artificial Sequence: Synthetic oligonucleotide
ggguaggugaaucccuggg

SEQ ID NO: 3209525 - RNA, 19 nt, Artificial Sequence
  Description of Artificial Sequence: Synthetic oligonucleotide
aguggcagaaggaggaggu

SEQ ID NO: 3209526 - RNA, 19 nt, Artificial Sequence
  Description of Artificial Sequence: Synthetic oligonucleotide
aguuuuggaggcuccucau

SEQ ID NO: 3209527 - RNA, 19 nt, Artificial Sequence
  Description of Artificial Sequence: Synthetic oligonucleotide
ugucuguggguccccuucu

SEQ ID NO: 3209528 - RNA, 19 nt, Artificial Sequence
  Description of Artificial Sequence: Synthetic oligonucleotide
uggcagaaggaggagguaa

SEQ ID NO: 3209529 - RNA, 19 nt, Artificial Sequence
  Description of Artificial Sequence: Synthetic oligonucleotide
gaggagguaaggcaaaguu

SEQ ID NO: 3209530 - RNA, 19 nt, Artificial Sequence
  Description of Artificial Sequence: Synthetic oligonucleotide
uggaggcuccucauuguuc

SEQ ID NO: 3209531 - RNA, 19 nt, Artificial Sequence
  Description of Artificial Sequence: Synthetic oligonucleotide
guucugugggcugcugucg

SEQ ID NO: 3209532 - RNA, 19 nt, Artificial Sequence
  Description of Artificial Sequence: Synthetic oligonucleotide
ucaucuuggcucugauguc

SEQ ID NO: 3209533 - RNA, 19 nt, Artificial Sequence
  Description of Artificial Sequence: Synthetic oligonucleotide
caucgaugucugugggucc

SEQ ID NO: 3209534 - RNA, 19 nt, Artificial Sequence
  Description of Artificial Sequence: Synthetic oligonucleotide
gaggguaggugaaucccug

SEQ ID NO: 3209535 - RNA, 19 nt, Artificial Sequence
  Description of Artificial Sequence: Synthetic oligonucleotide
ugugggcugcugucgggag

SEQ ID NO: 3209536 - RNA, 19 nt, Artificial Sequence
  Description of Artificial Sequence: Synthetic oligonucleotide
ggcagagcugcuugggucc

SEQ ID NO: 3209537 - RNA, 19 nt, Artificial Sequence
  Description of Artificial Sequence: Synthetic oligonucleotide
ucaguggcagaaggaggag

SEQ ID NO: 3209538 - RNA, 19 nt, Artificial Sequence
  Description of Artificial Sequence: Synthetic oligonucleotide
ucaaccuggguuggcccag

SEQ ID NO: 3209539 - RNA, 19 nt, Artificial Sequence
  Description of Artificial Sequence: Synthetic oligonucleotide
gagguaaggcaaaguuuug

SEQ ID NO: 3209540 - RNA, 19 nt, Artificial Sequence
  Description of Artificial Sequence: Synthetic oligonucleotide
uuggaggcuccucauuguu

SEQ ID NO: 3209541 - RNA, 19 nt, Artificial Sequence
  Description of Artificial Sequence: Synthetic oligonucleotide
agagcugcuuggguccugg

SEQ ID NO: 3209542 - RNA, 19 nt, Artificial Sequence
  Description of Artificial Sequence: Synthetic oligonucleotide
caguggcagaaggaggagg

SEQ ID NO: 3209543 - RNA, 19 nt, Artificial Sequence
  Description of Artificial Sequence: Synthetic oligonucleotide
cuucuguccagcaggggaa

SEQ ID NO: 3209544 - RNA, 19 nt, Artificial Sequence
  Description of Artificial Sequence: Synthetic oligonucleotide
cuguggguccccuucuguc

SEQ ID NO: 3209545 - RNA, 19 nt, Artificial Sequence
  Description of Artificial Sequence: Synthetic oligonucleotide
uccaguaggcauggccuug

SEQ ID NO: 3209546 - RNA, 19 nt, Artificial Sequence
  Description of Artificial Sequence: Synthetic oligonucleotide
ugucgggaggguaggugaa

SEQ ID NO: 3209547 - RNA, 19 nt, Artificial Sequence
  Description of Artificial Sequence: Synthetic oligonucleotide
cuguccagcaggggaaagc

SEQ ID NO: 3209548 - RNA, 19 nt, Artificial Sequence
  Description of Artificial Sequence: Synthetic oligonucleotide
caucuuggcucugauguca

SEQ ID NO: 3209549 - RNA, 19 nt, Artificial Sequence
  Description of Artificial Sequence: Synthetic oligonucleotide
cugucgggaggguagguga

SEQ ID NO: 3209550 - RNA, 19 nt, Artificial Sequence
  Description of Artificial Sequence: Synthetic oligonucleotide
accuggguuggcccagcuc

SEQ ID NO: 3209551 - RNA, 19 nt, Artificial Sequence
  Description of Artificial Sequence: Synthetic oligonucleotide
aggagguaaggcaaaguuu

SEQ ID NO: 3209552 - RNA, 19 nt, Artificial Sequence
  Description of Artificial Sequence: Synthetic oligonucleotide
aggaggagguaaggcaaag

SEQ ID NO: 3209553 - RNA, 19 nt, Artificial Sequence
  Description of Artificial Sequence: Synthetic oligonucleotide
ucuguccagcaggggaaag

SEQ ID NO: 3209554 - RNA, 19 nt, Artificial Sequence
  Description of Artificial Sequence: Synthetic oligonucleotide
uggcccagcucaucuuggc

SEQ ID NO: 3209555 - RNA, 19 nt, Artificial Sequence
  Description of Artificial Sequence: Synthetic oligonucleotide
uggcucugaugucaucgau

SEQ ID NO: 3209556 - RNA, 19 nt, Artificial Sequence
  Description of Artificial Sequence: Synthetic oligonucleotide
gugggcugcugucgggagg

SEQ ID NO: 3209557 - RNA, 19 nt, Artificial Sequence
  Description of Artificial Sequence: Synthetic oligonucleotide
ugaugucaucgaugucugu

SEQ ID NO: 3209558 - RNA, 19 nt, Artificial Sequence
  Description of Artificial Sequence: Synthetic oligonucleotide
aauagcucagcuuaggagc

SEQ ID NO: 3209559 - RNA, 19 nt, Artificial Sequence
  Description of Artificial Sequence: Synthetic oligonucleotide
aaugaaauagcucagcuua

SEQ ID NO: 3209560 - RNA, 19 nt, Artificial Sequence
  Description of Artificial Sequence: Synthetic oligonucleotide
uucaccagcaggaagaagg

SEQ ID NO: 3209561 - RNA, 19 nt, Artificial Sequence
  Description of Artificial Sequence: Synthetic oligonucleotide
aaauagcucagcuuaggag

SEQ ID NO: 3209562 - RNA, 19 nt, Artificial Sequence
  Description of Artificial Sequence: Synthetic oligonucleotide
ugagccaguacccagagga

SEQ ID NO: 3209563 - RNA, 19 nt, Artificial Sequence
  Description of Artificial Sequence: Synthetic oligonucleotide
ucgggaaugaaauagcuca

SEQ ID NO: 3209564 - RNA, 19 nt, Artificial Sequence
  Description of Artificial Sequence: Synthetic oligonucleotide
gaagccaaagguuucuugg

SEQ ID NO: 3209565 - RNA, 19 nt, Artificial Sequence
  Description of Artificial Sequence: Synthetic oligonucleotide
agaaagcuugaccagaauc

SEQ ID NO: 3209566 - RNA, 19 nt, Artificial Sequence
  Description of Artificial Sequence: Synthetic oligonucleotide
gaugaucuugaccaacucg

SEQ ID NO: 3209567 - RNA, 19 nt, Artificial Sequence
  Description of Artificial Sequence: Synthetic oligonucleotide
gaggaauccgucuucaucc

SEQ ID NO: 3209568 - RNA, 19 nt, Artificial Sequence
  Description of Artificial Sequence: Synthetic oligonucleotide
aaagcuugaccagaauccc

SEQ ID NO: 3209569 - RNA, 19 nt, Artificial Sequence
  Description of Artificial Sequence: Synthetic oligonucleotide
uagaugucagcgaugggcg

SEQ ID NO: 3209570 - RNA, 19 nt, Artificial Sequence
  Description of Artificial Sequence: Synthetic oligonucleotide
augaucuugaccaacucgc

SEQ ID NO: 3209571 - RNA, 19 nt, Artificial Sequence
  Description of Artificial Sequence: Synthetic oligonucleotide
gaaagcuugaccagaaucc

SEQ ID NO: 3209572 - RNA, 19 nt, Artificial Sequence
  Description of Artificial Sequence: Synthetic oligonucleotide
ucuugggaggcauagacca

SEQ ID NO: 3209573 - RNA, 19 nt, Artificial Sequence
  Description of Artificial Sequence: Synthetic oligonucleotide
agaauccccaaccaucccc

SEQ ID NO: 3209574 - RNA, 19 nt, Artificial Sequence
  Description of Artificial Sequence: Synthetic oligonucleotide
uugaccagaauccccaacc

SEQ ID NO: 3209575 - RNA, 19 nt, Artificial Sequence
  Description of Artificial Sequence: Synthetic oligonucleotide
ugacucagaagccaaaggu

SEQ ID NO: 3209576 - RNA, 19 nt, Artificial Sequence
  Description of Artificial Sequence: Synthetic oligonucleotide
agggaguucacaucucugc

SEQ ID NO: 3209577 - RNA, 19 nt, Artificial Sequence
  Description of Artificial Sequence: Synthetic oligonucleotide
acuggcaggaccuacacca

SEQ ID NO: 3209578 - RNA, 19 nt, Artificial Sequence
  Description of Artificial Sequence: Synthetic oligonucleotide
uuucuugggaggcauagac

SEQ ID NO: 3209579 - RNA, 19 nt, Artificial Sequence
  Description of Artificial Sequence: Synthetic oligonucleotide
aagccaaagguuucuuggg

SEQ ID NO: 3209580 - RNA, 19 nt, Artificial Sequence
  Description of Artificial Sequence: Synthetic oligonucleotide
uccgucuucauccuucucc

SEQ ID NO: 3209581 - RNA, 19 nt, Artificial Sequence
  Description of Artificial Sequence: Synthetic oligonucleotide
agaggaauccgucuucauc

SEQ ID NO: 3209582 - RNA, 19 nt, Artificial Sequence
  Description of Artificial Sequence: Synthetic oligonucleotide
agaggagcaacccuaacgu

SEQ ID NO: 3209583 - RNA, 19 nt, Artificial Sequence
  Description of Artificial Sequence: Synthetic oligonucleotide
uucauccuucuccuguucg

SEQ ID NO: 3209584 - RNA, 19 nt, Artificial Sequence
  Description of Artificial Sequence: Synthetic oligonucleotide
acccacucccaacugagcc

SEQ ID NO: 3209585 - RNA, 19 nt, Artificial Sequence
  Description of Artificial Sequence: Synthetic oligonucleotide
acagcaggggugcuguucc

SEQ ID NO: 3209586 - RNA, 19 nt, Artificial Sequence
  Description of Artificial Sequence: Synthetic oligonucleotide
uugaccaacucgcucaugu

SEQ ID NO: 3209587 - RNA, 19 nt, Artificial Sequence
  Description of Artificial Sequence: Synthetic oligonucleotide
guagaugucagcgaugggc

SEQ ID NO: 3209588 - RNA, 19 nt, Artificial Sequence
  Description of Artificial Sequence: Synthetic oligonucleotide
ucguagaugucagcgaugg

SEQ ID NO: 3209589 - RNA, 19 nt, Artificial Sequence
  Description of Artificial Sequence: Synthetic oligonucleotide
ugguucaccagcaggaaga

SEQ ID NO: 3209590 - RNA, 19 nt, Artificial Sequence
  Description of Artificial Sequence: Synthetic oligonucleotide
uacaccagagcaugguagg

SEQ ID NO: 3209591 - RNA, 19 nt, Artificial Sequence
  Description of Artificial Sequence: Synthetic oligonucleotide
aggaagaaggccugcgugg

SEQ ID NO: 3209592 - RNA, 19 nt, Artificial Sequence
  Description of Artificial Sequence: Synthetic oligonucleotide
ucacaucucugccuaaccc

SEQ ID NO: 3209593 - RNA, 19 nt, Artificial Sequence
  Description of Artificial Sequence: Synthetic oligonucleotide
ugaaauagcucagcuuagg

SEQ ID NO: 3209594 - RNA, 19 nt, Artificial Sequence
  Description of Artificial Sequence: Synthetic oligonucleotide
cagcuuaggagccaggacc

SEQ ID NO: 3209595 - RNA, 19 nt, Artificial Sequence
  Description of Artificial Sequence: Synthetic oligonucleotide
aucuugaccaacucgcuca

SEQ ID NO: 3209596 - RNA, 19 nt, Artificial Sequence
  Description of Artificial Sequence: Synthetic oligonucleotide
cuccuccugacucagaagc

SEQ ID NO: 3209597 - RNA, 19 nt, Artificial Sequence
  Description of Artificial Sequence: Synthetic oligonucleotide
cagaggagcaacccuaacg

SEQ ID NO: 3209598 - RNA, 19 nt, Artificial Sequence
  Description of Artificial Sequence: Synthetic oligonucleotide
ucccaacugagccaguacc

SEQ ID NO: 3209599 - RNA, 19 nt, Artificial Sequence
  Description of Artificial Sequence: Synthetic oligonucleotide
uaacgugacuggcaggacc

SEQ ID NO: 3209600 - RNA, 19 nt, Artificial Sequence
  Description of Artificial Sequence: Synthetic oligonucleotide
gcauagaccauguagagga

SEQ ID NO: 3209601 - RNA, 19 nt, Artificial Sequence
  Description of Artificial Sequence: Synthetic oligonucleotide
ggaggcauagaccauguag

SEQ ID NO: 3209602 - RNA, 19 nt, Artificial Sequence
  Description of Artificial Sequence: Synthetic oligonucleotide
uucuccuguucguagaugu

SEQ ID NO: 3209603 - RNA, 19 nt, Artificial Sequence
  Description of Artificial Sequence: Synthetic oligonucleotide
ugcugguucaccagcagga

SEQ ID NO: 3209604 - RNA, 19 nt, Artificial Sequence
  Description of Artificial Sequence: Synthetic oligonucleotide
cuacaccagagcaugguag

SEQ ID NO: 3209605 - RNA, 19 nt, Artificial Sequence
  Description of Artificial Sequence: Synthetic oligonucleotide
agcaugguaggcuggcugg

SEQ ID NO: 3209606 - RNA, 19 nt, Artificial Sequence
  Description of Artificial Sequence: Synthetic oligonucleotide
cuguucguagaugucagcg

SEQ ID NO: 3209607 - RNA, 19 nt, Artificial Sequence
  Description of Artificial Sequence: Synthetic oligonucleotide
gaaauagcucagcuuagga

SEQ ID NO: 3209608 - RNA, 19 nt, Artificial Sequence
  Description of Artificial Sequence: Synthetic oligonucleotide
auagcucagcuuaggagcc

SEQ ID NO: 3209609 - RNA, 19 nt, Artificial Sequence
  Description of Artificial Sequence: Synthetic oligonucleotide
agaccauguagaggaaucc

SEQ ID NO: 3209610 - RNA, 19 nt, Artificial Sequence
  Description of Artificial Sequence: Synthetic oligonucleotide
uagaccauguagaggaauc

SEQ ID NO: 3209611 - RNA, 19 nt, Artificial Sequence
  Description of Artificial Sequence: Synthetic oligonucleotide
ucugccuaacccacucggg

SEQ ID NO: 3209612 - RNA, 19 nt, Artificial Sequence
  Description of Artificial Sequence: Synthetic oligonucleotide
uccuguucguagaugucag

SEQ ID NO: 3209613 - RNA, 19 nt, Artificial Sequence
  Description of Artificial Sequence: Synthetic oligonucleotide
uucacaucucugccuaacc

SEQ ID NO: 3209614 - RNA, 19 nt, Artificial Sequence
  Description of Artificial Sequence: Synthetic oligonucleotide
aagcuugaccagaaucccc

SEQ ID NO: 3209615 - RNA, 19 nt, Artificial Sequence
  Description of Artificial Sequence: Synthetic oligonucleotide
uucuugggaggcauagacc

SEQ ID NO: 3209616 - RNA, 19 nt, Artificial Sequence
  Description of Artificial Sequence: Synthetic oligonucleotide
accagaauccccaaccauc

SEQ ID NO: 3209617 - RNA, 19 nt, Artificial Sequence
  Description of Artificial Sequence: Synthetic oligonucleotide
uguucguagaugucagcga

SEQ ID NO: 3209618 - RNA, 19 nt, Artificial Sequence
  Description of Artificial Sequence: Synthetic oligonucleotide
aucucugccuaacccacuc

SEQ ID NO: 3209619 - RNA, 19 nt, Artificial Sequence
  Description of Artificial Sequence: Synthetic oligonucleotide
gaccauguagaggaauccg

SEQ ID NO: 3209620 - RNA, 19 nt, Artificial Sequence
  Description of Artificial Sequence: Synthetic oligonucleotide
gaggcauagaccauguaga

SEQ ID NO: 3209621 - RNA, 19 nt, Artificial Sequence
  Description of Artificial Sequence: Synthetic oligonucleotide
uguagaggaauccgucuuc

SEQ ID NO: 3209622 - RNA, 19 nt, Artificial Sequence
  Description of Artificial Sequence: Synthetic oligonucleotide
cugacucagaagccaaagg

SEQ ID NO: 3209623 - RNA, 19 nt, Artificial Sequence
  Description of Artificial Sequence: Synthetic oligonucleotide
uuaggagccaggaccuccc

SEQ ID NO: 3209624 - RNA, 19 nt, Artificial Sequence
  Description of Artificial Sequence: Synthetic oligonucleotide
ucaccagcaggaagaaggc

SEQ ID NO: 3209625 - RNA, 19 nt, Artificial Sequence
  Description of Artificial Sequence: Synthetic oligonucleotide
aggcauagaccauguagag

SEQ ID NO: 3209626 - RNA, 19 nt, Artificial Sequence
  Description of Artificial Sequence: Synthetic oligonucleotide
ugaccagaauccccaacca

SEQ ID NO: 3209627 - RNA, 19 nt, Artificial Sequence
  Description of Artificial Sequence: Synthetic oligonucleotide
agaagccaaagguuucuug

SEQ ID NO: 3209628 - RNA, 19 nt, Artificial Sequence
  Description of Artificial Sequence: Synthetic oligonucleotide
aauccgucuucauccuucu

SEQ ID NO: 3209629 - RNA, 19 nt, Artificial Sequence
  Description of Artificial Sequence: Synthetic oligonucleotide
cucugccuaacccacucgg

SEQ ID NO: 3209630 - RNA, 19 nt, Artificial Sequence
  Description of Artificial Sequence: Synthetic oligonucleotide
agccaguacccagaggagc

SEQ ID NO: 3209631 - RNA, 19 nt, Artificial Sequence
  Description of Artificial Sequence: Synthetic oligonucleotide
acccuaacgugacuggcag

SEQ ID NO: 3209632 - RNA, 19 nt, Artificial Sequence
  Description of Artificial Sequence: Synthetic oligonucleotide
ucagcuuaggagccaggac

SEQ ID NO: 3209633 - RNA, 19 nt, Artificial Sequence
  Description of Artificial Sequence: Synthetic oligonucleotide
aguacccagaggagcaacc

SEQ ID NO: 3209634 - RNA, 19 nt, Artificial Sequence
  Description of Artificial Sequence: Synthetic oligonucleotide
accagagcaugguaggcug

SEQ ID NO: 3209635 - RNA, 19 nt, Artificial Sequence
  Description of Artificial Sequence: Synthetic oligonucleotide
caaagguuucuugggaggc

SEQ ID NO: 3209636 - RNA, 19 nt, Artificial Sequence
  Description of Artificial Sequence: Synthetic oligonucleotide
ugaucuugaccaacucgcu

SEQ ID NO: 3209637 - RNA, 19 nt, Artificial Sequence
  Description of Artificial Sequence: Synthetic oligonucleotide
gugggguugagcugcaggc

SEQ ID NO: 3209638 - RNA, 19 nt, Artificial Sequence
  Description of Artificial Sequence: Synthetic oligonucleotide
uagggaguucacaucucug

SEQ ID NO: 3209639 - RNA, 19 nt, Artificial Sequence
  Description of Artificial Sequence: Synthetic oligonucleotide
ucucugccuaacccacucg

SEQ ID NO: 3209640 - RNA, 19 nt, Artificial Sequence
  Description of Artificial Sequence: Synthetic oligonucleotide
cacucgggaaugaaauagc

SEQ ID NO: 3209641 - RNA, 19 nt, Artificial Sequence
  Description of Artificial Sequence: Synthetic oligonucleotide
acaucucugccuaacccac

SEQ ID NO: 3209642 - RNA, 19 nt, Artificial Sequence
  Description of Artificial Sequence: Synthetic oligonucleotide
ugugcugguucaccagcag

SEQ ID NO: 3209643 - RNA, 19 nt, Artificial Sequence
  Description of Artificial Sequence: Synthetic oligonucleotide
cuggagaaagcuugaccag

SEQ ID NO: 3209644 - RNA, 19 nt, Artificial Sequence
  Description of Artificial Sequence: Synthetic oligonucleotide
uucguagaugucagcgaug

SEQ ID NO: 3209645 - RNA, 19 nt, Artificial Sequence
  Description of Artificial Sequence: Synthetic oligonucleotide
guggauacgcucaccaugc

SEQ ID NO: 3209646 - RNA, 19 nt, Artificial Sequence
  Description of Artificial Sequence: Synthetic oligonucleotide
aacgugacuggcaggaccu

SEQ ID NO: 3209647 - RNA, 19 nt, Artificial Sequence
  Description of Artificial Sequence: Synthetic oligonucleotide
gaucuugaccaacucgcuc

SEQ ID NO: 3209648 - RNA, 19 nt, Artificial Sequence
  Description of Artificial Sequence: Synthetic oligonucleotide
uggagaaagcuugaccaga

SEQ ID NO: 3209649 - RNA, 19 nt, Artificial Sequence
  Description of Artificial Sequence: Synthetic oligonucleotide
ggagccaggaccucccugg

SEQ ID NO: 3209650 - RNA, 19 nt, Artificial Sequence
  Description of Artificial Sequence: Synthetic oligonucleotide
agcaacccuaacgugacug

SEQ ID NO: 3209651 - RNA, 19 nt, Artificial Sequence
  Description of Artificial Sequence: Synthetic oligonucleotide
aggaccucccuggagaaag

SEQ ID NO: 3209652 - RNA, 19 nt, Artificial Sequence
  Description of Artificial Sequence: Synthetic oligonucleotide
gauacgcucaccaugcugu

SEQ ID NO: 3209653 - RNA, 19 nt, Artificial Sequence
  Description of Artificial Sequence: Synthetic oligonucleotide
acugagccaguacccagag

SEQ ID NO: 3209654 - RNA, 19 nt, Artificial Sequence
  Description of Artificial Sequence: Synthetic oligonucleotide
gagcaugguaggcuggcug

SEQ ID NO: 3209655 - RNA, 19 nt, Artificial Sequence
  Description of Artificial Sequence: Synthetic oligonucleotide
aagaaggccugcguggggu

SEQ ID NO: 3209656 - RNA, 19 nt, Artificial Sequence
  Description of Artificial Sequence: Synthetic oligonucleotide
agggguagggaguucacau

SEQ ID NO: 3209657 - RNA, 19 nt, Artificial Sequence
  Description of Artificial Sequence: Synthetic oligonucleotide
ucagaagccaaagguuucu

SEQ ID NO: 3209658 - RNA, 19 nt, Artificial Sequence
  Description of Artificial Sequence: Synthetic oligonucleotide
aagaugugcacacucaagc

SEQ ID NO: 3209659 - RNA, 19 nt, Artificial Sequence
  Description of Artificial Sequence: Synthetic oligonucleotide
cuacaaacaauucauagcc

SEQ ID NO: 3209660 - RNA, 19 nt, Artificial Sequence
  Description of Artificial Sequence: Synthetic oligonucleotide
gagacaauaguccacagcc

SEQ ID NO: 3209661 - RNA, 19 nt, Artificial Sequence
  Description of Artificial Sequence: Synthetic oligonucleotide
agaauaguccuucacugcc

SEQ ID NO: 3209662 - RNA, 19 nt, Artificial Sequence
  Description of Artificial Sequence: Synthetic oligonucleotide
ucuaauguguacuaaguca

SEQ ID NO: 3209663 - RNA, 19 nt, Artificial Sequence
  Description of Artificial Sequence: Synthetic oligonucleotide
aacaauucauagcccacgc

SEQ ID NO: 3209664 - RNA, 19 nt, Artificial Sequence
  Description of Artificial Sequence: Synthetic oligonucleotide
aaagcuacccguuugguga

SEQ ID NO: 3209665 - RNA, 19 nt, Artificial Sequence
  Description of Artificial Sequence: Synthetic oligonucleotide
gauugaguuuaauaggucc

SEQ ID NO: 3209666 - RNA, 19 nt, Artificial Sequence
  Description of Artificial Sequence: Synthetic oligonucleotide
gaucauuagguacucagag

SEQ ID NO: 3209667 - RNA, 19 nt, Artificial Sequence
  Description of Artificial Sequence: Synthetic oligonucleotide
gucgguuccaaucagaacc

SEQ ID NO: 3209668 - RNA, 19 nt, Artificial Sequence
  Description of Artificial Sequence: Synthetic oligonucleotide
caauucauagcccacgccg

SEQ ID NO: 3209669 - RNA, 19 nt, Artificial Sequence
  Description of Artificial Sequence: Synthetic oligonucleotide
uguauagguccuucaaugg

SEQ ID NO: 3209670 - RNA, 19 nt, Artificial Sequence
  Description of Artificial Sequence: Synthetic oligonucleotide
aggaaggcaagcuagcuuc

SEQ ID NO: 3209671 - RNA, 19 nt, Artificial Sequence
  Description of Artificial Sequence: Synthetic oligonucleotide
ugauagauagagcaggaaa

SEQ ID NO: 3209672 - RNA, 19 nt, Artificial Sequence
  Description of Artificial Sequence: Synthetic oligonucleotide
aaacaauucauagcccacg

SEQ ID NO: 3209673 - RNA, 19 nt, Artificial Sequence
  Description of Artificial Sequence: Synthetic oligonucleotide
acacgugauagauagagca

SEQ ID NO: 3209674 - RNA, 19 nt, Artificial Sequence
  Description of Artificial Sequence: Synthetic oligonucleotide
uacucagagagaaaguaga

SEQ ID NO: 3209675 - RNA, 19 nt, Artificial Sequence
  Description of Artificial Sequence: Synthetic oligonucleotide
uggaucauuagguacucag

SEQ ID NO: 3209676 - RNA, 19 nt, Artificial Sequence
  Description of Artificial Sequence: Synthetic oligonucleotide
uucuuaaacauguuguaaa

SEQ ID NO: 3209677 - RNA, 19 nt, Artificial Sequence
  Description of Artificial Sequence: Synthetic oligonucleotide
ugacccuucacauacuggc

SEQ ID NO: 3209678 - RNA, 19 nt, Artificial Sequence
  Description of Artificial Sequence: Synthetic oligonucleotide
gauagauagagcaggaaac

SEQ ID NO: 3209679 - RNA, 19 nt, Artificial Sequence
  Description of Artificial Sequence: Synthetic oligonucleotide
aauucauagcccacgccgc

SEQ ID NO: 3209680 - RNA, 19 nt, Artificial Sequence
  Description of Artificial Sequence: Synthetic oligonucleotide
cuagcuucaaucucacucc

SEQ ID NO: 3209681 - RNA, 19 nt, Artificial Sequence
  Description of Artificial Sequence: Synthetic oligonucleotide
cuggguauaggcuucaaac

SEQ ID NO: 3209682 - RNA, 19 nt, Artificial Sequence
  Description of Artificial Sequence: Synthetic oligonucleotide
cuucaaacacaucagcagc

SEQ ID NO: 3209683 - RNA, 19 nt, Artificial Sequence
  Description of Artificial Sequence: Synthetic oligonucleotide
uguuaugccuugcuaagca

SEQ ID NO: 3209684 - RNA, 19 nt, Artificial Sequence
  Description of Artificial Sequence: Synthetic oligonucleotide
acaauguugaaaugggaca

SEQ ID NO: 3209685 - RNA, 19 nt, Artificial Sequence
  Description of Artificial Sequence: Synthetic oligonucleotide
uauagguccuucaauggcu

SEQ ID NO: 3209686 - RNA, 19 nt, Artificial Sequence
  Description of Artificial Sequence: Synthetic oligonucleotide
cacaauguugaaaugggac

SEQ ID NO: 3209687 - RNA, 19 nt, Artificial Sequence
  Description of Artificial Sequence: Synthetic oligonucleotide
gacuugagaacauggagac

SEQ ID NO: 3209688 - RNA, 19 nt, Artificial Sequence
  Description of Artificial Sequence: Synthetic oligonucleotide
gagcaggaaaccuacaaac

SEQ ID NO: 3209689 - RNA, 19 nt, Artificial Sequence
  Description of Artificial Sequence: Synthetic oligonucleotide
cuaagcaaguggcaaaagc

SEQ ID NO: 3209690 - RNA, 19 nt, Artificial Sequence
  Description of Artificial Sequence: Synthetic oligonucleotide
ugauguaugggaucaggug

SEQ ID NO: 3209691 - RNA, 19 nt, Artificial Sequence
  Description of Artificial Sequence: Synthetic oligonucleotide
uucaaacacaucagcagca

SEQ ID NO: 3209692 - RNA, 19 nt, Artificial Sequence
  Description of Artificial Sequence: Synthetic oligonucleotide
aguguuaugccuugcuaag

SEQ ID NO: 3209693 - RNA, 19 nt, Artificial Sequence
  Description of Artificial Sequence: Synthetic oligonucleotide
ucauuuauuucaagaugug

SEQ ID NO: 3209694 - RNA, 19 nt, Artificial Sequence
  Description of Artificial Sequence: Synthetic oligonucleotide
aacgguaggcagaauaguc

SEQ ID NO: 3209695 - RNA, 19 nt, Artificial Sequence
  Description of Artificial Sequence: Synthetic oligonucleotide
uuugauuugguaggggagc

SEQ ID NO: 3209696 - RNA, 19 nt, Artificial Sequence
  Description of Artificial Sequence: Synthetic oligonucleotide
aagaacgguaggcagaaua

SEQ ID NO: 3209697 - RNA, 19 nt, Artificial Sequence
  Description of Artificial Sequence: Synthetic oligonucleotide
ugucgucaugcccagagug

SEQ ID NO: 3209698 - RNA, 19 nt, Artificial Sequence
  Description of Artificial Sequence: Synthetic oligonucleotide
aggcaagcuagcuucaauc

SEQ ID NO: 3209699 - RNA, 19 nt, Artificial Sequence
  Description of Artificial Sequence: Synthetic oligonucleotide
uaaagcacggugugaauga

SEQ ID NO: 3209700 - RNA, 19 nt, Artificial Sequence
  Description of Artificial Sequence: Synthetic oligonucleotide
ugggacacaguacuguagc

SEQ ID NO: 3209701 - RNA, 19 nt, Artificial Sequence
  Description of Artificial Sequence: Synthetic oligonucleotide
acacacgugauagauagag

SEQ ID NO: 3209702 - RNA, 19 nt, Artificial Sequence
  Description of Artificial Sequence: Synthetic oligonucleotide
uaggaagcccucugcaucg

SEQ ID NO: 3209703 - RNA, 19 nt, Artificial Sequence
  Description of Artificial Sequence: Synthetic oligonucleotide
agaaagaaugggcucauau

SEQ ID NO: 3209704 - RNA, 19 nt, Artificial Sequence
  Description of Artificial Sequence: Synthetic oligonucleotide
aggagugcagucuugguca

SEQ ID NO: 3209705 - RNA, 19 nt, Artificial Sequence
  Description of Artificial Sequence: Synthetic oligonucleotide
agaugcagcaggugaggcc

SEQ ID NO: 3209706 - RNA, 19 nt, Artificial Sequence
  Description of Artificial Sequence: Synthetic oligonucleotide
aaggagaccauugcacuuc

SEQ ID NO: 3209707 - RNA, 19 nt, Artificial Sequence
  Description of Artificial Sequence: Synthetic oligonucleotide
cauuuauuucaagaugugc

SEQ ID NO: 3209708 - RNA, 19 nt, Artificial Sequence
  Description of Artificial Sequence: Synthetic oligonucleotide
uacuggcggagaaagaaug

SEQ ID NO: 3209709 - RNA, 19 nt, Artificial Sequence
  Description of Artificial Sequence: Synthetic oligonucleotide
uggguauaggcuucaaaca

SEQ ID NO: 3209710 - RNA, 19 nt, Artificial Sequence
  Description of Artificial Sequence: Synthetic oligonucleotide
agcagcaugacccuucaca

SEQ ID NO: 3209711 - RNA, 19 nt, Artificial Sequence
  Description of Artificial Sequence: Synthetic oligonucleotide
uguggggaaaugaaugcac

SEQ ID NO: 3209712 - RNA, 19 nt, Artificial Sequence
  Description of Artificial Sequence: Synthetic oligonucleotide
ugucgugugugguuuaagc

SEQ ID NO: 3209713 - RNA, 19 nt, Artificial Sequence
  Description of Artificial Sequence: Synthetic oligonucleotide
gauguugcucucccggccg

SEQ ID NO: 3209714 - RNA, 19 nt, Artificial Sequence
  Description of Artificial Sequence: Synthetic oligonucleotide
gauggagucgguuccaauc

SEQ ID NO: 3209715 - RNA, 19 nt, Artificial Sequence
  Description of Artificial Sequence: Synthetic oligonucleotide
agcuugaugucauggaugu

SEQ ID NO: 3209716 - RNA, 19 nt, Artificial Sequence
  Description of Artificial Sequence: Synthetic oligonucleotide
ugggcuggaauuuguaccc

SEQ ID NO: 3209717 - RNA, 19 nt, Artificial Sequence
  Description of Artificial Sequence: Synthetic oligonucleotide
uggaauuuguaccccuccc

SEQ ID NO: 3209718 - RNA, 19 nt, Artificial Sequence
  Description of Artificial Sequence: Synthetic oligonucleotide
acugcuccauggcaaagcg

SEQ ID NO: 3209719 - RNA, 19 nt, Artificial Sequence
  Description of Artificial Sequence: Synthetic oligonucleotide
acucuucucggccucuagc

SEQ ID NO: 3209720 - RNA, 19 nt, Artificial Sequence
  Description of Artificial Sequence: Synthetic oligonucleotide
guauagguccuucaauggc

SEQ ID NO: 3209721 - RNA, 19 nt, Artificial Sequence
  Description of Artificial Sequence: Synthetic oligonucleotide
acgugauagauagagcagg

SEQ ID NO: 3209722 - RNA, 19 nt, Artificial Sequence
  Description of Artificial Sequence: Synthetic oligonucleotide
gauagagcaggaaaccuac

SEQ ID NO: 3209723 - RNA, 19 nt, Artificial Sequence
  Description of Artificial Sequence: Synthetic oligonucleotide
guguucaggacguaaagca

SEQ ID NO: 3209724 - RNA, 19 nt, Artificial Sequence
  Description of Artificial Sequence: Synthetic oligonucleotide
uguucaggacguaaagcac

SEQ ID NO: 3209725 - RNA, 19 nt, Artificial Sequence
  Description of Artificial Sequence: Synthetic oligonucleotide
uccuucaauggcuugggcu

SEQ ID NO: 3209726 - RNA, 19 nt, Artificial Sequence
  Description of Artificial Sequence: Synthetic oligonucleotide
uccacuggcaugaacuccu

SEQ ID NO: 3209727 - RNA, 19 nt, Artificial Sequence
  Description of Artificial Sequence: Synthetic oligonucleotide
uagagcaggaaaccuacaa

SEQ ID NO: 3209728 - RNA, 19 nt, Artificial Sequence
  Description of Artificial Sequence: Synthetic oligonucleotide
gucguaaugcacaauguug

SEQ ID NO: 3209729 - RNA, 19 nt, Artificial Sequence
  Description of Artificial Sequence: Synthetic oligonucleotide
accuacaaaccccaaguca

SEQ ID NO: 3209730 - RNA, 19 nt, Artificial Sequence
  Description of Artificial Sequence: Synthetic oligonucleotide
acgguaggcagaauagucc

SEQ ID NO: 3209731 - RNA, 19 nt, Artificial Sequence
  Description of Artificial Sequence: Synthetic oligonucleotide
aaaugccuaagaccuuugu

SEQ ID NO: 3209732 - RNA, 19 nt, Artificial Sequence
  Description of Artificial Sequence: Synthetic oligonucleotide
agaccauugcacuucgugu

SEQ ID NO: 3209733 - RNA, 19 nt, Artificial Sequence
  Description of Artificial Sequence: Synthetic oligonucleotide
cuaaugcagcaucuguggg

SEQ ID NO: 3209734 - RNA, 19 nt, Artificial Sequence
  Description of Artificial Sequence: Synthetic oligonucleotide
cucuucucggccucuagcc

SEQ ID NO: 3209735 - RNA, 19 nt, Artificial Sequence
  Description of Artificial Sequence: Synthetic oligonucleotide
cugauucagggacaugggg

SEQ ID NO: 3209736 - RNA, 19 nt, Artificial Sequence
  Description of Artificial Sequence: Synthetic oligonucleotide
caauguugaaaugggacac

SEQ ID NO: 3209737 - RNA, 19 nt, Artificial Sequence
  Description of Artificial Sequence: Synthetic oligonucleotide
uccuccuggagccacugcc

SEQ ID NO: 3209738 - RNA, 19 nt, Artificial Sequence
  Description of Artificial Sequence: Synthetic oligonucleotide
ucagugagcagcuggguau

SEQ ID NO: 3209739 - RNA, 19 nt, Artificial Sequence
  Description of Artificial Sequence: Synthetic oligonucleotide
uggagguaaguguuaugcc

SEQ ID NO: 3209740 - RNA, 19 nt, Artificial Sequence
  Description of Artificial Sequence: Synthetic oligonucleotide
cagacaggagaccugcugc

SEQ ID NO: 3209741 - RNA, 19 nt, Artificial Sequence
  Description of Artificial Sequence: Synthetic oligonucleotide
guaaagcacggugugaaug

SEQ ID NO: 3209742 - RNA, 19 nt, Artificial Sequence
  Description of Artificial Sequence: Synthetic oligonucleotide
guguaaaugccuaagaccu

SEQ ID NO: 3209743 - RNA, 19 nt, Artificial Sequence
  Description of Artificial Sequence: Synthetic oligonucleotide
agaacgguaggcagaauag

SEQ ID NO: 3209744 - RNA, 19 nt, Artificial Sequence
  Description of Artificial Sequence: Synthetic oligonucleotide
caagaugugcacacucaag

SEQ ID NO: 3209745 - RNA, 19 nt, Artificial Sequence
  Description of Artificial Sequence: Synthetic oligonucleotide
ucuacccacuucuccuugg

SEQ ID NO: 3209746 - RNA, 19 nt, Artificial Sequence
  Description of Artificial Sequence: Synthetic oligonucleotide
auugaguuuaauagguccu

SEQ ID NO: 3209747 - RNA, 19 nt, Artificial Sequence
  Description of Artificial Sequence: Synthetic oligonucleotide
gaaccaggagugaucaaag

SEQ ID NO: 3209748 - RNA, 19 nt, Artificial Sequence
  Description of Artificial Sequence: Synthetic oligonucleotide
auggagucgguuccaauca

SEQ ID NO: 3209749 - RNA, 19 nt, Artificial Sequence
  Description of Artificial Sequence: Synthetic oligonucleotide
cacgugauagauagagcag

SEQ ID NO: 3209750 - RNA, 19 nt, Artificial Sequence
  Description of Artificial Sequence: Synthetic oligonucleotide
agagaaaguagaaccagga

SEQ ID NO: 3209751 - RNA, 19 nt, Artificial Sequence
  Description of Artificial Sequence: Synthetic oligonucleotide
ucggccucuagccaaucug

SEQ ID NO: 3209752 - RNA, 19 nt, Artificial Sequence
  Description of Artificial Sequence: Synthetic oligonucleotide
ugggcucauaucugguggg

SEQ ID NO: 3209753 - RNA, 19 nt, Artificial Sequence
  Description of Artificial Sequence: Synthetic oligonucleotide
uguugcucgaguuguguuc

SEQ ID NO: 3209754 - RNA, 19 nt, Artificial Sequence
  Description of Artificial Sequence: Synthetic oligonucleotide
ccucuagccaaucugacag

SEQ ID NO: 3209755 - RNA, 19 nt, Artificial Sequence
  Description of Artificial Sequence: Synthetic oligonucleotide
aggcagaauaguccuucac

SEQ ID NO: 3209756 - RNA, 19 nt, Artificial Sequence
  Description of Artificial Sequence: Synthetic oligonucleotide
cugcguaggaucuccacac

SEQ ID NO: 3209757 - RNA, 19 nt, Artificial Sequence
  Description of Artificial Sequence: Synthetic oligonucleotide
ucauucugcuggcucuucc

SEQ ID NO: 3209758 - RNA, 19 nt, Artificial Sequence
  Description of Artificial Sequence: Synthetic oligonucleotide
aaguuuugaagacucagcc

SEQ ID NO: 3209759 - RNA, 19 nt, Artificial Sequence
  Description of Artificial Sequence: Synthetic oligonucleotide
aaugcaguagcugaaaacc

SEQ ID NO: 3209760 - RNA, 19 nt, Artificial Sequence
  Description of Artificial Sequence: Synthetic oligonucleotide
uuaaucaaaguuuugaaga

SEQ ID NO: 3209761 - RNA, 19 nt, Artificial Sequence
  Description of Artificial Sequence: Synthetic oligonucleotide
uuaaauucuucauggaugg

SEQ ID NO: 3209762 - RNA, 19 nt, Artificial Sequence
  Description of Artificial Sequence: Synthetic oligonucleotide
acaguuaaauucuucaugg

SEQ ID NO: 3209763 - RNA, 19 nt, Artificial Sequence
  Description of Artificial Sequence: Synthetic oligonucleotide
uguacuuguuguaauaccg

SEQ ID NO: 3209764 - RNA, 19 nt, Artificial Sequence
  Description of Artificial Sequence: Synthetic oligonucleotide
ucaauauccaguuuggcag

SEQ ID NO: 3209765 - RNA, 19 nt, Artificial Sequence
  Description of Artificial Sequence: Synthetic oligonucleotide
aaguuuaaccugcaugagc

SEQ ID NO: 3209766 - RNA, 19 nt, Artificial Sequence
  Description of Artificial Sequence: Synthetic oligonucleotide
auguuaauccccgagaugc

SEQ ID NO: 3209767 - RNA, 19 nt, Artificial Sequence
  Description of Artificial Sequence: Synthetic oligonucleotide
aaaugcaguagcugaaaac

SEQ ID NO: 3209768 - RNA, 19 nt, Artificial Sequence
  Description of Artificial Sequence: Synthetic oligonucleotide
aaaucccgcaucaauaucc

SEQ ID NO: 3209769 - RNA, 19 nt, Artificial Sequence
  Description of Artificial Sequence: Synthetic oligonucleotide
uguaauaccggucguaacc

SEQ ID NO: 3209770 - RNA, 19 nt, Artificial Sequence
  Description of Artificial Sequence: Synthetic oligonucleotide
cuuguuguaauaccggucg

SEQ ID NO: 3209771 - RNA, 19 nt, Artificial Sequence
  Description of Artificial Sequence: Synthetic oligonucleotide
uuuauuggauacuaguucu

SEQ ID NO: 3209772 - RNA, 19 nt, Artificial Sequence
  Description of Artificial Sequence: Synthetic oligonucleotide
aaaguuuugaagacucagc

SEQ ID NO: 3209773 - RNA, 19 nt, Artificial Sequence
  Description of Artificial Sequence: Synthetic oligonucleotide
uaagaaaugcaguagcuga

SEQ ID NO: 3209774 - RNA, 19 nt, Artificial Sequence
  Description of Artificial Sequence: Synthetic oligonucleotide
uuuuauuggauacuaguuc

SEQ ID NO: 3209775 - RNA, 19 nt, Artificial Sequence
  Description of Artificial Sequence: Synthetic oligonucleotide
cuuaaucaaaguuuugaag

SEQ ID NO: 3209776 - RNA, 19 nt, Artificial Sequence
  Description of Artificial Sequence: Synthetic oligonucleotide
aguuccuuguaagaaaugc

SEQ ID NO: 3209777 - RNA, 19 nt, Artificial Sequence
  Description of Artificial Sequence: Synthetic oligonucleotide
cugaaaaccacguaggcug

SEQ ID NO: 3209778 - RNA, 19 nt, Artificial Sequence
  Description of Artificial Sequence: Synthetic oligonucleotide
uuccuuguaagaaaugcag

SEQ ID NO: 3209779 - RNA, 19 nt, Artificial Sequence
  Description of Artificial Sequence: Synthetic oligonucleotide
uacuaguucuuaaucaaag

SEQ ID NO: 3209780 - RNA, 19 nt, Artificial Sequence
  Description of Artificial Sequence: Synthetic oligonucleotide
guagcugaaaaccacguag

SEQ ID NO: 3209781 - RNA, 19 nt, Artificial Sequence
  Description of Artificial Sequence: Synthetic oligonucleotide
uuguaagaaaugcaguagc

SEQ ID NO: 3209782 - RNA, 19 nt, Artificial Sequence
  Description of Artificial Sequence: Synthetic oligonucleotide
gaugcugccuuuccgaacg

SEQ ID NO: 3209783 - RNA, 19 nt, Artificial Sequence
  Description of Artificial Sequence: Synthetic oligonucleotide
uccaaguuuaaccugcaug

SEQ ID NO: 3209784 - RNA, 19 nt, Artificial Sequence
  Description of Artificial Sequence: Synthetic oligonucleotide
guuuugaagacucagccac

SEQ ID NO: 3209785 - RNA, 19 nt, Artificial Sequence
  Description of Artificial Sequence: Synthetic oligonucleotide
auguacuuguuguaauacc

SEQ ID NO: 3209786 - RNA, 19 nt, Artificial Sequence
  Description of Artificial Sequence: Synthetic oligonucleotide
ugugcagugcccuccaugg

SEQ ID NO: 3209787 - RNA, 19 nt, Artificial Sequence
  Description of Artificial Sequence: Synthetic oligonucleotide
guuaaauucuucauggaug

SEQ ID NO: 3209788 - RNA, 19 nt, Artificial Sequence
  Description of Artificial Sequence: Synthetic oligonucleotide
gucguaaccucucugaaag

SEQ ID NO: 3209789 - RNA, 19 nt, Artificial Sequence
  Description of Artificial Sequence: Synthetic oligonucleotide
ucucugaaaggcuccaacg

SEQ ID NO: 3209790 - RNA, 19 nt, Artificial Sequence
  Description of Artificial Sequence: Synthetic oligonucleotide
ucagccacaguuaaauucu

SEQ ID NO: 3209791 - RNA, 19 nt, Artificial Sequence
  Description of Artificial Sequence: Synthetic oligonucleotide
uucuuaaucaaaguuuuga

SEQ ID NO: 3209792 - RNA, 19 nt, Artificial Sequence
  Description of Artificial Sequence: Synthetic oligonucleotide
uaaucaaaguuuugaagac

SEQ ID NO: 3209793 - RNA, 19 nt, Artificial Sequence
  Description of Artificial Sequence: Synthetic oligonucleotide
aacguugauguacuuguug

SEQ ID NO: 3209794 - RNA, 19 nt, Artificial Sequence
  Description of Artificial Sequence: Synthetic oligonucleotide
uccuucagaggcacgagcg

SEQ ID NO: 3209795 - RNA, 19 nt, Artificial Sequence
  Description of Artificial Sequence: Synthetic oligonucleotide
uagcugaaaaccacguagg

SEQ ID NO: 3209796 - RNA, 19 nt, Artificial Sequence
  Description of Artificial Sequence: Synthetic oligonucleotide
uguaagaaaugcaguagcu

SEQ ID NO: 3209797 - RNA, 19 nt, Artificial Sequence
  Description of Artificial Sequence: Synthetic oligonucleotide
aucaauauccaguuuggca

SEQ ID NO: 3209798 - RNA, 19 nt, Artificial Sequence
  Description of Artificial Sequence: Synthetic oligonucleotide
aaauucuucauggauggga

SEQ ID NO: 3209799 - RNA, 19 nt, Artificial Sequence
  Description of Artificial Sequence: Synthetic oligonucleotide
uucagugguacuugcgucg

SEQ ID NO: 3209800 - RNA, 19 nt, Artificial Sequence
  Description of Artificial Sequence: Synthetic oligonucleotide
uguuugaguuccuuguaag

SEQ ID NO: 3209801 - RNA, 19 nt, Artificial Sequence
  Description of Artificial Sequence: Synthetic oligonucleotide
ugaaaggcuccaacgaugc

SEQ ID NO: 3209802 - RNA, 19 nt, Artificial Sequence
  Description of Artificial Sequence: Synthetic oligonucleotide
aauucuucauggaugggag

SEQ ID NO: 3209803 - RNA, 19 nt, Artificial Sequence
  Description of Artificial Sequence: Synthetic oligonucleotide
ucuuaaucaaaguuuugaa

SEQ ID NO: 3209804 - RNA, 19 nt, Artificial Sequence
  Description of Artificial Sequence: Synthetic oligonucleotide
uaguucuuaaucaaaguuu

SEQ ID NO: 3209805 - RNA, 19 nt, Artificial Sequence
  Description of Artificial Sequence: Synthetic oligonucleotide
agcuucuucuccuucagag

SEQ ID NO: 3209806 - RNA, 19 nt, Artificial Sequence
  Description of Artificial Sequence: Synthetic oligonucleotide
aguuaaauucuucauggau

SEQ ID NO: 3209807 - RNA, 19 nt, Artificial Sequence
  Description of Artificial Sequence: Synthetic oligonucleotide
cuucuucuccuucagaggc

SEQ ID NO: 3209808 - RNA, 19 nt, Artificial Sequence
  Description of Artificial Sequence: Synthetic oligonucleotide
aucaaaguuuugaagacuc

SEQ ID NO: 3209809 - RNA, 19 nt, Artificial Sequence
  Description of Artificial Sequence: Synthetic oligonucleotide
ucauguuugaguuccuugu

SEQ ID NO: 3209810 - RNA, 19 nt, Artificial Sequence
  Description of Artificial Sequence: Synthetic oligonucleotide
ugaagacucagccacaguu

SEQ ID NO: 3209811 - RNA, 19 nt, Artificial Sequence
  Description of Artificial Sequence: Synthetic oligonucleotide
agcugaaaaccacguaggc

SEQ ID NO: 3209812 - RNA, 19 nt, Artificial Sequence
  Description of Artificial Sequence: Synthetic oligonucleotide
gauacuaguucuuaaucaa

SEQ ID NO: 3209813 - RNA, 19 nt, Artificial Sequence
  Description of Artificial Sequence: Synthetic oligonucleotide
aguuuaaccugcaugagcu

SEQ ID NO: 3209814 - RNA, 19 nt, Artificial Sequence
  Description of Artificial Sequence: Synthetic oligonucleotide
ucuucagugguacuugcgu

SEQ ID NO: 3209815 - RNA, 19 nt, Artificial Sequence
  Description of Artificial Sequence: Synthetic oligonucleotide
aaaggcuccaacgaugcca

SEQ ID NO: 3209816 - RNA, 19 nt, Artificial Sequence
  Description of Artificial Sequence: Synthetic oligonucleotide
ugugaaaucccgcaucaau

SEQ ID NO: 3209817 - RNA, 19 nt, Artificial Sequence
  Description of Artificial Sequence: Synthetic oligonucleotide
uuaauccccgagaugcugc

SEQ ID NO: 3209818 - RNA, 19 nt, Artificial Sequence
  Description of Artificial Sequence: Synthetic oligonucleotide
cacaguuaaauucuucaug

SEQ ID NO: 3209819 - RNA, 19 nt, Artificial Sequence
  Description of Artificial Sequence: Synthetic oligonucleotide
uggauacuaguucuuaauc

SEQ ID NO: 3209820 - RNA, 19 nt, Artificial Sequence
  Description of Artificial Sequence: Synthetic oligonucleotide
aaucaaaguuuugaagacu

SEQ ID NO: 3209821 - RNA, 19 nt, Artificial Sequence
  Description of Artificial Sequence: Synthetic oligonucleotide
cuuguaagaaaugcaguag

SEQ ID NO: 3209822 - RNA, 19 nt, Artificial Sequence
  Description of Artificial Sequence: Synthetic oligonucleotide
uuugaguuccuuguaagaa

SEQ ID NO: 3209823 - RNA, 19 nt, Artificial Sequence
  Description of Artificial Sequence: Synthetic oligonucleotide
cucuccaaguuuaaccugc

SEQ ID NO: 3209824 - RNA, 19 nt, Artificial Sequence
  Description of Artificial Sequence: Synthetic oligonucleotide
aaccacguaggcugccagc

SEQ ID NO: 3209825 - RNA, 19 nt, Artificial Sequence
  Description of Artificial Sequence: Synthetic oligonucleotide
uggugauccuucuucagug

SEQ ID NO: 3209826 - RNA, 19 nt, Artificial Sequence
  Description of Artificial Sequence: Synthetic oligonucleotide
ugaguuccuuguaagaaau

SEQ ID NO: 3209827 - RNA, 19 nt, Artificial Sequence
  Description of Artificial Sequence: Synthetic oligonucleotide
cucagccacaguuaaauuc

SEQ ID NO: 3209828 - RNA, 19 nt, Artificial Sequence
  Description of Artificial Sequence: Synthetic oligonucleotide
uucuucauggaugggagug

SEQ ID NO: 3209829 - RNA, 19 nt, Artificial Sequence
  Description of Artificial Sequence: Synthetic oligonucleotide
uccauggugauccuucuuc

SEQ ID NO: 3209830 - RNA, 19 nt, Artificial Sequence
  Description of Artificial Sequence: Synthetic oligonucleotide
acuaguucuuaaucaaagu

SEQ ID NO: 3209831 - RNA, 19 nt, Artificial Sequence
  Description of Artificial Sequence: Synthetic oligonucleotide
acgcucauguuugaguucc

SEQ ID NO: 3209832 - RNA, 19 nt, Artificial Sequence
  Description of Artificial Sequence: Synthetic oligonucleotide
ugaaaucccgcaucaauau

SEQ ID NO: 3209833 - RNA, 19 nt, Artificial Sequence
  Description of Artificial Sequence: Synthetic oligonucleotide
uaggcugccagcaccaugu

SEQ ID NO: 3209834 - RNA, 19 nt, Artificial Sequence
  Description of Artificial Sequence: Synthetic oligonucleotide
caaaguuuugaagacucag

SEQ ID NO: 3209835 - RNA, 19 nt, Artificial Sequence
  Description of Artificial Sequence: Synthetic oligonucleotide
uucagaggcacgagcgacg

SEQ ID NO: 3209836 - RNA, 19 nt, Artificial Sequence
  Description of Artificial Sequence: Synthetic oligonucleotide
uucuucagugguacuugcg

SEQ ID NO: 3209837 - RNA, 19 nt, Artificial Sequence
  Description of Artificial Sequence: Synthetic oligonucleotide
uuuccgaacguugauguac

SEQ ID NO: 3209838 - RNA, 19 nt, Artificial Sequence
  Description of Artificial Sequence: Synthetic oligonucleotide
accugcaugagcuucuucu

SEQ ID NO: 3209839 - RNA, 19 nt, Artificial Sequence
  Description of Artificial Sequence: Synthetic oligonucleotide
gauguacuuguuguaauac

SEQ ID NO: 3209840 - RNA, 19 nt, Artificial Sequence
  Description of Artificial Sequence: Synthetic oligonucleotide
agcucuccaaguuuaaccu

SEQ ID NO: 3209841 - RNA, 19 nt, Artificial Sequence
  Description of Artificial Sequence: Synthetic oligonucleotide
uuugaagacucagccacag

SEQ ID NO: 3209842 - RNA, 19 nt, Artificial Sequence
  Description of Artificial Sequence: Synthetic oligonucleotide
acguugauguacuuguugu

SEQ ID NO: 3209843 - RNA, 19 nt, Artificial Sequence
  Description of Artificial Sequence: Synthetic oligonucleotide
aagacucagccacaguuaa

SEQ ID NO: 3209844 - RNA, 19 nt, Artificial Sequence
  Description of Artificial Sequence: Synthetic oligonucleotide
uccuuguaagaaaugcagu

SEQ ID NO: 3209845 - RNA, 19 nt, Artificial Sequence
  Description of Artificial Sequence: Synthetic oligonucleotide
cagcucuccaaguuuaacc

SEQ ID NO: 3209846 - RNA, 19 nt, Artificial Sequence
  Description of Artificial Sequence: Synthetic oligonucleotide
aguuuugaagacucagcca

SEQ ID NO: 3209847 - RNA, 19 nt, Artificial Sequence
  Description of Artificial Sequence: Synthetic oligonucleotide
aguuuggcagcucuccaag

SEQ ID NO: 3209848 - RNA, 19 nt, Artificial Sequence
  Description of Artificial Sequence: Synthetic oligonucleotide
ugcaguagcugaaaaccac

SEQ ID NO: 3209849 - RNA, 19 nt, Artificial Sequence
  Description of Artificial Sequence: Synthetic oligonucleotide
ucugaaaggcuccaacgau

SEQ ID NO: 3209850 - RNA, 19 nt, Artificial Sequence
  Description of Artificial Sequence: Synthetic oligonucleotide
ucaaaguuuugaagacuca

SEQ ID NO: 3209851 - RNA, 19 nt, Artificial Sequence
  Description of Artificial Sequence: Synthetic oligonucleotide
uacuuguuguaauaccggu

SEQ ID NO: 3209852 - RNA, 19 nt, Artificial Sequence
  Description of Artificial Sequence: Synthetic oligonucleotide
aaggcuccaacgaugccac

SEQ ID NO: 3209853 - RNA, 19 nt, Artificial Sequence
  Description of Artificial Sequence: Synthetic oligonucleotide
uuaaccugcaugagcuucu

SEQ ID NO: 3209854 - RNA, 19 nt, Artificial Sequence
  Description of Artificial Sequence: Synthetic oligonucleotide
uauccaguuuggcagcucu

SEQ ID NO: 3209855 - RNA, 19 nt, Artificial Sequence
  Description of Artificial Sequence: Synthetic oligonucleotide
ucccgcaucaauauccagu

SEQ ID NO: 3209856 - RNA, 19 nt, Artificial Sequence
  Description of Artificial Sequence: Synthetic oligonucleotide
ugcagugcccuccauggug

SEQ ID NO: 3209857 - RNA, 19 nt, Artificial Sequence
  Description of Artificial Sequence: Synthetic oligonucleotide
uugaguuccuuguaagaaa

SEQ ID NO: 3209858 - RNA, 19 nt, Artificial Sequence
  Description of Artificial Sequence: Synthetic oligonucleotide
aagaucuucuuuaacaugc

SEQ ID NO: 3209859 - RNA, 19 nt, Artificial Sequence
  Description of Artificial Sequence: Synthetic oligonucleotide
auaauuugcauucuuguuc

SEQ ID NO: 3209860 - RNA, 19 nt, Artificial Sequence
  Description of Artificial Sequence: Synthetic oligonucleotide
ucaaagaucuucuuuaaca

SEQ ID NO: 3209861 - RNA, 19 nt, Artificial Sequence
  Description of Artificial Sequence: Synthetic oligonucleotide
gaguuuuccaccuucaaag

SEQ ID NO: 3209862 - RNA, 19 nt, Artificial Sequence
  Description of Artificial Sequence: Synthetic oligonucleotide
agaagagguucauagaugg

SEQ ID NO: 3209863 - RNA, 19 nt, Artificial Sequence
  Description of Artificial Sequence: Synthetic oligonucleotide
ugagagaagagguucauag

SEQ ID NO: 3209864 - RNA, 19 nt, Artificial Sequence
  Description of Artificial Sequence: Synthetic oligonucleotide
aagagguucauagaugggc

SEQ ID NO: 3209865 - RNA, 19 nt, Artificial Sequence
  Description of Artificial Sequence: Synthetic oligonucleotide
aauuuauugcuauaccuga

SEQ ID NO: 3209866 - RNA, 19 nt, Artificial Sequence
  Description of Artificial Sequence: Synthetic oligonucleotide
aaaugguguacucauagcu

SEQ ID NO: 3209867 - RNA, 19 nt, Artificial Sequence
  Description of Artificial Sequence: Synthetic oligonucleotide
aagacauuuuccaucaucg

SEQ ID NO: 3209868 - RNA, 19 nt, Artificial Sequence
  Description of Artificial Sequence: Synthetic oligonucleotide
aauuuugaguggugcauac

SEQ ID NO: 3209869 - RNA, 19 nt, Artificial Sequence
  Description of Artificial Sequence: Synthetic oligonucleotide
ucuucuuuaacaugcacug

SEQ ID NO: 3209870 - RNA, 19 nt, Artificial Sequence
  Description of Artificial Sequence: Synthetic oligonucleotide
uccaucaucguucauauaa

SEQ ID NO: 3209871 - RNA, 19 nt, Artificial Sequence
  Description of Artificial Sequence: Synthetic oligonucleotide
uuuauugcuauaccugaag

SEQ ID NO: 3209872 - RNA, 19 nt, Artificial Sequence
  Description of Artificial Sequence: Synthetic oligonucleotide
uaauuugcauucuuguucc

SEQ ID NO: 3209873 - RNA, 19 nt, Artificial Sequence
  Description of Artificial Sequence: Synthetic oligonucleotide
uguuccaugagagaagagg

SEQ ID NO: 3209874 - RNA, 19 nt, Artificial Sequence
  Description of Artificial Sequence: Synthetic oligonucleotide
uucauauaagcacacgugu

SEQ ID NO: 3209875 - RNA, 19 nt, Artificial Sequence
  Description of Artificial Sequence: Synthetic oligonucleotide
uuuaacaugcacugcuggg

SEQ ID NO: 3209876 - RNA, 19 nt, Artificial Sequence
  Description of Artificial Sequence: Synthetic oligonucleotide
gagagguucauuccgacag

SEQ ID NO: 3209877 - RNA, 19 nt, Artificial Sequence
  Description of Artificial Sequence: Synthetic oligonucleotide
ucaucguucauauaagcac

SEQ ID NO: 3209878 - RNA, 19 nt, Artificial Sequence
  Description of Artificial Sequence: Synthetic oligonucleotide
cauauaagcacacgugugg

SEQ ID NO: 3209879 - RNA, 19 nt, Artificial Sequence
  Description of Artificial Sequence: Synthetic oligonucleotide
uucuuuaacaugcacugcu

SEQ ID NO: 3209880 - RNA, 19 nt, Artificial Sequence
  Description of Artificial Sequence: Synthetic oligonucleotide
aaagaucuucuuuaacaug

SEQ ID NO: 3209881 - RNA, 19 nt, Artificial Sequence
  Description of Artificial Sequence: Synthetic oligonucleotide
acacccuugaaccaugaac

SEQ ID NO: 3209882 - RNA, 19 nt, Artificial Sequence
  Description of Artificial Sequence: Synthetic oligonucleotide
cauucuuguuccaugagag

SEQ ID NO: 3209883 - RNA, 19 nt, Artificial Sequence
  Description of Artificial Sequence: Synthetic oligonucleotide
acguguggcaauuuauugc

SEQ ID NO: 3209884 - RNA, 19 nt, Artificial Sequence
  Description of Artificial Sequence: Synthetic oligonucleotide
ugaaccaugaacuggaguu

SEQ ID NO: 3209885 - RNA, 19 nt, Artificial Sequence
  Description of Artificial Sequence: Synthetic oligonucleotide
augaacuggaguuuuccac

SEQ ID NO: 3209886 - RNA, 19 nt, Artificial Sequence
  Description of Artificial Sequence: Synthetic oligonucleotide
caauuuauugcuauaccug

SEQ ID NO: 3209887 - RNA, 19 nt, Artificial Sequence
  Description of Artificial Sequence: Synthetic oligonucleotide
ugcagagagguucauuccg

SEQ ID NO: 3209888 - RNA, 19 nt, Artificial Sequence
  Description of Artificial Sequence: Synthetic oligonucleotide
uuuugaguggugcauacuc

SEQ ID NO: 3209889 - RNA, 19 nt, Artificial Sequence
  Description of Artificial Sequence: Synthetic oligonucleotide
uuauugcuauaccugaaga

SEQ ID NO: 3209890 - RNA, 19 nt, Artificial Sequence
  Description of Artificial Sequence: Synthetic oligonucleotide
uccgacagcacauaauuug

SEQ ID NO: 3209891 - RNA, 19 nt, Artificial Sequence
  Description of Artificial Sequence: Synthetic oligonucleotide
ucauauaagcacacgugug

SEQ ID NO: 3209892 - RNA, 19 nt, Artificial Sequence
  Description of Artificial Sequence: Synthetic oligonucleotide
guucucacacccuugaacc

SEQ ID NO: 3209893 - RNA, 19 nt, Artificial Sequence
  Description of Artificial Sequence: Synthetic oligonucleotide
ugaacuggaguuuuccacc

SEQ ID NO: 3209894 - RNA, 19 nt, Artificial Sequence
  Description of Artificial Sequence: Synthetic oligonucleotide
acauuuuccaucaucguuc

SEQ ID NO: 3209895 - RNA, 19 nt, Artificial Sequence
  Description of Artificial Sequence: Synthetic oligonucleotide
acauaauuugcauucuugu

SEQ ID NO: 3209896 - RNA, 19 nt, Artificial Sequence
  Description of Artificial Sequence: Synthetic oligonucleotide
aagaugugcuuggaaaugg

SEQ ID NO: 3209897 - RNA, 19 nt, Artificial Sequence
  Description of Artificial Sequence: Synthetic oligonucleotide
uccacgaagacauuuucca

SEQ ID NO: 3209898 - RNA, 19 nt, Artificial Sequence
  Description of Artificial Sequence: Synthetic oligonucleotide
augguguacucauagcuuc

SEQ ID NO: 3209899 - RNA, 19 nt, Artificial Sequence
  Description of Artificial Sequence: Synthetic oligonucleotide
uucauagaugggcacaugu

SEQ ID NO: 3209900 - RNA, 19 nt, Artificial Sequence
  Description of Artificial Sequence: Synthetic oligonucleotide
uuuuccaccuucaaagauc

SEQ ID NO: 3209901 - RNA, 19 nt, Artificial Sequence
  Description of Artificial Sequence: Synthetic oligonucleotide
agagaagagguucauagau

SEQ ID NO: 3209902 - RNA, 19 nt, Artificial Sequence
  Description of Artificial Sequence: Synthetic oligonucleotide
auugcuauaccugaagaug

SEQ ID NO: 3209903 - RNA, 19 nt, Artificial Sequence
  Description of Artificial Sequence: Synthetic oligonucleotide
auauaagcacacguguggc

SEQ ID NO: 3209904 - RNA, 19 nt, Artificial Sequence
  Description of Artificial Sequence: Synthetic oligonucleotide
uugcuauaccugaagaugu

SEQ ID NO: 3209905 - RNA, 19 nt, Artificial Sequence
  Description of Artificial Sequence: Synthetic oligonucleotide
uuuccaccuucaaagaucu

SEQ ID NO: 3209906 - RNA, 19 nt, Artificial Sequence
  Description of Artificial Sequence: Synthetic oligonucleotide
uccuucuccacgaagacau

SEQ ID NO: 3209907 - RNA, 19 nt, Artificial Sequence
  Description of Artificial Sequence: Synthetic oligonucleotide
uuugcauucuuguuccaug

SEQ ID NO: 3209908 - RNA, 19 nt, Artificial Sequence
  Description of Artificial Sequence: Synthetic oligonucleotide
ucuuguuccaugagagaag

SEQ ID NO: 3209909 - RNA, 19 nt, Artificial Sequence
  Description of Artificial Sequence: Synthetic oligonucleotide
uguucucacacccuugaac

SEQ ID NO: 3209910 - RNA, 19 nt, Artificial Sequence
  Description of Artificial Sequence: Synthetic oligonucleotide
uuugaguggugcauacucc

SEQ ID NO: 3209911 - RNA, 19 nt, Artificial Sequence
  Description of Artificial Sequence: Synthetic oligonucleotide
cuuuaacaugcacugcugg

SEQ ID NO: 3209912 - RNA, 19 nt, Artificial Sequence
  Description of Artificial Sequence: Synthetic oligonucleotide
acugcugggaauuuugagu

SEQ ID NO: 3209913 - RNA, 19 nt, Artificial Sequence
  Description of Artificial Sequence: Synthetic oligonucleotide
guugcagagagguucauuc

SEQ ID NO: 3209914 - RNA, 19 nt, Artificial Sequence
  Description of Artificial Sequence: Synthetic oligonucleotide
uacuccuucuccacgaaga

SEQ ID NO: 3209915 - RNA, 19 nt, Artificial Sequence
  Description of Artificial Sequence: Synthetic oligonucleotide
ucuuuaacaugcacugcug

SEQ ID NO: 3209916 - RNA, 19 nt, Artificial Sequence
  Description of Artificial Sequence: Synthetic oligonucleotide
ggaaaugguguacucauag

SEQ ID NO: 3209917 - RNA, 19 nt, Artificial Sequence
  Description of Artificial Sequence: Synthetic oligonucleotide
cacauaauuugcauucuug

SEQ ID NO: 3209918 - RNA, 19 nt, Artificial Sequence
  Description of Artificial Sequence: Synthetic oligonucleotide
acuggaguuuuccaccuuc

SEQ ID NO: 3209919 - RNA, 19 nt, Artificial Sequence
  Description of Artificial Sequence: Synthetic oligonucleotide
gaagacauuuuccaucauc

SEQ ID NO: 3209920 - RNA, 19 nt, Artificial Sequence
  Description of Artificial Sequence: Synthetic oligonucleotide
ugcauacuccuucuccacg

SEQ ID NO: 3209921 - RNA, 19 nt, Artificial Sequence
  Description of Artificial Sequence: Synthetic oligonucleotide
gaaaugguguacucauagc

SEQ ID NO: 3209922 - RNA, 19 nt, Artificial Sequence
  Description of Artificial Sequence: Synthetic oligonucleotide
ugaagaugugcuuggaaau

SEQ ID NO: 3209923 - RNA, 19 nt, Artificial Sequence
  Description of Artificial Sequence: Synthetic oligonucleotide
uauugcuauaccugaagau

SEQ ID NO: 3209924 - RNA, 19 nt, Artificial Sequence
  Description of Artificial Sequence: Synthetic oligonucleotide
cauagaugggcacauguuc

SEQ ID NO: 3209925 - RNA, 19 nt, Artificial Sequence
  Description of Artificial Sequence: Synthetic oligonucleotide
uuggaaaugguguacucau

SEQ ID NO: 3209926 - RNA, 19 nt, Artificial Sequence
  Description of Artificial Sequence: Synthetic oligonucleotide
acgaagacauuuuccauca

SEQ ID NO: 3209927 - RNA, 19 nt, Artificial Sequence
  Description of Artificial Sequence: Synthetic oligonucleotide
uuuccaucaucguucauau

SEQ ID NO: 3209928 - RNA, 19 nt, Artificial Sequence
  Description of Artificial Sequence: Synthetic oligonucleotide
uucuuguuccaugagagaa

SEQ ID NO: 3209929 - RNA, 19 nt, Artificial Sequence
  Description of Artificial Sequence: Synthetic oligonucleotide
uuaacaugcacugcuggga

SEQ ID NO: 3209930 - RNA, 19 nt, Artificial Sequence
  Description of Artificial Sequence: Synthetic oligonucleotide
uucaaagaucuucuuuaac

SEQ ID NO: 3209931 - RNA, 19 nt, Artificial Sequence
  Description of Artificial Sequence: Synthetic oligonucleotide
cugcugggaauuuugagug

SEQ ID NO: 3209932 - RNA, 19 nt, Artificial Sequence
  Description of Artificial Sequence: Synthetic oligonucleotide
cagcacauaauuugcauuc

SEQ ID NO: 3209933 - RNA, 19 nt, Artificial Sequence
  Description of Artificial Sequence: Synthetic oligonucleotide
uuuuccaucaucguucaua

SEQ ID NO: 3209934 - RNA, 19 nt, Artificial Sequence
  Description of Artificial Sequence: Synthetic oligonucleotide
auuccgacagcacauaauu

SEQ ID NO: 3209935 - RNA, 19 nt, Artificial Sequence
  Description of Artificial Sequence: Synthetic oligonucleotide
uggugcauacuccuucucc

SEQ ID NO: 3209936 - RNA, 19 nt, Artificial Sequence
  Description of Artificial Sequence: Synthetic oligonucleotide
caucaucguucauauaagc

SEQ ID NO: 3209937 - RNA, 19 nt, Artificial Sequence
  Description of Artificial Sequence: Synthetic oligonucleotide
guucauauaagcacacgug

SEQ ID NO: 3209938 - RNA, 19 nt, Artificial Sequence
  Description of Artificial Sequence: Synthetic oligonucleotide
agagguucauuccgacagc

SEQ ID NO: 3209939 - RNA, 19 nt, Artificial Sequence
  Description of Artificial Sequence: Synthetic oligonucleotide
ugcacugcugggaauuuug

SEQ ID NO: 3209940 - RNA, 19 nt, Artificial Sequence
  Description of Artificial Sequence: Synthetic oligonucleotide
uaccugaagaugugcuugg

SEQ ID NO: 3209941 - RNA, 19 nt, Artificial Sequence
  Description of Artificial Sequence: Synthetic oligonucleotide
uguggcaauuuauugcuau

SEQ ID NO: 3209942 - RNA, 19 nt, Artificial Sequence
  Description of Artificial Sequence: Synthetic oligonucleotide
cacgaagacauuuuccauc

SEQ ID NO: 3209943 - RNA, 19 nt, Artificial Sequence
  Description of Artificial Sequence: Synthetic oligonucleotide
uccaccuucaaagaucuuc

SEQ ID NO: 3209944 - RNA, 19 nt, Artificial Sequence
  Description of Artificial Sequence: Synthetic oligonucleotide
uugaguggugcauacuccu

SEQ ID NO: 3209945 - RNA, 19 nt, Artificial Sequence
  Description of Artificial Sequence: Synthetic oligonucleotide
uauaagcacacguguggca

SEQ ID NO: 3209946 - RNA, 19 nt, Artificial Sequence
  Description of Artificial Sequence: Synthetic oligonucleotide
gaagaugugcuuggaaaug

SEQ ID NO: 3209947 - RNA, 19 nt, Artificial Sequence
  Description of Artificial Sequence: Synthetic oligonucleotide
acuccuucuccacgaagac

SEQ ID NO: 3209948 - RNA, 19 nt, Artificial Sequence
  Description of Artificial Sequence: Synthetic oligonucleotide
ugggaauuuugaguggugc

SEQ ID NO: 3209949 - RNA, 19 nt, Artificial Sequence
  Description of Artificial Sequence: Synthetic oligonucleotide
uugcauucuuguuccauga

SEQ ID NO: 3209950 - RNA, 19 nt, Artificial Sequence
  Description of Artificial Sequence: Synthetic oligonucleotide
uccaugagagaagagguuc

SEQ ID NO: 3209951 - RNA, 19 nt, Artificial Sequence
  Description of Artificial Sequence: Synthetic oligonucleotide
uggcaauuuauugcuauac

SEQ ID NO: 3209952 - RNA, 19 nt, Artificial Sequence
  Description of Artificial Sequence: Synthetic oligonucleotide
ugugcuuggaaauggugua

SEQ ID NO: 3209953 - RNA, 19 nt, Artificial Sequence
  Description of Artificial Sequence: Synthetic oligonucleotide
ugcauucuuguuccaugag

SEQ ID NO: 3209954 - RNA, 19 nt, Artificial Sequence
  Description of Artificial Sequence: Synthetic oligonucleotide
auaccugaagaugugcuug

SEQ ID NO: 3209955 - RNA, 19 nt, Artificial Sequence
  Description of Artificial Sequence: Synthetic oligonucleotide
aucuucuuuaacaugcacu

SEQ ID NO: 3209956 - RNA, 19 nt, Artificial Sequence
  Description of Artificial Sequence: Synthetic oligonucleotide
uugaaccaugaacuggagu

SEQ ID NO: 3209957 - RNA, 19 nt, Artificial Sequence
  Description of Artificial Sequence: Synthetic oligonucleotide
uaacaugcacugcugggaa

SEQ ID NO: 3209958 - RNA, 19 nt, Artificial Sequence
  Description of Artificial Sequence: Synthetic oligonucleotide
uuugcuucaaaccaggagg

SEQ ID NO: 3209959 - RNA, 19 nt, Artificial Sequence
  Description of Artificial Sequence: Synthetic oligonucleotide
aaagcgcacacccaggucc

SEQ ID NO: 3209960 - RNA, 19 nt, Artificial Sequence
  Description of Artificial Sequence: Synthetic oligonucleotide
aaauauaagacuuuugcua

SEQ ID NO: 3209961 - RNA, 19 nt, Artificial Sequence
  Description of Artificial Sequence: Synthetic oligonucleotide
uaucuuuaaaguuuucagg

SEQ ID NO: 3209962 - RNA, 19 nt, Artificial Sequence
  Description of Artificial Sequence: Synthetic oligonucleotide
auuuaauggccauggaugc

SEQ ID NO: 3209963 - RNA, 19 nt, Artificial Sequence
  Description of Artificial Sequence: Synthetic oligonucleotide
aauauaagacuuuugcuau

SEQ ID NO: 3209964 - RNA, 19 nt, Artificial Sequence
  Description of Artificial Sequence: Synthetic oligonucleotide
aagucuguaacucuuugag

SEQ ID NO: 3209965 - RNA, 19 nt, Artificial Sequence
  Description of Artificial Sequence: Synthetic oligonucleotide
ucaauuauuuuggagagag

SEQ ID NO: 3209966 - RNA, 19 nt, Artificial Sequence
  Description of Artificial Sequence: Synthetic oligonucleotide
aaccuguucuccuagggac

SEQ ID NO: 3209967 - RNA, 19 nt, Artificial Sequence
  Description of Artificial Sequence: Synthetic oligonucleotide
uaagaauuuggaaugcagc

SEQ ID NO: 3209968 - RNA, 19 nt, Artificial Sequence
  Description of Artificial Sequence: Synthetic oligonucleotide
gauuuaauggccauggaug

SEQ ID NO: 3209969 - RNA, 19 nt, Artificial Sequence
  Description of Artificial Sequence: Synthetic oligonucleotide
uuacuuaucagugugagaa

SEQ ID NO: 3209970 - RNA, 19 nt, Artificial Sequence
  Description of Artificial Sequence: Synthetic oligonucleotide
aaccagaccaaacagccag

SEQ ID NO: 3209971 - RNA, 19 nt, Artificial Sequence
  Description of Artificial Sequence: Synthetic oligonucleotide
aacaacaaauucuuaacaa

SEQ ID NO: 3209972 - RNA, 19 nt, Artificial Sequence
  Description of Artificial Sequence: Synthetic oligonucleotide
uaaauauaagacuuuugcu

SEQ ID NO: 3209973 - RNA, 19 nt, Artificial Sequence
  Description of Artificial Sequence: Synthetic oligonucleotide
aagaacaucccgcaggugu

SEQ ID NO: 3209974 - RNA, 19 nt, Artificial Sequence
  Description of Artificial Sequence: Synthetic oligonucleotide
cuagcugccuguuuaaucg

SEQ ID NO: 3209975 - RNA, 19 nt, Artificial Sequence
  Description of Artificial Sequence: Synthetic oligonucleotide
ugaauuccaaguuuggucu

SEQ ID NO: 3209976 - RNA, 19 nt, Artificial Sequence
  Description of Artificial Sequence: Synthetic oligonucleotide
uccaguaaauauaagacuu

SEQ ID NO: 3209977 - RNA, 19 nt, Artificial Sequence
  Description of Artificial Sequence: Synthetic oligonucleotide
guuggcaagaugcaaagag

SEQ ID NO: 3209978 - RNA, 19 nt, Artificial Sequence
  Description of Artificial Sequence: Synthetic oligonucleotide
uuuugcuucaaaccaggag

SEQ ID NO: 3209979 - RNA, 19 nt, Artificial Sequence
  Description of Artificial Sequence: Synthetic oligonucleotide
augaagaacaucccgcagg

SEQ ID NO: 3209980 - RNA, 19 nt, Artificial Sequence
  Description of Artificial Sequence: Synthetic oligonucleotide
gguuacaaacucuagagcc

SEQ ID NO: 3209981 - RNA, 19 nt, Artificial Sequence
  Description of Artificial Sequence: Synthetic oligonucleotide
ggcauugucacuuaaagac

SEQ ID NO: 3209982 - RNA, 19 nt, Artificial Sequence
  Description of Artificial Sequence: Synthetic oligonucleotide
gaguucccgaaacagaggg

SEQ ID NO: 3209983 - RNA, 19 nt, Artificial Sequence
  Description of Artificial Sequence: Synthetic oligonucleotide
cauaauucaguugagcgag

SEQ ID NO: 3209984 - RNA, 19 nt, Artificial Sequence
  Description of Artificial Sequence: Synthetic oligonucleotide
aaacagaggggcgauaauc

SEQ ID NO: 3209985 - RNA, 19 nt, Artificial Sequence
  Description of Artificial Sequence: Synthetic oligonucleotide
uccuaacuccauauuauag

SEQ ID NO: 3209986 - RNA, 19 nt, Artificial Sequence
  Description of Artificial Sequence: Synthetic oligonucleotide
ugcuaagucucucaggcug

SEQ ID NO: 3209987 - RNA, 19 nt, Artificial Sequence
  Description of Artificial Sequence: Synthetic oligonucleotide
uuuugacucuccuagcuug

SEQ ID NO: 3209988 - RNA, 19 nt, Artificial Sequence
  Description of Artificial Sequence: Synthetic oligonucleotide
uuggugaagugaaugaugu

SEQ ID NO: 3209989 - RNA, 19 nt, Artificial Sequence
  Description of Artificial Sequence: Synthetic oligonucleotide
aauaggugcuguugaguuc

SEQ ID NO: 3209990 - RNA, 19 nt, Artificial Sequence
  Description of Artificial Sequence: Synthetic oligonucleotide
uuaucagugugagaaaacc

SEQ ID NO: 3209991 - RNA, 19 nt, Artificial Sequence
  Description of Artificial Sequence: Synthetic oligonucleotide
cuaagaauuuggaaugcag

SEQ ID NO: 3209992 - RNA, 19 nt, Artificial Sequence
  Description of Artificial Sequence: Synthetic oligonucleotide
gaaccugacugcuacaggc

SEQ ID NO: 3209993 - RNA, 19 nt, Artificial Sequence
  Description of Artificial Sequence: Synthetic oligonucleotide
acuuaaagacauguacucc

SEQ ID NO: 3209994 - RNA, 19 nt, Artificial Sequence
  Description of Artificial Sequence: Synthetic oligonucleotide
uugaugaguuuacuuauca

SEQ ID NO: 3209995 - RNA, 19 nt, Artificial Sequence
  Description of Artificial Sequence: Synthetic oligonucleotide
uuccuuauuccgaggaagg

SEQ ID NO: 3209996 - RNA, 19 nt, Artificial Sequence
  Description of Artificial Sequence: Synthetic oligonucleotide
agcagcuuccagcuuagcc

SEQ ID NO: 3209997 - RNA, 19 nt, Artificial Sequence
  Description of Artificial Sequence: Synthetic oligonucleotide
caauucuaugauuuccugg

SEQ ID NO: 3209998 - RNA, 19 nt, Artificial Sequence
  Description of Artificial Sequence: Synthetic oligonucleotide
gaguuuacuuaucagugug

SEQ ID NO: 3209999 - RNA, 19 nt, Artificial Sequence
  Description of Artificial Sequence: Synthetic oligonucleotide
uuugacuugaccagcuugu

SEQ ID NO: 3210000 - RNA, 19 nt, Artificial Sequence
  Description of Artificial Sequence: Synthetic oligonucleotide
uuuuauucaaagucuccga

SEQ ID NO: 3210001 - RNA, 19 nt, Artificial Sequence
  Description of Artificial Sequence: Synthetic oligonucleotide
uuaggaaccugacugcuac

SEQ ID NO: 3210002 - RNA, 19 nt, Artificial Sequence
  Description of Artificial Sequence: Synthetic oligonucleotide
gaauuuggaaugcagcuga

SEQ ID NO: 3210003 - RNA, 19 nt, Artificial Sequence
  Description of Artificial Sequence: Synthetic oligonucleotide
gauuuccugggacagauuc

SEQ ID NO: 3210004 - RNA, 19 nt, Artificial Sequence
  Description of Artificial Sequence: Synthetic oligonucleotide
uuccaguaaauauaagacu

SEQ ID NO: 3210005 - RNA, 19 nt, Artificial Sequence
  Description of Artificial Sequence: Synthetic oligonucleotide
uccgaggaaggaaagagac

SEQ ID NO: 3210006 - RNA, 19 nt, Artificial Sequence
  Description of Artificial Sequence: Synthetic oligonucleotide
gacucaucuaagaauuugg

SEQ ID NO: 3210007 - RNA, 19 nt, Artificial Sequence
  Description of Artificial Sequence: Synthetic oligonucleotide
guuauggcucccuggaugg

SEQ ID NO: 3210008 - RNA, 19 nt, Artificial Sequence
  Description of Artificial Sequence: Synthetic oligonucleotide
aagccaaggggacucggac

SEQ ID NO: 3210009 - RNA, 19 nt, Artificial Sequence
  Description of Artificial Sequence: Synthetic oligonucleotide
uugaccaucauuaggcaaa

SEQ ID NO: 3210010 - RNA, 19 nt, Artificial Sequence
  Description of Artificial Sequence: Synthetic oligonucleotide
guuccaguaaauauaagac

SEQ ID NO: 3210011 - RNA, 19 nt, Artificial Sequence
  Description of Artificial Sequence: Synthetic oligonucleotide
gucucuuggccuuauagcc

SEQ ID NO: 3210012 - RNA, 19 nt, Artificial Sequence
  Description of Artificial Sequence: Synthetic oligonucleotide
gaacaacaaauucuuaaca

SEQ ID NO: 3210013 - RNA, 19 nt, Artificial Sequence
  Description of Artificial Sequence: Synthetic oligonucleotide
agggaugaagaacaucccg

SEQ ID NO: 3210014 - RNA, 19 nt, Artificial Sequence
  Description of Artificial Sequence: Synthetic oligonucleotide
ucagguuccaguaaauaua

SEQ ID NO: 3210015 - RNA, 19 nt, Artificial Sequence
  Description of Artificial Sequence: Synthetic oligonucleotide
uguucccagaaucagguuc

SEQ ID NO: 3210016 - RNA, 19 nt, Artificial Sequence
  Description of Artificial Sequence: Synthetic oligonucleotide
ugcuucucuggccagagca

SEQ ID NO: 3210017 - RNA, 19 nt, Artificial Sequence
  Description of Artificial Sequence: Synthetic oligonucleotide
aaggaucuugcucugaaua

SEQ ID NO: 3210018 - RNA, 19 nt, Artificial Sequence
  Description of Artificial Sequence: Synthetic oligonucleotide
agucucauguucauaauuc

SEQ ID NO: 3210019 - RNA, 19 nt, Artificial Sequence
  Description of Artificial Sequence: Synthetic oligonucleotide
uccacuccaagauccacgg

SEQ ID NO: 3210020 - RNA, 19 nt, Artificial Sequence
  Description of Artificial Sequence: Synthetic oligonucleotide
ugaagaacaucccgcaggu

SEQ ID NO: 3210021 - RNA, 19 nt, Artificial Sequence
  Description of Artificial Sequence: Synthetic oligonucleotide
acgaacaagccacagguca

SEQ ID NO: 3210022 - RNA, 19 nt, Artificial Sequence
  Description of Artificial Sequence: Synthetic oligonucleotide
agucuguaacucuuugagg

SEQ ID NO: 3210023 - RNA, 19 nt, Artificial Sequence
  Description of Artificial Sequence: Synthetic oligonucleotide
gcaaucauuuccaaggugg

SEQ ID NO: 3210024 - RNA, 19 nt, Artificial Sequence
  Description of Artificial Sequence: Synthetic oligonucleotide
gaaggaaagagacagacuu

SEQ ID NO: 3210025 - RNA, 19 nt, Artificial Sequence
  Description of Artificial Sequence: Synthetic oligonucleotide
aggauauccccaguuaugg

SEQ ID NO: 3210026 - RNA, 19 nt, Artificial Sequence
  Description of Artificial Sequence: Synthetic oligonucleotide
ucugaucaaggucacuugu

SEQ ID NO: 3210027 - RNA, 19 nt, Artificial Sequence
  Description of Artificial Sequence: Synthetic oligonucleotide
gcugcugugagccauaccc

SEQ ID NO: 3210028 - RNA, 19 nt, Artificial Sequence
  Description of Artificial Sequence: Synthetic oligonucleotide
gagacagacuuggagaugc

SEQ ID NO: 3210029 - RNA, 19 nt, Artificial Sequence
  Description of Artificial Sequence: Synthetic oligonucleotide
auaggcaaucauuuccaag

SEQ ID NO: 3210030 - RNA, 19 nt, Artificial Sequence
  Description of Artificial Sequence: Synthetic oligonucleotide
ugcucuguucuugaggagg

SEQ ID NO: 3210031 - RNA, 19 nt, Artificial Sequence
  Description of Artificial Sequence: Synthetic oligonucleotide
aacaaccuguucuccuagg

SEQ ID NO: 3210032 - RNA, 19 nt, Artificial Sequence
  Description of Artificial Sequence: Synthetic oligonucleotide
uucugggaguauaagcagc

SEQ ID NO: 3210033 - RNA, 19 nt, Artificial Sequence
  Description of Artificial Sequence: Synthetic oligonucleotide
ccagauuuuauucaaaguc

SEQ ID NO: 3210034 - RNA, 19 nt, Artificial Sequence
  Description of Artificial Sequence: Synthetic oligonucleotide
cuuggugaagugaaugaug

SEQ ID NO: 3210035 - RNA, 19 nt, Artificial Sequence
  Description of Artificial Sequence: Synthetic oligonucleotide
acaaccuguucuccuaggg

SEQ ID NO: 3210036 - RNA, 19 nt, Artificial Sequence
  Description of Artificial Sequence: Synthetic oligonucleotide
gugucaaagagauaggcaa

SEQ ID NO: 3210037 - RNA, 19 nt, Artificial Sequence
  Description of Artificial Sequence: Synthetic oligonucleotide
uaggcaaagagggaugaag

SEQ ID NO: 3210038 - RNA, 19 nt, Artificial Sequence
  Description of Artificial Sequence: Synthetic oligonucleotide
aagagauaggcaaucauuu

SEQ ID NO: 3210039 - RNA, 19 nt, Artificial Sequence
  Description of Artificial Sequence: Synthetic oligonucleotide
uccagauuuuauucaaagu

SEQ ID NO: 3210040 - RNA, 19 nt, Artificial Sequence
  Description of Artificial Sequence: Synthetic oligonucleotide
aucagguuccaguaaauau

SEQ ID NO: 3210041 - RNA, 19 nt, Artificial Sequence
  Description of Artificial Sequence: Synthetic oligonucleotide
ggacauacugcagaaagcg

SEQ ID NO: 3210042 - RNA, 19 nt, Artificial Sequence
  Description of Artificial Sequence: Synthetic oligonucleotide
gcagcuuccagcuuagccg

SEQ ID NO: 3210043 - RNA, 19 nt, Artificial Sequence
  Description of Artificial Sequence: Synthetic oligonucleotide
cuguccaacuccauuuucc

SEQ ID NO: 3210044 - RNA, 19 nt, Artificial Sequence
  Description of Artificial Sequence: Synthetic oligonucleotide
gguuccaguaaauauaaga

SEQ ID NO: 3210045 - RNA, 19 nt, Artificial Sequence
  Description of Artificial Sequence: Synthetic oligonucleotide
gaguauaagcagcuuccag

SEQ ID NO: 3210046 - RNA, 19 nt, Artificial Sequence
  Description of Artificial Sequence: Synthetic oligonucleotide
auguuacauuccuugauga

SEQ ID NO: 3210047 - RNA, 19 nt, Artificial Sequence
  Description of Artificial Sequence: Synthetic oligonucleotide
acuugugcagccuggggag

SEQ ID NO: 3210048 - RNA, 19 nt, Artificial Sequence
  Description of Artificial Sequence: Synthetic oligonucleotide
agcaccucccaaugugucc

SEQ ID NO: 3210049 - RNA, 19 nt, Artificial Sequence
  Description of Artificial Sequence: Synthetic oligonucleotide
cauggcagagucaucguug

SEQ ID NO: 3210050 - RNA, 19 nt, Artificial Sequence
  Description of Artificial Sequence: Synthetic oligonucleotide
ucauuaggcaaagagggau

SEQ ID NO: 3210051 - RNA, 19 nt, Artificial Sequence
  Description of Artificial Sequence: Synthetic oligonucleotide
ugggaguauaagcagcuuc

SEQ ID NO: 3210052 - RNA, 19 nt, Artificial Sequence
  Description of Artificial Sequence: Synthetic oligonucleotide
uuuacuuaucagugugaga

SEQ ID NO: 3210053 - RNA, 19 nt, Artificial Sequence
  Description of Artificial Sequence: Synthetic oligonucleotide
aggggcgauaaucacuggg

SEQ ID NO: 3210054 - RNA, 19 nt, Artificial Sequence
  Description of Artificial Sequence: Synthetic oligonucleotide
aacagaggggcgauaauca

SEQ ID NO: 3210055 - RNA, 19 nt, Artificial Sequence
  Description of Artificial Sequence: Synthetic oligonucleotide
uugcuucaaaccaggaggu

SEQ ID NO: 3210056 - RNA, 19 nt, Artificial Sequence
  Description of Artificial Sequence: Synthetic oligonucleotide
ugagggaaggugucaaaga

SEQ ID NO: 3210057 - RNA, 19 nt, Artificial Sequence
  Description of Artificial Sequence: Synthetic oligonucleotide
cuaacuccauauuauagaa

SEQ ID NO: 3210058 - RNA, 19 nt, Artificial Sequence
  Description of Artificial Sequence: Synthetic oligonucleotide
uaauccagggcacauaugg

SEQ ID NO: 3210059 - RNA, 19 nt, Artificial Sequence
  Description of Artificial Sequence: Synthetic oligonucleotide
uuauccaugauucucagcu

SEQ ID NO: 3210060 - RNA, 19 nt, Artificial Sequence
  Description of Artificial Sequence: Synthetic oligonucleotide
cuuaugacuguauuaaucc

SEQ ID NO: 3210061 - RNA, 19 nt, Artificial Sequence
  Description of Artificial Sequence: Synthetic oligonucleotide
uaagauacaauaccauggg

SEQ ID NO: 3210062 - RNA, 19 nt, Artificial Sequence
  Description of Artificial Sequence: Synthetic oligonucleotide
aagucauacuuguaguucg

SEQ ID NO: 3210063 - RNA, 19 nt, Artificial Sequence
  Description of Artificial Sequence: Synthetic oligonucleotide
ucggauaguauuuacaggc

SEQ ID NO: 3210064 - RNA, 19 nt, Artificial Sequence
  Description of Artificial Sequence: Synthetic oligonucleotide
acuguauuaauccagggca

SEQ ID NO: 3210065 - RNA, 19 nt, Artificial Sequence
  Description of Artificial Sequence: Synthetic oligonucleotide
agauacaauaccaugggcc

SEQ ID NO: 3210066 - RNA, 19 nt, Artificial Sequence
  Description of Artificial Sequence: Synthetic oligonucleotide
aagauacaauaccaugggc

SEQ ID NO: 3210067 - RNA, 19 nt, Artificial Sequence
  Description of Artificial Sequence: Synthetic oligonucleotide
uuuacaggccucuuuaucc

SEQ ID NO: 3210068 - RNA, 19 nt, Artificial Sequence
  Description of Artificial Sequence: Synthetic oligonucleotide
auaagauacaauaccaugg

SEQ ID NO: 3210069 - RNA, 19 nt, Artificial Sequence
  Description of Artificial Sequence: Synthetic oligonucleotide
ucuuuuaagcccaaggggu

SEQ ID NO: 3210070 - RNA, 19 nt, Artificial Sequence
  Description of Artificial Sequence: Synthetic oligonucleotide
aauaccaugggccacccca

SEQ ID NO: 3210071 - RNA, 19 nt, Artificial Sequence
  Description of Artificial Sequence: Synthetic oligonucleotide
uaugacuguauuaauccag

SEQ ID NO: 3210072 - RNA, 19 nt, Artificial Sequence
  Description of Artificial Sequence: Synthetic oligonucleotide
uccauaagauacaauacca

SEQ ID NO: 3210073 - RNA, 19 nt, Artificial Sequence
  Description of Artificial Sequence: Synthetic oligonucleotide
gaucuuaucuuccuggggc

SEQ ID NO: 3210074 - RNA, 19 nt, Artificial Sequence
  Description of Artificial Sequence: Synthetic oligonucleotide
aagagcucuggcuuggagg

SEQ ID NO: 3210075 - RNA, 19 nt, Artificial Sequence
  Description of Artificial Sequence: Synthetic oligonucleotide
aggcucuucagcuauuugc

SEQ ID NO: 3210076 - RNA, 19 nt, Artificial Sequence
  Description of Artificial Sequence: Synthetic oligonucleotide
agagcucuggcuuggaggc

SEQ ID NO: 3210077 - RNA, 19 nt, Artificial Sequence
  Description of Artificial Sequence: Synthetic oligonucleotide
auacuuguaguucggauag

SEQ ID NO: 3210078 - RNA, 19 nt, Artificial Sequence
  Description of Artificial Sequence: Synthetic oligonucleotide
ucuuuauccaugauucuca

SEQ ID NO: 3210079 - RNA, 19 nt, Artificial Sequence
  Description of Artificial Sequence: Synthetic oligonucleotide
cauaagauacaauaccaug

SEQ ID NO: 3210080 - RNA, 19 nt, Artificial Sequence
  Description of Artificial Sequence: Synthetic oligonucleotide
uuguaugcugaucuuaucu

SEQ ID NO: 3210081 - RNA, 19 nt, Artificial Sequence
  Description of Artificial Sequence: Synthetic oligonucleotide
uggucuuuuaagcccaagg

SEQ ID NO: 3210082 - RNA, 19 nt, Artificial Sequence
  Description of Artificial Sequence: Synthetic oligonucleotide
guucggauaguauuuacag

SEQ ID NO: 3210083 - RNA, 19 nt, Artificial Sequence
  Description of Artificial Sequence: Synthetic oligonucleotide
cuauuugcccuuaugacug

SEQ ID NO: 3210084 - RNA, 19 nt, Artificial Sequence
  Description of Artificial Sequence: Synthetic oligonucleotide
agcuauuugcccuuaugac

SEQ ID NO: 3210085 - RNA, 19 nt, Artificial Sequence
  Description of Artificial Sequence: Synthetic oligonucleotide
gucuuuuaagcccaagggg

SEQ ID NO: 3210086 - RNA, 19 nt, Artificial Sequence
  Description of Artificial Sequence: Synthetic oligonucleotide
augauucucagcuucaccu

SEQ ID NO: 3210087 - RNA, 19 nt, Artificial Sequence
  Description of Artificial Sequence: Synthetic oligonucleotide
uaugcugaucuuaucuucc

SEQ ID NO: 3210088 - RNA, 19 nt, Artificial Sequence
  Description of Artificial Sequence: Synthetic oligonucleotide
gauacaauaccaugggcca

SEQ ID NO: 3210089 - RNA, 19 nt, Artificial Sequence
  Description of Artificial Sequence: Synthetic oligonucleotide
gacuguauuaauccagggc

SEQ ID NO: 3210090 - RNA, 19 nt, Artificial Sequence
  Description of Artificial Sequence: Synthetic oligonucleotide
guccauaagauacaauacc

SEQ ID NO: 3210091 - RNA, 19 nt, Artificial Sequence
  Description of Artificial Sequence: Synthetic oligonucleotide
uucggauaguauuuacagg

SEQ ID NO: 3210092 - RNA, 19 nt, Artificial Sequence
  Description of Artificial Sequence: Synthetic oligonucleotide
auuuacaggccucuuuauc

SEQ ID NO: 3210093 - RNA, 19 nt, Artificial Sequence
  Description of Artificial Sequence: Synthetic oligonucleotide
cuggaagucauacuuguag

SEQ ID NO: 3210094 - RNA, 19 nt, Artificial Sequence
  Description of Artificial Sequence: Synthetic oligonucleotide
acaagaugggaacaggcug

SEQ ID NO: 3210095 - RNA, 19 nt, Artificial Sequence
  Description of Artificial Sequence: Synthetic oligonucleotide
uucgggugaagacugcagg

SEQ ID NO: 3210096 - RNA, 19 nt, Artificial Sequence
  Description of Artificial Sequence: Synthetic oligonucleotide
caagaugggaacaggcugg

SEQ ID NO: 3210097 - RNA, 19 nt, Artificial Sequence
  Description of Artificial Sequence: Synthetic oligonucleotide
ugaucuuaucuuccugggg

SEQ ID NO: 3210098 - RNA, 19 nt, Artificial Sequence
  Description of Artificial Sequence: Synthetic oligonucleotide
ggucuuuuaagcccaaggg

SEQ ID NO: 3210099 - RNA, 19 nt, Artificial Sequence
  Description of Artificial Sequence: Synthetic oligonucleotide
auccaugauucucagcuuc

SEQ ID NO: 3210100 - RNA, 19 nt, Artificial Sequence
  Description of Artificial Sequence: Synthetic oligonucleotide
uguaguucggauaguauuu

SEQ ID NO: 3210101 - RNA, 19 nt, Artificial Sequence
  Description of Artificial Sequence: Synthetic oligonucleotide
auccagggcacauaugggg

SEQ ID NO: 3210102 - RNA, 19 nt, Artificial Sequence
  Description of Artificial Sequence: Synthetic oligonucleotide
acguccauaagauacaaua

SEQ ID NO: 3210103 - RNA, 19 nt, Artificial Sequence
  Description of Artificial Sequence: Synthetic oligonucleotide
auuaauccagggcacauau

SEQ ID NO: 3210104 - RNA, 19 nt, Artificial Sequence
  Description of Artificial Sequence: Synthetic oligonucleotide
uggggauuggucuuuuaag

SEQ ID NO: 3210105 - RNA, 19 nt, Artificial Sequence
  Description of Artificial Sequence: Synthetic oligonucleotide
uuaugacuguauuaaucca

SEQ ID NO: 3210106 - RNA, 19 nt, Artificial Sequence
  Description of Artificial Sequence: Synthetic oligonucleotide
uauggggagauucggguga

SEQ ID NO: 3210107 - RNA, 19 nt, Artificial Sequence
  Description of Artificial Sequence: Synthetic oligonucleotide
caccacguccauaagauac

SEQ ID NO: 3210108 - RNA, 19 nt, Artificial Sequence
  Description of Artificial Sequence: Synthetic oligonucleotide
ugacuguauuaauccaggg

SEQ ID NO: 3210109 - RNA, 19 nt, Artificial Sequence
  Description of Artificial Sequence: Synthetic oligonucleotide
gauucucagcuucaccucc

SEQ ID NO: 3210110 - RNA, 19 nt, Artificial Sequence
  Description of Artificial Sequence: Synthetic oligonucleotide
uacagaagagcucuggcuu

SEQ ID NO: 3210111 - RNA, 19 nt, Artificial Sequence
  Description of Artificial Sequence: Synthetic oligonucleotide
ucgggugaagacugcaggg

SEQ ID NO: 3210112 - RNA, 19 nt, Artificial Sequence
  Description of Artificial Sequence: Synthetic oligonucleotide
uuguaguucggauaguauu

SEQ ID NO: 3210113 - RNA, 19 nt, Artificial Sequence
  Description of Artificial Sequence: Synthetic oligonucleotide
cugaucuuaucuuccuggg

SEQ ID NO: 3210114 - RNA, 19 nt, Artificial Sequence
  Description of Artificial Sequence: Synthetic oligonucleotide
uggaagucauacuuguagu

SEQ ID NO: 3210115 - RNA, 19 nt, Artificial Sequence
  Description of Artificial Sequence: Synthetic oligonucleotide
ucagcuauuugcccuuaug

SEQ ID NO: 3210116 - RNA, 19 nt, Artificial Sequence
  Description of Artificial Sequence: Synthetic oligonucleotide
aagcccaagggguacagaa

SEQ ID NO: 3210117 - RNA, 19 nt, Artificial Sequence
  Description of Artificial Sequence: Synthetic oligonucleotide
gcugaucuuaucuuccugg

SEQ ID NO: 3210118 - RNA, 19 nt, Artificial Sequence
  Description of Artificial Sequence: Synthetic oligonucleotide
acagaccuggaagucauac

SEQ ID NO: 3210119 - RNA, 19 nt, Artificial Sequence
  Description of Artificial Sequence: Synthetic oligonucleotide
gaggcccugacucaggcug

SEQ ID NO: 3210120 - RNA, 19 nt, Artificial Sequence
  Description of Artificial Sequence: Synthetic oligonucleotide
augacuguauuaauccagg

SEQ ID NO: 3210121 - RNA, 19 nt, Artificial Sequence
  Description of Artificial Sequence: Synthetic oligonucleotide
agaccuggaagucauacuu

SEQ ID NO: 3210122 - RNA, 19 nt, Artificial Sequence
  Description of Artificial Sequence: Synthetic oligonucleotide
gaagucauacuuguaguuc

SEQ ID NO: 3210123 - RNA, 19 nt, Artificial Sequence
  Description of Artificial Sequence: Synthetic oligonucleotide
ucagcuucaccucccucag

SEQ ID NO: 3210124 - RNA, 19 nt, Artificial Sequence
  Description of Artificial Sequence: Synthetic oligonucleotide
uguaugcugaucuuaucuu

SEQ ID NO: 3210125 - RNA, 19 nt, Artificial Sequence
  Description of Artificial Sequence: Synthetic oligonucleotide
ugcgucaccacguccauaa

SEQ ID NO: 3210126 - RNA, 19 nt, Artificial Sequence
  Description of Artificial Sequence: Synthetic oligonucleotide
uuuauccaugauucucagc

SEQ ID NO: 3210127 - RNA, 19 nt, Artificial Sequence
  Description of Artificial Sequence: Synthetic oligonucleotide
cuuuauccaugauucucag

SEQ ID NO: 3210128 - RNA, 19 nt, Artificial Sequence
  Description of Artificial Sequence: Synthetic oligonucleotide
ggauuggucuuuuaagccc

SEQ ID NO: 3210129 - RNA, 19 nt, Artificial Sequence
  Description of Artificial Sequence: Synthetic oligonucleotide
gauaguauuuacaggccuc

SEQ ID NO: 3210130 - RNA, 19 nt, Artificial Sequence
  Description of Artificial Sequence: Synthetic oligonucleotide
uuacaggccucuuuaucca

SEQ ID NO: 3210131 - RNA, 19 nt, Artificial Sequence
  Description of Artificial Sequence: Synthetic oligonucleotide
aauccagggcacauauggg

SEQ ID NO: 3210132 - RNA, 19 nt, Artificial Sequence
  Description of Artificial Sequence: Synthetic oligonucleotide
uguauuaauccagggcaca

SEQ ID NO: 3210133 - RNA, 19 nt, Artificial Sequence
  Description of Artificial Sequence: Synthetic oligonucleotide
gagauucgggugaagacug

SEQ ID NO: 3210134 - RNA, 19 nt, Artificial Sequence
  Description of Artificial Sequence: Synthetic oligonucleotide
uacaauaccaugggccacc

SEQ ID NO: 3210135 - RNA, 19 nt, Artificial Sequence
  Description of Artificial Sequence: Synthetic oligonucleotide
ucauacuuguaguucggau

SEQ ID NO: 3210136 - RNA, 19 nt, Artificial Sequence
  Description of Artificial Sequence: Synthetic oligonucleotide
uccagggcacauaugggga

SEQ ID NO: 3210137 - RNA, 19 nt, Artificial Sequence
  Description of Artificial Sequence: Synthetic oligonucleotide
auauggggagauucgggug

SEQ ID NO: 3210138 - RNA, 19 nt, Artificial Sequence
  Description of Artificial Sequence: Synthetic oligonucleotide
cuguauuaauccagggcac

SEQ ID NO: 3210139 - RNA, 19 nt, Artificial Sequence
  Description of Artificial Sequence: Synthetic oligonucleotide
acaggcuggggauuggucu

SEQ ID NO: 3210140 - RNA, 19 nt, Artificial Sequence
  Description of Artificial Sequence: Synthetic oligonucleotide
caugauucucagcuucacc

SEQ ID NO: 3210141 - RNA, 19 nt, Artificial Sequence
  Description of Artificial Sequence: Synthetic oligonucleotide
aguauuuacaggccucuuu

SEQ ID NO: 3210142 - RNA, 19 nt, Artificial Sequence
  Description of Artificial Sequence: Synthetic oligonucleotide
ggggauuggucuuuuaagc

SEQ ID NO: 3210143 - RNA, 19 nt, Artificial Sequence
  Description of Artificial Sequence: Synthetic oligonucleotide
uccaugauucucagcuuca

SEQ ID NO: 3210144 - RNA, 19 nt, Artificial Sequence
  Description of Artificial Sequence: Synthetic oligonucleotide
aagaugggaacaggcuggg

SEQ ID NO: 3210145 - RNA, 19 nt, Artificial Sequence
  Description of Artificial Sequence: Synthetic oligonucleotide
acagaagagcucuggcuug

SEQ ID NO: 3210146 - RNA, 19 nt, Artificial Sequence
  Description of Artificial Sequence: Synthetic oligonucleotide
uuaauccagggcacauaug

SEQ ID NO: 3210147 - RNA, 19 nt, Artificial Sequence
  Description of Artificial Sequence: Synthetic oligonucleotide
cagcacacaguagaggucc

SEQ ID NO: 3210148 - RNA, 19 nt, Artificial Sequence
  Description of Artificial Sequence: Synthetic oligonucleotide
accuggaagucauacuugu

SEQ ID NO: 3210149 - RNA, 19 nt, Artificial Sequence
  Description of Artificial Sequence: Synthetic oligonucleotide
guauuuacaggccucuuua

SEQ ID NO: 3210150 - RNA, 19 nt, Artificial Sequence
  Description of Artificial Sequence: Synthetic oligonucleotide
guaugcugaucuuaucuuc

SEQ ID NO: 3210151 - RNA, 19 nt, Artificial Sequence
  Description of Artificial Sequence: Synthetic oligonucleotide
ugcugaucuuaucuuccug

SEQ ID NO: 3210152 - RNA, 19 nt, Artificial Sequence
  Description of Artificial Sequence: Synthetic oligonucleotide
auaguauuuacaggccucu

SEQ ID NO: 3210153 - RNA, 19 nt, Artificial Sequence
  Description of Artificial Sequence: Synthetic oligonucleotide
cucuuuauccaugauucuc

SEQ ID NO: 3210154 - RNA, 19 nt, Artificial Sequence
  Description of Artificial Sequence: Synthetic oligonucleotide
gggauuggucuuuuaagcc

SEQ ID NO: 3210155 - RNA, 19 nt, Artificial Sequence
  Description of Artificial Sequence: Synthetic oligonucleotide
agggguacagaagagcucu

SEQ ID NO: 3210156 - RNA, 19 nt, Artificial Sequence
  Description of Artificial Sequence: Synthetic oligonucleotide
cacauauggggagauucgg

SEQ ID NO: 3210157 - RNA, 19 nt, Artificial Sequence
  Description of Artificial Sequence: Synthetic oligonucleotide
ugggacaagaugggaacag

SEQ ID NO: 3210158 - RNA, 19 nt, Artificial Sequence
  Description of Artificial Sequence: Synthetic oligonucleotide
uaaauuauacccuacaaug

SEQ ID NO: 3210159 - RNA, 19 nt, Artificial Sequence
  Description of Artificial Sequence: Synthetic oligonucleotide
auuaugaucuaucaauucc

SEQ ID NO: 3210160 - RNA, 19 nt, Artificial Sequence
  Description of Artificial Sequence: Synthetic oligonucleotide
uugauuauuccuuagauac

SEQ ID NO: 3210161 - RNA, 19 nt, Artificial Sequence
  Description of Artificial Sequence: Synthetic oligonucleotide
aauaacaauaucaaaagga

SEQ ID NO: 3210162 - RNA, 19 nt, Artificial Sequence
  Description of Artificial Sequence: Synthetic oligonucleotide
uuuuauauuggucaccacc

SEQ ID NO: 3210163 - RNA, 19 nt, Artificial Sequence
  Description of Artificial Sequence: Synthetic oligonucleotide
auaagaagaucucugcacc

SEQ ID NO: 3210164 - RNA, 19 nt, Artificial Sequence
  Description of Artificial Sequence: Synthetic oligonucleotide
agaacuacgguuucguacc

SEQ ID NO: 3210165 - RNA, 19 nt, Artificial Sequence
  Description of Artificial Sequence: Synthetic oligonucleotide
uuaugauagacacagagau

SEQ ID NO: 3210166 - RNA, 19 nt, Artificial Sequence
  Description of Artificial Sequence: Synthetic oligonucleotide
ugacgaguaaauuauaccc

SEQ ID NO: 3210167 - RNA, 19 nt, Artificial Sequence
  Description of Artificial Sequence: Synthetic oligonucleotide
uuuauauuggucaccacca

SEQ ID NO: 3210168 - RNA, 19 nt, Artificial Sequence
  Description of Artificial Sequence: Synthetic oligonucleotide
ugaauagugaucaucauuu

SEQ ID NO: 3210169 - RNA, 19 nt, Artificial Sequence
  Description of Artificial Sequence: Synthetic oligonucleotide
aaugccauugucuuugcug

SEQ ID NO: 3210170 - RNA, 19 nt, Artificial Sequence
  Description of Artificial Sequence: Synthetic oligonucleotide
ucuuucgugauaaacuugc

SEQ ID NO: 3210171 - RNA, 19 nt, Artificial Sequence
  Description of Artificial Sequence: Synthetic oligonucleotide
uacaucuacagaacuacgg

SEQ ID NO: 3210172 - RNA, 19 nt, Artificial Sequence
  Description of Artificial Sequence: Synthetic oligonucleotide
aguucaaggguguaguugg

SEQ ID NO: 3210173 - RNA, 19 nt, Artificial Sequence
  Description of Artificial Sequence: Synthetic oligonucleotide
ucuaucacaugccucauga

SEQ ID NO: 3210174 - RNA, 19 nt, Artificial Sequence
  Description of Artificial Sequence: Synthetic oligonucleotide
uuuaaguugaucccacucu

SEQ ID NO: 3210175 - RNA, 19 nt, Artificial Sequence
  Description of Artificial Sequence: Synthetic oligonucleotide
ugaagacaauucaugauug

SEQ ID NO: 3210176 - RNA, 19 nt, Artificial Sequence
  Description of Artificial Sequence: Synthetic oligonucleotide
ucuucuaaccgcagcaagg

SEQ ID NO: 3210177 - RNA, 19 nt, Artificial Sequence
  Description of Artificial Sequence: Synthetic oligonucleotide
uuugcugcuacccaugcca

SEQ ID NO: 3210178 - RNA, 19 nt, Artificial Sequence
  Description of Artificial Sequence: Synthetic oligonucleotide
uucgugauaaacuugcagu

SEQ ID NO: 3210179 - RNA, 19 nt, Artificial Sequence
  Description of Artificial Sequence: Synthetic oligonucleotide
uuaugaucuaucaauuccu

SEQ ID NO: 3210180 - RNA, 19 nt, Artificial Sequence
  Description of Artificial Sequence: Synthetic oligonucleotide
gaaaguaugcuggaaagcc

SEQ ID NO: 3210181 - RNA, 19 nt, Artificial Sequence
  Description of Artificial Sequence: Synthetic oligonucleotide
gacaauucaugauugucag

SEQ ID NO: 3210182 - RNA, 19 nt, Artificial Sequence
  Description of Artificial Sequence: Synthetic oligonucleotide
ugauucauagacaucaaua

SEQ ID NO: 3210183 - RNA, 19 nt, Artificial Sequence
  Description of Artificial Sequence: Synthetic oligonucleotide
augaccuuaucuucaaaac

SEQ ID NO: 3210184 - RNA, 19 nt, Artificial Sequence
  Description of Artificial Sequence: Synthetic oligonucleotide
uagauacaaaagaaugucc

SEQ ID NO: 3210185 - RNA, 19 nt, Artificial Sequence
  Description of Artificial Sequence: Synthetic oligonucleotide
gugaucaucauuuuaugug

SEQ ID NO: 3210186 - RNA, 19 nt, Artificial Sequence
  Description of Artificial Sequence: Synthetic oligonucleotide
uaguugagacacuacaucc

SEQ ID NO: 3210187 - RNA, 19 nt, Artificial Sequence
  Description of Artificial Sequence: Synthetic oligonucleotide
aagacaauucaugauuguc

SEQ ID NO: 3210188 - RNA, 19 nt, Artificial Sequence
  Description of Artificial Sequence: Synthetic oligonucleotide
gagauacaaauacuugacg

SEQ ID NO: 3210189 - RNA, 19 nt, Artificial Sequence
  Description of Artificial Sequence: Synthetic oligonucleotide
uuucgugauaaacuugcag

SEQ ID NO: 3210190 - RNA, 19 nt, Artificial Sequence
  Description of Artificial Sequence: Synthetic oligonucleotide
uguuauuuuaagugugccc

SEQ ID NO: 3210191 - RNA, 19 nt, Artificial Sequence
  Description of Artificial Sequence: Synthetic oligonucleotide
uuagauacaaaagaauguc

SEQ ID NO: 3210192 - RNA, 19 nt, Artificial Sequence
  Description of Artificial Sequence: Synthetic oligonucleotide
ucaaaaggaggacaggagu

SEQ ID NO: 3210193 - RNA, 19 nt, Artificial Sequence
  Description of Artificial Sequence: Synthetic oligonucleotide
uucaggguggcguagagca

SEQ ID NO: 3210194 - RNA, 19 nt, Artificial Sequence
  Description of Artificial Sequence: Synthetic oligonucleotide
ugaucaucauuuuaugugu

SEQ ID NO: 3210195 - RNA, 19 nt, Artificial Sequence
  Description of Artificial Sequence: Synthetic oligonucleotide
uuaaucucuucuaaccgca

SEQ ID NO: 3210196 - RNA, 19 nt, Artificial Sequence
  Description of Artificial Sequence: Synthetic oligonucleotide
cauaagaagaucucugcac

SEQ ID NO: 3210197 - RNA, 19 nt, Artificial Sequence
  Description of Artificial Sequence: Synthetic oligonucleotide
aaugcuguuagucccaguu

SEQ ID NO: 3210198 - RNA, 19 nt, Artificial Sequence
  Description of Artificial Sequence: Synthetic oligonucleotide
ugcuccagcagcaaaauaa

SEQ ID NO: 3210199 - RNA, 19 nt, Artificial Sequence
  Description of Artificial Sequence: Synthetic oligonucleotide
uugacgaguaaauuauacc

SEQ ID NO: 3210200 - RNA, 19 nt, Artificial Sequence
  Description of Artificial Sequence: Synthetic oligonucleotide
uucaaaacugaucuucccu

SEQ ID NO: 3210201 - RNA, 19 nt, Artificial Sequence
  Description of Artificial Sequence: Synthetic oligonucleotide
ucauaagaagaucucugca

SEQ ID NO: 3210202 - RNA, 19 nt, Artificial Sequence
  Description of Artificial Sequence: Synthetic oligonucleotide
gacucuaagacucuaccac

SEQ ID NO: 3210203 - RNA, 19 nt, Artificial Sequence
  Description of Artificial Sequence: Synthetic oligonucleotide
ucaauagugccucucuuac

SEQ ID NO: 3210204 - RNA, 19 nt, Artificial Sequence
  Description of Artificial Sequence: Synthetic oligonucleotide
cuaagacucuaccacagcc

SEQ ID NO: 3210205 - RNA, 19 nt, Artificial Sequence
  Description of Artificial Sequence: Synthetic oligonucleotide
aauuguccuuuccauuguc

SEQ ID NO: 3210206 - RNA, 19 nt, Artificial Sequence
  Description of Artificial Sequence: Synthetic oligonucleotide
aucaauaacuucugauguc

SEQ ID NO: 3210207 - RNA, 19 nt, Artificial Sequence
  Description of Artificial Sequence: Synthetic oligonucleotide
uccugauacaaacuccaag

SEQ ID NO: 3210208 - RNA, 19 nt, Artificial Sequence
  Description of Artificial Sequence: Synthetic oligonucleotide
cuugacgaguaaauuauac

SEQ ID NO: 3210209 - RNA, 19 nt, Artificial Sequence
  Description of Artificial Sequence: Synthetic oligonucleotide
uacuugacgaguaaauuau

SEQ ID NO: 3210210 - RNA, 19 nt, Artificial Sequence
  Description of Artificial Sequence: Synthetic oligonucleotide
aaaacugaucuucccuuug

SEQ ID NO: 3210211 - RNA, 19 nt, Artificial Sequence
  Description of Artificial Sequence: Synthetic oligonucleotide
ucaauaacuucugaugucu

SEQ ID NO: 3210212 - RNA, 19 nt, Artificial Sequence
  Description of Artificial Sequence: Synthetic oligonucleotide
uaugaucuaucaauuccug

SEQ ID NO: 3210213 - RNA, 19 nt, Artificial Sequence
  Description of Artificial Sequence: Synthetic oligonucleotide
uaucaaaaggaggacagga

SEQ ID NO: 3210214 - RNA, 19 nt, Artificial Sequence
  Description of Artificial Sequence: Synthetic oligonucleotide
ucuaccacagccugaacac

SEQ ID NO: 3210215 - RNA, 19 nt, Artificial Sequence
  Description of Artificial Sequence: Synthetic oligonucleotide
uagacaucaauaacuucug

SEQ ID NO: 3210216 - RNA, 19 nt, Artificial Sequence
  Description of Artificial Sequence: Synthetic oligonucleotide
ucuuacgugacacggcaug

SEQ ID NO: 3210217 - RNA, 19 nt, Artificial Sequence
  Description of Artificial Sequence: Synthetic oligonucleotide
ucucuuacgugacacggca

SEQ ID NO: 3210218 - RNA, 19 nt, Artificial Sequence
  Description of Artificial Sequence: Synthetic oligonucleotide
gauuaugaucuaucaauuc

SEQ ID NO: 3210219 - RNA, 19 nt, Artificial Sequence
  Description of Artificial Sequence: Synthetic oligonucleotide
ugagauuaugaucuaucaa

SEQ ID NO: 3210220 - RNA, 19 nt, Artificial Sequence
  Description of Artificial Sequence: Synthetic oligonucleotide
aacacuuguacuuggcuuu

SEQ ID NO: 3210221 - RNA, 19 nt, Artificial Sequence
  Description of Artificial Sequence: Synthetic oligonucleotide
uacaaaagaauguccagua

SEQ ID NO: 3210222 - RNA, 19 nt, Artificial Sequence
  Description of Artificial Sequence: Synthetic oligonucleotide
augagauuaugaucuauca

SEQ ID NO: 3210223 - RNA, 19 nt, Artificial Sequence
  Description of Artificial Sequence: Synthetic oligonucleotide
cuucgauauauuaucagca

SEQ ID NO: 3210224 - RNA, 19 nt, Artificial Sequence
  Description of Artificial Sequence: Synthetic oligonucleotide
agugaucaucauuuuaugu

SEQ ID NO: 3210225 - RNA, 19 nt, Artificial Sequence
  Description of Artificial Sequence: Synthetic oligonucleotide
aaacauuugauuauuccuu

SEQ ID NO: 3210226 - RNA, 19 nt, Artificial Sequence
  Description of Artificial Sequence: Synthetic oligonucleotide
ccuuagauacaaaagaaug

SEQ ID NO: 3210227 - RNA, 19 nt, Artificial Sequence
  Description of Artificial Sequence: Synthetic oligonucleotide
ccugauacaaacuccaagc

SEQ ID NO: 3210228 - RNA, 19 nt, Artificial Sequence
  Description of Artificial Sequence: Synthetic oligonucleotide
guuagcaugugcuuccggc

SEQ ID NO: 3210229 - RNA, 19 nt, Artificial Sequence
  Description of Artificial Sequence: Synthetic oligonucleotide
acaaaagaauguccaguag

SEQ ID NO: 3210230 - RNA, 19 nt, Artificial Sequence
  Description of Artificial Sequence: Synthetic oligonucleotide
aucgugacuuucuuaaucu

SEQ ID NO: 3210231 - RNA, 19 nt, Artificial Sequence
  Description of Artificial Sequence: Synthetic oligonucleotide
ucacaucuugaugaaagag

SEQ ID NO: 3210232 - RNA, 19 nt, Artificial Sequence
  Description of Artificial Sequence: Synthetic oligonucleotide
aucagaagaaacuugccua

SEQ ID NO: 3210233 - RNA, 19 nt, Artificial Sequence
  Description of Artificial Sequence: Synthetic oligonucleotide
cuuaaagaagaggugccgg

SEQ ID NO: 3210234 - RNA, 19 nt, Artificial Sequence
  Description of Artificial Sequence: Synthetic oligonucleotide
aaguaugcuggaaagccag

SEQ ID NO: 3210235 - RNA, 19 nt, Artificial Sequence
  Description of Artificial Sequence: Synthetic oligonucleotide
agauacaaaagaaugucca

SEQ ID NO: 3210236 - RNA, 19 nt, Artificial Sequence
  Description of Artificial Sequence: Synthetic oligonucleotide
acaucuacagaacuacggu

SEQ ID NO: 3210237 - RNA, 19 nt, Artificial Sequence
  Description of Artificial Sequence: Synthetic oligonucleotide
uccuuagauacaaaagaau

SEQ ID NO: 3210238 - RNA, 19 nt, Artificial Sequence
  Description of Artificial Sequence: Synthetic oligonucleotide
uaagacucuaccacagccu

SEQ ID NO: 3210239 - RNA, 19 nt, Artificial Sequence
  Description of Artificial Sequence: Synthetic oligonucleotide
auacuugacgaguaaauua

SEQ ID NO: 3210240 - RNA, 19 nt, Artificial Sequence
  Description of Artificial Sequence: Synthetic oligonucleotide
uuugaagggaucgugacuu

SEQ ID NO: 3210241 - RNA, 19 nt, Artificial Sequence
  Description of Artificial Sequence: Synthetic oligonucleotide
uugguuggcacuucauaag

SEQ ID NO: 3210242 - RNA, 19 nt, Artificial Sequence
  Description of Artificial Sequence: Synthetic oligonucleotide
aucgccaguugucugcacc

SEQ ID NO: 3210243 - RNA, 19 nt, Artificial Sequence
  Description of Artificial Sequence: Synthetic oligonucleotide
uguauacagucauuguagu

SEQ ID NO: 3210244 - RNA, 19 nt, Artificial Sequence
  Description of Artificial Sequence: Synthetic oligonucleotide
aguuugagauucacgauuc

SEQ ID NO: 3210245 - RNA, 19 nt, Artificial Sequence
  Description of Artificial Sequence: Synthetic oligonucleotide
agaagaaacuugccuacug

SEQ ID NO: 3210246 - RNA, 19 nt, Artificial Sequence
  Description of Artificial Sequence: Synthetic oligonucleotide
ucccgcaucagaucuuucg

SEQ ID NO: 3210247 - RNA, 19 nt, Artificial Sequence
  Description of Artificial Sequence: Synthetic oligonucleotide
acuacgguuucguaccauc

SEQ ID NO: 3210248 - RNA, 19 nt, Artificial Sequence
  Description of Artificial Sequence: Synthetic oligonucleotide
uuuugaagggaucgugacu

SEQ ID NO: 3210249 - RNA, 19 nt, Artificial Sequence
  Description of Artificial Sequence: Synthetic oligonucleotide
ugauugccugaguucaggg

SEQ ID NO: 3210250 - RNA, 19 nt, Artificial Sequence
  Description of Artificial Sequence: Synthetic oligonucleotide
uuagcaugugcuuccggcc

SEQ ID NO: 3210251 - RNA, 19 nt, Artificial Sequence
  Description of Artificial Sequence: Synthetic oligonucleotide
aaauaaugaucagaagaaa

SEQ ID NO: 3210252 - RNA, 19 nt, Artificial Sequence
  Description of Artificial Sequence: Synthetic oligonucleotide
cagaacuacgguuucguac

SEQ ID NO: 3210253 - RNA, 19 nt, Artificial Sequence
  Description of Artificial Sequence: Synthetic oligonucleotide
aagguaugugccaggaauc

SEQ ID NO: 3210254 - RNA, 19 nt, Artificial Sequence
  Description of Artificial Sequence: Synthetic oligonucleotide
ugucugaguggaucaaucc

SEQ ID NO: 3210255 - RNA, 19 nt, Artificial Sequence
  Description of Artificial Sequence: Synthetic oligonucleotide
aacauugaggccaucaaua

SEQ ID NO: 3210256 - RNA, 19 nt, Artificial Sequence
  Description of Artificial Sequence: Synthetic oligonucleotide
uucgauauauuaucagcaa

SEQ ID NO: 3210257 - RNA, 19 nt, Artificial Sequence
  Description of Artificial Sequence: Synthetic oligonucleotide
ugcuguuagucccaguuuc

SEQ ID NO: 3210258 - RNA, 19 nt, Artificial Sequence
  Description of Artificial Sequence: Synthetic oligonucleotide
uguuugauaauuaucaggg

SEQ ID NO: 3210259 - RNA, 19 nt, Artificial Sequence
  Description of Artificial Sequence: Synthetic oligonucleotide
uauuuuaugaaaacaauca

SEQ ID NO: 3210260 - RNA, 19 nt, Artificial Sequence
  Description of Artificial Sequence: Synthetic oligonucleotide
uucauaucuacacagacag

SEQ ID NO: 3210261 - RNA, 19 nt, Artificial Sequence
  Description of Artificial Sequence: Synthetic oligonucleotide
uguaaaacaaguacagugg

SEQ ID NO: 3210262 - RNA, 19 nt, Artificial Sequence
  Description of Artificial Sequence: Synthetic oligonucleotide
uuuuggacaguucaaaagg

SEQ ID NO: 3210263 - RNA, 19 nt, Artificial Sequence
  Description of Artificial Sequence: Synthetic oligonucleotide
uaaaacaacaacauggcca

SEQ ID NO: 3210264 - RNA, 19 nt, Artificial Sequence
  Description of Artificial Sequence: Synthetic oligonucleotide
aaaacaacaacauggccag

SEQ ID NO: 3210265 - RNA, 19 nt, Artificial Sequence
  Description of Artificial Sequence: Synthetic oligonucleotide
aaagaaauggucccaacag

SEQ ID NO: 3210266 - RNA, 19 nt, Artificial Sequence
  Description of Artificial Sequence: Synthetic oligonucleotide
aacggauuaaaacaacaac

SEQ ID NO: 3210267 - RNA, 19 nt, Artificial Sequence
  Description of Artificial Sequence: Synthetic oligonucleotide
gaaacaauuaaguucucgg

SEQ ID NO: 3210268 - RNA, 19 nt, Artificial Sequence
  Description of Artificial Sequence: Synthetic oligonucleotide
aaacaauuaaguucucggg

SEQ ID NO: 3210269 - RNA, 19 nt, Artificial Sequence
  Description of Artificial Sequence: Synthetic oligonucleotide
uauugguuuuguuagaucc

SEQ ID NO: 3210270 - RNA, 19 nt, Artificial Sequence
  Description of Artificial Sequence: Synthetic oligonucleotide
acaacuacacuuuucuacc

SEQ ID NO: 3210271 - RNA, 19 nt, Artificial Sequence
  Description of Artificial Sequence: Synthetic oligonucleotide
aauuauccgccucauaaag

SEQ ID NO: 3210272 - RNA, 19 nt, Artificial Sequence
  Description of Artificial Sequence: Synthetic oligonucleotide
ucuuauuuuggacaguuca

SEQ ID NO: 3210273 - RNA, 19 nt, Artificial Sequence
  Description of Artificial Sequence: Synthetic oligonucleotide
uuuaguaagaccauguguu

SEQ ID NO: 3210274 - RNA, 19 nt, Artificial Sequence
  Description of Artificial Sequence: Synthetic oligonucleotide
cacauuacagagcugaucg

SEQ ID NO: 3210275 - RNA, 19 nt, Artificial Sequence
  Description of Artificial Sequence: Synthetic oligonucleotide
uuauccgccucauaaagcg

SEQ ID NO: 3210276 - RNA, 19 nt, Artificial Sequence
  Description of Artificial Sequence: Synthetic oligonucleotide
aaugcauuaaauuguaguu

SEQ ID NO: 3210277 - RNA, 19 nt, Artificial Sequence
  Description of Artificial Sequence: Synthetic oligonucleotide
uaaauuugaagccaccaga

SEQ ID NO: 3210278 - RNA, 19 nt, Artificial Sequence
  Description of Artificial Sequence: Synthetic oligonucleotide
aagcgaagagcacacaagg

SEQ ID NO: 3210279 - RNA, 19 nt, Artificial Sequence
  Description of Artificial Sequence: Synthetic oligonucleotide
uuauuggucuuuauaaaug

SEQ ID NO: 3210280 - RNA, 19 nt, Artificial Sequence
  Description of Artificial Sequence: Synthetic oligonucleotide
ugaauuuaauaaauuguac

SEQ ID NO: 3210281 - RNA, 19 nt, Artificial Sequence
  Description of Artificial Sequence: Synthetic oligonucleotide
aauucucuaugccuuuugg

SEQ ID NO: 3210282 - RNA, 19 nt, Artificial Sequence
  Description of Artificial Sequence: Synthetic oligonucleotide
guguaaaacaaguacagug

SEQ ID NO: 3210283 - RNA, 19 nt, Artificial Sequence
  Description of Artificial Sequence: Synthetic oligonucleotide
uuaccuaggguauaugucc

SEQ ID NO: 3210284 - RNA, 19 nt, Artificial Sequence
  Description of Artificial Sequence: Synthetic oligonucleotide
uguguguuaaguuccauga

SEQ ID NO: 3210285 - RNA, 19 nt, Artificial Sequence
  Description of Artificial Sequence: Synthetic oligonucleotide
agauggacuaaacucuacc

SEQ ID NO: 3210286 - RNA, 19 nt, Artificial Sequence
  Description of Artificial Sequence: Synthetic oligonucleotide
uguuuguuccauuagcagc

SEQ ID NO: 3210287 - RNA, 19 nt, Artificial Sequence
  Description of Artificial Sequence: Synthetic oligonucleotide
uagaacagcaguuaaugug

SEQ ID NO: 3210288 - RNA, 19 nt, Artificial Sequence
  Description of Artificial Sequence: Synthetic oligonucleotide
aaaucuccaacacaggaaa

SEQ ID NO: 3210289 - RNA, 19 nt, Artificial Sequence
  Description of Artificial Sequence: Synthetic oligonucleotide
uccgauucagacuugagcu

SEQ ID NO: 3210290 - RNA, 19 nt, Artificial Sequence
  Description of Artificial Sequence: Synthetic oligonucleotide
cuauacuucauaucuacac

SEQ ID NO: 3210291 - RNA, 19 nt, Artificial Sequence
  Description of Artificial Sequence: Synthetic oligonucleotide
auacuucauaucuacacag

SEQ ID NO: 3210292 - RNA, 19 nt, Artificial Sequence
  Description of Artificial Sequence: Synthetic oligonucleotide
ucuguuauugguauaacuu

SEQ ID NO: 3210293 - RNA, 19 nt, Artificial Sequence
  Description of Artificial Sequence: Synthetic oligonucleotide
ucaauugguaucacaacug

SEQ ID NO: 3210294 - RNA, 19 nt, Artificial Sequence
  Description of Artificial Sequence: Synthetic oligonucleotide
aaacaaucauuucugcugu

SEQ ID NO: 3210295 - RNA, 19 nt, Artificial Sequence
  Description of Artificial Sequence: Synthetic oligonucleotide
uccaaaagggcauuuauaa

SEQ ID NO: 3210296 - RNA, 19 nt, Artificial Sequence
  Description of Artificial Sequence: Synthetic oligonucleotide
agauaaugcuauaagcacc

SEQ ID NO: 3210297 - RNA, 19 nt, Artificial Sequence
  Description of Artificial Sequence: Synthetic oligonucleotide
gagauaaugcuauaagcac

SEQ ID NO: 3210298 - RNA, 19 nt, Artificial Sequence
  Description of Artificial Sequence: Synthetic oligonucleotide
gaucucagaucauagauga

SEQ ID NO: 3210299 - RNA, 19 nt, Artificial Sequence
  Description of Artificial Sequence: Synthetic oligonucleotide
uuuauuggucuuuauaaau

SEQ ID NO: 3210300 - RNA, 19 nt, Artificial Sequence
  Description of Artificial Sequence: Synthetic oligonucleotide
uguacucugaccugaacug

SEQ ID NO: 3210301 - RNA, 19 nt, Artificial Sequence
  Description of Artificial Sequence: Synthetic oligonucleotide
ucacuaggaaacaauuaag

SEQ ID NO: 3210302 - RNA, 19 nt, Artificial Sequence
  Description of Artificial Sequence: Synthetic oligonucleotide
uuuguuagauccaagcaua

SEQ ID NO: 3210303 - RNA, 19 nt, Artificial Sequence
  Description of Artificial Sequence: Synthetic oligonucleotide
gauaaugcuauaagcaccc

SEQ ID NO: 3210304 - RNA, 19 nt, Artificial Sequence
  Description of Artificial Sequence: Synthetic oligonucleotide
caacccugcauuaacaacc

SEQ ID NO: 3210305 - RNA, 19 nt, Artificial Sequence
  Description of Artificial Sequence: Synthetic oligonucleotide
aauuugaagccaccagaag

SEQ ID NO: 3210306 - RNA, 19 nt, Artificial Sequence
  Description of Artificial Sequence: Synthetic oligonucleotide
ucuaggauaaaauggcuuc

SEQ ID NO: 3210307 - RNA, 19 nt, Artificial Sequence
  Description of Artificial Sequence: Synthetic oligonucleotide
acugauuggagauaaugcu

SEQ ID NO: 3210308 - RNA, 19 nt, Artificial Sequence
  Description of Artificial Sequence: Synthetic oligonucleotide
aaagauuuccuuuggugau

SEQ ID NO: 3210309 - RNA, 19 nt, Artificial Sequence
  Description of Artificial Sequence: Synthetic oligonucleotide
ugcaguuuuggucagaauu

SEQ ID NO: 3210310 - RNA, 19 nt, Artificial Sequence
  Description of Artificial Sequence: Synthetic oligonucleotide
uaauaaugacuugaaagug

SEQ ID NO: 3210311 - RNA, 19 nt, Artificial Sequence
  Description of Artificial Sequence: Synthetic oligonucleotide
aaaacucacucuuuucagu

SEQ ID NO: 3210312 - RNA, 19 nt, Artificial Sequence
  Description of Artificial Sequence: Synthetic oligonucleotide
ugagaaagcuuuccgauuc

SEQ ID NO: 3210313 - RNA, 19 nt, Artificial Sequence
  Description of Artificial Sequence: Synthetic oligonucleotide
uuuaagcuauuccaggaaa

SEQ ID NO: 3210314 - RNA, 19 nt, Artificial Sequence
  Description of Artificial Sequence: Synthetic oligonucleotide
acgaagaagucccauuaac

SEQ ID NO: 3210315 - RNA, 19 nt, Artificial Sequence
  Description of Artificial Sequence: Synthetic oligonucleotide
ucaguuuuauuaguuguag

SEQ ID NO: 3210316 - RNA, 19 nt, Artificial Sequence
  Description of Artificial Sequence: Synthetic oligonucleotide
cauguuacacccuugucug

SEQ ID NO: 3210317 - RNA, 19 nt, Artificial Sequence
  Description of Artificial Sequence: Synthetic oligonucleotide
uauguccugucaaacacca

SEQ ID NO: 3210318 - RNA, 19 nt, Artificial Sequence
  Description of Artificial Sequence: Synthetic oligonucleotide
auuuuaugaaaacaaucau

SEQ ID NO: 3210319 - RNA, 19 nt, Artificial Sequence
  Description of Artificial Sequence: Synthetic oligonucleotide
agcacaaaauuccuugaag

SEQ ID NO: 3210320 - RNA, 19 nt, Artificial Sequence
  Description of Artificial Sequence: Synthetic oligonucleotide
uuccgauucagacuugagc

SEQ ID NO: 3210321 - RNA, 19 nt, Artificial Sequence
  Description of Artificial Sequence: Synthetic oligonucleotide
uggacuaaacucuaccaga

SEQ ID NO: 3210322 - RNA, 19 nt, Artificial Sequence
  Description of Artificial Sequence: Synthetic oligonucleotide
ucucuaugccuuuugguug

SEQ ID NO: 3210323 - RNA, 19 nt, Artificial Sequence
  Description of Artificial Sequence: Synthetic oligonucleotide
cauagaugagcaaacuaac

SEQ ID NO: 3210324 - RNA, 19 nt, Artificial Sequence
  Description of Artificial Sequence: Synthetic oligonucleotide
auagacggcacacuguuca

SEQ ID NO: 3210325 - RNA, 19 nt, Artificial Sequence
  Description of Artificial Sequence: Synthetic oligonucleotide
aauuguaccgaguuccauu

SEQ ID NO: 3210326 - RNA, 19 nt, Artificial Sequence
  Description of Artificial Sequence: Synthetic oligonucleotide
ucaacaccaaaacucuucu

SEQ ID NO: 3210327 - RNA, 19 nt, Artificial Sequence
  Description of Artificial Sequence: Synthetic oligonucleotide
aaggcugacuucugugaac

SEQ ID NO: 3210328 - RNA, 19 nt, Artificial Sequence
  Description of Artificial Sequence: Synthetic oligonucleotide
ugaguaacucuaaaauuaa

SEQ ID NO: 3210329 - RNA, 19 nt, Artificial Sequence
  Description of Artificial Sequence: Synthetic oligonucleotide
uggauaguccacuaagcca

SEQ ID NO: 3210330 - RNA, 19 nt, Artificial Sequence
  Description of Artificial Sequence: Synthetic oligonucleotide
augaucucagaucauagau

SEQ ID NO: 3210331 - RNA, 19 nt, Artificial Sequence
  Description of Artificial Sequence: Synthetic oligonucleotide
uuuuaagcuauuccaggaa

SEQ ID NO: 3210332 - RNA, 19 nt, Artificial Sequence
  Description of Artificial Sequence: Synthetic oligonucleotide
acccauuagaacuugcuga

SEQ ID NO: 3210333 - RNA, 19 nt, Artificial Sequence
  Description of Artificial Sequence: Synthetic oligonucleotide
gaaccuguuaccuagggua

SEQ ID NO: 3210334 - RNA, 19 nt, Artificial Sequence
  Description of Artificial Sequence: Synthetic oligonucleotide
aucagggcaaauuguauug

SEQ ID NO: 3210335 - RNA, 19 nt, Artificial Sequence
  Description of Artificial Sequence: Synthetic oligonucleotide
ucugaccugaacugauugg

SEQ ID NO: 3210336 - RNA, 19 nt, Artificial Sequence
  Description of Artificial Sequence: Synthetic oligonucleotide
uacaagcaauguuauuggg

SEQ ID NO: 3210337 - RNA, 19 nt, Artificial Sequence
  Description of Artificial Sequence: Synthetic oligonucleotide
auaacagcugaauuuaaua

SEQ ID NO: 3210338 - RNA, 19 nt, Artificial Sequence
  Description of Artificial Sequence: Synthetic oligonucleotide
aaacacaagccucaaucau

SEQ ID NO: 3210339 - RNA, 19 nt, Artificial Sequence
  Description of Artificial Sequence: Synthetic oligonucleotide
uggagcuggaauuacuaug

SEQ ID NO: 3210340 - RNA, 19 nt, Artificial Sequence
  Description of Artificial Sequence: Synthetic oligonucleotide
gauggacuaaacucuacca

SEQ ID NO: 3210341 - RNA, 19 nt, Artificial Sequence
  Description of Artificial Sequence: Synthetic oligonucleotide
caugcaaugguuguagaag

SEQ ID NO: 3210342 - RNA, 19 nt, Artificial Sequence
  Description of Artificial Sequence: Synthetic oligonucleotide
aaaacuucucaucuuccuu

SEQ ID NO: 3210343 - RNA, 19 nt, Artificial Sequence
  Description of Artificial Sequence: Synthetic oligonucleotide
uaaggcauacaaaugugua

SEQ ID NO: 3210344 - RNA, 19 nt, Artificial Sequence
  Description of Artificial Sequence: Synthetic oligonucleotide
acugaugcagccaaguuug

SEQ ID NO: 3210345 - RNA, 19 nt, Artificial Sequence
  Description of Artificial Sequence: Synthetic oligonucleotide
ugguuucuuacacaacuac

SEQ ID NO: 3210346 - RNA, 19 nt, Artificial Sequence
  Description of Artificial Sequence: Synthetic oligonucleotide
ugucugagccaccacagac

SEQ ID NO: 3210347 - RNA, 19 nt, Artificial Sequence
  Description of Artificial Sequence: Synthetic oligonucleotide
uuuauuaguuguagccaac

SEQ ID NO: 3210348 - RNA, 19 nt, Artificial Sequence
  Description of Artificial Sequence: Synthetic oligonucleotide
acauuacagagcugaucgc

SEQ ID NO: 3210349 - RNA, 19 nt, Artificial Sequence
  Description of Artificial Sequence: Synthetic oligonucleotide
auggcuucuagauaguaaa

SEQ ID NO: 3210350 - RNA, 19 nt, Artificial Sequence
  Description of Artificial Sequence: Synthetic oligonucleotide
aaauuugaagccaccagaa

SEQ ID NO: 3210351 - RNA, 19 nt, Artificial Sequence
  Description of Artificial Sequence: Synthetic oligonucleotide
gaggacaugcaugcaaugg

SEQ ID NO: 3210352 - RNA, 19 nt, Artificial Sequence
  Description of Artificial Sequence: Synthetic oligonucleotide
uucucuaugccuuuugguu

SEQ ID NO: 3210353 - RNA, 19 nt, Artificial Sequence
  Description of Artificial Sequence: Synthetic oligonucleotide
auuauccgccucauaaagc

SEQ ID NO: 3210354 - RNA, 19 nt, Artificial Sequence
  Description of Artificial Sequence: Synthetic oligonucleotide
cagcacuuuaguaagacca

SEQ ID NO: 3210355 - RNA, 19 nt, Artificial Sequence
  Description of Artificial Sequence: Synthetic oligonucleotide
uuauuagguacauguuuac

SEQ ID NO: 3210356 - RNA, 19 nt, Artificial Sequence
  Description of Artificial Sequence: Synthetic oligonucleotide
aaggcgaggucuuuuccug

SEQ ID NO: 3210357 - RNA, 19 nt, Artificial Sequence
  Description of Artificial Sequence: Synthetic oligonucleotide
uguccuuuugggaagguuu

SEQ ID NO: 3210358 - RNA, 19 nt, Artificial Sequence
  Description of Artificial Sequence: Synthetic oligonucleotide
ucuaucgcaauccacaccg

SEQ ID NO: 3210359 - RNA, 19 nt, Artificial Sequence
  Description of Artificial Sequence: Synthetic oligonucleotide
aaagguagcaucuugguga

SEQ ID NO: 3210360 - RNA, 19 nt, Artificial Sequence
  Description of Artificial Sequence: Synthetic oligonucleotide
ugcuuaaagauauacaugc

SEQ ID NO: 3210361 - RNA, 19 nt, Artificial Sequence
  Description of Artificial Sequence: Synthetic oligonucleotide
aagaaucgaaccuugucac

SEQ ID NO: 3210362 - RNA, 19 nt, Artificial Sequence
  Description of Artificial Sequence: Synthetic oligonucleotide
uuaaagauauacaugcucu

SEQ ID NO: 3210363 - RNA, 19 nt, Artificial Sequence
  Description of Artificial Sequence: Synthetic oligonucleotide
aaagccugcaccuugggag

SEQ ID NO: 3210364 - RNA, 19 nt, Artificial Sequence
  Description of Artificial Sequence: Synthetic oligonucleotide
aagaaauagucuguguugc

SEQ ID NO: 3210365 - RNA, 19 nt, Artificial Sequence
  Description of Artificial Sequence: Synthetic oligonucleotide
caaauuucugaccaaagcc

SEQ ID NO: 3210366 - RNA, 19 nt, Artificial Sequence
  Description of Artificial Sequence: Synthetic oligonucleotide
ucaagaauccuuccaacag

SEQ ID NO: 3210367 - RNA, 19 nt, Artificial Sequence
  Description of Artificial Sequence: Synthetic oligonucleotide
uguccgacagugcagaggg

SEQ ID NO: 3210368 - RNA, 19 nt, Artificial Sequence
  Description of Artificial Sequence: Synthetic oligonucleotide
ucaaagaagaaucgaaccu

SEQ ID NO: 3210369 - RNA, 19 nt, Artificial Sequence
  Description of Artificial Sequence: Synthetic oligonucleotide
ugacagauuucucuggagg

SEQ ID NO: 3210370 - RNA, 19 nt, Artificial Sequence
  Description of Artificial Sequence: Synthetic oligonucleotide
aagaaauuuccuuucuugu

SEQ ID NO: 3210371 - RNA, 19 nt, Artificial Sequence
  Description of Artificial Sequence: Synthetic oligonucleotide
uuuguugacagauuucucu

SEQ ID NO: 3210372 - RNA, 19 nt, Artificial Sequence
  Description of Artificial Sequence: Synthetic oligonucleotide
aaagugagguugcuuaaag

SEQ ID NO: 3210373 - RNA, 19 nt, Artificial Sequence
  Description of Artificial Sequence: Synthetic oligonucleotide
agauauacaugcucuguac

SEQ ID NO: 3210374 - RNA, 19 nt, Artificial Sequence
  Description of Artificial Sequence: Synthetic oligonucleotide
aauccucuguugcauggcc

SEQ ID NO: 3210375 - RNA, 19 nt, Artificial Sequence
  Description of Artificial Sequence: Synthetic oligonucleotide
cucaaagaagaaucgaacc

SEQ ID NO: 3210376 - RNA, 19 nt, Artificial Sequence
  Description of Artificial Sequence: Synthetic oligonucleotide
agaaauuuccuuucuuguc

SEQ ID NO: 3210377 - RNA, 19 nt, Artificial Sequence
  Description of Artificial Sequence: Synthetic oligonucleotide
ugugucacacuccugaaga

SEQ ID NO: 3210378 - RNA, 19 nt, Artificial Sequence
  Description of Artificial Sequence: Synthetic oligonucleotide
accacuggcagcuggaggc

SEQ ID NO: 3210379 - RNA, 19 nt, Artificial Sequence
  Description of Artificial Sequence: Synthetic oligonucleotide
gaagaaucgaaccuuguca

SEQ ID NO: 3210380 - RNA, 19 nt, Artificial Sequence
  Description of Artificial Sequence: Synthetic oligonucleotide
aaaagguagcaucuuggug

SEQ ID NO: 3210381 - RNA, 19 nt, Artificial Sequence
  Description of Artificial Sequence: Synthetic oligonucleotide
ugagguugcuuaaagauau

SEQ ID NO: 3210382 - RNA, 19 nt, Artificial Sequence
  Description of Artificial Sequence: Synthetic oligonucleotide
cuuucucaaagaagaaucg

SEQ ID NO: 3210383 - RNA, 19 nt, Artificial Sequence
  Description of Artificial Sequence: Synthetic oligonucleotide
aaaacucuguccgacagug

SEQ ID NO: 3210384 - RNA, 19 nt, Artificial Sequence
  Description of Artificial Sequence: Synthetic oligonucleotide
aaauuucugaccaaagccu

SEQ ID NO: 3210385 - RNA, 19 nt, Artificial Sequence
  Description of Artificial Sequence: Synthetic oligonucleotide
cuuaaagauauacaugcuc

SEQ ID NO: 3210386 - RNA, 19 nt, Artificial Sequence
  Description of Artificial Sequence: Synthetic oligonucleotide
ucaagaaauagucuguguu

SEQ ID NO: 3210387 - RNA, 19 nt, Artificial Sequence
  Description of Artificial Sequence: Synthetic oligonucleotide
agaagaaucgaaccuuguc

SEQ ID NO: 3210388 - RNA, 19 nt, Artificial Sequence
  Description of Artificial Sequence: Synthetic oligonucleotide
gauauacaugcucuguacc

SEQ ID NO: 3210389 - RNA, 19 nt, Artificial Sequence
  Description of Artificial Sequence: Synthetic oligonucleotide
caagaaauuuccuuucuug

SEQ ID NO: 3210390 - RNA, 19 nt, Artificial Sequence
  Description of Artificial Sequence: Synthetic oligonucleotide
agggacguccaucucagcc

SEQ ID NO: 3210391 - RNA, 19 nt, Artificial Sequence
  Description of Artificial Sequence: Synthetic oligonucleotide
ugaccgauuuuguugacag

SEQ ID NO: 3210392 - RNA, 19 nt, Artificial Sequence
  Description of Artificial Sequence: Synthetic oligonucleotide
aaauagucuguguugcccu

SEQ ID NO: 3210393 - RNA, 19 nt, Artificial Sequence
  Description of Artificial Sequence: Synthetic oligonucleotide
uugcuuaaagauauacaug

SEQ ID NO: 3210394 - RNA, 19 nt, Artificial Sequence
  Description of Artificial Sequence: Synthetic oligonucleotide
aaucucaccaauccucugu

SEQ ID NO: 3210395 - RNA, 19 nt, Artificial Sequence
  Description of Artificial Sequence: Synthetic oligonucleotide
agugagguugcuuaaagau

SEQ ID NO: 3210396 - RNA, 19 nt, Artificial Sequence
  Description of Artificial Sequence: Synthetic oligonucleotide
uccucuaucgcaauccaca

SEQ ID NO: 3210397 - RNA, 19 nt, Artificial Sequence
  Description of Artificial Sequence: Synthetic oligonucleotide
agcaugaccgauuuuguug

SEQ ID NO: 3210398 - RNA, 19 nt, Artificial Sequence
  Description of Artificial Sequence: Synthetic oligonucleotide
gaagacuucaccgccaaag

SEQ ID NO: 3210399 - RNA, 19 nt, Artificial Sequence
  Description of Artificial Sequence: Synthetic oligonucleotide
aacucuguccgacagugca

SEQ ID NO: 3210400 - RNA, 19 nt, Artificial Sequence
  Description of Artificial Sequence: Synthetic oligonucleotide
uucucaaagaagaaucgaa

SEQ ID NO: 3210401 - RNA, 19 nt, Artificial Sequence
  Description of Artificial Sequence: Synthetic oligonucleotide
aagcugcucaucuuccugg

SEQ ID NO: 3210402 - RNA, 19 nt, Artificial Sequence
  Description of Artificial Sequence: Synthetic oligonucleotide
caagaaauagucuguguug

SEQ ID NO: 3210403 - RNA, 19 nt, Artificial Sequence
  Description of Artificial Sequence: Synthetic oligonucleotide
gaaugugucacacuccuga

SEQ ID NO: 3210404 - RNA, 19 nt, Artificial Sequence
  Description of Artificial Sequence: Synthetic oligonucleotide
auuuuguugacagauuucu

SEQ ID NO: 3210405 - RNA, 19 nt, Artificial Sequence
  Description of Artificial Sequence: Synthetic oligonucleotide
auacaugcucuguaccacc

SEQ ID NO: 3210406 - RNA, 19 nt, Artificial Sequence
  Description of Artificial Sequence: Synthetic oligonucleotide
gugagggaagacuucaccg

SEQ ID NO: 3210407 - RNA, 19 nt, Artificial Sequence
  Description of Artificial Sequence: Synthetic oligonucleotide
uguugacagauuucucugg

SEQ ID NO: 3210408 - RNA, 19 nt, Artificial Sequence
  Description of Artificial Sequence: Synthetic oligonucleotide
auauacaugcucuguacca

SEQ ID NO: 3210409 - RNA, 19 nt, Artificial Sequence
  Description of Artificial Sequence: Synthetic oligonucleotide
aaucgaaccuugucaccac

SEQ ID NO: 3210410 - RNA, 19 nt, Artificial Sequence
  Description of Artificial Sequence: Synthetic oligonucleotide
aaagauauacaugcucugu

SEQ ID NO: 3210411 - RNA, 19 nt, Artificial Sequence
  Description of Artificial Sequence: Synthetic oligonucleotide
agaaaagguagcaucuugg

SEQ ID NO: 3210412 - RNA, 19 nt, Artificial Sequence
  Description of Artificial Sequence: Synthetic oligonucleotide
ucugaccaaagccugcacc

SEQ ID NO: 3210413 - RNA, 19 nt, Artificial Sequence
  Description of Artificial Sequence: Synthetic oligonucleotide
uuguugacagauuucucug

SEQ ID NO: 3210414 - RNA, 19 nt, Artificial Sequence
  Description of Artificial Sequence: Synthetic oligonucleotide
aagauauacaugcucugua

SEQ ID NO: 3210415 - RNA, 19 nt, Artificial Sequence
  Description of Artificial Sequence: Synthetic oligonucleotide
gaaauagucuguguugccc

SEQ ID NO: 3210416 - RNA, 19 nt, Artificial Sequence
  Description of Artificial Sequence: Synthetic oligonucleotide
agcguagcauccucuaucg

SEQ ID NO: 3210417 - RNA, 19 nt, Artificial Sequence
  Description of Artificial Sequence: Synthetic oligonucleotide
cugcucaagaaauagucug

SEQ ID NO: 3210418 - RNA, 19 nt, Artificial Sequence
  Description of Artificial Sequence: Synthetic oligonucleotide
aaagaagaaucgaaccuug

SEQ ID NO: 3210419 - RNA, 19 nt, Artificial Sequence
  Description of Artificial Sequence: Synthetic oligonucleotide
aagguagcaucuuggugag

SEQ ID NO: 3210420 - RNA, 19 nt, Artificial Sequence
  Description of Artificial Sequence: Synthetic oligonucleotide
guugcuuaaagauauacau

SEQ ID NO: 3210421 - RNA, 19 nt, Artificial Sequence
  Description of Artificial Sequence: Synthetic oligonucleotide
uucaccgccaaagugaggu

SEQ ID NO: 3210422 - RNA, 19 nt, Artificial Sequence
  Description of Artificial Sequence: Synthetic oligonucleotide
uguaccaccacuggcagcu

SEQ ID NO: 3210423 - RNA, 19 nt, Artificial Sequence
  Description of Artificial Sequence: Synthetic oligonucleotide
cacaaucucaccaauccuc

SEQ ID NO: 3210424 - RNA, 19 nt, Artificial Sequence
  Description of Artificial Sequence: Synthetic oligonucleotide
aagacuucaccgccaaagu

SEQ ID NO: 3210425 - RNA, 19 nt, Artificial Sequence
  Description of Artificial Sequence: Synthetic oligonucleotide
agguugcuuaaagauauac

SEQ ID NO: 3210426 - RNA, 19 nt, Artificial Sequence
  Description of Artificial Sequence: Synthetic oligonucleotide
cucaccaauccucuguugc

SEQ ID NO: 3210427 - RNA, 19 nt, Artificial Sequence
  Description of Artificial Sequence: Synthetic oligonucleotide
cacugcucaagaaauaguc

SEQ ID NO: 3210428 - RNA, 19 nt, Artificial Sequence
  Description of Artificial Sequence: Synthetic oligonucleotide
gaauccuuccaacagcaga

SEQ ID NO: 3210429 - RNA, 19 nt, Artificial Sequence
  Description of Artificial Sequence: Synthetic oligonucleotide
aaauuuccuuucuugucaa

SEQ ID NO: 3210430 - RNA, 19 nt, Artificial Sequence
  Description of Artificial Sequence: Synthetic oligonucleotide
aaccuugucaccacugcuc

SEQ ID NO: 3210431 - RNA, 19 nt, Artificial Sequence
  Description of Artificial Sequence: Synthetic oligonucleotide
aagugagguugcuuaaaga

SEQ ID NO: 3210432 - RNA, 19 nt, Artificial Sequence
  Description of Artificial Sequence: Synthetic oligonucleotide
aauagucuguguugcccug

SEQ ID NO: 3210433 - RNA, 19 nt, Artificial Sequence
  Description of Artificial Sequence: Synthetic oligonucleotide
ugcucaucuuccugggugg

SEQ ID NO: 3210434 - RNA, 19 nt, Artificial Sequence
  Description of Artificial Sequence: Synthetic oligonucleotide
ggguggaaaacucuguccg

SEQ ID NO: 3210435 - RNA, 19 nt, Artificial Sequence
  Description of Artificial Sequence: Synthetic oligonucleotide
ugcucaagaaauagucugu

SEQ ID NO: 3210436 - RNA, 19 nt, Artificial Sequence
  Description of Artificial Sequence: Synthetic oligonucleotide
agcucuaagcugcucaucu

SEQ ID NO: 3210437 - RNA, 19 nt, Artificial Sequence
  Description of Artificial Sequence: Synthetic oligonucleotide
uaucgcaauccacaccgcc

SEQ ID NO: 3210438 - RNA, 19 nt, Artificial Sequence
  Description of Artificial Sequence: Synthetic oligonucleotide
uaagcugcucaucuuccug

SEQ ID NO: 3210439 - RNA, 19 nt, Artificial Sequence
  Description of Artificial Sequence: Synthetic oligonucleotide
aauccuuccaacagcagaa

SEQ ID NO: 3210440 - RNA, 19 nt, Artificial Sequence
  Description of Artificial Sequence: Synthetic oligonucleotide
gguagcaucuuggugaggg

SEQ ID NO: 3210441 - RNA, 19 nt, Artificial Sequence
  Description of Artificial Sequence: Synthetic oligonucleotide
aaaacgccuuucucaaaga

SEQ ID NO: 3210442 - RNA, 19 nt, Artificial Sequence
  Description of Artificial Sequence: Synthetic oligonucleotide
aacgccuuucucaaagaag

SEQ ID NO: 3210443 - RNA, 19 nt, Artificial Sequence
  Description of Artificial Sequence: Synthetic oligonucleotide
uuucucaaagaagaaucga

SEQ ID NO: 3210444 - RNA, 19 nt, Artificial Sequence
  Description of Artificial Sequence: Synthetic oligonucleotide
uggguggaaaacucugucc

SEQ ID NO: 3210445 - RNA, 19 nt, Artificial Sequence
  Description of Artificial Sequence: Synthetic oligonucleotide
aucucagccacaaucucac

SEQ ID NO: 3210446 - RNA, 19 nt, Artificial Sequence
  Description of Artificial Sequence: Synthetic oligonucleotide
uccguguacagaaaaggua

SEQ ID NO: 3210447 - RNA, 19 nt, Artificial Sequence
  Description of Artificial Sequence: Synthetic oligonucleotide
uugacagauuucucuggag

SEQ ID NO: 3210448 - RNA, 19 nt, Artificial Sequence
  Description of Artificial Sequence: Synthetic oligonucleotide
ucuuggugagggaagacuu

SEQ ID NO: 3210449 - RNA, 19 nt, Artificial Sequence
  Description of Artificial Sequence: Synthetic oligonucleotide
aaacgccuuucucaaagaa

SEQ ID NO: 3210450 - RNA, 19 nt, Artificial Sequence
  Description of Artificial Sequence: Synthetic oligonucleotide
guugcccugagcucuaagc

SEQ ID NO: 3210451 - RNA, 19 nt, Artificial Sequence
  Description of Artificial Sequence: Synthetic oligonucleotide
gagggaagacuucaccgcc

SEQ ID NO: 3210452 - RNA, 19 nt, Artificial Sequence
  Description of Artificial Sequence: Synthetic oligonucleotide
uugcccugagcucuaagcu

SEQ ID NO: 3210453 - RNA, 19 nt, Artificial Sequence
  Description of Artificial Sequence: Synthetic oligonucleotide
ccuuucucaaagaagaauc

SEQ ID NO: 3210454 - RNA, 19 nt, Artificial Sequence
  Description of Artificial Sequence: Synthetic oligonucleotide
ugcagagggacguccaucu

SEQ ID NO: 3210455 - RNA, 19 nt, Artificial Sequence
  Description of Artificial Sequence: Synthetic oligonucleotide
aucgcaauccacaccgccc

SEQ ID NO: 3210456 - RNA, 19 nt, Artificial Sequence
  Description of Artificial Sequence: Synthetic oligonucleotide
gaaucgaaccuugucacca

SEQ ID NO: 3210457 - RNA, 19 nt, Artificial Sequence
  Description of Artificial Sequence: Synthetic oligonucleotide
uauacaugcucuguaccac

SEQ ID NO: 3210458 - RNA, 19 nt, Artificial Sequence
  Description of Artificial Sequence: Synthetic oligonucleotide
aagaagaacaccuaaaggc

SEQ ID NO: 3210459 - RNA, 19 nt, Artificial Sequence
  Description of Artificial Sequence: Synthetic oligonucleotide
augaagaacagcuaaaggc

SEQ ID NO: 3210460 - RNA, 19 nt, Artificial Sequence
  Description of Artificial Sequence: Synthetic oligonucleotide
uaaaauaagaagaacaccu

SEQ ID NO: 3210461 - RNA, 19 nt, Artificial Sequence
  Description of Artificial Sequence: Synthetic oligonucleotide
ugauauuuaaaauaagaag

SEQ ID NO: 3210462 - RNA, 19 nt, Artificial Sequence
  Description of Artificial Sequence: Synthetic oligonucleotide
uaagauaugaagaacagcu

SEQ ID NO: 3210463 - RNA, 19 nt, Artificial Sequence
  Description of Artificial Sequence: Synthetic oligonucleotide
gauauuuaaaauaagaaga

SEQ ID NO: 3210464 - RNA, 19 nt, Artificial Sequence
  Description of Artificial Sequence: Synthetic oligonucleotide
uuuaaaauaagaagaacac

SEQ ID NO: 3210465 - RNA, 19 nt, Artificial Sequence
  Description of Artificial Sequence: Synthetic oligonucleotide
auguguaagauuuugcccc

SEQ ID NO: 3210466 - RNA, 19 nt, Artificial Sequence
  Description of Artificial Sequence: Synthetic oligonucleotide
uaagguaugaagaugaccu

SEQ ID NO: 3210467 - RNA, 19 nt, Artificial Sequence
  Description of Artificial Sequence: Synthetic oligonucleotide
aauucuuugguguacaaga

SEQ ID NO: 3210468 - RNA, 19 nt, Artificial Sequence
  Description of Artificial Sequence: Synthetic oligonucleotide
ucuuugguguacaagaagg

SEQ ID NO: 3210469 - RNA, 19 nt, Artificial Sequence
  Description of Artificial Sequence: Synthetic oligonucleotide
aauuaacaaacgcuuugcc

SEQ ID NO: 3210470 - RNA, 19 nt, Artificial Sequence
  Description of Artificial Sequence: Synthetic oligonucleotide
augaagaugaccuaaaggu

SEQ ID NO: 3210471 - RNA, 19 nt, Artificial Sequence
  Description of Artificial Sequence: Synthetic oligonucleotide
uaugaagaugaccuaaagg

SEQ ID NO: 3210472 - RNA, 19 nt, Artificial Sequence
  Description of Artificial Sequence: Synthetic oligonucleotide
ugauacuuaagauaugaag

SEQ ID NO: 3210473 - RNA, 19 nt, Artificial Sequence
  Description of Artificial Sequence: Synthetic oligonucleotide
ugcagaauaagacaugaag

SEQ ID NO: 3210474 - RNA, 19 nt, Artificial Sequence
  Description of Artificial Sequence: Synthetic oligonucleotide
aagacaugaagauuuagca

SEQ ID NO: 3210475 - RNA, 19 nt, Artificial Sequence
  Description of Artificial Sequence: Synthetic oligonucleotide
augaagauuuagcaaaggc

SEQ ID NO: 3210476 - RNA, 19 nt, Artificial Sequence
  Description of Artificial Sequence: Synthetic oligonucleotide
uaagaagaacaccuaaagg

SEQ ID NO: 3210477 - RNA, 19 nt, Artificial Sequence
  Description of Artificial Sequence: Synthetic oligonucleotide
aauucuuuggugcagaaua

SEQ ID NO: 3210478 - RNA, 19 nt, Artificial Sequence
  Description of Artificial Sequence: Synthetic oligonucleotide
ucucugaugauuccuaagg

SEQ ID NO: 3210479 - RNA, 19 nt, Artificial Sequence
  Description of Artificial Sequence: Synthetic oligonucleotide
uuaacaaacgcuuugccac

SEQ ID NO: 3210480 - RNA, 19 nt, Artificial Sequence
  Description of Artificial Sequence: Synthetic oligonucleotide
aagauuuugccccaguaug

SEQ ID NO: 3210481 - RNA, 19 nt, Artificial Sequence
  Description of Artificial Sequence: Synthetic oligonucleotide
uguacaagaaggcucgagg

SEQ ID NO: 3210482 - RNA, 19 nt, Artificial Sequence
  Description of Artificial Sequence: Synthetic oligonucleotide
aguaugaaaucucugauga

SEQ ID NO: 3210483 - RNA, 19 nt, Artificial Sequence
  Description of Artificial Sequence: Synthetic oligonucleotide
aacagcuaaaggcuuugcc

SEQ ID NO: 3210484 - RNA, 19 nt, Artificial Sequence
  Description of Artificial Sequence: Synthetic oligonucleotide
auucuuugcauuuguaugg

SEQ ID NO: 3210485 - RNA, 19 nt, Artificial Sequence
  Description of Artificial Sequence: Synthetic oligonucleotide
auaagaagaacaccuaaag

SEQ ID NO: 3210486 - RNA, 19 nt, Artificial Sequence
  Description of Artificial Sequence: Synthetic oligonucleotide
ugaagauuuagcaaaggcu

SEQ ID NO: 3210487 - RNA, 19 nt, Artificial Sequence
  Description of Artificial Sequence: Synthetic oligonucleotide
ugaagaacagcuaaaggcu

SEQ ID NO: 3210488 - RNA, 19 nt, Artificial Sequence
  Description of Artificial Sequence: Synthetic oligonucleotide
aguaugaagucucugauga

SEQ ID NO: 3210489 - RNA, 19 nt, Artificial Sequence
  Description of Artificial Sequence: Synthetic oligonucleotide
uaagacaugaagauuuagc

SEQ ID NO: 3210490 - RNA, 19 nt, Artificial Sequence
  Description of Artificial Sequence: Synthetic oligonucleotide
auuuaaaauaagaagaaca

SEQ ID NO: 3210491 - RNA, 19 nt, Artificial Sequence
  Description of Artificial Sequence: Synthetic oligonucleotide
uaugaagaacagcuaaagg

SEQ ID NO: 3210492 - RNA, 19 nt, Artificial Sequence
  Description of Artificial Sequence: Synthetic oligonucleotide
gauacuuaagauaugaaga

SEQ ID NO: 3210493 - RNA, 19 nt, Artificial Sequence
  Description of Artificial Sequence: Synthetic oligonucleotide
uuucucuccaguaugaagu

SEQ ID NO: 3210494 - RNA, 19 nt, Artificial Sequence
  Description of Artificial Sequence: Synthetic oligonucleotide
ucugaugauauuuaaaaua

SEQ ID NO: 3210495 - RNA, 19 nt, Artificial Sequence
  Description of Artificial Sequence: Synthetic oligonucleotide
auguguaugguuucucucc

SEQ ID NO: 3210496 - RNA, 19 nt, Artificial Sequence
  Description of Artificial Sequence: Synthetic oligonucleotide
agaagaacaccuaaaggcc

SEQ ID NO: 3210497 - RNA, 19 nt, Artificial Sequence
  Description of Artificial Sequence: Synthetic oligonucleotide
uuagcaaaggcuuugccac

SEQ ID NO: 3210498 - RNA, 19 nt, Artificial Sequence
  Description of Artificial Sequence: Synthetic oligonucleotide
uuaaaauaagaagaacacc

SEQ ID NO: 3210499 - RNA, 19 nt, Artificial Sequence
  Description of Artificial Sequence: Synthetic oligonucleotide
ucucugaugauauuuaaaa

SEQ ID NO: 3210500 - RNA, 19 nt, Artificial Sequence
  Description of Artificial Sequence: Synthetic oligonucleotide
gaugauauuuaaaauaaga

SEQ ID NO: 3210501 - RNA, 19 nt, Artificial Sequence
  Description of Artificial Sequence: Synthetic oligonucleotide
uccagugugaauucuuugg

SEQ ID NO: 3210502 - RNA, 19 nt, Artificial Sequence
  Description of Artificial Sequence: Synthetic oligonucleotide
aaauaagaagaacaccuaa

SEQ ID NO: 3210503 - RNA, 19 nt, Artificial Sequence
  Description of Artificial Sequence: Synthetic oligonucleotide
uuucucuccaguaugaaau

SEQ ID NO: 3210504 - RNA, 19 nt, Artificial Sequence
  Description of Artificial Sequence: Synthetic oligonucleotide
aguaugaaaucucugguga

SEQ ID NO: 3210505 - RNA, 19 nt, Artificial Sequence
  Description of Artificial Sequence: Synthetic oligonucleotide
aacaccuaaaggccuugcc

SEQ ID NO: 3210506 - RNA, 19 nt, Artificial Sequence
  Description of Artificial Sequence: Synthetic oligonucleotide
auucuuugcauguguaugg

SEQ ID NO: 3210507 - RNA, 19 nt, Artificial Sequence
  Description of Artificial Sequence: Synthetic oligonucleotide
uuuagcaaaggcuuugcca

SEQ ID NO: 3210508 - RNA, 19 nt, Artificial Sequence
  Description of Artificial Sequence: Synthetic oligonucleotide
uccuaagguaugaagauga

SEQ ID NO: 3210509 - RNA, 19 nt, Artificial Sequence
  Description of Artificial Sequence: Synthetic oligonucleotide
uaaagguuuugucacauuc

SEQ ID NO: 3210510 - RNA, 19 nt, Artificial Sequence
  Description of Artificial Sequence: Synthetic oligonucleotide
ugguguacaagaaggcucg

SEQ ID NO: 3210511 - RNA, 19 nt, Artificial Sequence
  Description of Artificial Sequence: Synthetic oligonucleotide
cuuaagauaugaagaacag

SEQ ID NO: 3210512 - RNA, 19 nt, Artificial Sequence
  Description of Artificial Sequence: Synthetic oligonucleotide
uuuggugcagaauaagaca

SEQ ID NO: 3210513 - RNA, 19 nt, Artificial Sequence
  Description of Artificial Sequence: Synthetic oligonucleotide
ugaccuaaagguuuuguca

SEQ ID NO: 3210514 - RNA, 19 nt, Artificial Sequence
  Description of Artificial Sequence: Synthetic oligonucleotide
gacaugaagauuuagcaaa

SEQ ID NO: 3210515 - RNA, 19 nt, Artificial Sequence
  Description of Artificial Sequence: Synthetic oligonucleotide
ucucuggugauacuuaaga

SEQ ID NO: 3210516 - RNA, 19 nt, Artificial Sequence
  Description of Artificial Sequence: Synthetic oligonucleotide
auuaacaaacgcuuugcca

SEQ ID NO: 3210517 - RNA, 19 nt, Artificial Sequence
  Description of Artificial Sequence: Synthetic oligonucleotide
cauucuuugcauuuguaug

SEQ ID NO: 3210518 - RNA, 19 nt, Artificial Sequence
  Description of Artificial Sequence: Synthetic oligonucleotide
uccaguaugaaaucucuga

SEQ ID NO: 3210519 - RNA, 19 nt, Artificial Sequence
  Description of Artificial Sequence: Synthetic oligonucleotide
ugaugauauuuaaaauaag

SEQ ID NO: 3210520 - RNA, 19 nt, Artificial Sequence
  Description of Artificial Sequence: Synthetic oligonucleotide
cauguguaagauuuugccc

SEQ ID NO: 3210521 - RNA, 19 nt, Artificial Sequence
  Description of Artificial Sequence: Synthetic oligonucleotide
uuuugucacauucuuugca

SEQ ID NO: 3210522 - RNA, 19 nt, Artificial Sequence
  Description of Artificial Sequence: Synthetic oligonucleotide
auguguaggguuucucucc

SEQ ID NO: 3210523 - RNA, 19 nt, Artificial Sequence
  Description of Artificial Sequence: Synthetic oligonucleotide
auuuagcaaaggcuuugcc

SEQ ID NO: 3210524 - RNA, 19 nt, Artificial Sequence
  Description of Artificial Sequence: Synthetic oligonucleotide
agugugaauucuuuggugu

SEQ ID NO: 3210525 - RNA, 19 nt, Artificial Sequence
  Description of Artificial Sequence: Synthetic oligonucleotide
ucgaggaauuaacaaacgc

SEQ ID NO: 3210526 - RNA, 19 nt, Artificial Sequence
  Description of Artificial Sequence: Synthetic oligonucleotide
agucuuugcauguguaggg

SEQ ID NO: 3210527 - RNA, 19 nt, Artificial Sequence
  Description of Artificial Sequence: Synthetic oligonucleotide
cuuuggugcagaauaagac

SEQ ID NO: 3210528 - RNA, 19 nt, Artificial Sequence
  Description of Artificial Sequence: Synthetic oligonucleotide
agauaugaagaacagcuaa

SEQ ID NO: 3210529 - RNA, 19 nt, Artificial Sequence
  Description of Artificial Sequence: Synthetic oligonucleotide
ucuuuggugcagaauaaga

SEQ ID NO: 3210530 - RNA, 19 nt, Artificial Sequence
  Description of Artificial Sequence: Synthetic oligonucleotide
auacuuaagauaugaagaa

SEQ ID NO: 3210531 - RNA, 19 nt, Artificial Sequence
  Description of Artificial Sequence: Synthetic oligonucleotide
uauuuaaaauaagaagaac

SEQ ID NO: 3210532 - RNA, 19 nt, Artificial Sequence
  Description of Artificial Sequence: Synthetic oligonucleotide
acuuaagauaugaagaaca

SEQ ID NO: 3210533 - RNA, 19 nt, Artificial Sequence
  Description of Artificial Sequence: Synthetic oligonucleotide
ugauuccuaagguaugaag

SEQ ID NO: 3210534 - RNA, 19 nt, Artificial Sequence
  Description of Artificial Sequence: Synthetic oligonucleotide
gguuuugucacauucuuug

SEQ ID NO: 3210535 - RNA, 19 nt, Artificial Sequence
  Description of Artificial Sequence: Synthetic oligonucleotide
uucuuugguguacaagaag

SEQ ID NO: 3210536 - RNA, 19 nt, Artificial Sequence
  Description of Artificial Sequence: Synthetic oligonucleotide
acagcuaaaggcuuugcca

SEQ ID NO: 3210537 - RNA, 19 nt, Artificial Sequence
  Description of Artificial Sequence: Synthetic oligonucleotide
gaauuaacaaacgcuuugc

SEQ ID NO: 3210538 - RNA, 19 nt, Artificial Sequence
  Description of Artificial Sequence: Synthetic oligonucleotide
ucuggugauacuuaagaua

SEQ ID NO: 3210539 - RNA, 19 nt, Artificial Sequence
  Description of Artificial Sequence: Synthetic oligonucleotide
augaccuaaagguuuuguc

SEQ ID NO: 3210540 - RNA, 19 nt, Artificial Sequence
  Description of Artificial Sequence: Synthetic oligonucleotide
uuuugccccaguaugaaau

SEQ ID NO: 3210541 - RNA, 19 nt, Artificial Sequence
  Description of Artificial Sequence: Synthetic oligonucleotide
uuaagauaugaagaacagc

SEQ ID NO: 3210542 - RNA, 19 nt, Artificial Sequence
  Description of Artificial Sequence: Synthetic oligonucleotide
auaugaagaacagcuaaag

SEQ ID NO: 3210543 - RNA, 19 nt, Artificial Sequence
  Description of Artificial Sequence: Synthetic oligonucleotide
gauuccuaagguaugaaga

SEQ ID NO: 3210544 - RNA, 19 nt, Artificial Sequence
  Description of Artificial Sequence: Synthetic oligonucleotide
augaaaucucuggugauac

SEQ ID NO: 3210545 - RNA, 19 nt, Artificial Sequence
  Description of Artificial Sequence: Synthetic oligonucleotide
cugaugauauuuaaaauaa

SEQ ID NO: 3210546 - RNA, 19 nt, Artificial Sequence
  Description of Artificial Sequence: Synthetic oligonucleotide
uccaguaugaagucucuga

SEQ ID NO: 3210547 - RNA, 19 nt, Artificial Sequence
  Description of Artificial Sequence: Synthetic oligonucleotide
uuggugcagaauaagacau

SEQ ID NO: 3210548 - RNA, 19 nt, Artificial Sequence
  Description of Artificial Sequence: Synthetic oligonucleotide
aauaagaagaacaccuaaa

SEQ ID NO: 3210549 - RNA, 19 nt, Artificial Sequence
  Description of Artificial Sequence: Synthetic oligonucleotide
gaccuaaagguuuugucac

SEQ ID NO: 3210550 - RNA, 19 nt, Artificial Sequence
  Description of Artificial Sequence: Synthetic oligonucleotide
uaagauuuugccccaguau

SEQ ID NO: 3210551 - RNA, 19 nt, Artificial Sequence
  Description of Artificial Sequence: Synthetic oligonucleotide
uugguguacaagaaggcuc

SEQ ID NO: 3210552 - RNA, 19 nt, Artificial Sequence
  Description of Artificial Sequence: Synthetic oligonucleotide
augaaaucucugaugauuc

SEQ ID NO: 3210553 - RNA, 19 nt, Artificial Sequence
  Description of Artificial Sequence: Synthetic oligonucleotide
augauauuuaaaauaagaa

SEQ ID NO: 3210554 - RNA, 19 nt, Artificial Sequence
  Description of Artificial Sequence: Synthetic oligonucleotide
uaugaaaucucugaugauu

SEQ ID NO: 3210555 - RNA, 19 nt, Artificial Sequence
  Description of Artificial Sequence: Synthetic oligonucleotide
auauuuaaaauaagaagaa

SEQ ID NO: 3210556 - RNA, 19 nt, Artificial Sequence
  Description of Artificial Sequence: Synthetic oligonucleotide
uuugccacagucuuugcau

SEQ ID NO: 3210557 - RNA, 19 nt, Artificial Sequence
  Description of Artificial Sequence: Synthetic oligonucleotide
ugcauguguaagauuuugc

SEQ ID NO: 3210558 - RNA, 19 nt, Artificial Sequence
  Description of Artificial Sequence: Synthetic oligonucleotide
uuuaagaugguuaugacac

SEQ ID NO: 3210559 - RNA, 19 nt, Artificial Sequence
  Description of Artificial Sequence: Synthetic oligonucleotide
gauguuuuggaauuaaucc

SEQ ID NO: 3210560 - RNA, 19 nt, Artificial Sequence
  Description of Artificial Sequence: Synthetic oligonucleotide
agugaaauggcucuuuccc

SEQ ID NO: 3210561 - RNA, 19 nt, Artificial Sequence
  Description of Artificial Sequence: Synthetic oligonucleotide
aaagcuuuuagcuacuggu

SEQ ID NO: 3210562 - RNA, 19 nt, Artificial Sequence
  Description of Artificial Sequence: Synthetic oligonucleotide
augguuaugacacauuagg

SEQ ID NO: 3210563 - RNA, 19 nt, Artificial Sequence
  Description of Artificial Sequence: Synthetic oligonucleotide
aguuuuggcagcaaaaucc

SEQ ID NO: 3210564 - RNA, 19 nt, Artificial Sequence
  Description of Artificial Sequence: Synthetic oligonucleotide
aaacaugggacucaucuag

SEQ ID NO: 3210565 - RNA, 19 nt, Artificial Sequence
  Description of Artificial Sequence: Synthetic oligonucleotide
aauccuugucaucaaaauc

SEQ ID NO: 3210566 - RNA, 19 nt, Artificial Sequence
  Description of Artificial Sequence: Synthetic oligonucleotide
augacuaaagcuuuuagcu

SEQ ID NO: 3210567 - RNA, 19 nt, Artificial Sequence
  Description of Artificial Sequence: Synthetic oligonucleotide
gauacagagcuaaacaugg

SEQ ID NO: 3210568 - RNA, 19 nt, Artificial Sequence
  Description of Artificial Sequence: Synthetic oligonucleotide
uuggaauuaauccuuguca

SEQ ID NO: 3210569 - RNA, 19 nt, Artificial Sequence
  Description of Artificial Sequence: Synthetic oligonucleotide
ugugauacagagcuaaaca

SEQ ID NO: 3210570 - RNA, 19 nt, Artificial Sequence
  Description of Artificial Sequence: Synthetic oligonucleotide
aaaaucguuccguuguuag

SEQ ID NO: 3210571 - RNA, 19 nt, Artificial Sequence
  Description of Artificial Sequence: Synthetic oligonucleotide
aauccucucagacuuaaug

SEQ ID NO: 3210572 - RNA, 19 nt, Artificial Sequence
  Description of Artificial Sequence: Synthetic oligonucleotide
uuuuauggucuucacauga

SEQ ID NO: 3210573 - RNA, 19 nt, Artificial Sequence
  Description of Artificial Sequence: Synthetic oligonucleotide
agugcugugucuuucuccc

SEQ ID NO: 3210574 - RNA, 19 nt, Artificial Sequence
  Description of Artificial Sequence: Synthetic oligonucleotide
uguaaagugauguuuugga

SEQ ID NO: 3210575 - RNA, 19 nt, Artificial Sequence
  Description of Artificial Sequence: Synthetic oligonucleotide
auccucucagacuuaaugc

SEQ ID NO: 3210576 - RNA, 19 nt, Artificial Sequence
  Description of Artificial Sequence: Synthetic oligonucleotide
auccuugucaucaaaaucg

SEQ ID NO: 3210577 - RNA, 19 nt, Artificial Sequence
  Description of Artificial Sequence: Synthetic oligonucleotide
acaaugugcagugaaaugg

SEQ ID NO: 3210578 - RNA, 19 nt, Artificial Sequence
  Description of Artificial Sequence: Synthetic oligonucleotide
aaaucguuccguuguuagc

SEQ ID NO: 3210579 - RNA, 19 nt, Artificial Sequence
  Description of Artificial Sequence: Synthetic oligonucleotide
uuuuaagaugguuaugaca

SEQ ID NO: 3210580 - RNA, 19 nt, Artificial Sequence
  Description of Artificial Sequence: Synthetic oligonucleotide
cuugucaucaaaaucguuc

SEQ ID NO: 3210581 - RNA, 19 nt, Artificial Sequence
  Description of Artificial Sequence: Synthetic oligonucleotide
agugaagucaucagggucc

SEQ ID NO: 3210582 - RNA, 19 nt, Artificial Sequence
  Description of Artificial Sequence: Synthetic oligonucleotide
ugauacagagcuaaacaug

SEQ ID NO: 3210583 - RNA, 19 nt, Artificial Sequence
  Description of Artificial Sequence: Synthetic oligonucleotide
gaugccauuguccucacug

SEQ ID NO: 3210584 - RNA, 19 nt, Artificial Sequence
  Description of Artificial Sequence: Synthetic oligonucleotide
gugaaagugaacuggcugg

SEQ ID NO: 3210585 - RNA, 19 nt, Artificial Sequence
  Description of Artificial Sequence: Synthetic oligonucleotide
ucuuagcugcucaaagucg

SEQ ID NO: 3210586 - RNA, 19 nt, Artificial Sequence
  Description of Artificial Sequence: Synthetic oligonucleotide
aagugaacuggcuggacag

SEQ ID NO: 3210587 - RNA, 19 nt, Artificial Sequence
  Description of Artificial Sequence: Synthetic oligonucleotide
ucaaagucgagcuauucac

SEQ ID NO: 3210588 - RNA, 19 nt, Artificial Sequence
  Description of Artificial Sequence: Synthetic oligonucleotide
gacuaaagcuuuuagcuac

SEQ ID NO: 3210589 - RNA, 19 nt, Artificial Sequence
  Description of Artificial Sequence: Synthetic oligonucleotide
aaagugauguuuuggaauu

SEQ ID NO: 3210590 - RNA, 19 nt, Artificial Sequence
  Description of Artificial Sequence: Synthetic oligonucleotide
ugauguuuuggaauuaauc

SEQ ID NO: 3210591 - RNA, 19 nt, Artificial Sequence
  Description of Artificial Sequence: Synthetic oligonucleotide
acacauuaggaguuuuggc

SEQ ID NO: 3210592 - RNA, 19 nt, Artificial Sequence
  Description of Artificial Sequence: Synthetic oligonucleotide
caugacuaaagcuuuuagc

SEQ ID NO: 3210593 - RNA, 19 nt, Artificial Sequence
  Description of Artificial Sequence: Synthetic oligonucleotide
uaaagcuuuuagcuacugg

SEQ ID NO: 3210594 - RNA, 19 nt, Artificial Sequence
  Description of Artificial Sequence: Synthetic oligonucleotide
uugucaucaaaaucguucc

SEQ ID NO: 3210595 - RNA, 19 nt, Artificial Sequence
  Description of Artificial Sequence: Synthetic oligonucleotide
uuuggcagcaaaauccucu

SEQ ID NO: 3210596 - RNA, 19 nt, Artificial Sequence
  Description of Artificial Sequence: Synthetic oligonucleotide
aucaaaaucguuccguugu

SEQ ID NO: 3210597 - RNA, 19 nt, Artificial Sequence
  Description of Artificial Sequence: Synthetic oligonucleotide
agugucuccaugcuguagg

SEQ ID NO: 3210598 - RNA, 19 nt, Artificial Sequence
  Description of Artificial Sequence: Synthetic oligonucleotide
acauuaggaguuuuggcag

SEQ ID NO: 3210599 - RNA, 19 nt, Artificial Sequence
  Description of Artificial Sequence: Synthetic oligonucleotide
cucacugauaugaaggcag

SEQ ID NO: 3210600 - RNA, 19 nt, Artificial Sequence
  Description of Artificial Sequence: Synthetic oligonucleotide
gaauuaauccuugucauca

SEQ ID NO: 3210601 - RNA, 19 nt, Artificial Sequence
  Description of Artificial Sequence: Synthetic oligonucleotide
uaaagugauguuuuggaau

SEQ ID NO: 3210602 - RNA, 19 nt, Artificial Sequence
  Description of Artificial Sequence: Synthetic oligonucleotide
gguuaugacacauuaggag

SEQ ID NO: 3210603 - RNA, 19 nt, Artificial Sequence
  Description of Artificial Sequence: Synthetic oligonucleotide
aaagugaacuggcuggaca

SEQ ID NO: 3210604 - RNA, 19 nt, Artificial Sequence
  Description of Artificial Sequence: Synthetic oligonucleotide
uuuggaauuaauccuuguc

SEQ ID NO: 3210605 - RNA, 19 nt, Artificial Sequence
  Description of Artificial Sequence: Synthetic oligonucleotide
gagaguugaguggagaggg

SEQ ID NO: 3210606 - RNA, 19 nt, Artificial Sequence
  Description of Artificial Sequence: Synthetic oligonucleotide
auguuuuggaauuaauccu

SEQ ID NO: 3210607 - RNA, 19 nt, Artificial Sequence
  Description of Artificial Sequence: Synthetic oligonucleotide
uacagagcuaaacauggga

SEQ ID NO: 3210608 - RNA, 19 nt, Artificial Sequence
  Description of Artificial Sequence: Synthetic oligonucleotide
agucgagcuauucacaaug

SEQ ID NO: 3210609 - RNA, 19 nt, Artificial Sequence
  Description of Artificial Sequence: Synthetic oligonucleotide
gacacauuaggaguuuugg

SEQ ID NO: 3210610 - RNA, 19 nt, Artificial Sequence
  Description of Artificial Sequence: Synthetic oligonucleotide
aaucguuccguuguuagca

SEQ ID NO: 3210611 - RNA, 19 nt, Artificial Sequence
  Description of Artificial Sequence: Synthetic oligonucleotide
uucuuagcugcucaaaguc

SEQ ID NO: 3210612 - RNA, 19 nt, Artificial Sequence
  Description of Artificial Sequence: Synthetic oligonucleotide
uuaauccuugucaucaaaa

SEQ ID NO: 3210613 - RNA, 19 nt, Artificial Sequence
  Description of Artificial Sequence: Synthetic oligonucleotide
ucuucacaugacuaaagcu

SEQ ID NO: 3210614 - RNA, 19 nt, Artificial Sequence
  Description of Artificial Sequence: Synthetic oligonucleotide
ugugcagugaaauggcucu

SEQ ID NO: 3210615 - RNA, 19 nt, Artificial Sequence
  Description of Artificial Sequence: Synthetic oligonucleotide
uuguaaagugauguuuugg

SEQ ID NO: 3210616 - RNA, 19 nt, Artificial Sequence
  Description of Artificial Sequence: Synthetic oligonucleotide
aaagucgagcuauucacaa

SEQ ID NO: 3210617 - RNA, 19 nt, Artificial Sequence
  Description of Artificial Sequence: Synthetic oligonucleotide
uguuuuggaauuaauccuu

SEQ ID NO: 3210618 - RNA, 19 nt, Artificial Sequence
  Description of Artificial Sequence: Synthetic oligonucleotide
gucuccaugcuguaggagg

SEQ ID NO: 3210619 - RNA, 19 nt, Artificial Sequence
  Description of Artificial Sequence: Synthetic oligonucleotide
cuauucacaaugugcagug

SEQ ID NO: 3210620 - RNA, 19 nt, Artificial Sequence
  Description of Artificial Sequence: Synthetic oligonucleotide
aaugccacccacugguugu

SEQ ID NO: 3210621 - RNA, 19 nt, Artificial Sequence
  Description of Artificial Sequence: Synthetic oligonucleotide
ugucaucaaaaucguuccg

SEQ ID NO: 3210622 - RNA, 19 nt, Artificial Sequence
  Description of Artificial Sequence: Synthetic oligonucleotide
auuguccucacugauauga

SEQ ID NO: 3210623 - RNA, 19 nt, Artificial Sequence
  Description of Artificial Sequence: Synthetic oligonucleotide
uuagcagucuucugugucc

SEQ ID NO: 3210624 - RNA, 19 nt, Artificial Sequence
  Description of Artificial Sequence: Synthetic oligonucleotide
uccuucccugcuuuuaugg

SEQ ID NO: 3210625 - RNA, 19 nt, Artificial Sequence
  Description of Artificial Sequence: Synthetic oligonucleotide
ugaaauggcucuuuccccu

SEQ ID NO: 3210626 - RNA, 19 nt, Artificial Sequence
  Description of Artificial Sequence: Synthetic oligonucleotide
uggaauuaauccuugucau

SEQ ID NO: 3210627 - RNA, 19 nt, Artificial Sequence
  Description of Artificial Sequence: Synthetic oligonucleotide
acagagcuaaacaugggac

SEQ ID NO: 3210628 - RNA, 19 nt, Artificial Sequence
  Description of Artificial Sequence: Synthetic oligonucleotide
ugguuaugacacauuagga

SEQ ID NO: 3210629 - RNA, 19 nt, Artificial Sequence
  Description of Artificial Sequence: Synthetic oligonucleotide
gaaggcagugucuccaugc

SEQ ID NO: 3210630 - RNA, 19 nt, Artificial Sequence
  Description of Artificial Sequence: Synthetic oligonucleotide
auaugaaggcagugucucc

SEQ ID NO: 3210631 - RNA, 19 nt, Artificial Sequence
  Description of Artificial Sequence: Synthetic oligonucleotide
cacauuaggaguuuuggca

SEQ ID NO: 3210632 - RNA, 19 nt, Artificial Sequence
  Description of Artificial Sequence: Synthetic oligonucleotide
acugguuguaaagugaugu

SEQ ID NO: 3210633 - RNA, 19 nt, Artificial Sequence
  Description of Artificial Sequence: Synthetic oligonucleotide
gacuuaaugccacccacug

SEQ ID NO: 3210634 - RNA, 19 nt, Artificial Sequence
  Description of Artificial Sequence: Synthetic oligonucleotide
ugauaugaaggcagugucu

SEQ ID NO: 3210635 - RNA, 19 nt, Artificial Sequence
  Description of Artificial Sequence: Synthetic oligonucleotide
uucuccgaugccauugucc

SEQ ID NO: 3210636 - RNA, 19 nt, Artificial Sequence
  Description of Artificial Sequence: Synthetic oligonucleotide
agagcuaaacaugggacuc

SEQ ID NO: 3210637 - RNA, 19 nt, Artificial Sequence
  Description of Artificial Sequence: Synthetic oligonucleotide
uuuauggucuucacaugac

SEQ ID NO: 3210638 - RNA, 19 nt, Artificial Sequence
  Description of Artificial Sequence: Synthetic oligonucleotide
augggacucaucuagugcu

SEQ ID NO: 3210639 - RNA, 19 nt, Artificial Sequence
  Description of Artificial Sequence: Synthetic oligonucleotide
acaugacuaaagcuuuuag

SEQ ID NO: 3210640 - RNA, 19 nt, Artificial Sequence
  Description of Artificial Sequence: Synthetic oligonucleotide
guccucacugauaugaagg

SEQ ID NO: 3210641 - RNA, 19 nt, Artificial Sequence
  Description of Artificial Sequence: Synthetic oligonucleotide
agcaaaauccucucagacu

SEQ ID NO: 3210642 - RNA, 19 nt, Artificial Sequence
  Description of Artificial Sequence: Synthetic oligonucleotide
uuauggucuucacaugacu

SEQ ID NO: 3210643 - RNA, 19 nt, Artificial Sequence
  Description of Artificial Sequence: Synthetic oligonucleotide
gaagucaucaggguccgag

SEQ ID NO: 3210644 - RNA, 19 nt, Artificial Sequence
  Description of Artificial Sequence: Synthetic oligonucleotide
caaugugcagugaaauggc

SEQ ID NO: 3210645 - RNA, 19 nt, Artificial Sequence
  Description of Artificial Sequence: Synthetic oligonucleotide
uuaugacacauuaggaguu

SEQ ID NO: 3210646 - RNA, 19 nt, Artificial Sequence
  Description of Artificial Sequence: Synthetic oligonucleotide
gauaugaaggcagugucuc

SEQ ID NO: 3210647 - RNA, 19 nt, Artificial Sequence
  Description of Artificial Sequence: Synthetic oligonucleotide
ugcuuuuauggucuucaca

SEQ ID NO: 3210648 - RNA, 19 nt, Artificial Sequence
  Description of Artificial Sequence: Synthetic oligonucleotide
uggcucuuuccccuuaucc

SEQ ID NO: 3210649 - RNA, 19 nt, Artificial Sequence
  Description of Artificial Sequence: Synthetic oligonucleotide
gaacuggcuggacagcagg

SEQ ID NO: 3210650 - RNA, 19 nt, Artificial Sequence
  Description of Artificial Sequence: Synthetic oligonucleotide
uucacaugacuaaagcuuu

SEQ ID NO: 3210651 - RNA, 19 nt, Artificial Sequence
  Description of Artificial Sequence: Synthetic oligonucleotide
auucuuagcugcucaaagu

SEQ ID NO: 3210652 - RNA, 19 nt, Artificial Sequence
  Description of Artificial Sequence: Synthetic oligonucleotide
ugucucaaggccagugaag

SEQ ID NO: 3210653 - RNA, 19 nt, Artificial Sequence
  Description of Artificial Sequence: Synthetic oligonucleotide
ucuccgaugccauuguccu

SEQ ID NO: 3210654 - RNA, 19 nt, Artificial Sequence
  Description of Artificial Sequence: Synthetic oligonucleotide
uaauccuugucaucaaaau

SEQ ID NO: 3210655 - RNA, 19 nt, Artificial Sequence
  Description of Artificial Sequence: Synthetic oligonucleotide
ucagacuuaaugccaccca

SEQ ID NO: 3210656 - RNA, 19 nt, Artificial Sequence
  Description of Artificial Sequence: Synthetic oligonucleotide
cuaaacaugggacucaucu

SEQ ID NO: 3210657 - RNA, 19 nt, Artificial Sequence
  Description of Artificial Sequence: Synthetic oligonucleotide
gucuucacaugacuaaagc

SEQ ID NO: 3210658 - RNA, 19 nt, Artificial Sequence
  Description of Artificial Sequence: Synthetic oligonucleotide
uaaaugucaaacuugguag

SEQ ID NO: 3210659 - RNA, 19 nt, Artificial Sequence
  Description of Artificial Sequence: Synthetic oligonucleotide
aaucccaauauccaguggg

SEQ ID NO: 3210660 - RNA, 19 nt, Artificial Sequence
  Description of Artificial Sequence: Synthetic oligonucleotide
augaaaacgagaaaauucc

SEQ ID NO: 3210661 - RNA, 19 nt, Artificial Sequence
  Description of Artificial Sequence: Synthetic oligonucleotide
ucuguuauuuugcagucgg

SEQ ID NO: 3210662 - RNA, 19 nt, Artificial Sequence
  Description of Artificial Sequence: Synthetic oligonucleotide
cuggauuucaucuuugucc

SEQ ID NO: 3210663 - RNA, 19 nt, Artificial Sequence
  Description of Artificial Sequence: Synthetic oligonucleotide
agggauaaguacucuaucc

SEQ ID NO: 3210664 - RNA, 19 nt, Artificial Sequence
  Description of Artificial Sequence: Synthetic oligonucleotide
aauacgaucucagagucag

SEQ ID NO: 3210665 - RNA, 19 nt, Artificial Sequence
  Description of Artificial Sequence: Synthetic oligonucleotide
uauugguggacgaaagugg

SEQ ID NO: 3210666 - RNA, 19 nt, Artificial Sequence
  Description of Artificial Sequence: Synthetic oligonucleotide
cacgaaaguacauacaaag

SEQ ID NO: 3210667 - RNA, 19 nt, Artificial Sequence
  Description of Artificial Sequence: Synthetic oligonucleotide
aaugucguggcacaggcca

SEQ ID NO: 3210668 - RNA, 19 nt, Artificial Sequence
  Description of Artificial Sequence: Synthetic oligonucleotide
uacauaaagaggcugcagc

SEQ ID NO: 3210669 - RNA, 19 nt, Artificial Sequence
  Description of Artificial Sequence: Synthetic oligonucleotide
uuugcagucggucaaacau

SEQ ID NO: 3210670 - RNA, 19 nt, Artificial Sequence
  Description of Artificial Sequence: Synthetic oligonucleotide
uuuguccucggccacaucc

SEQ ID NO: 3210671 - RNA, 19 nt, Artificial Sequence
  Description of Artificial Sequence: Synthetic oligonucleotide
acauaaagaggcugcagcg

SEQ ID NO: 3210672 - RNA, 19 nt, Artificial Sequence
  Description of Artificial Sequence: Synthetic oligonucleotide
agcucagcugcuuuguucc

SEQ ID NO: 3210673 - RNA, 19 nt, Artificial Sequence
  Description of Artificial Sequence: Synthetic oligonucleotide
agaaguggaauucauaaau

SEQ ID NO: 3210674 - RNA, 19 nt, Artificial Sequence
  Description of Artificial Sequence: Synthetic oligonucleotide
auaaaugucaaacuuggua

SEQ ID NO: 3210675 - RNA, 19 nt, Artificial Sequence
  Description of Artificial Sequence: Synthetic oligonucleotide
agaagagccaccuugcucu

SEQ ID NO: 3210676 - RNA, 19 nt, Artificial Sequence
  Description of Artificial Sequence: Synthetic oligonucleotide
uacacgaaaguacauacaa

SEQ ID NO: 3210677 - RNA, 19 nt, Artificial Sequence
  Description of Artificial Sequence: Synthetic oligonucleotide
uguacacgaaaguacauac

SEQ ID NO: 3210678 - RNA, 19 nt, Artificial Sequence
  Description of Artificial Sequence: Synthetic oligonucleotide
uggcgguacauaaagaggc

SEQ ID NO: 3210679 - RNA, 19 nt, Artificial Sequence
  Description of Artificial Sequence: Synthetic oligonucleotide
aauuccuuguacacgaaag

SEQ ID NO: 3210680 - RNA, 19 nt, Artificial Sequence
  Description of Artificial Sequence: Synthetic oligonucleotide
guagguaauucuccgauag

SEQ ID NO: 3210681 - RNA, 19 nt, Artificial Sequence
  Description of Artificial Sequence: Synthetic oligonucleotide
agagaaguggaauucauaa

SEQ ID NO: 3210682 - RNA, 19 nt, Artificial Sequence
  Description of Artificial Sequence: Synthetic oligonucleotide
gguaauagcagacagguca

SEQ ID NO: 3210683 - RNA, 19 nt, Artificial Sequence
  Description of Artificial Sequence: Synthetic oligonucleotide
ucggacuacacccagcuca

SEQ ID NO: 3210684 - RNA, 19 nt, Artificial Sequence
  Description of Artificial Sequence: Synthetic oligonucleotide
uacauugaaaccguggcgc

SEQ ID NO: 3210685 - RNA, 19 nt, Artificial Sequence
  Description of Artificial Sequence: Synthetic oligonucleotide
uucaucuuuguccucggcc

SEQ ID NO: 3210686 - RNA, 19 nt, Artificial Sequence
  Description of Artificial Sequence: Synthetic oligonucleotide
uugguaauagcagacaggu

SEQ ID NO: 3210687 - RNA, 19 nt, Artificial Sequence
  Description of Artificial Sequence: Synthetic oligonucleotide
ugcagucggucaaacaugg

SEQ ID NO: 3210688 - RNA, 19 nt, Artificial Sequence
  Description of Artificial Sequence: Synthetic oligonucleotide
aauauugguggacgaaagu

SEQ ID NO: 3210689 - RNA, 19 nt, Artificial Sequence
  Description of Artificial Sequence: Synthetic oligonucleotide
cauauugaugcucuccugc

SEQ ID NO: 3210690 - RNA, 19 nt, Artificial Sequence
  Description of Artificial Sequence: Synthetic oligonucleotide
uacgaucucagagucaggg

SEQ ID NO: 3210691 - RNA, 19 nt, Artificial Sequence
  Description of Artificial Sequence: Synthetic oligonucleotide
uacucuauccaacuuuucu

SEQ ID NO: 3210692 - RNA, 19 nt, Artificial Sequence
  Description of Artificial Sequence: Synthetic oligonucleotide
ucaaugucguggcacaggc

SEQ ID NO: 3210693 - RNA, 19 nt, Artificial Sequence
  Description of Artificial Sequence: Synthetic oligonucleotide
auucauaaaugucaaacuu

SEQ ID NO: 3210694 - RNA, 19 nt, Artificial Sequence
  Description of Artificial Sequence: Synthetic oligonucleotide
acgagcuccaacucagugc

SEQ ID NO: 3210695 - RNA, 19 nt, Artificial Sequence
  Description of Artificial Sequence: Synthetic oligonucleotide
agacaggucacaugcaguc

SEQ ID NO: 3210696 - RNA, 19 nt, Artificial Sequence
  Description of Artificial Sequence: Synthetic oligonucleotide
ugcacucucuuccaccugg

SEQ ID NO: 3210697 - RNA, 19 nt, Artificial Sequence
  Description of Artificial Sequence: Synthetic oligonucleotide
ugcacuccagaucagagaa

SEQ ID NO: 3210698 - RNA, 19 nt, Artificial Sequence
  Description of Artificial Sequence: Synthetic oligonucleotide
acuaucuccuuucgggugg

SEQ ID NO: 3210699 - RNA, 19 nt, Artificial Sequence
  Description of Artificial Sequence: Synthetic oligonucleotide
uaucuaggaagcuucguac

SEQ ID NO: 3210700 - RNA, 19 nt, Artificial Sequence
  Description of Artificial Sequence: Synthetic oligonucleotide
aguacauacaaagucgaug

SEQ ID NO: 3210701 - RNA, 19 nt, Artificial Sequence
  Description of Artificial Sequence: Synthetic oligonucleotide
uugacgagcuccaacucag

SEQ ID NO: 3210702 - RNA, 19 nt, Artificial Sequence
  Description of Artificial Sequence: Synthetic oligonucleotide
ucaucuuuguccucggcca

SEQ ID NO: 3210703 - RNA, 19 nt, Artificial Sequence
  Description of Artificial Sequence: Synthetic oligonucleotide
uuucggguggucuccaggg

SEQ ID NO: 3210704 - RNA, 19 nt, Artificial Sequence
  Description of Artificial Sequence: Synthetic oligonucleotide
aaaccagugcugcacucuc

SEQ ID NO: 3210705 - RNA, 19 nt, Artificial Sequence
  Description of Artificial Sequence: Synthetic oligonucleotide
uuugacgagcuccaacuca

SEQ ID NO: 3210706 - RNA, 19 nt, Artificial Sequence
  Description of Artificial Sequence: Synthetic oligonucleotide
gacuacacccagcucauag

SEQ ID NO: 3210707 - RNA, 19 nt, Artificial Sequence
  Description of Artificial Sequence: Synthetic oligonucleotide
auaggcuuugcugacagag

SEQ ID NO: 3210708 - RNA, 19 nt, Artificial Sequence
  Description of Artificial Sequence: Synthetic oligonucleotide
uggaauucauaaaugucaa

SEQ ID NO: 3210709 - RNA, 19 nt, Artificial Sequence
  Description of Artificial Sequence: Synthetic oligonucleotide
agggccuugacuuuggccu

SEQ ID NO: 3210710 - RNA, 19 nt, Artificial Sequence
  Description of Artificial Sequence: Synthetic oligonucleotide
acauuugacgagcuccaac

SEQ ID NO: 3210711 - RNA, 19 nt, Artificial Sequence
  Description of Artificial Sequence: Synthetic oligonucleotide
uuauuuugcagucggucaa

SEQ ID NO: 3210712 - RNA, 19 nt, Artificial Sequence
  Description of Artificial Sequence: Synthetic oligonucleotide
acauugaaaccguggcgcc

SEQ ID NO: 3210713 - RNA, 19 nt, Artificial Sequence
  Description of Artificial Sequence: Synthetic oligonucleotide
acuugguaggcccugggag

SEQ ID NO: 3210714 - RNA, 19 nt, Artificial Sequence
  Description of Artificial Sequence: Synthetic oligonucleotide
guucuuagguuguuggugc

SEQ ID NO: 3210715 - RNA, 19 nt, Artificial Sequence
  Description of Artificial Sequence: Synthetic oligonucleotide
ugaaaacgagaaaauuccu

SEQ ID NO: 3210716 - RNA, 19 nt, Artificial Sequence
  Description of Artificial Sequence: Synthetic oligonucleotide
acauacaaagucgaugaag

SEQ ID NO: 3210717 - RNA, 19 nt, Artificial Sequence
  Description of Artificial Sequence: Synthetic oligonucleotide
uguaauagcucuucaguuu

SEQ ID NO: 3210718 - RNA, 19 nt, Artificial Sequence
  Description of Artificial Sequence: Synthetic oligonucleotide
uuucggacuacacccagcu

SEQ ID NO: 3210719 - RNA, 19 nt, Artificial Sequence
  Description of Artificial Sequence: Synthetic oligonucleotide
uugaagaccacacguucca

SEQ ID NO: 3210720 - RNA, 19 nt, Artificial Sequence
  Description of Artificial Sequence: Synthetic oligonucleotide
ugacuuuggccucauacuc

SEQ ID NO: 3210721 - RNA, 19 nt, Artificial Sequence
  Description of Artificial Sequence: Synthetic oligonucleotide
agagaacaggaaccgcacc

SEQ ID NO: 3210722 - RNA, 19 nt, Artificial Sequence
  Description of Artificial Sequence: Synthetic oligonucleotide
uugugguagguaauucucc

SEQ ID NO: 3210723 - RNA, 19 nt, Artificial Sequence
  Description of Artificial Sequence: Synthetic oligonucleotide
guggaauucauaaauguca

SEQ ID NO: 3210724 - RNA, 19 nt, Artificial Sequence
  Description of Artificial Sequence: Synthetic oligonucleotide
guuauuuugcagucgguca

SEQ ID NO: 3210725 - RNA, 19 nt, Artificial Sequence
  Description of Artificial Sequence: Synthetic oligonucleotide
uucuuucaagauuuucccc

SEQ ID NO: 3210726 - RNA, 19 nt, Artificial Sequence
  Description of Artificial Sequence: Synthetic oligonucleotide
ucggcuaugccauugcgcu

SEQ ID NO: 3210727 - RNA, 19 nt, Artificial Sequence
  Description of Artificial Sequence: Synthetic oligonucleotide
ucuaggaagcuucguaccu

SEQ ID NO: 3210728 - RNA, 19 nt, Artificial Sequence
  Description of Artificial Sequence: Synthetic oligonucleotide
gauaaguacucuauccaac

SEQ ID NO: 3210729 - RNA, 19 nt, Artificial Sequence
  Description of Artificial Sequence: Synthetic oligonucleotide
cucuauccaacuuuucuug

SEQ ID NO: 3210730 - RNA, 19 nt, Artificial Sequence
  Description of Artificial Sequence: Synthetic oligonucleotide
uuguuccgguccaucaugg

SEQ ID NO: 3210731 - RNA, 19 nt, Artificial Sequence
  Description of Artificial Sequence: Synthetic oligonucleotide
ugauccaagaccguucucu

SEQ ID NO: 3210732 - RNA, 19 nt, Artificial Sequence
  Description of Artificial Sequence: Synthetic oligonucleotide
auaaagaggcugcagcggu

SEQ ID NO: 3210733 - RNA, 19 nt, Artificial Sequence
  Description of Artificial Sequence: Synthetic oligonucleotide
aaacuugguaggcccuggg

SEQ ID NO: 3210734 - RNA, 19 nt, Artificial Sequence
  Description of Artificial Sequence: Synthetic oligonucleotide
aaauuccuuguacacgaaa

SEQ ID NO: 3210735 - RNA, 19 nt, Artificial Sequence
  Description of Artificial Sequence: Synthetic oligonucleotide
aacgagaaaauuccuugua

SEQ ID NO: 3210736 - RNA, 19 nt, Artificial Sequence
  Description of Artificial Sequence: Synthetic oligonucleotide
agugggguucccuaucuag

SEQ ID NO: 3210737 - RNA, 19 nt, Artificial Sequence
  Description of Artificial Sequence: Synthetic oligonucleotide
caagauuuuccccagcuca

SEQ ID NO: 3210738 - RNA, 19 nt, Artificial Sequence
  Description of Artificial Sequence: Synthetic oligonucleotide
uguuauuuugcagucgguc

SEQ ID NO: 3210739 - RNA, 19 nt, Artificial Sequence
  Description of Artificial Sequence: Synthetic oligonucleotide
aagaccguucucuccaagu

SEQ ID NO: 3210740 - RNA, 19 nt, Artificial Sequence
  Description of Artificial Sequence: Synthetic oligonucleotide
aguucggcuaugccauugc

SEQ ID NO: 3210741 - RNA, 19 nt, Artificial Sequence
  Description of Artificial Sequence: Synthetic oligonucleotide
cuggcgguacauaaagagg

SEQ ID NO: 3210742 - RNA, 19 nt, Artificial Sequence
  Description of Artificial Sequence: Synthetic oligonucleotide
aacucagugcacuccagau

SEQ ID NO: 3210743 - RNA, 19 nt, Artificial Sequence
  Description of Artificial Sequence: Synthetic oligonucleotide
agaccguucucuccaaguc

SEQ ID NO: 3210744 - RNA, 19 nt, Artificial Sequence
  Description of Artificial Sequence: Synthetic oligonucleotide
aaccauggcaaaggccucc

SEQ ID NO: 3210745 - RNA, 19 nt, Artificial Sequence
  Description of Artificial Sequence: Synthetic oligonucleotide
cuucaugaaaacgagaaaa

SEQ ID NO: 3210746 - RNA, 19 nt, Artificial Sequence
  Description of Artificial Sequence: Synthetic oligonucleotide
uggucugagccacauggcc

SEQ ID NO: 3210747 - RNA, 19 nt, Artificial Sequence
  Description of Artificial Sequence: Synthetic oligonucleotide
uaguacaucuggaugccac

SEQ ID NO: 3210748 - RNA, 19 nt, Artificial Sequence
  Description of Artificial Sequence: Synthetic oligonucleotide
auuugacgagcuccaacuc

SEQ ID NO: 3210749 - RNA, 19 nt, Artificial Sequence
  Description of Artificial Sequence: Synthetic oligonucleotide
uguugauccaagaccguuc

SEQ ID NO: 3210750 - RNA, 19 nt, Artificial Sequence
  Description of Artificial Sequence: Synthetic oligonucleotide
aaaccguggcgccaguugu

SEQ ID NO: 3210751 - RNA, 19 nt, Artificial Sequence
  Description of Artificial Sequence: Synthetic oligonucleotide
aguucuuagguuguuggug

SEQ ID NO: 3210752 - RNA, 19 nt, Artificial Sequence
  Description of Artificial Sequence: Synthetic oligonucleotide
ucuucaugaaaacgagaaa

SEQ ID NO: 3210753 - RNA, 19 nt, Artificial Sequence
  Description of Artificial Sequence: Synthetic oligonucleotide
acauccggcacguucacca

SEQ ID NO: 3210754 - RNA, 19 nt, Artificial Sequence
  Description of Artificial Sequence: Synthetic oligonucleotide
acggccuuucaccacuccc

SEQ ID NO: 3210755 - RNA, 19 nt, Artificial Sequence
  Description of Artificial Sequence: Synthetic oligonucleotide
acucagugcacuccagauc

SEQ ID NO: 3210756 - RNA, 19 nt, Artificial Sequence
  Description of Artificial Sequence: Synthetic oligonucleotide
auauugaugcucuccugca

SEQ ID NO: 3210757 - RNA, 19 nt, Artificial Sequence
  Description of Artificial Sequence: Synthetic oligonucleotide
uugcagucggucaaacaug

SEQ ID NO: 3210758 - RNA, 19 nt, Artificial Sequence
  Description of Artificial Sequence: Synthetic oligonucleotide
aagaauucugguuugaugg

SEQ ID NO: 3210759 - RNA, 19 nt, Artificial Sequence
  Description of Artificial Sequence: Synthetic oligonucleotide
aaagaugacuucuuuaugg

SEQ ID NO: 3210760 - RNA, 19 nt, Artificial Sequence
  Description of Artificial Sequence: Synthetic oligonucleotide
aguaaaugaaacugaaccc

SEQ ID NO: 3210761 - RNA, 19 nt, Artificial Sequence
  Description of Artificial Sequence: Synthetic oligonucleotide
acagacaaaaggcugaacc

SEQ ID NO: 3210762 - RNA, 19 nt, Artificial Sequence
  Description of Artificial Sequence: Synthetic oligonucleotide
acacauuacauucauaggg

SEQ ID NO: 3210763 - RNA, 19 nt, Artificial Sequence
  Description of Artificial Sequence: Synthetic oligonucleotide
uucagcaucuucaugaagg

SEQ ID NO: 3210764 - RNA, 19 nt, Artificial Sequence
  Description of Artificial Sequence: Synthetic oligonucleotide
aauaagguuugacuggugg

SEQ ID NO: 3210765 - RNA, 19 nt, Artificial Sequence
  Description of Artificial Sequence: Synthetic oligonucleotide
caguaaaugaaacugaacc

SEQ ID NO: 3210766 - RNA, 19 nt, Artificial Sequence
  Description of Artificial Sequence: Synthetic oligonucleotide
uucuuuauggcugagaacc

SEQ ID NO: 3210767 - RNA, 19 nt, Artificial Sequence
  Description of Artificial Sequence: Synthetic oligonucleotide
aagaugacuucuuuauggc

SEQ ID NO: 3210768 - RNA, 19 nt, Artificial Sequence
  Description of Artificial Sequence: Synthetic oligonucleotide
aauccuuugagaggggucc

SEQ ID NO: 3210769 - RNA, 19 nt, Artificial Sequence
  Description of Artificial Sequence: Synthetic oligonucleotide
uuugaauuagcuugcaucu

SEQ ID NO: 3210770 - RNA, 19 nt, Artificial Sequence
  Description of Artificial Sequence: Synthetic oligonucleotide
uauagaauccuuugagagg

SEQ ID NO: 3210771 - RNA, 19 nt, Artificial Sequence
  Description of Artificial Sequence: Synthetic oligonucleotide
guauagaauccuuugagag

SEQ ID NO: 3210772 - RNA, 19 nt, Artificial Sequence
  Description of Artificial Sequence: Synthetic oligonucleotide
acucaggacauucaaaggg

SEQ ID NO: 3210773 - RNA, 19 nt, Artificial Sequence
  Description of Artificial Sequence: Synthetic oligonucleotide
auucugaguauucuacucc

SEQ ID NO: 3210774 - RNA, 19 nt, Artificial Sequence
  Description of Artificial Sequence: Synthetic oligonucleotide
auagaauccuuugagaggg

SEQ ID NO: 3210775 - RNA, 19 nt, Artificial Sequence
  Description of Artificial Sequence: Synthetic oligonucleotide
ugaggagcguacuugaagg

SEQ ID NO: 3210776 - RNA, 19 nt, Artificial Sequence
  Description of Artificial Sequence: Synthetic oligonucleotide
ucuuacacacauuacauuc

SEQ ID NO: 3210777 - RNA, 19 nt, Artificial Sequence
  Description of Artificial Sequence: Synthetic oligonucleotide
uucuacuccaucauggggc

SEQ ID NO: 3210778 - RNA, 19 nt, Artificial Sequence
  Description of Artificial Sequence: Synthetic oligonucleotide
agcacaaaggcacuggagg

SEQ ID NO: 3210779 - RNA, 19 nt, Artificial Sequence
  Description of Artificial Sequence: Synthetic oligonucleotide
cuauucguuacacucauag

SEQ ID NO: 3210780 - RNA, 19 nt, Artificial Sequence
  Description of Artificial Sequence: Synthetic oligonucleotide
gaagugguuucccaaaucc

SEQ ID NO: 3210781 - RNA, 19 nt, Artificial Sequence
  Description of Artificial Sequence: Synthetic oligonucleotide
auuacguccauguauagaa

SEQ ID NO: 3210782 - RNA, 19 nt, Artificial Sequence
  Description of Artificial Sequence: Synthetic oligonucleotide
auguauagaauccuuugag

SEQ ID NO: 3210783 - RNA, 19 nt, Artificial Sequence
  Description of Artificial Sequence: Synthetic oligonucleotide
auuagcuugcaucucaaug

SEQ ID NO: 3210784 - RNA, 19 nt, Artificial Sequence
  Description of Artificial Sequence: Synthetic oligonucleotide
uuauggcuaaugaggagcg

SEQ ID NO: 3210785 - RNA, 19 nt, Artificial Sequence
  Description of Artificial Sequence: Synthetic oligonucleotide
acacucaggacauucaaag

SEQ ID NO: 3210786 - RNA, 19 nt, Artificial Sequence
  Description of Artificial Sequence: Synthetic oligonucleotide
aacuucuugagcaaauguc

SEQ ID NO: 3210787 - RNA, 19 nt, Artificial Sequence
  Description of Artificial Sequence: Synthetic oligonucleotide
ugcacaauaagguuugacu

SEQ ID NO: 3210788 - RNA, 19 nt, Artificial Sequence
  Description of Artificial Sequence: Synthetic oligonucleotide
aaguucuuaauuuucugau

SEQ ID NO: 3210789 - RNA, 19 nt, Artificial Sequence
  Description of Artificial Sequence: Synthetic oligonucleotide
ucuggauaaacgauuuccc

SEQ ID NO: 3210790 - RNA, 19 nt, Artificial Sequence
  Description of Artificial Sequence: Synthetic oligonucleotide
uccugugugaaucuggugu

SEQ ID NO: 3210791 - RNA, 19 nt, Artificial Sequence
  Description of Artificial Sequence: Synthetic oligonucleotide
ugaauuagcuugcaucuca

SEQ ID NO: 3210792 - RNA, 19 nt, Artificial Sequence
  Description of Artificial Sequence: Synthetic oligonucleotide
ugcacuauucguuacacuc

SEQ ID NO: 3210793 - RNA, 19 nt, Artificial Sequence
  Description of Artificial Sequence: Synthetic oligonucleotide
aguaaguugcuguaguucu

SEQ ID NO: 3210794 - RNA, 19 nt, Artificial Sequence
  Description of Artificial Sequence: Synthetic oligonucleotide
uuucuuacacacauuacau

SEQ ID NO: 3210795 - RNA, 19 nt, Artificial Sequence
  Description of Artificial Sequence: Synthetic oligonucleotide
ugauguuugaugagguuug

SEQ ID NO: 3210796 - RNA, 19 nt, Artificial Sequence
  Description of Artificial Sequence: Synthetic oligonucleotide
ugagguuugccuuauggga

SEQ ID NO: 3210797 - RNA, 19 nt, Artificial Sequence
  Description of Artificial Sequence: Synthetic oligonucleotide
aaguaaguugcuguaguuc

SEQ ID NO: 3210798 - RNA, 19 nt, Artificial Sequence
  Description of Artificial Sequence: Synthetic oligonucleotide
uucuggauaaacgauuucc

SEQ ID NO: 3210799 - RNA, 19 nt, Artificial Sequence
  Description of Artificial Sequence: Synthetic oligonucleotide
uauucuacuccaucauggg

SEQ ID NO: 3210800 - RNA, 19 nt, Artificial Sequence
  Description of Artificial Sequence: Synthetic oligonucleotide
acugaaaguaaguugcugu

SEQ ID NO: 3210801 - RNA, 19 nt, Artificial Sequence
  Description of Artificial Sequence: Synthetic oligonucleotide
aguuucuaaacuucuugag

SEQ ID NO: 3210802 - RNA, 19 nt, Artificial Sequence
  Description of Artificial Sequence: Synthetic oligonucleotide
cacaauaagguuugacugg

SEQ ID NO: 3210803 - RNA, 19 nt, Artificial Sequence
  Description of Artificial Sequence: Synthetic oligonucleotide
guauucuacuccaucaugg

SEQ ID NO: 3210804 - RNA, 19 nt, Artificial Sequence
  Description of Artificial Sequence: Synthetic oligonucleotide
gauaaguugugaguucugg

SEQ ID NO: 3210805 - RNA, 19 nt, Artificial Sequence
  Description of Artificial Sequence: Synthetic oligonucleotide
gaagaauucugguuugaug

SEQ ID NO: 3210806 - RNA, 19 nt, Artificial Sequence
  Description of Artificial Sequence: Synthetic oligonucleotide
ucccauuauauucugagua

SEQ ID NO: 3210807 - RNA, 19 nt, Artificial Sequence
  Description of Artificial Sequence: Synthetic oligonucleotide
cuuauggcuaaugaggagc

SEQ ID NO: 3210808 - RNA, 19 nt, Artificial Sequence
  Description of Artificial Sequence: Synthetic oligonucleotide
uuuaaagaugacuucuuua

SEQ ID NO: 3210809 - RNA, 19 nt, Artificial Sequence
  Description of Artificial Sequence: Synthetic oligonucleotide
uugcuucagauacagaagu

SEQ ID NO: 3210810 - RNA, 19 nt, Artificial Sequence
  Description of Artificial Sequence: Synthetic oligonucleotide
cucaaugugauuucccaag

SEQ ID NO: 3210811 - RNA, 19 nt, Artificial Sequence
  Description of Artificial Sequence: Synthetic oligonucleotide
uaugaguucucauauggau

SEQ ID NO: 3210812 - RNA, 19 nt, Artificial Sequence
  Description of Artificial Sequence: Synthetic oligonucleotide
guaguuucuaaacuucuug

SEQ ID NO: 3210813 - RNA, 19 nt, Artificial Sequence
  Description of Artificial Sequence: Synthetic oligonucleotide
uugagagggguccaguugc

SEQ ID NO: 3210814 - RNA, 19 nt, Artificial Sequence
  Description of Artificial Sequence: Synthetic oligonucleotide
acaguaauuacagacaaaa

SEQ ID NO: 3210815 - RNA, 19 nt, Artificial Sequence
  Description of Artificial Sequence: Synthetic oligonucleotide
ugacuguagccucaggacc

SEQ ID NO: 3210816 - RNA, 19 nt, Artificial Sequence
  Description of Artificial Sequence: Synthetic oligonucleotide
aaucuaagagucgaucucu

SEQ ID NO: 3210817 - RNA, 19 nt, Artificial Sequence
  Description of Artificial Sequence: Synthetic oligonucleotide
uccucuuauggcuaaugag

SEQ ID NO: 3210818 - RNA, 19 nt, Artificial Sequence
  Description of Artificial Sequence: Synthetic oligonucleotide
ucugguuugaugguuuucc

SEQ ID NO: 3210819 - RNA, 19 nt, Artificial Sequence
  Description of Artificial Sequence: Synthetic oligonucleotide
ucuucaugaagguuucucu

SEQ ID NO: 3210820 - RNA, 19 nt, Artificial Sequence
  Description of Artificial Sequence: Synthetic oligonucleotide
uaaucuaagagucgaucuc

SEQ ID NO: 3210821 - RNA, 19 nt, Artificial Sequence
  Description of Artificial Sequence: Synthetic oligonucleotide
uaaguugugaguucuggau

SEQ ID NO: 3210822 - RNA, 19 nt, Artificial Sequence
  Description of Artificial Sequence: Synthetic oligonucleotide
ugagucgagacuuucugcu

SEQ ID NO: 3210823 - RNA, 19 nt, Artificial Sequence
  Description of Artificial Sequence: Synthetic oligonucleotide
acuucuuuauggcugagaa

SEQ ID NO: 3210824 - RNA, 19 nt, Artificial Sequence
  Description of Artificial Sequence: Synthetic oligonucleotide
uuugagagggguccaguug

SEQ ID NO: 3210825 - RNA, 19 nt, Artificial Sequence
  Description of Artificial Sequence: Synthetic oligonucleotide
aaccuuuccauucccauua

SEQ ID NO: 3210826 - RNA, 19 nt, Artificial Sequence
  Description of Artificial Sequence: Synthetic oligonucleotide
acaaucugacuguagccuc

SEQ ID NO: 3210827 - RNA, 19 nt, Artificial Sequence
  Description of Artificial Sequence: Synthetic oligonucleotide
ucaguaaaugaaacugaac

SEQ ID NO: 3210828 - RNA, 19 nt, Artificial Sequence
  Description of Artificial Sequence: Synthetic oligonucleotide
uucucagauguaaucuaag

SEQ ID NO: 3210829 - RNA, 19 nt, Artificial Sequence
  Description of Artificial Sequence: Synthetic oligonucleotide
uaagagucgaucucuggcu

SEQ ID NO: 3210830 - RNA, 19 nt, Artificial Sequence
  Description of Artificial Sequence: Synthetic oligonucleotide
gguacaaucugacuguagc

SEQ ID NO: 3210831 - RNA, 19 nt, Artificial Sequence
  Description of Artificial Sequence: Synthetic oligonucleotide
aguauucuacuccaucaug

SEQ ID NO: 3210832 - RNA, 19 nt, Artificial Sequence
  Description of Artificial Sequence: Synthetic oligonucleotide
cauuauauucugaguauuc

SEQ ID NO: 3210833 - RNA, 19 nt, Artificial Sequence
  Description of Artificial Sequence: Synthetic oligonucleotide
aguuacaucaguaaaugaa

SEQ ID NO: 3210834 - RNA, 19 nt, Artificial Sequence
  Description of Artificial Sequence: Synthetic oligonucleotide
ugaaaguaaguugcuguag

SEQ ID NO: 3210835 - RNA, 19 nt, Artificial Sequence
  Description of Artificial Sequence: Synthetic oligonucleotide
acaguuacaucaguaaaug

SEQ ID NO: 3210836 - RNA, 19 nt, Artificial Sequence
  Description of Artificial Sequence: Synthetic oligonucleotide
aguguaguuucuaaacuuc

SEQ ID NO: 3210837 - RNA, 19 nt, Artificial Sequence
  Description of Artificial Sequence: Synthetic oligonucleotide
aucauggggcuucucuugc

SEQ ID NO: 3210838 - RNA, 19 nt, Artificial Sequence
  Description of Artificial Sequence: Synthetic oligonucleotide
ucucacuggaagaauucug

SEQ ID NO: 3210839 - RNA, 19 nt, Artificial Sequence
  Description of Artificial Sequence: Synthetic oligonucleotide
cacacauuacauucauagg

SEQ ID NO: 3210840 - RNA, 19 nt, Artificial Sequence
  Description of Artificial Sequence: Synthetic oligonucleotide
uucugaguauucuacucca

SEQ ID NO: 3210841 - RNA, 19 nt, Artificial Sequence
  Description of Artificial Sequence: Synthetic oligonucleotide
uaaugaggagcguacuuga

SEQ ID NO: 3210842 - RNA, 19 nt, Artificial Sequence
  Description of Artificial Sequence: Synthetic oligonucleotide
auuauauucugaguauucu

SEQ ID NO: 3210843 - RNA, 19 nt, Artificial Sequence
  Description of Artificial Sequence: Synthetic oligonucleotide
cuggcugaaagucuucccg

SEQ ID NO: 3210844 - RNA, 19 nt, Artificial Sequence
  Description of Artificial Sequence: Synthetic oligonucleotide
ugggagaagguuuucuuac

SEQ ID NO: 3210845 - RNA, 19 nt, Artificial Sequence
  Description of Artificial Sequence: Synthetic oligonucleotide
ucagauacagaagugguuu

SEQ ID NO: 3210846 - RNA, 19 nt, Artificial Sequence
  Description of Artificial Sequence: Synthetic oligonucleotide
aaaguaaguugcuguaguu

SEQ ID NO: 3210847 - RNA, 19 nt, Artificial Sequence
  Description of Artificial Sequence: Synthetic oligonucleotide
ucaaugugauuucccaagu

SEQ ID NO: 3210848 - RNA, 19 nt, Artificial Sequence
  Description of Artificial Sequence: Synthetic oligonucleotide
acugagucgagacuuucug

SEQ ID NO: 3210849 - RNA, 19 nt, Artificial Sequence
  Description of Artificial Sequence: Synthetic oligonucleotide
uggguaaaugcuuuuccac

SEQ ID NO: 3210850 - RNA, 19 nt, Artificial Sequence
  Description of Artificial Sequence: Synthetic oligonucleotide
uucccaaguuccuucagca

SEQ ID NO: 3210851 - RNA, 19 nt, Artificial Sequence
  Description of Artificial Sequence: Synthetic oligonucleotide
uacaaucugacuguagccu

SEQ ID NO: 3210852 - RNA, 19 nt, Artificial Sequence
  Description of Artificial Sequence: Synthetic oligonucleotide
auauucugaguauucuacu

SEQ ID NO: 3210853 - RNA, 19 nt, Artificial Sequence
  Description of Artificial Sequence: Synthetic oligonucleotide
acaaaggcacuggaggggc

SEQ ID NO: 3210854 - RNA, 19 nt, Artificial Sequence
  Description of Artificial Sequence: Synthetic oligonucleotide
acguccauguauagaaucc

SEQ ID NO: 3210855 - RNA, 19 nt, Artificial Sequence
  Description of Artificial Sequence: Synthetic oligonucleotide
uguaaucuaagagucgauc

SEQ ID NO: 3210856 - RNA, 19 nt, Artificial Sequence
  Description of Artificial Sequence: Synthetic oligonucleotide
augaggagcguacuugaag

SEQ ID NO: 3210857 - RNA, 19 nt, Artificial Sequence
  Description of Artificial Sequence: Synthetic oligonucleotide
aggacauucaaaggguuuc

SEQ ID NO: 3210858 - RNA, 19 nt, Artificial Sequence
  Description of Artificial Sequence: Synthetic oligonucleotide
aacagaauggagcccacgc

SEQ ID NO: 3210859 - RNA, 19 nt, Artificial Sequence
  Description of Artificial Sequence: Synthetic oligonucleotide
aucacgagcucguugaucc

SEQ ID NO: 3210860 - RNA, 19 nt, Artificial Sequence
  Description of Artificial Sequence: Synthetic oligonucleotide
gauccuaacagcuucgucc

SEQ ID NO: 3210861 - RNA, 19 nt, Artificial Sequence
  Description of Artificial Sequence: Synthetic oligonucleotide
agagcaaacagaauggagc

SEQ ID NO: 3210862 - RNA, 19 nt, Artificial Sequence
  Description of Artificial Sequence: Synthetic oligonucleotide
cacaagagcaaacagaaug

SEQ ID NO: 3210863 - RNA, 19 nt, Artificial Sequence
  Description of Artificial Sequence: Synthetic oligonucleotide
aacagcuucgucccugcgc

SEQ ID NO: 3210864 - RNA, 19 nt, Artificial Sequence
  Description of Artificial Sequence: Synthetic oligonucleotide
acagcuucgucccugcgcc

SEQ ID NO: 3210865 - RNA, 19 nt, Artificial Sequence
  Description of Artificial Sequence: Synthetic oligonucleotide
aacugcagccaguucuucc

SEQ ID NO: 3210866 - RNA, 19 nt, Artificial Sequence
  Description of Artificial Sequence: Synthetic oligonucleotide
auccuaacagcuucguccc

SEQ ID NO: 3210867 - RNA, 19 nt, Artificial Sequence
  Description of Artificial Sequence: Synthetic oligonucleotide
agcucguugauccuaacag

SEQ ID NO: 3210868 - RNA, 19 nt, Artificial Sequence
  Description of Artificial Sequence: Synthetic oligonucleotide
uucaggguagccaucacga

SEQ ID NO: 3210869 - RNA, 19 nt, Artificial Sequence
  Description of Artificial Sequence: Synthetic oligonucleotide
gagcaaacagaauggagcc

SEQ ID NO: 3210870 - RNA, 19 nt, Artificial Sequence
  Description of Artificial Sequence: Synthetic oligonucleotide
acagaauggagcccacgcc

SEQ ID NO: 3210871 - RNA, 19 nt, Artificial Sequence
  Description of Artificial Sequence: Synthetic oligonucleotide
acaagagcaaacagaaugg

SEQ ID NO: 3210872 - RNA, 19 nt, Artificial Sequence
  Description of Artificial Sequence: Synthetic oligonucleotide
ucuccugcagcauugccug

SEQ ID NO: 3210873 - RNA, 19 nt, Artificial Sequence
  Description of Artificial Sequence: Synthetic oligonucleotide
aagagcaaacagaauggag

SEQ ID NO: 3210874 - RNA, 19 nt, Artificial Sequence
  Description of Artificial Sequence: Synthetic oligonucleotide
aauggagcccacgccagcg

SEQ ID NO: 3210875 - RNA, 19 nt, Artificial Sequence
  Description of Artificial Sequence: Synthetic oligonucleotide
ucucccgggaccacaagag

SEQ ID NO: 3210876 - RNA, 19 nt, Artificial Sequence
  Description of Artificial Sequence: Synthetic oligonucleotide
guuaacugcagccaguucu

SEQ ID NO: 3210877 - RNA, 19 nt, Artificial Sequence
  Description of Artificial Sequence: Synthetic oligonucleotide
gucacguucuccuccgugg

SEQ ID NO: 3210878 - RNA, 19 nt, Artificial Sequence
  Description of Artificial Sequence: Synthetic oligonucleotide
cuucaggguagccaucacg

SEQ ID NO: 3210879 - RNA, 19 nt, Artificial Sequence
  Description of Artificial Sequence: Synthetic oligonucleotide
aaacagaauggagcccacg

SEQ ID NO: 3210880 - RNA, 19 nt, Artificial Sequence
  Description of Artificial Sequence: Synthetic oligonucleotide
ugucacgcugaccugccgc

SEQ ID NO: 3210881 - RNA, 19 nt, Artificial Sequence
  Description of Artificial Sequence: Synthetic oligonucleotide
ucccgggaccacaagagca

SEQ ID NO: 3210882 - RNA, 19 nt, Artificial Sequence
  Description of Artificial Sequence: Synthetic oligonucleotide
agcauugccugcuucugug

SEQ ID NO: 3210883 - RNA, 19 nt, Artificial Sequence
  Description of Artificial Sequence: Synthetic oligonucleotide
accacaagagcaaacagaa

SEQ ID NO: 3210884 - RNA, 19 nt, Artificial Sequence
  Description of Artificial Sequence: Synthetic oligonucleotide
agcaaacagaauggagccc

SEQ ID NO: 3210885 - RNA, 19 nt, Artificial Sequence
  Description of Artificial Sequence: Synthetic oligonucleotide
acugcagccaguucuuccu

SEQ ID NO: 3210886 - RNA, 19 nt, Artificial Sequence
  Description of Artificial Sequence: Synthetic oligonucleotide
aguucuuccuccaggucac

SEQ ID NO: 3210887 - RNA, 19 nt, Artificial Sequence
  Description of Artificial Sequence: Synthetic oligonucleotide
agccaguucuuccuccagg

SEQ ID NO: 3210888 - RNA, 19 nt, Artificial Sequence
  Description of Artificial Sequence: Synthetic oligonucleotide
uccggcaucuccugcagca

SEQ ID NO: 3210889 - RNA, 19 nt, Artificial Sequence
  Description of Artificial Sequence: Synthetic oligonucleotide
caggguagccaucacgagc

SEQ ID NO: 3210890 - RNA, 19 nt, Artificial Sequence
  Description of Artificial Sequence: Synthetic oligonucleotide
uuaacugcagccaguucuu

SEQ ID NO: 3210891 - RNA, 19 nt, Artificial Sequence
  Description of Artificial Sequence: Synthetic oligonucleotide
guugauccuaacagcuucg

SEQ ID NO: 3210892 - RNA, 19 nt, Artificial Sequence
  Description of Artificial Sequence: Synthetic oligonucleotide
ugcuucugugcuucucccg

SEQ ID NO: 3210893 - RNA, 19 nt, Artificial Sequence
  Description of Artificial Sequence: Synthetic oligonucleotide
ugcagcauugccugcuucu

SEQ ID NO: 3210894 - RNA, 19 nt, Artificial Sequence
  Description of Artificial Sequence: Synthetic oligonucleotide
uucucccgggaccacaaga

SEQ ID NO: 3210895 - RNA, 19 nt, Artificial Sequence
  Description of Artificial Sequence: Synthetic oligonucleotide
uucuucaggguagccauca

SEQ ID NO: 3210896 - RNA, 19 nt, Artificial Sequence
  Description of Artificial Sequence: Synthetic oligonucleotide
ucacguucuccuccguggc

SEQ ID NO: 3210897 - RNA, 19 nt, Artificial Sequence
  Description of Artificial Sequence: Synthetic oligonucleotide
cuaacagcuucgucccugc

SEQ ID NO: 3210898 - RNA, 19 nt, Artificial Sequence
  Description of Artificial Sequence: Synthetic oligonucleotide
gaccacaagagcaaacaga

SEQ ID NO: 3210899 - RNA, 19 nt, Artificial Sequence
  Description of Artificial Sequence: Synthetic oligonucleotide
ugugcuucucccgggacca

SEQ ID NO: 3210900 - RNA, 19 nt, Artificial Sequence
  Description of Artificial Sequence: Synthetic oligonucleotide
ucaggguagccaucacgag

SEQ ID NO: 3210901 - RNA, 19 nt, Artificial Sequence
  Description of Artificial Sequence: Synthetic oligonucleotide
caguucuuccuccagguca

SEQ ID NO: 3210902 - RNA, 19 nt, Artificial Sequence
  Description of Artificial Sequence: Synthetic oligonucleotide
aggguagccaucacgagcu

SEQ ID NO: 3210903 - RNA, 19 nt, Artificial Sequence
  Description of Artificial Sequence: Synthetic oligonucleotide
gcuucugugcuucucccgg

SEQ ID NO: 3210904 - RNA, 19 nt, Artificial Sequence
  Description of Artificial Sequence: Synthetic oligonucleotide
ugauccuaacagcuucguc

SEQ ID NO: 3210905 - RNA, 19 nt, Artificial Sequence
  Description of Artificial Sequence: Synthetic oligonucleotide
acugcgaccgcggccaccg

SEQ ID NO: 3210906 - RNA, 19 nt, Artificial Sequence
  Description of Artificial Sequence: Synthetic oligonucleotide
uccguuaacugcagccagu

SEQ ID NO: 3210907 - RNA, 19 nt, Artificial Sequence
  Description of Artificial Sequence: Synthetic oligonucleotide
cagaauggagcccacgcca

SEQ ID NO: 3210908 - RNA, 19 nt, Artificial Sequence
  Description of Artificial Sequence: Synthetic oligonucleotide
auggagcccacgccagcgc

SEQ ID NO: 3210909 - RNA, 19 nt, Artificial Sequence
  Description of Artificial Sequence: Synthetic oligonucleotide
acguucuccuccguggccg

SEQ ID NO: 3210910 - RNA, 19 nt, Artificial Sequence
  Description of Artificial Sequence: Synthetic oligonucleotide
uaacagcuucgucccugcg

SEQ ID NO: 3210911 - RNA, 19 nt, Artificial Sequence
  Description of Artificial Sequence: Synthetic oligonucleotide
ugcagccaguucuuccucc

SEQ ID NO: 3210912 - RNA, 19 nt, Artificial Sequence
  Description of Artificial Sequence: Synthetic oligonucleotide
caggucacguucuccuccg

SEQ ID NO: 3210913 - RNA, 19 nt, Artificial Sequence
  Description of Artificial Sequence: Synthetic oligonucleotide
cuuccuccaggucacguuc

SEQ ID NO: 3210914 - RNA, 19 nt, Artificial Sequence
  Description of Artificial Sequence: Synthetic oligonucleotide
uucugugcuucucccggga

SEQ ID NO: 3210915 - RNA, 19 nt, Artificial Sequence
  Description of Artificial Sequence: Synthetic oligonucleotide
cuucugugcuucucccggg

SEQ ID NO: 3210916 - RNA, 19 nt, Artificial Sequence
  Description of Artificial Sequence: Synthetic oligonucleotide
cuccguuaacugcagccag

SEQ ID NO: 3210917 - RNA, 19 nt, Artificial Sequence
  Description of Artificial Sequence: Synthetic oligonucleotide
ucccguuccggcaucuccu

SEQ ID NO: 3210918 - RNA, 19 nt, Artificial Sequence
  Description of Artificial Sequence: Synthetic oligonucleotide
ugcugucacgcugaccugc

SEQ ID NO: 3210919 - RNA, 19 nt, Artificial Sequence
  Description of Artificial Sequence: Synthetic oligonucleotide
cugugcuucucccgggacc

SEQ ID NO: 3210920 - RNA, 19 nt, Artificial Sequence
  Description of Artificial Sequence: Synthetic oligonucleotide
cucguugauccuaacagcu

SEQ ID NO: 3210921 - RNA, 19 nt, Artificial Sequence
  Description of Artificial Sequence: Synthetic oligonucleotide
gagcucguugauccuaaca

SEQ ID NO: 3210922 - RNA, 19 nt, Artificial Sequence
  Description of Artificial Sequence: Synthetic oligonucleotide
gaauggagcccacgccagc

SEQ ID NO: 3210923 - RNA, 19 nt, Artificial Sequence
  Description of Artificial Sequence: Synthetic oligonucleotide
ggaccacaagagcaaacag

SEQ ID NO: 3210924 - RNA, 19 nt, Artificial Sequence
  Description of Artificial Sequence: Synthetic oligonucleotide
uggagcccacgccagcgcc

SEQ ID NO: 3210925 - RNA, 19 nt, Artificial Sequence
  Description of Artificial Sequence: Synthetic oligonucleotide
agcuucgucccugcgccgc

SEQ ID NO: 3210926 - RNA, 19 nt, Artificial Sequence
  Description of Artificial Sequence: Synthetic oligonucleotide
agcacugcgaccgcggcca

SEQ ID NO: 3210927 - RNA, 19 nt, Artificial Sequence
  Description of Artificial Sequence: Synthetic oligonucleotide
cugcuucugugcuucuccc

SEQ ID NO: 3210928 - RNA, 19 nt, Artificial Sequence
  Description of Artificial Sequence: Synthetic oligonucleotide
ugaccugccgccuccguua

SEQ ID NO: 3210929 - RNA, 19 nt, Artificial Sequence
  Description of Artificial Sequence: Synthetic oligonucleotide
ucugugcuucucccgggac

SEQ ID NO: 3210930 - RNA, 19 nt, Artificial Sequence
  Description of Artificial Sequence: Synthetic oligonucleotide
aucuccugcagcauugccu

SEQ ID NO: 3210931 - RNA, 19 nt, Artificial Sequence
  Description of Artificial Sequence: Synthetic oligonucleotide
agaauggagcccacgccag

SEQ ID NO: 3210932 - RNA, 19 nt, Artificial Sequence
  Description of Artificial Sequence: Synthetic oligonucleotide
gucacgcugaccugccgcc

SEQ ID NO: 3210933 - RNA, 19 nt, Artificial Sequence
  Description of Artificial Sequence: Synthetic oligonucleotide
acgcugaccugccgccucc

SEQ ID NO: 3210934 - RNA, 19 nt, Artificial Sequence
  Description of Artificial Sequence: Synthetic oligonucleotide
ucguugauccuaacagcuu

SEQ ID NO: 3210935 - RNA, 19 nt, Artificial Sequence
  Description of Artificial Sequence: Synthetic oligonucleotide
cuuucuucaggguagccau

SEQ ID NO: 3210936 - RNA, 19 nt, Artificial Sequence
  Description of Artificial Sequence: Synthetic oligonucleotide
gcucguugauccuaacagc

SEQ ID NO: 3210937 - RNA, 19 nt, Artificial Sequence
  Description of Artificial Sequence: Synthetic oligonucleotide
uuucuucaggguagccauc

SEQ ID NO: 3210938 - RNA, 19 nt, Artificial Sequence
  Description of Artificial Sequence: Synthetic oligonucleotide
agccaucacgagcucguug

SEQ ID NO: 3210939 - RNA, 19 nt, Artificial Sequence
  Description of Artificial Sequence: Synthetic oligonucleotide
ucuuccuccaggucacguu

SEQ ID NO: 3210940 - RNA, 19 nt, Artificial Sequence
  Description of Artificial Sequence: Synthetic oligonucleotide
caaacagaauggagcccac

SEQ ID NO: 3210941 - RNA, 19 nt, Artificial Sequence
  Description of Artificial Sequence: Synthetic oligonucleotide
gcaaacagaauggagccca

SEQ ID NO: 3210942 - RNA, 19 nt, Artificial Sequence
  Description of Artificial Sequence: Synthetic oligonucleotide
uugauccuaacagcuucgu

SEQ ID NO: 3210943 - RNA, 19 nt, Artificial Sequence
  Description of Artificial Sequence: Synthetic oligonucleotide
gagcccugcugucacgcug

SEQ ID NO: 3210944 - RNA, 19 nt, Artificial Sequence
  Description of Artificial Sequence: Synthetic oligonucleotide
guggccgccgcuuucuuca

SEQ ID NO: 3210945 - RNA, 19 nt, Artificial Sequence
  Description of Artificial Sequence: Synthetic oligonucleotide
gccuccguuaacugcagcc

SEQ ID NO: 3210946 - RNA, 19 nt, Artificial Sequence
  Description of Artificial Sequence: Synthetic oligonucleotide
ucuucaggguagccaucac

SEQ ID NO: 3210947 - RNA, 19 nt, Artificial Sequence
  Description of Artificial Sequence: Synthetic oligonucleotide
uuccuccaggucacguucu

SEQ ID NO: 3210948 - RNA, 19 nt, Artificial Sequence
  Description of Artificial Sequence: Synthetic oligonucleotide
ugccgccuccguuaacugc

SEQ ID NO: 3210949 - RNA, 19 nt, Artificial Sequence
  Description of Artificial Sequence: Synthetic oligonucleotide
caucuccugcagcauugcc

SEQ ID NO: 3210950 - RNA, 19 nt, Artificial Sequence
  Description of Artificial Sequence: Synthetic oligonucleotide
uucuccuccguggccgccg

SEQ ID NO: 3210951 - RNA, 19 nt, Artificial Sequence
  Description of Artificial Sequence: Synthetic oligonucleotide
gccaucacgagcucguuga

SEQ ID NO: 3210952 - RNA, 19 nt, Artificial Sequence
  Description of Artificial Sequence: Synthetic oligonucleotide
guuccggcaucuccugcag

SEQ ID NO: 3210953 - RNA, 19 nt, Artificial Sequence
  Description of Artificial Sequence: Synthetic oligonucleotide
gcggccaccgcuuuacgag

SEQ ID NO: 3210954 - RNA, 19 nt, Artificial Sequence
  Description of Artificial Sequence: Synthetic oligonucleotide
uucgucccugcgccgcggg

SEQ ID NO: 3210955 - RNA, 19 nt, Artificial Sequence
  Description of Artificial Sequence: Synthetic oligonucleotide
gucccguuccggcaucucc

SEQ ID NO: 3210956 - RNA, 19 nt, Artificial Sequence
  Description of Artificial Sequence: Synthetic oligonucleotide
accgcggccaccgcuuuac

SEQ ID NO: 3210957 - RNA, 19 nt, Artificial Sequence
  Description of Artificial Sequence: Synthetic oligonucleotide
gguagccaucacgagcucg

SEQ ID NO: 3210958 - RNA, 19 nt, Artificial Sequence
  Description of Artificial Sequence: Synthetic oligonucleotide
gagagaauggguuugaucc

SEQ ID NO: 3210959 - RNA, 19 nt, Artificial Sequence
  Description of Artificial Sequence: Synthetic oligonucleotide
aacagauuuaacuguagag

SEQ ID NO: 3210960 - RNA, 19 nt, Artificial Sequence
  Description of Artificial Sequence: Synthetic oligonucleotide
acuuaaacagauuuaacug

SEQ ID NO: 3210961 - RNA, 19 nt, Artificial Sequence
  Description of Artificial Sequence: Synthetic oligonucleotide
gaucccucaagacagagag

SEQ ID NO: 3210962 - RNA, 19 nt, Artificial Sequence
  Description of Artificial Sequence: Synthetic oligonucleotide
gaugucuaaauaugugugg

SEQ ID NO: 3210963 - RNA, 19 nt, Artificial Sequence
  Description of Artificial Sequence: Synthetic oligonucleotide
auauguguggcucccaugg

SEQ ID NO: 3210964 - RNA, 19 nt, Artificial Sequence
  Description of Artificial Sequence: Synthetic oligonucleotide
uggaucuucacuuggaugu

SEQ ID NO: 3210965 - RNA, 19 nt, Artificial Sequence
  Description of Artificial Sequence: Synthetic oligonucleotide
ucucuucuggagcacaugg

SEQ ID NO: 3210966 - RNA, 19 nt, Artificial Sequence
  Description of Artificial Sequence: Synthetic oligonucleotide
acuguagagaaucuuuauc

SEQ ID NO: 3210967 - RNA, 19 nt, Artificial Sequence
  Description of Artificial Sequence: Synthetic oligonucleotide
gauuuaacuguagagaauc

SEQ ID NO: 3210968 - RNA, 19 nt, Artificial Sequence
  Description of Artificial Sequence: Synthetic oligonucleotide
aaacagauuuaacuguaga

SEQ ID NO: 3210969 - RNA, 19 nt, Artificial Sequence
  Description of Artificial Sequence: Synthetic oligonucleotide
augucuaaauauguguggc

SEQ ID NO: 3210970 - RNA, 19 nt, Artificial Sequence
  Description of Artificial Sequence: Synthetic oligonucleotide
uuaacuguagagaaucuuu

SEQ ID NO: 3210971 - RNA, 19 nt, Artificial Sequence
  Description of Artificial Sequence: Synthetic oligonucleotide
ucuaaauauguguggcucc

SEQ ID NO: 3210972 - RNA, 19 nt, Artificial Sequence
  Description of Artificial Sequence: Synthetic oligonucleotide
uaaacagauuuaacuguag

SEQ ID NO: 3210973 - RNA, 19 nt, Artificial Sequence
  Description of Artificial Sequence: Synthetic oligonucleotide
uuaaacagauuuaacugua

SEQ ID NO: 3210974 - RNA, 19 nt, Artificial Sequence
  Description of Artificial Sequence: Synthetic oligonucleotide
uggaugucuaaauaugugu

SEQ ID NO: 3210975 - RNA, 19 nt, Artificial Sequence
  Description of Artificial Sequence: Synthetic oligonucleotide
agagaauggguuugauccc

SEQ ID NO: 3210976 - RNA, 19 nt, Artificial Sequence
  Description of Artificial Sequence: Synthetic oligonucleotide
guuugaucccucaagacag

SEQ ID NO: 3210977 - RNA, 19 nt, Artificial Sequence
  Description of Artificial Sequence: Synthetic oligonucleotide
uucuggagcacauggaucu

SEQ ID NO: 3210978 - RNA, 19 nt, Artificial Sequence
  Description of Artificial Sequence: Synthetic oligonucleotide
aagacagagagugccuccc

SEQ ID NO: 3210979 - RNA, 19 nt, Artificial Sequence
  Description of Artificial Sequence: Synthetic oligonucleotide
uuggaugucuaaauaugug

SEQ ID NO: 3210980 - RNA, 19 nt, Artificial Sequence
  Description of Artificial Sequence: Synthetic oligonucleotide
acagauuuaacuguagaga

SEQ ID NO: 3210981 - RNA, 19 nt, Artificial Sequence
  Description of Artificial Sequence: Synthetic oligonucleotide
ccaggugucacuuaaacag

SEQ ID NO: 3210982 - RNA, 19 nt, Artificial Sequence
  Description of Artificial Sequence: Synthetic oligonucleotide
ucccucaagacagagagug

SEQ ID NO: 3210983 - RNA, 19 nt, Artificial Sequence
  Description of Artificial Sequence: Synthetic oligonucleotide
aauauguguggcucccaug

SEQ ID NO: 3210984 - RNA, 19 nt, Artificial Sequence
  Description of Artificial Sequence: Synthetic oligonucleotide
uguguggcucccauggaag

SEQ ID NO: 3210985 - RNA, 19 nt, Artificial Sequence
  Description of Artificial Sequence: Synthetic oligonucleotide
agagagugccuccccaccc

SEQ ID NO: 3210986 - RNA, 19 nt, Artificial Sequence
  Description of Artificial Sequence: Synthetic oligonucleotide
cauggaaggagagaauggg

SEQ ID NO: 3210987 - RNA, 19 nt, Artificial Sequence
  Description of Artificial Sequence: Synthetic oligonucleotide
uggguuugaucccucaaga

SEQ ID NO: 3210988 - RNA, 19 nt, Artificial Sequence
  Description of Artificial Sequence: Synthetic oligonucleotide
agcacauggaucuucacuu

SEQ ID NO: 3210989 - RNA, 19 nt, Artificial Sequence
  Description of Artificial Sequence: Synthetic oligonucleotide
ucuucuggagcacauggau

SEQ ID NO: 3210990 - RNA, 19 nt, Artificial Sequence
  Description of Artificial Sequence: Synthetic oligonucleotide
uucacuuggaugucuaaau

SEQ ID NO: 3210991 - RNA, 19 nt, Artificial Sequence
  Description of Artificial Sequence: Synthetic oligonucleotide
aaauauguguggcucccau

SEQ ID NO: 3210992 - RNA, 19 nt, Artificial Sequence
  Description of Artificial Sequence: Synthetic oligonucleotide
aacuguagagaaucuuuau

SEQ ID NO: 3210993 - RNA, 19 nt, Artificial Sequence
  Description of Artificial Sequence: Synthetic oligonucleotide
auggguuugaucccucaag

SEQ ID NO: 3210994 - RNA, 19 nt, Artificial Sequence
  Description of Artificial Sequence: Synthetic oligonucleotide
ucacuuaaacagauuuaac

SEQ ID NO: 3210995 - RNA, 19 nt, Artificial Sequence
  Description of Artificial Sequence: Synthetic oligonucleotide
uaacuguagagaaucuuua

SEQ ID NO: 3210996 - RNA, 19 nt, Artificial Sequence
  Description of Artificial Sequence: Synthetic oligonucleotide
uggaaggagagaauggguu

SEQ ID NO: 3210997 - RNA, 19 nt, Artificial Sequence
  Description of Artificial Sequence: Synthetic oligonucleotide
cagauuuaacuguagagaa

SEQ ID NO: 3210998 - RNA, 19 nt, Artificial Sequence
  Description of Artificial Sequence: Synthetic oligonucleotide
cuaaauauguguggcuccc

SEQ ID NO: 3210999 - RNA, 19 nt, Artificial Sequence
  Description of Artificial Sequence: Synthetic oligonucleotide
ugucuaaauauguguggcu

SEQ ID NO: 3211000 - RNA, 19 nt, Artificial Sequence
  Description of Artificial Sequence: Synthetic oligonucleotide
cacuuaaacagauuuaacu

SEQ ID NO: 3211001 - RNA, 19 nt, Artificial Sequence
  Description of Artificial Sequence: Synthetic oligonucleotide
uccaagucccuucucuucu

SEQ ID NO: 3211002 - RNA, 19 nt, Artificial Sequence
  Description of Artificial Sequence: Synthetic oligonucleotide
ugucacuuaaacagauuua

SEQ ID NO: 3211003 - RNA, 19 nt, Artificial Sequence
  Description of Artificial Sequence: Synthetic oligonucleotide
cuuaaacagauuuaacugu

SEQ ID NO: 3211004 - RNA, 19 nt, Artificial Sequence
  Description of Artificial Sequence: Synthetic oligonucleotide
auggaucuucacuuggaug

SEQ ID NO: 3211005 - RNA, 19 nt, Artificial Sequence
  Description of Artificial Sequence: Synthetic oligonucleotide
acagagagugccuccccac

SEQ ID NO: 3211006 - RNA, 19 nt, Artificial Sequence
  Description of Artificial Sequence: Synthetic oligonucleotide
acuuggaugucuaaauaug

SEQ ID NO: 3211007 - RNA, 19 nt, Artificial Sequence
  Description of Artificial Sequence: Synthetic oligonucleotide
uccaggugucacuuaaaca

SEQ ID NO: 3211008 - RNA, 19 nt, Artificial Sequence
  Description of Artificial Sequence: Synthetic oligonucleotide
cacauggaucuucacuugg

SEQ ID NO: 3211009 - RNA, 19 nt, Artificial Sequence
  Description of Artificial Sequence: Synthetic oligonucleotide
gaaggagagaauggguuug

SEQ ID NO: 3211010 - RNA, 19 nt, Artificial Sequence
  Description of Artificial Sequence: Synthetic oligonucleotide
agucccuucucuucuggag

SEQ ID NO: 3211011 - RNA, 19 nt, Artificial Sequence
  Description of Artificial Sequence: Synthetic oligonucleotide
aauggguuugaucccucaa

SEQ ID NO: 3211012 - RNA, 19 nt, Artificial Sequence
  Description of Artificial Sequence: Synthetic oligonucleotide
ucacuuggaugucuaaaua

SEQ ID NO: 3211013 - RNA, 19 nt, Artificial Sequence
  Description of Artificial Sequence: Synthetic oligonucleotide
uuuaacuguagagaaucuu

SEQ ID NO: 3211014 - RNA, 19 nt, Artificial Sequence
  Description of Artificial Sequence: Synthetic oligonucleotide
agacagagagugccucccc

SEQ ID NO: 3211015 - RNA, 19 nt, Artificial Sequence
  Description of Artificial Sequence: Synthetic oligonucleotide
gucacuuaaacagauuuaa

SEQ ID NO: 3211016 - RNA, 19 nt, Artificial Sequence
  Description of Artificial Sequence: Synthetic oligonucleotide
gguuugaucccucaagaca

SEQ ID NO: 3211017 - RNA, 19 nt, Artificial Sequence
  Description of Artificial Sequence: Synthetic oligonucleotide
ccuuucaccuccaaguccc

SEQ ID NO: 3211018 - RNA, 19 nt, Artificial Sequence
  Description of Artificial Sequence: Synthetic oligonucleotide
uggagcacauggaucuuca

SEQ ID NO: 3211019 - RNA, 19 nt, Artificial Sequence
  Description of Artificial Sequence: Synthetic oligonucleotide
gucuaaauauguguggcuc

SEQ ID NO: 3211020 - RNA, 19 nt, Artificial Sequence
  Description of Artificial Sequence: Synthetic oligonucleotide
caagacagagagugccucc

SEQ ID NO: 3211021 - RNA, 19 nt, Artificial Sequence
  Description of Artificial Sequence: Synthetic oligonucleotide
ggaugucuaaauaugugug

SEQ ID NO: 3211022 - RNA, 19 nt, Artificial Sequence
  Description of Artificial Sequence: Synthetic oligonucleotide
ugaucccucaagacagaga

SEQ ID NO: 3211023 - RNA, 19 nt, Artificial Sequence
  Description of Artificial Sequence: Synthetic oligonucleotide
uucaccuccaagucccuuc

SEQ ID NO: 3211024 - RNA, 19 nt, Artificial Sequence
  Description of Artificial Sequence: Synthetic oligonucleotide
uuugaucccucaagacaga

SEQ ID NO: 3211025 - RNA, 19 nt, Artificial Sequence
  Description of Artificial Sequence: Synthetic oligonucleotide
cuccaggugucacuuaaac

SEQ ID NO: 3211026 - RNA, 19 nt, Artificial Sequence
  Description of Artificial Sequence: Synthetic oligonucleotide
cuucuggagcacauggauc

SEQ ID NO: 3211027 - RNA, 19 nt, Artificial Sequence
  Description of Artificial Sequence: Synthetic oligonucleotide
uugaucccucaagacagag

SEQ ID NO: 3211028 - RNA, 19 nt, Artificial Sequence
  Description of Artificial Sequence: Synthetic oligonucleotide
accuccaagucccuucucu

SEQ ID NO: 3211029 - RNA, 19 nt, Artificial Sequence
  Description of Artificial Sequence: Synthetic oligonucleotide
ucccuucucuucuggagca

SEQ ID NO: 3211030 - RNA, 19 nt, Artificial Sequence
  Description of Artificial Sequence: Synthetic oligonucleotide
gucccuucucuucuggagc

SEQ ID NO: 3211031 - RNA, 19 nt, Artificial Sequence
  Description of Artificial Sequence: Synthetic oligonucleotide
ugagucuccaggugucacu

SEQ ID NO: 3211032 - RNA, 19 nt, Artificial Sequence
  Description of Artificial Sequence: Synthetic oligonucleotide
ucaagacagagagugccuc

SEQ ID NO: 3211033 - RNA, 19 nt, Artificial Sequence
  Description of Artificial Sequence: Synthetic oligonucleotide
aagucccuucucuucugga

SEQ ID NO: 3211034 - RNA, 19 nt, Artificial Sequence
  Description of Artificial Sequence: Synthetic oligonucleotide
uauguguggcucccaugga

SEQ ID NO: 3211035 - RNA, 19 nt, Artificial Sequence
  Description of Artificial Sequence: Synthetic oligonucleotide
cuuggaugucuaaauaugu

SEQ ID NO: 3211036 - RNA, 19 nt, Artificial Sequence
  Description of Artificial Sequence: Synthetic oligonucleotide
ucaccuccaagucccuucu

SEQ ID NO: 3211037 - RNA, 19 nt, Artificial Sequence
  Description of Artificial Sequence: Synthetic oligonucleotide
agugccuccccaccccagg

SEQ ID NO: 3211038 - RNA, 19 nt, Artificial Sequence
  Description of Artificial Sequence: Synthetic oligonucleotide
guguggcucccauggaagg

SEQ ID NO: 3211039 - RNA, 19 nt, Artificial Sequence
  Description of Artificial Sequence: Synthetic oligonucleotide
caagucccuucucuucugg

SEQ ID NO: 3211040 - RNA, 19 nt, Artificial Sequence
  Description of Artificial Sequence: Synthetic oligonucleotide
gagagugccuccccacccc

SEQ ID NO: 3211041 - RNA, 19 nt, Artificial Sequence
  Description of Artificial Sequence: Synthetic oligonucleotide
aaggagagaauggguuuga

SEQ ID NO: 3211042 - RNA, 19 nt, Artificial Sequence
  Description of Artificial Sequence: Synthetic oligonucleotide
auuuaacuguagagaaucu

SEQ ID NO: 3211043 - RNA, 19 nt, Artificial Sequence
  Description of Artificial Sequence: Synthetic oligonucleotide
ccauggaaggagagaaugg

SEQ ID NO: 3211044 - RNA, 19 nt, Artificial Sequence
  Description of Artificial Sequence: Synthetic oligonucleotide
gugucacuuaaacagauuu

SEQ ID NO: 3211045 - RNA, 19 nt, Artificial Sequence
  Description of Artificial Sequence: Synthetic oligonucleotide
auguguggcucccauggaa

SEQ ID NO: 3211046 - RNA, 19 nt, Artificial Sequence
  Description of Artificial Sequence: Synthetic oligonucleotide
uaaauauguguggcuccca

SEQ ID NO: 3211047 - RNA, 19 nt, Artificial Sequence
  Description of Artificial Sequence: Synthetic oligonucleotide
gaauggguuugaucccuca

SEQ ID NO: 3211048 - RNA, 19 nt, Artificial Sequence
  Description of Artificial Sequence: Synthetic oligonucleotide
gacagagagugccucccca

SEQ ID NO: 3211049 - RNA, 19 nt, Artificial Sequence
  Description of Artificial Sequence: Synthetic oligonucleotide
gagcacauggaucuucacu

SEQ ID NO: 3211050 - RNA, 19 nt, Artificial Sequence
  Description of Artificial Sequence: Synthetic oligonucleotide
ucuucacuuggaugucuaa

SEQ ID NO: 3211051 - RNA, 19 nt, Artificial Sequence
  Description of Artificial Sequence: Synthetic oligonucleotide
cagagagugccuccccacc

SEQ ID NO: 3211052 - RNA, 19 nt, Artificial Sequence
  Description of Artificial Sequence: Synthetic oligonucleotide
agauuuaacuguagagaau

SEQ ID NO: 3211053 - RNA, 19 nt, Artificial Sequence
  Description of Artificial Sequence: Synthetic oligonucleotide
ccucaagacagagagugcc

SEQ ID NO: 3211054 - RNA, 19 nt, Artificial Sequence
  Description of Artificial Sequence: Synthetic oligonucleotide
cuccaagucccuucucuuc

SEQ ID NO: 3211055 - RNA, 19 nt, Artificial Sequence
  Description of Artificial Sequence: Synthetic oligonucleotide
uguggcucccauggaagga

SEQ ID NO: 3211056 - RNA, 19 nt, Artificial Sequence
  Description of Artificial Sequence: Synthetic oligonucleotide
ggagagaauggguuugauc

SEQ ID NO: 3211057 - RNA, 19 nt, Artificial Sequence
  Description of Artificial Sequence: Synthetic oligonucleotide
auggaaggagagaaugggu

SEQ ID NO: 3211058 - RNA, 19 nt, Artificial Sequence
  Description of Artificial Sequence: Synthetic oligonucleotide
acagaaucugacuucaucc

SEQ ID NO: 3211059 - RNA, 19 nt, Artificial Sequence
  Description of Artificial Sequence: Synthetic oligonucleotide
ucaagauagaguaugagcu

SEQ ID NO: 3211060 - RNA, 19 nt, Artificial Sequence
  Description of Artificial Sequence: Synthetic oligonucleotide
aucaagauagaguaugagc

SEQ ID NO: 3211061 - RNA, 19 nt, Artificial Sequence
  Description of Artificial Sequence: Synthetic oligonucleotide
agucaauuacaccaguucc

SEQ ID NO: 3211062 - RNA, 19 nt, Artificial Sequence
  Description of Artificial Sequence: Synthetic oligonucleotide
aagaaagucacuuuucaca

SEQ ID NO: 3211063 - RNA, 19 nt, Artificial Sequence
  Description of Artificial Sequence: Synthetic oligonucleotide
uuuugaauagcuuugacuu

SEQ ID NO: 3211064 - RNA, 19 nt, Artificial Sequence
  Description of Artificial Sequence: Synthetic oligonucleotide
aagucaauuacaccaguuc

SEQ ID NO: 3211065 - RNA, 19 nt, Artificial Sequence
  Description of Artificial Sequence: Synthetic oligonucleotide
ugaagaucaagauagagua

SEQ ID NO: 3211066 - RNA, 19 nt, Artificial Sequence
  Description of Artificial Sequence: Synthetic oligonucleotide
uuucacaugaagaucaaga

SEQ ID NO: 3211067 - RNA, 19 nt, Artificial Sequence
  Description of Artificial Sequence: Synthetic oligonucleotide
aauagcuuugacuuugcug

SEQ ID NO: 3211068 - RNA, 19 nt, Artificial Sequence
  Description of Artificial Sequence: Synthetic oligonucleotide
aauugguuggaagaaugcc

SEQ ID NO: 3211069 - RNA, 19 nt, Artificial Sequence
  Description of Artificial Sequence: Synthetic oligonucleotide
gauugagauuaucaggugg

SEQ ID NO: 3211070 - RNA, 19 nt, Artificial Sequence
  Description of Artificial Sequence: Synthetic oligonucleotide
uauaaagugguccccauga

SEQ ID NO: 3211071 - RNA, 19 nt, Artificial Sequence
  Description of Artificial Sequence: Synthetic oligonucleotide
agagauugagauuaucagg

SEQ ID NO: 3211072 - RNA, 19 nt, Artificial Sequence
  Description of Artificial Sequence: Synthetic oligonucleotide
ugauacgucgucuuuauca

SEQ ID NO: 3211073 - RNA, 19 nt, Artificial Sequence
  Description of Artificial Sequence: Synthetic oligonucleotide
agagcugucacagagauug

SEQ ID NO: 3211074 - RNA, 19 nt, Artificial Sequence
  Description of Artificial Sequence: Synthetic oligonucleotide
gucacuuucugauacgucg

SEQ ID NO: 3211075 - RNA, 19 nt, Artificial Sequence
  Description of Artificial Sequence: Synthetic oligonucleotide
auacaguccuguuaaauuc

SEQ ID NO: 3211076 - RNA, 19 nt, Artificial Sequence
  Description of Artificial Sequence: Synthetic oligonucleotide
uuucauugaauuguuuugg

SEQ ID NO: 3211077 - RNA, 19 nt, Artificial Sequence
  Description of Artificial Sequence: Synthetic oligonucleotide
aauuucgagagguacuucu

SEQ ID NO: 3211078 - RNA, 19 nt, Artificial Sequence
  Description of Artificial Sequence: Synthetic oligonucleotide
aagaucaagauagaguaug

SEQ ID NO: 3211079 - RNA, 19 nt, Artificial Sequence
  Description of Artificial Sequence: Synthetic oligonucleotide
aguccuguuaaauucauca

SEQ ID NO: 3211080 - RNA, 19 nt, Artificial Sequence
  Description of Artificial Sequence: Synthetic oligonucleotide
cuuucaagccauuaguccc

SEQ ID NO: 3211081 - RNA, 19 nt, Artificial Sequence
  Description of Artificial Sequence: Synthetic oligonucleotide
uguaagucaauuacaccag

SEQ ID NO: 3211082 - RNA, 19 nt, Artificial Sequence
  Description of Artificial Sequence: Synthetic oligonucleotide
ucuucaagagccuucacac

SEQ ID NO: 3211083 - RNA, 19 nt, Artificial Sequence
  Description of Artificial Sequence: Synthetic oligonucleotide
ugucacugagugaagaaag

SEQ ID NO: 3211084 - RNA, 19 nt, Artificial Sequence
  Description of Artificial Sequence: Synthetic oligonucleotide
ugcaguuguaacuucuacg

SEQ ID NO: 3211085 - RNA, 19 nt, Artificial Sequence
  Description of Artificial Sequence: Synthetic oligonucleotide
uuugcaaguucuucaagag

SEQ ID NO: 3211086 - RNA, 19 nt, Artificial Sequence
  Description of Artificial Sequence: Synthetic oligonucleotide
uaauucuucacucacuuuu

SEQ ID NO: 3211087 - RNA, 19 nt, Artificial Sequence
  Description of Artificial Sequence: Synthetic oligonucleotide
uugcauuuggcauuucccg

SEQ ID NO: 3211088 - RNA, 19 nt, Artificial Sequence
  Description of Artificial Sequence: Synthetic oligonucleotide
uuggaggaggaauuggugg

SEQ ID NO: 3211089 - RNA, 19 nt, Artificial Sequence
  Description of Artificial Sequence: Synthetic oligonucleotide
uguuaagggcgacagaaca

SEQ ID NO: 3211090 - RNA, 19 nt, Artificial Sequence
  Description of Artificial Sequence: Synthetic oligonucleotide
ucuaaauugcaguuguaac

SEQ ID NO: 3211091 - RNA, 19 nt, Artificial Sequence
  Description of Artificial Sequence: Synthetic oligonucleotide
agaacaaucuuuacucucc

SEQ ID NO: 3211092 - RNA, 19 nt, Artificial Sequence
  Description of Artificial Sequence: Synthetic oligonucleotide
uggaauuucacaucuuugu

SEQ ID NO: 3211093 - RNA, 19 nt, Artificial Sequence
  Description of Artificial Sequence: Synthetic oligonucleotide
aaaggugcauaauucuuca

SEQ ID NO: 3211094 - RNA, 19 nt, Artificial Sequence
  Description of Artificial Sequence: Synthetic oligonucleotide
gauacgucgucuuuaucag

SEQ ID NO: 3211095 - RNA, 19 nt, Artificial Sequence
  Description of Artificial Sequence: Synthetic oligonucleotide
gucuuuaucagcaggagag

SEQ ID NO: 3211096 - RNA, 19 nt, Artificial Sequence
  Description of Artificial Sequence: Synthetic oligonucleotide
cuucacacuguguuaaggg

SEQ ID NO: 3211097 - RNA, 19 nt, Artificial Sequence
  Description of Artificial Sequence: Synthetic oligonucleotide
cuuucuccaaauugguugg

SEQ ID NO: 3211098 - RNA, 19 nt, Artificial Sequence
  Description of Artificial Sequence: Synthetic oligonucleotide
cugucuguccuaaauacag

SEQ ID NO: 3211099 - RNA, 19 nt, Artificial Sequence
  Description of Artificial Sequence: Synthetic oligonucleotide
ugcauaauucuucacucac

SEQ ID NO: 3211100 - RNA, 19 nt, Artificial Sequence
  Description of Artificial Sequence: Synthetic oligonucleotide
aaauugcaguuguaacuuc

SEQ ID NO: 3211101 - RNA, 19 nt, Artificial Sequence
  Description of Artificial Sequence: Synthetic oligonucleotide
uagaguaugagcuggggaa

SEQ ID NO: 3211102 - RNA, 19 nt, Artificial Sequence
  Description of Artificial Sequence: Synthetic oligonucleotide
cagagauugagauuaucag

SEQ ID NO: 3211103 - RNA, 19 nt, Artificial Sequence
  Description of Artificial Sequence: Synthetic oligonucleotide
uucgagagguacuucuugg

SEQ ID NO: 3211104 - RNA, 19 nt, Artificial Sequence
  Description of Artificial Sequence: Synthetic oligonucleotide
aaagugguccccaugaggu

SEQ ID NO: 3211105 - RNA, 19 nt, Artificial Sequence
  Description of Artificial Sequence: Synthetic oligonucleotide
caaauugguuggaagaaug

SEQ ID NO: 3211106 - RNA, 19 nt, Artificial Sequence
  Description of Artificial Sequence: Synthetic oligonucleotide
acugagugaagaaagucac

SEQ ID NO: 3211107 - RNA, 19 nt, Artificial Sequence
  Description of Artificial Sequence: Synthetic oligonucleotide
ucuguccuaaauacagucc

SEQ ID NO: 3211108 - RNA, 19 nt, Artificial Sequence
  Description of Artificial Sequence: Synthetic oligonucleotide
uuuuggaaucuguuggccc

SEQ ID NO: 3211109 - RNA, 19 nt, Artificial Sequence
  Description of Artificial Sequence: Synthetic oligonucleotide
ugcauuuggcauuucccgg

SEQ ID NO: 3211110 - RNA, 19 nt, Artificial Sequence
  Description of Artificial Sequence: Synthetic oligonucleotide
uguuaaauucaucaaucuu

SEQ ID NO: 3211111 - RNA, 19 nt, Artificial Sequence
  Description of Artificial Sequence: Synthetic oligonucleotide
uacgucgucuuuaucagca

SEQ ID NO: 3211112 - RNA, 19 nt, Artificial Sequence
  Description of Artificial Sequence: Synthetic oligonucleotide
uugguggaauuucacaucu

SEQ ID NO: 3211113 - RNA, 19 nt, Artificial Sequence
  Description of Artificial Sequence: Synthetic oligonucleotide
gauugcauuuggcauuucc

SEQ ID NO: 3211114 - RNA, 19 nt, Artificial Sequence
  Description of Artificial Sequence: Synthetic oligonucleotide
uuuggaaucuguuggccca

SEQ ID NO: 3211115 - RNA, 19 nt, Artificial Sequence
  Description of Artificial Sequence: Synthetic oligonucleotide
uuuccaugggcacagguau

SEQ ID NO: 3211116 - RNA, 19 nt, Artificial Sequence
  Description of Artificial Sequence: Synthetic oligonucleotide
uggucacuagcuuucaagc

SEQ ID NO: 3211117 - RNA, 19 nt, Artificial Sequence
  Description of Artificial Sequence: Synthetic oligonucleotide
acuuuucacaugaagauca

SEQ ID NO: 3211118 - RNA, 19 nt, Artificial Sequence
  Description of Artificial Sequence: Synthetic oligonucleotide
gcuauuauaaagugguccc

SEQ ID NO: 3211119 - RNA, 19 nt, Artificial Sequence
  Description of Artificial Sequence: Synthetic oligonucleotide
ucuccaaauugguuggaag

SEQ ID NO: 3211120 - RNA, 19 nt, Artificial Sequence
  Description of Artificial Sequence: Synthetic oligonucleotide
uucuacgugggucugucug

SEQ ID NO: 3211121 - RNA, 19 nt, Artificial Sequence
  Description of Artificial Sequence: Synthetic oligonucleotide
uucacacuguguuaagggc

SEQ ID NO: 3211122 - RNA, 19 nt, Artificial Sequence
  Description of Artificial Sequence: Synthetic oligonucleotide
ugcuugacaacuucugucu

SEQ ID NO: 3211123 - RNA, 19 nt, Artificial Sequence
  Description of Artificial Sequence: Synthetic oligonucleotide
ugcccuggcuauuauaaag

SEQ ID NO: 3211124 - RNA, 19 nt, Artificial Sequence
  Description of Artificial Sequence: Synthetic oligonucleotide
cuagcuuucaagccauuag

SEQ ID NO: 3211125 - RNA, 19 nt, Artificial Sequence
  Description of Artificial Sequence: Synthetic oligonucleotide
uauuauaaaguggucccca

SEQ ID NO: 3211126 - RNA, 19 nt, Artificial Sequence
  Description of Artificial Sequence: Synthetic oligonucleotide
gaagaaagucacuuuucac

SEQ ID NO: 3211127 - RNA, 19 nt, Artificial Sequence
  Description of Artificial Sequence: Synthetic oligonucleotide
uagcuuucaagccauuagu

SEQ ID NO: 3211128 - RNA, 19 nt, Artificial Sequence
  Description of Artificial Sequence: Synthetic oligonucleotide
uuucgagagguacuucuug

SEQ ID NO: 3211129 - RNA, 19 nt, Artificial Sequence
  Description of Artificial Sequence: Synthetic oligonucleotide
uauguggucacuagcuuuc

SEQ ID NO: 3211130 - RNA, 19 nt, Artificial Sequence
  Description of Artificial Sequence: Synthetic oligonucleotide
uuucaagccauuaguccca

SEQ ID NO: 3211131 - RNA, 19 nt, Artificial Sequence
  Description of Artificial Sequence: Synthetic oligonucleotide
uggaguccuuucuaaauug

SEQ ID NO: 3211132 - RNA, 19 nt, Artificial Sequence
  Description of Artificial Sequence: Synthetic oligonucleotide
cuucacucacuuuugcaag

SEQ ID NO: 3211133 - RNA, 19 nt, Artificial Sequence
  Description of Artificial Sequence: Synthetic oligonucleotide
agcuuuucauuccuuggag

SEQ ID NO: 3211134 - RNA, 19 nt, Artificial Sequence
  Description of Artificial Sequence: Synthetic oligonucleotide
uguaacuucuacguggguc

SEQ ID NO: 3211135 - RNA, 19 nt, Artificial Sequence
  Description of Artificial Sequence: Synthetic oligonucleotide
uguacugcuugacaacuuc

SEQ ID NO: 3211136 - RNA, 19 nt, Artificial Sequence
  Description of Artificial Sequence: Synthetic oligonucleotide
uucauugaauuguuuugga

SEQ ID NO: 3211137 - RNA, 19 nt, Artificial Sequence
  Description of Artificial Sequence: Synthetic oligonucleotide
aaauacaguccuguuaaau

SEQ ID NO: 3211138 - RNA, 19 nt, Artificial Sequence
  Description of Artificial Sequence: Synthetic oligonucleotide
guuguaacuucuacguggg

SEQ ID NO: 3211139 - RNA, 19 nt, Artificial Sequence
  Description of Artificial Sequence: Synthetic oligonucleotide
ugaaaggugcauaauucuu

SEQ ID NO: 3211140 - RNA, 19 nt, Artificial Sequence
  Description of Artificial Sequence: Synthetic oligonucleotide
aaucugacuucauccuucu

SEQ ID NO: 3211141 - RNA, 19 nt, Artificial Sequence
  Description of Artificial Sequence: Synthetic oligonucleotide
caugaagaucaagauagag

SEQ ID NO: 3211142 - RNA, 19 nt, Artificial Sequence
  Description of Artificial Sequence: Synthetic oligonucleotide
ucauugaauuguuuuggaa

SEQ ID NO: 3211143 - RNA, 19 nt, Artificial Sequence
  Description of Artificial Sequence: Synthetic oligonucleotide
aaugcccuggcuauuauaa

SEQ ID NO: 3211144 - RNA, 19 nt, Artificial Sequence
  Description of Artificial Sequence: Synthetic oligonucleotide
agagccuucacacuguguu

SEQ ID NO: 3211145 - RNA, 19 nt, Artificial Sequence
  Description of Artificial Sequence: Synthetic oligonucleotide
acagagauugagauuauca

SEQ ID NO: 3211146 - RNA, 19 nt, Artificial Sequence
  Description of Artificial Sequence: Synthetic oligonucleotide
uggaagaaugcccuggcua

SEQ ID NO: 3211147 - RNA, 19 nt, Artificial Sequence
  Description of Artificial Sequence: Synthetic oligonucleotide
caugggcacagguaugugg

SEQ ID NO: 3211148 - RNA, 19 nt, Artificial Sequence
  Description of Artificial Sequence: Synthetic oligonucleotide
auagaguaugagcugggga

SEQ ID NO: 3211149 - RNA, 19 nt, Artificial Sequence
  Description of Artificial Sequence: Synthetic oligonucleotide
gaucaagauagaguaugag

SEQ ID NO: 3211150 - RNA, 19 nt, Artificial Sequence
  Description of Artificial Sequence: Synthetic oligonucleotide
caagauagaguaugagcug

SEQ ID NO: 3211151 - RNA, 19 nt, Artificial Sequence
  Description of Artificial Sequence: Synthetic oligonucleotide
agccauuagucccaucguc

SEQ ID NO: 3211152 - RNA, 19 nt, Artificial Sequence
  Description of Artificial Sequence: Synthetic oligonucleotide
gauagaguaugagcugggg

SEQ ID NO: 3211153 - RNA, 19 nt, Artificial Sequence
  Description of Artificial Sequence: Synthetic oligonucleotide
aauugcaguuguaacuucu

SEQ ID NO: 3211154 - RNA, 19 nt, Artificial Sequence
  Description of Artificial Sequence: Synthetic oligonucleotide
ugagugaagaaagucacuu

SEQ ID NO: 3211155 - RNA, 19 nt, Artificial Sequence
  Description of Artificial Sequence: Synthetic oligonucleotide
gagauugagauuaucaggu

SEQ ID NO: 3211156 - RNA, 19 nt, Artificial Sequence
  Description of Artificial Sequence: Synthetic oligonucleotide
auacgucgucuuuaucagc

SEQ ID NO: 3211157 - RNA, 19 nt, Artificial Sequence
  Description of Artificial Sequence: Synthetic oligonucleotide
acuguguuaagggcgacag

SEQ ID NO: 3211158 - RNA, 19 nt, Artificial Sequence
  Description of Artificial Sequence: Synthetic oligonucleotide
ugugcagagaaccuggggc

SEQ ID NO: 3211159 - RNA, 19 nt, Artificial Sequence
  Description of Artificial Sequence: Synthetic oligonucleotide
aguagaacgagguauugug

SEQ ID NO: 3211160 - RNA, 19 nt, Artificial Sequence
  Description of Artificial Sequence: Synthetic oligonucleotide
uguguguuuggaugcaugg

SEQ ID NO: 3211161 - RNA, 19 nt, Artificial Sequence
  Description of Artificial Sequence: Synthetic oligonucleotide
gugaugccaaaguagaacg

SEQ ID NO: 3211162 - RNA, 19 nt, Artificial Sequence
  Description of Artificial Sequence: Synthetic oligonucleotide
uguguuuggaugcauggac

SEQ ID NO: 3211163 - RNA, 19 nt, Artificial Sequence
  Description of Artificial Sequence: Synthetic oligonucleotide
ucagggagaccccuggugg

SEQ ID NO: 3211164 - RNA, 19 nt, Artificial Sequence
  Description of Artificial Sequence: Synthetic oligonucleotide
auguguguacgccuggugg

SEQ ID NO: 3211165 - RNA, 19 nt, Artificial Sequence
  Description of Artificial Sequence: Synthetic oligonucleotide
agggagaaguagcuggacc

SEQ ID NO: 3211166 - RNA, 19 nt, Artificial Sequence
  Description of Artificial Sequence: Synthetic oligonucleotide
uguguguacgccugguggg

SEQ ID NO: 3211167 - RNA, 19 nt, Artificial Sequence
  Description of Artificial Sequence: Synthetic oligonucleotide
uagaacgagguauugugug

SEQ ID NO: 3211168 - RNA, 19 nt, Artificial Sequence
  Description of Artificial Sequence: Synthetic oligonucleotide
aguagcuggaccaaccugg

SEQ ID NO: 3211169 - RNA, 19 nt, Artificial Sequence
  Description of Artificial Sequence: Synthetic oligonucleotide
aaggagucugugcagagaa

SEQ ID NO: 3211170 - RNA, 19 nt, Artificial Sequence
  Description of Artificial Sequence: Synthetic oligonucleotide
gguauuguguguuuggaug

SEQ ID NO: 3211171 - RNA, 19 nt, Artificial Sequence
  Description of Artificial Sequence: Synthetic oligonucleotide
uguuuggaugcauggacgc

SEQ ID NO: 3211172 - RNA, 19 nt, Artificial Sequence
  Description of Artificial Sequence: Synthetic oligonucleotide
guauuguguguuuggaugc

SEQ ID NO: 3211173 - RNA, 19 nt, Artificial Sequence
  Description of Artificial Sequence: Synthetic oligonucleotide
uuuggccucaguguugugg

SEQ ID NO: 3211174 - RNA, 19 nt, Artificial Sequence
  Description of Artificial Sequence: Synthetic oligonucleotide
gaugccaaaguagaacgag

SEQ ID NO: 3211175 - RNA, 19 nt, Artificial Sequence
  Description of Artificial Sequence: Synthetic oligonucleotide
ugcauggacgccaugugug

SEQ ID NO: 3211176 - RNA, 19 nt, Artificial Sequence
  Description of Artificial Sequence: Synthetic oligonucleotide
guuguggggagugagagcc

SEQ ID NO: 3211177 - RNA, 19 nt, Artificial Sequence
  Description of Artificial Sequence: Synthetic oligonucleotide
uuggccucaguguuguggg

SEQ ID NO: 3211178 - RNA, 19 nt, Artificial Sequence
  Description of Artificial Sequence: Synthetic oligonucleotide
ugccaaaguagaacgaggu

SEQ ID NO: 3211179 - RNA, 19 nt, Artificial Sequence
  Description of Artificial Sequence: Synthetic oligonucleotide
agaaguagcuggaccaacc

SEQ ID NO: 3211180 - RNA, 19 nt, Artificial Sequence
  Description of Artificial Sequence: Synthetic oligonucleotide
agcuggaccaaccuggcug

SEQ ID NO: 3211181 - RNA, 19 nt, Artificial Sequence
  Description of Artificial Sequence: Synthetic oligonucleotide
aaguagcuggaccaaccug

SEQ ID NO: 3211182 - RNA, 19 nt, Artificial Sequence
  Description of Artificial Sequence: Synthetic oligonucleotide
cacggugaugccaaaguag

SEQ ID NO: 3211183 - RNA, 19 nt, Artificial Sequence
  Description of Artificial Sequence: Synthetic oligonucleotide
aaaguagaacgagguauug

SEQ ID NO: 3211184 - RNA, 19 nt, Artificial Sequence
  Description of Artificial Sequence: Synthetic oligonucleotide
uggggcuggggcauguugg

SEQ ID NO: 3211185 - RNA, 19 nt, Artificial Sequence
  Description of Artificial Sequence: Synthetic oligonucleotide
uuuggaugcauggacgcca

SEQ ID NO: 3211186 - RNA, 19 nt, Artificial Sequence
  Description of Artificial Sequence: Synthetic oligonucleotide
gugggcaucagggagaccc

SEQ ID NO: 3211187 - RNA, 19 nt, Artificial Sequence
  Description of Artificial Sequence: Synthetic oligonucleotide
auggacgccauguguguac

SEQ ID NO: 3211188 - RNA, 19 nt, Artificial Sequence
  Description of Artificial Sequence: Synthetic oligonucleotide
ucugugcagagaaccuggg

SEQ ID NO: 3211189 - RNA, 19 nt, Artificial Sequence
  Description of Artificial Sequence: Synthetic oligonucleotide
ugggcuaaggagucugugc

SEQ ID NO: 3211190 - RNA, 19 nt, Artificial Sequence
  Description of Artificial Sequence: Synthetic oligonucleotide
uuguguguuuggaugcaug

SEQ ID NO: 3211191 - RNA, 19 nt, Artificial Sequence
  Description of Artificial Sequence: Synthetic oligonucleotide
ugaugccaaaguagaacga

SEQ ID NO: 3211192 - RNA, 19 nt, Artificial Sequence
  Description of Artificial Sequence: Synthetic oligonucleotide
gaugcauggacgccaugug

SEQ ID NO: 3211193 - RNA, 19 nt, Artificial Sequence
  Description of Artificial Sequence: Synthetic oligonucleotide
aaguagaacgagguauugu

SEQ ID NO: 3211194 - RNA, 19 nt, Artificial Sequence
  Description of Artificial Sequence: Synthetic oligonucleotide
agaacgagguauugugugu

SEQ ID NO: 3211195 - RNA, 19 nt, Artificial Sequence
  Description of Artificial Sequence: Synthetic oligonucleotide
guguuuggaugcauggacg

SEQ ID NO: 3211196 - RNA, 19 nt, Artificial Sequence
  Description of Artificial Sequence: Synthetic oligonucleotide
cuaaggagucugugcagag

SEQ ID NO: 3211197 - RNA, 19 nt, Artificial Sequence
  Description of Artificial Sequence: Synthetic oligonucleotide
aucagggagaccccuggug

SEQ ID NO: 3211198 - RNA, 19 nt, Artificial Sequence
  Description of Artificial Sequence: Synthetic oligonucleotide
gagaaccuggggcuggggc

SEQ ID NO: 3211199 - RNA, 19 nt, Artificial Sequence
  Description of Artificial Sequence: Synthetic oligonucleotide
gucugugcagagaaccugg

SEQ ID NO: 3211200 - RNA, 19 nt, Artificial Sequence
  Description of Artificial Sequence: Synthetic oligonucleotide
agaaccuggggcuggggca

SEQ ID NO: 3211201 - RNA, 19 nt, Artificial Sequence
  Description of Artificial Sequence: Synthetic oligonucleotide
augccaaaguagaacgagg

SEQ ID NO: 3211202 - RNA, 19 nt, Artificial Sequence
  Description of Artificial Sequence: Synthetic oligonucleotide
uguuguggggagugagagc

SEQ ID NO: 3211203 - RNA, 19 nt, Artificial Sequence
  Description of Artificial Sequence: Synthetic oligonucleotide
guguuguggggagugagag

SEQ ID NO: 3211204 - RNA, 19 nt, Artificial Sequence
  Description of Artificial Sequence: Synthetic oligonucleotide
ggagucugugcagagaacc

SEQ ID NO: 3211205 - RNA, 19 nt, Artificial Sequence
  Description of Artificial Sequence: Synthetic oligonucleotide
uauuguguguuuggaugca

SEQ ID NO: 3211206 - RNA, 19 nt, Artificial Sequence
  Description of Artificial Sequence: Synthetic oligonucleotide
gacgccauguguguacgcc

SEQ ID NO: 3211207 - RNA, 19 nt, Artificial Sequence
  Description of Artificial Sequence: Synthetic oligonucleotide
cccagggagaaguagcugg

SEQ ID NO: 3211208 - RNA, 19 nt, Artificial Sequence
  Description of Artificial Sequence: Synthetic oligonucleotide
ggaccaaccuggcuggagg

SEQ ID NO: 3211209 - RNA, 19 nt, Artificial Sequence
  Description of Artificial Sequence: Synthetic oligonucleotide
uccuuuggccucaguguug

SEQ ID NO: 3211210 - RNA, 19 nt, Artificial Sequence
  Description of Artificial Sequence: Synthetic oligonucleotide
ggugaugccaaaguagaac

SEQ ID NO: 3211211 - RNA, 19 nt, Artificial Sequence
  Description of Artificial Sequence: Synthetic oligonucleotide
augcauggacgccaugugu

SEQ ID NO: 3211212 - RNA, 19 nt, Artificial Sequence
  Description of Artificial Sequence: Synthetic oligonucleotide
agguauuguguguuuggau

SEQ ID NO: 3211213 - RNA, 19 nt, Artificial Sequence
  Description of Artificial Sequence: Synthetic oligonucleotide
uguggggagugagagcccc

SEQ ID NO: 3211214 - RNA, 19 nt, Artificial Sequence
  Description of Artificial Sequence: Synthetic oligonucleotide
cugugcagagaaccugggg

SEQ ID NO: 3211215 - RNA, 19 nt, Artificial Sequence
  Description of Artificial Sequence: Synthetic oligonucleotide
gggagaaguagcuggacca

SEQ ID NO: 3211216 - RNA, 19 nt, Artificial Sequence
  Description of Artificial Sequence: Synthetic oligonucleotide
acggugaugccaaaguaga

SEQ ID NO: 3211217 - RNA, 19 nt, Artificial Sequence
  Description of Artificial Sequence: Synthetic oligonucleotide
aacgagguauuguguguuu

SEQ ID NO: 3211218 - RNA, 19 nt, Artificial Sequence
  Description of Artificial Sequence: Synthetic oligonucleotide
uaaggagucugugcagaga

SEQ ID NO: 3211219 - RNA, 19 nt, Artificial Sequence
  Description of Artificial Sequence: Synthetic oligonucleotide
agucugugcagagaaccug

SEQ ID NO: 3211220 - RNA, 19 nt, Artificial Sequence
  Description of Artificial Sequence: Synthetic oligonucleotide
uggacgccauguguguacg

SEQ ID NO: 3211221 - RNA, 19 nt, Artificial Sequence
  Description of Artificial Sequence: Synthetic oligonucleotide
gcuggaccaaccuggcugg

SEQ ID NO: 3211222 - RNA, 19 nt, Artificial Sequence
  Description of Artificial Sequence: Synthetic oligonucleotide
cuccagcccacggugaugc

SEQ ID NO: 3211223 - RNA, 19 nt, Artificial Sequence
  Description of Artificial Sequence: Synthetic oligonucleotide
gagguauuguguguuugga

SEQ ID NO: 3211224 - RNA, 19 nt, Artificial Sequence
  Description of Artificial Sequence: Synthetic oligonucleotide
cucaguguuguggggagug

SEQ ID NO: 3211225 - RNA, 19 nt, Artificial Sequence
  Description of Artificial Sequence: Synthetic oligonucleotide
cagggagaccccugguggg

SEQ ID NO: 3211226 - RNA, 19 nt, Artificial Sequence
  Description of Artificial Sequence: Synthetic oligonucleotide
cauguguguacgccuggug

SEQ ID NO: 3211227 - RNA, 19 nt, Artificial Sequence
  Description of Artificial Sequence: Synthetic oligonucleotide
ggguccuuuggccucagug

SEQ ID NO: 3211228 - RNA, 19 nt, Artificial Sequence
  Description of Artificial Sequence: Synthetic oligonucleotide
gaaguagcuggaccaaccu

SEQ ID NO: 3211229 - RNA, 19 nt, Artificial Sequence
  Description of Artificial Sequence: Synthetic oligonucleotide
agggagaccccuggugggc

SEQ ID NO: 3211230 - RNA, 19 nt, Artificial Sequence
  Description of Artificial Sequence: Synthetic oligonucleotide
uggugggcuaaggagucug

SEQ ID NO: 3211231 - RNA, 19 nt, Artificial Sequence
  Description of Artificial Sequence: Synthetic oligonucleotide
gagaaguagcuggaccaac

SEQ ID NO: 3211232 - RNA, 19 nt, Artificial Sequence
  Description of Artificial Sequence: Synthetic oligonucleotide
guuuggaugcauggacgcc

SEQ ID NO: 3211233 - RNA, 19 nt, Artificial Sequence
  Description of Artificial Sequence: Synthetic oligonucleotide
ugggcaucagggagacccc

SEQ ID NO: 3211234 - RNA, 19 nt, Artificial Sequence
  Description of Artificial Sequence: Synthetic oligonucleotide
acgagguauuguguguuug

SEQ ID NO: 3211235 - RNA, 19 nt, Artificial Sequence
  Description of Artificial Sequence: Synthetic oligonucleotide
ugcagagaaccuggggcug

SEQ ID NO: 3211236 - RNA, 19 nt, Artificial Sequence
  Description of Artificial Sequence: Synthetic oligonucleotide
uuggaugcauggacgccau

SEQ ID NO: 3211237 - RNA, 19 nt, Artificial Sequence
  Description of Artificial Sequence: Synthetic oligonucleotide
gcaucagggagaccccugg

SEQ ID NO: 3211238 - RNA, 19 nt, Artificial Sequence
  Description of Artificial Sequence: Synthetic oligonucleotide
gggcuaaggagucugugca

SEQ ID NO: 3211239 - RNA, 19 nt, Artificial Sequence
  Description of Artificial Sequence: Synthetic oligonucleotide
acgccuggugggcaucagg

SEQ ID NO: 3211240 - RNA, 19 nt, Artificial Sequence
  Description of Artificial Sequence: Synthetic oligonucleotide
acgccauguguguacgccu

SEQ ID NO: 3211241 - RNA, 19 nt, Artificial Sequence
  Description of Artificial Sequence: Synthetic oligonucleotide
uggccucaguguugugggg

SEQ ID NO: 3211242 - RNA, 19 nt, Artificial Sequence
  Description of Artificial Sequence: Synthetic oligonucleotide
uggaccaaccuggcuggag

SEQ ID NO: 3211243 - RNA, 19 nt, Artificial Sequence
  Description of Artificial Sequence: Synthetic oligonucleotide
uuguggggagugagagccc

SEQ ID NO: 3211244 - RNA, 19 nt, Artificial Sequence
  Description of Artificial Sequence: Synthetic oligonucleotide
ccuggugggcaucagggag

SEQ ID NO: 3211245 - RNA, 19 nt, Artificial Sequence
  Description of Artificial Sequence: Synthetic oligonucleotide
caguguuguggggagugag

SEQ ID NO: 3211246 - RNA, 19 nt, Artificial Sequence
  Description of Artificial Sequence: Synthetic oligonucleotide
gaccaaccuggcuggagga

SEQ ID NO: 3211247 - RNA, 19 nt, Artificial Sequence
  Description of Artificial Sequence: Synthetic oligonucleotide
uguguacgccuggugggca

SEQ ID NO: 3211248 - RNA, 19 nt, Artificial Sequence
  Description of Artificial Sequence: Synthetic oligonucleotide
aguguuguggggagugaga

SEQ ID NO: 3211249 - RNA, 19 nt, Artificial Sequence
  Description of Artificial Sequence: Synthetic oligonucleotide
ggcuaaggagucugugcag

SEQ ID NO: 3211250 - RNA, 19 nt, Artificial Sequence
  Description of Artificial Sequence: Synthetic oligonucleotide
cgagguauuguguguuugg

SEQ ID NO: 3211251 - RNA, 19 nt, Artificial Sequence
  Description of Artificial Sequence: Synthetic oligonucleotide
ucaguguuguggggaguga

SEQ ID NO: 3211252 - RNA, 19 nt, Artificial Sequence
  Description of Artificial Sequence: Synthetic oligonucleotide
guagcuggaccaaccuggc

SEQ ID NO: 3211253 - RNA, 19 nt, Artificial Sequence
  Description of Artificial Sequence: Synthetic oligonucleotide
accccuggugggcuaagga

SEQ ID NO: 3211254 - RNA, 19 nt, Artificial Sequence
  Description of Artificial Sequence: Synthetic oligonucleotide
caaaguagaacgagguauu

SEQ ID NO: 3211255 - RNA, 19 nt, Artificial Sequence
  Description of Artificial Sequence: Synthetic oligonucleotide
aggagucugugcagagaac

SEQ ID NO: 3211256 - RNA, 19 nt, Artificial Sequence
  Description of Artificial Sequence: Synthetic oligonucleotide
uagcuggaccaaccuggcu

SEQ ID NO: 3211257 - RNA, 19 nt, Artificial Sequence
  Description of Artificial Sequence: Synthetic oligonucleotide
cuggugggcaucagggaga

SEQ ID NO: 3211258 - RNA, 19 nt, Artificial Sequence
  Description of Artificial Sequence: Synthetic oligonucleotide
aauaaaucuauuuugagaa

SEQ ID NO: 3211259 - RNA, 19 nt, Artificial Sequence
  Description of Artificial Sequence: Synthetic oligonucleotide
gacauuaugacauuaaccc

SEQ ID NO: 3211260 - RNA, 19 nt, Artificial Sequence
  Description of Artificial Sequence: Synthetic oligonucleotide
ugaauuuucaucuucaggu

SEQ ID NO: 3211261 - RNA, 19 nt, Artificial Sequence
  Description of Artificial Sequence: Synthetic oligonucleotide
uaagcuaccauuacaaacc

SEQ ID NO: 3211262 - RNA, 19 nt, Artificial Sequence
  Description of Artificial Sequence: Synthetic oligonucleotide
ugaauugucauccaucuca

SEQ ID NO: 3211263 - RNA, 19 nt, Artificial Sequence
  Description of Artificial Sequence: Synthetic oligonucleotide
auaagcuaccauuacaaac

SEQ ID NO: 3211264 - RNA, 19 nt, Artificial Sequence
  Description of Artificial Sequence: Synthetic oligonucleotide
aauucuaccuaccuaaagu

SEQ ID NO: 3211265 - RNA, 19 nt, Artificial Sequence
  Description of Artificial Sequence: Synthetic oligonucleotide
uuuaacaagucuuuggucu

SEQ ID NO: 3211266 - RNA, 19 nt, Artificial Sequence
  Description of Artificial Sequence: Synthetic oligonucleotide
uaagauucggaccuugugg

SEQ ID NO: 3211267 - RNA, 19 nt, Artificial Sequence
  Description of Artificial Sequence: Synthetic oligonucleotide
aaugcaggcaguguggugc

SEQ ID NO: 3211268 - RNA, 19 nt, Artificial Sequence
  Description of Artificial Sequence: Synthetic oligonucleotide
ucugguuuggggaaaauag

SEQ ID NO: 3211269 - RNA, 19 nt, Artificial Sequence
  Description of Artificial Sequence: Synthetic oligonucleotide
uucauuuuaauuauuuggu

SEQ ID NO: 3211270 - RNA, 19 nt, Artificial Sequence
  Description of Artificial Sequence: Synthetic oligonucleotide
guuuauaaauguuucaaug

SEQ ID NO: 3211271 - RNA, 19 nt, Artificial Sequence
  Description of Artificial Sequence: Synthetic oligonucleotide
uaauuauuuggucucuggg

SEQ ID NO: 3211272 - RNA, 19 nt, Artificial Sequence
  Description of Artificial Sequence: Synthetic oligonucleotide
aauuauuuggucucugggu

SEQ ID NO: 3211273 - RNA, 19 nt, Artificial Sequence
  Description of Artificial Sequence: Synthetic oligonucleotide
aauguauuauacucauaag

SEQ ID NO: 3211274 - RNA, 19 nt, Artificial Sequence
  Description of Artificial Sequence: Synthetic oligonucleotide
aauagaauucuaccuaccu

SEQ ID NO: 3211275 - RNA, 19 nt, Artificial Sequence
  Description of Artificial Sequence: Synthetic oligonucleotide
acaggaaugauugagagug

SEQ ID NO: 3211276 - RNA, 19 nt, Artificial Sequence
  Description of Artificial Sequence: Synthetic oligonucleotide
acugaacuaacuuugguug

SEQ ID NO: 3211277 - RNA, 19 nt, Artificial Sequence
  Description of Artificial Sequence: Synthetic oligonucleotide
ugguugauuuuaaagaagc

SEQ ID NO: 3211278 - RNA, 19 nt, Artificial Sequence
  Description of Artificial Sequence: Synthetic oligonucleotide
acauuaugacauuaacccc

SEQ ID NO: 3211279 - RNA, 19 nt, Artificial Sequence
  Description of Artificial Sequence: Synthetic oligonucleotide
uuaauuauuuggucucugg

SEQ ID NO: 3211280 - RNA, 19 nt, Artificial Sequence
  Description of Artificial Sequence: Synthetic oligonucleotide
uucuaacugauuaaguucu

SEQ ID NO: 3211281 - RNA, 19 nt, Artificial Sequence
  Description of Artificial Sequence: Synthetic oligonucleotide
aguuaugcugcuugguugc

SEQ ID NO: 3211282 - RNA, 19 nt, Artificial Sequence
  Description of Artificial Sequence: Synthetic oligonucleotide
uggcauauugcacaugcgg

SEQ ID NO: 3211283 - RNA, 19 nt, Artificial Sequence
  Description of Artificial Sequence: Synthetic oligonucleotide
auuauuuggucucugggug

SEQ ID NO: 3211284 - RNA, 19 nt, Artificial Sequence
  Description of Artificial Sequence: Synthetic oligonucleotide
uuguguacuuauuacagug

SEQ ID NO: 3211285 - RNA, 19 nt, Artificial Sequence
  Description of Artificial Sequence: Synthetic oligonucleotide
gguaaauuaaugaagcagg

SEQ ID NO: 3211286 - RNA, 19 nt, Artificial Sequence
  Description of Artificial Sequence: Synthetic oligonucleotide
aaauagacaugugaagguc

SEQ ID NO: 3211287 - RNA, 19 nt, Artificial Sequence
  Description of Artificial Sequence: Synthetic oligonucleotide
auguguacugaauacuugg

SEQ ID NO: 3211288 - RNA, 19 nt, Artificial Sequence
  Description of Artificial Sequence: Synthetic oligonucleotide
uugguguagacauuuaaca

SEQ ID NO: 3211289 - RNA, 19 nt, Artificial Sequence
  Description of Artificial Sequence: Synthetic oligonucleotide
gaaugaauuauguguacug

SEQ ID NO: 3211290 - RNA, 19 nt, Artificial Sequence
  Description of Artificial Sequence: Synthetic oligonucleotide
ugguaaauuaaugaagcag

SEQ ID NO: 3211291 - RNA, 19 nt, Artificial Sequence
  Description of Artificial Sequence: Synthetic oligonucleotide
uagaauucuaccuaccuaa

SEQ ID NO: 3211292 - RNA, 19 nt, Artificial Sequence
  Description of Artificial Sequence: Synthetic oligonucleotide
uuaugguucgucagagucg

SEQ ID NO: 3211293 - RNA, 19 nt, Artificial Sequence
  Description of Artificial Sequence: Synthetic oligonucleotide
guugaugugggaaauauug

SEQ ID NO: 3211294 - RNA, 19 nt, Artificial Sequence
  Description of Artificial Sequence: Synthetic oligonucleotide
acacgauuacaguauacac

SEQ ID NO: 3211295 - RNA, 19 nt, Artificial Sequence
  Description of Artificial Sequence: Synthetic oligonucleotide
uuuuauaaaguggaguacu

SEQ ID NO: 3211296 - RNA, 19 nt, Artificial Sequence
  Description of Artificial Sequence: Synthetic oligonucleotide
agugagauaagcuacugaa

SEQ ID NO: 3211297 - RNA, 19 nt, Artificial Sequence
  Description of Artificial Sequence: Synthetic oligonucleotide
gguguuaacacacaggaac

SEQ ID NO: 3211298 - RNA, 19 nt, Artificial Sequence
  Description of Artificial Sequence: Synthetic oligonucleotide
uaugacauuaaccccuugu

SEQ ID NO: 3211299 - RNA, 19 nt, Artificial Sequence
  Description of Artificial Sequence: Synthetic oligonucleotide
aagauucggaccuuguggu

SEQ ID NO: 3211300 - RNA, 19 nt, Artificial Sequence
  Description of Artificial Sequence: Synthetic oligonucleotide
ucauaagugagauaagcua

SEQ ID NO: 3211301 - RNA, 19 nt, Artificial Sequence
  Description of Artificial Sequence: Synthetic oligonucleotide
uuaacacacaggaacuggc

SEQ ID NO: 3211302 - RNA, 19 nt, Artificial Sequence
  Description of Artificial Sequence: Synthetic oligonucleotide
uuacuagcaccaaauagac

SEQ ID NO: 3211303 - RNA, 19 nt, Artificial Sequence
  Description of Artificial Sequence: Synthetic oligonucleotide
uugauugaaaugaaugaau

SEQ ID NO: 3211304 - RNA, 19 nt, Artificial Sequence
  Description of Artificial Sequence: Synthetic oligonucleotide
aaugaauuauguguacuga

SEQ ID NO: 3211305 - RNA, 19 nt, Artificial Sequence
  Description of Artificial Sequence: Synthetic oligonucleotide
cuucuaacugauuaaguuc

SEQ ID NO: 3211306 - RNA, 19 nt, Artificial Sequence
  Description of Artificial Sequence: Synthetic oligonucleotide
auuaaccccuuguugacag

SEQ ID NO: 3211307 - RNA, 19 nt, Artificial Sequence
  Description of Artificial Sequence: Synthetic oligonucleotide
ucuucuaacugauuaaguu

SEQ ID NO: 3211308 - RNA, 19 nt, Artificial Sequence
  Description of Artificial Sequence: Synthetic oligonucleotide
uccgaugauguucuggcag

SEQ ID NO: 3211309 - RNA, 19 nt, Artificial Sequence
  Description of Artificial Sequence: Synthetic oligonucleotide
uguguacuuauuacagugc

SEQ ID NO: 3211310 - RNA, 19 nt, Artificial Sequence
  Description of Artificial Sequence: Synthetic oligonucleotide
ugaauuauguguacugaau

SEQ ID NO: 3211311 - RNA, 19 nt, Artificial Sequence
  Description of Artificial Sequence: Synthetic oligonucleotide
acaguauacacacacuuaa

SEQ ID NO: 3211312 - RNA, 19 nt, Artificial Sequence
  Description of Artificial Sequence: Synthetic oligonucleotide
uauguguacugaauacuug

SEQ ID NO: 3211313 - RNA, 19 nt, Artificial Sequence
  Description of Artificial Sequence: Synthetic oligonucleotide
aucuauuuugagaauuuac

SEQ ID NO: 3211314 - RNA, 19 nt, Artificial Sequence
  Description of Artificial Sequence: Synthetic oligonucleotide
aagccaggagggcauuugc

SEQ ID NO: 3211315 - RNA, 19 nt, Artificial Sequence
  Description of Artificial Sequence: Synthetic oligonucleotide
uuauguguacugaauacuu

SEQ ID NO: 3211316 - RNA, 19 nt, Artificial Sequence
  Description of Artificial Sequence: Synthetic oligonucleotide
acauguaauguauuauacu

SEQ ID NO: 3211317 - RNA, 19 nt, Artificial Sequence
  Description of Artificial Sequence: Synthetic oligonucleotide
aguauacacacacuuaauu

SEQ ID NO: 3211318 - RNA, 19 nt, Artificial Sequence
  Description of Artificial Sequence: Synthetic oligonucleotide
ugaugugggaaauauugaa

SEQ ID NO: 3211319 - RNA, 19 nt, Artificial Sequence
  Description of Artificial Sequence: Synthetic oligonucleotide
aauaagcuaccauuacaaa

SEQ ID NO: 3211320 - RNA, 19 nt, Artificial Sequence
  Description of Artificial Sequence: Synthetic oligonucleotide
cacucauuguuaucaaugc

SEQ ID NO: 3211321 - RNA, 19 nt, Artificial Sequence
  Description of Artificial Sequence: Synthetic oligonucleotide
ugucuucuaacugauuaag

SEQ ID NO: 3211322 - RNA, 19 nt, Artificial Sequence
  Description of Artificial Sequence: Synthetic oligonucleotide
uggcaaacacccuuggacc

SEQ ID NO: 3211323 - RNA, 19 nt, Artificial Sequence
  Description of Artificial Sequence: Synthetic oligonucleotide
ugugggaaauauugaagca

SEQ ID NO: 3211324 - RNA, 19 nt, Artificial Sequence
  Description of Artificial Sequence: Synthetic oligonucleotide
cucaccaacuggcaggugg

SEQ ID NO: 3211325 - RNA, 19 nt, Artificial Sequence
  Description of Artificial Sequence: Synthetic oligonucleotide
aguggagguagcugacucc

SEQ ID NO: 3211326 - RNA, 19 nt, Artificial Sequence
  Description of Artificial Sequence: Synthetic oligonucleotide
aacacccuuggacccacac

SEQ ID NO: 3211327 - RNA, 19 nt, Artificial Sequence
  Description of Artificial Sequence: Synthetic oligonucleotide
aauagacaugugaaggucu

SEQ ID NO: 3211328 - RNA, 19 nt, Artificial Sequence
  Description of Artificial Sequence: Synthetic oligonucleotide
acuaccacuugguguagac

SEQ ID NO: 3211329 - RNA, 19 nt, Artificial Sequence
  Description of Artificial Sequence: Synthetic oligonucleotide
uaaaucuauuuugagaauu

SEQ ID NO: 3211330 - RNA, 19 nt, Artificial Sequence
  Description of Artificial Sequence: Synthetic oligonucleotide
ggugguaaauuaaugaagc

SEQ ID NO: 3211331 - RNA, 19 nt, Artificial Sequence
  Description of Artificial Sequence: Synthetic oligonucleotide
guuaacacacaggaacugg

SEQ ID NO: 3211332 - RNA, 19 nt, Artificial Sequence
  Description of Artificial Sequence: Synthetic oligonucleotide
ugggugguaaauuaaugaa

SEQ ID NO: 3211333 - RNA, 19 nt, Artificial Sequence
  Description of Artificial Sequence: Synthetic oligonucleotide
gacucaaucaaguaucugu

SEQ ID NO: 3211334 - RNA, 19 nt, Artificial Sequence
  Description of Artificial Sequence: Synthetic oligonucleotide
guaggaucacuuuauugug

SEQ ID NO: 3211335 - RNA, 19 nt, Artificial Sequence
  Description of Artificial Sequence: Synthetic oligonucleotide
uagcugguucuccacaucc

SEQ ID NO: 3211336 - RNA, 19 nt, Artificial Sequence
  Description of Artificial Sequence: Synthetic oligonucleotide
uacuuauuacagugcauca

SEQ ID NO: 3211337 - RNA, 19 nt, Artificial Sequence
  Description of Artificial Sequence: Synthetic oligonucleotide
auuauguguacugaauacu

SEQ ID NO: 3211338 - RNA, 19 nt, Artificial Sequence
  Description of Artificial Sequence: Synthetic oligonucleotide
ugcacaugcggugugaugu

SEQ ID NO: 3211339 - RNA, 19 nt, Artificial Sequence
  Description of Artificial Sequence: Synthetic oligonucleotide
ugaaugaauuauguguacu

SEQ ID NO: 3211340 - RNA, 19 nt, Artificial Sequence
  Description of Artificial Sequence: Synthetic oligonucleotide
ugguugcacacucaucaag

SEQ ID NO: 3211341 - RNA, 19 nt, Artificial Sequence
  Description of Artificial Sequence: Synthetic oligonucleotide
ucuucuucgugaaguggag

SEQ ID NO: 3211342 - RNA, 19 nt, Artificial Sequence
  Description of Artificial Sequence: Synthetic oligonucleotide
cugguugauuuuaaagaag

SEQ ID NO: 3211343 - RNA, 19 nt, Artificial Sequence
  Description of Artificial Sequence: Synthetic oligonucleotide
acugccuucuucuucguga

SEQ ID NO: 3211344 - RNA, 19 nt, Artificial Sequence
  Description of Artificial Sequence: Synthetic oligonucleotide
uacugaacuaacuuugguu

SEQ ID NO: 3211345 - RNA, 19 nt, Artificial Sequence
  Description of Artificial Sequence: Synthetic oligonucleotide
agugagaauccccgcuggc

SEQ ID NO: 3211346 - RNA, 19 nt, Artificial Sequence
  Description of Artificial Sequence: Synthetic oligonucleotide
agacccauccuggaugucc

SEQ ID NO: 3211347 - RNA, 19 nt, Artificial Sequence
  Description of Artificial Sequence: Synthetic oligonucleotide
caauuugguuucuaacuug

SEQ ID NO: 3211348 - RNA, 19 nt, Artificial Sequence
  Description of Artificial Sequence: Synthetic oligonucleotide
ggaaauauugaagcaaagc

SEQ ID NO: 3211349 - RNA, 19 nt, Artificial Sequence
  Description of Artificial Sequence: Synthetic oligonucleotide
augaauuauguguacugaa

SEQ ID NO: 3211350 - RNA, 19 nt, Artificial Sequence
  Description of Artificial Sequence: Synthetic oligonucleotide
aacccucacauuaagggcu

SEQ ID NO: 3211351 - RNA, 19 nt, Artificial Sequence
  Description of Artificial Sequence: Synthetic oligonucleotide
uaggaucacuuuauuguga

SEQ ID NO: 3211352 - RNA, 19 nt, Artificial Sequence
  Description of Artificial Sequence: Synthetic oligonucleotide
guacuuauuacagugcauc

SEQ ID NO: 3211353 - RNA, 19 nt, Artificial Sequence
  Description of Artificial Sequence: Synthetic oligonucleotide
aaugauugagagugacuuu

SEQ ID NO: 3211354 - RNA, 19 nt, Artificial Sequence
  Description of Artificial Sequence: Synthetic oligonucleotide
caugcggugugauguaggg

SEQ ID NO: 3211355 - RNA, 19 nt, Artificial Sequence
  Description of Artificial Sequence: Synthetic oligonucleotide
aagcuagcugguucuccac

SEQ ID NO: 3211356 - RNA, 19 nt, Artificial Sequence
  Description of Artificial Sequence: Synthetic oligonucleotide
gugaaggucugguuugggg

SEQ ID NO: 3211357 - RNA, 19 nt, Artificial Sequence
  Description of Artificial Sequence: Synthetic oligonucleotide
cacgauuacaguauacaca

SEQ ID NO: 3211358 - RNA, 19 nt, Artificial Sequence
  Description of Artificial Sequence: Synthetic oligonucleotide
aaaagaaacaagcaauugg

SEQ ID NO: 3211359 - RNA, 19 nt, Artificial Sequence
  Description of Artificial Sequence: Synthetic oligonucleotide
aaaguacgaacacuaaucc

SEQ ID NO: 3211360 - RNA, 19 nt, Artificial Sequence
  Description of Artificial Sequence: Synthetic oligonucleotide
uuuauuaaccuacagagga

SEQ ID NO: 3211361 - RNA, 19 nt, Artificial Sequence
  Description of Artificial Sequence: Synthetic oligonucleotide
aauucaagaacucugcaag

SEQ ID NO: 3211362 - RNA, 19 nt, Artificial Sequence
  Description of Artificial Sequence: Synthetic oligonucleotide
aacacaggaagcuuaacac

SEQ ID NO: 3211363 - RNA, 19 nt, Artificial Sequence
  Description of Artificial Sequence: Synthetic oligonucleotide
aaaucguaggaaaauagcc

SEQ ID NO: 3211364 - RNA, 19 nt, Artificial Sequence
  Description of Artificial Sequence: Synthetic oligonucleotide
acacaauaaacacugaagg

SEQ ID NO: 3211365 - RNA, 19 nt, Artificial Sequence
  Description of Artificial Sequence: Synthetic oligonucleotide
auuggaauuagccagaacu

SEQ ID NO: 3211366 - RNA, 19 nt, Artificial Sequence
  Description of Artificial Sequence: Synthetic oligonucleotide
uaaccuucaaucauuaaag

SEQ ID NO: 3211367 - RNA, 19 nt, Artificial Sequence
  Description of Artificial Sequence: Synthetic oligonucleotide
aaaaguacgaacacuaauc

SEQ ID NO: 3211368 - RNA, 19 nt, Artificial Sequence
  Description of Artificial Sequence: Synthetic oligonucleotide
acacuuaaaauucaagaac

SEQ ID NO: 3211369 - RNA, 19 nt, Artificial Sequence
  Description of Artificial Sequence: Synthetic oligonucleotide
aacuaaguacuuccuaacc

SEQ ID NO: 3211370 - RNA, 19 nt, Artificial Sequence
  Description of Artificial Sequence: Synthetic oligonucleotide
uuaacacuagcacagaaca

SEQ ID NO: 3211371 - RNA, 19 nt, Artificial Sequence
  Description of Artificial Sequence: Synthetic oligonucleotide
aacacuaauccacuccagc

SEQ ID NO: 3211372 - RNA, 19 nt, Artificial Sequence
  Description of Artificial Sequence: Synthetic oligonucleotide
agaacuagcacaaaaguac

SEQ ID NO: 3211373 - RNA, 19 nt, Artificial Sequence
  Description of Artificial Sequence: Synthetic oligonucleotide
agaacaacuaaaucguagg

SEQ ID NO: 3211374 - RNA, 19 nt, Artificial Sequence
  Description of Artificial Sequence: Synthetic oligonucleotide
agcaauuggaauuagccag

SEQ ID NO: 3211375 - RNA, 19 nt, Artificial Sequence
  Description of Artificial Sequence: Synthetic oligonucleotide
uaaaauucaagaacucugc

SEQ ID NO: 3211376 - RNA, 19 nt, Artificial Sequence
  Description of Artificial Sequence: Synthetic oligonucleotide
uacaauuuuaaaagaaaca

SEQ ID NO: 3211377 - RNA, 19 nt, Artificial Sequence
  Description of Artificial Sequence: Synthetic oligonucleotide
uuaaccuucaaucauuaaa

SEQ ID NO: 3211378 - RNA, 19 nt, Artificial Sequence
  Description of Artificial Sequence: Synthetic oligonucleotide
aucauuaaaguaugggaac

SEQ ID NO: 3211379 - RNA, 19 nt, Artificial Sequence
  Description of Artificial Sequence: Synthetic oligonucleotide
aagccuuucaagaagcacc

SEQ ID NO: 3211380 - RNA, 19 nt, Artificial Sequence
  Description of Artificial Sequence: Synthetic oligonucleotide
agggaugaaaacuuuguac

SEQ ID NO: 3211381 - RNA, 19 nt, Artificial Sequence
  Description of Artificial Sequence: Synthetic oligonucleotide
gcaacuacaauuuuaaaag

SEQ ID NO: 3211382 - RNA, 19 nt, Artificial Sequence
  Description of Artificial Sequence: Synthetic oligonucleotide
caagcaauuggaauuagcc

SEQ ID NO: 3211383 - RNA, 19 nt, Artificial Sequence
  Description of Artificial Sequence: Synthetic oligonucleotide
ucaaucauuaaaguauggg

SEQ ID NO: 3211384 - RNA, 19 nt, Artificial Sequence
  Description of Artificial Sequence: Synthetic oligonucleotide
cuuuguacacuuaaaauuc

SEQ ID NO: 3211385 - RNA, 19 nt, Artificial Sequence
  Description of Artificial Sequence: Synthetic oligonucleotide
uaaaucguaggaaaauagc

SEQ ID NO: 3211386 - RNA, 19 nt, Artificial Sequence
  Description of Artificial Sequence: Synthetic oligonucleotide
aaagaaacaagcaauugga

SEQ ID NO: 3211387 - RNA, 19 nt, Artificial Sequence
  Description of Artificial Sequence: Synthetic oligonucleotide
uuuugcaccacuuuucaug

SEQ ID NO: 3211388 - RNA, 19 nt, Artificial Sequence
  Description of Artificial Sequence: Synthetic oligonucleotide
aguacgaacacuaauccac

SEQ ID NO: 3211389 - RNA, 19 nt, Artificial Sequence
  Description of Artificial Sequence: Synthetic oligonucleotide
cuacaauuuuaaaagaaac

SEQ ID NO: 3211390 - RNA, 19 nt, Artificial Sequence
  Description of Artificial Sequence: Synthetic oligonucleotide
aggaaaauagccuagggau

SEQ ID NO: 3211391 - RNA, 19 nt, Artificial Sequence
  Description of Artificial Sequence: Synthetic oligonucleotide
gcacagaacaacuaaaucg

SEQ ID NO: 3211392 - RNA, 19 nt, Artificial Sequence
  Description of Artificial Sequence: Synthetic oligonucleotide
caauuuuaaaagaaacaag

SEQ ID NO: 3211393 - RNA, 19 nt, Artificial Sequence
  Description of Artificial Sequence: Synthetic oligonucleotide
aaccaaaagccuuucaaga

SEQ ID NO: 3211394 - RNA, 19 nt, Artificial Sequence
  Description of Artificial Sequence: Synthetic oligonucleotide
uuagcaacuacaauuuuaa

SEQ ID NO: 3211395 - RNA, 19 nt, Artificial Sequence
  Description of Artificial Sequence: Synthetic oligonucleotide
uguacacuuaaaauucaag

SEQ ID NO: 3211396 - RNA, 19 nt, Artificial Sequence
  Description of Artificial Sequence: Synthetic oligonucleotide
uacacuuaaaauucaagaa

SEQ ID NO: 3211397 - RNA, 19 nt, Artificial Sequence
  Description of Artificial Sequence: Synthetic oligonucleotide
ugccacacaauaaacacug

SEQ ID NO: 3211398 - RNA, 19 nt, Artificial Sequence
  Description of Artificial Sequence: Synthetic oligonucleotide
aauuagccagaacuagcac

SEQ ID NO: 3211399 - RNA, 19 nt, Artificial Sequence
  Description of Artificial Sequence: Synthetic oligonucleotide
cuaaaucguaggaaaauag

SEQ ID NO: 3211400 - RNA, 19 nt, Artificial Sequence
  Description of Artificial Sequence: Synthetic oligonucleotide
aacuuuguacacuuaaaau

SEQ ID NO: 3211401 - RNA, 19 nt, Artificial Sequence
  Description of Artificial Sequence: Synthetic oligonucleotide
acaauuuuaaaagaaacaa

SEQ ID NO: 3211402 - RNA, 19 nt, Artificial Sequence
  Description of Artificial Sequence: Synthetic oligonucleotide
uaaccaaaagccuuucaag

SEQ ID NO: 3211403 - RNA, 19 nt, Artificial Sequence
  Description of Artificial Sequence: Synthetic oligonucleotide
ucaagaacucugcaagggg

SEQ ID NO: 3211404 - RNA, 19 nt, Artificial Sequence
  Description of Artificial Sequence: Synthetic oligonucleotide
acuuuguacacuuaaaauu

SEQ ID NO: 3211405 - RNA, 19 nt, Artificial Sequence
  Description of Artificial Sequence: Synthetic oligonucleotide
cacaauaaacacugaaggg

SEQ ID NO: 3211406 - RNA, 19 nt, Artificial Sequence
  Description of Artificial Sequence: Synthetic oligonucleotide
uuacucuuugcucagcagc

SEQ ID NO: 3211407 - RNA, 19 nt, Artificial Sequence
  Description of Artificial Sequence: Synthetic oligonucleotide
aaucauuaaaguaugggaa

SEQ ID NO: 3211408 - RNA, 19 nt, Artificial Sequence
  Description of Artificial Sequence: Synthetic oligonucleotide
aaauucaagaacucugcaa

SEQ ID NO: 3211409 - RNA, 19 nt, Artificial Sequence
  Description of Artificial Sequence: Synthetic oligonucleotide
agcaacuacaauuuuaaaa

SEQ ID NO: 3211410 - RNA, 19 nt, Artificial Sequence
  Description of Artificial Sequence: Synthetic oligonucleotide
uuucaagaagcaccagugg

SEQ ID NO: 3211411 - RNA, 19 nt, Artificial Sequence
  Description of Artificial Sequence: Synthetic oligonucleotide
acgaacacuaauccacucc

SEQ ID NO: 3211412 - RNA, 19 nt, Artificial Sequence
  Description of Artificial Sequence: Synthetic oligonucleotide
agcuugugcuucuuuaacc

SEQ ID NO: 3211413 - RNA, 19 nt, Artificial Sequence
  Description of Artificial Sequence: Synthetic oligonucleotide
acaauaaacacugaaggga

SEQ ID NO: 3211414 - RNA, 19 nt, Artificial Sequence
  Description of Artificial Sequence: Synthetic oligonucleotide
gaaguuugggguuagcaac

SEQ ID NO: 3211415 - RNA, 19 nt, Artificial Sequence
  Description of Artificial Sequence: Synthetic oligonucleotide
agcacaaaaguacgaacac

SEQ ID NO: 3211416 - RNA, 19 nt, Artificial Sequence
  Description of Artificial Sequence: Synthetic oligonucleotide
uagcacaaaaguacgaaca

SEQ ID NO: 3211417 - RNA, 19 nt, Artificial Sequence
  Description of Artificial Sequence: Synthetic oligonucleotide
agaggaaggucacuuggcc

SEQ ID NO: 3211418 - RNA, 19 nt, Artificial Sequence
  Description of Artificial Sequence: Synthetic oligonucleotide
uucaagaagcaccagugga

SEQ ID NO: 3211419 - RNA, 19 nt, Artificial Sequence
  Description of Artificial Sequence: Synthetic oligonucleotide
uaggaaaauagccuaggga

SEQ ID NO: 3211420 - RNA, 19 nt, Artificial Sequence
  Description of Artificial Sequence: Synthetic oligonucleotide
aagcaauuggaauuagcca

SEQ ID NO: 3211421 - RNA, 19 nt, Artificial Sequence
  Description of Artificial Sequence: Synthetic oligonucleotide
cuuucaagaagcaccagug

SEQ ID NO: 3211422 - RNA, 19 nt, Artificial Sequence
  Description of Artificial Sequence: Synthetic oligonucleotide
aguacuuccuaaccaaaag

SEQ ID NO: 3211423 - RNA, 19 nt, Artificial Sequence
  Description of Artificial Sequence: Synthetic oligonucleotide
uuucaugccacacaauaaa

SEQ ID NO: 3211424 - RNA, 19 nt, Artificial Sequence
  Description of Artificial Sequence: Synthetic oligonucleotide
acaacuaaaucguaggaaa

SEQ ID NO: 3211425 - RNA, 19 nt, Artificial Sequence
  Description of Artificial Sequence: Synthetic oligonucleotide
aacccuuugugucagcucu

SEQ ID NO: 3211426 - RNA, 19 nt, Artificial Sequence
  Description of Artificial Sequence: Synthetic oligonucleotide
uuugggguuagcaacuaca

SEQ ID NO: 3211427 - RNA, 19 nt, Artificial Sequence
  Description of Artificial Sequence: Synthetic oligonucleotide
auaacuaaguacuuccuaa

SEQ ID NO: 3211428 - RNA, 19 nt, Artificial Sequence
  Description of Artificial Sequence: Synthetic oligonucleotide
uauuaaccuacagaggaag

SEQ ID NO: 3211429 - RNA, 19 nt, Artificial Sequence
  Description of Artificial Sequence: Synthetic oligonucleotide
uucaaucauuaaaguaugg

SEQ ID NO: 3211430 - RNA, 19 nt, Artificial Sequence
  Description of Artificial Sequence: Synthetic oligonucleotide
guacacuuaaaauucaaga

SEQ ID NO: 3211431 - RNA, 19 nt, Artificial Sequence
  Description of Artificial Sequence: Synthetic oligonucleotide
aagcuuaacacuagcacag

SEQ ID NO: 3211432 - RNA, 19 nt, Artificial Sequence
  Description of Artificial Sequence: Synthetic oligonucleotide
aaagccuuucaagaagcac

SEQ ID NO: 3211433 - RNA, 19 nt, Artificial Sequence
  Description of Artificial Sequence: Synthetic oligonucleotide
acuaaguacuuccuaacca

SEQ ID NO: 3211434 - RNA, 19 nt, Artificial Sequence
  Description of Artificial Sequence: Synthetic oligonucleotide
aaaucaagauacucugccu

SEQ ID NO: 3211435 - RNA, 19 nt, Artificial Sequence
  Description of Artificial Sequence: Synthetic oligonucleotide
aaucaagauacucugccuu

SEQ ID NO: 3211436 - RNA, 19 nt, Artificial Sequence
  Description of Artificial Sequence: Synthetic oligonucleotide
caugccacacaauaaacac

SEQ ID NO: 3211437 - RNA, 19 nt, Artificial Sequence
  Description of Artificial Sequence: Synthetic oligonucleotide
auagccuagggaugaaaac

SEQ ID NO: 3211438 - RNA, 19 nt, Artificial Sequence
  Description of Artificial Sequence: Synthetic oligonucleotide
uaugggaacacagaagaca

SEQ ID NO: 3211439 - RNA, 19 nt, Artificial Sequence
  Description of Artificial Sequence: Synthetic oligonucleotide
caaaagccuuucaagaagc

SEQ ID NO: 3211440 - RNA, 19 nt, Artificial Sequence
  Description of Artificial Sequence: Synthetic oligonucleotide
uucaagaacucugcaaggg

SEQ ID NO: 3211441 - RNA, 19 nt, Artificial Sequence
  Description of Artificial Sequence: Synthetic oligonucleotide
aauuggaauuagccagaac

SEQ ID NO: 3211442 - RNA, 19 nt, Artificial Sequence
  Description of Artificial Sequence: Synthetic oligonucleotide
acagaggaaggucacuugg

SEQ ID NO: 3211443 - RNA, 19 nt, Artificial Sequence
  Description of Artificial Sequence: Synthetic oligonucleotide
agcacagaacaacuaaauc

SEQ ID NO: 3211444 - RNA, 19 nt, Artificial Sequence
  Description of Artificial Sequence: Synthetic oligonucleotide
auuagccagaacuagcaca

SEQ ID NO: 3211445 - RNA, 19 nt, Artificial Sequence
  Description of Artificial Sequence: Synthetic oligonucleotide
uggguguuuauuaaccuac

SEQ ID NO: 3211446 - RNA, 19 nt, Artificial Sequence
  Description of Artificial Sequence: Synthetic oligonucleotide
ucaugccacacaauaaaca

SEQ ID NO: 3211447 - RNA, 19 nt, Artificial Sequence
  Description of Artificial Sequence: Synthetic oligonucleotide
uuagccagaacuagcacaa

SEQ ID NO: 3211448 - RNA, 19 nt, Artificial Sequence
  Description of Artificial Sequence: Synthetic oligonucleotide
agaaacaagcaauuggaau

SEQ ID NO: 3211449 - RNA, 19 nt, Artificial Sequence
  Description of Artificial Sequence: Synthetic oligonucleotide
uuccuuuaaaaucaagaua

SEQ ID NO: 3211450 - RNA, 19 nt, Artificial Sequence
  Description of Artificial Sequence: Synthetic oligonucleotide
aaagcugcuuuuccugauc

SEQ ID NO: 3211451 - RNA, 19 nt, Artificial Sequence
  Description of Artificial Sequence: Synthetic oligonucleotide
cuuaacacuagcacagaac

SEQ ID NO: 3211452 - RNA, 19 nt, Artificial Sequence
  Description of Artificial Sequence: Synthetic oligonucleotide
caaucauuaaaguauggga

SEQ ID NO: 3211453 - RNA, 19 nt, Artificial Sequence
  Description of Artificial Sequence: Synthetic oligonucleotide
uuuguacacuuaaaauuca

SEQ ID NO: 3211454 - RNA, 19 nt, Artificial Sequence
  Description of Artificial Sequence: Synthetic oligonucleotide
aaucguaggaaaauagccu

SEQ ID NO: 3211455 - RNA, 19 nt, Artificial Sequence
  Description of Artificial Sequence: Synthetic oligonucleotide
aguuaccugacuuugccca

SEQ ID NO: 3211456 - RNA, 19 nt, Artificial Sequence
  Description of Artificial Sequence: Synthetic oligonucleotide
cagaacaacuaaaucguag

SEQ ID NO: 3211457 - RNA, 19 nt, Artificial Sequence
  Description of Artificial Sequence: Synthetic oligonucleotide
gaaaacuuuguacacuuaa

SEQ ID NO: 3211458 - RNA, 19 nt, Artificial Sequence
  Description of Artificial Sequence: Synthetic oligonucleotide
uuggaagugauaaagacug

SEQ ID NO: 3211459 - RNA, 19 nt, Artificial Sequence
  Description of Artificial Sequence: Synthetic oligonucleotide
uuuccugccaaaaggaucg

SEQ ID NO: 3211460 - RNA, 19 nt, Artificial Sequence
  Description of Artificial Sequence: Synthetic oligonucleotide
gggaauuucaaugagaugg

SEQ ID NO: 3211461 - RNA, 19 nt, Artificial Sequence
  Description of Artificial Sequence: Synthetic oligonucleotide
uuuacuucccaacccaggg

SEQ ID NO: 3211462 - RNA, 19 nt, Artificial Sequence
  Description of Artificial Sequence: Synthetic oligonucleotide
ucgauuuacagccugcucc

SEQ ID NO: 3211463 - RNA, 19 nt, Artificial Sequence
  Description of Artificial Sequence: Synthetic oligonucleotide
uuuacugacagccucauuu

SEQ ID NO: 3211464 - RNA, 19 nt, Artificial Sequence
  Description of Artificial Sequence: Synthetic oligonucleotide
ucagauuccugcaaggcag

SEQ ID NO: 3211465 - RNA, 19 nt, Artificial Sequence
  Description of Artificial Sequence: Synthetic oligonucleotide
uuaagagaaagccuugcug

SEQ ID NO: 3211466 - RNA, 19 nt, Artificial Sequence
  Description of Artificial Sequence: Synthetic oligonucleotide
uuugcauugaaacugcuua

SEQ ID NO: 3211467 - RNA, 19 nt, Artificial Sequence
  Description of Artificial Sequence: Synthetic oligonucleotide
ucuauuuacuucccaaccc

SEQ ID NO: 3211468 - RNA, 19 nt, Artificial Sequence
  Description of Artificial Sequence: Synthetic oligonucleotide
cuaaauaugagcgcggugc

SEQ ID NO: 3211469 - RNA, 19 nt, Artificial Sequence
  Description of Artificial Sequence: Synthetic oligonucleotide
uggacauuugcauugaaac

SEQ ID NO: 3211470 - RNA, 19 nt, Artificial Sequence
  Description of Artificial Sequence: Synthetic oligonucleotide
acugucuuugcacacaguc

SEQ ID NO: 3211471 - RNA, 19 nt, Artificial Sequence
  Description of Artificial Sequence: Synthetic oligonucleotide
uaagagaaagccuugcugu

SEQ ID NO: 3211472 - RNA, 19 nt, Artificial Sequence
  Description of Artificial Sequence: Synthetic oligonucleotide
ugauaaagacugcacgagg

SEQ ID NO: 3211473 - RNA, 19 nt, Artificial Sequence
  Description of Artificial Sequence: Synthetic oligonucleotide
uauucuuaaacagagccga

SEQ ID NO: 3211474 - RNA, 19 nt, Artificial Sequence
  Description of Artificial Sequence: Synthetic oligonucleotide
aacccagggaauuucaaug

SEQ ID NO: 3211475 - RNA, 19 nt, Artificial Sequence
  Description of Artificial Sequence: Synthetic oligonucleotide
ucuacuguguguaguacag

SEQ ID NO: 3211476 - RNA, 19 nt, Artificial Sequence
  Description of Artificial Sequence: Synthetic oligonucleotide
cugcuuauuccaaaggugg

SEQ ID NO: 3211477 - RNA, 19 nt, Artificial Sequence
  Description of Artificial Sequence: Synthetic oligonucleotide
uaaauaugagcgcggugcg

SEQ ID NO: 3211478 - RNA, 19 nt, Artificial Sequence
  Description of Artificial Sequence: Synthetic oligonucleotide
uaaacagagccgaggaucc

SEQ ID NO: 3211479 - RNA, 19 nt, Artificial Sequence
  Description of Artificial Sequence: Synthetic oligonucleotide
aaagccuugcuguuagcag

SEQ ID NO: 3211480 - RNA, 19 nt, Artificial Sequence
  Description of Artificial Sequence: Synthetic oligonucleotide
aaaggaucggaccacacuu

SEQ ID NO: 3211481 - RNA, 19 nt, Artificial Sequence
  Description of Artificial Sequence: Synthetic oligonucleotide
cauugaaacugcuuauucc

SEQ ID NO: 3211482 - RNA, 19 nt, Artificial Sequence
  Description of Artificial Sequence: Synthetic oligonucleotide
aucauaaggguucuggcug

SEQ ID NO: 3211483 - RNA, 19 nt, Artificial Sequence
  Description of Artificial Sequence: Synthetic oligonucleotide
aagccgcuaaauaugagcg

SEQ ID NO: 3211484 - RNA, 19 nt, Artificial Sequence
  Description of Artificial Sequence: Synthetic oligonucleotide
gaagccgcuaaauaugagc

SEQ ID NO: 3211485 - RNA, 19 nt, Artificial Sequence
  Description of Artificial Sequence: Synthetic oligonucleotide
uuuaucgacuggaacauuc

SEQ ID NO: 3211486 - RNA, 19 nt, Artificial Sequence
  Description of Artificial Sequence: Synthetic oligonucleotide
ucuauuguccccacugcag

SEQ ID NO: 3211487 - RNA, 19 nt, Artificial Sequence
  Description of Artificial Sequence: Synthetic oligonucleotide
agaucuuccaccaacagcu

SEQ ID NO: 3211488 - RNA, 19 nt, Artificial Sequence
  Description of Artificial Sequence: Synthetic oligonucleotide
uguaguacagucuggcgug

SEQ ID NO: 3211489 - RNA, 19 nt, Artificial Sequence
  Description of Artificial Sequence: Synthetic oligonucleotide
aaggucgcgaccuggcucg

SEQ ID NO: 3211490 - RNA, 19 nt, Artificial Sequence
  Description of Artificial Sequence: Synthetic oligonucleotide
uuguguucacaucacagcu

SEQ ID NO: 3211491 - RNA, 19 nt, Artificial Sequence
  Description of Artificial Sequence: Synthetic oligonucleotide
ugucuuugcacacagucuc

SEQ ID NO: 3211492 - RNA, 19 nt, Artificial Sequence
  Description of Artificial Sequence: Synthetic oligonucleotide
aguagauaggguagaaggc

SEQ ID NO: 3211493 - RNA, 19 nt, Artificial Sequence
  Description of Artificial Sequence: Synthetic oligonucleotide
guagauaggguagaaggcg

SEQ ID NO: 3211494 - RNA, 19 nt, Artificial Sequence
  Description of Artificial Sequence: Synthetic oligonucleotide
cuuguguucacaucacagc

SEQ ID NO: 3211495 - RNA, 19 nt, Artificial Sequence
  Description of Artificial Sequence: Synthetic oligonucleotide
ucgacuggaacauucucag

SEQ ID NO: 3211496 - RNA, 19 nt, Artificial Sequence
  Description of Artificial Sequence: Synthetic oligonucleotide
uuaaacagagccgaggauc

SEQ ID NO: 3211497 - RNA, 19 nt, Artificial Sequence
  Description of Artificial Sequence: Synthetic oligonucleotide
acagucucuaucauaaggg

SEQ ID NO: 3211498 - RNA, 19 nt, Artificial Sequence
  Description of Artificial Sequence: Synthetic oligonucleotide
ucaaugagaugguuaagcu

SEQ ID NO: 3211499 - RNA, 19 nt, Artificial Sequence
  Description of Artificial Sequence: Synthetic oligonucleotide
ucgcucggaaaccugaucc

SEQ ID NO: 3211500 - RNA, 19 nt, Artificial Sequence
  Description of Artificial Sequence: Synthetic oligonucleotide
uaaugaugucaucuguuca

SEQ ID NO: 3211501 - RNA, 19 nt, Artificial Sequence
  Description of Artificial Sequence: Synthetic oligonucleotide
gaugaagccgcuaaauaug

SEQ ID NO: 3211502 - RNA, 19 nt, Artificial Sequence
  Description of Artificial Sequence: Synthetic oligonucleotide
uaucuauuuacuucccaac

SEQ ID NO: 3211503 - RNA, 19 nt, Artificial Sequence
  Description of Artificial Sequence: Synthetic oligonucleotide
agaugaagccgcuaaauau

SEQ ID NO: 3211504 - RNA, 19 nt, Artificial Sequence
  Description of Artificial Sequence: Synthetic oligonucleotide
uucuuaaacagagccgagg

SEQ ID NO: 3211505 - RNA, 19 nt, Artificial Sequence
  Description of Artificial Sequence: Synthetic oligonucleotide
ugaaccaucuauugucccc

SEQ ID NO: 3211506 - RNA, 19 nt, Artificial Sequence
  Description of Artificial Sequence: Synthetic oligonucleotide
uguguaguacagucuggcg

SEQ ID NO: 3211507 - RNA, 19 nt, Artificial Sequence
  Description of Artificial Sequence: Synthetic oligonucleotide
ugaagaugcucacuuuucu

SEQ ID NO: 3211508 - RNA, 19 nt, Artificial Sequence
  Description of Artificial Sequence: Synthetic oligonucleotide
ugccaaaaggaucggacca

SEQ ID NO: 3211509 - RNA, 19 nt, Artificial Sequence
  Description of Artificial Sequence: Synthetic oligonucleotide
uuuuaagagaaagccuugc

SEQ ID NO: 3211510 - RNA, 19 nt, Artificial Sequence
  Description of Artificial Sequence: Synthetic oligonucleotide
uaaggguucuggcuggcag

SEQ ID NO: 3211511 - RNA, 19 nt, Artificial Sequence
  Description of Artificial Sequence: Synthetic oligonucleotide
cuaaugaugucaucuguuc

SEQ ID NO: 3211512 - RNA, 19 nt, Artificial Sequence
  Description of Artificial Sequence: Synthetic oligonucleotide
ucauaaggguucuggcugg

SEQ ID NO: 3211513 - RNA, 19 nt, Artificial Sequence
  Description of Artificial Sequence: Synthetic oligonucleotide
gacaauaccagcucgauuu

SEQ ID NO: 3211514 - RNA, 19 nt, Artificial Sequence
  Description of Artificial Sequence: Synthetic oligonucleotide
aaauaugagcgcggugcgc

SEQ ID NO: 3211515 - RNA, 19 nt, Artificial Sequence
  Description of Artificial Sequence: Synthetic oligonucleotide
ugaguguucccucuccagc

SEQ ID NO: 3211516 - RNA, 19 nt, Artificial Sequence
  Description of Artificial Sequence: Synthetic oligonucleotide
aauaugagcgcggugcgca

SEQ ID NO: 3211517 - RNA, 19 nt, Artificial Sequence
  Description of Artificial Sequence: Synthetic oligonucleotide
accaaggagaugaagccgc

SEQ ID NO: 3211518 - RNA, 19 nt, Artificial Sequence
  Description of Artificial Sequence: Synthetic oligonucleotide
uucucagauuccugcaagg

SEQ ID NO: 3211519 - RNA, 19 nt, Artificial Sequence
  Description of Artificial Sequence: Synthetic oligonucleotide
agaugguuaagcugugcag

SEQ ID NO: 3211520 - RNA, 19 nt, Artificial Sequence
  Description of Artificial Sequence: Synthetic oligonucleotide
uguguguaguacagucugg

SEQ ID NO: 3211521 - RNA, 19 nt, Artificial Sequence
  Description of Artificial Sequence: Synthetic oligonucleotide
uauuccaaagguggcaaag

SEQ ID NO: 3211522 - RNA, 19 nt, Artificial Sequence
  Description of Artificial Sequence: Synthetic oligonucleotide
aaagacugcacgaggagca

SEQ ID NO: 3211523 - RNA, 19 nt, Artificial Sequence
  Description of Artificial Sequence: Synthetic oligonucleotide
aaggcagcuuggcauggac

SEQ ID NO: 3211524 - RNA, 19 nt, Artificial Sequence
  Description of Artificial Sequence: Synthetic oligonucleotide
ucuggcgugacuugcuucc

SEQ ID NO: 3211525 - RNA, 19 nt, Artificial Sequence
  Description of Artificial Sequence: Synthetic oligonucleotide
uggcuggacaucuuccugg

SEQ ID NO: 3211526 - RNA, 19 nt, Artificial Sequence
  Description of Artificial Sequence: Synthetic oligonucleotide
gauaaagacugcacgagga

SEQ ID NO: 3211527 - RNA, 19 nt, Artificial Sequence
  Description of Artificial Sequence: Synthetic oligonucleotide
uacuguguguaguacaguc

SEQ ID NO: 3211528 - RNA, 19 nt, Artificial Sequence
  Description of Artificial Sequence: Synthetic oligonucleotide
caaugagaugguuaagcug

SEQ ID NO: 3211529 - RNA, 19 nt, Artificial Sequence
  Description of Artificial Sequence: Synthetic oligonucleotide
aagcacugucuuugcacac

SEQ ID NO: 3211530 - RNA, 19 nt, Artificial Sequence
  Description of Artificial Sequence: Synthetic oligonucleotide
ucugguauuccuccagccu

SEQ ID NO: 3211531 - RNA, 19 nt, Artificial Sequence
  Description of Artificial Sequence: Synthetic oligonucleotide
uggaacauucucagauucc

SEQ ID NO: 3211532 - RNA, 19 nt, Artificial Sequence
  Description of Artificial Sequence: Synthetic oligonucleotide
uuugcacacagucucuauc

SEQ ID NO: 3211533 - RNA, 19 nt, Artificial Sequence
  Description of Artificial Sequence: Synthetic oligonucleotide
agagccgaggauccugccc

SEQ ID NO: 3211534 - RNA, 19 nt, Artificial Sequence
  Description of Artificial Sequence: Synthetic oligonucleotide
auuuccugccaaaaggauc

SEQ ID NO: 3211535 - RNA, 19 nt, Artificial Sequence
  Description of Artificial Sequence: Synthetic oligonucleotide
uucuacuguguguaguaca

SEQ ID NO: 3211536 - RNA, 19 nt, Artificial Sequence
  Description of Artificial Sequence: Synthetic oligonucleotide
ugcuuauuccaaagguggc

SEQ ID NO: 3211537 - RNA, 19 nt, Artificial Sequence
  Description of Artificial Sequence: Synthetic oligonucleotide
uccuaaugaugucaucugu

SEQ ID NO: 3211538 - RNA, 19 nt, Artificial Sequence
  Description of Artificial Sequence: Synthetic oligonucleotide
agaggaagcacugucuuug

SEQ ID NO: 3211539 - RNA, 19 nt, Artificial Sequence
  Description of Artificial Sequence: Synthetic oligonucleotide
uuaucgacuggaacauucu

SEQ ID NO: 3211540 - RNA, 19 nt, Artificial Sequence
  Description of Artificial Sequence: Synthetic oligonucleotide
uuagaggaagcacugucuu

SEQ ID NO: 3211541 - RNA, 19 nt, Artificial Sequence
  Description of Artificial Sequence: Synthetic oligonucleotide
acagugaaccaucuauugu

SEQ ID NO: 3211542 - RNA, 19 nt, Artificial Sequence
  Description of Artificial Sequence: Synthetic oligonucleotide
aaagucacuggagccauga

SEQ ID NO: 3211543 - RNA, 19 nt, Artificial Sequence
  Description of Artificial Sequence: Synthetic oligonucleotide
uuggcauggacauuugcau

SEQ ID NO: 3211544 - RNA, 19 nt, Artificial Sequence
  Description of Artificial Sequence: Synthetic oligonucleotide
gaagcacugucuuugcaca

SEQ ID NO: 3211545 - RNA, 19 nt, Artificial Sequence
  Description of Artificial Sequence: Synthetic oligonucleotide
aauaccagcucgauuuaca

SEQ ID NO: 3211546 - RNA, 19 nt, Artificial Sequence
  Description of Artificial Sequence: Synthetic oligonucleotide
uccugcaaagucacuggag

SEQ ID NO: 3211547 - RNA, 19 nt, Artificial Sequence
  Description of Artificial Sequence: Synthetic oligonucleotide
gagaugguuaagcugugca

SEQ ID NO: 3211548 - RNA, 19 nt, Artificial Sequence
  Description of Artificial Sequence: Synthetic oligonucleotide
auaggguagaaggcggcgc

SEQ ID NO: 3211549 - RNA, 19 nt, Artificial Sequence
  Description of Artificial Sequence: Synthetic oligonucleotide
gcuguuagcaggcucaccc

SEQ ID NO: 3211550 - RNA, 19 nt, Artificial Sequence
  Description of Artificial Sequence: Synthetic oligonucleotide
aggaugaagaugcucacuu

SEQ ID NO: 3211551 - RNA, 19 nt, Artificial Sequence
  Description of Artificial Sequence: Synthetic oligonucleotide
cagaucuuccaccaacagc

SEQ ID NO: 3211552 - RNA, 19 nt, Artificial Sequence
  Description of Artificial Sequence: Synthetic oligonucleotide
cuguucagguucuccaggg

SEQ ID NO: 3211553 - RNA, 19 nt, Artificial Sequence
  Description of Artificial Sequence: Synthetic oligonucleotide
ugaaacugcuuauuccaaa

SEQ ID NO: 3211554 - RNA, 19 nt, Artificial Sequence
  Description of Artificial Sequence: Synthetic oligonucleotide
agccgcuaaauaugagcgc

SEQ ID NO: 3211555 - RNA, 19 nt, Artificial Sequence
  Description of Artificial Sequence: Synthetic oligonucleotide
gucucuaucauaaggguuc

SEQ ID NO: 3211556 - RNA, 19 nt, Artificial Sequence
  Description of Artificial Sequence: Synthetic oligonucleotide
cuuggcauggacauuugca

SEQ ID NO: 3211557 - RNA, 19 nt, Artificial Sequence
  Description of Artificial Sequence: Synthetic oligonucleotide
gaagaugcucacuuuucuc

SEQ ID NO: 3211558 - RNA, 19 nt, Artificial Sequence
  Description of Artificial Sequence: Synthetic oligonucleotide
uauauauauauauauaugg

SEQ ID NO: 3211559 - RNA, 19 nt, Artificial Sequence
  Description of Artificial Sequence: Synthetic oligonucleotide
aaaguaaaacuacucaagg

SEQ ID NO: 3211560 - RNA, 19 nt, Artificial Sequence
  Description of Artificial Sequence: Synthetic oligonucleotide
auauauauuauauauauau

SEQ ID NO: 3211561 - RNA, 19 nt, Artificial Sequence
  Description of Artificial Sequence: Synthetic oligonucleotide
uauauauauauauauggag

SEQ ID NO: 3211562 - RNA, 19 nt, Artificial Sequence
  Description of Artificial Sequence: Synthetic oligonucleotide
aaagaauuaguuuacaaaa

SEQ ID NO: 3211563 - RNA, 19 nt, Artificial Sequence
  Description of Artificial Sequence: Synthetic oligonucleotide
uuauauauauauuauauau

SEQ ID NO: 3211564 - RNA, 19 nt, Artificial Sequence
  Description of Artificial Sequence: Synthetic oligonucleotide
uauauauauauauauauau

SEQ ID NO: 3211565 - RNA, 19 nt, Artificial Sequence
  Description of Artificial Sequence: Synthetic oligonucleotide
ugugugaagggacagacgg

SEQ ID NO: 3211566 - RNA, 19 nt, Artificial Sequence
  Description of Artificial Sequence: Synthetic oligonucleotide
auuauauauauauauauau

SEQ ID NO: 3211567 - RNA, 19 nt, Artificial Sequence
  Description of Artificial Sequence: Synthetic oligonucleotide
auauauauauuauauauau

SEQ ID NO: 3211568 - RNA, 19 nt, Artificial Sequence
  Description of Artificial Sequence: Synthetic oligonucleotide
agaauuaguuuacaaaagg

SEQ ID NO: 3211569 - RNA, 19 nt, Artificial Sequence
  Description of Artificial Sequence: Synthetic oligonucleotide
auauauuauauauauauau

SEQ ID NO: 3211570 - RNA, 19 nt, Artificial Sequence
  Description of Artificial Sequence: Synthetic oligonucleotide
aaaagaauuaguuuacaaa

SEQ ID NO: 3211571 - RNA, 19 nt, Artificial Sequence
  Description of Artificial Sequence: Synthetic oligonucleotide
auauuauauauauauauau

SEQ ID NO: 3211572 - RNA, 19 nt, Artificial Sequence
  Description of Artificial Sequence: Synthetic oligonucleotide
aaaacagugaucaaaagaa

SEQ ID NO: 3211573 - RNA, 19 nt, Artificial Sequence
  Description of Artificial Sequence: Synthetic oligonucleotide
uauauauggagauuuauau

SEQ ID NO: 3211574 - RNA, 19 nt, Artificial Sequence
  Description of Artificial Sequence: Synthetic oligonucleotide
uacuuuuaaaaguaaaacu

SEQ ID NO: 3211575 - RNA, 19 nt, Artificial Sequence
  Description of Artificial Sequence: Synthetic oligonucleotide
aaaaguaaaacuacucaag

SEQ ID NO: 3211576 - RNA, 19 nt, Artificial Sequence
  Description of Artificial Sequence: Synthetic oligonucleotide
uggacaauagaccucuccg

SEQ ID NO: 3211577 - RNA, 19 nt, Artificial Sequence
  Description of Artificial Sequence: Synthetic oligonucleotide
uuuuaaaaguaaaacuacu

SEQ ID NO: 3211578 - RNA, 19 nt, Artificial Sequence
  Description of Artificial Sequence: Synthetic oligonucleotide
uauauauauauauggagau

SEQ ID NO: 3211579 - RNA, 19 nt, Artificial Sequence
  Description of Artificial Sequence: Synthetic oligonucleotide
cuuuuaaaaguaaaacuac

SEQ ID NO: 3211580 - RNA, 19 nt, Artificial Sequence
  Description of Artificial Sequence: Synthetic oligonucleotide
uauauuauauauauauaua

SEQ ID NO: 3211581 - RNA, 19 nt, Artificial Sequence
  Description of Artificial Sequence: Synthetic oligonucleotide
uaaaaguaaaacuacucaa

SEQ ID NO: 3211582 - RNA, 19 nt, Artificial Sequence
  Description of Artificial Sequence: Synthetic oligonucleotide
ucaccaaugcaaaacagug

SEQ ID NO: 3211583 - RNA, 19 nt, Artificial Sequence
  Description of Artificial Sequence: Synthetic oligonucleotide
ugaguuaaggguaaccgug

SEQ ID NO: 3211584 - RNA, 19 nt, Artificial Sequence
  Description of Artificial Sequence: Synthetic oligonucleotide
acaaucacuucaccaaugc

SEQ ID NO: 3211585 - RNA, 19 nt, Artificial Sequence
  Description of Artificial Sequence: Synthetic oligonucleotide
uauuauauauauauauaua

SEQ ID NO: 3211586 - RNA, 19 nt, Artificial Sequence
  Description of Artificial Sequence: Synthetic oligonucleotide
aacccuuauauauauauua

SEQ ID NO: 3211587 - RNA, 19 nt, Artificial Sequence
  Description of Artificial Sequence: Synthetic oligonucleotide
cacaaaauggguauccucc

SEQ ID NO: 3211588 - RNA, 19 nt, Artificial Sequence
  Description of Artificial Sequence: Synthetic oligonucleotide
uuauauauauauauauaua

SEQ ID NO: 3211589 - RNA, 19 nt, Artificial Sequence
  Description of Artificial Sequence: Synthetic oligonucleotide
uauauauauauuauauaua

SEQ ID NO: 3211590 - RNA, 19 nt, Artificial Sequence
  Description of Artificial Sequence: Synthetic oligonucleotide
ucuaaaauaguuggagagg

SEQ ID NO: 3211591 - RNA, 19 nt, Artificial Sequence
  Description of Artificial Sequence: Synthetic oligonucleotide
aauuucuccuugcaugaag

SEQ ID NO: 3211592 - RNA, 19 nt, Artificial Sequence
  Description of Artificial Sequence: Synthetic oligonucleotide
aggcuucuaaaauaguugg

SEQ ID NO: 3211593 - RNA, 19 nt, Artificial Sequence
  Description of Artificial Sequence: Synthetic oligonucleotide
uauauauuauauauauaua

SEQ ID NO: 3211594 - RNA, 19 nt, Artificial Sequence
  Description of Artificial Sequence: Synthetic oligonucleotide
uuugucuggagcaagggaa

SEQ ID NO: 3211595 - RNA, 19 nt, Artificial Sequence
  Description of Artificial Sequence: Synthetic oligonucleotide
uuaguuuacaaaaggcuuc

SEQ ID NO: 3211596 - RNA, 19 nt, Artificial Sequence
  Description of Artificial Sequence: Synthetic oligonucleotide
auauauauauauauggaga

SEQ ID NO: 3211597 - RNA, 19 nt, Artificial Sequence
  Description of Artificial Sequence: Synthetic oligonucleotide
uaaaacuacucaaggaaaa

SEQ ID NO: 3211598 - RNA, 19 nt, Artificial Sequence
  Description of Artificial Sequence: Synthetic oligonucleotide
uuucacaucuccagcgagg

SEQ ID NO: 3211599 - RNA, 19 nt, Artificial Sequence
  Description of Artificial Sequence: Synthetic oligonucleotide
auauauauauauauauaug

SEQ ID NO: 3211600 - RNA, 19 nt, Artificial Sequence
  Description of Artificial Sequence: Synthetic oligonucleotide
acuuuuaaaaguaaaacua

SEQ ID NO: 3211601 - RNA, 19 nt, Artificial Sequence
  Description of Artificial Sequence: Synthetic oligonucleotide
uacaaaaggcuucuaaaau

SEQ ID NO: 3211602 - RNA, 19 nt, Artificial Sequence
  Description of Artificial Sequence: Synthetic oligonucleotide
uuaaggguaaccgugggcu

SEQ ID NO: 3211603 - RNA, 19 nt, Artificial Sequence
  Description of Artificial Sequence: Synthetic oligonucleotide
aaucacuucaccaaugcaa

SEQ ID NO: 3211604 - RNA, 19 nt, Artificial Sequence
  Description of Artificial Sequence: Synthetic oligonucleotide
ugaucaaaagaauuaguuu

SEQ ID NO: 3211605 - RNA, 19 nt, Artificial Sequence
  Description of Artificial Sequence: Synthetic oligonucleotide
uuaaugcuuugucuggagc

SEQ ID NO: 3211606 - RNA, 19 nt, Artificial Sequence
  Description of Artificial Sequence: Synthetic oligonucleotide
aaggcuucuaaaauaguug

SEQ ID NO: 3211607 - RNA, 19 nt, Artificial Sequence
  Description of Artificial Sequence: Synthetic oligonucleotide
uauauauauuauauauaua

SEQ ID NO: 3211608 - RNA, 19 nt, Artificial Sequence
  Description of Artificial Sequence: Synthetic oligonucleotide
auauauauauauauaugga

SEQ ID NO: 3211609 - RNA, 19 nt, Artificial Sequence
  Description of Artificial Sequence: Synthetic oligonucleotide
accaaugcaaaacagugau

SEQ ID NO: 3211610 - RNA, 19 nt, Artificial Sequence
  Description of Artificial Sequence: Synthetic oligonucleotide
aauggguauccuccagccg

SEQ ID NO: 3211611 - RNA, 19 nt, Artificial Sequence
  Description of Artificial Sequence: Synthetic oligonucleotide
aaauaguuggagagguggg

SEQ ID NO: 3211612 - RNA, 19 nt, Artificial Sequence
  Description of Artificial Sequence: Synthetic oligonucleotide
cacuuucacaucuccagcg

SEQ ID NO: 3211613 - RNA, 19 nt, Artificial Sequence
  Description of Artificial Sequence: Synthetic oligonucleotide
  modified_base (17)..(17): a, c, u, g, unknown or other
aagucacgagucucucncc

SEQ ID NO: 3211614 - RNA, 19 nt, Artificial Sequence
  Description of Artificial Sequence: Synthetic oligonucleotide
caaugcaaaacagugauca

SEQ ID NO: 3211615 - RNA, 19 nt, Artificial Sequence
  Description of Artificial Sequence: Synthetic oligonucleotide
acuucaccaaugcaaaaca

SEQ ID NO: 3211616 - RNA, 19 nt, Artificial Sequence
  Description of Artificial Sequence: Synthetic oligonucleotide
ugugaagggacagacgggc

SEQ ID NO: 3211617 - RNA, 19 nt, Artificial Sequence
  Description of Artificial Sequence: Synthetic oligonucleotide
uuggacaauagaccucucc

SEQ ID NO: 3211618 - RNA, 19 nt, Artificial Sequence
  Description of Artificial Sequence: Synthetic oligonucleotide
ccuucuuugguucauagag

SEQ ID NO: 3211619 - RNA, 19 nt, Artificial Sequence
  Description of Artificial Sequence: Synthetic oligonucleotide
aauagaccucuccgcuagc

SEQ ID NO: 3211620 - RNA, 19 nt, Artificial Sequence
  Description of Artificial Sequence: Synthetic oligonucleotide
uucauagagcugcagucga

SEQ ID NO: 3211621 - RNA, 19 nt, Artificial Sequence
  Description of Artificial Sequence: Synthetic oligonucleotide
aaaggcuucuaaaauaguu

SEQ ID NO: 3211622 - RNA, 19 nt, Artificial Sequence
  Description of Artificial Sequence: Synthetic oligonucleotide
uugaguuaaggguaaccgu

SEQ ID NO: 3211623 - RNA, 19 nt, Artificial Sequence
  Description of Artificial Sequence: Synthetic oligonucleotide
ugcuguuuaaugcuuuguc

SEQ ID NO: 3211624 - RNA, 19 nt, Artificial Sequence
  Description of Artificial Sequence: Synthetic oligonucleotide
uccgcuagcgcccugcugu

SEQ ID NO: 3211625 - RNA, 19 nt, Artificial Sequence
  Description of Artificial Sequence: Synthetic oligonucleotide
aguuaaggguaaccguggg

SEQ ID NO: 3211626 - RNA, 19 nt, Artificial Sequence
  Description of Artificial Sequence: Synthetic oligonucleotide
cuuauauauauauuauaua

SEQ ID NO: 3211627 - RNA, 19 nt, Artificial Sequence
  Description of Artificial Sequence: Synthetic oligonucleotide
auuaguuuacaaaaggcuu

SEQ ID NO: 3211628 - RNA, 19 nt, Artificial Sequence
  Description of Artificial Sequence: Synthetic oligonucleotide
ugguucauagagcugcagu

SEQ ID NO: 3211629 - RNA, 19 nt, Artificial Sequence
  Description of Artificial Sequence: Synthetic oligonucleotide
gauuuauauacaguucaga

SEQ ID NO: 3211630 - RNA, 19 nt, Artificial Sequence
  Description of Artificial Sequence: Synthetic oligonucleotide
cugaaugcagaaagucacg

SEQ ID NO: 3211631 - RNA, 19 nt, Artificial Sequence
  Description of Artificial Sequence: Synthetic oligonucleotide
guucauagagcugcagucg

SEQ ID NO: 3211632 - RNA, 19 nt, Artificial Sequence
  Description of Artificial Sequence: Synthetic oligonucleotide
ugaaugcagaaagucacga

SEQ ID NO: 3211633 - RNA, 19 nt, Artificial Sequence
  Description of Artificial Sequence: Synthetic oligonucleotide
caauagaccucuccgcuag

SEQ ID NO: 3211634 - RNA, 19 nt, Artificial Sequence
  Description of Artificial Sequence: Synthetic oligonucleotide
uugugugaagggacagacg

SEQ ID NO: 3211635 - RNA, 19 nt, Artificial Sequence
  Description of Artificial Sequence: Synthetic oligonucleotide
accagagggcacuucuccc

SEQ ID NO: 3211636 - RNA, 19 nt, Artificial Sequence
  Description of Artificial Sequence: Synthetic oligonucleotide
ucuuaggccugcuggacca

SEQ ID NO: 3211637 - RNA, 19 nt, Artificial Sequence
  Description of Artificial Sequence: Synthetic oligonucleotide
auauauauauauauauaua

SEQ ID NO: 3211638 - RNA, 19 nt, Artificial Sequence
  Description of Artificial Sequence: Synthetic oligonucleotide
acgggcacugcacaaaaug

SEQ ID NO: 3211639 - RNA, 19 nt, Artificial Sequence
  Description of Artificial Sequence: Synthetic oligonucleotide
  modified_base (16)..(16): a, c, u, g, unknown or other
agucacgagucucucnccu

SEQ ID NO: 3211640 - RNA, 19 nt, Artificial Sequence
  Description of Artificial Sequence: Synthetic oligonucleotide
cuugugugaagggacagac

SEQ ID NO: 3211641 - RNA, 19 nt, Artificial Sequence
  Description of Artificial Sequence: Synthetic oligonucleotide
augcagaaagucacgaguc

SEQ ID NO: 3211642 - RNA, 19 nt, Artificial Sequence
  Description of Artificial Sequence: Synthetic oligonucleotide
gacauuggagcccaccaga

SEQ ID NO: 3211643 - RNA, 19 nt, Artificial Sequence
  Description of Artificial Sequence: Synthetic oligonucleotide
uaguuuacaaaaggcuucu

SEQ ID NO: 3211644 - RNA, 19 nt, Artificial Sequence
  Description of Artificial Sequence: Synthetic oligonucleotide
agagggugcagcauagggg

SEQ ID NO: 3211645 - RNA, 19 nt, Artificial Sequence
  Description of Artificial Sequence: Synthetic oligonucleotide
agcgccaguagcgugucgc

SEQ ID NO: 3211646 - RNA, 19 nt, Artificial Sequence
  Description of Artificial Sequence: Synthetic oligonucleotide
gagagguggggcuugauua

SEQ ID NO: 3211647 - RNA, 19 nt, Artificial Sequence
  Description of Artificial Sequence: Synthetic oligonucleotide
uuugguucauagagcugca

SEQ ID NO: 3211648 - RNA, 19 nt, Artificial Sequence
  Description of Artificial Sequence: Synthetic oligonucleotide
uccuuguucggcucacgag

SEQ ID NO: 3211649 - RNA, 19 nt, Artificial Sequence
  Description of Artificial Sequence: Synthetic oligonucleotide
cuuucacaucuccagcgag

SEQ ID NO: 3211650 - RNA, 19 nt, Artificial Sequence
  Description of Artificial Sequence: Synthetic oligonucleotide
gacgccggccguuuguggg

SEQ ID NO: 3211651 - RNA, 19 nt, Artificial Sequence
  Description of Artificial Sequence: Synthetic oligonucleotide
ggagccguucaccagaggc

SEQ ID NO: 3211652 - RNA, 19 nt, Artificial Sequence
  Description of Artificial Sequence: Synthetic oligonucleotide
cucuuauacuuuuaaaagu

SEQ ID NO: 3211653 - RNA, 19 nt, Artificial Sequence
  Description of Artificial Sequence: Synthetic oligonucleotide
uucacaucuccagcgagga

SEQ ID NO: 3211654 - RNA, 19 nt, Artificial Sequence
  Description of Artificial Sequence: Synthetic oligonucleotide
aaugcuuugucuggagcaa

SEQ ID NO: 3211655 - RNA, 19 nt, Artificial Sequence
  Description of Artificial Sequence: Synthetic oligonucleotide
cacuucaccaaugcaaaac

SEQ ID NO: 3211656 - RNA, 19 nt, Artificial Sequence
  Description of Artificial Sequence: Synthetic oligonucleotide
acuucuccccgcuuggaca

SEQ ID NO: 3211657 - RNA, 19 nt, Artificial Sequence
  Description of Artificial Sequence: Synthetic oligonucleotide
ucgcgcaccgucuuaggcc

SEQ ID NO: 3211658 - RNA, 19 nt, Artificial Sequence
  Description of Artificial Sequence: Synthetic oligonucleotide
uuuaguuucucuaucacag

SEQ ID NO: 3211659 - RNA, 19 nt, Artificial Sequence
  Description of Artificial Sequence: Synthetic oligonucleotide
aaagugucaacauagaaaa

SEQ ID NO: 3211660 - RNA, 19 nt, Artificial Sequence
  Description of Artificial Sequence: Synthetic oligonucleotide
aaaacuuuaaagugucaac

SEQ ID NO: 3211661 - RNA, 19 nt, Artificial Sequence
  Description of Artificial Sequence: Synthetic oligonucleotide
auugaagccaaugacaucc

SEQ ID NO: 3211662 - RNA, 19 nt, Artificial Sequence
  Description of Artificial Sequence: Synthetic oligonucleotide
agaccugccauauugaagc

SEQ ID NO: 3211663 - RNA, 19 nt, Artificial Sequence
  Description of Artificial Sequence: Synthetic oligonucleotide
uucuucugaaacuagaacc

SEQ ID NO: 3211664 - RNA, 19 nt, Artificial Sequence
  Description of Artificial Sequence: Synthetic oligonucleotide
uauuagugcuccaucaugg

SEQ ID NO: 3211665 - RNA, 19 nt, Artificial Sequence
  Description of Artificial Sequence: Synthetic oligonucleotide
aguuguuuccuuuaguuuc

SEQ ID NO: 3211666 - RNA, 19 nt, Artificial Sequence
  Description of Artificial Sequence: Synthetic oligonucleotide
aaguucgaaucccuuaggc

SEQ ID NO: 3211667 - RNA, 19 nt, Artificial Sequence
  Description of Artificial Sequence: Synthetic oligonucleotide
aaccaguuacuauuagugc

SEQ ID NO: 3211668 - RNA, 19 nt, Artificial Sequence
  Description of Artificial Sequence: Synthetic oligonucleotide
ugacuuuugaaauaguugu

SEQ ID NO: 3211669 - RNA, 19 nt, Artificial Sequence
  Description of Artificial Sequence: Synthetic oligonucleotide
aaugacauccuggacuugc

SEQ ID NO: 3211670 - RNA, 19 nt, Artificial Sequence
  Description of Artificial Sequence: Synthetic oligonucleotide
ucugaaacuagaaccaagc

SEQ ID NO: 3211671 - RNA, 19 nt, Artificial Sequence
  Description of Artificial Sequence: Synthetic oligonucleotide
ucaucgugugcaaagagag

SEQ ID NO: 3211672 - RNA, 19 nt, Artificial Sequence
  Description of Artificial Sequence: Synthetic oligonucleotide
acuagaaccaagcccacac

SEQ ID NO: 3211673 - RNA, 19 nt, Artificial Sequence
  Description of Artificial Sequence: Synthetic oligonucleotide
aaacuuuaaagugucaaca

SEQ ID NO: 3211674 - RNA, 19 nt, Artificial Sequence
  Description of Artificial Sequence: Synthetic oligonucleotide
uguccaugcauauaacagg

SEQ ID NO: 3211675 - RNA, 19 nt, Artificial Sequence
  Description of Artificial Sequence: Synthetic oligonucleotide
gaaacuagaaccaagccca

SEQ ID NO: 3211676 - RNA, 19 nt, Artificial Sequence
  Description of Artificial Sequence: Synthetic oligonucleotide
aaauaguuguuuccuuuag

SEQ ID NO: 3211677 - RNA, 19 nt, Artificial Sequence
  Description of Artificial Sequence: Synthetic oligonucleotide
aagcccacaccucaguucg

SEQ ID NO: 3211678 - RNA, 19 nt, Artificial Sequence
  Description of Artificial Sequence: Synthetic oligonucleotide
aacauaacuucacucuuug

SEQ ID NO: 3211679 - RNA, 19 nt, Artificial Sequence
  Description of Artificial Sequence: Synthetic oligonucleotide
aaucccuuaggcacaaacc

SEQ ID NO: 3211680 - RNA, 19 nt, Artificial Sequence
  Description of Artificial Sequence: Synthetic oligonucleotide
aucccuuaggcacaaaccg

SEQ ID NO: 3211681 - RNA, 19 nt, Artificial Sequence
  Description of Artificial Sequence: Synthetic oligonucleotide
ucuaucacaggcacaagca
